United States Patent Application Publication US 2008/0113351 A1 - sequence listing, part 17

SEQ ID NO: 403760 - DNA, 19 bp, Homo sapiens
  siRNA target sequence for AAT1 (NM_033364.2,2156-2174).
gctgagttggtttatagtt

SEQ ID NO: 403761 - DNA, 19 bp, Homo sapiens
  siRNA target sequence for AAT1 (NM_033364.2,2157-2175).
ctgagttggtttatagttt

SEQ ID NO: 403762 - DNA, 19 bp, Homo sapiens
  siRNA target sequence for AAT1 (NM_033364.2,2224-2242).
cgcacagcggaaacatatt

SEQ ID NO: 403763 - DNA, 19 bp, Homo sapiens
  siRNA target sequence for AAT1 (NM_033364.2,2226-2244).
cacagcggaaacatattct

SEQ ID NO: 403764 - DNA, 19 bp, Homo sapiens
  siRNA target sequence for AAT1 (NM_033364.2,2274-2292).
cggaaagcatggttcaaaa

SEQ ID NO: 403765 - DNA, 19 bp, Homo sapiens
  siRNA target sequence for AAT1 (NM_033364.2,2280-2298).
gcatggttcaaaagaaatt

SEQ ID NO: 403766 - DNA, 19 bp, Homo sapiens
  siRNA target sequence for AAT1 (NM_033364.2,2311-2329).
gcaagatgaggcctcaaat

SEQ ID NO: 403767 - DNA, 19 bp, Homo sapiens
  siRNA target sequence for AAT1 (NM_033364.2,2325-2343).
caaatgctgccatgttact

SEQ ID NO: 403768 - DNA, 19 bp, Homo sapiens
  siRNA target sequence for AAT1 (NM_033364.2,2335-2353).
catgttacttgagaaagaa

SEQ ID NO: 403769 - DNA, 19 bp, Homo sapiens
  siRNA target sequence for C9orf59 (NM_033387.2,621-639).
gcagccacatggagttcta

SEQ ID NO: 403770 - DNA, 19 bp, Homo sapiens
  siRNA target sequence for C9orf59 (NM_033387.2,624-642).
gccacatggagttctacaa

SEQ ID NO: 403771 - DNA, 19 bp, Homo sapiens
  siRNA target sequence for C9orf59 (NM_033387.2,933-951).
cctccaccaacgacatgat

SEQ ID NO: 403772 - DNA, 19 bp, Homo sapiens
  siRNA target sequence for C9orf59 (NM_033387.2,936-954).
ccaccaacgacatgatcat

SEQ ID NO: 403773 - DNA, 19 bp, Homo sapiens
  siRNA target sequence for KIAA1754 (NM_033397.1,531-549).
gccacgcttggccactttt

SEQ ID NO: 403774 - DNA, 19 bp, Homo sapiens
  siRNA target sequence for KIAA1754 (NM_033397.1,532-550).
ccacgcttggccactttta

SEQ ID NO: 403775 - DNA, 19 bp, Homo sapiens
  siRNA target sequence for KIAA1754 (NM_033397.1,533-551).
cacgcttggccacttttat

SEQ ID NO: 403776 - DNA, 19 bp, Homo sapiens
  siRNA target sequence for KIAA1754 (NM_033397.1,892-910).
ccaagctcggggaagacat

SEQ ID NO: 403777 - DNA, 19 bp, Homo sapiens
  siRNA target sequence for KIAA1754 (NM_033397.1,1698-1716).
gcgctcattagcgagtatt

SEQ ID NO: 403778 - DNA, 19 bp, Homo sapiens
  siRNA target sequence for KIAA1754 (NM_033397.1,1708-1726).
gcgagtattccctacatgt

SEQ ID NO: 403779 - DNA, 19 bp, Homo sapiens
  siRNA target sequence for KIAA1754 (NM_033397.1,1737-1755).
cagcctaccccaaaaagct

SEQ ID NO: 403780 - DNA, 19 bp, Homo sapiens
  siRNA target sequence for PRIC285 (NM_033405.2,195-213).
cctctccgtgtgatgtaca

SEQ ID NO: 403781 - DNA, 19 bp, Homo sapiens
  siRNA target sequence for PRIC285 (NM_033405.2,243-261).
gtcacgctgcagtactgtt

SEQ ID NO: 403782 - DNA, 19 bp, Homo sapiens
  siRNA target sequence for PRIC285 (NM_033405.2,724-742).
ggcactacccgctcatgtt

SEQ ID NO: 403783 - DNA, 19 bp, Homo sapiens
  siRNA target sequence for PRIC285 (NM_033405.2,726-744).
cactacccgctcatgttct

SEQ ID NO: 403784 - DNA, 19 bp, Homo sapiens
  siRNA target sequence for PRIC285 (NM_033405.2,956-974).
ggtgtctgtcggcagtttt

SEQ ID NO: 403785 - DNA, 19 bp, Homo sapiens
  siRNA target sequence for PRIC285 (NM_033405.2,961-979).
ctgtcggcagttttgagat

SEQ ID NO: 403786 - DNA, 19 bp, Homo sapiens
  siRNA target sequence for PRIC285 (NM_033405.2,1995-2013).
cacgagctggcgtttgtgt

SEQ ID NO: 403787 - DNA, 19 bp, Homo sapiens
  siRNA target sequence for PRIC285 (NM_033405.2,2186-2204).
gctcttctgggtccaaatt

SEQ ID NO: 403788 - DNA, 19 bp, Homo sapiens
  siRNA target sequence for PRIC285 (NM_033405.2,2212-2230).
ggcggcaaggcttctacta

SEQ ID NO: 403789 - DNA, 19 bp, Homo sapiens
  siRNA target sequence for PRIC285 (NM_033405.2,2570-2588).
gcagggcgctgcgttctat

SEQ ID NO: 403790 - DNA, 19 bp, Homo sapiens
  siRNA target sequence for PRIC285 (NM_033405.2,2900-2918).
gcggtccgactgcttctat

SEQ ID NO: 403791 - DNA, 19 bp, Homo sapiens
  siRNA target sequence for PRIC285 (NM_033405.2,2975-2993).
ggagtacatgattcagttt

SEQ ID NO: 403792 - DNA, 19 bp, Homo sapiens
  siRNA target sequence for PRIC285 (NM_033405.2,2976-2994).
gagtacatgattcagttta

SEQ ID NO: 403793 - DNA, 19 bp, Homo sapiens
  siRNA target sequence for PRIC285 (NM_033405.2,2978-2996).
gtacatgattcagtttaat

SEQ ID NO: 403794 - DNA, 19 bp, Homo sapiens
  siRNA target sequence for PRIC285 (NM_033405.2,3232-3250).
cccaggactacgaacagat

SEQ ID NO: 403795 - DNA, 19 bp, Homo sapiens
  siRNA target sequence for PRIC285 (NM_033405.2,4222-4240).
cctgcgtgtgggaaccatt

SEQ ID NO: 403796 - DNA, 19 bp, Homo sapiens
  siRNA target sequence for PRIC285 (NM_033405.2,4266-4284).
gcggttgccgagaatgact

SEQ ID NO: 403797 - DNA, 19 bp, Homo sapiens
  siRNA target sequence for PRIC285 (NM_033405.2,4484-4502).
cggccctggcctgaatgtt

SEQ ID NO: 403798 - DNA, 19 bp, Homo sapiens
  siRNA target sequence for PRIC285 (NM_033405.2,4815-4833).
gagcggcagacctacaaca

SEQ ID NO: 403799 - DNA, 19 bp, Homo sapiens
  siRNA target sequence for PRIC285 (NM_033405.2,4944-4962).
gtgggcctccacatcgtat

SEQ ID NO: 403800 - DNA, 19 bp, Homo sapiens
  siRNA target sequence for PRIC285 (NM_033405.2,4947-4965).
ggcctccacatcgtattct

SEQ ID NO: 403801 - DNA, 19 bp, Homo sapiens
  siRNA target sequence for PRIC285 (NM_033405.2,4955-4973).
catcgtattctggtttcat

SEQ ID NO: 403802 - DNA, 19 bp, Homo sapiens
  siRNA target sequence for PRIC285 (NM_033405.2,4958-4976).
cgtattctggtttcataaa

SEQ ID NO: 403803 - DNA, 19 bp, Homo sapiens
  siRNA target sequence for PRIC285 (NM_033405.2,5031-5049).
gggggtccctgcatcttgt

SEQ ID NO: 403804 - DNA, 19 bp, Homo sapiens
  siRNA target sequence for PRIC285 (NM_033405.2,5032-5050).
ggggtccctgcatcttgta

SEQ ID NO: 403805 - DNA, 19 bp, Homo sapiens
  siRNA target sequence for PRIC285 (NM_033405.2,5034-5052).
ggtccctgcatcttgtact

SEQ ID NO: 403806 - DNA, 19 bp, Homo sapiens
  siRNA target sequence for PRIC285 (NM_033405.2,5274-5292).
ccttactcgtcggaaatca

SEQ ID NO: 403807 - DNA, 19 bp, Homo sapiens
  siRNA target sequence for PRIC285 (NM_033405.2,5275-5293).
cttactcgtcggaaatcaa

SEQ ID NO: 403808 - DNA, 19 bp, Homo sapiens
  siRNA target sequence for PRIC285 (NM_033405.2,5431-5449).
cctctgccagcctcaaaat

SEQ ID NO: 403809 - DNA, 19 bp, Homo sapiens
  siRNA target sequence for PRIC285 (NM_033405.2,5536-5554).
ccgagaaggtggttcttct

SEQ ID NO: 403810 - DNA, 19 bp, Homo sapiens
  siRNA target sequence for PRIC285 (NM_033405.2,5573-5591).
gcggcctgtggtcaagaat

SEQ ID NO: 403811 - DNA, 19 bp, Homo sapiens
  siRNA target sequence for PRIC285 (NM_033405.2,5700-5718).
ccctctgtggcgttctaca

SEQ ID NO: 403812 - DNA, 19 bp, Homo sapiens
  siRNA target sequence for PRIC285 (NM_033405.2,5845-5863).
cggacgaagggaatgagaa

SEQ ID NO: 403813 - DNA, 19 bp, Homo sapiens
  siRNA target sequence for PRIC285 (NM_033405.2,6164-6182).
ggaccccaaccaagtgaat

SEQ ID NO: 403814 - DNA, 19 bp, Homo sapiens
  siRNA target sequence for MGC16309 (NM_033413.2,324-342).
ctaagcggaacttgacttt

SEQ ID NO: 403815 - DNA, 19 bp, Homo sapiens
  siRNA target sequence for MGC16309 (NM_033413.2,334-352).
cttgactttccctgaagat

SEQ ID NO: 403816 - DNA, 19 bp, Homo sapiens
  siRNA target sequence for MGC16309 (NM_033413.2,409-427).
ggaccgggaggggattact

SEQ ID NO: 403817 - DNA, 19 bp, Homo sapiens
  siRNA target sequence for MGC16309 (NM_033413.2,412-430).
ccgggaggggattactact

SEQ ID NO: 403818 - DNA, 19 bp, Homo sapiens
  siRNA target sequence for MGC16309 (NM_033413.2,413-431).
cgggaggggattactacta

SEQ ID NO: 403819 - DNA, 19 bp, Homo sapiens
  siRNA target sequence for MGC16309 (NM_033413.2,416-434).
gaggggattactactatca

SEQ ID NO: 403820 - DNA, 19 bp, Homo sapiens
  siRNA target sequence for MGC16309 (NM_033413.2,481-499).
gaataagatccagcaaatt

SEQ ID NO: 403821 - DNA, 19 bp, Homo sapiens
  siRNA target sequence for MGC16309 (NM_033413.2,611-629).
gagaacctgatagaaacat

SEQ ID NO: 403822 - DNA, 19 bp, Homo sapiens
  siRNA target sequence for MGC19595 (NM_033415.2,848-866).
gtcacgcttgcctgaaaca

SEQ ID NO: 403823 - DNA, 19 bp, Homo sapiens
  siRNA target sequence for MGC19595 (NM_033415.2,852-870).
cgcttgcctgaaacatgaa

SEQ ID NO: 403824 - DNA, 19 bp, Homo sapiens
  siRNA target sequence for MGC19595 (NM_033415.2,1029-1047).
caaccatgccaagatgatt

SEQ ID NO: 403825 - DNA, 19 bp, Homo sapiens
  siRNA target sequence for MGC19595 (NM_033415.2,1307-1325).
gcaacgacgacgtgaaaga

SEQ ID NO: 403826 - DNA, 19 bp, Homo sapiens
  siRNA target sequence for MGC19595 (NM_033415.2,1314-1332).
cgacgtgaaagatgctatt

SEQ ID NO: 403827 - DNA, 19 bp, Homo sapiens
  siRNA target sequence for IMP4 (NM_033416.1,137-155).
cctgattcccactgagtta

SEQ ID NO: 403828 - DNA, 19 bp, Homo sapiens
  siRNA target sequence for IMP4 (NM_033416.1,220-238).
ccagccacgtggatgatga

SEQ ID NO: 403829 - DNA, 19 bp, Homo sapiens
  siRNA target sequence for IMP4 (NM_033416.1,255-273).
gtcgaggatcccaaggtta

SEQ ID NO: 403830 - DNA, 19 bp, Homo sapiens
  siRNA target sequence for IMP4 (NM_033416.1,264-282).
cccaaggttatgatcacta

SEQ ID NO: 403831 - DNA, 19 bp, Homo sapiens
  siRNA target sequence for IMP4 (NM_033416.1,359-377).
gaaccgaggtcgacatgaa

SEQ ID NO: 403832 - DNA, 19 bp, Homo sapiens
  siRNA target sequence for IMP4 (NM_033416.1,486-504).
ggtcctactgcctacttca

SEQ ID NO: 403833 - DNA, 19 bp, Homo sapiens
  siRNA target sequence for IMP4 (NM_033416.1,679-697).
caaaccaggacgactacat

SEQ ID NO: 403834 - DNA, 19 bp, Homo sapiens
  siRNA target sequence for IMP4 (NM_033416.1,705-723).
cggcaccatgtgtataaga

SEQ ID NO: 403835 - DNA, 19 bp, Homo sapiens
  siRNA target sequence for IMP4 (NM_033416.1,706-724).
ggcaccatgtgtataagaa

SEQ ID NO: 403836 - DNA, 19 bp, Homo sapiens
  siRNA target sequence for MGC9084 (NM_033418.1,309-327).
gaccatctggaaaatgaat

SEQ ID NO: 403837 - DNA, 19 bp, Homo sapiens
  siRNA target sequence for MGC9084 (NM_033418.1,450-468).
gatcacttgtgggaacata

SEQ ID NO: 403838 - DNA, 19 bp, Homo sapiens
  siRNA target sequence for MGC9084 (NM_033418.1,453-471).
cacttgtgggaacataagt

SEQ ID NO: 403839 - DNA, 19 bp, Homo sapiens
  siRNA target sequence for MGC9084 (NM_033418.1,643-661).
caggtttccagcatgttaa

SEQ ID NO: 403840 - DNA, 19 bp, Homo sapiens
  siRNA target sequence for MGC9084 (NM_033418.1,645-663).
ggtttccagcatgttaagt

SEQ ID NO: 403841 - DNA, 19 bp, Homo sapiens
  siRNA target sequence for MGC9084 (NM_033418.1,653-671).
gcatgttaagttatcagta

SEQ ID NO: 403842 - DNA, 19 bp, Homo sapiens
  siRNA target sequence for MGC9084 (NM_033418.1,701-719).
ccctggagaaaacatagtt

SEQ ID NO: 403843 - DNA, 19 bp, Homo sapiens
  siRNA target sequence for MGC9084 (NM_033418.1,798-816).
gacctcctggcttatttca

SEQ ID NO: 403844 - DNA, 19 bp, Homo sapiens
  siRNA target sequence for MGC9084 (NM_033418.1,821-839).
ggccaaagtgaaatttgct

SEQ ID NO: 403845 - DNA, 19 bp, Homo sapiens
  siRNA target sequence for MGC9084 (NM_033418.1,862-880).
gttgtggatcaggtttact

SEQ ID NO: 403846 - DNA, 19 bp, Homo sapiens
  siRNA target sequence for MGC9084 (NM_033418.1,868-886).
gatcaggtttactaggtat

SEQ ID NO: 403847 - DNA, 19 bp, Homo sapiens
  siRNA target sequence for MGC9084 (NM_033418.1,920-938).
ctttcaagattataacagt

SEQ ID NO: 403848 - DNA, 19 bp, Homo sapiens
  siRNA target sequence for MGC9084 (NM_033418.1,944-962).
gattgatgaagtaacctta

SEQ ID NO: 403849 - DNA, 19 bp, Homo sapiens
  siRNA target sequence for MGC9084 (NM_033418.1,1103-1121).
gcttgtactaagtagtgaa

SEQ ID NO: 403850 - DNA, 19 bp, Homo sapiens
  siRNA target sequence for MGC9084 (NM_033418.1,1104-1122).
cttgtactaagtagtgaaa

SEQ ID NO: 403851 - DNA, 19 bp, Homo sapiens
  siRNA target sequence for MGC9084 (NM_033418.1,1186-1204).
gtaatttgcaccagacttt

SEQ ID NO: 403852 - DNA, 19 bp, Homo sapiens
  siRNA target sequence for MGC9084 (NM_033418.1,1241-1259).
ggccagcaaagcacattat

SEQ ID NO: 403853 - DNA, 19 bp, Homo sapiens
  siRNA target sequence for MGC9084 (NM_033418.1,1270-1288).
gtggaggtgttcatctctt

SEQ ID NO: 403854 - DNA, 19 bp, Homo sapiens
  siRNA target sequence for MGC9084 (NM_033418.1,1273-1291).
gaggtgttcatctctttca

SEQ ID NO: 403855 - DNA, 19 bp, Homo sapiens
  siRNA target sequence for MGC9084 (NM_033418.1,1361-1379).
gttcataattgaaataact

SEQ ID NO: 403856 - DNA, 19 bp, Homo sapiens
  siRNA target sequence for CAB2 (NM_033419.2,160-178).
gctcccgccagccaatcta

SEQ ID NO: 403857 - DNA, 19 bp, Homo sapiens
  siRNA target sequence for CAB2 (NM_033419.2,163-181).
cccgccagccaatctacat

SEQ ID NO: 403858 - DNA, 19 bp, Homo sapiens
  siRNA target sequence for CAB2 (NM_033419.2,165-183).
cgccagccaatctacatga

SEQ ID NO: 403859 - DNA, 19 bp, Homo sapiens
  siRNA target sequence for CAB2 (NM_033419.2,199-217).
cctgtcgggacgactgtaa

SEQ ID NO: 403860 - DNA, 19 bp, Homo sapiens
  siRNA target sequence for CAB2 (NM_033419.2,202-220).
gtcgggacgactgtaagta

SEQ ID NO: 403861 - DNA, 19 bp, Homo sapiens
  siRNA target sequence for CAB2 (NM_033419.2,205-223).
gggacgactgtaagtatga

SEQ ID NO: 403862 - DNA, 19 bp, Homo sapiens
  siRNA target sequence for CAB2 (NM_033419.2,207-225).
gacgactgtaagtatgagt

SEQ ID NO: 403863 - DNA, 19 bp, Homo sapiens
  siRNA target sequence for CAB2 (NM_033419.2,333-351).
gccgtggcctcgtttctca

SEQ ID NO: 403864 - DNA, 19 bp, Homo sapiens
  siRNA target sequence for CAB2 (NM_033419.2,885-903).
cctgtccacgtcctctttt

SEQ ID NO: 403865 - DNA, 19 bp, Homo sapiens
  siRNA target sequence for CAB2 (NM_033419.2,886-904).
ctgtccacgtcctcttttt

SEQ ID NO: 403866 - DNA, 19 bp, Homo sapiens
  siRNA target sequence for CAB2 (NM_033419.2,888-906).
gtccacgtcctctttttca

SEQ ID NO: 403867 - DNA, 19 bp, Homo sapiens
  siRNA target sequence for C19orf6 (NM_033420.2,198-216).
cctcgcacccccaatctca

SEQ ID NO: 403868 - DNA, 19 bp, Homo sapiens
  siRNA target sequence for C19orf6 (NM_033420.2,199-217).
ctcgcacccccaatctcaa

SEQ ID NO: 403869 - DNA, 19 bp, Homo sapiens
  siRNA target sequence for C19orf6 (NM_033420.2,255-273).
cacgcgctgttcttcaaga

SEQ ID NO: 403870 - DNA, 19 bp, Homo sapiens
  siRNA target sequence for C19orf6 (NM_033420.2,609-627).
gggaacagctccatcaagt

SEQ ID NO: 403871 - DNA, 19 bp, Homo sapiens
  siRNA target sequence for C19orf6 (NM_033420.2,610-628).
ggaacagctccatcaagtt

SEQ ID NO: 403872 - DNA, 19 bp, Homo sapiens
  siRNA target sequence for C19orf6 (NM_033420.2,752-770).
ggagtactcactagagtat

SEQ ID NO: 403873 - DNA, 19 bp, Homo sapiens
  siRNA target sequence for C19orf6 (NM_033420.2,940-958).
ccgagaacgaggagaacaa

SEQ ID NO: 403874 - DNA, 19 bp, Homo sapiens
  siRNA target sequence for C19orf6 (NM_033420.2,1213-1231).
ccatcatgtcggagttctt

SEQ ID NO: 403875 - DNA, 19 bp, Homo sapiens
  siRNA target sequence for C19orf6 (NM_033420.2,1240-1258).
ccaccaccgccttctacat

SEQ ID NO: 403876 - DNA, 19 bp, Homo sapiens
  siRNA target sequence for C19orf6 (NM_033420.2,1273-1291).
ggctcgcggaccagtatga

SEQ ID NO: 403877 - DNA, 19 bp, Homo sapiens
  siRNA target sequence for C19orf6 (NM_033420.2,1326-1344).
cattggctgcgcattccat

SEQ ID NO: 403878 - DNA, 19 bp, Homo sapiens
  siRNA target sequence for KIAA1737 (NM_033426.2,402-420).
ccgaggcagaactccaaaa

SEQ ID NO: 403879 - DNA, 19 bp, Homo sapiens
  siRNA target sequence for KIAA1737 (NM_033426.2,452-470).
catggtcgtcatgaagaat

SEQ ID NO: 403880 - DNA, 19 bp, Homo sapiens
  siRNA target sequence for KIAA1737 (NM_033426.2,546-564).
gcacagccacagctcttat

SEQ ID NO: 403881 - DNA, 19 bp, Homo sapiens
  siRNA target sequence for KIAA1737 (NM_033426.2,547-565).
cacagccacagctcttatt

SEQ ID NO: 403882 - DNA, 19 bp, Homo sapiens
  siRNA target sequence for KIAA1737 (NM_033426.2,622-640).
ccgactccaggaactactt

SEQ ID NO: 403883 - DNA, 19 bp, Homo sapiens
  siRNA target sequence for KIAA1737 (NM_033426.2,638-656).
cttgcccattctgaattct

SEQ ID NO: 403884 - DNA, 19 bp, Homo sapiens
  siRNA target sequence for KIAA1737 (NM_033426.2,648-666).
ctgaattcttacaccaaaa

SEQ ID NO: 403885 - DNA, 19 bp, Homo sapiens
  siRNA target sequence for KIAA1737 (NM_033426.2,721-739).
caagtggagtgcagaagaa

SEQ ID NO: 403886 - DNA, 19 bp, Homo sapiens
  siRNA target sequence for KIAA1737 (NM_033426.2,756-774).
cttgggcctagcttgtctt

SEQ ID NO: 403887 - DNA, 19 bp, Homo sapiens
  siRNA target sequence for KIAA1737 (NM_033426.2,923-941).
cagtcacgtggctaaagct

SEQ ID NO: 403888 - DNA, 19 bp, Homo sapiens
  siRNA target sequence for KIAA1737 (NM_033426.2,1029-1047).
ccactgtccgctaattata

SEQ ID NO: 403889 - DNA, 19 bp, Homo sapiens
  siRNA target sequence for KIAA1737 (NM_033426.2,1032-1050).
ctgtccgctaattatagct

SEQ ID NO: 403890 - DNA, 19 bp, Homo sapiens
  siRNA target sequence for KIAA1737 (NM_033426.2,1080-1098).
cgcagcccagatatctttt

SEQ ID NO: 403891 - DNA, 19 bp, Homo sapiens
  siRNA target sequence for KIAA1737 (NM_033426.2,1119-1137).
cataggcgctttcagaata

SEQ ID NO: 403892 - DNA, 19 bp, Homo sapiens
  siRNA target sequence for KIAA1737 (NM_033426.2,1138-1156).
ccctagtagtcctacataa

SEQ ID NO: 403893 - DNA, 19 bp, Homo sapiens
  siRNA target sequence for KIAA1737 (NM_033426.2,1139-1157).
cctagtagtcctacataaa

SEQ ID NO: 403894 - DNA, 19 bp, Homo sapiens
  siRNA target sequence for KIAA1737 (NM_033426.2,1140-1158).
ctagtagtcctacataaat

SEQ ID NO: 403895 - DNA, 19 bp, Homo sapiens
  siRNA target sequence for KIAA1737 (NM_033426.2,1190-1208).
ggagttgattcgtcagaat

SEQ ID NO: 403896 - DNA, 19 bp, Homo sapiens
  siRNA target sequence for KIAA1737 (NM_033426.2,1211-1229).
ggcaactcaggtagaacta

SEQ ID NO: 403897 - DNA, 19 bp, Homo sapiens
  siRNA target sequence for KIAA1737 (NM_033426.2,1339-1357).
gcagtgacctagaagcatt

SEQ ID NO: 403898 - DNA, 19 bp, Homo sapiens
  siRNA target sequence for CORTBP2 (NM_033427.1,283-301).
ctcgcaggaaggaggtatt

SEQ ID NO: 403899 - DNA, 19 bp, Homo sapiens
  siRNA target sequence for CORTBP2 (NM_033427.1,285-303).
cgcaggaaggaggtattta

SEQ ID NO: 403900 - DNA, 19 bp, Homo sapiens
  siRNA target sequence for CORTBP2 (NM_033427.1,286-304).
gcaggaaggaggtatttat

SEQ ID NO: 403901 - DNA, 19 bp, Homo sapiens
  siRNA target sequence for CORTBP2 (NM_033427.1,289-307).
ggaaggaggtatttatcca

SEQ ID NO: 403902 - DNA, 19 bp, Homo sapiens
  siRNA target sequence for CORTBP2 (NM_033427.1,308-326).
ggaacggtatgggagattt

SEQ ID NO: 403903 - DNA, 19 bp, Homo sapiens
  siRNA target sequence for CORTBP2 (NM_033427.1,309-327).
gaacggtatgggagattta

SEQ ID NO: 403904 - DNA, 19 bp, Homo sapiens
  siRNA target sequence for CORTBP2 (NM_033427.1,313-331).
ggtatgggagatttaatct

SEQ ID NO: 403905 - DNA, 19 bp, Homo sapiens
  siRNA target sequence for CORTBP2 (NM_033427.1,576-594).
gaagagcgtggcaagaaca

SEQ ID NO: 403906 - DNA, 19 bp, Homo sapiens
  siRNA target sequence for CORTBP2 (NM_033427.1,632-650).
gctctcaggcaaagtcata

SEQ ID NO: 403907 - DNA, 19 bp, Homo sapiens
  siRNA target sequence for CORTBP2 (NM_033427.1,780-798).
caactctctgagtttgaca

SEQ ID NO: 403908 - DNA, 19 bp, Homo sapiens
  siRNA target sequence for CORTBP2 (NM_033427.1,906-924).
ggaagtgacagcaaaccaa

SEQ ID NO: 403909 - DNA, 19 bp, Homo sapiens
  siRNA target sequence for CORTBP2 (NM_033427.1,1060-1078).
ctttaaccatgcctgtaaa

SEQ ID NO: 403910 - DNA, 19 bp, Homo sapiens
  siRNA target sequence for CORTBP2 (NM_033427.1,1142-1160).
catggccagaccaggtatt

SEQ ID NO: 403911 - DNA, 19 bp, Homo sapiens
  siRNA target sequence for CORTBP2 (NM_033427.1,1146-1164).
gccagaccaggtattgaca

SEQ ID NO: 403912 - DNA, 19 bp, Homo sapiens
  siRNA target sequence for CORTBP2 (NM_033427.1,1213-1231).
cacctccaagtgcaaacaa

SEQ ID NO: 403913 - DNA, 19 bp, Homo sapiens
  siRNA target sequence for CORTBP2 (NM_033427.1,1362-1380).
cctatgcacagtttacatt

SEQ ID NO: 403914 - DNA, 19 bp, Homo sapiens
  siRNA target sequence for CORTBP2 (NM_033427.1,1399-1417).
ctttgcatccaggtctaaa

SEQ ID NO: 403915 - DNA, 19 bp, Homo sapiens
  siRNA target sequence for CORTBP2 (NM_033427.1,1444-1462).
gatttcagggcaatgctaa

SEQ ID NO: 403916 - DNA, 19 bp, Homo sapiens
  siRNA target sequence for CORTBP2 (NM_033427.1,1459-1477).
ctaacgacccagaccaaaa

SEQ ID NO: 403917 - DNA, 19 bp, Homo sapiens
  siRNA target sequence for CORTBP2 (NM_033427.1,1463-1481).
cgacccagaccaaaatgga

SEQ ID NO: 403918 - DNA, 19 bp, Homo sapiens
  siRNA target sequence for CORTBP2 (NM_033427.1,1470-1488).
gaccaaaatggaaatacta

SEQ ID NO: 403919 - DNA, 19 bp, Homo sapiens
  siRNA target sequence for CORTBP2 (NM_033427.1,1662-1680).
gttggtcggaccagtttaa

SEQ ID NO: 403920 - DNA, 19 bp, Homo sapiens
  siRNA target sequence for CORTBP2 (NM_033427.1,1772-1790).
cccccaactcaaggttatt

SEQ ID NO: 403921 - DNA, 19 bp, Homo sapiens
  siRNA target sequence for CORTBP2 (NM_033427.1,1774-1792).
cccaactcaaggttattat

SEQ ID NO: 403922 - DNA, 19 bp, Homo sapiens
  siRNA target sequence for CORTBP2 (NM_033427.1,1892-1910).
ggagaaccttcctaagtca

SEQ ID NO: 403923 - DNA, 19 bp, Homo sapiens
  siRNA target sequence for CORTBP2 (NM_033427.1,1893-1911).
gagaaccttcctaagtcat

SEQ ID NO: 403924 - DNA, 19 bp, Homo sapiens
  siRNA target sequence for CORTBP2 (NM_033427.1,2079-2097).
gccttttgctcttccataa

SEQ ID NO: 403925 - DNA, 19 bp, Homo sapiens
  siRNA target sequence for CORTBP2 (NM_033427.1,2244-2262).
gctgcccagggaaatgtca

SEQ ID NO: 403926 - DNA, 19 bp, Homo sapiens
  siRNA target sequence for CORTBP2 (NM_033427.1,2400-2418).
gtcaatgctgctgataaaa

SEQ ID NO: 403927 - DNA, 19 bp, Homo sapiens
  siRNA target sequence for CORTBP2 (NM_033427.1,2446-2464).
ctgctcagggacatttcga

SEQ ID NO: 403928 - DNA, 19 bp, Homo sapiens
  siRNA target sequence for CORTBP2 (NM_033427.1,2457-2475).
catttcgagtgtgtagaat

SEQ ID NO: 403929 - DNA, 19 bp, Homo sapiens
  siRNA target sequence for CORTBP2 (NM_033427.1,2462-2480).
cgagtgtgtagaattatta

SEQ ID NO: 403930 - DNA, 19 bp, Homo sapiens
  siRNA target sequence for CORTBP2 (NM_033427.1,2463-2481).
gagtgtgtagaattattaa

SEQ ID NO: 403931 - DNA, 19 bp, Homo sapiens
  siRNA target sequence for CORTBP2 (NM_033427.1,2485-2503).
catatgatgctaacattaa

SEQ ID NO: 403932 - DNA, 19 bp, Homo sapiens
  siRNA target sequence for CORTBP2 (NM_033427.1,2518-2536).
gaggacagacacctctata

SEQ ID NO: 403933 - DNA, 19 bp, Homo sapiens
  siRNA target sequence for CORTBP2 (NM_033427.1,2532-2550).
ctatacctggcctgtaaaa

SEQ ID NO: 403934 - DNA, 19 bp, Homo sapiens
  siRNA target sequence for CORTBP2 (NM_033427.1,2579-2597).
gttggaagctggaaccaat

SEQ ID NO: 403935 - DNA, 19 bp, Homo sapiens
  siRNA target sequence for CORTBP2 (NM_033427.1,2589-2607).
ggaaccaatcgaagtgtaa

SEQ ID NO: 403936 - DNA, 19 bp, Homo sapiens
  siRNA target sequence for CORTBP2 (NM_033427.1,2590-2608).
gaaccaatcgaagtgtaaa

SEQ ID NO: 403937 - DNA, 19 bp, Homo sapiens
  siRNA target sequence for CORTBP2 (NM_033427.1,2641-2659).
ctgtggacactggtaatgt

SEQ ID NO: 403938 - DNA, 19 bp, Homo sapiens
  siRNA target sequence for CORTBP2 (NM_033427.1,2665-2683).
gcctcaagcttcttatgta

SEQ ID NO: 403939 - DNA, 19 bp, Homo sapiens
  siRNA target sequence for CORTBP2 (NM_033427.1,2689-2707).
gaataccagctcatggaaa

SEQ ID NO: 403940 - DNA, 19 bp, Homo sapiens
  siRNA target sequence for CORTBP2 (NM_033427.1,2793-2811).
gttcctgcagacctcatta

SEQ ID NO: 403941 - DNA, 19 bp, Homo sapiens
  siRNA target sequence for CORTBP2 (NM_033427.1,2850-2868).
gctgcttccaaaggtttta

SEQ ID NO: 403942 - DNA, 19 bp, Homo sapiens
  siRNA target sequence for CORTBP2 (NM_033427.1,3026-3044).
gattgaaccaagcaactat

SEQ ID NO: 403943 - DNA, 19 bp, Homo sapiens
  siRNA target sequence for CORTBP2 (NM_033427.1,3030-3048).
gaaccaagcaactatggtt

SEQ ID NO: 403944 - DNA, 19 bp, Homo sapiens
  siRNA target sequence for CORTBP2 (NM_033427.1,3139-3157).
ctctgacaaatcatttcca

SEQ ID NO: 403945 - DNA, 19 bp, Homo sapiens
  siRNA target sequence for CORTBP2 (NM_033427.1,3188-3206).
ggaagacgtgacttgcaat

SEQ ID NO: 403946 - DNA, 19 bp, Homo sapiens
  siRNA target sequence for CORTBP2 (NM_033427.1,3189-3207).
gaagacgtgacttgcaata

SEQ ID NO: 403947 - DNA, 19 bp, Homo sapiens
  siRNA target sequence for CORTBP2 (NM_033427.1,3192-3210).
gacgtgacttgcaataaca

SEQ ID NO: 403948 - DNA, 19 bp, Homo sapiens
  siRNA target sequence for CORTBP2 (NM_033427.1,3250-3268).
gatccatcacgctaggaaa

SEQ ID NO: 403949 - DNA, 19 bp, Homo sapiens
  siRNA target sequence for CORTBP2 (NM_033427.1,3434-3452).
caggctggttgagcaatat

SEQ ID NO: 403950 - DNA, 19 bp, Homo sapiens
  siRNA target sequence for CORTBP2 (NM_033427.1,3436-3454).
ggctggttgagcaatatca

SEQ ID NO: 403951 - DNA, 19 bp, Homo sapiens
  siRNA target sequence for CORTBP2 (NM_033427.1,3437-3455).
gctggttgagcaatatcat

SEQ ID NO: 403952 - DNA, 19 bp, Homo sapiens
  siRNA target sequence for CORTBP2 (NM_033427.1,3438-3456).
ctggttgagcaatatcata

SEQ ID NO: 403953 - DNA, 19 bp, Homo sapiens
  siRNA target sequence for CORTBP2 (NM_033427.1,3446-3464).
gcaatatcataatgtcatt

SEQ ID NO: 403954 - DNA, 19 bp, Homo sapiens
  siRNA target sequence for CORTBP2 (NM_033427.1,3447-3465).
caatatcataatgtcattt

SEQ ID NO: 403955 - DNA, 19 bp, Homo sapiens
  siRNA target sequence for CORTBP2 (NM_033427.1,3481-3499).
gaagcttgcaagactacat

SEQ ID NO: 403956 - DNA, 19 bp, Homo sapiens
  siRNA target sequence for CORTBP2 (NM_033427.1,3484-3502).
gcttgcaagactacatagt

SEQ ID NO: 403957 - DNA, 19 bp, Homo sapiens
  siRNA target sequence for CORTBP2 (NM_033427.1,3485-3503).
cttgcaagactacatagta

SEQ ID NO: 403958 - DNA, 19 bp, Homo sapiens
  siRNA target sequence for CORTBP2 (NM_033427.1,3547-3565).
gattctcctgtgaaatagt

SEQ ID NO: 403959 - DNA, 19 bp, Homo sapiens
  siRNA target sequence for CORTBP2 (NM_033427.1,3576-3594).
gtagatgctggtttttcca

SEQ ID NO: 403960 - DNA, 19 bp, Homo sapiens
  siRNA target sequence for CORTBP2 (NM_033427.1,3631-3649).
gtctgatcccagtgaaaca

SEQ ID NO: 403961 - DNA, 19 bp, Homo sapiens
  siRNA target sequence for CORTBP2 (NM_033427.1,3700-3718).
cttcactgtcggagttatt

SEQ ID NO: 403962 - DNA, 19 bp, Homo sapiens
  siRNA target sequence for CORTBP2 (NM_033427.1,3711-3729).
gagttattgagggactttt

SEQ ID NO: 403963 - DNA, 19 bp, Homo sapiens
  siRNA target sequence for CORTBP2 (NM_033427.1,3741-3759).
gaaaatcgcagcactgaaa

SEQ ID NO: 403964 - DNA, 19 bp, Homo sapiens
  siRNA target sequence for CORTBP2 (NM_033427.1,3786-3804).
ggactgtccgaatgttatt

SEQ ID NO: 403965 - DNA, 19 bp, Homo sapiens
  siRNA target sequence for CORTBP2 (NM_033427.1,3787-3805).
gactgtccgaatgttatta

SEQ ID NO: 403966 - DNA, 19 bp, Homo sapiens
  siRNA target sequence for CORTBP2 (NM_033427.1,3791-3809).
gtccgaatgttattacttt

SEQ ID NO: 403967 - DNA, 19 bp, Homo sapiens
  siRNA target sequence for CORTBP2 (NM_033427.1,3793-3811).
ccgaatgttattactttca

SEQ ID NO: 403968 - DNA, 19 bp, Homo sapiens
  siRNA target sequence for CORTBP2 (NM_033427.1,3933-3951).
ctgcagaggttcttacgaa

SEQ ID NO: 403969 - DNA, 19 bp, Homo sapiens
  siRNA target sequence for CORTBP2 (NM_033427.1,3995-4013).
cgatcctgtgtgcaagatt

SEQ ID NO: 403970 - DNA, 19 bp, Homo sapiens
  siRNA target sequence for CORTBP2 (NM_033427.1,4032-4050).
gtctggcgtcagcttaact

SEQ ID NO: 403971 - DNA, 19 bp, Homo sapiens
  siRNA target sequence for CORTBP2 (NM_033427.1,4080-4098).
gcacttcttggaccaaaat

SEQ ID NO: 403972 - DNA, 19 bp, Homo sapiens
  siRNA target sequence for CORTBP2 (NM_033427.1,4175-4193).
catcgcacccagagttcaa

SEQ ID NO: 403973 - DNA, 19 bp, Homo sapiens
  siRNA target sequence for CORTBP2 (NM_033427.1,4178-4196).
cgcacccagagttcaagaa

SEQ ID NO: 403974 - DNA, 19 bp, Homo sapiens
  siRNA target sequence for CORTBP2 (NM_033427.1,4191-4209).
caagaagcaatattgtcaa

SEQ ID NO: 403975 - DNA, 19 bp, Homo sapiens
  siRNA target sequence for CORTBP2 (NM_033427.1,4297-4315).
ctctcagcatcttgctaaa

SEQ ID NO: 403976 - DNA, 19 bp, Homo sapiens
  siRNA target sequence for CORTBP2 (NM_033427.1,4299-4317).
ctcagcatcttgctaaata

SEQ ID NO: 403977 - DNA, 19 bp, Homo sapiens
  siRNA target sequence for CORTBP2 (NM_033427.1,4407-4425).
gtttccagttataacactt

SEQ ID NO: 403978 - DNA, 19 bp, Homo sapiens
  siRNA target sequence for CORTBP2 (NM_033427.1,4411-4429).
ccagttataacacttgtaa

SEQ ID NO: 403979 - DNA, 19 bp, Homo sapiens
  siRNA target sequence for CORTBP2 (NM_033427.1,4421-4439).
cacttgtaacaagaagaaa

SEQ ID NO: 403980 - DNA, 19 bp, Homo sapiens
  siRNA target sequence for CORTBP2 (NM_033427.1,4487-4505).
gtctggccgcttctcttta

SEQ ID NO: 403981 - DNA, 19 bp, Homo sapiens
  siRNA target sequence for CORTBP2 (NM_033427.1,4501-4519).
ctttacccacctggaataa

SEQ ID NO: 403982 - DNA, 19 bp, Homo sapiens
  siRNA target sequence for CORTBP2 (NM_033427.1,4540-4558).
gtatgaaaaataagactat

SEQ ID NO: 403983 - DNA, 19 bp, Homo sapiens
  siRNA target sequence for CORTBP2 (NM_033427.1,4580-4598).
gaatgcttctctgtcaaaa

SEQ ID NO: 403984 - DNA, 19 bp, Homo sapiens
  siRNA target sequence for CORTBP2 (NM_033427.1,4604-4622).
gtctttagagaatgatcta

SEQ ID NO: 403985 - DNA, 19 bp, Homo sapiens
  siRNA target sequence for CORTBP2 (NM_033427.1,4743-4761).
gattccagggatgatttaa

SEQ ID NO: 403986 - DNA, 19 bp, Homo sapiens
  siRNA target sequence for CORTBP2 (NM_033427.1,4755-4773).
gatttaaggatgtttgata

SEQ ID NO: 403987 - DNA, 19 bp, Homo sapiens
  siRNA target sequence for CORTBP2 (NM_033427.1,4779-4797).
ggaaacaaccctgtacttt

SEQ ID NO: 403988 - DNA, 19 bp, Homo sapiens
  siRNA target sequence for CORTBP2 (NM_033427.1,4804-4822).
ctattaataatctgagaat

SEQ ID NO: 403989 - DNA, 19 bp, Homo sapiens
  siRNA target sequence for CORTBP2 (NM_033427.1,4851-4869).
ctcagcagccatcaaacta

SEQ ID NO: 403990 - DNA, 19 bp, Homo sapiens
  siRNA target sequence for CORTBP2 (NM_033427.1,4853-4871).
cagcagccatcaaactact

SEQ ID NO: 403991 - DNA, 19 bp, Homo sapiens
  siRNA target sequence for CORTBP2 (NM_033427.1,4905-4923).
ggtgtttcaagagttaaat

SEQ ID NO: 403992 - DNA, 19 bp, Homo sapiens
  siRNA target sequence for CORTBP2 (NM_033427.1,4912-4930).
caagagttaaatcttttct

SEQ ID NO: 403993 - DNA, 19 bp, Homo sapiens
  siRNA target sequence for CORTBP2 (NM_033427.1,4933-4951).
ctgttcctagaagtaaagt

SEQ ID NO: 403994 - DNA, 19 bp, Homo sapiens
  siRNA target sequence for CORTBP2 (NM_033427.1,5041-5059).
ggaacttacacaaaaatga

SEQ ID NO: 403995 - DNA, 19 bp, Homo sapiens
  siRNA target sequence for CORTBP2 (NM_033427.1,5058-5076).
gaacacctagaaaaaccta

SEQ ID NO: 403996 - DNA, 19 bp, Homo sapiens
  siRNA target sequence for SLAMF9 (NM_033438.1,246-264).
ctggtcctctcacaaaagt

SEQ ID NO: 403997 - DNA, 19 bp, Homo sapiens
  siRNA target sequence for SLAMF9 (NM_033438.1,523-541).
gaaggtgcctgcagtatgt

SEQ ID NO: 403998 - DNA, 19 bp, Homo sapiens
  siRNA target sequence for SLAMF9 (NM_033438.1,601-619).
ggggatagcacttatacat

SEQ ID NO: 403999 - DNA, 19 bp, Homo sapiens
  siRNA target sequence for SLAMF9 (NM_033438.1,602-620).
gggatagcacttatacatt

SEQ ID NO: 404000 - DNA, 19 bp, Homo sapiens
  siRNA target sequence for SLAMF9 (NM_033438.1,737-755).
ccttctatgcagatcctaa

SEQ ID NO: 404001 - DNA, 19 bp, Homo sapiens
  siRNA target sequence for SLAMF9 (NM_033438.1,741-759).
ctatgcagatcctaactat

SEQ ID NO: 404002 - DNA, 19 bp, Homo sapiens
  siRNA target sequence for SLAMF9 (NM_033438.1,745-763).
gcagatcctaactatgctt

SEQ ID NO: 404003 - DNA, 19 bp, Homo sapiens
  siRNA target sequence for SLAMF9 (NM_033438.1,797-815).
ccaagggattgctcatctt

SEQ ID NO: 404004 - DNA, 19 bp, Homo sapiens
  siRNA target sequence for SLAMF9 (NM_033438.1,852-870).
catccgagtccagaaaaga

SEQ ID NO: 404005 - DNA, 19 bp, Homo sapiens
  siRNA target sequence for C9orf26 (NM_033439.1,78-96).
gcaagcaaagccttgtgtt

SEQ ID NO: 404006 - DNA, 19 bp, Homo sapiens
  siRNA target sequence for C9orf26 (NM_033439.1,132-150).
gtttgccccatgtacttta

SEQ ID NO: 404007 - DNA, 19 bp, Homo sapiens
  siRNA target sequence for C9orf26 (NM_033439.1,160-178).
gctctggccttatgataaa

SEQ ID NO: 404008 - DNA, 19 bp, Homo sapiens
  siRNA target sequence for C9orf26 (NM_033439.1,183-201).
gaggcctgttactttagga

SEQ ID NO: 404009 - DNA, 19 bp, Homo sapiens
  siRNA target sequence for C9orf26 (NM_033439.1,356-374).
cacaggaatttcacctatt

SEQ ID NO: 404010 - DNA, 19 bp, Homo sapiens
  siRNA target sequence for C9orf26 (NM_033439.1,361-379).
gaatttcacctattacaga

SEQ ID NO: 404011 - DNA, 19 bp, Homo sapiens
  siRNA target sequence for C9orf26 (NM_033439.1,378-396).
gagtatcttgcttctctaa

SEQ ID NO: 404012 - DNA, 19 bp, Homo sapiens
  siRNA target sequence for C9orf26 (NM_033439.1,391-409).
ctctaagcacatacaatga

SEQ ID NO: 404013 - DNA, 19 bp, Homo sapiens
  siRNA target sequence for C9orf26 (NM_033439.1,400-418).
catacaatgatcaatccat

SEQ ID NO: 404014 - DNA, 19 bp, Homo sapiens
  siRNA target sequence for C9orf26 (NM_033439.1,404-422).
caatgatcaatccattact

SEQ ID NO: 404015 - DNA, 19 bp, Homo sapiens
  siRNA target sequence for C9orf26 (NM_033439.1,491-509).
ggtgttactgagttactat

SEQ ID NO: 404016 - DNA, 19 bp, Homo sapiens
  siRNA target sequence for C9orf26 (NM_033439.1,512-530).
gtctcaacacccctcaaat

SEQ ID NO: 404017 - DNA, 19 bp, Homo sapiens
  siRNA target sequence for C9orf26 (NM_033439.1,516-534).
caacacccctcaaatgaat

SEQ ID NO: 404018 - DNA, 19 bp, Homo sapiens
  siRNA target sequence for C9orf26 (NM_033439.1,538-556).
gtgacggtgttgatggtaa

SEQ ID NO: 404019 - DNA, 19 bp, Homo sapiens
  siRNA target sequence for C9orf26 (NM_033439.1,543-561).
ggtgttgatggtaagatgt

SEQ ID NO: 404020 - DNA, 19 bp, Homo sapiens
  siRNA target sequence for C9orf26 (NM_033439.1,544-562).
gtgttgatggtaagatgtt

SEQ ID NO: 404021 - DNA, 19 bp, Homo sapiens
  siRNA target sequence for C9orf26 (NM_033439.1,552-570).
ggtaagatgttaatggtaa

SEQ ID NO: 404022 - DNA, 19 bp, Homo sapiens
  siRNA target sequence for C9orf26 (NM_033439.1,571-589).
ccctgagtcctacaaaaga

SEQ ID NO: 404023 - DNA, 19 bp, Homo sapiens
  siRNA target sequence for C9orf26 (NM_033439.1,595-613).
ggttgcatgccaacaacaa

SEQ ID NO: 404024 - DNA, 19 bp, Homo sapiens
  siRNA target sequence for C9orf26 (NM_033439.1,627-645).
gagctccataagtgtgaaa

SEQ ID NO: 404025 - DNA, 19 bp, Homo sapiens
  siRNA target sequence for C9orf26 (NM_033439.1,632-650).
ccataagtgtgaaaaacca

SEQ ID NO: 404026 - DNA, 19 bp, Homo sapiens
  siRNA target sequence for C9orf26 (NM_033439.1,686-704).
gcactccaactgtgtttca

SEQ ID NO: 404027 - DNA, 19 bp, Homo sapiens
  siRNA target sequence for C9orf26 (NM_033439.1,718-736).
ctgatcctggagtgtttat

SEQ ID NO: 404028 - DNA, 19 bp, Homo sapiens
  siRNA target sequence for C9orf26 (NM_033439.1,739-757).
gtgtaaaggataatcatct

SEQ ID NO: 404029 - DNA, 19 bp, Homo sapiens
  siRNA target sequence for C9orf26 (NM_033439.1,783-801).
gagaatttgtgtactgaaa

SEQ ID NO: 404030 - DNA, 19 bp, Homo sapiens
  siRNA target sequence for FLJ00007 (NM_033449.1,709-727).
gcccacctcgaccattact

SEQ ID NO: 404031 - DNA, 19 bp, Homo sapiens
  siRNA target sequence for FLJ00007 (NM_033449.1,710-728).
cccacctcgaccattacta

SEQ ID NO: 404032 - DNA, 19 bp, Homo sapiens
  siRNA target sequence for FLJ00007 (NM_033449.1,1137-1155).
gcgggaggctccaagcata

SEQ ID NO: 404033 - DNA, 19 bp, Homo sapiens
  siRNA target sequence for FLJ00007 (NM_033449.1,1239-1257).
gcagggggctggcttagat

SEQ ID NO: 404034 - DNA, 19 bp, Homo sapiens
  siRNA target sequence for FLJ00007 (NM_033449.1,1606-1624).
gtccctgagcgatatctca

SEQ ID NO: 404035 - DNA, 19 bp, Homo sapiens
  siRNA target sequence for FLJ00007 (NM_033449.1,1610-1628).
ctgagcgatatctcaactt

SEQ ID NO: 404036 - DNA, 19 bp, Homo sapiens
  siRNA target sequence for BMF (NM_033503.2,366-384).
ggaaccccagcgactcttt

SEQ ID NO: 404037 - DNA, 19 bp, Homo sapiens
  siRNA target sequence for BMF (NM_033503.2,552-570).
ccagcagaaccaaaatcgt

SEQ ID NO: 404038 - DNA, 19 bp, Homo sapiens
  siRNA target sequence for DISP2 (NM_033510.1,701-719).
gccacgggacacagacatt

SEQ ID NO: 404039 - DNA, 19 bp, Homo sapiens
  siRNA target sequence for DISP2 (NM_033510.1,933-951).
cctgagaagagctatgcaa

SEQ ID NO: 404040 - DNA, 19 bp, Homo sapiens
  siRNA target sequence for DISP2 (NM_033510.1,934-952).
ctgagaagagctatgcaaa

SEQ ID NO: 404041 - DNA, 19 bp, Homo sapiens
  siRNA target sequence for DISP2 (NM_033510.1,1468-1486).
gggggcttgctgacaacta

SEQ ID NO: 404042 - DNA, 19 bp, Homo sapiens
  siRNA target sequence for DISP2 (NM_033510.1,1756-1774).
ccaaccacacgctcatctt

SEQ ID NO: 404043 - DNA, 19 bp, Homo sapiens
  siRNA target sequence for DISP2 (NM_033510.1,2176-2194).
cctgcggcgtcatcaagtt

SEQ ID NO: 404044 - DNA, 19 bp, Homo sapiens
  siRNA target sequence for DISP2 (NM_033510.1,2392-2410).
gccacatgcccgtggtttt

SEQ ID NO: 404045 - DNA, 19 bp, Homo sapiens
  siRNA target sequence for DISP2 (NM_033510.1,2581-2599).
gctggcccacgctgtgttt

SEQ ID NO: 404046 - DNA, 19 bp, Homo sapiens
  siRNA target sequence for DISP2 (NM_033510.1,2824-2842).
ggaacagtccggactacaa

SEQ ID NO: 404047 - DNA, 19 bp, Homo sapiens
  siRNA target sequence for DISP2 (NM_033510.1,2846-2864).
gacccagctcttctacaat

SEQ ID NO: 404048 - DNA, 19 bp, Homo sapiens
  siRNA target sequence for DISP2 (NM_033510.1,2916-2934).
cgccgtggttggttcacta

SEQ ID NO: 404049 - DNA, 19 bp, Homo sapiens
  siRNA target sequence for DISP2 (NM_033510.1,3045-3063).
gttcccctcagcctattct

SEQ ID NO: 404050 - DNA, 19 bp, Homo sapiens
  siRNA target sequence for DISP2 (NM_033510.1,3180-3198).
gacttcactgtcaactact

SEQ ID NO: 404051 - DNA, 19 bp, Homo sapiens
  siRNA target sequence for DISP2 (NM_033510.1,3559-3577).
ggtcctgctcagagcaata

SEQ ID NO: 404052 - DNA, 19 bp, Homo sapiens
  siRNA target sequence for DISP2 (NM_033510.1,4118-4136).
gctgagggagacagtgtat

SEQ ID NO: 404053 - DNA, 19 bp, Homo sapiens
  siRNA target sequence for DISP2 (NM_033510.1,4129-4147).
cagtgtatgacccatcatt

SEQ ID NO: 404054 - DNA, 19 bp, Homo sapiens
  siRNA target sequence for DISP2 (NM_033510.1,4272-4290).
cacacgtcaggctatagca

SEQ ID NO: 404055 - DNA, 19 bp, Homo sapiens
  siRNA target sequence for ARHGAP18 (NM_033515.2,194-212).
cacctcgagtcgcagatat

SEQ ID NO: 404056 - DNA, 19 bp, Homo sapiens
  siRNA target sequence for ARHGAP18 (NM_033515.2,238-256).
gcaccaccatcaaagttat

SEQ ID NO: 404057 - DNA, 19 bp, Homo sapiens
  siRNA target sequence for ARHGAP18 (NM_033515.2,265-283).
ctccatttgatcgatcaat

SEQ ID NO: 404058 - DNA, 19 bp, Homo sapiens
  siRNA target sequence for ARHGAP18 (NM_033515.2,291-309).
gattctttggatgaactat

SEQ ID NO: 404059 - DNA, 19 bp, Homo sapiens
  siRNA target sequence for ARHGAP18 (NM_033515.2,295-313).
ctttggatgaactatctat

SEQ ID NO: 404060 - DNA, 19 bp, Homo sapiens
  siRNA target sequence for ARHGAP18 (NM_033515.2,299-317).
ggatgaactatctatggaa

SEQ ID NO: 404061 - DNA, 19 bp, Homo sapiens
  siRNA target sequence for ARHGAP18 (NM_033515.2,306-324).
ctatctatggaagactatt

SEQ ID NO: 404062 - DNA, 19 bp, Homo sapiens
  siRNA target sequence for ARHGAP18 (NM_033515.2,341-359).
catcaagaaatctagtgaa

SEQ ID NO: 404063 - DNA, 19 bp, Homo sapiens
  siRNA target sequence for ARHGAP18 (NM_033515.2,429-447).
cttaaagaggccggtttat

SEQ ID NO: 404064 - DNA, 19 bp, Homo sapiens
  siRNA target sequence for ARHGAP18 (NM_033515.2,438-456).
gccggtttatccaatctct

SEQ ID NO: 404065 - DNA, 19 bp, Homo sapiens
  siRNA target sequence for ARHGAP18 (NM_033515.2,439-457).
ccggtttatccaatctctt

SEQ ID NO: 404066 - DNA, 19 bp, Homo sapiens
  siRNA target sequence for ARHGAP18 (NM_033515.2,472-490).
gagatccacaggaaagcat

SEQ ID NO: 404067 - DNA, 19 bp, Homo sapiens
  siRNA target sequence for ARHGAP18 (NM_033515.2,594-612).
cctgacgtcagagacatat

SEQ ID NO: 404068 - DNA, 19 bp, Homo sapiens
  siRNA target sequence for ARHGAP18 (NM_033515.2,599-617).
cgtcagagacatatttgct

SEQ ID NO: 404069 - DNA, 19 bp, Homo sapiens
  siRNA target sequence for ARHGAP18 (NM_033515.2,700-718).
gagatgacgaggcatctaa

SEQ ID NO: 404070 - DNA, 19 bp, Homo sapiens
  siRNA target sequence for ARHGAP18 (NM_033515.2,799-817).
ccgagcaagcactcaatca

SEQ ID NO: 404071 - DNA, 19 bp, Homo sapiens
  siRNA target sequence for ARHGAP18 (NM_033515.2,807-825).
gcactcaatcagaaagaga

SEQ ID NO: 404072 - DNA, 19 bp, Homo sapiens
  siRNA target sequence for ARHGAP18 (NM_033515.2,858-876).
gatgatgccacattaccta

SEQ ID NO: 404073 - DNA, 19 bp, Homo sapiens
  siRNA target sequence for ARHGAP18 (NM_033515.2,864-882).
gccacattacctagtttca

SEQ ID NO: 404074 - DNA, 19 bp, Homo sapiens
  siRNA target sequence for ARHGAP18 (NM_033515.2,881-899).
cagattgccaaaagacaaa

SEQ ID NO: 404075 - DNA, 19 bp, Homo sapiens
  siRNA target sequence for ARHGAP18 (NM_033515.2,971-989).
gctgactgccctctatgat

SEQ ID NO: 404076 - DNA, 19 bp, Homo sapiens
  siRNA target sequence for ARHGAP18 (NM_033515.2,974-992).
gactgccctctatgatgta

SEQ ID NO: 404077 - DNA, 19 bp, Homo sapiens
  siRNA target sequence for ARHGAP18 (NM_033515.2,995-1013).
gggtattgagctgaaacaa

SEQ ID NO: 404078 - DNA, 19 bp, Homo sapiens
  siRNA target sequence for ARHGAP18 (NM_033515.2,1063-1081).
cattgacagcgctattaga

SEQ ID NO: 404079 - DNA, 19 bp, Homo sapiens
  siRNA target sequence for ARHGAP18 (NM_033515.2,1067-1085).
gacagcgctattagaacaa

SEQ ID NO: 404080 - DNA, 19 bp, Homo sapiens
  siRNA target sequence for ARHGAP18 (NM_033515.2,1069-1087).
cagcgctattagaacaaga

SEQ ID NO: 404081 - DNA, 19 bp, Homo sapiens
  siRNA target sequence for ARHGAP18 (NM_033515.2,1072-1090).
cgctattagaacaagatca

SEQ ID NO: 404082 - DNA, 19 bp, Homo sapiens
  siRNA target sequence for ARHGAP18 (NM_033515.2,1109-1127).
gcgaatacccttgatcttt

SEQ ID NO: 404083 - DNA, 19 bp, Homo sapiens
  siRNA target sequence for ARHGAP18 (NM_033515.2,1192-1210).
gagctgccattagaatcaa

SEQ ID NO: 404084 - DNA, 19 bp, Homo sapiens
  siRNA target sequence for ARHGAP18 (NM_033515.2,1194-1212).
gctgccattagaatcaaga

SEQ ID NO: 404085 - DNA, 19 bp, Homo sapiens
  siRNA target sequence for ARHGAP18 (NM_033515.2,1334-1352).
cagtgtggagtatctcaaa

SEQ ID NO: 404086 - DNA, 19 bp, Homo sapiens
  siRNA target sequence for ARHGAP18 (NM_033515.2,1449-1467).
ctgaaggcccttcttgaat

SEQ ID NO: 404087 - DNA, 19 bp, Homo sapiens
  siRNA target sequence for ARHGAP18 (NM_033515.2,1451-1469).
gaaggcccttcttgaattt

SEQ ID NO: 404088 - DNA, 19 bp, Homo sapiens
  siRNA target sequence for ARHGAP18 (NM_033515.2,1538-1556).
cccgaatctctttatgtgt

SEQ ID NO: 404089 - DNA, 19 bp, Homo sapiens
  siRNA target sequence for ARHGAP18 (NM_033515.2,1555-1573).
gtcatgcattgggattgaa

SEQ ID NO: 404090 - DNA, 19 bp, Homo sapiens
  siRNA target sequence for ARHGAP18 (NM_033515.2,1581-1599).
gaacagcgagaatttgtaa

SEQ ID NO: 404091 - DNA, 19 bp, Homo sapiens
  siRNA target sequence for ARHGAP18 (NM_033515.2,1605-1623).
gctgggacagcaaatacca

SEQ ID NO: 404092 - DNA, 19 bp, Homo sapiens
  siRNA target sequence for ARHGAP18 (NM_033515.2,1614-1632).
gcaaataccatgcacttat

SEQ ID NO: 404093 - DNA, 19 bp, Homo sapiens
  siRNA target sequence for ARHGAP18 (NM_033515.2,1621-1639).
ccatgcacttattgattaa

SEQ ID NO: 404094 - DNA, 19 bp, Homo sapiens
  siRNA target sequence for ARHGAP18 (NM_033515.2,1658-1676).
gacaattcccaagtttatt

SEQ ID NO: 404095 - DNA, 19 bp, Homo sapiens
  siRNA target sequence for ARHGAP18 (NM_033515.2,1691-1709).
gaagcaaaacacggaaaat

SEQ ID NO: 404096 - DNA, 19 bp, Homo sapiens
  siRNA target sequence for ARHGAP18 (NM_033515.2,1694-1712).
gcaaaacacggaaaatcat

SEQ ID NO: 404097 - DNA, 19 bp, Homo sapiens
  siRNA target sequence for ARHGAP18 (NM_033515.2,1695-1713).
caaaacacggaaaatcata

SEQ ID NO: 404098 - DNA, 19 bp, Homo sapiens
  siRNA target sequence for ARHGAP18 (NM_033515.2,1702-1720).
cggaaaatcataaaaagga

SEQ ID NO: 404099 - DNA, 19 bp, Homo sapiens
  siRNA target sequence for ARHGAP18 (NM_033515.2,1703-1721).
ggaaaatcataaaaaggat

SEQ ID NO: 404100 - DNA, 19 bp, Homo sapiens
  siRNA target sequence for ARHGAP18 (NM_033515.2,1781-1799).
gcaagataagagtacaaat

SEQ ID NO: 404101 - DNA, 19 bp, Homo sapiens
  siRNA target sequence for ARHGAP18 (NM_033515.2,1808-1826).
cgttcctcagggagtgatt

SEQ ID NO: 404102 - DNA, 19 bp, Homo sapiens
  siRNA target sequence for ARHGAP18 (NM_033515.2,1830-1848).
gtgcaagctccccatcttt

SEQ ID NO: 404103 - DNA, 19 bp, Homo sapiens
  siRNA target sequence for ARHGAP18 (NM_033515.2,1839-1857).
ccccatctttcgaaagttt

SEQ ID NO: 404104 - DNA, 19 bp, Homo sapiens
  siRNA target sequence for ARHGAP18 (NM_033515.2,1910-1928).
gtttctcagccaagaaagt

SEQ ID NO: 404105 - DNA, 19 bp, Homo sapiens
  siRNA target sequence for ARHGAP18 (NM_033515.2,1990-2008).
gggaacgctgccttgatga

SEQ ID NO: 404106 - DNA, 19 bp, Homo sapiens
  siRNA target sequence for ARHGAP18 (NM_033515.2,2001-2019).
cttgatgatgacacttaca

SEQ ID NO: 404107 - DNA, 19 bp, Homo sapiens
  siRNA target sequence for ARHGAP18 (NM_033515.2,2049-2067).
gctgagtgggttataaagt

SEQ ID NO: 404108 - DNA, 19 bp, Homo sapiens
  siRNA target sequence for ARHGAP18 (NM_033515.2,2052-2070).
gagtgggttataaagtcaa

SEQ ID NO: 404109 - DNA, 19 bp, Homo sapiens
  siRNA target sequence for C20orf35 (NM_033542.1,316-334).
cctcgctggaccagatgtt

SEQ ID NO: 404110 - DNA, 19 bp, Homo sapiens
  siRNA target sequence for R29124_1 (NM_033543.1,100-118).
gcctggctctttattgcat

SEQ ID NO: 404111 - DNA, 19 bp, Homo sapiens
  siRNA target sequence for R29124_1 (NM_033543.1,116-134).
catcagcgccctttgaagt

SEQ ID NO: 404112 - DNA, 19 bp, Homo sapiens
  siRNA target sequence for R29124_1 (NM_033543.1,137-155).
ctgaaggggagaatgttca

SEQ ID NO: 404113 - DNA, 19 bp, Homo sapiens
  siRNA target sequence for R29124_1 (NM_033543.1,172-190).
ctgcccgagaatctttaca

SEQ ID NO: 404114 - DNA, 19 bp, Homo sapiens
  siRNA target sequence for R29124_1 (NM_033543.1,189-207).
cagctatggctggtacaaa

SEQ ID NO: 404115 - DNA, 19 bp, Homo sapiens
  siRNA target sequence for R29124_1 (NM_033543.1,228-246).
ccagctaatcgcagcatat

SEQ ID NO: 404116 - DNA, 19 bp, Homo sapiens
  siRNA target sequence for R29124_1 (NM_033543.1,231-249).
gctaatcgcagcatatgta

SEQ ID NO: 404117 - DNA, 19 bp, Homo sapiens
  siRNA target sequence for R29124_1 (NM_033543.1,232-250).
ctaatcgcagcatatgtaa

SEQ ID NO: 404118 - DNA, 19 bp, Homo sapiens
  siRNA target sequence for R29124_1 (NM_033543.1,343-361).
gaggacacgggatactaca

SEQ ID NO: 404119 - DNA, 19 bp, Homo sapiens
  siRNA target sequence for R29124_1 (NM_033543.1,364-382).
ctacaagtcacatacagaa

SEQ ID NO: 404120 - DNA, 19 bp, Homo sapiens
  siRNA target sequence for R29124_1 (NM_033543.1,404-422).
ctcaccatctccgtgtata

SEQ ID NO: 404121 - DNA, 19 bp, Homo sapiens
  siRNA target sequence for R29124_1 (NM_033543.1,573-591).
gctgtcctggtttaaccat

SEQ ID NO: 404122 - DNA, 19 bp, Homo sapiens
  siRNA target sequence for R29124_1 (NM_033543.1,679-697).
cccctcaagctgactgtaa

SEQ ID NO: 404123 - DNA, 19 bp, Homo sapiens
  siRNA target sequence for R29124_1 (NM_033543.1,680-698).
ccctcaagctgactgtaaa

SEQ ID NO: 404124 - DNA, 19 bp, Homo sapiens
  siRNA target sequence for R29124_1 (NM_033543.1,681-699).
cctcaagctgactgtaaaa

SEQ ID NO: 404125 - DNA, 19 bp, Homo sapiens
  siRNA target sequence for MGC16733 (NM_033547.2,406-424).
cgtctcatggtgtaagaaa

SEQ ID NO: 404126 - DNA, 19 bp, Homo sapiens
  siRNA target sequence for MGC16733 (NM_033547.2,434-452).
gcagttacttggcaatctt

SEQ ID NO: 404127 - DNA, 19 bp, Homo sapiens
  siRNA target sequence for MGC16733 (NM_033547.2,499-517).
ccagagatgtccagaagat

SEQ ID NO: 404128 - DNA, 19 bp, Homo sapiens
  siRNA target sequence for MGC16733 (NM_033547.2,500-518).
cagagatgtccagaagatt

SEQ ID NO: 404129 - DNA, 19 bp, Homo sapiens
  siRNA target sequence for MGC16733 (NM_033547.2,554-572).
cagaacagcagctataaaa

SEQ ID NO: 404130 - DNA, 19 bp, Homo sapiens
  siRNA target sequence for MGC16733 (NM_033547.2,578-596).
gttgcagctccatgaaaga

SEQ ID NO: 404131 - DNA, 19 bp, Homo sapiens
  siRNA target sequence for LOC90522 (NM_033557.1,196-214).
cccccaccagcttttcgat

SEQ ID NO: 404132 - DNA, 19 bp, Homo sapiens
  siRNA target sequence for LOC90522 (NM_033557.1,258-276).
cacctggtggcctgagtta

SEQ ID NO: 404133 - DNA, 19 bp, Homo sapiens
  siRNA target sequence for LOC90522 (NM_033557.1,764-782).
gccttcttgggctacaaat

SEQ ID NO: 404134 - DNA, 19 bp, Homo sapiens
  siRNA target sequence for LOC90522 (NM_033557.1,765-783).
ccttcttgggctacaaata

SEQ ID NO: 404135 - DNA, 19 bp, Homo sapiens
  siRNA target sequence for LOC90522 (NM_033557.1,766-784).
cttcttgggctacaaatat

SEQ ID NO: 404136 - DNA, 19 bp, Homo sapiens
  siRNA target sequence for LOC90522 (NM_033557.1,778-796).
caaatatgtcgggatgatt

SEQ ID NO: 404137 - DNA, 19 bp, Homo sapiens
  siRNA target sequence for LOC90522 (NM_033557.1,861-879).
gcgtagccatctttgtgtt

SEQ ID NO: 404138 - DNA, 19 bp, Homo sapiens
  siRNA target sequence for LOC90522 (NM_033557.1,888-906).
ggacgctgcggctgaagat

SEQ ID NO: 404139 - DNA, 19 bp, Homo sapiens
  siRNA target sequence for LOC90522 (NM_033557.1,891-909).
cgctgcggctgaagatctt

SEQ ID NO: 404140 - DNA, 19 bp, Homo sapiens
  siRNA target sequence for LOC90522 (NM_033557.1,993-1011).
cgcagcctatgctcatgta

SEQ ID NO: 404141 - DNA, 19 bp, Homo sapiens
  siRNA target sequence for LOC90522 (NM_033557.1,995-1013).
cagcctatgctcatgtact

SEQ ID NO: 404142 - DNA, 19 bp, Homo sapiens
  siRNA target sequence for JM11 (NM_033626.2,831-849).
gccaagaggacgtagttct

SEQ ID NO: 404143 - DNA, 19 bp, Homo sapiens
  siRNA target sequence for JM11 (NM_033626.2,958-976).
ccagctgcgggcagtatct

SEQ ID NO: 404144 - DNA, 19 bp, Homo sapiens
  siRNA target sequence for JM11 (NM_033626.2,1791-1809).
gccctgaggtgcatccaaa

SEQ ID NO: 404145 - DNA, 19 bp, Homo sapiens
  siRNA target sequence for JM11 (NM_033626.2,2048-2066).
ccacactcgaggagtttca

SEQ ID NO: 404146 - DNA, 19 bp, Homo sapiens
  siRNA target sequence for JM11 (NM_033626.2,2088-2106).
ggtatggggggtgctttta

SEQ ID NO: 404147 - DNA, 19 bp, Homo sapiens
  siRNA target sequence for FBXW7 (NM_033632.1,93-111).
ctctgtgggcagcaaaaga

SEQ ID NO: 404148 - DNA, 19 bp, Homo sapiens
  siRNA target sequence for FBXW7 (NM_033632.1,323-341).
gatttatttcggtagatga

SEQ ID NO: 404149 - DNA, 19 bp, Homo sapiens
  siRNA target sequence for FBXW7 (NM_033632.1,342-360).
ggactcctcaggaaaccaa

SEQ ID NO: 404150 - DNA, 19 bp, Homo sapiens
  siRNA target sequence for FBXW7 (NM_033632.1,478-496).
gatgaacatacacatacta

SEQ ID NO: 404151 - DNA, 19 bp, Homo sapiens
  siRNA target sequence for FBXW7 (NM_033632.1,502-520).
gtcacgaactccagtagta

SEQ ID NO: 404152 - DNA, 19 bp, Homo sapiens
  siRNA target sequence for FBXW7 (NM_033632.1,504-522).
cacgaactccagtagtatt

SEQ ID NO: 404153 - DNA, 19 bp, Homo sapiens
  siRNA target sequence for FBXW7 (NM_033632.1,506-524).
cgaactccagtagtattgt

SEQ ID NO: 404154 - DNA, 19 bp, Homo sapiens
  siRNA target sequence for HELB (NM_033647.2,45-63).
cgtacctgcgccaacttca

SEQ ID NO: 404155 - DNA, 19 bp, Homo sapiens
  siRNA target sequence for HELB (NM_033647.2,98-116).
gaggacgacgactacctaa

SEQ ID NO: 404156 - DNA, 19 bp, Homo sapiens
  siRNA target sequence for HELB (NM_033647.2,203-221).
gggtgcctccgcgtttcta

SEQ ID NO: 404157 - DNA, 19 bp, Homo sapiens
  siRNA target sequence for HELB (NM_033647.2,204-222).
ggtgcctccgcgtttctat

SEQ ID NO: 404158 - DNA, 19 bp, Homo sapiens
  siRNA target sequence for HELB (NM_033647.2,205-223).
gtgcctccgcgtttctatt

SEQ ID NO: 404159 - DNA, 19 bp, Homo sapiens
  siRNA target sequence for HELB (NM_033647.2,208-226).
cctccgcgtttctatttgt

SEQ ID NO: 404160 - DNA, 19 bp, Homo sapiens
  siRNA target sequence for HELB (NM_033647.2,211-229).
ccgcgtttctatttgtgat

SEQ ID NO: 404161 - DNA, 19 bp, Homo sapiens
  siRNA target sequence for HELB (NM_033647.2,288-306).
ggagagtgaaggtacaagt

SEQ ID NO: 404162 - DNA, 19 bp, Homo sapiens
  siRNA target sequence for HELB (NM_033647.2,289-307).
gagagtgaaggtacaagta

SEQ ID NO: 404163 - DNA, 19 bp, Homo sapiens
  siRNA target sequence for HELB (NM_033647.2,319-337).
gggatcaaggagctatcaa

SEQ ID NO: 404164 - DNA, 19 bp, Homo sapiens
  siRNA target sequence for HELB (NM_033647.2,320-338).
ggatcaaggagctatcaat

SEQ ID NO: 404165 - DNA, 19 bp, Homo sapiens
  siRNA target sequence for HELB (NM_033647.2,321-339).
gatcaaggagctatcaata

SEQ ID NO: 404166 - DNA, 19 bp, Homo sapiens
  siRNA target sequence for HELB (NM_033647.2,330-348).
gctatcaatatcaagttca

SEQ ID NO: 404167 - DNA, 19 bp, Homo sapiens
  siRNA target sequence for HELB (NM_033647.2,347-365).
caaggatttccgtcttact

SEQ ID NO: 404168 - DNA, 19 bp, Homo sapiens
  siRNA target sequence for HELB (NM_033647.2,410-428).
gctctctttcttaaagagt

SEQ ID NO: 404169 - DNA, 19 bp, Homo sapiens
  siRNA target sequence for HELB (NM_033647.2,433-451).
ggtctccagtgatgatgtt

SEQ ID NO: 404170 - DNA, 19 bp, Homo sapiens
  siRNA target sequence for HELB (NM_033647.2,468-486).
gggtaaaggaggtatcaaa

SEQ ID NO: 404171 - DNA, 19 bp, Homo sapiens
  siRNA target sequence for HELB (NM_033647.2,623-641).
ctggaaaacacaattccat

SEQ ID NO: 404172 - DNA, 19 bp, Homo sapiens
  siRNA target sequence for HELB (NM_033647.2,698-716).
cttctgcctcgacacttta

SEQ ID NO: 404173 - DNA, 19 bp, Homo sapiens
  siRNA target sequence for HELB (NM_033647.2,705-723).
ctcgacactttaaatggat

SEQ ID NO: 404174 - DNA, 19 bp, Homo sapiens
  siRNA target sequence for HELB (NM_033647.2,735-753).
gttctaaagagatgttgaa

SEQ ID NO: 404175 - DNA, 19 bp, Homo sapiens
  siRNA target sequence for HELB (NM_033647.2,782-800).
ccgtggaaacttggattta

SEQ ID NO: 404176 - DNA, 19 bp, Homo sapiens
  siRNA target sequence for HELB (NM_033647.2,786-804).
ggaaacttggatttagtaa

SEQ ID NO: 404177 - DNA, 19 bp, Homo sapiens
  siRNA target sequence for HELB (NM_033647.2,787-805).
gaaacttggatttagtaaa

SEQ ID NO: 404178 - DNA, 19 bp, Homo sapiens
  siRNA target sequence for HELB (NM_033647.2,795-813).
gatttagtaaaataaccta

SEQ ID NO: 404179 - DNA, 19 bp, Homo sapiens
  siRNA target sequence for HELB (NM_033647.2,839-857).
gaggcaagttggatagcat

SEQ ID NO: 404180 - DNA, 19 bp, Homo sapiens
  siRNA target sequence for HELB (NM_033647.2,842-860).
gcaagttggatagcatttt

SEQ ID NO: 404181 - DNA, 19 bp, Homo sapiens
  siRNA target sequence for HELB (NM_033647.2,934-952).
gcagatatgtagagaagat

SEQ ID NO: 404182 - DNA, 19 bp, Homo sapiens
  siRNA target sequence for HELB (NM_033647.2,968-986).
gaagtgaatgacttaactt

SEQ ID NO: 404183 - DNA, 19 bp, Homo sapiens
  siRNA target sequence for HELB (NM_033647.2,973-991).
gaatgacttaactttgaca

SEQ ID NO: 404184 - DNA, 19 bp, Homo sapiens
  siRNA target sequence for HELB (NM_033647.2,1074-1092).
cctgtgtcttcccttatga

SEQ ID NO: 404185 - DNA, 19 bp, Homo sapiens
  siRNA target sequence for HELB (NM_033647.2,1110-1128).
gagccatcgccttttcaat

SEQ ID NO: 404186 - DNA, 19 bp, Homo sapiens
  siRNA target sequence for HELB (NM_033647.2,1125-1143).
caatttgtgacctgatgaa

SEQ ID NO: 404187 - DNA, 19 bp, Homo sapiens
  siRNA target sequence for HELB (NM_033647.2,1164-1182).
gtgtcgatgtcgaaaaggt

SEQ ID NO: 404188 - DNA, 19 bp, Homo sapiens
  siRNA target sequence for HELB (NM_033647.2,1221-1239).
gcgatgatgcattgaatga

SEQ ID NO: 404189 - DNA, 19 bp, Homo sapiens
  siRNA target sequence for HELB (NM_033647.2,1294-1312).
ggacaatggtgaccatatt

SEQ ID NO: 404190 - DNA, 19 bp, Homo sapiens
  siRNA target sequence for HELB (NM_033647.2,1315-1333).
gactaatggtgaaaatgaa

SEQ ID NO: 404191 - DNA, 19 bp, Homo sapiens
  siRNA target sequence for HELB (NM_033647.2,1429-1447).
caatcctgtgacagtcata

SEQ ID NO: 404192 - DNA, 19 bp, Homo sapiens
  siRNA target sequence for HELB (NM_033647.2,1466-1484).
gggaagaccacaatcgtta

SEQ ID NO: 404193 - DNA, 19 bp, Homo sapiens
  siRNA target sequence for HELB (NM_033647.2,1476-1494).
caatcgttagccgtctttt

SEQ ID NO: 404194 - DNA, 19 bp, Homo sapiens
  siRNA target sequence for HELB (NM_033647.2,1485-1503).
gccgtctttttaagcatat

SEQ ID NO: 404195 - DNA, 19 bp, Homo sapiens
  siRNA target sequence for HELB (NM_033647.2,1486-1504).
ccgtctttttaagcatata

SEQ ID NO: 404196 - DNA, 19 bp, Homo sapiens
  siRNA target sequence for HELB (NM_033647.2,1559-1577).
cagaatgcttcagaagaat

SEQ ID NO: 404197 - DNA, 19 bp, Homo sapiens
  siRNA target sequence for HELB (NM_033647.2,1565-1583).
gcttcagaagaatggatta

SEQ ID NO: 404198 - DNA, 19 bp, Homo sapiens
  siRNA target sequence for HELB (NM_033647.2,1569-1587).
cagaagaatggattacctt

SEQ ID NO: 404199 - DNA, 19 bp, Homo sapiens
  siRNA target sequence for HELB (NM_033647.2,1590-1608).
ctgagcaaagtcaactaga

SEQ ID NO: 404200 - DNA, 19 bp, Homo sapiens
  siRNA target sequence for HELB (NM_033647.2,1611-1629).
cggacaaggctatagaagt

SEQ ID NO: 404201 - DNA, 19 bp, Homo sapiens
  siRNA target sequence for HELB (NM_033647.2,1656-1674).
cagctggcttactaagaca

SEQ ID NO: 404202 - DNA, 19 bp, Homo sapiens
  siRNA target sequence for HELB (NM_033647.2,1698-1716).
cactgtgtcaggtcaatta

SEQ ID NO: 404203 - DNA, 19 bp, Homo sapiens
  siRNA target sequence for HELB (NM_033647.2,1728-1746).
catggactcaaacaatgat

SEQ ID NO: 404204 - DNA, 19 bp, Homo sapiens
  siRNA target sequence for HELB (NM_033647.2,1796-1814).
gatgaagggagtttggtat

SEQ ID NO: 404205 - DNA, 19 bp, Homo sapiens
  siRNA target sequence for HELB (NM_033647.2,1811-1829).
gtatctgtaggaatcttca

SEQ ID NO: 404206 - DNA, 19 bp, Homo sapiens
  siRNA target sequence for HELB (NM_033647.2,1849-1867).
gtgtgagcactccaaactt

SEQ ID NO: 404207 - DNA, 19 bp, Homo sapiens
  siRNA target sequence for HELB (NM_033647.2,1853-1871).
gagcactccaaactttcta

SEQ ID NO: 404208 - DNA, 19 bp, Homo sapiens
  siRNA target sequence for HELB (NM_033647.2,1908-1926).
gtattgaacctggtaactt

SEQ ID NO: 404209 - DNA, 19 bp, Homo sapiens
  siRNA target sequence for HELB (NM_033647.2,1920-1938).
gtaacttgctgaaagatct

SEQ ID NO: 404210 - DNA, 19 bp, Homo sapiens
  siRNA target sequence for HELB (NM_033647.2,1967-1985).
gctattgagctaaagacaa

SEQ ID NO: 404211 - DNA, 19 bp, Homo sapiens
  siRNA target sequence for HELB (NM_033647.2,1973-1991).
gagctaaagacaaaccata

SEQ ID NO: 404212 - DNA, 19 bp, Homo sapiens
  siRNA target sequence for HELB (NM_033647.2,2006-2024).
ctcattgtggacaatgcta

SEQ ID NO: 404213 - DNA, 19 bp, Homo sapiens
  siRNA target sequence for HELB (NM_033647.2,2012-2030).
gtggacaatgctacaagaa

SEQ ID NO: 404214 - DNA, 19 bp, Homo sapiens
  siRNA target sequence for HELB (NM_033647.2,2037-2055).
gacgccaatttccaaaatt

SEQ ID NO: 404215 - DNA, 19 bp, Homo sapiens
  siRNA target sequence for HELB (NM_033647.2,2040-2058).
gccaatttccaaaatttga

SEQ ID NO: 404216 - DNA, 19 bp, Homo sapiens
  siRNA target sequence for HELB (NM_033647.2,2041-2059).
ccaatttccaaaatttgat

SEQ ID NO: 404217 - DNA, 19 bp, Homo sapiens
  siRNA target sequence for HELB (NM_033647.2,2074-2092).
ctctgataatccaacatta

SEQ ID NO: 404218 - DNA, 19 bp, Homo sapiens
  siRNA target sequence for HELB (NM_033647.2,2084-2102).
ccaacattacccatctcaa

SEQ ID NO: 404219 - DNA, 19 bp, Homo sapiens
  siRNA target sequence for HELB (NM_033647.2,2094-2112).
ccatctcaattcaagataa

SEQ ID NO: 404220 - DNA, 19 bp, Homo sapiens
  siRNA target sequence for HELB (NM_033647.2,2154-2172).
ctcagtcatctaaaactaa

SEQ ID NO: 404221 - DNA, 19 bp, Homo sapiens
  siRNA target sequence for HELB (NM_033647.2,2174-2192).
catcactcttgtttatatt

SEQ ID NO: 404222 - DNA, 19 bp, Homo sapiens
  siRNA target sequence for HELB (NM_033647.2,2265-2283).
ggcaagactgtgatctaat

SEQ ID NO: 404223 - DNA, 19 bp, Homo sapiens
  siRNA target sequence for HELB (NM_033647.2,2329-2347).
ccatcagagtagacttgtt

SEQ ID NO: 404224 - DNA, 19 bp, Homo sapiens
  siRNA target sequence for HELB (NM_033647.2,2330-2348).
catcagagtagacttgttt

SEQ ID NO: 404225 - DNA, 19 bp, Homo sapiens
  siRNA target sequence for HELB (NM_033647.2,2335-2353).
gagtagacttgtttttgga

SEQ ID NO: 404226 - DNA, 19 bp, Homo sapiens
  siRNA target sequence for HELB (NM_033647.2,2337-2355).
gtagacttgtttttggaat

SEQ ID NO: 404227 - DNA, 19 bp, Homo sapiens
  siRNA target sequence for HELB (NM_033647.2,2385-2403).
catacctctcagacttact

SEQ ID NO: 404228 - DNA, 19 bp, Homo sapiens
  siRNA target sequence for HELB (NM_033647.2,2394-2412).
cagacttactacctgaaaa

SEQ ID NO: 404229 - DNA, 19 bp, Homo sapiens
  siRNA target sequence for HELB (NM_033647.2,2424-2442).
gtcagcaaaataatgatct

SEQ ID NO: 404230 - DNA, 19 bp, Homo sapiens
  siRNA target sequence for HELB (NM_033647.2,2428-2446).
gcaaaataatgatctagat

SEQ ID NO: 404231 - DNA, 19 bp, Homo sapiens
  siRNA target sequence for HELB (NM_033647.2,2472-2490).
cgcttcctgattttgctaa

SEQ ID NO: 404232 - DNA, 19 bp, Homo sapiens
  siRNA target sequence for HELB (NM_033647.2,2526-2544).
gcaatggagagatattttt

SEQ ID NO: 404233 - DNA, 19 bp, Homo sapiens
  siRNA target sequence for HELB (NM_033647.2,2545-2563).
cataacaaatgatgtaact

SEQ ID NO: 404234 - DNA, 19 bp, Homo sapiens
  siRNA target sequence for HELB (NM_033647.2,2583-2601).
gaagatctttgaccattaa

SEQ ID NO: 404235 - DNA, 19 bp, Homo sapiens
  siRNA target sequence for HELB (NM_033647.2,2586-2604).
gatctttgaccattaataa

SEQ ID NO: 404236 - DNA, 19 bp, Homo sapiens
  siRNA target sequence for HELB (NM_033647.2,2589-2607).
ctttgaccattaataatat

SEQ ID NO: 404237 - DNA, 19 bp, Homo sapiens
  siRNA target sequence for HELB (NM_033647.2,2670-2688).
catgggcaagaactattca

SEQ ID NO: 404238 - DNA, 19 bp, Homo sapiens
  siRNA target sequence for HELB (NM_033647.2,2676-2694).
caagaactattcacacttt

SEQ ID NO: 404239 - DNA, 19 bp, Homo sapiens
  siRNA target sequence for HELB (NM_033647.2,2700-2718).
ggtccgaggagcaaacagt

SEQ ID NO: 404240 - DNA, 19 bp, Homo sapiens
  siRNA target sequence for HELB (NM_033647.2,2701-2719).
gtccgaggagcaaacagtt

SEQ ID NO: 404241 - DNA, 19 bp, Homo sapiens
  siRNA target sequence for HELB (NM_033647.2,2787-2805).
gctgccgagtgtatgtgat

SEQ ID NO: 404242 - DNA, 19 bp, Homo sapiens
  siRNA target sequence for HELB (NM_033647.2,2825-2843).
cggaatgccattatgaaaa

SEQ ID NO: 404243 - DNA, 19 bp, Homo sapiens
  siRNA target sequence for HELB (NM_033647.2,2905-2923).
cgcacctccagcagatttt

SEQ ID NO: 404244 - DNA, 19 bp, Homo sapiens
  siRNA target sequence for HELB (NM_033647.2,3001-3019).
ccacgccatgacaaatgat

SEQ ID NO: 404245 - DNA, 19 bp, Homo sapiens
  siRNA target sequence for HELB (NM_033647.2,3071-3089).
gaaagatggcaattatctt

SEQ ID NO: 404246 - DNA, 19 bp, Homo sapiens
  siRNA target sequence for HELB (NM_033647.2,3101-3119).
gtagatacagatgatgatt

SEQ ID NO: 404247 - DNA, 19 bp, Homo sapiens
  siRNA target sequence for HELB (NM_033647.2,3108-3126).
cagatgatgatttaccaaa

SEQ ID NO: 404248 - DNA, 19 bp, Homo sapiens
  siRNA target sequence for HELB (NM_033647.2,3110-3128).
gatgatgatttaccaaaat

SEQ ID NO: 404249 - DNA, 19 bp, Homo sapiens
  siRNA target sequence for HELB (NM_033647.2,3144-3162).
gaacctgtggtgtgaatga

SEQ ID NO: 404250 - DNA, 19 bp, Homo sapiens
  siRNA target sequence for HELB (NM_033647.2,3164-3182).
gatgaaagtccaagcaaaa

SEQ ID NO: 404251 - DNA, 19 bp, Homo sapiens
  siRNA target sequence for HELB (NM_033647.2,3232-3250).
gagactgaataatttaatt

SEQ ID NO: 404252 - DNA, 19 bp, Homo sapiens
  siRNA target sequence for HELB (NM_033647.2,3265-3283).
caagcccaccgataatcaa

SEQ ID NO: 404253 - DNA, 19 bp, Homo sapiens
  siRNA target sequence for HELB (NM_033647.2,3269-3287).
cccaccgataatcaagaaa

SEQ ID NO: 404254 - DNA, 19 bp, Homo sapiens
  siRNA target sequence for CG018 (NM_052818.1,498-516).
gcagtcatggcacttgaaa

SEQ ID NO: 404255 - DNA, 19 bp, Homo sapiens
  siRNA target sequence for CG018 (NM_052818.1,501-519).
gtcatggcacttgaaaata

SEQ ID NO: 404256 - DNA, 19 bp, Homo sapiens
  siRNA target sequence for CG018 (NM_052818.1,546-564).
gacactcgctggaaattca

SEQ ID NO: 404257 - DNA, 19 bp, Homo sapiens
  siRNA target sequence for CG018 (NM_052818.1,570-588).
caagagttagcaagaagaa

SEQ ID NO: 404258 - DNA, 19 bp, Homo sapiens
  siRNA target sequence for CG018 (NM_052818.1,575-593).
gttagcaagaagaaacatt

SEQ ID NO: 404259 - DNA, 19 bp, Homo sapiens
  siRNA target sequence for CG018 (NM_052818.1,594-612).
catggtgtctcaagagaaa

SEQ ID NO: 404260 - DNA, 19 bp, Homo sapiens
  siRNA target sequence for CG018 (NM_052818.1,633-651).
cggtatgaacacgatgtta

SEQ ID NO: 404261 - DNA, 19 bp, Homo sapiens
  siRNA target sequence for CG018 (NM_052818.1,635-653).
gtatgaacacgatgttact

SEQ ID NO: 404262 - DNA, 19 bp, Homo sapiens
  siRNA target sequence for CG018 (NM_052818.1,642-660).
cacgatgttacttttcaca

SEQ ID NO: 404263 - DNA, 19 bp, Homo sapiens
  siRNA target sequence for CG018 (NM_052818.1,746-764).
gaattcctacacagagttt

SEQ ID NO: 404264 - DNA, 19 bp, Homo sapiens
  siRNA target sequence for CG018 (NM_052818.1,776-794).
ggcccacggtggatttaca

SEQ ID NO: 404265 - DNA, 19 bp, Homo sapiens
  siRNA target sequence for CG018 (NM_052818.1,778-796).
cccacggtggatttacaaa

SEQ ID NO: 404266 - DNA, 19 bp, Homo sapiens
  siRNA target sequence for CG018 (NM_052818.1,820-838).
gcggttgtcaccatggata

SEQ ID NO: 404267 - DNA, 19 bp, Homo sapiens
  siRNA target sequence for CG018 (NM_052818.1,822-840).
ggttgtcaccatggatatt

SEQ ID NO: 404268 - DNA, 19 bp, Homo sapiens
  siRNA target sequence for C6orf192 (NM_052831.1,184-202).
cgagagaacaggtttttgt

SEQ ID NO: 404269 - DNA, 19 bp, Homo sapiens
  siRNA target sequence for C6orf192 (NM_052831.1,211-229).
cggcagcttcggtgaactt

SEQ ID NO: 404270 - DNA, 19 bp, Homo sapiens
  siRNA target sequence for C6orf192 (NM_052831.1,212-230).
ggcagcttcggtgaactta

SEQ ID NO: 404271 - DNA, 19 bp, Homo sapiens
  siRNA target sequence for C6orf192 (NM_052831.1,216-234).
gcttcggtgaacttaggtt

SEQ ID NO: 404272 - DNA, 19 bp, Homo sapiens
  siRNA target sequence for C6orf192 (NM_052831.1,235-253).
ccatgatgtgctattctat

SEQ ID NO: 404273 - DNA, 19 bp, Homo sapiens
  siRNA target sequence for C6orf192 (NM_052831.1,239-257).
gatgtgctattctatactt

SEQ ID NO: 404274 - DNA, 19 bp, Homo sapiens
  siRNA target sequence for C6orf192 (NM_052831.1,250-268).
ctatacttggaccgttttt

SEQ ID NO: 404275 - DNA, 19 bp, Homo sapiens
  siRNA target sequence for C6orf192 (NM_052831.1,290-308).
gggagccagcaatacaatt

SEQ ID NO: 404276 - DNA, 19 bp, Homo sapiens
  siRNA target sequence for C6orf192 (NM_052831.1,291-309).
ggagccagcaatacaatta

SEQ ID NO: 404277 - DNA, 19 bp, Homo sapiens
  siRNA target sequence for C6orf192 (NM_052831.1,292-310).
gagccagcaatacaattat

SEQ ID NO: 404278 - DNA, 19 bp, Homo sapiens
  siRNA target sequence for C6orf192 (NM_052831.1,347-365).
gctggcatccttggtattt

SEQ ID NO: 404279 - DNA, 19 bp, Homo sapiens
  siRNA target sequence for C6orf192 (NM_052831.1,351-369).
gcatccttggtatttggaa

SEQ ID NO: 404280 - DNA, 19 bp, Homo sapiens
  siRNA target sequence for C6orf192 (NM_052831.1,352-370).
catccttggtatttggaaa

SEQ ID NO: 404281 - DNA, 19 bp, Homo sapiens
  siRNA target sequence for C6orf192 (NM_052831.1,366-384).
ggaaactatcttgtacata

SEQ ID NO: 404282 - DNA, 19 bp, Homo sapiens
  siRNA target sequence for C6orf192 (NM_052831.1,405-423).
gtagcaggaatgtttgtct

SEQ ID NO: 404283 - DNA, 19 bp, Homo sapiens
  siRNA target sequence for C6orf192 (NM_052831.1,477-495).
gtatttattgctatgtgtt

SEQ ID NO: 404284 - DNA, 19 bp, Homo sapiens
  siRNA target sequence for C6orf192 (NM_052831.1,493-511).
gttttctagtgagagtaat

SEQ ID NO: 404285 - DNA, 19 bp, Homo sapiens
  siRNA target sequence for C6orf192 (NM_052831.1,534-552).
gcaatgactgcatcttctt

SEQ ID NO: 404286 - DNA, 19 bp, Homo sapiens
  siRNA target sequence for C6orf192 (NM_052831.1,596-614).
gggaagtcttgagactttt

SEQ ID NO: 404287 - DNA, 19 bp, Homo sapiens
  siRNA target sequence for C6orf192 (NM_052831.1,616-634).
ctggactggggctaatact

SEQ ID NO: 404288 - DNA, 19 bp, Homo sapiens
  siRNA target sequence for C6orf192 (NM_052831.1,672-690).
ggctatgaagtgcctttta

SEQ ID NO: 404289 - DNA, 19 bp, Homo sapiens
  siRNA target sequence for C6orf192 (NM_052831.1,713-731).
gctgatggtaccactcaat

SEQ ID NO: 404290 - DNA, 19 bp, Homo sapiens
  siRNA target sequence for C6orf192 (NM_052831.1,714-732).
ctgatggtaccactcaata

SEQ ID NO: 404291 - DNA, 19 bp, Homo sapiens
  siRNA target sequence for C6orf192 (NM_052831.1,719-737).
ggtaccactcaatatgtat

SEQ ID NO: 404292 - DNA, 19 bp, Homo sapiens
  siRNA target sequence for C6orf192 (NM_052831.1,720-738).
gtaccactcaatatgtata

SEQ ID NO: 404293 - DNA, 19 bp, Homo sapiens
  siRNA target sequence for C6orf192 (NM_052831.1,723-741).
ccactcaatatgtatattt

SEQ ID NO: 404294 - DNA, 19 bp, Homo sapiens
  siRNA target sequence for C6orf192 (NM_052831.1,771-789).
cactcattctggaaactga

SEQ ID NO: 404295 - DNA, 19 bp, Homo sapiens
  siRNA target sequence for C6orf192 (NM_052831.1,788-806).
gatcgctttacccaaagtt

SEQ ID NO: 404296 - DNA, 19 bp, Homo sapiens
  siRNA target sequence for C6orf192 (NM_052831.1,893-911).
caatttaccagctggatat

SEQ ID NO: 404297 - DNA, 19 bp, Homo sapiens
  siRNA target sequence for C6orf192 (NM_052831.1,939-957).
ctgtcctatgccatctctt

SEQ ID NO: 404298 - DNA, 19 bp, Homo sapiens
  siRNA target sequence for C6orf192 (NM_052831.1,953-971).
ctcttcaccactatttggt

SEQ ID NO: 404299 - DNA, 19 bp, Homo sapiens
  siRNA target sequence for C6orf192 (NM_052831.1,1016-1034).
gtttggcaacttaatcaca

SEQ ID NO: 404300 - DNA, 19 bp, Homo sapiens
  siRNA target sequence for C6orf192 (NM_052831.1,1062-1080).
gtcccaatcttgcatatta

SEQ ID NO: 404301 - DNA, 19 bp, Homo sapiens
  siRNA target sequence for C6orf192 (NM_052831.1,1064-1082).
cccaatcttgcatattaaa

SEQ ID NO: 404302 - DNA, 19 bp, Homo sapiens
  siRNA target sequence for C6orf192 (NM_052831.1,1097-1115).
gctggtgctgatattagtt

SEQ ID NO: 404303 - DNA, 19 bp, Homo sapiens
  siRNA target sequence for C6orf192 (NM_052831.1,1100-1118).
ggtgctgatattagttgta

SEQ ID NO: 404304 - DNA, 19 bp, Homo sapiens
  siRNA target sequence for C6orf192 (NM_052831.1,1101-1119).
gtgctgatattagttgtaa

SEQ ID NO: 404305 - DNA, 19 bp, Homo sapiens
  siRNA target sequence for C6orf192 (NM_052831.1,1103-1121).
gctgatattagttgtaagt

SEQ ID NO: 404306 - DNA, 19 bp, Homo sapiens
  siRNA target sequence for C6orf192 (NM_052831.1,1134-1152).
ggaatgagtataattccaa

SEQ ID NO: 404307 - DNA, 19 bp, Homo sapiens
  siRNA target sequence for C6orf192 (NM_052831.1,1190-1208).
gtttgaagagggattaagt

SEQ ID NO: 404308 - DNA, 19 bp, Homo sapiens
  siRNA target sequence for C6orf192 (NM_052831.1,1194-1212).
gaagagggattaagtacat

SEQ ID NO: 404309 - DNA, 19 bp, Homo sapiens
  siRNA target sequence for C6orf192 (NM_052831.1,1244-1262).
gtggtcaattggtgctttt

SEQ ID NO: 404310 - DNA, 19 bp, Homo sapiens
  siRNA target sequence for C6orf192 (NM_052831.1,1270-1288).
caacgctgggtggatttct

SEQ ID NO: 404311 - DNA, 19 bp, Homo sapiens
  siRNA target sequence for C6orf192 (NM_052831.1,1273-1291).
cgctgggtggatttctgta

SEQ ID NO: 404312 - DNA, 19 bp, Homo sapiens
  siRNA target sequence for C6orf192 (NM_052831.1,1274-1292).
gctgggtggatttctgtat

SEQ ID NO: 404313 - DNA, 19 bp, Homo sapiens
  siRNA target sequence for C6orf192 (NM_052831.1,1287-1305).
ctgtatgagaaaattggtt

SEQ ID NO: 404314 - DNA, 19 bp, Homo sapiens
  siRNA target sequence for C6orf192 (NM_052831.1,1329-1347).
ggtctatgggctctgataa

SEQ ID NO: 404315 - DNA, 19 bp, Homo sapiens
  siRNA target sequence for C6orf192 (NM_052831.1,1399-1417).
ggtctaaatctcaaaacat

SEQ ID NO: 404316 - DNA, 19 bp, Homo sapiens
  siRNA target sequence for C6orf192 (NM_052831.1,1441-1459).
ctactctcttgcctaatga

SEQ ID NO: 404317 - DNA, 19 bp, Homo sapiens
  siRNA target sequence for OBSCN (NM_052843.1,295-313).
gcgacagtgggcaatacgt

SEQ ID NO: 404318 - DNA, 19 bp, Homo sapiens
  siRNA target sequence for OBSCN (NM_052843.1,1236-1254).
ctgaccgtgcgcaatgtct

SEQ ID NO: 404319 - DNA, 19 bp, Homo sapiens
  siRNA target sequence for OBSCN (NM_052843.1,1263-1281).
gacgacgcggtgtacatct

SEQ ID NO: 404320 - DNA, 19 bp, Homo sapiens
  siRNA target sequence for OBSCN (NM_052843.1,1647-1665).
gagagttccgtgattctca

SEQ ID NO: 404321 - DNA, 19 bp, Homo sapiens
  siRNA target sequence for OBSCN (NM_052843.1,1687-1705).
gggaacgccctgtcactat

SEQ ID NO: 404322 - DNA, 19 bp, Homo sapiens
  siRNA target sequence for OBSCN (NM_052843.1,1950-1968).
ggtggcgaggtcactttct

SEQ ID NO: 404323 - DNA, 19 bp, Homo sapiens
  siRNA target sequence for OBSCN (NM_052843.1,2124-2142).
gtggccaacggcattgaga

SEQ ID NO: 404324 - DNA, 19 bp, Homo sapiens
  siRNA target sequence for OBSCN (NM_052843.1,2309-2327).
gtccccaggccccaagtat

SEQ ID NO: 404325 - DNA, 19 bp, Homo sapiens
  siRNA target sequence for OBSCN (NM_052843.1,5757-5775).
ccccgagtggtgaagttta

SEQ ID NO: 404326 - DNA, 19 bp, Homo sapiens
  siRNA target sequence for OBSCN (NM_052843.1,5760-5778).
cgagtggtgaagtttatgt

SEQ ID NO: 404327 - DNA, 19 bp, Homo sapiens
  siRNA target sequence for OBSCN (NM_052843.1,5894-5912).
cgagaagtttgccatatca

SEQ ID NO: 404328 - DNA, 19 bp, Homo sapiens
  siRNA target sequence for OBSCN (NM_052843.1,6026-6044).
ggcgcctgtgctgttcaaa

SEQ ID NO: 404329 - DNA, 19 bp, Homo sapiens
  siRNA target sequence for OBSCN (NM_052843.1,6027-6045).
gcgcctgtgctgttcaaaa

SEQ ID NO: 404330 - DNA, 19 bp, Homo sapiens
  siRNA target sequence for OBSCN (NM_052843.1,6247-6265).
gcgagacgccggatgacaa

SEQ ID NO: 404331 - DNA, 19 bp, Homo sapiens
  siRNA target sequence for OBSCN (NM_052843.1,6632-6650).
cgagctgtcgcgtcctaat

SEQ ID NO: 404332 - DNA, 19 bp, Homo sapiens
  siRNA target sequence for OBSCN (NM_052843.1,6727-6745).
gcaggagcctcaccattta

SEQ ID NO: 404333 - DNA, 19 bp, Homo sapiens
  siRNA target sequence for OBSCN (NM_052843.1,6758-6776).
cgcggatcagggagtgtat

SEQ ID NO: 404334 - DNA, 19 bp, Homo sapiens
  siRNA target sequence for OBSCN (NM_052843.1,6760-6778).
cggatcagggagtgtatgt

SEQ ID NO: 404335 - DNA, 19 bp, Homo sapiens
  siRNA target sequence for OBSCN (NM_052843.1,6829-6847).
ggacatacactctcatcta

SEQ ID NO: 404336 - DNA, 19 bp, Homo sapiens
  siRNA target sequence for OBSCN (NM_052843.1,6871-6889).
caggagagatccaatttgt

SEQ ID NO: 404337 - DNA, 19 bp, Homo sapiens
  siRNA target sequence for OBSCN (NM_052843.1,7153-7171).
gtgacgccggtgatgtcaa

SEQ ID NO: 404338 - DNA, 19 bp, Homo sapiens
  siRNA target sequence for OBSCN (NM_052843.1,7934-7952).
ggctgatgcgggcatagta

SEQ ID NO: 404339 - DNA, 19 bp, Homo sapiens
  siRNA target sequence for OBSCN (NM_052843.1,8134-8152).
ccagtgacaagtatgactt

SEQ ID NO: 404340 - DNA, 19 bp, Homo sapiens
  siRNA target sequence for OBSCN (NM_052843.1,8322-8340).
gaaagctgcagctttgagt

SEQ ID NO: 404341 - DNA, 19 bp, Homo sapiens
  siRNA target sequence for OBSCN (NM_052843.1,8428-8446).
cacgtcagggccgaaaata

SEQ ID NO: 404342 - DNA, 19 bp, Homo sapiens
  siRNA target sequence for OBSCN (NM_052843.1,8430-8448).
cgtcagggccgaaaataca

SEQ ID NO: 404343 - DNA, 19 bp, Homo sapiens
  siRNA target sequence for OBSCN (NM_052843.1,8462-8480).
ggaggctgcaccaagtgat

SEQ ID NO: 404344 - DNA, 19 bp, Homo sapiens
  siRNA target sequence for OBSCN (NM_052843.1,8669-8687).
ccgcaagagccagaagtat

SEQ ID NO: 404345 - DNA, 19 bp, Homo sapiens
  siRNA target sequence for OBSCN (NM_052843.1,9009-9027).
gcagacagcgacacctata

SEQ ID NO: 404346 - DNA, 19 bp, Homo sapiens
  siRNA target sequence for OBSCN (NM_052843.1,9012-9030).
gacagcgacacctatacct

SEQ ID NO: 404347 - DNA, 19 bp, Homo sapiens
  siRNA target sequence for OBSCN (NM_052843.1,9287-9305).
ctcgggcaccatctacttt

SEQ ID NO: 404348 - DNA, 19 bp, Homo sapiens
  siRNA target sequence for OBSCN (NM_052843.1,9289-9307).
cgggcaccatctactttga

SEQ ID NO: 404349 - DNA, 19 bp, Homo sapiens
  siRNA target sequence for OBSCN (NM_052843.1,9552-9570).
gacagtggacgctacaagt

SEQ ID NO: 404350 - DNA, 19 bp, Homo sapiens
  siRNA target sequence for OBSCN (NM_052843.1,9714-9732).
gtgaagtggtgctatggaa

SEQ ID NO: 404351 - DNA, 19 bp, Homo sapiens
  siRNA target sequence for OBSCN (NM_052843.1,9845-9863).
cggggaccagactacttct

SEQ ID NO: 404352 - DNA, 19 bp, Homo sapiens
  siRNA target sequence for OBSCN (NM_052843.1,9894-9912).
cagttcatcgggaaactga

SEQ ID NO: 404353 - DNA, 19 bp, Homo sapiens
  siRNA target sequence for OBSCN (NM_052843.1,10823-10841).
gaggcaggacgggactaaa

SEQ ID NO: 404354 - DNA, 19 bp, Homo sapiens
  siRNA target sequence for OBSCN (NM_052843.1,10826-10844).
gcaggacgggactaaatgt

SEQ ID NO: 404355 - DNA, 19 bp, Homo sapiens
  siRNA target sequence for OBSCN (NM_052843.1,10936-10954).
gggctctacccatcaagtt

SEQ ID NO: 404356 - DNA, 19 bp, Homo sapiens
  siRNA target sequence for OBSCN (NM_052843.1,11204-11222).
catgccttccaagttcata

SEQ ID NO: 404357 - DNA, 19 bp, Homo sapiens
  siRNA target sequence for OBSCN (NM_052843.1,11524-11542).
cggccgtgctgcaatgtga

SEQ ID NO: 404358 - DNA, 19 bp, Homo sapiens
  siRNA target sequence for OBSCN (NM_052843.1,11899-11917).
ccgcggagctggtgttaca

SEQ ID NO: 404359 - DNA, 19 bp, Homo sapiens
  siRNA target sequence for OBSCN (NM_052843.1,11934-11952).
gacactggcgaatacactt

SEQ ID NO: 404360 - DNA, 19 bp, Homo sapiens
  siRNA target sequence for OBSCN (NM_052843.1,12047-12065).
gggaggcaccgcacactta

SEQ ID NO: 404361 - DNA, 19 bp, Homo sapiens
  siRNA target sequence for OBSCN (NM_052843.1,12048-12066).
ggaggcaccgcacacttat

SEQ ID NO: 404362 - DNA, 19 bp, Homo sapiens
  siRNA target sequence for OBSCN (NM_052843.1,12051-12069).
ggcaccgcacacttatgct

SEQ ID NO: 404363 - DNA, 19 bp, Homo sapiens
  siRNA target sequence for OBSCN (NM_052843.1,12305-12323).
gcaggagacaggtgacata

SEQ ID NO: 404364 - DNA, 19 bp, Homo sapiens
  siRNA target sequence for OBSCN (NM_052843.1,12539-12557).
gcctgaggtgaccattgta

SEQ ID NO: 404365 - DNA, 19 bp, Homo sapiens
  siRNA target sequence for OBSCN (NM_052843.1,12583-12601).
cggccgatgaggatgttga

SEQ ID NO: 404366 - DNA, 19 bp, Homo sapiens
  siRNA target sequence for OBSCN (NM_052843.1,12586-12604).
ccgatgaggatgttgagtt

SEQ ID NO: 404367 - DNA, 19 bp, Homo sapiens
  siRNA target sequence for OBSCN (NM_052843.1,12764-12782).
cttccatttgggaaaccat

SEQ ID NO: 404368 - DNA, 19 bp, Homo sapiens
  siRNA target sequence for OBSCN (NM_052843.1,12941-12959).
gcaggccaacgagatgaat

SEQ ID NO: 404369 - DNA, 19 bp, Homo sapiens
  siRNA target sequence for OBSCN (NM_052843.1,13460-13478).
ggcgtcctggtacatcaat

SEQ ID NO: 404370 - DNA, 19 bp, Homo sapiens
  siRNA target sequence for OBSCN (NM_052843.1,14089-14107).
cccagggtcggcaacagat

SEQ ID NO: 404371 - DNA, 19 bp, Homo sapiens
  siRNA target sequence for OBSCN (NM_052843.1,14328-14346).
cccacgctggactccatta

SEQ ID NO: 404372 - DNA, 19 bp, Homo sapiens
  siRNA target sequence for OBSCN (NM_052843.1,14764-14782).
ccatgttctcccacacatt

SEQ ID NO: 404373 - DNA, 19 bp, Homo sapiens
  siRNA target sequence for OBSCN (NM_052843.1,14765-14783).
catgttctcccacacattt

SEQ ID NO: 404374 - DNA, 19 bp, Homo sapiens
  siRNA target sequence for OBSCN (NM_052843.1,15117-15135).
cggctcttccgcaccaaaa

SEQ ID NO: 404375 - DNA, 19 bp, Homo sapiens
  siRNA target sequence for OBSCN (NM_052843.1,15119-15137).
gctcttccgcaccaaaagt

SEQ ID NO: 404376 - DNA, 19 bp, Homo sapiens
  siRNA target sequence for OBSCN (NM_052843.1,15131-15149).
caaaagtccggctgaagtt

SEQ ID NO: 404377 - DNA, 19 bp, Homo sapiens
  siRNA target sequence for OBSCN (NM_052843.1,15136-15154).
gtccggctgaagtttcaga

SEQ ID NO: 404378 - DNA, 19 bp, Homo sapiens
  siRNA target sequence for OBSCN (NM_052843.1,15226-15244).
gcgaagatgagcatttcat

SEQ ID NO: 404379 - DNA, 19 bp, Homo sapiens
  siRNA target sequence for OBSCN (NM_052843.1,15228-15246).
gaagatgagcatttcatct

SEQ ID NO: 404380 - DNA, 19 bp, Homo sapiens
  siRNA target sequence for OBSCN (NM_052843.1,15289-15307).
ctcgcttccaggagatgtt

SEQ ID NO: 404381 - DNA, 19 bp, Homo sapiens
  siRNA target sequence for OBSCN (NM_052843.1,15352-15370).
ggcctcggagggtagagat

SEQ ID NO: 404382 - DNA, 19 bp, Homo sapiens
  siRNA target sequence for OBSCN (NM_052843.1,15573-15591).
gaggatgatcactacatga

SEQ ID NO: 404383 - DNA, 19 bp, Homo sapiens
  siRNA target sequence for OBSCN (NM_052843.1,15575-15593).
ggatgatcactacatgatt

SEQ ID NO: 404384 - DNA, 19 bp, Homo sapiens
  siRNA target sequence for OBSCN (NM_052843.1,15610-15628).
gtggccatcagctcatcat

SEQ ID NO: 404385 - DNA, 19 bp, Homo sapiens
  siRNA target sequence for OBSCN (NM_052843.1,15711-15729).
ctccgtgtggacttgacaa

SEQ ID NO: 404386 - DNA, 19 bp, Homo sapiens
  siRNA target sequence for OBSCN (NM_052843.1,15722-15740).
cttgacaagcacagactat

SEQ ID NO: 404387 - DNA, 19 bp, Homo sapiens
  siRNA target sequence for OBSCN (NM_052843.1,15929-15947).
ctaccctgctcccagatta

SEQ ID NO: 404388 - DNA, 19 bp, Homo sapiens
  siRNA target sequence for OBSCN (NM_052843.1,15933-15951).
cctgctcccagattatact

SEQ ID NO: 404389 - DNA, 19 bp, Homo sapiens
  siRNA target sequence for OBSCN (NM_052843.1,15943-15961).
gattatactggttcaaaga

SEQ ID NO: 404390 - DNA, 19 bp, Homo sapiens
  siRNA target sequence for OBSCN (NM_052843.1,16057-16075).
gccagtatgcagcctatat

SEQ ID NO: 404391 - DNA, 19 bp, Homo sapiens
  siRNA target sequence for OBSCN (NM_052843.1,16059-16077).
cagtatgcagcctatatca

SEQ ID NO: 404392 - DNA, 19 bp, Homo sapiens
  siRNA target sequence for OBSCN (NM_052843.1,16196-16214).
gaggttcacccccaagaaa

SEQ ID NO: 404393 - DNA, 19 bp, Homo sapiens
  siRNA target sequence for OBSCN (NM_052843.1,16861-16879).
cccgaggcgagatctttga

SEQ ID NO: 404394 - DNA, 19 bp, Homo sapiens
  siRNA target sequence for OBSCN (NM_052843.1,16864-16882).
gaggcgagatctttgacat

SEQ ID NO: 404395 - DNA, 19 bp, Homo sapiens
  siRNA target sequence for OBSCN (NM_052843.1,16867-16885).
gcgagatctttgacatcta

SEQ ID NO: 404396 - DNA, 19 bp, Homo sapiens
  siRNA target sequence for OBSCN (NM_052843.1,17683-17701).
cacagcgcgctgagaacaa

SEQ ID NO: 404397 - DNA, 19 bp, Homo sapiens
  siRNA target sequence for OBSCN (NM_052843.1,18027-18045).
gcacggacagccattatca

SEQ ID NO: 404398 - DNA, 19 bp, Homo sapiens
  siRNA target sequence for OBSCN (NM_052843.1,18028-18046).
cacggacagccattatcaa

SEQ ID NO: 404399 - DNA, 19 bp, Homo sapiens
  siRNA target sequence for OBSCN (NM_052843.1,18030-18048).
cggacagccattatcaaga

SEQ ID NO: 404400 - DNA, 19 bp, Homo sapiens
  siRNA target sequence for OBSCN (NM_052843.1,18391-18409).
caccacggttcgtgaacaa

SEQ ID NO: 404401 - DNA, 19 bp, Homo sapiens
  siRNA target sequence for OBSCN (NM_052843.1,18513-18531).
ctgaccactggcaacaagt

SEQ ID NO: 404402 - DNA, 19 bp, Homo sapiens
  siRNA target sequence for OBSCN (NM_052843.1,18758-18776).
caagaaaaccgtcatcata

SEQ ID NO: 404403 - DNA, 19 bp, Homo sapiens
  siRNA target sequence for OBSCN (NM_052843.1,19843-19861).
ccacccagaccgtcaactt

SEQ ID NO: 404404 - DNA, 19 bp, Homo sapiens
  siRNA target sequence for MGC20486 (NM_052844.2,442-460).
gcagagccacgcgtttgat

SEQ ID NO: 404405 - DNA, 19 bp, Homo sapiens
  siRNA target sequence for MGC20486 (NM_052844.2,620-638).
gactggagcacgcttaagt

SEQ ID NO: 404406 - DNA, 19 bp, Homo sapiens
  siRNA target sequence for MGC20486 (NM_052844.2,1130-1148).
ggcttcccgctcaagtgtt

SEQ ID NO: 404407 - DNA, 19 bp, Homo sapiens
  siRNA target sequence for MGC20486 (NM_052844.2,1266-1284).
ccttccacaggaatctctt

SEQ ID NO: 404408 - DNA, 19 bp, Homo sapiens
  siRNA target sequence for MGC20255 (NM_052848.1,380-398).
cttgacagagcatgagaaa

SEQ ID NO: 404409 - DNA, 19 bp, Homo sapiens
  siRNA target sequence for MGC20255 (NM_052848.1,1088-1106).
ggaggagaggtactttgat

SEQ ID NO: 404410 - DNA, 19 bp, Homo sapiens
  siRNA target sequence for MGC20481 (NM_052849.2,323-341).
ggatctctgggctgaaatt

SEQ ID NO: 404411 - DNA, 19 bp, Homo sapiens
  siRNA target sequence for MGC20481 (NM_052849.2,324-342).
gatctctgggctgaaattt

SEQ ID NO: 404412 - DNA, 19 bp, Homo sapiens
  siRNA target sequence for MGC20481 (NM_052849.2,396-414).
gactcctttgtggattctt

SEQ ID NO: 404413 - DNA, 19 bp, Homo sapiens
  siRNA target sequence for MGC20481 (NM_052849.2,528-546).
ctaagaagaatcaaaggtt

SEQ ID NO: 404414 - DNA, 19 bp, Homo sapiens
  siRNA target sequence for MGC20481 (NM_052849.2,588-606).
gcccaagccaagaaggaat

SEQ ID NO: 404415 - DNA, 19 bp, Homo sapiens
  siRNA target sequence for MGC20481 (NM_052849.2,672-690).
gagagcaccttggaacatt

SEQ ID NO: 404416 - DNA, 19 bp, Homo sapiens
  siRNA target sequence for MGC20481 (NM_052849.2,697-715).
ggtggctccagccagataa

SEQ ID NO: 404417 - DNA, 19 bp, Homo sapiens
  siRNA target sequence for MGC20481 (NM_052849.2,698-716).
gtggctccagccagataaa

SEQ ID NO: 404418 - DNA, 19 bp, Homo sapiens
  siRNA target sequence for ADCK2 (NM_052853.2,491-509).
gctctgttggtgaaattct

SEQ ID NO: 404419 - DNA, 19 bp, Homo sapiens
  siRNA target sequence for ADCK2 (NM_052853.2,600-618).
caggcccaacctacatcaa

SEQ ID NO: 404420 - DNA, 19 bp, Homo sapiens
  siRNA target sequence for ADCK2 (NM_052853.2,807-825).
gcgtggcccaggtgtacaa

SEQ ID NO: 404421 - DNA, 19 bp, Homo sapiens
  siRNA target sequence for ADCK2 (NM_052853.2,812-830).
gcccaggtgtacaaagcat

SEQ ID NO: 404422 - DNA, 19 bp, Homo sapiens
  siRNA target sequence for ADCK2 (NM_052853.2,813-831).
cccaggtgtacaaagcata

SEQ ID NO: 404423 - DNA, 19 bp, Homo sapiens
  siRNA target sequence for ADCK2 (NM_052853.2,926-944).
ctgagagagctctttggat

SEQ ID NO: 404424 - DNA, 19 bp, Homo sapiens
  siRNA target sequence for ADCK2 (NM_052853.2,957-975).
gccggaaacctccagaaaa

SEQ ID NO: 404425 - DNA, 19 bp, Homo sapiens
  siRNA target sequence for ADCK2 (NM_052853.2,979-997).
cgcagaccagtcgtttcta

SEQ ID NO: 404426 - DNA, 19 bp, Homo sapiens
  siRNA target sequence for ADCK2 (NM_052853.2,983-1001).
gaccagtcgtttctagaaa

SEQ ID NO: 404427 - DNA, 19 bp, Homo sapiens
  siRNA target sequence for ADCK2 (NM_052853.2,1243-1261).
gctgatggtccaacagatt

SEQ ID NO: 404428 - DNA, 19 bp, Homo sapiens
  siRNA target sequence for ADCK2 (NM_052853.2,1258-1276).
gattgacctgcgttacgaa

SEQ ID NO: 404429 - DNA, 19 bp, Homo sapiens
  siRNA target sequence for ADCK2 (NM_052853.2,1267-1285).
gcgttacgaagctcagaat

SEQ ID NO: 404430 - DNA, 19 bp, Homo sapiens
  siRNA target sequence for ADCK2 (NM_052853.2,1273-1291).
cgaagctcagaatctagaa

SEQ ID NO: 404431 - DNA, 19 bp, Homo sapiens
  siRNA target sequence for ADCK2 (NM_052853.2,1301-1319).
gtcaacttccggaatgtga

SEQ ID NO: 404432 - DNA, 19 bp, Homo sapiens
  siRNA target sequence for ADCK2 (NM_052853.2,1432-1450).
ggacttgaaaaggaagatt

SEQ ID NO: 404433 - DNA, 19 bp, Homo sapiens
  siRNA target sequence for ADCK2 (NM_052853.2,1451-1469).
gcacggctggggatcaaca

SEQ ID NO: 404434 - DNA, 19 bp, Homo sapiens
  siRNA target sequence for ADCK2 (NM_052853.2,1452-1470).
cacggctggggatcaacat

SEQ ID NO: 404435 - DNA, 19 bp, Homo sapiens
  siRNA target sequence for ADCK2 (NM_052853.2,1789-1807).
ggacgtggaggggttcaaa

SEQ ID NO: 404436 - DNA, 19 bp, Homo sapiens
  siRNA target sequence for ADCK2 (NM_052853.2,1790-1808).
gacgtggaggggttcaaaa

SEQ ID NO: 404437 - DNA, 19 bp, Homo sapiens
  siRNA target sequence for ADCK2 (NM_052853.2,1909-1927).
gactcacaaggtaaagctt

SEQ ID NO: 404438 - DNA, 19 bp, Homo sapiens
  siRNA target sequence for MGC15396 (NM_052855.2,373-391).
caacggctggacttgttta

SEQ ID NO: 404439 - DNA, 19 bp, Homo sapiens
  siRNA target sequence for MGC15396 (NM_052855.2,377-395).
ggctggacttgtttacact

SEQ ID NO: 404440 - DNA, 19 bp, Homo sapiens
  siRNA target sequence for MGC15396 (NM_052855.2,397-415).
ggcatgtaaacgaaaccat

SEQ ID NO: 404441 - DNA, 19 bp, Homo sapiens
  siRNA target sequence for MGC15396 (NM_052855.2,422-440).
gtggtctcttacctgttaa

SEQ ID NO: 404442 - DNA, 19 bp, Homo sapiens
  siRNA target sequence for MGC15396 (NM_052855.2,427-445).
ctcttacctgttaaaatca

SEQ ID NO: 404443 - DNA, 19 bp, Homo sapiens
  siRNA target sequence for MGC15396 (NM_052855.2,479-497).
gaaatgccagtccagttaa

SEQ ID NO: 404444 - DNA, 19 bp, Homo sapiens
  siRNA target sequence for MGC15396 (NM_052855.2,484-502).
gccagtccagttaacatca

SEQ ID NO: 404445 - DNA, 19 bp, Homo sapiens
  siRNA target sequence for MGC15396 (NM_052855.2,485-503).
ccagtccagttaacatcaa

SEQ ID NO: 404446 - DNA, 19 bp, Homo sapiens
  siRNA target sequence for MGC15396 (NM_052855.2,786-804).
cctctttggcactagttca

SEQ ID NO: 404447 - DNA, 19 bp, Homo sapiens
  siRNA target sequence for MGC15396 (NM_052855.2,789-807).
ctttggcactagttcagaa

SEQ ID NO: 404448 - DNA, 19 bp, Homo sapiens
  siRNA target sequence for MGC15396 (NM_052855.2,1059-1077).
ctcttcgagaaaatgattt

SEQ ID NO: 404449 - DNA, 19 bp, Homo sapiens
  siRNA target sequence for MGC15396 (NM_052855.2,1061-1079).
cttcgagaaaatgatttca

SEQ ID NO: 404450 - DNA, 19 bp, Homo sapiens
  siRNA target sequence for MGC15396 (NM_052855.2,1137-1155).
gctgtgagctgggtgttaa

SEQ ID NO: 404451 - DNA, 19 bp, Homo sapiens
  siRNA target sequence for MGC15396 (NM_052855.2,1183-1201).
gttacccaatactctgtta

SEQ ID NO: 404452 - DNA, 19 bp, Homo sapiens
  siRNA target sequence for MGC15396 (NM_052855.2,1310-1328).
gaaaggccttgctataaca

SEQ ID NO: 404453 - DNA, 19 bp, Homo sapiens
  siRNA target sequence for MGC15396 (NM_052855.2,1334-1352).
gcttcaaaactgacttact

SEQ ID NO: 404454 - DNA, 19 bp, Homo sapiens
  siRNA target sequence for MGC20398 (NM_052857.1,81-99).
cagtcggaaacggatagaa

SEQ ID NO: 404455 - DNA, 19 bp, Homo sapiens
  siRNA target sequence for MGC20398 (NM_052857.1,101-119).
ctccattcgcgaagtacaa

SEQ ID NO: 404456 - DNA, 19 bp, Homo sapiens
  siRNA target sequence for MGC20398 (NM_052857.1,305-323).
cagacgaccaagatgtcaa

SEQ ID NO: 404457 - DNA, 19 bp, Homo sapiens
  siRNA target sequence for MGC20398 (NM_052857.1,590-608).
gtgtgctgccaaacgattt

SEQ ID NO: 404458 - DNA, 19 bp, Homo sapiens
  siRNA target sequence for MGC20398 (NM_052857.1,592-610).
gtgctgccaaacgatttct

SEQ ID NO: 404459 - DNA, 19 bp, Homo sapiens
  siRNA target sequence for MGC20398 (NM_052857.1,594-612).
gctgccaaacgatttcttt

SEQ ID NO: 404460 - DNA, 19 bp, Homo sapiens
  siRNA target sequence for MGC20398 (NM_052857.1,595-613).
ctgccaaacgatttcttta

SEQ ID NO: 404461 - DNA, 19 bp, Homo sapiens
  siRNA target sequence for MGC20398 (NM_052857.1,597-615).
gccaaacgatttctttagt

SEQ ID NO: 404462 - DNA, 19 bp, Homo sapiens
  siRNA target sequence for MGC20398 (NM_052857.1,598-616).
ccaaacgatttctttagta

SEQ ID NO: 404463 - DNA, 19 bp, Homo sapiens
  siRNA target sequence for MGC20398 (NM_052857.1,644-662).
ctcattcagggtcaattga

SEQ ID NO: 404464 - DNA, 19 bp, Homo sapiens
  siRNA target sequence for MGC20398 (NM_052857.1,656-674).
caattgagaaagcagaaat

SEQ ID NO: 404465 - DNA, 19 bp, Homo sapiens
  siRNA target sequence for MGC20398 (NM_052857.1,715-733).
gcgttaccggaaggttttt

SEQ ID NO: 404466 - DNA, 19 bp, Homo sapiens
  siRNA target sequence for MGC20398 (NM_052857.1,716-734).
cgttaccggaaggtttttt

SEQ ID NO: 404467 - DNA, 19 bp, Homo sapiens
  siRNA target sequence for MGC20398 (NM_052857.1,799-817).
gagtgggacgaattccaaa

SEQ ID NO: 404468 - DNA, 19 bp, Homo sapiens
  siRNA target sequence for MGC20398 (NM_052857.1,801-819).
gtgggacgaattccaaaaa

SEQ ID NO: 404469 - DNA, 19 bp, Homo sapiens
  siRNA target sequence for MGC20398 (NM_052857.1,825-843).
gaggcaggtcaacactatt

SEQ ID NO: 404470 - DNA, 19 bp, Homo sapiens
  siRNA target sequence for MGC20398 (NM_052857.1,923-941).
gttaccgacgggtggaaaa

SEQ ID NO: 404471 - DNA, 19 bp, Homo sapiens
  siRNA target sequence for MGC20398 (NM_052857.1,927-945).
ccgacgggtggaaaagcta

SEQ ID NO: 404472 - DNA, 19 bp, Homo sapiens
  siRNA target sequence for MGC20398 (NM_052857.1,946-964).
cggaatcgccaggatgaaa

SEQ ID NO: 404473 - DNA, 19 bp, Homo sapiens
  siRNA target sequence for MGC20398 (NM_052857.1,947-965).
ggaatcgccaggatgaaat

SEQ ID NO: 404474 - DNA, 19 bp, Homo sapiens
  siRNA target sequence for MGC20398 (NM_052857.1,948-966).
gaatcgccaggatgaaata

SEQ ID NO: 404475 - DNA, 19 bp, Homo sapiens
  siRNA target sequence for MGC20398 (NM_052857.1,1045-1063).
ggggaactacaggatttgt

SEQ ID NO: 404476 - DNA, 19 bp, Homo sapiens
  siRNA target sequence for MGC20398 (NM_052857.1,1046-1064).
gggaactacaggatttgtt

SEQ ID NO: 404477 - DNA, 19 bp, Homo sapiens
  siRNA target sequence for MGC20398 (NM_052857.1,1080-1098).
ggtgaaaggggcattgtta

SEQ ID NO: 404478 - DNA, 19 bp, Homo sapiens
  siRNA target sequence for MGC21675 (NM_052861.1,652-670).
gcgtgggacaacctagtat

SEQ ID NO: 404479 - DNA, 19 bp, Homo sapiens
  siRNA target sequence for MGC21675 (NM_052861.1,653-671).
cgtgggacaacctagtatt

SEQ ID NO: 404480 - DNA, 19 bp, Homo sapiens
  siRNA target sequence for MGC21675 (NM_052861.1,664-682).
ctagtattgggggaaaact

SEQ ID NO: 404481 - DNA, 19 bp, Homo sapiens
  siRNA target sequence for MGC21854 (NM_052862.2,436-454).
ggagacaccagccagtaaa

SEQ ID NO: 404482 - DNA, 19 bp, Homo sapiens
  siRNA target sequence for MGC21854 (NM_052862.2,515-533).
cagaatggtgaggagaaat

SEQ ID NO: 404483 - DNA, 19 bp, Homo sapiens
  siRNA target sequence for MGC21854 (NM_052862.2,571-589).
caagagctcgcctctgatt

SEQ ID NO: 404484 - DNA, 19 bp, Homo sapiens
  siRNA target sequence for MGC21854 (NM_052862.2,592-610).
gaagcttcaggccaattta

SEQ ID NO: 404485 - DNA, 19 bp, Homo sapiens
  siRNA target sequence for MGC21854 (NM_052862.2,596-614).
cttcaggccaatttaacct

SEQ ID NO: 404486 - DNA, 19 bp, Homo sapiens
  siRNA target sequence for MGC21854 (NM_052862.2,669-687).
ctatggtgtcgccatttca

SEQ ID NO: 404487 - DNA, 19 bp, Homo sapiens
  siRNA target sequence for MGC21854 (NM_052862.2,808-826).
gcggacgaggggctcaata

SEQ ID NO: 404488 - DNA, 19 bp, Homo sapiens
  siRNA target sequence for MGC21854 (NM_052862.2,809-827).
cggacgaggggctcaataa

SEQ ID NO: 404489 - DNA, 19 bp, Homo sapiens
  siRNA target sequence for MGC21854 (NM_052862.2,811-829).
gacgaggggctcaataaaa

SEQ ID NO: 404490 - DNA, 19 bp, Homo sapiens
  siRNA target sequence for MGC21854 (NM_052862.2,913-931).
gcagaacggtgctaaggaa

SEQ ID NO: 404491 - DNA, 19 bp, Homo sapiens
  siRNA target sequence for MGC21854 (NM_052862.2,1020-1038).
ccctgggacctgctgaaaa

SEQ ID NO: 404492 - DNA, 19 bp, Homo sapiens
  siRNA target sequence for T2BP (NM_052864.2,330-348).
ccagatgacggtttaccat

SEQ ID NO: 404493 - DNA, 19 bp, Homo sapiens
  siRNA target sequence for T2BP (NM_052864.2,354-372).
ccagttgcagtgtggaata

SEQ ID NO: 404494 - DNA, 19 bp, Homo sapiens
  siRNA target sequence for T2BP (NM_052864.2,376-394).
cagtcaataagttttaaca

SEQ ID NO: 404495 - DNA, 19 bp, Homo sapiens
  siRNA target sequence for T2BP (NM_052864.2,378-396).
gtcaataagttttaacaga

SEQ ID NO: 404496 - DNA, 19 bp, Homo sapiens
  siRNA target sequence for T2BP (NM_052864.2,410-428).
ccagcgaagtggtgaaatt

SEQ ID NO: 404497 - DNA, 19 bp, Homo sapiens
  siRNA target sequence for T2BP (NM_052864.2,411-429).
cagcgaagtggtgaaattt

SEQ ID NO: 404498 - DNA, 19 bp, Homo sapiens
  siRNA target sequence for T2BP (NM_052864.2,430-448).
ggccgaaattccaacatct

SEQ ID NO: 404499 - DNA, 19 bp, Homo sapiens
  siRNA target sequence for T2BP (NM_052864.2,441-459).
caacatctgtcattatact

SEQ ID NO: 404500 - DNA, 19 bp, Homo sapiens
  siRNA target sequence for T2BP (NM_052864.2,474-492).
ggtttcccgagttcagttt

SEQ ID NO: 404501 - DNA, 19 bp, Homo sapiens
  siRNA target sequence for T2BP (NM_052864.2,475-493).
gtttcccgagttcagtttt

SEQ ID NO: 404502 - DNA, 19 bp, Homo sapiens
  siRNA target sequence for T2BP (NM_052864.2,554-572).
gtaaaaagaccaatctgat

SEQ ID NO: 404503 - DNA, 19 bp, Homo sapiens
  siRNA target sequence for T2BP (NM_052864.2,584-602).
gagagctgggctacctaaa

SEQ ID NO: 404504 - DNA, 19 bp, Homo sapiens
  siRNA target sequence for T2BP (NM_052864.2,593-611).
gctacctaaataaaatgga

SEQ ID NO: 404505 - DNA, 19 bp, Homo sapiens
  siRNA target sequence for T2BP (NM_052864.2,630-648).
ggtcagattcggagagtat

SEQ ID NO: 404506 - DNA, 19 bp, Homo sapiens
  siRNA target sequence for T2BP (NM_052864.2,635-653).
gattcggagagtatcagtt

SEQ ID NO: 404507 - DNA, 19 bp, Homo sapiens
  siRNA target sequence for T2BP (NM_052864.2,670-688).
gatggcgagtcattggaat

SEQ ID NO: 404508 - DNA, 19 bp, Homo sapiens
  siRNA target sequence for T2BP (NM_052864.2,673-691).
ggcgagtcattggaatttt

SEQ ID NO: 404509 - DNA, 19 bp, Homo sapiens
  siRNA target sequence for T2BP (NM_052864.2,675-693).
cgagtcattggaatttttt

SEQ ID NO: 404510 - DNA, 19 bp, Homo sapiens
  siRNA target sequence for T2BP (NM_052864.2,763-781).
ccggagtatggcacttatt

SEQ ID NO: 404511 - DNA, 19 bp, Homo sapiens
  siRNA target sequence for T2BP (NM_052864.2,808-826).
ccgacagaaatggatgaaa

SEQ ID NO: 404512 - DNA, 19 bp, Homo sapiens
  siRNA target sequence for T2BP (NM_052864.2,809-827).
cgacagaaatggatgaaaa

SEQ ID NO: 404513 - DNA, 19 bp, Homo sapiens
  siRNA target sequence for C20orf72 (NM_052865.2,152-170).
gcccttgtggctttctcta

SEQ ID NO: 404514 - DNA, 19 bp, Homo sapiens
  siRNA target sequence for C20orf72 (NM_052865.2,188-206).
ggccggaagaaaaaagtga

SEQ ID NO: 404515 - DNA, 19 bp, Homo sapiens
  siRNA target sequence for C20orf72 (NM_052865.2,223-241).
ggaccaagaaaaatactct

SEQ ID NO: 404516 - DNA, 19 bp, Homo sapiens
  siRNA target sequence for C20orf72 (NM_052865.2,321-339).
gacccgtgagcaagcataa

SEQ ID NO: 404517 - DNA, 19 bp, Homo sapiens
  siRNA target sequence for C20orf72 (NM_052865.2,324-342).
ccgtgagcaagcataagct

SEQ ID NO: 404518 - DNA, 19 bp, Homo sapiens
  siRNA target sequence for C20orf72 (NM_052865.2,334-352).
gcataagctgccaaaccaa

SEQ ID NO: 404519 - DNA, 19 bp, Homo sapiens
  siRNA target sequence for C20orf72 (NM_052865.2,371-389).
ccacaaaactggtttccta

SEQ ID NO: 404520 - DNA, 19 bp, Homo sapiens
  siRNA target sequence for C20orf72 (NM_052865.2,401-419).
gagagaagtgataaaccaa

SEQ ID NO: 404521 - DNA, 19 bp, Homo sapiens
  siRNA target sequence for C20orf72 (NM_052865.2,537-555).
ggaaacagcggatgattct

SEQ ID NO: 404522 - DNA, 19 bp, Homo sapiens
  siRNA target sequence for C20orf72 (NM_052865.2,572-590).
ggctttaaagaatacactt

SEQ ID NO: 404523 - DNA, 19 bp, Homo sapiens
  siRNA target sequence for C20orf72 (NM_052865.2,626-644).
gccttggaaagcatacttt

SEQ ID NO: 404524 - DNA, 19 bp, Homo sapiens
  siRNA target sequence for C20orf72 (NM_052865.2,685-703).
caagtctggttacattgaa

SEQ ID NO: 404525 - DNA, 19 bp, Homo sapiens
  siRNA target sequence for C20orf72 (NM_052865.2,688-706).
gtctggttacattgaaagt

SEQ ID NO: 404526 - DNA, 19 bp, Homo sapiens
  siRNA target sequence for C20orf72 (NM_052865.2,761-779).
caacatgaaaccttaaact

SEQ ID NO: 404527 - DNA, 19 bp, Homo sapiens
  siRNA target sequence for C20orf72 (NM_052865.2,816-834).
gcaagctctgtgtgattga

SEQ ID NO: 404528 - DNA, 19 bp, Homo sapiens
  siRNA target sequence for C20orf72 (NM_052865.2,817-835).
caagctctgtgtgattgat

SEQ ID NO: 404529 - DNA, 19 bp, Homo sapiens
  siRNA target sequence for C20orf72 (NM_052865.2,915-933).
ccatgaaccatgataccaa

SEQ ID NO: 404530 - DNA, 19 bp, Homo sapiens
  siRNA target sequence for C20orf72 (NM_052865.2,946-964).
ggttcaatgtggcttaatt

SEQ ID NO: 404531 - DNA, 19 bp, Homo sapiens
  siRNA target sequence for C20orf72 (NM_052865.2,989-1007).
cctgcccacccacatttca

SEQ ID NO: 404532 - DNA, 19 bp, Homo sapiens
  siRNA target sequence for C20orf72 (NM_052865.2,990-1008).
ctgcccacccacatttcat

SEQ ID NO: 404533 - DNA, 19 bp, Homo sapiens
  siRNA target sequence for C20orf72 (NM_052865.2,1042-1060).
gtggcttcttcgactagaa

SEQ ID NO: 404534 - DNA, 19 bp, Homo sapiens
  siRNA target sequence for C20orf72 (NM_052865.2,1049-1067).
cttcgactagaagaatata

SEQ ID NO: 404535 - DNA, 19 bp, Homo sapiens
  siRNA target sequence for ADAMTSL1 (NM_052866.2,337-355).
gcaatgctcagctcataat

SEQ ID NO: 404536 - DNA, 19 bp, Homo sapiens
  siRNA target sequence for ADAMTSL1 (NM_052866.2,342-360).
gctcagctcataatgatgt

SEQ ID NO: 404537 - DNA, 19 bp, Homo sapiens
  siRNA target sequence for ADAMTSL1 (NM_052866.2,406-424).
ccctgacaacccatgttca

SEQ ID NO: 404538 - DNA, 19 bp, Homo sapiens
  siRNA target sequence for ADAMTSL1 (NM_052866.2,444-462).
gaacaaccctggttgttga

SEQ ID NO: 404539 - DNA, 19 bp, Homo sapiens
  siRNA target sequence for ADAMTSL1 (NM_052866.2,447-465).
caaccctggttgttgaact

SEQ ID NO: 404540 - DNA, 19 bp, Homo sapiens
  siRNA target sequence for ADAMTSL1 (NM_052866.2,482-500).
gatggtacgcgttgctata

SEQ ID NO: 404541 - DNA, 19 bp, Homo sapiens
  siRNA target sequence for ADAMTSL1 (NM_052866.2,486-504).
gtacgcgttgctatacaga

SEQ ID NO: 404542 - DNA, 19 bp, Homo sapiens
  siRNA target sequence for ADAMTSL1 (NM_052866.2,490-508).
gcgttgctatacagaatct

SEQ ID NO: 404543 - DNA, 19 bp, Homo sapiens
  siRNA target sequence for ADAMTSL1 (NM_052866.2,491-509).
cgttgctatacagaatctt

SEQ ID NO: 404544 - DNA, 19 bp, Homo sapiens
  siRNA target sequence for ADAMTSL1 (NM_052866.2,567-585).
gcaccgtcaaggaagataa

SEQ ID NO: 404545 - DNA, 19 bp, Homo sapiens
  siRNA target sequence for ADAMTSL1 (NM_052866.2,623-641).
ctggtccgagggcagtata

SEQ ID NO: 404546 - DNA, 19 bp, Homo sapiens
  siRNA target sequence for ADAMTSL1 (NM_052866.2,625-643).
ggtccgagggcagtataaa

SEQ ID NO: 404547 - DNA, 19 bp, Homo sapiens
  siRNA target sequence for ADAMTSL1 (NM_052866.2,626-644).
gtccgagggcagtataaat

SEQ ID NO: 404548 - DNA, 19 bp, Homo sapiens
  siRNA target sequence for ADAMTSL1 (NM_052866.2,656-674).
gcaaccaaatcggatgata

SEQ ID NO: 404549 - DNA, 19 bp, Homo sapiens
  siRNA target sequence for ADAMTSL1 (NM_052866.2,660-678).
ccaaatcggatgatactgt

SEQ ID NO: 404550 - DNA, 19 bp, Homo sapiens
  siRNA target sequence for ADAMTSL1 (NM_052866.2,691-709).
ctatggaagtagacatatt

SEQ ID NO: 404551 - DNA, 19 bp, Homo sapiens
  siRNA target sequence for ADAMTSL1 (NM_052866.2,704-722).
catattcgccttgtcttaa

SEQ ID NO: 404552 - DNA, 19 bp, Homo sapiens
  siRNA target sequence for ADAMTSL1 (NM_052866.2,726-744).
gtcctgatcacttatatct

SEQ ID NO: 404553 - DNA, 19 bp, Homo sapiens
  siRNA target sequence for ADAMTSL1 (NM_052866.2,805-823).
ccttgtggacaattctagt

SEQ ID NO: 404554 - DNA, 19 bp, Homo sapiens
  siRNA target sequence for ADAMTSL1 (NM_052866.2,931-949).
ccagttcatcttctatcaa

SEQ ID NO: 404555 - DNA, 19 bp, Homo sapiens
  siRNA target sequence for ADAMTSL1 (NM_052866.2,1056-1074).
gtgtggttgctgaccaata

SEQ ID NO: 404556 - DNA, 19 bp, Homo sapiens
  siRNA target sequence for ADAMTSL1 (NM_052866.2,1058-1076).
gtggttgctgaccaatact

SEQ ID NO: 404557 - DNA, 19 bp, Homo sapiens
  siRNA target sequence for ADAMTSL1 (NM_052866.2,1060-1078).
ggttgctgaccaatactgt

SEQ ID NO: 404558 - DNA, 19 bp, Homo sapiens
  siRNA target sequence for ADAMTSL1 (NM_052866.2,1067-1085).
gaccaatactgtcactatt

SEQ ID NO: 404559 - DNA, 19 bp, Homo sapiens
  siRNA target sequence for ADAMTSL1 (NM_052866.2,1143-1161).
cagccagtgacggatacaa

SEQ ID NO: 404560 - DNA, 19 bp, Homo sapiens
  siRNA target sequence for ADAMTSL1 (NM_052866.2,1323-1341).
gcatgtacacccctaagat

SEQ ID NO: 404561 - DNA, 19 bp, Homo sapiens
  siRNA target sequence for ADAMTSL1 (NM_052866.2,1348-1366).
cgcgcagccctgcaacatt

SEQ ID NO: 404562 - DNA, 19 bp, Homo sapiens
  siRNA target sequence for ADAMTSL1 (NM_052866.2,1349-1367).
gcgcagccctgcaacattt

SEQ ID NO: 404563 - DNA, 19 bp, Homo sapiens
  siRNA target sequence for ADAMTSL1 (NM_052866.2,1350-1368).
cgcagccctgcaacatttt

SEQ ID NO: 404564 - DNA, 19 bp, Homo sapiens
  siRNA target sequence for ADAMTSL1 (NM_052866.2,1526-1544).
gtacccactccctgctata

SEQ ID NO: 404565 - DNA, 19 bp, Homo sapiens
  siRNA target sequence for MGC16028 (NM_052873.1,120-138).
ggcaagaattcctctttga

SEQ ID NO: 404566 - DNA, 19 bp, Homo sapiens
  siRNA target sequence for MGC16028 (NM_052873.1,248-266).
ggatctgaacgcatgctat

SEQ ID NO: 404567 - DNA, 19 bp, Homo sapiens
  siRNA target sequence for MGC16028 (NM_052873.1,252-270).
ctgaacgcatgctatcaca

SEQ ID NO: 404568 - DNA, 19 bp, Homo sapiens
  siRNA target sequence for MGC16028 (NM_052873.1,469-487).
gggagatcgacctgaaact

SEQ ID NO: 404569 - DNA, 19 bp, Homo sapiens
  siRNA target sequence for STX1B2 (NM_052874.1,80-98).
ctgcggagtgcgaaagaca

SEQ ID NO: 404570 - DNA, 19 bp, Homo sapiens
  siRNA target sequence for STX1B2 (NM_052874.1,319-337).
ggttcggtccaaattgaaa

SEQ ID NO: 404571 - DNA, 19 bp, Homo sapiens
  siRNA target sequence for STX1B2 (NM_052874.1,440-458).
gaggtaatgaccgaatata

SEQ ID NO: 404572 - DNA, 19 bp, Homo sapiens
  siRNA target sequence for STX1B2 (NM_052874.1,683-701).
cgcgagctgcacgatatgt

SEQ ID NO: 404573 - DNA, 19 bp, Homo sapiens
  siRNA target sequence for STX1B2 (NM_052874.1,684-702).
gcgagctgcacgatatgtt

SEQ ID NO: 404574 - DNA, 19 bp, Homo sapiens
  siRNA target sequence for STX1B2 (NM_052874.1,685-703).
cgagctgcacgatatgttt

SEQ ID NO: 404575 - DNA, 19 bp, Homo sapiens
  siRNA target sequence for STX1B2 (NM_052874.1,755-773).
gagtacaacgtggaacatt

SEQ ID NO: 404576 - DNA, 19 bp, Homo sapiens
  siRNA target sequence for STX1B2 (NM_052874.1,757-775).
gtacaacgtggaacattct

SEQ ID NO: 404577 - DNA, 19 bp, Homo sapiens
  siRNA target sequence for STX1B2 (NM_052874.1,807-825).
ccaagaaagcagtgaaata

SEQ ID NO: 404578 - DNA, 19 bp, Homo sapiens
  siRNA target sequence for STX1B2 (NM_052874.1,886-904).
ggtcttggcgtcatccatt

SEQ ID NO: 404579 - DNA, 19 bp, Homo sapiens
  siRNA target sequence for MED8 (NM_052877.1,272-290).
ggacgggtgcctgttttca

SEQ ID NO: 404580 - DNA, 19 bp, Homo sapiens
  siRNA target sequence for MED8 (NM_052877.1,412-430).
gagcttgaataaaatgtgt

SEQ ID NO: 404581 - DNA, 19 bp, Homo sapiens
  siRNA target sequence for MED8 (NM_052877.1,432-450).
caaaccttctggagaaaat

SEQ ID NO: 404582 - DNA, 19 bp, Homo sapiens
  siRNA target sequence for MED8 (NM_052877.1,454-472).
caaagaggagcgagaatca

SEQ ID NO: 404583 - DNA, 19 bp, Homo sapiens
  siRNA target sequence for MED8 (NM_052877.1,491-509).
ccgaacaagcagaccttta

SEQ ID NO: 404584 - DNA, 19 bp, Homo sapiens
  siRNA target sequence for MED8 (NM_052877.1,492-510).
cgaacaagcagacctttaa

SEQ ID NO: 404585 - DNA, 19 bp, Homo sapiens
  siRNA target sequence for MED8 (NM_052877.1,796-814).
ctcctgcctgggtttcatt

SEQ ID NO: 404586 - DNA, 19 bp, Homo sapiens
  siRNA target sequence for MED8 (NM_052877.1,798-816).
cctgcctgggtttcattct

SEQ ID NO: 404587 - DNA, 19 bp, Homo sapiens
  siRNA target sequence for MGC17330 (NM_052880.2,463-481).
ccagccttcacgacagaaa

SEQ ID NO: 404588 - DNA, 19 bp, Homo sapiens
  siRNA target sequence for MGC17330 (NM_052880.2,744-762).
gcatgatcagaaagtatgt

SEQ ID NO: 404589 - DNA, 19 bp, Homo sapiens
  siRNA target sequence for MGC17330 (NM_052880.2,768-786).
ggagatgcagcgaatcact

SEQ ID NO: 404590 - DNA, 19 bp, Homo sapiens
  siRNA target sequence for LOC114659 (NM_052888.1,39-57).
cgtggcaactattgtcttt

SEQ ID NO: 404591 - DNA, 19 bp, Homo sapiens
  siRNA target sequence for LOC114659 (NM_052888.1,40-58).
gtggcaactattgtcttta

SEQ ID NO: 404592 - DNA, 19 bp, Homo sapiens
  siRNA target sequence for LOC114659 (NM_052888.1,42-60).
ggcaactattgtctttact

SEQ ID NO: 404593 - DNA, 19 bp, Homo sapiens
  siRNA target sequence for LOC114659 (NM_052888.1,43-61).
gcaactattgtctttacta

SEQ ID NO: 404594 - DNA, 19 bp, Homo sapiens
  siRNA target sequence for LOC114659 (NM_052888.1,280-298).
gctccattcctgaaggaat

SEQ ID NO: 404595 - DNA, 19 bp, Homo sapiens
  siRNA target sequence for LOC114659 (NM_052888.1,343-361).
gctgcacatcaggacttaa

SEQ ID NO: 404596 - DNA, 19 bp, Homo sapiens
  siRNA target sequence for LOC114659 (NM_052888.1,349-367).
catcaggacttaaatgaca

SEQ ID NO: 404597 - DNA, 19 bp, Homo sapiens
  siRNA target sequence for LOC114659 (NM_052888.1,448-466).
cgcctcaagtgggttcaaa

SEQ ID NO: 404598 - DNA, 19 bp, Homo sapiens
  siRNA target sequence for LOC114659 (NM_052888.1,450-468).
cctcaagtgggttcaaact

SEQ ID NO: 404599 - DNA, 19 bp, Homo sapiens
  siRNA target sequence for LOC114659 (NM_052888.1,451-469).
ctcaagtgggttcaaacta

SEQ ID NO: 404600 - DNA, 19 bp, Homo sapiens
  siRNA target sequence for LOC114659 (NM_052888.1,453-471).
caagtgggttcaaactaca

SEQ ID NO: 404601 - DNA, 19 bp, Homo sapiens
  siRNA target sequence for LOC114659 (NM_052888.1,517-535).
ccactagacagtaaggttt

SEQ ID NO: 404602 - DNA, 19 bp, Homo sapiens
  siRNA target sequence for LOC114659 (NM_052888.1,536-554).
caagaccaaccaaatttgt

SEQ ID NO: 404603 - DNA, 19 bp, Homo sapiens
  siRNA target sequence for LOC114659 (NM_052888.1,657-675).
gactttgccagatgattat

SEQ ID NO: 404604 - DNA, 19 bp, Homo sapiens
  siRNA target sequence for LOC114659 (NM_052888.1,1011-1029).
gcccaagtttacagtcaaa

SEQ ID NO: 404605 - DNA, 19 bp, Homo sapiens
  siRNA target sequence for LOC114659 (NM_052888.1,1122-1140).
ggaggcggaaccttcttct

SEQ ID NO: 404606 - DNA, 19 bp, Homo sapiens
  siRNA target sequence for LOC114659 (NM_052888.1,1123-1141).
gaggcggaaccttcttcta

SEQ ID NO: 404607 - DNA, 19 bp, Homo sapiens
  siRNA target sequence for LOC114659 (NM_052888.1,1125-1143).
ggcggaaccttcttctaca

SEQ ID NO: 404608 - DNA, 19 bp, Homo sapiens
  siRNA target sequence for LOC114659 (NM_052888.1,1463-1481).
caggtccacctacaaagtt

SEQ ID NO: 404609 - DNA, 19 bp, Homo sapiens
  siRNA target sequence for LOC114659 (NM_052888.1,1466-1484).
gtccacctacaaagttaga

SEQ ID NO: 404610 - DNA, 19 bp, Homo sapiens
  siRNA target sequence for LOC114659 (NM_052888.1,1468-1486).
ccacctacaaagttagaat

SEQ ID NO: 404611 - DNA, 19 bp, Homo sapiens
  siRNA target sequence for LOC114659 (NM_052888.1,1483-1501).
gaatcttcgcaggattcat

SEQ ID NO: 404612 - DNA, 19 bp, Homo sapiens
  siRNA target sequence for LOC114659 (NM_052888.1,1897-1915).
ctgggctgcaatttaatta

SEQ ID NO: 404613 - DNA, 19 bp, Homo sapiens
  siRNA target sequence for LOC114659 (NM_052888.1,1899-1917).
gggctgcaatttaattaca

SEQ ID NO: 404614 - DNA, 19 bp, Homo sapiens
  siRNA target sequence for LOC114659 (NM_052888.1,2023-2041).
gaactgccggcattaaaat

SEQ ID NO: 404615 - DNA, 19 bp, Homo sapiens
  siRNA target sequence for LOC114659 (NM_052888.1,2811-2829).
caaagacaacccatcaata

SEQ ID NO: 404616 - DNA, 19 bp, Homo sapiens
  siRNA target sequence for CSMD2 (NM_052896.2,56-74).
ccctagatggcaagttcaa

SEQ ID NO: 404617 - DNA, 19 bp, Homo sapiens
  siRNA target sequence for CSMD2 (NM_052896.2,57-75).
cctagatggcaagttcaaa

SEQ ID NO: 404618 - DNA, 19 bp, Homo sapiens
  siRNA target sequence for CSMD2 (NM_052896.2,685-703).
cctcggagtaccataacaa

SEQ ID NO: 404619 - DNA, 19 bp, Homo sapiens
  siRNA target sequence for CSMD2 (NM_052896.2,686-704).
ctcggagtaccataacaat

SEQ ID NO: 404620 - DNA, 19 bp, Homo sapiens
  siRNA target sequence for CSMD2 (NM_052896.2,750-768).
gccctggtgtttattgact

SEQ ID NO: 404621 - DNA, 19 bp, Homo sapiens
  siRNA target sequence for CSMD2 (NM_052896.2,931-949).
cccaataccaagtcaagaa

SEQ ID NO: 404622 - DNA, 19 bp, Homo sapiens
  siRNA target sequence for CSMD2 (NM_052896.2,1004-1022).
ccagaagacgtctgtgtta

SEQ ID NO: 404623 - DNA, 19 bp, Homo sapiens
  siRNA target sequence for CSMD2 (NM_052896.2,1007-1025).
gaagacgtctgtgttaact

SEQ ID NO: 404624 - DNA, 19 bp, Homo sapiens
  siRNA target sequence for CSMD2 (NM_052896.2,1040-1058).
ccaaggacataatatgtgt

SEQ ID NO: 404625 - DNA, 19 bp, Homo sapiens
  siRNA target sequence for CSMD2 (NM_052896.2,1075-1093).
ccgaaaggggcaaaagact

SEQ ID NO: 404626 - DNA, 19 bp, Homo sapiens
  siRNA target sequence for CSMD2 (NM_052896.2,1076-1094).
cgaaaggggcaaaagacta

SEQ ID NO: 404627 - DNA, 19 bp, Homo sapiens
  siRNA target sequence for CSMD2 (NM_052896.2,1168-1186).
ggatcacctgtatgaaagt

SEQ ID NO: 404628 - DNA, 19 bp, Homo sapiens
  siRNA target sequence for CSMD2 (NM_052896.2,1294-1312).
ccattcagtatgacaacaa

SEQ ID NO: 404629 - DNA, 19 bp, Homo sapiens
  siRNA target sequence for CSMD2 (NM_052896.2,1471-1489).
catcggtcccggatctcat

SEQ ID NO: 404630 - DNA, 19 bp, Homo sapiens
  siRNA target sequence for CSMD2 (NM_052896.2,1474-1492).
cggtcccggatctcattgt

SEQ ID NO: 404631 - DNA, 19 bp, Homo sapiens
  siRNA target sequence for CSMD2 (NM_052896.2,1550-1568).
gggattcaaggcttcttat

SEQ ID NO: 404632 - DNA, 19 bp, Homo sapiens
  siRNA target sequence for CSMD2 (NM_052896.2,1552-1570).
gattcaaggcttcttatga

SEQ ID NO: 404633 - DNA, 19 bp, Homo sapiens
  siRNA target sequence for CSMD2 (NM_052896.2,1648-1666).
gtgacacactcaagtttga

SEQ ID NO: 404634 - DNA, 19 bp, Homo sapiens
  siRNA target sequence for CSMD2 (NM_052896.2,1650-1668).
gacacactcaagtttgagt

SEQ ID NO: 404635 - DNA, 19 bp, Homo sapiens
  siRNA target sequence for CSMD2 (NM_052896.2,1691-1709).
gggacagaaggcaatcaca

SEQ ID NO: 404636 - DNA, 19 bp, Homo sapiens
  siRNA target sequence for CSMD2 (NM_052896.2,1701-1719).
gcaatcacatgccaaaaga

SEQ ID NO: 404637 - DNA, 19 bp, Homo sapiens
  siRNA target sequence for CSMD2 (NM_052896.2,2059-2077).
ggggcttcaacatcacttt

SEQ ID NO: 404638 - DNA, 19 bp, Homo sapiens
  siRNA target sequence for CSMD2 (NM_052896.2,2384-2402).
gccaggctaccccatcaaa

SEQ ID NO: 404639 - DNA, 19 bp, Homo sapiens
  siRNA target sequence for CSMD2 (NM_052896.2,2385-2403).
ccaggctaccccatcaaaa

SEQ ID NO: 404640 - DNA, 19 bp, Homo sapiens
  siRNA target sequence for CSMD2 (NM_052896.2,2388-2406).
ggctaccccatcaaaatca

SEQ ID NO: 404641 - DNA, 19 bp, Homo sapiens
  siRNA target sequence for CSMD2 (NM_052896.2,2405-2423).
caccttcgacagattcaaa

SEQ ID NO: 404642 - DNA, 19 bp, Homo sapiens
  siRNA target sequence for CSMD2 (NM_052896.2,2454-2472).
cgcgatgggcggacttact

SEQ ID NO: 404643 - DNA, 19 bp, Homo sapiens
  siRNA target sequence for CSMD2 (NM_052896.2,2479-2497).
ccttgatcggggtttacca

SEQ ID NO: 404644 - DNA, 19 bp, Homo sapiens
  siRNA target sequence for CSMD2 (NM_052896.2,2591-2609).
gctccgctatgagactata

SEQ ID NO: 404645 - DNA, 19 bp, Homo sapiens
  siRNA target sequence for CSMD2 (NM_052896.2,2592-2610).
ctccgctatgagactataa

SEQ ID NO: 404646 - DNA, 19 bp, Homo sapiens
  siRNA target sequence for CSMD2 (NM_052896.2,2594-2612).
ccgctatgagactataaca

SEQ ID NO: 404647 - DNA, 19 bp, Homo sapiens
  siRNA target sequence for CSMD2 (NM_052896.2,2596-2614).
gctatgagactataacact

SEQ ID NO: 404648 - DNA, 19 bp, Homo sapiens
  siRNA target sequence for CSMD2 (NM_052896.2,2658-2676).
cagcgtcatgggaatgact

SEQ ID NO: 404649 - DNA, 19 bp, Homo sapiens
  siRNA target sequence for CSMD2 (NM_052896.2,2662-2680).
gtcatgggaatgacttcta

SEQ ID NO: 404650 - DNA, 19 bp, Homo sapiens
  siRNA target sequence for CSMD2 (NM_052896.2,2707-2725).
gtgactcgggctacacatt

SEQ ID NO: 404651 - DNA, 19 bp, Homo sapiens
  siRNA target sequence for CSMD2 (NM_052896.2,2709-2727).
gactcgggctacacattaa

SEQ ID NO: 404652 - DNA, 19 bp, Homo sapiens
  siRNA target sequence for CSMD2 (NM_052896.2,2711-2729).
ctcgggctacacattaagt

SEQ ID NO: 404653 - DNA, 19 bp, Homo sapiens
  siRNA target sequence for CSMD2 (NM_052896.2,2885-2903).
gattatcgaaacatctcat

SEQ ID NO: 404654 - DNA, 19 bp, Homo sapiens
  siRNA target sequence for CSMD2 (NM_052896.2,3063-3081).
gcccaggtccgcttcatct

SEQ ID NO: 404655 - DNA, 19 bp, Homo sapiens
  siRNA target sequence for CSMD2 (NM_052896.2,3372-3390).
cctgtgaactacaataaca

SEQ ID NO: 404656 - DNA, 19 bp, Homo sapiens
  siRNA target sequence for CSMD2 (NM_052896.2,3443-3461).
gaaagccagggcattcgaa

SEQ ID NO: 404657 - DNA, 19 bp, Homo sapiens
  siRNA target sequence for CSMD2 (NM_052896.2,3471-3489).
ggagatgtcctcaaggttt

SEQ ID NO: 404658 - DNA, 19 bp, Homo sapiens
  siRNA target sequence for CSMD2 (NM_052896.2,3486-3504).
gtttatgatggcaacaaca

SEQ ID NO: 404659 - DNA, 19 bp, Homo sapiens
  siRNA target sequence for CSMD2 (NM_052896.2,3511-3529).
cccgtttgctgggagtttt

SEQ ID NO: 404660 - DNA, 19 bp, Homo sapiens
  siRNA target sequence for CSMD2 (NM_052896.2,3611-3629).
caccagcaagggctttgaa

SEQ ID NO: 404661 - DNA, 19 bp, Homo sapiens
  siRNA target sequence for CSMD2 (NM_052896.2,3613-3631).
ccagcaagggctttgaact

SEQ ID NO: 404662 - DNA, 19 bp, Homo sapiens
  siRNA target sequence for CSMD2 (NM_052896.2,3900-3918).
ccctatgaacacaatctca

SEQ ID NO: 404663 - DNA, 19 bp, Homo sapiens
  siRNA target sequence for CSMD2 (NM_052896.2,3901-3919).
cctatgaacacaatctcaa

SEQ ID NO: 404664 - DNA, 19 bp, Homo sapiens
  siRNA target sequence for CSMD2 (NM_052896.2,3952-3970).
gcaccattgggctacactt

SEQ ID NO: 404665 - DNA, 19 bp, Homo sapiens
  siRNA target sequence for CSMD2 (NM_052896.2,4080-4098).
ctgcatagcaccttcaact

SEQ ID NO: 404666 - DNA, 19 bp, Homo sapiens
  siRNA target sequence for CSMD2 (NM_052896.2,4142-4160).
gggctttgccattcaattt

SEQ ID NO: 404667 - DNA, 19 bp, Homo sapiens
  siRNA target sequence for CSMD2 (NM_052896.2,4473-4491).
gtcatcgccctggtattta

SEQ ID NO: 404668 - DNA, 19 bp, Homo sapiens
  siRNA target sequence for CSMD2 (NM_052896.2,4660-4678).
ctggcttcgtcattgacta

SEQ ID NO: 404669 - DNA, 19 bp, Homo sapiens
  siRNA target sequence for CSMD2 (NM_052896.2,4662-4680).
ggcttcgtcattgactata

SEQ ID NO: 404670 - DNA, 19 bp, Homo sapiens
  siRNA target sequence for CSMD2 (NM_052896.2,4667-4685).
cgtcattgactatacagaa

SEQ ID NO: 404671 - DNA, 19 bp, Homo sapiens
  siRNA target sequence for CSMD2 (NM_052896.2,4961-4979).
ctgcttgtattttgttact

SEQ ID NO: 404672 - DNA, 19 bp, Homo sapiens
  siRNA target sequence for CSMD2 (NM_052896.2,4978-4996).
ctgtgcccaaggactatgt

SEQ ID NO: 404673 - DNA, 19 bp, Homo sapiens
  siRNA target sequence for CSMD2 (NM_052896.2,5005-5023).
gccagttcgccttctttca

SEQ ID NO: 404674 - DNA, 19 bp, Homo sapiens
  siRNA target sequence for CSMD2 (NM_052896.2,5131-5149).
cctccaatcaagttctcat

SEQ ID NO: 404675 - DNA, 19 bp, Homo sapiens
  siRNA target sequence for CSMD2 (NM_052896.2,5132-5150).
ctccaatcaagttctcatt

SEQ ID NO: 404676 - DNA, 19 bp, Homo sapiens
  siRNA target sequence for CSMD2 (NM_052896.2,5139-5157).
caagttctcattaagttca

SEQ ID NO: 404677 - DNA, 19 bp, Homo sapiens
  siRNA target sequence for CSMD2 (NM_052896.2,5292-5310).
gccatcgtccgcttcgaat

SEQ ID NO: 404678 - DNA, 19 bp, Homo sapiens
  siRNA target sequence for CSMD2 (NM_052896.2,5527-5545).
gcatccagatccaagttgt

SEQ ID NO: 404679 - DNA, 19 bp, Homo sapiens
  siRNA target sequence for CSMD2 (NM_052896.2,5569-5587).
gggactcgctggaagtatt

SEQ ID NO: 404680 - DNA, 19 bp, Homo sapiens
  siRNA target sequence for CSMD2 (NM_052896.2,5570-5588).
ggactcgctggaagtattt

SEQ ID NO: 404681 - DNA, 19 bp, Homo sapiens
  siRNA target sequence for CSMD2 (NM_052896.2,5573-5591).
ctcgctggaagtatttgat

SEQ ID NO: 404682 - DNA, 19 bp, Homo sapiens
  siRNA target sequence for CSMD2 (NM_052896.2,5673-5691).
ctctaccttcatttctact

SEQ ID NO: 404683 - DNA, 19 bp, Homo sapiens
  siRNA target sequence for CSMD2 (NM_052896.2,5798-5816).
gcgctacttggtgaatgat

SEQ ID NO: 404684 - DNA, 19 bp, Homo sapiens
  siRNA target sequence for CSMD2 (NM_052896.2,6077-6095).
gcccaaccacgactacata

SEQ ID NO: 404685 - DNA, 19 bp, Homo sapiens
  siRNA target sequence for CSMD2 (NM_052896.2,6079-6097).
ccaaccacgactacataga

SEQ ID NO: 404686 - DNA, 19 bp, Homo sapiens
  siRNA target sequence for CSMD2 (NM_052896.2,6080-6098).
caaccacgactacatagaa

SEQ ID NO: 404687 - DNA, 19 bp, Homo sapiens
  siRNA target sequence for CSMD2 (NM_052896.2,6124-6142).
gccgcatgatgggaagatt

SEQ ID NO: 404688 - DNA, 19 bp, Homo sapiens
  siRNA target sequence for CSMD2 (NM_052896.2,6126-6144).
cgcatgatgggaagattca

SEQ ID NO: 404689 - DNA, 19 bp, Homo sapiens
  siRNA target sequence for CSMD2 (NM_052896.2,6183-6201).
cacgagaccaccgtgtatt

SEQ ID NO: 404690 - DNA, 19 bp, Homo sapiens
  siRNA target sequence for CSMD2 (NM_052896.2,6232-6250).
gattcaagctggagtatca

SEQ ID NO: 404691 - DNA, 19 bp, Homo sapiens
  siRNA target sequence for CSMD2 (NM_052896.2,6336-6354).
gtcgccgcttcctatgtct

SEQ ID NO: 404692 - DNA, 19 bp, Homo sapiens
  siRNA target sequence for CSMD2 (NM_052896.2,6347-6365).
ctatgtctgggatcttgat

SEQ ID NO: 404693 - DNA, 19 bp, Homo sapiens
  siRNA target sequence for CSMD2 (NM_052896.2,6443-6461).
ctacaacgtgggacaatca

SEQ ID NO: 404694 - DNA, 19 bp, Homo sapiens
  siRNA target sequence for CSMD2 (NM_052896.2,6570-6588).
ccttgtggcgggaacatca

SEQ ID NO: 404695 - DNA, 19 bp, Homo sapiens
  siRNA target sequence for CSMD2 (NM_052896.2,6576-6594).
ggcgggaacatcacttctt

SEQ ID NO: 404696 - DNA, 19 bp, Homo sapiens
  siRNA target sequence for CSMD2 (NM_052896.2,6720-6738).
ccctctggagatttcatca

SEQ ID NO: 404697 - DNA, 19 bp, Homo sapiens
  siRNA target sequence for CSMD2 (NM_052896.2,6788-6806).
ccggagcatggccaagaaa

SEQ ID NO: 404698 - DNA, 19 bp, Homo sapiens
  siRNA target sequence for CSMD2 (NM_052896.2,6789-6807).
cggagcatggccaagaaaa

SEQ ID NO: 404699 - DNA, 19 bp, Homo sapiens
  siRNA target sequence for CSMD2 (NM_052896.2,6868-6886).
ggatcttcgccatagcttt

SEQ ID NO: 404700 - DNA, 19 bp, Homo sapiens
  siRNA target sequence for CSMD2 (NM_052896.2,6891-6909).
gcttatccactcaccaaat

SEQ ID NO: 404701 - DNA, 19 bp, Homo sapiens
  siRNA target sequence for CSMD2 (NM_052896.2,6938-6956).
cgaagtcgtcacagagaat

SEQ ID NO: 404702 - DNA, 19 bp, Homo sapiens
  siRNA target sequence for CSMD2 (NM_052896.2,6975-6993).
gacatcgtacgctacagat

SEQ ID NO: 404703 - DNA, 19 bp, Homo sapiens
  siRNA target sequence for CSMD2 (NM_052896.2,6995-7013).
cctccctggctttacctta

SEQ ID NO: 404704 - DNA, 19 bp, Homo sapiens
  siRNA target sequence for CSMD2 (NM_052896.2,7066-7084).
gaccacccccgatatgtga

SEQ ID NO: 404705 - DNA, 19 bp, Homo sapiens
  siRNA target sequence for CSMD2 (NM_052896.2,7192-7210).
gagtggagcccgactataa

SEQ ID NO: 404706 - DNA, 19 bp, Homo sapiens
  siRNA target sequence for CSMD2 (NM_052896.2,7194-7212).
gtggagcccgactataaca

SEQ ID NO: 404707 - DNA, 19 bp, Homo sapiens
  siRNA target sequence for CSMD2 (NM_052896.2,7216-7234).
ccctcacagtggagtactt

SEQ ID NO: 404708 - DNA, 19 bp, Homo sapiens
  siRNA target sequence for CSMD2 (NM_052896.2,7235-7253).
cctcagcgagaagcaatat

SEQ ID NO: 404709 - DNA, 19 bp, Homo sapiens
  siRNA target sequence for CSMD2 (NM_052896.2,7238-7256).
cagcgagaagcaatatgat

SEQ ID NO: 404710 - DNA, 19 bp, Homo sapiens
  siRNA target sequence for CSMD2 (NM_052896.2,7240-7258).
gcgagaagcaatatgatga

SEQ ID NO: 404711 - DNA, 19 bp, Homo sapiens
  siRNA target sequence for CSMD2 (NM_052896.2,7364-7382).
cctgcgttggtcatctgat

SEQ ID NO: 404712 - DNA, 19 bp, Homo sapiens
  siRNA target sequence for CSMD2 (NM_052896.2,7403-7421).
cttcaagatccgctattca

SEQ ID NO: 404713 - DNA, 19 bp, Homo sapiens
  siRNA target sequence for CSMD2 (NM_052896.2,7840-7858).
gccgatggaggcttatctt

SEQ ID NO: 404714 - DNA, 19 bp, Homo sapiens
  siRNA target sequence for CSMD2 (NM_052896.2,7841-7859).
ccgatggaggcttatcttt

SEQ ID NO: 404715 - DNA, 19 bp, Homo sapiens
  siRNA target sequence for CSMD2 (NM_052896.2,7900-7918).
gtgaccctggctactacta

SEQ ID NO: 404716 - DNA, 19 bp, Homo sapiens
  siRNA target sequence for CSMD2 (NM_052896.2,7902-7920).
gaccctggctactactata

SEQ ID NO: 404717 - DNA, 19 bp, Homo sapiens
  siRNA target sequence for CSMD2 (NM_052896.2,7904-7922).
ccctggctactactatact

SEQ ID NO: 404718 - DNA, 19 bp, Homo sapiens
  siRNA target sequence for CSMD2 (NM_052896.2,7978-7996).
cgcccacctgccgaatcat

SEQ ID NO: 404719 - DNA, 19 bp, Homo sapiens
  siRNA target sequence for CSMD2 (NM_052896.2,8067-8085).
gccatcttctcctgcaatt

SEQ ID NO: 404720 - DNA, 19 bp, Homo sapiens
  siRNA target sequence for CSMD2 (NM_052896.2,8239-8257).
gtgtggtgtaccaatgcaa

SEQ ID NO: 404721 - DNA, 19 bp, Homo sapiens
  siRNA target sequence for CSMD2 (NM_052896.2,8318-8336).
gggcaagacccctttctgt

SEQ ID NO: 404722 - DNA, 19 bp, Homo sapiens
  siRNA target sequence for CSMD2 (NM_052896.2,8728-8746).
gtaatgcccgagttgtgtt

SEQ ID NO: 404723 - DNA, 19 bp, Homo sapiens
  siRNA target sequence for CSMD2 (NM_052896.2,8767-8785).
ccagctctatcgtctatga

SEQ ID NO: 404724 - DNA, 19 bp, Homo sapiens
  siRNA target sequence for CSMD2 (NM_052896.2,8826-8844).
cactgctcggtcaatggta

SEQ ID NO: 404725 - DNA, 19 bp, Homo sapiens
  siRNA target sequence for CSMD2 (NM_052896.2,8862-8880).
cctgagtgcctcgtcataa

SEQ ID NO: 404726 - DNA, 19 bp, Homo sapiens
  siRNA target sequence for CSMD2 (NM_052896.2,8913-8931).
cttcggctgggcaatgact

SEQ ID NO: 404727 - DNA, 19 bp, Homo sapiens
  siRNA target sequence for CSMD2 (NM_052896.2,8981-8999).
ggagtcacatagagtatct

SEQ ID NO: 404728 - DNA, 19 bp, Homo sapiens
  siRNA target sequence for CSMD2 (NM_052896.2,9014-9032).
caaggaccggacatggaat

SEQ ID NO: 404729 - DNA, 19 bp, Homo sapiens
  siRNA target sequence for CSMD2 (NM_052896.2,9018-9036).
gaccggacatggaatggaa

SEQ ID NO: 404730 - DNA, 19 bp, Homo sapiens
  siRNA target sequence for CSMD2 (NM_052896.2,9118-9136).
ggggctcaagtgtgactta

SEQ ID NO: 404731 - DNA, 19 bp, Homo sapiens
  siRNA target sequence for CSMD2 (NM_052896.2,9119-9137).
gggctcaagtgtgacttat

SEQ ID NO: 404732 - DNA, 19 bp, Homo sapiens
  siRNA target sequence for CSMD2 (NM_052896.2,9208-9226).
gagagctgcctcagtgttt

SEQ ID NO: 404733 - DNA, 19 bp, Homo sapiens
  siRNA target sequence for CSMD2 (NM_052896.2,9428-9446).
ccctggtgtgccacagttt

SEQ ID NO: 404734 - DNA, 19 bp, Homo sapiens
  siRNA target sequence for CSMD2 (NM_052896.2,9489-9507).
gtcctcttccgttgtcaaa

SEQ ID NO: 404735 - DNA, 19 bp, Homo sapiens
  siRNA target sequence for CSMD2 (NM_052896.2,9865-9883).
ggaaaggggcctatgaata

SEQ ID NO: 404736 - DNA, 19 bp, Homo sapiens
  siRNA target sequence for CSMD2 (NM_052896.2,9989-10007).
ggctggaacttacaagaaa

SEQ ID NO: 404737 - DNA, 19 bp, Homo sapiens
  siRNA target sequence for CSMD2 (NM_052896.2,10028-10046).
ccaggtgtaccagattaca

SEQ ID NO: 404738 - DNA, 19 bp, Homo sapiens
  siRNA target sequence for CSMD2 (NM_052896.2,10123-10141).
ccggagccaccttcatcta

SEQ ID NO: 404739 - DNA, 19 bp, Homo sapiens
  siRNA target sequence for CSMD2 (NM_052896.2,10170-10188).
gggcagttcggctttcaaa

SEQ ID NO: 404740 - DNA, 19 bp, Homo sapiens
  siRNA target sequence for CSMD2 (NM_052896.2,10270-10288).
cgatcctggtgcctttcat

SEQ ID NO: 404741 - DNA, 19 bp, Homo sapiens
  siRNA target sequence for CSMD2 (NM_052896.2,10281-10299).
cctttcatcgccctcatta

SEQ ID NO: 404742 - DNA, 19 bp, Homo sapiens
  siRNA target sequence for CSMD2 (NM_052896.2,10282-10300).
ctttcatcgccctcattat

SEQ ID NO: 404743 - DNA, 19 bp, Homo sapiens
  siRNA target sequence for CSMD2 (NM_052896.2,10303-10321).
cgggcttcgtgctctatct

SEQ ID NO: 404744 - DNA, 19 bp, Homo sapiens
  siRNA target sequence for CSMD2 (NM_052896.2,10305-10323).
ggcttcgtgctctatctct

SEQ ID NO: 404745 - DNA, 19 bp, Homo sapiens
  siRNA target sequence for CSMD2 (NM_052896.2,10370-10388).
ccacgagaacaccaatgtt

SEQ ID NO: 404746 - DNA, 19 bp, Homo sapiens
  siRNA target sequence for CSMD2 (NM_052896.2,10386-10404).
gttcgggccacatttgaga

SEQ ID NO: 404747 - DNA, 19 bp, Homo sapiens
  siRNA target sequence for MBD6 (NM_052897.1,446-464).
gtctggagtgtccacttaa

SEQ ID NO: 404748 - DNA, 19 bp, Homo sapiens
  siRNA target sequence for MBD6 (NM_052897.1,460-478).
cttaatgtccccaaggttt

SEQ ID NO: 404749 - DNA, 19 bp, Homo sapiens
  siRNA target sequence for MBD6 (NM_052897.1,466-484).
gtccccaaggttttcaact

SEQ ID NO: 404750 - DNA, 19 bp, Homo sapiens
  siRNA target sequence for MBD6 (NM_052897.1,470-488).
ccaaggttttcaactttga

SEQ ID NO: 404751 - DNA, 19 bp, Homo sapiens
  siRNA target sequence for MBD6 (NM_052897.1,1044-1062).
ctgtagtgatgccttaaca

SEQ ID NO: 404752 - DNA, 19 bp, Homo sapiens
  siRNA target sequence for MBD6 (NM_052897.1,1356-1374).
ccgcagaccccctactgta

SEQ ID NO: 404753 - DNA, 19 bp, Homo sapiens
  siRNA target sequence for MBD6 (NM_052897.1,1357-1375).
cgcagaccccctactgtat

SEQ ID NO: 404754 - DNA, 19 bp, Homo sapiens
  siRNA target sequence for MBD6 (NM_052897.1,1358-1376).
gcagaccccctactgtatt

SEQ ID NO: 404755 - DNA, 19 bp, Homo sapiens
  siRNA target sequence for MBD6 (NM_052897.1,1359-1377).
cagaccccctactgtattt

SEQ ID NO: 404756 - DNA, 19 bp, Homo sapiens
  siRNA target sequence for MBD6 (NM_052897.1,1363-1381).
ccccctactgtatttcgat

SEQ ID NO: 404757 - DNA, 19 bp, Homo sapiens
  siRNA target sequence for MBD6 (NM_052897.1,1364-1382).
cccctactgtatttcgatt

SEQ ID NO: 404758 - DNA, 19 bp, Homo sapiens
  siRNA target sequence for MBD6 (NM_052897.1,1463-1481).
cggagccatcccaaccaat

SEQ ID NO: 404759 - DNA, 19 bp, Homo sapiens
  siRNA target sequence for MBD6 (NM_052897.1,1464-1482).
ggagccatcccaaccaatt

SEQ ID NO: 404760 - DNA, 19 bp, Homo sapiens
  siRNA target sequence for MBD6 (NM_052897.1,2269-2287).
cctaccctcatagctttaa

SEQ ID NO: 404761 - DNA, 19 bp, Homo sapiens
  siRNA target sequence for MBD6 (NM_052897.1,2270-2288).
ctaccctcatagctttaaa

SEQ ID NO: 404762 - DNA, 19 bp, Homo sapiens
  siRNA target sequence for MBD6 (NM_052897.1,2616-2634).
cctctcagaggcttctagt

SEQ ID NO: 404763 - DNA, 19 bp, Homo sapiens
  siRNA target sequence for MBD6 (NM_052897.1,2846-2864).
ggggacttaggggcattaa

SEQ ID NO: 404764 - DNA, 19 bp, Homo sapiens
  siRNA target sequence for MBD6 (NM_052897.1,2847-2865).
gggacttaggggcattaat

SEQ ID NO: 404765 - DNA, 19 bp, Homo sapiens
  siRNA target sequence for MBD6 (NM_052897.1,2967-2985).
ggaaaggtccccaagaaga

SEQ ID NO: 404766 - DNA, 19 bp, Homo sapiens
  siRNA target sequence for MBD6 (NM_052897.1,2987-3005).
cccaccattggcagcataa

SEQ ID NO: 404767 - DNA, 19 bp, Homo sapiens
  siRNA target sequence for MBD6 (NM_052897.1,3059-3077).
cccattctgaggaccttaa

SEQ ID NO: 404768 - DNA, 19 bp, Homo sapiens
  siRNA target sequence for MBD6 (NM_052897.1,3109-3127).
cgtggccgtaggagaaaat

SEQ ID NO: 404769 - DNA, 19 bp, Homo sapiens
  siRNA target sequence for MBD6 (NM_052897.1,3112-3130).
ggccgtaggagaaaataca

SEQ ID NO: 404770 - DNA, 19 bp, Homo sapiens
  siRNA target sequence for MBD6 (NM_052897.1,3133-3151).
cctacccggaacagcaata

SEQ ID NO: 404771 - DNA, 19 bp, Homo sapiens
  siRNA target sequence for KIAA1893 (NM_052899.1,655-673).
ggccgattccacttccata

SEQ ID NO: 404772 - DNA, 19 bp, Homo sapiens
  siRNA target sequence for KIAA1893 (NM_052899.1,659-677).
gattccacttccataggaa

SEQ ID NO: 404773 - DNA, 19 bp, Homo sapiens
  siRNA target sequence for KIAA1893 (NM_052899.1,703-721).
ggcagatcccatgtttaca

SEQ ID NO: 404774 - DNA, 19 bp, Homo sapiens
  siRNA target sequence for KIAA1893 (NM_052899.1,778-796).
ggatcccatgactgtaaga

SEQ ID NO: 404775 - DNA, 19 bp, Homo sapiens
  siRNA target sequence for KIAA1893 (NM_052899.1,789-807).
ctgtaagaaaggaagatct

SEQ ID NO: 404776 - DNA, 19 bp, Homo sapiens
  siRNA target sequence for KIAA1893 (NM_052899.1,810-828).
gatccctgggaaaagtaga

SEQ ID NO: 404777 - DNA, 19 bp, Homo sapiens
  siRNA target sequence for KIAA1893 (NM_052899.1,872-890).
gaggatcctgggtctttga

SEQ ID NO: 404778 - DNA, 19 bp, Homo sapiens
  siRNA target sequence for KIAA1893 (NM_052899.1,951-969).
ccaggtattcaggaaaaga

SEQ ID NO: 404779 - DNA, 19 bp, Homo sapiens
  siRNA target sequence for KIAA1893 (NM_052899.1,1008-1026).
cagaaaaggtagatcttgt

SEQ ID NO: 404780 - DNA, 19 bp, Homo sapiens
  siRNA target sequence for KIAA1893 (NM_052899.1,1511-1529).
ggaaaggcaggaactgtat

SEQ ID NO: 404781 - DNA, 19 bp, Homo sapiens
  siRNA target sequence for KIAA1893 (NM_052899.1,1583-1601).
ggaagtagaaagacatcat

SEQ ID NO: 404782 - DNA, 19 bp, Homo sapiens
  siRNA target sequence for KIAA1893 (NM_052899.1,1876-1894).
ggactctgtgtctataggt

SEQ ID NO: 404783 - DNA, 19 bp, Homo sapiens
  siRNA target sequence for KIAA1893 (NM_052899.1,1877-1895).
gactctgtgtctataggta

SEQ ID NO: 404784 - DNA, 19 bp, Homo sapiens
  siRNA target sequence for KIAA1893 (NM_052899.1,1900-1918).
ggtctcaactccaggaaaa

SEQ ID NO: 404785 - DNA, 19 bp, Homo sapiens
  siRNA target sequence for KIAA1893 (NM_052899.1,1951-1969).
cgtgtccctgggaaaagca

SEQ ID NO: 404786 - DNA, 19 bp, Homo sapiens
  siRNA target sequence for KIAA1893 (NM_052899.1,2540-2558).
cggactcgcgacaacttca

SEQ ID NO: 404787 - DNA, 19 bp, Homo sapiens
  siRNA target sequence for CSMD3 (NM_052900.2,318-336).
gacggtgtcttgtgtgaaa

SEQ ID NO: 404788 - DNA, 19 bp, Homo sapiens
  siRNA target sequence for CSMD3 (NM_052900.2,324-342).
gtcttgtgtgaaaggattt

SEQ ID NO: 404789 - DNA, 19 bp, Homo sapiens
  siRNA target sequence for CSMD3 (NM_052900.2,371-389).
gacttaatggcactataga

SEQ ID NO: 404790 - DNA, 19 bp, Homo sapiens
  siRNA target sequence for CSMD3 (NM_052900.2,432-450).
cacatgggtaataatagca

SEQ ID NO: 404791 - DNA, 19 bp, Homo sapiens
  siRNA target sequence for CSMD3 (NM_052900.2,438-456).
ggtaataatagcagaagaa

SEQ ID NO: 404792 - DNA, 19 bp, Homo sapiens
  siRNA target sequence for CSMD3 (NM_052900.2,499-517).
gaagaatacgactacttat

SEQ ID NO: 404793 - DNA, 19 bp, Homo sapiens
  siRNA target sequence for CSMD3 (NM_052900.2,502-520).
gaatacgactacttatcat

SEQ ID NO: 404794 - DNA, 19 bp, Homo sapiens
  siRNA target sequence for CSMD3 (NM_052900.2,507-525).
cgactacttatcattatat

SEQ ID NO: 404795 - DNA, 19 bp, Homo sapiens
  siRNA target sequence for CSMD3 (NM_052900.2,532-550).
catcctcatcctacaaact

SEQ ID NO: 404796 - DNA, 19 bp, Homo sapiens
  siRNA target sequence for CSMD3 (NM_052900.2,538-556).
catcctacaaactttagga

SEQ ID NO: 404797 - DNA, 19 bp, Homo sapiens
  siRNA target sequence for CSMD3 (NM_052900.2,549-567).
ctttaggacaaggttaaca

SEQ ID NO: 404798 - DNA, 19 bp, Homo sapiens
  siRNA target sequence for CSMD3 (NM_052900.2,616-634).
ctacgtttgaccagtgatt

SEQ ID NO: 404799 - DNA, 19 bp, Homo sapiens
  siRNA target sequence for CSMD3 (NM_052900.2,627-645).
cagtgattttgcagttagt

SEQ ID NO: 404800 - DNA, 19 bp, Homo sapiens
  siRNA target sequence for CSMD3 (NM_052900.2,638-656).
cagttagtgctcatggatt

SEQ ID NO: 404801 - DNA, 19 bp, Homo sapiens
  siRNA target sequence for CSMD3 (NM_052900.2,640-658).
gttagtgctcatggattta

SEQ ID NO: 404802 - DNA, 19 bp, Homo sapiens
  siRNA target sequence for CSMD3 (NM_052900.2,681-699).
gagtagctcttgtggaaat

SEQ ID NO: 404803 - DNA, 19 bp, Homo sapiens
  siRNA target sequence for CSMD3 (NM_052900.2,710-728).
cacccaaaggtgtattata

SEQ ID NO: 404804 - DNA, 19 bp, Homo sapiens
  siRNA target sequence for CSMD3 (NM_052900.2,721-739).
gtattatatggcacaagat

SEQ ID NO: 404805 - DNA, 19 bp, Homo sapiens
  siRNA target sequence for CSMD3 (NM_052900.2,759-777).
ccgctacagctgtgtaact

SEQ ID NO: 404806 - DNA, 19 bp, Homo sapiens
  siRNA target sequence for CSMD3 (NM_052900.2,807-825).
cacctgcatagccaattca

SEQ ID NO: 404807 - DNA, 19 bp, Homo sapiens
  siRNA target sequence for CSMD3 (NM_052900.2,813-831).
catagccaattcagttaat

SEQ ID NO: 404808 - DNA, 19 bp, Homo sapiens
  siRNA target sequence for CSMD3 (NM_052900.2,918-936).
cagccctagttttcctaat

SEQ ID NO: 404809 - DNA, 19 bp, Homo sapiens
  siRNA target sequence for CSMD3 (NM_052900.2,931-949).
cctaatgagtaccataaca

SEQ ID NO: 404810 - DNA, 19 bp, Homo sapiens
  siRNA target sequence for CSMD3 (NM_052900.2,979-997).
gagcctggggacacaattt

SEQ ID NO: 404811 - DNA, 19 bp, Homo sapiens
  siRNA target sequence for CSMD3 (NM_052900.2,981-999).
gcctggggacacaatttca

SEQ ID NO: 404812 - DNA, 19 bp, Homo sapiens
  siRNA target sequence for CSMD3 (NM_052900.2,1062-1080).
gccacctaccatatggtta

SEQ ID NO: 404813 - DNA, 19 bp, Homo sapiens
  siRNA target sequence for CSMD3 (NM_052900.2,1063-1081).
ccacctaccatatggttat

SEQ ID NO: 404814 - DNA, 19 bp, Homo sapiens
  siRNA target sequence for CSMD3 (NM_052900.2,1089-1107).
gaatataccaccaccaatt

SEQ ID NO: 404815 - DNA, 19 bp, Homo sapiens
  siRNA target sequence for CSMD3 (NM_052900.2,1156-1174).
catcgataccgtggattta

SEQ ID NO: 404816 - DNA, 19 bp, Homo sapiens
  siRNA target sequence for CSMD3 (NM_052900.2,1175-1193).
gtgctccctatcaagtgaa

SEQ ID NO: 404817 - DNA, 19 bp, Homo sapiens
  siRNA target sequence for CSMD3 (NM_052900.2,1177-1195).
gctccctatcaagtgaaaa

SEQ ID NO: 404818 - DNA, 19 bp, Homo sapiens
  siRNA target sequence for CSMD3 (NM_052900.2,1178-1196).
ctccctatcaagtgaaaaa

SEQ ID NO: 404819 - DNA, 19 bp, Homo sapiens
  siRNA target sequence for CSMD3 (NM_052900.2,1200-1218).
catagattttaaatctaga

SEQ ID NO: 404820 - DNA, 19 bp, Homo sapiens
  siRNA target sequence for CSMD3 (NM_052900.2,1214-1232).
ctagaggatttaaattgtt

SEQ ID NO: 404821 - DNA, 19 bp, Homo sapiens
  siRNA target sequence for CSMD3 (NM_052900.2,1250-1268).
gcaacaagttttctatctt

SEQ ID NO: 404822 - DNA, 19 bp, Homo sapiens
  siRNA target sequence for CSMD3 (NM_052900.2,1251-1269).
caacaagttttctatctta

SEQ ID NO: 404823 - DNA, 19 bp, Homo sapiens
  siRNA target sequence for CSMD3 (NM_052900.2,1254-1272).
caagttttctatcttaaat

SEQ ID NO: 404824 - DNA, 19 bp, Homo sapiens
  siRNA target sequence for CSMD3 (NM_052900.2,1332-1350).
gaagagaatcggatcagat

SEQ ID NO: 404825 - DNA, 19 bp, Homo sapiens
  siRNA target sequence for CSMD3 (NM_052900.2,1426-1444).
caacggatagctgaagttt

SEQ ID NO: 404826 - DNA, 19 bp, Homo sapiens
  siRNA target sequence for CSMD3 (NM_052900.2,1471-1489).
gtgtgtaaagtgaaaacgt

SEQ ID NO: 404827 - DNA, 19 bp, Homo sapiens
  siRNA target sequence for CSMD3 (NM_052900.2,1487-1505).
cgtgtggctctaatcttca

SEQ ID NO: 404828 - DNA, 19 bp, Homo sapiens
  siRNA target sequence for CSMD3 (NM_052900.2,1510-1528).
ccaagtggtacctttacat

SEQ ID NO: 404829 - DNA, 19 bp, Homo sapiens
  siRNA target sequence for CSMD3 (NM_052900.2,1633-1651).
ctggagattggctatgata

SEQ ID NO: 404830 - DNA, 19 bp, Homo sapiens
  siRNA target sequence for CSMD3 (NM_052900.2,1719-1737).
ctttgtaccagacttgata

SEQ ID NO: 404831 - DNA, 19 bp, Homo sapiens
  siRNA target sequence for CSMD3 (NM_052900.2,1723-1741).
gtaccagacttgatagtga

SEQ ID NO: 404832 - DNA, 19 bp, Homo sapiens
  siRNA target sequence for CSMD3 (NM_052900.2,1779-1797).
cgaaagtgttggatctgtt

SEQ ID NO: 404833 - DNA, 19 bp, Homo sapiens
  siRNA target sequence for CSMD3 (NM_052900.2,1795-1813).
gttggtttcaaggttaact

SEQ ID NO: 404834 - DNA, 19 bp, Homo sapiens
  siRNA target sequence for CSMD3 (NM_052900.2,1798-1816).
ggtttcaaggttaactaca

SEQ ID NO: 404835 - DNA, 19 bp, Homo sapiens
  siRNA target sequence for CSMD3 (NM_052900.2,1799-1817).
gtttcaaggttaactacaa

SEQ ID NO: 404836 - DNA, 19 bp, Homo sapiens
  siRNA target sequence for CSMD3 (NM_052900.2,1850-1868).
gtacacccttatatggaat

SEQ ID NO: 404837 - DNA, 19 bp, Homo sapiens
  siRNA target sequence for CSMD3 (NM_052900.2,1856-1874).
ccttatatggaattagaga

SEQ ID NO: 404838 - DNA, 19 bp, Homo sapiens
  siRNA target sequence for CSMD3 (NM_052900.2,1873-1891).
gaaggcgatggattttcta

SEQ ID NO: 404839 - DNA, 19 bp, Homo sapiens
  siRNA target sequence for CSMD3 (NM_052900.2,1878-1896).
cgatggattttctaatcgt

SEQ ID NO: 404840 - DNA, 19 bp, Homo sapiens
  siRNA target sequence for CSMD3 (NM_052900.2,1949-1967).
ccattgtttgtcaagagaa

SEQ ID NO: 404841 - DNA, 19 bp, Homo sapiens
  siRNA target sequence for CSMD3 (NM_052900.2,2029-2047).
ccaatgggaacagttcttt

SEQ ID NO: 404842 - DNA, 19 bp, Homo sapiens
  siRNA target sequence for CSMD3 (NM_052900.2,2058-2076).
cccagaagggtatggaaat

SEQ ID NO: 404843 - DNA, 19 bp, Homo sapiens
  siRNA target sequence for CSMD3 (NM_052900.2,2088-2106).
catctggacgataatctct

SEQ ID NO: 404844 - DNA, 19 bp, Homo sapiens
  siRNA target sequence for CSMD3 (NM_052900.2,2113-2131).
gggagccggatacatcttt

SEQ ID NO: 404845 - DNA, 19 bp, Homo sapiens
  siRNA target sequence for CSMD3 (NM_052900.2,2115-2133).
gagccggatacatctttct

SEQ ID NO: 404846 - DNA, 19 bp, Homo sapiens
  siRNA target sequence for CSMD3 (NM_052900.2,2117-2135).
gccggatacatctttcttt

SEQ ID NO: 404847 - DNA, 19 bp, Homo sapiens
  siRNA target sequence for CSMD3 (NM_052900.2,2119-2137).
cggatacatctttctttca

SEQ ID NO: 404848 - DNA, 19 bp, Homo sapiens
  siRNA target sequence for CSMD3 (NM_052900.2,2148-2166).
cctggaatcccagtttgat

SEQ ID NO: 404849 - DNA, 19 bp, Homo sapiens
  siRNA target sequence for CSMD3 (NM_052900.2,2230-2248).
gaggtgccttcccatctta

SEQ ID NO: 404850 - DNA, 19 bp, Homo sapiens
  siRNA target sequence for CSMD3 (NM_052900.2,2235-2253).
gccttcccatcttactagt

SEQ ID NO: 404851 - DNA, 19 bp, Homo sapiens
  siRNA target sequence for CSMD3 (NM_052900.2,2241-2259).
ccatcttactagtaatagt

SEQ ID NO: 404852 - DNA, 19 bp, Homo sapiens
  siRNA target sequence for CSMD3 (NM_052900.2,2260-2278).
cacatactgcgattggaat

SEQ ID NO: 404853 - DNA, 19 bp, Homo sapiens
  siRNA target sequence for CSMD3 (NM_052900.2,2262-2280).
catactgcgattggaattt

SEQ ID NO: 404854 - DNA, 19 bp, Homo sapiens
  siRNA target sequence for CSMD3 (NM_052900.2,2281-2299).
caggctgaccactcaatgt

SEQ ID NO: 404855 - DNA, 19 bp, Homo sapiens
  siRNA target sequence for CSMD3 (NM_052900.2,2300-2318).
caggacgtggctttaacat

SEQ ID NO: 404856 - DNA, 19 bp, Homo sapiens
  siRNA target sequence for CSMD3 (NM_052900.2,2302-2320).
ggacgtggctttaacatca

SEQ ID NO: 404857 - DNA, 19 bp, Homo sapiens
  siRNA target sequence for CSMD3 (NM_052900.2,2306-2324).
gtggctttaacatcactta

SEQ ID NO: 404858 - DNA, 19 bp, Homo sapiens
  siRNA target sequence for CSMD3 (NM_052900.2,2325-2343).
caacacatttggacataat

SEQ ID NO: 404859 - DNA, 19 bp, Homo sapiens
  siRNA target sequence for CSMD3 (NM_052900.2,2328-2346).
cacatttggacataatgaa

SEQ ID NO: 404860 - DNA, 19 bp, Homo sapiens
  siRNA target sequence for CSMD3 (NM_052900.2,2388-2406).
ggacaactttcaattagga

SEQ ID NO: 404861 - DNA, 19 bp, Homo sapiens
  siRNA target sequence for CSMD3 (NM_052900.2,2404-2422).
ggaagttcaatttcagtta

SEQ ID NO: 404862 - DNA, 19 bp, Homo sapiens
  siRNA target sequence for CSMD3 (NM_052900.2,2405-2423).
gaagttcaatttcagttat

SEQ ID NO: 404863 - DNA, 19 bp, Homo sapiens
  siRNA target sequence for CSMD3 (NM_052900.2,2585-2603).
gatactacaaagactcttt

SEQ ID NO: 404864 - DNA, 19 bp, Homo sapiens
  siRNA target sequence for CSMD3 (NM_052900.2,2629-2647).
gaacctggacactctatca

SEQ ID NO: 404865 - DNA, 19 bp, Homo sapiens
  siRNA target sequence for CSMD3 (NM_052900.2,2723-2741).
cacccttgcttggatctta

SEQ ID NO: 404866 - DNA, 19 bp, Homo sapiens
  siRNA target sequence for CSMD3 (NM_052900.2,2727-2745).
cttgcttggatcttacaat

SEQ ID NO: 404867 - DNA, 19 bp, Homo sapiens
  siRNA target sequence for CSMD3 (NM_052900.2,2809-2827).
gacaacagtcgttccaata

SEQ ID NO: 404868 - DNA, 19 bp, Homo sapiens
  siRNA target sequence for CSMD3 (NM_052900.2,2811-2829).
caacagtcgttccaataat

SEQ ID NO: 404869 - DNA, 19 bp, Homo sapiens
  siRNA target sequence for CSMD3 (NM_052900.2,2814-2832).
cagtcgttccaataatggt

SEQ ID NO: 404870 - DNA, 19 bp, Homo sapiens
  siRNA target sequence for CSMD3 (NM_052900.2,2816-2834).
gtcgttccaataatggttt

SEQ ID NO: 404871 - DNA, 19 bp, Homo sapiens
  siRNA target sequence for CSMD3 (NM_052900.2,2835-2853).
caagattcattatgaaagt

SEQ ID NO: 404872 - DNA, 19 bp, Homo sapiens
  siRNA target sequence for CSMD3 (NM_052900.2,2838-2856).
gattcattatgaaagtgtt

SEQ ID NO: 404873 - DNA, 19 bp, Homo sapiens
  siRNA target sequence for CSMD3 (NM_052900.2,2854-2872).
gttacagtgaacacgtatt

SEQ ID NO: 404874 - DNA, 19 bp, Homo sapiens
  siRNA target sequence for CSMD3 (NM_052900.2,2908-2926).
cgctatggtcatgatttct

SEQ ID NO: 404875 - DNA, 19 bp, Homo sapiens
  siRNA target sequence for CSMD3 (NM_052900.2,2928-2946).
cattggctctactgtttca

SEQ ID NO: 404876 - DNA, 19 bp, Homo sapiens
  siRNA target sequence for CSMD3 (NM_052900.2,2977-2995).
catgaagagccccttctat

SEQ ID NO: 404877 - DNA, 19 bp, Homo sapiens
  siRNA target sequence for CSMD3 (NM_052900.2,2985-3003).
gccccttctatgcgaaaaa

SEQ ID NO: 404878 - DNA, 19 bp, Homo sapiens
  siRNA target sequence for CSMD3 (NM_052900.2,2986-3004).
ccccttctatgcgaaaaaa

SEQ ID NO: 404879 - DNA, 19 bp, Homo sapiens
  siRNA target sequence for CSMD3 (NM_052900.2,3028-3046).
ccaacctgtgatgcattat

SEQ ID NO: 404880 - DNA, 19 bp, Homo sapiens
  siRNA target sequence for CSMD3 (NM_052900.2,3062-3080).
gagggcctagtggaacaat

SEQ ID NO: 404881 - DNA, 19 bp, Homo sapiens
  siRNA target sequence for CSMD3 (NM_052900.2,3065-3083).
ggcctagtggaacaatctt

SEQ ID NO: 404882 - DNA, 19 bp, Homo sapiens
  siRNA target sequence for CSMD3 (NM_052900.2,3066-3084).
gcctagtggaacaatctta

SEQ ID NO: 404883 - DNA, 19 bp, Homo sapiens
  siRNA target sequence for CSMD3 (NM_052900.2,3067-3085).
cctagtggaacaatcttat

SEQ ID NO: 404884 - DNA, 19 bp, Homo sapiens
  siRNA target sequence for CSMD3 (NM_052900.2,3089-3107).
ctggttacccggaatttta

SEQ ID NO: 404885 - DNA, 19 bp, Homo sapiens
  siRNA target sequence for CSMD3 (NM_052900.2,3097-3115).
ccggaattttatccaaatt

SEQ ID NO: 404886 - DNA, 19 bp, Homo sapiens
  siRNA target sequence for CSMD3 (NM_052900.2,3125-3143).
gtacatggactgttgatgt

SEQ ID NO: 404887 - DNA, 19 bp, Homo sapiens
  siRNA target sequence for CSMD3 (NM_052900.2,3152-3170).
gaaaaggtgtgcagttcaa

SEQ ID NO: 404888 - DNA, 19 bp, Homo sapiens
  siRNA target sequence for CSMD3 (NM_052900.2,3165-3183).
gttcaacttccacactttt

SEQ ID NO: 404889 - DNA, 19 bp, Homo sapiens
  siRNA target sequence for CSMD3 (NM_052900.2,3174-3192).
ccacacttttcatttggaa

SEQ ID NO: 404890 - DNA, 19 bp, Homo sapiens
  siRNA target sequence for CSMD3 (NM_052900.2,3196-3214).
catcatgactacttactga

SEQ ID NO: 404891 - DNA, 19 bp, Homo sapiens
  siRNA target sequence for CSMD3 (NM_052900.2,3252-3270).
cctgactggttcagatctt

SEQ ID NO: 404892 - DNA, 19 bp, Homo sapiens
  siRNA target sequence for CSMD3 (NM_052900.2,3286-3304).
gctggtctctatggaaatt

SEQ ID NO: 404893 - DNA, 19 bp, Homo sapiens
  siRNA target sequence for CSMD3 (NM_052900.2,3287-3305).
ctggtctctatggaaattt

SEQ ID NO: 404894 - DNA, 19 bp, Homo sapiens
  siRNA target sequence for CSMD3 (NM_052900.2,3299-3317).
gaaatttcagggctcaatt

SEQ ID NO: 404895 - DNA, 19 bp, Homo sapiens
  siRNA target sequence for CSMD3 (NM_052900.2,3308-3326).
gggctcaattgcgtttcat

SEQ ID NO: 404896 - DNA, 19 bp, Homo sapiens
  siRNA target sequence for CSMD3 (NM_052900.2,3309-3327).
ggctcaattgcgtttcatt

SEQ ID NO: 404897 - DNA, 19 bp, Homo sapiens
  siRNA target sequence for CSMD3 (NM_052900.2,3310-3328).
gctcaattgcgtttcattt

SEQ ID NO: 404898 - DNA, 19 bp, Homo sapiens
  siRNA target sequence for CSMD3 (NM_052900.2,3365-3383).
cattctctgaatataacct

SEQ ID NO: 404899 - DNA, 19 bp, Homo sapiens
  siRNA target sequence for CSMD3 (NM_052900.2,3403-3421).
ggcattcctcaatatggta

SEQ ID NO: 404900 - DNA, 19 bp, Homo sapiens
  siRNA target sequence for CSMD3 (NM_052900.2,3451-3469).
gacactctgaccttctcat

SEQ ID NO: 404901 - DNA, 19 bp, Homo sapiens
  siRNA target sequence for CSMD3 (NM_052900.2,3572-3590).
gtgcatctgcaacgaataa

SEQ ID NO: 404902 - DNA, 19 bp, Homo sapiens
  siRNA target sequence for CSMD3 (NM_052900.2,3581-3599).
caacgaataatgaaggaat

SEQ ID NO: 404903 - DNA, 19 bp, Homo sapiens
  siRNA target sequence for CSMD3 (NM_052900.2,3584-3602).
cgaataatgaaggaatttt

SEQ ID NO: 404904 - DNA, 19 bp, Homo sapiens
  siRNA target sequence for CSMD3 (NM_052900.2,3670-3688).
gcaggaaagggaatcaata

SEQ ID NO: 404905 - DNA, 19 bp, Homo sapiens
  siRNA target sequence for CSMD3 (NM_052900.2,3715-3733).
caaggagatgttcttaaga

SEQ ID NO: 404906 - DNA, 19 bp, Homo sapiens
  siRNA target sequence for CSMD3 (NM_052900.2,3719-3737).
gagatgttcttaagattta

SEQ ID NO: 404907 - DNA, 19 bp, Homo sapiens
  siRNA target sequence for CSMD3 (NM_052900.2,3760-3778).
catctactaggtgctttta

SEQ ID NO: 404908 - DNA, 19 bp, Homo sapiens
  siRNA target sequence for CSMD3 (NM_052900.2,3792-3810).
gcgcggactgacacttagt

SEQ ID NO: 404909 - DNA, 19 bp, Homo sapiens
  siRNA target sequence for CSMD3 (NM_052900.2,3793-3811).
cgcggactgacacttagta

SEQ ID NO: 404910 - DNA, 19 bp, Homo sapiens
  siRNA target sequence for CSMD3 (NM_052900.2,3795-3813).
cggactgacacttagtagt

SEQ ID NO: 404911 - DNA, 19 bp, Homo sapiens
  siRNA target sequence for CSMD3 (NM_052900.2,3796-3814).
ggactgacacttagtagta

SEQ ID NO: 404912 - DNA, 19 bp, Homo sapiens
  siRNA target sequence for CSMD3 (NM_052900.2,3799-3817).
ctgacacttagtagtactt

SEQ ID NO: 404913 - DNA, 19 bp, Homo sapiens
  siRNA target sequence for CSMD3 (NM_052900.2,3801-3819).
gacacttagtagtacttca

SEQ ID NO: 404914 - DNA, 19 bp, Homo sapiens
  siRNA target sequence for CSMD3 (NM_052900.2,3826-3844).
ctctggctagaatttaatt

SEQ ID NO: 404915 - DNA, 19 bp, Homo sapiens
  siRNA target sequence for CSMD3 (NM_052900.2,3919-3937).
ggcattccacaatttggat

SEQ ID NO: 404916 - DNA, 19 bp, Homo sapiens
  siRNA target sequence for CSMD3 (NM_052900.2,3920-3938).
gcattccacaatttggata

SEQ ID NO: 404917 - DNA, 19 bp, Homo sapiens
  siRNA target sequence for CSMD3 (NM_052900.2,3925-3943).
ccacaatttggatacaaga

SEQ ID NO: 404918 - DNA, 19 bp, Homo sapiens
  siRNA target sequence for CSMD3 (NM_052900.2,3926-3944).
cacaatttggatacaagat

SEQ ID NO: 404919 - DNA, 19 bp, Homo sapiens
  siRNA target sequence for CSMD3 (NM_052900.2,3928-3946).
caatttggatacaagatca

SEQ ID NO: 404920 - DNA, 19 bp, Homo sapiens
  siRNA target sequence for CSMD3 (NM_052900.2,3964-3982).
gctggtagcaccatcattt

SEQ ID NO: 404921 - DNA, 19 bp, Homo sapiens
  siRNA target sequence for CSMD3 (NM_052900.2,3965-3983).
ctggtagcaccatcattta

SEQ ID NO: 404922 - DNA, 19 bp, Homo sapiens
  siRNA target sequence for CSMD3 (NM_052900.2,3975-3993).
catcatttatggatgcaat

SEQ ID NO: 404923 - DNA, 19 bp, Homo sapiens
  siRNA target sequence for CSMD3 (NM_052900.2,4084-4102).
gaatgtggaggtcgtttta

SEQ ID NO: 404924 - DNA, 19 bp, Homo sapiens
  siRNA target sequence for CSMD3 (NM_052900.2,4133-4151).
ctggctatccttttccata

SEQ ID NO: 404925 - DNA, 19 bp, Homo sapiens
  siRNA target sequence for CSMD3 (NM_052900.2,4164-4182).
gcgttgcatgtggatgatt

SEQ ID NO: 404926 - DNA, 19 bp, Homo sapiens
  siRNA target sequence for CSMD3 (NM_052900.2,4166-4184).
gttgcatgtggatgattga

SEQ ID NO: 404927 - DNA, 19 bp, Homo sapiens
  siRNA target sequence for CSMD3 (NM_052900.2,4232-4250).
cggaagcatcacatgatat

SEQ ID NO: 404928 - DNA, 19 bp, Homo sapiens
  siRNA target sequence for CSMD3 (NM_052900.2,4233-4251).
ggaagcatcacatgatata

SEQ ID NO: 404929 - DNA, 19 bp, Homo sapiens
  siRNA target sequence for CSMD3 (NM_052900.2,4266-4284).
cggtccaccagaaaatgat

SEQ ID NO: 404930 - DNA, 19 bp, Homo sapiens
  siRNA target sequence for CSMD3 (NM_052900.2,4268-4286).
gtccaccagaaaatgatat

SEQ ID NO: 404931 - DNA, 19 bp, Homo sapiens
  siRNA target sequence for CSMD3 (NM_052900.2,4297-4315).
gaaattagtggatctctta

SEQ ID NO: 404932 - DNA, 19 bp, Homo sapiens
  siRNA target sequence for CSMD3 (NM_052900.2,4356-4374).
ccagtttgacacggatttt

SEQ ID NO: 404933 - DNA, 19 bp, Homo sapiens
  siRNA target sequence for CSMD3 (NM_052900.2,4357-4375).
cagtttgacacggattttt

SEQ ID NO: 404934 - DNA, 19 bp, Homo sapiens
  siRNA target sequence for CSMD3 (NM_052900.2,4359-4377).
gtttgacacggatttttat

SEQ ID NO: 404935 - DNA, 19 bp, Homo sapiens
  siRNA target sequence for CSMD3 (NM_052900.2,4449-4467).
catgaatgggactcgaaat

SEQ ID NO: 404936 - DNA, 19 bp, Homo sapiens
  siRNA target sequence for CSMD3 (NM_052900.2,4489-4507).
gacactgttgtttttcaat

SEQ ID NO: 404937 - DNA, 19 bp, Homo sapiens
  siRNA target sequence for CSMD3 (NM_052900.2,4491-4509).
cactgttgtttttcaatgt

SEQ ID NO: 404938 - DNA, 19 bp, Homo sapiens
  siRNA target sequence for CSMD3 (NM_052900.2,4583-4601).
ccagcccaccagtctgtat

SEQ ID NO: 404939 - DNA, 19 bp, Homo sapiens
  siRNA target sequence for CSMD3 (NM_052900.2,4587-4605).
cccaccagtctgtatagca

SEQ ID NO: 404940 - DNA, 19 bp, Homo sapiens
  siRNA target sequence for CSMD3 (NM_052900.2,4604-4622).
caccctgtggaggcaattt

SEQ ID NO: 404941 - DNA, 19 bp, Homo sapiens
  siRNA target sequence for CSMD3 (NM_052900.2,4606-4624).
ccctgtggaggcaatttaa

SEQ ID NO: 404942 - DNA, 19 bp, Homo sapiens
  siRNA target sequence for CSMD3 (NM_052900.2,4617-4635).
caatttaacaggatcttca

SEQ ID NO: 404943 - DNA, 19 bp, Homo sapiens
  siRNA target sequence for CSMD3 (NM_052900.2,4652-4670).
caaacttccctcatccata

SEQ ID NO: 404944 - DNA, 19 bp, Homo sapiens
  siRNA target sequence for CSMD3 (NM_052900.2,4701-4719).
caccgtcaatgcagactat

SEQ ID NO: 404945 - DNA, 19 bp, Homo sapiens
  siRNA target sequence for CSMD3 (NM_052900.2,4703-4721).
ccgtcaatgcagactatgt

SEQ ID NO: 404946 - DNA, 19 bp, Homo sapiens
  siRNA target sequence for CSMD3 (NM_052900.2,4704-4722).
cgtcaatgcagactatgtt

SEQ ID NO: 404947 - DNA, 19 bp, Homo sapiens
  siRNA target sequence for CSMD3 (NM_052900.2,4727-4745).
ccttggcgttcatcagttt

SEQ ID NO: 404948 - DNA, 19 bp, Homo sapiens
  siRNA target sequence for CSMD3 (NM_052900.2,4748-4766).
gcatagaaccaaactatga

SEQ ID NO: 404949 - DNA, 19 bp, Homo sapiens
  siRNA target sequence for CSMD3 (NM_052900.2,4783-4801).
gatggaccagacagtaata

SEQ ID NO: 404950 - DNA, 19 bp, Homo sapiens
  siRNA target sequence for CSMD3 (NM_052900.2,4884-4902).
gagtgatggatctgttagt

SEQ ID NO: 404951 - DNA, 19 bp, Homo sapiens
  siRNA target sequence for CSMD3 (NM_052900.2,4901-4919).
gttacactggatttcatct

SEQ ID NO: 404952 - DNA, 19 bp, Homo sapiens
  siRNA target sequence for CSMD3 (NM_052900.2,4905-4923).
cactggatttcatctagaa

SEQ ID NO: 404953 - DNA, 19 bp, Homo sapiens
  siRNA target sequence for CSMD3 (NM_052900.2,4938-4956).
gcgagagtcctgctttgat

SEQ ID NO: 404954 - DNA, 19 bp, Homo sapiens
  siRNA target sequence for CSMD3 (NM_052900.2,4950-4968).
ctttgatccaggcaatata

SEQ ID NO: 404955 - DNA, 19 bp, Homo sapiens
  siRNA target sequence for CSMD3 (NM_052900.2,5005-5023).
gggtcaacagtcacctatt

SEQ ID NO: 404956 - DNA, 19 bp, Homo sapiens
  siRNA target sequence for CSMD3 (NM_052900.2,5036-5054).
gttatgttcttcaaggtta

SEQ ID NO: 404957 - DNA, 19 bp, Homo sapiens
  siRNA target sequence for CSMD3 (NM_052900.2,5041-5059).
gttcttcaaggttattcaa

SEQ ID NO: 404958 - DNA, 19 bp, Homo sapiens
  siRNA target sequence for CSMD3 (NM_052900.2,5162-5180).
ctgttctatcaccaaacta

SEQ ID NO: 404959 - DNA, 19 bp, Homo sapiens
  siRNA target sequence for CSMD3 (NM_052900.2,5167-5185).
ctatcaccaaactatccaa

SEQ ID NO: 404960 - DNA, 19 bp, Homo sapiens
  siRNA target sequence for CSMD3 (NM_052900.2,5173-5191).
ccaaactatccaaaaaatt

SEQ ID NO: 404961 - DNA, 19 bp, Homo sapiens
  siRNA target sequence for CSMD3 (NM_052900.2,5193-5211).
cagtgtgggacataattgt

SEQ ID NO: 404962 - DNA, 19 bp, Homo sapiens
  siRNA target sequence for CSMD3 (NM_052900.2,5199-5217).
gggacataattgtgtttat

SEQ ID NO: 404963 - DNA, 19 bp, Homo sapiens
  siRNA target sequence for CSMD3 (NM_052900.2,5245-5263).
gtgtttggccagtttgtat

SEQ ID NO: 404964 - DNA, 19 bp, Homo sapiens
  siRNA target sequence for CSMD3 (NM_052900.2,5273-5291).
catcactccacgatgttgt

SEQ ID NO: 404965 - DNA, 19 bp, Homo sapiens
  siRNA target sequence for CSMD3 (NM_052900.2,5305-5323).
gggccaactcagcaatctt

SEQ ID NO: 404966 - DNA, 19 bp, Homo sapiens
  siRNA target sequence for CSMD3 (NM_052900.2,5314-5332).
cagcaatcttctctgttat

SEQ ID NO: 404967 - DNA, 19 bp, Homo sapiens
  siRNA target sequence for CSMD3 (NM_052900.2,5371-5389).
ctgagttcaggtaatcaga

SEQ ID NO: 404968 - DNA, 19 bp, Homo sapiens
  siRNA target sequence for CSMD3 (NM_052900.2,5378-5396).
caggtaatcagatcacaat

SEQ ID NO: 404969 - DNA, 19 bp, Homo sapiens
  siRNA target sequence for CSMD3 (NM_052900.2,5386-5404).
cagatcacaattcgattta

SEQ ID NO: 404970 - DNA, 19 bp, Homo sapiens
  siRNA target sequence for CSMD3 (NM_052900.2,5388-5406).
gatcacaattcgatttact

SEQ ID NO: 404971 - DNA, 19 bp, Homo sapiens
  siRNA target sequence for CSMD3 (NM_052900.2,5423-5441).
cagctaagggatttcactt

SEQ ID NO: 404972 - DNA, 19 bp, Homo sapiens
  siRNA target sequence for CSMD3 (NM_052900.2,5533-5551).
gtcggttcatcggttcttt

SEQ ID NO: 404973 - DNA, 19 bp, Homo sapiens
  siRNA target sequence for CSMD3 (NM_052900.2,5535-5553).
cggttcatcggttcttttt

SEQ ID NO: 404974 - DNA, 19 bp, Homo sapiens
  siRNA target sequence for CSMD3 (NM_052900.2,5543-5561).
cggttctttttgattgtaa

SEQ ID NO: 404975 - DNA, 19 bp, Homo sapiens
  siRNA target sequence for CSMD3 (NM_052900.2,5558-5576).
gtaatccaggatatattct

SEQ ID NO: 404976 - DNA, 19 bp, Homo sapiens
  siRNA target sequence for CSMD3 (NM_052900.2,5575-5593).
ctccatggatccatagcaa

SEQ ID NO: 404977 - DNA, 19 bp, Homo sapiens
  siRNA target sequence for CSMD3 (NM_052900.2,5578-5596).
catggatccatagcaatta

SEQ ID NO: 404978 - DNA, 19 bp, Homo sapiens
  siRNA target sequence for CSMD3 (NM_052900.2,5625-5643).
ccagtggaatgattcctta

SEQ ID NO: 404979 - DNA, 19 bp, Homo sapiens
  siRNA target sequence for CSMD3 (NM_052900.2,5635-5653).
gattccttacctacttgta

SEQ ID NO: 404980 - DNA, 19 bp, Homo sapiens
  siRNA target sequence for CSMD3 (NM_052900.2,5639-5657).
ccttacctacttgtattgt

SEQ ID NO: 404981 - DNA, 19 bp, Homo sapiens
  siRNA target sequence for CSMD3 (NM_052900.2,5659-5677).
ccctgtggtggaattttaa

SEQ ID NO: 404982 - DNA, 19 bp, Homo sapiens
  siRNA target sequence for CSMD3 (NM_052900.2,5683-5701).
cgcaaagggactattttgt

SEQ ID NO: 404983 - DNA, 19 bp, Homo sapiens
  siRNA target sequence for CSMD3 (NM_052900.2,5714-5732).
ctgagccttatgacaacaa

SEQ ID NO: 404984 - DNA, 19 bp, Homo sapiens
  siRNA target sequence for CSMD3 (NM_052900.2,5719-5737).
ccttatgacaacaatctga

SEQ ID NO: 404985 - DNA, 19 bp, Homo sapiens
  siRNA target sequence for CSMD3 (NM_052900.2,5796-5814).
ctttgctacagaacataat

SEQ ID NO: 404986 - DNA, 19 bp, Homo sapiens
  siRNA target sequence for CSMD3 (NM_052900.2,5847-5865).
caacaatgctccaagactt

SEQ ID NO: 404987 - DNA, 19 bp, Homo sapiens
  siRNA target sequence for CSMD3 (NM_052900.2,5890-5908).
ccccatcttttgaatagta

SEQ ID NO: 404988 - DNA, 19 bp, Homo sapiens
  siRNA target sequence for CSMD3 (NM_052900.2,5906-5924).
gtacgtctaataatctgta

SEQ ID NO: 404989 - DNA, 19 bp, Homo sapiens
  siRNA target sequence for CSMD3 (NM_052900.2,5909-5927).
cgtctaataatctgtatct

SEQ ID NO: 404990 - DNA, 19 bp, Homo sapiens
  siRNA target sequence for CSMD3 (NM_052900.2,5910-5928).
gtctaataatctgtatcta

SEQ ID NO: 404991 - DNA, 19 bp, Homo sapiens
  siRNA target sequence for CSMD3 (NM_052900.2,5935-5953).
caatcagacatcagtgttt

SEQ ID NO: 404992 - DNA, 19 bp, Homo sapiens
  siRNA target sequence for CSMD3 (NM_052900.2,6000-6018).
ctgtcctgaaccacaaact

SEQ ID NO: 404993 - DNA, 19 bp, Homo sapiens
  siRNA target sequence for CSMD3 (NM_052900.2,6017-6035).
ctcctagcagtggaattaa

SEQ ID NO: 404994 - DNA, 19 bp, Homo sapiens
  siRNA target sequence for CSMD3 (NM_052900.2,6061-6079).
gatgtagtatcctttcagt

SEQ ID NO: 404995 - DNA, 19 bp, Homo sapiens
  siRNA target sequence for CSMD3 (NM_052900.2,6076-6094).
cagtgtgatcaaggatatt

SEQ ID NO: 404996 - DNA, 19 bp, Homo sapiens
  siRNA target sequence for CSMD3 (NM_052900.2,6078-6096).
gtgtgatcaaggatattct

SEQ ID NO: 404997 - DNA, 19 bp, Homo sapiens
  siRNA target sequence for CSMD3 (NM_052900.2,6100-6118).
cagggtcactctcacatta

SEQ ID NO: 404998 - DNA, 19 bp, Homo sapiens
  siRNA target sequence for CSMD3 (NM_052900.2,6102-6120).
gggtcactctcacattaca

SEQ ID NO: 404999 - DNA, 19 bp, Homo sapiens
  siRNA target sequence for CSMD3 (NM_052900.2,6257-6275).
gcacatggacaataaatct

SEQ ID NO: 405000 - DNA, 19 bp, Homo sapiens
  siRNA target sequence for CSMD3 (NM_052900.2,6292-6310).
gtacatctccagtttgtaa

SEQ ID NO: 405001 - DNA, 19 bp, Homo sapiens
  siRNA target sequence for CSMD3 (NM_052900.2,6327-6345).
catacatgattatttggaa

SEQ ID NO: 405002 - DNA, 19 bp, Homo sapiens
  siRNA target sequence for CSMD3 (NM_052900.2,6386-6404).
ggcttagtggtcctcaaat

SEQ ID NO: 405003 - DNA, 19 bp, Homo sapiens
  siRNA target sequence for CSMD3 (NM_052900.2,6387-6405).
gcttagtggtcctcaaata

SEQ ID NO: 405004 - DNA, 19 bp, Homo sapiens
  siRNA target sequence for CSMD3 (NM_052900.2,6428-6446).
cccatgaaaccagcttata

SEQ ID NO: 405005 - DNA, 19 bp, Homo sapiens
  siRNA target sequence for CSMD3 (NM_052900.2,6475-6493).
caagggtttcatattgtat

SEQ ID NO: 405006 - DNA, 19 bp, Homo sapiens
  siRNA target sequence for CSMD3 (NM_052900.2,6490-6508).
gtataccaagcctatcagt

SEQ ID NO: 405007 - DNA, 19 bp, Homo sapiens
  siRNA target sequence for CSMD3 (NM_052900.2,6523-6541).
gatccacgcccgtttcgaa

SEQ ID NO: 405008 - DNA, 19 bp, Homo sapiens
  siRNA target sequence for CSMD3 (NM_052900.2,6529-6547).
cgcccgtttcgaaatggtt

SEQ ID NO: 405009 - DNA, 19 bp, Homo sapiens
  siRNA target sequence for CSMD3 (NM_052900.2,6571-6589).
gtgggtcaaaccatttcat

SEQ ID NO: 405010 - DNA, 19 bp, Homo sapiens
  siRNA target sequence for CSMD3 (NM_052900.2,6600-6618).
cccaggatacacattaatt

SEQ ID NO: 405011 - DNA, 19 bp, Homo sapiens
  siRNA target sequence for CSMD3 (NM_052900.2,6604-6622).
ggatacacattaattggaa

SEQ ID NO: 405012 - DNA, 19 bp, Homo sapiens
  siRNA target sequence for CSMD3 (NM_052900.2,6643-6661).
cacggagtcagtcgtaatt

SEQ ID NO: 405013 - DNA, 19 bp, Homo sapiens
  siRNA target sequence for CSMD3 (NM_052900.2,6651-6669).
cagtcgtaattggaatcat

SEQ ID NO: 405014 - DNA, 19 bp, Homo sapiens
  siRNA target sequence for CSMD3 (NM_052900.2,6717-6735).
gaatggcaccatttattct

SEQ ID NO: 405015 - DNA, 19 bp, Homo sapiens
  siRNA target sequence for CSMD3 (NM_052900.2,6773-6791).
gtttttggcttgtaagagt

SEQ ID NO: 405016 - DNA, 19 bp, Homo sapiens
  siRNA target sequence for CSMD3 (NM_052900.2,6796-6814).
cctgggaatggcatctaca

SEQ ID NO: 405017 - DNA, 19 bp, Homo sapiens
  siRNA target sequence for CSMD3 (NM_052900.2,6805-6823).
ggcatctacatcaatttta

SEQ ID NO: 405018 - DNA, 19 bp, Homo sapiens
  siRNA target sequence for CSMD3 (NM_052900.2,6828-6846).
ccttcaaacagaaccaata

SEQ ID NO: 405019 - DNA, 19 bp, Homo sapiens
  siRNA target sequence for CSMD3 (NM_052900.2,6838-6856).
gaaccaatatatgatttca

SEQ ID NO: 405020 - DNA, 19 bp, Homo sapiens
  siRNA target sequence for CSMD3 (NM_052900.2,6867-6885).
ggatggaccagaccaaaat

SEQ ID NO: 405021 - DNA, 19 bp, Homo sapiens
  siRNA target sequence for CSMD3 (NM_052900.2,6910-6928).
ggcaataccgctttggaat

SEQ ID NO: 405022 - DNA, 19 bp, Homo sapiens
  siRNA target sequence for CSMD3 (NM_052900.2,6925-6943).
gaatcagtctacagtactt

SEQ ID NO: 405023 - DNA, 19 bp, Homo sapiens
  siRNA target sequence for CSMD3 (NM_052900.2,6936-6954).
cagtacttcaaatcagatt

SEQ ID NO: 405024 - DNA, 19 bp, Homo sapiens
  siRNA target sequence for CSMD3 (NM_052900.2,6978-6996).
cacaacaagtggctttttt

SEQ ID NO: 405025 - DNA, 19 bp, Homo sapiens
  siRNA target sequence for CSMD3 (NM_052900.2,6980-6998).
caacaagtggcttttttgt

SEQ ID NO: 405026 - DNA, 19 bp, Homo sapiens
  siRNA target sequence for CSMD3 (NM_052900.2,6989-7007).
gcttttttgtgctcagtta

SEQ ID NO: 405027 - DNA, 19 bp, Homo sapiens
  siRNA target sequence for CSMD3 (NM_052900.2,7002-7020).
cagttatcacgcctatcaa

SEQ ID NO: 405028 - DNA, 19 bp, Homo sapiens
  siRNA target sequence for CSMD3 (NM_052900.2,7004-7022).
gttatcacgcctatcaact

SEQ ID NO: 405029 - DNA, 19 bp, Homo sapiens
  siRNA target sequence for CSMD3 (NM_052900.2,7051-7069).
cccaatgctgaaattttga

SEQ ID NO: 405030 - DNA, 19 bp, Homo sapiens
  siRNA target sequence for CSMD3 (NM_052900.2,7068-7086).
gacggaagatgatgaattt

SEQ ID NO: 405031 - DNA, 19 bp, Homo sapiens
  siRNA target sequence for CSMD3 (NM_052900.2,7111-7129).
cagtgtcttccaggattta

SEQ ID NO: 405032 - DNA, 19 bp, Homo sapiens
  siRNA target sequence for CSMD3 (NM_052900.2,7115-7133).
gtcttccaggatttacttt

SEQ ID NO: 405033 - DNA, 19 bp, Homo sapiens
  siRNA target sequence for CSMD3 (NM_052900.2,7130-7148).
ctttagttggtaatgcaat

SEQ ID NO: 405034 - DNA, 19 bp, Homo sapiens
  siRNA target sequence for CSMD3 (NM_052900.2,7209-7227).
gctctgtcctgccaatgaa

SEQ ID NO: 405035 - DNA, 19 bp, Homo sapiens
  siRNA target sequence for CSMD3 (NM_052900.2,7212-7230).
ctgtcctgccaatgaatta

SEQ ID NO: 405036 - DNA, 19 bp, Homo sapiens
  siRNA target sequence for CSMD3 (NM_052900.2,7237-7255).
gattctactggagtcatat

SEQ ID NO: 405037 - DNA, 19 bp, Homo sapiens
  siRNA target sequence for CSMD3 (NM_052900.2,7275-7293).
cagttacccaaatcttcaa

SEQ ID NO: 405038 - DNA, 19 bp, Homo sapiens
  siRNA target sequence for CSMD3 (NM_052900.2,7277-7295).
gttacccaaatcttcaaat

SEQ ID NO: 405039 - DNA, 19 bp, Homo sapiens
  siRNA target sequence for CSMD3 (NM_052900.2,7281-7299).
cccaaatcttcaaatgtgt

SEQ ID NO: 405040 - DNA, 19 bp, Homo sapiens
  siRNA target sequence for CSMD3 (NM_052900.2,7296-7314).
gtgtgcatggagcatttca

SEQ ID NO: 405041 - DNA, 19 bp, Homo sapiens
  siRNA target sequence for CSMD3 (NM_052900.2,7318-7336).
gaaaagggttataatatca

SEQ ID NO: 405042 - DNA, 19 bp, Homo sapiens
  siRNA target sequence for CSMD3 (NM_052900.2,7387-7405).
gtgtatgatggaccaaata

SEQ ID NO: 405043 - DNA, 19 bp, Homo sapiens
  siRNA target sequence for CSMD3 (NM_052900.2,7389-7407).
gtatgatggaccaaatatt

SEQ ID NO: 405044 - DNA, 19 bp, Homo sapiens
  siRNA target sequence for CSMD3 (NM_052900.2,7429-7447).
ctcagtggggattattcat

SEQ ID NO: 405045 - DNA, 19 bp, Homo sapiens
  siRNA target sequence for CSMD3 (NM_052900.2,7463-7481).
caagcaatggtcatgaagt

SEQ ID NO: 405046 - DNA, 19 bp, Homo sapiens
  siRNA target sequence for CSMD3 (NM_052900.2,7466-7484).
gcaatggtcatgaagtatt

SEQ ID NO: 405047 - DNA, 19 bp, Homo sapiens
  siRNA target sequence for CSMD3 (NM_052900.2,7499-7517).
cagatcatggcaataacaa

SEQ ID NO: 405048 - DNA, 19 bp, Homo sapiens
  siRNA target sequence for CSMD3 (NM_052900.2,7522-7540).
ggcttccggataagatata

SEQ ID NO: 405049 - DNA, 19 bp, Homo sapiens
  siRNA target sequence for CSMD3 (NM_052900.2,7523-7541).
gcttccggataagatatat

SEQ ID NO: 405050 - DNA, 19 bp, Homo sapiens
  siRNA target sequence for CSMD3 (NM_052900.2,7524-7542).
cttccggataagatatata

SEQ ID NO: 405051 - DNA, 19 bp, Homo sapiens
  siRNA target sequence for CSMD3 (NM_052900.2,7527-7545).
ccggataagatatatagct

SEQ ID NO: 405052 - DNA, 19 bp, Homo sapiens
  siRNA target sequence for CSMD3 (NM_052900.2,7528-7546).
cggataagatatatagctt

SEQ ID NO: 405053 - DNA, 19 bp, Homo sapiens
  siRNA target sequence for CSMD3 (NM_052900.2,7683-7701).
gtcttcctatgggtatcat

SEQ ID NO: 405054 - DNA, 19 bp, Homo sapiens
  siRNA target sequence for CSMD3 (NM_052900.2,7720-7738).
cctgcctgtcaagcaattt

SEQ ID NO: 405055 - DNA, 19 bp, Homo sapiens
  siRNA target sequence for CSMD3 (NM_052900.2,7760-7778).
caacaaatggaggaatact

SEQ ID NO: 405056 - DNA, 19 bp, Homo sapiens
  siRNA target sequence for CSMD3 (NM_052900.2,7798-7816).
ggaacgcgagttacctatt

SEQ ID NO: 405057 - DNA, 19 bp, Homo sapiens
  siRNA target sequence for CSMD3 (NM_052900.2,7799-7817).
gaacgcgagttacctattt

SEQ ID NO: 405058 - DNA, 19 bp, Homo sapiens
  siRNA target sequence for CSMD3 (NM_052900.2,7859-7877).
cagctgtatgccaatcaga

SEQ ID NO: 405059 - DNA, 19 bp, Homo sapiens
  siRNA target sequence for CSMD3 (NM_052900.2,7879-7897).
ggaacatggagcaatcata

SEQ ID NO: 405060 - DNA, 19 bp, Homo sapiens
  siRNA target sequence for CSMD3 (NM_052900.2,7909-7927).
cgctgtgttgttatttcct

SEQ ID NO: 405061 - DNA, 19 bp, Homo sapiens
  siRNA target sequence for CSMD3 (NM_052900.2,8102-8120).
gtggaattccagaactgat

SEQ ID NO: 405062 - DNA, 19 bp, Homo sapiens
  siRNA target sequence for CSMD3 (NM_052900.2,8105-8123).
gaattccagaactgattgt

SEQ ID NO: 405063 - DNA, 19 bp, Homo sapiens
  siRNA target sequence for CSMD3 (NM_052900.2,8180-8198).
gtaatcctggttttcgatt

SEQ ID NO: 405064 - DNA, 19 bp, Homo sapiens
  siRNA target sequence for CSMD3 (NM_052900.2,8224-8242).
caacaggatcacaattggt

SEQ ID NO: 405065 - DNA, 19 bp, Homo sapiens
  siRNA target sequence for CSMD3 (NM_052900.2,8281-8299).
caccctggtagtccaattt

SEQ ID NO: 405066 - DNA, 19 bp, Homo sapiens
  siRNA target sequence for CSMD3 (NM_052900.2,8287-8305).
ggtagtccaatttatggaa

SEQ ID NO: 405067 - DNA, 19 bp, Homo sapiens
  siRNA target sequence for CSMD3 (NM_052900.2,8340-8358).
ggtaacattctcatgcaat

SEQ ID NO: 405068 - DNA, 19 bp, Homo sapiens
  siRNA target sequence for CSMD3 (NM_052900.2,8354-8372).
gcaatattgggtatcttat

SEQ ID NO: 405069 - DNA, 19 bp, Homo sapiens
  siRNA target sequence for CSMD3 (NM_052900.2,8517-8535).
cggcactgtggtattctat

SEQ ID NO: 405070 - DNA, 19 bp, Homo sapiens
  siRNA target sequence for CSMD3 (NM_052900.2,8519-8537).
gcactgtggtattctatga

SEQ ID NO: 405071 - DNA, 19 bp, Homo sapiens
  siRNA target sequence for CSMD3 (NM_052900.2,8541-8559).
caatcctggatatttttta

SEQ ID NO: 405072 - DNA, 19 bp, Homo sapiens
  siRNA target sequence for CSMD3 (NM_052900.2,8577-8595).
gatatgtcaaccaaatgga

SEQ ID NO: 405073 - DNA, 19 bp, Homo sapiens
  siRNA target sequence for CSMD3 (NM_052900.2,8594-8612).
gacaatgggacaaaccttt

SEQ ID NO: 405074 - DNA, 19 bp, Homo sapiens
  siRNA target sequence for CSMD3 (NM_052900.2,8604-8622).
caaacctttaccagaatgt

SEQ ID NO: 405075 - DNA, 19 bp, Homo sapiens
  siRNA target sequence for CSMD3 (NM_052900.2,8608-8626).
cctttaccagaatgtatca

SEQ ID NO: 405076 - DNA, 19 bp, Homo sapiens
  siRNA target sequence for CSMD3 (NM_052900.2,8609-8627).
ctttaccagaatgtatcat

SEQ ID NO: 405077 - DNA, 19 bp, Homo sapiens
  siRNA target sequence for CSMD3 (NM_052900.2,8615-8633).
cagaatgtatcatgattga

SEQ ID NO: 405078 - DNA, 19 bp, Homo sapiens
  siRNA target sequence for CSMD3 (NM_052900.2,8670-8688).
gtctggcgagaagtatact

SEQ ID NO: 405079 - DNA, 19 bp, Homo sapiens
  siRNA target sequence for CSMD3 (NM_052900.2,8692-8710).
gggtctactgttcactatt

SEQ ID NO: 405080 - DNA, 19 bp, Homo sapiens
  siRNA target sequence for CSMD3 (NM_052900.2,8731-8749).
cttttaggccagtcatcaa

SEQ ID NO: 405081 - DNA, 19 bp, Homo sapiens
  siRNA target sequence for CSMD3 (NM_052900.2,8769-8787).
ccattggagtggatcacaa

SEQ ID NO: 405082 - DNA, 19 bp, Homo sapiens
  siRNA target sequence for CSMD3 (NM_052900.2,8779-8797).
ggatcacaacctcattgtt

SEQ ID NO: 405083 - DNA, 19 bp, Homo sapiens
  siRNA target sequence for CSMD3 (NM_052900.2,8846-8864).
gctctagacaggaaagcaa

SEQ ID NO: 405084 - DNA, 19 bp, Homo sapiens
  siRNA target sequence for CSMD3 (NM_052900.2,8884-8902).
gtacgttatgcttgtgata

SEQ ID NO: 405085 - DNA, 19 bp, Homo sapiens
  siRNA target sequence for CSMD3 (NM_052900.2,8894-8912).
cttgtgatactggttacat

SEQ ID NO: 405086 - DNA, 19 bp, Homo sapiens
  siRNA target sequence for CSMD3 (NM_052900.2,9021-9039).
gaaagtcttccgaattgat

SEQ ID NO: 405087 - DNA, 19 bp, Homo sapiens
  siRNA target sequence for CSMD3 (NM_052900.2,9128-9146).
gaacatggtctggaacttt

SEQ ID NO: 405088 - DNA, 19 bp, Homo sapiens
  siRNA target sequence for CSMD3 (NM_052900.2,9139-9157).
ggaactttacctaactgta

SEQ ID NO: 405089 - DNA, 19 bp, Homo sapiens
  siRNA target sequence for CSMD3 (NM_052900.2,9148-9166).
cctaactgtacaataatca

SEQ ID NO: 405090 - DNA, 19 bp, Homo sapiens
  siRNA target sequence for CSMD3 (NM_052900.2,9192-9210).
caatggactgagatatgga

SEQ ID NO: 405091 - DNA, 19 bp, Homo sapiens
  siRNA target sequence for CSMD3 (NM_052900.2,9203-9221).
gatatggagatgattatgt

SEQ ID NO: 405092 - DNA, 19 bp, Homo sapiens
  siRNA target sequence for CSMD3 (NM_052900.2,9253-9271).
ccaggctacacgatggaat

SEQ ID NO: 405093 - DNA, 19 bp, Homo sapiens
  siRNA target sequence for CSMD3 (NM_052900.2,9254-9272).
caggctacacgatggaatt

SEQ ID NO: 405094 - DNA, 19 bp, Homo sapiens
  siRNA target sequence for CSMD3 (NM_052900.2,9257-9275).
gctacacgatggaattgaa

SEQ ID NO: 405095 - DNA, 19 bp, Homo sapiens
  siRNA target sequence for CSMD3 (NM_052900.2,9258-9276).
ctacacgatggaattgaat

SEQ ID NO: 405096 - DNA, 19 bp, Homo sapiens
  siRNA target sequence for CSMD3 (NM_052900.2,9284-9302).
gaatcaggacttgtacaat

SEQ ID NO: 405097 - DNA, 19 bp, Homo sapiens
  siRNA target sequence for CSMD3 (NM_052900.2,9308-9326).
gcacatggagtggagtaat

SEQ ID NO: 405098 - DNA, 19 bp, Homo sapiens
  siRNA target sequence for CSMD3 (NM_052900.2,9404-9422).
ggggctttagtattagcta

SEQ ID NO: 405099 - DNA, 19 bp, Homo sapiens
  siRNA target sequence for CSMD3 (NM_052900.2,9499-9517).
gtaccgcagtgcttaccaa

SEQ ID NO: 405100 - DNA, 19 bp, Homo sapiens
  siRNA target sequence for CSMD3 (NM_052900.2,9503-9521).
cgcagtgcttaccaaagtt

SEQ ID NO: 405101 - DNA, 19 bp, Homo sapiens
  siRNA target sequence for CSMD3 (NM_052900.2,9507-9525).
gtgcttaccaaagttttgt

SEQ ID NO: 405102 - DNA, 19 bp, Homo sapiens
  siRNA target sequence for CSMD3 (NM_052900.2,9536-9554).
gtatacctgcccaaggaaa

SEQ ID NO: 405103 - DNA, 19 bp, Homo sapiens
  siRNA target sequence for CSMD3 (NM_052900.2,9563-9581).
gcaaaagctttatatacca

SEQ ID NO: 405104 - DNA, 19 bp, Homo sapiens
  siRNA target sequence for CSMD3 (NM_052900.2,9589-9607).
gtttcattcagctgcaatt

SEQ ID NO: 405105 - DNA, 19 bp, Homo sapiens
  siRNA target sequence for CSMD3 (NM_052900.2,9733-9751).
ggatctcagaacaatacat

SEQ ID NO: 405106 - DNA, 19 bp, Homo sapiens
  siRNA target sequence for CSMD3 (NM_052900.2,9775-9793).
gtacagttccattgcaaaa

SEQ ID NO: 405107 - DNA, 19 bp, Homo sapiens
  siRNA target sequence for CSMD3 (NM_052900.2,10006-10024).
gtgtgtagatccgataaca

SEQ ID NO: 405108 - DNA, 19 bp, Homo sapiens
  siRNA target sequence for CSMD3 (NM_052900.2,10055-10073).
ctggttctaaaatattggt

SEQ ID NO: 405109 - DNA, 19 bp, Homo sapiens
  siRNA target sequence for CSMD3 (NM_052900.2,10104-10122).
cagcccaaagctaagtgtt

SEQ ID NO: 405110 - DNA, 19 bp, Homo sapiens
  siRNA target sequence for CSMD3 (NM_052900.2,10113-10131).
gctaagtgttcctgatgat

SEQ ID NO: 405111 - DNA, 19 bp, Homo sapiens
  siRNA target sequence for CSMD3 (NM_052900.2,10138-10156).
gcccaaaattatatatgga

SEQ ID NO: 405112 - DNA, 19 bp, Homo sapiens
  siRNA target sequence for CSMD3 (NM_052900.2,10191-10209).
catgaccttaacagttact

SEQ ID NO: 405113 - DNA, 19 bp, Homo sapiens
  siRNA target sequence for CSMD3 (NM_052900.2,10194-10212).
gaccttaacagttactagt

SEQ ID NO: 405114 - DNA, 19 bp, Homo sapiens
  siRNA target sequence for CSMD3 (NM_052900.2,10204-10222).
gttactagtttcaatgctt

SEQ ID NO: 405115 - DNA, 19 bp, Homo sapiens
  siRNA target sequence for CSMD3 (NM_052900.2,10219-10237).
gcttccactgggagagtta

SEQ ID NO: 405116 - DNA, 19 bp, Homo sapiens
  siRNA target sequence for CSMD3 (NM_052900.2,10220-10238).
cttccactgggagagttaa

SEQ ID NO: 405117 - DNA, 19 bp, Homo sapiens
  siRNA target sequence for CSMD3 (NM_052900.2,10240-10258).
gcaacactgagcaatagca

SEQ ID NO: 405118 - DNA, 19 bp, Homo sapiens
  siRNA target sequence for CSMD3 (NM_052900.2,10241-10259).
caacactgagcaatagcaa

SEQ ID NO: 405119 - DNA, 19 bp, Homo sapiens
  siRNA target sequence for CSMD3 (NM_052900.2,10270-10288).
ctactttcaggggtatata

SEQ ID NO: 405120 - DNA, 19 bp, Homo sapiens
  siRNA target sequence for CSMD3 (NM_052900.2,10273-10291).
ctttcaggggtatataaaa

SEQ ID NO: 405121 - DNA, 19 bp, Homo sapiens
  siRNA target sequence for CSMD3 (NM_052900.2,10294-10312).
caggaagctcgcctaatgt

SEQ ID NO: 405122 - DNA, 19 bp, Homo sapiens
  siRNA target sequence for CSMD3 (NM_052900.2,10304-10322).
gcctaatgttacgcatata

SEQ ID NO: 405123 - DNA, 19 bp, Homo sapiens
  siRNA target sequence for CSMD3 (NM_052900.2,10305-10323).
cctaatgttacgcatatat

SEQ ID NO: 405124 - DNA, 19 bp, Homo sapiens
  siRNA target sequence for CSMD3 (NM_052900.2,10311-10329).
gttacgcatatatcttatt

SEQ ID NO: 405125 - DNA, 19 bp, Homo sapiens
  siRNA target sequence for CSMD3 (NM_052900.2,10404-10422).
gcctgatggagctacttat

SEQ ID NO: 405126 - DNA, 19 bp, Homo sapiens
  siRNA target sequence for CSMD3 (NM_052900.2,10406-10424).
ctgatggagctacttatgt

SEQ ID NO: 405127 - DNA, 19 bp, Homo sapiens
  siRNA target sequence for CSMD3 (NM_052900.2,10408-10426).
gatggagctacttatgtat

SEQ ID NO: 405128 - DNA, 19 bp, Homo sapiens
  siRNA target sequence for CSMD3 (NM_052900.2,10412-10430).
gagctacttatgtatttca

SEQ ID NO: 405129 - DNA, 19 bp, Homo sapiens
  siRNA target sequence for CSMD3 (NM_052900.2,10418-10436).
cttatgtatttcaaggatt

SEQ ID NO: 405130 - DNA, 19 bp, Homo sapiens
  siRNA target sequence for CSMD3 (NM_052900.2,10471-10489).
caaagactgggactgaata

SEQ ID NO: 405131 - DNA, 19 bp, Homo sapiens
  siRNA target sequence for CSMD3 (NM_052900.2,10516-10534).
caacctcatggtacaaata

SEQ ID NO: 405132 - DNA, 19 bp, Homo sapiens
  siRNA target sequence for CSMD3 (NM_052900.2,10522-10540).
catggtacaaatagtagtt

SEQ ID NO: 405133 - DNA, 19 bp, Homo sapiens
  siRNA target sequence for CSMD3 (NM_052900.2,10538-10556).
gttctgtagccattgctat

SEQ ID NO: 405134 - DNA, 19 bp, Homo sapiens
  siRNA target sequence for CSMD3 (NM_052900.2,10541-10559).
ctgtagccattgctattct

SEQ ID NO: 405135 - DNA, 19 bp, Homo sapiens
  siRNA target sequence for CSMD3 (NM_052900.2,10616-10634).
ggactgcacctaaaacaca

SEQ ID NO: 405136 - DNA, 19 bp, Homo sapiens
  siRNA target sequence for CSMD3 (NM_052900.2,10621-10639).
gcacctaaaacacagtata

SEQ ID NO: 405137 - DNA, 19 bp, Homo sapiens
  siRNA target sequence for CSMD3 (NM_052900.2,10724-10742).
ggaaggcggtacgatttga

SEQ ID NO: 405138 - DNA, 19 bp, Homo sapiens
  siRNA target sequence for CSMD3 (NM_052900.2,10725-10743).
gaaggcggtacgatttgat

SEQ ID NO: 405139 - DNA, 19 bp, Homo sapiens
  siRNA target sequence for CSMD3 (NM_052900.2,10755-10773).
cacggtttgcacaatggta

SEQ ID NO: 405140 - DNA, 19 bp, Homo sapiens
  siRNA target sequence for STK11IP (NM_052902.1,273-291).
ctgccgactcccctgttat

SEQ ID NO: 405141 - DNA, 19 bp, Homo sapiens
  siRNA target sequence for STK11IP (NM_052902.1,277-295).
cgactcccctgttattctt

SEQ ID NO: 405142 - DNA, 19 bp, Homo sapiens
  siRNA target sequence for STK11IP (NM_052902.1,372-390).
cagggcccatcaagatttt

SEQ ID NO: 405143 - DNA, 19 bp, Homo sapiens
  siRNA target sequence for STK11IP (NM_052902.1,449-467).
ggcctccgaggcatctact

SEQ ID NO: 405144 - DNA, 19 bp, Homo sapiens
  siRNA target sequence for STK11IP (NM_052902.1,596-614).
gcactgaccgccttagaca

SEQ ID NO: 405145 - DNA, 19 bp, Homo sapiens
  siRNA target sequence for STK11IP (NM_052902.1,638-656).
ctgcgtttcttgaacctaa

SEQ ID NO: 405146 - DNA, 19 bp, Homo sapiens
  siRNA target sequence for STK11IP (NM_052902.1,726-744).
cctataatcgcctgcattt

SEQ ID NO: 405147 - DNA, 19 bp, Homo sapiens
  siRNA target sequence for STK11IP (NM_052902.1,1040-1058).
gtcttgtcactgacagatt

SEQ ID NO: 405148 - DNA, 19 bp, Homo sapiens
  siRNA target sequence for STK11IP (NM_052902.1,1042-1060).
cttgtcactgacagatttt

SEQ ID NO: 405149 - DNA, 19 bp, Homo sapiens
  siRNA target sequence for STK11IP (NM_052902.1,1189-1207).
gcccctgcttcataaggtt

SEQ ID NO: 405150 - DNA, 19 bp, Homo sapiens
  siRNA target sequence for STK11IP (NM_052902.1,1191-1209).
ccctgcttcataaggttaa

SEQ ID NO: 405151 - DNA, 19 bp, Homo sapiens
  siRNA target sequence for STK11IP (NM_052902.1,1193-1211).
ctgcttcataaggttaaga

SEQ ID NO: 405152 - DNA, 19 bp, Homo sapiens
  siRNA target sequence for STK11IP (NM_052902.1,2157-2175).
ggaggcctctgttccaaaa

SEQ ID NO: 405153 - DNA, 19 bp, Homo sapiens
  siRNA target sequence for STK11IP (NM_052902.1,2167-2185).
gttccaaaagacagaatct

SEQ ID NO: 405154 - DNA, 19 bp, Homo sapiens
  siRNA target sequence for STK11IP (NM_052902.1,2339-2357).
cttgacagggccaagaaca

SEQ ID NO: 405155 - DNA, 19 bp, Homo sapiens
  siRNA target sequence for STK11IP (NM_052902.1,2577-2595).
gcaggctgtacctgttgaa

SEQ ID NO: 405156 - DNA, 19 bp, Homo sapiens
  siRNA target sequence for STK11IP (NM_052902.1,2985-3003).
ccaccctgttcctgttaga

SEQ ID NO: 405157 - DNA, 19 bp, Homo sapiens
  siRNA target sequence for STK11IP (NM_052902.1,2988-3006).
ccctgttcctgttagatga

SEQ ID NO: 405158 - DNA, 19 bp, Homo sapiens
  siRNA target sequence for SLITRK1 (NM_052910.1,947-965).
ggggacgtttgcaaagaga

SEQ ID NO: 405159 - DNA, 19 bp, Homo sapiens
  siRNA target sequence for SLITRK1 (NM_052910.1,948-966).
gggacgtttgcaaagagaa

SEQ ID NO: 405160 - DNA, 19 bp, Homo sapiens
  siRNA target sequence for SLITRK1 (NM_052910.1,998-1016).
ctacacgtagactgtgaaa

SEQ ID NO: 405161 - DNA, 19 bp, Homo sapiens
  siRNA target sequence for SLITRK1 (NM_052910.1,1100-1118).
cgacttttccctaatgagt

SEQ ID NO: 405162 - DNA, 19 bp, Homo sapiens
  siRNA target sequence for SLITRK1 (NM_052910.1,1101-1119).
gacttttccctaatgagtt

SEQ ID NO: 405163 - DNA, 19 bp, Homo sapiens
  siRNA target sequence for SLITRK1 (NM_052910.1,1110-1128).
ctaatgagttcgctaactt

SEQ ID NO: 405164 - DNA, 19 bp, Homo sapiens
  siRNA target sequence for SLITRK1 (NM_052910.1,1117-1135).
gttcgctaacttttataat

SEQ ID NO: 405165 - DNA, 19 bp, Homo sapiens
  siRNA target sequence for SLITRK1 (NM_052910.1,1439-1457).
cggggtaacaggctgaaaa

SEQ ID NO: 405166 - DNA, 19 bp, Homo sapiens
  siRNA target sequence for SLITRK1 (NM_052910.1,1480-1498).
ggagcaaatccctggtatt

SEQ ID NO: 405167 - DNA, 19 bp, Homo sapiens
  siRNA target sequence for SLITRK1 (NM_052910.1,1544-1562).
ctgctctccctgaaagaat

SEQ ID NO: 405168 - DNA, 19 bp, Homo sapiens
  siRNA target sequence for SLITRK1 (NM_052910.1,1797-1815).
ctccaaacggaggtacaaa

SEQ ID NO: 405169 - DNA, 19 bp, Homo sapiens
  siRNA target sequence for SLITRK1 (NM_052910.1,1867-1885).
gggtagctccaggaacaaa

SEQ ID NO: 405170 - DNA, 19 bp, Homo sapiens
  siRNA target sequence for SLITRK1 (NM_052910.1,1878-1896).
ggaacaaacccttagctaa

SEQ ID NO: 405171 - DNA, 19 bp, Homo sapiens
  siRNA target sequence for SLITRK1 (NM_052910.1,1882-1900).
caaacccttagctaacagt

SEQ ID NO: 405172 - DNA, 19 bp, Homo sapiens
  siRNA target sequence for SLITRK1 (NM_052910.1,1937-1955).
ccagggtcgggtttaaaga

SEQ ID NO: 405173 - DNA, 19 bp, Homo sapiens
  siRNA target sequence for SLITRK1 (NM_052910.1,2014-2032).
cgtgcaggagcttttccta

SEQ ID NO: 405174 - DNA, 19 bp, Homo sapiens
  siRNA target sequence for SLITRK1 (NM_052910.1,2064-2082).
cgcactttgtggattacaa

SEQ ID NO: 405175 - DNA, 19 bp, Homo sapiens
  siRNA target sequence for SLITRK1 (NM_052910.1,2110-2128).
caataacatcgctactgta

SEQ ID NO: 405176 - DNA, 19 bp, Homo sapiens
  siRNA target sequence for SLITRK1 (NM_052910.1,2120-2138).
gctactgtagagaacaaca

SEQ ID NO: 405177 - DNA, 19 bp, Homo sapiens
  siRNA target sequence for SLITRK1 (NM_052910.1,2156-2174).
gacctcaggtggctataca

SEQ ID NO: 405178 - DNA, 19 bp, Homo sapiens
  siRNA target sequence for SLITRK1 (NM_052910.1,2168-2186).
ctatacatggatagcaatt

SEQ ID NO: 405179 - DNA, 19 bp, Homo sapiens
  siRNA target sequence for SLITRK1 (NM_052910.1,2196-2214).
cgctgtcccgggagaaatt

SEQ ID NO: 405180 - DNA, 19 bp, Homo sapiens
  siRNA target sequence for SLITRK1 (NM_052910.1,2303-2321).
ctgaggatcctcattctca

SEQ ID NO: 405181 - DNA, 19 bp, Homo sapiens
  siRNA target sequence for SLITRK1 (NM_052910.1,2423-2441).
ggggtgctggaccagttaa

SEQ ID NO: 405182 - DNA, 19 bp, Homo sapiens
  siRNA target sequence for SLITRK1 (NM_052910.1,2559-2577).
gtgagacgccggtgaactt

SEQ ID NO: 405183 - DNA, 19 bp, Homo sapiens
  siRNA target sequence for SLITRK1 (NM_052910.1,2561-2579).
gagacgccggtgaacttct

SEQ ID NO: 405184 - DNA, 19 bp, Homo sapiens
  siRNA target sequence for SLITRK1 (NM_052910.1,2563-2581).
gacgccggtgaacttcttt

SEQ ID NO: 405185 - DNA, 19 bp, Homo sapiens
  siRNA target sequence for SLITRK1 (NM_052910.1,2638-2656).
gatctcgcccacgttaact

SEQ ID NO: 405186 - DNA, 19 bp, Homo sapiens
  siRNA target sequence for SLITRK1 (NM_052910.1,2649-2667).
cgttaacttcgcacagtaa

SEQ ID NO: 405187 - DNA, 19 bp, Homo sapiens
  siRNA target sequence for SLITRK1 (NM_052910.1,2650-2668).
gttaacttcgcacagtaaa

SEQ ID NO: 405188 - DNA, 19 bp, Homo sapiens
  siRNA target sequence for SLITRK1 (NM_052910.1,2792-2810).
gtgggcatgctcgtgttta

SEQ ID NO: 405189 - DNA, 19 bp, Homo sapiens
  siRNA target sequence for SLITRK1 (NM_052910.1,2796-2814).
gcatgctcgtgtttatcct

SEQ ID NO: 405190 - DNA, 19 bp, Homo sapiens
  siRNA target sequence for SLITRK1 (NM_052910.1,2853-2871).
cctccgcgtccgagattaa

SEQ ID NO: 405191 - DNA, 19 bp, Homo sapiens
  siRNA target sequence for SLITRK1 (NM_052910.1,2854-2872).
ctccgcgtccgagattaat

SEQ ID NO: 405192 - DNA, 19 bp, Homo sapiens
  siRNA target sequence for SLITRK1 (NM_052910.1,2904-2922).
ggcacaatgggccttacaa

SEQ ID NO: 405193 - DNA, 19 bp, Homo sapiens
  siRNA target sequence for EFO1 (NM_052911.1,898-916).
gagaattcctccaaagtta

SEQ ID NO: 405194 - DNA, 19 bp, Homo sapiens
  siRNA target sequence for EFO1 (NM_052911.1,900-918).
gaattcctccaaagttact

SEQ ID NO: 405195 - DNA, 19 bp, Homo sapiens
  siRNA target sequence for EFO1 (NM_052911.1,917-935).
ctaaaaaaagtgacgataa

SEQ ID NO: 405196 - DNA, 19 bp, Homo sapiens
  siRNA target sequence for EFO1 (NM_052911.1,930-948).
cgataagaattcagaaaca

SEQ ID NO: 405197 - DNA, 19 bp, Homo sapiens
  siRNA target sequence for EFO1 (NM_052911.1,957-975).
ggattctcaaaagaatcta

SEQ ID NO: 405198 - DNA, 19 bp, Homo sapiens
  siRNA target sequence for EFO1 (NM_052911.1,1057-1075).
gaaacacgcatgagtacaa

SEQ ID NO: 405199 - DNA, 19 bp, Homo sapiens
  siRNA target sequence for EFO1 (NM_052911.1,1082-1100).
caaaggcagcatctaatga

SEQ ID NO: 405200 - DNA, 19 bp, Homo sapiens
  siRNA target sequence for EFO1 (NM_052911.1,1090-1108).
gcatctaatgataaagcta

SEQ ID NO: 405201 - DNA, 19 bp, Homo sapiens
  siRNA target sequence for EFO1 (NM_052911.1,1094-1112).
ctaatgataaagctactaa

SEQ ID NO: 405202 - DNA, 19 bp, Homo sapiens
  siRNA target sequence for EFO1 (NM_052911.1,1099-1117).
gataaagctactaaatcca

SEQ ID NO: 405203 - DNA, 19 bp, Homo sapiens
  siRNA target sequence for EFO1 (NM_052911.1,1106-1124).
ctactaaatccattaataa

SEQ ID NO: 405204 - DNA, 19 bp, Homo sapiens
  siRNA target sequence for EFO1 (NM_052911.1,1132-1150).
gtgactgtgaggggatatt

SEQ ID NO: 405205 - DNA, 19 bp, Homo sapiens
  siRNA target sequence for EFO1 (NM_052911.1,1221-1239).
gcttaaccggagatcacaa

SEQ ID NO: 405206 - DNA, 19 bp, Homo sapiens
  siRNA target sequence for EFO1 (NM_052911.1,1237-1255).
caaaggctacaacaattaa

SEQ ID NO: 405207 - DNA, 19 bp, Homo sapiens
  siRNA target sequence for EFO1 (NM_052911.1,1272-1290).
gtcgttacgcagtagagaa

SEQ ID NO: 405208 - DNA, 19 bp, Homo sapiens
  siRNA target sequence for EFO1 (NM_052911.1,1274-1292).
cgttacgcagtagagaaat

SEQ ID NO: 405209 - DNA, 19 bp, Homo sapiens
  siRNA target sequence for EFO1 (NM_052911.1,1275-1293).
gttacgcagtagagaaatt

SEQ ID NO: 405210 - DNA, 19 bp, Homo sapiens
  siRNA target sequence for EFO1 (NM_052911.1,1298-1316).
gtcaagttcaagcagttaa

SEQ ID NO: 405211 - DNA, 19 bp, Homo sapiens
  siRNA target sequence for EFO1 (NM_052911.1,1355-1373).
gtactcagagtaaatctaa

SEQ ID NO: 405212 - DNA, 19 bp, Homo sapiens
  siRNA target sequence for EFO1 (NM_052911.1,1358-1376).
ctcagagtaaatctaataa

SEQ ID NO: 405213 - DNA, 19 bp, Homo sapiens
  siRNA target sequence for EFO1 (NM_052911.1,1533-1551).
gcaaggatctgaaaagtgt

SEQ ID NO: 405214 - DNA, 19 bp, Homo sapiens
  siRNA target sequence for EFO1 (NM_052911.1,1552-1570).
cctcagaagactactagaa

SEQ ID NO: 405215 - DNA, 19 bp, Homo sapiens
  siRNA target sequence for EFO1 (NM_052911.1,1628-1646).
cttcagtggtcccgaaaaa

SEQ ID NO: 405216 - DNA, 19 bp, Homo sapiens
  siRNA target sequence for EFO1 (NM_052911.1,1656-1674).
gaagaagtcggttcataca

SEQ ID NO: 405217 - DNA, 19 bp, Homo sapiens
  siRNA target sequence for EFO1 (NM_052911.1,1659-1677).
gaagtcggttcatacacaa

SEQ ID NO: 405218 - DNA, 19 bp, Homo sapiens
  siRNA target sequence for EFO1 (NM_052911.1,1664-1682).
cggttcatacacaagtgaa

SEQ ID NO: 405219 - DNA, 19 bp, Homo sapiens
  siRNA target sequence for EFO1 (NM_052911.1,1666-1684).
gttcatacacaagtgaata

SEQ ID NO: 405220 - DNA, 19 bp, Homo sapiens
  siRNA target sequence for EFO1 (NM_052911.1,1669-1687).
catacacaagtgaatacta

SEQ ID NO: 405221 - DNA, 19 bp, Homo sapiens
  siRNA target sequence for EFO1 (NM_052911.1,1675-1693).
caagtgaatactaacacaa

SEQ ID NO: 405222 - DNA, 19 bp, Homo sapiens
  siRNA target sequence for EFO1 (NM_052911.1,1722-1740).
gcctgaacaaagtgataat

SEQ ID NO: 405223 - DNA, 19 bp, Homo sapiens
  siRNA target sequence for EFO1 (NM_052911.1,1763-1781).
gcaaacgaggtagtattct

SEQ ID NO: 405224 - DNA, 19 bp, Homo sapiens
  siRNA target sequence for EFO1 (NM_052911.1,1828-1846).
gaggtaaaaaaggaatctt

SEQ ID NO: 405225 - DNA, 19 bp, Homo sapiens
  siRNA target sequence for EFO1 (NM_052911.1,1830-1848).
ggtaaaaaaggaatcttca

SEQ ID NO: 405226 - DNA, 19 bp, Homo sapiens
  siRNA target sequence for EFO1 (NM_052911.1,1944-1962).
ggatgtgcaatgtaatcgt

SEQ ID NO: 405227 - DNA, 19 bp, Homo sapiens
  siRNA target sequence for EFO1 (NM_052911.1,1945-1963).
gatgtgcaatgtaatcgtt

SEQ ID NO: 405228 - DNA, 19 bp, Homo sapiens
  siRNA target sequence for EFO1 (NM_052911.1,1960-1978).
cgttttttcccaagtagaa

SEQ ID NO: 405229 - DNA, 19 bp, Homo sapiens
  siRNA target sequence for EFO1 (NM_052911.1,1987-2005).
cctgtgaaatgtatactaa

SEQ ID NO: 405230 - DNA, 19 bp, Homo sapiens
  siRNA target sequence for EFO1 (NM_052911.1,2034-2052).
ctccaactggactaaaatt

SEQ ID NO: 405231 - DNA, 19 bp, Homo sapiens
  siRNA target sequence for EFO1 (NM_052911.1,2072-2090).
ctgtgcagcacaataagtt

SEQ ID NO: 405232 - DNA, 19 bp, Homo sapiens
  siRNA target sequence for EFO1 (NM_052911.1,2106-2124).
ccctaaattaggcttatta

SEQ ID NO: 405233 - DNA, 19 bp, Homo sapiens
  siRNA target sequence for EFO1 (NM_052911.1,2118-2136).
cttattacgaaccagtttt

SEQ ID NO: 405234 - DNA, 19 bp, Homo sapiens
  siRNA target sequence for EFO1 (NM_052911.1,2161-2179).
catccagtgactcaaagta

SEQ ID NO: 405235 - DNA, 19 bp, Homo sapiens
  siRNA target sequence for EFO1 (NM_052911.1,2259-2277).
gaaaattaatgatattaca

SEQ ID NO: 405236 - DNA, 19 bp, Homo sapiens
  siRNA target sequence for EFO1 (NM_052911.1,2318-2336).
gtcatttggccaatgagat

SEQ ID NO: 405237 - DNA, 19 bp, Homo sapiens
  siRNA target sequence for EFO1 (NM_052911.1,2350-2368).
ccaccattggataatcaga

SEQ ID NO: 405238 - DNA, 19 bp, Homo sapiens
  siRNA target sequence for EFO1 (NM_052911.1,2359-2377).
gataatcagatgaaacatt

SEQ ID NO: 405239 - DNA, 19 bp, Homo sapiens
  siRNA target sequence for EFO1 (NM_052911.1,2383-2401).
gattcagcatcaaataaga

SEQ ID NO: 405240 - DNA, 19 bp, Homo sapiens
  siRNA target sequence for EFO1 (NM_052911.1,2408-2426).
gccaatgtttggaatccaa

SEQ ID NO: 405241 - DNA, 19 bp, Homo sapiens
  siRNA target sequence for EFO1 (NM_052911.1,2436-2454).
cagtccagtggaaaatgtt

SEQ ID NO: 405242 - DNA, 19 bp, Homo sapiens
  siRNA target sequence for EFO1 (NM_052911.1,2468-2486).
ctctgctcagtcaagcaaa

SEQ ID NO: 405243 - DNA, 19 bp, Homo sapiens
  siRNA target sequence for EFO1 (NM_052911.1,2472-2490).
gctcagtcaagcaaaaatt

SEQ ID NO: 405244 - DNA, 19 bp, Homo sapiens
  siRNA target sequence for EFO1 (NM_052911.1,2521-2539).
gctccccaacagcatagta

SEQ ID NO: 405245 - DNA, 19 bp, Homo sapiens
  siRNA target sequence for EFO1 (NM_052911.1,2522-2540).
ctccccaacagcatagtat

SEQ ID NO: 405246 - DNA, 19 bp, Homo sapiens
  siRNA target sequence for EFO1 (NM_052911.1,2527-2545).
caacagcatagtattctca

SEQ ID NO: 405247 - DNA, 19 bp, Homo sapiens
  siRNA target sequence for EFO1 (NM_052911.1,2542-2560).
ctcagtaaccagacatcta

SEQ ID NO: 405248 - DNA, 19 bp, Homo sapiens
  siRNA target sequence for EFO1 (NM_052911.1,2578-2596).
gagacaccacgaaatcatt

SEQ ID NO: 405249 - DNA, 19 bp, Homo sapiens
  siRNA target sequence for EFO1 (NM_052911.1,2580-2598).
gacaccacgaaatcattct

SEQ ID NO: 405250 - DNA, 19 bp, Homo sapiens
  siRNA target sequence for EFO1 (NM_052911.1,2615-2633).
cccatttggagataacaat

SEQ ID NO: 405251 - DNA, 19 bp, Homo sapiens
  siRNA target sequence for EFO1 (NM_052911.1,2616-2634).
ccatttggagataacaatt

SEQ ID NO: 405252 - DNA, 19 bp, Homo sapiens
  siRNA target sequence for EFO1 (NM_052911.1,2731-2749).
gtttgtggaatgctgtata

SEQ ID NO: 405253 - DNA, 19 bp, Homo sapiens
  siRNA target sequence for EFO1 (NM_052911.1,2790-2808).
ccacaaccagtttataagt

SEQ ID NO: 405254 - DNA, 19 bp, Homo sapiens
  siRNA target sequence for EFO1 (NM_052911.1,2856-2874).
ccctgatggcaggataata

SEQ ID NO: 405255 - DNA, 19 bp, Homo sapiens
  siRNA target sequence for EFO1 (NM_052911.1,2857-2875).
cctgatggcaggataataa

SEQ ID NO: 405256 - DNA, 19 bp, Homo sapiens
  siRNA target sequence for EFO1 (NM_052911.1,2898-2916).
gtatgccctgaaaaaggtt

SEQ ID NO: 405257 - DNA, 19 bp, Homo sapiens
  siRNA target sequence for EFO1 (NM_052911.1,2931-2949).
gatggttgacaatgattta

SEQ ID NO: 405258 - DNA, 19 bp, Homo sapiens
  siRNA target sequence for EFO1 (NM_052911.1,2934-2952).
ggttgacaatgatttaggt

SEQ ID NO: 405259 - DNA, 19 bp, Homo sapiens
  siRNA target sequence for EFO1 (NM_052911.1,2935-2953).
gttgacaatgatttaggtt

SEQ ID NO: 405260 - DNA, 19 bp, Homo sapiens
  siRNA target sequence for EFO1 (NM_052911.1,2962-2980).
gctccactaatgtgctatt

SEQ ID NO: 405261 - DNA, 19 bp, Homo sapiens
  siRNA target sequence for EFO1 (NM_052911.1,2965-2983).
ccactaatgtgctattcca

SEQ ID NO: 405262 - DNA, 19 bp, Homo sapiens
  siRNA target sequence for EFO1 (NM_052911.1,2973-2991).
gtgctattccagaactaaa

SEQ ID NO: 405263 - DNA, 19 bp, Homo sapiens
  siRNA target sequence for EFO1 (NM_052911.1,2984-3002).
gaactaaaacacttctctt

SEQ ID NO: 405264 - DNA, 19 bp, Homo sapiens
  siRNA target sequence for EFO1 (NM_052911.1,2987-3005).
ctaaaacacttctcttcat

SEQ ID NO: 405265 - DNA, 19 bp, Homo sapiens
  siRNA target sequence for EFO1 (NM_052911.1,3052-3070).
caatggggctacagagtta

SEQ ID NO: 405266 - DNA, 19 bp, Homo sapiens
  siRNA target sequence for EFO1 (NM_052911.1,3057-3075).
gggctacagagttatagaa

SEQ ID NO: 405267 - DNA, 19 bp, Homo sapiens
  siRNA target sequence for EFO1 (NM_052911.1,3059-3077).
gctacagagttatagaaga

SEQ ID NO: 405268 - DNA, 19 bp, Homo sapiens
  siRNA target sequence for EFO1 (NM_052911.1,3065-3083).
gagttatagaagagaaact

SEQ ID NO: 405269 - DNA, 19 bp, Homo sapiens
  siRNA target sequence for EFO1 (NM_052911.1,3168-3186).
ctgcgggatcagtcgaata

SEQ ID NO: 405270 - DNA, 19 bp, Homo sapiens
  siRNA target sequence for EFO1 (NM_052911.1,3201-3219).
gatgcgtcggaagaaaatt

SEQ ID NO: 405271 - DNA, 19 bp, Homo sapiens
  siRNA target sequence for EFO1 (NM_052911.1,3220-3238).
gcttctcgcatgattgaat

SEQ ID NO: 405272 - DNA, 19 bp, Homo sapiens
  siRNA target sequence for EFO1 (NM_052911.1,3235-3253).
gaatgcctaaggagtaact

SEQ ID NO: 405273 - DNA, 19 bp, Homo sapiens
  siRNA target sequence for EFO1 (NM_052911.1,3239-3257).
gcctaaggagtaactttat

SEQ ID NO: 405274 - DNA, 19 bp, Homo sapiens
  siRNA target sequence for EFO1 (NM_052911.1,3240-3258).
cctaaggagtaactttata

SEQ ID NO: 405275 - DNA, 19 bp, Homo sapiens
  siRNA target sequence for EFO1 (NM_052911.1,3266-3284).
catatttgagcaaagaaga

SEQ ID NO: 405276 - DNA, 19 bp, Homo sapiens
  siRNA target sequence for EFO1 (NM_052911.1,3338-3356).
gtggcactggtcaatttct

SEQ ID NO: 405277 - DNA, 19 bp, Homo sapiens
  siRNA target sequence for EFO1 (NM_052911.1,3344-3362).
ctggtcaatttctggtata

SEQ ID NO: 405278 - DNA, 19 bp, Homo sapiens
  siRNA target sequence for EFO1 (NM_052911.1,3346-3364).
ggtcaatttctggtatata

SEQ ID NO: 405279 - DNA, 19 bp, Homo sapiens
  siRNA target sequence for KIAA1913 (NM_052913.2,2535-2553).
ggcaaaatccggctttatt

SEQ ID NO: 405280 - DNA, 19 bp, Homo sapiens
  siRNA target sequence for KIAA1913 (NM_052913.2,2580-2598).
ggagtgctcatctccatta

SEQ ID NO: 405281 - DNA, 19 bp, Homo sapiens
  siRNA target sequence for KIAA1913 (NM_052913.2,2585-2603).
gctcatctccattatagga

SEQ ID NO: 405282 - DNA, 19 bp, Homo sapiens
  siRNA target sequence for KIAA1913 (NM_052913.2,2591-2609).
ctccattataggaattgct

SEQ ID NO: 405283 - DNA, 19 bp, Homo sapiens
  siRNA target sequence for KIAA1913 (NM_052913.2,2593-2611).
ccattataggaattgctat

SEQ ID NO: 405284 - DNA, 19 bp, Homo sapiens
  siRNA target sequence for KIAA1913 (NM_052913.2,2608-2626).
ctatggccgttcttggata

SEQ ID NO: 405285 - DNA, 19 bp, Homo sapiens
  siRNA target sequence for KIAA1913 (NM_052913.2,2823-2841).
gaaaaccgtgacaaagaga

SEQ ID NO: 405286 - DNA, 19 bp, Homo sapiens
  siRNA target sequence for KIAA1913 (NM_052913.2,2883-2901).
gacattcacacgctaagaa

SEQ ID NO: 405287 - DNA, 19 bp, Homo sapiens
  siRNA target sequence for KIAA1913 (NM_052913.2,2984-3002).
ctcgagattggcagcaaat

SEQ ID NO: 405288 - DNA, 19 bp, Homo sapiens
  siRNA target sequence for KIAA1913 (NM_052913.2,2989-3007).
gattggcagcaaatacgat

SEQ ID NO: 405289 - DNA, 19 bp, Homo sapiens
  siRNA target sequence for KIAA1913 (NM_052913.2,3057-3075).
gaggaggatgaacttatgt

SEQ ID NO: 405290 - DNA, 19 bp, Homo sapiens
  siRNA target sequence for KIAA1913 (NM_052913.2,3059-3077).
ggaggatgaacttatgtta

SEQ ID NO: 405291 - DNA, 19 bp, Homo sapiens
  siRNA target sequence for KIAA1913 (NM_052913.2,3060-3078).
gaggatgaacttatgttaa

SEQ ID NO: 405292 - DNA, 19 bp, Homo sapiens
  siRNA target sequence for KIAA1913 (NM_052913.2,3163-3181).
ccaagacaactgatgataa

SEQ ID NO: 405293 - DNA, 19 bp, Homo sapiens
  siRNA target sequence for KIAA1913 (NM_052913.2,3182-3200).
gaccagcggctctaagaaa

SEQ ID NO: 405294 - DNA, 19 bp, Homo sapiens
  siRNA target sequence for KIAA1913 (NM_052913.2,3185-3203).
cagcggctctaagaaatgt

SEQ ID NO: 405295 - DNA, 19 bp, Homo sapiens
  siRNA target sequence for KIAA1913 (NM_052913.2,3187-3205).
gcggctctaagaaatgtga

SEQ ID NO: 405296 - DNA, 19 bp, Homo sapiens
  siRNA target sequence for KIAA1913 (NM_052913.2,3188-3206).
cggctctaagaaatgtgaa

SEQ ID NO: 405297 - DNA, 19 bp, Homo sapiens
  siRNA target sequence for KIAA1913 (NM_052913.2,3202-3220).
gtgaaaccaagtcaattgt

SEQ ID NO: 405298 - DNA, 19 bp, Homo sapiens
  siRNA target sequence for KIAA1913 (NM_052913.2,3227-3245).
gtccatcagtgcttttaca

SEQ ID NO: 405299 - DNA, 19 bp, Homo sapiens
  siRNA target sequence for KIAA1913 (NM_052913.2,3229-3247).
ccatcagtgcttttacatt

SEQ ID NO: 405300 - DNA, 19 bp, Homo sapiens
  siRNA target sequence for KIAA1913 (NM_052913.2,3252-3270).
gtgatcaaacttaataact

SEQ ID NO: 405301 - DNA, 19 bp, Homo sapiens
  siRNA target sequence for KIAA1913 (NM_052913.2,3254-3272).
gatcaaacttaataactgt

SEQ ID NO: 405302 - DNA, 19 bp, Homo sapiens
  siRNA target sequence for KIAA1913 (NM_052913.2,3279-3297).
gatgagcccagtatagata

SEQ ID NO: 405303 - DNA, 19 bp, Homo sapiens
  siRNA target sequence for KIAA1913 (NM_052913.2,3282-3300).
gagcccagtatagataaca

SEQ ID NO: 405304 - DNA, 19 bp, Homo sapiens
  siRNA target sequence for KIAA1913 (NM_052913.2,3285-3303).
cccagtatagataacatca

SEQ ID NO: 405305 - DNA, 19 bp, Homo sapiens
  siRNA target sequence for KIAA1913 (NM_052913.2,3312-3330).
gctgacaacctcaaaagta

SEQ ID NO: 405306 - DNA, 19 bp, Homo sapiens
  siRNA target sequence for KIAA1913 (NM_052913.2,3406-3424).
cagtgctaccaaggaataa

SEQ ID NO: 405307 - DNA, 19 bp, Homo sapiens
  siRNA target sequence for KIAA1913 (NM_052913.2,3408-3426).
gtgctaccaaggaataatt

SEQ ID NO: 405308 - DNA, 19 bp, Homo sapiens
  siRNA target sequence for KIAA1913 (NM_052913.2,3411-3429).
ctaccaaggaataattcca

SEQ ID NO: 405309 - DNA, 19 bp, Homo sapiens
  siRNA target sequence for KIAA1913 (NM_052913.2,3439-3457).
cgttgtcgagtcagtacaa

SEQ ID NO: 405310 - DNA, 19 bp, Homo sapiens
  siRNA target sequence for KIAA1913 (NM_052913.2,3519-3537).
cagtttgggtccaatacat

SEQ ID NO: 405311 - DNA, 19 bp, Homo sapiens
  siRNA target sequence for KIAA1913 (NM_052913.2,3549-3567).
ctctcgtcacactcaaagt

SEQ ID NO: 405312 - DNA, 19 bp, Homo sapiens
  siRNA target sequence for KIAA1913 (NM_052913.2,3562-3580).
caaagtccttggacttaga

SEQ ID NO: 405313 - DNA, 19 bp, Homo sapiens
  siRNA target sequence for KIAA1913 (NM_052913.2,3582-3600).
cggggtccctccactctaa

SEQ ID NO: 405314 - DNA, 19 bp, Homo sapiens
  siRNA target sequence for KIAA1913 (NM_052913.2,3584-3602).
gggtccctccactctaact

SEQ ID NO: 405315 - DNA, 19 bp, Homo sapiens
  siRNA target sequence for KIAA1913 (NM_052913.2,3608-3626).
ggcagaacaacggaaacat

SEQ ID NO: 405316 - DNA, 19 bp, Homo sapiens
  siRNA target sequence for KIAA1913 (NM_052913.2,3656-3674).
cagcaagggatatatgaaa

SEQ ID NO: 405317 - DNA, 19 bp, Homo sapiens
  siRNA target sequence for KIAA1913 (NM_052913.2,3658-3676).
gcaagggatatatgaaact

SEQ ID NO: 405318 - DNA, 19 bp, Homo sapiens
  siRNA target sequence for KIAA1913 (NM_052913.2,3749-3767).
ggagaagcttcttatgatt

SEQ ID NO: 405319 - DNA, 19 bp, Homo sapiens
  siRNA target sequence for LENG8 (NM_052925.1,161-179).
ggccaacgtgggtgatcaa

SEQ ID NO: 405320 - DNA, 19 bp, Homo sapiens
  siRNA target sequence for LENG8 (NM_052925.1,850-868).
gaggtctcaagttcaacat

SEQ ID NO: 405321 - DNA, 19 bp, Homo sapiens
  siRNA target sequence for LENG8 (NM_052925.1,920-938).
gggccagcacagtggtttt

SEQ ID NO: 405322 - DNA, 19 bp, Homo sapiens
  siRNA target sequence for LENG8 (NM_052925.1,1136-1154).
cggctcggcctataccatt

SEQ ID NO: 405323 - DNA, 19 bp, Homo sapiens
  siRNA target sequence for LENG8 (NM_052925.1,1360-1378).
gcaaccgcaacgtcttcat

SEQ ID NO: 405324 - DNA, 19 bp, Homo sapiens
  siRNA target sequence for LENG8 (NM_052925.1,1618-1636).
ccaagcgcagtcgaaagaa

SEQ ID NO: 405325 - DNA, 19 bp, Homo sapiens
  siRNA target sequence for LENG8 (NM_052925.1,1875-1893).
cgccctgtggcagttttga

SEQ ID NO: 405326 - DNA, 19 bp, Homo sapiens
  siRNA target sequence for LENG8 (NM_052925.1,1950-1968).
gcctgcgagcagatgaagt

SEQ ID NO: 405327 - DNA, 19 bp, Homo sapiens
  siRNA target sequence for LENG8 (NM_052925.1,2058-2076).
ggtgaccatgaagagttta

SEQ ID NO: 405328 - DNA, 19 bp, Homo sapiens
  siRNA target sequence for LENG8 (NM_052925.1,2101-2119).
cgctgtacgccgagaactt

SEQ ID NO: 405329 - DNA, 19 bp, Homo sapiens
  siRNA target sequence for LENG8 (NM_052925.1,2126-2144).
caatgtgggcgagtttact

SEQ ID NO: 405330 - DNA, 19 bp, Homo sapiens
  siRNA target sequence for LENG8 (NM_052925.1,2146-2164).
cctaccgaatcctctacta

SEQ ID NO: 405331 - DNA, 19 bp, Homo sapiens
  siRNA target sequence for LENG8 (NM_052925.1,2151-2169).
cgaatcctctactacatct

SEQ ID NO: 405332 - DNA, 19 bp, Homo sapiens
  siRNA target sequence for LENG8 (NM_052925.1,2244-2262).
gcccacgccttggcattaa

SEQ ID NO: 405333 - DNA, 19 bp, Homo sapiens
  siRNA target sequence for LENG8 (NM_052925.1,2247-2265).
cacgccttggcattaagga

SEQ ID NO: 405334 - DNA, 19 bp, Homo sapiens
  siRNA target sequence for LENG8 (NM_052925.1,2281-2299).
gcaactaccaccgcttttt

SEQ ID NO: 405335 - DNA, 19 bp, Homo sapiens
  siRNA target sequence for PNMA5 (NM_052926.1,573-591).
gtcctagggagaatgttca

SEQ ID NO: 405336 - DNA, 19 bp, Homo sapiens
  siRNA target sequence for PNMA5 (NM_052926.1,607-625).
ccaaggcagtcttcattga

SEQ ID NO: 405337 - DNA, 19 bp, Homo sapiens
  siRNA target sequence for PNMA5 (NM_052926.1,608-626).
caaggcagtcttcattgaa

SEQ ID NO: 405338 - DNA, 19 bp, Homo sapiens
  siRNA target sequence for PNMA5 (NM_052926.1,630-648).
gctgacactgtcaattaca

SEQ ID NO: 405339 - DNA, 19 bp, Homo sapiens
  siRNA target sequence for PNMA5 (NM_052926.1,633-651).
gacactgtcaattacacta

SEQ ID NO: 405340 - DNA, 19 bp, Homo sapiens
  siRNA target sequence for PNMA5 (NM_052926.1,729-747).
ctcagtagactgaactact

SEQ ID NO: 405341 - DNA, 19 bp, Homo sapiens
  siRNA target sequence for PNMA5 (NM_052926.1,740-758).
gaactacttcctgaaagat

SEQ ID NO: 405342 - DNA, 19 bp, Homo sapiens
  siRNA target sequence for PNMA5 (NM_052926.1,756-774).
gatgagggccgaagtatga

SEQ ID NO: 405343 - DNA, 19 bp, Homo sapiens
  siRNA target sequence for PNMA5 (NM_052926.1,831-849).
gaggtcatgccccaagtta

SEQ ID NO: 405344 - DNA, 19 bp, Homo sapiens
  siRNA target sequence for PNMA5 (NM_052926.1,833-851).
ggtcatgccccaagttaga

SEQ ID NO: 405345 - DNA, 19 bp, Homo sapiens
  siRNA target sequence for PNMA5 (NM_052926.1,864-882).
gagcctccgaaagaaagta

SEQ ID NO: 405346 - DNA, 19 bp, Homo sapiens
  siRNA target sequence for PNMA5 (NM_052926.1,960-978).
gagcaggtcactgagataa

SEQ ID NO: 405347 - DNA, 19 bp, Homo sapiens
  siRNA target sequence for PNMA5 (NM_052926.1,1038-1056).
gggcctgctctgtcaatca

SEQ ID NO: 405348 - DNA, 19 bp, Homo sapiens
  siRNA target sequence for PNMA5 (NM_052926.1,1039-1057).
ggcctgctctgtcaatcat

SEQ ID NO: 405349 - DNA, 19 bp, Homo sapiens
  siRNA target sequence for PNMA5 (NM_052926.1,1065-1083).
ctccaggccaacaatgact

SEQ ID NO: 405350 - DNA, 19 bp, Homo sapiens
  siRNA target sequence for PNMA5 (NM_052926.1,1071-1089).
gccaacaatgactccataa

SEQ ID NO: 405351 - DNA, 19 bp, Homo sapiens
  siRNA target sequence for PNMA5 (NM_052926.1,1102-1120).
gccttgacgccctaaagca

SEQ ID NO: 405352 - DNA, 19 bp, Homo sapiens
  siRNA target sequence for PNMA5 (NM_052926.1,1109-1127).
cgccctaaagcagatcttt

SEQ ID NO: 405353 - DNA, 19 bp, Homo sapiens
  siRNA target sequence for PNMA5 (NM_052926.1,1118-1136).
gcagatctttggggataaa

SEQ ID NO: 405354 - DNA, 19 bp, Homo sapiens
  siRNA target sequence for PNMA5 (NM_052926.1,1147-1165).
gagcctctcagtttaggtt

SEQ ID NO: 405355 - DNA, 19 bp, Homo sapiens
  siRNA target sequence for PNMA5 (NM_052926.1,1169-1187).
gcagacctctccgaagatt

SEQ ID NO: 405356 - DNA, 19 bp, Homo sapiens
  siRNA target sequence for PNMA5 (NM_052926.1,1277-1295).
catgattcgtctgaaacat

SEQ ID NO: 405357 - DNA, 19 bp, Homo sapiens
  siRNA target sequence for PNMA5 (NM_052926.1,1357-1375).
gagggtgtcctcccaattt

SEQ ID NO: 405358 - DNA, 19 bp, Homo sapiens
  siRNA target sequence for PNMA5 (NM_052926.1,1526-1544).
cgtgcaggcaaggtctttt

SEQ ID NO: 405359 - DNA, 19 bp, Homo sapiens
  siRNA target sequence for PNMA5 (NM_052926.1,1527-1545).
gtgcaggcaaggtctttta

SEQ ID NO: 405360 - DNA, 19 bp, Homo sapiens
  siRNA target sequence for PNMA5 (NM_052926.1,1577-1595).
cttacccccattagtgaaa

SEQ ID NO: 405361 - DNA, 19 bp, Homo sapiens
  siRNA target sequence for PNMA5 (NM_052926.1,1602-1620).
cggctgttaggcagtgaaa

SEQ ID NO: 405362 - DNA, 19 bp, Homo sapiens
  siRNA target sequence for TSGA13 (NM_052933.2,536-554).
ggaatggttgtcaatagca

SEQ ID NO: 405363 - DNA, 19 bp, Homo sapiens
  siRNA target sequence for TSGA13 (NM_052933.2,545-563).
gtcaatagcaaagagattt

SEQ ID NO: 405364 - DNA, 19 bp, Homo sapiens
  siRNA target sequence for TSGA13 (NM_052933.2,570-588).
cagtcgggcaatcaaaatt

SEQ ID NO: 405365 - DNA, 19 bp, Homo sapiens
  siRNA target sequence for TSGA13 (NM_052933.2,574-592).
cgggcaatcaaaatttgtt

SEQ ID NO: 405366 - DNA, 19 bp, Homo sapiens
  siRNA target sequence for TSGA13 (NM_052933.2,576-594).
ggcaatcaaaatttgttct

SEQ ID NO: 405367 - DNA, 19 bp, Homo sapiens
  siRNA target sequence for TSGA13 (NM_052933.2,577-595).
gcaatcaaaatttgttcta

SEQ ID NO: 405368 - DNA, 19 bp, Homo sapiens
  siRNA target sequence for TSGA13 (NM_052933.2,596-614).
gagaaccttcggcattaca

SEQ ID NO: 405369 - DNA, 19 bp, Homo sapiens
  siRNA target sequence for TSGA13 (NM_052933.2,598-616).
gaaccttcggcattacaca

SEQ ID NO: 405370 - DNA, 19 bp, Homo sapiens
  siRNA target sequence for TSGA13 (NM_052933.2,624-642).
caaatttggcccagtacta

SEQ ID NO: 405371 - DNA, 19 bp, Homo sapiens
  siRNA target sequence for TSGA13 (NM_052933.2,699-717).
ccagcttcatgttaaaagt

SEQ ID NO: 405372 - DNA, 19 bp, Homo sapiens
  siRNA target sequence for TSGA13 (NM_052933.2,722-740).
cagtatgaccaggataaga

SEQ ID NO: 405373 - DNA, 19 bp, Homo sapiens
  siRNA target sequence for TSGA13 (NM_052933.2,733-751).
ggataagacgttactgatt

SEQ ID NO: 405374 - DNA, 19 bp, Homo sapiens
  siRNA target sequence for TSGA13 (NM_052933.2,734-752).
gataagacgttactgatta

SEQ ID NO: 405375 - DNA, 19 bp, Homo sapiens
  siRNA target sequence for TSGA13 (NM_052933.2,777-795).
caatcacccagcaagacaa

SEQ ID NO: 405376 - DNA, 19 bp, Homo sapiens
  siRNA target sequence for TSGA13 (NM_052933.2,796-814).
ggagagtgcatcaaaatat

SEQ ID NO: 405377 - DNA, 19 bp, Homo sapiens
  siRNA target sequence for TSGA13 (NM_052933.2,835-853).
caaggtcatggaaagtcat

SEQ ID NO: 405378 - DNA, 19 bp, Homo sapiens
  siRNA target sequence for TSGA13 (NM_052933.2,838-856).
ggtcatggaaagtcatcat

SEQ ID NO: 405379 - DNA, 19 bp, Homo sapiens
  siRNA target sequence for TSGA13 (NM_052933.2,915-933).
gatctaagctgaaaccaat

SEQ ID NO: 405380 - DNA, 19 bp, Homo sapiens
  siRNA target sequence for TSGA13 (NM_052933.2,918-936).
ctaagctgaaaccaatctt

SEQ ID NO: 405381 - DNA, 19 bp, Homo sapiens
  siRNA target sequence for TSGA13 (NM_052933.2,930-948).
caatcttccctttgatact

SEQ ID NO: 405382 - DNA, 19 bp, Homo sapiens
  siRNA target sequence for TSGA13 (NM_052933.2,966-984).
ccaagcgagaacaatggtt

SEQ ID NO: 405383 - DNA, 19 bp, Homo sapiens
  siRNA target sequence for TSGA13 (NM_052933.2,967-985).
caagcgagaacaatggttt

SEQ ID NO: 405384 - DNA, 19 bp, Homo sapiens
  siRNA target sequence for TSGA13 (NM_052933.2,971-989).
cgagaacaatggtttaggt

SEQ ID NO: 405385 - DNA, 19 bp, Homo sapiens
  siRNA target sequence for TSGA13 (NM_052933.2,972-990).
gagaacaatggtttaggtt

SEQ ID NO: 405386 - DNA, 19 bp, Homo sapiens
  siRNA target sequence for TSGA13 (NM_052933.2,1014-1032).
gcgaagggaagtattcaaa

SEQ ID NO: 405387 - DNA, 19 bp, Homo sapiens
  siRNA target sequence for TSGA13 (NM_052933.2,1085-1103).
ccagtccatgagagagata

SEQ ID NO: 405388 - DNA, 19 bp, Homo sapiens
  siRNA target sequence for TSGA13 (NM_052933.2,1088-1106).
gtccatgagagagatatga

SEQ ID NO: 405389 - DNA, 19 bp, Homo sapiens
  siRNA target sequence for TSGA13 (NM_052933.2,1130-1148).
gcgagtgaaaggccaattt

SEQ ID NO: 405390 - DNA, 19 bp, Homo sapiens
  siRNA target sequence for TSGA13 (NM_052933.2,1134-1152).
gtgaaaggccaatttccaa

SEQ ID NO: 405391 - DNA, 19 bp, Homo sapiens
  siRNA target sequence for TSGA13 (NM_052933.2,1179-1197).
catcgctcttggaagacat

SEQ ID NO: 405392 - DNA, 19 bp, Homo sapiens
  siRNA target sequence for TSGA13 (NM_052933.2,1247-1265).
ccgcagtggattatcaaaa

SEQ ID NO: 405393 - DNA, 19 bp, Homo sapiens
  siRNA target sequence for TSGA13 (NM_052933.2,1248-1266).
cgcagtggattatcaaaaa

SEQ ID NO: 405394 - DNA, 19 bp, Homo sapiens
  siRNA target sequence for MGC20781 (NM_052935.2,327-345).
gaccggttacaggtgattt

SEQ ID NO: 405395 - DNA, 19 bp, Homo sapiens
  siRNA target sequence for MGC20781 (NM_052935.2,329-347).
ccggttacaggtgatttct

SEQ ID NO: 405396 - DNA, 19 bp, Homo sapiens
  siRNA target sequence for MGC20781 (NM_052935.2,331-349).
ggttacaggtgatttctga

SEQ ID NO: 405397 - DNA, 19 bp, Homo sapiens
  siRNA target sequence for MGC20781 (NM_052935.2,362-380).
cttgagcaggtttgcatat

SEQ ID NO: 405398 - DNA, 19 bp, Homo sapiens
  siRNA target sequence for MGC20781 (NM_052935.2,368-386).
caggtttgcatataatgga

SEQ ID NO: 405399 - DNA, 19 bp, Homo sapiens
  siRNA target sequence for MGC20781 (NM_052935.2,370-388).
ggtttgcatataatggaaa

SEQ ID NO: 405400 - DNA, 19 bp, Homo sapiens
  siRNA target sequence for MGC20781 (NM_052935.2,394-412).
gcccttcttcttacaatat

SEQ ID NO: 405401 - DNA, 19 bp, Homo sapiens
  siRNA target sequence for MGC20781 (NM_052935.2,414-432).
ctggataatagcaagatca

SEQ ID NO: 405402 - DNA, 19 bp, Homo sapiens
  siRNA target sequence for MGC20781 (NM_052935.2,463-481).
cgctccttcaccactatta

SEQ ID NO: 405403 - DNA, 19 bp, Homo sapiens
  siRNA target sequence for MGC20781 (NM_052935.2,474-492).
cactattacccaattgaga

SEQ ID NO: 405404 - DNA, 19 bp, Homo sapiens
  siRNA target sequence for MGC20781 (NM_052935.2,606-624).
gttagagagtccaatgcaa

SEQ ID NO: 405405 - DNA, 19 bp, Homo sapiens
  siRNA target sequence for MGC20781 (NM_052935.2,674-692).
cattccccttttcatcttt

SEQ ID NO: 405406 - DNA, 19 bp, Homo sapiens
  siRNA target sequence for MGC20781 (NM_052935.2,694-712).
ctgcgggcattggtgatat

SEQ ID NO: 405407 - DNA, 19 bp, Homo sapiens
  siRNA target sequence for MGC20781 (NM_052935.2,697-715).
cgggcattggtgatatcct

SEQ ID NO: 405408 - DNA, 19 bp, Homo sapiens
  siRNA target sequence for MGC20781 (NM_052935.2,767-785).
gtctaactacatggatttt

SEQ ID NO: 405409 - DNA, 19 bp, Homo sapiens
  siRNA target sequence for MGC20781 (NM_052935.2,795-813).
ggttttctccagggattta

SEQ ID NO: 405410 - DNA, 19 bp, Homo sapiens
  siRNA target sequence for MGC20781 (NM_052935.2,868-886).
gttacttccagcaacttga

SEQ ID NO: 405411 - DNA, 19 bp, Homo sapiens
  siRNA target sequence for AUTL2 (NM_052936.2,129-147).
gtcagttttatccaagtat

SEQ ID NO: 405412 - DNA, 19 bp, Homo sapiens
  siRNA target sequence for AUTL2 (NM_052936.2,131-149).
cagttttatccaagtatga

SEQ ID NO: 405413 - DNA, 19 bp, Homo sapiens
  siRNA target sequence for AUTL2 (NM_052936.2,140-158).
ccaagtatgaagatcagat

SEQ ID NO: 405414 - DNA, 19 bp, Homo sapiens
  siRNA target sequence for AUTL2 (NM_052936.2,170-188).
ctgactacctagaagaata

SEQ ID NO: 405415 - DNA, 19 bp, Homo sapiens
  siRNA target sequence for AUTL2 (NM_052936.2,221-239).
ggaagcagcatctccttaa

SEQ ID NO: 405416 - DNA, 19 bp, Homo sapiens
  siRNA target sequence for AUTL2 (NM_052936.2,274-292).
gctcgtctatggtttacat

SEQ ID NO: 405417 - DNA, 19 bp, Homo sapiens
  siRNA target sequence for AUTL2 (NM_052936.2,277-295).
cgtctatggtttacataca

SEQ ID NO: 405418 - DNA, 19 bp, Homo sapiens
  siRNA target sequence for AUTL2 (NM_052936.2,379-397).
ctggctcaagcccttatct

SEQ ID NO: 405419 - DNA, 19 bp, Homo sapiens
  siRNA target sequence for AUTL2 (NM_052936.2,465-483).
cctacagtgcttcttagat

SEQ ID NO: 405420 - DNA, 19 bp, Homo sapiens
  siRNA target sequence for AUTL2 (NM_052936.2,466-484).
ctacagtgcttcttagata

SEQ ID NO: 405421 - DNA, 19 bp, Homo sapiens
  siRNA target sequence for AUTL2 (NM_052936.2,471-489).
gtgcttcttagatagaaaa

SEQ ID NO: 405422 - DNA, 19 bp, Homo sapiens
  siRNA target sequence for AUTL2 (NM_052936.2,473-491).
gcttcttagatagaaaaga

SEQ ID NO: 405423 - DNA, 19 bp, Homo sapiens
  siRNA target sequence for AUTL2 (NM_052936.2,474-492).
cttcttagatagaaaagat

SEQ ID NO: 405424 - DNA, 19 bp, Homo sapiens
  siRNA target sequence for AUTL2 (NM_052936.2,574-592).
gttgcacaggtgttaaaaa

SEQ ID NO: 405425 - DNA, 19 bp, Homo sapiens
  siRNA target sequence for AUTL2 (NM_052936.2,614-632).
ggaattccttggctgttta

SEQ ID NO: 405426 - DNA, 19 bp, Homo sapiens
  siRNA target sequence for AUTL2 (NM_052936.2,715-733).
gacaggcctcccgattctt

SEQ ID NO: 405427 - DNA, 19 bp, Homo sapiens
  siRNA target sequence for AUTL2 (NM_052936.2,717-735).
caggcctcccgattcttta

SEQ ID NO: 405428 - DNA, 19 bp, Homo sapiens
  siRNA target sequence for AUTL2 (NM_052936.2,806-824).
cccttcgcctgggcataaa

SEQ ID NO: 405429 - DNA, 19 bp, Homo sapiens
  siRNA target sequence for AUTL2 (NM_052936.2,811-829).
cgcctgggcataaaccaaa

SEQ ID NO: 405430 - DNA, 19 bp, Homo sapiens
  siRNA target sequence for AUTL2 (NM_052936.2,814-832).
ctgggcataaaccaaatca

SEQ ID NO: 405431 - DNA, 19 bp, Homo sapiens
  siRNA target sequence for AUTL2 (NM_052936.2,831-849).
caatcctgtctatgttgat

SEQ ID NO: 405432 - DNA, 19 bp, Homo sapiens
  siRNA target sequence for AUTL2 (NM_052936.2,844-862).
gttgatgcattcaaagagt

SEQ ID NO: 405433 - DNA, 19 bp, Homo sapiens
  siRNA target sequence for AUTL2 (NM_052936.2,904-922).
ccaaataacgcgtattatt

SEQ ID NO: 405434 - DNA, 19 bp, Homo sapiens
  siRNA target sequence for AUTL2 (NM_052936.2,913-931).
gcgtattatttcataggat

SEQ ID NO: 405435 - DNA, 19 bp, Homo sapiens
  siRNA target sequence for AUTL2 (NM_052936.2,914-932).
cgtattatttcataggatt

SEQ ID NO: 405436 - DNA, 19 bp, Homo sapiens
  siRNA target sequence for AUTL2 (NM_052936.2,968-986).
caacccagacctttgttga

SEQ ID NO: 405437 - DNA, 19 bp, Homo sapiens
  siRNA target sequence for AUTL2 (NM_052936.2,1004-1022).
cggttaatgaccagacttt

SEQ ID NO: 405438 - DNA, 19 bp, Homo sapiens
  siRNA target sequence for AUTL2 (NM_052936.2,1042-1060).
cagcgaatgaacatcctaa

SEQ ID NO: 405439 - DNA, 19 bp, Homo sapiens
  siRNA target sequence for AUTL2 (NM_052936.2,1163-1181).
ggatgtttgaattagttca

SEQ ID NO: 405440 - DNA, 19 bp, Homo sapiens
  siRNA target sequence for MGC8974 (NM_052940.3,494-512).
cgacaatgtggatcacatt

SEQ ID NO: 405441 - DNA, 19 bp, Homo sapiens
  siRNA target sequence for MGC8974 (NM_052940.3,671-689).
caggtatctcgtgatttca

SEQ ID NO: 405442 - DNA, 19 bp, Homo sapiens
  siRNA target sequence for MGC8974 (NM_052940.3,673-691).
ggtatctcgtgatttcaga

SEQ ID NO: 405443 - DNA, 19 bp, Homo sapiens
  siRNA target sequence for MGC8974 (NM_052940.3,674-692).
gtatctcgtgatttcagaa

SEQ ID NO: 405444 - DNA, 19 bp, Homo sapiens
  siRNA target sequence for MGC8974 (NM_052940.3,695-713).
gcttgaggagattaagtct

SEQ ID NO: 405445 - DNA, 19 bp, Homo sapiens
  siRNA target sequence for MGC8974 (NM_052940.3,696-714).
cttgaggagattaagtctt

SEQ ID NO: 405446 - DNA, 19 bp, Homo sapiens
  siRNA target sequence for MGC8974 (NM_052940.3,792-810).
gaagccctgtctagtgtaa

SEQ ID NO: 405447 - DNA, 19 bp, Homo sapiens
  siRNA target sequence for MGC8974 (NM_052940.3,796-814).
ccctgtctagtgtaactca

SEQ ID NO: 405448 - DNA, 19 bp, Homo sapiens
  siRNA target sequence for MGC8974 (NM_052940.3,815-833).
gctccacctgaaggataat

SEQ ID NO: 405449 - DNA, 19 bp, Homo sapiens
  siRNA target sequence for MGC8974 (NM_052940.3,868-886).
caccagttcgagtgatgaa

SEQ ID NO: 405450 - DNA, 19 bp, Homo sapiens
  siRNA target sequence for MGC8974 (NM_052940.3,870-888).
ccagttcgagtgatgaaaa

SEQ ID NO: 405451 - DNA, 19 bp, Homo sapiens
  siRNA target sequence for MGC8974 (NM_052940.3,891-909).
ggccttgagaatctaacat

SEQ ID NO: 405452 - DNA, 19 bp, Homo sapiens
  siRNA target sequence for MGC8974 (NM_052940.3,894-912).
cttgagaatctaacattat

SEQ ID NO: 405453 - DNA, 19 bp, Homo sapiens
  siRNA target sequence for MGC8974 (NM_052940.3,978-996).
ctaaactgcttagatatct

SEQ ID NO: 405454 - DNA, 19 bp, Homo sapiens
  siRNA target sequence for MGC8974 (NM_052940.3,1083-1101).
gaatttgatcatagtaact

SEQ ID NO: 405455 - DNA, 19 bp, Homo sapiens
  siRNA target sequence for MGC8974 (NM_052940.3,1257-1275).
gcagacacccacatgaact

SEQ ID NO: 405456 - DNA, 19 bp, Homo sapiens
  siRNA target sequence for MGC8974 (NM_052940.3,1279-1297).
ccgagaaactccagttcta

SEQ ID NO: 405457 - DNA, 19 bp, Homo sapiens
  siRNA target sequence for MGC8974 (NM_052940.3,1318-1336).
gccatgggccagtgttgaa

SEQ ID NO: 405458 - DNA, 19 bp, Homo sapiens
  siRNA target sequence for MGC8974 (NM_052940.3,1334-1352).
gaaacacgaagctatctca

SEQ ID NO: 405459 - DNA, 19 bp, Homo sapiens
  siRNA target sequence for MGC8974 (NM_052940.3,1396-1414).
cagagacagaacagaataa

SEQ ID NO: 405460 - DNA, 19 bp, Homo sapiens
  siRNA target sequence for MGC8974 (NM_052940.3,1400-1418).
gacagaacagaataactct

SEQ ID NO: 405461 - DNA, 19 bp, Homo sapiens
  siRNA target sequence for MGC16491 (NM_052943.2,787-805).
ggtgagacgccagtttgaa

SEQ ID NO: 405462 - DNA, 19 bp, Homo sapiens
  siRNA target sequence for MGC16491 (NM_052943.2,788-806).
gtgagacgccagtttgaat

SEQ ID NO: 405463 - DNA, 19 bp, Homo sapiens
  siRNA target sequence for MGC16491 (NM_052943.2,1064-1082).
gccctgcagcgctacatgt

SEQ ID NO: 405464 - DNA, 19 bp, Homo sapiens
  siRNA target sequence for MGC16491 (NM_052943.2,1364-1382).
ccagccactgtcaattact

SEQ ID NO: 405465 - DNA, 19 bp, Homo sapiens
  siRNA target sequence for MGC16491 (NM_052943.2,1365-1383).
cagccactgtcaattacta

SEQ ID NO: 405466 - DNA, 19 bp, Homo sapiens
  siRNA target sequence for NOSTRIN (NM_052946.2,209-227).
cagcggacctgcatcaaaa

SEQ ID NO: 405467 - DNA, 19 bp, Homo sapiens
  siRNA target sequence for NOSTRIN (NM_052946.2,229-247).
cttggcaaagcaattgaat

SEQ ID NO: 405468 - DNA, 19 bp, Homo sapiens
  siRNA target sequence for NOSTRIN (NM_052946.2,254-272).
caataaaaccgacttatca

SEQ ID NO: 405469 - DNA, 19 bp, Homo sapiens
  siRNA target sequence for NOSTRIN (NM_052946.2,263-281).
cgacttatcaagtcctaaa

SEQ ID NO: 405470 - DNA, 19 bp, Homo sapiens
  siRNA target sequence for NOSTRIN (NM_052946.2,264-282).
gacttatcaagtcctaaat

SEQ ID NO: 405471 - DNA, 19 bp, Homo sapiens
  siRNA target sequence for NOSTRIN (NM_052946.2,305-323).
cacttgacaatgaagttga

SEQ ID NO: 405472 - DNA, 19 bp, Homo sapiens
  siRNA target sequence for NOSTRIN (NM_052946.2,307-325).
cttgacaatgaagttgaaa

SEQ ID NO: 405473 - DNA, 19 bp, Homo sapiens
  siRNA target sequence for NOSTRIN (NM_052946.2,427-445).
gaaagctccaagcaatcta

SEQ ID NO: 405474 - DNA, 19 bp, Homo sapiens
  siRNA target sequence for NOSTRIN (NM_052946.2,432-450).
ctccaagcaatctatgact

SEQ ID NO: 405475 - DNA, 19 bp, Homo sapiens
  siRNA target sequence for NOSTRIN (NM_052946.2,462-480).
gcggaagctcctcaataaa

SEQ ID NO: 405476 - DNA, 19 bp, Homo sapiens
  siRNA target sequence for NOSTRIN (NM_052946.2,474-492).
caataaactgacaaaatca

SEQ ID NO: 405477 - DNA, 19 bp, Homo sapiens
  siRNA target sequence for NOSTRIN (NM_052946.2,620-638).
gaattcaacttttatgcaa

SEQ ID NO: 405478 - DNA, 19 bp, Homo sapiens
  siRNA target sequence for NOSTRIN (NM_052946.2,648-666).
ccagtacagccaacatatt

SEQ ID NO: 405479 - DNA, 19 bp, Homo sapiens
  siRNA target sequence for NOSTRIN (NM_052946.2,649-667).
cagtacagccaacatattt

SEQ ID NO: 405480 - DNA, 19 bp, Homo sapiens
  siRNA target sequence for NOSTRIN (NM_052946.2,651-669).
gtacagccaacatatttct

SEQ ID NO: 405481 - DNA, 19 bp, Homo sapiens
  siRNA target sequence for NOSTRIN (NM_052946.2,692-710).
catgccacacgcagattca

SEQ ID NO: 405482 - DNA, 19 bp, Homo sapiens
  siRNA target sequence for NOSTRIN (NM_052946.2,801-819).
cctgttaacggattacttt

SEQ ID NO: 405483 - DNA, 19 bp, Homo sapiens
  siRNA target sequence for NOSTRIN (NM_052946.2,930-948).
cctggaacgaatgcttaaa

SEQ ID NO: 405484 - DNA, 19 bp, Homo sapiens
  siRNA target sequence for NOSTRIN (NM_052946.2,931-949).
ctggaacgaatgcttaaaa

SEQ ID NO: 405485 - DNA, 19 bp, Homo sapiens
  siRNA target sequence for NOSTRIN (NM_052946.2,996-1014).
cacagcagcgttaatggat

SEQ ID NO: 405486 - DNA, 19 bp, Homo sapiens
  siRNA target sequence for NOSTRIN (NM_052946.2,1004-1022).
cgttaatggatgagaacaa

SEQ ID NO: 405487 - DNA, 19 bp, Homo sapiens
  siRNA target sequence for NOSTRIN (NM_052946.2,1041-1059).
ggaagcgaactcctacaaa

SEQ ID NO: 405488 - DNA, 19 bp, Homo sapiens
  siRNA target sequence for NOSTRIN (NM_052946.2,1045-1063).
gcgaactcctacaaactgt

SEQ ID NO: 405489 - DNA, 19 bp, Homo sapiens
  siRNA target sequence for NOSTRIN (NM_052946.2,1052-1070).
cctacaaactgtcatcaat

SEQ ID NO: 405490 - DNA, 19 bp, Homo sapiens
  siRNA target sequence for NOSTRIN (NM_052946.2,1101-1119).
cagccatccttgtagtaat

SEQ ID NO: 405491 - DNA, 19 bp, Homo sapiens
  siRNA target sequence for NOSTRIN (NM_052946.2,1138-1156).
gaaaaggagcatactcata

SEQ ID NO: 405492 - DNA, 19 bp, Homo sapiens
  siRNA target sequence for NOSTRIN (NM_052946.2,1143-1161).
ggagcatactcatagctat

SEQ ID NO: 405493 - DNA, 19 bp, Homo sapiens
  siRNA target sequence for NOSTRIN (NM_052946.2,1147-1165).
catactcatagctatgtga

SEQ ID NO: 405494 - DNA, 19 bp, Homo sapiens
  siRNA target sequence for NOSTRIN (NM_052946.2,1172-1190).
ctcggccttttttaatgaa

SEQ ID NO: 405495 - DNA, 19 bp, Homo sapiens
  siRNA target sequence for NOSTRIN (NM_052946.2,1233-1251).
gagcaatccaggttcttca

SEQ ID NO: 405496 - DNA, 19 bp, Homo sapiens
  siRNA target sequence for NOSTRIN (NM_052946.2,1321-1339).
caagatgatgagttgaatt

SEQ ID NO: 405497 - DNA, 19 bp, Homo sapiens
  siRNA target sequence for NOSTRIN (NM_052946.2,1347-1365).
gggtgacattgtgattata

SEQ ID NO: 405498 - DNA, 19 bp, Homo sapiens
  siRNA target sequence for NOSTRIN (NM_052946.2,1388-1406).
ggtggtttggatctttgaa

SEQ ID NO: 405499 - DNA, 19 bp, Homo sapiens
  siRNA target sequence for NOSTRIN (NM_052946.2,1389-1407).
gtggtttggatctttgaat

SEQ ID NO: 405500 - DNA, 19 bp, Homo sapiens
  siRNA target sequence for NOSTRIN (NM_052946.2,1443-1461).
ggagttaccttcaaatgct

SEQ ID NO: 405501 - DNA, 19 bp, Homo sapiens
  siRNA target sequence for DIRC1 (NM_052952.1,404-422).
gaatgctcaaaattgttct

SEQ ID NO: 405502 - DNA, 19 bp, Homo sapiens
  siRNA target sequence for DIRC1 (NM_052952.1,505-523).
ggtctgaattgaatactgt

SEQ ID NO: 405503 - DNA, 19 bp, Homo sapiens
  siRNA target sequence for DIRC1 (NM_052952.1,522-540).
gtgaggctaaagtgtctta

SEQ ID NO: 405504 - DNA, 19 bp, Homo sapiens
  siRNA target sequence for DIRC1 (NM_052952.1,528-546).
ctaaagtgtcttaactcat

SEQ ID NO: 405505 - DNA, 19 bp, Homo sapiens
  siRNA target sequence for LRP15 (NM_052953.2,631-649).
gtgtctcctcctacaaagt

SEQ ID NO: 405506 - DNA, 19 bp, Homo sapiens
  siRNA target sequence for LRP15 (NM_052953.2,637-655).
cctcctacaaagttttgtt

SEQ ID NO: 405507 - DNA, 19 bp, Homo sapiens
  siRNA target sequence for LRP15 (NM_052953.2,640-658).
cctacaaagttttgttctt

SEQ ID NO: 405508 - DNA, 19 bp, Homo sapiens
  siRNA target sequence for LRP15 (NM_052953.2,641-659).
ctacaaagttttgttctta

SEQ ID NO: 405509 - DNA, 19 bp, Homo sapiens
  siRNA target sequence for LRP15 (NM_052953.2,661-679).
gatactgtgctttcattct

SEQ ID NO: 405510 - DNA, 19 bp, Homo sapiens
  siRNA target sequence for LRP15 (NM_052953.2,733-751).
cacctgtagcaatgcaaat

SEQ ID NO: 405511 - DNA, 19 bp, Homo sapiens
  siRNA target sequence for LRP15 (NM_052953.2,777-795).
ctcctgaaacagtcttact

SEQ ID NO: 405512 - DNA, 19 bp, Homo sapiens
  siRNA target sequence for LRP15 (NM_052953.2,779-797).
cctgaaacagtcttactgt

SEQ ID NO: 405513 - DNA, 19 bp, Homo sapiens
  siRNA target sequence for LRP15 (NM_052953.2,803-821).
gactccaatcagatcacat

SEQ ID NO: 405514 - DNA, 19 bp, Homo sapiens
  siRNA target sequence for LRP15 (NM_052953.2,807-825).
ccaatcagatcacatctat

SEQ ID NO: 405515 - DNA, 19 bp, Homo sapiens
  siRNA target sequence for LRP15 (NM_052953.2,808-826).
caatcagatcacatctatt

SEQ ID NO: 405516 - DNA, 19 bp, Homo sapiens
  siRNA target sequence for LRP15 (NM_052953.2,817-835).
cacatctattcccaatgaa

SEQ ID NO: 405517 - DNA, 19 bp, Homo sapiens
  siRNA target sequence for LRP15 (NM_052953.2,819-837).
catctattcccaatgaaat

SEQ ID NO: 405518 - DNA, 19 bp, Homo sapiens
  siRNA target sequence for LRP15 (NM_052953.2,898-916).
cgatgagcatgccttcaaa

SEQ ID NO: 405519 - DNA, 19 bp, Homo sapiens
  siRNA target sequence for LRP15 (NM_052953.2,949-967).
gtccgacaatcggattcaa

SEQ ID NO: 405520 - DNA, 19 bp, Homo sapiens
  siRNA target sequence for LRP15 (NM_052953.2,952-970).
cgacaatcggattcaaagt

SEQ ID NO: 405521 - DNA, 19 bp, Homo sapiens
  siRNA target sequence for LRP15 (NM_052953.2,1030-1048).
gcactgcgactgtactcta

SEQ ID NO: 405522 - DNA, 19 bp, Homo sapiens
  siRNA target sequence for LRP15 (NM_052953.2,1063-1081).
gagcatggcgtccaatcat

SEQ ID NO: 405523 - DNA, 19 bp, Homo sapiens
  siRNA target sequence for LRP15 (NM_052953.2,1065-1083).
gcatggcgtccaatcatga

SEQ ID NO: 405524 - DNA, 19 bp, Homo sapiens
  siRNA target sequence for LRP15 (NM_052953.2,1088-1106).
gcccacaacgtgatctgta

SEQ ID NO: 405525 - DNA, 19 bp, Homo sapiens
  siRNA target sequence for LRP15 (NM_052953.2,1089-1107).
cccacaacgtgatctgtaa

SEQ ID NO: 405526 - DNA, 19 bp, Homo sapiens
  siRNA target sequence for LRP15 (NM_052953.2,1090-1108).
ccacaacgtgatctgtaaa

SEQ ID NO: 405527 - DNA, 19 bp, Homo sapiens
  siRNA target sequence for LRP15 (NM_052953.2,1091-1109).
cacaacgtgatctgtaaaa

SEQ ID NO: 405528 - DNA, 19 bp, Homo sapiens
  siRNA target sequence for LRP15 (NM_052953.2,1286-1304).
cggagacacctcgaatact

SEQ ID NO: 405529 - DNA, 19 bp, Homo sapiens
  siRNA target sequence for LRP15 (NM_052953.2,1287-1305).
ggagacacctcgaatactt

SEQ ID NO: 405530 - DNA, 19 bp, Homo sapiens
  siRNA target sequence for LRP15 (NM_052953.2,1290-1308).
gacacctcgaatacttgaa

SEQ ID NO: 405531 - DNA, 19 bp, Homo sapiens
  siRNA target sequence for LRP15 (NM_052953.2,1292-1310).
cacctcgaatacttgaaat

SEQ ID NO: 405532 - DNA, 19 bp, Homo sapiens
  siRNA target sequence for LRP15 (NM_052953.2,1340-1358).
gaacctgatgatattagca

SEQ ID NO: 405533 - DNA, 19 bp, Homo sapiens
  siRNA target sequence for VEST1 (NM_052958.1,1674-1692).
ggacaacttcaaagaactt

SEQ ID NO: 405534 - DNA, 19 bp, Homo sapiens
  siRNA target sequence for VEST1 (NM_052958.1,1675-1693).
gacaacttcaaagaacttt

SEQ ID NO: 405535 - DNA, 19 bp, Homo sapiens
  siRNA target sequence for VEST1 (NM_052958.1,1710-1728).
ctatgggcagaaagtgaaa

SEQ ID NO: 405536 - DNA, 19 bp, Homo sapiens
  siRNA target sequence for VEST1 (NM_052958.1,1799-1817).
gcctaaaaaatcaaaaagt

SEQ ID NO: 405537 - DNA, 19 bp, Homo sapiens
  siRNA target sequence for VEST1 (NM_052958.1,1820-1838).
ccttgctgtgtctaatatt

SEQ ID NO: 405538 - DNA, 19 bp, Homo sapiens
  siRNA target sequence for VEST1 (NM_052958.1,1873-1891).
ggtcagtagagcatccaaa

SEQ ID NO: 405539 - DNA, 19 bp, Homo sapiens
  siRNA target sequence for VEST1 (NM_052958.1,1912-1930).
cacaaagccgtgattttga

SEQ ID NO: 405540 - DNA, 19 bp, Homo sapiens
  siRNA target sequence for VEST1 (NM_052958.1,1986-2004).
ctctctcgaagtattgcaa

SEQ ID NO: 405541 - DNA, 19 bp, Homo sapiens
  siRNA target sequence for VEST1 (NM_052958.1,1988-2006).
ctctcgaagtattgcaatt

SEQ ID NO: 405542 - DNA, 19 bp, Homo sapiens
  siRNA target sequence for VEST1 (NM_052958.1,2008-2026).
cagatgaactcgataagga

SEQ ID NO: 405543 - DNA, 19 bp, Homo sapiens
  siRNA target sequence for VEST1 (NM_052958.1,2108-2126).
cctagctgctgaaatgcta

SEQ ID NO: 405544 - DNA, 19 bp, Homo sapiens
  siRNA target sequence for VEST1 (NM_052958.1,2123-2141).
gctacagcctccaattcca

SEQ ID NO: 405545 - DNA, 19 bp, Homo sapiens
  siRNA target sequence for VEST1 (NM_052958.1,2204-2222).
gatggagcctaagaacaaa

SEQ ID NO: 405546 - DNA, 19 bp, Homo sapiens
  siRNA target sequence for VEST1 (NM_052958.1,2210-2228).
gcctaagaacaaaggatta

SEQ ID NO: 405547 - DNA, 19 bp, Homo sapiens
  siRNA target sequence for VEST1 (NM_052958.1,2211-2229).
cctaagaacaaaggattaa

SEQ ID NO: 405548 - DNA, 19 bp, Homo sapiens
  siRNA target sequence for VEST1 (NM_052958.1,2264-2282).
cgcaatgctctctcaagat

SEQ ID NO: 405549 - DNA, 19 bp, Homo sapiens
  siRNA target sequence for VEST1 (NM_052958.1,2265-2283).
gcaatgctctctcaagatt

SEQ ID NO: 405550 - DNA, 19 bp, Homo sapiens
  siRNA target sequence for VEST1 (NM_052958.1,2355-2373).
gaattgctggaggatctta

SEQ ID NO: 405551 - DNA, 19 bp, Homo sapiens
  siRNA target sequence for VEST1 (NM_052958.1,2360-2378).
gctggaggatcttaatgat

SEQ ID NO: 405552 - DNA, 19 bp, Homo sapiens
  siRNA target sequence for VEST1 (NM_052958.1,2363-2381).
ggaggatcttaatgattta

SEQ ID NO: 405553 - DNA, 19 bp, Homo sapiens
  siRNA target sequence for VEST1 (NM_052958.1,2364-2382).
gaggatcttaatgatttaa

SEQ ID NO: 405554 - DNA, 19 bp, Homo sapiens
  siRNA target sequence for VEST1 (NM_052958.1,2469-2487).
gtcacactgaacatctgtt

SEQ ID NO: 405555 - DNA, 19 bp, Homo sapiens
  siRNA target sequence for VEST1 (NM_052958.1,2575-2593).
cagattcattcgattcctt

SEQ ID NO: 405556 - DNA, 19 bp, Homo sapiens
  siRNA target sequence for VEST1 (NM_052958.1,2599-2617).
ggactgaagaagcactaat

SEQ ID NO: 405557 - DNA, 19 bp, Homo sapiens
  siRNA target sequence for VEST1 (NM_052958.1,2618-2636).
ggaggagggtgacgaattt

SEQ ID NO: 405558 - DNA, 19 bp, Homo sapiens
  siRNA target sequence for VEST1 (NM_052958.1,2622-2640).
gagggtgacgaatttgaga

SEQ ID NO: 405559 - DNA, 19 bp, Homo sapiens
  siRNA target sequence for VEST1 (NM_052958.1,2628-2646).
gacgaatttgagaaagcat

SEQ ID NO: 405560 - DNA, 19 bp, Homo sapiens
  siRNA target sequence for VEST1 (NM_052958.1,2682-2700).
gtaggacactcactgaaaa

SEQ ID NO: 405561 - DNA, 19 bp, Homo sapiens
  siRNA target sequence for VEST1 (NM_052958.1,2715-2733).
gatgaatccttaaagcaat

SEQ ID NO: 405562 - DNA, 19 bp, Homo sapiens
  siRNA target sequence for VEST1 (NM_052958.1,2729-2747).
gcaattgcaggtagttcat

SEQ ID NO: 405563 - DNA, 19 bp, Homo sapiens
  siRNA target sequence for VEST1 (NM_052958.1,2804-2822).
gaaacgttccgctgatctt

SEQ ID NO: 405564 - DNA, 19 bp, Homo sapiens
  siRNA target sequence for VEST1 (NM_052958.1,2809-2827).
gttccgctgatcttcttct

SEQ ID NO: 405565 - DNA, 19 bp, Homo sapiens
  siRNA target sequence for C1orf19 (NM_052965.1,170-188).
gggcactcaccctaagtat

SEQ ID NO: 405566 - DNA, 19 bp, Homo sapiens
  siRNA target sequence for C1orf19 (NM_052965.1,172-190).
gcactcaccctaagtatct

SEQ ID NO: 405567 - DNA, 19 bp, Homo sapiens
  siRNA target sequence for C1orf19 (NM_052965.1,255-273).
gacctcatggaaagcaaaa

SEQ ID NO: 405568 - DNA, 19 bp, Homo sapiens
  siRNA target sequence for C1orf19 (NM_052965.1,269-287).
caaaagctggcatgaagta

SEQ ID NO: 405569 - DNA, 19 bp, Homo sapiens
  siRNA target sequence for C1orf19 (NM_052965.1,447-465).
ccagatttgccgatgtctt

SEQ ID NO: 405570 - DNA, 19 bp, Homo sapiens
  siRNA target sequence for C1orf19 (NM_052965.1,480-498).
gtggagtctgattctacaa

SEQ ID NO: 405571 - DNA, 19 bp, Homo sapiens
  siRNA target sequence for C1orf19 (NM_052965.1,487-505).
ctgattctacaatagtcta

SEQ ID NO: 405572 - DNA, 19 bp, Homo sapiens
  siRNA target sequence for C1orf19 (NM_052965.1,489-507).
gattctacaatagtctatt

SEQ ID NO: 405573 - DNA, 19 bp, Homo sapiens
  siRNA target sequence for C1orf19 (NM_052965.1,493-511).
ctacaatagtctattataa

SEQ ID NO: 405574 - DNA, 19 bp, Homo sapiens
  siRNA target sequence for C1orf19 (NM_052965.1,496-514).
caatagtctattataaact

SEQ ID NO: 405575 - DNA, 19 bp, Homo sapiens
  siRNA target sequence for C1orf19 (NM_052965.1,533-551).
gccagaccctcagaatatt

SEQ ID NO: 405576 - DNA, 19 bp, Homo sapiens
  siRNA target sequence for WDR10 (NM_052985.1,533-551).
caaaacagtaagagtaaca

SEQ ID NO: 405577 - DNA, 19 bp, Homo sapiens
  siRNA target sequence for WDR10 (NM_052985.1,919-937).
caagccgatgggagagttt

SEQ ID NO: 405578 - DNA, 19 bp, Homo sapiens
  siRNA target sequence for WDR10 (NM_052985.1,959-977).
ggatgccgaggatgtcatt

SEQ ID NO: 405579 - DNA, 19 bp, Homo sapiens
  siRNA target sequence for WDR10 (NM_052985.1,963-981).
gccgaggatgtcattgtca

SEQ ID NO: 405580 - DNA, 19 bp, Homo sapiens
  siRNA target sequence for WDR10 (NM_052985.1,964-982).
ccgaggatgtcattgtcaa

SEQ ID NO: 405581 - DNA, 19 bp, Homo sapiens
  siRNA target sequence for WDR10 (NM_052985.1,972-990).
gtcattgtcaacagatata

SEQ ID NO: 405582 - DNA, 19 bp, Homo sapiens
  siRNA target sequence for WDR10 (NM_052985.1,1081-1099).
gtcccagggacgacaactt

SEQ ID NO: 405583 - DNA, 19 bp, Homo sapiens
  siRNA target sequence for WDR10 (NM_052985.1,1084-1102).
ccagggacgacaacttaga

SEQ ID NO: 405584 - DNA, 19 bp, Homo sapiens
  siRNA target sequence for WDR10 (NM_052985.1,1094-1112).
caacttagaggaacgtaat

SEQ ID NO: 405585 - DNA, 19 bp, Homo sapiens
  siRNA target sequence for TIGA1 (NM_053000.1,293-311).
gtgggtccttccacttgta

SEQ ID NO: 405586 - DNA, 19 bp, Homo sapiens
  siRNA target sequence for TIGA1 (NM_053000.1,295-313).
gggtccttccacttgtaga

SEQ ID NO: 405587 - DNA, 19 bp, Homo sapiens
  siRNA target sequence for TIGA1 (NM_053000.1,303-321).
ccacttgtagaaaagcatt

SEQ ID NO: 405588 - DNA, 19 bp, Homo sapiens
  siRNA target sequence for TIGA1 (NM_053000.1,356-374).
gcgagcttgctgtggtttt

SEQ ID NO: 405589 - DNA, 19 bp, Homo sapiens
  siRNA target sequence for TIGA1 (NM_053000.1,357-375).
cgagcttgctgtggttttt

SEQ ID NO: 405590 - DNA, 19 bp, Homo sapiens
  siRNA target sequence for TIGA1 (NM_053000.1,541-559).
gcgttcccacgtttggaaa

SEQ ID NO: 405591 - DNA, 19 bp, Homo sapiens
  siRNA target sequence for TIGA1 (NM_053000.1,560-578).
cggggagcttcgtcgattt

SEQ ID NO: 405592 - DNA, 19 bp, Homo sapiens
  siRNA target sequence for TIGA1 (NM_053000.1,562-580).
gggagcttcgtcgatttgt

SEQ ID NO: 405593 - DNA, 19 bp, Homo sapiens
  siRNA target sequence for TIGA1 (NM_053000.1,564-582).
gagcttcgtcgatttgtgt

SEQ ID NO: 405594 - DNA, 19 bp, Homo sapiens
  siRNA target sequence for TIGA1 (NM_053000.1,566-584).
gcttcgtcgatttgtgttt

SEQ ID NO: 405595 - DNA, 19 bp, Homo sapiens
  siRNA target sequence for TIGA1 (NM_053000.1,567-585).
cttcgtcgatttgtgttta

SEQ ID NO: 405596 - DNA, 19 bp, Homo sapiens
  siRNA target sequence for TIGA1 (NM_053000.1,573-591).
cgatttgtgtttacatcat

SEQ ID NO: 405597 - DNA, 19 bp, Homo sapiens
  siRNA target sequence for TRALPUSH (NM_053002.2,208-226).
gctcagccagaaatattgt

SEQ ID NO: 405598 - DNA, 19 bp, Homo sapiens
  siRNA target sequence for TRALPUSH (NM_053002.2,209-227).
ctcagccagaaatattgta

SEQ ID NO: 405599 - DNA, 19 bp, Homo sapiens
  siRNA target sequence for TRALPUSH (NM_053002.2,211-229).
cagccagaaatattgtaat

SEQ ID NO: 405600 - DNA, 19 bp, Homo sapiens
  siRNA target sequence for TRALPUSH (NM_053002.2,213-231).
gccagaaatattgtaatta

SEQ ID NO: 405601 - DNA, 19 bp, Homo sapiens
  siRNA target sequence for TRALPUSH (NM_053002.2,249-267).
gcttattttagcagcatat

SEQ ID NO: 405602 - DNA, 19 bp, Homo sapiens
  siRNA target sequence for TRALPUSH (NM_053002.2,275-293).
gaaactgaagcttaacact

SEQ ID NO: 405603 - DNA, 19 bp, Homo sapiens
  siRNA target sequence for TRALPUSH (NM_053002.2,311-329).
gaagaaaccacaagttaat

SEQ ID NO: 405604 - DNA, 19 bp, Homo sapiens
  siRNA target sequence for TRALPUSH (NM_053002.2,365-383).
ccagagtgcaattcatagt

SEQ ID NO: 405605 - DNA, 19 bp, Homo sapiens
  siRNA target sequence for TRALPUSH (NM_053002.2,366-384).
cagagtgcaattcatagtt

SEQ ID NO: 405606 - DNA, 19 bp, Homo sapiens
  siRNA target sequence for TRALPUSH (NM_053002.2,372-390).
gcaattcatagttggtttt

SEQ ID NO: 405607 - DNA, 19 bp, Homo sapiens
  siRNA target sequence for TRALPUSH (NM_053002.2,434-452).
ggttcctatccttagtaaa

SEQ ID NO: 405608 - DNA, 19 bp, Homo sapiens
  siRNA target sequence for TRALPUSH (NM_053002.2,435-453).
gttcctatccttagtaaaa

SEQ ID NO: 405609 - DNA, 19 bp, Homo sapiens
  siRNA target sequence for TRALPUSH (NM_053002.2,439-457).
ctatccttagtaaaaaaga

SEQ ID NO: 405610 - DNA, 19 bp, Homo sapiens
  siRNA target sequence for TRALPUSH (NM_053002.2,462-480).
gtttttgcatatttagcta

SEQ ID NO: 405611 - DNA, 19 bp, Homo sapiens
  siRNA target sequence for TRALPUSH (NM_053002.2,468-486).
gcatatttagctaaatatt

SEQ ID NO: 405612 - DNA, 19 bp, Homo sapiens
  siRNA target sequence for TRALPUSH (NM_053002.2,502-520).
gagcaacgtggctgatcaa

SEQ ID NO: 405613 - DNA, 19 bp, Homo sapiens
  siRNA target sequence for TRALPUSH (NM_053002.2,533-551).
ctattattctgctatatct

SEQ ID NO: 405614 - DNA, 19 bp, Homo sapiens
  siRNA target sequence for TRALPUSH (NM_053002.2,577-595).
ctcctgatccgaatttgga

SEQ ID NO: 405615 - DNA, 19 bp, Homo sapiens
  siRNA target sequence for TRALPUSH (NM_053002.2,593-611).
ggagtggacacagatatct

SEQ ID NO: 405616 - DNA, 19 bp, Homo sapiens
  siRNA target sequence for TRALPUSH (NM_053002.2,594-612).
gagtggacacagatatcta

SEQ ID NO: 405617 - DNA, 19 bp, Homo sapiens
  siRNA target sequence for TRALPUSH (NM_053002.2,629-647).
gcagttggccaagatttct

SEQ ID NO: 405618 - DNA, 19 bp, Homo sapiens
  siRNA target sequence for TRALPUSH (NM_053002.2,723-741).
caatgggaatacaacgaaa

SEQ ID NO: 405619 - DNA, 19 bp, Homo sapiens
  siRNA target sequence for TRALPUSH (NM_053002.2,727-745).
gggaatacaacgaaaagct

SEQ ID NO: 405620 - DNA, 19 bp, Homo sapiens
  siRNA target sequence for TRALPUSH (NM_053002.2,728-746).
ggaatacaacgaaaagcta

SEQ ID NO: 405621 - DNA, 19 bp, Homo sapiens
  siRNA target sequence for TRALPUSH (NM_053002.2,734-752).
caacgaaaagctagcattt

SEQ ID NO: 405622 - DNA, 19 bp, Homo sapiens
  siRNA target sequence for TRALPUSH (NM_053002.2,773-791).
gttagaaaaacacgaatat

SEQ ID NO: 405623 - DNA, 19 bp, Homo sapiens
  siRNA target sequence for TRALPUSH (NM_053002.2,826-844).
gaccaatggatgatgatct

SEQ ID NO: 405624 - DNA, 19 bp, Homo sapiens
  siRNA target sequence for TRALPUSH (NM_053002.2,861-879).
ccactaatgctgcagtatt

SEQ ID NO: 405625 - DNA, 19 bp, Homo sapiens
  siRNA target sequence for TRALPUSH (NM_053002.2,875-893).
gtattcagatgagtttgtt

SEQ ID NO: 405626 - DNA, 19 bp, Homo sapiens
  siRNA target sequence for TRALPUSH (NM_053002.2,912-930).
cgtcgtcttgcctactttt

SEQ ID NO: 405627 - DNA, 19 bp, Homo sapiens
  siRNA target sequence for TRALPUSH (NM_053002.2,986-1004).
ctcaccccacatgatgata

SEQ ID NO: 405628 - DNA, 19 bp, Homo sapiens
  siRNA target sequence for TRALPUSH (NM_053002.2,1106-1124).
gcatggtcccctggtttat

SEQ ID NO: 405629 - DNA, 19 bp, Homo sapiens
  siRNA target sequence for TRALPUSH (NM_053002.2,1119-1137).
gtttatggacttagttgta

SEQ ID NO: 405630 - DNA, 19 bp, Homo sapiens
  siRNA target sequence for TRALPUSH (NM_053002.2,1270-1288).
gtgggaacacggctttcaa

SEQ ID NO: 405631 - DNA, 19 bp, Homo sapiens
  siRNA target sequence for TRALPUSH (NM_053002.2,1273-1291).
ggaacacggctttcaatca

SEQ ID NO: 405632 - DNA, 19 bp, Homo sapiens
  siRNA target sequence for TRALPUSH (NM_053002.2,1292-1310).
gcaggttcgggcaaggatt

SEQ ID NO: 405633 - DNA, 19 bp, Homo sapiens
  siRNA target sequence for TRALPUSH (NM_053002.2,1293-1311).
caggttcgggcaaggattt

SEQ ID NO: 405634 - DNA, 19 bp, Homo sapiens
  siRNA target sequence for TRALPUSH (NM_053002.2,1300-1318).
gggcaaggatttatgaagt

SEQ ID NO: 405635 - DNA, 19 bp, Homo sapiens
  siRNA target sequence for TRALPUSH (NM_053002.2,1301-1319).
ggcaaggatttatgaagta

SEQ ID NO: 405636 - DNA, 19 bp, Homo sapiens
  siRNA target sequence for TRALPUSH (NM_053002.2,1306-1324).
ggatttatgaagtagaaca

SEQ ID NO: 405637 - DNA, 19 bp, Homo sapiens
  siRNA target sequence for TRALPUSH (NM_053002.2,1352-1370).
ggaagttcggtggtcattt

SEQ ID NO: 405638 - DNA, 19 bp, Homo sapiens
  siRNA target sequence for TRALPUSH (NM_053002.2,1356-1374).
gttcggtggtcatttgaca

SEQ ID NO: 405639 - DNA, 19 bp, Homo sapiens
  siRNA target sequence for TRALPUSH (NM_053002.2,1388-1406).
cacagcaggggtgactatt

SEQ ID NO: 405640 - DNA, 19 bp, Homo sapiens
  siRNA target sequence for TRALPUSH (NM_053002.2,1402-1420).
ctattagtcgggttttgca

SEQ ID NO: 405641 - DNA, 19 bp, Homo sapiens
  siRNA target sequence for TRALPUSH (NM_053002.2,1445-1463).
ctgttttgaccgaactgat

SEQ ID NO: 405642 - DNA, 19 bp, Homo sapiens
  siRNA target sequence for TRALPUSH (NM_053002.2,1455-1473).
cgaactgattccagcaatt

SEQ ID NO: 405643 - DNA, 19 bp, Homo sapiens
  siRNA target sequence for TRALPUSH (NM_053002.2,1475-1493).
catggagacactttatcat

SEQ ID NO: 405644 - DNA, 19 bp, Homo sapiens
  siRNA target sequence for TRALPUSH (NM_053002.2,1479-1497).
gagacactttatcataaga

SEQ ID NO: 405645 - DNA, 19 bp, Homo sapiens
  siRNA target sequence for TRALPUSH (NM_053002.2,1481-1499).
gacactttatcataagatt

SEQ ID NO: 405646 - DNA, 19 bp, Homo sapiens
  siRNA target sequence for TRALPUSH (NM_053002.2,1496-1514).
gattttctgggcaaaccaa

SEQ ID NO: 405647 - DNA, 19 bp, Homo sapiens
  siRNA target sequence for TRALPUSH (NM_053002.2,1672-1690).
gtgaatcagaagtcttaga

SEQ ID NO: 405648 - DNA, 19 bp, Homo sapiens
  siRNA target sequence for TRALPUSH (NM_053002.2,1694-1712).
gaaggagtctatttcttca

SEQ ID NO: 405649 - DNA, 19 bp, Homo sapiens
  siRNA target sequence for TRALPUSH (NM_053002.2,1746-1764).
cagaatgtgctgttaaggt

SEQ ID NO: 405650 - DNA, 19 bp, Homo sapiens
  siRNA target sequence for TRALPUSH (NM_053002.2,1748-1766).
gaatgtgctgttaaggttt

SEQ ID NO: 405651 - DNA, 19 bp, Homo sapiens
  siRNA target sequence for TRALPUSH (NM_053002.2,1754-1772).
gctgttaaggtttttagat

SEQ ID NO: 405652 - DNA, 19 bp, Homo sapiens
  siRNA target sequence for TRALPUSH (NM_053002.2,1755-1773).
ctgttaaggtttttagata

SEQ ID NO: 405653 - DNA, 19 bp, Homo sapiens
  siRNA target sequence for TRALPUSH (NM_053002.2,1793-1811).
ggacccaaacagtgaatgt

SEQ ID NO: 405654 - DNA, 19 bp, Homo sapiens
  siRNA target sequence for TRALPUSH (NM_053002.2,1810-1828).
gtgaaaaggtggaatttgt

SEQ ID NO: 405655 - DNA, 19 bp, Homo sapiens
  siRNA target sequence for TRALPUSH (NM_053002.2,1946-1964).
gtcaccagtaggggaaaat

SEQ ID NO: 405656 - DNA, 19 bp, Homo sapiens
  siRNA target sequence for TRALPUSH (NM_053002.2,1981-1999).
caaaggaccatgatgtgaa

SEQ ID NO: 405657 - DNA, 19 bp, Homo sapiens
  siRNA target sequence for TRALPUSH (NM_053002.2,2054-2072).
gttgggcagaagaatgtca

SEQ ID NO: 405658 - DNA, 19 bp, Homo sapiens
  siRNA target sequence for TRALPUSH (NM_053002.2,2060-2078).
cagaagaatgtcagttaat

SEQ ID NO: 405659 - DNA, 19 bp, Homo sapiens
  siRNA target sequence for TRALPUSH (NM_053002.2,2065-2083).
gaatgtcagttaattgtga

SEQ ID NO: 405660 - DNA, 19 bp, Homo sapiens
  siRNA target sequence for TRALPUSH (NM_053002.2,2139-2157).
ctccttcgccacttacagt

SEQ ID NO: 405661 - DNA, 19 bp, Homo sapiens
  siRNA target sequence for TRALPUSH (NM_053002.2,2145-2163).
cgccacttacagtatgcaa

SEQ ID NO: 405662 - DNA, 19 bp, Homo sapiens
  siRNA target sequence for TRALPUSH (NM_053002.2,2156-2174).
gtatgcaacacattttcct

SEQ ID NO: 405663 - DNA, 19 bp, Homo sapiens
  siRNA target sequence for TRALPUSH (NM_053002.2,2172-2190).
cctatacctctggatgaat

SEQ ID NO: 405664 - DNA, 19 bp, Homo sapiens
  siRNA target sequence for TRALPUSH (NM_053002.2,2187-2205).
gaatcttcaagtcatgaat

SEQ ID NO: 405665 - DNA, 19 bp, Homo sapiens
  siRNA target sequence for TRALPUSH (NM_053002.2,2213-2231).
gcgcacaatccttctctat

SEQ ID NO: 405666 - DNA, 19 bp, Homo sapiens
  siRNA target sequence for TRALPUSH (NM_053002.2,2237-2255).
cggcaaagagcgtgatgaa

SEQ ID NO: 405667 - DNA, 19 bp, Homo sapiens
  siRNA target sequence for TRALPUSH (NM_053002.2,2411-2429).
gctcctttcatattttgat

SEQ ID NO: 405668 - DNA, 19 bp, Homo sapiens
  siRNA target sequence for TRALPUSH (NM_053002.2,2439-2457).
gtgacatctcagatttcta

SEQ ID NO: 405669 - DNA, 19 bp, Homo sapiens
  siRNA target sequence for TRALPUSH (NM_053002.2,2443-2461).
catctcagatttctaacaa

SEQ ID NO: 405670 - DNA, 19 bp, Homo sapiens
  siRNA target sequence for TRALPUSH (NM_053002.2,2455-2473).
ctaacaatgtgctagaaca

SEQ ID NO: 405671 - DNA, 19 bp, Homo sapiens
  siRNA target sequence for TRALPUSH (NM_053002.2,2489-2507).
gtcaggaacatcctatcat

SEQ ID NO: 405672 - DNA, 19 bp, Homo sapiens
  siRNA target sequence for TRALPUSH (NM_053002.2,2512-2530).
ctttggctcaccacattca

SEQ ID NO: 405673 - DNA, 19 bp, Homo sapiens
  siRNA target sequence for TRALPUSH (NM_053002.2,2561-2579).
gaacatcaacggactaatt

SEQ ID NO: 405674 - DNA, 19 bp, Homo sapiens
  siRNA target sequence for TRALPUSH (NM_053002.2,2582-2600).
cttcgcaatacagttacta

SEQ ID NO: 405675 - DNA, 19 bp, Homo sapiens
  siRNA target sequence for TRALPUSH (NM_053002.2,2585-2603).
cgcaatacagttactaaat

SEQ ID NO: 405676 - DNA, 19 bp, Homo sapiens
  siRNA target sequence for TRALPUSH (NM_053002.2,2648-2666).
cctggcaggaagttataca

SEQ ID NO: 405677 - DNA, 19 bp, Homo sapiens
  siRNA target sequence for TRALPUSH (NM_053002.2,2649-2667).
ctggcaggaagttatacaa

SEQ ID NO: 405678 - DNA, 19 bp, Homo sapiens
  siRNA target sequence for TRALPUSH (NM_053002.2,2651-2669).
ggcaggaagttatacaaca

SEQ ID NO: 405679 - DNA, 19 bp, Homo sapiens
  siRNA target sequence for TRALPUSH (NM_053002.2,2702-2720).
gcgctatcacagttgtcta

SEQ ID NO: 405680 - DNA, 19 bp, Homo sapiens
  siRNA target sequence for TRALPUSH (NM_053002.2,2709-2727).
cacagttgtctaatcttga

SEQ ID NO: 405681 - DNA, 19 bp, Homo sapiens
  siRNA target sequence for TRALPUSH (NM_053002.2,2781-2799).
gtcgtaaacccctcagaat

SEQ ID NO: 405682 - DNA, 19 bp, Homo sapiens
  siRNA target sequence for TRALPUSH (NM_053002.2,2783-2801).
cgtaaacccctcagaatgt

SEQ ID NO: 405683 - DNA, 19 bp, Homo sapiens
  siRNA target sequence for TRALPUSH (NM_053002.2,2784-2802).
gtaaacccctcagaatgtt

SEQ ID NO: 405684 - DNA, 19 bp, Homo sapiens
  siRNA target sequence for TRALPUSH (NM_053002.2,2828-2846).
ctacctctatgatctctat

SEQ ID NO: 405685 - DNA, 19 bp, Homo sapiens
  siRNA target sequence for TRALPUSH (NM_053002.2,2888-2906).
cagtagtgcctgttcaaaa

SEQ ID NO: 405686 - DNA, 19 bp, Homo sapiens
  siRNA target sequence for TRALPUSH (NM_053002.2,2931-2949).
gtgatgcctgcaaattcga

SEQ ID NO: 405687 - DNA, 19 bp, Homo sapiens
  siRNA target sequence for TRALPUSH (NM_053002.2,2956-2974).
gatgggatccagacttcat

SEQ ID NO: 405688 - DNA, 19 bp, Homo sapiens
  siRNA target sequence for TRALPUSH (NM_053002.2,2959-2977).
gggatccagacttcatgat

SEQ ID NO: 405689 - DNA, 19 bp, Homo sapiens
  siRNA target sequence for TRALPUSH (NM_053002.2,2967-2985).
gacttcatgatggatttta

SEQ ID NO: 405690 - DNA, 19 bp, Homo sapiens
  siRNA target sequence for TRALPUSH (NM_053002.2,3074-3092).
caatacactcatgaatgta

SEQ ID NO: 405691 - DNA, 19 bp, Homo sapiens
  siRNA target sequence for TRALPUSH (NM_053002.2,3161-3179).
ctgcactgttcttagttca

SEQ ID NO: 405692 - DNA, 19 bp, Homo sapiens
  siRNA target sequence for TRALPUSH (NM_053002.2,3164-3182).
cactgttcttagttcagaa

SEQ ID NO: 405693 - DNA, 19 bp, Homo sapiens
  siRNA target sequence for TRALPUSH (NM_053002.2,3200-3218).
ggctctttgttgttcttca

SEQ ID NO: 405694 - DNA, 19 bp, Homo sapiens
  siRNA target sequence for TRALPUSH (NM_053002.2,3224-3242).
cgtgtgggggtttaatgat

SEQ ID NO: 405695 - DNA, 19 bp, Homo sapiens
  siRNA target sequence for TRALPUSH (NM_053002.2,3229-3247).
gggggtttaatgatgtact

SEQ ID NO: 405696 - DNA, 19 bp, Homo sapiens
  siRNA target sequence for TRALPUSH (NM_053002.2,3231-3249).
gggtttaatgatgtacttt

SEQ ID NO: 405697 - DNA, 19 bp, Homo sapiens
  siRNA target sequence for TRALPUSH (NM_053002.2,3269-3287).
cctttcattccatgattca

SEQ ID NO: 405698 - DNA, 19 bp, Homo sapiens
  siRNA target sequence for TRALPUSH (NM_053002.2,3282-3300).
gattcattagctactttca

SEQ ID NO: 405699 - DNA, 19 bp, Homo sapiens
  siRNA target sequence for TRALPUSH (NM_053002.2,3311-3329).
gatagcacgacagtgtttt

SEQ ID NO: 405700 - DNA, 19 bp, Homo sapiens
  siRNA target sequence for TRALPUSH (NM_053002.2,3404-3422).
gcctggggcgagaatgaca

SEQ ID NO: 405701 - DNA, 19 bp, Homo sapiens
  siRNA target sequence for TRALPUSH (NM_053002.2,3405-3423).
cctggggcgagaatgacat

SEQ ID NO: 405702 - DNA, 19 bp, Homo sapiens
  siRNA target sequence for TRALPUSH (NM_053002.2,3474-3492).
caagcaacgggcaaacctt

SEQ ID NO: 405703 - DNA, 19 bp, Homo sapiens
  siRNA target sequence for TRALPUSH (NM_053002.2,3485-3503).
caaacctttccctggaata

SEQ ID NO: 405704 - DNA, 19 bp, Homo sapiens
  siRNA target sequence for TRALPUSH (NM_053002.2,3494-3512).
ccctggaataagatcatct

SEQ ID NO: 405705 - DNA, 19 bp, Homo sapiens
  siRNA target sequence for TRALPUSH (NM_053002.2,3561-3579).
gccgtgtttgctgtcttaa

SEQ ID NO: 405706 - DNA, 19 bp, Homo sapiens
  siRNA target sequence for TRALPUSH (NM_053002.2,3562-3580).
ccgtgtttgctgtcttaaa

SEQ ID NO: 405707 - DNA, 19 bp, Homo sapiens
  siRNA target sequence for TRALPUSH (NM_053002.2,3570-3588).
gctgtcttaaaagcaatta

SEQ ID NO: 405708 - DNA, 19 bp, Homo sapiens
  siRNA target sequence for TRALPUSH (NM_053002.2,3656-3674).
gagaggtttgcgatgtgat

SEQ ID NO: 405709 - DNA, 19 bp, Homo sapiens
  siRNA target sequence for TRALPUSH (NM_053002.2,3745-3763).
ctgccaatttaagagaata

SEQ ID NO: 405710 - DNA, 19 bp, Homo sapiens
  siRNA target sequence for TRALPUSH (NM_053002.2,3757-3775).
gagaatacgctagatatgt

SEQ ID NO: 405711 - DNA, 19 bp, Homo sapiens
  siRNA target sequence for TRALPUSH (NM_053002.2,3804-3822).
gtaggagagcattgcttaa

SEQ ID NO: 405712 - DNA, 19 bp, Homo sapiens
  siRNA target sequence for TRALPUSH (NM_053002.2,3808-3826).
gagagcattgcttaaaaga

SEQ ID NO: 405713 - DNA, 19 bp, Homo sapiens
  siRNA target sequence for TRALPUSH (NM_053002.2,3825-3843).
gaacctgaaagattatgta

SEQ ID NO: 405714 - DNA, 19 bp, Homo sapiens
  siRNA target sequence for TRALPUSH (NM_053002.2,3841-3859).
gtacagacaaagaacttat

SEQ ID NO: 405715 - DNA, 19 bp, Homo sapiens
  siRNA target sequence for TRALPUSH (NM_053002.2,3902-3920).
gcagcttatctgttatcct

SEQ ID NO: 405716 - DNA, 19 bp, Homo sapiens
  siRNA target sequence for TRALPUSH (NM_053002.2,3921-3939).
catggcattaaagaatgta

SEQ ID NO: 405717 - DNA, 19 bp, Homo sapiens
  siRNA target sequence for TRALPUSH (NM_053002.2,3937-3955).
gtaccgagggggacaatct

SEQ ID NO: 405718 - DNA, 19 bp, Homo sapiens
  siRNA target sequence for TRALPUSH (NM_053002.2,3954-3972).
ctgcaaagacagcacatta

SEQ ID NO: 405719 - DNA, 19 bp, Homo sapiens
  siRNA target sequence for TRALPUSH (NM_053002.2,3965-3983).
gcacattaagcgtattctt

SEQ ID NO: 405720 - DNA, 19 bp, Homo sapiens
  siRNA target sequence for TRALPUSH (NM_053002.2,3974-3992).
gcgtattcttcagaatctt

SEQ ID NO: 405721 - DNA, 19 bp, Homo sapiens
  siRNA target sequence for TRALPUSH (NM_053002.2,4007-4025).
gaggcaatcctggttagaa

SEQ ID NO: 405722 - DNA, 19 bp, Homo sapiens
  siRNA target sequence for TRALPUSH (NM_053002.2,4023-4041).
gaactccagctaatgatca

SEQ ID NO: 405723 - DNA, 19 bp, Homo sapiens
  siRNA target sequence for TRALPUSH (NM_053002.2,4078-4096).
ccgaaatgaacaacttact

SEQ ID NO: 405724 - DNA, 19 bp, Homo sapiens
  siRNA target sequence for TRALPUSH (NM_053002.2,4114-4132).
caacaatagaggtattcca

SEQ ID NO: 405725 - DNA, 19 bp, Homo sapiens
  siRNA target sequence for TRALPUSH (NM_053002.2,4292-4310).
cgccaggttgccaacttct

SEQ ID NO: 405726 - DNA, 19 bp, Homo sapiens
  siRNA target sequence for TRALPUSH (NM_053002.2,4457-4475).
ctgccttaagggacaagat

SEQ ID NO: 405727 - DNA, 19 bp, Homo sapiens
  siRNA target sequence for TRALPUSH (NM_053002.2,4548-4566).
cgataccaagatgacataa

SEQ ID NO: 405728 - DNA, 19 bp, Homo sapiens
  siRNA target sequence for TRALPUSH (NM_053002.2,4580-4598).
gatgcacgaagcattgcaa

SEQ ID NO: 405729 - DNA, 19 bp, Homo sapiens
  siRNA target sequence for TRALPUSH (NM_053002.2,4702-4720).
ctgttgacatgcacactaa

SEQ ID NO: 405730 - DNA, 19 bp, Homo sapiens
  siRNA target sequence for TRALPUSH (NM_053002.2,4704-4722).
gttgacatgcacactaaca

SEQ ID NO: 405731 - DNA, 19 bp, Homo sapiens
  siRNA target sequence for TRALPUSH (NM_053002.2,4712-4730).
gcacactaacaatgaatta

SEQ ID NO: 405732 - DNA, 19 bp, Homo sapiens
  siRNA target sequence for TRALPUSH (NM_053002.2,4713-4731).
cacactaacaatgaattat

SEQ ID NO: 405733 - DNA, 19 bp, Homo sapiens
  siRNA target sequence for TRALPUSH (NM_053002.2,4781-4799).
ctctgacctatcaaatgca

SEQ ID NO: 405734 - DNA, 19 bp, Homo sapiens
  siRNA target sequence for TRALPUSH (NM_053002.2,4826-4844).
gcgtgcatacatgaattta

SEQ ID NO: 405735 - DNA, 19 bp, Homo sapiens
  siRNA target sequence for TRALPUSH (NM_053002.2,4828-4846).
gtgcatacatgaatttagt

SEQ ID NO: 405736 - DNA, 19 bp, Homo sapiens
  siRNA target sequence for TRALPUSH (NM_053002.2,4830-4848).
gcatacatgaatttagtaa

SEQ ID NO: 405737 - DNA, 19 bp, Homo sapiens
  siRNA target sequence for TRALPUSH (NM_053002.2,4869-4887).
ggagacaagcgatcagaaa

SEQ ID NO: 405738 - DNA, 19 bp, Homo sapiens
  siRNA target sequence for TRALPUSH (NM_053002.2,4878-4896).
cgatcagaaagtattgaca

SEQ ID NO: 405739 - DNA, 19 bp, Homo sapiens
  siRNA target sequence for TRALPUSH (NM_053002.2,4919-4937).
gccgaaacagacatgtgat

SEQ ID NO: 405740 - DNA, 19 bp, Homo sapiens
  siRNA target sequence for TRALPUSH (NM_053002.2,4995-5013).
ggatttgactctatagata

SEQ ID NO: 405741 - DNA, 19 bp, Homo sapiens
  siRNA target sequence for TRALPUSH (NM_053002.2,4996-5014).
gatttgactctatagataa

SEQ ID NO: 405742 - DNA, 19 bp, Homo sapiens
  siRNA target sequence for TRALPUSH (NM_053002.2,5051-5069).
gtccccgtgggacttgttt

SEQ ID NO: 405743 - DNA, 19 bp, Homo sapiens
  siRNA target sequence for TRALPUSH (NM_053002.2,5053-5071).
ccccgtgggacttgtttga

SEQ ID NO: 405744 - DNA, 19 bp, Homo sapiens
  siRNA target sequence for TRALPUSH (NM_053002.2,5127-5145).
gaccgaagagtgatcaagt

SEQ ID NO: 405745 - DNA, 19 bp, Homo sapiens
  siRNA target sequence for TRALPUSH (NM_053002.2,5298-5316).
ctgtcagatcagggaaaaa

SEQ ID NO: 405746 - DNA, 19 bp, Homo sapiens
  siRNA target sequence for TRALPUSH (NM_053002.2,5351-5369).
gaagcgcaagacgaaatct

SEQ ID NO: 405747 - DNA, 19 bp, Homo sapiens
  siRNA target sequence for TRALPUSH (NM_053002.2,5409-5427).
cgagtgcctcctaattact

SEQ ID NO: 405748 - DNA, 19 bp, Homo sapiens
  siRNA target sequence for TRALPUSH (NM_053002.2,5516-5534).
ccttcagaaccaatctctt

SEQ ID NO: 405749 - DNA, 19 bp, Homo sapiens
  siRNA target sequence for TRALPUSH (NM_053002.2,5641-5659).
cgccttctcttcatgcaat

SEQ ID NO: 405750 - DNA, 19 bp, Homo sapiens
  siRNA target sequence for TRALPUSH (NM_053002.2,5732-5750).
ccagactcggcctttccaa

SEQ ID NO: 405751 - DNA, 19 bp, Homo sapiens
  siRNA target sequence for TRALPUSH (NM_053002.2,5850-5868).
ccacagggctatacaatgt

SEQ ID NO: 405752 - DNA, 19 bp, Homo sapiens
  siRNA target sequence for TRALPUSH (NM_053002.2,5851-5869).
cacagggctatacaatgta

SEQ ID NO: 405753 - DNA, 19 bp, Homo sapiens
  siRNA target sequence for TRALPUSH (NM_053002.2,5968-5986).
ccaaccccgtgctaatgga

SEQ ID NO: 405754 - DNA, 19 bp, Homo sapiens
  siRNA target sequence for TRALPUSH (NM_053002.2,5969-5987).
caaccccgtgctaatggaa

SEQ ID NO: 405755 - DNA, 19 bp, Homo sapiens
  siRNA target sequence for TRALPUSH (NM_053002.2,6008-6026).
gcagccgagtggctatgtt

SEQ ID NO: 405756 - DNA, 19 bp, Homo sapiens
  siRNA target sequence for GNB1L (NM_053004.1,645-663).
cagcgacgaggttcagatt

SEQ ID NO: 405757 - DNA, 19 bp, Homo sapiens
  siRNA target sequence for GNB1L (NM_053004.1,647-665).
gcgacgaggttcagattct

SEQ ID NO: 405758 - DNA, 19 bp, Homo sapiens
  siRNA target sequence for GNB1L (NM_053004.1,866-884).
ccgtcatggaccttgactt

SEQ ID NO: 405759 - DNA, 19 bp, Homo sapiens
  siRNA target sequence for GNB1L (NM_053004.1,867-885).
cgtcatggaccttgacttt

SEQ ID NO: 405760 - DNA, 19 bp, Homo sapiens
  siRNA target sequence for GNB1L (NM_053004.1,969-987).
ggtgcgtgggactcatgaa

SEQ ID NO: 405761 - DNA, 19 bp, Homo sapiens
  siRNA target sequence for HCCA2 (NM_053005.2,183-201).
gcgagattgaccttaacga

SEQ ID NO: 405762 - DNA, 19 bp, Homo sapiens
  siRNA target sequence for HCCA2 (NM_053005.2,213-231).
gcaacaccacgacgttttt

SEQ ID NO: 405763 - DNA, 19 bp, Homo sapiens
  siRNA target sequence for HCCA2 (NM_053005.2,236-254).
cacatcaacctgcagtata

SEQ ID NO: 405764 - DNA, 19 bp, Homo sapiens
  siRNA target sequence for HCCA2 (NM_053005.2,360-378).
ccccacagtacgttgactt

SEQ ID NO: 405765 - DNA, 19 bp, Homo sapiens
  siRNA target sequence for HCCA2 (NM_053005.2,416-434).
gacgtgttccccacaaaat

SEQ ID NO: 405766 - DNA, 19 bp, Homo sapiens
  siRNA target sequence for HCCA2 (NM_053005.2,570-588).
cgctctacgtccacttcat

SEQ ID NO: 405767 - DNA, 19 bp, Homo sapiens
  siRNA target sequence for STK22B (NM_053006.3,159-177).
catcgtaggcatcaatctt

SEQ ID NO: 405768 - DNA, 19 bp, Homo sapiens
  siRNA target sequence for STK22B (NM_053006.3,184-202).
ggttcctacgcaaaagtca

SEQ ID NO: 405769 - DNA, 19 bp, Homo sapiens
  siRNA target sequence for STK22B (NM_053006.3,185-203).
gttcctacgcaaaagtcaa

SEQ ID NO: 405770 - DNA, 19 bp, Homo sapiens
  siRNA target sequence for STK22B (NM_053006.3,215-233).
ctgagcgcctcaagttcaa

SEQ ID NO: 405771 - DNA, 19 bp, Homo sapiens
  siRNA target sequence for STK22B (NM_053006.3,246-264).
gatcatcgaccgcaagaaa

SEQ ID NO: 405772 - DNA, 19 bp, Homo sapiens
  siRNA target sequence for STK22B (NM_053006.3,249-267).
catcgaccgcaagaaaaca

SEQ ID NO: 405773 - DNA, 19 bp, Homo sapiens
  siRNA target sequence for STK22B (NM_053006.3,368-386).
ctgacggacggatctacat

SEQ ID NO: 405774 - DNA, 19 bp, Homo sapiens
  siRNA target sequence for STK22B (NM_053006.3,370-388).
gacggacggatctacatca

SEQ ID NO: 405775 - DNA, 19 bp, Homo sapiens
  siRNA target sequence for STK22B (NM_053006.3,373-391).
ggacggatctacatcatca

SEQ ID NO: 405776 - DNA, 19 bp, Homo sapiens
  siRNA target sequence for STK22B (NM_053006.3,454-472).
gacgtggcacgcaagatgt

SEQ ID NO: 405777 - DNA, 19 bp, Homo sapiens
  siRNA target sequence for STK22B (NM_053006.3,648-666).
ctgcgggtcggcagcatat

SEQ ID NO: 405778 - DNA, 19 bp, Homo sapiens
  siRNA target sequence for STK22B (NM_053006.3,651-669).
cgggtcggcagcatatgca

SEQ ID NO: 405779 - DNA, 19 bp, Homo sapiens
  siRNA target sequence for STK22B (NM_053006.3,902-920).
ggctccacatcgatgagat

SEQ ID NO: 405780 - DNA, 19 bp, Homo sapiens
  siRNA target sequence for STK22B (NM_053006.3,1148-1166).
gggccaaagaccatcacat

SEQ ID NO: 405781 - DNA, 19 bp, Homo sapiens
  siRNA target sequence for PALM2 (NM_053016.1,547-565).
ctgtgtacgccatggaaat

SEQ ID NO: 405782 - DNA, 19 bp, Homo sapiens
  siRNA target sequence for PALM2 (NM_053016.1,642-660).
cagaaaggagtcaaagtct

SEQ ID NO: 405783 - DNA, 19 bp, Homo sapiens
  siRNA target sequence for PALM2 (NM_053016.1,670-688).
gtaccaaagtagtgtatga

SEQ ID NO: 405784 - DNA, 19 bp, Homo sapiens
  siRNA target sequence for PALM2 (NM_053016.1,697-715).
caggaggcaccgtagtaga

SEQ ID NO: 405785 - DNA, 19 bp, Homo sapiens
  siRNA target sequence for PALM2 (NM_053016.1,699-717).
ggaggcaccgtagtagaaa

SEQ ID NO: 405786 - DNA, 19 bp, Homo sapiens
  siRNA target sequence for PALM2 (NM_053016.1,835-853).
gccatcccaaggaacacat

SEQ ID NO: 405787 - DNA, 19 bp, Homo sapiens
  siRNA target sequence for PALM2 (NM_053016.1,857-875).
ctgcaaagaagctaagtta

SEQ ID NO: 405788 - DNA, 19 bp, Homo sapiens
  siRNA target sequence for PALM2 (NM_053016.1,859-877).
gcaaagaagctaagttaga

SEQ ID NO: 405789 - DNA, 19 bp, Homo sapiens
  siRNA target sequence for PALM2 (NM_053016.1,860-878).
caaagaagctaagttagaa

SEQ ID NO: 405790 - DNA, 19 bp, Homo sapiens
  siRNA target sequence for PALM2 (NM_053016.1,974-992).
gcccgtcaccatgattttt

SEQ ID NO: 405791 - DNA, 19 bp, Homo sapiens
  siRNA target sequence for PALM2 (NM_053016.1,975-993).
cccgtcaccatgattttta

SEQ ID NO: 405792 - DNA, 19 bp, Homo sapiens
  siRNA target sequence for PALM2 (NM_053016.1,1034-1052).
ggtgctaggctatgatgaa

SEQ ID NO: 405793 - DNA, 19 bp, Homo sapiens
  siRNA target sequence for PALM2 (NM_053016.1,1035-1053).
gtgctaggctatgatgaaa

SEQ ID NO: 405794 - DNA, 19 bp, Homo sapiens
  siRNA target sequence for PALM2 (NM_053016.1,1054-1072).
ccatcaaggctgaattggt

SEQ ID NO: 405795 - DNA, 19 bp, Homo sapiens
  siRNA target sequence for PALM2 (NM_053016.1,1118-1136).
gacggacgtgtccactatt

SEQ ID NO: 405796 - DNA, 19 bp, Homo sapiens
  siRNA target sequence for PALM2 (NM_053016.1,1120-1138).
cggacgtgtccactattga

SEQ ID NO: 405797 - DNA, 19 bp, Homo sapiens
  siRNA target sequence for PALM2 (NM_053016.1,1264-1282).
gtcaatgctgtgttgtcat

SEQ ID NO: 405798 - DNA, 19 bp, Homo sapiens
  siRNA target sequence for ZFP91 (NM_053023.2,435-453).
gtccgcgactcctatgcat

SEQ ID NO: 405799 - DNA, 19 bp, Homo sapiens
  siRNA target sequence for ZFP91 (NM_053023.2,446-464).
ctatgcatagaaaaagtaa

SEQ ID NO: 405800 - DNA, 19 bp, Homo sapiens
  siRNA target sequence for ZFP91 (NM_053023.2,585-603).
ctcgccatcgtgatacaga

SEQ ID NO: 405801 - DNA, 19 bp, Homo sapiens
  siRNA target sequence for ZFP91 (NM_053023.2,621-639).
ggtccaagaccggttcatt

SEQ ID NO: 405802 - DNA, 19 bp, Homo sapiens
  siRNA target sequence for ZFP91 (NM_053023.2,636-654).
cattgcagctcatttgcaa

SEQ ID NO: 405803 - DNA, 19 bp, Homo sapiens
  siRNA target sequence for ZFP91 (NM_053023.2,669-687).
cagaccaacttgattatga

SEQ ID NO: 405804 - DNA, 19 bp, Homo sapiens
  siRNA target sequence for ZFP91 (NM_053023.2,706-724).
gtctccaggtggcattagt

SEQ ID NO: 405805 - DNA, 19 bp, Homo sapiens
  siRNA target sequence for ZFP91 (NM_053023.2,836-854).
ccaaagccacggagaaaat

SEQ ID NO: 405806 - DNA, 19 bp, Homo sapiens
  siRNA target sequence for ZFP91 (NM_053023.2,1186-1204).
gcgacatgccaaacatcat

SEQ ID NO: 405807 - DNA, 19 bp, Homo sapiens
  siRNA target sequence for ZFP91 (NM_053023.2,1195-1213).
caaacatcatacagatcaa

SEQ ID NO: 405808 - DNA, 19 bp, Homo sapiens
  siRNA target sequence for ZFP91 (NM_053023.2,1238-1256).
gctcgggccttcaagagtt

SEQ ID NO: 405809 - DNA, 19 bp, Homo sapiens
  siRNA target sequence for ZFP91 (NM_053023.2,1267-1285).
ggcagtgcaccggatgatt

SEQ ID NO: 405810 - DNA, 19 bp, Homo sapiens
  siRNA target sequence for ZFP91 (NM_053023.2,1269-1287).
cagtgcaccggatgattca

SEQ ID NO: 405811 - DNA, 19 bp, Homo sapiens
  siRNA target sequence for ZFP91 (NM_053023.2,1271-1289).
gtgcaccggatgattcaca

SEQ ID NO: 405812 - DNA, 19 bp, Homo sapiens
  siRNA target sequence for ZFP91 (NM_053023.2,1323-1341).
gatttacttgtcgacaaaa

SEQ ID NO: 405813 - DNA, 19 bp, Homo sapiens
  siRNA target sequence for ZFP91 (NM_053023.2,1379-1397).
gactccttctaccagtttt

SEQ ID NO: 405814 - DNA, 19 bp, Homo sapiens
  siRNA target sequence for ZFP91 (NM_053023.2,1387-1405).
ctaccagttttcttgcaat

SEQ ID NO: 405815 - DNA, 19 bp, Homo sapiens
  siRNA target sequence for ZFP91 (NM_053023.2,1617-1635).
ctggagagtgcctactgtt

SEQ ID NO: 405816 - DNA, 19 bp, Homo sapiens
  siRNA target sequence for ZFP91 (NM_053023.2,1643-1661).
gaagggatgtcaaagtcat

SEQ ID NO: 405817 - DNA, 19 bp, Homo sapiens
  siRNA target sequence for ZFP91 (NM_053023.2,1693-1711).
ggctgatgggaagatcttt

SEQ ID NO: 405818 - DNA, 19 bp, Homo sapiens
  siRNA target sequence for ZFP91 (NM_053023.2,1734-1752).
gcactgaagggctggttat

SEQ ID NO: 405819 - DNA, 19 bp, Homo sapiens
  siRNA target sequence for ZFP91 (NM_053023.2,1747-1765).
ggttatgaactcagatata

SEQ ID NO: 405820 - DNA, 19 bp, Homo sapiens
  siRNA target sequence for C20orf92 (NM_053041.1,403-421).
ccttctggttccaaatggt

SEQ ID NO: 405821 - DNA, 19 bp, Homo sapiens
  siRNA target sequence for C20orf92 (NM_053041.1,449-467).
caggtccaggcggatttca

SEQ ID NO: 405822 - DNA, 19 bp, Homo sapiens
  siRNA target sequence for C20orf92 (NM_053041.1,451-469).
ggtccaggcggatttcata

SEQ ID NO: 405823 - DNA, 19 bp, Homo sapiens
  siRNA target sequence for C20orf92 (NM_053041.1,454-472).
ccaggcggatttcataact

SEQ ID NO: 405824 - DNA, 19 bp, Homo sapiens
  siRNA target sequence for C20orf92 (NM_053041.1,555-573).
gtcagactctgatgattaa

SEQ ID NO: 405825 - DNA, 19 bp, Homo sapiens
  siRNA target sequence for MGC20460 (NM_053043.1,2949-2967).
gcccggtgtaaccatttat

SEQ ID NO: 405826 - DNA, 19 bp, Homo sapiens
  siRNA target sequence for MGC20460 (NM_053043.1,2951-2969).
ccggtgtaaccatttatga

SEQ ID NO: 405827 - DNA, 19 bp, Homo sapiens
  siRNA target sequence for MGC20460 (NM_053043.1,3298-3316).
caggggctccggcataata

SEQ ID NO: 405828 - DNA, 19 bp, Homo sapiens
  siRNA target sequence for MGC20460 (NM_053043.1,3300-3318).
ggggctccggcataataca

SEQ ID NO: 405829 - DNA, 19 bp, Homo sapiens
  siRNA target sequence for MGC20460 (NM_053043.1,3303-3321).
gctccggcataatacaact

SEQ ID NO: 405830 - DNA, 19 bp, Homo sapiens
  siRNA target sequence for MGC20460 (NM_053043.1,3304-3322).
ctccggcataatacaactt

SEQ ID NO: 405831 - DNA, 19 bp, Homo sapiens
  siRNA target sequence for MGC20460 (NM_053043.1,3306-3324).
ccggcataatacaacttct

SEQ ID NO: 405832 - DNA, 19 bp, Homo sapiens
  siRNA target sequence for MGC20460 (NM_053043.1,3404-3422).
cgccgtcacacgtgataga

SEQ ID NO: 405833 - DNA, 19 bp, Homo sapiens
  siRNA target sequence for MGC20460 (NM_053043.1,3405-3423).
gccgtcacacgtgatagaa

SEQ ID NO: 405834 - DNA, 19 bp, Homo sapiens
  siRNA target sequence for MGC20460 (NM_053043.1,3406-3424).
ccgtcacacgtgatagaaa

SEQ ID NO: 405835 - DNA, 19 bp, Homo sapiens
  siRNA target sequence for MGC20460 (NM_053043.1,3407-3425).
cgtcacacgtgatagaaat

SEQ ID NO: 405836 - DNA, 19 bp, Homo sapiens
  siRNA target sequence for MGC20460 (NM_053043.1,3449-3467).
cgccctcagcacaagtgaa

SEQ ID NO: 405837 - DNA, 19 bp, Homo sapiens
  siRNA target sequence for MGC20460 (NM_053043.1,3450-3468).
gccctcagcacaagtgaaa

SEQ ID NO: 405838 - DNA, 19 bp, Homo sapiens
  siRNA target sequence for MGC20460 (NM_053043.1,3455-3473).
cagcacaagtgaaacctat

SEQ ID NO: 405839 - DNA, 19 bp, Homo sapiens
  siRNA target sequence for MGC20460 (NM_053043.1,3613-3631).
gatgaggaaacaaggttat

SEQ ID NO: 405840 - DNA, 19 bp, Homo sapiens
  siRNA target sequence for MGC20460 (NM_053043.1,3626-3644).
ggttatatcgcttaaagat

SEQ ID NO: 405841 - DNA, 19 bp, Homo sapiens
  siRNA target sequence for MGC20460 (NM_053043.1,3627-3645).
gttatatcgcttaaagata

SEQ ID NO: 405842 - DNA, 19 bp, Homo sapiens
  siRNA target sequence for MGC20460 (NM_053043.1,3854-3872).
cacaggtcagacaaaatgt

SEQ ID NO: 405843 - DNA, 19 bp, Homo sapiens
  siRNA target sequence for MGC20460 (NM_053043.1,3897-3915).
ccaggatgtcagtatttca

SEQ ID NO: 405844 - DNA, 19 bp, Homo sapiens
  siRNA target sequence for MGC20460 (NM_053043.1,3922-3940).
cagcccaaaacatccaatt

SEQ ID NO: 405845 - DNA, 19 bp, Homo sapiens
  siRNA target sequence for MGC20460 (NM_053043.1,4034-4052).
ctcagccgctgcataaagt

SEQ ID NO: 405846 - DNA, 19 bp, Homo sapiens
  siRNA target sequence for MGC20460 (NM_053043.1,4211-4229).
ccaaggtcagggtgattaa

SEQ ID NO: 405847 - DNA, 19 bp, Homo sapiens
  siRNA target sequence for MGC20460 (NM_053043.1,4231-4249).
ctgtcaggtggggtaagtt

SEQ ID NO: 405848 - DNA, 19 bp, Homo sapiens
  siRNA target sequence for MGC14327 (NM_053045.1,471-489).
cgccttttctgggtactta

SEQ ID NO: 405849 - DNA, 19 bp, Homo sapiens
  siRNA target sequence for MGC14327 (NM_053045.1,490-508).
cggtcctgagtctcaagtt

SEQ ID NO: 405850 - DNA, 19 bp, Homo sapiens
  siRNA target sequence for MGC14327 (NM_053045.1,558-576).
ctctggttcggcctcatta

SEQ ID NO: 405851 - DNA, 19 bp, Homo sapiens
  siRNA target sequence for MRPL53 (NM_053050.2,166-184).
gtctgcggcctgtcaaaca

SEQ ID NO: 405852 - DNA, 19 bp, Homo sapiens
  siRNA target sequence for MRPL53 (NM_053050.2,202-220).
gtcccttcgagaaaaacgt

SEQ ID NO: 405853 - DNA, 19 bp, Homo sapiens
  siRNA target sequence for MRPL53 (NM_053050.2,260-278).
gaaggtccgctccactaat

SEQ ID NO: 405854 - DNA, 19 bp, Homo sapiens
  siRNA target sequence for MRPL53 (NM_053050.2,264-282).
gtccgctccactaatctca

SEQ ID NO: 405855 - DNA, 19 bp, Homo sapiens
  siRNA target sequence for MRPL53 (NM_053050.2,348-366).
gacgggcatcgcctgatta

SEQ ID NO: 405856 - DNA, 19 bp, Homo sapiens
  siRNA target sequence for LIP8 (NM_053051.1,1061-1079).
gacggcttcgcccaagaat

SEQ ID NO: 405857 - DNA, 19 bp, Homo sapiens
  siRNA target sequence for LIP8 (NM_053051.1,1064-1082).
ggcttcgcccaagaattga

SEQ ID NO: 405858 - DNA, 19 bp, Homo sapiens
  siRNA target sequence for LIP8 (NM_053051.1,1066-1084).
cttcgcccaagaattgagt

SEQ ID NO: 405859 - DNA, 19 bp, Homo sapiens
  siRNA target sequence for LIP8 (NM_053051.1,1131-1149).
gttctaagcatatctttga

SEQ ID NO: 405860 - DNA, 19 bp, Homo sapiens
  siRNA target sequence for LIP8 (NM_053051.1,1207-1225).
ctatcgggatcctctcatt

SEQ ID NO: 405861 - DNA, 19 bp, Homo sapiens
  siRNA target sequence for LIP8 (NM_053051.1,1386-1404).
cactcaatcccccagattt

SEQ ID NO: 405862 - DNA, 19 bp, Homo sapiens
  siRNA target sequence for LIP8 (NM_053051.1,1416-1434).
gagatgcattggattcaga

SEQ ID NO: 405863 - DNA, 19 bp, Homo sapiens
  siRNA target sequence for LIP8 (NM_053051.1,1474-1492).
cctgcagacccgagtgtta

SEQ ID NO: 405864 - DNA, 19 bp, Homo sapiens
  siRNA target sequence for LIP8 (NM_053051.1,1522-1540).
ggctgccgaccgcaagaaa

SEQ ID NO: 405865 - DNA, 19 bp, Homo sapiens
  siRNA target sequence for LIP8 (NM_053051.1,1524-1542).
ctgccgaccgcaagaaaga

SEQ ID NO: 405866 - DNA, 19 bp, Homo sapiens
  siRNA target sequence for LIP8 (NM_053051.1,1526-1544).
gccgaccgcaagaaagata

SEQ ID NO: 405867 - DNA, 19 bp, Homo sapiens
  siRNA target sequence for LIP8 (NM_053051.1,1688-1706).
gtaacccgcctggaacaaa

SEQ ID NO: 405868 - DNA, 19 bp, Homo sapiens
  siRNA target sequence for LIP8 (NM_053051.1,2280-2298).
cctccctcagggaacatca

SEQ ID NO: 405869 - DNA, 19 bp, Homo sapiens
  siRNA target sequence for LIP8 (NM_053051.1,2873-2891).
gccttccatcccgatcata

SEQ ID NO: 405870 - DNA, 19 bp, Homo sapiens
  siRNA target sequence for LIP8 (NM_053051.1,2975-2993).
gagggcctcaagaattttt

SEQ ID NO: 405871 - DNA, 19 bp, Homo sapiens
  siRNA target sequence for LIP8 (NM_053051.1,2979-2997).
gcctcaagaattttttgca

SEQ ID NO: 405872 - DNA, 19 bp, Homo sapiens
  siRNA target sequence for LIP8 (NM_053051.1,3097-3115).
ccctcaagtgccacgtatt

SEQ ID NO: 405873 - DNA, 19 bp, Homo sapiens
  siRNA target sequence for LIP8 (NM_053051.1,3119-3137).
ccgcctgtccacaaaacca

SEQ ID NO: 405874 - DNA, 19 bp, Homo sapiens
  siRNA target sequence for LIP8 (NM_053051.1,3481-3499).
ccccaagactgaaaaacct

SEQ ID NO: 405875 - DNA, 19 bp, Homo sapiens
  siRNA target sequence for LIP8 (NM_053051.1,3497-3515).
cctcccgcacggaagaaaa

SEQ ID NO: 405876 - DNA, 19 bp, Homo sapiens
  siRNA target sequence for IMAGE3451454 (NM_053052.2,622-640).
ggacagctgtccttaacat

SEQ ID NO: 405877 - DNA, 19 bp, Homo sapiens
  siRNA target sequence for IMAGE3451454 (NM_053052.2,643-661).
ctgtcgctcaggttcatga

SEQ ID NO: 405878 - DNA, 19 bp, Homo sapiens
  siRNA target sequence for IMAGE3451454 (NM_053052.2,695-713).
ccctctccagcatagttga

SEQ ID NO: 405879 - DNA, 19 bp, Homo sapiens
  siRNA target sequence for IMAGE3451454 (NM_053052.2,701-719).
ccagcatagttgagatcaa

SEQ ID NO: 405880 - DNA, 19 bp, Homo sapiens
  siRNA target sequence for IMAGE3451454 (NM_053052.2,704-722).
gcatagttgagatcaagaa

SEQ ID NO: 405881 - DNA, 19 bp, Homo sapiens
  siRNA target sequence for IMAGE3451454 (NM_053052.2,720-738).
gaaggaggcttcacatttt

SEQ ID NO: 405882 - DNA, 19 bp, Homo sapiens
  siRNA target sequence for IMAGE3451454 (NM_053052.2,724-742).
gaggcttcacattttatct

SEQ ID NO: 405883 - DNA, 19 bp, Homo sapiens
  siRNA target sequence for IMAGE3451454 (NM_053052.2,795-813).
cctgcggccaagtcgaaat

SEQ ID NO: 405884 - DNA, 19 bp, Homo sapiens
  siRNA target sequence for IMAGE3451454 (NM_053052.2,1081-1099).
ccctttagctccaagcttt

SEQ ID NO: 405885 - DNA, 19 bp, Homo sapiens
  siRNA target sequence for IMAGE3451454 (NM_053052.2,1137-1155).
ctccatgaccagttgtgaa

SEQ ID NO: 405886 - DNA, 19 bp, Homo sapiens
  siRNA target sequence for IMAGE3451454 (NM_053052.2,1162-1180).
gggaaagaagggatactga

SEQ ID NO: 405887 - DNA, 19 bp, Homo sapiens
  siRNA target sequence for IMAGE3451454 (NM_053052.2,1164-1182).
gaaagaagggatactgata

SEQ ID NO: 405888 - DNA, 19 bp, Homo sapiens
  siRNA target sequence for IMAGE3451454 (NM_053052.2,1168-1186).
gaagggatactgataaaaa

SEQ ID NO: 405889 - DNA, 19 bp, Homo sapiens
  siRNA target sequence for IMAGE3451454 (NM_053052.2,1173-1191).
gatactgataaaaattcct

SEQ ID NO: 405890 - DNA, 19 bp, Homo sapiens
  siRNA target sequence for IMAGE3451454 (NM_053052.2,1208-1226).
gaacagagtctcacgttaa

SEQ ID NO: 405891 - DNA, 19 bp, Homo sapiens
  siRNA target sequence for IMAGE3451454 (NM_053052.2,1251-1269).
gtctgggttggaaatacat

SEQ ID NO: 405892 - DNA, 19 bp, Homo sapiens
  siRNA target sequence for IMAGE3451454 (NM_053052.2,1253-1271).
ctgggttggaaatacatga

SEQ ID NO: 405893 - DNA, 19 bp, Homo sapiens
  siRNA target sequence for IMAGE3451454 (NM_053052.2,1285-1303).
ctcatgcacaggtttgaaa

SEQ ID NO: 405894 - DNA, 19 bp, Homo sapiens
  siRNA target sequence for IMAGE3451454 (NM_053052.2,1287-1305).
catgcacaggtttgaaaga

SEQ ID NO: 405895 - DNA, 19 bp, Homo sapiens
  siRNA target sequence for IMAGE3451454 (NM_053052.2,1290-1308).
gcacaggtttgaaagagaa

SEQ ID NO: 405896 - DNA, 19 bp, Homo sapiens
  siRNA target sequence for IMAGE3451454 (NM_053052.2,1327-1345).
gtccactcaccttacgaaa

SEQ ID NO: 405897 - DNA, 19 bp, Homo sapiens
  siRNA target sequence for IMAGE3451454 (NM_053052.2,1329-1347).
ccactcaccttacgaaatt

SEQ ID NO: 405898 - DNA, 19 bp, Homo sapiens
  siRNA target sequence for IMAGE3451454 (NM_053052.2,1330-1348).
cactcaccttacgaaatta

SEQ ID NO: 405899 - DNA, 19 bp, Homo sapiens
  siRNA target sequence for IMAGE3451454 (NM_053052.2,1334-1352).
caccttacgaaattagcat

SEQ ID NO: 405900 - DNA, 19 bp, Homo sapiens
  siRNA target sequence for IMAGE3451454 (NM_053052.2,1349-1367).
gcatccgccagcggtttat

SEQ ID NO: 405901 - DNA, 19 bp, Homo sapiens
  siRNA target sequence for IMAGE3451454 (NM_053052.2,1350-1368).
catccgccagcggtttatt

SEQ ID NO: 405902 - DNA, 19 bp, Homo sapiens
  siRNA target sequence for IMAGE3451454 (NM_053052.2,1353-1371).
ccgccagcggtttattgga

SEQ ID NO: 405903 - DNA, 19 bp, Homo sapiens
  siRNA target sequence for IMAGE3451454 (NM_053052.2,1354-1372).
cgccagcggtttattggaa

SEQ ID NO: 405904 - DNA, 19 bp, Homo sapiens
  siRNA target sequence for IMAGE3451454 (NM_053052.2,1375-1393).
ccagacatggcctatcgtt

SEQ ID NO: 405905 - DNA, 19 bp, Homo sapiens
  siRNA target sequence for IMAGE3451454 (NM_053052.2,1376-1394).
cagacatggcctatcgttt

SEQ ID NO: 405906 - DNA, 19 bp, Homo sapiens
  siRNA target sequence for IMAGE3451454 (NM_053052.2,1383-1401).
ggcctatcgtttgatatct

SEQ ID NO: 405907 - DNA, 19 bp, Homo sapiens
  siRNA target sequence for IMAGE3451454 (NM_053052.2,1403-1421).
ccaagatgccagaggttat

SEQ ID NO: 405908 - DNA, 19 bp, Homo sapiens
  siRNA target sequence for IMAGE3451454 (NM_053052.2,1639-1657).
gcagatacccaggaactaa

SEQ ID NO: 405909 - DNA, 19 bp, Homo sapiens
  siRNA target sequence for STAF42 (NM_053053.2,68-86).
gggacaacgtgaaacaata

SEQ ID NO: 405910 - DNA, 19 bp, Homo sapiens
  siRNA target sequence for STAF42 (NM_053053.2,141-159).
ccttgaagctcatagactt

SEQ ID NO: 405911 - DNA, 19 bp, Homo sapiens
  siRNA target sequence for STAF42 (NM_053053.2,155-173).
gacttctcacacaggataa

SEQ ID NO: 405912 - DNA, 19 bp, Homo sapiens
  siRNA target sequence for STAF42 (NM_053053.2,208-226).
ctcacgcgttgtcagattt

SEQ ID NO: 405913 - DNA, 19 bp, Homo sapiens
  siRNA target sequence for STAF42 (NM_053053.2,270-288).
gggttccgcagcaaaacct

SEQ ID NO: 405914 - DNA, 19 bp, Homo sapiens
  siRNA target sequence for STAF42 (NM_053053.2,276-294).
cgcagcaaaacctggaaaa

SEQ ID NO: 405915 - DNA, 19 bp, Homo sapiens
  siRNA target sequence for STAF42 (NM_053053.2,317-335).
cttctgttcgtcagaaatt

SEQ ID NO: 405916 - DNA, 19 bp, Homo sapiens
  siRNA target sequence for STAF42 (NM_053053.2,320-338).
ctgttcgtcagaaatttga

SEQ ID NO: 405917 - DNA, 19 bp, Homo sapiens
  siRNA target sequence for STAF42 (NM_053053.2,325-343).
cgtcagaaatttgatcata

SEQ ID NO: 405918 - DNA, 19 bp, Homo sapiens
  siRNA target sequence for STAF42 (NM_053053.2,366-384).
ctcaggagcccagcaattt

SEQ ID NO: 405919 - DNA, 19 bp, Homo sapiens
  siRNA target sequence for STAF42 (NM_053053.2,406-424).
gatgacgacttgaaacttt

SEQ ID NO: 405920 - DNA, 19 bp, Homo sapiens
  siRNA target sequence for STAF42 (NM_053053.2,409-427).
gacgacttgaaactttgtt

SEQ ID NO: 405921 - DNA, 19 bp, Homo sapiens
  siRNA target sequence for STAF42 (NM_053053.2,459-477).
gcttgaagggagaatgata

SEQ ID NO: 405922 - DNA, 19 bp, Homo sapiens
  siRNA target sequence for STAF42 (NM_053053.2,510-528).
caccgaggaggctgtttca

SEQ ID NO: 405923 - DNA, 19 bp, Homo sapiens
  siRNA target sequence for STAF42 (NM_053053.2,603-621).
gttacgagatggtcatttt

SEQ ID NO: 405924 - DNA, 19 bp, Homo sapiens
  siRNA target sequence for STAF42 (NM_053053.2,656-674).
catacctgaagaatagtgt

SEQ ID NO: 405925 - DNA, 19 bp, Homo sapiens
  siRNA target sequence for STAF42 (NM_053053.2,660-678).
cctgaagaatagtgtagta

SEQ ID NO: 405926 - DNA, 19 bp, Homo sapiens
  siRNA target sequence for STAF42 (NM_053053.2,671-689).
gtgtagtagcttacaacaa

SEQ ID NO: 405927 - DNA, 19 bp, Homo sapiens
  siRNA target sequence for STAF42 (NM_053053.2,673-691).
gtagtagcttacaacaact

SEQ ID NO: 405928 - DNA, 19 bp, Homo sapiens
  siRNA target sequence for STAF42 (NM_053053.2,676-694).
gtagcttacaacaacttaa

SEQ ID NO: 405929 - DNA, 19 bp, Homo sapiens
  siRNA target sequence for STAF42 (NM_053053.2,697-715).
gaaagccctccagctttta

SEQ ID NO: 405930 - DNA, 19 bp, Homo sapiens
  siRNA target sequence for STAF42 (NM_053053.2,821-839).
ctttgcctccggtgaacat

SEQ ID NO: 405931 - DNA, 19 bp, Homo sapiens
  siRNA target sequence for STAF42 (NM_053053.2,874-892).
gaagtcatccctacacata

SEQ ID NO: 405932 - DNA, 19 bp, Homo sapiens
  siRNA target sequence for STAF42 (NM_053053.2,893-911).
ctgtctatgctcttaacat

SEQ ID NO: 405933 - DNA, 19 bp, Homo sapiens
  siRNA target sequence for STAF42 (NM_053053.2,926-944).
cgaaactctggcatccaaa

SEQ ID NO: 405934 - DNA, 19 bp, Homo sapiens
  siRNA target sequence for STAF42 (NM_053053.2,927-945).
gaaactctggcatccaaat

SEQ ID NO: 405935 - DNA, 19 bp, Homo sapiens
  siRNA target sequence for STAF42 (NM_053053.2,954-972).
gctgcagcaagacaaagtt

SEQ ID NO: 405936 - DNA, 19 bp, Homo sapiens
  siRNA target sequence for VIT (NM_053276.2,278-296).
gctggtgactggagtacat

SEQ ID NO: 405937 - DNA, 19 bp, Homo sapiens
  siRNA target sequence for VIT (NM_053276.2,279-297).
ctggtgactggagtacatt

SEQ ID NO: 405938 - DNA, 19 bp, Homo sapiens
  siRNA target sequence for VIT (NM_053276.2,286-304).
ctggagtacattcaaacaa

SEQ ID NO: 405939 - DNA, 19 bp, Homo sapiens
  siRNA target sequence for VIT (NM_053276.2,380-398).
catcgatcctgagttcatt

SEQ ID NO: 405940 - DNA, 19 bp, Homo sapiens
  siRNA target sequence for VIT (NM_053276.2,419-437).
ccaagaccccaaataccat

SEQ ID NO: 405941 - DNA, 19 bp, Homo sapiens
  siRNA target sequence for VIT (NM_053276.2,444-462).
ggcactgacgtgtatgcat

SEQ ID NO: 405942 - DNA, 19 bp, Homo sapiens
  siRNA target sequence for VIT (NM_053276.2,492-510).
cacagtggtgtgcttgata

SEQ ID NO: 405943 - DNA, 19 bp, Homo sapiens
  siRNA target sequence for VIT (NM_053276.2,575-593).
caacggtgtccaatcgtta

SEQ ID NO: 405944 - DNA, 19 bp, Homo sapiens
  siRNA target sequence for VIT (NM_053276.2,597-615).
ctaccacgatggagagaat

SEQ ID NO: 405945 - DNA, 19 bp, Homo sapiens
  siRNA target sequence for VIT (NM_053276.2,603-621).
cgatggagagaatccttta

SEQ ID NO: 405946 - DNA, 19 bp, Homo sapiens
  siRNA target sequence for VIT (NM_053276.2,617-635).
ctttatcgtcttagaaagt

SEQ ID NO: 405947 - DNA, 19 bp, Homo sapiens
  siRNA target sequence for VIT (NM_053276.2,660-678).
ccatcagctcttacatact

SEQ ID NO: 405948 - DNA, 19 bp, Homo sapiens
  siRNA target sequence for VIT (NM_053276.2,725-743).
ctatcagaggccacctatt

SEQ ID NO: 405949 - DNA, 19 bp, Homo sapiens
  siRNA target sequence for VIT (NM_053276.2,948-966).
gctgatccaggtatccaaa

SEQ ID NO: 405950 - DNA, 19 bp, Homo sapiens
  siRNA target sequence for VIT (NM_053276.2,1045-1063).
ctggatcggtccttttaga

SEQ ID NO: 405951 - DNA, 19 bp, Homo sapiens
  siRNA target sequence for VIT (NM_053276.2,1048-1066).
gatcggtccttttagatga

SEQ ID NO: 405952 - DNA, 19 bp, Homo sapiens
  siRNA target sequence for VIT (NM_053276.2,1283-1301).
caaccctgctactcacttt

SEQ ID NO: 405953 - DNA, 19 bp, Homo sapiens
  siRNA target sequence for VIT (NM_053276.2,1288-1306).
ctgctactcactttaacct

SEQ ID NO: 405954 - DNA, 19 bp, Homo sapiens
  siRNA target sequence for VIT (NM_053276.2,1305-1323).
ctcaagacacacacgaatt

SEQ ID NO: 405955 - DNA, 19 bp, Homo sapiens
  siRNA target sequence for VIT (NM_053276.2,1307-1325).
caagacacacacgaattct

SEQ ID NO: 405956 - DNA, 19 bp, Homo sapiens
  siRNA target sequence for VIT (NM_053276.2,1318-1336).
cgaattctcgagatctgaa

SEQ ID NO: 405957 - DNA, 19 bp, Homo sapiens
  siRNA target sequence for VIT (NM_053276.2,1361-1379).
gagaggaggactttctaat

SEQ ID NO: 405958 - DNA, 19 bp, Homo sapiens
  siRNA target sequence for VIT (NM_053276.2,1363-1381).
gaggaggactttctaatgt

SEQ ID NO: 405959 - DNA, 19 bp, Homo sapiens
  siRNA target sequence for VIT (NM_053276.2,1386-1404).
cgggccatctcctttgtga

SEQ ID NO: 405960 - DNA, 19 bp, Homo sapiens
  siRNA target sequence for VIT (NM_053276.2,1477-1495).
gctggcccacggacaaagt

SEQ ID NO: 405961 - DNA, 19 bp, Homo sapiens
  siRNA target sequence for VIT (NM_053276.2,1519-1537).
gagagtcaggaatcaacat

SEQ ID NO: 405962 - DNA, 19 bp, Homo sapiens
  siRNA target sequence for VIT (NM_053276.2,1587-1605).
gtggagcccaactttgcaa

SEQ ID NO: 405963 - DNA, 19 bp, Homo sapiens
  siRNA target sequence for VIT (NM_053276.2,1736-1754).
cttgaactcggctgacatt

SEQ ID NO: 405964 - DNA, 19 bp, Homo sapiens
  siRNA target sequence for ODF3 (NM_053280.3,394-412).
ccaacaacaggcttcatga

SEQ ID NO: 405965 - DNA, 19 bp, Homo sapiens
  siRNA target sequence for ODF3 (NM_053280.3,395-413).
caacaacaggcttcatgaa

SEQ ID NO: 405966 - DNA, 19 bp, Homo sapiens
  siRNA target sequence for ODF3 (NM_053280.3,504-522).
caatgtaaaccccaagata

SEQ ID NO: 405967 - DNA, 19 bp, Homo sapiens
  siRNA target sequence for ODF3 (NM_053280.3,862-880).
gtgcgggtgaccaagttca

SEQ ID NO: 405968 - DNA, 19 bp, Homo sapiens
  siRNA target sequence for C8orf12 (NM_054017.2,1072-1090).
ggtgctagcacttttgctt

SEQ ID NO: 405969 - DNA, 19 bp, Homo sapiens
  siRNA target sequence for SCGB3A2 (NM_054023.2,127-145).
gaccatcagcctttgtagt

SEQ ID NO: 405970 - DNA, 19 bp, Homo sapiens
  siRNA target sequence for SCGB3A2 (NM_054023.2,129-147).
ccatcagcctttgtagtta

SEQ ID NO: 405971 - DNA, 19 bp, Homo sapiens
  siRNA target sequence for SCGB3A2 (NM_054023.2,180-198).
cccttcctgttgacaagtt

SEQ ID NO: 405972 - DNA, 19 bp, Homo sapiens
  siRNA target sequence for SCGB3A2 (NM_054023.2,193-211).
caagttggcacctttacct

SEQ ID NO: 405973 - DNA, 19 bp, Homo sapiens
  siRNA target sequence for SCGB3A2 (NM_054023.2,240-258).
cattaaagcttcttctgaa

SEQ ID NO: 405974 - DNA, 19 bp, Homo sapiens
  siRNA target sequence for SCGB3A2 (NM_054023.2,293-311).
gggctaaggaagtgtgtaa

SEQ ID NO: 405975 - DNA, 19 bp, Homo sapiens
  siRNA target sequence for SCGB3A2 (NM_054023.2,294-312).
ggctaaggaagtgtgtaaa

SEQ ID NO: 405976 - DNA, 19 bp, Homo sapiens
  siRNA target sequence for MIA2 (NM_054024.2,166-184).
cgatacctgaacttcacta

SEQ ID NO: 405977 - DNA, 19 bp, Homo sapiens
  siRNA target sequence for MIA2 (NM_054024.2,167-185).
gatacctgaacttcactaa

SEQ ID NO: 405978 - DNA, 19 bp, Homo sapiens
  siRNA target sequence for MIA2 (NM_054024.2,275-293).
gagatgcagtccagattga

SEQ ID NO: 405979 - DNA, 19 bp, Homo sapiens
  siRNA target sequence for MIA2 (NM_054024.2,288-306).
gattgaagaggtgttcata

SEQ ID NO: 405980 - DNA, 19 bp, Homo sapiens
  siRNA target sequence for MIA2 (NM_054024.2,321-339).
gatgtcaacgaaagaatct

SEQ ID NO: 405981 - DNA, 19 bp, Homo sapiens
  siRNA target sequence for MIA2 (NM_054024.2,352-370).
cttcttggagtaagttaca

SEQ ID NO: 405982 - DNA, 19 bp, Homo sapiens
  siRNA target sequence for MIA2 (NM_054024.2,359-377).
gagtaagttacacatttga

SEQ ID NO: 405983 - DNA, 19 bp, Homo sapiens
  siRNA target sequence for MIA2 (NM_054024.2,361-379).
gtaagttacacatttgaca

SEQ ID NO: 405984 - DNA, 19 bp, Homo sapiens
  siRNA target sequence for MIA2 (NM_054024.2,442-460).
gatgaaaaatctagtatat

SEQ ID NO: 405985 - DNA, 19 bp, Homo sapiens
  siRNA target sequence for MIA2 (NM_054024.2,589-607).
gaagtagttgttgaaagta

SEQ ID NO: 405986 - DNA, 19 bp, Homo sapiens
  siRNA target sequence for MIA2 (NM_054024.2,605-623).
gtatggaacaggatcgtat

SEQ ID NO: 405987 - DNA, 19 bp, Homo sapiens
  siRNA target sequence for MIA2 (NM_054024.2,659-677).
ctggagtcaaagaatggtt

SEQ ID NO: 405988 - DNA, 19 bp, Homo sapiens
  siRNA target sequence for MIA2 (NM_054024.2,743-761).
gctcatttcggagtagaaa

SEQ ID NO: 405989 - DNA, 19 bp, Homo sapiens
  siRNA target sequence for MIA2 (NM_054024.2,924-942).
gtttggtggaggatttaca

SEQ ID NO: 405990 - DNA, 19 bp, Homo sapiens
  siRNA target sequence for MIA2 (NM_054024.2,966-984).
ggatacagggcttgaatta

SEQ ID NO: 405991 - DNA, 19 bp, Homo sapiens
  siRNA target sequence for MIA2 (NM_054024.2,1012-1030).
caagattttcccaattcca

SEQ ID NO: 405992 - DNA, 19 bp, Homo sapiens
  siRNA target sequence for MIA2 (NM_054024.2,1015-1033).
gattttcccaattccatat

SEQ ID NO: 405993 - DNA, 19 bp, Homo sapiens
  siRNA target sequence for MIA2 (NM_054024.2,1028-1046).
ccatatcatctgataaaga

SEQ ID NO: 405994 - DNA, 19 bp, Homo sapiens
  siRNA target sequence for MIA2 (NM_054024.2,1050-1068).
cacagttccatgtacagaa

SEQ ID NO: 405995 - DNA, 19 bp, Homo sapiens
  siRNA target sequence for MIA2 (NM_054024.2,1119-1137).
gccaagttggtttgatttt

SEQ ID NO: 405996 - DNA, 19 bp, Homo sapiens
  siRNA target sequence for MIA2 (NM_054024.2,1145-1163).
ctatactaggctttgcata

SEQ ID NO: 405997 - DNA, 19 bp, Homo sapiens
  siRNA target sequence for MIA2 (NM_054024.2,1160-1178).
catatgccaaggaagataa

SEQ ID NO: 405998 - DNA, 19 bp, Homo sapiens
  siRNA target sequence for MIA2 (NM_054024.2,1238-1256).
ctctaacaagtgaattaga

SEQ ID NO: 405999 - DNA, 19 bp, Homo sapiens
  siRNA target sequence for MIA2 (NM_054024.2,1340-1358).
cagacgaatctgatactat

SEQ ID NO: 406000 - DNA, 19 bp, Homo sapiens
  siRNA target sequence for MIA2 (NM_054024.2,1344-1362).
cgaatctgatactatacca

SEQ ID NO: 406001 - DNA, 19 bp, Homo sapiens
  siRNA target sequence for MIA2 (NM_054024.2,1345-1363).
gaatctgatactataccat

SEQ ID NO: 406002 - DNA, 19 bp, Homo sapiens
  siRNA target sequence for MIA2 (NM_054024.2,1351-1369).
gatactataccatatttga

SEQ ID NO: 406003 - DNA, 19 bp, Homo sapiens
  siRNA target sequence for MIA2 (NM_054024.2,1504-1522).
gataattatcccacagata

SEQ ID NO: 406004 - DNA, 19 bp, Homo sapiens
  siRNA target sequence for MIA2 (NM_054024.2,1526-1544).
caaaagttatgatattcaa

SEQ ID NO: 406005 - DNA, 19 bp, Homo sapiens
  siRNA target sequence for MIA2 (NM_054024.2,1554-1572).
cagtctgtcaggttggtat

SEQ ID NO: 406006 - DNA, 19 bp, Homo sapiens
  siRNA target sequence for MIA2 (NM_054024.2,1558-1576).
ctgtcaggttggtatgaaa

SEQ ID NO: 406007 - DNA, 19 bp, Homo sapiens
  siRNA target sequence for MIA2 (NM_054024.2,1560-1578).
gtcaggttggtatgaaaat

SEQ ID NO: 406008 - DNA, 19 bp, Homo sapiens
  siRNA target sequence for MIA2 (NM_054024.2,1562-1580).
caggttggtatgaaaatat

SEQ ID NO: 406009 - DNA, 19 bp, Homo sapiens
  siRNA target sequence for C8orf14 (NM_054029.1,1507-1525).
ccatcagctcactttttaa

SEQ ID NO: 406010 - DNA, 19 bp, Homo sapiens
  siRNA target sequence for C8orf14 (NM_054029.1,1566-1584).
gcccgagatcggttcactt

SEQ ID NO: 406011 - DNA, 19 bp, Homo sapiens
  siRNA target sequence for C8orf14 (NM_054029.1,1567-1585).
cccgagatcggttcacttt

SEQ ID NO: 406012 - DNA, 19 bp, Homo sapiens
  siRNA target sequence for C8orf14 (NM_054029.1,1569-1587).
cgagatcggttcactttgt

SEQ ID NO: 406013 - DNA, 19 bp, Homo sapiens
  siRNA target sequence for C8orf14 (NM_054029.1,1589-1607).
cttcacatgtccttcacat

SEQ ID NO: 406014 - DNA, 19 bp, Homo sapiens
  siRNA target sequence for C8orf14 (NM_054029.1,1640-1658).
cacctgggtctctcacttt

SEQ ID NO: 406015 - DNA, 19 bp, Homo sapiens
  siRNA target sequence for C8orf14 (NM_054029.1,1645-1663).
gggtctctcactttccatt

SEQ ID NO: 406016 - DNA, 19 bp, Homo sapiens
  siRNA target sequence for C8orf14 (NM_054029.1,1665-1683).
cctgtctctcagatctact

SEQ ID NO: 406017 - DNA, 19 bp, Homo sapiens
  siRNA target sequence for C8orf14 (NM_054029.1,1666-1684).
ctgtctctcagatctacta

SEQ ID NO: 406018 - DNA, 19 bp, Homo sapiens
  siRNA target sequence for C8orf14 (NM_054029.1,1698-1716).
gccacaaagcacttatata

SEQ ID NO: 406019 - DNA, 19 bp, Homo sapiens
  siRNA target sequence for MRGX2 (NM_054030.2,185-203).
ccggtcttcctgatccttt

SEQ ID NO: 406020 - DNA, 19 bp, Homo sapiens
  siRNA target sequence for MRGX2 (NM_054030.2,186-204).
cggtcttcctgatcctttt

SEQ ID NO: 406021 - DNA, 19 bp, Homo sapiens
  siRNA target sequence for MRGX2 (NM_054030.2,347-365).
ctggtgtacctcagtaact

SEQ ID NO: 406022 - DNA, 19 bp, Homo sapiens
  siRNA target sequence for MRGX2 (NM_054030.2,350-368).
gtgtacctcagtaacttct

SEQ ID NO: 406023 - DNA, 19 bp, Homo sapiens
  siRNA target sequence for MRGX2 (NM_054030.2,372-390).
gttccatctccatcaattt

SEQ ID NO: 406024 - DNA, 19 bp, Homo sapiens
  siRNA target sequence for MRGX2 (NM_054030.2,648-666).
ctgcagcgtggctgatttt

SEQ ID NO: 406025 - DNA, 19 bp, Homo sapiens
  siRNA target sequence for MRGX2 (NM_054030.2,816-834).
ggttcctaatattatggat

SEQ ID NO: 406026 - DNA, 19 bp, Homo sapiens
  siRNA target sequence for HRLP5 (NM_054108.1,299-317).
gccccactcaggtctaaat

SEQ ID NO: 406027 - DNA, 19 bp, Homo sapiens
  siRNA target sequence for HRLP5 (NM_054108.1,300-318).
ccccactcaggtctaaata

SEQ ID NO: 406028 - DNA, 19 bp, Homo sapiens
  siRNA target sequence for HRLP5 (NM_054108.1,320-338).
catttccccccttgaatta

SEQ ID NO: 406029 - DNA, 19 bp, Homo sapiens
  siRNA target sequence for HRLP5 (NM_054108.1,503-521).
gaatgaaggcaagttaata

SEQ ID NO: 406030 - DNA, 19 bp, Homo sapiens
  siRNA target sequence for HRLP5 (NM_054108.1,528-546).
gcagctgagggaaaaccaa

SEQ ID NO: 406031 - DNA, 19 bp, Homo sapiens
  siRNA target sequence for HRLP5 (NM_054108.1,598-616).
gggccatctatgtagaaga

SEQ ID NO: 406032 - DNA, 19 bp, Homo sapiens
  siRNA target sequence for HRLP5 (NM_054108.1,599-617).
ggccatctatgtagaagat

SEQ ID NO: 406033 - DNA, 19 bp, Homo sapiens
  siRNA target sequence for HRLP5 (NM_054108.1,736-754).
gctcctggaaggtcaataa

SEQ ID NO: 406034 - DNA, 19 bp, Homo sapiens
  siRNA target sequence for HRLP5 (NM_054108.1,833-851).
gcagtacagcctgattgaa

SEQ ID NO: 406035 - DNA, 19 bp, Homo sapiens
  siRNA target sequence for HRLP5 (NM_054108.1,960-978).
gctgtagtggatagcataa

SEQ ID NO: 406036 - DNA, 19 bp, Homo sapiens
  siRNA target sequence for HRLP5 (NM_054108.1,961-979).
ctgtagtggatagcataaa

SEQ ID NO: 406037 - DNA, 19 bp, Homo sapiens
  siRNA target sequence for HRLP5 (NM_054108.1,973-991).
gcataaagcccaaaccaat

SEQ ID NO: 406038 - DNA, 19 bp, Homo sapiens
  siRNA target sequence for GALNT7 (NM_054110.2,750-768).
ggcctgccaccctttatct

SEQ ID NO: 406039 - DNA, 19 bp, Homo sapiens
  siRNA target sequence for GALNT7 (NM_054110.2,752-770).
cctgccaccctttatctca

SEQ ID NO: 406040 - DNA, 19 bp, Homo sapiens
  siRNA target sequence for GALNT7 (NM_054110.2,1081-1099).
ccagcgtcatcctctgttt

SEQ ID NO: 406041 - DNA, 19 bp, Homo sapiens
  siRNA target sequence for GALNT7 (NM_054110.2,1220-1238).
gtctgctctcagcgaatat

SEQ ID NO: 406042 - DNA, 19 bp, Homo sapiens
  siRNA target sequence for GALNT7 (NM_054110.2,1222-1240).
ctgctctcagcgaatatgt

SEQ ID NO: 406043 - DNA, 19 bp, Homo sapiens
  siRNA target sequence for GALNT7 (NM_054110.2,1247-1265).
gctggagggggtgaagtta

SEQ ID NO: 406044 - DNA, 19 bp, Homo sapiens
  siRNA target sequence for GALNT7 (NM_054110.2,1424-1442).
ggtatctccggtgatagat

SEQ ID NO: 406045 - DNA, 19 bp, Homo sapiens
  siRNA target sequence for GALNT7 (NM_054110.2,1429-1447).
ctccggtgatagatgtgat

SEQ ID NO: 406046 - DNA, 19 bp, Homo sapiens
  siRNA target sequence for GALNT7 (NM_054110.2,1611-1629).
gccatggacagacattact

SEQ ID NO: 406047 - DNA, 19 bp, Homo sapiens
  siRNA target sequence for GALNT7 (NM_054110.2,1641-1659).
ggagcgtatgactctctta

SEQ ID NO: 406048 - DNA, 19 bp, Homo sapiens
  siRNA target sequence for GALNT7 (NM_054110.2,1642-1660).
gagcgtatgactctcttat

SEQ ID NO: 406049 - DNA, 19 bp, Homo sapiens
  siRNA target sequence for GALNT7 (NM_054110.2,1644-1662).
gcgtatgactctcttatgt

SEQ ID NO: 406050 - DNA, 19 bp, Homo sapiens
  siRNA target sequence for GALNT7 (NM_054110.2,1663-1681).
cgctgcgaggtggtgaaaa

SEQ ID NO: 406051 - DNA, 19 bp, Homo sapiens
  siRNA target sequence for GALNT7 (NM_054110.2,1709-1727).
ctgtggtggctctgttgaa

SEQ ID NO: 406052 - DNA, 19 bp, Homo sapiens
  siRNA target sequence for GALNT7 (NM_054110.2,1741-1759).
ctcgggtaggacacatcta

SEQ ID NO: 406053 - DNA, 19 bp, Homo sapiens
  siRNA target sequence for GALNT7 (NM_054110.2,1746-1764).
gtaggacacatctaccaaa

SEQ ID NO: 406054 - DNA, 19 bp, Homo sapiens
  siRNA target sequence for GALNT7 (NM_054110.2,1832-1850).
ctggctggggtcattcaaa

SEQ ID NO: 406055 - DNA, 19 bp, Homo sapiens
  siRNA target sequence for GALNT7 (NM_054110.2,1834-1852).
ggctggggtcattcaaaga

SEQ ID NO: 406056 - DNA, 19 bp, Homo sapiens
  siRNA target sequence for GALNT7 (NM_054110.2,1840-1858).
ggtcattcaaagaaacctt

SEQ ID NO: 406057 - DNA, 19 bp, Homo sapiens
  siRNA target sequence for GALNT7 (NM_054110.2,1851-1869).
gaaaccttctacaagcata

SEQ ID NO: 406058 - DNA, 19 bp, Homo sapiens
  siRNA target sequence for GALNT7 (NM_054110.2,1963-1981).
ggtttctggctaatgtcta

SEQ ID NO: 406059 - DNA, 19 bp, Homo sapiens
  siRNA target sequence for GALNT7 (NM_054110.2,2146-2164).
ccagcaggaaggagattca

SEQ ID NO: 406060 - DNA, 19 bp, Homo sapiens
  siRNA target sequence for GALNT7 (NM_054110.2,2281-2299).
ggatgattgtccacattct

SEQ ID NO: 406061 - DNA, 19 bp, Homo sapiens
  siRNA target sequence for GALNT7 (NM_054110.2,2282-2300).
gatgattgtccacattctt

SEQ ID NO: 406062 - DNA, 19 bp, Homo sapiens
  siRNA target sequence for GALNT7 (NM_054110.2,2354-2372).
gcgtccgtgtgatggaaaa

SEQ ID NO: 406063 - DNA, 19 bp, Homo sapiens
  siRNA target sequence for GALNT7 (NM_054110.2,2377-2395).
gccagcagtggcgttttga

SEQ ID NO: 406064 - DNA, 19 bp, Homo sapiens
  siRNA target sequence for TAGAP (NM_054114.3,353-371).
caatgcttcaaaaacacta

SEQ ID NO: 406065 - DNA, 19 bp, Homo sapiens
  siRNA target sequence for TAGAP (NM_054114.3,403-421).
gtcaatcagagggtgatat

SEQ ID NO: 406066 - DNA, 19 bp, Homo sapiens
  siRNA target sequence for TAGAP (NM_054114.3,530-548).
gctctcccctgcatcagat

SEQ ID NO: 406067 - DNA, 19 bp, Homo sapiens
  siRNA target sequence for TAGAP (NM_054114.3,536-554).
ccctgcatcagatttttct

SEQ ID NO: 406068 - DNA, 19 bp, Homo sapiens
  siRNA target sequence for TAGAP (NM_054114.3,572-590).
cttgaaagcatcgctattt

SEQ ID NO: 406069 - DNA, 19 bp, Homo sapiens
  siRNA target sequence for TAGAP (NM_054114.3,575-593).
gaaagcatcgctatttgat

SEQ ID NO: 406070 - DNA, 19 bp, Homo sapiens
  siRNA target sequence for TAGAP (NM_054114.3,591-609).
gatcagcccttgtcaatta

SEQ ID NO: 406071 - DNA, 19 bp, Homo sapiens
  siRNA target sequence for TAGAP (NM_054114.3,1179-1197).
gtgcattccagtatcactt

SEQ ID NO: 406072 - DNA, 19 bp, Homo sapiens
  siRNA target sequence for TAGAP (NM_054114.3,1443-1461).
cagcccgataggagatact

SEQ ID NO: 406073 - DNA, 19 bp, Homo sapiens
  siRNA target sequence for TAGAP (NM_054114.3,1445-1463).
gcccgataggagatactca

SEQ ID NO: 406074 - DNA, 19 bp, Homo sapiens
  siRNA target sequence for TAGAP (NM_054114.3,1499-1517).
gagccgggtgacaaaccaa

SEQ ID NO: 406075 - DNA, 19 bp, Homo sapiens
  siRNA target sequence for TAGAP (NM_054114.3,1508-1526).
gacaaaccaaacactaaca

SEQ ID NO: 406076 - DNA, 19 bp, Homo sapiens
  siRNA target sequence for TAGAP (NM_054114.3,1556-1574).
ggtaggctctcgtttggaa

SEQ ID NO: 406077 - DNA, 19 bp, Homo sapiens
  siRNA target sequence for TAGAP (NM_054114.3,1557-1575).
gtaggctctcgtttggaaa

SEQ ID NO: 406078 - DNA, 19 bp, Homo sapiens
  siRNA target sequence for TAGAP (NM_054114.3,1561-1579).
gctctcgtttggaaagtga

SEQ ID NO: 406079 - DNA, 19 bp, Homo sapiens
  siRNA target sequence for TAGAP (NM_054114.3,1618-1636).
cagtgcaaggcaaaaccaa

SEQ ID NO: 406080 - DNA, 19 bp, Homo sapiens
  siRNA target sequence for TAGAP (NM_054114.3,1765-1783).
ccagtcccaaaagaaattt

SEQ ID NO: 406081 - DNA, 19 bp, Homo sapiens
  siRNA target sequence for TAGAP (NM_054114.3,1825-1843).
gcaagcccagccgagaaat

SEQ ID NO: 406082 - DNA, 19 bp, Homo sapiens
  siRNA target sequence for TAGAP (NM_054114.3,1826-1844).
caagcccagccgagaaatt

SEQ ID NO: 406083 - DNA, 19 bp, Homo sapiens
  siRNA target sequence for TAGAP (NM_054114.3,1830-1848).
cccagccgagaaattaaaa

SEQ ID NO: 406084 - DNA, 19 bp, Homo sapiens
  siRNA target sequence for TAGAP (NM_054114.3,1865-1883).
cacctttgcccctcacaaa

SEQ ID NO: 406085 - DNA, 19 bp, Homo sapiens
  siRNA target sequence for TAGAP (NM_054114.3,1984-2002).
gccgaatcgtgcaggaaaa

SEQ ID NO: 406086 - DNA, 19 bp, Homo sapiens
  siRNA target sequence for TAGAP (NM_054114.3,1985-2003).
ccgaatcgtgcaggaaaat

SEQ ID NO: 406087 - DNA, 19 bp, Homo sapiens
  siRNA target sequence for TAGAP (NM_054114.3,2107-2125).
gcccaccctcttatgaaga

SEQ ID NO: 406088 - DNA, 19 bp, Homo sapiens
  siRNA target sequence for TAGAP (NM_054114.3,2322-2340).
cctgagcgatggaaacaga

SEQ ID NO: 406089 - DNA, 19 bp, Homo sapiens
  siRNA target sequence for TAGAP (NM_054114.3,2427-2445).
gagtccgtgcagaggaata

SEQ ID NO: 406090 - DNA, 19 bp, Homo sapiens
  siRNA target sequence for TAGAP (NM_054114.3,2487-2505).
gaggctgaccaattccaat

SEQ ID NO: 406091 - DNA, 19 bp, Homo sapiens
  siRNA target sequence for TAGAP (NM_054114.3,2489-2507).
ggctgaccaattccaatat

SEQ ID NO: 406092 - DNA, 19 bp, Homo sapiens
  siRNA target sequence for KRT3 (NM_057088.1,700-718).
cagcagcagggcacaagtt

SEQ ID NO: 406093 - DNA, 19 bp, Homo sapiens
  siRNA target sequence for KRT3 (NM_057088.1,746-764).
ctctttttgagaatcacat

SEQ ID NO: 406094 - DNA, 19 bp, Homo sapiens
  siRNA target sequence for KRT3 (NM_057088.1,934-952).
gacagtgcctatatgaaca

SEQ ID NO: 406095 - DNA, 19 bp, Homo sapiens
  siRNA target sequence for KRT3 (NM_057088.1,1222-1240).
ggggatgacctaagaaata

SEQ ID NO: 406096 - DNA, 19 bp, Homo sapiens
  siRNA target sequence for KRT3 (NM_057088.1,1225-1243).
gatgacctaagaaatacca

SEQ ID NO: 406097 - DNA, 19 bp, Homo sapiens
  siRNA target sequence for KLHDC3 (NM_057161.2,233-251).
gtcgggcatcgggtatact

SEQ ID NO: 406098 - DNA, 19 bp, Homo sapiens
  siRNA target sequence for KLHDC3 (NM_057161.2,265-283).
ctgctctggtgaagactat

SEQ ID NO: 406099 - DNA, 19 bp, Homo sapiens
  siRNA target sequence for KLHDC3 (NM_057161.2,267-285).
gctctggtgaagactatga

SEQ ID NO: 406100 - DNA, 19 bp, Homo sapiens
  siRNA target sequence for KLHDC3 (NM_057161.2,286-304).
gacactgcgtcagatagat

SEQ ID NO: 406101 - DNA, 19 bp, Homo sapiens
  siRNA target sequence for KLHDC3 (NM_057161.2,288-306).
cactgcgtcagatagatgt

SEQ ID NO: 406102 - DNA, 19 bp, Homo sapiens
  siRNA target sequence for KLHDC3 (NM_057161.2,296-314).
cagatagatgtgcacattt

SEQ ID NO: 406103 - DNA, 19 bp, Homo sapiens
  siRNA target sequence for KLHDC3 (NM_057161.2,575-593).
ctaggcaagatcatgtaca

SEQ ID NO: 406104 - DNA, 19 bp, Homo sapiens
  siRNA target sequence for KLHDC3 (NM_057161.2,610-628).
gcagcaggcggactgtttt

SEQ ID NO: 406105 - DNA, 19 bp, Homo sapiens
  siRNA target sequence for KLHDC3 (NM_057161.2,614-632).
caggcggactgtttttcca

SEQ ID NO: 406106 - DNA, 19 bp, Homo sapiens
  siRNA target sequence for KLHDC3 (NM_057161.2,660-678).
ccatgacatggactcttat

SEQ ID NO: 406107 - DNA, 19 bp, Homo sapiens
  siRNA target sequence for KLHDC3 (NM_057161.2,770-788).
cgctttgggccattccatt

SEQ ID NO: 406108 - DNA, 19 bp, Homo sapiens
  siRNA target sequence for KLHDC3 (NM_057161.2,778-796).
gccattccattccaacaat

SEQ ID NO: 406109 - DNA, 19 bp, Homo sapiens
  siRNA target sequence for KLHDC3 (NM_057161.2,780-798).
cattccattccaacaatga

SEQ ID NO: 406110 - DNA, 19 bp, Homo sapiens
  siRNA target sequence for KLHDC3 (NM_057161.2,812-830).
cgcattcgagtctttgaca

SEQ ID NO: 406111 - DNA, 19 bp, Homo sapiens
  siRNA target sequence for KLHDC3 (NM_057161.2,895-913).
ctcggcctttggctacaat

SEQ ID NO: 406112 - DNA, 19 bp, Homo sapiens
  siRNA target sequence for KLHDC3 (NM_057161.2,928-946).
ctttggtggttataatgca

SEQ ID NO: 406113 - DNA, 19 bp, Homo sapiens
  siRNA target sequence for KLHDC3 (NM_057161.2,1059-1077).
gtattgttggtgacaagat

SEQ ID NO: 406114 - DNA, 19 bp, Homo sapiens
  siRNA target sequence for KLHDC3 (NM_057161.2,1194-1212).
gcaaactggccgtgattca

SEQ ID NO: 406115 - DNA, 19 bp, Homo sapiens
  siRNA target sequence for KLHDC3 (NM_057161.2,1203-1221).
ccgtgattcagtataacct

SEQ ID NO: 406116 - DNA, 19 bp, Homo sapiens
  siRNA target sequence for KLHDC3 (NM_057161.2,1204-1222).
cgtgattcagtataaccta

SEQ ID NO: 406117 - DNA, 19 bp, Homo sapiens
  siRNA target sequence for BSND (NM_057176.2,496-514).
cttgctgccgagatgaaga

SEQ ID NO: 406118 - DNA, 19 bp, Homo sapiens
  siRNA target sequence for BSND (NM_057176.2,589-607).
cacatccagatgaaagtca

SEQ ID NO: 406119 - DNA, 19 bp, Homo sapiens
  siRNA target sequence for BSND (NM_057176.2,761-779).
gggaaagacgcctaactca

SEQ ID NO: 406120 - DNA, 19 bp, Homo sapiens
  siRNA target sequence for ALS2CR19 (NM_057177.3,134-152).
gggtgaagattcatcactt

SEQ ID NO: 406121 - DNA, 19 bp, Homo sapiens
  siRNA target sequence for ALS2CR19 (NM_057177.3,350-368).
caattggtggggagattga

SEQ ID NO: 406122 - DNA, 19 bp, Homo sapiens
  siRNA target sequence for ALS2CR19 (NM_057177.3,476-494).
gtggccagagtctgaaact

SEQ ID NO: 406123 - DNA, 19 bp, Homo sapiens
  siRNA target sequence for ALS2CR19 (NM_057177.3,503-521).
cagattccacgcagaactt

SEQ ID NO: 406124 - DNA, 19 bp, Homo sapiens
  siRNA target sequence for ALS2CR19 (NM_057177.3,545-563).
gtgtacagacagaactact

SEQ ID NO: 406125 - DNA, 19 bp, Homo sapiens
  siRNA target sequence for ALS2CR19 (NM_057177.3,562-580).
ctaacttcgccaagaacta

SEQ ID NO: 406126 - DNA, 19 bp, Homo sapiens
  siRNA target sequence for ALS2CR19 (NM_057177.3,583-601).
gacacattgagtgatatga

SEQ ID NO: 406127 - DNA, 19 bp, Homo sapiens
  siRNA target sequence for ALS2CR19 (NM_057177.3,649-667).
gtagtgcccttcttttcat

SEQ ID NO: 406128 - DNA, 19 bp, Homo sapiens
  siRNA target sequence for ALS2CR19 (NM_057177.3,680-698).
ggattctaggactcttcat

SEQ ID NO: 406129 - DNA, 19 bp, Homo sapiens
  siRNA target sequence for ALS2CR19 (NM_057177.3,725-743).
ccaagcgggagggactatt

SEQ ID NO: 406130 - DNA, 19 bp, Homo sapiens
  siRNA target sequence for ALS2CR19 (NM_057177.3,726-744).
caagcgggagggactattt

SEQ ID NO: 406131 - DNA, 19 bp, Homo sapiens
  siRNA target sequence for ALS2CR19 (NM_057177.3,778-796).
gtggatctcgtagacaaaa

SEQ ID NO: 406132 - DNA, 19 bp, Homo sapiens
  siRNA target sequence for ALS2CR19 (NM_057177.3,781-799).
gatctcgtagacaaaacct

SEQ ID NO: 406133 - DNA, 19 bp, Homo sapiens
  siRNA target sequence for ALS2CR19 (NM_057177.3,819-837).
cttccgccaggcaatgaaa

SEQ ID NO: 406134 - DNA, 19 bp, Homo sapiens
  siRNA target sequence for ALS2CR19 (NM_057177.3,822-840).
ccgccaggcaatgaaatct

SEQ ID NO: 406135 - DNA, 19 bp, Homo sapiens
  siRNA target sequence for ALS2CR19 (NM_057177.3,885-903).
gtatgaaaagtcagtcatt

SEQ ID NO: 406136 - DNA, 19 bp, Homo sapiens
  siRNA target sequence for ALS2CR19 (NM_057177.3,896-914).
cagtcattggctctcttaa

SEQ ID NO: 406137 - DNA, 19 bp, Homo sapiens
  siRNA target sequence for ALS2CR19 (NM_057177.3,931-949).
gatggcgttttgaaaacca

SEQ ID NO: 406138 - DNA, 19 bp, Homo sapiens
  siRNA target sequence for ALS2CR19 (NM_057177.3,970-988).
ggaaaatcgggactaaaga

SEQ ID NO: 406139 - DNA, 19 bp, Homo sapiens
  siRNA target sequence for ALS2CR19 (NM_057177.3,1166-1184).
gccctgaaggacttggttt

SEQ ID NO: 406140 - DNA, 19 bp, Homo sapiens
  siRNA target sequence for ALS2CR19 (NM_057177.3,1217-1235).
gtcccggtcccatttttgt

SEQ ID NO: 406141 - DNA, 19 bp, Homo sapiens
  siRNA target sequence for ALS2CR19 (NM_057177.3,1219-1237).
cccggtcccatttttgtaa

SEQ ID NO: 406142 - DNA, 19 bp, Homo sapiens
  siRNA target sequence for ALS2CR19 (NM_057177.3,1220-1238).
ccggtcccatttttgtaaa

SEQ ID NO: 406143 - DNA, 19 bp, Homo sapiens
  siRNA target sequence for ALS2CR19 (NM_057177.3,1221-1239).
cggtcccatttttgtaaaa

SEQ ID NO: 406144 - DNA, 19 bp, Homo sapiens
  siRNA target sequence for ALS2CR19 (NM_057177.3,1254-1272).
gggagcagcaataaaagat

SEQ ID NO: 406145 - DNA, 19 bp, Homo sapiens
  siRNA target sequence for ALS2CR19 (NM_057177.3,1286-1304).
caggggacagaattttgga

SEQ ID NO: 406146 - DNA, 19 bp, Homo sapiens
  siRNA target sequence for ALS2CR19 (NM_057177.3,1492-1510).
gagatccccctgaatgatt

SEQ ID NO: 406147 - DNA, 19 bp, Homo sapiens
  siRNA target sequence for ALS2CR19 (NM_057177.3,1494-1512).
gatccccctgaatgattca

SEQ ID NO: 406148 - DNA, 19 bp, Homo sapiens
  siRNA target sequence for ALS2CR19 (NM_057177.3,1522-1540).
ggcctcggggtgagcttaa

SEQ ID NO: 406149 - DNA, 19 bp, Homo sapiens
  siRNA target sequence for ALS2CR19 (NM_057177.3,1523-1541).
gcctcggggtgagcttaaa

SEQ ID NO: 406150 - DNA, 19 bp, Homo sapiens
  siRNA target sequence for ALS2CR19 (NM_057177.3,1524-1542).
cctcggggtgagcttaaaa

SEQ ID NO: 406151 - DNA, 19 bp, Homo sapiens
  siRNA target sequence for ALS2CR19 (NM_057177.3,1625-1643).
gtcgtctgcgaatgaatga

SEQ ID NO: 406152 - DNA, 19 bp, Homo sapiens
  siRNA target sequence for ALS2CR19 (NM_057177.3,1644-1662).
ccagctgattgcagttaat

SEQ ID NO: 406153 - DNA, 19 bp, Homo sapiens
  siRNA target sequence for ALS2CR19 (NM_057177.3,1686-1704).
caaccacgaagctatggaa

SEQ ID NO: 406154 - DNA, 19 bp, Homo sapiens
  siRNA target sequence for ALS2CR19 (NM_057177.3,1817-1835).
ccaagccatgctttgagaa

SEQ ID NO: 406155 - DNA, 19 bp, Homo sapiens
  siRNA target sequence for ALS2CR19 (NM_057177.3,1857-1875).
ctctaggcgaaatgataat

SEQ ID NO: 406156 - DNA, 19 bp, Homo sapiens
  siRNA target sequence for ALS2CR19 (NM_057177.3,1862-1880).
ggcgaaatgataatagtat

SEQ ID NO: 406157 - DNA, 19 bp, Homo sapiens
  siRNA target sequence for ALS2CR19 (NM_057177.3,1901-1919).
gcagtccacaagacaaaca

SEQ ID NO: 406158 - DNA, 19 bp, Homo sapiens
  siRNA target sequence for ALS2CR19 (NM_057177.3,1996-2014).
ggattgggcctcgaagatt

SEQ ID NO: 406159 - DNA, 19 bp, Homo sapiens
  siRNA target sequence for ALS2CR19 (NM_057177.3,1997-2015).
gattgggcctcgaagatta

SEQ ID NO: 406160 - DNA, 19 bp, Homo sapiens
  siRNA target sequence for ALS2CR19 (NM_057177.3,2030-2048).
gggtggattcagcagtata

SEQ ID NO: 406161 - DNA, 19 bp, Homo sapiens
  siRNA target sequence for ALS2CR19 (NM_057177.3,2031-2049).
ggtggattcagcagtatat

SEQ ID NO: 406162 - DNA, 19 bp, Homo sapiens
  siRNA target sequence for ALS2CR19 (NM_057177.3,2053-2071).
ccagatcagcacatcaact

SEQ ID NO: 406163 - DNA, 19 bp, Homo sapiens
  siRNA target sequence for ALS2CR19 (NM_057177.3,2093-2111).
ggcagcctgaatcaattaa

SEQ ID NO: 406164 - DNA, 19 bp, Homo sapiens
  siRNA target sequence for ALS2CR19 (NM_057177.3,2094-2112).
gcagcctgaatcaattaat

SEQ ID NO: 406165 - DNA, 19 bp, Homo sapiens
  siRNA target sequence for ALS2CR19 (NM_057177.3,2134-2152).
gaccttgtgccagatgaaa

SEQ ID NO: 406166 - DNA, 19 bp, Homo sapiens
  siRNA target sequence for ALS2CR19 (NM_057177.3,2217-2235).
ccaaggagctctgaattgt

SEQ ID NO: 406167 - DNA, 19 bp, Homo sapiens
  siRNA target sequence for ALS2CR19 (NM_057177.3,2412-2430).
cgccatgctgagatttgga

SEQ ID NO: 406168 - DNA, 19 bp, Homo sapiens
  siRNA target sequence for ALS2CR19 (NM_057177.3,2571-2589).
ggcaagaggtcttcttgat

SEQ ID NO: 406169 - DNA, 19 bp, Homo sapiens
  siRNA target sequence for ALS2CR19 (NM_057177.3,2593-2611).
gctactggtgcaattggat

SEQ ID NO: 406170 - DNA, 19 bp, Homo sapiens
  siRNA target sequence for ALS2CR19 (NM_057177.3,2715-2733).
ccctcgagctggaccattt

SEQ ID NO: 406171 - DNA, 19 bp, Homo sapiens
  siRNA target sequence for ALS2CR19 (NM_057177.3,2765-2783).
cagaaagagaccacttaga

SEQ ID NO: 406172 - DNA, 19 bp, Homo sapiens
  siRNA target sequence for ALS2CR19 (NM_057177.3,2775-2793).
ccacttagagggtctctat

SEQ ID NO: 406173 - DNA, 19 bp, Homo sapiens
  siRNA target sequence for ALS2CR19 (NM_057177.3,2799-2817).
ggtcaacaagccataccat

SEQ ID NO: 406174 - DNA, 19 bp, Homo sapiens
  siRNA target sequence for ALS2CR19 (NM_057177.3,2861-2879).
ctgaccgtatccagaagtt

SEQ ID NO: 406175 - DNA, 19 bp, Homo sapiens
  siRNA target sequence for ALS2CR19 (NM_057177.3,2872-2890).
cagaagttgcggaaagagt

SEQ ID NO: 406176 - DNA, 19 bp, Homo sapiens
  siRNA target sequence for ALS2CR19 (NM_057177.3,2906-2924).
gggaaggtttccctttata

SEQ ID NO: 406177 - DNA, 19 bp, Homo sapiens
  siRNA target sequence for ALS2CR19 (NM_057177.3,3030-3048).
gaggcagtacgcatcctta

SEQ ID NO: 406178 - DNA, 19 bp, Homo sapiens
  siRNA target sequence for ALS2CR19 (NM_057177.3,3062-3080).
ccgcagatcctgtagacta

SEQ ID NO: 406179 - DNA, 19 bp, Homo sapiens
  siRNA target sequence for ALS2CR19 (NM_057177.3,3063-3081).
cgcagatcctgtagactat

SEQ ID NO: 406180 - DNA, 19 bp, Homo sapiens
  siRNA target sequence for ALS2CR19 (NM_057177.3,3065-3083).
cagatcctgtagactatct

SEQ ID NO: 406181 - DNA, 19 bp, Homo sapiens
  siRNA target sequence for DT1P1A10 (NM_058163.1,142-160).
ggggtgcagtggaggatta

SEQ ID NO: 406182 - DNA, 19 bp, Homo sapiens
  siRNA target sequence for DT1P1A10 (NM_058163.1,175-193).
ctgacttggagctagatga

SEQ ID NO: 406183 - DNA, 19 bp, Homo sapiens
  siRNA target sequence for DT1P1A10 (NM_058163.1,218-236).
gttgaccaacgagtttgat

SEQ ID NO: 406184 - DNA, 19 bp, Homo sapiens
  siRNA target sequence for DT1P1A10 (NM_058163.1,223-241).
ccaacgagtttgatacagt

SEQ ID NO: 406185 - DNA, 19 bp, Homo sapiens
  siRNA target sequence for DT1P1A10 (NM_058163.1,224-242).
caacgagtttgatacagtt

SEQ ID NO: 406186 - DNA, 19 bp, Homo sapiens
  siRNA target sequence for DT1P1A10 (NM_058163.1,440-458).
ggaggtcacagctacgaat

SEQ ID NO: 406187 - DNA, 19 bp, Homo sapiens
  siRNA target sequence for DT1P1A10 (NM_058163.1,443-461).
ggtcacagctacgaatgat

SEQ ID NO: 406188 - DNA, 19 bp, Homo sapiens
  siRNA target sequence for DT1P1A10 (NM_058163.1,507-525).
ccagacgctcagactatta

SEQ ID NO: 406189 - DNA, 19 bp, Homo sapiens
  siRNA target sequence for DT1P1A10 (NM_058163.1,554-572).
gaccattgtccggagaaaa

SEQ ID NO: 406190 - DNA, 19 bp, Homo sapiens
  siRNA target sequence for LOH12CR1 (NM_058169.2,395-413).
ccttcaccagccaagcata

SEQ ID NO: 406191 - DNA, 19 bp, Homo sapiens
  siRNA target sequence for LOH12CR1 (NM_058169.2,474-492).
gcaacgatcccgatgtcat

SEQ ID NO: 406192 - DNA, 19 bp, Homo sapiens
  siRNA target sequence for LOH12CR1 (NM_058169.2,604-622).
gctctgcctccgatatcaa

SEQ ID NO: 406193 - DNA, 19 bp, Homo sapiens
  siRNA target sequence for LOH12CR1 (NM_058169.2,607-625).
ctgcctccgatatcaagat

SEQ ID NO: 406194 - DNA, 19 bp, Homo sapiens
  siRNA target sequence for LOH12CR1 (NM_058169.2,609-627).
gcctccgatatcaagatca

SEQ ID NO: 406195 - DNA, 19 bp, Homo sapiens
  siRNA target sequence for LOH12CR1 (NM_058169.2,639-657).
gtgcagaggccgttgcttt

SEQ ID NO: 406196 - DNA, 19 bp, Homo sapiens
  siRNA target sequence for LOH12CR1 (NM_058169.2,691-709).
gatggatctgtctgtagaa

SEQ ID NO: 406197 - DNA, 19 bp, Homo sapiens
  siRNA target sequence for ING2 (NM_058171.2,256-274).
gagtctcaaccataaacca

SEQ ID NO: 406198 - DNA, 19 bp, Homo sapiens
  siRNA target sequence for LOC118430 (NM_058173.1,243-261).
ctaccactgctcgtaaaga

SEQ ID NO: 406199 - DNA, 19 bp, Homo sapiens
  siRNA target sequence for LOC118430 (NM_058173.1,287-305).
ggggatctcccgaatggta

SEQ ID NO: 406200 - DNA, 19 bp, Homo sapiens
  siRNA target sequence for C21orf58 (NM_058180.2,1301-1319).
ctttcctgcgagtaacaga

SEQ ID NO: 406201 - DNA, 19 bp, Homo sapiens
  siRNA target sequence for C21orf58 (NM_058180.2,1490-1508).
ccacctcgagccaggaaat

SEQ ID NO: 406202 - DNA, 19 bp, Homo sapiens
  siRNA target sequence for C21orf58 (NM_058180.2,1787-1805).
gccactcatagcacagatt

SEQ ID NO: 406203 - DNA, 19 bp, Homo sapiens
  siRNA target sequence for C21orf58 (NM_058180.2,1828-1846).
ctcaacggtcaggaagtat

SEQ ID NO: 406204 - DNA, 19 bp, Homo sapiens
  siRNA target sequence for C21orf58 (NM_058180.2,1830-1848).
caacggtcaggaagtatta

SEQ ID NO: 406205 - DNA, 19 bp, Homo sapiens
  siRNA target sequence for C21orf58 (NM_058180.2,1834-1852).
ggtcaggaagtattaagga

SEQ ID NO: 406206 - DNA, 19 bp, Homo sapiens
  siRNA target sequence for C21orf58 (NM_058180.2,1840-1858).
gaagtattaaggaagacat

SEQ ID NO: 406207 - DNA, 19 bp, Homo sapiens
  siRNA target sequence for C21orf42 (NM_058184.1,432-450).
cattatccttagtaacaga

SEQ ID NO: 406208 - DNA, 19 bp, Homo sapiens
  siRNA target sequence for C21orf42 (NM_058184.1,466-484).
gagccattttggaacttta

SEQ ID NO: 406209 - DNA, 19 bp, Homo sapiens
  siRNA target sequence for C21orf42 (NM_058184.1,476-494).
ggaactttaccaaggatta

SEQ ID NO: 406210 - DNA, 19 bp, Homo sapiens
  siRNA target sequence for C21orf42 (NM_058184.1,496-514).
ggatgagcacagatcacat

SEQ ID NO: 406211 - DNA, 19 bp, Homo sapiens
  siRNA target sequence for C21orf42 (NM_058184.1,507-525).
gatcacatcaagagtctaa

SEQ ID NO: 406212 - DNA, 19 bp, Homo sapiens
  siRNA target sequence for C21orf42 (NM_058184.1,510-528).
cacatcaagagtctaaata

SEQ ID NO: 406213 - DNA, 19 bp, Homo sapiens
  siRNA target sequence for C21orf42 (NM_058184.1,541-559).
ccatgtgcagatcagattt

SEQ ID NO: 406214 - DNA, 19 bp, Homo sapiens
  siRNA target sequence for C21orf42 (NM_058184.1,584-602).
ggacaccagagttttctgt

SEQ ID NO: 406215 - DNA, 19 bp, Homo sapiens
  siRNA target sequence for C21orf42 (NM_058184.1,587-605).
caccagagttttctgttaa

SEQ ID NO: 406216 - DNA, 19 bp, Homo sapiens
  siRNA target sequence for C21orf69 (NM_058189.1,434-452).
gggttcctaggcatgaaga

SEQ ID NO: 406217 - DNA, 19 bp, Homo sapiens
  siRNA target sequence for C21orf70 (NM_058190.1,157-175).
gactgggcgttcatcaaca

SEQ ID NO: 406218 - DNA, 19 bp, Homo sapiens
  siRNA target sequence for TECTB (NM_058222.1,4-22).
gtgacgaaggcctttgtct

SEQ ID NO: 406219 - DNA, 19 bp, Homo sapiens
  siRNA target sequence for TECTB (NM_058222.1,124-142).
cccgagtgtccctatggat

SEQ ID NO: 406220 - DNA, 19 bp, Homo sapiens
  siRNA target sequence for TECTB (NM_058222.1,161-179).
ccctcggagggctgtgtta

SEQ ID NO: 406221 - DNA, 19 bp, Homo sapiens
  siRNA target sequence for TECTB (NM_058222.1,163-181).
ctcggagggctgtgttaca

SEQ ID NO: 406222 - DNA, 19 bp, Homo sapiens
  siRNA target sequence for TECTB (NM_058222.1,165-183).
cggagggctgtgttacaat

SEQ ID NO: 406223 - DNA, 19 bp, Homo sapiens
  siRNA target sequence for TECTB (NM_058222.1,193-211).
gaaggaggttactaccaat

SEQ ID NO: 406224 - DNA, 19 bp, Homo sapiens
  siRNA target sequence for TECTB (NM_058222.1,197-215).
gaggttactaccaatttgt

SEQ ID NO: 406225 - DNA, 19 bp, Homo sapiens
  siRNA target sequence for TECTB (NM_058222.1,199-217).
ggttactaccaatttgtga

SEQ ID NO: 406226 - DNA, 19 bp, Homo sapiens
  siRNA target sequence for TECTB (NM_058222.1,200-218).
gttactaccaatttgtgat

SEQ ID NO: 406227 - DNA, 19 bp, Homo sapiens
  siRNA target sequence for TECTB (NM_058222.1,254-272).
gaacccagtctgagtacaa

SEQ ID NO: 406228 - DNA, 19 bp, Homo sapiens
  siRNA target sequence for TECTB (NM_058222.1,267-285).
gtacaagccacctatctat

SEQ ID NO: 406229 - DNA, 19 bp, Homo sapiens
  siRNA target sequence for TECTB (NM_058222.1,309-327).
caatgacaccacagtgatt

SEQ ID NO: 406230 - DNA, 19 bp, Homo sapiens
  siRNA target sequence for TECTB (NM_058222.1,313-331).
gacaccacagtgattgtaa

SEQ ID NO: 406231 - DNA, 19 bp, Homo sapiens
  siRNA target sequence for TECTB (NM_058222.1,435-453).
cgggagcatgggcacattt

SEQ ID NO: 406232 - DNA, 19 bp, Homo sapiens
  siRNA target sequence for TECTB (NM_058222.1,458-476).
gccaactgtctctcaactt

SEQ ID NO: 406233 - DNA, 19 bp, Homo sapiens
  siRNA target sequence for TECTB (NM_058222.1,574-592).
gggttaagcattaggttta

SEQ ID NO: 406234 - DNA, 19 bp, Homo sapiens
  siRNA target sequence for TECTB (NM_058222.1,575-593).
ggttaagcattaggtttaa

SEQ ID NO: 406235 - DNA, 19 bp, Homo sapiens
  siRNA target sequence for TECTB (NM_058222.1,690-708).
cgtcctcgtgcatgagaat

SEQ ID NO: 406236 - DNA, 19 bp, Homo sapiens
  siRNA target sequence for TECTB (NM_058222.1,722-740).
gggcaaccttccaattcaa

SEQ ID NO: 406237 - DNA, 19 bp, Homo sapiens
  siRNA target sequence for TECTB (NM_058222.1,743-761).
ctttccggttccagaacat

SEQ ID NO: 406238 - DNA, 19 bp, Homo sapiens
  siRNA target sequence for TECTB (NM_058222.1,787-805).
cactgtgagacgttcatct

SEQ ID NO: 406239 - DNA, 19 bp, Homo sapiens
  siRNA target sequence for TECTB (NM_058222.1,901-919).
ctgcggagcaggggatttt

SEQ ID NO: 406240 - DNA, 19 bp, Homo sapiens
  siRNA target sequence for TECTB (NM_058222.1,912-930).
gggattttccagtctctat

SEQ ID NO: 406241 - DNA, 19 bp, Homo sapiens
  siRNA target sequence for TECTB (NM_058222.1,927-945).
ctatagcttctcagatgtt

SEQ ID NO: 406242 - DNA, 19 bp, Homo sapiens
  siRNA target sequence for TECTB (NM_058222.1,949-967).
caccacctcatcatgatgt

SEQ ID NO: 406243 - DNA, 19 bp, Homo sapiens
  siRNA target sequence for TECTB (NM_058222.1,960-978).
catgatgttggggatttgt

SEQ ID NO: 406244 - DNA, 19 bp, Homo sapiens
  siRNA target sequence for TECTB (NM_058222.1,970-988).
gggatttgtgccgtgttat

SEQ ID NO: 406245 - DNA, 19 bp, Homo sapiens
  siRNA target sequence for FBXO32 (NM_058229.2,314-332).
gcaacaaggaggtatacaa

SEQ ID NO: 406246 - DNA, 19 bp, Homo sapiens
  siRNA target sequence for FBXO32 (NM_058229.2,315-333).
caacaaggaggtatacaat

SEQ ID NO: 406247 - DNA, 19 bp, Homo sapiens
  siRNA target sequence for FBXO32 (NM_058229.2,464-482).
ctaaagagcgccatggata

SEQ ID NO: 406248 - DNA, 19 bp, Homo sapiens
  siRNA target sequence for FBXO32 (NM_058229.2,570-588).
ggagctgatagcaaagtca

SEQ ID NO: 406249 - DNA, 19 bp, Homo sapiens
  siRNA target sequence for FBXO32 (NM_058229.2,672-690).
gcaaaacattagactaata

SEQ ID NO: 406250 - DNA, 19 bp, Homo sapiens
  siRNA target sequence for FBXO32 (NM_058229.2,683-701).
gactaataagggaactact

SEQ ID NO: 406251 - DNA, 19 bp, Homo sapiens
  siRNA target sequence for FBXO32 (NM_058229.2,705-723).
gaccctctacacatcctta

SEQ ID NO: 406252 - DNA, 19 bp, Homo sapiens
  siRNA target sequence for FBXO32 (NM_058229.2,709-727).
ctctacacatccttatgta

SEQ ID NO: 406253 - DNA, 19 bp, Homo sapiens
  siRNA target sequence for FBXO32 (NM_058229.2,711-729).
ctacacatccttatgtaca

SEQ ID NO: 406254 - DNA, 19 bp, Homo sapiens
  siRNA target sequence for FBXO32 (NM_058229.2,757-775).
ctggtcgggaacattaaca

SEQ ID NO: 406255 - DNA, 19 bp, Homo sapiens
  siRNA target sequence for FBXO32 (NM_058229.2,760-778).
gtcgggaacattaacatgt

SEQ ID NO: 406256 - DNA, 19 bp, Homo sapiens
  siRNA target sequence for FBXO32 (NM_058229.2,884-902).
gcctacaactgaacatcat

SEQ ID NO: 406257 - DNA, 19 bp, Homo sapiens
  siRNA target sequence for FBXO32 (NM_058229.2,1021-1039).
cggcagatccgcaaacgat

SEQ ID NO: 406258 - DNA, 19 bp, Homo sapiens
  siRNA target sequence for FBXO32 (NM_058229.2,1022-1040).
ggcagatccgcaaacgatt

SEQ ID NO: 406259 - DNA, 19 bp, Homo sapiens
  siRNA target sequence for FBXO32 (NM_058229.2,1023-1041).
gcagatccgcaaacgatta

SEQ ID NO: 406260 - DNA, 19 bp, Homo sapiens
  siRNA target sequence for FBXO32 (NM_058229.2,1024-1042).
cagatccgcaaacgattaa

SEQ ID NO: 406261 - DNA, 19 bp, Homo sapiens
  siRNA target sequence for FBXO32 (NM_058229.2,1026-1044).
gatccgcaaacgattaatt

SEQ ID NO: 406262 - DNA, 19 bp, Homo sapiens
  siRNA target sequence for FBXO32 (NM_058229.2,1226-1244).
caccccaggactttatcaa

SEQ ID NO: 406263 - DNA, 19 bp, Homo sapiens
  siRNA target sequence for KIAA1622 (NM_058237.1,517-535).
ggacgaatcagtgtcaatt

SEQ ID NO: 406264 - DNA, 19 bp, Homo sapiens
  siRNA target sequence for KIAA1622 (NM_058237.1,520-538).
cgaatcagtgtcaattcat

SEQ ID NO: 406265 - DNA, 19 bp, Homo sapiens
  siRNA target sequence for KIAA1622 (NM_058237.1,525-543).
cagtgtcaattcatgcata

SEQ ID NO: 406266 - DNA, 19 bp, Homo sapiens
  siRNA target sequence for KIAA1622 (NM_058237.1,527-545).
gtgtcaattcatgcatata

SEQ ID NO: 406267 - DNA, 19 bp, Homo sapiens
  siRNA target sequence for KIAA1622 (NM_058237.1,626-644).
ctgtctgttatagaagtat

SEQ ID NO: 406268 - DNA, 19 bp, Homo sapiens
  siRNA target sequence for KIAA1622 (NM_058237.1,657-675).
ccctacggcatgagatttt

SEQ ID NO: 406269 - DNA, 19 bp, Homo sapiens
  siRNA target sequence for KIAA1622 (NM_058237.1,659-677).
ctacggcatgagattttga

SEQ ID NO: 406270 - DNA, 19 bp, Homo sapiens
  siRNA target sequence for KIAA1622 (NM_058237.1,711-729).
cagtccagtctcgtttagt

SEQ ID NO: 406271 - DNA, 19 bp, Homo sapiens
  siRNA target sequence for KIAA1622 (NM_058237.1,718-736).
gtctcgtttagttagttgt

SEQ ID NO: 406272 - DNA, 19 bp, Homo sapiens
  siRNA target sequence for KIAA1622 (NM_058237.1,720-738).
ctcgtttagttagttgtaa

SEQ ID NO: 406273 - DNA, 19 bp, Homo sapiens
  siRNA target sequence for KIAA1622 (NM_058237.1,775-793).
caccattaagcgagaaata

SEQ ID NO: 406274 - DNA, 19 bp, Homo sapiens
  siRNA target sequence for KIAA1622 (NM_058237.1,816-834).
gtcaagatgtagaatatga

SEQ ID NO: 406275 - DNA, 19 bp, Homo sapiens
  siRNA target sequence for KIAA1622 (NM_058237.1,846-864).
gtatgtgtcggcaattaga

SEQ ID NO: 406276 - DNA, 19 bp, Homo sapiens
  siRNA target sequence for KIAA1622 (NM_058237.1,903-921).
gtgtggtgctccctgaatt

SEQ ID NO: 406277 - DNA, 19 bp, Homo sapiens
  siRNA target sequence for KIAA1622 (NM_058237.1,907-925).
ggtgctccctgaattaata

SEQ ID NO: 406278 - DNA, 19 bp, Homo sapiens
  siRNA target sequence for KIAA1622 (NM_058237.1,913-931).
ccctgaattaatagaactt

SEQ ID NO: 406279 - DNA, 19 bp, Homo sapiens
  siRNA target sequence for KIAA1622 (NM_058237.1,956-974).
cgacttgcagcttttgaaa

SEQ ID NO: 406280 - DNA, 19 bp, Homo sapiens
  siRNA target sequence for KIAA1622 (NM_058237.1,979-997).
ggttaatctgcttgatata

SEQ ID NO: 406281 - DNA, 19 bp, Homo sapiens
  siRNA target sequence for KIAA1622 (NM_058237.1,1028-1046).
cttcccttagtgaaatcat

SEQ ID NO: 406282 - DNA, 19 bp, Homo sapiens
  siRNA target sequence for KIAA1622 (NM_058237.1,1116-1134).
gtcatggactatatggaat

SEQ ID NO: 406283 - DNA, 19 bp, Homo sapiens
  siRNA target sequence for KIAA1622 (NM_058237.1,1121-1139).
ggactatatggaattttca

SEQ ID NO: 406284 - DNA, 19 bp, Homo sapiens
  siRNA target sequence for KIAA1622 (NM_058237.1,1228-1246).
gattccaccccaaatccta

SEQ ID NO: 406285 - DNA, 19 bp, Homo sapiens
  siRNA target sequence for KIAA1622 (NM_058237.1,1279-1297).
gaactgtgcttataacttt

SEQ ID NO: 406286 - DNA, 19 bp, Homo sapiens
  siRNA target sequence for KIAA1622 (NM_058237.1,1294-1312).
ctttccggccatgattgtt

SEQ ID NO: 406287 - DNA, 19 bp, Homo sapiens
  siRNA target sequence for KIAA1622 (NM_058237.1,1299-1317).
cggccatgattgtttttgt

SEQ ID NO: 406288 - DNA, 19 bp, Homo sapiens
  siRNA target sequence for KIAA1622 (NM_058237.1,1336-1354).
catggaactctattctaca

SEQ ID NO: 406289 - DNA, 19 bp, Homo sapiens
  siRNA target sequence for KIAA1622 (NM_058237.1,1377-1395).
ctgaagtaccagtcagata

SEQ ID NO: 406290 - DNA, 19 bp, Homo sapiens
  siRNA target sequence for KIAA1622 (NM_058237.1,1382-1400).
gtaccagtcagatacacta

SEQ ID NO: 406291 - DNA, 19 bp, Homo sapiens
  siRNA target sequence for KIAA1622 (NM_058237.1,1388-1406).
gtcagatacactattgcta

SEQ ID NO: 406292 - DNA, 19 bp, Homo sapiens
  siRNA target sequence for KIAA1622 (NM_058237.1,1390-1408).
cagatacactattgctatt

SEQ ID NO: 406293 - DNA, 19 bp, Homo sapiens
  siRNA target sequence for KIAA1622 (NM_058237.1,1396-1414).
cactattgctatttgcttt

SEQ ID NO: 406294 - DNA, 19 bp, Homo sapiens
  siRNA target sequence for KIAA1622 (NM_058237.1,1421-1439).
gtatctaagcttctgaatt

SEQ ID NO: 406295 - DNA, 19 bp, Homo sapiens
  siRNA target sequence for KIAA1622 (NM_058237.1,1498-1516).
ggtactagatgctcttata

SEQ ID NO: 406296 - DNA, 19 bp, Homo sapiens
  siRNA target sequence for KIAA1622 (NM_058237.1,1587-1605).
cttctctgcctgacttgat

SEQ ID NO: 406297 - DNA, 19 bp, Homo sapiens
  siRNA target sequence for KIAA1622 (NM_058237.1,1631-1649).
cgagctgcagcctctttaa

SEQ ID NO: 406298 - DNA, 19 bp, Homo sapiens
  siRNA target sequence for KIAA1622 (NM_058237.1,1634-1652).
gctgcagcctctttaaaat

SEQ ID NO: 406299 - DNA, 19 bp, Homo sapiens
  siRNA target sequence for KIAA1622 (NM_058237.1,1686-1704).
cctgcctgccacatgtcat

SEQ ID NO: 406300 - DNA, 19 bp, Homo sapiens
  siRNA target sequence for KIAA1622 (NM_058237.1,1691-1709).
ctgccacatgtcatatcaa

SEQ ID NO: 406301 - DNA, 19 bp, Homo sapiens
  siRNA target sequence for KIAA1622 (NM_058237.1,1702-1720).
catatcaagcgatcagatt

SEQ ID NO: 406302 - DNA, 19 bp, Homo sapiens
  siRNA target sequence for KIAA1622 (NM_058237.1,1707-1725).
caagcgatcagatttatta

SEQ ID NO: 406303 - DNA, 19 bp, Homo sapiens
  siRNA target sequence for KIAA1622 (NM_058237.1,1717-1735).
gatttattaccgtttctta

SEQ ID NO: 406304 - DNA, 19 bp, Homo sapiens
  siRNA target sequence for KIAA1622 (NM_058237.1,1786-1804).
ggcggcttcacgaactcta

SEQ ID NO: 406305 - DNA, 19 bp, Homo sapiens
  siRNA target sequence for KIAA1622 (NM_058237.1,1787-1805).
gcggcttcacgaactctat

SEQ ID NO: 406306 - DNA, 19 bp, Homo sapiens
  siRNA target sequence for KIAA1622 (NM_058237.1,1791-1809).
cttcacgaactctatgcat

SEQ ID NO: 406307 - DNA, 19 bp, Homo sapiens
  siRNA target sequence for KIAA1622 (NM_058237.1,1794-1812).
cacgaactctatgcatttt

SEQ ID NO: 406308 - DNA, 19 bp, Homo sapiens
  siRNA target sequence for KIAA1622 (NM_058237.1,1797-1815).
gaactctatgcatttttct

SEQ ID NO: 406309 - DNA, 19 bp, Homo sapiens
  siRNA target sequence for KIAA1622 (NM_058237.1,1807-1825).
catttttctgcgttataat

SEQ ID NO: 406310 - DNA, 19 bp, Homo sapiens
  siRNA target sequence for KIAA1622 (NM_058237.1,1816-1834).
gcgttataatcgtaaacaa

SEQ ID NO: 406311 - DNA, 19 bp, Homo sapiens
  siRNA target sequence for KIAA1622 (NM_058237.1,1818-1836).
gttataatcgtaaacaaga

SEQ ID NO: 406312 - DNA, 19 bp, Homo sapiens
  siRNA target sequence for KIAA1622 (NM_058237.1,1871-1889).
caattgggccaaggaaaaa

SEQ ID NO: 406313 - DNA, 19 bp, Homo sapiens
  siRNA target sequence for KIAA1622 (NM_058237.1,1894-1912).
ctggaatagacttcgattt

SEQ ID NO: 406314 - DNA, 19 bp, Homo sapiens
  siRNA target sequence for KIAA1622 (NM_058237.1,1896-1914).
ggaatagacttcgattttt

SEQ ID NO: 406315 - DNA, 19 bp, Homo sapiens
  siRNA target sequence for KIAA1622 (NM_058237.1,1923-1941).
gtgaatttattatagagat

SEQ ID NO: 406316 - DNA, 19 bp, Homo sapiens
  siRNA target sequence for KIAA1622 (NM_058237.1,2041-2059).
gcccaaagtgaaatctact

SEQ ID NO: 406317 - DNA, 19 bp, Homo sapiens
  siRNA target sequence for KIAA1622 (NM_058237.1,2065-2083).
gattcctgctgataagcat

SEQ ID NO: 406318 - DNA, 19 bp, Homo sapiens
  siRNA target sequence for KIAA1622 (NM_058237.1,2141-2159).
gatgttctggctattgtaa

SEQ ID NO: 406319 - DNA, 19 bp, Homo sapiens
  siRNA target sequence for KIAA1622 (NM_058237.1,2319-2337).
ggcccatgagtgataaaat

SEQ ID NO: 406320 - DNA, 19 bp, Homo sapiens
  siRNA target sequence for KIAA1622 (NM_058237.1,2423-2441).
gtcaccccatcgacaagta

SEQ ID NO: 406321 - DNA, 19 bp, Homo sapiens
  siRNA target sequence for KIAA1622 (NM_058237.1,2425-2443).
caccccatcgacaagtaaa

SEQ ID NO: 406322 - DNA, 19 bp, Homo sapiens
  siRNA target sequence for KIAA1622 (NM_058237.1,2427-2445).
ccccatcgacaagtaaaga

SEQ ID NO: 406323 - DNA, 19 bp, Homo sapiens
  siRNA target sequence for KIAA1622 (NM_058237.1,2519-2537).
gagaaatgtgctagtaaaa

SEQ ID NO: 406324 - DNA, 19 bp, Homo sapiens
  siRNA target sequence for KIAA1622 (NM_058237.1,2528-2546).
gctagtaaaagttctacaa

SEQ ID NO: 406325 - DNA, 19 bp, Homo sapiens
  siRNA target sequence for KIAA1622 (NM_058237.1,2590-2608).
gctttcactagctgatgat

SEQ ID NO: 406326 - DNA, 19 bp, Homo sapiens
  siRNA target sequence for KIAA1622 (NM_058237.1,2680-2698).
ccgtgggacaggtaactca

SEQ ID NO: 406327 - DNA, 19 bp, Homo sapiens
  siRNA target sequence for KIAA1622 (NM_058237.1,2715-2733).
gtggaagtaaagatacaca

SEQ ID NO: 406328 - DNA, 19 bp, Homo sapiens
  siRNA target sequence for BLP1 (NM_078473.1,337-355).
catcccaggaacttggtta

SEQ ID NO: 406329 - DNA, 19 bp, Homo sapiens
  siRNA target sequence for BLP1 (NM_078473.1,352-370).
gttatggttgtctcaagtt

SEQ ID NO: 406330 - DNA, 19 bp, Homo sapiens
  siRNA target sequence for BLP1 (NM_078473.1,415-433).
gccatgccttagatggaat

SEQ ID NO: 406331 - DNA, 19 bp, Homo sapiens
  siRNA target sequence for BLP1 (NM_078473.1,416-434).
ccatgccttagatggaatt

SEQ ID NO: 406332 - DNA, 19 bp, Homo sapiens
  siRNA target sequence for BLP1 (NM_078473.1,443-461).
cagtcctaggacctttcta

SEQ ID NO: 406333 - DNA, 19 bp, Homo sapiens
  siRNA target sequence for BLP1 (NM_078473.1,451-469).
ggacctttctacgagaaaa

SEQ ID NO: 406334 - DNA, 19 bp, Homo sapiens
  siRNA target sequence for BLP1 (NM_078473.1,452-470).
gacctttctacgagaaaat

SEQ ID NO: 406335 - DNA, 19 bp, Homo sapiens
  siRNA target sequence for BLP1 (NM_078473.1,497-515).
ctacttcataaccacttta

SEQ ID NO: 406336 - DNA, 19 bp, Homo sapiens
  siRNA target sequence for BLP1 (NM_078473.1,538-556).
gttttggtgtggatcgatt

SEQ ID NO: 406337 - DNA, 19 bp, Homo sapiens
  siRNA target sequence for BLP1 (NM_078473.1,543-561).
ggtgtggatcgattctgtt

SEQ ID NO: 406338 - DNA, 19 bp, Homo sapiens
  siRNA target sequence for BLP1 (NM_078473.1,544-562).
gtgtggatcgattctgttt

SEQ ID NO: 406339 - DNA, 19 bp, Homo sapiens
  siRNA target sequence for BLP1 (NM_078473.1,627-645).
gttgaccttattttgctaa

SEQ ID NO: 406340 - DNA, 19 bp, Homo sapiens
  siRNA target sequence for BLP1 (NM_078473.1,676-694).
gcaactggtgcactgttta

SEQ ID NO: 406341 - DNA, 19 bp, Homo sapiens
  siRNA target sequence for BLP2 (NM_078474.1,128-146).
ggctcagtcaataaaggat

SEQ ID NO: 406342 - DNA, 19 bp, Homo sapiens
  siRNA target sequence for MSL3L1 (NM_078628.1,111-129).
cgcgagcgagggcatgaaa

SEQ ID NO: 406343 - DNA, 19 bp, Homo sapiens
  siRNA target sequence for MSL3L1 (NM_078628.1,112-130).
gcgagcgagggcatgaaat

SEQ ID NO: 406344 - DNA, 19 bp, Homo sapiens
  siRNA target sequence for MSL3L1 (NM_078628.1,113-131).
cgagcgagggcatgaaatt

SEQ ID NO: 406345 - DNA, 19 bp, Homo sapiens
  siRNA target sequence for MSL3L1 (NM_078628.1,114-132).
gagcgagggcatgaaattt

SEQ ID NO: 406346 - DNA, 19 bp, Homo sapiens
  siRNA target sequence for MSL3L1 (NM_078628.1,116-134).
gcgagggcatgaaatttaa

SEQ ID NO: 406347 - DNA, 19 bp, Homo sapiens
  siRNA target sequence for MSL3L1 (NM_078628.1,117-135).
cgagggcatgaaatttaaa

SEQ ID NO: 406348 - DNA, 19 bp, Homo sapiens
  siRNA target sequence for MSL3L1 (NM_078628.1,195-213).
gtacgatgccaagattgtt

SEQ ID NO: 406349 - DNA, 19 bp, Homo sapiens
  siRNA target sequence for MSL3L1 (NM_078628.1,198-216).
cgatgccaagattgttgat

SEQ ID NO: 406350 - DNA, 19 bp, Homo sapiens
  siRNA target sequence for MSL3L1 (NM_078628.1,262-280).
ctgatccattttaatggtt

SEQ ID NO: 406351 - DNA, 19 bp, Homo sapiens
  siRNA target sequence for MSL3L1 (NM_078628.1,322-340).
cttcgtgataccgatgaaa

SEQ ID NO: 406352 - DNA, 19 bp, Homo sapiens
  siRNA target sequence for MSL3L1 (NM_078628.1,328-346).
gataccgatgaaaatcgta

SEQ ID NO: 406353 - DNA, 19 bp, Homo sapiens
  siRNA target sequence for MSL3L1 (NM_078628.1,332-350).
ccgatgaaaatcgtagatt

SEQ ID NO: 406354 - DNA, 19 bp, Homo sapiens
  siRNA target sequence for MSL3L1 (NM_078628.1,333-351).
cgatgaaaatcgtagatta

SEQ ID NO: 406355 - DNA, 19 bp, Homo sapiens
  siRNA target sequence for MSL3L1 (NM_078628.1,343-361).
cgtagattacagcgtaaat

SEQ ID NO: 406356 - DNA, 19 bp, Homo sapiens
  siRNA target sequence for MSL3L1 (NM_078628.1,344-362).
gtagattacagcgtaaatt

SEQ ID NO: 406357 - DNA, 19 bp, Homo sapiens
  siRNA target sequence for MSL3L1 (NM_078628.1,1269-1287).
ggaaaagagtaggttcatt

SEQ ID NO: 406358 - DNA, 19 bp, Homo sapiens
  siRNA target sequence for MSL3L1 (NM_078628.1,1308-1326).
gagagccagcgtgtacttt

SEQ ID NO: 406359 - DNA, 19 bp, Homo sapiens
  siRNA target sequence for MSL3L1 (NM_078628.1,1310-1328).
gagccagcgtgtactttgt

SEQ ID NO: 406360 - DNA, 19 bp, Homo sapiens
  siRNA target sequence for SCAMP-4 (NM_079834.1,106-124).
ccgccactgcccaagttca

SEQ ID NO: 406361 - DNA, 19 bp, Homo sapiens
  siRNA target sequence for SCAMP-4 (NM_079834.1,201-219).
ctaccggctgtggatgttt

SEQ ID NO: 406362 - DNA, 19 bp, Homo sapiens
  siRNA target sequence for SCAMP-4 (NM_079834.1,347-365).
ggttccggcctgtctacaa

SEQ ID NO: 406363 - DNA, 19 bp, Homo sapiens
  siRNA target sequence for SCAMP-4 (NM_079834.1,373-391).
cgagccgacagctccttta

SEQ ID NO: 406364 - DNA, 19 bp, Homo sapiens
  siRNA target sequence for SCAMP-4 (NM_079834.1,374-392).
gagccgacagctcctttaa

SEQ ID NO: 406365 - DNA, 19 bp, Homo sapiens
  siRNA target sequence for SCAMP-4 (NM_079834.1,376-394).
gccgacagctcctttaatt

SEQ ID NO: 406366 - DNA, 19 bp, Homo sapiens
  siRNA target sequence for SCAMP-4 (NM_079834.1,377-395).
ccgacagctcctttaattt

SEQ ID NO: 406367 - DNA, 19 bp, Homo sapiens
  siRNA target sequence for SCAMP-4 (NM_079834.1,482-500).
ggctgtcggcaattggatt

SEQ ID NO: 406368 - DNA, 19 bp, Homo sapiens
  siRNA target sequence for SCAMP-4 (NM_079834.1,680-698).
cgagggaggcccagtacaa

SEQ ID NO: 406369 - DNA, 19 bp, Homo sapiens
  siRNA target sequence for SCAMP-4 (NM_079834.1,685-703).
gaggcccagtacaacaact

SEQ ID NO: 406370 - DNA, 19 bp, Homo sapiens
  siRNA target sequence for my048 (NM_080390.2,202-220).
cgaatcaaggaaagataga

SEQ ID NO: 406371 - DNA, 19 bp, Homo sapiens
  siRNA target sequence for my048 (NM_080390.2,322-340).
gagttgaggaaccgttaaa

SEQ ID NO: 406372 - DNA, 19 bp, Homo sapiens
  siRNA target sequence for my048 (NM_080390.2,333-351).
ccgttaaaggataaagaaa

SEQ ID NO: 406373 - DNA, 19 bp, Homo sapiens
  siRNA target sequence for my048 (NM_080390.2,606-624).
cagtacctcaagcaatata

SEQ ID NO: 406374 - DNA, 19 bp, Homo sapiens
  siRNA target sequence for my048 (NM_080390.2,686-704).
ggctagggtggaggataaa

SEQ ID NO: 406375 - DNA, 19 bp, Homo sapiens
  siRNA target sequence for my048 (NM_080390.2,687-705).
gctagggtggaggataaaa

SEQ ID NO: 406376 - DNA, 19 bp, Homo sapiens
  siRNA target sequence for SELM (NM_080430.1,271-289).
cgcaggacattccattcta

SEQ ID NO: 406377 - DNA, 19 bp, Homo sapiens
  siRNA target sequence for SELM (NM_080430.1,272-290).
gcaggacattccattctat

SEQ ID NO: 406378 - DNA, 19 bp, Homo sapiens
  siRNA target sequence for SELM (NM_080430.1,276-294).
gacattccattctatcaca

SEQ ID NO: 406379 - DNA, 19 bp, Homo sapiens
  siRNA target sequence for VPS52 (NM_080564.1,1205-1223).
ctaatgggtgtggaagata

SEQ ID NO: 406380 - DNA, 19 bp, Homo sapiens
  siRNA target sequence for VPS52 (NM_080564.1,1226-1244).
gcaaagaaaggattcttct

SEQ ID NO: 406381 - DNA, 19 bp, Homo sapiens
  siRNA target sequence for VPS52 (NM_080564.1,1259-1277).
cgcagcaggaacaccattt

SEQ ID NO: 406382 - DNA, 19 bp, Homo sapiens
  siRNA target sequence for ZSWIM1 (NM_080603.2,163-181).
ctgaatgggctcctgatta

SEQ ID NO: 406383 - DNA, 19 bp, Homo sapiens
  siRNA target sequence for ZSWIM1 (NM_080603.2,224-242).
ctgcccagttagatacctt

SEQ ID NO: 406384 - DNA, 19 bp, Homo sapiens
  siRNA target sequence for ZSWIM1 (NM_080603.2,254-272).
gctgctttatgcaaagtgt

SEQ ID NO: 406385 - DNA, 19 bp, Homo sapiens
  siRNA target sequence for ZSWIM1 (NM_080603.2,279-297).
ccatttccctgagatctta

SEQ ID NO: 406386 - DNA, 19 bp, Homo sapiens
  siRNA target sequence for ZSWIM1 (NM_080603.2,287-305).
ctgagatcttatttatcca

SEQ ID NO: 406387 - DNA, 19 bp, Homo sapiens
  siRNA target sequence for ZSWIM1 (NM_080603.2,319-337).
ccaaggggtaaggtcttat

SEQ ID NO: 406388 - DNA, 19 bp, Homo sapiens
  siRNA target sequence for ZSWIM1 (NM_080603.2,320-338).
caaggggtaaggtcttata

SEQ ID NO: 406389 - DNA, 19 bp, Homo sapiens
  siRNA target sequence for ZSWIM1 (NM_080603.2,325-343).
ggtaaggtcttatatacct

SEQ ID NO: 406390 - DNA, 19 bp, Homo sapiens
  siRNA target sequence for ZSWIM1 (NM_080603.2,326-344).
gtaaggtcttatatacctt

SEQ ID NO: 406391 - DNA, 19 bp, Homo sapiens
  siRNA target sequence for ZSWIM1 (NM_080603.2,439-457).
cagatgttccaagtattca

SEQ ID NO: 406392 - DNA, 19 bp, Homo sapiens
  siRNA target sequence for ZSWIM1 (NM_080603.2,899-917).
cttctctgttccgttacat

SEQ ID NO: 406393 - DNA, 19 bp, Homo sapiens
  siRNA target sequence for ZSWIM1 (NM_080603.2,1205-1223).
gcagctgctactttaacca

SEQ ID NO: 406394 - DNA, 19 bp, Homo sapiens
  siRNA target sequence for ZSWIM1 (NM_080603.2,1441-1459).
gagtttgagcggaggtata

SEQ ID NO: 406395 - DNA, 19 bp, Homo sapiens
  siRNA target sequence for ZSWIM1 (NM_080603.2,1484-1502).
gctggattgggccttatga

SEQ ID NO: 406396 - DNA, 19 bp, Homo sapiens
  siRNA target sequence for TJP4 (NM_080604.1,433-451).
cgggagctgcgtttggaaa

SEQ ID NO: 406397 - DNA, 19 bp, Homo sapiens
  siRNA target sequence for TJP4 (NM_080604.1,640-658).
ctggacaaatttaaggata

SEQ ID NO: 406398 - DNA, 19 bp, Homo sapiens
  siRNA target sequence for TJP4 (NM_080604.1,643-661).
gacaaatttaaggataagt

SEQ ID NO: 406399 - DNA, 19 bp, Homo sapiens
  siRNA target sequence for TJP4 (NM_080604.1,1520-1538).
gcccagcacccctaacact

SEQ ID NO: 406400 - DNA, 19 bp, Homo sapiens
  siRNA target sequence for C20orf102 (NM_080607.1,378-396).
cagagacaccccatgacat

SEQ ID NO: 406401 - DNA, 19 bp, Homo sapiens
  siRNA target sequence for C20orf102 (NM_080607.1,525-543).
gggcctcgaaccagctaaa

SEQ ID NO: 406402 - DNA, 19 bp, Homo sapiens
  siRNA target sequence for C20orf102 (NM_080607.1,526-544).
ggcctcgaaccagctaaaa

SEQ ID NO: 406403 - DNA, 19 bp, Homo sapiens
  siRNA target sequence for C20orf102 (NM_080607.1,566-584).
gggaaggaggcaaccaaaa

SEQ ID NO: 406404 - DNA, 19 bp, Homo sapiens
  siRNA target sequence for C20orf102 (NM_080607.1,567-585).
ggaaggaggcaaccaaaat

SEQ ID NO: 406405 - DNA, 19 bp, Homo sapiens
  siRNA target sequence for DUSP15 (NM_080611.3,371-389).
gactctacctcggaaactt

SEQ ID NO: 406406 - DNA, 19 bp, Homo sapiens
  siRNA target sequence for DUSP15 (NM_080611.3,375-393).
ctacctcggaaacttcatt

SEQ ID NO: 406407 - DNA, 19 bp, Homo sapiens
  siRNA target sequence for DUSP15 (NM_080611.3,378-396).
cctcggaaacttcattgat

SEQ ID NO: 406408 - DNA, 19 bp, Homo sapiens
  siRNA target sequence for DUSP15 (NM_080611.3,409-427).
gatcagctgggccgaaata

SEQ ID NO: 406409 - DNA, 19 bp, Homo sapiens
  siRNA target sequence for DUSP15 (NM_080611.3,412-430).
cagctgggccgaaataaga

SEQ ID NO: 406410 - DNA, 19 bp, Homo sapiens
  siRNA target sequence for DUSP15 (NM_080611.3,415-433).
ctgggccgaaataagatca

SEQ ID NO: 406411 - DNA, 19 bp, Homo sapiens
  siRNA target sequence for DUSP15 (NM_080611.3,619-637).
cgcagcaccacgattgtga

SEQ ID NO: 406412 - DNA, 19 bp, Homo sapiens
  siRNA target sequence for DUSP15 (NM_080611.3,988-1006).
cgcgtcaagcagactttct

SEQ ID NO: 406413 - DNA, 19 bp, Homo sapiens
  siRNA target sequence for GAB3 (NM_080612.1,55-73).
gcaccggctggctcgttaa

SEQ ID NO: 406414 - DNA, 19 bp, Homo sapiens
  siRNA target sequence for GAB3 (NM_080612.1,148-166).
gcggcaaccccgatgtctt

SEQ ID NO: 406415 - DNA, 19 bp, Homo sapiens
  siRNA target sequence for GAB3 (NM_080612.1,253-271).
gctttgttcggaaggaatt

SEQ ID NO: 406416 - DNA, 19 bp, Homo sapiens
  siRNA target sequence for GAB3 (NM_080612.1,285-303).
gtgttcattgtcaagacta

SEQ ID NO: 406417 - DNA, 19 bp, Homo sapiens
  siRNA target sequence for GAB3 (NM_080612.1,505-523).
gagatgacccaaacactaa

SEQ ID NO: 406418 - DNA, 19 bp, Homo sapiens
  siRNA target sequence for GAB3 (NM_080612.1,627-645).
ctacccaccagatgtgata

SEQ ID NO: 406419 - DNA, 19 bp, Homo sapiens
  siRNA target sequence for GAB3 (NM_080612.1,652-670).
caaactcagaccgttcatt

SEQ ID NO: 406420 - DNA, 19 bp, Homo sapiens
  siRNA target sequence for GAB3 (NM_080612.1,667-685).
cattggaacaggcttcatt

SEQ ID NO: 406421 - DNA, 19 bp, Homo sapiens
  siRNA target sequence for GAB3 (NM_080612.1,678-696).
gcttcatttgatgatgttt

SEQ ID NO: 406422 - DNA, 19 bp, Homo sapiens
  siRNA target sequence for GAB3 (NM_080612.1,714-732).
ccgctcccctccagtcatt

SEQ ID NO: 406423 - DNA, 19 bp, Homo sapiens
  siRNA target sequence for GAB3 (NM_080612.1,715-733).
cgctcccctccagtcattt

SEQ ID NO: 406424 - DNA, 19 bp, Homo sapiens
  siRNA target sequence for GAB3 (NM_080612.1,880-898).
ccattcaggtagataaaaa

SEQ ID NO: 406425 - DNA, 19 bp, Homo sapiens
  siRNA target sequence for GAB3 (NM_080612.1,908-926).
cttaccctgtggagcaaaa

SEQ ID NO: 406426 - DNA, 19 bp, Homo sapiens
  siRNA target sequence for GAB3 (NM_080612.1,1104-1122).
gtagaaggccaatccttaa

SEQ ID NO: 406427 - DNA, 19 bp, Homo sapiens
  siRNA target sequence for GAB3 (NM_080612.1,1128-1146).
cgagacaagcggcttagtt

SEQ ID NO: 406428 - DNA, 19 bp, Homo sapiens
  siRNA target sequence for GAB3 (NM_080612.1,1129-1147).
gagacaagcggcttagttt

SEQ ID NO: 406429 - DNA, 19 bp, Homo sapiens
  siRNA target sequence for GAB3 (NM_080612.1,1131-1149).
gacaagcggcttagtttga

SEQ ID NO: 406430 - DNA, 19 bp, Homo sapiens
  siRNA target sequence for GAB3 (NM_080612.1,1133-1151).
caagcggcttagtttgaat

SEQ ID NO: 406431 - DNA, 19 bp, Homo sapiens
  siRNA target sequence for GAB3 (NM_080612.1,1269-1287).
gactacattccaatgaact

SEQ ID NO: 406432 - DNA, 19 bp, Homo sapiens
  siRNA target sequence for GAB3 (NM_080612.1,1331-1349).
ggaacctcccccagtgaat

SEQ ID NO: 406433 - DNA, 19 bp, Homo sapiens
  siRNA target sequence for GAB3 (NM_080612.1,1332-1350).
gaacctcccccagtgaata

SEQ ID NO: 406434 - DNA, 19 bp, Homo sapiens
  siRNA target sequence for GAB3 (NM_080612.1,1336-1354).
ctcccccagtgaatagaga

SEQ ID NO: 406435 - DNA, 19 bp, Homo sapiens
  siRNA target sequence for GAB3 (NM_080612.1,1342-1360).
cagtgaatagagatctcaa

SEQ ID NO: 406436 - DNA, 19 bp, Homo sapiens
  siRNA target sequence for GAB3 (NM_080612.1,1356-1374).
ctcaagcctcagaggaaat

SEQ ID NO: 406437 - DNA, 19 bp, Homo sapiens
  siRNA target sequence for GAB3 (NM_080612.1,1415-1433).
ccgggaacatgcatctctt

SEQ ID NO: 406438 - DNA, 19 bp, Homo sapiens
  siRNA target sequence for GAB3 (NM_080612.1,1416-1434).
cgggaacatgcatctctta

SEQ ID NO: 406439 - DNA, 19 bp, Homo sapiens
  siRNA target sequence for GAB3 (NM_080612.1,1475-1493).
ctctccagaaagaaatggt

SEQ ID NO: 406440 - DNA, 19 bp, Homo sapiens
  siRNA target sequence for GAB3 (NM_080612.1,1477-1495).
ctccagaaagaaatggtat

SEQ ID NO: 406441 - DNA, 19 bp, Homo sapiens
  siRNA target sequence for GAB3 (NM_080612.1,1492-1510).
gtattaattctgcaagatt

SEQ ID NO: 406442 - DNA, 19 bp, Homo sapiens
  siRNA target sequence for GAB3 (NM_080612.1,1539-1557).
gaagaaagctacatcgaaa

SEQ ID NO: 406443 - DNA, 19 bp, Homo sapiens
  siRNA target sequence for GAB3 (NM_080612.1,1598-1616).
ccttacgtggacaaagaaa

SEQ ID NO: 406444 - DNA, 19 bp, Homo sapiens
  siRNA target sequence for GAB3 (NM_080612.1,1599-1617).
cttacgtggacaaagaaat

SEQ ID NO: 406445 - DNA, 19 bp, Homo sapiens
  siRNA target sequence for GAB3 (NM_080612.1,1768-1786).
cggatgaaaggcaatccaa

SEQ ID NO: 406446 - DNA, 19 bp, Homo sapiens
  siRNA target sequence for C20orf112 (NM_080616.1,248-266).
ctgccttccccgagatgaa

SEQ ID NO: 406447 - DNA, 19 bp, Homo sapiens
  siRNA target sequence for C20orf112 (NM_080616.1,403-421).
ctgcggagccgcgtcaaat

SEQ ID NO: 406448 - DNA, 19 bp, Homo sapiens
  siRNA target sequence for C20orf112 (NM_080616.1,788-806).
cctgccgtcgcatgaagaa

SEQ ID NO: 406449 - DNA, 19 bp, Homo sapiens
  siRNA target sequence for C20orf112 (NM_080616.1,914-932).
ggatgcgtctagagatcta

SEQ ID NO: 406450 - DNA, 19 bp, Homo sapiens
  siRNA target sequence for C20orf112 (NM_080616.1,1152-1170).
cacggacctcagcatgaaa

SEQ ID NO: 406451 - DNA, 19 bp, Homo sapiens
  siRNA target sequence for CBLNL1 (NM_080617.3,318-336).
cacattggagtctgtcttt

SEQ ID NO: 406452 - DNA, 19 bp, Homo sapiens
  siRNA target sequence for CBLNL1 (NM_080617.3,320-338).
cattggagtctgtctttgt

SEQ ID NO: 406453 - DNA, 19 bp, Homo sapiens
  siRNA target sequence for CBLNL1 (NM_080617.3,395-413).
gccaaactatccaggttaa

SEQ ID NO: 406454 - DNA, 19 bp, Homo sapiens
  siRNA target sequence for CBLNL1 (NM_080617.3,397-415).
caaactatccaggttaact

SEQ ID NO: 406455 - DNA, 19 bp, Homo sapiens
  siRNA target sequence for CBLNL1 (NM_080617.3,401-419).
ctatccaggttaacttgat

SEQ ID NO: 406456 - DNA, 19 bp, Homo sapiens
  siRNA target sequence for CBLNL1 (NM_080617.3,406-424).
caggttaacttgatgttaa

SEQ ID NO: 406457 - DNA, 19 bp, Homo sapiens
  siRNA target sequence for CBLNL1 (NM_080617.3,493-511).
gtcctgctctacctagata

SEQ ID NO: 406458 - DNA, 19 bp, Homo sapiens
  siRNA target sequence for CBLNL1 (NM_080617.3,495-513).
cctgctctacctagataaa

SEQ ID NO: 406459 - DNA, 19 bp, Homo sapiens
  siRNA target sequence for CBLNL1 (NM_080617.3,514-532).
gaggataaggtttacctaa

SEQ ID NO: 406460 - DNA, 19 bp, Homo sapiens
  siRNA target sequence for CTCFL (NM_080618.2,102-120).
ctgtcctttctgagcaatt

SEQ ID NO: 406461 - DNA, 19 bp, Homo sapiens
  siRNA target sequence for CTCFL (NM_080618.2,113-131).
gagcaattcaccaagatca

SEQ ID NO: 406462 - DNA, 19 bp, Homo sapiens
  siRNA target sequence for CTCFL (NM_080618.2,115-133).
gcaattcaccaagatcaaa

SEQ ID NO: 406463 - DNA, 19 bp, Homo sapiens
  siRNA target sequence for CTCFL (NM_080618.2,139-157).
cgagttgatgccggaaaaa

SEQ ID NO: 406464 - DNA, 19 bp, Homo sapiens
  siRNA target sequence for CTCFL (NM_080618.2,181-199).
cggagtgtgcagagagaaa

SEQ ID NO: 406465 - DNA, 19 bp, Homo sapiens
  siRNA target sequence for CTCFL (NM_080618.2,476-494).
cagtgtgtggccattagta

SEQ ID NO: 406466 - DNA, 19 bp, Homo sapiens
  siRNA target sequence for CTCFL (NM_080618.2,592-610).
ggtgagcctggctgaaact

SEQ ID NO: 406467 - DNA, 19 bp, Homo sapiens
  siRNA target sequence for CTCFL (NM_080618.2,593-611).
gtgagcctggctgaaacta

SEQ ID NO: 406468 - DNA, 19 bp, Homo sapiens
  siRNA target sequence for CTCFL (NM_080618.2,595-613).
gagcctggctgaaactact

SEQ ID NO: 406469 - DNA, 19 bp, Homo sapiens
  siRNA target sequence for CTCFL (NM_080618.2,649-667).
ccagttattggctgaaaga

SEQ ID NO: 406470 - DNA, 19 bp, Homo sapiens
  siRNA target sequence for CTCFL (NM_080618.2,650-668).
cagttattggctgaaagaa

SEQ ID NO: 406471 - DNA, 19 bp, Homo sapiens
  siRNA target sequence for CTCFL (NM_080618.2,714-732).
gaagtgacgaaattgttct

SEQ ID NO: 406472 - DNA, 19 bp, Homo sapiens
  siRNA target sequence for CTCFL (NM_080618.2,722-740).
gaaattgttctcacagttt

SEQ ID NO: 406473 - DNA, 19 bp, Homo sapiens
  siRNA target sequence for CTCFL (NM_080618.2,891-909).
caagttttaatcgtcatat

SEQ ID NO: 406474 - DNA, 19 bp, Homo sapiens
  siRNA target sequence for CTCFL (NM_080618.2,977-995).
ctgctgcggaaccatgtta

SEQ ID NO: 406475 - DNA, 19 bp, Homo sapiens
  siRNA target sequence for CTCFL (NM_080618.2,980-998).
ctgcggaaccatgttaaca

SEQ ID NO: 406476 - DNA, 19 bp, Homo sapiens
  siRNA target sequence for CTCFL (NM_080618.2,1007-1025).
ggaaccaggccctacaagt

SEQ ID NO: 406477 - DNA, 19 bp, Homo sapiens
  siRNA target sequence for CTCFL (NM_080618.2,1069-1087).
ccgacacaggcgctataaa

SEQ ID NO: 406478 - DNA, 19 bp, Homo sapiens
  siRNA target sequence for CTCFL (NM_080618.2,1071-1089).
gacacaggcgctataaaca

SEQ ID NO: 406479 - DNA, 19 bp, Homo sapiens
  siRNA target sequence for CTCFL (NM_080618.2,1073-1091).
cacaggcgctataaacata

SEQ ID NO: 406480 - DNA, 19 bp, Homo sapiens
  siRNA target sequence for CTCFL (NM_080618.2,1075-1093).
caggcgctataaacatact

SEQ ID NO: 406481 - DNA, 19 bp, Homo sapiens
  siRNA target sequence for CTCFL (NM_080618.2,1077-1095).
ggcgctataaacatactca

SEQ ID NO: 406482 - DNA, 19 bp, Homo sapiens
  siRNA target sequence for CTCFL (NM_080618.2,1078-1096).
gcgctataaacatactcat

SEQ ID NO: 406483 - DNA, 19 bp, Homo sapiens
  siRNA target sequence for CTCFL (NM_080618.2,1134-1152).
gtgtggaggcaagtaaatt

SEQ ID NO: 406484 - DNA, 19 bp, Homo sapiens
  siRNA target sequence for CTCFL (NM_080618.2,1136-1154).
gtggaggcaagtaaattga

SEQ ID NO: 406485 - DNA, 19 bp, Homo sapiens
  siRNA target sequence for CTCFL (NM_080618.2,1306-1324).
ccagagcgggaccatgaaa

SEQ ID NO: 406486 - DNA, 19 bp, Homo sapiens
  siRNA target sequence for CTCFL (NM_080618.2,1311-1329).
gcgggaccatgaaaataca

SEQ ID NO: 406487 - DNA, 19 bp, Homo sapiens
  siRNA target sequence for CTCFL (NM_080618.2,1314-1332).
ggaccatgaaaatacatat

SEQ ID NO: 406488 - DNA, 19 bp, Homo sapiens
  siRNA target sequence for CTCFL (NM_080618.2,1404-1422).
gcgacctacgtgtgcatat

SEQ ID NO: 406489 - DNA, 19 bp, Homo sapiens
  siRNA target sequence for CTCFL (NM_080618.2,1624-1642).
cacctgcctttcttgcaat

SEQ ID NO: 406490 - DNA, 19 bp, Homo sapiens
  siRNA target sequence for CTCFL (NM_080618.2,1674-1692).
ctcacttcaggaaatacca

SEQ ID NO: 406491 - DNA, 19 bp, Homo sapiens
  siRNA target sequence for CTCFL (NM_080618.2,1683-1701).
ggaaataccacgatgcaaa

SEQ ID NO: 406492 - DNA, 19 bp, Homo sapiens
  siRNA target sequence for CTCFL (NM_080618.2,1684-1702).
gaaataccacgatgcaaat

SEQ ID NO: 406493 - DNA, 19 bp, Homo sapiens
  siRNA target sequence for CTCFL (NM_080618.2,1705-1723).
catcccgactgtttacaaa

SEQ ID NO: 406494 - DNA, 19 bp, Homo sapiens
  siRNA target sequence for CTCFL (NM_080618.2,1709-1727).
ccgactgtttacaaatgct

SEQ ID NO: 406495 - DNA, 19 bp, Homo sapiens
  siRNA target sequence for CTCFL (NM_080618.2,1947-1965).
ccacgaagggagaacagtt

SEQ ID NO: 406496 - DNA, 19 bp, Homo sapiens
  siRNA target sequence for CTCFL (NM_080618.2,1982-2000).
cctgtcgcctgcagagaaa

SEQ ID NO: 406497 - DNA, 19 bp, Homo sapiens
  siRNA target sequence for CTCFL (NM_080618.2,2030-2048).
gaaggcgtgacctgtgaaa

SEQ ID NO: 406498 - DNA, 19 bp, Homo sapiens
  siRNA target sequence for C20orf136 (NM_080621.2,298-316).
cactatggcctgtaccata

SEQ ID NO: 406499 - DNA, 19 bp, Homo sapiens
  siRNA target sequence for C20orf136 (NM_080621.2,592-610).
gcttccttcgggaaaatgt

SEQ ID NO: 406500 - DNA, 19 bp, Homo sapiens
  siRNA target sequence for C20orf160 (NM_080625.2,122-140).
gcactcgatgcccctttat

SEQ ID NO: 406501 - DNA, 19 bp, Homo sapiens
  siRNA target sequence for C20orf160 (NM_080625.2,365-383).
cacctggcgcgacaatgaa

SEQ ID NO: 406502 - DNA, 19 bp, Homo sapiens
  siRNA target sequence for C20orf160 (NM_080625.2,970-988).
gtcaggtcttccagatcat

SEQ ID NO: 406503 - DNA, 19 bp, Homo sapiens
  siRNA target sequence for C20orf160 (NM_080625.2,989-1007).
ctacggggaccagagtatt

SEQ ID NO: 406504 - DNA, 19 bp, Homo sapiens
  siRNA target sequence for C20orf160 (NM_080625.2,993-1011).
ggggaccagagtattgagt

SEQ ID NO: 406505 - DNA, 19 bp, Homo sapiens
  siRNA target sequence for C20orf160 (NM_080625.2,1060-1078).
ggctctgcagccgcataat

SEQ ID NO: 406506 - DNA, 19 bp, Homo sapiens
  siRNA target sequence for C20orf160 (NM_080625.2,1277-1295).
cccatccaggactattgca

SEQ ID NO: 406507 - DNA, 19 bp, Homo sapiens
  siRNA target sequence for BRI3BP (NM_080626.5,384-402).
gtgctgggagtggatatgt

SEQ ID NO: 406508 - DNA, 19 bp, Homo sapiens
  siRNA target sequence for BRI3BP (NM_080626.5,627-645).
cgggtcgtcctgttttcca

SEQ ID NO: 406509 - DNA, 19 bp, Homo sapiens
  siRNA target sequence for BRI3BP (NM_080626.5,628-646).
gggtcgtcctgttttccat

SEQ ID NO: 406510 - DNA, 19 bp, Homo sapiens
  siRNA target sequence for BRI3BP (NM_080626.5,643-661).
ccatgtcctgcgtgtacat

SEQ ID NO: 406511 - DNA, 19 bp, Homo sapiens
  siRNA target sequence for BRI3BP (NM_080626.5,717-735).
gtggccgtctacttcatga

SEQ ID NO: 406512 - DNA, 19 bp, Homo sapiens
  siRNA target sequence for TRAP25 (NM_080651.1,280-298).
cttaccacactggaacata

SEQ ID NO: 406513 - DNA, 19 bp, Homo sapiens
  siRNA target sequence for TRAP25 (NM_080651.1,324-342).
gataatcttcgccaacttt

SEQ ID NO: 406514 - DNA, 19 bp, Homo sapiens
  siRNA target sequence for TRAP25 (NM_080651.1,360-378).
ctgagattggtatatgaca

SEQ ID NO: 406515 - DNA, 19 bp, Homo sapiens
  siRNA target sequence for TRAP25 (NM_080651.1,368-386).
ggtatatgacaaatgcaat

SEQ ID NO: 406516 - DNA, 19 bp, Homo sapiens
  siRNA target sequence for TRAP25 (NM_080651.1,417-435).
gtcgagcaacttattccat

SEQ ID NO: 406517 - DNA, 19 bp, Homo sapiens
  siRNA target sequence for TRAP25 (NM_080651.1,419-437).
cgagcaacttattccatat

SEQ ID NO: 406518 - DNA, 19 bp, Homo sapiens
  siRNA target sequence for TRAP25 (NM_080651.1,470-488).
ggctggcccacctcgtttt

SEQ ID NO: 406519 - DNA, 19 bp, Homo sapiens
  siRNA target sequence for TRAP25 (NM_080651.1,474-492).
ggcccacctcgttttgcta

SEQ ID NO: 406520 - DNA, 19 bp, Homo sapiens
  siRNA target sequence for TRAP25 (NM_080651.1,493-511).
gtgaagagaggcgagaaat

SEQ ID NO: 406521 - DNA, 19 bp, Homo sapiens
  siRNA target sequence for MGC15397 (NM_080652.2,317-335).
cagcttcctgaatgtttta

SEQ ID NO: 406522 - DNA, 19 bp, Homo sapiens
  siRNA target sequence for MGC15397 (NM_080652.2,626-644).
cggtttgatcccatataat

SEQ ID NO: 406523 - DNA, 19 bp, Homo sapiens
  siRNA target sequence for MGC15397 (NM_080652.2,627-645).
ggtttgatcccatataatt

SEQ ID NO: 406524 - DNA, 19 bp, Homo sapiens
  siRNA target sequence for MGC15397 (NM_080652.2,628-646).
gtttgatcccatataattt

SEQ ID NO: 406525 - DNA, 19 bp, Homo sapiens
  siRNA target sequence for MGC15397 (NM_080652.2,794-812).
gcaattgaatgaaacaagt

SEQ ID NO: 406526 - DNA, 19 bp, Homo sapiens
  siRNA target sequence for NY-REN-41 (NM_080654.1,188-206).
ccgctgagctgcagcaatt

SEQ ID NO: 406527 - DNA, 19 bp, Homo sapiens
  siRNA target sequence for NY-REN-41 (NM_080654.1,386-404).
caggttgaatcagaaaata

SEQ ID NO: 406528 - DNA, 19 bp, Homo sapiens
  siRNA target sequence for NY-REN-41 (NM_080654.1,463-481).
gtggtttattggcaaagaa

SEQ ID NO: 406529 - DNA, 19 bp, Homo sapiens
  siRNA target sequence for NY-REN-41 (NM_080654.1,685-703).
ctattatacttcattacct

SEQ ID NO: 406530 - DNA, 19 bp, Homo sapiens
  siRNA target sequence for MGC17337 (NM_080655.1,301-319).
ggctcggaccaaaaaaatt

SEQ ID NO: 406531 - DNA, 19 bp, Homo sapiens
  siRNA target sequence for MGC17337 (NM_080655.1,302-320).
gctcggaccaaaaaaatta

SEQ ID NO: 406532 - DNA, 19 bp, Homo sapiens
  siRNA target sequence for MGC17337 (NM_080655.1,303-321).
ctcggaccaaaaaaattat

SEQ ID NO: 406533 - DNA, 19 bp, Homo sapiens
  siRNA target sequence for MGC17337 (NM_080655.1,475-493).
ctcagcccaagaatcattt

SEQ ID NO: 406534 - DNA, 19 bp, Homo sapiens
  siRNA target sequence for MGC17337 (NM_080655.1,630-648).
ctcaggaaggtgctttaaa

SEQ ID NO: 406535 - DNA, 19 bp, Homo sapiens
  siRNA target sequence for MGC17337 (NM_080655.1,688-706).
cttacaactgcaactgata

SEQ ID NO: 406536 - DNA, 19 bp, Homo sapiens
  siRNA target sequence for cig5 (NM_080657.3,236-254).
ccccaaccagcgtcaacta

SEQ ID NO: 406537 - DNA, 19 bp, Homo sapiens
  siRNA target sequence for cig5 (NM_080657.3,237-255).
cccaaccagcgtcaactat

SEQ ID NO: 406538 - DNA, 19 bp, Homo sapiens
  siRNA target sequence for cig5 (NM_080657.3,242-260).
ccagcgtcaactatcactt

SEQ ID NO: 406539 - DNA, 19 bp, Homo sapiens
  siRNA target sequence for cig5 (NM_080657.3,263-281).
ctcgccagtgcaactacaa

SEQ ID NO: 406540 - DNA, 19 bp, Homo sapiens
  siRNA target sequence for cig5 (NM_080657.3,367-385).
gctggtatggagaagatca

SEQ ID NO: 406541 - DNA, 19 bp, Homo sapiens
  siRNA target sequence for cig5 (NM_080657.3,370-388).
ggtatggagaagatcaact

SEQ ID NO: 406542 - DNA, 19 bp, Homo sapiens
  siRNA target sequence for cig5 (NM_080657.3,441-459).
ggtgaggttctgcaaagta

SEQ ID NO: 406543 - DNA, 19 bp, Homo sapiens
  siRNA target sequence for cig5 (NM_080657.3,446-464).
ggttctgcaaagtagagtt

SEQ ID NO: 406544 - DNA, 19 bp, Homo sapiens
  siRNA target sequence for cig5 (NM_080657.3,516-534).
gtggttccagaattatggt

SEQ ID NO: 406545 - DNA, 19 bp, Homo sapiens
  siRNA target sequence for cig5 (NM_080657.3,522-540).
ccagaattatggtgagtat

SEQ ID NO: 406546 - DNA, 19 bp, Homo sapiens
  siRNA target sequence for cig5 (NM_080657.3,533-551).
gtgagtatttggacattct

SEQ ID NO: 406547 - DNA, 19 bp, Homo sapiens
  siRNA target sequence for cig5 (NM_080657.3,651-669).
gtggtgtagggattataga

SEQ ID NO: 406548 - DNA, 19 bp, Homo sapiens
  siRNA target sequence for cig5 (NM_080657.3,668-686).
gagtcgctttcaagataaa

SEQ ID NO: 406549 - DNA, 19 bp, Homo sapiens
  siRNA target sequence for cig5 (NM_080657.3,672-690).
cgctttcaagataaattct

SEQ ID NO: 406550 - DNA, 19 bp, Homo sapiens
  siRNA target sequence for cig5 (NM_080657.3,689-707).
ctgtcattaatcgtttcaa

SEQ ID NO: 406551 - DNA, 19 bp, Homo sapiens
  siRNA target sequence for cig5 (NM_080657.3,748-766).
cctgtccgctggaaagtgt

SEQ ID NO: 406552 - DNA, 19 bp, Homo sapiens
  siRNA target sequence for cig5 (NM_080657.3,749-767).
ctgtccgctggaaagtgtt

SEQ ID NO: 406553 - DNA, 19 bp, Homo sapiens
  siRNA target sequence for cig5 (NM_080657.3,763-781).
gtgttccagtgcctcttaa

SEQ ID NO: 406554 - DNA, 19 bp, Homo sapiens
  siRNA target sequence for cig5 (NM_080657.3,887-905).
gcttggtgcctgaatctaa

SEQ ID NO: 406555 - DNA, 19 bp, Homo sapiens
  siRNA target sequence for cig5 (NM_080657.3,896-914).
ctgaatctaaccagaagat

SEQ ID NO: 406556 - DNA, 19 bp, Homo sapiens
  siRNA target sequence for cig5 (NM_080657.3,940-958).
gaatatatgcgctttctga

SEQ ID NO: 406557 - DNA, 19 bp, Homo sapiens
  siRNA target sequence for cig5 (NM_080657.3,949-967).
cgctttctgaactgtagaa

SEQ ID NO: 406558 - DNA, 19 bp, Homo sapiens
  siRNA target sequence for cig5 (NM_080657.3,950-968).
gctttctgaactgtagaaa

SEQ ID NO: 406559 - DNA, 19 bp, Homo sapiens
  siRNA target sequence for cig5 (NM_080657.3,996-1014).
cctggatgttggtgtagaa

SEQ ID NO: 406560 - DNA, 19 bp, Homo sapiens
  siRNA target sequence for ACY-3 (NM_080658.1,419-437).
ccccggacgacccatatga

SEQ ID NO: 406561 - DNA, 19 bp, Homo sapiens
  siRNA target sequence for ACY-3 (NM_080658.1,732-750).
gcgggctgacattttctca

SEQ ID NO: 406562 - DNA, 19 bp, Homo sapiens
  siRNA target sequence for ACY-3 (NM_080658.1,947-965).
ctcccatcttccagatgtt

SEQ ID NO: 406563 - DNA, 19 bp, Homo sapiens
  siRNA target sequence for ACY-3 (NM_080658.1,1002-1020).
ggtgtaccccgtgttcatt

SEQ ID NO: 406564 - DNA, 19 bp, Homo sapiens
  siRNA target sequence for ACY-3 (NM_080658.1,1003-1021).
gtgtaccccgtgttcatta

SEQ ID NO: 406565 - DNA, 19 bp, Homo sapiens
  siRNA target sequence for ACY-3 (NM_080658.1,1024-1042).
gaggctgcctactatgaga

SEQ ID NO: 406566 - DNA, 19 bp, Homo sapiens
  siRNA target sequence for ACY-3 (NM_080658.1,1057-1075).
gtccagactgagaagttca

SEQ ID NO: 406567 - DNA, 19 bp, Homo sapiens
  siRNA target sequence for MGC14839 (NM_080659.1,186-204).
cccaaagggccatgaaaca

SEQ ID NO: 406568 - DNA, 19 bp, Homo sapiens
  siRNA target sequence for MGC14839 (NM_080659.1,187-205).
ccaaagggccatgaaacaa

SEQ ID NO: 406569 - DNA, 19 bp, Homo sapiens
  siRNA target sequence for MGC14839 (NM_080659.1,215-233).
cgtatgaacgggtgttaca

SEQ ID NO: 406570 - DNA, 19 bp, Homo sapiens
  siRNA target sequence for MGC14839 (NM_080659.1,272-290).
cggaagacagcaacttaca

SEQ ID NO: 406571 - DNA, 19 bp, Homo sapiens
  siRNA target sequence for MGC14839 (NM_080659.1,279-297).
cagcaacttacattatgct

SEQ ID NO: 406572 - DNA, 19 bp, Homo sapiens
  siRNA target sequence for MGC14839 (NM_080659.1,285-303).
cttacattatgctgacatt

SEQ ID NO: 406573 - DNA, 19 bp, Homo sapiens
  siRNA target sequence for MGC14289 (NM_080660.2,443-461).
gactttttggtctcaatga

SEQ ID NO: 406574 - DNA, 19 bp, Homo sapiens
  siRNA target sequence for MGC14289 (NM_080660.2,489-507).
gaatgacccctgtctttta

SEQ ID NO: 406575 - DNA, 19 bp, Homo sapiens
  siRNA target sequence for MGC14289 (NM_080660.2,514-532).
gtctgtttgctctacaaca

SEQ ID NO: 406576 - DNA, 19 bp, Homo sapiens
  siRNA target sequence for MGC14289 (NM_080660.2,589-607).
gtgtgcaaatcctttgtga

SEQ ID NO: 406577 - DNA, 19 bp, Homo sapiens
  siRNA target sequence for MGC14289 (NM_080660.2,639-657).
gtcccatcagcttatccat

SEQ ID NO: 406578 - DNA, 19 bp, Homo sapiens
  siRNA target sequence for MGC14289 (NM_080660.2,684-702).
ccaaggactgaatattcca

SEQ ID NO: 406579 - DNA, 19 bp, Homo sapiens
  siRNA target sequence for MGC14289 (NM_080660.2,751-769).
cacaagatgcttgaaaata

SEQ ID NO: 406580 - DNA, 19 bp, Homo sapiens
  siRNA target sequence for MGC14289 (NM_080660.2,785-803).
cttcgactgagcattcaca

SEQ ID NO: 406581 - DNA, 19 bp, Homo sapiens
  siRNA target sequence for MGC15937 (NM_080661.2,116-134).
cccaggagcgcgaagtgaa

SEQ ID NO: 406582 - DNA, 19 bp, Homo sapiens
  siRNA target sequence for MGC15937 (NM_080661.2,178-196).
cagagtggctgaggataat

SEQ ID NO: 406583 - DNA, 19 bp, Homo sapiens
  siRNA target sequence for MGC15937 (NM_080661.2,184-202).
ggctgaggataatagagtt

SEQ ID NO: 406584 - DNA, 19 bp, Homo sapiens
  siRNA target sequence for MGC15937 (NM_080661.2,191-209).
gataatagagtttcttctt

SEQ ID NO: 406585 - DNA, 19 bp, Homo sapiens
  siRNA target sequence for MGC15937 (NM_080661.2,358-376).
caaacgtatatcgtatgtt

SEQ ID NO: 406586 - DNA, 19 bp, Homo sapiens
  siRNA target sequence for MGC15937 (NM_080661.2,880-898).
gagtgatggtgcgatacat

SEQ ID NO: 406587 - DNA, 19 bp, Homo sapiens
  siRNA target sequence for PEX11G (NM_080662.2,104-122).
gtggagttctggttgaaca

SEQ ID NO: 406588 - DNA, 19 bp, Homo sapiens
  siRNA target sequence for PEX11G (NM_080662.2,189-207).
gaccatcttgcgactcttt

SEQ ID NO: 406589 - DNA, 19 bp, Homo sapiens
  siRNA target sequence for PEX11G (NM_080662.2,191-209).
ccatcttgcgactctttga

SEQ ID NO: 406590 - DNA, 19 bp, Homo sapiens
  siRNA target sequence for PEX11G (NM_080662.2,192-210).
catcttgcgactctttgat

SEQ ID NO: 406591 - DNA, 19 bp, Homo sapiens
  siRNA target sequence for PEX11G (NM_080662.2,211-229).
gacctggccatgtttgtct

SEQ ID NO: 406592 - DNA, 19 bp, Homo sapiens
  siRNA target sequence for MGC19604 (NM_080665.2,486-504).
ctggaaggagcggaattca

SEQ ID NO: 406593 - DNA, 19 bp, Homo sapiens
  siRNA target sequence for MGC15407 (NM_080667.2,247-265).
gaaagcaaattgacctata

SEQ ID NO: 406594 - DNA, 19 bp, Homo sapiens
  siRNA target sequence for MGC15407 (NM_080667.2,268-286).
gagattcatcaggaataca

SEQ ID NO: 406595 - DNA, 19 bp, Homo sapiens
  siRNA target sequence for MGC15407 (NM_080667.2,373-391).
cttgcaaagacccatacat

SEQ ID NO: 406596 - DNA, 19 bp, Homo sapiens
  siRNA target sequence for MGC15407 (NM_080667.2,417-435).
ggcagcagaagattttact

SEQ ID NO: 406597 - DNA, 19 bp, Homo sapiens
  siRNA target sequence for MGC15407 (NM_080667.2,434-452).
ctatctttaaagcaatgat

SEQ ID NO: 406598 - DNA, 19 bp, Homo sapiens
  siRNA target sequence for MGC15407 (NM_080667.2,445-463).
gcaatgatggtccagaaaa

SEQ ID NO: 406599 - DNA, 19 bp, Homo sapiens
  siRNA target sequence for MGC15407 (NM_080667.2,480-498).
gcaagccattcgaataatt

SEQ ID NO: 406600 - DNA, 19 bp, Homo sapiens
  siRNA target sequence for MGC15407 (NM_080667.2,582-600).
cctgagggaagttcttaga

SEQ ID NO: 406601 - DNA, 19 bp, Homo sapiens
  siRNA target sequence for MGC15407 (NM_080667.2,651-669).
gttatcagaggctaaaaca

SEQ ID NO: 406602 - DNA, 19 bp, Homo sapiens
  siRNA target sequence for MGC15407 (NM_080667.2,689-707).
ccagtgaagctgcaataat

SEQ ID NO: 406603 - DNA, 19 bp, Homo sapiens
  siRNA target sequence for MGC15407 (NM_080667.2,692-710).
gtgaagctgcaataatgaa

SEQ ID NO: 406604 - DNA, 19 bp, Homo sapiens
  siRNA target sequence for MGC15407 (NM_080667.2,697-715).
gctgcaataatgaataatt

SEQ ID NO: 406605 - DNA, 19 bp, Homo sapiens
  siRNA target sequence for MGC15407 (NM_080667.2,717-735).
ccaaggggatggtgaacat

SEQ ID NO: 406606 - DNA, 19 bp, Homo sapiens
  siRNA target sequence for MGC15407 (NM_080667.2,744-762).
cccaccctcagaagttaaa

SEQ ID NO: 406607 - DNA, 19 bp, Homo sapiens
  siRNA target sequence for MGC15407 (NM_080667.2,746-764).
caccctcagaagttaaaat

SEQ ID NO: 406608 - DNA, 19 bp, Homo sapiens
  siRNA target sequence for MGC15407 (NM_080667.2,870-888).
gagcattgaaggaccaata

SEQ ID NO: 406609 - DNA, 19 bp, Homo sapiens
  siRNA target sequence for MGC15407 (NM_080667.2,873-891).
cattgaaggaccaatagca

SEQ ID NO: 406610 - DNA, 19 bp, Homo sapiens
  siRNA target sequence for MGC15407 (NM_080667.2,880-898).
ggaccaatagcaaacttat

SEQ ID NO: 406611 - DNA, 19 bp, Homo sapiens
  siRNA target sequence for MGC15407 (NM_080667.2,923-941).
ggcaacgagaacactatct

SEQ ID NO: 406612 - DNA, 19 bp, Homo sapiens
  siRNA target sequence for MGC15407 (NM_080667.2,925-943).
caacgagaacactatctca

SEQ ID NO: 406613 - DNA, 19 bp, Homo sapiens
  siRNA target sequence for MGC15407 (NM_080667.2,946-964).
cagaagagagataagttga

SEQ ID NO: 406614 - DNA, 19 bp, Homo sapiens
  siRNA target sequence for MGC15407 (NM_080667.2,1100-1118).
gattgcttgcagagaaact

SEQ ID NO: 406615 - DNA, 19 bp, Homo sapiens
  siRNA target sequence for CDCA5 (NM_080668.2,237-255).
gaaagcccatcgtcttaaa

SEQ ID NO: 406616 - DNA, 19 bp, Homo sapiens
  siRNA target sequence for CDCA5 (NM_080668.2,302-320).
cgcaggagccctaggattt

SEQ ID NO: 406617 - DNA, 19 bp, Homo sapiens
  siRNA target sequence for CDCA5 (NM_080668.2,309-327).
gccctaggatttccttttt

SEQ ID NO: 406618 - DNA, 19 bp, Homo sapiens
  siRNA target sequence for CDCA5 (NM_080668.2,350-368).
cctggcagggagcttacta

SEQ ID NO: 406619 - DNA, 19 bp, Homo sapiens
  siRNA target sequence for CDCA5 (NM_080668.2,351-369).
ctggcagggagcttactaa

SEQ ID NO: 406620 - DNA, 19 bp, Homo sapiens
  siRNA target sequence for CDCA5 (NM_080668.2,366-384).
ctaaggaggaccttttcaa

SEQ ID NO: 406621 - DNA, 19 bp, Homo sapiens
  siRNA target sequence for CDCA5 (NM_080668.2,702-720).
caccacccgagaaacagaa

SEQ ID NO: 406622 - DNA, 19 bp, Homo sapiens
  siRNA target sequence for SLC35A4 (NM_080670.2,902-920).
gctgaccaagctactgtta

SEQ ID NO: 406623 - DNA, 19 bp, Homo sapiens
  siRNA target sequence for SLC35A4 (NM_080670.2,1011-1029).
ctctatggcgctaacaaca

SEQ ID NO: 406624 - DNA, 19 bp, Homo sapiens
  siRNA target sequence for SLC35A4 (NM_080670.2,1028-1046).
caacctggtgatctatctt

SEQ ID NO: 406625 - DNA, 19 bp, Homo sapiens
  siRNA target sequence for SLC35A4 (NM_080670.2,1394-1412).
cttcctctacacttttggt

SEQ ID NO: 406626 - DNA, 19 bp, Homo sapiens
  siRNA target sequence for SLC35A4 (NM_080670.2,1502-1520).
gagccaggcactaaatgga

SEQ ID NO: 406627 - DNA, 19 bp, Homo sapiens
  siRNA target sequence for SLC35A4 (NM_080670.2,1555-1573).
gcatcacacgcctctttgt

SEQ ID NO: 406628 - DNA, 19 bp, Homo sapiens
  siRNA target sequence for SLC35A4 (NM_080670.2,1673-1691).
ggccatgcgcctgtactat

SEQ ID NO: 406629 - DNA, 19 bp, Homo sapiens
  siRNA target sequence for SCAPIN1 (NM_080672.2,242-260).
gggagaacccagatgagat

SEQ ID NO: 406630 - DNA, 19 bp, Homo sapiens
  siRNA target sequence for SCAPIN1 (NM_080672.2,850-868).
cccaaggcaagctccaaaa

SEQ ID NO: 406631 - DNA, 19 bp, Homo sapiens
  siRNA target sequence for SCAPIN1 (NM_080672.2,1001-1019).
ccccaagccgcgtcattga

SEQ ID NO: 406632 - DNA, 19 bp, Homo sapiens
  siRNA target sequence for SCAPIN1 (NM_080672.2,1192-1210).
cgaactgccgctaaggaat

SEQ ID NO: 406633 - DNA, 19 bp, Homo sapiens
  siRNA target sequence for SCAPIN1 (NM_080672.2,1196-1214).
ctgccgctaaggaatctga

SEQ ID NO: 406634 - DNA, 19 bp, Homo sapiens
  siRNA target sequence for SCAPIN1 (NM_080672.2,1249-1267).
ctcaaagacgacttgcttt

SEQ ID NO: 406635 - DNA, 19 bp, Homo sapiens
  siRNA target sequence for SCAPIN1 (NM_080672.2,1285-1303).
gcgctgaacgactccatta

SEQ ID NO: 406636 - DNA, 19 bp, Homo sapiens
  siRNA target sequence for SCAPIN1 (NM_080672.2,1286-1304).
cgctgaacgactccattat

SEQ ID NO: 406637 - DNA, 19 bp, Homo sapiens
  siRNA target sequence for SCAPIN1 (NM_080672.2,1287-1305).
gctgaacgactccattatt

SEQ ID NO: 406638 - DNA, 19 bp, Homo sapiens
  siRNA target sequence for SCAPIN1 (NM_080672.2,1288-1306).
ctgaacgactccattattt

SEQ ID NO: 406639 - DNA, 19 bp, Homo sapiens
  siRNA target sequence for SCAPIN1 (NM_080672.2,1290-1308).
gaacgactccattatttct

SEQ ID NO: 406640 - DNA, 19 bp, Homo sapiens
  siRNA target sequence for SCAPIN1 (NM_080672.2,1313-1331).
cactgccacggaaatgcaa

SEQ ID NO: 406641 - DNA, 19 bp, Homo sapiens
  siRNA target sequence for SCAPIN1 (NM_080672.2,1367-1385).
caagcaaacaggaactaga

SEQ ID NO: 406642 - DNA, 19 bp, Homo sapiens
  siRNA target sequence for SCAPIN1 (NM_080672.2,1381-1399).
ctagaagaccggaacattt

SEQ ID NO: 406643 - DNA, 19 bp, Homo sapiens
  siRNA target sequence for SCAPIN1 (NM_080672.2,1441-1459).
cagatcgagatgaagcttt

SEQ ID NO: 406644 - DNA, 19 bp, Homo sapiens
  siRNA target sequence for SCAPIN1 (NM_080672.2,1446-1464).
cgagatgaagctttccaaa

SEQ ID NO: 406645 - DNA, 19 bp, Homo sapiens
  siRNA target sequence for SCAPIN1 (NM_080672.2,1596-1614).
cactgttgatgaattaaga

SEQ ID NO: 406646 - DNA, 19 bp, Homo sapiens
  siRNA target sequence for SCAPIN1 (NM_080672.2,1627-1645).
ctgatacgattcagtgatt

SEQ ID NO: 406647 - DNA, 19 bp, Homo sapiens
  siRNA target sequence for SCAPIN1 (NM_080672.2,1658-1676).
caaaagcgcaggactatga

SEQ ID NO: 406648 - DNA, 19 bp, Homo sapiens
  siRNA target sequence for SCAPIN1 (NM_080672.2,1717-1735).
gataaggcagcaattcgta

SEQ ID NO: 406649 - DNA, 19 bp, Homo sapiens
  siRNA target sequence for SCAPIN1 (NM_080672.2,1723-1741).
gcagcaattcgtaaagaat

SEQ ID NO: 406650 - DNA, 19 bp, Homo sapiens
  siRNA target sequence for SCAPIN1 (NM_080672.2,1726-1744).
gcaattcgtaaagaattaa

SEQ ID NO: 406651 - DNA, 19 bp, Homo sapiens
  siRNA target sequence for SCAPIN1 (NM_080672.2,1727-1745).
caattcgtaaagaattaaa

SEQ ID NO: 406652 - DNA, 19 bp, Homo sapiens
  siRNA target sequence for C20orf86 (NM_080674.1,429-447).
cctgaagttccatgatgtt

SEQ ID NO: 406653 - DNA, 19 bp, Homo sapiens
  siRNA target sequence for C20orf86 (NM_080674.1,432-450).
gaagttccatgatgttgtt

SEQ ID NO: 406654 - DNA, 19 bp, Homo sapiens
  siRNA target sequence for C20orf86 (NM_080674.1,451-469).
cctggagggattatttcat

SEQ ID NO: 406655 - DNA, 19 bp, Homo sapiens
  siRNA target sequence for C20orf86 (NM_080674.1,452-470).
ctggagggattatttcatt

SEQ ID NO: 406656 - DNA, 19 bp, Homo sapiens
  siRNA target sequence for C20orf86 (NM_080674.1,489-507).
cggatggacagaacttgtt

SEQ ID NO: 406657 - DNA, 19 bp, Homo sapiens
  siRNA target sequence for C20orf86 (NM_080674.1,542-560).
cttgtctcgggcttactga

SEQ ID NO: 406658 - DNA, 19 bp, Homo sapiens
  siRNA target sequence for C20orf86 (NM_080674.1,547-565).
ctcgggcttactgaagatt

SEQ ID NO: 406659 - DNA, 19 bp, Homo sapiens
  siRNA target sequence for C20orf86 (NM_080674.1,551-569).
ggcttactgaagattcctt

SEQ ID NO: 406660 - DNA, 19 bp, Homo sapiens
  siRNA target sequence for C20orf86 (NM_080674.1,570-588).
ctaccgaaccgcaaattca

SEQ ID NO: 406661 - DNA, 19 bp, Homo sapiens
  siRNA target sequence for C20orf86 (NM_080674.1,573-591).
ccgaaccgcaaattcagaa

SEQ ID NO: 406662 - DNA, 19 bp, Homo sapiens
  siRNA target sequence for C20orf86 (NM_080674.1,633-651).
ggcgtttgtggcgttgtat

SEQ ID NO: 406663 - DNA, 19 bp, Homo sapiens
  siRNA target sequence for C20orf86 (NM_080674.1,895-913).
ctcctccaccggatagcaa

SEQ ID NO: 406664 - DNA, 19 bp, Homo sapiens
  siRNA target sequence for C20orf86 (NM_080674.1,917-935).
cggggataagggatctgaa

SEQ ID NO: 406665 - DNA, 19 bp, Homo sapiens
  siRNA target sequence for C20orf86 (NM_080674.1,977-995).
ggtttaggtctgagaagat

SEQ ID NO: 406666 - DNA, 19 bp, Homo sapiens
  siRNA target sequence for C20orf133 (NM_080676.2,166-184).
gagacgcaaagaataccta

SEQ ID NO: 406667 - DNA, 19 bp, Homo sapiens
  siRNA target sequence for C20orf133 (NM_080676.2,197-215).
cccctgaacagcattctat

SEQ ID NO: 406668 - DNA, 19 bp, Homo sapiens
  siRNA target sequence for C20orf133 (NM_080676.2,232-250).
gaagggcaagggccaaaat

SEQ ID NO: 406669 - DNA, 19 bp, Homo sapiens
  siRNA target sequence for MGC4473 (NM_080719.1,567-585).
ccaagtgaccgttcttgtt

SEQ ID NO: 406670 - DNA, 19 bp, Homo sapiens
  siRNA target sequence for MGC4473 (NM_080719.1,592-610).
gtgttgtgggctaagaaga

SEQ ID NO: 406671 - DNA, 19 bp, Homo sapiens
  siRNA target sequence for MGC4473 (NM_080719.1,639-657).
gcgaaagggcccaactcta

SEQ ID NO: 406672 - DNA, 19 bp, Homo sapiens
  siRNA target sequence for VMP (NM_080723.2,430-448).
cctcaatttgggagtatga

SEQ ID NO: 406673 - DNA, 19 bp, Homo sapiens
  siRNA target sequence for VMP (NM_080723.2,622-640).
cacatgctgtccagtttaa

SEQ ID NO: 406674 - DNA, 19 bp, Homo sapiens
  siRNA target sequence for VMP (NM_080723.2,804-822).
cacacccagccggttacaa

SEQ ID NO: 406675 - DNA, 19 bp, Homo sapiens
  siRNA target sequence for VMP (NM_080723.2,806-824).
cacccagccggttacaaaa

SEQ ID NO: 406676 - DNA, 19 bp, Homo sapiens
  siRNA target sequence for HOM-TES-103 (NM_080730.1,838-856).
gctgcaagaccgtgtaaat

SEQ ID NO: 406677 - DNA, 19 bp, Homo sapiens
  siRNA target sequence for HOM-TES-103 (NM_080730.1,1074-1092).
gcaactgcgaggacatgat

SEQ ID NO: 406678 - DNA, 19 bp, Homo sapiens
  siRNA target sequence for HOM-TES-103 (NM_080730.1,1261-1279).
gctgagggagtatgatttt

SEQ ID NO: 406679 - DNA, 19 bp, Homo sapiens
  siRNA target sequence for HOM-TES-103 (NM_080730.1,1395-1413).
gcctggagaaggtgattaa

SEQ ID NO: 406680 - DNA, 19 bp, Homo sapiens
  siRNA target sequence for C20orf141 (NM_080739.1,341-359).
gggcactaggactgacaat

SEQ ID NO: 406681 - DNA, 19 bp, Homo sapiens
  siRNA target sequence for SUHW1 (NM_080740.1,4-22).
ggagatatctttttgtgta

SEQ ID NO: 406682 - DNA, 19 bp, Homo sapiens
  siRNA target sequence for SUHW1 (NM_080740.1,5-23).
gagatatctttttgtgtaa

SEQ ID NO: 406683 - DNA, 19 bp, Homo sapiens
  siRNA target sequence for SUHW1 (NM_080740.1,7-25).
gatatctttttgtgtaaga

SEQ ID NO: 406684 - DNA, 19 bp, Homo sapiens
  siRNA target sequence for SUHW1 (NM_080740.1,139-157).
ctctttgtcgggatgattt

SEQ ID NO: 406685 - DNA, 19 bp, Homo sapiens
  siRNA target sequence for SUHW1 (NM_080740.1,141-159).
ctttgtcgggatgatttca

SEQ ID NO: 406686 - DNA, 19 bp, Homo sapiens
  siRNA target sequence for SUHW1 (NM_080740.1,145-163).
gtcgggatgatttcaaatt

SEQ ID NO: 406687 - DNA, 19 bp, Homo sapiens
  siRNA target sequence for SUHW1 (NM_080740.1,196-214).
gtcaccccaggctcaaagt

SEQ ID NO: 406688 - DNA, 19 bp, Homo sapiens
  siRNA target sequence for SUHW1 (NM_080740.1,255-273).
cgtgtcgcagcctgcaaat

SEQ ID NO: 406689 - DNA, 19 bp, Homo sapiens
  siRNA target sequence for SUHW1 (NM_080740.1,258-276).
gtcgcagcctgcaaatcat

SEQ ID NO: 406690 - DNA, 19 bp, Homo sapiens
  siRNA target sequence for SUHW1 (NM_080740.1,260-278).
cgcagcctgcaaatcatgt

SEQ ID NO: 406691 - DNA, 19 bp, Homo sapiens
  siRNA target sequence for SUHW1 (NM_080740.1,296-314).
ccatcatgcccgtttctct

SEQ ID NO: 406692 - DNA, 19 bp, Homo sapiens
  siRNA target sequence for SUHW1 (NM_080740.1,321-339).
ggggcgatcgacagatagt

SEQ ID NO: 406693 - DNA, 19 bp, Homo sapiens
  siRNA target sequence for SUHW1 (NM_080740.1,334-352).
gatagtcctgtcactatga

SEQ ID NO: 406694 - DNA, 19 bp, Homo sapiens
  siRNA target sequence for SUHW1 (NM_080740.1,340-358).
cctgtcactatgaagtctt

SEQ ID NO: 406695 - DNA, 19 bp, Homo sapiens
  siRNA target sequence for SUHW1 (NM_080740.1,343-361).
gtcactatgaagtcttcat

SEQ ID NO: 406696 - DNA, 19 bp, Homo sapiens
  siRNA target sequence for SUHW1 (NM_080740.1,345-363).
cactatgaagtcttcatct

SEQ ID NO: 406697 - DNA, 19 bp, Homo sapiens
  siRNA target sequence for SUHW1 (NM_080740.1,359-377).
catctgaacctggttataa

SEQ ID NO: 406698 - DNA, 19 bp, Homo sapiens
  siRNA target sequence for SUHW1 (NM_080740.1,364-382).
gaacctggttataaaatga

SEQ ID NO: 406699 - DNA, 19 bp, Homo sapiens
  siRNA target sequence for SUHW1 (NM_080740.1,381-399).
gagctcaccacaagttgtt

SEQ ID NO: 406700 - DNA, 19 bp, Homo sapiens
  siRNA target sequence for SUHW1 (NM_080740.1,394-412).
gttgtttctcccaattact

SEQ ID NO: 406701 - DNA, 19 bp, Homo sapiens
  siRNA target sequence for SUHW1 (NM_080740.1,499-517).
cgactttccacttcagata

SEQ ID NO: 406702 - DNA, 19 bp, Homo sapiens
  siRNA target sequence for SUHW1 (NM_080740.1,561-579).
cccaggggtaccttcttta

SEQ ID NO: 406703 - DNA, 19 bp, Homo sapiens
  siRNA target sequence for SUHW1 (NM_080740.1,581-599).
ctgtggtcccttcagatat

SEQ ID NO: 406704 - DNA, 19 bp, Homo sapiens
  siRNA target sequence for SUHW1 (NM_080740.1,583-601).
gtggtcccttcagatatgt

SEQ ID NO: 406705 - DNA, 19 bp, Homo sapiens
  siRNA target sequence for SUHW1 (NM_080740.1,585-603).
ggtcccttcagatatgtct

SEQ ID NO: 406706 - DNA, 19 bp, Homo sapiens
  siRNA target sequence for SUHW1 (NM_080740.1,586-604).
gtcccttcagatatgtctt

SEQ ID NO: 406707 - DNA, 19 bp, Homo sapiens
  siRNA target sequence for SUHW1 (NM_080740.1,631-649).
caggggatctgcaactcat

SEQ ID NO: 406708 - DNA, 19 bp, Homo sapiens
  siRNA target sequence for SUHW1 (NM_080740.1,639-657).
ctgcaactcatcaaaccat

SEQ ID NO: 406709 - DNA, 19 bp, Homo sapiens
  siRNA target sequence for SUHW1 (NM_080740.1,663-681).
gaatggagtaacatttcct

SEQ ID NO: 406710 - DNA, 19 bp, Homo sapiens
  siRNA target sequence for SUHW1 (NM_080740.1,683-701).
ggcctgatgctaatggaaa

SEQ ID NO: 406711 - DNA, 19 bp, Homo sapiens
  siRNA target sequence for SUHW1 (NM_080740.1,692-710).
ctaatggaaaggcacattt

SEQ ID NO: 406712 - DNA, 19 bp, Homo sapiens
  siRNA target sequence for SUHW1 (NM_080740.1,747-765).
cctggcaatgacagacatt

SEQ ID NO: 406713 - DNA, 19 bp, Homo sapiens
  siRNA target sequence for SUHW1 (NM_080740.1,748-766).
ctggcaatgacagacattt

SEQ ID NO: 406714 - DNA, 19 bp, Homo sapiens
  siRNA target sequence for SUHW1 (NM_080740.1,751-769).
gcaatgacagacatttcaa

SEQ ID NO: 406715 - DNA, 19 bp, Homo sapiens
  siRNA target sequence for SUHW1 (NM_080740.1,756-774).
gacagacatttcaagtcta

SEQ ID NO: 406716 - DNA, 19 bp, Homo sapiens
  siRNA target sequence for SUHW1 (NM_080740.1,815-833).
ccatcgtgttacttagcaa

SEQ ID NO: 406717 - DNA, 19 bp, Homo sapiens
  siRNA target sequence for SUHW1 (NM_080740.1,1301-1319).
ctgcaataccatacatgaa

SEQ ID NO: 406718 - DNA, 19 bp, Homo sapiens
  siRNA target sequence for SUHW1 (NM_080740.1,1304-1322).
caataccatacatgaatca

SEQ ID NO: 406719 - DNA, 19 bp, Homo sapiens
  siRNA target sequence for SUHW1 (NM_080740.1,1309-1327).
ccatacatgaatcattgtt

SEQ ID NO: 406720 - DNA, 19 bp, Homo sapiens
  siRNA target sequence for SUHW1 (NM_080740.1,1412-1430).
ccaaggaccatcaaacatt

SEQ ID NO: 406721 - DNA, 19 bp, Homo sapiens
  siRNA target sequence for SUHW1 (NM_080740.1,1454-1472).
ggttccctcgtgaaacaaa

SEQ ID NO: 406722 - DNA, 19 bp, Homo sapiens
  siRNA target sequence for SUHW1 (NM_080740.1,1455-1473).
gttccctcgtgaaacaaaa

SEQ ID NO: 406723 - DNA, 19 bp, Homo sapiens
  siRNA target sequence for SUHW1 (NM_080740.1,1511-1529).
gtatggcttccgttattgt

SEQ ID NO: 406724 - DNA, 19 bp, Homo sapiens
  siRNA target sequence for SUHW1 (NM_080740.1,1517-1535).
cttccgttattgttagcaa

SEQ ID NO: 406725 - DNA, 19 bp, Homo sapiens
  siRNA target sequence for SUHW1 (NM_080740.1,1548-1566).
gtcttctcctgtaaaaact

SEQ ID NO: 406726 - DNA, 19 bp, Homo sapiens
  siRNA target sequence for RNF36 (NM_080745.2,407-425).
gagatggagttgaatctga

SEQ ID NO: 406727 - DNA, 19 bp, Homo sapiens
  siRNA target sequence for RNF36 (NM_080745.2,444-462).
gtctcttagccaaggatat

SEQ ID NO: 406728 - DNA, 19 bp, Homo sapiens
  siRNA target sequence for RNF36 (NM_080745.2,520-538).
catcacaactctcttacat

SEQ ID NO: 406729 - DNA, 19 bp, Homo sapiens
  siRNA target sequence for RNF36 (NM_080745.2,525-543).
caactctcttacatagctt

SEQ ID NO: 406730 - DNA, 19 bp, Homo sapiens
  siRNA target sequence for RNF36 (NM_080745.2,565-583).
ggcaaccagagagcttatt

SEQ ID NO: 406731 - DNA, 19 bp, Homo sapiens
  siRNA target sequence for RNF36 (NM_080745.2,617-635).
cctatccagtacatggtat

SEQ ID NO: 406732 - DNA, 19 bp, Homo sapiens
  siRNA target sequence for RNF36 (NM_080745.2,677-695).
ctaactctggaccctaaaa

SEQ ID NO: 406733 - DNA, 19 bp, Homo sapiens
  siRNA target sequence for RNF36 (NM_080745.2,736-754).
cgtctggcatggtgacatt

SEQ ID NO: 406734 - DNA, 19 bp, Homo sapiens
  siRNA target sequence for RNF36 (NM_080745.2,737-755).
gtctggcatggtgacatta

SEQ ID NO: 406735 - DNA, 19 bp, Homo sapiens
  siRNA target sequence for RNF36 (NM_080745.2,773-791).
gatcctgagaggtttgact

SEQ ID NO: 406736 - DNA, 19 bp, Homo sapiens
  siRNA target sequence for RNF36 (NM_080745.2,1035-1053).
gcatatacctggattatga

SEQ ID NO: 406737 - DNA, 19 bp, Homo sapiens
  siRNA target sequence for RNF36 (NM_080745.2,1059-1077).
gacagttgtccttctacaa

SEQ ID NO: 406738 - DNA, 19 bp, Homo sapiens
  siRNA target sequence for RNF36 (NM_080745.2,1144-1162).
ctgcccctgccttaatgat

SEQ ID NO: 406739 - DNA, 19 bp, Homo sapiens
  siRNA target sequence for C20orf143 (NM_080750.2,164-182).
gaaatcgaggacttccaat

SEQ ID NO: 406740 - DNA, 19 bp, Homo sapiens
  siRNA target sequence for C20orf143 (NM_080750.2,288-306).
gctgctctctcattataaa

SEQ ID NO: 406741 - DNA, 19 bp, Homo sapiens
  siRNA target sequence for ZSWIM3 (NM_080752.1,255-273).
gtgcttcagcgcctacaaa

SEQ ID NO: 406742 - DNA, 19 bp, Homo sapiens
  siRNA target sequence for ZSWIM3 (NM_080752.1,279-297).
gaacaggtgctccttcatt

SEQ ID NO: 406743 - DNA, 19 bp, Homo sapiens
  siRNA target sequence for ZSWIM3 (NM_080752.1,344-362).
cctccatccgcgaagacat

SEQ ID NO: 406744 - DNA, 19 bp, Homo sapiens
  siRNA target sequence for ZSWIM3 (NM_080752.1,353-371).
gcgaagacatcctgtatgt

SEQ ID NO: 406745 - DNA, 19 bp, Homo sapiens
  siRNA target sequence for ZSWIM3 (NM_080752.1,366-384).
gtatgtgcaggtgaaattt

SEQ ID NO: 406746 - DNA, 19 bp, Homo sapiens
  siRNA target sequence for ZSWIM3 (NM_080752.1,389-407).
gcattcggacccaatcaaa

SEQ ID NO: 406747 - DNA, 19 bp, Homo sapiens
  siRNA target sequence for ZSWIM3 (NM_080752.1,443-461).
cgtacttgctcctaaggta

SEQ ID NO: 406748 - DNA, 19 bp, Homo sapiens
  siRNA target sequence for ZSWIM3 (NM_080752.1,459-477).
gtacaacgagagactagat

SEQ ID NO: 406749 - DNA, 19 bp, Homo sapiens
  siRNA target sequence for ZSWIM3 (NM_080752.1,462-480).
caacgagagactagataga

SEQ ID NO: 406750 - DNA, 19 bp, Homo sapiens
  siRNA target sequence for ZSWIM3 (NM_080752.1,465-483).
cgagagactagatagacta

SEQ ID NO: 406751 - DNA, 19 bp, Homo sapiens
  siRNA target sequence for ZSWIM3 (NM_080752.1,466-484).
gagagactagatagactat

SEQ ID NO: 406752 - DNA, 19 bp, Homo sapiens
  siRNA target sequence for ZSWIM3 (NM_080752.1,481-499).
ctatttatcagtgaactaa

SEQ ID NO: 406753 - DNA, 19 bp, Homo sapiens
  siRNA target sequence for ZSWIM3 (NM_080752.1,510-528).
catacatggtgactctaaa

SEQ ID NO: 406754 - DNA, 19 bp, Homo sapiens
  siRNA target sequence for ZSWIM3 (NM_080752.1,652-670).
ccatcgttttgcctagata

SEQ ID NO: 406755 - DNA, 19 bp, Homo sapiens
  siRNA target sequence for ZSWIM3 (NM_080752.1,653-671).
catcgttttgcctagataa

SEQ ID NO: 406756 - DNA, 19 bp, Homo sapiens
  siRNA target sequence for ZSWIM3 (NM_080752.1,662-680).
gcctagataaggtacaagt

SEQ ID NO: 406757 - DNA, 19 bp, Homo sapiens
  siRNA target sequence for ZSWIM3 (NM_080752.1,901-919).
ggccacatcctctatgctt

SEQ ID NO: 406758 - DNA, 19 bp, Homo sapiens
  siRNA target sequence for ZSWIM3 (NM_080752.1,1112-1130).
cccgcatcctcctttccat

SEQ ID NO: 406759 - DNA, 19 bp, Homo sapiens
  siRNA target sequence for ZSWIM3 (NM_080752.1,1158-1176).
gaagttgcatcgtagttca

SEQ ID NO: 406760 - DNA, 19 bp, Homo sapiens
  siRNA target sequence for ZSWIM3 (NM_080752.1,1168-1186).
cgtagttcagcaaatccat

SEQ ID NO: 406761 - DNA, 19 bp, Homo sapiens
  siRNA target sequence for ZSWIM3 (NM_080752.1,1360-1378).
ggcctgcttgcgtgtaaca

SEQ ID NO: 406762 - DNA, 19 bp, Homo sapiens
  siRNA target sequence for ZSWIM3 (NM_080752.1,1463-1481).
gctttgtggattacataga

SEQ ID NO: 406763 - DNA, 19 bp, Homo sapiens
  siRNA target sequence for ZSWIM3 (NM_080752.1,1470-1488).
ggattacatagacttcttt

SEQ ID NO: 406764 - DNA, 19 bp, Homo sapiens
  siRNA target sequence for ZSWIM3 (NM_080752.1,1471-1489).
gattacatagacttcttta

SEQ ID NO: 406765 - DNA, 19 bp, Homo sapiens
  siRNA target sequence for ZSWIM3 (NM_080752.1,1824-1842).
ctctcaccaggttagcaaa

SEQ ID NO: 406766 - DNA, 19 bp, Homo sapiens
  siRNA target sequence for ZSWIM3 (NM_080752.1,1862-1880).
gttcctttcaacaatggta

SEQ ID NO: 406767 - DNA, 19 bp, Homo sapiens
  siRNA target sequence for ZSWIM3 (NM_080752.1,1884-1902).
cctgccatgccgacacatt

SEQ ID NO: 406768 - DNA, 19 bp, Homo sapiens
  siRNA target sequence for ZSWIM3 (NM_080752.1,2051-2069).
gacggaacgacatgattca

SEQ ID NO: 406769 - DNA, 19 bp, Homo sapiens
  siRNA target sequence for ZSWIM3 (NM_080752.1,2074-2092).
ctaagcagggagttagcaa

SEQ ID NO: 406770 - DNA, 19 bp, Homo sapiens
  siRNA target sequence for ZSWIM3 (NM_080752.1,2138-2156).
ccaccctgcgcaagattgt

SEQ ID NO: 406771 - DNA, 19 bp, Homo sapiens
  siRNA target sequence for ZSWIM3 (NM_080752.1,2146-2164).
cgcaagattgtggatatct

SEQ ID NO: 406772 - DNA, 19 bp, Homo sapiens
  siRNA target sequence for PTPNS1 (NM_080792.1,920-938).
cggcctcaaccgttacaga

SEQ ID NO: 406773 - DNA, 19 bp, Homo sapiens
  siRNA target sequence for PTPNS1 (NM_080792.1,1200-1218).
ctacctcgtccgaatcaga

SEQ ID NO: 406774 - DNA, 19 bp, Homo sapiens
  siRNA target sequence for PTPNS1 (NM_080792.1,1230-1248).
ccagggctccacttcttct

SEQ ID NO: 406775 - DNA, 19 bp, Homo sapiens
  siRNA target sequence for PTPNS1 (NM_080792.1,1231-1249).
cagggctccacttcttcta

SEQ ID NO: 406776 - DNA, 19 bp, Homo sapiens
  siRNA target sequence for PTPNS1 (NM_080792.1,1257-1275).
gcatgagcccgagaagaat

SEQ ID NO: 406777 - DNA, 19 bp, Homo sapiens
  siRNA target sequence for PTPNS1 (NM_080792.1,1293-1311).
ggacacaaatgatatcaca

SEQ ID NO: 406778 - DNA, 19 bp, Homo sapiens
  siRNA target sequence for PTPNS1 (NM_080792.1,1294-1312).
gacacaaatgatatcacat

SEQ ID NO: 406779 - DNA, 19 bp, Homo sapiens
  siRNA target sequence for PTPNS1 (NM_080792.1,1381-1399).
gagtatgccagcattcaga

SEQ ID NO: 406780 - DNA, 19 bp, Homo sapiens
  siRNA target sequence for DATF1 (NM_080797.1,1789-1807).
gctctggtaagtattcgta

SEQ ID NO: 406781 - DNA, 19 bp, Homo sapiens
  siRNA target sequence for DATF1 (NM_080797.1,1790-1808).
ctctggtaagtattcgtat

SEQ ID NO: 406782 - DNA, 19 bp, Homo sapiens
  siRNA target sequence for DATF1 (NM_080797.1,1795-1813).
gtaagtattcgtattctct

SEQ ID NO: 406783 - DNA, 19 bp, Homo sapiens
  siRNA target sequence for C20orf108 (NM_080821.1,349-367).
gcacattggaatctcatta

SEQ ID NO: 406784 - DNA, 19 bp, Homo sapiens
  siRNA target sequence for C20orf108 (NM_080821.1,350-368).
cacattggaatctcattaa

SEQ ID NO: 406785 - DNA, 19 bp, Homo sapiens
  siRNA target sequence for C20orf108 (NM_080821.1,556-574).
gcccttgattgtcagatat

SEQ ID NO: 406786 - DNA, 19 bp, Homo sapiens
  siRNA target sequence for OVCA2 (NM_080822.1,243-261).
cgttttctccgcattggaa

SEQ ID NO: 406787 - DNA, 19 bp, Homo sapiens
  siRNA target sequence for OVCA2 (NM_080822.1,463-481).
ggcattgggttcaaggaat

SEQ ID NO: 406788 - DNA, 19 bp, Homo sapiens
  siRNA target sequence for C20orf144 (NM_080825.2,160-178).
ccaggatcgtgctgattct

SEQ ID NO: 406789 - DNA, 19 bp, Homo sapiens
  siRNA target sequence for C20orf144 (NM_080825.2,211-229).
ctgggcaacggattgacta

SEQ ID NO: 406790 - DNA, 19 bp, Homo sapiens
  siRNA target sequence for WFDC6 (NM_080827.1,111-129).
caatcctggtaccattcat

SEQ ID NO: 406791 - DNA, 19 bp, Homo sapiens
  siRNA target sequence for WFDC6 (NM_080827.1,116-134).
ctggtaccattcatccttt

SEQ ID NO: 406792 - DNA, 19 bp, Homo sapiens
  siRNA target sequence for WFDC6 (NM_080827.1,181-199).
gccgtgtcccaaaatcaaa

SEQ ID NO: 406793 - DNA, 19 bp, Homo sapiens
  siRNA target sequence for WFDC6 (NM_080827.1,277-295).
cagccgtggaaagaaatgt

SEQ ID NO: 406794 - DNA, 19 bp, Homo sapiens
  siRNA target sequence for WFDC6 (NM_080827.1,306-324).
gaaaggtcagccttacttt

SEQ ID NO: 406795 - DNA, 19 bp, Homo sapiens
  siRNA target sequence for WFDC6 (NM_080827.1,313-331).
cagccttactttataccat

SEQ ID NO: 406796 - DNA, 19 bp, Homo sapiens
  siRNA target sequence for C20orf173 (NM_080828.1,462-480).
gtggaggaagctgtttaaa

SEQ ID NO: 406797 - DNA, 19 bp, Homo sapiens
  siRNA target sequence for C20orf173 (NM_080828.1,492-510).
gctctcggtgagccatttt

SEQ ID NO: 406798 - DNA, 19 bp, Homo sapiens
  siRNA target sequence for C20orf173 (NM_080828.1,495-513).
ctcggtgagccattttgat

SEQ ID NO: 406799 - DNA, 19 bp, Homo sapiens
  siRNA target sequence for C20orf173 (NM_080828.1,575-593).
gcaacgacatcgaccaata

SEQ ID NO: 406800 - DNA, 19 bp, Homo sapiens
  siRNA target sequence for C20orf173 (NM_080828.1,589-607).
caataccccgtggttttca

SEQ ID NO: 406801 - DNA, 19 bp, Homo sapiens
  siRNA target sequence for C20orf173 (NM_080828.1,683-701).
cagatgctctaagtgataa

SEQ ID NO: 406802 - DNA, 19 bp, Homo sapiens
  siRNA target sequence for C20orf173 (NM_080828.1,685-703).
gatgctctaagtgataaga

SEQ ID NO: 406803 - DNA, 19 bp, Homo sapiens
  siRNA target sequence for C20orf175 (NM_080829.1,546-564).
gatcttcgaagcattgaaa

SEQ ID NO: 406804 - DNA, 19 bp, Homo sapiens
  siRNA target sequence for C20orf175 (NM_080829.1,549-567).
cttcgaagcattgaaaaga

SEQ ID NO: 406805 - DNA, 19 bp, Homo sapiens
  siRNA target sequence for C20orf175 (NM_080829.1,647-665).
ccaggctggctttctatta

SEQ ID NO: 406806 - DNA, 19 bp, Homo sapiens
  siRNA target sequence for C20orf175 (NM_080829.1,971-989).
gtcccggagaccactatga

SEQ ID NO: 406807 - DNA, 19 bp, Homo sapiens
  siRNA target sequence for C20orf175 (NM_080829.1,1254-1272).
gcagtggaacccgtttgat

SEQ ID NO: 406808 - DNA, 19 bp, Homo sapiens
  siRNA target sequence for C20orf175 (NM_080829.1,1255-1273).
cagtggaacccgtttgata

SEQ ID NO: 406809 - DNA, 19 bp, Homo sapiens
  siRNA target sequence for C20orf175 (NM_080829.1,1257-1275).
gtggaacccgtttgatact

SEQ ID NO: 406810 - DNA, 19 bp, Homo sapiens
  siRNA target sequence for C20orf175 (NM_080829.1,1259-1277).
ggaacccgtttgatactga

SEQ ID NO: 406811 - DNA, 19 bp, Homo sapiens
  siRNA target sequence for C20orf175 (NM_080829.1,1301-1319).
ccacgggcaagttttctat

SEQ ID NO: 406812 - DNA, 19 bp, Homo sapiens
  siRNA target sequence for C20orf175 (NM_080829.1,1367-1385).
ccagcttccgggagagata

SEQ ID NO: 406813 - DNA, 19 bp, Homo sapiens
  siRNA target sequence for C20orf175 (NM_080829.1,1370-1388).
gcttccgggagagatacta

SEQ ID NO: 406814 - DNA, 19 bp, Homo sapiens
  siRNA target sequence for C20orf175 (NM_080829.1,1619-1637).
cccacgcctccattgaaga

SEQ ID NO: 406815 - DNA, 19 bp, Homo sapiens
  siRNA target sequence for C20orf175 (NM_080829.1,1716-1734).
gcctggctggaggaactta

SEQ ID NO: 406816 - DNA, 19 bp, Homo sapiens
  siRNA target sequence for C20orf151 (NM_080833.1,687-705).
gcctacggggagaagaaaa

SEQ ID NO: 406817 - DNA, 19 bp, Homo sapiens
  siRNA target sequence for C20orf151 (NM_080833.1,723-741).
catctccagtggccaaaat

SEQ ID NO: 406818 - DNA, 19 bp, Homo sapiens
  siRNA target sequence for C20orf152 (NM_080834.1,161-179).
ggagacatatggtaactta

SEQ ID NO: 406819 - DNA, 19 bp, Homo sapiens
  siRNA target sequence for C20orf152 (NM_080834.1,276-294).
caggggattccgggaatat

SEQ ID NO: 406820 - DNA, 19 bp, Homo sapiens
  siRNA target sequence for C20orf152 (NM_080834.1,278-296).
ggggattccgggaatatca

SEQ ID NO: 406821 - DNA, 19 bp, Homo sapiens
  siRNA target sequence for C20orf152 (NM_080834.1,279-297).
gggattccgggaatatcaa

SEQ ID NO: 406822 - DNA, 19 bp, Homo sapiens
  siRNA target sequence for C20orf152 (NM_080834.1,280-298).
ggattccgggaatatcaaa

SEQ ID NO: 406823 - DNA, 19 bp, Homo sapiens
  siRNA target sequence for C20orf152 (NM_080834.1,281-299).
gattccgggaatatcaaat

SEQ ID NO: 406824 - DNA, 19 bp, Homo sapiens
  siRNA target sequence for C20orf152 (NM_080834.1,285-303).
ccgggaatatcaaatcatt

SEQ ID NO: 406825 - DNA, 19 bp, Homo sapiens
  siRNA target sequence for C20orf152 (NM_080834.1,289-307).
gaatatcaaatcattgaga

SEQ ID NO: 406826 - DNA, 19 bp, Homo sapiens
  siRNA target sequence for C20orf152 (NM_080834.1,335-353).
ccttctgggataaaaagat

SEQ ID NO: 406827 - DNA, 19 bp, Homo sapiens
  siRNA target sequence for C20orf152 (NM_080834.1,354-372).
gcaaagccgagtcacattt

SEQ ID NO: 406828 - DNA, 19 bp, Homo sapiens
  siRNA target sequence for C20orf152 (NM_080834.1,469-487).
caggccgtctgtaacatct

SEQ ID NO: 406829 - DNA, 19 bp, Homo sapiens
  siRNA target sequence for C20orf152 (NM_080834.1,543-561).
caaagtcatgcgctttgaa

SEQ ID NO: 406830 - DNA, 19 bp, Homo sapiens
  siRNA target sequence for C20orf152 (NM_080834.1,569-587).
gtcgcaggcgtgtgatcat

SEQ ID NO: 406831 - DNA, 19 bp, Homo sapiens
  siRNA target sequence for C20orf152 (NM_080834.1,571-589).
cgcaggcgtgtgatcatca

SEQ ID NO: 406832 - DNA, 19 bp, Homo sapiens
  siRNA target sequence for C20orf152 (NM_080834.1,572-590).
gcaggcgtgtgatcatcaa

SEQ ID NO: 406833 - DNA, 19 bp, Homo sapiens
  siRNA target sequence for C20orf152 (NM_080834.1,575-593).
ggcgtgtgatcatcaagaa

SEQ ID NO: 406834 - DNA, 19 bp, Homo sapiens
  siRNA target sequence for C20orf152 (NM_080834.1,605-623).
gcaacagcttttatttcat

SEQ ID NO: 406835 - DNA, 19 bp, Homo sapiens
  siRNA target sequence for C20orf152 (NM_080834.1,631-649).
ggcacagttgcaataacca

SEQ ID NO: 406836 - DNA, 19 bp, Homo sapiens
  siRNA target sequence for C20orf152 (NM_080834.1,779-797).
cggagttcctggttgttga

SEQ ID NO: 406837 - DNA, 19 bp, Homo sapiens
  siRNA target sequence for C20orf152 (NM_080834.1,799-817).
cgggaggacttctttgcta

SEQ ID NO: 406838 - DNA, 19 bp, Homo sapiens
  siRNA target sequence for C20orf152 (NM_080834.1,800-818).
gggaggacttctttgctaa

SEQ ID NO: 406839 - DNA, 19 bp, Homo sapiens
  siRNA target sequence for C20orf152 (NM_080834.1,847-865).
gctcagtatcggtttgaat

SEQ ID NO: 406840 - DNA, 19 bp, Homo sapiens
  siRNA target sequence for C20orf152 (NM_080834.1,848-866).
ctcagtatcggtttgaatt

SEQ ID NO: 406841 - DNA, 19 bp, Homo sapiens
  siRNA target sequence for C20orf152 (NM_080834.1,850-868).
cagtatcggtttgaatttt

SEQ ID NO: 406842 - DNA, 19 bp, Homo sapiens
  siRNA target sequence for C20orf152 (NM_080834.1,921-939).
ggtagccatggcgaagata

SEQ ID NO: 406843 - DNA, 19 bp, Homo sapiens
  siRNA target sequence for C20orf152 (NM_080834.1,957-975).
gcagctgatctcaaaagat

SEQ ID NO: 406844 - DNA, 19 bp, Homo sapiens
  siRNA target sequence for C20orf152 (NM_080834.1,963-981).
gatctcaaaagattttgga

SEQ ID NO: 406845 - DNA, 19 bp, Homo sapiens
  siRNA target sequence for C20orf152 (NM_080834.1,988-1006).
cccttcatcatgtttatca

SEQ ID NO: 406846 - DNA, 19 bp, Homo sapiens
  siRNA target sequence for C20orf152 (NM_080834.1,1158-1176).
ccagatcaaatcatatcct

SEQ ID NO: 406847 - DNA, 19 bp, Homo sapiens
  siRNA target sequence for C20orf152 (NM_080834.1,1311-1329).
gcctgctcagtcgatcaaa

SEQ ID NO: 406848 - DNA, 19 bp, Homo sapiens
  siRNA target sequence for C20orf152 (NM_080834.1,1312-1330).
cctgctcagtcgatcaaat

SEQ ID NO: 406849 - DNA, 19 bp, Homo sapiens
  siRNA target sequence for C20orf152 (NM_080834.1,1326-1344).
caaatgtgccatgatcaat

SEQ ID NO: 406850 - DNA, 19 bp, Homo sapiens
  siRNA target sequence for C20orf152 (NM_080834.1,1486-1504).
gagttgatacggataagga

SEQ ID NO: 406851 - DNA, 19 bp, Homo sapiens
  siRNA target sequence for C20orf152 (NM_080834.1,1534-1552).
gatgacgagatgataaaaa

SEQ ID NO: 406852 - DNA, 19 bp, Homo sapiens
  siRNA target sequence for C20orf152 (NM_080834.1,1554-1572).
gttgttaaagctcaatatt

SEQ ID NO: 406853 - DNA, 19 bp, Homo sapiens
  siRNA target sequence for C20orf152 (NM_080834.1,1557-1575).
gttaaagctcaatattgca

SEQ ID NO: 406854 - DNA, 19 bp, Homo sapiens
  siRNA target sequence for C20orf152 (NM_080834.1,1579-1597).
cccagtgatgaagatatgt

SEQ ID NO: 406855 - DNA, 19 bp, Homo sapiens
  siRNA target sequence for C20orf152 (NM_080834.1,1615-1633).
cagaacagctggaatatct

SEQ ID NO: 406856 - DNA, 19 bp, Homo sapiens
  siRNA target sequence for C20orf152 (NM_080834.1,1662-1680).
ggagccttgccaaagtcaa

SEQ ID NO: 406857 - DNA, 19 bp, Homo sapiens
  siRNA target sequence for C20orf152 (NM_080834.1,1667-1685).
cttgccaaagtcaactgtt

SEQ ID NO: 406858 - DNA, 19 bp, Homo sapiens
  siRNA target sequence for C20orf152 (NM_080834.1,1713-1731).
gatctacaaccctaagtct

SEQ ID NO: 406859 - DNA, 19 bp, Homo sapiens
  siRNA target sequence for C20orf152 (NM_080834.1,1821-1839).
gattgtccaagccatcaaa

SEQ ID NO: 406860 - DNA, 19 bp, Homo sapiens
  siRNA target sequence for C20orf152 (NM_080834.1,1836-1854).
caaagcacctcggtacaaa

SEQ ID NO: 406861 - DNA, 19 bp, Homo sapiens
  siRNA target sequence for LOC129026 (NM_080842.1,165-183).
gatgcgacacccacttaaa

SEQ ID NO: 406862 - DNA, 19 bp, Homo sapiens
  siRNA target sequence for ASB16 (NM_080863.4,1085-1103).
gggagcctgaagtcctttt

SEQ ID NO: 406863 - DNA, 19 bp, Homo sapiens
  siRNA target sequence for DPCR1 (NM_080870.2,202-220).
cacgtcaaccacagagaaa

SEQ ID NO: 406864 - DNA, 19 bp, Homo sapiens
  siRNA target sequence for DPCR1 (NM_080870.2,236-254).
gaaaagcctacgctatact

SEQ ID NO: 406865 - DNA, 19 bp, Homo sapiens
  siRNA target sequence for DPCR1 (NM_080870.2,332-350).
ctgaccactgagaccataa

SEQ ID NO: 406866 - DNA, 19 bp, Homo sapiens
  siRNA target sequence for DPCR1 (NM_080870.2,345-363).
ccataaaagccccagtaaa

SEQ ID NO: 406867 - DNA, 19 bp, Homo sapiens
  siRNA target sequence for DPCR1 (NM_080870.2,424-442).
ggtcacaggagacaaatct

SEQ ID NO: 406868 - DNA, 19 bp, Homo sapiens
  siRNA target sequence for DPCR1 (NM_080870.2,453-471).
cctcttctcatctaaataa

SEQ ID NO: 406869 - DNA, 19 bp, Homo sapiens
  siRNA target sequence for DPCR1 (NM_080870.2,459-477).
ctcatctaaataaaactga

SEQ ID NO: 406870 - DNA, 19 bp, Homo sapiens
  siRNA target sequence for DPCR1 (NM_080870.2,525-543).
gaacgaagctgagttctat

SEQ ID NO: 406871 - DNA, 19 bp, Homo sapiens
  siRNA target sequence for DPCR1 (NM_080870.2,561-579).
gaaacgagagccatccata

SEQ ID NO: 406872 - DNA, 19 bp, Homo sapiens
  siRNA target sequence for DPCR1 (NM_080870.2,570-588).
gccatccatacctcaataa

SEQ ID NO: 406873 - DNA, 19 bp, Homo sapiens
  siRNA target sequence for DPCR1 (NM_080870.2,620-638).
cagatgggagagaatgatt

SEQ ID NO: 406874 - DNA, 19 bp, Homo sapiens
  siRNA target sequence for DPCR1 (NM_080870.2,644-662).
cctgcatgggccatagtta

SEQ ID NO: 406875 - DNA, 19 bp, Homo sapiens
  siRNA target sequence for DPCR1 (NM_080870.2,645-663).
ctgcatgggccatagttat

SEQ ID NO: 406876 - DNA, 19 bp, Homo sapiens
  siRNA target sequence for DPCR1 (NM_080870.2,648-666).
catgggccatagttattgt

SEQ ID NO: 406877 - DNA, 19 bp, Homo sapiens
  siRNA target sequence for DPCR1 (NM_080870.2,734-752).
cggacacgccgcacactaa

SEQ ID NO: 406878 - DNA, 19 bp, Homo sapiens
  siRNA target sequence for DPCR1 (NM_080870.2,754-772).
ccagaacacccagtacaat

SEQ ID NO: 406879 - DNA, 19 bp, Homo sapiens
  siRNA target sequence for DPCR1 (NM_080870.2,757-775).
gaacacccagtacaatgat

SEQ ID NO: 406880 - DNA, 19 bp, Homo sapiens
  siRNA target sequence for LOC142678 (NM_080875.1,759-777).
cactaaggggcattttcca

SEQ ID NO: 406881 - DNA, 19 bp, Homo sapiens
  siRNA target sequence for LOC142678 (NM_080875.1,1151-1169).
cccaggatggcggagttta

SEQ ID NO: 406882 - DNA, 19 bp, Homo sapiens
  siRNA target sequence for LOC142678 (NM_080875.1,1179-1197).
cgggcaccgtgcatcgtat

SEQ ID NO: 406883 - DNA, 19 bp, Homo sapiens
  siRNA target sequence for LOC142678 (NM_080875.1,1726-1744).
gggccaggtggagttgata

SEQ ID NO: 406884 - DNA, 19 bp, Homo sapiens
  siRNA target sequence for LOC142678 (NM_080875.1,2063-2081).
gtgccaaacatcgatgtta

SEQ ID NO: 406885 - DNA, 19 bp, Homo sapiens
  siRNA target sequence for LOC142678 (NM_080875.1,2138-2156).
gcgctagctgtgagaaaga

SEQ ID NO: 406886 - DNA, 19 bp, Homo sapiens
  siRNA target sequence for LOC142678 (NM_080875.1,2139-2157).
cgctagctgtgagaaagat

SEQ ID NO: 406887 - DNA, 19 bp, Homo sapiens
  siRNA target sequence for LOC142678 (NM_080875.1,2140-2158).
gctagctgtgagaaagatt

SEQ ID NO: 406888 - DNA, 19 bp, Homo sapiens
  siRNA target sequence for LOC142678 (NM_080875.1,2902-2920).
ggtggtcgtcagcaagaaa

SEQ ID NO: 406889 - DNA, 19 bp, Homo sapiens
  siRNA target sequence for WAC (NM_100486.1,676-694).
gccagtggaaaatctacat

SEQ ID NO: 406890 - DNA, 19 bp, Homo sapiens
  siRNA target sequence for ASB12 (NM_130388.2,106-124).
gacaacgactcctatactt

SEQ ID NO: 406891 - DNA, 19 bp, Homo sapiens
  siRNA target sequence for ASB12 (NM_130388.2,142-160).
caggagcgttacaaacgtt

SEQ ID NO: 406892 - DNA, 19 bp, Homo sapiens
  siRNA target sequence for ASB12 (NM_130388.2,204-222).
gcgcttggctgcttcttat

SEQ ID NO: 406893 - DNA, 19 bp, Homo sapiens
  siRNA target sequence for ASB12 (NM_130388.2,225-243).
ccacttgagctgtttgcaa

SEQ ID NO: 406894 - DNA, 19 bp, Homo sapiens
  siRNA target sequence for ASB12 (NM_130388.2,289-307).
gcacagacgccacttttca

SEQ ID NO: 406895 - DNA, 19 bp, Homo sapiens
  siRNA target sequence for ASB12 (NM_130388.2,335-353).
gtgtacgtgtgcttttgga

SEQ ID NO: 406896 - DNA, 19 bp, Homo sapiens
  siRNA target sequence for ASB12 (NM_130388.2,371-389).
gtggtagcatctacaacaa

SEQ ID NO: 406897 - DNA, 19 bp, Homo sapiens
  siRNA target sequence for ASB12 (NM_130388.2,373-391).
ggtagcatctacaacaact

SEQ ID NO: 406898 - DNA, 19 bp, Homo sapiens
  siRNA target sequence for ASB12 (NM_130388.2,463-481).
gaggccaacgtcaaagcta

SEQ ID NO: 406899 - DNA, 19 bp, Homo sapiens
  siRNA target sequence for ASB12 (NM_130388.2,468-486).
caacgtcaaagctaaacta

SEQ ID NO: 406900 - DNA, 19 bp, Homo sapiens
  siRNA target sequence for ASB12 (NM_130388.2,586-604).
gcagaccctgactacaact

SEQ ID NO: 406901 - DNA, 19 bp, Homo sapiens
  siRNA target sequence for ASB12 (NM_130388.2,640-658).
ccccgcaccctccttgaaa

SEQ ID NO: 406902 - DNA, 19 bp, Homo sapiens
  siRNA target sequence for ASB12 (NM_130388.2,643-661).
cgcaccctccttgaaatct

SEQ ID NO: 406903 - DNA, 19 bp, Homo sapiens
  siRNA target sequence for ASB12 (NM_130388.2,662-680).
gcctccatcataattgtga

SEQ ID NO: 406904 - DNA, 19 bp, Homo sapiens
  siRNA target sequence for ASB12 (NM_130388.2,677-695).
gtgagccagagtatatcca

SEQ ID NO: 406905 - DNA, 19 bp, Homo sapiens
  siRNA target sequence for ASB12 (NM_130388.2,693-711).
ccagctgttaatcgatttt

SEQ ID NO: 406906 - DNA, 19 bp, Homo sapiens
  siRNA target sequence for ASB12 (NM_130388.2,747-765).
cctgacctcacaagatgat

SEQ ID NO: 406907 - DNA, 19 bp, Homo sapiens
  siRNA target sequence for ASB12 (NM_130388.2,760-778).
gatgataaaggcattgcat

SEQ ID NO: 406908 - DNA, 19 bp, Homo sapiens
  siRNA target sequence for ASB12 (NM_130388.2,798-816).
cactccacggtcacttcta

SEQ ID NO: 406909 - DNA, 19 bp, Homo sapiens
  siRNA target sequence for ASB12 (NM_130388.2,803-821).
cacggtcacttctatcaca

SEQ ID NO: 406910 - DNA, 19 bp, Homo sapiens
  siRNA target sequence for ASB12 (NM_130388.2,886-904).
gatattcctcccatgttga

SEQ ID NO: 406911 - DNA, 19 bp, Homo sapiens
  siRNA target sequence for ASB12 (NM_130388.2,900-918).
gttgattagctacctaaaa

SEQ ID NO: 406912 - DNA, 19 bp, Homo sapiens
  siRNA target sequence for TOR2A (NM_130459.1,298-316).
ccggcaccggcaaatccta

SEQ ID NO: 406913 - DNA, 19 bp, Homo sapiens
  siRNA target sequence for TOR2A (NM_130459.1,299-317).
cggcaccggcaaatcctat

SEQ ID NO: 406914 - DNA, 19 bp, Homo sapiens
  siRNA target sequence for TOR2A (NM_130459.1,414-432).
cacatcgagcgctacaaga

SEQ ID NO: 406915 - DNA, 19 bp, Homo sapiens
  siRNA target sequence for TOR2A (NM_130459.1,561-579).
gtggtatacgggaccaatt

SEQ ID NO: 406916 - DNA, 19 bp, Homo sapiens
  siRNA target sequence for TOR2A (NM_130459.1,739-757).
ccactctcagagatgacat

SEQ ID NO: 406917 - DNA, 19 bp, Homo sapiens
  siRNA target sequence for PAGE-5 (NM_130467.2,308-326).
gagtgagcatgtaacaaga

SEQ ID NO: 406918 - DNA, 19 bp, Homo sapiens
  siRNA target sequence for IMAP1 (NM_130759.2,107-125).
cgacagatgaagaaaatgt

SEQ ID NO: 406919 - DNA, 19 bp, Homo sapiens
  siRNA target sequence for IMAP1 (NM_130759.2,232-250).
ggccagagacggttcttct

SEQ ID NO: 406920 - DNA, 19 bp, Homo sapiens
  siRNA target sequence for IMAP1 (NM_130759.2,328-346).
gtggacactccggacattt

SEQ ID NO: 406921 - DNA, 19 bp, Homo sapiens
  siRNA target sequence for IMAP1 (NM_130759.2,331-349).
gacactccggacattttca

SEQ ID NO: 406922 - DNA, 19 bp, Homo sapiens
  siRNA target sequence for IMAP1 (NM_130759.2,508-526).
gaggacgtcctaaaatgga

SEQ ID NO: 406923 - DNA, 19 bp, Homo sapiens
  siRNA target sequence for IMAP1 (NM_130759.2,566-584).
gctccctgcacgattacgt

SEQ ID NO: 406924 - DNA, 19 bp, Homo sapiens
  siRNA target sequence for IMAP1 (NM_130759.2,637-655).
cgggtctgtgcctttgata

SEQ ID NO: 406925 - DNA, 19 bp, Homo sapiens
  siRNA target sequence for XAGE-5 (NM_130775.1,71-89).
gttggcgaggaagaagata

SEQ ID NO: 406926 - DNA, 19 bp, Homo sapiens
  siRNA target sequence for LOC93426 (NM_130784.1,182-200).
cgagttgaggtcctgatta

SEQ ID NO: 406927 - DNA, 19 bp, Homo sapiens
  siRNA target sequence for LOC93426 (NM_130784.1,297-315).
cgctgcatggagagaaagt

SEQ ID NO: 406928 - DNA, 19 bp, Homo sapiens
  siRNA target sequence for LOC93426 (NM_130784.1,298-316).
gctgcatggagagaaagta

SEQ ID NO: 406929 - DNA, 19 bp, Homo sapiens
  siRNA target sequence for LOC93426 (NM_130784.1,421-439).
ggagtgcaaggagagaatt

SEQ ID NO: 406930 - DNA, 19 bp, Homo sapiens
  siRNA target sequence for LOC93426 (NM_130784.1,566-584).
cggctggcaaaggagattt

SEQ ID NO: 406931 - DNA, 19 bp, Homo sapiens
  siRNA target sequence for moblak (NM_130807.2,329-347).
ccttcctgaagcaagtctt

SEQ ID NO: 406932 - DNA, 19 bp, Homo sapiens
  siRNA target sequence for moblak (NM_130807.2,617-635).
gctggcaggatgagcataa

SEQ ID NO: 406933 - DNA, 19 bp, Homo sapiens
  siRNA target sequence for moblak (NM_130807.2,692-710).
ggatcgaggcgcagatcaa

SEQ ID NO: 406934 - DNA, 19 bp, Homo sapiens
  siRNA target sequence for moblak (NM_130807.2,743-761).
ctccgtttcccaagaactt

SEQ ID NO: 406935 - DNA, 19 bp, Homo sapiens
  siRNA target sequence for CPNE4 (NM_130808.1,525-543).
ggcgtgcaaaggcatttct

SEQ ID NO: 406936 - DNA, 19 bp, Homo sapiens
  siRNA target sequence for CPNE4 (NM_130808.1,631-649).
gtgattcgcacctgcataa

SEQ ID NO: 406937 - DNA, 19 bp, Homo sapiens
  siRNA target sequence for CPNE4 (NM_130808.1,652-670).
ccagtgtactcaaaactgt

SEQ ID NO: 406938 - DNA, 19 bp, Homo sapiens
  siRNA target sequence for CPNE4 (NM_130808.1,657-675).
gtactcaaaactgtttact

SEQ ID NO: 406939 - DNA, 19 bp, Homo sapiens
  siRNA target sequence for CPNE4 (NM_130808.1,699-717).
gcagcgcctgcggtttgaa

SEQ ID NO: 406940 - DNA, 19 bp, Homo sapiens
  siRNA target sequence for CPNE4 (NM_130808.1,809-827).
gaaagctgtccaaatcctt

SEQ ID NO: 406941 - DNA, 19 bp, Homo sapiens
  siRNA target sequence for CPNE4 (NM_130808.1,840-858).
gaacacagcagggaaatct

SEQ ID NO: 406942 - DNA, 19 bp, Homo sapiens
  siRNA target sequence for CPNE4 (NM_130808.1,890-908).
gcaatgacgactatgttga

SEQ ID NO: 406943 - DNA, 19 bp, Homo sapiens
  siRNA target sequence for CPNE4 (NM_130808.1,914-932).
cattcaatgcacggaaatt

SEQ ID NO: 406944 - DNA, 19 bp, Homo sapiens
  siRNA target sequence for CPNE4 (NM_130808.1,918-936).
caatgcacggaaattggat

SEQ ID NO: 406945 - DNA, 19 bp, Homo sapiens
  siRNA target sequence for CPNE4 (NM_130808.1,923-941).
cacggaaattggatgacaa

SEQ ID NO: 406946 - DNA, 19 bp, Homo sapiens
  siRNA target sequence for CPNE4 (NM_130808.1,942-960).
ggatttcttcagtaaatct

SEQ ID NO: 406947 - DNA, 19 bp, Homo sapiens
  siRNA target sequence for CPNE4 (NM_130808.1,953-971).
gtaaatctgacccatttct

SEQ ID NO: 406948 - DNA, 19 bp, Homo sapiens
  siRNA target sequence for CPNE4 (NM_130808.1,972-990).
ggaaatttttcgtatgaat

SEQ ID NO: 406949 - DNA, 19 bp, Homo sapiens
  siRNA target sequence for CPNE4 (NM_130808.1,1026-1044).
ggttgtgatgaataactta

SEQ ID NO: 406950 - DNA, 19 bp, Homo sapiens
  siRNA target sequence for CPNE4 (NM_130808.1,1027-1045).
gttgtgatgaataacttaa

SEQ ID NO: 406951 - DNA, 19 bp, Homo sapiens
  siRNA target sequence for CPNE4 (NM_130808.1,1053-1071).
ctggaaatcattcaaagta

SEQ ID NO: 406952 - DNA, 19 bp, Homo sapiens
  siRNA target sequence for CPNE4 (NM_130808.1,1056-1074).
gaaatcattcaaagtatct

SEQ ID NO: 406953 - DNA, 19 bp, Homo sapiens
  siRNA target sequence for CPNE4 (NM_130808.1,1108-1126).
cggctaaagtgcatagtat

SEQ ID NO: 406954 - DNA, 19 bp, Homo sapiens
  siRNA target sequence for CPNE4 (NM_130808.1,1165-1183).
gaattcacctcgacattca

SEQ ID NO: 406955 - DNA, 19 bp, Homo sapiens
  siRNA target sequence for CPNE4 (NM_130808.1,1306-1324).
cacaagatgcattctttct

SEQ ID NO: 406956 - DNA, 19 bp, Homo sapiens
  siRNA target sequence for CPNE4 (NM_130808.1,1344-1362).
ctgccaaatccagtttaca

SEQ ID NO: 406957 - DNA, 19 bp, Homo sapiens
  siRNA target sequence for CPNE4 (NM_130808.1,1346-1364).
gccaaatccagtttacagt

SEQ ID NO: 406958 - DNA, 19 bp, Homo sapiens
  siRNA target sequence for CPNE4 (NM_130808.1,1347-1365).
ccaaatccagtttacagta

SEQ ID NO: 406959 - DNA, 19 bp, Homo sapiens
  siRNA target sequence for CPNE4 (NM_130808.1,1353-1371).
ccagtttacagtagctata

SEQ ID NO: 406960 - DNA, 19 bp, Homo sapiens
  siRNA target sequence for CPNE4 (NM_130808.1,1429-1447).
ccttaccaacccaatgagt

SEQ ID NO: 406961 - DNA, 19 bp, Homo sapiens
  siRNA target sequence for CPNE4 (NM_130808.1,1430-1448).
cttaccaacccaatgagta

SEQ ID NO: 406962 - DNA, 19 bp, Homo sapiens
  siRNA target sequence for CPNE4 (NM_130808.1,1462-1480).
gtagctgtgggggagattt

SEQ ID NO: 406963 - DNA, 19 bp, Homo sapiens
  siRNA target sequence for CPNE4 (NM_130808.1,1705-1723).
gcgtcagaggaaactaaca

SEQ ID NO: 406964 - DNA, 19 bp, Homo sapiens
  siRNA target sequence for CPNE4 (NM_130808.1,1729-1747).
gaggcatcgcaatacttca

SEQ ID NO: 406965 - DNA, 19 bp, Homo sapiens
  siRNA target sequence for CPNE4 (NM_130808.1,1759-1777).
ctgacagatggtgttatca

SEQ ID NO: 406966 - DNA, 19 bp, Homo sapiens
  siRNA target sequence for CPNE4 (NM_130808.1,1878-1896).
gatgctggacggtgatgat

SEQ ID NO: 406967 - DNA, 19 bp, Homo sapiens
  siRNA target sequence for LOC133619 (NM_130809.2,211-229).
gctactgctatgtcttcta

SEQ ID NO: 406968 - DNA, 19 bp, Homo sapiens
  siRNA target sequence for LOC133619 (NM_130809.2,244-262).
gcggcaaccagttcttttt

SEQ ID NO: 406969 - DNA, 19 bp, Homo sapiens
  siRNA target sequence for LOC133619 (NM_130809.2,294-312).
cccaccactcgcatactct

SEQ ID NO: 406970 - DNA, 19 bp, Homo sapiens
  siRNA target sequence for LOC133619 (NM_130809.2,295-313).
ccaccactcgcatactcta

SEQ ID NO: 406971 - DNA, 19 bp, Homo sapiens
  siRNA target sequence for LOC133619 (NM_130809.2,339-357).
gaggccttcagcaccatta

SEQ ID NO: 406972 - DNA, 19 bp, Homo sapiens
  siRNA target sequence for LOC133619 (NM_130809.2,343-361).
ccttcagcaccattacctt

SEQ ID NO: 406973 - DNA, 19 bp, Homo sapiens
  siRNA target sequence for LOC133619 (NM_130809.2,344-362).
cttcagcaccattaccttt

SEQ ID NO: 406974 - DNA, 19 bp, Homo sapiens
  siRNA target sequence for LOC133619 (NM_130809.2,392-410).
caccacttgttacttctat

SEQ ID NO: 406975 - DNA, 19 bp, Homo sapiens
  siRNA target sequence for LOC133619 (NM_130809.2,447-465).
cggtaatcctcctgtatct

SEQ ID NO: 406976 - DNA, 19 bp, Homo sapiens
  siRNA target sequence for LOC133619 (NM_130809.2,449-467).
gtaatcctcctgtatctca

SEQ ID NO: 406977 - DNA, 19 bp, Homo sapiens
  siRNA target sequence for LOC133619 (NM_130809.2,485-503).
ctgccccaaacactctttt

SEQ ID NO: 406978 - DNA, 19 bp, Homo sapiens
  siRNA target sequence for LOC133619 (NM_130809.2,514-532).
ccttcgggtcctcctatat

SEQ ID NO: 406979 - DNA, 19 bp, Homo sapiens
  siRNA target sequence for LOC133619 (NM_130809.2,523-541).
cctcctatatcaggatttt

SEQ ID NO: 406980 - DNA, 19 bp, Homo sapiens
  siRNA target sequence for LOC133619 (NM_130809.2,547-565).
ggttcaacttatgacatta

SEQ ID NO: 406981 - DNA, 19 bp, Homo sapiens
  siRNA target sequence for LOC133619 (NM_130809.2,598-616).
cccctgatgccatcatttt

SEQ ID NO: 406982 - DNA, 19 bp, Homo sapiens
  siRNA target sequence for LOC133619 (NM_130809.2,600-618).
cctgatgccatcattttct

SEQ ID NO: 406983 - DNA, 19 bp, Homo sapiens
  siRNA target sequence for LOC133619 (NM_130809.2,698-716).
ccacatcagccattacttt

SEQ ID NO: 406984 - DNA, 19 bp, Homo sapiens
  siRNA target sequence for LOC133619 (NM_130809.2,730-748).
gaagaccctagaattacta

SEQ ID NO: 406985 - DNA, 19 bp, Homo sapiens
  siRNA target sequence for LOC133619 (NM_130809.2,822-840).
gtctgtgcttgataagaca

SEQ ID NO: 406986 - DNA, 19 bp, Homo sapiens
  siRNA target sequence for LOC133619 (NM_130809.2,824-842).
ctgtgcttgataagacaaa

SEQ ID NO: 406987 - DNA, 19 bp, Homo sapiens
  siRNA target sequence for LOC133619 (NM_130809.2,828-846).
gcttgataagacaaaacat

SEQ ID NO: 406988 - DNA, 19 bp, Homo sapiens
  siRNA target sequence for LOC133619 (NM_130809.2,829-847).
cttgataagacaaaacatt

SEQ ID NO: 406989 - DNA, 19 bp, Homo sapiens
  siRNA target sequence for LOC133619 (NM_130809.2,850-868).
gtagaaagcatgattacaa

SEQ ID NO: 406990 - DNA, 19 bp, Homo sapiens
  siRNA target sequence for LOC133619 (NM_130809.2,878-896).
ctggcatggctccctatat

SEQ ID NO: 406991 - DNA, 19 bp, Homo sapiens
  siRNA target sequence for LOC133619 (NM_130809.2,880-898).
ggcatggctccctatatca

SEQ ID NO: 406992 - DNA, 19 bp, Homo sapiens
  siRNA target sequence for LOC133619 (NM_130809.2,881-899).
gcatggctccctatatcaa

SEQ ID NO: 406993 - DNA, 19 bp, Homo sapiens
  siRNA target sequence for LOC133619 (NM_130809.2,885-903).
ggctccctatatcaaatct

SEQ ID NO: 406994 - DNA, 19 bp, Homo sapiens
  siRNA target sequence for LOC133619 (NM_130809.2,908-926).
gtgaactggatattgtagt

SEQ ID NO: 406995 - DNA, 19 bp, Homo sapiens
  siRNA target sequence for LOC133619 (NM_130809.2,927-945).
gacctcaaataaagaagta

SEQ ID NO: 406996 - DNA, 19 bp, Homo sapiens
  siRNA target sequence for LOC133619 (NM_130809.2,1042-1060).
ggctatgcagctggattaa

SEQ ID NO: 406997 - DNA, 19 bp, Homo sapiens
  siRNA target sequence for LOC133619 (NM_130809.2,1043-1061).
gctatgcagctggattaaa

SEQ ID NO: 406998 - DNA, 19 bp, Homo sapiens
  siRNA target sequence for LOC133619 (NM_130809.2,1097-1115).
ctggggtgatccatgaaaa

SEQ ID NO: 406999 - DNA, 19 bp, Homo sapiens
  siRNA target sequence for LOC133619 (NM_130809.2,1100-1118).
gggtgatccatgaaaaaca

SEQ ID NO: 407000 - DNA, 19 bp, Homo sapiens
  siRNA target sequence for LOC133619 (NM_130809.2,1123-1141).
gctgtgtcagtagaaaact

SEQ ID NO: 407001 - DNA, 19 bp, Homo sapiens
  siRNA target sequence for LOC133619 (NM_130809.2,1126-1144).
gtgtcagtagaaaacttca

SEQ ID NO: 407002 - DNA, 19 bp, Homo sapiens
  siRNA target sequence for LOC133619 (NM_130809.2,1155-1173).
gctgcctgacaaatggttt

SEQ ID NO: 407003 - DNA, 19 bp, Homo sapiens
  siRNA target sequence for LOC133619 (NM_130809.2,1206-1224).
ccatggcattcatctagaa

SEQ ID NO: 407004 - DNA, 19 bp, Homo sapiens
  siRNA target sequence for LOC133619 (NM_130809.2,1266-1284).
gcaggctcaaagtctaact

SEQ ID NO: 407005 - DNA, 19 bp, Homo sapiens
  siRNA target sequence for LOC133619 (NM_130809.2,1279-1297).
ctaactccccaggactata

SEQ ID NO: 407006 - DNA, 19 bp, Homo sapiens
  siRNA target sequence for LOC133619 (NM_130809.2,1283-1301).
ctccccaggactataatct

SEQ ID NO: 407007 - DNA, 19 bp, Homo sapiens
  siRNA target sequence for LOC133619 (NM_130809.2,1285-1303).
ccccaggactataatctga

SEQ ID NO: 407008 - DNA, 19 bp, Homo sapiens
  siRNA target sequence for LOC133619 (NM_130809.2,1400-1418).
cccgtcggcagatgatcta

SEQ ID NO: 407009 - DNA, 19 bp, Homo sapiens
  siRNA target sequence for DYX1C1 (NM_130810.1,375-393).
cttcaggttagcgattaca

SEQ ID NO: 407010 - DNA, 19 bp, Homo sapiens
  siRNA target sequence for DYX1C1 (NM_130810.1,406-424).
cgaagactgcggtctttct

SEQ ID NO: 407011 - DNA, 19 bp, Homo sapiens
  siRNA target sequence for DYX1C1 (NM_130810.1,472-490).
gcacggaaaactatctgaa

SEQ ID NO: 407012 - DNA, 19 bp, Homo sapiens
  siRNA target sequence for DYX1C1 (NM_130810.1,567-585).
gggaatgacaccattgtct

SEQ ID NO: 407013 - DNA, 19 bp, Homo sapiens
  siRNA target sequence for DYX1C1 (NM_130810.1,568-586).
ggaatgacaccattgtctt

SEQ ID NO: 407014 - DNA, 19 bp, Homo sapiens
  siRNA target sequence for DYX1C1 (NM_130810.1,634-652).
cgggtgttgacaaagagat

SEQ ID NO: 407015 - DNA, 19 bp, Homo sapiens
  siRNA target sequence for DYX1C1 (NM_130810.1,727-745).
cagcaaagcgggaagatca

SEQ ID NO: 407016 - DNA, 19 bp, Homo sapiens
  siRNA target sequence for DYX1C1 (NM_130810.1,760-778).
gtgtcatgatgaagattga

SEQ ID NO: 407017 - DNA, 19 bp, Homo sapiens
  siRNA target sequence for DYX1C1 (NM_130810.1,973-991).
gaaatttggcatctagaaa

SEQ ID NO: 407018 - DNA, 19 bp, Homo sapiens
  siRNA target sequence for DYX1C1 (NM_130810.1,1065-1083).
cgctctgttggcagtatta

SEQ ID NO: 407019 - DNA, 19 bp, Homo sapiens
  siRNA target sequence for DYX1C1 (NM_130810.1,1066-1084).
gctctgttggcagtattaa

SEQ ID NO: 407020 - DNA, 19 bp, Homo sapiens
  siRNA target sequence for DYX1C1 (NM_130810.1,1074-1092).
ggcagtattaaaatcaact

SEQ ID NO: 407021 - DNA, 19 bp, Homo sapiens
  siRNA target sequence for DYX1C1 (NM_130810.1,1172-1190).
ggcacgaagagcaatgaat

SEQ ID NO: 407022 - DNA, 19 bp, Homo sapiens
  siRNA target sequence for DYX1C1 (NM_130810.1,1173-1191).
gcacgaagagcaatgaata

SEQ ID NO: 407023 - DNA, 19 bp, Homo sapiens
  siRNA target sequence for DYX1C1 (NM_130810.1,1177-1195).
gaagagcaatgaatactga

SEQ ID NO: 407024 - DNA, 19 bp, Homo sapiens
  siRNA target sequence for DYX1C1 (NM_130810.1,1200-1218).
gctgaactttgcgatttaa

SEQ ID NO: 407025 - DNA, 19 bp, Homo sapiens
  siRNA target sequence for DYX1C1 (NM_130810.1,1236-1254).
ccagaatggttgaaggata

SEQ ID NO: 407026 - DNA, 19 bp, Homo sapiens
  siRNA target sequence for DYX1C1 (NM_130810.1,1268-1286).
gtttgcaacggaaaactat

SEQ ID NO: 407027 - DNA, 19 bp, Homo sapiens
  siRNA target sequence for DYX1C1 (NM_130810.1,1283-1301).
ctatttggcagctatcaat

SEQ ID NO: 407028 - DNA, 19 bp, Homo sapiens
  siRNA target sequence for DYX1C1 (NM_130810.1,1290-1308).
gcagctatcaatgcatata

SEQ ID NO: 407029 - DNA, 19 bp, Homo sapiens
  siRNA target sequence for DYX1C1 (NM_130810.1,1291-1309).
cagctatcaatgcatataa

SEQ ID NO: 407030 - DNA, 19 bp, Homo sapiens
  siRNA target sequence for DYX1C1 (NM_130810.1,1358-1376).
ggctgcttgccacctaaaa

SEQ ID NO: 407031 - DNA, 19 bp, Homo sapiens
  siRNA target sequence for DYX1C1 (NM_130810.1,1360-1378).
ctgcttgccacctaaaact

SEQ ID NO: 407032 - DNA, 19 bp, Homo sapiens
  siRNA target sequence for DYX1C1 (NM_130810.1,1362-1380).
gcttgccacctaaaactaa

SEQ ID NO: 407033 - DNA, 19 bp, Homo sapiens
  siRNA target sequence for DYX1C1 (NM_130810.1,1395-1413).
gctattgaagattcttcta

SEQ ID NO: 407034 - DNA, 19 bp, Homo sapiens
  siRNA target sequence for DYX1C1 (NM_130810.1,1437-1455).
cctgttacagacaatgcta

SEQ ID NO: 407035 - DNA, 19 bp, Homo sapiens
  siRNA target sequence for DYX1C1 (NM_130810.1,1489-1507).
cagcattctgtcaactaga

SEQ ID NO: 407036 - DNA, 19 bp, Homo sapiens
  siRNA target sequence for DYX1C1 (NM_130810.1,1496-1514).
ctgtcaactagaattgtat

SEQ ID NO: 407037 - DNA, 19 bp, Homo sapiens
  siRNA target sequence for DYX1C1 (NM_130810.1,1558-1576).
catccaacaaaattgtaca

SEQ ID NO: 407038 - DNA, 19 bp, Homo sapiens
  siRNA target sequence for DYX1C1 (NM_130810.1,1589-1607).
gaagattcggaatgtaatt

SEQ ID NO: 407039 - DNA, 19 bp, Homo sapiens
  siRNA target sequence for DYX1C1 (NM_130810.1,1592-1610).
gattcggaatgtaattcaa

SEQ ID NO: 407040 - DNA, 19 bp, Homo sapiens
  siRNA target sequence for LRRC15 (NM_130830.2,331-349).
cgcacatcactgaactcaa

SEQ ID NO: 407041 - DNA, 19 bp, Homo sapiens
  siRNA target sequence for LRRC15 (NM_130830.2,351-369).
gagtccccgttcctcaata

SEQ ID NO: 407042 - DNA, 19 bp, Homo sapiens
  siRNA target sequence for LRRC15 (NM_130830.2,356-374).
cccgttcctcaatatctca

SEQ ID NO: 407043 - DNA, 19 bp, Homo sapiens
  siRNA target sequence for LRRC15 (NM_130830.2,444-462).
ggctcgctgcgctatctca

SEQ ID NO: 407044 - DNA, 19 bp, Homo sapiens
  siRNA target sequence for LRRC15 (NM_130830.2,674-692).
gctcaatctgggcaagaat

SEQ ID NO: 407045 - DNA, 19 bp, Homo sapiens
  siRNA target sequence for LRRC15 (NM_130830.2,744-762).
gtcctccggctgtatgaga

SEQ ID NO: 407046 - DNA, 19 bp, Homo sapiens
  siRNA target sequence for LRRC15 (NM_130830.2,950-968).
ccagctcaaccgtcttact

SEQ ID NO: 407047 - DNA, 19 bp, Homo sapiens
  siRNA target sequence for LRRC15 (NM_130830.2,1030-1048).
gggagctttggctctatga

SEQ ID NO: 407048 - DNA, 19 bp, Homo sapiens
  siRNA target sequence for LRRC15 (NM_130830.2,1032-1050).
gagctttggctctatgaca

SEQ ID NO: 407049 - DNA, 19 bp, Homo sapiens
  siRNA target sequence for LRRC15 (NM_130830.2,1063-1081).
ctctacccgacaatgtctt

SEQ ID NO: 407050 - DNA, 19 bp, Homo sapiens
  siRNA target sequence for LRRC15 (NM_130830.2,1522-1540).
gaggccagtccctcattat

SEQ ID NO: 407051 - DNA, 19 bp, Homo sapiens
  siRNA target sequence for LRRC15 (NM_130830.2,1586-1604).
gcctagttacccagaaaca

SEQ ID NO: 407052 - DNA, 19 bp, Homo sapiens
  siRNA target sequence for LRRC15 (NM_130830.2,1760-1778).
ggccattgccgccattgta

SEQ ID NO: 407053 - DNA, 19 bp, Homo sapiens
  siRNA target sequence for LRRC15 (NM_130830.2,1761-1779).
gccattgccgccattgtaa

SEQ ID NO: 407054 - DNA, 19 bp, Homo sapiens
  siRNA target sequence for LRRC15 (NM_130830.2,1762-1780).
ccattgccgccattgtaat

SEQ ID NO: 407055 - DNA, 19 bp, Homo sapiens
  siRNA target sequence for LRRC15 (NM_130830.2,1763-1781).
cattgccgccattgtaatt

SEQ ID NO: 407056 - DNA, 19 bp, Homo sapiens
  siRNA target sequence for AMOTL1 (NM_130847.1,191-209).
ggtccccttctgcttgtta

SEQ ID NO: 407057 - DNA, 19 bp, Homo sapiens
  siRNA target sequence for AMOTL1 (NM_130847.1,221-239).
gtcctgtccaggttctaga

SEQ ID NO: 407058 - DNA, 19 bp, Homo sapiens
  siRNA target sequence for AMOTL1 (NM_130847.1,224-242).
ctgtccaggttctagaaga

SEQ ID NO: 407059 - DNA, 19 bp, Homo sapiens
  siRNA target sequence for AMOTL1 (NM_130847.1,320-338).
gtagcatcagggaaaaagt

SEQ ID NO: 407060 - DNA, 19 bp, Homo sapiens
  siRNA target sequence for AMOTL1 (NM_130847.1,470-488).
gcaccccaaccgagaacat

SEQ ID NO: 407061 - DNA, 19 bp, Homo sapiens
  siRNA target sequence for AMOTL1 (NM_130847.1,475-493).
ccaaccgagaacatgaact

SEQ ID NO: 407062 - DNA, 19 bp, Homo sapiens
  siRNA target sequence for AMOTL1 (NM_130847.1,476-494).
caaccgagaacatgaactt

SEQ ID NO: 407063 - DNA, 19 bp, Homo sapiens
  siRNA target sequence for AMOTL1 (NM_130847.1,530-548).
gaccagcccatcctacaaa

SEQ ID NO: 407064 - DNA, 19 bp, Homo sapiens
  siRNA target sequence for AMOTL1 (NM_130847.1,536-554).
cccatcctacaaacaactt

SEQ ID NO: 407065 - DNA, 19 bp, Homo sapiens
  siRNA target sequence for AMOTL1 (NM_130847.1,537-555).
ccatcctacaaacaacttt

SEQ ID NO: 407066 - DNA, 19 bp, Homo sapiens
  siRNA target sequence for AMOTL1 (NM_130847.1,631-649).
gaacaccaggtggacaata

SEQ ID NO: 407067 - DNA, 19 bp, Homo sapiens
  siRNA target sequence for AMOTL1 (NM_130847.1,779-797).
cggtgggccatggttacta

SEQ ID NO: 407068 - DNA, 19 bp, Homo sapiens
  siRNA target sequence for AMOTL1 (NM_130847.1,781-799).
gtgggccatggttactaca

SEQ ID NO: 407069 - DNA, 19 bp, Homo sapiens
  siRNA target sequence for AMOTL1 (NM_130847.1,863-881).
gtggacaggcgcataagga

SEQ ID NO: 407070 - DNA, 19 bp, Homo sapiens
  siRNA target sequence for AMOTL1 (NM_130847.1,917-935).
gctcgctcagcgagagaat

SEQ ID NO: 407071 - DNA, 19 bp, Homo sapiens
  siRNA target sequence for AMOTL1 (NM_130847.1,920-938).
cgctcagcgagagaatcat

SEQ ID NO: 407072 - DNA, 19 bp, Homo sapiens
  siRNA target sequence for AMOTL1 (NM_130847.1,1121-1139).
cccaggagcacggactttt

SEQ ID NO: 407073 - DNA, 19 bp, Homo sapiens
  siRNA target sequence for AMOTL1 (NM_130847.1,1122-1140).
ccaggagcacggacttttt

SEQ ID NO: 407074 - DNA, 19 bp, Homo sapiens
  siRNA target sequence for AMOTL1 (NM_130847.1,1123-1141).
caggagcacggactttttt

SEQ ID NO: 407075 - DNA, 19 bp, Homo sapiens
  siRNA target sequence for AMOTL1 (NM_130847.1,1128-1146).
gcacggacttttttatggt

SEQ ID NO: 407076 - DNA, 19 bp, Homo sapiens
  siRNA target sequence for AMOTL1 (NM_130847.1,1538-1556).
ccgacaagctccacaagtt

SEQ ID NO: 407077 - DNA, 19 bp, Homo sapiens
  siRNA target sequence for AMOTL1 (NM_130847.1,1539-1557).
cgacaagctccacaagttt

SEQ ID NO: 407078 - DNA, 19 bp, Homo sapiens
  siRNA target sequence for AMOTL1 (NM_130847.1,1659-1677).
cgagattagaagacttcat

SEQ ID NO: 407079 - DNA, 19 bp, Homo sapiens
  siRNA target sequence for AMOTL1 (NM_130847.1,1947-1965).
gcaagcatatgttgagaaa

SEQ ID NO: 407080 - DNA, 19 bp, Homo sapiens
  siRNA target sequence for AMOTL1 (NM_130847.1,2009-2027).
gtgagaagcgagaacagat

SEQ ID NO: 407081 - DNA, 19 bp, Homo sapiens
  siRNA target sequence for AMOTL1 (NM_130847.1,2107-2125).
gccaacatgccggaataca

SEQ ID NO: 407082 - DNA, 19 bp, Homo sapiens
  siRNA target sequence for AMOTL1 (NM_130847.1,2108-2126).
ccaacatgccggaatacaa

SEQ ID NO: 407083 - DNA, 19 bp, Homo sapiens
  siRNA target sequence for AMOTL1 (NM_130847.1,2109-2127).
caacatgccggaatacaat

SEQ ID NO: 407084 - DNA, 19 bp, Homo sapiens
  siRNA target sequence for AMOTL1 (NM_130847.1,2232-2250).
ccgacactttgccatgaat

SEQ ID NO: 407085 - DNA, 19 bp, Homo sapiens
  siRNA target sequence for AMOTL1 (NM_130847.1,2276-2294).
gggacaccacgatcatcaa

SEQ ID NO: 407086 - DNA, 19 bp, Homo sapiens
  siRNA target sequence for AMOTL1 (NM_130847.1,2386-2404).
caggacatggaatacacta

SEQ ID NO: 407087 - DNA, 19 bp, Homo sapiens
  siRNA target sequence for AMOTL1 (NM_130847.1,2391-2409).
catggaatacactattaaa

SEQ ID NO: 407088 - DNA, 19 bp, Homo sapiens
  siRNA target sequence for AMOTL1 (NM_130847.1,2416-2434).
catgccaaaatcatagaga

SEQ ID NO: 407089 - DNA, 19 bp, Homo sapiens
  siRNA target sequence for AMOTL1 (NM_130847.1,2457-2475).
gcagcagcgatctcgtaaa

SEQ ID NO: 407090 - DNA, 19 bp, Homo sapiens
  siRNA target sequence for AMOTL1 (NM_130847.1,2460-2478).
gcagcgatctcgtaaagat

SEQ ID NO: 407091 - DNA, 19 bp, Homo sapiens
  siRNA target sequence for AMOTL1 (NM_130847.1,2615-2633).
ggaaggggagcataggatt

SEQ ID NO: 407092 - DNA, 19 bp, Homo sapiens
  siRNA target sequence for DCNP1 (NM_130848.1,483-501).
gcgagagggggcagttcaa

SEQ ID NO: 407093 - DNA, 19 bp, Homo sapiens
  siRNA target sequence for DCNP1 (NM_130848.1,625-643).
cggaaacatctggtttgta

SEQ ID NO: 407094 - DNA, 19 bp, Homo sapiens
  siRNA target sequence for DCNP1 (NM_130848.1,700-718).
gccctgtaccaagttttta

SEQ ID NO: 407095 - DNA, 19 bp, Homo sapiens
  siRNA target sequence for DCNP1 (NM_130848.1,845-863).
cctggtcttcgcacttgat

SEQ ID NO: 407096 - DNA, 19 bp, Homo sapiens
  siRNA target sequence for DCNP1 (NM_130848.1,846-864).
ctggtcttcgcacttgata

SEQ ID NO: 407097 - DNA, 19 bp, Homo sapiens
  siRNA target sequence for DCNP1 (NM_130848.1,849-867).
gtcttcgcacttgatatca

SEQ ID NO: 407098 - DNA, 19 bp, Homo sapiens
  siRNA target sequence for DCNP1 (NM_130848.1,851-869).
cttcgcacttgatatcact

SEQ ID NO: 407099 - DNA, 19 bp, Homo sapiens
  siRNA target sequence for MGC26988 (NM_130899.1,111-129).
gagcaatgaatcttgttta

SEQ ID NO: 407100 - DNA, 19 bp, Homo sapiens
  siRNA target sequence for MGC26988 (NM_130899.1,143-161).
cccacagctactcttcaat

SEQ ID NO: 407101 - DNA, 19 bp, Homo sapiens
  siRNA target sequence for MGC26988 (NM_130899.1,147-165).
cagctactcttcaatgagt

SEQ ID NO: 407102 - DNA, 19 bp, Homo sapiens
  siRNA target sequence for MGC26988 (NM_130899.1,187-205).
gacctgcaacgacaattgt

SEQ ID NO: 407103 - DNA, 19 bp, Homo sapiens
  siRNA target sequence for MGC26988 (NM_130899.1,239-257).
caccaatgttcgagagtaa

SEQ ID NO: 407104 - DNA, 19 bp, Homo sapiens
  siRNA target sequence for MGC26988 (NM_130899.1,468-486).
gagactgcttcccttgaaa

SEQ ID NO: 407105 - DNA, 19 bp, Homo sapiens
  siRNA target sequence for MGC26988 (NM_130899.1,500-518).
ccatccacgatcatgagaa

SEQ ID NO: 407106 - DNA, 19 bp, Homo sapiens
  siRNA target sequence for MGC26988 (NM_130899.1,501-519).
catccacgatcatgagaaa

SEQ ID NO: 407107 - DNA, 19 bp, Homo sapiens
  siRNA target sequence for MGC26988 (NM_130899.1,540-558).
cgccactggccgtactttt

SEQ ID NO: 407108 - DNA, 19 bp, Homo sapiens
  siRNA target sequence for MGC26988 (NM_130899.1,545-563).
ctggccgtactttttatct

SEQ ID NO: 407109 - DNA, 19 bp, Homo sapiens
  siRNA target sequence for MGC26988 (NM_130899.1,590-608).
gggaagatctcttttgcta

SEQ ID NO: 407110 - DNA, 19 bp, Homo sapiens
  siRNA target sequence for MGC26988 (NM_130899.1,611-629).
gggaaaaacttgtctatct

SEQ ID NO: 407111 - DNA, 19 bp, Homo sapiens
  siRNA target sequence for MGC26988 (NM_130899.1,637-655).
ccaccagtagagagttact

SEQ ID NO: 407112 - DNA, 19 bp, Homo sapiens
  siRNA target sequence for MGC26988 (NM_130899.1,686-704).
caccacccgaagacaacaa

SEQ ID NO: 407113 - DNA, 19 bp, Homo sapiens
  siRNA target sequence for MGC26988 (NM_130899.1,688-706).
ccacccgaagacaacaaaa

SEQ ID NO: 407114 - DNA, 19 bp, Homo sapiens
  siRNA target sequence for MGC26988 (NM_130899.1,746-764).
gtgagactgggctctacaa

SEQ ID NO: 407115 - DNA, 19 bp, Homo sapiens
  siRNA target sequence for MGC26988 (NM_130899.1,759-777).
ctacaagccttgtgatgta

SEQ ID NO: 407116 - DNA, 19 bp, Homo sapiens
  siRNA target sequence for MGC26988 (NM_130899.1,988-1006).
ggtgctatgagcatagcaa

SEQ ID NO: 407117 - DNA, 19 bp, Homo sapiens
  siRNA target sequence for MGC26988 (NM_130899.1,1047-1065).
ggcgggagcagctatcaaa

SEQ ID NO: 407118 - DNA, 19 bp, Homo sapiens
  siRNA target sequence for MGC26988 (NM_130899.1,1049-1067).
cgggagcagctatcaaaaa

SEQ ID NO: 407119 - DNA, 19 bp, Homo sapiens
  siRNA target sequence for MGC26988 (NM_130899.1,1098-1116).
ggcaggtgctgccaacata

SEQ ID NO: 407120 - DNA, 19 bp, Homo sapiens
  siRNA target sequence for MGC26988 (NM_130899.1,1099-1117).
gcaggtgctgccaacatat

SEQ ID NO: 407121 - DNA, 19 bp, Homo sapiens
  siRNA target sequence for MGC26988 (NM_130899.1,1102-1120).
ggtgctgccaacatatcct

SEQ ID NO: 407122 - DNA, 19 bp, Homo sapiens
  siRNA target sequence for MGC26988 (NM_130899.1,1230-1248).
ggcgtttgcaggcagtatt

SEQ ID NO: 407123 - DNA, 19 bp, Homo sapiens
  siRNA target sequence for MGC26988 (NM_130899.1,1231-1249).
gcgtttgcaggcagtatta

SEQ ID NO: 407124 - DNA, 19 bp, Homo sapiens
  siRNA target sequence for MGC26988 (NM_130899.1,1315-1333).
caaagcgaaggctacatga

SEQ ID NO: 407125 - DNA, 19 bp, Homo sapiens
  siRNA target sequence for MGC26988 (NM_130899.1,1512-1530).
gtccgcatctggccataaa

SEQ ID NO: 407126 - DNA, 19 bp, Homo sapiens
  siRNA target sequence for MGC26988 (NM_130899.1,1733-1751).
gggccactcctggttcaaa

SEQ ID NO: 407127 - DNA, 19 bp, Homo sapiens
  siRNA target sequence for MGC26988 (NM_130899.1,1735-1753).
gccactcctggttcaaaaa

SEQ ID NO: 407128 - DNA, 19 bp, Homo sapiens
  siRNA target sequence for MGC26988 (NM_130899.1,1737-1755).
cactcctggttcaaaaaca

SEQ ID NO: 407129 - DNA, 19 bp, Homo sapiens
  siRNA target sequence for MGC26988 (NM_130899.1,1768-1786).
catgacagagaggtagata

SEQ ID NO: 407130 - DNA, 19 bp, Homo sapiens
  siRNA target sequence for MGC26988 (NM_130899.1,1863-1881).
gatcagtggcactatgaca

SEQ ID NO: 407131 - DNA, 19 bp, Homo sapiens
  siRNA target sequence for MGC26988 (NM_130899.1,1892-1910).
cggagatgatcgtctttga

SEQ ID NO: 407132 - DNA, 19 bp, Homo sapiens
  siRNA target sequence for C15orf16 (NM_130901.1,266-284).
ccgctctgagcgactatga

SEQ ID NO: 407133 - DNA, 19 bp, Homo sapiens
  siRNA target sequence for C15orf16 (NM_130901.1,315-333).
gccacatgtgttcaatgaa

SEQ ID NO: 407134 - DNA, 19 bp, Homo sapiens
  siRNA target sequence for C15orf16 (NM_130901.1,523-541).
ctggagatgccaatctaca

SEQ ID NO: 407135 - DNA, 19 bp, Homo sapiens
  siRNA target sequence for C15orf16 (NM_130901.1,526-544).
gagatgccaatctacacat

SEQ ID NO: 407136 - DNA, 19 bp, Homo sapiens
  siRNA target sequence for C15orf16 (NM_130901.1,563-581).
gcgtgtacagcgaggattt

SEQ ID NO: 407137 - DNA, 19 bp, Homo sapiens
  siRNA target sequence for C15orf16 (NM_130901.1,711-729).
ggatgggaactgcctttta

SEQ ID NO: 407138 - DNA, 19 bp, Homo sapiens
  siRNA target sequence for C15orf16 (NM_130901.1,777-795).
gttacggaaagctctctat

SEQ ID NO: 407139 - DNA, 19 bp, Homo sapiens
  siRNA target sequence for C15orf16 (NM_130901.1,787-805).
gctctctataccatgatga

SEQ ID NO: 407140 - DNA, 19 bp, Homo sapiens
  siRNA target sequence for C15orf16 (NM_130901.1,1023-1041).
cctagcccatatattaaga

SEQ ID NO: 407141 - DNA, 19 bp, Homo sapiens
  siRNA target sequence for C15orf16 (NM_130901.1,1024-1042).
ctagcccatatattaagaa

SEQ ID NO: 407142 - DNA, 19 bp, Homo sapiens
  siRNA target sequence for C15orf16 (NM_130901.1,1040-1058).
gaaggcccatcgttgttgt

SEQ ID NO: 407143 - DNA, 19 bp, Homo sapiens
  siRNA target sequence for C15orf16 (NM_130901.1,1050-1068).
cgttgttgtggcagataca

SEQ ID NO: 407144 - DNA, 19 bp, Homo sapiens
  siRNA target sequence for C15orf16 (NM_130901.1,1054-1072).
gttgtggcagatacaatgt

SEQ ID NO: 407145 - DNA, 19 bp, Homo sapiens
  siRNA target sequence for C15orf16 (NM_130901.1,1325-1343).
ggaaagacgacaacgataa

SEQ ID NO: 407146 - DNA, 19 bp, Homo sapiens
  siRNA target sequence for C15orf16 (NM_130901.1,1528-1546).
gattcggtgtgcagcaatt

SEQ ID NO: 407147 - DNA, 19 bp, Homo sapiens
  siRNA target sequence for C15orf16 (NM_130901.1,1918-1936).
ggcgacgcctggaagtaca

SEQ ID NO: 407148 - DNA, 19 bp, Homo sapiens
  siRNA target sequence for C15orf16 (NM_130901.1,1981-1999).
cagggggagcgcaagttca

SEQ ID NO: 407149 - DNA, 19 bp, Homo sapiens
  siRNA target sequence for C15orf16 (NM_130901.1,1984-2002).
ggggagcgcaagttcatct

SEQ ID NO: 407150 - DNA, 19 bp, Homo sapiens
  siRNA target sequence for C15orf16 (NM_130901.1,1985-2003).
gggagcgcaagttcatctt

SEQ ID NO: 407151 - DNA, 19 bp, Homo sapiens
  siRNA target sequence for COX7B2 (NM_130902.1,186-204).
caaagcatggcaagacata

SEQ ID NO: 407152 - DNA, 19 bp, Homo sapiens
  siRNA target sequence for COX7B2 (NM_130902.1,195-213).
gcaagacatagccatgtaa

SEQ ID NO: 407153 - DNA, 19 bp, Homo sapiens
  siRNA target sequence for COX7B2 (NM_130902.1,196-214).
caagacatagccatgtaaa

SEQ ID NO: 407154 - DNA, 19 bp, Homo sapiens
  siRNA target sequence for COX7B2 (NM_130902.1,199-217).
gacatagccatgtaaaaca

SEQ ID NO: 407155 - DNA, 19 bp, Homo sapiens
  siRNA target sequence for COX7B2 (NM_130902.1,201-219).
catagccatgtaaaacact

SEQ ID NO: 407156 - DNA, 19 bp, Homo sapiens
  siRNA target sequence for COX7B2 (NM_130902.1,218-236).
ctcaccagattttcatgat

SEQ ID NO: 407157 - DNA, 19 bp, Homo sapiens
  siRNA target sequence for COX7B2 (NM_130902.1,279-297).
gttgctacatgggtgttta

SEQ ID NO: 407158 - DNA, 19 bp, Homo sapiens
  siRNA target sequence for COX7B2 (NM_130902.1,350-368).
cccaaaagagtggaaacat

SEQ ID NO: 407159 - DNA, 19 bp, Homo sapiens
  siRNA target sequence for WIRE (NM_133264.2,78-96).
gcccaagctgagtagagat

SEQ ID NO: 407160 - DNA, 19 bp, Homo sapiens
  siRNA target sequence for WIRE (NM_133264.2,115-133).
gccctcttacaggacattt

SEQ ID NO: 407161 - DNA, 19 bp, Homo sapiens
  siRNA target sequence for WIRE (NM_133264.2,153-171).
gaaggtgaccaacattaat

SEQ ID NO: 407162 - DNA, 19 bp, Homo sapiens
  siRNA target sequence for WIRE (NM_133264.2,396-414).
gcgtcctcaggatgataca

SEQ ID NO: 407163 - DNA, 19 bp, Homo sapiens
  siRNA target sequence for WIRE (NM_133264.2,472-490).
gacctctctcggcctaata

SEQ ID NO: 407164 - DNA, 19 bp, Homo sapiens
  siRNA target sequence for WIRE (NM_133264.2,697-715).
cctccttcccctgtgaata

SEQ ID NO: 407165 - DNA, 19 bp, Homo sapiens
  siRNA target sequence for WIRE (NM_133264.2,794-812).
cctctagccccactaatga

SEQ ID NO: 407166 - DNA, 19 bp, Homo sapiens
  siRNA target sequence for WIRE (NM_133264.2,829-847).
ccacagagacacaattctt

SEQ ID NO: 407167 - DNA, 19 bp, Homo sapiens
  siRNA target sequence for WIRE (NM_133264.2,834-852).
gagacacaattctttgcat

SEQ ID NO: 407168 - DNA, 19 bp, Homo sapiens
  siRNA target sequence for WIRE (NM_133264.2,909-927).
cccatctttactgagtaat

SEQ ID NO: 407169 - DNA, 19 bp, Homo sapiens
  siRNA target sequence for WIRE (NM_133264.2,1137-1155).
gaatggccacagagattct

SEQ ID NO: 407170 - DNA, 19 bp, Homo sapiens
  siRNA target sequence for WIRE (NM_133264.2,1160-1178).
ccactgtccggtctttctt

SEQ ID NO: 407171 - DNA, 19 bp, Homo sapiens
  siRNA target sequence for WIRE (NM_133264.2,1231-1249).
ccagaagaatataaacact

SEQ ID NO: 407172 - DNA, 19 bp, Homo sapiens
  siRNA target sequence for AMOT (NM_133265.1,981-999).
gcgtctcggaggcatatga

SEQ ID NO: 407173 - DNA, 19 bp, Homo sapiens
  siRNA target sequence for AMOT (NM_133265.1,983-1001).
gtctcggaggcatatgaga

SEQ ID NO: 407174 - DNA, 19 bp, Homo sapiens
  siRNA target sequence for AMOT (NM_133265.1,1009-1027).
gaagtcatcctccaaaaga

SEQ ID NO: 407175 - DNA, 19 bp, Homo sapiens
  siRNA target sequence for AMOT (NM_133265.1,1073-1091).
cggaggatgcatgatttca

SEQ ID NO: 407176 - DNA, 19 bp, Homo sapiens
  siRNA target sequence for AMOT (NM_133265.1,1074-1092).
ggaggatgcatgatttcaa

SEQ ID NO: 407177 - DNA, 19 bp, Homo sapiens
  siRNA target sequence for AMOT (NM_133265.1,1271-1289).
caaagacgacacatcgaaa

SEQ ID NO: 407178 - DNA, 19 bp, Homo sapiens
  siRNA target sequence for AMOT (NM_133265.1,1293-1311).
gagatcaggccctgagtaa

SEQ ID NO: 407179 - DNA, 19 bp, Homo sapiens
  siRNA target sequence for AMOT (NM_133265.1,1518-1536).
ccaacgtttcagaatacaa

SEQ ID NO: 407180 - DNA, 19 bp, Homo sapiens
  siRNA target sequence for AMOT (NM_133265.1,1519-1537).
caacgtttcagaatacaat

SEQ ID NO: 407181 - DNA, 19 bp, Homo sapiens
  siRNA target sequence for AMOT (NM_133265.1,1712-1730).
cctaacaccagctatgaca

SEQ ID NO: 407182 - DNA, 19 bp, Homo sapiens
  siRNA target sequence for AMOT (NM_133265.1,1796-1814).
gacatggagggcaggatta

SEQ ID NO: 407183 - DNA, 19 bp, Homo sapiens
  siRNA target sequence for AMOT (NM_133265.1,1823-1841).
catgcccagattattgaga

SEQ ID NO: 407184 - DNA, 19 bp, Homo sapiens
  siRNA target sequence for AMOT (NM_133265.1,1843-1861).
ggatgccatgatcaaagta

SEQ ID NO: 407185 - DNA, 19 bp, Homo sapiens
  siRNA target sequence for AMOT (NM_133265.1,2174-2192).
gggacggaatcgaacaaaa

SEQ ID NO: 407186 - DNA, 19 bp, Homo sapiens
  siRNA target sequence for AMOT (NM_133265.1,2176-2194).
gacggaatcgaacaaaact

SEQ ID NO: 407187 - DNA, 19 bp, Homo sapiens
  siRNA target sequence for AMOT (NM_133265.1,2670-2688).
gtcctggaccacatcgttt

SEQ ID NO: 407188 - DNA, 19 bp, Homo sapiens
  siRNA target sequence for AMOT (NM_133265.1,2676-2694).
gaccacatcgtttgtctat

SEQ ID NO: 407189 - DNA, 19 bp, Homo sapiens
  siRNA target sequence for AMOT (NM_133265.1,2681-2699).
catcgtttgtctataccaa

SEQ ID NO: 407190 - DNA, 19 bp, Homo sapiens
  siRNA target sequence for AMOT (NM_133265.1,2685-2703).
gtttgtctataccaagttt

SEQ ID NO: 407191 - DNA, 19 bp, Homo sapiens
  siRNA target sequence for AMOT (NM_133265.1,2704-2722).
gacctgcaatccagacaaa

SEQ ID NO: 407192 - DNA, 19 bp, Homo sapiens
  siRNA target sequence for MYOZ3 (NM_133371.2,324-342).
ctgtcactacgcaacaaca

SEQ ID NO: 407193 - DNA, 19 bp, Homo sapiens
  siRNA target sequence for MYOZ3 (NM_133371.2,372-390).
cgccgtgtgcagaagttca

SEQ ID NO: 407194 - DNA, 19 bp, Homo sapiens
  siRNA target sequence for MYOZ3 (NM_133371.2,765-783).
cccaacgactaccgaaatt

SEQ ID NO: 407195 - DNA, 19 bp, Homo sapiens
  siRNA target sequence for MYOZ3 (NM_133371.2,766-784).
ccaacgactaccgaaattt

SEQ ID NO: 407196 - DNA, 19 bp, Homo sapiens
  siRNA target sequence for MYOZ3 (NM_133371.2,771-789).
gactaccgaaatttcaaca

SEQ ID NO: 407197 - DNA, 19 bp, Homo sapiens
  siRNA target sequence for MYOZ3 (NM_133371.2,791-809).
gaccccggtgccatttgga

SEQ ID NO: 407198 - DNA, 19 bp, Homo sapiens
  siRNA target sequence for GAGED2 (NM_133431.1,238-256).
ctcgtcacggccataacta

SEQ ID NO: 407199 - DNA, 19 bp, Homo sapiens
  siRNA target sequence for IDN3 (NM_133433.1,6785-6803).
cacttcagggtcattgaga

SEQ ID NO: 407200 - DNA, 19 bp, Homo sapiens
  siRNA target sequence for IDN3 (NM_133433.1,6870-6888).
gatgtcatcgctatttgct

SEQ ID NO: 407201 - DNA, 19 bp, Homo sapiens
  siRNA target sequence for IDN3 (NM_133433.1,6880-6898).
ctatttgctgtccaaagta

SEQ ID NO: 407202 - DNA, 19 bp, Homo sapiens
  siRNA target sequence for IDN3 (NM_133433.1,6886-6904).
gctgtccaaagtacaaaga

SEQ ID NO: 407203 - DNA, 19 bp, Homo sapiens
  siRNA target sequence for IDN3 (NM_133433.1,6903-6921).
gatcgaccacaaattgcaa

SEQ ID NO: 407204 - DNA, 19 bp, Homo sapiens
  siRNA target sequence for IDN3 (NM_133433.1,7030-7048).
gggtagacactattaaaga

SEQ ID NO: 407205 - DNA, 19 bp, Homo sapiens
  siRNA target sequence for IDN3 (NM_133433.1,7032-7050).
gtagacactattaaagagt

SEQ ID NO: 407206 - DNA, 19 bp, Homo sapiens
  siRNA target sequence for IDN3 (NM_133433.1,7074-7092).
gctctaacgagtgctaata

SEQ ID NO: 407207 - DNA, 19 bp, Homo sapiens
  siRNA target sequence for IDN3 (NM_133433.1,7075-7093).
ctctaacgagtgctaataa

SEQ ID NO: 407208 - DNA, 19 bp, Homo sapiens
  siRNA target sequence for IDN3 (NM_133433.1,7094-7112).
gctgactaataaagttgtt

SEQ ID NO: 407209 - DNA, 19 bp, Homo sapiens
  siRNA target sequence for IDN3 (NM_133433.1,7107-7125).
gttgttcagactttacgat

SEQ ID NO: 407210 - DNA, 19 bp, Homo sapiens
  siRNA target sequence for EMU1 (NM_133455.1,121-139).
gtgacccgcaccatctcat

SEQ ID NO: 407211 - DNA, 19 bp, Homo sapiens
  siRNA target sequence for EMU1 (NM_133455.1,226-244).
gtggtgagacccacataca

SEQ ID NO: 407212 - DNA, 19 bp, Homo sapiens
  siRNA target sequence for EMU1 (NM_133455.1,236-254).
ccacatacaaggtgatgta

SEQ ID NO: 407213 - DNA, 19 bp, Homo sapiens
  siRNA target sequence for EMU1 (NM_133455.1,243-261).
caaggtgatgtacaagata

SEQ ID NO: 407214 - DNA, 19 bp, Homo sapiens
  siRNA target sequence for EMU1 (NM_133455.1,403-421).
ctcaactgcagcaaagtgt

SEQ ID NO: 407215 - DNA, 19 bp, Homo sapiens
  siRNA target sequence for EMU1 (NM_133455.1,462-480).
gaccatgctgactgtcata

SEQ ID NO: 407216 - DNA, 19 bp, Homo sapiens
  siRNA target sequence for EMU1 (NM_133455.1,1135-1153).
cgcgaggctttgaagattt

SEQ ID NO: 407217 - DNA, 19 bp, Homo sapiens
  siRNA target sequence for EMU1 (NM_133455.1,1137-1155).
cgaggctttgaagatttta

SEQ ID NO: 407218 - DNA, 19 bp, Homo sapiens
  siRNA target sequence for EMU1 (NM_133455.1,1181-1199).
caatgattgggctctatga

SEQ ID NO: 407219 - DNA, 19 bp, Homo sapiens
  siRNA target sequence for APXL2 (NM_133456.1,1087-1105).
gcgcttcaggcgaagtctt

SEQ ID NO: 407220 - DNA, 19 bp, Homo sapiens
  siRNA target sequence for APXL2 (NM_133456.1,1350-1368).
gccccactggtcagaatga

SEQ ID NO: 407221 - DNA, 19 bp, Homo sapiens
  siRNA target sequence for APXL2 (NM_133456.1,1582-1600).
ccactgggactgcaaatga

SEQ ID NO: 407222 - DNA, 19 bp, Homo sapiens
  siRNA target sequence for APXL2 (NM_133456.1,1585-1603).
ctgggactgcaaatgataa

SEQ ID NO: 407223 - DNA, 19 bp, Homo sapiens
  siRNA target sequence for APXL2 (NM_133456.1,1587-1605).
gggactgcaaatgataaca

SEQ ID NO: 407224 - DNA, 19 bp, Homo sapiens
  siRNA target sequence for APXL2 (NM_133456.1,1588-1606).
ggactgcaaatgataacat

SEQ ID NO: 407225 - DNA, 19 bp, Homo sapiens
  siRNA target sequence for APXL2 (NM_133456.1,1694-1712).
gggactttcaggcaatgat

SEQ ID NO: 407226 - DNA, 19 bp, Homo sapiens
  siRNA target sequence for APXL2 (NM_133456.1,1695-1713).
ggactttcaggcaatgata

SEQ ID NO: 407227 - DNA, 19 bp, Homo sapiens
  siRNA target sequence for APXL2 (NM_133456.1,1811-1829).
ggagctggccagattagat

SEQ ID NO: 407228 - DNA, 19 bp, Homo sapiens
  siRNA target sequence for APXL2 (NM_133456.1,1974-1992).
gagccagggtcctatcagt

SEQ ID NO: 407229 - DNA, 19 bp, Homo sapiens
  siRNA target sequence for APXL2 (NM_133456.1,2086-2104).
ggctccctgcaccaaacaa

SEQ ID NO: 407230 - DNA, 19 bp, Homo sapiens
  siRNA target sequence for COL26A1 (NM_133457.1,266-284).
gcgccaacctcgtaagtta

SEQ ID NO: 407231 - DNA, 19 bp, Homo sapiens
  siRNA target sequence for COL26A1 (NM_133457.1,268-286).
gccaacctcgtaagttaca

SEQ ID NO: 407232 - DNA, 19 bp, Homo sapiens
  siRNA target sequence for COL26A1 (NM_133457.1,379-397).
gatgaggaatgcatgaact

SEQ ID NO: 407233 - DNA, 19 bp, Homo sapiens
  siRNA target sequence for CITED4 (NM_133467.2,611-629).
gcatggacgccgaactcat

SEQ ID NO: 407234 - DNA, 19 bp, Homo sapiens
  siRNA target sequence for GEFT (NM_133483.1,397-415).
gagggccctggagataaga

SEQ ID NO: 407235 - DNA, 19 bp, Homo sapiens
  siRNA target sequence for GEFT (NM_133483.1,507-525).
gagtgaactggtagaaaca

SEQ ID NO: 407236 - DNA, 19 bp, Homo sapiens
  siRNA target sequence for GEFT (NM_133483.1,613-631).
ggccgtgacaggattgtgt

SEQ ID NO: 407237 - DNA, 19 bp, Homo sapiens
  siRNA target sequence for GEFT (NM_133483.1,634-652).
gggaatatccagcaaatct

SEQ ID NO: 407238 - DNA, 19 bp, Homo sapiens
  siRNA target sequence for GEFT (NM_133483.1,655-673).
gagtggcaccgagactatt

SEQ ID NO: 407239 - DNA, 19 bp, Homo sapiens
  siRNA target sequence for GEFT (NM_133483.1,684-702).
gctacaacggtgtctgaaa

SEQ ID NO: 407240 - DNA, 19 bp, Homo sapiens
  siRNA target sequence for GEFT (NM_133483.1,760-778).
gtggtgtactgtcagaata

SEQ ID NO: 407241 - DNA, 19 bp, Homo sapiens
  siRNA target sequence for GEFT (NM_133483.1,864-882).
gaacgacctcctcatcaaa

SEQ ID NO: 407242 - DNA, 19 bp, Homo sapiens
  siRNA target sequence for GEFT (NM_133483.1,886-904).
gtgcagcggatcatgaaat

SEQ ID NO: 407243 - DNA, 19 bp, Homo sapiens
  siRNA target sequence for GEFT (NM_133483.1,1000-1018).
cccaagcgctgcaacgata

SEQ ID NO: 407244 - DNA, 19 bp, Homo sapiens
  siRNA target sequence for GEFT (NM_133483.1,1001-1019).
ccaagcgctgcaacgatat

SEQ ID NO: 407245 - DNA, 19 bp, Homo sapiens
  siRNA target sequence for GEFT (NM_133483.1,1042-1060).
ggatttgagggcaaactga

SEQ ID NO: 407246 - DNA, 19 bp, Homo sapiens
  siRNA target sequence for GEFT (NM_133483.1,1622-1640).
ccctcttgccactggataa

SEQ ID NO: 407247 - DNA, 19 bp, Homo sapiens
  siRNA target sequence for GEFT (NM_133483.1,1623-1641).
cctcttgccactggataaa

SEQ ID NO: 407248 - DNA, 19 bp, Homo sapiens
  siRNA target sequence for ASAH3 (NM_133492.1,159-177).
gaagcgctcccgctacatt

SEQ ID NO: 407249 - DNA, 19 bp, Homo sapiens
  siRNA target sequence for ASAH3 (NM_133492.1,164-182).
gctcccgctacatttacgt

SEQ ID NO: 407250 - DNA, 19 bp, Homo sapiens
  siRNA target sequence for ASAH3 (NM_133492.1,165-183).
ctcccgctacatttacgtt

SEQ ID NO: 407251 - DNA, 19 bp, Homo sapiens
  siRNA target sequence for ASAH3 (NM_133492.1,209-227).
gcctgttctccatgtattt

SEQ ID NO: 407252 - DNA, 19 bp, Homo sapiens
  siRNA target sequence for ASAH3 (NM_133492.1,288-306).
gggcagtggctatagcata

SEQ ID NO: 407253 - DNA, 19 bp, Homo sapiens
  siRNA target sequence for ASAH3 (NM_133492.1,289-307).
ggcagtggctatagcatat

SEQ ID NO: 407254 - DNA, 19 bp, Homo sapiens
  siRNA target sequence for ASAH3 (NM_133492.1,344-362).
ggaacaggtcccagttcat

SEQ ID NO: 407255 - DNA, 19 bp, Homo sapiens
  siRNA target sequence for ASAH3 (NM_133492.1,520-538).
gaggtctccgtggttttat

SEQ ID NO: 407256 - DNA, 19 bp, Homo sapiens
  siRNA target sequence for SLC30A7 (NM_133496.2,190-208).
gttgcccctgtccatcaaa

SEQ ID NO: 407257 - DNA, 19 bp, Homo sapiens
  siRNA target sequence for SLC30A7 (NM_133496.2,224-242).
ccacccaagttcaatttgt

SEQ ID NO: 407258 - DNA, 19 bp, Homo sapiens
  siRNA target sequence for SLC30A7 (NM_133496.2,225-243).
cacccaagttcaatttgtt

SEQ ID NO: 407259 - DNA, 19 bp, Homo sapiens
  siRNA target sequence for SLC30A7 (NM_133496.2,256-274).
gggctggtttaggtctata

SEQ ID NO: 407260 - DNA, 19 bp, Homo sapiens
  siRNA target sequence for SLC30A7 (NM_133496.2,258-276).
gctggtttaggtctatact

SEQ ID NO: 407261 - DNA, 19 bp, Homo sapiens
  siRNA target sequence for SLC30A7 (NM_133496.2,333-351).
cttttgtggaactactcta

SEQ ID NO: 407262 - DNA, 19 bp, Homo sapiens
  siRNA target sequence for SLC30A7 (NM_133496.2,364-382).
caactgcttaggcttgatt

SEQ ID NO: 407263 - DNA, 19 bp, Homo sapiens
  siRNA target sequence for SLC30A7 (NM_133496.2,384-402).
ccgactcttttcacatgtt

SEQ ID NO: 407264 - DNA, 19 bp, Homo sapiens
  siRNA target sequence for SLC30A7 (NM_133496.2,385-403).
cgactcttttcacatgttt

SEQ ID NO: 407265 - DNA, 19 bp, Homo sapiens
  siRNA target sequence for SLC30A7 (NM_133496.2,434-452).
gcagcttctgttatttcaa

SEQ ID NO: 407266 - DNA, 19 bp, Homo sapiens
  siRNA target sequence for SLC30A7 (NM_133496.2,515-533).
gtcaatggcctatttttga

SEQ ID NO: 407267 - DNA, 19 bp, Homo sapiens
  siRNA target sequence for SLC30A7 (NM_133496.2,521-539).
ggcctatttttgatcttca

SEQ ID NO: 407268 - DNA, 19 bp, Homo sapiens
  siRNA target sequence for SLC30A7 (NM_133496.2,630-648).
ggtttgtggtaaacctaat

SEQ ID NO: 407269 - DNA, 19 bp, Homo sapiens
  siRNA target sequence for SLC30A7 (NM_133496.2,637-655).
ggtaaacctaataggaata

SEQ ID NO: 407270 - DNA, 19 bp, Homo sapiens
  siRNA target sequence for SLC30A7 (NM_133496.2,638-656).
gtaaacctaataggaatat

SEQ ID NO: 407271 - DNA, 19 bp, Homo sapiens
  siRNA target sequence for SLC30A7 (NM_133496.2,721-739).
ctttaatggtgctctagat

SEQ ID NO: 407272 - DNA, 19 bp, Homo sapiens
  siRNA target sequence for SLC30A7 (NM_133496.2,746-764).
catggccatgtcgatcatt

SEQ ID NO: 407273 - DNA, 19 bp, Homo sapiens
  siRNA target sequence for SLC30A7 (NM_133496.2,765-783).
gccatagccatgaagtgaa

SEQ ID NO: 407274 - DNA, 19 bp, Homo sapiens
  siRNA target sequence for SLC30A7 (NM_133496.2,766-784).
ccatagccatgaagtgaaa

SEQ ID NO: 407275 - DNA, 19 bp, Homo sapiens
  siRNA target sequence for SLC30A7 (NM_133496.2,839-857).
catgatggcccgtccttaa

SEQ ID NO: 407276 - DNA, 19 bp, Homo sapiens
  siRNA target sequence for SLC30A7 (NM_133496.2,845-863).
ggcccgtccttaaaagaaa

SEQ ID NO: 407277 - DNA, 19 bp, Homo sapiens
  siRNA target sequence for SLC30A7 (NM_133496.2,1010-1028).
gccattcttatagttgtaa

SEQ ID NO: 407278 - DNA, 19 bp, Homo sapiens
  siRNA target sequence for SLC30A7 (NM_133496.2,1072-1090).
gagaactcctcccctatta

SEQ ID NO: 407279 - DNA, 19 bp, Homo sapiens
  siRNA target sequence for SLC30A7 (NM_133496.2,1074-1092).
gaactcctcccctattaga

SEQ ID NO: 407280 - DNA, 19 bp, Homo sapiens
  siRNA target sequence for SLC30A7 (NM_133496.2,1079-1097).
cctcccctattagaaaata

SEQ ID NO: 407281 - DNA, 19 bp, Homo sapiens
  siRNA target sequence for SLC30A7 (NM_133496.2,1127-1145).
cagttgcaaggagtttaca

SEQ ID NO: 407282 - DNA, 19 bp, Homo sapiens
  siRNA target sequence for SLC30A7 (NM_133496.2,1129-1147).
gttgcaaggagtttacagt

SEQ ID NO: 407283 - DNA, 19 bp, Homo sapiens
  siRNA target sequence for SLC30A7 (NM_133496.2,1190-1208).
gttgggaccttgaaattaa

SEQ ID NO: 407284 - DNA, 19 bp, Homo sapiens
  siRNA target sequence for SLC30A7 (NM_133496.2,1194-1212).
ggaccttgaaattaatagt

SEQ ID NO: 407285 - DNA, 19 bp, Homo sapiens
  siRNA target sequence for SLC30A7 (NM_133496.2,1281-1299).
gacagctctacgtacagat

SEQ ID NO: 407286 - DNA, 19 bp, Homo sapiens
  siRNA target sequence for SLC30A7 (NM_133496.2,1286-1304).
ctctacgtacagattgact

SEQ ID NO: 407287 - DNA, 19 bp, Homo sapiens
  siRNA target sequence for SLC30A7 (NM_133496.2,1288-1306).
ctacgtacagattgacttt

SEQ ID NO: 407288 - DNA, 19 bp, Homo sapiens
  siRNA target sequence for C21orf80 (NM_133635.2,1139-1157).
cgcacacgccaggtttttt

SEQ ID NO: 407289 - DNA, 19 bp, Homo sapiens
  siRNA target sequence for C21orf80 (NM_133635.2,1224-1242).
cccaagacgacgtacaaca

SEQ ID NO: 407290 - DNA, 19 bp, Homo sapiens
  siRNA target sequence for C21orf80 (NM_133635.2,1278-1296).
cccacccactggaagatca

SEQ ID NO: 407291 - DNA, 19 bp, Homo sapiens
  siRNA target sequence for NALP4 (NM_134444.1,196-214).
ccctggactgaggtcaaaa

SEQ ID NO: 407292 - DNA, 19 bp, Homo sapiens
  siRNA target sequence for NALP4 (NM_134444.1,197-215).
cctggactgaggtcaaaaa

SEQ ID NO: 407293 - DNA, 19 bp, Homo sapiens
  siRNA target sequence for NALP4 (NM_134444.1,198-216).
ctggactgaggtcaaaaaa

SEQ ID NO: 407294 - DNA, 19 bp, Homo sapiens
  siRNA target sequence for NALP4 (NM_134444.1,201-219).
gactgaggtcaaaaaagca

SEQ ID NO: 407295 - DNA, 19 bp, Homo sapiens
  siRNA target sequence for NALP4 (NM_134444.1,252-270).
gcactatgaagaacaacaa

SEQ ID NO: 407296 - DNA, 19 bp, Homo sapiens
  siRNA target sequence for NALP4 (NM_134444.1,265-283).
caacaagcttggaacataa

SEQ ID NO: 407297 - DNA, 19 bp, Homo sapiens
  siRNA target sequence for NALP4 (NM_134444.1,275-293).
ggaacataaccttaagaat

SEQ ID NO: 407298 - DNA, 19 bp, Homo sapiens
  siRNA target sequence for NALP4 (NM_134444.1,408-426).
caagtctgtcactgagatt

SEQ ID NO: 407299 - DNA, 19 bp, Homo sapiens
  siRNA target sequence for NALP4 (NM_134444.1,468-486).
ccatttggaccgccttttt

SEQ ID NO: 407300 - DNA, 19 bp, Homo sapiens
  siRNA target sequence for NALP4 (NM_134444.1,581-599).
cctggtcggacaacaagat

SEQ ID NO: 407301 - DNA, 19 bp, Homo sapiens
  siRNA target sequence for NALP4 (NM_134444.1,584-602).
ggtcggacaacaagatctt

SEQ ID NO: 407302 - DNA, 19 bp, Homo sapiens
  siRNA target sequence for NALP4 (NM_134444.1,585-603).
gtcggacaacaagatcttt

SEQ ID NO: 407303 - DNA, 19 bp, Homo sapiens
  siRNA target sequence for NALP4 (NM_134444.1,612-630).
gttcctgtacacgttctat

SEQ ID NO: 407304 - DNA, 19 bp, Homo sapiens
  siRNA target sequence for NALP4 (NM_134444.1,665-683).
cgagtttggctgacttgat

SEQ ID NO: 407305 - DNA, 19 bp, Homo sapiens
  siRNA target sequence for NALP4 (NM_134444.1,666-684).
gagtttggctgacttgatt

SEQ ID NO: 407306 - DNA, 19 bp, Homo sapiens
  siRNA target sequence for NALP4 (NM_134444.1,700-718).
gaccccgctgctcctataa

SEQ ID NO: 407307 - DNA, 19 bp, Homo sapiens
  siRNA target sequence for NALP4 (NM_134444.1,702-720).
ccccgctgctcctataaca

SEQ ID NO: 407308 - DNA, 19 bp, Homo sapiens
  siRNA target sequence for NALP4 (NM_134444.1,704-722).
ccgctgctcctataacaga

SEQ ID NO: 407309 - DNA, 19 bp, Homo sapiens
  siRNA target sequence for NALP4 (NM_134444.1,937-955).
caggtgacgatctcagaaa

SEQ ID NO: 407310 - DNA, 19 bp, Homo sapiens
  siRNA target sequence for NALP4 (NM_134444.1,970-988).
ggattcaacgagagtgata

SEQ ID NO: 407311 - DNA, 19 bp, Homo sapiens
  siRNA target sequence for NALP4 (NM_134444.1,975-993).
caacgagagtgataggtta

SEQ ID NO: 407312 - DNA, 19 bp, Homo sapiens
  siRNA target sequence for NALP4 (NM_134444.1,981-999).
gagtgataggttagtgtat

SEQ ID NO: 407313 - DNA, 19 bp, Homo sapiens
  siRNA target sequence for NALP4 (NM_134444.1,985-1003).
gataggttagtgtatttct

SEQ ID NO: 407314 - DNA, 19 bp, Homo sapiens
  siRNA target sequence for NALP4 (NM_134444.1,1040-1058).
ccttcaatcttgtaagaga

SEQ ID NO: 407315 - DNA, 19 bp, Homo sapiens
  siRNA target sequence for NALP4 (NM_134444.1,1115-1133).
ccagtctgaagcaagagat

SEQ ID NO: 407316 - DNA, 19 bp, Homo sapiens
  siRNA target sequence for NALP4 (NM_134444.1,1187-1205).
cctctttcgtctttaacct

SEQ ID NO: 407317 - DNA, 19 bp, Homo sapiens
  siRNA target sequence for NALP4 (NM_134444.1,1292-1310).
ggacagacacatttgagtt

SEQ ID NO: 407318 - DNA, 19 bp, Homo sapiens
  siRNA target sequence for NALP4 (NM_134444.1,1373-1391).
ccaagatacttctgaagta

SEQ ID NO: 407319 - DNA, 19 bp, Homo sapiens
  siRNA target sequence for NALP4 (NM_134444.1,1502-1520).
gatgtgtacaggaattgct

SEQ ID NO: 407320 - DNA, 19 bp, Homo sapiens
  siRNA target sequence for NALP4 (NM_134444.1,1519-1537).
ctagttgccaattttgaaa

SEQ ID NO: 407321 - DNA, 19 bp, Homo sapiens
  siRNA target sequence for NALP4 (NM_134444.1,1541-1559).
caaggagagcacattggat

SEQ ID NO: 407322 - DNA, 19 bp, Homo sapiens
  siRNA target sequence for NALP4 (NM_134444.1,1714-1732).
gattccttggcgatatttt

SEQ ID NO: 407323 - DNA, 19 bp, Homo sapiens
  siRNA target sequence for NALP4 (NM_134444.1,1719-1737).
cttggcgatattttactgt

SEQ ID NO: 407324 - DNA, 19 bp, Homo sapiens
  siRNA target sequence for NALP4 (NM_134444.1,1789-1807).
caagaagctaactttcata

SEQ ID NO: 407325 - DNA, 19 bp, Homo sapiens
  siRNA target sequence for NALP4 (NM_134444.1,1792-1810).
gaagctaactttcatatta

SEQ ID NO: 407326 - DNA, 19 bp, Homo sapiens
  siRNA target sequence for NALP4 (NM_134444.1,1796-1814).
ctaactttcatattattga

SEQ ID NO: 407327 - DNA, 19 bp, Homo sapiens
  siRNA target sequence for NALP4 (NM_134444.1,1837-1855).
gcctactgcttaaaatact

SEQ ID NO: 407328 - DNA, 19 bp, Homo sapiens
  siRNA target sequence for NALP4 (NM_134444.1,1862-1880).
gcttgaggaaactctgttt

SEQ ID NO: 407329 - DNA, 19 bp, Homo sapiens
  siRNA target sequence for NALP4 (NM_134444.1,1883-1901).
ccgttcaaaatgtctttaa

SEQ ID NO: 407330 - DNA, 19 bp, Homo sapiens
  siRNA target sequence for NALP4 (NM_134444.1,2125-2143).
ctctttgaggtgctctttt

SEQ ID NO: 407331 - DNA, 19 bp, Homo sapiens
  siRNA target sequence for NALP4 (NM_134444.1,2248-2266).
gagctagcgctggtaaatt

SEQ ID NO: 407332 - DNA, 19 bp, Homo sapiens
  siRNA target sequence for NALP4 (NM_134444.1,2250-2268).
gctagcgctggtaaattgt

SEQ ID NO: 407333 - DNA, 19 bp, Homo sapiens
  siRNA target sequence for NALP4 (NM_134444.1,2302-2320).
ggccttctaaccaacaaca

SEQ ID NO: 407334 - DNA, 19 bp, Homo sapiens
  siRNA target sequence for NALP4 (NM_134444.1,2303-2321).
gccttctaaccaacaacaa

SEQ ID NO: 407335 - DNA, 19 bp, Homo sapiens
  siRNA target sequence for NALP4 (NM_134444.1,2322-2340).
gaagctgacgtatctgaat

SEQ ID NO: 407336 - DNA, 19 bp, Homo sapiens
  siRNA target sequence for NALP4 (NM_134444.1,2325-2343).
gctgacgtatctgaatgta

SEQ ID NO: 407337 - DNA, 19 bp, Homo sapiens
  siRNA target sequence for NALP4 (NM_134444.1,2326-2344).
ctgacgtatctgaatgtat

SEQ ID NO: 407338 - DNA, 19 bp, Homo sapiens
  siRNA target sequence for NALP4 (NM_134444.1,2399-2417).
cagacacggtcctggtata

SEQ ID NO: 407339 - DNA, 19 bp, Homo sapiens
  siRNA target sequence for NALP4 (NM_134444.1,2487-2505).
caagagcgtgcgctatcta

SEQ ID NO: 407340 - DNA, 19 bp, Homo sapiens
  siRNA target sequence for NALP4 (NM_134444.1,2526-2544).
gaaggacgaaggactgaaa

SEQ ID NO: 407341 - DNA, 19 bp, Homo sapiens
  siRNA target sequence for NALP4 (NM_134444.1,2550-2568).
ctgcgaggccttgaaacat

SEQ ID NO: 407342 - DNA, 19 bp, Homo sapiens
  siRNA target sequence for NALP4 (NM_134444.1,2676-2694).
gcaaattgggtgcaatgaa

SEQ ID NO: 407343 - DNA, 19 bp, Homo sapiens
  siRNA target sequence for NALP4 (NM_134444.1,2677-2695).
caaattgggtgcaatgaaa

SEQ ID NO: 407344 - DNA, 19 bp, Homo sapiens
  siRNA target sequence for NALP4 (NM_134444.1,2741-2759).
cggattgccgcttagagat

SEQ ID NO: 407345 - DNA, 19 bp, Homo sapiens
  siRNA target sequence for NALP4 (NM_134444.1,2742-2760).
ggattgccgcttagagatt

SEQ ID NO: 407346 - DNA, 19 bp, Homo sapiens
  siRNA target sequence for NALP4 (NM_134444.1,2770-2788).
gaagaatgtgggttaacga

SEQ ID NO: 407347 - DNA, 19 bp, Homo sapiens
  siRNA target sequence for NALP4 (NM_134444.1,2928-2946).
ggtgctcgggctgagaaaa

SEQ ID NO: 407348 - DNA, 19 bp, Homo sapiens
  siRNA target sequence for NALP4 (NM_134444.1,2931-2949).
gctcgggctgagaaaaact

SEQ ID NO: 407349 - DNA, 19 bp, Homo sapiens
  siRNA target sequence for NALP4 (NM_134444.1,3022-3040).
gactgtgacacaatcacaa

SEQ ID NO: 407350 - DNA, 19 bp, Homo sapiens
  siRNA target sequence for NALP4 (NM_134444.1,3032-3050).
caatcacaagggtagagat

SEQ ID NO: 407351 - DNA, 19 bp, Homo sapiens
  siRNA target sequence for C6orf25 (NM_138272.1,705-723).
catctatgcagttgtagtt

SEQ ID NO: 407352 - DNA, 19 bp, Homo sapiens
  siRNA target sequence for C6orf25 (NM_138275.1,404-422).
cccatgctccacttgtgaa

SEQ ID NO: 407353 - DNA, 19 bp, Homo sapiens
  siRNA target sequence for BNIPL (NM_138278.1,724-742).
gttctgacctggagataga

SEQ ID NO: 407354 - DNA, 19 bp, Homo sapiens
  siRNA target sequence for BNIPL (NM_138278.1,853-871).
ggctgggccgaggttgtat

SEQ ID NO: 407355 - DNA, 19 bp, Homo sapiens
  siRNA target sequence for BNIPL (NM_138278.1,855-873).
ctgggccgaggttgtatgt

SEQ ID NO: 407356 - DNA, 19 bp, Homo sapiens
  siRNA target sequence for BNIPL (NM_138278.1,875-893).
ggatgtgactggagaagat

SEQ ID NO: 407357 - DNA, 19 bp, Homo sapiens
  siRNA target sequence for BNIPL (NM_138278.1,938-956).
cgtagacatgactgtcatt

SEQ ID NO: 407358 - DNA, 19 bp, Homo sapiens
  siRNA target sequence for BNIPL (NM_138278.1,949-967).
ctgtcattgagccctataa

SEQ ID NO: 407359 - DNA, 19 bp, Homo sapiens
  siRNA target sequence for BNIPL (NM_138278.1,1056-1074).
cccaactacacctatgtca

SEQ ID NO: 407360 - DNA, 19 bp, Homo sapiens
  siRNA target sequence for BNIPL (NM_138278.1,1066-1084).
cctatgtcatggaacactt

SEQ ID NO: 407361 - DNA, 19 bp, Homo sapiens
  siRNA target sequence for BNIPL (NM_138278.1,1186-1204).
gctggatacgtcagtgtta

SEQ ID NO: 407362 - DNA, 19 bp, Homo sapiens
  siRNA target sequence for BNIPL (NM_138278.1,1257-1275).
catgctacatggtatgtga

SEQ ID NO: 407363 - DNA, 19 bp, Homo sapiens
  siRNA target sequence for BNIPL (NM_138278.1,1293-1311).
cttcggcccttcatcagtt

SEQ ID NO: 407364 - DNA, 19 bp, Homo sapiens
  siRNA target sequence for BNIPL (NM_138278.1,1298-1316).
gcccttcatcagttccaaa

SEQ ID NO: 407365 - DNA, 19 bp, Homo sapiens
  siRNA target sequence for BNIPL (NM_138278.1,1299-1317).
cccttcatcagttccaaat

SEQ ID NO: 407366 - DNA, 19 bp, Homo sapiens
  siRNA target sequence for BNIPL (NM_138278.1,1300-1318).
ccttcatcagttccaaatt

SEQ ID NO: 407367 - DNA, 19 bp, Homo sapiens
  siRNA target sequence for BNIPL (NM_138278.1,1321-1339).
cacgaaaaatccgttttct

SEQ ID NO: 407368 - DNA, 19 bp, Homo sapiens
  siRNA target sequence for BNIPL (NM_138279.1,593-611).
ccctggatcggcgagtttt

SEQ ID NO: 407369 - DNA, 19 bp, Homo sapiens
  siRNA target sequence for BNIPL (NM_138279.1,594-612).
cctggatcggcgagtttta

SEQ ID NO: 407370 - DNA, 19 bp, Homo sapiens
  siRNA target sequence for BNIPL (NM_138279.1,595-613).
ctggatcggcgagttttat

SEQ ID NO: 407371 - DNA, 19 bp, Homo sapiens
  siRNA target sequence for CSTL1 (NM_138283.1,377-395).
cactcaacttcttcattca

SEQ ID NO: 407372 - DNA, 19 bp, Homo sapiens
  siRNA target sequence for CSTL1 (NM_138283.1,413-431).
gcaacgacacctacttata

SEQ ID NO: 407373 - DNA, 19 bp, Homo sapiens
  siRNA target sequence for CSTL1 (NM_138283.1,414-432).
caacgacacctacttatat

SEQ ID NO: 407374 - DNA, 19 bp, Homo sapiens
  siRNA target sequence for CSTL1 (NM_138283.1,417-435).
cgacacctacttatatcga

SEQ ID NO: 407375 - DNA, 19 bp, Homo sapiens
  siRNA target sequence for CSTL1 (NM_138283.1,436-454).
gtccagaggctaattcgaa

SEQ ID NO: 407376 - DNA, 19 bp, Homo sapiens
  siRNA target sequence for CSTL1 (NM_138283.1,470-488).
cgacgggagtggagtatat

SEQ ID NO: 407377 - DNA, 19 bp, Homo sapiens
  siRNA target sequence for CSTL1 (NM_138283.1,471-489).
gacgggagtggagtatata

SEQ ID NO: 407378 - DNA, 19 bp, Homo sapiens
  siRNA target sequence for CSTL1 (NM_138283.1,473-491).
cgggagtggagtatatagt

SEQ ID NO: 407379 - DNA, 19 bp, Homo sapiens
  siRNA target sequence for CSTL1 (NM_138283.1,475-493).
ggagtggagtatatagtca

SEQ ID NO: 407380 - DNA, 19 bp, Homo sapiens
  siRNA target sequence for CSTL1 (NM_138283.1,525-543).
gaatgacacgagcaattct

SEQ ID NO: 407381 - DNA, 19 bp, Homo sapiens
  siRNA target sequence for CSTL1 (NM_138283.1,606-624).
catgccctggataaactat

SEQ ID NO: 407382 - DNA, 19 bp, Homo sapiens
  siRNA target sequence for CSTL1 (NM_138283.1,611-629).
cctggataaactatttcca

SEQ ID NO: 407383 - DNA, 19 bp, Homo sapiens
  siRNA target sequence for IL17D (NM_138284.1,383-401).
cgccctgggcctacagaat

SEQ ID NO: 407384 - DNA, 19 bp, Homo sapiens
  siRNA target sequence for LOC151636 (NM_138287.2,42-60).
ctcgtgcgggtgtacaagt

SEQ ID NO: 407385 - DNA, 19 bp, Homo sapiens
  siRNA target sequence for LOC151636 (NM_138287.2,171-189).
cgggtggagttcagtgaaa

SEQ ID NO: 407386 - DNA, 19 bp, Homo sapiens
  siRNA target sequence for LOC151636 (NM_138287.2,264-282).
ctggtacccactgaaaatt

SEQ ID NO: 407387 - DNA, 19 bp, Homo sapiens
  siRNA target sequence for LOC151636 (NM_138287.2,266-284).
ggtacccactgaaaattca

SEQ ID NO: 407388 - DNA, 19 bp, Homo sapiens
  siRNA target sequence for LOC151636 (NM_138287.2,267-285).
gtacccactgaaaattcaa

SEQ ID NO: 407389 - DNA, 19 bp, Homo sapiens
  siRNA target sequence for LOC151636 (NM_138287.2,293-311).
gaacacgagacctcaaatt

SEQ ID NO: 407390 - DNA, 19 bp, Homo sapiens
  siRNA target sequence for LOC151636 (NM_138287.2,296-314).
cacgagacctcaaatttct

SEQ ID NO: 407391 - DNA, 19 bp, Homo sapiens
  siRNA target sequence for LOC151636 (NM_138287.2,363-381).
catgaaggacatattccta

SEQ ID NO: 407392 - DNA, 19 bp, Homo sapiens
  siRNA target sequence for LOC151636 (NM_138287.2,456-474).
gagcagagggcatacataa

SEQ ID NO: 407393 - DNA, 19 bp, Homo sapiens
  siRNA target sequence for LOC151636 (NM_138287.2,459-477).
cagagggcatacataacca

SEQ ID NO: 407394 - DNA, 19 bp, Homo sapiens
  siRNA target sequence for LOC151636 (NM_138287.2,475-493).
ccacactgtgccctagtat

SEQ ID NO: 407395 - DNA, 19 bp, Homo sapiens
  siRNA target sequence for LOC151636 (NM_138287.2,480-498).
ctgtgccctagtatcagaa

SEQ ID NO: 407396 - DNA, 19 bp, Homo sapiens
  siRNA target sequence for LOC151636 (NM_138287.2,482-500).
gtgccctagtatcagaaaa

SEQ ID NO: 407397 - DNA, 19 bp, Homo sapiens
  siRNA target sequence for LOC151636 (NM_138287.2,487-505).
ctagtatcagaaaaatgga

SEQ ID NO: 407398 - DNA, 19 bp, Homo sapiens
  siRNA target sequence for LOC151636 (NM_138287.2,507-525).
ggtcacgatggaattgaga

SEQ ID NO: 407399 - DNA, 19 bp, Homo sapiens
  siRNA target sequence for LOC151636 (NM_138287.2,508-526).
gtcacgatggaattgagaa

SEQ ID NO: 407400 - DNA, 19 bp, Homo sapiens
  siRNA target sequence for LOC151636 (NM_138287.2,535-553).
gtgacttccaagacattga

SEQ ID NO: 407401 - DNA, 19 bp, Homo sapiens
  siRNA target sequence for LOC151636 (NM_138287.2,606-624).
caattttccccttcaatga

SEQ ID NO: 407402 - DNA, 19 bp, Homo sapiens
  siRNA target sequence for LOC151636 (NM_138287.2,723-741).
cccttgccttactttgaat

SEQ ID NO: 407403 - DNA, 19 bp, Homo sapiens
  siRNA target sequence for LOC151636 (NM_138287.2,787-805).
gatttggtgtaaacattga

SEQ ID NO: 407404 - DNA, 19 bp, Homo sapiens
  siRNA target sequence for LOC151636 (NM_138287.2,820-838).
ctccaaatatggtctgttt

SEQ ID NO: 407405 - DNA, 19 bp, Homo sapiens
  siRNA target sequence for LOC151636 (NM_138287.2,876-894).
gctcgtgagtcttttgcta

SEQ ID NO: 407406 - DNA, 19 bp, Homo sapiens
  siRNA target sequence for LOC151636 (NM_138287.2,915-933).
gaacctctgaagcaagaat

SEQ ID NO: 407407 - DNA, 19 bp, Homo sapiens
  siRNA target sequence for LOC151636 (NM_138287.2,978-996).
gaattgaatcaccagttta

SEQ ID NO: 407408 - DNA, 19 bp, Homo sapiens
  siRNA target sequence for LOC151636 (NM_138287.2,992-1010).
gtttacaaagctccttata

SEQ ID NO: 407409 - DNA, 19 bp, Homo sapiens
  siRNA target sequence for LOC151636 (NM_138287.2,997-1015).
caaagctccttataaagga

SEQ ID NO: 407410 - DNA, 19 bp, Homo sapiens
  siRNA target sequence for LOC151636 (NM_138287.2,1016-1034).
gaaaggaggcgaattaact

SEQ ID NO: 407411 - DNA, 19 bp, Homo sapiens
  siRNA target sequence for LOC151636 (NM_138287.2,1041-1059).
gggacccaagatgacattt

SEQ ID NO: 407412 - DNA, 19 bp, Homo sapiens
  siRNA target sequence for LOC151636 (NM_138287.2,1094-1112).
caagatacctgtgaaacta

SEQ ID NO: 407413 - DNA, 19 bp, Homo sapiens
  siRNA target sequence for LOC151636 (NM_138287.2,1097-1115).
gatacctgtgaaactattt

SEQ ID NO: 407414 - DNA, 19 bp, Homo sapiens
  siRNA target sequence for LOC151636 (NM_138287.2,1110-1128).
ctatttgctgccaattaca

SEQ ID NO: 407415 - DNA, 19 bp, Homo sapiens
  siRNA target sequence for LOC151636 (NM_138287.2,1146-1164).
gttgatagtgcccactata

SEQ ID NO: 407416 - DNA, 19 bp, Homo sapiens
  siRNA target sequence for LOC151636 (NM_138287.2,1153-1171).
gtgcccactataaactttt

SEQ ID NO: 407417 - DNA, 19 bp, Homo sapiens
  siRNA target sequence for LOC151636 (NM_138287.2,1191-1209).
gagatatcagagatcgaaa

SEQ ID NO: 407418 - DNA, 19 bp, Homo sapiens
  siRNA target sequence for LOC151636 (NM_138287.2,1198-1216).
cagagatcgaaaaaaggta

SEQ ID NO: 407419 - DNA, 19 bp, Homo sapiens
  siRNA target sequence for LOC151636 (NM_138287.2,1205-1223).
cgaaaaaaggtatgacatt

SEQ ID NO: 407420 - DNA, 19 bp, Homo sapiens
  siRNA target sequence for LOC151636 (NM_138287.2,1277-1295).
ggacaggcaggtagatcta

SEQ ID NO: 407421 - DNA, 19 bp, Homo sapiens
  siRNA target sequence for LOC151636 (NM_138287.2,1278-1296).
gacaggcaggtagatctat

SEQ ID NO: 407422 - DNA, 19 bp, Homo sapiens
  siRNA target sequence for LOC151636 (NM_138287.2,1280-1298).
caggcaggtagatctatct

SEQ ID NO: 407423 - DNA, 19 bp, Homo sapiens
  siRNA target sequence for LOC151636 (NM_138287.2,1282-1300).
ggcaggtagatctatctgt

SEQ ID NO: 407424 - DNA, 19 bp, Homo sapiens
  siRNA target sequence for LOC151636 (NM_138287.2,1319-1337).
catcgatgcctttcaacat

SEQ ID NO: 407425 - DNA, 19 bp, Homo sapiens
  siRNA target sequence for LOC151636 (NM_138287.2,1400-1418).
cttacatcagaccaagttt

SEQ ID NO: 407426 - DNA, 19 bp, Homo sapiens
  siRNA target sequence for LOC151636 (NM_138287.2,1415-1433).
gtttgctgatgactttaga

SEQ ID NO: 407427 - DNA, 19 bp, Homo sapiens
  siRNA target sequence for LOC151636 (NM_138287.2,1511-1529).
ggcgaagcagtatgttcta

SEQ ID NO: 407428 - DNA, 19 bp, Homo sapiens
  siRNA target sequence for LOC151636 (NM_138287.2,1512-1530).
gcgaagcagtatgttctaa

SEQ ID NO: 407429 - DNA, 19 bp, Homo sapiens
  siRNA target sequence for LOC151636 (NM_138287.2,1513-1531).
cgaagcagtatgttctaaa

SEQ ID NO: 407430 - DNA, 19 bp, Homo sapiens
  siRNA target sequence for LOC151636 (NM_138287.2,1703-1721).
ggacaccattagtaacaaa

SEQ ID NO: 407431 - DNA, 19 bp, Homo sapiens
  siRNA target sequence for LOC151636 (NM_138287.2,1704-1722).
gacaccattagtaacaaaa

SEQ ID NO: 407432 - DNA, 19 bp, Homo sapiens
  siRNA target sequence for LOC151636 (NM_138287.2,1706-1724).
caccattagtaacaaaaaa

SEQ ID NO: 407433 - DNA, 19 bp, Homo sapiens
  siRNA target sequence for LOC151636 (NM_138287.2,1731-1749).
ccaaagtgcaagcatgaat

SEQ ID NO: 407434 - DNA, 19 bp, Homo sapiens
  siRNA target sequence for LOC151636 (NM_138287.2,1778-1796).
gtcatataagccaatctgt

SEQ ID NO: 407435 - DNA, 19 bp, Homo sapiens
  siRNA target sequence for LOC151636 (NM_138287.2,1799-1817).
cacatgccagacttcctat

SEQ ID NO: 407436 - DNA, 19 bp, Homo sapiens
  siRNA target sequence for LOC151636 (NM_138287.2,1804-1822).
gccagacttcctatggtat

SEQ ID NO: 407437 - DNA, 19 bp, Homo sapiens
  siRNA target sequence for LOC151636 (NM_138287.2,1805-1823).
ccagacttcctatggtatt

SEQ ID NO: 407438 - DNA, 19 bp, Homo sapiens
  siRNA target sequence for LOC151636 (NM_138287.2,1899-1917).
ggcaccattgtgattactt

SEQ ID NO: 407439 - DNA, 19 bp, Homo sapiens
  siRNA target sequence for LOC151636 (NM_138287.2,1900-1918).
gcaccattgtgattactta

SEQ ID NO: 407440 - DNA, 19 bp, Homo sapiens
  siRNA target sequence for LOC151636 (NM_138287.2,1901-1919).
caccattgtgattacttat

SEQ ID NO: 407441 - DNA, 19 bp, Homo sapiens
  siRNA target sequence for LOC151636 (NM_138287.2,1990-2008).
ctgcatacttgcctgataa

SEQ ID NO: 407442 - DNA, 19 bp, Homo sapiens
  siRNA target sequence for LOC151636 (NM_138287.2,2044-2062).
gggcctttgaccaaaagct

SEQ ID NO: 407443 - DNA, 19 bp, Homo sapiens
  siRNA target sequence for LOC151636 (NM_138287.2,2075-2093).
ggggtactctcgcgtatta

SEQ ID NO: 407444 - DNA, 19 bp, Homo sapiens
  siRNA target sequence for C14orf147 (NM_138288.1,71-89).
cagatgtcctggttctact

SEQ ID NO: 407445 - DNA, 19 bp, Homo sapiens
  siRNA target sequence for C14orf147 (NM_138288.1,132-150).
gggagcggacggtgttcaa

SEQ ID NO: 407446 - DNA, 19 bp, Homo sapiens
  siRNA target sequence for C14orf147 (NM_138288.1,133-151).
ggagcggacggtgttcaat

SEQ ID NO: 407447 - DNA, 19 bp, Homo sapiens
  siRNA target sequence for C14orf147 (NM_138288.1,134-152).
gagcggacggtgttcaatt

SEQ ID NO: 407448 - DNA, 19 bp, Homo sapiens
  siRNA target sequence for C14orf147 (NM_138288.1,137-155).
cggacggtgttcaattcca

SEQ ID NO: 407449 - DNA, 19 bp, Homo sapiens
  siRNA target sequence for C14orf147 (NM_138288.1,138-156).
ggacggtgttcaattccat

SEQ ID NO: 407450 - DNA, 19 bp, Homo sapiens
  siRNA target sequence for C14orf147 (NM_138288.1,220-238).
ggcgatattgcactacttt

SEQ ID NO: 407451 - DNA, 19 bp, Homo sapiens
  siRNA target sequence for C14orf147 (NM_138288.1,229-247).
gcactactttgaaatcgta

SEQ ID NO: 407452 - DNA, 19 bp, Homo sapiens
  siRNA target sequence for RPIB9 (NM_138290.1,550-568).
gattgatcggtcttgcttt

SEQ ID NO: 407453 - DNA, 19 bp, Homo sapiens
  siRNA target sequence for RPIB9 (NM_138290.1,554-572).
gatcggtcttgctttgaga

SEQ ID NO: 407454 - DNA, 19 bp, Homo sapiens
  siRNA target sequence for RPIB9 (NM_138290.1,558-576).
ggtcttgctttgagacaat

SEQ ID NO: 407455 - DNA, 19 bp, Homo sapiens
  siRNA target sequence for RPIB9 (NM_138290.1,559-577).
gtcttgctttgagacaatt

SEQ ID NO: 407456 - DNA, 19 bp, Homo sapiens
  siRNA target sequence for RPIB9 (NM_138290.1,581-599).
gattcttctcctgaattta

SEQ ID NO: 407457 - DNA, 19 bp, Homo sapiens
  siRNA target sequence for RPIB9 (NM_138290.1,633-651).
gccaccggctaaaagagat

SEQ ID NO: 407458 - DNA, 19 bp, Homo sapiens
  siRNA target sequence for RPIB9 (NM_138290.1,689-707).
cctcttcaaggtcaagtaa

SEQ ID NO: 407459 - DNA, 19 bp, Homo sapiens
  siRNA target sequence for RPIB9 (NM_138290.1,701-719).
caagtaacctggtttggtt

SEQ ID NO: 407460 - DNA, 19 bp, Homo sapiens
  siRNA target sequence for RPIB9 (NM_138290.1,731-749).
cgtagcttctgggactata

SEQ ID NO: 407461 - DNA, 19 bp, Homo sapiens
  siRNA target sequence for RPIB9 (NM_138290.1,732-750).
gtagcttctgggactatat

SEQ ID NO: 407462 - DNA, 19 bp, Homo sapiens
  siRNA target sequence for RPIB9 (NM_138290.1,736-754).
cttctgggactatatcaga

SEQ ID NO: 407463 - DNA, 19 bp, Homo sapiens
  siRNA target sequence for RPIB9 (NM_138290.1,755-773).
gtggcttgccggaaagttt

SEQ ID NO: 407464 - DNA, 19 bp, Homo sapiens
  siRNA target sequence for RPIB9 (NM_138290.1,757-775).
ggcttgccggaaagtttca

SEQ ID NO: 407465 - DNA, 19 bp, Homo sapiens
  siRNA target sequence for RPIB9 (NM_138290.1,805-823).
ggaaaatgtcagttcttct

SEQ ID NO: 407466 - DNA, 19 bp, Homo sapiens
  siRNA target sequence for RPIB9 (NM_138290.1,976-994).
catgcttctaggactcaat

SEQ ID NO: 407467 - DNA, 19 bp, Homo sapiens
  siRNA target sequence for RPIB9 (NM_138290.1,1030-1048).
gctggatggcagttttcct

SEQ ID NO: 407468 - DNA, 19 bp, Homo sapiens
  siRNA target sequence for RPIB9 (NM_138290.1,1041-1059).
gttttcctgctgtaataga

SEQ ID NO: 407469 - DNA, 19 bp, Homo sapiens
  siRNA target sequence for RPIB9 (NM_138290.1,1200-1218).
gttggttcaacaagtgtaa

SEQ ID NO: 407470 - DNA, 19 bp, Homo sapiens
  siRNA target sequence for RPIB9 (NM_138290.1,1260-1278).
gttaccttgaagaactctt

SEQ ID NO: 407471 - DNA, 19 bp, Homo sapiens
  siRNA target sequence for RPIB9 (NM_138290.1,1287-1305).
gagagaaccaactatctga

SEQ ID NO: 407472 - DNA, 19 bp, Homo sapiens
  siRNA target sequence for RPIB9 (NM_138290.1,1289-1307).
gagaaccaactatctgaat

SEQ ID NO: 407473 - DNA, 19 bp, Homo sapiens
  siRNA target sequence for RPIB9 (NM_138290.1,1350-1368).
ccgatctggctcataaact

SEQ ID NO: 407474 - DNA, 19 bp, Homo sapiens
  siRNA target sequence for RPIB9 (NM_138290.1,1414-1432).
gctgactgtgctaaagaat

SEQ ID NO: 407475 - DNA, 19 bp, Homo sapiens
  siRNA target sequence for RPIB9 (NM_138290.1,1417-1435).
gactgtgctaaagaataat

SEQ ID NO: 407476 - DNA, 19 bp, Homo sapiens
  siRNA target sequence for RPIB9 (NM_138290.1,1512-1530).
ctgttgccttggatacgtt

SEQ ID NO: 407477 - DNA, 19 bp, Homo sapiens
  siRNA target sequence for RPIB9 (NM_138290.1,1517-1535).
gccttggatacgttgcttt

SEQ ID NO: 407478 - DNA, 19 bp, Homo sapiens
  siRNA target sequence for RPIB9 (NM_138290.1,1527-1545).
cgttgctttaccgaaaaca

SEQ ID NO: 407479 - DNA, 19 bp, Homo sapiens
  siRNA target sequence for RPIB9 (NM_138290.1,1532-1550).
ctttaccgaaaacacaata

SEQ ID NO: 407480 - DNA, 19 bp, Homo sapiens
  siRNA target sequence for RPIB9 (NM_138290.1,1538-1556).
cgaaaacacaataaacagt

SEQ ID NO: 407481 - DNA, 19 bp, Homo sapiens
  siRNA target sequence for RPIB9 (NM_138290.1,1553-1571).
cagtggtatgagaaaagtt

SEQ ID NO: 407482 - DNA, 19 bp, Homo sapiens
  siRNA target sequence for RPIB9 (NM_138290.1,1555-1573).
gtggtatgagaaaagttat

SEQ ID NO: 407483 - DNA, 19 bp, Homo sapiens
  siRNA target sequence for RPIB9 (NM_138290.1,1558-1576).
gtatgagaaaagttatcaa

SEQ ID NO: 407484 - DNA, 19 bp, Homo sapiens
  siRNA target sequence for RPIB9 (NM_138290.1,1606-1624).
cctttctcagacttcacta

SEQ ID NO: 407485 - DNA, 19 bp, Homo sapiens
  siRNA target sequence for RPIB9 (NM_138290.1,1661-1679).
gacacattaaatgtaatga

SEQ ID NO: 407486 - DNA, 19 bp, Homo sapiens
  siRNA target sequence for RPIB9 (NM_138290.1,1731-1749).
cgtcagtggcaagttacaa

SEQ ID NO: 407487 - DNA, 19 bp, Homo sapiens
  siRNA target sequence for RPIB9 (NM_138290.1,1739-1757).
gcaagttacaagtctctaa

SEQ ID NO: 407488 - DNA, 19 bp, Homo sapiens
  siRNA target sequence for RPIB9 (NM_138290.1,1747-1765).
caagtctctaacaagctta

SEQ ID NO: 407489 - DNA, 19 bp, Homo sapiens
  siRNA target sequence for RPIB9 (NM_138290.1,1758-1776).
caagcttaaaatctaatga

SEQ ID NO: 407490 - DNA, 19 bp, Homo sapiens
  siRNA target sequence for RPIB9 (NM_138290.1,1761-1779).
gcttaaaatctaatgacta

SEQ ID NO: 407491 - DNA, 19 bp, Homo sapiens
  siRNA target sequence for RPIB9 (NM_138290.1,1780-1798).
ccttgcaagtcctacaaca

SEQ ID NO: 407492 - DNA, 19 bp, Homo sapiens
  siRNA target sequence for ACMSD (NM_138326.1,314-332).
cagagtggtgcgagagaat

SEQ ID NO: 407493 - DNA, 19 bp, Homo sapiens
  siRNA target sequence for ACMSD (NM_138326.1,337-355).
gggatccagaagttcgtat

SEQ ID NO: 407494 - DNA, 19 bp, Homo sapiens
  siRNA target sequence for ACMSD (NM_138326.1,338-356).
ggatccagaagttcgtatt

SEQ ID NO: 407495 - DNA, 19 bp, Homo sapiens
  siRNA target sequence for ACMSD (NM_138326.1,339-357).
gatccagaagttcgtatta

SEQ ID NO: 407496 - DNA, 19 bp, Homo sapiens
  siRNA target sequence for ACMSD (NM_138326.1,343-361).
cagaagttcgtattagaga

SEQ ID NO: 407497 - DNA, 19 bp, Homo sapiens
  siRNA target sequence for ACMSD (NM_138326.1,591-609).
ggagctctttcctgtctat

SEQ ID NO: 407498 - DNA, 19 bp, Homo sapiens
  siRNA target sequence for ACMSD (NM_138326.1,881-899).
ccatgaacccgaagaaata

SEQ ID NO: 407499 - DNA, 19 bp, Homo sapiens
  siRNA target sequence for ACMSD (NM_138326.1,885-903).
gaacccgaagaaatacctt

SEQ ID NO: 407500 - DNA, 19 bp, Homo sapiens
  siRNA target sequence for ACMSD (NM_138326.1,908-926).
ccttttacacagatgcttt

SEQ ID NO: 407501 - DNA, 19 bp, Homo sapiens
  siRNA target sequence for ACMSD (NM_138326.1,945-963).
cctcaagctgttaacagat

SEQ ID NO: 407502 - DNA, 19 bp, Homo sapiens
  siRNA target sequence for C21orf41 (NM_138332.1,320-338).
gttgagagagataacatat

SEQ ID NO: 407503 - DNA, 19 bp, Homo sapiens
  siRNA target sequence for C21orf41 (NM_138332.1,329-347).
gataacatattcaatcact

SEQ ID NO: 407504 - DNA, 19 bp, Homo sapiens
  siRNA target sequence for C21orf41 (NM_138332.1,360-378).
catggaacttcccttctaa

SEQ ID NO: 407505 - DNA, 19 bp, Homo sapiens
  siRNA target sequence for C21orf41 (NM_138332.1,393-411).
gctacaggtctggtaacat

SEQ ID NO: 407506 - DNA, 19 bp, Homo sapiens
  siRNA target sequence for C21orf41 (NM_138332.1,394-412).
ctacaggtctggtaacatt

SEQ ID NO: 407507 - DNA, 19 bp, Homo sapiens
  siRNA target sequence for C9orf42 (NM_138333.1,358-376).
gccgcttgcaccagatcaa

SEQ ID NO: 407508 - DNA, 19 bp, Homo sapiens
  siRNA target sequence for C9orf42 (NM_138333.1,359-377).
ccgcttgcaccagatcaaa

SEQ ID NO: 407509 - DNA, 19 bp, Homo sapiens
  siRNA target sequence for C9orf42 (NM_138333.1,384-402).
gagggcatggacttgatca

SEQ ID NO: 407510 - DNA, 19 bp, Homo sapiens
  siRNA target sequence for C9orf42 (NM_138333.1,483-501).
gacaacgacgtggagaaat

SEQ ID NO: 407511 - DNA, 19 bp, Homo sapiens
  siRNA target sequence for C9orf42 (NM_138333.1,508-526).
cccccaagcgcatcgattt

SEQ ID NO: 407512 - DNA, 19 bp, Homo sapiens
  siRNA target sequence for C9orf42 (NM_138333.1,510-528).
cccaagcgcatcgatttca

SEQ ID NO: 407513 - DNA, 19 bp, Homo sapiens
  siRNA target sequence for C9orf42 (NM_138333.1,511-529).
ccaagcgcatcgatttcat

SEQ ID NO: 407514 - DNA, 19 bp, Homo sapiens
  siRNA target sequence for C9orf42 (NM_138333.1,512-530).
caagcgcatcgatttcatt

SEQ ID NO: 407515 - DNA, 19 bp, Homo sapiens
  siRNA target sequence for C9orf42 (NM_138333.1,584-602).
gccatccttgcaaagtttt

SEQ ID NO: 407516 - DNA, 19 bp, Homo sapiens
  siRNA target sequence for C9orf42 (NM_138333.1,642-660).
ccaacgacccgatttacca

SEQ ID NO: 407517 - DNA, 19 bp, Homo sapiens
  siRNA target sequence for C9orf42 (NM_138333.1,674-692).
gagccccatcaattgcatt

SEQ ID NO: 407518 - DNA, 19 bp, Homo sapiens
  siRNA target sequence for C9orf42 (NM_138333.1,677-695).
ccccatcaattgcattaga

SEQ ID NO: 407519 - DNA, 19 bp, Homo sapiens
  siRNA target sequence for C9orf42 (NM_138333.1,702-720).
gttcttggaccattgaaaa

SEQ ID NO: 407520 - DNA, 19 bp, Homo sapiens
  siRNA target sequence for C9orf42 (NM_138333.1,741-759).
gaatatcagccaaagagat

SEQ ID NO: 407521 - DNA, 19 bp, Homo sapiens
  siRNA target sequence for C9orf42 (NM_138333.1,773-791).
caccaacatgctttcttct

SEQ ID NO: 407522 - DNA, 19 bp, Homo sapiens
  siRNA target sequence for C9orf42 (NM_138333.1,859-877).
gtgccggatcttcttgtaa

SEQ ID NO: 407523 - DNA, 19 bp, Homo sapiens
  siRNA target sequence for C9orf42 (NM_138333.1,861-879).
gccggatcttcttgtaact

SEQ ID NO: 407524 - DNA, 19 bp, Homo sapiens
  siRNA target sequence for C9orf42 (NM_138333.1,863-881).
cggatcttcttgtaactca

SEQ ID NO: 407525 - DNA, 19 bp, Homo sapiens
  siRNA target sequence for C9orf42 (NM_138333.1,927-945).
caagcggcttctccattta

SEQ ID NO: 407526 - DNA, 19 bp, Homo sapiens
  siRNA target sequence for C9orf42 (NM_138333.1,932-950).
ggcttctccatttattcca

SEQ ID NO: 407527 - DNA, 19 bp, Homo sapiens
  siRNA target sequence for SBBI54 (NM_138334.1,222-240).
gcaccggcaactatgatgt

SEQ ID NO: 407528 - DNA, 19 bp, Homo sapiens
  siRNA target sequence for SBBI54 (NM_138334.1,226-244).
cggcaactatgatgtcaat

SEQ ID NO: 407529 - DNA, 19 bp, Homo sapiens
  siRNA target sequence for SBBI54 (NM_138334.1,425-443).
gtggacggtgtctactaca

SEQ ID NO: 407530 - DNA, 19 bp, Homo sapiens
  siRNA target sequence for LOC89894 (NM_138341.1,685-703).
catctccactggtgataga

SEQ ID NO: 407531 - DNA, 19 bp, Homo sapiens
  siRNA target sequence for LOC89894 (NM_138341.1,688-706).
ctccactggtgatagatta

SEQ ID NO: 407532 - DNA, 19 bp, Homo sapiens
  siRNA target sequence for LOC89894 (NM_138341.1,690-708).
ccactggtgatagattata

SEQ ID NO: 407533 - DNA, 19 bp, Homo sapiens
  siRNA target sequence for LOC89894 (NM_138341.1,764-782).
gatgacacctgtattctgt

SEQ ID NO: 407534 - DNA, 19 bp, Homo sapiens
  siRNA target sequence for LOC89894 (NM_138341.1,785-803).
gggaaatactagtgaatgt

SEQ ID NO: 407535 - DNA, 19 bp, Homo sapiens
  siRNA target sequence for LOC89894 (NM_138341.1,817-835).
gtcagagccacaagtgtat

SEQ ID NO: 407536 - DNA, 19 bp, Homo sapiens
  siRNA target sequence for LOC89894 (NM_138341.1,948-966).
ctcagcctccttaccatta

SEQ ID NO: 407537 - DNA, 19 bp, Homo sapiens
  siRNA target sequence for LOC89894 (NM_138341.1,952-970).
gcctccttaccattatggt

SEQ ID NO: 407538 - DNA, 19 bp, Homo sapiens
  siRNA target sequence for LOC89894 (NM_138341.1,980-998).
ccgagcccagacattgtat

SEQ ID NO: 407539 - DNA, 19 bp, Homo sapiens
  siRNA target sequence for LOC89894 (NM_138341.1,981-999).
cgagcccagacattgtata

SEQ ID NO: 407540 - DNA, 19 bp, Homo sapiens
  siRNA target sequence for LOC89894 (NM_138341.1,982-1000).
gagcccagacattgtataa

SEQ ID NO: 407541 - DNA, 19 bp, Homo sapiens
  siRNA target sequence for LOC89894 (NM_138341.1,984-1002).
gcccagacattgtataaga

SEQ ID NO: 407542 - DNA, 19 bp, Homo sapiens
  siRNA target sequence for LOC89894 (NM_138341.1,989-1007).
gacattgtataagaagttt

SEQ ID NO: 407543 - DNA, 19 bp, Homo sapiens
  siRNA target sequence for LOC89894 (NM_138341.1,1108-1126).
gcccagctgtcattctaat

SEQ ID NO: 407544 - DNA, 19 bp, Homo sapiens
  siRNA target sequence for LOC89894 (NM_138341.1,1110-1128).
ccagctgtcattctaatga

SEQ ID NO: 407545 - DNA, 19 bp, Homo sapiens
  siRNA target sequence for LOC89894 (NM_138341.1,1160-1178).
gcttcacatggccctttat

SEQ ID NO: 407546 - DNA, 19 bp, Homo sapiens
  siRNA target sequence for LOC89894 (NM_138341.1,1233-1251).
ggctggacgcagcacaaat

SEQ ID NO: 407547 - DNA, 19 bp, Homo sapiens
  siRNA target sequence for LOC89894 (NM_138341.1,1237-1255).
ggacgcagcacaaattcca

SEQ ID NO: 407548 - DNA, 19 bp, Homo sapiens
  siRNA target sequence for LOC89894 (NM_138341.1,1245-1263).
cacaaattccaccaactaa

SEQ ID NO: 407549 - DNA, 19 bp, Homo sapiens
  siRNA target sequence for LOC89894 (NM_138341.1,1309-1327).
gctcacagaagagattcta

SEQ ID NO: 407550 - DNA, 19 bp, Homo sapiens
  siRNA target sequence for LOC89894 (NM_138341.1,1325-1343).
ctatagcaggggcttaaat

SEQ ID NO: 407551 - DNA, 19 bp, Homo sapiens
  siRNA target sequence for LOC89894 (NM_138341.1,1330-1348).
gcaggggcttaaattcact

SEQ ID NO: 407552 - DNA, 19 bp, Homo sapiens
  siRNA target sequence for LOC90050 (NM_138344.2,501-519).
catccgacagtgatgtgaa

SEQ ID NO: 407553 - DNA, 19 bp, Homo sapiens
  siRNA target sequence for LOC90050 (NM_138344.2,1339-1357).
gcccccacccatcttcaat

SEQ ID NO: 407554 - DNA, 19 bp, Homo sapiens
  siRNA target sequence for LOC90268 (NM_138348.3,197-215).
ccagaaaaactcataagca

SEQ ID NO: 407555 - DNA, 19 bp, Homo sapiens
  siRNA target sequence for LOC90268 (NM_138348.3,405-423).
gcctctatgaagctgtaaa

SEQ ID NO: 407556 - DNA, 19 bp, Homo sapiens
  siRNA target sequence for LOC90268 (NM_138348.3,433-451).
gctaaacagagccattgaa

SEQ ID NO: 407557 - DNA, 19 bp, Homo sapiens
  siRNA target sequence for LOC90268 (NM_138348.3,510-528).
ctcgggacacatcaaatga

SEQ ID NO: 407558 - DNA, 19 bp, Homo sapiens
  siRNA target sequence for LOC90268 (NM_138348.3,728-746).
gaggacgatcggcactata

SEQ ID NO: 407559 - DNA, 19 bp, Homo sapiens
  siRNA target sequence for LOC90268 (NM_138348.3,731-749).
gacgatcggcactataaca

SEQ ID NO: 407560 - DNA, 19 bp, Homo sapiens
  siRNA target sequence for LOC90313 (NM_138349.2,620-638).
caggcagccctcttctagt

SEQ ID NO: 407561 - DNA, 19 bp, Homo sapiens
  siRNA target sequence for LOC90313 (NM_138349.2,755-773).
ccctggtagggagagtaat

SEQ ID NO: 407562 - DNA, 19 bp, Homo sapiens
  siRNA target sequence for LOC90313 (NM_138349.2,873-891).
gggggctgtgtctgttcaa

SEQ ID NO: 407563 - DNA, 19 bp, Homo sapiens
  siRNA target sequence for LOC90313 (NM_138349.2,875-893).
gggctgtgtctgttcaagt

SEQ ID NO: 407564 - DNA, 19 bp, Homo sapiens
  siRNA target sequence for LOC90378 (NM_138352.1,1395-1413).
ggatgtcgtcgaatatttt

SEQ ID NO: 407565 - DNA, 19 bp, Homo sapiens
  siRNA target sequence for LOC90378 (NM_138352.1,1396-1414).
gatgtcgtcgaatatttta

SEQ ID NO: 407566 - DNA, 19 bp, Homo sapiens
  siRNA target sequence for LOC90378 (NM_138352.1,1434-1452).
gcaggcgacagctttccaa

SEQ ID NO: 407567 - DNA, 19 bp, Homo sapiens
  siRNA target sequence for Ses2 (NM_138355.1,216-234).
gctccagtgcacctacatt

SEQ ID NO: 407568 - DNA, 19 bp, Homo sapiens
  siRNA target sequence for Ses2 (NM_138355.1,219-237).
ccagtgcacctacattgaa

SEQ ID NO: 407569 - DNA, 19 bp, Homo sapiens
  siRNA target sequence for Ses2 (NM_138355.1,505-523).
gcgccattctcctaccata

SEQ ID NO: 407570 - DNA, 19 bp, Homo sapiens
  siRNA target sequence for Ses2 (NM_138355.1,945-963).
gccctgcgtgcactttctt

SEQ ID NO: 407571 - DNA, 19 bp, Homo sapiens
  siRNA target sequence for Ses2 (NM_138355.1,946-964).
ccctgcgtgcactttctta

SEQ ID NO: 407572 - DNA, 19 bp, Homo sapiens
  siRNA target sequence for Ses2 (NM_138355.1,989-1007).
ctgtgttcaaacctttcat

SEQ ID NO: 407573 - DNA, 19 bp, Homo sapiens
  siRNA target sequence for C10orf42 (NM_138357.1,231-249).
gccctctgatgatgttaca

SEQ ID NO: 407574 - DNA, 19 bp, Homo sapiens
  siRNA target sequence for C10orf42 (NM_138357.1,233-251).
cctctgatgatgttacagt

SEQ ID NO: 407575 - DNA, 19 bp, Homo sapiens
  siRNA target sequence for C10orf42 (NM_138357.1,390-408).
cagagttgctatctattca

SEQ ID NO: 407576 - DNA, 19 bp, Homo sapiens
  siRNA target sequence for C10orf42 (NM_138357.1,463-481).
gactttaagctggtcatta

SEQ ID NO: 407577 - DNA, 19 bp, Homo sapiens
  siRNA target sequence for C10orf42 (NM_138357.1,465-483).
ctttaagctggtcattaat

SEQ ID NO: 407578 - DNA, 19 bp, Homo sapiens
  siRNA target sequence for C10orf42 (NM_138357.1,495-513).
ccacgtacgaccaccaaaa

SEQ ID NO: 407579 - DNA, 19 bp, Homo sapiens
  siRNA target sequence for C10orf42 (NM_138357.1,496-514).
cacgtacgaccaccaaaaa

SEQ ID NO: 407580 - DNA, 19 bp, Homo sapiens
  siRNA target sequence for C10orf42 (NM_138357.1,498-516).
cgtacgaccaccaaaaaga

SEQ ID NO: 407581 - DNA, 19 bp, Homo sapiens
  siRNA target sequence for C10orf42 (NM_138357.1,517-535).
gacctcttaagtcatgaaa

SEQ ID NO: 407582 - DNA, 19 bp, Homo sapiens
  siRNA target sequence for C10orf42 (NM_138357.1,539-557).
cagcaacgctgaatgatgt

SEQ ID NO: 407583 - DNA, 19 bp, Homo sapiens
  siRNA target sequence for C10orf42 (NM_138357.1,541-559).
gcaacgctgaatgatgtaa

SEQ ID NO: 407584 - DNA, 19 bp, Homo sapiens
  siRNA target sequence for C10orf42 (NM_138357.1,542-560).
caacgctgaatgatgtaaa

SEQ ID NO: 407585 - DNA, 19 bp, Homo sapiens
  siRNA target sequence for C10orf42 (NM_138357.1,563-581).
cattggtccagcaactata

SEQ ID NO: 407586 - DNA, 19 bp, Homo sapiens
  siRNA target sequence for C10orf42 (NM_138357.1,598-616).
gagcagcaccagttaaaca

SEQ ID NO: 407587 - DNA, 19 bp, Homo sapiens
  siRNA target sequence for C10orf42 (NM_138357.1,618-636).
ggaaagggagcttattgaa

SEQ ID NO: 407588 - DNA, 19 bp, Homo sapiens
  siRNA target sequence for C10orf42 (NM_138357.1,663-681).
ggctcccctggaaaaggta

SEQ ID NO: 407589 - DNA, 19 bp, Homo sapiens
  siRNA target sequence for C10orf42 (NM_138357.1,668-686).
ccctggaaaaggtacgaat

SEQ ID NO: 407590 - DNA, 19 bp, Homo sapiens
  siRNA target sequence for C10orf42 (NM_138357.1,669-687).
cctggaaaaggtacgaatt

SEQ ID NO: 407591 - DNA, 19 bp, Homo sapiens
  siRNA target sequence for C10orf42 (NM_138357.1,679-697).
gtacgaattgagattagca

SEQ ID NO: 407592 - DNA, 19 bp, Homo sapiens
  siRNA target sequence for C10orf42 (NM_138357.1,839-857).
gaagtgccatggcaatgta

SEQ ID NO: 407593 - DNA, 19 bp, Homo sapiens
  siRNA target sequence for C10orf42 (NM_138357.1,845-863).
ccatggcaatgtatgcata

SEQ ID NO: 407594 - DNA, 19 bp, Homo sapiens
  siRNA target sequence for C10orf42 (NM_138357.1,873-891).
gacacgccaggaatatgtt

SEQ ID NO: 407595 - DNA, 19 bp, Homo sapiens
  siRNA target sequence for C10orf42 (NM_138357.1,875-893).
cacgccaggaatatgttta

SEQ ID NO: 407596 - DNA, 19 bp, Homo sapiens
  siRNA target sequence for C10orf42 (NM_138357.1,903-921).
cagagacagacaatactta

SEQ ID NO: 407597 - DNA, 19 bp, Homo sapiens
  siRNA target sequence for C10orf42 (NM_138357.1,909-927).
cagacaatacttactattt

SEQ ID NO: 407598 - DNA, 19 bp, Homo sapiens
  siRNA target sequence for C10orf42 (NM_138357.1,953-971).
gttttgacctagagaaata

SEQ ID NO: 407599 - DNA, 19 bp, Homo sapiens
  siRNA target sequence for C10orf42 (NM_138357.1,960-978).
cctagagaaatacaatcaa

SEQ ID NO: 407600 - DNA, 19 bp, Homo sapiens
  siRNA target sequence for C10orf42 (NM_138357.1,1019-1037).
gactgagagacccattaca

SEQ ID NO: 407601 - DNA, 19 bp, Homo sapiens
  siRNA target sequence for C10orf42 (NM_138357.1,1023-1041).
gagagacccattacaagta

SEQ ID NO: 407602 - DNA, 19 bp, Homo sapiens
  siRNA target sequence for C10orf42 (NM_138357.1,1025-1043).
gagacccattacaagtaca

SEQ ID NO: 407603 - DNA, 19 bp, Homo sapiens
  siRNA target sequence for LOC90580 (NM_138358.2,88-106).
gctctgaggagattttggt

SEQ ID NO: 407604 - DNA, 19 bp, Homo sapiens
  siRNA target sequence for LOC90580 (NM_138358.2,707-725).
ggctcttcgatgagaagta

SEQ ID NO: 407605 - DNA, 19 bp, Homo sapiens
  siRNA target sequence for LOC90736 (NM_138362.1,36-54).
ccctgtacggaaaagaaga

SEQ ID NO: 407606 - DNA, 19 bp, Homo sapiens
  siRNA target sequence for LOC90736 (NM_138362.1,87-105).
cacccagcccaaaaggaat

SEQ ID NO: 407607 - DNA, 19 bp, Homo sapiens
  siRNA target sequence for LOC90736 (NM_138362.1,89-107).
cccagcccaaaaggaataa

SEQ ID NO: 407608 - DNA, 19 bp, Homo sapiens
  siRNA target sequence for LOC90736 (NM_138362.1,91-109).
cagcccaaaaggaataaga

SEQ ID NO: 407609 - DNA, 19 bp, Homo sapiens
  siRNA target sequence for LOC90736 (NM_138362.1,131-149).
ctcaagatacagaggtatt

SEQ ID NO: 407610 - DNA, 19 bp, Homo sapiens
  siRNA target sequence for LOC90736 (NM_138362.1,136-154).
gatacagaggtattttcat

SEQ ID NO: 407611 - DNA, 19 bp, Homo sapiens
  siRNA target sequence for LOC90736 (NM_138362.1,239-257).
ctgaacccgatgcaaactt

SEQ ID NO: 407612 - DNA, 19 bp, Homo sapiens
  siRNA target sequence for LOC90736 (NM_138362.1,267-285).
cttgcatgagggattgtct

SEQ ID NO: 407613 - DNA, 19 bp, Homo sapiens
  siRNA target sequence for LOC90736 (NM_138362.1,270-288).
gcatgagggattgtctaaa

SEQ ID NO: 407614 - DNA, 19 bp, Homo sapiens
  siRNA target sequence for LOC90736 (NM_138362.1,284-302).
ctaaacctgtttatgtcat

SEQ ID NO: 407615 - DNA, 19 bp, Homo sapiens
  siRNA target sequence for LOC90736 (NM_138362.1,289-307).
cctgtttatgtcataaact

SEQ ID NO: 407616 - DNA, 19 bp, Homo sapiens
  siRNA target sequence for LOC90736 (NM_138362.1,315-333).
gtcctttggtcctgaaata

SEQ ID NO: 407617 - DNA, 19 bp, Homo sapiens
  siRNA target sequence for LOC90799 (NM_138363.1,92-110).
gccaataaccttcttttta

SEQ ID NO: 407618 - DNA, 19 bp, Homo sapiens
  siRNA target sequence for LOC90799 (NM_138363.1,114-132).
gtcatatacatctgagaat

SEQ ID NO: 407619 - DNA, 19 bp, Homo sapiens
  siRNA target sequence for LOC90799 (NM_138363.1,127-145).
gagaatacatgaacttcaa

SEQ ID NO: 407620 - DNA, 19 bp, Homo sapiens
  siRNA target sequence for LOC90799 (NM_138363.1,292-310).
ggtcagcttgtctcacata

SEQ ID NO: 407621 - DNA, 19 bp, Homo sapiens
  siRNA target sequence for LOC90799 (NM_138363.1,293-311).
gtcagcttgtctcacataa

SEQ ID NO: 407622 - DNA, 19 bp, Homo sapiens
  siRNA target sequence for LOC90799 (NM_138363.1,295-313).
cagcttgtctcacataaca

SEQ ID NO: 407623 - DNA, 19 bp, Homo sapiens
  siRNA target sequence for LOC90799 (NM_138363.1,335-353).
gataaagaatctattaaga

SEQ ID NO: 407624 - DNA, 19 bp, Homo sapiens
  siRNA target sequence for LOC90799 (NM_138363.1,379-397).
gttggagtatcttacagaa

SEQ ID NO: 407625 - DNA, 19 bp, Homo sapiens
  siRNA target sequence for LOC90799 (NM_138363.1,395-413).
gaacgcatcagtgaaacat

SEQ ID NO: 407626 - DNA, 19 bp, Homo sapiens
  siRNA target sequence for LOC90799 (NM_138363.1,453-471).
ctgatcgaggagaacgttt

SEQ ID NO: 407627 - DNA, 19 bp, Homo sapiens
  siRNA target sequence for LOC90799 (NM_138363.1,562-580).
ctcttgggatggagatgaa

SEQ ID NO: 407628 - DNA, 19 bp, Homo sapiens
  siRNA target sequence for LOC90799 (NM_138363.1,582-600).
cagaatccactggtgaaat

SEQ ID NO: 407629 - DNA, 19 bp, Homo sapiens
  siRNA target sequence for LOC90799 (NM_138363.1,620-638).
gcacacaccttttctctaa

SEQ ID NO: 407630 - DNA, 19 bp, Homo sapiens
  siRNA target sequence for LOC90799 (NM_138363.1,689-707).
gcctcaccaagttctaaat

SEQ ID NO: 407631 - DNA, 19 bp, Homo sapiens
  siRNA target sequence for LOC90799 (NM_138363.1,693-711).
caccaagttctaaatcaca

SEQ ID NO: 407632 - DNA, 19 bp, Homo sapiens
  siRNA target sequence for LOC90799 (NM_138363.1,748-766).
gagtaggacatcctttgtt

SEQ ID NO: 407633 - DNA, 19 bp, Homo sapiens
  siRNA target sequence for LOC90799 (NM_138363.1,750-768).
gtaggacatcctttgttga

SEQ ID NO: 407634 - DNA, 19 bp, Homo sapiens
  siRNA target sequence for LOC90799 (NM_138363.1,753-771).
ggacatcctttgttgaaga

SEQ ID NO: 407635 - DNA, 19 bp, Homo sapiens
  siRNA target sequence for LOC90799 (NM_138363.1,786-804).
ctgtgagtgggattccaaa

SEQ ID NO: 407636 - DNA, 19 bp, Homo sapiens
  siRNA target sequence for LOC90799 (NM_138363.1,790-808).
gagtgggattccaaatgct

SEQ ID NO: 407637 - DNA, 19 bp, Homo sapiens
  siRNA target sequence for LOC90799 (NM_138363.1,823-841).
gcctatccgagcagctatt

SEQ ID NO: 407638 - DNA, 19 bp, Homo sapiens
  siRNA target sequence for LOC90799 (NM_138363.1,922-940).
ctccccagccgtaaattct

SEQ ID NO: 407639 - DNA, 19 bp, Homo sapiens
  siRNA target sequence for LOC90799 (NM_138363.1,925-943).
cccagccgtaaattctact

SEQ ID NO: 407640 - DNA, 19 bp, Homo sapiens
  siRNA target sequence for LOC90799 (NM_138363.1,1183-1201).
ctctcagcggctttctgaa

SEQ ID NO: 407641 - DNA, 19 bp, Homo sapiens
  siRNA target sequence for LOC90799 (NM_138363.1,1189-1207).
gcggctttctgaactagat

SEQ ID NO: 407642 - DNA, 19 bp, Homo sapiens
  siRNA target sequence for LOC90799 (NM_138363.1,1190-1208).
cggctttctgaactagatt

SEQ ID NO: 407643 - DNA, 19 bp, Homo sapiens
  siRNA target sequence for LOC90799 (NM_138363.1,1224-1242).
ctctgggtgatcggattaa

SEQ ID NO: 407644 - DNA, 19 bp, Homo sapiens
  siRNA target sequence for LOC90799 (NM_138363.1,1228-1246).
gggtgatcggattaaagaa

SEQ ID NO: 407645 - DNA, 19 bp, Homo sapiens
  siRNA target sequence for LOC90799 (NM_138363.1,1229-1247).
ggtgatcggattaaagaaa

SEQ ID NO: 407646 - DNA, 19 bp, Homo sapiens
  siRNA target sequence for LOC90799 (NM_138363.1,1462-1480).
gcgcaagccaagagaaaca

SEQ ID NO: 407647 - DNA, 19 bp, Homo sapiens
  siRNA target sequence for LOC90799 (NM_138363.1,1479-1497).
cagatgtccgccaattcca

SEQ ID NO: 407648 - DNA, 19 bp, Homo sapiens
  siRNA target sequence for LOC90799 (NM_138363.1,1495-1513).
ccaagcacaggcgtttact

SEQ ID NO: 407649 - DNA, 19 bp, Homo sapiens
  siRNA target sequence for LOC90799 (NM_138363.1,1517-1535).
gcatttgaaagggaactaa

SEQ ID NO: 407650 - DNA, 19 bp, Homo sapiens
  siRNA target sequence for LOC90799 (NM_138363.1,1555-1573).
gaatattggacctctaaga

SEQ ID NO: 407651 - DNA, 19 bp, Homo sapiens
  siRNA target sequence for LOC90799 (NM_138363.1,1678-1696).
cacaacgcagagtctaaga

SEQ ID NO: 407652 - DNA, 19 bp, Homo sapiens
  siRNA target sequence for LOC90799 (NM_138363.1,1768-1786).
ggagcagtttccgtttctt

SEQ ID NO: 407653 - DNA, 19 bp, Homo sapiens
  siRNA target sequence for LOC90799 (NM_138363.1,1790-1808).
gtttctggcccaacactaa

SEQ ID NO: 407654 - DNA, 19 bp, Homo sapiens
  siRNA target sequence for LOC90799 (NM_138363.1,1833-1851).
cacaggttgaacagcttaa

SEQ ID NO: 407655 - DNA, 19 bp, Homo sapiens
  siRNA target sequence for LOC90799 (NM_138363.1,1835-1853).
caggttgaacagcttaaga

SEQ ID NO: 407656 - DNA, 19 bp, Homo sapiens
  siRNA target sequence for LOC90799 (NM_138363.1,1859-1877).
gcatgtagagaaaatcgat

SEQ ID NO: 407657 - DNA, 19 bp, Homo sapiens
  siRNA target sequence for LOC90799 (NM_138363.1,1935-1953).
ctacccttgtcaagaaaga

SEQ ID NO: 407658 - DNA, 19 bp, Homo sapiens
  siRNA target sequence for LOC90799 (NM_138363.1,1992-2010).
gcattcgtaggcaaaggtt

SEQ ID NO: 407659 - DNA, 19 bp, Homo sapiens
  siRNA target sequence for LOC90799 (NM_138363.1,2003-2021).
caaaggttgacccaatcaa

SEQ ID NO: 407660 - DNA, 19 bp, Homo sapiens
  siRNA target sequence for LOC90799 (NM_138363.1,2047-2065).
cgttcgtgctcgaaaatat

SEQ ID NO: 407661 - DNA, 19 bp, Homo sapiens
  siRNA target sequence for LOC90799 (NM_138363.1,2048-2066).
gttcgtgctcgaaaatatt

SEQ ID NO: 407662 - DNA, 19 bp, Homo sapiens
  siRNA target sequence for LOC90799 (NM_138363.1,2052-2070).
gtgctcgaaaatattatga

SEQ ID NO: 407663 - DNA, 19 bp, Homo sapiens
  siRNA target sequence for LOC90799 (NM_138363.1,2057-2075).
cgaaaatattatgatgatt

SEQ ID NO: 407664 - DNA, 19 bp, Homo sapiens
  siRNA target sequence for LOC90799 (NM_138363.1,2175-2193).
gattacgagacctaagaaa

SEQ ID NO: 407665 - DNA, 19 bp, Homo sapiens
  siRNA target sequence for LOC90799 (NM_138363.1,2246-2264).
gactccatggagaactact

SEQ ID NO: 407666 - DNA, 19 bp, Homo sapiens
  siRNA target sequence for LOC90799 (NM_138363.1,2248-2266).
ctccatggagaactactat

SEQ ID NO: 407667 - DNA, 19 bp, Homo sapiens
  siRNA target sequence for LOC90799 (NM_138363.1,2337-2355).
ctcaggcccagacattaca

SEQ ID NO: 407668 - DNA, 19 bp, Homo sapiens
  siRNA target sequence for LOC90799 (NM_138363.1,2402-2420).
cagctgcaggacatgataa

SEQ ID NO: 407669 - DNA, 19 bp, Homo sapiens
  siRNA target sequence for LOC90799 (NM_138363.1,2413-2431).
catgataacacagaatgat

SEQ ID NO: 407670 - DNA, 19 bp, Homo sapiens
  siRNA target sequence for LOC90826 (NM_138364.2,320-338).
cacgacgtgaaggaaactt

SEQ ID NO: 407671 - DNA, 19 bp, Homo sapiens
  siRNA target sequence for LOC90826 (NM_138364.2,322-340).
cgacgtgaaggaaactttt

SEQ ID NO: 407672 - DNA, 19 bp, Homo sapiens
  siRNA target sequence for LOC90826 (NM_138364.2,326-344).
gtgaaggaaacttttcagt

SEQ ID NO: 407673 - DNA, 19 bp, Homo sapiens
  siRNA target sequence for LOC90826 (NM_138364.2,336-354).
cttttcagtacacactttt

SEQ ID NO: 407674 - DNA, 19 bp, Homo sapiens
  siRNA target sequence for LOC90826 (NM_138364.2,378-396).
ctctcagtcggatacaaga

SEQ ID NO: 407675 - DNA, 19 bp, Homo sapiens
  siRNA target sequence for LOC90826 (NM_138364.2,382-400).
cagtcggatacaagactta

SEQ ID NO: 407676 - DNA, 19 bp, Homo sapiens
  siRNA target sequence for LOC90826 (NM_138364.2,384-402).
gtcggatacaagacttact

SEQ ID NO: 407677 - DNA, 19 bp, Homo sapiens
  siRNA target sequence for LOC90826 (NM_138364.2,443-461).
gaagtgatttgcaatagta

SEQ ID NO: 407678 - DNA, 19 bp, Homo sapiens
  siRNA target sequence for LOC90826 (NM_138364.2,459-477).
gtatgggggagcatctctt

SEQ ID NO: 407679 - DNA, 19 bp, Homo sapiens
  siRNA target sequence for LOC90826 (NM_138364.2,500-518).
gcagctgggtattttcata

SEQ ID NO: 407680 - DNA, 19 bp, Homo sapiens
  siRNA target sequence for LOC90826 (NM_138364.2,590-608).
gaacgctggcactttatca

SEQ ID NO: 407681 - DNA, 19 bp, Homo sapiens
  siRNA target sequence for LOC90826 (NM_138364.2,597-615).
ggcactttatcatgcttaa

SEQ ID NO: 407682 - DNA, 19 bp, Homo sapiens
  siRNA target sequence for LOC90826 (NM_138364.2,617-635).
gacaccaagaggaatacaa

SEQ ID NO: 407683 - DNA, 19 bp, Homo sapiens
  siRNA target sequence for LOC90826 (NM_138364.2,619-637).
caccaagaggaatacaatt

SEQ ID NO: 407684 - DNA, 19 bp, Homo sapiens
  siRNA target sequence for LOC90826 (NM_138364.2,748-766).
cgtgtatgcctgtgagtta

SEQ ID NO: 407685 - DNA, 19 bp, Homo sapiens
  siRNA target sequence for LOC90826 (NM_138364.2,749-767).
gtgtatgcctgtgagttat

SEQ ID NO: 407686 - DNA, 19 bp, Homo sapiens
  siRNA target sequence for LOC90826 (NM_138364.2,763-781).
gttatccaagaccatgtat

SEQ ID NO: 407687 - DNA, 19 bp, Homo sapiens
  siRNA target sequence for LOC90826 (NM_138364.2,769-787).
caagaccatgtatgaactt

SEQ ID NO: 407688 - DNA, 19 bp, Homo sapiens
  siRNA target sequence for LOC90826 (NM_138364.2,797-815).
gtcgtggcagcaaacaaga

SEQ ID NO: 407689 - DNA, 19 bp, Homo sapiens
  siRNA target sequence for LOC90826 (NM_138364.2,818-836).
gaagcagggatcaaactct

SEQ ID NO: 407690 - DNA, 19 bp, Homo sapiens
  siRNA target sequence for LOC90826 (NM_138364.2,822-840).
cagggatcaaactcttaca

SEQ ID NO: 407691 - DNA, 19 bp, Homo sapiens
  siRNA target sequence for LOC90826 (NM_138364.2,824-842).
gggatcaaactcttacata

SEQ ID NO: 407692 - DNA, 19 bp, Homo sapiens
  siRNA target sequence for LOC90826 (NM_138364.2,843-861).
cgaagtcacttgacataga

SEQ ID NO: 407693 - DNA, 19 bp, Homo sapiens
  siRNA target sequence for LOC90826 (NM_138364.2,847-865).
gtcacttgacatagagatt

SEQ ID NO: 407694 - DNA, 19 bp, Homo sapiens
  siRNA target sequence for LOC90826 (NM_138364.2,851-869).
cttgacatagagattccaa

SEQ ID NO: 407695 - DNA, 19 bp, Homo sapiens
  siRNA target sequence for LOC90826 (NM_138364.2,889-907).
gtccctagttgtaacagaa

SEQ ID NO: 407696 - DNA, 19 bp, Homo sapiens
  siRNA target sequence for LOC90826 (NM_138364.2,892-910).
cctagttgtaacagaaact

SEQ ID NO: 407697 - DNA, 19 bp, Homo sapiens
  siRNA target sequence for LOC90826 (NM_138364.2,909-927).
ctgtcgatgcaggtttatt

SEQ ID NO: 407698 - DNA, 19 bp, Homo sapiens
  siRNA target sequence for LOC90826 (NM_138364.2,959-977).
gcatgggagcatttacttt

SEQ ID NO: 407699 - DNA, 19 bp, Homo sapiens
  siRNA target sequence for LOC90826 (NM_138364.2,996-1014).
gtgaaagtgctaattgtga

SEQ ID NO: 407700 - DNA, 19 bp, Homo sapiens
  siRNA target sequence for LOC90826 (NM_138364.2,1013-1031).
gaaaagtatgggaaagtta

SEQ ID NO: 407701 - DNA, 19 bp, Homo sapiens
  siRNA target sequence for LOC90826 (NM_138364.2,1018-1036).
gtatgggaaagttatacca

SEQ ID NO: 407702 - DNA, 19 bp, Homo sapiens
  siRNA target sequence for LOC90826 (NM_138364.2,1034-1052).
ccagcaagtgctgttatat

SEQ ID NO: 407703 - DNA, 19 bp, Homo sapiens
  siRNA target sequence for LOC90826 (NM_138364.2,1064-1082).
gtagaatgtgcagagataa

SEQ ID NO: 407704 - DNA, 19 bp, Homo sapiens
  siRNA target sequence for LOC90826 (NM_138364.2,1108-1126).
ggacattgctggtatccat

SEQ ID NO: 407705 - DNA, 19 bp, Homo sapiens
  siRNA target sequence for LOC90826 (NM_138364.2,1109-1127).
gacattgctggtatccatt

SEQ ID NO: 407706 - DNA, 19 bp, Homo sapiens
  siRNA target sequence for LOC90826 (NM_138364.2,1119-1137).
gtatccatttgccaacaaa

SEQ ID NO: 407707 - DNA, 19 bp, Homo sapiens
  siRNA target sequence for LOC90826 (NM_138364.2,1150-1168).
gagtccggcttattcttct

SEQ ID NO: 407708 - DNA, 19 bp, Homo sapiens
  siRNA target sequence for LOC90826 (NM_138364.2,1156-1174).
ggcttattcttctgtagat

SEQ ID NO: 407709 - DNA, 19 bp, Homo sapiens
  siRNA target sequence for LOC90826 (NM_138364.2,1194-1212).
cttatacaactgaaaagat

SEQ ID NO: 407710 - DNA, 19 bp, Homo sapiens
  siRNA target sequence for LOC90826 (NM_138364.2,1308-1326).
ctaaaaagcctgataagat

SEQ ID NO: 407711 - DNA, 19 bp, Homo sapiens
  siRNA target sequence for LOC90826 (NM_138364.2,1349-1367).
ggcatactagatgctatta

SEQ ID NO: 407712 - DNA, 19 bp, Homo sapiens
  siRNA target sequence for LOC90826 (NM_138364.2,1350-1368).
gcatactagatgctattat

SEQ ID NO: 407713 - DNA, 19 bp, Homo sapiens
  siRNA target sequence for LOC90826 (NM_138364.2,1384-1402).
ccagcttgatgatgaacat

SEQ ID NO: 407714 - DNA, 19 bp, Homo sapiens
  siRNA target sequence for LOC90826 (NM_138364.2,1385-1403).
cagcttgatgatgaacata

SEQ ID NO: 407715 - DNA, 19 bp, Homo sapiens
  siRNA target sequence for LOC90826 (NM_138364.2,1387-1405).
gcttgatgatgaacatagt

SEQ ID NO: 407716 - DNA, 19 bp, Homo sapiens
  siRNA target sequence for LOC90826 (NM_138364.2,1388-1406).
cttgatgatgaacatagtt

SEQ ID NO: 407717 - DNA, 19 bp, Homo sapiens
  siRNA target sequence for LOC90826 (NM_138364.2,1418-1436).
cctagtgaggaaacatgtt

SEQ ID NO: 407718 - DNA, 19 bp, Homo sapiens
  siRNA target sequence for LOC90826 (NM_138364.2,1466-1484).
cttgcagactactggataa

SEQ ID NO: 407719 - DNA, 19 bp, Homo sapiens
  siRNA target sequence for LOC90826 (NM_138364.2,1496-1514).
catgtgatgatggaagtat

SEQ ID NO: 407720 - DNA, 19 bp, Homo sapiens
  siRNA target sequence for LOC90826 (NM_138364.2,1682-1700).
gtagagcagacatgtatat

SEQ ID NO: 407721 - DNA, 19 bp, Homo sapiens
  siRNA target sequence for LOC90826 (NM_138364.2,1799-1817).
ctgtatcagaccatggata

SEQ ID NO: 407722 - DNA, 19 bp, Homo sapiens
  siRNA target sequence for LOC90826 (NM_138364.2,1842-1860).
ctggaactggacagagtaa

SEQ ID NO: 407723 - DNA, 19 bp, Homo sapiens
  siRNA target sequence for LOC90826 (NM_138364.2,1844-1862).
ggaactggacagagtaata

SEQ ID NO: 407724 - DNA, 19 bp, Homo sapiens
  siRNA target sequence for LOC90826 (NM_138364.2,1884-1902).
ctttctacgtgttagatgt

SEQ ID NO: 407725 - DNA, 19 bp, Homo sapiens
  siRNA target sequence for LOC90826 (NM_138364.2,1938-1956).
gcacacttgggcaggttaa

SEQ ID NO: 407726 - DNA, 19 bp, Homo sapiens
  siRNA target sequence for LOC90826 (NM_138364.2,1939-1957).
cacacttgggcaggttaaa

SEQ ID NO: 407727 - DNA, 19 bp, Homo sapiens
  siRNA target sequence for LOC90826 (NM_138364.2,1948-1966).
gcaggttaaaccatacagt

SEQ ID NO: 407728 - DNA, 19 bp, Homo sapiens
  siRNA target sequence for LOC90826 (NM_138364.2,1949-1967).
caggttaaaccatacagtt

SEQ ID NO: 407729 - DNA, 19 bp, Homo sapiens
  siRNA target sequence for LOC90826 (NM_138364.2,1975-1993).
gaaagaccagcatcgtatt

SEQ ID NO: 407730 - DNA, 19 bp, Homo sapiens
  siRNA target sequence for LOC90826 (NM_138364.2,2012-2030).
gaagccaatcactttccta

SEQ ID NO: 407731 - DNA, 19 bp, Homo sapiens
  siRNA target sequence for LOC90826 (NM_138364.2,2065-2083).
ggatgaatctgctatgtta

SEQ ID NO: 407732 - DNA, 19 bp, Homo sapiens
  siRNA target sequence for LOC90826 (NM_138364.2,2080-2098).
gttacaaaggccaaaatca

SEQ ID NO: 407733 - DNA, 19 bp, Homo sapiens
  siRNA target sequence for LOC90826 (NM_138364.2,2088-2106).
ggccaaaatcagacaagtt

SEQ ID NO: 407734 - DNA, 19 bp, Homo sapiens
  siRNA target sequence for LOC90826 (NM_138364.2,2104-2122).
gttatggagcataattata

SEQ ID NO: 407735 - DNA, 19 bp, Homo sapiens
  siRNA target sequence for LOC90826 (NM_138364.2,2109-2127).
ggagcataattatattgga

SEQ ID NO: 407736 - DNA, 19 bp, Homo sapiens
  siRNA target sequence for LOC90826 (NM_138364.2,2110-2128).
gagcataattatattggat

SEQ ID NO: 407737 - DNA, 19 bp, Homo sapiens
  siRNA target sequence for LOC90826 (NM_138364.2,2185-2203).
caggtgtttactacaatct

SEQ ID NO: 407738 - DNA, 19 bp, Homo sapiens
  siRNA target sequence for LOC90826 (NM_138364.2,2198-2216).
caatctggaggcaagatct

SEQ ID NO: 407739 - DNA, 19 bp, Homo sapiens
  siRNA target sequence for LOC90826 (NM_138364.2,2292-2310).
cagaacgtactcttggatt

SEQ ID NO: 407740 - DNA, 19 bp, Homo sapiens
  siRNA target sequence for LOC90826 (NM_138364.2,2297-2315).
cgtactcttggattaaata

SEQ ID NO: 407741 - DNA, 19 bp, Homo sapiens
  siRNA target sequence for LOC90826 (NM_138364.2,2335-2353).
gtttcaggtacctatacgt

SEQ ID NO: 407742 - DNA, 19 bp, Homo sapiens
  siRNA target sequence for LOC90826 (NM_138364.2,2371-2389).
ctcattgccctgtatacct

SEQ ID NO: 407743 - DNA, 19 bp, Homo sapiens
  siRNA target sequence for LOC90826 (NM_138364.2,2373-2391).
cattgccctgtataccttt

SEQ ID NO: 407744 - DNA, 19 bp, Homo sapiens
  siRNA target sequence for LOC90826 (NM_138364.2,2378-2396).
ccctgtatacctttaagca

SEQ ID NO: 407745 - DNA, 19 bp, Homo sapiens
  siRNA target sequence for LOC90826 (NM_138364.2,2394-2412).
gcaagccagtggaactctt

SEQ ID NO: 407746 - DNA, 19 bp, Homo sapiens
  siRNA target sequence for LOC90826 (NM_138364.2,2395-2413).
caagccagtggaactctta

SEQ ID NO: 407747 - DNA, 19 bp, Homo sapiens
  siRNA target sequence for LOC90826 (NM_138364.2,2454-2472).
gagaagtaaaggtatacgt

SEQ ID NO: 407748 - DNA, 19 bp, Homo sapiens
  siRNA target sequence for LOC90826 (NM_138364.2,2456-2474).
gaagtaaaggtatacgttt

SEQ ID NO: 407749 - DNA, 19 bp, Homo sapiens
  siRNA target sequence for LOC90826 (NM_138364.2,2459-2477).
gtaaaggtatacgtttgta

SEQ ID NO: 407750 - DNA, 19 bp, Homo sapiens
  siRNA target sequence for LOC90826 (NM_138364.2,2487-2505).
gactgactgctattccatt

SEQ ID NO: 407751 - DNA, 19 bp, Homo sapiens
  siRNA target sequence for LOC90826 (NM_138364.2,2501-2519).
ccattttggtatcatatgt

SEQ ID NO: 407752 - DNA, 19 bp, Homo sapiens
  siRNA target sequence for LOC90826 (NM_138364.2,2528-2546).
gaagagattaggttggata

SEQ ID NO: 407753 - DNA, 19 bp, Homo sapiens
  siRNA target sequence for LOC90826 (NM_138364.2,2533-2551).
gattaggttggatacttca

SEQ ID NO: 407754 - DNA, 19 bp, Homo sapiens
  siRNA target sequence for LOC91056 (NM_138368.2,1238-1256).
gagtgctaccctcaacttt

SEQ ID NO: 407755 - DNA, 19 bp, Homo sapiens
  siRNA target sequence for LOC91056 (NM_138368.2,1240-1258).
gtgctaccctcaactttct

SEQ ID NO: 407756 - DNA, 19 bp, Homo sapiens
  siRNA target sequence for LOC91056 (NM_138368.2,1794-1812).
gatgtccatgccctttaca

SEQ ID NO: 407757 - DNA, 19 bp, Homo sapiens
  siRNA target sequence for LOC91056 (NM_138368.2,1849-1867).
cacccctgttcgtgaactt

SEQ ID NO: 407758 - DNA, 19 bp, Homo sapiens
  siRNA target sequence for LOC91056 (NM_138368.2,2056-2074).
ccagctactgtgtagcaat

SEQ ID NO: 407759 - DNA, 19 bp, Homo sapiens
  siRNA target sequence for LOC91272 (NM_138369.1,522-540).
ggaatcctacgatgaacaa

SEQ ID NO: 407760 - DNA, 19 bp, Homo sapiens
  siRNA target sequence for LOC91272 (NM_138369.1,523-541).
gaatcctacgatgaacaaa

SEQ ID NO: 407761 - DNA, 19 bp, Homo sapiens
  siRNA target sequence for MGC16044 (NM_138371.1,637-655).
gctgaacttcgaacaagat

SEQ ID NO: 407762 - DNA, 19 bp, Homo sapiens
  siRNA target sequence for MGC16044 (NM_138371.1,733-751).
ccaccatctggtacgtttt

SEQ ID NO: 407763 - DNA, 19 bp, Homo sapiens
  siRNA target sequence for MGC16044 (NM_138371.1,734-752).
caccatctggtacgttttt

SEQ ID NO: 407764 - DNA, 19 bp, Homo sapiens
  siRNA target sequence for MGC16044 (NM_138371.1,737-755).
catctggtacgtttttact

SEQ ID NO: 407765 - DNA, 19 bp, Homo sapiens
  siRNA target sequence for MGC16044 (NM_138371.1,765-783).
gcgtgtactccgattacct

SEQ ID NO: 407766 - DNA, 19 bp, Homo sapiens
  siRNA target sequence for MGC16044 (NM_138371.1,824-842).
cccgacctggtcatcatga

SEQ ID NO: 407767 - DNA, 19 bp, Homo sapiens
  siRNA target sequence for MGC16044 (NM_138371.1,827-845).
gacctggtcatcatgaatt

SEQ ID NO: 407768 - DNA, 19 bp, Homo sapiens
  siRNA target sequence for MGC16044 (NM_138371.1,1035-1053).
ccaccttcctgaaaaacga

SEQ ID NO: 407769 - DNA, 19 bp, Homo sapiens
  siRNA target sequence for MGC16044 (NM_138371.1,1078-1096).
cgccaccgaggcacgtaaa

SEQ ID NO: 407770 - DNA, 19 bp, Homo sapiens
  siRNA target sequence for MGC16044 (NM_138371.1,1080-1098).
ccaccgaggcacgtaaaca

SEQ ID NO: 407771 - DNA, 19 bp, Homo sapiens
  siRNA target sequence for MGC16044 (NM_138371.1,1081-1099).
caccgaggcacgtaaacat

SEQ ID NO: 407772 - DNA, 19 bp, Homo sapiens
  siRNA target sequence for MGC16044 (NM_138371.1,1083-1101).
ccgaggcacgtaaacataa

SEQ ID NO: 407773 - DNA, 19 bp, Homo sapiens
  siRNA target sequence for MGC16044 (NM_138371.1,1085-1103).
gaggcacgtaaacataact

SEQ ID NO: 407774 - DNA, 19 bp, Homo sapiens
  siRNA target sequence for MGC16044 (NM_138371.1,1518-1536).
ctttccagtcggatcaatt

SEQ ID NO: 407775 - DNA, 19 bp, Homo sapiens
  siRNA target sequence for MGC16044 (NM_138371.1,1523-1541).
cagtcggatcaattctatt

SEQ ID NO: 407776 - DNA, 19 bp, Homo sapiens
  siRNA target sequence for MGC16044 (NM_138371.1,1563-1581).
cagcccatgcaggtttctt

SEQ ID NO: 407777 - DNA, 19 bp, Homo sapiens
  siRNA target sequence for MGC16044 (NM_138371.1,1575-1593).
gtttcttcgtcgaagacaa

SEQ ID NO: 407778 - DNA, 19 bp, Homo sapiens
  siRNA target sequence for MGC16044 (NM_138371.1,1585-1603).
cgaagacaattttatggtt

SEQ ID NO: 407779 - DNA, 19 bp, Homo sapiens
  siRNA target sequence for MGC16044 (NM_138371.1,1652-1670).
cctgccccagtggtacata

SEQ ID NO: 407780 - DNA, 19 bp, Homo sapiens
  siRNA target sequence for MGC16044 (NM_138371.1,1721-1739).
cggcctcgaccttcaaaga

SEQ ID NO: 407781 - DNA, 19 bp, Homo sapiens
  siRNA target sequence for MGC16044 (NM_138371.1,1723-1741).
gcctcgaccttcaaagaga

SEQ ID NO: 407782 - DNA, 19 bp, Homo sapiens
  siRNA target sequence for MGC16044 (NM_138371.1,1724-1742).
cctcgaccttcaaagagaa

SEQ ID NO: 407783 - DNA, 19 bp, Homo sapiens
  siRNA target sequence for TTC5 (NM_138376.1,98-116).
gtggatcagctctactcat

SEQ ID NO: 407784 - DNA, 19 bp, Homo sapiens
  siRNA target sequence for TTC5 (NM_138376.1,100-118).
ggatcagctctactcattt

SEQ ID NO: 407785 - DNA, 19 bp, Homo sapiens
  siRNA target sequence for TTC5 (NM_138376.1,127-145).
ctatttcgagacacatagt

SEQ ID NO: 407786 - DNA, 19 bp, Homo sapiens
  siRNA target sequence for TTC5 (NM_138376.1,232-250).
ccagggcaaggcacaagtt

SEQ ID NO: 407787 - DNA, 19 bp, Homo sapiens
  siRNA target sequence for TTC5 (NM_138376.1,235-253).
gggcaaggcacaagttcta

SEQ ID NO: 407788 - DNA, 19 bp, Homo sapiens
  siRNA target sequence for TTC5 (NM_138376.1,236-254).
ggcaaggcacaagttctaa

SEQ ID NO: 407789 - DNA, 19 bp, Homo sapiens
  siRNA target sequence for TTC5 (NM_138376.1,237-255).
gcaaggcacaagttctaat

SEQ ID NO: 407790 - DNA, 19 bp, Homo sapiens
  siRNA target sequence for TTC5 (NM_138376.1,241-259).
ggcacaagttctaatgcta

SEQ ID NO: 407791 - DNA, 19 bp, Homo sapiens
  siRNA target sequence for TTC5 (NM_138376.1,242-260).
gcacaagttctaatgctaa

SEQ ID NO: 407792 - DNA, 19 bp, Homo sapiens
  siRNA target sequence for TTC5 (NM_138376.1,303-321).
ctgaggagcttctgtcaaa

SEQ ID NO: 407793 - DNA, 19 bp, Homo sapiens
  siRNA target sequence for TTC5 (NM_138376.1,368-386).
ggtgaggtgtactggaaaa

SEQ ID NO: 407794 - DNA, 19 bp, Homo sapiens
  siRNA target sequence for TTC5 (NM_138376.1,430-448).
cacccattgcaggaacaaa

SEQ ID NO: 407795 - DNA, 19 bp, Homo sapiens
  siRNA target sequence for TTC5 (NM_138376.1,434-452).
cattgcaggaacaaagtct

SEQ ID NO: 407796 - DNA, 19 bp, Homo sapiens
  siRNA target sequence for TTC5 (NM_138376.1,453-471).
ccttgcaaaacctgtcaat

SEQ ID NO: 407797 - DNA, 19 bp, Homo sapiens
  siRNA target sequence for TTC5 (NM_138376.1,487-505).
gcggactgacactgaagat

SEQ ID NO: 407798 - DNA, 19 bp, Homo sapiens
  siRNA target sequence for TTC5 (NM_138376.1,489-507).
ggactgacactgaagatga

SEQ ID NO: 407799 - DNA, 19 bp, Homo sapiens
  siRNA target sequence for TTC5 (NM_138376.1,531-549).
gtgtccgacaggctaagtt

SEQ ID NO: 407800 - DNA, 19 bp, Homo sapiens
  siRNA target sequence for TTC5 (NM_138376.1,572-590).
gatggccgctcctggtata

SEQ ID NO: 407801 - DNA, 19 bp, Homo sapiens
  siRNA target sequence for TTC5 (NM_138376.1,586-604).
gtatattcttgggaattca

SEQ ID NO: 407802 - DNA, 19 bp, Homo sapiens
  siRNA target sequence for TTC5 (NM_138376.1,727-745).
cagggcgacgttgcataaa

SEQ ID NO: 407803 - DNA, 19 bp, Homo sapiens
  siRNA target sequence for TTC5 (NM_138376.1,729-747).
gggcgacgttgcataaata

SEQ ID NO: 407804 - DNA, 19 bp, Homo sapiens
  siRNA target sequence for TTC5 (NM_138376.1,733-751).
gacgttgcataaatatgaa

SEQ ID NO: 407805 - DNA, 19 bp, Homo sapiens
  siRNA target sequence for TTC5 (NM_138376.1,1084-1102).
ggagaaagtcccctttaca

SEQ ID NO: 407806 - DNA, 19 bp, Homo sapiens
  siRNA target sequence for TTC5 (NM_138376.1,1085-1103).
gagaaagtcccctttacat

SEQ ID NO: 407807 - DNA, 19 bp, Homo sapiens
  siRNA target sequence for TTC5 (NM_138376.1,1223-1241).
cgaattcagcacaaaggaa

SEQ ID NO: 407808 - DNA, 19 bp, Homo sapiens
  siRNA target sequence for LOC91937 (NM_138379.1,60-78).
gtccaaagaacctctcatt

SEQ ID NO: 407809 - DNA, 19 bp, Homo sapiens
  siRNA target sequence for LOC91937 (NM_138379.1,75-93).
cattctctggctgatgatt

SEQ ID NO: 407810 - DNA, 19 bp, Homo sapiens
  siRNA target sequence for LOC91937 (NM_138379.1,297-315).
gtcagcaaaatatagactt

SEQ ID NO: 407811 - DNA, 19 bp, Homo sapiens
  siRNA target sequence for LOC91937 (NM_138379.1,384-402).
gtactgctgccgcatagaa

SEQ ID NO: 407812 - DNA, 19 bp, Homo sapiens
  siRNA target sequence for LOC91937 (NM_138379.1,410-428).
gctggttcaacgatgtaaa

SEQ ID NO: 407813 - DNA, 19 bp, Homo sapiens
  siRNA target sequence for LOC91937 (NM_138379.1,413-431).
ggttcaacgatgtaaagat

SEQ ID NO: 407814 - DNA, 19 bp, Homo sapiens
  siRNA target sequence for LOC91937 (NM_138379.1,522-540).
caccacccgacaaatgaca

SEQ ID NO: 407815 - DNA, 19 bp, Homo sapiens
  siRNA target sequence for LOC91937 (NM_138379.1,842-860).
caacatcccacgtgtcaat

SEQ ID NO: 407816 - DNA, 19 bp, Homo sapiens
  siRNA target sequence for LOC91937 (NM_138379.1,861-879).
gtggaaaacgagtgattct

SEQ ID NO: 407817 - DNA, 19 bp, Homo sapiens
  siRNA target sequence for LOC91937 (NM_138379.1,955-973).
gatggaatacccatgtcaa

SEQ ID NO: 407818 - DNA, 19 bp, Homo sapiens
  siRNA target sequence for LOC91937 (NM_138379.1,1085-1103).
cctattgttcgcagaaaca

SEQ ID NO: 407819 - DNA, 19 bp, Homo sapiens
  siRNA target sequence for LOC91937 (NM_138379.1,1114-1132).
gactacattggagatagta

SEQ ID NO: 407820 - DNA, 19 bp, Homo sapiens
  siRNA target sequence for LOC91937 (NM_138379.1,1168-1186).
gacgaagacggccttttta

SEQ ID NO: 407821 - DNA, 19 bp, Homo sapiens
  siRNA target sequence for LOC92170 (NM_138384.1,216-234).
gccgcaaccctctgtttca

SEQ ID NO: 407822 - DNA, 19 bp, Homo sapiens
  siRNA target sequence for LOC92170 (NM_138384.1,280-298).
ggacttggcggatcttaca

SEQ ID NO: 407823 - DNA, 19 bp, Homo sapiens
  siRNA target sequence for LOC92170 (NM_138384.1,332-350).
gaaggcctaaaaaatgtca

SEQ ID NO: 407824 - DNA, 19 bp, Homo sapiens
  siRNA target sequence for LOC92170 (NM_138384.1,396-414).
cgatggtcactgaactgat

SEQ ID NO: 407825 - DNA, 19 bp, Homo sapiens
  siRNA target sequence for LOC92170 (NM_138384.1,428-446).
cgctaccaccgaaaagaga

SEQ ID NO: 407826 - DNA, 19 bp, Homo sapiens
  siRNA target sequence for LOC92170 (NM_138384.1,763-781).
cacagtcgtcatagtcttt

SEQ ID NO: 407827 - DNA, 19 bp, Homo sapiens
  siRNA target sequence for LOC92170 (NM_138384.1,776-794).
gtctttgcgccaaaccttt

SEQ ID NO: 407828 - DNA, 19 bp, Homo sapiens
  siRNA target sequence for LOC92170 (NM_138384.1,795-813).
ggggaaggcacgctgtttt

SEQ ID NO: 407829 - DNA, 19 bp, Homo sapiens
  siRNA target sequence for LOC92305 (NM_138385.1,751-769).
gtgccttgcggcttcagaa

SEQ ID NO: 407830 - DNA, 19 bp, Homo sapiens
  siRNA target sequence for LOC92305 (NM_138385.1,753-771).
gccttgcggcttcagaaaa

SEQ ID NO: 407831 - DNA, 19 bp, Homo sapiens
  siRNA target sequence for LOC92305 (NM_138385.1,849-867).
cctgcatcctgatctacta

SEQ ID NO: 407832 - DNA, 19 bp, Homo sapiens
  siRNA target sequence for LOC92305 (NM_138385.1,1008-1026).
caggtgcccgtgtgattgt

SEQ ID NO: 407833 - DNA, 19 bp, Homo sapiens
  siRNA target sequence for LOC92345 (NM_138386.1,745-763).
ctgttgaagaactcactat

SEQ ID NO: 407834 - DNA, 19 bp, Homo sapiens
  siRNA target sequence for LOC92345 (NM_138386.1,771-789).
cctgaagatattgagttaa

SEQ ID NO: 407835 - DNA, 19 bp, Homo sapiens
  siRNA target sequence for LOC92345 (NM_138386.1,792-810).
cctcttgggatggtttcaa

SEQ ID NO: 407836 - DNA, 19 bp, Homo sapiens
  siRNA target sequence for LOC92345 (NM_138386.1,795-813).
cttgggatggtttcaagta

SEQ ID NO: 407837 - DNA, 19 bp, Homo sapiens
  siRNA target sequence for LOC92345 (NM_138386.1,800-818).
gatggtttcaagtattatt

SEQ ID NO: 407838 - DNA, 19 bp, Homo sapiens
  siRNA target sequence for LOC92345 (NM_138386.1,822-840).
caactagtaataattgaat

SEQ ID NO: 407839 - DNA, 19 bp, Homo sapiens
  siRNA target sequence for LOC92345 (NM_138386.1,828-846).
gtaataattgaatctatga

SEQ ID NO: 407840 - DNA, 19 bp, Homo sapiens
  siRNA target sequence for LOC92345 (NM_138386.1,847-865).
ctaacctacctccagttaa

SEQ ID NO: 407841 - DNA, 19 bp, Homo sapiens
  siRNA target sequence for LOC92345 (NM_138386.1,861-879).
gttaatgaggagactgtaa

SEQ ID NO: 407842 - DNA, 19 bp, Homo sapiens
  siRNA target sequence for LOC92345 (NM_138386.1,928-946).
gacctgttgcacatccatt

SEQ ID NO: 407843 - DNA, 19 bp, Homo sapiens
  siRNA target sequence for LOC92345 (NM_138386.1,953-971).
gttacggtttaattcttca

SEQ ID NO: 407844 - DNA, 19 bp, Homo sapiens
  siRNA target sequence for LOC92345 (NM_138386.1,977-995).
cattgagagtaaaggtatt

SEQ ID NO: 407845 - DNA, 19 bp, Homo sapiens
  siRNA target sequence for LOC92345 (NM_138386.1,1004-1022).
ggagactatgtattttgct

SEQ ID NO: 407846 - DNA, 19 bp, Homo sapiens
  siRNA target sequence for LOC92345 (NM_138386.1,1020-1038).
gctccatcaatgaaagatt

SEQ ID NO: 407847 - DNA, 19 bp, Homo sapiens
  siRNA target sequence for LOC92345 (NM_138386.1,1021-1039).
ctccatcaatgaaagattt

SEQ ID NO: 407848 - DNA, 19 bp, Homo sapiens
  siRNA target sequence for LOC92345 (NM_138386.1,1031-1049).
gaaagatttcactcaatat

SEQ ID NO: 407849 - DNA, 19 bp, Homo sapiens
  siRNA target sequence for LOC92345 (NM_138386.1,1116-1134).
ccaccagaggccttagatt

SEQ ID NO: 407850 - DNA, 19 bp, Homo sapiens
  siRNA target sequence for LOC92345 (NM_138386.1,1124-1142).
ggccttagattttagtgat

SEQ ID NO: 407851 - DNA, 19 bp, Homo sapiens
  siRNA target sequence for LOC92345 (NM_138386.1,1188-1206).
caaggccggaaaaaactca

SEQ ID NO: 407852 - DNA, 19 bp, Homo sapiens
  siRNA target sequence for LOC92345 (NM_138386.1,1193-1211).
ccggaaaaaactcaaatct

SEQ ID NO: 407853 - DNA, 19 bp, Homo sapiens
  siRNA target sequence for LOC92345 (NM_138386.1,1242-1260).
gaagtacatcagaattgga

SEQ ID NO: 407854 - DNA, 19 bp, Homo sapiens
  siRNA target sequence for LOC92345 (NM_138386.1,1279-1297).
cagagcatgcaaaaggata

SEQ ID NO: 407855 - DNA, 19 bp, Homo sapiens
  siRNA target sequence for LOC92345 (NM_138386.1,1283-1301).
gcatgcaaaaggatatcgt

SEQ ID NO: 407856 - DNA, 19 bp, Homo sapiens
  siRNA target sequence for LOC92345 (NM_138386.1,1293-1311).
ggatatcgtaacagagaat

SEQ ID NO: 407857 - DNA, 19 bp, Homo sapiens
  siRNA target sequence for LOC92345 (NM_138386.1,1294-1312).
gatatcgtaacagagaatt

SEQ ID NO: 407858 - DNA, 19 bp, Homo sapiens
  siRNA target sequence for LOC92345 (NM_138386.1,1308-1326).
gaattcacacgaggatttt

SEQ ID NO: 407859 - DNA, 19 bp, Homo sapiens
  siRNA target sequence for LOC92345 (NM_138386.1,1432-1450).
gacaaaataatcccattat

SEQ ID NO: 407860 - DNA, 19 bp, Homo sapiens
  siRNA target sequence for LOC92345 (NM_138386.1,1473-1491).
ccagtgtttgacatgcata

SEQ ID NO: 407861 - DNA, 19 bp, Homo sapiens
  siRNA target sequence for LOC92345 (NM_138386.1,1543-1561).
gttgggctacaccaaacat

SEQ ID NO: 407862 - DNA, 19 bp, Homo sapiens
  siRNA target sequence for LOC92345 (NM_138386.1,1559-1577).
catggctgctcatccatta

SEQ ID NO: 407863 - DNA, 19 bp, Homo sapiens
  siRNA target sequence for LOC92345 (NM_138386.1,1566-1584).
gctcatccattacttaact

SEQ ID NO: 407864 - DNA, 19 bp, Homo sapiens
  siRNA target sequence for LOC92345 (NM_138386.1,1567-1585).
ctcatccattacttaactt

SEQ ID NO: 407865 - DNA, 19 bp, Homo sapiens
  siRNA target sequence for LOC92345 (NM_138386.1,1635-1653).
ccctcttctggagatagta

SEQ ID NO: 407866 - DNA, 19 bp, Homo sapiens
  siRNA target sequence for LOC92345 (NM_138386.1,1636-1654).
cctcttctggagatagtaa

SEQ ID NO: 407867 - DNA, 19 bp, Homo sapiens
  siRNA target sequence for LOC92345 (NM_138386.1,1644-1662).
ggagatagtaattctcatt

SEQ ID NO: 407868 - DNA, 19 bp, Homo sapiens
  siRNA target sequence for G6PC3 (NM_138387.1,423-441).
catcttcaagtggtttctt

SEQ ID NO: 407869 - DNA, 19 bp, Homo sapiens
  siRNA target sequence for G6PC3 (NM_138387.1,469-487).
catgagtctggttactaca

SEQ ID NO: 407870 - DNA, 19 bp, Homo sapiens
  siRNA target sequence for G6PC3 (NM_138387.1,575-593).
cagccctctggcccataat

SEQ ID NO: 407871 - DNA, 19 bp, Homo sapiens
  siRNA target sequence for G6PC3 (NM_138387.1,577-595).
gccctctggcccataatga

SEQ ID NO: 407872 - DNA, 19 bp, Homo sapiens
  siRNA target sequence for G6PC3 (NM_138387.1,652-670).
cctagcctggcttattgca

SEQ ID NO: 407873 - DNA, 19 bp, Homo sapiens
  siRNA target sequence for G6PC3 (NM_138387.1,661-679).
gcttattgcaccttccttt

SEQ ID NO: 407874 - DNA, 19 bp, Homo sapiens
  siRNA target sequence for G6PC3 (NM_138387.1,688-706).
ggcttgtcgcgaatcttca

SEQ ID NO: 407875 - DNA, 19 bp, Homo sapiens
  siRNA target sequence for G6PC3 (NM_138387.1,689-707).
gcttgtcgcgaatcttcat

SEQ ID NO: 407876 - DNA, 19 bp, Homo sapiens
  siRNA target sequence for G6PC3 (NM_138387.1,693-711).
gtcgcgaatcttcatctta

SEQ ID NO: 407877 - DNA, 19 bp, Homo sapiens
  siRNA target sequence for G6PC3 (NM_138387.1,729-747).
ggtgctggctggcctaata

SEQ ID NO: 407878 - DNA, 19 bp, Homo sapiens
  siRNA target sequence for G6PC3 (NM_138387.1,795-813).
gcgggagctaagcttctat

SEQ ID NO: 407879 - DNA, 19 bp, Homo sapiens
  siRNA target sequence for G6PC3 (NM_138387.1,841-859).
ggcaccagcctcatctatt

SEQ ID NO: 407880 - DNA, 19 bp, Homo sapiens
  siRNA target sequence for G6PC3 (NM_138387.1,855-873).
ctattggaccctctttaca

SEQ ID NO: 407881 - DNA, 19 bp, Homo sapiens
  siRNA target sequence for G6PC3 (NM_138387.1,1050-1068).
gggaaatggccagaagata

SEQ ID NO: 407882 - DNA, 19 bp, Homo sapiens
  siRNA target sequence for LOC92689 (NM_138389.1,210-228).
ggagacaaagcagaagtta

SEQ ID NO: 407883 - DNA, 19 bp, Homo sapiens
  siRNA target sequence for LOC92689 (NM_138389.1,229-247).
ctgagatgcctaatagtga

SEQ ID NO: 407884 - DNA, 19 bp, Homo sapiens
  siRNA target sequence for LOC92689 (NM_138389.1,231-249).
gagatgcctaatagtgatt

SEQ ID NO: 407885 - DNA, 19 bp, Homo sapiens
  siRNA target sequence for LOC92689 (NM_138389.1,233-251).
gatgcctaatagtgattct

SEQ ID NO: 407886 - DNA, 19 bp, Homo sapiens
  siRNA target sequence for LOC92689 (NM_138389.1,431-449).
cgtgactgaggatacactt

SEQ ID NO: 407887 - DNA, 19 bp, Homo sapiens
  siRNA target sequence for LOC92689 (NM_138389.1,441-459).
gatacacttgctgaatgta

SEQ ID NO: 407888 - DNA, 19 bp, Homo sapiens
  siRNA target sequence for LOC92689 (NM_138389.1,604-622).
ccacagtaggtcatggatt

SEQ ID NO: 407889 - DNA, 19 bp, Homo sapiens
  siRNA target sequence for LOC92689 (NM_138389.1,659-677).
gattcatggtgtaaattct

SEQ ID NO: 407890 - DNA, 19 bp, Homo sapiens
  siRNA target sequence for LOC92689 (NM_138389.1,685-703).
ctgaaggagcccaaccaaa

SEQ ID NO: 407891 - DNA, 19 bp, Homo sapiens
  siRNA target sequence for LOC92689 (NM_138389.1,691-709).
gagcccaaccaaatactga

SEQ ID NO: 407892 - DNA, 19 bp, Homo sapiens
  siRNA target sequence for LOC92689 (NM_138389.1,856-874).
gccttgatgcgttggaatt

SEQ ID NO: 407893 - DNA, 19 bp, Homo sapiens
  siRNA target sequence for LOC92689 (NM_138389.1,858-876).
cttgatgcgttggaattca

SEQ ID NO: 407894 - DNA, 19 bp, Homo sapiens
  siRNA target sequence for LOC92689 (NM_138389.1,869-887).
ggaattcatcggcaagaaa

SEQ ID NO: 407895 - DNA, 19 bp, Homo sapiens
  siRNA target sequence for LOC92689 (NM_138389.1,1121-1139).
ggttcagtcatttttagca

SEQ ID NO: 407896 - DNA, 19 bp, Homo sapiens
  siRNA target sequence for LOC92689 (NM_138389.1,1127-1145).
gtcatttttagcatcactt

SEQ ID NO: 407897 - DNA, 19 bp, Homo sapiens
  siRNA target sequence for LOC92689 (NM_138389.1,1152-1170).
gagaagctggaactcttaa

SEQ ID NO: 407898 - DNA, 19 bp, Homo sapiens
  siRNA target sequence for LOC92689 (NM_138389.1,1166-1184).
cttaaaaaatgacctaatt

SEQ ID NO: 407899 - DNA, 19 bp, Homo sapiens
  siRNA target sequence for LOC92689 (NM_138389.1,1179-1197).
ctaatttccattaaagaca

SEQ ID NO: 407900 - DNA, 19 bp, Homo sapiens
  siRNA target sequence for LOC92689 (NM_138389.1,1314-1332).
gccacacctgacaaactca

SEQ ID NO: 407901 - DNA, 19 bp, Homo sapiens
  siRNA target sequence for LOC92689 (NM_138389.1,1316-1334).
cacacctgacaaactcaat

SEQ ID NO: 407902 - DNA, 19 bp, Homo sapiens
  siRNA target sequence for LOC92689 (NM_138389.1,1318-1336).
cacctgacaaactcaataa

SEQ ID NO: 407903 - DNA, 19 bp, Homo sapiens
  siRNA target sequence for LOC92689 (NM_138389.1,1389-1407).
gtagatgtggcaaaagtgt

SEQ ID NO: 407904 - DNA, 19 bp, Homo sapiens
  siRNA target sequence for LOC92689 (NM_138389.1,1404-1422).
gtgtccgaagaagaaacaa

SEQ ID NO: 407905 - DNA, 19 bp, Homo sapiens
  siRNA target sequence for LOC92689 (NM_138389.1,1452-1470).
gaccctcaagaagacaaaa

SEQ ID NO: 407906 - DNA, 19 bp, Homo sapiens
  siRNA target sequence for LOC92689 (NM_138389.1,1492-1510).
ccatagaggaagtatacat

SEQ ID NO: 407907 - DNA, 19 bp, Homo sapiens
  siRNA target sequence for LOC92689 (NM_138389.1,1508-1526).
catgtcgtccattgaaagt

SEQ ID NO: 407908 - DNA, 19 bp, Homo sapiens
  siRNA target sequence for LOC92689 (NM_138389.1,1535-1553).
ggtaacagcgcgctgtatt

SEQ ID NO: 407909 - DNA, 19 bp, Homo sapiens
  siRNA target sequence for LOC92689 (NM_138389.1,1662-1680).
gaagtggcctctttatcaa

SEQ ID NO: 407910 - DNA, 19 bp, Homo sapiens
  siRNA target sequence for LOC92689 (NM_138389.1,1665-1683).
gtggcctctttatcaaaga

SEQ ID NO: 407911 - DNA, 19 bp, Homo sapiens
  siRNA target sequence for LOC92689 (NM_138389.1,1734-1752).
cttaaccccatgatcagta

SEQ ID NO: 407912 - DNA, 19 bp, Homo sapiens
  siRNA target sequence for LOC92689 (NM_138389.1,1739-1757).
ccccatgatcagtagtgta

SEQ ID NO: 407913 - DNA, 19 bp, Homo sapiens
  siRNA target sequence for LOC92689 (NM_138389.1,1740-1758).
cccatgatcagtagtgtat

SEQ ID NO: 407914 - DNA, 19 bp, Homo sapiens
  siRNA target sequence for LOC92689 (NM_138389.1,1741-1759).
ccatgatcagtagtgtatt

SEQ ID NO: 407915 - DNA, 19 bp, Homo sapiens
  siRNA target sequence for LOC92689 (NM_138389.1,1764-1782).
gagggctgcaacagtacaa

SEQ ID NO: 407916 - DNA, 19 bp, Homo sapiens
  siRNA target sequence for LOC92689 (NM_138389.1,1772-1790).
caacagtacaacgtacata

SEQ ID NO: 407917 - DNA, 19 bp, Homo sapiens
  siRNA target sequence for LOC92689 (NM_138389.1,1818-1836).
gttctgcaggtctcacata

SEQ ID NO: 407918 - DNA, 19 bp, Homo sapiens
  siRNA target sequence for LOC92689 (NM_138389.1,1838-1856).
ccagaccagttgtttgaaa

SEQ ID NO: 407919 - DNA, 19 bp, Homo sapiens
  siRNA target sequence for LOC92691 (NM_138390.2,325-343).
cgcccagaatccatcatca

SEQ ID NO: 407920 - DNA, 19 bp, Homo sapiens
  siRNA target sequence for LOC92691 (NM_138390.2,326-344).
gcccagaatccatcatcat

SEQ ID NO: 407921 - DNA, 19 bp, Homo sapiens
  siRNA target sequence for LOC92691 (NM_138390.2,329-347).
cagaatccatcatcatcta

SEQ ID NO: 407922 - DNA, 19 bp, Homo sapiens
  siRNA target sequence for LOC92691 (NM_138390.2,348-366).
ccgctcagacaatgagaaa

SEQ ID NO: 407923 - DNA, 19 bp, Homo sapiens
  siRNA target sequence for LOC92691 (NM_138390.2,349-367).
cgctcagacaatgagaaaa

SEQ ID NO: 407924 - DNA, 19 bp, Homo sapiens
  siRNA target sequence for LOC92691 (NM_138390.2,375-393).
ggagcccggagaatcagaa

SEQ ID NO: 407925 - DNA, 19 bp, Homo sapiens
  siRNA target sequence for LOC92691 (NM_138390.2,395-413).
gtggagatcagcctaaaga

SEQ ID NO: 407926 - DNA, 19 bp, Homo sapiens
  siRNA target sequence for LOC92691 (NM_138390.2,438-456).
ctatcctgtggatgatgat

SEQ ID NO: 407927 - DNA, 19 bp, Homo sapiens
  siRNA target sequence for LOC92691 (NM_138390.2,442-460).
cctgtggatgatgatatgt

SEQ ID NO: 407928 - DNA, 19 bp, Homo sapiens
  siRNA target sequence for LOC92691 (NM_138390.2,480-498).
ccgctacgtcaccttaact

SEQ ID NO: 407929 - DNA, 19 bp, Homo sapiens
  siRNA target sequence for LOC92691 (NM_138390.2,504-522).
catcacacgagggaagaaa

SEQ ID NO: 407930 - DNA, 19 bp, Homo sapiens
  siRNA target sequence for LOC92691 (NM_138390.2,538-556).
gacatccatgtcacattga

SEQ ID NO: 407931 - DNA, 19 bp, Homo sapiens
  siRNA target sequence for LOC92691 (NM_138390.2,608-626).
cgacgcctgaaggaagaat

SEQ ID NO: 407932 - DNA, 19 bp, Homo sapiens
  siRNA target sequence for LOC92691 (NM_138390.2,750-768).
catcttcctcgtgtataat

SEQ ID NO: 407933 - DNA, 19 bp, Homo sapiens
  siRNA target sequence for LOC92691 (NM_138390.2,1006-1024).
gaatccgacaatatctcaa

SEQ ID NO: 407934 - DNA, 19 bp, Homo sapiens
  siRNA target sequence for LOC92691 (NM_138390.2,1041-1059).
ggaccccatccaagaagta

SEQ ID NO: 407935 - DNA, 19 bp, Homo sapiens
  siRNA target sequence for C1orf37 (NM_138391.3,548-566).
cgtcctgaggacattgtga

SEQ ID NO: 407936 - DNA, 19 bp, Homo sapiens
  siRNA target sequence for C1orf37 (NM_138391.3,549-567).
gtcctgaggacattgtgaa

SEQ ID NO: 407937 - DNA, 19 bp, Homo sapiens
  siRNA target sequence for C1orf37 (NM_138391.3,672-690).
gtctgcgaccagagtcaat

SEQ ID NO: 407938 - DNA, 19 bp, Homo sapiens
  siRNA target sequence for DP1L1 (NM_138393.1,277-295).
gcaatctcatcggatttgt

SEQ ID NO: 407939 - DNA, 19 bp, Homo sapiens
  siRNA target sequence for DP1L1 (NM_138393.1,300-318).
cccgcatatgcctcaatca

SEQ ID NO: 407940 - DNA, 19 bp, Homo sapiens
  siRNA target sequence for DP1L1 (NM_138393.1,301-319).
ccgcatatgcctcaatcaa

SEQ ID NO: 407941 - DNA, 19 bp, Homo sapiens
  siRNA target sequence for DP1L1 (NM_138393.1,302-320).
cgcatatgcctcaatcaaa

SEQ ID NO: 407942 - DNA, 19 bp, Homo sapiens
  siRNA target sequence for DP1L1 (NM_138393.1,496-514).
gggctctcatgctgtatca

SEQ ID NO: 407943 - DNA, 19 bp, Homo sapiens
  siRNA target sequence for DP1L1 (NM_138393.1,522-540).
gtgcgtccgctgttcctaa

SEQ ID NO: 407944 - DNA, 19 bp, Homo sapiens
  siRNA target sequence for DP1L1 (NM_138393.1,552-570).
gccgtagacagaatcatga

SEQ ID NO: 407945 - DNA, 19 bp, Homo sapiens
  siRNA target sequence for LOC92979 (NM_138396.3,423-441).
ctcggctccgcatgtttct

SEQ ID NO: 407946 - DNA, 19 bp, Homo sapiens
  siRNA target sequence for LOC92979 (NM_138396.3,764-782).
gagcagggggagctcttaa

SEQ ID NO: 407947 - DNA, 19 bp, Homo sapiens
  siRNA target sequence for LOC92979 (NM_138396.3,961-979).
ccagattgctgccatagtt

SEQ ID NO: 407948 - DNA, 19 bp, Homo sapiens
  siRNA target sequence for LOC92979 (NM_138396.3,1186-1204).
gtggaaggtcctaaattat

SEQ ID NO: 407949 - DNA, 19 bp, Homo sapiens
  siRNA target sequence for LOC92979 (NM_138396.3,1188-1206).
ggaaggtcctaaattatga

SEQ ID NO: 407950 - DNA, 19 bp, Homo sapiens
  siRNA target sequence for LOC92979 (NM_138396.3,1340-1358).
cctcagcgctgcggttata

SEQ ID NO: 407951 - DNA, 19 bp, Homo sapiens
  siRNA target sequence for LOC92979 (NM_138396.3,1343-1361).
cagcgctgcggttatacaa

SEQ ID NO: 407952 - DNA, 19 bp, Homo sapiens
  siRNA target sequence for LOC92979 (NM_138396.3,1346-1364).
cgctgcggttatacaatct

SEQ ID NO: 407953 - DNA, 19 bp, Homo sapiens
  siRNA target sequence for LOC93109 (NM_138399.2,194-212).
cccacgcgctgcttctcta

SEQ ID NO: 407954 - DNA, 19 bp, Homo sapiens
  siRNA target sequence for LOC93109 (NM_138399.2,195-213).
ccacgcgctgcttctctat

SEQ ID NO: 407955 - DNA, 19 bp, Homo sapiens
  siRNA target sequence for LOC93109 (NM_138399.2,199-217).
gcgctgcttctctatctga

SEQ ID NO: 407956 - DNA, 19 bp, Homo sapiens
  siRNA target sequence for LOC93109 (NM_138399.2,321-339).
cacaatccaggttttcact

SEQ ID NO: 407957 - DNA, 19 bp, Homo sapiens
  siRNA target sequence for LOC93109 (NM_138399.2,353-371).
cagctattgacttagtgaa

SEQ ID NO: 407958 - DNA, 19 bp, Homo sapiens
  siRNA target sequence for LOC93109 (NM_138399.2,356-374).
ctattgacttagtgaactt

SEQ ID NO: 407959 - DNA, 19 bp, Homo sapiens
  siRNA target sequence for LOC93109 (NM_138399.2,400-418).
ggatccaaattcaagtcta

SEQ ID NO: 407960 - DNA, 19 bp, Homo sapiens
  siRNA target sequence for LOC93109 (NM_138399.2,459-477).
gctcagggccagtgtgttt

SEQ ID NO: 407961 - DNA, 19 bp, Homo sapiens
  siRNA target sequence for LOC93109 (NM_138399.2,578-596).
cgagcctgctgcaggaaaa

SEQ ID NO: 407962 - DNA, 19 bp, Homo sapiens
  siRNA target sequence for LOC93109 (NM_138399.2,835-853).
gcactggacctcgctatta

SEQ ID NO: 407963 - DNA, 19 bp, Homo sapiens
  siRNA target sequence for LOC93109 (NM_138399.2,885-903).
gagacaggccttaggattt

SEQ ID NO: 407964 - DNA, 19 bp, Homo sapiens
  siRNA target sequence for LOC93343 (NM_138401.1,174-192).
gagcttcgcgcagaaatct

SEQ ID NO: 407965 - DNA, 19 bp, Homo sapiens
  siRNA target sequence for LOC93343 (NM_138401.1,307-325).
gtctgcgaccccatggatt

SEQ ID NO: 407966 - DNA, 19 bp, Homo sapiens
  siRNA target sequence for LOC93343 (NM_138401.1,429-447).
gacagtgcctggatacctt

SEQ ID NO: 407967 - DNA, 19 bp, Homo sapiens
  siRNA target sequence for LOC93343 (NM_138401.1,435-453).
gcctggataccttcgaata

SEQ ID NO: 407968 - DNA, 19 bp, Homo sapiens
  siRNA target sequence for C6orf117 (NM_138409.1,193-211).
gtccgcccagaggttaatt

SEQ ID NO: 407969 - DNA, 19 bp, Homo sapiens
  siRNA target sequence for C6orf117 (NM_138409.1,196-214).
cgcccagaggttaatttct

SEQ ID NO: 407970 - DNA, 19 bp, Homo sapiens
  siRNA target sequence for C6orf117 (NM_138409.1,202-220).
gaggttaatttctaacaga

SEQ ID NO: 407971 - DNA, 19 bp, Homo sapiens
  siRNA target sequence for C6orf117 (NM_138409.1,225-243).
cccagcaatcggcatctaa

SEQ ID NO: 407972 - DNA, 19 bp, Homo sapiens
  siRNA target sequence for C6orf117 (NM_138409.1,226-244).
ccagcaatcggcatctaat

SEQ ID NO: 407973 - DNA, 19 bp, Homo sapiens
  siRNA target sequence for C6orf117 (NM_138409.1,227-245).
cagcaatcggcatctaatt

SEQ ID NO: 407974 - DNA, 19 bp, Homo sapiens
  siRNA target sequence for C6orf117 (NM_138409.1,229-247).
gcaatcggcatctaattct

SEQ ID NO: 407975 - DNA, 19 bp, Homo sapiens
  siRNA target sequence for C6orf117 (NM_138409.1,236-254).
gcatctaattctgattaca

SEQ ID NO: 407976 - DNA, 19 bp, Homo sapiens
  siRNA target sequence for C6orf117 (NM_138409.1,253-271).
cacctgggaatatgaatat

SEQ ID NO: 407977 - DNA, 19 bp, Homo sapiens
  siRNA target sequence for C6orf117 (NM_138409.1,258-276).
gggaatatgaatattatga

SEQ ID NO: 407978 - DNA, 19 bp, Homo sapiens
  siRNA target sequence for C6orf117 (NM_138409.1,535-553).
ctttcactgctacatcaat

SEQ ID NO: 407979 - DNA, 19 bp, Homo sapiens
  siRNA target sequence for C6orf117 (NM_138409.1,723-741).
gggaggatgatcttctgat

SEQ ID NO: 407980 - DNA, 19 bp, Homo sapiens
  siRNA target sequence for C6orf117 (NM_138409.1,725-743).
gaggatgatcttctgattt

SEQ ID NO: 407981 - DNA, 19 bp, Homo sapiens
  siRNA target sequence for C6orf117 (NM_138409.1,739-757).
gatttctgaaccacctatt

SEQ ID NO: 407982 - DNA, 19 bp, Homo sapiens
  siRNA target sequence for C6orf117 (NM_138409.1,744-762).
ctgaaccacctattgttct

SEQ ID NO: 407983 - DNA, 19 bp, Homo sapiens
  siRNA target sequence for LOC112817 (NM_138413.2,573-591).
ccaatggcgagtttccttt

SEQ ID NO: 407984 - DNA, 19 bp, Homo sapiens
  siRNA target sequence for LOC112817 (NM_138413.2,748-766).
ggtgaccccttgctactat

SEQ ID NO: 407985 - DNA, 19 bp, Homo sapiens
  siRNA target sequence for LOC112817 (NM_138413.2,1007-1025).
ggatcggctggctttctga

SEQ ID NO: 407986 - DNA, 19 bp, Homo sapiens
  siRNA target sequence for LOC112817 (NM_138413.2,1008-1026).
gatcggctggctttctgat

SEQ ID NO: 407987 - DNA, 19 bp, Homo sapiens
  siRNA target sequence for LOC112817 (NM_138413.2,1219-1237).
ggactggtttggctactat

SEQ ID NO: 407988 - DNA, 19 bp, Homo sapiens
  siRNA target sequence for LOC112869 (NM_138414.1,199-217).
cccgcattgcagaacttct

SEQ ID NO: 407989 - DNA, 19 bp, Homo sapiens
  siRNA target sequence for LOC112869 (NM_138414.1,259-277).
gttcgcggagcgaacacaa

SEQ ID NO: 407990 - DNA, 19 bp, Homo sapiens
  siRNA target sequence for LOC112869 (NM_138414.1,262-280).
cgcggagcgaacacaactt

SEQ ID NO: 407991 - DNA, 19 bp, Homo sapiens
  siRNA target sequence for LOC112869 (NM_138414.1,265-283).
ggagcgaacacaacttagt

SEQ ID NO: 407992 - DNA, 19 bp, Homo sapiens
  siRNA target sequence for LOC112869 (NM_138414.1,268-286).
gcgaacacaacttagtgaa

SEQ ID NO: 407993 - DNA, 19 bp, Homo sapiens
  siRNA target sequence for LOC112869 (NM_138414.1,351-369).
ctgcgtggcctctacacaa

SEQ ID NO: 407994 - DNA, 19 bp, Homo sapiens
  siRNA target sequence for LOC112869 (NM_138414.1,458-476).
gcggattgcggccaagatt

SEQ ID NO: 407995 - DNA, 19 bp, Homo sapiens
  siRNA target sequence for LOC112869 (NM_138414.1,727-745).
gccatgccaccaacaagta

SEQ ID NO: 407996 - DNA, 19 bp, Homo sapiens
  siRNA target sequence for LOC112869 (NM_138414.1,953-971).
ctactcggtcctgtttgaa

SEQ ID NO: 407997 - DNA, 19 bp, Homo sapiens
  siRNA target sequence for LOC112869 (NM_138414.1,1025-1043).
cgtggtggcttgtaaggaa

SEQ ID NO: 407998 - DNA, 19 bp, Homo sapiens
  siRNA target sequence for LOC112970 (NM_138417.1,252-270).
ctggactcgcttaactaca

SEQ ID NO: 407999 - DNA, 19 bp, Homo sapiens
  siRNA target sequence for LOC112970 (NM_138417.1,255-273).
gactcgcttaactacatca

SEQ ID NO: 408000 - DNA, 19 bp, Homo sapiens
  siRNA target sequence for LOC112970 (NM_138417.1,257-275).
ctcgcttaactacatcaaa

SEQ ID NO: 408001 - DNA, 19 bp, Homo sapiens
  siRNA target sequence for LOC112970 (NM_138417.1,490-508).
ctgcggactctgtagtaaa

SEQ ID NO: 408002 - DNA, 19 bp, Homo sapiens
  siRNA target sequence for LOC112970 (NM_138417.1,494-512).
ggactctgtagtaaatgga

SEQ ID NO: 408003 - DNA, 19 bp, Homo sapiens
  siRNA target sequence for LOC112970 (NM_138417.1,615-633).
gggtccggtgccttttact

SEQ ID NO: 408004 - DNA, 19 bp, Homo sapiens
  siRNA target sequence for LOC112970 (NM_138417.1,617-635).
gtccggtgccttttactct

SEQ ID NO: 408005 - DNA, 19 bp, Homo sapiens
  siRNA target sequence for LOC112970 (NM_138417.1,696-714).
gaccggcctttattcactt

SEQ ID NO: 408006 - DNA, 19 bp, Homo sapiens
  siRNA target sequence for LOC112970 (NM_138417.1,845-863).
ccaggtcacgagtcaagta

SEQ ID NO: 408007 - DNA, 19 bp, Homo sapiens
  siRNA target sequence for LOC112970 (NM_138417.1,978-996).
cgccttcgtcgccagttta

SEQ ID NO: 408008 - DNA, 19 bp, Homo sapiens
  siRNA target sequence for LOC112970 (NM_138417.1,979-997).
gccttcgtcgccagtttat

SEQ ID NO: 408009 - DNA, 19 bp, Homo sapiens
  siRNA target sequence for LOC112970 (NM_138417.1,980-998).
ccttcgtcgccagtttatt

SEQ ID NO: 408010 - DNA, 19 bp, Homo sapiens
  siRNA target sequence for LOC112970 (NM_138417.1,981-999).
cttcgtcgccagtttattt

SEQ ID NO: 408011 - DNA, 19 bp, Homo sapiens
  siRNA target sequence for LOC112970 (NM_138417.1,984-1002).
cgtcgccagtttatttcgt

SEQ ID NO: 408012 - DNA, 19 bp, Homo sapiens
  siRNA target sequence for LOC112970 (NM_138417.1,985-1003).
gtcgccagtttatttcgta

SEQ ID NO: 408013 - DNA, 19 bp, Homo sapiens
  siRNA target sequence for LOC112970 (NM_138417.1,990-1008).
cagtttatttcgtacacta

SEQ ID NO: 408014 - DNA, 19 bp, Homo sapiens
  siRNA target sequence for LOC112970 (NM_138417.1,992-1010).
gtttatttcgtacactaaa

SEQ ID NO: 408015 - DNA, 19 bp, Homo sapiens
  siRNA target sequence for LOC112970 (NM_138417.1,1035-1053).
ccgcaactggccaacatgt

SEQ ID NO: 408016 - DNA, 19 bp, Homo sapiens
  siRNA target sequence for DUFD1 (NM_138419.2,111-129).
catactgaatatcttaaga

SEQ ID NO: 408017 - DNA, 19 bp, Homo sapiens
  siRNA target sequence for DUFD1 (NM_138419.2,155-173).
ctgtagaacaggttttgct

SEQ ID NO: 408018 - DNA, 19 bp, Homo sapiens
  siRNA target sequence for DUFD1 (NM_138419.2,203-221).
ctaggagtattgttcgtat

SEQ ID NO: 408019 - DNA, 19 bp, Homo sapiens
  siRNA target sequence for DUFD1 (NM_138419.2,206-224).
ggagtattgttcgtattat

SEQ ID NO: 408020 - DNA, 19 bp, Homo sapiens
  siRNA target sequence for DUFD1 (NM_138419.2,247-265).
ccttgtcgaagacctaatt

SEQ ID NO: 408021 - DNA, 19 bp, Homo sapiens
  siRNA target sequence for DUFD1 (NM_138419.2,248-266).
cttgtcgaagacctaattt

SEQ ID NO: 408022 - DNA, 19 bp, Homo sapiens
  siRNA target sequence for DUFD1 (NM_138419.2,251-269).
gtcgaagacctaattttga

SEQ ID NO: 408023 - DNA, 19 bp, Homo sapiens
  siRNA target sequence for DUFD1 (NM_138419.2,257-275).
gacctaattttgagttgat

SEQ ID NO: 408024 - DNA, 19 bp, Homo sapiens
  siRNA target sequence for DUFD1 (NM_138419.2,311-329).
gatctatggttccatcttt

SEQ ID NO: 408025 - DNA, 19 bp, Homo sapiens
  siRNA target sequence for DUFD1 (NM_138419.2,366-384).
cagttatctcagatttcga

SEQ ID NO: 408026 - DNA, 19 bp, Homo sapiens
  siRNA target sequence for DUFD1 (NM_138419.2,630-648).
gagtgacgagcgcattagt

SEQ ID NO: 408027 - DNA, 19 bp, Homo sapiens
  siRNA target sequence for DUFD1 (NM_138419.2,632-650).
gtgacgagcgcattagttt

SEQ ID NO: 408028 - DNA, 19 bp, Homo sapiens
  siRNA target sequence for DUFD1 (NM_138419.2,765-783).
ccagccaccgtgttttcct

SEQ ID NO: 408029 - DNA, 19 bp, Homo sapiens
  siRNA target sequence for DUFD1 (NM_138419.2,785-803).
ccgtacaaccaggatctaa

SEQ ID NO: 408030 - DNA, 19 bp, Homo sapiens
  siRNA target sequence for DUFD1 (NM_138419.2,786-804).
cgtacaaccaggatctaat

SEQ ID NO: 408031 - DNA, 19 bp, Homo sapiens
  siRNA target sequence for DUFD1 (NM_138419.2,787-805).
gtacaaccaggatctaata

SEQ ID NO: 408032 - DNA, 19 bp, Homo sapiens
  siRNA target sequence for DUFD1 (NM_138419.2,790-808).
caaccaggatctaataata

SEQ ID NO: 408033 - DNA, 19 bp, Homo sapiens
  siRNA target sequence for DUFD1 (NM_138419.2,793-811).
ccaggatctaataatattt

SEQ ID NO: 408034 - DNA, 19 bp, Homo sapiens
  siRNA target sequence for DUFD1 (NM_138419.2,847-865).
cagaacccggctgctaata

SEQ ID NO: 408035 - DNA, 19 bp, Homo sapiens
  siRNA target sequence for DUFD1 (NM_138419.2,856-874).
gctgctaataagaccaatt

SEQ ID NO: 408036 - DNA, 19 bp, Homo sapiens
  siRNA target sequence for DUFD1 (NM_138419.2,857-875).
ctgctaataagaccaatta

SEQ ID NO: 408037 - DNA, 19 bp, Homo sapiens
  siRNA target sequence for DUFD1 (NM_138419.2,867-885).
gaccaattatagtcatcat

SEQ ID NO: 408038 - DNA, 19 bp, Homo sapiens
  siRNA target sequence for DUFD1 (NM_138419.2,870-888).
caattatagtcatcattca

SEQ ID NO: 408039 - DNA, 19 bp, Homo sapiens
  siRNA target sequence for DUFD1 (NM_138419.2,925-943).
gacgttctaaaggatatga

SEQ ID NO: 408040 - DNA, 19 bp, Homo sapiens
  siRNA target sequence for DUFD1 (NM_138419.2,927-945).
cgttctaaaggatatgaat

SEQ ID NO: 408041 - DNA, 19 bp, Homo sapiens
  siRNA target sequence for DUFD1 (NM_138419.2,928-946).
gttctaaaggatatgaata

SEQ ID NO: 408042 - DNA, 19 bp, Homo sapiens
  siRNA target sequence for DUFD1 (NM_138419.2,979-997).
ggcggtagacccattcata

SEQ ID NO: 408043 - DNA, 19 bp, Homo sapiens
  siRNA target sequence for DUFD1 (NM_138419.2,980-998).
gcggtagacccattcataa

SEQ ID NO: 408044 - DNA, 19 bp, Homo sapiens
  siRNA target sequence for DUFD1 (NM_138419.2,982-1000).
ggtagacccattcataaga

SEQ ID NO: 408045 - DNA, 19 bp, Homo sapiens
  siRNA target sequence for DUFD1 (NM_138419.2,1110-1128).
ggaatcttccccattttct

SEQ ID NO: 408046 - DNA, 19 bp, Homo sapiens
  siRNA target sequence for DUFD1 (NM_138419.2,1142-1160).
caaggtttggacatcacat

SEQ ID NO: 408047 - DNA, 19 bp, Homo sapiens
  siRNA target sequence for DUFD1 (NM_138419.2,1219-1237).
caaggtatcagcaacacaa

SEQ ID NO: 408048 - DNA, 19 bp, Homo sapiens
  siRNA target sequence for LOC113174 (NM_138421.1,154-172).
gcggactcatccagattgt

SEQ ID NO: 408049 - DNA, 19 bp, Homo sapiens
  siRNA target sequence for LOC113174 (NM_138421.1,155-173).
cggactcatccagattgtt

SEQ ID NO: 408050 - DNA, 19 bp, Homo sapiens
  siRNA target sequence for LOC113174 (NM_138421.1,188-206).
caaatctagctcagatgat

SEQ ID NO: 408051 - DNA, 19 bp, Homo sapiens
  siRNA target sequence for LOC113174 (NM_138421.1,254-272).
cagagtatgggatatgtca

SEQ ID NO: 408052 - DNA, 19 bp, Homo sapiens
  siRNA target sequence for LOC113174 (NM_138421.1,256-274).
gagtatgggatatgtcaat

SEQ ID NO: 408053 - DNA, 19 bp, Homo sapiens
  siRNA target sequence for LOC113174 (NM_138421.1,344-362).
gtccaagtgtcctcgatta

SEQ ID NO: 408054 - DNA, 19 bp, Homo sapiens
  siRNA target sequence for LOC113174 (NM_138421.1,352-370).
gtcctcgattaagagaaat

SEQ ID NO: 408055 - DNA, 19 bp, Homo sapiens
  siRNA target sequence for LOC113174 (NM_138421.1,354-372).
cctcgattaagagaaatct

SEQ ID NO: 408056 - DNA, 19 bp, Homo sapiens
  siRNA target sequence for LOC113174 (NM_138421.1,396-414).
gcctgtttccaggagatat

SEQ ID NO: 408057 - DNA, 19 bp, Homo sapiens
  siRNA target sequence for LOC113174 (NM_138421.1,398-416).
ctgtttccaggagatatgt

SEQ ID NO: 408058 - DNA, 19 bp, Homo sapiens
  siRNA target sequence for LOC113174 (NM_138421.1,458-476).
gcactgtttgtatgattca

SEQ ID NO: 408059 - DNA, 19 bp, Homo sapiens
  siRNA target sequence for LOC113174 (NM_138421.1,483-501).
cctactctgctggaaacaa

SEQ ID NO: 408060 - DNA, 19 bp, Homo sapiens
  siRNA target sequence for LOC113174 (NM_138421.1,566-584).
ggaacatccagctatttat

SEQ ID NO: 408061 - DNA, 19 bp, Homo sapiens
  siRNA target sequence for LOC113174 (NM_138421.1,570-588).
catccagctatttatgata

SEQ ID NO: 408062 - DNA, 19 bp, Homo sapiens
  siRNA target sequence for LOC113174 (NM_138421.1,585-603).
gatagcatttgcttcatta

SEQ ID NO: 408063 - DNA, 19 bp, Homo sapiens
  siRNA target sequence for LOC113174 (NM_138421.1,590-608).
catttgcttcattatgtca

SEQ ID NO: 408064 - DNA, 19 bp, Homo sapiens
  siRNA target sequence for LOC113174 (NM_138421.1,599-617).
cattatgtcaagttcaaca

SEQ ID NO: 408065 - DNA, 19 bp, Homo sapiens
  siRNA target sequence for LOC113174 (NM_138421.1,666-684).
gatttggatgagaaactaa

SEQ ID NO: 408066 - DNA, 19 bp, Homo sapiens
  siRNA target sequence for LOC113174 (NM_138421.1,791-809).
caaacaagtacgttctgaa

SEQ ID NO: 408067 - DNA, 19 bp, Homo sapiens
  siRNA target sequence for LOC113174 (NM_138421.1,816-834).
gaatggcttgatgtttaca

SEQ ID NO: 408068 - DNA, 19 bp, Homo sapiens
  siRNA target sequence for LOC113174 (NM_138421.1,856-874).
ctacagtggatgatggaat

SEQ ID NO: 408069 - DNA, 19 bp, Homo sapiens
  siRNA target sequence for LOC113174 (NM_138421.1,892-910).
gtcctgacactggaaaaga

SEQ ID NO: 408070 - DNA, 19 bp, Homo sapiens
  siRNA target sequence for LOC113174 (NM_138421.1,996-1014).
gtgctagcctctgtttttt

SEQ ID NO: 408071 - DNA, 19 bp, Homo sapiens
  siRNA target sequence for LOC113174 (NM_138421.1,1077-1095).
gatcttcctctaattgaca

SEQ ID NO: 408072 - DNA, 19 bp, Homo sapiens
  siRNA target sequence for LOC113174 (NM_138421.1,1096-1114).
gcctcattcgggtcttaca

SEQ ID NO: 408073 - DNA, 19 bp, Homo sapiens
  siRNA target sequence for LOC113174 (NM_138421.1,1097-1115).
cctcattcgggtcttacaa

SEQ ID NO: 408074 - DNA, 19 bp, Homo sapiens
  siRNA target sequence for LOC113174 (NM_138421.1,1148-1166).
ctcggcagagtctaacaca

SEQ ID NO: 408075 - DNA, 19 bp, Homo sapiens
  siRNA target sequence for H63 (NM_138423.2,378-396).
gtcctcgccttcaactact

SEQ ID NO: 408076 - DNA, 19 bp, Homo sapiens
  siRNA target sequence for H63 (NM_138423.2,613-631).
gcgaggatgacaaggttaa

SEQ ID NO: 408077 - DNA, 19 bp, Homo sapiens
  siRNA target sequence for H63 (NM_138423.2,627-645).
gttaaactacagaacaaca

SEQ ID NO: 408078 - DNA, 19 bp, Homo sapiens
  siRNA target sequence for H63 (NM_138423.2,633-651).
ctacagaacaacatatcgt

SEQ ID NO: 408079 - DNA, 19 bp, Homo sapiens
  siRNA target sequence for H63 (NM_138423.2,656-674).
gatggcagacatacatcat

SEQ ID NO: 408080 - DNA, 19 bp, Homo sapiens
  siRNA target sequence for H63 (NM_138423.2,691-709).
ctgagcttcgtcaggaatt

SEQ ID NO: 408081 - DNA, 19 bp, Homo sapiens
  siRNA target sequence for H63 (NM_138423.2,758-776).
ccttgtgaagaggttagaa

SEQ ID NO: 408082 - DNA, 19 bp, Homo sapiens
  siRNA target sequence for H63 (NM_138423.2,769-787).
ggttagaatatgaaagttt

SEQ ID NO: 408083 - DNA, 19 bp, Homo sapiens
  siRNA target sequence for H63 (NM_138423.2,845-863).
gttagcagaccagttttta

SEQ ID NO: 408084 - DNA, 19 bp, Homo sapiens
  siRNA target sequence for H63 (NM_138423.2,884-902).
ccaaaagattcaatcaaat

SEQ ID NO: 408085 - DNA, 19 bp, Homo sapiens
  siRNA target sequence for H63 (NM_138423.2,911-929).
ggaattggatataaacaat

SEQ ID NO: 408086 - DNA, 19 bp, Homo sapiens
  siRNA target sequence for H63 (NM_138423.2,965-983).
gaatgttgcagataagaat

SEQ ID NO: 408087 - DNA, 19 bp, Homo sapiens
  siRNA target sequence for H63 (NM_138423.2,1221-1239).
ggaaaccccggtacttcaa

SEQ ID NO: 408088 - DNA, 19 bp, Homo sapiens
  siRNA target sequence for H63 (NM_138423.2,1222-1240).
gaaaccccggtacttcaaa

SEQ ID NO: 408089 - DNA, 19 bp, Homo sapiens
  siRNA target sequence for H63 (NM_138423.2,1227-1245).
cccggtacttcaaaacaga

SEQ ID NO: 408090 - DNA, 19 bp, Homo sapiens
  siRNA target sequence for H63 (NM_138423.2,1229-1247).
cggtacttcaaaacagaat

SEQ ID NO: 408091 - DNA, 19 bp, Homo sapiens
  siRNA target sequence for H63 (NM_138423.2,1255-1273).
gtcctcttcagcgtttaat

SEQ ID NO: 408092 - DNA, 19 bp, Homo sapiens
  siRNA target sequence for H63 (NM_138423.2,1289-1307).
ggacagtgaacccagaatt

SEQ ID NO: 408093 - DNA, 19 bp, Homo sapiens
  siRNA target sequence for H63 (NM_138423.2,1292-1310).
cagtgaacccagaattcaa

SEQ ID NO: 408094 - DNA, 19 bp, Homo sapiens
  siRNA target sequence for H63 (NM_138423.2,1344-1362).
gtcagtgatttccataaat

SEQ ID NO: 408095 - DNA, 19 bp, Homo sapiens
  siRNA target sequence for H63 (NM_138423.2,1348-1366).
gtgatttccataaattgaa

SEQ ID NO: 408096 - DNA, 19 bp, Homo sapiens
  siRNA target sequence for H63 (NM_138423.2,1367-1385).
gcaaagccgattctttgat

SEQ ID NO: 408097 - DNA, 19 bp, Homo sapiens
  siRNA target sequence for H63 (NM_138423.2,1408-1426).
cgcagcatggctctaaact

SEQ ID NO: 408098 - DNA, 19 bp, Homo sapiens
  siRNA target sequence for H63 (NM_138423.2,1450-1468).
gtaacgtaggtgagtatga

SEQ ID NO: 408099 - DNA, 19 bp, Homo sapiens
  siRNA target sequence for H63 (NM_138423.2,1483-1501).
ctgagctggcttacaatga

SEQ ID NO: 408100 - DNA, 19 bp, Homo sapiens
  siRNA target sequence for H63 (NM_138423.2,1566-1584).
gatcctgcagactatggaa

SEQ ID NO: 408101 - DNA, 19 bp, Homo sapiens
  siRNA target sequence for H63 (NM_138423.2,1575-1593).
gactatggaaagcaacatt

SEQ ID NO: 408102 - DNA, 19 bp, Homo sapiens
  siRNA target sequence for GRCC10 (NM_138425.2,225-243).
gtaagatgctgcaattcgt

SEQ ID NO: 408103 - DNA, 19 bp, Homo sapiens
  siRNA target sequence for GRCC10 (NM_138425.2,306-324).
gggaaggtgtccttaagtt

SEQ ID NO: 408104 - DNA, 19 bp, Homo sapiens
  siRNA target sequence for GRCC10 (NM_138425.2,307-325).
ggaaggtgtccttaagttt

SEQ ID NO: 408105 - DNA, 19 bp, Homo sapiens
  siRNA target sequence for LOC113444 (NM_138428.2,548-566).
gaggaaggccgcatctgtt

SEQ ID NO: 408106 - DNA, 19 bp, Homo sapiens
  siRNA target sequence for LOC113444 (NM_138428.2,583-601).
cactcaggcatctgagttt

SEQ ID NO: 408107 - DNA, 19 bp, Homo sapiens
  siRNA target sequence for LOC113444 (NM_138428.2,613-631).
gctgggaggagagttatga

SEQ ID NO: 408108 - DNA, 19 bp, Homo sapiens
  siRNA target sequence for LOC113444 (NM_138428.2,621-639).
gagagttatgagatgaaca

SEQ ID NO: 408109 - DNA, 19 bp, Homo sapiens
  siRNA target sequence for LOC113444 (NM_138428.2,635-653).
gaacattggctgtcaatct

SEQ ID NO: 408110 - DNA, 19 bp, Homo sapiens
  siRNA target sequence for LOC113444 (NM_138428.2,717-735).
gatacctgcatgtctagtt

SEQ ID NO: 408111 - DNA, 19 bp, Homo sapiens
  siRNA target sequence for LOC113444 (NM_138428.2,739-757).
gtctgcactggaaagaatt

SEQ ID NO: 408112 - DNA, 19 bp, Homo sapiens
  siRNA target sequence for LOC113444 (NM_138428.2,901-919).
ggggcagggacgaacatgt

SEQ ID NO: 408113 - DNA, 19 bp, Homo sapiens
  siRNA target sequence for LOC113444 (NM_138428.2,918-936).
gtgcctcgtgaatttgctt

SEQ ID NO: 408114 - DNA, 19 bp, Homo sapiens
  siRNA target sequence for LOC113655 (NM_138431.1,287-305).
ggctggccaaggttctgta

SEQ ID NO: 408115 - DNA, 19 bp, Homo sapiens
  siRNA target sequence for LOC113655 (NM_138431.1,1355-1373).
ctgcctttcccgttctgta

SEQ ID NO: 408116 - DNA, 19 bp, Homo sapiens
  siRNA target sequence for LOC113730 (NM_138433.2,1653-1671).
gccgtgatgcgctacaaca

SEQ ID NO: 408117 - DNA, 19 bp, Homo sapiens
  siRNA target sequence for C7orf29 (NM_138434.1,418-436).
gagattagagtgtctgaat

SEQ ID NO: 408118 - DNA, 19 bp, Homo sapiens
  siRNA target sequence for C7orf29 (NM_138434.1,425-443).
gagtgtctgaatactcttt

SEQ ID NO: 408119 - DNA, 19 bp, Homo sapiens
  siRNA target sequence for LOC113828 (NM_138435.1,472-490).
gtgatatctttcaagacat

SEQ ID NO: 408120 - DNA, 19 bp, Homo sapiens
  siRNA target sequence for LOC113828 (NM_138435.1,628-646).
caggcgtcggcttctacat

SEQ ID NO: 408121 - DNA, 19 bp, Homo sapiens
  siRNA target sequence for LOC113828 (NM_138435.1,689-707).
gatggtggacggtgacaaa

SEQ ID NO: 408122 - DNA, 19 bp, Homo sapiens
  siRNA target sequence for LOC113828 (NM_138435.1,708-726).
gtggccactggatcttaca

SEQ ID NO: 408123 - DNA, 19 bp, Homo sapiens
  siRNA target sequence for LOC113828 (NM_138435.1,871-889).
gcagggttggcctccatta

SEQ ID NO: 408124 - DNA, 19 bp, Homo sapiens
  siRNA target sequence for LOC113828 (NM_138435.1,898-916).
ctgtggctcgaaagcttat

SEQ ID NO: 408125 - DNA, 19 bp, Homo sapiens
  siRNA target sequence for LOC113828 (NM_138435.1,900-918).
gtggctcgaaagcttatca

SEQ ID NO: 408126 - DNA, 19 bp, Homo sapiens
  siRNA target sequence for LOC113828 (NM_138435.1,1394-1412).
catctcaggtaaaacaagt

SEQ ID NO: 408127 - DNA, 19 bp, Homo sapiens
  siRNA target sequence for LOC114926 (NM_138436.2,121-139).
gggtgacgatggttctatt

SEQ ID NO: 408128 - DNA, 19 bp, Homo sapiens
  siRNA target sequence for LOC114926 (NM_138436.2,125-143).
gacgatggttctattgatt

SEQ ID NO: 408129 - DNA, 19 bp, Homo sapiens
  siRNA target sequence for LOC114926 (NM_138436.2,170-188).
gccaccaatgtttacttga

SEQ ID NO: 408130 - DNA, 19 bp, Homo sapiens
  siRNA target sequence for LOC114926 (NM_138436.2,171-189).
ccaccaatgtttacttgat

SEQ ID NO: 408131 - DNA, 19 bp, Homo sapiens
  siRNA target sequence for LOC114926 (NM_138436.2,172-190).
caccaatgtttacttgata

SEQ ID NO: 408132 - DNA, 19 bp, Homo sapiens
  siRNA target sequence for LOC114926 (NM_138436.2,174-192).
ccaatgtttacttgatagt

SEQ ID NO: 408133 - DNA, 19 bp, Homo sapiens
  siRNA target sequence for LOC114926 (NM_138436.2,204-222).
gcttcggtctcttcatgta

SEQ ID NO: 408134 - DNA, 19 bp, Homo sapiens
  siRNA target sequence for LOC114926 (NM_138436.2,269-287).
cctacagaggaaactttgt

SEQ ID NO: 408135 - DNA, 19 bp, Homo sapiens
  siRNA target sequence for LOC114926 (NM_138436.2,288-306).
cagagcccaacttttatga

SEQ ID NO: 408136 - DNA, 19 bp, Homo sapiens
  siRNA target sequence for LOC114926 (NM_138436.2,309-327).
cgataagcaagattcgttt

SEQ ID NO: 408137 - DNA, 19 bp, Homo sapiens
  siRNA target sequence for LOC114926 (NM_138436.2,315-333).
gcaagattcgtttaagaca

SEQ ID NO: 408138 - DNA, 19 bp, Homo sapiens
  siRNA target sequence for LOC114926 (NM_138436.2,316-334).
caagattcgtttaagacaa

SEQ ID NO: 408139 - DNA, 19 bp, Homo sapiens
  siRNA target sequence for LOC114926 (NM_138436.2,319-337).
gattcgtttaagacaacaa

SEQ ID NO: 408140 - DNA, 19 bp, Homo sapiens
  siRNA target sequence for LOC114926 (NM_138436.2,357-375).
caagaaagtacgactatca

SEQ ID NO: 408141 - DNA, 19 bp, Homo sapiens
  siRNA target sequence for LOC114928 (NM_138437.1,452-470).
ggaggctcaaggaatcaca

SEQ ID NO: 408142 - DNA, 19 bp, Homo sapiens
  siRNA target sequence for LOC114928 (NM_138437.1,504-522).
ggtggcgctcgttctaaaa

SEQ ID NO: 408143 - DNA, 19 bp, Homo sapiens
  siRNA target sequence for LOC114928 (NM_138437.1,508-526).
gcgctcgttctaaaactga

SEQ ID NO: 408144 - DNA, 19 bp, Homo sapiens
  siRNA target sequence for LOC114928 (NM_138437.1,509-527).
cgctcgttctaaaactgat

SEQ ID NO: 408145 - DNA, 19 bp, Homo sapiens
  siRNA target sequence for LOC114928 (NM_138437.1,571-589).
catgggcccagagtgaatt

SEQ ID NO: 408146 - DNA, 19 bp, Homo sapiens
  siRNA target sequence for LOC114928 (NM_138437.1,663-681).
gagtctggatcagttacta

SEQ ID NO: 408147 - DNA, 19 bp, Homo sapiens
  siRNA target sequence for LOC114928 (NM_138437.1,695-713).
gtctatggatagagaacta

SEQ ID NO: 408148 - DNA, 19 bp, Homo sapiens
  siRNA target sequence for LOC114928 (NM_138437.1,697-715).
ctatggatagagaactagt

SEQ ID NO: 408149 - DNA, 19 bp, Homo sapiens
  siRNA target sequence for LOC114928 (NM_138437.1,745-763).
cccagggtcagaaaggaat

SEQ ID NO: 408150 - DNA, 19 bp, Homo sapiens
  siRNA target sequence for LOC114928 (NM_138437.1,830-848).
cagagaggaggcctctaat

SEQ ID NO: 408151 - DNA, 19 bp, Homo sapiens
  siRNA target sequence for LOC114928 (NM_138437.1,832-850).
gagaggaggcctctaatga

SEQ ID NO: 408152 - DNA, 19 bp, Homo sapiens
  siRNA target sequence for LOC114928 (NM_138437.1,958-976).
ggcacagggctaaacatca

SEQ ID NO: 408153 - DNA, 19 bp, Homo sapiens
  siRNA target sequence for LOC114928 (NM_138437.1,964-982).
gggctaaacatcagactaa

SEQ ID NO: 408154 - DNA, 19 bp, Homo sapiens
  siRNA target sequence for LOC114928 (NM_138437.1,965-983).
ggctaaacatcagactaat

SEQ ID NO: 408155 - DNA, 19 bp, Homo sapiens
  siRNA target sequence for LOC114928 (NM_138437.1,1004-1022).
caagcaagaagcctatgtt

SEQ ID NO: 408156 - DNA, 19 bp, Homo sapiens
  siRNA target sequence for LOC114928 (NM_138437.1,1007-1025).
gcaagaagcctatgttgat

SEQ ID NO: 408157 - DNA, 19 bp, Homo sapiens
  siRNA target sequence for LOC114928 (NM_138437.1,1008-1026).
caagaagcctatgttgatt

SEQ ID NO: 408158 - DNA, 19 bp, Homo sapiens
  siRNA target sequence for LOC114928 (NM_138437.1,1074-1092).
gttggagaaaataccaata

SEQ ID NO: 408159 - DNA, 19 bp, Homo sapiens
  siRNA target sequence for LOC114928 (NM_138437.1,1221-1239).
gaggccaatagtagattca

SEQ ID NO: 408160 - DNA, 19 bp, Homo sapiens
  siRNA target sequence for LOC114928 (NM_138437.1,1301-1319).
cagtgatagggtcaaacaa

SEQ ID NO: 408161 - DNA, 19 bp, Homo sapiens
  siRNA target sequence for LOC114928 (NM_138437.1,1303-1321).
gtgatagggtcaaacaaga

SEQ ID NO: 408162 - DNA, 19 bp, Homo sapiens
  siRNA target sequence for LOC114928 (NM_138437.1,1453-1471).
cgtactgggctgaggaaaa

SEQ ID NO: 408163 - DNA, 19 bp, Homo sapiens
  siRNA target sequence for LOC114928 (NM_138437.1,1505-1523).
caagccggagtctgaagaa

SEQ ID NO: 408164 - DNA, 19 bp, Homo sapiens
  siRNA target sequence for LOC114928 (NM_138437.1,1562-1580).
ggcctgctttgacctaaat

SEQ ID NO: 408165 - DNA, 19 bp, Homo sapiens
  siRNA target sequence for LOC114928 (NM_138437.1,1590-1608).
gtgtacaaggtcagtgata

SEQ ID NO: 408166 - DNA, 19 bp, Homo sapiens
  siRNA target sequence for LOC114928 (NM_138437.1,1661-1679).
ggacgaggtcactgttgaa

SEQ ID NO: 408167 - DNA, 19 bp, Homo sapiens
  siRNA target sequence for LOC114928 (NM_138437.1,1662-1680).
gacgaggtcactgttgaat

SEQ ID NO: 408168 - DNA, 19 bp, Homo sapiens
  siRNA target sequence for LOC114928 (NM_138437.1,1718-1736).
cacaagcccctttggaatt

SEQ ID NO: 408169 - DNA, 19 bp, Homo sapiens
  siRNA target sequence for LOC114928 (NM_138437.1,1934-1952).
gtcctgcagctgcatacaa

SEQ ID NO: 408170 - DNA, 19 bp, Homo sapiens
  siRNA target sequence for LOC114928 (NM_138437.1,2143-2161).
ctagagttaggacaagttt

SEQ ID NO: 408171 - DNA, 19 bp, Homo sapiens
  siRNA target sequence for LOC114928 (NM_138437.1,2197-2215).
caaatctaaacatgattga

SEQ ID NO: 408172 - DNA, 19 bp, Homo sapiens
  siRNA target sequence for LOC114928 (NM_138437.1,2207-2225).
catgattgagacattcata

SEQ ID NO: 408173 - DNA, 19 bp, Homo sapiens
  siRNA target sequence for LOC114928 (NM_138437.1,2210-2228).
gattgagacattcatatgt

SEQ ID NO: 408174 - DNA, 19 bp, Homo sapiens
  siRNA target sequence for LOC114928 (NM_138437.1,2240-2258).
ggaaacccttgcacatagt

SEQ ID NO: 408175 - DNA, 19 bp, Homo sapiens
  siRNA target sequence for LOC114928 (NM_138437.1,2295-2313).
cttagacacctcactatga

SEQ ID NO: 408176 - DNA, 19 bp, Homo sapiens
  siRNA target sequence for LOC114928 (NM_138437.1,2299-2317).
gacacctcactatgactat

SEQ ID NO: 408177 - DNA, 19 bp, Homo sapiens
  siRNA target sequence for LOC114928 (NM_138437.1,2304-2322).
ctcactatgactattgact

SEQ ID NO: 408178 - DNA, 19 bp, Homo sapiens
  siRNA target sequence for LOC114928 (NM_138437.1,2378-2396).
caatgcgagaacgaagttt

SEQ ID NO: 408179 - DNA, 19 bp, Homo sapiens
  siRNA target sequence for LOC114928 (NM_138437.1,2389-2407).
cgaagtttcacgttctgaa

SEQ ID NO: 408180 - DNA, 19 bp, Homo sapiens
  siRNA target sequence for LOC114928 (NM_138437.1,2397-2415).
cacgttctgaaaatgctat

SEQ ID NO: 408181 - DNA, 19 bp, Homo sapiens
  siRNA target sequence for LOC114928 (NM_138437.1,2441-2459).
ggcaaaaaaactattcagt

SEQ ID NO: 408182 - DNA, 19 bp, Homo sapiens
  siRNA target sequence for LOC114928 (NM_138437.1,2569-2587).
gaaagatgtccttaattga

SEQ ID NO: 408183 - DNA, 19 bp, Homo sapiens
  siRNA target sequence for LOC114928 (NM_138437.1,2639-2657).
gttagctaagcaactacaa

SEQ ID NO: 408184 - DNA, 19 bp, Homo sapiens
  siRNA target sequence for LOC114928 (NM_138437.1,2652-2670).
ctacaagcccaaatagaca

SEQ ID NO: 408185 - DNA, 19 bp, Homo sapiens
  siRNA target sequence for LOC114928 (NM_138437.1,2658-2676).
gcccaaatagacaaccaaa

SEQ ID NO: 408186 - DNA, 19 bp, Homo sapiens
  siRNA target sequence for LOC114928 (NM_138437.1,2659-2677).
cccaaatagacaaccaaaa

SEQ ID NO: 408187 - DNA, 19 bp, Homo sapiens
  siRNA target sequence for LOC114928 (NM_138437.1,2660-2678).
ccaaatagacaaccaaaat

SEQ ID NO: 408188 - DNA, 19 bp, Homo sapiens
  siRNA target sequence for LOC114928 (NM_138437.1,2685-2703).
gaggtgggacaacaaagtt

SEQ ID NO: 408189 - DNA, 19 bp, Homo sapiens
  siRNA target sequence for LOC114990 (NM_138440.1,285-303).
gggctgtacgtctttgaga

SEQ ID NO: 408190 - DNA, 19 bp, Homo sapiens
  siRNA target sequence for LOC114990 (NM_138440.1,286-304).
ggctgtacgtctttgagaa

SEQ ID NO: 408191 - DNA, 19 bp, Homo sapiens
  siRNA target sequence for LOC114990 (NM_138440.1,445-463).
ccaacaggctgcatgaaat

SEQ ID NO: 408192 - DNA, 19 bp, Homo sapiens
  siRNA target sequence for LOC114990 (NM_138440.1,924-942).
ctggatgtgagcaacctaa

SEQ ID NO: 408193 - DNA, 19 bp, Homo sapiens
  siRNA target sequence for C6orf150 (NM_138441.1,615-633).
ctcagccgcgatgatatct

SEQ ID NO: 408194 - DNA, 19 bp, Homo sapiens
  siRNA target sequence for C6orf150 (NM_138441.1,722-740).
gaacaccgggagctactat

SEQ ID NO: 408195 - DNA, 19 bp, Homo sapiens
  siRNA target sequence for C6orf150 (NM_138441.1,797-815).
ccccagaattcaactagaa

SEQ ID NO: 408196 - DNA, 19 bp, Homo sapiens
  siRNA target sequence for C6orf150 (NM_138441.1,823-841).
ccaacactcgtgcatatta

SEQ ID NO: 408197 - DNA, 19 bp, Homo sapiens
  siRNA target sequence for C6orf150 (NM_138441.1,827-845).
cactcgtgcatattacttt

SEQ ID NO: 408198 - DNA, 19 bp, Homo sapiens
  siRNA target sequence for C6orf150 (NM_138441.1,923-941).
gctgtcaaagtttaggaaa

SEQ ID NO: 408199 - DNA, 19 bp, Homo sapiens
  siRNA target sequence for C6orf150 (NM_138441.1,1006-1024).
ggagccctgctgtaacact

SEQ ID NO: 408200 - DNA, 19 bp, Homo sapiens
  siRNA target sequence for C6orf150 (NM_138441.1,1007-1025).
gagccctgctgtaacactt

SEQ ID NO: 408201 - DNA, 19 bp, Homo sapiens
  siRNA target sequence for C6orf150 (NM_138441.1,1104-1122).
ggcctgcgcattcaaaact

SEQ ID NO: 408202 - DNA, 19 bp, Homo sapiens
  siRNA target sequence for C6orf150 (NM_138441.1,1141-1159).
ggaagcaactacgactaaa

SEQ ID NO: 408203 - DNA, 19 bp, Homo sapiens
  siRNA target sequence for C6orf150 (NM_138441.1,1149-1167).
ctacgactaaagccatttt

SEQ ID NO: 408204 - DNA, 19 bp, Homo sapiens
  siRNA target sequence for C6orf150 (NM_138441.1,1228-1246).
ccttctctcacatcgaaaa

SEQ ID NO: 408205 - DNA, 19 bp, Homo sapiens
  siRNA target sequence for C6orf150 (NM_138441.1,1232-1250).
ctctcacatcgaaaaggaa

SEQ ID NO: 408206 - DNA, 19 bp, Homo sapiens
  siRNA target sequence for C6orf150 (NM_138441.1,1247-1265).
ggaaattttgaacaatcat

SEQ ID NO: 408207 - DNA, 19 bp, Homo sapiens
  siRNA target sequence for C6orf150 (NM_138441.1,1488-1506).
gataactgcgtgacatact

SEQ ID NO: 408208 - DNA, 19 bp, Homo sapiens
  siRNA target sequence for C6orf150 (NM_138441.1,1493-1511).
ctgcgtgacatactttctt

SEQ ID NO: 408209 - DNA, 19 bp, Homo sapiens
  siRNA target sequence for C6orf150 (NM_138441.1,1495-1513).
gcgtgacatactttcttca

SEQ ID NO: 408210 - DNA, 19 bp, Homo sapiens
  siRNA target sequence for C6orf150 (NM_138441.1,1563-1581).
ctattctctagcaacttaa

SEQ ID NO: 408211 - DNA, 19 bp, Homo sapiens
  siRNA target sequence for LOC115098 (NM_138442.2,223-241).
ggaaggacgacgacaaaca

SEQ ID NO: 408212 - DNA, 19 bp, Homo sapiens
  siRNA target sequence for LOC115098 (NM_138442.2,682-700).
ggctgtcgcagctgaaaca

SEQ ID NO: 408213 - DNA, 19 bp, Homo sapiens
  siRNA target sequence for LOC115106 (NM_138443.2,81-99).
caggttgctgcgtggttaa

SEQ ID NO: 408214 - DNA, 19 bp, Homo sapiens
  siRNA target sequence for LOC115106 (NM_138443.2,83-101).
ggttgctgcgtggttaaaa

SEQ ID NO: 408215 - DNA, 19 bp, Homo sapiens
  siRNA target sequence for LOC115106 (NM_138443.2,84-102).
gttgctgcgtggttaaaaa

SEQ ID NO: 408216 - DNA, 19 bp, Homo sapiens
  siRNA target sequence for LOC115106 (NM_138443.2,90-108).
gcgtggttaaaaaaaatat

SEQ ID NO: 408217 - DNA, 19 bp, Homo sapiens
  siRNA target sequence for LOC115106 (NM_138443.2,248-266).
cgagtcagaagccaagtat

SEQ ID NO: 408218 - DNA, 19 bp, Homo sapiens
  siRNA target sequence for LOC115106 (NM_138443.2,357-375).
gcggtggcccttgaaacaa

SEQ ID NO: 408219 - DNA, 19 bp, Homo sapiens
  siRNA target sequence for LOC115106 (NM_138443.2,358-376).
cggtggcccttgaaacaaa

SEQ ID NO: 408220 - DNA, 19 bp, Homo sapiens
  siRNA target sequence for LOC115106 (NM_138443.2,382-400).
cctcgctagctagttttat

SEQ ID NO: 408221 - DNA, 19 bp, Homo sapiens
  siRNA target sequence for LOC115106 (NM_138443.2,426-444).
gatctctttcgtaccaaat

SEQ ID NO: 408222 - DNA, 19 bp, Homo sapiens
  siRNA target sequence for LOC115106 (NM_138443.2,429-447).
ctctttcgtaccaaatcca

SEQ ID NO: 408223 - DNA, 19 bp, Homo sapiens
  siRNA target sequence for LOC115106 (NM_138443.2,431-449).
ctttcgtaccaaatccaaa

SEQ ID NO: 408224 - DNA, 19 bp, Homo sapiens
  siRNA target sequence for LOC115106 (NM_138443.2,520-538).
gtctacaagaggatgtcaa

SEQ ID NO: 408225 - DNA, 19 bp, Homo sapiens
  siRNA target sequence for LOC115106 (NM_138443.2,548-566).
gttgcatctgtctacagaa

SEQ ID NO: 408226 - DNA, 19 bp, Homo sapiens
  siRNA target sequence for LOC115106 (NM_138443.2,569-587).
ggccaaagttgataatcgt

SEQ ID NO: 408227 - DNA, 19 bp, Homo sapiens
  siRNA target sequence for LOC115106 (NM_138443.2,589-607).
gtcagaacatggactttct

SEQ ID NO: 408228 - DNA, 19 bp, Homo sapiens
  siRNA target sequence for LOC115106 (NM_138443.2,612-630).
gcaaagtcagaggaattca

SEQ ID NO: 408229 - DNA, 19 bp, Homo sapiens
  siRNA target sequence for LOC115106 (NM_138443.2,645-663).
gctgcagaggagcaacttt

SEQ ID NO: 408230 - DNA, 19 bp, Homo sapiens
  siRNA target sequence for LOC115106 (NM_138443.2,689-707).
gtctcatcagtccttagta

SEQ ID NO: 408231 - DNA, 19 bp, Homo sapiens
  siRNA target sequence for LOC115106 (NM_138443.2,700-718).
ccttagtagcactatcaga

SEQ ID NO: 408232 - DNA, 19 bp, Homo sapiens
  siRNA target sequence for LOC115106 (NM_138443.2,741-759).
cagactatacctttgaaga

SEQ ID NO: 408233 - DNA, 19 bp, Homo sapiens
  siRNA target sequence for LOC115106 (NM_138443.2,743-761).
gactatacctttgaagaaa

SEQ ID NO: 408234 - DNA, 19 bp, Homo sapiens
  siRNA target sequence for LOC115106 (NM_138443.2,767-785).
ggagtcctatttagactta

SEQ ID NO: 408235 - DNA, 19 bp, Homo sapiens
  siRNA target sequence for LOC115106 (NM_138443.2,768-786).
gagtcctatttagacttaa

SEQ ID NO: 408236 - DNA, 19 bp, Homo sapiens
  siRNA target sequence for LOC115106 (NM_138443.2,796-814).
cgtctcttgctcaagtgaa

SEQ ID NO: 408237 - DNA, 19 bp, Homo sapiens
  siRNA target sequence for LOC115106 (NM_138443.2,797-815).
gtctcttgctcaagtgaaa

SEQ ID NO: 408238 - DNA, 19 bp, Homo sapiens
  siRNA target sequence for LOC115106 (NM_138443.2,825-843).
gcaaagcgagaactagata

SEQ ID NO: 408239 - DNA, 19 bp, Homo sapiens
  siRNA target sequence for LOC115106 (NM_138443.2,830-848).
gcgagaactagatagcatt

SEQ ID NO: 408240 - DNA, 19 bp, Homo sapiens
  siRNA target sequence for ARLTS1 (NM_138450.3,406-424).
gcaagaccacgctccttta

SEQ ID NO: 408241 - DNA, 19 bp, Homo sapiens
  siRNA target sequence for ARLTS1 (NM_138450.3,454-472).
ccctgcccactgttggttt

SEQ ID NO: 408242 - DNA, 19 bp, Homo sapiens
  siRNA target sequence for ARLTS1 (NM_138450.3,473-491).
caacgtggagcctctgaaa

SEQ ID NO: 408243 - DNA, 19 bp, Homo sapiens
  siRNA target sequence for ARLTS1 (NM_138450.3,721-739).
cacttccgctgcttaagat

SEQ ID NO: 408244 - DNA, 19 bp, Homo sapiens
  siRNA target sequence for ARLTS1 (NM_138450.3,723-741).
cttccgctgcttaagatca

SEQ ID NO: 408245 - DNA, 19 bp, Homo sapiens
  siRNA target sequence for ARLTS1 (NM_138450.3,726-744).
ccgctgcttaagatcagaa

SEQ ID NO: 408246 - DNA, 19 bp, Homo sapiens
  siRNA target sequence for ARLTS1 (NM_138450.3,729-747).
ctgcttaagatcagaaaca

SEQ ID NO: 408247 - DNA, 19 bp, Homo sapiens
  siRNA target sequence for ARLTS1 (NM_138450.3,903-921).
cgcggagacagcaagagat

SEQ ID NO: 408248 - DNA, 19 bp, Homo sapiens
  siRNA target sequence for LOC115811 (NM_138451.1,190-208).
cgccatggcccctttgtat

SEQ ID NO: 408249 - DNA, 19 bp, Homo sapiens
  siRNA target sequence for LOC115811 (NM_138451.1,214-232).
ccctgccatcaacagaata

SEQ ID NO: 408250 - DNA, 19 bp, Homo sapiens
  siRNA target sequence for LOC115811 (NM_138451.1,258-276).
ggccagctgatccactaaa

SEQ ID NO: 408251 - DNA, 19 bp, Homo sapiens
  siRNA target sequence for LOC115811 (NM_138451.1,259-277).
gccagctgatccactaaaa

SEQ ID NO: 408252 - DNA, 19 bp, Homo sapiens
  siRNA target sequence for LOC115811 (NM_138451.1,287-305).
ctctctaggaccaaactca

SEQ ID NO: 408253 - DNA, 19 bp, Homo sapiens
  siRNA target sequence for LOC115811 (NM_138451.1,314-332).
gaggccaaaaggatcatgt

SEQ ID NO: 408254 - DNA, 19 bp, Homo sapiens
  siRNA target sequence for LOC115811 (NM_138451.1,338-356).
ctggatgaggcgatctaca

SEQ ID NO: 408255 - DNA, 19 bp, Homo sapiens
  siRNA target sequence for LOC115811 (NM_138451.1,390-408).
catccaacagagaggatat

SEQ ID NO: 408256 - DNA, 19 bp, Homo sapiens
  siRNA target sequence for LOC115811 (NM_138451.1,487-505).
caggtgcctgaaagagaaa

SEQ ID NO: 408257 - DNA, 19 bp, Homo sapiens
  siRNA target sequence for LOC115811 (NM_138451.1,555-573).
gagaccgcctcctttccat

SEQ ID NO: 408258 - DNA, 19 bp, Homo sapiens
  siRNA target sequence for LOC115811 (NM_138451.1,600-618).
cacttatgcagcagatcaa

SEQ ID NO: 408259 - DNA, 19 bp, Homo sapiens
  siRNA target sequence for LOC115811 (NM_138451.1,627-645).
ccaagaacgtccttagact

SEQ ID NO: 408260 - DNA, 19 bp, Homo sapiens
  siRNA target sequence for LOC115811 (NM_138451.1,790-808).
ggataaggcccagttctta

SEQ ID NO: 408261 - DNA, 19 bp, Homo sapiens
  siRNA target sequence for LOC115811 (NM_138451.1,798-816).
cccagttcttacaggatat

SEQ ID NO: 408262 - DNA, 19 bp, Homo sapiens
  siRNA target sequence for LOC115811 (NM_138451.1,812-830).
gatatcagtagacagaata

SEQ ID NO: 408263 - DNA, 19 bp, Homo sapiens
  siRNA target sequence for LOC115811 (NM_138451.1,817-835).
cagtagacagaatagtaat

SEQ ID NO: 408264 - DNA, 19 bp, Homo sapiens
  siRNA target sequence for LOC115811 (NM_138451.1,822-840).
gacagaatagtaataacca

SEQ ID NO: 408265 - DNA, 19 bp, Homo sapiens
  siRNA target sequence for LOC115811 (NM_138451.1,838-856).
ccaacaaatcattgatact

SEQ ID NO: 408266 - DNA, 19 bp, Homo sapiens
  siRNA target sequence for LOC115811 (NM_138451.1,866-884).
gaattggcggagagaatga

SEQ ID NO: 408267 - DNA, 19 bp, Homo sapiens
  siRNA target sequence for LOC115811 (NM_138451.1,872-890).
gcggagagaatgaagaaca

SEQ ID NO: 408268 - DNA, 19 bp, Homo sapiens
  siRNA target sequence for LOC115811 (NM_138451.1,1007-1025).
gaagagcgggagatcaact

SEQ ID NO: 408269 - DNA, 19 bp, Homo sapiens
  siRNA target sequence for CTHRC1 (NM_138455.2,237-255).
ggtggtggacctgtataat

SEQ ID NO: 408270 - DNA, 19 bp, Homo sapiens
  siRNA target sequence for CTHRC1 (NM_138455.2,240-258).
ggtggacctgtataatgga

SEQ ID NO: 408271 - DNA, 19 bp, Homo sapiens
  siRNA target sequence for CTHRC1 (NM_138455.2,241-259).
gtggacctgtataatggaa

SEQ ID NO: 408272 - DNA, 19 bp, Homo sapiens
  siRNA target sequence for CTHRC1 (NM_138455.2,341-359).
caggtcgggatggattcaa

SEQ ID NO: 408273 - DNA, 19 bp, Homo sapiens
  siRNA target sequence for CTHRC1 (NM_138455.2,441-459).
gaattatggcatagatctt

SEQ ID NO: 408274 - DNA, 19 bp, Homo sapiens
  siRNA target sequence for CTHRC1 (NM_138455.2,469-487).
gcggagtgtacatttacaa

SEQ ID NO: 408275 - DNA, 19 bp, Homo sapiens
  siRNA target sequence for CTHRC1 (NM_138455.2,470-488).
cggagtgtacatttacaaa

SEQ ID NO: 408276 - DNA, 19 bp, Homo sapiens
  siRNA target sequence for CTHRC1 (NM_138455.2,472-490).
gagtgtacatttacaaaga

SEQ ID NO: 408277 - DNA, 19 bp, Homo sapiens
  siRNA target sequence for CTHRC1 (NM_138455.2,497-515).
caaatagtgctctaagagt

SEQ ID NO: 408278 - DNA, 19 bp, Homo sapiens
  siRNA target sequence for CTHRC1 (NM_138455.2,503-521).
gtgctctaagagttttgtt

SEQ ID NO: 408279 - DNA, 19 bp, Homo sapiens
  siRNA target sequence for CTHRC1 (NM_138455.2,526-544).
ggctcacttcggctaaaat

SEQ ID NO: 408280 - DNA, 19 bp, Homo sapiens
  siRNA target sequence for CTHRC1 (NM_138455.2,557-575).
gctgtcagcgttggtattt

SEQ ID NO: 408281 - DNA, 19 bp, Homo sapiens
  siRNA target sequence for CTHRC1 (NM_138455.2,562-580).
cagcgttggtatttcacat

SEQ ID NO: 408282 - DNA, 19 bp, Homo sapiens
  siRNA target sequence for CTHRC1 (NM_138455.2,582-600).
caatggagctgaatgttca

SEQ ID NO: 408283 - DNA, 19 bp, Homo sapiens
  siRNA target sequence for CTHRC1 (NM_138455.2,607-625).
cttcccattgaagctataa

SEQ ID NO: 408284 - DNA, 19 bp, Homo sapiens
  siRNA target sequence for CTHRC1 (NM_138455.2,610-628).
cccattgaagctataattt

SEQ ID NO: 408285 - DNA, 19 bp, Homo sapiens
  siRNA target sequence for CTHRC1 (NM_138455.2,646-664).
cctgaaatgaattcaacaa

SEQ ID NO: 408286 - DNA, 19 bp, Homo sapiens
  siRNA target sequence for CTHRC1 (NM_138455.2,686-704).
ctgtggaaggactttgtga

SEQ ID NO: 408287 - DNA, 19 bp, Homo sapiens
  siRNA target sequence for CTHRC1 (NM_138455.2,707-725).
gaattggtgctggattagt

SEQ ID NO: 408288 - DNA, 19 bp, Homo sapiens
  siRNA target sequence for CTHRC1 (NM_138455.2,719-737).
gattagtggatgttgctat

SEQ ID NO: 408289 - DNA, 19 bp, Homo sapiens
  siRNA target sequence for CTHRC1 (NM_138455.2,794-812).
cagtttctcgcatcattat

SEQ ID NO: 408290 - DNA, 19 bp, Homo sapiens
  siRNA target sequence for CTHRC1 (NM_138455.2,800-818).
ctcgcatcattattgaaga

SEQ ID NO: 408291 - DNA, 19 bp, Homo sapiens
  siRNA target sequence for ZMYND19 (NM_138462.2,579-597).
gagggagcaaagcttgtat

SEQ ID NO: 408292 - DNA, 19 bp, Homo sapiens
  siRNA target sequence for ZMYND19 (NM_138462.2,590-608).
gcttgtattggcttgcaat

SEQ ID NO: 408293 - DNA, 19 bp, Homo sapiens
  siRNA target sequence for ZMYND19 (NM_138462.2,591-609).
cttgtattggcttgcaatt

SEQ ID NO: 408294 - DNA, 19 bp, Homo sapiens
  siRNA target sequence for ZMYND19 (NM_138462.2,618-636).
gcctacagaccctatagaa

SEQ ID NO: 408295 - DNA, 19 bp, Homo sapiens
  siRNA target sequence for ZMYND19 (NM_138462.2,620-638).
ctacagaccctatagaaga

SEQ ID NO: 408296 - DNA, 19 bp, Homo sapiens
  siRNA target sequence for ZMYND19 (NM_138462.2,763-781).
ctccgggagttcaacatct

SEQ ID NO: 408297 - DNA, 19 bp, Homo sapiens
  siRNA target sequence for LOC116238 (NM_138463.2,311-329).
ggcagactcctgacatgtt

SEQ ID NO: 408298 - DNA, 19 bp, Homo sapiens
  siRNA target sequence for LOC116238 (NM_138463.2,312-330).
gcagactcctgacatgtta

SEQ ID NO: 408299 - DNA, 19 bp, Homo sapiens
  siRNA target sequence for LOC116238 (NM_138463.2,340-358).
gagacggcgtggtcacttt

SEQ ID NO: 408300 - DNA, 19 bp, Homo sapiens
  siRNA target sequence for LOC116238 (NM_138463.2,342-360).
gacggcgtggtcactttct

SEQ ID NO: 408301 - DNA, 19 bp, Homo sapiens
  siRNA target sequence for LOC116238 (NM_138463.2,362-380).
gctatttgctcgtttgctt

SEQ ID NO: 408302 - DNA, 19 bp, Homo sapiens
  siRNA target sequence for LOC116238 (NM_138463.2,377-395).
gcttctctgcggggtattt

SEQ ID NO: 408303 - DNA, 19 bp, Homo sapiens
  siRNA target sequence for LOC116238 (NM_138463.2,516-534).
cggtgggggtgtcttaaca

SEQ ID NO: 408304 - DNA, 19 bp, Homo sapiens
  siRNA target sequence for LOC116238 (NM_138463.2,567-585).
cattcgcatgatgatgaaa

SEQ ID NO: 408305 - DNA, 19 bp, Homo sapiens
  siRNA target sequence for LOC116238 (NM_138463.2,590-608).
gtaatgcccaggatcatct

SEQ ID NO: 408306 - DNA, 19 bp, Homo sapiens
  siRNA target sequence for LOC116238 (NM_138463.2,750-768).
gctggacgtgatgatcata

SEQ ID NO: 408307 - DNA, 19 bp, Homo sapiens
  siRNA target sequence for LOC116238 (NM_138463.2,751-769).
ctggacgtgatgatcataa

SEQ ID NO: 408308 - DNA, 19 bp, Homo sapiens
  siRNA target sequence for LOC116238 (NM_138463.2,754-772).
gacgtgatgatcataatct

SEQ ID NO: 408309 - DNA, 19 bp, Homo sapiens
  siRNA target sequence for LOC116238 (NM_138463.2,757-775).
gtgatgatcataatctact

SEQ ID NO: 408310 - DNA, 19 bp, Homo sapiens
  siRNA target sequence for LOC130026 (NM_138468.3,173-191).
gcaacccagaccagaagat

SEQ ID NO: 408311 - DNA, 19 bp, Homo sapiens
  siRNA target sequence for LOC130026 (NM_138468.3,195-213).
cagtcagtagtcagaagaa

SEQ ID NO: 408312 - DNA, 19 bp, Homo sapiens
  siRNA target sequence for LOC130026 (NM_138468.3,240-258).
caggtctttatcaaagcaa

SEQ ID NO: 408313 - DNA, 19 bp, Homo sapiens
  siRNA target sequence for LOC130026 (NM_138468.3,298-316).
ctgaactggatgctaaact

SEQ ID NO: 408314 - DNA, 19 bp, Homo sapiens
  siRNA target sequence for LOC130026 (NM_138468.3,320-338).
ggtttttcactctgttcaa

SEQ ID NO: 408315 - DNA, 19 bp, Homo sapiens
  siRNA target sequence for LOC130026 (NM_138468.3,385-403).
gactcaatgttatatcaga

SEQ ID NO: 408316 - DNA, 19 bp, Homo sapiens
  siRNA target sequence for LOC130026 (NM_138468.3,414-432).
gagctagggctctttttaa

SEQ ID NO: 408317 - DNA, 19 bp, Homo sapiens
  siRNA target sequence for LOC130026 (NM_138468.3,421-439).
ggctctttttaaaatttca

SEQ ID NO: 408318 - DNA, 19 bp, Homo sapiens
  siRNA target sequence for LOC130026 (NM_138468.3,454-472).
caactcaagctggcaaaat

SEQ ID NO: 408319 - DNA, 19 bp, Homo sapiens
  siRNA target sequence for LOC130026 (NM_138468.3,482-500).
cactggcaaggcactttgt

SEQ ID NO: 408320 - DNA, 19 bp, Homo sapiens
  siRNA target sequence for LOC130026 (NM_138468.3,541-559).
ctcgtctgaagcaagaagt

SEQ ID NO: 408321 - DNA, 19 bp, Homo sapiens
  siRNA target sequence for LOC130026 (NM_138468.3,558-576).
gtagcaacattcagtcaaa

SEQ ID NO: 408322 - DNA, 19 bp, Homo sapiens
  siRNA target sequence for LOC130026 (NM_138468.3,571-589).
gtcaaagggcagtatctga

SEQ ID NO: 408323 - DNA, 19 bp, Homo sapiens
  siRNA target sequence for LOC130026 (NM_138468.3,573-591).
caaagggcagtatctgata

SEQ ID NO: 408324 - DNA, 19 bp, Homo sapiens
  siRNA target sequence for LOC130026 (NM_138468.3,582-600).
gtatctgataccttgatga

SEQ ID NO: 408325 - DNA, 19 bp, Homo sapiens
  siRNA target sequence for LOC130026 (NM_138468.3,586-604).
ctgataccttgatgacaat

SEQ ID NO: 408326 - DNA, 19 bp, Homo sapiens
  siRNA target sequence for LOC130026 (NM_138468.3,588-606).
gataccttgatgacaatta

SEQ ID NO: 408327 - DNA, 19 bp, Homo sapiens
  siRNA target sequence for LOC130026 (NM_138468.3,615-633).
gagcaggcacgcacagaat

SEQ ID NO: 408328 - DNA, 19 bp, Homo sapiens
  siRNA target sequence for LOC130026 (NM_138468.3,675-693).
ctggacccagacaccttaa

SEQ ID NO: 408329 - DNA, 19 bp, Homo sapiens
  siRNA target sequence for LOC130026 (NM_138468.3,682-700).
cagacaccttaaagcaaat

SEQ ID NO: 408330 - DNA, 19 bp, Homo sapiens
  siRNA target sequence for LOC130026 (NM_138468.3,745-763).
cttcttttgacaagttaaa

SEQ ID NO: 408331 - DNA, 19 bp, Homo sapiens
  siRNA target sequence for LOC130026 (NM_138468.3,796-814).
gagctagtcgctgcaatat

SEQ ID NO: 408332 - DNA, 19 bp, Homo sapiens
  siRNA target sequence for LOC130026 (NM_138468.3,799-817).
ctagtcgctgcaatatgct

SEQ ID NO: 408333 - DNA, 19 bp, Homo sapiens
  siRNA target sequence for LOC130026 (NM_138468.3,877-895).
gaatgatgtcccaaattca

SEQ ID NO: 408334 - DNA, 19 bp, Homo sapiens
  siRNA target sequence for LOC130026 (NM_138468.3,881-899).
gatgtcccaaattcatgaa

SEQ ID NO: 408335 - DNA, 19 bp, Homo sapiens
  siRNA target sequence for LOC130026 (NM_138468.3,909-927).
ggctttcatccgtatgatt

SEQ ID NO: 408336 - DNA, 19 bp, Homo sapiens
  siRNA target sequence for LOC130026 (NM_138468.3,934-952).
ctctcaagcaactacaaga

SEQ ID NO: 408337 - DNA, 19 bp, Homo sapiens
  siRNA target sequence for LOC130026 (NM_138468.3,951-969).
gacacgccaagcaagatta

SEQ ID NO: 408338 - DNA, 19 bp, Homo sapiens
  siRNA target sequence for LOC130026 (NM_138468.3,953-971).
cacgccaagcaagattagt

SEQ ID NO: 408339 - DNA, 19 bp, Homo sapiens
  siRNA target sequence for LOC130026 (NM_138468.3,955-973).
cgccaagcaagattagtga

SEQ ID NO: 408340 - DNA, 19 bp, Homo sapiens
  siRNA target sequence for LOC130026 (NM_138468.3,961-979).
gcaagattagtgaagacaa

SEQ ID NO: 408341 - DNA, 19 bp, Homo sapiens
  siRNA target sequence for LOC130026 (NM_138468.3,1014-1032).
cagctcaataagctagttt

SEQ ID NO: 408342 - DNA, 19 bp, Homo sapiens
  siRNA target sequence for LOC130026 (NM_138468.3,1152-1170).
gatctacctgtagattcat

SEQ ID NO: 408343 - DNA, 19 bp, Homo sapiens
  siRNA target sequence for LOC130026 (NM_138468.3,1208-1226).
gaacaacctcctaagttct

SEQ ID NO: 408344 - DNA, 19 bp, Homo sapiens
  siRNA target sequence for LOC130026 (NM_138468.3,1218-1236).
ctaagttctggttcttcaa

SEQ ID NO: 408345 - DNA, 19 bp, Homo sapiens
  siRNA target sequence for LOC130026 (NM_138468.3,1323-1341).
gagcccctcgctcattctt

SEQ ID NO: 408346 - DNA, 19 bp, Homo sapiens
  siRNA target sequence for LOC130026 (NM_138468.3,1325-1343).
gcccctcgctcattcttct

SEQ ID NO: 408347 - DNA, 19 bp, Homo sapiens
  siRNA target sequence for LOC130026 (NM_138468.3,1383-1401).
gtggctggagcgttcaaca

SEQ ID NO: 408348 - DNA, 19 bp, Homo sapiens
  siRNA target sequence for LOC130026 (NM_138468.3,1386-1404).
gctggagcgttcaacaact

SEQ ID NO: 408349 - DNA, 19 bp, Homo sapiens
  siRNA target sequence for LOC130026 (NM_138468.3,1514-1532).
catgtcagcctggttcaat

SEQ ID NO: 408350 - DNA, 19 bp, Homo sapiens
  siRNA target sequence for LOC144097 (NM_138471.1,937-955).
gacctatgaccaaaaacct

SEQ ID NO: 408351 - DNA, 19 bp, Homo sapiens
  siRNA target sequence for MGC5987 (NM_138476.2,94-112).
cgaagctggcagtctttga

SEQ ID NO: 408352 - DNA, 19 bp, Homo sapiens
  siRNA target sequence for MGC5987 (NM_138476.2,95-113).
gaagctggcagtctttgat

SEQ ID NO: 408353 - DNA, 19 bp, Homo sapiens
  siRNA target sequence for MGC5987 (NM_138476.2,105-123).
gtctttgatttggattaca

SEQ ID NO: 408354 - DNA, 19 bp, Homo sapiens
  siRNA target sequence for MGC5987 (NM_138476.2,107-125).
ctttgatttggattacact

SEQ ID NO: 408355 - DNA, 19 bp, Homo sapiens
  siRNA target sequence for MGC5987 (NM_138476.2,153-171).
gtagaccctccgttccata

SEQ ID NO: 408356 - DNA, 19 bp, Homo sapiens
  siRNA target sequence for MGC5987 (NM_138476.2,156-174).
gaccctccgttccataaga

SEQ ID NO: 408357 - DNA, 19 bp, Homo sapiens
  siRNA target sequence for MGC5987 (NM_138476.2,235-253).
ctgaggtcctaaaacgatt

SEQ ID NO: 408358 - DNA, 19 bp, Homo sapiens
  siRNA target sequence for MGC5987 (NM_138476.2,374-392).
cagcaagatcacacacttt

SEQ ID NO: 408359 - DNA, 19 bp, Homo sapiens
  siRNA target sequence for MGC5987 (NM_138476.2,483-501).
ggtgttacctgcattcaca

SEQ ID NO: 408360 - DNA, 19 bp, Homo sapiens
  siRNA target sequence for MGC5987 (NM_138476.2,500-518).
catccagaatggaatgaat

SEQ ID NO: 408361 - DNA, 19 bp, Homo sapiens
  siRNA target sequence for MGC5987 (NM_138476.2,503-521).
ccagaatggaatgaatctt

SEQ ID NO: 408362 - DNA, 19 bp, Homo sapiens
  siRNA target sequence for MGC5987 (NM_138476.2,528-546).
ctaagtcaagggttagaga

SEQ ID NO: 408363 - DNA, 19 bp, Homo sapiens
  siRNA target sequence for MGC5987 (NM_138476.2,532-550).
gtcaagggttagagacatt

SEQ ID NO: 408364 - DNA, 19 bp, Homo sapiens
  siRNA target sequence for CDAN1 (NM_138477.1,1021-1039).
gagcttgtagcccttgttt

SEQ ID NO: 408365 - DNA, 19 bp, Homo sapiens
  siRNA target sequence for CDAN1 (NM_138477.1,1024-1042).
cttgtagcccttgtttact

SEQ ID NO: 408366 - DNA, 19 bp, Homo sapiens
  siRNA target sequence for CDAN1 (NM_138477.1,1137-1155).
ggacagcgaccctgaacta

SEQ ID NO: 408367 - DNA, 19 bp, Homo sapiens
  siRNA target sequence for CDAN1 (NM_138477.1,1138-1156).
gacagcgaccctgaactaa

SEQ ID NO: 408368 - DNA, 19 bp, Homo sapiens
  siRNA target sequence for CDAN1 (NM_138477.1,1140-1158).
cagcgaccctgaactaagt

SEQ ID NO: 408369 - DNA, 19 bp, Homo sapiens
  siRNA target sequence for CDAN1 (NM_138477.1,1184-1202).
gtccactgttccaaagcat

SEQ ID NO: 408370 - DNA, 19 bp, Homo sapiens
  siRNA target sequence for CDAN1 (NM_138477.1,1230-1248).
ggttttggagtgtcacttt

SEQ ID NO: 408371 - DNA, 19 bp, Homo sapiens
  siRNA target sequence for CDAN1 (NM_138477.1,1426-1444).
gacaatcgtgccaacttct

SEQ ID NO: 408372 - DNA, 19 bp, Homo sapiens
  siRNA target sequence for CDAN1 (NM_138477.1,1446-1464).
cagtgaccgagcctttcat

SEQ ID NO: 408373 - DNA, 19 bp, Homo sapiens
  siRNA target sequence for CDAN1 (NM_138477.1,1450-1468).
gaccgagcctttcatactt

SEQ ID NO: 408374 - DNA, 19 bp, Homo sapiens
  siRNA target sequence for CDAN1 (NM_138477.1,1453-1471).
cgagcctttcatactttta

SEQ ID NO: 408375 - DNA, 19 bp, Homo sapiens
  siRNA target sequence for CDAN1 (NM_138477.1,1454-1472).
gagcctttcatacttttaa

SEQ ID NO: 408376 - DNA, 19 bp, Homo sapiens
  siRNA target sequence for CDAN1 (NM_138477.1,1688-1706).
gcgaggccccagatgtgtt

SEQ ID NO: 408377 - DNA, 19 bp, Homo sapiens
  siRNA target sequence for CDAN1 (NM_138477.1,1694-1712).
ccccagatgtgttgagtat

SEQ ID NO: 408378 - DNA, 19 bp, Homo sapiens
  siRNA target sequence for CDAN1 (NM_138477.1,1974-1992).
gggtgagcggaagcaattt

SEQ ID NO: 408379 - DNA, 19 bp, Homo sapiens
  siRNA target sequence for CDAN1 (NM_138477.1,2195-2213).
cctggctggtggagtttct

SEQ ID NO: 408380 - DNA, 19 bp, Homo sapiens
  siRNA target sequence for CDAN1 (NM_138477.1,2390-2408).
ctgaggacttgttctttct

SEQ ID NO: 408381 - DNA, 19 bp, Homo sapiens
  siRNA target sequence for CDAN1 (NM_138477.1,2409-2427).
ggaagagggtccctcatat

SEQ ID NO: 408382 - DNA, 19 bp, Homo sapiens
  siRNA target sequence for CDAN1 (NM_138477.1,2713-2731).
gagttcgtggcagaaagaa

SEQ ID NO: 408383 - DNA, 19 bp, Homo sapiens
  siRNA target sequence for CDAN1 (NM_138477.1,2715-2733).
gttcgtggcagaaagaatt

SEQ ID NO: 408384 - DNA, 19 bp, Homo sapiens
  siRNA target sequence for CDAN1 (NM_138477.1,2735-2753).
gatcaaactgtgtcaaaca

SEQ ID NO: 408385 - DNA, 19 bp, Homo sapiens
  siRNA target sequence for CDAN1 (NM_138477.1,2854-2872).
ctgttggagatcttgtgtt

SEQ ID NO: 408386 - DNA, 19 bp, Homo sapiens
  siRNA target sequence for CDAN1 (NM_138477.1,2915-2933).
gggagttctgtcaaaggaa

SEQ ID NO: 408387 - DNA, 19 bp, Homo sapiens
  siRNA target sequence for CDAN1 (NM_138477.1,3190-3208).
cacctcatctccgagataa

SEQ ID NO: 408388 - DNA, 19 bp, Homo sapiens
  siRNA target sequence for CDAN1 (NM_138477.1,3192-3210).
cctcatctccgagataaaa

SEQ ID NO: 408389 - DNA, 19 bp, Homo sapiens
  siRNA target sequence for CDAN1 (NM_138477.1,3375-3393).
cctcctcgttgcagatcaa

SEQ ID NO: 408390 - DNA, 19 bp, Homo sapiens
  siRNA target sequence for CDAN1 (NM_138477.1,3376-3394).
ctcctcgttgcagatcaaa

SEQ ID NO: 408391 - DNA, 19 bp, Homo sapiens
  siRNA target sequence for CDAN1 (NM_138477.1,3378-3396).
cctcgttgcagatcaaatt

SEQ ID NO: 408392 - DNA, 19 bp, Homo sapiens
  siRNA target sequence for CDAN1 (NM_138477.1,3381-3399).
cgttgcagatcaaattcct

SEQ ID NO: 408393 - DNA, 19 bp, Homo sapiens
  siRNA target sequence for CDAN1 (NM_138477.1,3382-3400).
gttgcagatcaaattccta

SEQ ID NO: 408394 - DNA, 19 bp, Homo sapiens
  siRNA target sequence for CDAN1 (NM_138477.1,3566-3584).
gggacttgctgctattctt

SEQ ID NO: 408395 - DNA, 19 bp, Homo sapiens
  siRNA target sequence for CDAN1 (NM_138477.1,3670-3688).
ggggactttgctgaagaat

SEQ ID NO: 408396 - DNA, 19 bp, Homo sapiens
  siRNA target sequence for CDAN1 (NM_138477.1,3671-3689).
gggactttgctgaagaatt

SEQ ID NO: 408397 - DNA, 19 bp, Homo sapiens
  siRNA target sequence for CDAN1 (NM_138477.1,3691-3709).
gcaacactgtctaatctgt

SEQ ID NO: 408398 - DNA, 19 bp, Homo sapiens
  siRNA target sequence for CDAN1 (NM_138477.1,3692-3710).
caacactgtctaatctgtt

SEQ ID NO: 408399 - DNA, 19 bp, Homo sapiens
  siRNA target sequence for LOC151534 (NM_138482.1,783-801).
gcgtctgcagcctcttcat

SEQ ID NO: 408400 - DNA, 19 bp, Homo sapiens
  siRNA target sequence for LOC151534 (NM_138482.1,884-902).
cgcaagtctggagttttct

SEQ ID NO: 408401 - DNA, 19 bp, Homo sapiens
  siRNA target sequence for LOC151534 (NM_138482.1,963-981).
cccgacctccatctttgat

SEQ ID NO: 408402 - DNA, 19 bp, Homo sapiens
  siRNA target sequence for LOC151648 (NM_138484.1,167-185).
gtcctttcaagatagtctt

SEQ ID NO: 408403 - DNA, 19 bp, Homo sapiens
  siRNA target sequence for LOC151648 (NM_138484.1,170-188).
ctttcaagatagtcttgaa

SEQ ID NO: 408404 - DNA, 19 bp, Homo sapiens
  siRNA target sequence for LOC151648 (NM_138484.1,240-258).
ggcaaacgcaggtctttta

SEQ ID NO: 408405 - DNA, 19 bp, Homo sapiens
  siRNA target sequence for LOC151648 (NM_138484.1,262-280).
ctgcaccatgccaaataat

SEQ ID NO: 408406 - DNA, 19 bp, Homo sapiens
  siRNA target sequence for LOC151648 (NM_138484.1,264-282).
gcaccatgccaaataatca

SEQ ID NO: 408407 - DNA, 19 bp, Homo sapiens
  siRNA target sequence for LOC151648 (NM_138484.1,292-310).
ctacactgctgaaaaatta

SEQ ID NO: 408408 - DNA, 19 bp, Homo sapiens
  siRNA target sequence for LOC151648 (NM_138484.1,416-434).
cacatgtcagctatatgca

SEQ ID NO: 408409 - DNA, 19 bp, Homo sapiens
  siRNA target sequence for LOC151648 (NM_138484.1,418-436).
catgtcagctatatgcatt

SEQ ID NO: 408410 - DNA, 19 bp, Homo sapiens
  siRNA target sequence for LOC151648 (NM_138484.1,421-439).
gtcagctatatgcattgaa

SEQ ID NO: 408411 - DNA, 19 bp, Homo sapiens
  siRNA target sequence for LOC151648 (NM_138484.1,477-495).
cagaaccaggaaatatgtt

SEQ ID NO: 408412 - DNA, 19 bp, Homo sapiens
  siRNA target sequence for LOC151648 (NM_138484.1,502-520).
gaatggaccccaatagtga

SEQ ID NO: 408413 - DNA, 19 bp, Homo sapiens
  siRNA target sequence for LOC151648 (NM_138484.1,519-537).
gatgacagctccagaaatt

SEQ ID NO: 408414 - DNA, 19 bp, Homo sapiens
  siRNA target sequence for LOC151648 (NM_138484.1,522-540).
gacagctccagaaatttat

SEQ ID NO: 408415 - DNA, 19 bp, Homo sapiens
  siRNA target sequence for LOC151648 (NM_138484.1,526-544).
gctccagaaatttatttgt

SEQ ID NO: 408416 - DNA, 19 bp, Homo sapiens
  siRNA target sequence for LOC151648 (NM_138484.1,556-574).
cgcaaattcctcttgaaga

SEQ ID NO: 408417 - DNA, 19 bp, Homo sapiens
  siRNA target sequence for LOC151648 (NM_138484.1,616-634).
ctacaccacctgaaactca

SEQ ID NO: 408418 - DNA, 19 bp, Homo sapiens
  siRNA target sequence for LOC151648 (NM_138484.1,645-663).
catcttagcctgaaggata

SEQ ID NO: 408419 - DNA, 19 bp, Homo sapiens
  siRNA target sequence for LOC151648 (NM_138484.1,648-666).
cttagcctgaaggatatca

SEQ ID NO: 408420 - DNA, 19 bp, Homo sapiens
  siRNA target sequence for LOC151648 (NM_138484.1,684-702).
cctgttgtgaaaatcagaa

SEQ ID NO: 408421 - DNA, 19 bp, Homo sapiens
  siRNA target sequence for LOC151648 (NM_138484.1,744-762).
gtggctctgcctaaacgta

SEQ ID NO: 408422 - DNA, 19 bp, Homo sapiens
  siRNA target sequence for LOC151648 (NM_138484.1,772-790).
ccagcgtgaactataagga

SEQ ID NO: 408423 - DNA, 19 bp, Homo sapiens
  siRNA target sequence for LOC151648 (NM_138484.1,819-837).
ggggacccttttacagatt

SEQ ID NO: 408424 - DNA, 19 bp, Homo sapiens
  siRNA target sequence for LOC151648 (NM_138484.1,820-838).
gggacccttttacagattt

SEQ ID NO: 408425 - DNA, 19 bp, Homo sapiens
  siRNA target sequence for LOC151648 (NM_138484.1,915-933).
cctgccaaagaagcaattt

SEQ ID NO: 408426 - DNA, 19 bp, Homo sapiens
  siRNA target sequence for MGC21644 (NM_138492.3,472-490).
gtggttccagaaattttaa

SEQ ID NO: 408427 - DNA, 19 bp, Homo sapiens
  siRNA target sequence for MGC21644 (NM_138492.3,544-562).
ctcaatcctcgggaaagaa

SEQ ID NO: 408428 - DNA, 19 bp, Homo sapiens
  siRNA target sequence for MGC21644 (NM_138492.3,585-603).
ccttacgtggacacagtat

SEQ ID NO: 408429 - DNA, 19 bp, Homo sapiens
  siRNA target sequence for MGC21644 (NM_138492.3,623-641).
ctgtcttccgggaaagtat

SEQ ID NO: 408430 - DNA, 19 bp, Homo sapiens
  siRNA target sequence for MGC21644 (NM_138492.3,657-675).
gacagagttcattcaaaga

SEQ ID NO: 408431 - DNA, 19 bp, Homo sapiens
  siRNA target sequence for MGC21644 (NM_138492.3,700-718).
ggatttctcaactgtgttt

SEQ ID NO: 408432 - DNA, 19 bp, Homo sapiens
  siRNA target sequence for MGC21644 (NM_138492.3,751-769).
ggagcccagaagggaatta

SEQ ID NO: 408433 - DNA, 19 bp, Homo sapiens
  siRNA target sequence for KIF23 (NM_138555.1,2182-2200).
cctctttctagtaactata

SEQ ID NO: 408434 - DNA, 19 bp, Homo sapiens
  siRNA target sequence for KIF23 (NM_138555.1,2183-2201).
ctctttctagtaactatat

SEQ ID NO: 408435 - DNA, 19 bp, Homo sapiens
  siRNA target sequence for KIF23 (NM_138555.1,2245-2263).
ctacataggcgctctaact

SEQ ID NO: 408436 - DNA, 19 bp, Homo sapiens
  siRNA target sequence for KIF23 (NM_138555.1,2248-2266).
cataggcgctctaactctt

SEQ ID NO: 408437 - DNA, 19 bp, Homo sapiens
  siRNA target sequence for KIF23 (NM_138555.1,2332-2350).
cctctcaaagtcacatcta

SEQ ID NO: 408438 - DNA, 19 bp, Homo sapiens
  siRNA target sequence for KIF23 (NM_138555.1,2337-2355).
caaagtcacatctattgca

SEQ ID NO: 408439 - DNA, 19 bp, Homo sapiens
  siRNA target sequence for KIF23 (NM_138555.1,2438-2456).
gggaggtggttcctacatt

SEQ ID NO: 408440 - DNA, 19 bp, Homo sapiens
  siRNA target sequence for KIF23 (NM_138555.1,2440-2458).
gaggtggttcctacattca

SEQ ID NO: 408441 - DNA, 19 bp, Homo sapiens
  siRNA target sequence for KIF23 (NM_138555.1,2442-2460).
ggtggttcctacattcaga

SEQ ID NO: 408442 - DNA, 19 bp, Homo sapiens
  siRNA target sequence for KIF23 (NM_138555.1,2443-2461).
gtggttcctacattcagaa

SEQ ID NO: 408443 - DNA, 19 bp, Homo sapiens
  siRNA target sequence for KIF23 (NM_138555.1,2470-2488).
gaaatagaagaggatcatt

SEQ ID NO: 408444 - DNA, 19 bp, Homo sapiens
  siRNA target sequence for KIF23 (NM_138555.1,2485-2503).
cattgcggcaggttactct

SEQ ID NO: 408445 - DNA, 19 bp, Homo sapiens
  siRNA target sequence for KIF23 (NM_138555.1,2489-2507).
gcggcaggttactctttca

SEQ ID NO: 408446 - DNA, 19 bp, Homo sapiens
  siRNA target sequence for KIF23 (NM_138555.1,2490-2508).
cggcaggttactctttcaa

SEQ ID NO: 408447 - DNA, 19 bp, Homo sapiens
  siRNA target sequence for XTP7 (NM_138568.2,344-362).
gcgtgtggagcgattccat

SEQ ID NO: 408448 - DNA, 19 bp, Homo sapiens
  siRNA target sequence for C6orf142 (NM_138569.1,53-71).
gcgtgaaaaaagaagctta

SEQ ID NO: 408449 - DNA, 19 bp, Homo sapiens
  siRNA target sequence for C6orf142 (NM_138569.1,149-167).
ccccactgtcagaagacta

SEQ ID NO: 408450 - DNA, 19 bp, Homo sapiens
  siRNA target sequence for C6orf142 (NM_138569.1,163-181).
gactaccaacccatactca

SEQ ID NO: 408451 - DNA, 19 bp, Homo sapiens
  siRNA target sequence for C6orf142 (NM_138569.1,236-254).
gagtccagaaactgtaaat

SEQ ID NO: 408452 - DNA, 19 bp, Homo sapiens
  siRNA target sequence for C6orf142 (NM_138569.1,249-267).
gtaaataggtctaaatcca

SEQ ID NO: 408453 - DNA, 19 bp, Homo sapiens
  siRNA target sequence for C6orf142 (NM_138569.1,256-274).
ggtctaaatccaatgacta

SEQ ID NO: 408454 - DNA, 19 bp, Homo sapiens
  siRNA target sequence for C6orf142 (NM_138569.1,259-277).
ctaaatccaatgactactt

SEQ ID NO: 408455 - DNA, 19 bp, Homo sapiens
  siRNA target sequence for C6orf142 (NM_138569.1,309-327).
gaccaagcgaaattgactt

SEQ ID NO: 408456 - DNA, 19 bp, Homo sapiens
  siRNA target sequence for C6orf142 (NM_138569.1,338-356).
ggtcagtggaacgatttta

SEQ ID NO: 408457 - DNA, 19 bp, Homo sapiens
  siRNA target sequence for C6orf142 (NM_138569.1,341-359).
cagtggaacgattttacaa

SEQ ID NO: 408458 - DNA, 19 bp, Homo sapiens
  siRNA target sequence for C6orf142 (NM_138569.1,343-361).
gtggaacgattttacaaga

SEQ ID NO: 408459 - DNA, 19 bp, Homo sapiens
  siRNA target sequence for C6orf142 (NM_138569.1,371-389).
cgaagcaaacaaacttcaa

SEQ ID NO: 408460 - DNA, 19 bp, Homo sapiens
  siRNA target sequence for C6orf142 (NM_138569.1,418-436).
ctgaatatgtccttattgt

SEQ ID NO: 408461 - DNA, 19 bp, Homo sapiens
  siRNA target sequence for C6orf142 (NM_138569.1,687-705).
gcaatccctacaaacacat

SEQ ID NO: 408462 - DNA, 19 bp, Homo sapiens
  siRNA target sequence for C6orf142 (NM_138569.1,688-706).
caatccctacaaacacatt

SEQ ID NO: 408463 - DNA, 19 bp, Homo sapiens
  siRNA target sequence for C6orf142 (NM_138569.1,753-771).
gtctccaaggacaacacat

SEQ ID NO: 408464 - DNA, 19 bp, Homo sapiens
  siRNA target sequence for C6orf142 (NM_138569.1,755-773).
ctccaaggacaacacatta

SEQ ID NO: 408465 - DNA, 19 bp, Homo sapiens
  siRNA target sequence for C6orf142 (NM_138569.1,758-776).
caaggacaacacattagaa

SEQ ID NO: 408466 - DNA, 19 bp, Homo sapiens
  siRNA target sequence for C6orf142 (NM_138569.1,777-795).
ccaccagtggagctctatt

SEQ ID NO: 408467 - DNA, 19 bp, Homo sapiens
  siRNA target sequence for C6orf142 (NM_138569.1,778-796).
caccagtggagctctattt

SEQ ID NO: 408468 - DNA, 19 bp, Homo sapiens
  siRNA target sequence for C6orf142 (NM_138569.1,828-846).
ctctgtgctaccattgata

SEQ ID NO: 408469 - DNA, 19 bp, Homo sapiens
  siRNA target sequence for C6orf142 (NM_138569.1,832-850).
gtgctaccattgataaggt

SEQ ID NO: 408470 - DNA, 19 bp, Homo sapiens
  siRNA target sequence for C6orf142 (NM_138569.1,857-875).
ggattccttgtctatgcat

SEQ ID NO: 408471 - DNA, 19 bp, Homo sapiens
  siRNA target sequence for C6orf142 (NM_138569.1,866-884).
gtctatgcattcttctgat

SEQ ID NO: 408472 - DNA, 19 bp, Homo sapiens
  siRNA target sequence for C6orf142 (NM_138569.1,892-910).
caaggtccccaaagacatt

SEQ ID NO: 408473 - DNA, 19 bp, Homo sapiens
  siRNA target sequence for C6orf142 (NM_138569.1,929-947).
caaaactcctacaactctt

SEQ ID NO: 408474 - DNA, 19 bp, Homo sapiens
  siRNA target sequence for C6orf142 (NM_138569.1,963-981).
cgagaaaccaaatatgcaa

SEQ ID NO: 408475 - DNA, 19 bp, Homo sapiens
  siRNA target sequence for C6orf142 (NM_138569.1,964-982).
gagaaaccaaatatgcaaa

SEQ ID NO: 408476 - DNA, 19 bp, Homo sapiens
  siRNA target sequence for C6orf142 (NM_138569.1,1041-1059).
cgcccagtacctgtaaaat

SEQ ID NO: 408477 - DNA, 19 bp, Homo sapiens
  siRNA target sequence for C6orf142 (NM_138569.1,1125-1143).
gataacagcgacctctttt

SEQ ID NO: 408478 - DNA, 19 bp, Homo sapiens
  siRNA target sequence for C6orf142 (NM_138569.1,1174-1192).
ctgtctcgctccatccttt

SEQ ID NO: 408479 - DNA, 19 bp, Homo sapiens
  siRNA target sequence for C6orf142 (NM_138569.1,1176-1194).
gtctcgctccatcctttat

SEQ ID NO: 408480 - DNA, 19 bp, Homo sapiens
  siRNA target sequence for C6orf142 (NM_138569.1,1180-1198).
cgctccatcctttatatca

SEQ ID NO: 408481 - DNA, 19 bp, Homo sapiens
  siRNA target sequence for C6orf142 (NM_138569.1,1182-1200).
ctccatcctttatatcaga

SEQ ID NO: 408482 - DNA, 19 bp, Homo sapiens
  siRNA target sequence for C6orf142 (NM_138569.1,1383-1401).
gaacatgaagctcttgatt

SEQ ID NO: 408483 - DNA, 19 bp, Homo sapiens
  siRNA target sequence for TBN (NM_138572.1,64-82).
cgagatcgggaagtaaaca

SEQ ID NO: 408484 - DNA, 19 bp, Homo sapiens
  siRNA target sequence for TBN (NM_138572.1,88-106).
ctaaccctgccgataacta

SEQ ID NO: 408485 - DNA, 19 bp, Homo sapiens
  siRNA target sequence for TBN (NM_138572.1,92-110).
ccctgccgataactatcat

SEQ ID NO: 408486 - DNA, 19 bp, Homo sapiens
  siRNA target sequence for TBN (NM_138572.1,94-112).
ctgccgataactatcatct

SEQ ID NO: 408487 - DNA, 19 bp, Homo sapiens
  siRNA target sequence for TBN (NM_138572.1,283-301).
ccacactgtccgatatcgt

SEQ ID NO: 408488 - DNA, 19 bp, Homo sapiens
  siRNA target sequence for TBN (NM_138572.1,332-350).
ggacactctccctgcttat

SEQ ID NO: 408489 - DNA, 19 bp, Homo sapiens
  siRNA target sequence for TBN (NM_138572.1,452-470).
gcacatccccagccatttt

SEQ ID NO: 408490 - DNA, 19 bp, Homo sapiens
  siRNA target sequence for TBN (NM_138572.1,486-504).
ccccacacctacatcaaaa

SEQ ID NO: 408491 - DNA, 19 bp, Homo sapiens
  siRNA target sequence for TBN (NM_138572.1,744-762).
cctcggagcaggatgaaca

SEQ ID NO: 408492 - DNA, 19 bp, Homo sapiens
  siRNA target sequence for PWWP1 (NM_138574.1,119-137).
cgctaccaggtgtttttct

SEQ ID NO: 408493 - DNA, 19 bp, Homo sapiens
  siRNA target sequence for BCL11B (NM_138576.1,754-772).
cactcatccgtgatcactt

SEQ ID NO: 408494 - DNA, 19 bp, Homo sapiens
  siRNA target sequence for BCL11B (NM_138576.1,894-912).
gtgtcagttgtcaggtaaa

SEQ ID NO: 408495 - DNA, 19 bp, Homo sapiens
  siRNA target sequence for BCL11B (NM_138576.1,896-914).
gtcagttgtcaggtaaaga

SEQ ID NO: 408496 - DNA, 19 bp, Homo sapiens
  siRNA target sequence for LOC91431 (NM_138698.2,226-244).
caacagcggcaggatttta

SEQ ID NO: 408497 - DNA, 19 bp, Homo sapiens
  siRNA target sequence for LOC91431 (NM_138698.2,237-255).
ggattttagcagtcaagat

SEQ ID NO: 408498 - DNA, 19 bp, Homo sapiens
  siRNA target sequence for LOC91431 (NM_138698.2,238-256).
gattttagcagtcaagatt

SEQ ID NO: 408499 - DNA, 19 bp, Homo sapiens
  siRNA target sequence for LOC91431 (NM_138698.2,257-275).
cggtttccagaaagaaagt

SEQ ID NO: 408500 - DNA, 19 bp, Homo sapiens
  siRNA target sequence for LOC91431 (NM_138698.2,270-288).
gaaagtactttctctgaat

SEQ ID NO: 408501 - DNA, 19 bp, Homo sapiens
  siRNA target sequence for LOC91431 (NM_138698.2,334-352).
gggtctacctgctacaact

SEQ ID NO: 408502 - DNA, 19 bp, Homo sapiens
  siRNA target sequence for LOC91431 (NM_138698.2,335-353).
ggtctacctgctacaacta

SEQ ID NO: 408503 - DNA, 19 bp, Homo sapiens
  siRNA target sequence for LOC91431 (NM_138698.2,344-362).
gctacaactacagtgtaaa

SEQ ID NO: 408504 - DNA, 19 bp, Homo sapiens
  siRNA target sequence for LOC91431 (NM_138698.2,351-369).
ctacagtgtaaaggattta

SEQ ID NO: 408505 - DNA, 19 bp, Homo sapiens
  siRNA target sequence for LOC91431 (NM_138698.2,434-452).
cccaaaggcaaattcacat

SEQ ID NO: 408506 - DNA, 19 bp, Homo sapiens
  siRNA target sequence for LOC91431 (NM_138698.2,435-453).
ccaaaggcaaattcacata

SEQ ID NO: 408507 - DNA, 19 bp, Homo sapiens
  siRNA target sequence for LOC91431 (NM_138698.2,466-484).
cagtctcctgctcattata

SEQ ID NO: 408508 - DNA, 19 bp, Homo sapiens
  siRNA target sequence for LOC91431 (NM_138698.2,497-515).
catcttgcctcatagaaca

SEQ ID NO: 408509 - DNA, 19 bp, Homo sapiens
  siRNA target sequence for LOC91431 (NM_138698.2,500-518).
cttgcctcatagaacatct

SEQ ID NO: 408510 - DNA, 19 bp, Homo sapiens
  siRNA target sequence for LOC91431 (NM_138698.2,505-523).
ctcatagaacatctaaata

SEQ ID NO: 408511 - DNA, 19 bp, Homo sapiens
  siRNA target sequence for LOC91431 (NM_138698.2,566-584).
caaaagttgacatatcatt

SEQ ID NO: 408512 - DNA, 19 bp, Homo sapiens
  siRNA target sequence for LOC91431 (NM_138698.2,631-649).
gtaccatcctgccatcata

SEQ ID NO: 408513 - DNA, 19 bp, Homo sapiens
  siRNA target sequence for LOC91431 (NM_138698.2,635-653).
catcctgccatcatagtca

SEQ ID NO: 408514 - DNA, 19 bp, Homo sapiens
  siRNA target sequence for LOC91431 (NM_138698.2,650-668).
gtcaacctgcaaaacttgt

SEQ ID NO: 408515 - DNA, 19 bp, Homo sapiens
  siRNA target sequence for LOC91431 (NM_138698.2,696-714).
gggtcgtctcttttataca

SEQ ID NO: 408516 - DNA, 19 bp, Homo sapiens
  siRNA target sequence for LOC91431 (NM_138698.2,697-715).
ggtcgtctcttttatacat

SEQ ID NO: 408517 - DNA, 19 bp, Homo sapiens
  siRNA target sequence for LOC91431 (NM_138698.2,725-743).
ccaaagctgatcgatgtaa

SEQ ID NO: 408518 - DNA, 19 bp, Homo sapiens
  siRNA target sequence for LOC91431 (NM_138698.2,726-744).
caaagctgatcgatgtaaa

SEQ ID NO: 408519 - DNA, 19 bp, Homo sapiens
  siRNA target sequence for LOC91431 (NM_138698.2,730-748).
gctgatcgatgtaaattct

SEQ ID NO: 408520 - DNA, 19 bp, Homo sapiens
  siRNA target sequence for LOC91431 (NM_138698.2,731-749).
ctgatcgatgtaaattctt

SEQ ID NO: 408521 - DNA, 19 bp, Homo sapiens
  siRNA target sequence for LOC91431 (NM_138698.2,733-751).
gatcgatgtaaattcttta

SEQ ID NO: 408522 - DNA, 19 bp, Homo sapiens
  siRNA target sequence for LOC91431 (NM_138698.2,736-754).
cgatgtaaattctttaaat

SEQ ID NO: 408523 - DNA, 19 bp, Homo sapiens
  siRNA target sequence for LOC91431 (NM_138698.2,762-780).
ggacgtgactccaggatat

SEQ ID NO: 408524 - DNA, 19 bp, Homo sapiens
  siRNA target sequence for LOC91431 (NM_138698.2,763-781).
gacgtgactccaggatatt

SEQ ID NO: 408525 - DNA, 19 bp, Homo sapiens
  siRNA target sequence for LOC91431 (NM_138698.2,799-817).
cgacctggcatggttttaa

SEQ ID NO: 408526 - DNA, 19 bp, Homo sapiens
  siRNA target sequence for LOC91431 (NM_138698.2,803-821).
ctggcatggttttaagtga

SEQ ID NO: 408527 - DNA, 19 bp, Homo sapiens
  siRNA target sequence for LOC91431 (NM_138698.2,805-823).
ggcatggttttaagtgata

SEQ ID NO: 408528 - DNA, 19 bp, Homo sapiens
  siRNA target sequence for LOC91431 (NM_138698.2,919-937).
cagtatggcaaactaaaga

SEQ ID NO: 408529 - DNA, 19 bp, Homo sapiens
  siRNA target sequence for LOC91431 (NM_138698.2,981-999).
caaactttatcttaagcta

SEQ ID NO: 408530 - DNA, 19 bp, Homo sapiens
  siRNA target sequence for LOC91431 (NM_138698.2,1008-1026).
ggaaagatcttcagcttat

SEQ ID NO: 408531 - DNA, 19 bp, Homo sapiens
  siRNA target sequence for LOC91431 (NM_138698.2,1009-1027).
gaaagatcttcagcttata

SEQ ID NO: 408532 - DNA, 19 bp, Homo sapiens
  siRNA target sequence for LOC91431 (NM_138698.2,1013-1031).
gatcttcagcttatagcaa

SEQ ID NO: 408533 - DNA, 19 bp, Homo sapiens
  siRNA target sequence for LOC91431 (NM_138698.2,1036-1054).
gatctttgggtggtttcaa

SEQ ID NO: 408534 - DNA, 19 bp, Homo sapiens
  siRNA target sequence for LOC91431 (NM_138698.2,1063-1081).
gactttgagctggatactt

SEQ ID NO: 408535 - DNA, 19 bp, Homo sapiens
  siRNA target sequence for LOC91431 (NM_138698.2,1086-1104).
cgcatgtagtgctttcttt

SEQ ID NO: 408536 - DNA, 19 bp, Homo sapiens
  siRNA target sequence for LOC91431 (NM_138698.2,1106-1124).
gaccatcatctatcaatga

SEQ ID NO: 408537 - DNA, 19 bp, Homo sapiens
  siRNA target sequence for LOC91431 (NM_138698.2,1108-1126).
ccatcatctatcaatgaga

SEQ ID NO: 408538 - DNA, 19 bp, Homo sapiens
  siRNA target sequence for LOC91431 (NM_138698.2,1160-1178).
ctaattggcccactaacat

SEQ ID NO: 408539 - DNA, 19 bp, Homo sapiens
  siRNA target sequence for LOC91431 (NM_138698.2,1191-1209).
gttattggtttgtaatgct

SEQ ID NO: 408540 - DNA, 19 bp, Homo sapiens
  siRNA target sequence for LOC91431 (NM_138698.2,1211-1229).
gcacagaactgactacttt

SEQ ID NO: 408541 - DNA, 19 bp, Homo sapiens
  siRNA target sequence for LOC91431 (NM_138698.2,1259-1277).
ctactctacctctaacaca

SEQ ID NO: 408542 - DNA, 19 bp, Homo sapiens
  siRNA target sequence for LOC91431 (NM_138698.2,1289-1307).
caacgtcttcgccaactat

SEQ ID NO: 408543 - DNA, 19 bp, Homo sapiens
  siRNA target sequence for LOC91431 (NM_138698.2,1292-1310).
cgtcttcgccaactatagt

SEQ ID NO: 408544 - DNA, 19 bp, Homo sapiens
  siRNA target sequence for LOC91431 (NM_138698.2,1293-1311).
gtcttcgccaactatagtt

SEQ ID NO: 408545 - DNA, 19 bp, Homo sapiens
  siRNA target sequence for LOC91431 (NM_138698.2,1344-1362).
cccaccagccttcacaaat

SEQ ID NO: 408546 - DNA, 19 bp, Homo sapiens
  siRNA target sequence for LOC91431 (NM_138698.2,1365-1383).
cagtacaaaatttgaacta

SEQ ID NO: 408547 - DNA, 19 bp, Homo sapiens
  siRNA target sequence for LOC91431 (NM_138698.2,1367-1385).
gtacaaaatttgaactact

SEQ ID NO: 408548 - DNA, 19 bp, Homo sapiens
  siRNA target sequence for LOC91431 (NM_138698.2,1388-1406).
gcctaggagcaacattgaa

SEQ ID NO: 408549 - DNA, 19 bp, Homo sapiens
  siRNA target sequence for LOC91431 (NM_138698.2,1390-1408).
ctaggagcaacattgaagt

SEQ ID NO: 408550 - DNA, 19 bp, Homo sapiens
  siRNA target sequence for LOC91431 (NM_138698.2,1396-1414).
gcaacattgaagttagcta

SEQ ID NO: 408551 - DNA, 19 bp, Homo sapiens
  siRNA target sequence for LOC91431 (NM_138698.2,1426-1444).
caggtacacaagttaaaca

SEQ ID NO: 408552 - DNA, 19 bp, Homo sapiens
  siRNA target sequence for LOC91431 (NM_138698.2,1485-1503).
ggcatcacatgaaagcatt

SEQ ID NO: 408553 - DNA, 19 bp, Homo sapiens
  siRNA target sequence for LOC91431 (NM_138698.2,1533-1551).
cttccctatcacaatcata

SEQ ID NO: 408554 - DNA, 19 bp, Homo sapiens
  siRNA target sequence for LOC91431 (NM_138698.2,1536-1554).
ccctatcacaatcatacat

SEQ ID NO: 408555 - DNA, 19 bp, Homo sapiens
  siRNA target sequence for LOC91431 (NM_138698.2,1636-1654).
cccaccattggaaatgcaa

SEQ ID NO: 408556 - DNA, 19 bp, Homo sapiens
  siRNA target sequence for LOC91431 (NM_138698.2,1652-1670).
caaggccgtggaaacttct

SEQ ID NO: 408557 - DNA, 19 bp, Homo sapiens
  siRNA target sequence for LOC91431 (NM_138698.2,1655-1673).
ggccgtggaaacttctgat

SEQ ID NO: 408558 - DNA, 19 bp, Homo sapiens
  siRNA target sequence for LOC91431 (NM_138698.2,1657-1675).
ccgtggaaacttctgattt

SEQ ID NO: 408559 - DNA, 19 bp, Homo sapiens
  siRNA target sequence for LOC91431 (NM_138698.2,1694-1712).
ctgttgacagagtacttct

SEQ ID NO: 408560 - DNA, 19 bp, Homo sapiens
  siRNA target sequence for LOC91431 (NM_138698.2,1724-1742).
gtcttggatttgaaaactt

SEQ ID NO: 408561 - DNA, 19 bp, Homo sapiens
  siRNA target sequence for LOC91431 (NM_138698.2,1767-1785).
gattgccaaaccaatttta

SEQ ID NO: 408562 - DNA, 19 bp, Homo sapiens
  siRNA target sequence for LOC91431 (NM_138698.2,1771-1789).
gccaaaccaattttacctt

SEQ ID NO: 408563 - DNA, 19 bp, Homo sapiens
  siRNA target sequence for LOC91431 (NM_138698.2,1834-1852).
gaactacatgcactaatga

SEQ ID NO: 408564 - DNA, 19 bp, Homo sapiens
  siRNA target sequence for LOC91431 (NM_138698.2,1868-1886).
ctacggaaagagtctatgt

SEQ ID NO: 408565 - DNA, 19 bp, Homo sapiens
  siRNA target sequence for LOC91431 (NM_138698.2,1879-1897).
gtctatgtgagaaaaagca

SEQ ID NO: 408566 - DNA, 19 bp, Homo sapiens
  siRNA target sequence for LOC91431 (NM_138698.2,1895-1913).
gcattgagcagcataaact

SEQ ID NO: 408567 - DNA, 19 bp, Homo sapiens
  siRNA target sequence for LOC91431 (NM_138698.2,1906-1924).
cataaactggggaccaata

SEQ ID NO: 408568 - DNA, 19 bp, Homo sapiens
  siRNA target sequence for LOC91431 (NM_138698.2,1935-1953).
gaagcaggttcgagtagtt

SEQ ID NO: 408569 - DNA, 19 bp, Homo sapiens
  siRNA target sequence for LOC91431 (NM_138698.2,1974-1992).
cccattcccatgcatgaat

SEQ ID NO: 408570 - DNA, 19 bp, Homo sapiens
  siRNA target sequence for LOC91431 (NM_138698.2,1976-1994).
cattcccatgcatgaatga

SEQ ID NO: 408571 - DNA, 19 bp, Homo sapiens
  siRNA target sequence for LOC91431 (NM_138698.2,1981-1999).
ccatgcatgaatgatctta

SEQ ID NO: 408572 - DNA, 19 bp, Homo sapiens
  siRNA target sequence for LOC91431 (NM_138698.2,1982-2000).
catgcatgaatgatcttaa

SEQ ID NO: 408573 - DNA, 19 bp, Homo sapiens
  siRNA target sequence for LOC91431 (NM_138698.2,2019-2037).
ggatgagtgtagtcagata

SEQ ID NO: 408574 - DNA, 19 bp, Homo sapiens
  siRNA target sequence for LOC91431 (NM_138698.2,2020-2038).
gatgagtgtagtcagataa

SEQ ID NO: 408575 - DNA, 19 bp, Homo sapiens
  siRNA target sequence for LOC91431 (NM_138698.2,2025-2043).
gtgtagtcagataactgaa

SEQ ID NO: 408576 - DNA, 19 bp, Homo sapiens
  siRNA target sequence for LOC91431 (NM_138698.2,2069-2087).
ggtttgagtgtgaaaagct

SEQ ID NO: 408577 - DNA, 19 bp, Homo sapiens
  siRNA target sequence for LOC91431 (NM_138698.2,2078-2096).
gtgaaaagctgattcttgt

SEQ ID NO: 408578 - DNA, 19 bp, Homo sapiens
  siRNA target sequence for LOC91431 (NM_138698.2,2193-2211).
gggtcacaagccaattcta

SEQ ID NO: 408579 - DNA, 19 bp, Homo sapiens
  siRNA target sequence for LOC91431 (NM_138698.2,2195-2213).
gtcacaagccaattctatt

SEQ ID NO: 408580 - DNA, 19 bp, Homo sapiens
  siRNA target sequence for LOC91431 (NM_138698.2,2197-2215).
cacaagccaattctattga

SEQ ID NO: 408581 - DNA, 19 bp, Homo sapiens
  siRNA target sequence for LOC91431 (NM_138698.2,2239-2257).
gcaatcagtgctattgcta

SEQ ID NO: 408582 - DNA, 19 bp, Homo sapiens
  siRNA target sequence for LOC91431 (NM_138698.2,2240-2258).
caatcagtgctattgctaa

SEQ ID NO: 408583 - DNA, 19 bp, Homo sapiens
  siRNA target sequence for LOC91431 (NM_138698.2,2244-2262).
cagtgctattgctaatgat

SEQ ID NO: 408584 - DNA, 19 bp, Homo sapiens
  siRNA target sequence for LOC91431 (NM_138698.2,2246-2264).
gtgctattgctaatgatct

SEQ ID NO: 408585 - DNA, 19 bp, Homo sapiens
  siRNA target sequence for LOC91431 (NM_138698.2,2308-2326).
cggagccctttattggaat

SEQ ID NO: 408586 - DNA, 19 bp, Homo sapiens
  siRNA target sequence for LOC91431 (NM_138698.2,2398-2416).
gtggcagaagctacgttta

SEQ ID NO: 408587 - DNA, 19 bp, Homo sapiens
  siRNA target sequence for LOC91431 (NM_138698.2,2400-2418).
ggcagaagctacgtttaca

SEQ ID NO: 408588 - DNA, 19 bp, Homo sapiens
  siRNA target sequence for LOC91431 (NM_138698.2,2424-2442).
gctgattcaatcactgatt

SEQ ID NO: 408589 - DNA, 19 bp, Homo sapiens
  siRNA target sequence for LOC91431 (NM_138698.2,2449-2467).
ggaatagcaggctctatga

SEQ ID NO: 408590 - DNA, 19 bp, Homo sapiens
  siRNA target sequence for LOC91431 (NM_138698.2,2450-2468).
gaatagcaggctctatgat

SEQ ID NO: 408591 - DNA, 19 bp, Homo sapiens
  siRNA target sequence for LOC91431 (NM_138698.2,2466-2484).
gattggtgtgataacatta

SEQ ID NO: 408592 - DNA, 19 bp, Homo sapiens
  siRNA target sequence for LOC91431 (NM_138698.2,2471-2489).
gtgtgataacattatacaa

SEQ ID NO: 408593 - DNA, 19 bp, Homo sapiens
  siRNA target sequence for LOC91431 (NM_138698.2,2496-2514).
gatgtacaagctttgtcat

SEQ ID NO: 408594 - DNA, 19 bp, Homo sapiens
  siRNA target sequence for LOC91431 (NM_138698.2,2499-2517).
gtacaagctttgtcattta

SEQ ID NO: 408595 - DNA, 19 bp, Homo sapiens
  siRNA target sequence for LOC91431 (NM_138698.2,2532-2550).
ctttcaccatcctgatatt

SEQ ID NO: 408596 - DNA, 19 bp, Homo sapiens
  siRNA target sequence for LOC91431 (NM_138698.2,2565-2583).
gtccacagtagatgctttt

SEQ ID NO: 408597 - DNA, 19 bp, Homo sapiens
  siRNA target sequence for LOC91431 (NM_138698.2,2588-2606).
gagctgaaaaggagatcat

SEQ ID NO: 408598 - DNA, 19 bp, Homo sapiens
  siRNA target sequence for LOC91431 (NM_138698.2,2616-2634).
ctgtgtaaggacaagacaa

SEQ ID NO: 408599 - DNA, 19 bp, Homo sapiens
  siRNA target sequence for LOC91431 (NM_138698.2,2624-2642).
ggacaagacaagtaggatt

SEQ ID NO: 408600 - DNA, 19 bp, Homo sapiens
  siRNA target sequence for LOC91431 (NM_138698.2,2627-2645).
caagacaagtaggattcat

SEQ ID NO: 408601 - DNA, 19 bp, Homo sapiens
  siRNA target sequence for LOC91431 (NM_138698.2,2811-2829).
gctgaaccatctccttaaa

SEQ ID NO: 408602 - DNA, 19 bp, Homo sapiens
  siRNA target sequence for LOC91431 (NM_138698.2,2814-2832).
gaaccatctccttaaagat

SEQ ID NO: 408603 - DNA, 19 bp, Homo sapiens
  siRNA target sequence for C7orf11 (NM_138701.1,446-464).
gtctaatgagttggaaaat

SEQ ID NO: 408604 - DNA, 19 bp, Homo sapiens
  siRNA target sequence for C7orf11 (NM_138701.1,502-520).
gcctagaaccagtatctgt

SEQ ID NO: 408605 - DNA, 19 bp, Homo sapiens
  siRNA target sequence for C7orf11 (NM_138701.1,503-521).
cctagaaccagtatctgta

SEQ ID NO: 408606 - DNA, 19 bp, Homo sapiens
  siRNA target sequence for C7orf11 (NM_138701.1,513-531).
gtatctgtagtggatataa

SEQ ID NO: 408607 - DNA, 19 bp, Homo sapiens
  siRNA target sequence for C7orf11 (NM_138701.1,533-551).
ccaacaatacagcaatact

SEQ ID NO: 408608 - DNA, 19 bp, Homo sapiens
  siRNA target sequence for MAGEC3 (NM_138702.1,136-154).
gccacagataaggactatt

SEQ ID NO: 408609 - DNA, 19 bp, Homo sapiens
  siRNA target sequence for MAGEC3 (NM_138702.1,138-156).
cacagataaggactattct

SEQ ID NO: 408610 - DNA, 19 bp, Homo sapiens
  siRNA target sequence for MAGEC3 (NM_138702.1,177-195).
gagggaggtgaggcttttt

SEQ ID NO: 408611 - DNA, 19 bp, Homo sapiens
  siRNA target sequence for MAGEC3 (NM_138702.1,235-253).
gtcctctgccccacatact

SEQ ID NO: 408612 - DNA, 19 bp, Homo sapiens
  siRNA target sequence for MAGEC3 (NM_138702.1,275-293).
cagggtccccaggtttaca

SEQ ID NO: 408613 - DNA, 19 bp, Homo sapiens
  siRNA target sequence for MAGEC3 (NM_138702.1,323-341).
cggaggggaagttttctct

SEQ ID NO: 408614 - DNA, 19 bp, Homo sapiens
  siRNA target sequence for MAGEC3 (NM_138702.1,344-362).
ggagggcagtttcagttaa

SEQ ID NO: 408615 - DNA, 19 bp, Homo sapiens
  siRNA target sequence for MAGEC3 (NM_138702.1,730-748).
gtggaccccgaccatttct

SEQ ID NO: 408616 - DNA, 19 bp, Homo sapiens
  siRNA target sequence for MAGEC3 (NM_138702.1,732-750).
ggaccccgaccatttctat

SEQ ID NO: 408617 - DNA, 19 bp, Homo sapiens
  siRNA target sequence for MAGEC3 (NM_138702.1,736-754).
cccgaccatttctatgtct

SEQ ID NO: 408618 - DNA, 19 bp, Homo sapiens
  siRNA target sequence for MAGEC3 (NM_138702.1,738-756).
cgaccatttctatgtcttt

SEQ ID NO: 408619 - DNA, 19 bp, Homo sapiens
  siRNA target sequence for MAGEC3 (NM_138702.1,1447-1465).
ctgacgactgtcatcaaga

SEQ ID NO: 408620 - DNA, 19 bp, Homo sapiens
  siRNA target sequence for MAGEC3 (NM_138702.1,1464-1482).
gaagtataaggactatttt

SEQ ID NO: 408621 - DNA, 19 bp, Homo sapiens
  siRNA target sequence for MAGEC3 (NM_138702.1,1528-1546).
ggcattgccctgactgata

SEQ ID NO: 408622 - DNA, 19 bp, Homo sapiens
  siRNA target sequence for MAGEC3 (NM_138702.1,1552-1570).
cccgacaaccactcctatt

SEQ ID NO: 408623 - DNA, 19 bp, Homo sapiens
  siRNA target sequence for MAGEC3 (NM_138702.1,1553-1571).
ccgacaaccactcctattt

SEQ ID NO: 408624 - DNA, 19 bp, Homo sapiens
  siRNA target sequence for MAGEC3 (NM_138702.1,1555-1573).
gacaaccactcctatttct

SEQ ID NO: 408625 - DNA, 19 bp, Homo sapiens
  siRNA target sequence for MAGEC3 (NM_138702.1,1720-1738).
gcaatagggcccattcaga

SEQ ID NO: 408626 - DNA, 19 bp, Homo sapiens
  siRNA target sequence for MAGEC3 (NM_138702.1,1739-1757).
ggccagcaagagaagtctt

SEQ ID NO: 408627 - DNA, 19 bp, Homo sapiens
  siRNA target sequence for HCA3 (NM_138703.2,450-468).
gaagacaggtcgattgctt

SEQ ID NO: 408628 - DNA, 19 bp, Homo sapiens
  siRNA target sequence for HCA3 (NM_138703.2,522-540).
gagatgctggagtttctca

SEQ ID NO: 408629 - DNA, 19 bp, Homo sapiens
  siRNA target sequence for HCA3 (NM_138703.2,541-559).
gagagtactcagatcagtt

SEQ ID NO: 408630 - DNA, 19 bp, Homo sapiens
  siRNA target sequence for HCA3 (NM_138703.2,607-625).
ggttgaacctgagagttat

SEQ ID NO: 408631 - DNA, 19 bp, Homo sapiens
  siRNA target sequence for HCA3 (NM_138703.2,608-626).
gttgaacctgagagttatt

SEQ ID NO: 408632 - DNA, 19 bp, Homo sapiens
  siRNA target sequence for HCA3 (NM_138703.2,633-651).
caggctgacacctacaatt

SEQ ID NO: 408633 - DNA, 19 bp, Homo sapiens
  siRNA target sequence for HCA3 (NM_138703.2,635-653).
ggctgacacctacaattta

SEQ ID NO: 408634 - DNA, 19 bp, Homo sapiens
  siRNA target sequence for HCA3 (NM_138703.2,637-655).
ctgacacctacaatttagt

SEQ ID NO: 408635 - DNA, 19 bp, Homo sapiens
  siRNA target sequence for HCA3 (NM_138703.2,671-689).
ccagatcaccgataggata

SEQ ID NO: 408636 - DNA, 19 bp, Homo sapiens
  siRNA target sequence for HCA3 (NM_138703.2,788-806).
cttgctgctaaaagttgat

SEQ ID NO: 408637 - DNA, 19 bp, Homo sapiens
  siRNA target sequence for HCA3 (NM_138703.2,902-920).
gccggtgtatggcactaat

SEQ ID NO: 408638 - DNA, 19 bp, Homo sapiens
  siRNA target sequence for HCA3 (NM_138703.2,913-931).
gcactaatccccttgagtt

SEQ ID NO: 408639 - DNA, 19 bp, Homo sapiens
  siRNA target sequence for HCA3 (NM_138703.2,914-932).
cactaatccccttgagttt

SEQ ID NO: 408640 - DNA, 19 bp, Homo sapiens
  siRNA target sequence for HCA3 (NM_138703.2,916-934).
ctaatccccttgagtttga

SEQ ID NO: 408641 - DNA, 19 bp, Homo sapiens
  siRNA target sequence for HCA3 (NM_138703.2,995-1013).
gtcagatgcccatgatgaa

SEQ ID NO: 408642 - DNA, 19 bp, Homo sapiens
  siRNA target sequence for HCA3 (NM_138703.2,1102-1120).
ggtcggaggacactatgaa

SEQ ID NO: 408643 - DNA, 19 bp, Homo sapiens
  siRNA target sequence for HCA3 (NM_138703.2,1103-1121).
gtcggaggacactatgaat

SEQ ID NO: 408644 - DNA, 19 bp, Homo sapiens
  siRNA target sequence for HCA3 (NM_138703.2,1139-1157).
ggtccagttggctattagt

SEQ ID NO: 408645 - DNA, 19 bp, Homo sapiens
  siRNA target sequence for HCA3 (NM_138703.2,1199-1217).
ggctcacactggcaaagaa

SEQ ID NO: 408646 - DNA, 19 bp, Homo sapiens
  siRNA target sequence for HCA3 (NM_138703.2,1241-1259).
cctcaatagagctactcta

SEQ ID NO: 408647 - DNA, 19 bp, Homo sapiens
  siRNA target sequence for HCA3 (NM_138703.2,1242-1260).
ctcaatagagctactctaa

SEQ ID NO: 408648 - DNA, 19 bp, Homo sapiens
  siRNA target sequence for HCA3 (NM_138703.2,1244-1262).
caatagagctactctaatt

SEQ ID NO: 408649 - DNA, 19 bp, Homo sapiens
  siRNA target sequence for HCA3 (NM_138703.2,1249-1267).
gagctactctaattcttga

SEQ ID NO: 408650 - DNA, 19 bp, Homo sapiens
  siRNA target sequence for HCA3 (NM_138703.2,1251-1269).
gctactctaattcttgata

SEQ ID NO: 408651 - DNA, 19 bp, Homo sapiens
  siRNA target sequence for HCA3 (NM_138703.2,1376-1394).
gagacccactcaagaatat

SEQ ID NO: 408652 - DNA, 19 bp, Homo sapiens
  siRNA target sequence for HCA3 (NM_138703.2,1378-1396).
gacccactcaagaatatgt

SEQ ID NO: 408653 - DNA, 19 bp, Homo sapiens
  siRNA target sequence for HCA3 (NM_138703.2,1381-1399).
ccactcaagaatatgtaat

SEQ ID NO: 408654 - DNA, 19 bp, Homo sapiens
  siRNA target sequence for HCA3 (NM_138703.2,1460-1478).
cttgcttcgaagatttagt

SEQ ID NO: 408655 - DNA, 19 bp, Homo sapiens
  siRNA target sequence for HCA3 (NM_138703.2,1481-1499).
ggatgtagggagaaagcat

SEQ ID NO: 408656 - DNA, 19 bp, Homo sapiens
  siRNA target sequence for HCA3 (NM_138703.2,1501-1519).
ccatcacccgtaagcttat

SEQ ID NO: 408657 - DNA, 19 bp, Homo sapiens
  siRNA target sequence for HCA3 (NM_138703.2,1505-1523).
cacccgtaagcttatgaga

SEQ ID NO: 408658 - DNA, 19 bp, Homo sapiens
  siRNA target sequence for HCA3 (NM_138703.2,1543-1561).
ggccactgtcctactctaa

SEQ ID NO: 408659 - DNA, 19 bp, Homo sapiens
  siRNA target sequence for HCA3 (NM_138703.2,1553-1571).
ctactctaatccagttgaa

SEQ ID NO: 408660 - DNA, 19 bp, Homo sapiens
  siRNA target sequence for HCA3 (NM_138703.2,1558-1576).
ctaatccagttgaatatga

SEQ ID NO: 408661 - DNA, 19 bp, Homo sapiens
  siRNA target sequence for HCA3 (NM_138703.2,1590-1608).
cctcgagctcaccatgaaa

SEQ ID NO: 408662 - DNA, 19 bp, Homo sapiens
  siRNA target sequence for HCA3 (NM_138703.2,1662-1680).
cagaactggccagaacaat

SEQ ID NO: 408663 - DNA, 19 bp, Homo sapiens
  siRNA target sequence for HCA3 (NM_138703.2,1703-1721).
ggaggccagagccaaatct

SEQ ID NO: 408664 - DNA, 19 bp, Homo sapiens
  siRNA target sequence for HCA3 (NM_138703.2,1720-1738).
ctgaggcaactatcatgtt

SEQ ID NO: 408665 - DNA, 19 bp, Homo sapiens
  siRNA target sequence for HCA3 (NM_138703.2,1722-1740).
gaggcaactatcatgtttt

SEQ ID NO: 408666 - DNA, 19 bp, Homo sapiens
  siRNA target sequence for NDNL2 (NM_138704.2,632-650).
ctacgggcctcctgatgat

SEQ ID NO: 408667 - DNA, 19 bp, Homo sapiens
  siRNA target sequence for NDNL2 (NM_138704.2,651-669).
cgtcttagggctcatcttt

SEQ ID NO: 408668 - DNA, 19 bp, Homo sapiens
  siRNA target sequence for NDNL2 (NM_138704.2,832-850).
gaccccgtcgactacgaat

SEQ ID NO: 408669 - DNA, 19 bp, Homo sapiens
  siRNA target sequence for NDNL2 (NM_138704.2,836-854).
ccgtcgactacgaattcca

SEQ ID NO: 408670 - DNA, 19 bp, Homo sapiens
  siRNA target sequence for NDNL2 (NM_138704.2,911-929).
ccaaggtccataatcaaga

SEQ ID NO: 408671 - DNA, 19 bp, Homo sapiens
  siRNA target sequence for ST7L (NM_138728.2,1693-1711).
gggaaggcacctttcatca

SEQ ID NO: 408672 - DNA, 19 bp, Homo sapiens
  siRNA target sequence for ST7L (NM_138728.2,1694-1712).
ggaaggcacctttcatcat

SEQ ID NO: 408673 - DNA, 19 bp, Homo sapiens
  siRNA target sequence for ST7L (NM_138729.2,1946-1964).
ctcaaggacttgtgtagat

SEQ ID NO: 408674 - DNA, 19 bp, Homo sapiens
  siRNA target sequence for ST7L (NM_138729.2,1948-1966).
caaggacttgtgtagatta

SEQ ID NO: 408675 - DNA, 19 bp, Homo sapiens
  siRNA target sequence for MIPOL1 (NM_138731.2,470-488).
gagaactggtcaaaagaca

SEQ ID NO: 408676 - DNA, 19 bp, Homo sapiens
  siRNA target sequence for MIPOL1 (NM_138731.2,472-490).
gaactggtcaaaagacata

SEQ ID NO: 408677 - DNA, 19 bp, Homo sapiens
  siRNA target sequence for MIPOL1 (NM_138731.2,487-505).
cataacccacagttatctt

SEQ ID NO: 408678 - DNA, 19 bp, Homo sapiens
  siRNA target sequence for MIPOL1 (NM_138731.2,492-510).
cccacagttatcttgaaca

SEQ ID NO: 408679 - DNA, 19 bp, Homo sapiens
  siRNA target sequence for MIPOL1 (NM_138731.2,496-514).
cagttatcttgaacaagaa

SEQ ID NO: 408680 - DNA, 19 bp, Homo sapiens
  siRNA target sequence for MIPOL1 (NM_138731.2,543-561).
cagatgagcaactgactat

SEQ ID NO: 408681 - DNA, 19 bp, Homo sapiens
  siRNA target sequence for MIPOL1 (NM_138731.2,545-563).
gatgagcaactgactatga

SEQ ID NO: 408682 - DNA, 19 bp, Homo sapiens
  siRNA target sequence for MIPOL1 (NM_138731.2,550-568).
gcaactgactatgaattct

SEQ ID NO: 408683 - DNA, 19 bp, Homo sapiens
  siRNA target sequence for MIPOL1 (NM_138731.2,556-574).
gactatgaattctgagaaa

SEQ ID NO: 408684 - DNA, 19 bp, Homo sapiens
  siRNA target sequence for MIPOL1 (NM_138731.2,591-609).
ccactgaattagttaatga

SEQ ID NO: 408685 - DNA, 19 bp, Homo sapiens
  siRNA target sequence for MIPOL1 (NM_138731.2,638-656).
gggcagagatcaacgaatt

SEQ ID NO: 408686 - DNA, 19 bp, Homo sapiens
  siRNA target sequence for MIPOL1 (NM_138731.2,639-657).
ggcagagatcaacgaattt

SEQ ID NO: 408687 - DNA, 19 bp, Homo sapiens
  siRNA target sequence for MIPOL1 (NM_138731.2,640-658).
gcagagatcaacgaatttt

SEQ ID NO: 408688 - DNA, 19 bp, Homo sapiens
  siRNA target sequence for MIPOL1 (NM_138731.2,645-663).
gatcaacgaattttcagat

SEQ ID NO: 408689 - DNA, 19 bp, Homo sapiens
  siRNA target sequence for MIPOL1 (NM_138731.2,648-666).
caacgaattttcagatcat

SEQ ID NO: 408690 - DNA, 19 bp, Homo sapiens
  siRNA target sequence for MIPOL1 (NM_138731.2,661-679).
gatcatcagttcttatcca

SEQ ID NO: 408691 - DNA, 19 bp, Homo sapiens
  siRNA target sequence for MIPOL1 (NM_138731.2,692-710).
gtttactgcactactgaaa

SEQ ID NO: 408692 - DNA, 19 bp, Homo sapiens
  siRNA target sequence for MIPOL1 (NM_138731.2,705-723).
ctgaaaaatacaacgttat

SEQ ID NO: 408693 - DNA, 19 bp, Homo sapiens
  siRNA target sequence for MIPOL1 (NM_138731.2,715-733).
caacgttatggaacataga

SEQ ID NO: 408694 - DNA, 19 bp, Homo sapiens
  siRNA target sequence for MIPOL1 (NM_138731.2,718-736).
cgttatggaacatagacat

SEQ ID NO: 408695 - DNA, 19 bp, Homo sapiens
  siRNA target sequence for MIPOL1 (NM_138731.2,719-737).
gttatggaacatagacata

SEQ ID NO: 408696 - DNA, 19 bp, Homo sapiens
  siRNA target sequence for MIPOL1 (NM_138731.2,745-763).
gcattatgaatgtatgact

SEQ ID NO: 408697 - DNA, 19 bp, Homo sapiens
  siRNA target sequence for MIPOL1 (NM_138731.2,773-791).
gttacttcagactcagata

SEQ ID NO: 408698 - DNA, 19 bp, Homo sapiens
  siRNA target sequence for MIPOL1 (NM_138731.2,799-817).
gacaatagcatttcttcta

SEQ ID NO: 408699 - DNA, 19 bp, Homo sapiens
  siRNA target sequence for MIPOL1 (NM_138731.2,960-978).
ctctggttgaagaagtgta

SEQ ID NO: 408700 - DNA, 19 bp, Homo sapiens
  siRNA target sequence for MIPOL1 (NM_138731.2,995-1013).
cgtgatgaagctgttatgt

SEQ ID NO: 408701 - DNA, 19 bp, Homo sapiens
  siRNA target sequence for MIPOL1 (NM_138731.2,998-1016).
gatgaagctgttatgtcta

SEQ ID NO: 408702 - DNA, 19 bp, Homo sapiens
  siRNA target sequence for MIPOL1 (NM_138731.2,1058-1076).
cgagccaagcatatggaaa

SEQ ID NO: 408703 - DNA, 19 bp, Homo sapiens
  siRNA target sequence for MIPOL1 (NM_138731.2,1132-1150).
ggaattactgaacagaata

SEQ ID NO: 408704 - DNA, 19 bp, Homo sapiens
  siRNA target sequence for MIPOL1 (NM_138731.2,1157-1175).
gcagacacagggatagcta

SEQ ID NO: 408705 - DNA, 19 bp, Homo sapiens
  siRNA target sequence for MIPOL1 (NM_138731.2,1158-1176).
cagacacagggatagctat

SEQ ID NO: 408706 - DNA, 19 bp, Homo sapiens
  siRNA target sequence for MIPOL1 (NM_138731.2,1199-1217).
gtggatagaatctacaaga

SEQ ID NO: 408707 - DNA, 19 bp, Homo sapiens
  siRNA target sequence for MIPOL1 (NM_138731.2,1255-1273).
gagtgcactaatagaagaa

SEQ ID NO: 408708 - DNA, 19 bp, Homo sapiens
  siRNA target sequence for MIPOL1 (NM_138731.2,1437-1455).
ctgcagttcaacagtacaa

SEQ ID NO: 408709 - DNA, 19 bp, Homo sapiens
  siRNA target sequence for MIPOL1 (NM_138731.2,1552-1570).
ccttagtacatatgaagaa

SEQ ID NO: 408710 - DNA, 19 bp, Homo sapiens
  siRNA target sequence for MIPOL1 (NM_138731.2,1655-1673).
gagcgagcaaatatggaat

SEQ ID NO: 408711 - DNA, 19 bp, Homo sapiens
  siRNA target sequence for MIPOL1 (NM_138731.2,1662-1680).
caaatatggaattacaact

SEQ ID NO: 408712 - DNA, 19 bp, Homo sapiens
  siRNA target sequence for MIPOL1 (NM_138731.2,1669-1687).
ggaattacaacttcaacat

SEQ ID NO: 408713 - DNA, 19 bp, Homo sapiens
  siRNA target sequence for LOC90693 (NM_138771.2,478-496).
gcttgtatttggactcatt

SEQ ID NO: 408714 - DNA, 19 bp, Homo sapiens
  siRNA target sequence for LOC90693 (NM_138771.2,491-509).
ctcatttggggattgatgt

SEQ ID NO: 408715 - DNA, 19 bp, Homo sapiens
  siRNA target sequence for LOC90693 (NM_138771.2,508-526).
gttactgcactatactttt

SEQ ID NO: 408716 - DNA, 19 bp, Homo sapiens
  siRNA target sequence for LOC90693 (NM_138771.2,514-532).
gcactatacttttcaacaa

SEQ ID NO: 408717 - DNA, 19 bp, Homo sapiens
  siRNA target sequence for LOC90693 (NM_138771.2,553-571).
caagttacgtgagcaaata

SEQ ID NO: 408718 - DNA, 19 bp, Homo sapiens
  siRNA target sequence for LOC90693 (NM_138771.2,556-574).
gttacgtgagcaaatacta

SEQ ID NO: 408719 - DNA, 19 bp, Homo sapiens
  siRNA target sequence for LOC90693 (NM_138771.2,561-579).
gtgagcaaatactagactt

SEQ ID NO: 408720 - DNA, 19 bp, Homo sapiens
  siRNA target sequence for LOC90693 (NM_138771.2,563-581).
gagcaaatactagacttaa

SEQ ID NO: 408721 - DNA, 19 bp, Homo sapiens
  siRNA target sequence for LOC90693 (NM_138771.2,566-584).
caaatactagacttaagca

SEQ ID NO: 408722 - DNA, 19 bp, Homo sapiens
  siRNA target sequence for LOC90693 (NM_138771.2,654-672).
caggatatgcggatctgaa

SEQ ID NO: 408723 - DNA, 19 bp, Homo sapiens
  siRNA target sequence for LOC90693 (NM_138771.2,764-782).
gccaacaccaccaatggta

SEQ ID NO: 408724 - DNA, 19 bp, Homo sapiens
  siRNA target sequence for LOC90693 (NM_138771.2,769-787).
caccaccaatggtactagt

SEQ ID NO: 408725 - DNA, 19 bp, Homo sapiens
  siRNA target sequence for LOC90693 (NM_138771.2,780-798).
gtactagtgggaatttggt

SEQ ID NO: 408726 - DNA, 19 bp, Homo sapiens
  siRNA target sequence for LOC90693 (NM_138771.2,797-815).
gtgccagtaaccacaaata

SEQ ID NO: 408727 - DNA, 19 bp, Homo sapiens
  siRNA target sequence for LOC90693 (NM_138771.2,799-817).
gccagtaaccacaaataaa

SEQ ID NO: 408728 - DNA, 19 bp, Homo sapiens
  siRNA target sequence for LOC90693 (NM_138771.2,827-845).
gtctcgggcagtatcagat

SEQ ID NO: 408729 - DNA, 19 bp, Homo sapiens
  siRNA target sequence for MGC16353 (NM_138774.2,177-195).
ggcggaaacagcacttcat

SEQ ID NO: 408730 - DNA, 19 bp, Homo sapiens
  siRNA target sequence for MGC16353 (NM_138774.2,389-407).
gtggaggtctggaacgatt

SEQ ID NO: 408731 - DNA, 19 bp, Homo sapiens
  siRNA target sequence for MGC16353 (NM_138774.2,392-410).
gaggtctggaacgatttca

SEQ ID NO: 408732 - DNA, 19 bp, Homo sapiens
  siRNA target sequence for MGC16353 (NM_138774.2,395-413).
gtctggaacgatttcatga

SEQ ID NO: 408733 - DNA, 19 bp, Homo sapiens
  siRNA target sequence for MGC16353 (NM_138774.2,664-682).
cgtgtacacagcaatgcta

SEQ ID NO: 408734 - DNA, 19 bp, Homo sapiens
  siRNA target sequence for MGC16353 (NM_138774.2,783-801).
gtaatcggcacctggattt

SEQ ID NO: 408735 - DNA, 19 bp, Homo sapiens
  siRNA target sequence for LOC92715 (NM_138778.1,314-332).
gtggaatggaagttaagga

SEQ ID NO: 408736 - DNA, 19 bp, Homo sapiens
  siRNA target sequence for LOC92715 (NM_138778.1,397-415).
ctggtcgaggtccaaagaa

SEQ ID NO: 408737 - DNA, 19 bp, Homo sapiens
  siRNA target sequence for LOC92715 (NM_138778.1,399-417).
ggtcgaggtccaaagaaaa

SEQ ID NO: 408738 - DNA, 19 bp, Homo sapiens
  siRNA target sequence for LOC92715 (NM_138778.1,402-420).
cgaggtccaaagaaaagat

SEQ ID NO: 408739 - DNA, 19 bp, Homo sapiens
  siRNA target sequence for LOC92715 (NM_138778.1,405-423).
ggtccaaagaaaagatact

SEQ ID NO: 408740 - DNA, 19 bp, Homo sapiens
  siRNA target sequence for LOC92715 (NM_138778.1,586-604).
ctggctttgtccctagatt

SEQ ID NO: 408741 - DNA, 19 bp, Homo sapiens
  siRNA target sequence for LOC92715 (NM_138778.1,637-655).
cagcccttgaagatcatca

SEQ ID NO: 408742 - DNA, 19 bp, Homo sapiens
  siRNA target sequence for LOC92715 (NM_138778.1,726-744).
ctcatggcaggcacatcaa

SEQ ID NO: 408743 - DNA, 19 bp, Homo sapiens
  siRNA target sequence for LOC92715 (NM_138778.1,731-749).
ggcaggcacatcaattcga

SEQ ID NO: 408744 - DNA, 19 bp, Homo sapiens
  siRNA target sequence for LOC92715 (NM_138778.1,777-795).
gcatccagaaattgtgtat

SEQ ID NO: 408745 - DNA, 19 bp, Homo sapiens
  siRNA target sequence for LOC92715 (NM_138778.1,778-796).
catccagaaattgtgtatt

SEQ ID NO: 408746 - DNA, 19 bp, Homo sapiens
  siRNA target sequence for LOC92715 (NM_138778.1,834-852).
cagggtacccggcaaattt

SEQ ID NO: 408747 - DNA, 19 bp, Homo sapiens
  siRNA target sequence for LOC92715 (NM_138778.1,836-854).
gggtacccggcaaatttct

SEQ ID NO: 408748 - DNA, 19 bp, Homo sapiens
  siRNA target sequence for LOC92715 (NM_138778.1,838-856).
gtacccggcaaatttctct

SEQ ID NO: 408749 - DNA, 19 bp, Homo sapiens
  siRNA target sequence for LOC92715 (NM_138778.1,927-945).
cacgggaagctatgatgaa

SEQ ID NO: 408750 - DNA, 19 bp, Homo sapiens
  siRNA target sequence for LOC92715 (NM_138778.1,929-947).
cgggaagctatgatgaaca

SEQ ID NO: 408751 - DNA, 19 bp, Homo sapiens
  siRNA target sequence for LOC92715 (NM_138778.1,1009-1027).
ggggtatggagaatcaagt

SEQ ID NO: 408752 - DNA, 19 bp, Homo sapiens
  siRNA target sequence for LOC92715 (NM_138778.1,1213-1231).
ccctcgtggtcctttccta

SEQ ID NO: 408753 - DNA, 19 bp, Homo sapiens
  siRNA target sequence for LOC92715 (NM_138778.1,1278-1296).
gccaacaccctgtcatgaa

SEQ ID NO: 408754 - DNA, 19 bp, Homo sapiens
  siRNA target sequence for LOC119710 (NM_138787.1,154-172).
cgtcttggataaattcctt

SEQ ID NO: 408755 - DNA, 19 bp, Homo sapiens
  siRNA target sequence for LOC119710 (NM_138787.1,177-195).
gtcatgagcaaacatatga

SEQ ID NO: 408756 - DNA, 19 bp, Homo sapiens
  siRNA target sequence for LOC119710 (NM_138787.1,331-349).
gccaaagcccagtgttaaa

SEQ ID NO: 408757 - DNA, 19 bp, Homo sapiens
  siRNA target sequence for LOC119710 (NM_138787.1,358-376).
caaacagacggaagagata

SEQ ID NO: 408758 - DNA, 19 bp, Homo sapiens
  siRNA target sequence for LOC119710 (NM_138787.1,436-454).
gctaacctccaagtttagt

SEQ ID NO: 408759 - DNA, 19 bp, Homo sapiens
  siRNA target sequence for LOC119710 (NM_138787.1,448-466).
gtttagtcctgcagagata

SEQ ID NO: 408760 - DNA, 19 bp, Homo sapiens
  siRNA target sequence for LOC119710 (NM_138787.1,515-533).
ccagacttagagaaatcct

SEQ ID NO: 408761 - DNA, 19 bp, Homo sapiens
  siRNA target sequence for LOC120224 (NM_138788.2,85-103).
cgcttccagggagtttctt

SEQ ID NO: 408762 - DNA, 19 bp, Homo sapiens
  siRNA target sequence for LOC120224 (NM_138788.2,170-188).
cagcccactacattactat

SEQ ID NO: 408763 - DNA, 19 bp, Homo sapiens
  siRNA target sequence for LOC120224 (NM_138788.2,172-190).
gcccactacattactatca

SEQ ID NO: 408764 - DNA, 19 bp, Homo sapiens
  siRNA target sequence for LOC120224 (NM_138788.2,204-222).
gtcgaagccgcaattagga

SEQ ID NO: 408765 - DNA, 19 bp, Homo sapiens
  siRNA target sequence for LOC120224 (NM_138788.2,210-228).
gccgcaattaggactttgt

SEQ ID NO: 408766 - DNA, 19 bp, Homo sapiens
  siRNA target sequence for LOC120224 (NM_138788.2,211-229).
ccgcaattaggactttgtt

SEQ ID NO: 408767 - DNA, 19 bp, Homo sapiens
  siRNA target sequence for LOC120224 (NM_138788.2,212-230).
cgcaattaggactttgttt

SEQ ID NO: 408768 - DNA, 19 bp, Homo sapiens
  siRNA target sequence for LOC120224 (NM_138788.2,327-345).
cacagcaccatgtacctat

SEQ ID NO: 408769 - DNA, 19 bp, Homo sapiens
  siRNA target sequence for LOC120224 (NM_138788.2,332-350).
caccatgtacctattcttt

SEQ ID NO: 408770 - DNA, 19 bp, Homo sapiens
  siRNA target sequence for LOC120224 (NM_138788.2,522-540).
ctgttcggagggtgtgtta

SEQ ID NO: 408771 - DNA, 19 bp, Homo sapiens
  siRNA target sequence for LOC120224 (NM_138788.2,528-546).
ggagggtgtgttagtatct

SEQ ID NO: 408772 - DNA, 19 bp, Homo sapiens
  siRNA target sequence for LOC120224 (NM_138788.2,645-663).
ctgttcccaccttttggaa

SEQ ID NO: 408773 - DNA, 19 bp, Homo sapiens
  siRNA target sequence for LOC120224 (NM_138788.2,687-705).
gatgccaacctcatgttca

SEQ ID NO: 408774 - DNA, 19 bp, Homo sapiens
  siRNA target sequence for LOC120224 (NM_138788.2,745-763).
gcattgtggccgtcaacta

SEQ ID NO: 408775 - DNA, 19 bp, Homo sapiens
  siRNA target sequence for LOC120224 (NM_138788.2,746-764).
cattgtggccgtcaactat

SEQ ID NO: 408776 - DNA, 19 bp, Homo sapiens
  siRNA target sequence for LOC120224 (NM_138788.2,752-770).
ggccgtcaactattctctt

SEQ ID NO: 408777 - DNA, 19 bp, Homo sapiens
  siRNA target sequence for LOC120224 (NM_138788.2,755-773).
cgtcaactattctcttgtt

SEQ ID NO: 408778 - DNA, 19 bp, Homo sapiens
  siRNA target sequence for LOC120224 (NM_138788.2,756-774).
gtcaactattctcttgttt

SEQ ID NO: 408779 - DNA, 19 bp, Homo sapiens
  siRNA target sequence for LOC120379 (NM_138789.2,35-53).
ggagacatcctcaaaaggt

SEQ ID NO: 408780 - DNA, 19 bp, Homo sapiens
  siRNA target sequence for LOC120379 (NM_138789.2,51-69).
ggtctgcttacccaagtta

SEQ ID NO: 408781 - DNA, 19 bp, Homo sapiens
  siRNA target sequence for LOC120379 (NM_138789.2,79-97).
ggaacctcctagatgatct

SEQ ID NO: 408782 - DNA, 19 bp, Homo sapiens
  siRNA target sequence for LOC120379 (NM_138789.2,80-98).
gaacctcctagatgatcta

SEQ ID NO: 408783 - DNA, 19 bp, Homo sapiens
  siRNA target sequence for LOC120379 (NM_138789.2,112-130).
ctgagggctatgagaagtt

SEQ ID NO: 408784 - DNA, 19 bp, Homo sapiens
  siRNA target sequence for LOC120379 (NM_138789.2,114-132).
gagggctatgagaagttta

SEQ ID NO: 408785 - DNA, 19 bp, Homo sapiens
  siRNA target sequence for LOC120379 (NM_138789.2,116-134).
gggctatgagaagtttatt

SEQ ID NO: 408786 - DNA, 19 bp, Homo sapiens
  siRNA target sequence for LOC120379 (NM_138789.2,461-479).
cctctcacactcttaccat

SEQ ID NO: 408787 - DNA, 19 bp, Homo sapiens
  siRNA target sequence for LOC120379 (NM_138789.2,462-480).
ctctcacactcttaccata

SEQ ID NO: 408788 - DNA, 19 bp, Homo sapiens
  siRNA target sequence for LOC120379 (NM_138789.2,464-482).
ctcacactcttaccatatt

SEQ ID NO: 408789 - DNA, 19 bp, Homo sapiens
  siRNA target sequence for LOC120379 (NM_138789.2,472-490).
cttaccatattaccaaatt

SEQ ID NO: 408790 - DNA, 19 bp, Homo sapiens
  siRNA target sequence for LOC120379 (NM_138789.2,505-523).
gcattcaaagaatgaaaca

SEQ ID NO: 408791 - DNA, 19 bp, Homo sapiens
  siRNA target sequence for LOC120379 (NM_138789.2,535-553).
gaatccaaactgattccat

SEQ ID NO: 408792 - DNA, 19 bp, Homo sapiens
  siRNA target sequence for LOC120379 (NM_138789.2,572-590).
gagaagggaactaactctt

SEQ ID NO: 408793 - DNA, 19 bp, Homo sapiens
  siRNA target sequence for LOC120379 (NM_138789.2,594-612).
cagatacgaagcagtacta

SEQ ID NO: 408794 - DNA, 19 bp, Homo sapiens
  siRNA target sequence for LOC120379 (NM_138789.2,614-632).
gagcaatccagatcacttt

SEQ ID NO: 408795 - DNA, 19 bp, Homo sapiens
  siRNA target sequence for LOC120379 (NM_138789.2,673-691).
cagtgtgtctgatagaaga

SEQ ID NO: 408796 - DNA, 19 bp, Homo sapiens
  siRNA target sequence for LOC120379 (NM_138789.2,722-740).
gaagatgccagcctatgaa

SEQ ID NO: 408797 - DNA, 19 bp, Homo sapiens
  siRNA target sequence for LOC120379 (NM_138789.2,725-743).
gatgccagcctatgaacta

SEQ ID NO: 408798 - DNA, 19 bp, Homo sapiens
  siRNA target sequence for LOC120379 (NM_138789.2,728-746).
gccagcctatgaactaaaa

SEQ ID NO: 408799 - DNA, 19 bp, Homo sapiens
  siRNA target sequence for LOC120379 (NM_138789.2,729-747).
ccagcctatgaactaaaaa

SEQ ID NO: 408800 - DNA, 19 bp, Homo sapiens
  siRNA target sequence for LOC120379 (NM_138789.2,730-748).
cagcctatgaactaaaaat

SEQ ID NO: 408801 - DNA, 19 bp, Homo sapiens
  siRNA target sequence for LOC120379 (NM_138789.2,785-803).
gttgaaagttgaattacct

SEQ ID NO: 408802 - DNA, 19 bp, Homo sapiens
  siRNA target sequence for LOC120379 (NM_138789.2,792-810).
gttgaattacctggtatta

SEQ ID NO: 408803 - DNA, 19 bp, Homo sapiens
  siRNA target sequence for LOC120379 (NM_138789.2,795-813).
gaattacctggtattaatt

SEQ ID NO: 408804 - DNA, 19 bp, Homo sapiens
  siRNA target sequence for LOC120379 (NM_138789.2,845-863).
ggatgatttattgattgaa

SEQ ID NO: 408805 - DNA, 19 bp, Homo sapiens
  siRNA target sequence for LOC120379 (NM_138789.2,878-896).
cagattacatctgaatctt

SEQ ID NO: 408806 - DNA, 19 bp, Homo sapiens
  siRNA target sequence for LOC120379 (NM_138789.2,898-916).
caaaacttattgatactga

SEQ ID NO: 408807 - DNA, 19 bp, Homo sapiens
  siRNA target sequence for LOC120379 (NM_138789.2,949-967).
ccacgctaatcatcacaat

SEQ ID NO: 408808 - DNA, 19 bp, Homo sapiens
  siRNA target sequence for LOC123169 (NM_138792.2,57-75).
gcgaagctgagcgtaaaga

SEQ ID NO: 408809 - DNA, 19 bp, Homo sapiens
  siRNA target sequence for LOC123169 (NM_138792.2,58-76).
cgaagctgagcgtaaagat

SEQ ID NO: 408810 - DNA, 19 bp, Homo sapiens
  siRNA target sequence for LOC123169 (NM_138792.2,59-77).
gaagctgagcgtaaagatt

SEQ ID NO: 408811 - DNA, 19 bp, Homo sapiens
  siRNA target sequence for LOC123169 (NM_138792.2,65-83).
gagcgtaaagattctgatt

SEQ ID NO: 408812 - DNA, 19 bp, Homo sapiens
  siRNA target sequence for LOC123169 (NM_138792.2,67-85).
gcgtaaagattctgattct

SEQ ID NO: 408813 - DNA, 19 bp, Homo sapiens
  siRNA target sequence for LOC123169 (NM_138792.2,174-192).
caggacaaccaagtaataa

SEQ ID NO: 408814 - DNA, 19 bp, Homo sapiens
  siRNA target sequence for LOC123169 (NM_138792.2,220-238).
cgagggagcttcacatcat

SEQ ID NO: 408815 - DNA, 19 bp, Homo sapiens
  siRNA target sequence for LOC123169 (NM_138792.2,221-239).
gagggagcttcacatcata

SEQ ID NO: 408816 - DNA, 19 bp, Homo sapiens
  siRNA target sequence for LOC123169 (NM_138792.2,223-241).
gggagcttcacatcatagt

SEQ ID NO: 408817 - DNA, 19 bp, Homo sapiens
  siRNA target sequence for LOC123169 (NM_138792.2,525-543).
gatctgatgaagataagct

SEQ ID NO: 408818 - DNA, 19 bp, Homo sapiens
  siRNA target sequence for LOC123169 (NM_138792.2,643-661).
ggctaattctgatgatgaa

SEQ ID NO: 408819 - DNA, 19 bp, Homo sapiens
  siRNA target sequence for LOC123169 (NM_138792.2,666-684).
cggtagcttctgataatga

SEQ ID NO: 408820 - DNA, 19 bp, Homo sapiens
  siRNA target sequence for LOC123169 (NM_138792.2,667-685).
ggtagcttctgataatgat

SEQ ID NO: 408821 - DNA, 19 bp, Homo sapiens
  siRNA target sequence for LOC123169 (NM_138792.2,790-808).
caggcattcagatgatgaa

SEQ ID NO: 408822 - DNA, 19 bp, Homo sapiens
  siRNA target sequence for LOC123169 (NM_138792.2,811-829).
ggaacaggatcataaatca

SEQ ID NO: 408823 - DNA, 19 bp, Homo sapiens
  siRNA target sequence for LOC123169 (NM_138792.2,837-855).
caagaggcagtgatagtga

SEQ ID NO: 408824 - DNA, 19 bp, Homo sapiens
  siRNA target sequence for LOC123169 (NM_138792.2,878-896).
cgcaagaatgcgattgcat

SEQ ID NO: 408825 - DNA, 19 bp, Homo sapiens
  siRNA target sequence for LOC123169 (NM_138792.2,883-901).
gaatgcgattgcatctgat

SEQ ID NO: 408826 - DNA, 19 bp, Homo sapiens
  siRNA target sequence for LOC123169 (NM_138792.2,888-906).
cgattgcatctgattcaga

SEQ ID NO: 408827 - DNA, 19 bp, Homo sapiens
  siRNA target sequence for LOC123169 (NM_138792.2,889-907).
gattgcatctgattcagaa

SEQ ID NO: 408828 - DNA, 19 bp, Homo sapiens
  siRNA target sequence for LOC123169 (NM_138792.2,923-941).
gaggtgccaaaagataata

SEQ ID NO: 408829 - DNA, 19 bp, Homo sapiens
  siRNA target sequence for LOC123169 (NM_138792.2,942-960).
gtggaaccatggatttatt

SEQ ID NO: 408830 - DNA, 19 bp, Homo sapiens
  siRNA target sequence for LOC123169 (NM_138792.2,1017-1035).
caggacagcctgttgatga

SEQ ID NO: 408831 - DNA, 19 bp, Homo sapiens
  siRNA target sequence for LOC123169 (NM_138792.2,1020-1038).
gacagcctgttgatgaaaa

SEQ ID NO: 408832 - DNA, 19 bp, Homo sapiens
  siRNA target sequence for LOC123169 (NM_138792.2,1041-1059).
gattgcctcaggatcaaca

SEQ ID NO: 408833 - DNA, 19 bp, Homo sapiens
  siRNA target sequence for LOC123169 (NM_138792.2,1118-1136).
gatttaggaaacgacttat

SEQ ID NO: 408834 - DNA, 19 bp, Homo sapiens
  siRNA target sequence for LOC123169 (NM_138792.2,1246-1264).
caggttaaaattaaaggta

SEQ ID NO: 408835 - DNA, 19 bp, Homo sapiens
  siRNA target sequence for LOC123169 (NM_138792.2,1282-1300).
gaggatacgccgagatgaa

SEQ ID NO: 408836 - DNA, 19 bp, Homo sapiens
  siRNA target sequence for LOC123169 (NM_138792.2,1285-1303).
gatacgccgagatgaagaa

SEQ ID NO: 408837 - DNA, 19 bp, Homo sapiens
  siRNA target sequence for LOC123169 (NM_138792.2,1323-1341).
gcaatgctcggatagtcaa

SEQ ID NO: 408838 - DNA, 19 bp, Homo sapiens
  siRNA target sequence for LOC123169 (NM_138792.2,1408-1426).
gcagggcgaccacaatcat

SEQ ID NO: 408839 - DNA, 19 bp, Homo sapiens
  siRNA target sequence for LOC123169 (NM_138792.2,1414-1432).
cgaccacaatcatcttttt

SEQ ID NO: 408840 - DNA, 19 bp, Homo sapiens
  siRNA target sequence for LOC123169 (NM_138792.2,1538-1556).
cttgcagataggtgttcaa

SEQ ID NO: 408841 - DNA, 19 bp, Homo sapiens
  siRNA target sequence for LOC123169 (NM_138792.2,1541-1559).
gcagataggtgttcaaaga

SEQ ID NO: 408842 - DNA, 19 bp, Homo sapiens
  siRNA target sequence for LOC123169 (NM_138792.2,1551-1569).
gttcaaagacacagaagat

SEQ ID NO: 408843 - DNA, 19 bp, Homo sapiens
  siRNA target sequence for LOC123169 (NM_138792.2,1560-1578).
cacagaagattagaatctt

SEQ ID NO: 408844 - DNA, 19 bp, Homo sapiens
  siRNA target sequence for LOC123169 (NM_138792.2,1653-1671).
ccatacgtagggaatctca

SEQ ID NO: 408845 - DNA, 19 bp, Homo sapiens
  siRNA target sequence for LOC123169 (NM_138792.2,1675-1693).
gcgccgaatgagagagaaa

SEQ ID NO: 408846 - DNA, 19 bp, Homo sapiens
  siRNA target sequence for LOC123169 (NM_138792.2,1726-1744).
ggaacctgatcgatacgat

SEQ ID NO: 408847 - DNA, 19 bp, Homo sapiens
  siRNA target sequence for LOC123169 (NM_138792.2,1771-1789).
cagcttggctgccattaaa

SEQ ID NO: 408848 - DNA, 19 bp, Homo sapiens
  siRNA target sequence for LOC123169 (NM_138792.2,1781-1799).
gccattaaaaaccgatata

SEQ ID NO: 408849 - DNA, 19 bp, Homo sapiens
  siRNA target sequence for LOC123169 (NM_138792.2,1782-1800).
ccattaaaaaccgatataa

SEQ ID NO: 408850 - DNA, 19 bp, Homo sapiens
  siRNA target sequence for LOC123169 (NM_138792.2,1814-1832).
gaggaacgagccagaatct

SEQ ID NO: 408851 - DNA, 19 bp, Homo sapiens
  siRNA target sequence for LOC123169 (NM_138792.2,1817-1835).
gaacgagccagaatctatt

SEQ ID NO: 408852 - DNA, 19 bp, Homo sapiens
  siRNA target sequence for LOC128153 (NM_138796.2,55-73).
ggtcgtcgactgtaggaaa

SEQ ID NO: 408853 - DNA, 19 bp, Homo sapiens
  siRNA target sequence for LOC128153 (NM_138796.2,56-74).
gtcgtcgactgtaggaaat

SEQ ID NO: 408854 - DNA, 19 bp, Homo sapiens
  siRNA target sequence for LOC128153 (NM_138796.2,58-76).
cgtcgactgtaggaaatca

SEQ ID NO: 408855 - DNA, 19 bp, Homo sapiens
  siRNA target sequence for LOC128153 (NM_138796.2,64-82).
ctgtaggaaatcagtacta

SEQ ID NO: 408856 - DNA, 19 bp, Homo sapiens
  siRNA target sequence for LOC128153 (NM_138796.2,92-110).
cagtgttgtagatccattt

SEQ ID NO: 408857 - DNA, 19 bp, Homo sapiens
  siRNA target sequence for LOC128153 (NM_138796.2,96-114).
gttgtagatccatttagaa

SEQ ID NO: 408858 - DNA, 19 bp, Homo sapiens
  siRNA target sequence for LOC128153 (NM_138796.2,122-140).
gaatgatgcagcagttaaa

SEQ ID NO: 408859 - DNA, 19 bp, Homo sapiens
  siRNA target sequence for LOC128153 (NM_138796.2,152-170).
gtttcgaggatgtcaagtt

SEQ ID NO: 408860 - DNA, 19 bp, Homo sapiens
  siRNA target sequence for LOC128153 (NM_138796.2,163-181).
gtcaagttcgggcatatat

SEQ ID NO: 408861 - DNA, 19 bp, Homo sapiens
  siRNA target sequence for LOC128153 (NM_138796.2,165-183).
caagttcgggcatatatca

SEQ ID NO: 408862 - DNA, 19 bp, Homo sapiens
  siRNA target sequence for LOC128153 (NM_138796.2,173-191).
ggcatatatcaggcattta

SEQ ID NO: 408863 - DNA, 19 bp, Homo sapiens
  siRNA target sequence for LOC128153 (NM_138796.2,345-363).
gttcggaagtacctcttta

SEQ ID NO: 408864 - DNA, 19 bp, Homo sapiens
  siRNA target sequence for LOC128153 (NM_138796.2,395-413).
cgtttcagagaccaatgat

SEQ ID NO: 408865 - DNA, 19 bp, Homo sapiens
  siRNA target sequence for LOC128153 (NM_138796.2,507-525).
caagcccgaaagatgcatt

SEQ ID NO: 408866 - DNA, 19 bp, Homo sapiens
  siRNA target sequence for LOC128153 (NM_138796.2,625-643).
cacaccgaagacctaaagt

SEQ ID NO: 408867 - DNA, 19 bp, Homo sapiens
  siRNA target sequence for LOC128153 (NM_138796.2,627-645).
caccgaagacctaaagtta

SEQ ID NO: 408868 - DNA, 19 bp, Homo sapiens
  siRNA target sequence for LOC128153 (NM_138796.2,672-690).
gattggctagcttgtacaa

SEQ ID NO: 408869 - DNA, 19 bp, Homo sapiens
  siRNA target sequence for LOC128153 (NM_138796.2,720-738).
ctaccacctattaatagaa

SEQ ID NO: 408870 - DNA, 19 bp, Homo sapiens
  siRNA target sequence for LOC128153 (NM_138796.2,726-744).
cctattaatagaaagcaat

SEQ ID NO: 408871 - DNA, 19 bp, Homo sapiens
  siRNA target sequence for LOC128153 (NM_138796.2,759-777).
cgagatatcaccgaagtat

SEQ ID NO: 408872 - DNA, 19 bp, Homo sapiens
  siRNA target sequence for LOC128153 (NM_138796.2,767-785).
caccgaagtattagaacaa

SEQ ID NO: 408873 - DNA, 19 bp, Homo sapiens
  siRNA target sequence for LOC128153 (NM_138796.2,815-833).
ggtggcagaaccaatcgat

SEQ ID NO: 408874 - DNA, 19 bp, Homo sapiens
  siRNA target sequence for LOC128153 (NM_138796.2,822-840).
gaaccaatcgatgagttaa

SEQ ID NO: 408875 - DNA, 19 bp, Homo sapiens
  siRNA target sequence for LOC128153 (NM_138796.2,825-843).
ccaatcgatgagttaaagt

SEQ ID NO: 408876 - DNA, 19 bp, Homo sapiens
  siRNA target sequence for LOC128153 (NM_138796.2,826-844).
caatcgatgagttaaagtt

SEQ ID NO: 408877 - DNA, 19 bp, Homo sapiens
  siRNA target sequence for LOC128153 (NM_138796.2,905-923).
gccattttcttcataccat

SEQ ID NO: 408878 - DNA, 19 bp, Homo sapiens
  siRNA target sequence for LOC128153 (NM_138796.2,935-953).
gtacatcccatcaatgcat

SEQ ID NO: 408879 - DNA, 19 bp, Homo sapiens
  siRNA target sequence for LOC128153 (NM_138796.2,938-956).
catcccatcaatgcattta

SEQ ID NO: 408880 - DNA, 19 bp, Homo sapiens
  siRNA target sequence for LOC128153 (NM_138796.2,941-959).
cccatcaatgcatttatca

SEQ ID NO: 408881 - DNA, 19 bp, Homo sapiens
  siRNA target sequence for LOC128153 (NM_138796.2,970-988).
gtcctatttcttacaaaga

SEQ ID NO: 408882 - DNA, 19 bp, Homo sapiens
  siRNA target sequence for LOC128153 (NM_138796.2,973-991).
ctatttcttacaaagaaca

SEQ ID NO: 408883 - DNA, 19 bp, Homo sapiens
  siRNA target sequence for LOC128153 (NM_138796.2,1040-1058).
gactgtattaccatcattt

SEQ ID NO: 408884 - DNA, 19 bp, Homo sapiens
  siRNA target sequence for LOC129138 (NM_138797.1,406-424).
ctcggccaatgccaatgat

SEQ ID NO: 408885 - DNA, 19 bp, Homo sapiens
  siRNA target sequence for LOC129138 (NM_138797.1,408-426).
cggccaatgccaatgatgt

SEQ ID NO: 408886 - DNA, 19 bp, Homo sapiens
  siRNA target sequence for LOC129138 (NM_138797.1,705-723).
ccaagtcaaagctgaatat

SEQ ID NO: 408887 - DNA, 19 bp, Homo sapiens
  siRNA target sequence for LOC129531 (NM_138798.1,102-120).
gctaaagcgggcagtagaa

SEQ ID NO: 408888 - DNA, 19 bp, Homo sapiens
  siRNA target sequence for LOC129531 (NM_138798.1,108-126).
gcgggcagtagaactagat

SEQ ID NO: 408889 - DNA, 19 bp, Homo sapiens
  siRNA target sequence for LOC129531 (NM_138798.1,109-127).
cgggcagtagaactagatt

SEQ ID NO: 408890 - DNA, 19 bp, Homo sapiens
  siRNA target sequence for LOC129531 (NM_138798.1,143-161).
cgcaggctctggtgtgtta

SEQ ID NO: 408891 - DNA, 19 bp, Homo sapiens
  siRNA target sequence for LOC129531 (NM_138798.1,180-198).
gctcctgcaggttctgaaa

SEQ ID NO: 408892 - DNA, 19 bp, Homo sapiens
  siRNA target sequence for LOC129531 (NM_138798.1,362-380).
cactttttcgcgaatacct

SEQ ID NO: 408893 - DNA, 19 bp, Homo sapiens
  siRNA target sequence for LOC129531 (NM_138798.1,364-382).
ctttttcgcgaatacctta

SEQ ID NO: 408894 - DNA, 19 bp, Homo sapiens
  siRNA target sequence for LOC129531 (NM_138798.1,370-388).
cgcgaataccttaatgaga

SEQ ID NO: 408895 - DNA, 19 bp, Homo sapiens
  siRNA target sequence for LOC129531 (NM_138798.1,389-407).
cagttacagaagtttggat

SEQ ID NO: 408896 - DNA, 19 bp, Homo sapiens
  siRNA target sequence for LOC129531 (NM_138798.1,404-422).
ggatagaagatccttatat

SEQ ID NO: 408897 - DNA, 19 bp, Homo sapiens
  siRNA target sequence for LOC129531 (NM_138798.1,482-500).
catgtaaagtaaaaactat

SEQ ID NO: 408898 - DNA, 19 bp, Homo sapiens
  siRNA target sequence for LOC129531 (NM_138798.1,532-550).
gagcaagtgcagcaaagta

SEQ ID NO: 408899 - DNA, 19 bp, Homo sapiens
  siRNA target sequence for LOC129531 (NM_138798.1,534-552).
gcaagtgcagcaaagtaga

SEQ ID NO: 408900 - DNA, 19 bp, Homo sapiens
  siRNA target sequence for LOC129531 (NM_138798.1,548-566).
gtagaggcctgcaagaaat

SEQ ID NO: 408901 - DNA, 19 bp, Homo sapiens
  siRNA target sequence for LOC129531 (NM_138798.1,597-615).
gttggaagttcaatactct

SEQ ID NO: 408902 - DNA, 19 bp, Homo sapiens
  siRNA target sequence for LOC129531 (NM_138798.1,601-619).
gaagttcaatactcttctt

SEQ ID NO: 408903 - DNA, 19 bp, Homo sapiens
  siRNA target sequence for LOC129531 (NM_138798.1,666-684).
gattggaaggggacttgat

SEQ ID NO: 408904 - DNA, 19 bp, Homo sapiens
  siRNA target sequence for LOC129531 (NM_138798.1,670-688).
ggaaggggacttgattatt

SEQ ID NO: 408905 - DNA, 19 bp, Homo sapiens
  siRNA target sequence for LOC129531 (NM_138798.1,671-689).
gaaggggacttgattattt

SEQ ID NO: 408906 - DNA, 19 bp, Homo sapiens
  siRNA target sequence for LOC129531 (NM_138798.1,704-722).
gtcgtttttcccttggata

SEQ ID NO: 408907 - DNA, 19 bp, Homo sapiens
  siRNA target sequence for LOC129531 (NM_138798.1,758-776).
cagtagacatttttcataa

SEQ ID NO: 408908 - DNA, 19 bp, Homo sapiens
  siRNA target sequence for LOC129642 (NM_138799.2,198-216).
ccatcgaccaggtcaactt

SEQ ID NO: 408909 - DNA, 19 bp, Homo sapiens
  siRNA target sequence for LOC129642 (NM_138799.2,199-217).
catcgaccaggtcaacttt

SEQ ID NO: 408910 - DNA, 19 bp, Homo sapiens
  siRNA target sequence for LOC129642 (NM_138799.2,202-220).
cgaccaggtcaactttgta

SEQ ID NO: 408911 - DNA, 19 bp, Homo sapiens
  siRNA target sequence for LOC129642 (NM_138799.2,245-263).
gcagccatttggtttcgaa

SEQ ID NO: 408912 - DNA, 19 bp, Homo sapiens
  siRNA target sequence for LOC129642 (NM_138799.2,255-273).
ggtttcgaacttatctaca

SEQ ID NO: 408913 - DNA, 19 bp, Homo sapiens
  siRNA target sequence for LOC129642 (NM_138799.2,256-274).
gtttcgaacttatctacat

SEQ ID NO: 408914 - DNA, 19 bp, Homo sapiens
  siRNA target sequence for LOC129642 (NM_138799.2,260-278).
cgaacttatctacattcaa

SEQ ID NO: 408915 - DNA, 19 bp, Homo sapiens
  siRNA target sequence for LOC129642 (NM_138799.2,280-298).
caaaactagctcttttata

SEQ ID NO: 408916 - DNA, 19 bp, Homo sapiens
  siRNA target sequence for LOC129642 (NM_138799.2,285-303).
ctagctcttttataagaca

SEQ ID NO: 408917 - DNA, 19 bp, Homo sapiens
  siRNA target sequence for LOC129642 (NM_138799.2,350-368).
ggatggtatgccttacact

SEQ ID NO: 408918 - DNA, 19 bp, Homo sapiens
  siRNA target sequence for LOC129642 (NM_138799.2,360-378).
ccttacactttcttgtaca

SEQ ID NO: 408919 - DNA, 19 bp, Homo sapiens
  siRNA target sequence for LOC129642 (NM_138799.2,390-408).
cctactgtatcatgatcat

SEQ ID NO: 408920 - DNA, 19 bp, Homo sapiens
  siRNA target sequence for LOC129642 (NM_138799.2,416-434).
gtggagaacatgcacaatt

SEQ ID NO: 408921 - DNA, 19 bp, Homo sapiens
  siRNA target sequence for LOC129642 (NM_138799.2,461-479).
ctcacagtgtgccaagtta

SEQ ID NO: 408922 - DNA, 19 bp, Homo sapiens
  siRNA target sequence for LOC129642 (NM_138799.2,463-481).
cacagtgtgccaagttact

SEQ ID NO: 408923 - DNA, 19 bp, Homo sapiens
  siRNA target sequence for LOC129642 (NM_138799.2,472-490).
ccaagttactcgagtctat

SEQ ID NO: 408924 - DNA, 19 bp, Homo sapiens
  siRNA target sequence for LOC129642 (NM_138799.2,473-491).
caagttactcgagtctata

SEQ ID NO: 408925 - DNA, 19 bp, Homo sapiens
  siRNA target sequence for LOC129642 (NM_138799.2,480-498).
ctcgagtctatatctttga

SEQ ID NO: 408926 - DNA, 19 bp, Homo sapiens
  siRNA target sequence for LOC129642 (NM_138799.2,482-500).
cgagtctatatctttgact

SEQ ID NO: 408927 - DNA, 19 bp, Homo sapiens
  siRNA target sequence for LOC129642 (NM_138799.2,483-501).
gagtctatatctttgacta

SEQ ID NO: 408928 - DNA, 19 bp, Homo sapiens
  siRNA target sequence for LOC129642 (NM_138799.2,493-511).
ctttgactatggacaatat

SEQ ID NO: 408929 - DNA, 19 bp, Homo sapiens
  siRNA target sequence for LOC129642 (NM_138799.2,525-543).
caggcccaatgatgatcat

SEQ ID NO: 408930 - DNA, 19 bp, Homo sapiens
  siRNA target sequence for LOC129642 (NM_138799.2,546-564).
ctcagaagatcactagttt

SEQ ID NO: 408931 - DNA, 19 bp, Homo sapiens
  siRNA target sequence for LOC129642 (NM_138799.2,589-607).
gtttcggaaggatgaagaa

SEQ ID NO: 408932 - DNA, 19 bp, Homo sapiens
  siRNA target sequence for LOC129642 (NM_138799.2,616-634).
ctcacagagggatttagct

SEQ ID NO: 408933 - DNA, 19 bp, Homo sapiens
  siRNA target sequence for LOC129642 (NM_138799.2,707-725).
ctttgctcttacaaagact

SEQ ID NO: 408934 - DNA, 19 bp, Homo sapiens
  siRNA target sequence for LOC129642 (NM_138799.2,724-742).
ctacattactttcattgaa

SEQ ID NO: 408935 - DNA, 19 bp, Homo sapiens
  siRNA target sequence for LOC129642 (NM_138799.2,740-758).
gaaggcagatcataccata

SEQ ID NO: 408936 - DNA, 19 bp, Homo sapiens
  siRNA target sequence for LOC129642 (NM_138799.2,745-763).
cagatcataccatatcaca

SEQ ID NO: 408937 - DNA, 19 bp, Homo sapiens
  siRNA target sequence for LOC129642 (NM_138799.2,819-837).
caaatactgcggttgttca

SEQ ID NO: 408938 - DNA, 19 bp, Homo sapiens
  siRNA target sequence for LOC129642 (NM_138799.2,852-870).
gtgggctgtccttgttatt

SEQ ID NO: 408939 - DNA, 19 bp, Homo sapiens
  siRNA target sequence for LOC129642 (NM_138799.2,872-890).
cacttgaccatctgtacaa

SEQ ID NO: 408940 - DNA, 19 bp, Homo sapiens
  siRNA target sequence for LOC129642 (NM_138799.2,874-892).
cttgaccatctgtacaaca

SEQ ID NO: 408941 - DNA, 19 bp, Homo sapiens
  siRNA target sequence for LOC129642 (NM_138799.2,877-895).
gaccatctgtacaacatta

SEQ ID NO: 408942 - DNA, 19 bp, Homo sapiens
  siRNA target sequence for LOC129642 (NM_138799.2,891-909).
cattacctgtggagtacaa

SEQ ID NO: 408943 - DNA, 19 bp, Homo sapiens
  siRNA target sequence for LOC129642 (NM_138799.2,933-951).
cagcttcgtggccaacaaa

SEQ ID NO: 408944 - DNA, 19 bp, Homo sapiens
  siRNA target sequence for LOC129642 (NM_138799.2,943-961).
gccaacaaagattatctat

SEQ ID NO: 408945 - DNA, 19 bp, Homo sapiens
  siRNA target sequence for LOC129642 (NM_138799.2,945-963).
caacaaagattatctatct

SEQ ID NO: 408946 - DNA, 19 bp, Homo sapiens
  siRNA target sequence for LOC129642 (NM_138799.2,981-999).
ctgccagacccaaatacta

SEQ ID NO: 408947 - DNA, 19 bp, Homo sapiens
  siRNA target sequence for LOC129642 (NM_138799.2,989-1007).
cccaaatactattttgcat

SEQ ID NO: 408948 - DNA, 19 bp, Homo sapiens
  siRNA target sequence for LOC129642 (NM_138799.2,1074-1092).
cagctcgctgggacttaat

SEQ ID NO: 408949 - DNA, 19 bp, Homo sapiens
  siRNA target sequence for LOC129642 (NM_138799.2,1076-1094).
gctcgctgggacttaattt

SEQ ID NO: 408950 - DNA, 19 bp, Homo sapiens
  siRNA target sequence for LOC129642 (NM_138799.2,1079-1097).
cgctgggacttaatttcca

SEQ ID NO: 408951 - DNA, 19 bp, Homo sapiens
  siRNA target sequence for LOC129642 (NM_138799.2,1083-1101).
gggacttaatttccaattt

SEQ ID NO: 408952 - DNA, 19 bp, Homo sapiens
  siRNA target sequence for LOC129642 (NM_138799.2,1095-1113).
ccaatttgagaattcaaca

SEQ ID NO: 408953 - DNA, 19 bp, Homo sapiens
  siRNA target sequence for LOC129642 (NM_138799.2,1096-1114).
caatttgagaattcaacaa

SEQ ID NO: 408954 - DNA, 19 bp, Homo sapiens
  siRNA target sequence for LOC129642 (NM_138799.2,1109-1127).
caacaaatagagatgtcaa

SEQ ID NO: 408955 - DNA, 19 bp, Homo sapiens
  siRNA target sequence for LOC129642 (NM_138799.2,1135-1153).
caagatgtttcttgataat

SEQ ID NO: 408956 - DNA, 19 bp, Homo sapiens
  siRNA target sequence for LOC129642 (NM_138799.2,1176-1194).
ggctcaaaagggtgtgtta

SEQ ID NO: 408957 - DNA, 19 bp, Homo sapiens
  siRNA target sequence for LOC129642 (NM_138799.2,1180-1198).
caaaagggtgtgttatgaa

SEQ ID NO: 408958 - DNA, 19 bp, Homo sapiens
  siRNA target sequence for LOC129642 (NM_138799.2,1253-1271).
ggggtatacccaggatatt

SEQ ID NO: 408959 - DNA, 19 bp, Homo sapiens
  siRNA target sequence for LOC129642 (NM_138799.2,1254-1272).
gggtatacccaggatatta

SEQ ID NO: 408960 - DNA, 19 bp, Homo sapiens
  siRNA target sequence for LOC129642 (NM_138799.2,1255-1273).
ggtatacccaggatattat

SEQ ID NO: 408961 - DNA, 19 bp, Homo sapiens
  siRNA target sequence for LOC129642 (NM_138799.2,1287-1305).
caggggtgttaatgacatt

SEQ ID NO: 408962 - DNA, 19 bp, Homo sapiens
  siRNA target sequence for LOC129642 (NM_138799.2,1291-1309).
ggtgttaatgacattagca

SEQ ID NO: 408963 - DNA, 19 bp, Homo sapiens
  siRNA target sequence for LOC129642 (NM_138799.2,1349-1367).
gaaccttcccaactgaaat

SEQ ID NO: 408964 - DNA, 19 bp, Homo sapiens
  siRNA target sequence for LOC129642 (NM_138799.2,1353-1371).
cttcccaactgaaattatt

SEQ ID NO: 408965 - DNA, 19 bp, Homo sapiens
  siRNA target sequence for LOC129642 (NM_138799.2,1379-1397).
gttataacatggatagtaa

SEQ ID NO: 408966 - DNA, 19 bp, Homo sapiens
  siRNA target sequence for LOC129642 (NM_138799.2,1398-1416).
ctcaagtagcaataagtta

SEQ ID NO: 408967 - DNA, 19 bp, Homo sapiens
  siRNA target sequence for LOC129642 (NM_138799.2,1451-1469).
ccatcactcacgttttaca

SEQ ID NO: 408968 - DNA, 19 bp, Homo sapiens
  siRNA target sequence for LOC129642 (NM_138799.2,1485-1503).
gcctgcacattcttggtat

SEQ ID NO: 408969 - DNA, 19 bp, Homo sapiens
  siRNA target sequence for LOC129642 (NM_138799.2,1489-1507).
gcacattcttggtatctta

SEQ ID NO: 408970 - DNA, 19 bp, Homo sapiens
  siRNA target sequence for LOC129642 (NM_138799.2,1492-1510).
cattcttggtatcttagta

SEQ ID NO: 408971 - DNA, 19 bp, Homo sapiens
  siRNA target sequence for LOC129642 (NM_138799.2,1496-1514).
cttggtatcttagtattat

SEQ ID NO: 408972 - DNA, 19 bp, Homo sapiens
  siRNA target sequence for LOC129642 (NM_138799.2,1499-1517).
ggtatcttagtattattgt

SEQ ID NO: 408973 - DNA, 19 bp, Homo sapiens
  siRNA target sequence for LOC129642 (NM_138799.2,1500-1518).
gtatcttagtattattgtt

SEQ ID NO: 408974 - DNA, 19 bp, Homo sapiens
  siRNA target sequence for LOC129642 (NM_138799.2,1568-1586).
cagctctcacaatccaaaa

SEQ ID NO: 408975 - DNA, 19 bp, Homo sapiens
  siRNA target sequence for LOC129642 (NM_138799.2,1571-1589).
ctctcacaatccaaaaagt

SEQ ID NO: 408976 - DNA, 19 bp, Homo sapiens
  siRNA target sequence for LOC129642 (NM_138799.2,1573-1591).
ctcacaatccaaaaagttt

SEQ ID NO: 408977 - DNA, 19 bp, Homo sapiens
  siRNA target sequence for LOC129642 (NM_138799.2,1632-1650).
caacaaacaatgtttgcaa

SEQ ID NO: 408978 - DNA, 19 bp, Homo sapiens
  siRNA target sequence for LOC129642 (NM_138799.2,1661-1679).
gaaatagcctcgagacatt

SEQ ID NO: 408979 - DNA, 19 bp, Homo sapiens
  siRNA target sequence for LOC129642 (NM_138799.2,1669-1687).
ctcgagacattcatcacta

SEQ ID NO: 408980 - DNA, 19 bp, Homo sapiens
  siRNA target sequence for LOC129642 (NM_138799.2,1671-1689).
cgagacattcatcactaaa

SEQ ID NO: 408981 - DNA, 19 bp, Homo sapiens
  siRNA target sequence for LOC129642 (NM_138799.2,1674-1692).
gacattcatcactaaagca

SEQ ID NO: 408982 - DNA, 19 bp, Homo sapiens
  siRNA target sequence for LOC130589 (NM_138801.1,391-409).
gagtcagagggtttgataa

SEQ ID NO: 408983 - DNA, 19 bp, Homo sapiens
  siRNA target sequence for LOC130589 (NM_138801.1,421-439).
cccctcgggtgctgtcaaa

SEQ ID NO: 408984 - DNA, 19 bp, Homo sapiens
  siRNA target sequence for LOC130589 (NM_138801.1,480-498).
ggctaccccggagagttaa

SEQ ID NO: 408985 - DNA, 19 bp, Homo sapiens
  siRNA target sequence for LOC130589 (NM_138801.1,481-499).
gctaccccggagagttaaa

SEQ ID NO: 408986 - DNA, 19 bp, Homo sapiens
  siRNA target sequence for LOC130589 (NM_138801.1,525-543).
ggcggagagctcatagtca

SEQ ID NO: 408987 - DNA, 19 bp, Homo sapiens
  siRNA target sequence for LOC130589 (NM_138801.1,531-549).
gagctcatagtcaactaca

SEQ ID NO: 408988 - DNA, 19 bp, Homo sapiens
  siRNA target sequence for LOC130589 (NM_138801.1,576-594).
gtcaacctgaccaaccatt

SEQ ID NO: 408989 - DNA, 19 bp, Homo sapiens
  siRNA target sequence for LOC130589 (NM_138801.1,614-632).
ccaggcttccccaaatata

SEQ ID NO: 408990 - DNA, 19 bp, Homo sapiens
  siRNA target sequence for LOC130589 (NM_138801.1,649-667).
ccatagaagcggatactta

SEQ ID NO: 408991 - DNA, 19 bp, Homo sapiens
  siRNA target sequence for LOC130589 (NM_138801.1,771-789).
gacttccatctcaatggtt

SEQ ID NO: 408992 - DNA, 19 bp, Homo sapiens
  siRNA target sequence for LOC130589 (NM_138801.1,786-804).
ggttttgaccacaatttct

SEQ ID NO: 408993 - DNA, 19 bp, Homo sapiens
  siRNA target sequence for LOC130589 (NM_138801.1,807-825).
ctgaagggatctaaagaaa

SEQ ID NO: 408994 - DNA, 19 bp, Homo sapiens
  siRNA target sequence for LOC130589 (NM_138801.1,812-830).
gggatctaaagaaaagcat

SEQ ID NO: 408995 - DNA, 19 bp, Homo sapiens
  siRNA target sequence for LOC130589 (NM_138801.1,813-831).
ggatctaaagaaaagcatt

SEQ ID NO: 408996 - DNA, 19 bp, Homo sapiens
  siRNA target sequence for LOC130589 (NM_138801.1,917-935).
cttcctggatggcacatta

SEQ ID NO: 408997 - DNA, 19 bp, Homo sapiens
  siRNA target sequence for LOC130589 (NM_138801.1,929-947).
cacattaaagggcaagaat

SEQ ID NO: 408998 - DNA, 19 bp, Homo sapiens
  siRNA target sequence for LOC130589 (NM_138801.1,941-959).
caagaatggagctgtctat

SEQ ID NO: 408999 - DNA, 19 bp, Homo sapiens
  siRNA target sequence for LOC130589 (NM_138801.1,995-1013).
ctggcctgatgcagtcaat

SEQ ID NO: 409000 - DNA, 19 bp, Homo sapiens
  siRNA target sequence for LOC130589 (NM_138801.1,997-1015).
ggcctgatgcagtcaatca

SEQ ID NO: 409001 - DNA, 19 bp, Homo sapiens
  siRNA target sequence for LOC130589 (NM_138801.1,1064-1082).
caccacctggttcaagttt

SEQ ID NO: 409002 - DNA, 19 bp, Homo sapiens
  siRNA target sequence for LOC130940 (NM_138803.2,283-301).
ctccagataatctggtatt

SEQ ID NO: 409003 - DNA, 19 bp, Homo sapiens
  siRNA target sequence for LOC130940 (NM_138803.2,288-306).
gataatctggtattccata

SEQ ID NO: 409004 - DNA, 19 bp, Homo sapiens
  siRNA target sequence for LOC130940 (NM_138803.2,332-350).
gtacaaaccagtagactat

SEQ ID NO: 409005 - DNA, 19 bp, Homo sapiens
  siRNA target sequence for LOC130940 (NM_138803.2,335-353).
caaaccagtagactatcaa

SEQ ID NO: 409006 - DNA, 19 bp, Homo sapiens
  siRNA target sequence for LOC130940 (NM_138803.2,339-357).
ccagtagactatcaacaat

SEQ ID NO: 409007 - DNA, 19 bp, Homo sapiens
  siRNA target sequence for LOC130940 (NM_138803.2,340-358).
cagtagactatcaacaatt

SEQ ID NO: 409008 - DNA, 19 bp, Homo sapiens
  siRNA target sequence for LOC130940 (NM_138803.2,501-519).
ctgaatgaagtcagatgta

SEQ ID NO: 409009 - DNA, 19 bp, Homo sapiens
  siRNA target sequence for LOC130940 (NM_138803.2,576-594).
ctttgtgaccttacaaatt

SEQ ID NO: 409010 - DNA, 19 bp, Homo sapiens
  siRNA target sequence for LOC130940 (NM_138803.2,659-677).
gctgagagcagatctaaaa

SEQ ID NO: 409011 - DNA, 19 bp, Homo sapiens
  siRNA target sequence for LOC130940 (NM_138803.2,706-724).
cacacccacatattgagtt

SEQ ID NO: 409012 - DNA, 19 bp, Homo sapiens
  siRNA target sequence for LOC130940 (NM_138803.2,708-726).
cacccacatattgagttta

SEQ ID NO: 409013 - DNA, 19 bp, Homo sapiens
  siRNA target sequence for LOC130940 (NM_138803.2,711-729).
ccacatattgagtttaact

SEQ ID NO: 409014 - DNA, 19 bp, Homo sapiens
  siRNA target sequence for LOC130940 (NM_138803.2,722-740).
gtttaactccatgaaagta

SEQ ID NO: 409015 - DNA, 19 bp, Homo sapiens
  siRNA target sequence for LOC130940 (NM_138803.2,728-746).
ctccatgaaagtattggaa

SEQ ID NO: 409016 - DNA, 19 bp, Homo sapiens
  siRNA target sequence for LOC130940 (NM_138803.2,835-853).
ggagtataaagattctaga

SEQ ID NO: 409017 - DNA, 19 bp, Homo sapiens
  siRNA target sequence for LOC130940 (NM_138803.2,838-856).
gtataaagattctagatca

SEQ ID NO: 409018 - DNA, 19 bp, Homo sapiens
  siRNA target sequence for LOC130940 (NM_138803.2,872-890).
gactaacccgcttagtgaa

SEQ ID NO: 409019 - DNA, 19 bp, Homo sapiens
  siRNA target sequence for LOC130940 (NM_138803.2,886-904).
gtgaactgcccattgaatt

SEQ ID NO: 409020 - DNA, 19 bp, Homo sapiens
  siRNA target sequence for LOC130940 (NM_138803.2,919-937).
gcccataccctgatttgaa

SEQ ID NO: 409021 - DNA, 19 bp, Homo sapiens
  siRNA target sequence for LOC130940 (NM_138803.2,926-944).
ccctgatttgaaatcttca

SEQ ID NO: 409022 - DNA, 19 bp, Homo sapiens
  siRNA target sequence for LOC130940 (NM_138803.2,943-961).
caattctcagtgagttcta

SEQ ID NO: 409023 - DNA, 19 bp, Homo sapiens
  siRNA target sequence for LOC130940 (NM_138803.2,959-977).
ctataagtttacacagaaa

SEQ ID NO: 409024 - DNA, 19 bp, Homo sapiens
  siRNA target sequence for LOC130940 (NM_138803.2,1031-1049).
ctgtcaactaagtgaagaa

SEQ ID NO: 409025 - DNA, 19 bp, Homo sapiens
  siRNA target sequence for LOC130940 (NM_138803.2,1121-1139).
ggacatgttacaaagatat

SEQ ID NO: 409026 - DNA, 19 bp, Homo sapiens
  siRNA target sequence for LOC130940 (NM_138803.2,1146-1164).
cacaaatctaggcatgatt

SEQ ID NO: 409027 - DNA, 19 bp, Homo sapiens
  siRNA target sequence for LOC130940 (NM_138803.2,1166-1184).
ggttgaacacgagaaatat

SEQ ID NO: 409028 - DNA, 19 bp, Homo sapiens
  siRNA target sequence for LOC130940 (NM_138803.2,1167-1185).
gttgaacacgagaaatatt

SEQ ID NO: 409029 - DNA, 19 bp, Homo sapiens
  siRNA target sequence for LOC130940 (NM_138803.2,1188-1206).
gaccaatatcgctttgcta

SEQ ID NO: 409030 - DNA, 19 bp, Homo sapiens
  siRNA target sequence for LOC130940 (NM_138803.2,1190-1208).
ccaatatcgctttgctata

SEQ ID NO: 409031 - DNA, 19 bp, Homo sapiens
  siRNA target sequence for LOC130940 (NM_138803.2,1203-1221).
gctatagagcagcaaaata

SEQ ID NO: 409032 - DNA, 19 bp, Homo sapiens
  siRNA target sequence for LOC130940 (NM_138803.2,1204-1222).
ctatagagcagcaaaatat

SEQ ID NO: 409033 - DNA, 19 bp, Homo sapiens
  siRNA target sequence for LOC130940 (NM_138803.2,1290-1308).
gcttgtgcaacacatgaaa

SEQ ID NO: 409034 - DNA, 19 bp, Homo sapiens
  siRNA target sequence for LOC130940 (NM_138803.2,1319-1337).
gttggctaaggacaagaaa

SEQ ID NO: 409035 - DNA, 19 bp, Homo sapiens
  siRNA target sequence for LOC130940 (NM_138803.2,1635-1653).
gttaaatatagacaagaat

SEQ ID NO: 409036 - DNA, 19 bp, Homo sapiens
  siRNA target sequence for LOC130940 (NM_138803.2,1682-1700).
ggaagtggcccttcaagaa

SEQ ID NO: 409037 - DNA, 19 bp, Homo sapiens
  siRNA target sequence for LOC130940 (NM_138803.2,1729-1747).
ggctagaagcccttaggaa

SEQ ID NO: 409038 - DNA, 19 bp, Homo sapiens
  siRNA target sequence for LOC130940 (NM_138803.2,1730-1748).
gctagaagcccttaggaaa

SEQ ID NO: 409039 - DNA, 19 bp, Homo sapiens
  siRNA target sequence for LOC130940 (NM_138803.2,1767-1785).
caatttgatcctgttagaa

SEQ ID NO: 409040 - DNA, 19 bp, Homo sapiens
  siRNA target sequence for LOC130940 (NM_138803.2,1856-1874).
gccactcttcacattgaat

SEQ ID NO: 409041 - DNA, 19 bp, Homo sapiens
  siRNA target sequence for LOC130940 (NM_138803.2,1941-1959).
ggacttcatagaacacttt

SEQ ID NO: 409042 - DNA, 19 bp, Homo sapiens
  siRNA target sequence for LOC130940 (NM_138803.2,1942-1960).
gacttcatagaacacttta

SEQ ID NO: 409043 - DNA, 19 bp, Homo sapiens
  siRNA target sequence for LOC130940 (NM_138803.2,1947-1965).
catagaacactttatgcta

SEQ ID NO: 409044 - DNA, 19 bp, Homo sapiens
  siRNA target sequence for LOC130940 (NM_138803.2,1951-1969).
gaacactttatgctaaaga

SEQ ID NO: 409045 - DNA, 19 bp, Homo sapiens
  siRNA target sequence for LOC130940 (NM_138803.2,1963-1981).
ctaaagagatattaccaaa

SEQ ID NO: 409046 - DNA, 19 bp, Homo sapiens
  siRNA target sequence for LOC130940 (NM_138803.2,1970-1988).
gatattaccaaaaattagt

SEQ ID NO: 409047 - DNA, 19 bp, Homo sapiens
  siRNA target sequence for LOC130940 (NM_138803.2,2009-2027).
ggacatggagtctactgta

SEQ ID NO: 409048 - DNA, 19 bp, Homo sapiens
  siRNA target sequence for LOC130940 (NM_138803.2,2010-2028).
gacatggagtctactgtat

SEQ ID NO: 409049 - DNA, 19 bp, Homo sapiens
  siRNA target sequence for LOC130951 (NM_138804.2,123-141).
gcatcctgggcgaactact

SEQ ID NO: 409050 - DNA, 19 bp, Homo sapiens
  siRNA target sequence for LOC130951 (NM_138804.2,153-171).
ctctactcacactcagatt

SEQ ID NO: 409051 - DNA, 19 bp, Homo sapiens
  siRNA target sequence for LOC130951 (NM_138804.2,155-173).
ctactcacactcagattga

SEQ ID NO: 409052 - DNA, 19 bp, Homo sapiens
  siRNA target sequence for LOC130951 (NM_138804.2,182-200).
ctccacggcttctcattgt

SEQ ID NO: 409053 - DNA, 19 bp, Homo sapiens
  siRNA target sequence for LOC130951 (NM_138804.2,314-332).
gtttatacatggtacaaga

SEQ ID NO: 409054 - DNA, 19 bp, Homo sapiens
  siRNA target sequence for LOC130951 (NM_138804.2,364-382).
gtgaaagggaactttgcta

SEQ ID NO: 409055 - DNA, 19 bp, Homo sapiens
  siRNA target sequence for LOC130951 (NM_138804.2,401-419).
cagaactccgcatgttaca

SEQ ID NO: 409056 - DNA, 19 bp, Homo sapiens
  siRNA target sequence for LOC130951 (NM_138804.2,476-494).
ggctccagcaattcaaaca

SEQ ID NO: 409057 - DNA, 19 bp, Homo sapiens
  siRNA target sequence for LOC130951 (NM_138804.2,478-496).
ctccagcaattcaaacaat

SEQ ID NO: 409058 - DNA, 19 bp, Homo sapiens
  siRNA target sequence for LOC130951 (NM_138804.2,520-538).
gcagctctgacctatacct

SEQ ID NO: 409059 - DNA, 19 bp, Homo sapiens
  siRNA target sequence for LOC130951 (NM_138804.2,539-557).
ccctggagattactattct

SEQ ID NO: 409060 - DNA, 19 bp, Homo sapiens
  siRNA target sequence for LOC130951 (NM_138804.2,541-559).
ctggagattactattctga

SEQ ID NO: 409061 - DNA, 19 bp, Homo sapiens
  siRNA target sequence for LOC130951 (NM_138804.2,707-725).
gcaatgatgagagttctat

SEQ ID NO: 409062 - DNA, 19 bp, Homo sapiens
  siRNA target sequence for LOC130951 (NM_138804.2,708-726).
caatgatgagagttctatt

SEQ ID NO: 409063 - DNA, 19 bp, Homo sapiens
  siRNA target sequence for LOC130951 (NM_138804.2,742-760).
gaccttcagactatagaca

SEQ ID NO: 409064 - DNA, 19 bp, Homo sapiens
  siRNA target sequence for LOC130951 (NM_138804.2,744-762).
ccttcagactatagacaat

SEQ ID NO: 409065 - DNA, 19 bp, Homo sapiens
  siRNA target sequence for LOC130951 (NM_138804.2,949-967).
gctgacggctccttgagaa

SEQ ID NO: 409066 - DNA, 19 bp, Homo sapiens
  siRNA target sequence for LOC130951 (NM_138804.2,954-972).
cggctccttgagaatggat

SEQ ID NO: 409067 - DNA, 19 bp, Homo sapiens
  siRNA target sequence for LOC130951 (NM_138804.2,1015-1033).
cagtcatcggcctctcatt

SEQ ID NO: 409068 - DNA, 19 bp, Homo sapiens
  siRNA target sequence for LOC130951 (NM_138804.2,1019-1037).
catcggcctctcattacaa

SEQ ID NO: 409069 - DNA, 19 bp, Homo sapiens
  siRNA target sequence for LOC130951 (NM_138804.2,1047-1065).
gatcaaggctttaaaatct

SEQ ID NO: 409070 - DNA, 19 bp, Homo sapiens
  siRNA target sequence for LOC130951 (NM_138804.2,1067-1085).
gcgggctctgcgagtcatt

SEQ ID NO: 409071 - DNA, 19 bp, Homo sapiens
  siRNA target sequence for LOC130951 (NM_138804.2,1069-1087).
gggctctgcgagtcattga

SEQ ID NO: 409072 - DNA, 19 bp, Homo sapiens
  siRNA target sequence for LOC130951 (NM_138804.2,1071-1089).
gctctgcgagtcattgaca

SEQ ID NO: 409073 - DNA, 19 bp, Homo sapiens
  siRNA target sequence for LOC130951 (NM_138804.2,1072-1090).
ctctgcgagtcattgacat

SEQ ID NO: 409074 - DNA, 19 bp, Homo sapiens
  siRNA target sequence for LOC130951 (NM_138804.2,1074-1092).
ctgcgagtcattgacatat

SEQ ID NO: 409075 - DNA, 19 bp, Homo sapiens
  siRNA target sequence for LOC130951 (NM_138804.2,1139-1157).
gggatgagctggagacaaa

SEQ ID NO: 409076 - DNA, 19 bp, Homo sapiens
  siRNA target sequence for LOC130951 (NM_138804.2,1261-1279).
gccagcaccttctatgtga

SEQ ID NO: 409077 - DNA, 19 bp, Homo sapiens
  siRNA target sequence for LOC130951 (NM_138804.2,1375-1393).
catgatgatagccttaaga

SEQ ID NO: 409078 - DNA, 19 bp, Homo sapiens
  siRNA target sequence for LOC130951 (NM_138804.2,1437-1455).
caaccccttgcatgttcaa

SEQ ID NO: 409079 - DNA, 19 bp, Homo sapiens
  siRNA target sequence for LOC132001 (NM_138807.2,414-432).
cctgtcgcatggcattcaa

SEQ ID NO: 409080 - DNA, 19 bp, Homo sapiens
  siRNA target sequence for LOC132001 (NM_138807.2,415-433).
ctgtcgcatggcattcaaa

SEQ ID NO: 409081 - DNA, 19 bp, Homo sapiens
  siRNA target sequence for LOC132001 (NM_138807.2,417-435).
gtcgcatggcattcaaaga

SEQ ID NO: 409082 - DNA, 19 bp, Homo sapiens
  siRNA target sequence for LOC132001 (NM_138807.2,452-470).
gagtcactactctttccta

SEQ ID NO: 409083 - DNA, 19 bp, Homo sapiens
  siRNA target sequence for LOC132001 (NM_138807.2,474-492).
gttttagggcccaagatta

SEQ ID NO: 409084 - DNA, 19 bp, Homo sapiens
  siRNA target sequence for LOC132001 (NM_138807.2,496-514).
cgtccatccagaataacta

SEQ ID NO: 409085 - DNA, 19 bp, Homo sapiens
  siRNA target sequence for LOC132001 (NM_138807.2,497-515).
gtccatccagaataactat

SEQ ID NO: 409086 - DNA, 19 bp, Homo sapiens
  siRNA target sequence for LOC132001 (NM_138807.2,525-543).
gtttactacaattcattga

SEQ ID NO: 409087 - DNA, 19 bp, Homo sapiens
  siRNA target sequence for LOC132001 (NM_138807.2,583-601).
gcactaacgttctgattga

SEQ ID NO: 409088 - DNA, 19 bp, Homo sapiens
  siRNA target sequence for LOC132001 (NM_138807.2,586-604).
ctaacgttctgattgaaga

SEQ ID NO: 409089 - DNA, 19 bp, Homo sapiens
  siRNA target sequence for LOC132001 (NM_138807.2,606-624).
ctcctcaactggaataact

SEQ ID NO: 409090 - DNA, 19 bp, Homo sapiens
  siRNA target sequence for LOC132001 (NM_138807.2,608-626).
cctcaactggaataactta

SEQ ID NO: 409091 - DNA, 19 bp, Homo sapiens
  siRNA target sequence for LOC132001 (NM_138807.2,642-660).
ctccaaaaaccggtgaaaa

SEQ ID NO: 409092 - DNA, 19 bp, Homo sapiens
  siRNA target sequence for LOC132001 (NM_138807.2,644-662).
ccaaaaaccggtgaaaatt

SEQ ID NO: 409093 - DNA, 19 bp, Homo sapiens
  siRNA target sequence for LOC132001 (NM_138807.2,645-663).
caaaaaccggtgaaaatta

SEQ ID NO: 409094 - DNA, 19 bp, Homo sapiens
  siRNA target sequence for LOC132001 (NM_138807.2,674-692).
cgaggatgtcactcttaga

SEQ ID NO: 409095 - DNA, 19 bp, Homo sapiens
  siRNA target sequence for LOC132001 (NM_138807.2,675-693).
gaggatgtcactcttagat

SEQ ID NO: 409096 - DNA, 19 bp, Homo sapiens
  siRNA target sequence for LOC132001 (NM_138807.2,691-709).
gatcagccctcgatagaaa

SEQ ID NO: 409097 - DNA, 19 bp, Homo sapiens
  siRNA target sequence for LOC132001 (NM_138807.2,696-714).
gccctcgatagaaatctga

SEQ ID NO: 409098 - DNA, 19 bp, Homo sapiens
  siRNA target sequence for LOC132001 (NM_138807.2,743-761).
gctccccgaaagcttttct

SEQ ID NO: 409099 - DNA, 19 bp, Homo sapiens
  siRNA target sequence for LOC132001 (NM_138807.2,815-833).
gatggtggttggagaagat

SEQ ID NO: 409100 - DNA, 19 bp, Homo sapiens
  siRNA target sequence for LOC132001 (NM_138807.2,884-902).
gctctatggcagcatacta

SEQ ID NO: 409101 - DNA, 19 bp, Homo sapiens
  siRNA target sequence for LOC132001 (NM_138807.2,912-930).
cctcaagtggtgtataaaa

SEQ ID NO: 409102 - DNA, 19 bp, Homo sapiens
  siRNA target sequence for LOC132001 (NM_138807.2,939-957).
ggctggctggagatagata

SEQ ID NO: 409103 - DNA, 19 bp, Homo sapiens
  siRNA target sequence for LOC132001 (NM_138807.2,1004-1022).
cttacagcaacagataaat

SEQ ID NO: 409104 - DNA, 19 bp, Homo sapiens
  siRNA target sequence for LOC132001 (NM_138807.2,1110-1128).
cgactaggcctgaagaagt

SEQ ID NO: 409105 - DNA, 19 bp, Homo sapiens
  siRNA target sequence for LOC132001 (NM_138807.2,1131-1149).
gtgatttatagttcactaa

SEQ ID NO: 409106 - DNA, 19 bp, Homo sapiens
  siRNA target sequence for LOC132001 (NM_138807.2,1170-1188).
gggtggctgaggaaaacat

SEQ ID NO: 409107 - DNA, 19 bp, Homo sapiens
  siRNA target sequence for LOC132200 (NM_138808.1,115-133).
gattgcctacagaaaagtt

SEQ ID NO: 409108 - DNA, 19 bp, Homo sapiens
  siRNA target sequence for LOC132200 (NM_138808.1,144-162).
gaagattccagcaactcaa

SEQ ID NO: 409109 - DNA, 19 bp, Homo sapiens
  siRNA target sequence for LOC132200 (NM_138808.1,181-199).
caaaaggaaggggatagaa

SEQ ID NO: 409110 - DNA, 19 bp, Homo sapiens
  siRNA target sequence for LOC132200 (NM_138808.1,213-231).
ctgtgtctaccaacttact

SEQ ID NO: 409111 - DNA, 19 bp, Homo sapiens
  siRNA target sequence for LOC132200 (NM_138808.1,215-233).
gtgtctaccaacttactaa

SEQ ID NO: 409112 - DNA, 19 bp, Homo sapiens
  siRNA target sequence for LOC132200 (NM_138808.1,217-235).
gtctaccaacttactaaaa

SEQ ID NO: 409113 - DNA, 19 bp, Homo sapiens
  siRNA target sequence for LOC132200 (NM_138808.1,248-266).
gtccctaaagaggaatcat

SEQ ID NO: 409114 - DNA, 19 bp, Homo sapiens
  siRNA target sequence for LOC132200 (NM_138808.1,276-294).
gtgacatgggatttcatga

SEQ ID NO: 409115 - DNA, 19 bp, Homo sapiens
  siRNA target sequence for LOC132200 (NM_138808.1,278-296).
gacatgggatttcatgaaa

SEQ ID NO: 409116 - DNA, 19 bp, Homo sapiens
  siRNA target sequence for LOC132200 (NM_138808.1,355-373).
gctgtcctacaagtataga

SEQ ID NO: 409117 - DNA, 19 bp, Homo sapiens
  siRNA target sequence for LOC132200 (NM_138808.1,400-418).
gggctccactgaccataaa

SEQ ID NO: 409118 - DNA, 19 bp, Homo sapiens
  siRNA target sequence for LOC132200 (NM_138808.1,403-421).
ctccactgaccataaagaa

SEQ ID NO: 409119 - DNA, 19 bp, Homo sapiens
  siRNA target sequence for LOC132200 (NM_138808.1,442-460).
gagccttctccctaggatt

SEQ ID NO: 409120 - DNA, 19 bp, Homo sapiens
  siRNA target sequence for LOC132200 (NM_138808.1,446-464).
cttctccctaggattgtca

SEQ ID NO: 409121 - DNA, 19 bp, Homo sapiens
  siRNA target sequence for LOC132200 (NM_138808.1,457-475).
gattgtcaaggagttttca

SEQ ID NO: 409122 - DNA, 19 bp, Homo sapiens
  siRNA target sequence for LOC132200 (NM_138808.1,469-487).
gttttcatctcccaagtta

SEQ ID NO: 409123 - DNA, 19 bp, Homo sapiens
  siRNA target sequence for LOC132200 (NM_138808.1,511-529).
ctcagagaatgcgactata

SEQ ID NO: 409124 - DNA, 19 bp, Homo sapiens
  siRNA target sequence for LOC132200 (NM_138808.1,513-531).
cagagaatgcgactataca

SEQ ID NO: 409125 - DNA, 19 bp, Homo sapiens
  siRNA target sequence for LOC132200 (NM_138808.1,517-535).
gaatgcgactatacaactt

SEQ ID NO: 409126 - DNA, 19 bp, Homo sapiens
  siRNA target sequence for LOC132200 (NM_138808.1,522-540).
cgactatacaacttgatgt

SEQ ID NO: 409127 - DNA, 19 bp, Homo sapiens
  siRNA target sequence for LOC132200 (NM_138808.1,600-618).
ccaccaagcggttatctgt

SEQ ID NO: 409128 - DNA, 19 bp, Homo sapiens
  siRNA target sequence for LOC132200 (NM_138808.1,672-690).
cacactttccagcacttaa

SEQ ID NO: 409129 - DNA, 19 bp, Homo sapiens
  siRNA target sequence for LOC132200 (NM_138808.1,709-727).
ggaaaacatccttcgaaaa

SEQ ID NO: 409130 - DNA, 19 bp, Homo sapiens
  siRNA target sequence for LOC132200 (NM_138808.1,710-728).
gaaaacatccttcgaaaat

SEQ ID NO: 409131 - DNA, 19 bp, Homo sapiens
  siRNA target sequence for LOC132200 (NM_138808.1,761-779).
gtggatgacctcatagaaa

SEQ ID NO: 409132 - DNA, 19 bp, Homo sapiens
  siRNA target sequence for LOC132200 (NM_138808.1,780-798).
cagtgactgataaatccat

SEQ ID NO: 409133 - DNA, 19 bp, Homo sapiens
  siRNA target sequence for LOC132200 (NM_138808.1,816-834).
gacatgctgagcttcaaca

SEQ ID NO: 409134 - DNA, 19 bp, Homo sapiens
  siRNA target sequence for LOC132200 (NM_138808.1,897-915).
gaaccatgaggaagtataa

SEQ ID NO: 409135 - DNA, 19 bp, Homo sapiens
  siRNA target sequence for TAGAP (NM_138810.2,1106-1124).
gaacaacaaggtttgttct

SEQ ID NO: 409136 - DNA, 19 bp, Homo sapiens
  siRNA target sequence for C7orf31 (NM_138811.3,604-622).
gaaggagctgacatactgt

SEQ ID NO: 409137 - DNA, 19 bp, Homo sapiens
  siRNA target sequence for C7orf31 (NM_138811.3,624-642).
caacaccttttactctaat

SEQ ID NO: 409138 - DNA, 19 bp, Homo sapiens
  siRNA target sequence for C7orf31 (NM_138811.3,627-645).
caccttttactctaatgaa

SEQ ID NO: 409139 - DNA, 19 bp, Homo sapiens
  siRNA target sequence for C7orf31 (NM_138811.3,711-729).
ggagtcacttcaacaatgt

SEQ ID NO: 409140 - DNA, 19 bp, Homo sapiens
  siRNA target sequence for C7orf31 (NM_138811.3,752-770).
gagagtatggtgggataat

SEQ ID NO: 409141 - DNA, 19 bp, Homo sapiens
  siRNA target sequence for C7orf31 (NM_138811.3,789-807).
ggaccacaggccaaagtat

SEQ ID NO: 409142 - DNA, 19 bp, Homo sapiens
  siRNA target sequence for C7orf31 (NM_138811.3,832-850).
ggacatcagcattatggat

SEQ ID NO: 409143 - DNA, 19 bp, Homo sapiens
  siRNA target sequence for C7orf31 (NM_138811.3,833-851).
gacatcagcattatggatt

SEQ ID NO: 409144 - DNA, 19 bp, Homo sapiens
  siRNA target sequence for C7orf31 (NM_138811.3,876-894).
gcttcctgttgaacaattt

SEQ ID NO: 409145 - DNA, 19 bp, Homo sapiens
  siRNA target sequence for C7orf31 (NM_138811.3,881-899).
ctgttgaacaattttatta

SEQ ID NO: 409146 - DNA, 19 bp, Homo sapiens
  siRNA target sequence for C7orf31 (NM_138811.3,949-967).
cccaagccgcctaattcaa

SEQ ID NO: 409147 - DNA, 19 bp, Homo sapiens
  siRNA target sequence for C7orf31 (NM_138811.3,951-969).
caagccgcctaattcaaca

SEQ ID NO: 409148 - DNA, 19 bp, Homo sapiens
  siRNA target sequence for C7orf31 (NM_138811.3,954-972).
gccgcctaattcaacagta

SEQ ID NO: 409149 - DNA, 19 bp, Homo sapiens
  siRNA target sequence for C7orf31 (NM_138811.3,978-996).
gatctgcttgccatatcca

SEQ ID NO: 409150 - DNA, 19 bp, Homo sapiens
  siRNA target sequence for C7orf31 (NM_138811.3,983-1001).
gcttgccatatccaattga

SEQ ID NO: 409151 - DNA, 19 bp, Homo sapiens
  siRNA target sequence for C7orf31 (NM_138811.3,1116-1134).
gccaaccaaggcttatgat

SEQ ID NO: 409152 - DNA, 19 bp, Homo sapiens
  siRNA target sequence for C7orf31 (NM_138811.3,1117-1135).
ccaaccaaggcttatgatt

SEQ ID NO: 409153 - DNA, 19 bp, Homo sapiens
  siRNA target sequence for C7orf31 (NM_138811.3,1125-1143).
ggcttatgattcaacagtt

SEQ ID NO: 409154 - DNA, 19 bp, Homo sapiens
  siRNA target sequence for C7orf31 (NM_138811.3,1126-1144).
gcttatgattcaacagttt

SEQ ID NO: 409155 - DNA, 19 bp, Homo sapiens
  siRNA target sequence for C7orf31 (NM_138811.3,1157-1175).
gtaatccttatagatatga

SEQ ID NO: 409156 - DNA, 19 bp, Homo sapiens
  siRNA target sequence for C7orf31 (NM_138811.3,1183-1201).
gatattcccatggattcaa

SEQ ID NO: 409157 - DNA, 19 bp, Homo sapiens
  siRNA target sequence for C7orf31 (NM_138811.3,1223-1241).
caggtcaaggtgtatatta

SEQ ID NO: 409158 - DNA, 19 bp, Homo sapiens
  siRNA target sequence for C7orf31 (NM_138811.3,1281-1299).
ctacccaaaacctcctaaa

SEQ ID NO: 409159 - DNA, 19 bp, Homo sapiens
  siRNA target sequence for C7orf31 (NM_138811.3,1307-1325).
ctcctaacacttctttaaa

SEQ ID NO: 409160 - DNA, 19 bp, Homo sapiens
  siRNA target sequence for C7orf31 (NM_138811.3,1395-1413).
cacttcgtacactcatgat

SEQ ID NO: 409161 - DNA, 19 bp, Homo sapiens
  siRNA target sequence for C7orf31 (NM_138811.3,1397-1415).
cttcgtacactcatgattt

SEQ ID NO: 409162 - DNA, 19 bp, Homo sapiens
  siRNA target sequence for C7orf31 (NM_138811.3,1439-1457).
cccttgaactggatgatta

SEQ ID NO: 409163 - DNA, 19 bp, Homo sapiens
  siRNA target sequence for C7orf31 (NM_138811.3,1467-1485).
gatggtagcagagttaaca

SEQ ID NO: 409164 - DNA, 19 bp, Homo sapiens
  siRNA target sequence for C7orf31 (NM_138811.3,1484-1502).
cacgaaagataggatttga

SEQ ID NO: 409165 - DNA, 19 bp, Homo sapiens
  siRNA target sequence for C7orf31 (NM_138811.3,1504-1522).
ccagagccgcaagaaaaat

SEQ ID NO: 409166 - DNA, 19 bp, Homo sapiens
  siRNA target sequence for C7orf31 (NM_138811.3,1558-1576).
ggacgaattgcccgattaa

SEQ ID NO: 409167 - DNA, 19 bp, Homo sapiens
  siRNA target sequence for C7orf31 (NM_138811.3,1559-1577).
gacgaattgcccgattaat

SEQ ID NO: 409168 - DNA, 19 bp, Homo sapiens
  siRNA target sequence for C7orf31 (NM_138811.3,1562-1580).
gaattgcccgattaattca

SEQ ID NO: 409169 - DNA, 19 bp, Homo sapiens
  siRNA target sequence for C7orf31 (NM_138811.3,1589-1607).
gttctctggaggctatagt

SEQ ID NO: 409170 - DNA, 19 bp, Homo sapiens
  siRNA target sequence for C7orf31 (NM_138811.3,1621-1639).
cgttcctgtccagattgta

SEQ ID NO: 409171 - DNA, 19 bp, Homo sapiens
  siRNA target sequence for C7orf31 (NM_138811.3,1667-1685).
cctttgtacccagttctaa

SEQ ID NO: 409172 - DNA, 19 bp, Homo sapiens
  siRNA target sequence for C7orf31 (NM_138811.3,1668-1686).
ctttgtacccagttctaaa

SEQ ID NO: 409173 - DNA, 19 bp, Homo sapiens
  siRNA target sequence for C7orf31 (NM_138811.3,1672-1690).
gtacccagttctaaagaaa

SEQ ID NO: 409174 - DNA, 19 bp, Homo sapiens
  siRNA target sequence for C7orf31 (NM_138811.3,1770-1788).
gagcttgctgtctacctat

SEQ ID NO: 409175 - DNA, 19 bp, Homo sapiens
  siRNA target sequence for C7orf31 (NM_138811.3,1785-1803).
ctatgaactcccatcttgt

SEQ ID NO: 409176 - DNA, 19 bp, Homo sapiens
  siRNA target sequence for C7orf31 (NM_138811.3,1796-1814).
catcttgttacccaacaaa

SEQ ID NO: 409177 - DNA, 19 bp, Homo sapiens
  siRNA target sequence for C7orf31 (NM_138811.3,1823-1841).
ctagcatttatgacataaa

SEQ ID NO: 409178 - DNA, 19 bp, Homo sapiens
  siRNA target sequence for C7orf31 (NM_138811.3,1911-1929).
ccaacccacaccttactgt

SEQ ID NO: 409179 - DNA, 19 bp, Homo sapiens
  siRNA target sequence for C7orf31 (NM_138811.3,1912-1930).
caacccacaccttactgta

SEQ ID NO: 409180 - DNA, 19 bp, Homo sapiens
  siRNA target sequence for C7orf31 (NM_138811.3,1970-1988).
ccctacgtgatcagtataa

SEQ ID NO: 409181 - DNA, 19 bp, Homo sapiens
  siRNA target sequence for C7orf31 (NM_138811.3,1971-1989).
cctacgtgatcagtataat

SEQ ID NO: 409182 - DNA, 19 bp, Homo sapiens
  siRNA target sequence for C7orf31 (NM_138811.3,1975-1993).
cgtgatcagtataatatgt

SEQ ID NO: 409183 - DNA, 19 bp, Homo sapiens
  siRNA target sequence for C7orf31 (NM_138811.3,2001-2019).
ccctgttagccttagtaaa

SEQ ID NO: 409184 - DNA, 19 bp, Homo sapiens
  siRNA target sequence for C7orf31 (NM_138811.3,2005-2023).
gttagccttagtaaaccta

SEQ ID NO: 409185 - DNA, 19 bp, Homo sapiens
  siRNA target sequence for C7orf31 (NM_138811.3,2010-2028).
ccttagtaaacctagtgtt

SEQ ID NO: 409186 - DNA, 19 bp, Homo sapiens
  siRNA target sequence for C7orf31 (NM_138811.3,2011-2029).
cttagtaaacctagtgttt

SEQ ID NO: 409187 - DNA, 19 bp, Homo sapiens
  siRNA target sequence for C7orf31 (NM_138811.3,2044-2062).
gacacggaagctttcactt

SEQ ID NO: 409188 - DNA, 19 bp, Homo sapiens
  siRNA target sequence for C7orf31 (NM_138811.3,2046-2064).
cacggaagctttcacttta

SEQ ID NO: 409189 - DNA, 19 bp, Homo sapiens
  siRNA target sequence for C7orf31 (NM_138811.3,2218-2236).
gcacaaaagcgtttccata

SEQ ID NO: 409190 - DNA, 19 bp, Homo sapiens
  siRNA target sequence for C7orf31 (NM_138811.3,2221-2239).
caaaagcgtttccataaat

SEQ ID NO: 409191 - DNA, 19 bp, Homo sapiens
  siRNA target sequence for C7orf31 (NM_138811.3,2282-2300).
cggggatgaagcaccaatt

SEQ ID NO: 409192 - DNA, 19 bp, Homo sapiens
  siRNA target sequence for C7orf31 (NM_138811.3,2284-2302).
gggatgaagcaccaattct

SEQ ID NO: 409193 - DNA, 19 bp, Homo sapiens
  siRNA target sequence for C7orf31 (NM_138811.3,2296-2314).
caattctatggccataatt

SEQ ID NO: 409194 - DNA, 19 bp, Homo sapiens
  siRNA target sequence for C7orf31 (NM_138811.3,2301-2319).
ctatggccataattcctat

SEQ ID NO: 409195 - DNA, 19 bp, Homo sapiens
  siRNA target sequence for C7orf31 (NM_138811.3,2305-2323).
ggccataattcctattatt

SEQ ID NO: 409196 - DNA, 19 bp, Homo sapiens
  siRNA target sequence for C7orf31 (NM_138811.3,2306-2324).
gccataattcctattattt

SEQ ID NO: 409197 - DNA, 19 bp, Homo sapiens
  siRNA target sequence for LOC143241 (NM_138812.1,197-215).
ccttggggcctgtttaact

SEQ ID NO: 409198 - DNA, 19 bp, Homo sapiens
  siRNA target sequence for LOC143241 (NM_138812.1,245-263).
cccagtggatccgatagaa

SEQ ID NO: 409199 - DNA, 19 bp, Homo sapiens
  siRNA target sequence for LOC143241 (NM_138812.1,246-264).
ccagtggatccgatagaat

SEQ ID NO: 409200 - DNA, 19 bp, Homo sapiens
  siRNA target sequence for LOC143241 (NM_138812.1,247-265).
cagtggatccgatagaata

SEQ ID NO: 409201 - DNA, 19 bp, Homo sapiens
  siRNA target sequence for LOC143241 (NM_138812.1,249-267).
gtggatccgatagaatatt

SEQ ID NO: 409202 - DNA, 19 bp, Homo sapiens
  siRNA target sequence for LOC143241 (NM_138812.1,251-269).
ggatccgatagaatattta

SEQ ID NO: 409203 - DNA, 19 bp, Homo sapiens
  siRNA target sequence for LOC143241 (NM_138812.1,255-273).
ccgatagaatatttagcat

SEQ ID NO: 409204 - DNA, 19 bp, Homo sapiens
  siRNA target sequence for LOC143241 (NM_138812.1,256-274).
cgatagaatatttagcatt

SEQ ID NO: 409205 - DNA, 19 bp, Homo sapiens
  siRNA target sequence for LOC143241 (NM_138812.1,270-288).
gcattgtggatttacaagt

SEQ ID NO: 409206 - DNA, 19 bp, Homo sapiens
  siRNA target sequence for LOC143241 (NM_138812.1,277-295).
ggatttacaagtataagga

SEQ ID NO: 409207 - DNA, 19 bp, Homo sapiens
  siRNA target sequence for LOC143241 (NM_138812.1,335-353).
caagctggagcgtgaaaga

SEQ ID NO: 409208 - DNA, 19 bp, Homo sapiens
  siRNA target sequence for LOC143241 (NM_138812.1,341-359).
ggagcgtgaaagagaatta

SEQ ID NO: 409209 - DNA, 19 bp, Homo sapiens
  siRNA target sequence for LOC143241 (NM_138812.1,344-362).
gcgtgaaagagaattagct

SEQ ID NO: 409210 - DNA, 19 bp, Homo sapiens
  siRNA target sequence for LOC143241 (NM_138812.1,486-504).
cagagagctcaagaacaat

SEQ ID NO: 409211 - DNA, 19 bp, Homo sapiens
  siRNA target sequence for LOC143241 (NM_138812.1,488-506).
gagagctcaagaacaatta

SEQ ID NO: 409212 - DNA, 19 bp, Homo sapiens
  siRNA target sequence for LOC143241 (NM_138812.1,524-542).
gaatatggaaaatctagtt

SEQ ID NO: 409213 - DNA, 19 bp, Homo sapiens
  siRNA target sequence for LOC143241 (NM_138812.1,537-555).
ctagttaggaatgaagata

SEQ ID NO: 409214 - DNA, 19 bp, Homo sapiens
  siRNA target sequence for LOC143241 (NM_138812.1,601-619).
ctgaaatcagcgatcgtta

SEQ ID NO: 409215 - DNA, 19 bp, Homo sapiens
  siRNA target sequence for LOC143241 (NM_138812.1,670-688).
ctgatattgcattaaacat

SEQ ID NO: 409216 - DNA, 19 bp, Homo sapiens
  siRNA target sequence for LOC150379 (NM_138814.1,370-388).
cctgacggacgcaacttct

SEQ ID NO: 409217 - DNA, 19 bp, Homo sapiens
  siRNA target sequence for LOC150379 (NM_138814.1,371-389).
ctgacggacgcaacttctt

SEQ ID NO: 409218 - DNA, 19 bp, Homo sapiens
  siRNA target sequence for LOC150379 (NM_138814.1,432-450).
ggtctgcaccttatacttt

SEQ ID NO: 409219 - DNA, 19 bp, Homo sapiens
  siRNA target sequence for LOC150379 (NM_138814.1,505-523).
ggggctctgagcaacaact

SEQ ID NO: 409220 - DNA, 19 bp, Homo sapiens
  siRNA target sequence for LOC150379 (NM_138814.1,669-687).
ggggctcatatgtctcata

SEQ ID NO: 409221 - DNA, 19 bp, Homo sapiens
  siRNA target sequence for C9orf65 (NM_138818.2,139-157).
gcaacgcgccaaatctaaa

SEQ ID NO: 409222 - DNA, 19 bp, Homo sapiens
  siRNA target sequence for C9orf65 (NM_138818.2,143-161).
cgcgccaaatctaaactga

SEQ ID NO: 409223 - DNA, 19 bp, Homo sapiens
  siRNA target sequence for C9orf65 (NM_138818.2,145-163).
cgccaaatctaaactgaat

SEQ ID NO: 409224 - DNA, 19 bp, Homo sapiens
  siRNA target sequence for C9orf65 (NM_138818.2,191-209).
gtggttattgggcctaaat

SEQ ID NO: 409225 - DNA, 19 bp, Homo sapiens
  siRNA target sequence for C9orf65 (NM_138818.2,194-212).
gttattgggcctaaatcgt

SEQ ID NO: 409226 - DNA, 19 bp, Homo sapiens
  siRNA target sequence for C9orf65 (NM_138818.2,227-245).
ctcatttctaccttcacat

SEQ ID NO: 409227 - DNA, 19 bp, Homo sapiens
  siRNA target sequence for C9orf65 (NM_138818.2,234-252).
ctaccttcacatatgctta

SEQ ID NO: 409228 - DNA, 19 bp, Homo sapiens
  siRNA target sequence for C9orf65 (NM_138818.2,288-306).
gtttaccagtgctgaacat

SEQ ID NO: 409229 - DNA, 19 bp, Homo sapiens
  siRNA target sequence for C9orf65 (NM_138818.2,293-311).
ccagtgctgaacataccaa

SEQ ID NO: 409230 - DNA, 19 bp, Homo sapiens
  siRNA target sequence for C9orf65 (NM_138818.2,331-349).
caccgagacgaggtttatt

SEQ ID NO: 409231 - DNA, 19 bp, Homo sapiens
  siRNA target sequence for C9orf65 (NM_138818.2,333-351).
ccgagacgaggtttatttt

SEQ ID NO: 409232 - DNA, 19 bp, Homo sapiens
  siRNA target sequence for C9orf65 (NM_138818.2,337-355).
gacgaggtttattttagaa

SEQ ID NO: 409233 - DNA, 19 bp, Homo sapiens
  siRNA target sequence for C9orf65 (NM_138818.2,339-357).
cgaggtttattttagaaga

SEQ ID NO: 409234 - DNA, 19 bp, Homo sapiens
  siRNA target sequence for C9orf65 (NM_138818.2,369-387).
ccgaatcattccacatatt

SEQ ID NO: 409235 - DNA, 19 bp, Homo sapiens
  siRNA target sequence for C9orf65 (NM_138818.2,382-400).
catattccgggatgaaatt

SEQ ID NO: 409236 - DNA, 19 bp, Homo sapiens
  siRNA target sequence for C9orf65 (NM_138818.2,403-421).
cctgcatcagctaaatgat

SEQ ID NO: 409237 - DNA, 19 bp, Homo sapiens
  siRNA target sequence for C9orf65 (NM_138818.2,419-437).
gatgaagggaagttatcga

SEQ ID NO: 409238 - DNA, 19 bp, Homo sapiens
  siRNA target sequence for C9orf65 (NM_138818.2,422-440).
gaagggaagttatcgataa

SEQ ID NO: 409239 - DNA, 19 bp, Homo sapiens
  siRNA target sequence for C9orf65 (NM_138818.2,427-445).
gaagttatcgataacactt

SEQ ID NO: 409240 - DNA, 19 bp, Homo sapiens
  siRNA target sequence for C9orf65 (NM_138818.2,430-448).
gttatcgataacacttgtt

SEQ ID NO: 409241 - DNA, 19 bp, Homo sapiens
  siRNA target sequence for C9orf65 (NM_138818.2,461-479).
ctggcgagtgaagacaaaa

SEQ ID NO: 409242 - DNA, 19 bp, Homo sapiens
  siRNA target sequence for C9orf65 (NM_138818.2,463-481).
ggcgagtgaagacaaaact

SEQ ID NO: 409243 - DNA, 19 bp, Homo sapiens
  siRNA target sequence for C9orf65 (NM_138818.2,464-482).
gcgagtgaagacaaaactt

SEQ ID NO: 409244 - DNA, 19 bp, Homo sapiens
  siRNA target sequence for C9orf65 (NM_138818.2,465-483).
cgagtgaagacaaaacttt

SEQ ID NO: 409245 - DNA, 19 bp, Homo sapiens
  siRNA target sequence for C9orf65 (NM_138818.2,468-486).
gtgaagacaaaactttaga

SEQ ID NO: 409246 - DNA, 19 bp, Homo sapiens
  siRNA target sequence for C9orf65 (NM_138818.2,491-509).
gcagttgtcaaagtcatta

SEQ ID NO: 409247 - DNA, 19 bp, Homo sapiens
  siRNA target sequence for C9orf65 (NM_138818.2,525-543).
gcgatgccaacgttgagtt

SEQ ID NO: 409248 - DNA, 19 bp, Homo sapiens
  siRNA target sequence for C9orf65 (NM_138818.2,558-576).
cttctctcgtgctaaagga

SEQ ID NO: 409249 - DNA, 19 bp, Homo sapiens
  siRNA target sequence for C9orf65 (NM_138818.2,625-643).
cctcagaggtagcattctt

SEQ ID NO: 409250 - DNA, 19 bp, Homo sapiens
  siRNA target sequence for C9orf65 (NM_138818.2,630-648).
gaggtagcattcttttcaa

SEQ ID NO: 409251 - DNA, 19 bp, Homo sapiens
  siRNA target sequence for C9orf65 (NM_138818.2,702-720).
ctatcctggaagaaaaatt

SEQ ID NO: 409252 - DNA, 19 bp, Homo sapiens
  siRNA target sequence for C9orf65 (NM_138818.2,780-798).
ctcagggtttaagtattga

SEQ ID NO: 409253 - DNA, 19 bp, Homo sapiens
  siRNA target sequence for C9orf65 (NM_138818.2,792-810).
gtattgaacagacaatgtt

SEQ ID NO: 409254 - DNA, 19 bp, Homo sapiens
  siRNA target sequence for C9orf65 (NM_138818.2,826-844).
gctgtcagatggagaaata

SEQ ID NO: 409255 - DNA, 19 bp, Homo sapiens
  siRNA target sequence for LOC159091 (NM_138819.1,458-476).
ccgcagacggcaacattct

SEQ ID NO: 409256 - DNA, 19 bp, Homo sapiens
  siRNA target sequence for LOC159091 (NM_138819.1,534-552).
gcaagctgacatgttaaga

SEQ ID NO: 409257 - DNA, 19 bp, Homo sapiens
  siRNA target sequence for LOC159091 (NM_138819.1,541-559).
gacatgttaagaattagga

SEQ ID NO: 409258 - DNA, 19 bp, Homo sapiens
  siRNA target sequence for LOC159091 (NM_138819.1,564-582).
cagaacaacatttaggaat

SEQ ID NO: 409259 - DNA, 19 bp, Homo sapiens
  siRNA target sequence for LOC159091 (NM_138819.1,624-642).
catcagccgccttcatcaa

SEQ ID NO: 409260 - DNA, 19 bp, Homo sapiens
  siRNA target sequence for LOC159091 (NM_138819.1,629-647).
gccgccttcatcaaatcaa

SEQ ID NO: 409261 - DNA, 19 bp, Homo sapiens
  siRNA target sequence for LOC159091 (NM_138819.1,630-648).
ccgccttcatcaaatcaaa

SEQ ID NO: 409262 - DNA, 19 bp, Homo sapiens
  siRNA target sequence for LOC159091 (NM_138819.1,696-714).
gaagctacaaagtgagata

SEQ ID NO: 409263 - DNA, 19 bp, Homo sapiens
  siRNA target sequence for LOC159091 (NM_138819.1,707-725).
gtgagatacagataagtca

SEQ ID NO: 409264 - DNA, 19 bp, Homo sapiens
  siRNA target sequence for LOC159091 (NM_138819.1,731-749).
gggaagaaggcttgaaact

SEQ ID NO: 409265 - DNA, 19 bp, Homo sapiens
  siRNA target sequence for LOC159091 (NM_138819.1,739-757).
ggcttgaaactgaatgaca

SEQ ID NO: 409266 - DNA, 19 bp, Homo sapiens
  siRNA target sequence for LOC159091 (NM_138819.1,777-795).
ctctctaaagtgcattgat

SEQ ID NO: 409267 - DNA, 19 bp, Homo sapiens
  siRNA target sequence for LOC159091 (NM_138819.1,781-799).
ctaaagtgcattgatttaa

SEQ ID NO: 409268 - DNA, 19 bp, Homo sapiens
  siRNA target sequence for ESAM (NM_138961.1,167-185).
ccaacttgctgcggttttt

SEQ ID NO: 409269 - DNA, 19 bp, Homo sapiens
  siRNA target sequence for ESAM (NM_138961.1,307-325).
cacggggaggtgtcttcat

SEQ ID NO: 409270 - DNA, 19 bp, Homo sapiens
  siRNA target sequence for ESAM (NM_138961.1,419-437).
gcaaacctggagtatcctt

SEQ ID NO: 409271 - DNA, 19 bp, Homo sapiens
  siRNA target sequence for ESAM (NM_138961.1,518-536).
ccgtgaatgtgcaagacaa

SEQ ID NO: 409272 - DNA, 19 bp, Homo sapiens
  siRNA target sequence for ESAM (NM_138961.1,554-572).
gccacagcatcaaaacctt

SEQ ID NO: 409273 - DNA, 19 bp, Homo sapiens
  siRNA target sequence for ESAM (NM_138961.1,555-573).
ccacagcatcaaaacctta

SEQ ID NO: 409274 - DNA, 19 bp, Homo sapiens
  siRNA target sequence for ESAM (NM_138961.1,560-578).
gcatcaaaaccttagaact

SEQ ID NO: 409275 - DNA, 19 bp, Homo sapiens
  siRNA target sequence for ESAM (NM_138961.1,569-587).
ccttagaactcaatgtact

SEQ ID NO: 409276 - DNA, 19 bp, Homo sapiens
  siRNA target sequence for ESAM (NM_138961.1,674-692).
gtaagcccgctgtccaata

SEQ ID NO: 409277 - DNA, 19 bp, Homo sapiens
  siRNA target sequence for ESAM (NM_138961.1,713-731).
catccttccagactttctt

SEQ ID NO: 409278 - DNA, 19 bp, Homo sapiens
  siRNA target sequence for ESAM (NM_138961.1,788-806).
ccatggctggagtctatgt

SEQ ID NO: 409279 - DNA, 19 bp, Homo sapiens
  siRNA target sequence for ESAM (NM_138961.1,826-844).
gtgggcactgcccaatgta

SEQ ID NO: 409280 - DNA, 19 bp, Homo sapiens
  siRNA target sequence for ESAM (NM_138961.1,828-846).
gggcactgcccaatgtaat

SEQ ID NO: 409281 - DNA, 19 bp, Homo sapiens
  siRNA target sequence for ESAM (NM_138961.1,830-848).
gcactgcccaatgtaatgt

SEQ ID NO: 409282 - DNA, 19 bp, Homo sapiens
  siRNA target sequence for ESAM (NM_138961.1,1195-1213).
gcccaccctcaaccaatat

SEQ ID NO: 409283 - DNA, 19 bp, Homo sapiens
  siRNA target sequence for NETO1 (NM_138966.2,296-314).
gcgcagcgtgcttcacatt

SEQ ID NO: 409284 - DNA, 19 bp, Homo sapiens
  siRNA target sequence for NETO1 (NM_138966.2,299-317).
cagcgtgcttcacattgta

SEQ ID NO: 409285 - DNA, 19 bp, Homo sapiens
  siRNA target sequence for NETO1 (NM_138966.2,341-359).
gtctggggcaaccaagaaa

SEQ ID NO: 409286 - DNA, 19 bp, Homo sapiens
  siRNA target sequence for NETO1 (NM_138966.2,426-444).
gcagagggaggtatcttta

SEQ ID NO: 409287 - DNA, 19 bp, Homo sapiens
  siRNA target sequence for NETO1 (NM_138966.2,481-499).
gggaatgcatctacatcat

SEQ ID NO: 409288 - DNA, 19 bp, Homo sapiens
  siRNA target sequence for NETO1 (NM_138966.2,482-500).
ggaatgcatctacatcata

SEQ ID NO: 409289 - DNA, 19 bp, Homo sapiens
  siRNA target sequence for NETO1 (NM_138966.2,516-534).
cagtgcattgaactttact

SEQ ID NO: 409290 - DNA, 19 bp, Homo sapiens
  siRNA target sequence for NETO1 (NM_138966.2,559-577).
cgtcttgggagtgcaaatt

SEQ ID NO: 409291 - DNA, 19 bp, Homo sapiens
  siRNA target sequence for NETO1 (NM_138966.2,560-578).
gtcttgggagtgcaaattt

SEQ ID NO: 409292 - DNA, 19 bp, Homo sapiens
  siRNA target sequence for NETO1 (NM_138966.2,565-583).
gggagtgcaaatttgatca

SEQ ID NO: 409293 - DNA, 19 bp, Homo sapiens
  siRNA target sequence for NETO1 (NM_138966.2,566-584).
ggagtgcaaatttgatcat

SEQ ID NO: 409294 - DNA, 19 bp, Homo sapiens
  siRNA target sequence for NETO1 (NM_138966.2,645-663).
caaaatccacctgtcataa

SEQ ID NO: 409295 - DNA, 19 bp, Homo sapiens
  siRNA target sequence for NETO1 (NM_138966.2,724-742).
gattttcagctcgatacaa

SEQ ID NO: 409296 - DNA, 19 bp, Homo sapiens
  siRNA target sequence for NETO1 (NM_138966.2,793-811).
cagcgtgtgagtttgagat

SEQ ID NO: 409297 - DNA, 19 bp, Homo sapiens
  siRNA target sequence for NETO1 (NM_138966.2,814-832).
gcggttccgaaggaattgt

SEQ ID NO: 409298 - DNA, 19 bp, Homo sapiens
  siRNA target sequence for NETO1 (NM_138966.2,826-844).
gaattgtggagtctataca

SEQ ID NO: 409299 - DNA, 19 bp, Homo sapiens
  siRNA target sequence for NETO1 (NM_138966.2,831-849).
gtggagtctatacaaatta

SEQ ID NO: 409300 - DNA, 19 bp, Homo sapiens
  siRNA target sequence for NETO1 (NM_138966.2,834-852).
gagtctatacaaattatga

SEQ ID NO: 409301 - DNA, 19 bp, Homo sapiens
  siRNA target sequence for NETO1 (NM_138966.2,870-888).
gctagcgaggctgttgatt

SEQ ID NO: 409302 - DNA, 19 bp, Homo sapiens
  siRNA target sequence for NETO1 (NM_138966.2,874-892).
gcgaggctgttgattgcaa

SEQ ID NO: 409303 - DNA, 19 bp, Homo sapiens
  siRNA target sequence for NETO1 (NM_138966.2,909-927).
cctccacggtccaagattt

SEQ ID NO: 409304 - DNA, 19 bp, Homo sapiens
  siRNA target sequence for NETO1 (NM_138966.2,910-928).
ctccacggtccaagattta

SEQ ID NO: 409305 - DNA, 19 bp, Homo sapiens
  siRNA target sequence for NETO1 (NM_138966.2,933-951).
cgattcttggactatgaga

SEQ ID NO: 409306 - DNA, 19 bp, Homo sapiens
  siRNA target sequence for NETO1 (NM_138966.2,1003-1021).
gcagttccgtggaggattt

SEQ ID NO: 409307 - DNA, 19 bp, Homo sapiens
  siRNA target sequence for NETO1 (NM_138966.2,1006-1024).
gttccgtggaggatttgaa

SEQ ID NO: 409308 - DNA, 19 bp, Homo sapiens
  siRNA target sequence for NETO1 (NM_138966.2,1110-1128).
cgaaacagccgatttcaga

SEQ ID NO: 409309 - DNA, 19 bp, Homo sapiens
  siRNA target sequence for NETO1 (NM_138966.2,1156-1174).
cttgtgaaggcaacacatt

SEQ ID NO: 409310 - DNA, 19 bp, Homo sapiens
  siRNA target sequence for NETO1 (NM_138966.2,1159-1177).
gtgaaggcaacacattctt

SEQ ID NO: 409311 - DNA, 19 bp, Homo sapiens
  siRNA target sequence for NETO1 (NM_138966.2,1171-1189).
cattcttctgccatagtaa

SEQ ID NO: 409312 - DNA, 19 bp, Homo sapiens
  siRNA target sequence for NETO1 (NM_138966.2,1236-1254).
gtgtatccttgggatgaaa

SEQ ID NO: 409313 - DNA, 19 bp, Homo sapiens
  siRNA target sequence for NETO1 (NM_138966.2,1363-1381).
ctgtcatcgtacagatcaa

SEQ ID NO: 409314 - DNA, 19 bp, Homo sapiens
  siRNA target sequence for NETO1 (NM_138966.2,1416-1434).
gactttgaccagacagttt

SEQ ID NO: 409315 - DNA, 19 bp, Homo sapiens
  siRNA target sequence for NETO1 (NM_138966.2,1455-1473).
cctcattatgagttatgca

SEQ ID NO: 409316 - DNA, 19 bp, Homo sapiens
  siRNA target sequence for NETO1 (NM_138966.2,1555-1573).
cttccaaatgcattcatga

SEQ ID NO: 409317 - DNA, 19 bp, Homo sapiens
  siRNA target sequence for NETO1 (NM_138966.2,1699-1717).
gaagaaatatccttgtcat

SEQ ID NO: 409318 - DNA, 19 bp, Homo sapiens
  siRNA target sequence for NETO1 (NM_138966.2,1749-1767).
gcctgtgacatagatgaaa

SEQ ID NO: 409319 - DNA, 19 bp, Homo sapiens
  siRNA target sequence for NETO1 (NM_138966.2,1750-1768).
cctgtgacatagatgaaat

SEQ ID NO: 409320 - DNA, 19 bp, Homo sapiens
  siRNA target sequence for SCAMP5 (NM_138967.1,293-311).
gctggtttcggcccattta

SEQ ID NO: 409321 - DNA, 19 bp, Homo sapiens
  siRNA target sequence for SCAMP5 (NM_138967.1,296-314).
ggtttcggcccatttacaa

SEQ ID NO: 409322 - DNA, 19 bp, Homo sapiens
  siRNA target sequence for SCAMP5 (NM_138967.1,421-439).
gtctgcggctggattgcta

SEQ ID NO: 409323 - DNA, 19 bp, Homo sapiens
  siRNA target sequence for SCAMP5 (NM_138967.1,447-465).
cttcttcggaacgaacatt

SEQ ID NO: 409324 - DNA, 19 bp, Homo sapiens
  siRNA target sequence for SCAMP5 (NM_138967.1,470-488).
cggcggtggtgatgctaat

SEQ ID NO: 409325 - DNA, 19 bp, Homo sapiens
  siRNA target sequence for NETO1 (NM_138999.1,122-140).
ctaaggttgtagcaagttt

SEQ ID NO: 409326 - DNA, 19 bp, Homo sapiens
  siRNA target sequence for TSARG1 (NM_139073.2,166-184).
cagcatgctagctccaatt

SEQ ID NO: 409327 - DNA, 19 bp, Homo sapiens
  siRNA target sequence for TSARG1 (NM_139073.2,402-420).
gaaagcagggcctctgatt

SEQ ID NO: 409328 - DNA, 19 bp, Homo sapiens
  siRNA target sequence for FLJ13614 (NM_139076.1,407-425).
cgactggaacattccttat

SEQ ID NO: 409329 - DNA, 19 bp, Homo sapiens
  siRNA target sequence for FLJ13614 (NM_139076.1,432-450).
ctcaaaaaggactttttca

SEQ ID NO: 409330 - DNA, 19 bp, Homo sapiens
  siRNA target sequence for FLJ13614 (NM_139076.1,486-504).
ctgaacaactgggttataa

SEQ ID NO: 409331 - DNA, 19 bp, Homo sapiens
  siRNA target sequence for FLJ13614 (NM_139076.1,494-512).
ctgggttataaaactgtat

SEQ ID NO: 409332 - DNA, 19 bp, Homo sapiens
  siRNA target sequence for FLJ13614 (NM_139076.1,540-558).
gccgagcagtacaaacaca

SEQ ID NO: 409333 - DNA, 19 bp, Homo sapiens
  siRNA target sequence for FLJ13614 (NM_139076.1,588-606).
ccttaaaggaggtacataa

SEQ ID NO: 409334 - DNA, 19 bp, Homo sapiens
  siRNA target sequence for FLJ13614 (NM_139076.1,638-656).
gaattaaagagtatatgca

SEQ ID NO: 409335 - DNA, 19 bp, Homo sapiens
  siRNA target sequence for FLJ13614 (NM_139076.1,692-710).
ctagtaaaggatgtaaaca

SEQ ID NO: 409336 - DNA, 19 bp, Homo sapiens
  siRNA target sequence for FLJ13614 (NM_139076.1,695-713).
gtaaaggatgtaaacagat

SEQ ID NO: 409337 - DNA, 19 bp, Homo sapiens
  siRNA target sequence for FLJ13614 (NM_139076.1,709-727).
cagattaaaacgagaaatt

SEQ ID NO: 409338 - DNA, 19 bp, Homo sapiens
  siRNA target sequence for FLJ13614 (NM_139076.1,782-800).
gaccctcaggagaacattt

SEQ ID NO: 409339 - DNA, 19 bp, Homo sapiens
  siRNA target sequence for FLJ13614 (NM_139076.1,809-827).
caggcattacggacctttt

SEQ ID NO: 409340 - DNA, 19 bp, Homo sapiens
  siRNA target sequence for FLJ13614 (NM_139076.1,811-829).
ggcattacggacctttttt

SEQ ID NO: 409341 - DNA, 19 bp, Homo sapiens
  siRNA target sequence for FLJ13614 (NM_139076.1,848-866).
cattcatgtgttatgtctt

SEQ ID NO: 409342 - DNA, 19 bp, Homo sapiens
  siRNA target sequence for FLJ13614 (NM_139076.1,907-925).
ccaccatctcgatgtagta

SEQ ID NO: 409343 - DNA, 19 bp, Homo sapiens
  siRNA target sequence for FLJ13614 (NM_139076.1,923-941).
gtagacaatctgaccttaa

SEQ ID NO: 409344 - DNA, 19 bp, Homo sapiens
  siRNA target sequence for FLJ13614 (NM_139076.1,928-946).
caatctgaccttaatggta

SEQ ID NO: 409345 - DNA, 19 bp, Homo sapiens
  siRNA target sequence for FLJ13614 (NM_139076.1,943-961).
ggtagaacacactgacatt

SEQ ID NO: 409346 - DNA, 19 bp, Homo sapiens
  siRNA target sequence for FLJ13614 (NM_139076.1,975-993).
cagctagtacaccacaaat

SEQ ID NO: 409347 - DNA, 19 bp, Homo sapiens
  siRNA target sequence for FLJ13614 (NM_139076.1,977-995).
gctagtacaccacaaatca

SEQ ID NO: 409348 - DNA, 19 bp, Homo sapiens
  siRNA target sequence for FLJ13614 (NM_139076.1,981-999).
gtacaccacaaatcattaa

SEQ ID NO: 409349 - DNA, 19 bp, Homo sapiens
  siRNA target sequence for FLJ13614 (NM_139076.1,984-1002).
caccacaaatcattaagca

SEQ ID NO: 409350 - DNA, 19 bp, Homo sapiens
  siRNA target sequence for FLJ13614 (NM_139076.1,986-1004).
ccacaaatcattaagcata

SEQ ID NO: 409351 - DNA, 19 bp, Homo sapiens
  siRNA target sequence for FLJ13614 (NM_139076.1,1036-1054).
caagagatctcggttgtta

SEQ ID NO: 409352 - DNA, 19 bp, Homo sapiens
  siRNA target sequence for FLJ13614 (NM_139076.1,1055-1073).
gatacacaagacaaacgat

SEQ ID NO: 409353 - DNA, 19 bp, Homo sapiens
  siRNA target sequence for FLJ13614 (NM_139076.1,1059-1077).
cacaagacaaacgatctaa

SEQ ID NO: 409354 - DNA, 19 bp, Homo sapiens
  siRNA target sequence for FLJ13614 (NM_139076.1,1080-1098).
cagatactggtagtagtaa

SEQ ID NO: 409355 - DNA, 19 bp, Homo sapiens
  siRNA target sequence for FLJ13614 (NM_139076.1,1088-1106).
ggtagtagtaaccaagata

SEQ ID NO: 409356 - DNA, 19 bp, Homo sapiens
  siRNA target sequence for FLJ13614 (NM_139076.1,1089-1107).
gtagtagtaaccaagataa

SEQ ID NO: 409357 - DNA, 19 bp, Homo sapiens
  siRNA target sequence for FLJ13614 (NM_139076.1,1103-1121).
gataaagcatccaaaatga

SEQ ID NO: 409358 - DNA, 19 bp, Homo sapiens
  siRNA target sequence for CRB3 (NM_139161.2,495-513).
cgacccccaacctcaagtt

SEQ ID NO: 409359 - DNA, 19 bp, Homo sapiens
  siRNA target sequence for SMCR7 (NM_139162.2,325-343).
ggccgtgaagcggttcatt

SEQ ID NO: 409360 - DNA, 19 bp, Homo sapiens
  siRNA target sequence for SMCR7 (NM_139162.2,327-345).
ccgtgaagcggttcattga

SEQ ID NO: 409361 - DNA, 19 bp, Homo sapiens
  siRNA target sequence for SMCR7 (NM_139162.2,329-347).
gtgaagcggttcattgaca

SEQ ID NO: 409362 - DNA, 19 bp, Homo sapiens
  siRNA target sequence for STARS (NM_139166.2,98-116).
gagcgccctccggaagata

SEQ ID NO: 409363 - DNA, 19 bp, Homo sapiens
  siRNA target sequence for STARS (NM_139166.2,234-252).
cctcaagctcctaaaccaa

SEQ ID NO: 409364 - DNA, 19 bp, Homo sapiens
  siRNA target sequence for STARS (NM_139166.2,235-253).
ctcaagctcctaaaccaat

SEQ ID NO: 409365 - DNA, 19 bp, Homo sapiens
  siRNA target sequence for STARS (NM_139166.2,354-372).
gaggtttctcacatcaaaa

SEQ ID NO: 409366 - DNA, 19 bp, Homo sapiens
  siRNA target sequence for STARS (NM_139166.2,391-409).
cggtggtcagcaagactta

SEQ ID NO: 409367 - DNA, 19 bp, Homo sapiens
  siRNA target sequence for STARS (NM_139166.2,475-493).
ctgggcagccagagaatga

SEQ ID NO: 409368 - DNA, 19 bp, Homo sapiens
  siRNA target sequence for STARS (NM_139166.2,719-737).
ctcccaggtaaacagattt

SEQ ID NO: 409369 - DNA, 19 bp, Homo sapiens
  siRNA target sequence for STARS (NM_139166.2,722-740).
ccaggtaaacagatttaca

SEQ ID NO: 409370 - DNA, 19 bp, Homo sapiens
  siRNA target sequence for STARS (NM_139166.2,752-770).
ctgcaaagcccaacagaaa

SEQ ID NO: 409371 - DNA, 19 bp, Homo sapiens
  siRNA target sequence for STARS (NM_139166.2,775-793).
gcccagtgggcaacttgaa

SEQ ID NO: 409372 - DNA, 19 bp, Homo sapiens
  siRNA target sequence for STARS (NM_139166.2,776-794).
cccagtgggcaacttgaaa

SEQ ID NO: 409373 - DNA, 19 bp, Homo sapiens
  siRNA target sequence for STARS (NM_139166.2,811-829).
gggctgatgaacacataca

SEQ ID NO: 409374 - DNA, 19 bp, Homo sapiens
  siRNA target sequence for STARS (NM_139166.2,813-831).
gctgatgaacacatacaat

SEQ ID NO: 409375 - DNA, 19 bp, Homo sapiens
  siRNA target sequence for STARS (NM_139166.2,881-899).
gtccacccgcctacacaaa

SEQ ID NO: 409376 - DNA, 19 bp, Homo sapiens
  siRNA target sequence for STARS (NM_139166.2,990-1008).
gacatgtgcttcattatct

SEQ ID NO: 409377 - DNA, 19 bp, Homo sapiens
  siRNA target sequence for STARS (NM_139166.2,1035-1053).
ggcaagatccaggttactt

SEQ ID NO: 409378 - DNA, 19 bp, Homo sapiens
  siRNA target sequence for STARS (NM_139166.2,1040-1058).
gatccaggttacttttgga

SEQ ID NO: 409379 - DNA, 19 bp, Homo sapiens
  siRNA target sequence for STARS (NM_139166.2,1068-1086).
gacagatacgttcgtattt

SEQ ID NO: 409380 - DNA, 19 bp, Homo sapiens
  siRNA target sequence for STARS (NM_139166.2,1072-1090).
gatacgttcgtatttcaga

SEQ ID NO: 409381 - DNA, 19 bp, Homo sapiens
  siRNA target sequence for STARS (NM_139166.2,1109-1127).
catgcgtgccaggaaacat

SEQ ID NO: 409382 - DNA, 19 bp, Homo sapiens
  siRNA target sequence for STARS (NM_139166.2,1168-1186).
gagatgaccatgttgtgat

SEQ ID NO: 409383 - DNA, 19 bp, Homo sapiens
  siRNA target sequence for STARS (NM_139166.2,1170-1188).
gatgaccatgttgtgatta

SEQ ID NO: 409384 - DNA, 19 bp, Homo sapiens
  siRNA target sequence for SGCZ (NM_139167.1,5-23).
cacgagaacaatacatact

SEQ ID NO: 409385 - DNA, 19 bp, Homo sapiens
  siRNA target sequence for SGCZ (NM_139167.1,42-60).
cctgccaaggactgagaat

SEQ ID NO: 409386 - DNA, 19 bp, Homo sapiens
  siRNA target sequence for SGCZ (NM_139167.1,92-110).
ggcgaaagaggtgcttata

SEQ ID NO: 409387 - DNA, 19 bp, Homo sapiens
  siRNA target sequence for SGCZ (NM_139167.1,94-112).
cgaaagaggtgcttatact

SEQ ID NO: 409388 - DNA, 19 bp, Homo sapiens
  siRNA target sequence for SGCZ (NM_139167.1,99-117).
gaggtgcttatacttcttt

SEQ ID NO: 409389 - DNA, 19 bp, Homo sapiens
  siRNA target sequence for SGCZ (NM_139167.1,101-119).
ggtgcttatacttctttgt

SEQ ID NO: 409390 - DNA, 19 bp, Homo sapiens
  siRNA target sequence for SGCZ (NM_139167.1,126-144).
gctgttggttaccatgata

SEQ ID NO: 409391 - DNA, 19 bp, Homo sapiens
  siRNA target sequence for SGCZ (NM_139167.1,154-172).
gccatgacaatatggatat

SEQ ID NO: 409392 - DNA, 19 bp, Homo sapiens
  siRNA target sequence for SGCZ (NM_139167.1,155-173).
ccatgacaatatggatatt

SEQ ID NO: 409393 - DNA, 19 bp, Homo sapiens
  siRNA target sequence for SGCZ (NM_139167.1,174-192).
gaaagttatgaatttcact

SEQ ID NO: 409394 - DNA, 19 bp, Homo sapiens
  siRNA target sequence for SGCZ (NM_139167.1,230-248).
gaatccgacttgaaggtat

SEQ ID NO: 409395 - DNA, 19 bp, Homo sapiens
  siRNA target sequence for SGCZ (NM_139167.1,234-252).
ccgacttgaaggtatatct

SEQ ID NO: 409396 - DNA, 19 bp, Homo sapiens
  siRNA target sequence for SGCZ (NM_139167.1,236-254).
gacttgaaggtatatctga

SEQ ID NO: 409397 - DNA, 19 bp, Homo sapiens
  siRNA target sequence for SGCZ (NM_139167.1,251-269).
ctgagtttctacttccatt

SEQ ID NO: 409398 - DNA, 19 bp, Homo sapiens
  siRNA target sequence for SGCZ (NM_139167.1,259-277).
ctacttccattgtatgtga

SEQ ID NO: 409399 - DNA, 19 bp, Homo sapiens
  siRNA target sequence for SGCZ (NM_139167.1,316-334).
cagtctgacaggaatgtca

SEQ ID NO: 409400 - DNA, 19 bp, Homo sapiens
  siRNA target sequence for SGCZ (NM_139167.1,479-497).
ccattggggctgaaaagct

SEQ ID NO: 409401 - DNA, 19 bp, Homo sapiens
  siRNA target sequence for SGCZ (NM_139167.1,510-528).
cactgaaggagccgtattt

SEQ ID NO: 409402 - DNA, 19 bp, Homo sapiens
  siRNA target sequence for SGCZ (NM_139167.1,560-578).
cagagccatcccaagatct

SEQ ID NO: 409403 - DNA, 19 bp, Homo sapiens
  siRNA target sequence for SGCZ (NM_139167.1,592-610).
cccaccagatccttgatca

SEQ ID NO: 409404 - DNA, 19 bp, Homo sapiens
  siRNA target sequence for SGCZ (NM_139167.1,593-611).
ccaccagatccttgatcat

SEQ ID NO: 409405 - DNA, 19 bp, Homo sapiens
  siRNA target sequence for SGCZ (NM_139167.1,676-694).
gagctccatctgcaatcta

SEQ ID NO: 409406 - DNA, 19 bp, Homo sapiens
  siRNA target sequence for SGCZ (NM_139167.1,678-696).
gctccatctgcaatctaca

SEQ ID NO: 409407 - DNA, 19 bp, Homo sapiens
  siRNA target sequence for SGCZ (NM_139167.1,725-743).
caatcaagctgggaaatct

SEQ ID NO: 409408 - DNA, 19 bp, Homo sapiens
  siRNA target sequence for SGCZ (NM_139167.1,788-806).
ctcgacagacagtgtatga

SEQ ID NO: 409409 - DNA, 19 bp, Homo sapiens
  siRNA target sequence for SGCZ (NM_139167.1,791-809).
gacagacagtgtatgaact

SEQ ID NO: 409410 - DNA, 19 bp, Homo sapiens
  siRNA target sequence for SGCZ (NM_139167.1,818-836).
gccccaatggcaaacttta

SEQ ID NO: 409411 - DNA, 19 bp, Homo sapiens
  siRNA target sequence for SGCZ (NM_139167.1,821-839).
ccaatggcaaactttacct

SEQ ID NO: 409412 - DNA, 19 bp, Homo sapiens
  siRNA target sequence for SGCZ (NM_139167.1,868-886).
cagtccagtagcaacatct

SEQ ID NO: 409413 - DNA, 19 bp, Homo sapiens
  siRNA target sequence for LOC146562 (NM_139170.1,592-610).
catcttccagcgaaaccaa

SEQ ID NO: 409414 - DNA, 19 bp, Homo sapiens
  siRNA target sequence for LOC146562 (NM_139170.1,890-908).
ggaagcctgtctttcaaca

SEQ ID NO: 409415 - DNA, 19 bp, Homo sapiens
  siRNA target sequence for LOC146562 (NM_139170.1,994-1012).
cagcactgcctcacaagaa

SEQ ID NO: 409416 - DNA, 19 bp, Homo sapiens
  siRNA target sequence for LOC146562 (NM_139170.1,1230-1248).
cgtgggatttggatgacat

SEQ ID NO: 409417 - DNA, 19 bp, Homo sapiens
  siRNA target sequence for LOC146562 (NM_139170.1,1317-1335).
ctgaccaccgccaagttca

SEQ ID NO: 409418 - DNA, 19 bp, Homo sapiens
  siRNA target sequence for MDAC1 (NM_139172.1,71-89).
cggcagacggaaatggaat

SEQ ID NO: 409419 - DNA, 19 bp, Homo sapiens
  siRNA target sequence for LOC150159 (NM_139173.1,162-180).
gaaaacttccaaacatcta

SEQ ID NO: 409420 - DNA, 19 bp, Homo sapiens
  siRNA target sequence for LOC150159 (NM_139173.1,197-215).
cattgatcctaataatact

SEQ ID NO: 409421 - DNA, 19 bp, Homo sapiens
  siRNA target sequence for LOC150159 (NM_139173.1,306-324).
ggagtattgaatgtaatta

SEQ ID NO: 409422 - DNA, 19 bp, Homo sapiens
  siRNA target sequence for LOC150159 (NM_139173.1,307-325).
gagtattgaatgtaattat

SEQ ID NO: 409423 - DNA, 19 bp, Homo sapiens
  siRNA target sequence for RNF133 (NM_139175.1,349-367).
ggatggcttatatgaacat

SEQ ID NO: 409424 - DNA, 19 bp, Homo sapiens
  siRNA target sequence for RNF133 (NM_139175.1,404-422).
gggagagactggagtcttt

SEQ ID NO: 409425 - DNA, 19 bp, Homo sapiens
  siRNA target sequence for RNF133 (NM_139175.1,443-461).
gagagtggcaggagttata

SEQ ID NO: 409426 - DNA, 19 bp, Homo sapiens
  siRNA target sequence for RNF133 (NM_139175.1,445-463).
gagtggcaggagttatagt

SEQ ID NO: 409427 - DNA, 19 bp, Homo sapiens
  siRNA target sequence for RNF133 (NM_139175.1,489-507).
gcatgtaatcccaatacca

SEQ ID NO: 409428 - DNA, 19 bp, Homo sapiens
  siRNA target sequence for RNF133 (NM_139175.1,565-583).
gtaccttcacacagaaaat

SEQ ID NO: 409429 - DNA, 19 bp, Homo sapiens
  siRNA target sequence for RNF133 (NM_139175.1,607-625).
ccagtggagtgatcatcta

SEQ ID NO: 409430 - DNA, 19 bp, Homo sapiens
  siRNA target sequence for RNF133 (NM_139175.1,613-631).
gagtgatcatctataacgt

SEQ ID NO: 409431 - DNA, 19 bp, Homo sapiens
  siRNA target sequence for DEPC-1 (NM_139178.1,444-462).
cctgggctgcccctgttaa

SEQ ID NO: 409432 - DNA, 19 bp, Homo sapiens
  siRNA target sequence for DEPC-1 (NM_139178.1,608-626).
gagccacgagtgattgaca

SEQ ID NO: 409433 - DNA, 19 bp, Homo sapiens
  siRNA target sequence for DEPC-1 (NM_139178.1,625-643).
cagagagggtgtgtatgaa

SEQ ID NO: 409434 - DNA, 19 bp, Homo sapiens
  siRNA target sequence for DEPC-1 (NM_139178.1,652-670).
gtcacccacaggtgtatct

SEQ ID NO: 409435 - DNA, 19 bp, Homo sapiens
  siRNA target sequence for DEPC-1 (NM_139178.1,663-681).
gtgtatctagggtctgttt

SEQ ID NO: 409436 - DNA, 19 bp, Homo sapiens
  siRNA target sequence for DEPC-1 (NM_139178.1,766-784).
catcagagaggatataact

SEQ ID NO: 409437 - DNA, 19 bp, Homo sapiens
  siRNA target sequence for DEPC-1 (NM_139178.1,844-862).
cactatggaaccaaatcct

SEQ ID NO: 409438 - DNA, 19 bp, Homo sapiens
  siRNA target sequence for DEPC-1 (NM_139178.1,872-890).
cctgtgctgcgcacactaa

SEQ ID NO: 409439 - DNA, 19 bp, Homo sapiens
  siRNA target sequence for DEPC-1 (NM_139178.1,875-893).
gtgctgcgcacactaaaga

SEQ ID NO: 409440 - DNA, 19 bp, Homo sapiens
  siRNA target sequence for DEPC-1 (NM_139178.1,931-949).
cttactctgcaatctttat

SEQ ID NO: 409441 - DNA, 19 bp, Homo sapiens
  siRNA target sequence for DEPC-1 (NM_139178.1,1010-1028).
cccattattgcttcactaa

SEQ ID NO: 409442 - DNA, 19 bp, Homo sapiens
  siRNA target sequence for DEPC-1 (NM_139178.1,1035-1053).
gtgccacacgcacatttga

SEQ ID NO: 409443 - DNA, 19 bp, Homo sapiens
  siRNA target sequence for DEPC-1 (NM_139178.1,1037-1055).
gccacacgcacatttgaga

SEQ ID NO: 409444 - DNA, 19 bp, Homo sapiens
  siRNA target sequence for DEPC-1 (NM_139178.1,1038-1056).
ccacacgcacatttgagat

SEQ ID NO: 409445 - DNA, 19 bp, Homo sapiens
  siRNA target sequence for DEPC-1 (NM_139178.1,1124-1142).
gatcatgggaccttgttaa

SEQ ID NO: 409446 - DNA, 19 bp, Homo sapiens
  siRNA target sequence for DEPC-1 (NM_139178.1,1127-1145).
catgggaccttgttaatca

SEQ ID NO: 409447 - DNA, 19 bp, Homo sapiens
  siRNA target sequence for DEPC-1 (NM_139178.1,1222-1240).
gacctttcggacagtctat

SEQ ID NO: 409448 - DNA, 19 bp, Homo sapiens
  siRNA target sequence for ADAMTSL1 (NM_139238.1,1712-1730).
caggtgctcctgtctttct

SEQ ID NO: 409449 - DNA, 19 bp, Homo sapiens
  siRNA target sequence for ADAMTSL1 (NM_139238.1,1863-1881).
gtggcctgcaggatttcga

SEQ ID NO: 409450 - DNA, 19 bp, Homo sapiens
  siRNA target sequence for ADAMTSL1 (NM_139238.1,1955-1973).
gtggtgagctgcttgaaca

SEQ ID NO: 409451 - DNA, 19 bp, Homo sapiens
  siRNA target sequence for ADAMTSL1 (NM_139238.1,1957-1975).
ggtgagctgcttgaacaaa

SEQ ID NO: 409452 - DNA, 19 bp, Homo sapiens
  siRNA target sequence for ADAMTSL1 (NM_139238.1,2038-2056).
gaagtcctgcaatttggat

SEQ ID NO: 409453 - DNA, 19 bp, Homo sapiens
  siRNA target sequence for ADAMTSL1 (NM_139238.1,2095-2113).
cgcctgcaacgttctttgt

SEQ ID NO: 409454 - DNA, 19 bp, Homo sapiens
  siRNA target sequence for ADAMTSL1 (NM_139238.1,2096-2114).
gcctgcaacgttctttgtt

SEQ ID NO: 409455 - DNA, 19 bp, Homo sapiens
  siRNA target sequence for LOC92346 (NM_139240.2,367-385).
gtttcaagttccagatgtt

SEQ ID NO: 409456 - DNA, 19 bp, Homo sapiens
  siRNA target sequence for LOC92346 (NM_139240.2,470-488).
gtacaaccaagaacaatga

SEQ ID NO: 409457 - DNA, 19 bp, Homo sapiens
  siRNA target sequence for LOC92346 (NM_139240.2,493-511).
cccagatgatccaaaagca

SEQ ID NO: 409458 - DNA, 19 bp, Homo sapiens
  siRNA target sequence for LOC92346 (NM_139240.2,518-536).
gagaattgtatgagttata

SEQ ID NO: 409459 - DNA, 19 bp, Homo sapiens
  siRNA target sequence for LOC92346 (NM_139240.2,543-561).
gtcttcatcaacccaaatt

SEQ ID NO: 409460 - DNA, 19 bp, Homo sapiens
  siRNA target sequence for LOC92346 (NM_139240.2,645-663).
ctgtcttccacggattact

SEQ ID NO: 409461 - DNA, 19 bp, Homo sapiens
  siRNA target sequence for LOC92346 (NM_139240.2,666-684).
cagaggcctacaaaactct

SEQ ID NO: 409462 - DNA, 19 bp, Homo sapiens
  siRNA target sequence for LOC92346 (NM_139240.2,670-688).
ggcctacaaaactctaaaa

SEQ ID NO: 409463 - DNA, 19 bp, Homo sapiens
  siRNA target sequence for LOC92346 (NM_139240.2,709-727).
gcccagaaaggaaccaata

SEQ ID NO: 409464 - DNA, 19 bp, Homo sapiens
  siRNA target sequence for STXBP5 (NM_139244.2,622-640).
gactgttcgccatggattt

SEQ ID NO: 409465 - DNA, 19 bp, Homo sapiens
  siRNA target sequence for STXBP5 (NM_139244.2,725-743).
ggtcgtccaggagtagaat

SEQ ID NO: 409466 - DNA, 19 bp, Homo sapiens
  siRNA target sequence for STXBP5 (NM_139244.2,728-746).
cgtccaggagtagaatgtt

SEQ ID NO: 409467 - DNA, 19 bp, Homo sapiens
  siRNA target sequence for STXBP5 (NM_139244.2,731-749).
ccaggagtagaatgttatt

SEQ ID NO: 409468 - DNA, 19 bp, Homo sapiens
  siRNA target sequence for STXBP5 (NM_139244.2,824-842).
gctgatgacaccttacact

SEQ ID NO: 409469 - DNA, 19 bp, Homo sapiens
  siRNA target sequence for STXBP5 (NM_139244.2,827-845).
gatgacaccttacacttat

SEQ ID NO: 409470 - DNA, 19 bp, Homo sapiens
  siRNA target sequence for STXBP5 (NM_139244.2,830-848).
gacaccttacacttatgga

SEQ ID NO: 409471 - DNA, 19 bp, Homo sapiens
  siRNA target sequence for STXBP5 (NM_139244.2,832-850).
caccttacacttatggaat

SEQ ID NO: 409472 - DNA, 19 bp, Homo sapiens
  siRNA target sequence for STXBP5 (NM_139244.2,834-852).
ccttacacttatggaattt

SEQ ID NO: 409473 - DNA, 19 bp, Homo sapiens
  siRNA target sequence for STXBP5 (NM_139244.2,862-880).
gaggcctgccatactacat

SEQ ID NO: 409474 - DNA, 19 bp, Homo sapiens
  siRNA target sequence for STXBP5 (NM_139244.2,875-893).
ctacattcgcttaaatttt

SEQ ID NO: 409475 - DNA, 19 bp, Homo sapiens
  siRNA target sequence for STXBP5 (NM_139244.2,949-967).
gggcactgaacgaggtaat

SEQ ID NO: 409476 - DNA, 19 bp, Homo sapiens
  siRNA target sequence for STXBP5 (NM_139244.2,950-968).
ggcactgaacgaggtaata

SEQ ID NO: 409477 - DNA, 19 bp, Homo sapiens
  siRNA target sequence for STXBP5 (NM_139244.2,951-969).
gcactgaacgaggtaatat

SEQ ID NO: 409478 - DNA, 19 bp, Homo sapiens
  siRNA target sequence for STXBP5 (NM_139244.2,952-970).
cactgaacgaggtaatata

SEQ ID NO: 409479 - DNA, 19 bp, Homo sapiens
  siRNA target sequence for STXBP5 (NM_139244.2,954-972).
ctgaacgaggtaatataca

SEQ ID NO: 409480 - DNA, 19 bp, Homo sapiens
  siRNA target sequence for STXBP5 (NM_139244.2,956-974).
gaacgaggtaatatacata

SEQ ID NO: 409481 - DNA, 19 bp, Homo sapiens
  siRNA target sequence for STXBP5 (NM_139244.2,1058-1076).
ggacctgtggtccatataa

SEQ ID NO: 409482 - DNA, 19 bp, Homo sapiens
  siRNA target sequence for STXBP5 (NM_139244.2,1064-1082).
gtggtccatataagtgata

SEQ ID NO: 409483 - DNA, 19 bp, Homo sapiens
  siRNA target sequence for STXBP5 (NM_139244.2,1066-1084).
ggtccatataagtgataat

SEQ ID NO: 409484 - DNA, 19 bp, Homo sapiens
  siRNA target sequence for STXBP5 (NM_139244.2,1069-1087).
ccatataagtgataatcca

SEQ ID NO: 409485 - DNA, 19 bp, Homo sapiens
  siRNA target sequence for STXBP5 (NM_139244.2,1070-1088).
catataagtgataatccaa

SEQ ID NO: 409486 - DNA, 19 bp, Homo sapiens
  siRNA target sequence for STXBP5 (NM_139244.2,1091-1109).
gacgagggaaagcttttga

SEQ ID NO: 409487 - DNA, 19 bp, Homo sapiens
  siRNA target sequence for STXBP5 (NM_139244.2,1103-1121).
cttttgattggctttgaat

SEQ ID NO: 409488 - DNA, 19 bp, Homo sapiens
  siRNA target sequence for STXBP5 (NM_139244.2,1160-1178).
gccgactacagatacacat

SEQ ID NO: 409489 - DNA, 19 bp, Homo sapiens
  siRNA target sequence for STXBP5 (NM_139244.2,1161-1179).
ccgactacagatacacata

SEQ ID NO: 409490 - DNA, 19 bp, Homo sapiens
  siRNA target sequence for STXBP5 (NM_139244.2,1162-1180).
cgactacagatacacatat

SEQ ID NO: 409491 - DNA, 19 bp, Homo sapiens
  siRNA target sequence for STXBP5 (NM_139244.2,1244-1262).
gatggcaccttgactatat

SEQ ID NO: 409492 - DNA, 19 bp, Homo sapiens
  siRNA target sequence for STXBP5 (NM_139244.2,1247-1265).
ggcaccttgactatatgga

SEQ ID NO: 409493 - DNA, 19 bp, Homo sapiens
  siRNA target sequence for STXBP5 (NM_139244.2,1248-1266).
gcaccttgactatatggaa

SEQ ID NO: 409494 - DNA, 19 bp, Homo sapiens
  siRNA target sequence for STXBP5 (NM_139244.2,1249-1267).
caccttgactatatggaat

SEQ ID NO: 409495 - DNA, 19 bp, Homo sapiens
  siRNA target sequence for STXBP5 (NM_139244.2,1281-1299).
ctaaaccagtacagacaat

SEQ ID NO: 409496 - DNA, 19 bp, Homo sapiens
  siRNA target sequence for STXBP5 (NM_139244.2,1353-1371).
ctatcctcaaggtggaatt

SEQ ID NO: 409497 - DNA, 19 bp, Homo sapiens
  siRNA target sequence for STXBP5 (NM_139244.2,1358-1376).
ctcaaggtggaattcaaaa

SEQ ID NO: 409498 - DNA, 19 bp, Homo sapiens
  siRNA target sequence for STXBP5 (NM_139244.2,1367-1385).
gaattcaaaacgactagat

SEQ ID NO: 409499 - DNA, 19 bp, Homo sapiens
  siRNA target sequence for STXBP5 (NM_139244.2,1412-1430).
ggaggtttgtcatatgata

SEQ ID NO: 409500 - DNA, 19 bp, Homo sapiens
  siRNA target sequence for STXBP5 (NM_139244.2,1481-1499).
gtgctagaaatggactatt

SEQ ID NO: 409501 - DNA, 19 bp, Homo sapiens
  siRNA target sequence for STXBP5 (NM_139244.2,1492-1510).
ggactattcaattgttgat

SEQ ID NO: 409502 - DNA, 19 bp, Homo sapiens
  siRNA target sequence for STXBP5 (NM_139244.2,1493-1511).
gactattcaattgttgatt

SEQ ID NO: 409503 - DNA, 19 bp, Homo sapiens
  siRNA target sequence for STXBP5 (NM_139244.2,1563-1581).
ctgtggttgttcttctaga

SEQ ID NO: 409504 - DNA, 19 bp, Homo sapiens
  siRNA target sequence for STXBP5 (NM_139244.2,1608-1626).
cacaaaatggatatcctat

SEQ ID NO: 409505 - DNA, 19 bp, Homo sapiens
  siRNA target sequence for STXBP5 (NM_139244.2,1610-1628).
caaaatggatatcctatat

SEQ ID NO: 409506 - DNA, 19 bp, Homo sapiens
  siRNA target sequence for STXBP5 (NM_139244.2,1616-1634).
ggatatcctatatttgaaa

SEQ ID NO: 409507 - DNA, 19 bp, Homo sapiens
  siRNA target sequence for STXBP5 (NM_139244.2,1639-1657).
ctaccctttgagtatacat

SEQ ID NO: 409508 - DNA, 19 bp, Homo sapiens
  siRNA target sequence for STXBP5 (NM_139244.2,1655-1673).
catgagtcccctgttacat

SEQ ID NO: 409509 - DNA, 19 bp, Homo sapiens
  siRNA target sequence for STXBP5 (NM_139244.2,1658-1676).
gagtcccctgttacatgtt

SEQ ID NO: 409510 - DNA, 19 bp, Homo sapiens
  siRNA target sequence for STXBP5 (NM_139244.2,1705-1723).
ccttattcctgcactttat

SEQ ID NO: 409511 - DNA, 19 bp, Homo sapiens
  siRNA target sequence for STXBP5 (NM_139244.2,1737-1755).
gacagaaacgtcaaggtta

SEQ ID NO: 409512 - DNA, 19 bp, Homo sapiens
  siRNA target sequence for STXBP5 (NM_139244.2,1745-1763).
cgtcaaggttacagcaaaa

SEQ ID NO: 409513 - DNA, 19 bp, Homo sapiens
  siRNA target sequence for STXBP5 (NM_139244.2,1794-1812).
gcttgggtgctcaaagtta

SEQ ID NO: 409514 - DNA, 19 bp, Homo sapiens
  siRNA target sequence for STXBP5 (NM_139244.2,1809-1827).
gttacccagaaataattat

SEQ ID NO: 409515 - DNA, 19 bp, Homo sapiens
  siRNA target sequence for STXBP5 (NM_139244.2,1838-1856).
gctgatgggtcagttaagt

SEQ ID NO: 409516 - DNA, 19 bp, Homo sapiens
  siRNA target sequence for STXBP5 (NM_139244.2,1839-1857).
ctgatgggtcagttaagtt

SEQ ID NO: 409517 - DNA, 19 bp, Homo sapiens
  siRNA target sequence for STXBP5 (NM_139244.2,1841-1859).
gatgggtcagttaagttct

SEQ ID NO: 409518 - DNA, 19 bp, Homo sapiens
  siRNA target sequence for STXBP5 (NM_139244.2,1871-1889).
gcaataactctacaagtat

SEQ ID NO: 409519 - DNA, 19 bp, Homo sapiens
  siRNA target sequence for STXBP5 (NM_139244.2,1878-1896).
ctctacaagtattatataa

SEQ ID NO: 409520 - DNA, 19 bp, Homo sapiens
  siRNA target sequence for STXBP5 (NM_139244.2,1897-1915).
gctaaagacatctaaagta

SEQ ID NO: 409521 - DNA, 19 bp, Homo sapiens
  siRNA target sequence for STXBP5 (NM_139244.2,1944-1962).
ggccaaacacagacattgt

SEQ ID NO: 409522 - DNA, 19 bp, Homo sapiens
  siRNA target sequence for STXBP5 (NM_139244.2,1945-1963).
gccaaacacagacattgta

SEQ ID NO: 409523 - DNA, 19 bp, Homo sapiens
  siRNA target sequence for STXBP5 (NM_139244.2,2020-2038).
gtgcatcgctggagtttca

SEQ ID NO: 409524 - DNA, 19 bp, Homo sapiens
  siRNA target sequence for STXBP5 (NM_139244.2,2033-2051).
gtttcagctcatgtcatta

SEQ ID NO: 409525 - DNA, 19 bp, Homo sapiens
  siRNA target sequence for STXBP5 (NM_139244.2,2065-2083).
caagcaggaagtaatcaca

SEQ ID NO: 409526 - DNA, 19 bp, Homo sapiens
  siRNA target sequence for STXBP5 (NM_139244.2,2094-2112).
cgatgcttgaagttcgatt

SEQ ID NO: 409527 - DNA, 19 bp, Homo sapiens
  siRNA target sequence for STXBP5 (NM_139244.2,2095-2113).
gatgcttgaagttcgatta

SEQ ID NO: 409528 - DNA, 19 bp, Homo sapiens
  siRNA target sequence for STXBP5 (NM_139244.2,2098-2116).
gcttgaagttcgattatta

SEQ ID NO: 409529 - DNA, 19 bp, Homo sapiens
  siRNA target sequence for STXBP5 (NM_139244.2,2099-2117).
cttgaagttcgattattat

SEQ ID NO: 409530 - DNA, 19 bp, Homo sapiens
  siRNA target sequence for STXBP5 (NM_139244.2,2105-2123).
gttcgattattatatgaga

SEQ ID NO: 409531 - DNA, 19 bp, Homo sapiens
  siRNA target sequence for STXBP5 (NM_139244.2,2108-2126).
cgattattatatgagataa

SEQ ID NO: 409532 - DNA, 19 bp, Homo sapiens
  siRNA target sequence for STXBP5 (NM_139244.2,2227-2245).
cagtagcagttcatctgat

SEQ ID NO: 409533 - DNA, 19 bp, Homo sapiens
  siRNA target sequence for STXBP5 (NM_139244.2,2241-2259).
ctgatgggcttcgtgataa

SEQ ID NO: 409534 - DNA, 19 bp, Homo sapiens
  siRNA target sequence for STXBP5 (NM_139244.2,2255-2273).
gataatgtaccttgtttaa

SEQ ID NO: 409535 - DNA, 19 bp, Homo sapiens
  siRNA target sequence for STXBP5 (NM_139244.2,2307-2325).
gttatcaaacagaactagt

SEQ ID NO: 409536 - DNA, 19 bp, Homo sapiens
  siRNA target sequence for STXBP5 (NM_139244.2,2321-2339).
ctagttattcagttggttt

SEQ ID NO: 409537 - DNA, 19 bp, Homo sapiens
  siRNA target sequence for STXBP5 (NM_139244.2,2377-2395).
ggcagtcaattcttcctat

SEQ ID NO: 409538 - DNA, 19 bp, Homo sapiens
  siRNA target sequence for STXBP5 (NM_139244.2,2391-2409).
cctatggactggtggtttt

SEQ ID NO: 409539 - DNA, 19 bp, Homo sapiens
  siRNA target sequence for STXBP5 (NM_139244.2,2404-2422).
ggtttttggcaattgcaat

SEQ ID NO: 409540 - DNA, 19 bp, Homo sapiens
  siRNA target sequence for STXBP5 (NM_139244.2,2470-2488).
gggcactattgaattatat

SEQ ID NO: 409541 - DNA, 19 bp, Homo sapiens
  siRNA target sequence for STXBP5 (NM_139244.2,2516-2534).
ccccgatctcctcgtaaat

SEQ ID NO: 409542 - DNA, 19 bp, Homo sapiens
  siRNA target sequence for STXBP5 (NM_139244.2,2518-2536).
ccgatctcctcgtaaatct

SEQ ID NO: 409543 - DNA, 19 bp, Homo sapiens
  siRNA target sequence for STXBP5 (NM_139244.2,2549-2567).
ggagccggtctgtgtgata

SEQ ID NO: 409544 - DNA, 19 bp, Homo sapiens
  siRNA target sequence for STXBP5 (NM_139244.2,2550-2568).
gagccggtctgtgtgatat

SEQ ID NO: 409545 - DNA, 19 bp, Homo sapiens
  siRNA target sequence for STXBP5 (NM_139244.2,2552-2570).
gccggtctgtgtgatatta

SEQ ID NO: 409546 - DNA, 19 bp, Homo sapiens
  siRNA target sequence for STXBP5 (NM_139244.2,2554-2572).
cggtctgtgtgatattagt

SEQ ID NO: 409547 - DNA, 19 bp, Homo sapiens
  siRNA target sequence for STXBP5 (NM_139244.2,2588-2606).
ccagaggatcgctgcaaat

SEQ ID NO: 409548 - DNA, 19 bp, Homo sapiens
  siRNA target sequence for STXBP5 (NM_139244.2,2640-2658).
gcttacctactgacctaaa

SEQ ID NO: 409549 - DNA, 19 bp, Homo sapiens
  siRNA target sequence for STXBP5 (NM_139244.2,2653-2671).
cctaaagcctgatttagat

SEQ ID NO: 409550 - DNA, 19 bp, Homo sapiens
  siRNA target sequence for STXBP5 (NM_139244.2,2692-2710).
ccgatcacggagttcaagt

SEQ ID NO: 409551 - DNA, 19 bp, Homo sapiens
  siRNA target sequence for STXBP5 (NM_139244.2,2741-2759).
gcgatctccgctcttcatt

SEQ ID NO: 409552 - DNA, 19 bp, Homo sapiens
  siRNA target sequence for STXBP5 (NM_139244.2,2742-2760).
cgatctccgctcttcattt

SEQ ID NO: 409553 - DNA, 19 bp, Homo sapiens
  siRNA target sequence for STXBP5 (NM_139244.2,2882-2900).
cttcagccagtaattgtgt

SEQ ID NO: 409554 - DNA, 19 bp, Homo sapiens
  siRNA target sequence for STXBP5 (NM_139244.2,2899-2917).
gtctccaagtggtactata

SEQ ID NO: 409555 - DNA, 19 bp, Homo sapiens
  siRNA target sequence for STXBP5 (NM_139244.2,2957-2975).
gataccacaggctgcttaa

SEQ ID NO: 409556 - DNA, 19 bp, Homo sapiens
  siRNA target sequence for STXBP5 (NM_139244.2,2962-2980).
cacaggctgcttaatacca

SEQ ID NO: 409557 - DNA, 19 bp, Homo sapiens
  siRNA target sequence for STXBP5 (NM_139244.2,3100-3118).
ccagtatgcagtgatatgt

SEQ ID NO: 409558 - DNA, 19 bp, Homo sapiens
  siRNA target sequence for STXBP5 (NM_139244.2,3103-3121).
gtatgcagtgatatgttct

SEQ ID NO: 409559 - DNA, 19 bp, Homo sapiens
  siRNA target sequence for STXBP5 (NM_139244.2,3153-3171).
cccagaactgtgcttataa

SEQ ID NO: 409560 - DNA, 19 bp, Homo sapiens
  siRNA target sequence for STXBP5 (NM_139244.2,3218-3236).
gcattgagtaacagtatct

SEQ ID NO: 409561 - DNA, 19 bp, Homo sapiens
  siRNA target sequence for STXBP5 (NM_139244.2,3256-3274).
caatggacatataatgact

SEQ ID NO: 409562 - DNA, 19 bp, Homo sapiens
  siRNA target sequence for STXBP5 (NM_139244.2,3294-3312).
gacctctgttggatgtgta

SEQ ID NO: 409563 - DNA, 19 bp, Homo sapiens
  siRNA target sequence for STXBP5 (NM_139244.2,3299-3317).
ctgttggatgtgtattact

SEQ ID NO: 409564 - DNA, 19 bp, Homo sapiens
  siRNA target sequence for STXBP5 (NM_139244.2,3341-3359).
gccagaacgttctgcttta

SEQ ID NO: 409565 - DNA, 19 bp, Homo sapiens
  siRNA target sequence for STXBP5 (NM_139244.2,3345-3363).
gaacgttctgctttaccaa

SEQ ID NO: 409566 - DNA, 19 bp, Homo sapiens
  siRNA target sequence for STXBP5 (NM_139244.2,3349-3367).
gttctgctttaccaacaat

SEQ ID NO: 409567 - DNA, 19 bp, Homo sapiens
  siRNA target sequence for STXBP5 (NM_139244.2,3360-3378).
ccaacaatggacaagcatt

SEQ ID NO: 409568 - DNA, 19 bp, Homo sapiens
  siRNA target sequence for STXBP5 (NM_139244.2,3361-3379).
caacaatggacaagcatta

SEQ ID NO: 409569 - DNA, 19 bp, Homo sapiens
  siRNA target sequence for STXBP5 (NM_139244.2,3403-3421).
ccagagacttacttatagt

SEQ ID NO: 409570 - DNA, 19 bp, Homo sapiens
  siRNA target sequence for STXBP5 (NM_139244.2,3491-3509).
ccaaacaggggattcttta

SEQ ID NO: 409571 - DNA, 19 bp, Homo sapiens
  siRNA target sequence for STXBP5 (NM_139244.2,3492-3510).
caaacaggggattctttaa

SEQ ID NO: 409572 - DNA, 19 bp, Homo sapiens
  siRNA target sequence for STXBP5 (NM_139244.2,3522-3540).
gaggtggtgcacaatctct

SEQ ID NO: 409573 - DNA, 19 bp, Homo sapiens
  siRNA target sequence for STXBP5 (NM_139244.2,3588-3606).
ggagccttgcacagcatat

SEQ ID NO: 409574 - DNA, 19 bp, Homo sapiens
  siRNA target sequence for STXBP5 (NM_139244.2,3589-3607).
gagccttgcacagcatatt

SEQ ID NO: 409575 - DNA, 19 bp, Homo sapiens
  siRNA target sequence for STXBP5 (NM_139244.2,3679-3697).
gctggcactagatgaaaga

SEQ ID NO: 409576 - DNA, 19 bp, Homo sapiens
  siRNA target sequence for STXBP5 (NM_139244.2,3710-3728).
ggcgatctggaagaaagaa

SEQ ID NO: 409577 - DNA, 19 bp, Homo sapiens
  siRNA target sequence for STXBP5 (NM_139244.2,3762-3780).
ctaaacatgctcatgagat

SEQ ID NO: 409578 - DNA, 19 bp, Homo sapiens
  siRNA target sequence for LOC158427 (NM_139246.3,303-321).
ctttgccctttttgtcaaa

SEQ ID NO: 409579 - DNA, 19 bp, Homo sapiens
  siRNA target sequence for LOC158427 (NM_139246.3,335-353).
caacaaaaaggagttttga

SEQ ID NO: 409580 - DNA, 19 bp, Homo sapiens
  siRNA target sequence for LOC158427 (NM_139246.3,397-415).
gaccaaaccagcatccata

SEQ ID NO: 409581 - DNA, 19 bp, Homo sapiens
  siRNA target sequence for LOC158427 (NM_139246.3,451-469).
caccagacagcttctattt

SEQ ID NO: 409582 - DNA, 19 bp, Homo sapiens
  siRNA target sequence for LOC158427 (NM_139246.3,580-598).
cctgatataagctgcttta

SEQ ID NO: 409583 - DNA, 19 bp, Homo sapiens
  siRNA target sequence for LOC158427 (NM_139246.3,581-599).
ctgatataagctgctttaa

SEQ ID NO: 409584 - DNA, 19 bp, Homo sapiens
  siRNA target sequence for LOC158427 (NM_139246.3,637-655).
ggggaggtgctcctttatt

SEQ ID NO: 409585 - DNA, 19 bp, Homo sapiens
  siRNA target sequence for LOC158427 (NM_139246.3,638-656).
gggaggtgctcctttatta

SEQ ID NO: 409586 - DNA, 19 bp, Homo sapiens
  siRNA target sequence for LOC158427 (NM_139246.3,821-839).
ccttcccattgtttaagga

SEQ ID NO: 409587 - DNA, 19 bp, Homo sapiens
  siRNA target sequence for LOC158427 (NM_139246.3,837-855).
ggatgacctgtgtaaagat

SEQ ID NO: 409588 - DNA, 19 bp, Homo sapiens
  siRNA target sequence for LOC158427 (NM_139246.3,900-918).
gcgtgttggtgtatttgaa

SEQ ID NO: 409589 - DNA, 19 bp, Homo sapiens
  siRNA target sequence for LOC158427 (NM_139246.3,983-1001).
ccccaggtgaatttcataa

SEQ ID NO: 409590 - DNA, 19 bp, Homo sapiens
  siRNA target sequence for LOC158427 (NM_139246.3,1033-1051).
caagaacaaagtgatacta

SEQ ID NO: 409591 - DNA, 19 bp, Homo sapiens
  siRNA target sequence for LOC158427 (NM_139246.3,1045-1063).
gatactatccttcttgatt

SEQ ID NO: 409592 - DNA, 19 bp, Homo sapiens
  siRNA target sequence for LOC158427 (NM_139246.3,1083-1101).
caaaataggacgattccaa

SEQ ID NO: 409593 - DNA, 19 bp, Homo sapiens
  siRNA target sequence for LOC158427 (NM_139246.3,1111-1129).
gccccagacatcaggaaat

SEQ ID NO: 409594 - DNA, 19 bp, Homo sapiens
  siRNA target sequence for LOC158427 (NM_139246.3,1140-1158).
ccctagctacgttgacaaa

SEQ ID NO: 409595 - DNA, 19 bp, Homo sapiens
  siRNA target sequence for LOC158427 (NM_139246.3,1141-1159).
cctagctacgttgacaaaa

SEQ ID NO: 409596 - DNA, 19 bp, Homo sapiens
  siRNA target sequence for LOC158427 (NM_139246.3,1142-1160).
ctagctacgttgacaaaaa

SEQ ID NO: 409597 - DNA, 19 bp, Homo sapiens
  siRNA target sequence for LOC158427 (NM_139246.3,1145-1163).
gctacgttgacaaaaatct

SEQ ID NO: 409598 - DNA, 19 bp, Homo sapiens
  siRNA target sequence for LOC158427 (NM_139246.3,1146-1164).
ctacgttgacaaaaatcta

SEQ ID NO: 409599 - DNA, 19 bp, Homo sapiens
  siRNA target sequence for LOC158427 (NM_139246.3,1381-1399).
gtgtcagagtgttcatact

SEQ ID NO: 409600 - DNA, 19 bp, Homo sapiens
  siRNA target sequence for LOC158427 (NM_139246.3,1405-1423).
gcccgctgggaccagtata

SEQ ID NO: 409601 - DNA, 19 bp, Homo sapiens
  siRNA target sequence for LOC158427 (NM_139246.3,1406-1424).
cccgctgggaccagtataa

SEQ ID NO: 409602 - DNA, 19 bp, Homo sapiens
  siRNA target sequence for LOC158427 (NM_139246.3,1407-1425).
ccgctgggaccagtataaa

SEQ ID NO: 409603 - DNA, 19 bp, Homo sapiens
  siRNA target sequence for LOC158427 (NM_139246.3,1409-1427).
gctgggaccagtataaact

SEQ ID NO: 409604 - DNA, 19 bp, Homo sapiens
  siRNA target sequence for LOC158427 (NM_139246.3,1585-1603).
cgacggccacgcataccta

SEQ ID NO: 409605 - DNA, 19 bp, Homo sapiens
  siRNA target sequence for LOC158427 (NM_139246.3,1595-1613).
gcatacctagggaactctt

SEQ ID NO: 409606 - DNA, 19 bp, Homo sapiens
  siRNA target sequence for LOC158427 (NM_139246.3,1666-1684).
gatgggccagtgcttatgt

SEQ ID NO: 409607 - DNA, 19 bp, Homo sapiens
  siRNA target sequence for ORMDL3 (NM_139280.1,295-313).
ccaacctcattcacaacat

SEQ ID NO: 409608 - DNA, 19 bp, Homo sapiens
  siRNA target sequence for ORMDL3 (NM_139280.1,306-324).
cacaacatgggcatgtata

SEQ ID NO: 409609 - DNA, 19 bp, Homo sapiens
  siRNA target sequence for ORMDL3 (NM_139280.1,427-445).
cggcctctcggaagttctt

SEQ ID NO: 409610 - DNA, 19 bp, Homo sapiens
  siRNA target sequence for ORMDL3 (NM_139280.1,429-447).
gcctctcggaagttcttga

SEQ ID NO: 409611 - DNA, 19 bp, Homo sapiens
  siRNA target sequence for ORMDL3 (NM_139280.1,566-584).
ccacggagtccggattttt

SEQ ID NO: 409612 - DNA, 19 bp, Homo sapiens
  siRNA target sequence for ORMDL3 (NM_139280.1,569-587).
cggagtccggatttttgga

SEQ ID NO: 409613 - DNA, 19 bp, Homo sapiens
  siRNA target sequence for ORMDL3 (NM_139280.1,570-588).
ggagtccggatttttggaa

SEQ ID NO: 409614 - DNA, 19 bp, Homo sapiens
  siRNA target sequence for LGI4 (NM_139284.1,789-807).
gattgaggacgatgcattt

SEQ ID NO: 409615 - DNA, 19 bp, Homo sapiens
  siRNA target sequence for LGI4 (NM_139284.1,1114-1132).
ctcgaccccaagactttca

SEQ ID NO: 409616 - DNA, 19 bp, Homo sapiens
  siRNA target sequence for LGI4 (NM_139284.1,1730-1748).
ccgaggccgaggatgtcta

SEQ ID NO: 409617 - DNA, 19 bp, Homo sapiens
  siRNA target sequence for LGI4 (NM_139284.1,1731-1749).
cgaggccgaggatgtctat

SEQ ID NO: 409618 - DNA, 19 bp, Homo sapiens
  siRNA target sequence for LGI4 (NM_139284.1,1827-1845).
ctgggacggctccatgttt

SEQ ID NO: 409619 - DNA, 19 bp, Homo sapiens
  siRNA target sequence for LGI4 (NM_139284.1,2030-2048).
cctttgcccacatcactat

SEQ ID NO: 409620 - DNA, 19 bp, Homo sapiens
  siRNA target sequence for AF15Q14 (NM_144508.1,2447-2465).
cacactgtcgtcattggat

SEQ ID NO: 409621 - DNA, 19 bp, Homo sapiens
  siRNA target sequence for AF15Q14 (NM_144508.1,2449-2467).
cactgtcgtcattggattt

SEQ ID NO: 409622 - DNA, 19 bp, Homo sapiens
  siRNA target sequence for AF15Q14 (NM_144508.1,2711-2729).
ccaaaaattgataagacta

SEQ ID NO: 409623 - DNA, 19 bp, Homo sapiens
  siRNA target sequence for AF15Q14 (NM_144508.1,4053-4071).
cctgtttaccaaatgttat

SEQ ID NO: 409624 - DNA, 19 bp, Homo sapiens
  siRNA target sequence for AF15Q14 (NM_144508.1,5319-5337).
cttcagactctattaacat

SEQ ID NO: 409625 - DNA, 19 bp, Homo sapiens
  siRNA target sequence for AF15Q14 (NM_144508.1,5326-5344).
ctctattaacatagaaact

SEQ ID NO: 409626 - DNA, 19 bp, Homo sapiens
  siRNA target sequence for AF15Q14 (NM_144508.1,5538-5556).
ctgaagaggatatagataa

SEQ ID NO: 409627 - DNA, 19 bp, Homo sapiens
  siRNA target sequence for AF15Q14 (NM_144508.1,5559-5577).
gtgctaacagtgtattgat

SEQ ID NO: 409628 - DNA, 19 bp, Homo sapiens
  siRNA target sequence for AF15Q14 (NM_144508.1,5561-5579).
gctaacagtgtattgataa

SEQ ID NO: 409629 - DNA, 19 bp, Homo sapiens
  siRNA target sequence for AF15Q14 (NM_144508.1,5562-5580).
ctaacagtgtattgataaa

SEQ ID NO: 409630 - DNA, 19 bp, Homo sapiens
  siRNA target sequence for AF15Q14 (NM_144508.1,5659-5677).
cacttaccgcagtagtcaa

SEQ ID NO: 409631 - DNA, 19 bp, Homo sapiens
  siRNA target sequence for AF15Q14 (NM_144508.1,5661-5679).
cttaccgcagtagtcaaat

SEQ ID NO: 409632 - DNA, 19 bp, Homo sapiens
  siRNA target sequence for AF15Q14 (NM_144508.1,5665-5683).
ccgcagtagtcaaatggaa

SEQ ID NO: 409633 - DNA, 19 bp, Homo sapiens
  siRNA target sequence for AF15Q14 (NM_144508.1,5666-5684).
cgcagtagtcaaatggaat

SEQ ID NO: 409634 - DNA, 19 bp, Homo sapiens
  siRNA target sequence for AF15Q14 (NM_144508.1,5670-5688).
gtagtcaaatggaatcaca

SEQ ID NO: 409635 - DNA, 19 bp, Homo sapiens
  siRNA target sequence for AF15Q14 (NM_144508.1,5689-5707).
gtttctcagagatactatt

SEQ ID NO: 409636 - DNA, 19 bp, Homo sapiens
  siRNA target sequence for AF15Q14 (NM_144508.1,5695-5713).
cagagatactatttgtgaa

SEQ ID NO: 409637 - DNA, 19 bp, Homo sapiens
  siRNA target sequence for AF15Q14 (NM_144508.1,5732-5750).
ctccaagatgggagaataa

SEQ ID NO: 409638 - DNA, 19 bp, Homo sapiens
  siRNA target sequence for AF15Q14 (NM_144508.1,5776-5794).
ccaggtccacatcttgata

SEQ ID NO: 409639 - DNA, 19 bp, Homo sapiens
  siRNA target sequence for AF15Q14 (NM_144508.1,5780-5798).
gtccacatcttgatacaga

SEQ ID NO: 409640 - DNA, 19 bp, Homo sapiens
  siRNA target sequence for AF15Q14 (NM_144508.1,5824-5842).
caattttactgtaaacaca

SEQ ID NO: 409641 - DNA, 19 bp, Homo sapiens
  siRNA target sequence for AF15Q14 (NM_144508.1,5858-5876).
gacctgatgttaagtcaat

SEQ ID NO: 409642 - DNA, 19 bp, Homo sapiens
  siRNA target sequence for AF15Q14 (NM_144508.1,5860-5878).
cctgatgttaagtcaatat

SEQ ID NO: 409643 - DNA, 19 bp, Homo sapiens
  siRNA target sequence for AF15Q14 (NM_144508.1,5884-5902).
ccgacccaagatacagatt

SEQ ID NO: 409644 - DNA, 19 bp, Homo sapiens
  siRNA target sequence for AF15Q14 (NM_144508.1,5885-5903).
cgacccaagatacagattt

SEQ ID NO: 409645 - DNA, 19 bp, Homo sapiens
  siRNA target sequence for AF15Q14 (NM_144508.1,5899-5917).
gatttatagagaagattgt

SEQ ID NO: 409646 - DNA, 19 bp, Homo sapiens
  siRNA target sequence for AF15Q14 (NM_144508.1,5918-5936).
gaggctcgtcgccaaaaga

SEQ ID NO: 409647 - DNA, 19 bp, Homo sapiens
  siRNA target sequence for AF15Q14 (NM_144508.1,5920-5938).
ggctcgtcgccaaaagatt

SEQ ID NO: 409648 - DNA, 19 bp, Homo sapiens
  siRNA target sequence for AF15Q14 (NM_144508.1,5922-5940).
ctcgtcgccaaaagattga

SEQ ID NO: 409649 - DNA, 19 bp, Homo sapiens
  siRNA target sequence for AF15Q14 (NM_144508.1,5927-5945).
cgccaaaagattgaagaat

SEQ ID NO: 409650 - DNA, 19 bp, Homo sapiens
  siRNA target sequence for AF15Q14 (NM_144508.1,5958-5976).
catcgaaccaagataagct

SEQ ID NO: 409651 - DNA, 19 bp, Homo sapiens
  siRNA target sequence for AF15Q14 (NM_144508.1,6035-6053).
ctgaaggcctttggaattt

SEQ ID NO: 409652 - DNA, 19 bp, Homo sapiens
  siRNA target sequence for AF15Q14 (NM_144508.1,6037-6055).
gaaggcctttggaatttat

SEQ ID NO: 409653 - DNA, 19 bp, Homo sapiens
  siRNA target sequence for AF15Q14 (NM_144508.1,6157-6175).
gagggagaaacttcaaata

SEQ ID NO: 409654 - DNA, 19 bp, Homo sapiens
  siRNA target sequence for AF15Q14 (NM_144508.1,6347-6365).
gagcttcaaagaaatctct

SEQ ID NO: 409655 - DNA, 19 bp, Homo sapiens
  siRNA target sequence for AF15Q14 (NM_144508.1,6388-6406).
gcagacccttgctcaaata

SEQ ID NO: 409656 - DNA, 19 bp, Homo sapiens
  siRNA target sequence for AF15Q14 (NM_144508.1,6399-6417).
ctcaaatagactttatgca

SEQ ID NO: 409657 - DNA, 19 bp, Homo sapiens
  siRNA target sequence for AF15Q14 (NM_144508.1,6478-6496).
cgttgagtggagtgatgat

SEQ ID NO: 409658 - DNA, 19 bp, Homo sapiens
  siRNA target sequence for AF15Q14 (NM_144508.1,6489-6507).
gtgatgatcaagctgtatt

SEQ ID NO: 409659 - DNA, 19 bp, Homo sapiens
  siRNA target sequence for AF15Q14 (NM_144508.1,6491-6509).
gatgatcaagctgtattca

SEQ ID NO: 409660 - DNA, 19 bp, Homo sapiens
  siRNA target sequence for AF15Q14 (NM_144508.1,6575-6593).
ctggacaagcgttatagga

SEQ ID NO: 409661 - DNA, 19 bp, Homo sapiens
  siRNA target sequence for AF15Q14 (NM_144508.1,6580-6598).
caagcgttataggaagatt

SEQ ID NO: 409662 - DNA, 19 bp, Homo sapiens
  siRNA target sequence for AF15Q14 (NM_144508.1,6583-6601).
gcgttataggaagattgtt

SEQ ID NO: 409663 - DNA, 19 bp, Homo sapiens
  siRNA target sequence for AF15Q14 (NM_144508.1,6585-6603).
gttataggaagattgttga

SEQ ID NO: 409664 - DNA, 19 bp, Homo sapiens
  siRNA target sequence for AF15Q14 (NM_144508.1,6592-6610).
gaagattgttgatgtcaat

SEQ ID NO: 409665 - DNA, 19 bp, Homo sapiens
  siRNA target sequence for AF15Q14 (NM_144508.1,6595-6613).
gattgttgatgtcaatttt

SEQ ID NO: 409666 - DNA, 19 bp, Homo sapiens
  siRNA target sequence for AF15Q14 (NM_144508.1,6810-6828).
gatggggaccaaattataa

SEQ ID NO: 409667 - DNA, 19 bp, Homo sapiens
  siRNA target sequence for AF15Q14 (NM_144508.1,6815-6833).
ggaccaaattataacctaa

SEQ ID NO: 409668 - DNA, 19 bp, Homo sapiens
  siRNA target sequence for AF15Q14 (NM_144508.1,6816-6834).
gaccaaattataacctaat

SEQ ID NO: 409669 - DNA, 19 bp, Homo sapiens
  siRNA target sequence for AF15Q14 (NM_144508.1,6874-6892).
ctctagctccgcagcattt

SEQ ID NO: 409670 - DNA, 19 bp, Homo sapiens
  siRNA target sequence for AF15Q14 (NM_144508.1,6883-6901).
cgcagcatttgcaaagttt

SEQ ID NO: 409671 - DNA, 19 bp, Homo sapiens
  siRNA target sequence for AF15Q14 (NM_144508.1,6917-6935).
ctctcagcctattatccat

SEQ ID NO: 409672 - DNA, 19 bp, Homo sapiens
  siRNA target sequence for AF15Q14 (NM_144508.1,6972-6990).
ggaacactagccaagatga

SEQ ID NO: 409673 - DNA, 19 bp, Homo sapiens
  siRNA target sequence for AF15Q14 (NM_144508.1,6973-6991).
gaacactagccaagatgat

SEQ ID NO: 409674 - DNA, 19 bp, Homo sapiens
  siRNA target sequence for AF15Q14 (NM_144508.1,6976-6994).
cactagccaagatgatatt

SEQ ID NO: 409675 - DNA, 19 bp, Homo sapiens
  siRNA target sequence for FLJ32334 (NM_144565.1,60-78).
ctactttgggacacacatt

SEQ ID NO: 409676 - DNA, 19 bp, Homo sapiens
  siRNA target sequence for FLJ32334 (NM_144565.1,128-146).
gccagcatcatcatgatct

SEQ ID NO: 409677 - DNA, 19 bp, Homo sapiens
  siRNA target sequence for FLJ32334 (NM_144565.1,130-148).
cagcatcatcatgatcttt

SEQ ID NO: 409678 - DNA, 19 bp, Homo sapiens
  siRNA target sequence for FLJ32334 (NM_144565.1,221-239).
cgggtggtgaccagcttat

SEQ ID NO: 409679 - DNA, 19 bp, Homo sapiens
  siRNA target sequence for FLJ32334 (NM_144565.1,222-240).
gggtggtgaccagcttatt

SEQ ID NO: 409680 - DNA, 19 bp, Homo sapiens
  siRNA target sequence for FLJ32334 (NM_144565.1,316-334).
gcgcctgggtgagaactat

SEQ ID NO: 409681 - DNA, 19 bp, Homo sapiens
  siRNA target sequence for FLJ32334 (NM_144565.1,517-535).
catgcctgtgctggtatat

SEQ ID NO: 409682 - DNA, 19 bp, Homo sapiens
  siRNA target sequence for FLJ32334 (NM_144565.1,925-943).
ccccaaagatcctgattgt

SEQ ID NO: 409683 - DNA, 19 bp, Homo sapiens
  siRNA target sequence for FLJ32334 (NM_144565.1,932-950).
gatcctgattgtgctttat

SEQ ID NO: 409684 - DNA, 19 bp, Homo sapiens
  siRNA target sequence for LOC90806 (NM_144567.2,261-279).
ctacaccgtgggagaatct

SEQ ID NO: 409685 - DNA, 19 bp, Homo sapiens
  siRNA target sequence for LOC90806 (NM_144567.2,288-306).
gttgctggaacagacatat

SEQ ID NO: 409686 - DNA, 19 bp, Homo sapiens
  siRNA target sequence for LOC90806 (NM_144567.2,295-313).
gaacagacatatttctagt

SEQ ID NO: 409687 - DNA, 19 bp, Homo sapiens
  siRNA target sequence for LOC90806 (NM_144567.2,302-320).
catatttctagttgtatga

SEQ ID NO: 409688 - DNA, 19 bp, Homo sapiens
  siRNA target sequence for LOC90806 (NM_144567.2,342-360).
gagctccttacccatactt

SEQ ID NO: 409689 - DNA, 19 bp, Homo sapiens
  siRNA target sequence for LOC90806 (NM_144567.2,344-362).
gctccttacccatacttca

SEQ ID NO: 409690 - DNA, 19 bp, Homo sapiens
  siRNA target sequence for LOC90806 (NM_144567.2,363-381).
gtagtaggcatttttcact

SEQ ID NO: 409691 - DNA, 19 bp, Homo sapiens
  siRNA target sequence for LOC90806 (NM_144567.2,366-384).
gtaggcatttttcactaaa

SEQ ID NO: 409692 - DNA, 19 bp, Homo sapiens
  siRNA target sequence for LOC90806 (NM_144567.2,392-410).
ccaccctgtttgtttgagt

SEQ ID NO: 409693 - DNA, 19 bp, Homo sapiens
  siRNA target sequence for LOC90806 (NM_144567.2,417-435).
ctcagttccagtactgtaa

SEQ ID NO: 409694 - DNA, 19 bp, Homo sapiens
  siRNA target sequence for LOC90806 (NM_144567.2,502-520).
gggagatgagccttcatca

SEQ ID NO: 409695 - DNA, 19 bp, Homo sapiens
  siRNA target sequence for LOC90806 (NM_144567.2,503-521).
ggagatgagccttcatcaa

SEQ ID NO: 409696 - DNA, 19 bp, Homo sapiens
  siRNA target sequence for LOC90806 (NM_144567.2,504-522).
gagatgagccttcatcaaa

SEQ ID NO: 409697 - DNA, 19 bp, Homo sapiens
  siRNA target sequence for LOC90806 (NM_144567.2,550-568).
gcggaattgggaatatata

SEQ ID NO: 409698 - DNA, 19 bp, Homo sapiens
  siRNA target sequence for LOC90806 (NM_144567.2,551-569).
cggaattgggaatatatat

SEQ ID NO: 409699 - DNA, 19 bp, Homo sapiens
  siRNA target sequence for LOC90806 (NM_144567.2,598-616).
cctaggagacaaaaatgtt

SEQ ID NO: 409700 - DNA, 19 bp, Homo sapiens
  siRNA target sequence for LOC90806 (NM_144567.2,657-675).
cagtgatgtcctataatat

SEQ ID NO: 409701 - DNA, 19 bp, Homo sapiens
  siRNA target sequence for LOC90806 (NM_144567.2,666-684).
cctataatatactttcaca

SEQ ID NO: 409702 - DNA, 19 bp, Homo sapiens
  siRNA target sequence for LOC90806 (NM_144567.2,698-716).
gataactctcacctttata

SEQ ID NO: 409703 - DNA, 19 bp, Homo sapiens
  siRNA target sequence for LOC90806 (NM_144567.2,734-752).
gtattacactggagtttta

SEQ ID NO: 409704 - DNA, 19 bp, Homo sapiens
  siRNA target sequence for LOC90806 (NM_144567.2,747-765).
gttttaggtttcccaatat

SEQ ID NO: 409705 - DNA, 19 bp, Homo sapiens
  siRNA target sequence for LOC90806 (NM_144567.2,753-771).
ggtttcccaatattctgaa

SEQ ID NO: 409706 - DNA, 19 bp, Homo sapiens
  siRNA target sequence for LOC90806 (NM_144567.2,841-859).
gatcaggccaagtttggaa

SEQ ID NO: 409707 - DNA, 19 bp, Homo sapiens
  siRNA target sequence for LOC90806 (NM_144567.2,857-875).
gaatcactgggttatcact

SEQ ID NO: 409708 - DNA, 19 bp, Homo sapiens
  siRNA target sequence for LOC90806 (NM_144567.2,863-881).
ctgggttatcactgtgaat

SEQ ID NO: 409709 - DNA, 19 bp, Homo sapiens
  siRNA target sequence for LOC90806 (NM_144567.2,865-883).
gggttatcactgtgaatat

SEQ ID NO: 409710 - DNA, 19 bp, Homo sapiens
  siRNA target sequence for LOC90806 (NM_144567.2,866-884).
ggttatcactgtgaatata

SEQ ID NO: 409711 - DNA, 19 bp, Homo sapiens
  siRNA target sequence for LOC90806 (NM_144567.2,915-933).
gtgctatttgcttcaaaca

SEQ ID NO: 409712 - DNA, 19 bp, Homo sapiens
  siRNA target sequence for LOC90806 (NM_144567.2,917-935).
gctatttgcttcaaacatt

SEQ ID NO: 409713 - DNA, 19 bp, Homo sapiens
  siRNA target sequence for LOC90806 (NM_144567.2,928-946).
caaacattccaaattttca

SEQ ID NO: 409714 - DNA, 19 bp, Homo sapiens
  siRNA target sequence for LOC90806 (NM_144567.2,973-991).
cttccgccctgatatttct

SEQ ID NO: 409715 - DNA, 19 bp, Homo sapiens
  siRNA target sequence for LOC90806 (NM_144567.2,994-1012).
gttggacagagacaatgtt

SEQ ID NO: 409716 - DNA, 19 bp, Homo sapiens
  siRNA target sequence for LOC90806 (NM_144567.2,1000-1018).
cagagacaatgttggatta

SEQ ID NO: 409717 - DNA, 19 bp, Homo sapiens
  siRNA target sequence for LOC90806 (NM_144567.2,1027-1045).
cttacagcccaaaattcca

SEQ ID NO: 409718 - DNA, 19 bp, Homo sapiens
  siRNA target sequence for LOC90806 (NM_144567.2,1059-1077).
ctgcaatctgcgtagcaaa

SEQ ID NO: 409719 - DNA, 19 bp, Homo sapiens
  siRNA target sequence for LOC90806 (NM_144567.2,1074-1092).
caaatacgcatctgttgta

SEQ ID NO: 409720 - DNA, 19 bp, Homo sapiens
  siRNA target sequence for LOC90806 (NM_144567.2,1097-1115).
ccaaggcgaggtgatatta

SEQ ID NO: 409721 - DNA, 19 bp, Homo sapiens
  siRNA target sequence for LOC90806 (NM_144567.2,1098-1116).
caaggcgaggtgatattaa

SEQ ID NO: 409722 - DNA, 19 bp, Homo sapiens
  siRNA target sequence for LOC90806 (NM_144567.2,1101-1119).
ggcgaggtgatattaagct

SEQ ID NO: 409723 - DNA, 19 bp, Homo sapiens
  siRNA target sequence for LOC90806 (NM_144567.2,1120-1138).
gacgcaattggcaatgcta

SEQ ID NO: 409724 - DNA, 19 bp, Homo sapiens
  siRNA target sequence for LOC90806 (NM_144567.2,1136-1154).
ctactggcagagatttcca

SEQ ID NO: 409725 - DNA, 19 bp, Homo sapiens
  siRNA target sequence for LOC90806 (NM_144567.2,1155-1173).
gtgttgcccaccagaaaga

SEQ ID NO: 409726 - DNA, 19 bp, Homo sapiens
  siRNA target sequence for LOC90806 (NM_144567.2,1183-1201).
ctgccctattgttatgtgt

SEQ ID NO: 409727 - DNA, 19 bp, Homo sapiens
  siRNA target sequence for LOC90806 (NM_144567.2,1193-1211).
gttatgtgtggtgacttta

SEQ ID NO: 409728 - DNA, 19 bp, Homo sapiens
  siRNA target sequence for LOC90806 (NM_144567.2,1200-1218).
gtggtgactttaattctgt

SEQ ID NO: 409729 - DNA, 19 bp, Homo sapiens
  siRNA target sequence for LOC90806 (NM_144567.2,1223-1241).
ggttctccactatatagtt

SEQ ID NO: 409730 - DNA, 19 bp, Homo sapiens
  siRNA target sequence for LOC90806 (NM_144567.2,1224-1242).
gttctccactatatagttt

SEQ ID NO: 409731 - DNA, 19 bp, Homo sapiens
  siRNA target sequence for LOC90806 (NM_144567.2,1227-1245).
ctccactatatagtttcat

SEQ ID NO: 409732 - DNA, 19 bp, Homo sapiens
  siRNA target sequence for LOC90806 (NM_144567.2,1230-1248).
cactatatagtttcataaa

SEQ ID NO: 409733 - DNA, 19 bp, Homo sapiens
  siRNA target sequence for LOC90806 (NM_144567.2,1308-1326).
cttcacggggacaaagaat

SEQ ID NO: 409734 - DNA, 19 bp, Homo sapiens
  siRNA target sequence for LOC90806 (NM_144567.2,1384-1402).
ggtacagcaggtaccaaaa

SEQ ID NO: 409735 - DNA, 19 bp, Homo sapiens
  siRNA target sequence for LOC90806 (NM_144567.2,1390-1408).
gcaggtaccaaaagtagaa

SEQ ID NO: 409736 - DNA, 19 bp, Homo sapiens
  siRNA target sequence for LOC90806 (NM_144567.2,1415-1433).
gacagtgatctgacacaaa

SEQ ID NO: 409737 - DNA, 19 bp, Homo sapiens
  siRNA target sequence for LOC90806 (NM_144567.2,1419-1437).
gtgatctgacacaaacaca

SEQ ID NO: 409738 - DNA, 19 bp, Homo sapiens
  siRNA target sequence for LOC90806 (NM_144567.2,1457-1475).
ctagtgacagctgaaaaat

SEQ ID NO: 409739 - DNA, 19 bp, Homo sapiens
  siRNA target sequence for LOC90806 (NM_144567.2,1490-1508).
cagcaccatttcagtttgt

SEQ ID NO: 409740 - DNA, 19 bp, Homo sapiens
  siRNA target sequence for LOC90806 (NM_144567.2,1492-1510).
gcaccatttcagtttgtca

SEQ ID NO: 409741 - DNA, 19 bp, Homo sapiens
  siRNA target sequence for LOC90806 (NM_144567.2,1569-1587).
cccgaagtgccataactgt

SEQ ID NO: 409742 - DNA, 19 bp, Homo sapiens
  siRNA target sequence for LOC90806 (NM_144567.2,1575-1593).
gtgccataactgtggatta

SEQ ID NO: 409743 - DNA, 19 bp, Homo sapiens
  siRNA target sequence for LOC90806 (NM_144567.2,1577-1595).
gccataactgtggattata

SEQ ID NO: 409744 - DNA, 19 bp, Homo sapiens
  siRNA target sequence for LOC90806 (NM_144567.2,1578-1596).
ccataactgtggattatat

SEQ ID NO: 409745 - DNA, 19 bp, Homo sapiens
  siRNA target sequence for LOC90806 (NM_144567.2,1705-1723).
cttatggactgttaatgga

SEQ ID NO: 409746 - DNA, 19 bp, Homo sapiens
  siRNA target sequence for LOC90806 (NM_144567.2,1721-1739).
ggacttccaaacgaaaata

SEQ ID NO: 409747 - DNA, 19 bp, Homo sapiens
  siRNA target sequence for LOC90806 (NM_144567.2,1746-1764).
cagatcatctgcctttatt

SEQ ID NO: 409748 - DNA, 19 bp, Homo sapiens
  siRNA target sequence for LOC90806 (NM_144567.2,1757-1775).
cctttattggcaaagttca

SEQ ID NO: 409749 - DNA, 19 bp, Homo sapiens
  siRNA target sequence for C14orf9 (NM_144568.1,351-369).
ccctattcacccttaacta

SEQ ID NO: 409750 - DNA, 19 bp, Homo sapiens
  siRNA target sequence for C14orf9 (NM_144568.1,379-397).
gtgggagtgcccctatgat

SEQ ID NO: 409751 - DNA, 19 bp, Homo sapiens
  siRNA target sequence for C14orf9 (NM_144568.1,381-399).
gggagtgcccctatgatca

SEQ ID NO: 409752 - DNA, 19 bp, Homo sapiens
  siRNA target sequence for C14orf9 (NM_144568.1,403-421).
gccgagtctgccaatctct

SEQ ID NO: 409753 - DNA, 19 bp, Homo sapiens
  siRNA target sequence for C14orf9 (NM_144568.1,443-461).
gcatcagcatgtagtcaaa

SEQ ID NO: 409754 - DNA, 19 bp, Homo sapiens
  siRNA target sequence for C14orf9 (NM_144568.1,477-495).
gaagccaccccaatcaaga

SEQ ID NO: 409755 - DNA, 19 bp, Homo sapiens
  siRNA target sequence for C14orf9 (NM_144568.1,579-597).
cctcggccctactgcaaaa

SEQ ID NO: 409756 - DNA, 19 bp, Homo sapiens
  siRNA target sequence for C14orf9 (NM_144568.1,585-603).
ccctactgcaaaagaatca

SEQ ID NO: 409757 - DNA, 19 bp, Homo sapiens
  siRNA target sequence for C14orf9 (NM_144568.1,656-674).
gggtgtcagggttatctgt

SEQ ID NO: 409758 - DNA, 19 bp, Homo sapiens
  siRNA target sequence for C14orf9 (NM_144568.1,675-693).
ggacattgcaagaatactt

SEQ ID NO: 409759 - DNA, 19 bp, Homo sapiens
  siRNA target sequence for C14orf9 (NM_144568.1,857-875).
gcatgcacggcgatatgga

SEQ ID NO: 409760 - DNA, 19 bp, Homo sapiens
  siRNA target sequence for C14orf9 (NM_144568.1,866-884).
gcgatatggaggcatctat

SEQ ID NO: 409761 - DNA, 19 bp, Homo sapiens
  siRNA target sequence for C14orf9 (NM_144568.1,936-954).
ctttattgggcctgtatga

SEQ ID NO: 409762 - DNA, 19 bp, Homo sapiens
  siRNA target sequence for C16orf34 (NM_144570.1,98-116).
ggagaatcgagcaatcttt

SEQ ID NO: 409763 - DNA, 19 bp, Homo sapiens
  siRNA target sequence for C16orf34 (NM_144570.1,99-117).
gagaatcgagcaatctttt

SEQ ID NO: 409764 - DNA, 19 bp, Homo sapiens
  siRNA target sequence for C16orf34 (NM_144570.1,144-162).
ccagcaggcctaataggat

SEQ ID NO: 409765 - DNA, 19 bp, Homo sapiens
  siRNA target sequence for C16orf34 (NM_144570.1,160-178).
gatggcatctaatattttt

SEQ ID NO: 409766 - DNA, 19 bp, Homo sapiens
  siRNA target sequence for C16orf34 (NM_144570.1,231-249).
gtaaaggaagtggtatctt

SEQ ID NO: 409767 - DNA, 19 bp, Homo sapiens
  siRNA target sequence for C16orf34 (NM_144570.1,242-260).
ggtatctttgacgaatcaa

SEQ ID NO: 409768 - DNA, 19 bp, Homo sapiens
  siRNA target sequence for C16orf34 (NM_144570.1,346-364).
cttggcacacccaaacaaa

SEQ ID NO: 409769 - DNA, 19 bp, Homo sapiens
  siRNA target sequence for C16orf34 (NM_144570.1,361-379).
caaacccaaggatcatgtt

SEQ ID NO: 409770 - DNA, 19 bp, Homo sapiens
  siRNA target sequence for C16orf34 (NM_144570.1,543-561).
ggcctcgctctcacaacaa

SEQ ID NO: 409771 - DNA, 19 bp, Homo sapiens
  siRNA target sequence for CNOT6L (NM_144571.1,100-118).
ccagatcctcgcagaattt

SEQ ID NO: 409772 - DNA, 19 bp, Homo sapiens
  siRNA target sequence for CNOT6L (NM_144571.1,103-121).
gatcctcgcagaatttata

SEQ ID NO: 409773 - DNA, 19 bp, Homo sapiens
  siRNA target sequence for CNOT6L (NM_144571.1,107-125).
ctcgcagaatttataccat

SEQ ID NO: 409774 - DNA, 19 bp, Homo sapiens
  siRNA target sequence for CNOT6L (NM_144571.1,142-160).
gtagccaatgggaaaaaat

SEQ ID NO: 409775 - DNA, 19 bp, Homo sapiens
  siRNA target sequence for CNOT6L (NM_144571.1,195-213).
gcggagcctaagtacatca

SEQ ID NO: 409776 - DNA, 19 bp, Homo sapiens
  siRNA target sequence for CNOT6L (NM_144571.1,198-216).
gagcctaagtacatcactt

SEQ ID NO: 409777 - DNA, 19 bp, Homo sapiens
  siRNA target sequence for CNOT6L (NM_144571.1,234-252).
gacagcgctgcacctaaat

SEQ ID NO: 409778 - DNA, 19 bp, Homo sapiens
  siRNA target sequence for CNOT6L (NM_144571.1,236-254).
cagcgctgcacctaaatga

SEQ ID NO: 409779 - DNA, 19 bp, Homo sapiens
  siRNA target sequence for CNOT6L (NM_144571.1,239-257).
cgctgcacctaaatgacaa

SEQ ID NO: 409780 - DNA, 19 bp, Homo sapiens
  siRNA target sequence for CNOT6L (NM_144571.1,241-259).
ctgcacctaaatgacaatt

SEQ ID NO: 409781 - DNA, 19 bp, Homo sapiens
  siRNA target sequence for CNOT6L (NM_144571.1,316-334).
ctgtcatccaataaactca

SEQ ID NO: 409782 - DNA, 19 bp, Homo sapiens
  siRNA target sequence for CNOT6L (NM_144571.1,404-422).
gggttttgccttatgaact

SEQ ID NO: 409783 - DNA, 19 bp, Homo sapiens
  siRNA target sequence for CNOT6L (NM_144571.1,487-505).
cctccgaggccatggatta

SEQ ID NO: 409784 - DNA, 19 bp, Homo sapiens
  siRNA target sequence for CNOT6L (NM_144571.1,490-508).
ccgaggccatggattacat

SEQ ID NO: 409785 - DNA, 19 bp, Homo sapiens
  siRNA target sequence for CNOT6L (NM_144571.1,495-513).
gccatggattacattaaaa

SEQ ID NO: 409786 - DNA, 19 bp, Homo sapiens
  siRNA target sequence for CNOT6L (NM_144571.1,529-547).
ctgccgtcagcatcattca

SEQ ID NO: 409787 - DNA, 19 bp, Homo sapiens
  siRNA target sequence for CNOT6L (NM_144571.1,538-556).
gcatcattcacggttatgt

SEQ ID NO: 409788 - DNA, 19 bp, Homo sapiens
  siRNA target sequence for CNOT6L (NM_144571.1,546-564).
cacggttatgtgttacaat

SEQ ID NO: 409789 - DNA, 19 bp, Homo sapiens
  siRNA target sequence for CNOT6L (NM_144571.1,582-600).
cgctacccggcagctatat

SEQ ID NO: 409790 - DNA, 19 bp, Homo sapiens
  siRNA target sequence for CNOT6L (NM_144571.1,669-687).
ctgtgacgcagatatcatt

SEQ ID NO: 409791 - DNA, 19 bp, Homo sapiens
  siRNA target sequence for CNOT6L (NM_144571.1,675-693).
cgcagatatcattagtctt

SEQ ID NO: 409792 - DNA, 19 bp, Homo sapiens
  siRNA target sequence for CNOT6L (NM_144571.1,773-791).
caaagtcacgtgccaaaat

SEQ ID NO: 409793 - DNA, 19 bp, Homo sapiens
  siRNA target sequence for CNOT6L (NM_144571.1,889-907).
caagtggcgatggctaatt

SEQ ID NO: 409794 - DNA, 19 bp, Homo sapiens
  siRNA target sequence for CNOT6L (NM_144571.1,894-912).
ggcgatggctaattcagat

SEQ ID NO: 409795 - DNA, 19 bp, Homo sapiens
  siRNA target sequence for CNOT6L (NM_144571.1,908-926).
cagatggatccgaagctat

SEQ ID NO: 409796 - DNA, 19 bp, Homo sapiens
  siRNA target sequence for CNOT6L (NM_144571.1,976-994).
gaggtccacaaagaactat

SEQ ID NO: 409797 - DNA, 19 bp, Homo sapiens
  siRNA target sequence for CNOT6L (NM_144571.1,1025-1043).
cagacaaacagctgcttat

SEQ ID NO: 409798 - DNA, 19 bp, Homo sapiens
  siRNA target sequence for CNOT6L (NM_144571.1,1062-1080).
gcattgggacccagagtat

SEQ ID NO: 409799 - DNA, 19 bp, Homo sapiens
  siRNA target sequence for CNOT6L (NM_144571.1,1063-1081).
cattgggacccagagtatt

SEQ ID NO: 409800 - DNA, 19 bp, Homo sapiens
  siRNA target sequence for CNOT6L (NM_144571.1,1068-1086).
ggacccagagtattctgat

SEQ ID NO: 409801 - DNA, 19 bp, Homo sapiens
  siRNA target sequence for CNOT6L (NM_144571.1,1095-1113).
catccagaccatgatgttt

SEQ ID NO: 409802 - DNA, 19 bp, Homo sapiens
  siRNA target sequence for CNOT6L (NM_144571.1,1110-1128).
gtttgtctcagaggttaaa

SEQ ID NO: 409803 - DNA, 19 bp, Homo sapiens
  siRNA target sequence for CNOT6L (NM_144571.1,1118-1136).
cagaggttaaaaacattct

SEQ ID NO: 409804 - DNA, 19 bp, Homo sapiens
  siRNA target sequence for CNOT6L (NM_144571.1,1135-1153).
ctggagaaagcctctagta

SEQ ID NO: 409805 - DNA, 19 bp, Homo sapiens
  siRNA target sequence for CNOT6L (NM_144571.1,1169-1187).
ctgcagatcctaattccat

SEQ ID NO: 409806 - DNA, 19 bp, Homo sapiens
  siRNA target sequence for CNOT6L (NM_144571.1,1229-1247).
caggtgttgtggaatactt

SEQ ID NO: 409807 - DNA, 19 bp, Homo sapiens
  siRNA target sequence for CNOT6L (NM_144571.1,1259-1277).
gagtagctgacaaccataa

SEQ ID NO: 409808 - DNA, 19 bp, Homo sapiens
  siRNA target sequence for CNOT6L (NM_144571.1,1264-1282).
gctgacaaccataaagact

SEQ ID NO: 409809 - DNA, 19 bp, Homo sapiens
  siRNA target sequence for CNOT6L (NM_144571.1,1295-1313).
ggtacaatgagtgtcttat

SEQ ID NO: 409810 - DNA, 19 bp, Homo sapiens
  siRNA target sequence for CNOT6L (NM_144571.1,1303-1321).
gagtgtcttatgaacttca

SEQ ID NO: 409811 - DNA, 19 bp, Homo sapiens
  siRNA target sequence for CNOT6L (NM_144571.1,1361-1379).
cacatggcttccaacttaa

SEQ ID NO: 409812 - DNA, 19 bp, Homo sapiens
  siRNA target sequence for CNOT6L (NM_144571.1,1363-1381).
catggcttccaacttaaga

SEQ ID NO: 409813 - DNA, 19 bp, Homo sapiens
  siRNA target sequence for CNOT6L (NM_144571.1,1375-1393).
cttaagagcgcctatgaaa

SEQ ID NO: 409814 - DNA, 19 bp, Homo sapiens
  siRNA target sequence for CNOT6L (NM_144571.1,1382-1400).
gcgcctatgaaaataactt

SEQ ID NO: 409815 - DNA, 19 bp, Homo sapiens
  siRNA target sequence for CNOT6L (NM_144571.1,1457-1475).
gtgtagaaattatttcaga

SEQ ID NO: 409816 - DNA, 19 bp, Homo sapiens
  siRNA target sequence for LOC91624 (NM_144573.1,88-106).
gaattgagcaggatatgtt

SEQ ID NO: 409817 - DNA, 19 bp, Homo sapiens
  siRNA target sequence for LOC91624 (NM_144573.1,93-111).
gagcaggatatgttagaaa

SEQ ID NO: 409818 - DNA, 19 bp, Homo sapiens
  siRNA target sequence for LOC91624 (NM_144573.1,167-185).
caatacgggaactgaatca

SEQ ID NO: 409819 - DNA, 19 bp, Homo sapiens
  siRNA target sequence for LOC91624 (NM_144573.1,194-212).
ggaaggagatgattcacta

SEQ ID NO: 409820 - DNA, 19 bp, Homo sapiens
  siRNA target sequence for LOC91624 (NM_144573.1,198-216).
ggagatgattcactactta

SEQ ID NO: 409821 - DNA, 19 bp, Homo sapiens
  siRNA target sequence for LOC91624 (NM_144573.1,199-217).
gagatgattcactacttat

SEQ ID NO: 409822 - DNA, 19 bp, Homo sapiens
  siRNA target sequence for LOC91624 (NM_144573.1,222-240).
gtggtacctgtcaaatcat

SEQ ID NO: 409823 - DNA, 19 bp, Homo sapiens
  siRNA target sequence for LOC91624 (NM_144573.1,224-242).
ggtacctgtcaaatcatat

SEQ ID NO: 409824 - DNA, 19 bp, Homo sapiens
  siRNA target sequence for LOC91624 (NM_144573.1,225-243).
gtacctgtcaaatcatata

SEQ ID NO: 409825 - DNA, 19 bp, Homo sapiens
  siRNA target sequence for LOC91624 (NM_144573.1,311-329).
caagtacgaggaagataaa

SEQ ID NO: 409826 - DNA, 19 bp, Homo sapiens
  siRNA target sequence for LOC91624 (NM_144573.1,355-373).
catctctcaaggaagcaaa

SEQ ID NO: 409827 - DNA, 19 bp, Homo sapiens
  siRNA target sequence for LOC91624 (NM_144573.1,376-394).
gtctttcattagttatgga

SEQ ID NO: 409828 - DNA, 19 bp, Homo sapiens
  siRNA target sequence for LOC91624 (NM_144573.1,434-452).
ccgccctggtaaactcaaa

SEQ ID NO: 409829 - DNA, 19 bp, Homo sapiens
  siRNA target sequence for LOC91624 (NM_144573.1,436-454).
gccctggtaaactcaaact

SEQ ID NO: 409830 - DNA, 19 bp, Homo sapiens
  siRNA target sequence for LOC91624 (NM_144573.1,438-456).
cctggtaaactcaaactca

SEQ ID NO: 409831 - DNA, 19 bp, Homo sapiens
  siRNA target sequence for LOC91624 (NM_144573.1,562-580).
ggagaaatatggtagtaga

SEQ ID NO: 409832 - DNA, 19 bp, Homo sapiens
  siRNA target sequence for LOC91624 (NM_144573.1,585-603).
gactccccagagatgtata

SEQ ID NO: 409833 - DNA, 19 bp, Homo sapiens
  siRNA target sequence for LOC91624 (NM_144573.1,592-610).
cagagatgtataagacaat

SEQ ID NO: 409834 - DNA, 19 bp, Homo sapiens
  siRNA target sequence for LOC91624 (NM_144573.1,594-612).
gagatgtataagacaatct

SEQ ID NO: 409835 - DNA, 19 bp, Homo sapiens
  siRNA target sequence for LOC91624 (NM_144573.1,628-646).
caccgggaaaactggaaat

SEQ ID NO: 409836 - DNA, 19 bp, Homo sapiens
  siRNA target sequence for LOC91624 (NM_144573.1,630-648).
ccgggaaaactggaaatta

SEQ ID NO: 409837 - DNA, 19 bp, Homo sapiens
  siRNA target sequence for LOC91624 (NM_144573.1,704-722).
ggaacggaagcataagcta

SEQ ID NO: 409838 - DNA, 19 bp, Homo sapiens
  siRNA target sequence for LOC91624 (NM_144573.1,708-726).
cggaagcataagctagaaa

SEQ ID NO: 409839 - DNA, 19 bp, Homo sapiens
  siRNA target sequence for LOC91624 (NM_144573.1,709-727).
ggaagcataagctagaaat

SEQ ID NO: 409840 - DNA, 19 bp, Homo sapiens
  siRNA target sequence for LOC91624 (NM_144573.1,838-856).
gtggctctattcaagctaa

SEQ ID NO: 409841 - DNA, 19 bp, Homo sapiens
  siRNA target sequence for LOC91624 (NM_144573.1,840-858).
ggctctattcaagctaaaa

SEQ ID NO: 409842 - DNA, 19 bp, Homo sapiens
  siRNA target sequence for LOC91624 (NM_144573.1,1008-1026).
gttaggcctgcaagaaaaa

SEQ ID NO: 409843 - DNA, 19 bp, Homo sapiens
  siRNA target sequence for LOC91624 (NM_144573.1,1033-1051).
ctccatttactcacaaagt

SEQ ID NO: 409844 - DNA, 19 bp, Homo sapiens
  siRNA target sequence for LOC91624 (NM_144573.1,1035-1053).
ccatttactcacaaagtga

SEQ ID NO: 409845 - DNA, 19 bp, Homo sapiens
  siRNA target sequence for LOC91624 (NM_144573.1,1036-1054).
catttactcacaaagtgaa

SEQ ID NO: 409846 - DNA, 19 bp, Homo sapiens
  siRNA target sequence for LOC91624 (NM_144573.1,1134-1152).
cgcatgcagtttgaacaaa

SEQ ID NO: 409847 - DNA, 19 bp, Homo sapiens
  siRNA target sequence for LOC91624 (NM_144573.1,1200-1218).
gaagaaggtagcatcatga

SEQ ID NO: 409848 - DNA, 19 bp, Homo sapiens
  siRNA target sequence for LOC91624 (NM_144573.1,1222-1240).
gctccactgctgaagatga

SEQ ID NO: 409849 - DNA, 19 bp, Homo sapiens
  siRNA target sequence for LOC91624 (NM_144573.1,1304-1322).
cagtgagccagtcagattt

SEQ ID NO: 409850 - DNA, 19 bp, Homo sapiens
  siRNA target sequence for LOC91624 (NM_144573.1,1316-1334).
cagatttacggttaaagta

SEQ ID NO: 409851 - DNA, 19 bp, Homo sapiens
  siRNA target sequence for LOC91624 (NM_144573.1,1392-1410).
ggagaagactatcaatata

SEQ ID NO: 409852 - DNA, 19 bp, Homo sapiens
  siRNA target sequence for LOC91624 (NM_144573.1,1393-1411).
gagaagactatcaatatat

SEQ ID NO: 409853 - DNA, 19 bp, Homo sapiens
  siRNA target sequence for LOC91624 (NM_144573.1,1464-1482).
ggaggagagtatatgtgta

SEQ ID NO: 409854 - DNA, 19 bp, Homo sapiens
  siRNA target sequence for LOC91624 (NM_144573.1,1465-1483).
gaggagagtatatgtgtaa

SEQ ID NO: 409855 - DNA, 19 bp, Homo sapiens
  siRNA target sequence for LOC91624 (NM_144573.1,1478-1496).
gtgtaaagcagtcaacaat

SEQ ID NO: 409856 - DNA, 19 bp, Homo sapiens
  siRNA target sequence for LOC91624 (NM_144573.1,1480-1498).
gtaaagcagtcaacaataa

SEQ ID NO: 409857 - DNA, 19 bp, Homo sapiens
  siRNA target sequence for LOC91624 (NM_144573.1,1507-1525).
cagctagtacctgtattct

SEQ ID NO: 409858 - DNA, 19 bp, Homo sapiens
  siRNA target sequence for LOC91624 (NM_144573.1,1513-1531).
gtacctgtattcttaccat

SEQ ID NO: 409859 - DNA, 19 bp, Homo sapiens
  siRNA target sequence for LOC91624 (NM_144573.1,1524-1542).
cttaccattgaaagtaaga

SEQ ID NO: 409860 - DNA, 19 bp, Homo sapiens
  siRNA target sequence for WDR20 (NM_144574.2,105-123).
cccgggaaggtctgtacaa

SEQ ID NO: 409861 - DNA, 19 bp, Homo sapiens
  siRNA target sequence for WDR20 (NM_144574.2,191-209).
gtccgcgtctccttcgtaa

SEQ ID NO: 409862 - DNA, 19 bp, Homo sapiens
  siRNA target sequence for WDR20 (NM_144574.2,195-213).
gcgtctccttcgtaaacct

SEQ ID NO: 409863 - DNA, 19 bp, Homo sapiens
  siRNA target sequence for WDR20 (NM_144574.2,235-253).
cgaccgcctctgcttcaat

SEQ ID NO: 409864 - DNA, 19 bp, Homo sapiens
  siRNA target sequence for WDR20 (NM_144574.2,302-320).
gctgacttgagtaaaccaa

SEQ ID NO: 409865 - DNA, 19 bp, Homo sapiens
  siRNA target sequence for WDR20 (NM_144574.2,500-518).
cgagttacctgtgtcaaat

SEQ ID NO: 409866 - DNA, 19 bp, Homo sapiens
  siRNA target sequence for WDR20 (NM_144574.2,528-546).
gttcggaaagccttttcct

SEQ ID NO: 409867 - DNA, 19 bp, Homo sapiens
  siRNA target sequence for WDR20 (NM_144574.2,554-572).
cactcgagtgggaacatgt

SEQ ID NO: 409868 - DNA, 19 bp, Homo sapiens
  siRNA target sequence for WDR20 (NM_144574.2,558-576).
cgagtgggaacatgtactt

SEQ ID NO: 409869 - DNA, 19 bp, Homo sapiens
  siRNA target sequence for WDR20 (NM_144574.2,559-577).
gagtgggaacatgtactta

SEQ ID NO: 409870 - DNA, 19 bp, Homo sapiens
  siRNA target sequence for WDR20 (NM_144574.2,561-579).
gtgggaacatgtacttata

SEQ ID NO: 409871 - DNA, 19 bp, Homo sapiens
  siRNA target sequence for WDR20 (NM_144574.2,564-582).
ggaacatgtacttatataa

SEQ ID NO: 409872 - DNA, 19 bp, Homo sapiens
  siRNA target sequence for WDR20 (NM_144574.2,565-583).
gaacatgtacttatataat

SEQ ID NO: 409873 - DNA, 19 bp, Homo sapiens
  siRNA target sequence for WDR20 (NM_144574.2,713-731).
gccctcaacgagtttgctt

SEQ ID NO: 409874 - DNA, 19 bp, Homo sapiens
  siRNA target sequence for WDR20 (NM_144574.2,774-792).
ggtttctgcgggtgttcaa

SEQ ID NO: 409875 - DNA, 19 bp, Homo sapiens
  siRNA target sequence for WDR20 (NM_144574.2,782-800).
cgggtgttcaactttgact

SEQ ID NO: 409876 - DNA, 19 bp, Homo sapiens
  siRNA target sequence for WDR20 (NM_144574.2,808-826).
gctgcacggtacgatgaaa

SEQ ID NO: 409877 - DNA, 19 bp, Homo sapiens
  siRNA target sequence for WDR20 (NM_144574.2,961-979).
gtcctgggtcagtgttgta

SEQ ID NO: 409878 - DNA, 19 bp, Homo sapiens
  siRNA target sequence for WDR20 (NM_144574.2,1013-1031).
ggtgaccctatggagttta

SEQ ID NO: 409879 - DNA, 19 bp, Homo sapiens
  siRNA target sequence for WDR20 (NM_144574.2,1070-1088).
ggcagagatcgagcaaata

SEQ ID NO: 409880 - DNA, 19 bp, Homo sapiens
  siRNA target sequence for WDR20 (NM_144574.2,1142-1160).
gtcacgtatcggtttggtt

SEQ ID NO: 409881 - DNA, 19 bp, Homo sapiens
  siRNA target sequence for WDR20 (NM_144574.2,1185-1203).
gtttatgggaccttacaga

SEQ ID NO: 409882 - DNA, 19 bp, Homo sapiens
  siRNA target sequence for WDR20 (NM_144574.2,1195-1213).
ccttacagaagatatcctt

SEQ ID NO: 409883 - DNA, 19 bp, Homo sapiens
  siRNA target sequence for WDR20 (NM_144574.2,1288-1306).
caatgggaacagtgttaca

SEQ ID NO: 409884 - DNA, 19 bp, Homo sapiens
  siRNA target sequence for WDR20 (NM_144574.2,1418-1436).
ggggtcagcaaatttgcaa

SEQ ID NO: 409885 - DNA, 19 bp, Homo sapiens
  siRNA target sequence for WDR20 (NM_144574.2,1434-1452).
caacactttcactacatga

SEQ ID NO: 409886 - DNA, 19 bp, Homo sapiens
  siRNA target sequence for WDR20 (NM_144574.2,1462-1480).
gaggcaccacgagaaagat

SEQ ID NO: 409887 - DNA, 19 bp, Homo sapiens
  siRNA target sequence for WDR20 (NM_144574.2,1493-1511).
catagcatgggacacattt

SEQ ID NO: 409888 - DNA, 19 bp, Homo sapiens
  siRNA target sequence for WDR20 (NM_144574.2,1515-1533).
gcaagagcagtgacaaact

SEQ ID NO: 409889 - DNA, 19 bp, Homo sapiens
  siRNA target sequence for WDR20 (NM_144574.2,1519-1537).
gagcagtgacaaactgaat

SEQ ID NO: 409890 - DNA, 19 bp, Homo sapiens
  siRNA target sequence for WDR20 (NM_144574.2,1521-1539).
gcagtgacaaactgaatct

SEQ ID NO: 409891 - DNA, 19 bp, Homo sapiens
  siRNA target sequence for WDR20 (NM_144574.2,1522-1540).
cagtgacaaactgaatcta

SEQ ID NO: 409892 - DNA, 19 bp, Homo sapiens
  siRNA target sequence for WDR20 (NM_144574.2,1524-1542).
gtgacaaactgaatctagt

SEQ ID NO: 409893 - DNA, 19 bp, Homo sapiens
  siRNA target sequence for WDR20 (NM_144574.2,1532-1550).
ctgaatctagttaccaaaa

SEQ ID NO: 409894 - DNA, 19 bp, Homo sapiens
  siRNA target sequence for WDR20 (NM_144574.2,1552-1570).
caaaacggaccctgctaaa

SEQ ID NO: 409895 - DNA, 19 bp, Homo sapiens
  siRNA target sequence for WDR20 (NM_144574.2,1557-1575).
cggaccctgctaaaactct

SEQ ID NO: 409896 - DNA, 19 bp, Homo sapiens
  siRNA target sequence for WDR20 (NM_144574.2,1590-1608).
gtcctcgaatggaagatgt

SEQ ID NO: 409897 - DNA, 19 bp, Homo sapiens
  siRNA target sequence for WDR20 (NM_144574.2,1600-1618).
ggaagatgttcccttgtta

SEQ ID NO: 409898 - DNA, 19 bp, Homo sapiens
  siRNA target sequence for WDR20 (NM_144574.2,1615-1633).
gttagagccgctgatatgt

SEQ ID NO: 409899 - DNA, 19 bp, Homo sapiens
  siRNA target sequence for WDR20 (NM_144574.2,1619-1637).
gagccgctgatatgtaaaa

SEQ ID NO: 409900 - DNA, 19 bp, Homo sapiens
  siRNA target sequence for WDR20 (NM_144574.2,1622-1640).
ccgctgatatgtaaaaaga

SEQ ID NO: 409901 - DNA, 19 bp, Homo sapiens
  siRNA target sequence for WDR20 (NM_144574.2,1673-1691).
cttgaagactgtatagtca

SEQ ID NO: 409902 - DNA, 19 bp, Homo sapiens
  siRNA target sequence for WDR20 (NM_144574.2,1694-1712).
gcttgtcaggagggattta

SEQ ID NO: 409903 - DNA, 19 bp, Homo sapiens
  siRNA target sequence for WDR20 (NM_144574.2,1731-1749).
ctggtaaagtggtaagttt

SEQ ID NO: 409904 - DNA, 19 bp, Homo sapiens
  siRNA target sequence for FLJ32926 (NM_144577.1,182-200).
cgaggacgccctgaataaa

SEQ ID NO: 409905 - DNA, 19 bp, Homo sapiens
  siRNA target sequence for FLJ32926 (NM_144577.1,257-275).
gatcgaggagcgcaacttt

SEQ ID NO: 409906 - DNA, 19 bp, Homo sapiens
  siRNA target sequence for FLJ32926 (NM_144577.1,760-778).
cccctgacactctagaaga

SEQ ID NO: 409907 - DNA, 19 bp, Homo sapiens
  siRNA target sequence for FLJ32926 (NM_144577.1,1048-1066).
ctcttggccacgtcacttt

SEQ ID NO: 409908 - DNA, 19 bp, Homo sapiens
  siRNA target sequence for FLJ32926 (NM_144577.1,1275-1293).
ggaggcacagcgtctgatt

SEQ ID NO: 409909 - DNA, 19 bp, Homo sapiens
  siRNA target sequence for C14orf32 (NM_144578.2,182-200).
ctctgctgtgagcaataca

SEQ ID NO: 409910 - DNA, 19 bp, Homo sapiens
  siRNA target sequence for C14orf32 (NM_144578.2,231-249).
ggctccaacccttggaata

SEQ ID NO: 409911 - DNA, 19 bp, Homo sapiens
  siRNA target sequence for C14orf32 (NM_144578.2,232-250).
gctccaacccttggaataa

SEQ ID NO: 409912 - DNA, 19 bp, Homo sapiens
  siRNA target sequence for C14orf32 (NM_144578.2,233-251).
ctccaacccttggaataat

SEQ ID NO: 409913 - DNA, 19 bp, Homo sapiens
  siRNA target sequence for C14orf32 (NM_144578.2,302-320).
ctccactgtgccttttgga

SEQ ID NO: 409914 - DNA, 19 bp, Homo sapiens
  siRNA target sequence for C14orf32 (NM_144578.2,458-476).
ccccacagggccatatcct

SEQ ID NO: 409915 - DNA, 19 bp, Homo sapiens
  siRNA target sequence for C14orf32 (NM_144578.2,467-485).
gccatatcctacaccaaat

SEQ ID NO: 409916 - DNA, 19 bp, Homo sapiens
  siRNA target sequence for C14orf32 (NM_144578.2,468-486).
ccatatcctacaccaaata

SEQ ID NO: 409917 - DNA, 19 bp, Homo sapiens
  siRNA target sequence for C14orf32 (NM_144578.2,469-487).
catatcctacaccaaatat

SEQ ID NO: 409918 - DNA, 19 bp, Homo sapiens
  siRNA target sequence for C14orf32 (NM_144578.2,555-573).
ccatggggatccatgtctt

SEQ ID NO: 409919 - DNA, 19 bp, Homo sapiens
  siRNA target sequence for C14orf32 (NM_144578.2,603-621).
cagtatcctacccctaata

SEQ ID NO: 409920 - DNA, 19 bp, Homo sapiens
  siRNA target sequence for C14orf32 (NM_144578.2,614-632).
ccctaatatgccatatcca

SEQ ID NO: 409921 - DNA, 19 bp, Homo sapiens
  siRNA target sequence for C14orf32 (NM_144578.2,615-633).
cctaatatgccatatccat

SEQ ID NO: 409922 - DNA, 19 bp, Homo sapiens
  siRNA target sequence for C14orf32 (NM_144578.2,722-740).
gggaccaccagcaccatat

SEQ ID NO: 409923 - DNA, 19 bp, Homo sapiens
  siRNA target sequence for C14orf32 (NM_144578.2,776-794).
ctatcctactcccagtaat

SEQ ID NO: 409924 - DNA, 19 bp, Homo sapiens
  siRNA target sequence for MGC31963 (NM_144580.1,194-212).
gcagtgggcaccaattcca

SEQ ID NO: 409925 - DNA, 19 bp, Homo sapiens
  siRNA target sequence for MGC31963 (NM_144580.1,347-365).
cctaaggacagcattcagt

SEQ ID NO: 409926 - DNA, 19 bp, Homo sapiens
  siRNA target sequence for MGC31963 (NM_144580.1,348-366).
ctaaggacagcattcagtt

SEQ ID NO: 409927 - DNA, 19 bp, Homo sapiens
  siRNA target sequence for MGC31963 (NM_144580.1,473-491).
gatttctcttggaacaaca

SEQ ID NO: 409928 - DNA, 19 bp, Homo sapiens
  siRNA target sequence for MGC31963 (NM_144580.1,484-502).
gaacaacatcactgattca

SEQ ID NO: 409929 - DNA, 19 bp, Homo sapiens
  siRNA target sequence for MGC31963 (NM_144580.1,514-532).
caccctgagtgccacattt

SEQ ID NO: 409930 - DNA, 19 bp, Homo sapiens
  siRNA target sequence for MGC31963 (NM_144580.1,516-534).
ccctgagtgccacatttca

SEQ ID NO: 409931 - DNA, 19 bp, Homo sapiens
  siRNA target sequence for MGC31963 (NM_144580.1,550-568).
cgaccctaccaggactttt

SEQ ID NO: 409932 - DNA, 19 bp, Homo sapiens
  siRNA target sequence for MGC31963 (NM_144580.1,773-791).
cactccatcgacgatgaat

SEQ ID NO: 409933 - DNA, 19 bp, Homo sapiens
  siRNA target sequence for MGC31963 (NM_144580.1,775-793).
ctccatcgacgatgaatat

SEQ ID NO: 409934 - DNA, 19 bp, Homo sapiens
  siRNA target sequence for MGC31963 (NM_144580.1,778-796).
catcgacgatgaatatgca

SEQ ID NO: 409935 - DNA, 19 bp, Homo sapiens
  siRNA target sequence for MGC31963 (NM_144580.1,964-982).
cattgtccgagccttcttt

SEQ ID NO: 409936 - DNA, 19 bp, Homo sapiens
  siRNA target sequence for MGC31963 (NM_144580.1,983-1001).
gggtcccagaataacttct

SEQ ID NO: 409937 - DNA, 19 bp, Homo sapiens
  siRNA target sequence for MGC31963 (NM_144580.1,1041-1059).
gctattgggaccaacacta

SEQ ID NO: 409938 - DNA, 19 bp, Homo sapiens
  siRNA target sequence for MGC31963 (NM_144580.1,1212-1230).
cagagtaccagtccataaa

SEQ ID NO: 409939 - DNA, 19 bp, Homo sapiens
  siRNA target sequence for MGC31963 (NM_144580.1,1214-1232).
gagtaccagtccataaatt

SEQ ID NO: 409940 - DNA, 19 bp, Homo sapiens
  siRNA target sequence for FLJ25436 (NM_144581.1,582-600).
gatggtggacattgcatat

SEQ ID NO: 409941 - DNA, 19 bp, Homo sapiens
  siRNA target sequence for FLJ25436 (NM_144581.1,595-613).
gcatatggcggtgcatttt

SEQ ID NO: 409942 - DNA, 19 bp, Homo sapiens
  siRNA target sequence for FLJ25436 (NM_144581.1,596-614).
catatggcggtgcatttta

SEQ ID NO: 409943 - DNA, 19 bp, Homo sapiens
  siRNA target sequence for FLJ25436 (NM_144581.1,601-619).
ggcggtgcattttatgcat

SEQ ID NO: 409944 - DNA, 19 bp, Homo sapiens
  siRNA target sequence for FLJ25436 (NM_144581.1,602-620).
gcggtgcattttatgcatt

SEQ ID NO: 409945 - DNA, 19 bp, Homo sapiens
  siRNA target sequence for FLJ25436 (NM_144581.1,703-721).
gcagtgaaagctcagttta

SEQ ID NO: 409946 - DNA, 19 bp, Homo sapiens
  siRNA target sequence for FLJ25436 (NM_144581.1,752-770).
cctttttatatggaactat

SEQ ID NO: 409947 - DNA, 19 bp, Homo sapiens
  siRNA target sequence for FLJ25436 (NM_144581.1,781-799).
ggaaaagatgcttatacca

SEQ ID NO: 409948 - DNA, 19 bp, Homo sapiens
  siRNA target sequence for FLJ25436 (NM_144581.1,782-800).
gaaaagatgcttataccaa

SEQ ID NO: 409949 - DNA, 19 bp, Homo sapiens
  siRNA target sequence for FLJ25436 (NM_144581.1,875-893).
cccgaattgccttacagta

SEQ ID NO: 409950 - DNA, 19 bp, Homo sapiens
  siRNA target sequence for FLJ25436 (NM_144581.1,876-894).
ccgaattgccttacagtat

SEQ ID NO: 409951 - DNA, 19 bp, Homo sapiens
  siRNA target sequence for FLJ25436 (NM_144581.1,878-896).
gaattgccttacagtatca

SEQ ID NO: 409952 - DNA, 19 bp, Homo sapiens
  siRNA target sequence for FLJ25436 (NM_144581.1,918-936).
ccagatgagagccttcaaa

SEQ ID NO: 409953 - DNA, 19 bp, Homo sapiens
  siRNA target sequence for FLJ25436 (NM_144581.1,941-959).
gtgcaactggctcagtatt

SEQ ID NO: 409954 - DNA, 19 bp, Homo sapiens
  siRNA target sequence for FLJ25436 (NM_144581.1,1038-1056).
cacgggtacagcaagcttt

SEQ ID NO: 409955 - DNA, 19 bp, Homo sapiens
  siRNA target sequence for FLJ25436 (NM_144581.1,1040-1058).
cgggtacagcaagctttat

SEQ ID NO: 409956 - DNA, 19 bp, Homo sapiens
  siRNA target sequence for FLJ25436 (NM_144581.1,1041-1059).
gggtacagcaagctttata

SEQ ID NO: 409957 - DNA, 19 bp, Homo sapiens
  siRNA target sequence for FLJ25436 (NM_144581.1,1043-1061).
gtacagcaagctttataat

SEQ ID NO: 409958 - DNA, 19 bp, Homo sapiens
  siRNA target sequence for FLJ25436 (NM_144581.1,1046-1064).
cagcaagctttataataga

SEQ ID NO: 409959 - DNA, 19 bp, Homo sapiens
  siRNA target sequence for FLJ25436 (NM_144581.1,1052-1070).
gctttataatagaagatga

SEQ ID NO: 409960 - DNA, 19 bp, Homo sapiens
  siRNA target sequence for FLJ25436 (NM_144581.1,1074-1092).
cccattgagggatggattt

SEQ ID NO: 409961 - DNA, 19 bp, Homo sapiens
  siRNA target sequence for TEX261 (NM_144582.1,19-37).
ctccaccgctgtactgatt

SEQ ID NO: 409962 - DNA, 19 bp, Homo sapiens
  siRNA target sequence for TEX261 (NM_144582.1,91-109).
caccaacctcgtctacttt

SEQ ID NO: 409963 - DNA, 19 bp, Homo sapiens
  siRNA target sequence for TEX261 (NM_144582.1,140-158).
ctgacctcgcctaacttca

SEQ ID NO: 409964 - DNA, 19 bp, Homo sapiens
  siRNA target sequence for TEX261 (NM_144582.1,178-196).
ggtggtgaatcattaccta

SEQ ID NO: 409965 - DNA, 19 bp, Homo sapiens
  siRNA target sequence for TEX261 (NM_144582.1,188-206).
cattacctagcatttcagt

SEQ ID NO: 409966 - DNA, 19 bp, Homo sapiens
  siRNA target sequence for TEX261 (NM_144582.1,205-223).
gttttttgcagaagaatat

SEQ ID NO: 409967 - DNA, 19 bp, Homo sapiens
  siRNA target sequence for TEX261 (NM_144582.1,234-252).
cagaggtcctggcctattt

SEQ ID NO: 409968 - DNA, 19 bp, Homo sapiens
  siRNA target sequence for TEX261 (NM_144582.1,236-254).
gaggtcctggcctatttca

SEQ ID NO: 409969 - DNA, 19 bp, Homo sapiens
  siRNA target sequence for TEX261 (NM_144582.1,275-293).
ccgtttgcgttttttgtgt

SEQ ID NO: 409970 - DNA, 19 bp, Homo sapiens
  siRNA target sequence for TEX261 (NM_144582.1,281-299).
gcgttttttgtgtcacttt

SEQ ID NO: 409971 - DNA, 19 bp, Homo sapiens
  siRNA target sequence for TEX261 (NM_144582.1,341-359).
gatgatgtcgtctccaatt

SEQ ID NO: 409972 - DNA, 19 bp, Homo sapiens
  siRNA target sequence for TEX261 (NM_144582.1,344-362).
gatgtcgtctccaattatt

SEQ ID NO: 409973 - DNA, 19 bp, Homo sapiens
  siRNA target sequence for TEX261 (NM_144582.1,347-365).
gtcgtctccaattatttca

SEQ ID NO: 409974 - DNA, 19 bp, Homo sapiens
  siRNA target sequence for FLJ30525 (NM_144584.1,454-472).
ggttgacggtaattttgaa

SEQ ID NO: 409975 - DNA, 19 bp, Homo sapiens
  siRNA target sequence for FLJ30525 (NM_144584.1,460-478).
cggtaattttgaagaagtt

SEQ ID NO: 409976 - DNA, 19 bp, Homo sapiens
  siRNA target sequence for FLJ30525 (NM_144584.1,483-501).
gggagacggcaattcagtt

SEQ ID NO: 409977 - DNA, 19 bp, Homo sapiens
  siRNA target sequence for FLJ30525 (NM_144584.1,487-505).
gacggcaattcagtttaaa

SEQ ID NO: 409978 - DNA, 19 bp, Homo sapiens
  siRNA target sequence for FLJ30525 (NM_144584.1,490-508).
ggcaattcagtttaaacct

SEQ ID NO: 409979 - DNA, 19 bp, Homo sapiens
  siRNA target sequence for FLJ30525 (NM_144584.1,521-539).
cagcggtaccagttcgtta

SEQ ID NO: 409980 - DNA, 19 bp, Homo sapiens
  siRNA target sequence for FLJ30525 (NM_144584.1,523-541).
gcggtaccagttcgttaaa

SEQ ID NO: 409981 - DNA, 19 bp, Homo sapiens
  siRNA target sequence for FLJ30525 (NM_144584.1,524-542).
cggtaccagttcgttaaaa

SEQ ID NO: 409982 - DNA, 19 bp, Homo sapiens
  siRNA target sequence for FLJ30525 (NM_144584.1,583-601).
gggatgtggtgatacttca

SEQ ID NO: 409983 - DNA, 19 bp, Homo sapiens
  siRNA target sequence for FLJ30525 (NM_144584.1,600-618).
cactcttaaggctgctaaa

SEQ ID NO: 409984 - DNA, 19 bp, Homo sapiens
  siRNA target sequence for FLJ30525 (NM_144584.1,611-629).
ctgctaaaagtcaatccat

SEQ ID NO: 409985 - DNA, 19 bp, Homo sapiens
  siRNA target sequence for FLJ30525 (NM_144584.1,620-638).
gtcaatccatgcattgaat

SEQ ID NO: 409986 - DNA, 19 bp, Homo sapiens
  siRNA target sequence for FLJ30525 (NM_144584.1,640-658).
gcttgttggagtagatatt

SEQ ID NO: 409987 - DNA, 19 bp, Homo sapiens
  siRNA target sequence for FLJ30525 (NM_144584.1,641-659).
cttgttggagtagatatta

SEQ ID NO: 409988 - DNA, 19 bp, Homo sapiens
  siRNA target sequence for FLJ30525 (NM_144584.1,653-671).
gatattaatgaggataaat

SEQ ID NO: 409989 - DNA, 19 bp, Homo sapiens
  siRNA target sequence for FLJ30525 (NM_144584.1,675-693).
gatggagaggggattcgtt

SEQ ID NO: 409990 - DNA, 19 bp, Homo sapiens
  siRNA target sequence for FLJ30525 (NM_144584.1,722-740).
cctcgggatctgaatttga

SEQ ID NO: 409991 - DNA, 19 bp, Homo sapiens
  siRNA target sequence for FLJ30525 (NM_144584.1,739-757).
gaccatcacattgtatcat

SEQ ID NO: 409992 - DNA, 19 bp, Homo sapiens
  siRNA target sequence for FLJ30525 (NM_144584.1,772-790).
gagagactctcgtttgctt

SEQ ID NO: 409993 - DNA, 19 bp, Homo sapiens
  siRNA target sequence for FLJ30525 (NM_144584.1,778-796).
ctctcgtttgcttggattt

SEQ ID NO: 409994 - DNA, 19 bp, Homo sapiens
  siRNA target sequence for FLJ30525 (NM_144584.1,780-798).
ctcgtttgcttggatttga

SEQ ID NO: 409995 - DNA, 19 bp, Homo sapiens
  siRNA target sequence for FLJ30525 (NM_144584.1,782-800).
cgtttgcttggatttgact

SEQ ID NO: 409996 - DNA, 19 bp, Homo sapiens
  siRNA target sequence for FLJ30525 (NM_144584.1,783-801).
gtttgcttggatttgactt

SEQ ID NO: 409997 - DNA, 19 bp, Homo sapiens
  siRNA target sequence for FLJ30525 (NM_144584.1,787-805).
gcttggatttgacttgata

SEQ ID NO: 409998 - DNA, 19 bp, Homo sapiens
  siRNA target sequence for FLJ30525 (NM_144584.1,791-809).
ggatttgacttgataacgt

SEQ ID NO: 409999 - DNA, 19 bp, Homo sapiens
  siRNA target sequence for FLJ30525 (NM_144584.1,799-817).
cttgataacgtgtattgaa

SEQ ID NO: 410000 - DNA, 19 bp, Homo sapiens
  siRNA target sequence for FLJ30525 (NM_144584.1,807-825).
cgtgtattgaattaataga

SEQ ID NO: 410001 - DNA, 19 bp, Homo sapiens
  siRNA target sequence for FLJ30525 (NM_144584.1,810-828).
gtattgaattaatagaaca

SEQ ID NO: 410002 - DNA, 19 bp, Homo sapiens
  siRNA target sequence for FLJ30525 (NM_144584.1,943-961).
gaccttaagagattcagat

SEQ ID NO: 410003 - DNA, 19 bp, Homo sapiens
  siRNA target sequence for FLJ30525 (NM_144584.1,1010-1028).
gtggcaaatcgctatgatt

SEQ ID NO: 410004 - DNA, 19 bp, Homo sapiens
  siRNA target sequence for FLJ30525 (NM_144584.1,1013-1031).
gcaaatcgctatgattact

SEQ ID NO: 410005 - DNA, 19 bp, Homo sapiens
  siRNA target sequence for FLJ30525 (NM_144584.1,1025-1043).
gattactctgtggagttta

SEQ ID NO: 410006 - DNA, 19 bp, Homo sapiens
  siRNA target sequence for FLJ30525 (NM_144584.1,1186-1204).
cacctcatacccaagctta

SEQ ID NO: 410007 - DNA, 19 bp, Homo sapiens
  siRNA target sequence for FLJ30525 (NM_144584.1,1200-1218).
gcttacagcaggaaaggtt

SEQ ID NO: 410008 - DNA, 19 bp, Homo sapiens
  siRNA target sequence for FLJ30525 (NM_144584.1,1205-1223).
cagcaggaaaggttcttta

SEQ ID NO: 410009 - DNA, 19 bp, Homo sapiens
  siRNA target sequence for FLJ30525 (NM_144584.1,1249-1267).
ccaacaagtggaaagctta

SEQ ID NO: 410010 - DNA, 19 bp, Homo sapiens
  siRNA target sequence for FLJ30525 (NM_144584.1,1314-1332).
gtgataagcccaaagacat

SEQ ID NO: 410011 - DNA, 19 bp, Homo sapiens
  siRNA target sequence for FLJ30525 (NM_144584.1,1345-1363).
ggcccctgtcccatgcttt

SEQ ID NO: 410012 - DNA, 19 bp, Homo sapiens
  siRNA target sequence for FLJ30525 (NM_144584.1,1460-1478).
cttgcgtatcccaagttga

SEQ ID NO: 410013 - DNA, 19 bp, Homo sapiens
  siRNA target sequence for FLJ30525 (NM_144584.1,1471-1489).
caagttgaaccgcttatgt

SEQ ID NO: 410014 - DNA, 19 bp, Homo sapiens
  siRNA target sequence for FLJ30525 (NM_144584.1,1480-1498).
ccgcttatgtgctaatgaa

SEQ ID NO: 410015 - DNA, 19 bp, Homo sapiens
  siRNA target sequence for FLJ30525 (NM_144584.1,1559-1577).
gtggctgacctgcgtaatt

SEQ ID NO: 410016 - DNA, 19 bp, Homo sapiens
  siRNA target sequence for FLJ30525 (NM_144584.1,1563-1581).
ctgacctgcgtaattattt

SEQ ID NO: 410017 - DNA, 19 bp, Homo sapiens
  siRNA target sequence for FLJ30525 (NM_144584.1,1570-1588).
gcgtaattattttgatgaa

SEQ ID NO: 410018 - DNA, 19 bp, Homo sapiens
  siRNA target sequence for MGC29643 (NM_144586.3,296-314).
caactttttgcggattgtt

SEQ ID NO: 410019 - DNA, 19 bp, Homo sapiens
  siRNA target sequence for MGC29643 (NM_144586.3,299-317).
ctttttgcggattgttctt

SEQ ID NO: 410020 - DNA, 19 bp, Homo sapiens
  siRNA target sequence for MGC29643 (NM_144586.3,323-341).
caggctttgcgctgcaaat

SEQ ID NO: 410021 - DNA, 19 bp, Homo sapiens
  siRNA target sequence for MGC29643 (NM_144586.3,326-344).
gctttgcgctgcaaatcca

SEQ ID NO: 410022 - DNA, 19 bp, Homo sapiens
  siRNA target sequence for MGC29643 (NM_144586.3,347-365).
gctaccagtgtgaagaatt

SEQ ID NO: 410023 - DNA, 19 bp, Homo sapiens
  siRNA target sequence for MGC29643 (NM_144586.3,386-404).
cctcccccgagttcattgt

SEQ ID NO: 410024 - DNA, 19 bp, Homo sapiens
  siRNA target sequence for MGC29643 (NM_144586.3,410-428).
gcacggtgaacgttcaaga

SEQ ID NO: 410025 - DNA, 19 bp, Homo sapiens
  siRNA target sequence for MGC29643 (NM_144586.3,413-431).
cggtgaacgttcaagacat

SEQ ID NO: 410026 - DNA, 19 bp, Homo sapiens
  siRNA target sequence for MGC29643 (NM_144586.3,594-612).
cgggccaaggcccaagaaa

SEQ ID NO: 410027 - DNA, 19 bp, Homo sapiens
  siRNA target sequence for FLJ25359 (NM_144587.1,374-392).
ggctctgagcatagacttt

SEQ ID NO: 410028 - DNA, 19 bp, Homo sapiens
  siRNA target sequence for FLJ25359 (NM_144587.1,411-429).
ccagacaggttatgcattt

SEQ ID NO: 410029 - DNA, 19 bp, Homo sapiens
  siRNA target sequence for FLJ25359 (NM_144587.1,503-521).
cgagtgcctgggcttcaaa

SEQ ID NO: 410030 - DNA, 19 bp, Homo sapiens
  siRNA target sequence for FLJ25359 (NM_144587.1,634-652).
gagctcaatcacctaagaa

SEQ ID NO: 410031 - DNA, 19 bp, Homo sapiens
  siRNA target sequence for FLJ25359 (NM_144587.1,636-654).
gctcaatcacctaagaaga

SEQ ID NO: 410032 - DNA, 19 bp, Homo sapiens
  siRNA target sequence for FLJ25359 (NM_144587.1,670-688).
ctgcaaagaggatcatcat

SEQ ID NO: 410033 - DNA, 19 bp, Homo sapiens
  siRNA target sequence for FLJ25359 (NM_144587.1,760-778).
gtgaggtggagattaactt

SEQ ID NO: 410034 - DNA, 19 bp, Homo sapiens
  siRNA target sequence for FLJ25359 (NM_144587.1,940-958).
gcgagaagtggctggaaat

SEQ ID NO: 410035 - DNA, 19 bp, Homo sapiens
  siRNA target sequence for FLJ25359 (NM_144587.1,1036-1054).
cccccaggttatttacctt

SEQ ID NO: 410036 - DNA, 19 bp, Homo sapiens
  siRNA target sequence for FLJ25359 (NM_144587.1,1037-1055).
ccccaggttatttaccttt

SEQ ID NO: 410037 - DNA, 19 bp, Homo sapiens
  siRNA target sequence for FLJ25359 (NM_144587.1,1038-1056).
cccaggttatttaccttta

SEQ ID NO: 410038 - DNA, 19 bp, Homo sapiens
  siRNA target sequence for FLJ25359 (NM_144587.1,1040-1058).
caggttatttacctttagt

SEQ ID NO: 410039 - DNA, 19 bp, Homo sapiens
  siRNA target sequence for FLJ25359 (NM_144587.1,1090-1108).
gggtcttcttgcaactgaa

SEQ ID NO: 410040 - DNA, 19 bp, Homo sapiens
  siRNA target sequence for FLJ25359 (NM_144587.1,1100-1118).
gcaactgaactacaagatt

SEQ ID NO: 410041 - DNA, 19 bp, Homo sapiens
  siRNA target sequence for FLJ25359 (NM_144587.1,1121-1139).
ggcaattccgacttatgaa

SEQ ID NO: 410042 - DNA, 19 bp, Homo sapiens
  siRNA target sequence for FLJ25359 (NM_144587.1,1143-1161).
gtgatgacattttttaaga

SEQ ID NO: 410043 - DNA, 19 bp, Homo sapiens
  siRNA target sequence for FLJ25359 (NM_144587.1,1269-1287).
gtgctgcggcaccttaact

SEQ ID NO: 410044 - DNA, 19 bp, Homo sapiens
  siRNA target sequence for FLJ25359 (NM_144587.1,1272-1290).
ctgcggcaccttaacttct

SEQ ID NO: 410045 - DNA, 19 bp, Homo sapiens
  siRNA target sequence for FLJ25359 (NM_144587.1,1303-1321).
ggctcgaccaggttacagt

SEQ ID NO: 410046 - DNA, 19 bp, Homo sapiens
  siRNA target sequence for FLJ25359 (NM_144587.1,1311-1329).
caggttacagtcaaccatt

SEQ ID NO: 410047 - DNA, 19 bp, Homo sapiens
  siRNA target sequence for FLJ25359 (NM_144587.1,1355-1373).
catggtccacctgaaagat

SEQ ID NO: 410048 - DNA, 19 bp, Homo sapiens
  siRNA target sequence for FLJ25359 (NM_144587.1,1358-1376).
ggtccacctgaaagatctt

SEQ ID NO: 410049 - DNA, 19 bp, Homo sapiens
  siRNA target sequence for FLJ25359 (NM_144587.1,1359-1377).
gtccacctgaaagatctta

SEQ ID NO: 410050 - DNA, 19 bp, Homo sapiens
  siRNA target sequence for FLJ25359 (NM_144587.1,1362-1380).
cacctgaaagatcttaaca

SEQ ID NO: 410051 - DNA, 19 bp, Homo sapiens
  siRNA target sequence for FLJ25359 (NM_144587.1,1379-1397).
cacccaggctgtgagattt

SEQ ID NO: 410052 - DNA, 19 bp, Homo sapiens
  siRNA target sequence for FLJ25359 (NM_144587.1,1393-1411).
gatttgggctgctctttaa

SEQ ID NO: 410053 - DNA, 19 bp, Homo sapiens
  siRNA target sequence for FLJ25359 (NM_144587.1,1412-1430).
ccaggagaatacaacttat

SEQ ID NO: 410054 - DNA, 19 bp, Homo sapiens
  siRNA target sequence for FLJ25359 (NM_144587.1,1416-1434).
gagaatacaacttattcga

SEQ ID NO: 410055 - DNA, 19 bp, Homo sapiens
  siRNA target sequence for FLJ25359 (NM_144587.1,1418-1436).
gaatacaacttattcgaaa

SEQ ID NO: 410056 - DNA, 19 bp, Homo sapiens
  siRNA target sequence for FLJ25359 (NM_144587.1,1432-1450).
cgaaaacgattgctctata

SEQ ID NO: 410057 - DNA, 19 bp, Homo sapiens
  siRNA target sequence for FLJ25359 (NM_144587.1,1438-1456).
cgattgctctatatggatt

SEQ ID NO: 410058 - DNA, 19 bp, Homo sapiens
  siRNA target sequence for FLJ25359 (NM_144587.1,1443-1461).
gctctatatggattcttct

SEQ ID NO: 410059 - DNA, 19 bp, Homo sapiens
  siRNA target sequence for FLJ25359 (NM_144587.1,1444-1462).
ctctatatggattcttctt

SEQ ID NO: 410060 - DNA, 19 bp, Homo sapiens
  siRNA target sequence for FLJ25359 (NM_144587.1,1446-1464).
ctatatggattcttcttta

SEQ ID NO: 410061 - DNA, 19 bp, Homo sapiens
  siRNA target sequence for FLJ25359 (NM_144587.1,1466-1484).
gataaagggactcaaacat

SEQ ID NO: 410062 - DNA, 19 bp, Homo sapiens
  siRNA target sequence for FLJ25359 (NM_144587.1,1473-1491).
ggactcaaacatgatacta

SEQ ID NO: 410063 - DNA, 19 bp, Homo sapiens
  siRNA target sequence for FLJ25359 (NM_144587.1,1482-1500).
catgatactacctcttata

SEQ ID NO: 410064 - DNA, 19 bp, Homo sapiens
  siRNA target sequence for FLJ25359 (NM_144587.1,1489-1507).
ctacctcttatagttttta

SEQ ID NO: 410065 - DNA, 19 bp, Homo sapiens
  siRNA target sequence for FLJ25359 (NM_144587.1,1582-1600).
cggcacgcctggtgaagta

SEQ ID NO: 410066 - DNA, 19 bp, Homo sapiens
  siRNA target sequence for FLJ25359 (NM_144587.1,1583-1601).
ggcacgcctggtgaagtat

SEQ ID NO: 410067 - DNA, 19 bp, Homo sapiens
  siRNA target sequence for FLJ25359 (NM_144587.1,1585-1603).
cacgcctggtgaagtatga

SEQ ID NO: 410068 - DNA, 19 bp, Homo sapiens
  siRNA target sequence for FLJ25359 (NM_144587.1,1727-1745).
catcccaatctatgtaagt

SEQ ID NO: 410069 - DNA, 19 bp, Homo sapiens
  siRNA target sequence for MGC22805 (NM_144590.1,218-236).
gtggcggtgggtgaaagaa

SEQ ID NO: 410070 - DNA, 19 bp, Homo sapiens
  siRNA target sequence for MGC22805 (NM_144590.1,244-262).
gctatgccaacgttcaaga

SEQ ID NO: 410071 - DNA, 19 bp, Homo sapiens
  siRNA target sequence for MGC22805 (NM_144590.1,254-272).
cgttcaagatggctttaat

SEQ ID NO: 410072 - DNA, 19 bp, Homo sapiens
  siRNA target sequence for MGC22805 (NM_144590.1,301-319).
ggcgagggcatgtgagaat

SEQ ID NO: 410073 - DNA, 19 bp, Homo sapiens
  siRNA target sequence for MGC22805 (NM_144590.1,316-334).
gaatcgtttccttcctttt

SEQ ID NO: 410074 - DNA, 19 bp, Homo sapiens
  siRNA target sequence for MGC22805 (NM_144590.1,345-363).
gctaatgtcaacctcaaaa

SEQ ID NO: 410075 - DNA, 19 bp, Homo sapiens
  siRNA target sequence for MGC22805 (NM_144590.1,426-444).
ctactaattatcctcttaa

SEQ ID NO: 410076 - DNA, 19 bp, Homo sapiens
  siRNA target sequence for MGC22805 (NM_144590.1,462-480).
gggtatttcctcatggtat

SEQ ID NO: 410077 - DNA, 19 bp, Homo sapiens
  siRNA target sequence for MGC22805 (NM_144590.1,500-518).
ggctcttgtacgaatgcta

SEQ ID NO: 410078 - DNA, 19 bp, Homo sapiens
  siRNA target sequence for MGC22805 (NM_144590.1,533-551).
cgaagttaatgctacagat

SEQ ID NO: 410079 - DNA, 19 bp, Homo sapiens
  siRNA target sequence for MGC22805 (NM_144590.1,537-555).
gttaatgctacagattgtt

SEQ ID NO: 410080 - DNA, 19 bp, Homo sapiens
  siRNA target sequence for MGC22805 (NM_144590.1,558-576).
ggctgtaccgcattacatt

SEQ ID NO: 410081 - DNA, 19 bp, Homo sapiens
  siRNA target sequence for MGC22805 (NM_144590.1,559-577).
gctgtaccgcattacatta

SEQ ID NO: 410082 - DNA, 19 bp, Homo sapiens
  siRNA target sequence for MGC22805 (NM_144590.1,560-578).
ctgtaccgcattacattat

SEQ ID NO: 410083 - DNA, 19 bp, Homo sapiens
  siRNA target sequence for MGC22805 (NM_144590.1,671-689).
ggatattgcacggagatta

SEQ ID NO: 410084 - DNA, 19 bp, Homo sapiens
  siRNA target sequence for MGC22805 (NM_144590.1,672-690).
gatattgcacggagattaa

SEQ ID NO: 410085 - DNA, 19 bp, Homo sapiens
  siRNA target sequence for MGC22805 (NM_144590.1,678-696).
gcacggagattaaaatttt

SEQ ID NO: 410086 - DNA, 19 bp, Homo sapiens
  siRNA target sequence for MGC22805 (NM_144590.1,697-715).
cccagattgaattaatgct

SEQ ID NO: 410087 - DNA, 19 bp, Homo sapiens
  siRNA target sequence for MGC22805 (NM_144590.1,698-716).
ccagattgaattaatgcta

SEQ ID NO: 410088 - DNA, 19 bp, Homo sapiens
  siRNA target sequence for C10orf32 (NM_144591.1,109-127).
cctgtggtactgacgtaat

SEQ ID NO: 410089 - DNA, 19 bp, Homo sapiens
  siRNA target sequence for C10orf32 (NM_144591.1,215-233).
catcttgcactcagaagat

SEQ ID NO: 410090 - DNA, 19 bp, Homo sapiens
  siRNA target sequence for C10orf32 (NM_144591.1,221-239).
gcactcagaagatagttta

SEQ ID NO: 410091 - DNA, 19 bp, Homo sapiens
  siRNA target sequence for C10orf32 (NM_144591.1,286-304).
ctattcagaagaatgttga

SEQ ID NO: 410092 - DNA, 19 bp, Homo sapiens
  siRNA target sequence for C10orf6 (NM_144592.1,1143-1161).
cacaaaggtttgttagcat

SEQ ID NO: 410093 - DNA, 19 bp, Homo sapiens
  siRNA target sequence for C10orf6 (NM_144592.1,1204-1222).
gcttacttttaatttacct

SEQ ID NO: 410094 - DNA, 19 bp, Homo sapiens
  siRNA target sequence for C10orf6 (NM_144592.1,1238-1256).
gagaaattagcgtgcattt

SEQ ID NO: 410095 - DNA, 19 bp, Homo sapiens
  siRNA target sequence for C10orf6 (NM_144592.1,1268-1286).
gtcaactgtgttagaataa

SEQ ID NO: 410096 - DNA, 19 bp, Homo sapiens
  siRNA target sequence for FLJ32942 (NM_144594.1,97-115).
gcaatgcccctatgacaaa

SEQ ID NO: 410097 - DNA, 19 bp, Homo sapiens
  siRNA target sequence for FLJ32942 (NM_144594.1,98-116).
caatgcccctatgacaaaa

SEQ ID NO: 410098 - DNA, 19 bp, Homo sapiens
  siRNA target sequence for FLJ32942 (NM_144594.1,103-121).
cccctatgacaaaaaccat

SEQ ID NO: 410099 - DNA, 19 bp, Homo sapiens
  siRNA target sequence for FLJ32942 (NM_144594.1,138-156).
ggtttccttatcatcttat

SEQ ID NO: 410100 - DNA, 19 bp, Homo sapiens
  siRNA target sequence for FLJ32942 (NM_144594.1,143-161).
ccttatcatcttatcaagt

SEQ ID NO: 410101 - DNA, 19 bp, Homo sapiens
  siRNA target sequence for FLJ32942 (NM_144594.1,152-170).
cttatcaagtgcagaaaga

SEQ ID NO: 410102 - DNA, 19 bp, Homo sapiens
  siRNA target sequence for FLJ32942 (NM_144594.1,176-194).
cctgatgttgcaagcaaat

SEQ ID NO: 410103 - DNA, 19 bp, Homo sapiens
  siRNA target sequence for FLJ32942 (NM_144594.1,196-214).
ggctacttgtcccttcaat

SEQ ID NO: 410104 - DNA, 19 bp, Homo sapiens
  siRNA target sequence for FLJ32942 (NM_144594.1,227-245).
gttcctcgagctgaaatta

SEQ ID NO: 410105 - DNA, 19 bp, Homo sapiens
  siRNA target sequence for FLJ32942 (NM_144594.1,231-249).
ctcgagctgaaattagtca

SEQ ID NO: 410106 - DNA, 19 bp, Homo sapiens
  siRNA target sequence for FLJ32942 (NM_144594.1,276-294).
gttgtattgagcaagatgt

SEQ ID NO: 410107 - DNA, 19 bp, Homo sapiens
  siRNA target sequence for FLJ32942 (NM_144594.1,287-305).
caagatgttgtcaaccaaa

SEQ ID NO: 410108 - DNA, 19 bp, Homo sapiens
  siRNA target sequence for FLJ30046 (NM_144595.2,248-266).
gcaagattatgcttctact

SEQ ID NO: 410109 - DNA, 19 bp, Homo sapiens
  siRNA target sequence for FLJ30046 (NM_144595.2,249-267).
caagattatgcttctactt

SEQ ID NO: 410110 - DNA, 19 bp, Homo sapiens
  siRNA target sequence for FLJ30046 (NM_144595.2,322-340).
ggacatgtagtgatcaaga

SEQ ID NO: 410111 - DNA, 19 bp, Homo sapiens
  siRNA target sequence for FLJ30046 (NM_144595.2,323-341).
gacatgtagtgatcaagaa

SEQ ID NO: 410112 - DNA, 19 bp, Homo sapiens
  siRNA target sequence for FLJ30046 (NM_144595.2,430-448).
gaggaattccccattcaca

SEQ ID NO: 410113 - DNA, 19 bp, Homo sapiens
  siRNA target sequence for FLJ30046 (NM_144595.2,515-533).
ccagcagcaacagtattat

SEQ ID NO: 410114 - DNA, 19 bp, Homo sapiens
  siRNA target sequence for FLJ30046 (NM_144595.2,518-536).
gcagcaacagtattattca

SEQ ID NO: 410115 - DNA, 19 bp, Homo sapiens
  siRNA target sequence for FLJ30046 (NM_144595.2,582-600).
gataagctccgaagaagta

SEQ ID NO: 410116 - DNA, 19 bp, Homo sapiens
  siRNA target sequence for FLJ30046 (NM_144595.2,614-632).
ccggatgccaagtacaact

SEQ ID NO: 410117 - DNA, 19 bp, Homo sapiens
  siRNA target sequence for FLJ30046 (NM_144595.2,633-651).
gccattagtagcaacatta

SEQ ID NO: 410118 - DNA, 19 bp, Homo sapiens
  siRNA target sequence for FLJ30046 (NM_144595.2,657-675).
ccggtcaccgtgcgaaata

SEQ ID NO: 410119 - DNA, 19 bp, Homo sapiens
  siRNA target sequence for FLJ30046 (NM_144595.2,659-677).
ggtcaccgtgcgaaatagt

SEQ ID NO: 410120 - DNA, 19 bp, Homo sapiens
  siRNA target sequence for FLJ30046 (NM_144595.2,796-814).
ctatccgacagcctcttaa

SEQ ID NO: 410121 - DNA, 19 bp, Homo sapiens
  siRNA target sequence for FLJ30046 (NM_144595.2,958-976).
gaccttcgttggcaataaa

SEQ ID NO: 410122 - DNA, 19 bp, Homo sapiens
  siRNA target sequence for FLJ30046 (NM_144595.2,986-1004).
cctgcctcgaagcaaaatt

SEQ ID NO: 410123 - DNA, 19 bp, Homo sapiens
  siRNA target sequence for FLJ30046 (NM_144595.2,1005-1023).
gcacaacctgttagaagtt

SEQ ID NO: 410124 - DNA, 19 bp, Homo sapiens
  siRNA target sequence for FLJ30046 (NM_144595.2,1058-1076).
cactctgagggatggaaat

SEQ ID NO: 410125 - DNA, 19 bp, Homo sapiens
  siRNA target sequence for TTC8 (NM_144596.1,113-131).
cagctctgcgccgatctat

SEQ ID NO: 410126 - DNA, 19 bp, Homo sapiens
  siRNA target sequence for TTC8 (NM_144596.1,163-181).
ccaggcagcttggatctta

SEQ ID NO: 410127 - DNA, 19 bp, Homo sapiens
  siRNA target sequence for TTC8 (NM_144596.1,185-203).
gcaagagcgctaacagaaa

SEQ ID NO: 410128 - DNA, 19 bp, Homo sapiens
  siRNA target sequence for TTC8 (NM_144596.1,186-204).
caagagcgctaacagaaat

SEQ ID NO: 410129 - DNA, 19 bp, Homo sapiens
  siRNA target sequence for TTC8 (NM_144596.1,189-207).
gagcgctaacagaaatggt

SEQ ID NO: 410130 - DNA, 19 bp, Homo sapiens
  siRNA target sequence for TTC8 (NM_144596.1,191-209).
gcgctaacagaaatggtat

SEQ ID NO: 410131 - DNA, 19 bp, Homo sapiens
  siRNA target sequence for TTC8 (NM_144596.1,291-309).
ctggaacgtctttgaaact

SEQ ID NO: 410132 - DNA, 19 bp, Homo sapiens
  siRNA target sequence for TTC8 (NM_144596.1,308-326).
ctccctggaactaatcaga

SEQ ID NO: 410133 - DNA, 19 bp, Homo sapiens
  siRNA target sequence for TTC8 (NM_144596.1,343-361).
ggccgttaggccaatcaca

SEQ ID NO: 410134 - DNA, 19 bp, Homo sapiens
  siRNA target sequence for TTC8 (NM_144596.1,477-495).
ccagctcctccggaagatt

SEQ ID NO: 410135 - DNA, 19 bp, Homo sapiens
  siRNA target sequence for TTC8 (NM_144596.1,478-496).
cagctcctccggaagattt

SEQ ID NO: 410136 - DNA, 19 bp, Homo sapiens
  siRNA target sequence for TTC8 (NM_144596.1,480-498).
gctcctccggaagatttgt

SEQ ID NO: 410137 - DNA, 19 bp, Homo sapiens
  siRNA target sequence for TTC8 (NM_144596.1,506-524).
ggaacggcttccatgctta

SEQ ID NO: 410138 - DNA, 19 bp, Homo sapiens
  siRNA target sequence for TTC8 (NM_144596.1,528-546).
gtcctgatggaccatttat

SEQ ID NO: 410139 - DNA, 19 bp, Homo sapiens
  siRNA target sequence for TTC8 (NM_144596.1,533-551).
gatggaccatttataaatt

SEQ ID NO: 410140 - DNA, 19 bp, Homo sapiens
  siRNA target sequence for TTC8 (NM_144596.1,607-625).
gtttgagtatatctttcat

SEQ ID NO: 410141 - DNA, 19 bp, Homo sapiens
  siRNA target sequence for TTC8 (NM_144596.1,613-631).
gtatatctttcatcatgaa

SEQ ID NO: 410142 - DNA, 19 bp, Homo sapiens
  siRNA target sequence for TTC8 (NM_144596.1,645-663).
ctattcatcttgaagatgt

SEQ ID NO: 410143 - DNA, 19 bp, Homo sapiens
  siRNA target sequence for TTC8 (NM_144596.1,677-695).
ggaatttacccattcttat

SEQ ID NO: 410144 - DNA, 19 bp, Homo sapiens
  siRNA target sequence for TTC8 (NM_144596.1,678-696).
gaatttacccattcttatt

SEQ ID NO: 410145 - DNA, 19 bp, Homo sapiens
  siRNA target sequence for TTC8 (NM_144596.1,686-704).
ccattcttattgaggaata

SEQ ID NO: 410146 - DNA, 19 bp, Homo sapiens
  siRNA target sequence for TTC8 (NM_144596.1,774-792).
ggtggtggaaagtacagat

SEQ ID NO: 410147 - DNA, 19 bp, Homo sapiens
  siRNA target sequence for TTC8 (NM_144596.1,775-793).
gtggtggaaagtacagatt

SEQ ID NO: 410148 - DNA, 19 bp, Homo sapiens
  siRNA target sequence for TTC8 (NM_144596.1,820-838).
gtatcgtgaagcagaaaaa

SEQ ID NO: 410149 - DNA, 19 bp, Homo sapiens
  siRNA target sequence for TTC8 (NM_144596.1,884-902).
ctgtacttggcaaaagttt

SEQ ID NO: 410150 - DNA, 19 bp, Homo sapiens
  siRNA target sequence for TTC8 (NM_144596.1,894-912).
caaaagtttatgtctcatt

SEQ ID NO: 410151 - DNA, 19 bp, Homo sapiens
  siRNA target sequence for TTC8 (NM_144596.1,987-1005).
gtggaattgcaagaatcta

SEQ ID NO: 410152 - DNA, 19 bp, Homo sapiens
  siRNA target sequence for TTC8 (NM_144596.1,990-1008).
gaattgcaagaatctatga

SEQ ID NO: 410153 - DNA, 19 bp, Homo sapiens
  siRNA target sequence for TTC8 (NM_144596.1,1024-1042).
gtcatcagcagcagaatat

SEQ ID NO: 410154 - DNA, 19 bp, Homo sapiens
  siRNA target sequence for TTC8 (NM_144596.1,1082-1100).
gccatcgcatgcattggaa

SEQ ID NO: 410155 - DNA, 19 bp, Homo sapiens
  siRNA target sequence for TTC8 (NM_144596.1,1101-1119).
gcaaccacttctattctga

SEQ ID NO: 410156 - DNA, 19 bp, Homo sapiens
  siRNA target sequence for TTC8 (NM_144596.1,1156-1174).
gctgcagatgggcatttat

SEQ ID NO: 410157 - DNA, 19 bp, Homo sapiens
  siRNA target sequence for TTC8 (NM_144596.1,1177-1195).
cggccagctttttaacaat

SEQ ID NO: 410158 - DNA, 19 bp, Homo sapiens
  siRNA target sequence for TTC8 (NM_144596.1,1289-1307).
gctgatgtctggtacaact

SEQ ID NO: 410159 - DNA, 19 bp, Homo sapiens
  siRNA target sequence for TTC8 (NM_144596.1,1447-1465).
ggcaagggcactattacaa

SEQ ID NO: 410160 - DNA, 19 bp, Homo sapiens
  siRNA target sequence for TTC8 (NM_144596.1,1448-1466).
gcaagggcactattacaaa

SEQ ID NO: 410161 - DNA, 19 bp, Homo sapiens
  siRNA target sequence for TTC8 (NM_144596.1,1476-1494).
cattagcaccccatatgta

SEQ ID NO: 410162 - DNA, 19 bp, Homo sapiens
  siRNA target sequence for TTC8 (NM_144596.1,1514-1532).
gcaacaatctctgataaga

SEQ ID NO: 410163 - DNA, 19 bp, Homo sapiens
  siRNA target sequence for TTC8 (NM_144596.1,1515-1533).
caacaatctctgataagat

SEQ ID NO: 410164 - DNA, 19 bp, Homo sapiens
  siRNA target sequence for MGC29937 (NM_144597.1,165-183).
gcagttgatcctaaaggat

SEQ ID NO: 410165 - DNA, 19 bp, Homo sapiens
  siRNA target sequence for MGC29937 (NM_144597.1,190-208).
ccatagccatccatgcaaa

SEQ ID NO: 410166 - DNA, 19 bp, Homo sapiens
  siRNA target sequence for MGC29937 (NM_144597.1,191-209).
catagccatccatgcaaaa

SEQ ID NO: 410167 - DNA, 19 bp, Homo sapiens
  siRNA target sequence for MGC29937 (NM_144597.1,303-321).
gagctctgtcggtatcttt

SEQ ID NO: 410168 - DNA, 19 bp, Homo sapiens
  siRNA target sequence for MGC29937 (NM_144597.1,370-388).
gtaaatctcgtgaaaaggt

SEQ ID NO: 410169 - DNA, 19 bp, Homo sapiens
  siRNA target sequence for MGC29937 (NM_144597.1,409-427).
caactccagaagagatctt

SEQ ID NO: 410170 - DNA, 19 bp, Homo sapiens
  siRNA target sequence for MGC24976 (NM_144598.2,278-296).
gtacttggagagactctat

SEQ ID NO: 410171 - DNA, 19 bp, Homo sapiens
  siRNA target sequence for MGC24976 (NM_144598.2,363-381).
ctatacctgcactcaaata

SEQ ID NO: 410172 - DNA, 19 bp, Homo sapiens
  siRNA target sequence for MGC24976 (NM_144598.2,368-386).
cctgcactcaaataacata

SEQ ID NO: 410173 - DNA, 19 bp, Homo sapiens
  siRNA target sequence for MGC24976 (NM_144598.2,371-389).
gcactcaaataacatagtt

SEQ ID NO: 410174 - DNA, 19 bp, Homo sapiens
  siRNA target sequence for MGC24976 (NM_144598.2,425-443).
ccaatgtctggatcttagt

SEQ ID NO: 410175 - DNA, 19 bp, Homo sapiens
  siRNA target sequence for MGC24976 (NM_144598.2,442-460).
gtgacaatgccttagaaat

SEQ ID NO: 410176 - DNA, 19 bp, Homo sapiens
  siRNA target sequence for MGC24976 (NM_144598.2,446-464).
caatgccttagaaattgtt

SEQ ID NO: 410177 - DNA, 19 bp, Homo sapiens
  siRNA target sequence for MGC24976 (NM_144598.2,485-503).
gagagctttacgtcatctt

SEQ ID NO: 410178 - DNA, 19 bp, Homo sapiens
  siRNA target sequence for MGC24976 (NM_144598.2,495-513).
cgtcatcttcgattagcta

SEQ ID NO: 410179 - DNA, 19 bp, Homo sapiens
  siRNA target sequence for MGC24976 (NM_144598.2,496-514).
gtcatcttcgattagctaa

SEQ ID NO: 410180 - DNA, 19 bp, Homo sapiens
  siRNA target sequence for MGC24976 (NM_144598.2,498-516).
catcttcgattagctaata

SEQ ID NO: 410181 - DNA, 19 bp, Homo sapiens
  siRNA target sequence for MGC24976 (NM_144598.2,538-556).
cagaggttggcgatttgaa

SEQ ID NO: 410182 - DNA, 19 bp, Homo sapiens
  siRNA target sequence for MGC24976 (NM_144598.2,583-601).
ccaatcgtttgctaacttt

SEQ ID NO: 410183 - DNA, 19 bp, Homo sapiens
  siRNA target sequence for MGC24976 (NM_144598.2,584-602).
caatcgtttgctaacttta

SEQ ID NO: 410184 - DNA, 19 bp, Homo sapiens
  siRNA target sequence for MGC24976 (NM_144598.2,641-659).
cactgtggaccgaaatcgt

SEQ ID NO: 410185 - DNA, 19 bp, Homo sapiens
  siRNA target sequence for MGC24976 (NM_144598.2,650-668).
ccgaaatcgtctatggtat

SEQ ID NO: 410186 - DNA, 19 bp, Homo sapiens
  siRNA target sequence for MGC24976 (NM_144598.2,718-736).
ctggaaaccgtcttgcatt

SEQ ID NO: 410187 - DNA, 19 bp, Homo sapiens
  siRNA target sequence for MGC24976 (NM_144598.2,720-738).
ggaaaccgtcttgcatttt

SEQ ID NO: 410188 - DNA, 19 bp, Homo sapiens
  siRNA target sequence for MGC24976 (NM_144598.2,732-750).
gcatttttgccacttgatt

SEQ ID NO: 410189 - DNA, 19 bp, Homo sapiens
  siRNA target sequence for MGC24976 (NM_144598.2,754-772).
gtcgatctcgagaactaca

SEQ ID NO: 410190 - DNA, 19 bp, Homo sapiens
  siRNA target sequence for MGC24976 (NM_144598.2,757-775).
gatctcgagaactacagta

SEQ ID NO: 410191 - DNA, 19 bp, Homo sapiens
  siRNA target sequence for MGC24976 (NM_144598.2,760-778).
ctcgagaactacagtatgt

SEQ ID NO: 410192 - DNA, 19 bp, Homo sapiens
  siRNA target sequence for MGC24976 (NM_144598.2,777-795).
gtatacgtggataacaaca

SEQ ID NO: 410193 - DNA, 19 bp, Homo sapiens
  siRNA target sequence for MGC24976 (NM_144598.2,808-826).
gcttgccatcttatctgta

SEQ ID NO: 410194 - DNA, 19 bp, Homo sapiens
  siRNA target sequence for MGC24976 (NM_144598.2,812-830).
gccatcttatctgtacaat

SEQ ID NO: 410195 - DNA, 19 bp, Homo sapiens
  siRNA target sequence for MGC24976 (NM_144598.2,813-831).
ccatcttatctgtacaata

SEQ ID NO: 410196 - DNA, 19 bp, Homo sapiens
  siRNA target sequence for MGC24976 (NM_144598.2,851-869).
ctgtggtgctcccattcaa

SEQ ID NO: 410197 - DNA, 19 bp, Homo sapiens
  siRNA target sequence for MGC24976 (NM_144598.2,855-873).
ggtgctcccattcaagttt

SEQ ID NO: 410198 - DNA, 19 bp, Homo sapiens
  siRNA target sequence for MGC24976 (NM_144598.2,904-922).
ggcagcgaaccgttttcct

SEQ ID NO: 410199 - DNA, 19 bp, Homo sapiens
  siRNA target sequence for MGC24976 (NM_144598.2,985-1003).
ctatgagagggctgtatca

SEQ ID NO: 410200 - DNA, 19 bp, Homo sapiens
  siRNA target sequence for MGC24976 (NM_144598.2,991-1009).
gagggctgtatcataccta

SEQ ID NO: 410201 - DNA, 19 bp, Homo sapiens
  siRNA target sequence for MGC24976 (NM_144598.2,1105-1123).
ggtgtagtgagcctatgtt

SEQ ID NO: 410202 - DNA, 19 bp, Homo sapiens
  siRNA target sequence for MGC24976 (NM_144598.2,1106-1124).
gtgtagtgagcctatgttt

SEQ ID NO: 410203 - DNA, 19 bp, Homo sapiens
  siRNA target sequence for MGC24976 (NM_144598.2,1111-1129).
gtgagcctatgtttaccat

SEQ ID NO: 410204 - DNA, 19 bp, Homo sapiens
  siRNA target sequence for MGC24976 (NM_144598.2,1184-1202).
gtggaagacaactgttagt

SEQ ID NO: 410205 - DNA, 19 bp, Homo sapiens
  siRNA target sequence for MGC24976 (NM_144598.2,1187-1205).
gaagacaactgttagtttt

SEQ ID NO: 410206 - DNA, 19 bp, Homo sapiens
  siRNA target sequence for SPG6 (NM_144599.2,1403-1421).
gtaccgttcgggtccattt

SEQ ID NO: 410207 - DNA, 19 bp, Homo sapiens
  siRNA target sequence for SPG6 (NM_144599.2,1408-1426).
gttcgggtccattttagct

SEQ ID NO: 410208 - DNA, 19 bp, Homo sapiens
  siRNA target sequence for SPG6 (NM_144599.2,1414-1432).
gtccattttagcttcctat

SEQ ID NO: 410209 - DNA, 19 bp, Homo sapiens
  siRNA target sequence for SPG6 (NM_144599.2,1490-1508).
ggctccgtcgtgctgatta

SEQ ID NO: 410210 - DNA, 19 bp, Homo sapiens
  siRNA target sequence for SPG6 (NM_144599.2,1491-1509).
gctccgtcgtgctgattat

SEQ ID NO: 410211 - DNA, 19 bp, Homo sapiens
  siRNA target sequence for SPG6 (NM_144599.2,1494-1512).
ccgtcgtgctgattatcca

SEQ ID NO: 410212 - DNA, 19 bp, Homo sapiens
  siRNA target sequence for SPG6 (NM_144599.2,1561-1579).
gctgaccaatccagtgttt

SEQ ID NO: 410213 - DNA, 19 bp, Homo sapiens
  siRNA target sequence for SPG6 (NM_144599.2,1643-1661).
catgggcccaccaacatca

SEQ ID NO: 410214 - DNA, 19 bp, Homo sapiens
  siRNA target sequence for SPG6 (NM_144599.2,1733-1751).
gcccaagacatcttgcata

SEQ ID NO: 410215 - DNA, 19 bp, Homo sapiens
  siRNA target sequence for SPG6 (NM_144599.2,1734-1752).
cccaagacatcttgcataa

SEQ ID NO: 410216 - DNA, 19 bp, Homo sapiens
  siRNA target sequence for SPG6 (NM_144599.2,2023-2041).
ggtgttcaaagagttcaat

SEQ ID NO: 410217 - DNA, 19 bp, Homo sapiens
  siRNA target sequence for SPG6 (NM_144599.2,2051-2069).
ggggagatgaacaaatcta

SEQ ID NO: 410218 - DNA, 19 bp, Homo sapiens
  siRNA target sequence for FLJ31153 (NM_144600.1,486-504).
gtactaacattgaagatct

SEQ ID NO: 410219 - DNA, 19 bp, Homo sapiens
  siRNA target sequence for MGC33367 (NM_144602.2,56-74).
caaatggacctgaaggatt

SEQ ID NO: 410220 - DNA, 19 bp, Homo sapiens
  siRNA target sequence for MGC33367 (NM_144602.2,182-200).
caagctcccgagaagcaaa

SEQ ID NO: 410221 - DNA, 19 bp, Homo sapiens
  siRNA target sequence for MGC33367 (NM_144602.2,211-229).
ggtgacagtccttaaacga

SEQ ID NO: 410222 - DNA, 19 bp, Homo sapiens
  siRNA target sequence for MGC33367 (NM_144602.2,212-230).
gtgacagtccttaaacgaa

SEQ ID NO: 410223 - DNA, 19 bp, Homo sapiens
  siRNA target sequence for MGC33367 (NM_144602.2,214-232).
gacagtccttaaacgaaat

SEQ ID NO: 410224 - DNA, 19 bp, Homo sapiens
  siRNA target sequence for MGC33367 (NM_144602.2,216-234).
cagtccttaaacgaaataa

SEQ ID NO: 410225 - DNA, 19 bp, Homo sapiens
  siRNA target sequence for MGC33367 (NM_144602.2,218-236).
gtccttaaacgaaataaga

SEQ ID NO: 410226 - DNA, 19 bp, Homo sapiens
  siRNA target sequence for MGC33367 (NM_144602.2,221-239).
cttaaacgaaataagaaga

SEQ ID NO: 410227 - DNA, 19 bp, Homo sapiens
  siRNA target sequence for MGC33367 (NM_144602.2,306-324).
cccagcaggccttaggaaa

SEQ ID NO: 410228 - DNA, 19 bp, Homo sapiens
  siRNA target sequence for MGC33367 (NM_144602.2,310-328).
gcaggccttaggaaagaga

SEQ ID NO: 410229 - DNA, 19 bp, Homo sapiens
  siRNA target sequence for MGC33367 (NM_144602.2,415-433).
caaggatggccccaagaaa

SEQ ID NO: 410230 - DNA, 19 bp, Homo sapiens
  siRNA target sequence for MGC33367 (NM_144602.2,418-436).
ggatggccccaagaaatct

SEQ ID NO: 410231 - DNA, 19 bp, Homo sapiens
  siRNA target sequence for MGC33367 (NM_144602.2,424-442).
ccccaagaaatctgataca

SEQ ID NO: 410232 - DNA, 19 bp, Homo sapiens
  siRNA target sequence for MGC33367 (NM_144602.2,489-507).
cattccgtcgacaaagcat

SEQ ID NO: 410233 - DNA, 19 bp, Homo sapiens
  siRNA target sequence for MGC33367 (NM_144602.2,494-512).
cgtcgacaaagcattgtct

SEQ ID NO: 410234 - DNA, 19 bp, Homo sapiens
  siRNA target sequence for MGC33367 (NM_144602.2,495-513).
gtcgacaaagcattgtctt

SEQ ID NO: 410235 - DNA, 19 bp, Homo sapiens
  siRNA target sequence for MGC33367 (NM_144602.2,547-565).
ccagagggcaaccttcata

SEQ ID NO: 410236 - DNA, 19 bp, Homo sapiens
  siRNA target sequence for MGC33367 (NM_144602.2,550-568).
gagggcaaccttcataaga

SEQ ID NO: 410237 - DNA, 19 bp, Homo sapiens
  siRNA target sequence for MGC33367 (NM_144602.2,552-570).
gggcaaccttcataagaga

SEQ ID NO: 410238 - DNA, 19 bp, Homo sapiens
  siRNA target sequence for MGC33367 (NM_144602.2,586-604).
gcctgacatggcttacgaa

SEQ ID NO: 410239 - DNA, 19 bp, Homo sapiens
  siRNA target sequence for MGC33367 (NM_144602.2,596-614).
gcttacgaacgcaagctaa

SEQ ID NO: 410240 - DNA, 19 bp, Homo sapiens
  siRNA target sequence for MGC33367 (NM_144602.2,597-615).
cttacgaacgcaagctaaa

SEQ ID NO: 410241 - DNA, 19 bp, Homo sapiens
  siRNA target sequence for MGC33367 (NM_144602.2,692-710).
cgatacctgaggttatcca

SEQ ID NO: 410242 - DNA, 19 bp, Homo sapiens
  siRNA target sequence for MGC33367 (NM_144602.2,702-720).
ggttatccaaggagaacat

SEQ ID NO: 410243 - DNA, 19 bp, Homo sapiens
  siRNA target sequence for MGC33367 (NM_144602.2,781-799).
ggtcgaagaggacatagat

SEQ ID NO: 410244 - DNA, 19 bp, Homo sapiens
  siRNA target sequence for BHD (NM_144606.3,647-665).
ggtggcattcagatgaaca

SEQ ID NO: 410245 - DNA, 19 bp, Homo sapiens
  siRNA target sequence for BHD (NM_144606.3,767-785).
gcagggcacccgggatata

SEQ ID NO: 410246 - DNA, 19 bp, Homo sapiens
  siRNA target sequence for BHD (NM_144606.3,768-786).
cagggcacccgggatatat

SEQ ID NO: 410247 - DNA, 19 bp, Homo sapiens
  siRNA target sequence for BHD (NM_144606.3,779-797).
ggatatatcagccatgata

SEQ ID NO: 410248 - DNA, 19 bp, Homo sapiens
  siRNA target sequence for BHD (NM_144606.3,780-798).
gatatatcagccatgataa

SEQ ID NO: 410249 - DNA, 19 bp, Homo sapiens
  siRNA target sequence for BHD (NM_144606.3,908-926).
cgtgaaggccccatcttct

SEQ ID NO: 410250 - DNA, 19 bp, Homo sapiens
  siRNA target sequence for BHD (NM_144606.3,1001-1019).
cgctggtacagcatcatca

SEQ ID NO: 410251 - DNA, 19 bp, Homo sapiens
  siRNA target sequence for BHD (NM_144606.3,1034-1052).
cggatctacctcatcaact

SEQ ID NO: 410252 - DNA, 19 bp, Homo sapiens
  siRNA target sequence for BHD (NM_144606.3,1071-1089).
ggaaggtccggggaatcat

SEQ ID NO: 410253 - DNA, 19 bp, Homo sapiens
  siRNA target sequence for BHD (NM_144606.3,1329-1347).
ctccgaccgaggatacctt

SEQ ID NO: 410254 - DNA, 19 bp, Homo sapiens
  siRNA target sequence for BHD (NM_144606.3,1462-1480).
gggaaacgcggctctgaat

SEQ ID NO: 410255 - DNA, 19 bp, Homo sapiens
  siRNA target sequence for BHD (NM_144606.3,1464-1482).
gaaacgcggctctgaatca

SEQ ID NO: 410256 - DNA, 19 bp, Homo sapiens
  siRNA target sequence for FLJ32499 (NM_144607.2,166-184).
gggccagacttggagtatt

SEQ ID NO: 410257 - DNA, 19 bp, Homo sapiens
  siRNA target sequence for FLJ32499 (NM_144607.2,167-185).
ggccagacttggagtattt

SEQ ID NO: 410258 - DNA, 19 bp, Homo sapiens
  siRNA target sequence for FLJ32499 (NM_144607.2,208-226).
gcggaggtggcccaacata

SEQ ID NO: 410259 - DNA, 19 bp, Homo sapiens
  siRNA target sequence for FLJ32499 (NM_144607.2,209-227).
cggaggtggcccaacataa

SEQ ID NO: 410260 - DNA, 19 bp, Homo sapiens
  siRNA target sequence for FLJ32499 (NM_144607.2,235-253).
gaagacctctgggtatctt

SEQ ID NO: 410261 - DNA, 19 bp, Homo sapiens
  siRNA target sequence for FLJ32499 (NM_144607.2,278-296).
cgtcattggcacaggaata

SEQ ID NO: 410262 - DNA, 19 bp, Homo sapiens
  siRNA target sequence for FLJ32499 (NM_144607.2,378-396).
catccgcaagcacatagat

SEQ ID NO: 410263 - DNA, 19 bp, Homo sapiens
  siRNA target sequence for FLJ32499 (NM_144607.2,470-488).
cggactgggccaacgattt

SEQ ID NO: 410264 - DNA, 19 bp, Homo sapiens
  siRNA target sequence for FLJ32499 (NM_144607.2,471-489).
ggactgggccaacgatttt

SEQ ID NO: 410265 - DNA, 19 bp, Homo sapiens
  siRNA target sequence for FLJ32499 (NM_144607.2,500-518).
ggtggcaggggtcgtatta

SEQ ID NO: 410266 - DNA, 19 bp, Homo sapiens
  siRNA target sequence for FLJ32499 (NM_144607.2,501-519).
gtggcaggggtcgtattat

SEQ ID NO: 410267 - DNA, 19 bp, Homo sapiens
  siRNA target sequence for FLJ32499 (NM_144607.2,503-521).
ggcaggggtcgtattatga

SEQ ID NO: 410268 - DNA, 19 bp, Homo sapiens
  siRNA target sequence for FLJ32499 (NM_144607.2,547-565).
cggagcatccgcatcatta

SEQ ID NO: 410269 - DNA, 19 bp, Homo sapiens
  siRNA target sequence for FLJ32499 (NM_144607.2,548-566).
ggagcatccgcatcattaa

SEQ ID NO: 410270 - DNA, 19 bp, Homo sapiens
  siRNA target sequence for FLJ32499 (NM_144607.2,612-630).
gtccatatgggaaatccta

SEQ ID NO: 410271 - DNA, 19 bp, Homo sapiens
  siRNA target sequence for FLJ32499 (NM_144607.2,661-679).
gccagctacacgtggaaat

SEQ ID NO: 410272 - DNA, 19 bp, Homo sapiens
  siRNA target sequence for FLJ32499 (NM_144607.2,662-680).
ccagctacacgtggaaata

SEQ ID NO: 410273 - DNA, 19 bp, Homo sapiens
  siRNA target sequence for FLJ32499 (NM_144607.2,663-681).
cagctacacgtggaaatat

SEQ ID NO: 410274 - DNA, 19 bp, Homo sapiens
  siRNA target sequence for FLJ32499 (NM_144607.2,665-683).
gctacacgtggaaatatga

SEQ ID NO: 410275 - DNA, 19 bp, Homo sapiens
  siRNA target sequence for FLJ32499 (NM_144607.2,666-684).
ctacacgtggaaatatgaa

SEQ ID NO: 410276 - DNA, 19 bp, Homo sapiens
  siRNA target sequence for FLJ32499 (NM_144607.2,759-777).
cagtatggacggtacactt

SEQ ID NO: 410277 - DNA, 19 bp, Homo sapiens
  siRNA target sequence for FLJ32499 (NM_144607.2,788-806).
caatacttctgtacttcaa

SEQ ID NO: 410278 - DNA, 19 bp, Homo sapiens
  siRNA target sequence for FLJ32384 (NM_144608.1,257-275).
ccagaccgcctgtaatgca

SEQ ID NO: 410279 - DNA, 19 bp, Homo sapiens
  siRNA target sequence for FLJ32384 (NM_144608.1,613-631).
cccgggtccgcgaagagat

SEQ ID NO: 410280 - DNA, 19 bp, Homo sapiens
  siRNA target sequence for FLJ32384 (NM_144608.1,616-634).
gggtccgcgaagagatgtt

SEQ ID NO: 410281 - DNA, 19 bp, Homo sapiens
  siRNA target sequence for FLJ32384 (NM_144608.1,815-833).
cttctctgagacttacgaa

SEQ ID NO: 410282 - DNA, 19 bp, Homo sapiens
  siRNA target sequence for FLJ32384 (NM_144608.1,1012-1030).
ggctccggaccgaaaacca

SEQ ID NO: 410283 - DNA, 19 bp, Homo sapiens
  siRNA target sequence for FLJ31795 (NM_144609.1,114-132).
ggaccgagccgtttatgga

SEQ ID NO: 410284 - DNA, 19 bp, Homo sapiens
  siRNA target sequence for FLJ31795 (NM_144609.1,250-268).
gtggaacgatggtcagaaa

SEQ ID NO: 410285 - DNA, 19 bp, Homo sapiens
  siRNA target sequence for FLJ31795 (NM_144609.1,252-270).
ggaacgatggtcagaaact

SEQ ID NO: 410286 - DNA, 19 bp, Homo sapiens
  siRNA target sequence for FLJ31795 (NM_144609.1,277-295).
gttgtcaccaaagtgaaaa

SEQ ID NO: 410287 - DNA, 19 bp, Homo sapiens
  siRNA target sequence for FLJ31795 (NM_144609.1,312-330).
ggccattgccaccctaatt

SEQ ID NO: 410288 - DNA, 19 bp, Homo sapiens
  siRNA target sequence for FLJ31795 (NM_144609.1,314-332).
ccattgccaccctaattga

SEQ ID NO: 410289 - DNA, 19 bp, Homo sapiens
  siRNA target sequence for FLJ31795 (NM_144609.1,337-355).
caggcacaaatcgtagtaa

SEQ ID NO: 410290 - DNA, 19 bp, Homo sapiens
  siRNA target sequence for FLJ31795 (NM_144609.1,461-479).
caggtgctaccacaatgaa

SEQ ID NO: 410291 - DNA, 19 bp, Homo sapiens
  siRNA target sequence for FLJ31795 (NM_144609.1,464-482).
gtgctaccacaatgaacat

SEQ ID NO: 410292 - DNA, 19 bp, Homo sapiens
  siRNA target sequence for FLJ31795 (NM_144609.1,480-498).
cattggttctgacaaactt

SEQ ID NO: 410293 - DNA, 19 bp, Homo sapiens
  siRNA target sequence for MGC32124 (NM_144611.2,598-616).
ctggctttcgccttttcat

SEQ ID NO: 410294 - DNA, 19 bp, Homo sapiens
  siRNA target sequence for MGC32124 (NM_144611.2,720-738).
gagcctgggtcccactata

SEQ ID NO: 410295 - DNA, 19 bp, Homo sapiens
  siRNA target sequence for MGC32124 (NM_144611.2,776-794).
gaccggggactgttctgaa

SEQ ID NO: 410296 - DNA, 19 bp, Homo sapiens
  siRNA target sequence for MGC32124 (NM_144611.2,856-874).
ggctttcattctatgagaa

SEQ ID NO: 410297 - DNA, 19 bp, Homo sapiens
  siRNA target sequence for MGC32124 (NM_144611.2,1260-1278).
ccaccgctagccatcacat

SEQ ID NO: 410298 - DNA, 19 bp, Homo sapiens
  siRNA target sequence for FLJ32670 (NM_144612.3,400-418).
cgagatcacgtactacttt

SEQ ID NO: 410299 - DNA, 19 bp, Homo sapiens
  siRNA target sequence for FLJ32670 (NM_144612.3,522-540).
ggggaggcggtgacaacaa

SEQ ID NO: 410300 - DNA, 19 bp, Homo sapiens
  siRNA target sequence for FLJ32670 (NM_144612.3,604-622).
gactggggttaagaagaat

SEQ ID NO: 410301 - DNA, 19 bp, Homo sapiens
  siRNA target sequence for FLJ32670 (NM_144612.3,627-645).
gcacagatgctaatgtctt

SEQ ID NO: 410302 - DNA, 19 bp, Homo sapiens
  siRNA target sequence for FLJ32670 (NM_144612.3,630-648).
cagatgctaatgtcttcat

SEQ ID NO: 410303 - DNA, 19 bp, Homo sapiens
  siRNA target sequence for FLJ32670 (NM_144612.3,632-650).
gatgctaatgtcttcatca

SEQ ID NO: 410304 - DNA, 19 bp, Homo sapiens
  siRNA target sequence for FLJ32670 (NM_144612.3,689-707).
ctgaagtcctccaagacaa

SEQ ID NO: 410305 - DNA, 19 bp, Homo sapiens
  siRNA target sequence for FLJ32670 (NM_144612.3,705-723).
caaacagcgataagtttga

SEQ ID NO: 410306 - DNA, 19 bp, Homo sapiens
  siRNA target sequence for FLJ32670 (NM_144612.3,726-744).
gggacagcattgaaatctt

SEQ ID NO: 410307 - DNA, 19 bp, Homo sapiens
  siRNA target sequence for FLJ32670 (NM_144612.3,813-831).
ccccaggctggtttgtaga

SEQ ID NO: 410308 - DNA, 19 bp, Homo sapiens
  siRNA target sequence for FLJ32670 (NM_144612.3,958-976).
gctgtacacaccatttgtt

SEQ ID NO: 410309 - DNA, 19 bp, Homo sapiens
  siRNA target sequence for FLJ32670 (NM_144612.3,1020-1038).
ggacagatgccaacatctt

SEQ ID NO: 410310 - DNA, 19 bp, Homo sapiens
  siRNA target sequence for FLJ32670 (NM_144612.3,1137-1155).
cccgcttcatcgtagagtt

SEQ ID NO: 410311 - DNA, 19 bp, Homo sapiens
  siRNA target sequence for FLJ32670 (NM_144612.3,1138-1156).
ccgcttcatcgtagagtta

SEQ ID NO: 410312 - DNA, 19 bp, Homo sapiens
  siRNA target sequence for FLJ32670 (NM_144612.3,1140-1158).
gcttcatcgtagagttaga

SEQ ID NO: 410313 - DNA, 19 bp, Homo sapiens
  siRNA target sequence for FLJ32670 (NM_144612.3,1144-1162).
catcgtagagttagaagat

SEQ ID NO: 410314 - DNA, 19 bp, Homo sapiens
  siRNA target sequence for FLJ32670 (NM_144612.3,1187-1205).
cggattggccataataaca

SEQ ID NO: 410315 - DNA, 19 bp, Homo sapiens
  siRNA target sequence for FLJ32670 (NM_144612.3,1249-1267).
caggctcctcccggataaa

SEQ ID NO: 410316 - DNA, 19 bp, Homo sapiens
  siRNA target sequence for FLJ32670 (NM_144612.3,1251-1269).
ggctcctcccggataaaga

SEQ ID NO: 410317 - DNA, 19 bp, Homo sapiens
  siRNA target sequence for FLJ32670 (NM_144612.3,1271-1289).
ggtgcagagaccttgactt

SEQ ID NO: 410318 - DNA, 19 bp, Homo sapiens
  siRNA target sequence for FLJ32670 (NM_144612.3,1272-1290).
gtgcagagaccttgacttt

SEQ ID NO: 410319 - DNA, 19 bp, Homo sapiens
  siRNA target sequence for FLJ32670 (NM_144612.3,1341-1359).
gagaactggttccatatga

SEQ ID NO: 410320 - DNA, 19 bp, Homo sapiens
  siRNA target sequence for FLJ32670 (NM_144612.3,1389-1407).
ggtccttacggcaagtcta

SEQ ID NO: 410321 - DNA, 19 bp, Homo sapiens
  siRNA target sequence for FLJ32670 (NM_144612.3,1392-1410).
ccttacggcaagtctacaa

SEQ ID NO: 410322 - DNA, 19 bp, Homo sapiens
  siRNA target sequence for FLJ32670 (NM_144612.3,1485-1503).
cggatgccaaggtgtacat

SEQ ID NO: 410323 - DNA, 19 bp, Homo sapiens
  siRNA target sequence for FLJ32670 (NM_144612.3,1487-1505).
gatgccaaggtgtacatca

SEQ ID NO: 410324 - DNA, 19 bp, Homo sapiens
  siRNA target sequence for FLJ32670 (NM_144612.3,1495-1513).
ggtgtacatcaccatctat

SEQ ID NO: 410325 - DNA, 19 bp, Homo sapiens
  siRNA target sequence for FLJ32670 (NM_144612.3,1528-1546).
cactggggagcgatacctt

SEQ ID NO: 410326 - DNA, 19 bp, Homo sapiens
  siRNA target sequence for FLJ32670 (NM_144612.3,1614-1632).
ctgacctaggcgtcatcta

SEQ ID NO: 410327 - DNA, 19 bp, Homo sapiens
  siRNA target sequence for FLJ32670 (NM_144612.3,1616-1634).
gacctaggcgtcatctaca

SEQ ID NO: 410328 - DNA, 19 bp, Homo sapiens
  siRNA target sequence for FLJ32670 (NM_144612.3,1619-1637).
ctaggcgtcatctacaaga

SEQ ID NO: 410329 - DNA, 19 bp, Homo sapiens
  siRNA target sequence for FLJ32670 (NM_144612.3,1623-1641).
gcgtcatctacaagatcaa

SEQ ID NO: 410330 - DNA, 19 bp, Homo sapiens
  siRNA target sequence for FLJ32670 (NM_144612.3,1718-1736).
gacgagttcctgttcctat

SEQ ID NO: 410331 - DNA, 19 bp, Homo sapiens
  siRNA target sequence for FLJ32670 (NM_144612.3,1772-1790).
cgactcgagaggctctttt

SEQ ID NO: 410332 - DNA, 19 bp, Homo sapiens
  siRNA target sequence for FLJ32670 (NM_144612.3,1773-1791).
gactcgagaggctctttta

SEQ ID NO: 410333 - DNA, 19 bp, Homo sapiens
  siRNA target sequence for FLJ32670 (NM_144612.3,1919-1937).
gttcaagagggcccaatta

SEQ ID NO: 410334 - DNA, 19 bp, Homo sapiens
  siRNA target sequence for FLJ32670 (NM_144612.3,1988-2006).
gacagccgagccttcatct

SEQ ID NO: 410335 - DNA, 19 bp, Homo sapiens
  siRNA target sequence for FLJ32670 (NM_144612.3,2124-2142).
gcatcatcaagaaaataga

SEQ ID NO: 410336 - DNA, 19 bp, Homo sapiens
  siRNA target sequence for FLJ32670 (NM_144612.3,2521-2539).
gatgcggatccggattgat

SEQ ID NO: 410337 - DNA, 19 bp, Homo sapiens
  siRNA target sequence for MGC23244 (NM_144615.1,201-219).
gggaacggctccgtgttaa

SEQ ID NO: 410338 - DNA, 19 bp, Homo sapiens
  siRNA target sequence for MGC23244 (NM_144615.1,203-221).
gaacggctccgtgttaagt

SEQ ID NO: 410339 - DNA, 19 bp, Homo sapiens
  siRNA target sequence for MGC23244 (NM_144615.1,242-260).
ctgtgtcaaccgtacatca

SEQ ID NO: 410340 - DNA, 19 bp, Homo sapiens
  siRNA target sequence for MGC23244 (NM_144615.1,698-716).
ggccagagcatttattcaa

SEQ ID NO: 410341 - DNA, 19 bp, Homo sapiens
  siRNA target sequence for FLJ32416 (NM_144616.2,394-412).
gagacctgtcgctcaacaa

SEQ ID NO: 410342 - DNA, 19 bp, Homo sapiens
  siRNA target sequence for FLJ32416 (NM_144616.2,396-414).
gacctgtcgctcaacaagt

SEQ ID NO: 410343 - DNA, 19 bp, Homo sapiens
  siRNA target sequence for FLJ32416 (NM_144616.2,553-571).
cgtcgcccctgcctaagtt

SEQ ID NO: 410344 - DNA, 19 bp, Homo sapiens
  siRNA target sequence for MGC29891 (NM_144618.1,460-478).
ccttgcagctcaatatggt

SEQ ID NO: 410345 - DNA, 19 bp, Homo sapiens
  siRNA target sequence for MGC29891 (NM_144618.1,520-538).
cagggatgcccggactaaa

SEQ ID NO: 410346 - DNA, 19 bp, Homo sapiens
  siRNA target sequence for MGC29891 (NM_144618.1,523-541).
ggatgcccggactaaagta

SEQ ID NO: 410347 - DNA, 19 bp, Homo sapiens
  siRNA target sequence for MGC29891 (NM_144618.1,681-699).
gagatgtcgtagagttact

SEQ ID NO: 410348 - DNA, 19 bp, Homo sapiens
  siRNA target sequence for MGC29891 (NM_144618.1,683-701).
gatgtcgtagagttactta

SEQ ID NO: 410349 - DNA, 19 bp, Homo sapiens
  siRNA target sequence for MGC29891 (NM_144618.1,686-704).
gtcgtagagttacttatca

SEQ ID NO: 410350 - DNA, 19 bp, Homo sapiens
  siRNA target sequence for MGC29891 (NM_144618.1,688-706).
cgtagagttacttatcaaa

SEQ ID NO: 410351 - DNA, 19 bp, Homo sapiens
  siRNA target sequence for MGC29891 (NM_144618.1,694-712).
gttacttatcaaatatgga

SEQ ID NO: 410352 - DNA, 19 bp, Homo sapiens
  siRNA target sequence for MGC29891 (NM_144618.1,719-737).
gtccatgctttcagcaaat

SEQ ID NO: 410353 - DNA, 19 bp, Homo sapiens
  siRNA target sequence for MGC29891 (NM_144618.1,867-885).
gtatggctgctccattcat

SEQ ID NO: 410354 - DNA, 19 bp, Homo sapiens
  siRNA target sequence for MGC29891 (NM_144618.1,872-890).
gctgctccattcatcttca

SEQ ID NO: 410355 - DNA, 19 bp, Homo sapiens
  siRNA target sequence for MGC29891 (NM_144618.1,891-909).
cgtcgggtgaggttgttaa

SEQ ID NO: 410356 - DNA, 19 bp, Homo sapiens
  siRNA target sequence for MGC29891 (NM_144618.1,894-912).
cgggtgaggttgttaacct

SEQ ID NO: 410357 - DNA, 19 bp, Homo sapiens
  siRNA target sequence for MGC29891 (NM_144618.1,910-928).
cctcgcaagccttatttct

SEQ ID NO: 410358 - DNA, 19 bp, Homo sapiens
  siRNA target sequence for MGC29891 (NM_144618.1,911-929).
ctcgcaagccttatttctt

SEQ ID NO: 410359 - DNA, 19 bp, Homo sapiens
  siRNA target sequence for MGC29891 (NM_144618.1,914-932).
gcaagccttatttcttcaa

SEQ ID NO: 410360 - DNA, 19 bp, Homo sapiens
  siRNA target sequence for MGC29891 (NM_144618.1,958-976).
cccccatgcctcaacagta

SEQ ID NO: 410361 - DNA, 19 bp, Homo sapiens
  siRNA target sequence for MGC29891 (NM_144618.1,965-983).
gcctcaacagtacagtttt

SEQ ID NO: 410362 - DNA, 19 bp, Homo sapiens
  siRNA target sequence for MGC29891 (NM_144618.1,1057-1075).
cagagccacagccaataca

SEQ ID NO: 410363 - DNA, 19 bp, Homo sapiens
  siRNA target sequence for MGC29891 (NM_144618.1,1067-1085).
gccaatacagaggaaatta

SEQ ID NO: 410364 - DNA, 19 bp, Homo sapiens
  siRNA target sequence for MGC29891 (NM_144618.1,1166-1184).
ggagtccctctgggtaata

SEQ ID NO: 410365 - DNA, 19 bp, Homo sapiens
  siRNA target sequence for MGC29891 (NM_144618.1,1167-1185).
gagtccctctgggtaatat

SEQ ID NO: 410366 - DNA, 19 bp, Homo sapiens
  siRNA target sequence for MGC29891 (NM_144618.1,1171-1189).
ccctctgggtaatatccaa

SEQ ID NO: 410367 - DNA, 19 bp, Homo sapiens
  siRNA target sequence for MGC29891 (NM_144618.1,1172-1190).
cctctgggtaatatccaaa

SEQ ID NO: 410368 - DNA, 19 bp, Homo sapiens
  siRNA target sequence for MGC29891 (NM_144618.1,1177-1195).
gggtaatatccaaacttca

SEQ ID NO: 410369 - DNA, 19 bp, Homo sapiens
  siRNA target sequence for MGC29891 (NM_144618.1,1178-1196).
ggtaatatccaaacttcaa

SEQ ID NO: 410370 - DNA, 19 bp, Homo sapiens
  siRNA target sequence for MGC29891 (NM_144618.1,1208-1226).
ggcattggccagccattta

SEQ ID NO: 410371 - DNA, 19 bp, Homo sapiens
  siRNA target sequence for MGC29891 (NM_144618.1,1214-1232).
ggccagccatttattgtaa

SEQ ID NO: 410372 - DNA, 19 bp, Homo sapiens
  siRNA target sequence for MGC29891 (NM_144618.1,1245-1263).
gacagcaagttctaactgt

SEQ ID NO: 410373 - DNA, 19 bp, Homo sapiens
  siRNA target sequence for MGC29891 (NM_144618.1,1280-1298).
gcagaggagactgtaatta

SEQ ID NO: 410374 - DNA, 19 bp, Homo sapiens
  siRNA target sequence for MGC29891 (NM_144618.1,1412-1430).
ctccaggaggccaatcgaa

SEQ ID NO: 410375 - DNA, 19 bp, Homo sapiens
  siRNA target sequence for MGC29891 (NM_144618.1,1637-1655).
gagcctcacactagagttt

SEQ ID NO: 410376 - DNA, 19 bp, Homo sapiens
  siRNA target sequence for MGC14816 (NM_144620.1,228-246).
ctgtcaatgctgtaaagga

SEQ ID NO: 410377 - DNA, 19 bp, Homo sapiens
  siRNA target sequence for MGC14816 (NM_144620.1,289-307).
gcgagagaaggaatttcaa

SEQ ID NO: 410378 - DNA, 19 bp, Homo sapiens
  siRNA target sequence for MGC14816 (NM_144620.1,332-350).
gaacgagtaagcttaacca

SEQ ID NO: 410379 - DNA, 19 bp, Homo sapiens
  siRNA target sequence for MGC14816 (NM_144620.1,338-356).
gtaagcttaaccaagctaa

SEQ ID NO: 410380 - DNA, 19 bp, Homo sapiens
  siRNA target sequence for MGC14816 (NM_144620.1,342-360).
gcttaaccaagctaagaga

SEQ ID NO: 410381 - DNA, 19 bp, Homo sapiens
  siRNA target sequence for MGC14816 (NM_144620.1,432-450).
ctctgctgaaactgaatca

SEQ ID NO: 410382 - DNA, 19 bp, Homo sapiens
  siRNA target sequence for MGC14816 (NM_144620.1,436-454).
gctgaaactgaatcaacta

SEQ ID NO: 410383 - DNA, 19 bp, Homo sapiens
  siRNA target sequence for MGC14816 (NM_144620.1,455-473).
caggaatggcaacttcata

SEQ ID NO: 410384 - DNA, 19 bp, Homo sapiens
  siRNA target sequence for MGC14816 (NM_144620.1,520-538).
cctcattgtgttagattta

SEQ ID NO: 410385 - DNA, 19 bp, Homo sapiens
  siRNA target sequence for MGC14816 (NM_144620.1,523-541).
cattgtgttagatttatct

SEQ ID NO: 410386 - DNA, 19 bp, Homo sapiens
  siRNA target sequence for MGC14816 (NM_144620.1,533-551).
gatttatctcgaaacacaa

SEQ ID NO: 410387 - DNA, 19 bp, Homo sapiens
  siRNA target sequence for MGC14816 (NM_144620.1,569-587).
gggattggactgcttacta

SEQ ID NO: 410388 - DNA, 19 bp, Homo sapiens
  siRNA target sequence for MGC14816 (NM_144620.1,676-694).
ggctgttaacagagatata

SEQ ID NO: 410389 - DNA, 19 bp, Homo sapiens
  siRNA target sequence for MGC14816 (NM_144620.1,712-730).
gctcagcaatctgctaaaa

SEQ ID NO: 410390 - DNA, 19 bp, Homo sapiens
  siRNA target sequence for MGC14816 (NM_144620.1,715-733).
cagcaatctgctaaaactt

SEQ ID NO: 410391 - DNA, 19 bp, Homo sapiens
  siRNA target sequence for MGC14816 (NM_144620.1,737-755).
caccttgatctgagtatga

SEQ ID NO: 410392 - DNA, 19 bp, Homo sapiens
  siRNA target sequence for MGC14816 (NM_144620.1,743-761).
gatctgagtatgaacgatt

SEQ ID NO: 410393 - DNA, 19 bp, Homo sapiens
  siRNA target sequence for MGC14816 (NM_144620.1,746-764).
ctgagtatgaacgatttta

SEQ ID NO: 410394 - DNA, 19 bp, Homo sapiens
  siRNA target sequence for MGC14816 (NM_144620.1,748-766).
gagtatgaacgattttact

SEQ ID NO: 410395 - DNA, 19 bp, Homo sapiens
  siRNA target sequence for MGC14816 (NM_144620.1,814-832).
catgggaagcaacaaactt

SEQ ID NO: 410396 - DNA, 19 bp, Homo sapiens
  siRNA target sequence for MGC14816 (NM_144620.1,822-840).
gcaacaaacttgaacaact

SEQ ID NO: 410397 - DNA, 19 bp, Homo sapiens
  siRNA target sequence for MGC14816 (NM_144620.1,833-851).
gaacaacttcctgatacta

SEQ ID NO: 410398 - DNA, 19 bp, Homo sapiens
  siRNA target sequence for MGC14816 (NM_144620.1,876-894).
cgttatggctgcaacgaaa

SEQ ID NO: 410399 - DNA, 19 bp, Homo sapiens
  siRNA target sequence for MGC14816 (NM_144620.1,882-900).
ggctgcaacgaaatgaaat

SEQ ID NO: 410400 - DNA, 19 bp, Homo sapiens
  siRNA target sequence for MGC14816 (NM_144620.1,883-901).
gctgcaacgaaatgaaata

SEQ ID NO: 410401 - DNA, 19 bp, Homo sapiens
  siRNA target sequence for MGC14816 (NM_144620.1,886-904).
gcaacgaaatgaaataaca

SEQ ID NO: 410402 - DNA, 19 bp, Homo sapiens
  siRNA target sequence for MGC14816 (NM_144620.1,903-921).
catgcttgcctcaaacaat

SEQ ID NO: 410403 - DNA, 19 bp, Homo sapiens
  siRNA target sequence for MGC14816 (NM_144620.1,911-929).
cctcaaacaatcagcaata

SEQ ID NO: 410404 - DNA, 19 bp, Homo sapiens
  siRNA target sequence for MGC14816 (NM_144620.1,912-930).
ctcaaacaatcagcaatat

SEQ ID NO: 410405 - DNA, 19 bp, Homo sapiens
  siRNA target sequence for MGC14816 (NM_144620.1,914-932).
caaacaatcagcaatatga

SEQ ID NO: 410406 - DNA, 19 bp, Homo sapiens
  siRNA target sequence for MGC14816 (NM_144620.1,980-998).
ccagtatgcatggaagaaa

SEQ ID NO: 410407 - DNA, 19 bp, Homo sapiens
  siRNA target sequence for MGC14816 (NM_144620.1,1007-1025).
ctgaggtttgtcaacttca

SEQ ID NO: 410408 - DNA, 19 bp, Homo sapiens
  siRNA target sequence for MGC14816 (NM_144620.1,1026-1044).
gagacaacccactgaaatt

SEQ ID NO: 410409 - DNA, 19 bp, Homo sapiens
  siRNA target sequence for MGC14816 (NM_144620.1,1156-1174).
ccaagtcaacggttcaact

SEQ ID NO: 410410 - DNA, 19 bp, Homo sapiens
  siRNA target sequence for MGC14816 (NM_144620.1,1157-1175).
caagtcaacggttcaacta

SEQ ID NO: 410411 - DNA, 19 bp, Homo sapiens
  siRNA target sequence for MGC14816 (NM_144620.1,1160-1178).
gtcaacggttcaactactt

SEQ ID NO: 410412 - DNA, 19 bp, Homo sapiens
  siRNA target sequence for MGC14816 (NM_144620.1,1162-1180).
caacggttcaactacttta

SEQ ID NO: 410413 - DNA, 19 bp, Homo sapiens
  siRNA target sequence for FLJ32934 (NM_144622.1,520-538).
gtgccctgaacaagattaa

SEQ ID NO: 410414 - DNA, 19 bp, Homo sapiens
  siRNA target sequence for FLJ32934 (NM_144622.1,570-588).
gaccgggtccgcaagttct

SEQ ID NO: 410415 - DNA, 19 bp, Homo sapiens
  siRNA target sequence for FLJ32934 (NM_144622.1,704-722).
gtgtgcacgggttttcgat

SEQ ID NO: 410416 - DNA, 19 bp, Homo sapiens
  siRNA target sequence for FLJ32934 (NM_144622.1,835-853).
gcgtcatccctaagtacat

SEQ ID NO: 410417 - DNA, 19 bp, Homo sapiens
  siRNA target sequence for FLJ32934 (NM_144622.1,836-854).
cgtcatccctaagtacatt

SEQ ID NO: 410418 - DNA, 19 bp, Homo sapiens
  siRNA target sequence for FLJ32934 (NM_144622.1,907-925).
gggtgcgtcaggagtttga

SEQ ID NO: 410419 - DNA, 19 bp, Homo sapiens
  siRNA target sequence for FLJ32934 (NM_144622.1,909-927).
gtgcgtcaggagtttgagt

SEQ ID NO: 410420 - DNA, 19 bp, Homo sapiens
  siRNA target sequence for FLJ32934 (NM_144622.1,1134-1152).
gaccattatgacaatatct

SEQ ID NO: 410421 - DNA, 19 bp, Homo sapiens
  siRNA target sequence for FLJ32934 (NM_144622.1,1271-1289).
gtcccaatgggagaagttt

SEQ ID NO: 410422 - DNA, 19 bp, Homo sapiens
  siRNA target sequence for FLJ32934 (NM_144622.1,1343-1361).
cctagtcttcctagactat

SEQ ID NO: 410423 - DNA, 19 bp, Homo sapiens
  siRNA target sequence for FLJ32934 (NM_144622.1,1425-1443).
cctgtgttggtgtctctaa

SEQ ID NO: 410424 - DNA, 19 bp, Homo sapiens
  siRNA target sequence for FLJ32934 (NM_144622.1,1456-1474).
ctggctacgctgggaatat

SEQ ID NO: 410425 - DNA, 19 bp, Homo sapiens
  siRNA target sequence for FLJ32934 (NM_144622.1,1459-1477).
gctacgctgggaatattta

SEQ ID NO: 410426 - DNA, 19 bp, Homo sapiens
  siRNA target sequence for FLJ32934 (NM_144622.1,1460-1478).
ctacgctgggaatatttat

SEQ ID NO: 410427 - DNA, 19 bp, Homo sapiens
  siRNA target sequence for FLJ32934 (NM_144622.1,1463-1481).
cgctgggaatatttatcgt

SEQ ID NO: 410428 - DNA, 19 bp, Homo sapiens
  siRNA target sequence for FLJ32934 (NM_144622.1,1484-1502).
cctggtgtcagcatttgat

SEQ ID NO: 410429 - DNA, 19 bp, Homo sapiens
  siRNA target sequence for FLJ32934 (NM_144622.1,1515-1533).
ggcaacatcagtattttgt

SEQ ID NO: 410430 - DNA, 19 bp, Homo sapiens
  siRNA target sequence for FLJ32934 (NM_144622.1,1570-1588).
gcactggctacatagtcat

SEQ ID NO: 410431 - DNA, 19 bp, Homo sapiens
  siRNA target sequence for FLJ32934 (NM_144622.1,1571-1589).
cactggctacatagtcatt

SEQ ID NO: 410432 - DNA, 19 bp, Homo sapiens
  siRNA target sequence for FLJ32934 (NM_144622.1,1602-1620).
ggcctatgcttcttcatca

SEQ ID NO: 410433 - DNA, 19 bp, Homo sapiens
  siRNA target sequence for FLJ32934 (NM_144622.1,1696-1714).
ggatctcctacctgtacaa

SEQ ID NO: 410434 - DNA, 19 bp, Homo sapiens
  siRNA target sequence for FLJ32934 (NM_144622.1,1697-1715).
gatctcctacctgtacaat

SEQ ID NO: 410435 - DNA, 19 bp, Homo sapiens
  siRNA target sequence for FLJ32934 (NM_144622.1,1702-1720).
cctacctgtacaatgtact

SEQ ID NO: 410436 - DNA, 19 bp, Homo sapiens
  siRNA target sequence for FLJ32934 (NM_144622.1,1703-1721).
ctacctgtacaatgtactt

SEQ ID NO: 410437 - DNA, 19 bp, Homo sapiens
  siRNA target sequence for FLJ32934 (NM_144622.1,1826-1844).
cccctgcctaggtccattt

SEQ ID NO: 410438 - DNA, 19 bp, Homo sapiens
  siRNA target sequence for FLJ32934 (NM_144622.1,1940-1958).
cggctgccaaggatttata

SEQ ID NO: 410439 - DNA, 19 bp, Homo sapiens
  siRNA target sequence for FLJ32934 (NM_144622.1,1941-1959).
ggctgccaaggatttatat

SEQ ID NO: 410440 - DNA, 19 bp, Homo sapiens
  siRNA target sequence for FLJ32934 (NM_144622.1,1945-1963).
gccaaggatttatatgcaa

SEQ ID NO: 410441 - DNA, 19 bp, Homo sapiens
  siRNA target sequence for FLJ32784 (NM_144623.1,946-964).
caaggcctgcaacatcatt

SEQ ID NO: 410442 - DNA, 19 bp, Homo sapiens
  siRNA target sequence for FLJ32784 (NM_144623.1,950-968).
gcctgcaacatcattagca

SEQ ID NO: 410443 - DNA, 19 bp, Homo sapiens
  siRNA target sequence for FLJ32784 (NM_144623.1,954-972).
gcaacatcattagcaaata

SEQ ID NO: 410444 - DNA, 19 bp, Homo sapiens
  siRNA target sequence for FLJ32784 (NM_144623.1,1123-1141).
gacgatgcttggagaagat

SEQ ID NO: 410445 - DNA, 19 bp, Homo sapiens
  siRNA target sequence for FLJ32784 (NM_144623.1,1256-1274).
caaagtgttctctcaactt

SEQ ID NO: 410446 - DNA, 19 bp, Homo sapiens
  siRNA target sequence for FLJ32978 (NM_144625.2,195-213).
ctgctccttagacagtaat

SEQ ID NO: 410447 - DNA, 19 bp, Homo sapiens
  siRNA target sequence for FLJ32978 (NM_144625.2,197-215).
gctccttagacagtaatca

SEQ ID NO: 410448 - DNA, 19 bp, Homo sapiens
  siRNA target sequence for FLJ32978 (NM_144625.2,280-298).
ccaagaggagccaacactt

SEQ ID NO: 410449 - DNA, 19 bp, Homo sapiens
  siRNA target sequence for FLJ32978 (NM_144625.2,286-304).
ggagccaacactttttgct

SEQ ID NO: 410450 - DNA, 19 bp, Homo sapiens
  siRNA target sequence for FLJ32978 (NM_144625.2,308-326).
gtgttaaggcaaatgtgat

SEQ ID NO: 410451 - DNA, 19 bp, Homo sapiens
  siRNA target sequence for FLJ32978 (NM_144625.2,332-350).
ctggaggagatgataaggt

SEQ ID NO: 410452 - DNA, 19 bp, Homo sapiens
  siRNA target sequence for FLJ32978 (NM_144625.2,397-415).
cttgtaggacacatgttca

SEQ ID NO: 410453 - DNA, 19 bp, Homo sapiens
  siRNA target sequence for FLJ32978 (NM_144625.2,400-418).
gtaggacacatgttcagta

SEQ ID NO: 410454 - DNA, 19 bp, Homo sapiens
  siRNA target sequence for FLJ32978 (NM_144625.2,420-438).
cgccgagatcgtaaccaat

SEQ ID NO: 410455 - DNA, 19 bp, Homo sapiens
  siRNA target sequence for FLJ32978 (NM_144625.2,423-441).
cgagatcgtaaccaatgaa

SEQ ID NO: 410456 - DNA, 19 bp, Homo sapiens
  siRNA target sequence for FLJ32978 (NM_144625.2,424-442).
gagatcgtaaccaatgaaa

SEQ ID NO: 410457 - DNA, 19 bp, Homo sapiens
  siRNA target sequence for FLJ32978 (NM_144625.2,426-444).
gatcgtaaccaatgaaaaa

SEQ ID NO: 410458 - DNA, 19 bp, Homo sapiens
  siRNA target sequence for FLJ32978 (NM_144625.2,483-501).
ccgggtgtgggatatacaa

SEQ ID NO: 410459 - DNA, 19 bp, Homo sapiens
  siRNA target sequence for FLJ32978 (NM_144625.2,486-504).
ggtgtgggatatacaaact

SEQ ID NO: 410460 - DNA, 19 bp, Homo sapiens
  siRNA target sequence for FLJ32978 (NM_144625.2,489-507).
gtgggatatacaaactctt

SEQ ID NO: 410461 - DNA, 19 bp, Homo sapiens
  siRNA target sequence for FLJ32978 (NM_144625.2,545-563).
caggagacatgcagattta

SEQ ID NO: 410462 - DNA, 19 bp, Homo sapiens
  siRNA target sequence for FLJ32978 (NM_144625.2,555-573).
gcagatttactctatgata

SEQ ID NO: 410463 - DNA, 19 bp, Homo sapiens
  siRNA target sequence for FLJ32978 (NM_144625.2,581-599).
ccaatcatggcatgcttat

SEQ ID NO: 410464 - DNA, 19 bp, Homo sapiens
  siRNA target sequence for FLJ32978 (NM_144625.2,594-612).
gcttattacgggatctagt

SEQ ID NO: 410465 - DNA, 19 bp, Homo sapiens
  siRNA target sequence for FLJ32978 (NM_144625.2,602-620).
cgggatctagtgttatgga

SEQ ID NO: 410466 - DNA, 19 bp, Homo sapiens
  siRNA target sequence for FLJ32978 (NM_144625.2,608-626).
ctagtgttatggacatgta

SEQ ID NO: 410467 - DNA, 19 bp, Homo sapiens
  siRNA target sequence for FLJ32978 (NM_144625.2,633-651).
gactaggatgatacaagat

SEQ ID NO: 410468 - DNA, 19 bp, Homo sapiens
  siRNA target sequence for FLJ32978 (NM_144625.2,639-657).
gatgatacaagatacaaaa

SEQ ID NO: 410469 - DNA, 19 bp, Homo sapiens
  siRNA target sequence for FLJ32978 (NM_144625.2,676-694).
gaacgagaaatcaatgtca

SEQ ID NO: 410470 - DNA, 19 bp, Homo sapiens
  siRNA target sequence for FLJ32978 (NM_144625.2,715-733).
catcaagtactcactatct

SEQ ID NO: 410471 - DNA, 19 bp, Homo sapiens
  siRNA target sequence for FLJ32978 (NM_144625.2,728-746).
ctatctgctctgaatccat

SEQ ID NO: 410472 - DNA, 19 bp, Homo sapiens
  siRNA target sequence for FLJ32978 (NM_144625.2,766-784).
gagactgggctccaagtat

SEQ ID NO: 410473 - DNA, 19 bp, Homo sapiens
  siRNA target sequence for FLJ32978 (NM_144625.2,770-788).
ctgggctccaagtatacca

SEQ ID NO: 410474 - DNA, 19 bp, Homo sapiens
  siRNA target sequence for FLJ32978 (NM_144625.2,800-818).
ctcatggtttcaatactga

SEQ ID NO: 410475 - DNA, 19 bp, Homo sapiens
  siRNA target sequence for FLJ32978 (NM_144625.2,962-980).
gcctacgacgcctcatttt

SEQ ID NO: 410476 - DNA, 19 bp, Homo sapiens
  siRNA target sequence for FLJ32978 (NM_144625.2,1024-1042).
gagcgcaacgggactatca

SEQ ID NO: 410477 - DNA, 19 bp, Homo sapiens
  siRNA target sequence for FLJ32978 (NM_144625.2,1026-1044).
gcgcaacgggactatcaaa

SEQ ID NO: 410478 - DNA, 19 bp, Homo sapiens
  siRNA target sequence for FLJ32978 (NM_144625.2,1027-1045).
cgcaacgggactatcaaaa

SEQ ID NO: 410479 - DNA, 19 bp, Homo sapiens
  siRNA target sequence for FLJ32978 (NM_144625.2,1028-1046).
gcaacgggactatcaaaat

SEQ ID NO: 410480 - DNA, 19 bp, Homo sapiens
  siRNA target sequence for FLJ32978 (NM_144625.2,1088-1106).
gggagctgcctgatgttgt

SEQ ID NO: 410481 - DNA, 19 bp, Homo sapiens
  siRNA target sequence for FLJ32978 (NM_144625.2,1161-1179).
caggaacatggctattcct

SEQ ID NO: 410482 - DNA, 19 bp, Homo sapiens
  siRNA target sequence for FLJ32978 (NM_144625.2,1182-1200).
cccagatgtcgagttgata

SEQ ID NO: 410483 - DNA, 19 bp, Homo sapiens
  siRNA target sequence for FLJ32978 (NM_144625.2,1184-1202).
cagatgtcgagttgatagt

SEQ ID NO: 410484 - DNA, 19 bp, Homo sapiens
  siRNA target sequence for FLJ32978 (NM_144625.2,1197-1215).
gatagttgagaggaacttt

SEQ ID NO: 410485 - DNA, 19 bp, Homo sapiens
  siRNA target sequence for FLJ32978 (NM_144625.2,1228-1246).
gataatcccaccatggatt

SEQ ID NO: 410486 - DNA, 19 bp, Homo sapiens
  siRNA target sequence for FLJ32978 (NM_144625.2,1236-1254).
caccatggatttattacga

SEQ ID NO: 410487 - DNA, 19 bp, Homo sapiens
  siRNA target sequence for FLJ32978 (NM_144625.2,1262-1280).
gcattgatttactacaagt

SEQ ID NO: 410488 - DNA, 19 bp, Homo sapiens
  siRNA target sequence for FLJ32978 (NM_144625.2,1279-1297).
gtagaaggatataatttga

SEQ ID NO: 410489 - DNA, 19 bp, Homo sapiens
  siRNA target sequence for FLJ32978 (NM_144625.2,1301-1319).
cagctggaaccttaaatga

SEQ ID NO: 410490 - DNA, 19 bp, Homo sapiens
  siRNA target sequence for FLJ32978 (NM_144625.2,1322-1340).
gacatgttatcctttgcaa

SEQ ID NO: 410491 - DNA, 19 bp, Homo sapiens
  siRNA target sequence for FLJ32978 (NM_144625.2,1356-1374).
ggatccacctcatgatgaa

SEQ ID NO: 410492 - DNA, 19 bp, Homo sapiens
  siRNA target sequence for FLJ32978 (NM_144625.2,1360-1378).
ccacctcatgatgaaaaga

SEQ ID NO: 410493 - DNA, 19 bp, Homo sapiens
  siRNA target sequence for FLJ32978 (NM_144625.2,1401-1419).
gcgtgctcattctttggaa

SEQ ID NO: 410494 - DNA, 19 bp, Homo sapiens
  siRNA target sequence for FLJ32978 (NM_144625.2,1402-1420).
cgtgctcattctttggaaa

SEQ ID NO: 410495 - DNA, 19 bp, Homo sapiens
  siRNA target sequence for FLJ32978 (NM_144625.2,1500-1518).
cctcaatggacattattgt

SEQ ID NO: 410496 - DNA, 19 bp, Homo sapiens
  siRNA target sequence for FLJ32978 (NM_144625.2,1529-1547).
gacagcgaaggctctttga

SEQ ID NO: 410497 - DNA, 19 bp, Homo sapiens
  siRNA target sequence for FLJ32978 (NM_144625.2,1531-1549).
cagcgaaggctctttgaat

SEQ ID NO: 410498 - DNA, 19 bp, Homo sapiens
  siRNA target sequence for FLJ32978 (NM_144625.2,1533-1551).
gcgaaggctctttgaatta

SEQ ID NO: 410499 - DNA, 19 bp, Homo sapiens
  siRNA target sequence for FLJ32978 (NM_144625.2,1635-1653).
gcaaaaatatgaatatcct

SEQ ID NO: 410500 - DNA, 19 bp, Homo sapiens
  siRNA target sequence for FLJ32978 (NM_144625.2,1686-1704).
gagctcagtgtctctactt

SEQ ID NO: 410501 - DNA, 19 bp, Homo sapiens
  siRNA target sequence for FLJ32978 (NM_144625.2,1741-1759).
caggatttcaagtttttca

SEQ ID NO: 410502 - DNA, 19 bp, Homo sapiens
  siRNA target sequence for FLJ32978 (NM_144625.2,1772-1790).
ctcctaagattcgaagata

SEQ ID NO: 410503 - DNA, 19 bp, Homo sapiens
  siRNA target sequence for FLJ32978 (NM_144625.2,1801-1819).
ggtttcgtgactgaaaaca

SEQ ID NO: 410504 - DNA, 19 bp, Homo sapiens
  siRNA target sequence for FLJ32978 (NM_144625.2,1846-1864).
ctgcctatatacagtatat

SEQ ID NO: 410505 - DNA, 19 bp, Homo sapiens
  siRNA target sequence for FLJ32978 (NM_144625.2,1868-1886).
gccccactagtctaagatt

SEQ ID NO: 410506 - DNA, 19 bp, Homo sapiens
  siRNA target sequence for FLJ32978 (NM_144625.2,1901-1919).
gcgtagaagcccaaaagga

SEQ ID NO: 410507 - DNA, 19 bp, Homo sapiens
  siRNA target sequence for FLJ32978 (NM_144625.2,1947-1965).
gaagggaggtcatgttcaa

SEQ ID NO: 410508 - DNA, 19 bp, Homo sapiens
  siRNA target sequence for FLJ32978 (NM_144625.2,1955-1973).
gtcatgttcaacgtgaaaa

SEQ ID NO: 410509 - DNA, 19 bp, Homo sapiens
  siRNA target sequence for FLJ32978 (NM_144625.2,1960-1978).
gttcaacgtgaaaaagtaa

SEQ ID NO: 410510 - DNA, 19 bp, Homo sapiens
  siRNA target sequence for SSTK-IP (NM_144627.1,368-386).
ggagcggcacactagtcat

SEQ ID NO: 410511 - DNA, 19 bp, Homo sapiens
  siRNA target sequence for SSTK-IP (NM_144627.1,379-397).
ctagtcatcctaacagaaa

SEQ ID NO: 410512 - DNA, 19 bp, Homo sapiens
  siRNA target sequence for SSTK-IP (NM_144627.1,428-446).
gcctctctgtagagcaaaa

SEQ ID NO: 410513 - DNA, 19 bp, Homo sapiens
  siRNA target sequence for SSTK-IP (NM_144627.1,448-466).
cctcccccagctatattaa

SEQ ID NO: 410514 - DNA, 19 bp, Homo sapiens
  siRNA target sequence for SSTK-IP (NM_144627.1,449-467).
ctcccccagctatattaat

SEQ ID NO: 410515 - DNA, 19 bp, Homo sapiens
  siRNA target sequence for SSTK-IP (NM_144627.1,451-469).
cccccagctatattaatct

SEQ ID NO: 410516 - DNA, 19 bp, Homo sapiens
  siRNA target sequence for SSTK-IP (NM_144627.1,452-470).
ccccagctatattaatctt

SEQ ID NO: 410517 - DNA, 19 bp, Homo sapiens
  siRNA target sequence for SSTK-IP (NM_144627.1,454-472).
ccagctatattaatcttca

SEQ ID NO: 410518 - DNA, 19 bp, Homo sapiens
  siRNA target sequence for SSTK-IP (NM_144627.1,531-549).
gatcacaagcccaaggaat

SEQ ID NO: 410519 - DNA, 19 bp, Homo sapiens
  siRNA target sequence for SSTK-IP (NM_144627.1,552-570).
ctaggactcctggaatgta

SEQ ID NO: 410520 - DNA, 19 bp, Homo sapiens
  siRNA target sequence for SSTK-IP (NM_144627.1,700-718).
ctcctaatccattgttaaa

SEQ ID NO: 410521 - DNA, 19 bp, Homo sapiens
  siRNA target sequence for SSTK-IP (NM_144627.1,722-740).
cctgccccaattcagtaaa

SEQ ID NO: 410522 - DNA, 19 bp, Homo sapiens
  siRNA target sequence for SSTK-IP (NM_144627.1,723-741).
ctgccccaattcagtaaat

SEQ ID NO: 410523 - DNA, 19 bp, Homo sapiens
  siRNA target sequence for C20orf140 (NM_144628.1,156-174).
gcggagaaggcagacttta

SEQ ID NO: 410524 - DNA, 19 bp, Homo sapiens
  siRNA target sequence for C20orf140 (NM_144628.1,157-175).
cggagaaggcagactttaa

SEQ ID NO: 410525 - DNA, 19 bp, Homo sapiens
  siRNA target sequence for C20orf140 (NM_144628.1,168-186).
gactttaacgccaaaagga

SEQ ID NO: 410526 - DNA, 19 bp, Homo sapiens
  siRNA target sequence for C20orf140 (NM_144628.1,274-292).
ggctcctgactgatgagat

SEQ ID NO: 410527 - DNA, 19 bp, Homo sapiens
  siRNA target sequence for C20orf140 (NM_144628.1,288-306).
gagatcagacgaaaagtgt

SEQ ID NO: 410528 - DNA, 19 bp, Homo sapiens
  siRNA target sequence for C20orf140 (NM_144628.1,310-328).
ccaagctcctcaatgtcaa

SEQ ID NO: 410529 - DNA, 19 bp, Homo sapiens
  siRNA target sequence for C20orf140 (NM_144628.1,311-329).
caagctcctcaatgtcaat

SEQ ID NO: 410530 - DNA, 19 bp, Homo sapiens
  siRNA target sequence for C20orf140 (NM_144628.1,376-394).
gcaaggactaccaacaagt

SEQ ID NO: 410531 - DNA, 19 bp, Homo sapiens
  siRNA target sequence for C20orf140 (NM_144628.1,586-604).
catccctggtagaaaaatt

SEQ ID NO: 410532 - DNA, 19 bp, Homo sapiens
  siRNA target sequence for C20orf140 (NM_144628.1,617-635).
cctcagggattttatggat

SEQ ID NO: 410533 - DNA, 19 bp, Homo sapiens
  siRNA target sequence for C20orf140 (NM_144628.1,645-663).
gacaacaccaagcatatat

SEQ ID NO: 410534 - DNA, 19 bp, Homo sapiens
  siRNA target sequence for C20orf140 (NM_144628.1,647-665).
caacaccaagcatatatta

SEQ ID NO: 410535 - DNA, 19 bp, Homo sapiens
  siRNA target sequence for C20orf140 (NM_144628.1,700-718).
cagagctccatgacttcat

SEQ ID NO: 410536 - DNA, 19 bp, Homo sapiens
  siRNA target sequence for C20orf140 (NM_144628.1,796-814).
ggcacgtcgtgcggttata

SEQ ID NO: 410537 - DNA, 19 bp, Homo sapiens
  siRNA target sequence for C20orf140 (NM_144628.1,797-815).
gcacgtcgtgcggttatat

SEQ ID NO: 410538 - DNA, 19 bp, Homo sapiens
  siRNA target sequence for C20orf140 (NM_144628.1,801-819).
gtcgtgcggttatatgact

SEQ ID NO: 410539 - DNA, 19 bp, Homo sapiens
  siRNA target sequence for C20orf140 (NM_144628.1,837-855).
ccactgatgccgatttact

SEQ ID NO: 410540 - DNA, 19 bp, Homo sapiens
  siRNA target sequence for C20orf140 (NM_144628.1,838-856).
cactgatgccgatttactt

SEQ ID NO: 410541 - DNA, 19 bp, Homo sapiens
  siRNA target sequence for C20orf140 (NM_144628.1,859-877).
cagccgtgattgtgttgta

SEQ ID NO: 410542 - DNA, 19 bp, Homo sapiens
  siRNA target sequence for C20orf140 (NM_144628.1,1058-1076).
ggcagcctctactttcaaa

SEQ ID NO: 410543 - DNA, 19 bp, Homo sapiens
  siRNA target sequence for C20orf140 (NM_144628.1,1063-1081).
cctctactttcaaagactt

SEQ ID NO: 410544 - DNA, 19 bp, Homo sapiens
  siRNA target sequence for C20orf140 (NM_144628.1,1147-1165).
ggcctgaagatcgaacaaa

SEQ ID NO: 410545 - DNA, 19 bp, Homo sapiens
  siRNA target sequence for C20orf140 (NM_144628.1,1148-1166).
gcctgaagatcgaacaaaa

SEQ ID NO: 410546 - DNA, 19 bp, Homo sapiens
  siRNA target sequence for C20orf140 (NM_144628.1,1186-1204).
ggaccaaccgctttgtgaa

SEQ ID NO: 410547 - DNA, 19 bp, Homo sapiens
  siRNA target sequence for C2orf11 (NM_144629.1,408-426).
gtgcggacttagaaagcta

SEQ ID NO: 410548 - DNA, 19 bp, Homo sapiens
  siRNA target sequence for C2orf11 (NM_144629.1,413-431).
gacttagaaagctagaaga

SEQ ID NO: 410549 - DNA, 19 bp, Homo sapiens
  siRNA target sequence for C2orf11 (NM_144629.1,497-515).
cagaatttgcttacgaata

SEQ ID NO: 410550 - DNA, 19 bp, Homo sapiens
  siRNA target sequence for C2orf11 (NM_144629.1,506-524).
cttacgaatatgtattgct

SEQ ID NO: 410551 - DNA, 19 bp, Homo sapiens
  siRNA target sequence for C2orf11 (NM_144629.1,559-577).
gtcatcaagataaattcaa

SEQ ID NO: 410552 - DNA, 19 bp, Homo sapiens
  siRNA target sequence for C2orf11 (NM_144629.1,633-651).
ggctattcatcctgttata

SEQ ID NO: 410553 - DNA, 19 bp, Homo sapiens
  siRNA target sequence for C2orf11 (NM_144629.1,635-653).
ctattcatcctgttataca

SEQ ID NO: 410554 - DNA, 19 bp, Homo sapiens
  siRNA target sequence for C2orf11 (NM_144629.1,679-697).
cctgcaagttacctataca

SEQ ID NO: 410555 - DNA, 19 bp, Homo sapiens
  siRNA target sequence for C2orf11 (NM_144629.1,702-720).
ggtgctattgcgcttgaaa

SEQ ID NO: 410556 - DNA, 19 bp, Homo sapiens
  siRNA target sequence for C2orf11 (NM_144629.1,703-721).
gtgctattgcgcttgaaat

SEQ ID NO: 410557 - DNA, 19 bp, Homo sapiens
  siRNA target sequence for C2orf11 (NM_144629.1,705-723).
gctattgcgcttgaaatta

SEQ ID NO: 410558 - DNA, 19 bp, Homo sapiens
  siRNA target sequence for C2orf11 (NM_144629.1,706-724).
ctattgcgcttgaaattaa

SEQ ID NO: 410559 - DNA, 19 bp, Homo sapiens
  siRNA target sequence for C2orf11 (NM_144629.1,778-796).
gaggaatgtcccctaactt

SEQ ID NO: 410560 - DNA, 19 bp, Homo sapiens
  siRNA target sequence for C2orf11 (NM_144629.1,840-858).
gattaatgtcgctgctaaa

SEQ ID NO: 410561 - DNA, 19 bp, Homo sapiens
  siRNA target sequence for C2orf11 (NM_144629.1,891-909).
gcattattctccatctaaa

SEQ ID NO: 410562 - DNA, 19 bp, Homo sapiens
  siRNA target sequence for C2orf11 (NM_144629.1,892-910).
cattattctccatctaaat

SEQ ID NO: 410563 - DNA, 19 bp, Homo sapiens
  siRNA target sequence for C2orf11 (NM_144629.1,928-946).
catgatggagatatagaat

SEQ ID NO: 410564 - DNA, 19 bp, Homo sapiens
  siRNA target sequence for C2orf11 (NM_144629.1,962-980).
gacacggttcagatgaaaa

SEQ ID NO: 410565 - DNA, 19 bp, Homo sapiens
  siRNA target sequence for C2orf11 (NM_144629.1,993-1011).
gaatgaagggacgttaagt

SEQ ID NO: 410566 - DNA, 19 bp, Homo sapiens
  siRNA target sequence for C2orf11 (NM_144629.1,1019-1037).
catctgaaagcggaattga

SEQ ID NO: 410567 - DNA, 19 bp, Homo sapiens
  siRNA target sequence for C2orf11 (NM_144629.1,1028-1046).
gcggaattgaggaagaact

SEQ ID NO: 410568 - DNA, 19 bp, Homo sapiens
  siRNA target sequence for C2orf11 (NM_144629.1,1058-1076).
gtggacagtatcaaatgga

SEQ ID NO: 410569 - DNA, 19 bp, Homo sapiens
  siRNA target sequence for C2orf11 (NM_144629.1,1090-1108).
cctacttcctctaaatcaa

SEQ ID NO: 410570 - DNA, 19 bp, Homo sapiens
  siRNA target sequence for C2orf11 (NM_144629.1,1120-1138).
gcctcagataacaaattgt

SEQ ID NO: 410571 - DNA, 19 bp, Homo sapiens
  siRNA target sequence for C2orf11 (NM_144629.1,1189-1207).
gaaggcatcctgtcaatga

SEQ ID NO: 410572 - DNA, 19 bp, Homo sapiens
  siRNA target sequence for C2orf11 (NM_144629.1,1193-1211).
gcatcctgtcaatgaaagt

SEQ ID NO: 410573 - DNA, 19 bp, Homo sapiens
  siRNA target sequence for C2orf11 (NM_144629.1,1249-1267).
gattggctggagttaacta

SEQ ID NO: 410574 - DNA, 19 bp, Homo sapiens
  siRNA target sequence for C2orf11 (NM_144629.1,1333-1351).
gaacatttgcctaaatctt

SEQ ID NO: 410575 - DNA, 19 bp, Homo sapiens
  siRNA target sequence for C2orf11 (NM_144629.1,1343-1361).
ctaaatctttggaaggatt

SEQ ID NO: 410576 - DNA, 19 bp, Homo sapiens
  siRNA target sequence for C2orf11 (NM_144629.1,1387-1405).
ggagttccaggttctagta

SEQ ID NO: 410577 - DNA, 19 bp, Homo sapiens
  siRNA target sequence for C2orf11 (NM_144629.1,1420-1438).
gccatcgtagtagaacaat

SEQ ID NO: 410578 - DNA, 19 bp, Homo sapiens
  siRNA target sequence for C2orf11 (NM_144629.1,1429-1447).
gtagaacaatggactgtta

SEQ ID NO: 410579 - DNA, 19 bp, Homo sapiens
  siRNA target sequence for C2orf11 (NM_144629.1,1444-1462).
gttattgagggatgtgaaa

SEQ ID NO: 410580 - DNA, 19 bp, Homo sapiens
  siRNA target sequence for C2orf11 (NM_144629.1,1450-1468).
gagggatgtgaaatcaaaa

SEQ ID NO: 410581 - DNA, 19 bp, Homo sapiens
  siRNA target sequence for C2orf11 (NM_144629.1,1570-1588).
gctacaaagcagatcgtat

SEQ ID NO: 410582 - DNA, 19 bp, Homo sapiens
  siRNA target sequence for C2orf11 (NM_144629.1,1571-1589).
ctacaaagcagatcgtatt

SEQ ID NO: 410583 - DNA, 19 bp, Homo sapiens
  siRNA target sequence for C2orf11 (NM_144629.1,1574-1592).
caaagcagatcgtattcct

SEQ ID NO: 410584 - DNA, 19 bp, Homo sapiens
  siRNA target sequence for C2orf11 (NM_144629.1,1599-1617).
gccagttatgtggaattca

SEQ ID NO: 410585 - DNA, 19 bp, Homo sapiens
  siRNA target sequence for C2orf11 (NM_144629.1,1685-1703).
gtagaagcatcggattaga

SEQ ID NO: 410586 - DNA, 19 bp, Homo sapiens
  siRNA target sequence for ZNF513 (NM_144631.2,367-385).
gtgcggagagtgaagttga

SEQ ID NO: 410587 - DNA, 19 bp, Homo sapiens
  siRNA target sequence for ZNF513 (NM_144631.2,516-534).
ccacggctactgtactcat

SEQ ID NO: 410588 - DNA, 19 bp, Homo sapiens
  siRNA target sequence for ZNF513 (NM_144631.2,1175-1193).
cccctttgccactcactat

SEQ ID NO: 410589 - DNA, 19 bp, Homo sapiens
  siRNA target sequence for ZNF513 (NM_144631.2,1267-1285).
cctctgctcatctggataa

SEQ ID NO: 410590 - DNA, 19 bp, Homo sapiens
  siRNA target sequence for ZNF513 (NM_144631.2,1270-1288).
ctgctcatctggataacct

SEQ ID NO: 410591 - DNA, 19 bp, Homo sapiens
  siRNA target sequence for ZNF513 (NM_144631.2,1503-1521).
gccacctgcgcctatacca

SEQ ID NO: 410592 - DNA, 19 bp, Homo sapiens
  siRNA target sequence for ZNF513 (NM_144631.2,1522-1540).
cgggccactgggacaacta

SEQ ID NO: 410593 - DNA, 19 bp, Homo sapiens
  siRNA target sequence for FLJ30294 (NM_144632.2,151-169).
gactaaatatcgctatctt

SEQ ID NO: 410594 - DNA, 19 bp, Homo sapiens
  siRNA target sequence for FLJ30294 (NM_144632.2,153-171).
ctaaatatcgctatcttct

SEQ ID NO: 410595 - DNA, 19 bp, Homo sapiens
  siRNA target sequence for FLJ30294 (NM_144632.2,189-207).
gctttgggggtgttactct

SEQ ID NO: 410596 - DNA, 19 bp, Homo sapiens
  siRNA target sequence for FLJ30294 (NM_144632.2,190-208).
ctttgggggtgttactctt

SEQ ID NO: 410597 - DNA, 19 bp, Homo sapiens
  siRNA target sequence for FLJ30294 (NM_144632.2,196-214).
gggtgttactctttttggt

SEQ ID NO: 410598 - DNA, 19 bp, Homo sapiens
  siRNA target sequence for FLJ30294 (NM_144632.2,215-233).
ggcttttggatcggattat

SEQ ID NO: 410599 - DNA, 19 bp, Homo sapiens
  siRNA target sequence for FLJ30294 (NM_144632.2,259-277).
gatgttcaggtgaaaagaa

SEQ ID NO: 410600 - DNA, 19 bp, Homo sapiens
  siRNA target sequence for FLJ30294 (NM_144632.2,262-280).
gttcaggtgaaaagaatat

SEQ ID NO: 410601 - DNA, 19 bp, Homo sapiens
  siRNA target sequence for FLJ30294 (NM_144632.2,461-479).
ctatgactctgcagttatt

SEQ ID NO: 410602 - DNA, 19 bp, Homo sapiens
  siRNA target sequence for FLJ30294 (NM_144632.2,514-532).
gggtagttgctgtagtcat

SEQ ID NO: 410603 - DNA, 19 bp, Homo sapiens
  siRNA target sequence for FLJ30294 (NM_144632.2,525-543).
gtagtcatcgcaagctttt

SEQ ID NO: 410604 - DNA, 19 bp, Homo sapiens
  siRNA target sequence for FLJ30294 (NM_144632.2,528-546).
gtcatcgcaagctttttga

SEQ ID NO: 410605 - DNA, 19 bp, Homo sapiens
  siRNA target sequence for FLJ30294 (NM_144632.2,588-606).
gctgggggaggctcatata

SEQ ID NO: 410606 - DNA, 19 bp, Homo sapiens
  siRNA target sequence for FLJ30294 (NM_144632.2,589-607).
ctgggggaggctcatatat

SEQ ID NO: 410607 - DNA, 19 bp, Homo sapiens
  siRNA target sequence for FLJ30294 (NM_144632.2,609-627).
gctgcaggcatcctatttt

SEQ ID NO: 410608 - DNA, 19 bp, Homo sapiens
  siRNA target sequence for FLJ30294 (NM_144632.2,612-630).
gcaggcatcctattttcat

SEQ ID NO: 410609 - DNA, 19 bp, Homo sapiens
  siRNA target sequence for FLJ30294 (NM_144632.2,678-696).
gaaagctaccgaaacatga

SEQ ID NO: 410610 - DNA, 19 bp, Homo sapiens
  siRNA target sequence for FLJ30294 (NM_144632.2,713-731).
ggatttcaccccttctgtt

SEQ ID NO: 410611 - DNA, 19 bp, Homo sapiens
  siRNA target sequence for FLJ30294 (NM_144632.2,782-800).
gctagctggattactattt

SEQ ID NO: 410612 - DNA, 19 bp, Homo sapiens
  siRNA target sequence for MGC21688 (NM_144635.3,1850-1868).
cactgatgactcctatgat

SEQ ID NO: 410613 - DNA, 19 bp, Homo sapiens
  siRNA target sequence for MGC21688 (NM_144635.3,2175-2193).
caggactcactctacaact

SEQ ID NO: 410614 - DNA, 19 bp, Homo sapiens
  siRNA target sequence for MGC29956 (NM_144638.1,115-133).
cgcttttggggcgtattca

SEQ ID NO: 410615 - DNA, 19 bp, Homo sapiens
  siRNA target sequence for MGC29956 (NM_144638.1,116-134).
gcttttggggcgtattcaa

SEQ ID NO: 410616 - DNA, 19 bp, Homo sapiens
  siRNA target sequence for MGC29956 (NM_144638.1,218-236).
gcgtcttaggcattattgt

SEQ ID NO: 410617 - DNA, 19 bp, Homo sapiens
  siRNA target sequence for MGC29956 (NM_144638.1,235-253).
gtgatggcgagcaccaatt

SEQ ID NO: 410618 - DNA, 19 bp, Homo sapiens
  siRNA target sequence for IL17RE (NM_144640.2,394-412).
cacctcctggtgcagaaat

SEQ ID NO: 410619 - DNA, 19 bp, Homo sapiens
  siRNA target sequence for IL17RE (NM_144640.2,399-417).
cctggtgcagaaatccaaa

SEQ ID NO: 410620 - DNA, 19 bp, Homo sapiens
  siRNA target sequence for IL17RE (NM_144640.2,550-568).
ggacttcgctctaaaagga

SEQ ID NO: 410621 - DNA, 19 bp, Homo sapiens
  siRNA target sequence for IL17RE (NM_144640.2,604-622).
cccagattggactcacaaa

SEQ ID NO: 410622 - DNA, 19 bp, Homo sapiens
  siRNA target sequence for IL17RE (NM_144640.2,670-688).
gctattcgggtgaccatat

SEQ ID NO: 410623 - DNA, 19 bp, Homo sapiens
  siRNA target sequence for IL17RE (NM_144640.2,702-720).
ggtcagcgtgcgtctttgt

SEQ ID NO: 410624 - DNA, 19 bp, Homo sapiens
  siRNA target sequence for IL17RE (NM_144640.2,747-765).
gctgagcagtccctatgat

SEQ ID NO: 410625 - DNA, 19 bp, Homo sapiens
  siRNA target sequence for IL17RE (NM_144640.2,757-775).
ccctatgatgtccagaaaa

SEQ ID NO: 410626 - DNA, 19 bp, Homo sapiens
  siRNA target sequence for IL17RE (NM_144640.2,794-812).
ctgtagagctgccttatga

SEQ ID NO: 410627 - DNA, 19 bp, Homo sapiens
  siRNA target sequence for IL17RE (NM_144640.2,796-814).
gtagagctgccttatgaat

SEQ ID NO: 410628 - DNA, 19 bp, Homo sapiens
  siRNA target sequence for IL17RE (NM_144640.2,801-819).
gctgccttatgaattcctt

SEQ ID NO: 410629 - DNA, 19 bp, Homo sapiens
  siRNA target sequence for IL17RE (NM_144640.2,1029-1047).
ctggcataccctttgcaaa

SEQ ID NO: 410630 - DNA, 19 bp, Homo sapiens
  siRNA target sequence for IL17RE (NM_144640.2,1074-1092).
gtcagatgggtggtatgtt

SEQ ID NO: 410631 - DNA, 19 bp, Homo sapiens
  siRNA target sequence for IL17RE (NM_144640.2,1183-1201).
ctcacatcctggaatgtaa

SEQ ID NO: 410632 - DNA, 19 bp, Homo sapiens
  siRNA target sequence for FLJ30655 (NM_144643.1,511-529).
gcagaaatcgactttctga

SEQ ID NO: 410633 - DNA, 19 bp, Homo sapiens
  siRNA target sequence for FLJ30655 (NM_144643.1,534-552).
gcaaaatcgaagactaaat

SEQ ID NO: 410634 - DNA, 19 bp, Homo sapiens
  siRNA target sequence for FLJ30655 (NM_144643.1,556-574).
gattttaggcggtatcaaa

SEQ ID NO: 410635 - DNA, 19 bp, Homo sapiens
  siRNA target sequence for FLJ30655 (NM_144643.1,565-583).
cggtatcaaatggaaagtt

SEQ ID NO: 410636 - DNA, 19 bp, Homo sapiens
  siRNA target sequence for FLJ30655 (NM_144643.1,566-584).
ggtatcaaatggaaagttt

SEQ ID NO: 410637 - DNA, 19 bp, Homo sapiens
  siRNA target sequence for FLJ30655 (NM_144643.1,623-641).
gagaaggagacgacacatt

SEQ ID NO: 410638 - DNA, 19 bp, Homo sapiens
  siRNA target sequence for FLJ30655 (NM_144643.1,677-695).
ctcttgttactgagtatga

SEQ ID NO: 410639 - DNA, 19 bp, Homo sapiens
  siRNA target sequence for FLJ30655 (NM_144643.1,679-697).
cttgttactgagtatgata

SEQ ID NO: 410640 - DNA, 19 bp, Homo sapiens
  siRNA target sequence for FLJ30655 (NM_144643.1,712-730).
ctaaatgggcagctgaaat

SEQ ID NO: 410641 - DNA, 19 bp, Homo sapiens
  siRNA target sequence for FLJ30655 (NM_144643.1,749-767).
gtgagatgaaattacaact

SEQ ID NO: 410642 - DNA, 19 bp, Homo sapiens
  siRNA target sequence for FLJ30655 (NM_144643.1,753-771).
gatgaaattacaacttgaa

SEQ ID NO: 410643 - DNA, 19 bp, Homo sapiens
  siRNA target sequence for FLJ30655 (NM_144643.1,794-812).
ggttgcacagtgaattaaa

SEQ ID NO: 410644 - DNA, 19 bp, Homo sapiens
  siRNA target sequence for FLJ30655 (NM_144643.1,856-874).
gaggtaggaactgacatat

SEQ ID NO: 410645 - DNA, 19 bp, Homo sapiens
  siRNA target sequence for FLJ30655 (NM_144643.1,858-876).
ggtaggaactgacatatat

SEQ ID NO: 410646 - DNA, 19 bp, Homo sapiens
  siRNA target sequence for FLJ30655 (NM_144643.1,979-997).
gacagactacacaagcttt

SEQ ID NO: 410647 - DNA, 19 bp, Homo sapiens
  siRNA target sequence for FLJ30655 (NM_144643.1,1083-1101).
caaacaacttcatgttact

SEQ ID NO: 410648 - DNA, 19 bp, Homo sapiens
  siRNA target sequence for FLJ30655 (NM_144643.1,1110-1128).
catggaagtgactaaccaa

SEQ ID NO: 410649 - DNA, 19 bp, Homo sapiens
  siRNA target sequence for FLJ30655 (NM_144643.1,1121-1139).
ctaaccaacagtttctgaa

SEQ ID NO: 410650 - DNA, 19 bp, Homo sapiens
  siRNA target sequence for FLJ30655 (NM_144643.1,1148-1166).
ctgaacaaagtgtgataat

SEQ ID NO: 410651 - DNA, 19 bp, Homo sapiens
  siRNA target sequence for FLJ30655 (NM_144643.1,1231-1249).
gaagagttaactaatgtga

SEQ ID NO: 410652 - DNA, 19 bp, Homo sapiens
  siRNA target sequence for FLJ30655 (NM_144643.1,1241-1259).
ctaatgtgactgaagatct

SEQ ID NO: 410653 - DNA, 19 bp, Homo sapiens
  siRNA target sequence for FLJ30655 (NM_144643.1,1319-1337).
catcagataggcgtttaca

SEQ ID NO: 410654 - DNA, 19 bp, Homo sapiens
  siRNA target sequence for FLJ30655 (NM_144643.1,1328-1346).
ggcgtttacagcagttaca

SEQ ID NO: 410655 - DNA, 19 bp, Homo sapiens
  siRNA target sequence for FLJ30655 (NM_144643.1,1330-1348).
cgtttacagcagttacagt

SEQ ID NO: 410656 - DNA, 19 bp, Homo sapiens
  siRNA target sequence for FLJ30655 (NM_144643.1,1336-1354).
cagcagttacagtctagta

SEQ ID NO: 410657 - DNA, 19 bp, Homo sapiens
  siRNA target sequence for FLJ30655 (NM_144643.1,1339-1357).
cagttacagtctagtataa

SEQ ID NO: 410658 - DNA, 19 bp, Homo sapiens
  siRNA target sequence for FLJ30655 (NM_144643.1,1341-1359).
gttacagtctagtataaaa

SEQ ID NO: 410659 - DNA, 19 bp, Homo sapiens
  siRNA target sequence for FLJ30655 (NM_144643.1,1347-1365).
gtctagtataaaacaatta

SEQ ID NO: 410660 - DNA, 19 bp, Homo sapiens
  siRNA target sequence for FLJ30655 (NM_144643.1,1401-1419).
ccaattaagaaccgaaaat

SEQ ID NO: 410661 - DNA, 19 bp, Homo sapiens
  siRNA target sequence for FLJ30655 (NM_144643.1,1450-1468).
caagcaaagtgcaatgaat

SEQ ID NO: 410662 - DNA, 19 bp, Homo sapiens
  siRNA target sequence for FLJ30655 (NM_144643.1,1479-1497).
gagatatgaggctattgta

SEQ ID NO: 410663 - DNA, 19 bp, Homo sapiens
  siRNA target sequence for FLJ30655 (NM_144643.1,1495-1513).
gtaagagccagaaatagca

SEQ ID NO: 410664 - DNA, 19 bp, Homo sapiens
  siRNA target sequence for FLJ30655 (NM_144643.1,1521-1539).
cttagaagaagctaacctt

SEQ ID NO: 410665 - DNA, 19 bp, Homo sapiens
  siRNA target sequence for FLJ30655 (NM_144643.1,1525-1543).
gaagaagctaaccttcaaa

SEQ ID NO: 410666 - DNA, 19 bp, Homo sapiens
  siRNA target sequence for FLJ30655 (NM_144643.1,1604-1622).
cagtttctcggtttgtaca

SEQ ID NO: 410667 - DNA, 19 bp, Homo sapiens
  siRNA target sequence for FLJ30655 (NM_144643.1,1618-1636).
gtacaagatgctaccataa

SEQ ID NO: 410668 - DNA, 19 bp, Homo sapiens
  siRNA target sequence for FLJ30655 (NM_144643.1,1648-1666).
gaagttgcaaacaccaaaa

SEQ ID NO: 410669 - DNA, 19 bp, Homo sapiens
  siRNA target sequence for FLJ30655 (NM_144643.1,1688-1706).
ctcgattaacagaagaact

SEQ ID NO: 410670 - DNA, 19 bp, Homo sapiens
  siRNA target sequence for FLJ30655 (NM_144643.1,1744-1762).
caaattgaacgagtcatta

SEQ ID NO: 410671 - DNA, 19 bp, Homo sapiens
  siRNA target sequence for FLJ30655 (NM_144643.1,1750-1768).
gaacgagtcattaaggaaa

SEQ ID NO: 410672 - DNA, 19 bp, Homo sapiens
  siRNA target sequence for FLJ30655 (NM_144643.1,1866-1884).
ggtttcagagcgttcaaaa

SEQ ID NO: 410673 - DNA, 19 bp, Homo sapiens
  siRNA target sequence for FLJ30655 (NM_144643.1,1875-1893).
gcgttcaaaagatgatctt

SEQ ID NO: 410674 - DNA, 19 bp, Homo sapiens
  siRNA target sequence for FLJ30655 (NM_144643.1,1942-1960).
gactcctcagaagaaatat

SEQ ID NO: 410675 - DNA, 19 bp, Homo sapiens
  siRNA target sequence for FLJ30655 (NM_144643.1,1961-1979).
cacgttaccaagaaatgat

SEQ ID NO: 410676 - DNA, 19 bp, Homo sapiens
  siRNA target sequence for FLJ30655 (NM_144643.1,1964-1982).
gttaccaagaaatgattca

SEQ ID NO: 410677 - DNA, 19 bp, Homo sapiens
  siRNA target sequence for FLJ30655 (NM_144643.1,2031-2049).
cagtgaacaaaggctaaaa

SEQ ID NO: 410678 - DNA, 19 bp, Homo sapiens
  siRNA target sequence for FLJ30655 (NM_144643.1,2076-2094).
gaaagagactgagagttta

SEQ ID NO: 410679 - DNA, 19 bp, Homo sapiens
  siRNA target sequence for FLJ30655 (NM_144643.1,2169-2187).
ggaacgtggatttgaagtt

SEQ ID NO: 410680 - DNA, 19 bp, Homo sapiens
  siRNA target sequence for FLJ30655 (NM_144643.1,2173-2191).
cgtggatttgaagttcaat

SEQ ID NO: 410681 - DNA, 19 bp, Homo sapiens
  siRNA target sequence for FLJ30655 (NM_144643.1,2174-2192).
gtggatttgaagttcaatt

SEQ ID NO: 410682 - DNA, 19 bp, Homo sapiens
  siRNA target sequence for FLJ30655 (NM_144643.1,2176-2194).
ggatttgaagttcaattga

SEQ ID NO: 410683 - DNA, 19 bp, Homo sapiens
  siRNA target sequence for FLJ30655 (NM_144643.1,2216-2234).
gaaattccattgttgaact

SEQ ID NO: 410684 - DNA, 19 bp, Homo sapiens
  siRNA target sequence for FLJ30655 (NM_144643.1,2340-2358).
gctgagtcgacagaaactt

SEQ ID NO: 410685 - DNA, 19 bp, Homo sapiens
  siRNA target sequence for FLJ30655 (NM_144643.1,2343-2361).
gagtcgacagaaacttcat

SEQ ID NO: 410686 - DNA, 19 bp, Homo sapiens
  siRNA target sequence for FLJ30655 (NM_144643.1,2503-2521).
cagcagctcagtgtgatta

SEQ ID NO: 410687 - DNA, 19 bp, Homo sapiens
  siRNA target sequence for FLJ30655 (NM_144643.1,2540-2558).
cagcctccctgatgaatct

SEQ ID NO: 410688 - DNA, 19 bp, Homo sapiens
  siRNA target sequence for TSARG2 (NM_144644.2,164-182).
gacaagtcaccgtcacttt

SEQ ID NO: 410689 - DNA, 19 bp, Homo sapiens
  siRNA target sequence for TSARG2 (NM_144644.2,377-395).
ccctgggaacttgaattat

SEQ ID NO: 410690 - DNA, 19 bp, Homo sapiens
  siRNA target sequence for TSARG2 (NM_144644.2,379-397).
ctgggaacttgaattatca

SEQ ID NO: 410691 - DNA, 19 bp, Homo sapiens
  siRNA target sequence for TSARG2 (NM_144644.2,525-543).
gagtgcctgaaatattgat

SEQ ID NO: 410692 - DNA, 19 bp, Homo sapiens
  siRNA target sequence for TSARG2 (NM_144644.2,569-587).
catcgagaaattaaaagta

SEQ ID NO: 410693 - DNA, 19 bp, Homo sapiens
  siRNA target sequence for TSARG2 (NM_144644.2,602-620).
gtgaatttcacggactata

SEQ ID NO: 410694 - DNA, 19 bp, Homo sapiens
  siRNA target sequence for TSARG2 (NM_144644.2,648-666).
ccaggtctacagtttcgaa

SEQ ID NO: 410695 - DNA, 19 bp, Homo sapiens
  siRNA target sequence for TSARG2 (NM_144644.2,663-681).
cgaagtctattaaagataa

SEQ ID NO: 410696 - DNA, 19 bp, Homo sapiens
  siRNA target sequence for TSARG2 (NM_144644.2,712-730).
caacatgctgaccaatgaa

SEQ ID NO: 410697 - DNA, 19 bp, Homo sapiens
  siRNA target sequence for TSARG2 (NM_144644.2,715-733).
catgctgaccaatgaactt

SEQ ID NO: 410698 - DNA, 19 bp, Homo sapiens
  siRNA target sequence for TSARG2 (NM_144644.2,718-736).
gctgaccaatgaacttaaa

SEQ ID NO: 410699 - DNA, 19 bp, Homo sapiens
  siRNA target sequence for TSARG2 (NM_144644.2,737-755).
gcggagttcctcatccttt

SEQ ID NO: 410700 - DNA, 19 bp, Homo sapiens
  siRNA target sequence for TSARG2 (NM_144644.2,758-776).
catatgttgcaaagaaaat

SEQ ID NO: 410701 - DNA, 19 bp, Homo sapiens
  siRNA target sequence for TSARG2 (NM_144644.2,795-813).
cagaatggtttgatgtgaa

SEQ ID NO: 410702 - DNA, 19 bp, Homo sapiens
  siRNA target sequence for TSARG2 (NM_144644.2,823-841).
gggagaagttactctcaat

SEQ ID NO: 410703 - DNA, 19 bp, Homo sapiens
  siRNA target sequence for TSARG2 (NM_144644.2,825-843).
gagaagttactctcaatca

SEQ ID NO: 410704 - DNA, 19 bp, Homo sapiens
  siRNA target sequence for TSARG2 (NM_144644.2,859-877).
ctctgggcgcagatataat

SEQ ID NO: 410705 - DNA, 19 bp, Homo sapiens
  siRNA target sequence for TSARG2 (NM_144644.2,861-879).
ctgggcgcagatataattt

SEQ ID NO: 410706 - DNA, 19 bp, Homo sapiens
  siRNA target sequence for TSARG2 (NM_144644.2,863-881).
gggcgcagatataatttaa

SEQ ID NO: 410707 - DNA, 19 bp, Homo sapiens
  siRNA target sequence for TSARG2 (NM_144644.2,934-952).
cagttcacatagagaaata

SEQ ID NO: 410708 - DNA, 19 bp, Homo sapiens
  siRNA target sequence for TSARG2 (NM_144644.2,939-957).
cacatagagaaatacatgt

SEQ ID NO: 410709 - DNA, 19 bp, Homo sapiens
  siRNA target sequence for TSARG2 (NM_144644.2,962-980).
caagctggacaacattctt

SEQ ID NO: 410710 - DNA, 19 bp, Homo sapiens
  siRNA target sequence for TSARG2 (NM_144644.2,965-983).
gctggacaacattcttatt

SEQ ID NO: 410711 - DNA, 19 bp, Homo sapiens
  siRNA target sequence for MGC26744 (NM_144645.1,337-355).
gggcagttgttataatgta

SEQ ID NO: 410712 - DNA, 19 bp, Homo sapiens
  siRNA target sequence for MGC26744 (NM_144645.1,339-357).
gcagttgttataatgtaca

SEQ ID NO: 410713 - DNA, 19 bp, Homo sapiens
  siRNA target sequence for MGC26744 (NM_144645.1,465-483).
caaaatgtaccaccattaa

SEQ ID NO: 410714 - DNA, 19 bp, Homo sapiens
  siRNA target sequence for IGJ (NM_144646.2,81-99).
gggagtcctggcggttttt

SEQ ID NO: 410715 - DNA, 19 bp, Homo sapiens
  siRNA target sequence for IGJ (NM_144646.2,82-100).
ggagtcctggcggttttta

SEQ ID NO: 410716 - DNA, 19 bp, Homo sapiens
  siRNA target sequence for IGJ (NM_144646.2,83-101).
gagtcctggcggtttttat

SEQ ID NO: 410717 - DNA, 19 bp, Homo sapiens
  siRNA target sequence for IGJ (NM_144646.2,85-103).
gtcctggcggtttttatta

SEQ ID NO: 410718 - DNA, 19 bp, Homo sapiens
  siRNA target sequence for IGJ (NM_144646.2,137-155).
ggattgttcttgttgacaa

SEQ ID NO: 410719 - DNA, 19 bp, Homo sapiens
  siRNA target sequence for IGJ (NM_144646.2,194-212).
gttcttccgaagatcctaa

SEQ ID NO: 410720 - DNA, 19 bp, Homo sapiens
  siRNA target sequence for IGJ (NM_144646.2,197-215).
cttccgaagatcctaatga

SEQ ID NO: 410721 - DNA, 19 bp, Homo sapiens
  siRNA target sequence for IGJ (NM_144646.2,228-246).
gagaaacatccgaattatt

SEQ ID NO: 410722 - DNA, 19 bp, Homo sapiens
  siRNA target sequence for IGJ (NM_144646.2,230-248).
gaaacatccgaattattgt

SEQ ID NO: 410723 - DNA, 19 bp, Homo sapiens
  siRNA target sequence for IGJ (NM_144646.2,290-308).
cattgagaaccagatttgt

SEQ ID NO: 410724 - DNA, 19 bp, Homo sapiens
  siRNA target sequence for IGJ (NM_144646.2,425-443).
gctacacttatgacagaaa

SEQ ID NO: 410725 - DNA, 19 bp, Homo sapiens
  siRNA target sequence for IGJ (NM_144646.2,458-476).
ctgtggtcccactcgtata

SEQ ID NO: 410726 - DNA, 19 bp, Homo sapiens
  siRNA target sequence for IGJ (NM_144646.2,462-480).
ggtcccactcgtatatggt

SEQ ID NO: 410727 - DNA, 19 bp, Homo sapiens
  siRNA target sequence for FLJ32786 (NM_144648.1,92-110).
ggagcccgatcgttacagt

SEQ ID NO: 410728 - DNA, 19 bp, Homo sapiens
  siRNA target sequence for FLJ32786 (NM_144648.1,93-111).
gagcccgatcgttacagtt

SEQ ID NO: 410729 - DNA, 19 bp, Homo sapiens
  siRNA target sequence for FLJ32786 (NM_144648.1,165-183).
cgaaaggcagctctaacat

SEQ ID NO: 410730 - DNA, 19 bp, Homo sapiens
  siRNA target sequence for FLJ32786 (NM_144648.1,166-184).
gaaaggcagctctaacata

SEQ ID NO: 410731 - DNA, 19 bp, Homo sapiens
  siRNA target sequence for FLJ32786 (NM_144648.1,285-303).
cctcagagtccgaaatgct

SEQ ID NO: 410732 - DNA, 19 bp, Homo sapiens
  siRNA target sequence for FLJ32786 (NM_144648.1,398-416).
gtctacctcaatctaactt

SEQ ID NO: 410733 - DNA, 19 bp, Homo sapiens
  siRNA target sequence for FLJ32786 (NM_144648.1,400-418).
ctacctcaatctaacttta

SEQ ID NO: 410734 - DNA, 19 bp, Homo sapiens
  siRNA target sequence for FLJ32786 (NM_144648.1,456-474).
gatatgttcatctacagaa

SEQ ID NO: 410735 - DNA, 19 bp, Homo sapiens
  siRNA target sequence for FLJ32786 (NM_144648.1,488-506).
gcgaataaaattgaagatt

SEQ ID NO: 410736 - DNA, 19 bp, Homo sapiens
  siRNA target sequence for FLJ32786 (NM_144648.1,489-507).
cgaataaaattgaagattt

SEQ ID NO: 410737 - DNA, 19 bp, Homo sapiens
  siRNA target sequence for FLJ32786 (NM_144648.1,527-545).
ccttatctcctagaactta

SEQ ID NO: 410738 - DNA, 19 bp, Homo sapiens
  siRNA target sequence for FLJ32786 (NM_144648.1,528-546).
cttatctcctagaacttaa

SEQ ID NO: 410739 - DNA, 19 bp, Homo sapiens
  siRNA target sequence for FLJ32786 (NM_144648.1,533-551).
ctcctagaacttaatgctt

SEQ ID NO: 410740 - DNA, 19 bp, Homo sapiens
  siRNA target sequence for FLJ32786 (NM_144648.1,567-585).
ctacgttcttcaatttcaa

SEQ ID NO: 410741 - DNA, 19 bp, Homo sapiens
  siRNA target sequence for FLJ32786 (NM_144648.1,598-616).
cctcaagaaggcggatttt

SEQ ID NO: 410742 - DNA, 19 bp, Homo sapiens
  siRNA target sequence for FLJ32786 (NM_144648.1,599-617).
ctcaagaaggcggattttt

SEQ ID NO: 410743 - DNA, 19 bp, Homo sapiens
  siRNA target sequence for FLJ32786 (NM_144648.1,620-638).
cacaaccaaatttctgaaa

SEQ ID NO: 410744 - DNA, 19 bp, Homo sapiens
  siRNA target sequence for FLJ32786 (NM_144648.1,654-672).
cgtatcatgctctcactaa

SEQ ID NO: 410745 - DNA, 19 bp, Homo sapiens
  siRNA target sequence for FLJ32786 (NM_144648.1,718-736).
gatgtgcaacaacctaatt

SEQ ID NO: 410746 - DNA, 19 bp, Homo sapiens
  siRNA target sequence for FLJ32786 (NM_144648.1,739-757).
ccttagtttggccaacaat

SEQ ID NO: 410747 - DNA, 19 bp, Homo sapiens
  siRNA target sequence for FLJ32786 (NM_144648.1,740-758).
cttagtttggccaacaata

SEQ ID NO: 410748 - DNA, 19 bp, Homo sapiens
  siRNA target sequence for FLJ32786 (NM_144648.1,744-762).
gtttggccaacaataagat

SEQ ID NO: 410749 - DNA, 19 bp, Homo sapiens
  siRNA target sequence for FLJ32786 (NM_144648.1,754-772).
caataagatcacgacaatt

SEQ ID NO: 410750 - DNA, 19 bp, Homo sapiens
  siRNA target sequence for FLJ32786 (NM_144648.1,765-783).
cgacaattaatggcttaaa

SEQ ID NO: 410751 - DNA, 19 bp, Homo sapiens
  siRNA target sequence for FLJ32786 (NM_144648.1,898-916).
cctccaaggcttagagaat

SEQ ID NO: 410752 - DNA, 19 bp, Homo sapiens
  siRNA target sequence for FLJ32786 (NM_144648.1,962-980).
gagctgagagaaatagaat

SEQ ID NO: 410753 - DNA, 19 bp, Homo sapiens
  siRNA target sequence for FLJ32786 (NM_144648.1,997-1015).
catccttcgagttctcaat

SEQ ID NO: 410754 - DNA, 19 bp, Homo sapiens
  siRNA target sequence for FLJ32786 (NM_144648.1,1046-1064).
gaatattggttcttcgtaa

SEQ ID NO: 410755 - DNA, 19 bp, Homo sapiens
  siRNA target sequence for FLJ32786 (NM_144648.1,1078-1096).
gcgattaacagaattagat

SEQ ID NO: 410756 - DNA, 19 bp, Homo sapiens
  siRNA target sequence for FLJ32786 (NM_144648.1,1207-1225).
gcagccgcagaggatcttt

SEQ ID NO: 410757 - DNA, 19 bp, Homo sapiens
  siRNA target sequence for FLJ32786 (NM_144648.1,1254-1272).
cttatcccatgctgatact

SEQ ID NO: 410758 - DNA, 19 bp, Homo sapiens
  siRNA target sequence for FLJ32786 (NM_144648.1,1313-1331).
cgcctctgcagacagttta

SEQ ID NO: 410759 - DNA, 19 bp, Homo sapiens
  siRNA target sequence for FLJ32786 (NM_144648.1,1362-1380).
ccacaagaccaccttactt

SEQ ID NO: 410760 - DNA, 19 bp, Homo sapiens
  siRNA target sequence for FLJ32786 (NM_144648.1,1389-1407).
gggatcgagttgattatca

SEQ ID NO: 410761 - DNA, 19 bp, Homo sapiens
  siRNA target sequence for FLJ32786 (NM_144648.1,1391-1409).
gatcgagttgattatcatt

SEQ ID NO: 410762 - DNA, 19 bp, Homo sapiens
  siRNA target sequence for FLJ32786 (NM_144648.1,1394-1412).
cgagttgattatcatttta

SEQ ID NO: 410763 - DNA, 19 bp, Homo sapiens
  siRNA target sequence for FLJ32786 (NM_144648.1,1397-1415).
gttgattatcattttatct

SEQ ID NO: 410764 - DNA, 19 bp, Homo sapiens
  siRNA target sequence for FLJ32786 (NM_144648.1,1414-1432).
ctctcaagacgtttttgat

SEQ ID NO: 410765 - DNA, 19 bp, Homo sapiens
  siRNA target sequence for FLJ32786 (NM_144648.1,1449-1467).
ggaaattcattctaacatt

SEQ ID NO: 410766 - DNA, 19 bp, Homo sapiens
  siRNA target sequence for FLJ32786 (NM_144648.1,1460-1478).
ctaacatttagttatggta

SEQ ID NO: 410767 - DNA, 19 bp, Homo sapiens
  siRNA target sequence for FLJ32786 (NM_144648.1,1470-1488).
gttatggtaatcacaagta

SEQ ID NO: 410768 - DNA, 19 bp, Homo sapiens
  siRNA target sequence for FLJ32786 (NM_144648.1,1475-1493).
ggtaatcacaagtatggat

SEQ ID NO: 410769 - DNA, 19 bp, Homo sapiens
  siRNA target sequence for FLJ32786 (NM_144648.1,1476-1494).
gtaatcacaagtatggatt

SEQ ID NO: 410770 - DNA, 19 bp, Homo sapiens
  siRNA target sequence for FLJ32786 (NM_144648.1,1481-1499).
cacaagtatggattaaata

SEQ ID NO: 410771 - DNA, 19 bp, Homo sapiens
  siRNA target sequence for FLJ32786 (NM_144648.1,1515-1533).
gtatcgcaagagatggttt

SEQ ID NO: 410772 - DNA, 19 bp, Homo sapiens
  siRNA target sequence for FLJ32786 (NM_144648.1,1530-1548).
gtttggcaagctgtattca

SEQ ID NO: 410773 - DNA, 19 bp, Homo sapiens
  siRNA target sequence for FLJ32786 (NM_144648.1,1552-1570).
ggaaatagaaggtgtaaga

SEQ ID NO: 410774 - DNA, 19 bp, Homo sapiens
  siRNA target sequence for FLJ32786 (NM_144648.1,1562-1580).
ggtgtaagaagtttgaaat

SEQ ID NO: 410775 - DNA, 19 bp, Homo sapiens
  siRNA target sequence for FLJ32786 (NM_144648.1,1585-1603).
ctattttgagcctcgttat

SEQ ID NO: 410776 - DNA, 19 bp, Homo sapiens
  siRNA target sequence for FLJ32786 (NM_144648.1,1616-1634).
cccatgaacaaggaaaaat

SEQ ID NO: 410777 - DNA, 19 bp, Homo sapiens
  siRNA target sequence for FLJ32786 (NM_144648.1,1649-1667).
cggagaaaaggattattca

SEQ ID NO: 410778 - DNA, 19 bp, Homo sapiens
  siRNA target sequence for FLJ32786 (NM_144648.1,1696-1714).
cagagtggacctttatatt

SEQ ID NO: 410779 - DNA, 19 bp, Homo sapiens
  siRNA target sequence for FLJ32786 (NM_144648.1,1703-1721).
gacctttatattaaaatta

SEQ ID NO: 410780 - DNA, 19 bp, Homo sapiens
  siRNA target sequence for FLJ32786 (NM_144648.1,1769-1787).
ctggatgttgcctaccaaa

SEQ ID NO: 410781 - DNA, 19 bp, Homo sapiens
  siRNA target sequence for FLJ32786 (NM_144648.1,1792-1810).
gagtcagctcattagagaa

SEQ ID NO: 410782 - DNA, 19 bp, Homo sapiens
  siRNA target sequence for FLJ32786 (NM_144648.1,1837-1855).
caagagtttggctacaact

SEQ ID NO: 410783 - DNA, 19 bp, Homo sapiens
  siRNA target sequence for FLJ32786 (NM_144648.1,1847-1865).
gctacaactgcagatgtta

SEQ ID NO: 410784 - DNA, 19 bp, Homo sapiens
  siRNA target sequence for FLJ32786 (NM_144648.1,1848-1866).
ctacaactgcagatgttaa

SEQ ID NO: 410785 - DNA, 19 bp, Homo sapiens
  siRNA target sequence for FLJ32786 (NM_144648.1,1884-1902).
ctgaagcgcatcctacaaa

SEQ ID NO: 410786 - DNA, 19 bp, Homo sapiens
  siRNA target sequence for FLJ32786 (NM_144648.1,1886-1904).
gaagcgcatcctacaaagt

SEQ ID NO: 410787 - DNA, 19 bp, Homo sapiens
  siRNA target sequence for FLJ32786 (NM_144648.1,1889-1907).
gcgcatcctacaaagtata

SEQ ID NO: 410788 - DNA, 19 bp, Homo sapiens
  siRNA target sequence for FLJ32786 (NM_144648.1,1890-1908).
cgcatcctacaaagtatat

SEQ ID NO: 410789 - DNA, 19 bp, Homo sapiens
  siRNA target sequence for FLJ32786 (NM_144648.1,1911-1929).
cttcgaatatgggtgattt

SEQ ID NO: 410790 - DNA, 19 bp, Homo sapiens
  siRNA target sequence for FLJ32786 (NM_144648.1,1914-1932).
cgaatatgggtgatttcct

SEQ ID NO: 410791 - DNA, 19 bp, Homo sapiens
  siRNA target sequence for FLJ32786 (NM_144648.1,1971-1989).
ccaaactttcagccaaaaa

SEQ ID NO: 410792 - DNA, 19 bp, Homo sapiens
  siRNA target sequence for FLJ32786 (NM_144648.1,1995-2013).
cagcggaaagagattctat

SEQ ID NO: 410793 - DNA, 19 bp, Homo sapiens
  siRNA target sequence for FLJ32786 (NM_144648.1,2000-2018).
gaaagagattctatacaca

SEQ ID NO: 410794 - DNA, 19 bp, Homo sapiens
  siRNA target sequence for FLJ32786 (NM_144648.1,2069-2087).
cacacactcctatttcaaa

SEQ ID NO: 410795 - DNA, 19 bp, Homo sapiens
  siRNA target sequence for FLJ32786 (NM_144648.1,2110-2128).
caccagtggtctacactat

SEQ ID NO: 410796 - DNA, 19 bp, Homo sapiens
  siRNA target sequence for FLJ32786 (NM_144648.1,2112-2130).
ccagtggtctacactatta

SEQ ID NO: 410797 - DNA, 19 bp, Homo sapiens
  siRNA target sequence for FLJ32786 (NM_144648.1,2113-2131).
cagtggtctacactattat

SEQ ID NO: 410798 - DNA, 19 bp, Homo sapiens
  siRNA target sequence for FLJ32786 (NM_144648.1,2117-2135).
ggtctacactattatacaa

SEQ ID NO: 410799 - DNA, 19 bp, Homo sapiens
  siRNA target sequence for FLJ32786 (NM_144648.1,2120-2138).
ctacactattatacaactt

SEQ ID NO: 410800 - DNA, 19 bp, Homo sapiens
  siRNA target sequence for FLJ32786 (NM_144648.1,2216-2234).
gggaaggattccttggttt

SEQ ID NO: 410801 - DNA, 19 bp, Homo sapiens
  siRNA target sequence for FLJ32786 (NM_144648.1,2257-2275).
gttctgtccgtggtcaaaa

SEQ ID NO: 410802 - DNA, 19 bp, Homo sapiens
  siRNA target sequence for FLJ32786 (NM_144648.1,2260-2278).
ctgtccgtggtcaaaagaa

SEQ ID NO: 410803 - DNA, 19 bp, Homo sapiens
  siRNA target sequence for FLJ32786 (NM_144648.1,2262-2280).
gtccgtggtcaaaagaatt

SEQ ID NO: 410804 - DNA, 19 bp, Homo sapiens
  siRNA target sequence for FLJ32786 (NM_144648.1,2355-2373).
cccggaaagcactacctat

SEQ ID NO: 410805 - DNA, 19 bp, Homo sapiens
  siRNA target sequence for FLJ32786 (NM_144648.1,2356-2374).
ccggaaagcactacctata

SEQ ID NO: 410806 - DNA, 19 bp, Homo sapiens
  siRNA target sequence for FLJ32786 (NM_144648.1,2358-2376).
ggaaagcactacctataca

SEQ ID NO: 410807 - DNA, 19 bp, Homo sapiens
  siRNA target sequence for FLJ32786 (NM_144648.1,2359-2377).
gaaagcactacctatacaa

SEQ ID NO: 410808 - DNA, 19 bp, Homo sapiens
  siRNA target sequence for FLJ32786 (NM_144648.1,2363-2381).
gcactacctatacaatcat

SEQ ID NO: 410809 - DNA, 19 bp, Homo sapiens
  siRNA target sequence for FLJ32786 (NM_144648.1,2366-2384).
ctacctatacaatcatttt

SEQ ID NO: 410810 - DNA, 19 bp, Homo sapiens
  siRNA target sequence for FLJ33069 (NM_144649.1,190-208).
ccaggttggaaagagaata

SEQ ID NO: 410811 - DNA, 19 bp, Homo sapiens
  siRNA target sequence for FLJ33069 (NM_144649.1,191-209).
caggttggaaagagaatat

SEQ ID NO: 410812 - DNA, 19 bp, Homo sapiens
  siRNA target sequence for FLJ33069 (NM_144649.1,229-247).
cgtgcattttcccaagttt

SEQ ID NO: 410813 - DNA, 19 bp, Homo sapiens
  siRNA target sequence for FLJ33069 (NM_144649.1,253-271).
gtgattccctggatggtta

SEQ ID NO: 410814 - DNA, 19 bp, Homo sapiens
  siRNA target sequence for FLJ33069 (NM_144649.1,261-279).
ctggatggttaccattctt

SEQ ID NO: 410815 - DNA, 19 bp, Homo sapiens
  siRNA target sequence for FLJ33069 (NM_144649.1,263-281).
ggatggttaccattctttt

SEQ ID NO: 410816 - DNA, 19 bp, Homo sapiens
  siRNA target sequence for FLJ33069 (NM_144649.1,303-321).
ctgacaggctcccactata

SEQ ID NO: 410817 - DNA, 19 bp, Homo sapiens
  siRNA target sequence for FLJ33069 (NM_144649.1,380-398).
cttcctgtgcgacaaagat

SEQ ID NO: 410818 - DNA, 19 bp, Homo sapiens
  siRNA target sequence for FLJ33069 (NM_144649.1,421-439).
cccagaccagcgttatgta

SEQ ID NO: 410819 - DNA, 19 bp, Homo sapiens
  siRNA target sequence for FLJ33069 (NM_144649.1,423-441).
cagaccagcgttatgtata

SEQ ID NO: 410820 - DNA, 19 bp, Homo sapiens
  siRNA target sequence for FLJ33069 (NM_144649.1,427-445).
ccagcgttatgtataagga

SEQ ID NO: 410821 - DNA, 19 bp, Homo sapiens
  siRNA target sequence for FLJ33069 (NM_144649.1,437-455).
gtataaggagaacttagtt

SEQ ID NO: 410822 - DNA, 19 bp, Homo sapiens
  siRNA target sequence for FLJ33069 (NM_144649.1,469-487).
cttggctgcatggaagtat

SEQ ID NO: 410823 - DNA, 19 bp, Homo sapiens
  siRNA target sequence for FLJ33069 (NM_144649.1,473-491).
gctgcatggaagtatcttt

SEQ ID NO: 410824 - DNA, 19 bp, Homo sapiens
  siRNA target sequence for FLJ33069 (NM_144649.1,484-502).
gtatctttggtgacatcaa

SEQ ID NO: 410825 - DNA, 19 bp, Homo sapiens
  siRNA target sequence for FLJ33069 (NM_144649.1,548-566).
ggacacagaccattgcaat

SEQ ID NO: 410826 - DNA, 19 bp, Homo sapiens
  siRNA target sequence for FLJ33069 (NM_144649.1,650-668).
ctcttccagccacatcata

SEQ ID NO: 410827 - DNA, 19 bp, Homo sapiens
  siRNA target sequence for FLJ33069 (NM_144649.1,682-700).
gaggaaactcccatagctt

SEQ ID NO: 410828 - DNA, 19 bp, Homo sapiens
  siRNA target sequence for FLJ33069 (NM_144649.1,729-747).
gaacgtttccaagagaata

SEQ ID NO: 410829 - DNA, 19 bp, Homo sapiens
  siRNA target sequence for FLJ33069 (NM_144649.1,741-759).
gagaatagttcggatcatt

SEQ ID NO: 410830 - DNA, 19 bp, Homo sapiens
  siRNA target sequence for FLJ33069 (NM_144649.1,743-761).
gaatagttcggatcattca

SEQ ID NO: 410831 - DNA, 19 bp, Homo sapiens
  siRNA target sequence for FLJ33069 (NM_144649.1,773-791).
gttgcaagaggtcttcttt

SEQ ID NO: 410832 - DNA, 19 bp, Homo sapiens
  siRNA target sequence for FLJ33069 (NM_144649.1,801-819).
ctgcttgctgtgtgcttaa

SEQ ID NO: 410833 - DNA, 19 bp, Homo sapiens
  siRNA target sequence for FLJ33069 (NM_144649.1,804-822).
cttgctgtgtgcttaatca

SEQ ID NO: 410834 - DNA, 19 bp, Homo sapiens
  siRNA target sequence for FLJ33069 (NM_144649.1,828-846).
gcatgtgcaagatggttta

SEQ ID NO: 410835 - DNA, 19 bp, Homo sapiens
  siRNA target sequence for FLJ33069 (NM_144649.1,867-885).
gtcttcacatgctcattga

SEQ ID NO: 410836 - DNA, 19 bp, Homo sapiens
  siRNA target sequence for FLJ33069 (NM_144649.1,872-890).
cacatgctcattgatgata

SEQ ID NO: 410837 - DNA, 19 bp, Homo sapiens
  siRNA target sequence for FLJ33069 (NM_144649.1,877-895).
gctcattgatgataactgt

SEQ ID NO: 410838 - DNA, 19 bp, Homo sapiens
  siRNA target sequence for FLJ33069 (NM_144649.1,884-902).
gatgataactgtagcttat

SEQ ID NO: 410839 - DNA, 19 bp, Homo sapiens
  siRNA target sequence for FLJ33069 (NM_144649.1,897-915).
gcttatgtgaaatcattgt

SEQ ID NO: 410840 - DNA, 19 bp, Homo sapiens
  siRNA target sequence for FLJ33069 (NM_144649.1,950-968).
ctgtgctcggtttgtcaaa

SEQ ID NO: 410841 - DNA, 19 bp, Homo sapiens
  siRNA target sequence for FLJ33069 (NM_144649.1,952-970).
gtgctcggtttgtcaaaat

SEQ ID NO: 410842 - DNA, 19 bp, Homo sapiens
  siRNA target sequence for FLJ33069 (NM_144649.1,954-972).
gctcggtttgtcaaaattt

SEQ ID NO: 410843 - DNA, 19 bp, Homo sapiens
  siRNA target sequence for FLJ25409 (NM_144652.1,209-227).
gtcagccaggcaatacagt

SEQ ID NO: 410844 - DNA, 19 bp, Homo sapiens
  siRNA target sequence for FLJ25409 (NM_144652.1,342-360).
ccctcaggccacaaaagaa

SEQ ID NO: 410845 - DNA, 19 bp, Homo sapiens
  siRNA target sequence for FLJ25409 (NM_144652.1,379-397).
gaaggcaaacaatcttata

SEQ ID NO: 410846 - DNA, 19 bp, Homo sapiens
  siRNA target sequence for FLJ25409 (NM_144652.1,432-450).
caatggattctacttactt

SEQ ID NO: 410847 - DNA, 19 bp, Homo sapiens
  siRNA target sequence for FLJ25409 (NM_144652.1,564-582).
gttggaactagcaaaattt

SEQ ID NO: 410848 - DNA, 19 bp, Homo sapiens
  siRNA target sequence for FLJ25409 (NM_144652.1,710-728).
gcttctccaaactatttga

SEQ ID NO: 410849 - DNA, 19 bp, Homo sapiens
  siRNA target sequence for FLJ25409 (NM_144652.1,765-783).
gctggttgccctttgcaaa

SEQ ID NO: 410850 - DNA, 19 bp, Homo sapiens
  siRNA target sequence for FLJ25409 (NM_144652.1,849-867).
gtctataaaagcagatgat

SEQ ID NO: 410851 - DNA, 19 bp, Homo sapiens
  siRNA target sequence for FLJ25409 (NM_144652.1,851-869).
ctataaaagcagatgatga

SEQ ID NO: 410852 - DNA, 19 bp, Homo sapiens
  siRNA target sequence for FLJ25409 (NM_144652.1,893-911).
cagcattgagtgtatcaga

SEQ ID NO: 410853 - DNA, 19 bp, Homo sapiens
  siRNA target sequence for FLJ25409 (NM_144652.1,1046-1064).
gcaccttctacctgataga

SEQ ID NO: 410854 - DNA, 19 bp, Homo sapiens
  siRNA target sequence for FLJ25409 (NM_144652.1,1047-1065).
caccttctacctgatagat

SEQ ID NO: 410855 - DNA, 19 bp, Homo sapiens
  siRNA target sequence for FLJ25409 (NM_144652.1,1049-1067).
ccttctacctgatagatgt

SEQ ID NO: 410856 - DNA, 19 bp, Homo sapiens
  siRNA target sequence for FLJ25409 (NM_144652.1,1071-1089).
gcccaagccgattgagata

SEQ ID NO: 410857 - DNA, 19 bp, Homo sapiens
  siRNA target sequence for FLJ25409 (NM_144652.1,1136-1154).
ctactttcactgaatctaa

SEQ ID NO: 410858 - DNA, 19 bp, Homo sapiens
  siRNA target sequence for FLJ25409 (NM_144652.1,1139-1157).
ctttcactgaatctaaaga

SEQ ID NO: 410859 - DNA, 19 bp, Homo sapiens
  siRNA target sequence for FLJ25409 (NM_144652.1,1178-1196).
ctcaactgaagggaactaa

SEQ ID NO: 410860 - DNA, 19 bp, Homo sapiens
  siRNA target sequence for FLJ25409 (NM_144652.1,1190-1208).
gaactaaggatgaagactt

SEQ ID NO: 410861 - DNA, 19 bp, Homo sapiens
  siRNA target sequence for FLJ25409 (NM_144652.1,1193-1211).
ctaaggatgaagactttat

SEQ ID NO: 410862 - DNA, 19 bp, Homo sapiens
  siRNA target sequence for FLJ25409 (NM_144652.1,1213-1231).
cagccgccaccagttacat

SEQ ID NO: 410863 - DNA, 19 bp, Homo sapiens
  siRNA target sequence for FLJ25409 (NM_144652.1,1215-1233).
gccgccaccagttacatca

SEQ ID NO: 410864 - DNA, 19 bp, Homo sapiens
  siRNA target sequence for FLJ25409 (NM_144652.1,1216-1234).
ccgccaccagttacatcat

SEQ ID NO: 410865 - DNA, 19 bp, Homo sapiens
  siRNA target sequence for FLJ25409 (NM_144652.1,1218-1236).
gccaccagttacatcatca

SEQ ID NO: 410866 - DNA, 19 bp, Homo sapiens
  siRNA target sequence for FLJ25409 (NM_144652.1,1246-1264).
ccatcaacacctatttcat

SEQ ID NO: 410867 - DNA, 19 bp, Homo sapiens
  siRNA target sequence for FLJ25409 (NM_144652.1,1253-1271).
cacctatttcattacctaa

SEQ ID NO: 410868 - DNA, 19 bp, Homo sapiens
  siRNA target sequence for FLJ25409 (NM_144652.1,1267-1285).
cctaaaggacccatcactt

SEQ ID NO: 410869 - DNA, 19 bp, Homo sapiens
  siRNA target sequence for FLJ25409 (NM_144652.1,1332-1350).
gaacagcaaggctagttca

SEQ ID NO: 410870 - DNA, 19 bp, Homo sapiens
  siRNA target sequence for FLJ25409 (NM_144652.1,1335-1353).
cagcaaggctagttcaaaa

SEQ ID NO: 410871 - DNA, 19 bp, Homo sapiens
  siRNA target sequence for FLJ25409 (NM_144652.1,1338-1356).
caaggctagttcaaaagga

SEQ ID NO: 410872 - DNA, 19 bp, Homo sapiens
  siRNA target sequence for MGC29761 (NM_144654.1,398-416).
ggaatgttccggaacaata

SEQ ID NO: 410873 - DNA, 19 bp, Homo sapiens
  siRNA target sequence for MGC29761 (NM_144654.1,406-424).
ccggaacaatactctcaat

SEQ ID NO: 410874 - DNA, 19 bp, Homo sapiens
  siRNA target sequence for MGC29761 (NM_144654.1,408-426).
ggaacaatactctcaatgt

SEQ ID NO: 410875 - DNA, 19 bp, Homo sapiens
  siRNA target sequence for MGC29761 (NM_144654.1,409-427).
gaacaatactctcaatgtt

SEQ ID NO: 410876 - DNA, 19 bp, Homo sapiens
  siRNA target sequence for DOCK11 (NM_144658.2,68-86).
gccgaagtgcgcaaattca

SEQ ID NO: 410877 - DNA, 19 bp, Homo sapiens
  siRNA target sequence for DOCK11 (NM_144658.2,243-261).
ccctccgagatctgcttat

SEQ ID NO: 410878 - DNA, 19 bp, Homo sapiens
  siRNA target sequence for DOCK11 (NM_144658.2,245-263).
ctccgagatctgcttatgt

SEQ ID NO: 410879 - DNA, 19 bp, Homo sapiens
  siRNA target sequence for DOCK11 (NM_144658.2,265-283).
cccaatggaagatatatct

SEQ ID NO: 410880 - DNA, 19 bp, Homo sapiens
  siRNA target sequence for DOCK11 (NM_144658.2,319-337).
gtctactgtaccagaagat

SEQ ID NO: 410881 - DNA, 19 bp, Homo sapiens
  siRNA target sequence for DOCK11 (NM_144658.2,346-364).
gagggcccagagtttattt

SEQ ID NO: 410882 - DNA, 19 bp, Homo sapiens
  siRNA target sequence for DOCK11 (NM_144658.2,443-461).
cgaatgttgccatgtaaat

SEQ ID NO: 410883 - DNA, 19 bp, Homo sapiens
  siRNA target sequence for DOCK11 (NM_144658.2,451-469).
gccatgtaaatctttgaga

SEQ ID NO: 410884 - DNA, 19 bp, Homo sapiens
  siRNA target sequence for DOCK11 (NM_144658.2,483-501).
ctaatcatgtatttgagat

SEQ ID NO: 410885 - DNA, 19 bp, Homo sapiens
  siRNA target sequence for DOCK11 (NM_144658.2,526-544).
ggactcatcttctttatgt

SEQ ID NO: 410886 - DNA, 19 bp, Homo sapiens
  siRNA target sequence for DOCK11 (NM_144658.2,572-590).
ggctggttgcataaagcaa

SEQ ID NO: 410887 - DNA, 19 bp, Homo sapiens
  siRNA target sequence for DOCK11 (NM_144658.2,600-618).
gtaccatcacagtaaccat

SEQ ID NO: 410888 - DNA, 19 bp, Homo sapiens
  siRNA target sequence for DOCK11 (NM_144658.2,611-629).
gtaaccatgaaggtattca

SEQ ID NO: 410889 - DNA, 19 bp, Homo sapiens
  siRNA target sequence for DOCK11 (NM_144658.2,656-674).
cttcctgacggttcatata

SEQ ID NO: 410890 - DNA, 19 bp, Homo sapiens
  siRNA target sequence for DOCK11 (NM_144658.2,660-678).
ctgacggttcatatattct

SEQ ID NO: 410891 - DNA, 19 bp, Homo sapiens
  siRNA target sequence for DOCK11 (NM_144658.2,662-680).
gacggttcatatattctca

SEQ ID NO: 410892 - DNA, 19 bp, Homo sapiens
  siRNA target sequence for DOCK11 (NM_144658.2,664-682).
cggttcatatattctcaat

SEQ ID NO: 410893 - DNA, 19 bp, Homo sapiens
  siRNA target sequence for DOCK11 (NM_144658.2,714-732).
cgaaaggttgcatctactt

SEQ ID NO: 410894 - DNA, 19 bp, Homo sapiens
  siRNA target sequence for DOCK11 (NM_144658.2,730-748).
cttggacgcctgcattgat

SEQ ID NO: 410895 - DNA, 19 bp, Homo sapiens
  siRNA target sequence for DOCK11 (NM_144658.2,733-751).
ggacgcctgcattgatgtt

SEQ ID NO: 410896 - DNA, 19 bp, Homo sapiens
  siRNA target sequence for DOCK11 (NM_144658.2,736-754).
cgcctgcattgatgttgtt

SEQ ID NO: 410897 - DNA, 19 bp, Homo sapiens
  siRNA target sequence for DOCK11 (NM_144658.2,769-787).
gcgccgtcatgcttttgaa

SEQ ID NO: 410898 - DNA, 19 bp, Homo sapiens
  siRNA target sequence for DOCK11 (NM_144658.2,771-789).
gccgtcatgcttttgaact

SEQ ID NO: 410899 - DNA, 19 bp, Homo sapiens
  siRNA target sequence for DOCK11 (NM_144658.2,785-803).
gaactcaagatgttagata

SEQ ID NO: 410900 - DNA, 19 bp, Homo sapiens
  siRNA target sequence for DOCK11 (NM_144658.2,788-806).
ctcaagatgttagataaat

SEQ ID NO: 410901 - DNA, 19 bp, Homo sapiens
  siRNA target sequence for DOCK11 (NM_144658.2,844-862).
ggaggaatggttgataact

SEQ ID NO: 410902 - DNA, 19 bp, Homo sapiens
  siRNA target sequence for DOCK11 (NM_144658.2,845-863).
gaggaatggttgataactt

SEQ ID NO: 410903 - DNA, 19 bp, Homo sapiens
  siRNA target sequence for DOCK11 (NM_144658.2,880-898).
gatcaacaccgacagttta

SEQ ID NO: 410904 - DNA, 19 bp, Homo sapiens
  siRNA target sequence for DOCK11 (NM_144658.2,883-901).
caacaccgacagtttagtt

SEQ ID NO: 410905 - DNA, 19 bp, Homo sapiens
  siRNA target sequence for DOCK11 (NM_144658.2,919-937).
ggtagaaacagcacaagat

SEQ ID NO: 410906 - DNA, 19 bp, Homo sapiens
  siRNA target sequence for DOCK11 (NM_144658.2,956-974).
ggaaaagccgagaacatca

SEQ ID NO: 410907 - DNA, 19 bp, Homo sapiens
  siRNA target sequence for DOCK11 (NM_144658.2,970-988).
catcatggcaagtttggaa

SEQ ID NO: 410908 - DNA, 19 bp, Homo sapiens
  siRNA target sequence for DOCK11 (NM_144658.2,993-1011).
gcatgcatccggaactgat

SEQ ID NO: 410909 - DNA, 19 bp, Homo sapiens
  siRNA target sequence for DOCK11 (NM_144658.2,1115-1133).
ggaattgaacctgatataa

SEQ ID NO: 410910 - DNA, 19 bp, Homo sapiens
  siRNA target sequence for DOCK11 (NM_144658.2,1171-1189).
gaattgccatgatttaact

SEQ ID NO: 410911 - DNA, 19 bp, Homo sapiens
  siRNA target sequence for DOCK11 (NM_144658.2,1246-1264).
gcccttttttatcaatctt

SEQ ID NO: 410912 - DNA, 19 bp, Homo sapiens
  siRNA target sequence for DOCK11 (NM_144658.2,1329-1347).
catctgtccgtgaaatgct

SEQ ID NO: 410913 - DNA, 19 bp, Homo sapiens
  siRNA target sequence for DOCK11 (NM_144658.2,1391-1409).
ggctcttcacccgaatctt

SEQ ID NO: 410914 - DNA, 19 bp, Homo sapiens
  siRNA target sequence for DOCK11 (NM_144658.2,1392-1410).
gctcttcacccgaatctta

SEQ ID NO: 410915 - DNA, 19 bp, Homo sapiens
  siRNA target sequence for DOCK11 (NM_144658.2,1398-1416).
cacccgaatcttacattca

SEQ ID NO: 410916 - DNA, 19 bp, Homo sapiens
  siRNA target sequence for DOCK11 (NM_144658.2,1431-1449).
ctcagttacgctacataca

SEQ ID NO: 410917 - DNA, 19 bp, Homo sapiens
  siRNA target sequence for DOCK11 (NM_144658.2,1470-1488).
cgaatccacatcctgaaat

SEQ ID NO: 410918 - DNA, 19 bp, Homo sapiens
  siRNA target sequence for DOCK11 (NM_144658.2,1618-1636).
ccgccttggacaatacaga

SEQ ID NO: 410919 - DNA, 19 bp, Homo sapiens
  siRNA target sequence for DOCK11 (NM_144658.2,1619-1637).
cgccttggacaatacagaa

SEQ ID NO: 410920 - DNA, 19 bp, Homo sapiens
  siRNA target sequence for DOCK11 (NM_144658.2,1650-1668).
gggctgccagacccatttt

SEQ ID NO: 410921 - DNA, 19 bp, Homo sapiens
  siRNA target sequence for DOCK11 (NM_144658.2,1652-1670).
gctgccagacccattttca

SEQ ID NO: 410922 - DNA, 19 bp, Homo sapiens
  siRNA target sequence for DOCK11 (NM_144658.2,1677-1695).
ctcaaggctctcttgatct

SEQ ID NO: 410923 - DNA, 19 bp, Homo sapiens
  siRNA target sequence for DOCK11 (NM_144658.2,1702-1720).
gagattttctcctctgtat

SEQ ID NO: 410924 - DNA, 19 bp, Homo sapiens
  siRNA target sequence for DOCK11 (NM_144658.2,1757-1775).
ctcaagttgctctcagaat

SEQ ID NO: 410925 - DNA, 19 bp, Homo sapiens
  siRNA target sequence for DOCK11 (NM_144658.2,1847-1865).
gtggatttatcaaattgta

SEQ ID NO: 410926 - DNA, 19 bp, Homo sapiens
  siRNA target sequence for DOCK11 (NM_144658.2,1951-1969).
gacaaaatattgttatcca

SEQ ID NO: 410927 - DNA, 19 bp, Homo sapiens
  siRNA target sequence for DOCK11 (NM_144658.2,2004-2022).
ccctgcaattaaaatacga

SEQ ID NO: 410928 - DNA, 19 bp, Homo sapiens
  siRNA target sequence for DOCK11 (NM_144658.2,2005-2023).
cctgcaattaaaatacgat

SEQ ID NO: 410929 - DNA, 19 bp, Homo sapiens
  siRNA target sequence for DOCK11 (NM_144658.2,2006-2024).
ctgcaattaaaatacgata

SEQ ID NO: 410930 - DNA, 19 bp, Homo sapiens
  siRNA target sequence for DOCK11 (NM_144658.2,2020-2038).
cgatagccagaaaacattt

SEQ ID NO: 410931 - DNA, 19 bp, Homo sapiens
  siRNA target sequence for DOCK11 (NM_144658.2,2093-2111).
gacgctagtgccctaaagt

SEQ ID NO: 410932 - DNA, 19 bp, Homo sapiens
  siRNA target sequence for DOCK11 (NM_144658.2,2095-2113).
cgctagtgccctaaagtgt

SEQ ID NO: 410933 - DNA, 19 bp, Homo sapiens
  siRNA target sequence for DOCK11 (NM_144658.2,2096-2114).
gctagtgccctaaagtgta

SEQ ID NO: 410934 - DNA, 19 bp, Homo sapiens
  siRNA target sequence for DOCK11 (NM_144658.2,2097-2115).
ctagtgccctaaagtgtat

SEQ ID NO: 410935 - DNA, 19 bp, Homo sapiens
  siRNA target sequence for DOCK11 (NM_144658.2,2104-2122).
cctaaagtgtatttatgga

SEQ ID NO: 410936 - DNA, 19 bp, Homo sapiens
  siRNA target sequence for DOCK11 (NM_144658.2,2105-2123).
ctaaagtgtatttatggaa

SEQ ID NO: 410937 - DNA, 19 bp, Homo sapiens
  siRNA target sequence for DOCK11 (NM_144658.2,2160-2178).
ctgttgtctcgcatcacaa

SEQ ID NO: 410938 - DNA, 19 bp, Homo sapiens
  siRNA target sequence for DOCK11 (NM_144658.2,2165-2183).
gtctcgcatcacaaccaaa

SEQ ID NO: 410939 - DNA, 19 bp, Homo sapiens
  siRNA target sequence for DOCK11 (NM_144658.2,2167-2185).
ctcgcatcacaaccaaaat

SEQ ID NO: 410940 - DNA, 19 bp, Homo sapiens
  siRNA target sequence for DOCK11 (NM_144658.2,2361-2379).
gtagaatcatcacatttga

SEQ ID NO: 410941 - DNA, 19 bp, Homo sapiens
  siRNA target sequence for DOCK11 (NM_144658.2,2389-2407).
gccagtttccgccaatctt

SEQ ID NO: 410942 - DNA, 19 bp, Homo sapiens
  siRNA target sequence for DOCK11 (NM_144658.2,2405-2423).
cttcccccaggctacttga

SEQ ID NO: 410943 - DNA, 19 bp, Homo sapiens
  siRNA target sequence for DOCK11 (NM_144658.2,2409-2427).
ccccaggctacttgaatct

SEQ ID NO: 410944 - DNA, 19 bp, Homo sapiens
  siRNA target sequence for DOCK11 (NM_144658.2,2412-2430).
caggctacttgaatctgaa

SEQ ID NO: 410945 - DNA, 19 bp, Homo sapiens
  siRNA target sequence for DOCK11 (NM_144658.2,2448-2466).
ggcaatgtaacgtggatat

SEQ ID NO: 410946 - DNA, 19 bp, Homo sapiens
  siRNA target sequence for DOCK11 (NM_144658.2,2449-2467).
gcaatgtaacgtggatatt

SEQ ID NO: 410947 - DNA, 19 bp, Homo sapiens
  siRNA target sequence for DOCK11 (NM_144658.2,2450-2468).
caatgtaacgtggatatta

SEQ ID NO: 410948 - DNA, 19 bp, Homo sapiens
  siRNA target sequence for DOCK11 (NM_144658.2,2481-2499).
gtgcaaagcctttgttgaa

SEQ ID NO: 410949 - DNA, 19 bp, Homo sapiens
  siRNA target sequence for DOCK11 (NM_144658.2,2537-2555).
gatctgcatgtgcacaaat

SEQ ID NO: 410950 - DNA, 19 bp, Homo sapiens
  siRNA target sequence for DOCK11 (NM_144658.2,2540-2558).
ctgcatgtgcacaaattct

SEQ ID NO: 410951 - DNA, 19 bp, Homo sapiens
  siRNA target sequence for DOCK11 (NM_144658.2,2549-2567).
cacaaattcttccatcatt

SEQ ID NO: 410952 - DNA, 19 bp, Homo sapiens
  siRNA target sequence for DOCK11 (NM_144658.2,2581-2599).
gtcaggctcgaaagaagtt

SEQ ID NO: 410953 - DNA, 19 bp, Homo sapiens
  siRNA target sequence for DOCK11 (NM_144658.2,2597-2615).
gttccaggggagctcatta

SEQ ID NO: 410954 - DNA, 19 bp, Homo sapiens
  siRNA target sequence for DOCK11 (NM_144658.2,2600-2618).
ccaggggagctcattaaat

SEQ ID NO: 410955 - DNA, 19 bp, Homo sapiens
  siRNA target sequence for DOCK11 (NM_144658.2,2601-2619).
caggggagctcattaaata

SEQ ID NO: 410956 - DNA, 19 bp, Homo sapiens
  siRNA target sequence for DOCK11 (NM_144658.2,2641-2659).
ggagatccaagtcatgata

SEQ ID NO: 410957 - DNA, 19 bp, Homo sapiens
  siRNA target sequence for DOCK11 (NM_144658.2,2662-2680).
gtttctacctgtaattctt

SEQ ID NO: 410958 - DNA, 19 bp, Homo sapiens
  siRNA target sequence for DOCK11 (NM_144658.2,2693-2711).
cgagttctcacaaatatga

SEQ ID NO: 410959 - DNA, 19 bp, Homo sapiens
  siRNA target sequence for DOCK11 (NM_144658.2,2720-2738).
gatgacgttcctatcaact

SEQ ID NO: 410960 - DNA, 19 bp, Homo sapiens
  siRNA target sequence for DOCK11 (NM_144658.2,2737-2755).
ctgcaccatggttctctta

SEQ ID NO: 410961 - DNA, 19 bp, Homo sapiens
  siRNA target sequence for DOCK11 (NM_144658.2,2740-2758).
caccatggttctcttacat

SEQ ID NO: 410962 - DNA, 19 bp, Homo sapiens
  siRNA target sequence for DOCK11 (NM_144658.2,2743-2761).
catggttctcttacatatt

SEQ ID NO: 410963 - DNA, 19 bp, Homo sapiens
  siRNA target sequence for DOCK11 (NM_144658.2,2746-2764).
ggttctcttacatattgta

SEQ ID NO: 410964 - DNA, 19 bp, Homo sapiens
  siRNA target sequence for DOCK11 (NM_144658.2,2777-2795).
gaagaaggcttggatagtt

SEQ ID NO: 410965 - DNA, 19 bp, Homo sapiens
  siRNA target sequence for DOCK11 (NM_144658.2,2783-2801).
ggcttggatagttatctaa

SEQ ID NO: 410966 - DNA, 19 bp, Homo sapiens
  siRNA target sequence for DOCK11 (NM_144658.2,2785-2803).
cttggatagttatctaaga

SEQ ID NO: 410967 - DNA, 19 bp, Homo sapiens
  siRNA target sequence for DOCK11 (NM_144658.2,2788-2806).
ggatagttatctaagatca

SEQ ID NO: 410968 - DNA, 19 bp, Homo sapiens
  siRNA target sequence for DOCK11 (NM_144658.2,2789-2807).
gatagttatctaagatcat

SEQ ID NO: 410969 - DNA, 19 bp, Homo sapiens
  siRNA target sequence for DOCK11 (NM_144658.2,2793-2811).
gttatctaagatcattcat

SEQ ID NO: 410970 - DNA, 19 bp, Homo sapiens
  siRNA target sequence for DOCK11 (NM_144658.2,2798-2816).
ctaagatcattcataaagt

SEQ ID NO: 410971 - DNA, 19 bp, Homo sapiens
  siRNA target sequence for DOCK11 (NM_144658.2,2805-2823).
cattcataaagtatagctt

SEQ ID NO: 410972 - DNA, 19 bp, Homo sapiens
  siRNA target sequence for DOCK11 (NM_144658.2,2851-2869).
ggcccagctgatacatgaa

SEQ ID NO: 410973 - DNA, 19 bp, Homo sapiens
  siRNA target sequence for DOCK11 (NM_144658.2,2872-2890).
cctggctactacgatgata

SEQ ID NO: 410974 - DNA, 19 bp, Homo sapiens
  siRNA target sequence for DOCK11 (NM_144658.2,2876-2894).
gctactacgatgatagcaa

SEQ ID NO: 410975 - DNA, 19 bp, Homo sapiens
  siRNA target sequence for DOCK11 (NM_144658.2,2877-2895).
ctactacgatgatagcaat

SEQ ID NO: 410976 - DNA, 19 bp, Homo sapiens
  siRNA target sequence for DOCK11 (NM_144658.2,2880-2898).
ctacgatgatagcaatatt

SEQ ID NO: 410977 - DNA, 19 bp, Homo sapiens
  siRNA target sequence for DOCK11 (NM_144658.2,2985-3003).
catacttgttggaagagaa

SEQ ID NO: 410978 - DNA, 19 bp, Homo sapiens
  siRNA target sequence for DOCK11 (NM_144658.2,3028-3046).
gagatttcccgagacatat

SEQ ID NO: 410979 - DNA, 19 bp, Homo sapiens
  siRNA target sequence for DOCK11 (NM_144658.2,3030-3048).
gatttcccgagacatatca

SEQ ID NO: 410980 - DNA, 19 bp, Homo sapiens
  siRNA target sequence for DOCK11 (NM_144658.2,3063-3081).
cactgcttcttgcaataat

SEQ ID NO: 410981 - DNA, 19 bp, Homo sapiens
  siRNA target sequence for DOCK11 (NM_144658.2,3154-3172).
cctgaagcgctgtttgaca

SEQ ID NO: 410982 - DNA, 19 bp, Homo sapiens
  siRNA target sequence for DOCK11 (NM_144658.2,3162-3180).
gctgtttgacactaatgga

SEQ ID NO: 410983 - DNA, 19 bp, Homo sapiens
  siRNA target sequence for DOCK11 (NM_144658.2,3163-3181).
ctgtttgacactaatggat

SEQ ID NO: 410984 - DNA, 19 bp, Homo sapiens
  siRNA target sequence for DOCK11 (NM_144658.2,3173-3191).
ctaatggatagaggattta

SEQ ID NO: 410985 - DNA, 19 bp, Homo sapiens
  siRNA target sequence for DOCK11 (NM_144658.2,3229-3247).
ccccaaagatcctaaggtt

SEQ ID NO: 410986 - DNA, 19 bp, Homo sapiens
  siRNA target sequence for DOCK11 (NM_144658.2,3240-3258).
ctaaggttctggctgaata

SEQ ID NO: 410987 - DNA, 19 bp, Homo sapiens
  siRNA target sequence for DOCK11 (NM_144658.2,3285-3303).
gcaatcacgaacattacat

SEQ ID NO: 410988 - DNA, 19 bp, Homo sapiens
  siRNA target sequence for DOCK11 (NM_144658.2,3341-3359).
ctgcagcgggttcaagatt

SEQ ID NO: 410989 - DNA, 19 bp, Homo sapiens
  siRNA target sequence for DOCK11 (NM_144658.2,3346-3364).
gcgggttcaagattcaaat

SEQ ID NO: 410990 - DNA, 19 bp, Homo sapiens
  siRNA target sequence for DOCK11 (NM_144658.2,3416-3434).
ctacttctgagggaaactt

SEQ ID NO: 410991 - DNA, 19 bp, Homo sapiens
  siRNA target sequence for DOCK11 (NM_144658.2,3451-3469).
caattatgagatcagatat

SEQ ID NO: 410992 - DNA, 19 bp, Homo sapiens
  siRNA target sequence for DOCK11 (NM_144658.2,3471-3489).
cagctatctctgttataaa

SEQ ID NO: 410993 - DNA, 19 bp, Homo sapiens
  siRNA target sequence for DOCK11 (NM_144658.2,3482-3500).
gttataaagaatcttttga

SEQ ID NO: 410994 - DNA, 19 bp, Homo sapiens
  siRNA target sequence for DOCK11 (NM_144658.2,3546-3564).
ccaaaatagcacaattgta

SEQ ID NO: 410995 - DNA, 19 bp, Homo sapiens
  siRNA target sequence for DOCK11 (NM_144658.2,3568-3586).
cccctttgttggactactt

SEQ ID NO: 410996 - DNA, 19 bp, Homo sapiens
  siRNA target sequence for DOCK11 (NM_144658.2,3570-3588).
cctttgttggactactttt

SEQ ID NO: 410997 - DNA, 19 bp, Homo sapiens
  siRNA target sequence for DOCK11 (NM_144658.2,3611-3629).
ggtcgagataccttgtatt

SEQ ID NO: 410998 - DNA, 19 bp, Homo sapiens
  siRNA target sequence for DOCK11 (NM_144658.2,3614-3632).
cgagataccttgtattctt

SEQ ID NO: 410999 - DNA, 19 bp, Homo sapiens
  siRNA target sequence for DOCK11 (NM_144658.2,3724-3742).
caccgcttatgggtctttt

SEQ ID NO: 411000 - DNA, 19 bp, Homo sapiens
  siRNA target sequence for DOCK11 (NM_144658.2,3728-3746).
gcttatgggtcttttcaaa

SEQ ID NO: 411001 - DNA, 19 bp, Homo sapiens
  siRNA target sequence for DOCK11 (NM_144658.2,3880-3898).
ccgcctggatcagtatgaa

SEQ ID NO: 411002 - DNA, 19 bp, Homo sapiens
  siRNA target sequence for DOCK11 (NM_144658.2,3916-3934).
gtgctacctgtatatagta

SEQ ID NO: 411003 - DNA, 19 bp, Homo sapiens
  siRNA target sequence for DOCK11 (NM_144658.2,3958-3976).
cttaacttactggaataaa

SEQ ID NO: 411004 - DNA, 19 bp, Homo sapiens
  siRNA target sequence for DOCK11 (NM_144658.2,3983-4001).
cctcaggagctcataaaca

SEQ ID NO: 411005 - DNA, 19 bp, Homo sapiens
  siRNA target sequence for DOCK11 (NM_144658.2,3984-4002).
ctcaggagctcataaacat

SEQ ID NO: 411006 - DNA, 19 bp, Homo sapiens
  siRNA target sequence for DOCK11 (NM_144658.2,3988-4006).
ggagctcataaacattctt

SEQ ID NO: 411007 - DNA, 19 bp, Homo sapiens
  siRNA target sequence for DOCK11 (NM_144658.2,3991-4009).
gctcataaacattcttata

SEQ ID NO: 411008 - DNA, 19 bp, Homo sapiens
  siRNA target sequence for DOCK11 (NM_144658.2,4023-4041).
gcttgtttcactttagata

SEQ ID NO: 411009 - DNA, 19 bp, Homo sapiens
  siRNA target sequence for DOCK11 (NM_144658.2,4123-4141).
gcctgctcttcgaaacaga

SEQ ID NO: 411010 - DNA, 19 bp, Homo sapiens
  siRNA target sequence for DOCK11 (NM_144658.2,4134-4152).
gaaacagatcaggagtaat

SEQ ID NO: 411011 - DNA, 19 bp, Homo sapiens
  siRNA target sequence for DOCK11 (NM_144658.2,4160-4178).
cggcttcagcatcttagta

SEQ ID NO: 411012 - DNA, 19 bp, Homo sapiens
  siRNA target sequence for DOCK11 (NM_144658.2,4237-4255).
ccaccaggcacttcttgaa

SEQ ID NO: 411013 - DNA, 19 bp, Homo sapiens
  siRNA target sequence for DOCK11 (NM_144658.2,4286-4304).
gtactagacaccatatcat

SEQ ID NO: 411014 - DNA, 19 bp, Homo sapiens
  siRNA target sequence for DOCK11 (NM_144658.2,4289-4307).
ctagacaccatatcatttt

SEQ ID NO: 411015 - DNA, 19 bp, Homo sapiens
  siRNA target sequence for DOCK11 (NM_144658.2,4318-4336).
cttcaagacccaactttta

SEQ ID NO: 411016 - DNA, 19 bp, Homo sapiens
  siRNA target sequence for DOCK11 (NM_144658.2,4415-4433).
gtgtcgctgaaacatgtat

SEQ ID NO: 411017 - DNA, 19 bp, Homo sapiens
  siRNA target sequence for DOCK11 (NM_144658.2,4528-4546).
gtgctgcacatcgaagatt

SEQ ID NO: 411018 - DNA, 19 bp, Homo sapiens
  siRNA target sequence for DOCK11 (NM_144658.2,4572-4590).
cacttttgtatcttttgat

SEQ ID NO: 411019 - DNA, 19 bp, Homo sapiens
  siRNA target sequence for DOCK11 (NM_144658.2,4597-4615).
caactttgagtataccaaa

SEQ ID NO: 411020 - DNA, 19 bp, Homo sapiens
  siRNA target sequence for DOCK11 (NM_144658.2,4624-4642).
ctttttgaggacacatcta

SEQ ID NO: 411021 - DNA, 19 bp, Homo sapiens
  siRNA target sequence for DOCK11 (NM_144658.2,4632-4650).
ggacacatctacagataat

SEQ ID NO: 411022 - DNA, 19 bp, Homo sapiens
  siRNA target sequence for DOCK11 (NM_144658.2,4633-4651).
gacacatctacagataata

SEQ ID NO: 411023 - DNA, 19 bp, Homo sapiens
  siRNA target sequence for DOCK11 (NM_144658.2,4635-4653).
cacatctacagataataat

SEQ ID NO: 411024 - DNA, 19 bp, Homo sapiens
  siRNA target sequence for DOCK11 (NM_144658.2,4689-4707).
gcggaggatcaagatttca

SEQ ID NO: 411025 - DNA, 19 bp, Homo sapiens
  siRNA target sequence for DOCK11 (NM_144658.2,4698-4716).
caagatttcaggagtcttt

SEQ ID NO: 411026 - DNA, 19 bp, Homo sapiens
  siRNA target sequence for DOCK11 (NM_144658.2,4701-4719).
gatttcaggagtctttatt

SEQ ID NO: 411027 - DNA, 19 bp, Homo sapiens
  siRNA target sequence for DOCK11 (NM_144658.2,4706-4724).
caggagtctttattcatta

SEQ ID NO: 411028 - DNA, 19 bp, Homo sapiens
  siRNA target sequence for DOCK11 (NM_144658.2,4768-4786).
ctttcccgcagaagtcaaa

SEQ ID NO: 411029 - DNA, 19 bp, Homo sapiens
  siRNA target sequence for DOCK11 (NM_144658.2,4772-4790).
cccgcagaagtcaaagact

SEQ ID NO: 411030 - DNA, 19 bp, Homo sapiens
  siRNA target sequence for DOCK11 (NM_144658.2,4773-4791).
ccgcagaagtcaaagactt

SEQ ID NO: 411031 - DNA, 19 bp, Homo sapiens
  siRNA target sequence for DOCK11 (NM_144658.2,4798-4816).
gagaatccgcactgttctt

SEQ ID NO: 411032 - DNA, 19 bp, Homo sapiens
  siRNA target sequence for DOCK11 (NM_144658.2,4862-4880).
ctaattgatctccagtata

SEQ ID NO: 411033 - DNA, 19 bp, Homo sapiens
  siRNA target sequence for DOCK11 (NM_144658.2,4936-4954).
catggccaagattcatgta

SEQ ID NO: 411034 - DNA, 19 bp, Homo sapiens
  siRNA target sequence for DOCK11 (NM_144658.2,4993-5011).
ccatgtagcagctctagtt

SEQ ID NO: 411035 - DNA, 19 bp, Homo sapiens
  siRNA target sequence for DOCK11 (NM_144658.2,5048-5066).
ggatgttcagcgttcaaga

SEQ ID NO: 411036 - DNA, 19 bp, Homo sapiens
  siRNA target sequence for DOCK11 (NM_144658.2,5049-5067).
gatgttcagcgttcaagaa

SEQ ID NO: 411037 - DNA, 19 bp, Homo sapiens
  siRNA target sequence for DOCK11 (NM_144658.2,5052-5070).
gttcagcgttcaagaaaat

SEQ ID NO: 411038 - DNA, 19 bp, Homo sapiens
  siRNA target sequence for DOCK11 (NM_144658.2,5073-5091).
ctcccaatatagatgaaga

SEQ ID NO: 411039 - DNA, 19 bp, Homo sapiens
  siRNA target sequence for DOCK11 (NM_144658.2,5115-5133).
ggatgatggatgtccatta

SEQ ID NO: 411040 - DNA, 19 bp, Homo sapiens
  siRNA target sequence for DOCK11 (NM_144658.2,5122-5140).
ggatgtccattatagtgaa

SEQ ID NO: 411041 - DNA, 19 bp, Homo sapiens
  siRNA target sequence for DOCK11 (NM_144658.2,5150-5168).
ctggagttgctagaacaat

SEQ ID NO: 411042 - DNA, 19 bp, Homo sapiens
  siRNA target sequence for DOCK11 (NM_144658.2,5184-5202).
ggaaggcagaacgttatga

SEQ ID NO: 411043 - DNA, 19 bp, Homo sapiens
  siRNA target sequence for DOCK11 (NM_144658.2,5188-5206).
ggcagaacgttatgaaata

SEQ ID NO: 411044 - DNA, 19 bp, Homo sapiens
  siRNA target sequence for DOCK11 (NM_144658.2,5211-5229).
ctgagatttccaagttgat

SEQ ID NO: 411045 - DNA, 19 bp, Homo sapiens
  siRNA target sequence for DOCK11 (NM_144658.2,5220-5238).
ccaagttgatcgttccaat

SEQ ID NO: 411046 - DNA, 19 bp, Homo sapiens
  siRNA target sequence for DOCK11 (NM_144658.2,5221-5239).
caagttgatcgttccaatt

SEQ ID NO: 411047 - DNA, 19 bp, Homo sapiens
  siRNA target sequence for DOCK11 (NM_144658.2,5250-5268).
gtcgtgagtttgagaaact

SEQ ID NO: 411048 - DNA, 19 bp, Homo sapiens
  siRNA target sequence for DOCK11 (NM_144658.2,5252-5270).
cgtgagtttgagaaactta

SEQ ID NO: 411049 - DNA, 19 bp, Homo sapiens
  siRNA target sequence for DOCK11 (NM_144658.2,5267-5285).
cttactcaagtttatagaa

SEQ ID NO: 411050 - DNA, 19 bp, Homo sapiens
  siRNA target sequence for DOCK11 (NM_144658.2,5295-5313).
gagcttacacaaaaattct

SEQ ID NO: 411051 - DNA, 19 bp, Homo sapiens
  siRNA target sequence for DOCK11 (NM_144658.2,5312-5330).
ctggaagttatgcatacaa

SEQ ID NO: 411052 - DNA, 19 bp, Homo sapiens
  siRNA target sequence for DOCK11 (NM_144658.2,5373-5391).
gccaatctttttttgaaga

SEQ ID NO: 411053 - DNA, 19 bp, Homo sapiens
  siRNA target sequence for DOCK11 (NM_144658.2,5404-5422).
ggagtacatctataaagaa

SEQ ID NO: 411054 - DNA, 19 bp, Homo sapiens
  siRNA target sequence for DOCK11 (NM_144658.2,5451-5469).
ccttgagacttgttaaact

SEQ ID NO: 411055 - DNA, 19 bp, Homo sapiens
  siRNA target sequence for DOCK11 (NM_144658.2,5556-5574).
ctcatatacaagttactta

SEQ ID NO: 411056 - DNA, 19 bp, Homo sapiens
  siRNA target sequence for DOCK11 (NM_144658.2,5614-5632).
gaagaccgagtttgaaaga

SEQ ID NO: 411057 - DNA, 19 bp, Homo sapiens
  siRNA target sequence for DOCK11 (NM_144658.2,5619-5637).
ccgagtttgaaagaaatca

SEQ ID NO: 411058 - DNA, 19 bp, Homo sapiens
  siRNA target sequence for DOCK11 (NM_144658.2,5660-5678).
gaggccccttacactttat

SEQ ID NO: 411059 - DNA, 19 bp, Homo sapiens
  siRNA target sequence for DOCK11 (NM_144658.2,5662-5680).
ggccccttacactttatca

SEQ ID NO: 411060 - DNA, 19 bp, Homo sapiens
  siRNA target sequence for DOCK11 (NM_144658.2,5683-5701).
caaaaaacagggctgtata

SEQ ID NO: 411061 - DNA, 19 bp, Homo sapiens
  siRNA target sequence for DOCK11 (NM_144658.2,5712-5730).
gcaaacgccgtacaatctt

SEQ ID NO: 411062 - DNA, 19 bp, Homo sapiens
  siRNA target sequence for DOCK11 (NM_144658.2,5717-5735).
cgccgtacaatcttgacaa

SEQ ID NO: 411063 - DNA, 19 bp, Homo sapiens
  siRNA target sequence for DOCK11 (NM_144658.2,5720-5738).
cgtacaatcttgacaactt

SEQ ID NO: 411064 - DNA, 19 bp, Homo sapiens
  siRNA target sequence for DOCK11 (NM_144658.2,5736-5754).
cttcaaactcgtttcctta

SEQ ID NO: 411065 - DNA, 19 bp, Homo sapiens
  siRNA target sequence for DOCK11 (NM_144658.2,5764-5782).
gaggattcctattaactgt

SEQ ID NO: 411066 - DNA, 19 bp, Homo sapiens
  siRNA target sequence for DOCK11 (NM_144658.2,5781-5799).
gtgaacagcagattaattt

SEQ ID NO: 411067 - DNA, 19 bp, Homo sapiens
  siRNA target sequence for DOCK11 (NM_144658.2,5868-5886).
ctactgacgtggacatgat

SEQ ID NO: 411068 - DNA, 19 bp, Homo sapiens
  siRNA target sequence for DOCK11 (NM_144658.2,5871-5889).
ctgacgtggacatgattca

SEQ ID NO: 411069 - DNA, 19 bp, Homo sapiens
  siRNA target sequence for DOCK11 (NM_144658.2,5884-5902).
gattcagctccaacttaaa

SEQ ID NO: 411070 - DNA, 19 bp, Homo sapiens
  siRNA target sequence for DOCK11 (NM_144658.2,5936-5954).
ggtccattagcatatgcaa

SEQ ID NO: 411071 - DNA, 19 bp, Homo sapiens
  siRNA target sequence for DOCK11 (NM_144658.2,5971-5989).
cagccaagctagcaagtat

SEQ ID NO: 411072 - DNA, 19 bp, Homo sapiens
  siRNA target sequence for DOCK11 (NM_144658.2,5982-6000).
gcaagtatccacctaagaa

SEQ ID NO: 411073 - DNA, 19 bp, Homo sapiens
  siRNA target sequence for DOCK11 (NM_144658.2,5983-6001).
caagtatccacctaagaaa

SEQ ID NO: 411074 - DNA, 19 bp, Homo sapiens
  siRNA target sequence for DOCK11 (NM_144658.2,6008-6026).
gagttgaaagacatgttta

SEQ ID NO: 411075 - DNA, 19 bp, Homo sapiens
  siRNA target sequence for DOCK11 (NM_144658.2,6048-6066).
gcattgcacttgaactaaa

SEQ ID NO: 411076 - DNA, 19 bp, Homo sapiens
  siRNA target sequence for DOCK11 (NM_144658.2,6062-6080).
ctaaatgagcggctaatta

SEQ ID NO: 411077 - DNA, 19 bp, Homo sapiens
  siRNA target sequence for DOCK11 (NM_144658.2,6073-6091).
gctaattaaagaagatcaa

SEQ ID NO: 411078 - DNA, 19 bp, Homo sapiens
  siRNA target sequence for DOCK11 (NM_144658.2,6101-6119).
catgaagggctaaagtcaa

SEQ ID NO: 411079 - DNA, 19 bp, Homo sapiens
  siRNA target sequence for DOCK11 (NM_144658.2,6199-6217).
gatgagcaacacattacat

SEQ ID NO: 411080 - DNA, 19 bp, Homo sapiens
  siRNA target sequence for DOCK11 (NM_144658.2,6255-6273).
gttatggttccccaagata

SEQ ID NO: 411081 - DNA, 19 bp, Homo sapiens
  siRNA target sequence for SAMD8 (NM_144660.1,198-216).
ccgacttgatggaatcaca

SEQ ID NO: 411082 - DNA, 19 bp, Homo sapiens
  siRNA target sequence for SAMD8 (NM_144660.1,199-217).
cgacttgatggaatcacat

SEQ ID NO: 411083 - DNA, 19 bp, Homo sapiens
  siRNA target sequence for SAMD8 (NM_144660.1,205-223).
gatggaatcacattgctaa

SEQ ID NO: 411084 - DNA, 19 bp, Homo sapiens
  siRNA target sequence for SAMD8 (NM_144660.1,208-226).
ggaatcacattgctaacat

SEQ ID NO: 411085 - DNA, 19 bp, Homo sapiens
  siRNA target sequence for SAMD8 (NM_144660.1,209-227).
gaatcacattgctaacatt

SEQ ID NO: 411086 - DNA, 19 bp, Homo sapiens
  siRNA target sequence for SAMD8 (NM_144660.1,213-231).
cacattgctaacattgact

SEQ ID NO: 411087 - DNA, 19 bp, Homo sapiens
  siRNA target sequence for SAMD8 (NM_144660.1,371-389).
gttccatgacccctttcat

SEQ ID NO: 411088 - DNA, 19 bp, Homo sapiens
  siRNA target sequence for SAMD8 (NM_144660.1,441-459).
ctgtgacggacccataact

SEQ ID NO: 411089 - DNA, 19 bp, Homo sapiens
  siRNA target sequence for SAMD8 (NM_144660.1,443-461).
gtgacggacccataactga

SEQ ID NO: 411090 - DNA, 19 bp, Homo sapiens
  siRNA target sequence for SAMD8 (NM_144660.1,449-467).
gacccataactgacttgaa

SEQ ID NO: 411091 - DNA, 19 bp, Homo sapiens
  siRNA target sequence for SAMD8 (NM_144660.1,453-471).
cataactgacttgaattct

SEQ ID NO: 411092 - DNA, 19 bp, Homo sapiens
  siRNA target sequence for SAMD8 (NM_144660.1,470-488).
ctgatcagtaccagtacat

SEQ ID NO: 411093 - DNA, 19 bp, Homo sapiens
  siRNA target sequence for SAMD8 (NM_144660.1,515-533).
gaagattggacccagaata

SEQ ID NO: 411094 - DNA, 19 bp, Homo sapiens
  siRNA target sequence for SAMD8 (NM_144660.1,527-545).
cagaatactggaagactat

SEQ ID NO: 411095 - DNA, 19 bp, Homo sapiens
  siRNA target sequence for SAMD8 (NM_144660.1,562-580).
gtttttatagtatttggat

SEQ ID NO: 411096 - DNA, 19 bp, Homo sapiens
  siRNA target sequence for SAMD8 (NM_144660.1,571-589).
gtatttggatttacatctt

SEQ ID NO: 411097 - DNA, 19 bp, Homo sapiens
  siRNA target sequence for SAMD8 (NM_144660.1,646-664).
ccagatatattcttagaca

SEQ ID NO: 411098 - DNA, 19 bp, Homo sapiens
  siRNA target sequence for SAMD8 (NM_144660.1,709-727).
ggcatgattctgtgctata

SEQ ID NO: 411099 - DNA, 19 bp, Homo sapiens
  siRNA target sequence for SAMD8 (NM_144660.1,710-728).
gcatgattctgtgctatat

SEQ ID NO: 411100 - DNA, 19 bp, Homo sapiens
  siRNA target sequence for SAMD8 (NM_144660.1,864-882).
gcagtgtactggaaagata

SEQ ID NO: 411101 - DNA, 19 bp, Homo sapiens
  siRNA target sequence for SAMD8 (NM_144660.1,867-885).
gtgtactggaaagatatat

SEQ ID NO: 411102 - DNA, 19 bp, Homo sapiens
  siRNA target sequence for SAMD8 (NM_144660.1,886-904).
ggcagtgtatgggagaaat

SEQ ID NO: 411103 - DNA, 19 bp, Homo sapiens
  siRNA target sequence for SAMD8 (NM_144660.1,887-905).
gcagtgtatgggagaaatt

SEQ ID NO: 411104 - DNA, 19 bp, Homo sapiens
  siRNA target sequence for SAMD8 (NM_144660.1,888-906).
cagtgtatgggagaaatta

SEQ ID NO: 411105 - DNA, 19 bp, Homo sapiens
  siRNA target sequence for SAMD8 (NM_144660.1,910-928).
cgagcctttgccatttgga

SEQ ID NO: 411106 - DNA, 19 bp, Homo sapiens
  siRNA target sequence for SAMD8 (NM_144660.1,962-980).
catgtggagattacatgtt

SEQ ID NO: 411107 - DNA, 19 bp, Homo sapiens
  siRNA target sequence for SAMD8 (NM_144660.1,988-1006).
cacacagtcgtcctaacta

SEQ ID NO: 411108 - DNA, 19 bp, Homo sapiens
  siRNA target sequence for SAMD8 (NM_144660.1,1000-1018).
ctaactatgctgaatttct

SEQ ID NO: 411109 - DNA, 19 bp, Homo sapiens
  siRNA target sequence for SAMD8 (NM_144660.1,1023-1041).
caccgaatgtaagtatctt

SEQ ID NO: 411110 - DNA, 19 bp, Homo sapiens
  siRNA target sequence for SAMD8 (NM_144660.1,1025-1043).
ccgaatgtaagtatctttt

SEQ ID NO: 411111 - DNA, 19 bp, Homo sapiens
  siRNA target sequence for MGC33547 (NM_144661.2,192-210).
cacagcgctataaagaaca

SEQ ID NO: 411112 - DNA, 19 bp, Homo sapiens
  siRNA target sequence for MGC33547 (NM_144661.2,206-224).
gaacagctgcgggaattgt

SEQ ID NO: 411113 - DNA, 19 bp, Homo sapiens
  siRNA target sequence for MGC33547 (NM_144661.2,238-256).
cactgccccgaaactgaaa

SEQ ID NO: 411114 - DNA, 19 bp, Homo sapiens
  siRNA target sequence for MGC33547 (NM_144661.2,326-344).
ctggaatgcaaatatgtaa

SEQ ID NO: 411115 - DNA, 19 bp, Homo sapiens
  siRNA target sequence for NOV1 (NM_144663.1,130-148).
ctgaagccaagggaaacat

SEQ ID NO: 411116 - DNA, 19 bp, Homo sapiens
  siRNA target sequence for NOV1 (NM_144663.1,136-154).
ccaagggaaacatccaaaa

SEQ ID NO: 411117 - DNA, 19 bp, Homo sapiens
  siRNA target sequence for NOV1 (NM_144663.1,149-167).
ccaaaaatatccttataaa

SEQ ID NO: 411118 - DNA, 19 bp, Homo sapiens
  siRNA target sequence for NOV1 (NM_144663.1,171-189).
ctacagagcctttaactta

SEQ ID NO: 411119 - DNA, 19 bp, Homo sapiens
  siRNA target sequence for NOV1 (NM_144663.1,176-194).
gagcctttaacttagataa

SEQ ID NO: 411120 - DNA, 19 bp, Homo sapiens
  siRNA target sequence for NOV1 (NM_144663.1,180-198).
ctttaacttagataaggat

SEQ ID NO: 411121 - DNA, 19 bp, Homo sapiens
  siRNA target sequence for NOV1 (NM_144663.1,242-260).
gtgtggtgatgggtgataa

SEQ ID NO: 411122 - DNA, 19 bp, Homo sapiens
  siRNA target sequence for NOV1 (NM_144663.1,371-389).
ctgtgggagcaatgaaaca

SEQ ID NO: 411123 - DNA, 19 bp, Homo sapiens
  siRNA target sequence for NOV1 (NM_144663.1,401-419).
gtgacttaatggatcttat

SEQ ID NO: 411124 - DNA, 19 bp, Homo sapiens
  siRNA target sequence for NOV1 (NM_144663.1,415-433).
cttatcacgctttctttct

SEQ ID NO: 411125 - DNA, 19 bp, Homo sapiens
  siRNA target sequence for NOV1 (NM_144663.1,434-452).
ggttagcaggtcagtgtat

SEQ ID NO: 411126 - DNA, 19 bp, Homo sapiens
  siRNA target sequence for NOV1 (NM_144663.1,503-521).
gtgactgggccattgaatt

SEQ ID NO: 411127 - DNA, 19 bp, Homo sapiens
  siRNA target sequence for NOV1 (NM_144663.1,517-535).
gaattggaccgcactgatt

SEQ ID NO: 411128 - DNA, 19 bp, Homo sapiens
  siRNA target sequence for NOV1 (NM_144663.1,523-541).
gaccgcactgattacaaaa

SEQ ID NO: 411129 - DNA, 19 bp, Homo sapiens
  siRNA target sequence for NOV1 (NM_144663.1,525-543).
ccgcactgattacaaaaca

SEQ ID NO: 411130 - DNA, 19 bp, Homo sapiens
  siRNA target sequence for NOV1 (NM_144663.1,527-545).
gcactgattacaaaacact

SEQ ID NO: 411131 - DNA, 19 bp, Homo sapiens
  siRNA target sequence for NOV1 (NM_144663.1,537-555).
caaaacacttccatcagaa

SEQ ID NO: 411132 - DNA, 19 bp, Homo sapiens
  siRNA target sequence for NOV1 (NM_144663.1,544-562).
cttccatcagaatattcca

SEQ ID NO: 411133 - DNA, 19 bp, Homo sapiens
  siRNA target sequence for NOV1 (NM_144663.1,597-615).
ctgtatggatcgtgttcta

SEQ ID NO: 411134 - DNA, 19 bp, Homo sapiens
  siRNA target sequence for NOV1 (NM_144663.1,599-617).
gtatggatcgtgttctact

SEQ ID NO: 411135 - DNA, 19 bp, Homo sapiens
  siRNA target sequence for MGC33371 (NM_144664.2,347-365).
gtacccagcgttatccttt

SEQ ID NO: 411136 - DNA, 19 bp, Homo sapiens
  siRNA target sequence for MGC33371 (NM_144664.2,408-426).
gattgcacatcctattgta

SEQ ID NO: 411137 - DNA, 19 bp, Homo sapiens
  siRNA target sequence for MGC33371 (NM_144664.2,441-459).
cagatcagaatttcaacaa

SEQ ID NO: 411138 - DNA, 19 bp, Homo sapiens
  siRNA target sequence for MGC33371 (NM_144664.2,457-475).
caagagagcaaaactaaca

SEQ ID NO: 411139 - DNA, 19 bp, Homo sapiens
  siRNA target sequence for MGC33371 (NM_144664.2,482-500).
gtaagaagtgtgctcaaaa

SEQ ID NO: 411140 - DNA, 19 bp, Homo sapiens
  siRNA target sequence for MGC33371 (NM_144664.2,676-694).
gttgatggaaagttattat

SEQ ID NO: 411141 - DNA, 19 bp, Homo sapiens
  siRNA target sequence for MGC33371 (NM_144664.2,698-716).
ggctctgtactttatcgta

SEQ ID NO: 411142 - DNA, 19 bp, Homo sapiens
  siRNA target sequence for MGC33371 (NM_144664.2,707-725).
ctttatcgtacaaaagagt

SEQ ID NO: 411143 - DNA, 19 bp, Homo sapiens
  siRNA target sequence for MGC33371 (NM_144664.2,759-777).
gggatcttcacattcaaat

SEQ ID NO: 411144 - DNA, 19 bp, Homo sapiens
  siRNA target sequence for MGC33371 (NM_144664.2,760-778).
ggatcttcacattcaaatt

SEQ ID NO: 411145 - DNA, 19 bp, Homo sapiens
  siRNA target sequence for MGC33371 (NM_144664.2,810-828).
gcatcatccaaaacatcat

SEQ ID NO: 411146 - DNA, 19 bp, Homo sapiens
  siRNA target sequence for MGC33371 (NM_144664.2,858-876).
cagcagtagccatcacaaa

SEQ ID NO: 411147 - DNA, 19 bp, Homo sapiens
  siRNA target sequence for MGC33371 (NM_144664.2,860-878).
gcagtagccatcacaaaat

SEQ ID NO: 411148 - DNA, 19 bp, Homo sapiens
  siRNA target sequence for MGC33371 (NM_144664.2,873-891).
caaaatcagcaatctaagt

SEQ ID NO: 411149 - DNA, 19 bp, Homo sapiens
  siRNA target sequence for MGC33371 (NM_144664.2,932-950).
cctctgcaacaattcagaa

SEQ ID NO: 411150 - DNA, 19 bp, Homo sapiens
  siRNA target sequence for FLJ32894 (NM_144667.1,253-271).
cggagcctccactttgact

SEQ ID NO: 411151 - DNA, 19 bp, Homo sapiens
  siRNA target sequence for MGC33630 (NM_144668.2,212-230).
gaggaacctaatccaaatt

SEQ ID NO: 411152 - DNA, 19 bp, Homo sapiens
  siRNA target sequence for MGC33630 (NM_144668.2,214-232).
ggaacctaatccaaattat

SEQ ID NO: 411153 - DNA, 19 bp, Homo sapiens
  siRNA target sequence for MGC33630 (NM_144668.2,245-263).
gatccacaacaggaatcaa

SEQ ID NO: 411154 - DNA, 19 bp, Homo sapiens
  siRNA target sequence for MGC33630 (NM_144668.2,481-499).
ccgtttggagacacagatt

SEQ ID NO: 411155 - DNA, 19 bp, Homo sapiens
  siRNA target sequence for MGC33630 (NM_144668.2,548-566).
ggtagcaagtcaaagcttt

SEQ ID NO: 411156 - DNA, 19 bp, Homo sapiens
  siRNA target sequence for MGC33630 (NM_144668.2,553-571).
caagtcaaagctttcctta

SEQ ID NO: 411157 - DNA, 19 bp, Homo sapiens
  siRNA target sequence for MGC33630 (NM_144668.2,556-574).
gtcaaagctttccttacaa

SEQ ID NO: 411158 - DNA, 19 bp, Homo sapiens
  siRNA target sequence for MGC33630 (NM_144668.2,613-631).
gagcacacaaattgaattt

SEQ ID NO: 411159 - DNA, 19 bp, Homo sapiens
  siRNA target sequence for MGC33630 (NM_144668.2,656-674).
gaggaacaacagattagtt

SEQ ID NO: 411160 - DNA, 19 bp, Homo sapiens
  siRNA target sequence for MGC33630 (NM_144668.2,720-738).
ggatgccccaagatgaact

SEQ ID NO: 411161 - DNA, 19 bp, Homo sapiens
  siRNA target sequence for MGC33630 (NM_144668.2,992-1010).
gctcacactgcgatcatct

SEQ ID NO: 411162 - DNA, 19 bp, Homo sapiens
  siRNA target sequence for MGC33630 (NM_144668.2,993-1011).
ctcacactgcgatcatcta

SEQ ID NO: 411163 - DNA, 19 bp, Homo sapiens
  siRNA target sequence for MGC33630 (NM_144668.2,995-1013).
cacactgcgatcatctaca

SEQ ID NO: 411164 - DNA, 19 bp, Homo sapiens
  siRNA target sequence for MGC33630 (NM_144668.2,1043-1061).
cagggccacgccaatatta

SEQ ID NO: 411165 - DNA, 19 bp, Homo sapiens
  siRNA target sequence for MGC33630 (NM_144668.2,1046-1064).
ggccacgccaatattatct

SEQ ID NO: 411166 - DNA, 19 bp, Homo sapiens
  siRNA target sequence for MGC33630 (NM_144668.2,1118-1136).
ccagactgcctggtgatta

SEQ ID NO: 411167 - DNA, 19 bp, Homo sapiens
  siRNA target sequence for MGC33630 (NM_144668.2,1119-1137).
cagactgcctggtgattat

SEQ ID NO: 411168 - DNA, 19 bp, Homo sapiens
  siRNA target sequence for MGC33630 (NM_144668.2,1121-1139).
gactgcctggtgattatat

SEQ ID NO: 411169 - DNA, 19 bp, Homo sapiens
  siRNA target sequence for MGC33630 (NM_144668.2,1155-1173).
gtattcctgtgcacacaat

SEQ ID NO: 411170 - DNA, 19 bp, Homo sapiens
  siRNA target sequence for MGC33630 (NM_144668.2,1161-1179).
ctgtgcacacaatatttga

SEQ ID NO: 411171 - DNA, 19 bp, Homo sapiens
  siRNA target sequence for MGC33630 (NM_144668.2,1163-1181).
gtgcacacaatatttgaca

SEQ ID NO: 411172 - DNA, 19 bp, Homo sapiens
  siRNA target sequence for MGC33630 (NM_144668.2,1219-1237).
gacccacgacgccaagtat

SEQ ID NO: 411173 - DNA, 19 bp, Homo sapiens
  siRNA target sequence for MGC33630 (NM_144668.2,1221-1239).
cccacgacgccaagtatct

SEQ ID NO: 411174 - DNA, 19 bp, Homo sapiens
  siRNA target sequence for MGC33630 (NM_144668.2,1346-1364).
cagaactacgttactttta

SEQ ID NO: 411175 - DNA, 19 bp, Homo sapiens
  siRNA target sequence for MGC33630 (NM_144668.2,1359-1377).
cttttaacccaacaaataa

SEQ ID NO: 411176 - DNA, 19 bp, Homo sapiens
  siRNA target sequence for MGC33630 (NM_144668.2,1382-1400).
gaattggtgagcaatagta

SEQ ID NO: 411177 - DNA, 19 bp, Homo sapiens
  siRNA target sequence for MGC33630 (NM_144668.2,1387-1405).
ggtgagcaatagtaaaaca

SEQ ID NO: 411178 - DNA, 19 bp, Homo sapiens
  siRNA target sequence for MGC33630 (NM_144668.2,1398-1416).
gtaaaacacgggcaatata

SEQ ID NO: 411179 - DNA, 19 bp, Homo sapiens
  siRNA target sequence for MGC33630 (NM_144668.2,1501-1519).
gtttagccagtccatcttt

SEQ ID NO: 411180 - DNA, 19 bp, Homo sapiens
  siRNA target sequence for MGC33630 (NM_144668.2,1520-1538).
cacttgaatttaacacaaa

SEQ ID NO: 411181 - DNA, 19 bp, Homo sapiens
  siRNA target sequence for MGC33630 (NM_144668.2,1623-1641).
cctatatcaagccttgtaa

SEQ ID NO: 411182 - DNA, 19 bp, Homo sapiens
  siRNA target sequence for MGC33630 (NM_144668.2,1624-1642).
ctatatcaagccttgtaaa

SEQ ID NO: 411183 - DNA, 19 bp, Homo sapiens
  siRNA target sequence for MGC33630 (NM_144668.2,1630-1648).
caagccttgtaaattggtt

SEQ ID NO: 411184 - DNA, 19 bp, Homo sapiens
  siRNA target sequence for MGC33630 (NM_144668.2,1634-1652).
ccttgtaaattggttcatt

SEQ ID NO: 411185 - DNA, 19 bp, Homo sapiens
  siRNA target sequence for MGC33630 (NM_144668.2,1661-1679).
gagggtatcacggtactta

SEQ ID NO: 411186 - DNA, 19 bp, Homo sapiens
  siRNA target sequence for MGC33630 (NM_144668.2,1669-1687).
cacggtacttaccacaatt

SEQ ID NO: 411187 - DNA, 19 bp, Homo sapiens
  siRNA target sequence for MGC33630 (NM_144668.2,1671-1689).
cggtacttaccacaattga

SEQ ID NO: 411188 - DNA, 19 bp, Homo sapiens
  siRNA target sequence for MGC33630 (NM_144668.2,1672-1690).
ggtacttaccacaattgat

SEQ ID NO: 411189 - DNA, 19 bp, Homo sapiens
  siRNA target sequence for MGC33630 (NM_144668.2,1673-1691).
gtacttaccacaattgata

SEQ ID NO: 411190 - DNA, 19 bp, Homo sapiens
  siRNA target sequence for MGC33630 (NM_144668.2,1681-1699).
cacaattgatagctacatt

SEQ ID NO: 411191 - DNA, 19 bp, Homo sapiens
  siRNA target sequence for MGC33630 (NM_144668.2,1717-1735).
ggggaacattaagttctat

SEQ ID NO: 411192 - DNA, 19 bp, Homo sapiens
  siRNA target sequence for MGC33630 (NM_144668.2,1739-1757).
cacaccctgtctattgtta

SEQ ID NO: 411193 - DNA, 19 bp, Homo sapiens
  siRNA target sequence for MGC33630 (NM_144668.2,1817-1835).
gcaactcctcctactgaaa

SEQ ID NO: 411194 - DNA, 19 bp, Homo sapiens
  siRNA target sequence for MGC33630 (NM_144668.2,1916-1934).
gcggtgtaccacttaacaa

SEQ ID NO: 411195 - DNA, 19 bp, Homo sapiens
  siRNA target sequence for MGC33630 (NM_144668.2,1918-1936).
ggtgtaccacttaacaaca

SEQ ID NO: 411196 - DNA, 19 bp, Homo sapiens
  siRNA target sequence for MGC33630 (NM_144668.2,1921-1939).
gtaccacttaacaacagat

SEQ ID NO: 411197 - DNA, 19 bp, Homo sapiens
  siRNA target sequence for MGC33630 (NM_144668.2,1935-1953).
cagatgggaccaaacttga

SEQ ID NO: 411198 - DNA, 19 bp, Homo sapiens
  siRNA target sequence for MGC33630 (NM_144668.2,1941-1959).
ggaccaaacttgagaagtt

SEQ ID NO: 411199 - DNA, 19 bp, Homo sapiens
  siRNA target sequence for MGC33630 (NM_144668.2,1969-1987).
gcccaaggatgccatttgt

SEQ ID NO: 411200 - DNA, 19 bp, Homo sapiens
  siRNA target sequence for MGC33630 (NM_144668.2,2169-2187).
ggacagtttacattcttga

SEQ ID NO: 411201 - DNA, 19 bp, Homo sapiens
  siRNA target sequence for MGC33630 (NM_144668.2,2241-2259).
gtgtgactcatataagctt

SEQ ID NO: 411202 - DNA, 19 bp, Homo sapiens
  siRNA target sequence for MGC33630 (NM_144668.2,2320-2338).
gctggtggtcagaaatgga

SEQ ID NO: 411203 - DNA, 19 bp, Homo sapiens
  siRNA target sequence for MGC33630 (NM_144668.2,2345-2363).
gtctgggagtacttagcaa

SEQ ID NO: 411204 - DNA, 19 bp, Homo sapiens
  siRNA target sequence for MGC33630 (NM_144668.2,2350-2368).
ggagtacttagcaagactt

SEQ ID NO: 411205 - DNA, 19 bp, Homo sapiens
  siRNA target sequence for MGC33630 (NM_144668.2,2369-2387).
cgctctcatcgcaaaagca

SEQ ID NO: 411206 - DNA, 19 bp, Homo sapiens
  siRNA target sequence for MGC33630 (NM_144668.2,2370-2388).
gctctcatcgcaaaagcat

SEQ ID NO: 411207 - DNA, 19 bp, Homo sapiens
  siRNA target sequence for MGC33630 (NM_144668.2,2375-2393).
catcgcaaaagcattcgaa

SEQ ID NO: 411208 - DNA, 19 bp, Homo sapiens
  siRNA target sequence for MGC33630 (NM_144668.2,2448-2466).
ggacagacaggctcttgat

SEQ ID NO: 411209 - DNA, 19 bp, Homo sapiens
  siRNA target sequence for MGC33630 (NM_144668.2,2458-2476).
gctcttgatagagtatgat

SEQ ID NO: 411210 - DNA, 19 bp, Homo sapiens
  siRNA target sequence for MGC33630 (NM_144668.2,2461-2479).
cttgatagagtatgatctt

SEQ ID NO: 411211 - DNA, 19 bp, Homo sapiens
  siRNA target sequence for MGC33630 (NM_144668.2,2582-2600).
ctcttcctgcttatttgca

SEQ ID NO: 411212 - DNA, 19 bp, Homo sapiens
  siRNA target sequence for MGC33630 (NM_144668.2,2598-2616).
gcaacagtggctacaaagt

SEQ ID NO: 411213 - DNA, 19 bp, Homo sapiens
  siRNA target sequence for MGC33630 (NM_144668.2,2656-2674).
gcttctggggccagcttat

SEQ ID NO: 411214 - DNA, 19 bp, Homo sapiens
  siRNA target sequence for MGC33630 (NM_144668.2,2670-2688).
cttatggttcccctattga

SEQ ID NO: 411215 - DNA, 19 bp, Homo sapiens
  siRNA target sequence for MGC33630 (NM_144668.2,2735-2753).
cgctacttggtgtttatta

SEQ ID NO: 411216 - DNA, 19 bp, Homo sapiens
  siRNA target sequence for MGC33630 (NM_144668.2,2736-2754).
gctacttggtgtttattaa

SEQ ID NO: 411217 - DNA, 19 bp, Homo sapiens
  siRNA target sequence for MGC33630 (NM_144668.2,2789-2807).
gacggcaatccacataaga

SEQ ID NO: 411218 - DNA, 19 bp, Homo sapiens
  siRNA target sequence for MGC33630 (NM_144668.2,2842-2860).
cggcatggccgtttcctat

SEQ ID NO: 411219 - DNA, 19 bp, Homo sapiens
  siRNA target sequence for MGC33630 (NM_144668.2,2845-2863).
catggccgtttcctatgat

SEQ ID NO: 411220 - DNA, 19 bp, Homo sapiens
  siRNA target sequence for MGC33630 (NM_144668.2,2999-3017).
cgggaaggaaaattctaca

SEQ ID NO: 411221 - DNA, 19 bp, Homo sapiens
  siRNA target sequence for MGC33630 (NM_144668.2,3057-3075).
gtcaaggcatcgacacaat

SEQ ID NO: 411222 - DNA, 19 bp, Homo sapiens
  siRNA target sequence for MGC33630 (NM_144668.2,3218-3236).
ctaatcgacaagatcaact

SEQ ID NO: 411223 - DNA, 19 bp, Homo sapiens
  siRNA target sequence for MGC33630 (NM_144668.2,3314-3332).
gaggtgctcggttatacca

SEQ ID NO: 411224 - DNA, 19 bp, Homo sapiens
  siRNA target sequence for MGC33630 (NM_144668.2,3371-3389).
ctgagactgctcgttacta

SEQ ID NO: 411225 - DNA, 19 bp, Homo sapiens
  siRNA target sequence for MGC33630 (NM_144668.2,3373-3391).
gagactgctcgttactaaa

SEQ ID NO: 411226 - DNA, 19 bp, Homo sapiens
  siRNA target sequence for MGC33630 (NM_144668.2,3448-3466).
gaatcccgagggatggaaa

SEQ ID NO: 411227 - DNA, 19 bp, Homo sapiens
  siRNA target sequence for MGC33630 (NM_144668.2,3484-3502).
ctccgtcaaaggttcagaa

SEQ ID NO: 411228 - DNA, 19 bp, Homo sapiens
  siRNA target sequence for MGC33630 (NM_144668.2,3542-3560).
gaaatattcgcgactgaaa

SEQ ID NO: 411229 - DNA, 19 bp, Homo sapiens
  siRNA target sequence for MGC33630 (NM_144668.2,3557-3575).
gaaattcttggcttaacca

SEQ ID NO: 411230 - DNA, 19 bp, Homo sapiens
  siRNA target sequence for OTOA (NM_144672.2,18-36).
cgacatactcccttttcct

SEQ ID NO: 411231 - DNA, 19 bp, Homo sapiens
  siRNA target sequence for OTOA (NM_144672.2,19-37).
gacatactcccttttccta

SEQ ID NO: 411232 - DNA, 19 bp, Homo sapiens
  siRNA target sequence for OTOA (NM_144672.2,21-39).
catactcccttttcctatt

SEQ ID NO: 411233 - DNA, 19 bp, Homo sapiens
  siRNA target sequence for OTOA (NM_144672.2,52-70).
ccatggagtgtcgagttat

SEQ ID NO: 411234 - DNA, 19 bp, Homo sapiens
  siRNA target sequence for OTOA (NM_144672.2,53-71).
catggagtgtcgagttata

SEQ ID NO: 411235 - DNA, 19 bp, Homo sapiens
  siRNA target sequence for OTOA (NM_144672.2,57-75).
gagtgtcgagttatacagt

SEQ ID NO: 411236 - DNA, 19 bp, Homo sapiens
  siRNA target sequence for OTOA (NM_144672.2,153-171).
cactgctggatctcataca

SEQ ID NO: 411237 - DNA, 19 bp, Homo sapiens
  siRNA target sequence for OTOA (NM_144672.2,215-233).
gtcctggcctatctgaatt

SEQ ID NO: 411238 - DNA, 19 bp, Homo sapiens
  siRNA target sequence for OTOA (NM_144672.2,363-381).
ccatgaaatgcctcttaga

SEQ ID NO: 411239 - DNA, 19 bp, Homo sapiens
  siRNA target sequence for OTOA (NM_144672.2,418-436).
catcgacttaggagagatt

SEQ ID NO: 411240 - DNA, 19 bp, Homo sapiens
  siRNA target sequence for OTOA (NM_144672.2,614-632).
cgcgaggatgcctttaaga

SEQ ID NO: 411241 - DNA, 19 bp, Homo sapiens
  siRNA target sequence for OTOA (NM_144672.2,615-633).
gcgaggatgcctttaagaa

SEQ ID NO: 411242 - DNA, 19 bp, Homo sapiens
  siRNA target sequence for OTOA (NM_144672.2,634-652).
cctatctgcagtgttcaaa

SEQ ID NO: 411243 - DNA, 19 bp, Homo sapiens
  siRNA target sequence for OTOA (NM_144672.2,653-671).
gatctctacgacaaaacct

SEQ ID NO: 411244 - DNA, 19 bp, Homo sapiens
  siRNA target sequence for OTOA (NM_144672.2,699-717).
cctggatgactggaatact

SEQ ID NO: 411245 - DNA, 19 bp, Homo sapiens
  siRNA target sequence for OTOA (NM_144672.2,756-774).
gggtcagtgcggaacactt

SEQ ID NO: 411246 - DNA, 19 bp, Homo sapiens
  siRNA target sequence for OTOA (NM_144672.2,757-775).
ggtcagtgcggaacactta

SEQ ID NO: 411247 - DNA, 19 bp, Homo sapiens
  siRNA target sequence for OTOA (NM_144672.2,758-776).
gtcagtgcggaacacttat

SEQ ID NO: 411248 - DNA, 19 bp, Homo sapiens
  siRNA target sequence for OTOA (NM_144672.2,793-811).
catggttcacctatcgttt

SEQ ID NO: 411249 - DNA, 19 bp, Homo sapiens
  siRNA target sequence for OTOA (NM_144672.2,796-814).
ggttcacctatcgtttgaa

SEQ ID NO: 411250 - DNA, 19 bp, Homo sapiens
  siRNA target sequence for OTOA (NM_144672.2,822-840).
cgaaaattagtcctataga

SEQ ID NO: 411251 - DNA, 19 bp, Homo sapiens
  siRNA target sequence for OTOA (NM_144672.2,1196-1214).
gagaccctgggttctttgt

SEQ ID NO: 411252 - DNA, 19 bp, Homo sapiens
  siRNA target sequence for OTOA (NM_144672.2,1215-1233).
cggatgcagttgtaggttt

SEQ ID NO: 411253 - DNA, 19 bp, Homo sapiens
  siRNA target sequence for OTOA (NM_144672.2,1363-1381).
ggtgctgtctttctacaat

SEQ ID NO: 411254 - DNA, 19 bp, Homo sapiens
  siRNA target sequence for OTOA (NM_144672.2,1470-1488).
gtgccgtctcccagtatgt

SEQ ID NO: 411255 - DNA, 19 bp, Homo sapiens
  siRNA target sequence for OTOA (NM_144672.2,1472-1490).
gccgtctcccagtatgtat

SEQ ID NO: 411256 - DNA, 19 bp, Homo sapiens
  siRNA target sequence for OTOA (NM_144672.2,1570-1588).
gatacaaggggctttcttt

SEQ ID NO: 411257 - DNA, 19 bp, Homo sapiens
  siRNA target sequence for OTOA (NM_144672.2,1595-1613).
gtgtctctctttgatttaa

SEQ ID NO: 411258 - DNA, 19 bp, Homo sapiens
  siRNA target sequence for OTOA (NM_144672.2,1614-1632).
ggaggcaacctggattcaa

SEQ ID NO: 411259 - DNA, 19 bp, Homo sapiens
  siRNA target sequence for OTOA (NM_144672.2,1619-1637).
caacctggattcaactcta

SEQ ID NO: 411260 - DNA, 19 bp, Homo sapiens
  siRNA target sequence for OTOA (NM_144672.2,1753-1771).
cgtgacctgctcacacatt

SEQ ID NO: 411261 - DNA, 19 bp, Homo sapiens
  siRNA target sequence for OTOA (NM_144672.2,1841-1859).
ccctatcaggttaattgtt

SEQ ID NO: 411262 - DNA, 19 bp, Homo sapiens
  siRNA target sequence for OTOA (NM_144672.2,1842-1860).
cctatcaggttaattgttt

SEQ ID NO: 411263 - DNA, 19 bp, Homo sapiens
  siRNA target sequence for OTOA (NM_144672.2,1992-2010).
ggttggactccttggtttt

SEQ ID NO: 411264 - DNA, 19 bp, Homo sapiens
  siRNA target sequence for OTOA (NM_144672.2,2006-2024).
gttttagattcccacaaaa

SEQ ID NO: 411265 - DNA, 19 bp, Homo sapiens
  siRNA target sequence for OTOA (NM_144672.2,2012-2030).
gattcccacaaaaagactt

SEQ ID NO: 411266 - DNA, 19 bp, Homo sapiens
  siRNA target sequence for MGC18079 (NM_144675.1,365-383).
ctggcgtggggctccttta

SEQ ID NO: 411267 - DNA, 19 bp, Homo sapiens
  siRNA target sequence for MGC18079 (NM_144675.1,368-386).
gcgtggggctcctttacct

SEQ ID NO: 411268 - DNA, 19 bp, Homo sapiens
  siRNA target sequence for MGC18079 (NM_144675.1,426-444).
ccaagacggtcattgagtt

SEQ ID NO: 411269 - DNA, 19 bp, Homo sapiens
  siRNA target sequence for MGC18079 (NM_144675.1,481-499).
ggaagagccgaccttcata

SEQ ID NO: 411270 - DNA, 19 bp, Homo sapiens
  siRNA target sequence for MGC18079 (NM_144675.1,552-570).
gcgaggaggactttcactt

SEQ ID NO: 411271 - DNA, 19 bp, Homo sapiens
  siRNA target sequence for MGC18079 (NM_144675.1,553-571).
cgaggaggactttcactta

SEQ ID NO: 411272 - DNA, 19 bp, Homo sapiens
  siRNA target sequence for GnT-IX (NM_144677.2,331-349).
ccgatgggaagataatggt

SEQ ID NO: 411273 - DNA, 19 bp, Homo sapiens
  siRNA target sequence for GnT-IX (NM_144677.2,481-499).
ccatccgcacagaagtgat

SEQ ID NO: 411274 - DNA, 19 bp, Homo sapiens
  siRNA target sequence for GnT-IX (NM_144677.2,519-537).
ggcgtcctgcgcaagatga

SEQ ID NO: 411275 - DNA, 19 bp, Homo sapiens
  siRNA target sequence for GnT-IX (NM_144677.2,1586-1604).
gcagttcatgaccatgttt

SEQ ID NO: 411276 - DNA, 19 bp, Homo sapiens
  siRNA target sequence for GnT-IX (NM_144677.2,1878-1896).
ctgcgcaaggccaaactct

SEQ ID NO: 411277 - DNA, 19 bp, Homo sapiens
  siRNA target sequence for GnT-IX (NM_144677.2,1882-1900).
gcaaggccaaactcttcat

SEQ ID NO: 411278 - DNA, 19 bp, Homo sapiens
  siRNA target sequence for GnT-IX (NM_144677.2,2092-2110).
ggacagtcgactacaacaa

SEQ ID NO: 411279 - DNA, 19 bp, Homo sapiens
  siRNA target sequence for GnT-IX (NM_144677.2,2421-2439).
ctggaccacgggctaatct

SEQ ID NO: 411280 - DNA, 19 bp, Homo sapiens
  siRNA target sequence for GnT-IX (NM_144677.2,2423-2441).
ggaccacgggctaatctgt

SEQ ID NO: 411281 - DNA, 19 bp, Homo sapiens
  siRNA target sequence for GnT-IX (NM_144677.2,2509-2527).
gcaccgagtcggagatgaa

SEQ ID NO: 411282 - DNA, 19 bp, Homo sapiens
  siRNA target sequence for FLJ31528 (NM_144679.1,88-106).
ggggacgtccgatgatgat

SEQ ID NO: 411283 - DNA, 19 bp, Homo sapiens
  siRNA target sequence for FLJ31528 (NM_144679.1,90-108).
ggacgtccgatgatgatgt

SEQ ID NO: 411284 - DNA, 19 bp, Homo sapiens
  siRNA target sequence for FLJ31528 (NM_144679.1,114-132).
gtccgggctacctgtttga

SEQ ID NO: 411285 - DNA, 19 bp, Homo sapiens
  siRNA target sequence for FLJ31528 (NM_144679.1,887-905).
ctgcgtgggaccagtgaat

SEQ ID NO: 411286 - DNA, 19 bp, Homo sapiens
  siRNA target sequence for FLJ32734 (NM_144681.1,308-326).
ccagaaactccccaatgtt

SEQ ID NO: 411287 - DNA, 19 bp, Homo sapiens
  siRNA target sequence for FLJ32734 (NM_144681.1,381-399).
gaaatcatgcatcaaacta

SEQ ID NO: 411288 - DNA, 19 bp, Homo sapiens
  siRNA target sequence for FLJ32734 (NM_144681.1,738-756).
gtgattgcacgctacaaga

SEQ ID NO: 411289 - DNA, 19 bp, Homo sapiens
  siRNA target sequence for FLJ32734 (NM_144681.1,915-933).
cgtgcccgcagcaatgtca

SEQ ID NO: 411290 - DNA, 19 bp, Homo sapiens
  siRNA target sequence for FLJ32734 (NM_144681.1,1100-1118).
gatccagcaatttatccaa

SEQ ID NO: 411291 - DNA, 19 bp, Homo sapiens
  siRNA target sequence for FLJ31952 (NM_144682.2,1192-1210).
caaaacctcgggtagagta

SEQ ID NO: 411292 - DNA, 19 bp, Homo sapiens
  siRNA target sequence for FLJ31952 (NM_144682.2,1208-1226).
gtacagcaccaaaatcgta

SEQ ID NO: 411293 - DNA, 19 bp, Homo sapiens
  siRNA target sequence for FLJ31952 (NM_144682.2,1217-1235).
caaaatcgtagaagtgttt

SEQ ID NO: 411294 - DNA, 19 bp, Homo sapiens
  siRNA target sequence for FLJ31952 (NM_144682.2,1230-1248).
gtgttttgtgggaaagagt

SEQ ID NO: 411295 - DNA, 19 bp, Homo sapiens
  siRNA target sequence for FLJ31952 (NM_144682.2,1245-1263).
gagttgtatggctatctct

SEQ ID NO: 411296 - DNA, 19 bp, Homo sapiens
  siRNA target sequence for FLJ31952 (NM_144682.2,1254-1272).
ggctatctctgtgtgatta

SEQ ID NO: 411297 - DNA, 19 bp, Homo sapiens
  siRNA target sequence for FLJ31952 (NM_144682.2,1425-1443).
gagtctcagttgagtctat

SEQ ID NO: 411298 - DNA, 19 bp, Homo sapiens
  siRNA target sequence for FLJ31952 (NM_144682.2,1427-1445).
gtctcagttgagtctatct

SEQ ID NO: 411299 - DNA, 19 bp, Homo sapiens
  siRNA target sequence for FLJ31952 (NM_144682.2,2542-2560).
ccgagtacatacaacaaga

SEQ ID NO: 411300 - DNA, 19 bp, Homo sapiens
  siRNA target sequence for FLJ31952 (NM_144682.2,2543-2561).
cgagtacatacaacaagaa

SEQ ID NO: 411301 - DNA, 19 bp, Homo sapiens
  siRNA target sequence for FLJ31952 (NM_144682.2,2577-2595).
gaaaatcctccaattaata

SEQ ID NO: 411302 - DNA, 19 bp, Homo sapiens
  siRNA target sequence for FLJ31952 (NM_144682.2,2646-2664).
gttccaggcaacacaaaga

SEQ ID NO: 411303 - DNA, 19 bp, Homo sapiens
  siRNA target sequence for FLJ31952 (NM_144682.2,2649-2667).
ccaggcaacacaaagatta

SEQ ID NO: 411304 - DNA, 19 bp, Homo sapiens
  siRNA target sequence for FLJ31952 (NM_144682.2,2652-2670).
ggcaacacaaagattatta

SEQ ID NO: 411305 - DNA, 19 bp, Homo sapiens
  siRNA target sequence for FLJ31952 (NM_144682.2,2653-2671).
gcaacacaaagattattaa

SEQ ID NO: 411306 - DNA, 19 bp, Homo sapiens
  siRNA target sequence for FLJ31952 (NM_144682.2,2663-2681).
gattattaaaaactttact

SEQ ID NO: 411307 - DNA, 19 bp, Homo sapiens
  siRNA target sequence for TMC4 (NM_144686.1,52-70).
cccgaccttggaatcagaa

SEQ ID NO: 411308 - DNA, 19 bp, Homo sapiens
  siRNA target sequence for TMC4 (NM_144686.1,407-425).
cggaggtccaaggagaaaa

SEQ ID NO: 411309 - DNA, 19 bp, Homo sapiens
  siRNA target sequence for TMC4 (NM_144686.1,497-515).
ggcacggagtcctacttct

SEQ ID NO: 411310 - DNA, 19 bp, Homo sapiens
  siRNA target sequence for TMC4 (NM_144686.1,957-975).
gccagcgcatcatcttgta

SEQ ID NO: 411311 - DNA, 19 bp, Homo sapiens
  siRNA target sequence for TMC4 (NM_144686.1,962-980).
cgcatcatcttgtacgaat

SEQ ID NO: 411312 - DNA, 19 bp, Homo sapiens
  siRNA target sequence for TMC4 (NM_144686.1,964-982).
catcatcttgtacgaatta

SEQ ID NO: 411313 - DNA, 19 bp, Homo sapiens
  siRNA target sequence for TMC4 (NM_144686.1,1286-1304).
cggagtcgccagatcgttt

SEQ ID NO: 411314 - DNA, 19 bp, Homo sapiens
  siRNA target sequence for TMC4 (NM_144686.1,1416-1434).
cctgtggctacaattacaa

SEQ ID NO: 411315 - DNA, 19 bp, Homo sapiens
  siRNA target sequence for TMC4 (NM_144686.1,1417-1435).
ctgtggctacaattacaaa

SEQ ID NO: 411316 - DNA, 19 bp, Homo sapiens
  siRNA target sequence for TMC4 (NM_144686.1,1419-1437).
gtggctacaattacaaaca

SEQ ID NO: 411317 - DNA, 19 bp, Homo sapiens
  siRNA target sequence for TMC4 (NM_144686.1,1422-1440).
gctacaattacaaacaact

SEQ ID NO: 411318 - DNA, 19 bp, Homo sapiens
  siRNA target sequence for TMC4 (NM_144686.1,1659-1677).
gttttttctgccctttact

SEQ ID NO: 411319 - DNA, 19 bp, Homo sapiens
  siRNA target sequence for TMC4 (NM_144686.1,1671-1689).
ctttactgcccctgcttaa

SEQ ID NO: 411320 - DNA, 19 bp, Homo sapiens
  siRNA target sequence for TMC4 (NM_144686.1,1940-1958).
cctgagaccacccagaatt

SEQ ID NO: 411321 - DNA, 19 bp, Homo sapiens
  siRNA target sequence for TMC4 (NM_144686.1,1941-1959).
ctgagaccacccagaattt

SEQ ID NO: 411322 - DNA, 19 bp, Homo sapiens
  siRNA target sequence for FLJ32658 (NM_144688.2,2157-2175).
gattgctgcctgtcaacta

SEQ ID NO: 411323 - DNA, 19 bp, Homo sapiens
  siRNA target sequence for FLJ32658 (NM_144688.2,2661-2679).
cgagcgggatggagtgaaa

SEQ ID NO: 411324 - DNA, 19 bp, Homo sapiens
  siRNA target sequence for FLJ32658 (NM_144688.2,2662-2680).
gagcgggatggagtgaaaa

SEQ ID NO: 411325 - DNA, 19 bp, Homo sapiens
  siRNA target sequence for FLJ32658 (NM_144688.2,2699-2717).
ccatggagaaggacacttt

SEQ ID NO: 411326 - DNA, 19 bp, Homo sapiens
  siRNA target sequence for FLJ32658 (NM_144688.2,2808-2826).
gaccctggaagaatacaga

SEQ ID NO: 411327 - DNA, 19 bp, Homo sapiens
  siRNA target sequence for CAPN12 (NM_144691.2,518-536).
ccaaaggcgtgaaatggat

SEQ ID NO: 411328 - DNA, 19 bp, Homo sapiens
  siRNA target sequence for CAPN12 (NM_144691.2,554-572).
gtgctgagccgaagttcat

SEQ ID NO: 411329 - DNA, 19 bp, Homo sapiens
  siRNA target sequence for CAPN12 (NM_144691.2,556-574).
gctgagccgaagttcatct

SEQ ID NO: 411330 - DNA, 19 bp, Homo sapiens
  siRNA target sequence for CAPN12 (NM_144691.2,642-660).
cgcctcccttactctgtat

SEQ ID NO: 411331 - DNA, 19 bp, Homo sapiens
  siRNA target sequence for CAPN12 (NM_144691.2,818-836).
cggaacagcggaatgagtt

SEQ ID NO: 411332 - DNA, 19 bp, Homo sapiens
  siRNA target sequence for CAPN12 (NM_144691.2,943-961).
ggcgaggtgctctatctga

SEQ ID NO: 411333 - DNA, 19 bp, Homo sapiens
  siRNA target sequence for CAPN12 (NM_144691.2,1625-1643).
gagccaagggcctcactta

SEQ ID NO: 411334 - DNA, 19 bp, Homo sapiens
  siRNA target sequence for CAPN12 (NM_144691.2,2017-2035).
cagctccaggccttactaa

SEQ ID NO: 411335 - DNA, 19 bp, Homo sapiens
  siRNA target sequence for CAPN12 (NM_144691.2,2022-2040).
ccaggccttactaagcatt

SEQ ID NO: 411336 - DNA, 19 bp, Homo sapiens
  siRNA target sequence for LOC148137 (NM_144692.1,39-57).
cgcagcctgccagttttct

SEQ ID NO: 411337 - DNA, 19 bp, Homo sapiens
  siRNA target sequence for LOC148137 (NM_144692.1,329-347).
ctccgtggtggccaagtat

SEQ ID NO: 411338 - DNA, 19 bp, Homo sapiens
  siRNA target sequence for LOC148137 (NM_144692.1,331-349).
ccgtggtggccaagtatat

SEQ ID NO: 411339 - DNA, 19 bp, Homo sapiens
  siRNA target sequence for LOC148137 (NM_144692.1,333-351).
gtggtggccaagtatataa

SEQ ID NO: 411340 - DNA, 19 bp, Homo sapiens
  siRNA target sequence for LOC148137 (NM_144692.1,336-354).
gtggccaagtatataaaca

SEQ ID NO: 411341 - DNA, 19 bp, Homo sapiens
  siRNA target sequence for LOC148137 (NM_144692.1,548-566).
ggctccccttcaggaaata

SEQ ID NO: 411342 - DNA, 19 bp, Homo sapiens
  siRNA target sequence for LOC148137 (NM_144692.1,576-594).
ctccacacatggaactcat

SEQ ID NO: 411343 - DNA, 19 bp, Homo sapiens
  siRNA target sequence for FLJ32421 (NM_144695.1,435-453).
gctcctgtgtcttttaatt

SEQ ID NO: 411344 - DNA, 19 bp, Homo sapiens
  siRNA target sequence for FLJ32421 (NM_144695.1,514-532).
gggcacgactccttgaact

SEQ ID NO: 411345 - DNA, 19 bp, Homo sapiens
  siRNA target sequence for FLJ32421 (NM_144695.1,517-535).
cacgactccttgaactgtt

SEQ ID NO: 411346 - DNA, 19 bp, Homo sapiens
  siRNA target sequence for FLJ32421 (NM_144695.1,636-654).
gaaagcaagttacgatata

SEQ ID NO: 411347 - DNA, 19 bp, Homo sapiens
  siRNA target sequence for FLJ32421 (NM_144695.1,640-658).
gcaagttacgatatattca

SEQ ID NO: 411348 - DNA, 19 bp, Homo sapiens
  siRNA target sequence for FLJ32421 (NM_144695.1,641-659).
caagttacgatatattcaa

SEQ ID NO: 411349 - DNA, 19 bp, Homo sapiens
  siRNA target sequence for FLJ32421 (NM_144695.1,668-686).
gtggactgatacattgcaa

SEQ ID NO: 411350 - DNA, 19 bp, Homo sapiens
  siRNA target sequence for FLJ32421 (NM_144695.1,703-721).
cccagcaggatgctgtttt

SEQ ID NO: 411351 - DNA, 19 bp, Homo sapiens
  siRNA target sequence for FLJ32421 (NM_144695.1,710-728).
ggatgctgtttttgaatta

SEQ ID NO: 411352 - DNA, 19 bp, Homo sapiens
  siRNA target sequence for FLJ32421 (NM_144695.1,750-768).
gctttatggtataccaaat

SEQ ID NO: 411353 - DNA, 19 bp, Homo sapiens
  siRNA target sequence for FLJ32421 (NM_144695.1,751-769).
ctttatggtataccaaata

SEQ ID NO: 411354 - DNA, 19 bp, Homo sapiens
  siRNA target sequence for FLJ32421 (NM_144695.1,782-800).
ggctggaaaagaaaatata

SEQ ID NO: 411355 - DNA, 19 bp, Homo sapiens
  siRNA target sequence for FLJ32421 (NM_144695.1,822-840).
gttcatcgaagcctaaaga

SEQ ID NO: 411356 - DNA, 19 bp, Homo sapiens
  siRNA target sequence for FLJ32421 (NM_144695.1,876-894).
catctcccaaaactcatta

SEQ ID NO: 411357 - DNA, 19 bp, Homo sapiens
  siRNA target sequence for FLJ32421 (NM_144695.1,890-908).
cattacacctgcggaaaaa

SEQ ID NO: 411358 - DNA, 19 bp, Homo sapiens
  siRNA target sequence for FLJ32421 (NM_144695.1,925-943).
cacgactcatagaagcata

SEQ ID NO: 411359 - DNA, 19 bp, Homo sapiens
  siRNA target sequence for FLJ32421 (NM_144695.1,930-948).
ctcatagaagcatacgtta

SEQ ID NO: 411360 - DNA, 19 bp, Homo sapiens
  siRNA target sequence for FLJ32421 (NM_144695.1,932-950).
catagaagcatacgttatt

SEQ ID NO: 411361 - DNA, 19 bp, Homo sapiens
  siRNA target sequence for FLJ32421 (NM_144695.1,936-954).
gaagcatacgttattcaat

SEQ ID NO: 411362 - DNA, 19 bp, Homo sapiens
  siRNA target sequence for FLJ32421 (NM_144695.1,940-958).
catacgttattcaatgtca

SEQ ID NO: 411363 - DNA, 19 bp, Homo sapiens
  siRNA target sequence for FLJ32421 (NM_144695.1,984-1002).
gctcgagcaattgaactaa

SEQ ID NO: 411364 - DNA, 19 bp, Homo sapiens
  siRNA target sequence for FLJ32421 (NM_144695.1,985-1003).
ctcgagcaattgaactaaa

SEQ ID NO: 411365 - DNA, 19 bp, Homo sapiens
  siRNA target sequence for FLJ32421 (NM_144695.1,1033-1051).
cgtatgaaacagccaattt

SEQ ID NO: 411366 - DNA, 19 bp, Homo sapiens
  siRNA target sequence for FLJ32421 (NM_144695.1,1052-1070).
ctatcaaaaagctgatcat

SEQ ID NO: 411367 - DNA, 19 bp, Homo sapiens
  siRNA target sequence for FLJ32421 (NM_144695.1,1056-1074).
caaaaagctgatcatactt

SEQ ID NO: 411368 - DNA, 19 bp, Homo sapiens
  siRNA target sequence for FLJ32421 (NM_144695.1,1062-1080).
gctgatcatactttatcca

SEQ ID NO: 411369 - DNA, 19 bp, Homo sapiens
  siRNA target sequence for FLJ32421 (NM_144695.1,1102-1120).
ccaaatggagaaaatatct

SEQ ID NO: 411370 - DNA, 19 bp, Homo sapiens
  siRNA target sequence for FLJ32421 (NM_144695.1,1309-1327).
gacatctgttctttaggaa

SEQ ID NO: 411371 - DNA, 19 bp, Homo sapiens
  siRNA target sequence for FLJ32421 (NM_144695.1,1341-1359).
gtgaagaacaccctagaaa

SEQ ID NO: 411372 - DNA, 19 bp, Homo sapiens
  siRNA target sequence for FLJ32421 (NM_144695.1,1411-1429).
ccccacagctggaactcaa

SEQ ID NO: 411373 - DNA, 19 bp, Homo sapiens
  siRNA target sequence for FLJ32421 (NM_144695.1,1418-1436).
gctggaactcaaagcaaat

SEQ ID NO: 411374 - DNA, 19 bp, Homo sapiens
  siRNA target sequence for FLJ32421 (NM_144695.1,1421-1439).
ggaactcaaagcaaattat

SEQ ID NO: 411375 - DNA, 19 bp, Homo sapiens
  siRNA target sequence for FLJ32421 (NM_144695.1,1443-1461).
ctcgtagagcctatacctt

SEQ ID NO: 411376 - DNA, 19 bp, Homo sapiens
  siRNA target sequence for FLJ32421 (NM_144695.1,1451-1469).
gcctatacctttcgaattt

SEQ ID NO: 411377 - DNA, 19 bp, Homo sapiens
  siRNA target sequence for FLJ32421 (NM_144695.1,1485-1503).
cagtggacaccagaaacat

SEQ ID NO: 411378 - DNA, 19 bp, Homo sapiens
  siRNA target sequence for FLJ32421 (NM_144695.1,1509-1527).
gcatttgatctcaccaaaa

SEQ ID NO: 411379 - DNA, 19 bp, Homo sapiens
  siRNA target sequence for FLJ32940 (NM_144696.2,441-459).
gaaacctaataaaagagta

SEQ ID NO: 411380 - DNA, 19 bp, Homo sapiens
  siRNA target sequence for FLJ32940 (NM_144696.2,467-485).
cccagctgaatgatgtgat

SEQ ID NO: 411381 - DNA, 19 bp, Homo sapiens
  siRNA target sequence for FLJ32940 (NM_144696.2,472-490).
ctgaatgatgtgatggata

SEQ ID NO: 411382 - DNA, 19 bp, Homo sapiens
  siRNA target sequence for FLJ32940 (NM_144696.2,536-554).
caacgaagatgcacaaact

SEQ ID NO: 411383 - DNA, 19 bp, Homo sapiens
  siRNA target sequence for FLJ32940 (NM_144696.2,543-561).
gatgcacaaactactacat

SEQ ID NO: 411384 - DNA, 19 bp, Homo sapiens
  siRNA target sequence for FLJ32940 (NM_144696.2,546-564).
gcacaaactactacatata

SEQ ID NO: 411385 - DNA, 19 bp, Homo sapiens
  siRNA target sequence for FLJ32940 (NM_144696.2,547-565).
cacaaactactacatatat

SEQ ID NO: 411386 - DNA, 19 bp, Homo sapiens
  siRNA target sequence for FLJ32940 (NM_144696.2,553-571).
ctactacatatattgaaga

SEQ ID NO: 411387 - DNA, 19 bp, Homo sapiens
  siRNA target sequence for FLJ32940 (NM_144696.2,641-659).
gaggagaacttctgtctaa

SEQ ID NO: 411388 - DNA, 19 bp, Homo sapiens
  siRNA target sequence for FLJ32940 (NM_144696.2,669-687).
gaggtatgtgcaaatgctt

SEQ ID NO: 411389 - DNA, 19 bp, Homo sapiens
  siRNA target sequence for FLJ32940 (NM_144696.2,693-711).
gattgctcggcagatgatt

SEQ ID NO: 411390 - DNA, 19 bp, Homo sapiens
  siRNA target sequence for FLJ32940 (NM_144696.2,697-715).
gctcggcagatgattgatt

SEQ ID NO: 411391 - DNA, 19 bp, Homo sapiens
  siRNA target sequence for FLJ32940 (NM_144696.2,698-716).
ctcggcagatgattgattt

SEQ ID NO: 411392 - DNA, 19 bp, Homo sapiens
  siRNA target sequence for FLJ32940 (NM_144696.2,744-762).
gatggaccagcgcatttta

SEQ ID NO: 411393 - DNA, 19 bp, Homo sapiens
  siRNA target sequence for FLJ32940 (NM_144696.2,750-768).
ccagcgcattttagaagaa

SEQ ID NO: 411394 - DNA, 19 bp, Homo sapiens
  siRNA target sequence for FLJ32940 (NM_144696.2,751-769).
cagcgcattttagaagaat

SEQ ID NO: 411395 - DNA, 19 bp, Homo sapiens
  siRNA target sequence for FLJ32940 (NM_144696.2,823-841).
cgggcacatgatgtgaaat

SEQ ID NO: 411396 - DNA, 19 bp, Homo sapiens
  siRNA target sequence for FLJ32940 (NM_144696.2,886-904).
cttttaaatgcggaaaaga

SEQ ID NO: 411397 - DNA, 19 bp, Homo sapiens
  siRNA target sequence for FLJ32940 (NM_144696.2,919-937).
gaagaatatcatgacttat

SEQ ID NO: 411398 - DNA, 19 bp, Homo sapiens
  siRNA target sequence for FLJ32940 (NM_144696.2,931-949).
gacttatatacattacaaa

SEQ ID NO: 411399 - DNA, 19 bp, Homo sapiens
  siRNA target sequence for FLJ32940 (NM_144696.2,933-951).
cttatatacattacaaaga

SEQ ID NO: 411400 - DNA, 19 bp, Homo sapiens
  siRNA target sequence for FLJ32940 (NM_144696.2,1023-1041).
ggccctgaaggtgattgaa

SEQ ID NO: 411401 - DNA, 19 bp, Homo sapiens
  siRNA target sequence for FLJ32940 (NM_144696.2,1024-1042).
gccctgaaggtgattgaaa

SEQ ID NO: 411402 - DNA, 19 bp, Homo sapiens
  siRNA target sequence for FLJ32940 (NM_144696.2,1053-1071).
catattggctagaagactt

SEQ ID NO: 411403 - DNA, 19 bp, Homo sapiens
  siRNA target sequence for FLJ32940 (NM_144696.2,1060-1078).
gctagaagactttacctta

SEQ ID NO: 411404 - DNA, 19 bp, Homo sapiens
  siRNA target sequence for FLJ32940 (NM_144696.2,1061-1079).
ctagaagactttaccttaa

SEQ ID NO: 411405 - DNA, 19 bp, Homo sapiens
  siRNA target sequence for FLJ32940 (NM_144696.2,1087-1105).
ggctggaataaatacacta

SEQ ID NO: 411406 - DNA, 19 bp, Homo sapiens
  siRNA target sequence for FLJ32940 (NM_144696.2,1088-1106).
gctggaataaatacactaa

SEQ ID NO: 411407 - DNA, 19 bp, Homo sapiens
  siRNA target sequence for FLJ32940 (NM_144696.2,1092-1110).
gaataaatacactaagcat

SEQ ID NO: 411408 - DNA, 19 bp, Homo sapiens
  siRNA target sequence for FLJ32940 (NM_144696.2,1181-1199).
gaaacttagtgaataaact

SEQ ID NO: 411409 - DNA, 19 bp, Homo sapiens
  siRNA target sequence for FLJ32940 (NM_144696.2,1252-1270).
gttaaggatgggcttatca

SEQ ID NO: 411410 - DNA, 19 bp, Homo sapiens
  siRNA target sequence for FLJ32940 (NM_144696.2,1297-1315).
gacattttatcccctaata

SEQ ID NO: 411411 - DNA, 19 bp, Homo sapiens
  siRNA target sequence for FLJ32940 (NM_144696.2,1309-1327).
cctaataagggaaatatat

SEQ ID NO: 411412 - DNA, 19 bp, Homo sapiens
  siRNA target sequence for FLJ32940 (NM_144696.2,1334-1352).
cagttcttttagacttcaa

SEQ ID NO: 411413 - DNA, 19 bp, Homo sapiens
  siRNA target sequence for FLJ32940 (NM_144696.2,1397-1415).
gggatgttctactgtcaaa

SEQ ID NO: 411414 - DNA, 19 bp, Homo sapiens
  siRNA target sequence for FLJ32940 (NM_144696.2,1398-1416).
ggatgttctactgtcaaaa

SEQ ID NO: 411415 - DNA, 19 bp, Homo sapiens
  siRNA target sequence for FLJ32940 (NM_144696.2,1405-1423).
ctactgtcaaaatacgata

SEQ ID NO: 411416 - DNA, 19 bp, Homo sapiens
  siRNA target sequence for FLJ32940 (NM_144696.2,1419-1437).
cgatactctcaagattatt

SEQ ID NO: 411417 - DNA, 19 bp, Homo sapiens
  siRNA target sequence for FLJ32940 (NM_144696.2,1420-1438).
gatactctcaagattatta

SEQ ID NO: 411418 - DNA, 19 bp, Homo sapiens
  siRNA target sequence for FLJ32940 (NM_144696.2,1424-1442).
ctctcaagattattaaaca

SEQ ID NO: 411419 - DNA, 19 bp, Homo sapiens
  siRNA target sequence for FLJ32940 (NM_144696.2,1514-1532).
catcagagcgacagtacat

SEQ ID NO: 411420 - DNA, 19 bp, Homo sapiens
  siRNA target sequence for FLJ32940 (NM_144696.2,1596-1614).
caatggttactccaaaatt

SEQ ID NO: 411421 - DNA, 19 bp, Homo sapiens
  siRNA target sequence for FLJ32940 (NM_144696.2,1646-1664).
gttctttcaagttggaaaa

SEQ ID NO: 411422 - DNA, 19 bp, Homo sapiens
  siRNA target sequence for FLJ32940 (NM_144696.2,1676-1694).
ctgatacgcctcttgaaga

SEQ ID NO: 411423 - DNA, 19 bp, Homo sapiens
  siRNA target sequence for FLJ32940 (NM_144696.2,1678-1696).
gatacgcctcttgaagaat

SEQ ID NO: 411424 - DNA, 19 bp, Homo sapiens
  siRNA target sequence for FLJ32940 (NM_144696.2,1735-1753).
cacttggatatattgttaa

SEQ ID NO: 411425 - DNA, 19 bp, Homo sapiens
  siRNA target sequence for FLJ32940 (NM_144696.2,1740-1758).
ggatatattgttaaacctt

SEQ ID NO: 411426 - DNA, 19 bp, Homo sapiens
  siRNA target sequence for FLJ32940 (NM_144696.2,1741-1759).
gatatattgttaaacctta

SEQ ID NO: 411427 - DNA, 19 bp, Homo sapiens
  siRNA target sequence for FLJ32940 (NM_144696.2,1749-1767).
gttaaaccttactggtatt

SEQ ID NO: 411428 - DNA, 19 bp, Homo sapiens
  siRNA target sequence for FLJ32940 (NM_144696.2,1799-1817).
cggtactccaagcgtatat

SEQ ID NO: 411429 - DNA, 19 bp, Homo sapiens
  siRNA target sequence for FLJ32940 (NM_144696.2,1807-1825).
caagcgtatatatttaaca

SEQ ID NO: 411430 - DNA, 19 bp, Homo sapiens
  siRNA target sequence for FLJ32940 (NM_144696.2,1811-1829).
cgtatatatttaacatgat

SEQ ID NO: 411431 - DNA, 19 bp, Homo sapiens
  siRNA target sequence for FLJ32940 (NM_144696.2,1866-1884).
caacggtaacattgaactt

SEQ ID NO: 411432 - DNA, 19 bp, Homo sapiens
  siRNA target sequence for FLJ32940 (NM_144696.2,1887-1905).
gcaccacatggatgagtta

SEQ ID NO: 411433 - DNA, 19 bp, Homo sapiens
  siRNA target sequence for FLJ32940 (NM_144696.2,1890-1908).
ccacatggatgagttacat

SEQ ID NO: 411434 - DNA, 19 bp, Homo sapiens
  siRNA target sequence for FLJ32940 (NM_144696.2,1891-1909).
cacatggatgagttacata

SEQ ID NO: 411435 - DNA, 19 bp, Homo sapiens
  siRNA target sequence for FLJ32940 (NM_144696.2,1897-1915).
gatgagttacatatatcta

SEQ ID NO: 411436 - DNA, 19 bp, Homo sapiens
  siRNA target sequence for FLJ32940 (NM_144696.2,1900-1918).
gagttacatatatctatga

SEQ ID NO: 411437 - DNA, 19 bp, Homo sapiens
  siRNA target sequence for FLJ32940 (NM_144696.2,2034-2052).
ggagctagatgcgattgaa

SEQ ID NO: 411438 - DNA, 19 bp, Homo sapiens
  siRNA target sequence for FLJ32940 (NM_144696.2,2125-2143).
ctgagtaaatccactaact

SEQ ID NO: 411439 - DNA, 19 bp, Homo sapiens
  siRNA target sequence for FLJ32940 (NM_144696.2,2222-2240).
cttgcctcctttctaatat

SEQ ID NO: 411440 - DNA, 19 bp, Homo sapiens
  siRNA target sequence for FLJ32940 (NM_144696.2,2225-2243).
gcctcctttctaatatcaa

SEQ ID NO: 411441 - DNA, 19 bp, Homo sapiens
  siRNA target sequence for FLJ32940 (NM_144696.2,2407-2425).
gaagaacaaccttcaacat

SEQ ID NO: 411442 - DNA, 19 bp, Homo sapiens
  siRNA target sequence for FLJ32940 (NM_144696.2,2481-2499).
caaacctctatttgaaaca

SEQ ID NO: 411443 - DNA, 19 bp, Homo sapiens
  siRNA target sequence for LOC148523 (NM_144697.2,535-553).
gcttcccctctgatagtga

SEQ ID NO: 411444 - DNA, 19 bp, Homo sapiens
  siRNA target sequence for LOC148523 (NM_144697.2,720-738).
ggatctggggcgaaaagat

SEQ ID NO: 411445 - DNA, 19 bp, Homo sapiens
  siRNA target sequence for LOC148523 (NM_144697.2,728-746).
ggcgaaaagatcaagagat

SEQ ID NO: 411446 - DNA, 19 bp, Homo sapiens
  siRNA target sequence for LOC148523 (NM_144697.2,803-821).
gtttgcccagaagtgtaaa

SEQ ID NO: 411447 - DNA, 19 bp, Homo sapiens
  siRNA target sequence for LOC148523 (NM_144697.2,808-826).
cccagaagtgtaaagaact

SEQ ID NO: 411448 - DNA, 19 bp, Homo sapiens
  siRNA target sequence for LOC148523 (NM_144697.2,844-862).
ctctcacagacctactcaa

SEQ ID NO: 411449 - DNA, 19 bp, Homo sapiens
  siRNA target sequence for LOC148523 (NM_144697.2,866-884).
gctgaagatgggtcgtttt

SEQ ID NO: 411450 - DNA, 19 bp, Homo sapiens
  siRNA target sequence for LOC148523 (NM_144697.2,879-897).
cgttttgagagaggattaa

SEQ ID NO: 411451 - DNA, 19 bp, Homo sapiens
  siRNA target sequence for LOC148523 (NM_144697.2,887-905).
gagaggattaagcagtttt

SEQ ID NO: 411452 - DNA, 19 bp, Homo sapiens
  siRNA target sequence for LOC148523 (NM_144697.2,926-944).
caggatccagcgtattgta

SEQ ID NO: 411453 - DNA, 19 bp, Homo sapiens
  siRNA target sequence for LOC148523 (NM_144697.2,961-979).
cacagatgggggaacgtta

SEQ ID NO: 411454 - DNA, 19 bp, Homo sapiens
  siRNA target sequence for LOC148523 (NM_144697.2,965-983).
gatgggggaacgttaccta

SEQ ID NO: 411455 - DNA, 19 bp, Homo sapiens
  siRNA target sequence for LOC148523 (NM_144697.2,1068-1086).
catcagctgaccaagcatt

SEQ ID NO: 411456 - DNA, 19 bp, Homo sapiens
  siRNA target sequence for LOC148523 (NM_144697.2,1151-1169).
gacacagctaggacatcta

SEQ ID NO: 411457 - DNA, 19 bp, Homo sapiens
  siRNA target sequence for LOC148523 (NM_144697.2,1164-1182).
catctagctttaaaaccaa

SEQ ID NO: 411458 - DNA, 19 bp, Homo sapiens
  siRNA target sequence for LOC148523 (NM_144697.2,1229-1247).
gatccacaccactccaatt

SEQ ID NO: 411459 - DNA, 19 bp, Homo sapiens
  siRNA target sequence for LOC148523 (NM_144697.2,1312-1330).
ccggcattggcgtcattct

SEQ ID NO: 411460 - DNA, 19 bp, Homo sapiens
  siRNA target sequence for LOC148523 (NM_144697.2,1315-1333).
gcattggcgtcattctttt

SEQ ID NO: 411461 - DNA, 19 bp, Homo sapiens
  siRNA target sequence for LOC148523 (NM_144697.2,1414-1432).
ctggtgagcctatgaaact

SEQ ID NO: 411462 - DNA, 19 bp, Homo sapiens
  siRNA target sequence for LOC148523 (NM_144697.2,1416-1434).
ggtgagcctatgaaactat

SEQ ID NO: 411463 - DNA, 19 bp, Homo sapiens
  siRNA target sequence for LOC148523 (NM_144697.2,1443-1461).
ggtcctcgttgctacagtt

SEQ ID NO: 411464 - DNA, 19 bp, Homo sapiens
  siRNA target sequence for LOC148523 (NM_144697.2,1444-1462).
gtcctcgttgctacagttt

SEQ ID NO: 411465 - DNA, 19 bp, Homo sapiens
  siRNA target sequence for FLJ25124 (NM_144698.2,234-252).
gccagtccccgtttcatct

SEQ ID NO: 411466 - DNA, 19 bp, Homo sapiens
  siRNA target sequence for FLJ25124 (NM_144698.2,283-301).
gactatcctgcttgcaaat

SEQ ID NO: 411467 - DNA, 19 bp, Homo sapiens
  siRNA target sequence for FLJ25124 (NM_144698.2,297-315).
caaatggggctgacatcaa

SEQ ID NO: 411468 - DNA, 19 bp, Homo sapiens
  siRNA target sequence for FLJ25124 (NM_144698.2,370-388).
gccacagtgtgttaaggtt

SEQ ID NO: 411469 - DNA, 19 bp, Homo sapiens
  siRNA target sequence for FLJ25124 (NM_144698.2,603-621).
cccgagttaatgttacaga

SEQ ID NO: 411470 - DNA, 19 bp, Homo sapiens
  siRNA target sequence for FLJ25124 (NM_144698.2,985-1003).
ggagcggaggaaagttgtt

SEQ ID NO: 411471 - DNA, 19 bp, Homo sapiens
  siRNA target sequence for FLJ25124 (NM_144698.2,1251-1269).
ccacagtaaatccagtatt

SEQ ID NO: 411472 - DNA, 19 bp, Homo sapiens
  siRNA target sequence for FLJ25124 (NM_144698.2,1252-1270).
cacagtaaatccagtatta

SEQ ID NO: 411473 - DNA, 19 bp, Homo sapiens
  siRNA target sequence for FLJ25124 (NM_144698.2,1572-1590).
ctgcagtgtggcgagaaaa

SEQ ID NO: 411474 - DNA, 19 bp, Homo sapiens
  siRNA target sequence for FLJ25124 (NM_144698.2,2567-2585).
ctacggcaacacgagaaaa

SEQ ID NO: 411475 - DNA, 19 bp, Homo sapiens
  siRNA target sequence for FLJ25124 (NM_144698.2,2774-2792).
cgctccgagcagtttgaga

SEQ ID NO: 411476 - DNA, 19 bp, Homo sapiens
  siRNA target sequence for FLJ25124 (NM_144698.2,2982-3000).
ccacctacaggaatcatct

SEQ ID NO: 411477 - DNA, 19 bp, Homo sapiens
  siRNA target sequence for FLJ25124 (NM_144698.2,2983-3001).
cacctacaggaatcatcta

SEQ ID NO: 411478 - DNA, 19 bp, Homo sapiens
  siRNA target sequence for FLJ32884 (NM_144702.1,673-691).
cttgtctctgcggaacaat

SEQ ID NO: 411479 - DNA, 19 bp, Homo sapiens
  siRNA target sequence for FLJ32884 (NM_144702.1,678-696).
ctctgcggaacaataacat

SEQ ID NO: 411480 - DNA, 19 bp, Homo sapiens
  siRNA target sequence for FLJ32884 (NM_144702.1,954-972).
gacgcctcctgctggaaaa

SEQ ID NO: 411481 - DNA, 19 bp, Homo sapiens
  siRNA target sequence for FLJ32884 (NM_144702.1,1088-1106).
gacaagacgcagacaatga

SEQ ID NO: 411482 - DNA, 19 bp, Homo sapiens
  siRNA target sequence for FLJ32884 (NM_144702.1,1090-1108).
caagacgcagacaatgaaa

SEQ ID NO: 411483 - DNA, 19 bp, Homo sapiens
  siRNA target sequence for FLJ32884 (NM_144702.1,1272-1290).
gggcaaaagggatcaagat

SEQ ID NO: 411484 - DNA, 19 bp, Homo sapiens
  siRNA target sequence for FLJ32884 (NM_144702.1,1326-1344).
ccgagcagctggttgttga

SEQ ID NO: 411485 - DNA, 19 bp, Homo sapiens
  siRNA target sequence for FLJ32884 (NM_144702.1,1384-1402).
gcaccgagatgggaaagtt

SEQ ID NO: 411486 - DNA, 19 bp, Homo sapiens
  siRNA target sequence for FLJ32884 (NM_144702.1,1385-1403).
caccgagatgggaaagttt

SEQ ID NO: 411487 - DNA, 19 bp, Homo sapiens
  siRNA target sequence for FLJ32884 (NM_144702.1,1413-1431).
ggaacaaggtccttttgca

SEQ ID NO: 411488 - DNA, 19 bp, Homo sapiens
  siRNA target sequence for FLJ32884 (NM_144702.1,1484-1502).
gccacggtgcagtatcaga

SEQ ID NO: 411489 - DNA, 19 bp, Homo sapiens
  siRNA target sequence for FLJ32884 (NM_144702.1,1606-1624).
gcccctatcagctgtcata

SEQ ID NO: 411490 - DNA, 19 bp, Homo sapiens
  siRNA target sequence for FLJ32884 (NM_144702.1,1608-1626).
ccctatcagctgtcatact

SEQ ID NO: 411491 - DNA, 19 bp, Homo sapiens
  siRNA target sequence for FLJ32884 (NM_144702.1,1609-1627).
cctatcagctgtcatacta

SEQ ID NO: 411492 - DNA, 19 bp, Homo sapiens
  siRNA target sequence for C20orf40 (NM_144703.1,454-472).
ccgtttcagagcttgactt

SEQ ID NO: 411493 - DNA, 19 bp, Homo sapiens
  siRNA target sequence for C20orf40 (NM_144703.1,498-516).
gccaaggggtgccttttct

SEQ ID NO: 411494 - DNA, 19 bp, Homo sapiens
  siRNA target sequence for C20orf40 (NM_144703.1,500-518).
caaggggtgccttttctgt

SEQ ID NO: 411495 - DNA, 19 bp, Homo sapiens
  siRNA target sequence for C20orf40 (NM_144703.1,576-594).
ggtcctggaaccttggaaa

SEQ ID NO: 411496 - DNA, 19 bp, Homo sapiens
  siRNA target sequence for C20orf40 (NM_144703.1,681-699).
gctgacaacctgaatgcta

SEQ ID NO: 411497 - DNA, 19 bp, Homo sapiens
  siRNA target sequence for C20orf40 (NM_144703.1,889-907).
ggcaaaaccgtccaactaa

SEQ ID NO: 411498 - DNA, 19 bp, Homo sapiens
  siRNA target sequence for C20orf40 (NM_144703.1,900-918).
ccaactaacgttaaggaaa

SEQ ID NO: 411499 - DNA, 19 bp, Homo sapiens
  siRNA target sequence for C20orf40 (NM_144703.1,901-919).
caactaacgttaaggaaaa

SEQ ID NO: 411500 - DNA, 19 bp, Homo sapiens
  siRNA target sequence for C20orf40 (NM_144703.1,1006-1024).
gacccatactgctacttgt

SEQ ID NO: 411501 - DNA, 19 bp, Homo sapiens
  siRNA target sequence for C20orf40 (NM_144703.1,1009-1027).
ccatactgctacttgtgtt

SEQ ID NO: 411502 - DNA, 19 bp, Homo sapiens
  siRNA target sequence for C20orf40 (NM_144703.1,1010-1028).
catactgctacttgtgttt

SEQ ID NO: 411503 - DNA, 19 bp, Homo sapiens
  siRNA target sequence for C20orf40 (NM_144703.1,1014-1032).
ctgctacttgtgttttgga

SEQ ID NO: 411504 - DNA, 19 bp, Homo sapiens
  siRNA target sequence for MGC29762 (NM_144706.2,405-423).
ctcaactctggggaagtta

SEQ ID NO: 411505 - DNA, 19 bp, Homo sapiens
  siRNA target sequence for MGC29762 (NM_144706.2,410-428).
ctctggggaagttaagtaa

SEQ ID NO: 411506 - DNA, 19 bp, Homo sapiens
  siRNA target sequence for MGC29762 (NM_144706.2,414-432).
ggggaagttaagtaatcaa

SEQ ID NO: 411507 - DNA, 19 bp, Homo sapiens
  siRNA target sequence for MGC29762 (NM_144706.2,443-461).
cacttccactacttaaaaa

SEQ ID NO: 411508 - DNA, 19 bp, Homo sapiens
  siRNA target sequence for MGC29762 (NM_144706.2,462-480).
ggtacctgcaaattacttt

SEQ ID NO: 411509 - DNA, 19 bp, Homo sapiens
  siRNA target sequence for MGC29762 (NM_144706.2,498-516).
cctaatgggattttcactt

SEQ ID NO: 411510 - DNA, 19 bp, Homo sapiens
  siRNA target sequence for MGC29762 (NM_144706.2,499-517).
ctaatgggattttcactta

SEQ ID NO: 411511 - DNA, 19 bp, Homo sapiens
  siRNA target sequence for MGC29762 (NM_144706.2,564-582).
ggatgatcacttaatacga

SEQ ID NO: 411512 - DNA, 19 bp, Homo sapiens
  siRNA target sequence for MGC29762 (NM_144706.2,603-621).
ggaaccagcgactcagtta

SEQ ID NO: 411513 - DNA, 19 bp, Homo sapiens
  siRNA target sequence for MGC29762 (NM_144706.2,604-622).
gaaccagcgactcagttat

SEQ ID NO: 411514 - DNA, 19 bp, Homo sapiens
  siRNA target sequence for MGC29762 (NM_144706.2,608-626).
cagcgactcagttatttca

SEQ ID NO: 411515 - DNA, 19 bp, Homo sapiens
  siRNA target sequence for MGC29762 (NM_144706.2,610-628).
gcgactcagttatttcaaa

SEQ ID NO: 411516 - DNA, 19 bp, Homo sapiens
  siRNA target sequence for MGC29762 (NM_144706.2,611-629).
cgactcagttatttcaaaa

SEQ ID NO: 411517 - DNA, 19 bp, Homo sapiens
  siRNA target sequence for MGC29762 (NM_144706.2,716-734).
ccttgggttcagtggtata

SEQ ID NO: 411518 - DNA, 19 bp, Homo sapiens
  siRNA target sequence for MGC29762 (NM_144706.2,722-740).
gttcagtggtatatgtcaa

SEQ ID NO: 411519 - DNA, 19 bp, Homo sapiens
  siRNA target sequence for MGC29762 (NM_144706.2,729-747).
ggtatatgtcaaagaaagt

SEQ ID NO: 411520 - DNA, 19 bp, Homo sapiens
  siRNA target sequence for FLJ32312 (NM_144709.1,117-135).
ccagttgttgctcaatact

SEQ ID NO: 411521 - DNA, 19 bp, Homo sapiens
  siRNA target sequence for FLJ32312 (NM_144709.1,126-144).
gctcaatactggtacttgt

SEQ ID NO: 411522 - DNA, 19 bp, Homo sapiens
  siRNA target sequence for FLJ32312 (NM_144709.1,136-154).
ggtacttgtccaagatgta

SEQ ID NO: 411523 - DNA, 19 bp, Homo sapiens
  siRNA target sequence for FLJ32312 (NM_144709.1,137-155).
gtacttgtccaagatgtat

SEQ ID NO: 411524 - DNA, 19 bp, Homo sapiens
  siRNA target sequence for FLJ32312 (NM_144709.1,140-158).
cttgtccaagatgtatctt

SEQ ID NO: 411525 - DNA, 19 bp, Homo sapiens
  siRNA target sequence for FLJ32312 (NM_144709.1,185-203).
caccttacaaacttccata

SEQ ID NO: 411526 - DNA, 19 bp, Homo sapiens
  siRNA target sequence for FLJ32312 (NM_144709.1,204-222).
caaggagttgctcaatgaa

SEQ ID NO: 411527 - DNA, 19 bp, Homo sapiens
  siRNA target sequence for FLJ32312 (NM_144709.1,207-225).
ggagttgctcaatgaacta

SEQ ID NO: 411528 - DNA, 19 bp, Homo sapiens
  siRNA target sequence for FLJ32312 (NM_144709.1,317-335).
gtattgataatctaagtca

SEQ ID NO: 411529 - DNA, 19 bp, Homo sapiens
  siRNA target sequence for FLJ32312 (NM_144709.1,343-361).
gagggaaggatctctgtta

SEQ ID NO: 411530 - DNA, 19 bp, Homo sapiens
  siRNA target sequence for FLJ32312 (NM_144709.1,390-408).
ctcaaatttaaatgtatgt

SEQ ID NO: 411531 - DNA, 19 bp, Homo sapiens
  siRNA target sequence for FLJ32312 (NM_144709.1,407-425).
gtaatgtatgcctaggaat

SEQ ID NO: 411532 - DNA, 19 bp, Homo sapiens
  siRNA target sequence for FLJ32312 (NM_144709.1,522-540).
cttcccaccacaactatct

SEQ ID NO: 411533 - DNA, 19 bp, Homo sapiens
  siRNA target sequence for FLJ32312 (NM_144709.1,525-543).
cccaccacaactatctgta

SEQ ID NO: 411534 - DNA, 19 bp, Homo sapiens
  siRNA target sequence for FLJ32312 (NM_144709.1,530-548).
cacaactatctgtaagaga

SEQ ID NO: 411535 - DNA, 19 bp, Homo sapiens
  siRNA target sequence for FLJ32312 (NM_144709.1,557-575).
catggttgctggtaaaaca

SEQ ID NO: 411536 - DNA, 19 bp, Homo sapiens
  siRNA target sequence for FLJ32312 (NM_144709.1,763-781).
gcgatatgcccagattgtt

SEQ ID NO: 411537 - DNA, 19 bp, Homo sapiens
  siRNA target sequence for FLJ32312 (NM_144709.1,764-782).
cgatatgcccagattgttt

SEQ ID NO: 411538 - DNA, 19 bp, Homo sapiens
  siRNA target sequence for FLJ32312 (NM_144709.1,904-922).
gtatgcgctgttcttgaaa

SEQ ID NO: 411539 - DNA, 19 bp, Homo sapiens
  siRNA target sequence for FLJ32312 (NM_144709.1,908-926).
gcgctgttcttgaaattga

SEQ ID NO: 411540 - DNA, 19 bp, Homo sapiens
  siRNA target sequence for FLJ32312 (NM_144709.1,909-927).
cgctgttcttgaaattgaa

SEQ ID NO: 411541 - DNA, 19 bp, Homo sapiens
  siRNA target sequence for FLJ32312 (NM_144709.1,929-947).
gtgctcatggtgctgtttt

SEQ ID NO: 411542 - DNA, 19 bp, Homo sapiens
  siRNA target sequence for FLJ32312 (NM_144709.1,949-967).
gtggctgggagatataata

SEQ ID NO: 411543 - DNA, 19 bp, Homo sapiens
  siRNA target sequence for FLJ32312 (NM_144709.1,1111-1129).
gatgtagatgtgagaacat

SEQ ID NO: 411544 - DNA, 19 bp, Homo sapiens
  siRNA target sequence for FLJ32312 (NM_144709.1,1161-1179).
ggtgaatcctcatagagta

SEQ ID NO: 411545 - DNA, 19 bp, Homo sapiens
  siRNA target sequence for FLJ32312 (NM_144709.1,1275-1293).
ggcaataggacatatgaaa

SEQ ID NO: 411546 - DNA, 19 bp, Homo sapiens
  siRNA target sequence for FLJ32312 (NM_144709.1,1277-1295).
caataggacatatgaaaga

SEQ ID NO: 411547 - DNA, 19 bp, Homo sapiens
  siRNA target sequence for FLJ32312 (NM_144709.1,1317-1335).
gacctacagtgccttaatt

SEQ ID NO: 411548 - DNA, 19 bp, Homo sapiens
  siRNA target sequence for FLJ32312 (NM_144709.1,1450-1468).
cgagctcgcgtcattcact

SEQ ID NO: 411549 - DNA, 19 bp, Homo sapiens
  siRNA target sequence for FLJ32312 (NM_144709.1,1451-1469).
gagctcgcgtcattcactt

SEQ ID NO: 411550 - DNA, 19 bp, Homo sapiens
  siRNA target sequence for FLJ32312 (NM_144709.1,1454-1472).
ctcgcgtcattcacttcat

SEQ ID NO: 411551 - DNA, 19 bp, Homo sapiens
  siRNA target sequence for FLJ32312 (NM_144709.1,1524-1542).
ggctggcacctacattaaa

SEQ ID NO: 411552 - DNA, 19 bp, Homo sapiens
  siRNA target sequence for FLJ32312 (NM_144709.1,1528-1546).
ggcacctacattaaagagt

SEQ ID NO: 411553 - DNA, 19 bp, Homo sapiens
  siRNA target sequence for FLJ32312 (NM_144709.1,1565-1583).
ggagaaccaagccaaacat

SEQ ID NO: 411554 - DNA, 19 bp, Homo sapiens
  siRNA target sequence for FLJ32312 (NM_144709.1,1566-1584).
gagaaccaagccaaacatt

SEQ ID NO: 411555 - DNA, 19 bp, Homo sapiens
  siRNA target sequence for FLJ32312 (NM_144709.1,1581-1599).
cattgggtccctgatgaat

SEQ ID NO: 411556 - DNA, 19 bp, Homo sapiens
  siRNA target sequence for FLJ32312 (NM_144709.1,1585-1603).
gggtccctgatgaatgtga

SEQ ID NO: 411557 - DNA, 19 bp, Homo sapiens
  siRNA target sequence for MGC22679 (NM_144711.3,151-169).
gcattcagaacattttact

SEQ ID NO: 411558 - DNA, 19 bp, Homo sapiens
  siRNA target sequence for MGC22679 (NM_144711.3,171-189).
ggatggattatttactgat

SEQ ID NO: 411559 - DNA, 19 bp, Homo sapiens
  siRNA target sequence for MGC22679 (NM_144711.3,201-219).
gtgtccttcaggcataatt

SEQ ID NO: 411560 - DNA, 19 bp, Homo sapiens
  siRNA target sequence for MGC22679 (NM_144711.3,244-262).
gctgcttgcagcaattatt

SEQ ID NO: 411561 - DNA, 19 bp, Homo sapiens
  siRNA target sequence for MGC22679 (NM_144711.3,340-358).
ctggaaggccttgtaaatt

SEQ ID NO: 411562 - DNA, 19 bp, Homo sapiens
  siRNA target sequence for MGC22679 (NM_144711.3,366-384).
cacttcccaaattgaaata

SEQ ID NO: 411563 - DNA, 19 bp, Homo sapiens
  siRNA target sequence for MGC22679 (NM_144711.3,421-439).
gatctgctacagttccttt

SEQ ID NO: 411564 - DNA, 19 bp, Homo sapiens
  siRNA target sequence for MGC22679 (NM_144711.3,426-444).
gctacagttcctttcagta

SEQ ID NO: 411565 - DNA, 19 bp, Homo sapiens
  siRNA target sequence for MGC22679 (NM_144711.3,468-486).
ggtaaggcacttggatatt

SEQ ID NO: 411566 - DNA, 19 bp, Homo sapiens
  siRNA target sequence for MGC22679 (NM_144711.3,474-492).
gcacttggatattgataat

SEQ ID NO: 411567 - DNA, 19 bp, Homo sapiens
  siRNA target sequence for MGC22679 (NM_144711.3,504-522).
gcactcctttgcagaattt

SEQ ID NO: 411568 - DNA, 19 bp, Homo sapiens
  siRNA target sequence for MGC22679 (NM_144711.3,546-564).
ggaatctcgaagaattcta

SEQ ID NO: 411569 - DNA, 19 bp, Homo sapiens
  siRNA target sequence for MGC22679 (NM_144711.3,674-692).
ctatcatagagccagttat

SEQ ID NO: 411570 - DNA, 19 bp, Homo sapiens
  siRNA target sequence for MGC22679 (NM_144711.3,696-714).
gtggactgctcatgatgta

SEQ ID NO: 411571 - DNA, 19 bp, Homo sapiens
  siRNA target sequence for MGC22679 (NM_144711.3,699-717).
gactgctcatgatgtagaa

SEQ ID NO: 411572 - DNA, 19 bp, Homo sapiens
  siRNA target sequence for MGC22679 (NM_144711.3,742-760).
ctactgagctatatcaaca

SEQ ID NO: 411573 - DNA, 19 bp, Homo sapiens
  siRNA target sequence for MGC22679 (NM_144711.3,747-765).
gagctatatcaacattgat

SEQ ID NO: 411574 - DNA, 19 bp, Homo sapiens
  siRNA target sequence for MGC22679 (NM_144711.3,810-828).
ctgcctgctcaccgaaaat

SEQ ID NO: 411575 - DNA, 19 bp, Homo sapiens
  siRNA target sequence for MGC22679 (NM_144711.3,834-852).
ccgctccctaatatacaat

SEQ ID NO: 411576 - DNA, 19 bp, Homo sapiens
  siRNA target sequence for MGC22679 (NM_144711.3,887-905).
ggtccacagccacaatgta

SEQ ID NO: 411577 - DNA, 19 bp, Homo sapiens
  siRNA target sequence for MGC22679 (NM_144711.3,888-906).
gtccacagccacaatgtat

SEQ ID NO: 411578 - DNA, 19 bp, Homo sapiens
  siRNA target sequence for MGC22679 (NM_144711.3,897-915).
cacaatgtatataattgga

SEQ ID NO: 411579 - DNA, 19 bp, Homo sapiens
  siRNA target sequence for MGC22679 (NM_144711.3,948-966).
catatgggatcctttgaca

SEQ ID NO: 411580 - DNA, 19 bp, Homo sapiens
  siRNA target sequence for MGC22679 (NM_144711.3,1011-1029).
gagctatggtgttacatgt

SEQ ID NO: 411581 - DNA, 19 bp, Homo sapiens
  siRNA target sequence for MGC22679 (NM_144711.3,1013-1031).
gctatggtgttacatgttt

SEQ ID NO: 411582 - DNA, 19 bp, Homo sapiens
  siRNA target sequence for MGC22679 (NM_144711.3,1014-1032).
ctatggtgttacatgttta

SEQ ID NO: 411583 - DNA, 19 bp, Homo sapiens
  siRNA target sequence for MGC22679 (NM_144711.3,1028-1046).
gtttaggacccaacattta

SEQ ID NO: 411584 - DNA, 19 bp, Homo sapiens
  siRNA target sequence for MGC22679 (NM_144711.3,1057-1075).
ggctacaggacggataaca

SEQ ID NO: 411585 - DNA, 19 bp, Homo sapiens
  siRNA target sequence for MGC22679 (NM_144711.3,1059-1077).
ctacaggacggataacata

SEQ ID NO: 411586 - DNA, 19 bp, Homo sapiens
  siRNA target sequence for MGC22679 (NM_144711.3,1062-1080).
caggacggataacatagaa

SEQ ID NO: 411587 - DNA, 19 bp, Homo sapiens
  siRNA target sequence for MGC22679 (NM_144711.3,1087-1105).
gacacagtgtggatctata

SEQ ID NO: 411588 - DNA, 19 bp, Homo sapiens
  siRNA target sequence for MGC22679 (NM_144711.3,1098-1116).
gatctataacagtgaaagt

SEQ ID NO: 411589 - DNA, 19 bp, Homo sapiens
  siRNA target sequence for MGC22679 (NM_144711.3,1180-1198).
ggtggctgtgtctatgctt

SEQ ID NO: 411590 - DNA, 19 bp, Homo sapiens
  siRNA target sequence for MGC22679 (NM_144711.3,1181-1199).
gtggctgtgtctatgcttt

SEQ ID NO: 411591 - DNA, 19 bp, Homo sapiens
  siRNA target sequence for MGC22679 (NM_144711.3,1185-1203).
ctgtgtctatgctttaggt

SEQ ID NO: 411592 - DNA, 19 bp, Homo sapiens
  siRNA target sequence for MGC22679 (NM_144711.3,1260-1278).
gaaatggattcctattgca

SEQ ID NO: 411593 - DNA, 19 bp, Homo sapiens
  siRNA target sequence for MGC22679 (NM_144711.3,1265-1283).
ggattcctattgcaaacat

SEQ ID NO: 411594 - DNA, 19 bp, Homo sapiens
  siRNA target sequence for MGC22679 (NM_144711.3,1307-1325).
ctgcctgtgtcttacatga

SEQ ID NO: 411595 - DNA, 19 bp, Homo sapiens
  siRNA target sequence for MGC22679 (NM_144711.3,1311-1329).
ctgtgtcttacatgatgtt

SEQ ID NO: 411596 - DNA, 19 bp, Homo sapiens
  siRNA target sequence for MGC22679 (NM_144711.3,1315-1333).
gtcttacatgatgttatct

SEQ ID NO: 411597 - DNA, 19 bp, Homo sapiens
  siRNA target sequence for MGC22679 (NM_144711.3,1364-1382).
gaagctgcacctatgacaa

SEQ ID NO: 411598 - DNA, 19 bp, Homo sapiens
  siRNA target sequence for MGC22679 (NM_144711.3,1391-1409).
gctacaattccgatatcaa

SEQ ID NO: 411599 - DNA, 19 bp, Homo sapiens
  siRNA target sequence for MGC22679 (NM_144711.3,1435-1453).
ccacatccagaatatggat

SEQ ID NO: 411600 - DNA, 19 bp, Homo sapiens
  siRNA target sequence for MGC22679 (NM_144711.3,1455-1473).
gtgctcagttccgtttgaa

SEQ ID NO: 411601 - DNA, 19 bp, Homo sapiens
  siRNA target sequence for MGC22679 (NM_144711.3,1457-1475).
gctcagttccgtttgaaaa

SEQ ID NO: 411602 - DNA, 19 bp, Homo sapiens
  siRNA target sequence for MGC22679 (NM_144711.3,1458-1476).
ctcagttccgtttgaaaat

SEQ ID NO: 411603 - DNA, 19 bp, Homo sapiens
  siRNA target sequence for MGC22679 (NM_144711.3,1517-1535).
gctatgaccctgaacaaaa

SEQ ID NO: 411604 - DNA, 19 bp, Homo sapiens
  siRNA target sequence for MGC22679 (NM_144711.3,1581-1599).
cggtgccgtcatcatgaat

SEQ ID NO: 411605 - DNA, 19 bp, Homo sapiens
  siRNA target sequence for MGC22679 (NM_144711.3,1585-1603).
gccgtcatcatgaatggat

SEQ ID NO: 411606 - DNA, 19 bp, Homo sapiens
  siRNA target sequence for MGC22679 (NM_144711.3,1590-1608).
catcatgaatggatgtatt

SEQ ID NO: 411607 - DNA, 19 bp, Homo sapiens
  siRNA target sequence for MGC22679 (NM_144711.3,1618-1636).
ggaggatactcctactcaa

SEQ ID NO: 411608 - DNA, 19 bp, Homo sapiens
  siRNA target sequence for MGC22679 (NM_144711.3,1629-1647).
ctactcaaagggaacgtat

SEQ ID NO: 411609 - DNA, 19 bp, Homo sapiens
  siRNA target sequence for MGC22679 (NM_144711.3,1632-1650).
ctcaaagggaacgtatctt

SEQ ID NO: 411610 - DNA, 19 bp, Homo sapiens
  siRNA target sequence for MGC22679 (NM_144711.3,1634-1652).
caaagggaacgtatcttca

SEQ ID NO: 411611 - DNA, 19 bp, Homo sapiens
  siRNA target sequence for MGC22679 (NM_144711.3,1653-1671).
gagcattgagaaatatgat

SEQ ID NO: 411612 - DNA, 19 bp, Homo sapiens
  siRNA target sequence for MGC22679 (NM_144711.3,1688-1706).
gggaaatagtgggtaatct

SEQ ID NO: 411613 - DNA, 19 bp, Homo sapiens
  siRNA target sequence for FLJ32954 (NM_144713.1,153-171).
gagcttccaacgatgttct

SEQ ID NO: 411614 - DNA, 19 bp, Homo sapiens
  siRNA target sequence for FLJ32954 (NM_144713.1,202-220).
catcgtggagcctcttcta

SEQ ID NO: 411615 - DNA, 19 bp, Homo sapiens
  siRNA target sequence for FLJ32954 (NM_144713.1,224-242).
cacaaccaagtatatctct

SEQ ID NO: 411616 - DNA, 19 bp, Homo sapiens
  siRNA target sequence for FLJ32954 (NM_144713.1,233-251).
gtatatctcttggtcataa

SEQ ID NO: 411617 - DNA, 19 bp, Homo sapiens
  siRNA target sequence for FLJ32954 (NM_144713.1,241-259).
cttggtcataaaacatctt

SEQ ID NO: 411618 - DNA, 19 bp, Homo sapiens
  siRNA target sequence for FLJ32954 (NM_144713.1,280-298).
gtcaatgcagccaaagcaa

SEQ ID NO: 411619 - DNA, 19 bp, Homo sapiens
  siRNA target sequence for FLJ32954 (NM_144713.1,286-304).
gcagccaaagcaagtagaa

SEQ ID NO: 411620 - DNA, 19 bp, Homo sapiens
  siRNA target sequence for FLJ32954 (NM_144713.1,291-309).
caaagcaagtagaaggtta

SEQ ID NO: 411621 - DNA, 19 bp, Homo sapiens
  siRNA target sequence for FLJ32954 (NM_144713.1,299-317).
gtagaaggttattatctgt

SEQ ID NO: 411622 - DNA, 19 bp, Homo sapiens
  siRNA target sequence for FLJ32954 (NM_144713.1,314-332).
ctgtatcaagtccatcttt

SEQ ID NO: 411623 - DNA, 19 bp, Homo sapiens
  siRNA target sequence for FLJ32954 (NM_144713.1,385-403).
ccttactggcaacaaagta

SEQ ID NO: 411624 - DNA, 19 bp, Homo sapiens
  siRNA target sequence for FLJ32954 (NM_144713.1,433-451).
ggcttcactgatataaaat

SEQ ID NO: 411625 - DNA, 19 bp, Homo sapiens
  siRNA target sequence for FLJ32954 (NM_144713.1,462-480).
ccattgtggtagctttatt

SEQ ID NO: 411626 - DNA, 19 bp, Homo sapiens
  siRNA target sequence for FLJ32954 (NM_144713.1,463-481).
cattgtggtagctttattt

SEQ ID NO: 411627 - DNA, 19 bp, Homo sapiens
  siRNA target sequence for FLJ32954 (NM_144713.1,483-501).
ccgcagaagacgtttctca

SEQ ID NO: 411628 - DNA, 19 bp, Homo sapiens
  siRNA target sequence for FLJ32954 (NM_144713.1,494-512).
gtttctcatcccgtaaact

SEQ ID NO: 411629 - DNA, 19 bp, Homo sapiens
  siRNA target sequence for FLJ32954 (NM_144713.1,498-516).
ctcatcccgtaaactaagt

SEQ ID NO: 411630 - DNA, 19 bp, Homo sapiens
  siRNA target sequence for FLJ32954 (NM_144713.1,500-518).
catcccgtaaactaagtat

SEQ ID NO: 411631 - DNA, 19 bp, Homo sapiens
  siRNA target sequence for FLJ32954 (NM_144713.1,503-521).
cccgtaaactaagtatagt

SEQ ID NO: 411632 - DNA, 19 bp, Homo sapiens
  siRNA target sequence for FLJ32954 (NM_144713.1,504-522).
ccgtaaactaagtatagtt

SEQ ID NO: 411633 - DNA, 19 bp, Homo sapiens
  siRNA target sequence for FLJ32954 (NM_144713.1,505-523).
cgtaaactaagtatagttt

SEQ ID NO: 411634 - DNA, 19 bp, Homo sapiens
  siRNA target sequence for FLJ32954 (NM_144713.1,515-533).
gtatagtttcctattacaa

SEQ ID NO: 411635 - DNA, 19 bp, Homo sapiens
  siRNA target sequence for FLJ32954 (NM_144713.1,583-601).
ctaaatgaaatcgaaatct

SEQ ID NO: 411636 - DNA, 19 bp, Homo sapiens
  siRNA target sequence for FLJ32954 (NM_144713.1,589-607).
gaaatcgaaatcttttcta

SEQ ID NO: 411637 - DNA, 19 bp, Homo sapiens
  siRNA target sequence for FLJ32954 (NM_144713.1,645-663).
catctctgctcctgaatat

SEQ ID NO: 411638 - DNA, 19 bp, Homo sapiens
  siRNA target sequence for FLJ32954 (NM_144713.1,653-671).
ctcctgaatataacactaa

SEQ ID NO: 411639 - DNA, 19 bp, Homo sapiens
  siRNA target sequence for FLJ32954 (NM_144713.1,707-725).
cagcctttgggaacactat

SEQ ID NO: 411640 - DNA, 19 bp, Homo sapiens
  siRNA target sequence for FLJ32954 (NM_144713.1,711-729).
ctttgggaacactattgat

SEQ ID NO: 411641 - DNA, 19 bp, Homo sapiens
  siRNA target sequence for FLJ32954 (NM_144713.1,769-787).
cttgcaagtgatatttcct

SEQ ID NO: 411642 - DNA, 19 bp, Homo sapiens
  siRNA target sequence for FLJ32954 (NM_144713.1,826-844).
caaaggggccaattatgta

SEQ ID NO: 411643 - DNA, 19 bp, Homo sapiens
  siRNA target sequence for FLJ32954 (NM_144713.1,830-848).
ggggccaattatgtaaaga

SEQ ID NO: 411644 - DNA, 19 bp, Homo sapiens
  siRNA target sequence for FLJ32954 (NM_144713.1,832-850).
ggccaattatgtaaagatt

SEQ ID NO: 411645 - DNA, 19 bp, Homo sapiens
  siRNA target sequence for FLJ32954 (NM_144713.1,833-851).
gccaattatgtaaagattt

SEQ ID NO: 411646 - DNA, 19 bp, Homo sapiens
  siRNA target sequence for FLJ32954 (NM_144713.1,865-883).
catcctcgtcctgaaagtt

SEQ ID NO: 411647 - DNA, 19 bp, Homo sapiens
  siRNA target sequence for FLJ32954 (NM_144713.1,868-886).
cctcgtcctgaaagttaca

SEQ ID NO: 411648 - DNA, 19 bp, Homo sapiens
  siRNA target sequence for FLJ32954 (NM_144713.1,1000-1018).
ccacctcaaagcgaattaa

SEQ ID NO: 411649 - DNA, 19 bp, Homo sapiens
  siRNA target sequence for FLJ32954 (NM_144713.1,1104-1122).
gtatattacagctaatact

SEQ ID NO: 411650 - DNA, 19 bp, Homo sapiens
  siRNA target sequence for FLJ32954 (NM_144713.1,1145-1163).
cagtccctaaggcatttaa

SEQ ID NO: 411651 - DNA, 19 bp, Homo sapiens
  siRNA target sequence for FLJ32954 (NM_144713.1,1147-1165).
gtccctaaggcatttaaca

SEQ ID NO: 411652 - DNA, 19 bp, Homo sapiens
  siRNA target sequence for FLJ32954 (NM_144713.1,1235-1253).
gcaagtcggagagttttga

SEQ ID NO: 411653 - DNA, 19 bp, Homo sapiens
  siRNA target sequence for FLJ32954 (NM_144713.1,1239-1257).
gtcggagagttttgaacta

SEQ ID NO: 411654 - DNA, 19 bp, Homo sapiens
  siRNA target sequence for FLJ32954 (NM_144713.1,1241-1259).
cggagagttttgaactact

SEQ ID NO: 411655 - DNA, 19 bp, Homo sapiens
  siRNA target sequence for FLJ32954 (NM_144713.1,1242-1260).
ggagagttttgaactactt

SEQ ID NO: 411656 - DNA, 19 bp, Homo sapiens
  siRNA target sequence for FLJ32954 (NM_144713.1,1261-1279).
cgtgaccacaaagaaaagt

SEQ ID NO: 411657 - DNA, 19 bp, Homo sapiens
  siRNA target sequence for FLJ32954 (NM_144713.1,1296-1314).
gtttatgtggcgatttgct

SEQ ID NO: 411658 - DNA, 19 bp, Homo sapiens
  siRNA target sequence for FLJ32954 (NM_144713.1,1305-1323).
gcgatttgctcgtgcttat

SEQ ID NO: 411659 - DNA, 19 bp, Homo sapiens
  siRNA target sequence for FLJ32954 (NM_144713.1,1316-1334).
gtgcttatggagacatgta

SEQ ID NO: 411660 - DNA, 19 bp, Homo sapiens
  siRNA target sequence for FLJ32954 (NM_144713.1,1319-1337).
cttatggagacatgtatga

SEQ ID NO: 411661 - DNA, 19 bp, Homo sapiens
  siRNA target sequence for FLJ32954 (NM_144713.1,1324-1342).
ggagacatgtatgaactat

SEQ ID NO: 411662 - DNA, 19 bp, Homo sapiens
  siRNA target sequence for FLJ32954 (NM_144713.1,1366-1384).
cattatgctaatattggaa

SEQ ID NO: 411663 - DNA, 19 bp, Homo sapiens
  siRNA target sequence for FLJ32954 (NM_144713.1,1372-1390).
gctaatattggaaaaactt

SEQ ID NO: 411664 - DNA, 19 bp, Homo sapiens
  siRNA target sequence for FLJ32954 (NM_144713.1,1373-1391).
ctaatattggaaaaacttt

SEQ ID NO: 411665 - DNA, 19 bp, Homo sapiens
  siRNA target sequence for FLJ32954 (NM_144713.1,1438-1456).
ctgtggtatgcagttttgt

SEQ ID NO: 411666 - DNA, 19 bp, Homo sapiens
  siRNA target sequence for FLJ32954 (NM_144713.1,1469-1487).
ctgagtttgagggtttaca

SEQ ID NO: 411667 - DNA, 19 bp, Homo sapiens
  siRNA target sequence for FLJ32954 (NM_144713.1,1518-1536).
ggaacatctagatatagca

SEQ ID NO: 411668 - DNA, 19 bp, Homo sapiens
  siRNA target sequence for FLJ32954 (NM_144713.1,1580-1598).
ggagatactgctatactgt

SEQ ID NO: 411669 - DNA, 19 bp, Homo sapiens
  siRNA target sequence for FLJ32954 (NM_144713.1,1589-1607).
gctatactgtctcaaaact

SEQ ID NO: 411670 - DNA, 19 bp, Homo sapiens
  siRNA target sequence for FLJ32954 (NM_144713.1,1669-1687).
caagaagctttacacaatt

SEQ ID NO: 411671 - DNA, 19 bp, Homo sapiens
  siRNA target sequence for FLJ32954 (NM_144713.1,1702-1720).
gaactatgccctggttatt

SEQ ID NO: 411672 - DNA, 19 bp, Homo sapiens
  siRNA target sequence for FLJ32954 (NM_144713.1,1705-1723).
ctatgccctggttattcta

SEQ ID NO: 411673 - DNA, 19 bp, Homo sapiens
  siRNA target sequence for FLJ32954 (NM_144713.1,1715-1733).
gttattctaatcccaatta

SEQ ID NO: 411674 - DNA, 19 bp, Homo sapiens
  siRNA target sequence for FLJ32954 (NM_144713.1,1721-1739).
ctaatcccaattacatgta

SEQ ID NO: 411675 - DNA, 19 bp, Homo sapiens
  siRNA target sequence for FLJ32954 (NM_144713.1,1734-1752).
catgtacttagcaaagtgt

SEQ ID NO: 411676 - DNA, 19 bp, Homo sapiens
  siRNA target sequence for FLJ32954 (NM_144713.1,1757-1775).
ctgatcttgaggaaaacca

SEQ ID NO: 411677 - DNA, 19 bp, Homo sapiens
  siRNA target sequence for FLJ32954 (NM_144713.1,1793-1811).
gtaatttggctttattgct

SEQ ID NO: 411678 - DNA, 19 bp, Homo sapiens
  siRNA target sequence for MGC23918 (NM_144716.1,58-76).
ggcgttgcggcgaaaggaa

SEQ ID NO: 411679 - DNA, 19 bp, Homo sapiens
  siRNA target sequence for MGC23918 (NM_144716.1,170-188).
gagaagcacagggaactta

SEQ ID NO: 411680 - DNA, 19 bp, Homo sapiens
  siRNA target sequence for LOC152185 (NM_144718.2,291-309).
ccccgagttggtgtaagaa

SEQ ID NO: 411681 - DNA, 19 bp, Homo sapiens
  siRNA target sequence for LOC152185 (NM_144718.2,292-310).
cccgagttggtgtaagaaa

SEQ ID NO: 411682 - DNA, 19 bp, Homo sapiens
  siRNA target sequence for LOC152185 (NM_144718.2,294-312).
cgagttggtgtaagaaaga

SEQ ID NO: 411683 - DNA, 19 bp, Homo sapiens
  siRNA target sequence for LOC152185 (NM_144718.2,307-325).
gaaagacaccgaaagtaaa

SEQ ID NO: 411684 - DNA, 19 bp, Homo sapiens
  siRNA target sequence for LOC152185 (NM_144718.2,344-362).
gaaacaagaatgggataat

SEQ ID NO: 411685 - DNA, 19 bp, Homo sapiens
  siRNA target sequence for LOC152185 (NM_144718.2,405-423).
ctggtacgccgtcatgaaa

SEQ ID NO: 411686 - DNA, 19 bp, Homo sapiens
  siRNA target sequence for LOC152185 (NM_144718.2,407-425).
ggtacgccgtcatgaaata

SEQ ID NO: 411687 - DNA, 19 bp, Homo sapiens
  siRNA target sequence for LOC152185 (NM_144718.2,412-430).
gccgtcatgaaatacacaa

SEQ ID NO: 411688 - DNA, 19 bp, Homo sapiens
  siRNA target sequence for LOC152185 (NM_144718.2,413-431).
ccgtcatgaaatacacaaa

SEQ ID NO: 411689 - DNA, 19 bp, Homo sapiens
  siRNA target sequence for LOC152185 (NM_144718.2,414-432).
cgtcatgaaatacacaaat

SEQ ID NO: 411690 - DNA, 19 bp, Homo sapiens
  siRNA target sequence for LOC152185 (NM_144718.2,433-451).
cgaagaatagagcattagt

SEQ ID NO: 411691 - DNA, 19 bp, Homo sapiens
  siRNA target sequence for LOC152185 (NM_144718.2,434-452).
gaagaatagagcattagta

SEQ ID NO: 411692 - DNA, 19 bp, Homo sapiens
  siRNA target sequence for LOC152185 (NM_144718.2,584-602).
gttggagaaatctgatcat

SEQ ID NO: 411693 - DNA, 19 bp, Homo sapiens
  siRNA target sequence for LOC152185 (NM_144718.2,590-608).
gaaatctgatcatctaata

SEQ ID NO: 411694 - DNA, 19 bp, Homo sapiens
  siRNA target sequence for LOC152185 (NM_144718.2,637-655).
ggcgcacagggtttccaaa

SEQ ID NO: 411695 - DNA, 19 bp, Homo sapiens
  siRNA target sequence for LOC152185 (NM_144718.2,638-656).
gcgcacagggtttccaaat

SEQ ID NO: 411696 - DNA, 19 bp, Homo sapiens
  siRNA target sequence for LOC152185 (NM_144718.2,646-664).
ggtttccaaatgtaacagt

SEQ ID NO: 411697 - DNA, 19 bp, Homo sapiens
  siRNA target sequence for LOC152185 (NM_144718.2,683-701).
gggtcccattgtggtaaat

SEQ ID NO: 411698 - DNA, 19 bp, Homo sapiens
  siRNA target sequence for LOC152185 (NM_144718.2,685-703).
gtcccattgtggtaaatca

SEQ ID NO: 411699 - DNA, 19 bp, Homo sapiens
  siRNA target sequence for LOC152185 (NM_144718.2,705-723).
gaccctatcacccaatcta

SEQ ID NO: 411700 - DNA, 19 bp, Homo sapiens
  siRNA target sequence for LOC152185 (NM_144718.2,717-735).
caatctatctttaatgagt

SEQ ID NO: 411701 - DNA, 19 bp, Homo sapiens
  siRNA target sequence for LOC152185 (NM_144718.2,821-839).
gaatgagttggataactct

SEQ ID NO: 411702 - DNA, 19 bp, Homo sapiens
  siRNA target sequence for LOC152185 (NM_144718.2,825-843).
gagttggataactctctaa

SEQ ID NO: 411703 - DNA, 19 bp, Homo sapiens
  siRNA target sequence for LOC152185 (NM_144718.2,840-858).
ctaaactctcagtctaaca

SEQ ID NO: 411704 - DNA, 19 bp, Homo sapiens
  siRNA target sequence for LOC152185 (NM_144718.2,869-887).
caggtttctccaacaacta

SEQ ID NO: 411705 - DNA, 19 bp, Homo sapiens
  siRNA target sequence for LOC152185 (NM_144718.2,872-890).
gtttctccaacaactaaca

SEQ ID NO: 411706 - DNA, 19 bp, Homo sapiens
  siRNA target sequence for LOC152185 (NM_144718.2,903-921).
gagttaattagtaagttgt

SEQ ID NO: 411707 - DNA, 19 bp, Homo sapiens
  siRNA target sequence for LOC152185 (NM_144718.2,1104-1122).
ggacacgtgctgaactcaa

SEQ ID NO: 411708 - DNA, 19 bp, Homo sapiens
  siRNA target sequence for LOC152185 (NM_144718.2,1230-1248).
ccaaataggactaattcca

SEQ ID NO: 411709 - DNA, 19 bp, Homo sapiens
  siRNA target sequence for LOC152185 (NM_144718.2,1231-1249).
caaataggactaattccaa

SEQ ID NO: 411710 - DNA, 19 bp, Homo sapiens
  siRNA target sequence for LOC152185 (NM_144718.2,1340-1358).
gagcagtcagggtcttaca

SEQ ID NO: 411711 - DNA, 19 bp, Homo sapiens
  siRNA target sequence for LOC152185 (NM_144718.2,1392-1410).
cgcctggttcggtacctta

SEQ ID NO: 411712 - DNA, 19 bp, Homo sapiens
  siRNA target sequence for LOC152185 (NM_144718.2,1393-1411).
gcctggttcggtaccttaa

SEQ ID NO: 411713 - DNA, 19 bp, Homo sapiens
  siRNA target sequence for LOC152185 (NM_144718.2,1394-1412).
cctggttcggtaccttaaa

SEQ ID NO: 411714 - DNA, 19 bp, Homo sapiens
  siRNA target sequence for LOC152185 (NM_144718.2,1398-1416).
gttcggtaccttaaagaga

SEQ ID NO: 411715 - DNA, 19 bp, Homo sapiens
  siRNA target sequence for LOC152185 (NM_144718.2,1421-1439).
gatccagctacgtaaagaa

SEQ ID NO: 411716 - DNA, 19 bp, Homo sapiens
  siRNA target sequence for LOC152185 (NM_144718.2,1594-1612).
cactcacacatgctattaa

SEQ ID NO: 411717 - DNA, 19 bp, Homo sapiens
  siRNA target sequence for LOC152185 (NM_144718.2,1596-1614).
ctcacacatgctattaaga

SEQ ID NO: 411718 - DNA, 19 bp, Homo sapiens
  siRNA target sequence for LOC152185 (NM_144718.2,1666-1684).
ccacaggtagaagagttat

SEQ ID NO: 411719 - DNA, 19 bp, Homo sapiens
  siRNA target sequence for LOC152185 (NM_144718.2,1692-1710).
ccagagcgtccagttgtaa

SEQ ID NO: 411720 - DNA, 19 bp, Homo sapiens
  siRNA target sequence for LOC152185 (NM_144718.2,1693-1711).
cagagcgtccagttgtaaa

SEQ ID NO: 411721 - DNA, 19 bp, Homo sapiens
  siRNA target sequence for LOC152185 (NM_144718.2,1704-1722).
gttgtaaatgccaatgtct

SEQ ID NO: 411722 - DNA, 19 bp, Homo sapiens
  siRNA target sequence for LOC152185 (NM_144718.2,1800-1818).
gaccctccagataacatga

SEQ ID NO: 411723 - DNA, 19 bp, Homo sapiens
  siRNA target sequence for LOC152185 (NM_144718.2,1814-1832).
catgaatctggccaagaat

SEQ ID NO: 411724 - DNA, 19 bp, Homo sapiens
  siRNA target sequence for LOC152185 (NM_144718.2,1829-1847).
gaattttccagcacatatt

SEQ ID NO: 411725 - DNA, 19 bp, Homo sapiens
  siRNA target sequence for LOC152185 (NM_144718.2,1853-1871).
gccagctgtgttgttaaca

SEQ ID NO: 411726 - DNA, 19 bp, Homo sapiens
  siRNA target sequence for LOC152185 (NM_144718.2,1922-1940).
gagaaggactgttcaaact

SEQ ID NO: 411727 - DNA, 19 bp, Homo sapiens
  siRNA target sequence for LOC152185 (NM_144718.2,2014-2032).
ctattgatacagacattca

SEQ ID NO: 411728 - DNA, 19 bp, Homo sapiens
  siRNA target sequence for LOC152185 (NM_144718.2,2078-2096).
ctctcacatgggagaagat

SEQ ID NO: 411729 - DNA, 19 bp, Homo sapiens
  siRNA target sequence for LOC152185 (NM_144718.2,2223-2241).
cagctgagaacaaatgagt

SEQ ID NO: 411730 - DNA, 19 bp, Homo sapiens
  siRNA target sequence for LOC152185 (NM_144718.2,2271-2289).
cgaattgctgatttgacat

SEQ ID NO: 411731 - DNA, 19 bp, Homo sapiens
  siRNA target sequence for LOC152185 (NM_144718.2,2272-2290).
gaattgctgatttgacatt

SEQ ID NO: 411732 - DNA, 19 bp, Homo sapiens
  siRNA target sequence for LOC152185 (NM_144718.2,2301-2319).
gctatcaaggcacatatga

SEQ ID NO: 411733 - DNA, 19 bp, Homo sapiens
  siRNA target sequence for LOC152185 (NM_144718.2,2306-2324).
caaggcacatatgaataat

SEQ ID NO: 411734 - DNA, 19 bp, Homo sapiens
  siRNA target sequence for LOC152185 (NM_144718.2,2355-2373).
ggactccgggagttgaaca

SEQ ID NO: 411735 - DNA, 19 bp, Homo sapiens
  siRNA target sequence for LOC152185 (NM_144718.2,2422-2440).
ctctaacaccaggtagtat

SEQ ID NO: 411736 - DNA, 19 bp, Homo sapiens
  siRNA target sequence for LOC152185 (NM_144718.2,2477-2495).
ggaggctcgtggaaaacta

SEQ ID NO: 411737 - DNA, 19 bp, Homo sapiens
  siRNA target sequence for LOC152185 (NM_144718.2,2545-2563).
caatgtcacctgttcagtt

SEQ ID NO: 411738 - DNA, 19 bp, Homo sapiens
  siRNA target sequence for LOC152185 (NM_144718.2,2597-2615).
gacaattgaggtatctatt

SEQ ID NO: 411739 - DNA, 19 bp, Homo sapiens
  siRNA target sequence for LOC152185 (NM_144718.2,2661-2679).
cccgtcagcgggataaata

SEQ ID NO: 411740 - DNA, 19 bp, Homo sapiens
  siRNA target sequence for LOC152185 (NM_144718.2,2663-2681).
cgtcagcgggataaataca

SEQ ID NO: 411741 - DNA, 19 bp, Homo sapiens
  siRNA target sequence for LOC152185 (NM_144718.2,2664-2682).
gtcagcgggataaatacaa

SEQ ID NO: 411742 - DNA, 19 bp, Homo sapiens
  siRNA target sequence for LOC152185 (NM_144718.2,2696-2714).
ggctactggtaattcttgt

SEQ ID NO: 411743 - DNA, 19 bp, Homo sapiens
  siRNA target sequence for LOC152185 (NM_144718.2,2808-2826).
ctttctacccatgtatcat

SEQ ID NO: 411744 - DNA, 19 bp, Homo sapiens
  siRNA target sequence for FLJ25467 (NM_144719.2,115-133).
ctttgcggctccagttcaa

SEQ ID NO: 411745 - DNA, 19 bp, Homo sapiens
  siRNA target sequence for FLJ25467 (NM_144719.2,150-168).
cagcacaaacggttacaga

SEQ ID NO: 411746 - DNA, 19 bp, Homo sapiens
  siRNA target sequence for FLJ25467 (NM_144719.2,233-251).
gcccttggaggtttcagat

SEQ ID NO: 411747 - DNA, 19 bp, Homo sapiens
  siRNA target sequence for FLJ25467 (NM_144719.2,273-291).
ggggagccaaactcgaaaa

SEQ ID NO: 411748 - DNA, 19 bp, Homo sapiens
  siRNA target sequence for FLJ25467 (NM_144719.2,276-294).
gagccaaactcgaaaaata

SEQ ID NO: 411749 - DNA, 19 bp, Homo sapiens
  siRNA target sequence for FLJ25467 (NM_144719.2,323-341).
gattgaacaccttcgaaat

SEQ ID NO: 411750 - DNA, 19 bp, Homo sapiens
  siRNA target sequence for FLJ25467 (NM_144719.2,362-380).
cgagaacgggcgattgtat

SEQ ID NO: 411751 - DNA, 19 bp, Homo sapiens
  siRNA target sequence for FLJ25467 (NM_144719.2,363-381).
gagaacgggcgattgtata

SEQ ID NO: 411752 - DNA, 19 bp, Homo sapiens
  siRNA target sequence for FLJ25467 (NM_144719.2,405-423).
gaaatcaaacacctcaaaa

SEQ ID NO: 411753 - DNA, 19 bp, Homo sapiens
  siRNA target sequence for FLJ25467 (NM_144719.2,479-497).
cgtggtcgccaccaaaatt

SEQ ID NO: 411754 - DNA, 19 bp, Homo sapiens
  siRNA target sequence for FLJ25467 (NM_144719.2,498-516).
gtggagctatcaaaaaaga

SEQ ID NO: 411755 - DNA, 19 bp, Homo sapiens
  siRNA target sequence for FLJ25467 (NM_144719.2,534-552).
gaatcagagggtgcaaaaa

SEQ ID NO: 411756 - DNA, 19 bp, Homo sapiens
  siRNA target sequence for FLJ25467 (NM_144719.2,840-858).
gttcagcagctcctatctt

SEQ ID NO: 411757 - DNA, 19 bp, Homo sapiens
  siRNA target sequence for FLJ25467 (NM_144719.2,872-890).
gaggggtcgggctcaacaa

SEQ ID NO: 411758 - DNA, 19 bp, Homo sapiens
  siRNA target sequence for FLJ25467 (NM_144719.2,874-892).
ggggtcgggctcaacaaat

SEQ ID NO: 411759 - DNA, 19 bp, Homo sapiens
  siRNA target sequence for FLJ25467 (NM_144719.2,875-893).
gggtcgggctcaacaaatt

SEQ ID NO: 411760 - DNA, 19 bp, Homo sapiens
  siRNA target sequence for FLJ25467 (NM_144719.2,877-895).
gtcgggctcaacaaattct

SEQ ID NO: 411761 - DNA, 19 bp, Homo sapiens
  siRNA target sequence for FLJ25467 (NM_144719.2,961-979).
gaacagccagtgatgagtt

SEQ ID NO: 411762 - DNA, 19 bp, Homo sapiens
  siRNA target sequence for FLJ25467 (NM_144719.2,1061-1079).
ggaaggcttggagaaactt

SEQ ID NO: 411763 - DNA, 19 bp, Homo sapiens
  siRNA target sequence for FLJ25467 (NM_144719.2,1433-1451).
ggagatcggacaactcaat

SEQ ID NO: 411764 - DNA, 19 bp, Homo sapiens
  siRNA target sequence for FLJ25467 (NM_144719.2,1454-1472).
gcactatcttcggaataaa

SEQ ID NO: 411765 - DNA, 19 bp, Homo sapiens
  siRNA target sequence for FLJ25467 (NM_144719.2,1457-1475).
ctatcttcggaataaagga

SEQ ID NO: 411766 - DNA, 19 bp, Homo sapiens
  siRNA target sequence for FLJ25467 (NM_144719.2,1990-2008).
caaccgggagcgagaagaa

SEQ ID NO: 411767 - DNA, 19 bp, Homo sapiens
  siRNA target sequence for FLJ25467 (NM_144719.2,2041-2059).
ccgtggaatcccaaatgga

SEQ ID NO: 411768 - DNA, 19 bp, Homo sapiens
  siRNA target sequence for FLJ25467 (NM_144719.2,2042-2060).
cgtggaatcccaaatggaa

SEQ ID NO: 411769 - DNA, 19 bp, Homo sapiens
  siRNA target sequence for FLJ31564 (NM_144720.1,640-658).
cggcacacggcctacattt

SEQ ID NO: 411770 - DNA, 19 bp, Homo sapiens
  siRNA target sequence for FLJ31564 (NM_144720.1,1091-1109).
ggaaagaccgtgtgattct

SEQ ID NO: 411771 - DNA, 19 bp, Homo sapiens
  siRNA target sequence for FLJ31564 (NM_144720.1,1218-1236).
ccacagtagtccaaagaga

SEQ ID NO: 411772 - DNA, 19 bp, Homo sapiens
  siRNA target sequence for FLJ31564 (NM_144720.1,1275-1293).
gggcgtccaggatcaacat

SEQ ID NO: 411773 - DNA, 19 bp, Homo sapiens
  siRNA target sequence for FLJ31564 (NM_144720.1,1276-1294).
ggcgtccaggatcaacata

SEQ ID NO: 411774 - DNA, 19 bp, Homo sapiens
  siRNA target sequence for FLJ31564 (NM_144720.1,1277-1295).
gcgtccaggatcaacatat

SEQ ID NO: 411775 - DNA, 19 bp, Homo sapiens
  siRNA target sequence for FLJ31564 (NM_144720.1,1304-1322).
gagatgtgaggcgatttca

SEQ ID NO: 411776 - DNA, 19 bp, Homo sapiens
  siRNA target sequence for FLJ31564 (NM_144720.1,1311-1329).
gaggcgatttcaactaaaa

SEQ ID NO: 411777 - DNA, 19 bp, Homo sapiens
  siRNA target sequence for FLJ31564 (NM_144720.1,1313-1331).
ggcgatttcaactaaaaat

SEQ ID NO: 411778 - DNA, 19 bp, Homo sapiens
  siRNA target sequence for FLJ31564 (NM_144720.1,1314-1332).
gcgatttcaactaaaaatt

SEQ ID NO: 411779 - DNA, 19 bp, Homo sapiens
  siRNA target sequence for FLJ31564 (NM_144720.1,1532-1550).
cgcgggaaaacgtggaaat

SEQ ID NO: 411780 - DNA, 19 bp, Homo sapiens
  siRNA target sequence for FLJ31564 (NM_144720.1,1584-1602).
gcggcatacctccttgaat

SEQ ID NO: 411781 - DNA, 19 bp, Homo sapiens
  siRNA target sequence for FLJ31564 (NM_144720.1,1586-1604).
ggcatacctccttgaatga

SEQ ID NO: 411782 - DNA, 19 bp, Homo sapiens
  siRNA target sequence for FLJ31564 (NM_144720.1,1745-1763).
cgcccaagaagcatgttgt

SEQ ID NO: 411783 - DNA, 19 bp, Homo sapiens
  siRNA target sequence for FLJ31564 (NM_144720.1,1793-1811).
ctgtggactcagaaacgtt

SEQ ID NO: 411784 - DNA, 19 bp, Homo sapiens
  siRNA target sequence for FLJ31564 (NM_144720.1,1804-1822).
gaaacgttgtccgaaacat

SEQ ID NO: 411785 - DNA, 19 bp, Homo sapiens
  siRNA target sequence for FLJ31564 (NM_144720.1,1853-1871).
cagccacgcccgaagaaga

SEQ ID NO: 411786 - DNA, 19 bp, Homo sapiens
  siRNA target sequence for FLJ31564 (NM_144720.1,2042-2060).
ggtgtcaggccaaaatcga

SEQ ID NO: 411787 - DNA, 19 bp, Homo sapiens
  siRNA target sequence for FLJ31564 (NM_144720.1,2047-2065).
caggccaaaatcgaagatt

SEQ ID NO: 411788 - DNA, 19 bp, Homo sapiens
  siRNA target sequence for FLJ31564 (NM_144720.1,2218-2236).
cagaacgagctgttagaat

SEQ ID NO: 411789 - DNA, 19 bp, Homo sapiens
  siRNA target sequence for FLJ31564 (NM_144720.1,2223-2241).
cgagctgttagaattcaga

SEQ ID NO: 411790 - DNA, 19 bp, Homo sapiens
  siRNA target sequence for FLJ31564 (NM_144720.1,2242-2260).
gtgctagaactcgaagtaa

SEQ ID NO: 411791 - DNA, 19 bp, Homo sapiens
  siRNA target sequence for FLJ31564 (NM_144720.1,2244-2262).
gctagaactcgaagtaaga

SEQ ID NO: 411792 - DNA, 19 bp, Homo sapiens
  siRNA target sequence for FLJ31564 (NM_144720.1,2261-2279).
gagactctatctgttgtaa

SEQ ID NO: 411793 - DNA, 19 bp, Homo sapiens
  siRNA target sequence for FLJ31564 (NM_144720.1,2283-2301).
ctcaaacggagcagacatt

SEQ ID NO: 411794 - DNA, 19 bp, Homo sapiens
  siRNA target sequence for FLJ31564 (NM_144720.1,2289-2307).
cggagcagacattctcttt

SEQ ID NO: 411795 - DNA, 19 bp, Homo sapiens
  siRNA target sequence for FLJ31564 (NM_144720.1,2308-2326).
gaacccaaactgaaattca

SEQ ID NO: 411796 - DNA, 19 bp, Homo sapiens
  siRNA target sequence for FLJ25439 (NM_144725.2,188-206).
gacatcgactgggatttct

SEQ ID NO: 411797 - DNA, 19 bp, Homo sapiens
  siRNA target sequence for FLJ25439 (NM_144725.2,320-338).
ggccatagactgtatgtct

SEQ ID NO: 411798 - DNA, 19 bp, Homo sapiens
  siRNA target sequence for FLJ25439 (NM_144725.2,378-396).
gctcagctgattaaggaaa

SEQ ID NO: 411799 - DNA, 19 bp, Homo sapiens
  siRNA target sequence for FLJ25439 (NM_144725.2,459-477).
ggggaccatcactggaaat

SEQ ID NO: 411800 - DNA, 19 bp, Homo sapiens
  siRNA target sequence for FLJ25439 (NM_144725.2,487-505).
ctctggccaacctagctta

SEQ ID NO: 411801 - DNA, 19 bp, Homo sapiens
  siRNA target sequence for FLJ25439 (NM_144725.2,498-516).
ctagcttatggctacttga

SEQ ID NO: 411802 - DNA, 19 bp, Homo sapiens
  siRNA target sequence for FLJ25439 (NM_144725.2,530-548).
cccagttcaggccaagaaa

SEQ ID NO: 411803 - DNA, 19 bp, Homo sapiens
  siRNA target sequence for FLJ25439 (NM_144725.2,542-560).
caagaaacatgctacatca

SEQ ID NO: 411804 - DNA, 19 bp, Homo sapiens
  siRNA target sequence for FLJ25439 (NM_144725.2,552-570).
gctacatcagccaagaata

SEQ ID NO: 411805 - DNA, 19 bp, Homo sapiens
  siRNA target sequence for FLJ25439 (NM_144725.2,588-606).
gcaaatacgacctcaaata

SEQ ID NO: 411806 - DNA, 19 bp, Homo sapiens
  siRNA target sequence for FLJ25439 (NM_144725.2,631-649).
ctctggtcaagctgtacta

SEQ ID NO: 411807 - DNA, 19 bp, Homo sapiens
  siRNA target sequence for FLJ25439 (NM_144725.2,757-775).
gtgtttgtgaattacaagt

SEQ ID NO: 411808 - DNA, 19 bp, Homo sapiens
  siRNA target sequence for FLJ25439 (NM_144725.2,836-854).
cctagctctggcatacttt

SEQ ID NO: 411809 - DNA, 19 bp, Homo sapiens
  siRNA target sequence for FLJ25439 (NM_144725.2,860-878).
ggcaattggcgatgttatt

SEQ ID NO: 411810 - DNA, 19 bp, Homo sapiens
  siRNA target sequence for FLJ25439 (NM_144725.2,1024-1042).
gccccaaaactgcagaaat

SEQ ID NO: 411811 - DNA, 19 bp, Homo sapiens
  siRNA target sequence for FLJ25439 (NM_144725.2,1026-1044).
cccaaaactgcagaaatga

SEQ ID NO: 411812 - DNA, 19 bp, Homo sapiens
  siRNA target sequence for FLJ25439 (NM_144725.2,1047-1065).
gcgttactggccaaagctt

SEQ ID NO: 411813 - DNA, 19 bp, Homo sapiens
  siRNA target sequence for FLJ25439 (NM_144725.2,1049-1067).
gttactggccaaagcttat

SEQ ID NO: 411814 - DNA, 19 bp, Homo sapiens
  siRNA target sequence for FLJ25439 (NM_144725.2,1093-1111).
gggatgctgttgagatata

SEQ ID NO: 411815 - DNA, 19 bp, Homo sapiens
  siRNA target sequence for FLJ25439 (NM_144725.2,1094-1112).
ggatgctgttgagatatat

SEQ ID NO: 411816 - DNA, 19 bp, Homo sapiens
  siRNA target sequence for FLJ25439 (NM_144725.2,1240-1258).
gatataaacatgaccataa

SEQ ID NO: 411817 - DNA, 19 bp, Homo sapiens
  siRNA target sequence for FLJ25439 (NM_144725.2,1271-1289).
gatgtttaaccccattagt

SEQ ID NO: 411818 - DNA, 19 bp, Homo sapiens
  siRNA target sequence for FLJ25439 (NM_144725.2,1274-1292).
gtttaaccccattagtcat

SEQ ID NO: 411819 - DNA, 19 bp, Homo sapiens
  siRNA target sequence for FLJ31951 (NM_144726.1,230-248).
gaagtagccttagtaataa

SEQ ID NO: 411820 - DNA, 19 bp, Homo sapiens
  siRNA target sequence for FLJ31951 (NM_144726.1,253-271).
cttttccagtataagtatt

SEQ ID NO: 411821 - DNA, 19 bp, Homo sapiens
  siRNA target sequence for FLJ31951 (NM_144726.1,308-326).
gtgtggtgctgctaacatt

SEQ ID NO: 411822 - DNA, 19 bp, Homo sapiens
  siRNA target sequence for FLJ31951 (NM_144726.1,378-396).
cctctatgctggacatcaa

SEQ ID NO: 411823 - DNA, 19 bp, Homo sapiens
  siRNA target sequence for FLJ31951 (NM_144726.1,379-397).
ctctatgctggacatcaaa

SEQ ID NO: 411824 - DNA, 19 bp, Homo sapiens
  siRNA target sequence for FLJ31951 (NM_144726.1,385-403).
gctggacatcaaatttcca

SEQ ID NO: 411825 - DNA, 19 bp, Homo sapiens
  siRNA target sequence for FLJ31951 (NM_144726.1,441-459).
gggaccaatgtatttagaa

SEQ ID NO: 411826 - DNA, 19 bp, Homo sapiens
  siRNA target sequence for FLJ31951 (NM_144726.1,499-517).
cagttggtggtgtgtactt

SEQ ID NO: 411827 - DNA, 19 bp, Homo sapiens
  siRNA target sequence for FLJ31951 (NM_144726.1,505-523).
gtggtgtgtactttatgct

SEQ ID NO: 411828 - DNA, 19 bp, Homo sapiens
  siRNA target sequence for FLJ31951 (NM_144726.1,607-625).
gagacaattgttatcatca

SEQ ID NO: 411829 - DNA, 19 bp, Homo sapiens
  siRNA target sequence for FLJ31951 (NM_144726.1,647-665).
ctggattggaagttctcta

SEQ ID NO: 411830 - DNA, 19 bp, Homo sapiens
  siRNA target sequence for FLJ31951 (NM_144726.1,649-667).
ggattggaagttctctatt

SEQ ID NO: 411831 - DNA, 19 bp, Homo sapiens
  siRNA target sequence for FLJ31951 (NM_144726.1,677-695).
ctaatcttttggtacctta

SEQ ID NO: 411832 - DNA, 19 bp, Homo sapiens
  siRNA target sequence for FLJ31951 (NM_144726.1,691-709).
ccttataaccttgctaaat

SEQ ID NO: 411833 - DNA, 19 bp, Homo sapiens
  siRNA target sequence for FLJ31951 (NM_144726.1,710-728).
ctgcatacagagaattggt

SEQ ID NO: 411834 - DNA, 19 bp, Homo sapiens
  siRNA target sequence for FLJ31951 (NM_144726.1,787-805).
gtagtccctgttcttttca

SEQ ID NO: 411835 - DNA, 19 bp, Homo sapiens
  siRNA target sequence for FLJ31951 (NM_144726.1,951-969).
ggtcttcacggtttctttt

SEQ ID NO: 411836 - DNA, 19 bp, Homo sapiens
  siRNA target sequence for FLJ31951 (NM_144726.1,1012-1030).
ggttatcgagctttcatga

SEQ ID NO: 411837 - DNA, 19 bp, Homo sapiens
  siRNA target sequence for FLJ31951 (NM_144726.1,1013-1031).
gttatcgagctttcatgaa

SEQ ID NO: 411838 - DNA, 19 bp, Homo sapiens
  siRNA target sequence for FLJ31951 (NM_144726.1,1064-1082).
gagtaacgctgttaatcct

SEQ ID NO: 411839 - DNA, 19 bp, Homo sapiens
  siRNA target sequence for FLJ31951 (NM_144726.1,1124-1142).
gggcattcttgctcagtat

SEQ ID NO: 411840 - DNA, 19 bp, Homo sapiens
  siRNA target sequence for FLJ31951 (NM_144726.1,1126-1144).
gcattcttgctcagtatta

SEQ ID NO: 411841 - DNA, 19 bp, Homo sapiens
  siRNA target sequence for FLJ31951 (NM_144726.1,1166-1184).
ctatcctacagtctatgtt

SEQ ID NO: 411842 - DNA, 19 bp, Homo sapiens
  siRNA target sequence for FLJ31951 (NM_144726.1,1170-1188).
cctacagtctatgttagaa

SEQ ID NO: 411843 - DNA, 19 bp, Homo sapiens
  siRNA target sequence for FLJ31951 (NM_144726.1,1330-1348).
gatttttggcttcttatca

SEQ ID NO: 411844 - DNA, 19 bp, Homo sapiens
  siRNA target sequence for FLJ31951 (NM_144726.1,1561-1579).
gtgatgggctcaatgatca

SEQ ID NO: 411845 - DNA, 19 bp, Homo sapiens
  siRNA target sequence for FLJ31951 (NM_144726.1,1625-1643).
ggtggaagagctttcttct

SEQ ID NO: 411846 - DNA, 19 bp, Homo sapiens
  siRNA target sequence for FLJ31951 (NM_144726.1,1645-1663).
cgcagggatgctgtgaata

SEQ ID NO: 411847 - DNA, 19 bp, Homo sapiens
  siRNA target sequence for FLJ31951 (NM_144726.1,1649-1667).
gggatgctgtgaataagat

SEQ ID NO: 411848 - DNA, 19 bp, Homo sapiens
  siRNA target sequence for FLJ31951 (NM_144726.1,1657-1675).
gtgaataagattaaatcgt

SEQ ID NO: 411849 - DNA, 19 bp, Homo sapiens
  siRNA target sequence for FLJ31951 (NM_144726.1,1659-1677).
gaataagattaaatcgtta

SEQ ID NO: 411850 - DNA, 19 bp, Homo sapiens
  siRNA target sequence for FLJ31951 (NM_144726.1,1674-1692).
gttacccattgctacgaaa

SEQ ID NO: 411851 - DNA, 19 bp, Homo sapiens
  siRNA target sequence for FLJ31951 (NM_144726.1,1758-1776).
cacgccttgcagtcatttt

SEQ ID NO: 411852 - DNA, 19 bp, Homo sapiens
  siRNA target sequence for FLJ31951 (NM_144726.1,1780-1798).
catgcaggctgtcttaaga

SEQ ID NO: 411853 - DNA, 19 bp, Homo sapiens
  siRNA target sequence for FLJ31951 (NM_144726.1,1834-1852).
cactgccatctgaaaaact

SEQ ID NO: 411854 - DNA, 19 bp, Homo sapiens
  siRNA target sequence for FLJ31951 (NM_144726.1,1907-1925).
ctgagcaaaacgtcatgtt

SEQ ID NO: 411855 - DNA, 19 bp, Homo sapiens
  siRNA target sequence for FLJ31951 (NM_144726.1,1981-1999).
gaaggttccagggacaata

SEQ ID NO: 411856 - DNA, 19 bp, Homo sapiens
  siRNA target sequence for FLJ31951 (NM_144726.1,1985-2003).
gttccagggacaataatga

SEQ ID NO: 411857 - DNA, 19 bp, Homo sapiens
  siRNA target sequence for FLJ31951 (NM_144726.1,1988-2006).
ccagggacaataatgagta

SEQ ID NO: 411858 - DNA, 19 bp, Homo sapiens
  siRNA target sequence for FLJ31951 (NM_144726.1,1991-2009).
gggacaataatgagtacat

SEQ ID NO: 411859 - DNA, 19 bp, Homo sapiens
  siRNA target sequence for FLJ31951 (NM_144726.1,2037-2055).
ggcttttgaccccaaagaa

SEQ ID NO: 411860 - DNA, 19 bp, Homo sapiens
  siRNA target sequence for CRYGN (NM_144727.1,103-121).
cagcgctcggggaagatca

SEQ ID NO: 411861 - DNA, 19 bp, Homo sapiens
  siRNA target sequence for CRYGN (NM_144727.1,239-257).
cctgggtctgcttcaatca

SEQ ID NO: 411862 - DNA, 19 bp, Homo sapiens
  siRNA target sequence for CRYGN (NM_144727.1,296-314).
gcgactaccccgacttctt

SEQ ID NO: 411863 - DNA, 19 bp, Homo sapiens
  siRNA target sequence for CRYGN (NM_144727.1,373-391).
gaacatttccgcctagaaa

SEQ ID NO: 411864 - DNA, 19 bp, Homo sapiens
  siRNA target sequence for CRYGN (NM_144727.1,376-394).
catttccgcctagaaatct

SEQ ID NO: 411865 - DNA, 19 bp, Homo sapiens
  siRNA target sequence for PRO1853 (NM_144736.2,109-127).
gcgcagccattccttttat

SEQ ID NO: 411866 - DNA, 19 bp, Homo sapiens
  siRNA target sequence for PRO1853 (NM_144736.2,114-132).
gccattccttttatttgga

SEQ ID NO: 411867 - DNA, 19 bp, Homo sapiens
  siRNA target sequence for PRO1853 (NM_144736.2,183-201).
ccgatgctgcggcatctta

SEQ ID NO: 411868 - DNA, 19 bp, Homo sapiens
  siRNA target sequence for PRO1853 (NM_144736.2,184-202).
cgatgctgcggcatcttat

SEQ ID NO: 411869 - DNA, 19 bp, Homo sapiens
  siRNA target sequence for PRO1853 (NM_144736.2,189-207).
ctgcggcatcttatgtaca

SEQ ID NO: 411870 - DNA, 19 bp, Homo sapiens
  siRNA target sequence for PRO1853 (NM_144736.2,191-209).
gcggcatcttatgtacaaa

SEQ ID NO: 411871 - DNA, 19 bp, Homo sapiens
  siRNA target sequence for PRO1853 (NM_144736.2,192-210).
cggcatcttatgtacaaaa

SEQ ID NO: 411872 - DNA, 19 bp, Homo sapiens
  siRNA target sequence for PRO1853 (NM_144736.2,248-266).
gaaggaggtgttgactaat

SEQ ID NO: 411873 - DNA, 19 bp, Homo sapiens
  siRNA target sequence for PRO1853 (NM_144736.2,251-269).
ggaggtgttgactaatcca

SEQ ID NO: 411874 - DNA, 19 bp, Homo sapiens
  siRNA target sequence for PRO1853 (NM_144736.2,268-286).
cagccaagggttattatgt

SEQ ID NO: 411875 - DNA, 19 bp, Homo sapiens
  siRNA target sequence for PRO1853 (NM_144736.2,270-288).
gccaagggttattatgtgt

SEQ ID NO: 411876 - DNA, 19 bp, Homo sapiens
  siRNA target sequence for PRO1853 (NM_144736.2,296-314).
catgctaggcgaaaaagga

SEQ ID NO: 411877 - DNA, 19 bp, Homo sapiens
  siRNA target sequence for PRO1853 (NM_144736.2,303-321).
ggcgaaaaaggagatttca

SEQ ID NO: 411878 - DNA, 19 bp, Homo sapiens
  siRNA target sequence for PRO1853 (NM_144736.2,304-322).
gcgaaaaaggagatttcat

SEQ ID NO: 411879 - DNA, 19 bp, Homo sapiens
  siRNA target sequence for PRO1853 (NM_144736.2,325-343).
cttcacctgaaataagtca

SEQ ID NO: 411880 - DNA, 19 bp, Homo sapiens
  siRNA target sequence for PRO1853 (NM_144736.2,360-378).
ctaggtatatggttcatta

SEQ ID NO: 411881 - DNA, 19 bp, Homo sapiens
  siRNA target sequence for PRO1853 (NM_144736.2,364-382).
gtatatggttcattagtga

SEQ ID NO: 411882 - DNA, 19 bp, Homo sapiens
  siRNA target sequence for PRO1853 (NM_144736.2,370-388).
ggttcattagtgaatggat

SEQ ID NO: 411883 - DNA, 19 bp, Homo sapiens
  siRNA target sequence for PRO1853 (NM_144736.2,442-460).
gaaccctcgtgggagatat

SEQ ID NO: 411884 - DNA, 19 bp, Homo sapiens
  siRNA target sequence for PRO1853 (NM_144736.2,445-463).
ccctcgtgggagatatttt

SEQ ID NO: 411885 - DNA, 19 bp, Homo sapiens
  siRNA target sequence for PRO1853 (NM_144736.2,522-540).
gtagaggtaagccaaaaat

SEQ ID NO: 411886 - DNA, 19 bp, Homo sapiens
  siRNA target sequence for PRO1853 (NM_144736.2,525-543).
gaggtaagccaaaaattaa

SEQ ID NO: 411887 - DNA, 19 bp, Homo sapiens
  siRNA target sequence for PRO1853 (NM_144736.2,527-545).
ggtaagccaaaaattaagt

SEQ ID NO: 411888 - DNA, 19 bp, Homo sapiens
  siRNA target sequence for PRO1853 (NM_144736.2,556-574).
cattgacactgactaaaga

SEQ ID NO: 411889 - DNA, 19 bp, Homo sapiens
  siRNA target sequence for PRO1853 (NM_144736.2,581-599).
cccgttagagcgaaatgct

SEQ ID NO: 411890 - DNA, 19 bp, Homo sapiens
  siRNA target sequence for PRO1853 (NM_144736.2,617-635).
gaaaggtgtcactaagtct

SEQ ID NO: 411891 - DNA, 19 bp, Homo sapiens
  siRNA target sequence for PRO1853 (NM_144736.2,676-694).
caaaagggtacagctttta

SEQ ID NO: 411892 - DNA, 19 bp, Homo sapiens
  siRNA target sequence for PRO1853 (NM_144736.2,723-741).
cctgtgcataaatttcaga

SEQ ID NO: 411893 - DNA, 19 bp, Homo sapiens
  siRNA target sequence for PRO1853 (NM_144736.2,752-770).
gggatggcgagaagtattt

SEQ ID NO: 411894 - DNA, 19 bp, Homo sapiens
  siRNA target sequence for PRO1853 (NM_144736.2,830-848).
cccagcagaagccttcata

SEQ ID NO: 411895 - DNA, 19 bp, Homo sapiens
  siRNA target sequence for PRO1853 (NM_144736.2,857-875).
cgaaacaagggatcatgtt

SEQ ID NO: 411896 - DNA, 19 bp, Homo sapiens
  siRNA target sequence for PRO1853 (NM_144736.2,862-880).
caagggatcatgttgaagt

SEQ ID NO: 411897 - DNA, 19 bp, Homo sapiens
  siRNA target sequence for PRO1853 (NM_144736.2,902-920).
catcgaggaactttctcaa

SEQ ID NO: 411898 - DNA, 19 bp, Homo sapiens
  siRNA target sequence for PRO1853 (NM_144736.2,963-981).
ggtcatgatggaacaaaga

SEQ ID NO: 411899 - DNA, 19 bp, Homo sapiens
  siRNA target sequence for PRO1853 (NM_144736.2,1004-1022).
cgaccacaagcttcatgat

SEQ ID NO: 411900 - DNA, 19 bp, Homo sapiens
  siRNA target sequence for SMCR5 (NM_144774.1,455-473).
gcgaaggtgtttaagagta

SEQ ID NO: 411901 - DNA, 19 bp, Homo sapiens
  siRNA target sequence for SMCR5 (NM_144774.1,456-474).
cgaaggtgtttaagagtaa

SEQ ID NO: 411902 - DNA, 19 bp, Homo sapiens
  siRNA target sequence for SMCR5 (NM_144774.1,457-475).
gaaggtgtttaagagtaaa

SEQ ID NO: 411903 - DNA, 19 bp, Homo sapiens
  siRNA target sequence for SMCR5 (NM_144774.1,505-523).
ccagctgttttgaacaaca

SEQ ID NO: 411904 - DNA, 19 bp, Homo sapiens
  siRNA target sequence for SMCR5 (NM_144774.1,539-557).
cagagtgaacagaatactt

SEQ ID NO: 411905 - DNA, 19 bp, Homo sapiens
  siRNA target sequence for SMCR5 (NM_144774.1,555-573).
ctttctgcggttcagaata

SEQ ID NO: 411906 - DNA, 19 bp, Homo sapiens
  siRNA target sequence for SMCR5 (NM_144774.1,819-837).
cggaaagggaggcttttga

SEQ ID NO: 411907 - DNA, 19 bp, Homo sapiens
  siRNA target sequence for SMCR8 (NM_144775.1,418-436).
caccaaagaggaagagtat

SEQ ID NO: 411908 - DNA, 19 bp, Homo sapiens
  siRNA target sequence for SMCR8 (NM_144775.1,550-568).
gagggacttcattcttatt

SEQ ID NO: 411909 - DNA, 19 bp, Homo sapiens
  siRNA target sequence for SMCR8 (NM_144775.1,666-684).
gtatcatgtctgtggatta

SEQ ID NO: 411910 - DNA, 19 bp, Homo sapiens
  siRNA target sequence for SMCR8 (NM_144775.1,842-860).
ccgttttgcatggcttata

SEQ ID NO: 411911 - DNA, 19 bp, Homo sapiens
  siRNA target sequence for SMCR8 (NM_144775.1,898-916).
ggagctttcagccgaattt

SEQ ID NO: 411912 - DNA, 19 bp, Homo sapiens
  siRNA target sequence for SMCR8 (NM_144775.1,899-917).
gagctttcagccgaatttt

SEQ ID NO: 411913 - DNA, 19 bp, Homo sapiens
  siRNA target sequence for SMCR8 (NM_144775.1,902-920).
ctttcagccgaattttcca

SEQ ID NO: 411914 - DNA, 19 bp, Homo sapiens
  siRNA target sequence for SMCR8 (NM_144775.1,923-941).
gcttctgagtgcttgaaga

SEQ ID NO: 411915 - DNA, 19 bp, Homo sapiens
  siRNA target sequence for SMCR8 (NM_144775.1,1044-1062).
ccaacgacaaaggctttta

SEQ ID NO: 411916 - DNA, 19 bp, Homo sapiens
  siRNA target sequence for SMCR8 (NM_144775.1,1048-1066).
cgacaaaggcttttactca

SEQ ID NO: 411917 - DNA, 19 bp, Homo sapiens
  siRNA target sequence for SMCR8 (NM_144775.1,1111-1129).
gtccatcattgaacatcaa

SEQ ID NO: 411918 - DNA, 19 bp, Homo sapiens
  siRNA target sequence for SMCR8 (NM_144775.1,1259-1277).
gccgacacagacctttaca

SEQ ID NO: 411919 - DNA, 19 bp, Homo sapiens
  siRNA target sequence for SMCR8 (NM_144775.1,1287-1305).
cagcctacaccccaaaact

SEQ ID NO: 411920 - DNA, 19 bp, Homo sapiens
  siRNA target sequence for SMCR8 (NM_144775.1,1289-1307).
gcctacaccccaaaactta

SEQ ID NO: 411921 - DNA, 19 bp, Homo sapiens
  siRNA target sequence for SMCR8 (NM_144775.1,1360-1378).
gctctgtgacactgaatat

SEQ ID NO: 411922 - DNA, 19 bp, Homo sapiens
  siRNA target sequence for SMCR8 (NM_144775.1,1441-1459).
cctcctgaccagtcagatt

SEQ ID NO: 411923 - DNA, 19 bp, Homo sapiens
  siRNA target sequence for SMCR8 (NM_144775.1,1445-1463).
ctgaccagtcagattgata

SEQ ID NO: 411924 - DNA, 19 bp, Homo sapiens
  siRNA target sequence for SMCR8 (NM_144775.1,1606-1624).
cccaattcctaaagtgtta

SEQ ID NO: 411925 - DNA, 19 bp, Homo sapiens
  siRNA target sequence for SMCR8 (NM_144775.1,1652-1670).
gtggagtctgtgttgatca

SEQ ID NO: 411926 - DNA, 19 bp, Homo sapiens
  siRNA target sequence for SMCR8 (NM_144775.1,1793-1811).
ggtgaaagtattgaagttt

SEQ ID NO: 411927 - DNA, 19 bp, Homo sapiens
  siRNA target sequence for SMCR8 (NM_144775.1,1808-1826).
gttttgggcacggagaaat

SEQ ID NO: 411928 - DNA, 19 bp, Homo sapiens
  siRNA target sequence for SMCR8 (NM_144775.1,1828-1846).
cacctccgtgctttctaaa

SEQ ID NO: 411929 - DNA, 19 bp, Homo sapiens
  siRNA target sequence for SMCR8 (NM_144775.1,1831-1849).
ctccgtgctttctaaatct

SEQ ID NO: 411930 - DNA, 19 bp, Homo sapiens
  siRNA target sequence for SMCR8 (NM_144775.1,1921-1939).
catcagcgaggacagtatt

SEQ ID NO: 411931 - DNA, 19 bp, Homo sapiens
  siRNA target sequence for SMCR8 (NM_144775.1,1968-1986).
ccctcatccctgatgactt

SEQ ID NO: 411932 - DNA, 19 bp, Homo sapiens
  siRNA target sequence for SMCR8 (NM_144775.1,2260-2278).
ggggttccgtgtagacttt

SEQ ID NO: 411933 - DNA, 19 bp, Homo sapiens
  siRNA target sequence for SMCR8 (NM_144775.1,2305-2323).
ccgagacaacagttgtgaa

SEQ ID NO: 411934 - DNA, 19 bp, Homo sapiens
  siRNA target sequence for SMCR8 (NM_144775.1,2363-2381).
gctagccgggacatcagta

SEQ ID NO: 411935 - DNA, 19 bp, Homo sapiens
  siRNA target sequence for SMCR8 (NM_144775.1,2364-2382).
ctagccgggacatcagtaa

SEQ ID NO: 411936 - DNA, 19 bp, Homo sapiens
  siRNA target sequence for SMCR8 (NM_144775.1,2449-2467).
caggatcccctctgcttat

SEQ ID NO: 411937 - DNA, 19 bp, Homo sapiens
  siRNA target sequence for SMCR8 (NM_144775.1,2452-2470).
gatcccctctgcttatcct

SEQ ID NO: 411938 - DNA, 19 bp, Homo sapiens
  siRNA target sequence for SMCR8 (NM_144775.1,2507-2525).
ggccagaacgccttaaaat

SEQ ID NO: 411939 - DNA, 19 bp, Homo sapiens
  siRNA target sequence for SMCR8 (NM_144775.1,2508-2526).
gccagaacgccttaaaatt

SEQ ID NO: 411940 - DNA, 19 bp, Homo sapiens
  siRNA target sequence for SMCR8 (NM_144775.1,2668-2686).
cgctaagcccgtgaaacat

SEQ ID NO: 411941 - DNA, 19 bp, Homo sapiens
  siRNA target sequence for SMCR8 (NM_144775.1,2669-2687).
gctaagcccgtgaaacatt

SEQ ID NO: 411942 - DNA, 19 bp, Homo sapiens
  siRNA target sequence for SMCR8 (NM_144775.1,2697-2715).
cccctttgcacattatgga

SEQ ID NO: 411943 - DNA, 19 bp, Homo sapiens
  siRNA target sequence for SMCR8 (NM_144775.1,2698-2716).
ccctttgcacattatggat

SEQ ID NO: 411944 - DNA, 19 bp, Homo sapiens
  siRNA target sequence for MGC22776 (NM_144962.1,336-354).
cgtggacggcgcaacctat

SEQ ID NO: 411945 - DNA, 19 bp, Homo sapiens
  siRNA target sequence for MGC22776 (NM_144962.1,337-355).
gtggacggcgcaacctata

SEQ ID NO: 411946 - DNA, 19 bp, Homo sapiens
  siRNA target sequence for MGC22776 (NM_144962.1,394-412).
gaacccagacagagattct

SEQ ID NO: 411947 - DNA, 19 bp, Homo sapiens
  siRNA target sequence for MGC22776 (NM_144962.1,596-614).
ctcgaggctcttggaaaat

SEQ ID NO: 411948 - DNA, 19 bp, Homo sapiens
  siRNA target sequence for TTC16 (NM_144965.1,199-217).
catctgtgatgtaaaacca

SEQ ID NO: 411949 - DNA, 19 bp, Homo sapiens
  siRNA target sequence for TTC16 (NM_144965.1,242-260).
ctcaaagtcagggaatact

SEQ ID NO: 411950 - DNA, 19 bp, Homo sapiens
  siRNA target sequence for TTC16 (NM_144965.1,419-437).
ctgcgaagggcctactcat

SEQ ID NO: 411951 - DNA, 19 bp, Homo sapiens
  siRNA target sequence for TTC16 (NM_144965.1,421-439).
gcgaagggcctactcatta

SEQ ID NO: 411952 - DNA, 19 bp, Homo sapiens
  siRNA target sequence for TTC16 (NM_144965.1,423-441).
gaagggcctactcattaca

SEQ ID NO: 411953 - DNA, 19 bp, Homo sapiens
  siRNA target sequence for TTC16 (NM_144965.1,669-687).
ccaccaacgccgatgtcta

SEQ ID NO: 411954 - DNA, 19 bp, Homo sapiens
  siRNA target sequence for TTC16 (NM_144965.1,697-715).
ggccagactctacaacttt

SEQ ID NO: 411955 - DNA, 19 bp, Homo sapiens
  siRNA target sequence for TTC16 (NM_144965.1,1625-1643).
ggcattgtggggatgctta

SEQ ID NO: 411956 - DNA, 19 bp, Homo sapiens
  siRNA target sequence for TTC16 (NM_144965.1,1626-1644).
gcattgtggggatgcttaa

SEQ ID NO: 411957 - DNA, 19 bp, Homo sapiens
  siRNA target sequence for TTC16 (NM_144965.1,1732-1750).
gaaggccacccctgagatt

SEQ ID NO: 411958 - DNA, 19 bp, Homo sapiens
  siRNA target sequence for TTC16 (NM_144965.1,1953-1971).
cggctatctgccaggaata

SEQ ID NO: 411959 - DNA, 19 bp, Homo sapiens
  siRNA target sequence for TTC16 (NM_144965.1,1955-1973).
gctatctgccaggaataca

SEQ ID NO: 411960 - DNA, 19 bp, Homo sapiens
  siRNA target sequence for TTC16 (NM_144965.1,1983-2001).
cagccaccgccgtgacatt

SEQ ID NO: 411961 - DNA, 19 bp, Homo sapiens
  siRNA target sequence for TTC16 (NM_144965.1,1987-2005).
caccgccgtgacattctct

SEQ ID NO: 411962 - DNA, 19 bp, Homo sapiens
  siRNA target sequence for TTC16 (NM_144965.1,2004-2022).
ctgactcgtcactgttgaa

SEQ ID NO: 411963 - DNA, 19 bp, Homo sapiens
  siRNA target sequence for TTC16 (NM_144965.1,2006-2024).
gactcgtcactgttgaaga

SEQ ID NO: 411964 - DNA, 19 bp, Homo sapiens
  siRNA target sequence for TTC16 (NM_144965.1,2160-2178).
ccaaggccactatacacaa

SEQ ID NO: 411965 - DNA, 19 bp, Homo sapiens
  siRNA target sequence for TTC16 (NM_144965.1,2476-2494).
caagactgaggctttctat

SEQ ID NO: 411966 - DNA, 19 bp, Homo sapiens
  siRNA target sequence for TTC16 (NM_144965.1,2509-2527).
cctcagcaaaactgagtat

SEQ ID NO: 411967 - DNA, 19 bp, Homo sapiens
  siRNA target sequence for TTC16 (NM_144965.1,2643-2661).
gcaaaactgaggttgatca

SEQ ID NO: 411968 - DNA, 19 bp, Homo sapiens
  siRNA target sequence for TTC16 (NM_144965.1,2662-2680).
ggacctcacctactatgaa

SEQ ID NO: 411969 - DNA, 19 bp, Homo sapiens
  siRNA target sequence for FLJ30058 (NM_144967.2,478-496).
cgcaggacgaagatggtat

SEQ ID NO: 411970 - DNA, 19 bp, Homo sapiens
  siRNA target sequence for FLJ30058 (NM_144967.2,482-500).
ggacgaagatggtatcgat

SEQ ID NO: 411971 - DNA, 19 bp, Homo sapiens
  siRNA target sequence for FLJ30058 (NM_144967.2,483-501).
gacgaagatggtatcgata

SEQ ID NO: 411972 - DNA, 19 bp, Homo sapiens
  siRNA target sequence for FLJ30058 (NM_144967.2,553-571).
gaactcgtggccagacatt

SEQ ID NO: 411973 - DNA, 19 bp, Homo sapiens
  siRNA target sequence for FLJ30058 (NM_144967.2,613-631).
cgtccgaacaccttggata

SEQ ID NO: 411974 - DNA, 19 bp, Homo sapiens
  siRNA target sequence for FLJ30058 (NM_144967.2,614-632).
gtccgaacaccttggataa

SEQ ID NO: 411975 - DNA, 19 bp, Homo sapiens
  siRNA target sequence for FLJ30058 (NM_144967.2,616-634).
ccgaacaccttggataagt

SEQ ID NO: 411976 - DNA, 19 bp, Homo sapiens
  siRNA target sequence for FLJ30058 (NM_144967.2,664-682).
gctgtatcacacaagacat

SEQ ID NO: 411977 - DNA, 19 bp, Homo sapiens
  siRNA target sequence for FLJ30058 (NM_144967.2,665-683).
ctgtatcacacaagacatt

SEQ ID NO: 411978 - DNA, 19 bp, Homo sapiens
  siRNA target sequence for FLJ30058 (NM_144967.2,703-721).
gtcctggtgaacgagttta

SEQ ID NO: 411979 - DNA, 19 bp, Homo sapiens
  siRNA target sequence for FLJ30058 (NM_144967.2,750-768).
cacgatgcaggttgaagaa

SEQ ID NO: 411980 - DNA, 19 bp, Homo sapiens
  siRNA target sequence for FLJ30058 (NM_144967.2,905-923).
cagtgtctgtggatagtct

SEQ ID NO: 411981 - DNA, 19 bp, Homo sapiens
  siRNA target sequence for FLJ30058 (NM_144967.2,955-973).
cagaccctgcagctttcaa

SEQ ID NO: 411982 - DNA, 19 bp, Homo sapiens
  siRNA target sequence for FLJ30058 (NM_144967.2,1073-1091).
gccaattcattgaaaaaca

SEQ ID NO: 411983 - DNA, 19 bp, Homo sapiens
  siRNA target sequence for FLJ30058 (NM_144967.2,1185-1203).
gctggatgacaatcagaat

SEQ ID NO: 411984 - DNA, 19 bp, Homo sapiens
  siRNA target sequence for FLJ30058 (NM_144967.2,1220-1238).
cactcctcaaggagttttt

SEQ ID NO: 411985 - DNA, 19 bp, Homo sapiens
  siRNA target sequence for FLJ30058 (NM_144967.2,1267-1285).
gatgatctgtacatgtcat

SEQ ID NO: 411986 - DNA, 19 bp, Homo sapiens
  siRNA target sequence for FLJ30058 (NM_144967.2,1387-1405).
ctgaaggccctgcataaaa

SEQ ID NO: 411987 - DNA, 19 bp, Homo sapiens
  siRNA target sequence for FLJ30058 (NM_144967.2,1413-1431).
gaactgcgaggactcaatt

SEQ ID NO: 411988 - DNA, 19 bp, Homo sapiens
  siRNA target sequence for FLJ30058 (NM_144967.2,1422-1440).
ggactcaattggcattgat

SEQ ID NO: 411989 - DNA, 19 bp, Homo sapiens
  siRNA target sequence for FLJ30058 (NM_144967.2,1452-1470).
cccaggcaaccgtatgact

SEQ ID NO: 411990 - DNA, 19 bp, Homo sapiens
  siRNA target sequence for FLJ30058 (NM_144967.2,1453-1471).
ccaggcaaccgtatgactt

SEQ ID NO: 411991 - DNA, 19 bp, Homo sapiens
  siRNA target sequence for FLJ30058 (NM_144967.2,1551-1569).
gctggggattgatcactat

SEQ ID NO: 411992 - DNA, 19 bp, Homo sapiens
  siRNA target sequence for FLJ30058 (NM_144967.2,1554-1572).
ggggattgatcactatgtt

SEQ ID NO: 411993 - DNA, 19 bp, Homo sapiens
  siRNA target sequence for FLJ30058 (NM_144967.2,1623-1641).
ccaggtgcctccccatatt

SEQ ID NO: 411994 - DNA, 19 bp, Homo sapiens
  siRNA target sequence for FLJ30058 (NM_144967.2,1627-1645).
gtgcctccccatattcaga

SEQ ID NO: 411995 - DNA, 19 bp, Homo sapiens
  siRNA target sequence for FLJ30058 (NM_144967.2,1723-1741).
cagagtgcacgcataaaga

SEQ ID NO: 411996 - DNA, 19 bp, Homo sapiens
  siRNA target sequence for FLJ30058 (NM_144967.2,1744-1762).
gaagaggatgcactacttt

SEQ ID NO: 411997 - DNA, 19 bp, Homo sapiens
  siRNA target sequence for FLJ30058 (NM_144967.2,1749-1767).
ggatgcactactttctgat

SEQ ID NO: 411998 - DNA, 19 bp, Homo sapiens
  siRNA target sequence for FLJ32783 (NM_144968.1,213-231).
cataaaacagtcaacagat

SEQ ID NO: 411999 - DNA, 19 bp, Homo sapiens
  siRNA target sequence for FLJ32783 (NM_144968.1,248-266).
ccatcgaggctagaagaaa

SEQ ID NO: 412000 - DNA, 19 bp, Homo sapiens
  siRNA target sequence for FLJ32783 (NM_144968.1,519-537).
caagaacgggcgtgaattt

SEQ ID NO: 412001 - DNA, 19 bp, Homo sapiens
  siRNA target sequence for FLJ32783 (NM_144968.1,522-540).
gaacgggcgtgaatttagt

SEQ ID NO: 412002 - DNA, 19 bp, Homo sapiens
  siRNA target sequence for FLJ32783 (NM_144968.1,525-543).
cgggcgtgaatttagtctt

SEQ ID NO: 412003 - DNA, 19 bp, Homo sapiens
  siRNA target sequence for FLJ32783 (NM_144968.1,564-582).
gaaggggcttccaacctat

SEQ ID NO: 412004 - DNA, 19 bp, Homo sapiens
  siRNA target sequence for FLJ32783 (NM_144968.1,567-585).
ggggcttccaacctatctt

SEQ ID NO: 412005 - DNA, 19 bp, Homo sapiens
  siRNA target sequence for FLJ32783 (NM_144968.1,570-588).
gcttccaacctatcttagt

SEQ ID NO: 412006 - DNA, 19 bp, Homo sapiens
  siRNA target sequence for FLJ32783 (NM_144968.1,571-589).
cttccaacctatcttagtt

SEQ ID NO: 412007 - DNA, 19 bp, Homo sapiens
  siRNA target sequence for FLJ32783 (NM_144968.1,574-592).
ccaacctatcttagttaca

SEQ ID NO: 412008 - DNA, 19 bp, Homo sapiens
  siRNA target sequence for FLJ32783 (NM_144968.1,578-596).
cctatcttagttacagtaa

SEQ ID NO: 412009 - DNA, 19 bp, Homo sapiens
  siRNA target sequence for FLJ32783 (NM_144968.1,676-694).
gggcagttcaggtacaact

SEQ ID NO: 412010 - DNA, 19 bp, Homo sapiens
  siRNA target sequence for FLJ32783 (NM_144968.1,677-695).
ggcagttcaggtacaactt

SEQ ID NO: 412011 - DNA, 19 bp, Homo sapiens
  siRNA target sequence for FLJ32783 (NM_144968.1,724-742).
gccaaggttgatgagaatt

SEQ ID NO: 412012 - DNA, 19 bp, Homo sapiens
  siRNA target sequence for ZDHHC15 (NM_144969.1,81-99).
gggtgccagtgctcgttat

SEQ ID NO: 412013 - DNA, 19 bp, Homo sapiens
  siRNA target sequence for ZDHHC15 (NM_144969.1,109-127).
cgtgctctggtcctactat

SEQ ID NO: 412014 - DNA, 19 bp, Homo sapiens
  siRNA target sequence for ZDHHC15 (NM_144969.1,143-161).
ctctgcctggtgactgttt

SEQ ID NO: 412015 - DNA, 19 bp, Homo sapiens
  siRNA target sequence for ZDHHC15 (NM_144969.1,229-247).
ctactggaagtctatcttt

SEQ ID NO: 412016 - DNA, 19 bp, Homo sapiens
  siRNA target sequence for ZDHHC15 (NM_144969.1,234-252).
ggaagtctatctttacact

SEQ ID NO: 412017 - DNA, 19 bp, Homo sapiens
  siRNA target sequence for ZDHHC15 (NM_144969.1,293-311).
gacaaggagcgctatgaaa

SEQ ID NO: 412018 - DNA, 19 bp, Homo sapiens
  siRNA target sequence for ZDHHC15 (NM_144969.1,295-313).
caaggagcgctatgaaaat

SEQ ID NO: 412019 - DNA, 19 bp, Homo sapiens
  siRNA target sequence for ZDHHC15 (NM_144969.1,298-316).
ggagcgctatgaaaatgaa

SEQ ID NO: 412020 - DNA, 19 bp, Homo sapiens
  siRNA target sequence for ZDHHC15 (NM_144969.1,459-477).
gtgctatgtgtgtgttaaa

SEQ ID NO: 412021 - DNA, 19 bp, Homo sapiens
  siRNA target sequence for ZDHHC15 (NM_144969.1,585-603).
cgacagtcttcagctattt

SEQ ID NO: 412022 - DNA, 19 bp, Homo sapiens
  siRNA target sequence for ZDHHC15 (NM_144969.1,630-648).
ccagtgttcgctctaagtt

SEQ ID NO: 412023 - DNA, 19 bp, Homo sapiens
  siRNA target sequence for ZDHHC15 (NM_144969.1,689-707).
gtcagccttgtgattctct

SEQ ID NO: 412024 - DNA, 19 bp, Homo sapiens
  siRNA target sequence for ZDHHC15 (NM_144969.1,760-778).
ctgcactccagtgtttaca

SEQ ID NO: 412025 - DNA, 19 bp, Homo sapiens
  siRNA target sequence for ZDHHC15 (NM_144969.1,763-781).
cactccagtgtttacaagt

SEQ ID NO: 412026 - DNA, 19 bp, Homo sapiens
  siRNA target sequence for ZDHHC15 (NM_144969.1,810-828).
gcttcatcaagaatatcca

SEQ ID NO: 412027 - DNA, 19 bp, Homo sapiens
  siRNA target sequence for ZDHHC15 (NM_144969.1,853-871).
gttctggttaatacctatt

SEQ ID NO: 412028 - DNA, 19 bp, Homo sapiens
  siRNA target sequence for ZDHHC15 (NM_144969.1,856-874).
ctggttaatacctattggt

SEQ ID NO: 412029 - DNA, 19 bp, Homo sapiens
  siRNA target sequence for ZDHHC15 (NM_144969.1,901-919).
ccctatgaggtctatgaat

SEQ ID NO: 412030 - DNA, 19 bp, Homo sapiens
  siRNA target sequence for ZDHHC15 (NM_144969.1,928-946).
gaacccactgctagcaaat

SEQ ID NO: 412031 - DNA, 19 bp, Homo sapiens
  siRNA target sequence for MGC39350 (NM_144970.1,260-278).
ggagattttgagacatcat

SEQ ID NO: 412032 - DNA, 19 bp, Homo sapiens
  siRNA target sequence for MGC39350 (NM_144970.1,368-386).
ccgaggactagcagacaaa

SEQ ID NO: 412033 - DNA, 19 bp, Homo sapiens
  siRNA target sequence for MGC39350 (NM_144970.1,370-388).
gaggactagcagacaaaca

SEQ ID NO: 412034 - DNA, 19 bp, Homo sapiens
  siRNA target sequence for MGC39350 (NM_144970.1,403-421).
gtgatgcagttgctctttt

SEQ ID NO: 412035 - DNA, 19 bp, Homo sapiens
  siRNA target sequence for MGC39350 (NM_144970.1,417-435).
cttttaagtctcatcaact

SEQ ID NO: 412036 - DNA, 19 bp, Homo sapiens
  siRNA target sequence for MGC39350 (NM_144970.1,449-467).
cgtggttgatcgaaagaaa

SEQ ID NO: 412037 - DNA, 19 bp, Homo sapiens
  siRNA target sequence for MGC39350 (NM_144970.1,453-471).
gttgatcgaaagaaagtca

SEQ ID NO: 412038 - DNA, 19 bp, Homo sapiens
  siRNA target sequence for MGC39350 (NM_144970.1,464-482).
gaaagtcacagaggtaatt

SEQ ID NO: 412039 - DNA, 19 bp, Homo sapiens
  siRNA target sequence for MGC39350 (NM_144970.1,513-531).
gagatgaaagtatcttcta

SEQ ID NO: 412040 - DNA, 19 bp, Homo sapiens
  siRNA target sequence for MGC39350 (NM_144970.1,529-547).
ctacgtggcttcgagattt

SEQ ID NO: 412041 - DNA, 19 bp, Homo sapiens
  siRNA target sequence for MGC39350 (NM_144970.1,535-553).
ggcttcgagattttcagat

SEQ ID NO: 412042 - DNA, 19 bp, Homo sapiens
  siRNA target sequence for MGC39350 (NM_144970.1,551-569).
gatgaagatccaaaatttt

SEQ ID NO: 412043 - DNA, 19 bp, Homo sapiens
  siRNA target sequence for MGC39350 (NM_144970.1,592-610).
cagagattgtggcagtata

SEQ ID NO: 412044 - DNA, 19 bp, Homo sapiens
  siRNA target sequence for MGC39350 (NM_144970.1,602-620).
ggcagtatactccagaata

SEQ ID NO: 412045 - DNA, 19 bp, Homo sapiens
  siRNA target sequence for MGC39350 (NM_144970.1,604-622).
cagtatactccagaataga

SEQ ID NO: 412046 - DNA, 19 bp, Homo sapiens
  siRNA target sequence for MGC39350 (NM_144970.1,669-687).
cagcgagatgggtgtgaat

SEQ ID NO: 412047 - DNA, 19 bp, Homo sapiens
  siRNA target sequence for MGC39350 (NM_144970.1,671-689).
gcgagatgggtgtgaatgt

SEQ ID NO: 412048 - DNA, 19 bp, Homo sapiens
  siRNA target sequence for MGC39350 (NM_144970.1,740-758).
gttactaaaggagaaactt

SEQ ID NO: 412049 - DNA, 19 bp, Homo sapiens
  siRNA target sequence for MGC39350 (NM_144970.1,797-815).
gcctgaagagctctcaaat

SEQ ID NO: 412050 - DNA, 19 bp, Homo sapiens
  siRNA target sequence for MGC39350 (NM_144970.1,868-886).
gccttacagaagatatgca

SEQ ID NO: 412051 - DNA, 19 bp, Homo sapiens
  siRNA target sequence for MGC24039 (NM_144973.2,328-346).
cagagtcctttgagaagaa

SEQ ID NO: 412052 - DNA, 19 bp, Homo sapiens
  siRNA target sequence for MGC24039 (NM_144973.2,366-384).
cgcccactatcctcagaat

SEQ ID NO: 412053 - DNA, 19 bp, Homo sapiens
  siRNA target sequence for MGC24039 (NM_144973.2,367-385).
gcccactatcctcagaata

SEQ ID NO: 412054 - DNA, 19 bp, Homo sapiens
  siRNA target sequence for MGC24039 (NM_144973.2,369-387).
ccactatcctcagaatata

SEQ ID NO: 412055 - DNA, 19 bp, Homo sapiens
  siRNA target sequence for MGC24039 (NM_144973.2,372-390).
ctatcctcagaatatagaa

SEQ ID NO: 412056 - DNA, 19 bp, Homo sapiens
  siRNA target sequence for MGC24039 (NM_144973.2,406-424).
caagatgcggtgaacatgt

SEQ ID NO: 412057 - DNA, 19 bp, Homo sapiens
  siRNA target sequence for MGC24039 (NM_144973.2,409-427).
gatgcggtgaacatgttgt

SEQ ID NO: 412058 - DNA, 19 bp, Homo sapiens
  siRNA target sequence for MGC24039 (NM_144973.2,476-494).
cccagtttcactcatttat

SEQ ID NO: 412059 - DNA, 19 bp, Homo sapiens
  siRNA target sequence for MGC24039 (NM_144973.2,511-529).
ggttctcgcacctatggtt

SEQ ID NO: 412060 - DNA, 19 bp, Homo sapiens
  siRNA target sequence for MGC24039 (NM_144973.2,512-530).
gttctcgcacctatggttt

SEQ ID NO: 412061 - DNA, 19 bp, Homo sapiens
  siRNA target sequence for MGC24039 (NM_144973.2,515-533).
ctcgcacctatggttttgt

SEQ ID NO: 412062 - DNA, 19 bp, Homo sapiens
  siRNA target sequence for MGC24039 (NM_144973.2,553-571).
gttacaagtaagcaaatct

SEQ ID NO: 412063 - DNA, 19 bp, Homo sapiens
  siRNA target sequence for MGC24039 (NM_144973.2,601-619).
cacaacgctgagcattaca

SEQ ID NO: 412064 - DNA, 19 bp, Homo sapiens
  siRNA target sequence for MGC24039 (NM_144973.2,612-630).
gcattacagcagtgtgtat

SEQ ID NO: 412065 - DNA, 19 bp, Homo sapiens
  siRNA target sequence for MGC24039 (NM_144973.2,641-659).
cctgcagtatggactcatt

SEQ ID NO: 412066 - DNA, 19 bp, Homo sapiens
  siRNA target sequence for MGC24039 (NM_144973.2,651-669).
ggactcattggcaagtagt

SEQ ID NO: 412067 - DNA, 19 bp, Homo sapiens
  siRNA target sequence for MGC24039 (NM_144973.2,682-700).
gatacaacttcccttttga

SEQ ID NO: 412068 - DNA, 19 bp, Homo sapiens
  siRNA target sequence for MGC24039 (NM_144973.2,708-726).
gcgatacaactcctatgat

SEQ ID NO: 412069 - DNA, 19 bp, Homo sapiens
  siRNA target sequence for MGC24039 (NM_144973.2,709-727).
cgatacaactcctatgata

SEQ ID NO: 412070 - DNA, 19 bp, Homo sapiens
  siRNA target sequence for MGC24039 (NM_144973.2,710-728).
gatacaactcctatgatat

SEQ ID NO: 412071 - DNA, 19 bp, Homo sapiens
  siRNA target sequence for MGC24039 (NM_144973.2,732-750).
cagagacaccctgtatgtt

SEQ ID NO: 412072 - DNA, 19 bp, Homo sapiens
  siRNA target sequence for MGC24039 (NM_144973.2,736-754).
gacaccctgtatgtttcaa

SEQ ID NO: 412073 - DNA, 19 bp, Homo sapiens
  siRNA target sequence for MGC24039 (NM_144973.2,851-869).
ccttgccacttgaaagcta

SEQ ID NO: 412074 - DNA, 19 bp, Homo sapiens
  siRNA target sequence for MGC24039 (NM_144973.2,852-870).
cttgccacttgaaagctat

SEQ ID NO: 412075 - DNA, 19 bp, Homo sapiens
  siRNA target sequence for MGC24039 (NM_144973.2,862-880).
gaaagctatatccacaata

SEQ ID NO: 412076 - DNA, 19 bp, Homo sapiens
  siRNA target sequence for MGC24039 (NM_144973.2,866-884).
gctatatccacaatattct

SEQ ID NO: 412077 - DNA, 19 bp, Homo sapiens
  siRNA target sequence for MGC24039 (NM_144973.2,867-885).
ctatatccacaatattctt

SEQ ID NO: 412078 - DNA, 19 bp, Homo sapiens
  siRNA target sequence for MGC24039 (NM_144973.2,1080-1098).
ctactcacaagattatcaa

SEQ ID NO: 412079 - DNA, 19 bp, Homo sapiens
  siRNA target sequence for MGC24039 (NM_144973.2,1120-1138).
ggcatcaccacacttttgt

SEQ ID NO: 412080 - DNA, 19 bp, Homo sapiens
  siRNA target sequence for MGC24039 (NM_144973.2,1142-1160).
catttcaatggcaacatgt

SEQ ID NO: 412081 - DNA, 19 bp, Homo sapiens
  siRNA target sequence for MGC24039 (NM_144973.2,1204-1222).
gctcctgtcccttatctga

SEQ ID NO: 412082 - DNA, 19 bp, Homo sapiens
  siRNA target sequence for MGC24039 (NM_144973.2,1205-1223).
ctcctgtcccttatctgat

SEQ ID NO: 412083 - DNA, 19 bp, Homo sapiens
  siRNA target sequence for MGC24039 (NM_144973.2,1221-1239).
gatgggccttcagtcaaaa

SEQ ID NO: 412084 - DNA, 19 bp, Homo sapiens
  siRNA target sequence for MGC24039 (NM_144973.2,1224-1242).
gggccttcagtcaaaagaa

SEQ ID NO: 412085 - DNA, 19 bp, Homo sapiens
  siRNA target sequence for MGC24039 (NM_144973.2,1244-1262).
gaactgaccgttctaaact

SEQ ID NO: 412086 - DNA, 19 bp, Homo sapiens
  siRNA target sequence for MGC24039 (NM_144973.2,1247-1265).
ctgaccgttctaaactaga

SEQ ID NO: 412087 - DNA, 19 bp, Homo sapiens
  siRNA target sequence for MGC24039 (NM_144973.2,1251-1269).
ccgttctaaactagaactt

SEQ ID NO: 412088 - DNA, 19 bp, Homo sapiens
  siRNA target sequence for MGC24039 (NM_144973.2,1267-1285).
cttcctcaagaggctaatt

SEQ ID NO: 412089 - DNA, 19 bp, Homo sapiens
  siRNA target sequence for MGC24039 (NM_144973.2,1273-1291).
caagaggctaatttgtgtt

SEQ ID NO: 412090 - DNA, 19 bp, Homo sapiens
  siRNA target sequence for MGC24039 (NM_144973.2,1320-1338).
gttgcctgaagaatttcca

SEQ ID NO: 412091 - DNA, 19 bp, Homo sapiens
  siRNA target sequence for MGC24039 (NM_144973.2,1429-1447).
gagagtaccagcaaactga

SEQ ID NO: 412092 - DNA, 19 bp, Homo sapiens
  siRNA target sequence for MGC24039 (NM_144973.2,1433-1451).
gtaccagcaaactgaagaa

SEQ ID NO: 412093 - DNA, 19 bp, Homo sapiens
  siRNA target sequence for MGC24039 (NM_144973.2,1488-1506).
cggcaatgtctgtactaat

SEQ ID NO: 412094 - DNA, 19 bp, Homo sapiens
  siRNA target sequence for MGC24039 (NM_144973.2,1489-1507).
ggcaatgtctgtactaata

SEQ ID NO: 412095 - DNA, 19 bp, Homo sapiens
  siRNA target sequence for MGC24039 (NM_144973.2,1490-1508).
gcaatgtctgtactaataa

SEQ ID NO: 412096 - DNA, 19 bp, Homo sapiens
  siRNA target sequence for MGC24039 (NM_144973.2,1509-1527).
catcagcatgtatgagtta

SEQ ID NO: 412097 - DNA, 19 bp, Homo sapiens
  siRNA target sequence for MGC24039 (NM_144973.2,1667-1685).
gggactaccagctcaatgt

SEQ ID NO: 412098 - DNA, 19 bp, Homo sapiens
  siRNA target sequence for MGC24039 (NM_144973.2,1750-1768).
ctttcacgcttcattgaaa

SEQ ID NO: 412099 - DNA, 19 bp, Homo sapiens
  siRNA target sequence for MGC24039 (NM_144973.2,1771-1789).
cagatgtttgccaccttta

SEQ ID NO: 412100 - DNA, 19 bp, Homo sapiens
  siRNA target sequence for MGC24039 (NM_144973.2,1773-1791).
gatgtttgccacctttatt

SEQ ID NO: 412101 - DNA, 19 bp, Homo sapiens
  siRNA target sequence for MGC24039 (NM_144973.2,1780-1798).
gccacctttattgataata

SEQ ID NO: 412102 - DNA, 19 bp, Homo sapiens
  siRNA target sequence for MGC24039 (NM_144973.2,1781-1799).
ccacctttattgataataa

SEQ ID NO: 412103 - DNA, 19 bp, Homo sapiens
  siRNA target sequence for MGC24039 (NM_144973.2,1842-1860).
ctttgacactcggattgat

SEQ ID NO: 412104 - DNA, 19 bp, Homo sapiens
  siRNA target sequence for MGC24039 (NM_144973.2,1848-1866).
cactcggattgataagata

SEQ ID NO: 412105 - DNA, 19 bp, Homo sapiens
  siRNA target sequence for MGC24039 (NM_144973.2,1858-1876).
gataagataaggctgtata

SEQ ID NO: 412106 - DNA, 19 bp, Homo sapiens
  siRNA target sequence for MGC24039 (NM_144973.2,1889-1907).
ccaccttgcggacatctat

SEQ ID NO: 412107 - DNA, 19 bp, Homo sapiens
  siRNA target sequence for MGC24039 (NM_144973.2,1890-1908).
caccttgcggacatctata

SEQ ID NO: 412108 - DNA, 19 bp, Homo sapiens
  siRNA target sequence for MGC24039 (NM_144973.2,1892-1910).
ccttgcggacatctatata

SEQ ID NO: 412109 - DNA, 19 bp, Homo sapiens
  siRNA target sequence for MGC24039 (NM_144973.2,1893-1911).
cttgcggacatctatatat

SEQ ID NO: 412110 - DNA, 19 bp, Homo sapiens
  siRNA target sequence for MGC24039 (NM_144973.2,1897-1915).
cggacatctatatatcaga

SEQ ID NO: 412111 - DNA, 19 bp, Homo sapiens
  siRNA target sequence for MGC24039 (NM_144973.2,1898-1916).
ggacatctatatatcagaa

SEQ ID NO: 412112 - DNA, 19 bp, Homo sapiens
  siRNA target sequence for MGC24039 (NM_144973.2,1912-1930).
cagaaatgcagcactttaa

SEQ ID NO: 412113 - DNA, 19 bp, Homo sapiens
  siRNA target sequence for MGC24039 (NM_144973.2,1986-2004).
ccacccacatctacttgat

SEQ ID NO: 412114 - DNA, 19 bp, Homo sapiens
  siRNA target sequence for MGC24039 (NM_144973.2,2034-2052).
ggggttctttccaaagtta

SEQ ID NO: 412115 - DNA, 19 bp, Homo sapiens
  siRNA target sequence for MGC24039 (NM_144973.2,2036-2054).
ggttctttccaaagttaca

SEQ ID NO: 412116 - DNA, 19 bp, Homo sapiens
  siRNA target sequence for MGC24039 (NM_144973.2,2135-2153).
gccttcgccagcattctga

SEQ ID NO: 412117 - DNA, 19 bp, Homo sapiens
  siRNA target sequence for MGC24039 (NM_144973.2,2172-2190).
cgacttgagggagaaatat

SEQ ID NO: 412118 - DNA, 19 bp, Homo sapiens
  siRNA target sequence for MGC24039 (NM_144973.2,2193-2211).
gcaagaggcacgaagttta

SEQ ID NO: 412119 - DNA, 19 bp, Homo sapiens
  siRNA target sequence for MGC24039 (NM_144973.2,2200-2218).
gcacgaagtttaggaaaaa

SEQ ID NO: 412120 - DNA, 19 bp, Homo sapiens
  siRNA target sequence for MGC24039 (NM_144973.2,2221-2239).
ctgaggcaacccaaactgt

SEQ ID NO: 412121 - DNA, 19 bp, Homo sapiens
  siRNA target sequence for MGC24039 (NM_144973.2,2263-2281).
gcacagaccaactgtaaat

SEQ ID NO: 412122 - DNA, 19 bp, Homo sapiens
  siRNA target sequence for MGC24039 (NM_144973.2,2264-2282).
cacagaccaactgtaaatt

SEQ ID NO: 412123 - DNA, 19 bp, Homo sapiens
  siRNA target sequence for MGC24039 (NM_144973.2,2268-2286).
gaccaactgtaaattcgta

SEQ ID NO: 412124 - DNA, 19 bp, Homo sapiens
  siRNA target sequence for MGC24039 (NM_144973.2,2287-2305).
gaaggcttattaaaagaat

SEQ ID NO: 412125 - DNA, 19 bp, Homo sapiens
  siRNA target sequence for MGC24039 (NM_144973.2,2551-2569).
gccctcggaccagaaagaa

SEQ ID NO: 412126 - DNA, 19 bp, Homo sapiens
  siRNA target sequence for MGC24039 (NM_144973.2,2553-2571).
cctcggaccagaaagaaga

SEQ ID NO: 412127 - DNA, 19 bp, Homo sapiens
  siRNA target sequence for MGC24039 (NM_144973.2,2600-2618).
cgctcagggtctctcttat

SEQ ID NO: 412128 - DNA, 19 bp, Homo sapiens
  siRNA target sequence for MGC24039 (NM_144973.2,2601-2619).
gctcagggtctctcttatt

SEQ ID NO: 412129 - DNA, 19 bp, Homo sapiens
  siRNA target sequence for MGC24039 (NM_144973.2,2622-2640).
ggacatgaggcatattcaa

SEQ ID NO: 412130 - DNA, 19 bp, Homo sapiens
  siRNA target sequence for MGC24039 (NM_144973.2,2671-2689).
cgagctcgggcgtggataa

SEQ ID NO: 412131 - DNA, 19 bp, Homo sapiens
  siRNA target sequence for MGC24039 (NM_144973.2,2675-2693).
ctcgggcgtggataagact

SEQ ID NO: 412132 - DNA, 19 bp, Homo sapiens
  siRNA target sequence for MGC24039 (NM_144973.2,2725-2743).
cttaagcagttgctttcta

SEQ ID NO: 412133 - DNA, 19 bp, Homo sapiens
  siRNA target sequence for MGC24039 (NM_144973.2,2763-2781).
gctttataagcgatatgct

SEQ ID NO: 412134 - DNA, 19 bp, Homo sapiens
  siRNA target sequence for MGC24039 (NM_144973.2,2785-2803).
ctacgttgcgaagaagaaa

SEQ ID NO: 412135 - DNA, 19 bp, Homo sapiens
  siRNA target sequence for MGC24039 (NM_144973.2,2804-2822).
gagagcagtttctttacca

SEQ ID NO: 412136 - DNA, 19 bp, Homo sapiens
  siRNA target sequence for MGC24039 (NM_144973.2,2864-2882).
gtgtgttcaccactatcat

SEQ ID NO: 412137 - DNA, 19 bp, Homo sapiens
  siRNA target sequence for MGC24039 (NM_144973.2,2866-2884).
gtgttcaccactatcatga

SEQ ID NO: 412138 - DNA, 19 bp, Homo sapiens
  siRNA target sequence for MGC24039 (NM_144973.2,2868-2886).
gttcaccactatcatgatt

SEQ ID NO: 412139 - DNA, 19 bp, Homo sapiens
  siRNA target sequence for MGC24039 (NM_144973.2,2888-2906).
cgtataggtcagtgatcat

SEQ ID NO: 412140 - DNA, 19 bp, Homo sapiens
  siRNA target sequence for MGC24039 (NM_144973.2,2897-2915).
cagtgatcatcccaatcaa

SEQ ID NO: 412141 - DNA, 19 bp, Homo sapiens
  siRNA target sequence for MGC24039 (NM_144973.2,2920-2938).
ctgagcaatgcaataatca

SEQ ID NO: 412142 - DNA, 19 bp, Homo sapiens
  siRNA target sequence for MGC24039 (NM_144973.2,2922-2940).
gagcaatgcaataatcaca

SEQ ID NO: 412143 - DNA, 19 bp, Homo sapiens
  siRNA target sequence for MGC24039 (NM_144973.2,3069-3087).
cgataactcaggactgtta

SEQ ID NO: 412144 - DNA, 19 bp, Homo sapiens
  siRNA target sequence for MGC24039 (NM_144973.2,3109-3127).
gtcatggtcagaaatgaaa

SEQ ID NO: 412145 - DNA, 19 bp, Homo sapiens
  siRNA target sequence for MGC24039 (NM_144973.2,3338-3356).
ccaatgctgggcagataca

SEQ ID NO: 412146 - DNA, 19 bp, Homo sapiens
  siRNA target sequence for MGC24039 (NM_144973.2,3339-3357).
caatgctgggcagatacaa

SEQ ID NO: 412147 - DNA, 19 bp, Homo sapiens
  siRNA target sequence for MGC24039 (NM_144973.2,3500-3518).
ctgcccgcatctttcacaa

SEQ ID NO: 412148 - DNA, 19 bp, Homo sapiens
  siRNA target sequence for MGC24039 (NM_144973.2,3506-3524).
gcatctttcacaagaatgt

SEQ ID NO: 412149 - DNA, 19 bp, Homo sapiens
  siRNA target sequence for MGC24039 (NM_144973.2,3544-3562).
gagaaagtggttgcttatt

SEQ ID NO: 412150 - DNA, 19 bp, Homo sapiens
  siRNA target sequence for MGC24039 (NM_144973.2,3569-3587).
caactgaccagattctaga

SEQ ID NO: 412151 - DNA, 19 bp, Homo sapiens
  siRNA target sequence for MGC24039 (NM_144973.2,3629-3647).
ccttctgccactacgtaaa

SEQ ID NO: 412152 - DNA, 19 bp, Homo sapiens
  siRNA target sequence for MGC24039 (NM_144973.2,3633-3651).
ctgccactacgtaaatgct

SEQ ID NO: 412153 - DNA, 19 bp, Homo sapiens
  siRNA target sequence for MGC24039 (NM_144973.2,3635-3653).
gccactacgtaaatgctat

SEQ ID NO: 412154 - DNA, 19 bp, Homo sapiens
  siRNA target sequence for MGC24039 (NM_144973.2,3636-3654).
ccactacgtaaatgctatt

SEQ ID NO: 412155 - DNA, 19 bp, Homo sapiens
  siRNA target sequence for MGC24039 (NM_144973.2,3642-3660).
cgtaaatgctattaatact

SEQ ID NO: 412156 - DNA, 19 bp, Homo sapiens
  siRNA target sequence for MGC24039 (NM_144973.2,3686-3704).
gcaaattccagattttagt

SEQ ID NO: 412157 - DNA, 19 bp, Homo sapiens
  siRNA target sequence for MGC24039 (NM_144973.2,3687-3705).
caaattccagattttagtt

SEQ ID NO: 412158 - DNA, 19 bp, Homo sapiens
  siRNA target sequence for MGC24039 (NM_144973.2,3764-3782).
ctgccatcactcgaatgta

SEQ ID NO: 412159 - DNA, 19 bp, Homo sapiens
  siRNA target sequence for MGC24039 (NM_144973.2,3767-3785).
ccatcactcgaatgtatga

SEQ ID NO: 412160 - DNA, 19 bp, Homo sapiens
  siRNA target sequence for MGC24039 (NM_144973.2,3768-3786).
catcactcgaatgtatgaa

SEQ ID NO: 412161 - DNA, 19 bp, Homo sapiens
  siRNA target sequence for FLJ31846 (NM_144974.1,536-554).
cctggaaactcaaatcaaa

SEQ ID NO: 412162 - DNA, 19 bp, Homo sapiens
  siRNA target sequence for FLJ31846 (NM_144974.1,716-734).
ccatgaaaagcgagatttt

SEQ ID NO: 412163 - DNA, 19 bp, Homo sapiens
  siRNA target sequence for FLJ31846 (NM_144974.1,751-769).
caatgaaagaagaacttat

SEQ ID NO: 412164 - DNA, 19 bp, Homo sapiens
  siRNA target sequence for FLJ31846 (NM_144974.1,790-808).
gagggaaccgaataacaca

SEQ ID NO: 412165 - DNA, 19 bp, Homo sapiens
  siRNA target sequence for FLJ31846 (NM_144974.1,794-812).
gaaccgaataacacaagta

SEQ ID NO: 412166 - DNA, 19 bp, Homo sapiens
  siRNA target sequence for FLJ31846 (NM_144974.1,850-868).
ctgtaaaagaatctatcat

SEQ ID NO: 412167 - DNA, 19 bp, Homo sapiens
  siRNA target sequence for MGC27044 (NM_144977.1,310-328).
gatggccccaacctgtatt

SEQ ID NO: 412168 - DNA, 19 bp, Homo sapiens
  siRNA target sequence for MGC27044 (NM_144977.1,317-335).
ccaacctgtattttcgaat

SEQ ID NO: 412169 - DNA, 19 bp, Homo sapiens
  siRNA target sequence for MGC27044 (NM_144977.1,370-388).
gagaccaggaaatactaca

SEQ ID NO: 412170 - DNA, 19 bp, Homo sapiens
  siRNA target sequence for MGC27044 (NM_144977.1,387-405).
cagagtgtgccaaagttct

SEQ ID NO: 412171 - DNA, 19 bp, Homo sapiens
  siRNA target sequence for MGC27044 (NM_144977.1,391-409).
gtgtgccaaagttctgttt

SEQ ID NO: 412172 - DNA, 19 bp, Homo sapiens
  siRNA target sequence for MGC27044 (NM_144977.1,427-445).
gggtgtctcagaatcaagt

SEQ ID NO: 412173 - DNA, 19 bp, Homo sapiens
  siRNA target sequence for MGC27044 (NM_144977.1,444-462).
gttggacagcactttacct

SEQ ID NO: 412174 - DNA, 19 bp, Homo sapiens
  siRNA target sequence for MGC27044 (NM_144977.1,512-530).
gacgtcaggaggcacaatt

SEQ ID NO: 412175 - DNA, 19 bp, Homo sapiens
  siRNA target sequence for MGC27044 (NM_144977.1,532-550).
gtttatgcatccttagtta

SEQ ID NO: 412176 - DNA, 19 bp, Homo sapiens
  siRNA target sequence for MGC27044 (NM_144977.1,567-585).
gtgtattacaagcttctaa

SEQ ID NO: 412177 - DNA, 19 bp, Homo sapiens
  siRNA target sequence for MGC27044 (NM_144977.1,575-593).
caagcttctaaatactctt

SEQ ID NO: 412178 - DNA, 19 bp, Homo sapiens
  siRNA target sequence for MGC27044 (NM_144977.1,637-655).
ctctcagatcactgtataa

SEQ ID NO: 412179 - DNA, 19 bp, Homo sapiens
  siRNA target sequence for MGC27044 (NM_144977.1,672-690).
gcaaatactcctgtaaatt

SEQ ID NO: 412180 - DNA, 19 bp, Homo sapiens
  siRNA target sequence for MGC27044 (NM_144977.1,739-757).
caatacccgagagtagaaa

SEQ ID NO: 412181 - DNA, 19 bp, Homo sapiens
  siRNA target sequence for MGC27044 (NM_144977.1,744-762).
cccgagagtagaaatctta

SEQ ID NO: 412182 - DNA, 19 bp, Homo sapiens
  siRNA target sequence for MGC27044 (NM_144977.1,746-764).
cgagagtagaaatcttaca

SEQ ID NO: 412183 - DNA, 19 bp, Homo sapiens
  siRNA target sequence for MGC27044 (NM_144977.1,810-828).
gccagtatgctgcatgaaa

SEQ ID NO: 412184 - DNA, 19 bp, Homo sapiens
  siRNA target sequence for MGC27044 (NM_144977.1,825-843).
gaaaggcgcatcgtgatta

SEQ ID NO: 412185 - DNA, 19 bp, Homo sapiens
  siRNA target sequence for MGC27044 (NM_144977.1,837-855).
gtgattatctcgagcaaat

SEQ ID NO: 412186 - DNA, 19 bp, Homo sapiens
  siRNA target sequence for MGC27044 (NM_144977.1,839-857).
gattatctcgagcaaatta

SEQ ID NO: 412187 - DNA, 19 bp, Homo sapiens
  siRNA target sequence for MGC27044 (NM_144977.1,851-869).
caaattaagcactttaact

SEQ ID NO: 412188 - DNA, 19 bp, Homo sapiens
  siRNA target sequence for MGC27044 (NM_144977.1,882-900).
ggatcagctgctcttctat

SEQ ID NO: 412189 - DNA, 19 bp, Homo sapiens
  siRNA target sequence for MGC27044 (NM_144977.1,883-901).
gatcagctgctcttctata

SEQ ID NO: 412190 - DNA, 19 bp, Homo sapiens
  siRNA target sequence for MGC27044 (NM_144977.1,892-910).
ctcttctatacccaatgta

SEQ ID NO: 412191 - DNA, 19 bp, Homo sapiens
  siRNA target sequence for MGC27044 (NM_144977.1,894-912).
cttctatacccaatgtatt

SEQ ID NO: 412192 - DNA, 19 bp, Homo sapiens
  siRNA target sequence for MGC27044 (NM_144977.1,904-922).
caatgtattggcaacacat

SEQ ID NO: 412193 - DNA, 19 bp, Homo sapiens
  siRNA target sequence for MGC27044 (NM_144977.1,974-992).
gccatacctgattggaata

SEQ ID NO: 412194 - DNA, 19 bp, Homo sapiens
  siRNA target sequence for MGC27044 (NM_144977.1,976-994).
catacctgattggaataca

SEQ ID NO: 412195 - DNA, 19 bp, Homo sapiens
  siRNA target sequence for MGC27044 (NM_144977.1,1022-1040).
caaatcattggaagatgtt

SEQ ID NO: 412196 - DNA, 19 bp, Homo sapiens
  siRNA target sequence for MGC27044 (NM_144977.1,1077-1095).
ccatttagtgacttgaaca

SEQ ID NO: 412197 - DNA, 19 bp, Homo sapiens
  siRNA target sequence for MGC27044 (NM_144977.1,1078-1096).
catttagtgacttgaacaa

SEQ ID NO: 412198 - DNA, 19 bp, Homo sapiens
  siRNA target sequence for MGC27044 (NM_144977.1,1091-1109).
gaacaacctaccaagtgat

SEQ ID NO: 412199 - DNA, 19 bp, Homo sapiens
  siRNA target sequence for MGC27044 (NM_144977.1,1110-1128).
gtggtctcggccttgaaaa

SEQ ID NO: 412200 - DNA, 19 bp, Homo sapiens
  siRNA target sequence for MGC27044 (NM_144977.1,1167-1185).
gtagctagggcctttctta

SEQ ID NO: 412201 - DNA, 19 bp, Homo sapiens
  siRNA target sequence for MGC27044 (NM_144977.1,1252-1270).
ctttctgtgaggagagttt

SEQ ID NO: 412202 - DNA, 19 bp, Homo sapiens
  siRNA target sequence for MGC27044 (NM_144977.1,1256-1274).
ctgtgaggagagttttgta

SEQ ID NO: 412203 - DNA, 19 bp, Homo sapiens
  siRNA target sequence for MGC27044 (NM_144977.1,1282-1300).
gctcaagcgtgatgaaaca

SEQ ID NO: 412204 - DNA, 19 bp, Homo sapiens
  siRNA target sequence for MGC27044 (NM_144977.1,1285-1303).
caagcgtgatgaaacagtt

SEQ ID NO: 412205 - DNA, 19 bp, Homo sapiens
  siRNA target sequence for MGC27044 (NM_144977.1,1350-1368).
ggtcgactggcaaaactaa

SEQ ID NO: 412206 - DNA, 19 bp, Homo sapiens
  siRNA target sequence for MGC27044 (NM_144977.1,1409-1427).
cacttcaggtggcttttgt

SEQ ID NO: 412207 - DNA, 19 bp, Homo sapiens
  siRNA target sequence for MGC27044 (NM_144977.1,1429-1447).
gaggtaaagacaagttaca

SEQ ID NO: 412208 - DNA, 19 bp, Homo sapiens
  siRNA target sequence for MGC27044 (NM_144977.1,1432-1450).
gtaaagacaagttacaata

SEQ ID NO: 412209 - DNA, 19 bp, Homo sapiens
  siRNA target sequence for MGC27044 (NM_144977.1,1442-1460).
gttacaatatgattatcca

SEQ ID NO: 412210 - DNA, 19 bp, Homo sapiens
  siRNA target sequence for FLJ32745 (NM_144978.1,100-118).
gtagtggagagtctcaaaa

SEQ ID NO: 412211 - DNA, 19 bp, Homo sapiens
  siRNA target sequence for FLJ32745 (NM_144978.1,141-159).
ctgccccgacgagtatgat

SEQ ID NO: 412212 - DNA, 19 bp, Homo sapiens
  siRNA target sequence for FLJ32745 (NM_144978.1,143-161).
gccccgacgagtatgattt

SEQ ID NO: 412213 - DNA, 19 bp, Homo sapiens
  siRNA target sequence for FLJ32745 (NM_144978.1,144-162).
ccccgacgagtatgatttt

SEQ ID NO: 412214 - DNA, 19 bp, Homo sapiens
  siRNA target sequence for FLJ32745 (NM_144978.1,148-166).
gacgagtatgatttttcaa

SEQ ID NO: 412215 - DNA, 19 bp, Homo sapiens
  siRNA target sequence for FLJ32745 (NM_144978.1,150-168).
cgagtatgatttttcaaat

SEQ ID NO: 412216 - DNA, 19 bp, Homo sapiens
  siRNA target sequence for FLJ32745 (NM_144978.1,183-201).
gtataagagaagaactcta

SEQ ID NO: 412217 - DNA, 19 bp, Homo sapiens
  siRNA target sequence for FLJ32745 (NM_144978.1,203-221).
cctccccaggtgatttgga

SEQ ID NO: 412218 - DNA, 19 bp, Homo sapiens
  siRNA target sequence for FLJ32745 (NM_144978.1,241-259).
gttggttcatcgttaaaat

SEQ ID NO: 412219 - DNA, 19 bp, Homo sapiens
  siRNA target sequence for FLJ32745 (NM_144978.1,248-266).
catcgttaaaatattctga

SEQ ID NO: 412220 - DNA, 19 bp, Homo sapiens
  siRNA target sequence for FLJ32745 (NM_144978.1,287-305).
caccattgggcagcttatt

SEQ ID NO: 412221 - DNA, 19 bp, Homo sapiens
  siRNA target sequence for FLJ32745 (NM_144978.1,289-307).
ccattgggcagcttattca

SEQ ID NO: 412222 - DNA, 19 bp, Homo sapiens
  siRNA target sequence for FLJ32745 (NM_144978.1,299-317).
gcttattcaagcacgtaaa

SEQ ID NO: 412223 - DNA, 19 bp, Homo sapiens
  siRNA target sequence for FLJ32745 (NM_144978.1,321-339).
gaattgcctagatgatgaa

SEQ ID NO: 412224 - DNA, 19 bp, Homo sapiens
  siRNA target sequence for FLJ32745 (NM_144978.1,404-422).
gagttagtacctcgaaaat

SEQ ID NO: 412225 - DNA, 19 bp, Homo sapiens
  siRNA target sequence for FLJ32745 (NM_144978.1,406-424).
gttagtacctcgaaaataa

SEQ ID NO: 412226 - DNA, 19 bp, Homo sapiens
  siRNA target sequence for FLJ32745 (NM_144978.1,457-475).
gccttgccaactaatacga

SEQ ID NO: 412227 - DNA, 19 bp, Homo sapiens
  siRNA target sequence for FLJ32745 (NM_144978.1,487-505).
cctcggactgagtgttgta

SEQ ID NO: 412228 - DNA, 19 bp, Homo sapiens
  siRNA target sequence for FLJ32745 (NM_144978.1,532-550).
cctgtcagctgtccaaaat

SEQ ID NO: 412229 - DNA, 19 bp, Homo sapiens
  siRNA target sequence for FLJ32745 (NM_144978.1,537-555).
cagctgtccaaaatctaaa

SEQ ID NO: 412230 - DNA, 19 bp, Homo sapiens
  siRNA target sequence for FLJ32745 (NM_144978.1,560-578).
cagacaagcggagtttact

SEQ ID NO: 412231 - DNA, 19 bp, Homo sapiens
  siRNA target sequence for FLJ32745 (NM_144978.1,595-613).
cagatatatgacgaattat

SEQ ID NO: 412232 - DNA, 19 bp, Homo sapiens
  siRNA target sequence for FLJ32745 (NM_144978.1,625-643).
ctgaaattgcagtgtgaaa

SEQ ID NO: 412233 - DNA, 19 bp, Homo sapiens
  siRNA target sequence for FLJ32745 (NM_144978.1,681-699).
gcgagaacgttttttactt

SEQ ID NO: 412234 - DNA, 19 bp, Homo sapiens
  siRNA target sequence for FLJ32745 (NM_144978.1,683-701).
gagaacgttttttacttga

SEQ ID NO: 412235 - DNA, 19 bp, Homo sapiens
  siRNA target sequence for FLJ32745 (NM_144978.1,754-772).
gttgaagaagaggttctta

SEQ ID NO: 412236 - DNA, 19 bp, Homo sapiens
  siRNA target sequence for FLJ32745 (NM_144978.1,817-835).
cacttaaccgaagttctta

SEQ ID NO: 412237 - DNA, 19 bp, Homo sapiens
  siRNA target sequence for FLJ32745 (NM_144978.1,951-969).
cattcaggctaaaagagtt

SEQ ID NO: 412238 - DNA, 19 bp, Homo sapiens
  siRNA target sequence for FLJ32745 (NM_144978.1,976-994).
cgtttagataatttacaga

SEQ ID NO: 412239 - DNA, 19 bp, Homo sapiens
  siRNA target sequence for FLJ32745 (NM_144978.1,999-1017).
gtacgagtttatgacaata

SEQ ID NO: 412240 - DNA, 19 bp, Homo sapiens
  siRNA target sequence for FLJ32745 (NM_144978.1,1011-1029).
gacaatacagagattgaaa

SEQ ID NO: 412241 - DNA, 19 bp, Homo sapiens
  siRNA target sequence for FLJ32745 (NM_144978.1,1042-1060).
gctgttcatgaaatgaaaa

SEQ ID NO: 412242 - DNA, 19 bp, Homo sapiens
  siRNA target sequence for FLJ32745 (NM_144978.1,1105-1123).
ccacttaatgggcaagttt

SEQ ID NO: 412243 - DNA, 19 bp, Homo sapiens
  siRNA target sequence for FLJ32745 (NM_144978.1,1106-1124).
cacttaatgggcaagttta

SEQ ID NO: 412244 - DNA, 19 bp, Homo sapiens
  siRNA target sequence for FLJ32745 (NM_144978.1,1157-1175).
cggatcatcatcttagcaa

SEQ ID NO: 412245 - DNA, 19 bp, Homo sapiens
  siRNA target sequence for FLJ32745 (NM_144978.1,1158-1176).
ggatcatcatcttagcaaa

SEQ ID NO: 412246 - DNA, 19 bp, Homo sapiens
  siRNA target sequence for FLJ32745 (NM_144978.1,1162-1180).
catcatcttagcaaagtga

SEQ ID NO: 412247 - DNA, 19 bp, Homo sapiens
  siRNA target sequence for FLJ32745 (NM_144978.1,1228-1246).
gcttcccagagaaatgata

SEQ ID NO: 412248 - DNA, 19 bp, Homo sapiens
  siRNA target sequence for FLJ32745 (NM_144978.1,1229-1247).
cttcccagagaaatgatat

SEQ ID NO: 412249 - DNA, 19 bp, Homo sapiens
  siRNA target sequence for FLJ32745 (NM_144978.1,1321-1339).
cttcacgagccttttgtaa

SEQ ID NO: 412250 - DNA, 19 bp, Homo sapiens
  siRNA target sequence for FLJ32745 (NM_144978.1,1324-1342).
cacgagccttttgtaaaat

SEQ ID NO: 412251 - DNA, 19 bp, Homo sapiens
  siRNA target sequence for FLJ32745 (NM_144978.1,1384-1402).
cactcgactatgacatcaa

SEQ ID NO: 412252 - DNA, 19 bp, Homo sapiens
  siRNA target sequence for FLJ32745 (NM_144978.1,1386-1404).
ctcgactatgacatcaaca

SEQ ID NO: 412253 - DNA, 19 bp, Homo sapiens
  siRNA target sequence for FLJ32745 (NM_144978.1,1445-1463).
ctaaaggaattcaggataa

SEQ ID NO: 412254 - DNA, 19 bp, Homo sapiens
  siRNA target sequence for FLJ32745 (NM_144978.1,1657-1675).
caggctgttccagtaatat

SEQ ID NO: 412255 - DNA, 19 bp, Homo sapiens
  siRNA target sequence for FLJ32745 (NM_144978.1,1659-1677).
ggctgttccagtaatatta

SEQ ID NO: 412256 - DNA, 19 bp, Homo sapiens
  siRNA target sequence for FLJ32745 (NM_144978.1,1660-1678).
gctgttccagtaatattaa

SEQ ID NO: 412257 - DNA, 19 bp, Homo sapiens
  siRNA target sequence for FLJ32745 (NM_144978.1,1697-1715).
gtaaaggactcctgtctaa

SEQ ID NO: 412258 - DNA, 19 bp, Homo sapiens
  siRNA target sequence for FLJ32745 (NM_144978.1,1702-1720).
ggactcctgtctaatgtta

SEQ ID NO: 412259 - DNA, 19 bp, Homo sapiens
  siRNA target sequence for FLJ32745 (NM_144978.1,1708-1726).
ctgtctaatgttattgata

SEQ ID NO: 412260 - DNA, 19 bp, Homo sapiens
  siRNA target sequence for FLJ32745 (NM_144978.1,1735-1753).
cagatgacggtggaatcta

SEQ ID NO: 412261 - DNA, 19 bp, Homo sapiens
  siRNA target sequence for FLJ32745 (NM_144978.1,1737-1755).
gatgacggtggaatctaaa

SEQ ID NO: 412262 - DNA, 19 bp, Homo sapiens
  siRNA target sequence for FLJ32745 (NM_144978.1,1774-1792).
gaagcctgtagcaactctt

SEQ ID NO: 412263 - DNA, 19 bp, Homo sapiens
  siRNA target sequence for FLJ32745 (NM_144978.1,1818-1836).
gcttcgagcccctaagctt

SEQ ID NO: 412264 - DNA, 19 bp, Homo sapiens
  siRNA target sequence for FLJ32745 (NM_144978.1,1827-1845).
ccctaagcttgatcttcaa

SEQ ID NO: 412265 - DNA, 19 bp, Homo sapiens
  siRNA target sequence for FLJ32745 (NM_144978.1,1829-1847).
ctaagcttgatcttcaaat

SEQ ID NO: 412266 - DNA, 19 bp, Homo sapiens
  siRNA target sequence for FLJ32745 (NM_144978.1,1879-1897).
ctttccaaaatcaagagta

SEQ ID NO: 412267 - DNA, 19 bp, Homo sapiens
  siRNA target sequence for FLJ32745 (NM_144978.1,1908-1926).
ctttgaactttttacgatt

SEQ ID NO: 412268 - DNA, 19 bp, Homo sapiens
  siRNA target sequence for C6orf118 (NM_144980.1,33-51).
gagcgggagcctgaattgt

SEQ ID NO: 412269 - DNA, 19 bp, Homo sapiens
  siRNA target sequence for C6orf118 (NM_144980.1,137-155).
gtgtaatctgaagaaactt

SEQ ID NO: 412270 - DNA, 19 bp, Homo sapiens
  siRNA target sequence for C6orf118 (NM_144980.1,236-254).
gcctccggagacgatctta

SEQ ID NO: 412271 - DNA, 19 bp, Homo sapiens
  siRNA target sequence for C6orf118 (NM_144980.1,238-256).
ctccggagacgatcttaca

SEQ ID NO: 412272 - DNA, 19 bp, Homo sapiens
  siRNA target sequence for C6orf118 (NM_144980.1,535-553).
ggcgcaggagggaagaact

SEQ ID NO: 412273 - DNA, 19 bp, Homo sapiens
  siRNA target sequence for C6orf118 (NM_144980.1,610-628).
gggaccggcaccactatgt

SEQ ID NO: 412274 - DNA, 19 bp, Homo sapiens
  siRNA target sequence for C6orf118 (NM_144980.1,856-874).
gtaacagttctttgatatt

SEQ ID NO: 412275 - DNA, 19 bp, Homo sapiens
  siRNA target sequence for C6orf118 (NM_144980.1,879-897).
gatctcttgaaaaaagtta

SEQ ID NO: 412276 - DNA, 19 bp, Homo sapiens
  siRNA target sequence for C6orf118 (NM_144980.1,961-979).
ctcttctggctcaactcaa

SEQ ID NO: 412277 - DNA, 19 bp, Homo sapiens
  siRNA target sequence for C6orf118 (NM_144980.1,1043-1061).
gctcgtgacagccacaaaa

SEQ ID NO: 412278 - DNA, 19 bp, Homo sapiens
  siRNA target sequence for C6orf118 (NM_144980.1,1128-1146).
gcaaaggaacgatcagaat

SEQ ID NO: 412279 - DNA, 19 bp, Homo sapiens
  siRNA target sequence for C6orf118 (NM_144980.1,1210-1228).
ggtgtgaaatactcagtaa

SEQ ID NO: 412280 - DNA, 19 bp, Homo sapiens
  siRNA target sequence for C6orf118 (NM_144980.1,1223-1241).
cagtaagtgggatgagata

SEQ ID NO: 412281 - DNA, 19 bp, Homo sapiens
  siRNA target sequence for C6orf118 (NM_144980.1,1298-1316).
cactgagaataggattaaa

SEQ ID NO: 412282 - DNA, 19 bp, Homo sapiens
  siRNA target sequence for C6orf118 (NM_144980.1,1302-1320).
gagaataggattaaaagca

SEQ ID NO: 412283 - DNA, 19 bp, Homo sapiens
  siRNA target sequence for C6orf118 (NM_144980.1,1304-1322).
gaataggattaaaagcata

SEQ ID NO: 412284 - DNA, 19 bp, Homo sapiens
  siRNA target sequence for C6orf118 (NM_144980.1,1318-1336).
gcatagagcatgaagctat

SEQ ID NO: 412285 - DNA, 19 bp, Homo sapiens
  siRNA target sequence for C6orf118 (NM_144980.1,1319-1337).
catagagcatgaagctata

SEQ ID NO: 412286 - DNA, 19 bp, Homo sapiens
  siRNA target sequence for MGC23401 (NM_144982.3,542-560).
gtctcatccgccttctgta

SEQ ID NO: 412287 - DNA, 19 bp, Homo sapiens
  siRNA target sequence for MGC23401 (NM_144982.3,795-813).
cctcggaagagctccaaaa

SEQ ID NO: 412288 - DNA, 19 bp, Homo sapiens
  siRNA target sequence for MGC23401 (NM_144982.3,798-816).
cggaagagctccaaaagtt

SEQ ID NO: 412289 - DNA, 19 bp, Homo sapiens
  siRNA target sequence for MGC23401 (NM_144982.3,921-939).
gaactagaatgcatcaata

SEQ ID NO: 412290 - DNA, 19 bp, Homo sapiens
  siRNA target sequence for MGC23401 (NM_144982.3,1011-1029).
gaccaaactagcactgata

SEQ ID NO: 412291 - DNA, 19 bp, Homo sapiens
  siRNA target sequence for MGC23401 (NM_144982.3,1013-1031).
ccaaactagcactgataat

SEQ ID NO: 412292 - DNA, 19 bp, Homo sapiens
  siRNA target sequence for MGC23401 (NM_144982.3,1151-1169).
gaaccgtttgaaaaaagtt

SEQ ID NO: 412293 - DNA, 19 bp, Homo sapiens
  siRNA target sequence for MGC23401 (NM_144982.3,1196-1214).
gaaatccgacactactgat

SEQ ID NO: 412294 - DNA, 19 bp, Homo sapiens
  siRNA target sequence for MGC23401 (NM_144982.3,1210-1228).
ctgattctagtcaaggatt

SEQ ID NO: 412295 - DNA, 19 bp, Homo sapiens
  siRNA target sequence for MGC23401 (NM_144982.3,1258-1276).
gaattagtacctcagatat

SEQ ID NO: 412296 - DNA, 19 bp, Homo sapiens
  siRNA target sequence for MGC23401 (NM_144982.3,1409-1427).
gttgactaagacgaaaact

SEQ ID NO: 412297 - DNA, 19 bp, Homo sapiens
  siRNA target sequence for MGC23401 (NM_144982.3,1412-1430).
gactaagacgaaaactgta

SEQ ID NO: 412298 - DNA, 19 bp, Homo sapiens
  siRNA target sequence for MGC23401 (NM_144982.3,1426-1444).
ctgtacagcaaaaagttaa

SEQ ID NO: 412299 - DNA, 19 bp, Homo sapiens
  siRNA target sequence for MGC23401 (NM_144982.3,1459-1477).
cacattcggccaaaaaagt

SEQ ID NO: 412300 - DNA, 19 bp, Homo sapiens
  siRNA target sequence for MGC23401 (NM_144982.3,1483-1501).
ctacagctaaacaagcatt

SEQ ID NO: 412301 - DNA, 19 bp, Homo sapiens
  siRNA target sequence for MGC23401 (NM_144982.3,1659-1677).
cagtacaatcgattcatga

SEQ ID NO: 412302 - DNA, 19 bp, Homo sapiens
  siRNA target sequence for MGC23401 (NM_144982.3,1661-1679).
gtacaatcgattcatgaaa

SEQ ID NO: 412303 - DNA, 19 bp, Homo sapiens
  siRNA target sequence for MGC23401 (NM_144982.3,1727-1745).
cctgaggcgatccttagat

SEQ ID NO: 412304 - DNA, 19 bp, Homo sapiens
  siRNA target sequence for MGC23401 (NM_144982.3,1728-1746).
ctgaggcgatccttagata

SEQ ID NO: 412305 - DNA, 19 bp, Homo sapiens
  siRNA target sequence for MGC23401 (NM_144982.3,1732-1750).
ggcgatccttagataagca

SEQ ID NO: 412306 - DNA, 19 bp, Homo sapiens
  siRNA target sequence for MGC23401 (NM_144982.3,1733-1751).
gcgatccttagataagcaa

SEQ ID NO: 412307 - DNA, 19 bp, Homo sapiens
  siRNA target sequence for MGC23401 (NM_144982.3,1764-1782).
ggaggaggcatttatcagt

SEQ ID NO: 412308 - DNA, 19 bp, Homo sapiens
  siRNA target sequence for MGC23401 (NM_144982.3,1845-1863).
ccagtgcaaccgccatttt

SEQ ID NO: 412309 - DNA, 19 bp, Homo sapiens
  siRNA target sequence for MGC23401 (NM_144982.3,1846-1864).
cagtgcaaccgccattttt

SEQ ID NO: 412310 - DNA, 19 bp, Homo sapiens
  siRNA target sequence for MGC23401 (NM_144982.3,1854-1872).
ccgccatttttctctgaat

SEQ ID NO: 412311 - DNA, 19 bp, Homo sapiens
  siRNA target sequence for MGC23401 (NM_144982.3,2042-2060).
gcctccaaaaccacctttt

SEQ ID NO: 412312 - DNA, 19 bp, Homo sapiens
  siRNA target sequence for MGC23401 (NM_144982.3,2087-2105).
gctgcttcgagaagaacta

SEQ ID NO: 412313 - DNA, 19 bp, Homo sapiens
  siRNA target sequence for MGC23401 (NM_144982.3,2091-2109).
cttcgagaagaactactta

SEQ ID NO: 412314 - DNA, 19 bp, Homo sapiens
  siRNA target sequence for MGC23401 (NM_144982.3,2173-2191).
cacctccagttctgaacaa

SEQ ID NO: 412315 - DNA, 19 bp, Homo sapiens
  siRNA target sequence for MGC23401 (NM_144982.3,2175-2193).
cctccagttctgaacaatt

SEQ ID NO: 412316 - DNA, 19 bp, Homo sapiens
  siRNA target sequence for MGC23401 (NM_144982.3,2179-2197).
cagttctgaacaattcaca

SEQ ID NO: 412317 - DNA, 19 bp, Homo sapiens
  siRNA target sequence for MGC23401 (NM_144982.3,2202-2220).
gtgccaagaagcaatctat

SEQ ID NO: 412318 - DNA, 19 bp, Homo sapiens
  siRNA target sequence for MGC23401 (NM_144982.3,2217-2235).
ctatcaatagtcagtatta

SEQ ID NO: 412319 - DNA, 19 bp, Homo sapiens
  siRNA target sequence for MGC23401 (NM_144982.3,2251-2269).
ctaggatacagaatccaaa

SEQ ID NO: 412320 - DNA, 19 bp, Homo sapiens
  siRNA target sequence for MGC23401 (NM_144982.3,2299-2317).
ctgtgatctcgcttccaaa

SEQ ID NO: 412321 - DNA, 19 bp, Homo sapiens
  siRNA target sequence for MGC23401 (NM_144982.3,2319-2337).
cataaatcagtggttgtaa

SEQ ID NO: 412322 - DNA, 19 bp, Homo sapiens
  siRNA target sequence for MGC23401 (NM_144982.3,2406-2424).
ggattagagtccatgatta

SEQ ID NO: 412323 - DNA, 19 bp, Homo sapiens
  siRNA target sequence for MGC23401 (NM_144982.3,2407-2425).
gattagagtccatgattaa

SEQ ID NO: 412324 - DNA, 19 bp, Homo sapiens
  siRNA target sequence for MGC23401 (NM_144982.3,2572-2590).
gtgagaaacagcgtttgat

SEQ ID NO: 412325 - DNA, 19 bp, Homo sapiens
  siRNA target sequence for MGC23401 (NM_144982.3,2574-2592).
gagaaacagcgtttgatta

SEQ ID NO: 412326 - DNA, 19 bp, Homo sapiens
  siRNA target sequence for MGC23401 (NM_144982.3,2582-2600).
gcgtttgattaaatcagat

SEQ ID NO: 412327 - DNA, 19 bp, Homo sapiens
  siRNA target sequence for MGC23401 (NM_144982.3,2684-2702).
ggttacagatgcagaatca

SEQ ID NO: 412328 - DNA, 19 bp, Homo sapiens
  siRNA target sequence for MGC23401 (NM_144982.3,2729-2747).
gatgaaagatgaatctgtt

SEQ ID NO: 412329 - DNA, 19 bp, Homo sapiens
  siRNA target sequence for MGC23401 (NM_144982.3,2904-2922).
gttcaacagcgtgttacaa

SEQ ID NO: 412330 - DNA, 19 bp, Homo sapiens
  siRNA target sequence for MGC23401 (NM_144982.3,2907-2925).
caacagcgtgttacaatta

SEQ ID NO: 412331 - DNA, 19 bp, Homo sapiens
  siRNA target sequence for MGC23401 (NM_144982.3,2910-2928).
cagcgtgttacaattaaga

SEQ ID NO: 412332 - DNA, 19 bp, Homo sapiens
  siRNA target sequence for MGC23401 (NM_144982.3,2912-2930).
gcgtgttacaattaagaaa

SEQ ID NO: 412333 - DNA, 19 bp, Homo sapiens
  siRNA target sequence for MGC23401 (NM_144982.3,3047-3065).
ggacagttctccagtatca

SEQ ID NO: 412334 - DNA, 19 bp, Homo sapiens
  siRNA target sequence for MGC23401 (NM_144982.3,3101-3119).
ggagaaaagacggttacaa

SEQ ID NO: 412335 - DNA, 19 bp, Homo sapiens
  siRNA target sequence for MGC23401 (NM_144982.3,3102-3120).
gagaaaagacggttacaaa

SEQ ID NO: 412336 - DNA, 19 bp, Homo sapiens
  siRNA target sequence for MGC23401 (NM_144982.3,3111-3129).
cggttacaaaagctagaat

SEQ ID NO: 412337 - DNA, 19 bp, Homo sapiens
  siRNA target sequence for MGC23401 (NM_144982.3,3112-3130).
ggttacaaaagctagaata

SEQ ID NO: 412338 - DNA, 19 bp, Homo sapiens
  siRNA target sequence for MGC23401 (NM_144982.3,3165-3183).
gcccgtgcccttaaagcaa

SEQ ID NO: 412339 - DNA, 19 bp, Homo sapiens
  siRNA target sequence for MGC23401 (NM_144982.3,3216-3234).
gaggaacccgaattttctt

SEQ ID NO: 412340 - DNA, 19 bp, Homo sapiens
  siRNA target sequence for MGC23401 (NM_144982.3,3218-3236).
ggaacccgaattttcttta

SEQ ID NO: 412341 - DNA, 19 bp, Homo sapiens
  siRNA target sequence for MGC23401 (NM_144982.3,3255-3273).
gatctgacacaagataaat

SEQ ID NO: 412342 - DNA, 19 bp, Homo sapiens
  siRNA target sequence for MGC23401 (NM_144982.3,3300-3318).
gttgatgatgaaattttgt

SEQ ID NO: 412343 - DNA, 19 bp, Homo sapiens
  siRNA target sequence for MGC23401 (NM_144982.3,3343-3361).
gatcttttttagaatccaa

SEQ ID NO: 412344 - DNA, 19 bp, Homo sapiens
  siRNA target sequence for MGC23401 (NM_144982.3,3370-3388).
ctaaacctaaccttaagca

SEQ ID NO: 412345 - DNA, 19 bp, Homo sapiens
  siRNA target sequence for MGC23401 (NM_144982.3,3380-3398).
ccttaagcacactgatact

SEQ ID NO: 412346 - DNA, 19 bp, Homo sapiens
  siRNA target sequence for MGC23401 (NM_144982.3,3389-3407).
cactgatactgctaacaaa

SEQ ID NO: 412347 - DNA, 19 bp, Homo sapiens
  siRNA target sequence for MGC23401 (NM_144982.3,3419-3437).
caaacttaataaaaatact

SEQ ID NO: 412348 - DNA, 19 bp, Homo sapiens
  siRNA target sequence for MGC23401 (NM_144982.3,3474-3492).
ggtgaattgcaaaaattgt

SEQ ID NO: 412349 - DNA, 19 bp, Homo sapiens
  siRNA target sequence for MGC23401 (NM_144982.3,3623-3641).
gaagccatgtccttttaga

SEQ ID NO: 412350 - DNA, 19 bp, Homo sapiens
  siRNA target sequence for MGC23401 (NM_144982.3,3633-3651).
ccttttagaccctaccata

SEQ ID NO: 412351 - DNA, 19 bp, Homo sapiens
  siRNA target sequence for MGC23401 (NM_144982.3,3674-3692).
ctacagatttagtccatat

SEQ ID NO: 412352 - DNA, 19 bp, Homo sapiens
  siRNA target sequence for MGC23401 (NM_144982.3,3711-3729).
cttcccctgagctcagtat

SEQ ID NO: 412353 - DNA, 19 bp, Homo sapiens
  siRNA target sequence for MGC23401 (NM_144982.3,3715-3733).
ccctgagctcagtatcata

SEQ ID NO: 412354 - DNA, 19 bp, Homo sapiens
  siRNA target sequence for MGC23401 (NM_144982.3,3721-3739).
gctcagtatcatacagtaa

SEQ ID NO: 412355 - DNA, 19 bp, Homo sapiens
  siRNA target sequence for MGC23401 (NM_144982.3,3722-3740).
ctcagtatcatacagtaat

SEQ ID NO: 412356 - DNA, 19 bp, Homo sapiens
  siRNA target sequence for MGC23401 (NM_144982.3,3758-3776).
gtgtttctgccgttttgat

SEQ ID NO: 412357 - DNA, 19 bp, Homo sapiens
  siRNA target sequence for MGC23401 (NM_144982.3,3815-3833).
gcatatacaagactataca

SEQ ID NO: 412358 - DNA, 19 bp, Homo sapiens
  siRNA target sequence for MGC23401 (NM_144982.3,3834-3852).
cttagccgaaaacagttat

SEQ ID NO: 412359 - DNA, 19 bp, Homo sapiens
  siRNA target sequence for MGC23401 (NM_144982.3,3857-3875).
ggacattctgtcatataat

SEQ ID NO: 412360 - DNA, 19 bp, Homo sapiens
  siRNA target sequence for MGC23401 (NM_144982.3,3888-3906).
ggttgtgcagagacaagta

SEQ ID NO: 412361 - DNA, 19 bp, Homo sapiens
  siRNA target sequence for MGC23401 (NM_144982.3,3892-3910).
gtgcagagacaagtactaa

SEQ ID NO: 412362 - DNA, 19 bp, Homo sapiens
  siRNA target sequence for MGC23401 (NM_144982.3,3996-4014).
gttctccttgttagcaata

SEQ ID NO: 412363 - DNA, 19 bp, Homo sapiens
  siRNA target sequence for MGC23401 (NM_144982.3,3999-4017).
ctccttgttagcaatatca

SEQ ID NO: 412364 - DNA, 19 bp, Homo sapiens
  siRNA target sequence for MGC23401 (NM_144982.3,4001-4019).
ccttgttagcaatatcaat

SEQ ID NO: 412365 - DNA, 19 bp, Homo sapiens
  siRNA target sequence for MGC23401 (NM_144982.3,4029-4047).
ggtcatactcctccattta

SEQ ID NO: 412366 - DNA, 19 bp, Homo sapiens
  siRNA target sequence for MGC23401 (NM_144982.3,4032-4050).
catactcctccatttacaa

SEQ ID NO: 412367 - DNA, 19 bp, Homo sapiens
  siRNA target sequence for MGC23401 (NM_144982.3,4082-4100).
gttttggagaaaacctatt

SEQ ID NO: 412368 - DNA, 19 bp, Homo sapiens
  siRNA target sequence for MGC23401 (NM_144982.3,4163-4181).
gccagagaaccaaataaat

SEQ ID NO: 412369 - DNA, 19 bp, Homo sapiens
  siRNA target sequence for MGC23401 (NM_144982.3,4302-4320).
ctcaagcttgcgtacaagt

SEQ ID NO: 412370 - DNA, 19 bp, Homo sapiens
  siRNA target sequence for MGC23401 (NM_144982.3,4308-4326).
cttgcgtacaagtacttga

SEQ ID NO: 412371 - DNA, 19 bp, Homo sapiens
  siRNA target sequence for MGC23401 (NM_144982.3,4339-4357).
gggagtgctcagaatcctt

SEQ ID NO: 412372 - DNA, 19 bp, Homo sapiens
  siRNA target sequence for MGC23401 (NM_144982.3,4377-4395).
ctggcgcgagcattggaaa

SEQ ID NO: 412373 - DNA, 19 bp, Homo sapiens
  siRNA target sequence for MGC23401 (NM_144982.3,4380-4398).
gcgcgagcattggaaaata

SEQ ID NO: 412374 - DNA, 19 bp, Homo sapiens
  siRNA target sequence for MGC23401 (NM_144982.3,4381-4399).
cgcgagcattggaaaataa

SEQ ID NO: 412375 - DNA, 19 bp, Homo sapiens
  siRNA target sequence for MGC23401 (NM_144982.3,4383-4401).
cgagcattggaaaataaca

SEQ ID NO: 412376 - DNA, 19 bp, Homo sapiens
  siRNA target sequence for MGC23401 (NM_144982.3,4404-4422).
gacaatccagaaatttggt

SEQ ID NO: 412377 - DNA, 19 bp, Homo sapiens
  siRNA target sequence for MGC23401 (NM_144982.3,4420-4438).
ggtgccattacctcagatt

SEQ ID NO: 412378 - DNA, 19 bp, Homo sapiens
  siRNA target sequence for MGC23401 (NM_144982.3,4516-4534).
gcttttggacttttctaca

SEQ ID NO: 412379 - DNA, 19 bp, Homo sapiens
  siRNA target sequence for MGC23401 (NM_144982.3,4551-4569).
gaagaaaaggattacgtat

SEQ ID NO: 412380 - DNA, 19 bp, Homo sapiens
  siRNA target sequence for MGC23401 (NM_144982.3,4576-4594).
gaatgttggagtttctgat

SEQ ID NO: 412381 - DNA, 19 bp, Homo sapiens
  siRNA target sequence for MGC23401 (NM_144982.3,4662-4680).
gttcagctgcacatattta

SEQ ID NO: 412382 - DNA, 19 bp, Homo sapiens
  siRNA target sequence for MGC23401 (NM_144982.3,4696-4714).
gtgcactggcaattttaca

SEQ ID NO: 412383 - DNA, 19 bp, Homo sapiens
  siRNA target sequence for MGC23401 (NM_144982.3,4698-4716).
gcactggcaattttacaga

SEQ ID NO: 412384 - DNA, 19 bp, Homo sapiens
  siRNA target sequence for MGC23401 (NM_144982.3,4699-4717).
cactggcaattttacagaa

SEQ ID NO: 412385 - DNA, 19 bp, Homo sapiens
  siRNA target sequence for MGC23401 (NM_144982.3,4720-4738).
cattgaaatctgctaatga

SEQ ID NO: 412386 - DNA, 19 bp, Homo sapiens
  siRNA target sequence for MGC23401 (NM_144982.3,4783-4801).
catggttggcctacataca

SEQ ID NO: 412387 - DNA, 19 bp, Homo sapiens
  siRNA target sequence for MGC23401 (NM_144982.3,4786-4804).
ggttggcctacatacatct

SEQ ID NO: 412388 - DNA, 19 bp, Homo sapiens
  siRNA target sequence for MGC23401 (NM_144982.3,4787-4805).
gttggcctacatacatctt

SEQ ID NO: 412389 - DNA, 19 bp, Homo sapiens
  siRNA target sequence for MGC23401 (NM_144982.3,4790-4808).
ggcctacatacatcttatt

SEQ ID NO: 412390 - DNA, 19 bp, Homo sapiens
  siRNA target sequence for MGC23401 (NM_144982.3,4792-4810).
cctacatacatcttattga

SEQ ID NO: 412391 - DNA, 19 bp, Homo sapiens
  siRNA target sequence for MGC23401 (NM_144982.3,4823-4841).
cccttcaaaattttatgat

SEQ ID NO: 412392 - DNA, 19 bp, Homo sapiens
  siRNA target sequence for MGC23401 (NM_144982.3,4842-4860).
ccatctaatgataatcctt

SEQ ID NO: 412393 - DNA, 19 bp, Homo sapiens
  siRNA target sequence for MGC23401 (NM_144982.3,4857-4875).
ccttcaagaattgttaaca

SEQ ID NO: 412394 - DNA, 19 bp, Homo sapiens
  siRNA target sequence for MGC23401 (NM_144982.3,4892-4910).
gccatggcaagctgttcaa

SEQ ID NO: 412395 - DNA, 19 bp, Homo sapiens
  siRNA target sequence for MGC23401 (NM_144982.3,4983-5001).
cttgctgttgaggaaagaa

SEQ ID NO: 412396 - DNA, 19 bp, Homo sapiens
  siRNA target sequence for MGC23401 (NM_144982.3,5070-5088).
gcaatggagctttgtaaat

SEQ ID NO: 412397 - DNA, 19 bp, Homo sapiens
  siRNA target sequence for MGC23401 (NM_144982.3,5097-5115).
gaatcatgtcctattaact

SEQ ID NO: 412398 - DNA, 19 bp, Homo sapiens
  siRNA target sequence for MGC23401 (NM_144982.3,5120-5138).
gttgctggaagctcttgtt

SEQ ID NO: 412399 - DNA, 19 bp, Homo sapiens
  siRNA target sequence for MGC23401 (NM_144982.3,5126-5144).
ggaagctcttgttgcatta

SEQ ID NO: 412400 - DNA, 19 bp, Homo sapiens
  siRNA target sequence for MGC23401 (NM_144982.3,5127-5145).
gaagctcttgttgcattat

SEQ ID NO: 412401 - DNA, 19 bp, Homo sapiens
  siRNA target sequence for MGC23401 (NM_144982.3,5217-5235).
gcagaggttttttatcata

SEQ ID NO: 412402 - DNA, 19 bp, Homo sapiens
  siRNA target sequence for MGC23401 (NM_144982.3,5258-5276).
gaatcgaggcgataatctt

SEQ ID NO: 412403 - DNA, 19 bp, Homo sapiens
  siRNA target sequence for MGC23401 (NM_144982.3,5266-5284).
gcgataatcttcttccatt

SEQ ID NO: 412404 - DNA, 19 bp, Homo sapiens
  siRNA target sequence for MGC23401 (NM_144982.3,5280-5298).
ccatttttgcggaaattta

SEQ ID NO: 412405 - DNA, 19 bp, Homo sapiens
  siRNA target sequence for MGC23401 (NM_144982.3,5281-5299).
catttttgcggaaatttat

SEQ ID NO: 412406 - DNA, 19 bp, Homo sapiens
  siRNA target sequence for MGC23401 (NM_144982.3,5343-5361).
gatctgtttcggtatctct

SEQ ID NO: 412407 - DNA, 19 bp, Homo sapiens
  siRNA target sequence for MGC23401 (NM_144982.3,5346-5364).
ctgtttcggtatctcttaa

SEQ ID NO: 412408 - DNA, 19 bp, Homo sapiens
  siRNA target sequence for MGC23401 (NM_144982.3,5348-5366).
gtttcggtatctcttaaat

SEQ ID NO: 412409 - DNA, 19 bp, Homo sapiens
  siRNA target sequence for MGC23401 (NM_144982.3,5354-5372).
gtatctcttaaatattcca

SEQ ID NO: 412410 - DNA, 19 bp, Homo sapiens
  siRNA target sequence for MGC23401 (NM_144982.3,5382-5400).
gacattccatctcgtttat

SEQ ID NO: 412411 - DNA, 19 bp, Homo sapiens
  siRNA target sequence for MGC23401 (NM_144982.3,5384-5402).
cattccatctcgtttatgt

SEQ ID NO: 412412 - DNA, 19 bp, Homo sapiens
  siRNA target sequence for MGC23401 (NM_144982.3,5433-5451).
caccaagttccttatttgt

SEQ ID NO: 412413 - DNA, 19 bp, Homo sapiens
  siRNA target sequence for MGC23401 (NM_144982.3,5442-5460).
ccttatttgtggctgattt

SEQ ID NO: 412414 - DNA, 19 bp, Homo sapiens
  siRNA target sequence for MGC23401 (NM_144982.3,5456-5474).
gatttactgcctttgtcat

SEQ ID NO: 412415 - DNA, 19 bp, Homo sapiens
  siRNA target sequence for MGC23401 (NM_144982.3,5472-5490).
catcctcttcaatcaagta

SEQ ID NO: 412416 - DNA, 19 bp, Homo sapiens
  siRNA target sequence for MGC23401 (NM_144982.3,5485-5503).
caagtattaaagaaacagt

SEQ ID NO: 412417 - DNA, 19 bp, Homo sapiens
  siRNA target sequence for MGC23401 (NM_144982.3,5528-5546).
ggtggctatgagatgtgat

SEQ ID NO: 412418 - DNA, 19 bp, Homo sapiens
  siRNA target sequence for MGC23401 (NM_144982.3,5531-5549).
ggctatgagatgtgatata

SEQ ID NO: 412419 - DNA, 19 bp, Homo sapiens
  siRNA target sequence for MGC23401 (NM_144982.3,5533-5551).
ctatgagatgtgatatagt

SEQ ID NO: 412420 - DNA, 19 bp, Homo sapiens
  siRNA target sequence for MGC23401 (NM_144982.3,5539-5557).
gatgtgatatagtacagaa

SEQ ID NO: 412421 - DNA, 19 bp, Homo sapiens
  siRNA target sequence for MGC23401 (NM_144982.3,5640-5658).
gatttagtgaatagatgtt

SEQ ID NO: 412422 - DNA, 19 bp, Homo sapiens
  siRNA target sequence for MGC23401 (NM_144982.3,5673-5691).
gcccgataccccattcctt

SEQ ID NO: 412423 - DNA, 19 bp, Homo sapiens
  siRNA target sequence for MGC23401 (NM_144982.3,5674-5692).
cccgataccccattccttt

SEQ ID NO: 412424 - DNA, 19 bp, Homo sapiens
  siRNA target sequence for MGC23401 (NM_144982.3,5675-5693).
ccgataccccattcctttt

SEQ ID NO: 412425 - DNA, 19 bp, Homo sapiens
  siRNA target sequence for MGC23401 (NM_144982.3,5676-5694).
cgataccccattcctttta

SEQ ID NO: 412426 - DNA, 19 bp, Homo sapiens
  siRNA target sequence for MGC23401 (NM_144982.3,5708-5726).
ctggtccaactatgaattt

SEQ ID NO: 412427 - DNA, 19 bp, Homo sapiens
  siRNA target sequence for MGC23401 (NM_144982.3,5710-5728).
ggtccaactatgaatttca

SEQ ID NO: 412428 - DNA, 19 bp, Homo sapiens
  siRNA target sequence for MGC23401 (NM_144982.3,5711-5729).
gtccaactatgaatttcat

SEQ ID NO: 412429 - DNA, 19 bp, Homo sapiens
  siRNA target sequence for MGC23401 (NM_144982.3,5786-5804).
cttggaacggttttgttca

SEQ ID NO: 412430 - DNA, 19 bp, Homo sapiens
  siRNA target sequence for MGC23401 (NM_144982.3,5789-5807).
ggaacggttttgttcagtt

SEQ ID NO: 412431 - DNA, 19 bp, Homo sapiens
  siRNA target sequence for MGC23401 (NM_144982.3,5790-5808).
gaacggttttgttcagtta

SEQ ID NO: 412432 - DNA, 19 bp, Homo sapiens
  siRNA target sequence for MGC23401 (NM_144982.3,5815-5833).
ctaattctggacttgcatt

SEQ ID NO: 412433 - DNA, 19 bp, Homo sapiens
  siRNA target sequence for MGC23401 (NM_144982.3,5830-5848).
cattgaggttacttcaaca

SEQ ID NO: 412434 - DNA, 19 bp, Homo sapiens
  siRNA target sequence for FLJ31737 (NM_144984.1,198-216).
ggccgtgcgctggttcttt

SEQ ID NO: 412435 - DNA, 19 bp, Homo sapiens
  siRNA target sequence for FLJ31737 (NM_144984.1,277-295).
cagtactatgggaatttca

SEQ ID NO: 412436 - DNA, 19 bp, Homo sapiens
  siRNA target sequence for FLJ31737 (NM_144984.1,383-401).
ccgatcaagggcattacgt

SEQ ID NO: 412437 - DNA, 19 bp, Homo sapiens
  siRNA target sequence for FLJ31737 (NM_144984.1,462-480).
ctcagccacggaaatgaga

SEQ ID NO: 412438 - DNA, 19 bp, Homo sapiens
  siRNA target sequence for FLJ31737 (NM_144984.1,517-535).
cttgggatttcccttgtaa

SEQ ID NO: 412439 - DNA, 19 bp, Homo sapiens
  siRNA target sequence for FLJ31737 (NM_144984.1,552-570).
gcccttcaccgcagactta

SEQ ID NO: 412440 - DNA, 19 bp, Homo sapiens
  siRNA target sequence for FLJ31737 (NM_144984.1,553-571).
cccttcaccgcagacttaa

SEQ ID NO: 412441 - DNA, 19 bp, Homo sapiens
  siRNA target sequence for MGC19780 (NM_144988.1,73-91).
gagctgtggcggttttcct

SEQ ID NO: 412442 - DNA, 19 bp, Homo sapiens
  siRNA target sequence for MGC19780 (NM_144988.1,75-93).
gctgtggcggttttcctaa

SEQ ID NO: 412443 - DNA, 19 bp, Homo sapiens
  siRNA target sequence for MGC19780 (NM_144988.1,76-94).
ctgtggcggttttcctaat

SEQ ID NO: 412444 - DNA, 19 bp, Homo sapiens
  siRNA target sequence for MGC19780 (NM_144988.1,138-156).
cgggagtctctcagtatct

SEQ ID NO: 412445 - DNA, 19 bp, Homo sapiens
  siRNA target sequence for MGC19780 (NM_144988.1,222-240).
gcctactcacctagacatt

SEQ ID NO: 412446 - DNA, 19 bp, Homo sapiens
  siRNA target sequence for MGC19780 (NM_144988.1,223-241).
cctactcacctagacatta

SEQ ID NO: 412447 - DNA, 19 bp, Homo sapiens
  siRNA target sequence for MGC19780 (NM_144988.1,224-242).
ctactcacctagacattat

SEQ ID NO: 412448 - DNA, 19 bp, Homo sapiens
  siRNA target sequence for MGC19780 (NM_144988.1,229-247).
cacctagacattatgtcat

SEQ ID NO: 412449 - DNA, 19 bp, Homo sapiens
  siRNA target sequence for MGC19780 (NM_144988.1,306-324).
gatagagaccctagtaaca

SEQ ID NO: 412450 - DNA, 19 bp, Homo sapiens
  siRNA target sequence for MGC19780 (NM_144988.1,310-328).
gagaccctagtaacatgta

SEQ ID NO: 412451 - DNA, 19 bp, Homo sapiens
  siRNA target sequence for MGC19780 (NM_144988.1,315-333).
cctagtaacatgtatacca

SEQ ID NO: 412452 - DNA, 19 bp, Homo sapiens
  siRNA target sequence for MGC19780 (NM_144988.1,338-356).
ctacattcaccgaattcca

SEQ ID NO: 412453 - DNA, 19 bp, Homo sapiens
  siRNA target sequence for MGC19780 (NM_144988.1,450-468).
ccagatttggtgttgtgta

SEQ ID NO: 412454 - DNA, 19 bp, Homo sapiens
  siRNA target sequence for MGC19780 (NM_144988.1,451-469).
cagatttggtgttgtgtaa

SEQ ID NO: 412455 - DNA, 19 bp, Homo sapiens
  siRNA target sequence for MGC19780 (NM_144988.1,470-488).
cggaccaggaacatgtgtt

SEQ ID NO: 412456 - DNA, 19 bp, Homo sapiens
  siRNA target sequence for MGC19780 (NM_144988.1,506-524).
ccttctccttgggatacta

SEQ ID NO: 412457 - DNA, 19 bp, Homo sapiens
  siRNA target sequence for MGC19780 (NM_144988.1,517-535).
ggatactaggaataaagaa

SEQ ID NO: 412458 - DNA, 19 bp, Homo sapiens
  siRNA target sequence for MGC19780 (NM_144988.1,563-581).
ctgccgtgtagaaacgtta

SEQ ID NO: 412459 - DNA, 19 bp, Homo sapiens
  siRNA target sequence for MGC19780 (NM_144988.1,568-586).
gtgtagaaacgttatccat

SEQ ID NO: 412460 - DNA, 19 bp, Homo sapiens
  siRNA target sequence for MGC19780 (NM_144988.1,590-608).
cggaaagattctgtttcat

SEQ ID NO: 412461 - DNA, 19 bp, Homo sapiens
  siRNA target sequence for MGC19780 (NM_144988.1,613-631).
cagattacttcattgttca

SEQ ID NO: 412462 - DNA, 19 bp, Homo sapiens
  siRNA target sequence for MGC19780 (NM_144988.1,668-686).
gtaccttgggcgaattgtt

SEQ ID NO: 412463 - DNA, 19 bp, Homo sapiens
  siRNA target sequence for FLJ23878 (NM_144990.1,250-268).
ctcggcgcacactctctat

SEQ ID NO: 412464 - DNA, 19 bp, Homo sapiens
  siRNA target sequence for FLJ23878 (NM_144990.1,505-523).
gaaggacctgctattgagt

SEQ ID NO: 412465 - DNA, 19 bp, Homo sapiens
  siRNA target sequence for MGC26733 (NM_144992.2,531-549).
gttttcaggaaattcctat

SEQ ID NO: 412466 - DNA, 19 bp, Homo sapiens
  siRNA target sequence for MGC26733 (NM_144992.2,559-577).
ctccttcaattacaatgat

SEQ ID NO: 412467 - DNA, 19 bp, Homo sapiens
  siRNA target sequence for MGC26733 (NM_144992.2,621-639).
gaggagagttccattttta

SEQ ID NO: 412468 - DNA, 19 bp, Homo sapiens
  siRNA target sequence for MGC26733 (NM_144992.2,624-642).
gagagttccatttttataa

SEQ ID NO: 412469 - DNA, 19 bp, Homo sapiens
  siRNA target sequence for MGC26733 (NM_144992.2,772-790).
catggactggtggtacaat

SEQ ID NO: 412470 - DNA, 19 bp, Homo sapiens
  siRNA target sequence for MGC26733 (NM_144992.2,858-876).
gtgcaaagcctcaatctga

SEQ ID NO: 412471 - DNA, 19 bp, Homo sapiens
  siRNA target sequence for MGC26733 (NM_144992.2,869-887).
caatctgatgtcgattcaa

SEQ ID NO: 412472 - DNA, 19 bp, Homo sapiens
  siRNA target sequence for MGC26733 (NM_144992.2,875-893).
gatgtcgattcaacacaaa

SEQ ID NO: 412473 - DNA, 19 bp, Homo sapiens
  siRNA target sequence for MGC26733 (NM_144992.2,878-896).
gtcgattcaacacaaactt

SEQ ID NO: 412474 - DNA, 19 bp, Homo sapiens
  siRNA target sequence for MGC26733 (NM_144992.2,918-936).
gaccatggggcctttcaga

SEQ ID NO: 412475 - DNA, 19 bp, Homo sapiens
  siRNA target sequence for MGC26733 (NM_144992.2,927-945).
gcctttcagatcaaaaggt

SEQ ID NO: 412476 - DNA, 19 bp, Homo sapiens
  siRNA target sequence for MGC26733 (NM_144992.2,959-977).
gtccttcacgcagaatcaa

SEQ ID NO: 412477 - DNA, 19 bp, Homo sapiens
  siRNA target sequence for MGC26733 (NM_144992.2,965-983).
cacgcagaatcaaccaaaa

SEQ ID NO: 412478 - DNA, 19 bp, Homo sapiens
  siRNA target sequence for MGC26733 (NM_144992.2,968-986).
gcagaatcaaccaaaacca

SEQ ID NO: 412479 - DNA, 19 bp, Homo sapiens
  siRNA target sequence for MGC26733 (NM_144992.2,1072-1090).
gactgctctaagtgacaaa

SEQ ID NO: 412480 - DNA, 19 bp, Homo sapiens
  siRNA target sequence for MGC26733 (NM_144992.2,1074-1092).
ctgctctaagtgacaaaga

SEQ ID NO: 412481 - DNA, 19 bp, Homo sapiens
  siRNA target sequence for MGC26733 (NM_144992.2,1115-1133).
gagtggctggatgacaaat

SEQ ID NO: 412482 - DNA, 19 bp, Homo sapiens
  siRNA target sequence for MGC26733 (NM_144992.2,1124-1142).
gatgacaaatcgtcagaaa

SEQ ID NO: 412483 - DNA, 19 bp, Homo sapiens
  siRNA target sequence for MGC26733 (NM_144992.2,1166-1184).
gtttatgaccacgattctt

SEQ ID NO: 412484 - DNA, 19 bp, Homo sapiens
  siRNA target sequence for MGC26733 (NM_144992.2,1221-1239).
gcttggtcgccaagaaact

SEQ ID NO: 412485 - DNA, 19 bp, Homo sapiens
  siRNA target sequence for MGC26733 (NM_144992.2,1276-1294).
gcacagctccacctatgtt

SEQ ID NO: 412486 - DNA, 19 bp, Homo sapiens
  siRNA target sequence for MGC26733 (NM_144992.2,1400-1418).
gccaaactcaatatctaca

SEQ ID NO: 412487 - DNA, 19 bp, Homo sapiens
  siRNA target sequence for MGC26733 (NM_144992.2,1451-1469).
gaaaagcgcttgaataaaa

SEQ ID NO: 412488 - DNA, 19 bp, Homo sapiens
  siRNA target sequence for MGC26733 (NM_144992.2,1456-1474).
gcgcttgaataaaattgtt

SEQ ID NO: 412489 - DNA, 19 bp, Homo sapiens
  siRNA target sequence for MGC26733 (NM_144992.2,1561-1579).
ggctttagaacggttgaat

SEQ ID NO: 412490 - DNA, 19 bp, Homo sapiens
  siRNA target sequence for MGC26733 (NM_144992.2,1573-1591).
gttgaattggcccatttca

SEQ ID NO: 412491 - DNA, 19 bp, Homo sapiens
  siRNA target sequence for MGC26733 (NM_144992.2,1625-1643).
ctagctgggaaaatgtaca

SEQ ID NO: 412492 - DNA, 19 bp, Homo sapiens
  siRNA target sequence for MGC26733 (NM_144992.2,1674-1692).
ccaagaagaattatgcaaa

SEQ ID NO: 412493 - DNA, 19 bp, Homo sapiens
  siRNA target sequence for MGC26733 (NM_144992.2,1701-1719).
cgggagagcaacagaaatt

SEQ ID NO: 412494 - DNA, 19 bp, Homo sapiens
  siRNA target sequence for MGC26733 (NM_144992.2,1772-1790).
ggacagaaggttattgcaa

SEQ ID NO: 412495 - DNA, 19 bp, Homo sapiens
  siRNA target sequence for MGC26733 (NM_144992.2,1945-1963).
ggttggagattatgtgttt

SEQ ID NO: 412496 - DNA, 19 bp, Homo sapiens
  siRNA target sequence for MGC26733 (NM_144992.2,2070-2088).
gtaacaaccggagagaatt

SEQ ID NO: 412497 - DNA, 19 bp, Homo sapiens
  siRNA target sequence for MGC26733 (NM_144992.2,2091-2109).
gccctcggagtgcacttat

SEQ ID NO: 412498 - DNA, 19 bp, Homo sapiens
  siRNA target sequence for MGC26733 (NM_144992.2,2092-2110).
ccctcggagtgcacttatt

SEQ ID NO: 412499 - DNA, 19 bp, Homo sapiens
  siRNA target sequence for MGC26733 (NM_144992.2,2093-2111).
cctcggagtgcacttatta

SEQ ID NO: 412500 - DNA, 19 bp, Homo sapiens
  siRNA target sequence for MGC26733 (NM_144992.2,2094-2112).
ctcggagtgcacttattaa

SEQ ID NO: 412501 - DNA, 19 bp, Homo sapiens
  siRNA target sequence for MGC26733 (NM_144992.2,2096-2114).
cggagtgcacttattaaga

SEQ ID NO: 412502 - DNA, 19 bp, Homo sapiens
  siRNA target sequence for MGC26733 (NM_144992.2,2097-2115).
ggagtgcacttattaagat

SEQ ID NO: 412503 - DNA, 19 bp, Homo sapiens
  siRNA target sequence for MGC26733 (NM_144992.2,2113-2131).
gatcagccaaaacaagtat

SEQ ID NO: 412504 - DNA, 19 bp, Homo sapiens
  siRNA target sequence for DARP (NM_144994.5,405-423).
ctgattgacaagtacttga

SEQ ID NO: 412505 - DNA, 19 bp, Homo sapiens
  siRNA target sequence for DARP (NM_144994.5,779-797).
gcggcacggcagctacaaa

SEQ ID NO: 412506 - DNA, 19 bp, Homo sapiens
  siRNA target sequence for DKFZp761H079 (NM_144996.2,339-357).
ctgtcaggttggcaaataa

SEQ ID NO: 412507 - DNA, 19 bp, Homo sapiens
  siRNA target sequence for DKFZp761H079 (NM_144996.2,389-407).
gatgtcattgaatgtctat

SEQ ID NO: 412508 - DNA, 19 bp, Homo sapiens
  siRNA target sequence for DKFZp761H079 (NM_144996.2,436-454).
gtgcctgtgtcagatagaa

SEQ ID NO: 412509 - DNA, 19 bp, Homo sapiens
  siRNA target sequence for DKFZp761H079 (NM_144996.2,520-538).
gctgctacatgttattgca

SEQ ID NO: 412510 - DNA, 19 bp, Homo sapiens
  siRNA target sequence for DKFZp761H079 (NM_144996.2,521-539).
ctgctacatgttattgcaa

SEQ ID NO: 412511 - DNA, 19 bp, Homo sapiens
  siRNA target sequence for DKFZp761H079 (NM_144996.2,560-578).
gaacgcatccaaaaagaga

SEQ ID NO: 412512 - DNA, 19 bp, Homo sapiens
  siRNA target sequence for DKFZp761H079 (NM_144996.2,623-641).
gctgaacgagtgcgaaaat

SEQ ID NO: 412513 - DNA, 19 bp, Homo sapiens
  siRNA target sequence for DKFZp761H079 (NM_144996.2,624-642).
ctgaacgagtgcgaaaatt

SEQ ID NO: 412514 - DNA, 19 bp, Homo sapiens
  siRNA target sequence for DKFZp761H079 (NM_144996.2,634-652).
gcgaaaattacgagaagaa

SEQ ID NO: 412515 - DNA, 19 bp, Homo sapiens
  siRNA target sequence for DKFZp761H079 (NM_144996.2,712-730).
ggacccagaaccaacgaat

SEQ ID NO: 412516 - DNA, 19 bp, Homo sapiens
  siRNA target sequence for DKFZp761H079 (NM_144996.2,740-758).
ccaatagcatctgtaatca

SEQ ID NO: 412517 - DNA, 19 bp, Homo sapiens
  siRNA target sequence for DKFZp761H079 (NM_144996.2,741-759).
caatagcatctgtaatcat

SEQ ID NO: 412518 - DNA, 19 bp, Homo sapiens
  siRNA target sequence for DKFZp761H079 (NM_144996.2,747-765).
catctgtaatcattgagaa

SEQ ID NO: 412519 - DNA, 19 bp, Homo sapiens
  siRNA target sequence for DKFZp761H079 (NM_144996.2,750-768).
ctgtaatcattgagaatga

SEQ ID NO: 412520 - DNA, 19 bp, Homo sapiens
  siRNA target sequence for DKFZp761H079 (NM_144996.2,821-839).
ggctgccacctgaaacata

SEQ ID NO: 412521 - DNA, 19 bp, Homo sapiens
  siRNA target sequence for DKFZp761H079 (NM_144996.2,825-843).
gccacctgaaacataaaat

SEQ ID NO: 412522 - DNA, 19 bp, Homo sapiens
  siRNA target sequence for DKFZp761H079 (NM_144996.2,862-880).
gacacaaggccaggttaat

SEQ ID NO: 412523 - DNA, 19 bp, Homo sapiens
  siRNA target sequence for DKFZp761H079 (NM_144996.2,864-882).
cacaaggccaggttaatca

SEQ ID NO: 412524 - DNA, 19 bp, Homo sapiens
  siRNA target sequence for DKFZp761H079 (NM_144996.2,968-986).
gaccggccatcattggaat

SEQ ID NO: 412525 - DNA, 19 bp, Homo sapiens
  siRNA target sequence for DKFZp761H079 (NM_144996.2,982-1000).
ggaatcagctaatggtaaa

SEQ ID NO: 412526 - DNA, 19 bp, Homo sapiens
  siRNA target sequence for DKFZp761H079 (NM_144996.2,1036-1054).
ccgggtagaaccacttaat

SEQ ID NO: 412527 - DNA, 19 bp, Homo sapiens
  siRNA target sequence for DKFZp761H079 (NM_144996.2,1037-1055).
cgggtagaaccacttaata

SEQ ID NO: 412528 - DNA, 19 bp, Homo sapiens
  siRNA target sequence for DKFZp761H079 (NM_144996.2,1110-1128).
gctggggaacccctaaagt

SEQ ID NO: 412529 - DNA, 19 bp, Homo sapiens
  siRNA target sequence for DKFZp761H079 (NM_144996.2,1120-1138).
ccctaaagtcactagactt

SEQ ID NO: 412530 - DNA, 19 bp, Homo sapiens
  siRNA target sequence for DKFZp761H079 (NM_144996.2,1129-1147).
cactagacttccaaaactt

SEQ ID NO: 412531 - DNA, 19 bp, Homo sapiens
  siRNA target sequence for DKFZp761H079 (NM_144996.2,1131-1149).
ctagacttccaaaacttga

SEQ ID NO: 412532 - DNA, 19 bp, Homo sapiens
  siRNA target sequence for DKFZp761H079 (NM_144996.2,1158-1176).
gtgaaacacatcataatga

SEQ ID NO: 412533 - DNA, 19 bp, Homo sapiens
  siRNA target sequence for DKFZp761H079 (NM_144996.2,1169-1187).
cataatgatttctatagga

SEQ ID NO: 412534 - DNA, 19 bp, Homo sapiens
  siRNA target sequence for DKFZp761H079 (NM_144996.2,1210-1228).
gccacagcgacctaacagt

SEQ ID NO: 412535 - DNA, 19 bp, Homo sapiens
  siRNA target sequence for DKFZp761H079 (NM_144996.2,1232-1250).
gctcatgatgtgatctcat

SEQ ID NO: 412536 - DNA, 19 bp, Homo sapiens
  siRNA target sequence for BHD (NM_144997.3,1360-1378).
gaagctcgctgatttagaa

SEQ ID NO: 412537 - DNA, 19 bp, Homo sapiens
  siRNA target sequence for BHD (NM_144997.3,2023-2041).
ggaggagtggatgaacaaa

SEQ ID NO: 412538 - DNA, 19 bp, Homo sapiens
  siRNA target sequence for BHD (NM_144997.3,2121-2139).
cgtccgaggaggacaatgt

SEQ ID NO: 412539 - DNA, 19 bp, Homo sapiens
  siRNA target sequence for MGC20806 (NM_144999.2,502-520).
ctgcgctttctggacttaa

SEQ ID NO: 412540 - DNA, 19 bp, Homo sapiens
  siRNA target sequence for MGC20806 (NM_144999.2,548-566).
ccgaggctctgggaaaact

SEQ ID NO: 412541 - DNA, 19 bp, Homo sapiens
  siRNA target sequence for MGC20806 (NM_144999.2,774-792).
cctgcgctggaataacgtt

SEQ ID NO: 412542 - DNA, 19 bp, Homo sapiens
  siRNA target sequence for MGC20806 (NM_144999.2,1023-1041).
cttgatggagactattgat

SEQ ID NO: 412543 - DNA, 19 bp, Homo sapiens
  siRNA target sequence for MGC20806 (NM_144999.2,1117-1135).
gagaggcactccatcatca

SEQ ID NO: 412544 - DNA, 19 bp, Homo sapiens
  siRNA target sequence for MGC20806 (NM_144999.2,1292-1310).
ctgcagagcgggagtctaa

SEQ ID NO: 412545 - DNA, 19 bp, Homo sapiens
  siRNA target sequence for FLJ25422 (NM_145000.2,565-583).
cggcgacagcaagaaaaat

SEQ ID NO: 412546 - DNA, 19 bp, Homo sapiens
  siRNA target sequence for FLJ25422 (NM_145000.2,592-610).
gctcaacccatatttgttt

SEQ ID NO: 412547 - DNA, 19 bp, Homo sapiens
  siRNA target sequence for FLJ25422 (NM_145000.2,676-694).
gaatgtaatggttttccaa

SEQ ID NO: 412548 - DNA, 19 bp, Homo sapiens
  siRNA target sequence for FLJ25422 (NM_145000.2,699-717).
gcgtgtacggtcttcatct

SEQ ID NO: 412549 - DNA, 19 bp, Homo sapiens
  siRNA target sequence for FLJ25422 (NM_145000.2,700-718).
cgtgtacggtcttcatctt

SEQ ID NO: 412550 - DNA, 19 bp, Homo sapiens
  siRNA target sequence for FLJ25422 (NM_145000.2,792-810).
gcaaagtagtgttgatata

SEQ ID NO: 412551 - DNA, 19 bp, Homo sapiens
  siRNA target sequence for FLJ25422 (NM_145000.2,884-902).
ctcgaagttgtgcaaaagt

SEQ ID NO: 412552 - DNA, 19 bp, Homo sapiens
  siRNA target sequence for FLJ25422 (NM_145000.2,886-904).
cgaagttgtgcaaaagtaa

SEQ ID NO: 412553 - DNA, 19 bp, Homo sapiens
  siRNA target sequence for FLJ25422 (NM_145000.2,975-993).
gggaaattcctatttgtta

SEQ ID NO: 412554 - DNA, 19 bp, Homo sapiens
  siRNA target sequence for FLJ25422 (NM_145000.2,976-994).
ggaaattcctatttgttaa

SEQ ID NO: 412555 - DNA, 19 bp, Homo sapiens
  siRNA target sequence for FLJ25422 (NM_145000.2,1007-1025).
caagggctagaatttcagt

SEQ ID NO: 412556 - DNA, 19 bp, Homo sapiens
  siRNA target sequence for FLJ25422 (NM_145000.2,1064-1082).
cagtaggatgtcaaccaaa

SEQ ID NO: 412557 - DNA, 19 bp, Homo sapiens
  siRNA target sequence for FLJ25422 (NM_145000.2,1070-1088).
gatgtcaaccaaatgaaga

SEQ ID NO: 412558 - DNA, 19 bp, Homo sapiens
  siRNA target sequence for FLJ25422 (NM_145000.2,1106-1124).
gctgcagttccaattttgt

SEQ ID NO: 412559 - DNA, 19 bp, Homo sapiens
  siRNA target sequence for FLJ25422 (NM_145000.2,1148-1166).
gagttttgggtactcaaaa

SEQ ID NO: 412560 - DNA, 19 bp, Homo sapiens
  siRNA target sequence for FLJ25422 (NM_145000.2,1172-1190).
cccagcctcaacttgaaaa

SEQ ID NO: 412561 - DNA, 19 bp, Homo sapiens
  siRNA target sequence for FLJ25422 (NM_145000.2,1242-1260).
caactttttaagttcaaga

SEQ ID NO: 412562 - DNA, 19 bp, Homo sapiens
  siRNA target sequence for FLJ25422 (NM_145000.2,1370-1388).
cagaacataatgtgttaaa

SEQ ID NO: 412563 - DNA, 19 bp, Homo sapiens
  siRNA target sequence for FLJ25422 (NM_145000.2,1451-1469).
gaacgttgagactgaatga

SEQ ID NO: 412564 - DNA, 19 bp, Homo sapiens
  siRNA target sequence for FLJ25422 (NM_145000.2,1481-1499).
ctgactgtggaacattaca

SEQ ID NO: 412565 - DNA, 19 bp, Homo sapiens
  siRNA target sequence for FLJ25422 (NM_145000.2,1516-1534).
cgcaatcaaggcagtctaa

SEQ ID NO: 412566 - DNA, 19 bp, Homo sapiens
  siRNA target sequence for FLJ25422 (NM_145000.2,1560-1578).
ggcccaaatgaagattcaa

SEQ ID NO: 412567 - DNA, 19 bp, Homo sapiens
  siRNA target sequence for FLJ25422 (NM_145000.2,1561-1579).
gcccaaatgaagattcaaa

SEQ ID NO: 412568 - DNA, 19 bp, Homo sapiens
  siRNA target sequence for FLJ25422 (NM_145000.2,1587-1605).
ccacaaaaatgtacgaata

SEQ ID NO: 412569 - DNA, 19 bp, Homo sapiens
  siRNA target sequence for FLJ25422 (NM_145000.2,1588-1606).
cacaaaaatgtacgaataa

SEQ ID NO: 412570 - DNA, 19 bp, Homo sapiens
  siRNA target sequence for FLJ25422 (NM_145000.2,1590-1608).
caaaaatgtacgaataaca

SEQ ID NO: 412571 - DNA, 19 bp, Homo sapiens
  siRNA target sequence for FLJ25422 (NM_145000.2,1600-1618).
cgaataacagctactgatt

SEQ ID NO: 412572 - DNA, 19 bp, Homo sapiens
  siRNA target sequence for FLJ25422 (NM_145000.2,1760-1778).
cagaaacagcccaacaatt

SEQ ID NO: 412573 - DNA, 19 bp, Homo sapiens
  siRNA target sequence for FLJ25422 (NM_145000.2,1815-1833).
catccaagtcactaaaaat

SEQ ID NO: 412574 - DNA, 19 bp, Homo sapiens
  siRNA target sequence for FLJ25422 (NM_145000.2,1818-1836).
ccaagtcactaaaaatgga

SEQ ID NO: 412575 - DNA, 19 bp, Homo sapiens
  siRNA target sequence for FLJ25422 (NM_145000.2,1819-1837).
caagtcactaaaaatggat

SEQ ID NO: 412576 - DNA, 19 bp, Homo sapiens
  siRNA target sequence for FLJ25422 (NM_145000.2,1864-1882).
cagtcggttgcctgttcat

SEQ ID NO: 412577 - DNA, 19 bp, Homo sapiens
  siRNA target sequence for FLJ31164 (NM_145003.1,198-216).
cctagagtgcgctagatgt

SEQ ID NO: 412578 - DNA, 19 bp, Homo sapiens
  siRNA target sequence for FLJ31164 (NM_145003.1,199-217).
ctagagtgcgctagatgtt

SEQ ID NO: 412579 - DNA, 19 bp, Homo sapiens
  siRNA target sequence for FLJ31164 (NM_145003.1,215-233).
gttggaccgagtatggaat

SEQ ID NO: 412580 - DNA, 19 bp, Homo sapiens
  siRNA target sequence for FLJ31164 (NM_145003.1,314-332).
cagcaggcacgcctattgt

SEQ ID NO: 412581 - DNA, 19 bp, Homo sapiens
  siRNA target sequence for FLJ31164 (NM_145003.1,911-929).
ccaacgtcttccgaatcaa

SEQ ID NO: 412582 - DNA, 19 bp, Homo sapiens
  siRNA target sequence for FLJ31164 (NM_145003.1,1224-1242).
ggcgcagaggggcagtaaa

SEQ ID NO: 412583 - DNA, 19 bp, Homo sapiens
  siRNA target sequence for FLJ31164 (NM_145003.1,1226-1244).
cgcagaggggcagtaaaca

SEQ ID NO: 412584 - DNA, 19 bp, Homo sapiens
  siRNA target sequence for FLJ31164 (NM_145003.1,1407-1425).
caacttgctggatgtgaat

SEQ ID NO: 412585 - DNA, 19 bp, Homo sapiens
  siRNA target sequence for MGC26847 (NM_145006.2,507-525).
ggtgcaggccgcatacctt

SEQ ID NO: 412586 - DNA, 19 bp, Homo sapiens
  siRNA target sequence for MGC26847 (NM_145006.2,528-546).
cctcaagcacttcaacaaa

SEQ ID NO: 412587 - DNA, 19 bp, Homo sapiens
  siRNA target sequence for FLJ30213 (NM_145008.1,514-532).
cgctgtcaccgcacttaca

SEQ ID NO: 412588 - DNA, 19 bp, Homo sapiens
  siRNA target sequence for FLJ30213 (NM_145008.1,560-578).
ccaaacacgatgagcttat

SEQ ID NO: 412589 - DNA, 19 bp, Homo sapiens
  siRNA target sequence for FLJ30213 (NM_145008.1,561-579).
caaacacgatgagcttatt

SEQ ID NO: 412590 - DNA, 19 bp, Homo sapiens
  siRNA target sequence for FLJ30213 (NM_145008.1,604-622).
ggccgagcctacctgttta

SEQ ID NO: 412591 - DNA, 19 bp, Homo sapiens
  siRNA target sequence for FLJ30213 (NM_145008.1,605-623).
gccgagcctacctgtttaa

SEQ ID NO: 412592 - DNA, 19 bp, Homo sapiens
  siRNA target sequence for MGC26778 (NM_145010.2,231-249).
ccagcctcctaggtacata

SEQ ID NO: 412593 - DNA, 19 bp, Homo sapiens
  siRNA target sequence for MGC26778 (NM_145010.2,238-256).
cctaggtacatatccattt

SEQ ID NO: 412594 - DNA, 19 bp, Homo sapiens
  siRNA target sequence for MGC26778 (NM_145010.2,239-257).
ctaggtacatatccatttt

SEQ ID NO: 412595 - DNA, 19 bp, Homo sapiens
  siRNA target sequence for MGC26778 (NM_145010.2,274-292).
gatgacatgcaaaaagcta

SEQ ID NO: 412596 - DNA, 19 bp, Homo sapiens
  siRNA target sequence for MGC26778 (NM_145010.2,277-295).
gacatgcaaaaagctaaaa

SEQ ID NO: 412597 - DNA, 19 bp, Homo sapiens
  siRNA target sequence for MGC26778 (NM_145010.2,279-297).
catgcaaaaagctaaaact

SEQ ID NO: 412598 - DNA, 19 bp, Homo sapiens
  siRNA target sequence for MGC26778 (NM_145010.2,312-330).
gggaccagcaaaagttgaa

SEQ ID NO: 412599 - DNA, 19 bp, Homo sapiens
  siRNA target sequence for MGC26778 (NM_145010.2,429-447).
gccattgaagactgatcat

SEQ ID NO: 412600 - DNA, 19 bp, Homo sapiens
  siRNA target sequence for MGC26778 (NM_145010.2,448-466).
cctgtcatgggaatacaga

SEQ ID NO: 412601 - DNA, 19 bp, Homo sapiens
  siRNA target sequence for MGC26778 (NM_145010.2,527-545).
ctaaaccaatttatgttga

SEQ ID NO: 412602 - DNA, 19 bp, Homo sapiens
  siRNA target sequence for MGC26778 (NM_145010.2,581-599).
caggactagttccaaagta

SEQ ID NO: 412603 - DNA, 19 bp, Homo sapiens
  siRNA target sequence for MGC26778 (NM_145010.2,583-601).
ggactagttccaaagtaca

SEQ ID NO: 412604 - DNA, 19 bp, Homo sapiens
  siRNA target sequence for MGC26778 (NM_145010.2,584-602).
gactagttccaaagtacat

SEQ ID NO: 412605 - DNA, 19 bp, Homo sapiens
  siRNA target sequence for MGC26778 (NM_145010.2,586-604).
ctagttccaaagtacatca

SEQ ID NO: 412606 - DNA, 19 bp, Homo sapiens
  siRNA target sequence for MGC26778 (NM_145010.2,622-640).
gtcacacctgaatacatat

SEQ ID NO: 412607 - DNA, 19 bp, Homo sapiens
  siRNA target sequence for MGC26778 (NM_145010.2,646-664).
cgaaacgaggaaataaaga

SEQ ID NO: 412608 - DNA, 19 bp, Homo sapiens
  siRNA target sequence for MGC26778 (NM_145010.2,776-794).
gggaagaggtgcataaaga

SEQ ID NO: 412609 - DNA, 19 bp, Homo sapiens
  siRNA target sequence for MGC26778 (NM_145010.2,799-817).
cagtccctctcggtcttta

SEQ ID NO: 412610 - DNA, 19 bp, Homo sapiens
  siRNA target sequence for MGC26778 (NM_145010.2,801-819).
gtccctctcggtctttata

SEQ ID NO: 412611 - DNA, 19 bp, Homo sapiens
  siRNA target sequence for MGC26778 (NM_145010.2,804-822).
cctctcggtctttatagat

SEQ ID NO: 412612 - DNA, 19 bp, Homo sapiens
  siRNA target sequence for MGC26778 (NM_145010.2,805-823).
ctctcggtctttatagatt

SEQ ID NO: 412613 - DNA, 19 bp, Homo sapiens
  siRNA target sequence for MGC26778 (NM_145010.2,807-825).
ctcggtctttatagattct

SEQ ID NO: 412614 - DNA, 19 bp, Homo sapiens
  siRNA target sequence for MGC26778 (NM_145010.2,809-827).
cggtctttatagattctat

SEQ ID NO: 412615 - DNA, 19 bp, Homo sapiens
  siRNA target sequence for MGC26778 (NM_145010.2,810-828).
ggtctttatagattctata

SEQ ID NO: 412616 - DNA, 19 bp, Homo sapiens
  siRNA target sequence for MGC35558 (NM_145013.1,395-413).
ggatgtgcatgccatagta

SEQ ID NO: 412617 - DNA, 19 bp, Homo sapiens
  siRNA target sequence for MGC35558 (NM_145013.1,396-414).
gatgtgcatgccatagtaa

SEQ ID NO: 412618 - DNA, 19 bp, Homo sapiens
  siRNA target sequence for MGC35558 (NM_145013.1,551-569).
ctgcaaggcccatgatagt

SEQ ID NO: 412619 - DNA, 19 bp, Homo sapiens
  siRNA target sequence for MGC35558 (NM_145013.1,554-572).
caaggcccatgatagtaga

SEQ ID NO: 412620 - DNA, 19 bp, Homo sapiens
  siRNA target sequence for FLJ32915 (NM_145014.1,558-576).
ggacaaatatgggctaata

SEQ ID NO: 412621 - DNA, 19 bp, Homo sapiens
  siRNA target sequence for FLJ32915 (NM_145014.1,600-618).
gcagctgctacagctttta

SEQ ID NO: 412622 - DNA, 19 bp, Homo sapiens
  siRNA target sequence for FLJ32915 (NM_145014.1,660-678).
gaagcccaatctatccaat

SEQ ID NO: 412623 - DNA, 19 bp, Homo sapiens
  siRNA target sequence for FLJ32915 (NM_145014.1,664-682).
cccaatctatccaatatga

SEQ ID NO: 412624 - DNA, 19 bp, Homo sapiens
  siRNA target sequence for FLJ32915 (NM_145014.1,665-683).
ccaatctatccaatatgat

SEQ ID NO: 412625 - DNA, 19 bp, Homo sapiens
  siRNA target sequence for FLJ32915 (NM_145014.1,675-693).
caatatgatccctacagta

SEQ ID NO: 412626 - DNA, 19 bp, Homo sapiens
  siRNA target sequence for FLJ32915 (NM_145014.1,686-704).
ctacagtaaagcttcagta

SEQ ID NO: 412627 - DNA, 19 bp, Homo sapiens
  siRNA target sequence for FLJ32915 (NM_145014.1,743-761).
gtacccacatgtagaaagt

SEQ ID NO: 412628 - DNA, 19 bp, Homo sapiens
  siRNA target sequence for FLJ32915 (NM_145014.1,842-860).
gccagatggggaagtatta

SEQ ID NO: 412629 - DNA, 19 bp, Homo sapiens
  siRNA target sequence for FLJ32915 (NM_145014.1,861-879).
gtaacagatgagtcgatta

SEQ ID NO: 412630 - DNA, 19 bp, Homo sapiens
  siRNA target sequence for FLJ32915 (NM_145014.1,870-888).
gagtcgattatcagtgaat

SEQ ID NO: 412631 - DNA, 19 bp, Homo sapiens
  siRNA target sequence for FLJ32915 (NM_145014.1,872-890).
gtcgattatcagtgaatca

SEQ ID NO: 412632 - DNA, 19 bp, Homo sapiens
  siRNA target sequence for FLJ32915 (NM_145014.1,874-892).
cgattatcagtgaatcaga

SEQ ID NO: 412633 - DNA, 19 bp, Homo sapiens
  siRNA target sequence for FLJ32915 (NM_145014.1,914-932).
ggatctctgggacttaaga

SEQ ID NO: 412634 - DNA, 19 bp, Homo sapiens
  siRNA target sequence for FLJ32915 (NM_145014.1,937-955).
ggctgatgaatgtacagtt

SEQ ID NO: 412635 - DNA, 19 bp, Homo sapiens
  siRNA target sequence for FLJ32915 (NM_145014.1,1001-1019).
cctaccacatgaataccaa

SEQ ID NO: 412636 - DNA, 19 bp, Homo sapiens
  siRNA target sequence for FLJ32915 (NM_145014.1,1072-1090).
ctccagcttacgaacaaga

SEQ ID NO: 412637 - DNA, 19 bp, Homo sapiens
  siRNA target sequence for FLJ32915 (NM_145014.1,1169-1187).
ccgggtagcccggtatttt

SEQ ID NO: 412638 - DNA, 19 bp, Homo sapiens
  siRNA target sequence for FLJ32915 (NM_145014.1,1171-1189).
gggtagcccggtattttga

SEQ ID NO: 412639 - DNA, 19 bp, Homo sapiens
  siRNA target sequence for FLJ32915 (NM_145014.1,1173-1191).
gtagcccggtattttgagt

SEQ ID NO: 412640 - DNA, 19 bp, Homo sapiens
  siRNA target sequence for FLJ32915 (NM_145014.1,1177-1195).
cccggtattttgagtacaa

SEQ ID NO: 412641 - DNA, 19 bp, Homo sapiens
  siRNA target sequence for FLJ32915 (NM_145014.1,1199-1217).
ggactgggactcaatacgt

SEQ ID NO: 412642 - DNA, 19 bp, Homo sapiens
  siRNA target sequence for FLJ32915 (NM_145014.1,1200-1218).
gactgggactcaatacgtt

SEQ ID NO: 412643 - DNA, 19 bp, Homo sapiens
  siRNA target sequence for FLJ32915 (NM_145014.1,1205-1223).
ggactcaatacgtttacct

SEQ ID NO: 412644 - DNA, 19 bp, Homo sapiens
  siRNA target sequence for FLJ32915 (NM_145014.1,1216-1234).
gtttacctggtgaagatca

SEQ ID NO: 412645 - DNA, 19 bp, Homo sapiens
  siRNA target sequence for FLJ32915 (NM_145014.1,1316-1334).
cccaaacaattatctagta

SEQ ID NO: 412646 - DNA, 19 bp, Homo sapiens
  siRNA target sequence for BXMAS2-10 (NM_145016.2,422-440).
cagattctgtataaatcct

SEQ ID NO: 412647 - DNA, 19 bp, Homo sapiens
  siRNA target sequence for BXMAS2-10 (NM_145016.2,428-446).
ctgtataaatccttagaaa

SEQ ID NO: 412648 - DNA, 19 bp, Homo sapiens
  siRNA target sequence for BXMAS2-10 (NM_145016.2,448-466).
gagcatccctgaatccata

SEQ ID NO: 412649 - DNA, 19 bp, Homo sapiens
  siRNA target sequence for BXMAS2-10 (NM_145016.2,470-488).
gtatatggcgccattttca

SEQ ID NO: 412650 - DNA, 19 bp, Homo sapiens
  siRNA target sequence for BXMAS2-10 (NM_145016.2,606-624).
ccaacacttaccacatctt

SEQ ID NO: 412651 - DNA, 19 bp, Homo sapiens
  siRNA target sequence for BXMAS2-10 (NM_145016.2,647-665).
gaggaagtcctgtcatact

SEQ ID NO: 412652 - DNA, 19 bp, Homo sapiens
  siRNA target sequence for BXMAS2-10 (NM_145016.2,655-673).
cctgtcatactccaatgta

SEQ ID NO: 412653 - DNA, 19 bp, Homo sapiens
  siRNA target sequence for BXMAS2-10 (NM_145016.2,656-674).
ctgtcatactccaatgtaa

SEQ ID NO: 412654 - DNA, 19 bp, Homo sapiens
  siRNA target sequence for BXMAS2-10 (NM_145016.2,715-733).
gggcttggatgaagcaata

SEQ ID NO: 412655 - DNA, 19 bp, Homo sapiens
  siRNA target sequence for BXMAS2-10 (NM_145016.2,716-734).
ggcttggatgaagcaataa

SEQ ID NO: 412656 - DNA, 19 bp, Homo sapiens
  siRNA target sequence for BXMAS2-10 (NM_145016.2,718-736).
cttggatgaagcaataaga

SEQ ID NO: 412657 - DNA, 19 bp, Homo sapiens
  siRNA target sequence for BXMAS2-10 (NM_145016.2,784-802).
cctctttataccggaatta

SEQ ID NO: 412658 - DNA, 19 bp, Homo sapiens
  siRNA target sequence for BXMAS2-10 (NM_145016.2,787-805).
ctttataccggaattacca

SEQ ID NO: 412659 - DNA, 19 bp, Homo sapiens
  siRNA target sequence for BXMAS2-10 (NM_145016.2,795-813).
cggaattaccaaagaaaca

SEQ ID NO: 412660 - DNA, 19 bp, Homo sapiens
  siRNA target sequence for BXMAS2-10 (NM_145016.2,1055-1073).
gagttgagaatgggttata

SEQ ID NO: 412661 - DNA, 19 bp, Homo sapiens
  siRNA target sequence for BXMAS2-10 (NM_145016.2,1057-1075).
gttgagaatgggttatact

SEQ ID NO: 412662 - DNA, 19 bp, Homo sapiens
  siRNA target sequence for BXMAS2-10 (NM_145016.2,1068-1086).
gttatactgtccccaaata

SEQ ID NO: 412663 - DNA, 19 bp, Homo sapiens
  siRNA target sequence for BXMAS2-10 (NM_145016.2,1191-1209).
gcctacaggcactgaacaa

SEQ ID NO: 412664 - DNA, 19 bp, Homo sapiens
  siRNA target sequence for BXMAS2-10 (NM_145016.2,1192-1210).
cctacaggcactgaacaat

SEQ ID NO: 412665 - DNA, 19 bp, Homo sapiens
  siRNA target sequence for BXMAS2-10 (NM_145016.2,1249-1267).
gaaatgcacccccaagaaa

SEQ ID NO: 412666 - DNA, 19 bp, Homo sapiens
  siRNA target sequence for FLJ32771 (NM_145017.1,148-166).
gggtcgtctccccttatgt

SEQ ID NO: 412667 - DNA, 19 bp, Homo sapiens
  siRNA target sequence for FLJ32771 (NM_145017.1,150-168).
gtcgtctccccttatgtga

SEQ ID NO: 412668 - DNA, 19 bp, Homo sapiens
  siRNA target sequence for FLJ32771 (NM_145017.1,229-247).
cctacggtcgggaggattt

SEQ ID NO: 412669 - DNA, 19 bp, Homo sapiens
  siRNA target sequence for FLJ32771 (NM_145017.1,273-291).
ggcaccggctacaaatcaa

SEQ ID NO: 412670 - DNA, 19 bp, Homo sapiens
  siRNA target sequence for FLJ32771 (NM_145017.1,647-665).
catgacgtcggagtacaat

SEQ ID NO: 412671 - DNA, 19 bp, Homo sapiens
  siRNA target sequence for FLJ32771 (NM_145017.1,652-670).
cgtcggagtacaattccaa

SEQ ID NO: 412672 - DNA, 19 bp, Homo sapiens
  siRNA target sequence for FLJ32771 (NM_145017.1,697-715).
cagatttcttgcagaagaa

SEQ ID NO: 412673 - DNA, 19 bp, Homo sapiens
  siRNA target sequence for FLJ32771 (NM_145017.1,923-941).
cttcagccgagggaatgaa

SEQ ID NO: 412674 - DNA, 19 bp, Homo sapiens
  siRNA target sequence for FLJ32771 (NM_145017.1,1022-1040).
gatgcaacagacaaacgtt

SEQ ID NO: 412675 - DNA, 19 bp, Homo sapiens
  siRNA target sequence for FLJ32771 (NM_145017.1,1081-1099).
cagggttcagccttaacaa

SEQ ID NO: 412676 - DNA, 19 bp, Homo sapiens
  siRNA target sequence for FLJ32771 (NM_145017.1,1157-1175).
ctacaaccaagggtacttt

SEQ ID NO: 412677 - DNA, 19 bp, Homo sapiens
  siRNA target sequence for FLJ25416 (NM_145018.2,218-236).
cagaagacgaaaatttctt

SEQ ID NO: 412678 - DNA, 19 bp, Homo sapiens
  siRNA target sequence for FLJ25416 (NM_145018.2,295-313).
gcttctctaggataatcct

SEQ ID NO: 412679 - DNA, 19 bp, Homo sapiens
  siRNA target sequence for FLJ25416 (NM_145018.2,314-332).
ggtctccaaaaggtctaat

SEQ ID NO: 412680 - DNA, 19 bp, Homo sapiens
  siRNA target sequence for FLJ25416 (NM_145018.2,317-335).
ctccaaaaggtctaattgt

SEQ ID NO: 412681 - DNA, 19 bp, Homo sapiens
  siRNA target sequence for FLJ25416 (NM_145018.2,326-344).
gtctaattgtccaaaatgt

SEQ ID NO: 412682 - DNA, 19 bp, Homo sapiens
  siRNA target sequence for FLJ25416 (NM_145018.2,383-401).
caaactttccttaaaagtt

SEQ ID NO: 412683 - DNA, 19 bp, Homo sapiens
  siRNA target sequence for FLJ25416 (NM_145018.2,488-506).
gtacattcaggatcctaat

SEQ ID NO: 412684 - DNA, 19 bp, Homo sapiens
  siRNA target sequence for FLJ25416 (NM_145018.2,491-509).
cattcaggatcctaataaa

SEQ ID NO: 412685 - DNA, 19 bp, Homo sapiens
  siRNA target sequence for FLJ25416 (NM_145018.2,571-589).
gctttgttggacaaagctt

SEQ ID NO: 412686 - DNA, 19 bp, Homo sapiens
  siRNA target sequence for FLJ25416 (NM_145018.2,598-616).
gagtgacgaattttgaaaa

SEQ ID NO: 412687 - DNA, 19 bp, Homo sapiens
  siRNA target sequence for FLJ25416 (NM_145018.2,724-742).
gtattgcaggctttactgt

SEQ ID NO: 412688 - DNA, 19 bp, Homo sapiens
  siRNA target sequence for FLJ25416 (NM_145018.2,730-748).
caggctttactgtcattga

SEQ ID NO: 412689 - DNA, 19 bp, Homo sapiens
  siRNA target sequence for FLJ25416 (NM_145018.2,732-750).
ggctttactgtcattgact

SEQ ID NO: 412690 - DNA, 19 bp, Homo sapiens
  siRNA target sequence for FLJ25416 (NM_145018.2,733-751).
gctttactgtcattgacta

SEQ ID NO: 412691 - DNA, 19 bp, Homo sapiens
  siRNA target sequence for FLJ25416 (NM_145018.2,800-818).
ctctcaggcacctaacaat

SEQ ID NO: 412692 - DNA, 19 bp, Homo sapiens
  siRNA target sequence for FLJ25416 (NM_145018.2,804-822).
caggcacctaacaatcact

SEQ ID NO: 412693 - DNA, 19 bp, Homo sapiens
  siRNA target sequence for FLJ25416 (NM_145018.2,815-833).
caatcacttacttgcttta

SEQ ID NO: 412694 - DNA, 19 bp, Homo sapiens
  siRNA target sequence for FLJ25416 (NM_145018.2,828-846).
gctttagatcactcaaata

SEQ ID NO: 412695 - DNA, 19 bp, Homo sapiens
  siRNA target sequence for FLJ25416 (NM_145018.2,928-946).
ggcagccatcacttgaatt

SEQ ID NO: 412696 - DNA, 19 bp, Homo sapiens
  siRNA target sequence for FLJ25416 (NM_145018.2,930-948).
cagccatcacttgaattca

SEQ ID NO: 412697 - DNA, 19 bp, Homo sapiens
  siRNA target sequence for FLJ25416 (NM_145018.2,942-960).
gaattcacttgcattgttt

SEQ ID NO: 412698 - DNA, 19 bp, Homo sapiens
  siRNA target sequence for FLJ25416 (NM_145018.2,966-984).
ctaacagataatgatgatt

SEQ ID NO: 412699 - DNA, 19 bp, Homo sapiens
  siRNA target sequence for FLJ25416 (NM_145018.2,1096-1114).
catggagccttgtttcata

SEQ ID NO: 412700 - DNA, 19 bp, Homo sapiens
  siRNA target sequence for FLJ25416 (NM_145018.2,1099-1117).
ggagccttgtttcatatat

SEQ ID NO: 412701 - DNA, 19 bp, Homo sapiens
  siRNA target sequence for FLJ25416 (NM_145018.2,1209-1227).
ggagttaatgactctaatt

SEQ ID NO: 412702 - DNA, 19 bp, Homo sapiens
  siRNA target sequence for FLJ25416 (NM_145018.2,1251-1269).
ccccttgagtcaagtaata

SEQ ID NO: 412703 - DNA, 19 bp, Homo sapiens
  siRNA target sequence for FLJ25416 (NM_145018.2,1253-1271).
ccttgagtcaagtaataca

SEQ ID NO: 412704 - DNA, 19 bp, Homo sapiens
  siRNA target sequence for FLJ25416 (NM_145018.2,1254-1272).
cttgagtcaagtaatacaa

SEQ ID NO: 412705 - DNA, 19 bp, Homo sapiens
  siRNA target sequence for FLJ25416 (NM_145018.2,1257-1275).
gagtcaagtaatacaaaat

SEQ ID NO: 412706 - DNA, 19 bp, Homo sapiens
  siRNA target sequence for FLJ25416 (NM_145018.2,1393-1411).
cgttactcagacttgaaga

SEQ ID NO: 412707 - DNA, 19 bp, Homo sapiens
  siRNA target sequence for FLJ25416 (NM_145018.2,1430-1448).
ggatggtgaccctcaaatt

SEQ ID NO: 412708 - DNA, 19 bp, Homo sapiens
  siRNA target sequence for FLJ25416 (NM_145018.2,1534-1552).
gtagtaggaaacatcatgt

SEQ ID NO: 412709 - DNA, 19 bp, Homo sapiens
  siRNA target sequence for FLJ25416 (NM_145018.2,1601-1619).
gactccccagagaactact

SEQ ID NO: 412710 - DNA, 19 bp, Homo sapiens
  siRNA target sequence for FLJ25416 (NM_145018.2,1625-1643).
cctgcatacaccacctata

SEQ ID NO: 412711 - DNA, 19 bp, Homo sapiens
  siRNA target sequence for FLJ25416 (NM_145018.2,1628-1646).
gcatacaccacctatagct

SEQ ID NO: 412712 - DNA, 19 bp, Homo sapiens
  siRNA target sequence for FLJ25416 (NM_145018.2,1638-1656).
cctatagctttaagatcat

SEQ ID NO: 412713 - DNA, 19 bp, Homo sapiens
  siRNA target sequence for FLJ25416 (NM_145018.2,1651-1669).
gatcatcacaagtaatagt

SEQ ID NO: 412714 - DNA, 19 bp, Homo sapiens
  siRNA target sequence for FLJ25416 (NM_145018.2,1719-1737).
ctaagtcctagtgttgaaa

SEQ ID NO: 412715 - DNA, 19 bp, Homo sapiens
  siRNA target sequence for FLJ25416 (NM_145018.2,1827-1845).
ctgtcagctctgtcttcat

SEQ ID NO: 412716 - DNA, 19 bp, Homo sapiens
  siRNA target sequence for FLJ25416 (NM_145018.2,1829-1847).
gtcagctctgtcttcatct

SEQ ID NO: 412717 - DNA, 19 bp, Homo sapiens
  siRNA target sequence for FLJ25416 (NM_145018.2,1864-1882).
caatagttactcttaagaa

SEQ ID NO: 412718 - DNA, 19 bp, Homo sapiens
  siRNA target sequence for FLJ25416 (NM_145018.2,1907-1925).
ggagagtgaccattctagt

SEQ ID NO: 412719 - DNA, 19 bp, Homo sapiens
  siRNA target sequence for FLJ25416 (NM_145018.2,1910-1928).
gagtgaccattctagtcta

SEQ ID NO: 412720 - DNA, 19 bp, Homo sapiens
  siRNA target sequence for FLJ25416 (NM_145018.2,1912-1930).
gtgaccattctagtctaaa

SEQ ID NO: 412721 - DNA, 19 bp, Homo sapiens
  siRNA target sequence for FLJ25416 (NM_145018.2,1914-1932).
gaccattctagtctaaata

SEQ ID NO: 412722 - DNA, 19 bp, Homo sapiens
  siRNA target sequence for FLJ25416 (NM_145018.2,1990-2008).
caactctgtgttataggaa

SEQ ID NO: 412723 - DNA, 19 bp, Homo sapiens
  siRNA target sequence for FLJ25416 (NM_145018.2,1995-2013).
ctgtgttataggaagtata

SEQ ID NO: 412724 - DNA, 19 bp, Homo sapiens
  siRNA target sequence for FLJ25416 (NM_145018.2,1999-2017).
gttataggaagtataatga

SEQ ID NO: 412725 - DNA, 19 bp, Homo sapiens
  siRNA target sequence for FLJ25416 (NM_145018.2,2062-2080).
ggtccaagaaccaagatga

SEQ ID NO: 412726 - DNA, 19 bp, Homo sapiens
  siRNA target sequence for FLJ25416 (NM_145018.2,2098-2116).
ggaaacttacatatccttt

SEQ ID NO: 412727 - DNA, 19 bp, Homo sapiens
  siRNA target sequence for FLJ25416 (NM_145018.2,2099-2117).
gaaacttacatatccttta

SEQ ID NO: 412728 - DNA, 19 bp, Homo sapiens
  siRNA target sequence for FLJ25416 (NM_145018.2,2107-2125).
catatcctttagaaactct

SEQ ID NO: 412729 - DNA, 19 bp, Homo sapiens
  siRNA target sequence for FLJ25416 (NM_145018.2,2168-2186).
gccttggggacatatcaat

SEQ ID NO: 412730 - DNA, 19 bp, Homo sapiens
  siRNA target sequence for FLJ25416 (NM_145018.2,2178-2196).
catatcaataacaacgtaa

SEQ ID NO: 412731 - DNA, 19 bp, Homo sapiens
  siRNA target sequence for FLJ25416 (NM_145018.2,2193-2211).
gtaacacagagctattcta

SEQ ID NO: 412732 - DNA, 19 bp, Homo sapiens
  siRNA target sequence for FLJ25416 (NM_145018.2,2199-2217).
cagagctattctattggtt

SEQ ID NO: 412733 - DNA, 19 bp, Homo sapiens
  siRNA target sequence for FLJ25416 (NM_145018.2,2273-2291).
ggacattgcaactgagatt

SEQ ID NO: 412734 - DNA, 19 bp, Homo sapiens
  siRNA target sequence for FLJ25416 (NM_145018.2,2274-2292).
gacattgcaactgagatta

SEQ ID NO: 412735 - DNA, 19 bp, Homo sapiens
  siRNA target sequence for FLJ25416 (NM_145018.2,2315-2333).
gttaaaatggggaacatct

SEQ ID NO: 412736 - DNA, 19 bp, Homo sapiens
  siRNA target sequence for FLJ25416 (NM_145018.2,2346-2364).
cacccttcagagtctgatt

SEQ ID NO: 412737 - DNA, 19 bp, Homo sapiens
  siRNA target sequence for FLJ25416 (NM_145018.2,2377-2395).
cactttctgaagacttcat

SEQ ID NO: 412738 - DNA, 19 bp, Homo sapiens
  siRNA target sequence for FLJ25416 (NM_145018.2,2401-2419).
cttcacaaaaattatcctt

SEQ ID NO: 412739 - DNA, 19 bp, Homo sapiens
  siRNA target sequence for FLJ25416 (NM_145018.2,2416-2434).
ccttgcaaagcctatctga

SEQ ID NO: 412740 - DNA, 19 bp, Homo sapiens
  siRNA target sequence for FLJ25416 (NM_145018.2,2435-2453).
ctctaggcattcaagaaca

SEQ ID NO: 412741 - DNA, 19 bp, Homo sapiens
  siRNA target sequence for FLJ25416 (NM_145018.2,2458-2476).
ctccaacacctcattttca

SEQ ID NO: 412742 - DNA, 19 bp, Homo sapiens
  siRNA target sequence for FLJ25416 (NM_145018.2,2548-2566).
ggttccaccaaacaagaat

SEQ ID NO: 412743 - DNA, 19 bp, Homo sapiens
  siRNA target sequence for FLJ25416 (NM_145018.2,2549-2567).
gttccaccaaacaagaatt

SEQ ID NO: 412744 - DNA, 19 bp, Homo sapiens
  siRNA target sequence for FLJ25416 (NM_145018.2,2714-2732).
cagaagccctattgtatct

SEQ ID NO: 412745 - DNA, 19 bp, Homo sapiens
  siRNA target sequence for FLJ25416 (NM_145018.2,2740-2758).
cacaaccagacgttttcaa

SEQ ID NO: 412746 - DNA, 19 bp, Homo sapiens
  siRNA target sequence for FLJ25416 (NM_145018.2,2777-2795).
gtgccatgaaactgatagt

SEQ ID NO: 412747 - DNA, 19 bp, Homo sapiens
  siRNA target sequence for FLJ25416 (NM_145018.2,2780-2798).
ccatgaaactgatagtgat

SEQ ID NO: 412748 - DNA, 19 bp, Homo sapiens
  siRNA target sequence for FLJ25416 (NM_145018.2,2885-2903).
ctatcatttccctgatcaa

SEQ ID NO: 412749 - DNA, 19 bp, Homo sapiens
  siRNA target sequence for FLJ25416 (NM_145018.2,2894-2912).
ccctgatcaacaagagtta

SEQ ID NO: 412750 - DNA, 19 bp, Homo sapiens
  siRNA target sequence for FLJ25416 (NM_145018.2,2940-2958).
caaggaaccaataaaggtt

SEQ ID NO: 412751 - DNA, 19 bp, Homo sapiens
  siRNA target sequence for FLJ25416 (NM_145018.2,2947-2965).
ccaataaaggtttaattaa

SEQ ID NO: 412752 - DNA, 19 bp, Homo sapiens
  siRNA target sequence for FLJ25416 (NM_145018.2,2991-3009).
gcagttgttacgaaaaaga

SEQ ID NO: 412753 - DNA, 19 bp, Homo sapiens
  siRNA target sequence for FLJ25416 (NM_145018.2,3055-3073).
gtccagacattcaagtctt

SEQ ID NO: 412754 - DNA, 19 bp, Homo sapiens
  siRNA target sequence for FLJ25416 (NM_145018.2,3099-3117).
cttggacctgattcttgtt

SEQ ID NO: 412755 - DNA, 19 bp, Homo sapiens
  siRNA target sequence for FLJ25416 (NM_145018.2,3156-3174).
ccaccttcagtgtgtgaaa

SEQ ID NO: 412756 - DNA, 19 bp, Homo sapiens
  siRNA target sequence for FLJ25416 (NM_145018.2,3181-3199).
gtgcttggtcacctgaatt

SEQ ID NO: 412757 - DNA, 19 bp, Homo sapiens
  siRNA target sequence for FLJ25416 (NM_145018.2,3183-3201).
gcttggtcacctgaattgt

SEQ ID NO: 412758 - DNA, 19 bp, Homo sapiens
  siRNA target sequence for FLJ30707 (NM_145019.2,220-238).
cctccacgagcaatggatt

SEQ ID NO: 412759 - DNA, 19 bp, Homo sapiens
  siRNA target sequence for FLJ30707 (NM_145019.2,770-788).
ctgtcgctacgacaactat

SEQ ID NO: 412760 - DNA, 19 bp, Homo sapiens
  siRNA target sequence for FLJ30707 (NM_145019.2,1077-1095).
caaagggtgcataagaagt

SEQ ID NO: 412761 - DNA, 19 bp, Homo sapiens
  siRNA target sequence for FLJ30707 (NM_145019.2,1368-1386).
gctgaaccacagtggtttt

SEQ ID NO: 412762 - DNA, 19 bp, Homo sapiens
  siRNA target sequence for FLJ32743 (NM_145020.2,485-503).
gagaaaactaaattactaa

SEQ ID NO: 412763 - DNA, 19 bp, Homo sapiens
  siRNA target sequence for FLJ32743 (NM_145020.2,575-593).
gaggagctccgtgttgaat

SEQ ID NO: 412764 - DNA, 19 bp, Homo sapiens
  siRNA target sequence for FLJ32743 (NM_145020.2,578-596).
gagctccgtgttgaattgt

SEQ ID NO: 412765 - DNA, 19 bp, Homo sapiens
  siRNA target sequence for FLJ32743 (NM_145020.2,580-598).
gctccgtgttgaattgtta

SEQ ID NO: 412766 - DNA, 19 bp, Homo sapiens
  siRNA target sequence for FLJ32743 (NM_145020.2,581-599).
ctccgtgttgaattgttat

SEQ ID NO: 412767 - DNA, 19 bp, Homo sapiens
  siRNA target sequence for FLJ32743 (NM_145020.2,584-602).
cgtgttgaattgttatcta

SEQ ID NO: 412768 - DNA, 19 bp, Homo sapiens
  siRNA target sequence for FLJ32743 (NM_145020.2,625-643).
ggagcggaaagcacagatt

SEQ ID NO: 412769 - DNA, 19 bp, Homo sapiens
  siRNA target sequence for FLJ32743 (NM_145020.2,713-731).
gaccgattagccaaggaaa

SEQ ID NO: 412770 - DNA, 19 bp, Homo sapiens
  siRNA target sequence for FLJ32743 (NM_145020.2,857-875).
gcacgccttgtggaaagta

SEQ ID NO: 412771 - DNA, 19 bp, Homo sapiens
  siRNA target sequence for FLJ32743 (NM_145020.2,858-876).
cacgccttgtggaaagtaa

SEQ ID NO: 412772 - DNA, 19 bp, Homo sapiens
  siRNA target sequence for FLJ32743 (NM_145020.2,860-878).
cgccttgtggaaagtaaca

SEQ ID NO: 412773 - DNA, 19 bp, Homo sapiens
  siRNA target sequence for FLJ32743 (NM_145020.2,873-891).
gtaacaacgcacagattaa

SEQ ID NO: 412774 - DNA, 19 bp, Homo sapiens
  siRNA target sequence for FLJ32743 (NM_145020.2,902-920).
gaacaggatatgctaaaga

SEQ ID NO: 412775 - DNA, 19 bp, Homo sapiens
  siRNA target sequence for FLJ32743 (NM_145020.2,935-953).
caggaaactaggaccattt

SEQ ID NO: 412776 - DNA, 19 bp, Homo sapiens
  siRNA target sequence for FLJ32743 (NM_145020.2,964-982).
cctacaagagaggatagaa

SEQ ID NO: 412777 - DNA, 19 bp, Homo sapiens
  siRNA target sequence for FLJ32743 (NM_145020.2,1002-1020).
gagacgaacaggacttgaa

SEQ ID NO: 412778 - DNA, 19 bp, Homo sapiens
  siRNA target sequence for FLJ32743 (NM_145020.2,1004-1022).
gacgaacaggacttgaaca

SEQ ID NO: 412779 - DNA, 19 bp, Homo sapiens
  siRNA target sequence for FLJ32743 (NM_145020.2,1007-1025).
gaacaggacttgaacatga

SEQ ID NO: 412780 - DNA, 19 bp, Homo sapiens
  siRNA target sequence for FLJ32743 (NM_145020.2,1038-1056).
gggcccttcaagacttaca

SEQ ID NO: 412781 - DNA, 19 bp, Homo sapiens
  siRNA target sequence for FLJ32743 (NM_145020.2,1106-1124).
cagaagatataccataaat

SEQ ID NO: 412782 - DNA, 19 bp, Homo sapiens
  siRNA target sequence for FLJ32743 (NM_145020.2,1162-1180).
gaaagaatttgacagaata

SEQ ID NO: 412783 - DNA, 19 bp, Homo sapiens
  siRNA target sequence for FLJ32743 (NM_145020.2,1267-1285).
ggtcatgtgtacaagaaaa

SEQ ID NO: 412784 - DNA, 19 bp, Homo sapiens
  siRNA target sequence for FLJ32743 (NM_145020.2,1303-1321).
gttgcaacgagaagctaaa

SEQ ID NO: 412785 - DNA, 19 bp, Homo sapiens
  siRNA target sequence for FLJ32743 (NM_145020.2,1495-1513).
gaaacgccgagagtttgaa

SEQ ID NO: 412786 - DNA, 19 bp, Homo sapiens
  siRNA target sequence for MIR (NM_145021.2,294-312).
gctagagtctacagaagta

SEQ ID NO: 412787 - DNA, 19 bp, Homo sapiens
  siRNA target sequence for MIR (NM_145021.2,295-313).
ctagagtctacagaagtaa

SEQ ID NO: 412788 - DNA, 19 bp, Homo sapiens
  siRNA target sequence for MIR (NM_145021.2,310-328).
gtaagaccaaagaaaagga

SEQ ID NO: 412789 - DNA, 19 bp, Homo sapiens
  siRNA target sequence for MIR (NM_145021.2,357-375).
ggacatttcatgagtcatt

SEQ ID NO: 412790 - DNA, 19 bp, Homo sapiens
  siRNA target sequence for MIR (NM_145021.2,723-741).
cacgtcattgccatcacat

SEQ ID NO: 412791 - DNA, 19 bp, Homo sapiens
  siRNA target sequence for MIR (NM_145021.2,754-772).
ccttgtatgtgctcattga

SEQ ID NO: 412792 - DNA, 19 bp, Homo sapiens
  siRNA target sequence for MIR (NM_145021.2,863-881).
caccggaggacttcttttt

SEQ ID NO: 412793 - DNA, 19 bp, Homo sapiens
  siRNA target sequence for MIR (NM_145021.2,865-883).
ccggaggacttctttttat

SEQ ID NO: 412794 - DNA, 19 bp, Homo sapiens
  siRNA target sequence for MIR (NM_145021.2,944-962).
gatctatgttcaaaactgt

SEQ ID NO: 412795 - DNA, 19 bp, Homo sapiens
  siRNA target sequence for MIR (NM_145021.2,1047-1065).
cattccgacacaaactctt

SEQ ID NO: 412796 - DNA, 19 bp, Homo sapiens
  siRNA target sequence for MIR (NM_145021.2,1052-1070).
cgacacaaactcttcttgt

SEQ ID NO: 412797 - DNA, 19 bp, Homo sapiens
  siRNA target sequence for MIR (NM_145021.2,1053-1071).
gacacaaactcttcttgtt

SEQ ID NO: 412798 - DNA, 19 bp, Homo sapiens
  siRNA target sequence for MIR (NM_145021.2,1086-1104).
gacactggagcagaaatca

SEQ ID NO: 412799 - DNA, 19 bp, Homo sapiens
  siRNA target sequence for C10orf25 (NM_145022.1,46-64).
ccgaaagcgttgttcgttt

SEQ ID NO: 412800 - DNA, 19 bp, Homo sapiens
  siRNA target sequence for C10orf25 (NM_145022.1,182-200).
cctctccaacctagaaact

SEQ ID NO: 412801 - DNA, 19 bp, Homo sapiens
  siRNA target sequence for C10orf25 (NM_145022.1,247-265).
cacgaagtcaccttaatta

SEQ ID NO: 412802 - DNA, 19 bp, Homo sapiens
  siRNA target sequence for C10orf25 (NM_145022.1,250-268).
gaagtcaccttaattatca

SEQ ID NO: 412803 - DNA, 19 bp, Homo sapiens
  siRNA target sequence for C10orf25 (NM_145022.1,282-300).
gcaagatgggagtggttat

SEQ ID NO: 412804 - DNA, 19 bp, Homo sapiens
  siRNA target sequence for C10orf25 (NM_145022.1,283-301).
caagatgggagtggttata

SEQ ID NO: 412805 - DNA, 19 bp, Homo sapiens
  siRNA target sequence for C10orf25 (NM_145022.1,291-309).
gagtggttatactccattt

SEQ ID NO: 412806 - DNA, 19 bp, Homo sapiens
  siRNA target sequence for FLJ32762 (NM_145023.3,526-544).
ctgttgaccaccagtaaca

SEQ ID NO: 412807 - DNA, 19 bp, Homo sapiens
  siRNA target sequence for FLJ32762 (NM_145023.3,528-546).
gttgaccaccagtaacaaa

SEQ ID NO: 412808 - DNA, 19 bp, Homo sapiens
  siRNA target sequence for FLJ32762 (NM_145023.3,549-567).
ggcaaatgttccagcatta

SEQ ID NO: 412809 - DNA, 19 bp, Homo sapiens
  siRNA target sequence for FLJ32762 (NM_145023.3,580-598).
ggactacataatttaccat

SEQ ID NO: 412810 - DNA, 19 bp, Homo sapiens
  siRNA target sequence for FLJ32762 (NM_145023.3,609-627).
gctaaaggaaaaacataat

SEQ ID NO: 412811 - DNA, 19 bp, Homo sapiens
  siRNA target sequence for FLJ32762 (NM_145023.3,711-729).
cattccatcgagtaagaca

SEQ ID NO: 412812 - DNA, 19 bp, Homo sapiens
  siRNA target sequence for FLJ32762 (NM_145023.3,715-733).
ccatcgagtaagacaaaga

SEQ ID NO: 412813 - DNA, 19 bp, Homo sapiens
  siRNA target sequence for FLJ32762 (NM_145023.3,716-734).
catcgagtaagacaaagaa

SEQ ID NO: 412814 - DNA, 19 bp, Homo sapiens
  siRNA target sequence for FLJ32762 (NM_145023.3,722-740).
gtaagacaaagaacttact

SEQ ID NO: 412815 - DNA, 19 bp, Homo sapiens
  siRNA target sequence for FLJ32762 (NM_145023.3,732-750).
gaacttactaccagaagat

SEQ ID NO: 412816 - DNA, 19 bp, Homo sapiens
  siRNA target sequence for FLJ32762 (NM_145023.3,822-840).
cgatcagaatggagaagaa

SEQ ID NO: 412817 - DNA, 19 bp, Homo sapiens
  siRNA target sequence for FLJ32762 (NM_145023.3,906-924).
gacatattgttcgcaattt

SEQ ID NO: 412818 - DNA, 19 bp, Homo sapiens
  siRNA target sequence for FLJ32762 (NM_145023.3,976-994).
ctttttaagtggtttcagt

SEQ ID NO: 412819 - DNA, 19 bp, Homo sapiens
  siRNA target sequence for FLJ32762 (NM_145023.3,1096-1114).
gtaaggcttgtacaaagat

SEQ ID NO: 412820 - DNA, 19 bp, Homo sapiens
  siRNA target sequence for FLJ32762 (NM_145023.3,1148-1166).
ctaaatcctccgtgaaagt

SEQ ID NO: 412821 - DNA, 19 bp, Homo sapiens
  siRNA target sequence for FLJ32762 (NM_145023.3,1154-1172).
cctccgtgaaagtcatgtt

SEQ ID NO: 412822 - DNA, 19 bp, Homo sapiens
  siRNA target sequence for FLJ32762 (NM_145023.3,1159-1177).
gtgaaagtcatgttgtcta

SEQ ID NO: 412823 - DNA, 19 bp, Homo sapiens
  siRNA target sequence for FLJ32762 (NM_145023.3,1198-1216).
cgaccagaagcagtgaaaa

SEQ ID NO: 412824 - DNA, 19 bp, Homo sapiens
  siRNA target sequence for FLJ32762 (NM_145023.3,1258-1276).
gcccactcaactgatgaat

SEQ ID NO: 412825 - DNA, 19 bp, Homo sapiens
  siRNA target sequence for FLJ32762 (NM_145023.3,1259-1277).
cccactcaactgatgaatt

SEQ ID NO: 412826 - DNA, 19 bp, Homo sapiens
  siRNA target sequence for FLJ32762 (NM_145023.3,1261-1279).
cactcaactgatgaattta

SEQ ID NO: 412827 - DNA, 19 bp, Homo sapiens
  siRNA target sequence for FLJ32762 (NM_145023.3,1300-1318).
ccacaaactgctcattcaa

SEQ ID NO: 412828 - DNA, 19 bp, Homo sapiens
  siRNA target sequence for FLJ32762 (NM_145023.3,1301-1319).
cacaaactgctcattcaat

SEQ ID NO: 412829 - DNA, 19 bp, Homo sapiens
  siRNA target sequence for FLJ32762 (NM_145023.3,1303-1321).
caaactgctcattcaatga

SEQ ID NO: 412830 - DNA, 19 bp, Homo sapiens
  siRNA target sequence for FLJ32762 (NM_145023.3,1312-1330).
cattcaatgactaatcgat

SEQ ID NO: 412831 - DNA, 19 bp, Homo sapiens
  siRNA target sequence for FLJ32762 (NM_145023.3,1327-1345).
cgatttaatgccatgttga

SEQ ID NO: 412832 - DNA, 19 bp, Homo sapiens
  siRNA target sequence for FLJ32762 (NM_145023.3,1337-1355).
ccatgttgaaagtatttga

SEQ ID NO: 412833 - DNA, 19 bp, Homo sapiens
  siRNA target sequence for FLJ32762 (NM_145023.3,1629-1647).
ggatcaagtacagaaagta

SEQ ID NO: 412834 - DNA, 19 bp, Homo sapiens
  siRNA target sequence for FLJ32762 (NM_145023.3,1717-1735).
gctaagcatcaacttaact

SEQ ID NO: 412835 - DNA, 19 bp, Homo sapiens
  siRNA target sequence for FLJ32762 (NM_145023.3,1726-1744).
caacttaactatttcctaa

SEQ ID NO: 412836 - DNA, 19 bp, Homo sapiens
  siRNA target sequence for FLJ32762 (NM_145023.3,1791-1809).
gcaagtgggtaatagtcaa

SEQ ID NO: 412837 - DNA, 19 bp, Homo sapiens
  siRNA target sequence for FLJ32762 (NM_145023.3,1799-1817).
gtaatagtcaaacaaaagt

SEQ ID NO: 412838 - DNA, 19 bp, Homo sapiens
  siRNA target sequence for FLJ32762 (NM_145023.3,1895-1913).
ggacaagtgataaaatcca

SEQ ID NO: 412839 - DNA, 19 bp, Homo sapiens
  siRNA target sequence for FLJ32762 (NM_145023.3,1935-1953).
ccaaagcggaagactgatt

SEQ ID NO: 412840 - DNA, 19 bp, Homo sapiens
  siRNA target sequence for FLJ32762 (NM_145023.3,1940-1958).
gcggaagactgattgaaaa

SEQ ID NO: 412841 - DNA, 19 bp, Homo sapiens
  siRNA target sequence for SPATS1 (NM_145026.2,390-408).
cgtctcccctccatctcaa

SEQ ID NO: 412842 - DNA, 19 bp, Homo sapiens
  siRNA target sequence for SPATS1 (NM_145026.2,509-527).
ggaatctaagggatgtttt

SEQ ID NO: 412843 - DNA, 19 bp, Homo sapiens
  siRNA target sequence for SPATS1 (NM_145026.2,519-537).
ggatgttttgccaacacaa

SEQ ID NO: 412844 - DNA, 19 bp, Homo sapiens
  siRNA target sequence for SPATS1 (NM_145026.2,662-680).
ctccttctcacattctgat

SEQ ID NO: 412845 - DNA, 19 bp, Homo sapiens
  siRNA target sequence for SPATS1 (NM_145026.2,701-719).
gcctgaagtccaaaaggat

SEQ ID NO: 412846 - DNA, 19 bp, Homo sapiens
  siRNA target sequence for SPATS1 (NM_145026.2,702-720).
cctgaagtccaaaaggata

SEQ ID NO: 412847 - DNA, 19 bp, Homo sapiens
  siRNA target sequence for SPATS1 (NM_145026.2,771-789).
cgtcctgagtggacatttt

SEQ ID NO: 412848 - DNA, 19 bp, Homo sapiens
  siRNA target sequence for SPATS1 (NM_145026.2,906-924).
gggagaaagaaatacgata

SEQ ID NO: 412849 - DNA, 19 bp, Homo sapiens
  siRNA target sequence for SPATS1 (NM_145026.2,907-925).
ggagaaagaaatacgatat

SEQ ID NO: 412850 - DNA, 19 bp, Homo sapiens
  siRNA target sequence for SPATS1 (NM_145026.2,910-928).
gaaagaaatacgatattga

SEQ ID NO: 412851 - DNA, 19 bp, Homo sapiens
  siRNA target sequence for SPATS1 (NM_145026.2,955-973).
ctccaggcgacaatccata

SEQ ID NO: 412852 - DNA, 19 bp, Homo sapiens
  siRNA target sequence for SPATS1 (NM_145026.2,957-975).
ccaggcgacaatccatata

SEQ ID NO: 412853 - DNA, 19 bp, Homo sapiens
  siRNA target sequence for SPATS1 (NM_145026.2,958-976).
caggcgacaatccatatat

SEQ ID NO: 412854 - DNA, 19 bp, Homo sapiens
  siRNA target sequence for SPATS1 (NM_145026.2,960-978).
ggcgacaatccatatatgt

SEQ ID NO: 412855 - DNA, 19 bp, Homo sapiens
  siRNA target sequence for SPATS1 (NM_145026.2,961-979).
gcgacaatccatatatgta

SEQ ID NO: 412856 - DNA, 19 bp, Homo sapiens
  siRNA target sequence for SPATS1 (NM_145026.2,1019-1037).
gctcccaccagtgaatttt

SEQ ID NO: 412857 - DNA, 19 bp, Homo sapiens
  siRNA target sequence for SPATS1 (NM_145026.2,1221-1239).
ggtgctttggactttccaa

SEQ ID NO: 412858 - DNA, 19 bp, Homo sapiens
  siRNA target sequence for C6orf102 (NM_145027.2,179-197).
gatgccaggaggcttttga

SEQ ID NO: 412859 - DNA, 19 bp, Homo sapiens
  siRNA target sequence for C6orf102 (NM_145027.2,187-205).
gaggcttttgaaatcttca

SEQ ID NO: 412860 - DNA, 19 bp, Homo sapiens
  siRNA target sequence for C6orf102 (NM_145027.2,224-242).
gcgttaccatcgatgacaa

SEQ ID NO: 412861 - DNA, 19 bp, Homo sapiens
  siRNA target sequence for C6orf102 (NM_145027.2,234-252).
cgatgacaacaaacagatt

SEQ ID NO: 412862 - DNA, 19 bp, Homo sapiens
  siRNA target sequence for C6orf102 (NM_145027.2,238-256).
gacaacaaacagattctga

SEQ ID NO: 412863 - DNA, 19 bp, Homo sapiens
  siRNA target sequence for C6orf102 (NM_145027.2,280-298).
gccctgggagaaagtataa

SEQ ID NO: 412864 - DNA, 19 bp, Homo sapiens
  siRNA target sequence for C6orf102 (NM_145027.2,281-299).
ccctgggagaaagtataaa

SEQ ID NO: 412865 - DNA, 19 bp, Homo sapiens
  siRNA target sequence for C6orf102 (NM_145027.2,322-340).
cacctgaaggaagaaatca

SEQ ID NO: 412866 - DNA, 19 bp, Homo sapiens
  siRNA target sequence for C6orf102 (NM_145027.2,599-617).
ctccagcagtgaattcact

SEQ ID NO: 412867 - DNA, 19 bp, Homo sapiens
  siRNA target sequence for C6orf102 (NM_145027.2,665-683).
ggtcccaactcctctctaa

SEQ ID NO: 412868 - DNA, 19 bp, Homo sapiens
  siRNA target sequence for C6orf102 (NM_145027.2,668-686).
cccaactcctctctaacaa

SEQ ID NO: 412869 - DNA, 19 bp, Homo sapiens
  siRNA target sequence for C6orf81 (NM_145028.3,128-146).
ccatcaaggctggcataaa

SEQ ID NO: 412870 - DNA, 19 bp, Homo sapiens
  siRNA target sequence for C6orf81 (NM_145028.3,129-147).
catcaaggctggcataaaa

SEQ ID NO: 412871 - DNA, 19 bp, Homo sapiens
  siRNA target sequence for C6orf81 (NM_145028.3,135-153).
ggctggcataaaatgcaaa

SEQ ID NO: 412872 - DNA, 19 bp, Homo sapiens
  siRNA target sequence for C6orf81 (NM_145028.3,372-390).
gatcctgcacagtatcact

SEQ ID NO: 412873 - DNA, 19 bp, Homo sapiens
  siRNA target sequence for C6orf81 (NM_145028.3,415-433).
gaggcctctgcttgtacta

SEQ ID NO: 412874 - DNA, 19 bp, Homo sapiens
  siRNA target sequence for C6orf81 (NM_145028.3,425-443).
cttgtactacggatgacat

SEQ ID NO: 412875 - DNA, 19 bp, Homo sapiens
  siRNA target sequence for C6orf81 (NM_145028.3,493-511).
caagctctgaatacactta

SEQ ID NO: 412876 - DNA, 19 bp, Homo sapiens
  siRNA target sequence for C6orf81 (NM_145028.3,549-567).
ccaggaacactccatcaaa

SEQ ID NO: 412877 - DNA, 19 bp, Homo sapiens
  siRNA target sequence for C6orf81 (NM_145028.3,552-570).
ggaacactccatcaaagta

SEQ ID NO: 412878 - DNA, 19 bp, Homo sapiens
  siRNA target sequence for C6orf81 (NM_145028.3,1010-1028).
ctgaggaagatgttcagat

SEQ ID NO: 412879 - DNA, 19 bp, Homo sapiens
  siRNA target sequence for C6orf136 (NM_145029.1,843-861).
cacgactacagtctgtatt

SEQ ID NO: 412880 - DNA, 19 bp, Homo sapiens
  siRNA target sequence for C6orf136 (NM_145029.1,885-903).
gagatcctcaacatacgta

SEQ ID NO: 412881 - DNA, 19 bp, Homo sapiens
  siRNA target sequence for C6orf136 (NM_145029.1,911-929).
ccggacatggtacattctt

SEQ ID NO: 412882 - DNA, 19 bp, Homo sapiens
  siRNA target sequence for C6orf136 (NM_145029.1,914-932).
gacatggtacattctttca

SEQ ID NO: 412883 - DNA, 19 bp, Homo sapiens
  siRNA target sequence for C6orf136 (NM_145029.1,1053-1071).
cccgtccacttgctctttt

SEQ ID NO: 412884 - DNA, 19 bp, Homo sapiens
  siRNA target sequence for C6orf136 (NM_145029.1,1054-1072).
ccgtccacttgctcttttt

SEQ ID NO: 412885 - DNA, 19 bp, Homo sapiens
  siRNA target sequence for C6orf136 (NM_145029.1,1076-1094).
gttctacaagcgtgacaaa

SEQ ID NO: 412886 - DNA, 19 bp, Homo sapiens
  siRNA target sequence for C6orf136 (NM_145029.1,1100-1118).
gcattaccggacctatgat

SEQ ID NO: 412887 - DNA, 19 bp, Homo sapiens
  siRNA target sequence for C6orf136 (NM_145029.1,1159-1177).
gtcgccatcgtctagataa

SEQ ID NO: 412888 - DNA, 19 bp, Homo sapiens
  siRNA target sequence for C6orf136 (NM_145029.1,1162-1180).
gccatcgtctagataaact

SEQ ID NO: 412889 - DNA, 19 bp, Homo sapiens
  siRNA target sequence for C6orf136 (NM_145029.1,1164-1182).
catcgtctagataaactga

SEQ ID NO: 412890 - DNA, 19 bp, Homo sapiens
  siRNA target sequence for C6orf136 (NM_145029.1,1198-1216).
ctccaacgcctgtgaagaa

SEQ ID NO: 412891 - DNA, 19 bp, Homo sapiens
  siRNA target sequence for C6orf136 (NM_145029.1,1258-1276).
cagaacctgacttaaacct

SEQ ID NO: 412892 - DNA, 19 bp, Homo sapiens
  siRNA target sequence for MGC22793 (NM_145030.1,606-624).
cggaggaacaggttctgaa

SEQ ID NO: 412893 - DNA, 19 bp, Homo sapiens
  siRNA target sequence for MGC22793 (NM_145030.1,727-745).
cccagaaacgctattttat

SEQ ID NO: 412894 - DNA, 19 bp, Homo sapiens
  siRNA target sequence for MGC22793 (NM_145030.1,729-747).
cagaaacgctattttatga

SEQ ID NO: 412895 - DNA, 19 bp, Homo sapiens
  siRNA target sequence for MGC22793 (NM_145030.1,777-795).
cccctctccgacttcaact

SEQ ID NO: 412896 - DNA, 19 bp, Homo sapiens
  siRNA target sequence for MGC21636 (NM_145032.2,430-448).
gactccggaattgatgata

SEQ ID NO: 412897 - DNA, 19 bp, Homo sapiens
  siRNA target sequence for MGC21636 (NM_145032.2,460-478).
cttttatactggacattta

SEQ ID NO: 412898 - DNA, 19 bp, Homo sapiens
  siRNA target sequence for MGC21636 (NM_145032.2,508-526).
catagctcgtacaaatgaa

SEQ ID NO: 412899 - DNA, 19 bp, Homo sapiens
  siRNA target sequence for MGC21636 (NM_145032.2,560-578).
gtgacatgctacaatttca

SEQ ID NO: 412900 - DNA, 19 bp, Homo sapiens
  siRNA target sequence for MGC21636 (NM_145032.2,656-674).
cggatacaacagatcatct

SEQ ID NO: 412901 - DNA, 19 bp, Homo sapiens
  siRNA target sequence for MGC21636 (NM_145032.2,657-675).
ggatacaacagatcatcta

SEQ ID NO: 412902 - DNA, 19 bp, Homo sapiens
  siRNA target sequence for MGC21636 (NM_145032.2,658-676).
gatacaacagatcatctat

SEQ ID NO: 412903 - DNA, 19 bp, Homo sapiens
  siRNA target sequence for MGC21636 (NM_145032.2,686-704).
ctaaccattatcctaacaa

SEQ ID NO: 412904 - DNA, 19 bp, Homo sapiens
  siRNA target sequence for MGC21636 (NM_145032.2,709-727).
gcggaatacagcaagacat

SEQ ID NO: 412905 - DNA, 19 bp, Homo sapiens
  siRNA target sequence for MGC21636 (NM_145032.2,710-728).
cggaatacagcaagacata

SEQ ID NO: 412906 - DNA, 19 bp, Homo sapiens
  siRNA target sequence for MGC21636 (NM_145032.2,717-735).
cagcaagacataagagtaa

SEQ ID NO: 412907 - DNA, 19 bp, Homo sapiens
  siRNA target sequence for MGC21636 (NM_145032.2,719-737).
gcaagacataagagtaaaa

SEQ ID NO: 412908 - DNA, 19 bp, Homo sapiens
  siRNA target sequence for MGC21636 (NM_145032.2,874-892).
gactctaaaatgtgacatt

SEQ ID NO: 412909 - DNA, 19 bp, Homo sapiens
  siRNA target sequence for MGC21636 (NM_145032.2,931-949).
ctacctcagtttaaaagat

SEQ ID NO: 412910 - DNA, 19 bp, Homo sapiens
  siRNA target sequence for MGC21636 (NM_145032.2,1005-1023).
cactgtggaatgctattga

SEQ ID NO: 412911 - DNA, 19 bp, Homo sapiens
  siRNA target sequence for MGC21636 (NM_145032.2,1043-1061).
gtgattccagataaatata

SEQ ID NO: 412912 - DNA, 19 bp, Homo sapiens
  siRNA target sequence for MGC21636 (NM_145032.2,1075-1093).
gcaaaggtggcgtttaaat

SEQ ID NO: 412913 - DNA, 19 bp, Homo sapiens
  siRNA target sequence for MGC21636 (NM_145032.2,1121-1139).
cttctccgacccaaaactt

SEQ ID NO: 412914 - DNA, 19 bp, Homo sapiens
  siRNA target sequence for MGC21636 (NM_145032.2,1124-1142).
ctccgacccaaaactttca

SEQ ID NO: 412915 - DNA, 19 bp, Homo sapiens
  siRNA target sequence for MGC21636 (NM_145032.2,1127-1145).
cgacccaaaactttcagat

SEQ ID NO: 412916 - DNA, 19 bp, Homo sapiens
  siRNA target sequence for MGC21636 (NM_145032.2,1161-1179).
ggaacttgcaagagttgaa

SEQ ID NO: 412917 - DNA, 19 bp, Homo sapiens
  siRNA target sequence for MGC21636 (NM_145032.2,1197-1215).
cattcacagatgaatcaat

SEQ ID NO: 412918 - DNA, 19 bp, Homo sapiens
  siRNA target sequence for MGC21636 (NM_145032.2,1253-1271).
ctcaatctgtctaacacaa

SEQ ID NO: 412919 - DNA, 19 bp, Homo sapiens
  siRNA target sequence for MGC21636 (NM_145032.2,1259-1277).
ctgtctaacacaactatca

SEQ ID NO: 412920 - DNA, 19 bp, Homo sapiens
  siRNA target sequence for MGC21636 (NM_145032.2,1302-1320).
cgaggcacttccacaactt

SEQ ID NO: 412921 - DNA, 19 bp, Homo sapiens
  siRNA target sequence for MGC21636 (NM_145032.2,1303-1321).
gaggcacttccacaactta

SEQ ID NO: 412922 - DNA, 19 bp, Homo sapiens
  siRNA target sequence for MGC21636 (NM_145032.2,1305-1323).
ggcacttccacaacttaca

SEQ ID NO: 412923 - DNA, 19 bp, Homo sapiens
  siRNA target sequence for MGC21636 (NM_145032.2,1356-1374).
cagacaaaggcttacagta

SEQ ID NO: 412924 - DNA, 19 bp, Homo sapiens
  siRNA target sequence for MGC21636 (NM_145032.2,1425-1443).
gctgcacccagatttcagt

SEQ ID NO: 412925 - DNA, 19 bp, Homo sapiens
  siRNA target sequence for MGC21636 (NM_145032.2,1448-1466).
ggcttcaggtacattgcaa

SEQ ID NO: 412926 - DNA, 19 bp, Homo sapiens
  siRNA target sequence for MGC21636 (NM_145032.2,1514-1532).
ctgacggacaactgtgtaa

SEQ ID NO: 412927 - DNA, 19 bp, Homo sapiens
  siRNA target sequence for MGC21636 (NM_145032.2,1519-1537).
ggacaactgtgtaaaagct

SEQ ID NO: 412928 - DNA, 19 bp, Homo sapiens
  siRNA target sequence for MGC21636 (NM_145032.2,1520-1538).
gacaactgtgtaaaagctt

SEQ ID NO: 412929 - DNA, 19 bp, Homo sapiens
  siRNA target sequence for MGC21636 (NM_145032.2,1527-1545).
gtgtaaaagctttagttga

SEQ ID NO: 412930 - DNA, 19 bp, Homo sapiens
  siRNA target sequence for MGC21636 (NM_145032.2,1535-1553).
gctttagttgaaaaatgct

SEQ ID NO: 412931 - DNA, 19 bp, Homo sapiens
  siRNA target sequence for MGC21636 (NM_145032.2,1586-1604).
ccgcatatctccgattgta

SEQ ID NO: 412932 - DNA, 19 bp, Homo sapiens
  siRNA target sequence for MGC21636 (NM_145032.2,1588-1606).
gcatatctccgattgtact

SEQ ID NO: 412933 - DNA, 19 bp, Homo sapiens
  siRNA target sequence for MGC21636 (NM_145032.2,1589-1607).
catatctccgattgtactt

SEQ ID NO: 412934 - DNA, 19 bp, Homo sapiens
  siRNA target sequence for MGC21636 (NM_145032.2,1594-1612).
ctccgattgtactttcaga

SEQ ID NO: 412935 - DNA, 19 bp, Homo sapiens
  siRNA target sequence for MGC21636 (NM_145032.2,1611-1629).
gagctctttctgcttgtaa

SEQ ID NO: 412936 - DNA, 19 bp, Homo sapiens
  siRNA target sequence for MGC21636 (NM_145032.2,1633-1651).
cagaaagatccgatttgaa

SEQ ID NO: 412937 - DNA, 19 bp, Homo sapiens
  siRNA target sequence for MGC21636 (NM_145032.2,1639-1657).
gatccgatttgaaggaaat

SEQ ID NO: 412938 - DNA, 19 bp, Homo sapiens
  siRNA target sequence for MGC21636 (NM_145032.2,1642-1660).
ccgatttgaaggaaataaa

SEQ ID NO: 412939 - DNA, 19 bp, Homo sapiens
  siRNA target sequence for MGC21636 (NM_145032.2,1653-1671).
gaaataaaagggttactga

SEQ ID NO: 412940 - DNA, 19 bp, Homo sapiens
  siRNA target sequence for MGC21636 (NM_145032.2,1668-1686).
ctgatgcatccttcaaatt

SEQ ID NO: 412941 - DNA, 19 bp, Homo sapiens
  siRNA target sequence for MGC21636 (NM_145032.2,1677-1695).
ccttcaaatttatagacaa

SEQ ID NO: 412942 - DNA, 19 bp, Homo sapiens
  siRNA target sequence for MGC21636 (NM_145032.2,1704-1722).
caaatctcagtcacattta

SEQ ID NO: 412943 - DNA, 19 bp, Homo sapiens
  siRNA target sequence for MGC21636 (NM_145032.2,1727-1745).
gctgactgcaagggaataa

SEQ ID NO: 412944 - DNA, 19 bp, Homo sapiens
  siRNA target sequence for MGC21636 (NM_145032.2,1761-1779).
gatccctttcacctttgaa

SEQ ID NO: 412945 - DNA, 19 bp, Homo sapiens
  siRNA target sequence for MGC21636 (NM_145032.2,1821-1839).
gtgatatgggactaaagca

SEQ ID NO: 412946 - DNA, 19 bp, Homo sapiens
  siRNA target sequence for MGC21636 (NM_145032.2,1830-1848).
gactaaagcaatttcttga

SEQ ID NO: 412947 - DNA, 19 bp, Homo sapiens
  siRNA target sequence for MGC21636 (NM_145032.2,1864-1882).
gaggataagagagctaaat

SEQ ID NO: 412948 - DNA, 19 bp, Homo sapiens
  siRNA target sequence for MGC21636 (NM_145032.2,1867-1885).
gataagagagctaaattta

SEQ ID NO: 412949 - DNA, 19 bp, Homo sapiens
  siRNA target sequence for MGC21636 (NM_145032.2,1901-1919).
ctaagtgatgcctctgtta

SEQ ID NO: 412950 - DNA, 19 bp, Homo sapiens
  siRNA target sequence for MGC21636 (NM_145032.2,1910-1928).
gcctctgttatgaaactat

SEQ ID NO: 412951 - DNA, 19 bp, Homo sapiens
  siRNA target sequence for MGC21636 (NM_145032.2,1912-1930).
ctctgttatgaaactatct

SEQ ID NO: 412952 - DNA, 19 bp, Homo sapiens
  siRNA target sequence for MGC21636 (NM_145032.2,1931-1949).
gagcgctgccctaatttaa

SEQ ID NO: 412953 - DNA, 19 bp, Homo sapiens
  siRNA target sequence for MGC21636 (NM_145032.2,1934-1952).
cgctgccctaatttaaact

SEQ ID NO: 412954 - DNA, 19 bp, Homo sapiens
  siRNA target sequence for MGC21636 (NM_145032.2,1935-1953).
gctgccctaatttaaacta

SEQ ID NO: 412955 - DNA, 19 bp, Homo sapiens
  siRNA target sequence for MGC21636 (NM_145032.2,1954-1972).
cttgagtttacgaaattgt

SEQ ID NO: 412956 - DNA, 19 bp, Homo sapiens
  siRNA target sequence for MGC21636 (NM_145032.2,1957-1975).
gagtttacgaaattgtgaa

SEQ ID NO: 412957 - DNA, 19 bp, Homo sapiens
  siRNA target sequence for MGC21636 (NM_145032.2,1991-2009).
ggaattggatatattgtaa

SEQ ID NO: 412958 - DNA, 19 bp, Homo sapiens
  siRNA target sequence for MGC21636 (NM_145032.2,1997-2015).
ggatatattgtaaacatct

SEQ ID NO: 412959 - DNA, 19 bp, Homo sapiens
  siRNA target sequence for MGC21636 (NM_145032.2,1998-2016).
gatatattgtaaacatctt

SEQ ID NO: 412960 - DNA, 19 bp, Homo sapiens
  siRNA target sequence for MGC21636 (NM_145032.2,2053-2071).
ctctaatgagggtttgaat

SEQ ID NO: 412961 - DNA, 19 bp, Homo sapiens
  siRNA target sequence for MGC21636 (NM_145032.2,2079-2097).
ccagacataaaaaattgaa

SEQ ID NO: 412962 - DNA, 19 bp, Homo sapiens
  siRNA target sequence for MGC21636 (NM_145032.2,2144-2162).
caggcattctgcaaaagct

SEQ ID NO: 412963 - DNA, 19 bp, Homo sapiens
  siRNA target sequence for MGC21636 (NM_145032.2,2163-2181).
cactgatcttggaacattt

SEQ ID NO: 412964 - DNA, 19 bp, Homo sapiens
  siRNA target sequence for MGC21636 (NM_145032.2,2167-2185).
gatcttggaacatttggat

SEQ ID NO: 412965 - DNA, 19 bp, Homo sapiens
  siRNA target sequence for MGC21636 (NM_145032.2,2228-2246).
ctggccatttactgcatta

SEQ ID NO: 412966 - DNA, 19 bp, Homo sapiens
  siRNA target sequence for MGC21636 (NM_145032.2,2271-2289).
gctgtccaaagattactga

SEQ ID NO: 412967 - DNA, 19 bp, Homo sapiens
  siRNA target sequence for MGC21636 (NM_145032.2,2310-2328).
cggcaaaatgccattacct

SEQ ID NO: 412968 - DNA, 19 bp, Homo sapiens
  siRNA target sequence for MGC21636 (NM_145032.2,2319-2337).
gccattacctgcacatttt

SEQ ID NO: 412969 - DNA, 19 bp, Homo sapiens
  siRNA target sequence for MGC21636 (NM_145032.2,2327-2345).
ctgcacattttggatatct

SEQ ID NO: 412970 - DNA, 19 bp, Homo sapiens
  siRNA target sequence for MGC21636 (NM_145032.2,2329-2347).
gcacattttggatatctct

SEQ ID NO: 412971 - DNA, 19 bp, Homo sapiens
  siRNA target sequence for MGC21636 (NM_145032.2,2349-2367).
gttgtgtcttgcttactga

SEQ ID NO: 412972 - DNA, 19 bp, Homo sapiens
  siRNA target sequence for MGC21636 (NM_145032.2,2359-2377).
gcttactgaccaaatcctt

SEQ ID NO: 412973 - DNA, 19 bp, Homo sapiens
  siRNA target sequence for MGC21636 (NM_145032.2,2402-2420).
caactccggatccttaaga

SEQ ID NO: 412974 - DNA, 19 bp, Homo sapiens
  siRNA target sequence for MGC21636 (NM_145032.2,2408-2426).
cggatccttaagatgcaat

SEQ ID NO: 412975 - DNA, 19 bp, Homo sapiens
  siRNA target sequence for MGC21636 (NM_145032.2,2453-2471).
gctcaaagaatgtcatcta

SEQ ID NO: 412976 - DNA, 19 bp, Homo sapiens
  siRNA target sequence for MGC21636 (NM_145032.2,2474-2492).
gttcagcagcaggaataca

SEQ ID NO: 412977 - DNA, 19 bp, Homo sapiens
  siRNA target sequence for MGC21636 (NM_145032.2,2510-2528).
cgttggtttggctatgata

SEQ ID NO: 412978 - DNA, 19 bp, Homo sapiens
  siRNA target sequence for MGC21636 (NM_145032.2,2541-2559).
ctgttacagagcttgacaa

SEQ ID NO: 412979 - DNA, 19 bp, Homo sapiens
  siRNA target sequence for MGC21636 (NM_145032.2,2549-2567).
gagcttgacaacataacat

SEQ ID NO: 412980 - DNA, 19 bp, Homo sapiens
  siRNA target sequence for MGC21636 (NM_145032.2,2551-2569).
gcttgacaacataacatca

SEQ ID NO: 412981 - DNA, 19 bp, Homo sapiens
  siRNA target sequence for MGC21636 (NM_145032.2,2555-2573).
gacaacataacatcatcta

SEQ ID NO: 412982 - DNA, 19 bp, Homo sapiens
  siRNA target sequence for MGC21636 (NM_145032.2,2577-2595).
gagccttagaattaacagt

SEQ ID NO: 412983 - DNA, 19 bp, Homo sapiens
  siRNA target sequence for C21orf100 (NM_145033.1,93-111).
gtgtctcccaagaagtcat

SEQ ID NO: 412984 - DNA, 19 bp, Homo sapiens
  siRNA target sequence for C21orf100 (NM_145033.1,136-154).
cctcacaacgtgacattgt

SEQ ID NO: 412985 - DNA, 19 bp, Homo sapiens
  siRNA target sequence for C21orf100 (NM_145033.1,137-155).
ctcacaacgtgacattgtt

SEQ ID NO: 412986 - DNA, 19 bp, Homo sapiens
  siRNA target sequence for LOC163590 (NM_145034.1,414-432).
cctcaagaggactctcaaa

SEQ ID NO: 412987 - DNA, 19 bp, Homo sapiens
  siRNA target sequence for LOC163590 (NM_145034.1,415-433).
ctcaagaggactctcaaaa

SEQ ID NO: 412988 - DNA, 19 bp, Homo sapiens
  siRNA target sequence for LOC163590 (NM_145034.1,468-486).
gcgcaggagaccacaatca

SEQ ID NO: 412989 - DNA, 19 bp, Homo sapiens
  siRNA target sequence for LOC163590 (NM_145034.1,469-487).
cgcaggagaccacaatcat

SEQ ID NO: 412990 - DNA, 19 bp, Homo sapiens
  siRNA target sequence for LOC163590 (NM_145034.1,470-488).
gcaggagaccacaatcata

SEQ ID NO: 412991 - DNA, 19 bp, Homo sapiens
  siRNA target sequence for LOC163590 (NM_145034.1,478-496).
ccacaatcatagcaagtaa

SEQ ID NO: 412992 - DNA, 19 bp, Homo sapiens
  siRNA target sequence for LOC163590 (NM_145034.1,479-497).
cacaatcatagcaagtaat

SEQ ID NO: 412993 - DNA, 19 bp, Homo sapiens
  siRNA target sequence for LOC163590 (NM_145034.1,577-595).
gtgcagatacaggtgataa

SEQ ID NO: 412994 - DNA, 19 bp, Homo sapiens
  siRNA target sequence for LOC163590 (NM_145034.1,604-622).
gtccagatgaagcaaatgt

SEQ ID NO: 412995 - DNA, 19 bp, Homo sapiens
  siRNA target sequence for LOC163590 (NM_145034.1,689-707).
gcatcacctcccttcagaa

SEQ ID NO: 412996 - DNA, 19 bp, Homo sapiens
  siRNA target sequence for LOC163590 (NM_145034.1,1006-1024).
ccatgagacagattaataa

SEQ ID NO: 412997 - DNA, 19 bp, Homo sapiens
  siRNA target sequence for LOC163590 (NM_145034.1,1007-1025).
catgagacagattaataaa

SEQ ID NO: 412998 - DNA, 19 bp, Homo sapiens
  siRNA target sequence for LOC163590 (NM_145034.1,1039-1057).
gctatggccctgtgattct

SEQ ID NO: 412999 - DNA, 19 bp, Homo sapiens
  siRNA target sequence for LOC163590 (NM_145034.1,1092-1110).
gtgaatagctactattcct

SEQ ID NO: 413000 - DNA, 19 bp, Homo sapiens
  siRNA target sequence for LOC163590 (NM_145034.1,1121-1139).
gcaagtgcccaaaaatcca

SEQ ID NO: 413001 - DNA, 19 bp, Homo sapiens
  siRNA target sequence for LOC163590 (NM_145034.1,1159-1177).
cccagtttagccaattgga

SEQ ID NO: 413002 - DNA, 19 bp, Homo sapiens
  siRNA target sequence for LOC163590 (NM_145034.1,1211-1229).
gcagagaggacggaagttt

SEQ ID NO: 413003 - DNA, 19 bp, Homo sapiens
  siRNA target sequence for LOC163590 (NM_145034.1,1263-1281).
gagccagccaccatcatat

SEQ ID NO: 413004 - DNA, 19 bp, Homo sapiens
  siRNA target sequence for LOC163590 (NM_145034.1,1266-1284).
ccagccaccatcatattta

SEQ ID NO: 413005 - DNA, 19 bp, Homo sapiens
  siRNA target sequence for LOC163590 (NM_145034.1,1440-1458).
ctgagctatgggtttgaga

SEQ ID NO: 413006 - DNA, 19 bp, Homo sapiens
  siRNA target sequence for LOC163590 (NM_145034.1,1476-1494).
gtggtacaccacttcgaat

SEQ ID NO: 413007 - DNA, 19 bp, Homo sapiens
  siRNA target sequence for LOC163590 (NM_145034.1,1500-1518).
cctgccggctccactttga

SEQ ID NO: 413008 - DNA, 19 bp, Homo sapiens
  siRNA target sequence for LOC163590 (NM_145034.1,1529-1547).
gtattgtgatcatgagaat

SEQ ID NO: 413009 - DNA, 19 bp, Homo sapiens
  siRNA target sequence for LOC163590 (NM_145034.1,1586-1604).
gctagaggaggaaacatta

SEQ ID NO: 413010 - DNA, 19 bp, Homo sapiens
  siRNA target sequence for LOC163590 (NM_145034.1,1649-1667).
cttactctgggccaagttt

SEQ ID NO: 413011 - DNA, 19 bp, Homo sapiens
  siRNA target sequence for LOC163590 (NM_145034.1,1653-1671).
ctctgggccaagtttacca

SEQ ID NO: 413012 - DNA, 19 bp, Homo sapiens
  siRNA target sequence for LOC163590 (NM_145034.1,1703-1721).
ggactcagacaaattgagt

SEQ ID NO: 413013 - DNA, 19 bp, Homo sapiens
  siRNA target sequence for LOC163590 (NM_145034.1,1722-1740).
gggctgtggagccgaattt

SEQ ID NO: 413014 - DNA, 19 bp, Homo sapiens
  siRNA target sequence for ADMP (NM_145035.2,190-208).
gccctccggggaagatatt

SEQ ID NO: 413015 - DNA, 19 bp, Homo sapiens
  siRNA target sequence for ADMP (NM_145035.2,193-211).
ctccggggaagatattcga

SEQ ID NO: 413016 - DNA, 19 bp, Homo sapiens
  siRNA target sequence for ADMP (NM_145035.2,361-379).
gagtgggcacacacaagtt

SEQ ID NO: 413017 - DNA, 19 bp, Homo sapiens
  siRNA target sequence for ADMP (NM_145035.2,382-400).
ccgggcacgatcctttcat

SEQ ID NO: 413018 - DNA, 19 bp, Homo sapiens
  siRNA target sequence for ADMP (NM_145035.2,384-402).
gggcacgatcctttcatct

SEQ ID NO: 413019 - DNA, 19 bp, Homo sapiens
  siRNA target sequence for ADMP (NM_145035.2,385-403).
ggcacgatcctttcatcta

SEQ ID NO: 413020 - DNA, 19 bp, Homo sapiens
  siRNA target sequence for ADMP (NM_145035.2,386-404).
gcacgatcctttcatctat

SEQ ID NO: 413021 - DNA, 19 bp, Homo sapiens
  siRNA target sequence for ADMP (NM_145035.2,387-405).
cacgatcctttcatctatt

SEQ ID NO: 413022 - DNA, 19 bp, Homo sapiens
  siRNA target sequence for ADMP (NM_145035.2,417-435).
gtccacctttttaacgatt

SEQ ID NO: 413023 - DNA, 19 bp, Homo sapiens
  siRNA target sequence for ADMP (NM_145035.2,419-437).
ccacctttttaacgattaa

SEQ ID NO: 413024 - DNA, 19 bp, Homo sapiens
  siRNA target sequence for ADMP (NM_145035.2,422-440).
cctttttaacgattaacct

SEQ ID NO: 413025 - DNA, 19 bp, Homo sapiens
  siRNA target sequence for ADMP (NM_145035.2,527-545).
gtgctaaaaggctttgctt

SEQ ID NO: 413026 - DNA, 19 bp, Homo sapiens
  siRNA target sequence for ADMP (NM_145035.2,727-745).
ctttccctgagcgctttaa

SEQ ID NO: 413027 - DNA, 19 bp, Homo sapiens
  siRNA target sequence for MGC33887 (NM_145036.1,154-172).
ggaaaagtttgatcttcaa

SEQ ID NO: 413028 - DNA, 19 bp, Homo sapiens
  siRNA target sequence for MGC33887 (NM_145036.1,213-231).
caaatgtgcgtctgaataa

SEQ ID NO: 413029 - DNA, 19 bp, Homo sapiens
  siRNA target sequence for MGC33887 (NM_145036.1,264-282).
ccacaaaccacatgatcaa

SEQ ID NO: 413030 - DNA, 19 bp, Homo sapiens
  siRNA target sequence for MGC33887 (NM_145036.1,426-444).
gtaacacactgcataaaga

SEQ ID NO: 413031 - DNA, 19 bp, Homo sapiens
  siRNA target sequence for MGC33887 (NM_145036.1,443-461).
gagaaggaccatcttgtaa

SEQ ID NO: 413032 - DNA, 19 bp, Homo sapiens
  siRNA target sequence for MGC33887 (NM_145036.1,449-467).
gaccatcttgtaaatgatt

SEQ ID NO: 413033 - DNA, 19 bp, Homo sapiens
  siRNA target sequence for MGC33887 (NM_145036.1,495-513).
ccaaatatgatgctgatat

SEQ ID NO: 413034 - DNA, 19 bp, Homo sapiens
  siRNA target sequence for MGC33887 (NM_145036.1,553-571).
ggcatctagtatgattgaa

SEQ ID NO: 413035 - DNA, 19 bp, Homo sapiens
  siRNA target sequence for MGC33887 (NM_145036.1,555-573).
catctagtatgattgaaga

SEQ ID NO: 413036 - DNA, 19 bp, Homo sapiens
  siRNA target sequence for MGC33887 (NM_145036.1,558-576).
ctagtatgattgaagaatt

SEQ ID NO: 413037 - DNA, 19 bp, Homo sapiens
  siRNA target sequence for MGC33887 (NM_145036.1,561-579).
gtatgattgaagaattaga

SEQ ID NO: 413038 - DNA, 19 bp, Homo sapiens
  siRNA target sequence for MGC33887 (NM_145036.1,578-596).
gagcagaatgtctgtcaat

SEQ ID NO: 413039 - DNA, 19 bp, Homo sapiens
  siRNA target sequence for MGC33887 (NM_145036.1,638-656).
caactaagggatcaagaaa

SEQ ID NO: 413040 - DNA, 19 bp, Homo sapiens
  siRNA target sequence for MGC33887 (NM_145036.1,718-736).
gcagagtgaacttgataaa

SEQ ID NO: 413041 - DNA, 19 bp, Homo sapiens
  siRNA target sequence for MGC33887 (NM_145036.1,941-959).
gatctaactagatccaaat

SEQ ID NO: 413042 - DNA, 19 bp, Homo sapiens
  siRNA target sequence for MGC33887 (NM_145036.1,1006-1024).
catcagacagcggtatgaa

SEQ ID NO: 413043 - DNA, 19 bp, Homo sapiens
  siRNA target sequence for MGC33887 (NM_145036.1,1011-1029).
gacagcggtatgaacaaca

SEQ ID NO: 413044 - DNA, 19 bp, Homo sapiens
  siRNA target sequence for MGC33887 (NM_145036.1,1015-1033).
gcggtatgaacaacagata

SEQ ID NO: 413045 - DNA, 19 bp, Homo sapiens
  siRNA target sequence for MGC33887 (NM_145036.1,1017-1035).
ggtatgaacaacagatagt

SEQ ID NO: 413046 - DNA, 19 bp, Homo sapiens
  siRNA target sequence for MGC33887 (NM_145036.1,1060-1078).
ggagaagacgcacctatta

SEQ ID NO: 413047 - DNA, 19 bp, Homo sapiens
  siRNA target sequence for MGC33887 (NM_145036.1,1085-1103).
cataacgcagagaaggata

SEQ ID NO: 413048 - DNA, 19 bp, Homo sapiens
  siRNA target sequence for MGC33887 (NM_145036.1,1161-1179).
ccaatatggagcacgaaaa

SEQ ID NO: 413049 - DNA, 19 bp, Homo sapiens
  siRNA target sequence for MGC33887 (NM_145036.1,1162-1180).
caatatggagcacgaaaat

SEQ ID NO: 413050 - DNA, 19 bp, Homo sapiens
  siRNA target sequence for MGC33887 (NM_145036.1,1294-1312).
ggtagagcttggtcttctt

SEQ ID NO: 413051 - DNA, 19 bp, Homo sapiens
  siRNA target sequence for MGC33887 (NM_145036.1,1332-1350).
gggctacaagggaacatga

SEQ ID NO: 413052 - DNA, 19 bp, Homo sapiens
  siRNA target sequence for MGC33887 (NM_145036.1,1346-1364).
catgagattgtcgtcaata

SEQ ID NO: 413053 - DNA, 19 bp, Homo sapiens
  siRNA target sequence for MGC33887 (NM_145036.1,1486-1504).
gaagcttgccaaatcttca

SEQ ID NO: 413054 - DNA, 19 bp, Homo sapiens
  siRNA target sequence for MGC33887 (NM_145036.1,1495-1513).
caaatcttcacagatcata

SEQ ID NO: 413055 - DNA, 19 bp, Homo sapiens
  siRNA target sequence for MGC33887 (NM_145036.1,1530-1548).
ccatttcctctctgaaaga

SEQ ID NO: 413056 - DNA, 19 bp, Homo sapiens
  siRNA target sequence for MGC33887 (NM_145036.1,1585-1603).
gctccaggatgttagacaa

SEQ ID NO: 413057 - DNA, 19 bp, Homo sapiens
  siRNA target sequence for MGC33887 (NM_145036.1,1586-1604).
ctccaggatgttagacaaa

SEQ ID NO: 413058 - DNA, 19 bp, Homo sapiens
  siRNA target sequence for MGC33887 (NM_145036.1,1621-1639).
gaagcagctgattagagat

SEQ ID NO: 413059 - DNA, 19 bp, Homo sapiens
  siRNA target sequence for MGC33887 (NM_145036.1,1624-1642).
gcagctgattagagataat

SEQ ID NO: 413060 - DNA, 19 bp, Homo sapiens
  siRNA target sequence for MGC33887 (NM_145036.1,1694-1712).
gtgcgatgtgcagagaaaa

SEQ ID NO: 413061 - DNA, 19 bp, Homo sapiens
  siRNA target sequence for MGC33887 (NM_145036.1,1732-1750).
ggagtcacaggaacagata

SEQ ID NO: 413062 - DNA, 19 bp, Homo sapiens
  siRNA target sequence for MGC33887 (NM_145036.1,1733-1751).
gagtcacaggaacagataa

SEQ ID NO: 413063 - DNA, 19 bp, Homo sapiens
  siRNA target sequence for MGC33887 (NM_145036.1,1756-1774).
catacgacaagaatatgaa

SEQ ID NO: 413064 - DNA, 19 bp, Homo sapiens
  siRNA target sequence for MGC33887 (NM_145036.1,1760-1778).
cgacaagaatatgaaacaa

SEQ ID NO: 413065 - DNA, 19 bp, Homo sapiens
  siRNA target sequence for MGC33887 (NM_145036.1,1776-1794).
caaaattgaaaggattgat

SEQ ID NO: 413066 - DNA, 19 bp, Homo sapiens
  siRNA target sequence for MGC33887 (NM_145036.1,1800-1818).
catccctaagacaagaact

SEQ ID NO: 413067 - DNA, 19 bp, Homo sapiens
  siRNA target sequence for MGC15606 (NM_145037.1,595-613).
gtggaccaatttcttcaaa

SEQ ID NO: 413068 - DNA, 19 bp, Homo sapiens
  siRNA target sequence for MGC15606 (NM_145037.1,630-648).
gtctgcttgcagtgttgat

SEQ ID NO: 413069 - DNA, 19 bp, Homo sapiens
  siRNA target sequence for MGC15606 (NM_145037.1,652-670).
ggtggtgctggtcatcaat

SEQ ID NO: 413070 - DNA, 19 bp, Homo sapiens
  siRNA target sequence for MGC15606 (NM_145037.1,721-739).
cgacagcagtggacagttt

SEQ ID NO: 413071 - DNA, 19 bp, Homo sapiens
  siRNA target sequence for MGC15606 (NM_145037.1,909-927).
gctactttgtcatcttgaa

SEQ ID NO: 413072 - DNA, 19 bp, Homo sapiens
  siRNA target sequence for MGC15606 (NM_145037.1,1022-1040).
ctgcaggccagaattcact

SEQ ID NO: 413073 - DNA, 19 bp, Homo sapiens
  siRNA target sequence for MGC15606 (NM_145037.1,1068-1086).
gcagggtggtggattacca

SEQ ID NO: 413074 - DNA, 19 bp, Homo sapiens
  siRNA target sequence for MGC15606 (NM_145037.1,1124-1142).
ccaggcaaagttaaagtat

SEQ ID NO: 413075 - DNA, 19 bp, Homo sapiens
  siRNA target sequence for MGC15606 (NM_145037.1,1184-1202).
cagcgcttacaggaagata

SEQ ID NO: 413076 - DNA, 19 bp, Homo sapiens
  siRNA target sequence for MGC15606 (NM_145037.1,1186-1204).
gcgcttacaggaagataaa

SEQ ID NO: 413077 - DNA, 19 bp, Homo sapiens
  siRNA target sequence for MGC15606 (NM_145037.1,1206-1224).
cagacagggtctatttcaa

SEQ ID NO: 413078 - DNA, 19 bp, Homo sapiens
  siRNA target sequence for MGC15606 (NM_145037.1,1231-1249).
cttccgttcaggaagaatt

SEQ ID NO: 413079 - DNA, 19 bp, Homo sapiens
  siRNA target sequence for MGC15606 (NM_145037.1,1234-1252).
ccgttcaggaagaatttct

SEQ ID NO: 413080 - DNA, 19 bp, Homo sapiens
  siRNA target sequence for MGC15606 (NM_145037.1,1284-1302).
ggaatctgcccctgtgtaa

SEQ ID NO: 413081 - DNA, 19 bp, Homo sapiens
  siRNA target sequence for MGC15606 (NM_145037.1,1289-1307).
ctgcccctgtgtaacttta

SEQ ID NO: 413082 - DNA, 19 bp, Homo sapiens
  siRNA target sequence for MGC15606 (NM_145037.1,1291-1309).
gcccctgtgtaactttaca

SEQ ID NO: 413083 - DNA, 19 bp, Homo sapiens
  siRNA target sequence for MGC15606 (NM_145037.1,1332-1350).
ggttctgcttcaaaccaaa

SEQ ID NO: 413084 - DNA, 19 bp, Homo sapiens
  siRNA target sequence for MGC15606 (NM_145037.1,1416-1434).
ctgcagagagtgctttctt

SEQ ID NO: 413085 - DNA, 19 bp, Homo sapiens
  siRNA target sequence for MGC15606 (NM_145037.1,1432-1450).
cttccagagtggtgtcaat

SEQ ID NO: 413086 - DNA, 19 bp, Homo sapiens
  siRNA target sequence for MGC15606 (NM_145037.1,1436-1454).
cagagtggtgtcaatatca

SEQ ID NO: 413087 - DNA, 19 bp, Homo sapiens
  siRNA target sequence for MGC15606 (NM_145037.1,1438-1456).
gagtggtgtcaatatcaaa

SEQ ID NO: 413088 - DNA, 19 bp, Homo sapiens
  siRNA target sequence for MGC15606 (NM_145037.1,1476-1494).
gacctgattgggtaactgt

SEQ ID NO: 413089 - DNA, 19 bp, Homo sapiens
  siRNA target sequence for MGC15606 (NM_145037.1,1650-1668).
gaaaagtggtgcatttatt

SEQ ID NO: 413090 - DNA, 19 bp, Homo sapiens
  siRNA target sequence for MGC15606 (NM_145037.1,1686-1704).
ggcaatggtttgaatacct

SEQ ID NO: 413091 - DNA, 19 bp, Homo sapiens
  siRNA target sequence for MGC15606 (NM_145037.1,1693-1711).
gtttgaataccttactaca

SEQ ID NO: 413092 - DNA, 19 bp, Homo sapiens
  siRNA target sequence for MGC15606 (NM_145037.1,1719-1737).
cagatttagtggagtttaa

SEQ ID NO: 413093 - DNA, 19 bp, Homo sapiens
  siRNA target sequence for MGC15606 (NM_145037.1,1721-1739).
gatttagtggagtttaact

SEQ ID NO: 413094 - DNA, 19 bp, Homo sapiens
  siRNA target sequence for MGC15606 (NM_145037.1,1738-1756).
cttgggtagtcccaagaat

SEQ ID NO: 413095 - DNA, 19 bp, Homo sapiens
  siRNA target sequence for MGC15606 (NM_145037.1,1787-1805).
cacaacatcctgctcaaat

SEQ ID NO: 413096 - DNA, 19 bp, Homo sapiens
  siRNA target sequence for MGC15606 (NM_145037.1,1828-1846).
ccgcttcacgactgtcttt

SEQ ID NO: 413097 - DNA, 19 bp, Homo sapiens
  siRNA target sequence for MGC15606 (NM_145037.1,1829-1847).
cgcttcacgactgtcttta

SEQ ID NO: 413098 - DNA, 19 bp, Homo sapiens
  siRNA target sequence for MGC15606 (NM_145037.1,1834-1852).
cacgactgtctttagcaat

SEQ ID NO: 413099 - DNA, 19 bp, Homo sapiens
  siRNA target sequence for MGC15606 (NM_145037.1,1848-1866).
gcaatgagctccattatgt

SEQ ID NO: 413100 - DNA, 19 bp, Homo sapiens
  siRNA target sequence for MGC15606 (NM_145037.1,1941-1959).
ccttccctttggaagtgta

SEQ ID NO: 413101 - DNA, 19 bp, Homo sapiens
  siRNA target sequence for MGC15606 (NM_145037.1,2066-2084).
gaggtgagccttttcaaca

SEQ ID NO: 413102 - DNA, 19 bp, Homo sapiens
  siRNA target sequence for MGC15606 (NM_145037.1,2083-2101).
cagcgactggtacaacttt

SEQ ID NO: 413103 - DNA, 19 bp, Homo sapiens
  siRNA target sequence for MGC15606 (NM_145037.1,2085-2103).
gcgactggtacaactttca

SEQ ID NO: 413104 - DNA, 19 bp, Homo sapiens
  siRNA target sequence for MGC15606 (NM_145037.1,2131-2149).
ctcaggggttggagtatat

SEQ ID NO: 413105 - DNA, 19 bp, Homo sapiens
  siRNA target sequence for MGC15606 (NM_145037.1,2133-2151).
caggggttggagtatatct

SEQ ID NO: 413106 - DNA, 19 bp, Homo sapiens
  siRNA target sequence for MGC16372 (NM_145038.1,200-218).
catcgctgcgcgcttagaa

SEQ ID NO: 413107 - DNA, 19 bp, Homo sapiens
  siRNA target sequence for MGC16372 (NM_145038.1,303-321).
gaagaaagccgattgaaat

SEQ ID NO: 413108 - DNA, 19 bp, Homo sapiens
  siRNA target sequence for MGC16372 (NM_145038.1,343-361).
gcaccgagttggtgacaaa

SEQ ID NO: 413109 - DNA, 19 bp, Homo sapiens
  siRNA target sequence for MGC16372 (NM_145038.1,416-434).
gataaagcgtcaaaggatt

SEQ ID NO: 413110 - DNA, 19 bp, Homo sapiens
  siRNA target sequence for MGC16372 (NM_145038.1,460-478).
ccagccaggacaaattcga

SEQ ID NO: 413111 - DNA, 19 bp, Homo sapiens
  siRNA target sequence for MGC16372 (NM_145038.1,633-651).
gaccagtatgtgaaggatt

SEQ ID NO: 413112 - DNA, 19 bp, Homo sapiens
  siRNA target sequence for MGC16372 (NM_145038.1,636-654).
cagtatgtgaaggatttga

SEQ ID NO: 413113 - DNA, 19 bp, Homo sapiens
  siRNA target sequence for MGC16372 (NM_145038.1,710-728).
gaatgtgatgaaaaccttt

SEQ ID NO: 413114 - DNA, 19 bp, Homo sapiens
  siRNA target sequence for MGC16372 (NM_145038.1,729-747).
cgtgaggagctctataaca

SEQ ID NO: 413115 - DNA, 19 bp, Homo sapiens
  siRNA target sequence for MGC16372 (NM_145038.1,730-748).
gtgaggagctctataacat

SEQ ID NO: 413116 - DNA, 19 bp, Homo sapiens
  siRNA target sequence for MGC16372 (NM_145038.1,780-798).
ctactggccagtaataaga

SEQ ID NO: 413117 - DNA, 19 bp, Homo sapiens
  siRNA target sequence for MGC16372 (NM_145038.1,783-801).
ctggccagtaataagaaga

SEQ ID NO: 413118 - DNA, 19 bp, Homo sapiens
  siRNA target sequence for MGC16372 (NM_145038.1,786-804).
gccagtaataagaagaaat

SEQ ID NO: 413119 - DNA, 19 bp, Homo sapiens
  siRNA target sequence for MGC16372 (NM_145038.1,833-851).
caaagagctggagtatctt

SEQ ID NO: 413120 - DNA, 19 bp, Homo sapiens
  siRNA target sequence for MGC16372 (NM_145038.1,837-855).
gagctggagtatcttaaca

SEQ ID NO: 413121 - DNA, 19 bp, Homo sapiens
  siRNA target sequence for MGC16372 (NM_145038.1,849-867).
cttaacaaccgcatgaaga

SEQ ID NO: 413122 - DNA, 19 bp, Homo sapiens
  siRNA target sequence for MGC16372 (NM_145038.1,910-928).
gggattgcgaagaatacaa

SEQ ID NO: 413123 - DNA, 19 bp, Homo sapiens
  siRNA target sequence for MGC16372 (NM_145038.1,916-934).
gcgaagaatacaacatgat

SEQ ID NO: 413124 - DNA, 19 bp, Homo sapiens
  siRNA target sequence for MGC16372 (NM_145038.1,994-1012).
caatttatcagctaaacca

SEQ ID NO: 413125 - DNA, 19 bp, Homo sapiens
  siRNA target sequence for MGC16372 (NM_145038.1,1097-1115).
caatcgcctgcatgatata

SEQ ID NO: 413126 - DNA, 19 bp, Homo sapiens
  siRNA target sequence for MGC16372 (NM_145038.1,1101-1119).
cgcctgcatgatatactta

SEQ ID NO: 413127 - DNA, 19 bp, Homo sapiens
  siRNA target sequence for MGC16372 (NM_145038.1,1102-1120).
gcctgcatgatatacttaa

SEQ ID NO: 413128 - DNA, 19 bp, Homo sapiens
  siRNA target sequence for MGC16372 (NM_145038.1,1197-1215).
cgtcttgtgatgcaattca

SEQ ID NO: 413129 - DNA, 19 bp, Homo sapiens
  siRNA target sequence for MGC16372 (NM_145038.1,1198-1216).
gtcttgtgatgcaattcaa

SEQ ID NO: 413130 - DNA, 19 bp, Homo sapiens
  siRNA target sequence for MGC16372 (NM_145038.1,1237-1255).
ggcattttgctcttattga

SEQ ID NO: 413131 - DNA, 19 bp, Homo sapiens
  siRNA target sequence for MGC16372 (NM_145038.1,1246-1264).
ctcttattgatgatgagaa

SEQ ID NO: 413132 - DNA, 19 bp, Homo sapiens
  siRNA target sequence for MGC16372 (NM_145038.1,1295-1313).
ggaggcgaaggacctaata

SEQ ID NO: 413133 - DNA, 19 bp, Homo sapiens
  siRNA target sequence for MGC16372 (NM_145038.1,1397-1415).
caatgttgggcctatttct

SEQ ID NO: 413134 - DNA, 19 bp, Homo sapiens
  siRNA target sequence for MGC16372 (NM_145038.1,1430-1448).
gtccgccacacagatagta

SEQ ID NO: 413135 - DNA, 19 bp, Homo sapiens
  siRNA target sequence for MGC16372 (NM_145038.1,1432-1450).
ccgccacacagatagtaga

SEQ ID NO: 413136 - DNA, 19 bp, Homo sapiens
  siRNA target sequence for MGC16372 (NM_145038.1,1433-1451).
cgccacacagatagtagaa

SEQ ID NO: 413137 - DNA, 19 bp, Homo sapiens
  siRNA target sequence for MGC16372 (NM_145038.1,1517-1535).
ggatttgccgaagcaaatt

SEQ ID NO: 413138 - DNA, 19 bp, Homo sapiens
  siRNA target sequence for MGC16372 (NM_145038.1,1518-1536).
gatttgccgaagcaaattt

SEQ ID NO: 413139 - DNA, 19 bp, Homo sapiens
  siRNA target sequence for MGC16372 (NM_145038.1,1628-1646).
ggagcagaatgaatgctat

SEQ ID NO: 413140 - DNA, 19 bp, Homo sapiens
  siRNA target sequence for MGC16372 (NM_145038.1,1690-1708).
gtgaggatgacttgtataa

SEQ ID NO: 413141 - DNA, 19 bp, Homo sapiens
  siRNA target sequence for MGC16372 (NM_145038.1,1715-1733).
gaacttcttccttaaatat

SEQ ID NO: 413142 - DNA, 19 bp, Homo sapiens
  siRNA target sequence for MGC16372 (NM_145038.1,1734-1752).
cgagctcaccgtttatctt

SEQ ID NO: 413143 - DNA, 19 bp, Homo sapiens
  siRNA target sequence for MGC16372 (NM_145038.1,2008-2026).
cgctgagggtacagaagaa

SEQ ID NO: 413144 - DNA, 19 bp, Homo sapiens
  siRNA target sequence for MGC16372 (NM_145038.1,2276-2294).
gttgcgggtacccacaaaa

SEQ ID NO: 413145 - DNA, 19 bp, Homo sapiens
  siRNA target sequence for MGC16385 (NM_145039.1,705-723).
ggaagtgttacgacgattt

SEQ ID NO: 413146 - DNA, 19 bp, Homo sapiens
  siRNA target sequence for MGC20983 (NM_145045.3,766-784).
gaggccgagcacattacca

SEQ ID NO: 413147 - DNA, 19 bp, Homo sapiens
  siRNA target sequence for MGC20983 (NM_145045.3,795-813).
gcagctcaaggcctatcta

SEQ ID NO: 413148 - DNA, 19 bp, Homo sapiens
  siRNA target sequence for MGC20983 (NM_145045.3,987-1005).
gaagcgggaacgctacata

SEQ ID NO: 413149 - DNA, 19 bp, Homo sapiens
  siRNA target sequence for MGC20983 (NM_145045.3,992-1010).
gggaacgctacataagtga

SEQ ID NO: 413150 - DNA, 19 bp, Homo sapiens
  siRNA target sequence for MGC20983 (NM_145045.3,1711-1729).
ggaaggctgcccgaataca

SEQ ID NO: 413151 - DNA, 19 bp, Homo sapiens
  siRNA target sequence for MGC20983 (NM_145045.3,1830-1848).
gatccgttcccagaaatta

SEQ ID NO: 413152 - DNA, 19 bp, Homo sapiens
  siRNA target sequence for NOR1 (NM_145047.2,370-388).
ggctttcaaatatcaagta

SEQ ID NO: 413153 - DNA, 19 bp, Homo sapiens
  siRNA target sequence for NOR1 (NM_145047.2,415-433).
gctgctggtcactttcaat

SEQ ID NO: 413154 - DNA, 19 bp, Homo sapiens
  siRNA target sequence for NOR1 (NM_145047.2,502-520).
gcggcagctgacagaaata

SEQ ID NO: 413155 - DNA, 19 bp, Homo sapiens
  siRNA target sequence for NOR1 (NM_145047.2,503-521).
cggcagctgacagaaatat

SEQ ID NO: 413156 - DNA, 19 bp, Homo sapiens
  siRNA target sequence for NOR1 (NM_145047.2,595-613).
ccgagtatccatgtttcta

SEQ ID NO: 413157 - DNA, 19 bp, Homo sapiens
  siRNA target sequence for NOR1 (NM_145047.2,596-614).
cgagtatccatgtttctaa

SEQ ID NO: 413158 - DNA, 19 bp, Homo sapiens
  siRNA target sequence for NOR1 (NM_145047.2,860-878).
catgtgtctggatcatcaa

SEQ ID NO: 413159 - DNA, 19 bp, Homo sapiens
  siRNA target sequence for NOR1 (NM_145047.2,867-885).
ctggatcatcaaagaactt

SEQ ID NO: 413160 - DNA, 19 bp, Homo sapiens
  siRNA target sequence for NOR1 (NM_145047.2,912-930).
ctccaaaccctcttgctaa

SEQ ID NO: 413161 - DNA, 19 bp, Homo sapiens
  siRNA target sequence for NOR1 (NM_145047.2,962-980).
ggagggatggagattaaga

SEQ ID NO: 413162 - DNA, 19 bp, Homo sapiens
  siRNA target sequence for NOR1 (NM_145047.2,963-981).
gagggatggagattaagaa

SEQ ID NO: 413163 - DNA, 19 bp, Homo sapiens
  siRNA target sequence for NOR1 (NM_145047.2,997-1015).
gcccggattccggttgaat

SEQ ID NO: 413164 - DNA, 19 bp, Homo sapiens
  siRNA target sequence for NOR1 (NM_145047.2,999-1017).
ccggattccggttgaatct

SEQ ID NO: 413165 - DNA, 19 bp, Homo sapiens
  siRNA target sequence for NOR1 (NM_145047.2,1001-1019).
ggattccggttgaatctct

SEQ ID NO: 413166 - DNA, 19 bp, Homo sapiens
  siRNA target sequence for NOR1 (NM_145047.2,1002-1020).
gattccggttgaatctctt

SEQ ID NO: 413167 - DNA, 19 bp, Homo sapiens
  siRNA target sequence for NOR1 (NM_145047.2,1007-1025).
cggttgaatctctttacca

SEQ ID NO: 413168 - DNA, 19 bp, Homo sapiens
  siRNA target sequence for NOR1 (NM_145047.2,1018-1036).
ctttaccaccgatgaagaa

SEQ ID NO: 413169 - DNA, 19 bp, Homo sapiens
  siRNA target sequence for NOR1 (NM_145047.2,1067-1085).
gagttatcctatgaagtta

SEQ ID NO: 413170 - DNA, 19 bp, Homo sapiens
  siRNA target sequence for NOR1 (NM_145047.2,1201-1219).
cgccatgatggatgagtta

SEQ ID NO: 413171 - DNA, 19 bp, Homo sapiens
  siRNA target sequence for MGC29898 (NM_145048.2,160-178).
ggaggtacacagttgaaaa

SEQ ID NO: 413172 - DNA, 19 bp, Homo sapiens
  siRNA target sequence for MGC29898 (NM_145048.2,180-198).
cagagcaacaggtaactat

SEQ ID NO: 413173 - DNA, 19 bp, Homo sapiens
  siRNA target sequence for MGC29898 (NM_145048.2,182-200).
gagcaacaggtaactatga

SEQ ID NO: 413174 - DNA, 19 bp, Homo sapiens
  siRNA target sequence for MGC29898 (NM_145048.2,185-203).
caacaggtaactatgatca

SEQ ID NO: 413175 - DNA, 19 bp, Homo sapiens
  siRNA target sequence for MGC29898 (NM_145048.2,250-268).
ggaagcaaatcctcattgt

SEQ ID NO: 413176 - DNA, 19 bp, Homo sapiens
  siRNA target sequence for MGC29898 (NM_145048.2,281-299).
cagagtctgcaagaaaact

SEQ ID NO: 413177 - DNA, 19 bp, Homo sapiens
  siRNA target sequence for MGC29898 (NM_145048.2,285-303).
gtctgcaagaaaacttcat

SEQ ID NO: 413178 - DNA, 19 bp, Homo sapiens
  siRNA target sequence for MGC29898 (NM_145048.2,301-319).
catcctagaccaagtgata

SEQ ID NO: 413179 - DNA, 19 bp, Homo sapiens
  siRNA target sequence for MGC29898 (NM_145048.2,516-534).
gactaagcatccatacact

SEQ ID NO: 413180 - DNA, 19 bp, Homo sapiens
  siRNA target sequence for MGC29898 (NM_145048.2,540-558).
gtcaaaggagggttttaga

SEQ ID NO: 413181 - DNA, 19 bp, Homo sapiens
  siRNA target sequence for MGC29898 (NM_145048.2,542-560).
caaaggagggttttagaga

SEQ ID NO: 413182 - DNA, 19 bp, Homo sapiens
  siRNA target sequence for MGC29898 (NM_145048.2,573-591).
caaaggtgctcctgaaaaa

SEQ ID NO: 413183 - DNA, 19 bp, Homo sapiens
  siRNA target sequence for MGC29898 (NM_145048.2,583-601).
cctgaaaaagctattcctt

SEQ ID NO: 413184 - DNA, 19 bp, Homo sapiens
  siRNA target sequence for MGC29898 (NM_145048.2,611-629).
gactgattcctgtgctaaa

SEQ ID NO: 413185 - DNA, 19 bp, Homo sapiens
  siRNA target sequence for MGC29898 (NM_145048.2,660-678).
gtttgaaagaggattgaat

SEQ ID NO: 413186 - DNA, 19 bp, Homo sapiens
  siRNA target sequence for MGC29898 (NM_145048.2,671-689).
gattgaatgctctagttca

SEQ ID NO: 413187 - DNA, 19 bp, Homo sapiens
  siRNA target sequence for MGC29898 (NM_145048.2,699-717).
cgttgttggtccttctcta

SEQ ID NO: 413188 - DNA, 19 bp, Homo sapiens
  siRNA target sequence for MGC29898 (NM_145048.2,713-731).
ctctaaacgaccatctgaa

SEQ ID NO: 413189 - DNA, 19 bp, Homo sapiens
  siRNA target sequence for MGC29898 (NM_145048.2,743-761).
caagcgggagccttagcat

SEQ ID NO: 413190 - DNA, 19 bp, Homo sapiens
  siRNA target sequence for MGC29898 (NM_145048.2,749-767).
ggagccttagcatcatcaa

SEQ ID NO: 413191 - DNA, 19 bp, Homo sapiens
  siRNA target sequence for MGC29898 (NM_145048.2,750-768).
gagccttagcatcatcaaa

SEQ ID NO: 413192 - DNA, 19 bp, Homo sapiens
  siRNA target sequence for MGC29898 (NM_145048.2,778-796).
ccaacatactgctccatat

SEQ ID NO: 413193 - DNA, 19 bp, Homo sapiens
  siRNA target sequence for MGC27434 (NM_145050.1,250-268).
ctgccacactgggaaagat

SEQ ID NO: 413194 - DNA, 19 bp, Homo sapiens
  siRNA target sequence for MGC27434 (NM_145050.1,315-333).
ctcccgcaggctcatgttt

SEQ ID NO: 413195 - DNA, 19 bp, Homo sapiens
  siRNA target sequence for MGC27434 (NM_145050.1,318-336).
ccgcaggctcatgttttgt

SEQ ID NO: 413196 - DNA, 19 bp, Homo sapiens
  siRNA target sequence for MGC27434 (NM_145050.1,324-342).
gctcatgttttgtgttcat

SEQ ID NO: 413197 - DNA, 19 bp, Homo sapiens
  siRNA target sequence for MGC27434 (NM_145050.1,367-385).
ccaataaataagtatcaaa

SEQ ID NO: 413198 - DNA, 19 bp, Homo sapiens
  siRNA target sequence for MGC27434 (NM_145050.1,386-404).
ggttagtggtgaaaatgaa

SEQ ID NO: 413199 - DNA, 19 bp, Homo sapiens
  siRNA target sequence for MGC27434 (NM_145050.1,414-432).
ggcattgcgtgaaaaacta

SEQ ID NO: 413200 - DNA, 19 bp, Homo sapiens
  siRNA target sequence for MGC27434 (NM_145050.1,415-433).
gcattgcgtgaaaaactaa

SEQ ID NO: 413201 - DNA, 19 bp, Homo sapiens
  siRNA target sequence for MGC27434 (NM_145050.1,473-491).
gttcactggaaatgataga

SEQ ID NO: 413202 - DNA, 19 bp, Homo sapiens
  siRNA target sequence for MGC4734 (NM_145051.2,186-204).
cgttccatacccccaaaat

SEQ ID NO: 413203 - DNA, 19 bp, Homo sapiens
  siRNA target sequence for MGC4734 (NM_145051.2,589-607).
ccctcagttccgcatcttt

SEQ ID NO: 413204 - DNA, 19 bp, Homo sapiens
  siRNA target sequence for MGC4734 (NM_145051.2,635-653).
gtcactctgttgctcatat

SEQ ID NO: 413205 - DNA, 19 bp, Homo sapiens
  siRNA target sequence for MGC4734 (NM_145051.2,646-664).
gctcatattctccatcttt

SEQ ID NO: 413206 - DNA, 19 bp, Homo sapiens
  siRNA target sequence for MGC23937 (NM_145052.1,526-544).
gtagaggtgacttcatgtt

SEQ ID NO: 413207 - DNA, 19 bp, Homo sapiens
  siRNA target sequence for MGC23937 (NM_145052.1,556-574).
gtttgatcagacttgttgt

SEQ ID NO: 413208 - DNA, 19 bp, Homo sapiens
  siRNA target sequence for MGC23937 (NM_145052.1,672-690).
ggggtcagcataatgagaa

SEQ ID NO: 413209 - DNA, 19 bp, Homo sapiens
  siRNA target sequence for MGC23937 (NM_145052.1,724-742).
gctgtcgatccatacgaat

SEQ ID NO: 413210 - DNA, 19 bp, Homo sapiens
  siRNA target sequence for MGC23937 (NM_145052.1,725-743).
ctgtcgatccatacgaatt

SEQ ID NO: 413211 - DNA, 19 bp, Homo sapiens
  siRNA target sequence for MGC23937 (NM_145052.1,729-747).
cgatccatacgaattggaa

SEQ ID NO: 413212 - DNA, 19 bp, Homo sapiens
  siRNA target sequence for MGC23937 (NM_145052.1,904-922).
gagttcaacccagtgttat

SEQ ID NO: 413213 - DNA, 19 bp, Homo sapiens
  siRNA target sequence for MGC23937 (NM_145052.1,948-966).
cctcatggtgccaaatcaa

SEQ ID NO: 413214 - DNA, 19 bp, Homo sapiens
  siRNA target sequence for MGC23937 (NM_145052.1,951-969).
catggtgccaaatcaatca

SEQ ID NO: 413215 - DNA, 19 bp, Homo sapiens
  siRNA target sequence for MGC23937 (NM_145052.1,984-1002).
gagatcacaattttaacta

SEQ ID NO: 413216 - DNA, 19 bp, Homo sapiens
  siRNA target sequence for MGC23937 (NM_145052.1,989-1007).
cacaattttaactactgaa

SEQ ID NO: 413217 - DNA, 19 bp, Homo sapiens
  siRNA target sequence for MGC20470 (NM_145053.2,33-51).
gtatgaaaaggctttctca

SEQ ID NO: 413218 - DNA, 19 bp, Homo sapiens
  siRNA target sequence for MGC20470 (NM_145053.2,42-60).
ggctttctcatccaagtat

SEQ ID NO: 413219 - DNA, 19 bp, Homo sapiens
  siRNA target sequence for MGC20470 (NM_145053.2,44-62).
ctttctcatccaagtatct

SEQ ID NO: 413220 - DNA, 19 bp, Homo sapiens
  siRNA target sequence for MGC20470 (NM_145053.2,112-130).
gaaggctacactcaaatta

SEQ ID NO: 413221 - DNA, 19 bp, Homo sapiens
  siRNA target sequence for MGC20470 (NM_145053.2,135-153).
caacgatcgtggtcatcta

SEQ ID NO: 413222 - DNA, 19 bp, Homo sapiens
  siRNA target sequence for MGC20470 (NM_145053.2,168-186).
ccgttccaaggcaaatcct

SEQ ID NO: 413223 - DNA, 19 bp, Homo sapiens
  siRNA target sequence for MGC20470 (NM_145053.2,246-264).
cctgacctcccgtacaact

SEQ ID NO: 413224 - DNA, 19 bp, Homo sapiens
  siRNA target sequence for MGC20470 (NM_145053.2,276-294).
ctccctcaccaaatggata

SEQ ID NO: 413225 - DNA, 19 bp, Homo sapiens
  siRNA target sequence for MGC20470 (NM_145053.2,280-298).
ctcaccaaatggatacaga

SEQ ID NO: 413226 - DNA, 19 bp, Homo sapiens
  siRNA target sequence for MGC20470 (NM_145053.2,330-348).
gctgtgtcctgaaatctta

SEQ ID NO: 413227 - DNA, 19 bp, Homo sapiens
  siRNA target sequence for MGC20470 (NM_145053.2,534-552).
ggcagacaaaaatatctct

SEQ ID NO: 413228 - DNA, 19 bp, Homo sapiens
  siRNA target sequence for MGC20470 (NM_145053.2,540-558).
caaaaatatctcttcaagt

SEQ ID NO: 413229 - DNA, 19 bp, Homo sapiens
  siRNA target sequence for MGC20470 (NM_145053.2,557-575).
gtgccactcgagtgatagt

SEQ ID NO: 413230 - DNA, 19 bp, Homo sapiens
  siRNA target sequence for MGC20470 (NM_145053.2,559-577).
gccactcgagtgatagtga

SEQ ID NO: 413231 - DNA, 19 bp, Homo sapiens
  siRNA target sequence for MGC20470 (NM_145053.2,560-578).
ccactcgagtgatagtgaa

SEQ ID NO: 413232 - DNA, 19 bp, Homo sapiens
  siRNA target sequence for MGC20470 (NM_145053.2,583-601).
gcaggcaaccagaaagact

SEQ ID NO: 413233 - DNA, 19 bp, Homo sapiens
  siRNA target sequence for MGC20470 (NM_145053.2,584-602).
caggcaaccagaaagactt

SEQ ID NO: 413234 - DNA, 19 bp, Homo sapiens
  siRNA target sequence for MGC20470 (NM_145053.2,586-604).
ggcaaccagaaagacttta

SEQ ID NO: 413235 - DNA, 19 bp, Homo sapiens
  siRNA target sequence for MGC20470 (NM_145053.2,587-605).
gcaaccagaaagactttat

SEQ ID NO: 413236 - DNA, 19 bp, Homo sapiens
  siRNA target sequence for MGC20470 (NM_145053.2,646-664).
ctattggctcacttccaat

SEQ ID NO: 413237 - DNA, 19 bp, Homo sapiens
  siRNA target sequence for MGC20470 (NM_145053.2,791-809).
gatctctagcccattcctt

SEQ ID NO: 413238 - DNA, 19 bp, Homo sapiens
  siRNA target sequence for MGC20470 (NM_145053.2,813-831).
ggacctgccaacgaatgat

SEQ ID NO: 413239 - DNA, 19 bp, Homo sapiens
  siRNA target sequence for MGC20470 (NM_145053.2,1066-1084).
ctagacacgcaacaattga

SEQ ID NO: 413240 - DNA, 19 bp, Homo sapiens
  siRNA target sequence for MGC20470 (NM_145053.2,1107-1125).
ccgccttcttcttgataat

SEQ ID NO: 413241 - DNA, 19 bp, Homo sapiens
  siRNA target sequence for MGC20470 (NM_145053.2,1108-1126).
cgccttcttcttgataatt

SEQ ID NO: 413242 - DNA, 19 bp, Homo sapiens
  siRNA target sequence for MGC20470 (NM_145053.2,1157-1175).
ccaggaaccttgctatgat

SEQ ID NO: 413243 - DNA, 19 bp, Homo sapiens
  siRNA target sequence for MGC20470 (NM_145053.2,1168-1186).
gctatgatccaagagataa

SEQ ID NO: 413244 - DNA, 19 bp, Homo sapiens
  siRNA target sequence for MGC20470 (NM_145053.2,1191-1209).
gatccaacaaccttcacaa

SEQ ID NO: 413245 - DNA, 19 bp, Homo sapiens
  siRNA target sequence for MGC20470 (NM_145053.2,1320-1338).
cagcatgcaagatcctttt

SEQ ID NO: 413246 - DNA, 19 bp, Homo sapiens
  siRNA target sequence for MGC20470 (NM_145053.2,1453-1471).
gcaacccgagtcatctata

SEQ ID NO: 413247 - DNA, 19 bp, Homo sapiens
  siRNA target sequence for MGC20470 (NM_145053.2,1454-1472).
caacccgagtcatctataa

SEQ ID NO: 413248 - DNA, 19 bp, Homo sapiens
  siRNA target sequence for MGC20470 (NM_145053.2,1459-1477).
cgagtcatctataatagct

SEQ ID NO: 413249 - DNA, 19 bp, Homo sapiens
  siRNA target sequence for MGC20470 (NM_145053.2,1753-1771).
ggcatgatgcagttgctta

SEQ ID NO: 413250 - DNA, 19 bp, Homo sapiens
  siRNA target sequence for MGC20470 (NM_145053.2,1782-1800).
ctacctggcagctcagatt

SEQ ID NO: 413251 - DNA, 19 bp, Homo sapiens
  siRNA target sequence for MGC20470 (NM_145053.2,1789-1807).
gcagctcagattatgttgt

SEQ ID NO: 413252 - DNA, 19 bp, Homo sapiens
  siRNA target sequence for MGC20470 (NM_145053.2,1790-1808).
cagctcagattatgttgtt

SEQ ID NO: 413253 - DNA, 19 bp, Homo sapiens
  siRNA target sequence for MGC20470 (NM_145053.2,1792-1810).
gctcagattatgttgttca

SEQ ID NO: 413254 - DNA, 19 bp, Homo sapiens
  siRNA target sequence for MGC20470 (NM_145053.2,1795-1813).
cagattatgttgttcacaa

SEQ ID NO: 413255 - DNA, 19 bp, Homo sapiens
  siRNA target sequence for LOC146845 (NM_145054.2,316-334).
cctgaccaggagcatatga

SEQ ID NO: 413256 - DNA, 19 bp, Homo sapiens
  siRNA target sequence for LOC146845 (NM_145054.2,324-342).
ggagcatatgatttatcct

SEQ ID NO: 413257 - DNA, 19 bp, Homo sapiens
  siRNA target sequence for LOC146845 (NM_145054.2,357-375).
cctcattcaggcaataaat

SEQ ID NO: 413258 - DNA, 19 bp, Homo sapiens
  siRNA target sequence for LOC146845 (NM_145054.2,434-452).
ccaggtctggagagtacat

SEQ ID NO: 413259 - DNA, 19 bp, Homo sapiens
  siRNA target sequence for LOC146845 (NM_145054.2,455-473).
cctccggacaagtcacatt

SEQ ID NO: 413260 - DNA, 19 bp, Homo sapiens
  siRNA target sequence for LOC146845 (NM_145054.2,458-476).
ccggacaagtcacattcat

SEQ ID NO: 413261 - DNA, 19 bp, Homo sapiens
  siRNA target sequence for LOC146845 (NM_145054.2,530-548).
ctcggctgtcccttcacaa

SEQ ID NO: 413262 - DNA, 19 bp, Homo sapiens
  siRNA target sequence for LOC146845 (NM_145054.2,575-593).
ctccaaatgatttgtactt

SEQ ID NO: 413263 - DNA, 19 bp, Homo sapiens
  siRNA target sequence for LOC146845 (NM_145054.2,691-709).
ggcaatgccaccaatgtga

SEQ ID NO: 413264 - DNA, 19 bp, Homo sapiens
  siRNA target sequence for LOC146845 (NM_145054.2,716-734).
ccaggtgccgggatgagat

SEQ ID NO: 413265 - DNA, 19 bp, Homo sapiens
  siRNA target sequence for LOC146845 (NM_145054.2,722-740).
gccgggatgagatgtttat

SEQ ID NO: 413266 - DNA, 19 bp, Homo sapiens
  siRNA target sequence for LOC146845 (NM_145054.2,724-742).
cgggatgagatgtttatga

SEQ ID NO: 413267 - DNA, 19 bp, Homo sapiens
  siRNA target sequence for LOC146845 (NM_145054.2,772-790).
gaattggatcttccaaata

SEQ ID NO: 413268 - DNA, 19 bp, Homo sapiens
  siRNA target sequence for LOC146845 (NM_145054.2,813-831).
ccaaacaggacagttgaaa

SEQ ID NO: 413269 - DNA, 19 bp, Homo sapiens
  siRNA target sequence for LOC146845 (NM_145054.2,814-832).
caaacaggacagttgaaaa

SEQ ID NO: 413270 - DNA, 19 bp, Homo sapiens
  siRNA target sequence for LOC146845 (NM_145054.2,884-902).
gcaccacgactggagatat

SEQ ID NO: 413271 - DNA, 19 bp, Homo sapiens
  siRNA target sequence for LOC146845 (NM_145054.2,885-903).
caccacgactggagatatt

SEQ ID NO: 413272 - DNA, 19 bp, Homo sapiens
  siRNA target sequence for LOC146845 (NM_145054.2,887-905).
ccacgactggagatattct

SEQ ID NO: 413273 - DNA, 19 bp, Homo sapiens
  siRNA target sequence for LOC146845 (NM_145054.2,890-908).
cgactggagatattctaaa

SEQ ID NO: 413274 - DNA, 19 bp, Homo sapiens
  siRNA target sequence for LOC146845 (NM_145054.2,943-961).
gggcctgcgaaggacaaat

SEQ ID NO: 413275 - DNA, 19 bp, Homo sapiens
  siRNA target sequence for LOC146845 (NM_145054.2,946-964).
cctgcgaaggacaaattca

SEQ ID NO: 413276 - DNA, 19 bp, Homo sapiens
  siRNA target sequence for LOC146845 (NM_145054.2,950-968).
cgaaggacaaattcagttt

SEQ ID NO: 413277 - DNA, 19 bp, Homo sapiens
  siRNA target sequence for LOC146845 (NM_145054.2,1084-1102).
caaggcggcatcacttcta

SEQ ID NO: 413278 - DNA, 19 bp, Homo sapiens
  siRNA target sequence for LOC146845 (NM_145054.2,1128-1146).
gtttctcgtaggaacagaa

SEQ ID NO: 413279 - DNA, 19 bp, Homo sapiens
  siRNA target sequence for LOC146845 (NM_145054.2,1132-1150).
ctcgtaggaacagaagaat

SEQ ID NO: 413280 - DNA, 19 bp, Homo sapiens
  siRNA target sequence for LOC146845 (NM_145054.2,1165-1183).
gtcagcttcacggatttca

SEQ ID NO: 413281 - DNA, 19 bp, Homo sapiens
  siRNA target sequence for LOC146845 (NM_145054.2,1167-1185).
cagcttcacggatttcaaa

SEQ ID NO: 413282 - DNA, 19 bp, Homo sapiens
  siRNA target sequence for LOC146845 (NM_145054.2,1194-1212).
catagcgacttgtcacttt

SEQ ID NO: 413283 - DNA, 19 bp, Homo sapiens
  siRNA target sequence for LOC146845 (NM_145054.2,1348-1366).
cacggcatcgacttcatga

SEQ ID NO: 413284 - DNA, 19 bp, Homo sapiens
  siRNA target sequence for LOC146845 (NM_145054.2,1369-1387).
gacggcaaaagcatcattt

SEQ ID NO: 413285 - DNA, 19 bp, Homo sapiens
  siRNA target sequence for LOC146845 (NM_145054.2,1390-1408).
gcatggaacgacggtaaaa

SEQ ID NO: 413286 - DNA, 19 bp, Homo sapiens
  siRNA target sequence for LOC146845 (NM_145054.2,1391-1409).
catggaacgacggtaaaat

SEQ ID NO: 413287 - DNA, 19 bp, Homo sapiens
  siRNA target sequence for LOC146845 (NM_145054.2,1430-1448).
caggccgactgatgtatgt

SEQ ID NO: 413288 - DNA, 19 bp, Homo sapiens
  siRNA target sequence for LOC146845 (NM_145054.2,1432-1450).
ggccgactgatgtatgtca

SEQ ID NO: 413289 - DNA, 19 bp, Homo sapiens
  siRNA target sequence for LOC146845 (NM_145054.2,1440-1458).
gatgtatgtcattaacaat

SEQ ID NO: 413290 - DNA, 19 bp, Homo sapiens
  siRNA target sequence for LOC146845 (NM_145054.2,1488-1506).
caccaccagtgactgtaaa

SEQ ID NO: 413291 - DNA, 19 bp, Homo sapiens
  siRNA target sequence for LOC146845 (NM_145054.2,1658-1676).
ccgatgggacttgtatcat

SEQ ID NO: 413292 - DNA, 19 bp, Homo sapiens
  siRNA target sequence for LOC146845 (NM_145054.2,1659-1677).
cgatgggacttgtatcatt

SEQ ID NO: 413293 - DNA, 19 bp, Homo sapiens
  siRNA target sequence for LOC146845 (NM_145054.2,1690-1708).
cgtctcaggaggaatcaga

SEQ ID NO: 413294 - DNA, 19 bp, Homo sapiens
  siRNA target sequence for LOC146845 (NM_145054.2,1775-1793).
gcggaacagacagaaagat

SEQ ID NO: 413295 - DNA, 19 bp, Homo sapiens
  siRNA target sequence for LOC146845 (NM_145054.2,1844-1862).
ccctgtctgggtcgataaa

SEQ ID NO: 413296 - DNA, 19 bp, Homo sapiens
  siRNA target sequence for LOC146845 (NM_145054.2,1845-1863).
cctgtctgggtcgataaat

SEQ ID NO: 413297 - DNA, 19 bp, Homo sapiens
  siRNA target sequence for LOC146845 (NM_145054.2,1856-1874).
cgataaatggcatggatat

SEQ ID NO: 413298 - DNA, 19 bp, Homo sapiens
  siRNA target sequence for LOC146845 (NM_145054.2,1986-2004).
cacacgcatccgcataagt

SEQ ID NO: 413299 - DNA, 19 bp, Homo sapiens
  siRNA target sequence for LOC146845 (NM_145054.2,1995-2013).
ccgcataagtccaggaaat

SEQ ID NO: 413300 - DNA, 19 bp, Homo sapiens
  siRNA target sequence for LOC146845 (NM_145054.2,1997-2015).
gcataagtccaggaaatca

SEQ ID NO: 413301 - DNA, 19 bp, Homo sapiens
  siRNA target sequence for LOC146845 (NM_145054.2,2003-2021).
gtccaggaaatcaatatat

SEQ ID NO: 413302 - DNA, 19 bp, Homo sapiens
  siRNA target sequence for LOC146845 (NM_145054.2,2033-2051).
gtgccgatggagccatttt

SEQ ID NO: 413303 - DNA, 19 bp, Homo sapiens
  siRNA target sequence for LOC146845 (NM_145054.2,2053-2071).
cgatggaagtacccatata

SEQ ID NO: 413304 - DNA, 19 bp, Homo sapiens
  siRNA target sequence for MGC12909 (NM_145055.1,106-124).
cccaccaaaagcatctgaa

SEQ ID NO: 413305 - DNA, 19 bp, Homo sapiens
  siRNA target sequence for MGC12909 (NM_145055.1,139-157).
ggaggaagatggatctgta

SEQ ID NO: 413306 - DNA, 19 bp, Homo sapiens
  siRNA target sequence for MGC12909 (NM_145055.1,182-200).
gatggtgtagcggattcta

SEQ ID NO: 413307 - DNA, 19 bp, Homo sapiens
  siRNA target sequence for MGC12909 (NM_145055.1,188-206).
gtagcggattctacagtta

SEQ ID NO: 413308 - DNA, 19 bp, Homo sapiens
  siRNA target sequence for MGC12909 (NM_145055.1,191-209).
gcggattctacagttattt

SEQ ID NO: 413309 - DNA, 19 bp, Homo sapiens
  siRNA target sequence for MGC12909 (NM_145055.1,193-211).
ggattctacagttatttct

SEQ ID NO: 413310 - DNA, 19 bp, Homo sapiens
  siRNA target sequence for MGC12909 (NM_145055.1,194-212).
gattctacagttatttctt

SEQ ID NO: 413311 - DNA, 19 bp, Homo sapiens
  siRNA target sequence for MGC12909 (NM_145055.1,277-295).
gagtgacaagcctacaact

SEQ ID NO: 413312 - DNA, 19 bp, Homo sapiens
  siRNA target sequence for MGC12909 (NM_145055.1,288-306).
ctacaactggccgagttta

SEQ ID NO: 413313 - DNA, 19 bp, Homo sapiens
  siRNA target sequence for MGC12909 (NM_145055.1,291-309).
caactggccgagtttatga

SEQ ID NO: 413314 - DNA, 19 bp, Homo sapiens
  siRNA target sequence for MGC12909 (NM_145055.1,354-372).
gtcacctggctgattcaga

SEQ ID NO: 413315 - DNA, 19 bp, Homo sapiens
  siRNA target sequence for MGC12909 (NM_145055.1,379-397).
gtcttccgcagaagagaat

SEQ ID NO: 413316 - DNA, 19 bp, Homo sapiens
  siRNA target sequence for MGC12909 (NM_145055.1,381-399).
cttccgcagaagagaatga

SEQ ID NO: 413317 - DNA, 19 bp, Homo sapiens
  siRNA target sequence for MGC12909 (NM_145055.1,475-493).
gcggtcccgatctgaaagt

SEQ ID NO: 413318 - DNA, 19 bp, Homo sapiens
  siRNA target sequence for MGC12909 (NM_145055.1,523-541).
ccggcaatccagtgataaa

SEQ ID NO: 413319 - DNA, 19 bp, Homo sapiens
  siRNA target sequence for MGC12909 (NM_145055.1,548-566).
ggccgagtcgccaaggtta

SEQ ID NO: 413320 - DNA, 19 bp, Homo sapiens
  siRNA target sequence for MGC12909 (NM_145055.1,549-567).
gccgagtcgccaaggttaa

SEQ ID NO: 413321 - DNA, 19 bp, Homo sapiens
  siRNA target sequence for MGC12909 (NM_145055.1,550-568).
ccgagtcgccaaggttaaa

SEQ ID NO: 413322 - DNA, 19 bp, Homo sapiens
  siRNA target sequence for MGC12909 (NM_145055.1,570-588).
gtcatcggagccaaaagca

SEQ ID NO: 413323 - DNA, 19 bp, Homo sapiens
  siRNA target sequence for MGC12909 (NM_145055.1,702-720).
cgagctcatcagatgatga

SEQ ID NO: 413324 - DNA, 19 bp, Homo sapiens
  siRNA target sequence for MGC12909 (NM_145055.1,774-792).
ctccagttgtagctcatta

SEQ ID NO: 413325 - DNA, 19 bp, Homo sapiens
  siRNA target sequence for MGC12909 (NM_145055.1,777-795).
cagttgtagctcattatga

SEQ ID NO: 413326 - DNA, 19 bp, Homo sapiens
  siRNA target sequence for MGC12909 (NM_145055.1,779-797).
gttgtagctcattatgata

SEQ ID NO: 413327 - DNA, 19 bp, Homo sapiens
  siRNA target sequence for MGC12909 (NM_145055.1,813-831).
ctgacccagaagtggtaaa

SEQ ID NO: 413328 - DNA, 19 bp, Homo sapiens
  siRNA target sequence for MGC12909 (NM_145055.1,849-867).
cggctgcagtagttcaaga

SEQ ID NO: 413329 - DNA, 19 bp, Homo sapiens
  siRNA target sequence for MGC12909 (NM_145055.1,860-878).
gttcaagagcacagtaatt

SEQ ID NO: 413330 - DNA, 19 bp, Homo sapiens
  siRNA target sequence for MGC12909 (NM_145055.1,996-1014).
gcaatgcgccactcaatga

SEQ ID NO: 413331 - DNA, 19 bp, Homo sapiens
  siRNA target sequence for MGC12909 (NM_145055.1,1089-1107).
ctcgaggtggtgtgattca

SEQ ID NO: 413332 - DNA, 19 bp, Homo sapiens
  siRNA target sequence for MGC12909 (NM_145055.1,1091-1109).
cgaggtggtgtgattcaga

SEQ ID NO: 413333 - DNA, 19 bp, Homo sapiens
  siRNA target sequence for MGC12909 (NM_145055.1,1131-1149).
gctcgggcacgcagtatgt

SEQ ID NO: 413334 - DNA, 19 bp, Homo sapiens
  siRNA target sequence for MGC12909 (NM_145055.1,1132-1150).
ctcgggcacgcagtatgtt

SEQ ID NO: 413335 - DNA, 19 bp, Homo sapiens
  siRNA target sequence for MGC15476 (NM_145056.1,1291-1309).
cccagcgtcgtctgcttta

SEQ ID NO: 413336 - DNA, 19 bp, Homo sapiens
  siRNA target sequence for MGC15476 (NM_145056.1,1585-1603).
cttcccacgcgctcaagaa

SEQ ID NO: 413337 - DNA, 19 bp, Homo sapiens
  siRNA target sequence for MGC15476 (NM_145056.1,1588-1606).
cccacgcgctcaagaaaaa

SEQ ID NO: 413338 - DNA, 19 bp, Homo sapiens
  siRNA target sequence for MGC15476 (NM_145056.1,1592-1610).
cgcgctcaagaaaaagata

SEQ ID NO: 413339 - DNA, 19 bp, Homo sapiens
  siRNA target sequence for MGC7036 (NM_145058.1,769-787).
gagctgcagtgctacaaga

SEQ ID NO: 413340 - DNA, 19 bp, Homo sapiens
  siRNA target sequence for MGC7036 (NM_145058.1,843-861).
ggttactagtgccaaaaat

SEQ ID NO: 413341 - DNA, 19 bp, Homo sapiens
  siRNA target sequence for MGC10200 (NM_145060.1,195-213).
caattatgctctcatgtta

SEQ ID NO: 413342 - DNA, 19 bp, Homo sapiens
  siRNA target sequence for MGC10200 (NM_145060.1,264-282).
caggaacctaccttgaaaa

SEQ ID NO: 413343 - DNA, 19 bp, Homo sapiens
  siRNA target sequence for MGC10200 (NM_145060.1,266-284).
ggaacctaccttgaaaact

SEQ ID NO: 413344 - DNA, 19 bp, Homo sapiens
  siRNA target sequence for MGC10200 (NM_145060.1,308-326).
gatcattgtaataaatgaa

SEQ ID NO: 413345 - DNA, 19 bp, Homo sapiens
  siRNA target sequence for MGC10200 (NM_145060.1,386-404).
ggaactctgtgaatctctt

SEQ ID NO: 413346 - DNA, 19 bp, Homo sapiens
  siRNA target sequence for MGC10200 (NM_145060.1,482-500).
ctgtgttaagggatcagat

SEQ ID NO: 413347 - DNA, 19 bp, Homo sapiens
  siRNA target sequence for MGC10200 (NM_145060.1,531-549).
gaacctgaacccgtaaaga

SEQ ID NO: 413348 - DNA, 19 bp, Homo sapiens
  siRNA target sequence for MGC10200 (NM_145060.1,629-647).
gaaatcccgcttaacctat

SEQ ID NO: 413349 - DNA, 19 bp, Homo sapiens
  siRNA target sequence for MGC10200 (NM_145060.1,634-652).
cccgcttaacctataatca

SEQ ID NO: 413350 - DNA, 19 bp, Homo sapiens
  siRNA target sequence for MGC10200 (NM_145060.1,635-653).
ccgcttaacctataatcaa

SEQ ID NO: 413351 - DNA, 19 bp, Homo sapiens
  siRNA target sequence for MGC10200 (NM_145060.1,636-654).
cgcttaacctataatcaaa

SEQ ID NO: 413352 - DNA, 19 bp, Homo sapiens
  siRNA target sequence for MGC10200 (NM_145060.1,637-655).
gcttaacctataatcaaat

SEQ ID NO: 413353 - DNA, 19 bp, Homo sapiens
  siRNA target sequence for MGC10200 (NM_145060.1,708-726).
ctacatcagccaaaaaagt

SEQ ID NO: 413354 - DNA, 19 bp, Homo sapiens
  siRNA target sequence for MGC10200 (NM_145060.1,782-800).
ggataccaaaggtcgttat

SEQ ID NO: 413355 - DNA, 19 bp, Homo sapiens
  siRNA target sequence for MGC10200 (NM_145060.1,783-801).
gataccaaaggtcgttatt

SEQ ID NO: 413356 - DNA, 19 bp, Homo sapiens
  siRNA target sequence for MGC10200 (NM_145060.1,854-872).
gtttcacgtgttactgaat

SEQ ID NO: 413357 - DNA, 19 bp, Homo sapiens
  siRNA target sequence for MGC10200 (NM_145060.1,905-923).
ccgagggggaggacttact

SEQ ID NO: 413358 - DNA, 19 bp, Homo sapiens
  siRNA target sequence for MGC10200 (NM_145060.1,911-929).
gggaggacttactcgttat

SEQ ID NO: 413359 - DNA, 19 bp, Homo sapiens
  siRNA target sequence for MGC10200 (NM_145060.1,913-931).
gaggacttactcgttatgt

SEQ ID NO: 413360 - DNA, 19 bp, Homo sapiens
  siRNA target sequence for MGC10200 (NM_145060.1,915-933).
ggacttactcgttatgtta

SEQ ID NO: 413361 - DNA, 19 bp, Homo sapiens
  siRNA target sequence for MGC10200 (NM_145060.1,916-934).
gacttactcgttatgttat

SEQ ID NO: 413362 - DNA, 19 bp, Homo sapiens
  siRNA target sequence for MGC10200 (NM_145060.1,918-936).
cttactcgttatgttataa

SEQ ID NO: 413363 - DNA, 19 bp, Homo sapiens
  siRNA target sequence for C13orf3 (NM_145061.2,319-337).
ccacgtgtcaagaaaaatt

SEQ ID NO: 413364 - DNA, 19 bp, Homo sapiens
  siRNA target sequence for C13orf3 (NM_145061.2,369-387).
cccagagttgtctaattgt

SEQ ID NO: 413365 - DNA, 19 bp, Homo sapiens
  siRNA target sequence for C13orf3 (NM_145061.2,434-452).
ctgttgcaagcagttgtat

SEQ ID NO: 413366 - DNA, 19 bp, Homo sapiens
  siRNA target sequence for C13orf3 (NM_145061.2,466-484).
ccacgtagtccacaacttt

SEQ ID NO: 413367 - DNA, 19 bp, Homo sapiens
  siRNA target sequence for C13orf3 (NM_145061.2,473-491).
gtccacaactttcagattt

SEQ ID NO: 413368 - DNA, 19 bp, Homo sapiens
  siRNA target sequence for C13orf3 (NM_145061.2,496-514).
cttgagcggtacatcgtat

SEQ ID NO: 413369 - DNA, 19 bp, Homo sapiens
  siRNA target sequence for C13orf3 (NM_145061.2,507-525).
catcgtatcccaagttcta

SEQ ID NO: 413370 - DNA, 19 bp, Homo sapiens
  siRNA target sequence for C13orf3 (NM_145061.2,536-554).
cacaggcagtgaacaacta

SEQ ID NO: 413371 - DNA, 19 bp, Homo sapiens
  siRNA target sequence for C13orf3 (NM_145061.2,538-556).
caggcagtgaacaactata

SEQ ID NO: 413372 - DNA, 19 bp, Homo sapiens
  siRNA target sequence for C13orf3 (NM_145061.2,558-576).
ggaagagcccgtaattgta

SEQ ID NO: 413373 - DNA, 19 bp, Homo sapiens
  siRNA target sequence for C13orf3 (NM_145061.2,559-577).
gaagagcccgtaattgtaa

SEQ ID NO: 413374 - DNA, 19 bp, Homo sapiens
  siRNA target sequence for C13orf3 (NM_145061.2,587-605).
ccaaacaatcactagtaaa

SEQ ID NO: 413375 - DNA, 19 bp, Homo sapiens
  siRNA target sequence for C13orf3 (NM_145061.2,588-606).
caaacaatcactagtaaaa

SEQ ID NO: 413376 - DNA, 19 bp, Homo sapiens
  siRNA target sequence for C13orf3 (NM_145061.2,649-667).
gagtgtgtaactcctaaat

SEQ ID NO: 413377 - DNA, 19 bp, Homo sapiens
  siRNA target sequence for C13orf3 (NM_145061.2,653-671).
gtgtaactcctaaattaga

SEQ ID NO: 413378 - DNA, 19 bp, Homo sapiens
  siRNA target sequence for C13orf3 (NM_145061.2,659-677).
ctcctaaattagaacactt

SEQ ID NO: 413379 - DNA, 19 bp, Homo sapiens
  siRNA target sequence for C13orf3 (NM_145061.2,675-693).
ctttggtatctctgaatat

SEQ ID NO: 413380 - DNA, 19 bp, Homo sapiens
  siRNA target sequence for C13orf3 (NM_145061.2,772-790).
gaatccaggctcaatgata

SEQ ID NO: 413381 - DNA, 19 bp, Homo sapiens
  siRNA target sequence for C13orf3 (NM_145061.2,776-794).
ccaggctcaatgataatgt

SEQ ID NO: 413382 - DNA, 19 bp, Homo sapiens
  siRNA target sequence for C13orf3 (NM_145061.2,777-795).
caggctcaatgataatgtt

SEQ ID NO: 413383 - DNA, 19 bp, Homo sapiens
  siRNA target sequence for C13orf3 (NM_145061.2,779-797).
ggctcaatgataatgtttt

SEQ ID NO: 413384 - DNA, 19 bp, Homo sapiens
  siRNA target sequence for C13orf3 (NM_145061.2,836-854).
gtgatgccgaatataccaa

SEQ ID NO: 413385 - DNA, 19 bp, Homo sapiens
  siRNA target sequence for C13orf3 (NM_145061.2,859-877).
cctttggtacctacattct

SEQ ID NO: 413386 - DNA, 19 bp, Homo sapiens
  siRNA target sequence for C13orf3 (NM_145061.2,876-894).
ctgtactcctggtttgaaa

SEQ ID NO: 413387 - DNA, 19 bp, Homo sapiens
  siRNA target sequence for C13orf3 (NM_145061.2,878-896).
gtactcctggtttgaaaat

SEQ ID NO: 413388 - DNA, 19 bp, Homo sapiens
  siRNA target sequence for C13orf3 (NM_145061.2,919-937).
gctttggtatccacaaatt

SEQ ID NO: 413389 - DNA, 19 bp, Homo sapiens
  siRNA target sequence for C13orf3 (NM_145061.2,932-950).
caaattacccattatcaaa

SEQ ID NO: 413390 - DNA, 19 bp, Homo sapiens
  siRNA target sequence for C13orf3 (NM_145061.2,985-1003).
gatcgtacttcgttggttt

SEQ ID NO: 413391 - DNA, 19 bp, Homo sapiens
  siRNA target sequence for C13orf3 (NM_145061.2,988-1006).
cgtacttcgttggttttaa

SEQ ID NO: 413392 - DNA, 19 bp, Homo sapiens
  siRNA target sequence for C13orf3 (NM_145061.2,1012-1030).
gacacatgctttgagaatt

SEQ ID NO: 413393 - DNA, 19 bp, Homo sapiens
  siRNA target sequence for C13orf3 (NM_145061.2,1039-1057).
ccctcttcacctacgattt

SEQ ID NO: 413394 - DNA, 19 bp, Homo sapiens
  siRNA target sequence for C13orf3 (NM_145061.2,1046-1064).
cacctacgatttcttctta

SEQ ID NO: 413395 - DNA, 19 bp, Homo sapiens
  siRNA target sequence for C13orf3 (NM_145061.2,1049-1067).
ctacgatttcttcttatga

SEQ ID NO: 413396 - DNA, 19 bp, Homo sapiens
  siRNA target sequence for C13orf3 (NM_145061.2,1052-1070).
cgatttcttcttatgagaa

SEQ ID NO: 413397 - DNA, 19 bp, Homo sapiens
  siRNA target sequence for C13orf3 (NM_145061.2,1152-1170).
cctagctactccaatagca

SEQ ID NO: 413398 - DNA, 19 bp, Homo sapiens
  siRNA target sequence for C13orf3 (NM_145061.2,1153-1171).
ctagctactccaatagcaa

SEQ ID NO: 413399 - DNA, 19 bp, Homo sapiens
  siRNA target sequence for C13orf3 (NM_145061.2,1156-1174).
gctactccaatagcaatta

SEQ ID NO: 413400 - DNA, 19 bp, Homo sapiens
  siRNA target sequence for C13orf3 (NM_145061.2,1157-1175).
ctactccaatagcaattaa

SEQ ID NO: 413401 - DNA, 19 bp, Homo sapiens
  siRNA target sequence for C13orf3 (NM_145061.2,1177-1195).
gcagtgccacccagtaaaa

SEQ ID NO: 413402 - DNA, 19 bp, Homo sapiens
  siRNA target sequence for C13orf3 (NM_145061.2,1180-1198).
gtgccacccagtaaaaggt

SEQ ID NO: 413403 - DNA, 19 bp, Homo sapiens
  siRNA target sequence for C13orf3 (NM_145061.2,1186-1204).
cccagtaaaaggttcctta

SEQ ID NO: 413404 - DNA, 19 bp, Homo sapiens
  siRNA target sequence for C13orf3 (NM_145061.2,1187-1205).
ccagtaaaaggttccttaa

SEQ ID NO: 413405 - DNA, 19 bp, Homo sapiens
  siRNA target sequence for C13orf3 (NM_145061.2,1221-1239).
ccgagatgtcagcaacaaa

SEQ ID NO: 413406 - DNA, 19 bp, Homo sapiens
  siRNA target sequence for C6orf113 (NM_145062.1,294-312).
catgaaagctcacctaatt

SEQ ID NO: 413407 - DNA, 19 bp, Homo sapiens
  siRNA target sequence for C6orf113 (NM_145062.1,302-320).
ctcacctaattgttcacat

SEQ ID NO: 413408 - DNA, 19 bp, Homo sapiens
  siRNA target sequence for C6orf113 (NM_145062.1,348-366).
caagttgtcaggtgtgaat

SEQ ID NO: 413409 - DNA, 19 bp, Homo sapiens
  siRNA target sequence for C6orf113 (NM_145062.1,351-369).
gttgtcaggtgtgaattat

SEQ ID NO: 413410 - DNA, 19 bp, Homo sapiens
  siRNA target sequence for C6orf113 (NM_145062.1,354-372).
gtcaggtgtgaattatgat

SEQ ID NO: 413411 - DNA, 19 bp, Homo sapiens
  siRNA target sequence for C6orf113 (NM_145062.1,397-415).
gctcattttgagcagaata

SEQ ID NO: 413412 - DNA, 19 bp, Homo sapiens
  siRNA target sequence for C6orf113 (NM_145062.1,429-447).
ctttgagaggataaataca

SEQ ID NO: 413413 - DNA, 19 bp, Homo sapiens
  siRNA target sequence for C6orf113 (NM_145062.1,458-476).
gaacttcagataacaagaa

SEQ ID NO: 413414 - DNA, 19 bp, Homo sapiens
  siRNA target sequence for C6orf113 (NM_145062.1,530-548).
gtgcatctaatcatccaaa

SEQ ID NO: 413415 - DNA, 19 bp, Homo sapiens
  siRNA target sequence for C6orf113 (NM_145062.1,532-550).
gcatctaatcatccaaaaa

SEQ ID NO: 413416 - DNA, 19 bp, Homo sapiens
  siRNA target sequence for C6orf113 (NM_145062.1,533-551).
catctaatcatccaaaaaa

SEQ ID NO: 413417 - DNA, 19 bp, Homo sapiens
  siRNA target sequence for C6orf113 (NM_145062.1,564-582).
cctgactaaagatagtact

SEQ ID NO: 413418 - DNA, 19 bp, Homo sapiens
  siRNA target sequence for C6orf113 (NM_145062.1,600-618).
ctattcagagaacttaact

SEQ ID NO: 413419 - DNA, 19 bp, Homo sapiens
  siRNA target sequence for C6orf113 (NM_145062.1,609-627).
gaacttaactgaatctaga

SEQ ID NO: 413420 - DNA, 19 bp, Homo sapiens
  siRNA target sequence for C6orf113 (NM_145062.1,654-672).
gtccagcctgaccgaaata

SEQ ID NO: 413421 - DNA, 19 bp, Homo sapiens
  siRNA target sequence for C6orf113 (NM_145062.1,657-675).
cagcctgaccgaaataaaa

SEQ ID NO: 413422 - DNA, 19 bp, Homo sapiens
  siRNA target sequence for C6orf113 (NM_145062.1,661-679).
ctgaccgaaataaaaggat

SEQ ID NO: 413423 - DNA, 19 bp, Homo sapiens
  siRNA target sequence for C6orf113 (NM_145062.1,680-698).
ctgtttatgaaacaacata

SEQ ID NO: 413424 - DNA, 19 bp, Homo sapiens
  siRNA target sequence for C6orf113 (NM_145062.1,713-731).
gtccattctgtggaaaaat

SEQ ID NO: 413425 - DNA, 19 bp, Homo sapiens
  siRNA target sequence for C6orf113 (NM_145062.1,770-788).
caaagcatgccaatctttt

SEQ ID NO: 413426 - DNA, 19 bp, Homo sapiens
  siRNA target sequence for C6orf113 (NM_145062.1,811-829).
gatcaaccactctatgatt

SEQ ID NO: 413427 - DNA, 19 bp, Homo sapiens
  siRNA target sequence for C6orf113 (NM_145062.1,832-850).
cctatgtgtgggctcatat

SEQ ID NO: 413428 - DNA, 19 bp, Homo sapiens
  siRNA target sequence for C6orf113 (NM_145062.1,837-855).
gtgtgggctcatatgtaca

SEQ ID NO: 413429 - DNA, 19 bp, Homo sapiens
  siRNA target sequence for C6orf113 (NM_145062.1,839-857).
gtgggctcatatgtacaaa

SEQ ID NO: 413430 - DNA, 19 bp, Homo sapiens
  siRNA target sequence for C6orf113 (NM_145062.1,846-864).
catatgtacaaattaccat

SEQ ID NO: 413431 - DNA, 19 bp, Homo sapiens
  siRNA target sequence for C6orf113 (NM_145062.1,930-948).
ccagtgttctggtgatcta

SEQ ID NO: 413432 - DNA, 19 bp, Homo sapiens
  siRNA target sequence for C6orf113 (NM_145062.1,935-953).
gttctggtgatctacaatt

SEQ ID NO: 413433 - DNA, 19 bp, Homo sapiens
  siRNA target sequence for C6orf113 (NM_145062.1,1029-1047).
gaagctgcagagacaatat

SEQ ID NO: 413434 - DNA, 19 bp, Homo sapiens
  siRNA target sequence for C6orf113 (NM_145062.1,1032-1050).
gctgcagagacaatatggt

SEQ ID NO: 413435 - DNA, 19 bp, Homo sapiens
  siRNA target sequence for C6orf113 (NM_145062.1,1123-1141).
cctccatctgaatttcata

SEQ ID NO: 413436 - DNA, 19 bp, Homo sapiens
  siRNA target sequence for C6orf113 (NM_145062.1,1220-1238).
cacttcataggtattatca

SEQ ID NO: 413437 - DNA, 19 bp, Homo sapiens
  siRNA target sequence for C6orf113 (NM_145062.1,1222-1240).
cttcataggtattatcaga

SEQ ID NO: 413438 - DNA, 19 bp, Homo sapiens
  siRNA target sequence for C6orf113 (NM_145062.1,1274-1292).
cttcagtggtggatcactt

SEQ ID NO: 413439 - DNA, 19 bp, Homo sapiens
  siRNA target sequence for C6orf113 (NM_145062.1,1319-1337).
ggggttgtggttacagaaa

SEQ ID NO: 413440 - DNA, 19 bp, Homo sapiens
  siRNA target sequence for C6orf113 (NM_145062.1,1322-1340).
gttgtggttacagaaattt

SEQ ID NO: 413441 - DNA, 19 bp, Homo sapiens
  siRNA target sequence for C6orf113 (NM_145062.1,1327-1345).
ggttacagaaatttccaaa

SEQ ID NO: 413442 - DNA, 19 bp, Homo sapiens
  siRNA target sequence for C6orf113 (NM_145062.1,1341-1359).
ccaaatgctactttcatca

SEQ ID NO: 413443 - DNA, 19 bp, Homo sapiens
  siRNA target sequence for C6orf113 (NM_145062.1,1409-1427).
cttgcattccaaaaattca

SEQ ID NO: 413444 - DNA, 19 bp, Homo sapiens
  siRNA target sequence for C6orf113 (NM_145062.1,1413-1431).
cattccaaaaattcaatct

SEQ ID NO: 413445 - DNA, 19 bp, Homo sapiens
  siRNA target sequence for C6orf113 (NM_145062.1,1418-1436).
caaaaattcaatctatgat

SEQ ID NO: 413446 - DNA, 19 bp, Homo sapiens
  siRNA target sequence for C6orf113 (NM_145062.1,1515-1533).
gattggagcatgtgaagta

SEQ ID NO: 413447 - DNA, 19 bp, Homo sapiens
  siRNA target sequence for C6orf113 (NM_145062.1,1519-1537).
ggagcatgtgaagtatata

SEQ ID NO: 413448 - DNA, 19 bp, Homo sapiens
  siRNA target sequence for C6orf113 (NM_145062.1,1548-1566).
ctccctaagggtaaagtgt

SEQ ID NO: 413449 - DNA, 19 bp, Homo sapiens
  siRNA target sequence for C6orf113 (NM_145062.1,1552-1570).
ctaagggtaaagtgtcata

SEQ ID NO: 413450 - DNA, 19 bp, Homo sapiens
  siRNA target sequence for C6orf113 (NM_145062.1,1556-1574).
gggtaaagtgtcatattgt

SEQ ID NO: 413451 - DNA, 19 bp, Homo sapiens
  siRNA target sequence for C6orf113 (NM_145062.1,1563-1581).
gtgtcatattgttgatttt

SEQ ID NO: 413452 - DNA, 19 bp, Homo sapiens
  siRNA target sequence for C6orf113 (NM_145062.1,1607-1625).
cacaccctcgcttatttga

SEQ ID NO: 413453 - DNA, 19 bp, Homo sapiens
  siRNA target sequence for C6orf113 (NM_145062.1,1666-1684).
ccaaaggtagtgtgtacat

SEQ ID NO: 413454 - DNA, 19 bp, Homo sapiens
  siRNA target sequence for C6orf113 (NM_145062.1,1682-1700).
catctaaacctcctatcta

SEQ ID NO: 413455 - DNA, 19 bp, Homo sapiens
  siRNA target sequence for C6orf113 (NM_145062.1,1685-1703).
ctaaacctcctatctatct

SEQ ID NO: 413456 - DNA, 19 bp, Homo sapiens
  siRNA target sequence for C6orf113 (NM_145062.1,1714-1732).
ggtcacagtcgaactgtta

SEQ ID NO: 413457 - DNA, 19 bp, Homo sapiens
  siRNA target sequence for C6orf113 (NM_145062.1,1715-1733).
gtcacagtcgaactgttat

SEQ ID NO: 413458 - DNA, 19 bp, Homo sapiens
  siRNA target sequence for C6orf113 (NM_145062.1,1721-1739).
gtcgaactgttattggaat

SEQ ID NO: 413459 - DNA, 19 bp, Homo sapiens
  siRNA target sequence for C6orf113 (NM_145062.1,1755-1773).
ccgaacattatgcttacta

SEQ ID NO: 413460 - DNA, 19 bp, Homo sapiens
  siRNA target sequence for C6orf113 (NM_145062.1,1760-1778).
cattatgcttactaatact

SEQ ID NO: 413461 - DNA, 19 bp, Homo sapiens
  siRNA target sequence for C6orf113 (NM_145062.1,1959-1977).
ctttacagccgagaagatt

SEQ ID NO: 413462 - DNA, 19 bp, Homo sapiens
  siRNA target sequence for C6orf130 (NM_145063.2,243-261).
gcccgaaaacagactcttt

SEQ ID NO: 413463 - DNA, 19 bp, Homo sapiens
  siRNA target sequence for C6orf130 (NM_145063.2,332-350).
ggggtgcaagaacttttaa

SEQ ID NO: 413464 - DNA, 19 bp, Homo sapiens
  siRNA target sequence for C6orf130 (NM_145063.2,388-406).
gagagatgggcgatatata

SEQ ID NO: 413465 - DNA, 19 bp, Homo sapiens
  siRNA target sequence for C6orf130 (NM_145063.2,390-408).
gagatgggcgatatatata

SEQ ID NO: 413466 - DNA, 19 bp, Homo sapiens
  siRNA target sequence for C6orf130 (NM_145063.2,395-413).
gggcgatatatatattact

SEQ ID NO: 413467 - DNA, 19 bp, Homo sapiens
  siRNA target sequence for C6orf130 (NM_145063.2,396-414).
ggcgatatatatattactt

SEQ ID NO: 413468 - DNA, 19 bp, Homo sapiens
  siRNA target sequence for C6orf130 (NM_145063.2,432-450).
cttcgcacaagccaactta

SEQ ID NO: 413469 - DNA, 19 bp, Homo sapiens
  siRNA target sequence for C6orf130 (NM_145063.2,442-460).
gccaacttatgaaaactta

SEQ ID NO: 413470 - DNA, 19 bp, Homo sapiens
  siRNA target sequence for C6orf130 (NM_145063.2,473-491).
gaggcaatgaagtctcatt

SEQ ID NO: 413471 - DNA, 19 bp, Homo sapiens
  siRNA target sequence for C6orf130 (NM_145063.2,529-547).
gattggatgtggtcttgat

SEQ ID NO: 413472 - DNA, 19 bp, Homo sapiens
  siRNA target sequence for C6orf130 (NM_145063.2,595-613).
ggcaacagacatcaaaatt

SEQ ID NO: 413473 - DNA, 19 bp, Homo sapiens
  siRNA target sequence for C6orf130 (NM_145063.2,596-614).
gcaacagacatcaaaatta

SEQ ID NO: 413474 - DNA, 19 bp, Homo sapiens
  siRNA target sequence for C6orf130 (NM_145063.2,600-618).
cagacatcaaaattactgt

SEQ ID NO: 413475 - DNA, 19 bp, Homo sapiens
  siRNA target sequence for MGC35521 (NM_145065.1,216-234).
cgaggagcccatcaagtat

SEQ ID NO: 413476 - DNA, 19 bp, Homo sapiens
  siRNA target sequence for MGC35521 (NM_145065.1,475-493).
cagcacagcatctcgtata

SEQ ID NO: 413477 - DNA, 19 bp, Homo sapiens
  siRNA target sequence for MGC35521 (NM_145065.1,503-521).
ggagccactcggtcatagt

SEQ ID NO: 413478 - DNA, 19 bp, Homo sapiens
  siRNA target sequence for MGC35521 (NM_145065.1,563-581).
gccgctccacagagaacat

SEQ ID NO: 413479 - DNA, 19 bp, Homo sapiens
  siRNA target sequence for MGC35521 (NM_145065.1,727-745).
gatgcctctagcaacatct

SEQ ID NO: 413480 - DNA, 19 bp, Homo sapiens
  siRNA target sequence for MGC35521 (NM_145065.1,881-899).
cggtctgtgggaatgtgta

SEQ ID NO: 413481 - DNA, 19 bp, Homo sapiens
  siRNA target sequence for MGC35521 (NM_145065.1,887-905).
gtgggaatgtgtacacatt

SEQ ID NO: 413482 - DNA, 19 bp, Homo sapiens
  siRNA target sequence for MGC35521 (NM_145065.1,1065-1083).
gcggcaggaggcaaatgca

SEQ ID NO: 413483 - DNA, 19 bp, Homo sapiens
  siRNA target sequence for MGC35521 (NM_145065.1,1265-1283).
gccttgtggggccttatgt

SEQ ID NO: 413484 - DNA, 19 bp, Homo sapiens
  siRNA target sequence for MGC35521 (NM_145065.1,1409-1427).
cccacggcacccatgcttt

SEQ ID NO: 413485 - DNA, 19 bp, Homo sapiens
  siRNA target sequence for MGC35521 (NM_145065.1,1474-1492).
ggctgcgtccgcctcattt

SEQ ID NO: 413486 - DNA, 19 bp, Homo sapiens
  siRNA target sequence for MGC35521 (NM_145065.1,1475-1493).
gctgcgtccgcctcatttt

SEQ ID NO: 413487 - DNA, 19 bp, Homo sapiens
  siRNA target sequence for DKFZp727G131 (NM_145111.1,164-182).
cctgaatcaagggatacta

SEQ ID NO: 413488 - DNA, 19 bp, Homo sapiens
  siRNA target sequence for DKFZp727G131 (NM_145111.1,175-193).
ggatactacagatttgtct

SEQ ID NO: 413489 - DNA, 19 bp, Homo sapiens
  siRNA target sequence for DKFZp727G131 (NM_145111.1,215-233).
gaaggcatcgtgatagtga

SEQ ID NO: 413490 - DNA, 19 bp, Homo sapiens
  siRNA target sequence for DKFZp727G131 (NM_145111.1,302-320).
gttctcagtcgctctacaa

SEQ ID NO: 413491 - DNA, 19 bp, Homo sapiens
  siRNA target sequence for DKFZp727G131 (NM_145111.1,305-323).
ctcagtcgctctacaacta

SEQ ID NO: 413492 - DNA, 19 bp, Homo sapiens
  siRNA target sequence for DKFZp727G131 (NM_145111.1,312-330).
gctctacaactatgaatga

SEQ ID NO: 413493 - DNA, 19 bp, Homo sapiens
  siRNA target sequence for DKFZp727G131 (NM_145111.1,349-367).
gtatttagttgcatataga

SEQ ID NO: 413494 - DNA, 19 bp, Homo sapiens
  siRNA target sequence for DKFZp727G131 (NM_145111.1,427-445).
ggacatggtacggacaatt

SEQ ID NO: 413495 - DNA, 19 bp, Homo sapiens
  siRNA target sequence for DKFZp727G131 (NM_145111.1,428-446).
gacatggtacggacaattt

SEQ ID NO: 413496 - DNA, 19 bp, Homo sapiens
  siRNA target sequence for DKFZp727G131 (NM_145111.1,438-456).
ggacaatttttgatgacaa

SEQ ID NO: 413497 - DNA, 19 bp, Homo sapiens
  siRNA target sequence for DKFZp727G131 (NM_145111.1,474-492).
gaactatacctcttagtga

SEQ ID NO: 413498 - DNA, 19 bp, Homo sapiens
  siRNA target sequence for DKFZp727G131 (NM_145111.1,477-495).
ctatacctcttagtgataa

SEQ ID NO: 413499 - DNA, 19 bp, Homo sapiens
  siRNA target sequence for DKFZp727G131 (NM_145111.1,509-527).
cgaatctgtacgattgcaa

SEQ ID NO: 413500 - DNA, 19 bp, Homo sapiens
  siRNA target sequence for DKFZp727G131 (NM_145111.1,510-528).
gaatctgtacgattgcaaa

SEQ ID NO: 413501 - DNA, 19 bp, Homo sapiens
  siRNA target sequence for DKFZp727G131 (NM_145111.1,514-532).
ctgtacgattgcaaaacat

SEQ ID NO: 413502 - DNA, 19 bp, Homo sapiens
  siRNA target sequence for DKFZp727G131 (NM_145111.1,519-537).
cgattgcaaaacatttgga

SEQ ID NO: 413503 - DNA, 19 bp, Homo sapiens
  siRNA target sequence for DKFZp727G131 (NM_145111.1,535-553).
ggaagcaatgcttattaca

SEQ ID NO: 413504 - DNA, 19 bp, Homo sapiens
  siRNA target sequence for DKFZp727G131 (NM_145111.1,557-575).
ctgcagtccggtatagact

SEQ ID NO: 413505 - DNA, 19 bp, Homo sapiens
  siRNA target sequence for DKFZp727G131 (NM_145111.1,559-577).
gcagtccggtatagacttt

SEQ ID NO: 413506 - DNA, 19 bp, Homo sapiens
  siRNA target sequence for DKFZp727G131 (NM_145111.1,618-636).
ccacactcttggtttatgt

SEQ ID NO: 413507 - DNA, 19 bp, Homo sapiens
  siRNA target sequence for DKFZp727G131 (NM_145111.1,665-683).
gaggatctcttatgttgtt

SEQ ID NO: 413508 - DNA, 19 bp, Homo sapiens
  siRNA target sequence for DKFZp727G131 (NM_145111.1,671-689).
ctcttatgttgtttaaatt

SEQ ID NO: 413509 - DNA, 19 bp, Homo sapiens
  siRNA target sequence for DKFZp727G131 (NM_145111.1,696-714).
cacatataactggattaga

SEQ ID NO: 413510 - DNA, 19 bp, Homo sapiens
  siRNA target sequence for DKFZp727G131 (NM_145111.1,738-756).
gccttcttggtcagtataa

SEQ ID NO: 413511 - DNA, 19 bp, Homo sapiens
  siRNA target sequence for DKFZp727G131 (NM_145111.1,739-757).
ccttcttggtcagtataaa

SEQ ID NO: 413512 - DNA, 19 bp, Homo sapiens
  siRNA target sequence for DKFZp727G131 (NM_145111.1,822-840).
gcagacttactgaaaaatt

SEQ ID NO: 413513 - DNA, 19 bp, Homo sapiens
  siRNA target sequence for DKFZp727G131 (NM_145111.1,887-905).
catcgagaagctttggtat

SEQ ID NO: 413514 - DNA, 19 bp, Homo sapiens
  siRNA target sequence for DKFZp727G131 (NM_145111.1,891-909).
gagaagctttggtatccaa

SEQ ID NO: 413515 - DNA, 19 bp, Homo sapiens
  siRNA target sequence for DKFZp727G131 (NM_145111.1,990-1008).
gccgacttctcgaaatatt

SEQ ID NO: 413516 - DNA, 19 bp, Homo sapiens
  siRNA target sequence for DKFZp727G131 (NM_145111.1,991-1009).
ccgacttctcgaaatattt

SEQ ID NO: 413517 - DNA, 19 bp, Homo sapiens
  siRNA target sequence for DKFZp727G131 (NM_145111.1,992-1010).
cgacttctcgaaatatttt

SEQ ID NO: 413518 - DNA, 19 bp, Homo sapiens
  siRNA target sequence for DKFZp727G131 (NM_145111.1,1025-1043).
gtgaaccacacccacttat

SEQ ID NO: 413519 - DNA, 19 bp, Homo sapiens
  siRNA target sequence for DKFZp727G131 (NM_145111.1,1100-1118).
gaactcaggaacgagattt

SEQ ID NO: 413520 - DNA, 19 bp, Homo sapiens
  siRNA target sequence for DKFZp727G131 (NM_145111.1,1108-1126).
gaacgagatttacattttt

SEQ ID NO: 413521 - DNA, 19 bp, Homo sapiens
  siRNA target sequence for DKFZp727G131 (NM_145111.1,1129-1147).
cgttgaaaagcaatctcat

SEQ ID NO: 413522 - DNA, 19 bp, Homo sapiens
  siRNA target sequence for DKFZp727G131 (NM_145111.1,1168-1186).
cgacatttgggtaacaaaa

SEQ ID NO: 413523 - DNA, 19 bp, Homo sapiens
  siRNA target sequence for DKFZp727G131 (NM_145111.1,1334-1352).
cgccctagctactatatgt

SEQ ID NO: 413524 - DNA, 19 bp, Homo sapiens
  siRNA target sequence for DKFZp727G131 (NM_145111.1,1335-1353).
gccctagctactatatgtt

SEQ ID NO: 413525 - DNA, 19 bp, Homo sapiens
  siRNA target sequence for DKFZp727G131 (NM_145111.1,1356-1374).
caacattattgcaacacat

SEQ ID NO: 413526 - DNA, 19 bp, Homo sapiens
  siRNA target sequence for DKFZp727G131 (NM_145111.1,1532-1550).
caaaacccagaatcaataa

SEQ ID NO: 413527 - DNA, 19 bp, Homo sapiens
  siRNA target sequence for DKFZp727G131 (NM_145111.1,1592-1610).
cagctcagttcatcattca

SEQ ID NO: 413528 - DNA, 19 bp, Homo sapiens
  siRNA target sequence for DKFZp727G131 (NM_145111.1,1599-1617).
gttcatcattcacactaaa

SEQ ID NO: 413529 - DNA, 19 bp, Homo sapiens
  siRNA target sequence for DKFZp727G131 (NM_145111.1,1646-1664).
gcattttggattaagatta

SEQ ID NO: 413530 - DNA, 19 bp, Homo sapiens
  siRNA target sequence for DKFZp727G131 (NM_145111.1,1681-1699).
gctaagtaggaagagtata

SEQ ID NO: 413531 - DNA, 19 bp, Homo sapiens
  siRNA target sequence for DKFZp727G131 (NM_145111.1,1693-1711).
gagtatattgctgttacta

SEQ ID NO: 413532 - DNA, 19 bp, Homo sapiens
  siRNA target sequence for DKFZp727G131 (NM_145111.1,1712-1730).
ccattcacaactacatatt

SEQ ID NO: 413533 - DNA, 19 bp, Homo sapiens
  siRNA target sequence for DKFZp727G131 (NM_145111.1,1739-1757).
ctaggattttcaatcttga

SEQ ID NO: 413534 - DNA, 19 bp, Homo sapiens
  siRNA target sequence for DKFZp727G131 (NM_145111.1,1777-1795).
gagaaataggctcaatagt

SEQ ID NO: 413535 - DNA, 19 bp, Homo sapiens
  siRNA target sequence for ZNF498 (NM_145115.1,1300-1318).
ccctgcctgacgaagtcaa

SEQ ID NO: 413536 - DNA, 19 bp, Homo sapiens
  siRNA target sequence for ZNF498 (NM_145115.1,1301-1319).
cctgcctgacgaagtcaaa

SEQ ID NO: 413537 - DNA, 19 bp, Homo sapiens
  siRNA target sequence for ZNF498 (NM_145115.1,1302-1320).
ctgcctgacgaagtcaaaa

SEQ ID NO: 413538 - DNA, 19 bp, Homo sapiens
  siRNA target sequence for ZNF498 (NM_145115.1,1409-1427).
ccacgaagagaagtcttat

SEQ ID NO: 413539 - DNA, 19 bp, Homo sapiens
  siRNA target sequence for C6orf83 (NM_145169.1,116-134).
gtttcaacaccagattgaa

SEQ ID NO: 413540 - DNA, 19 bp, Homo sapiens
  siRNA target sequence for C6orf83 (NM_145169.1,153-171).
cgtatgtggcgttttcttt

SEQ ID NO: 413541 - DNA, 19 bp, Homo sapiens
  siRNA target sequence for C6orf83 (NM_145169.1,207-225).
cggcataaagctttttgca

SEQ ID NO: 413542 - DNA, 19 bp, Homo sapiens
  siRNA target sequence for C6orf83 (NM_145169.1,250-268).
gctgcgttagccagtacat

SEQ ID NO: 413543 - DNA, 19 bp, Homo sapiens
  siRNA target sequence for C6orf83 (NM_145169.1,255-273).
gttagccagtacatgcttt

SEQ ID NO: 413544 - DNA, 19 bp, Homo sapiens
  siRNA target sequence for C6orf83 (NM_145169.1,259-277).
gccagtacatgctttttaa

SEQ ID NO: 413545 - DNA, 19 bp, Homo sapiens
  siRNA target sequence for C6orf83 (NM_145169.1,337-355).
gttatgcttttgtgtttca

SEQ ID NO: 413546 - DNA, 19 bp, Homo sapiens
  siRNA target sequence for C6orf83 (NM_145169.1,373-391).
gctctttggtggcataaga

SEQ ID NO: 413547 - DNA, 19 bp, Homo sapiens
  siRNA target sequence for C6orf83 (NM_145169.1,394-412).
ggactggctgtgttattct

SEQ ID NO: 413548 - DNA, 19 bp, Homo sapiens
  siRNA target sequence for C6orf83 (NM_145169.1,467-485).
caagggatgcagttattaa

SEQ ID NO: 413549 - DNA, 19 bp, Homo sapiens
  siRNA target sequence for C6orf83 (NM_145169.1,472-490).
gatgcagttattaaatgct

SEQ ID NO: 413550 - DNA, 19 bp, Homo sapiens
  siRNA target sequence for LOC118491 (NM_145170.2,158-176).
cgtgacagagggatatgat

SEQ ID NO: 413551 - DNA, 19 bp, Homo sapiens
  siRNA target sequence for LOC118491 (NM_145170.2,163-181).
cagagggatatgatttgaa

SEQ ID NO: 413552 - DNA, 19 bp, Homo sapiens
  siRNA target sequence for LOC118491 (NM_145170.2,193-211).
gagatactccagttacctt

SEQ ID NO: 413553 - DNA, 19 bp, Homo sapiens
  siRNA target sequence for LOC118491 (NM_145170.2,195-213).
gatactccagttaccttta

SEQ ID NO: 413554 - DNA, 19 bp, Homo sapiens
  siRNA target sequence for LOC118491 (NM_145170.2,208-226).
cctttattcgagcagaatt

SEQ ID NO: 413555 - DNA, 19 bp, Homo sapiens
  siRNA target sequence for LOC118491 (NM_145170.2,243-261).
ggagactctgcaaaaatta

SEQ ID NO: 413556 - DNA, 19 bp, Homo sapiens
  siRNA target sequence for LOC118491 (NM_145170.2,282-300).
gcaaaatacaacttcacta

SEQ ID NO: 413557 - DNA, 19 bp, Homo sapiens
  siRNA target sequence for LOC118491 (NM_145170.2,302-320).
cagttttgagtttaatcct

SEQ ID NO: 413558 - DNA, 19 bp, Homo sapiens
  siRNA target sequence for LOC118491 (NM_145170.2,465-483).
ggacagagttcatttcaaa

SEQ ID NO: 413559 - DNA, 19 bp, Homo sapiens
  siRNA target sequence for LOC118491 (NM_145170.2,507-525).
caaggctcacccttagaaa

SEQ ID NO: 413560 - DNA, 19 bp, Homo sapiens
  siRNA target sequence for LOC118491 (NM_145170.2,518-536).
cttagaaactcctagatca

SEQ ID NO: 413561 - DNA, 19 bp, Homo sapiens
  siRNA target sequence for LOC118491 (NM_145170.2,545-563).
gcagtgcagtcttgaagtt

SEQ ID NO: 413562 - DNA, 19 bp, Homo sapiens
  siRNA target sequence for LOC118491 (NM_145170.2,546-564).
cagtgcagtcttgaagtta

SEQ ID NO: 413563 - DNA, 19 bp, Homo sapiens
  siRNA target sequence for LOC118491 (NM_145170.2,548-566).
gtgcagtcttgaagttaaa

SEQ ID NO: 413564 - DNA, 19 bp, Homo sapiens
  siRNA target sequence for LOC118491 (NM_145170.2,602-620).
gatctcagggggcaatcta

SEQ ID NO: 413565 - DNA, 19 bp, Homo sapiens
  siRNA target sequence for LOC118491 (NM_145170.2,607-625).
cagggggcaatctactgaa

SEQ ID NO: 413566 - DNA, 19 bp, Homo sapiens
  siRNA target sequence for LOC118491 (NM_145170.2,675-693).
ggtcctgggcagaactaca

SEQ ID NO: 413567 - DNA, 19 bp, Homo sapiens
  siRNA target sequence for LOC118491 (NM_145170.2,676-694).
gtcctgggcagaactacat

SEQ ID NO: 413568 - DNA, 19 bp, Homo sapiens
  siRNA target sequence for LOC118491 (NM_145170.2,803-821).
gtggccaattgccaacatt

SEQ ID NO: 413569 - DNA, 19 bp, Homo sapiens
  siRNA target sequence for LOC118491 (NM_145170.2,805-823).
ggccaattgccaacattct

SEQ ID NO: 413570 - DNA, 19 bp, Homo sapiens
  siRNA target sequence for LOC118491 (NM_145170.2,822-840).
ctggctccaggagctaata

SEQ ID NO: 413571 - DNA, 19 bp, Homo sapiens
  siRNA target sequence for LOC118491 (NM_145170.2,903-921).
cctgaggacagcgaattta

SEQ ID NO: 413572 - DNA, 19 bp, Homo sapiens
  siRNA target sequence for LOC118491 (NM_145170.2,906-924).
gaggacagcgaatttagga

SEQ ID NO: 413573 - DNA, 19 bp, Homo sapiens
  siRNA target sequence for LOC118491 (NM_145170.2,908-926).
ggacagcgaatttaggaat

SEQ ID NO: 413574 - DNA, 19 bp, Homo sapiens
  siRNA target sequence for LOC118491 (NM_145170.2,911-929).
cagcgaatttaggaatcaa

SEQ ID NO: 413575 - DNA, 19 bp, Homo sapiens
  siRNA target sequence for LOC118491 (NM_145170.2,1030-1048).
ggctttggcctgtagagat

SEQ ID NO: 413576 - DNA, 19 bp, Homo sapiens
  siRNA target sequence for LOC118491 (NM_145170.2,1054-1072).
gagttcctctggtcactat

SEQ ID NO: 413577 - DNA, 19 bp, Homo sapiens
  siRNA target sequence for LOC118491 (NM_145170.2,1082-1100).
gaaagctggcaaaactgaa

SEQ ID NO: 413578 - DNA, 19 bp, Homo sapiens
  siRNA target sequence for LOC118491 (NM_145170.2,1134-1152).
ggtgtggcttatgttaata

SEQ ID NO: 413579 - DNA, 19 bp, Homo sapiens
  siRNA target sequence for LOC118491 (NM_145170.2,1183-1201).
gaattcggggagcttttca

SEQ ID NO: 413580 - DNA, 19 bp, Homo sapiens
  siRNA target sequence for LOC118491 (NM_145170.2,1188-1206).
cggggagcttttcatgttt

SEQ ID NO: 413581 - DNA, 19 bp, Homo sapiens
  siRNA target sequence for LOC118491 (NM_145170.2,1189-1207).
ggggagcttttcatgttta

SEQ ID NO: 413582 - DNA, 19 bp, Homo sapiens
  siRNA target sequence for LOC118491 (NM_145170.2,1218-1236).
gacagtgtagtccatgaaa

SEQ ID NO: 413583 - DNA, 19 bp, Homo sapiens
  siRNA target sequence for LOC118491 (NM_145170.2,1230-1248).
catgaaaagaccaaatgtt

SEQ ID NO: 413584 - DNA, 19 bp, Homo sapiens
  siRNA target sequence for LOC118491 (NM_145170.2,1253-1271).
gagcttgttccgggatatt

SEQ ID NO: 413585 - DNA, 19 bp, Homo sapiens
  siRNA target sequence for LOC118491 (NM_145170.2,1264-1282).
gggatattggccatcactt

SEQ ID NO: 413586 - DNA, 19 bp, Homo sapiens
  siRNA target sequence for LOC118491 (NM_145170.2,1273-1291).
gccatcacttgattcataa

SEQ ID NO: 413587 - DNA, 19 bp, Homo sapiens
  siRNA target sequence for LOC118491 (NM_145170.2,1274-1292).
ccatcacttgattcataat

SEQ ID NO: 413588 - DNA, 19 bp, Homo sapiens
  siRNA target sequence for LOC118491 (NM_145170.2,1275-1293).
catcacttgattcataata

SEQ ID NO: 413589 - DNA, 19 bp, Homo sapiens
  siRNA target sequence for LOC118491 (NM_145170.2,1322-1340).
gtccaaacaagctgtttct

SEQ ID NO: 413590 - DNA, 19 bp, Homo sapiens
  siRNA target sequence for LOC118491 (NM_145170.2,1324-1342).
ccaaacaagctgtttctaa

SEQ ID NO: 413591 - DNA, 19 bp, Homo sapiens
  siRNA target sequence for LOC118491 (NM_145170.2,1409-1427).
gcaggcacctagtataaaa

SEQ ID NO: 413592 - DNA, 19 bp, Homo sapiens
  siRNA target sequence for LOC118491 (NM_145170.2,1410-1428).
caggcacctagtataaaat

SEQ ID NO: 413593 - DNA, 19 bp, Homo sapiens
  siRNA target sequence for LOC118491 (NM_145170.2,1412-1430).
ggcacctagtataaaatct

SEQ ID NO: 413594 - DNA, 19 bp, Homo sapiens
  siRNA target sequence for LOC118491 (NM_145170.2,1414-1432).
cacctagtataaaatctca

SEQ ID NO: 413595 - DNA, 19 bp, Homo sapiens
  siRNA target sequence for LOC118491 (NM_145170.2,1456-1474).
gtgaaccccctctaagtca

SEQ ID NO: 413596 - DNA, 19 bp, Homo sapiens
  siRNA target sequence for LOC118491 (NM_145170.2,1503-1521).
gcagggacatacattgtgt

SEQ ID NO: 413597 - DNA, 19 bp, Homo sapiens
  siRNA target sequence for LOC118491 (NM_145170.2,1651-1669).
gtgactaccacatacagat

SEQ ID NO: 413598 - DNA, 19 bp, Homo sapiens
  siRNA target sequence for LOC118491 (NM_145170.2,1686-1704).
gccattctagatgaatact

SEQ ID NO: 413599 - DNA, 19 bp, Homo sapiens
  siRNA target sequence for LOC118491 (NM_145170.2,1692-1710).
ctagatgaatactacagaa

SEQ ID NO: 413600 - DNA, 19 bp, Homo sapiens
  siRNA target sequence for LOC118491 (NM_145170.2,1728-1746).
gccaaactggagagtgata

SEQ ID NO: 413601 - DNA, 19 bp, Homo sapiens
  siRNA target sequence for LOC118491 (NM_145170.2,1729-1747).
ccaaactggagagtgatat

SEQ ID NO: 413602 - DNA, 19 bp, Homo sapiens
  siRNA target sequence for LOC118491 (NM_145170.2,1842-1860).
gctgtggtaaagattgtga

SEQ ID NO: 413603 - DNA, 19 bp, Homo sapiens
  siRNA target sequence for LOC118491 (NM_145170.2,1848-1866).
gtaaagattgtgagagata

SEQ ID NO: 413604 - DNA, 19 bp, Homo sapiens
  siRNA target sequence for LOC118491 (NM_145170.2,1857-1875).
gtgagagataaatacttga

SEQ ID NO: 413605 - DNA, 19 bp, Homo sapiens
  siRNA target sequence for LOC118491 (NM_145170.2,1998-2016).
gttgcaaccatttatacaa

SEQ ID NO: 413606 - DNA, 19 bp, Homo sapiens
  siRNA target sequence for LOC118491 (NM_145170.2,2174-2192).
caaagcacaagagtgtttt

SEQ ID NO: 413607 - DNA, 19 bp, Homo sapiens
  siRNA target sequence for LOC118491 (NM_145170.2,2305-2323).
cttgcttggaaccaactaa

SEQ ID NO: 413608 - DNA, 19 bp, Homo sapiens
  siRNA target sequence for LOC118491 (NM_145170.2,2308-2326).
gcttggaaccaactaatgt

SEQ ID NO: 413609 - DNA, 19 bp, Homo sapiens
  siRNA target sequence for LOC118491 (NM_145170.2,2309-2327).
cttggaaccaactaatgtt

SEQ ID NO: 413610 - DNA, 19 bp, Homo sapiens
  siRNA target sequence for LOC118491 (NM_145170.2,2312-2330).
ggaaccaactaatgttgta

SEQ ID NO: 413611 - DNA, 19 bp, Homo sapiens
  siRNA target sequence for LOC118491 (NM_145170.2,2335-2353).
ggactttacttggtttgta

SEQ ID NO: 413612 - DNA, 19 bp, Homo sapiens
  siRNA target sequence for LOC118491 (NM_145170.2,2338-2356).
ctttacttggtttgtacta

SEQ ID NO: 413613 - DNA, 19 bp, Homo sapiens
  siRNA target sequence for LOC118491 (NM_145170.2,2364-2382).
caaaacaatgatattcgaa

SEQ ID NO: 413614 - DNA, 19 bp, Homo sapiens
  siRNA target sequence for LOC118491 (NM_145170.2,2430-2448).
cttcaggcacaagtaacaa

SEQ ID NO: 413615 - DNA, 19 bp, Homo sapiens
  siRNA target sequence for LOC118491 (NM_145170.2,2487-2505).
gggaagagagaatctagtt

SEQ ID NO: 413616 - DNA, 19 bp, Homo sapiens
  siRNA target sequence for LOC118491 (NM_145170.2,2508-2526).
ggcccttggggaatcacaa

SEQ ID NO: 413617 - DNA, 19 bp, Homo sapiens
  siRNA target sequence for LOC118491 (NM_145170.2,2568-2586).
ccaggagctgcattatcta

SEQ ID NO: 413618 - DNA, 19 bp, Homo sapiens
  siRNA target sequence for LOC118491 (NM_145170.2,2569-2587).
caggagctgcattatctat

SEQ ID NO: 413619 - DNA, 19 bp, Homo sapiens
  siRNA target sequence for LOC118491 (NM_145170.2,2572-2590).
gagctgcattatctattct

SEQ ID NO: 413620 - DNA, 19 bp, Homo sapiens
  siRNA target sequence for LOC118491 (NM_145170.2,2615-2633).
caaactgcagtctgattca

SEQ ID NO: 413621 - DNA, 19 bp, Homo sapiens
  siRNA target sequence for LOC118491 (NM_145170.2,2686-2704).
catctaacacatttatcaa

SEQ ID NO: 413622 - DNA, 19 bp, Homo sapiens
  siRNA target sequence for LOC118491 (NM_145170.2,2787-2805).
caaactaccaccatcttca

SEQ ID NO: 413623 - DNA, 19 bp, Homo sapiens
  siRNA target sequence for LOC118491 (NM_145170.2,2801-2819).
cttcatggagaccatacat

SEQ ID NO: 413624 - DNA, 19 bp, Homo sapiens
  siRNA target sequence for LOC118491 (NM_145170.2,2921-2939).
ggcccaaacacacattctt

SEQ ID NO: 413625 - DNA, 19 bp, Homo sapiens
  siRNA target sequence for LOC118491 (NM_145170.2,2922-2940).
gcccaaacacacattctta

SEQ ID NO: 413626 - DNA, 19 bp, Homo sapiens
  siRNA target sequence for LOC118491 (NM_145170.2,2933-2951).
cattcttaagaagaacttt

SEQ ID NO: 413627 - DNA, 19 bp, Homo sapiens
  siRNA target sequence for LOC118491 (NM_145170.2,2959-2977).
cagaggaataccttcaaca

SEQ ID NO: 413628 - DNA, 19 bp, Homo sapiens
  siRNA target sequence for LOC118491 (NM_145170.2,3017-3035).
cctgaagggccatctctat

SEQ ID NO: 413629 - DNA, 19 bp, Homo sapiens
  siRNA target sequence for LOC118491 (NM_145170.2,3018-3036).
ctgaagggccatctctatt

SEQ ID NO: 413630 - DNA, 19 bp, Homo sapiens
  siRNA target sequence for LOC118491 (NM_145170.2,3020-3038).
gaagggccatctctatttt

SEQ ID NO: 413631 - DNA, 19 bp, Homo sapiens
  siRNA target sequence for LOC118491 (NM_145170.2,3024-3042).
ggccatctctattttctga

SEQ ID NO: 413632 - DNA, 19 bp, Homo sapiens
  siRNA target sequence for LOC118491 (NM_145170.2,3106-3124).
ctgagatgcacttcatctt

SEQ ID NO: 413633 - DNA, 19 bp, Homo sapiens
  siRNA target sequence for LOC118491 (NM_145170.2,3130-3148).
gactggggctcatctatct

SEQ ID NO: 413634 - DNA, 19 bp, Homo sapiens
  siRNA target sequence for LOC118491 (NM_145170.2,3282-3300).
ctttctgaagccaatgcat

SEQ ID NO: 413635 - DNA, 19 bp, Homo sapiens
  siRNA target sequence for LOC118491 (NM_145170.2,3286-3304).
ctgaagccaatgcattgaa

SEQ ID NO: 413636 - DNA, 19 bp, Homo sapiens
  siRNA target sequence for LOC118491 (NM_145170.2,3292-3310).
ccaatgcattgaacaacta

SEQ ID NO: 413637 - DNA, 19 bp, Homo sapiens
  siRNA target sequence for LOC118491 (NM_145170.2,3316-3334).
ctgaagtatgggcatatct

SEQ ID NO: 413638 - DNA, 19 bp, Homo sapiens
  siRNA target sequence for LOC118491 (NM_145170.2,3337-3355).
ctctggtctgcctgaaagt

SEQ ID NO: 413639 - DNA, 19 bp, Homo sapiens
  siRNA target sequence for LOC118491 (NM_145170.2,3350-3368).
gaaagttggacggcaatta

SEQ ID NO: 413640 - DNA, 19 bp, Homo sapiens
  siRNA target sequence for LOC118491 (NM_145170.2,3373-3391).
ctgagcaggcctacaagta

SEQ ID NO: 413641 - DNA, 19 bp, Homo sapiens
  siRNA target sequence for LOC118491 (NM_145170.2,3378-3396).
caggcctacaagtacatga

SEQ ID NO: 413642 - DNA, 19 bp, Homo sapiens
  siRNA target sequence for NYD-SP29 (NM_145172.1,215-233).
cgtggcaaaaaaagactaa

SEQ ID NO: 413643 - DNA, 19 bp, Homo sapiens
  siRNA target sequence for NYD-SP29 (NM_145172.1,283-301).
catgggtcatccagaaatt

SEQ ID NO: 413644 - DNA, 19 bp, Homo sapiens
  siRNA target sequence for NYD-SP29 (NM_145172.1,318-336).
ccaccaagacccaagaaat

SEQ ID NO: 413645 - DNA, 19 bp, Homo sapiens
  siRNA target sequence for NYD-SP29 (NM_145172.1,319-337).
caccaagacccaagaaata

SEQ ID NO: 413646 - DNA, 19 bp, Homo sapiens
  siRNA target sequence for NYD-SP29 (NM_145172.1,343-361).
ctgccgaatagatgaagat

SEQ ID NO: 413647 - DNA, 19 bp, Homo sapiens
  siRNA target sequence for NYD-SP29 (NM_145172.1,345-363).
gccgaatagatgaagatgt

SEQ ID NO: 413648 - DNA, 19 bp, Homo sapiens
  siRNA target sequence for NYD-SP29 (NM_145172.1,371-389).
gaacaaccttataagctta

SEQ ID NO: 413649 - DNA, 19 bp, Homo sapiens
  siRNA target sequence for NYD-SP29 (NM_145172.1,445-463).
ccacccagtcaaaaaaatt

SEQ ID NO: 413650 - DNA, 19 bp, Homo sapiens
  siRNA target sequence for NYD-SP29 (NM_145172.1,514-532).
caaatatggacttaacttt

SEQ ID NO: 413651 - DNA, 19 bp, Homo sapiens
  siRNA target sequence for NYD-SP29 (NM_145172.1,521-539).
ggacttaacttttatctta

SEQ ID NO: 413652 - DNA, 19 bp, Homo sapiens
  siRNA target sequence for NYD-SP29 (NM_145172.1,644-662).
ccacctgtctctaaaccat

SEQ ID NO: 413653 - DNA, 19 bp, Homo sapiens
  siRNA target sequence for NYD-SP29 (NM_145172.1,702-720).
cagttacggaatctacaaa

SEQ ID NO: 413654 - DNA, 19 bp, Homo sapiens
  siRNA target sequence for NYD-SP29 (NM_145172.1,741-759).
ctcgaaaacgaagtgaatt

SEQ ID NO: 413655 - DNA, 19 bp, Homo sapiens
  siRNA target sequence for NYD-SP29 (NM_145172.1,761-779).
ggtgcaccaattaagttca

SEQ ID NO: 413656 - DNA, 19 bp, Homo sapiens
  siRNA target sequence for NYD-SP29 (NM_145172.1,785-803).
cagaatgcttccagtgtaa

SEQ ID NO: 413657 - DNA, 19 bp, Homo sapiens
  siRNA target sequence for NYD-SP29 (NM_145172.1,787-805).
gaatgcttccagtgtaaaa

SEQ ID NO: 413658 - DNA, 19 bp, Homo sapiens
  siRNA target sequence for NYD-SP29 (NM_145172.1,822-840).
gtacagcctacccagataa

SEQ ID NO: 413659 - DNA, 19 bp, Homo sapiens
  siRNA target sequence for NYD-SP29 (NM_145172.1,825-843).
cagcctacccagataaaaa

SEQ ID NO: 413660 - DNA, 19 bp, Homo sapiens
  siRNA target sequence for NYD-SP29 (NM_145172.1,880-898).
gcaagtaatcccccaaata

SEQ ID NO: 413661 - DNA, 19 bp, Homo sapiens
  siRNA target sequence for NYD-SP29 (NM_145172.1,950-968).
caatattatccaagagaat

SEQ ID NO: 413662 - DNA, 19 bp, Homo sapiens
  siRNA target sequence for NYD-SP29 (NM_145172.1,986-1004).
gagacactcaaacaatcaa

SEQ ID NO: 413663 - DNA, 19 bp, Homo sapiens
  siRNA target sequence for NYD-SP29 (NM_145172.1,1027-1045).
caatgcatccataagtgtt

SEQ ID NO: 413664 - DNA, 19 bp, Homo sapiens
  siRNA target sequence for NYD-SP29 (NM_145172.1,1031-1049).
gcatccataagtgttgaaa

SEQ ID NO: 413665 - DNA, 19 bp, Homo sapiens
  siRNA target sequence for NYD-SP29 (NM_145172.1,1137-1155).
ccgatacccacctgaaaga

SEQ ID NO: 413666 - DNA, 19 bp, Homo sapiens
  siRNA target sequence for NYD-SP29 (NM_145172.1,1183-1201).
cccaacggagaaaatgatt

SEQ ID NO: 413667 - DNA, 19 bp, Homo sapiens
  siRNA target sequence for NYD-SP29 (NM_145172.1,1212-1230).
catggcatccaactatcta

SEQ ID NO: 413668 - DNA, 19 bp, Homo sapiens
  siRNA target sequence for NYD-SP29 (NM_145172.1,1249-1267).
ggtagccgtgcgactttct

SEQ ID NO: 413669 - DNA, 19 bp, Homo sapiens
  siRNA target sequence for NYD-SP29 (NM_145172.1,1254-1272).
ccgtgcgactttcttttga

SEQ ID NO: 413670 - DNA, 19 bp, Homo sapiens
  siRNA target sequence for NYD-SP29 (NM_145172.1,1255-1273).
cgtgcgactttcttttgaa

SEQ ID NO: 413671 - DNA, 19 bp, Homo sapiens
  siRNA target sequence for NYD-SP29 (NM_145172.1,1306-1324).
gcagccatcactgattctt

SEQ ID NO: 413672 - DNA, 19 bp, Homo sapiens
  siRNA target sequence for NYD-SP29 (NM_145172.1,1307-1325).
cagccatcactgattcttt

SEQ ID NO: 413673 - DNA, 19 bp, Homo sapiens
  siRNA target sequence for NYD-SP29 (NM_145172.1,1330-1348).
gagcttctctgatcctata

SEQ ID NO: 413674 - DNA, 19 bp, Homo sapiens
  siRNA target sequence for NYD-SP29 (NM_145172.1,1343-1361).
cctatacatcctcagttaa

SEQ ID NO: 413675 - DNA, 19 bp, Homo sapiens
  siRNA target sequence for NYD-SP29 (NM_145172.1,1344-1362).
ctatacatcctcagttaat

SEQ ID NO: 413676 - DNA, 19 bp, Homo sapiens
  siRNA target sequence for NYD-SP29 (NM_145172.1,1399-1417).
ctgtccgagtgatcctaat

SEQ ID NO: 413677 - DNA, 19 bp, Homo sapiens
  siRNA target sequence for NYD-SP29 (NM_145172.1,1401-1419).
gtccgagtgatcctaatat

SEQ ID NO: 413678 - DNA, 19 bp, Homo sapiens
  siRNA target sequence for NYD-SP29 (NM_145172.1,1404-1422).
cgagtgatcctaatatcat

SEQ ID NO: 413679 - DNA, 19 bp, Homo sapiens
  siRNA target sequence for NYD-SP29 (NM_145172.1,1405-1423).
gagtgatcctaatatcatt

SEQ ID NO: 413680 - DNA, 19 bp, Homo sapiens
  siRNA target sequence for NYD-SP29 (NM_145172.1,1434-1452).
gtatcaatgggcagattgt

SEQ ID NO: 413681 - DNA, 19 bp, Homo sapiens
  siRNA target sequence for NYD-SP29 (NM_145172.1,1472-1490).
catgcagatcgcatagaaa

SEQ ID NO: 413682 - DNA, 19 bp, Homo sapiens
  siRNA target sequence for NYD-SP29 (NM_145172.1,1475-1493).
gcagatcgcatagaaaaca

SEQ ID NO: 413683 - DNA, 19 bp, Homo sapiens
  siRNA target sequence for NYD-SP29 (NM_145172.1,1525-1543).
cacactgaagcctatgttt

SEQ ID NO: 413684 - DNA, 19 bp, Homo sapiens
  siRNA target sequence for NYD-SP29 (NM_145172.1,1546-1564).
ccttgaaccggagagtaat

SEQ ID NO: 413685 - DNA, 19 bp, Homo sapiens
  siRNA target sequence for NYD-SP29 (NM_145172.1,1547-1565).
cttgaaccggagagtaata

SEQ ID NO: 413686 - DNA, 19 bp, Homo sapiens
  siRNA target sequence for NYD-SP29 (NM_145172.1,1586-1604).
cactgtgcagtctcttcaa

SEQ ID NO: 413687 - DNA, 19 bp, Homo sapiens
  siRNA target sequence for NYD-SP29 (NM_145172.1,1625-1643).
gtaattacagatatacact

SEQ ID NO: 413688 - DNA, 19 bp, Homo sapiens
  siRNA target sequence for NYD-SP29 (NM_145172.1,1642-1660).
ctggttgtctgacacattt

SEQ ID NO: 413689 - DNA, 19 bp, Homo sapiens
  siRNA target sequence for NYD-SP29 (NM_145172.1,1644-1662).
ggttgtctgacacatttga

SEQ ID NO: 413690 - DNA, 19 bp, Homo sapiens
  siRNA target sequence for NYD-SP29 (NM_145172.1,1648-1666).
gtctgacacatttgagatt

SEQ ID NO: 413691 - DNA, 19 bp, Homo sapiens
  siRNA target sequence for NYD-SP29 (NM_145172.1,1671-1689).
gaatgggctccgtctttga

SEQ ID NO: 413692 - DNA, 19 bp, Homo sapiens
  siRNA target sequence for NYD-SP29 (NM_145172.1,1675-1693).
gggctccgtctttgagaat

SEQ ID NO: 413693 - DNA, 19 bp, Homo sapiens
  siRNA target sequence for NYD-SP29 (NM_145172.1,1701-1719).
gaatatgctgtcaacttgt

SEQ ID NO: 413694 - DNA, 19 bp, Homo sapiens
  siRNA target sequence for NYD-SP29 (NM_145172.1,1731-1749).
cagattgcacaatatgttt

SEQ ID NO: 413695 - DNA, 19 bp, Homo sapiens
  siRNA target sequence for NYD-SP29 (NM_145172.1,1753-1771).
ggatattagaccacagaaa

SEQ ID NO: 413696 - DNA, 19 bp, Homo sapiens
  siRNA target sequence for NYD-SP29 (NM_145172.1,1808-1826).
gaaagtattgaaattcctt

SEQ ID NO: 413697 - DNA, 19 bp, Homo sapiens
  siRNA target sequence for NYD-SP29 (NM_145172.1,1891-1909).
gtccaagggtgaaacaagt

SEQ ID NO: 413698 - DNA, 19 bp, Homo sapiens
  siRNA target sequence for NYD-SP29 (NM_145172.1,1893-1911).
ccaagggtgaaacaagttt

SEQ ID NO: 413699 - DNA, 19 bp, Homo sapiens
  siRNA target sequence for NYD-SP29 (NM_145172.1,1916-1934).
cactgtccaaccaagataa

SEQ ID NO: 413700 - DNA, 19 bp, Homo sapiens
  siRNA target sequence for NYD-SP29 (NM_145172.1,2009-2027).
gaaatgaacccgtatcata

SEQ ID NO: 413701 - DNA, 19 bp, Homo sapiens
  siRNA target sequence for NYD-SP29 (NM_145172.1,2037-2055).
gtgggatggccaatcttct

SEQ ID NO: 413702 - DNA, 19 bp, Homo sapiens
  siRNA target sequence for NYD-SP29 (NM_145172.1,2040-2058).
ggatggccaatcttctcaa

SEQ ID NO: 413703 - DNA, 19 bp, Homo sapiens
  siRNA target sequence for NYD-SP29 (NM_145172.1,2097-2115).
cagaggaaggcgaagtgat

SEQ ID NO: 413704 - DNA, 19 bp, Homo sapiens
  siRNA target sequence for NYD-SP29 (NM_145172.1,2099-2117).
gaggaaggcgaagtgatat

SEQ ID NO: 413705 - DNA, 19 bp, Homo sapiens
  siRNA target sequence for NYD-SP29 (NM_145172.1,2102-2120).
gaaggcgaagtgatataca

SEQ ID NO: 413706 - DNA, 19 bp, Homo sapiens
  siRNA target sequence for NYD-SP29 (NM_145172.1,2113-2131).
gatatacacagattggaaa

SEQ ID NO: 413707 - DNA, 19 bp, Homo sapiens
  siRNA target sequence for NYD-SP29 (NM_145172.1,2145-2163).
ctgaaactggccgacttat

SEQ ID NO: 413708 - DNA, 19 bp, Homo sapiens
  siRNA target sequence for NYD-SP29 (NM_145172.1,2153-2171).
ggccgacttatgtcaaaga

SEQ ID NO: 413709 - DNA, 19 bp, Homo sapiens
  siRNA target sequence for NYD-SP29 (NM_145172.1,2154-2172).
gccgacttatgtcaaagaa

SEQ ID NO: 413710 - DNA, 19 bp, Homo sapiens
  siRNA target sequence for NYD-SP29 (NM_145172.1,2200-2218).
cggaactgtccacactatt

SEQ ID NO: 413711 - DNA, 19 bp, Homo sapiens
  siRNA target sequence for NYD-SP29 (NM_145172.1,2202-2220).
gaactgtccacactattca

SEQ ID NO: 413712 - DNA, 19 bp, Homo sapiens
  siRNA target sequence for NYD-SP29 (NM_145172.1,2219-2237).
cagagatcacctttctaca

SEQ ID NO: 413713 - DNA, 19 bp, Homo sapiens
  siRNA target sequence for NYD-SP29 (NM_145172.1,2229-2247).
ctttctacaacgacattat

SEQ ID NO: 413714 - DNA, 19 bp, Homo sapiens
  siRNA target sequence for NYD-SP29 (NM_145172.1,2319-2337).
gctgtgcaccaaaaaggta

SEQ ID NO: 413715 - DNA, 19 bp, Homo sapiens
  siRNA target sequence for NYD-SP29 (NM_145172.1,2466-2484).
ctatgatcacctacatcaa

SEQ ID NO: 413716 - DNA, 19 bp, Homo sapiens
  siRNA target sequence for NYD-SP29 (NM_145172.1,2490-2508).
ggatcttttcttctaaaca

SEQ ID NO: 413717 - DNA, 19 bp, Homo sapiens
  siRNA target sequence for NYD-SP29 (NM_145172.1,2521-2539).
cacagctgattattatgga

SEQ ID NO: 413718 - DNA, 19 bp, Homo sapiens
  siRNA target sequence for NYD-SP29 (NM_145172.1,2538-2556).
gaacactgcatatattaga

SEQ ID NO: 413719 - DNA, 19 bp, Homo sapiens
  siRNA target sequence for NYD-SP29 (NM_145172.1,2541-2559).
cactgcatatattagaaat

SEQ ID NO: 413720 - DNA, 19 bp, Homo sapiens
  siRNA target sequence for NYD-SP29 (NM_145172.1,2597-2615).
gcaagtgtcaaccactatt

SEQ ID NO: 413721 - DNA, 19 bp, Homo sapiens
  siRNA target sequence for NYD-SP29 (NM_145172.1,2598-2616).
caagtgtcaaccactattt

SEQ ID NO: 413722 - DNA, 19 bp, Homo sapiens
  siRNA target sequence for NYD-SP29 (NM_145172.1,2605-2623).
caaccactattttgaaaga

SEQ ID NO: 413723 - DNA, 19 bp, Homo sapiens
  siRNA target sequence for NYD-SP29 (NM_145172.1,2644-2662).
cgtagaacagcgcaaaaaa

SEQ ID NO: 413724 - DNA, 19 bp, Homo sapiens
  siRNA target sequence for NYD-SP29 (NM_145172.1,2645-2663).
gtagaacagcgcaaaaaaa

SEQ ID NO: 413725 - DNA, 19 bp, Homo sapiens
  siRNA target sequence for NYD-SP29 (NM_145172.1,2741-2759).
caaatgcaggctgaattaa

SEQ ID NO: 413726 - DNA, 19 bp, Homo sapiens
  siRNA target sequence for DNAJB7 (NM_145174.1,172-190).
gcttcacctgaggacatta

SEQ ID NO: 413727 - DNA, 19 bp, Homo sapiens
  siRNA target sequence for DNAJB7 (NM_145174.1,281-299).
ctgaggcatacgaggtatt

SEQ ID NO: 413728 - DNA, 19 bp, Homo sapiens
  siRNA target sequence for DNAJB7 (NM_145174.1,283-301).
gaggcatacgaggtattat

SEQ ID NO: 413729 - DNA, 19 bp, Homo sapiens
  siRNA target sequence for DNAJB7 (NM_145174.1,285-303).
ggcatacgaggtattatca

SEQ ID NO: 413730 - DNA, 19 bp, Homo sapiens
  siRNA target sequence for DNAJB7 (NM_145174.1,286-304).
gcatacgaggtattatcaa

SEQ ID NO: 413731 - DNA, 19 bp, Homo sapiens
  siRNA target sequence for DNAJB7 (NM_145174.1,287-305).
catacgaggtattatcaaa

SEQ ID NO: 413732 - DNA, 19 bp, Homo sapiens
  siRNA target sequence for DNAJB7 (NM_145174.1,291-309).
cgaggtattatcaaatgat

SEQ ID NO: 413733 - DNA, 19 bp, Homo sapiens
  siRNA target sequence for DNAJB7 (NM_145174.1,383-401).
gtgagtacggcttcacatt

SEQ ID NO: 413734 - DNA, 19 bp, Homo sapiens
  siRNA target sequence for DNAJB7 (NM_145174.1,387-405).
gtacggcttcacattccat

SEQ ID NO: 413735 - DNA, 19 bp, Homo sapiens
  siRNA target sequence for DNAJB7 (NM_145174.1,527-545).
gagatgcaggatacttttt

SEQ ID NO: 413736 - DNA, 19 bp, Homo sapiens
  siRNA target sequence for DNAJB7 (NM_145174.1,529-547).
gatgcaggatactttttct

SEQ ID NO: 413737 - DNA, 19 bp, Homo sapiens
  siRNA target sequence for DNAJB7 (NM_145174.1,549-567).
cactgccagtgaatatcca

SEQ ID NO: 413738 - DNA, 19 bp, Homo sapiens
  siRNA target sequence for DNAJB7 (NM_145174.1,668-686).
gtgggatggacaactacat

SEQ ID NO: 413739 - DNA, 19 bp, Homo sapiens
  siRNA target sequence for DNAJB7 (NM_145174.1,678-696).
caactacatatctgttaca

SEQ ID NO: 413740 - DNA, 19 bp, Homo sapiens
  siRNA target sequence for DNAJB7 (NM_145174.1,695-713).
caacttcagacaaaatcgt

SEQ ID NO: 413741 - DNA, 19 bp, Homo sapiens
  siRNA target sequence for DNAJB7 (NM_145174.1,711-729).
cgttaatggcagaaatatt

SEQ ID NO: 413742 - DNA, 19 bp, Homo sapiens
  siRNA target sequence for DNAJB7 (NM_145174.1,848-866).
ggagaacacagtcattcaa

SEQ ID NO: 413743 - DNA, 19 bp, Homo sapiens
  siRNA target sequence for DNAJB7 (NM_145174.1,854-872).
cacagtcattcaacaacta

SEQ ID NO: 413744 - DNA, 19 bp, Homo sapiens
  siRNA target sequence for DNAJB7 (NM_145174.1,890-908).
gctccaaacatgtatctca

SEQ ID NO: 413745 - DNA, 19 bp, Homo sapiens
  siRNA target sequence for DNAJB7 (NM_145174.1,893-911).
ccaaacatgtatctcaata

SEQ ID NO: 413746 - DNA, 19 bp, Homo sapiens
  siRNA target sequence for DNAJB7 (NM_145174.1,894-912).
caaacatgtatctcaatat

SEQ ID NO: 413747 - DNA, 19 bp, Homo sapiens
  siRNA target sequence for DNAJB7 (NM_145174.1,924-942).
caatgatgagggaggtata

SEQ ID NO: 413748 - DNA, 19 bp, Homo sapiens
  siRNA target sequence for DNAJB7 (NM_145174.1,1021-1039).
cgtaaagaggtgcaaaaga

SEQ ID NO: 413749 - DNA, 19 bp, Homo sapiens
  siRNA target sequence for DNAJB7 (NM_145174.1,1032-1050).
gcaaaagaagtctaccaaa

SEQ ID NO: 413750 - DNA, 19 bp, Homo sapiens
  siRNA target sequence for DNAJB7 (NM_145174.1,1041-1059).
gtctaccaaaaggaattgt

SEQ ID NO: 413751 - DNA, 19 bp, Homo sapiens
  siRNA target sequence for NSE1 (NM_145175.1,299-317).
ggacccgtcggggattgaa

SEQ ID NO: 413752 - DNA, 19 bp, Homo sapiens
  siRNA target sequence for NSE1 (NM_145175.1,300-318).
gacccgtcggggattgaaa

SEQ ID NO: 413753 - DNA, 19 bp, Homo sapiens
  siRNA target sequence for NSE1 (NM_145175.1,304-322).
cgtcggggattgaaaagga

SEQ ID NO: 413754 - DNA, 19 bp, Homo sapiens
  siRNA target sequence for NSE1 (NM_145175.1,333-351).
gtcggggttgcctacttct

SEQ ID NO: 413755 - DNA, 19 bp, Homo sapiens
  siRNA target sequence for NSE1 (NM_145175.1,336-354).
ggggttgcctacttcttct

SEQ ID NO: 413756 - DNA, 19 bp, Homo sapiens
  siRNA target sequence for NSE1 (NM_145175.1,1005-1023).
cacaccgccaggtttcaca

SEQ ID NO: 413757 - DNA, 19 bp, Homo sapiens
  siRNA target sequence for ATOH7 (NM_145178.2,626-644).
cagtggggccaggataaaa

SEQ ID NO: 413758 - DNA, 19 bp, Homo sapiens
  siRNA target sequence for ATOH7 (NM_145178.2,630-648).
ggggccaggataaaaagct

SEQ ID NO: 413759 - DNA, 19 bp, Homo sapiens
  siRNA target sequence for C21orf93 (NM_145179.1,910-928).
ccatccccgcacatggaaa

SEQ ID NO: 413760 - DNA, 19 bp, Homo sapiens
  siRNA target sequence for C21orf93 (NM_145179.1,970-988).
ccgacacgcaccaagacat

SEQ ID NO: 413761 - DNA, 19 bp, Homo sapiens
  siRNA target sequence for C21orf94 (NM_145180.2,123-141).
cctggaagactgtatggaa

SEQ ID NO: 413762 - DNA, 19 bp, Homo sapiens
  siRNA target sequence for C21orf94 (NM_145180.2,221-239).
catttggtctgtgtatata

SEQ ID NO: 413763 - DNA, 19 bp, Homo sapiens
  siRNA target sequence for PP3856 (NM_145201.3,121-139).
ccgagttcgagctcttctt

SEQ ID NO: 413764 - DNA, 19 bp, Homo sapiens
  siRNA target sequence for PP3856 (NM_145201.3,1113-1131).
ggcagtgaggtgaatgtca

SEQ ID NO: 413765 - DNA, 19 bp, Homo sapiens
  siRNA target sequence for PP3856 (NM_145201.3,1174-1192).
ccctgggtggcgtctataa

SEQ ID NO: 413766 - DNA, 19 bp, Homo sapiens
  siRNA target sequence for MBD3L1 (NM_145208.1,51-69).
cgtgactgtgtaaaccaat

SEQ ID NO: 413767 - DNA, 19 bp, Homo sapiens
  siRNA target sequence for MBD3L1 (NM_145208.1,107-125).
gagaatgtccagttacaca

SEQ ID NO: 413768 - DNA, 19 bp, Homo sapiens
  siRNA target sequence for MBD3L1 (NM_145208.1,131-149).
gaggccagtaacgagaatt

SEQ ID NO: 413769 - DNA, 19 bp, Homo sapiens
  siRNA target sequence for MBD3L1 (NM_145208.1,134-152).
gccagtaacgagaattaca

SEQ ID NO: 413770 - DNA, 19 bp, Homo sapiens
  siRNA target sequence for MBD3L1 (NM_145208.1,400-418).
cagatgcggtggagataat

SEQ ID NO: 413771 - DNA, 19 bp, Homo sapiens
  siRNA target sequence for MBD3L1 (NM_145208.1,544-562).
cggatggactcgctaatga

SEQ ID NO: 413772 - DNA, 19 bp, Homo sapiens
  siRNA target sequence for FANK1 (NM_145235.2,171-189).
cacagcattgaattatact

SEQ ID NO: 413773 - DNA, 19 bp, Homo sapiens
  siRNA target sequence for FANK1 (NM_145235.2,236-254).
gttcaggttctcgattgaa

SEQ ID NO: 413774 - DNA, 19 bp, Homo sapiens
  siRNA target sequence for FANK1 (NM_145235.2,239-257).
caggttctcgattgaagaa

SEQ ID NO: 413775 - DNA, 19 bp, Homo sapiens
  siRNA target sequence for FANK1 (NM_145235.2,242-260).
gttctcgattgaagaagaa

SEQ ID NO: 413776 - DNA, 19 bp, Homo sapiens
  siRNA target sequence for FANK1 (NM_145235.2,272-290).
gcacacttatggtatcatt

SEQ ID NO: 413777 - DNA, 19 bp, Homo sapiens
  siRNA target sequence for FANK1 (NM_145235.2,273-291).
cacacttatggtatcattt

SEQ ID NO: 413778 - DNA, 19 bp, Homo sapiens
  siRNA target sequence for FANK1 (NM_145235.2,287-305).
catttatacgggatatgca

SEQ ID NO: 413779 - DNA, 19 bp, Homo sapiens
  siRNA target sequence for FANK1 (NM_145235.2,304-322).
caacgaagcatgttgttga

SEQ ID NO: 413780 - DNA, 19 bp, Homo sapiens
  siRNA target sequence for FANK1 (NM_145235.2,333-351).
ccaaggacgctgtacagat

SEQ ID NO: 413781 - DNA, 19 bp, Homo sapiens
  siRNA target sequence for FANK1 (NM_145235.2,334-352).
caaggacgctgtacagatt

SEQ ID NO: 413782 - DNA, 19 bp, Homo sapiens
  siRNA target sequence for FANK1 (NM_145235.2,399-417).
ctcgtctcagtgtctacaa

SEQ ID NO: 413783 - DNA, 19 bp, Homo sapiens
  siRNA target sequence for FANK1 (NM_145235.2,513-531).
gttgatgttcccaataagt

SEQ ID NO: 413784 - DNA, 19 bp, Homo sapiens
  siRNA target sequence for FANK1 (NM_145235.2,579-597).
cttgtgaaaatcctagttt

SEQ ID NO: 413785 - DNA, 19 bp, Homo sapiens
  siRNA target sequence for FANK1 (NM_145235.2,582-600).
gtgaaaatcctagtttcta

SEQ ID NO: 413786 - DNA, 19 bp, Homo sapiens
  siRNA target sequence for FANK1 (NM_145235.2,603-621).
ggcacagacgtgaatctga

SEQ ID NO: 413787 - DNA, 19 bp, Homo sapiens
  siRNA target sequence for FANK1 (NM_145235.2,604-622).
gcacagacgtgaatctgaa

SEQ ID NO: 413788 - DNA, 19 bp, Homo sapiens
  siRNA target sequence for FANK1 (NM_145235.2,634-652).
gcaaggacagtctaatgct

SEQ ID NO: 413789 - DNA, 19 bp, Homo sapiens
  siRNA target sequence for FANK1 (NM_145235.2,664-682).
cgggacacctagatgttgt

SEQ ID NO: 413790 - DNA, 19 bp, Homo sapiens
  siRNA target sequence for FANK1 (NM_145235.2,667-685).
gacacctagatgttgtgaa

SEQ ID NO: 413791 - DNA, 19 bp, Homo sapiens
  siRNA target sequence for FANK1 (NM_145235.2,671-689).
cctagatgttgtgaaatat

SEQ ID NO: 413792 - DNA, 19 bp, Homo sapiens
  siRNA target sequence for FANK1 (NM_145235.2,683-701).
gaaatatctccgaagacat

SEQ ID NO: 413793 - DNA, 19 bp, Homo sapiens
  siRNA target sequence for FANK1 (NM_145235.2,859-877).
ctgcggtgtcgggaaatca

SEQ ID NO: 413794 - DNA, 19 bp, Homo sapiens
  siRNA target sequence for FANK1 (NM_145235.2,861-879).
gcggtgtcgggaaatcaga

SEQ ID NO: 413795 - DNA, 19 bp, Homo sapiens
  siRNA target sequence for FANK1 (NM_145235.2,880-898).
gggtggcctctcttctaat

SEQ ID NO: 413796 - DNA, 19 bp, Homo sapiens
  siRNA target sequence for FANK1 (NM_145235.2,881-899).
ggtggcctctcttctaatt

SEQ ID NO: 413797 - DNA, 19 bp, Homo sapiens
  siRNA target sequence for FANK1 (NM_145235.2,937-955).
gaaagacgccccttatggt

SEQ ID NO: 413798 - DNA, 19 bp, Homo sapiens
  siRNA target sequence for FANK1 (NM_145235.2,948-966).
cttatggtggctgtgttaa

SEQ ID NO: 413799 - DNA, 19 bp, Homo sapiens
  siRNA target sequence for FANK1 (NM_145235.2,956-974).
ggctgtgttaaataatcat

SEQ ID NO: 413800 - DNA, 19 bp, Homo sapiens
  siRNA target sequence for FANK1 (NM_145235.2,980-998).
gttagttcagttacttctt

SEQ ID NO: 413801 - DNA, 19 bp, Homo sapiens
  siRNA target sequence for FANK1 (NM_145235.2,1006-1024).
gggcagatgcaagtgtaaa

SEQ ID NO: 413802 - DNA, 19 bp, Homo sapiens
  siRNA target sequence for FANK1 (NM_145235.2,1036-1054).
gcaaaggtgtcctagaaat

SEQ ID NO: 413803 - DNA, 19 bp, Homo sapiens
  siRNA target sequence for FANK1 (NM_145235.2,1076-1094).
gagtgtagtctccttatta

SEQ ID NO: 413804 - DNA, 19 bp, Homo sapiens
  siRNA target sequence for FANK1 (NM_145235.2,1078-1096).
gtgtagtctccttattaga

SEQ ID NO: 413805 - DNA, 19 bp, Homo sapiens
  siRNA target sequence for FANK1 (NM_145235.2,1113-1131).
cagaggccaaagaagtctt

SEQ ID NO: 413806 - DNA, 19 bp, Homo sapiens
  siRNA target sequence for LOC112476 (NM_145239.1,461-479).
gcccaggaggggaatcaaa

SEQ ID NO: 413807 - DNA, 19 bp, Homo sapiens
  siRNA target sequence for LOC112476 (NM_145239.1,711-729).
gagtgtaggggaaaagcaa

SEQ ID NO: 413808 - DNA, 19 bp, Homo sapiens
  siRNA target sequence for LOC112476 (NM_145239.1,1047-1065).
cgtggccttcgcttatgct

SEQ ID NO: 413809 - DNA, 19 bp, Homo sapiens
  siRNA target sequence for LOC112476 (NM_145239.1,1123-1141).
cgggtagccaagctcttaa

SEQ ID NO: 413810 - DNA, 19 bp, Homo sapiens
  siRNA target sequence for LOC112476 (NM_145239.1,1126-1144).
gtagccaagctcttaagca

SEQ ID NO: 413811 - DNA, 19 bp, Homo sapiens
  siRNA target sequence for LOC112476 (NM_145239.1,1182-1200).
ctcctgcgtcatcaactta

SEQ ID NO: 413812 - DNA, 19 bp, Homo sapiens
  siRNA target sequence for LOC115265 (NM_145244.2,207-225).
gttgcaactggcagtttga

SEQ ID NO: 413813 - DNA, 19 bp, Homo sapiens
  siRNA target sequence for LOC115265 (NM_145244.2,302-320).
ctactgggattatgttgtt

SEQ ID NO: 413814 - DNA, 19 bp, Homo sapiens
  siRNA target sequence for LOC115265 (NM_145244.2,328-346).
ccaacctcaacgaggtaat

SEQ ID NO: 413815 - DNA, 19 bp, Homo sapiens
  siRNA target sequence for LOC115265 (NM_145244.2,329-347).
caacctcaacgaggtaata

SEQ ID NO: 413816 - DNA, 19 bp, Homo sapiens
  siRNA target sequence for LOC115265 (NM_145244.2,332-350).
cctcaacgaggtaatattt

SEQ ID NO: 413817 - DNA, 19 bp, Homo sapiens
  siRNA target sequence for LOC115265 (NM_145244.2,354-372).
gaatcaacttgccagaatt

SEQ ID NO: 413818 - DNA, 19 bp, Homo sapiens
  siRNA target sequence for LOC115265 (NM_145244.2,387-405).
gagaactgtctgtccaaat

SEQ ID NO: 413819 - DNA, 19 bp, Homo sapiens
  siRNA target sequence for LOC115265 (NM_145244.2,434-452).
ggtccttgtccctgagaaa

SEQ ID NO: 413820 - DNA, 19 bp, Homo sapiens
  siRNA target sequence for LOC115265 (NM_145244.2,438-456).
cttgtccctgagaaactga

SEQ ID NO: 413821 - DNA, 19 bp, Homo sapiens
  siRNA target sequence for LOC115265 (NM_145244.2,458-476).
ccagagaattgctcaagat

SEQ ID NO: 413822 - DNA, 19 bp, Homo sapiens
  siRNA target sequence for LOC115265 (NM_145244.2,506-524).
cggcttgcgaggttgtgtt

SEQ ID NO: 413823 - DNA, 19 bp, Homo sapiens
  siRNA target sequence for LOC115265 (NM_145244.2,507-525).
ggcttgcgaggttgtgtta

SEQ ID NO: 413824 - DNA, 19 bp, Homo sapiens
  siRNA target sequence for LOC115265 (NM_145244.2,508-526).
gcttgcgaggttgtgttat

SEQ ID NO: 413825 - DNA, 19 bp, Homo sapiens
  siRNA target sequence for LOC115265 (NM_145244.2,520-538).
gtgttatgcacgtgaactt

SEQ ID NO: 413826 - DNA, 19 bp, Homo sapiens
  siRNA target sequence for LOC115265 (NM_145244.2,527-545).
gcacgtgaacttggaaatt

SEQ ID NO: 413827 - DNA, 19 bp, Homo sapiens
  siRNA target sequence for LOC115265 (NM_145244.2,556-574).
gtaaaaagctggataggat

SEQ ID NO: 413828 - DNA, 19 bp, Homo sapiens
  siRNA target sequence for LOC115265 (NM_145244.2,586-604).
ctagcgtcgtacctacttt

SEQ ID NO: 413829 - DNA, 19 bp, Homo sapiens
  siRNA target sequence for LOC115265 (NM_145244.2,589-607).
gcgtcgtacctacttttga

SEQ ID NO: 413830 - DNA, 19 bp, Homo sapiens
  siRNA target sequence for LOC115265 (NM_145244.2,646-664).
ctagcttcagggacttttt

SEQ ID NO: 413831 - DNA, 19 bp, Homo sapiens
  siRNA target sequence for LOC115265 (NM_145244.2,653-671).
cagggactttttctttagt

SEQ ID NO: 413832 - DNA, 19 bp, Homo sapiens
  siRNA target sequence for LOC115265 (NM_145244.2,716-734).
ctcaggatttcgacttgtt

SEQ ID NO: 413833 - DNA, 19 bp, Homo sapiens
  siRNA target sequence for LOC115265 (NM_145244.2,718-736).
caggatttcgacttgttaa

SEQ ID NO: 413834 - DNA, 19 bp, Homo sapiens
  siRNA target sequence for C10orf4 (NM_145246.2,291-309).
cttactgctccaaaaacca

SEQ ID NO: 413835 - DNA, 19 bp, Homo sapiens
  siRNA target sequence for C10orf4 (NM_145246.2,392-410).
ggtttcatctcatagctat

SEQ ID NO: 413836 - DNA, 19 bp, Homo sapiens
  siRNA target sequence for C10orf4 (NM_145246.2,406-424).
gctatggatgcttatcaaa

SEQ ID NO: 413837 - DNA, 19 bp, Homo sapiens
  siRNA target sequence for C10orf4 (NM_145246.2,435-453).
gttcgtaaatgactatatt

SEQ ID NO: 413838 - DNA, 19 bp, Homo sapiens
  siRNA target sequence for C10orf4 (NM_145246.2,464-482).
gtggcaaaaaagaagactt

SEQ ID NO: 413839 - DNA, 19 bp, Homo sapiens
  siRNA target sequence for C10orf4 (NM_145246.2,483-501).
caagcgtttgggggaaaat

SEQ ID NO: 413840 - DNA, 19 bp, Homo sapiens
  siRNA target sequence for C10orf4 (NM_145246.2,507-525).
gacagacttggatgttata

SEQ ID NO: 413841 - DNA, 19 bp, Homo sapiens
  siRNA target sequence for C10orf4 (NM_145246.2,529-547).
gaaaatcatagattcctat

SEQ ID NO: 413842 - DNA, 19 bp, Homo sapiens
  siRNA target sequence for C10orf4 (NM_145246.2,578-596).
gggagaagagacttgctaa

SEQ ID NO: 413843 - DNA, 19 bp, Homo sapiens
  siRNA target sequence for C10orf4 (NM_145246.2,587-605).
gacttgctaagaaatacta

SEQ ID NO: 413844 - DNA, 19 bp, Homo sapiens
  siRNA target sequence for C10orf4 (NM_145246.2,808-826).
gcacttgttaaattaaggt

SEQ ID NO: 413845 - DNA, 19 bp, Homo sapiens
  siRNA target sequence for C10orf4 (NM_145246.2,809-827).
cacttgttaaattaaggtt

SEQ ID NO: 413846 - DNA, 19 bp, Homo sapiens
  siRNA target sequence for C10orf4 (NM_145246.2,917-935).
gtgaagagtcatcacataa

SEQ ID NO: 413847 - DNA, 19 bp, Homo sapiens
  siRNA target sequence for C10orf4 (NM_145246.2,1009-1027).
gaagattctctacttagaa

SEQ ID NO: 413848 - DNA, 19 bp, Homo sapiens
  siRNA target sequence for LOC119392 (NM_145247.3,630-648).
gagcaagaatgaattacaa

SEQ ID NO: 413849 - DNA, 19 bp, Homo sapiens
  siRNA target sequence for LOC119392 (NM_145247.3,633-651).
caagaatgaattacaaagt

SEQ ID NO: 413850 - DNA, 19 bp, Homo sapiens
  siRNA target sequence for LOC119392 (NM_145247.3,683-701).
gatgctttgtacaccaata

SEQ ID NO: 413851 - DNA, 19 bp, Homo sapiens
  siRNA target sequence for LOC119392 (NM_145247.3,687-705).
ctttgtacaccaatacaat

SEQ ID NO: 413852 - DNA, 19 bp, Homo sapiens
  siRNA target sequence for LOC119392 (NM_145247.3,715-733).
gataaaagtcgactataga

SEQ ID NO: 413853 - DNA, 19 bp, Homo sapiens
  siRNA target sequence for LOC119392 (NM_145247.3,734-752).
gaggtgtggttaattcgat

SEQ ID NO: 413854 - DNA, 19 bp, Homo sapiens
  siRNA target sequence for LOC119392 (NM_145247.3,736-754).
ggtgtggttaattcgatta

SEQ ID NO: 413855 - DNA, 19 bp, Homo sapiens
  siRNA target sequence for LOC119392 (NM_145247.3,737-755).
gtgtggttaattcgattat

SEQ ID NO: 413856 - DNA, 19 bp, Homo sapiens
  siRNA target sequence for LOC119392 (NM_145247.3,778-796).
gaaaaaccaagatttcact

SEQ ID NO: 413857 - DNA, 19 bp, Homo sapiens
  siRNA target sequence for LOC119392 (NM_145247.3,885-903).
gttcccgaaaacaacctat

SEQ ID NO: 413858 - DNA, 19 bp, Homo sapiens
  siRNA target sequence for LOC119392 (NM_145247.3,899-917).
cctatgagtgcaacactta

SEQ ID NO: 413859 - DNA, 19 bp, Homo sapiens
  siRNA target sequence for LOC119392 (NM_145247.3,904-922).
gagtgcaacacttagagaa

SEQ ID NO: 413860 - DNA, 19 bp, Homo sapiens
  siRNA target sequence for LOC119392 (NM_145247.3,908-926).
gcaacacttagagaaagat

SEQ ID NO: 413861 - DNA, 19 bp, Homo sapiens
  siRNA target sequence for LOC119392 (NM_145247.3,909-927).
caacacttagagaaagatt

SEQ ID NO: 413862 - DNA, 19 bp, Homo sapiens
  siRNA target sequence for LOC119392 (NM_145247.3,967-985).
ggtgaaacgtcttaaagta

SEQ ID NO: 413863 - DNA, 19 bp, Homo sapiens
  siRNA target sequence for LOC119392 (NM_145247.3,1170-1188).
gtgctctccaaaatgagtt

SEQ ID NO: 413864 - DNA, 19 bp, Homo sapiens
  siRNA target sequence for LOC119392 (NM_145247.3,1224-1242).
ctgaaaaagccaaattggt

SEQ ID NO: 413865 - DNA, 19 bp, Homo sapiens
  siRNA target sequence for LOC119392 (NM_145247.3,1267-1285).
ccttcttcggaggctaaaa

SEQ ID NO: 413866 - DNA, 19 bp, Homo sapiens
  siRNA target sequence for LOC119392 (NM_145247.3,1286-1304).
ctagtcaaaatgtatagat

SEQ ID NO: 413867 - DNA, 19 bp, Homo sapiens
  siRNA target sequence for LOC119392 (NM_145247.3,1289-1307).
gtcaaaatgtatagatcaa

SEQ ID NO: 413868 - DNA, 19 bp, Homo sapiens
  siRNA target sequence for LOC119392 (NM_145247.3,1313-1331).
gatctgtctcagttacagt

SEQ ID NO: 413869 - DNA, 19 bp, Homo sapiens
  siRNA target sequence for LOC119392 (NM_145247.3,1318-1336).
gtctcagttacagttgtta

SEQ ID NO: 413870 - DNA, 19 bp, Homo sapiens
  siRNA target sequence for LOC119392 (NM_145247.3,1320-1338).
ctcagttacagttgttaat

SEQ ID NO: 413871 - DNA, 19 bp, Homo sapiens
  siRNA target sequence for LOC119392 (NM_145247.3,1356-1374).
gtagccagctcttgcttta

SEQ ID NO: 413872 - DNA, 19 bp, Homo sapiens
  siRNA target sequence for LOC119392 (NM_145247.3,1412-1430).
ctaagccttactcaattga

SEQ ID NO: 413873 - DNA, 19 bp, Homo sapiens
  siRNA target sequence for LOC119392 (NM_145247.3,1416-1434).
gccttactcaattgataga

SEQ ID NO: 413874 - DNA, 19 bp, Homo sapiens
  siRNA target sequence for LOC119392 (NM_145247.3,1435-1453).
ccactatgggttagatgat

SEQ ID NO: 413875 - DNA, 19 bp, Homo sapiens
  siRNA target sequence for LOC119392 (NM_145247.3,1444-1462).
gttagatgataaattacta

SEQ ID NO: 413876 - DNA, 19 bp, Homo sapiens
  siRNA target sequence for LOC119392 (NM_145247.3,1451-1469).
gataaattactacactata

SEQ ID NO: 413877 - DNA, 19 bp, Homo sapiens
  siRNA target sequence for LOC122258 (NM_145248.2,129-147).
cacctactgaaataccatt

SEQ ID NO: 413878 - DNA, 19 bp, Homo sapiens
  siRNA target sequence for LOC122258 (NM_145248.2,150-168).
gttcaaaacaggaggatat

SEQ ID NO: 413879 - DNA, 19 bp, Homo sapiens
  siRNA target sequence for LOC122258 (NM_145248.2,160-178).
ggaggatatgtctgaatta

SEQ ID NO: 413880 - DNA, 19 bp, Homo sapiens
  siRNA target sequence for LOC122258 (NM_145248.2,161-179).
gaggatatgtctgaattat

SEQ ID NO: 413881 - DNA, 19 bp, Homo sapiens
  siRNA target sequence for LOC122258 (NM_145248.2,229-247).
gagcgaaatgccaagtaca

SEQ ID NO: 413882 - DNA, 19 bp, Homo sapiens
  siRNA target sequence for LOC122258 (NM_145248.2,267-285).
cgttacatgctggtattga

SEQ ID NO: 413883 - DNA, 19 bp, Homo sapiens
  siRNA target sequence for LOC122258 (NM_145248.2,275-293).
gctggtattgatgagaatt

SEQ ID NO: 413884 - DNA, 19 bp, Homo sapiens
  siRNA target sequence for LOC122258 (NM_145248.2,319-337).
ccatgaattattagagaat

SEQ ID NO: 413885 - DNA, 19 bp, Homo sapiens
  siRNA target sequence for LOC122258 (NM_145248.2,320-338).
catgaattattagagaatt

SEQ ID NO: 413886 - DNA, 19 bp, Homo sapiens
  siRNA target sequence for LOC122258 (NM_145248.2,407-425).
ggcgatccttctgagaatt

SEQ ID NO: 413887 - DNA, 19 bp, Homo sapiens
  siRNA target sequence for LOC122258 (NM_145248.2,408-426).
gcgatccttctgagaatta

SEQ ID NO: 413888 - DNA, 19 bp, Homo sapiens
  siRNA target sequence for LOC122258 (NM_145248.2,409-427).
cgatccttctgagaattat

SEQ ID NO: 413889 - DNA, 19 bp, Homo sapiens
  siRNA target sequence for LOC122258 (NM_145248.2,460-478).
gagtgtttccagtaaagaa

SEQ ID NO: 413890 - DNA, 19 bp, Homo sapiens
  siRNA target sequence for LOC122258 (NM_145248.2,493-511).
cactcagtatgaaaatcta

SEQ ID NO: 413891 - DNA, 19 bp, Homo sapiens
  siRNA target sequence for LOC122258 (NM_145248.2,499-517).
gtatgaaaatctatccatt

SEQ ID NO: 413892 - DNA, 19 bp, Homo sapiens
  siRNA target sequence for LOC122258 (NM_145248.2,521-539).
gaccaaatccttcaaaata

SEQ ID NO: 413893 - DNA, 19 bp, Homo sapiens
  siRNA target sequence for LOC124220 (NM_145252.1,165-183).
cctgggcagggaagatgta

SEQ ID NO: 413894 - DNA, 19 bp, Homo sapiens
  siRNA target sequence for LOC124220 (NM_145252.1,218-236).
gaagactacgaccatgaaa

SEQ ID NO: 413895 - DNA, 19 bp, Homo sapiens
  siRNA target sequence for LOC124220 (NM_145252.1,223-241).
ctacgaccatgaaatcaca

SEQ ID NO: 413896 - DNA, 19 bp, Homo sapiens
  siRNA target sequence for LOC124220 (NM_145252.1,356-374).
cagccaggcgaatacatca

SEQ ID NO: 413897 - DNA, 19 bp, Homo sapiens
  siRNA target sequence for LOC124220 (NM_145252.1,359-377).
ccaggcgaatacatcacaa

SEQ ID NO: 413898 - DNA, 19 bp, Homo sapiens
  siRNA target sequence for LOC124220 (NM_145252.1,360-378).
caggcgaatacatcacaaa

SEQ ID NO: 413899 - DNA, 19 bp, Homo sapiens
  siRNA target sequence for LOC124220 (NM_145252.1,363-381).
gcgaatacatcacaaaagt

SEQ ID NO: 413900 - DNA, 19 bp, Homo sapiens
  siRNA target sequence for LOC124220 (NM_145252.1,407-425).
cggggtatggtcatgtaca

SEQ ID NO: 413901 - DNA, 19 bp, Homo sapiens
  siRNA target sequence for LOC124220 (NM_145252.1,426-444).
ccagcaaggaccgctattt

SEQ ID NO: 413902 - DNA, 19 bp, Homo sapiens
  siRNA target sequence for LOC124220 (NM_145252.1,429-447).
gcaaggaccgctatttcta

SEQ ID NO: 413903 - DNA, 19 bp, Homo sapiens
  siRNA target sequence for LOC124220 (NM_145252.1,513-531).
gcatctatggccagtatca

SEQ ID NO: 413904 - DNA, 19 bp, Homo sapiens
  siRNA target sequence for LOC124220 (NM_145252.1,514-532).
catctatggccagtatcaa

SEQ ID NO: 413905 - DNA, 19 bp, Homo sapiens
  siRNA target sequence for LOC124220 (NM_145252.1,589-607).
cactgagccaccagttaat

SEQ ID NO: 413906 - DNA, 19 bp, Homo sapiens
  siRNA target sequence for LOC124220 (NM_145252.1,593-611).
gagccaccagttaatctca

SEQ ID NO: 413907 - DNA, 19 bp, Homo sapiens
  siRNA target sequence for LOC124220 (NM_145252.1,597-615).
caccagttaatctcacata

SEQ ID NO: 413908 - DNA, 19 bp, Homo sapiens
  siRNA target sequence for LOC124220 (NM_145252.1,599-617).
ccagttaatctcacatact

SEQ ID NO: 413909 - DNA, 19 bp, Homo sapiens
  siRNA target sequence for LOC124402 (NM_145253.1,301-319).
gacgctctcaccatgttct

SEQ ID NO: 413910 - DNA, 19 bp, Homo sapiens
  siRNA target sequence for LOC124491 (NM_145254.1,299-317).
caccctcagacatcacaaa

SEQ ID NO: 413911 - DNA, 19 bp, Homo sapiens
  siRNA target sequence for LOC124491 (NM_145254.1,301-319).
ccctcagacatcacaaata

SEQ ID NO: 413912 - DNA, 19 bp, Homo sapiens
  siRNA target sequence for LOC124491 (NM_145254.1,325-343).
ggttcatgtctgtaagcat

SEQ ID NO: 413913 - DNA, 19 bp, Homo sapiens
  siRNA target sequence for LOC124491 (NM_145254.1,354-372).
ggcatcgtgggaccaatta

SEQ ID NO: 413914 - DNA, 19 bp, Homo sapiens
  siRNA target sequence for LOC124491 (NM_145254.1,356-374).
catcgtgggaccaattact

SEQ ID NO: 413915 - DNA, 19 bp, Homo sapiens
  siRNA target sequence for LOC124491 (NM_145254.1,383-401).
cttgacaagtgcagctatt

SEQ ID NO: 413916 - DNA, 19 bp, Homo sapiens
  siRNA target sequence for LOC124491 (NM_145254.1,458-476).
gggcactggacagacattt

SEQ ID NO: 413917 - DNA, 19 bp, Homo sapiens
  siRNA target sequence for LOC124491 (NM_145254.1,491-509).
ctcctttttacggatttta

SEQ ID NO: 413918 - DNA, 19 bp, Homo sapiens
  siRNA target sequence for LOC124491 (NM_145254.1,494-512).
ctttttacggattttagct

SEQ ID NO: 413919 - DNA, 19 bp, Homo sapiens
  siRNA target sequence for LOC124491 (NM_145254.1,501-519).
cggattttagctactctat

SEQ ID NO: 413920 - DNA, 19 bp, Homo sapiens
  siRNA target sequence for MRPL10 (NM_145255.2,136-154).
gtcgtgtgatgcactttca

SEQ ID NO: 413921 - DNA, 19 bp, Homo sapiens
  siRNA target sequence for MRPL10 (NM_145255.2,296-314).
ccaggacaaccgaatgata

SEQ ID NO: 413922 - DNA, 19 bp, Homo sapiens
  siRNA target sequence for MRPL10 (NM_145255.2,432-450).
gaggattccaagtaccaaa

SEQ ID NO: 413923 - DNA, 19 bp, Homo sapiens
  siRNA target sequence for MRPL10 (NM_145255.2,434-452).
ggattccaagtaccaaaat

SEQ ID NO: 413924 - DNA, 19 bp, Homo sapiens
  siRNA target sequence for MRPL10 (NM_145255.2,513-531).
gagatggtacggatcttaa

SEQ ID NO: 413925 - DNA, 19 bp, Homo sapiens
  siRNA target sequence for MRPL10 (NM_145255.2,591-609).
cagggctttatcaactact

SEQ ID NO: 413926 - DNA, 19 bp, Homo sapiens
  siRNA target sequence for MRPL10 (NM_145255.2,720-738).
ctgttggaccagtacatca

SEQ ID NO: 413927 - DNA, 19 bp, Homo sapiens
  siRNA target sequence for MRPL10 (NM_145255.2,741-759).
gagcaacgcgagaaggatt

SEQ ID NO: 413928 - DNA, 19 bp, Homo sapiens
  siRNA target sequence for LOC126731 (NM_145257.1,69-87).
gggtgaagagcgagtacat

SEQ ID NO: 413929 - DNA, 19 bp, Homo sapiens
  siRNA target sequence for LOC126731 (NM_145257.1,443-461).
gataaacctgaacaacaaa

SEQ ID NO: 413930 - DNA, 19 bp, Homo sapiens
  siRNA target sequence for LOC126731 (NM_145257.1,562-580).
ccaaagatcatcgagtaaa

SEQ ID NO: 413931 - DNA, 19 bp, Homo sapiens
  siRNA target sequence for LOC126731 (NM_145257.1,567-585).
gatcatcgagtaaaataaa

SEQ ID NO: 413932 - DNA, 19 bp, Homo sapiens
  siRNA target sequence for LOC126731 (NM_145257.1,595-613).
gcatccatttgctctttat

SEQ ID NO: 413933 - DNA, 19 bp, Homo sapiens
  siRNA target sequence for LOC126731 (NM_145257.1,675-693).
ctcctgtgcacgagattca

SEQ ID NO: 413934 - DNA, 19 bp, Homo sapiens
  siRNA target sequence for LOC126731 (NM_145257.1,680-698).
gtgcacgagattcatgaat

SEQ ID NO: 413935 - DNA, 19 bp, Homo sapiens
  siRNA target sequence for LOC126731 (NM_145257.1,682-700).
gcacgagattcatgaatca

SEQ ID NO: 413936 - DNA, 19 bp, Homo sapiens
  siRNA target sequence for LOC126731 (NM_145257.1,688-706).
gattcatgaatcagcatta

SEQ ID NO: 413937 - DNA, 19 bp, Homo sapiens
  siRNA target sequence for LOC126731 (NM_145257.1,821-839).
ccgtggatgacagaataca

SEQ ID NO: 413938 - DNA, 19 bp, Homo sapiens
  siRNA target sequence for LOC126731 (NM_145257.1,822-840).
cgtggatgacagaatacat

SEQ ID NO: 413939 - DNA, 19 bp, Homo sapiens
  siRNA target sequence for LOC126731 (NM_145257.1,833-851).
gaatacatgaggtgctatt

SEQ ID NO: 413940 - DNA, 19 bp, Homo sapiens
  siRNA target sequence for MGC22773 (NM_145258.1,192-210).
gaagaatggagtcactata

SEQ ID NO: 413941 - DNA, 19 bp, Homo sapiens
  siRNA target sequence for MGC22773 (NM_145258.1,254-272).
gttcaatggccttcattta

SEQ ID NO: 413942 - DNA, 19 bp, Homo sapiens
  siRNA target sequence for MGC22773 (NM_145258.1,261-279).
ggccttcatttaaagtcta

SEQ ID NO: 413943 - DNA, 19 bp, Homo sapiens
  siRNA target sequence for MGC22773 (NM_145258.1,262-280).
gccttcatttaaagtctat

SEQ ID NO: 413944 - DNA, 19 bp, Homo sapiens
  siRNA target sequence for MGC22773 (NM_145258.1,291-309).
cagtcttgcatctctctta

SEQ ID NO: 413945 - DNA, 19 bp, Homo sapiens
  siRNA target sequence for MGC22773 (NM_145258.1,293-311).
gtcttgcatctctcttaga

SEQ ID NO: 413946 - DNA, 19 bp, Homo sapiens
  siRNA target sequence for MGC22773 (NM_145258.1,295-313).
cttgcatctctcttagagt

SEQ ID NO: 413947 - DNA, 19 bp, Homo sapiens
  siRNA target sequence for MGC22773 (NM_145258.1,306-324).
cttagagtatgcatcttct

SEQ ID NO: 413948 - DNA, 19 bp, Homo sapiens
  siRNA target sequence for MGC22773 (NM_145258.1,310-328).
gagtatgcatcttctcaaa

SEQ ID NO: 413949 - DNA, 19 bp, Homo sapiens
  siRNA target sequence for MGC22773 (NM_145258.1,348-366).
catccacttcaaagttgta

SEQ ID NO: 413950 - DNA, 19 bp, Homo sapiens
  siRNA target sequence for MGC22773 (NM_145258.1,351-369).
ccacttcaaagttgtataa

SEQ ID NO: 413951 - DNA, 19 bp, Homo sapiens
  siRNA target sequence for MGC22773 (NM_145258.1,401-419).
gataaagagtctaccaaat

SEQ ID NO: 413952 - DNA, 19 bp, Homo sapiens
  siRNA target sequence for MGC22773 (NM_145258.1,411-429).
ctaccaaataccaaatttt

SEQ ID NO: 413953 - DNA, 19 bp, Homo sapiens
  siRNA target sequence for MGC22773 (NM_145258.1,421-439).
ccaaattttggaatggatt

SEQ ID NO: 413954 - DNA, 19 bp, Homo sapiens
  siRNA target sequence for MGC22773 (NM_145258.1,446-464).
cctaaaactactctatctt

SEQ ID NO: 413955 - DNA, 19 bp, Homo sapiens
  siRNA target sequence for MGC22773 (NM_145258.1,465-483).
catgacaatgggtttgcaa

SEQ ID NO: 413956 - DNA, 19 bp, Homo sapiens
  siRNA target sequence for MGC22773 (NM_145258.1,524-542).
cattgccctcactatgttt

SEQ ID NO: 413957 - DNA, 19 bp, Homo sapiens
  siRNA target sequence for MGC22773 (NM_145258.1,530-548).
cctcactatgtttgattgt

SEQ ID NO: 413958 - DNA, 19 bp, Homo sapiens
  siRNA target sequence for MGC22773 (NM_145258.1,568-586).
gatatagacatgttcttgt

SEQ ID NO: 413959 - DNA, 19 bp, Homo sapiens
  siRNA target sequence for MGC22773 (NM_145258.1,611-629).
gctggatcatcatgtgatt

SEQ ID NO: 413960 - DNA, 19 bp, Homo sapiens
  siRNA target sequence for MGC22773 (NM_145258.1,657-675).
catcttcctgaaagattca

SEQ ID NO: 413961 - DNA, 19 bp, Homo sapiens
  siRNA target sequence for MGC22773 (NM_145258.1,679-697).
catgtaaccatcgactttt

SEQ ID NO: 413962 - DNA, 19 bp, Homo sapiens
  siRNA target sequence for MGC22773 (NM_145258.1,682-700).
gtaaccatcgacttttctt

SEQ ID NO: 413963 - DNA, 19 bp, Homo sapiens
  siRNA target sequence for LOC131118 (NM_145261.1,206-224).
catatggagcctcaagtaa

SEQ ID NO: 413964 - DNA, 19 bp, Homo sapiens
  siRNA target sequence for LOC131118 (NM_145261.1,211-229).
ggagcctcaagtaaaacaa

SEQ ID NO: 413965 - DNA, 19 bp, Homo sapiens
  siRNA target sequence for LOC131118 (NM_145261.1,259-277).
cagtggtggctattataga

SEQ ID NO: 413966 - DNA, 19 bp, Homo sapiens
  siRNA target sequence for LOC131118 (NM_145261.1,279-297).
gtgggtttgaacccaaaat

SEQ ID NO: 413967 - DNA, 19 bp, Homo sapiens
  siRNA target sequence for LOC131118 (NM_145261.1,307-325).
ggaagcagcattaatacta

SEQ ID NO: 413968 - DNA, 19 bp, Homo sapiens
  siRNA target sequence for LOC131118 (NM_145261.1,362-380).
gatgctcatcgacgaatta

SEQ ID NO: 413969 - DNA, 19 bp, Homo sapiens
  siRNA target sequence for LOC131118 (NM_145261.1,366-384).
ctcatcgacgaattatgct

SEQ ID NO: 413970 - DNA, 19 bp, Homo sapiens
  siRNA target sequence for LOC131118 (NM_145261.1,368-386).
catcgacgaattatgcttt

SEQ ID NO: 413971 - DNA, 19 bp, Homo sapiens
  siRNA target sequence for LOC131118 (NM_145261.1,371-389).
cgacgaattatgcttttaa

SEQ ID NO: 413972 - DNA, 19 bp, Homo sapiens
  siRNA target sequence for GLYCTK (NM_145262.2,1066-1084).
gccatgcaaggtgatgtaa

SEQ ID NO: 413973 - DNA, 19 bp, Homo sapiens
  siRNA target sequence for GLYCTK (NM_145262.2,1067-1085).
ccatgcaaggtgatgtaaa

SEQ ID NO: 413974 - DNA, 19 bp, Homo sapiens
  siRNA target sequence for GLYCTK (NM_145262.2,1071-1089).
gcaaggtgatgtaaaaagt

SEQ ID NO: 413975 - DNA, 19 bp, Homo sapiens
  siRNA target sequence for GLYCTK (NM_145262.2,1381-1399).
ccgatagatgtgctgtttt

SEQ ID NO: 413976 - DNA, 19 bp, Homo sapiens
  siRNA target sequence for GLYCTK (NM_145262.2,1505-1523).
ccttcctagcccacaatga

SEQ ID NO: 413977 - DNA, 19 bp, Homo sapiens
  siRNA target sequence for LOC132671 (NM_145263.1,286-304).
cggaaaacctgaaaagact

SEQ ID NO: 413978 - DNA, 19 bp, Homo sapiens
  siRNA target sequence for LOC132671 (NM_145263.1,308-326).
ctcaaacgaaactttacga

SEQ ID NO: 413979 - DNA, 19 bp, Homo sapiens
  siRNA target sequence for LOC132671 (NM_145263.1,370-388).
caaacacgtgtgatcaaaa

SEQ ID NO: 413980 - DNA, 19 bp, Homo sapiens
  siRNA target sequence for LOC132671 (NM_145263.1,376-394).
cgtgtgatcaaaatctaaa

SEQ ID NO: 413981 - DNA, 19 bp, Homo sapiens
  siRNA target sequence for LOC132671 (NM_145263.1,379-397).
gtgatcaaaatctaaacca

SEQ ID NO: 413982 - DNA, 19 bp, Homo sapiens
  siRNA target sequence for LOC132671 (NM_145263.1,395-413).
ccattgccttgaactcatt

SEQ ID NO: 413983 - DNA, 19 bp, Homo sapiens
  siRNA target sequence for LOC132671 (NM_145263.1,543-561).
gctgcttccctgggaaaat

SEQ ID NO: 413984 - DNA, 19 bp, Homo sapiens
  siRNA target sequence for LOC132671 (NM_145263.1,585-603).
ctgcaggacacgtttgata

SEQ ID NO: 413985 - DNA, 19 bp, Homo sapiens
  siRNA target sequence for LOC132671 (NM_145263.1,628-646).
ctcgggatcgggatatgca

SEQ ID NO: 413986 - DNA, 19 bp, Homo sapiens
  siRNA target sequence for LOC132671 (NM_145263.1,639-657).
gatatgcaacagttagact

SEQ ID NO: 413987 - DNA, 19 bp, Homo sapiens
  siRNA target sequence for LOC132671 (NM_145263.1,644-662).
gcaacagttagactctaat

SEQ ID NO: 413988 - DNA, 19 bp, Homo sapiens
  siRNA target sequence for LOC132671 (NM_145263.1,645-663).
caacagttagactctaatt

SEQ ID NO: 413989 - DNA, 19 bp, Homo sapiens
  siRNA target sequence for LOC132671 (NM_145263.1,648-666).
cagttagactctaatttga

SEQ ID NO: 413990 - DNA, 19 bp, Homo sapiens
  siRNA target sequence for LOC132671 (NM_145263.1,654-672).
gactctaatttgaactcaa

SEQ ID NO: 413991 - DNA, 19 bp, Homo sapiens
  siRNA target sequence for LOC132671 (NM_145263.1,670-688).
caacccggagtcaatgcaa

SEQ ID NO: 413992 - DNA, 19 bp, Homo sapiens
  siRNA target sequence for LOC132671 (NM_145263.1,696-714).
caagacgatctggttgaaa

SEQ ID NO: 413993 - DNA, 19 bp, Homo sapiens
  siRNA target sequence for LOC132671 (NM_145263.1,797-815).
gcagcttaaatctcttcaa

SEQ ID NO: 413994 - DNA, 19 bp, Homo sapiens
  siRNA target sequence for LOC132671 (NM_145263.1,951-969).
gaagccatgtccgattata

SEQ ID NO: 413995 - DNA, 19 bp, Homo sapiens
  siRNA target sequence for LOC132671 (NM_145263.1,954-972).
gccatgtccgattataaga

SEQ ID NO: 413996 - DNA, 19 bp, Homo sapiens
  siRNA target sequence for LOC132671 (NM_145263.1,955-973).
ccatgtccgattataagaa

SEQ ID NO: 413997 - DNA, 19 bp, Homo sapiens
  siRNA target sequence for LOC132671 (NM_145263.1,956-974).
catgtccgattataagaaa

SEQ ID NO: 413998 - DNA, 19 bp, Homo sapiens
  siRNA target sequence for LOC132671 (NM_145263.1,1192-1210).
cccggttcagcgattccta

SEQ ID NO: 413999 - DNA, 19 bp, Homo sapiens
  siRNA target sequence for LOC132671 (NM_145263.1,1193-1211).
ccggttcagcgattcctat

SEQ ID NO: 414000 - DNA, 19 bp, Homo sapiens
  siRNA target sequence for LOC132671 (NM_145263.1,1270-1288).
ccgttcagcggatcatcta

SEQ ID NO: 414001 - DNA, 19 bp, Homo sapiens
  siRNA target sequence for LOC132671 (NM_145263.1,1272-1290).
gttcagcggatcatctaca

SEQ ID NO: 414002 - DNA, 19 bp, Homo sapiens
  siRNA target sequence for LOC132671 (NM_145263.1,1360-1378).
cgttgacaccatcttatgt

SEQ ID NO: 414003 - DNA, 19 bp, Homo sapiens
  siRNA target sequence for LOC132671 (NM_145263.1,1380-1398).
gggtcgaatgactttgaga

SEQ ID NO: 414004 - DNA, 19 bp, Homo sapiens
  siRNA target sequence for LOC132671 (NM_145263.1,1382-1400).
gtcgaatgactttgagaat

SEQ ID NO: 414005 - DNA, 19 bp, Homo sapiens
  siRNA target sequence for LOC132671 (NM_145263.1,1395-1413).
gagaatgctgtcttggatt

SEQ ID NO: 414006 - DNA, 19 bp, Homo sapiens
  siRNA target sequence for LOC132671 (NM_145263.1,1444-1462).
ctcaaagcagtgtcaatga

SEQ ID NO: 414007 - DNA, 19 bp, Homo sapiens
  siRNA target sequence for LOC132671 (NM_145263.1,1450-1468).
gcagtgtcaatgatgtgat

SEQ ID NO: 414008 - DNA, 19 bp, Homo sapiens
  siRNA target sequence for LOC132671 (NM_145263.1,1482-1500).
gtcaatcccaagatttcat

SEQ ID NO: 414009 - DNA, 19 bp, Homo sapiens
  siRNA target sequence for LOC132671 (NM_145263.1,1503-1521).
cctcctgtcgttgactttt

SEQ ID NO: 414010 - DNA, 19 bp, Homo sapiens
  siRNA target sequence for LOC132671 (NM_145263.1,1533-1551).
gacttcatccaggagatat

SEQ ID NO: 414011 - DNA, 19 bp, Homo sapiens
  siRNA target sequence for LOC132671 (NM_145263.1,1535-1553).
cttcatccaggagatatgt

SEQ ID NO: 414012 - DNA, 19 bp, Homo sapiens
  siRNA target sequence for LOC132671 (NM_145263.1,1585-1603).
cacccctagatattgcata

SEQ ID NO: 414013 - DNA, 19 bp, Homo sapiens
  siRNA target sequence for LOC132671 (NM_145263.1,1589-1607).
cctagatattgcatatgga

SEQ ID NO: 414014 - DNA, 19 bp, Homo sapiens
  siRNA target sequence for LOC132671 (NM_145263.1,1614-1632).
ggagaagtttttaatgatt

SEQ ID NO: 414015 - DNA, 19 bp, Homo sapiens
  siRNA target sequence for LOC132671 (NM_145263.1,1649-1667).
ctacgactcggatttcact

SEQ ID NO: 414016 - DNA, 19 bp, Homo sapiens
  siRNA target sequence for LOC132671 (NM_145263.1,1696-1714).
ctgctctcatggagaatga

SEQ ID NO: 414017 - DNA, 19 bp, Homo sapiens
  siRNA target sequence for LOC132671 (NM_145263.1,1706-1724).
ggagaatgactgtgtcatt

SEQ ID NO: 414018 - DNA, 19 bp, Homo sapiens
  siRNA target sequence for LOC132671 (NM_145263.1,1748-1766).
gagaggggctttttggaat

SEQ ID NO: 414019 - DNA, 19 bp, Homo sapiens
  siRNA target sequence for LOC132671 (NM_145263.1,1763-1781).
gaattcggtgcgatctgta

SEQ ID NO: 414020 - DNA, 19 bp, Homo sapiens
  siRNA target sequence for LOC132671 (NM_145263.1,1819-1837).
cccgtagccaaattggttt

SEQ ID NO: 414021 - DNA, 19 bp, Homo sapiens
  siRNA target sequence for LOC132671 (NM_145263.1,1820-1838).
ccgtagccaaattggttta

SEQ ID NO: 414022 - DNA, 19 bp, Homo sapiens
  siRNA target sequence for LOC132671 (NM_145263.1,1821-1839).
cgtagccaaattggtttaa

SEQ ID NO: 414023 - DNA, 19 bp, Homo sapiens
  siRNA target sequence for LOC133957 (NM_145265.2,205-223).
gggattggctgcttttcgt

SEQ ID NO: 414024 - DNA, 19 bp, Homo sapiens
  siRNA target sequence for LOC133957 (NM_145265.2,206-224).
ggattggctgcttttcgtt

SEQ ID NO: 414025 - DNA, 19 bp, Homo sapiens
  siRNA target sequence for LOC133957 (NM_145265.2,238-256).
ggagtcccagaaagaagta

SEQ ID NO: 414026 - DNA, 19 bp, Homo sapiens
  siRNA target sequence for LOC133957 (NM_145265.2,325-343).
cgccatgatctcagaaaat

SEQ ID NO: 414027 - DNA, 19 bp, Homo sapiens
  siRNA target sequence for LOC133957 (NM_145265.2,406-424).
ccgagaagcccttatctct

SEQ ID NO: 414028 - DNA, 19 bp, Homo sapiens
  siRNA target sequence for LOC133957 (NM_145265.2,429-447).
gacgcaagttggtagaaga

SEQ ID NO: 414029 - DNA, 19 bp, Homo sapiens
  siRNA target sequence for LOC133957 (NM_145265.2,473-491).
gcccaggtgatgcaagaaa

SEQ ID NO: 414030 - DNA, 19 bp, Homo sapiens
  siRNA target sequence for LOC133957 (NM_145265.2,600-618).
cagaaagacagaatatcta

SEQ ID NO: 414031 - DNA, 19 bp, Homo sapiens
  siRNA target sequence for LOC133957 (NM_145265.2,602-620).
gaaagacagaatatctact

SEQ ID NO: 414032 - DNA, 19 bp, Homo sapiens
  siRNA target sequence for LOC133957 (NM_145265.2,642-660).
gcaagcggctggagataga

SEQ ID NO: 414033 - DNA, 19 bp, Homo sapiens
  siRNA target sequence for LOC133957 (NM_145265.2,719-737).
gccggtctcaccgacatat

SEQ ID NO: 414034 - DNA, 19 bp, Homo sapiens
  siRNA target sequence for LOC133957 (NM_145265.2,720-738).
ccggtctcaccgacatatt

SEQ ID NO: 414035 - DNA, 19 bp, Homo sapiens
  siRNA target sequence for LOC133957 (NM_145265.2,721-739).
cggtctcaccgacatattt

SEQ ID NO: 414036 - DNA, 19 bp, Homo sapiens
  siRNA target sequence for LOC133957 (NM_145265.2,723-741).
gtctcaccgacatatttca

SEQ ID NO: 414037 - DNA, 19 bp, Homo sapiens
  siRNA target sequence for LOC133957 (NM_145265.2,731-749).
gacatatttcagcatgata

SEQ ID NO: 414038 - DNA, 19 bp, Homo sapiens
  siRNA target sequence for LOC133957 (NM_145265.2,797-815).
ctcatgtggctctatctca

SEQ ID NO: 414039 - DNA, 19 bp, Homo sapiens
  siRNA target sequence for LOC134492 (NM_145266.4,159-177).
cttggaggaggtgttcatt

SEQ ID NO: 414040 - DNA, 19 bp, Homo sapiens
  siRNA target sequence for LOC134492 (NM_145266.4,162-180).
ggaggaggtgttcattgaa

SEQ ID NO: 414041 - DNA, 19 bp, Homo sapiens
  siRNA target sequence for LOC134492 (NM_145266.4,270-288).
cctcaagggcaaactcttt

SEQ ID NO: 414042 - DNA, 19 bp, Homo sapiens
  siRNA target sequence for LOC134492 (NM_145266.4,277-295).
ggcaaactctttgattcta

SEQ ID NO: 414043 - DNA, 19 bp, Homo sapiens
  siRNA target sequence for LOC134492 (NM_145266.4,330-348).
cagaaaaatggttcgtatt

SEQ ID NO: 414044 - DNA, 19 bp, Homo sapiens
  siRNA target sequence for LOC134492 (NM_145266.4,332-350).
gaaaaatggttcgtattgt

SEQ ID NO: 414045 - DNA, 19 bp, Homo sapiens
  siRNA target sequence for LOC134492 (NM_145266.4,422-440).
cttgggtgcaagaccaaat

SEQ ID NO: 414046 - DNA, 19 bp, Homo sapiens
  siRNA target sequence for LOC134492 (NM_145266.4,475-493).
gaaaatcctggttttgact

SEQ ID NO: 414047 - DNA, 19 bp, Homo sapiens
  siRNA target sequence for LOC134492 (NM_145266.4,495-513).
cagtggagcagaaatctca

SEQ ID NO: 414048 - DNA, 19 bp, Homo sapiens
  siRNA target sequence for LOC134492 (NM_145266.4,529-547).
ggtggaccagatttctcaa

SEQ ID NO: 414049 - DNA, 19 bp, Homo sapiens
  siRNA target sequence for LOC136263 (NM_145268.2,71-89).
ctcccccaatacctgtaaa

SEQ ID NO: 414050 - DNA, 19 bp, Homo sapiens
  siRNA target sequence for LOC136263 (NM_145268.2,95-113).
ccattccaaatcaggatta

SEQ ID NO: 414051 - DNA, 19 bp, Homo sapiens
  siRNA target sequence for LOC136263 (NM_145268.2,96-114).
cattccaaatcaggattat

SEQ ID NO: 414052 - DNA, 19 bp, Homo sapiens
  siRNA target sequence for LOC136263 (NM_145268.2,149-167).
ggagcttcctgctttggta

SEQ ID NO: 414053 - DNA, 19 bp, Homo sapiens
  siRNA target sequence for LOC136263 (NM_145268.2,184-202).
gtcctgatgttcttctcta

SEQ ID NO: 414054 - DNA, 19 bp, Homo sapiens
  siRNA target sequence for LOC136263 (NM_145268.2,243-261).
cagtgggacaagtacttca

SEQ ID NO: 414055 - DNA, 19 bp, Homo sapiens
  siRNA target sequence for LOC136263 (NM_145268.2,247-265).
gggacaagtacttcagtaa

SEQ ID NO: 414056 - DNA, 19 bp, Homo sapiens
  siRNA target sequence for LOC136263 (NM_145268.2,288-306).
ctgtaagcggcaaagcaaa

SEQ ID NO: 414057 - DNA, 19 bp, Homo sapiens
  siRNA target sequence for LOC136263 (NM_145268.2,313-331).
gcctgggatccctcacaaa

SEQ ID NO: 414058 - DNA, 19 bp, Homo sapiens
  siRNA target sequence for LOC136263 (NM_145268.2,315-333).
ctgggatccctcacaaaca

SEQ ID NO: 414059 - DNA, 19 bp, Homo sapiens
  siRNA target sequence for LOC136263 (NM_145268.2,317-335).
gggatccctcacaaacaat

SEQ ID NO: 414060 - DNA, 19 bp, Homo sapiens
  siRNA target sequence for LOC136263 (NM_145268.2,319-337).
gatccctcacaaacaatga

SEQ ID NO: 414061 - DNA, 19 bp, Homo sapiens
  siRNA target sequence for LOC136263 (NM_145268.2,422-440).
ggcgccagtctcagttcaa

SEQ ID NO: 414062 - DNA, 19 bp, Homo sapiens
  siRNA target sequence for LOC136263 (NM_145268.2,423-441).
gcgccagtctcagttcaat

SEQ ID NO: 414063 - DNA, 19 bp, Homo sapiens
  siRNA target sequence for LOC136263 (NM_145268.2,425-443).
gccagtctcagttcaatga

SEQ ID NO: 414064 - DNA, 19 bp, Homo sapiens
  siRNA target sequence for LOC136263 (NM_145268.2,484-502).
ggcagtgaagagtctaact

SEQ ID NO: 414065 - DNA, 19 bp, Homo sapiens
  siRNA target sequence for LOC136263 (NM_145268.2,486-504).
cagtgaagagtctaactca

SEQ ID NO: 414066 - DNA, 19 bp, Homo sapiens
  siRNA target sequence for LOC136263 (NM_145268.2,576-594).
ggctcagaggcaaaggaat

SEQ ID NO: 414067 - DNA, 19 bp, Homo sapiens
  siRNA target sequence for LOC136263 (NM_145268.2,591-609).
gaatctgggaagttaccaa

SEQ ID NO: 414068 - DNA, 19 bp, Homo sapiens
  siRNA target sequence for LOC136263 (NM_145268.2,640-658).
gccttgagaaccaacgaat

SEQ ID NO: 414069 - DNA, 19 bp, Homo sapiens
  siRNA target sequence for LOC136263 (NM_145268.2,675-693).
ccgacagaagccttcagta

SEQ ID NO: 414070 - DNA, 19 bp, Homo sapiens
  siRNA target sequence for LOC136263 (NM_145268.2,718-736).
caagaggaaagttccatat

SEQ ID NO: 414071 - DNA, 19 bp, Homo sapiens
  siRNA target sequence for LOC136263 (NM_145268.2,728-746).
gttccatatctgacattaa

SEQ ID NO: 414072 - DNA, 19 bp, Homo sapiens
  siRNA target sequence for LOC146325 (NM_145270.1,371-389).
ggggcaaaccctacaacta

SEQ ID NO: 414073 - DNA, 19 bp, Homo sapiens
  siRNA target sequence for LOC146325 (NM_145270.1,380-398).
cctacaactacaaatgctt

SEQ ID NO: 414074 - DNA, 19 bp, Homo sapiens
  siRNA target sequence for LOC146853 (NM_145272.2,444-462).
ctcctcttctgcaagaaat

SEQ ID NO: 414075 - DNA, 19 bp, Homo sapiens
  siRNA target sequence for LOC146853 (NM_145272.2,756-774).
gcagagcccagcataacct

SEQ ID NO: 414076 - DNA, 19 bp, Homo sapiens
  siRNA target sequence for TREM4 (NM_145273.2,300-318).
gagctctcgctcattgtga

SEQ ID NO: 414077 - DNA, 19 bp, Homo sapiens
  siRNA target sequence for TREM4 (NM_145273.2,381-399).
cccgatgagtctttactga

SEQ ID NO: 414078 - DNA, 19 bp, Homo sapiens
  siRNA target sequence for TREM4 (NM_145273.2,382-400).
ccgatgagtctttactgat

SEQ ID NO: 414079 - DNA, 19 bp, Homo sapiens
  siRNA target sequence for TREM4 (NM_145273.2,894-912).
cagaggaacgagaagttct

SEQ ID NO: 414080 - DNA, 19 bp, Homo sapiens
  siRNA target sequence for MGC21518 (NM_145274.1,372-390).
cagctcattctgttagagt

SEQ ID NO: 414081 - DNA, 19 bp, Homo sapiens
  siRNA target sequence for MGC21518 (NM_145274.1,436-454).
ccttcctcaagtattctta

SEQ ID NO: 414082 - DNA, 19 bp, Homo sapiens
  siRNA target sequence for MGC21518 (NM_145274.1,489-507).
ggctctcccttgagttatt

SEQ ID NO: 414083 - DNA, 19 bp, Homo sapiens
  siRNA target sequence for MGC21518 (NM_145274.1,520-538).
ctatcttgggactcttctt

SEQ ID NO: 414084 - DNA, 19 bp, Homo sapiens
  siRNA target sequence for MGC21518 (NM_145274.1,597-615).
gctcgtggttgctcttcaa

SEQ ID NO: 414085 - DNA, 19 bp, Homo sapiens
  siRNA target sequence for MGC21518 (NM_145274.1,600-618).
cgtggttgctcttcaacaa

SEQ ID NO: 414086 - DNA, 19 bp, Homo sapiens
  siRNA target sequence for MGC21518 (NM_145274.1,764-782).
catgccggttggcaattgt

SEQ ID NO: 414087 - DNA, 19 bp, Homo sapiens
  siRNA target sequence for MGC21518 (NM_145274.1,821-839).
gaggtgttagagtggaata

SEQ ID NO: 414088 - DNA, 19 bp, Homo sapiens
  siRNA target sequence for LOC148738 (NM_145277.2,483-501).
cggacccttgtgactatga

SEQ ID NO: 414089 - DNA, 19 bp, Homo sapiens
  siRNA target sequence for LOC148738 (NM_145277.2,576-594).
gcagcttccaccatcactt

SEQ ID NO: 414090 - DNA, 19 bp, Homo sapiens
  siRNA target sequence for LOC148738 (NM_145277.2,577-595).
cagcttccaccatcacttt

SEQ ID NO: 414091 - DNA, 19 bp, Homo sapiens
  siRNA target sequence for LOC148738 (NM_145277.2,618-636).
cttggcctctactggataa

SEQ ID NO: 414092 - DNA, 19 bp, Homo sapiens
  siRNA target sequence for LOC148738 (NM_145277.2,623-641).
cctctactggataatgact

SEQ ID NO: 414093 - DNA, 19 bp, Homo sapiens
  siRNA target sequence for LOC148738 (NM_145277.2,624-642).
ctctactggataatgactt

SEQ ID NO: 414094 - DNA, 19 bp, Homo sapiens
  siRNA target sequence for LOC148738 (NM_145277.2,700-718).
ccggaagctcaccatcata

SEQ ID NO: 414095 - DNA, 19 bp, Homo sapiens
  siRNA target sequence for LOC148738 (NM_145277.2,701-719).
cggaagctcaccatcatat

SEQ ID NO: 414096 - DNA, 19 bp, Homo sapiens
  siRNA target sequence for LOC148738 (NM_145277.2,874-892).
gatccaagctgcctacatt

SEQ ID NO: 414097 - DNA, 19 bp, Homo sapiens
  siRNA target sequence for LOC148738 (NM_145277.2,884-902).
gcctacattggcacaacta

SEQ ID NO: 414098 - DNA, 19 bp, Homo sapiens
  siRNA target sequence for LOC148738 (NM_145277.2,885-903).
cctacattggcacaactat

SEQ ID NO: 414099 - DNA, 19 bp, Homo sapiens
  siRNA target sequence for LOC148738 (NM_145277.2,886-904).
ctacattggcacaactata

SEQ ID NO: 414100 - DNA, 19 bp, Homo sapiens
  siRNA target sequence for LOC148738 (NM_145277.2,1045-1063).
caatcgtcggggagctata

SEQ ID NO: 414101 - DNA, 19 bp, Homo sapiens
  siRNA target sequence for LOC148738 (NM_145277.2,1049-1067).
cgtcggggagctataacca

SEQ ID NO: 414102 - DNA, 19 bp, Homo sapiens
  siRNA target sequence for LOC148738 (NM_145277.2,1050-1068).
gtcggggagctataaccat

SEQ ID NO: 414103 - DNA, 19 bp, Homo sapiens
  siRNA target sequence for LOC148738 (NM_145277.2,1054-1072).
gggagctataaccattgat

SEQ ID NO: 414104 - DNA, 19 bp, Homo sapiens
  siRNA target sequence for LOC148738 (NM_145277.2,1291-1309).
cctttctgggctctttgtt

SEQ ID NO: 414105 - DNA, 19 bp, Homo sapiens
  siRNA target sequence for LOC148823 (NM_145278.1,205-223).
cttctaatcaggaaaacga

SEQ ID NO: 414106 - DNA, 19 bp, Homo sapiens
  siRNA target sequence for LOC148823 (NM_145278.1,250-268).
gctacactgtcattaatca

SEQ ID NO: 414107 - DNA, 19 bp, Homo sapiens
  siRNA target sequence for LOC148823 (NM_145278.1,338-356).
gaaagtgagacagtttaga

SEQ ID NO: 414108 - DNA, 19 bp, Homo sapiens
  siRNA target sequence for LOC148823 (NM_145278.1,342-360).
gtgagacagtttagagaaa

SEQ ID NO: 414109 - DNA, 19 bp, Homo sapiens
  siRNA target sequence for LOC148823 (NM_145278.1,380-398).
ccttcttaggacttctgtt

SEQ ID NO: 414110 - DNA, 19 bp, Homo sapiens
  siRNA target sequence for LOC148823 (NM_145278.1,384-402).
cttaggacttctgttagta

SEQ ID NO: 414111 - DNA, 19 bp, Homo sapiens
  siRNA target sequence for LOC148823 (NM_145278.1,418-436).
cccatgagcatgattatga

SEQ ID NO: 414112 - DNA, 19 bp, Homo sapiens
  siRNA target sequence for LOC151194 (NM_145280.3,202-220).
gaatttgggttgcagaaat

SEQ ID NO: 414113 - DNA, 19 bp, Homo sapiens
  siRNA target sequence for LOC151194 (NM_145280.3,313-331).
gatgcggccatcgttcttt

SEQ ID NO: 414114 - DNA, 19 bp, Homo sapiens
  siRNA target sequence for LOC151194 (NM_145280.3,441-459).
gactatcacggatcgaaaa

SEQ ID NO: 414115 - DNA, 19 bp, Homo sapiens
  siRNA target sequence for LOC151194 (NM_145280.3,443-461).
ctatcacggatcgaaaagt

SEQ ID NO: 414116 - DNA, 19 bp, Homo sapiens
  siRNA target sequence for LOC151194 (NM_145280.3,454-472).
cgaaaagtagcattagaat

SEQ ID NO: 414117 - DNA, 19 bp, Homo sapiens
  siRNA target sequence for LOC151194 (NM_145280.3,463-481).
gcattagaatttcttaaat

SEQ ID NO: 414118 - DNA, 19 bp, Homo sapiens
  siRNA target sequence for LOC151194 (NM_145280.3,498-516).
cttacctcctcatatccaa

SEQ ID NO: 414119 - DNA, 19 bp, Homo sapiens
  siRNA target sequence for LOC151194 (NM_145280.3,502-520).
cctcctcatatccaaacta

SEQ ID NO: 414120 - DNA, 19 bp, Homo sapiens
  siRNA target sequence for LOC151194 (NM_145280.3,503-521).
ctcctcatatccaaactaa

SEQ ID NO: 414121 - DNA, 19 bp, Homo sapiens
  siRNA target sequence for LOC151194 (NM_145280.3,537-555).
gctgacttggggacaaaat

SEQ ID NO: 414122 - DNA, 19 bp, Homo sapiens
  siRNA target sequence for LOC151194 (NM_145280.3,538-556).
ctgacttggggacaaaatt

SEQ ID NO: 414123 - DNA, 19 bp, Homo sapiens
  siRNA target sequence for LOC151194 (NM_145280.3,575-593).
gagaatttgacctgatact

SEQ ID NO: 414124 - DNA, 19 bp, Homo sapiens
  siRNA target sequence for LOC151194 (NM_145280.3,697-715).
cgctatgaacgggataaca

SEQ ID NO: 414125 - DNA, 19 bp, Homo sapiens
  siRNA target sequence for LOC151194 (NM_145280.3,698-716).
gctatgaacgggataacaa

SEQ ID NO: 414126 - DNA, 19 bp, Homo sapiens
  siRNA target sequence for LOC151194 (NM_145280.3,703-721).
gaacgggataacaacttct

SEQ ID NO: 414127 - DNA, 19 bp, Homo sapiens
  siRNA target sequence for LOC151194 (NM_145280.3,737-755).
ggcaatttattgtgagaaa

SEQ ID NO: 414128 - DNA, 19 bp, Homo sapiens
  siRNA target sequence for LOC151194 (NM_145280.3,765-783).
cgatcctgaaaaagatgta

SEQ ID NO: 414129 - DNA, 19 bp, Homo sapiens
  siRNA target sequence for LOC159090 (NM_145284.3,498-516).
gcagcgctcccctaatcca

SEQ ID NO: 414130 - DNA, 19 bp, Homo sapiens
  siRNA target sequence for LOC159090 (NM_145284.3,499-517).
cagcgctcccctaatccat

SEQ ID NO: 414131 - DNA, 19 bp, Homo sapiens
  siRNA target sequence for LOC159090 (NM_145284.3,529-547).
cctttcacaggttttccaa

SEQ ID NO: 414132 - DNA, 19 bp, Homo sapiens
  siRNA target sequence for LOC159090 (NM_145284.3,538-556).
ggttttccaaccttacaca

SEQ ID NO: 414133 - DNA, 19 bp, Homo sapiens
  siRNA target sequence for LOC159090 (NM_145284.3,544-562).
ccaaccttacacacttaga

SEQ ID NO: 414134 - DNA, 19 bp, Homo sapiens
  siRNA target sequence for LOC159090 (NM_145284.3,566-584).
cggaggaatagtacaacaa

SEQ ID NO: 414135 - DNA, 19 bp, Homo sapiens
  siRNA target sequence for LOC159090 (NM_145284.3,567-585).
ggaggaatagtacaacaat

SEQ ID NO: 414136 - DNA, 19 bp, Homo sapiens
  siRNA target sequence for LOC159090 (NM_145284.3,639-657).
cacatgaaagggaaatgca

SEQ ID NO: 414137 - DNA, 19 bp, Homo sapiens
  siRNA target sequence for LOC159090 (NM_145284.3,719-737).
gacaagccggagaaattat

SEQ ID NO: 414138 - DNA, 19 bp, Homo sapiens
  siRNA target sequence for LOC159090 (NM_145284.3,721-739).
caagccggagaaattatat

SEQ ID NO: 414139 - DNA, 19 bp, Homo sapiens
  siRNA target sequence for LOC159090 (NM_145284.3,724-742).
gccggagaaattatattct

SEQ ID NO: 414140 - DNA, 19 bp, Homo sapiens
  siRNA target sequence for LOC159090 (NM_145284.3,789-807).
ccaggggattcggaaagat

SEQ ID NO: 414141 - DNA, 19 bp, Homo sapiens
  siRNA target sequence for LOC159090 (NM_145284.3,792-810).
ggggattcggaaagatgtt

SEQ ID NO: 414142 - DNA, 19 bp, Homo sapiens
  siRNA target sequence for LOC159090 (NM_145284.3,847-865).
cagtccaagacgattttca

SEQ ID NO: 414143 - DNA, 19 bp, Homo sapiens
  siRNA target sequence for LOC159090 (NM_145284.3,967-985).
cttccaaggcactaccaat

SEQ ID NO: 414144 - DNA, 19 bp, Homo sapiens
  siRNA target sequence for LOC159090 (NM_145284.3,974-992).
ggcactaccaatatgttat

SEQ ID NO: 414145 - DNA, 19 bp, Homo sapiens
  siRNA target sequence for LOC159090 (NM_145284.3,1012-1030).
gtctgatctcagttcatgt

SEQ ID NO: 414146 - DNA, 19 bp, Homo sapiens
  siRNA target sequence for LOC159090 (NM_145284.3,1112-1130).
ccagtagcatgctccaatt

SEQ ID NO: 414147 - DNA, 19 bp, Homo sapiens
  siRNA target sequence for LOC159090 (NM_145284.3,1115-1133).
gtagcatgctccaattcat

SEQ ID NO: 414148 - DNA, 19 bp, Homo sapiens
  siRNA target sequence for LOC159090 (NM_145284.3,1134-1152).
gctcttcgttcatcttgat

SEQ ID NO: 414149 - DNA, 19 bp, Homo sapiens
  siRNA target sequence for ZNF509 (NM_145291.2,166-184).
gcatgagcagcgaatccaa

SEQ ID NO: 414150 - DNA, 19 bp, Homo sapiens
  siRNA target sequence for ZNF509 (NM_145291.2,199-217).
ctgtatgttggtggtaaaa

SEQ ID NO: 414151 - DNA, 19 bp, Homo sapiens
  siRNA target sequence for ZNF509 (NM_145291.2,225-243).
gctttaaagcgcataagaa

SEQ ID NO: 414152 - DNA, 19 bp, Homo sapiens
  siRNA target sequence for ZNF509 (NM_145291.2,251-269).
gcagcattcagccagtatt

SEQ ID NO: 414153 - DNA, 19 bp, Homo sapiens
  siRNA target sequence for ZNF509 (NM_145291.2,252-270).
cagcattcagccagtattt

SEQ ID NO: 414154 - DNA, 19 bp, Homo sapiens
  siRNA target sequence for ZNF509 (NM_145291.2,294-312).
caagccagaagaatgatgt

SEQ ID NO: 414155 - DNA, 19 bp, Homo sapiens
  siRNA target sequence for ZNF509 (NM_145291.2,364-382).
catgtacacttctcatcta

SEQ ID NO: 414156 - DNA, 19 bp, Homo sapiens
  siRNA target sequence for ZNF509 (NM_145291.2,367-385).
gtacacttctcatctagat

SEQ ID NO: 414157 - DNA, 19 bp, Homo sapiens
  siRNA target sequence for ZNF509 (NM_145291.2,370-388).
cacttctcatctagatctt

SEQ ID NO: 414158 - DNA, 19 bp, Homo sapiens
  siRNA target sequence for ZNF509 (NM_145291.2,372-390).
cttctcatctagatcttaa

SEQ ID NO: 414159 - DNA, 19 bp, Homo sapiens
  siRNA target sequence for ZNF509 (NM_145291.2,383-401).
gatcttaaccaggacaata

SEQ ID NO: 414160 - DNA, 19 bp, Homo sapiens
  siRNA target sequence for ZNF509 (NM_145291.2,451-469).
gagtctgtgtcacacattt

SEQ ID NO: 414161 - DNA, 19 bp, Homo sapiens
  siRNA target sequence for ZNF509 (NM_145291.2,500-518).
ggcatgccttgtaatagta

SEQ ID NO: 414162 - DNA, 19 bp, Homo sapiens
  siRNA target sequence for ZNF509 (NM_145291.2,502-520).
catgccttgtaatagtaca

SEQ ID NO: 414163 - DNA, 19 bp, Homo sapiens
  siRNA target sequence for ZNF509 (NM_145291.2,606-624).
cagatgcacagcagaacaa

SEQ ID NO: 414164 - DNA, 19 bp, Homo sapiens
  siRNA target sequence for ZNF509 (NM_145291.2,611-629).
gcacagcagaacaaaacgt

SEQ ID NO: 414165 - DNA, 19 bp, Homo sapiens
  siRNA target sequence for ZNF509 (NM_145291.2,674-692).
cactccgcaggtgaaatct

SEQ ID NO: 414166 - DNA, 19 bp, Homo sapiens
  siRNA target sequence for ZNF509 (NM_145291.2,676-694).
ctccgcaggtgaaatctca

SEQ ID NO: 414167 - DNA, 19 bp, Homo sapiens
  siRNA target sequence for ZNF509 (NM_145291.2,679-697).
cgcaggtgaaatctcaaaa

SEQ ID NO: 414168 - DNA, 19 bp, Homo sapiens
  siRNA target sequence for ZNF509 (NM_145291.2,742-760).
caaacagccaaattactat

SEQ ID NO: 414169 - DNA, 19 bp, Homo sapiens
  siRNA target sequence for ZNF509 (NM_145291.2,781-799).
cagtaagcagtaccataaa

SEQ ID NO: 414170 - DNA, 19 bp, Homo sapiens
  siRNA target sequence for ZNF509 (NM_145291.2,783-801).
gtaagcagtaccataaaca

SEQ ID NO: 414171 - DNA, 19 bp, Homo sapiens
  siRNA target sequence for ZNF509 (NM_145291.2,891-909).
gtgccgtcagtcattctga

SEQ ID NO: 414172 - DNA, 19 bp, Homo sapiens
  siRNA target sequence for ZNF509 (NM_145291.2,1101-1119).
ccaagtcagatgatggttt

SEQ ID NO: 414173 - DNA, 19 bp, Homo sapiens
  siRNA target sequence for ZNF509 (NM_145291.2,1105-1123).
gtcagatgatggtttgaca

SEQ ID NO: 414174 - DNA, 19 bp, Homo sapiens
  siRNA target sequence for ZNF509 (NM_145291.2,1128-1146).
ggttggaatctgctagtaa

SEQ ID NO: 414175 - DNA, 19 bp, Homo sapiens
  siRNA target sequence for ZNF509 (NM_145291.2,1132-1150).
ggaatctgctagtaaaaat

SEQ ID NO: 414176 - DNA, 19 bp, Homo sapiens
  siRNA target sequence for ZNF509 (NM_145291.2,1143-1161).
gtaaaaataccctagagaa

SEQ ID NO: 414177 - DNA, 19 bp, Homo sapiens
  siRNA target sequence for ZNF509 (NM_145291.2,1301-1319).
caatacgcgtgtgaattat

SEQ ID NO: 414178 - DNA, 19 bp, Homo sapiens
  siRNA target sequence for ZNF509 (NM_145291.2,1313-1331).
gaattatgcgggaaacctt

SEQ ID NO: 414179 - DNA, 19 bp, Homo sapiens
  siRNA target sequence for ZNF509 (NM_145291.2,1355-1373).
cttcacaaacggtctcata

SEQ ID NO: 414180 - DNA, 19 bp, Homo sapiens
  siRNA target sequence for ZNF509 (NM_145291.2,1513-1531).
cgacgtccagcgtcacatt

SEQ ID NO: 414181 - DNA, 19 bp, Homo sapiens
  siRNA target sequence for ZNF509 (NM_145291.2,1514-1532).
gacgtccagcgtcacatta

SEQ ID NO: 414182 - DNA, 19 bp, Homo sapiens
  siRNA target sequence for ZNF509 (NM_145291.2,1516-1534).
cgtccagcgtcacattatt

SEQ ID NO: 414183 - DNA, 19 bp, Homo sapiens
  siRNA target sequence for ZNF509 (NM_145291.2,1517-1535).
gtccagcgtcacattatta

SEQ ID NO: 414184 - DNA, 19 bp, Homo sapiens
  siRNA target sequence for ZNF509 (NM_145291.2,1523-1541).
cgtcacattattattcact

SEQ ID NO: 414185 - DNA, 19 bp, Homo sapiens
  siRNA target sequence for ZNF509 (NM_145291.2,1572-1590).
gtggtcgagggtttagtaa

SEQ ID NO: 414186 - DNA, 19 bp, Homo sapiens
  siRNA target sequence for ZNF509 (NM_145291.2,1574-1592).
ggtcgagggtttagtaact

SEQ ID NO: 414187 - DNA, 19 bp, Homo sapiens
  siRNA target sequence for ZNF509 (NM_145291.2,1575-1593).
gtcgagggtttagtaactt

SEQ ID NO: 414188 - DNA, 19 bp, Homo sapiens
  siRNA target sequence for ZNF509 (NM_145291.2,1577-1595).
cgagggtttagtaacttca

SEQ ID NO: 414189 - DNA, 19 bp, Homo sapiens
  siRNA target sequence for ZNF509 (NM_145291.2,1581-1599).
ggtttagtaacttcagtaa

SEQ ID NO: 414190 - DNA, 19 bp, Homo sapiens
  siRNA target sequence for ZNF509 (NM_145291.2,1582-1600).
gtttagtaacttcagtaat

SEQ ID NO: 414191 - DNA, 19 bp, Homo sapiens
  siRNA target sequence for ZNF509 (NM_145291.2,1618-1636).
gacacacacggctgataaa

SEQ ID NO: 414192 - DNA, 19 bp, Homo sapiens
  siRNA target sequence for ZNF509 (NM_145291.2,1659-1677).
gaaagtcttttaatatgca

SEQ ID NO: 414193 - DNA, 19 bp, Homo sapiens
  siRNA target sequence for ZNF509 (NM_145291.2,1665-1683).
cttttaatatgcaaaggaa

SEQ ID NO: 414194 - DNA, 19 bp, Homo sapiens
  siRNA target sequence for ZNF509 (NM_145291.2,1936-1954).
ctccgacctcgagaaatct

SEQ ID NO: 414195 - DNA, 19 bp, Homo sapiens
  siRNA target sequence for ZNF509 (NM_145291.2,1938-1956).
ccgacctcgagaaatctca

SEQ ID NO: 414196 - DNA, 19 bp, Homo sapiens
  siRNA target sequence for ZNF509 (NM_145291.2,1996-2014).
gatgccagtgtcggttaaa

SEQ ID NO: 414197 - DNA, 19 bp, Homo sapiens
  siRNA target sequence for ZNF509 (NM_145291.2,2021-2039).
gtccacccagtggaaaatt

SEQ ID NO: 414198 - DNA, 19 bp, Homo sapiens
  siRNA target sequence for ZNF509 (NM_145291.2,2060-2078).
cactctggcggctcctatt

SEQ ID NO: 414199 - DNA, 19 bp, Homo sapiens
  siRNA target sequence for ZNF509 (NM_145291.2,2064-2082).
ctggcggctcctattgtaa

SEQ ID NO: 414200 - DNA, 19 bp, Homo sapiens
  siRNA target sequence for ZNF509 (NM_145291.2,2066-2084).
ggcggctcctattgtaagt

SEQ ID NO: 414201 - DNA, 19 bp, Homo sapiens
  siRNA target sequence for ZNF509 (NM_145291.2,2067-2085).
gcggctcctattgtaagtt

SEQ ID NO: 414202 - DNA, 19 bp, Homo sapiens
  siRNA target sequence for ZNF509 (NM_145291.2,2068-2086).
cggctcctattgtaagtta

SEQ ID NO: 414203 - DNA, 19 bp, Homo sapiens
  siRNA target sequence for ZNF509 (NM_145291.2,2332-2350).
gaactcagagggtcagttt

SEQ ID NO: 414204 - DNA, 19 bp, Homo sapiens
  siRNA target sequence for ZNF509 (NM_145291.2,2388-2406).
cgctgcagaatgaaaacga

SEQ ID NO: 414205 - DNA, 19 bp, Homo sapiens
  siRNA target sequence for GALNT15 (NM_145292.2,253-271).
ctatgggtccttgacattt

SEQ ID NO: 414206 - DNA, 19 bp, Homo sapiens
  siRNA target sequence for GALNT15 (NM_145292.2,356-374).
gcttggtcccctggaaaaa

SEQ ID NO: 414207 - DNA, 19 bp, Homo sapiens
  siRNA target sequence for GALNT15 (NM_145292.2,360-378).
ggtcccctggaaaaaaagt

SEQ ID NO: 414208 - DNA, 19 bp, Homo sapiens
  siRNA target sequence for GALNT15 (NM_145292.2,377-395).
gtgcatcagcaaattatct

SEQ ID NO: 414209 - DNA, 19 bp, Homo sapiens
  siRNA target sequence for GALNT15 (NM_145292.2,394-412).
ctatggctcagagcaaata

SEQ ID NO: 414210 - DNA, 19 bp, Homo sapiens
  siRNA target sequence for GALNT15 (NM_145292.2,399-417).
gctcagagcaaataccaaa

SEQ ID NO: 414211 - DNA, 19 bp, Homo sapiens
  siRNA target sequence for GALNT15 (NM_145292.2,449-467).
gataaagcaaagtctatgt

SEQ ID NO: 414212 - DNA, 19 bp, Homo sapiens
  siRNA target sequence for GALNT15 (NM_145292.2,455-473).
gcaaagtctatgttaggta

SEQ ID NO: 414213 - DNA, 19 bp, Homo sapiens
  siRNA target sequence for GALNT15 (NM_145292.2,462-480).
ctatgttaggtacagattt

SEQ ID NO: 414214 - DNA, 19 bp, Homo sapiens
  siRNA target sequence for GALNT15 (NM_145292.2,470-488).
ggtacagattttaaccata

SEQ ID NO: 414215 - DNA, 19 bp, Homo sapiens
  siRNA target sequence for GALNT15 (NM_145292.2,484-502).
ccatacaaacccagaactt

SEQ ID NO: 414216 - DNA, 19 bp, Homo sapiens
  siRNA target sequence for GALNT15 (NM_145292.2,550-568).
cttgggcatcgaaagagaa

SEQ ID NO: 414217 - DNA, 19 bp, Homo sapiens
  siRNA target sequence for GALNT15 (NM_145292.2,571-589).
gccagataccaggagtaaa

SEQ ID NO: 414218 - DNA, 19 bp, Homo sapiens
  siRNA target sequence for GALNT15 (NM_145292.2,623-641).
ccgactgccagcattgtca

SEQ ID NO: 414219 - DNA, 19 bp, Homo sapiens
  siRNA target sequence for GALNT15 (NM_145292.2,624-642).
cgactgccagcattgtcat

SEQ ID NO: 414220 - DNA, 19 bp, Homo sapiens
  siRNA target sequence for GALNT15 (NM_145292.2,697-715).
gaacctcacgccacactat

SEQ ID NO: 414221 - DNA, 19 bp, Homo sapiens
  siRNA target sequence for GALNT15 (NM_145292.2,703-721).
cacgccacactattttctt

SEQ ID NO: 414222 - DNA, 19 bp, Homo sapiens
  siRNA target sequence for GALNT15 (NM_145292.2,705-723).
cgccacactattttcttga

SEQ ID NO: 414223 - DNA, 19 bp, Homo sapiens
  siRNA target sequence for GALNT15 (NM_145292.2,706-724).
gccacactattttcttgaa

SEQ ID NO: 414224 - DNA, 19 bp, Homo sapiens
  siRNA target sequence for GALNT15 (NM_145292.2,745-763).
catgagcaaagttgatgat

SEQ ID NO: 414225 - DNA, 19 bp, Homo sapiens
  siRNA target sequence for GALNT15 (NM_145292.2,800-818).
cggggaaaggttaaaataa

SEQ ID NO: 414226 - DNA, 19 bp, Homo sapiens
  siRNA target sequence for GALNT15 (NM_145292.2,957-975).
ccaaggaccccaaaatggt

SEQ ID NO: 414227 - DNA, 19 bp, Homo sapiens
  siRNA target sequence for GALNT15 (NM_145292.2,992-1010).
gatgtcattgatgatagaa

SEQ ID NO: 414228 - DNA, 19 bp, Homo sapiens
  siRNA target sequence for GALNT15 (NM_145292.2,1032-1050).
ctcttgtaaggggaacttt

SEQ ID NO: 414229 - DNA, 19 bp, Homo sapiens
  siRNA target sequence for GALNT15 (NM_145292.2,1041-1059).
ggggaacttttgattggaa

SEQ ID NO: 414230 - DNA, 19 bp, Homo sapiens
  siRNA target sequence for GALNT15 (NM_145292.2,1109-1127).
gaaggatctactaaaccaa

SEQ ID NO: 414231 - DNA, 19 bp, Homo sapiens
  siRNA target sequence for GALNT15 (NM_145292.2,1160-1178).
gctatacgtcggcattatt

SEQ ID NO: 414232 - DNA, 19 bp, Homo sapiens
  siRNA target sequence for GALNT15 (NM_145292.2,1161-1179).
ctatacgtcggcattattt

SEQ ID NO: 414233 - DNA, 19 bp, Homo sapiens
  siRNA target sequence for GALNT15 (NM_145292.2,1167-1185).
gtcggcattattttaatga

SEQ ID NO: 414234 - DNA, 19 bp, Homo sapiens
  siRNA target sequence for GALNT15 (NM_145292.2,1191-1209).
gacagtatgacaaggatat

SEQ ID NO: 414235 - DNA, 19 bp, Homo sapiens
  siRNA target sequence for GALNT15 (NM_145292.2,1195-1213).
gtatgacaaggatatggat

SEQ ID NO: 414236 - DNA, 19 bp, Homo sapiens
  siRNA target sequence for GALNT15 (NM_145292.2,1260-1278).
gtggaggccaactctttat

SEQ ID NO: 414237 - DNA, 19 bp, Homo sapiens
  siRNA target sequence for GALNT15 (NM_145292.2,1262-1280).
ggaggccaactctttataa

SEQ ID NO: 414238 - DNA, 19 bp, Homo sapiens
  siRNA target sequence for GALNT15 (NM_145292.2,1263-1281).
gaggccaactctttataat

SEQ ID NO: 414239 - DNA, 19 bp, Homo sapiens
  siRNA target sequence for GALNT15 (NM_145292.2,1292-1310).
cgagtaggacatatcagta

SEQ ID NO: 414240 - DNA, 19 bp, Homo sapiens
  siRNA target sequence for GALNT15 (NM_145292.2,1293-1311).
gagtaggacatatcagtaa

SEQ ID NO: 414241 - DNA, 19 bp, Homo sapiens
  siRNA target sequence for GALNT15 (NM_145292.2,1295-1313).
gtaggacatatcagtaaga

SEQ ID NO: 414242 - DNA, 19 bp, Homo sapiens
  siRNA target sequence for GALNT15 (NM_145292.2,1323-1341).
gaaaaccttctacaatcat

SEQ ID NO: 414243 - DNA, 19 bp, Homo sapiens
  siRNA target sequence for GALNT15 (NM_145292.2,1344-1362).
gtgctatgacacataacta

SEQ ID NO: 414244 - DNA, 19 bp, Homo sapiens
  siRNA target sequence for GALNT15 (NM_145292.2,1353-1371).
cacataactacctaagact

SEQ ID NO: 414245 - DNA, 19 bp, Homo sapiens
  siRNA target sequence for GALNT15 (NM_145292.2,1376-1394).
cacgtttggctggatgaat

SEQ ID NO: 414246 - DNA, 19 bp, Homo sapiens
  siRNA target sequence for GALNT15 (NM_145292.2,1415-1433).
cgaaagcctggtctgaaat

SEQ ID NO: 414247 - DNA, 19 bp, Homo sapiens
  siRNA target sequence for GALNT15 (NM_145292.2,1416-1434).
gaaagcctggtctgaaata

SEQ ID NO: 414248 - DNA, 19 bp, Homo sapiens
  siRNA target sequence for GALNT15 (NM_145292.2,1454-1472).
cgcgagcgtgttgagttaa

SEQ ID NO: 414249 - DNA, 19 bp, Homo sapiens
  siRNA target sequence for GALNT15 (NM_145292.2,1478-1496).
cgactgggttgcaagtcat

SEQ ID NO: 414250 - DNA, 19 bp, Homo sapiens
  siRNA target sequence for LOC197336 (NM_145294.3,608-626).
cctgggggctggaatagga

SEQ ID NO: 414251 - DNA, 19 bp, Homo sapiens
  siRNA target sequence for LOC197336 (NM_145294.3,609-627).
ctgggggctggaataggaa

SEQ ID NO: 414252 - DNA, 19 bp, Homo sapiens
  siRNA target sequence for LOC197336 (NM_145294.3,893-911).
ggctccctgcgcatcttca

SEQ ID NO: 414253 - DNA, 19 bp, Homo sapiens
  siRNA target sequence for LOC197336 (NM_145294.3,1223-1241).
cttgtggactggttgagtt

SEQ ID NO: 414254 - DNA, 19 bp, Homo sapiens
  siRNA target sequence for LOC197336 (NM_145294.3,1254-1272).
ccaccacggaggtaaacca

SEQ ID NO: 414255 - DNA, 19 bp, Homo sapiens
  siRNA target sequence for LOC197336 (NM_145294.3,1255-1273).
caccacggaggtaaaccat

SEQ ID NO: 414256 - DNA, 19 bp, Homo sapiens
  siRNA target sequence for TSLL2 (NM_145296.1,180-198).
gccgtctgcaccagtatga

SEQ ID NO: 414257 - DNA, 19 bp, Homo sapiens
  siRNA target sequence for TSLL2 (NM_145296.1,193-211).
gtatgatgggtccatagtt

SEQ ID NO: 414258 - DNA, 19 bp, Homo sapiens
  siRNA target sequence for TSLL2 (NM_145296.1,396-414).
ccacgctcacggtactagt

SEQ ID NO: 414259 - DNA, 19 bp, Homo sapiens
  siRNA target sequence for TSLL2 (NM_145296.1,626-644).
gacggtggtatcatcatct

SEQ ID NO: 414260 - DNA, 19 bp, Homo sapiens
  siRNA target sequence for TSLL2 (NM_145296.1,902-920).
gataacggcacctacactt

SEQ ID NO: 414261 - DNA, 19 bp, Homo sapiens
  siRNA target sequence for TSLL2 (NM_145296.1,918-936).
cttgcgaggcgtccaataa

SEQ ID NO: 414262 - DNA, 19 bp, Homo sapiens
  siRNA target sequence for TSLL2 (NM_145296.1,921-939).
gcgaggcgtccaataagca

SEQ ID NO: 414263 - DNA, 19 bp, Homo sapiens
  siRNA target sequence for TSLL2 (NM_145296.1,951-969).
gggcgctctacgtacttgt

SEQ ID NO: 414264 - DNA, 19 bp, Homo sapiens
  siRNA target sequence for APOBEC3F (NM_145298.3,921-939).
gcctatggtcggaacgaaa

SEQ ID NO: 414265 - DNA, 19 bp, Homo sapiens
  siRNA target sequence for APOBEC3F (NM_145298.3,950-968).
cttcaccatggaagttgta

SEQ ID NO: 414266 - DNA, 19 bp, Homo sapiens
  siRNA target sequence for APOBEC3F (NM_145298.3,1277-1295).
ggagatcatgggctacaaa

SEQ ID NO: 414267 - DNA, 19 bp, Homo sapiens
  siRNA target sequence for APOBEC3F (NM_145298.3,1350-1368).
ccttggaaaggactaaaat

SEQ ID NO: 414268 - DNA, 19 bp, Homo sapiens
  siRNA target sequence for LOC200420 (NM_145300.1,705-723).
ccactgaagctgtttgtga

SEQ ID NO: 414269 - DNA, 19 bp, Homo sapiens
  siRNA target sequence for LOC201158 (NM_145301.1,772-790).
caggcaactgccaacagat

SEQ ID NO: 414270 - DNA, 19 bp, Homo sapiens
  siRNA target sequence for C7orf33 (NM_145304.2,519-537).
gcggtccaggtcaatttaa

SEQ ID NO: 414271 - DNA, 19 bp, Homo sapiens
  siRNA target sequence for C7orf33 (NM_145304.2,521-539).
ggtccaggtcaatttaact

SEQ ID NO: 414272 - DNA, 19 bp, Homo sapiens
  siRNA target sequence for C7orf33 (NM_145304.2,524-542).
ccaggtcaatttaacttgt

SEQ ID NO: 414273 - DNA, 19 bp, Homo sapiens
  siRNA target sequence for C7orf33 (NM_145304.2,527-545).
ggtcaatttaacttgtcat

SEQ ID NO: 414274 - DNA, 19 bp, Homo sapiens
  siRNA target sequence for C7orf33 (NM_145304.2,528-546).
gtcaatttaacttgtcata

SEQ ID NO: 414275 - DNA, 19 bp, Homo sapiens
  siRNA target sequence for C7orf33 (NM_145304.2,617-635).
gtatcagctcccaccaaat

SEQ ID NO: 414276 - DNA, 19 bp, Homo sapiens
  siRNA target sequence for C7orf33 (NM_145304.2,639-657).
gtgccccgtggcattttct

SEQ ID NO: 414277 - DNA, 19 bp, Homo sapiens
  siRNA target sequence for C7orf33 (NM_145304.2,641-659).
gccccgtggcattttcttt

SEQ ID NO: 414278 - DNA, 19 bp, Homo sapiens
  siRNA target sequence for C7orf33 (NM_145304.2,680-698).
cagagagcagtcagaatca

SEQ ID NO: 414279 - DNA, 19 bp, Homo sapiens
  siRNA target sequence for C7orf33 (NM_145304.2,734-752).
gttgtcggcaccttgtctt

SEQ ID NO: 414280 - DNA, 19 bp, Homo sapiens
  siRNA target sequence for C7orf33 (NM_145304.2,767-785).
ctgctaactctctcttaca

SEQ ID NO: 414281 - DNA, 19 bp, Homo sapiens
  siRNA target sequence for C7orf33 (NM_145304.2,793-811).
gaggacagtgacaagttca

SEQ ID NO: 414282 - DNA, 19 bp, Homo sapiens
  siRNA target sequence for C7orf33 (NM_145304.2,795-813).
ggacagtgacaagttcata

SEQ ID NO: 414283 - DNA, 19 bp, Homo sapiens
  siRNA target sequence for C7orf33 (NM_145304.2,804-822).
caagttcatacctaaacgt

SEQ ID NO: 414284 - DNA, 19 bp, Homo sapiens
  siRNA target sequence for C7orf33 (NM_145304.2,820-838).
cgtacgtgggcatgaagta

SEQ ID NO: 414285 - DNA, 19 bp, Homo sapiens
  siRNA target sequence for C7orf33 (NM_145304.2,821-839).
gtacgtgggcatgaagtaa

SEQ ID NO: 414286 - DNA, 19 bp, Homo sapiens
  siRNA target sequence for C7orf33 (NM_145304.2,824-842).
cgtgggcatgaagtaagaa

SEQ ID NO: 414287 - DNA, 19 bp, Homo sapiens
  siRNA target sequence for C7orf33 (NM_145304.2,860-878).
gaggccacaaggatttcca

SEQ ID NO: 414288 - DNA, 19 bp, Homo sapiens
  siRNA target sequence for RTKN2 (NM_145307.2,154-172).
gcaggactgcaacattcaa

SEQ ID NO: 414289 - DNA, 19 bp, Homo sapiens
  siRNA target sequence for RTKN2 (NM_145307.2,194-212).
cgaatgcgagaaggaatat

SEQ ID NO: 414290 - DNA, 19 bp, Homo sapiens
  siRNA target sequence for RTKN2 (NM_145307.2,229-247).
gagcactcagaaagatcaa

SEQ ID NO: 414291 - DNA, 19 bp, Homo sapiens
  siRNA target sequence for RTKN2 (NM_145307.2,287-305).
cgactaatggcctatacat

SEQ ID NO: 414292 - DNA, 19 bp, Homo sapiens
  siRNA target sequence for RTKN2 (NM_145307.2,303-321).
catcggagctacagaaatt

SEQ ID NO: 414293 - DNA, 19 bp, Homo sapiens
  siRNA target sequence for RTKN2 (NM_145307.2,380-398).
cgaacagcatgtaaaggaa

SEQ ID NO: 414294 - DNA, 19 bp, Homo sapiens
  siRNA target sequence for RTKN2 (NM_145307.2,396-414).
gaaagattgccatatcaga

SEQ ID NO: 414295 - DNA, 19 bp, Homo sapiens
  siRNA target sequence for RTKN2 (NM_145307.2,425-443).
ccactaatgtggaaagact

SEQ ID NO: 414296 - DNA, 19 bp, Homo sapiens
  siRNA target sequence for RTKN2 (NM_145307.2,435-453).
ggaaagactctgatcactt

SEQ ID NO: 414297 - DNA, 19 bp, Homo sapiens
  siRNA target sequence for RTKN2 (NM_145307.2,471-489).
cacgacgctatgccatttt

SEQ ID NO: 414298 - DNA, 19 bp, Homo sapiens
  siRNA target sequence for RTKN2 (NM_145307.2,473-491).
cgacgctatgccatttttt

SEQ ID NO: 414299 - DNA, 19 bp, Homo sapiens
  siRNA target sequence for RTKN2 (NM_145307.2,596-614).
gggccagactttcagataa

SEQ ID NO: 414300 - DNA, 19 bp, Homo sapiens
  siRNA target sequence for RTKN2 (NM_145307.2,634-652).
ctgtacagaagaatcttct

SEQ ID NO: 414301 - DNA, 19 bp, Homo sapiens
  siRNA target sequence for RTKN2 (NM_145307.2,636-654).
gtacagaagaatcttctat

SEQ ID NO: 414302 - DNA, 19 bp, Homo sapiens
  siRNA target sequence for RTKN2 (NM_145307.2,663-681).
caccaaaaaagctagctaa

SEQ ID NO: 414303 - DNA, 19 bp, Homo sapiens
  siRNA target sequence for RTKN2 (NM_145307.2,666-684).
caaaaaagctagctaagaa

SEQ ID NO: 414304 - DNA, 19 bp, Homo sapiens
  siRNA target sequence for RTKN2 (NM_145307.2,779-797).
gtttttggtgtaaagtata

SEQ ID NO: 414305 - DNA, 19 bp, Homo sapiens
  siRNA target sequence for RTKN2 (NM_145307.2,843-861).
gtttcaagacccataatct

SEQ ID NO: 414306 - DNA, 19 bp, Homo sapiens
  siRNA target sequence for RTKN2 (NM_145307.2,913-931).
catgtgctgccgactagtt

SEQ ID NO: 414307 - DNA, 19 bp, Homo sapiens
  siRNA target sequence for RTKN2 (NM_145307.2,955-973).
ggatgcatttgcaggattt

SEQ ID NO: 414308 - DNA, 19 bp, Homo sapiens
  siRNA target sequence for RTKN2 (NM_145307.2,992-1010).
gtagaaggtctgattagtt

SEQ ID NO: 414309 - DNA, 19 bp, Homo sapiens
  siRNA target sequence for RTKN2 (NM_145307.2,1011-1029).
ggagaaggttgtattgtgt

SEQ ID NO: 414310 - DNA, 19 bp, Homo sapiens
  siRNA target sequence for RTKN2 (NM_145307.2,1012-1030).
gagaaggttgtattgtgtt

SEQ ID NO: 414311 - DNA, 19 bp, Homo sapiens
  siRNA target sequence for RTKN2 (NM_145307.2,1033-1051).
gcgaggaggtaaactctat

SEQ ID NO: 414312 - DNA, 19 bp, Homo sapiens
  siRNA target sequence for RTKN2 (NM_145307.2,1034-1052).
cgaggaggtaaactctatt

SEQ ID NO: 414313 - DNA, 19 bp, Homo sapiens
  siRNA target sequence for RTKN2 (NM_145307.2,1041-1059).
gtaaactctattgttttta

SEQ ID NO: 414314 - DNA, 19 bp, Homo sapiens
  siRNA target sequence for RTKN2 (NM_145307.2,1095-1113).
ctttggtagtacccattaa

SEQ ID NO: 414315 - DNA, 19 bp, Homo sapiens
  siRNA target sequence for RTKN2 (NM_145307.2,1123-1141).
cagaatccgggcaatggat

SEQ ID NO: 414316 - DNA, 19 bp, Homo sapiens
  siRNA target sequence for RTKN2 (NM_145307.2,1129-1147).
ccgggcaatggataaggat

SEQ ID NO: 414317 - DNA, 19 bp, Homo sapiens
  siRNA target sequence for RTKN2 (NM_145307.2,1150-1168).
caagaaaagaatccataat

SEQ ID NO: 414318 - DNA, 19 bp, Homo sapiens
  siRNA target sequence for RTKN2 (NM_145307.2,1256-1274).
gccttctggcagcatttct

SEQ ID NO: 414319 - DNA, 19 bp, Homo sapiens
  siRNA target sequence for RTKN2 (NM_145307.2,1299-1317).
gttgtgaagaacttatgaa

SEQ ID NO: 414320 - DNA, 19 bp, Homo sapiens
  siRNA target sequence for RTKN2 (NM_145307.2,1335-1353).
cacggaaaccacctttgtt

SEQ ID NO: 414321 - DNA, 19 bp, Homo sapiens
  siRNA target sequence for RTKN2 (NM_145307.2,1371-1389).
cctcagtctaccatgatat

SEQ ID NO: 414322 - DNA, 19 bp, Homo sapiens
  siRNA target sequence for RTKN2 (NM_145307.2,1381-1399).
ccatgatatgagcattgat

SEQ ID NO: 414323 - DNA, 19 bp, Homo sapiens
  siRNA target sequence for RTKN2 (NM_145307.2,1382-1400).
catgatatgagcattgatt

SEQ ID NO: 414324 - DNA, 19 bp, Homo sapiens
  siRNA target sequence for RTKN2 (NM_145307.2,1419-1437).
gtttaacggatataataca

SEQ ID NO: 414325 - DNA, 19 bp, Homo sapiens
  siRNA target sequence for RTKN2 (NM_145307.2,1509-1527).
ccacactctttgatggtaa

SEQ ID NO: 414326 - DNA, 19 bp, Homo sapiens
  siRNA target sequence for RTKN2 (NM_145307.2,1537-1555).
ggtcatccagaaaaaggta

SEQ ID NO: 414327 - DNA, 19 bp, Homo sapiens
  siRNA target sequence for RTKN2 (NM_145307.2,1563-1581).
ctgcaagtgagccattaca

SEQ ID NO: 414328 - DNA, 19 bp, Homo sapiens
  siRNA target sequence for RTKN2 (NM_145307.2,1566-1584).
caagtgagccattacatga

SEQ ID NO: 414329 - DNA, 19 bp, Homo sapiens
  siRNA target sequence for RTKN2 (NM_145307.2,1569-1587).
gtgagccattacatgatga

SEQ ID NO: 414330 - DNA, 19 bp, Homo sapiens
  siRNA target sequence for RTKN2 (NM_145307.2,1631-1649).
cttccattcagcttaaaat

SEQ ID NO: 414331 - DNA, 19 bp, Homo sapiens
  siRNA target sequence for RTKN2 (NM_145307.2,1656-1674).
gtaacacagatcaattggt

SEQ ID NO: 414332 - DNA, 19 bp, Homo sapiens
  siRNA target sequence for RTKN2 (NM_145307.2,1706-1724).
cagacatcgtctttggata

SEQ ID NO: 414333 - DNA, 19 bp, Homo sapiens
  siRNA target sequence for RTKN2 (NM_145307.2,1710-1728).
catcgtctttggataccaa

SEQ ID NO: 414334 - DNA, 19 bp, Homo sapiens
  siRNA target sequence for RTKN2 (NM_145307.2,1720-1738).
ggataccaaactatcaact

SEQ ID NO: 414335 - DNA, 19 bp, Homo sapiens
  siRNA target sequence for RTKN2 (NM_145307.2,1767-1785).
ctgctcctcgaaaacttct

SEQ ID NO: 414336 - DNA, 19 bp, Homo sapiens
  siRNA target sequence for RTKN2 (NM_145307.2,1815-1833).
gtgagcacacagacactaa

SEQ ID NO: 414337 - DNA, 19 bp, Homo sapiens
  siRNA target sequence for RTKN2 (NM_145307.2,1888-1906).
cattctggaccctagatca

SEQ ID NO: 414338 - DNA, 19 bp, Homo sapiens
  siRNA target sequence for LOC220070 (NM_145308.2,307-325).
ccacctgctcccatgcaaa

SEQ ID NO: 414339 - DNA, 19 bp, Homo sapiens
  siRNA target sequence for LOC220070 (NM_145308.2,308-326).
cacctgctcccatgcaaat

SEQ ID NO: 414340 - DNA, 19 bp, Homo sapiens
  siRNA target sequence for LOC220070 (NM_145308.2,352-370).
gaaggagaggtgtgttgta

SEQ ID NO: 414341 - DNA, 19 bp, Homo sapiens
  siRNA target sequence for LOC220074 (NM_145309.1,176-194).
cgggactatatgaacactt

SEQ ID NO: 414342 - DNA, 19 bp, Homo sapiens
  siRNA target sequence for LOC220074 (NM_145309.1,231-249).
gcatccacgtcattcaaga

SEQ ID NO: 414343 - DNA, 19 bp, Homo sapiens
  siRNA target sequence for LOC220074 (NM_145309.1,232-250).
catccacgtcattcaagat

SEQ ID NO: 414344 - DNA, 19 bp, Homo sapiens
  siRNA target sequence for LOC220074 (NM_145309.1,241-259).
cattcaagatctggtaaat

SEQ ID NO: 414345 - DNA, 19 bp, Homo sapiens
  siRNA target sequence for LOC220074 (NM_145309.1,282-300).
gaccactgaagcgttcaaa

SEQ ID NO: 414346 - DNA, 19 bp, Homo sapiens
  siRNA target sequence for LOC220074 (NM_145309.1,297-315).
caaagtcggggaaatcact

SEQ ID NO: 414347 - DNA, 19 bp, Homo sapiens
  siRNA target sequence for LOC220074 (NM_145309.1,324-342).
ccctgtggctgaataacaa

SEQ ID NO: 414348 - DNA, 19 bp, Homo sapiens
  siRNA target sequence for LOC220074 (NM_145309.1,330-348).
ggctgaataacaatgttct

SEQ ID NO: 414349 - DNA, 19 bp, Homo sapiens
  siRNA target sequence for LOC220074 (NM_145309.1,414-432).
ggatcgacctgtcctttaa

SEQ ID NO: 414350 - DNA, 19 bp, Homo sapiens
  siRNA target sequence for LOC220074 (NM_145309.1,415-433).
gatcgacctgtcctttaat

SEQ ID NO: 414351 - DNA, 19 bp, Homo sapiens
  siRNA target sequence for LOC220074 (NM_145309.1,475-493).
cctgagtgtcctctatctt

SEQ ID NO: 414352 - DNA, 19 bp, Homo sapiens
  siRNA target sequence for LOC220074 (NM_145309.1,512-530).
cgcctgggggaggtgaata

SEQ ID NO: 414353 - DNA, 19 bp, Homo sapiens
  siRNA target sequence for LOC220074 (NM_145309.1,592-610).
gaaagggtataggcaatat

SEQ ID NO: 414354 - DNA, 19 bp, Homo sapiens
  siRNA target sequence for LOC220074 (NM_145309.1,686-704).
gtctggaaacgcatgaaca

SEQ ID NO: 414355 - DNA, 19 bp, Homo sapiens
  siRNA target sequence for LOC220074 (NM_145309.1,723-741).
ggaccaagcagaatacact

SEQ ID NO: 414356 - DNA, 19 bp, Homo sapiens
  siRNA target sequence for LOC220074 (NM_145309.1,724-742).
gaccaagcagaatacactt

SEQ ID NO: 414357 - DNA, 19 bp, Homo sapiens
  siRNA target sequence for LOC221044 (NM_145314.1,320-338).
gatgagctgcggagagaat

SEQ ID NO: 414358 - DNA, 19 bp, Homo sapiens
  siRNA target sequence for LOC221044 (NM_145314.1,354-372).
ggaatgaatttgagaactt

SEQ ID NO: 414359 - DNA, 19 bp, Homo sapiens
  siRNA target sequence for LOC221044 (NM_145314.1,429-447).
ggcgccagtggcactatga

SEQ ID NO: 414360 - DNA, 19 bp, Homo sapiens
  siRNA target sequence for LOC221044 (NM_145314.1,448-466).
cggcctgcacccatcctat

SEQ ID NO: 414361 - DNA, 19 bp, Homo sapiens
  siRNA target sequence for LOC221044 (NM_145314.1,543-561).
ccgtgttccagcaatcttt

SEQ ID NO: 414362 - DNA, 19 bp, Homo sapiens
  siRNA target sequence for LOC221044 (NM_145314.1,553-571).
gcaatctttcccatgcaaa

SEQ ID NO: 414363 - DNA, 19 bp, Homo sapiens
  siRNA target sequence for LOC221044 (NM_145314.1,652-670).
gtgaaagtgtcctgacttt

SEQ ID NO: 414364 - DNA, 19 bp, Homo sapiens
  siRNA target sequence for LOC221044 (NM_145314.1,654-672).
gaaagtgtcctgactttca

SEQ ID NO: 414365 - DNA, 19 bp, Homo sapiens
  siRNA target sequence for LACE1 (NM_145315.2,364-382).
gccacttcagagacttatt

SEQ ID NO: 414366 - DNA, 19 bp, Homo sapiens
  siRNA target sequence for LACE1 (NM_145315.2,365-383).
ccacttcagagacttattt

SEQ ID NO: 414367 - DNA, 19 bp, Homo sapiens
  siRNA target sequence for LACE1 (NM_145315.2,499-517).
cacgaggaccttaaaggat

SEQ ID NO: 414368 - DNA, 19 bp, Homo sapiens
  siRNA target sequence for LACE1 (NM_145315.2,504-522).
ggaccttaaaggatacaat

SEQ ID NO: 414369 - DNA, 19 bp, Homo sapiens
  siRNA target sequence for LACE1 (NM_145315.2,505-523).
gaccttaaaggatacaata

SEQ ID NO: 414370 - DNA, 19 bp, Homo sapiens
  siRNA target sequence for LACE1 (NM_145315.2,535-553).
ggccttttttcaaagcttt

SEQ ID NO: 414371 - DNA, 19 bp, Homo sapiens
  siRNA target sequence for LACE1 (NM_145315.2,621-639).
gatggacatgttttatgct

SEQ ID NO: 414372 - DNA, 19 bp, Homo sapiens
  siRNA target sequence for LACE1 (NM_145315.2,657-675).
gaaaaaacgggttcatttt

SEQ ID NO: 414373 - DNA, 19 bp, Homo sapiens
  siRNA target sequence for LACE1 (NM_145315.2,704-722).
gaatacatcgccttaaaca

SEQ ID NO: 414374 - DNA, 19 bp, Homo sapiens
  siRNA target sequence for LACE1 (NM_145315.2,745-763).
ggattcatggctaaatcat

SEQ ID NO: 414375 - DNA, 19 bp, Homo sapiens
  siRNA target sequence for LACE1 (NM_145315.2,746-764).
gattcatggctaaatcata

SEQ ID NO: 414376 - DNA, 19 bp, Homo sapiens
  siRNA target sequence for LACE1 (NM_145315.2,775-793).
gctcccatagccgaagaaa

SEQ ID NO: 414377 - DNA, 19 bp, Homo sapiens
  siRNA target sequence for LACE1 (NM_145315.2,776-794).
ctcccatagccgaagaaat

SEQ ID NO: 414378 - DNA, 19 bp, Homo sapiens
  siRNA target sequence for LACE1 (NM_145315.2,778-796).
cccatagccgaagaaatca

SEQ ID NO: 414379 - DNA, 19 bp, Homo sapiens
  siRNA target sequence for LACE1 (NM_145315.2,802-820).
gaagcatgtctcctatgtt

SEQ ID NO: 414380 - DNA, 19 bp, Homo sapiens
  siRNA target sequence for LACE1 (NM_145315.2,811-829).
ctcctatgttttgatgaat

SEQ ID NO: 414381 - DNA, 19 bp, Homo sapiens
  siRNA target sequence for LACE1 (NM_145315.2,813-831).
cctatgttttgatgaattt

SEQ ID NO: 414382 - DNA, 19 bp, Homo sapiens
  siRNA target sequence for LACE1 (NM_145315.2,923-941).
ggccaccggaagatctcta

SEQ ID NO: 414383 - DNA, 19 bp, Homo sapiens
  siRNA target sequence for LACE1 (NM_145315.2,924-942).
gccaccggaagatctctat

SEQ ID NO: 414384 - DNA, 19 bp, Homo sapiens
  siRNA target sequence for LACE1 (NM_145315.2,925-943).
ccaccggaagatctctata

SEQ ID NO: 414385 - DNA, 19 bp, Homo sapiens
  siRNA target sequence for LACE1 (NM_145315.2,926-944).
caccggaagatctctataa

SEQ ID NO: 414386 - DNA, 19 bp, Homo sapiens
  siRNA target sequence for LACE1 (NM_145315.2,928-946).
ccggaagatctctataaaa

SEQ ID NO: 414387 - DNA, 19 bp, Homo sapiens
  siRNA target sequence for LACE1 (NM_145315.2,929-947).
cggaagatctctataaaaa

SEQ ID NO: 414388 - DNA, 19 bp, Homo sapiens
  siRNA target sequence for LACE1 (NM_145315.2,930-948).
ggaagatctctataaaaat

SEQ ID NO: 414389 - DNA, 19 bp, Homo sapiens
  siRNA target sequence for LACE1 (NM_145315.2,954-972).
ccaaagagctaactttgta

SEQ ID NO: 414390 - DNA, 19 bp, Homo sapiens
  siRNA target sequence for LACE1 (NM_145315.2,962-980).
ctaactttgtaccattcat

SEQ ID NO: 414391 - DNA, 19 bp, Homo sapiens
  siRNA target sequence for LACE1 (NM_145315.2,982-1000).
gcagtcttgaaggaatatt

SEQ ID NO: 414392 - DNA, 19 bp, Homo sapiens
  siRNA target sequence for LACE1 (NM_145315.2,985-1003).
gtcttgaaggaatattgta

SEQ ID NO: 414393 - DNA, 19 bp, Homo sapiens
  siRNA target sequence for LACE1 (NM_145315.2,1014-1032).
gctagattctgggatagat

SEQ ID NO: 414394 - DNA, 19 bp, Homo sapiens
  siRNA target sequence for LACE1 (NM_145315.2,1015-1033).
ctagattctgggatagatt

SEQ ID NO: 414395 - DNA, 19 bp, Homo sapiens
  siRNA target sequence for LACE1 (NM_145315.2,1052-1070).
ctgctgcaggaaaactcta

SEQ ID NO: 414396 - DNA, 19 bp, Homo sapiens
  siRNA target sequence for LACE1 (NM_145315.2,1099-1117).
gctgtcatggataagttgt

SEQ ID NO: 414397 - DNA, 19 bp, Homo sapiens
  siRNA target sequence for LACE1 (NM_145315.2,1100-1118).
ctgtcatggataagttgtt

SEQ ID NO: 414398 - DNA, 19 bp, Homo sapiens
  siRNA target sequence for LACE1 (NM_145315.2,1154-1172).
gaccaaggattctaaaagt

SEQ ID NO: 414399 - DNA, 19 bp, Homo sapiens
  siRNA target sequence for LACE1 (NM_145315.2,1212-1230).
cgttgccgactgcacattt

SEQ ID NO: 414400 - DNA, 19 bp, Homo sapiens
  siRNA target sequence for LACE1 (NM_145315.2,1252-1270).
cttggagccagtgactatt

SEQ ID NO: 414401 - DNA, 19 bp, Homo sapiens
  siRNA target sequence for LACE1 (NM_145315.2,1291-1309).
gatacaatatttttacgaa

SEQ ID NO: 414402 - DNA, 19 bp, Homo sapiens
  siRNA target sequence for LACE1 (NM_145315.2,1306-1324).
cgaaacattccgcaattta

SEQ ID NO: 414403 - DNA, 19 bp, Homo sapiens
  siRNA target sequence for LACE1 (NM_145315.2,1342-1360).
caaggtcgaagattcataa

SEQ ID NO: 414404 - DNA, 19 bp, Homo sapiens
  siRNA target sequence for LACE1 (NM_145315.2,1365-1383).
catcgataacttttatgat

SEQ ID NO: 414405 - DNA, 19 bp, Homo sapiens
  siRNA target sequence for LACE1 (NM_145315.2,1381-1399).
gatctcaaggtgcgtataa

SEQ ID NO: 414406 - DNA, 19 bp, Homo sapiens
  siRNA target sequence for LACE1 (NM_145315.2,1384-1402).
ctcaaggtgcgtataattt

SEQ ID NO: 414407 - DNA, 19 bp, Homo sapiens
  siRNA target sequence for LACE1 (NM_145315.2,1408-1426).
gcgtcgactcctatatcaa

SEQ ID NO: 414408 - DNA, 19 bp, Homo sapiens
  siRNA target sequence for LACE1 (NM_145315.2,1413-1431).
gactcctatatcaagctta

SEQ ID NO: 414409 - DNA, 19 bp, Homo sapiens
  siRNA target sequence for LACE1 (NM_145315.2,1533-1551).
cggagaagaggaaatcttt

SEQ ID NO: 414410 - DNA, 19 bp, Homo sapiens
  siRNA target sequence for LACE1 (NM_145315.2,1552-1570).
gcatttcagcgcacaattt

SEQ ID NO: 414411 - DNA, 19 bp, Homo sapiens
  siRNA target sequence for C6orf128 (NM_145316.2,109-127).
catggccgtagacatgtat

SEQ ID NO: 414412 - DNA, 19 bp, Homo sapiens
  siRNA target sequence for C6orf128 (NM_145316.2,113-131).
gccgtagacatgtatctca

SEQ ID NO: 414413 - DNA, 19 bp, Homo sapiens
  siRNA target sequence for C6orf128 (NM_145316.2,114-132).
ccgtagacatgtatctcat

SEQ ID NO: 414414 - DNA, 19 bp, Homo sapiens
  siRNA target sequence for C6orf128 (NM_145316.2,189-207).
ggggtgcaagtaacatcat

SEQ ID NO: 414415 - DNA, 19 bp, Homo sapiens
  siRNA target sequence for C6orf128 (NM_145316.2,190-208).
gggtgcaagtaacatcata

SEQ ID NO: 414416 - DNA, 19 bp, Homo sapiens
  siRNA target sequence for C6orf128 (NM_145316.2,191-209).
ggtgcaagtaacatcataa

SEQ ID NO: 414417 - DNA, 19 bp, Homo sapiens
  siRNA target sequence for C6orf128 (NM_145316.2,194-212).
gcaagtaacatcataaata

SEQ ID NO: 414418 - DNA, 19 bp, Homo sapiens
  siRNA target sequence for C6orf128 (NM_145316.2,225-243).
gctggagttttaaaatcgt

SEQ ID NO: 414419 - DNA, 19 bp, Homo sapiens
  siRNA target sequence for C6orf128 (NM_145316.2,283-301).
cctcctgtactcagtgtat

SEQ ID NO: 414420 - DNA, 19 bp, Homo sapiens
  siRNA target sequence for C6orf128 (NM_145316.2,296-314).
gtgtatgcccagatcttca

SEQ ID NO: 414421 - DNA, 19 bp, Homo sapiens
  siRNA target sequence for C6orf128 (NM_145316.2,357-375).
ctgcaaacgtcgtaataca

SEQ ID NO: 414422 - DNA, 19 bp, Homo sapiens
  siRNA target sequence for C6orf128 (NM_145316.2,360-378).
caaacgtcgtaatacaaat

SEQ ID NO: 414423 - DNA, 19 bp, Homo sapiens
  siRNA target sequence for C6orf128 (NM_145316.2,489-507).
cccacataacctacaaaaa

SEQ ID NO: 414424 - DNA, 19 bp, Homo sapiens
  siRNA target sequence for C6orf128 (NM_145316.2,509-527).
cggagccagggcaatataa

SEQ ID NO: 414425 - DNA, 19 bp, Homo sapiens
  siRNA target sequence for C6orf128 (NM_145316.2,511-529).
gagccagggcaatataatt

SEQ ID NO: 414426 - DNA, 19 bp, Homo sapiens
  siRNA target sequence for C6orf128 (NM_145316.2,643-661).
gagcttccacactagcata

SEQ ID NO: 414427 - DNA, 19 bp, Homo sapiens
  siRNA target sequence for C6orf128 (NM_145316.2,645-663).
gcttccacactagcatatt

SEQ ID NO: 414428 - DNA, 19 bp, Homo sapiens
  siRNA target sequence for C6orf128 (NM_145316.2,650-668).
cacactagcatatttacct

SEQ ID NO: 414429 - DNA, 19 bp, Homo sapiens
  siRNA target sequence for C6orf128 (NM_145316.2,699-717).
gcacctgtagatacacaat

SEQ ID NO: 414430 - DNA, 19 bp, Homo sapiens
  siRNA target sequence for C6orf128 (NM_145316.2,700-718).
cacctgtagatacacaata

SEQ ID NO: 414431 - DNA, 19 bp, Homo sapiens
  siRNA target sequence for SOC (NM_145345.1,152-170).
gcgaggaatccgcatctat

SEQ ID NO: 414432 - DNA, 19 bp, Homo sapiens
  siRNA target sequence for SOC (NM_145345.1,251-269).
ggcccagactgatgagata

SEQ ID NO: 414433 - DNA, 19 bp, Homo sapiens
  siRNA target sequence for SOC (NM_145345.1,253-271).
cccagactgatgagatact

SEQ ID NO: 414434 - DNA, 19 bp, Homo sapiens
  siRNA target sequence for SOC (NM_145345.1,410-428).
gcggttcctcagtgactat

SEQ ID NO: 414435 - DNA, 19 bp, Homo sapiens
  siRNA target sequence for SOC (NM_145345.1,693-711).
cggaatggcatcatgatgt

SEQ ID NO: 414436 - DNA, 19 bp, Homo sapiens
  siRNA target sequence for SOC (NM_145345.1,753-771).
cgctgcctccgagacatat

SEQ ID NO: 414437 - DNA, 19 bp, Homo sapiens
  siRNA target sequence for SOC (NM_145345.1,757-775).
gcctccgagacatattgga

SEQ ID NO: 414438 - DNA, 19 bp, Homo sapiens
  siRNA target sequence for SOC (NM_145345.1,758-776).
cctccgagacatattggat

SEQ ID NO: 414439 - DNA, 19 bp, Homo sapiens
  siRNA target sequence for SOC (NM_145345.1,1006-1024).
ggcaaggcgaggtgattga

SEQ ID NO: 414440 - DNA, 19 bp, Homo sapiens
  siRNA target sequence for SOC (NM_145345.1,1008-1026).
caaggcgaggtgattgaca

SEQ ID NO: 414441 - DNA, 19 bp, Homo sapiens
  siRNA target sequence for SOC (NM_145345.1,1402-1420).
cgaagtccagcctgaaatt

SEQ ID NO: 414442 - DNA, 19 bp, Homo sapiens
  siRNA target sequence for DHX57 (NM_145646.2,251-269).
ccgagacctgcaagaacaa

SEQ ID NO: 414443 - DNA, 19 bp, Homo sapiens
  siRNA target sequence for DHX57 (NM_145646.2,383-401).
cgacttggatcctttggaa

SEQ ID NO: 414444 - DNA, 19 bp, Homo sapiens
  siRNA target sequence for DHX57 (NM_145646.2,389-407).
ggatcctttggaatatgct

SEQ ID NO: 414445 - DNA, 19 bp, Homo sapiens
  siRNA target sequence for DHX57 (NM_145646.2,585-603).
ggagagaggatgaagatct

SEQ ID NO: 414446 - DNA, 19 bp, Homo sapiens
  siRNA target sequence for DHX57 (NM_145646.2,606-624).
gaggcagtcaaccagataa

SEQ ID NO: 414447 - DNA, 19 bp, Homo sapiens
  siRNA target sequence for DHX57 (NM_145646.2,609-627).
gcagtcaaccagataagct

SEQ ID NO: 414448 - DNA, 19 bp, Homo sapiens
  siRNA target sequence for DHX57 (NM_145646.2,610-628).
cagtcaaccagataagctt

SEQ ID NO: 414449 - DNA, 19 bp, Homo sapiens
  siRNA target sequence for DHX57 (NM_145646.2,730-748).
ggttagaactggagtatct

SEQ ID NO: 414450 - DNA, 19 bp, Homo sapiens
  siRNA target sequence for DHX57 (NM_145646.2,741-759).
gagtatctgacaagtagat

SEQ ID NO: 414451 - DNA, 19 bp, Homo sapiens
  siRNA target sequence for DHX57 (NM_145646.2,754-772).
gtagattccgcaaatccaa

SEQ ID NO: 414452 - DNA, 19 bp, Homo sapiens
  siRNA target sequence for DHX57 (NM_145646.2,918-936).
gtagatgattctcatctta

SEQ ID NO: 414453 - DNA, 19 bp, Homo sapiens
  siRNA target sequence for DHX57 (NM_145646.2,924-942).
gattctcatcttaatgcta

SEQ ID NO: 414454 - DNA, 19 bp, Homo sapiens
  siRNA target sequence for DHX57 (NM_145646.2,1014-1032).
ccgctcgtggcattttatt

SEQ ID NO: 414455 - DNA, 19 bp, Homo sapiens
  siRNA target sequence for DHX57 (NM_145646.2,1017-1035).
ctcgtggcattttattcca

SEQ ID NO: 414456 - DNA, 19 bp, Homo sapiens
  siRNA target sequence for DHX57 (NM_145646.2,1051-1069).
ctctggcttgtcgtttaca

SEQ ID NO: 414457 - DNA, 19 bp, Homo sapiens
  siRNA target sequence for DHX57 (NM_145646.2,1053-1071).
ctggcttgtcgtttacata

SEQ ID NO: 414458 - DNA, 19 bp, Homo sapiens
  siRNA target sequence for DHX57 (NM_145646.2,1055-1073).
ggcttgtcgtttacatatt

SEQ ID NO: 414459 - DNA, 19 bp, Homo sapiens
  siRNA target sequence for DHX57 (NM_145646.2,1056-1074).
gcttgtcgtttacatattt

SEQ ID NO: 414460 - DNA, 19 bp, Homo sapiens
  siRNA target sequence for DHX57 (NM_145646.2,1114-1132).
cttcggaacctgtcgtata

SEQ ID NO: 414461 - DNA, 19 bp, Homo sapiens
  siRNA target sequence for DHX57 (NM_145646.2,1118-1136).
ggaacctgtcgtatattct

SEQ ID NO: 414462 - DNA, 19 bp, Homo sapiens
  siRNA target sequence for DHX57 (NM_145646.2,1119-1137).
gaacctgtcgtatattctt

SEQ ID NO: 414463 - DNA, 19 bp, Homo sapiens
  siRNA target sequence for DHX57 (NM_145646.2,1122-1140).
cctgtcgtatattctttga

SEQ ID NO: 414464 - DNA, 19 bp, Homo sapiens
  siRNA target sequence for DHX57 (NM_145646.2,1123-1141).
ctgtcgtatattctttgat

SEQ ID NO: 414465 - DNA, 19 bp, Homo sapiens
  siRNA target sequence for DHX57 (NM_145646.2,1160-1178).
gtcggaaatagtcaagtta

SEQ ID NO: 414466 - DNA, 19 bp, Homo sapiens
  siRNA target sequence for DHX57 (NM_145646.2,1162-1180).
cggaaatagtcaagttact

SEQ ID NO: 414467 - DNA, 19 bp, Homo sapiens
  siRNA target sequence for DHX57 (NM_145646.2,1183-1201).
cgaatacccaccacaagta

SEQ ID NO: 414468 - DNA, 19 bp, Homo sapiens
  siRNA target sequence for DHX57 (NM_145646.2,1184-1202).
gaatacccaccacaagtat

SEQ ID NO: 414469 - DNA, 19 bp, Homo sapiens
  siRNA target sequence for DHX57 (NM_145646.2,1233-1251).
ccctctaggaccagaataa

SEQ ID NO: 414470 - DNA, 19 bp, Homo sapiens
  siRNA target sequence for DHX57 (NM_145646.2,1234-1252).
cctctaggaccagaataaa

SEQ ID NO: 414471 - DNA, 19 bp, Homo sapiens
  siRNA target sequence for DHX57 (NM_145646.2,1235-1253).
ctctaggaccagaataaat

SEQ ID NO: 414472 - DNA, 19 bp, Homo sapiens
  siRNA target sequence for DHX57 (NM_145646.2,1237-1255).
ctaggaccagaataaataa

SEQ ID NO: 414473 - DNA, 19 bp, Homo sapiens
  siRNA target sequence for DHX57 (NM_145646.2,1241-1259).
gaccagaataaataatcct

SEQ ID NO: 414474 - DNA, 19 bp, Homo sapiens
  siRNA target sequence for DHX57 (NM_145646.2,1358-1376).
cggtcctgcacctgttata

SEQ ID NO: 414475 - DNA, 19 bp, Homo sapiens
  siRNA target sequence for DHX57 (NM_145646.2,1360-1378).
gtcctgcacctgttatagt

SEQ ID NO: 414476 - DNA, 19 bp, Homo sapiens
  siRNA target sequence for DHX57 (NM_145646.2,1433-1451).
gcaggcaaagtcagtacat

SEQ ID NO: 414477 - DNA, 19 bp, Homo sapiens
  siRNA target sequence for DHX57 (NM_145646.2,1536-1554).
ctccctgcttgggaagaaa

SEQ ID NO: 414478 - DNA, 19 bp, Homo sapiens
  siRNA target sequence for DHX57 (NM_145646.2,1605-1623).
ggtatgactgggacttatt

SEQ ID NO: 414479 - DNA, 19 bp, Homo sapiens
  siRNA target sequence for DHX57 (NM_145646.2,1606-1624).
gtatgactgggacttattt

SEQ ID NO: 414480 - DNA, 19 bp, Homo sapiens
  siRNA target sequence for MGC21654 (NM_145647.1,115-133).
caaggagagcggcaagata

SEQ ID NO: 414481 - DNA, 19 bp, Homo sapiens
  siRNA target sequence for MGC21654 (NM_145647.1,155-173).
gccacgcgggacggaatta

SEQ ID NO: 414482 - DNA, 19 bp, Homo sapiens
  siRNA target sequence for MGC21654 (NM_145647.1,156-174).
ccacgcgggacggaattat

SEQ ID NO: 414483 - DNA, 19 bp, Homo sapiens
  siRNA target sequence for MGC21654 (NM_145647.1,157-175).
cacgcgggacggaattata

SEQ ID NO: 414484 - DNA, 19 bp, Homo sapiens
  siRNA target sequence for MGC21654 (NM_145647.1,159-177).
cgcgggacggaattatagt

SEQ ID NO: 414485 - DNA, 19 bp, Homo sapiens
  siRNA target sequence for MGC21654 (NM_145647.1,161-179).
cgggacggaattatagtga

SEQ ID NO: 414486 - DNA, 19 bp, Homo sapiens
  siRNA target sequence for MGC21654 (NM_145647.1,162-180).
gggacggaattatagtgaa

SEQ ID NO: 414487 - DNA, 19 bp, Homo sapiens
  siRNA target sequence for MGC21654 (NM_145647.1,166-184).
cggaattatagtgaacatt

SEQ ID NO: 414488 - DNA, 19 bp, Homo sapiens
  siRNA target sequence for MGC21654 (NM_145647.1,167-185).
ggaattatagtgaacatta

SEQ ID NO: 414489 - DNA, 19 bp, Homo sapiens
  siRNA target sequence for MGC21654 (NM_145647.1,190-208).
caacacttccgattaccat

SEQ ID NO: 414490 - DNA, 19 bp, Homo sapiens
  siRNA target sequence for MGC21654 (NM_145647.1,195-213).
cttccgattaccatccaaa

SEQ ID NO: 414491 - DNA, 19 bp, Homo sapiens
  siRNA target sequence for MGC21654 (NM_145647.1,198-216).
ccgattaccatccaaaagt

SEQ ID NO: 414492 - DNA, 19 bp, Homo sapiens
  siRNA target sequence for MGC21654 (NM_145647.1,199-217).
cgattaccatccaaaagtt

SEQ ID NO: 414493 - DNA, 19 bp, Homo sapiens
  siRNA target sequence for MGC21654 (NM_145647.1,200-218).
gattaccatccaaaagttt

SEQ ID NO: 414494 - DNA, 19 bp, Homo sapiens
  siRNA target sequence for MGC21654 (NM_145647.1,245-263).
ggcacaggcgactgcttaa

SEQ ID NO: 414495 - DNA, 19 bp, Homo sapiens
  siRNA target sequence for MGC21654 (NM_145647.1,246-264).
gcacaggcgactgcttaat

SEQ ID NO: 414496 - DNA, 19 bp, Homo sapiens
  siRNA target sequence for MGC21654 (NM_145647.1,247-265).
cacaggcgactgcttaatt

SEQ ID NO: 414497 - DNA, 19 bp, Homo sapiens
  siRNA target sequence for MGC21654 (NM_145647.1,270-288).
gggaccaccaaggaaatat

SEQ ID NO: 414498 - DNA, 19 bp, Homo sapiens
  siRNA target sequence for MGC21654 (NM_145647.1,348-366).
gcacagctctggcctttaa

SEQ ID NO: 414499 - DNA, 19 bp, Homo sapiens
  siRNA target sequence for MGC21654 (NM_145647.1,361-379).
ctttaatcttcgtaggaaa

SEQ ID NO: 414500 - DNA, 19 bp, Homo sapiens
  siRNA target sequence for MGC21654 (NM_145647.1,394-412).
ggcattagctgattattct

SEQ ID NO: 414501 - DNA, 19 bp, Homo sapiens
  siRNA target sequence for MGC21654 (NM_145647.1,395-413).
gcattagctgattattcta

SEQ ID NO: 414502 - DNA, 19 bp, Homo sapiens
  siRNA target sequence for MGC21654 (NM_145647.1,396-414).
cattagctgattattctat

SEQ ID NO: 414503 - DNA, 19 bp, Homo sapiens
  siRNA target sequence for MGC21654 (NM_145647.1,401-419).
gctgattattctattaaat

SEQ ID NO: 414504 - DNA, 19 bp, Homo sapiens
  siRNA target sequence for MGC21654 (NM_145647.1,431-449).
gtcaccaaggagctagtta

SEQ ID NO: 414505 - DNA, 19 bp, Homo sapiens
  siRNA target sequence for MGC21654 (NM_145647.1,451-469).
ctggatgagaggacatgaa

SEQ ID NO: 414506 - DNA, 19 bp, Homo sapiens
  siRNA target sequence for MGC21654 (NM_145647.1,461-479).
ggacatgaatcatcagtat

SEQ ID NO: 414507 - DNA, 19 bp, Homo sapiens
  siRNA target sequence for MGC21654 (NM_145647.1,493-511).
gcatgcatcagggaaatat

SEQ ID NO: 414508 - DNA, 19 bp, Homo sapiens
  siRNA target sequence for MGC21654 (NM_145647.1,517-535).
cacaacttcttctgataca

SEQ ID NO: 414509 - DNA, 19 bp, Homo sapiens
  siRNA target sequence for MGC21654 (NM_145647.1,539-557).
caattatgggacttggata

SEQ ID NO: 414510 - DNA, 19 bp, Homo sapiens
  siRNA target sequence for MGC21654 (NM_145647.1,596-614).
gtgggtatacagaaggttt

SEQ ID NO: 414511 - DNA, 19 bp, Homo sapiens
  siRNA target sequence for MGC21654 (NM_145647.1,599-617).
ggtatacagaaggttttct

SEQ ID NO: 414512 - DNA, 19 bp, Homo sapiens
  siRNA target sequence for MGC21654 (NM_145647.1,637-655).
catcctcagctgttttaaa

SEQ ID NO: 414513 - DNA, 19 bp, Homo sapiens
  siRNA target sequence for MGC21654 (NM_145647.1,683-701).
gacacacttttttgcaaat

SEQ ID NO: 414514 - DNA, 19 bp, Homo sapiens
  siRNA target sequence for MGC21654 (NM_145647.1,685-703).
cacacttttttgcaaatat

SEQ ID NO: 414515 - DNA, 19 bp, Homo sapiens
  siRNA target sequence for MGC21654 (NM_145647.1,716-734).
ccacctgaaagctctagta

SEQ ID NO: 414516 - DNA, 19 bp, Homo sapiens
  siRNA target sequence for MGC21654 (NM_145647.1,717-735).
cacctgaaagctctagtat

SEQ ID NO: 414517 - DNA, 19 bp, Homo sapiens
  siRNA target sequence for MGC21654 (NM_145647.1,727-745).
ctctagtatattatacaaa

SEQ ID NO: 414518 - DNA, 19 bp, Homo sapiens
  siRNA target sequence for MGC21654 (NM_145647.1,825-843).
ctaggcagctctttagaat

SEQ ID NO: 414519 - DNA, 19 bp, Homo sapiens
  siRNA target sequence for MGC21654 (NM_145647.1,870-888).
ccattcgccatctggaatt

SEQ ID NO: 414520 - DNA, 19 bp, Homo sapiens
  siRNA target sequence for MGC21654 (NM_145647.1,922-940).
ggttcttggagtactaagt

SEQ ID NO: 414521 - DNA, 19 bp, Homo sapiens
  siRNA target sequence for MGC21654 (NM_145647.1,941-959).
caagatggtattatgagat

SEQ ID NO: 414522 - DNA, 19 bp, Homo sapiens
  siRNA target sequence for MGC21654 (NM_145647.1,944-962).
gatggtattatgagattta

SEQ ID NO: 414523 - DNA, 19 bp, Homo sapiens
  siRNA target sequence for MGC21654 (NM_145647.1,947-965).
ggtattatgagatttatca

SEQ ID NO: 414524 - DNA, 19 bp, Homo sapiens
  siRNA target sequence for MGC21654 (NM_145647.1,948-966).
gtattatgagatttatcaa

SEQ ID NO: 414525 - DNA, 19 bp, Homo sapiens
  siRNA target sequence for MGC21654 (NM_145647.1,1000-1018).
gagcctcgatgaaggaatt

SEQ ID NO: 414526 - DNA, 19 bp, Homo sapiens
  siRNA target sequence for MGC21654 (NM_145647.1,1036-1054).
cccacatggacggtacatt

SEQ ID NO: 414527 - DNA, 19 bp, Homo sapiens
  siRNA target sequence for MGC21654 (NM_145647.1,1040-1058).
catggacggtacattgcat

SEQ ID NO: 414528 - DNA, 19 bp, Homo sapiens
  siRNA target sequence for MGC21654 (NM_145647.1,1046-1064).
cggtacattgcatctatta

SEQ ID NO: 414529 - DNA, 19 bp, Homo sapiens
  siRNA target sequence for MGC21654 (NM_145647.1,1125-1143).
cacctccgcctttagtgaa

SEQ ID NO: 414530 - DNA, 19 bp, Homo sapiens
  siRNA target sequence for MGC21654 (NM_145647.1,1130-1148).
ccgcctttagtgaaagtta

SEQ ID NO: 414531 - DNA, 19 bp, Homo sapiens
  siRNA target sequence for MGC21654 (NM_145647.1,1131-1149).
cgcctttagtgaaagttat

SEQ ID NO: 414532 - DNA, 19 bp, Homo sapiens
  siRNA target sequence for MGC21654 (NM_145647.1,1132-1150).
gcctttagtgaaagttatt

SEQ ID NO: 414533 - DNA, 19 bp, Homo sapiens
  siRNA target sequence for MGC21654 (NM_145647.1,1134-1152).
ctttagtgaaagttattga

SEQ ID NO: 414534 - DNA, 19 bp, Homo sapiens
  siRNA target sequence for MGC21654 (NM_145647.1,1273-1291).
cctgactggtgattttgaa

SEQ ID NO: 414535 - DNA, 19 bp, Homo sapiens
  siRNA target sequence for MGC21654 (NM_145647.1,1352-1370).
ggctatggtgaatatccaa

SEQ ID NO: 414536 - DNA, 19 bp, Homo sapiens
  siRNA target sequence for MGC21654 (NM_145647.1,1358-1376).
ggtgaatatccaacaaaat

SEQ ID NO: 414537 - DNA, 19 bp, Homo sapiens
  siRNA target sequence for MGC21654 (NM_145647.1,1392-1410).
ggcgctctctgctacaact

SEQ ID NO: 414538 - DNA, 19 bp, Homo sapiens
  siRNA target sequence for MGC21654 (NM_145647.1,1428-1446).
cgtttagtaccctcataga

SEQ ID NO: 414539 - DNA, 19 bp, Homo sapiens
  siRNA target sequence for MGC21654 (NM_145647.1,1429-1447).
gtttagtaccctcatagat

SEQ ID NO: 414540 - DNA, 19 bp, Homo sapiens
  siRNA target sequence for MGC21654 (NM_145647.1,1483-1501).
gaaataccccatcaaaagt

SEQ ID NO: 414541 - DNA, 19 bp, Homo sapiens
  siRNA target sequence for MGC21654 (NM_145647.1,1503-1521).
ggaagctactcagagtatt

SEQ ID NO: 414542 - DNA, 19 bp, Homo sapiens
  siRNA target sequence for MGC21654 (NM_145647.1,1504-1522).
gaagctactcagagtatta

SEQ ID NO: 414543 - DNA, 19 bp, Homo sapiens
  siRNA target sequence for MGC21654 (NM_145647.1,1517-1535).
gtattacagagaaccttat

SEQ ID NO: 414544 - DNA, 19 bp, Homo sapiens
  siRNA target sequence for MGC21654 (NM_145647.1,1544-1562).
gctcactggtctgtcattt

SEQ ID NO: 414545 - DNA, 19 bp, Homo sapiens
  siRNA target sequence for MGC21654 (NM_145647.1,1551-1569).
ggtctgtcatttttagtga

SEQ ID NO: 414546 - DNA, 19 bp, Homo sapiens
  siRNA target sequence for MGC21654 (NM_145647.1,1583-1601).
ccactcttggcatttccat

SEQ ID NO: 414547 - DNA, 19 bp, Homo sapiens
  siRNA target sequence for MGC21654 (NM_145647.1,1584-1602).
cactcttggcatttccatt

SEQ ID NO: 414548 - DNA, 19 bp, Homo sapiens
  siRNA target sequence for MGC21654 (NM_145647.1,1649-1667).
gctactctcataatcaatt

SEQ ID NO: 414549 - DNA, 19 bp, Homo sapiens
  siRNA target sequence for MGC21654 (NM_145647.1,1694-1712).
cctaatcctcctatcaata

SEQ ID NO: 414550 - DNA, 19 bp, Homo sapiens
  siRNA target sequence for MGC21654 (NM_145647.1,1695-1713).
ctaatcctcctatcaatat

SEQ ID NO: 414551 - DNA, 19 bp, Homo sapiens
  siRNA target sequence for MGC21654 (NM_145647.1,1766-1784).
cacttcatagatcatgata

SEQ ID NO: 414552 - DNA, 19 bp, Homo sapiens
  siRNA target sequence for MGC21654 (NM_145647.1,1854-1872).
ggctgaaattgttcgataa

SEQ ID NO: 414553 - DNA, 19 bp, Homo sapiens
  siRNA target sequence for MGC21654 (NM_145647.1,1908-1926).
ctgttgtagcctacaacat

SEQ ID NO: 414554 - DNA, 19 bp, Homo sapiens
  siRNA target sequence for MGC21654 (NM_145647.1,1910-1928).
gttgtagcctacaacatat

SEQ ID NO: 414555 - DNA, 19 bp, Homo sapiens
  siRNA target sequence for MGC21654 (NM_145647.1,1913-1931).
gtagcctacaacatatgtt

SEQ ID NO: 414556 - DNA, 19 bp, Homo sapiens
  siRNA target sequence for MGC21654 (NM_145647.1,1918-1936).
ctacaacatatgttctaga

SEQ ID NO: 414557 - DNA, 19 bp, Homo sapiens
  siRNA target sequence for MGC21654 (NM_145647.1,1945-1963).
gctcagctgtaatcttaaa

SEQ ID NO: 414558 - DNA, 19 bp, Homo sapiens
  siRNA target sequence for MGC21654 (NM_145647.1,1948-1966).
cagctgtaatcttaaagat

SEQ ID NO: 414559 - DNA, 19 bp, Homo sapiens
  siRNA target sequence for MGC21654 (NM_145647.1,1993-2011).
gaataacctggatataaat

SEQ ID NO: 414560 - DNA, 19 bp, Homo sapiens
  siRNA target sequence for MGC21654 (NM_145647.1,2044-2062).
gaccacgcctactgacatt

SEQ ID NO: 414561 - DNA, 19 bp, Homo sapiens
  siRNA target sequence for MGC21654 (NM_145647.1,2047-2065).
cacgcctactgacattcat

SEQ ID NO: 414562 - DNA, 19 bp, Homo sapiens
  siRNA target sequence for MGC21654 (NM_145647.1,2063-2081).
catccagacagcatgctta

SEQ ID NO: 414563 - DNA, 19 bp, Homo sapiens
  siRNA target sequence for MGC21654 (NM_145647.1,2105-2123).
gggcagtatccagtattta

SEQ ID NO: 414564 - DNA, 19 bp, Homo sapiens
  siRNA target sequence for MGC21654 (NM_145647.1,2106-2124).
ggcagtatccagtatttaa

SEQ ID NO: 414565 - DNA, 19 bp, Homo sapiens
  siRNA target sequence for MGC21654 (NM_145647.1,2157-2175).
cacaggaacgagaaagaat

SEQ ID NO: 414566 - DNA, 19 bp, Homo sapiens
  siRNA target sequence for MGC21654 (NM_145647.1,2162-2180).
gaacgagaaagaataagga

SEQ ID NO: 414567 - DNA, 19 bp, Homo sapiens
  siRNA target sequence for MGC21654 (NM_145647.1,2178-2196).
ggaatgatgaattggatta

SEQ ID NO: 414568 - DNA, 19 bp, Homo sapiens
  siRNA target sequence for MGC21654 (NM_145647.1,2212-2230).
gacagttgaagatatgcaa

SEQ ID NO: 414569 - DNA, 19 bp, Homo sapiens
  siRNA target sequence for MGC21654 (NM_145647.1,2287-2305).
gcttcgtaaagctgaagaa

SEQ ID NO: 414570 - DNA, 19 bp, Homo sapiens
  siRNA target sequence for MGC21654 (NM_145647.1,2288-2306).
cttcgtaaagctgaagaaa

SEQ ID NO: 414571 - DNA, 19 bp, Homo sapiens
  siRNA target sequence for MGC21654 (NM_145647.1,2359-2377).
gaggctagctgctgtgaaa

SEQ ID NO: 414572 - DNA, 19 bp, Homo sapiens
  siRNA target sequence for MGC21654 (NM_145647.1,2415-2433).
ctgcaagaaggcgttttct

SEQ ID NO: 414573 - DNA, 19 bp, Homo sapiens
  siRNA target sequence for MGC21654 (NM_145647.1,2417-2435).
gcaagaaggcgttttctga

SEQ ID NO: 414574 - DNA, 19 bp, Homo sapiens
  siRNA target sequence for MGC21654 (NM_145647.1,2506-2524).
gagagatcgagaaattgct

SEQ ID NO: 414575 - DNA, 19 bp, Homo sapiens
  siRNA target sequence for MGC21654 (NM_145647.1,2529-2547).
cagccagagacctagaaat

SEQ ID NO: 414576 - DNA, 19 bp, Homo sapiens
  siRNA target sequence for MGC21654 (NM_145647.1,2558-2576).
gaactcgaatcacaaaaga

SEQ ID NO: 414577 - DNA, 19 bp, Homo sapiens
  siRNA target sequence for MGC21654 (NM_145647.1,2568-2586).
cacaaaagagactttatga

SEQ ID NO: 414578 - DNA, 19 bp, Homo sapiens
  siRNA target sequence for MGC21654 (NM_145647.1,2577-2595).
gactttatgagaagaatct

SEQ ID NO: 414579 - DNA, 19 bp, Homo sapiens
  siRNA target sequence for MGC21654 (NM_145647.1,2759-2777).
gaacaagcatgcctaaata

SEQ ID NO: 414580 - DNA, 19 bp, Homo sapiens
  siRNA target sequence for MGC21654 (NM_145647.1,2822-2840).
ctacaacgaaacaaatgtt

SEQ ID NO: 414581 - DNA, 19 bp, Homo sapiens
  siRNA target sequence for MGC21654 (NM_145647.1,3072-3090).
ccaggttccaaaatgaaca

SEQ ID NO: 414582 - DNA, 19 bp, Homo sapiens
  siRNA target sequence for MGC21654 (NM_145647.1,3190-3208).
caccacgggacagaatctt

SEQ ID NO: 414583 - DNA, 19 bp, Homo sapiens
  siRNA target sequence for MGC21654 (NM_145647.1,3193-3211).
cacgggacagaatcttatt

SEQ ID NO: 414584 - DNA, 19 bp, Homo sapiens
  siRNA target sequence for MGC21654 (NM_145647.1,3195-3213).
cgggacagaatcttattaa

SEQ ID NO: 414585 - DNA, 19 bp, Homo sapiens
  siRNA target sequence for MGC21654 (NM_145647.1,3197-3215).
ggacagaatcttattaaga

SEQ ID NO: 414586 - DNA, 19 bp, Homo sapiens
  siRNA target sequence for MGC21654 (NM_145647.1,3250-3268).
ggctcgtcacagatgtcaa

SEQ ID NO: 414587 - DNA, 19 bp, Homo sapiens
  siRNA target sequence for MGC21654 (NM_145647.1,3251-3269).
gctcgtcacagatgtcaaa

SEQ ID NO: 414588 - DNA, 19 bp, Homo sapiens
  siRNA target sequence for MGC21654 (NM_145647.1,3264-3282).
gtcaaacccctcatctttt

SEQ ID NO: 414589 - DNA, 19 bp, Homo sapiens
  siRNA target sequence for MUC15 (NM_145650.2,343-361).
gttgatttcaacgttgttt

SEQ ID NO: 414590 - DNA, 19 bp, Homo sapiens
  siRNA target sequence for MUC15 (NM_145650.2,346-364).
gatttcaacgttgttttat

SEQ ID NO: 414591 - DNA, 19 bp, Homo sapiens
  siRNA target sequence for MUC15 (NM_145650.2,351-369).
caacgttgttttattcact

SEQ ID NO: 414592 - DNA, 19 bp, Homo sapiens
  siRNA target sequence for MUC15 (NM_145650.2,355-373).
gttgttttattcacttcta

SEQ ID NO: 414593 - DNA, 19 bp, Homo sapiens
  siRNA target sequence for MUC15 (NM_145650.2,375-393).
cggggagccatggaaaaga

SEQ ID NO: 414594 - DNA, 19 bp, Homo sapiens
  siRNA target sequence for MUC15 (NM_145650.2,528-546).
gtcattcccctcctttgaa

SEQ ID NO: 414595 - DNA, 19 bp, Homo sapiens
  siRNA target sequence for MUC15 (NM_145650.2,556-574).
caacagccacggaataaca

SEQ ID NO: 414596 - DNA, 19 bp, Homo sapiens
  siRNA target sequence for MUC15 (NM_145650.2,559-577).
cagccacggaataacagat

SEQ ID NO: 414597 - DNA, 19 bp, Homo sapiens
  siRNA target sequence for MUC15 (NM_145650.2,563-581).
cacggaataacagatttct

SEQ ID NO: 414598 - DNA, 19 bp, Homo sapiens
  siRNA target sequence for MUC15 (NM_145650.2,652-670).
cttgatccatagctttgtt

SEQ ID NO: 414599 - DNA, 19 bp, Homo sapiens
  siRNA target sequence for MUC15 (NM_145650.2,679-697).
gccttggaatgcacctata

SEQ ID NO: 414600 - DNA, 19 bp, Homo sapiens
  siRNA target sequence for MUC15 (NM_145650.2,690-708).
cacctatagcagatgaaga

SEQ ID NO: 414601 - DNA, 19 bp, Homo sapiens
  siRNA target sequence for MUC15 (NM_145650.2,693-711).
ctatagcagatgaagatct

SEQ ID NO: 414602 - DNA, 19 bp, Homo sapiens
  siRNA target sequence for MUC15 (NM_145650.2,768-786).
cttggtctttggtcaatga

SEQ ID NO: 414603 - DNA, 19 bp, Homo sapiens
  siRNA target sequence for MUC15 (NM_145650.2,779-797).
gtcaatgacaccgtgaaaa

SEQ ID NO: 414604 - DNA, 19 bp, Homo sapiens
  siRNA target sequence for MUC15 (NM_145650.2,781-799).
caatgacaccgtgaaaact

SEQ ID NO: 414605 - DNA, 19 bp, Homo sapiens
  siRNA target sequence for MUC15 (NM_145650.2,789-807).
ccgtgaaaactcctgataa

SEQ ID NO: 414606 - DNA, 19 bp, Homo sapiens
  siRNA target sequence for MUC15 (NM_145650.2,810-828).
gttccattacagttagcat

SEQ ID NO: 414607 - DNA, 19 bp, Homo sapiens
  siRNA target sequence for MUC15 (NM_145650.2,832-850).
ctcttcagaaccaacttct

SEQ ID NO: 414608 - DNA, 19 bp, Homo sapiens
  siRNA target sequence for MUC15 (NM_145650.2,855-873).
ctgtgacccccttgatagt

SEQ ID NO: 414609 - DNA, 19 bp, Homo sapiens
  siRNA target sequence for MUC15 (NM_145650.2,884-902).
ggatggcttaccacaaaca

SEQ ID NO: 414610 - DNA, 19 bp, Homo sapiens
  siRNA target sequence for MUC15 (NM_145650.2,894-912).
ccacaaacagtgatagctt

SEQ ID NO: 414611 - DNA, 19 bp, Homo sapiens
  siRNA target sequence for MUC15 (NM_145650.2,915-933).
ctgggtttaccccttatca

SEQ ID NO: 414612 - DNA, 19 bp, Homo sapiens
  siRNA target sequence for MUC15 (NM_145650.2,918-936).
ggtttaccccttatcaaga

SEQ ID NO: 414613 - DNA, 19 bp, Homo sapiens
  siRNA target sequence for MUC15 (NM_145650.2,945-963).
ctctacagcctaccttaaa

SEQ ID NO: 414614 - DNA, 19 bp, Homo sapiens
  siRNA target sequence for MUC15 (NM_145650.2,1056-1074).
ctattctgggtgtctcatt

SEQ ID NO: 414615 - DNA, 19 bp, Homo sapiens
  siRNA target sequence for MUC15 (NM_145650.2,1065-1083).
gtgtctcattgcttactct

SEQ ID NO: 414616 - DNA, 19 bp, Homo sapiens
  siRNA target sequence for MUC15 (NM_145650.2,1080-1098).
ctcttgtgggctacttgtt

SEQ ID NO: 414617 - DNA, 19 bp, Homo sapiens
  siRNA target sequence for MUC15 (NM_145650.2,1128-1146).
cccatcggcgactttatga

SEQ ID NO: 414618 - DNA, 19 bp, Homo sapiens
  siRNA target sequence for MUC15 (NM_145650.2,1160-1178).
ccagttctgcgattagaca

SEQ ID NO: 414619 - DNA, 19 bp, Homo sapiens
  siRNA target sequence for MUC15 (NM_145650.2,1161-1179).
cagttctgcgattagacaa

SEQ ID NO: 414620 - DNA, 19 bp, Homo sapiens
  siRNA target sequence for MUC15 (NM_145650.2,1177-1195).
caatgcaccggaaccttat

SEQ ID NO: 414621 - DNA, 19 bp, Homo sapiens
  siRNA target sequence for MUC15 (NM_145650.2,1182-1200).
caccggaaccttatgatgt

SEQ ID NO: 414622 - DNA, 19 bp, Homo sapiens
  siRNA target sequence for MUC15 (NM_145650.2,1210-1228).
gaattctagctactacaat

SEQ ID NO: 414623 - DNA, 19 bp, Homo sapiens
  siRNA target sequence for MUC15 (NM_145650.2,1222-1240).
ctacaatccaactttgaat

SEQ ID NO: 414624 - DNA, 19 bp, Homo sapiens
  siRNA target sequence for MUC15 (NM_145650.2,1225-1243).
caatccaactttgaatgat

SEQ ID NO: 414625 - DNA, 19 bp, Homo sapiens
  siRNA target sequence for MUC15 (NM_145650.2,1271-1289).
gcacgtgatggcattccta

SEQ ID NO: 414626 - DNA, 19 bp, Homo sapiens
  siRNA target sequence for MUC15 (NM_145650.2,1272-1290).
cacgtgatggcattcctat

SEQ ID NO: 414627 - DNA, 19 bp, Homo sapiens
  siRNA target sequence for MUC15 (NM_145650.2,1304-1322).
ccacttcgtacttctgtat

SEQ ID NO: 414628 - DNA, 19 bp, Homo sapiens
  siRNA target sequence for RYD5 (NM_145651.1,89-107).
ggaggacaacgatgagttt

SEQ ID NO: 414629 - DNA, 19 bp, Homo sapiens
  siRNA target sequence for RYD5 (NM_145651.1,113-131).
ggacttcctgcaaacacta

SEQ ID NO: 414630 - DNA, 19 bp, Homo sapiens
  siRNA target sequence for RYD5 (NM_145651.1,163-181).
ggaccttgggcaagtacaa

SEQ ID NO: 414631 - DNA, 19 bp, Homo sapiens
  siRNA target sequence for SPESP1 (NM_145658.1,180-198).
ccggcttatccgagcataa

SEQ ID NO: 414632 - DNA, 19 bp, Homo sapiens
  siRNA target sequence for SPESP1 (NM_145658.1,182-200).
ggcttatccgagcataact

SEQ ID NO: 414633 - DNA, 19 bp, Homo sapiens
  siRNA target sequence for SPESP1 (NM_145658.1,184-202).
cttatccgagcataactgt

SEQ ID NO: 414634 - DNA, 19 bp, Homo sapiens
  siRNA target sequence for SPESP1 (NM_145658.1,210-228).
gatgaagagcaaaacttga

SEQ ID NO: 414635 - DNA, 19 bp, Homo sapiens
  siRNA target sequence for SPESP1 (NM_145658.1,224-242).
cttgaatcattatatacaa

SEQ ID NO: 414636 - DNA, 19 bp, Homo sapiens
  siRNA target sequence for SPESP1 (NM_145658.1,251-269).
gaacctagtacgaagtgtt

SEQ ID NO: 414637 - DNA, 19 bp, Homo sapiens
  siRNA target sequence for SPESP1 (NM_145658.1,278-296).
ggagccaggtcgtgagaaa

SEQ ID NO: 414638 - DNA, 19 bp, Homo sapiens
  siRNA target sequence for SPESP1 (NM_145658.1,279-297).
gagccaggtcgtgagaaaa

SEQ ID NO: 414639 - DNA, 19 bp, Homo sapiens
  siRNA target sequence for SPESP1 (NM_145658.1,281-299).
gccaggtcgtgagaaaaaa

SEQ ID NO: 414640 - DNA, 19 bp, Homo sapiens
  siRNA target sequence for SPESP1 (NM_145658.1,282-300).
ccaggtcgtgagaaaaaat

SEQ ID NO: 414641 - DNA, 19 bp, Homo sapiens
  siRNA target sequence for SPESP1 (NM_145658.1,285-303).
ggtcgtgagaaaaaatcta

SEQ ID NO: 414642 - DNA, 19 bp, Homo sapiens
  siRNA target sequence for SPESP1 (NM_145658.1,286-304).
gtcgtgagaaaaaatctaa

SEQ ID NO: 414643 - DNA, 19 bp, Homo sapiens
  siRNA target sequence for SPESP1 (NM_145658.1,288-306).
cgtgagaaaaaatctaact

SEQ ID NO: 414644 - DNA, 19 bp, Homo sapiens
  siRNA target sequence for SPESP1 (NM_145658.1,301-319).
ctaactctccaaaacatgt

SEQ ID NO: 414645 - DNA, 19 bp, Homo sapiens
  siRNA target sequence for SPESP1 (NM_145658.1,331-349).
catcaaagggatcaaaatt

SEQ ID NO: 414646 - DNA, 19 bp, Homo sapiens
  siRNA target sequence for SPESP1 (NM_145658.1,374-392).
cgcttcaactgagaatgat

SEQ ID NO: 414647 - DNA, 19 bp, Homo sapiens
  siRNA target sequence for SPESP1 (NM_145658.1,376-394).
cttcaactgagaatgatgt

SEQ ID NO: 414648 - DNA, 19 bp, Homo sapiens
  siRNA target sequence for SPESP1 (NM_145658.1,390-408).
gatgttttaaccaatccta

SEQ ID NO: 414649 - DNA, 19 bp, Homo sapiens
  siRNA target sequence for SPESP1 (NM_145658.1,443-461).
cttcacaccggaaatagga

SEQ ID NO: 414650 - DNA, 19 bp, Homo sapiens
  siRNA target sequence for SPESP1 (NM_145658.1,485-503).
cccattctggtcgatcaaa

SEQ ID NO: 414651 - DNA, 19 bp, Homo sapiens
  siRNA target sequence for SPESP1 (NM_145658.1,494-512).
gtcgatcaaaccaaacaat

SEQ ID NO: 414652 - DNA, 19 bp, Homo sapiens
  siRNA target sequence for SPESP1 (NM_145658.1,496-514).
cgatcaaaccaaacaatgt

SEQ ID NO: 414653 - DNA, 19 bp, Homo sapiens
  siRNA target sequence for SPESP1 (NM_145658.1,527-545).
gcatgcagaggaaccttat

SEQ ID NO: 414654 - DNA, 19 bp, Homo sapiens
  siRNA target sequence for SPESP1 (NM_145658.1,574-592).
cggagccagctgcaaaaca

SEQ ID NO: 414655 - DNA, 19 bp, Homo sapiens
  siRNA target sequence for SPESP1 (NM_145658.1,642-660).
ccatatgttacctcataca

SEQ ID NO: 414656 - DNA, 19 bp, Homo sapiens
  siRNA target sequence for SPESP1 (NM_145658.1,643-661).
catatgttacctcatacaa

SEQ ID NO: 414657 - DNA, 19 bp, Homo sapiens
  siRNA target sequence for SPESP1 (NM_145658.1,664-682).
cacctgtcaccactttaga

SEQ ID NO: 414658 - DNA, 19 bp, Homo sapiens
  siRNA target sequence for SPESP1 (NM_145658.1,666-684).
cctgtcaccactttagata

SEQ ID NO: 414659 - DNA, 19 bp, Homo sapiens
  siRNA target sequence for SPESP1 (NM_145658.1,667-685).
ctgtcaccactttagataa

SEQ ID NO: 414660 - DNA, 19 bp, Homo sapiens
  siRNA target sequence for SPESP1 (NM_145658.1,700-718).
ggatctctacagaatcaga

SEQ ID NO: 414661 - DNA, 19 bp, Homo sapiens
  siRNA target sequence for SPESP1 (NM_145658.1,739-757).
gtgaaactgcgatagaaaa

SEQ ID NO: 414662 - DNA, 19 bp, Homo sapiens
  siRNA target sequence for SPESP1 (NM_145658.1,779-797).
cccagagagttggaataat

SEQ ID NO: 414663 - DNA, 19 bp, Homo sapiens
  siRNA target sequence for SPESP1 (NM_145658.1,781-799).
cagagagttggaataatga

SEQ ID NO: 414664 - DNA, 19 bp, Homo sapiens
  siRNA target sequence for SPESP1 (NM_145658.1,865-883).
gcaacccagcatatagaga

SEQ ID NO: 414665 - DNA, 19 bp, Homo sapiens
  siRNA target sequence for SPESP1 (NM_145658.1,896-914).
ctctaaagatcacctaaaa

SEQ ID NO: 414666 - DNA, 19 bp, Homo sapiens
  siRNA target sequence for SPESP1 (NM_145658.1,980-998).
gccagtaggacgaacaagt

SEQ ID NO: 414667 - DNA, 19 bp, Homo sapiens
  siRNA target sequence for SPESP1 (NM_145658.1,981-999).
ccagtaggacgaacaagta

SEQ ID NO: 414668 - DNA, 19 bp, Homo sapiens
  siRNA target sequence for SPESP1 (NM_145658.1,982-1000).
cagtaggacgaacaagtaa

SEQ ID NO: 414669 - DNA, 19 bp, Homo sapiens
  siRNA target sequence for SPESP1 (NM_145658.1,984-1002).
gtaggacgaacaagtaata

SEQ ID NO: 414670 - DNA, 19 bp, Homo sapiens
  siRNA target sequence for SPESP1 (NM_145658.1,988-1006).
gacgaacaagtaataaaat

SEQ ID NO: 414671 - DNA, 19 bp, Homo sapiens
  siRNA target sequence for SPESP1 (NM_145658.1,1011-1029).
gacatcgaaactgttatta

SEQ ID NO: 414672 - DNA, 19 bp, Homo sapiens
  siRNA target sequence for SPESP1 (NM_145658.1,1031-1049).
catgctgtgtaattctaga

SEQ ID NO: 414673 - DNA, 19 bp, Homo sapiens
  siRNA target sequence for SPESP1 (NM_145658.1,1045-1063).
ctagatctaaactctatga

SEQ ID NO: 414674 - DNA, 19 bp, Homo sapiens
  siRNA target sequence for SPESP1 (NM_145658.1,1048-1066).
gatctaaactctatgaata

SEQ ID NO: 414675 - DNA, 19 bp, Homo sapiens
  siRNA target sequence for SPESP1 (NM_145658.1,1153-1171).
gagtcacagccttattaaa

SEQ ID NO: 414676 - DNA, 19 bp, Homo sapiens
  siRNA target sequence for MAP4K4 (NM_145686.1,1751-1769).
gcgcgagaggtggaagata

SEQ ID NO: 414677 - DNA, 19 bp, Homo sapiens
  siRNA target sequence for MAP4K4 (NM_145686.1,1753-1771).
gcgagaggtggaagataga

SEQ ID NO: 414678 - DNA, 19 bp, Homo sapiens
  siRNA target sequence for MAP4K4 (NM_145686.1,1754-1772).
cgagaggtggaagatagat

SEQ ID NO: 414679 - DNA, 19 bp, Homo sapiens
  siRNA target sequence for MAP4K4 (NM_145686.1,1794-1812).
cccctgaagcccagtctaa

SEQ ID NO: 414680 - DNA, 19 bp, Homo sapiens
  siRNA target sequence for MAP4K4 (NM_145686.1,1845-1863).
cttcccgatcagagtcttt

SEQ ID NO: 414681 - DNA, 19 bp, Homo sapiens
  siRNA target sequence for MAP4K4 (NM_145686.1,1850-1868).
cgatcagagtctttttcca

SEQ ID NO: 414682 - DNA, 19 bp, Homo sapiens
  siRNA target sequence for MAP4K4 (NM_145686.1,1939-1957).
ggcatctctcaagaacaat

SEQ ID NO: 414683 - DNA, 19 bp, Homo sapiens
  siRNA target sequence for MAP4K4 (NM_145686.1,1941-1959).
catctctcaagaacaatgt

SEQ ID NO: 414684 - DNA, 19 bp, Homo sapiens
  siRNA target sequence for MAP4K4 (NM_145686.1,1989-2007).
gtgacccttctcccaaatt

SEQ ID NO: 414685 - DNA, 19 bp, Homo sapiens
  siRNA target sequence for MAP4K4 (NM_145686.1,2067-2085).
gtcagagctctgactctaa

SEQ ID NO: 414686 - DNA, 19 bp, Homo sapiens
  siRNA target sequence for MAP4K4 (NM_145686.1,2069-2087).
cagagctctgactctaagt

SEQ ID NO: 414687 - DNA, 19 bp, Homo sapiens
  siRNA target sequence for MAP4K4 (NM_145686.1,2108-2126).
caaaaggcttggtctagat

SEQ ID NO: 414688 - DNA, 19 bp, Homo sapiens
  siRNA target sequence for ATPAF2 (NM_145691.2,290-308).
ggaagaggttttatcagaa

SEQ ID NO: 414689 - DNA, 19 bp, Homo sapiens
  siRNA target sequence for ATPAF2 (NM_145691.2,291-309).
gaagaggttttatcagaat

SEQ ID NO: 414690 - DNA, 19 bp, Homo sapiens
  siRNA target sequence for ATPAF2 (NM_145691.2,354-372).
ccacaggaagctgaaaact

SEQ ID NO: 414691 - DNA, 19 bp, Homo sapiens
  siRNA target sequence for ATPAF2 (NM_145691.2,482-500).
cattgtgcaacacatcatt

SEQ ID NO: 414692 - DNA, 19 bp, Homo sapiens
  siRNA target sequence for ATPAF2 (NM_145691.2,537-555).
ccgggcagccgtgaagttt

SEQ ID NO: 414693 - DNA, 19 bp, Homo sapiens
  siRNA target sequence for ATPAF2 (NM_145691.2,539-557).
gggcagccgtgaagtttct

SEQ ID NO: 414694 - DNA, 19 bp, Homo sapiens
  siRNA target sequence for ATPAF2 (NM_145691.2,585-603).
ggaggagcccgagacatta

SEQ ID NO: 414695 - DNA, 19 bp, Homo sapiens
  siRNA target sequence for ATPAF2 (NM_145691.2,597-615).
gacattagtggaacttcaa

SEQ ID NO: 414696 - DNA, 19 bp, Homo sapiens
  siRNA target sequence for ATPAF2 (NM_145691.2,607-625).
gaacttcaaaggaatgagt

SEQ ID NO: 414697 - DNA, 19 bp, Homo sapiens
  siRNA target sequence for ATPAF2 (NM_145691.2,734-752).
gccacctggcatcttacaa

SEQ ID NO: 414698 - DNA, 19 bp, Homo sapiens
  siRNA target sequence for ATPAF2 (NM_145691.2,739-757).
ctggcatcttacaacacat

SEQ ID NO: 414699 - DNA, 19 bp, Homo sapiens
  siRNA target sequence for ATPAF2 (NM_145691.2,888-906).
ccagaagtggggcaacatt

SEQ ID NO: 414700 - DNA, 19 bp, Homo sapiens
  siRNA target sequence for TIGD1 (NM_145702.1,758-776).
ctcctgcggcaaacagtta

SEQ ID NO: 414701 - DNA, 19 bp, Homo sapiens
  siRNA target sequence for TIGD1 (NM_145702.1,771-789).
cagttagccaagttgtaaa

SEQ ID NO: 414702 - DNA, 19 bp, Homo sapiens
  siRNA target sequence for TIGD1 (NM_145702.1,1059-1077).
gaagccatttccataacat

SEQ ID NO: 414703 - DNA, 19 bp, Homo sapiens
  siRNA target sequence for TIGD1 (NM_145702.1,1062-1080).
gccatttccataacataaa

SEQ ID NO: 414704 - DNA, 19 bp, Homo sapiens
  siRNA target sequence for TIGD1 (NM_145702.1,1133-1151).
gaagctttagctaagatca

SEQ ID NO: 414705 - DNA, 19 bp, Homo sapiens
  siRNA target sequence for TIGD1 (NM_145702.1,1259-1277).
gtgcctggcttcaaagctt

SEQ ID NO: 414706 - DNA, 19 bp, Homo sapiens
  siRNA target sequence for TIGD1 (NM_145702.1,1392-1410).
ctactctacccgtgctata

SEQ ID NO: 414707 - DNA, 19 bp, Homo sapiens
  siRNA target sequence for TIGD1 (NM_145702.1,1395-1413).
ctctacccgtgctatataa

SEQ ID NO: 414708 - DNA, 19 bp, Homo sapiens
  siRNA target sequence for TIGD1 (NM_145702.1,1397-1415).
ctacccgtgctatataaat

SEQ ID NO: 414709 - DNA, 19 bp, Homo sapiens
  siRNA target sequence for TIGD1 (NM_145702.1,1400-1418).
cccgtgctatataaatgga

SEQ ID NO: 414710 - DNA, 19 bp, Homo sapiens
  siRNA target sequence for TIGD1 (NM_145702.1,1401-1419).
ccgtgctatataaatggaa

SEQ ID NO: 414711 - DNA, 19 bp, Homo sapiens
  siRNA target sequence for TIGD1 (NM_145702.1,1646-1664).
gtaatttcgaccttcaagt

SEQ ID NO: 414712 - DNA, 19 bp, Homo sapiens
  siRNA target sequence for TIGD1 (NM_145702.1,1653-1671).
cgaccttcaagtcttatta

SEQ ID NO: 414713 - DNA, 19 bp, Homo sapiens
  siRNA target sequence for TIGD1 (NM_145702.1,1858-1876).
caccctcattgatgactat

SEQ ID NO: 414714 - DNA, 19 bp, Homo sapiens
  siRNA target sequence for TIGD1 (NM_145702.1,2018-2036).
cttatggatgcgcaaagaa

SEQ ID NO: 414715 - DNA, 19 bp, Homo sapiens
  siRNA target sequence for TIGD1 (NM_145702.1,2267-2285).
gcttcaccgatgtcttatt

SEQ ID NO: 414716 - DNA, 19 bp, Homo sapiens
  siRNA target sequence for TIGD1 (NM_145702.1,2273-2291).
ccgatgtcttattttagga

SEQ ID NO: 414717 - DNA, 19 bp, Homo sapiens
  siRNA target sequence for TIGD1 (NM_145702.1,2274-2292).
cgatgtcttattttaggaa

SEQ ID NO: 414718 - DNA, 19 bp, Homo sapiens
  siRNA target sequence for TIGD2 (NM_145715.1,254-272).
cgtggtgtacggaattggt

SEQ ID NO: 414719 - DNA, 19 bp, Homo sapiens
  siRNA target sequence for TIGD2 (NM_145715.1,320-338).
ctatgcaaacagttcagat

SEQ ID NO: 414720 - DNA, 19 bp, Homo sapiens
  siRNA target sequence for TIGD2 (NM_145715.1,340-358).
ctaccagtggagtatccaa

SEQ ID NO: 414721 - DNA, 19 bp, Homo sapiens
  siRNA target sequence for TIGD2 (NM_145715.1,346-364).
gtggagtatccaaacgtaa

SEQ ID NO: 414722 - DNA, 19 bp, Homo sapiens
  siRNA target sequence for TIGD2 (NM_145715.1,348-366).
ggagtatccaaacgtaaat

SEQ ID NO: 414723 - DNA, 19 bp, Homo sapiens
  siRNA target sequence for TIGD2 (NM_145715.1,351-369).
gtatccaaacgtaaatcta

SEQ ID NO: 414724 - DNA, 19 bp, Homo sapiens
  siRNA target sequence for TIGD2 (NM_145715.1,386-404).
cgaggagcttgatagagtt

SEQ ID NO: 414725 - DNA, 19 bp, Homo sapiens
  siRNA target sequence for TIGD2 (NM_145715.1,390-408).
gagcttgatagagttatga

SEQ ID NO: 414726 - DNA, 19 bp, Homo sapiens
  siRNA target sequence for TIGD2 (NM_145715.1,407-425).
gatagagtggtttaaccaa

SEQ ID NO: 414727 - DNA, 19 bp, Homo sapiens
  siRNA target sequence for TIGD2 (NM_145715.1,444-462).
ccagtgtccggaacgattt

SEQ ID NO: 414728 - DNA, 19 bp, Homo sapiens
  siRNA target sequence for TIGD2 (NM_145715.1,452-470).
cggaacgatttgtgcaaaa

SEQ ID NO: 414729 - DNA, 19 bp, Homo sapiens
  siRNA target sequence for TIGD2 (NM_145715.1,454-472).
gaacgatttgtgcaaaaca

SEQ ID NO: 414730 - DNA, 19 bp, Homo sapiens
  siRNA target sequence for TIGD2 (NM_145715.1,548-566).
gcagcgccatggtattcca

SEQ ID NO: 414731 - DNA, 19 bp, Homo sapiens
  siRNA target sequence for TIGD2 (NM_145715.1,573-591).
gctggtaaaggaacaaaat

SEQ ID NO: 414732 - DNA, 19 bp, Homo sapiens
  siRNA target sequence for TIGD2 (NM_145715.1,603-621).
gaaactgctgccagagaat

SEQ ID NO: 414733 - DNA, 19 bp, Homo sapiens
  siRNA target sequence for TIGD2 (NM_145715.1,690-708).
caaactggattgttttgga

SEQ ID NO: 414734 - DNA, 19 bp, Homo sapiens
  siRNA target sequence for TIGD2 (NM_145715.1,725-743).
gacattaactcttgaaact

SEQ ID NO: 414735 - DNA, 19 bp, Homo sapiens
  siRNA target sequence for TIGD2 (NM_145715.1,773-791).
cagagagagaatcatcatt

SEQ ID NO: 414736 - DNA, 19 bp, Homo sapiens
  siRNA target sequence for TIGD2 (NM_145715.1,972-990).
ccacaggtacagaagcatt

SEQ ID NO: 414737 - DNA, 19 bp, Homo sapiens
  siRNA target sequence for TIGD2 (NM_145715.1,973-991).
cacaggtacagaagcattt

SEQ ID NO: 414738 - DNA, 19 bp, Homo sapiens
  siRNA target sequence for TIGD2 (NM_145715.1,992-1010).
gaaatccaagggactttta

SEQ ID NO: 414739 - DNA, 19 bp, Homo sapiens
  siRNA target sequence for TIGD2 (NM_145715.1,1037-1055).
ccccccagcacgtccaaat

SEQ ID NO: 414740 - DNA, 19 bp, Homo sapiens
  siRNA target sequence for TIGD2 (NM_145715.1,1039-1057).
ccccagcacgtccaaatga

SEQ ID NO: 414741 - DNA, 19 bp, Homo sapiens
  siRNA target sequence for TIGD2 (NM_145715.1,1040-1058).
cccagcacgtccaaatgaa

SEQ ID NO: 414742 - DNA, 19 bp, Homo sapiens
  siRNA target sequence for TIGD2 (NM_145715.1,1044-1062).
gcacgtccaaatgaagaaa

SEQ ID NO: 414743 - DNA, 19 bp, Homo sapiens
  siRNA target sequence for TIGD2 (NM_145715.1,1081-1099).
gcagaataattgtgaagta

SEQ ID NO: 414744 - DNA, 19 bp, Homo sapiens
  siRNA target sequence for TIGD2 (NM_145715.1,1143-1161).
ggagttctagccactgtaa

SEQ ID NO: 414745 - DNA, 19 bp, Homo sapiens
  siRNA target sequence for TIGD2 (NM_145715.1,1144-1162).
gagttctagccactgtaaa

SEQ ID NO: 414746 - DNA, 19 bp, Homo sapiens
  siRNA target sequence for TIGD2 (NM_145715.1,1153-1171).
ccactgtaaaaagatacta

SEQ ID NO: 414747 - DNA, 19 bp, Homo sapiens
  siRNA target sequence for TIGD2 (NM_145715.1,1240-1258).
cagtgttggatgcaattta

SEQ ID NO: 414748 - DNA, 19 bp, Homo sapiens
  siRNA target sequence for TIGD2 (NM_145715.1,1277-1295).
gaacatggtaaaatcaagt

SEQ ID NO: 414749 - DNA, 19 bp, Homo sapiens
  siRNA target sequence for TIGD2 (NM_145715.1,1283-1301).
ggtaaaatcaagtaccata

SEQ ID NO: 414750 - DNA, 19 bp, Homo sapiens
  siRNA target sequence for TIGD2 (NM_145715.1,1303-1321).
ccaaagcatggaaaaaact

SEQ ID NO: 414751 - DNA, 19 bp, Homo sapiens
  siRNA target sequence for TIGD2 (NM_145715.1,1338-1356).
gagaattcaggtatgaaca

SEQ ID NO: 414752 - DNA, 19 bp, Homo sapiens
  siRNA target sequence for TIGD2 (NM_145715.1,1340-1358).
gaattcaggtatgaacatt

SEQ ID NO: 414753 - DNA, 19 bp, Homo sapiens
  siRNA target sequence for TIGD2 (NM_145715.1,1533-1551).
caaaagccttccagtaaga

SEQ ID NO: 414754 - DNA, 19 bp, Homo sapiens
  siRNA target sequence for TIGD2 (NM_145715.1,1577-1595).
gaagcatattagccataaa

SEQ ID NO: 414755 - DNA, 19 bp, Homo sapiens
  siRNA target sequence for TIGD2 (NM_145715.1,1589-1607).
ccataaagcggcacttgaa

SEQ ID NO: 414756 - DNA, 19 bp, Homo sapiens
  siRNA target sequence for TIGD2 (NM_145715.1,1678-1696).
ggaggcttcggaccataat

SEQ ID NO: 414757 - DNA, 19 bp, Homo sapiens
  siRNA target sequence for TIGD2 (NM_145715.1,1679-1697).
gaggcttcggaccataata

SEQ ID NO: 414758 - DNA, 19 bp, Homo sapiens
  siRNA target sequence for TIGD2 (NM_145715.1,1682-1700).
gcttcggaccataataaga

SEQ ID NO: 414759 - DNA, 19 bp, Homo sapiens
  siRNA target sequence for TIGD2 (NM_145715.1,1683-1701).
cttcggaccataataagaa

SEQ ID NO: 414760 - DNA, 19 bp, Homo sapiens
  siRNA target sequence for TIGD3 (NM_145719.1,290-308).
ctcgcgcatctgcaagaat

SEQ ID NO: 414761 - DNA, 19 bp, Homo sapiens
  siRNA target sequence for TIGD3 (NM_145719.1,292-310).
cgcgcatctgcaagaataa

SEQ ID NO: 414762 - DNA, 19 bp, Homo sapiens
  siRNA target sequence for TIGD3 (NM_145719.1,295-313).
gcatctgcaagaataagga

SEQ ID NO: 414763 - DNA, 19 bp, Homo sapiens
  siRNA target sequence for TIGD3 (NM_145719.1,532-550).
gctggaaacgccgaaacaa

SEQ ID NO: 414764 - DNA, 19 bp, Homo sapiens
  siRNA target sequence for TIGD3 (NM_145719.1,719-737).
ctttggtgcatgtgatcaa

SEQ ID NO: 414765 - DNA, 19 bp, Homo sapiens
  siRNA target sequence for TIGD3 (NM_145719.1,724-742).
gtgcatgtgatcaagtaca

SEQ ID NO: 414766 - DNA, 19 bp, Homo sapiens
  siRNA target sequence for TIGD3 (NM_145719.1,1209-1227).
cctcctcagctcattttca

SEQ ID NO: 414767 - DNA, 19 bp, Homo sapiens
  siRNA target sequence for TIGD3 (NM_145719.1,1361-1379).
gccaaggtctggagtatgt

SEQ ID NO: 414768 - DNA, 19 bp, Homo sapiens
  siRNA target sequence for TIGD3 (NM_145719.1,1362-1380).
ccaaggtctggagtatgta

SEQ ID NO: 414769 - DNA, 19 bp, Homo sapiens
  siRNA target sequence for TIGD3 (NM_145719.1,1363-1381).
caaggtctggagtatgtaa

SEQ ID NO: 414770 - DNA, 19 bp, Homo sapiens
  siRNA target sequence for TIGD3 (NM_145719.1,1480-1498).
ggaggtggtttgaatgcaa

SEQ ID NO: 414771 - DNA, 19 bp, Homo sapiens
  siRNA target sequence for TIGD3 (NM_145719.1,1501-1519).
gcacttctcctgagctatt

SEQ ID NO: 414772 - DNA, 19 bp, Homo sapiens
  siRNA target sequence for TIGD3 (NM_145719.1,1504-1522).
cttctcctgagctattcga

SEQ ID NO: 414773 - DNA, 19 bp, Homo sapiens
  siRNA target sequence for TIGD3 (NM_145719.1,1507-1525).
ctcctgagctattcgaaaa

SEQ ID NO: 414774 - DNA, 19 bp, Homo sapiens
  siRNA target sequence for LL5beta (NM_145753.1,188-206).
cattctgttgagaacgatt

SEQ ID NO: 414775 - DNA, 19 bp, Homo sapiens
  siRNA target sequence for LL5beta (NM_145753.1,197-215).
gagaacgattcccaaaaca

SEQ ID NO: 414776 - DNA, 19 bp, Homo sapiens
  siRNA target sequence for LL5beta (NM_145753.1,275-293).
gactattctggctcctatt

SEQ ID NO: 414777 - DNA, 19 bp, Homo sapiens
  siRNA target sequence for LL5beta (NM_145753.1,387-405).
gcaagcagttctcttatga

SEQ ID NO: 414778 - DNA, 19 bp, Homo sapiens
  siRNA target sequence for LL5beta (NM_145753.1,388-406).
caagcagttctcttatgat

SEQ ID NO: 414779 - DNA, 19 bp, Homo sapiens
  siRNA target sequence for LL5beta (NM_145753.1,550-568).
gcctccctattccaaatat

SEQ ID NO: 414780 - DNA, 19 bp, Homo sapiens
  siRNA target sequence for LL5beta (NM_145753.1,551-569).
cctccctattccaaatata

SEQ ID NO: 414781 - DNA, 19 bp, Homo sapiens
  siRNA target sequence for LL5beta (NM_145753.1,576-594).
ggcataaatcgcatgacaa

SEQ ID NO: 414782 - DNA, 19 bp, Homo sapiens
  siRNA target sequence for LL5beta (NM_145753.1,577-595).
gcataaatcgcatgacaat

SEQ ID NO: 414783 - DNA, 19 bp, Homo sapiens
  siRNA target sequence for LL5beta (NM_145753.1,644-662).
ctggccatgtggaatggaa

SEQ ID NO: 414784 - DNA, 19 bp, Homo sapiens
  siRNA target sequence for LL5beta (NM_145753.1,766-784).
ggcgcttcaacccaagtta

SEQ ID NO: 414785 - DNA, 19 bp, Homo sapiens
  siRNA target sequence for LL5beta (NM_145753.1,767-785).
gcgcttcaacccaagttaa

SEQ ID NO: 414786 - DNA, 19 bp, Homo sapiens
  siRNA target sequence for LL5beta (NM_145753.1,769-787).
gcttcaacccaagttaact

SEQ ID NO: 414787 - DNA, 19 bp, Homo sapiens
  siRNA target sequence for LL5beta (NM_145753.1,770-788).
cttcaacccaagttaacta

SEQ ID NO: 414788 - DNA, 19 bp, Homo sapiens
  siRNA target sequence for LL5beta (NM_145753.1,947-965).
ctgggcaattccaaacgaa

SEQ ID NO: 414789 - DNA, 19 bp, Homo sapiens
  siRNA target sequence for LL5beta (NM_145753.1,996-1014).
gcgtaatagacaatgacaa

SEQ ID NO: 414790 - DNA, 19 bp, Homo sapiens
  siRNA target sequence for LL5beta (NM_145753.1,997-1015).
cgtaatagacaatgacaat

SEQ ID NO: 414791 - DNA, 19 bp, Homo sapiens
  siRNA target sequence for LL5beta (NM_145753.1,1043-1061).
ggggctttaccctataaaa

SEQ ID NO: 414792 - DNA, 19 bp, Homo sapiens
  siRNA target sequence for LL5beta (NM_145753.1,1046-1064).
gctttaccctataaaacct

SEQ ID NO: 414793 - DNA, 19 bp, Homo sapiens
  siRNA target sequence for LL5beta (NM_145753.1,1078-1096).
caatccttatgtaagttct

SEQ ID NO: 414794 - DNA, 19 bp, Homo sapiens
  siRNA target sequence for LL5beta (NM_145753.1,1196-1214).
gggacaaacccgagtcatt

SEQ ID NO: 414795 - DNA, 19 bp, Homo sapiens
  siRNA target sequence for LL5beta (NM_145753.1,1198-1216).
gacaaacccgagtcattca

SEQ ID NO: 414796 - DNA, 19 bp, Homo sapiens
  siRNA target sequence for LL5beta (NM_145753.1,1340-1358).
cttcgggaacggaaaagca

SEQ ID NO: 414797 - DNA, 19 bp, Homo sapiens
  siRNA target sequence for LL5beta (NM_145753.1,1346-1364).
gaacggaaaagcagtatta

SEQ ID NO: 414798 - DNA, 19 bp, Homo sapiens
  siRNA target sequence for LL5beta (NM_145753.1,1379-1397).
cgtgatgacctgatggatt

SEQ ID NO: 414799 - DNA, 19 bp, Homo sapiens
  siRNA target sequence for LL5beta (NM_145753.1,1380-1398).
gtgatgacctgatggatta

SEQ ID NO: 414800 - DNA, 19 bp, Homo sapiens
  siRNA target sequence for LL5beta (NM_145753.1,1501-1519).
gcctgacagtcgcttatct

SEQ ID NO: 414801 - DNA, 19 bp, Homo sapiens
  siRNA target sequence for LL5beta (NM_145753.1,1502-1520).
cctgacagtcgcttatcta

SEQ ID NO: 414802 - DNA, 19 bp, Homo sapiens
  siRNA target sequence for LL5beta (NM_145753.1,1726-1744).
caccaggaatgatgaacta

SEQ ID NO: 414803 - DNA, 19 bp, Homo sapiens
  siRNA target sequence for LL5beta (NM_145753.1,1805-1823).
gagtcctcttatctaagta

SEQ ID NO: 414804 - DNA, 19 bp, Homo sapiens
  siRNA target sequence for LL5beta (NM_145753.1,1810-1828).
ctcttatctaagtatccta

SEQ ID NO: 414805 - DNA, 19 bp, Homo sapiens
  siRNA target sequence for LL5beta (NM_145753.1,1834-1852).
gaccccagagggtataagt

SEQ ID NO: 414806 - DNA, 19 bp, Homo sapiens
  siRNA target sequence for LL5beta (NM_145753.1,1836-1854).
ccccagagggtataagtga

SEQ ID NO: 414807 - DNA, 19 bp, Homo sapiens
  siRNA target sequence for LL5beta (NM_145753.1,1893-1911).
cccggatagtcattctgaa

SEQ ID NO: 414808 - DNA, 19 bp, Homo sapiens
  siRNA target sequence for LL5beta (NM_145753.1,1896-1914).
ggatagtcattctgaacaa

SEQ ID NO: 414809 - DNA, 19 bp, Homo sapiens
  siRNA target sequence for LL5beta (NM_145753.1,1915-1933).
cctcgaggaacttaagcaa

SEQ ID NO: 414810 - DNA, 19 bp, Homo sapiens
  siRNA target sequence for LL5beta (NM_145753.1,1957-1975).
gatggatgagtctttcaga

SEQ ID NO: 414811 - DNA, 19 bp, Homo sapiens
  siRNA target sequence for LL5beta (NM_145753.1,2021-2039).
gaaacaactgaacttatga

SEQ ID NO: 414812 - DNA, 19 bp, Homo sapiens
  siRNA target sequence for LL5beta (NM_145753.1,2132-2150).
gatgttgaaagcaaacact

SEQ ID NO: 414813 - DNA, 19 bp, Homo sapiens
  siRNA target sequence for LL5beta (NM_145753.1,2185-2203).
gagccgtctagatgaagaa

SEQ ID NO: 414814 - DNA, 19 bp, Homo sapiens
  siRNA target sequence for LL5beta (NM_145753.1,2230-2248).
gcgtgaagttgctgaatat

SEQ ID NO: 414815 - DNA, 19 bp, Homo sapiens
  siRNA target sequence for LL5beta (NM_145753.1,2249-2267).
caacggaacatcgtttcta

SEQ ID NO: 414816 - DNA, 19 bp, Homo sapiens
  siRNA target sequence for LL5beta (NM_145753.1,2252-2270).
cggaacatcgtttctagaa

SEQ ID NO: 414817 - DNA, 19 bp, Homo sapiens
  siRNA target sequence for LL5beta (NM_145753.1,2253-2271).
ggaacatcgtttctagaaa

SEQ ID NO: 414818 - DNA, 19 bp, Homo sapiens
  siRNA target sequence for LL5beta (NM_145753.1,2257-2275).
catcgtttctagaaaggaa

SEQ ID NO: 414819 - DNA, 19 bp, Homo sapiens
  siRNA target sequence for LL5beta (NM_145753.1,2447-2465).
cccgttaaccccaatactt

SEQ ID NO: 414820 - DNA, 19 bp, Homo sapiens
  siRNA target sequence for LL5beta (NM_145753.1,2449-2467).
cgttaaccccaatacttta

SEQ ID NO: 414821 - DNA, 19 bp, Homo sapiens
  siRNA target sequence for LL5beta (NM_145753.1,2473-2491).
gggctatatcagtgtaaat

SEQ ID NO: 414822 - DNA, 19 bp, Homo sapiens
  siRNA target sequence for LL5beta (NM_145753.1,2475-2493).
gctatatcagtgtaaatga

SEQ ID NO: 414823 - DNA, 19 bp, Homo sapiens
  siRNA target sequence for LL5beta (NM_145753.1,2501-2519).
gagccgtgtggcaattcca

SEQ ID NO: 414824 - DNA, 19 bp, Homo sapiens
  siRNA target sequence for LL5beta (NM_145753.1,2595-2613).
cgagccagccacagagtaa

SEQ ID NO: 414825 - DNA, 19 bp, Homo sapiens
  siRNA target sequence for LL5beta (NM_145753.1,2596-2614).
gagccagccacagagtaaa

SEQ ID NO: 414826 - DNA, 19 bp, Homo sapiens
  siRNA target sequence for LL5beta (NM_145753.1,2608-2626).
gagtaaagagcactttaga

SEQ ID NO: 414827 - DNA, 19 bp, Homo sapiens
  siRNA target sequence for LL5beta (NM_145753.1,2660-2678).
ggcctctatctgagtgata

SEQ ID NO: 414828 - DNA, 19 bp, Homo sapiens
  siRNA target sequence for LL5beta (NM_145753.1,2662-2680).
cctctatctgagtgatact

SEQ ID NO: 414829 - DNA, 19 bp, Homo sapiens
  siRNA target sequence for LL5beta (NM_145753.1,2663-2681).
ctctatctgagtgatactt

SEQ ID NO: 414830 - DNA, 19 bp, Homo sapiens
  siRNA target sequence for LL5beta (NM_145753.1,2768-2786).
cccctaggacagagtaaca

SEQ ID NO: 414831 - DNA, 19 bp, Homo sapiens
  siRNA target sequence for LL5beta (NM_145753.1,2848-2866).
gatgctcagaggttataat

SEQ ID NO: 414832 - DNA, 19 bp, Homo sapiens
  siRNA target sequence for LL5beta (NM_145753.1,2914-2932).
ccgcacagcatctgaatca

SEQ ID NO: 414833 - DNA, 19 bp, Homo sapiens
  siRNA target sequence for LL5beta (NM_145753.1,2915-2933).
cgcacagcatctgaatcaa

SEQ ID NO: 414834 - DNA, 19 bp, Homo sapiens
  siRNA target sequence for LL5beta (NM_145753.1,2938-2956).
ctacttgaatagtttccat

SEQ ID NO: 414835 - DNA, 19 bp, Homo sapiens
  siRNA target sequence for LL5beta (NM_145753.1,2977-2995).
ggaccaggcctttgatact

SEQ ID NO: 414836 - DNA, 19 bp, Homo sapiens
  siRNA target sequence for LL5beta (NM_145753.1,3039-3057).
cttgctcaccagacaacat

SEQ ID NO: 414837 - DNA, 19 bp, Homo sapiens
  siRNA target sequence for LL5beta (NM_145753.1,3060-3078).
ctagtgccagcacttcaaa

SEQ ID NO: 414838 - DNA, 19 bp, Homo sapiens
  siRNA target sequence for LL5beta (NM_145753.1,3365-3383).
gagactgctggccacaata

SEQ ID NO: 414839 - DNA, 19 bp, Homo sapiens
  siRNA target sequence for LL5beta (NM_145753.1,3367-3385).
gactgctggccacaatatt

SEQ ID NO: 414840 - DNA, 19 bp, Homo sapiens
  siRNA target sequence for LL5beta (NM_145753.1,3371-3389).
gctggccacaatattgaca

SEQ ID NO: 414841 - DNA, 19 bp, Homo sapiens
  siRNA target sequence for LL5beta (NM_145753.1,3386-3404).
gacacctgttaccatgtat

SEQ ID NO: 414842 - DNA, 19 bp, Homo sapiens
  siRNA target sequence for LL5beta (NM_145753.1,3388-3406).
cacctgttaccatgtatca

SEQ ID NO: 414843 - DNA, 19 bp, Homo sapiens
  siRNA target sequence for LL5beta (NM_145753.1,3390-3408).
cctgttaccatgtatcaat

SEQ ID NO: 414844 - DNA, 19 bp, Homo sapiens
  siRNA target sequence for LL5beta (NM_145753.1,3423-3441).
gccgaggattcctcatcaa

SEQ ID NO: 414845 - DNA, 19 bp, Homo sapiens
  siRNA target sequence for LL5beta (NM_145753.1,3491-3509).
cggaacaagcgaacattct

SEQ ID NO: 414846 - DNA, 19 bp, Homo sapiens
  siRNA target sequence for LL5beta (NM_145753.1,3493-3511).
gaacaagcgaacattctct

SEQ ID NO: 414847 - DNA, 19 bp, Homo sapiens
  siRNA target sequence for LL5beta (NM_145753.1,3496-3514).
caagcgaacattctcttat

SEQ ID NO: 414848 - DNA, 19 bp, Homo sapiens
  siRNA target sequence for LL5beta (NM_145753.1,3499-3517).
gcgaacattctcttattat

SEQ ID NO: 414849 - DNA, 19 bp, Homo sapiens
  siRNA target sequence for LL5beta (NM_145753.1,3518-3536).
gcagacaagcatgaaacta

SEQ ID NO: 414850 - DNA, 19 bp, Homo sapiens
  siRNA target sequence for LL5beta (NM_145753.1,3519-3537).
cagacaagcatgaaactaa

SEQ ID NO: 414851 - DNA, 19 bp, Homo sapiens
  siRNA target sequence for LL5beta (NM_145753.1,3521-3539).
gacaagcatgaaactaaat

SEQ ID NO: 414852 - DNA, 19 bp, Homo sapiens
  siRNA target sequence for LL5beta (NM_145753.1,3556-3574).
ctttcaagccattgaagaa

SEQ ID NO: 414853 - DNA, 19 bp, Homo sapiens
  siRNA target sequence for LL5beta (NM_145753.1,3587-3605).
cacctcaagaatgctaata

SEQ ID NO: 414854 - DNA, 19 bp, Homo sapiens
  siRNA target sequence for LL5beta (NM_145753.1,3590-3608).
ctcaagaatgctaataaga

SEQ ID NO: 414855 - DNA, 19 bp, Homo sapiens
  siRNA target sequence for LL5beta (NM_145753.1,3592-3610).
caagaatgctaataagagt

SEQ ID NO: 414856 - DNA, 19 bp, Homo sapiens
  siRNA target sequence for LL5beta (NM_145753.1,3640-3658).
gactcatgacagaatctat

SEQ ID NO: 414857 - DNA, 19 bp, Homo sapiens
  siRNA target sequence for LL5beta (NM_145753.1,3644-3662).
catgacagaatctattata

SEQ ID NO: 414858 - DNA, 19 bp, Homo sapiens
  siRNA target sequence for LL5beta (NM_145753.1,3694-3712).
ctggatggatgttatagtt

SEQ ID NO: 414859 - DNA, 19 bp, Homo sapiens
  siRNA target sequence for STI2 (NM_145755.1,167-185).
gctgggatcatttactata

SEQ ID NO: 414860 - DNA, 19 bp, Homo sapiens
  siRNA target sequence for STI2 (NM_145755.1,246-264).
gcaatgaccctgtgttgaa

SEQ ID NO: 414861 - DNA, 19 bp, Homo sapiens
  siRNA target sequence for STI2 (NM_145755.1,373-391).
cctcatttatgctcacaaa

SEQ ID NO: 414862 - DNA, 19 bp, Homo sapiens
  siRNA target sequence for STI2 (NM_145755.1,376-394).
catttatgctcacaaaaga

SEQ ID NO: 414863 - DNA, 19 bp, Homo sapiens
  siRNA target sequence for STI2 (NM_145755.1,403-421).
cattgaccgagaagcaatt

SEQ ID NO: 414864 - DNA, 19 bp, Homo sapiens
  siRNA target sequence for STI2 (NM_145755.1,417-435).
caattcaggagcttgagta

SEQ ID NO: 414865 - DNA, 19 bp, Homo sapiens
  siRNA target sequence for STI2 (NM_145755.1,465-483).
gtgggactgcactgtacta

SEQ ID NO: 414866 - DNA, 19 bp, Homo sapiens
  siRNA target sequence for STI2 (NM_145755.1,520-538).
caaggccaaagagtacatt

SEQ ID NO: 414867 - DNA, 19 bp, Homo sapiens
  siRNA target sequence for STI2 (NM_145755.1,616-634).
gccccacactgcgaagaaa

SEQ ID NO: 414868 - DNA, 19 bp, Homo sapiens
  siRNA target sequence for STI2 (NM_145755.1,626-644).
gcgaagaaagccattgagt

SEQ ID NO: 414869 - DNA, 19 bp, Homo sapiens
  siRNA target sequence for STI2 (NM_145755.1,693-711).
gaaaggcaatgtacttcat

SEQ ID NO: 414870 - DNA, 19 bp, Homo sapiens
  siRNA target sequence for STI2 (NM_145755.1,849-867).
gacacagaatcctagaaaa

SEQ ID NO: 414871 - DNA, 19 bp, Homo sapiens
  siRNA target sequence for STI2 (NM_145755.1,884-902).
gatgcctgccaaattctaa

SEQ ID NO: 414872 - DNA, 19 bp, Homo sapiens
  siRNA target sequence for STI2 (NM_145755.1,965-983).
gctaccaatcacgttagaa

SEQ ID NO: 414873 - DNA, 19 bp, Homo sapiens
  siRNA target sequence for STI2 (NM_145755.1,966-984).
ctaccaatcacgttagaaa

SEQ ID NO: 414874 - DNA, 19 bp, Homo sapiens
  siRNA target sequence for STI2 (NM_145755.1,969-987).
ccaatcacgttagaaatct

SEQ ID NO: 414875 - DNA, 19 bp, Homo sapiens
  siRNA target sequence for STI2 (NM_145755.1,974-992).
cacgttagaaatctgatta

SEQ ID NO: 414876 - DNA, 19 bp, Homo sapiens
  siRNA target sequence for STI2 (NM_145755.1,1085-1103).
ctagggctagtgtgtagtt

SEQ ID NO: 414877 - DNA, 19 bp, Homo sapiens
  siRNA target sequence for STI2 (NM_145755.1,1088-1106).
gggctagtgtgtagtttca

SEQ ID NO: 414878 - DNA, 19 bp, Homo sapiens
  siRNA target sequence for STI2 (NM_145755.1,1089-1107).
ggctagtgtgtagtttcat

SEQ ID NO: 414879 - DNA, 19 bp, Homo sapiens
  siRNA target sequence for STI2 (NM_145755.1,1248-1266).
gtttgacagggatcatctt

SEQ ID NO: 414880 - DNA, 19 bp, Homo sapiens
  siRNA target sequence for STI2 (NM_145755.1,1256-1274).
gggatcatcttgtgtcata

SEQ ID NO: 414881 - DNA, 19 bp, Homo sapiens
  siRNA target sequence for STI2 (NM_145755.1,1257-1275).
ggatcatcttgtgtcatat

SEQ ID NO: 414882 - DNA, 19 bp, Homo sapiens
  siRNA target sequence for STI2 (NM_145755.1,1350-1368).
ctgaggtgctaattttcct

SEQ ID NO: 414883 - DNA, 19 bp, Homo sapiens
  siRNA target sequence for STI2 (NM_145755.1,1518-1536).
gcattgctaaggagtactt

SEQ ID NO: 414884 - DNA, 19 bp, Homo sapiens
  siRNA target sequence for STI2 (NM_145755.1,1581-1599).
ctccacttcttaaacaagt

SEQ ID NO: 414885 - DNA, 19 bp, Homo sapiens
  siRNA target sequence for STI2 (NM_145755.1,1595-1613).
caagtcgccgtgatcttga

SEQ ID NO: 414886 - DNA, 19 bp, Homo sapiens
  siRNA target sequence for STI2 (NM_145755.1,1664-1682).
gctcaggtcaggtattact

SEQ ID NO: 414887 - DNA, 19 bp, Homo sapiens
  siRNA target sequence for STI2 (NM_145755.1,1999-2017).
ccagcgggcatccatctta

SEQ ID NO: 414888 - DNA, 19 bp, Homo sapiens
  siRNA target sequence for STI2 (NM_145755.1,2000-2018).
cagcgggcatccatcttat

SEQ ID NO: 414889 - DNA, 19 bp, Homo sapiens
  siRNA target sequence for STI2 (NM_145755.1,2005-2023).
ggcatccatcttattggaa

SEQ ID NO: 414890 - DNA, 19 bp, Homo sapiens
  siRNA target sequence for STI2 (NM_145755.1,2078-2096).
caggacaccatcaatgagt

SEQ ID NO: 414891 - DNA, 19 bp, Homo sapiens
  siRNA target sequence for STI2 (NM_145755.1,2201-2219).
cccaagcagtcctgctata

SEQ ID NO: 414892 - DNA, 19 bp, Homo sapiens
  siRNA target sequence for STI2 (NM_145755.1,2202-2220).
ccaagcagtcctgctatat

SEQ ID NO: 414893 - DNA, 19 bp, Homo sapiens
  siRNA target sequence for STI2 (NM_145755.1,2206-2224).
gcagtcctgctatatggaa

SEQ ID NO: 414894 - DNA, 19 bp, Homo sapiens
  siRNA target sequence for STI2 (NM_145755.1,2267-2285).
gacaggcgcctctacatca

SEQ ID NO: 414895 - DNA, 19 bp, Homo sapiens
  siRNA target sequence for STI2 (NM_145755.1,2295-2313).
gtgagctctgtgaacatct

SEQ ID NO: 414896 - DNA, 19 bp, Homo sapiens
  siRNA target sequence for STI2 (NM_145755.1,2339-2357).
ctgggcgatgccttaatga

SEQ ID NO: 414897 - DNA, 19 bp, Homo sapiens
  siRNA target sequence for STI2 (NM_145755.1,2439-2457).
gaattgggcacgcttatgt

SEQ ID NO: 414898 - DNA, 19 bp, Homo sapiens
  siRNA target sequence for STI2 (NM_145755.1,2458-2476).
gaaggcccaccagtatact

SEQ ID NO: 414899 - DNA, 19 bp, Homo sapiens
  siRNA target sequence for STI2 (NM_145755.1,2599-2617).
ggcactggaacatgacatt

SEQ ID NO: 414900 - DNA, 19 bp, Homo sapiens
  siRNA target sequence for STI2 (NM_145755.1,2631-2649).
catccatgatgaatgatgt

SEQ ID NO: 414901 - DNA, 19 bp, Homo sapiens
  siRNA target sequence for STI2 (NM_145755.1,2666-2684).
ctggcaaaggtttacaaga

SEQ ID NO: 414902 - DNA, 19 bp, Homo sapiens
  siRNA target sequence for STI2 (NM_145755.1,2674-2692).
ggtttacaagagccataaa

SEQ ID NO: 414903 - DNA, 19 bp, Homo sapiens
  siRNA target sequence for STI2 (NM_145755.1,2696-2714).
gaagctgtgatagaaactt

SEQ ID NO: 414904 - DNA, 19 bp, Homo sapiens
  siRNA target sequence for STI2 (NM_145755.1,2760-2778).
cactggagcaaccagaaat

SEQ ID NO: 414905 - DNA, 19 bp, Homo sapiens
  siRNA target sequence for STI2 (NM_145755.1,2795-2813).
caactggcagcctctatct

SEQ ID NO: 414906 - DNA, 19 bp, Homo sapiens
  siRNA target sequence for STI2 (NM_145755.1,2806-2824).
ctctatctgcatccaattt

SEQ ID NO: 414907 - DNA, 19 bp, Homo sapiens
  siRNA target sequence for STI2 (NM_145755.1,2857-2875).
caaggcggtacagtcttat

SEQ ID NO: 414908 - DNA, 19 bp, Homo sapiens
  siRNA target sequence for STI2 (NM_145755.1,2862-2880).
cggtacagtcttataagga

SEQ ID NO: 414909 - DNA, 19 bp, Homo sapiens
  siRNA target sequence for STI2 (NM_145755.1,3028-3046).
ggctgacctgatgtttaga

SEQ ID NO: 414910 - DNA, 19 bp, Homo sapiens
  siRNA target sequence for STI2 (NM_145755.1,3029-3047).
gctgacctgatgtttagaa

SEQ ID NO: 414911 - DNA, 19 bp, Homo sapiens
  siRNA target sequence for STI2 (NM_145755.1,3063-3081).
cggccatcaatctttacca

SEQ ID NO: 414912 - DNA, 19 bp, Homo sapiens
  siRNA target sequence for STI2 (NM_145755.1,3094-3112).
gaaagcgccagacaatttt

SEQ ID NO: 414913 - DNA, 19 bp, Homo sapiens
  siRNA target sequence for STI2 (NM_145755.1,3099-3117).
cgccagacaattttttggt

SEQ ID NO: 414914 - DNA, 19 bp, Homo sapiens
  siRNA target sequence for STI2 (NM_145755.1,3106-3124).
caattttttggtattgcat

SEQ ID NO: 414915 - DNA, 19 bp, Homo sapiens
  siRNA target sequence for STI2 (NM_145755.1,3133-3151).
cgatctgctaagaagaagt

SEQ ID NO: 414916 - DNA, 19 bp, Homo sapiens
  siRNA target sequence for STI2 (NM_145755.1,3218-3236).
gaaccagggttcaattact

SEQ ID NO: 414917 - DNA, 19 bp, Homo sapiens
  siRNA target sequence for STI2 (NM_145755.1,3343-3361).
ggtgcagatctgtctgaat

SEQ ID NO: 414918 - DNA, 19 bp, Homo sapiens
  siRNA target sequence for STI2 (NM_145755.1,3787-3805).
gttcgacctcgccttagaa

SEQ ID NO: 414919 - DNA, 19 bp, Homo sapiens
  siRNA target sequence for STI2 (NM_145755.1,3896-3914).
gatgcagtcaccaactaca

SEQ ID NO: 414920 - DNA, 19 bp, Homo sapiens
  siRNA target sequence for STI2 (NM_145755.1,3948-3966).
ctgccattggtttcaaact

SEQ ID NO: 414921 - DNA, 19 bp, Homo sapiens
  siRNA target sequence for STI2 (NM_145755.1,4050-4068).
ccaagatcagggaggaaat

SEQ ID NO: 414922 - DNA, 19 bp, Homo sapiens
  siRNA target sequence for ZNF511 (NM_145806.2,331-349).
cacgctgcacggaaatgtt

SEQ ID NO: 414923 - DNA, 19 bp, Homo sapiens
  siRNA target sequence for ZNF511 (NM_145806.2,542-560).
gcggacttccggtttgata

SEQ ID NO: 414924 - DNA, 19 bp, Homo sapiens
  siRNA target sequence for ZNF511 (NM_145806.2,543-561).
cggacttccggtttgataa

SEQ ID NO: 414925 - DNA, 19 bp, Homo sapiens
  siRNA target sequence for ZNF511 (NM_145806.2,680-698).
ggtgagaggcggatctaca

SEQ ID NO: 414926 - DNA, 19 bp, Homo sapiens
  siRNA target sequence for ZNF511 (NM_145806.2,688-706).
gcggatctacagacataga

SEQ ID NO: 414927 - DNA, 19 bp, Homo sapiens
  siRNA target sequence for ZNF511 (NM_145806.2,689-707).
cggatctacagacatagaa

SEQ ID NO: 414928 - DNA, 19 bp, Homo sapiens
  siRNA target sequence for ZNF511 (NM_145806.2,690-708).
ggatctacagacatagaat

SEQ ID NO: 414929 - DNA, 19 bp, Homo sapiens
  siRNA target sequence for ZNF511 (NM_145806.2,691-709).
gatctacagacatagaata

SEQ ID NO: 414930 - DNA, 19 bp, Homo sapiens
  siRNA target sequence for ZNF511 (NM_145806.2,734-752).
ggtgccgctcgaggattta

SEQ ID NO: 414931 - DNA, 19 bp, Homo sapiens
  siRNA target sequence for ZNF511 (NM_145806.2,735-753).
gtgccgctcgaggatttaa

SEQ ID NO: 414932 - DNA, 19 bp, Homo sapiens
  siRNA target sequence for ZNF511 (NM_145806.2,737-755).
gccgctcgaggatttaaaa

SEQ ID NO: 414933 - DNA, 19 bp, Homo sapiens
  siRNA target sequence for FLJ38819 (NM_145865.1,62-80).
caagctgctagtgatagtt

SEQ ID NO: 414934 - DNA, 19 bp, Homo sapiens
  siRNA target sequence for FLJ38819 (NM_145865.1,78-96).
gttacctggaacttctaaa

SEQ ID NO: 414935 - DNA, 19 bp, Homo sapiens
  siRNA target sequence for FLJ38819 (NM_145865.1,100-118).
ggctaccaagcgagatcta

SEQ ID NO: 414936 - DNA, 19 bp, Homo sapiens
  siRNA target sequence for FLJ38819 (NM_145865.1,101-119).
gctaccaagcgagatctaa

SEQ ID NO: 414937 - DNA, 19 bp, Homo sapiens
  siRNA target sequence for FLJ38819 (NM_145865.1,102-120).
ctaccaagcgagatctaaa

SEQ ID NO: 414938 - DNA, 19 bp, Homo sapiens
  siRNA target sequence for FLJ38819 (NM_145865.1,105-123).
ccaagcgagatctaaatct

SEQ ID NO: 414939 - DNA, 19 bp, Homo sapiens
  siRNA target sequence for FLJ38819 (NM_145865.1,106-124).
caagcgagatctaaatctt

SEQ ID NO: 414940 - DNA, 19 bp, Homo sapiens
  siRNA target sequence for FLJ38819 (NM_145865.1,313-331).
catctttgccctggataat

SEQ ID NO: 414941 - DNA, 19 bp, Homo sapiens
  siRNA target sequence for FLJ38819 (NM_145865.1,404-422).
gccactgcacagaacatca

SEQ ID NO: 414942 - DNA, 19 bp, Homo sapiens
  siRNA target sequence for FLJ38819 (NM_145865.1,451-469).
ggagcaggctcagaagaat

SEQ ID NO: 414943 - DNA, 19 bp, Homo sapiens
  siRNA target sequence for FLJ38819 (NM_145865.1,619-637).
cacattcgggtcactatct

SEQ ID NO: 414944 - DNA, 19 bp, Homo sapiens
  siRNA target sequence for FLJ38819 (NM_145865.1,621-639).
cattcgggtcactatctaa

SEQ ID NO: 414945 - DNA, 19 bp, Homo sapiens
  siRNA target sequence for FLJ38819 (NM_145865.1,630-648).
cactatctaagggcattaa

SEQ ID NO: 414946 - DNA, 19 bp, Homo sapiens
  siRNA target sequence for FLJ38819 (NM_145865.1,641-659).
ggcattaaagacactttca

SEQ ID NO: 414947 - DNA, 19 bp, Homo sapiens
  siRNA target sequence for FLJ38819 (NM_145865.1,642-660).
gcattaaagacactttcaa

SEQ ID NO: 414948 - DNA, 19 bp, Homo sapiens
  siRNA target sequence for FLJ38819 (NM_145865.1,726-744).
ggaacgtgatggaagtgtt

SEQ ID NO: 414949 - DNA, 19 bp, Homo sapiens
  siRNA target sequence for FLJ38819 (NM_145865.1,819-837).
gtgtgcaccatgaatccat

SEQ ID NO: 414950 - DNA, 19 bp, Homo sapiens
  siRNA target sequence for FLJ38819 (NM_145865.1,849-867).
caggtctaggaagtattgt

SEQ ID NO: 414951 - DNA, 19 bp, Homo sapiens
  siRNA target sequence for FLJ38819 (NM_145865.1,1077-1095).
ccacgcccctggaagtgtt

SEQ ID NO: 414952 - DNA, 19 bp, Homo sapiens
  siRNA target sequence for FLJ38819 (NM_145865.1,1118-1136).
gaattcctgcctatcttca

SEQ ID NO: 414953 - DNA, 19 bp, Homo sapiens
  siRNA target sequence for FLJ38819 (NM_145865.1,1140-1158).
gagagcagattgatctaga

SEQ ID NO: 414954 - DNA, 19 bp, Homo sapiens
  siRNA target sequence for FLJ38819 (NM_145865.1,1210-1228).
gggtcccaggaagaaagtt

SEQ ID NO: 414955 - DNA, 19 bp, Homo sapiens
  siRNA target sequence for NFAM1 (NM_145912.3,227-245).
gcaggatcacctatccata

SEQ ID NO: 414956 - DNA, 19 bp, Homo sapiens
  siRNA target sequence for NFAM1 (NM_145912.3,231-249).
gatcacctatccatacact

SEQ ID NO: 414957 - DNA, 19 bp, Homo sapiens
  siRNA target sequence for NFAM1 (NM_145912.3,252-270).
ccaattcaaggttttcaca

SEQ ID NO: 414958 - DNA, 19 bp, Homo sapiens
  siRNA target sequence for NFAM1 (NM_145912.3,269-287).
cagtcagctactttcatga

SEQ ID NO: 414959 - DNA, 19 bp, Homo sapiens
  siRNA target sequence for NFAM1 (NM_145912.3,308-326).
gccctaagaagccaacaaa

SEQ ID NO: 414960 - DNA, 19 bp, Homo sapiens
  siRNA target sequence for NFAM1 (NM_145912.3,310-328).
cctaagaagccaacaaact

SEQ ID NO: 414961 - DNA, 19 bp, Homo sapiens
  siRNA target sequence for NFAM1 (NM_145912.3,406-424).
gccactggcacctactact

SEQ ID NO: 414962 - DNA, 19 bp, Homo sapiens
  siRNA target sequence for NFAM1 (NM_145912.3,789-807).
gagaccgcatagattcgaa

SEQ ID NO: 414963 - DNA, 19 bp, Homo sapiens
  siRNA target sequence for NFAM1 (NM_145912.3,794-812).
cgcatagattcgaagatga

SEQ ID NO: 414964 - DNA, 19 bp, Homo sapiens
  siRNA target sequence for NFAM1 (NM_145912.3,795-813).
gcatagattcgaagatgat

SEQ ID NO: 414965 - DNA, 19 bp, Homo sapiens
  siRNA target sequence for NFAM1 (NM_145912.3,820-838).
cttaacctggtctatgaaa

SEQ ID NO: 414966 - DNA, 19 bp, Homo sapiens
  siRNA target sequence for EVC2 (NM_147127.2,748-766).
gaatgctgtcactttaaga

SEQ ID NO: 414967 - DNA, 19 bp, Homo sapiens
  siRNA target sequence for EVC2 (NM_147127.2,853-871).
ccatgggctcattccttat

SEQ ID NO: 414968 - DNA, 19 bp, Homo sapiens
  siRNA target sequence for EVC2 (NM_147127.2,854-872).
catgggctcattccttatt

SEQ ID NO: 414969 - DNA, 19 bp, Homo sapiens
  siRNA target sequence for EVC2 (NM_147127.2,888-906).
ctggcctaagaagaactta

SEQ ID NO: 414970 - DNA, 19 bp, Homo sapiens
  siRNA target sequence for EVC2 (NM_147127.2,914-932).
gagagtctcctataacaca

SEQ ID NO: 414971 - DNA, 19 bp, Homo sapiens
  siRNA target sequence for EVC2 (NM_147127.2,1381-1399).
cacgcagcagggttcttca

SEQ ID NO: 414972 - DNA, 19 bp, Homo sapiens
  siRNA target sequence for EVC2 (NM_147127.2,1492-1510).
cgggtttggcagtatgaga

SEQ ID NO: 414973 - DNA, 19 bp, Homo sapiens
  siRNA target sequence for EVC2 (NM_147127.2,1565-1583).
cccttaacgaccaaatgat

SEQ ID NO: 414974 - DNA, 19 bp, Homo sapiens
  siRNA target sequence for EVC2 (NM_147127.2,1566-1584).
ccttaacgaccaaatgata

SEQ ID NO: 414975 - DNA, 19 bp, Homo sapiens
  siRNA target sequence for EVC2 (NM_147127.2,1572-1590).
cgaccaaatgatagacatt

SEQ ID NO: 414976 - DNA, 19 bp, Homo sapiens
  siRNA target sequence for EVC2 (NM_147127.2,1614-1632).
catgcttcaagccttagaa

SEQ ID NO: 414977 - DNA, 19 bp, Homo sapiens
  siRNA target sequence for EVC2 (NM_147127.2,1674-1692).
ggaggcttgtcgaacacaa

SEQ ID NO: 414978 - DNA, 19 bp, Homo sapiens
  siRNA target sequence for EVC2 (NM_147127.2,1675-1693).
gaggcttgtcgaacacaaa

SEQ ID NO: 414979 - DNA, 19 bp, Homo sapiens
  siRNA target sequence for EVC2 (NM_147127.2,1845-1863).
ggcattgacagctgaatgt

SEQ ID NO: 414980 - DNA, 19 bp, Homo sapiens
  siRNA target sequence for EVC2 (NM_147127.2,2022-2040).
gaagtctctcgctttgcaa

SEQ ID NO: 414981 - DNA, 19 bp, Homo sapiens
  siRNA target sequence for EVC2 (NM_147127.2,2027-2045).
ctctcgctttgcaacaaga

SEQ ID NO: 414982 - DNA, 19 bp, Homo sapiens
  siRNA target sequence for EVC2 (NM_147127.2,2031-2049).
cgctttgcaacaagaagaa

SEQ ID NO: 414983 - DNA, 19 bp, Homo sapiens
  siRNA target sequence for EVC2 (NM_147127.2,2098-2116).
ctgcacagtatctttttta

SEQ ID NO: 414984 - DNA, 19 bp, Homo sapiens
  siRNA target sequence for EVC2 (NM_147127.2,2189-2207).
ctaaaatacaggagaatgt

SEQ ID NO: 414985 - DNA, 19 bp, Homo sapiens
  siRNA target sequence for EVC2 (NM_147127.2,2241-2259).
gaggtatcatctaagtaaa

SEQ ID NO: 414986 - DNA, 19 bp, Homo sapiens
  siRNA target sequence for EVC2 (NM_147127.2,2420-2438).
gggctcagacagaagtctt

SEQ ID NO: 414987 - DNA, 19 bp, Homo sapiens
  siRNA target sequence for EVC2 (NM_147127.2,2429-2447).
cagaagtcttttcaatcaa

SEQ ID NO: 414988 - DNA, 19 bp, Homo sapiens
  siRNA target sequence for EVC2 (NM_147127.2,2451-2469).
gaagttggacaatgactta

SEQ ID NO: 414989 - DNA, 19 bp, Homo sapiens
  siRNA target sequence for EVC2 (NM_147127.2,2516-2534).
gacgagagttgctacaaaa

SEQ ID NO: 414990 - DNA, 19 bp, Homo sapiens
  siRNA target sequence for EVC2 (NM_147127.2,2706-2724).
gaccctttcgctgtttgaa

SEQ ID NO: 414991 - DNA, 19 bp, Homo sapiens
  siRNA target sequence for EVC2 (NM_147127.2,2969-2987).
gctgggagcacctgatctt

SEQ ID NO: 414992 - DNA, 19 bp, Homo sapiens
  siRNA target sequence for EVC2 (NM_147127.2,3110-3128).
gagttctgctgcagcaatt

SEQ ID NO: 414993 - DNA, 19 bp, Homo sapiens
  siRNA target sequence for EVC2 (NM_147127.2,3216-3234).
gtcacggtccaagagtaaa

SEQ ID NO: 414994 - DNA, 19 bp, Homo sapiens
  siRNA target sequence for EVC2 (NM_147127.2,3220-3238).
cggtccaagagtaaaagca

SEQ ID NO: 414995 - DNA, 19 bp, Homo sapiens
  siRNA target sequence for EVC2 (NM_147127.2,3260-3278).
gcatcgaagacaaaattca

SEQ ID NO: 414996 - DNA, 19 bp, Homo sapiens
  siRNA target sequence for EVC2 (NM_147127.2,3737-3755).
cattactggagcaacatca

SEQ ID NO: 414997 - DNA, 19 bp, Homo sapiens
  siRNA target sequence for EVC2 (NM_147127.2,3748-3766).
caacatcagcagtgtttga

SEQ ID NO: 414998 - DNA, 19 bp, Homo sapiens
  siRNA target sequence for EVC2 (NM_147127.2,3761-3779).
gtttgagagaggaacaaca

SEQ ID NO: 414999 - DNA, 19 bp, Homo sapiens
  siRNA target sequence for EVC2 (NM_147127.2,3785-3803).
gtgtcgtgctagaagactt

SEQ ID NO: 415000 - DNA, 19 bp, Homo sapiens
  siRNA target sequence for EVC2 (NM_147127.2,4059-4077).
ctggtggcaagccttagat

SEQ ID NO: 415001 - DNA, 19 bp, Homo sapiens
  siRNA target sequence for EVC2 (NM_147127.2,4087-4105).
cgaggagatctgataagca

SEQ ID NO: 415002 - DNA, 19 bp, Homo sapiens
  siRNA target sequence for EVC2 (NM_147127.2,4174-4192).
ctcagagagaggatgatat

SEQ ID NO: 415003 - DNA, 19 bp, Homo sapiens
  siRNA target sequence for EVC2 (NM_147127.2,4266-4284).
ggcagaaaccattgatcta

SEQ ID NO: 415004 - DNA, 19 bp, Homo sapiens
  siRNA target sequence for EVC2 (NM_147127.2,4297-4315).
gagaagctctttatattca

SEQ ID NO: 415005 - DNA, 19 bp, Homo sapiens
  siRNA target sequence for EVC2 (NM_147127.2,4302-4320).
gctctttatattcagaaat

SEQ ID NO: 415006 - DNA, 19 bp, Homo sapiens
  siRNA target sequence for LOC223082 (NM_147128.3,1498-1516).
cctctcgccgcacatgttt

SEQ ID NO: 415007 - DNA, 19 bp, Homo sapiens
  siRNA target sequence for LOC223082 (NM_147128.3,1530-1548).
gccctgtatgctcaaaatt

SEQ ID NO: 415008 - DNA, 19 bp, Homo sapiens
  siRNA target sequence for LOC223082 (NM_147128.3,1531-1549).
ccctgtatgctcaaaattt

SEQ ID NO: 415009 - DNA, 19 bp, Homo sapiens
  siRNA target sequence for LOC223082 (NM_147128.3,1593-1611).
caaagccacgaataaccta

SEQ ID NO: 415010 - DNA, 19 bp, Homo sapiens
  siRNA target sequence for LOC223082 (NM_147128.3,1597-1615).
gccacgaataacctataat

SEQ ID NO: 415011 - DNA, 19 bp, Homo sapiens
  siRNA target sequence for LOC223082 (NM_147128.3,1599-1617).
cacgaataacctataatga

SEQ ID NO: 415012 - DNA, 19 bp, Homo sapiens
  siRNA target sequence for LOC223082 (NM_147128.3,1608-1626).
cctataatgaggatgtact

SEQ ID NO: 415013 - DNA, 19 bp, Homo sapiens
  siRNA target sequence for LOC223082 (NM_147128.3,1618-1636).
ggatgtactgagtaaagat

SEQ ID NO: 415014 - DNA, 19 bp, Homo sapiens
  siRNA target sequence for LOC223082 (NM_147128.3,1688-1706).
gcacgactgccttgtctat

SEQ ID NO: 415015 - DNA, 19 bp, Homo sapiens
  siRNA target sequence for LOC223082 (NM_147128.3,1696-1714).
gccttgtctatgcatatat

SEQ ID NO: 415016 - DNA, 19 bp, Homo sapiens
  siRNA target sequence for LOC223082 (NM_147128.3,1698-1716).
cttgtctatgcatatatca

SEQ ID NO: 415017 - DNA, 19 bp, Homo sapiens
  siRNA target sequence for LOC223082 (NM_147128.3,1722-1740).
gctgcatagatgaatggtt

SEQ ID NO: 415018 - DNA, 19 bp, Homo sapiens
  siRNA target sequence for LOC223082 (NM_147128.3,1759-1777).
ccctgagcacccttcagat

SEQ ID NO: 415019 - DNA, 19 bp, Homo sapiens
  siRNA target sequence for FLJ36525 (NM_147129.2,355-373).
ggcccacatagagtacatt

SEQ ID NO: 415020 - DNA, 19 bp, Homo sapiens
  siRNA target sequence for FLJ36525 (NM_147129.2,357-375).
cccacatagagtacattga

SEQ ID NO: 415021 - DNA, 19 bp, Homo sapiens
  siRNA target sequence for FLJ36525 (NM_147129.2,359-377).
cacatagagtacattgagt

SEQ ID NO: 415022 - DNA, 19 bp, Homo sapiens
  siRNA target sequence for FLJ36525 (NM_147129.2,540-558).
cccatcacgtgcaacagta

SEQ ID NO: 415023 - DNA, 19 bp, Homo sapiens
  siRNA target sequence for FLJ36525 (NM_147129.2,1081-1099).
ctgccgctgcgcagaatat

SEQ ID NO: 415024 - DNA, 19 bp, Homo sapiens
  siRNA target sequence for FLJ36525 (NM_147129.2,1085-1103).
cgctgcgcagaatatacct

SEQ ID NO: 415025 - DNA, 19 bp, Homo sapiens
  siRNA target sequence for FLJ36525 (NM_147129.2,1086-1104).
gctgcgcagaatatacctt

SEQ ID NO: 415026 - DNA, 19 bp, Homo sapiens
  siRNA target sequence for FLJ36525 (NM_147129.2,1200-1218).
ggaatcacgtggggaattt

SEQ ID NO: 415027 - DNA, 19 bp, Homo sapiens
  siRNA target sequence for FLJ36525 (NM_147129.2,1344-1362).
gcaccgacgaggtgtacaa

SEQ ID NO: 415028 - DNA, 19 bp, Homo sapiens
  siRNA target sequence for FLJ36525 (NM_147129.2,1875-1893).
gccccttccgggactttgt

SEQ ID NO: 415029 - DNA, 19 bp, Homo sapiens
  siRNA target sequence for FLJ36525 (NM_147129.2,1877-1895).
cccttccgggactttgtgt

SEQ ID NO: 415030 - DNA, 19 bp, Homo sapiens
  siRNA target sequence for FLJ36525 (NM_147129.2,1965-1983).
gtaggtctcaggattacct

SEQ ID NO: 415031 - DNA, 19 bp, Homo sapiens
  siRNA target sequence for FLJ36525 (NM_147129.2,2808-2826).
caggaggcctgtatgactt

SEQ ID NO: 415032 - DNA, 19 bp, Homo sapiens
  siRNA target sequence for MOB (NM_147156.2,1015-1033).
caggccaggacttgatcaa

SEQ ID NO: 415033 - DNA, 19 bp, Homo sapiens
  siRNA target sequence for MOB (NM_147156.2,1020-1038).
caggacttgatcaacctaa

SEQ ID NO: 415034 - DNA, 19 bp, Homo sapiens
  siRNA target sequence for MOB (NM_147156.2,1094-1112).
gcggctcctggacatgata

SEQ ID NO: 415035 - DNA, 19 bp, Homo sapiens
  siRNA target sequence for MOB (NM_147156.2,1096-1114).
ggctcctggacatgataga

SEQ ID NO: 415036 - DNA, 19 bp, Homo sapiens
  siRNA target sequence for MOB (NM_147156.2,1162-1180).
ccaatgggcacctcaacat

SEQ ID NO: 415037 - DNA, 19 bp, Homo sapiens
  siRNA target sequence for MOB (NM_147156.2,1210-1228).
gcttcagcatcaagattaa

SEQ ID NO: 415038 - DNA, 19 bp, Homo sapiens
  siRNA target sequence for MOB (NM_147156.2,1241-1259).
gccaaatgggtataggaaa

SEQ ID NO: 415039 - DNA, 19 bp, Homo sapiens
  siRNA target sequence for MOB (NM_147156.2,1420-1438).
ctccactaccggacacatt

SEQ ID NO: 415040 - DNA, 19 bp, Homo sapiens
  siRNA target sequence for MOB (NM_147156.2,1423-1441).
cactaccggacacattttt

SEQ ID NO: 415041 - DNA, 19 bp, Homo sapiens
  siRNA target sequence for MOB (NM_147156.2,1458-1476).
gtgcagtgggccttttcta

SEQ ID NO: 415042 - DNA, 19 bp, Homo sapiens
  siRNA target sequence for MOB (NM_147156.2,1463-1481).
gtgggccttttctatttgt

SEQ ID NO: 415043 - DNA, 19 bp, Homo sapiens
  siRNA target sequence for MOB (NM_147156.2,1465-1483).
gggccttttctatttgtga

SEQ ID NO: 415044 - DNA, 19 bp, Homo sapiens
  siRNA target sequence for MOB (NM_147156.2,1506-1524).
ggactctggttaattcagt

SEQ ID NO: 415045 - DNA, 19 bp, Homo sapiens
  siRNA target sequence for MOB (NM_147156.2,1586-1604).
gtacctgtatcggtgtatt

SEQ ID NO: 415046 - DNA, 19 bp, Homo sapiens
  siRNA target sequence for MOB (NM_147156.2,1632-1650).
cctggtatgcatttcaact

SEQ ID NO: 415047 - DNA, 19 bp, Homo sapiens
  siRNA target sequence for MOB (NM_147156.2,1680-1698).
gcccaactgcgaagaataa

SEQ ID NO: 415048 - DNA, 19 bp, Homo sapiens
  siRNA target sequence for MOB (NM_147156.2,1681-1699).
cccaactgcgaagaataat

SEQ ID NO: 415049 - DNA, 19 bp, Homo sapiens
  siRNA target sequence for MOB (NM_147156.2,1710-1728).
gctggaggtggcttgtcta

SEQ ID NO: 415050 - DNA, 19 bp, Homo sapiens
  siRNA target sequence for MOB (NM_147156.2,1775-1793).
cacggtcatgctaacactt

SEQ ID NO: 415051 - DNA, 19 bp, Homo sapiens
  siRNA target sequence for MOB (NM_147156.2,1784-1802).
gctaacacttacctactta

SEQ ID NO: 415052 - DNA, 19 bp, Homo sapiens
  siRNA target sequence for MOB (NM_147156.2,1785-1803).
ctaacacttacctacttat

SEQ ID NO: 415053 - DNA, 19 bp, Homo sapiens
  siRNA target sequence for MOB (NM_147156.2,1827-1845).
cgactctggtggtatcact

SEQ ID NO: 415054 - DNA, 19 bp, Homo sapiens
  siRNA target sequence for MOB (NM_147156.2,1914-1932).
gacgtggtggtggcatatt

SEQ ID NO: 415055 - DNA, 19 bp, Homo sapiens
  siRNA target sequence for MOB (NM_147156.2,1917-1935).
gtggtggtggcatattaca

SEQ ID NO: 415056 - DNA, 19 bp, Homo sapiens
  siRNA target sequence for MOB (NM_147156.2,1947-1965).
ctcttctggtggtatcaca

SEQ ID NO: 415057 - DNA, 19 bp, Homo sapiens
  siRNA target sequence for MOB (NM_147156.2,2026-2044).
ggtggtacaggccatttca

SEQ ID NO: 415058 - DNA, 19 bp, Homo sapiens
  siRNA target sequence for MOB (NM_147156.2,2029-2047).
ggtacaggccatttcagta

SEQ ID NO: 415059 - DNA, 19 bp, Homo sapiens
  siRNA target sequence for MOB (NM_147156.2,2037-2055).
ccatttcagtactttgaaa

SEQ ID NO: 415060 - DNA, 19 bp, Homo sapiens
  siRNA target sequence for MOB (NM_147156.2,2068-2086).
gaattgtacctcgatctta

SEQ ID NO: 415061 - DNA, 19 bp, Homo sapiens
  siRNA target sequence for MOB (NM_147156.2,2073-2091).
gtacctcgatcttaccatt

SEQ ID NO: 415062 - DNA, 19 bp, Homo sapiens
  siRNA target sequence for MOB (NM_147156.2,2115-2133).
cacctcagtaggcaagtta

SEQ ID NO: 415063 - DNA, 19 bp, Homo sapiens
  siRNA target sequence for MOB (NM_147156.2,2117-2135).
cctcagtaggcaagttaaa

SEQ ID NO: 415064 - DNA, 19 bp, Homo sapiens
  siRNA target sequence for MOB (NM_147156.2,2118-2136).
ctcagtaggcaagttaaat

SEQ ID NO: 415065 - DNA, 19 bp, Homo sapiens
  siRNA target sequence for C9orf24 (NM_147169.1,379-397).
ccatatccgaaccttagat

SEQ ID NO: 415066 - DNA, 19 bp, Homo sapiens
  siRNA target sequence for PPP3R2 (NM_147180.2,358-376).
ggtttgcgttcagcattta

SEQ ID NO: 415067 - DNA, 19 bp, Homo sapiens
  siRNA target sequence for PPP3R2 (NM_147180.2,370-388).
gcatttacgacatggataa

SEQ ID NO: 415068 - DNA, 19 bp, Homo sapiens
  siRNA target sequence for PPP3R2 (NM_147180.2,510-528).
ggcgatgggaagatatcct

SEQ ID NO: 415069 - DNA, 19 bp, Homo sapiens
  siRNA target sequence for PPP3R2 (NM_147180.2,511-529).
gcgatgggaagatatcctt

SEQ ID NO: 415070 - DNA, 19 bp, Homo sapiens
  siRNA target sequence for PPP3R2 (NM_147180.2,512-530).
cgatgggaagatatccttt

SEQ ID NO: 415071 - DNA, 19 bp, Homo sapiens
  siRNA target sequence for FBXO22 (NM_147188.1,928-946).
gtggttggactgtcattta

SEQ ID NO: 415072 - DNA, 19 bp, Homo sapiens
  siRNA target sequence for FBXO22 (NM_147188.1,930-948).
ggttggactgtcatttagt

SEQ ID NO: 415073 - DNA, 19 bp, Homo sapiens
  siRNA target sequence for FBXO22 (NM_147188.1,1029-1047).
cctcaaagcggccaacatt

SEQ ID NO: 415074 - DNA, 19 bp, Homo sapiens
  siRNA target sequence for FBXO22 (NM_147188.1,1040-1058).
ccaacattccagagcataa

SEQ ID NO: 415075 - DNA, 19 bp, Homo sapiens
  siRNA target sequence for FBXO22 (NM_147188.1,1059-1077).
caccattggcttcatgttt

SEQ ID NO: 415076 - DNA, 19 bp, Homo sapiens
  siRNA target sequence for FBXO22 (NM_147188.1,1084-1102).
gttggcaggggctttcagt

SEQ ID NO: 415077 - DNA, 19 bp, Homo sapiens
  siRNA target sequence for FBXO22 (NM_147188.1,1123-1141).
gttgaggctgatgcattta

SEQ ID NO: 415078 - DNA, 19 bp, Homo sapiens
  siRNA target sequence for FBXO22 (NM_147188.1,1129-1147).
gctgatgcatttagaaagt

SEQ ID NO: 415079 - DNA, 19 bp, Homo sapiens
  siRNA target sequence for FBXO22 (NM_147188.1,1195-1213).
ggatgtgatcggatagtca

SEQ ID NO: 415080 - DNA, 19 bp, Homo sapiens
  siRNA target sequence for FBXO22 (NM_147188.1,1206-1224).
gatagtcactgggaacttt

SEQ ID NO: 415081 - DNA, 19 bp, Homo sapiens
  siRNA target sequence for FBXO22 (NM_147188.1,1258-1276).
gatctgtttcatagctata

SEQ ID NO: 415082 - DNA, 19 bp, Homo sapiens
  siRNA target sequence for FBXO22 (NM_147188.1,1261-1279).
ctgtttcatagctatacaa

SEQ ID NO: 415083 - DNA, 19 bp, Homo sapiens
  siRNA target sequence for FBXO22 (NM_147188.1,1263-1281).
gtttcatagctatacaaca

SEQ ID NO: 415084 - DNA, 19 bp, Homo sapiens
  siRNA target sequence for MGC39325 (NM_147189.1,1086-1104).
gccatcgcctccatgaagt

SEQ ID NO: 415085 - DNA, 19 bp, Homo sapiens
  siRNA target sequence for MGC39325 (NM_147189.1,1157-1175).
cctccagcggtctaagtca

SEQ ID NO: 415086 - DNA, 19 bp, Homo sapiens
  siRNA target sequence for MGC39325 (NM_147189.1,1352-1370).
gtctcaggacagtaacagt

SEQ ID NO: 415087 - DNA, 19 bp, Homo sapiens
  siRNA target sequence for MGC39325 (NM_147189.1,1363-1381).
gtaacagtgaccttagaaa

SEQ ID NO: 415088 - DNA, 19 bp, Homo sapiens
  siRNA target sequence for MGC39325 (NM_147189.1,1403-1421).
cgtgccgtatggcatttct

SEQ ID NO: 415089 - DNA, 19 bp, Homo sapiens
  siRNA target sequence for FLJ36155 (NM_147193.1,857-875).
ggtcacctgtgtaaatgga

SEQ ID NO: 415090 - DNA, 19 bp, Homo sapiens
  siRNA target sequence for FLJ36155 (NM_147193.1,1936-1954).
gcctcctctcaccaatagt

SEQ ID NO: 415091 - DNA, 19 bp, Homo sapiens
  siRNA target sequence for FLJ36155 (NM_147193.1,2200-2218).
gggagacccacggtttcaa

SEQ ID NO: 415092 - DNA, 19 bp, Homo sapiens
  siRNA target sequence for FLJ35740 (NM_147195.1,449-467).
cccgtctactttcttttgt

SEQ ID NO: 415093 - DNA, 19 bp, Homo sapiens
  siRNA target sequence for FLJ35740 (NM_147195.1,450-468).
ccgtctactttcttttgta

SEQ ID NO: 415094 - DNA, 19 bp, Homo sapiens
  siRNA target sequence for TMIE (NM_147196.1,327-345).
cacgtggtgggcatctttt

SEQ ID NO: 415095 - DNA, 19 bp, Homo sapiens
  siRNA target sequence for TMIE (NM_147196.1,373-391).
cgctgtgctgtgtcttcaa

SEQ ID NO: 415096 - DNA, 19 bp, Homo sapiens
  siRNA target sequence for TMIE (NM_147196.1,510-528).
ccaggagaggataagaaga

SEQ ID NO: 415097 - DNA, 19 bp, Homo sapiens
  siRNA target sequence for TMIE (NM_147196.1,557-575).
cacagtggccatcaaagta

SEQ ID NO: 415098 - DNA, 19 bp, Homo sapiens
  siRNA target sequence for TMIE (NM_147196.1,559-577).
cagtggccatcaaagtaga

SEQ ID NO: 415099 - DNA, 19 bp, Homo sapiens
  siRNA target sequence for WFDC11 (NM_147197.2,343-361).
gaatgtaccaataagtgtt

SEQ ID NO: 415100 - DNA, 19 bp, Homo sapiens
  siRNA target sequence for WFDC11 (NM_147197.2,362-380).
ctaaagcctttagatgtaa

SEQ ID NO: 415101 - DNA, 19 bp, Homo sapiens
  siRNA target sequence for WFDC11 (NM_147197.2,415-433).
ggaaacatctgctggataa

SEQ ID NO: 415102 - DNA, 19 bp, Homo sapiens
  siRNA target sequence for WFDC11 (NM_147197.2,439-457).
gaaaccagtggagattact

SEQ ID NO: 415103 - DNA, 19 bp, Homo sapiens
  siRNA target sequence for WFDC9 (NM_147198.2,234-252).
cttctactcgtcatgttca

SEQ ID NO: 415104 - DNA, 19 bp, Homo sapiens
  siRNA target sequence for WFDC9 (NM_147198.2,306-324).
ccctttctagatatgataa

SEQ ID NO: 415105 - DNA, 19 bp, Homo sapiens
  siRNA target sequence for WFDC9 (NM_147198.2,312-330).
ctagatatgataagagaaa

SEQ ID NO: 415106 - DNA, 19 bp, Homo sapiens
  siRNA target sequence for WFDC9 (NM_147198.2,377-395).
gtgtactaaaataatgact

SEQ ID NO: 415107 - DNA, 19 bp, Homo sapiens
  siRNA target sequence for WFDC9 (NM_147198.2,394-412).
cttgtgtacgtccaaatca

SEQ ID NO: 415108 - DNA, 19 bp, Homo sapiens
  siRNA target sequence for WFDC9 (NM_147198.2,436-454).
gaaacatctgcttagacaa

SEQ ID NO: 415109 - DNA, 19 bp, Homo sapiens
  siRNA target sequence for WFDC9 (NM_147198.2,455-473).
cgaagagccccttaaatca

SEQ ID NO: 415110 - DNA, 19 bp, Homo sapiens
  siRNA target sequence for WFDC9 (NM_147198.2,456-474).
gaagagccccttaaatcaa

SEQ ID NO: 415111 - DNA, 19 bp, Homo sapiens
  siRNA target sequence for WFDC9 (NM_147198.2,461-479).
gccccttaaatcaatgcta

SEQ ID NO: 415112 - DNA, 19 bp, Homo sapiens
  siRNA target sequence for WFDC9 (NM_147198.2,462-480).
ccccttaaatcaatgctaa

SEQ ID NO: 415113 - DNA, 19 bp, Homo sapiens
  siRNA target sequence for WFDC9 (NM_147198.2,463-481).
cccttaaatcaatgctaaa

SEQ ID NO: 415114 - DNA, 19 bp, Homo sapiens
  siRNA target sequence for C9orf25 (NM_147202.1,519-537).
ggctggtcgtccccaataa

SEQ ID NO: 415115 - DNA, 19 bp, Homo sapiens
  siRNA target sequence for C9orf25 (NM_147202.1,520-538).
gctggtcgtccccaataaa

SEQ ID NO: 415116 - DNA, 19 bp, Homo sapiens
  siRNA target sequence for C9orf25 (NM_147202.1,608-626).
gactttgacatgtctagat

SEQ ID NO: 415117 - DNA, 19 bp, Homo sapiens
  siRNA target sequence for C9orf25 (NM_147202.1,645-663).
cctctgctgagcagatcaa

SEQ ID NO: 415118 - DNA, 19 bp, Homo sapiens
  siRNA target sequence for C9orf25 (NM_147202.1,691-709).
ggacggctaccggttagat

SEQ ID NO: 415119 - DNA, 19 bp, Homo sapiens
  siRNA target sequence for C9orf25 (NM_147202.1,696-714).
gctaccggttagatgagat

SEQ ID NO: 415120 - DNA, 19 bp, Homo sapiens
  siRNA target sequence for C9orf23 (NM_148178.1,165-183).
gtccgagatggcagcaaaa

SEQ ID NO: 415121 - DNA, 19 bp, Homo sapiens
  siRNA target sequence for C9orf23 (NM_148178.1,229-247).
gtgctcggcatgtagtgtt

SEQ ID NO: 415122 - DNA, 19 bp, Homo sapiens
  siRNA target sequence for C9orf23 (NM_148178.1,283-301).
gctgcgctgagattgtcaa

SEQ ID NO: 415123 - DNA, 19 bp, Homo sapiens
  siRNA target sequence for FLJ33215 (NM_148894.1,356-374).
ccaagcctgcgtatcagaa

SEQ ID NO: 415124 - DNA, 19 bp, Homo sapiens
  siRNA target sequence for FLJ33215 (NM_148894.1,357-375).
caagcctgcgtatcagaat

SEQ ID NO: 415125 - DNA, 19 bp, Homo sapiens
  siRNA target sequence for FLJ33215 (NM_148894.1,361-379).
cctgcgtatcagaatctga

SEQ ID NO: 415126 - DNA, 19 bp, Homo sapiens
  siRNA target sequence for FLJ33215 (NM_148894.1,380-398).
gacagcgtgttgacaactt

SEQ ID NO: 415127 - DNA, 19 bp, Homo sapiens
  siRNA target sequence for FLJ33215 (NM_148894.1,384-402).
gcgtgttgacaactttgtt

SEQ ID NO: 415128 - DNA, 19 bp, Homo sapiens
  siRNA target sequence for FLJ33215 (NM_148894.1,425-443).
catggagtccgcatctcaa

SEQ ID NO: 415129 - DNA, 19 bp, Homo sapiens
  siRNA target sequence for FLJ33215 (NM_148894.1,431-449).
gtccgcatctcaataagaa

SEQ ID NO: 415130 - DNA, 19 bp, Homo sapiens
  siRNA target sequence for FLJ33215 (NM_148894.1,450-468).
ccagctaagaaacaacatt

SEQ ID NO: 415131 - DNA, 19 bp, Homo sapiens
  siRNA target sequence for FLJ33215 (NM_148894.1,505-523).
ggtattgaccgaattattt

SEQ ID NO: 415132 - DNA, 19 bp, Homo sapiens
  siRNA target sequence for FLJ33215 (NM_148894.1,594-612).
ggccacgctaaatcacaaa

SEQ ID NO: 415133 - DNA, 19 bp, Homo sapiens
  siRNA target sequence for FLJ33215 (NM_148894.1,718-736).
gccatgtcgatattggaaa

SEQ ID NO: 415134 - DNA, 19 bp, Homo sapiens
  siRNA target sequence for FLJ33215 (NM_148894.1,723-741).
gtcgatattggaaaccata

SEQ ID NO: 415135 - DNA, 19 bp, Homo sapiens
  siRNA target sequence for FLJ33215 (NM_148894.1,732-750).
ggaaaccataacttctctt

SEQ ID NO: 415136 - DNA, 19 bp, Homo sapiens
  siRNA target sequence for FLJ33215 (NM_148894.1,737-755).
ccataacttctcttaacca

SEQ ID NO: 415137 - DNA, 19 bp, Homo sapiens
  siRNA target sequence for FLJ33215 (NM_148894.1,738-756).
cataacttctcttaaccaa

SEQ ID NO: 415138 - DNA, 19 bp, Homo sapiens
  siRNA target sequence for FLJ33215 (NM_148894.1,774-792).
ggcttcaacagaaacatca

SEQ ID NO: 415139 - DNA, 19 bp, Homo sapiens
  siRNA target sequence for FLJ33215 (NM_148894.1,804-822).
cagtgagagagcgtcaaaa

SEQ ID NO: 415140 - DNA, 19 bp, Homo sapiens
  siRNA target sequence for FLJ33215 (NM_148894.1,806-824).
gtgagagagcgtcaaaaaa

SEQ ID NO: 415141 - DNA, 19 bp, Homo sapiens
  siRNA target sequence for FLJ33215 (NM_148894.1,837-855).
gccaaccactgatactagt

SEQ ID NO: 415142 - DNA, 19 bp, Homo sapiens
  siRNA target sequence for FLJ33215 (NM_148894.1,838-856).
ccaaccactgatactagta

SEQ ID NO: 415143 - DNA, 19 bp, Homo sapiens
  siRNA target sequence for FLJ33215 (NM_148894.1,967-985).
ccctgtccagtcgaagaaa

SEQ ID NO: 415144 - DNA, 19 bp, Homo sapiens
  siRNA target sequence for FLJ33215 (NM_148894.1,968-986).
cctgtccagtcgaagaaat

SEQ ID NO: 415145 - DNA, 19 bp, Homo sapiens
  siRNA target sequence for FLJ33215 (NM_148894.1,969-987).
ctgtccagtcgaagaaatt

SEQ ID NO: 415146 - DNA, 19 bp, Homo sapiens
  siRNA target sequence for FLJ33215 (NM_148894.1,1023-1041).
gctaaataaggatgttcaa

SEQ ID NO: 415147 - DNA, 19 bp, Homo sapiens
  siRNA target sequence for FLJ33215 (NM_148894.1,1279-1297).
gggacaaaagaagatttct

SEQ ID NO: 415148 - DNA, 19 bp, Homo sapiens
  siRNA target sequence for FLJ33215 (NM_148894.1,1291-1309).
gatttctctttgatagatt

SEQ ID NO: 415149 - DNA, 19 bp, Homo sapiens
  siRNA target sequence for FLJ33215 (NM_148894.1,1393-1411).
gaagttgtaacgtctgata

SEQ ID NO: 415150 - DNA, 19 bp, Homo sapiens
  siRNA target sequence for FLJ33215 (NM_148894.1,1522-1540).
gcgtatgtccacaaaccat

SEQ ID NO: 415151 - DNA, 19 bp, Homo sapiens
  siRNA target sequence for FLJ33215 (NM_148894.1,1523-1541).
cgtatgtccacaaaccata

SEQ ID NO: 415152 - DNA, 19 bp, Homo sapiens
  siRNA target sequence for FLJ33215 (NM_148894.1,1524-1542).
gtatgtccacaaaccatat

SEQ ID NO: 415153 - DNA, 19 bp, Homo sapiens
  siRNA target sequence for FLJ33215 (NM_148894.1,1528-1546).
gtccacaaaccatatcttt

SEQ ID NO: 415154 - DNA, 19 bp, Homo sapiens
  siRNA target sequence for FLJ33215 (NM_148894.1,1531-1549).
cacaaaccatatctttact

SEQ ID NO: 415155 - DNA, 19 bp, Homo sapiens
  siRNA target sequence for FLJ33215 (NM_148894.1,1594-1612).
cgacgacagtccattggta

SEQ ID NO: 415156 - DNA, 19 bp, Homo sapiens
  siRNA target sequence for FLJ33215 (NM_148894.1,1595-1613).
gacgacagtccattggtat

SEQ ID NO: 415157 - DNA, 19 bp, Homo sapiens
  siRNA target sequence for FLJ33215 (NM_148894.1,1597-1615).
cgacagtccattggtattt

SEQ ID NO: 415158 - DNA, 19 bp, Homo sapiens
  siRNA target sequence for MDS2 (NM_148895.1,590-608).
gctccaggctgcggatttt

SEQ ID NO: 415159 - DNA, 19 bp, Homo sapiens
  siRNA target sequence for MDS2 (NM_148895.1,591-609).
ctccaggctgcggatttta

SEQ ID NO: 415160 - DNA, 19 bp, Homo sapiens
  siRNA target sequence for MDS2 (NM_148895.1,645-663).
gggttaattggagttttat

SEQ ID NO: 415161 - DNA, 19 bp, Homo sapiens
  siRNA target sequence for MDS2 (NM_148895.1,647-665).
gttaattggagttttatca

SEQ ID NO: 415162 - DNA, 19 bp, Homo sapiens
  siRNA target sequence for MDS2 (NM_148895.1,657-675).
gttttatcaagccagattt

SEQ ID NO: 415163 - DNA, 19 bp, Homo sapiens
  siRNA target sequence for MDS2 (NM_148895.1,676-694).
catggtgtctgcttaatgt

SEQ ID NO: 415164 - DNA, 19 bp, Homo sapiens
  siRNA target sequence for MDS2 (NM_148895.1,679-697).
ggtgtctgcttaatgttaa

SEQ ID NO: 415165 - DNA, 19 bp, Homo sapiens
  siRNA target sequence for MDS2 (NM_148895.1,797-815).
cctggagaggccattaaga

SEQ ID NO: 415166 - DNA, 19 bp, Homo sapiens
  siRNA target sequence for MDS2 (NM_148895.1,851-869).
gaaaggtggctttgtaaga

SEQ ID NO: 415167 - DNA, 19 bp, Homo sapiens
  siRNA target sequence for HUS1B (NM_148959.2,32-50).
gctgtctagagctgttcat

SEQ ID NO: 415168 - DNA, 19 bp, Homo sapiens
  siRNA target sequence for HUS1B (NM_148959.2,35-53).
gtctagagctgttcattca

SEQ ID NO: 415169 - DNA, 19 bp, Homo sapiens
  siRNA target sequence for HUS1B (NM_148959.2,215-233).
cggaagatctcgatgagat

SEQ ID NO: 415170 - DNA, 19 bp, Homo sapiens
  siRNA target sequence for HUS1B (NM_148959.2,563-581).
ggatgaccctgagtataga

SEQ ID NO: 415171 - DNA, 19 bp, Homo sapiens
  siRNA target sequence for HUS1B (NM_148959.2,588-606).
ggtggtgtccattcaaagt

SEQ ID NO: 415172 - DNA, 19 bp, Homo sapiens
  siRNA target sequence for HUS1B (NM_148959.2,591-609).
ggtgtccattcaaagttat

SEQ ID NO: 415173 - DNA, 19 bp, Homo sapiens
  siRNA target sequence for HUS1B (NM_148959.2,700-718).
cggaagcttctgcagtttt

SEQ ID NO: 415174 - DNA, 19 bp, Homo sapiens
  siRNA target sequence for HUS1B (NM_148959.2,743-761).
cgacggccctgtgcaatat

SEQ ID NO: 415175 - DNA, 19 bp, Homo sapiens
  siRNA target sequence for HUS1B (NM_148959.2,802-820).
gatgtctctcttcagtatt

SEQ ID NO: 415176 - DNA, 19 bp, Homo sapiens
  siRNA target sequence for LOC150677 (NM_148961.2,350-368).
catggcccgaaccttcttt

SEQ ID NO: 415177 - DNA, 19 bp, Homo sapiens
  siRNA target sequence for MGC45866 (NM_152259.2,266-284).
gggcacgcctcagaatcaa

SEQ ID NO: 415178 - DNA, 19 bp, Homo sapiens
  siRNA target sequence for MGC45866 (NM_152259.2,267-285).
ggcacgcctcagaatcaaa

SEQ ID NO: 415179 - DNA, 19 bp, Homo sapiens
  siRNA target sequence for MGC45866 (NM_152259.2,326-344).
ggaaccagcccagaaacta

SEQ ID NO: 415180 - DNA, 19 bp, Homo sapiens
  siRNA target sequence for MGC45866 (NM_152259.2,354-372).
gctatcaaaactccaaaaa

SEQ ID NO: 415181 - DNA, 19 bp, Homo sapiens
  siRNA target sequence for MGC45866 (NM_152259.2,403-421).
cacctgttacgccaaagaa

SEQ ID NO: 415182 - DNA, 19 bp, Homo sapiens
  siRNA target sequence for MGC45866 (NM_152259.2,408-426).
gttacgccaaagaaactgt

SEQ ID NO: 415183 - DNA, 19 bp, Homo sapiens
  siRNA target sequence for MGC45866 (NM_152259.2,462-480).
ccatttaggaaatctaaaa

SEQ ID NO: 415184 - DNA, 19 bp, Homo sapiens
  siRNA target sequence for MGC45866 (NM_152259.2,633-651).
gttgggaaacggtgtagaa

SEQ ID NO: 415185 - DNA, 19 bp, Homo sapiens
  siRNA target sequence for MGC45866 (NM_152259.2,819-837).
cctggtctcaggagtgatt

SEQ ID NO: 415186 - DNA, 19 bp, Homo sapiens
  siRNA target sequence for MGC45866 (NM_152259.2,1094-1112).
ccaggcttcggcacaacta

SEQ ID NO: 415187 - DNA, 19 bp, Homo sapiens
  siRNA target sequence for MGC45866 (NM_152259.2,1099-1117).
cttcggcacaactagacaa

SEQ ID NO: 415188 - DNA, 19 bp, Homo sapiens
  siRNA target sequence for MGC45866 (NM_152259.2,1198-1216).
gccttcccaaacttcgaat

SEQ ID NO: 415189 - DNA, 19 bp, Homo sapiens
  siRNA target sequence for MGC45866 (NM_152259.2,1199-1217).
ccttcccaaacttcgaatt

SEQ ID NO: 415190 - DNA, 19 bp, Homo sapiens
  siRNA target sequence for MGC45866 (NM_152259.2,1204-1222).
ccaaacttcgaattaagaa

SEQ ID NO: 415191 - DNA, 19 bp, Homo sapiens
  siRNA target sequence for MGC45866 (NM_152259.2,1320-1338).
gccagcaggtccttaagca

SEQ ID NO: 415192 - DNA, 19 bp, Homo sapiens
  siRNA target sequence for MGC45866 (NM_152259.2,1321-1339).
ccagcaggtccttaagcaa

SEQ ID NO: 415193 - DNA, 19 bp, Homo sapiens
  siRNA target sequence for MGC45866 (NM_152259.2,1322-1340).
cagcaggtccttaagcaaa

SEQ ID NO: 415194 - DNA, 19 bp, Homo sapiens
  siRNA target sequence for MGC45866 (NM_152259.2,1439-1457).
cacccacggcccttctagt

SEQ ID NO: 415195 - DNA, 19 bp, Homo sapiens
  siRNA target sequence for MGC45866 (NM_152259.2,1517-1535).
gaagacaactccagacata

SEQ ID NO: 415196 - DNA, 19 bp, Homo sapiens
  siRNA target sequence for MGC45866 (NM_152259.2,1520-1538).
gacaactccagacataatt

SEQ ID NO: 415197 - DNA, 19 bp, Homo sapiens
  siRNA target sequence for MGC45866 (NM_152259.2,1522-1540).
caactccagacataattaa

SEQ ID NO: 415198 - DNA, 19 bp, Homo sapiens
  siRNA target sequence for MGC45866 (NM_152259.2,1687-1705).
cgcccatcttggaggattt

SEQ ID NO: 415199 - DNA, 19 bp, Homo sapiens
  siRNA target sequence for MGC45866 (NM_152259.2,1842-1860).
gaccgtggagccaaaagga

SEQ ID NO: 415200 - DNA, 19 bp, Homo sapiens
  siRNA target sequence for MGC45866 (NM_152259.2,1882-1900).
cagaagttagtaagagtaa

SEQ ID NO: 415201 - DNA, 19 bp, Homo sapiens
  siRNA target sequence for MGC45866 (NM_152259.2,1945-1963).
gagacgaagaggtgtttgt

SEQ ID NO: 415202 - DNA, 19 bp, Homo sapiens
  siRNA target sequence for MGC45866 (NM_152259.2,1947-1965).
gacgaagaggtgtttgttt

SEQ ID NO: 415203 - DNA, 19 bp, Homo sapiens
  siRNA target sequence for MGC17943 (NM_152261.1,241-259).
gaaatcccatcatacctta

SEQ ID NO: 415204 - DNA, 19 bp, Homo sapiens
  siRNA target sequence for MGC17943 (NM_152261.1,246-264).
cccatcataccttaatgat

SEQ ID NO: 415205 - DNA, 19 bp, Homo sapiens
  siRNA target sequence for MGC17943 (NM_152261.1,325-343).
gtgactgggggtatcttca

SEQ ID NO: 415206 - DNA, 19 bp, Homo sapiens
  siRNA target sequence for MGC17943 (NM_152261.1,414-432).
gaccaaaacagctgttaca

SEQ ID NO: 415207 - DNA, 19 bp, Homo sapiens
  siRNA target sequence for MGC32020 (NM_152266.1,143-161).
catattgtggccaatgaga

SEQ ID NO: 415208 - DNA, 19 bp, Homo sapiens
  siRNA target sequence for MGC32020 (NM_152266.1,224-242).
ggcttgacaccagactttt

SEQ ID NO: 415209 - DNA, 19 bp, Homo sapiens
  siRNA target sequence for MGC32020 (NM_152266.1,226-244).
cttgacaccagacttttat

SEQ ID NO: 415210 - DNA, 19 bp, Homo sapiens
  siRNA target sequence for MGC32020 (NM_152266.1,250-268).
gaacagatgctgcattctt

SEQ ID NO: 415211 - DNA, 19 bp, Homo sapiens
  siRNA target sequence for MGC32020 (NM_152266.1,294-312).
caggaaatggctacagaaa

SEQ ID NO: 415212 - DNA, 19 bp, Homo sapiens
  siRNA target sequence for MGC32020 (NM_152266.1,315-333).
ggcttgttcgggttagaaa

SEQ ID NO: 415213 - DNA, 19 bp, Homo sapiens
  siRNA target sequence for MGC32020 (NM_152266.1,316-334).
gcttgttcgggttagaaat

SEQ ID NO: 415214 - DNA, 19 bp, Homo sapiens
  siRNA target sequence for MGC32020 (NM_152266.1,317-335).
cttgttcgggttagaaatt

SEQ ID NO: 415215 - DNA, 19 bp, Homo sapiens
  siRNA target sequence for MGC32020 (NM_152266.1,320-338).
gttcgggttagaaattcca

SEQ ID NO: 415216 - DNA, 19 bp, Homo sapiens
  siRNA target sequence for MGC32020 (NM_152266.1,323-341).
cgggttagaaattccaata

SEQ ID NO: 415217 - DNA, 19 bp, Homo sapiens
  siRNA target sequence for MGC32020 (NM_152266.1,330-348).
gaaattccaataatcttaa

SEQ ID NO: 415218 - DNA, 19 bp, Homo sapiens
  siRNA target sequence for MGC32020 (NM_152266.1,372-390).
cccggatgagtgaacaata

SEQ ID NO: 415219 - DNA, 19 bp, Homo sapiens
  siRNA target sequence for MGC32020 (NM_152266.1,375-393).
ggatgagtgaacaatactt

SEQ ID NO: 415220 - DNA, 19 bp, Homo sapiens
  siRNA target sequence for MGC32020 (NM_152266.1,639-657).
gcatccagcaactgagtaa

SEQ ID NO: 415221 - DNA, 19 bp, Homo sapiens
  siRNA target sequence for MGC32020 (NM_152266.1,640-658).
catccagcaactgagtaat

SEQ ID NO: 415222 - DNA, 19 bp, Homo sapiens
  siRNA target sequence for MGC32020 (NM_152266.1,643-661).
ccagcaactgagtaatgct

SEQ ID NO: 415223 - DNA, 19 bp, Homo sapiens
  siRNA target sequence for MGC32020 (NM_152266.1,644-662).
cagcaactgagtaatgctt

SEQ ID NO: 415224 - DNA, 19 bp, Homo sapiens
  siRNA target sequence for FLJ38628 (NM_152267.2,330-348).
cttctgttggccgtgttta

SEQ ID NO: 415225 - DNA, 19 bp, Homo sapiens
  siRNA target sequence for FLJ38628 (NM_152267.2,333-351).
ctgttggccgtgtttacat

SEQ ID NO: 415226 - DNA, 19 bp, Homo sapiens
  siRNA target sequence for FLJ38628 (NM_152267.2,335-353).
gttggccgtgtttacatca

SEQ ID NO: 415227 - DNA, 19 bp, Homo sapiens
  siRNA target sequence for FLJ38628 (NM_152267.2,360-378).
ggagaccagacctaacaga

SEQ ID NO: 415228 - DNA, 19 bp, Homo sapiens
  siRNA target sequence for FLJ38628 (NM_152267.2,501-519).
gccagagccggagaataga

SEQ ID NO: 415229 - DNA, 19 bp, Homo sapiens
  siRNA target sequence for FLJ38628 (NM_152267.2,513-531).
gaatagagggggatttcaa

SEQ ID NO: 415230 - DNA, 19 bp, Homo sapiens
  siRNA target sequence for FLJ38628 (NM_152267.2,522-540).
gggatttcaaggatttgga

SEQ ID NO: 415231 - DNA, 19 bp, Homo sapiens
  siRNA target sequence for FLJ34922 (NM_152270.1,711-729).
caagagaggcattctgttt

SEQ ID NO: 415232 - DNA, 19 bp, Homo sapiens
  siRNA target sequence for FLJ34922 (NM_152270.1,838-856).
ggatcctgctgacctaatt

SEQ ID NO: 415233 - DNA, 19 bp, Homo sapiens
  siRNA target sequence for FLJ34922 (NM_152270.1,859-877).
ccaaaaagactatcttgaa

SEQ ID NO: 415234 - DNA, 19 bp, Homo sapiens
  siRNA target sequence for FLJ34922 (NM_152270.1,900-918).
ctgagtctcagttagtaga

SEQ ID NO: 415235 - DNA, 19 bp, Homo sapiens
  siRNA target sequence for FLJ34922 (NM_152270.1,963-981).
ggacaattccagaatacgt

SEQ ID NO: 415236 - DNA, 19 bp, Homo sapiens
  siRNA target sequence for FLJ34922 (NM_152270.1,1142-1160).
ccccaacgcccgataacct

SEQ ID NO: 415237 - DNA, 19 bp, Homo sapiens
  siRNA target sequence for FLJ34922 (NM_152270.1,1143-1161).
cccaacgcccgataacctt

SEQ ID NO: 415238 - DNA, 19 bp, Homo sapiens
  siRNA target sequence for FLJ34922 (NM_152270.1,1205-1223).
ggctatgcttgcatgatca

SEQ ID NO: 415239 - DNA, 19 bp, Homo sapiens
  siRNA target sequence for FLJ34922 (NM_152270.1,1211-1229).
gcttgcatgatcagagtaa

SEQ ID NO: 415240 - DNA, 19 bp, Homo sapiens
  siRNA target sequence for FLJ34922 (NM_152270.1,1212-1230).
cttgcatgatcagagtaaa

SEQ ID NO: 415241 - DNA, 19 bp, Homo sapiens
  siRNA target sequence for FLJ34922 (NM_152270.1,1272-1290).
ggatagtggaggacaagta

SEQ ID NO: 415242 - DNA, 19 bp, Homo sapiens
  siRNA target sequence for FLJ34922 (NM_152270.1,1336-1354).
cacagatccagatcttcta

SEQ ID NO: 415243 - DNA, 19 bp, Homo sapiens
  siRNA target sequence for FLJ34922 (NM_152270.1,1362-1380).
ctgaagattttgaatgtca

SEQ ID NO: 415244 - DNA, 19 bp, Homo sapiens
  siRNA target sequence for FLJ34922 (NM_152270.1,1373-1391).
gaatgtcagctgagtctat

SEQ ID NO: 415245 - DNA, 19 bp, Homo sapiens
  siRNA target sequence for FLJ34922 (NM_152270.1,1481-1499).
ccaggatatttgcgatata

SEQ ID NO: 415246 - DNA, 19 bp, Homo sapiens
  siRNA target sequence for FLJ34922 (NM_152270.1,2480-2498).
gatccaatagccaagtact

SEQ ID NO: 415247 - DNA, 19 bp, Homo sapiens
  siRNA target sequence for FLJ34922 (NM_152270.1,2484-2502).
caatagccaagtacttaca

SEQ ID NO: 415248 - DNA, 19 bp, Homo sapiens
  siRNA target sequence for FLJ34922 (NM_152270.1,2516-2534).
gtaattagaagtaatcctt

SEQ ID NO: 415249 - DNA, 19 bp, Homo sapiens
  siRNA target sequence for FLJ34922 (NM_152270.1,2550-2568).
ctgggtgcctcgaggtatt

SEQ ID NO: 415250 - DNA, 19 bp, Homo sapiens
  siRNA target sequence for FLJ34922 (NM_152270.1,2554-2572).
gtgcctcgaggtatttcct

SEQ ID NO: 415251 - DNA, 19 bp, Homo sapiens
  siRNA target sequence for FLJ34922 (NM_152270.1,2594-2612).
gttcagggaaccttacgaa

SEQ ID NO: 415252 - DNA, 19 bp, Homo sapiens
  siRNA target sequence for FLJ34922 (NM_152270.1,2597-2615).
cagggaaccttacgaatta

SEQ ID NO: 415253 - DNA, 19 bp, Homo sapiens
  siRNA target sequence for FLJ34922 (NM_152270.1,2600-2618).
ggaaccttacgaattaaga

SEQ ID NO: 415254 - DNA, 19 bp, Homo sapiens
  siRNA target sequence for FLJ34922 (NM_152270.1,2601-2619).
gaaccttacgaattaagaa

SEQ ID NO: 415255 - DNA, 19 bp, Homo sapiens
  siRNA target sequence for FLJ34922 (NM_152270.1,2604-2622).
ccttacgaattaagaaata

SEQ ID NO: 415256 - DNA, 19 bp, Homo sapiens
  siRNA target sequence for FLJ23749 (NM_152271.2,226-244).
ctgccagagaggactgttt

SEQ ID NO: 415257 - DNA, 19 bp, Homo sapiens
  siRNA target sequence for FLJ23749 (NM_152271.2,321-339).
gaacaggatgtgattgtaa

SEQ ID NO: 415258 - DNA, 19 bp, Homo sapiens
  siRNA target sequence for FLJ23749 (NM_152271.2,373-391).
gagaaactcccaatgaagt

SEQ ID NO: 415259 - DNA, 19 bp, Homo sapiens
  siRNA target sequence for FLJ23749 (NM_152271.2,381-399).
cccaatgaagtctgtatgt

SEQ ID NO: 415260 - DNA, 19 bp, Homo sapiens
  siRNA target sequence for FLJ23749 (NM_152271.2,398-416).
gttttccttagcttatggt

SEQ ID NO: 415261 - DNA, 19 bp, Homo sapiens
  siRNA target sequence for FLJ23749 (NM_152271.2,403-421).
ccttagcttatggtgatat

SEQ ID NO: 415262 - DNA, 19 bp, Homo sapiens
  siRNA target sequence for FLJ23749 (NM_152271.2,462-480).
ctctgcatgaggttgtttt

SEQ ID NO: 415263 - DNA, 19 bp, Homo sapiens
  siRNA target sequence for FLJ23749 (NM_152271.2,496-514).
ccccttgcggacattcgtt

SEQ ID NO: 415264 - DNA, 19 bp, Homo sapiens
  siRNA target sequence for FLJ23749 (NM_152271.2,502-520).
gcggacattcgttctgtaa

SEQ ID NO: 415265 - DNA, 19 bp, Homo sapiens
  siRNA target sequence for FLJ23749 (NM_152271.2,507-525).
cattcgttctgtaagaatt

SEQ ID NO: 415266 - DNA, 19 bp, Homo sapiens
  siRNA target sequence for FLJ23749 (NM_152271.2,511-529).
cgttctgtaagaattgtct

SEQ ID NO: 415267 - DNA, 19 bp, Homo sapiens
  siRNA target sequence for FLJ23749 (NM_152271.2,526-544).
gtcttgagcgttgtttaga

SEQ ID NO: 415268 - DNA, 19 bp, Homo sapiens
  siRNA target sequence for FLJ23749 (NM_152271.2,641-659).
gaagtatctgcctgatgaa

SEQ ID NO: 415269 - DNA, 19 bp, Homo sapiens
  siRNA target sequence for FLJ23749 (NM_152271.2,713-731).
gaccaagaatgttccaata

SEQ ID NO: 415270 - DNA, 19 bp, Homo sapiens
  siRNA target sequence for FLJ23749 (NM_152271.2,762-780).
ccttgccctctccatgtat

SEQ ID NO: 415271 - DNA, 19 bp, Homo sapiens
  siRNA target sequence for FLJ23749 (NM_152271.2,763-781).
cttgccctctccatgtatt

SEQ ID NO: 415272 - DNA, 19 bp, Homo sapiens
  siRNA target sequence for FLJ23749 (NM_152271.2,786-804).
ccaagatacagattgatga

SEQ ID NO: 415273 - DNA, 19 bp, Homo sapiens
  siRNA target sequence for FLJ23749 (NM_152271.2,787-805).
caagatacagattgatgat

SEQ ID NO: 415274 - DNA, 19 bp, Homo sapiens
  siRNA target sequence for FLJ23749 (NM_152271.2,800-818).
gatgattcgaagaagtata

SEQ ID NO: 415275 - DNA, 19 bp, Homo sapiens
  siRNA target sequence for FLJ23749 (NM_152271.2,842-860).
catgtgtgtcagtgataca

SEQ ID NO: 415276 - DNA, 19 bp, Homo sapiens
  siRNA target sequence for FLJ23749 (NM_152271.2,845-863).
gtgtgtcagtgatacacaa

SEQ ID NO: 415277 - DNA, 19 bp, Homo sapiens
  siRNA target sequence for FLJ23749 (NM_152271.2,847-865).
gtgtcagtgatacacaaaa

SEQ ID NO: 415278 - DNA, 19 bp, Homo sapiens
  siRNA target sequence for FLJ23749 (NM_152271.2,924-942).
ggaaggtctgtggttgata

SEQ ID NO: 415279 - DNA, 19 bp, Homo sapiens
  siRNA target sequence for FLJ23749 (NM_152271.2,929-947).
gtctgtggttgatacagtt

SEQ ID NO: 415280 - DNA, 19 bp, Homo sapiens
  siRNA target sequence for FLJ23749 (NM_152271.2,1063-1081).
gagagcttcatgatttggt

SEQ ID NO: 415281 - DNA, 19 bp, Homo sapiens
  siRNA target sequence for FLJ23749 (NM_152271.2,1065-1083).
gagcttcatgatttggttt

SEQ ID NO: 415282 - DNA, 19 bp, Homo sapiens
  siRNA target sequence for FLJ23749 (NM_152271.2,1068-1086).
cttcatgatttggtttact

SEQ ID NO: 415283 - DNA, 19 bp, Homo sapiens
  siRNA target sequence for FLJ23749 (NM_152271.2,1123-1141).
gatttcgaagccaaattct

SEQ ID NO: 415284 - DNA, 19 bp, Homo sapiens
  siRNA target sequence for FLJ23749 (NM_152271.2,1250-1268).
ccagctgtcggttttgtca

SEQ ID NO: 415285 - DNA, 19 bp, Homo sapiens
  siRNA target sequence for FLJ23749 (NM_152271.2,1251-1269).
cagctgtcggttttgtcaa

SEQ ID NO: 415286 - DNA, 19 bp, Homo sapiens
  siRNA target sequence for FLJ23749 (NM_152271.2,1254-1272).
ctgtcggttttgtcaatga

SEQ ID NO: 415287 - DNA, 19 bp, Homo sapiens
  siRNA target sequence for FLJ13946 (NM_152275.2,532-550).
gtacaaggcctgcctttat

SEQ ID NO: 415288 - DNA, 19 bp, Homo sapiens
  siRNA target sequence for FLJ13946 (NM_152275.2,757-775).
ctacaaggagggacagtat

SEQ ID NO: 415289 - DNA, 19 bp, Homo sapiens
  siRNA target sequence for FLJ13946 (NM_152275.2,779-797).
gctgcatgctccaagtttt

SEQ ID NO: 415290 - DNA, 19 bp, Homo sapiens
  siRNA target sequence for FLJ13946 (NM_152275.2,1974-1992).
gcttggagccttataataa

SEQ ID NO: 415291 - DNA, 19 bp, Homo sapiens
  siRNA target sequence for FLJ13946 (NM_152275.2,1975-1993).
cttggagccttataataaa

SEQ ID NO: 415292 - DNA, 19 bp, Homo sapiens
  siRNA target sequence for FLJ13946 (NM_152275.2,2205-2223).
cagatgagtccagacaatt

SEQ ID NO: 415293 - DNA, 19 bp, Homo sapiens
  siRNA target sequence for FLJ13946 (NM_152275.2,2207-2225).
gatgagtccagacaattga

SEQ ID NO: 415294 - DNA, 19 bp, Homo sapiens
  siRNA target sequence for DC-UbP (NM_152277.1,125-143).
cgcagcaagagggatgaat

SEQ ID NO: 415295 - DNA, 19 bp, Homo sapiens
  siRNA target sequence for DC-UbP (NM_152277.1,148-166).
ggatacagcaccagctttt

SEQ ID NO: 415296 - DNA, 19 bp, Homo sapiens
  siRNA target sequence for DC-UbP (NM_152277.1,238-256).
ggcacaagcaatcattgat

SEQ ID NO: 415297 - DNA, 19 bp, Homo sapiens
  siRNA target sequence for DC-UbP (NM_152277.1,250-268).
cattgatggtgcaaacata

SEQ ID NO: 415298 - DNA, 19 bp, Homo sapiens
  siRNA target sequence for DC-UbP (NM_152277.1,291-309).
cagagtgctacgatgaact

SEQ ID NO: 415299 - DNA, 19 bp, Homo sapiens
  siRNA target sequence for DC-UbP (NM_152277.1,323-341).
cagcttccagtgtattgct

SEQ ID NO: 415300 - DNA, 19 bp, Homo sapiens
  siRNA target sequence for DC-UbP (NM_152277.1,344-362).
gcaccgccaatcaacatga

SEQ ID NO: 415301 - DNA, 19 bp, Homo sapiens
  siRNA target sequence for DC-UbP (NM_152277.1,345-363).
caccgccaatcaacatgat

SEQ ID NO: 415302 - DNA, 19 bp, Homo sapiens
  siRNA target sequence for DC-UbP (NM_152277.1,408-426).
cacccaattctggatatga

SEQ ID NO: 415303 - DNA, 19 bp, Homo sapiens
  siRNA target sequence for DC-UbP (NM_152277.1,542-560).
ggtagtcagcggtggtttt

SEQ ID NO: 415304 - DNA, 19 bp, Homo sapiens
  siRNA target sequence for DC-UbP (NM_152277.1,543-561).
gtagtcagcggtggttttt

SEQ ID NO: 415305 - DNA, 19 bp, Homo sapiens
  siRNA target sequence for DC-UbP (NM_152277.1,575-593).
ctcactgacaaaatgaagt

SEQ ID NO: 415306 - DNA, 19 bp, Homo sapiens
  siRNA target sequence for DC-UbP (NM_152277.1,623-641).
gttgtacaggttatagtga

SEQ ID NO: 415307 - DNA, 19 bp, Homo sapiens
  siRNA target sequence for FLJ11752 (NM_152281.1,137-155).
gagactaaagcagactaaa

SEQ ID NO: 415308 - DNA, 19 bp, Homo sapiens
  siRNA target sequence for FLJ11752 (NM_152281.1,146-164).
gcagactaaagatccattt

SEQ ID NO: 415309 - DNA, 19 bp, Homo sapiens
  siRNA target sequence for FLJ11752 (NM_152281.1,191-209).
gaaaagtcgacaacaactt

SEQ ID NO: 415310 - DNA, 19 bp, Homo sapiens
  siRNA target sequence for FLJ11752 (NM_152281.1,287-305).
gctgctttcagcaccaaaa

SEQ ID NO: 415311 - DNA, 19 bp, Homo sapiens
  siRNA target sequence for FLJ11752 (NM_152281.1,301-319).
caaaacagagagttaacgt

SEQ ID NO: 415312 - DNA, 19 bp, Homo sapiens
  siRNA target sequence for FLJ11752 (NM_152281.1,306-324).
cagagagttaacgttcaaa

SEQ ID NO: 415313 - DNA, 19 bp, Homo sapiens
  siRNA target sequence for FLJ11752 (NM_152281.1,472-490).
ctccaaagccagattgcaa

SEQ ID NO: 415314 - DNA, 19 bp, Homo sapiens
  siRNA target sequence for FLJ11752 (NM_152281.1,588-606).
gctcttttggctaaagcta

SEQ ID NO: 415315 - DNA, 19 bp, Homo sapiens
  siRNA target sequence for FLJ11752 (NM_152281.1,753-771).
gctcggaagcggtttgaca

SEQ ID NO: 415316 - DNA, 19 bp, Homo sapiens
  siRNA target sequence for FLJ11752 (NM_152281.1,772-790).
gggctgaagcagagtacat

SEQ ID NO: 415317 - DNA, 19 bp, Homo sapiens
  siRNA target sequence for FLJ11752 (NM_152281.1,773-791).
ggctgaagcagagtacatt

SEQ ID NO: 415318 - DNA, 19 bp, Homo sapiens
  siRNA target sequence for FLJ11752 (NM_152281.1,793-811).
cagcaaagctagatataca

SEQ ID NO: 415319 - DNA, 19 bp, Homo sapiens
  siRNA target sequence for FLJ11752 (NM_152281.1,810-828).
cagcgcaagactgagataa

SEQ ID NO: 415320 - DNA, 19 bp, Homo sapiens
  siRNA target sequence for FLJ11752 (NM_152281.1,812-830).
gcgcaagactgagataaaa

SEQ ID NO: 415321 - DNA, 19 bp, Homo sapiens
  siRNA target sequence for FLJ11752 (NM_152281.1,853-871).
gtacgatcatacagcaaaa

SEQ ID NO: 415322 - DNA, 19 bp, Homo sapiens
  siRNA target sequence for FLJ11752 (NM_152281.1,902-920).
gttgatgcaacaactagat

SEQ ID NO: 415323 - DNA, 19 bp, Homo sapiens
  siRNA target sequence for FLJ11752 (NM_152281.1,997-1015).
ggagaccagtggttcgttt

SEQ ID NO: 415324 - DNA, 19 bp, Homo sapiens
  siRNA target sequence for FLJ11752 (NM_152281.1,1000-1018).
gaccagtggttcgtttaga

SEQ ID NO: 415325 - DNA, 19 bp, Homo sapiens
  siRNA target sequence for FLJ11752 (NM_152281.1,1002-1020).
ccagtggttcgtttagaga

SEQ ID NO: 415326 - DNA, 19 bp, Homo sapiens
  siRNA target sequence for FLJ11752 (NM_152281.1,1012-1030).
gtttagagaggccatttca

SEQ ID NO: 415327 - DNA, 19 bp, Homo sapiens
  siRNA target sequence for FLJ11752 (NM_152281.1,1043-1061).
gagtgtgacattagaattt

SEQ ID NO: 415328 - DNA, 19 bp, Homo sapiens
  siRNA target sequence for MGC40555 (NM_152285.1,188-206).
cgggtgacctgcataggtt

SEQ ID NO: 415329 - DNA, 19 bp, Homo sapiens
  siRNA target sequence for MGC40555 (NM_152285.1,248-266).
gtggaggagggttacttca

SEQ ID NO: 415330 - DNA, 19 bp, Homo sapiens
  siRNA target sequence for MGC40555 (NM_152285.1,254-272).
gagggttacttcaacagtt

SEQ ID NO: 415331 - DNA, 19 bp, Homo sapiens
  siRNA target sequence for MGC40555 (NM_152285.1,410-428).
cacacgccacggttttcca

SEQ ID NO: 415332 - DNA, 19 bp, Homo sapiens
  siRNA target sequence for MGC40555 (NM_152285.1,420-438).
ggttttccaaggatcacaa

SEQ ID NO: 415333 - DNA, 19 bp, Homo sapiens
  siRNA target sequence for MGC40555 (NM_152285.1,444-462).
gcctcgtgttctatatctt

SEQ ID NO: 415334 - DNA, 19 bp, Homo sapiens
  siRNA target sequence for MGC40555 (NM_152285.1,446-464).
ctcgtgttctatatcttga

SEQ ID NO: 415335 - DNA, 19 bp, Homo sapiens
  siRNA target sequence for MGC40555 (NM_152285.1,478-496).
gaacagcatcccagacatt

SEQ ID NO: 415336 - DNA, 19 bp, Homo sapiens
  siRNA target sequence for MGC40555 (NM_152285.1,838-856).
ccacatcgactactactta

SEQ ID NO: 415337 - DNA, 19 bp, Homo sapiens
  siRNA target sequence for MGC40555 (NM_152285.1,897-915).
cggtcttcattggcaatat

SEQ ID NO: 415338 - DNA, 19 bp, Homo sapiens
  siRNA target sequence for MGC40555 (NM_152285.1,901-919).
cttcattggcaatattgct

SEQ ID NO: 415339 - DNA, 19 bp, Homo sapiens
  siRNA target sequence for FLJ43070 (NM_152286.2,260-278).
gttggtgtcctcatccttt

SEQ ID NO: 415340 - DNA, 19 bp, Homo sapiens
  siRNA target sequence for FLJ43070 (NM_152286.2,283-301).
gttcagaaggcttagacaa

SEQ ID NO: 415341 - DNA, 19 bp, Homo sapiens
  siRNA target sequence for FLJ43070 (NM_152286.2,345-363).
gagacaaagtgatgtttta

SEQ ID NO: 415342 - DNA, 19 bp, Homo sapiens
  siRNA target sequence for FLJ43070 (NM_152286.2,546-564).
ccgacctcacggagtttga

SEQ ID NO: 415343 - DNA, 19 bp, Homo sapiens
  siRNA target sequence for FLJ43070 (NM_152286.2,555-573).
cggagtttgacgtgaagaa

SEQ ID NO: 415344 - DNA, 19 bp, Homo sapiens
  siRNA target sequence for FLJ43070 (NM_152286.2,557-575).
gagtttgacgtgaagaatt

SEQ ID NO: 415345 - DNA, 19 bp, Homo sapiens
  siRNA target sequence for FLJ43070 (NM_152286.2,559-577).
gtttgacgtgaagaattct

SEQ ID NO: 415346 - DNA, 19 bp, Homo sapiens
  siRNA target sequence for FLJ43070 (NM_152286.2,861-879).
gccatgctgcaccttacaa

SEQ ID NO: 415347 - DNA, 19 bp, Homo sapiens
  siRNA target sequence for FLJ43070 (NM_152286.2,1450-1468).
cgtgatggttgcagagata

SEQ ID NO: 415348 - DNA, 19 bp, Homo sapiens
  siRNA target sequence for FLJ43070 (NM_152286.2,2168-2186).
gccgttcgggactcagaat

SEQ ID NO: 415349 - DNA, 19 bp, Homo sapiens
  siRNA target sequence for FLJ43070 (NM_152286.2,2242-2260).
ggtgactcggctgattcat

SEQ ID NO: 415350 - DNA, 19 bp, Homo sapiens
  siRNA target sequence for FLJ43070 (NM_152286.2,2247-2265).
ctcggctgattcatctctt

SEQ ID NO: 415351 - DNA, 19 bp, Homo sapiens
  siRNA target sequence for FLJ43070 (NM_152286.2,2476-2494).
gactagtgacaacataaaa

SEQ ID NO: 415352 - DNA, 19 bp, Homo sapiens
  siRNA target sequence for FLJ43070 (NM_152286.2,3003-3021).
cccaggtgggcgttctcaa

SEQ ID NO: 415353 - DNA, 19 bp, Homo sapiens
  siRNA target sequence for FLJ43070 (NM_152286.2,3152-3170).
ggcatgacgtccttgatga

SEQ ID NO: 415354 - DNA, 19 bp, Homo sapiens
  siRNA target sequence for FLJ43070 (NM_152286.2,3153-3171).
gcatgacgtccttgatgaa

SEQ ID NO: 415355 - DNA, 19 bp, Homo sapiens
  siRNA target sequence for FLJ43070 (NM_152286.2,3269-3287).
gacctgtggattccttatt

SEQ ID NO: 415356 - DNA, 19 bp, Homo sapiens
  siRNA target sequence for FLJ43070 (NM_152286.2,3468-3486).
ggtccatgggggcaaaagt

SEQ ID NO: 415357 - DNA, 19 bp, Homo sapiens
  siRNA target sequence for FLJ43070 (NM_152286.2,3520-3538).
gacggacctcaccaactat

SEQ ID NO: 415358 - DNA, 19 bp, Homo sapiens
  siRNA target sequence for FLJ43070 (NM_152286.2,3584-3602).
cccttggccacgaaagtca

SEQ ID NO: 415359 - DNA, 19 bp, Homo sapiens
  siRNA target sequence for FLJ43070 (NM_152286.2,3585-3603).
ccttggccacgaaagtcaa

SEQ ID NO: 415360 - DNA, 19 bp, Homo sapiens
  siRNA target sequence for FLJ43070 (NM_152286.2,3895-3913).
cacggaccttgccgaaatt

SEQ ID NO: 415361 - DNA, 19 bp, Homo sapiens
  siRNA target sequence for FLJ43070 (NM_152286.2,3897-3915).
cggaccttgccgaaattgt

SEQ ID NO: 415362 - DNA, 19 bp, Homo sapiens
  siRNA target sequence for FLJ43070 (NM_152286.2,3899-3917).
gaccttgccgaaattgtgt

SEQ ID NO: 415363 - DNA, 19 bp, Homo sapiens
  siRNA target sequence for ZFP276 (NM_152287.2,288-306).
ctctgccacgggaagtttt

SEQ ID NO: 415364 - DNA, 19 bp, Homo sapiens
  siRNA target sequence for ZFP276 (NM_152287.2,595-613).
cgtgtctggtggatctgat

SEQ ID NO: 415365 - DNA, 19 bp, Homo sapiens
  siRNA target sequence for ZFP276 (NM_152287.2,759-777).
cacgactacaccatggata

SEQ ID NO: 415366 - DNA, 19 bp, Homo sapiens
  siRNA target sequence for ZFP276 (NM_152287.2,1088-1106).
ctcggatgatcgggtaaaa

SEQ ID NO: 415367 - DNA, 19 bp, Homo sapiens
  siRNA target sequence for ZFP276 (NM_152287.2,1090-1108).
cggatgatcgggtaaaaga

SEQ ID NO: 415368 - DNA, 19 bp, Homo sapiens
  siRNA target sequence for ZFP276 (NM_152287.2,1335-1353).
cttcccaccatctacaagt

SEQ ID NO: 415369 - DNA, 19 bp, Homo sapiens
  siRNA target sequence for ZFP276 (NM_152287.2,1386-1404).
ggcgctgacggcatgaaga

SEQ ID NO: 415370 - DNA, 19 bp, Homo sapiens
  siRNA target sequence for ZFP276 (NM_152287.2,1387-1405).
gcgctgacggcatgaagaa

SEQ ID NO: 415371 - DNA, 19 bp, Homo sapiens
  siRNA target sequence for ZFP276 (NM_152287.2,1456-1474).
ctggctgcaacaaggtttt

SEQ ID NO: 415372 - DNA, 19 bp, Homo sapiens
  siRNA target sequence for ZFP276 (NM_152287.2,1517-1535).
cacagaggtgcggaactat

SEQ ID NO: 415373 - DNA, 19 bp, Homo sapiens
  siRNA target sequence for ZFP276 (NM_152287.2,1521-1539).
gaggtgcggaactatatct

SEQ ID NO: 415374 - DNA, 19 bp, Homo sapiens
  siRNA target sequence for ZFP276 (NM_152287.2,1523-1541).
ggtgcggaactatatctgt

SEQ ID NO: 415375 - DNA, 19 bp, Homo sapiens
  siRNA target sequence for MGC13024 (NM_152288.1,548-566).
gtctgctgccccacattga

SEQ ID NO: 415376 - DNA, 19 bp, Homo sapiens
  siRNA target sequence for MGC13024 (NM_152288.1,699-717).
ggttggttgggtcaagttt

SEQ ID NO: 415377 - DNA, 19 bp, Homo sapiens
  siRNA target sequence for MGC13024 (NM_152288.1,804-822).
ccttagtccagcttccaat

SEQ ID NO: 415378 - DNA, 19 bp, Homo sapiens
  siRNA target sequence for MGC13024 (NM_152288.1,956-974).
ccgtggggctcgtgtttgt

SEQ ID NO: 415379 - DNA, 19 bp, Homo sapiens
  siRNA target sequence for MGC13024 (NM_152288.1,1025-1043).
gctacaagcaggaactaga

SEQ ID NO: 415380 - DNA, 19 bp, Homo sapiens
  siRNA target sequence for MGC13024 (NM_152288.1,1035-1053).
ggaactagaggaactgaat

SEQ ID NO: 415381 - DNA, 19 bp, Homo sapiens
  siRNA target sequence for MGC35194 (NM_152290.1,345-363).
caagacaccccaatccatt

SEQ ID NO: 415382 - DNA, 19 bp, Homo sapiens
  siRNA target sequence for MGC35194 (NM_152290.1,352-370).
ccccaatccatttacagaa

SEQ ID NO: 415383 - DNA, 19 bp, Homo sapiens
  siRNA target sequence for MGC35194 (NM_152290.1,503-521).
gcacctatgacgaccatta

SEQ ID NO: 415384 - DNA, 19 bp, Homo sapiens
  siRNA target sequence for MGC35194 (NM_152290.1,506-524).
cctatgacgaccattacaa

SEQ ID NO: 415385 - DNA, 19 bp, Homo sapiens
  siRNA target sequence for MGC35194 (NM_152290.1,616-634).
cttgctccccctacaaact

SEQ ID NO: 415386 - DNA, 19 bp, Homo sapiens
  siRNA target sequence for MGC35194 (NM_152290.1,629-647).
caaactatggactctatga

SEQ ID NO: 415387 - DNA, 19 bp, Homo sapiens
  siRNA target sequence for MUC7 (NM_152291.1,153-171).
gtcgagaaagggatcatga

SEQ ID NO: 415388 - DNA, 19 bp, Homo sapiens
  siRNA target sequence for MUC7 (NM_152291.1,248-266).
caccagaagccgttcatta

SEQ ID NO: 415389 - DNA, 19 bp, Homo sapiens
  siRNA target sequence for MUC7 (NM_152291.1,250-268).
ccagaagccgttcattaga

SEQ ID NO: 415390 - DNA, 19 bp, Homo sapiens
  siRNA target sequence for MUC7 (NM_152291.1,251-269).
cagaagccgttcattagaa

SEQ ID NO: 415391 - DNA, 19 bp, Homo sapiens
  siRNA target sequence for MUC7 (NM_152291.1,307-325).
gcttccaccttcacctaat

SEQ ID NO: 415392 - DNA, 19 bp, Homo sapiens
  siRNA target sequence for MUC7 (NM_152291.1,348-366).
ctcaccagccacctaaaca

SEQ ID NO: 415393 - DNA, 19 bp, Homo sapiens
  siRNA target sequence for MUC7 (NM_152291.1,443-461).
gcttccaccaaaattacta

SEQ ID NO: 415394 - DNA, 19 bp, Homo sapiens
  siRNA target sequence for MUC7 (NM_152291.1,490-508).
gaatgccaccaccatatct

SEQ ID NO: 415395 - DNA, 19 bp, Homo sapiens
  siRNA target sequence for MUC7 (NM_152291.1,531-549).
gctcttctgtagctacatt

SEQ ID NO: 415396 - DNA, 19 bp, Homo sapiens
  siRNA target sequence for MUC7 (NM_152291.1,532-550).
ctcttctgtagctacatta

SEQ ID NO: 415397 - DNA, 19 bp, Homo sapiens
  siRNA target sequence for MUC7 (NM_152291.1,1006-1024).
cccaattaccacacctaat

SEQ ID NO: 415398 - DNA, 19 bp, Homo sapiens
  siRNA target sequence for MUC7 (NM_152291.1,1104-1122).
ctcaaactactactactaa

SEQ ID NO: 415399 - DNA, 19 bp, Homo sapiens
  siRNA target sequence for MUC7 (NM_152291.1,1158-1176).
ctcgatttcttttatatat

SEQ ID NO: 415400 - DNA, 19 bp, Homo sapiens
  siRNA target sequence for MGC27034 (NM_152292.2,335-353).
gcatttattgaaacttcta

SEQ ID NO: 415401 - DNA, 19 bp, Homo sapiens
  siRNA target sequence for MGC27034 (NM_152292.2,416-434).
gaagggtgtgaaccaatat

SEQ ID NO: 415402 - DNA, 19 bp, Homo sapiens
  siRNA target sequence for MGC27034 (NM_152292.2,420-438).
ggtgtgaaccaatatctaa

SEQ ID NO: 415403 - DNA, 19 bp, Homo sapiens
  siRNA target sequence for MGC27034 (NM_152292.2,421-439).
gtgtgaaccaatatctaaa

SEQ ID NO: 415404 - DNA, 19 bp, Homo sapiens
  siRNA target sequence for MGC27034 (NM_152292.2,485-503).
cgggaactccgcaaacaaa

SEQ ID NO: 415405 - DNA, 19 bp, Homo sapiens
  siRNA target sequence for MGC27034 (NM_152292.2,486-504).
gggaactccgcaaacaaaa

SEQ ID NO: 415406 - DNA, 19 bp, Homo sapiens
  siRNA target sequence for MGC27034 (NM_152292.2,538-556).
gcgacaatgtcaaatggaa

SEQ ID NO: 415407 - DNA, 19 bp, Homo sapiens
  siRNA target sequence for MGC27034 (NM_152292.2,590-608).
cgaagagatgttgttcata

SEQ ID NO: 415408 - DNA, 19 bp, Homo sapiens
  siRNA target sequence for MGC27034 (NM_152292.2,609-627).
gcacccttcgccttattat

SEQ ID NO: 415409 - DNA, 19 bp, Homo sapiens
  siRNA target sequence for MGC27034 (NM_152292.2,610-628).
cacccttcgccttattatt

SEQ ID NO: 415410 - DNA, 19 bp, Homo sapiens
  siRNA target sequence for MGC27034 (NM_152292.2,612-630).
cccttcgccttattattga

SEQ ID NO: 415411 - DNA, 19 bp, Homo sapiens
  siRNA target sequence for MGC27034 (NM_152292.2,614-632).
cttcgccttattattgact

SEQ ID NO: 415412 - DNA, 19 bp, Homo sapiens
  siRNA target sequence for MGC27034 (NM_152292.2,641-659).
gatcacttgatggtattaa

SEQ ID NO: 415413 - DNA, 19 bp, Homo sapiens
  siRNA target sequence for MGC27034 (NM_152292.2,653-671).
gtattaaaggacattaaga

SEQ ID NO: 415414 - DNA, 19 bp, Homo sapiens
  siRNA target sequence for MGC27034 (NM_152292.2,728-746).
gtgcagttttacttgacaa

SEQ ID NO: 415415 - DNA, 19 bp, Homo sapiens
  siRNA target sequence for MGC27034 (NM_152292.2,795-813).
gggtcaactggaaggatat

SEQ ID NO: 415416 - DNA, 19 bp, Homo sapiens
  siRNA target sequence for MGC27034 (NM_152292.2,804-822).
ggaaggatatccatatcaa

SEQ ID NO: 415417 - DNA, 19 bp, Homo sapiens
  siRNA target sequence for MGC27034 (NM_152292.2,820-838).
caaaccagagcactatagt

SEQ ID NO: 415418 - DNA, 19 bp, Homo sapiens
  siRNA target sequence for MGC27034 (NM_152292.2,874-892).
gtcagattcacctaatata

SEQ ID NO: 415419 - DNA, 19 bp, Homo sapiens
  siRNA target sequence for MGC27034 (NM_152292.2,878-896).
gattcacctaatatactga

SEQ ID NO: 415420 - DNA, 19 bp, Homo sapiens
  siRNA target sequence for MGC27034 (NM_152292.2,884-902).
cctaatatactgaaggaat

SEQ ID NO: 415421 - DNA, 19 bp, Homo sapiens
  siRNA target sequence for MGC27034 (NM_152292.2,919-937).
ctatgtgattggaggatta

SEQ ID NO: 415422 - DNA, 19 bp, Homo sapiens
  siRNA target sequence for MGC27034 (NM_152292.2,930-948).
gaggattagtagatcacaa

SEQ ID NO: 415423 - DNA, 19 bp, Homo sapiens
  siRNA target sequence for MGC27034 (NM_152292.2,953-971).
cacaagggactcacatata

SEQ ID NO: 415424 - DNA, 19 bp, Homo sapiens
  siRNA target sequence for MGC27034 (NM_152292.2,955-973).
caagggactcacatataaa

SEQ ID NO: 415425 - DNA, 19 bp, Homo sapiens
  siRNA target sequence for MGC27034 (NM_152292.2,978-996).
cgtcagattatggaatcaa

SEQ ID NO: 415426 - DNA, 19 bp, Homo sapiens
  siRNA target sequence for MGC27034 (NM_152292.2,979-997).
gtcagattatggaatcaat

SEQ ID NO: 415427 - DNA, 19 bp, Homo sapiens
  siRNA target sequence for MGC27034 (NM_152292.2,981-999).
cagattatggaatcaatca

SEQ ID NO: 415428 - DNA, 19 bp, Homo sapiens
  siRNA target sequence for MGC27034 (NM_152292.2,1030-1048).
gatgaatagtcgaaaagtt

SEQ ID NO: 415429 - DNA, 19 bp, Homo sapiens
  siRNA target sequence for MGC27034 (NM_152292.2,1105-1123).
gcaagaagcattttttact

SEQ ID NO: 415430 - DNA, 19 bp, Homo sapiens
  siRNA target sequence for MGC27034 (NM_152292.2,1173-1191).
gtgcttctcatgacaatca

SEQ ID NO: 415431 - DNA, 19 bp, Homo sapiens
  siRNA target sequence for MGC27034 (NM_152292.2,1211-1229).
ggtggatcggacagtgatt

SEQ ID NO: 415432 - DNA, 19 bp, Homo sapiens
  siRNA target sequence for 384D8-2 (NM_152299.1,1483-1501).
ggagctggttcgaaggaat

SEQ ID NO: 415433 - DNA, 19 bp, Homo sapiens
  siRNA target sequence for C20orf158 (NM_152302.1,1396-1414).
cgtttccagaagagaatat

SEQ ID NO: 415434 - DNA, 19 bp, Homo sapiens
  siRNA target sequence for C20orf158 (NM_152302.1,1409-1427).
gaatatcgcttctaacgat

SEQ ID NO: 415435 - DNA, 19 bp, Homo sapiens
  siRNA target sequence for C20orf158 (NM_152302.1,1568-1586).
ggcaccatcccaatttgaa

SEQ ID NO: 415436 - DNA, 19 bp, Homo sapiens
  siRNA target sequence for C20orf158 (NM_152302.1,1807-1825).
gaccaccccctggtcattt

SEQ ID NO: 415437 - DNA, 19 bp, Homo sapiens
  siRNA target sequence for C20orf158 (NM_152302.1,1810-1828).
caccccctggtcatttcgt

SEQ ID NO: 415438 - DNA, 19 bp, Homo sapiens
  siRNA target sequence for C20orf158 (NM_152302.1,1876-1894).
ctcatcccaaccagtttga

SEQ ID NO: 415439 - DNA, 19 bp, Homo sapiens
  siRNA target sequence for C20orf158 (NM_152302.1,1906-1924).
gccaagcgcctaactttat

SEQ ID NO: 415440 - DNA, 19 bp, Homo sapiens
  siRNA target sequence for C20orf158 (NM_152302.1,2036-2054).
ggggtccgcacccttttct

SEQ ID NO: 415441 - DNA, 19 bp, Homo sapiens
  siRNA target sequence for C20orf158 (NM_152302.1,2038-2056).
ggtccgcacccttttctga

SEQ ID NO: 415442 - DNA, 19 bp, Homo sapiens
  siRNA target sequence for C20orf158 (NM_152302.1,2039-2057).
gtccgcacccttttctgaa

SEQ ID NO: 415443 - DNA, 19 bp, Homo sapiens
  siRNA target sequence for C20orf158 (NM_152302.1,2042-2060).
cgcacccttttctgaaaaa

SEQ ID NO: 415444 - DNA, 19 bp, Homo sapiens
  siRNA target sequence for C20orf158 (NM_152302.1,2071-2089).
ccccttcgcgatttcactt

SEQ ID NO: 415445 - DNA, 19 bp, Homo sapiens
  siRNA target sequence for MDS010 (NM_152305.1,747-765).
ggaaaaacccaaaacttgt

SEQ ID NO: 415446 - DNA, 19 bp, Homo sapiens
  siRNA target sequence for MGC24665 (NM_152308.1,302-320).
gtctagtcccaggaaagta

SEQ ID NO: 415447 - DNA, 19 bp, Homo sapiens
  siRNA target sequence for MGC24665 (NM_152308.1,381-399).
gatgacagacctttctgat

SEQ ID NO: 415448 - DNA, 19 bp, Homo sapiens
  siRNA target sequence for MGC24665 (NM_152308.1,424-442).
gaactggaggtagaagatt

SEQ ID NO: 415449 - DNA, 19 bp, Homo sapiens
  siRNA target sequence for PIK3AP1 (NM_152309.1,269-287).
ggcgacagaagcagagttt

SEQ ID NO: 415450 - DNA, 19 bp, Homo sapiens
  siRNA target sequence for PIK3AP1 (NM_152309.1,294-312).
gaggattctccctctgtaa

SEQ ID NO: 415451 - DNA, 19 bp, Homo sapiens
  siRNA target sequence for PIK3AP1 (NM_152309.1,330-348).
gagaatgagtacaccattt

SEQ ID NO: 415452 - DNA, 19 bp, Homo sapiens
  siRNA target sequence for PIK3AP1 (NM_152309.1,392-410).
gatatattctggagactta

SEQ ID NO: 415453 - DNA, 19 bp, Homo sapiens
  siRNA target sequence for PIK3AP1 (NM_152309.1,414-432).
gtgtgtgaaaccgttatca

SEQ ID NO: 415454 - DNA, 19 bp, Homo sapiens
  siRNA target sequence for PIK3AP1 (NM_152309.1,420-438).
gaaaccgttatcagctatt

SEQ ID NO: 415455 - DNA, 19 bp, Homo sapiens
  siRNA target sequence for PIK3AP1 (NM_152309.1,425-443).
cgttatcagctattatact

SEQ ID NO: 415456 - DNA, 19 bp, Homo sapiens
  siRNA target sequence for PIK3AP1 (NM_152309.1,478-496).
ccgcgaatcctgtggaatt

SEQ ID NO: 415457 - DNA, 19 bp, Homo sapiens
  siRNA target sequence for PIK3AP1 (NM_152309.1,480-498).
gcgaatcctgtggaattca

SEQ ID NO: 415458 - DNA, 19 bp, Homo sapiens
  siRNA target sequence for PIK3AP1 (NM_152309.1,481-499).
cgaatcctgtggaattcat

SEQ ID NO: 415459 - DNA, 19 bp, Homo sapiens
  siRNA target sequence for PIK3AP1 (NM_152309.1,497-515).
catgtgtcaggcctttaaa

SEQ ID NO: 415460 - DNA, 19 bp, Homo sapiens
  siRNA target sequence for PIK3AP1 (NM_152309.1,502-520).
gtcaggcctttaaaattgt

SEQ ID NO: 415461 - DNA, 19 bp, Homo sapiens
  siRNA target sequence for PIK3AP1 (NM_152309.1,556-574).
ccgaatccctgaagaacaa

SEQ ID NO: 415462 - DNA, 19 bp, Homo sapiens
  siRNA target sequence for PIK3AP1 (NM_152309.1,627-645).
gatatgatgacaaatcaga

SEQ ID NO: 415463 - DNA, 19 bp, Homo sapiens
  siRNA target sequence for PIK3AP1 (NM_152309.1,637-655).
caaatcagagggatgaaga

SEQ ID NO: 415464 - DNA, 19 bp, Homo sapiens
  siRNA target sequence for PIK3AP1 (NM_152309.1,659-677).
gcccaccctgttgcatttt

SEQ ID NO: 415465 - DNA, 19 bp, Homo sapiens
  siRNA target sequence for PIK3AP1 (NM_152309.1,671-689).
gcattttgctgcgaagtat

SEQ ID NO: 415466 - DNA, 19 bp, Homo sapiens
  siRNA target sequence for PIK3AP1 (NM_152309.1,682-700).
cgaagtatggactgaagaa

SEQ ID NO: 415467 - DNA, 19 bp, Homo sapiens
  siRNA target sequence for PIK3AP1 (NM_152309.1,848-866).
catgctcaagagtcacatt

SEQ ID NO: 415468 - DNA, 19 bp, Homo sapiens
  siRNA target sequence for PIK3AP1 (NM_152309.1,964-982).
gctgtgacgaggatctcta

SEQ ID NO: 415469 - DNA, 19 bp, Homo sapiens
  siRNA target sequence for PIK3AP1 (NM_152309.1,965-983).
ctgtgacgaggatctctat

SEQ ID NO: 415470 - DNA, 19 bp, Homo sapiens
  siRNA target sequence for PIK3AP1 (NM_152309.1,969-987).
gacgaggatctctatgagt

SEQ ID NO: 415471 - DNA, 19 bp, Homo sapiens
  siRNA target sequence for PIK3AP1 (NM_152309.1,1012-1030).
ccactgaagacctctatgt

SEQ ID NO: 415472 - DNA, 19 bp, Homo sapiens
  siRNA target sequence for PIK3AP1 (NM_152309.1,1037-1055).
gcttcaggccagtacatct

SEQ ID NO: 415473 - DNA, 19 bp, Homo sapiens
  siRNA target sequence for PIK3AP1 (NM_152309.1,1038-1056).
cttcaggccagtacatcta

SEQ ID NO: 415474 - DNA, 19 bp, Homo sapiens
  siRNA target sequence for PIK3AP1 (NM_152309.1,1086-1104).
gccactaaggactctatga

SEQ ID NO: 415475 - DNA, 19 bp, Homo sapiens
  siRNA target sequence for PIK3AP1 (NM_152309.1,1099-1117).
ctatgatccgcaagttttt

SEQ ID NO: 415476 - DNA, 19 bp, Homo sapiens
  siRNA target sequence for PIK3AP1 (NM_152309.1,1103-1121).
gatccgcaagtttttagaa

SEQ ID NO: 415477 - DNA, 19 bp, Homo sapiens
  siRNA target sequence for PIK3AP1 (NM_152309.1,1294-1312).
ctgacaacgaaccatacat

SEQ ID NO: 415478 - DNA, 19 bp, Homo sapiens
  siRNA target sequence for PIK3AP1 (NM_152309.1,1341-1359).
gagcggcctgggaatttct

SEQ ID NO: 415479 - DNA, 19 bp, Homo sapiens
  siRNA target sequence for PIK3AP1 (NM_152309.1,1412-1430).
caggccccagtcgagtata

SEQ ID NO: 415480 - DNA, 19 bp, Homo sapiens
  siRNA target sequence for PIK3AP1 (NM_152309.1,1414-1432).
ggccccagtcgagtatata

SEQ ID NO: 415481 - DNA, 19 bp, Homo sapiens
  siRNA target sequence for PIK3AP1 (NM_152309.1,1415-1433).
gccccagtcgagtatatat

SEQ ID NO: 415482 - DNA, 19 bp, Homo sapiens
  siRNA target sequence for PIK3AP1 (NM_152309.1,1417-1435).
cccagtcgagtatatatga

SEQ ID NO: 415483 - DNA, 19 bp, Homo sapiens
  siRNA target sequence for PIK3AP1 (NM_152309.1,1436-1454).
cccttttgcgggaatgaaa

SEQ ID NO: 415484 - DNA, 19 bp, Homo sapiens
  siRNA target sequence for PIK3AP1 (NM_152309.1,1437-1455).
ccttttgcgggaatgaaaa

SEQ ID NO: 415485 - DNA, 19 bp, Homo sapiens
  siRNA target sequence for PIK3AP1 (NM_152309.1,1461-1479).
ggccagcggcagcttatca

SEQ ID NO: 415486 - DNA, 19 bp, Homo sapiens
  siRNA target sequence for PIK3AP1 (NM_152309.1,1494-1512).
gtgaagctgggcattgtca

SEQ ID NO: 415487 - DNA, 19 bp, Homo sapiens
  siRNA target sequence for PIK3AP1 (NM_152309.1,1523-1541).
ggctgtgctccacttcaaa

SEQ ID NO: 415488 - DNA, 19 bp, Homo sapiens
  siRNA target sequence for PIK3AP1 (NM_152309.1,1525-1543).
ctgtgctccacttcaaaga

SEQ ID NO: 415489 - DNA, 19 bp, Homo sapiens
  siRNA target sequence for PIK3AP1 (NM_152309.1,1551-1569).
ctcaaccagaagaaacgat

SEQ ID NO: 415490 - DNA, 19 bp, Homo sapiens
  siRNA target sequence for PIK3AP1 (NM_152309.1,1566-1584).
cgatcggagtcctttcgtt

SEQ ID NO: 415491 - DNA, 19 bp, Homo sapiens
  siRNA target sequence for PIK3AP1 (NM_152309.1,1567-1585).
gatcggagtcctttcgttt

SEQ ID NO: 415492 - DNA, 19 bp, Homo sapiens
  siRNA target sequence for PIK3AP1 (NM_152309.1,1734-1752).
gagagtggccccaggaaaa

SEQ ID NO: 415493 - DNA, 19 bp, Homo sapiens
  siRNA target sequence for PIK3AP1 (NM_152309.1,1883-1901).
ggacaacgaggataatgaa

SEQ ID NO: 415494 - DNA, 19 bp, Homo sapiens
  siRNA target sequence for MGC32871 (NM_152311.1,297-315).
caaatgggagcattttcat

SEQ ID NO: 415495 - DNA, 19 bp, Homo sapiens
  siRNA target sequence for MGC32871 (NM_152311.1,313-331).
catcacttacggacttttt

SEQ ID NO: 415496 - DNA, 19 bp, Homo sapiens
  siRNA target sequence for MGC32871 (NM_152311.1,316-334).
cacttacggactttttcgt

SEQ ID NO: 415497 - DNA, 19 bp, Homo sapiens
  siRNA target sequence for MGC32871 (NM_152311.1,338-356).
gagagtagtgaagaattga

SEQ ID NO: 415498 - DNA, 19 bp, Homo sapiens
  siRNA target sequence for MGC32871 (NM_152311.1,385-403).
gtttgcagttttagagata

SEQ ID NO: 415499 - DNA, 19 bp, Homo sapiens
  siRNA target sequence for MGC32871 (NM_152311.1,426-444).
ctctgcattcggtgactat

SEQ ID NO: 415500 - DNA, 19 bp, Homo sapiens
  siRNA target sequence for MGC32871 (NM_152311.1,452-470).
ctggtcctgagtttgatca

SEQ ID NO: 415501 - DNA, 19 bp, Homo sapiens
  siRNA target sequence for MGC32871 (NM_152311.1,486-504).
ctgggtttaccttctacaa

SEQ ID NO: 415502 - DNA, 19 bp, Homo sapiens
  siRNA target sequence for MGC32871 (NM_152311.1,488-506).
gggtttaccttctacaaca

SEQ ID NO: 415503 - DNA, 19 bp, Homo sapiens
  siRNA target sequence for MGC32871 (NM_152311.1,513-531).
gcaacccttaccagacatt

SEQ ID NO: 415504 - DNA, 19 bp, Homo sapiens
  siRNA target sequence for MGC32871 (NM_152311.1,566-584).
ctcggtgcatccttcgttt

SEQ ID NO: 415505 - DNA, 19 bp, Homo sapiens
  siRNA target sequence for MGC32871 (NM_152311.1,572-590).
gcatccttcgtttttgtga

SEQ ID NO: 415506 - DNA, 19 bp, Homo sapiens
  siRNA target sequence for MGC32871 (NM_152311.1,580-598).
cgtttttgtgaccatgata

SEQ ID NO: 415507 - DNA, 19 bp, Homo sapiens
  siRNA target sequence for MGC32871 (NM_152311.1,633-651).
ccgaagagttgttccaaat

SEQ ID NO: 415508 - DNA, 19 bp, Homo sapiens
  siRNA target sequence for MGC32871 (NM_152311.1,658-676).
cccggcaaccaccagtaaa

SEQ ID NO: 415509 - DNA, 19 bp, Homo sapiens
  siRNA target sequence for MGC32871 (NM_152311.1,712-730).
catactgctcgtcattctt

SEQ ID NO: 415510 - DNA, 19 bp, Homo sapiens
  siRNA target sequence for MGC32871 (NM_152311.1,718-736).
gctcgtcattcttctaaat

SEQ ID NO: 415511 - DNA, 19 bp, Homo sapiens
  siRNA target sequence for MGC32871 (NM_152311.1,721-739).
cgtcattcttctaaatata

SEQ ID NO: 415512 - DNA, 19 bp, Homo sapiens
  siRNA target sequence for MGC32871 (NM_152311.1,819-837).
ctccaagggacggaatttt

SEQ ID NO: 415513 - DNA, 19 bp, Homo sapiens
  siRNA target sequence for MGC34830 (NM_152314.1,255-273).
gagggtgcacacacttgaa

SEQ ID NO: 415514 - DNA, 19 bp, Homo sapiens
  siRNA target sequence for MGC34830 (NM_152314.1,344-362).
ggtctaggaagcgatttct

SEQ ID NO: 415515 - DNA, 19 bp, Homo sapiens
  siRNA target sequence for MGC34830 (NM_152314.1,347-365).
ctaggaagcgatttctgaa

SEQ ID NO: 415516 - DNA, 19 bp, Homo sapiens
  siRNA target sequence for MGC34830 (NM_152314.1,369-387).
ggcccagttagcacaatgt

SEQ ID NO: 415517 - DNA, 19 bp, Homo sapiens
  siRNA target sequence for MGC34830 (NM_152314.1,371-389).
cccagttagcacaatgtct

SEQ ID NO: 415518 - DNA, 19 bp, Homo sapiens
  siRNA target sequence for MGC34830 (NM_152314.1,372-390).
ccagttagcacaatgtctt

SEQ ID NO: 415519 - DNA, 19 bp, Homo sapiens
  siRNA target sequence for MGC34830 (NM_152314.1,386-404).
gtcttgctcagcagacaat

SEQ ID NO: 415520 - DNA, 19 bp, Homo sapiens
  siRNA target sequence for MGC34830 (NM_152314.1,388-406).
cttgctcagcagacaataa

SEQ ID NO: 415521 - DNA, 19 bp, Homo sapiens
  siRNA target sequence for MGC34290 (NM_152315.1,456-474).
ggtgatggacttcaacaat

SEQ ID NO: 415522 - DNA, 19 bp, Homo sapiens
  siRNA target sequence for MGC34290 (NM_152315.1,578-596).
ggaaccaaggctatgataa

SEQ ID NO: 415523 - DNA, 19 bp, Homo sapiens
  siRNA target sequence for MGC34290 (NM_152315.1,582-600).
ccaaggctatgataaaatt

SEQ ID NO: 415524 - DNA, 19 bp, Homo sapiens
  siRNA target sequence for MGC34290 (NM_152315.1,583-601).
caaggctatgataaaatta

SEQ ID NO: 415525 - DNA, 19 bp, Homo sapiens
  siRNA target sequence for MGC34290 (NM_152315.1,772-790).
cggaatagagaggtatctt

SEQ ID NO: 415526 - DNA, 19 bp, Homo sapiens
  siRNA target sequence for MGC34290 (NM_152315.1,849-867).
gaaggatcgtaaacacatt

SEQ ID NO: 415527 - DNA, 19 bp, Homo sapiens
  siRNA target sequence for MGC34290 (NM_152315.1,871-889).
gtcactaattgtaacaaga

SEQ ID NO: 415528 - DNA, 19 bp, Homo sapiens
  siRNA target sequence for MGC34290 (NM_152315.1,908-926).
catgccaagttggaatgaa

SEQ ID NO: 415529 - DNA, 19 bp, Homo sapiens
  siRNA target sequence for MGC34290 (NM_152315.1,931-949).
cctgtccctggtggttata

SEQ ID NO: 415530 - DNA, 19 bp, Homo sapiens
  siRNA target sequence for MGC34290 (NM_152315.1,934-952).
gtccctggtggttatactt

SEQ ID NO: 415531 - DNA, 19 bp, Homo sapiens
  siRNA target sequence for MGC34290 (NM_152315.1,980-998).
gcaaccaggttcagttaga

SEQ ID NO: 415532 - DNA, 19 bp, Homo sapiens
  siRNA target sequence for MGC34290 (NM_152315.1,987-1005).
ggttcagttagacacaatt

SEQ ID NO: 415533 - DNA, 19 bp, Homo sapiens
  siRNA target sequence for MGC34290 (NM_152315.1,988-1006).
gttcagttagacacaatta

SEQ ID NO: 415534 - DNA, 19 bp, Homo sapiens
  siRNA target sequence for MGC34290 (NM_152315.1,993-1011).
gttagacacaattaagata

SEQ ID NO: 415535 - DNA, 19 bp, Homo sapiens
  siRNA target sequence for MGC34290 (NM_152315.1,1044-1062).
cctgggagactctacacta

SEQ ID NO: 415536 - DNA, 19 bp, Homo sapiens
  siRNA target sequence for MGC34290 (NM_152315.1,1060-1078).
ctacgtcagtggatctact

SEQ ID NO: 415537 - DNA, 19 bp, Homo sapiens
  siRNA target sequence for MGC34290 (NM_152315.1,1104-1122).
gaagttttttgatcttcat

SEQ ID NO: 415538 - DNA, 19 bp, Homo sapiens
  siRNA target sequence for MGC34290 (NM_152315.1,1170-1188).
cactcagattcaatggaaa

SEQ ID NO: 415539 - DNA, 19 bp, Homo sapiens
  siRNA target sequence for MGC34290 (NM_152315.1,1196-1214).
gctatcccttcgtcacttt

SEQ ID NO: 415540 - DNA, 19 bp, Homo sapiens
  siRNA target sequence for MGC34290 (NM_152315.1,1218-1236).
gctctactctctgatagat

SEQ ID NO: 415541 - DNA, 19 bp, Homo sapiens
  siRNA target sequence for MGC34290 (NM_152315.1,1221-1239).
ctactctctgatagatcat

SEQ ID NO: 415542 - DNA, 19 bp, Homo sapiens
  siRNA target sequence for MGC34290 (NM_152315.1,1226-1244).
ctctgatagatcatgatta

SEQ ID NO: 415543 - DNA, 19 bp, Homo sapiens
  siRNA target sequence for MGC34290 (NM_152315.1,1263-1281).
ccggctatcaggtgacaaa

SEQ ID NO: 415544 - DNA, 19 bp, Homo sapiens
  siRNA target sequence for MGC34290 (NM_152315.1,1347-1365).
cagggccatcggtgttcaa

SEQ ID NO: 415545 - DNA, 19 bp, Homo sapiens
  siRNA target sequence for MGC34290 (NM_152315.1,1349-1367).
gggccatcggtgttcaaaa

SEQ ID NO: 415546 - DNA, 19 bp, Homo sapiens
  siRNA target sequence for MGC34290 (NM_152315.1,1391-1409).
gaagcccagccactaaagt

SEQ ID NO: 415547 - DNA, 19 bp, Homo sapiens
  siRNA target sequence for MGC34290 (NM_152315.1,1399-1417).
gccactaaagtgattatta

SEQ ID NO: 415548 - DNA, 19 bp, Homo sapiens
  siRNA target sequence for MGC34290 (NM_152315.1,1541-1559).
gggacatgaccattgcata

SEQ ID NO: 415549 - DNA, 19 bp, Homo sapiens
  siRNA target sequence for MGC34290 (NM_152315.1,1556-1574).
catatggcactgacactat

SEQ ID NO: 415550 - DNA, 19 bp, Homo sapiens
  siRNA target sequence for MGC34290 (NM_152315.1,1588-1606).
catgtgattggaaatcaga

SEQ ID NO: 415551 - DNA, 19 bp, Homo sapiens
  siRNA target sequence for FLJ38968 (NM_152316.1,189-207).
gtccagcttcgtactacaa

SEQ ID NO: 415552 - DNA, 19 bp, Homo sapiens
  siRNA target sequence for FLJ38968 (NM_152316.1,191-209).
ccagcttcgtactacaaat

SEQ ID NO: 415553 - DNA, 19 bp, Homo sapiens
  siRNA target sequence for FLJ38968 (NM_152316.1,195-213).
cttcgtactacaaatgagt

SEQ ID NO: 415554 - DNA, 19 bp, Homo sapiens
  siRNA target sequence for FLJ38968 (NM_152316.1,215-233).
ccataaaacctactatact

SEQ ID NO: 415555 - DNA, 19 bp, Homo sapiens
  siRNA target sequence for FLJ38968 (NM_152316.1,232-250).
ctcgtcacacaggttttaa

SEQ ID NO: 415556 - DNA, 19 bp, Homo sapiens
  siRNA target sequence for FLJ38968 (NM_152316.1,237-255).
cacacaggttttaagactt

SEQ ID NO: 415557 - DNA, 19 bp, Homo sapiens
  siRNA target sequence for FLJ38968 (NM_152316.1,251-269).
gactttgcaagaattgtca

SEQ ID NO: 415558 - DNA, 19 bp, Homo sapiens
  siRNA target sequence for FLJ38968 (NM_152316.1,257-275).
gcaagaattgtcatcaaat

SEQ ID NO: 415559 - DNA, 19 bp, Homo sapiens
  siRNA target sequence for FLJ38968 (NM_152316.1,266-284).
gtcatcaaatgatatgctt

SEQ ID NO: 415560 - DNA, 19 bp, Homo sapiens
  siRNA target sequence for FLJ38968 (NM_152316.1,319-337).
ggaacaatacaatttgctt

SEQ ID NO: 415561 - DNA, 19 bp, Homo sapiens
  siRNA target sequence for FLJ38968 (NM_152316.1,492-510).
gtacctggttggaagcttt

SEQ ID NO: 415562 - DNA, 19 bp, Homo sapiens
  siRNA target sequence for FLJ38968 (NM_152316.1,537-555).
ggaagtgtggatgttgata

SEQ ID NO: 415563 - DNA, 19 bp, Homo sapiens
  siRNA target sequence for FLJ38968 (NM_152316.1,541-559).
gtgtggatgttgatactga

SEQ ID NO: 415564 - DNA, 19 bp, Homo sapiens
  siRNA target sequence for FLJ38968 (NM_152316.1,606-624).
gctttgaggtcattacaat

SEQ ID NO: 415565 - DNA, 19 bp, Homo sapiens
  siRNA target sequence for FLJ38968 (NM_152316.1,607-625).
ctttgaggtcattacaatt

SEQ ID NO: 415566 - DNA, 19 bp, Homo sapiens
  siRNA target sequence for FLJ38968 (NM_152316.1,613-631).
ggtcattacaatttacgaa

SEQ ID NO: 415567 - DNA, 19 bp, Homo sapiens
  siRNA target sequence for FLJ38968 (NM_152316.1,614-632).
gtcattacaatttacgaat

SEQ ID NO: 415568 - DNA, 19 bp, Homo sapiens
  siRNA target sequence for FLJ38968 (NM_152316.1,709-727).
gttcagacagacaagtgat

SEQ ID NO: 415569 - DNA, 19 bp, Homo sapiens
  siRNA target sequence for FLJ38968 (NM_152316.1,807-825).
gactgcttaggatgtttct

SEQ ID NO: 415570 - DNA, 19 bp, Homo sapiens
  siRNA target sequence for FLJ38968 (NM_152316.1,809-827).
ctgcttaggatgtttctat

SEQ ID NO: 415571 - DNA, 19 bp, Homo sapiens
  siRNA target sequence for MGC40397 (NM_152318.1,39-57).
caggctagcccgagttgtt

SEQ ID NO: 415572 - DNA, 19 bp, Homo sapiens
  siRNA target sequence for MGC40397 (NM_152318.1,141-159).
gacaggttgctcatcaact

SEQ ID NO: 415573 - DNA, 19 bp, Homo sapiens
  siRNA target sequence for MGC40397 (NM_152318.1,162-180).
caacctaagtccagaaaga

SEQ ID NO: 415574 - DNA, 19 bp, Homo sapiens
  siRNA target sequence for MGC40397 (NM_152318.1,179-197).
gacctccactcttcaaaca

SEQ ID NO: 415575 - DNA, 19 bp, Homo sapiens
  siRNA target sequence for MGC40397 (NM_152318.1,251-269).
gatggcacgggcaaatgaa

SEQ ID NO: 415576 - DNA, 19 bp, Homo sapiens
  siRNA target sequence for MGC40397 (NM_152318.1,256-274).
cacgggcaaatgaaaagct

SEQ ID NO: 415577 - DNA, 19 bp, Homo sapiens
  siRNA target sequence for MGC40397 (NM_152318.1,258-276).
cgggcaaatgaaaagctaa

SEQ ID NO: 415578 - DNA, 19 bp, Homo sapiens
  siRNA target sequence for MGC40397 (NM_152318.1,295-313).
caccacctggtcgtttcaa

SEQ ID NO: 415579 - DNA, 19 bp, Homo sapiens
  siRNA target sequence for MGC40397 (NM_152318.1,297-315).
ccacctggtcgtttcaata

SEQ ID NO: 415580 - DNA, 19 bp, Homo sapiens
  siRNA target sequence for MGC40397 (NM_152318.1,298-316).
cacctggtcgtttcaatat

SEQ ID NO: 415581 - DNA, 19 bp, Homo sapiens
  siRNA target sequence for MGC40397 (NM_152318.1,301-319).
ctggtcgtttcaatattga

SEQ ID NO: 415582 - DNA, 19 bp, Homo sapiens
  siRNA target sequence for MGC40397 (NM_152318.1,306-324).
cgtttcaatattgaaaaca

SEQ ID NO: 415583 - DNA, 19 bp, Homo sapiens
  siRNA target sequence for MGC40397 (NM_152318.1,323-341).
cattgatgggcctcatagt

SEQ ID NO: 415584 - DNA, 19 bp, Homo sapiens
  siRNA target sequence for MGC40397 (NM_152318.1,336-354).
catagtaaagttatacaaa

SEQ ID NO: 415585 - DNA, 19 bp, Homo sapiens
  siRNA target sequence for MGC40397 (NM_152318.1,357-375).
gatgtggctttgtttgaga

SEQ ID NO: 415586 - DNA, 19 bp, Homo sapiens
  siRNA target sequence for MGC40397 (NM_152318.1,377-395).
gaatcagtcggattcaaaa

SEQ ID NO: 415587 - DNA, 19 bp, Homo sapiens
  siRNA target sequence for MGC40397 (NM_152318.1,483-501).
gtcaccatagataacatta

SEQ ID NO: 415588 - DNA, 19 bp, Homo sapiens
  siRNA target sequence for MGC35033 (NM_152319.2,195-213).
gctgacagtttttaaggat

SEQ ID NO: 415589 - DNA, 19 bp, Homo sapiens
  siRNA target sequence for MGC35033 (NM_152319.2,310-328).
cctccagattccttgatga

SEQ ID NO: 415590 - DNA, 19 bp, Homo sapiens
  siRNA target sequence for MGC35169 (NM_152324.1,196-214).
gttcctctgtatgacattt

SEQ ID NO: 415591 - DNA, 19 bp, Homo sapiens
  siRNA target sequence for MGC35169 (NM_152324.1,505-523).
gctgggccctcgatgaaga

SEQ ID NO: 415592 - DNA, 19 bp, Homo sapiens
  siRNA target sequence for MGC35169 (NM_152324.1,528-546).
cgaggataaggatgatgta

SEQ ID NO: 415593 - DNA, 19 bp, Homo sapiens
  siRNA target sequence for MGC40178 (NM_152325.1,164-182).
cgccaaaacggtatcagaa

SEQ ID NO: 415594 - DNA, 19 bp, Homo sapiens
  siRNA target sequence for MGC40178 (NM_152325.1,172-190).
cggtatcagaagattagga

SEQ ID NO: 415595 - DNA, 19 bp, Homo sapiens
  siRNA target sequence for MGC40178 (NM_152325.1,174-192).
gtatcagaagattaggata

SEQ ID NO: 415596 - DNA, 19 bp, Homo sapiens
  siRNA target sequence for MGC40178 (NM_152325.1,188-206).
ggatatacatattcactta

SEQ ID NO: 415597 - DNA, 19 bp, Homo sapiens
  siRNA target sequence for MGC40178 (NM_152325.1,201-219).
cacttagtgatcctattct

SEQ ID NO: 415598 - DNA, 19 bp, Homo sapiens
  siRNA target sequence for MGC40178 (NM_152325.1,203-221).
cttagtgatcctattctca

SEQ ID NO: 415599 - DNA, 19 bp, Homo sapiens
  siRNA target sequence for MGC40178 (NM_152325.1,218-236).
ctcaatcagacacaatata

SEQ ID NO: 415600 - DNA, 19 bp, Homo sapiens
  siRNA target sequence for MGC40178 (NM_152325.1,239-257).
gatgagtacacttggaaat

SEQ ID NO: 415601 - DNA, 19 bp, Homo sapiens
  siRNA target sequence for MGC40178 (NM_152325.1,260-278).
cactctaaagaagatttga

SEQ ID NO: 415602 - DNA, 19 bp, Homo sapiens
  siRNA target sequence for MGC40178 (NM_152325.1,318-336).
ctcatctcaatgaagacat

SEQ ID NO: 415603 - DNA, 19 bp, Homo sapiens
  siRNA target sequence for MGC40178 (NM_152325.1,365-383).
caaacggggacactaaaga

SEQ ID NO: 415604 - DNA, 19 bp, Homo sapiens
  siRNA target sequence for MGC40178 (NM_152325.1,406-424).
ggcttcaatgaaagaagtt

SEQ ID NO: 415605 - DNA, 19 bp, Homo sapiens
  siRNA target sequence for MGC40178 (NM_152325.1,431-449).
gcactatcaaatcagttta

SEQ ID NO: 415606 - DNA, 19 bp, Homo sapiens
  siRNA target sequence for MGC40178 (NM_152325.1,432-450).
cactatcaaatcagtttat

SEQ ID NO: 415607 - DNA, 19 bp, Homo sapiens
  siRNA target sequence for MGC40178 (NM_152325.1,434-452).
ctatcaaatcagtttattt

SEQ ID NO: 415608 - DNA, 19 bp, Homo sapiens
  siRNA target sequence for MGC40178 (NM_152325.1,454-472).
ccttactaagagagacttt

SEQ ID NO: 415609 - DNA, 19 bp, Homo sapiens
  siRNA target sequence for MGC40178 (NM_152325.1,467-485).
gactttgtggacagatcaa

SEQ ID NO: 415610 - DNA, 19 bp, Homo sapiens
  siRNA target sequence for MGC40178 (NM_152325.1,556-574).
cactgaattccgaaggaat

SEQ ID NO: 415611 - DNA, 19 bp, Homo sapiens
  siRNA target sequence for MGC40178 (NM_152325.1,558-576).
ctgaattccgaaggaatta

SEQ ID NO: 415612 - DNA, 19 bp, Homo sapiens
  siRNA target sequence for MGC40178 (NM_152325.1,565-583).
ccgaaggaattaccaaatt

SEQ ID NO: 415613 - DNA, 19 bp, Homo sapiens
  siRNA target sequence for MGC40178 (NM_152325.1,712-730).
gaaacagaccacataccaa

SEQ ID NO: 415614 - DNA, 19 bp, Homo sapiens
  siRNA target sequence for MGC40178 (NM_152325.1,732-750).
gtgactacgacaaaaccta

SEQ ID NO: 415615 - DNA, 19 bp, Homo sapiens
  siRNA target sequence for MGC40178 (NM_152325.1,747-765).
cctacccagatttcttaat

SEQ ID NO: 415616 - DNA, 19 bp, Homo sapiens
  siRNA target sequence for AK7 (NM_152327.1,69-87).
gctctcacggagaaggtta

SEQ ID NO: 415617 - DNA, 19 bp, Homo sapiens
  siRNA target sequence for AK7 (NM_152327.1,70-88).
ctctcacggagaaggttat

SEQ ID NO: 415618 - DNA, 19 bp, Homo sapiens
  siRNA target sequence for AK7 (NM_152327.1,94-112).
cccagagggtgtttataaa

SEQ ID NO: 415619 - DNA, 19 bp, Homo sapiens
  siRNA target sequence for AK7 (NM_152327.1,124-142).
cctacagcagcggaaacat

SEQ ID NO: 415620 - DNA, 19 bp, Homo sapiens
  siRNA target sequence for AK7 (NM_152327.1,134-152).
cggaaacatcgggaagttt

SEQ ID NO: 415621 - DNA, 19 bp, Homo sapiens
  siRNA target sequence for AK7 (NM_152327.1,140-158).
catcgggaagtttctatct

SEQ ID NO: 415622 - DNA, 19 bp, Homo sapiens
  siRNA target sequence for AK7 (NM_152327.1,144-162).
gggaagtttctatctaact

SEQ ID NO: 415623 - DNA, 19 bp, Homo sapiens
  siRNA target sequence for AK7 (NM_152327.1,171-189).
ggggcttcgcttgaagaaa

SEQ ID NO: 415624 - DNA, 19 bp, Homo sapiens
  siRNA target sequence for AK7 (NM_152327.1,172-190).
gggcttcgcttgaagaaat

SEQ ID NO: 415625 - DNA, 19 bp, Homo sapiens
  siRNA target sequence for AK7 (NM_152327.1,368-386).
cctgctggagtgtgatgtt

SEQ ID NO: 415626 - DNA, 19 bp, Homo sapiens
  siRNA target sequence for AK7 (NM_152327.1,371-389).
gctggagtgtgatgttatt

SEQ ID NO: 415627 - DNA, 19 bp, Homo sapiens
  siRNA target sequence for AK7 (NM_152327.1,372-390).
ctggagtgtgatgttatta

SEQ ID NO: 415628 - DNA, 19 bp, Homo sapiens
  siRNA target sequence for AK7 (NM_152327.1,384-402).
gttattatttataacatca

SEQ ID NO: 415629 - DNA, 19 bp, Homo sapiens
  siRNA target sequence for AK7 (NM_152327.1,470-488).
ctttgaaaagcgaaagcta

SEQ ID NO: 415630 - DNA, 19 bp, Homo sapiens
  siRNA target sequence for AK7 (NM_152327.1,479-497).
gcgaaagctatttatttta

SEQ ID NO: 415631 - DNA, 19 bp, Homo sapiens
  siRNA target sequence for AK7 (NM_152327.1,498-516).
ctgtcgacggtgatgactt

SEQ ID NO: 415632 - DNA, 19 bp, Homo sapiens
  siRNA target sequence for AK7 (NM_152327.1,563-581).
cactgaagaagattatcga

SEQ ID NO: 415633 - DNA, 19 bp, Homo sapiens
  siRNA target sequence for AK7 (NM_152327.1,703-721).
cggaaggaggcatgttaca

SEQ ID NO: 415634 - DNA, 19 bp, Homo sapiens
  siRNA target sequence for AK7 (NM_152327.1,705-723).
gaaggaggcatgttacaca

SEQ ID NO: 415635 - DNA, 19 bp, Homo sapiens
  siRNA target sequence for AK7 (NM_152327.1,775-793).
gcgatggaacaaatgtaat

SEQ ID NO: 415636 - DNA, 19 bp, Homo sapiens
  siRNA target sequence for AK7 (NM_152327.1,776-794).
cgatggaacaaatgtaatt

SEQ ID NO: 415637 - DNA, 19 bp, Homo sapiens
  siRNA target sequence for AK7 (NM_152327.1,796-814).
caacaatccatgttcttga

SEQ ID NO: 415638 - DNA, 19 bp, Homo sapiens
  siRNA target sequence for AK7 (NM_152327.1,827-845).
gatacaaaacgtcatagat

SEQ ID NO: 415639 - DNA, 19 bp, Homo sapiens
  siRNA target sequence for AK7 (NM_152327.1,903-921).
gacatagtcaagtgtatca

SEQ ID NO: 415640 - DNA, 19 bp, Homo sapiens
  siRNA target sequence for AK7 (NM_152327.1,909-927).
gtcaagtgtatcagtaaaa

SEQ ID NO: 415641 - DNA, 19 bp, Homo sapiens
  siRNA target sequence for AK7 (NM_152327.1,914-932).
gtgtatcagtaaaaatact

SEQ ID NO: 415642 - DNA, 19 bp, Homo sapiens
  siRNA target sequence for AK7 (NM_152327.1,1007-1025).
ccatttactggtcaactta

SEQ ID NO: 415643 - DNA, 19 bp, Homo sapiens
  siRNA target sequence for AK7 (NM_152327.1,1008-1026).
catttactggtcaacttaa

SEQ ID NO: 415644 - DNA, 19 bp, Homo sapiens
  siRNA target sequence for AK7 (NM_152327.1,1016-1034).
ggtcaacttaagaatggaa

SEQ ID NO: 415645 - DNA, 19 bp, Homo sapiens
  siRNA target sequence for AK7 (NM_152327.1,1049-1067).
ggagaattttaatattcga

SEQ ID NO: 415646 - DNA, 19 bp, Homo sapiens
  siRNA target sequence for AK7 (NM_152327.1,1072-1090).
ctgcccaaacaggatttgt

SEQ ID NO: 415647 - DNA, 19 bp, Homo sapiens
  siRNA target sequence for AK7 (NM_152327.1,1132-1150).
gaggattgatgccaatcaa

SEQ ID NO: 415648 - DNA, 19 bp, Homo sapiens
  siRNA target sequence for AK7 (NM_152327.1,1135-1153).
gattgatgccaatcaagat

SEQ ID NO: 415649 - DNA, 19 bp, Homo sapiens
  siRNA target sequence for AK7 (NM_152327.1,1170-1188).
cctgctgtgggaaaatcca

SEQ ID NO: 415650 - DNA, 19 bp, Homo sapiens
  siRNA target sequence for AK7 (NM_152327.1,1186-1204).
ccagtattgctaaagaatt

SEQ ID NO: 415651 - DNA, 19 bp, Homo sapiens
  siRNA target sequence for AK7 (NM_152327.1,1233-1251).
caactgaaggatgtcattt

SEQ ID NO: 415652 - DNA, 19 bp, Homo sapiens
  siRNA target sequence for AK7 (NM_152327.1,1238-1256).
gaaggatgtcatttctgaa

SEQ ID NO: 415653 - DNA, 19 bp, Homo sapiens
  siRNA target sequence for AK7 (NM_152327.1,1252-1270).
ctgaagccatagcaaaact

SEQ ID NO: 415654 - DNA, 19 bp, Homo sapiens
  siRNA target sequence for AK7 (NM_152327.1,1277-1295).
gattgttgcccctaacgat

SEQ ID NO: 415655 - DNA, 19 bp, Homo sapiens
  siRNA target sequence for AK7 (NM_152327.1,1401-1419).
ggtcaactagacgatcaat

SEQ ID NO: 415656 - DNA, 19 bp, Homo sapiens
  siRNA target sequence for AK7 (NM_152327.1,1402-1420).
gtcaactagacgatcaata

SEQ ID NO: 415657 - DNA, 19 bp, Homo sapiens
  siRNA target sequence for AK7 (NM_152327.1,1404-1422).
caactagacgatcaatata

SEQ ID NO: 415658 - DNA, 19 bp, Homo sapiens
  siRNA target sequence for AK7 (NM_152327.1,1407-1425).
ctagacgatcaatatataa

SEQ ID NO: 415659 - DNA, 19 bp, Homo sapiens
  siRNA target sequence for AK7 (NM_152327.1,1413-1431).
gatcaatatataattagat

SEQ ID NO: 415660 - DNA, 19 bp, Homo sapiens
  siRNA target sequence for AK7 (NM_152327.1,1501-1519).
cctatgatcaagcaaaaga

SEQ ID NO: 415661 - DNA, 19 bp, Homo sapiens
  siRNA target sequence for AK7 (NM_152327.1,1513-1531).
caaaagacctgttcaatca

SEQ ID NO: 415662 - DNA, 19 bp, Homo sapiens
  siRNA target sequence for AK7 (NM_152327.1,1620-1638).
gcttcggatgagtttctga

SEQ ID NO: 415663 - DNA, 19 bp, Homo sapiens
  siRNA target sequence for AK7 (NM_152327.1,1640-1658).
ggagcgtgtgataaacctt

SEQ ID NO: 415664 - DNA, 19 bp, Homo sapiens
  siRNA target sequence for AK7 (NM_152327.1,1718-1736).
caactaccgggacatcaat

SEQ ID NO: 415665 - DNA, 19 bp, Homo sapiens
  siRNA target sequence for AK7 (NM_152327.1,1757-1775).
caactattttgatgaactt

SEQ ID NO: 415666 - DNA, 19 bp, Homo sapiens
  siRNA target sequence for AK7 (NM_152327.1,1776-1794).
gaaattcacccgatacata

SEQ ID NO: 415667 - DNA, 19 bp, Homo sapiens
  siRNA target sequence for AK7 (NM_152327.1,1784-1802).
cccgatacatattgatgta

SEQ ID NO: 415668 - DNA, 19 bp, Homo sapiens
  siRNA target sequence for AK7 (NM_152327.1,1819-1837).
ctcagaatagacttgctat

SEQ ID NO: 415669 - DNA, 19 bp, Homo sapiens
  siRNA target sequence for AK7 (NM_152327.1,1823-1841).
gaatagacttgctatcaaa

SEQ ID NO: 415670 - DNA, 19 bp, Homo sapiens
  siRNA target sequence for AK7 (NM_152327.1,1862-1880).
ggagcctcgaaattatggt

SEQ ID NO: 415671 - DNA, 19 bp, Homo sapiens
  siRNA target sequence for AK7 (NM_152327.1,1863-1881).
gagcctcgaaattatggtt

SEQ ID NO: 415672 - DNA, 19 bp, Homo sapiens
  siRNA target sequence for AK7 (NM_152327.1,1865-1883).
gcctcgaaattatggttta

SEQ ID NO: 415673 - DNA, 19 bp, Homo sapiens
  siRNA target sequence for AK7 (NM_152327.1,1866-1884).
cctcgaaattatggtttaa

SEQ ID NO: 415674 - DNA, 19 bp, Homo sapiens
  siRNA target sequence for AK7 (NM_152327.1,2009-2027).
ggaggagtggaataaacga

SEQ ID NO: 415675 - DNA, 19 bp, Homo sapiens
  siRNA target sequence for AK7 (NM_152327.1,2079-2097).
cccctgagaaactatttaa

SEQ ID NO: 415676 - DNA, 19 bp, Homo sapiens
  siRNA target sequence for AK7 (NM_152327.1,2155-2173).
ccgaagaccctgttgattt

SEQ ID NO: 415677 - DNA, 19 bp, Homo sapiens
  siRNA target sequence for AK7 (NM_152327.1,2156-2174).
cgaagaccctgttgatttt

SEQ ID NO: 415678 - DNA, 19 bp, Homo sapiens
  siRNA target sequence for PPIL5 (NM_152329.2,461-479).
gcaattcttcaccaaattt

SEQ ID NO: 415679 - DNA, 19 bp, Homo sapiens
  siRNA target sequence for PPIL5 (NM_152329.2,496-514).
ccactgttcggttaaagga

SEQ ID NO: 415680 - DNA, 19 bp, Homo sapiens
  siRNA target sequence for PPIL5 (NM_152329.2,515-533).
gcctcctgtggatatctgt

SEQ ID NO: 415681 - DNA, 19 bp, Homo sapiens
  siRNA target sequence for PPIL5 (NM_152329.2,522-540).
gtggatatctgtctaagta

SEQ ID NO: 415682 - DNA, 19 bp, Homo sapiens
  siRNA target sequence for PPIL5 (NM_152329.2,532-550).
gtctaagtaaggattccat

SEQ ID NO: 415683 - DNA, 19 bp, Homo sapiens
  siRNA target sequence for PPIL5 (NM_152329.2,534-552).
ctaagtaaggattccatat

SEQ ID NO: 415684 - DNA, 19 bp, Homo sapiens
  siRNA target sequence for PPIL5 (NM_152329.2,548-566).
catatggctctcatatcat

SEQ ID NO: 415685 - DNA, 19 bp, Homo sapiens
  siRNA target sequence for PPIL5 (NM_152329.2,553-571).
ggctctcatatcattccat

SEQ ID NO: 415686 - DNA, 19 bp, Homo sapiens
  siRNA target sequence for PPIL5 (NM_152329.2,554-572).
gctctcatatcattccatt

SEQ ID NO: 415687 - DNA, 19 bp, Homo sapiens
  siRNA target sequence for PPIL5 (NM_152329.2,591-609).
ggataccgcaaaaatttgt

SEQ ID NO: 415688 - DNA, 19 bp, Homo sapiens
  siRNA target sequence for PPIL5 (NM_152329.2,624-642).
ctgtctgaactctttcatt

SEQ ID NO: 415689 - DNA, 19 bp, Homo sapiens
  siRNA target sequence for PPIL5 (NM_152329.2,647-665).
gaactactaccatgaatct

SEQ ID NO: 415690 - DNA, 19 bp, Homo sapiens
  siRNA target sequence for PPIL5 (NM_152329.2,681-699).
cactgtggtcttagtagat

SEQ ID NO: 415691 - DNA, 19 bp, Homo sapiens
  siRNA target sequence for PTE2B (NM_152331.1,276-294).
gaacccgagaagccttttt

SEQ ID NO: 415692 - DNA, 19 bp, Homo sapiens
  siRNA target sequence for PTE2B (NM_152331.1,811-829).
cagccatcaactataagca

SEQ ID NO: 415693 - DNA, 19 bp, Homo sapiens
  siRNA target sequence for PTE2B (NM_152331.1,821-839).
ctataagcacagtagcatt

SEQ ID NO: 415694 - DNA, 19 bp, Homo sapiens
  siRNA target sequence for C14orf69 (NM_152333.1,651-669).
ccagcttcggcgtctactt

SEQ ID NO: 415695 - DNA, 19 bp, Homo sapiens
  siRNA target sequence for FLJ38190 (NM_152335.1,680-698).
ggtgaagagggtcattgat

SEQ ID NO: 415696 - DNA, 19 bp, Homo sapiens
  siRNA target sequence for FLJ38190 (NM_152335.1,918-936).
cgcagccgcttcaaagtgt

SEQ ID NO: 415697 - DNA, 19 bp, Homo sapiens
  siRNA target sequence for FLJ38190 (NM_152335.1,1031-1049).
cagctacatcagtcagtat

SEQ ID NO: 415698 - DNA, 19 bp, Homo sapiens
  siRNA target sequence for FLJ38190 (NM_152335.1,1517-1535).
ggagggcttcactgtcttt

SEQ ID NO: 415699 - DNA, 19 bp, Homo sapiens
  siRNA target sequence for FLJ32702 (NM_152337.1,206-224).
gaaaaatgagactgactta

SEQ ID NO: 415700 - DNA, 19 bp, Homo sapiens
  siRNA target sequence for FLJ32702 (NM_152337.1,251-269).
gttcacagaagaaacagaa

SEQ ID NO: 415701 - DNA, 19 bp, Homo sapiens
  siRNA target sequence for FLJ32702 (NM_152337.1,324-342).
ctcgatgtcagtgacatta

SEQ ID NO: 415702 - DNA, 19 bp, Homo sapiens
  siRNA target sequence for FLJ32702 (NM_152337.1,334-352).
gtgacattacgcttgaaca

SEQ ID NO: 415703 - DNA, 19 bp, Homo sapiens
  siRNA target sequence for FLJ32702 (NM_152337.1,338-356).
cattacgcttgaacaagat

SEQ ID NO: 415704 - DNA, 19 bp, Homo sapiens
  siRNA target sequence for FLJ32702 (NM_152337.1,365-383).
caaagagtttattattgga

SEQ ID NO: 415705 - DNA, 19 bp, Homo sapiens
  siRNA target sequence for FLJ32702 (NM_152337.1,437-455).
catctggccgaggaagata

SEQ ID NO: 415706 - DNA, 19 bp, Homo sapiens
  siRNA target sequence for FLJ32702 (NM_152337.1,496-514).
gcttggtgtgtgttaacct

SEQ ID NO: 415707 - DNA, 19 bp, Homo sapiens
  siRNA target sequence for FLJ32702 (NM_152337.1,656-674).
ctttcgagcagagaaaaaa

SEQ ID NO: 415708 - DNA, 19 bp, Homo sapiens
  siRNA target sequence for FLJ32702 (NM_152337.1,678-696).
ctgcaaatcaaggagttta

SEQ ID NO: 415709 - DNA, 19 bp, Homo sapiens
  siRNA target sequence for FLJ32702 (NM_152337.1,681-699).
caaatcaaggagtttattt

SEQ ID NO: 415710 - DNA, 19 bp, Homo sapiens
  siRNA target sequence for FLJ32702 (NM_152337.1,847-865).
caaatgctttggatgttct

SEQ ID NO: 415711 - DNA, 19 bp, Homo sapiens
  siRNA target sequence for FLJ32702 (NM_152337.1,1182-1200).
ggagtgcaaagctacaaat

SEQ ID NO: 415712 - DNA, 19 bp, Homo sapiens
  siRNA target sequence for ZG16 (NM_152338.1,78-96).
ctcctatagtggagagtat

SEQ ID NO: 415713 - DNA, 19 bp, Homo sapiens
  siRNA target sequence for ZG16 (NM_152338.1,109-127).
ggaaagcgattctctcatt

SEQ ID NO: 415714 - DNA, 19 bp, Homo sapiens
  siRNA target sequence for ZG16 (NM_152338.1,164-182).
gggtccgagtcaacacata

SEQ ID NO: 415715 - DNA, 19 bp, Homo sapiens
  siRNA target sequence for ZG16 (NM_152338.1,166-184).
gtccgagtcaacacatact

SEQ ID NO: 415716 - DNA, 19 bp, Homo sapiens
  siRNA target sequence for ZG16 (NM_152338.1,295-313).
gtttctgggaagtacaagt

SEQ ID NO: 415717 - DNA, 19 bp, Homo sapiens
  siRNA target sequence for ZG16 (NM_152338.1,375-393).
cagtggcacaagtttcaat

SEQ ID NO: 415718 - DNA, 19 bp, Homo sapiens
  siRNA target sequence for MGC26885 (NM_152339.2,858-876).
gagcagagtgccaaactgt

SEQ ID NO: 415719 - DNA, 19 bp, Homo sapiens
  siRNA target sequence for MGC26885 (NM_152339.2,1089-1107).
ccagcctcagcctataggt

SEQ ID NO: 415720 - DNA, 19 bp, Homo sapiens
  siRNA target sequence for FLJ25414 (NM_152343.1,155-173).
cagagatgcgagatgactt

SEQ ID NO: 415721 - DNA, 19 bp, Homo sapiens
  siRNA target sequence for FLJ25414 (NM_152343.1,157-175).
gagatgcgagatgacttaa

SEQ ID NO: 415722 - DNA, 19 bp, Homo sapiens
  siRNA target sequence for FLJ25414 (NM_152343.1,159-177).
gatgcgagatgacttaagt

SEQ ID NO: 415723 - DNA, 19 bp, Homo sapiens
  siRNA target sequence for FLJ25414 (NM_152343.1,162-180).
gcgagatgacttaagtcaa

SEQ ID NO: 415724 - DNA, 19 bp, Homo sapiens
  siRNA target sequence for FLJ25414 (NM_152343.1,176-194).
gtcaacaccagatacaaga

SEQ ID NO: 415725 - DNA, 19 bp, Homo sapiens
  siRNA target sequence for FLJ25414 (NM_152343.1,621-639).
caacatgcagctcaacaat

SEQ ID NO: 415726 - DNA, 19 bp, Homo sapiens
  siRNA target sequence for FLJ25414 (NM_152343.1,1038-1056).
caagaacttcgctcaatct

SEQ ID NO: 415727 - DNA, 19 bp, Homo sapiens
  siRNA target sequence for FLJ25414 (NM_152343.1,1044-1062).
cttcgctcaatcttacttt

SEQ ID NO: 415728 - DNA, 19 bp, Homo sapiens
  siRNA target sequence for FLJ25414 (NM_152343.1,1048-1066).
gctcaatcttactttgact

SEQ ID NO: 415729 - DNA, 19 bp, Homo sapiens
  siRNA target sequence for FLJ25414 (NM_152343.1,1049-1067).
ctcaatcttactttgactt

SEQ ID NO: 415730 - DNA, 19 bp, Homo sapiens
  siRNA target sequence for FLJ25414 (NM_152343.1,1168-1186).
gtgccgccaggaaaagaga

SEQ ID NO: 415731 - DNA, 19 bp, Homo sapiens
  siRNA target sequence for FLJ25414 (NM_152343.1,1231-1249).
cccacaatcccagagaaat

SEQ ID NO: 415732 - DNA, 19 bp, Homo sapiens
  siRNA target sequence for FLJ25555 (NM_152345.3,604-622).
ccctagtgacacctacaaa

SEQ ID NO: 415733 - DNA, 19 bp, Homo sapiens
  siRNA target sequence for FLJ25555 (NM_152345.3,606-624).
ctagtgacacctacaaagt

SEQ ID NO: 415734 - DNA, 19 bp, Homo sapiens
  siRNA target sequence for FLJ25555 (NM_152345.3,695-713).
gggaaccgcagctttgtct

SEQ ID NO: 415735 - DNA, 19 bp, Homo sapiens
  siRNA target sequence for FLJ25555 (NM_152345.3,884-902).
cagcttgacaccaagaata

SEQ ID NO: 415736 - DNA, 19 bp, Homo sapiens
  siRNA target sequence for FLJ25555 (NM_152345.3,935-953).
ggctggcgcagtgaaaaga

SEQ ID NO: 415737 - DNA, 19 bp, Homo sapiens
  siRNA target sequence for FLJ25555 (NM_152345.3,1015-1033).
ccgcacacggacagaacat

SEQ ID NO: 415738 - DNA, 19 bp, Homo sapiens
  siRNA target sequence for FLJ25555 (NM_152345.3,1017-1035).
gcacacggacagaacatct

SEQ ID NO: 415739 - DNA, 19 bp, Homo sapiens
  siRNA target sequence for FLJ25555 (NM_152345.3,1018-1036).
cacacggacagaacatctt

SEQ ID NO: 415740 - DNA, 19 bp, Homo sapiens
  siRNA target sequence for FLJ25555 (NM_152345.3,1401-1419).
gcttcccagttaagattga

SEQ ID NO: 415741 - DNA, 19 bp, Homo sapiens
  siRNA target sequence for FLJ25555 (NM_152345.3,1402-1420).
cttcccagttaagattgaa

SEQ ID NO: 415742 - DNA, 19 bp, Homo sapiens
  siRNA target sequence for MGC34680 (NM_152346.1,238-256).
gtaccgagccagagaatgt

SEQ ID NO: 415743 - DNA, 19 bp, Homo sapiens
  siRNA target sequence for MGC34680 (NM_152346.1,338-356).
ccaggacgagatgctaaat

SEQ ID NO: 415744 - DNA, 19 bp, Homo sapiens
  siRNA target sequence for MGC34680 (NM_152346.1,339-357).
caggacgagatgctaaatt

SEQ ID NO: 415745 - DNA, 19 bp, Homo sapiens
  siRNA target sequence for MGC34680 (NM_152346.1,491-509).
gtacggagcaagtaaacca

SEQ ID NO: 415746 - DNA, 19 bp, Homo sapiens
  siRNA target sequence for MGC34680 (NM_152346.1,514-532).
ctctctccgtgctcatctt

SEQ ID NO: 415747 - DNA, 19 bp, Homo sapiens
  siRNA target sequence for MGC34680 (NM_152346.1,516-534).
ctctccgtgctcatcttca

SEQ ID NO: 415748 - DNA, 19 bp, Homo sapiens
  siRNA target sequence for MGC34680 (NM_152346.1,552-570).
ggctttggtgggatgtgta

SEQ ID NO: 415749 - DNA, 19 bp, Homo sapiens
  siRNA target sequence for MGC34680 (NM_152346.1,553-571).
gctttggtgggatgtgtat

SEQ ID NO: 415750 - DNA, 19 bp, Homo sapiens
  siRNA target sequence for MGC34680 (NM_152346.1,574-592).
ccttcacctcattaacact

SEQ ID NO: 415751 - DNA, 19 bp, Homo sapiens
  siRNA target sequence for MGC34680 (NM_152346.1,609-627).
gaccttcggtccacgttta

SEQ ID NO: 415752 - DNA, 19 bp, Homo sapiens
  siRNA target sequence for MGC34680 (NM_152346.1,611-629).
ccttcggtccacgtttatt

SEQ ID NO: 415753 - DNA, 19 bp, Homo sapiens
  siRNA target sequence for MGC34680 (NM_152346.1,739-757).
gctccgggctggttttcct

SEQ ID NO: 415754 - DNA, 19 bp, Homo sapiens
  siRNA target sequence for MGC34680 (NM_152346.1,1462-1480).
caatcgtgcgaggattcat

SEQ ID NO: 415755 - DNA, 19 bp, Homo sapiens
  siRNA target sequence for FLJ33817 (NM_152348.1,717-735).
cagaagatcctccttgata

SEQ ID NO: 415756 - DNA, 19 bp, Homo sapiens
  siRNA target sequence for FLJ33817 (NM_152348.1,719-737).
gaagatcctccttgataca

SEQ ID NO: 415757 - DNA, 19 bp, Homo sapiens
  siRNA target sequence for FLJ33817 (NM_152348.1,816-834).
cgcctgctgacgtcttgtt

SEQ ID NO: 415758 - DNA, 19 bp, Homo sapiens
  siRNA target sequence for FLJ33817 (NM_152348.1,817-835).
gcctgctgacgtcttgtta

SEQ ID NO: 415759 - DNA, 19 bp, Homo sapiens
  siRNA target sequence for FLJ33817 (NM_152348.1,818-836).
cctgctgacgtcttgttat

SEQ ID NO: 415760 - DNA, 19 bp, Homo sapiens
  siRNA target sequence for FLJ33817 (NM_152348.1,821-839).
gctgacgtcttgttatgtt

SEQ ID NO: 415761 - DNA, 19 bp, Homo sapiens
  siRNA target sequence for FLJ33817 (NM_152348.1,1105-1123).
cgctgactcagaagatcat

SEQ ID NO: 415762 - DNA, 19 bp, Homo sapiens
  siRNA target sequence for FLJ33817 (NM_152348.1,1512-1530).
gagatggcatacacaatct

SEQ ID NO: 415763 - DNA, 19 bp, Homo sapiens
  siRNA target sequence for FLJ33817 (NM_152348.1,2085-2103).
ctctggccgctgtacaact

SEQ ID NO: 415764 - DNA, 19 bp, Homo sapiens
  siRNA target sequence for MGC40157 (NM_152350.1,134-152).
ggagggcagctgttgagat

SEQ ID NO: 415765 - DNA, 19 bp, Homo sapiens
  siRNA target sequence for MGC40157 (NM_152350.1,412-430).
gtagccacgaggttgcaaa

SEQ ID NO: 415766 - DNA, 19 bp, Homo sapiens
  siRNA target sequence for MGC40157 (NM_152350.1,426-444).
gcaaattcgtgaagaatca

SEQ ID NO: 415767 - DNA, 19 bp, Homo sapiens
  siRNA target sequence for MGC24180 (NM_152352.1,482-500).
gtaaagggacctttacttt

SEQ ID NO: 415768 - DNA, 19 bp, Homo sapiens
  siRNA target sequence for MGC24180 (NM_152352.1,488-506).
ggacctttacttttataca

SEQ ID NO: 415769 - DNA, 19 bp, Homo sapiens
  siRNA target sequence for MGC24180 (NM_152352.1,489-507).
gacctttacttttatacaa

SEQ ID NO: 415770 - DNA, 19 bp, Homo sapiens
  siRNA target sequence for MGC24180 (NM_152352.1,572-590).
cagtgtgttgcaaaggaaa

SEQ ID NO: 415771 - DNA, 19 bp, Homo sapiens
  siRNA target sequence for MGC24180 (NM_152352.1,586-604).
ggaaaggaggccattggat

SEQ ID NO: 415772 - DNA, 19 bp, Homo sapiens
  siRNA target sequence for MGC24180 (NM_152352.1,624-642).
gagtccttcgccataagca

SEQ ID NO: 415773 - DNA, 19 bp, Homo sapiens
  siRNA target sequence for MGC24180 (NM_152352.1,729-747).
ctttgcaagacaaatctat

SEQ ID NO: 415774 - DNA, 19 bp, Homo sapiens
  siRNA target sequence for MGC24180 (NM_152352.1,750-768).
gtctttatcaacgattcaa

SEQ ID NO: 415775 - DNA, 19 bp, Homo sapiens
  siRNA target sequence for MGC24180 (NM_152352.1,752-770).
ctttatcaacgattcaaga

SEQ ID NO: 415776 - DNA, 19 bp, Homo sapiens
  siRNA target sequence for MGC24180 (NM_152352.1,780-798).
gacagtatggaaaagttct

SEQ ID NO: 415777 - DNA, 19 bp, Homo sapiens
  siRNA target sequence for MGC24180 (NM_152352.1,799-817).
gattccagtgcatctaata

SEQ ID NO: 415778 - DNA, 19 bp, Homo sapiens
  siRNA target sequence for MGC24180 (NM_152352.1,855-873).
ccttgaaaggagtgaatgt

SEQ ID NO: 415779 - DNA, 19 bp, Homo sapiens
  siRNA target sequence for MGC24180 (NM_152352.1,903-921).
ctgacagtgtggtaagcat

SEQ ID NO: 415780 - DNA, 19 bp, Homo sapiens
  siRNA target sequence for MGC24180 (NM_152352.1,956-974).
gcatatgccttgtttaaga

SEQ ID NO: 415781 - DNA, 19 bp, Homo sapiens
  siRNA target sequence for MGC24180 (NM_152352.1,962-980).
gccttgtttaagattgcaa

SEQ ID NO: 415782 - DNA, 19 bp, Homo sapiens
  siRNA target sequence for MGC24180 (NM_152352.1,987-1005).
ctcggtataccgtgacttt

SEQ ID NO: 415783 - DNA, 19 bp, Homo sapiens
  siRNA target sequence for MGC24180 (NM_152352.1,1014-1032).
catctgtcactgtgaagta

SEQ ID NO: 415784 - DNA, 19 bp, Homo sapiens
  siRNA target sequence for MGC24180 (NM_152352.1,1037-1055).
cgcagtcatggctacatgt

SEQ ID NO: 415785 - DNA, 19 bp, Homo sapiens
  siRNA target sequence for MGC24180 (NM_152352.1,1065-1083).
cacccgtcaaggagtatct

SEQ ID NO: 415786 - DNA, 19 bp, Homo sapiens
  siRNA target sequence for MGC24180 (NM_152352.1,1102-1120).
gacaaaggagcttatcaca

SEQ ID NO: 415787 - DNA, 19 bp, Homo sapiens
  siRNA target sequence for MGC24180 (NM_152352.1,1146-1164).
gactcactgaaaagttaca

SEQ ID NO: 415788 - DNA, 19 bp, Homo sapiens
  siRNA target sequence for MGC33947 (NM_152358.1,144-162).
gcatggaggggcctttctt

SEQ ID NO: 415789 - DNA, 19 bp, Homo sapiens
  siRNA target sequence for MGC33947 (NM_152358.1,218-236).
cttgtggcgtcctttgtca

SEQ ID NO: 415790 - DNA, 19 bp, Homo sapiens
  siRNA target sequence for MGC33947 (NM_152358.1,259-277).
gggtaactctctgaaagat

SEQ ID NO: 415791 - DNA, 19 bp, Homo sapiens
  siRNA target sequence for MGC33947 (NM_152358.1,303-321).
ccctcagggcgaatgtgat

SEQ ID NO: 415792 - DNA, 19 bp, Homo sapiens
  siRNA target sequence for MGC33947 (NM_152358.1,381-399).
gccgcttgctaaaagaaga

SEQ ID NO: 415793 - DNA, 19 bp, Homo sapiens
  siRNA target sequence for MGC33947 (NM_152358.1,400-418).
ggtgttggactgtttacat

SEQ ID NO: 415794 - DNA, 19 bp, Homo sapiens
  siRNA target sequence for MGC33947 (NM_152358.1,426-444).
ggatcactcccaagtgtat

SEQ ID NO: 415795 - DNA, 19 bp, Homo sapiens
  siRNA target sequence for MGC33947 (NM_152358.1,434-452).
cccaagtgtatccacaaaa

SEQ ID NO: 415796 - DNA, 19 bp, Homo sapiens
  siRNA target sequence for MGC33947 (NM_152358.1,583-601).
cgtggtctcggcttgtaca

SEQ ID NO: 415797 - DNA, 19 bp, Homo sapiens
  siRNA target sequence for MGC33947 (NM_152358.1,584-602).
gtggtctcggcttgtacat

SEQ ID NO: 415798 - DNA, 19 bp, Homo sapiens
  siRNA target sequence for MGC33947 (NM_152358.1,587-605).
gtctcggcttgtacataca

SEQ ID NO: 415799 - DNA, 19 bp, Homo sapiens
  siRNA target sequence for MGC33947 (NM_152358.1,589-607).
ctcggcttgtacatacaga

SEQ ID NO: 415800 - DNA, 19 bp, Homo sapiens
  siRNA target sequence for MGC33947 (NM_152358.1,593-611).
gcttgtacatacagacaaa

SEQ ID NO: 415801 - DNA, 19 bp, Homo sapiens
  siRNA target sequence for MGC33947 (NM_152358.1,594-612).
cttgtacatacagacaaaa

SEQ ID NO: 415802 - DNA, 19 bp, Homo sapiens
  siRNA target sequence for FLJ38944 (NM_152361.1,301-319).
gcagctcgctttcttagaa

SEQ ID NO: 415803 - DNA, 19 bp, Homo sapiens
  siRNA target sequence for FLJ38944 (NM_152361.1,304-322).
gctcgctttcttagaaatt

SEQ ID NO: 415804 - DNA, 19 bp, Homo sapiens
  siRNA target sequence for FLJ38944 (NM_152361.1,305-323).
ctcgctttcttagaaatta

SEQ ID NO: 415805 - DNA, 19 bp, Homo sapiens
  siRNA target sequence for FLJ38944 (NM_152361.1,352-370).
ggatggtagctccatgatt

SEQ ID NO: 415806 - DNA, 19 bp, Homo sapiens
  siRNA target sequence for FLJ38944 (NM_152361.1,363-381).
ccatgattccggtcagatt

SEQ ID NO: 415807 - DNA, 19 bp, Homo sapiens
  siRNA target sequence for FLJ38944 (NM_152361.1,364-382).
catgattccggtcagatta

SEQ ID NO: 415808 - DNA, 19 bp, Homo sapiens
  siRNA target sequence for FLJ38944 (NM_152361.1,378-396).
gattactacgggatttcga

SEQ ID NO: 415809 - DNA, 19 bp, Homo sapiens
  siRNA target sequence for MGC17791 (NM_152362.1,144-162).
ctctgcaggcgcagaagaa

SEQ ID NO: 415810 - DNA, 19 bp, Homo sapiens
  siRNA target sequence for FLJ34633 (NM_152365.1,170-188).
ggagacatatgataaacca

SEQ ID NO: 415811 - DNA, 19 bp, Homo sapiens
  siRNA target sequence for FLJ34633 (NM_152365.1,255-273).
gagagcattaccttcatct

SEQ ID NO: 415812 - DNA, 19 bp, Homo sapiens
  siRNA target sequence for FLJ34633 (NM_152365.1,568-586).
gctaccccgatgttaagct

SEQ ID NO: 415813 - DNA, 19 bp, Homo sapiens
  siRNA target sequence for FLJ34633 (NM_152365.1,721-739).
gtggctccgaggagtacta

SEQ ID NO: 415814 - DNA, 19 bp, Homo sapiens
  siRNA target sequence for FLJ34633 (NM_152365.1,727-745).
ccgaggagtactattcttt

SEQ ID NO: 415815 - DNA, 19 bp, Homo sapiens
  siRNA target sequence for FLJ34633 (NM_152365.1,788-806).
catgtcgagccgagaaatt

SEQ ID NO: 415816 - DNA, 19 bp, Homo sapiens
  siRNA target sequence for FLJ34633 (NM_152365.1,791-809).
gtcgagccgagaaattgat

SEQ ID NO: 415817 - DNA, 19 bp, Homo sapiens
  siRNA target sequence for FLJ34633 (NM_152365.1,793-811).
cgagccgagaaattgatgt

SEQ ID NO: 415818 - DNA, 19 bp, Homo sapiens
  siRNA target sequence for FLJ34633 (NM_152365.1,897-915).
gagaagaccagtaagatct

SEQ ID NO: 415819 - DNA, 19 bp, Homo sapiens
  siRNA target sequence for FLJ34633 (NM_152365.1,907-925).
gtaagatctcggaccttat

SEQ ID NO: 415820 - DNA, 19 bp, Homo sapiens
  siRNA target sequence for FLJ34633 (NM_152365.1,977-995).
cctggtacgcggcatcatt

SEQ ID NO: 415821 - DNA, 19 bp, Homo sapiens
  siRNA target sequence for FLJ34633 (NM_152365.1,986-1004).
cggcatcattcgcattagt

SEQ ID NO: 415822 - DNA, 19 bp, Homo sapiens
  siRNA target sequence for FLJ34633 (NM_152365.1,987-1005).
ggcatcattcgcattagta

SEQ ID NO: 415823 - DNA, 19 bp, Homo sapiens
  siRNA target sequence for FLJ34633 (NM_152365.1,1034-1052).
ctcggagggtcgttcaact

SEQ ID NO: 415824 - DNA, 19 bp, Homo sapiens
  siRNA target sequence for MGC33338 (NM_152366.2,242-260).
gctagagctttccattcat

SEQ ID NO: 415825 - DNA, 19 bp, Homo sapiens
  siRNA target sequence for MGC33338 (NM_152366.2,327-345).
gcagcgatacggtggtttt

SEQ ID NO: 415826 - DNA, 19 bp, Homo sapiens
  siRNA target sequence for MGC33338 (NM_152366.2,330-348).
gcgatacggtggttttcga

SEQ ID NO: 415827 - DNA, 19 bp, Homo sapiens
  siRNA target sequence for MGC33338 (NM_152366.2,357-375).
ggggccaggccgtacgatt

SEQ ID NO: 415828 - DNA, 19 bp, Homo sapiens
  siRNA target sequence for FLJ38716 (NM_152367.1,274-292).
ccttactgtgggagactta

SEQ ID NO: 415829 - DNA, 19 bp, Homo sapiens
  siRNA target sequence for FLJ38716 (NM_152367.1,281-299).
gtgggagacttagaagatt

SEQ ID NO: 415830 - DNA, 19 bp, Homo sapiens
  siRNA target sequence for FLJ38716 (NM_152367.1,293-311).
gaagattgcctactgaata

SEQ ID NO: 415831 - DNA, 19 bp, Homo sapiens
  siRNA target sequence for FLJ38716 (NM_152367.1,358-376).
gcagaaagtcgttcatcat

SEQ ID NO: 415832 - DNA, 19 bp, Homo sapiens
  siRNA target sequence for FLJ38716 (NM_152367.1,393-411).
gcaaccaagacattagatt

SEQ ID NO: 415833 - DNA, 19 bp, Homo sapiens
  siRNA target sequence for FLJ38716 (NM_152367.1,394-412).
caaccaagacattagattt

SEQ ID NO: 415834 - DNA, 19 bp, Homo sapiens
  siRNA target sequence for FLJ38716 (NM_152367.1,397-415).
ccaagacattagatttcaa

SEQ ID NO: 415835 - DNA, 19 bp, Homo sapiens
  siRNA target sequence for FLJ38716 (NM_152367.1,476-494).
ctcgtcacagtcccaataa

SEQ ID NO: 415836 - DNA, 19 bp, Homo sapiens
  siRNA target sequence for FLJ38716 (NM_152367.1,478-496).
cgtcacagtcccaataaaa

SEQ ID NO: 415837 - DNA, 19 bp, Homo sapiens
  siRNA target sequence for FLJ38716 (NM_152367.1,527-545).
cagcactggcggtactaca

SEQ ID NO: 415838 - DNA, 19 bp, Homo sapiens
  siRNA target sequence for FLJ38716 (NM_152367.1,658-676).
gaacatcgacggagacatt

SEQ ID NO: 415839 - DNA, 19 bp, Homo sapiens
  siRNA target sequence for FLJ38716 (NM_152367.1,784-802).
ggttgctgtggaaacatct

SEQ ID NO: 415840 - DNA, 19 bp, Homo sapiens
  siRNA target sequence for FLJ38716 (NM_152367.1,947-965).
gcctgttcaaattatcact

SEQ ID NO: 415841 - DNA, 19 bp, Homo sapiens
  siRNA target sequence for FLJ38716 (NM_152367.1,1025-1043).
ggctgccgtaggaagtgtt

SEQ ID NO: 415842 - DNA, 19 bp, Homo sapiens
  siRNA target sequence for FLJ38716 (NM_152367.1,1026-1044).
gctgccgtaggaagtgttt

SEQ ID NO: 415843 - DNA, 19 bp, Homo sapiens
  siRNA target sequence for FLJ38716 (NM_152367.1,1118-1136).
cagactgtgctcttttgga

SEQ ID NO: 415844 - DNA, 19 bp, Homo sapiens
  siRNA target sequence for FLJ38716 (NM_152367.1,1224-1242).
gccagcacttcctgaaaca

SEQ ID NO: 415845 - DNA, 19 bp, Homo sapiens
  siRNA target sequence for MGC45474 (NM_152369.2,248-266).
cacgtgttctttatgaatt

SEQ ID NO: 415846 - DNA, 19 bp, Homo sapiens
  siRNA target sequence for MGC45474 (NM_152369.2,302-320).
cgcatggccctctgtgtat

SEQ ID NO: 415847 - DNA, 19 bp, Homo sapiens
  siRNA target sequence for MGC45474 (NM_152369.2,352-370).
ggaagaggtccagttcttt

SEQ ID NO: 415848 - DNA, 19 bp, Homo sapiens
  siRNA target sequence for MGC45474 (NM_152369.2,356-374).
gaggtccagttctttgcaa

SEQ ID NO: 415849 - DNA, 19 bp, Homo sapiens
  siRNA target sequence for MGC45474 (NM_152369.2,421-439).
ctatacccacagtccaaaa

SEQ ID NO: 415850 - DNA, 19 bp, Homo sapiens
  siRNA target sequence for MGC45474 (NM_152369.2,499-517).
ccgatgtgtccctcaaaca

SEQ ID NO: 415851 - DNA, 19 bp, Homo sapiens
  siRNA target sequence for MGC45474 (NM_152369.2,523-541).
gtgctactccctatttgca

SEQ ID NO: 415852 - DNA, 19 bp, Homo sapiens
  siRNA target sequence for MGC45474 (NM_152369.2,565-583).
caccctccaccgaattcta

SEQ ID NO: 415853 - DNA, 19 bp, Homo sapiens
  siRNA target sequence for MGC45474 (NM_152369.2,568-586).
cctccaccgaattctaagt

SEQ ID NO: 415854 - DNA, 19 bp, Homo sapiens
  siRNA target sequence for MGC45474 (NM_152369.2,576-594).
gaattctaagtggaatcat

SEQ ID NO: 415855 - DNA, 19 bp, Homo sapiens
  siRNA target sequence for MGC45474 (NM_152369.2,592-610).
catgtcgggaagagataca

SEQ ID NO: 415856 - DNA, 19 bp, Homo sapiens
  siRNA target sequence for MGC45474 (NM_152369.2,609-627).
caatccttggcctgtgtat

SEQ ID NO: 415857 - DNA, 19 bp, Homo sapiens
  siRNA target sequence for MGC45474 (NM_152369.2,731-749).
gtctgcggtgttttatggt

SEQ ID NO: 415858 - DNA, 19 bp, Homo sapiens
  siRNA target sequence for MGC45474 (NM_152369.2,748-766).
gtggctgtattatgactat

SEQ ID NO: 415859 - DNA, 19 bp, Homo sapiens
  siRNA target sequence for MGC45474 (NM_152369.2,752-770).
ctgtattatgactatacca

SEQ ID NO: 415860 - DNA, 19 bp, Homo sapiens
  siRNA target sequence for MGC45474 (NM_152369.2,820-838).
gctggggtttgctatcgta

SEQ ID NO: 415861 - DNA, 19 bp, Homo sapiens
  siRNA target sequence for MGC45474 (NM_152369.2,821-839).
ctggggtttgctatcgtat

SEQ ID NO: 415862 - DNA, 19 bp, Homo sapiens
  siRNA target sequence for MGC45474 (NM_152369.2,855-873).
cagtgctgctcgtcttgat

SEQ ID NO: 415863 - DNA, 19 bp, Homo sapiens
  siRNA target sequence for MGC45474 (NM_152369.2,857-875).
gtgctgctcgtcttgattt

SEQ ID NO: 415864 - DNA, 19 bp, Homo sapiens
  siRNA target sequence for MGC45474 (NM_152369.2,859-877).
gctgctcgtcttgattttt

SEQ ID NO: 415865 - DNA, 19 bp, Homo sapiens
  siRNA target sequence for MGC45474 (NM_152369.2,862-880).
gctcgtcttgatttttgtt

SEQ ID NO: 415866 - DNA, 19 bp, Homo sapiens
  siRNA target sequence for MGC45474 (NM_152369.2,878-896).
gttctcagaaagagaataa

SEQ ID NO: 415867 - DNA, 19 bp, Homo sapiens
  siRNA target sequence for MGC45474 (NM_152369.2,901-919).
gacagttgagcttttccaa

SEQ ID NO: 415868 - DNA, 19 bp, Homo sapiens
  siRNA target sequence for MGC45474 (NM_152369.2,903-921).
cagttgagcttttccaaat

SEQ ID NO: 415869 - DNA, 19 bp, Homo sapiens
  siRNA target sequence for MGC45474 (NM_152369.2,905-923).
gttgagcttttccaaatca

SEQ ID NO: 415870 - DNA, 19 bp, Homo sapiens
  siRNA target sequence for MGC45474 (NM_152369.2,908-926).
gagcttttccaaatcacaa

SEQ ID NO: 415871 - DNA, 19 bp, Homo sapiens
  siRNA target sequence for MGC45474 (NM_152369.2,1102-1120).
catgtggtcgtaccattta

SEQ ID NO: 415872 - DNA, 19 bp, Homo sapiens
  siRNA target sequence for MGC45474 (NM_152369.2,1105-1123).
gtggtcgtaccatttaatt

SEQ ID NO: 415873 - DNA, 19 bp, Homo sapiens
  siRNA target sequence for MGC45474 (NM_152369.2,1126-1144).
cctcatctggactagtgaa

SEQ ID NO: 415874 - DNA, 19 bp, Homo sapiens
  siRNA target sequence for MGC45474 (NM_152369.2,1151-1169).
cttgcgtgccagcaaatga

SEQ ID NO: 415875 - DNA, 19 bp, Homo sapiens
  siRNA target sequence for MGC45474 (NM_152369.2,1154-1172).
gcgtgccagcaaatgacta

SEQ ID NO: 415876 - DNA, 19 bp, Homo sapiens
  siRNA target sequence for MGC45474 (NM_152369.2,1155-1173).
cgtgccagcaaatgactat

SEQ ID NO: 415877 - DNA, 19 bp, Homo sapiens
  siRNA target sequence for MGC45474 (NM_152369.2,1156-1174).
gtgccagcaaatgactata

SEQ ID NO: 415878 - DNA, 19 bp, Homo sapiens
  siRNA target sequence for MGC45474 (NM_152369.2,1159-1177).
ccagcaaatgactatagct

SEQ ID NO: 415879 - DNA, 19 bp, Homo sapiens
  siRNA target sequence for MGC45474 (NM_152369.2,1180-1198).
ggcagtggttacttgttat

SEQ ID NO: 415880 - DNA, 19 bp, Homo sapiens
  siRNA target sequence for MGC45474 (NM_152369.2,1194-1212).
gttatttcaacagaagtaa

SEQ ID NO: 415881 - DNA, 19 bp, Homo sapiens
  siRNA target sequence for MGC45474 (NM_152369.2,1201-1219).
caacagaagtaaaaatgat

SEQ ID NO: 415882 - DNA, 19 bp, Homo sapiens
  siRNA target sequence for MGC45474 (NM_152369.2,1223-1241).
cctgatcatcccatccttt

SEQ ID NO: 415883 - DNA, 19 bp, Homo sapiens
  siRNA target sequence for MGC45474 (NM_152369.2,1310-1328).
gtgaggattccgagaatca

SEQ ID NO: 415884 - DNA, 19 bp, Homo sapiens
  siRNA target sequence for MGC45474 (NM_152369.2,1312-1330).
gaggattccgagaatcatt

SEQ ID NO: 415885 - DNA, 19 bp, Homo sapiens
  siRNA target sequence for MGC45474 (NM_152369.2,1320-1338).
cgagaatcattgtcatgta

SEQ ID NO: 415886 - DNA, 19 bp, Homo sapiens
  siRNA target sequence for MGC45474 (NM_152369.2,1339-1357).
catgcaaaacgcactgaaa

SEQ ID NO: 415887 - DNA, 19 bp, Homo sapiens
  siRNA target sequence for MGC45474 (NM_152369.2,1416-1434).
ggtgtcttgacaaatacct

SEQ ID NO: 415888 - DNA, 19 bp, Homo sapiens
  siRNA target sequence for MGC45474 (NM_152369.2,1442-1460).
ctcaaccagaatgcatata

SEQ ID NO: 415889 - DNA, 19 bp, Homo sapiens
  siRNA target sequence for MGC45474 (NM_152369.2,1444-1462).
caaccagaatgcatatact

SEQ ID NO: 415890 - DNA, 19 bp, Homo sapiens
  siRNA target sequence for MGC45474 (NM_152369.2,1450-1468).
gaatgcatatactacaact

SEQ ID NO: 415891 - DNA, 19 bp, Homo sapiens
  siRNA target sequence for MGC45474 (NM_152369.2,1478-1496).
gggacagatttctgtacat

SEQ ID NO: 415892 - DNA, 19 bp, Homo sapiens
  siRNA target sequence for MGC45474 (NM_152369.2,1505-1523).
gatgcattcaaaatcttgt

SEQ ID NO: 415893 - DNA, 19 bp, Homo sapiens
  siRNA target sequence for MGC45474 (NM_152369.2,1528-1546).
gaactcaagtcactttaca

SEQ ID NO: 415894 - DNA, 19 bp, Homo sapiens
  siRNA target sequence for MGC45474 (NM_152369.2,1536-1554).
gtcactttacatctattaa

SEQ ID NO: 415895 - DNA, 19 bp, Homo sapiens
  siRNA target sequence for MGC45474 (NM_152369.2,1589-1607).
gtgttagtggtgtgtttca

SEQ ID NO: 415896 - DNA, 19 bp, Homo sapiens
  siRNA target sequence for MGC45474 (NM_152369.2,1616-1634).
ggaggactcatggctttta

SEQ ID NO: 415897 - DNA, 19 bp, Homo sapiens
  siRNA target sequence for MGC45474 (NM_152369.2,1617-1635).
gaggactcatggcttttaa

SEQ ID NO: 415898 - DNA, 19 bp, Homo sapiens
  siRNA target sequence for MGC45474 (NM_152369.2,1619-1637).
ggactcatggcttttaact

SEQ ID NO: 415899 - DNA, 19 bp, Homo sapiens
  siRNA target sequence for MGC45474 (NM_152369.2,1620-1638).
gactcatggcttttaacta

SEQ ID NO: 415900 - DNA, 19 bp, Homo sapiens
  siRNA target sequence for MGC45474 (NM_152369.2,1624-1642).
catggcttttaactacaat

SEQ ID NO: 415901 - DNA, 19 bp, Homo sapiens
  siRNA target sequence for MGC45474 (NM_152369.2,1657-1675).
gtgggcagtccctctgtta

SEQ ID NO: 415902 - DNA, 19 bp, Homo sapiens
  siRNA target sequence for MGC45474 (NM_152369.2,1672-1690).
gttattggtagcttttttt

SEQ ID NO: 415903 - DNA, 19 bp, Homo sapiens
  siRNA target sequence for MGC45474 (NM_152369.2,1683-1701).
ctttttttgcctacttagt

SEQ ID NO: 415904 - DNA, 19 bp, Homo sapiens
  siRNA target sequence for MGC45474 (NM_152369.2,1760-1778).
gctgttgatctggaaacaa

SEQ ID NO: 415905 - DNA, 19 bp, Homo sapiens
  siRNA target sequence for MGC45474 (NM_152369.2,1800-1818).
cctactttatggatcaaga

SEQ ID NO: 415906 - DNA, 19 bp, Homo sapiens
  siRNA target sequence for MGC26818 (NM_152371.1,359-377).
gagagcaagcagctttaca

SEQ ID NO: 415907 - DNA, 19 bp, Homo sapiens
  siRNA target sequence for MGC26818 (NM_152371.1,386-404).
ggcttcaagcggtacaaca

SEQ ID NO: 415908 - DNA, 19 bp, Homo sapiens
  siRNA target sequence for MGC26818 (NM_152371.1,473-491).
ggcatccaggggaacttgt

SEQ ID NO: 415909 - DNA, 19 bp, Homo sapiens
  siRNA target sequence for FLJ35961 (NM_152372.2,25-43).
ggccccagcgtggaattca

SEQ ID NO: 415910 - DNA, 19 bp, Homo sapiens
  siRNA target sequence for FLJ35961 (NM_152372.2,48-66).
ggtgctgaagccagtcttt

SEQ ID NO: 415911 - DNA, 19 bp, Homo sapiens
  siRNA target sequence for FLJ35961 (NM_152372.2,464-482).
gcgagtctggggaatggat

SEQ ID NO: 415912 - DNA, 19 bp, Homo sapiens
  siRNA target sequence for FLJ35961 (NM_152372.2,653-671).
cagagatcccctttgatct

SEQ ID NO: 415913 - DNA, 19 bp, Homo sapiens
  siRNA target sequence for FLJ35961 (NM_152372.2,723-741).
cccctcaccgccaaccaat

SEQ ID NO: 415914 - DNA, 19 bp, Homo sapiens
  siRNA target sequence for FLJ35961 (NM_152372.2,832-850).
gagaagtcagtcataggta

SEQ ID NO: 415915 - DNA, 19 bp, Homo sapiens
  siRNA target sequence for FLJ35961 (NM_152372.2,1106-1124).
cagagctcctgggttatta

SEQ ID NO: 415916 - DNA, 19 bp, Homo sapiens
  siRNA target sequence for FLJ35961 (NM_152372.2,1114-1132).
ctgggttattacatctact

SEQ ID NO: 415917 - DNA, 19 bp, Homo sapiens
  siRNA target sequence for FLJ35961 (NM_152372.2,1148-1166).
catctgagtggcaaacagt

SEQ ID NO: 415918 - DNA, 19 bp, Homo sapiens
  siRNA target sequence for FLJ35961 (NM_152372.2,1221-1239).
gaaggagtacgagttttgt

SEQ ID NO: 415919 - DNA, 19 bp, Homo sapiens
  siRNA target sequence for FLJ35961 (NM_152372.2,1347-1365).
cctgaactgcgggaagaat

SEQ ID NO: 415920 - DNA, 19 bp, Homo sapiens
  siRNA target sequence for FLJ35961 (NM_152372.2,1355-1373).
gcgggaagaatgaaatggt

SEQ ID NO: 415921 - DNA, 19 bp, Homo sapiens
  siRNA target sequence for FLJ35961 (NM_152372.2,1954-1972).
gaagagggctttatctatt

SEQ ID NO: 415922 - DNA, 19 bp, Homo sapiens
  siRNA target sequence for FLJ35961 (NM_152372.2,2054-2072).
gggtcaagatcgaggataa

SEQ ID NO: 415923 - DNA, 19 bp, Homo sapiens
  siRNA target sequence for FLJ35961 (NM_152372.2,2247-2265).
gatctccggctggaacatt

SEQ ID NO: 415924 - DNA, 19 bp, Homo sapiens
  siRNA target sequence for FLJ35961 (NM_152372.2,2252-2270).
ccggctggaacattgacat

SEQ ID NO: 415925 - DNA, 19 bp, Homo sapiens
  siRNA target sequence for FLJ35961 (NM_152372.2,2292-2310).
gctttggctggaagtagaa

SEQ ID NO: 415926 - DNA, 19 bp, Homo sapiens
  siRNA target sequence for FLJ35961 (NM_152372.2,2298-2316).
gctggaagtagaaaagtta

SEQ ID NO: 415927 - DNA, 19 bp, Homo sapiens
  siRNA target sequence for FLJ35961 (NM_152372.2,2321-2339).
cagccgctgagctacatct

SEQ ID NO: 415928 - DNA, 19 bp, Homo sapiens
  siRNA target sequence for FLJ35961 (NM_152372.2,2323-2341).
gccgctgagctacatctaa

SEQ ID NO: 415929 - DNA, 19 bp, Homo sapiens
  siRNA target sequence for FLJ35961 (NM_152372.2,2324-2342).
ccgctgagctacatctaat

SEQ ID NO: 415930 - DNA, 19 bp, Homo sapiens
  siRNA target sequence for FLJ35961 (NM_152372.2,2329-2347).
gagctacatctaatcttca

SEQ ID NO: 415931 - DNA, 19 bp, Homo sapiens
  siRNA target sequence for FLJ35961 (NM_152372.2,2366-2384).
gctcgccgaaccgcaaaat

SEQ ID NO: 415932 - DNA, 19 bp, Homo sapiens
  siRNA target sequence for FLJ35961 (NM_152372.2,2369-2387).
cgccgaaccgcaaaatcaa

SEQ ID NO: 415933 - DNA, 19 bp, Homo sapiens
  siRNA target sequence for FLJ35961 (NM_152372.2,2371-2389).
ccgaaccgcaaaatcaatt

SEQ ID NO: 415934 - DNA, 19 bp, Homo sapiens
  siRNA target sequence for FLJ35961 (NM_152372.2,2372-2390).
cgaaccgcaaaatcaattt

SEQ ID NO: 415935 - DNA, 19 bp, Homo sapiens
  siRNA target sequence for FLJ35961 (NM_152372.2,2373-2391).
gaaccgcaaaatcaatttt

SEQ ID NO: 415936 - DNA, 19 bp, Homo sapiens
  siRNA target sequence for FLJ35961 (NM_152372.2,2504-2522).
cactggtggatgacgattt

SEQ ID NO: 415937 - DNA, 19 bp, Homo sapiens
  siRNA target sequence for FLJ35961 (NM_152372.2,2736-2754).
gggacttctctgcattgaa

SEQ ID NO: 415938 - DNA, 19 bp, Homo sapiens
  siRNA target sequence for FLJ35961 (NM_152372.2,2769-2787).
ggacaagggaatttacaga

SEQ ID NO: 415939 - DNA, 19 bp, Homo sapiens
  siRNA target sequence for FLJ35961 (NM_152372.2,2809-2827).
ggggaggacgacaccatat

SEQ ID NO: 415940 - DNA, 19 bp, Homo sapiens
  siRNA target sequence for FLJ35961 (NM_152372.2,2810-2828).
gggaggacgacaccatatt

SEQ ID NO: 415941 - DNA, 19 bp, Homo sapiens
  siRNA target sequence for FLJ35961 (NM_152372.2,2958-2976).
caacgtggagtacatgaaa

SEQ ID NO: 415942 - DNA, 19 bp, Homo sapiens
  siRNA target sequence for FLJ35961 (NM_152372.2,3126-3144).
ccggcagctctcaacagat

SEQ ID NO: 415943 - DNA, 19 bp, Homo sapiens
  siRNA target sequence for FLJ35961 (NM_152372.2,3244-3262).
ccggatgtggccactatca

SEQ ID NO: 415944 - DNA, 19 bp, Homo sapiens
  siRNA target sequence for FLJ35961 (NM_152372.2,3245-3263).
cggatgtggccactatcat

SEQ ID NO: 415945 - DNA, 19 bp, Homo sapiens
  siRNA target sequence for FLJ35961 (NM_152372.2,3439-3457).
ggcgtcttcgtcaagaaca

SEQ ID NO: 415946 - DNA, 19 bp, Homo sapiens
  siRNA target sequence for FLJ35961 (NM_152372.2,3440-3458).
gcgtcttcgtcaagaacaa

SEQ ID NO: 415947 - DNA, 19 bp, Homo sapiens
  siRNA target sequence for FLJ35961 (NM_152372.2,3442-3460).
gtcttcgtcaagaacaagt

SEQ ID NO: 415948 - DNA, 19 bp, Homo sapiens
  siRNA target sequence for FLJ38984 (NM_152374.1,536-554).
ggacccacctcctggatta

SEQ ID NO: 415949 - DNA, 19 bp, Homo sapiens
  siRNA target sequence for FLJ38984 (NM_152374.1,537-555).
gacccacctcctggattat

SEQ ID NO: 415950 - DNA, 19 bp, Homo sapiens
  siRNA target sequence for FLJ38984 (NM_152374.1,937-955).
ctgtgcagcacttacaagt

SEQ ID NO: 415951 - DNA, 19 bp, Homo sapiens
  siRNA target sequence for FLJ38753 (NM_152375.1,279-297).
ggtcttcacccgtgtgata

SEQ ID NO: 415952 - DNA, 19 bp, Homo sapiens
  siRNA target sequence for FLJ38753 (NM_152375.1,387-405).
ctataccttctcatccata

SEQ ID NO: 415953 - DNA, 19 bp, Homo sapiens
  siRNA target sequence for FLJ38753 (NM_152375.1,611-629).
gccaagccggtgacacaaa

SEQ ID NO: 415954 - DNA, 19 bp, Homo sapiens
  siRNA target sequence for FLJ38753 (NM_152375.1,900-918).
ggatctgggcaattgctat

SEQ ID NO: 415955 - DNA, 19 bp, Homo sapiens
  siRNA target sequence for FLJ38753 (NM_152375.1,1499-1517).
cggtgcgtgccaaggaaat

SEQ ID NO: 415956 - DNA, 19 bp, Homo sapiens
  siRNA target sequence for FLJ38753 (NM_152375.1,1501-1519).
gtgcgtgccaaggaaatct

SEQ ID NO: 415957 - DNA, 19 bp, Homo sapiens
  siRNA target sequence for FLJ38753 (NM_152375.1,1630-1648).
gcggtcaacggctttctct

SEQ ID NO: 415958 - DNA, 19 bp, Homo sapiens
  siRNA target sequence for FLJ38753 (NM_152375.1,1631-1649).
cggtcaacggctttctcta

SEQ ID NO: 415959 - DNA, 19 bp, Homo sapiens
  siRNA target sequence for FLJ25429 (NM_152376.2,166-184).
ggcagccaaactcactaaa

SEQ ID NO: 415960 - DNA, 19 bp, Homo sapiens
  siRNA target sequence for FLJ25429 (NM_152376.2,167-185).
gcagccaaactcactaaat

SEQ ID NO: 415961 - DNA, 19 bp, Homo sapiens
  siRNA target sequence for FLJ25429 (NM_152376.2,168-186).
cagccaaactcactaaata

SEQ ID NO: 415962 - DNA, 19 bp, Homo sapiens
  siRNA target sequence for FLJ25429 (NM_152376.2,172-190).
caaactcactaaatatgca

SEQ ID NO: 415963 - DNA, 19 bp, Homo sapiens
  siRNA target sequence for FLJ25429 (NM_152376.2,254-272).
ggaggtgtgcgctcatcat

SEQ ID NO: 415964 - DNA, 19 bp, Homo sapiens
  siRNA target sequence for FLJ25429 (NM_152376.2,255-273).
gaggtgtgcgctcatcata

SEQ ID NO: 415965 - DNA, 19 bp, Homo sapiens
  siRNA target sequence for FLJ25429 (NM_152376.2,257-275).
ggtgtgcgctcatcatata

SEQ ID NO: 415966 - DNA, 19 bp, Homo sapiens
  siRNA target sequence for FLJ25429 (NM_152376.2,260-278).
gtgcgctcatcatatacca

SEQ ID NO: 415967 - DNA, 19 bp, Homo sapiens
  siRNA target sequence for FLJ25429 (NM_152376.2,288-306).
ccagccattccctatgagt

SEQ ID NO: 415968 - DNA, 19 bp, Homo sapiens
  siRNA target sequence for FLJ25429 (NM_152376.2,289-307).
cagccattccctatgagtt

SEQ ID NO: 415969 - DNA, 19 bp, Homo sapiens
  siRNA target sequence for FLJ25429 (NM_152376.2,409-427).
cctcttctctcaataagta

SEQ ID NO: 415970 - DNA, 19 bp, Homo sapiens
  siRNA target sequence for FLJ25429 (NM_152376.2,438-456).
ccttccatcaacagaaaga

SEQ ID NO: 415971 - DNA, 19 bp, Homo sapiens
  siRNA target sequence for FLJ25429 (NM_152376.2,514-532).
gcagtatccgggctcttta

SEQ ID NO: 415972 - DNA, 19 bp, Homo sapiens
  siRNA target sequence for FLJ25429 (NM_152376.2,517-535).
gtatccgggctctttacca

SEQ ID NO: 415973 - DNA, 19 bp, Homo sapiens
  siRNA target sequence for FLJ25429 (NM_152376.2,592-610).
ccgtggagaggaaattcat

SEQ ID NO: 415974 - DNA, 19 bp, Homo sapiens
  siRNA target sequence for FLJ25429 (NM_152376.2,634-652).
cttccagggctggaaatct

SEQ ID NO: 415975 - DNA, 19 bp, Homo sapiens
  siRNA target sequence for FLJ25429 (NM_152376.2,683-701).
gctgcttgctgttagatca

SEQ ID NO: 415976 - DNA, 19 bp, Homo sapiens
  siRNA target sequence for FLJ25429 (NM_152376.2,733-751).
ggccaacagatgatttgca

SEQ ID NO: 415977 - DNA, 19 bp, Homo sapiens
  siRNA target sequence for FLJ25429 (NM_152376.2,734-752).
gccaacagatgatttgcaa

SEQ ID NO: 415978 - DNA, 19 bp, Homo sapiens
  siRNA target sequence for FLJ25429 (NM_152376.2,735-753).
ccaacagatgatttgcaaa

SEQ ID NO: 415979 - DNA, 19 bp, Homo sapiens
  siRNA target sequence for FLJ25429 (NM_152376.2,763-781).
ctgtggccgaacagaaaaa

SEQ ID NO: 415980 - DNA, 19 bp, Homo sapiens
  siRNA target sequence for FLJ25429 (NM_152376.2,795-813).
cgacactgcagcattgaaa

SEQ ID NO: 415981 - DNA, 19 bp, Homo sapiens
  siRNA target sequence for FLJ25429 (NM_152376.2,822-840).
gtgcccaggaggcgatttt

SEQ ID NO: 415982 - DNA, 19 bp, Homo sapiens
  siRNA target sequence for FLJ25429 (NM_152376.2,824-842).
gcccaggaggcgattttct

SEQ ID NO: 415983 - DNA, 19 bp, Homo sapiens
  siRNA target sequence for FLJ25429 (NM_152376.2,826-844).
ccaggaggcgattttctga

SEQ ID NO: 415984 - DNA, 19 bp, Homo sapiens
  siRNA target sequence for FLJ31052 (NM_152378.1,247-265).
ggagctcggcgagaaaaga

SEQ ID NO: 415985 - DNA, 19 bp, Homo sapiens
  siRNA target sequence for FLJ31052 (NM_152378.1,511-529).
gcgcagcgtctcctattct

SEQ ID NO: 415986 - DNA, 19 bp, Homo sapiens
  siRNA target sequence for FLJ31052 (NM_152378.1,512-530).
cgcagcgtctcctattcta

SEQ ID NO: 415987 - DNA, 19 bp, Homo sapiens
  siRNA target sequence for FLJ31052 (NM_152378.1,629-647).
gtccccctgccccacattt

SEQ ID NO: 415988 - DNA, 19 bp, Homo sapiens
  siRNA target sequence for FLJ31052 (NM_152378.1,920-938).
cgctgcagttcgcgtttta

SEQ ID NO: 415989 - DNA, 19 bp, Homo sapiens
  siRNA target sequence for FLJ31052 (NM_152378.1,922-940).
ctgcagttcgcgttttaca

SEQ ID NO: 415990 - DNA, 19 bp, Homo sapiens
  siRNA target sequence for FLJ31052 (NM_152378.1,925-943).
cagttcgcgttttacaagt

SEQ ID NO: 415991 - DNA, 19 bp, Homo sapiens
  siRNA target sequence for DKFZp547B1713 (NM_152379.1,252-270).
ctacctggttctctcataa

SEQ ID NO: 415992 - DNA, 19 bp, Homo sapiens
  siRNA target sequence for DKFZp547B1713 (NM_152379.1,286-304).
gcgcttcgagcttcttcaa

SEQ ID NO: 415993 - DNA, 19 bp, Homo sapiens
  siRNA target sequence for DKFZp547B1713 (NM_152379.1,379-397).
ctccctcttccctaaagaa

SEQ ID NO: 415994 - DNA, 19 bp, Homo sapiens
  siRNA target sequence for DKFZp547B1713 (NM_152379.1,395-413).
gaacaatagggaacaagta

SEQ ID NO: 415995 - DNA, 19 bp, Homo sapiens
  siRNA target sequence for DKFZp547B1713 (NM_152379.1,408-426).
caagtagaagtggtagaat

SEQ ID NO: 415996 - DNA, 19 bp, Homo sapiens
  siRNA target sequence for DKFZp547B1713 (NM_152379.1,454-472).
cgccagatcataacaagaa

SEQ ID NO: 415997 - DNA, 19 bp, Homo sapiens
  siRNA target sequence for DKFZp547B1713 (NM_152379.1,479-497).
gcaggctaatcctagtgtt

SEQ ID NO: 415998 - DNA, 19 bp, Homo sapiens
  siRNA target sequence for DKFZp547B1713 (NM_152379.1,480-498).
caggctaatcctagtgttt

SEQ ID NO: 415999 - DNA, 19 bp, Homo sapiens
  siRNA target sequence for DKFZp547B1713 (NM_152379.1,564-582).
ggtatcacgggttatggaa

SEQ ID NO: 416000 - DNA, 19 bp, Homo sapiens
  siRNA target sequence for DKFZp547B1713 (NM_152379.1,565-583).
gtatcacgggttatggaaa

SEQ ID NO: 416001 - DNA, 19 bp, Homo sapiens
  siRNA target sequence for DKFZp547B1713 (NM_152379.1,569-587).
cacgggttatggaaaagga

SEQ ID NO: 416002 - DNA, 19 bp, Homo sapiens
  siRNA target sequence for DKFZp547B1713 (NM_152379.1,627-645).
ggcgctaagcctcctaaaa

SEQ ID NO: 416003 - DNA, 19 bp, Homo sapiens
  siRNA target sequence for DKFZp547B1713 (NM_152379.1,628-646).
gcgctaagcctcctaaaaa

SEQ ID NO: 416004 - DNA, 19 bp, Homo sapiens
  siRNA target sequence for DKFZp547B1713 (NM_152379.1,635-653).
gcctcctaaaaagagttat

SEQ ID NO: 416005 - DNA, 19 bp, Homo sapiens
  siRNA target sequence for DKFZp547B1713 (NM_152379.1,639-657).
cctaaaaagagttatgtga

SEQ ID NO: 416006 - DNA, 19 bp, Homo sapiens
  siRNA target sequence for CMYA3 (NM_152381.2,3731-3749).
gagagctacttatgttcat

SEQ ID NO: 416007 - DNA, 19 bp, Homo sapiens
  siRNA target sequence for CMYA3 (NM_152381.2,3733-3751).
gagctacttatgttcataa

SEQ ID NO: 416008 - DNA, 19 bp, Homo sapiens
  siRNA target sequence for CMYA3 (NM_152381.2,3736-3754).
ctacttatgttcataaaga

SEQ ID NO: 416009 - DNA, 19 bp, Homo sapiens
  siRNA target sequence for FLJ37953 (NM_152382.1,367-385).
ggataatttgttaatacaa

SEQ ID NO: 416010 - DNA, 19 bp, Homo sapiens
  siRNA target sequence for FLJ37953 (NM_152382.1,419-437).
cctcgagatgcccagtatt

SEQ ID NO: 416011 - DNA, 19 bp, Homo sapiens
  siRNA target sequence for FLJ37953 (NM_152382.1,420-438).
ctcgagatgcccagtattt

SEQ ID NO: 416012 - DNA, 19 bp, Homo sapiens
  siRNA target sequence for FLJ37953 (NM_152382.1,422-440).
cgagatgcccagtatttat

SEQ ID NO: 416013 - DNA, 19 bp, Homo sapiens
  siRNA target sequence for FLJ37953 (NM_152382.1,423-441).
gagatgcccagtatttata

SEQ ID NO: 416014 - DNA, 19 bp, Homo sapiens
  siRNA target sequence for FLJ37953 (NM_152382.1,563-581).
cctgctttatggttccata

SEQ ID NO: 416015 - DNA, 19 bp, Homo sapiens
  siRNA target sequence for FLJ37953 (NM_152382.1,564-582).
ctgctttatggttccataa

SEQ ID NO: 416016 - DNA, 19 bp, Homo sapiens
  siRNA target sequence for FLJ37953 (NM_152382.1,602-620).
ggagtgggagtgaatatct

SEQ ID NO: 416017 - DNA, 19 bp, Homo sapiens
  siRNA target sequence for FLJ37953 (NM_152382.1,603-621).
gagtgggagtgaatatctt

SEQ ID NO: 416018 - DNA, 19 bp, Homo sapiens
  siRNA target sequence for FLJ37953 (NM_152382.1,608-626).
ggagtgaatatcttttgga

SEQ ID NO: 416019 - DNA, 19 bp, Homo sapiens
  siRNA target sequence for FLJ37953 (NM_152382.1,657-675).
cagatacctatggaaacaa

SEQ ID NO: 416020 - DNA, 19 bp, Homo sapiens
  siRNA target sequence for FLJ37953 (NM_152382.1,710-728).
ctggacagagccttgaaaa

SEQ ID NO: 416021 - DNA, 19 bp, Homo sapiens
  siRNA target sequence for FLJ37953 (NM_152382.1,735-753).
ccgagttaccagaggaata

SEQ ID NO: 416022 - DNA, 19 bp, Homo sapiens
  siRNA target sequence for FLJ37953 (NM_152382.1,736-754).
cgagttaccagaggaatat

SEQ ID NO: 416023 - DNA, 19 bp, Homo sapiens
  siRNA target sequence for FLJ37953 (NM_152382.1,771-789).
gacgaatggtcctacacat

SEQ ID NO: 416024 - DNA, 19 bp, Homo sapiens
  siRNA target sequence for DKFZp762I194 (NM_152384.1,100-118).
gtccgcgcagcaaatgaaa

SEQ ID NO: 416025 - DNA, 19 bp, Homo sapiens
  siRNA target sequence for DKFZp762I194 (NM_152384.1,103-121).
cgcgcagcaaatgaaaaca

SEQ ID NO: 416026 - DNA, 19 bp, Homo sapiens
  siRNA target sequence for DKFZp762I194 (NM_152384.1,126-144).
ctggagaagtccttattga

SEQ ID NO: 416027 - DNA, 19 bp, Homo sapiens
  siRNA target sequence for DKFZp762I194 (NM_152384.1,128-146).
ggagaagtccttattgatt

SEQ ID NO: 416028 - DNA, 19 bp, Homo sapiens
  siRNA target sequence for DKFZp762I194 (NM_152384.1,147-165).
gtttagattccattgaaga

SEQ ID NO: 416029 - DNA, 19 bp, Homo sapiens
  siRNA target sequence for DKFZp762I194 (NM_152384.1,192-210).
gtagactcttggtaacaaa

SEQ ID NO: 416030 - DNA, 19 bp, Homo sapiens
  siRNA target sequence for DKFZp762I194 (NM_152384.1,237-255).
cattatcaagagtcaatgt

SEQ ID NO: 416031 - DNA, 19 bp, Homo sapiens
  siRNA target sequence for DKFZp762I194 (NM_152384.1,258-276).
ctgtcggttacaattgcat

SEQ ID NO: 416032 - DNA, 19 bp, Homo sapiens
  siRNA target sequence for DKFZp762I194 (NM_152384.1,260-278).
gtcggttacaattgcatat

SEQ ID NO: 416033 - DNA, 19 bp, Homo sapiens
  siRNA target sequence for DKFZp762I194 (NM_152384.1,263-281).
ggttacaattgcatattga

SEQ ID NO: 416034 - DNA, 19 bp, Homo sapiens
  siRNA target sequence for DKFZp762I194 (NM_152384.1,274-292).
catattgaatattacaaca

SEQ ID NO: 416035 - DNA, 19 bp, Homo sapiens
  siRNA target sequence for DKFZp762I194 (NM_152384.1,291-309).
caaggactgctaactctaa

SEQ ID NO: 416036 - DNA, 19 bp, Homo sapiens
  siRNA target sequence for DKFZp762I194 (NM_152384.1,294-312).
ggactgctaactctaaatt

SEQ ID NO: 416037 - DNA, 19 bp, Homo sapiens
  siRNA target sequence for DKFZp762I194 (NM_152384.1,295-313).
gactgctaactctaaatta

SEQ ID NO: 416038 - DNA, 19 bp, Homo sapiens
  siRNA target sequence for DKFZp762I194 (NM_152384.1,320-338).
caaactgaagctctctata

SEQ ID NO: 416039 - DNA, 19 bp, Homo sapiens
  siRNA target sequence for DKFZp762I194 (NM_152384.1,351-369).
gtaacagtactcgttttga

SEQ ID NO: 416040 - DNA, 19 bp, Homo sapiens
  siRNA target sequence for DKFZp762I194 (NM_152384.1,357-375).
gtactcgttttgaatttat

SEQ ID NO: 416041 - DNA, 19 bp, Homo sapiens
  siRNA target sequence for DKFZp762I194 (NM_152384.1,424-442).
ggcagtacacagagcttat

SEQ ID NO: 416042 - DNA, 19 bp, Homo sapiens
  siRNA target sequence for DKFZp762I194 (NM_152384.1,426-444).
cagtacacagagcttatga

SEQ ID NO: 416043 - DNA, 19 bp, Homo sapiens
  siRNA target sequence for DKFZp762I194 (NM_152384.1,435-453).
gagcttatgaaacttctaa

SEQ ID NO: 416044 - DNA, 19 bp, Homo sapiens
  siRNA target sequence for DKFZp762I194 (NM_152384.1,561-579).
ccagtgatcagggcaattt

SEQ ID NO: 416045 - DNA, 19 bp, Homo sapiens
  siRNA target sequence for DKFZp762I194 (NM_152384.1,562-580).
cagtgatcagggcaattta

SEQ ID NO: 416046 - DNA, 19 bp, Homo sapiens
  siRNA target sequence for DKFZp762I194 (NM_152384.1,571-589).
gggcaatttaggaaccttt

SEQ ID NO: 416047 - DNA, 19 bp, Homo sapiens
  siRNA target sequence for DKFZp762I194 (NM_152384.1,574-592).
caatttaggaacctttttt

SEQ ID NO: 416048 - DNA, 19 bp, Homo sapiens
  siRNA target sequence for DKFZp762I194 (NM_152384.1,582-600).
gaaccttttttattaccaa

SEQ ID NO: 416049 - DNA, 19 bp, Homo sapiens
  siRNA target sequence for DKFZp762I194 (NM_152384.1,616-634).
gcatgcaaatatgaatgat

SEQ ID NO: 416050 - DNA, 19 bp, Homo sapiens
  siRNA target sequence for DKFZp762I194 (NM_152384.1,617-635).
catgcaaatatgaatgata

SEQ ID NO: 416051 - DNA, 19 bp, Homo sapiens
  siRNA target sequence for DKFZp762I194 (NM_152384.1,653-671).
ccatatctgcaaattcgtt

SEQ ID NO: 416052 - DNA, 19 bp, Homo sapiens
  siRNA target sequence for DKFZp762I194 (NM_152384.1,659-677).
ctgcaaattcgttcaataa

SEQ ID NO: 416053 - DNA, 19 bp, Homo sapiens
  siRNA target sequence for DKFZp762I194 (NM_152384.1,662-680).
caaattcgttcaataaaga

SEQ ID NO: 416054 - DNA, 19 bp, Homo sapiens
  siRNA target sequence for DKFZp762I194 (NM_152384.1,684-702).
gagattcaaaatttggttt

SEQ ID NO: 416055 - DNA, 19 bp, Homo sapiens
  siRNA target sequence for DKFZp762I194 (NM_152384.1,730-748).
gagtggtggatatgttctt

SEQ ID NO: 416056 - DNA, 19 bp, Homo sapiens
  siRNA target sequence for DKFZp762I194 (NM_152384.1,830-848).
cccatatttggagttgatt

SEQ ID NO: 416057 - DNA, 19 bp, Homo sapiens
  siRNA target sequence for DKFZp762I194 (NM_152384.1,881-899).
gctctgacagtcgaacaaa

SEQ ID NO: 416058 - DNA, 19 bp, Homo sapiens
  siRNA target sequence for DKFZp762I194 (NM_152384.1,882-900).
ctctgacagtcgaacaaat

SEQ ID NO: 416059 - DNA, 19 bp, Homo sapiens
  siRNA target sequence for DKFZp762I194 (NM_152384.1,892-910).
cgaacaaattcaagatgat

SEQ ID NO: 416060 - DNA, 19 bp, Homo sapiens
  siRNA target sequence for DKFZp762I194 (NM_152384.1,980-998).
gatcgtgaacctgtatttt

SEQ ID NO: 416061 - DNA, 19 bp, Homo sapiens
  siRNA target sequence for DKFZp762I194 (NM_152384.1,1013-1031).
cttgcaatagagaaattga

SEQ ID NO: 416062 - DNA, 19 bp, Homo sapiens
  siRNA target sequence for FLJ31438 (NM_152385.1,375-393).
cagttctcccacctatcat

SEQ ID NO: 416063 - DNA, 19 bp, Homo sapiens
  siRNA target sequence for FLJ31438 (NM_152385.1,396-414).
gtagaagtgacaaggaatt

SEQ ID NO: 416064 - DNA, 19 bp, Homo sapiens
  siRNA target sequence for FLJ31438 (NM_152385.1,476-494).
ggacctgctgatgaatatt

SEQ ID NO: 416065 - DNA, 19 bp, Homo sapiens
  siRNA target sequence for FLJ31438 (NM_152385.1,477-495).
gacctgctgatgaatatta

SEQ ID NO: 416066 - DNA, 19 bp, Homo sapiens
  siRNA target sequence for FLJ31438 (NM_152385.1,482-500).
gctgatgaatattacatca

SEQ ID NO: 416067 - DNA, 19 bp, Homo sapiens
  siRNA target sequence for FLJ31438 (NM_152385.1,496-514).
catcatataccgaaatgtt

SEQ ID NO: 416068 - DNA, 19 bp, Homo sapiens
  siRNA target sequence for FLJ31438 (NM_152385.1,507-525).
gaaatgtttttgataaggt

SEQ ID NO: 416069 - DNA, 19 bp, Homo sapiens
  siRNA target sequence for FLJ31438 (NM_152385.1,523-541).
ggtaatagagcatatcact

SEQ ID NO: 416070 - DNA, 19 bp, Homo sapiens
  siRNA target sequence for FLJ31438 (NM_152385.1,532-550).
gcatatcactgcatacaaa

SEQ ID NO: 416071 - DNA, 19 bp, Homo sapiens
  siRNA target sequence for FLJ31438 (NM_152385.1,533-551).
catatcactgcatacaaat

SEQ ID NO: 416072 - DNA, 19 bp, Homo sapiens
  siRNA target sequence for FLJ31438 (NM_152385.1,547-565).
caaatccattcttacttca

SEQ ID NO: 416073 - DNA, 19 bp, Homo sapiens
  siRNA target sequence for FLJ31438 (NM_152385.1,553-571).
cattcttacttcaatcaaa

SEQ ID NO: 416074 - DNA, 19 bp, Homo sapiens
  siRNA target sequence for FLJ31438 (NM_152385.1,584-602).
gcctttattgagacaataa

SEQ ID NO: 416075 - DNA, 19 bp, Homo sapiens
  siRNA target sequence for FLJ31438 (NM_152385.1,610-628).
ccgaagaactacattttgt

SEQ ID NO: 416076 - DNA, 19 bp, Homo sapiens
  siRNA target sequence for FLJ31438 (NM_152385.1,661-679).
gcctacagctttggtatat

SEQ ID NO: 416077 - DNA, 19 bp, Homo sapiens
  siRNA target sequence for FLJ31438 (NM_152385.1,662-680).
cctacagctttggtatatt

SEQ ID NO: 416078 - DNA, 19 bp, Homo sapiens
  siRNA target sequence for FLJ31438 (NM_152385.1,708-726).
caaaaatgaggattatcga

SEQ ID NO: 416079 - DNA, 19 bp, Homo sapiens
  siRNA target sequence for FLJ31438 (NM_152385.1,729-747).
gtaattcctcgaagattca

SEQ ID NO: 416080 - DNA, 19 bp, Homo sapiens
  siRNA target sequence for FLJ31438 (NM_152385.1,735-753).
cctcgaagattcaatctca

SEQ ID NO: 416081 - DNA, 19 bp, Homo sapiens
  siRNA target sequence for FLJ31438 (NM_152385.1,736-754).
ctcgaagattcaatctcaa

SEQ ID NO: 416082 - DNA, 19 bp, Homo sapiens
  siRNA target sequence for FLJ31438 (NM_152385.1,738-756).
cgaagattcaatctcaaat

SEQ ID NO: 416083 - DNA, 19 bp, Homo sapiens
  siRNA target sequence for FLJ31438 (NM_152385.1,742-760).
gattcaatctcaaatagat

SEQ ID NO: 416084 - DNA, 19 bp, Homo sapiens
  siRNA target sequence for FLJ31438 (NM_152385.1,784-802).
gtatgacacaaaagaagta

SEQ ID NO: 416085 - DNA, 19 bp, Homo sapiens
  siRNA target sequence for FLJ31438 (NM_152385.1,872-890).
ctagatgctctcactaaat

SEQ ID NO: 416086 - DNA, 19 bp, Homo sapiens
  siRNA target sequence for FLJ31438 (NM_152385.1,963-981).
ggaaggctgatttagatga

SEQ ID NO: 416087 - DNA, 19 bp, Homo sapiens
  siRNA target sequence for FLJ31438 (NM_152385.1,964-982).
gaaggctgatttagatgaa

SEQ ID NO: 416088 - DNA, 19 bp, Homo sapiens
  siRNA target sequence for FLJ31438 (NM_152385.1,1005-1023).
ggcgagatgtagctgaaaa

SEQ ID NO: 416089 - DNA, 19 bp, Homo sapiens
  siRNA target sequence for FLJ31438 (NM_152385.1,1006-1024).
gcgagatgtagctgaaaat

SEQ ID NO: 416090 - DNA, 19 bp, Homo sapiens
  siRNA target sequence for FLJ31438 (NM_152385.1,1056-1074).
gactgcagataatttcaca

SEQ ID NO: 416091 - DNA, 19 bp, Homo sapiens
  siRNA target sequence for FLJ31438 (NM_152385.1,1079-1097).
cttagttcatgggtaaaat

SEQ ID NO: 416092 - DNA, 19 bp, Homo sapiens
  siRNA target sequence for FLJ31438 (NM_152385.1,1107-1125).
gcagcccatttcaagactt

SEQ ID NO: 416093 - DNA, 19 bp, Homo sapiens
  siRNA target sequence for FLJ31438 (NM_152385.1,1161-1179).
gtgaccaaggcattgttga

SEQ ID NO: 416094 - DNA, 19 bp, Homo sapiens
  siRNA target sequence for FLJ31438 (NM_152385.1,1218-1236).
ctgaaattatgcttcacta

SEQ ID NO: 416095 - DNA, 19 bp, Homo sapiens
  siRNA target sequence for FLJ31438 (NM_152385.1,1303-1321).
cagtcctagaagaattctt

SEQ ID NO: 416096 - DNA, 19 bp, Homo sapiens
  siRNA target sequence for FLJ31438 (NM_152385.1,1311-1329).
gaagaattcttcgaaacat

SEQ ID NO: 416097 - DNA, 19 bp, Homo sapiens
  siRNA target sequence for FLJ31438 (NM_152385.1,1323-1341).
gaaacattggtacaatgaa

SEQ ID NO: 416098 - DNA, 19 bp, Homo sapiens
  siRNA target sequence for FLJ31438 (NM_152385.1,1351-1369).
ggctgttggaaaaattaga

SEQ ID NO: 416099 - DNA, 19 bp, Homo sapiens
  siRNA target sequence for FLJ31438 (NM_152385.1,1371-1389).
gaaagcctcttccattact

SEQ ID NO: 416100 - DNA, 19 bp, Homo sapiens
  siRNA target sequence for FLJ31438 (NM_152385.1,1376-1394).
cctcttccattactcttat

SEQ ID NO: 416101 - DNA, 19 bp, Homo sapiens
  siRNA target sequence for FLJ31438 (NM_152385.1,1377-1395).
ctcttccattactcttatt

SEQ ID NO: 416102 - DNA, 19 bp, Homo sapiens
  siRNA target sequence for FLJ31438 (NM_152385.1,1379-1397).
cttccattactcttatttt

SEQ ID NO: 416103 - DNA, 19 bp, Homo sapiens
  siRNA target sequence for FLJ31438 (NM_152385.1,1449-1467).
ctctaaccctggaaggaat

SEQ ID NO: 416104 - DNA, 19 bp, Homo sapiens
  siRNA target sequence for FLJ31438 (NM_152385.1,1491-1509).
ggttagatttagttaccaa

SEQ ID NO: 416105 - DNA, 19 bp, Homo sapiens
  siRNA target sequence for FLJ31438 (NM_152385.1,1512-1530).
gggttacacaggaaagact

SEQ ID NO: 416106 - DNA, 19 bp, Homo sapiens
  siRNA target sequence for FLJ31438 (NM_152385.1,1571-1589).
ggggagcaggatacttata

SEQ ID NO: 416107 - DNA, 19 bp, Homo sapiens
  siRNA target sequence for FLJ31438 (NM_152385.1,1572-1590).
gggagcaggatacttataa

SEQ ID NO: 416108 - DNA, 19 bp, Homo sapiens
  siRNA target sequence for FLJ31438 (NM_152385.1,1574-1592).
gagcaggatacttataaca

SEQ ID NO: 416109 - DNA, 19 bp, Homo sapiens
  siRNA target sequence for FLJ31438 (NM_152385.1,1639-1657).
cctgcacaagaaagctatt

SEQ ID NO: 416110 - DNA, 19 bp, Homo sapiens
  siRNA target sequence for FLJ31438 (NM_152385.1,1733-1751).
gacctgttgcagctattaa

SEQ ID NO: 416111 - DNA, 19 bp, Homo sapiens
  siRNA target sequence for FLJ31438 (NM_152385.1,1738-1756).
gttgcagctattaatgtca

SEQ ID NO: 416112 - DNA, 19 bp, Homo sapiens
  siRNA target sequence for FLJ31438 (NM_152385.1,1755-1773).
catgtccccaagttgaatt

SEQ ID NO: 416113 - DNA, 19 bp, Homo sapiens
  siRNA target sequence for FLJ31438 (NM_152385.1,1761-1779).
cccaagttgaattaattca

SEQ ID NO: 416114 - DNA, 19 bp, Homo sapiens
  siRNA target sequence for FLJ31438 (NM_152385.1,1763-1781).
caagttgaattaattcagt

SEQ ID NO: 416115 - DNA, 19 bp, Homo sapiens
  siRNA target sequence for FLJ31438 (NM_152385.1,1778-1796).
cagtgtctcactaaagagt

SEQ ID NO: 416116 - DNA, 19 bp, Homo sapiens
  siRNA target sequence for FLJ31438 (NM_152385.1,1782-1800).
gtctcactaaagagttgaa

SEQ ID NO: 416117 - DNA, 19 bp, Homo sapiens
  siRNA target sequence for FLJ31438 (NM_152385.1,1827-1845).
gtcttgctatacttcatct

SEQ ID NO: 416118 - DNA, 19 bp, Homo sapiens
  siRNA target sequence for FLJ31438 (NM_152385.1,1894-1912).
caataaaggtgggatagat

SEQ ID NO: 416119 - DNA, 19 bp, Homo sapiens
  siRNA target sequence for FLJ31438 (NM_152385.1,1962-1980).
ggcaagaagtggcaaatat

SEQ ID NO: 416120 - DNA, 19 bp, Homo sapiens
  siRNA target sequence for FLJ31438 (NM_152385.1,1995-2013).
gctttgacaaattatctaa

SEQ ID NO: 416121 - DNA, 19 bp, Homo sapiens
  siRNA target sequence for FLJ31438 (NM_152385.1,2069-2087).
gatgacgcagtcaacctaa

SEQ ID NO: 416122 - DNA, 19 bp, Homo sapiens
  siRNA target sequence for ALS2CR4 (NM_152388.1,385-403).
cacttagtcgtcctaagaa

SEQ ID NO: 416123 - DNA, 19 bp, Homo sapiens
  siRNA target sequence for ALS2CR4 (NM_152388.1,486-504).
ggcaatgagccatcaacta

SEQ ID NO: 416124 - DNA, 19 bp, Homo sapiens
  siRNA target sequence for ALS2CR4 (NM_152388.1,487-505).
gcaatgagccatcaactaa

SEQ ID NO: 416125 - DNA, 19 bp, Homo sapiens
  siRNA target sequence for ALS2CR4 (NM_152388.1,488-506).
caatgagccatcaactaaa

SEQ ID NO: 416126 - DNA, 19 bp, Homo sapiens
  siRNA target sequence for ALS2CR4 (NM_152388.1,559-577).
ggctacctcttgaattgga

SEQ ID NO: 416127 - DNA, 19 bp, Homo sapiens
  siRNA target sequence for ALS2CR4 (NM_152388.1,580-598).
cttcctccacccaaaagaa

SEQ ID NO: 416128 - DNA, 19 bp, Homo sapiens
  siRNA target sequence for ALS2CR4 (NM_152388.1,590-608).
ccaaaagaagtcatctagt

SEQ ID NO: 416129 - DNA, 19 bp, Homo sapiens
  siRNA target sequence for ALS2CR4 (NM_152388.1,591-609).
caaaagaagtcatctagtt

SEQ ID NO: 416130 - DNA, 19 bp, Homo sapiens
  siRNA target sequence for ALS2CR4 (NM_152388.1,607-625).
gttcatctttattacgaaa

SEQ ID NO: 416131 - DNA, 19 bp, Homo sapiens
  siRNA target sequence for ALS2CR4 (NM_152388.1,652-670).
ctgaggaggcagttattca

SEQ ID NO: 416132 - DNA, 19 bp, Homo sapiens
  siRNA target sequence for ALS2CR4 (NM_152388.1,722-740).
caatgagctaggagtagaa

SEQ ID NO: 416133 - DNA, 19 bp, Homo sapiens
  siRNA target sequence for ALS2CR4 (NM_152388.1,774-792).
gtggaacagcagtctgtat

SEQ ID NO: 416134 - DNA, 19 bp, Homo sapiens
  siRNA target sequence for ALS2CR4 (NM_152388.1,818-836).
gcctgtaggcaaagtattt

SEQ ID NO: 416135 - DNA, 19 bp, Homo sapiens
  siRNA target sequence for ALS2CR4 (NM_152388.1,865-883).
ctgatcgttcagagttgat

SEQ ID NO: 416136 - DNA, 19 bp, Homo sapiens
  siRNA target sequence for ALS2CR4 (NM_152388.1,867-885).
gatcgttcagagttgataa

SEQ ID NO: 416137 - DNA, 19 bp, Homo sapiens
  siRNA target sequence for ALS2CR4 (NM_152388.1,870-888).
cgttcagagttgataaaga

SEQ ID NO: 416138 - DNA, 19 bp, Homo sapiens
  siRNA target sequence for ALS2CR4 (NM_152388.1,938-956).
cagagatgtggcacttaca

SEQ ID NO: 416139 - DNA, 19 bp, Homo sapiens
  siRNA target sequence for ALS2CR4 (NM_152388.1,962-980).
ccgggctttcaggatgatt

SEQ ID NO: 416140 - DNA, 19 bp, Homo sapiens
  siRNA target sequence for ALS2CR4 (NM_152388.1,974-992).
gatgattggtctcttttct

SEQ ID NO: 416141 - DNA, 19 bp, Homo sapiens
  siRNA target sequence for ALS2CR4 (NM_152388.1,977-995).
gattggtctcttttctcat

SEQ ID NO: 416142 - DNA, 19 bp, Homo sapiens
  siRNA target sequence for ALS2CR4 (NM_152388.1,1019-1037).
gtggaatattgttgtgata

SEQ ID NO: 416143 - DNA, 19 bp, Homo sapiens
  siRNA target sequence for ALS2CR4 (NM_152388.1,1048-1066).
caggagatcagctatccaa

SEQ ID NO: 416144 - DNA, 19 bp, Homo sapiens
  siRNA target sequence for ALS2CR4 (NM_152388.1,1072-1090).
caaaccttctgcaacaata

SEQ ID NO: 416145 - DNA, 19 bp, Homo sapiens
  siRNA target sequence for ALS2CR4 (NM_152388.1,1161-1179).
gacaggattgactttgcta

SEQ ID NO: 416146 - DNA, 19 bp, Homo sapiens
  siRNA target sequence for ALS2CR4 (NM_152388.1,1186-1204).
cagtagcaatccgaaattt

SEQ ID NO: 416147 - DNA, 19 bp, Homo sapiens
  siRNA target sequence for ALS2CR4 (NM_152388.1,1188-1206).
gtagcaatccgaaattttt

SEQ ID NO: 416148 - DNA, 19 bp, Homo sapiens
  siRNA target sequence for ALS2CR4 (NM_152388.1,1211-1229).
cctggatcctacagcttta

SEQ ID NO: 416149 - DNA, 19 bp, Homo sapiens
  siRNA target sequence for ALS2CR4 (NM_152388.1,1215-1233).
gatcctacagctttagcat

SEQ ID NO: 416150 - DNA, 19 bp, Homo sapiens
  siRNA target sequence for ALS2CR4 (NM_152388.1,1224-1242).
gctttagcatctttcttgt

SEQ ID NO: 416151 - DNA, 19 bp, Homo sapiens
  siRNA target sequence for ALS2CR4 (NM_152388.1,1225-1243).
ctttagcatctttcttgta

SEQ ID NO: 416152 - DNA, 19 bp, Homo sapiens
  siRNA target sequence for ALS2CR4 (NM_152388.1,1230-1248).
gcatctttcttgtacttta

SEQ ID NO: 416153 - DNA, 19 bp, Homo sapiens
  siRNA target sequence for ALS2CR4 (NM_152388.1,1241-1259).
gtactttactgctcttata

SEQ ID NO: 416154 - DNA, 19 bp, Homo sapiens
  siRNA target sequence for ALS2CR4 (NM_152388.1,1244-1262).
ctttactgctcttatacta

SEQ ID NO: 416155 - DNA, 19 bp, Homo sapiens
  siRNA target sequence for ALS2CR4 (NM_152388.1,1249-1267).
ctgctcttatactatctct

SEQ ID NO: 416156 - DNA, 19 bp, Homo sapiens
  siRNA target sequence for ALS2CR4 (NM_152388.1,1287-1305).
gacagaatccacctttaca

SEQ ID NO: 416157 - DNA, 19 bp, Homo sapiens
  siRNA target sequence for ALS2CR4 (NM_152388.1,1289-1307).
cagaatccacctttacaca

SEQ ID NO: 416158 - DNA, 19 bp, Homo sapiens
  siRNA target sequence for ALS2CR4 (NM_152388.1,1304-1322).
cacaccttcttctgttaat

SEQ ID NO: 416159 - DNA, 19 bp, Homo sapiens
  siRNA target sequence for ALS2CR4 (NM_152388.1,1366-1384).
catggattgtggtgaatct

SEQ ID NO: 416160 - DNA, 19 bp, Homo sapiens
  siRNA target sequence for ALS2CR4 (NM_152388.1,1391-1409).
ggctcttctggttggatta

SEQ ID NO: 416161 - DNA, 19 bp, Homo sapiens
  siRNA target sequence for ALS2CR4 (NM_152388.1,1392-1410).
gctcttctggttggattat

SEQ ID NO: 416162 - DNA, 19 bp, Homo sapiens
  siRNA target sequence for ALS2CR4 (NM_152388.1,1435-1453).
caggcatggatcttagtga

SEQ ID NO: 416163 - DNA, 19 bp, Homo sapiens
  siRNA target sequence for ALS2CR4 (NM_152388.1,1446-1464).
cttagtgaagagttaatgt

SEQ ID NO: 416164 - DNA, 19 bp, Homo sapiens
  siRNA target sequence for ALS2CR4 (NM_152388.1,1468-1486).
cctcagaggtggaagaata

SEQ ID NO: 416165 - DNA, 19 bp, Homo sapiens
  siRNA target sequence for MGC35338 (NM_152389.1,372-390).
ctgaggagctgcattggaa

SEQ ID NO: 416166 - DNA, 19 bp, Homo sapiens
  siRNA target sequence for MGC35338 (NM_152389.1,425-443).
ctggttctgaaaaatcgat

SEQ ID NO: 416167 - DNA, 19 bp, Homo sapiens
  siRNA target sequence for MGC35338 (NM_152389.1,519-537).
gaaagcaggctctcttcaa

SEQ ID NO: 416168 - DNA, 19 bp, Homo sapiens
  siRNA target sequence for MGC35338 (NM_152389.1,523-541).
gcaggctctcttcaaaaca

SEQ ID NO: 416169 - DNA, 19 bp, Homo sapiens
  siRNA target sequence for MGC33926 (NM_152390.1,89-107).
ctcgtcacggccatcttca

SEQ ID NO: 416170 - DNA, 19 bp, Homo sapiens
  siRNA target sequence for MGC33926 (NM_152390.1,437-455).
cgatgcacggccatcaagt

SEQ ID NO: 416171 - DNA, 19 bp, Homo sapiens
  siRNA target sequence for MGC33926 (NM_152390.1,438-456).
gatgcacggccatcaagta

SEQ ID NO: 416172 - DNA, 19 bp, Homo sapiens
  siRNA target sequence for MGC33926 (NM_152390.1,446-464).
gccatcaagtaccactttt

SEQ ID NO: 416173 - DNA, 19 bp, Homo sapiens
  siRNA target sequence for MGC33926 (NM_152390.1,471-489).
ccatccgcttgcgaaacat

SEQ ID NO: 416174 - DNA, 19 bp, Homo sapiens
  siRNA target sequence for MGC33926 (NM_152390.1,472-490).
catccgcttgcgaaacatt

SEQ ID NO: 416175 - DNA, 19 bp, Homo sapiens
  siRNA target sequence for MGC33926 (NM_152390.1,476-494).
cgcttgcgaaacattcctt

SEQ ID NO: 416176 - DNA, 19 bp, Homo sapiens
  siRNA target sequence for MGC33926 (NM_152390.1,478-496).
cttgcgaaacattcctttt

SEQ ID NO: 416177 - DNA, 19 bp, Homo sapiens
  siRNA target sequence for MGC33926 (NM_152390.1,529-547).
gcacctgcttcatttaaga

SEQ ID NO: 416178 - DNA, 19 bp, Homo sapiens
  siRNA target sequence for MGC33926 (NM_152390.1,530-548).
cacctgcttcatttaagaa

SEQ ID NO: 416179 - DNA, 19 bp, Homo sapiens
  siRNA target sequence for MGC33926 (NM_152390.1,605-623).
gtggccacagtcagtttct

SEQ ID NO: 416180 - DNA, 19 bp, Homo sapiens
  siRNA target sequence for MGC33926 (NM_152390.1,712-730).
cgccagtatctcgtatgat

SEQ ID NO: 416181 - DNA, 19 bp, Homo sapiens
  siRNA target sequence for MGC33926 (NM_152390.1,713-731).
gccagtatctcgtatgatt

SEQ ID NO: 416182 - DNA, 19 bp, Homo sapiens
  siRNA target sequence for MGC33926 (NM_152390.1,714-732).
ccagtatctcgtatgattt

SEQ ID NO: 416183 - DNA, 19 bp, Homo sapiens
  siRNA target sequence for MGC33926 (NM_152390.1,717-735).
gtatctcgtatgatttgaa

SEQ ID NO: 416184 - DNA, 19 bp, Homo sapiens
  siRNA target sequence for MGC33926 (NM_152390.1,733-751).
gaaccggctcccaaagcta

SEQ ID NO: 416185 - DNA, 19 bp, Homo sapiens
  siRNA target sequence for MGC33926 (NM_152390.1,736-754).
ccggctcccaaagctaatt

SEQ ID NO: 416186 - DNA, 19 bp, Homo sapiens
  siRNA target sequence for MGC33926 (NM_152390.1,740-758).
ctcccaaagctaatttata

SEQ ID NO: 416187 - DNA, 19 bp, Homo sapiens
  siRNA target sequence for MGC33926 (NM_152390.1,768-786).
ctgatgtggaacatggtta

SEQ ID NO: 416188 - DNA, 19 bp, Homo sapiens
  siRNA target sequence for MGC33926 (NM_152390.1,810-828).
ggtgcagtttaggctttat

SEQ ID NO: 416189 - DNA, 19 bp, Homo sapiens
  siRNA target sequence for MGC33926 (NM_152390.1,813-831).
gcagtttaggctttattgt

SEQ ID NO: 416190 - DNA, 19 bp, Homo sapiens
  siRNA target sequence for MGC33926 (NM_152390.1,849-867).
gcatcgcttatccgtttat

SEQ ID NO: 416191 - DNA, 19 bp, Homo sapiens
  siRNA target sequence for MGC33926 (NM_152390.1,850-868).
catcgcttatccgtttatt

SEQ ID NO: 416192 - DNA, 19 bp, Homo sapiens
  siRNA target sequence for MGC33926 (NM_152390.1,880-898).
gattgcacagctaaagtct

SEQ ID NO: 416193 - DNA, 19 bp, Homo sapiens
  siRNA target sequence for MGC33602 (NM_152391.2,246-264).
gccttccgagtttacttct

SEQ ID NO: 416194 - DNA, 19 bp, Homo sapiens
  siRNA target sequence for MGC33602 (NM_152391.2,290-308).
ctgcggtaccagtgttact

SEQ ID NO: 416195 - DNA, 19 bp, Homo sapiens
  siRNA target sequence for MGC33602 (NM_152391.2,292-310).
gcggtaccagtgttactat

SEQ ID NO: 416196 - DNA, 19 bp, Homo sapiens
  siRNA target sequence for MGC33602 (NM_152391.2,414-432).
ctccttacatcgctgtatt

SEQ ID NO: 416197 - DNA, 19 bp, Homo sapiens
  siRNA target sequence for MGC33602 (NM_152391.2,417-435).
cttacatcgctgtattggt

SEQ ID NO: 416198 - DNA, 19 bp, Homo sapiens
  siRNA target sequence for MGC33602 (NM_152391.2,479-497).
ctggccatgaatctatgta

SEQ ID NO: 416199 - DNA, 19 bp, Homo sapiens
  siRNA target sequence for MGC33602 (NM_152391.2,481-499).
ggccatgaatctatgtact

SEQ ID NO: 416200 - DNA, 19 bp, Homo sapiens
  siRNA target sequence for MGC33602 (NM_152391.2,482-500).
gccatgaatctatgtactt

SEQ ID NO: 416201 - DNA, 19 bp, Homo sapiens
  siRNA target sequence for MGC33602 (NM_152391.2,595-613).
ctatacctgtgcaacaaga

SEQ ID NO: 416202 - DNA, 19 bp, Homo sapiens
  siRNA target sequence for MGC33602 (NM_152391.2,625-643).
cttaatgaccaccaatgat

SEQ ID NO: 416203 - DNA, 19 bp, Homo sapiens
  siRNA target sequence for MGC33602 (NM_152391.2,631-649).
gaccaccaatgattttaca

SEQ ID NO: 416204 - DNA, 19 bp, Homo sapiens
  siRNA target sequence for MGC33602 (NM_152391.2,648-666).
caattcttctacgttttgt

SEQ ID NO: 416205 - DNA, 19 bp, Homo sapiens
  siRNA target sequence for MGC33602 (NM_152391.2,691-709).
ggtaacagtgacagtactt

SEQ ID NO: 416206 - DNA, 19 bp, Homo sapiens
  siRNA target sequence for MGC39662 (NM_152394.2,518-536).
gaaatattcatcgcaattt

SEQ ID NO: 416207 - DNA, 19 bp, Homo sapiens
  siRNA target sequence for MGC39662 (NM_152394.2,571-589).
gaaagttggctccaagatt

SEQ ID NO: 416208 - DNA, 19 bp, Homo sapiens
  siRNA target sequence for MGC39662 (NM_152394.2,580-598).
ctccaagatttgtctgata

SEQ ID NO: 416209 - DNA, 19 bp, Homo sapiens
  siRNA target sequence for MGC39662 (NM_152394.2,609-627).
gaggaagaaagcctctaaa

SEQ ID NO: 416210 - DNA, 19 bp, Homo sapiens
  siRNA target sequence for MGC39662 (NM_152394.2,652-670).
gcatctaagttaagagaaa

SEQ ID NO: 416211 - DNA, 19 bp, Homo sapiens
  siRNA target sequence for MGC39662 (NM_152394.2,686-704).
cagaagagtcgaaactaaa

SEQ ID NO: 416212 - DNA, 19 bp, Homo sapiens
  siRNA target sequence for MGC39662 (NM_152394.2,688-706).
gaagagtcgaaactaaata

SEQ ID NO: 416213 - DNA, 19 bp, Homo sapiens
  siRNA target sequence for MGC39662 (NM_152394.2,691-709).
gagtcgaaactaaatattt

SEQ ID NO: 416214 - DNA, 19 bp, Homo sapiens
  siRNA target sequence for MGC39662 (NM_152394.2,693-711).
gtcgaaactaaatatttta

SEQ ID NO: 416215 - DNA, 19 bp, Homo sapiens
  siRNA target sequence for MGC39662 (NM_152394.2,747-765).
gttcgagccttctctaaga

SEQ ID NO: 416216 - DNA, 19 bp, Homo sapiens
  siRNA target sequence for MGC39662 (NM_152394.2,753-771).
gccttctctaagaacgtta

SEQ ID NO: 416217 - DNA, 19 bp, Homo sapiens
  siRNA target sequence for MGC39662 (NM_152394.2,777-795).
catcggaccaccatccatt

SEQ ID NO: 416218 - DNA, 19 bp, Homo sapiens
  siRNA target sequence for MGC39662 (NM_152394.2,818-836).
ccaatttaggcattaactt

SEQ ID NO: 416219 - DNA, 19 bp, Homo sapiens
  siRNA target sequence for MGC39662 (NM_152394.2,884-902).
gcgatctaagagcattttt

SEQ ID NO: 416220 - DNA, 19 bp, Homo sapiens
  siRNA target sequence for MGC39662 (NM_152394.2,934-952).
gggcatgcctcctgttgta

SEQ ID NO: 416221 - DNA, 19 bp, Homo sapiens
  siRNA target sequence for MGC39662 (NM_152394.2,935-953).
ggcatgcctcctgttgtat

SEQ ID NO: 416222 - DNA, 19 bp, Homo sapiens
  siRNA target sequence for MGC39662 (NM_152394.2,936-954).
gcatgcctcctgttgtatt

SEQ ID NO: 416223 - DNA, 19 bp, Homo sapiens
  siRNA target sequence for MGC39662 (NM_152394.2,960-978).
ccaaaatctgattgactat

SEQ ID NO: 416224 - DNA, 19 bp, Homo sapiens
  siRNA target sequence for MGC39662 (NM_152394.2,1108-1126).
caacgaatggccagacatt

SEQ ID NO: 416225 - DNA, 19 bp, Homo sapiens
  siRNA target sequence for MGC39662 (NM_152394.2,1266-1284).
cagtaacatgtctatcatt

SEQ ID NO: 416226 - DNA, 19 bp, Homo sapiens
  siRNA target sequence for MGC39662 (NM_152394.2,1332-1350).
cttagagaagcactacaaa

SEQ ID NO: 416227 - DNA, 19 bp, Homo sapiens
  siRNA target sequence for MGC39662 (NM_152394.2,1378-1396).
ccagatgggacaacacaaa

SEQ ID NO: 416228 - DNA, 19 bp, Homo sapiens
  siRNA target sequence for MGC39662 (NM_152394.2,1381-1399).
gatgggacaacacaaatat

SEQ ID NO: 416229 - DNA, 19 bp, Homo sapiens
  siRNA target sequence for MGC39662 (NM_152394.2,1384-1402).
gggacaacacaaatattct

SEQ ID NO: 416230 - DNA, 19 bp, Homo sapiens
  siRNA target sequence for MGC39662 (NM_152394.2,1385-1403).
ggacaacacaaatattcta

SEQ ID NO: 416231 - DNA, 19 bp, Homo sapiens
  siRNA target sequence for MGC39662 (NM_152394.2,1429-1447).
cgagtgcccaacaaggtaa

SEQ ID NO: 416232 - DNA, 19 bp, Homo sapiens
  siRNA target sequence for MGC39662 (NM_152394.2,1434-1452).
gcccaacaaggtaaatggt

SEQ ID NO: 416233 - DNA, 19 bp, Homo sapiens
  siRNA target sequence for MGC39662 (NM_152394.2,1437-1455).
caacaaggtaaatggtttt

SEQ ID NO: 416234 - DNA, 19 bp, Homo sapiens
  siRNA target sequence for MGC39662 (NM_152394.2,1457-1475).
cttgtatagtccaagaaga

SEQ ID NO: 416235 - DNA, 19 bp, Homo sapiens
  siRNA target sequence for MGC39662 (NM_152394.2,1460-1478).
gtatagtccaagaagatat

SEQ ID NO: 416236 - DNA, 19 bp, Homo sapiens
  siRNA target sequence for MGC39662 (NM_152394.2,1482-1500).
cactaaccctgctatccta

SEQ ID NO: 416237 - DNA, 19 bp, Homo sapiens
  siRNA target sequence for MGC39662 (NM_152394.2,1532-1550).
gctatcatcccaatggaaa

SEQ ID NO: 416238 - DNA, 19 bp, Homo sapiens
  siRNA target sequence for MGC39662 (NM_152394.2,1556-1574).
gggtatacatcaatatctt

SEQ ID NO: 416239 - DNA, 19 bp, Homo sapiens
  siRNA target sequence for MGC39662 (NM_152394.2,1591-1609).
gatcaagccggcaacagaa

SEQ ID NO: 416240 - DNA, 19 bp, Homo sapiens
  siRNA target sequence for MGC39662 (NM_152394.2,1594-1612).
caagccggcaacagaataa

SEQ ID NO: 416241 - DNA, 19 bp, Homo sapiens
  siRNA target sequence for MGC39662 (NM_152394.2,1675-1693).
ctggctttgaaccgttata

SEQ ID NO: 416242 - DNA, 19 bp, Homo sapiens
  siRNA target sequence for MGC39662 (NM_152394.2,1677-1695).
ggctttgaaccgttatatt

SEQ ID NO: 416243 - DNA, 19 bp, Homo sapiens
  siRNA target sequence for MGC39662 (NM_152394.2,1697-1715).
gagtccgcatcttagaaca

SEQ ID NO: 416244 - DNA, 19 bp, Homo sapiens
  siRNA target sequence for MGC39662 (NM_152394.2,1727-1745).
ctataacttttctagcaat

SEQ ID NO: 416245 - DNA, 19 bp, Homo sapiens
  siRNA target sequence for MGC39662 (NM_152394.2,1807-1825).
ccaatcctccgatacgtaa

SEQ ID NO: 416246 - DNA, 19 bp, Homo sapiens
  siRNA target sequence for MGC39662 (NM_152394.2,1846-1864).
ctggccagtttaataaaga

SEQ ID NO: 416247 - DNA, 19 bp, Homo sapiens
  siRNA target sequence for MGC39662 (NM_152394.2,1863-1881).
gatccgtcgcctgtttcat

SEQ ID NO: 416248 - DNA, 19 bp, Homo sapiens
  siRNA target sequence for MGC39662 (NM_152394.2,1866-1884).
ccgtcgcctgtttcataaa

SEQ ID NO: 416249 - DNA, 19 bp, Homo sapiens
  siRNA target sequence for MGC39662 (NM_152394.2,1868-1886).
gtcgcctgtttcataaact

SEQ ID NO: 416250 - DNA, 19 bp, Homo sapiens
  siRNA target sequence for MGC39662 (NM_152394.2,1871-1889).
gcctgtttcataaacttga

SEQ ID NO: 416251 - DNA, 19 bp, Homo sapiens
  siRNA target sequence for MGC39662 (NM_152394.2,1872-1890).
cctgtttcataaacttgaa

SEQ ID NO: 416252 - DNA, 19 bp, Homo sapiens
  siRNA target sequence for MGC39662 (NM_152394.2,1991-2009).
ctggtataaagcaagatat

SEQ ID NO: 416253 - DNA, 19 bp, Homo sapiens
  siRNA target sequence for MGC39662 (NM_152394.2,1993-2011).
ggtataaagcaagatataa

SEQ ID NO: 416254 - DNA, 19 bp, Homo sapiens
  siRNA target sequence for MGC39662 (NM_152394.2,1994-2012).
gtataaagcaagatataat

SEQ ID NO: 416255 - DNA, 19 bp, Homo sapiens
  siRNA target sequence for FLJ31265 (NM_152395.1,363-381).
gtgcgagtgcccctgtata

SEQ ID NO: 416256 - DNA, 19 bp, Homo sapiens
  siRNA target sequence for MGC39725 (NM_152397.1,89-107).
cgaaggaaccctcaaaaga

SEQ ID NO: 416257 - DNA, 19 bp, Homo sapiens
  siRNA target sequence for MGC39725 (NM_152397.1,146-164).
ccttaggagcagagtcaaa

SEQ ID NO: 416258 - DNA, 19 bp, Homo sapiens
  siRNA target sequence for MGC39725 (NM_152397.1,362-380).
gctggtggcggctgatact

SEQ ID NO: 416259 - DNA, 19 bp, Homo sapiens
  siRNA target sequence for MGC39725 (NM_152397.1,372-390).
gctgatactgtccaagatt

SEQ ID NO: 416260 - DNA, 19 bp, Homo sapiens
  siRNA target sequence for MGC39725 (NM_152397.1,641-659).
gcattgtgacagagtgtat

SEQ ID NO: 416261 - DNA, 19 bp, Homo sapiens
  siRNA target sequence for MGC45416 (NM_152398.1,220-238).
gctcgtggaaaccaagata

SEQ ID NO: 416262 - DNA, 19 bp, Homo sapiens
  siRNA target sequence for MGC45416 (NM_152398.1,273-291).
cctgttgttttgtccaaaa

SEQ ID NO: 416263 - DNA, 19 bp, Homo sapiens
  siRNA target sequence for MGC45416 (NM_152398.1,409-427).
ctagtctaccaaggttatt

SEQ ID NO: 416264 - DNA, 19 bp, Homo sapiens
  siRNA target sequence for MGC45416 (NM_152398.1,421-439).
ggttatttggcagctaatt

SEQ ID NO: 416265 - DNA, 19 bp, Homo sapiens
  siRNA target sequence for MGC45416 (NM_152398.1,429-447).
ggcagctaattctagattt

SEQ ID NO: 416266 - DNA, 19 bp, Homo sapiens
  siRNA target sequence for MGC45416 (NM_152398.1,433-451).
gctaattctagatttggat

SEQ ID NO: 416267 - DNA, 19 bp, Homo sapiens
  siRNA target sequence for FLJ30834 (NM_152399.1,290-308).
gatcttatcaggacaatct

SEQ ID NO: 416268 - DNA, 19 bp, Homo sapiens
  siRNA target sequence for FLJ30834 (NM_152399.1,363-381).
catctggtgcgattctaca

SEQ ID NO: 416269 - DNA, 19 bp, Homo sapiens
  siRNA target sequence for FLJ30834 (NM_152399.1,366-384).
ctggtgcgattctacagaa

SEQ ID NO: 416270 - DNA, 19 bp, Homo sapiens
  siRNA target sequence for FLJ30834 (NM_152399.1,508-526).
ccgcagcaccccacaagaa

SEQ ID NO: 416271 - DNA, 19 bp, Homo sapiens
  siRNA target sequence for FLJ30834 (NM_152399.1,551-569).
cggggcatgccagttcaaa

SEQ ID NO: 416272 - DNA, 19 bp, Homo sapiens
  siRNA target sequence for FLJ30834 (NM_152399.1,552-570).
ggggcatgccagttcaaat

SEQ ID NO: 416273 - DNA, 19 bp, Homo sapiens
  siRNA target sequence for FLJ30834 (NM_152399.1,555-573).
gcatgccagttcaaatcca

SEQ ID NO: 416274 - DNA, 19 bp, Homo sapiens
  siRNA target sequence for FLJ30834 (NM_152399.1,566-584).
caaatccacttccttttaa

SEQ ID NO: 416275 - DNA, 19 bp, Homo sapiens
  siRNA target sequence for FLJ30834 (NM_152399.1,595-613).
cagcagcccaataactttt

SEQ ID NO: 416276 - DNA, 19 bp, Homo sapiens
  siRNA target sequence for FLJ39370 (NM_152400.1,203-221).
gagcgagcaggatgttgaa

SEQ ID NO: 416277 - DNA, 19 bp, Homo sapiens
  siRNA target sequence for FLJ39370 (NM_152400.1,205-223).
gcgagcaggatgttgaaga

SEQ ID NO: 416278 - DNA, 19 bp, Homo sapiens
  siRNA target sequence for FLJ39370 (NM_152400.1,314-332).
gggcttcacaaggatgtat

SEQ ID NO: 416279 - DNA, 19 bp, Homo sapiens
  siRNA target sequence for FLJ39370 (NM_152400.1,315-333).
ggcttcacaaggatgtatt

SEQ ID NO: 416280 - DNA, 19 bp, Homo sapiens
  siRNA target sequence for FLJ39370 (NM_152400.1,316-334).
gcttcacaaggatgtattt

SEQ ID NO: 416281 - DNA, 19 bp, Homo sapiens
  siRNA target sequence for FLJ39370 (NM_152400.1,343-361).
gaatagtggaaccagtaat

SEQ ID NO: 416282 - DNA, 19 bp, Homo sapiens
  siRNA target sequence for FLJ39370 (NM_152400.1,348-366).
gtggaaccagtaatagtca

SEQ ID NO: 416283 - DNA, 19 bp, Homo sapiens
  siRNA target sequence for FLJ39370 (NM_152400.1,401-419).
gcaagcccttggactagtt

SEQ ID NO: 416284 - DNA, 19 bp, Homo sapiens
  siRNA target sequence for FLJ39370 (NM_152400.1,411-429).
ggactagttgctgttcttt

SEQ ID NO: 416285 - DNA, 19 bp, Homo sapiens
  siRNA target sequence for MGC26568 (NM_152402.1,218-236).
ccgttctcagccaggaatt

SEQ ID NO: 416286 - DNA, 19 bp, Homo sapiens
  siRNA target sequence for MGC26568 (NM_152402.1,266-284).
cctgcgtggggatgttctt

SEQ ID NO: 416287 - DNA, 19 bp, Homo sapiens
  siRNA target sequence for MGC26568 (NM_152402.1,376-394).
caagccacgggctcaaagt

SEQ ID NO: 416288 - DNA, 19 bp, Homo sapiens
  siRNA target sequence for MGC26568 (NM_152402.1,385-403).
ggctcaaagtccctctatt

SEQ ID NO: 416289 - DNA, 19 bp, Homo sapiens
  siRNA target sequence for MGC26568 (NM_152402.1,389-407).
caaagtccctctattatta

SEQ ID NO: 416290 - DNA, 19 bp, Homo sapiens
  siRNA target sequence for MGC26568 (NM_152402.1,393-411).
gtccctctattattatggt

SEQ ID NO: 416291 - DNA, 19 bp, Homo sapiens
  siRNA target sequence for MGC26568 (NM_152402.1,513-531).
gttcaccaaagcgaaacaa

SEQ ID NO: 416292 - DNA, 19 bp, Homo sapiens
  siRNA target sequence for MGC26568 (NM_152402.1,523-541).
gcgaaacaaaacaagttta

SEQ ID NO: 416293 - DNA, 19 bp, Homo sapiens
  siRNA target sequence for MGC26568 (NM_152402.1,553-571).
cagtttagtgtgttctact

SEQ ID NO: 416294 - DNA, 19 bp, Homo sapiens
  siRNA target sequence for MGC26568 (NM_152402.1,625-643).
gacccaactcttatatgga

SEQ ID NO: 416295 - DNA, 19 bp, Homo sapiens
  siRNA target sequence for MGC26568 (NM_152402.1,808-826).
ggagcttatctcttgtact

SEQ ID NO: 416296 - DNA, 19 bp, Homo sapiens
  siRNA target sequence for MGC26568 (NM_152402.1,809-827).
gagcttatctcttgtactt

SEQ ID NO: 416297 - DNA, 19 bp, Homo sapiens
  siRNA target sequence for MGC26568 (NM_152402.1,837-855).
gggacttcttcttttggta

SEQ ID NO: 416298 - DNA, 19 bp, Homo sapiens
  siRNA target sequence for MGC26568 (NM_152402.1,847-865).
cttttggtactgcattatt

SEQ ID NO: 416299 - DNA, 19 bp, Homo sapiens
  siRNA target sequence for MGC26568 (NM_152402.1,888-906).
gtgcggcctgttttacttt

SEQ ID NO: 416300 - DNA, 19 bp, Homo sapiens
  siRNA target sequence for MGC26568 (NM_152402.1,891-909).
cggcctgttttactttagt

SEQ ID NO: 416301 - DNA, 19 bp, Homo sapiens
  siRNA target sequence for MGC26568 (NM_152402.1,893-911).
gcctgttttactttagtga

SEQ ID NO: 416302 - DNA, 19 bp, Homo sapiens
  siRNA target sequence for MGC26568 (NM_152402.1,918-936).
gtaccagaaaggcatatct

SEQ ID NO: 416303 - DNA, 19 bp, Homo sapiens
  siRNA target sequence for MGC26568 (NM_152402.1,941-959).
gggccattgtgtttatctt

SEQ ID NO: 416304 - DNA, 19 bp, Homo sapiens
  siRNA target sequence for MGC26568 (NM_152402.1,951-969).
gtttatcttgggtagactt

SEQ ID NO: 416305 - DNA, 19 bp, Homo sapiens
  siRNA target sequence for MGC26568 (NM_152402.1,1110-1128).
ctacgtaacatggaactta

SEQ ID NO: 416306 - DNA, 19 bp, Homo sapiens
  siRNA target sequence for MGC26568 (NM_152402.1,1113-1131).
cgtaacatggaacttaatt

SEQ ID NO: 416307 - DNA, 19 bp, Homo sapiens
  siRNA target sequence for MGC26568 (NM_152402.1,1148-1166).
ggtgggtagaagattctaa

SEQ ID NO: 416308 - DNA, 19 bp, Homo sapiens
  siRNA target sequence for MGC26568 (NM_152402.1,1149-1167).
gtgggtagaagattctaat

SEQ ID NO: 416309 - DNA, 19 bp, Homo sapiens
  siRNA target sequence for MGC26568 (NM_152402.1,1151-1169).
gggtagaagattctaatat

SEQ ID NO: 416310 - DNA, 19 bp, Homo sapiens
  siRNA target sequence for MGC26568 (NM_152402.1,1152-1170).
ggtagaagattctaatatt

SEQ ID NO: 416311 - DNA, 19 bp, Homo sapiens
  siRNA target sequence for MGC26568 (NM_152402.1,1191-1209).
gaaacggtcgagatcttct

SEQ ID NO: 416312 - DNA, 19 bp, Homo sapiens
  siRNA target sequence for MGC26568 (NM_152402.1,1234-1252).
ggagtggaaacttcaaata

SEQ ID NO: 416313 - DNA, 19 bp, Homo sapiens
  siRNA target sequence for MGC26568 (NM_152402.1,1264-1282).
ccgccaaagaggaaagaga

SEQ ID NO: 416314 - DNA, 19 bp, Homo sapiens
  siRNA target sequence for JMY (NM_152405.1,18-36).
ggagcttctggacttgtat

SEQ ID NO: 416315 - DNA, 19 bp, Homo sapiens
  siRNA target sequence for JMY (NM_152405.1,74-92).
ctacaaccgaactctatca

SEQ ID NO: 416316 - DNA, 19 bp, Homo sapiens
  siRNA target sequence for JMY (NM_152405.1,77-95).
caaccgaactctatcagta

SEQ ID NO: 416317 - DNA, 19 bp, Homo sapiens
  siRNA target sequence for JMY (NM_152405.1,111-129).
ccgagacatgagagaactt

SEQ ID NO: 416318 - DNA, 19 bp, Homo sapiens
  siRNA target sequence for JMY (NM_152405.1,156-174).
gatttccatggagaatgat

SEQ ID NO: 416319 - DNA, 19 bp, Homo sapiens
  siRNA target sequence for JMY (NM_152405.1,161-179).
ccatggagaatgattatct

SEQ ID NO: 416320 - DNA, 19 bp, Homo sapiens
  siRNA target sequence for JMY (NM_152405.1,191-209).
gaattgagagtctacaaaa

SEQ ID NO: 416321 - DNA, 19 bp, Homo sapiens
  siRNA target sequence for JMY (NM_152405.1,240-258).
catggctgtactgtctatt

SEQ ID NO: 416322 - DNA, 19 bp, Homo sapiens
  siRNA target sequence for JMY (NM_152405.1,250-268).
ctgtctattcaagatctta

SEQ ID NO: 416323 - DNA, 19 bp, Homo sapiens
  siRNA target sequence for JMY (NM_152405.1,254-272).
ctattcaagatcttactgt

SEQ ID NO: 416324 - DNA, 19 bp, Homo sapiens
  siRNA target sequence for JMY (NM_152405.1,262-280).
gatcttactgtcaagtact

SEQ ID NO: 416325 - DNA, 19 bp, Homo sapiens
  siRNA target sequence for JMY (NM_152405.1,320-338).
gaatgcgagctgatcagaa

SEQ ID NO: 416326 - DNA, 19 bp, Homo sapiens
  siRNA target sequence for JMY (NM_152405.1,325-343).
cgagctgatcagaagaaat

SEQ ID NO: 416327 - DNA, 19 bp, Homo sapiens
  siRNA target sequence for JMY (NM_152405.1,367-385).
gctgctgaacggatggaaa

SEQ ID NO: 416328 - DNA, 19 bp, Homo sapiens
  siRNA target sequence for JMY (NM_152405.1,371-389).
ctgaacggatggaaaaact

SEQ ID NO: 416329 - DNA, 19 bp, Homo sapiens
  siRNA target sequence for JMY (NM_152405.1,444-462).
cttggaacagcggaaacat

SEQ ID NO: 416330 - DNA, 19 bp, Homo sapiens
  siRNA target sequence for JMY (NM_152405.1,455-473).
ggaaacatgcactaaagga

SEQ ID NO: 416331 - DNA, 19 bp, Homo sapiens
  siRNA target sequence for JMY (NM_152405.1,456-474).
gaaacatgcactaaaggaa

SEQ ID NO: 416332 - DNA, 19 bp, Homo sapiens
  siRNA target sequence for JMY (NM_152405.1,512-530).
cacgattggatcagttaga

SEQ ID NO: 416333 - DNA, 19 bp, Homo sapiens
  siRNA target sequence for JMY (NM_152405.1,525-543).
gttagaagctgattattat

SEQ ID NO: 416334 - DNA, 19 bp, Homo sapiens
  siRNA target sequence for JMY (NM_152405.1,608-626).
cagcgcaactagaaagcat

SEQ ID NO: 416335 - DNA, 19 bp, Homo sapiens
  siRNA target sequence for JMY (NM_152405.1,624-642).
catcaaaagacttatatca

SEQ ID NO: 416336 - DNA, 19 bp, Homo sapiens
  siRNA target sequence for JMY (NM_152405.1,718-736).
gcatctgcgtacttacaga

SEQ ID NO: 416337 - DNA, 19 bp, Homo sapiens
  siRNA target sequence for JMY (NM_152405.1,839-857).
gtattgcaaaacacaatga

SEQ ID NO: 416338 - DNA, 19 bp, Homo sapiens
  siRNA target sequence for JMY (NM_152405.1,870-888).
gcgcactcggattgaagat

SEQ ID NO: 416339 - DNA, 19 bp, Homo sapiens
  siRNA target sequence for JMY (NM_152405.1,872-890).
gcactcggattgaagatga

SEQ ID NO: 416340 - DNA, 19 bp, Homo sapiens
  siRNA target sequence for JMY (NM_152405.1,873-891).
cactcggattgaagatgaa

SEQ ID NO: 416341 - DNA, 19 bp, Homo sapiens
  siRNA target sequence for JMY (NM_152405.1,875-893).
ctcggattgaagatgaata

SEQ ID NO: 416342 - DNA, 19 bp, Homo sapiens
  siRNA target sequence for JMY (NM_152405.1,981-999).
gagaacactggatagactt

SEQ ID NO: 416343 - DNA, 19 bp, Homo sapiens
  siRNA target sequence for JMY (NM_152405.1,991-1009).
gatagacttcgaacattta

SEQ ID NO: 416344 - DNA, 19 bp, Homo sapiens
  siRNA target sequence for JMY (NM_152405.1,1021-1039).
cctgggcaagtcatactta

SEQ ID NO: 416345 - DNA, 19 bp, Homo sapiens
  siRNA target sequence for JMY (NM_152405.1,1022-1040).
ctgggcaagtcatacttaa

SEQ ID NO: 416346 - DNA, 19 bp, Homo sapiens
  siRNA target sequence for JMY (NM_152405.1,1024-1042).
gggcaagtcatacttaaat

SEQ ID NO: 416347 - DNA, 19 bp, Homo sapiens
  siRNA target sequence for JMY (NM_152405.1,1026-1044).
gcaagtcatacttaaatca

SEQ ID NO: 416348 - DNA, 19 bp, Homo sapiens
  siRNA target sequence for JMY (NM_152405.1,1027-1045).
caagtcatacttaaatcaa

SEQ ID NO: 416349 - DNA, 19 bp, Homo sapiens
  siRNA target sequence for JMY (NM_152405.1,1057-1075).
ctagctcatgcaagaagaa

SEQ ID NO: 416350 - DNA, 19 bp, Homo sapiens
  siRNA target sequence for JMY (NM_152405.1,1116-1134).
ctctttaccaagtgtgtta

SEQ ID NO: 416351 - DNA, 19 bp, Homo sapiens
  siRNA target sequence for JMY (NM_152405.1,1209-1227).
gagccttgtgcaacttgaa

SEQ ID NO: 416352 - DNA, 19 bp, Homo sapiens
  siRNA target sequence for JMY (NM_152405.1,1232-1250).
cttcattaacacaacttga

SEQ ID NO: 416353 - DNA, 19 bp, Homo sapiens
  siRNA target sequence for JMY (NM_152405.1,1306-1324).
cttccacttttgaataaca

SEQ ID NO: 416354 - DNA, 19 bp, Homo sapiens
  siRNA target sequence for JMY (NM_152405.1,1323-1341).
caacctcgaaccatgttct

SEQ ID NO: 416355 - DNA, 19 bp, Homo sapiens
  siRNA target sequence for JMY (NM_152405.1,1326-1344).
cctcgaaccatgttctgtt

SEQ ID NO: 416356 - DNA, 19 bp, Homo sapiens
  siRNA target sequence for JMY (NM_152405.1,1327-1345).
ctcgaaccatgttctgtta

SEQ ID NO: 416357 - DNA, 19 bp, Homo sapiens
  siRNA target sequence for JMY (NM_152405.1,1334-1352).
catgttctgttaccataaa

SEQ ID NO: 416358 - DNA, 19 bp, Homo sapiens
  siRNA target sequence for JMY (NM_152405.1,1641-1659).
cttgaagcgtggtagtttt

SEQ ID NO: 416359 - DNA, 19 bp, Homo sapiens
  siRNA target sequence for JMY (NM_152405.1,1651-1669).
ggtagttttcatctgaaaa

SEQ ID NO: 416360 - DNA, 19 bp, Homo sapiens
  siRNA target sequence for JMY (NM_152405.1,1793-1811).
cacttctacccgatacaga

SEQ ID NO: 416361 - DNA, 19 bp, Homo sapiens
  siRNA target sequence for JMY (NM_152405.1,1803-1821).
cgatacagaccctctaaca

SEQ ID NO: 416362 - DNA, 19 bp, Homo sapiens
  siRNA target sequence for JMY (NM_152405.1,1878-1896).
cgaagaggaggctttacct

SEQ ID NO: 416363 - DNA, 19 bp, Homo sapiens
  siRNA target sequence for JMY (NM_152405.1,1879-1897).
gaagaggaggctttacctt

SEQ ID NO: 416364 - DNA, 19 bp, Homo sapiens
  siRNA target sequence for GRPEL2 (NM_152407.2,200-218).
gggtaaaagctgttaaact

SEQ ID NO: 416365 - DNA, 19 bp, Homo sapiens
  siRNA target sequence for GRPEL2 (NM_152407.2,246-264).
gagataccagagagctata

SEQ ID NO: 416366 - DNA, 19 bp, Homo sapiens
  siRNA target sequence for GRPEL2 (NM_152407.2,255-273).
gagagctatagctgattgt

SEQ ID NO: 416367 - DNA, 19 bp, Homo sapiens
  siRNA target sequence for GRPEL2 (NM_152407.2,257-275).
gagctatagctgattgtga

SEQ ID NO: 416368 - DNA, 19 bp, Homo sapiens
  siRNA target sequence for GRPEL2 (NM_152407.2,259-277).
gctatagctgattgtgaaa

SEQ ID NO: 416369 - DNA, 19 bp, Homo sapiens
  siRNA target sequence for GRPEL2 (NM_152407.2,304-322).
gtggaagacgccaagatat

SEQ ID NO: 416370 - DNA, 19 bp, Homo sapiens
  siRNA target sequence for GRPEL2 (NM_152407.2,510-528).
gacacccattggtgacaaa

SEQ ID NO: 416371 - DNA, 19 bp, Homo sapiens
  siRNA target sequence for GRPEL2 (NM_152407.2,512-530).
cacccattggtgacaaata

SEQ ID NO: 416372 - DNA, 19 bp, Homo sapiens
  siRNA target sequence for GRPEL2 (NM_152407.2,587-605).
ctggcaccgtggcattagt

SEQ ID NO: 416373 - DNA, 19 bp, Homo sapiens
  siRNA target sequence for GRPEL2 (NM_152407.2,589-607).
ggcaccgtggcattagtaa

SEQ ID NO: 416374 - DNA, 19 bp, Homo sapiens
  siRNA target sequence for GRPEL2 (NM_152407.2,591-609).
caccgtggcattagtaaga

SEQ ID NO: 416375 - DNA, 19 bp, Homo sapiens
  siRNA target sequence for GRPEL2 (NM_152407.2,593-611).
ccgtggcattagtaagaca

SEQ ID NO: 416376 - DNA, 19 bp, Homo sapiens
  siRNA target sequence for GRPEL2 (NM_152407.2,594-612).
cgtggcattagtaagacaa

SEQ ID NO: 416377 - DNA, 19 bp, Homo sapiens
  siRNA target sequence for GRPEL2 (NM_152407.2,597-615).
ggcattagtaagacaagat

SEQ ID NO: 416378 - DNA, 19 bp, Homo sapiens
  siRNA target sequence for GRPEL2 (NM_152407.2,625-643).
cttcatggccgcaccatta

SEQ ID NO: 416379 - DNA, 19 bp, Homo sapiens
  siRNA target sequence for FLJ35779 (NM_152408.1,63-81).
gaactgcttcattatgcta

SEQ ID NO: 416380 - DNA, 19 bp, Homo sapiens
  siRNA target sequence for FLJ35779 (NM_152408.1,78-96).
gctatagtgactccaaata

SEQ ID NO: 416381 - DNA, 19 bp, Homo sapiens
  siRNA target sequence for FLJ35779 (NM_152408.1,79-97).
ctatagtgactccaaatat

SEQ ID NO: 416382 - DNA, 19 bp, Homo sapiens
  siRNA target sequence for FLJ35779 (NM_152408.1,112-130).
cacagtcatctcatcctaa

SEQ ID NO: 416383 - DNA, 19 bp, Homo sapiens
  siRNA target sequence for FLJ35779 (NM_152408.1,121-139).
ctcatcctaagggagaatt

SEQ ID NO: 416384 - DNA, 19 bp, Homo sapiens
  siRNA target sequence for FLJ35779 (NM_152408.1,177-195).
cttcatagtcaaggaaata

SEQ ID NO: 416385 - DNA, 19 bp, Homo sapiens
  siRNA target sequence for FLJ35779 (NM_152408.1,309-327).
cacccagtcatggattttt

SEQ ID NO: 416386 - DNA, 19 bp, Homo sapiens
  siRNA target sequence for FLJ35779 (NM_152408.1,367-385).
caaattctagtcatacaga

SEQ ID NO: 416387 - DNA, 19 bp, Homo sapiens
  siRNA target sequence for FLJ35779 (NM_152408.1,406-424).
gcgattttcttgtttctga

SEQ ID NO: 416388 - DNA, 19 bp, Homo sapiens
  siRNA target sequence for FLJ35779 (NM_152408.1,471-489).
ggtcttaagacaaacatca

SEQ ID NO: 416389 - DNA, 19 bp, Homo sapiens
  siRNA target sequence for FLJ35779 (NM_152408.1,479-497).
gacaaacatcatatctgaa

SEQ ID NO: 416390 - DNA, 19 bp, Homo sapiens
  siRNA target sequence for FLJ35779 (NM_152408.1,508-526).
ggagacttaattttattga

SEQ ID NO: 416391 - DNA, 19 bp, Homo sapiens
  siRNA target sequence for FLJ35779 (NM_152408.1,525-543).
gactggcaccgaatggaaa

SEQ ID NO: 416392 - DNA, 19 bp, Homo sapiens
  siRNA target sequence for FLJ35779 (NM_152408.1,587-605).
gtgtaatcagatcaatgaa

SEQ ID NO: 416393 - DNA, 19 bp, Homo sapiens
  siRNA target sequence for FLJ35779 (NM_152408.1,589-607).
gtaatcagatcaatgaatt

SEQ ID NO: 416394 - DNA, 19 bp, Homo sapiens
  siRNA target sequence for FLJ35779 (NM_152408.1,635-653).
ctccattgggagaaaagat

SEQ ID NO: 416395 - DNA, 19 bp, Homo sapiens
  siRNA target sequence for FLJ35779 (NM_152408.1,637-655).
ccattgggagaaaagatga

SEQ ID NO: 416396 - DNA, 19 bp, Homo sapiens
  siRNA target sequence for FLJ35779 (NM_152408.1,679-697).
ccataggcaagcaaaagga

SEQ ID NO: 416397 - DNA, 19 bp, Homo sapiens
  siRNA target sequence for FLJ35779 (NM_152408.1,680-698).
cataggcaagcaaaaggaa

SEQ ID NO: 416398 - DNA, 19 bp, Homo sapiens
  siRNA target sequence for FLJ35779 (NM_152408.1,751-769).
ccagacaggatgtttatga

SEQ ID NO: 416399 - DNA, 19 bp, Homo sapiens
  siRNA target sequence for FLJ35779 (NM_152408.1,829-847).
ggcgttccgtagtgcaaaa

SEQ ID NO: 416400 - DNA, 19 bp, Homo sapiens
  siRNA target sequence for FLJ35779 (NM_152408.1,832-850).
gttccgtagtgcaaaagca

SEQ ID NO: 416401 - DNA, 19 bp, Homo sapiens
  siRNA target sequence for FLJ35779 (NM_152408.1,929-947).
caaagttgctatgttatct

SEQ ID NO: 416402 - DNA, 19 bp, Homo sapiens
  siRNA target sequence for FLJ35779 (NM_152408.1,941-959).
gttatctggagctttggaa

SEQ ID NO: 416403 - DNA, 19 bp, Homo sapiens
  siRNA target sequence for FLJ35779 (NM_152408.1,1034-1052).
gaggggtgtatgtgcatta

SEQ ID NO: 416404 - DNA, 19 bp, Homo sapiens
  siRNA target sequence for FLJ35779 (NM_152408.1,1056-1074).
cttgaagccatgactatat

SEQ ID NO: 416405 - DNA, 19 bp, Homo sapiens
  siRNA target sequence for FLJ35779 (NM_152408.1,1062-1080).
gccatgactatatttcaaa

SEQ ID NO: 416406 - DNA, 19 bp, Homo sapiens
  siRNA target sequence for FLJ35779 (NM_152408.1,1063-1081).
ccatgactatatttcaaaa

SEQ ID NO: 416407 - DNA, 19 bp, Homo sapiens
  siRNA target sequence for FLJ35779 (NM_152408.1,1095-1113).
gggatagactccacaaata

SEQ ID NO: 416408 - DNA, 19 bp, Homo sapiens
  siRNA target sequence for FLJ35779 (NM_152408.1,1096-1114).
ggatagactccacaaataa

SEQ ID NO: 416409 - DNA, 19 bp, Homo sapiens
  siRNA target sequence for FLJ35779 (NM_152408.1,1097-1115).
gatagactccacaaataat

SEQ ID NO: 416410 - DNA, 19 bp, Homo sapiens
  siRNA target sequence for FLJ35779 (NM_152408.1,1190-1208).
gcccttaccagttacatca

SEQ ID NO: 416411 - DNA, 19 bp, Homo sapiens
  siRNA target sequence for FLJ35779 (NM_152408.1,1269-1287).
gctgcttcgatgacttcta

SEQ ID NO: 416412 - DNA, 19 bp, Homo sapiens
  siRNA target sequence for FLJ35779 (NM_152408.1,1373-1391).
gtatgtgccaagagttgta

SEQ ID NO: 416413 - DNA, 19 bp, Homo sapiens
  siRNA target sequence for FLJ35779 (NM_152408.1,1430-1448).
ccggatcacaggaagatgt

SEQ ID NO: 416414 - DNA, 19 bp, Homo sapiens
  siRNA target sequence for FLJ35779 (NM_152408.1,1474-1492).
gcagcagtttagctataat

SEQ ID NO: 416415 - DNA, 19 bp, Homo sapiens
  siRNA target sequence for FLJ35779 (NM_152408.1,1589-1607).
gaccattcatcctgaaagt

SEQ ID NO: 416416 - DNA, 19 bp, Homo sapiens
  siRNA target sequence for FLJ35779 (NM_152408.1,1661-1679).
cacaagtgttcattccata

SEQ ID NO: 416417 - DNA, 19 bp, Homo sapiens
  siRNA target sequence for FLJ37562 (NM_152409.2,112-130).
gccttcctgcctcaatgaa

SEQ ID NO: 416418 - DNA, 19 bp, Homo sapiens
  siRNA target sequence for FLJ37562 (NM_152409.2,139-157).
gagagctgctgatcagttt

SEQ ID NO: 416419 - DNA, 19 bp, Homo sapiens
  siRNA target sequence for FLJ37562 (NM_152409.2,146-164).
gctgatcagtttgacatat

SEQ ID NO: 416420 - DNA, 19 bp, Homo sapiens
  siRNA target sequence for FLJ37562 (NM_152409.2,152-170).
cagtttgacatatattcct

SEQ ID NO: 416421 - DNA, 19 bp, Homo sapiens
  siRNA target sequence for FLJ37562 (NM_152409.2,478-496).
cagacctccaggtagcatt

SEQ ID NO: 416422 - DNA, 19 bp, Homo sapiens
  siRNA target sequence for FLJ37562 (NM_152409.2,480-498).
gacctccaggtagcattaa

SEQ ID NO: 416423 - DNA, 19 bp, Homo sapiens
  siRNA target sequence for FLJ37562 (NM_152409.2,510-528).
gtcttgccgatcttggtta

SEQ ID NO: 416424 - DNA, 19 bp, Homo sapiens
  siRNA target sequence for FLJ37562 (NM_152409.2,546-564).
cttttccttaccctatgat

SEQ ID NO: 416425 - DNA, 19 bp, Homo sapiens
  siRNA target sequence for FLJ37562 (NM_152409.2,581-599).
catggggtagaggaaacta

SEQ ID NO: 416426 - DNA, 19 bp, Homo sapiens
  siRNA target sequence for PACRG (NM_152410.1,394-412).
cagctgcaggggcatttaa

SEQ ID NO: 416427 - DNA, 19 bp, Homo sapiens
  siRNA target sequence for PACRG (NM_152410.1,425-443).
caagcccacagcatttcga

SEQ ID NO: 416428 - DNA, 19 bp, Homo sapiens
  siRNA target sequence for PACRG (NM_152410.1,430-448).
ccacagcatttcgaaaatt

SEQ ID NO: 416429 - DNA, 19 bp, Homo sapiens
  siRNA target sequence for PACRG (NM_152410.1,433-451).
cagcatttcgaaaattcta

SEQ ID NO: 416430 - DNA, 19 bp, Homo sapiens
  siRNA target sequence for PACRG (NM_152410.1,476-494).
ccttgagcatgattcgaaa

SEQ ID NO: 416431 - DNA, 19 bp, Homo sapiens
  siRNA target sequence for PACRG (NM_152410.1,480-498).
gagcatgattcgaaaggaa

SEQ ID NO: 416432 - DNA, 19 bp, Homo sapiens
  siRNA target sequence for PACRG (NM_152410.1,530-548).
gctggattaccatcattat

SEQ ID NO: 416433 - DNA, 19 bp, Homo sapiens
  siRNA target sequence for PACRG (NM_152410.1,630-648).
gaacacggtgggaacaaga

SEQ ID NO: 416434 - DNA, 19 bp, Homo sapiens
  siRNA target sequence for PACRG (NM_152410.1,668-686).
gctcattatcccgataaaa

SEQ ID NO: 416435 - DNA, 19 bp, Homo sapiens
  siRNA target sequence for PACRG (NM_152410.1,669-687).
ctcattatcccgataaaaa

SEQ ID NO: 416436 - DNA, 19 bp, Homo sapiens
  siRNA target sequence for PACRG (NM_152410.1,961-979).
ccggagacggcattgacta

SEQ ID NO: 416437 - DNA, 19 bp, Homo sapiens
  siRNA target sequence for PACRG (NM_152410.1,1040-1058).
gcgctacggaggagaaaat

SEQ ID NO: 416438 - DNA, 19 bp, Homo sapiens
  siRNA target sequence for PACRG (NM_152410.1,1053-1071).
gaaaatgcctttatcaaca

SEQ ID NO: 416439 - DNA, 19 bp, Homo sapiens
  siRNA target sequence for PACRG (NM_152410.1,1095-1113).
gagtcttgcttgctaaact

SEQ ID NO: 416440 - DNA, 19 bp, Homo sapiens
  siRNA target sequence for BHLHB5 (NM_152414.2,967-985).
gcgctgcggcttaacatca

SEQ ID NO: 416441 - DNA, 19 bp, Homo sapiens
  siRNA target sequence for BHLHB5 (NM_152414.2,968-986).
cgctgcggcttaacatcaa

SEQ ID NO: 416442 - DNA, 19 bp, Homo sapiens
  siRNA target sequence for BHLHB5 (NM_152414.2,1324-1342).
gagaagtgcgccctgttta

SEQ ID NO: 416443 - DNA, 19 bp, Homo sapiens
  siRNA target sequence for FLJ32642 (NM_152415.1,394-412).
ctccagtatagccgaaata

SEQ ID NO: 416444 - DNA, 19 bp, Homo sapiens
  siRNA target sequence for FLJ32642 (NM_152415.1,396-414).
ccagtatagccgaaataca

SEQ ID NO: 416445 - DNA, 19 bp, Homo sapiens
  siRNA target sequence for FLJ32642 (NM_152415.1,399-417).
gtatagccgaaatacagaa

SEQ ID NO: 416446 - DNA, 19 bp, Homo sapiens
  siRNA target sequence for FLJ32642 (NM_152415.1,432-450).
gattgccattcaccataaa

SEQ ID NO: 416447 - DNA, 19 bp, Homo sapiens
  siRNA target sequence for FLJ32642 (NM_152415.1,444-462).
ccataaacaacctgacaat

SEQ ID NO: 416448 - DNA, 19 bp, Homo sapiens
  siRNA target sequence for FLJ32642 (NM_152415.1,445-463).
cataaacaacctgacaatt

SEQ ID NO: 416449 - DNA, 19 bp, Homo sapiens
  siRNA target sequence for FLJ32642 (NM_152415.1,451-469).
caacctgacaattaacatt

SEQ ID NO: 416450 - DNA, 19 bp, Homo sapiens
  siRNA target sequence for FLJ32642 (NM_152415.1,454-472).
cctgacaattaacattaat

SEQ ID NO: 416451 - DNA, 19 bp, Homo sapiens
  siRNA target sequence for FLJ32642 (NM_152415.1,455-473).
ctgacaattaacattaata

SEQ ID NO: 416452 - DNA, 19 bp, Homo sapiens
  siRNA target sequence for FLJ32642 (NM_152415.1,525-543).
caccaatacgacatcactt

SEQ ID NO: 416453 - DNA, 19 bp, Homo sapiens
  siRNA target sequence for FLJ32642 (NM_152415.1,527-545).
ccaatacgacatcacttaa

SEQ ID NO: 416454 - DNA, 19 bp, Homo sapiens
  siRNA target sequence for FLJ32642 (NM_152415.1,528-546).
caatacgacatcacttaat

SEQ ID NO: 416455 - DNA, 19 bp, Homo sapiens
  siRNA target sequence for FLJ32642 (NM_152415.1,533-551).
cgacatcacttaatggata

SEQ ID NO: 416456 - DNA, 19 bp, Homo sapiens
  siRNA target sequence for FLJ32642 (NM_152415.1,562-580).
gtatgttacctctccatta

SEQ ID NO: 416457 - DNA, 19 bp, Homo sapiens
  siRNA target sequence for FLJ32642 (NM_152415.1,566-584).
gttacctctccattagtaa

SEQ ID NO: 416458 - DNA, 19 bp, Homo sapiens
  siRNA target sequence for FLJ32642 (NM_152415.1,573-591).
ctccattagtaaacaattt

SEQ ID NO: 416459 - DNA, 19 bp, Homo sapiens
  siRNA target sequence for FLJ32642 (NM_152415.1,625-643).
gagtctgttggatgagttt

SEQ ID NO: 416460 - DNA, 19 bp, Homo sapiens
  siRNA target sequence for FLJ32642 (NM_152415.1,645-663).
ggaagaatcctccagtttt

SEQ ID NO: 416461 - DNA, 19 bp, Homo sapiens
  siRNA target sequence for FLJ32642 (NM_152415.1,649-667).
gaatcctccagttttagct

SEQ ID NO: 416462 - DNA, 19 bp, Homo sapiens
  siRNA target sequence for FLJ32642 (NM_152415.1,659-677).
gttttagctcctacttcaa

SEQ ID NO: 416463 - DNA, 19 bp, Homo sapiens
  siRNA target sequence for FLJ32642 (NM_152415.1,675-693).
caacagcatttccttatct

SEQ ID NO: 416464 - DNA, 19 bp, Homo sapiens
  siRNA target sequence for FLJ32642 (NM_152415.1,710-728).
gggatgtctccttatgctt

SEQ ID NO: 416465 - DNA, 19 bp, Homo sapiens
  siRNA target sequence for FLJ32642 (NM_152415.1,775-793).
caggagtatcacttcttta

SEQ ID NO: 416466 - DNA, 19 bp, Homo sapiens
  siRNA target sequence for FLJ32642 (NM_152415.1,895-913).
cacagtggatgcttcaata

SEQ ID NO: 416467 - DNA, 19 bp, Homo sapiens
  siRNA target sequence for FLJ32642 (NM_152415.1,914-932).
ccgacaagccaaaatggtt

SEQ ID NO: 416468 - DNA, 19 bp, Homo sapiens
  siRNA target sequence for FLJ32642 (NM_152415.1,915-933).
cgacaagccaaaatggttt

SEQ ID NO: 416469 - DNA, 19 bp, Homo sapiens
  siRNA target sequence for FLJ32642 (NM_152415.1,916-934).
gacaagccaaaatggtttt

SEQ ID NO: 416470 - DNA, 19 bp, Homo sapiens
  siRNA target sequence for FLJ32642 (NM_152415.1,1043-1061).
ctgactttgcctcaactaa

SEQ ID NO: 416471 - DNA, 19 bp, Homo sapiens
  siRNA target sequence for FLJ32642 (NM_152415.1,1052-1070).
cctcaactaaaacaaatta

SEQ ID NO: 416472 - DNA, 19 bp, Homo sapiens
  siRNA target sequence for FLJ32642 (NM_152415.1,1053-1071).
ctcaactaaaacaaattat

SEQ ID NO: 416473 - DNA, 19 bp, Homo sapiens
  siRNA target sequence for FLJ32642 (NM_152415.1,1074-1092).
ccgacaaagatgacttagt

SEQ ID NO: 416474 - DNA, 19 bp, Homo sapiens
  siRNA target sequence for FLJ32642 (NM_152415.1,1075-1093).
cgacaaagatgacttagta

SEQ ID NO: 416475 - DNA, 19 bp, Homo sapiens
  siRNA target sequence for FLJ32642 (NM_152415.1,1163-1181).
gttttagataagtatgaat

SEQ ID NO: 416476 - DNA, 19 bp, Homo sapiens
  siRNA target sequence for FLJ32642 (NM_152415.1,1169-1187).
gataagtatgaattactta

SEQ ID NO: 416477 - DNA, 19 bp, Homo sapiens
  siRNA target sequence for FLJ32642 (NM_152415.1,1219-1237).
gcaaaggcagcatgaactt

SEQ ID NO: 416478 - DNA, 19 bp, Homo sapiens
  siRNA target sequence for FLJ32642 (NM_152415.1,1220-1238).
caaaggcagcatgaactta

SEQ ID NO: 416479 - DNA, 19 bp, Homo sapiens
  siRNA target sequence for FLJ32642 (NM_152415.1,1224-1242).
ggcagcatgaacttagtga

SEQ ID NO: 416480 - DNA, 19 bp, Homo sapiens
  siRNA target sequence for FLJ32642 (NM_152415.1,1259-1277).
gcccttcaggcaagattga

SEQ ID NO: 416481 - DNA, 19 bp, Homo sapiens
  siRNA target sequence for FLJ32642 (NM_152415.1,1261-1279).
ccttcaggcaagattgaaa

SEQ ID NO: 416482 - DNA, 19 bp, Homo sapiens
  siRNA target sequence for FLJ32642 (NM_152415.1,1421-1439).
cttcagcaggcgatagcaa

SEQ ID NO: 416483 - DNA, 19 bp, Homo sapiens
  siRNA target sequence for FLJ32642 (NM_152415.1,1437-1455).
caatgcacagccaatttca

SEQ ID NO: 416484 - DNA, 19 bp, Homo sapiens
  siRNA target sequence for MGC40214 (NM_152416.1,210-228).
gcggaaacgggattatgaa

SEQ ID NO: 416485 - DNA, 19 bp, Homo sapiens
  siRNA target sequence for MGC40214 (NM_152416.1,217-235).
cgggattatgaaggttatt

SEQ ID NO: 416486 - DNA, 19 bp, Homo sapiens
  siRNA target sequence for MGC40214 (NM_152416.1,218-236).
gggattatgaaggttattt

SEQ ID NO: 416487 - DNA, 19 bp, Homo sapiens
  siRNA target sequence for MGC40214 (NM_152416.1,219-237).
ggattatgaaggttattta

SEQ ID NO: 416488 - DNA, 19 bp, Homo sapiens
  siRNA target sequence for MGC40214 (NM_152416.1,308-326).
ctcaggctggattactctt

SEQ ID NO: 416489 - DNA, 19 bp, Homo sapiens
  siRNA target sequence for MGC40214 (NM_152416.1,352-370).
cactgggatctgaacacta

SEQ ID NO: 416490 - DNA, 19 bp, Homo sapiens
  siRNA target sequence for MGC40214 (NM_152416.1,354-372).
ctgggatctgaacactaaa

SEQ ID NO: 416491 - DNA, 19 bp, Homo sapiens
  siRNA target sequence for MGC40214 (NM_152416.1,356-374).
gggatctgaacactaaaca

SEQ ID NO: 416492 - DNA, 19 bp, Homo sapiens
  siRNA target sequence for MGC40214 (NM_152416.1,357-375).
ggatctgaacactaaacat

SEQ ID NO: 416493 - DNA, 19 bp, Homo sapiens
  siRNA target sequence for FLJ35775 (NM_152418.1,206-224).
ctcagattcgccaactatt

SEQ ID NO: 416494 - DNA, 19 bp, Homo sapiens
  siRNA target sequence for FLJ35775 (NM_152418.1,217-235).
caactattgccgtatagct

SEQ ID NO: 416495 - DNA, 19 bp, Homo sapiens
  siRNA target sequence for FLJ35775 (NM_152418.1,323-341).
cgcatactggcgaatacca

SEQ ID NO: 416496 - DNA, 19 bp, Homo sapiens
  siRNA target sequence for FLJ35775 (NM_152418.1,324-342).
gcatactggcgaataccaa

SEQ ID NO: 416497 - DNA, 19 bp, Homo sapiens
  siRNA target sequence for FLJ35775 (NM_152418.1,434-452).
cgggtatacccgcacaaaa

SEQ ID NO: 416498 - DNA, 19 bp, Homo sapiens
  siRNA target sequence for FLJ35775 (NM_152418.1,464-482).
cctaatcggaaggtgaatt

SEQ ID NO: 416499 - DNA, 19 bp, Homo sapiens
  siRNA target sequence for FLJ35775 (NM_152418.1,578-596).
gcgtcgctgttcataggta

SEQ ID NO: 416500 - DNA, 19 bp, Homo sapiens
  siRNA target sequence for FLJ35775 (NM_152418.1,680-698).
cacgcgtatcactctttca

SEQ ID NO: 416501 - DNA, 19 bp, Homo sapiens
  siRNA target sequence for FLJ35775 (NM_152418.1,682-700).
cgcgtatcactctttcagt

SEQ ID NO: 416502 - DNA, 19 bp, Homo sapiens
  siRNA target sequence for FLJ35775 (NM_152418.1,1022-1040).
gaaggtcatgtgaataact

SEQ ID NO: 416503 - DNA, 19 bp, Homo sapiens
  siRNA target sequence for C9orf41 (NM_152420.1,378-396).
ctacggcaccagtatgcat

SEQ ID NO: 416504 - DNA, 19 bp, Homo sapiens
  siRNA target sequence for C9orf41 (NM_152420.1,399-417).
gcgggtgaaccgaacagaa

SEQ ID NO: 416505 - DNA, 19 bp, Homo sapiens
  siRNA target sequence for C9orf41 (NM_152420.1,400-418).
cgggtgaaccgaacagaaa

SEQ ID NO: 416506 - DNA, 19 bp, Homo sapiens
  siRNA target sequence for C9orf41 (NM_152420.1,402-420).
ggtgaaccgaacagaaaga

SEQ ID NO: 416507 - DNA, 19 bp, Homo sapiens
  siRNA target sequence for C9orf41 (NM_152420.1,408-426).
ccgaacagaaagacagttt

SEQ ID NO: 416508 - DNA, 19 bp, Homo sapiens
  siRNA target sequence for C9orf41 (NM_152420.1,450-468).
gaaactacttcctcagttt

SEQ ID NO: 416509 - DNA, 19 bp, Homo sapiens
  siRNA target sequence for C9orf41 (NM_152420.1,481-499).
gacaagatccggaaatgca

SEQ ID NO: 416510 - DNA, 19 bp, Homo sapiens
  siRNA target sequence for C9orf41 (NM_152420.1,486-504).
gatccggaaatgcattgat

SEQ ID NO: 416511 - DNA, 19 bp, Homo sapiens
  siRNA target sequence for C9orf41 (NM_152420.1,490-508).
cggaaatgcattgatcata

SEQ ID NO: 416512 - DNA, 19 bp, Homo sapiens
  siRNA target sequence for C9orf41 (NM_152420.1,523-541).
ctgaccattgtgaatgatt

SEQ ID NO: 416513 - DNA, 19 bp, Homo sapiens
  siRNA target sequence for C9orf41 (NM_152420.1,577-595).
gatgggaatggaaagatta

SEQ ID NO: 416514 - DNA, 19 bp, Homo sapiens
  siRNA target sequence for C9orf41 (NM_152420.1,591-609).
gattatgccagcatctaca

SEQ ID NO: 416515 - DNA, 19 bp, Homo sapiens
  siRNA target sequence for C9orf41 (NM_152420.1,632-650).
ccacgctgaaacagtttgt

SEQ ID NO: 416516 - DNA, 19 bp, Homo sapiens
  siRNA target sequence for C9orf41 (NM_152420.1,690-708).
ctgttaccagccaatcatt

SEQ ID NO: 416517 - DNA, 19 bp, Homo sapiens
  siRNA target sequence for C9orf41 (NM_152420.1,692-710).
gttaccagccaatcattaa

SEQ ID NO: 416518 - DNA, 19 bp, Homo sapiens
  siRNA target sequence for C9orf41 (NM_152420.1,740-758).
gatgggatccttctaaagt

SEQ ID NO: 416519 - DNA, 19 bp, Homo sapiens
  siRNA target sequence for C9orf41 (NM_152420.1,743-761).
gggatccttctaaagtaaa

SEQ ID NO: 416520 - DNA, 19 bp, Homo sapiens
  siRNA target sequence for C9orf41 (NM_152420.1,744-762).
ggatccttctaaagtaaat

SEQ ID NO: 416521 - DNA, 19 bp, Homo sapiens
  siRNA target sequence for C9orf41 (NM_152420.1,745-763).
gatccttctaaagtaaata

SEQ ID NO: 416522 - DNA, 19 bp, Homo sapiens
  siRNA target sequence for C9orf41 (NM_152420.1,793-811).
ctggcctgggaaatagcta

SEQ ID NO: 416523 - DNA, 19 bp, Homo sapiens
  siRNA target sequence for C9orf41 (NM_152420.1,798-816).
ctgggaaatagctatgcta

SEQ ID NO: 416524 - DNA, 19 bp, Homo sapiens
  siRNA target sequence for C9orf41 (NM_152420.1,808-826).
gctatgctaggttatgctt

SEQ ID NO: 416525 - DNA, 19 bp, Homo sapiens
  siRNA target sequence for C9orf41 (NM_152420.1,813-831).
gctaggttatgcttgtcaa

SEQ ID NO: 416526 - DNA, 19 bp, Homo sapiens
  siRNA target sequence for C9orf41 (NM_152420.1,921-939).
gatccatcagtttagcaat

SEQ ID NO: 416527 - DNA, 19 bp, Homo sapiens
  siRNA target sequence for C9orf41 (NM_152420.1,958-976).
cagattcgacccatctttt

SEQ ID NO: 416528 - DNA, 19 bp, Homo sapiens
  siRNA target sequence for C9orf41 (NM_152420.1,1003-1021).
cctcctggttctaactttt

SEQ ID NO: 416529 - DNA, 19 bp, Homo sapiens
  siRNA target sequence for C9orf41 (NM_152420.1,1061-1079).
gcaatacctgggactgtat

SEQ ID NO: 416530 - DNA, 19 bp, Homo sapiens
  siRNA target sequence for C9orf41 (NM_152420.1,1062-1080).
caatacctgggactgtatt

SEQ ID NO: 416531 - DNA, 19 bp, Homo sapiens
  siRNA target sequence for C9orf41 (NM_152420.1,1105-1123).
gctcacaatgtaattgatt

SEQ ID NO: 416532 - DNA, 19 bp, Homo sapiens
  siRNA target sequence for C9orf41 (NM_152420.1,1147-1165).
ctcaagccaggtggaattt

SEQ ID NO: 416533 - DNA, 19 bp, Homo sapiens
  siRNA target sequence for C9orf41 (NM_152420.1,1157-1175).
gtggaatttggataaatct

SEQ ID NO: 416534 - DNA, 19 bp, Homo sapiens
  siRNA target sequence for C9orf41 (NM_152420.1,1181-1199).
ctctgctgtaccactttga

SEQ ID NO: 416535 - DNA, 19 bp, Homo sapiens
  siRNA target sequence for C9orf41 (NM_152420.1,1291-1309).
gaatctgtattgtcaacat

SEQ ID NO: 416536 - DNA, 19 bp, Homo sapiens
  siRNA target sequence for C9orf41 (NM_152420.1,1302-1320).
gtcaacatatactgtgaat

SEQ ID NO: 416537 - DNA, 19 bp, Homo sapiens
  siRNA target sequence for C9orf41 (NM_152420.1,1315-1333).
gtgaatgatctctctatga

SEQ ID NO: 416538 - DNA, 19 bp, Homo sapiens
  siRNA target sequence for C9orf41 (NM_152420.1,1328-1346).
ctatgatgaaatactacta

SEQ ID NO: 416539 - DNA, 19 bp, Homo sapiens
  siRNA target sequence for MGC20262 (NM_152421.2,273-291).
gccaggtggtcatttgtga

SEQ ID NO: 416540 - DNA, 19 bp, Homo sapiens
  siRNA target sequence for MGC20262 (NM_152421.2,492-510).
gggagctggtactgtttga

SEQ ID NO: 416541 - DNA, 19 bp, Homo sapiens
  siRNA target sequence for MGC20262 (NM_152421.2,494-512).
gagctggtactgtttgaca

SEQ ID NO: 416542 - DNA, 19 bp, Homo sapiens
  siRNA target sequence for FLJ33516 (NM_152423.2,474-492).
gttgtggccagcaaaagtt

SEQ ID NO: 416543 - DNA, 19 bp, Homo sapiens
  siRNA target sequence for FLJ33516 (NM_152423.2,544-562).
ctagaagttcaaatactct

SEQ ID NO: 416544 - DNA, 19 bp, Homo sapiens
  siRNA target sequence for FLJ33516 (NM_152423.2,679-697).
gaggaaactgcctatggaa

SEQ ID NO: 416545 - DNA, 19 bp, Homo sapiens
  siRNA target sequence for FLJ33516 (NM_152423.2,690-708).
ctatggaagatcactaaaa

SEQ ID NO: 416546 - DNA, 19 bp, Homo sapiens
  siRNA target sequence for FLJ33516 (NM_152423.2,711-729).
ggcactgggtattctgaat

SEQ ID NO: 416547 - DNA, 19 bp, Homo sapiens
  siRNA target sequence for FLJ33516 (NM_152423.2,788-806).
ctcaaaatgtaccacaaaa

SEQ ID NO: 416548 - DNA, 19 bp, Homo sapiens
  siRNA target sequence for FLJ33516 (NM_152423.2,812-830).
ccgattcaccccctcataa

SEQ ID NO: 416549 - DNA, 19 bp, Homo sapiens
  siRNA target sequence for FLJ33516 (NM_152423.2,919-937).
gattccctgtatgatgata

SEQ ID NO: 416550 - DNA, 19 bp, Homo sapiens
  siRNA target sequence for FLJ33516 (NM_152423.2,927-945).
gtatgatgataaatcacaa

SEQ ID NO: 416551 - DNA, 19 bp, Homo sapiens
  siRNA target sequence for FLJ33516 (NM_152423.2,949-967).
cccacaatggtcgatacta

SEQ ID NO: 416552 - DNA, 19 bp, Homo sapiens
  siRNA target sequence for FLJ33516 (NM_152423.2,950-968).
ccacaatggtcgatactat

SEQ ID NO: 416553 - DNA, 19 bp, Homo sapiens
  siRNA target sequence for FLJ33516 (NM_152423.2,951-969).
cacaatggtcgatactatt

SEQ ID NO: 416554 - DNA, 19 bp, Homo sapiens
  siRNA target sequence for FLJ33516 (NM_152423.2,960-978).
cgatactattccaagtgaa

SEQ ID NO: 416555 - DNA, 19 bp, Homo sapiens
  siRNA target sequence for FLJ33516 (NM_152423.2,1024-1042).
ccttcactttcggaagata

SEQ ID NO: 416556 - DNA, 19 bp, Homo sapiens
  siRNA target sequence for FLJ33516 (NM_152423.2,1025-1043).
cttcactttcggaagataa

SEQ ID NO: 416557 - DNA, 19 bp, Homo sapiens
  siRNA target sequence for FLJ33516 (NM_152423.2,1072-1090).
gatatctcagcagttatgt

SEQ ID NO: 416558 - DNA, 19 bp, Homo sapiens
  siRNA target sequence for FLJ33516 (NM_152423.2,1140-1158).
gtttgctccacctttgtca

SEQ ID NO: 416559 - DNA, 19 bp, Homo sapiens
  siRNA target sequence for FLJ33516 (NM_152423.2,1155-1173).
gtcacctttgtcatcagat

SEQ ID NO: 416560 - DNA, 19 bp, Homo sapiens
  siRNA target sequence for FLJ33516 (NM_152423.2,1166-1184).
catcagatatgctcattat

SEQ ID NO: 416561 - DNA, 19 bp, Homo sapiens
  siRNA target sequence for FLJ33516 (NM_152423.2,1185-1203).
gcccaaagctttgaaagaa

SEQ ID NO: 416562 - DNA, 19 bp, Homo sapiens
  siRNA target sequence for FLJ33516 (NM_152423.2,1253-1271).
ctgctttctcagagaatat

SEQ ID NO: 416563 - DNA, 19 bp, Homo sapiens
  siRNA target sequence for FLJ33516 (NM_152423.2,1285-1303).
gagggtccctcaaatccat

SEQ ID NO: 416564 - DNA, 19 bp, Homo sapiens
  siRNA target sequence for FLJ33516 (NM_152423.2,1293-1311).
ctcaaatccatgcttagat

SEQ ID NO: 416565 - DNA, 19 bp, Homo sapiens
  siRNA target sequence for FLJ33516 (NM_152423.2,1380-1398).
ggaatgcgaggtttcattt

SEQ ID NO: 416566 - DNA, 19 bp, Homo sapiens
  siRNA target sequence for FLJ33516 (NM_152423.2,1381-1399).
gaatgcgaggtttcattta

SEQ ID NO: 416567 - DNA, 19 bp, Homo sapiens
  siRNA target sequence for FLJ33516 (NM_152423.2,1439-1457).
gtagtgaaagaaattttca

SEQ ID NO: 416568 - DNA, 19 bp, Homo sapiens
  siRNA target sequence for FLJ33516 (NM_152423.2,1492-1510).
caagcctctgacaagtcat

SEQ ID NO: 416569 - DNA, 19 bp, Homo sapiens
  siRNA target sequence for FLJ33516 (NM_152423.2,1512-1530).
gcttccaagtcgcattaat

SEQ ID NO: 416570 - DNA, 19 bp, Homo sapiens
  siRNA target sequence for FLJ33516 (NM_152423.2,1516-1534).
ccaagtcgcattaatcttt

SEQ ID NO: 416571 - DNA, 19 bp, Homo sapiens
  siRNA target sequence for FLJ33516 (NM_152423.2,1520-1538).
gtcgcattaatctttctct

SEQ ID NO: 416572 - DNA, 19 bp, Homo sapiens
  siRNA target sequence for FLJ33516 (NM_152423.2,1522-1540).
cgcattaatctttctctat

SEQ ID NO: 416573 - DNA, 19 bp, Homo sapiens
  siRNA target sequence for FLJ33516 (NM_152423.2,1523-1541).
gcattaatctttctctatt

SEQ ID NO: 416574 - DNA, 19 bp, Homo sapiens
  siRNA target sequence for FLJ33516 (NM_152423.2,1524-1542).
cattaatctttctctatta

SEQ ID NO: 416575 - DNA, 19 bp, Homo sapiens
  siRNA target sequence for FLJ33516 (NM_152423.2,1591-1609).
gagacacatccgtttgaaa

SEQ ID NO: 416576 - DNA, 19 bp, Homo sapiens
  siRNA target sequence for FLJ33516 (NM_152423.2,1623-1641).
ctggtttaaatatcagaaa

SEQ ID NO: 416577 - DNA, 19 bp, Homo sapiens
  siRNA target sequence for FLJ33516 (NM_152423.2,1808-1826).
ccagggaggattatagtga

SEQ ID NO: 416578 - DNA, 19 bp, Homo sapiens
  siRNA target sequence for FLJ33516 (NM_152423.2,1834-1852).
gactggtgcatctcactaa

SEQ ID NO: 416579 - DNA, 19 bp, Homo sapiens
  siRNA target sequence for FLJ33516 (NM_152423.2,1836-1854).
ctggtgcatctcactaatt

SEQ ID NO: 416580 - DNA, 19 bp, Homo sapiens
  siRNA target sequence for FLJ33516 (NM_152423.2,1839-1857).
gtgcatctcactaatttgt

SEQ ID NO: 416581 - DNA, 19 bp, Homo sapiens
  siRNA target sequence for FLJ33516 (NM_152423.2,1841-1859).
gcatctcactaatttgtga

SEQ ID NO: 416582 - DNA, 19 bp, Homo sapiens
  siRNA target sequence for FLJ33516 (NM_152423.2,1856-1874).
gtgactacagagttagaat

SEQ ID NO: 416583 - DNA, 19 bp, Homo sapiens
  siRNA target sequence for FLJ33516 (NM_152423.2,1860-1878).
ctacagagttagaataggt

SEQ ID NO: 416584 - DNA, 19 bp, Homo sapiens
  siRNA target sequence for FLJ33516 (NM_152423.2,1892-1910).
cgggctctttgcttgagta

SEQ ID NO: 416585 - DNA, 19 bp, Homo sapiens
  siRNA target sequence for FLJ33516 (NM_152423.2,1894-1912).
ggctctttgcttgagtatt

SEQ ID NO: 416586 - DNA, 19 bp, Homo sapiens
  siRNA target sequence for FLJ33516 (NM_152423.2,1895-1913).
gctctttgcttgagtatta

SEQ ID NO: 416587 - DNA, 19 bp, Homo sapiens
  siRNA target sequence for FLJ33516 (NM_152423.2,1896-1914).
ctctttgcttgagtattat

SEQ ID NO: 416588 - DNA, 19 bp, Homo sapiens
  siRNA target sequence for FLJ33516 (NM_152423.2,1956-1974).
ggatactttcaggaacaaa

SEQ ID NO: 416589 - DNA, 19 bp, Homo sapiens
  siRNA target sequence for FLJ33516 (NM_152423.2,2129-2147).
gaacagagaaccatcttct

SEQ ID NO: 416590 - DNA, 19 bp, Homo sapiens
  siRNA target sequence for FLJ33516 (NM_152423.2,2174-2192).
ccagatggctgaaatcatt

SEQ ID NO: 416591 - DNA, 19 bp, Homo sapiens
  siRNA target sequence for FLJ33516 (NM_152423.2,2216-2234).
cctgtattgaaacatactt

SEQ ID NO: 416592 - DNA, 19 bp, Homo sapiens
  siRNA target sequence for FLJ33516 (NM_152423.2,2285-2303).
gcaatcaaatagatcaaat

SEQ ID NO: 416593 - DNA, 19 bp, Homo sapiens
  siRNA target sequence for FLJ33516 (NM_152423.2,2286-2304).
caatcaaatagatcaaata

SEQ ID NO: 416594 - DNA, 19 bp, Homo sapiens
  siRNA target sequence for FLJ33516 (NM_152423.2,2307-2325).
gccaacttggataaaagat

SEQ ID NO: 416595 - DNA, 19 bp, Homo sapiens
  siRNA target sequence for FLJ39827 (NM_152424.1,325-343).
gggagtacccgtgaacaaa

SEQ ID NO: 416596 - DNA, 19 bp, Homo sapiens
  siRNA target sequence for FLJ39827 (NM_152424.1,327-345).
gagtacccgtgaacaaaca

SEQ ID NO: 416597 - DNA, 19 bp, Homo sapiens
  siRNA target sequence for FLJ39827 (NM_152424.1,457-475).
ggcaagaagggtatctgta

SEQ ID NO: 416598 - DNA, 19 bp, Homo sapiens
  siRNA target sequence for FLJ39827 (NM_152424.1,581-599).
cccatggccctgaagatgt

SEQ ID NO: 416599 - DNA, 19 bp, Homo sapiens
  siRNA target sequence for FLJ39827 (NM_152424.1,691-709).
ggctccagatgtaagacat

SEQ ID NO: 416600 - DNA, 19 bp, Homo sapiens
  siRNA target sequence for FLJ39827 (NM_152424.1,765-783).
gccaaagaaaggcctaaaa

SEQ ID NO: 416601 - DNA, 19 bp, Homo sapiens
  siRNA target sequence for FLJ39827 (NM_152424.1,778-796).
ctaaaaggcttttttagca

SEQ ID NO: 416602 - DNA, 19 bp, Homo sapiens
  siRNA target sequence for FLJ39827 (NM_152424.1,1122-1140).
gccccatagcccagaaaca

SEQ ID NO: 416603 - DNA, 19 bp, Homo sapiens
  siRNA target sequence for FLJ39827 (NM_152424.1,1615-1633).
ctagcccctggggaacttt

SEQ ID NO: 416604 - DNA, 19 bp, Homo sapiens
  siRNA target sequence for FLJ39827 (NM_152424.1,1618-1636).
gcccctggggaacttttga

SEQ ID NO: 416605 - DNA, 19 bp, Homo sapiens
  siRNA target sequence for FLJ39827 (NM_152424.1,1775-1793).
gtggagatgccctatatga

SEQ ID NO: 416606 - DNA, 19 bp, Homo sapiens
  siRNA target sequence for FLJ39827 (NM_152424.1,1777-1795).
ggagatgccctatatgagt

SEQ ID NO: 416607 - DNA, 19 bp, Homo sapiens
  siRNA target sequence for FLJ39827 (NM_152424.1,1778-1796).
gagatgccctatatgagtt

SEQ ID NO: 416608 - DNA, 19 bp, Homo sapiens
  siRNA target sequence for FLJ39827 (NM_152424.1,1784-1802).
ccctatatgagttctatga

SEQ ID NO: 416609 - DNA, 19 bp, Homo sapiens
  siRNA target sequence for FLJ39827 (NM_152424.1,1862-1880).
gtcgaagctctgagatgtt

SEQ ID NO: 416610 - DNA, 19 bp, Homo sapiens
  siRNA target sequence for FLJ39827 (NM_152424.1,1957-1975).
gtgaccatccagaaacagt

SEQ ID NO: 416611 - DNA, 19 bp, Homo sapiens
  siRNA target sequence for FLJ39827 (NM_152424.1,2163-2181).
ccgagaggttcgttgtaga

SEQ ID NO: 416612 - DNA, 19 bp, Homo sapiens
  siRNA target sequence for FLJ39827 (NM_152424.1,2215-2233).
gagaagcccgtcttagagt

SEQ ID NO: 416613 - DNA, 19 bp, Homo sapiens
  siRNA target sequence for FLJ39827 (NM_152424.1,2217-2235).
gaagcccgtcttagagtat

SEQ ID NO: 416614 - DNA, 19 bp, Homo sapiens
  siRNA target sequence for FLJ39827 (NM_152424.1,2221-2239).
cccgtcttagagtatcaga

SEQ ID NO: 416615 - DNA, 19 bp, Homo sapiens
  siRNA target sequence for FLJ39827 (NM_152424.1,2222-2240).
ccgtcttagagtatcagat

SEQ ID NO: 416616 - DNA, 19 bp, Homo sapiens
  siRNA target sequence for FLJ39827 (NM_152424.1,2439-2457).
ccagagtgatgccatgttt

SEQ ID NO: 416617 - DNA, 19 bp, Homo sapiens
  siRNA target sequence for FLJ39827 (NM_152424.1,2498-2516).
ggagggcctaccctactta

SEQ ID NO: 416618 - DNA, 19 bp, Homo sapiens
  siRNA target sequence for FLJ39827 (NM_152424.1,2499-2517).
gagggcctaccctacttat

SEQ ID NO: 416619 - DNA, 19 bp, Homo sapiens
  siRNA target sequence for FLJ39827 (NM_152424.1,2502-2520).
ggcctaccctacttattca

SEQ ID NO: 416620 - DNA, 19 bp, Homo sapiens
  siRNA target sequence for FLJ39827 (NM_152424.1,2561-2579).
ggaatgccactgtgagttt

SEQ ID NO: 416621 - DNA, 19 bp, Homo sapiens
  siRNA target sequence for FLJ39827 (NM_152424.1,2582-2600).
cacaggccctggtagagtt

SEQ ID NO: 416622 - DNA, 19 bp, Homo sapiens
  siRNA target sequence for FLJ39827 (NM_152424.1,2636-2654).
gcccaggtactgaagacaa

SEQ ID NO: 416623 - DNA, 19 bp, Homo sapiens
  siRNA target sequence for FLJ40249 (NM_152425.1,1955-1973).
cgcgacagttccatcaaga

SEQ ID NO: 416624 - DNA, 19 bp, Homo sapiens
  siRNA target sequence for APOBEC3D (NM_152426.1,228-246).
cacaggcaggaggtgtatt

SEQ ID NO: 416625 - DNA, 19 bp, Homo sapiens
  siRNA target sequence for APOBEC3D (NM_152426.1,240-258).
gtgtatttccggtttgaga

SEQ ID NO: 416626 - DNA, 19 bp, Homo sapiens
  siRNA target sequence for MGC35285 (NM_152428.2,177-195).
gaagacctccgcaacgatt

SEQ ID NO: 416627 - DNA, 19 bp, Homo sapiens
  siRNA target sequence for MGC35285 (NM_152428.2,258-276).
caaggccgtgtttctcata

SEQ ID NO: 416628 - DNA, 19 bp, Homo sapiens
  siRNA target sequence for MGC35285 (NM_152428.2,262-280).
gccgtgtttctcatataga

SEQ ID NO: 416629 - DNA, 19 bp, Homo sapiens
  siRNA target sequence for MGC35285 (NM_152428.2,445-463).
cttgtcgggttcatgagaa

SEQ ID NO: 416630 - DNA, 19 bp, Homo sapiens
  siRNA target sequence for MGC35285 (NM_152428.2,451-469).
gggttcatgagaaagaagt

SEQ ID NO: 416631 - DNA, 19 bp, Homo sapiens
  siRNA target sequence for MGC35285 (NM_152428.2,1034-1052).
cctggaggtaaaatgtgat

SEQ ID NO: 416632 - DNA, 19 bp, Homo sapiens
  siRNA target sequence for MGC35285 (NM_152428.2,1037-1055).
ggaggtaaaatgtgatgtt

SEQ ID NO: 416633 - DNA, 19 bp, Homo sapiens
  siRNA target sequence for MGC35285 (NM_152428.2,1041-1059).
gtaaaatgtgatgttgaat

SEQ ID NO: 416634 - DNA, 19 bp, Homo sapiens
  siRNA target sequence for MGC35285 (NM_152428.2,1106-1124).
cgaggaactcacctacttt

SEQ ID NO: 416635 - DNA, 19 bp, Homo sapiens
  siRNA target sequence for MGC35285 (NM_152428.2,1299-1317).
ctgacaaggcaccagtttt

SEQ ID NO: 416636 - DNA, 19 bp, Homo sapiens
  siRNA target sequence for MGC35285 (NM_152428.2,1303-1321).
caaggcaccagttttacct

SEQ ID NO: 416637 - DNA, 19 bp, Homo sapiens
  siRNA target sequence for MGC35285 (NM_152428.2,1349-1367).
gaggctgtactgcaatgaa

SEQ ID NO: 416638 - DNA, 19 bp, Homo sapiens
  siRNA target sequence for MGC35285 (NM_152428.2,1614-1632).
ctggttcaccaagtattct

SEQ ID NO: 416639 - DNA, 19 bp, Homo sapiens
  siRNA target sequence for MGC35285 (NM_152428.2,1616-1634).
ggttcaccaagtattctca

SEQ ID NO: 416640 - DNA, 19 bp, Homo sapiens
  siRNA target sequence for MGC35285 (NM_152428.2,1675-1693).
gtgccaagggtgtcatagt

SEQ ID NO: 416641 - DNA, 19 bp, Homo sapiens
  siRNA target sequence for MGC35285 (NM_152428.2,1677-1695).
gccaagggtgtcatagtct

SEQ ID NO: 416642 - DNA, 19 bp, Homo sapiens
  siRNA target sequence for MGC35285 (NM_152428.2,1678-1696).
ccaagggtgtcatagtcta

SEQ ID NO: 416643 - DNA, 19 bp, Homo sapiens
  siRNA target sequence for MGC35285 (NM_152428.2,1679-1697).
caagggtgtcatagtctat

SEQ ID NO: 416644 - DNA, 19 bp, Homo sapiens
  siRNA target sequence for MGC35285 (NM_152428.2,1682-1700).
gggtgtcatagtctatgaa

SEQ ID NO: 416645 - DNA, 19 bp, Homo sapiens
  siRNA target sequence for MGC35285 (NM_152428.2,1684-1702).
gtgtcatagtctatgaagt

SEQ ID NO: 416646 - DNA, 19 bp, Homo sapiens
  siRNA target sequence for MGC35285 (NM_152428.2,1712-1730).
cagcagaattgcaatgtta

SEQ ID NO: 416647 - DNA, 19 bp, Homo sapiens
  siRNA target sequence for MGC35285 (NM_152428.2,1722-1740).
gcaatgttacggtttcagt

SEQ ID NO: 416648 - DNA, 19 bp, Homo sapiens
  siRNA target sequence for MGC35285 (NM_152428.2,1731-1749).
cggtttcagtggagagaaa

SEQ ID NO: 416649 - DNA, 19 bp, Homo sapiens
  siRNA target sequence for MGC35285 (NM_152428.2,1750-1768).
ccgggaagatttctactta

SEQ ID NO: 416650 - DNA, 19 bp, Homo sapiens
  siRNA target sequence for MGC35285 (NM_152428.2,1751-1769).
cgggaagatttctacttat

SEQ ID NO: 416651 - DNA, 19 bp, Homo sapiens
  siRNA target sequence for MGC35285 (NM_152428.2,1831-1849).
cagccaagaccagtaaata

SEQ ID NO: 416652 - DNA, 19 bp, Homo sapiens
  siRNA target sequence for MGC35285 (NM_152428.2,1833-1851).
gccaagaccagtaaatact

SEQ ID NO: 416653 - DNA, 19 bp, Homo sapiens
  siRNA target sequence for MGC35285 (NM_152428.2,1871-1889).
ccagcatgggtttaatgca

SEQ ID NO: 416654 - DNA, 19 bp, Homo sapiens
  siRNA target sequence for MGC35285 (NM_152428.2,1909-1927).
cttcccatgttttatttga

SEQ ID NO: 416655 - DNA, 19 bp, Homo sapiens
  siRNA target sequence for MGC35285 (NM_152428.2,1976-1994).
ccggtctaagcctctcatt

SEQ ID NO: 416656 - DNA, 19 bp, Homo sapiens
  siRNA target sequence for MGC35285 (NM_152428.2,1977-1995).
cggtctaagcctctcattt

SEQ ID NO: 416657 - DNA, 19 bp, Homo sapiens
  siRNA target sequence for MGC35285 (NM_152428.2,1981-1999).
ctaagcctctcatttggat

SEQ ID NO: 416658 - DNA, 19 bp, Homo sapiens
  siRNA target sequence for MGC35285 (NM_152428.2,2005-2023).
gattgtcatgctcagaaaa

SEQ ID NO: 416659 - DNA, 19 bp, Homo sapiens
  siRNA target sequence for MGC35285 (NM_152428.2,2019-2037).
gaaaacgagttgtttgtat

SEQ ID NO: 416660 - DNA, 19 bp, Homo sapiens
  siRNA target sequence for MGC35285 (NM_152428.2,2058-2076).
ggaggcctgctgagtacat

SEQ ID NO: 416661 - DNA, 19 bp, Homo sapiens
  siRNA target sequence for MGC35285 (NM_152428.2,2066-2084).
gctgagtacatcaatggat

SEQ ID NO: 416662 - DNA, 19 bp, Homo sapiens
  siRNA target sequence for MGC35285 (NM_152428.2,2067-2085).
ctgagtacatcaatggata

SEQ ID NO: 416663 - DNA, 19 bp, Homo sapiens
  siRNA target sequence for MGC35285 (NM_152428.2,2235-2253).
gcaggctcaaagaataata

SEQ ID NO: 416664 - DNA, 19 bp, Homo sapiens
  siRNA target sequence for MGC35285 (NM_152428.2,2372-2390).
ccctggcatttttatatct

SEQ ID NO: 416665 - DNA, 19 bp, Homo sapiens
  siRNA target sequence for MGC35285 (NM_152428.2,2373-2391).
cctggcatttttatatctt

SEQ ID NO: 416666 - DNA, 19 bp, Homo sapiens
  siRNA target sequence for MGC35285 (NM_152428.2,2499-2517).
gttaggatgatccagaatt

SEQ ID NO: 416667 - DNA, 19 bp, Homo sapiens
  siRNA target sequence for MGC35285 (NM_152428.2,2513-2531).
gaattcccctgacaacata

SEQ ID NO: 416668 - DNA, 19 bp, Homo sapiens
  siRNA target sequence for MGC35285 (NM_152428.2,2637-2655).
gggtaccagggaagtttgt

SEQ ID NO: 416669 - DNA, 19 bp, Homo sapiens
  siRNA target sequence for MGC35285 (NM_152428.2,2782-2800).
ctccatcacctccagaaat

SEQ ID NO: 416670 - DNA, 19 bp, Homo sapiens
  siRNA target sequence for MGC35285 (NM_152428.2,2784-2802).
ccatcacctccagaaatca

SEQ ID NO: 416671 - DNA, 19 bp, Homo sapiens
  siRNA target sequence for MGC35285 (NM_152428.2,2860-2878).
gtgtaactggtggcattaa

SEQ ID NO: 416672 - DNA, 19 bp, Homo sapiens
  siRNA target sequence for MGC35285 (NM_152428.2,2888-2906).
gccatatggtggtatctat

SEQ ID NO: 416673 - DNA, 19 bp, Homo sapiens
  siRNA target sequence for MGC35285 (NM_152428.2,2890-2908).
catatggtggtatctatgt

SEQ ID NO: 416674 - DNA, 19 bp, Homo sapiens
  siRNA target sequence for MGC35285 (NM_152428.2,2895-2913).
ggtggtatctatgtgaaat

SEQ ID NO: 416675 - DNA, 19 bp, Homo sapiens
  siRNA target sequence for MGC35285 (NM_152428.2,2903-2921).
ctatgtgaaatccattgtt

SEQ ID NO: 416676 - DNA, 19 bp, Homo sapiens
  siRNA target sequence for MGC35285 (NM_152428.2,3388-3406).
ccacggaaggcctcatctt

SEQ ID NO: 416677 - DNA, 19 bp, Homo sapiens
  siRNA target sequence for C10orf13 (NM_152429.2,901-919).
cactccctctgcaacttct

SEQ ID NO: 416678 - DNA, 19 bp, Homo sapiens
  siRNA target sequence for C10orf13 (NM_152429.2,903-921).
ctccctctgcaacttcttt

SEQ ID NO: 416679 - DNA, 19 bp, Homo sapiens
  siRNA target sequence for HIWI2 (NM_152431.1,229-247).
ctcgccattgcctagatct

SEQ ID NO: 416680 - DNA, 19 bp, Homo sapiens
  siRNA target sequence for HIWI2 (NM_152431.1,232-250).
gccattgcctagatctgtt

SEQ ID NO: 416681 - DNA, 19 bp, Homo sapiens
  siRNA target sequence for HIWI2 (NM_152431.1,238-256).
gcctagatctgttgatctt

SEQ ID NO: 416682 - DNA, 19 bp, Homo sapiens
  siRNA target sequence for HIWI2 (NM_152431.1,239-257).
cctagatctgttgatctta

SEQ ID NO: 416683 - DNA, 19 bp, Homo sapiens
  siRNA target sequence for HIWI2 (NM_152431.1,303-321).
ggatctcaaccaacgataa

SEQ ID NO: 416684 - DNA, 19 bp, Homo sapiens
  siRNA target sequence for HIWI2 (NM_152431.1,316-334).
cgataaatatgggatatct

SEQ ID NO: 416685 - DNA, 19 bp, Homo sapiens
  siRNA target sequence for HIWI2 (NM_152431.1,454-472).
cagtggaatacctgtgaaa

SEQ ID NO: 416686 - DNA, 19 bp, Homo sapiens
  siRNA target sequence for HIWI2 (NM_152431.1,456-474).
gtggaatacctgtgaaact

SEQ ID NO: 416687 - DNA, 19 bp, Homo sapiens
  siRNA target sequence for HIWI2 (NM_152431.1,476-494).
gttacaaacctctttaact

SEQ ID NO: 416688 - DNA, 19 bp, Homo sapiens
  siRNA target sequence for HIWI2 (NM_152431.1,480-498).
caaacctctttaacttaga

SEQ ID NO: 416689 - DNA, 19 bp, Homo sapiens
  siRNA target sequence for HIWI2 (NM_152431.1,504-522).
cccaagactggcagctata

SEQ ID NO: 416690 - DNA, 19 bp, Homo sapiens
  siRNA target sequence for HIWI2 (NM_152431.1,523-541).
ccagtaccatgtgacatat

SEQ ID NO: 416691 - DNA, 19 bp, Homo sapiens
  siRNA target sequence for HIWI2 (NM_152431.1,524-542).
cagtaccatgtgacatata

SEQ ID NO: 416692 - DNA, 19 bp, Homo sapiens
  siRNA target sequence for HIWI2 (NM_152431.1,526-544).
gtaccatgtgacatatatt

SEQ ID NO: 416693 - DNA, 19 bp, Homo sapiens
  siRNA target sequence for HIWI2 (NM_152431.1,535-553).
gacatatattccagattta

SEQ ID NO: 416694 - DNA, 19 bp, Homo sapiens
  siRNA target sequence for HIWI2 (NM_152431.1,622-640).
cgacggtgccatccttttt

SEQ ID NO: 416695 - DNA, 19 bp, Homo sapiens
  siRNA target sequence for HIWI2 (NM_152431.1,673-691).
gttgtcaagtgaaactcaa

SEQ ID NO: 416696 - DNA, 19 bp, Homo sapiens
  siRNA target sequence for HIWI2 (NM_152431.1,676-694).
gtcaagtgaaactcaaaga

SEQ ID NO: 416697 - DNA, 19 bp, Homo sapiens
  siRNA target sequence for HIWI2 (NM_152431.1,687-705).
ctcaaagaggtgagactat

SEQ ID NO: 416698 - DNA, 19 bp, Homo sapiens
  siRNA target sequence for HIWI2 (NM_152431.1,689-707).
caaagaggtgagactataa

SEQ ID NO: 416699 - DNA, 19 bp, Homo sapiens
  siRNA target sequence for HIWI2 (NM_152431.1,693-711).
gaggtgagactataaagat

SEQ ID NO: 416700 - DNA, 19 bp, Homo sapiens
  siRNA target sequence for HIWI2 (NM_152431.1,695-713).
ggtgagactataaagatga

SEQ ID NO: 416701 - DNA, 19 bp, Homo sapiens
  siRNA target sequence for HIWI2 (NM_152431.1,754-772).
gtgcatccaggtcttcaat

SEQ ID NO: 416702 - DNA, 19 bp, Homo sapiens
  siRNA target sequence for HIWI2 (NM_152431.1,799-817).
gttgtccatgtaccaaatt

SEQ ID NO: 416703 - DNA, 19 bp, Homo sapiens
  siRNA target sequence for HIWI2 (NM_152431.1,812-830).
caaattggacggaacttct

SEQ ID NO: 416704 - DNA, 19 bp, Homo sapiens
  siRNA target sequence for HIWI2 (NM_152431.1,821-839).
cggaacttctataatcctt

SEQ ID NO: 416705 - DNA, 19 bp, Homo sapiens
  siRNA target sequence for HIWI2 (NM_152431.1,930-948).
gtgctgatgtgagttacaa

SEQ ID NO: 416706 - DNA, 19 bp, Homo sapiens
  siRNA target sequence for HIWI2 (NM_152431.1,933-951).
ctgatgtgagttacaaagt

SEQ ID NO: 416707 - DNA, 19 bp, Homo sapiens
  siRNA target sequence for HIWI2 (NM_152431.1,1046-1064).
gggctcattgtccttacaa

SEQ ID NO: 416708 - DNA, 19 bp, Homo sapiens
  siRNA target sequence for HIWI2 (NM_152431.1,1055-1073).
gtccttacaagatacaata

SEQ ID NO: 416709 - DNA, 19 bp, Homo sapiens
  siRNA target sequence for HIWI2 (NM_152431.1,1058-1076).
cttacaagatacaataaca

SEQ ID NO: 416710 - DNA, 19 bp, Homo sapiens
  siRNA target sequence for HIWI2 (NM_152431.1,1116-1134).
ccacacacacctttcagaa

SEQ ID NO: 416711 - DNA, 19 bp, Homo sapiens
  siRNA target sequence for HIWI2 (NM_152431.1,1155-1173).
cctatgtggattactacaa

SEQ ID NO: 416712 - DNA, 19 bp, Homo sapiens
  siRNA target sequence for HIWI2 (NM_152431.1,1177-1195).
gcagtatgatattactgta

SEQ ID NO: 416713 - DNA, 19 bp, Homo sapiens
  siRNA target sequence for HIWI2 (NM_152431.1,1191-1209).
ctgtatcggacctgaatca

SEQ ID NO: 416714 - DNA, 19 bp, Homo sapiens
  siRNA target sequence for HIWI2 (NM_152431.1,1213-1231).
catgcttgttagtctgtta

SEQ ID NO: 416715 - DNA, 19 bp, Homo sapiens
  siRNA target sequence for HIWI2 (NM_152431.1,1425-1443).
ccaatgctcgctttgaact

SEQ ID NO: 416716 - DNA, 19 bp, Homo sapiens
  siRNA target sequence for HIWI2 (NM_152431.1,1426-1444).
caatgctcgctttgaacta

SEQ ID NO: 416717 - DNA, 19 bp, Homo sapiens
  siRNA target sequence for HIWI2 (NM_152431.1,1492-1510).
gattgtgccttcagaaaaa

SEQ ID NO: 416718 - DNA, 19 bp, Homo sapiens
  siRNA target sequence for HIWI2 (NM_152431.1,1592-1610).
gcacagtctttgaatacct

SEQ ID NO: 416719 - DNA, 19 bp, Homo sapiens
  siRNA target sequence for HIWI2 (NM_152431.1,1603-1621).
gaatacctggttgatttta

SEQ ID NO: 416720 - DNA, 19 bp, Homo sapiens
  siRNA target sequence for HIWI2 (NM_152431.1,1623-1641).
gtagcgacagaactgaata

SEQ ID NO: 416721 - DNA, 19 bp, Homo sapiens
  siRNA target sequence for HIWI2 (NM_152431.1,1626-1644).
gcgacagaactgaatatgt

SEQ ID NO: 416722 - DNA, 19 bp, Homo sapiens
  siRNA target sequence for HIWI2 (NM_152431.1,1627-1645).
cgacagaactgaatatgtt

SEQ ID NO: 416723 - DNA, 19 bp, Homo sapiens
  siRNA target sequence for HIWI2 (NM_152431.1,1643-1661).
gttgccgagagctttctga

SEQ ID NO: 416724 - DNA, 19 bp, Homo sapiens
  siRNA target sequence for HIWI2 (NM_152431.1,1660-1678).
gaactgcttgagaagagtt

SEQ ID NO: 416725 - DNA, 19 bp, Homo sapiens
  siRNA target sequence for HIWI2 (NM_152431.1,1679-1697).
gcaggttccatgggattta

SEQ ID NO: 416726 - DNA, 19 bp, Homo sapiens
  siRNA target sequence for HIWI2 (NM_152431.1,1680-1698).
caggttccatgggatttaa

SEQ ID NO: 416727 - DNA, 19 bp, Homo sapiens
  siRNA target sequence for HIWI2 (NM_152431.1,1700-1718).
gtggactaccccaaaatca

SEQ ID NO: 416728 - DNA, 19 bp, Homo sapiens
  siRNA target sequence for HIWI2 (NM_152431.1,1702-1720).
ggactaccccaaaatcata

SEQ ID NO: 416729 - DNA, 19 bp, Homo sapiens
  siRNA target sequence for HIWI2 (NM_152431.1,1743-1761).
catttgttagagctataca

SEQ ID NO: 416730 - DNA, 19 bp, Homo sapiens
  siRNA target sequence for HIWI2 (NM_152431.1,1819-1837).
gacctattatgattccatt

SEQ ID NO: 416731 - DNA, 19 bp, Homo sapiens
  siRNA target sequence for HIWI2 (NM_152431.1,1863-1881).
cagtcccaagccaatgtgt

SEQ ID NO: 416732 - DNA, 19 bp, Homo sapiens
  siRNA target sequence for HIWI2 (NM_152431.1,1883-1901).
cttgctcggaccttgaata

SEQ ID NO: 416733 - DNA, 19 bp, Homo sapiens
  siRNA target sequence for HIWI2 (NM_152431.1,1887-1905).
ctcggaccttgaataaaca

SEQ ID NO: 416734 - DNA, 19 bp, Homo sapiens
  siRNA target sequence for HIWI2 (NM_152431.1,1904-1922).
cagggcatgatgatgagta

SEQ ID NO: 416735 - DNA, 19 bp, Homo sapiens
  siRNA target sequence for HIWI2 (NM_152431.1,2002-2020).
gatggtggtcggtattgat

SEQ ID NO: 416736 - DNA, 19 bp, Homo sapiens
  siRNA target sequence for HIWI2 (NM_152431.1,2011-2029).
cggtattgatgtctgtaaa

SEQ ID NO: 416737 - DNA, 19 bp, Homo sapiens
  siRNA target sequence for HIWI2 (NM_152431.1,2013-2031).
gtattgatgtctgtaaaga

SEQ ID NO: 416738 - DNA, 19 bp, Homo sapiens
  siRNA target sequence for HIWI2 (NM_152431.1,2060-2078).
ggatgcgtggccagtgtta

SEQ ID NO: 416739 - DNA, 19 bp, Homo sapiens
  siRNA target sequence for HIWI2 (NM_152431.1,2061-2079).
gatgcgtggccagtgttaa

SEQ ID NO: 416740 - DNA, 19 bp, Homo sapiens
  siRNA target sequence for HIWI2 (NM_152431.1,2109-2127).
gtatccttcagagaacaat

SEQ ID NO: 416741 - DNA, 19 bp, Homo sapiens
  siRNA target sequence for HIWI2 (NM_152431.1,2119-2137).
gagaacaatgactgatgtt

SEQ ID NO: 416742 - DNA, 19 bp, Homo sapiens
  siRNA target sequence for HIWI2 (NM_152431.1,2161-2179).
gactggagcactcaacaaa

SEQ ID NO: 416743 - DNA, 19 bp, Homo sapiens
  siRNA target sequence for HIWI2 (NM_152431.1,2165-2183).
ggagcactcaacaaatggt

SEQ ID NO: 416744 - DNA, 19 bp, Homo sapiens
  siRNA target sequence for HIWI2 (NM_152431.1,2176-2194).
caaatggtacaagtacaat

SEQ ID NO: 416745 - DNA, 19 bp, Homo sapiens
  siRNA target sequence for HIWI2 (NM_152431.1,2181-2199).
ggtacaagtacaatcatga

SEQ ID NO: 416746 - DNA, 19 bp, Homo sapiens
  siRNA target sequence for HIWI2 (NM_152431.1,2182-2200).
gtacaagtacaatcatgat

SEQ ID NO: 416747 - DNA, 19 bp, Homo sapiens
  siRNA target sequence for HIWI2 (NM_152431.1,2204-2222).
ccagcacggataattgtgt

SEQ ID NO: 416748 - DNA, 19 bp, Homo sapiens
  siRNA target sequence for HIWI2 (NM_152431.1,2205-2223).
cagcacggataattgtgta

SEQ ID NO: 416749 - DNA, 19 bp, Homo sapiens
  siRNA target sequence for HIWI2 (NM_152431.1,2322-2340).
caagactgtcggtgattgt

SEQ ID NO: 416750 - DNA, 19 bp, Homo sapiens
  siRNA target sequence for HIWI2 (NM_152431.1,2363-2381).
cgattctttaccgaaatga

SEQ ID NO: 416751 - DNA, 19 bp, Homo sapiens
  siRNA target sequence for HIWI2 (NM_152431.1,2364-2382).
gattctttaccgaaatgaa

SEQ ID NO: 416752 - DNA, 19 bp, Homo sapiens
  siRNA target sequence for HIWI2 (NM_152431.1,2426-2444).
gaagcaacacgtaacgaat

SEQ ID NO: 416753 - DNA, 19 bp, Homo sapiens
  siRNA target sequence for HIWI2 (NM_152431.1,2430-2448).
caacacgtaacgaatggta

SEQ ID NO: 416754 - DNA, 19 bp, Homo sapiens
  siRNA target sequence for HIWI2 (NM_152431.1,2435-2453).
cgtaacgaatggtatgact

SEQ ID NO: 416755 - DNA, 19 bp, Homo sapiens
  siRNA target sequence for HIWI2 (NM_152431.1,2445-2463).
ggtatgacttttatctgat

SEQ ID NO: 416756 - DNA, 19 bp, Homo sapiens
  siRNA target sequence for HIWI2 (NM_152431.1,2489-2507).
gttagtcctacctactata

SEQ ID NO: 416757 - DNA, 19 bp, Homo sapiens
  siRNA target sequence for HIWI2 (NM_152431.1,2495-2513).
cctacctactataatgtca

SEQ ID NO: 416758 - DNA, 19 bp, Homo sapiens
  siRNA target sequence for HIWI2 (NM_152431.1,2496-2514).
ctacctactataatgtcat

SEQ ID NO: 416759 - DNA, 19 bp, Homo sapiens
  siRNA target sequence for HIWI2 (NM_152431.1,2499-2517).
cctactataatgtcatcta

SEQ ID NO: 416760 - DNA, 19 bp, Homo sapiens
  siRNA target sequence for HIWI2 (NM_152431.1,2529-2547).
gcttgaagcccgaccatat

SEQ ID NO: 416761 - DNA, 19 bp, Homo sapiens
  siRNA target sequence for HIWI2 (NM_152431.1,2540-2558).
gaccatatgcagagactta

SEQ ID NO: 416762 - DNA, 19 bp, Homo sapiens
  siRNA target sequence for HIWI2 (NM_152431.1,2543-2561).
catatgcagagacttacat

SEQ ID NO: 416763 - DNA, 19 bp, Homo sapiens
  siRNA target sequence for FLJ32343 (NM_152434.1,147-165).
gactgttgattttatgtct

SEQ ID NO: 416764 - DNA, 19 bp, Homo sapiens
  siRNA target sequence for FLJ32343 (NM_152434.1,326-344).
gtgtgtcatcgattactaa

SEQ ID NO: 416765 - DNA, 19 bp, Homo sapiens
  siRNA target sequence for FLJ32343 (NM_152434.1,335-353).
cgattactaaagtttcagt

SEQ ID NO: 416766 - DNA, 19 bp, Homo sapiens
  siRNA target sequence for FLJ32343 (NM_152434.1,374-392).
gctggctaaggaaatctta

SEQ ID NO: 416767 - DNA, 19 bp, Homo sapiens
  siRNA target sequence for FLJ32343 (NM_152434.1,377-395).
ggctaaggaaatcttatct

SEQ ID NO: 416768 - DNA, 19 bp, Homo sapiens
  siRNA target sequence for FLJ32343 (NM_152434.1,378-396).
gctaaggaaatcttatcta

SEQ ID NO: 416769 - DNA, 19 bp, Homo sapiens
  siRNA target sequence for FLJ32343 (NM_152434.1,379-397).
ctaaggaaatcttatctaa

SEQ ID NO: 416770 - DNA, 19 bp, Homo sapiens
  siRNA target sequence for FLJ32343 (NM_152434.1,439-457).
gacattgtagccgaaagat

SEQ ID NO: 416771 - DNA, 19 bp, Homo sapiens
  siRNA target sequence for FLJ32343 (NM_152434.1,441-459).
cattgtagccgaaagatat

SEQ ID NO: 416772 - DNA, 19 bp, Homo sapiens
  siRNA target sequence for FLJ32343 (NM_152434.1,506-524).
ctgcatccacgaaagaaga

SEQ ID NO: 416773 - DNA, 19 bp, Homo sapiens
  siRNA target sequence for FLJ32343 (NM_152434.1,509-527).
catccacgaaagaagatta

SEQ ID NO: 416774 - DNA, 19 bp, Homo sapiens
  siRNA target sequence for FLJ32343 (NM_152434.1,587-605).
gtagagaatcagacttagt

SEQ ID NO: 416775 - DNA, 19 bp, Homo sapiens
  siRNA target sequence for FLJ32343 (NM_152434.1,598-616).
gacttagtaaaatatggta

SEQ ID NO: 416776 - DNA, 19 bp, Homo sapiens
  siRNA target sequence for FLJ32343 (NM_152434.1,618-636).
cagttcaagggatagatat

SEQ ID NO: 416777 - DNA, 19 bp, Homo sapiens
  siRNA target sequence for FLJ32343 (NM_152434.1,627-645).
ggatagatatgctacaaca

SEQ ID NO: 416778 - DNA, 19 bp, Homo sapiens
  siRNA target sequence for FLJ32343 (NM_152434.1,650-668).
ctgcaaaaaatagcaataa

SEQ ID NO: 416779 - DNA, 19 bp, Homo sapiens
  siRNA target sequence for FLJ32343 (NM_152434.1,719-737).
cgtgtagaagagaatctaa

SEQ ID NO: 416780 - DNA, 19 bp, Homo sapiens
  siRNA target sequence for FLJ32343 (NM_152434.1,822-840).
cagcaagggcagaaaattt

SEQ ID NO: 416781 - DNA, 19 bp, Homo sapiens
  siRNA target sequence for FLJ32343 (NM_152434.1,841-859).
gaaccacttagttcatctt

SEQ ID NO: 416782 - DNA, 19 bp, Homo sapiens
  siRNA target sequence for FLJ32343 (NM_152434.1,912-930).
gaacagtgaagaaagatta

SEQ ID NO: 416783 - DNA, 19 bp, Homo sapiens
  siRNA target sequence for FLJ32343 (NM_152434.1,1061-1079).
gagatgaccctccaaaaaa

SEQ ID NO: 416784 - DNA, 19 bp, Homo sapiens
  siRNA target sequence for FLJ32343 (NM_152434.1,1081-1099).
gaacatctacgggatacaa

SEQ ID NO: 416785 - DNA, 19 bp, Homo sapiens
  siRNA target sequence for FLJ32343 (NM_152434.1,1084-1102).
catctacgggatacaaagt

SEQ ID NO: 416786 - DNA, 19 bp, Homo sapiens
  siRNA target sequence for FLJ32343 (NM_152434.1,1087-1105).
ctacgggatacaaagtcta

SEQ ID NO: 416787 - DNA, 19 bp, Homo sapiens
  siRNA target sequence for FLJ32343 (NM_152434.1,1123-1141).
gagcgtgagtccattcaca

SEQ ID NO: 416788 - DNA, 19 bp, Homo sapiens
  siRNA target sequence for FLJ32343 (NM_152434.1,1148-1166).
gtgttgatgagaagaacaa

SEQ ID NO: 416789 - DNA, 19 bp, Homo sapiens
  siRNA target sequence for FLJ32343 (NM_152434.1,1336-1354).
gatcagtctggaagagtat

SEQ ID NO: 416790 - DNA, 19 bp, Homo sapiens
  siRNA target sequence for FLJ32343 (NM_152434.1,1442-1460).
gggtcagatactttcatga

SEQ ID NO: 416791 - DNA, 19 bp, Homo sapiens
  siRNA target sequence for FLJ32343 (NM_152434.1,1475-1493).
gcctaaatgatttagtcaa

SEQ ID NO: 416792 - DNA, 19 bp, Homo sapiens
  siRNA target sequence for FLJ32343 (NM_152434.1,1477-1495).
ctaaatgatttagtcaaaa

SEQ ID NO: 416793 - DNA, 19 bp, Homo sapiens
  siRNA target sequence for FLJ32343 (NM_152434.1,1679-1697).
ggagtcttgctgcacaaat

SEQ ID NO: 416794 - DNA, 19 bp, Homo sapiens
  siRNA target sequence for FLJ32343 (NM_152434.1,1682-1700).
gtcttgctgcacaaatgga

SEQ ID NO: 416795 - DNA, 19 bp, Homo sapiens
  siRNA target sequence for FLJ32343 (NM_152434.1,1753-1771).
gcaataggtgttaaggttt

SEQ ID NO: 416796 - DNA, 19 bp, Homo sapiens
  siRNA target sequence for FLJ32343 (NM_152434.1,1754-1772).
caataggtgttaaggttta

SEQ ID NO: 416797 - DNA, 19 bp, Homo sapiens
  siRNA target sequence for FLJ32343 (NM_152434.1,1783-1801).
cccaacgtacggtctctta

SEQ ID NO: 416798 - DNA, 19 bp, Homo sapiens
  siRNA target sequence for FLJ32343 (NM_152434.1,1785-1803).
caacgtacggtctcttact

SEQ ID NO: 416799 - DNA, 19 bp, Homo sapiens
  siRNA target sequence for FLJ32343 (NM_152434.1,1915-1933).
gaagataaaggattagact

SEQ ID NO: 416800 - DNA, 19 bp, Homo sapiens
  siRNA target sequence for FLJ32343 (NM_152434.1,1980-1998).
ggtttatgaatgtattcct

SEQ ID NO: 416801 - DNA, 19 bp, Homo sapiens
  siRNA target sequence for FLJ32343 (NM_152434.1,2017-2035).
gacatggctcccatctatt

SEQ ID NO: 416802 - DNA, 19 bp, Homo sapiens
  siRNA target sequence for FLJ32343 (NM_152434.1,2069-2087).
ggtccatgaacaagaagtt

SEQ ID NO: 416803 - DNA, 19 bp, Homo sapiens
  siRNA target sequence for FLJ32343 (NM_152434.1,2092-2110).
gatctctcttcaaaagata

SEQ ID NO: 416804 - DNA, 19 bp, Homo sapiens
  siRNA target sequence for FLJ32343 (NM_152434.1,2122-2140).
gtacccagagggttacctt

SEQ ID NO: 416805 - DNA, 19 bp, Homo sapiens
  siRNA target sequence for FLJ32343 (NM_152434.1,2171-2189).
ggtttgcccatgtcattga

SEQ ID NO: 416806 - DNA, 19 bp, Homo sapiens
  siRNA target sequence for FLJ32343 (NM_152434.1,2177-2195).
cccatgtcattgaagatca

SEQ ID NO: 416807 - DNA, 19 bp, Homo sapiens
  siRNA target sequence for FLJ32343 (NM_152434.1,2197-2215).
cacaaattccctcattact

SEQ ID NO: 416808 - DNA, 19 bp, Homo sapiens
  siRNA target sequence for FLJ32343 (NM_152434.1,2327-2345).
ggtggaaaccatatgactt

SEQ ID NO: 416809 - DNA, 19 bp, Homo sapiens
  siRNA target sequence for FLJ32343 (NM_152434.1,2335-2353).
ccatatgacttcaccaaaa

SEQ ID NO: 416810 - DNA, 19 bp, Homo sapiens
  siRNA target sequence for FLJ32549 (NM_152440.1,75-93).
gtgctggagacgttcttct

SEQ ID NO: 416811 - DNA, 19 bp, Homo sapiens
  siRNA target sequence for FLJ32549 (NM_152440.1,144-162).
gaacgagaggccaacaaga

SEQ ID NO: 416812 - DNA, 19 bp, Homo sapiens
  siRNA target sequence for FLJ32549 (NM_152440.1,216-234).
gccgagaaggtctatcaca

SEQ ID NO: 416813 - DNA, 19 bp, Homo sapiens
  siRNA target sequence for FLJ32549 (NM_152440.1,242-260).
ctacctggggcagaaacta

SEQ ID NO: 416814 - DNA, 19 bp, Homo sapiens
  siRNA target sequence for FLJ32549 (NM_152440.1,296-314).
ccgcaccatctatacttca

SEQ ID NO: 416815 - DNA, 19 bp, Homo sapiens
  siRNA target sequence for FLJ32549 (NM_152440.1,305-323).
ctatacttcattgcataat

SEQ ID NO: 416816 - DNA, 19 bp, Homo sapiens
  siRNA target sequence for FLJ32549 (NM_152440.1,370-388).
ctcctcacgtggaagaact

SEQ ID NO: 416817 - DNA, 19 bp, Homo sapiens
  siRNA target sequence for FLJ32549 (NM_152440.1,653-671).
cctcccatctctggttaat

SEQ ID NO: 416818 - DNA, 19 bp, Homo sapiens
  siRNA target sequence for FLJ32549 (NM_152440.1,654-672).
ctcccatctctggttaatt

SEQ ID NO: 416819 - DNA, 19 bp, Homo sapiens
  siRNA target sequence for FLJ32549 (NM_152440.1,656-674).
cccatctctggttaattta

SEQ ID NO: 416820 - DNA, 19 bp, Homo sapiens
  siRNA target sequence for FLJ32549 (NM_152440.1,700-718).
cgtggggccagatctttga

SEQ ID NO: 416821 - DNA, 19 bp, Homo sapiens
  siRNA target sequence for FLJ32549 (NM_152440.1,725-743).
gcgggagaccaagaaacat

SEQ ID NO: 416822 - DNA, 19 bp, Homo sapiens
  siRNA target sequence for FLJ32549 (NM_152440.1,825-843).
gccaagtttagcttttact

SEQ ID NO: 416823 - DNA, 19 bp, Homo sapiens
  siRNA target sequence for FLJ32549 (NM_152440.1,868-886).
cgactgcttcagaaatgaa

SEQ ID NO: 416824 - DNA, 19 bp, Homo sapiens
  siRNA target sequence for FLJ32549 (NM_152440.1,873-891).
gcttcagaaatgaaaacgt

SEQ ID NO: 416825 - DNA, 19 bp, Homo sapiens
  siRNA target sequence for FLJ32549 (NM_152440.1,931-949).
ccagcttcatcagaaaata

SEQ ID NO: 416826 - DNA, 19 bp, Homo sapiens
  siRNA target sequence for FLJ32549 (NM_152440.1,954-972).
gctgccaatgtgtccttaa

SEQ ID NO: 416827 - DNA, 19 bp, Homo sapiens
  siRNA target sequence for FLJ32549 (NM_152440.1,963-981).
gtgtccttaatttttgaca

SEQ ID NO: 416828 - DNA, 19 bp, Homo sapiens
  siRNA target sequence for FLJ32549 (NM_152440.1,1108-1126).
ggcccaatgtcatcatgat

SEQ ID NO: 416829 - DNA, 19 bp, Homo sapiens
  siRNA target sequence for FLJ32549 (NM_152440.1,1130-1148).
gacggaccgcacatctgat

SEQ ID NO: 416830 - DNA, 19 bp, Homo sapiens
  siRNA target sequence for FLJ32549 (NM_152440.1,1163-1181).
gaaagtggtccacttctat

SEQ ID NO: 416831 - DNA, 19 bp, Homo sapiens
  siRNA target sequence for FLJ32549 (NM_152440.1,1172-1190).
ccacttctatgatgacaaa

SEQ ID NO: 416832 - DNA, 19 bp, Homo sapiens
  siRNA target sequence for FLJ32549 (NM_152440.1,1194-1212).
cagagtacctacttcctaa

SEQ ID NO: 416833 - DNA, 19 bp, Homo sapiens
  siRNA target sequence for FLJ32549 (NM_152440.1,1219-1237).
cggaacctcactttaccat

SEQ ID NO: 416834 - DNA, 19 bp, Homo sapiens
  siRNA target sequence for FLJ32549 (NM_152440.1,1220-1238).
ggaacctcactttaccatt

SEQ ID NO: 416835 - DNA, 19 bp, Homo sapiens
  siRNA target sequence for FLJ32549 (NM_152440.1,1302-1320).
gtctcacttgcccttaaga

SEQ ID NO: 416836 - DNA, 19 bp, Homo sapiens
  siRNA target sequence for MGC40195 (NM_152441.1,608-626).
gcctcaagagccttaacct

SEQ ID NO: 416837 - DNA, 19 bp, Homo sapiens
  siRNA target sequence for MGC40195 (NM_152441.1,738-756).
gaagctcacagatctttct

SEQ ID NO: 416838 - DNA, 19 bp, Homo sapiens
  siRNA target sequence for MGC40195 (NM_152441.1,741-759).
gctcacagatctttctcta

SEQ ID NO: 416839 - DNA, 19 bp, Homo sapiens
  siRNA target sequence for MGC40195 (NM_152441.1,944-962).
cggggctggatgtttcgtt

SEQ ID NO: 416840 - DNA, 19 bp, Homo sapiens
  siRNA target sequence for MGC40195 (NM_152441.1,1092-1110).
gctgcgcacgctcaacatt

SEQ ID NO: 416841 - DNA, 19 bp, Homo sapiens
  siRNA target sequence for MGC40195 (NM_152441.1,1293-1311).
ggaggcacgaggggatttt

SEQ ID NO: 416842 - DNA, 19 bp, Homo sapiens
  siRNA target sequence for RAD9B (NM_152442.1,731-749).
gtcaagaggaagttactct

SEQ ID NO: 416843 - DNA, 19 bp, Homo sapiens
  siRNA target sequence for RAD9B (NM_152442.1,751-769).
gctgttactccactgaatt

SEQ ID NO: 416844 - DNA, 19 bp, Homo sapiens
  siRNA target sequence for RAD9B (NM_152442.1,790-808).
gaggaatcaatggatttga

SEQ ID NO: 416845 - DNA, 19 bp, Homo sapiens
  siRNA target sequence for RAD9B (NM_152442.1,815-833).
ctgtacacagtgagatgtt

SEQ ID NO: 416846 - DNA, 19 bp, Homo sapiens
  siRNA target sequence for RAD9B (NM_152442.1,849-867).
gtttgacttctttcaaatt

SEQ ID NO: 416847 - DNA, 19 bp, Homo sapiens
  siRNA target sequence for RAD9B (NM_152442.1,873-891).
ggacactgagataacattt

SEQ ID NO: 416848 - DNA, 19 bp, Homo sapiens
  siRNA target sequence for RAD9B (NM_152442.1,874-892).
gacactgagataacatttt

SEQ ID NO: 416849 - DNA, 19 bp, Homo sapiens
  siRNA target sequence for RAD9B (NM_152442.1,977-995).
ctctggctttgagtattga

SEQ ID NO: 416850 - DNA, 19 bp, Homo sapiens
  siRNA target sequence for RAD9B (NM_152442.1,981-999).
ggctttgagtattgatgat

SEQ ID NO: 416851 - DNA, 19 bp, Homo sapiens
  siRNA target sequence for RAD9B (NM_152442.1,982-1000).
gctttgagtattgatgata

SEQ ID NO: 416852 - DNA, 19 bp, Homo sapiens
  siRNA target sequence for RAD9B (NM_152442.1,983-1001).
ctttgagtattgatgatat

SEQ ID NO: 416853 - DNA, 19 bp, Homo sapiens
  siRNA target sequence for RAD9B (NM_152442.1,1026-1044).
ggccacattagctgatgaa

SEQ ID NO: 416854 - DNA, 19 bp, Homo sapiens
  siRNA target sequence for RAD9B (NM_152442.1,1028-1046).
ccacattagctgatgaaca

SEQ ID NO: 416855 - DNA, 19 bp, Homo sapiens
  siRNA target sequence for RAD9B (NM_152442.1,1029-1047).
cacattagctgatgaacaa

SEQ ID NO: 416856 - DNA, 19 bp, Homo sapiens
  siRNA target sequence for RAD9B (NM_152442.1,1076-1094).
gtctttcacagaaacgaaa

SEQ ID NO: 416857 - DNA, 19 bp, Homo sapiens
  siRNA target sequence for RAD9B (NM_152442.1,1091-1109).
gaaaaaggtcagatctgat

SEQ ID NO: 416858 - DNA, 19 bp, Homo sapiens
  siRNA target sequence for RAD9B (NM_152442.1,1097-1115).
ggtcagatctgattgaaaa

SEQ ID NO: 416859 - DNA, 19 bp, Homo sapiens
  siRNA target sequence for RAD9B (NM_152442.1,1098-1116).
gtcagatctgattgaaaaa

SEQ ID NO: 416860 - DNA, 19 bp, Homo sapiens
  siRNA target sequence for RAD9B (NM_152442.1,1174-1192).
ccaagaaggctttatccta

SEQ ID NO: 416861 - DNA, 19 bp, Homo sapiens
  siRNA target sequence for MGC33951 (NM_152448.1,150-168).
ccagacacgctgagaatat

SEQ ID NO: 416862 - DNA, 19 bp, Homo sapiens
  siRNA target sequence for MGC33951 (NM_152448.1,151-169).
cagacacgctgagaatata

SEQ ID NO: 416863 - DNA, 19 bp, Homo sapiens
  siRNA target sequence for MGC33951 (NM_152448.1,175-193).
gccttgattacatagaaga

SEQ ID NO: 416864 - DNA, 19 bp, Homo sapiens
  siRNA target sequence for MGC33951 (NM_152448.1,177-195).
cttgattacatagaagata

SEQ ID NO: 416865 - DNA, 19 bp, Homo sapiens
  siRNA target sequence for MGC33951 (NM_152448.1,230-248).
ggtagctaatgccaaaata

SEQ ID NO: 416866 - DNA, 19 bp, Homo sapiens
  siRNA target sequence for MGC33951 (NM_152448.1,262-280).
ctttgggtcatttcattct

SEQ ID NO: 416867 - DNA, 19 bp, Homo sapiens
  siRNA target sequence for MGC33951 (NM_152448.1,283-301).
ctcctgcgtgcctgcaaaa

SEQ ID NO: 416868 - DNA, 19 bp, Homo sapiens
  siRNA target sequence for MGC33951 (NM_152448.1,289-307).
cgtgcctgcaaaaagaaat

SEQ ID NO: 416869 - DNA, 19 bp, Homo sapiens
  siRNA target sequence for MGC33951 (NM_152448.1,290-308).
gtgcctgcaaaaagaaata

SEQ ID NO: 416870 - DNA, 19 bp, Homo sapiens
  siRNA target sequence for MGC33951 (NM_152448.1,334-352).
gggaacaagaccaacattt

SEQ ID NO: 416871 - DNA, 19 bp, Homo sapiens
  siRNA target sequence for MGC33951 (NM_152448.1,497-515).
gtacttccctctacagaat

SEQ ID NO: 416872 - DNA, 19 bp, Homo sapiens
  siRNA target sequence for MGC33951 (NM_152448.1,519-537).
ccagttaacaacatggtaa

SEQ ID NO: 416873 - DNA, 19 bp, Homo sapiens
  siRNA target sequence for MGC33951 (NM_152448.1,527-545).
caacatggtaacaggttat

SEQ ID NO: 416874 - DNA, 19 bp, Homo sapiens
  siRNA target sequence for MGC33951 (NM_152448.1,538-556).
caggttatatatcaattga

SEQ ID NO: 416875 - DNA, 19 bp, Homo sapiens
  siRNA target sequence for MGC33951 (NM_152448.1,610-628).
gatatttggcatatcatgt

SEQ ID NO: 416876 - DNA, 19 bp, Homo sapiens
  siRNA target sequence for MGC33951 (NM_152448.1,617-635).
ggcatatcatgttcaaaat

SEQ ID NO: 416877 - DNA, 19 bp, Homo sapiens
  siRNA target sequence for FLJ33008 (NM_152449.2,453-471).
cagtatggctgcaaacaca

SEQ ID NO: 416878 - DNA, 19 bp, Homo sapiens
  siRNA target sequence for FLJ33008 (NM_152449.2,553-571).
ggcaaagttgcagatatca

SEQ ID NO: 416879 - DNA, 19 bp, Homo sapiens
  siRNA target sequence for FLJ33008 (NM_152449.2,554-572).
gcaaagttgcagatatcaa

SEQ ID NO: 416880 - DNA, 19 bp, Homo sapiens
  siRNA target sequence for FLJ33008 (NM_152449.2,582-600).
caacttcatcagagaacaa

SEQ ID NO: 416881 - DNA, 19 bp, Homo sapiens
  siRNA target sequence for FLJ33008 (NM_152449.2,595-613).
gaacaagacttatatgctt

SEQ ID NO: 416882 - DNA, 19 bp, Homo sapiens
  siRNA target sequence for FLJ33008 (NM_152449.2,768-786).
ccaactgatgggcttcttt

SEQ ID NO: 416883 - DNA, 19 bp, Homo sapiens
  siRNA target sequence for FLJ33008 (NM_152449.2,769-787).
caactgatgggcttcttta

SEQ ID NO: 416884 - DNA, 19 bp, Homo sapiens
  siRNA target sequence for FLJ33008 (NM_152449.2,789-807).
ggggattgaccaggatatt

SEQ ID NO: 416885 - DNA, 19 bp, Homo sapiens
  siRNA target sequence for FLJ33008 (NM_152449.2,791-809).
ggattgaccaggatattga

SEQ ID NO: 416886 - DNA, 19 bp, Homo sapiens
  siRNA target sequence for FLJ33008 (NM_152449.2,819-837).
gcagtcagaaatctttcta

SEQ ID NO: 416887 - DNA, 19 bp, Homo sapiens
  siRNA target sequence for FLJ33008 (NM_152449.2,822-840).
gtcagaaatctttctacat

SEQ ID NO: 416888 - DNA, 19 bp, Homo sapiens
  siRNA target sequence for FLJ33008 (NM_152449.2,1012-1030).
ggtgagacccctaatagct

SEQ ID NO: 416889 - DNA, 19 bp, Homo sapiens
  siRNA target sequence for FLJ33008 (NM_152449.2,1013-1031).
gtgagacccctaatagctt

SEQ ID NO: 416890 - DNA, 19 bp, Homo sapiens
  siRNA target sequence for FLJ33008 (NM_152449.2,1021-1039).
cctaatagcttgaacacaa

SEQ ID NO: 416891 - DNA, 19 bp, Homo sapiens
  siRNA target sequence for MGC26690 (NM_152450.1,250-268).
ggcaccatactcatctgta

SEQ ID NO: 416892 - DNA, 19 bp, Homo sapiens
  siRNA target sequence for MGC26690 (NM_152450.1,334-352).
gcacgcctttcggattaaa

SEQ ID NO: 416893 - DNA, 19 bp, Homo sapiens
  siRNA target sequence for MGC26690 (NM_152450.1,337-355).
cgcctttcggattaaagat

SEQ ID NO: 416894 - DNA, 19 bp, Homo sapiens
  siRNA target sequence for MGC26690 (NM_152450.1,345-363).
ggattaaagatgacattgt

SEQ ID NO: 416895 - DNA, 19 bp, Homo sapiens
  siRNA target sequence for MGC26690 (NM_152450.1,404-422).
cgcttggccaggcttttct

SEQ ID NO: 416896 - DNA, 19 bp, Homo sapiens
  siRNA target sequence for MGC26690 (NM_152450.1,425-443).
gaggagcatatcagaaaca

SEQ ID NO: 416897 - DNA, 19 bp, Homo sapiens
  siRNA target sequence for MGC26690 (NM_152450.1,449-467).
gccatagtgaagcaactta

SEQ ID NO: 416898 - DNA, 19 bp, Homo sapiens
  siRNA target sequence for MGC26690 (NM_152450.1,514-532).
cattagctatggaactaat

SEQ ID NO: 416899 - DNA, 19 bp, Homo sapiens
  siRNA target sequence for MGC26690 (NM_152450.1,525-543).
gaactaattctgccttaaa

SEQ ID NO: 416900 - DNA, 19 bp, Homo sapiens
  siRNA target sequence for MGC26690 (NM_152450.1,565-583).
ctccggtttgggagatctt

SEQ ID NO: 416901 - DNA, 19 bp, Homo sapiens
  siRNA target sequence for MGC26690 (NM_152450.1,608-626).
gccagcatagctagacttt

SEQ ID NO: 416902 - DNA, 19 bp, Homo sapiens
  siRNA target sequence for MGC26690 (NM_152450.1,610-628).
cagcatagctagactttct

SEQ ID NO: 416903 - DNA, 19 bp, Homo sapiens
  siRNA target sequence for MGC26690 (NM_152450.1,653-671).
gggctccagcacttgaaca

SEQ ID NO: 416904 - DNA, 19 bp, Homo sapiens
  siRNA target sequence for MGC26690 (NM_152450.1,654-672).
ggctccagcacttgaacaa

SEQ ID NO: 416905 - DNA, 19 bp, Homo sapiens
  siRNA target sequence for MGC26690 (NM_152450.1,677-695).
cagcaggctgccaaactta

SEQ ID NO: 416906 - DNA, 19 bp, Homo sapiens
  siRNA target sequence for MGC26690 (NM_152450.1,680-698).
caggctgccaaacttatct

SEQ ID NO: 416907 - DNA, 19 bp, Homo sapiens
  siRNA target sequence for MGC26690 (NM_152450.1,686-704).
gccaaacttatcttggaaa

SEQ ID NO: 416908 - DNA, 19 bp, Homo sapiens
  siRNA target sequence for MGC26690 (NM_152450.1,720-738).
cagagggacagatttctca

SEQ ID NO: 416909 - DNA, 19 bp, Homo sapiens
  siRNA target sequence for MGC26690 (NM_152450.1,901-919).
ggaacaagaacggatagaa

SEQ ID NO: 416910 - DNA, 19 bp, Homo sapiens
  siRNA target sequence for MGC26690 (NM_152450.1,902-920).
gaacaagaacggatagaaa

SEQ ID NO: 416911 - DNA, 19 bp, Homo sapiens
  siRNA target sequence for MGC26690 (NM_152450.1,955-973).
gattgttaaggaaaacagt

SEQ ID NO: 416912 - DNA, 19 bp, Homo sapiens
  siRNA target sequence for MGC26690 (NM_152450.1,1021-1039).
caggcttgacaaaatagaa

SEQ ID NO: 416913 - DNA, 19 bp, Homo sapiens
  siRNA target sequence for MGC26690 (NM_152450.1,1170-1188).
ggtttacagccgtctatga

SEQ ID NO: 416914 - DNA, 19 bp, Homo sapiens
  siRNA target sequence for MGC26690 (NM_152450.1,1171-1189).
gtttacagccgtctatgaa

SEQ ID NO: 416915 - DNA, 19 bp, Homo sapiens
  siRNA target sequence for MGC26690 (NM_152450.1,1176-1194).
cagccgtctatgaaagcat

SEQ ID NO: 416916 - DNA, 19 bp, Homo sapiens
  siRNA target sequence for MGC26690 (NM_152450.1,1181-1199).
gtctatgaaagcataggat

SEQ ID NO: 416917 - DNA, 19 bp, Homo sapiens
  siRNA target sequence for FLJ30973 (NM_152451.1,319-337).
ggtgcgaagatcagatcaa

SEQ ID NO: 416918 - DNA, 19 bp, Homo sapiens
  siRNA target sequence for FLJ30973 (NM_152451.1,442-460).
gcgaatgtatggagactat

SEQ ID NO: 416919 - DNA, 19 bp, Homo sapiens
  siRNA target sequence for FLJ30973 (NM_152451.1,487-505).
gctcacccaggaactatca

SEQ ID NO: 416920 - DNA, 19 bp, Homo sapiens
  siRNA target sequence for FLJ30973 (NM_152451.1,530-548).
ctggagaatcacatccaaa

SEQ ID NO: 416921 - DNA, 19 bp, Homo sapiens
  siRNA target sequence for FLJ30973 (NM_152451.1,558-576).
ctgccctggatcgttttaa

SEQ ID NO: 416922 - DNA, 19 bp, Homo sapiens
  siRNA target sequence for FLJ30973 (NM_152451.1,569-587).
cgttttaatgccatgaact

SEQ ID NO: 416923 - DNA, 19 bp, Homo sapiens
  siRNA target sequence for FLJ30973 (NM_152451.1,624-642).
ccctcgtggatgtgacttt

SEQ ID NO: 416924 - DNA, 19 bp, Homo sapiens
  siRNA target sequence for FLJ30973 (NM_152451.1,733-751).
ggaggtagcgcaagttgaa

SEQ ID NO: 416925 - DNA, 19 bp, Homo sapiens
  siRNA target sequence for FLJ30973 (NM_152451.1,734-752).
gaggtagcgcaagttgaaa

SEQ ID NO: 416926 - DNA, 19 bp, Homo sapiens
  siRNA target sequence for FLJ30973 (NM_152451.1,883-901).
gaaggaggctcttttggaa

SEQ ID NO: 416927 - DNA, 19 bp, Homo sapiens
  siRNA target sequence for FLJ30973 (NM_152451.1,1070-1088).
gaaatgtctggggagttaa

SEQ ID NO: 416928 - DNA, 19 bp, Homo sapiens
  siRNA target sequence for FLJ30973 (NM_152451.1,1075-1093).
gtctggggagttaactgat

SEQ ID NO: 416929 - DNA, 19 bp, Homo sapiens
  siRNA target sequence for FLJ30973 (NM_152451.1,1205-1223).
gtcgaggagattgaatcat

SEQ ID NO: 416930 - DNA, 19 bp, Homo sapiens
  siRNA target sequence for FLJ30973 (NM_152451.1,1264-1282).
gcttttagaaaagatatct

SEQ ID NO: 416931 - DNA, 19 bp, Homo sapiens
  siRNA target sequence for FLJ30973 (NM_152451.1,1310-1328).
caaagcaggttggactatt

SEQ ID NO: 416932 - DNA, 19 bp, Homo sapiens
  siRNA target sequence for FLJ30973 (NM_152451.1,1315-1333).
caggttggactatttaaca

SEQ ID NO: 416933 - DNA, 19 bp, Homo sapiens
  siRNA target sequence for FLJ30973 (NM_152451.1,1317-1335).
ggttggactatttaacaga

SEQ ID NO: 416934 - DNA, 19 bp, Homo sapiens
  siRNA target sequence for FLJ30973 (NM_152451.1,1374-1392).
gagtgggctgtgatcttct

SEQ ID NO: 416935 - DNA, 19 bp, Homo sapiens
  siRNA target sequence for FLJ30973 (NM_152451.1,1438-1456).
gaactacaccccatacaca

SEQ ID NO: 416936 - DNA, 19 bp, Homo sapiens
  siRNA target sequence for FLJ30973 (NM_152451.1,1458-1476).
gagtcctggagttaaccat

SEQ ID NO: 416937 - DNA, 19 bp, Homo sapiens
  siRNA target sequence for MGC18216 (NM_152452.1,2271-2289).
gtctggctgccgtcattgt

SEQ ID NO: 416938 - DNA, 19 bp, Homo sapiens
  siRNA target sequence for MGC18216 (NM_152452.1,2327-2345).
cagccaatggttttcatga

SEQ ID NO: 416939 - DNA, 19 bp, Homo sapiens
  siRNA target sequence for MGC18216 (NM_152452.1,2335-2353).
ggttttcatgatgattaca

SEQ ID NO: 416940 - DNA, 19 bp, Homo sapiens
  siRNA target sequence for MGC18216 (NM_152452.1,2344-2362).
gatgattacagcatacaca

SEQ ID NO: 416941 - DNA, 19 bp, Homo sapiens
  siRNA target sequence for MGC35118 (NM_152453.2,114-132).
caagattggctcagtcaaa

SEQ ID NO: 416942 - DNA, 19 bp, Homo sapiens
  siRNA target sequence for MGC35118 (NM_152453.2,168-186).
gggatacgcagagaataga

SEQ ID NO: 416943 - DNA, 19 bp, Homo sapiens
  siRNA target sequence for MGC35118 (NM_152453.2,169-187).
ggatacgcagagaatagat

SEQ ID NO: 416944 - DNA, 19 bp, Homo sapiens
  siRNA target sequence for MGC35118 (NM_152453.2,385-403).
gttggtccacagtataaca

SEQ ID NO: 416945 - DNA, 19 bp, Homo sapiens
  siRNA target sequence for MGC35118 (NM_152453.2,394-412).
cagtataacagaacttcaa

SEQ ID NO: 416946 - DNA, 19 bp, Homo sapiens
  siRNA target sequence for MGC35118 (NM_152453.2,407-425).
cttcaacaaaagcttacaa

SEQ ID NO: 416947 - DNA, 19 bp, Homo sapiens
  siRNA target sequence for MGC35118 (NM_152453.2,465-483).
cagatggagccctagaaga

SEQ ID NO: 416948 - DNA, 19 bp, Homo sapiens
  siRNA target sequence for MGC35118 (NM_152453.2,506-524).
ctggaagcttcctatgcat

SEQ ID NO: 416949 - DNA, 19 bp, Homo sapiens
  siRNA target sequence for MGC35118 (NM_152453.2,516-534).
cctatgcatgccaagagaa

SEQ ID NO: 416950 - DNA, 19 bp, Homo sapiens
  siRNA target sequence for MGC35118 (NM_152453.2,574-592).
ccagctctgtgaagatcaa

SEQ ID NO: 416951 - DNA, 19 bp, Homo sapiens
  siRNA target sequence for MGC35118 (NM_152453.2,587-605).
gatcaagccctctacataa

SEQ ID NO: 416952 - DNA, 19 bp, Homo sapiens
  siRNA target sequence for MGC35118 (NM_152453.2,813-831).
gactgctgagctacatgtt

SEQ ID NO: 416953 - DNA, 19 bp, Homo sapiens
  siRNA target sequence for MGC35118 (NM_152453.2,855-873).
cagatctcctcgtcaatgt

SEQ ID NO: 416954 - DNA, 19 bp, Homo sapiens
  siRNA target sequence for FLJ31461 (NM_152454.1,206-224).
gaattgtgatgctttgcta

SEQ ID NO: 416955 - DNA, 19 bp, Homo sapiens
  siRNA target sequence for FLJ31461 (NM_152454.1,211-229).
gtgatgctttgctacatca

SEQ ID NO: 416956 - DNA, 19 bp, Homo sapiens
  siRNA target sequence for FLJ31461 (NM_152454.1,309-327).
caatctgtgtgtctctttt

SEQ ID NO: 416957 - DNA, 19 bp, Homo sapiens
  siRNA target sequence for FLJ31461 (NM_152454.1,561-579).
cccacatgtgtcttcacat

SEQ ID NO: 416958 - DNA, 19 bp, Homo sapiens
  siRNA target sequence for MGC34647 (NM_152456.1,463-481).
ggcccttgacgcagaatga

SEQ ID NO: 416959 - DNA, 19 bp, Homo sapiens
  siRNA target sequence for MGC34647 (NM_152456.1,526-544).
ggagccgacttcagtacat

SEQ ID NO: 416960 - DNA, 19 bp, Homo sapiens
  siRNA target sequence for MGC34647 (NM_152456.1,529-547).
gccgacttcagtacatgaa

SEQ ID NO: 416961 - DNA, 19 bp, Homo sapiens
  siRNA target sequence for MGC34647 (NM_152456.1,645-663).
cgggagctgcggtatctgt

SEQ ID NO: 416962 - DNA, 19 bp, Homo sapiens
  siRNA target sequence for MGC34647 (NM_152456.1,814-832).
ccgtgttgtccctcttgaa

SEQ ID NO: 416963 - DNA, 19 bp, Homo sapiens
  siRNA target sequence for MGC34647 (NM_152456.1,815-833).
cgtgttgtccctcttgaat

SEQ ID NO: 416964 - DNA, 19 bp, Homo sapiens
  siRNA target sequence for FLJ31882 (NM_152460.1,655-673).
gtagctacttctcttttta

SEQ ID NO: 416965 - DNA, 19 bp, Homo sapiens
  siRNA target sequence for FLJ31882 (NM_152460.1,658-676).
gctacttctctttttacat

SEQ ID NO: 416966 - DNA, 19 bp, Homo sapiens
  siRNA target sequence for FLJ31882 (NM_152460.1,711-729).
ctaaggtacagtgtatgtt

SEQ ID NO: 416967 - DNA, 19 bp, Homo sapiens
  siRNA target sequence for FLJ31882 (NM_152460.1,734-752).
ggtgtgcccaaacttttgt

SEQ ID NO: 416968 - DNA, 19 bp, Homo sapiens
  siRNA target sequence for FLJ31882 (NM_152460.1,832-850).
caggaggaacccaagcatt

SEQ ID NO: 416969 - DNA, 19 bp, Homo sapiens
  siRNA target sequence for MGC45714 (NM_152464.1,216-234).
gggattccaaactatacct

SEQ ID NO: 416970 - DNA, 19 bp, Homo sapiens
  siRNA target sequence for MGC45714 (NM_152464.1,288-306).
cacggaacccagaactagt

SEQ ID NO: 416971 - DNA, 19 bp, Homo sapiens
  siRNA target sequence for MGC45714 (NM_152464.1,313-331).
gctggagaagattaagata

SEQ ID NO: 416972 - DNA, 19 bp, Homo sapiens
  siRNA target sequence for MGC45714 (NM_152464.1,334-352).
gctggccaatgaggaatat

SEQ ID NO: 416973 - DNA, 19 bp, Homo sapiens
  siRNA target sequence for MGC45714 (NM_152464.1,335-353).
ctggccaatgaggaatata

SEQ ID NO: 416974 - DNA, 19 bp, Homo sapiens
  siRNA target sequence for MGC45714 (NM_152464.1,337-355).
ggccaatgaggaatataaa

SEQ ID NO: 416975 - DNA, 19 bp, Homo sapiens
  siRNA target sequence for MGC45714 (NM_152464.1,406-424).
cagcgacctgggaaagcaa

SEQ ID NO: 416976 - DNA, 19 bp, Homo sapiens
  siRNA target sequence for MGC45714 (NM_152464.1,417-435).
gaaagcaagtgagatcatt

SEQ ID NO: 416977 - DNA, 19 bp, Homo sapiens
  siRNA target sequence for MGC45714 (NM_152464.1,487-505).
cttcgtctgcacttacctt

SEQ ID NO: 416978 - DNA, 19 bp, Homo sapiens
  siRNA target sequence for MGC45714 (NM_152464.1,503-521).
cttggaagccaatatatct

SEQ ID NO: 416979 - DNA, 19 bp, Homo sapiens
  siRNA target sequence for MGC45714 (NM_152464.1,540-558).
gggtgctagctgcattgat

SEQ ID NO: 416980 - DNA, 19 bp, Homo sapiens
  siRNA target sequence for MGC45714 (NM_152464.1,576-594).
gtctggccgagctgtatgt

SEQ ID NO: 416981 - DNA, 19 bp, Homo sapiens
  siRNA target sequence for FLJ25168 (NM_152466.1,475-493).
ggttatcagggctcacata

SEQ ID NO: 416982 - DNA, 19 bp, Homo sapiens
  siRNA target sequence for FLJ25168 (NM_152466.1,481-499).
cagggctcacatacttcta

SEQ ID NO: 416983 - DNA, 19 bp, Homo sapiens
  siRNA target sequence for FLJ25168 (NM_152466.1,504-522).
caccctactgccttggaat

SEQ ID NO: 416984 - DNA, 19 bp, Homo sapiens
  siRNA target sequence for FLJ25168 (NM_152466.1,665-683).
gtgactcccaagaaggaat

SEQ ID NO: 416985 - DNA, 19 bp, Homo sapiens
  siRNA target sequence for EVER2 (NM_152468.3,685-703).
ggaattcggtcctacttca

SEQ ID NO: 416986 - DNA, 19 bp, Homo sapiens
  siRNA target sequence for EVER2 (NM_152468.3,864-882).
gaggttccacaatcaactt

SEQ ID NO: 416987 - DNA, 19 bp, Homo sapiens
  siRNA target sequence for EVER2 (NM_152468.3,1423-1441).
ggtcccctgctgttcacat

SEQ ID NO: 416988 - DNA, 19 bp, Homo sapiens
  siRNA target sequence for EVER2 (NM_152468.3,1519-1537).
gccagcttggggatgttct

SEQ ID NO: 416989 - DNA, 19 bp, Homo sapiens
  siRNA target sequence for EVER2 (NM_152468.3,1546-1564).
ctgggtcagaccatactgt

SEQ ID NO: 416990 - DNA, 19 bp, Homo sapiens
  siRNA target sequence for EVER2 (NM_152468.3,1602-1620).
ctacaacgtttgtgactat

SEQ ID NO: 416991 - DNA, 19 bp, Homo sapiens
  siRNA target sequence for FLJ31338 (NM_152469.1,641-659).
gggtcagggtgctttgaaa

SEQ ID NO: 416992 - DNA, 19 bp, Homo sapiens
  siRNA target sequence for FLJ31338 (NM_152469.1,643-661).
gtcagggtgctttgaaaga

SEQ ID NO: 416993 - DNA, 19 bp, Homo sapiens
  siRNA target sequence for FLJ31338 (NM_152469.1,1112-1130).
gcgtgcgcaccgttatttt

SEQ ID NO: 416994 - DNA, 19 bp, Homo sapiens
  siRNA target sequence for FLJ31338 (NM_152469.1,1114-1132).
gtgcgcaccgttattttct

SEQ ID NO: 416995 - DNA, 19 bp, Homo sapiens
  siRNA target sequence for FLJ31338 (NM_152469.1,1116-1134).
gcgcaccgttattttctaa

SEQ ID NO: 416996 - DNA, 19 bp, Homo sapiens
  siRNA target sequence for FLJ31338 (NM_152469.1,1117-1135).
cgcaccgttattttctaat

SEQ ID NO: 416997 - DNA, 19 bp, Homo sapiens
  siRNA target sequence for FLJ31338 (NM_152469.1,1137-1155).
gactgtgcaggcatctgtt

SEQ ID NO: 416998 - DNA, 19 bp, Homo sapiens
  siRNA target sequence for MGC41906 (NM_152474.2,260-278).
ccaaagagcccaaagtgtt

SEQ ID NO: 416999 - DNA, 19 bp, Homo sapiens
  siRNA target sequence for MGC41906 (NM_152474.2,268-286).
cccaaagtgttctttcata

SEQ ID NO: 417000 - DNA, 19 bp, Homo sapiens
  siRNA target sequence for MGC41906 (NM_152474.2,339-357).
ccctacgaaccccatgaaa

SEQ ID NO: 417001 - DNA, 19 bp, Homo sapiens
  siRNA target sequence for MGC41906 (NM_152474.2,344-362).
cgaaccccatgaaattcct

SEQ ID NO: 417002 - DNA, 19 bp, Homo sapiens
  siRNA target sequence for MGC41906 (NM_152474.2,354-372).
gaaattcctgaggaataaa

SEQ ID NO: 417003 - DNA, 19 bp, Homo sapiens
  siRNA target sequence for MGC41906 (NM_152474.2,384-402).
gcatagacctgctcttgtt

SEQ ID NO: 417004 - DNA, 19 bp, Homo sapiens
  siRNA target sequence for MGC41906 (NM_152474.2,385-403).
catagacctgctcttgtta

SEQ ID NO: 417005 - DNA, 19 bp, Homo sapiens
  siRNA target sequence for MGC41906 (NM_152474.2,391-409).
cctgctcttgttaaagtaa

SEQ ID NO: 417006 - DNA, 19 bp, Homo sapiens
  siRNA target sequence for MGC41906 (NM_152474.2,432-450).
cagcattgccctgatatgt

SEQ ID NO: 417007 - DNA, 19 bp, Homo sapiens
  siRNA target sequence for MGC41906 (NM_152474.2,451-469).
gggatggcaatctcctata

SEQ ID NO: 417008 - DNA, 19 bp, Homo sapiens
  siRNA target sequence for MGC41906 (NM_152474.2,456-474).
ggcaatctcctatatgata

SEQ ID NO: 417009 - DNA, 19 bp, Homo sapiens
  siRNA target sequence for MGC41906 (NM_152474.2,462-480).
ctcctatatgatatatcga

SEQ ID NO: 417010 - DNA, 19 bp, Homo sapiens
  siRNA target sequence for MGC41906 (NM_152474.2,502-520).
caacagctcgagtcacttt

SEQ ID NO: 417011 - DNA, 19 bp, Homo sapiens
  siRNA target sequence for MGC41906 (NM_152474.2,508-526).
ctcgagtcactttataaga

SEQ ID NO: 417012 - DNA, 19 bp, Homo sapiens
  siRNA target sequence for MGC41906 (NM_152474.2,528-546).
cctcaggataccgttatta

SEQ ID NO: 417013 - DNA, 19 bp, Homo sapiens
  siRNA target sequence for MGC41906 (NM_152474.2,531-549).
caggataccgttattagga

SEQ ID NO: 417014 - DNA, 19 bp, Homo sapiens
  siRNA target sequence for MGC41906 (NM_152474.2,713-731).
caaagaatgcgtcacataa

SEQ ID NO: 417015 - DNA, 19 bp, Homo sapiens
  siRNA target sequence for MGC41906 (NM_152474.2,717-735).
gaatgcgtcacataatgga

SEQ ID NO: 417016 - DNA, 19 bp, Homo sapiens
  siRNA target sequence for FLJ30373 (NM_152479.1,222-240).
gctgctatcgagagaagaa

SEQ ID NO: 417017 - DNA, 19 bp, Homo sapiens
  siRNA target sequence for FLJ30373 (NM_152479.1,225-243).
gctatcgagagaagaagtt

SEQ ID NO: 417018 - DNA, 19 bp, Homo sapiens
  siRNA target sequence for FLJ30373 (NM_152479.1,396-414).
gcacggaggtggagtgtta

SEQ ID NO: 417019 - DNA, 19 bp, Homo sapiens
  siRNA target sequence for FLJ30373 (NM_152479.1,549-567).
gccttcagagcttgatcaa

SEQ ID NO: 417020 - DNA, 19 bp, Homo sapiens
  siRNA target sequence for MGC39338 (NM_152480.1,153-171).
gcaggggaagtggcattta

SEQ ID NO: 417021 - DNA, 19 bp, Homo sapiens
  siRNA target sequence for MGC39338 (NM_152480.1,251-269).
ggctctgagaactagactt

SEQ ID NO: 417022 - DNA, 19 bp, Homo sapiens
  siRNA target sequence for MGC39338 (NM_152480.1,293-311).
gccaacttggaccaaactt

SEQ ID NO: 417023 - DNA, 19 bp, Homo sapiens
  siRNA target sequence for MGC39338 (NM_152480.1,358-376).
gccacgcctacccaagatt

SEQ ID NO: 417024 - DNA, 19 bp, Homo sapiens
  siRNA target sequence for MGC39338 (NM_152480.1,360-378).
cacgcctacccaagattta

SEQ ID NO: 417025 - DNA, 19 bp, Homo sapiens
  siRNA target sequence for MGC39338 (NM_152480.1,363-381).
gcctacccaagatttacga

SEQ ID NO: 417026 - DNA, 19 bp, Homo sapiens
  siRNA target sequence for MGC39338 (NM_152480.1,386-404).
gtcctttccctcatgcaat

SEQ ID NO: 417027 - DNA, 19 bp, Homo sapiens
  siRNA target sequence for FLJ25660 (NM_152481.1,88-106).
gcactggggttctactttt

SEQ ID NO: 417028 - DNA, 19 bp, Homo sapiens
  siRNA target sequence for FLJ25660 (NM_152481.1,239-257).
gcctcaccaatatttccaa

SEQ ID NO: 417029 - DNA, 19 bp, Homo sapiens
  siRNA target sequence for FLJ25660 (NM_152481.1,272-290).
ccgagggcagccttctcat

SEQ ID NO: 417030 - DNA, 19 bp, Homo sapiens
  siRNA target sequence for FLJ25660 (NM_152481.1,276-294).
gggcagccttctcattaaa

SEQ ID NO: 417031 - DNA, 19 bp, Homo sapiens
  siRNA target sequence for FLJ25660 (NM_152481.1,279-297).
cagccttctcattaaagat

SEQ ID NO: 417032 - DNA, 19 bp, Homo sapiens
  siRNA target sequence for FLJ25660 (NM_152481.1,347-365).
gccaagtggtgcagtatga

SEQ ID NO: 417033 - DNA, 19 bp, Homo sapiens
  siRNA target sequence for FLJ25660 (NM_152481.1,348-366).
ccaagtggtgcagtatgaa

SEQ ID NO: 417034 - DNA, 19 bp, Homo sapiens
  siRNA target sequence for FLJ25660 (NM_152481.1,382-400).
gtcaccaccctgcatataa

SEQ ID NO: 417035 - DNA, 19 bp, Homo sapiens
  siRNA target sequence for FLJ25660 (NM_152481.1,384-402).
caccaccctgcatataaca

SEQ ID NO: 417036 - DNA, 19 bp, Homo sapiens
  siRNA target sequence for FLJ25660 (NM_152481.1,386-404).
ccaccctgcatataacaca

SEQ ID NO: 417037 - DNA, 19 bp, Homo sapiens
  siRNA target sequence for FLJ25660 (NM_152481.1,531-549).
cctggggtaccgctacatt

SEQ ID NO: 417038 - DNA, 19 bp, Homo sapiens
  siRNA target sequence for FLJ25660 (NM_152481.1,649-667).
cacgtccagtgcaccaata

SEQ ID NO: 417039 - DNA, 19 bp, Homo sapiens
  siRNA target sequence for FLJ25660 (NM_152481.1,652-670).
gtccagtgcaccaataaca

SEQ ID NO: 417040 - DNA, 19 bp, Homo sapiens
  siRNA target sequence for FLJ25660 (NM_152481.1,654-672).
ccagtgcaccaataacaca

SEQ ID NO: 417041 - DNA, 19 bp, Homo sapiens
  siRNA target sequence for FLJ25660 (NM_152481.1,681-699).
ggtggattacgtcattttt

SEQ ID NO: 417042 - DNA, 19 bp, Homo sapiens
  siRNA target sequence for FLJ25660 (NM_152481.1,685-703).
gattacgtcatttttgaca

SEQ ID NO: 417043 - DNA, 19 bp, Homo sapiens
  siRNA target sequence for FLJ25660 (NM_152481.1,712-730).
ctcgatgagaagacagaat

SEQ ID NO: 417044 - DNA, 19 bp, Homo sapiens
  siRNA target sequence for FLJ25660 (NM_152481.1,739-757).
ctcgactgtcccttaggat

SEQ ID NO: 417045 - DNA, 19 bp, Homo sapiens
  siRNA target sequence for FLJ25660 (NM_152481.1,748-766).
cccttaggatccatgtaca

SEQ ID NO: 417046 - DNA, 19 bp, Homo sapiens
  siRNA target sequence for FLJ25328 (NM_152483.1,301-319).
catggctctttgatagcaa

SEQ ID NO: 417047 - DNA, 19 bp, Homo sapiens
  siRNA target sequence for FLJ25328 (NM_152483.1,304-322).
ggctctttgatagcaattt

SEQ ID NO: 417048 - DNA, 19 bp, Homo sapiens
  siRNA target sequence for FLJ25328 (NM_152483.1,325-343).
gttctgccgtagaaattat

SEQ ID NO: 417049 - DNA, 19 bp, Homo sapiens
  siRNA target sequence for FLJ25328 (NM_152483.1,328-346).
ctgccgtagaaattatcct

SEQ ID NO: 417050 - DNA, 19 bp, Homo sapiens
  siRNA target sequence for FLJ25328 (NM_152483.1,402-420).
ccgaattctgggtcacttt

SEQ ID NO: 417051 - DNA, 19 bp, Homo sapiens
  siRNA target sequence for FLJ25328 (NM_152483.1,403-421).
cgaattctgggtcactttt

SEQ ID NO: 417052 - DNA, 19 bp, Homo sapiens
  siRNA target sequence for FLJ25328 (NM_152483.1,507-525).
ccagagcgcccaaagaact

SEQ ID NO: 417053 - DNA, 19 bp, Homo sapiens
  siRNA target sequence for FLJ25328 (NM_152483.1,782-800).
gagacgactgggaacttca

SEQ ID NO: 417054 - DNA, 19 bp, Homo sapiens
  siRNA target sequence for MGC45873 (NM_152486.1,1253-1271).
ggcgcctgggccgagtttt

SEQ ID NO: 417055 - DNA, 19 bp, Homo sapiens
  siRNA target sequence for MGC45873 (NM_152486.1,1402-1420).
gcccttgccggtcaaactt

SEQ ID NO: 417056 - DNA, 19 bp, Homo sapiens
  siRNA target sequence for MGC45873 (NM_152486.1,1404-1422).
ccttgccggtcaaacttca

SEQ ID NO: 417057 - DNA, 19 bp, Homo sapiens
  siRNA target sequence for FLJ31842 (NM_152487.1,315-333).
caatagtctcagcttcaaa

SEQ ID NO: 417058 - DNA, 19 bp, Homo sapiens
  siRNA target sequence for FLJ31842 (NM_152487.1,324-342).
cagcttcaaaaagaagatt

SEQ ID NO: 417059 - DNA, 19 bp, Homo sapiens
  siRNA target sequence for FLJ31842 (NM_152487.1,389-407).
gtatttttggcctgtacat

SEQ ID NO: 417060 - DNA, 19 bp, Homo sapiens
  siRNA target sequence for FLJ31842 (NM_152487.1,397-415).
ggcctgtacattttcttat

SEQ ID NO: 417061 - DNA, 19 bp, Homo sapiens
  siRNA target sequence for FLJ31842 (NM_152487.1,417-435).
cgatgaggctactaaagct

SEQ ID NO: 417062 - DNA, 19 bp, Homo sapiens
  siRNA target sequence for FLJ31842 (NM_152487.1,449-467).
gtggtccatcacttgcaaa

SEQ ID NO: 417063 - DNA, 19 bp, Homo sapiens
  siRNA target sequence for FLJ31842 (NM_152487.1,458-476).
cacttgcaaacgtgaatat

SEQ ID NO: 417064 - DNA, 19 bp, Homo sapiens
  siRNA target sequence for FLJ31842 (NM_152487.1,463-481).
gcaaacgtgaatattgcta

SEQ ID NO: 417065 - DNA, 19 bp, Homo sapiens
  siRNA target sequence for FLJ31842 (NM_152487.1,464-482).
caaacgtgaatattgctat

SEQ ID NO: 417066 - DNA, 19 bp, Homo sapiens
  siRNA target sequence for FLJ31842 (NM_152487.1,486-504).
ctcaggctacctcatttct

SEQ ID NO: 417067 - DNA, 19 bp, Homo sapiens
  siRNA target sequence for FLJ31842 (NM_152487.1,490-508).
ggctacctcatttctgatt

SEQ ID NO: 417068 - DNA, 19 bp, Homo sapiens
  siRNA target sequence for FLJ31842 (NM_152487.1,491-509).
gctacctcatttctgattt

SEQ ID NO: 417069 - DNA, 19 bp, Homo sapiens
  siRNA target sequence for FLJ31842 (NM_152487.1,569-587).
gtgcgtccctgtatgcata

SEQ ID NO: 417070 - DNA, 19 bp, Homo sapiens
  siRNA target sequence for FLJ31842 (NM_152487.1,572-590).
cgtccctgtatgcatacta

SEQ ID NO: 417071 - DNA, 19 bp, Homo sapiens
  siRNA target sequence for FLJ31842 (NM_152487.1,666-684).
gaatcagcggtggttcttt

SEQ ID NO: 417072 - DNA, 19 bp, Homo sapiens
  siRNA target sequence for FLJ31842 (NM_152487.1,691-709).
ctgaagtatcccaagtttt

SEQ ID NO: 417073 - DNA, 19 bp, Homo sapiens
  siRNA target sequence for FLJ31842 (NM_152487.1,710-728).
ctaaagctatcgttatcaa

SEQ ID NO: 417074 - DNA, 19 bp, Homo sapiens
  siRNA target sequence for FLJ31842 (NM_152487.1,715-733).
gctatcgttatcaatggaa

SEQ ID NO: 417075 - DNA, 19 bp, Homo sapiens
  siRNA target sequence for FLJ31842 (NM_152487.1,716-734).
ctatcgttatcaatggaat

SEQ ID NO: 417076 - DNA, 19 bp, Homo sapiens
  siRNA target sequence for FLJ31842 (NM_152487.1,736-754).
ctcatgacagtagtattct

SEQ ID NO: 417077 - DNA, 19 bp, Homo sapiens
  siRNA target sequence for FLJ31842 (NM_152487.1,762-780).
gcggattgcctcaatgctt

SEQ ID NO: 417078 - DNA, 19 bp, Homo sapiens
  siRNA target sequence for FLJ31842 (NM_152487.1,782-800).
ctcattatggcttcatgta

SEQ ID NO: 417079 - DNA, 19 bp, Homo sapiens
  siRNA target sequence for FLJ31842 (NM_152487.1,811-829).
ggaacagaaccctacataa

SEQ ID NO: 417080 - DNA, 19 bp, Homo sapiens
  siRNA target sequence for FLJ31842 (NM_152487.1,830-848).
ggcttggagttttaatcca

SEQ ID NO: 417081 - DNA, 19 bp, Homo sapiens
  siRNA target sequence for FLJ31842 (NM_152487.1,838-856).
gttttaatccagttatcct

SEQ ID NO: 417082 - DNA, 19 bp, Homo sapiens
  siRNA target sequence for FLJ31842 (NM_152487.1,849-867).
gttatcctgggtcattagt

SEQ ID NO: 417083 - DNA, 19 bp, Homo sapiens
  siRNA target sequence for FLJ31842 (NM_152487.1,858-876).
ggtcattagttgtgttgtt

SEQ ID NO: 417084 - DNA, 19 bp, Homo sapiens
  siRNA target sequence for FLJ32825 (NM_152492.1,431-449).
ccggcttcatgtccaaaat

SEQ ID NO: 417085 - DNA, 19 bp, Homo sapiens
  siRNA target sequence for FLJ32825 (NM_152492.1,532-550).
cccactgaggccgatttgt

SEQ ID NO: 417086 - DNA, 19 bp, Homo sapiens
  siRNA target sequence for FLJ32825 (NM_152492.1,543-561).
cgatttgtccggagagatt

SEQ ID NO: 417087 - DNA, 19 bp, Homo sapiens
  siRNA target sequence for FLJ32825 (NM_152492.1,662-680).
gcatctgcgagttcgatta

SEQ ID NO: 417088 - DNA, 19 bp, Homo sapiens
  siRNA target sequence for FLJ32825 (NM_152492.1,1395-1413).
ccttgcaacaggagtgatt

SEQ ID NO: 417089 - DNA, 19 bp, Homo sapiens
  siRNA target sequence for FLJ32825 (NM_152492.1,1406-1424).
gagtgattgcgtctttaca

SEQ ID NO: 417090 - DNA, 19 bp, Homo sapiens
  siRNA target sequence for FLJ32825 (NM_152492.1,1450-1468).
cagctgcgaaagatcaata

SEQ ID NO: 417091 - DNA, 19 bp, Homo sapiens
  siRNA target sequence for FLJ32825 (NM_152492.1,1522-1540).
gccatgaccgacaagttct

SEQ ID NO: 417092 - DNA, 19 bp, Homo sapiens
  siRNA target sequence for FLJ32825 (NM_152492.1,1572-1590).
gatgatggggctcattgaa

SEQ ID NO: 417093 - DNA, 19 bp, Homo sapiens
  siRNA target sequence for FLJ32825 (NM_152492.1,1828-1846).
ctcgagaggttaaggaata

SEQ ID NO: 417094 - DNA, 19 bp, Homo sapiens
  siRNA target sequence for FLJ32825 (NM_152492.1,1893-1911).
caacgagatctctgacaat

SEQ ID NO: 417095 - DNA, 19 bp, Homo sapiens
  siRNA target sequence for FLJ32825 (NM_152492.1,1924-1942).
gccctgcagagaattatct

SEQ ID NO: 417096 - DNA, 19 bp, Homo sapiens
  siRNA target sequence for FLJ32825 (NM_152492.1,1926-1944).
cctgcagagaattatctca

SEQ ID NO: 417097 - DNA, 19 bp, Homo sapiens
  siRNA target sequence for FLJ32825 (NM_152492.1,1943-1961).
cagagagaagcgactacta

SEQ ID NO: 417098 - DNA, 19 bp, Homo sapiens
  siRNA target sequence for FLJ32825 (NM_152492.1,1949-1967).
gaagcgactactataatca

SEQ ID NO: 417099 - DNA, 19 bp, Homo sapiens
  siRNA target sequence for FLJ25476 (NM_152493.2,209-227).
gatggccgagcctcgattt

SEQ ID NO: 417100 - DNA, 19 bp, Homo sapiens
  siRNA target sequence for FLJ25476 (NM_152493.2,276-294).
gacaacctggttctgatta

SEQ ID NO: 417101 - DNA, 19 bp, Homo sapiens
  siRNA target sequence for FLJ25476 (NM_152493.2,282-300).
ctggttctgattaacaaga

SEQ ID NO: 417102 - DNA, 19 bp, Homo sapiens
  siRNA target sequence for FLJ25476 (NM_152493.2,285-303).
gttctgattaacaagatca

SEQ ID NO: 417103 - DNA, 19 bp, Homo sapiens
  siRNA target sequence for FLJ25476 (NM_152493.2,687-705).
ctggactccatcaagacaa

SEQ ID NO: 417104 - DNA, 19 bp, Homo sapiens
  siRNA target sequence for FLJ25476 (NM_152493.2,845-863).
gacgtacaggtgtaaggta

SEQ ID NO: 417105 - DNA, 19 bp, Homo sapiens
  siRNA target sequence for FLJ25476 (NM_152493.2,861-879).
gtatgcccactgacctttt

SEQ ID NO: 417106 - DNA, 19 bp, Homo sapiens
  siRNA target sequence for FLJ25476 (NM_152493.2,1406-1424).
catcccggtgcgaatctct

SEQ ID NO: 417107 - DNA, 19 bp, Homo sapiens
  siRNA target sequence for FLJ32785 (NM_152494.1,121-139).
ggcacaagagggcaaagaa

SEQ ID NO: 417108 - DNA, 19 bp, Homo sapiens
  siRNA target sequence for FLJ32785 (NM_152494.1,318-336).
ctacgaagaacagaagatt

SEQ ID NO: 417109 - DNA, 19 bp, Homo sapiens
  siRNA target sequence for FLJ32785 (NM_152494.1,401-419).
gtgccagcctcctactagt

SEQ ID NO: 417110 - DNA, 19 bp, Homo sapiens
  siRNA target sequence for FLJ32785 (NM_152494.1,497-515).
ccaatctgcgacacaatct

SEQ ID NO: 417111 - DNA, 19 bp, Homo sapiens
  siRNA target sequence for FLJ32785 (NM_152494.1,598-616).
cccttacgggccatgttca

SEQ ID NO: 417112 - DNA, 19 bp, Homo sapiens
  siRNA target sequence for FLJ32785 (NM_152494.1,599-617).
ccttacgggccatgttcaa

SEQ ID NO: 417113 - DNA, 19 bp, Homo sapiens
  siRNA target sequence for FLJ32785 (NM_152494.1,621-639).
cctgctgagtagcaaagaa

SEQ ID NO: 417114 - DNA, 19 bp, Homo sapiens
  siRNA target sequence for FLJ32785 (NM_152494.1,622-640).
ctgctgagtagcaaagaat

SEQ ID NO: 417115 - DNA, 19 bp, Homo sapiens
  siRNA target sequence for FLJ32785 (NM_152494.1,660-678).
gaacatctccgccactttt

SEQ ID NO: 417116 - DNA, 19 bp, Homo sapiens
  siRNA target sequence for FLJ32785 (NM_152494.1,867-885).
cagctgccgtcgttggttt

SEQ ID NO: 417117 - DNA, 19 bp, Homo sapiens
  siRNA target sequence for FLJ32785 (NM_152494.1,1053-1071).
cctcaaccagtctattcgt

SEQ ID NO: 417118 - DNA, 19 bp, Homo sapiens
  siRNA target sequence for FLJ32785 (NM_152494.1,1082-1100).
gggaattttcagccaatat

SEQ ID NO: 417119 - DNA, 19 bp, Homo sapiens
  siRNA target sequence for FLJ32785 (NM_152494.1,1129-1147).
gtgctggggctcaacacaa

SEQ ID NO: 417120 - DNA, 19 bp, Homo sapiens
  siRNA target sequence for FLJ32785 (NM_152494.1,1258-1276).
gtcctgcatgcgtctttct

SEQ ID NO: 417121 - DNA, 19 bp, Homo sapiens
  siRNA target sequence for FLJ32785 (NM_152494.1,1287-1305).
cagctataaccatgacatt

SEQ ID NO: 417122 - DNA, 19 bp, Homo sapiens
  siRNA target sequence for FLJ32785 (NM_152494.1,1583-1601).
ccttccgcagcagtcataa

SEQ ID NO: 417123 - DNA, 19 bp, Homo sapiens
  siRNA target sequence for FLJ32785 (NM_152494.1,1584-1602).
cttccgcagcagtcataaa

SEQ ID NO: 417124 - DNA, 19 bp, Homo sapiens
  siRNA target sequence for FLJ32785 (NM_152494.1,1639-1657).
cggcttcttcgaaaaacca

SEQ ID NO: 417125 - DNA, 19 bp, Homo sapiens
  siRNA target sequence for FLJ32785 (NM_152494.1,1641-1659).
gcttcttcgaaaaaccatt

SEQ ID NO: 417126 - DNA, 19 bp, Homo sapiens
  siRNA target sequence for FLJ32785 (NM_152494.1,1765-1783).
ccgattggcctgttagtgt

SEQ ID NO: 417127 - DNA, 19 bp, Homo sapiens
  siRNA target sequence for FLJ32785 (NM_152494.1,1881-1899).
caatgacctattgaagaaa

SEQ ID NO: 417128 - DNA, 19 bp, Homo sapiens
  siRNA target sequence for FLJ31434 (NM_152496.1,374-392).
gtgcattttaccgctataa

SEQ ID NO: 417129 - DNA, 19 bp, Homo sapiens
  siRNA target sequence for FLJ31434 (NM_152496.1,376-394).
gcattttaccgctataaga

SEQ ID NO: 417130 - DNA, 19 bp, Homo sapiens
  siRNA target sequence for FLJ31434 (NM_152496.1,377-395).
cattttaccgctataagaa

SEQ ID NO: 417131 - DNA, 19 bp, Homo sapiens
  siRNA target sequence for FLJ31434 (NM_152496.1,412-430).
ctcccactcttttatatct

SEQ ID NO: 417132 - DNA, 19 bp, Homo sapiens
  siRNA target sequence for FLJ31434 (NM_152496.1,548-566).
gccacacccacgatatcct

SEQ ID NO: 417133 - DNA, 19 bp, Homo sapiens
  siRNA target sequence for FLJ31434 (NM_152496.1,574-592).
ggatttgacggcatgtaca

SEQ ID NO: 417134 - DNA, 19 bp, Homo sapiens
  siRNA target sequence for FLJ31434 (NM_152496.1,582-600).
cggcatgtacacctacttt

SEQ ID NO: 417135 - DNA, 19 bp, Homo sapiens
  siRNA target sequence for FLJ31434 (NM_152496.1,806-824).
ggcccgagatcgtttccat

SEQ ID NO: 417136 - DNA, 19 bp, Homo sapiens
  siRNA target sequence for FLJ31434 (NM_152496.1,807-825).
gcccgagatcgtttccatt

SEQ ID NO: 417137 - DNA, 19 bp, Homo sapiens
  siRNA target sequence for FLJ31434 (NM_152496.1,808-826).
cccgagatcgtttccatta

SEQ ID NO: 417138 - DNA, 19 bp, Homo sapiens
  siRNA target sequence for FLJ31434 (NM_152496.1,811-829).
gagatcgtttccattacct

SEQ ID NO: 417139 - DNA, 19 bp, Homo sapiens
  siRNA target sequence for FLJ31434 (NM_152496.1,821-839).
ccattacctccttcaatga

SEQ ID NO: 417140 - DNA, 19 bp, Homo sapiens
  siRNA target sequence for FLJ31434 (NM_152496.1,887-905).
ccacccgcctgtatttgga

SEQ ID NO: 417141 - DNA, 19 bp, Homo sapiens
  siRNA target sequence for FLJ31434 (NM_152496.1,956-974).
cggagcacttcatcaaaga

SEQ ID NO: 417142 - DNA, 19 bp, Homo sapiens
  siRNA target sequence for FLJ32206 (NM_152497.1,773-791).
cgcccaacaaagacagaat

SEQ ID NO: 417143 - DNA, 19 bp, Homo sapiens
  siRNA target sequence for FLJ32206 (NM_152497.1,795-813).
catttgggtacctttggta

SEQ ID NO: 417144 - DNA, 19 bp, Homo sapiens
  siRNA target sequence for FLJ32206 (NM_152497.1,821-839).
gcagcaatgccaactacaa

SEQ ID NO: 417145 - DNA, 19 bp, Homo sapiens
  siRNA target sequence for FLJ32206 (NM_152497.1,857-875).
gaccttctccgcatagatt

SEQ ID NO: 417146 - DNA, 19 bp, Homo sapiens
  siRNA target sequence for FLJ32206 (NM_152497.1,859-877).
ccttctccgcatagattct

SEQ ID NO: 417147 - DNA, 19 bp, Homo sapiens
  siRNA target sequence for FLJ32206 (NM_152497.1,944-962).
gaatacaaccacttacaga

SEQ ID NO: 417148 - DNA, 19 bp, Homo sapiens
  siRNA target sequence for FLJ32206 (NM_152497.1,1085-1103).
gggctctggcaagaaaaat

SEQ ID NO: 417149 - DNA, 19 bp, Homo sapiens
  siRNA target sequence for FLJ32206 (NM_152497.1,1127-1145).
gctcccttggtgattgtat

SEQ ID NO: 417150 - DNA, 19 bp, Homo sapiens
  siRNA target sequence for FLJ32206 (NM_152497.1,1128-1146).
ctcccttggtgattgtatt

SEQ ID NO: 417151 - DNA, 19 bp, Homo sapiens
  siRNA target sequence for FLJ32206 (NM_152497.1,1202-1220).
cttggcaaggccctttatt

SEQ ID NO: 417152 - DNA, 19 bp, Homo sapiens
  siRNA target sequence for FLJ32000 (NM_152498.1,139-157).
gctcagacgctgcatgttt

SEQ ID NO: 417153 - DNA, 19 bp, Homo sapiens
  siRNA target sequence for FLJ32000 (NM_152498.1,140-158).
ctcagacgctgcatgtttt

SEQ ID NO: 417154 - DNA, 19 bp, Homo sapiens
  siRNA target sequence for FLJ32000 (NM_152498.1,144-162).
gacgctgcatgtttttggt

SEQ ID NO: 417155 - DNA, 19 bp, Homo sapiens
  siRNA target sequence for FLJ32000 (NM_152498.1,170-188).
cccacgtggccaacaatat

SEQ ID NO: 417156 - DNA, 19 bp, Homo sapiens
  siRNA target sequence for FLJ32000 (NM_152498.1,172-190).
cacgtggccaacaatatct

SEQ ID NO: 417157 - DNA, 19 bp, Homo sapiens
  siRNA target sequence for FLJ32000 (NM_152498.1,175-193).
gtggccaacaatatcttct

SEQ ID NO: 417158 - DNA, 19 bp, Homo sapiens
  siRNA target sequence for FLJ32000 (NM_152498.1,195-213).
cttcgatgaacagatcatt

SEQ ID NO: 417159 - DNA, 19 bp, Homo sapiens
  siRNA target sequence for FLJ32000 (NM_152498.1,198-216).
cgatgaacagatcattata

SEQ ID NO: 417160 - DNA, 19 bp, Homo sapiens
  siRNA target sequence for FLJ32000 (NM_152498.1,199-217).
gatgaacagatcattatat

SEQ ID NO: 417161 - DNA, 19 bp, Homo sapiens
  siRNA target sequence for FLJ32000 (NM_152498.1,330-348).
gcggtacctcgctatctct

SEQ ID NO: 417162 - DNA, 19 bp, Homo sapiens
  siRNA target sequence for FLJ32000 (NM_152498.1,404-422).
gccggaagcgcaaagttct

SEQ ID NO: 417163 - DNA, 19 bp, Homo sapiens
  siRNA target sequence for FLJ32000 (NM_152498.1,405-423).
ccggaagcgcaaagttctt

SEQ ID NO: 417164 - DNA, 19 bp, Homo sapiens
  siRNA target sequence for FLJ32000 (NM_152498.1,406-424).
cggaagcgcaaagttctta

SEQ ID NO: 417165 - DNA, 19 bp, Homo sapiens
  siRNA target sequence for FLJ32000 (NM_152498.1,407-425).
ggaagcgcaaagttcttaa

SEQ ID NO: 417166 - DNA, 19 bp, Homo sapiens
  siRNA target sequence for FLJ32000 (NM_152498.1,411-429).
gcgcaaagttcttaataat

SEQ ID NO: 417167 - DNA, 19 bp, Homo sapiens
  siRNA target sequence for FLJ32000 (NM_152498.1,412-430).
cgcaaagttcttaataatt

SEQ ID NO: 417168 - DNA, 19 bp, Homo sapiens
  siRNA target sequence for FLJ32000 (NM_152498.1,500-518).
cgtcacctccagagtcaaa

SEQ ID NO: 417169 - DNA, 19 bp, Homo sapiens
  siRNA target sequence for FLJ32000 (NM_152498.1,503-521).
cacctccagagtcaaatct

SEQ ID NO: 417170 - DNA, 19 bp, Homo sapiens
  siRNA target sequence for FLJ32000 (NM_152498.1,506-524).
ctccagagtcaaatcttgt

SEQ ID NO: 417171 - DNA, 19 bp, Homo sapiens
  siRNA target sequence for FLJ32000 (NM_152498.1,550-568).
gtaatggccattgttagaa

SEQ ID NO: 417172 - DNA, 19 bp, Homo sapiens
  siRNA target sequence for FLJ32000 (NM_152498.1,627-645).
ggtgtgtgtcactggaaat

SEQ ID NO: 417173 - DNA, 19 bp, Homo sapiens
  siRNA target sequence for FLJ32000 (NM_152498.1,636-654).
cactggaaatgggatgttt

SEQ ID NO: 417174 - DNA, 19 bp, Homo sapiens
  siRNA target sequence for FLJ32000 (NM_152498.1,638-656).
ctggaaatgggatgtttaa

SEQ ID NO: 417175 - DNA, 19 bp, Homo sapiens
  siRNA target sequence for FLJ32000 (NM_152498.1,767-785).
ctgacacaggcaaactctt

SEQ ID NO: 417176 - DNA, 19 bp, Homo sapiens
  siRNA target sequence for FLJ32000 (NM_152498.1,808-826).
cgttgggagaccagcataa

SEQ ID NO: 417177 - DNA, 19 bp, Homo sapiens
  siRNA target sequence for FLJ32000 (NM_152498.1,882-900).
gagcctgattgaatttcca

SEQ ID NO: 417178 - DNA, 19 bp, Homo sapiens
  siRNA target sequence for FLJ32000 (NM_152498.1,914-932).
cactcccttcctatgaaca

SEQ ID NO: 417179 - DNA, 19 bp, Homo sapiens
  siRNA target sequence for FLJ32000 (NM_152498.1,1028-1046).
ggagagttctgctgtttga

SEQ ID NO: 417180 - DNA, 19 bp, Homo sapiens
  siRNA target sequence for FLJ32000 (NM_152498.1,1072-1090).
cgtgagagcagagaaatca

SEQ ID NO: 417181 - DNA, 19 bp, Homo sapiens
  siRNA target sequence for FLJ32000 (NM_152498.1,1247-1265).
gggagcctgctcactttga

SEQ ID NO: 417182 - DNA, 19 bp, Homo sapiens
  siRNA target sequence for FLJ32000 (NM_152498.1,1249-1267).
gagcctgctcactttgagt

SEQ ID NO: 417183 - DNA, 19 bp, Homo sapiens
  siRNA target sequence for FLJ32000 (NM_152498.1,1251-1269).
gcctgctcactttgagtat

SEQ ID NO: 417184 - DNA, 19 bp, Homo sapiens
  siRNA target sequence for FLJ32000 (NM_152498.1,1317-1335).
catccgcaaaccccttata

SEQ ID NO: 417185 - DNA, 19 bp, Homo sapiens
  siRNA target sequence for FLJ32000 (NM_152498.1,1355-1373).
gatccatccgcctttggaa

SEQ ID NO: 417186 - DNA, 19 bp, Homo sapiens
  siRNA target sequence for FLJ32000 (NM_152498.1,1358-1376).
ccatccgcctttggaatta

SEQ ID NO: 417187 - DNA, 19 bp, Homo sapiens
  siRNA target sequence for FLJ32000 (NM_152498.1,1359-1377).
catccgcctttggaattat

SEQ ID NO: 417188 - DNA, 19 bp, Homo sapiens
  siRNA target sequence for FLJ32000 (NM_152498.1,1362-1380).
ccgcctttggaattatgaa

SEQ ID NO: 417189 - DNA, 19 bp, Homo sapiens
  siRNA target sequence for FLJ32000 (NM_152498.1,1442-1460).
catctggacacttcattgt

SEQ ID NO: 417190 - DNA, 19 bp, Homo sapiens
  siRNA target sequence for FLJ32000 (NM_152498.1,1476-1494).
caaactacgcctcatgaat

SEQ ID NO: 417191 - DNA, 19 bp, Homo sapiens
  siRNA target sequence for FLJ32000 (NM_152498.1,1491-1509).
gaatctactcattgatgat

SEQ ID NO: 417192 - DNA, 19 bp, Homo sapiens
  siRNA target sequence for FLJ32000 (NM_152498.1,1498-1516).
ctcattgatgatatacgtt

SEQ ID NO: 417193 - DNA, 19 bp, Homo sapiens
  siRNA target sequence for FLJ32000 (NM_152498.1,1504-1522).
gatgatatacgttctttca

SEQ ID NO: 417194 - DNA, 19 bp, Homo sapiens
  siRNA target sequence for FLJ32000 (NM_152498.1,1595-1613).
gaaatgtgattcacgttta

SEQ ID NO: 417195 - DNA, 19 bp, Homo sapiens
  siRNA target sequence for FLJ32000 (NM_152498.1,1616-1634).
ccaccacgagcctagagaa

SEQ ID NO: 417196 - DNA, 19 bp, Homo sapiens
  siRNA target sequence for FLJ32000 (NM_152498.1,1619-1637).
ccacgagcctagagaacat

SEQ ID NO: 417197 - DNA, 19 bp, Homo sapiens
  siRNA target sequence for FLJ32000 (NM_152498.1,1661-1679).
ggaagattcgctcaattgt

SEQ ID NO: 417198 - DNA, 19 bp, Homo sapiens
  siRNA target sequence for FLJ32000 (NM_152498.1,1687-1705).
gcagatgatagcaaactga

SEQ ID NO: 417199 - DNA, 19 bp, Homo sapiens
  siRNA target sequence for FLJ32000 (NM_152498.1,1688-1706).
cagatgatagcaaactgat

SEQ ID NO: 417200 - DNA, 19 bp, Homo sapiens
  siRNA target sequence for FLJ32000 (NM_152498.1,1716-1734).
cacagatggtgctgtgtat

SEQ ID NO: 417201 - DNA, 19 bp, Homo sapiens
  siRNA target sequence for FLJ32000 (NM_152498.1,1729-1747).
gtgtatgaatggaatctgt

SEQ ID NO: 417202 - DNA, 19 bp, Homo sapiens
  siRNA target sequence for FLJ32000 (NM_152498.1,1768-1786).
gaatgcgtgctcaagtctt

SEQ ID NO: 417203 - DNA, 19 bp, Homo sapiens
  siRNA target sequence for FLJ32000 (NM_152498.1,1809-1827).
ctcccccgatgccaaaatt

SEQ ID NO: 417204 - DNA, 19 bp, Homo sapiens
  siRNA target sequence for FLJ32000 (NM_152498.1,1811-1829).
cccccgatgccaaaattat

SEQ ID NO: 417205 - DNA, 19 bp, Homo sapiens
  siRNA target sequence for FLJ32000 (NM_152498.1,1813-1831).
cccgatgccaaaattatct

SEQ ID NO: 417206 - DNA, 19 bp, Homo sapiens
  siRNA target sequence for FLJ32000 (NM_152498.1,1814-1832).
ccgatgccaaaattatctt

SEQ ID NO: 417207 - DNA, 19 bp, Homo sapiens
  siRNA target sequence for FLJ32000 (NM_152498.1,1815-1833).
cgatgccaaaattatcttt

SEQ ID NO: 417208 - DNA, 19 bp, Homo sapiens
  siRNA target sequence for FLJ32000 (NM_152498.1,1875-1893).
cttgatccttcgagagata

SEQ ID NO: 417209 - DNA, 19 bp, Homo sapiens
  siRNA target sequence for FLJ32000 (NM_152498.1,1959-1977).
cacctcggtgggaaccatt

SEQ ID NO: 417210 - DNA, 19 bp, Homo sapiens
  siRNA target sequence for FLJ32000 (NM_152498.1,1973-1991).
ccattcgtgccatgaagta

SEQ ID NO: 417211 - DNA, 19 bp, Homo sapiens
  siRNA target sequence for FLJ32000 (NM_152498.1,2187-2205).
ccatctattgactatgaat

SEQ ID NO: 417212 - DNA, 19 bp, Homo sapiens
  siRNA target sequence for MGC45441 (NM_152499.1,363-381).
ctctgacccctcttctctt

SEQ ID NO: 417213 - DNA, 19 bp, Homo sapiens
  siRNA target sequence for MGC45441 (NM_152499.1,389-407).
caccgcctctcctaaagga

SEQ ID NO: 417214 - DNA, 19 bp, Homo sapiens
  siRNA target sequence for MGC45441 (NM_152499.1,484-502).
caagcttgggtccagtata

SEQ ID NO: 417215 - DNA, 19 bp, Homo sapiens
  siRNA target sequence for FLJ33084 (NM_152500.1,189-207).
gggacctgtgacatggttt

SEQ ID NO: 417216 - DNA, 19 bp, Homo sapiens
  siRNA target sequence for FLJ33084 (NM_152500.1,553-571).
gccgacgcctccaagttgt

SEQ ID NO: 417217 - DNA, 19 bp, Homo sapiens
  siRNA target sequence for FLJ33084 (NM_152500.1,614-632).
gcaggagattcgagaacta

SEQ ID NO: 417218 - DNA, 19 bp, Homo sapiens
  siRNA target sequence for FLJ33084 (NM_152500.1,617-635).
ggagattcgagaactacaa

SEQ ID NO: 417219 - DNA, 19 bp, Homo sapiens
  siRNA target sequence for FLJ33084 (NM_152500.1,727-745).
ggcgagaggcagaacttta

SEQ ID NO: 417220 - DNA, 19 bp, Homo sapiens
  siRNA target sequence for FLJ33084 (NM_152500.1,728-746).
gcgagaggcagaactttat

SEQ ID NO: 417221 - DNA, 19 bp, Homo sapiens
  siRNA target sequence for FLJ33084 (NM_152500.1,837-855).
ggcgtgctgggccagatat

SEQ ID NO: 417222 - DNA, 19 bp, Homo sapiens
  siRNA target sequence for FLJ33084 (NM_152500.1,966-984).
cgcttggaggcagaaatct

SEQ ID NO: 417223 - DNA, 19 bp, Homo sapiens
  siRNA target sequence for FLJ33084 (NM_152500.1,967-985).
gcttggaggcagaaatctt

SEQ ID NO: 417224 - DNA, 19 bp, Homo sapiens
  siRNA target sequence for FLJ33084 (NM_152500.1,1214-1232).
gggccctgcaccctatgat

SEQ ID NO: 417225 - DNA, 19 bp, Homo sapiens
  siRNA target sequence for FLJ33084 (NM_152500.1,1275-1293).
cttgaggcttcctggattt

SEQ ID NO: 417226 - DNA, 19 bp, Homo sapiens
  siRNA target sequence for FLJ33084 (NM_152500.1,1531-1549).
gggtctcacttggactatt

SEQ ID NO: 417227 - DNA, 19 bp, Homo sapiens
  siRNA target sequence for FLJ33084 (NM_152500.1,1532-1550).
ggtctcacttggactattt

SEQ ID NO: 417228 - DNA, 19 bp, Homo sapiens
  siRNA target sequence for FLJ33084 (NM_152500.1,1543-1561).
gactatttgaccaagatca

SEQ ID NO: 417229 - DNA, 19 bp, Homo sapiens
  siRNA target sequence for FLJ33084 (NM_152500.1,1823-1841).
gctaacggccagcctttat

SEQ ID NO: 417230 - DNA, 19 bp, Homo sapiens
  siRNA target sequence for FLJ33084 (NM_152500.1,1824-1842).
ctaacggccagcctttatt

SEQ ID NO: 417231 - DNA, 19 bp, Homo sapiens
  siRNA target sequence for IFIX (NM_152501.2,603-621).
caaccgtctcacagctaaa

SEQ ID NO: 417232 - DNA, 19 bp, Homo sapiens
  siRNA target sequence for IFIX (NM_152501.2,606-624).
ccgtctcacagctaaagga

SEQ ID NO: 417233 - DNA, 19 bp, Homo sapiens
  siRNA target sequence for IFIX (NM_152501.2,843-861).
cgcaactgccagtaaaaat

SEQ ID NO: 417234 - DNA, 19 bp, Homo sapiens
  siRNA target sequence for IFIX (NM_152501.2,845-863).
caactgccagtaaaaatat

SEQ ID NO: 417235 - DNA, 19 bp, Homo sapiens
  siRNA target sequence for IFIX (NM_152501.2,885-903).
cgcgatggtactaaatgca

SEQ ID NO: 417236 - DNA, 19 bp, Homo sapiens
  siRNA target sequence for IFIX (NM_152501.2,886-904).
gcgatggtactaaatgcaa

SEQ ID NO: 417237 - DNA, 19 bp, Homo sapiens
  siRNA target sequence for IFIX (NM_152501.2,891-909).
ggtactaaatgcaacaaaa

SEQ ID NO: 417238 - DNA, 19 bp, Homo sapiens
  siRNA target sequence for IFIX (NM_152501.2,1052-1070).
caaattattccaaacgtaa

SEQ ID NO: 417239 - DNA, 19 bp, Homo sapiens
  siRNA target sequence for IFIX (NM_152501.2,1164-1182).
gaaaattccgaagatcaat

SEQ ID NO: 417240 - DNA, 19 bp, Homo sapiens
  siRNA target sequence for IFIX (NM_152501.2,1230-1248).
gctacatacgaaaattgta

SEQ ID NO: 417241 - DNA, 19 bp, Homo sapiens
  siRNA target sequence for IFIX (NM_152501.2,1231-1249).
ctacatacgaaaattgtaa

SEQ ID NO: 417242 - DNA, 19 bp, Homo sapiens
  siRNA target sequence for IFIX (NM_152501.2,1234-1252).
catacgaaaattgtaaata

SEQ ID NO: 417243 - DNA, 19 bp, Homo sapiens
  siRNA target sequence for IFIX (NM_152501.2,1623-1641).
gtcatcgcctgcaaacttt

SEQ ID NO: 417244 - DNA, 19 bp, Homo sapiens
  siRNA target sequence for IFIX (NM_152501.2,1628-1646).
cgcctgcaaactttagaat

SEQ ID NO: 417245 - DNA, 19 bp, Homo sapiens
  siRNA target sequence for IFIX (NM_152501.2,1630-1648).
cctgcaaactttagaatca

SEQ ID NO: 417246 - DNA, 19 bp, Homo sapiens
  siRNA target sequence for C20orf132 (NM_152503.1,152-170).
ctcgagcggcgactagtaa

SEQ ID NO: 417247 - DNA, 19 bp, Homo sapiens
  siRNA target sequence for C20orf132 (NM_152503.1,597-615).
gctcagtgaggccattgtt

SEQ ID NO: 417248 - DNA, 19 bp, Homo sapiens
  siRNA target sequence for C20orf132 (NM_152503.1,602-620).
gtgaggccattgttgagaa

SEQ ID NO: 417249 - DNA, 19 bp, Homo sapiens
  siRNA target sequence for C20orf132 (NM_152503.1,628-646).
cagtccatccagaaggttt

SEQ ID NO: 417250 - DNA, 19 bp, Homo sapiens
  siRNA target sequence for C20orf132 (NM_152503.1,706-724).
ctcagccaagctttacctt

SEQ ID NO: 417251 - DNA, 19 bp, Homo sapiens
  siRNA target sequence for C20orf132 (NM_152503.1,710-728).
gccaagctttaccttatga

SEQ ID NO: 417252 - DNA, 19 bp, Homo sapiens
  siRNA target sequence for C20orf132 (NM_152503.1,711-729).
ccaagctttaccttatgat

SEQ ID NO: 417253 - DNA, 19 bp, Homo sapiens
  siRNA target sequence for C20orf132 (NM_152503.1,727-745).
gatgaaaccgcaaaatcat

SEQ ID NO: 417254 - DNA, 19 bp, Homo sapiens
  siRNA target sequence for C20orf132 (NM_152503.1,730-748).
gaaaccgcaaaatcattca

SEQ ID NO: 417255 - DNA, 19 bp, Homo sapiens
  siRNA target sequence for C20orf132 (NM_152503.1,855-873).
cgctgatctcagttaccaa

SEQ ID NO: 417256 - DNA, 19 bp, Homo sapiens
  siRNA target sequence for C20orf132 (NM_152503.1,901-919).
gatcgagctgagttgttca

SEQ ID NO: 417257 - DNA, 19 bp, Homo sapiens
  siRNA target sequence for C20orf132 (NM_152503.1,907-925).
gctgagttgttcagtctta

SEQ ID NO: 417258 - DNA, 19 bp, Homo sapiens
  siRNA target sequence for C20orf132 (NM_152503.1,920-938).
gtcttaccatcaagagtat

SEQ ID NO: 417259 - DNA, 19 bp, Homo sapiens
  siRNA target sequence for C20orf132 (NM_152503.1,922-940).
cttaccatcaagagtataa

SEQ ID NO: 417260 - DNA, 19 bp, Homo sapiens
  siRNA target sequence for C20orf132 (NM_152503.1,968-986).
cccagatacaggaaatcat

SEQ ID NO: 417261 - DNA, 19 bp, Homo sapiens
  siRNA target sequence for C20orf132 (NM_152503.1,1001-1019).
gcaacacagagtgtcttta

SEQ ID NO: 417262 - DNA, 19 bp, Homo sapiens
  siRNA target sequence for C20orf132 (NM_152503.1,1074-1092).
cccacatttggaaaatctt

SEQ ID NO: 417263 - DNA, 19 bp, Homo sapiens
  siRNA target sequence for C20orf132 (NM_152503.1,1107-1125).
gcttccactgcgattccaa

SEQ ID NO: 417264 - DNA, 19 bp, Homo sapiens
  siRNA target sequence for C20orf132 (NM_152503.1,1108-1126).
cttccactgcgattccaaa

SEQ ID NO: 417265 - DNA, 19 bp, Homo sapiens
  siRNA target sequence for C20orf132 (NM_152503.1,1227-1245).
caccctgaggctgaagtat

SEQ ID NO: 417266 - DNA, 19 bp, Homo sapiens
  siRNA target sequence for C20orf132 (NM_152503.1,1292-1310).
caaaatgtcgagaattcct

SEQ ID NO: 417267 - DNA, 19 bp, Homo sapiens
  siRNA target sequence for C20orf132 (NM_152503.1,1327-1345).
gccgctaaatgcttctaca

SEQ ID NO: 417268 - DNA, 19 bp, Homo sapiens
  siRNA target sequence for C20orf132 (NM_152503.1,1328-1346).
ccgctaaatgcttctacaa

SEQ ID NO: 417269 - DNA, 19 bp, Homo sapiens
  siRNA target sequence for C20orf132 (NM_152503.1,1371-1389).
ctttgaaggttttcttgat

SEQ ID NO: 417270 - DNA, 19 bp, Homo sapiens
  siRNA target sequence for C20orf132 (NM_152503.1,1396-1414).
gagctctgccagtttataa

SEQ ID NO: 417271 - DNA, 19 bp, Homo sapiens
  siRNA target sequence for C20orf132 (NM_152503.1,1399-1417).
ctctgccagtttataatga

SEQ ID NO: 417272 - DNA, 19 bp, Homo sapiens
  siRNA target sequence for C20orf132 (NM_152503.1,1461-1479).
gcgatcagcaggagaatta

SEQ ID NO: 417273 - DNA, 19 bp, Homo sapiens
  siRNA target sequence for C20orf132 (NM_152503.1,1471-1489).
ggagaattactgctaactt

SEQ ID NO: 417274 - DNA, 19 bp, Homo sapiens
  siRNA target sequence for C20orf132 (NM_152503.1,1502-1520).
cagagtcccaatttgagaa

SEQ ID NO: 417275 - DNA, 19 bp, Homo sapiens
  siRNA target sequence for C20orf132 (NM_152503.1,1577-1595).
gagtccgccaacaaatcat

SEQ ID NO: 417276 - DNA, 19 bp, Homo sapiens
  siRNA target sequence for C20orf132 (NM_152503.1,1581-1599).
ccgccaacaaatcataaat

SEQ ID NO: 417277 - DNA, 19 bp, Homo sapiens
  siRNA target sequence for C20orf132 (NM_152503.1,1582-1600).
cgccaacaaatcataaata

SEQ ID NO: 417278 - DNA, 19 bp, Homo sapiens
  siRNA target sequence for C20orf132 (NM_152503.1,1622-1640).
gacccaagtacacagatat

SEQ ID NO: 417279 - DNA, 19 bp, Homo sapiens
  siRNA target sequence for C20orf132 (NM_152503.1,1661-1679).
gtcatccagtgccgtataa

SEQ ID NO: 417280 - DNA, 19 bp, Homo sapiens
  siRNA target sequence for C20orf132 (NM_152503.1,1663-1681).
catccagtgccgtataaca

SEQ ID NO: 417281 - DNA, 19 bp, Homo sapiens
  siRNA target sequence for FLJ25067 (NM_152504.2,147-165).
gccatcagcgtgtgacata

SEQ ID NO: 417282 - DNA, 19 bp, Homo sapiens
  siRNA target sequence for FLJ25067 (NM_152504.2,148-166).
ccatcagcgtgtgacataa

SEQ ID NO: 417283 - DNA, 19 bp, Homo sapiens
  siRNA target sequence for FLJ25067 (NM_152504.2,152-170).
cagcgtgtgacataagaga

SEQ ID NO: 417284 - DNA, 19 bp, Homo sapiens
  siRNA target sequence for FLJ25067 (NM_152504.2,155-173).
cgtgtgacataagagatta

SEQ ID NO: 417285 - DNA, 19 bp, Homo sapiens
  siRNA target sequence for FLJ25067 (NM_152504.2,158-176).
gtgacataagagattacgt

SEQ ID NO: 417286 - DNA, 19 bp, Homo sapiens
  siRNA target sequence for FLJ25067 (NM_152504.2,206-224).
gcgaggctttcagttcttt

SEQ ID NO: 417287 - DNA, 19 bp, Homo sapiens
  siRNA target sequence for FLJ25067 (NM_152504.2,259-277).
gatccagacaccagtaact

SEQ ID NO: 417288 - DNA, 19 bp, Homo sapiens
  siRNA target sequence for FLJ25067 (NM_152504.2,262-280).
ccagacaccagtaacttaa

SEQ ID NO: 417289 - DNA, 19 bp, Homo sapiens
  siRNA target sequence for FLJ25067 (NM_152504.2,263-281).
cagacaccagtaacttaaa

SEQ ID NO: 417290 - DNA, 19 bp, Homo sapiens
  siRNA target sequence for FLJ25067 (NM_152504.2,265-283).
gacaccagtaacttaaata

SEQ ID NO: 417291 - DNA, 19 bp, Homo sapiens
  siRNA target sequence for FLJ25067 (NM_152504.2,267-285).
caccagtaacttaaatata

SEQ ID NO: 417292 - DNA, 19 bp, Homo sapiens
  siRNA target sequence for FLJ25067 (NM_152504.2,269-287).
ccagtaacttaaatataga

SEQ ID NO: 417293 - DNA, 19 bp, Homo sapiens
  siRNA target sequence for FLJ25067 (NM_152504.2,321-339).
gcttgaccctgctgtgaaa

SEQ ID NO: 417294 - DNA, 19 bp, Homo sapiens
  siRNA target sequence for FLJ25067 (NM_152504.2,373-391).
cggaaatccctggatagat

SEQ ID NO: 417295 - DNA, 19 bp, Homo sapiens
  siRNA target sequence for FLJ25067 (NM_152504.2,374-392).
ggaaatccctggatagatt

SEQ ID NO: 417296 - DNA, 19 bp, Homo sapiens
  siRNA target sequence for FLJ25067 (NM_152504.2,381-399).
cctggatagattctatgaa

SEQ ID NO: 417297 - DNA, 19 bp, Homo sapiens
  siRNA target sequence for FLJ25067 (NM_152504.2,487-505).
ggccaggagagccaaaagt

SEQ ID NO: 417298 - DNA, 19 bp, Homo sapiens
  siRNA target sequence for FLJ25067 (NM_152504.2,488-506).
gccaggagagccaaaagta

SEQ ID NO: 417299 - DNA, 19 bp, Homo sapiens
  siRNA target sequence for FLJ25067 (NM_152504.2,489-507).
ccaggagagccaaaagtat

SEQ ID NO: 417300 - DNA, 19 bp, Homo sapiens
  siRNA target sequence for FLJ25067 (NM_152504.2,504-522).
gtatgccctccgcagtttt

SEQ ID NO: 417301 - DNA, 19 bp, Homo sapiens
  siRNA target sequence for FLJ25067 (NM_152504.2,508-526).
gccctccgcagttttcaaa

SEQ ID NO: 417302 - DNA, 19 bp, Homo sapiens
  siRNA target sequence for FLJ25067 (NM_152504.2,509-527).
ccctccgcagttttcaaat

SEQ ID NO: 417303 - DNA, 19 bp, Homo sapiens
  siRNA target sequence for FLJ25067 (NM_152504.2,553-571).
ggctgctccgtcttacaga

SEQ ID NO: 417304 - DNA, 19 bp, Homo sapiens
  siRNA target sequence for FLJ25067 (NM_152504.2,643-661).
ccaggactgtcaaaggata

SEQ ID NO: 417305 - DNA, 19 bp, Homo sapiens
  siRNA target sequence for FLJ25067 (NM_152504.2,644-662).
caggactgtcaaaggatat

SEQ ID NO: 417306 - DNA, 19 bp, Homo sapiens
  siRNA target sequence for FLJ25067 (NM_152504.2,672-690).
cctcttgcagcagaatgta

SEQ ID NO: 417307 - DNA, 19 bp, Homo sapiens
  siRNA target sequence for FLJ25067 (NM_152504.2,673-691).
ctcttgcagcagaatgtaa

SEQ ID NO: 417308 - DNA, 19 bp, Homo sapiens
  siRNA target sequence for C21orf129 (NM_152506.1,513-531).
ccctagacagggttaatta

SEQ ID NO: 417309 - DNA, 19 bp, Homo sapiens
  siRNA target sequence for C21orf129 (NM_152506.1,514-532).
cctagacagggttaattat

SEQ ID NO: 417310 - DNA, 19 bp, Homo sapiens
  siRNA target sequence for C21orf129 (NM_152506.1,546-564).
gacccagggttcgtttgtt

SEQ ID NO: 417311 - DNA, 19 bp, Homo sapiens
  siRNA target sequence for C21orf129 (NM_152506.1,600-618).
caggatccaccggcaatat

SEQ ID NO: 417312 - DNA, 19 bp, Homo sapiens
  siRNA target sequence for C21orf128 (NM_152507.1,77-95).
ggctgccttgccatcagaa

SEQ ID NO: 417313 - DNA, 19 bp, Homo sapiens
  siRNA target sequence for C21orf128 (NM_152507.1,251-269).
gacacgatctgcattctca

SEQ ID NO: 417314 - DNA, 19 bp, Homo sapiens
  siRNA target sequence for C21orf128 (NM_152507.1,316-334).
ctcgacctagccaagaaga

SEQ ID NO: 417315 - DNA, 19 bp, Homo sapiens
  siRNA target sequence for C21orf128 (NM_152507.1,402-420).
ggtgcttggagccatttct

SEQ ID NO: 417316 - DNA, 19 bp, Homo sapiens
  siRNA target sequence for FLJ31568 (NM_152509.1,493-511).
gcagcctgtcctacaataa

SEQ ID NO: 417317 - DNA, 19 bp, Homo sapiens
  siRNA target sequence for FLJ31568 (NM_152509.1,875-893).
gtgctacagctctacagat

SEQ ID NO: 417318 - DNA, 19 bp, Homo sapiens
  siRNA target sequence for FLJ31568 (NM_152509.1,933-951).
cctgtcctgcagacatcat

SEQ ID NO: 417319 - DNA, 19 bp, Homo sapiens
  siRNA target sequence for MGC26710 (NM_152510.1,92-110).
cactgcatcacaatacaca

SEQ ID NO: 417320 - DNA, 19 bp, Homo sapiens
  siRNA target sequence for MGC26710 (NM_152510.1,133-151).
cccatcccaaatcactaat

SEQ ID NO: 417321 - DNA, 19 bp, Homo sapiens
  siRNA target sequence for MGC26710 (NM_152510.1,147-165).
ctaatgagcatgagtcatt

SEQ ID NO: 417322 - DNA, 19 bp, Homo sapiens
  siRNA target sequence for MGC26710 (NM_152510.1,188-206).
gctacttccatctcatgta

SEQ ID NO: 417323 - DNA, 19 bp, Homo sapiens
  siRNA target sequence for MGC26710 (NM_152510.1,189-207).
ctacttccatctcatgtat

SEQ ID NO: 417324 - DNA, 19 bp, Homo sapiens
  siRNA target sequence for MGC26710 (NM_152510.1,195-213).
ccatctcatgtataacata

SEQ ID NO: 417325 - DNA, 19 bp, Homo sapiens
  siRNA target sequence for MGC26710 (NM_152510.1,300-318).
gtcccgggtcactgcatat

SEQ ID NO: 417326 - DNA, 19 bp, Homo sapiens
  siRNA target sequence for MGC26710 (NM_152510.1,302-320).
cccgggtcactgcatatta

SEQ ID NO: 417327 - DNA, 19 bp, Homo sapiens
  siRNA target sequence for MGC26710 (NM_152510.1,313-331).
gcatattatcagatggatt

SEQ ID NO: 417328 - DNA, 19 bp, Homo sapiens
  siRNA target sequence for MGC26710 (NM_152510.1,327-345).
ggattcaaggttgttttga

SEQ ID NO: 417329 - DNA, 19 bp, Homo sapiens
  siRNA target sequence for MGC26710 (NM_152510.1,374-392).
gcagtactgacactttaca

SEQ ID NO: 417330 - DNA, 19 bp, Homo sapiens
  siRNA target sequence for MGC26710 (NM_152510.1,455-473).
gaaggagccactatggatt

SEQ ID NO: 417331 - DNA, 19 bp, Homo sapiens
  siRNA target sequence for MGC26710 (NM_152510.1,548-566).
ctgatccgtaaattgtata

SEQ ID NO: 417332 - DNA, 19 bp, Homo sapiens
  siRNA target sequence for MGC26710 (NM_152510.1,554-572).
cgtaaattgtatatactga

SEQ ID NO: 417333 - DNA, 19 bp, Homo sapiens
  siRNA target sequence for MGC26710 (NM_152510.1,586-604).
gccacttcctaataatgtt

SEQ ID NO: 417334 - DNA, 19 bp, Homo sapiens
  siRNA target sequence for MGC26710 (NM_152510.1,588-606).
cacttcctaataatgttgt

SEQ ID NO: 417335 - DNA, 19 bp, Homo sapiens
  siRNA target sequence for MGC26710 (NM_152510.1,593-611).
cctaataatgttgtactta

SEQ ID NO: 417336 - DNA, 19 bp, Homo sapiens
  siRNA target sequence for MGC26710 (NM_152510.1,612-630).
ctatgaaactccactacta

SEQ ID NO: 417337 - DNA, 19 bp, Homo sapiens
  siRNA target sequence for MGC26710 (NM_152510.1,616-634).
gaaactccactactataat

SEQ ID NO: 417338 - DNA, 19 bp, Homo sapiens
  siRNA target sequence for MGC26710 (NM_152510.1,635-653).
gcagtgaccccacatgatt

SEQ ID NO: 417339 - DNA, 19 bp, Homo sapiens
  siRNA target sequence for MGC26710 (NM_152510.1,636-654).
cagtgaccccacatgatta

SEQ ID NO: 417340 - DNA, 19 bp, Homo sapiens
  siRNA target sequence for MGC26710 (NM_152510.1,655-673).
ccaacccctcggttttaaa

SEQ ID NO: 417341 - DNA, 19 bp, Homo sapiens
  siRNA target sequence for MGC26710 (NM_152510.1,722-740).
gtgcaagtgggatttgtct

SEQ ID NO: 417342 - DNA, 19 bp, Homo sapiens
  siRNA target sequence for MGC26710 (NM_152510.1,741-759).
ccactggctttcatagcat

SEQ ID NO: 417343 - DNA, 19 bp, Homo sapiens
  siRNA target sequence for MGC26710 (NM_152510.1,782-800).
gctacaaaagtgattgatt

SEQ ID NO: 417344 - DNA, 19 bp, Homo sapiens
  siRNA target sequence for MGC26710 (NM_152510.1,908-926).
gtgtgcagtcagcaaagtt

SEQ ID NO: 417345 - DNA, 19 bp, Homo sapiens
  siRNA target sequence for MGC26710 (NM_152510.1,970-988).
ggtcttcatccctaacaga

SEQ ID NO: 417346 - DNA, 19 bp, Homo sapiens
  siRNA target sequence for FLJ25421 (NM_152512.3,312-330).
gtcagggaagcaacttcta

SEQ ID NO: 417347 - DNA, 19 bp, Homo sapiens
  siRNA target sequence for FLJ25421 (NM_152512.3,336-354).
ccttggggtccctctagtt

SEQ ID NO: 417348 - DNA, 19 bp, Homo sapiens
  siRNA target sequence for FLJ25421 (NM_152512.3,347-365).
ctctagttctctgatgtta

SEQ ID NO: 417349 - DNA, 19 bp, Homo sapiens
  siRNA target sequence for FLJ25421 (NM_152512.3,349-367).
ctagttctctgatgttaga

SEQ ID NO: 417350 - DNA, 19 bp, Homo sapiens
  siRNA target sequence for FLJ25421 (NM_152512.3,352-370).
gttctctgatgttagatat

SEQ ID NO: 417351 - DNA, 19 bp, Homo sapiens
  siRNA target sequence for FLJ25421 (NM_152512.3,366-384).
gatatcagtgacttgactt

SEQ ID NO: 417352 - DNA, 19 bp, Homo sapiens
  siRNA target sequence for FLJ25421 (NM_152512.3,380-398).
gactttcaacacaatttct

SEQ ID NO: 417353 - DNA, 19 bp, Homo sapiens
  siRNA target sequence for FLJ25421 (NM_152512.3,472-490).
cccttaccctaatggatta

SEQ ID NO: 417354 - DNA, 19 bp, Homo sapiens
  siRNA target sequence for FLJ25421 (NM_152512.3,478-496).
ccctaatggattatctcat

SEQ ID NO: 417355 - DNA, 19 bp, Homo sapiens
  siRNA target sequence for FLJ25421 (NM_152512.3,505-523).
gatcaaagaaagttattca

SEQ ID NO: 417356 - DNA, 19 bp, Homo sapiens
  siRNA target sequence for FLJ25421 (NM_152512.3,611-629).
ccgggaaaaatctaagcaa

SEQ ID NO: 417357 - DNA, 19 bp, Homo sapiens
  siRNA target sequence for FLJ25421 (NM_152512.3,698-716).
gcgtacctcccactctata

SEQ ID NO: 417358 - DNA, 19 bp, Homo sapiens
  siRNA target sequence for FLJ25421 (NM_152512.3,699-717).
cgtacctcccactctatat

SEQ ID NO: 417359 - DNA, 19 bp, Homo sapiens
  siRNA target sequence for FLJ25421 (NM_152512.3,700-718).
gtacctcccactctatatt

SEQ ID NO: 417360 - DNA, 19 bp, Homo sapiens
  siRNA target sequence for FLJ25421 (NM_152512.3,704-722).
ctcccactctatattgttt

SEQ ID NO: 417361 - DNA, 19 bp, Homo sapiens
  siRNA target sequence for FLJ25421 (NM_152512.3,730-748).
gacaacttggttcaagtaa

SEQ ID NO: 417362 - DNA, 19 bp, Homo sapiens
  siRNA target sequence for FLJ25421 (NM_152512.3,771-789).
gcccccacaccggatattt

SEQ ID NO: 417363 - DNA, 19 bp, Homo sapiens
  siRNA target sequence for FLJ25421 (NM_152512.3,773-791).
ccccacaccggatatttct

SEQ ID NO: 417364 - DNA, 19 bp, Homo sapiens
  siRNA target sequence for FLJ25421 (NM_152512.3,806-824).
gtataagcttcctaagttt

SEQ ID NO: 417365 - DNA, 19 bp, Homo sapiens
  siRNA target sequence for FLJ25421 (NM_152512.3,821-839).
gtttggaaggttacataat

SEQ ID NO: 417366 - DNA, 19 bp, Homo sapiens
  siRNA target sequence for FLJ25421 (NM_152512.3,958-976).
cagaggacctgatgacatt

SEQ ID NO: 417367 - DNA, 19 bp, Homo sapiens
  siRNA target sequence for FLJ25421 (NM_152512.3,1022-1040).
cattgtctctccaatcact

SEQ ID NO: 417368 - DNA, 19 bp, Homo sapiens
  siRNA target sequence for FLJ25421 (NM_152512.3,1043-1061).
cttgtcagaagcagaagaa

SEQ ID NO: 417369 - DNA, 19 bp, Homo sapiens
  siRNA target sequence for FLJ25421 (NM_152512.3,1218-1236).
gcagaaggtcttaaaacat

SEQ ID NO: 417370 - DNA, 19 bp, Homo sapiens
  siRNA target sequence for FLJ25421 (NM_152512.3,1225-1243).
gtcttaaaacattgacaat

SEQ ID NO: 417371 - DNA, 19 bp, Homo sapiens
  siRNA target sequence for FLJ25421 (NM_152512.3,1252-1270).
catgttggtcaagtaaaga

SEQ ID NO: 417372 - DNA, 19 bp, Homo sapiens
  siRNA target sequence for FLJ25421 (NM_152512.3,1261-1279).
caagtaaagaggagtttat

SEQ ID NO: 417373 - DNA, 19 bp, Homo sapiens
  siRNA target sequence for FLJ25421 (NM_152512.3,1284-1302).
cccgacttaagggtatcaa

SEQ ID NO: 417374 - DNA, 19 bp, Homo sapiens
  siRNA target sequence for FLJ25421 (NM_152512.3,1285-1303).
ccgacttaagggtatcaaa

SEQ ID NO: 417375 - DNA, 19 bp, Homo sapiens
  siRNA target sequence for FLJ25421 (NM_152512.3,1287-1305).
gacttaagggtatcaaagt

SEQ ID NO: 417376 - DNA, 19 bp, Homo sapiens
  siRNA target sequence for FLJ25421 (NM_152512.3,1352-1370).
ctctccctcattcaaaata

SEQ ID NO: 417377 - DNA, 19 bp, Homo sapiens
  siRNA target sequence for FLJ25421 (NM_152512.3,1513-1531).
ccatgtcatctcctgattt

SEQ ID NO: 417378 - DNA, 19 bp, Homo sapiens
  siRNA target sequence for FLJ25421 (NM_152512.3,1514-1532).
catgtcatctcctgattta

SEQ ID NO: 417379 - DNA, 19 bp, Homo sapiens
  siRNA target sequence for FLJ25421 (NM_152512.3,1547-1565).
gtcagctcatctcttatca

SEQ ID NO: 417380 - DNA, 19 bp, Homo sapiens
  siRNA target sequence for FLJ25421 (NM_152512.3,1613-1631).
gtcttctacctcctttaaa

SEQ ID NO: 417381 - DNA, 19 bp, Homo sapiens
  siRNA target sequence for FLJ25421 (NM_152512.3,1687-1705).
cttctgatgtagaggaaaa

SEQ ID NO: 417382 - DNA, 19 bp, Homo sapiens
  siRNA target sequence for FLJ25421 (NM_152512.3,1921-1939).
gtgcgatcgctagattaca

SEQ ID NO: 417383 - DNA, 19 bp, Homo sapiens
  siRNA target sequence for FLJ25421 (NM_152512.3,1924-1942).
cgatcgctagattacatga

SEQ ID NO: 417384 - DNA, 19 bp, Homo sapiens
  siRNA target sequence for FLJ25421 (NM_152512.3,1925-1943).
gatcgctagattacatgaa

SEQ ID NO: 417385 - DNA, 19 bp, Homo sapiens
  siRNA target sequence for FLJ25421 (NM_152512.3,1928-1946).
cgctagattacatgaagat

SEQ ID NO: 417386 - DNA, 19 bp, Homo sapiens
  siRNA target sequence for FLJ25421 (NM_152512.3,1968-1986).
cttaatgtcatcaataaca

SEQ ID NO: 417387 - DNA, 19 bp, Homo sapiens
  siRNA target sequence for FLJ25421 (NM_152512.3,1991-2009).
gatgagcatgagtctgaat

SEQ ID NO: 417388 - DNA, 19 bp, Homo sapiens
  siRNA target sequence for FLJ25421 (NM_152512.3,1994-2012).
gagcatgagtctgaatagt

SEQ ID NO: 417389 - DNA, 19 bp, Homo sapiens
  siRNA target sequence for FLJ25421 (NM_152512.3,2000-2018).
gagtctgaatagttcacaa

SEQ ID NO: 417390 - DNA, 19 bp, Homo sapiens
  siRNA target sequence for FLJ40629 (NM_152515.2,153-171).
ccaccttctaaatctacta

SEQ ID NO: 417391 - DNA, 19 bp, Homo sapiens
  siRNA target sequence for FLJ40629 (NM_152515.2,169-187).
ctattagacccaaaaatga

SEQ ID NO: 417392 - DNA, 19 bp, Homo sapiens
  siRNA target sequence for FLJ40629 (NM_152515.2,204-222).
gttttgcctgtcaaaccta

SEQ ID NO: 417393 - DNA, 19 bp, Homo sapiens
  siRNA target sequence for FLJ40629 (NM_152515.2,210-228).
cctgtcaaacctaaaaggt

SEQ ID NO: 417394 - DNA, 19 bp, Homo sapiens
  siRNA target sequence for FLJ40629 (NM_152515.2,226-244).
ggtccatcagcattaaact

SEQ ID NO: 417395 - DNA, 19 bp, Homo sapiens
  siRNA target sequence for FLJ40629 (NM_152515.2,284-302).
gaagttggagccaccaaaa

SEQ ID NO: 417396 - DNA, 19 bp, Homo sapiens
  siRNA target sequence for FLJ40629 (NM_152515.2,316-334).
ggctgacttcagaatgtgt

SEQ ID NO: 417397 - DNA, 19 bp, Homo sapiens
  siRNA target sequence for FLJ40629 (NM_152515.2,317-335).
gctgacttcagaatgtgtt

SEQ ID NO: 417398 - DNA, 19 bp, Homo sapiens
  siRNA target sequence for FLJ40629 (NM_152515.2,337-355).
cttctaacccatactctaa

SEQ ID NO: 417399 - DNA, 19 bp, Homo sapiens
  siRNA target sequence for FLJ40629 (NM_152515.2,356-374).
gccttctagcaagagtttt

SEQ ID NO: 417400 - DNA, 19 bp, Homo sapiens
  siRNA target sequence for FLJ40629 (NM_152515.2,460-478).
caaagcagcagttaacaga

SEQ ID NO: 417401 - DNA, 19 bp, Homo sapiens
  siRNA target sequence for FLJ40629 (NM_152515.2,525-543).
gaaaacgaatctttggata

SEQ ID NO: 417402 - DNA, 19 bp, Homo sapiens
  siRNA target sequence for FLJ40629 (NM_152515.2,530-548).
cgaatctttggataacttt

SEQ ID NO: 417403 - DNA, 19 bp, Homo sapiens
  siRNA target sequence for FLJ40629 (NM_152515.2,567-585).
gagaacttgctcgatatct

SEQ ID NO: 417404 - DNA, 19 bp, Homo sapiens
  siRNA target sequence for FLJ40629 (NM_152515.2,572-590).
cttgctcgatatcttaaca

SEQ ID NO: 417405 - DNA, 19 bp, Homo sapiens
  siRNA target sequence for FLJ40629 (NM_152515.2,575-593).
gctcgatatcttaacagaa

SEQ ID NO: 417406 - DNA, 19 bp, Homo sapiens
  siRNA target sequence for FLJ40629 (NM_152515.2,606-624).
ccagatcctaaattatata

SEQ ID NO: 417407 - DNA, 19 bp, Homo sapiens
  siRNA target sequence for FLJ40629 (NM_152515.2,609-627).
gatcctaaattatatacca

SEQ ID NO: 417408 - DNA, 19 bp, Homo sapiens
  siRNA target sequence for FLJ40629 (NM_152515.2,636-654).
ccaaagactgactcttata

SEQ ID NO: 417409 - DNA, 19 bp, Homo sapiens
  siRNA target sequence for FLJ40629 (NM_152515.2,684-702).
caagccttgggcaaaagtt

SEQ ID NO: 417410 - DNA, 19 bp, Homo sapiens
  siRNA target sequence for FLJ40629 (NM_152515.2,730-748).
gggttaataaacaatttgt

SEQ ID NO: 417411 - DNA, 19 bp, Homo sapiens
  siRNA target sequence for FLJ40629 (NM_152515.2,763-781).
gcaggactttcccagtaaa

SEQ ID NO: 417412 - DNA, 19 bp, Homo sapiens
  siRNA target sequence for FLJ40629 (NM_152515.2,862-880).
ggacccttagtaaagttca

SEQ ID NO: 417413 - DNA, 19 bp, Homo sapiens
  siRNA target sequence for FLJ40629 (NM_152515.2,886-904).
caaagaaaccagtagtcaa

SEQ ID NO: 417414 - DNA, 19 bp, Homo sapiens
  siRNA target sequence for FLJ40629 (NM_152515.2,908-926).
catcaaagatataaaggtt

SEQ ID NO: 417415 - DNA, 19 bp, Homo sapiens
  siRNA target sequence for FLJ40629 (NM_152515.2,915-933).
gatataaaggttaatagga

SEQ ID NO: 417416 - DNA, 19 bp, Homo sapiens
  siRNA target sequence for FLJ40629 (NM_152515.2,968-986).
gtcataccctgttactgaa

SEQ ID NO: 417417 - DNA, 19 bp, Homo sapiens
  siRNA target sequence for FLJ40629 (NM_152515.2,1029-1047).
cttcagggtgaatataaca

SEQ ID NO: 417418 - DNA, 19 bp, Homo sapiens
  siRNA target sequence for FLJ40629 (NM_152515.2,1057-1075).
caaacatcaagcaagatca

SEQ ID NO: 417419 - DNA, 19 bp, Homo sapiens
  siRNA target sequence for FLJ40629 (NM_152515.2,1076-1094).
gaagtccagccaagtttgt

SEQ ID NO: 417420 - DNA, 19 bp, Homo sapiens
  siRNA target sequence for FLJ40629 (NM_152515.2,1079-1097).
gtccagccaagtttgtata

SEQ ID NO: 417421 - DNA, 19 bp, Homo sapiens
  siRNA target sequence for FLJ40629 (NM_152515.2,1082-1100).
cagccaagtttgtatacct

SEQ ID NO: 417422 - DNA, 19 bp, Homo sapiens
  siRNA target sequence for FLJ40629 (NM_152515.2,1139-1157).
ccagaggcctaatttgaca

SEQ ID NO: 417423 - DNA, 19 bp, Homo sapiens
  siRNA target sequence for FLJ40629 (NM_152515.2,1190-1208).
ccctagcataagaccaaat

SEQ ID NO: 417424 - DNA, 19 bp, Homo sapiens
  siRNA target sequence for FLJ40629 (NM_152515.2,1313-1331).
gacagctcccaaaactcaa

SEQ ID NO: 417425 - DNA, 19 bp, Homo sapiens
  siRNA target sequence for FLJ40629 (NM_152515.2,1397-1415).
ggatcgaaggaaacaacta

SEQ ID NO: 417426 - DNA, 19 bp, Homo sapiens
  siRNA target sequence for FLJ40629 (NM_152515.2,1452-1470).
cggcctcctatggaactta

SEQ ID NO: 417427 - DNA, 19 bp, Homo sapiens
  siRNA target sequence for FLJ40629 (NM_152515.2,1455-1473).
cctcctatggaacttaaaa

SEQ ID NO: 417428 - DNA, 19 bp, Homo sapiens
  siRNA target sequence for FLJ40629 (NM_152515.2,1458-1476).
cctatggaacttaaaacaa

SEQ ID NO: 417429 - DNA, 19 bp, Homo sapiens
  siRNA target sequence for FLJ40629 (NM_152515.2,1554-1572).
ctcgaactgtccagtaaaa

SEQ ID NO: 417430 - DNA, 19 bp, Homo sapiens
  siRNA target sequence for FLJ40629 (NM_152515.2,1556-1574).
cgaactgtccagtaaaatt

SEQ ID NO: 417431 - DNA, 19 bp, Homo sapiens
  siRNA target sequence for FLJ40629 (NM_152515.2,1560-1578).
ctgtccagtaaaattaaca

SEQ ID NO: 417432 - DNA, 19 bp, Homo sapiens
  siRNA target sequence for FLJ40629 (NM_152515.2,1612-1630).
ggggtgtaccttctaatga

SEQ ID NO: 417433 - DNA, 19 bp, Homo sapiens
  siRNA target sequence for FLJ40629 (NM_152515.2,1613-1631).
gggtgtaccttctaatgaa

SEQ ID NO: 417434 - DNA, 19 bp, Homo sapiens
  siRNA target sequence for FLJ40629 (NM_152515.2,1614-1632).
ggtgtaccttctaatgaaa

SEQ ID NO: 417435 - DNA, 19 bp, Homo sapiens
  siRNA target sequence for FLJ40629 (NM_152515.2,1696-1714).
caaagttgttggcaagtaa

SEQ ID NO: 417436 - DNA, 19 bp, Homo sapiens
  siRNA target sequence for FLJ40629 (NM_152515.2,1711-1729).
gtaaaggcacctttgatgt

SEQ ID NO: 417437 - DNA, 19 bp, Homo sapiens
  siRNA target sequence for FLJ40629 (NM_152515.2,1826-1844).
cacagaagggattacttct

SEQ ID NO: 417438 - DNA, 19 bp, Homo sapiens
  siRNA target sequence for FLJ40629 (NM_152515.2,1835-1853).
gattacttctgactcttta

SEQ ID NO: 417439 - DNA, 19 bp, Homo sapiens
  siRNA target sequence for FLJ40629 (NM_152515.2,1857-1875).
gctgaaactagtataacat

SEQ ID NO: 417440 - DNA, 19 bp, Homo sapiens
  siRNA target sequence for FLJ40629 (NM_152515.2,1989-2007).
cctggtatcaaattacaga

SEQ ID NO: 417441 - DNA, 19 bp, Homo sapiens
  siRNA target sequence for FLJ40629 (NM_152515.2,1990-2008).
ctggtatcaaattacagat

SEQ ID NO: 417442 - DNA, 19 bp, Homo sapiens
  siRNA target sequence for FLJ40629 (NM_152515.2,2010-2028).
ggtccaatccctagaataa

SEQ ID NO: 417443 - DNA, 19 bp, Homo sapiens
  siRNA target sequence for FLJ40629 (NM_152515.2,2011-2029).
gtccaatccctagaataaa

SEQ ID NO: 417444 - DNA, 19 bp, Homo sapiens
  siRNA target sequence for FLJ40629 (NM_152515.2,2104-2122).
cccgctacccagaaatgct

SEQ ID NO: 417445 - DNA, 19 bp, Homo sapiens
  siRNA target sequence for FLJ40629 (NM_152515.2,2120-2138).
gctgcaggaacacgattta

SEQ ID NO: 417446 - DNA, 19 bp, Homo sapiens
  siRNA target sequence for FLJ40629 (NM_152515.2,2123-2141).
gcaggaacacgatttagta

SEQ ID NO: 417447 - DNA, 19 bp, Homo sapiens
  siRNA target sequence for FLJ40629 (NM_152515.2,2205-2223).
gaggcgctgcctgtaacat

SEQ ID NO: 417448 - DNA, 19 bp, Homo sapiens
  siRNA target sequence for FLJ40629 (NM_152515.2,2228-2246).
gtttcaaacccctgaatca

SEQ ID NO: 417449 - DNA, 19 bp, Homo sapiens
  siRNA target sequence for C2orf5 (NM_152516.1,62-80).
cgctggcccaggacacttt

SEQ ID NO: 417450 - DNA, 19 bp, Homo sapiens
  siRNA target sequence for C2orf5 (NM_152516.1,111-129).
gctacggagccagctatat

SEQ ID NO: 417451 - DNA, 19 bp, Homo sapiens
  siRNA target sequence for C2orf5 (NM_152516.1,174-192).
gagggggattcttaagtct

SEQ ID NO: 417452 - DNA, 19 bp, Homo sapiens
  siRNA target sequence for C2orf5 (NM_152516.1,176-194).
gggggattcttaagtctat

SEQ ID NO: 417453 - DNA, 19 bp, Homo sapiens
  siRNA target sequence for C2orf5 (NM_152516.1,177-195).
ggggattcttaagtctatt

SEQ ID NO: 417454 - DNA, 19 bp, Homo sapiens
  siRNA target sequence for C2orf5 (NM_152516.1,274-292).
gaccaagctgctgtcattt

SEQ ID NO: 417455 - DNA, 19 bp, Homo sapiens
  siRNA target sequence for C2orf5 (NM_152516.1,437-455).
ccattatagagctggaatt

SEQ ID NO: 417456 - DNA, 19 bp, Homo sapiens
  siRNA target sequence for C2orf5 (NM_152516.1,450-468).
ggaattaggcaaatatgga

SEQ ID NO: 417457 - DNA, 19 bp, Homo sapiens
  siRNA target sequence for FLJ30990 (NM_152517.1,1094-1112).
gaggtcctccggaaactta

SEQ ID NO: 417458 - DNA, 19 bp, Homo sapiens
  siRNA target sequence for FLJ30990 (NM_152517.1,1102-1120).
ccggaaacttaccatacaa

SEQ ID NO: 417459 - DNA, 19 bp, Homo sapiens
  siRNA target sequence for FLJ30990 (NM_152517.1,1527-1545).
cttatgatgacccagataa

SEQ ID NO: 417460 - DNA, 19 bp, Homo sapiens
  siRNA target sequence for FLJ30990 (NM_152517.1,1641-1659).
gcttggaaccttacaacaa

SEQ ID NO: 417461 - DNA, 19 bp, Homo sapiens
  siRNA target sequence for FLJ30990 (NM_152517.1,1741-1759).
gcttcgtgatagtgttatt

SEQ ID NO: 417462 - DNA, 19 bp, Homo sapiens
  siRNA target sequence for FLJ30990 (NM_152517.1,1879-1897).
gtctaggcagttaaaagct

SEQ ID NO: 417463 - DNA, 19 bp, Homo sapiens
  siRNA target sequence for FLJ30990 (NM_152517.1,1881-1899).
ctaggcagttaaaagcttt

SEQ ID NO: 417464 - DNA, 19 bp, Homo sapiens
  siRNA target sequence for FLJ30990 (NM_152517.1,1884-1902).
ggcagttaaaagctttgat

SEQ ID NO: 417465 - DNA, 19 bp, Homo sapiens
  siRNA target sequence for FLJ23861 (NM_152519.2,303-321).
gtcccagaactgtagatga

SEQ ID NO: 417466 - DNA, 19 bp, Homo sapiens
  siRNA target sequence for FLJ23861 (NM_152519.2,366-384).
ctcctgaacctactcttaa

SEQ ID NO: 417467 - DNA, 19 bp, Homo sapiens
  siRNA target sequence for FLJ23861 (NM_152519.2,368-386).
cctgaacctactcttaata

SEQ ID NO: 417468 - DNA, 19 bp, Homo sapiens
  siRNA target sequence for FLJ23861 (NM_152519.2,380-398).
cttaatactaattttgtga

SEQ ID NO: 417469 - DNA, 19 bp, Homo sapiens
  siRNA target sequence for FLJ23861 (NM_152519.2,413-431).
ggctcccctcagtcttcaa

SEQ ID NO: 417470 - DNA, 19 bp, Homo sapiens
  siRNA target sequence for FLJ23861 (NM_152519.2,418-436).
ccctcagtcttcaaaacat

SEQ ID NO: 417471 - DNA, 19 bp, Homo sapiens
  siRNA target sequence for FLJ23861 (NM_152519.2,512-530).
ggggagcccagttgcaata

SEQ ID NO: 417472 - DNA, 19 bp, Homo sapiens
  siRNA target sequence for FLJ23861 (NM_152519.2,522-540).
gttgcaataagctgaaaaa

SEQ ID NO: 417473 - DNA, 19 bp, Homo sapiens
  siRNA target sequence for FLJ23861 (NM_152519.2,526-544).
caataagctgaaaaacata

SEQ ID NO: 417474 - DNA, 19 bp, Homo sapiens
  siRNA target sequence for FLJ23861 (NM_152519.2,588-606).
ctcattctgaagagttcat

SEQ ID NO: 417475 - DNA, 19 bp, Homo sapiens
  siRNA target sequence for FLJ23861 (NM_152519.2,631-649).
cacgagccagtgcatgaaa

SEQ ID NO: 417476 - DNA, 19 bp, Homo sapiens
  siRNA target sequence for FLJ23861 (NM_152519.2,633-651).
cgagccagtgcatgaaaga

SEQ ID NO: 417477 - DNA, 19 bp, Homo sapiens
  siRNA target sequence for FLJ23861 (NM_152519.2,634-652).
gagccagtgcatgaaagat

SEQ ID NO: 417478 - DNA, 19 bp, Homo sapiens
  siRNA target sequence for FLJ23861 (NM_152519.2,636-654).
gccagtgcatgaaagatgt

SEQ ID NO: 417479 - DNA, 19 bp, Homo sapiens
  siRNA target sequence for FLJ23861 (NM_152519.2,767-785).
gagattaaaaagggtttat

SEQ ID NO: 417480 - DNA, 19 bp, Homo sapiens
  siRNA target sequence for FLJ23861 (NM_152519.2,820-838).
ctcaaatgtgcctgttagt

SEQ ID NO: 417481 - DNA, 19 bp, Homo sapiens
  siRNA target sequence for FLJ23861 (NM_152519.2,873-891).
ctcgtttacttcattgtgt

SEQ ID NO: 417482 - DNA, 19 bp, Homo sapiens
  siRNA target sequence for FLJ23861 (NM_152519.2,952-970).
cctggcaaagcatgttgtt

SEQ ID NO: 417483 - DNA, 19 bp, Homo sapiens
  siRNA target sequence for FLJ23861 (NM_152519.2,953-971).
ctggcaaagcatgttgtta

SEQ ID NO: 417484 - DNA, 19 bp, Homo sapiens
  siRNA target sequence for FLJ23861 (NM_152519.2,957-975).
caaagcatgttgttaagca

SEQ ID NO: 417485 - DNA, 19 bp, Homo sapiens
  siRNA target sequence for FLJ23861 (NM_152519.2,976-994).
ctatggtcagcagatgaaa

SEQ ID NO: 417486 - DNA, 19 bp, Homo sapiens
  siRNA target sequence for FLJ23861 (NM_152519.2,980-998).
ggtcagcagatgaaattgt

SEQ ID NO: 417487 - DNA, 19 bp, Homo sapiens
  siRNA target sequence for FLJ23861 (NM_152519.2,983-1001).
cagcagatgaaattgtcta

SEQ ID NO: 417488 - DNA, 19 bp, Homo sapiens
  siRNA target sequence for FLJ23861 (NM_152519.2,1034-1052).
catgaacctaccacaattt

SEQ ID NO: 417489 - DNA, 19 bp, Homo sapiens
  siRNA target sequence for FLJ23861 (NM_152519.2,1045-1063).
cacaattttgggtaatagt

SEQ ID NO: 417490 - DNA, 19 bp, Homo sapiens
  siRNA target sequence for FLJ23861 (NM_152519.2,1047-1065).
caattttgggtaatagttt

SEQ ID NO: 417491 - DNA, 19 bp, Homo sapiens
  siRNA target sequence for FLJ23861 (NM_152519.2,1123-1141).
gtgggatgatgcaaaaaat

SEQ ID NO: 417492 - DNA, 19 bp, Homo sapiens
  siRNA target sequence for FLJ23861 (NM_152519.2,1155-1173).
gtacagctgcggaaatcca

SEQ ID NO: 417493 - DNA, 19 bp, Homo sapiens
  siRNA target sequence for FLJ23861 (NM_152519.2,1225-1243).
ggattccgatgcaactgat

SEQ ID NO: 417494 - DNA, 19 bp, Homo sapiens
  siRNA target sequence for FLJ23861 (NM_152519.2,1226-1244).
gattccgatgcaactgata

SEQ ID NO: 417495 - DNA, 19 bp, Homo sapiens
  siRNA target sequence for FLJ23861 (NM_152519.2,1248-1266).
gctctgatgacgatttgga

SEQ ID NO: 417496 - DNA, 19 bp, Homo sapiens
  siRNA target sequence for FLJ23861 (NM_152519.2,1249-1267).
ctctgatgacgatttggat

SEQ ID NO: 417497 - DNA, 19 bp, Homo sapiens
  siRNA target sequence for FLJ23861 (NM_152519.2,1377-1395).
cagacctagaatgcaaaat

SEQ ID NO: 417498 - DNA, 19 bp, Homo sapiens
  siRNA target sequence for FLJ23861 (NM_152519.2,1400-1418).
caactaacagacattcaca

SEQ ID NO: 417499 - DNA, 19 bp, Homo sapiens
  siRNA target sequence for FLJ23861 (NM_152519.2,1411-1429).
cattcacaggcaaattcgt

SEQ ID NO: 417500 - DNA, 19 bp, Homo sapiens
  siRNA target sequence for FLJ23861 (NM_152519.2,1440-1458).
ggatagtggtcctagaaga

SEQ ID NO: 417501 - DNA, 19 bp, Homo sapiens
  siRNA target sequence for FLJ23861 (NM_152519.2,1505-1523).
gaccaagcagcttcactaa

SEQ ID NO: 417502 - DNA, 19 bp, Homo sapiens
  siRNA target sequence for FLJ23861 (NM_152519.2,1565-1583).
cctgtaccggaacaagatt

SEQ ID NO: 417503 - DNA, 19 bp, Homo sapiens
  siRNA target sequence for FLJ23861 (NM_152519.2,1566-1584).
ctgtaccggaacaagattt

SEQ ID NO: 417504 - DNA, 19 bp, Homo sapiens
  siRNA target sequence for FLJ23861 (NM_152519.2,1572-1590).
cggaacaagattttgaaat

SEQ ID NO: 417505 - DNA, 19 bp, Homo sapiens
  siRNA target sequence for FLJ23861 (NM_152519.2,1593-1611).
caccaagcagccctacttt

SEQ ID NO: 417506 - DNA, 19 bp, Homo sapiens
  siRNA target sequence for FLJ23861 (NM_152519.2,1599-1617).
gcagccctactttacttct

SEQ ID NO: 417507 - DNA, 19 bp, Homo sapiens
  siRNA target sequence for FLJ23861 (NM_152519.2,1605-1623).
ctactttacttcttcgaaa

SEQ ID NO: 417508 - DNA, 19 bp, Homo sapiens
  siRNA target sequence for FLJ23861 (NM_152519.2,1608-1626).
ctttacttcttcgaaacat

SEQ ID NO: 417509 - DNA, 19 bp, Homo sapiens
  siRNA target sequence for FLJ23861 (NM_152519.2,1714-1732).
caaatcctgtagccataaa

SEQ ID NO: 417510 - DNA, 19 bp, Homo sapiens
  siRNA target sequence for FLJ23861 (NM_152519.2,1734-1752).
gtctggctaatggcattta

SEQ ID NO: 417511 - DNA, 19 bp, Homo sapiens
  siRNA target sequence for FLJ23861 (NM_152519.2,1736-1754).
ctggctaatggcatttaca

SEQ ID NO: 417512 - DNA, 19 bp, Homo sapiens
  siRNA target sequence for FLJ23861 (NM_152519.2,1789-1807).
ctccagtagctggttactt

SEQ ID NO: 417513 - DNA, 19 bp, Homo sapiens
  siRNA target sequence for FLJ23861 (NM_152519.2,1791-1809).
ccagtagctggttacttaa

SEQ ID NO: 417514 - DNA, 19 bp, Homo sapiens
  siRNA target sequence for FLJ23861 (NM_152519.2,1794-1812).
gtagctggttacttaacca

SEQ ID NO: 417515 - DNA, 19 bp, Homo sapiens
  siRNA target sequence for FLJ23861 (NM_152519.2,1838-1856).
gacaggacaagactgaaat

SEQ ID NO: 417516 - DNA, 19 bp, Homo sapiens
  siRNA target sequence for FLJ23861 (NM_152519.2,1843-1861).
gacaagactgaaatcttca

SEQ ID NO: 417517 - DNA, 19 bp, Homo sapiens
  siRNA target sequence for FLJ23861 (NM_152519.2,1857-1875).
cttcatccttgactttcat

SEQ ID NO: 417518 - DNA, 19 bp, Homo sapiens
  siRNA target sequence for FLJ23861 (NM_152519.2,1904-1922).
cagagtttccacaaacgaa

SEQ ID NO: 417519 - DNA, 19 bp, Homo sapiens
  siRNA target sequence for FLJ23861 (NM_152519.2,1906-1924).
gagtttccacaaacgaaaa

SEQ ID NO: 417520 - DNA, 19 bp, Homo sapiens
  siRNA target sequence for FLJ23861 (NM_152519.2,1932-1950).
gattgagccctacttttta

SEQ ID NO: 417521 - DNA, 19 bp, Homo sapiens
  siRNA target sequence for FLJ23861 (NM_152519.2,2015-2033).
ctgcaatcagcttcaactt

SEQ ID NO: 417522 - DNA, 19 bp, Homo sapiens
  siRNA target sequence for FLJ23861 (NM_152519.2,2031-2049).
cttggagtagctatgaaca

SEQ ID NO: 417523 - DNA, 19 bp, Homo sapiens
  siRNA target sequence for FLJ23861 (NM_152519.2,2034-2052).
ggagtagctatgaacacaa

SEQ ID NO: 417524 - DNA, 19 bp, Homo sapiens
  siRNA target sequence for FLJ23861 (NM_152519.2,2035-2053).
gagtagctatgaacacaat

SEQ ID NO: 417525 - DNA, 19 bp, Homo sapiens
  siRNA target sequence for FLJ23861 (NM_152519.2,2050-2068).
caattcggagtcttaccta

SEQ ID NO: 417526 - DNA, 19 bp, Homo sapiens
  siRNA target sequence for FLJ23861 (NM_152519.2,2056-2074).
ggagtcttacctattaaga

SEQ ID NO: 417527 - DNA, 19 bp, Homo sapiens
  siRNA target sequence for FLJ23861 (NM_152519.2,2078-2096).
catgtatcagagttagatt

SEQ ID NO: 417528 - DNA, 19 bp, Homo sapiens
  siRNA target sequence for FLJ23861 (NM_152519.2,2147-2165).
cactttgaaacactgttaa

SEQ ID NO: 417529 - DNA, 19 bp, Homo sapiens
  siRNA target sequence for FLJ23861 (NM_152519.2,2183-2201).
ggcaatcttgctgaaaata

SEQ ID NO: 417530 - DNA, 19 bp, Homo sapiens
  siRNA target sequence for FLJ23861 (NM_152519.2,2240-2258).
catagtactctgaatcaat

SEQ ID NO: 417531 - DNA, 19 bp, Homo sapiens
  siRNA target sequence for FLJ23861 (NM_152519.2,2267-2285).
ggatattcacctatatgta

SEQ ID NO: 417532 - DNA, 19 bp, Homo sapiens
  siRNA target sequence for FLJ23861 (NM_152519.2,2268-2286).
gatattcacctatatgtaa

SEQ ID NO: 417533 - DNA, 19 bp, Homo sapiens
  siRNA target sequence for FLJ23861 (NM_152519.2,2288-2306).
cctcaaataaggtcagaat

SEQ ID NO: 417534 - DNA, 19 bp, Homo sapiens
  siRNA target sequence for FLJ23861 (NM_152519.2,2291-2309).
caaataaggtcagaatctt

SEQ ID NO: 417535 - DNA, 19 bp, Homo sapiens
  siRNA target sequence for FLJ23861 (NM_152519.2,2347-2365).
gagtgaaacagcattagga

SEQ ID NO: 417536 - DNA, 19 bp, Homo sapiens
  siRNA target sequence for FLJ23861 (NM_152519.2,2411-2429).
ggatcccatagcaatttta

SEQ ID NO: 417537 - DNA, 19 bp, Homo sapiens
  siRNA target sequence for FLJ23861 (NM_152519.2,2435-2453).
gtttccaatgtcaacgttt

SEQ ID NO: 417538 - DNA, 19 bp, Homo sapiens
  siRNA target sequence for FLJ23861 (NM_152519.2,2444-2462).
gtcaacgttttatcaagaa

SEQ ID NO: 417539 - DNA, 19 bp, Homo sapiens
  siRNA target sequence for FLJ23861 (NM_152519.2,2467-2485).
gaattcatcacgaaatact

SEQ ID NO: 417540 - DNA, 19 bp, Homo sapiens
  siRNA target sequence for FLJ23861 (NM_152519.2,2500-2518).
gagaagtgagagctcttat

SEQ ID NO: 417541 - DNA, 19 bp, Homo sapiens
  siRNA target sequence for FLJ23861 (NM_152519.2,2502-2520).
gaagtgagagctcttatga

SEQ ID NO: 417542 - DNA, 19 bp, Homo sapiens
  siRNA target sequence for FLJ23861 (NM_152519.2,2505-2523).
gtgagagctcttatgacat

SEQ ID NO: 417543 - DNA, 19 bp, Homo sapiens
  siRNA target sequence for FLJ23861 (NM_152519.2,2509-2527).
gagctcttatgacatagat

SEQ ID NO: 417544 - DNA, 19 bp, Homo sapiens
  siRNA target sequence for FLJ23861 (NM_152519.2,2511-2529).
gctcttatgacatagataa

SEQ ID NO: 417545 - DNA, 19 bp, Homo sapiens
  siRNA target sequence for FLJ23861 (NM_152519.2,2514-2532).
cttatgacatagataacat

SEQ ID NO: 417546 - DNA, 19 bp, Homo sapiens
  siRNA target sequence for FLJ23861 (NM_152519.2,2536-2554).
gattcccatgtcattagta

SEQ ID NO: 417547 - DNA, 19 bp, Homo sapiens
  siRNA target sequence for FLJ23861 (NM_152519.2,2607-2625).
ggaggatggttgttcttca

SEQ ID NO: 417548 - DNA, 19 bp, Homo sapiens
  siRNA target sequence for FLJ23861 (NM_152519.2,2720-2738).
caagccaggtggtcactat

SEQ ID NO: 417549 - DNA, 19 bp, Homo sapiens
  siRNA target sequence for FLJ23861 (NM_152519.2,2772-2790).
gagcttacagtaaaaatgt

SEQ ID NO: 417550 - DNA, 19 bp, Homo sapiens
  siRNA target sequence for FLJ23861 (NM_152519.2,2816-2834).
gaataccctaataacttca

SEQ ID NO: 417551 - DNA, 19 bp, Homo sapiens
  siRNA target sequence for FLJ23861 (NM_152519.2,2887-2905).
ccaggatctgtgtgcatat

SEQ ID NO: 417552 - DNA, 19 bp, Homo sapiens
  siRNA target sequence for FLJ23861 (NM_152519.2,2901-2919).
catatggcttaccttcttt

SEQ ID NO: 417553 - DNA, 19 bp, Homo sapiens
  siRNA target sequence for FLJ23861 (NM_152519.2,2989-3007).
ggcagccttattatgtcaa

SEQ ID NO: 417554 - DNA, 19 bp, Homo sapiens
  siRNA target sequence for FLJ23861 (NM_152519.2,3044-3062).
gctttccatggtgaaatct

SEQ ID NO: 417555 - DNA, 19 bp, Homo sapiens
  siRNA target sequence for FLJ23861 (NM_152519.2,3103-3121).
gcagtcagatggaatggaa

SEQ ID NO: 417556 - DNA, 19 bp, Homo sapiens
  siRNA target sequence for FLJ23861 (NM_152519.2,3138-3156).
gtctaggacttactaatgt

SEQ ID NO: 417557 - DNA, 19 bp, Homo sapiens
  siRNA target sequence for FLJ23861 (NM_152519.2,3140-3158).
ctaggacttactaatgtta

SEQ ID NO: 417558 - DNA, 19 bp, Homo sapiens
  siRNA target sequence for FLJ23861 (NM_152519.2,3143-3161).
ggacttactaatgttaaaa

SEQ ID NO: 417559 - DNA, 19 bp, Homo sapiens
  siRNA target sequence for MGC33864 (NM_152522.2,629-647).
gctatagcatggcgatttt

SEQ ID NO: 417560 - DNA, 19 bp, Homo sapiens
  siRNA target sequence for MGC33864 (NM_152522.2,654-672).
catcgtagctgctcttact

SEQ ID NO: 417561 - DNA, 19 bp, Homo sapiens
  siRNA target sequence for TRIPIN (NM_152524.1,179-197).
gactactaagttgaatgtt

SEQ ID NO: 417562 - DNA, 19 bp, Homo sapiens
  siRNA target sequence for TRIPIN (NM_152524.1,266-284).
caacaacagggcattagct

SEQ ID NO: 417563 - DNA, 19 bp, Homo sapiens
  siRNA target sequence for TRIPIN (NM_152524.1,308-326).
gaattctcgaagaattaca

SEQ ID NO: 417564 - DNA, 19 bp, Homo sapiens
  siRNA target sequence for TRIPIN (NM_152524.1,325-343).
caactgaaaagatgctatt

SEQ ID NO: 417565 - DNA, 19 bp, Homo sapiens
  siRNA target sequence for TRIPIN (NM_152524.1,379-397).
catttcttcgcctaaagct

SEQ ID NO: 417566 - DNA, 19 bp, Homo sapiens
  siRNA target sequence for TRIPIN (NM_152524.1,384-402).
cttcgcctaaagctaaata

SEQ ID NO: 417567 - DNA, 19 bp, Homo sapiens
  siRNA target sequence for TRIPIN (NM_152524.1,387-405).
cgcctaaagctaaataact

SEQ ID NO: 417568 - DNA, 19 bp, Homo sapiens
  siRNA target sequence for TRIPIN (NM_152524.1,388-406).
gcctaaagctaaataactt

SEQ ID NO: 417569 - DNA, 19 bp, Homo sapiens
  siRNA target sequence for TRIPIN (NM_152524.1,413-431).
gaagcttatagacatagaa

SEQ ID NO: 417570 - DNA, 19 bp, Homo sapiens
  siRNA target sequence for TRIPIN (NM_152524.1,432-450).
gctctcatgaacaataact

SEQ ID NO: 417571 - DNA, 19 bp, Homo sapiens
  siRNA target sequence for TRIPIN (NM_152524.1,435-453).
ctcatgaacaataacttga

SEQ ID NO: 417572 - DNA, 19 bp, Homo sapiens
  siRNA target sequence for TRIPIN (NM_152524.1,449-467).
cttgataactgcaattgaa

SEQ ID NO: 417573 - DNA, 19 bp, Homo sapiens
  siRNA target sequence for TRIPIN (NM_152524.1,485-503).
gttccatcagagttccttt

SEQ ID NO: 417574 - DNA, 19 bp, Homo sapiens
  siRNA target sequence for TRIPIN (NM_152524.1,514-532).
ctagcaagaagaaacgaat

SEQ ID NO: 417575 - DNA, 19 bp, Homo sapiens
  siRNA target sequence for TRIPIN (NM_152524.1,521-539).
gaagaaacgaattagtaaa

SEQ ID NO: 417576 - DNA, 19 bp, Homo sapiens
  siRNA target sequence for TRIPIN (NM_152524.1,535-553).
gtaaacagtgcaagttgat

SEQ ID NO: 417577 - DNA, 19 bp, Homo sapiens
  siRNA target sequence for TRIPIN (NM_152524.1,548-566).
gttgatgcgtcttccattt

SEQ ID NO: 417578 - DNA, 19 bp, Homo sapiens
  siRNA target sequence for TRIPIN (NM_152524.1,551-569).
gatgcgtcttccatttgca

SEQ ID NO: 417579 - DNA, 19 bp, Homo sapiens
  siRNA target sequence for TRIPIN (NM_152524.1,663-681).
ccctcttcaggatcaacaa

SEQ ID NO: 417580 - DNA, 19 bp, Homo sapiens
  siRNA target sequence for TRIPIN (NM_152524.1,702-720).
gataattcggaagtgttat

SEQ ID NO: 417581 - DNA, 19 bp, Homo sapiens
  siRNA target sequence for TRIPIN (NM_152524.1,786-804).
gatgtacctcccagagaaa

SEQ ID NO: 417582 - DNA, 19 bp, Homo sapiens
  siRNA target sequence for TRIPIN (NM_152524.1,854-872).
gagaaacgcccagtctatt

SEQ ID NO: 417583 - DNA, 19 bp, Homo sapiens
  siRNA target sequence for TRIPIN (NM_152524.1,891-909).
ccatctcctagtaatgtga

SEQ ID NO: 417584 - DNA, 19 bp, Homo sapiens
  siRNA target sequence for TRIPIN (NM_152524.1,897-915).
cctagtaatgtgactgaaa

SEQ ID NO: 417585 - DNA, 19 bp, Homo sapiens
  siRNA target sequence for TRIPIN (NM_152524.1,967-985).
cctgtgcaacagttttaga

SEQ ID NO: 417586 - DNA, 19 bp, Homo sapiens
  siRNA target sequence for TRIPIN (NM_152524.1,1003-1021).
gtccagaattaaattgcaa

SEQ ID NO: 417587 - DNA, 19 bp, Homo sapiens
  siRNA target sequence for TRIPIN (NM_152524.1,1026-1044).
gagataaatggtcatacta

SEQ ID NO: 417588 - DNA, 19 bp, Homo sapiens
  siRNA target sequence for TRIPIN (NM_152524.1,1036-1054).
gtcatactaatgaaacaaa

SEQ ID NO: 417589 - DNA, 19 bp, Homo sapiens
  siRNA target sequence for TRIPIN (NM_152524.1,1122-1140).
gcagagtgcatgaatcaaa

SEQ ID NO: 417590 - DNA, 19 bp, Homo sapiens
  siRNA target sequence for TRIPIN (NM_152524.1,1193-1211).
ggatttaactgctagtgaa

SEQ ID NO: 417591 - DNA, 19 bp, Homo sapiens
  siRNA target sequence for TRIPIN (NM_152524.1,1203-1221).
gctagtgaagtcagcaaaa

SEQ ID NO: 417592 - DNA, 19 bp, Homo sapiens
  siRNA target sequence for TRIPIN (NM_152524.1,1204-1222).
ctagtgaagtcagcaaaat

SEQ ID NO: 417593 - DNA, 19 bp, Homo sapiens
  siRNA target sequence for TRIPIN (NM_152524.1,1207-1225).
gtgaagtcagcaaaattgt

SEQ ID NO: 417594 - DNA, 19 bp, Homo sapiens
  siRNA target sequence for TRIPIN (NM_152524.1,1209-1227).
gaagtcagcaaaattgtca

SEQ ID NO: 417595 - DNA, 19 bp, Homo sapiens
  siRNA target sequence for TRIPIN (NM_152524.1,1228-1246).
cagtctcaacaggcattaa

SEQ ID NO: 417596 - DNA, 19 bp, Homo sapiens
  siRNA target sequence for TRIPIN (NM_152524.1,1434-1452).
gaagatcccggttttattt

SEQ ID NO: 417597 - DNA, 19 bp, Homo sapiens
  siRNA target sequence for TRIPIN (NM_152524.1,1437-1455).
gatcccggttttattttca

SEQ ID NO: 417598 - DNA, 19 bp, Homo sapiens
  siRNA target sequence for TRIPIN (NM_152524.1,1491-1509).
gctcaggtgaatgaactaa

SEQ ID NO: 417599 - DNA, 19 bp, Homo sapiens
  siRNA target sequence for TRIPIN (NM_152524.1,1595-1613).
gcaagaggaaacatactct

SEQ ID NO: 417600 - DNA, 19 bp, Homo sapiens
  siRNA target sequence for TRIPIN (NM_152524.1,1596-1614).
caagaggaaacatactctt

SEQ ID NO: 417601 - DNA, 19 bp, Homo sapiens
  siRNA target sequence for TRIPIN (NM_152524.1,1665-1683).
cagaattccctaacttgta

SEQ ID NO: 417602 - DNA, 19 bp, Homo sapiens
  siRNA target sequence for TRIPIN (NM_152524.1,1699-1717).
ctagacagacatttgtgat

SEQ ID NO: 417603 - DNA, 19 bp, Homo sapiens
  siRNA target sequence for TRIPIN (NM_152524.1,1781-1799).
cctagacgtcacaaatgaa

SEQ ID NO: 417604 - DNA, 19 bp, Homo sapiens
  siRNA target sequence for TRIPIN (NM_152524.1,1811-1829).
caatctttccaccaaagat

SEQ ID NO: 417605 - DNA, 19 bp, Homo sapiens
  siRNA target sequence for TRIPIN (NM_152524.1,1853-1871).
gacccacaatatattggat

SEQ ID NO: 417606 - DNA, 19 bp, Homo sapiens
  siRNA target sequence for TRIPIN (NM_152524.1,1972-1990).
gaatgaaccacatgtatga

SEQ ID NO: 417607 - DNA, 19 bp, Homo sapiens
  siRNA target sequence for TRIPIN (NM_152524.1,2007-2025).
gtggtgcatggcctaaaaa

SEQ ID NO: 417608 - DNA, 19 bp, Homo sapiens
  siRNA target sequence for TRIPIN (NM_152524.1,2012-2030).
gcatggcctaaaaaaaggt

SEQ ID NO: 417609 - DNA, 19 bp, Homo sapiens
  siRNA target sequence for TRIPIN (NM_152524.1,2013-2031).
catggcctaaaaaaaggta

SEQ ID NO: 417610 - DNA, 19 bp, Homo sapiens
  siRNA target sequence for FLJ25351 (NM_152525.3,51-69).
gccaccccaagagacaaat

SEQ ID NO: 417611 - DNA, 19 bp, Homo sapiens
  siRNA target sequence for FLJ25351 (NM_152525.3,72-90).
gcctttcagcacacttgat

SEQ ID NO: 417612 - DNA, 19 bp, Homo sapiens
  siRNA target sequence for FLJ25351 (NM_152525.3,119-137).
ccgccaccccgctattgca

SEQ ID NO: 417613 - DNA, 19 bp, Homo sapiens
  siRNA target sequence for FLJ25351 (NM_152525.3,157-175).
ccggatatcatgcacatta

SEQ ID NO: 417614 - DNA, 19 bp, Homo sapiens
  siRNA target sequence for FLJ25351 (NM_152525.3,158-176).
cggatatcatgcacattaa

SEQ ID NO: 417615 - DNA, 19 bp, Homo sapiens
  siRNA target sequence for FLJ25351 (NM_152525.3,159-177).
ggatatcatgcacattaaa

SEQ ID NO: 417616 - DNA, 19 bp, Homo sapiens
  siRNA target sequence for FLJ25351 (NM_152525.3,221-239).
cgacggccctgcctaagaa

SEQ ID NO: 417617 - DNA, 19 bp, Homo sapiens
  siRNA target sequence for FLJ25351 (NM_152525.3,367-385).
ggctgcctgggcattcata

SEQ ID NO: 417618 - DNA, 19 bp, Homo sapiens
  siRNA target sequence for FLJ25351 (NM_152525.3,368-386).
gctgcctgggcattcatat

SEQ ID NO: 417619 - DNA, 19 bp, Homo sapiens
  siRNA target sequence for FLJ25351 (NM_152525.3,371-389).
gcctgggcattcatataaa

SEQ ID NO: 417620 - DNA, 19 bp, Homo sapiens
  siRNA target sequence for FLJ25351 (NM_152525.3,398-416).
gacattttatgcctaagat

SEQ ID NO: 417621 - DNA, 19 bp, Homo sapiens
  siRNA target sequence for FLJ25351 (NM_152525.3,417-435).
cagtttacaacattatgct

SEQ ID NO: 417622 - DNA, 19 bp, Homo sapiens
  siRNA target sequence for FLJ25351 (NM_152525.3,486-504).
gtgtagcttgctatccaaa

SEQ ID NO: 417623 - DNA, 19 bp, Homo sapiens
  siRNA target sequence for FLJ25351 (NM_152525.3,488-506).
gtagcttgctatccaaaaa

SEQ ID NO: 417624 - DNA, 19 bp, Homo sapiens
  siRNA target sequence for FLJ25351 (NM_152525.3,491-509).
gcttgctatccaaaaacga

SEQ ID NO: 417625 - DNA, 19 bp, Homo sapiens
  siRNA target sequence for FLJ25351 (NM_152525.3,492-510).
cttgctatccaaaaacgat

SEQ ID NO: 417626 - DNA, 19 bp, Homo sapiens
  siRNA target sequence for FLJ25351 (NM_152525.3,531-549).
gttcgatgaagtgaagtat

SEQ ID NO: 417627 - DNA, 19 bp, Homo sapiens
  siRNA target sequence for FLJ25351 (NM_152525.3,561-579).
ggttcccagacgttatgat

SEQ ID NO: 417628 - DNA, 19 bp, Homo sapiens
  siRNA target sequence for FLJ25351 (NM_152525.3,565-583).
cccagacgttatgatgata

SEQ ID NO: 417629 - DNA, 19 bp, Homo sapiens
  siRNA target sequence for FLJ25351 (NM_152525.3,566-584).
ccagacgttatgatgataa

SEQ ID NO: 417630 - DNA, 19 bp, Homo sapiens
  siRNA target sequence for FLJ25351 (NM_152525.3,580-598).
gataagcggaataatattt

SEQ ID NO: 417631 - DNA, 19 bp, Homo sapiens
  siRNA target sequence for FLJ25351 (NM_152525.3,604-622).
gaactcatacaatatgaca

SEQ ID NO: 417632 - DNA, 19 bp, Homo sapiens
  siRNA target sequence for FLJ25351 (NM_152525.3,609-627).
catacaatatgacaataga

SEQ ID NO: 417633 - DNA, 19 bp, Homo sapiens
  siRNA target sequence for FLJ25351 (NM_152525.3,650-668).
ggagtgttcagatacatct

SEQ ID NO: 417634 - DNA, 19 bp, Homo sapiens
  siRNA target sequence for FLJ25351 (NM_152525.3,684-702).
gaaagggtgcttcattgaa

SEQ ID NO: 417635 - DNA, 19 bp, Homo sapiens
  siRNA target sequence for FLJ25351 (NM_152525.3,765-783).
ctatggaaactttggttat

SEQ ID NO: 417636 - DNA, 19 bp, Homo sapiens
  siRNA target sequence for FLJ25351 (NM_152525.3,770-788).
gaaactttggttatggatt

SEQ ID NO: 417637 - DNA, 19 bp, Homo sapiens
  siRNA target sequence for FLJ25351 (NM_152525.3,784-802).
ggattttcacatcagttaa

SEQ ID NO: 417638 - DNA, 19 bp, Homo sapiens
  siRNA target sequence for FLJ25351 (NM_152525.3,825-843).
gccatccatgtttatgaat

SEQ ID NO: 417639 - DNA, 19 bp, Homo sapiens
  siRNA target sequence for FLJ25351 (NM_152525.3,863-881).
gaacagatcccgtgacaaa

SEQ ID NO: 417640 - DNA, 19 bp, Homo sapiens
  siRNA target sequence for FLJ25351 (NM_152525.3,866-884).
cagatcccgtgacaaaagt

SEQ ID NO: 417641 - DNA, 19 bp, Homo sapiens
  siRNA target sequence for FLJ25351 (NM_152525.3,868-886).
gatcccgtgacaaaagtta

SEQ ID NO: 417642 - DNA, 19 bp, Homo sapiens
  siRNA target sequence for FLJ25351 (NM_152525.3,871-889).
cccgtgacaaaagttatta

SEQ ID NO: 417643 - DNA, 19 bp, Homo sapiens
  siRNA target sequence for FLJ25351 (NM_152525.3,873-891).
cgtgacaaaagttattaca

SEQ ID NO: 417644 - DNA, 19 bp, Homo sapiens
  siRNA target sequence for FLJ25351 (NM_152525.3,1064-1082).
ggatagataaagctaacta

SEQ ID NO: 417645 - DNA, 19 bp, Homo sapiens
  siRNA target sequence for FLJ25351 (NM_152525.3,1251-1269).
gttactggataatgattct

SEQ ID NO: 417646 - DNA, 19 bp, Homo sapiens
  siRNA target sequence for FLJ25351 (NM_152525.3,1268-1286).
ctgagaaaggcctgactat

SEQ ID NO: 417647 - DNA, 19 bp, Homo sapiens
  siRNA target sequence for FLJ25351 (NM_152525.3,1299-1317).
ccaatcggaccaagataat

SEQ ID NO: 417648 - DNA, 19 bp, Homo sapiens
  siRNA target sequence for FLJ25351 (NM_152525.3,1300-1318).
caatcggaccaagataatt

SEQ ID NO: 417649 - DNA, 19 bp, Homo sapiens
  siRNA target sequence for FLJ25351 (NM_152525.3,1305-1323).
ggaccaagataattcaact

SEQ ID NO: 417650 - DNA, 19 bp, Homo sapiens
  siRNA target sequence for FLJ25351 (NM_152525.3,1330-1348).
gcttctaaaaatgatgaat

SEQ ID NO: 417651 - DNA, 19 bp, Homo sapiens
  siRNA target sequence for FLJ25351 (NM_152525.3,1361-1379).
ccacagaagtgcactcatt

SEQ ID NO: 417652 - DNA, 19 bp, Homo sapiens
  siRNA target sequence for FLJ25351 (NM_152525.3,1372-1390).
cactcattgtgcactattt

SEQ ID NO: 417653 - DNA, 19 bp, Homo sapiens
  siRNA target sequence for FLJ25351 (NM_152525.3,1376-1394).
cattgtgcactatttctaa

SEQ ID NO: 417654 - DNA, 19 bp, Homo sapiens
  siRNA target sequence for FLJ25351 (NM_152525.3,1416-1434).
cagaataccacctttaggt

SEQ ID NO: 417655 - DNA, 19 bp, Homo sapiens
  siRNA target sequence for FLJ25351 (NM_152525.3,1507-1525).
gataactatccaagcattt

SEQ ID NO: 417656 - DNA, 19 bp, Homo sapiens
  siRNA target sequence for FLJ25351 (NM_152525.3,1543-1561).
ctatcagaggtggcttttt

SEQ ID NO: 417657 - DNA, 19 bp, Homo sapiens
  siRNA target sequence for FLJ25351 (NM_152525.3,1551-1569).
ggtggctttttcaccaaaa

SEQ ID NO: 417658 - DNA, 19 bp, Homo sapiens
  siRNA target sequence for FLJ25351 (NM_152525.3,1554-1572).
ggctttttcaccaaaagaa

SEQ ID NO: 417659 - DNA, 19 bp, Homo sapiens
  siRNA target sequence for FLJ25351 (NM_152525.3,1664-1682).
cctcatttacacaccttaa

SEQ ID NO: 417660 - DNA, 19 bp, Homo sapiens
  siRNA target sequence for FLJ25351 (NM_152525.3,1665-1683).
ctcatttacacaccttaaa

SEQ ID NO: 417661 - DNA, 19 bp, Homo sapiens
  siRNA target sequence for FLJ25351 (NM_152525.3,1711-1729).
ggaaaaagctcagatgata

SEQ ID NO: 417662 - DNA, 19 bp, Homo sapiens
  siRNA target sequence for FLJ25351 (NM_152525.3,1718-1736).
gctcagatgatatccataa

SEQ ID NO: 417663 - DNA, 19 bp, Homo sapiens
  siRNA target sequence for FLJ25351 (NM_152525.3,1721-1739).
cagatgatatccataacca

SEQ ID NO: 417664 - DNA, 19 bp, Homo sapiens
  siRNA target sequence for FLJ25351 (NM_152525.3,1749-1767).
ctctgcaagaccatatact

SEQ ID NO: 417665 - DNA, 19 bp, Homo sapiens
  siRNA target sequence for FLJ25351 (NM_152525.3,1800-1818).
cagtggaaagtttacaagt

SEQ ID NO: 417666 - DNA, 19 bp, Homo sapiens
  siRNA target sequence for FLJ25351 (NM_152525.3,1827-1845).
ggtttcatcaggcttagtt

SEQ ID NO: 417667 - DNA, 19 bp, Homo sapiens
  siRNA target sequence for FLJ25351 (NM_152525.3,1832-1850).
catcaggcttagttcatat

SEQ ID NO: 417668 - DNA, 19 bp, Homo sapiens
  siRNA target sequence for FLJ25351 (NM_152525.3,1862-1880).
catcagattatgaaatgca

SEQ ID NO: 417669 - DNA, 19 bp, Homo sapiens
  siRNA target sequence for ALS2CR19 (NM_152526.2,1999-2017).
gaatctccaagcaaagatt

SEQ ID NO: 417670 - DNA, 19 bp, Homo sapiens
  siRNA target sequence for ALS2CR19 (NM_152526.2,2023-2041).
ccaactctgggtttgaaaa

SEQ ID NO: 417671 - DNA, 19 bp, Homo sapiens
  siRNA target sequence for ALS2CR19 (NM_152526.2,2178-2196).
ctacgatggacctgaagaa

SEQ ID NO: 417672 - DNA, 19 bp, Homo sapiens
  siRNA target sequence for FLJ30794 (NM_152527.1,632-650).
gggacagcctctctattta

SEQ ID NO: 417673 - DNA, 19 bp, Homo sapiens
  siRNA target sequence for FLJ30794 (NM_152527.1,634-652).
gacagcctctctatttaca

SEQ ID NO: 417674 - DNA, 19 bp, Homo sapiens
  siRNA target sequence for FLJ30794 (NM_152527.1,640-658).
ctctctatttacaaatcga

SEQ ID NO: 417675 - DNA, 19 bp, Homo sapiens
  siRNA target sequence for FLJ30794 (NM_152527.1,756-774).
cggagcaaaacgacgtttt

SEQ ID NO: 417676 - DNA, 19 bp, Homo sapiens
  siRNA target sequence for FLJ30794 (NM_152527.1,836-854).
gccgacttgccttgcatta

SEQ ID NO: 417677 - DNA, 19 bp, Homo sapiens
  siRNA target sequence for FLJ30794 (NM_152527.1,838-856).
cgacttgccttgcattagt

SEQ ID NO: 417678 - DNA, 19 bp, Homo sapiens
  siRNA target sequence for FLJ30794 (NM_152527.1,1105-1123).
ctatgacatcacgcaaaaa

SEQ ID NO: 417679 - DNA, 19 bp, Homo sapiens
  siRNA target sequence for FLJ30794 (NM_152527.1,1111-1129).
catcacgcaaaaatatgat

SEQ ID NO: 417680 - DNA, 19 bp, Homo sapiens
  siRNA target sequence for FLJ30794 (NM_152527.1,1138-1156).
ctacatatgtggtttgctt

SEQ ID NO: 417681 - DNA, 19 bp, Homo sapiens
  siRNA target sequence for FLJ30794 (NM_152527.1,1153-1171).
gctttacatgataggaata

SEQ ID NO: 417682 - DNA, 19 bp, Homo sapiens
  siRNA target sequence for FLJ30794 (NM_152527.1,1187-1205).
cagccgtgcattcgaatta

SEQ ID NO: 417683 - DNA, 19 bp, Homo sapiens
  siRNA target sequence for FLJ30794 (NM_152527.1,1189-1207).
gccgtgcattcgaattata

SEQ ID NO: 417684 - DNA, 19 bp, Homo sapiens
  siRNA target sequence for FLJ30794 (NM_152527.1,1191-1209).
cgtgcattcgaattataga

SEQ ID NO: 417685 - DNA, 19 bp, Homo sapiens
  siRNA target sequence for FLJ30794 (NM_152527.1,1228-1246).
catggatggtgcacatgtt

SEQ ID NO: 417686 - DNA, 19 bp, Homo sapiens
  siRNA target sequence for FLJ36175 (NM_152528.1,232-250).
gctccttggacaaaacaat

SEQ ID NO: 417687 - DNA, 19 bp, Homo sapiens
  siRNA target sequence for FLJ36175 (NM_152528.1,233-251).
ctccttggacaaaacaatt

SEQ ID NO: 417688 - DNA, 19 bp, Homo sapiens
  siRNA target sequence for FLJ36175 (NM_152528.1,257-275).
gtactcgttacgtgacttt

SEQ ID NO: 417689 - DNA, 19 bp, Homo sapiens
  siRNA target sequence for FLJ36175 (NM_152528.1,260-278).
ctcgttacgtgactttact

SEQ ID NO: 417690 - DNA, 19 bp, Homo sapiens
  siRNA target sequence for FLJ36175 (NM_152528.1,262-280).
cgttacgtgactttactga

SEQ ID NO: 417691 - DNA, 19 bp, Homo sapiens
  siRNA target sequence for FLJ36175 (NM_152528.1,263-281).
gttacgtgactttactgaa

SEQ ID NO: 417692 - DNA, 19 bp, Homo sapiens
  siRNA target sequence for FLJ36175 (NM_152528.1,285-303).
ccacattctccattgaagt

SEQ ID NO: 417693 - DNA, 19 bp, Homo sapiens
  siRNA target sequence for FLJ36175 (NM_152528.1,286-304).
cacattctccattgaagtt

SEQ ID NO: 417694 - DNA, 19 bp, Homo sapiens
  siRNA target sequence for FLJ36175 (NM_152528.1,295-313).
cattgaagtttcataccta

SEQ ID NO: 417695 - DNA, 19 bp, Homo sapiens
  siRNA target sequence for FLJ36175 (NM_152528.1,337-355).
ccccttcaggacatatttt

SEQ ID NO: 417696 - DNA, 19 bp, Homo sapiens
  siRNA target sequence for FLJ36175 (NM_152528.1,380-398).
cactgtcctatggaatact

SEQ ID NO: 417697 - DNA, 19 bp, Homo sapiens
  siRNA target sequence for FLJ36175 (NM_152528.1,520-538).
ggaatgcacagtcatacaa

SEQ ID NO: 417698 - DNA, 19 bp, Homo sapiens
  siRNA target sequence for FLJ36175 (NM_152528.1,521-539).
gaatgcacagtcatacaaa

SEQ ID NO: 417699 - DNA, 19 bp, Homo sapiens
  siRNA target sequence for FLJ36175 (NM_152528.1,526-544).
cacagtcatacaaattata

SEQ ID NO: 417700 - DNA, 19 bp, Homo sapiens
  siRNA target sequence for FLJ36175 (NM_152528.1,547-565).
gatgtggtagtgttaaaga

SEQ ID NO: 417701 - DNA, 19 bp, Homo sapiens
  siRNA target sequence for FLJ36175 (NM_152528.1,625-643).
catgtggtgatttaacagt

SEQ ID NO: 417702 - DNA, 19 bp, Homo sapiens
  siRNA target sequence for FLJ36175 (NM_152528.1,777-795).
caggattgccaagtcaaaa

SEQ ID NO: 417703 - DNA, 19 bp, Homo sapiens
  siRNA target sequence for FLJ36175 (NM_152528.1,926-944).
ggataagtctgtcatagta

SEQ ID NO: 417704 - DNA, 19 bp, Homo sapiens
  siRNA target sequence for FLJ36175 (NM_152528.1,927-945).
gataagtctgtcatagtat

SEQ ID NO: 417705 - DNA, 19 bp, Homo sapiens
  siRNA target sequence for FLJ36175 (NM_152528.1,932-950).
gtctgtcatagtatatgat

SEQ ID NO: 417706 - DNA, 19 bp, Homo sapiens
  siRNA target sequence for FLJ36175 (NM_152528.1,936-954).
gtcatagtatatgatacta

SEQ ID NO: 417707 - DNA, 19 bp, Homo sapiens
  siRNA target sequence for FLJ36175 (NM_152528.1,1113-1131).
gaacatcagctgaagcaat

SEQ ID NO: 417708 - DNA, 19 bp, Homo sapiens
  siRNA target sequence for FLJ36175 (NM_152528.1,1149-1167).
gaggaggatgtctcaacat

SEQ ID NO: 417709 - DNA, 19 bp, Homo sapiens
  siRNA target sequence for FLJ36175 (NM_152528.1,1169-1187).
gctttgtgcacaagattta

SEQ ID NO: 417710 - DNA, 19 bp, Homo sapiens
  siRNA target sequence for FLJ36175 (NM_152528.1,1170-1188).
ctttgtgcacaagatttaa

SEQ ID NO: 417711 - DNA, 19 bp, Homo sapiens
  siRNA target sequence for FLJ36175 (NM_152528.1,1208-1226).
caagatgaataacattgat

SEQ ID NO: 417712 - DNA, 19 bp, Homo sapiens
  siRNA target sequence for FLJ36175 (NM_152528.1,1214-1232).
gaataacattgatggaaaa

SEQ ID NO: 417713 - DNA, 19 bp, Homo sapiens
  siRNA target sequence for FLJ36175 (NM_152528.1,1228-1246).
gaaaagaactgttgaatct

SEQ ID NO: 417714 - DNA, 19 bp, Homo sapiens
  siRNA target sequence for FLJ36175 (NM_152528.1,1233-1251).
gaactgttgaatcttacaa

SEQ ID NO: 417715 - DNA, 19 bp, Homo sapiens
  siRNA target sequence for FLJ36175 (NM_152528.1,1238-1256).
gttgaatcttacaaaagaa

SEQ ID NO: 417716 - DNA, 19 bp, Homo sapiens
  siRNA target sequence for FLJ36175 (NM_152528.1,1325-1343).
gctcaggaccaaggttaaa

SEQ ID NO: 417717 - DNA, 19 bp, Homo sapiens
  siRNA target sequence for FLJ36175 (NM_152528.1,1380-1398).
ccaataactagagaactta

SEQ ID NO: 417718 - DNA, 19 bp, Homo sapiens
  siRNA target sequence for FLJ36175 (NM_152528.1,1381-1399).
caataactagagaacttat

SEQ ID NO: 417719 - DNA, 19 bp, Homo sapiens
  siRNA target sequence for FLJ36175 (NM_152528.1,1415-1433).
cgcatcagatggctattca

SEQ ID NO: 417720 - DNA, 19 bp, Homo sapiens
  siRNA target sequence for FLJ36175 (NM_152528.1,1416-1434).
gcatcagatggctattcat

SEQ ID NO: 417721 - DNA, 19 bp, Homo sapiens
  siRNA target sequence for FLJ36175 (NM_152528.1,1476-1494).
cgtacaagtcccatgacaa

SEQ ID NO: 417722 - DNA, 19 bp, Homo sapiens
  siRNA target sequence for FLJ36175 (NM_152528.1,1477-1495).
gtacaagtcccatgacaaa

SEQ ID NO: 417723 - DNA, 19 bp, Homo sapiens
  siRNA target sequence for FLJ36175 (NM_152528.1,1480-1498).
caagtcccatgacaaatct

SEQ ID NO: 417724 - DNA, 19 bp, Homo sapiens
  siRNA target sequence for FLJ36175 (NM_152528.1,1503-1521).
cttccttcagcggtactta

SEQ ID NO: 417725 - DNA, 19 bp, Homo sapiens
  siRNA target sequence for FLJ36175 (NM_152528.1,1512-1530).
gcggtacttacaccaaata

SEQ ID NO: 417726 - DNA, 19 bp, Homo sapiens
  siRNA target sequence for FLJ36175 (NM_152528.1,1560-1578).
ctggagacacaccaaaagt

SEQ ID NO: 417727 - DNA, 19 bp, Homo sapiens
  siRNA target sequence for MGC34728 (NM_152533.1,546-564).
ctcggggctccagatttta

SEQ ID NO: 417728 - DNA, 19 bp, Homo sapiens
  siRNA target sequence for MGC34728 (NM_152533.1,548-566).
cggggctccagattttaca

SEQ ID NO: 417729 - DNA, 19 bp, Homo sapiens
  siRNA target sequence for IGSF11 (NM_152538.1,196-214).
ctctggtggaactgctttt

SEQ ID NO: 417730 - DNA, 19 bp, Homo sapiens
  siRNA target sequence for IGSF11 (NM_152538.1,201-219).
gtggaactgcttttctaga

SEQ ID NO: 417731 - DNA, 19 bp, Homo sapiens
  siRNA target sequence for IGSF11 (NM_152538.1,204-222).
gaactgcttttctagaact

SEQ ID NO: 417732 - DNA, 19 bp, Homo sapiens
  siRNA target sequence for IGSF11 (NM_152538.1,295-313).
ctgccctgcactttcacta

SEQ ID NO: 417733 - DNA, 19 bp, Homo sapiens
  siRNA target sequence for IGSF11 (NM_152538.1,317-335).
gcgctgccctcattaacct

SEQ ID NO: 417734 - DNA, 19 bp, Homo sapiens
  siRNA target sequence for IGSF11 (NM_152538.1,402-420).
gggtggacagatgtttgat

SEQ ID NO: 417735 - DNA, 19 bp, Homo sapiens
  siRNA target sequence for IGSF11 (NM_152538.1,435-453).
ccacggtagggtaggattt

SEQ ID NO: 417736 - DNA, 19 bp, Homo sapiens
  siRNA target sequence for IGSF11 (NM_152538.1,436-454).
cacggtagggtaggattta

SEQ ID NO: 417737 - DNA, 19 bp, Homo sapiens
  siRNA target sequence for IGSF11 (NM_152538.1,438-456).
cggtagggtaggatttaca

SEQ ID NO: 417738 - DNA, 19 bp, Homo sapiens
  siRNA target sequence for IGSF11 (NM_152538.1,459-477).
caccatgccagctaccaat

SEQ ID NO: 417739 - DNA, 19 bp, Homo sapiens
  siRNA target sequence for IGSF11 (NM_152538.1,469-487).
gctaccaatgtctctatct

SEQ ID NO: 417740 - DNA, 19 bp, Homo sapiens
  siRNA target sequence for IGSF11 (NM_152538.1,470-488).
ctaccaatgtctctatctt

SEQ ID NO: 417741 - DNA, 19 bp, Homo sapiens
  siRNA target sequence for IGSF11 (NM_152538.1,478-496).
gtctctatcttcattaata

SEQ ID NO: 417742 - DNA, 19 bp, Homo sapiens
  siRNA target sequence for IGSF11 (NM_152538.1,576-594).
caccggtctcacagtgtta

SEQ ID NO: 417743 - DNA, 19 bp, Homo sapiens
  siRNA target sequence for IGSF11 (NM_152538.1,578-596).
ccggtctcacagtgttagt

SEQ ID NO: 417744 - DNA, 19 bp, Homo sapiens
  siRNA target sequence for IGSF11 (NM_152538.1,579-597).
cggtctcacagtgttagtt

SEQ ID NO: 417745 - DNA, 19 bp, Homo sapiens
  siRNA target sequence for IGSF11 (NM_152538.1,680-698).
gcattcctcgaccaactta

SEQ ID NO: 417746 - DNA, 19 bp, Homo sapiens
  siRNA target sequence for IGSF11 (NM_152538.1,685-703).
cctcgaccaacttaccttt

SEQ ID NO: 417747 - DNA, 19 bp, Homo sapiens
  siRNA target sequence for IGSF11 (NM_152538.1,810-828).
ccagtgcgtggcttctaat

SEQ ID NO: 417748 - DNA, 19 bp, Homo sapiens
  siRNA target sequence for IGSF11 (NM_152538.1,881-899).
ccaggaacattggactaat

SEQ ID NO: 417749 - DNA, 19 bp, Homo sapiens
  siRNA target sequence for IGSF11 (NM_152538.1,885-903).
gaacattggactaatagct

SEQ ID NO: 417750 - DNA, 19 bp, Homo sapiens
  siRNA target sequence for IGSF11 (NM_152538.1,913-931).
ggcactggtgcagttatta

SEQ ID NO: 417751 - DNA, 19 bp, Homo sapiens
  siRNA target sequence for IGSF11 (NM_152538.1,917-935).
ctggtgcagttattatcat

SEQ ID NO: 417752 - DNA, 19 bp, Homo sapiens
  siRNA target sequence for IGSF11 (NM_152538.1,919-937).
ggtgcagttattatcattt

SEQ ID NO: 417753 - DNA, 19 bp, Homo sapiens
  siRNA target sequence for IGSF11 (NM_152538.1,1033-1051).
gatcttccacccaagtgtt

SEQ ID NO: 417754 - DNA, 19 bp, Homo sapiens
  siRNA target sequence for IGSF11 (NM_152538.1,1052-1070).
cttctgccaaagcatttca

SEQ ID NO: 417755 - DNA, 19 bp, Homo sapiens
  siRNA target sequence for IGSF11 (NM_152538.1,1098-1116).
cacactaacctcttccaat

SEQ ID NO: 417756 - DNA, 19 bp, Homo sapiens
  siRNA target sequence for IGSF11 (NM_152538.1,1137-1155).
gagcaacaatccaaaagtt

SEQ ID NO: 417757 - DNA, 19 bp, Homo sapiens
  siRNA target sequence for IGSF11 (NM_152538.1,1139-1157).
gcaacaatccaaaagttca

SEQ ID NO: 417758 - DNA, 19 bp, Homo sapiens
  siRNA target sequence for IGSF11 (NM_152538.1,1140-1158).
caacaatccaaaagttcat

SEQ ID NO: 417759 - DNA, 19 bp, Homo sapiens
  siRNA target sequence for IGSF11 (NM_152538.1,1215-1233).
ctcaggcaatgccaacata

SEQ ID NO: 417760 - DNA, 19 bp, Homo sapiens
  siRNA target sequence for IGSF11 (NM_152538.1,1219-1237).
ggcaatgccaacataccat

SEQ ID NO: 417761 - DNA, 19 bp, Homo sapiens
  siRNA target sequence for IGSF11 (NM_152538.1,1226-1244).
ccaacataccatccattta

SEQ ID NO: 417762 - DNA, 19 bp, Homo sapiens
  siRNA target sequence for IGSF11 (NM_152538.1,1230-1248).
cataccatccatttatgct

SEQ ID NO: 417763 - DNA, 19 bp, Homo sapiens
  siRNA target sequence for IGSF11 (NM_152538.1,1264-1282).
gtcccgggtcaacataaga

SEQ ID NO: 417764 - DNA, 19 bp, Homo sapiens
  siRNA target sequence for IGSF11 (NM_152538.1,1266-1284).
cccgggtcaacataagact

SEQ ID NO: 417765 - DNA, 19 bp, Homo sapiens
  siRNA target sequence for IGSF11 (NM_152538.1,1360-1378).
cggcctccacacactcatt

SEQ ID NO: 417766 - DNA, 19 bp, Homo sapiens
  siRNA target sequence for IGSF11 (NM_152538.1,1364-1382).
ctccacacactcattccta

SEQ ID NO: 417767 - DNA, 19 bp, Homo sapiens
  siRNA target sequence for IGSF11 (NM_152538.1,1395-1413).
cgcaacactggaacgaatt

SEQ ID NO: 417768 - DNA, 19 bp, Homo sapiens
  siRNA target sequence for FLJ32859 (NM_152539.1,178-196).
cactgctcacagaatagct

SEQ ID NO: 417769 - DNA, 19 bp, Homo sapiens
  siRNA target sequence for FLJ32859 (NM_152539.1,259-277).
cggagtagctgaacaaaat

SEQ ID NO: 417770 - DNA, 19 bp, Homo sapiens
  siRNA target sequence for FLJ32859 (NM_152539.1,366-384).
caccgtctgaacagactaa

SEQ ID NO: 417771 - DNA, 19 bp, Homo sapiens
  siRNA target sequence for FLJ32859 (NM_152539.1,391-409).
ggcatctagccaagctaat

SEQ ID NO: 417772 - DNA, 19 bp, Homo sapiens
  siRNA target sequence for FLJ32859 (NM_152539.1,393-411).
catctagccaagctaataa

SEQ ID NO: 417773 - DNA, 19 bp, Homo sapiens
  siRNA target sequence for FLJ32859 (NM_152539.1,396-414).
ctagccaagctaataatgt

SEQ ID NO: 417774 - DNA, 19 bp, Homo sapiens
  siRNA target sequence for FLJ32859 (NM_152539.1,399-417).
gccaagctaataatgtaca

SEQ ID NO: 417775 - DNA, 19 bp, Homo sapiens
  siRNA target sequence for FLJ32859 (NM_152539.1,475-493).
gactgaacgaagattacct

SEQ ID NO: 417776 - DNA, 19 bp, Homo sapiens
  siRNA target sequence for FLJ32859 (NM_152539.1,567-585).
gacagaccgaccacagaat

SEQ ID NO: 417777 - DNA, 19 bp, Homo sapiens
  siRNA target sequence for FLJ32859 (NM_152539.1,657-675).
cttctgagcagattacaca

SEQ ID NO: 417778 - DNA, 19 bp, Homo sapiens
  siRNA target sequence for FLJ32859 (NM_152539.1,907-925).
gactgacctcagattgtat

SEQ ID NO: 417779 - DNA, 19 bp, Homo sapiens
  siRNA target sequence for FLJ32859 (NM_152539.1,926-944).
ggcctcgttgaccacaaaa

SEQ ID NO: 417780 - DNA, 19 bp, Homo sapiens
  siRNA target sequence for FLJ32859 (NM_152539.1,928-946).
cctcgttgaccacaaaaca

SEQ ID NO: 417781 - DNA, 19 bp, Homo sapiens
  siRNA target sequence for FLJ32859 (NM_152539.1,929-947).
ctcgttgaccacaaaacat

SEQ ID NO: 417782 - DNA, 19 bp, Homo sapiens
  siRNA target sequence for FLJ32859 (NM_152539.1,931-949).
cgttgaccacaaaacatct

SEQ ID NO: 417783 - DNA, 19 bp, Homo sapiens
  siRNA target sequence for FLJ32859 (NM_152539.1,973-991).
cggccaagccactgaacta

SEQ ID NO: 417784 - DNA, 19 bp, Homo sapiens
  siRNA target sequence for FLJ32859 (NM_152539.1,1012-1030).
ccaagctcatagtaatgct

SEQ ID NO: 417785 - DNA, 19 bp, Homo sapiens
  siRNA target sequence for FLJ32859 (NM_152539.1,1053-1071).
ctcactacactgaatctga

SEQ ID NO: 417786 - DNA, 19 bp, Homo sapiens
  siRNA target sequence for FLJ32859 (NM_152539.1,1089-1107).
cagacagacaagctaatca

SEQ ID NO: 417787 - DNA, 19 bp, Homo sapiens
  siRNA target sequence for FLJ32859 (NM_152539.1,1091-1109).
gacagacaagctaatcata

SEQ ID NO: 417788 - DNA, 19 bp, Homo sapiens
  siRNA target sequence for FLJ32859 (NM_152539.1,1093-1111).
cagacaagctaatcataaa

SEQ ID NO: 417789 - DNA, 19 bp, Homo sapiens
  siRNA target sequence for FLJ32859 (NM_152539.1,1095-1113).
gacaagctaatcataaaga

SEQ ID NO: 417790 - DNA, 19 bp, Homo sapiens
  siRNA target sequence for FLJ32859 (NM_152539.1,1117-1135).
gctgtcttactatgaaaca

SEQ ID NO: 417791 - DNA, 19 bp, Homo sapiens
  siRNA target sequence for FLJ32859 (NM_152539.1,1195-1213).
ggctgactacagagtacaa

SEQ ID NO: 417792 - DNA, 19 bp, Homo sapiens
  siRNA target sequence for FLJ32859 (NM_152539.1,1246-1264).
caattccaagccttcagtt

SEQ ID NO: 417793 - DNA, 19 bp, Homo sapiens
  siRNA target sequence for FLJ32859 (NM_152539.1,1307-1325).
ccagttgatgccagattca

SEQ ID NO: 417794 - DNA, 19 bp, Homo sapiens
  siRNA target sequence for FLJ32859 (NM_152539.1,1326-1344).
ccagtaacttccaagcaaa

SEQ ID NO: 417795 - DNA, 19 bp, Homo sapiens
  siRNA target sequence for FLJ32859 (NM_152539.1,1393-1411).
ctataccagcagtcaagaa

SEQ ID NO: 417796 - DNA, 19 bp, Homo sapiens
  siRNA target sequence for FLJ32859 (NM_152539.1,1418-1436).
caagccatagtaaccaaat

SEQ ID NO: 417797 - DNA, 19 bp, Homo sapiens
  siRNA target sequence for FLJ32859 (NM_152539.1,1422-1440).
ccatagtaaccaaatctga

SEQ ID NO: 417798 - DNA, 19 bp, Homo sapiens
  siRNA target sequence for FLJ32859 (NM_152539.1,1459-1477).
ccaaggaaagggttatcat

SEQ ID NO: 417799 - DNA, 19 bp, Homo sapiens
  siRNA target sequence for FLJ32859 (NM_152539.1,1475-1493).
catatacgcaatcaaactt

SEQ ID NO: 417800 - DNA, 19 bp, Homo sapiens
  siRNA target sequence for FLJ32859 (NM_152539.1,1481-1499).
cgcaatcaaacttatagaa

SEQ ID NO: 417801 - DNA, 19 bp, Homo sapiens
  siRNA target sequence for FLJ32859 (NM_152539.1,1500-1518).
ggttcccttctatagttta

SEQ ID NO: 417802 - DNA, 19 bp, Homo sapiens
  siRNA target sequence for FLJ32859 (NM_152539.1,1501-1519).
gttcccttctatagtttat

SEQ ID NO: 417803 - DNA, 19 bp, Homo sapiens
  siRNA target sequence for FLJ32859 (NM_152539.1,1504-1522).
cccttctatagtttatgaa

SEQ ID NO: 417804 - DNA, 19 bp, Homo sapiens
  siRNA target sequence for FLJ32859 (NM_152539.1,1506-1524).
cttctatagtttatgaaga

SEQ ID NO: 417805 - DNA, 19 bp, Homo sapiens
  siRNA target sequence for FLJ32859 (NM_152539.1,1532-1550).
caagtttcactccaataca

SEQ ID NO: 417806 - DNA, 19 bp, Homo sapiens
  siRNA target sequence for FLJ32859 (NM_152539.1,1571-1589).
caaatattccagcagatta

SEQ ID NO: 417807 - DNA, 19 bp, Homo sapiens
  siRNA target sequence for FLJ32859 (NM_152539.1,1582-1600).
gcagattactgaaaactta

SEQ ID NO: 417808 - DNA, 19 bp, Homo sapiens
  siRNA target sequence for FLJ32859 (NM_152539.1,1590-1608).
ctgaaaacttagtctatga

SEQ ID NO: 417809 - DNA, 19 bp, Homo sapiens
  siRNA target sequence for FLJ32859 (NM_152539.1,1592-1610).
gaaaacttagtctatgaaa

SEQ ID NO: 417810 - DNA, 19 bp, Homo sapiens
  siRNA target sequence for STXBP1L1 (NM_152540.3,558-576).
gaatggatgggcaacatga

SEQ ID NO: 417811 - DNA, 19 bp, Homo sapiens
  siRNA target sequence for STXBP1L1 (NM_152540.3,596-614).
ccatgtcccgttattgctt

SEQ ID NO: 417812 - DNA, 19 bp, Homo sapiens
  siRNA target sequence for STXBP1L1 (NM_152540.3,681-699).
gatgtgcacctccttaata

SEQ ID NO: 417813 - DNA, 19 bp, Homo sapiens
  siRNA target sequence for STXBP1L1 (NM_152540.3,826-844).
gagtacgggaggagtgttt

SEQ ID NO: 417814 - DNA, 19 bp, Homo sapiens
  siRNA target sequence for STXBP1L1 (NM_152540.3,874-892).
ctgcggatctggccaatta

SEQ ID NO: 417815 - DNA, 19 bp, Homo sapiens
  siRNA target sequence for STXBP1L1 (NM_152540.3,1031-1049).
gctcccaggccacacaaat

SEQ ID NO: 417816 - DNA, 19 bp, Homo sapiens
  siRNA target sequence for STXBP1L1 (NM_152540.3,1119-1137).
ccaggctgtctttcacaat

SEQ ID NO: 417817 - DNA, 19 bp, Homo sapiens
  siRNA target sequence for STXBP1L1 (NM_152540.3,1161-1179).
ctatgggaagctttactga

SEQ ID NO: 417818 - DNA, 19 bp, Homo sapiens
  siRNA target sequence for STXBP1L1 (NM_152540.3,1231-1249).
cggcaagcagagaaaacct

SEQ ID NO: 417819 - DNA, 19 bp, Homo sapiens
  siRNA target sequence for STXBP1L1 (NM_152540.3,1248-1266).
ctgccaatcaagatgagta

SEQ ID NO: 417820 - DNA, 19 bp, Homo sapiens
  siRNA target sequence for STXBP1L1 (NM_152540.3,1325-1343).
caaagctctaatgaatcat

SEQ ID NO: 417821 - DNA, 19 bp, Homo sapiens
  siRNA target sequence for STXBP1L1 (NM_152540.3,1370-1388).
cacagctcaaacgttgaaa

SEQ ID NO: 417822 - DNA, 19 bp, Homo sapiens
  siRNA target sequence for STXBP1L1 (NM_152540.3,1462-1480).
caatgtccgttgtgttaaa

SEQ ID NO: 417823 - DNA, 19 bp, Homo sapiens
  siRNA target sequence for STXBP1L1 (NM_152540.3,1482-1500).
cagctgctgcccatgatta

SEQ ID NO: 417824 - DNA, 19 bp, Homo sapiens
  siRNA target sequence for STXBP1L1 (NM_152540.3,1548-1566).
ctgatccttctcatatata

SEQ ID NO: 417825 - DNA, 19 bp, Homo sapiens
  siRNA target sequence for STXBP1L1 (NM_152540.3,1693-1711).
cggactgggactcttcaat

SEQ ID NO: 417826 - DNA, 19 bp, Homo sapiens
  siRNA target sequence for STXBP1L1 (NM_152540.3,1697-1715).
ctgggactcttcaattaat

SEQ ID NO: 417827 - DNA, 19 bp, Homo sapiens
  siRNA target sequence for STXBP1L1 (NM_152540.3,1701-1719).
gactcttcaattaatctga

SEQ ID NO: 417828 - DNA, 19 bp, Homo sapiens
  siRNA target sequence for STXBP1L1 (NM_152540.3,1740-1758).
gccgtggatgaactcttta

SEQ ID NO: 417829 - DNA, 19 bp, Homo sapiens
  siRNA target sequence for STXBP1L1 (NM_152540.3,1834-1852).
cccaccaggcatcttataa

SEQ ID NO: 417830 - DNA, 19 bp, Homo sapiens
  siRNA target sequence for STXBP1L1 (NM_152540.3,1897-1915).
ggccagattccgttgatat

SEQ ID NO: 417831 - DNA, 19 bp, Homo sapiens
  siRNA target sequence for STXBP1L1 (NM_152540.3,1898-1916).
gccagattccgttgatatt

SEQ ID NO: 417832 - DNA, 19 bp, Homo sapiens
  siRNA target sequence for STXBP1L1 (NM_152540.3,1900-1918).
cagattccgttgatattga

SEQ ID NO: 417833 - DNA, 19 bp, Homo sapiens
  siRNA target sequence for STXBP1L1 (NM_152540.3,1906-1924).
ccgttgatattgaacacat

SEQ ID NO: 417834 - DNA, 19 bp, Homo sapiens
  siRNA target sequence for STXBP1L1 (NM_152540.3,1934-1952).
cctcactgatctccttaaa

SEQ ID NO: 417835 - DNA, 19 bp, Homo sapiens
  siRNA target sequence for STXBP1L1 (NM_152540.3,1956-1974).
ggatttagcatgttcatga

SEQ ID NO: 417836 - DNA, 19 bp, Homo sapiens
  siRNA target sequence for STXBP1L1 (NM_152540.3,2086-2104).
caggaacccaggtaatcgt

SEQ ID NO: 417837 - DNA, 19 bp, Homo sapiens
  siRNA target sequence for FLJ25371 (NM_152543.1,88-106).
ggcatctgtatcataccaa

SEQ ID NO: 417838 - DNA, 19 bp, Homo sapiens
  siRNA target sequence for FLJ25371 (NM_152543.1,89-107).
gcatctgtatcataccaaa

SEQ ID NO: 417839 - DNA, 19 bp, Homo sapiens
  siRNA target sequence for FLJ25371 (NM_152543.1,104-122).
caaaagccaacatctacta

SEQ ID NO: 417840 - DNA, 19 bp, Homo sapiens
  siRNA target sequence for FLJ25371 (NM_152543.1,117-135).
ctactactgtgggaaaaca

SEQ ID NO: 417841 - DNA, 19 bp, Homo sapiens
  siRNA target sequence for FLJ25371 (NM_152543.1,150-168).
gtccagactacataaagga

SEQ ID NO: 417842 - DNA, 19 bp, Homo sapiens
  siRNA target sequence for FLJ25371 (NM_152543.1,152-170).
ccagactacataaaggatt

SEQ ID NO: 417843 - DNA, 19 bp, Homo sapiens
  siRNA target sequence for FLJ25371 (NM_152543.1,153-171).
cagactacataaaggatta

SEQ ID NO: 417844 - DNA, 19 bp, Homo sapiens
  siRNA target sequence for FLJ25371 (NM_152543.1,166-184).
ggattatttacccaaaatt

SEQ ID NO: 417845 - DNA, 19 bp, Homo sapiens
  siRNA target sequence for FLJ25371 (NM_152543.1,256-274).
gaggcctgcctcaaataga

SEQ ID NO: 417846 - DNA, 19 bp, Homo sapiens
  siRNA target sequence for FLJ25371 (NM_152543.1,321-339).
ggagaataccacagtataa

SEQ ID NO: 417847 - DNA, 19 bp, Homo sapiens
  siRNA target sequence for FLJ25371 (NM_152543.1,322-340).
gagaataccacagtataat

SEQ ID NO: 417848 - DNA, 19 bp, Homo sapiens
  siRNA target sequence for FLJ25371 (NM_152543.1,324-342).
gaataccacagtataattt

SEQ ID NO: 417849 - DNA, 19 bp, Homo sapiens
  siRNA target sequence for FLJ25371 (NM_152543.1,369-387).
gctttcatatcaagtatga

SEQ ID NO: 417850 - DNA, 19 bp, Homo sapiens
  siRNA target sequence for FLJ25371 (NM_152543.1,382-400).
gtatgaagaactaagtcaa

SEQ ID NO: 417851 - DNA, 19 bp, Homo sapiens
  siRNA target sequence for FLJ25371 (NM_152543.1,414-432).
caataacccacagatatca

SEQ ID NO: 417852 - DNA, 19 bp, Homo sapiens
  siRNA target sequence for FLJ25371 (NM_152543.1,436-454).
cccatggcaaccaaaacct

SEQ ID NO: 417853 - DNA, 19 bp, Homo sapiens
  siRNA target sequence for FLJ25371 (NM_152543.1,541-559).
caaatgggctattcttgtt

SEQ ID NO: 417854 - DNA, 19 bp, Homo sapiens
  siRNA target sequence for FLJ25371 (NM_152543.1,554-572).
cttgttaggcagtgtaagt

SEQ ID NO: 417855 - DNA, 19 bp, Homo sapiens
  siRNA target sequence for FLJ25371 (NM_152543.1,557-575).
gttaggcagtgtaagtcat

SEQ ID NO: 417856 - DNA, 19 bp, Homo sapiens
  siRNA target sequence for FLJ25371 (NM_152543.1,561-579).
ggcagtgtaagtcatcatt

SEQ ID NO: 417857 - DNA, 19 bp, Homo sapiens
  siRNA target sequence for FLJ25371 (NM_152543.1,604-622).
gctgccgaagctaccaaaa

SEQ ID NO: 417858 - DNA, 19 bp, Homo sapiens
  siRNA target sequence for FLJ25371 (NM_152543.1,605-623).
ctgccgaagctaccaaaaa

SEQ ID NO: 417859 - DNA, 19 bp, Homo sapiens
  siRNA target sequence for FLJ35725 (NM_152544.1,208-226).
gaccacaaactcagttaga

SEQ ID NO: 417860 - DNA, 19 bp, Homo sapiens
  siRNA target sequence for FLJ35725 (NM_152544.1,234-252).
gcaatcacacccaatgata

SEQ ID NO: 417861 - DNA, 19 bp, Homo sapiens
  siRNA target sequence for FLJ35725 (NM_152544.1,235-253).
caatcacacccaatgataa

SEQ ID NO: 417862 - DNA, 19 bp, Homo sapiens
  siRNA target sequence for FLJ35725 (NM_152544.1,286-304).
gtaaccattctgatgaact

SEQ ID NO: 417863 - DNA, 19 bp, Homo sapiens
  siRNA target sequence for FLJ35725 (NM_152544.1,330-348).
gccaggtcttcctacaatt

SEQ ID NO: 417864 - DNA, 19 bp, Homo sapiens
  siRNA target sequence for FLJ35725 (NM_152544.1,341-359).
ctacaattgccgcttcttt

SEQ ID NO: 417865 - DNA, 19 bp, Homo sapiens
  siRNA target sequence for FLJ35725 (NM_152544.1,421-439).
ctcagtaccgggaatacct

SEQ ID NO: 417866 - DNA, 19 bp, Homo sapiens
  siRNA target sequence for FLJ35725 (NM_152544.1,430-448).
gggaataccttgacttcat

SEQ ID NO: 417867 - DNA, 19 bp, Homo sapiens
  siRNA target sequence for FLJ35725 (NM_152544.1,432-450).
gaataccttgacttcatta

SEQ ID NO: 417868 - DNA, 19 bp, Homo sapiens
  siRNA target sequence for FLJ35725 (NM_152544.1,519-537).
gtctgtctcgttggaaaat

SEQ ID NO: 417869 - DNA, 19 bp, Homo sapiens
  siRNA target sequence for FLJ35725 (NM_152544.1,708-726).
gccagggtcgggtgtgtaa

SEQ ID NO: 417870 - DNA, 19 bp, Homo sapiens
  siRNA target sequence for FLJ35725 (NM_152544.1,831-849).
gccctgccacgagatttta

SEQ ID NO: 417871 - DNA, 19 bp, Homo sapiens
  siRNA target sequence for FLJ35725 (NM_152544.1,832-850).
ccctgccacgagattttat

SEQ ID NO: 417872 - DNA, 19 bp, Homo sapiens
  siRNA target sequence for FLJ35725 (NM_152544.1,882-900).
ctgttaggtggaaagcaat

SEQ ID NO: 417873 - DNA, 19 bp, Homo sapiens
  siRNA target sequence for FLJ35725 (NM_152544.1,897-915).
caattaaacacaagaagtt

SEQ ID NO: 417874 - DNA, 19 bp, Homo sapiens
  siRNA target sequence for FLJ35725 (NM_152544.1,905-923).
cacaagaagttctcgaaat

SEQ ID NO: 417875 - DNA, 19 bp, Homo sapiens
  siRNA target sequence for FLJ35725 (NM_152544.1,1128-1146).
caaccggaagcgaaacaga

SEQ ID NO: 417876 - DNA, 19 bp, Homo sapiens
  siRNA target sequence for FLJ25286 (NM_152546.1,85-103).
ggaactctgaacctcaata

SEQ ID NO: 417877 - DNA, 19 bp, Homo sapiens
  siRNA target sequence for FLJ25286 (NM_152546.1,86-104).
gaactctgaacctcaataa

SEQ ID NO: 417878 - DNA, 19 bp, Homo sapiens
  siRNA target sequence for FLJ25286 (NM_152546.1,89-107).
ctctgaacctcaataacga

SEQ ID NO: 417879 - DNA, 19 bp, Homo sapiens
  siRNA target sequence for FLJ25286 (NM_152546.1,132-150).
gaagagaattcgagtttta

SEQ ID NO: 417880 - DNA, 19 bp, Homo sapiens
  siRNA target sequence for FLJ25286 (NM_152546.1,135-153).
gagaattcgagttttagtt

SEQ ID NO: 417881 - DNA, 19 bp, Homo sapiens
  siRNA target sequence for FLJ25286 (NM_152546.1,137-155).
gaattcgagttttagttat

SEQ ID NO: 417882 - DNA, 19 bp, Homo sapiens
  siRNA target sequence for FLJ25286 (NM_152546.1,175-193).
gttggccgactgaagtcaa

SEQ ID NO: 417883 - DNA, 19 bp, Homo sapiens
  siRNA target sequence for FLJ25286 (NM_152546.1,178-196).
ggccgactgaagtcaaaaa

SEQ ID NO: 417884 - DNA, 19 bp, Homo sapiens
  siRNA target sequence for FLJ25286 (NM_152546.1,236-254).
cgcaaagattgcttgaaga

SEQ ID NO: 417885 - DNA, 19 bp, Homo sapiens
  siRNA target sequence for FLJ25286 (NM_152546.1,276-294).
gaaacctgacatagtaact

SEQ ID NO: 417886 - DNA, 19 bp, Homo sapiens
  siRNA target sequence for FLJ25286 (NM_152546.1,304-322).
cttggtgatgatatcaact

SEQ ID NO: 417887 - DNA, 19 bp, Homo sapiens
  siRNA target sequence for FLJ25286 (NM_152546.1,383-401).
cagtacatcctcttctgaa

SEQ ID NO: 417888 - DNA, 19 bp, Homo sapiens
  siRNA target sequence for FLJ25286 (NM_152546.1,463-481).
gctgaagttgagtcatcaa

SEQ ID NO: 417889 - DNA, 19 bp, Homo sapiens
  siRNA target sequence for FLJ25286 (NM_152546.1,487-505).
gcttcagaggacaatcatt

SEQ ID NO: 417890 - DNA, 19 bp, Homo sapiens
  siRNA target sequence for FLJ25286 (NM_152546.1,600-618).
ggcgaagaaaccaatacat

SEQ ID NO: 417891 - DNA, 19 bp, Homo sapiens
  siRNA target sequence for FLJ25286 (NM_152546.1,601-619).
gcgaagaaaccaatacata

SEQ ID NO: 417892 - DNA, 19 bp, Homo sapiens
  siRNA target sequence for FLJ25286 (NM_152546.1,645-663).
ggaacatggacctaaagca

SEQ ID NO: 417893 - DNA, 19 bp, Homo sapiens
  siRNA target sequence for FLJ25286 (NM_152546.1,653-671).
gacctaaagcagtgactat

SEQ ID NO: 417894 - DNA, 19 bp, Homo sapiens
  siRNA target sequence for FLJ25286 (NM_152546.1,736-754).
cctgctgacccaaaactga

SEQ ID NO: 417895 - DNA, 19 bp, Homo sapiens
  siRNA target sequence for FLJ25286 (NM_152546.1,893-911).
ccatgtctgaagatagtga

SEQ ID NO: 417896 - DNA, 19 bp, Homo sapiens
  siRNA target sequence for FLJ25286 (NM_152546.1,894-912).
catgtctgaagatagtgat

SEQ ID NO: 417897 - DNA, 19 bp, Homo sapiens
  siRNA target sequence for FLJ25286 (NM_152546.1,915-933).
cggtgacgacttcttcatt

SEQ ID NO: 417898 - DNA, 19 bp, Homo sapiens
  siRNA target sequence for FLJ25286 (NM_152546.1,946-964).
cggacacgaaagaaggaaa

SEQ ID NO: 417899 - DNA, 19 bp, Homo sapiens
  siRNA target sequence for FLJ25286 (NM_152546.1,971-989).
gtcattcttcagttaagga

SEQ ID NO: 417900 - DNA, 19 bp, Homo sapiens
  siRNA target sequence for FLJ25286 (NM_152546.1,1198-1216).
cagatcaagaatcagttta

SEQ ID NO: 417901 - DNA, 19 bp, Homo sapiens
  siRNA target sequence for FLJ25286 (NM_152546.1,1289-1307).
caagcagaaggcgaaaaga

SEQ ID NO: 417902 - DNA, 19 bp, Homo sapiens
  siRNA target sequence for FLJ32535 (NM_152547.1,444-462).
ccggagtcagaccttcaat

SEQ ID NO: 417903 - DNA, 19 bp, Homo sapiens
  siRNA target sequence for FLJ32535 (NM_152547.1,594-612).
ctctgacaagggcacatat

SEQ ID NO: 417904 - DNA, 19 bp, Homo sapiens
  siRNA target sequence for FLJ32535 (NM_152547.1,841-859).
ctgttcagtctggaaacat

SEQ ID NO: 417905 - DNA, 19 bp, Homo sapiens
  siRNA target sequence for FLJ25333 (NM_152548.1,242-260).
cttcctggctcagacaata

SEQ ID NO: 417906 - DNA, 19 bp, Homo sapiens
  siRNA target sequence for FLJ25333 (NM_152548.1,312-330).
ctacagatctagttgaata

SEQ ID NO: 417907 - DNA, 19 bp, Homo sapiens
  siRNA target sequence for FLJ25333 (NM_152548.1,403-421).
caaccaggcgcgtaccata

SEQ ID NO: 417908 - DNA, 19 bp, Homo sapiens
  siRNA target sequence for FLJ25333 (NM_152548.1,412-430).
gcgtaccatagctttcctt

SEQ ID NO: 417909 - DNA, 19 bp, Homo sapiens
  siRNA target sequence for FLJ25333 (NM_152548.1,480-498).
ggacccatggctttcgaaa

SEQ ID NO: 417910 - DNA, 19 bp, Homo sapiens
  siRNA target sequence for FLJ25333 (NM_152548.1,507-525).
cgctcgccaggaagttact

SEQ ID NO: 417911 - DNA, 19 bp, Homo sapiens
  siRNA target sequence for FLJ25333 (NM_152548.1,549-567).
ccagcatcgtcaaaaaact

SEQ ID NO: 417912 - DNA, 19 bp, Homo sapiens
  siRNA target sequence for FLJ25333 (NM_152548.1,559-577).
caaaaaactcagccaaaat

SEQ ID NO: 417913 - DNA, 19 bp, Homo sapiens
  siRNA target sequence for FLJ25333 (NM_152548.1,619-637).
ggccacaggaactaacttt

SEQ ID NO: 417914 - DNA, 19 bp, Homo sapiens
  siRNA target sequence for FLJ25333 (NM_152548.1,638-656).
gcagtacacgagataaaca

SEQ ID NO: 417915 - DNA, 19 bp, Homo sapiens
  siRNA target sequence for FLJ25333 (NM_152548.1,639-657).
cagtacacgagataaacat

SEQ ID NO: 417916 - DNA, 19 bp, Homo sapiens
  siRNA target sequence for FLJ25333 (NM_152548.1,641-659).
gtacacgagataaacatca

SEQ ID NO: 417917 - DNA, 19 bp, Homo sapiens
  siRNA target sequence for FLJ25333 (NM_152548.1,700-718).
cagatgtgattcaagcatt

SEQ ID NO: 417918 - DNA, 19 bp, Homo sapiens
  siRNA target sequence for FLJ25333 (NM_152548.1,751-769).
gcaagagcaccggcaaatt

SEQ ID NO: 417919 - DNA, 19 bp, Homo sapiens
  siRNA target sequence for FLJ25333 (NM_152548.1,755-773).
gagcaccggcaaattgaga

SEQ ID NO: 417920 - DNA, 19 bp, Homo sapiens
  siRNA target sequence for FLJ25333 (NM_152548.1,870-888).
ctgagcaaacctcgaattt

SEQ ID NO: 417921 - DNA, 19 bp, Homo sapiens
  siRNA target sequence for FLJ25333 (NM_152548.1,875-893).
caaacctcgaatttaaaga

SEQ ID NO: 417922 - DNA, 19 bp, Homo sapiens
  siRNA target sequence for FLJ25333 (NM_152548.1,892-910).
gatggtccagggggattat

SEQ ID NO: 417923 - DNA, 19 bp, Homo sapiens
  siRNA target sequence for FLJ25333 (NM_152548.1,903-921).
gggattatcgccacgaaat

SEQ ID NO: 417924 - DNA, 19 bp, Homo sapiens
  siRNA target sequence for FLJ25333 (NM_152548.1,905-923).
gattatcgccacgaaatga

SEQ ID NO: 417925 - DNA, 19 bp, Homo sapiens
  siRNA target sequence for FLJ25333 (NM_152548.1,916-934).
cgaaatgaaccttttggaa

SEQ ID NO: 417926 - DNA, 19 bp, Homo sapiens
  siRNA target sequence for FLJ25333 (NM_152548.1,957-975).
gtaatctgtacgaagaagt

SEQ ID NO: 417927 - DNA, 19 bp, Homo sapiens
  siRNA target sequence for FLJ25333 (NM_152548.1,964-982).
gtacgaagaagttgagaat

SEQ ID NO: 417928 - DNA, 19 bp, Homo sapiens
  siRNA target sequence for FLJ25333 (NM_152548.1,967-985).
cgaagaagttgagaataat

SEQ ID NO: 417929 - DNA, 19 bp, Homo sapiens
  siRNA target sequence for FLJ25333 (NM_152548.1,1025-1043).
gaccacctgggccatataa

SEQ ID NO: 417930 - DNA, 19 bp, Homo sapiens
  siRNA target sequence for FLJ25333 (NM_152548.1,1027-1045).
ccacctgggccatataaat

SEQ ID NO: 417931 - DNA, 19 bp, Homo sapiens
  siRNA target sequence for FLJ25333 (NM_152548.1,1108-1126).
gctgcagctttcaagcaaa

SEQ ID NO: 417932 - DNA, 19 bp, Homo sapiens
  siRNA target sequence for FLJ25333 (NM_152548.1,1111-1129).
gcagctttcaagcaaagta

SEQ ID NO: 417933 - DNA, 19 bp, Homo sapiens
  siRNA target sequence for FLJ25333 (NM_152548.1,1119-1137).
caagcaaagtagagaattt

SEQ ID NO: 417934 - DNA, 19 bp, Homo sapiens
  siRNA target sequence for FLJ25333 (NM_152548.1,1127-1145).
gtagagaatttcattaaca

SEQ ID NO: 417935 - DNA, 19 bp, Homo sapiens
  siRNA target sequence for FLJ25333 (NM_152548.1,1225-1243).
gcagatctggggtgaatta

SEQ ID NO: 417936 - DNA, 19 bp, Homo sapiens
  siRNA target sequence for FLJ25333 (NM_152548.1,1252-1270).
gcagaatgaatatcaatca

SEQ ID NO: 417937 - DNA, 19 bp, Homo sapiens
  siRNA target sequence for FLJ25333 (NM_152548.1,1259-1277).
gaatatcaatcaggattta

SEQ ID NO: 417938 - DNA, 19 bp, Homo sapiens
  siRNA target sequence for FLJ25333 (NM_152548.1,1366-1384).
gaaattacagcgcaagata

SEQ ID NO: 417939 - DNA, 19 bp, Homo sapiens
  siRNA target sequence for MGC39633 (NM_152549.1,548-566).
gcatagtatgctagaagaa

SEQ ID NO: 417940 - DNA, 19 bp, Homo sapiens
  siRNA target sequence for MGC39633 (NM_152549.1,549-567).
catagtatgctagaagaat

SEQ ID NO: 417941 - DNA, 19 bp, Homo sapiens
  siRNA target sequence for MGC39633 (NM_152549.1,606-624).
gcaaaaatccagcaacaat

SEQ ID NO: 417942 - DNA, 19 bp, Homo sapiens
  siRNA target sequence for MGC39633 (NM_152549.1,617-635).
gcaacaattggccaaaata

SEQ ID NO: 417943 - DNA, 19 bp, Homo sapiens
  siRNA target sequence for MGC39633 (NM_152549.1,621-639).
caattggccaaaatacata

SEQ ID NO: 417944 - DNA, 19 bp, Homo sapiens
  siRNA target sequence for MGC39633 (NM_152549.1,626-644).
ggccaaaatacataataat

SEQ ID NO: 417945 - DNA, 19 bp, Homo sapiens
  siRNA target sequence for MGC39633 (NM_152549.1,682-700).
ctacacctgattttgttga

SEQ ID NO: 417946 - DNA, 19 bp, Homo sapiens
  siRNA target sequence for MGC39633 (NM_152549.1,685-703).
cacctgattttgttgagaa

SEQ ID NO: 417947 - DNA, 19 bp, Homo sapiens
  siRNA target sequence for MGC39633 (NM_152549.1,753-771).
gaagagcagaggttgatat

SEQ ID NO: 417948 - DNA, 19 bp, Homo sapiens
  siRNA target sequence for MGC39633 (NM_152549.1,758-776).
gcagaggttgatatatgaa

SEQ ID NO: 417949 - DNA, 19 bp, Homo sapiens
  siRNA target sequence for MGC39633 (NM_152549.1,810-828).
gagttgagtgccatatcaa

SEQ ID NO: 417950 - DNA, 19 bp, Homo sapiens
  siRNA target sequence for MGC39633 (NM_152549.1,812-830).
gttgagtgccatatcaaga

SEQ ID NO: 417951 - DNA, 19 bp, Homo sapiens
  siRNA target sequence for MGC39633 (NM_152549.1,815-833).
gagtgccatatcaagaaaa

SEQ ID NO: 417952 - DNA, 19 bp, Homo sapiens
  siRNA target sequence for MGC39633 (NM_152549.1,845-863).
ggctttgggtaattcagaa

SEQ ID NO: 417953 - DNA, 19 bp, Homo sapiens
  siRNA target sequence for MGC39633 (NM_152549.1,873-891).
gctttcagagcaatctcaa

SEQ ID NO: 417954 - DNA, 19 bp, Homo sapiens
  siRNA target sequence for MGC39633 (NM_152549.1,878-896).
cagagcaatctcaagcaaa

SEQ ID NO: 417955 - DNA, 19 bp, Homo sapiens
  siRNA target sequence for MGC39633 (NM_152549.1,892-910).
gcaaagttcctgtagacaa

SEQ ID NO: 417956 - DNA, 19 bp, Homo sapiens
  siRNA target sequence for MGC39633 (NM_152549.1,908-926).
caaagtaacaccaagtact

SEQ ID NO: 417957 - DNA, 19 bp, Homo sapiens
  siRNA target sequence for MGC39633 (NM_152549.1,930-948).
ccagaagaggtactagatt

SEQ ID NO: 417958 - DNA, 19 bp, Homo sapiens
  siRNA target sequence for MGC39633 (NM_152549.1,936-954).
gaggtactagattttgaaa

SEQ ID NO: 417959 - DNA, 19 bp, Homo sapiens
  siRNA target sequence for MGC39633 (NM_152549.1,938-956).
ggtactagattttgaaaaa

SEQ ID NO: 417960 - DNA, 19 bp, Homo sapiens
  siRNA target sequence for MGC39633 (NM_152549.1,985-1003).
gtgcctgggatgattatga

SEQ ID NO: 417961 - DNA, 19 bp, Homo sapiens
  siRNA target sequence for MGC39633 (NM_152549.1,1002-1020).
gatcaccagaactttgtaa

SEQ ID NO: 417962 - DNA, 19 bp, Homo sapiens
  siRNA target sequence for MGC39633 (NM_152549.1,1090-1108).
cacaagatgaagttcaaca

SEQ ID NO: 417963 - DNA, 19 bp, Homo sapiens
  siRNA target sequence for MGC39633 (NM_152549.1,1109-1127).
gcatgaaaaatggtatcaa

SEQ ID NO: 417964 - DNA, 19 bp, Homo sapiens
  siRNA target sequence for MGC39633 (NM_152549.1,1239-1257).
cctgtgctttttcataata

SEQ ID NO: 417965 - DNA, 19 bp, Homo sapiens
  siRNA target sequence for MGC39633 (NM_152549.1,1410-1428).
gaacgccagcgccagttta

SEQ ID NO: 417966 - DNA, 19 bp, Homo sapiens
  siRNA target sequence for MGC39633 (NM_152549.1,1413-1431).
cgccagcgccagtttaagt

SEQ ID NO: 417967 - DNA, 19 bp, Homo sapiens
  siRNA target sequence for MGC39633 (NM_152549.1,1414-1432).
gccagcgccagtttaagtt

SEQ ID NO: 417968 - DNA, 19 bp, Homo sapiens
  siRNA target sequence for MGC39633 (NM_152549.1,1415-1433).
ccagcgccagtttaagtta

SEQ ID NO: 417969 - DNA, 19 bp, Homo sapiens
  siRNA target sequence for MGC39633 (NM_152549.1,1416-1434).
cagcgccagtttaagttaa

SEQ ID NO: 417970 - DNA, 19 bp, Homo sapiens
  siRNA target sequence for MGC39633 (NM_152549.1,1418-1436).
gcgccagtttaagttaaaa

SEQ ID NO: 417971 - DNA, 19 bp, Homo sapiens
  siRNA target sequence for MGC39633 (NM_152549.1,1419-1437).
cgccagtttaagttaaaat

SEQ ID NO: 417972 - DNA, 19 bp, Homo sapiens
  siRNA target sequence for MGC39633 (NM_152549.1,1759-1777).
gctctgggccacttctaca

SEQ ID NO: 417973 - DNA, 19 bp, Homo sapiens
  siRNA target sequence for MGC39633 (NM_152549.1,1762-1780).
ctgggccacttctacatat

SEQ ID NO: 417974 - DNA, 19 bp, Homo sapiens
  siRNA target sequence for MGC39633 (NM_152549.1,1781-1799).
cccacatagggctattcca

SEQ ID NO: 417975 - DNA, 19 bp, Homo sapiens
  siRNA target sequence for MGC39633 (NM_152549.1,1782-1800).
ccacatagggctattccaa

SEQ ID NO: 417976 - DNA, 19 bp, Homo sapiens
  siRNA target sequence for FLJ23654 (NM_152550.1,225-243).
ggatgatttgacgttactt

SEQ ID NO: 417977 - DNA, 19 bp, Homo sapiens
  siRNA target sequence for FLJ23654 (NM_152550.1,310-328).
cacaccttctgcaaaccat

SEQ ID NO: 417978 - DNA, 19 bp, Homo sapiens
  siRNA target sequence for FLJ23654 (NM_152550.1,565-583).
cggctagtgcctaatgtca

SEQ ID NO: 417979 - DNA, 19 bp, Homo sapiens
  siRNA target sequence for FLJ23654 (NM_152550.1,643-661).
cccggtgacctaaggttta

SEQ ID NO: 417980 - DNA, 19 bp, Homo sapiens
  siRNA target sequence for FLJ23654 (NM_152550.1,644-662).
ccggtgacctaaggtttaa

SEQ ID NO: 417981 - DNA, 19 bp, Homo sapiens
  siRNA target sequence for FLJ23654 (NM_152550.1,645-663).
cggtgacctaaggtttaat

SEQ ID NO: 417982 - DNA, 19 bp, Homo sapiens
  siRNA target sequence for FLJ23654 (NM_152550.1,686-704).
ggagacagcttgatgagaa

SEQ ID NO: 417983 - DNA, 19 bp, Homo sapiens
  siRNA target sequence for FLJ23654 (NM_152550.1,691-709).
cagcttgatgagaattggt

SEQ ID NO: 417984 - DNA, 19 bp, Homo sapiens
  siRNA target sequence for FLJ23654 (NM_152550.1,752-770).
gctccgtggaagtcatcaa

SEQ ID NO: 417985 - DNA, 19 bp, Homo sapiens
  siRNA target sequence for FLJ23654 (NM_152550.1,920-938).
gcaagttaggagataaagt

SEQ ID NO: 417986 - DNA, 19 bp, Homo sapiens
  siRNA target sequence for FLJ23654 (NM_152550.1,921-939).
caagttaggagataaagta

SEQ ID NO: 417987 - DNA, 19 bp, Homo sapiens
  siRNA target sequence for FLJ23654 (NM_152550.1,940-958).
ggcatcttccctatcttgt

SEQ ID NO: 417988 - DNA, 19 bp, Homo sapiens
  siRNA target sequence for FLJ23654 (NM_152550.1,975-993).
caccgcaagacacctttta

SEQ ID NO: 417989 - DNA, 19 bp, Homo sapiens
  siRNA target sequence for FLJ23654 (NM_152550.1,977-995).
ccgcaagacaccttttaga

SEQ ID NO: 417990 - DNA, 19 bp, Homo sapiens
  siRNA target sequence for FLJ23654 (NM_152550.1,979-997).
gcaagacaccttttagaga

SEQ ID NO: 417991 - DNA, 19 bp, Homo sapiens
  siRNA target sequence for FLJ23654 (NM_152550.1,980-998).
caagacaccttttagagaa

SEQ ID NO: 417992 - DNA, 19 bp, Homo sapiens
  siRNA target sequence for FLJ23654 (NM_152550.1,1275-1293).
gggacaggtcagcacttat

SEQ ID NO: 417993 - DNA, 19 bp, Homo sapiens
  siRNA target sequence for FLJ23654 (NM_152550.1,1277-1295).
gacaggtcagcacttatca

SEQ ID NO: 417994 - DNA, 19 bp, Homo sapiens
  siRNA target sequence for FLJ23654 (NM_152550.1,1357-1375).
cacctctcagcgaacatgt

SEQ ID NO: 417995 - DNA, 19 bp, Homo sapiens
  siRNA target sequence for FLJ23654 (NM_152550.1,1359-1377).
cctctcagcgaacatgttt

SEQ ID NO: 417996 - DNA, 19 bp, Homo sapiens
  siRNA target sequence for FLJ23654 (NM_152550.1,1506-1524).
cggcatcttcccaaacaat

SEQ ID NO: 417997 - DNA, 19 bp, Homo sapiens
  siRNA target sequence for C6orf151 (NM_152551.2,166-184).
ctgggctgggacctagata

SEQ ID NO: 417998 - DNA, 19 bp, Homo sapiens
  siRNA target sequence for C6orf151 (NM_152551.2,168-186).
gggctgggacctagatagt

SEQ ID NO: 417999 - DNA, 19 bp, Homo sapiens
  siRNA target sequence for C6orf151 (NM_152551.2,212-230).
cggaggatgaagttgtgat

SEQ ID NO: 418000 - DNA, 19 bp, Homo sapiens
  siRNA target sequence for C6orf151 (NM_152551.2,213-231).
ggaggatgaagttgtgata

SEQ ID NO: 418001 - DNA, 19 bp, Homo sapiens
  siRNA target sequence for C6orf151 (NM_152551.2,216-234).
ggatgaagttgtgatatgt

SEQ ID NO: 418002 - DNA, 19 bp, Homo sapiens
  siRNA target sequence for C6orf151 (NM_152551.2,236-254).
catacgattccaatcatca

SEQ ID NO: 418003 - DNA, 19 bp, Homo sapiens
  siRNA target sequence for C6orf151 (NM_152551.2,279-297).
gcacatggcatcttgtaga

SEQ ID NO: 418004 - DNA, 19 bp, Homo sapiens
  siRNA target sequence for C6orf151 (NM_152551.2,311-329).
gctataccaaagaagaaga

SEQ ID NO: 418005 - DNA, 19 bp, Homo sapiens
  siRNA target sequence for C6orf151 (NM_152551.2,330-348).
ggatgaaatgtataatcct

SEQ ID NO: 418006 - DNA, 19 bp, Homo sapiens
  siRNA target sequence for C6orf151 (NM_152551.2,346-364).
cctgagtttttctatgaaa

SEQ ID NO: 418007 - DNA, 19 bp, Homo sapiens
  siRNA target sequence for C6orf151 (NM_152551.2,367-385).
gtgaagataccttcgatta

SEQ ID NO: 418008 - DNA, 19 bp, Homo sapiens
  siRNA target sequence for C6orf151 (NM_152551.2,376-394).
ccttcgattactttgaata

SEQ ID NO: 418009 - DNA, 19 bp, Homo sapiens
  siRNA target sequence for C6orf151 (NM_152551.2,377-395).
cttcgattactttgaataa

SEQ ID NO: 418010 - DNA, 19 bp, Homo sapiens
  siRNA target sequence for C6orf151 (NM_152551.2,380-398).
cgattactttgaataagga

SEQ ID NO: 418011 - DNA, 19 bp, Homo sapiens
  siRNA target sequence for C6orf151 (NM_152551.2,441-459).
gaaagacagtgattgttat

SEQ ID NO: 418012 - DNA, 19 bp, Homo sapiens
  siRNA target sequence for C6orf151 (NM_152551.2,585-603).
gcgctctgattctcaaatt

SEQ ID NO: 418013 - DNA, 19 bp, Homo sapiens
  siRNA target sequence for C6orf151 (NM_152551.2,586-604).
cgctctgattctcaaatta

SEQ ID NO: 418014 - DNA, 19 bp, Homo sapiens
  siRNA target sequence for C6orf151 (NM_152551.2,590-608).
ctgattctcaaattattga

SEQ ID NO: 418015 - DNA, 19 bp, Homo sapiens
  siRNA target sequence for C6orf151 (NM_152551.2,631-649).
gacttggctgccaaaatca

SEQ ID NO: 418016 - DNA, 19 bp, Homo sapiens
  siRNA target sequence for C6orf151 (NM_152551.2,652-670).
caagacaatagtcgaaaaa

SEQ ID NO: 418017 - DNA, 19 bp, Homo sapiens
  siRNA target sequence for C6orf151 (NM_152551.2,664-682).
cgaaaaagtccaaaatcct

SEQ ID NO: 418018 - DNA, 19 bp, Homo sapiens
  siRNA target sequence for C6orf151 (NM_152551.2,696-714).
ggcagaagtacgagattat

SEQ ID NO: 418019 - DNA, 19 bp, Homo sapiens
  siRNA target sequence for C6orf151 (NM_152551.2,732-750).
ctatagagccaagaatgtt

SEQ ID NO: 418020 - DNA, 19 bp, Homo sapiens
  siRNA target sequence for C6orf151 (NM_152551.2,739-757).
gccaagaatgttcacataa

SEQ ID NO: 418021 - DNA, 19 bp, Homo sapiens
  siRNA target sequence for C6orf151 (NM_152551.2,777-795).
ggtgattcgagatgtgata

SEQ ID NO: 418022 - DNA, 19 bp, Homo sapiens
  siRNA target sequence for C6orf151 (NM_152551.2,778-796).
gtgattcgagatgtgataa

SEQ ID NO: 418023 - DNA, 19 bp, Homo sapiens
  siRNA target sequence for C6orf151 (NM_152551.2,780-798).
gattcgagatgtgataaat

SEQ ID NO: 418024 - DNA, 19 bp, Homo sapiens
  siRNA target sequence for C6orf151 (NM_152551.2,880-898).
cgatcagcttcagtagatt

SEQ ID NO: 418025 - DNA, 19 bp, Homo sapiens
  siRNA target sequence for C6orf151 (NM_152551.2,956-974).
ggagtagaagcccacataa

SEQ ID NO: 418026 - DNA, 19 bp, Homo sapiens
  siRNA target sequence for C6orf151 (NM_152551.2,957-975).
gagtagaagcccacataaa

SEQ ID NO: 418027 - DNA, 19 bp, Homo sapiens
  siRNA target sequence for C6orf151 (NM_152551.2,1037-1055).
gggaaagacaccatagtca

SEQ ID NO: 418028 - DNA, 19 bp, Homo sapiens
  siRNA target sequence for C6orf151 (NM_152551.2,1038-1056).
ggaaagacaccatagtcat

SEQ ID NO: 418029 - DNA, 19 bp, Homo sapiens
  siRNA target sequence for C6orf151 (NM_152551.2,1039-1057).
gaaagacaccatagtcata

SEQ ID NO: 418030 - DNA, 19 bp, Homo sapiens
  siRNA target sequence for SAMD3 (NM_152552.1,49-67).
gttggttggtggagaaaaa

SEQ ID NO: 418031 - DNA, 19 bp, Homo sapiens
  siRNA target sequence for SAMD3 (NM_152552.1,53-71).
gttggtggagaaaaattta

SEQ ID NO: 418032 - DNA, 19 bp, Homo sapiens
  siRNA target sequence for SAMD3 (NM_152552.1,115-133).
ccgctcttcttgcacttaa

SEQ ID NO: 418033 - DNA, 19 bp, Homo sapiens
  siRNA target sequence for SAMD3 (NM_152552.1,116-134).
cgctcttcttgcacttaat

SEQ ID NO: 418034 - DNA, 19 bp, Homo sapiens
  siRNA target sequence for SAMD3 (NM_152552.1,144-162).
gttcagcaactggtaaaga

SEQ ID NO: 418035 - DNA, 19 bp, Homo sapiens
  siRNA target sequence for SAMD3 (NM_152552.1,223-241).
gactgaagtccccagaaaa

SEQ ID NO: 418036 - DNA, 19 bp, Homo sapiens
  siRNA target sequence for SAMD3 (NM_152552.1,252-270).
gcagccctggtcatgcaaa

SEQ ID NO: 418037 - DNA, 19 bp, Homo sapiens
  siRNA target sequence for SAMD3 (NM_152552.1,329-347).
gcagatgccatctttctat

SEQ ID NO: 418038 - DNA, 19 bp, Homo sapiens
  siRNA target sequence for SAMD3 (NM_152552.1,349-367).
cagctgaaaaccttgataa

SEQ ID NO: 418039 - DNA, 19 bp, Homo sapiens
  siRNA target sequence for SAMD3 (NM_152552.1,359-377).
ccttgataatggactaatt

SEQ ID NO: 418040 - DNA, 19 bp, Homo sapiens
  siRNA target sequence for SAMD3 (NM_152552.1,443-461).
gtggacgaagtcctatgtt

SEQ ID NO: 418041 - DNA, 19 bp, Homo sapiens
  siRNA target sequence for SAMD3 (NM_152552.1,449-467).
gaagtcctatgttttacca

SEQ ID NO: 418042 - DNA, 19 bp, Homo sapiens
  siRNA target sequence for SAMD3 (NM_152552.1,474-492).
ccctatgatgtcaaatgca

SEQ ID NO: 418043 - DNA, 19 bp, Homo sapiens
  siRNA target sequence for SAMD3 (NM_152552.1,475-493).
cctatgatgtcaaatgcat

SEQ ID NO: 418044 - DNA, 19 bp, Homo sapiens
  siRNA target sequence for SAMD3 (NM_152552.1,519-537).
cacagcatgaggataagga

SEQ ID NO: 418045 - DNA, 19 bp, Homo sapiens
  siRNA target sequence for SAMD3 (NM_152552.1,554-572).
ggccgacatgactaagtat

SEQ ID NO: 418046 - DNA, 19 bp, Homo sapiens
  siRNA target sequence for SAMD3 (NM_152552.1,605-623).
gtacaatgacgtggttaat

SEQ ID NO: 418047 - DNA, 19 bp, Homo sapiens
  siRNA target sequence for IBRDC1 (NM_152553.2,438-456).
gactccatcaagtataagt

SEQ ID NO: 418048 - DNA, 19 bp, Homo sapiens
  siRNA target sequence for IBRDC1 (NM_152553.2,442-460).
ccatcaagtataagtactt

SEQ ID NO: 418049 - DNA, 19 bp, Homo sapiens
  siRNA target sequence for IBRDC1 (NM_152553.2,464-482).
ggaacttggccgtattgat

SEQ ID NO: 418050 - DNA, 19 bp, Homo sapiens
  siRNA target sequence for IBRDC1 (NM_152553.2,596-614).
ccaattcgtctggtgtttt

SEQ ID NO: 418051 - DNA, 19 bp, Homo sapiens
  siRNA target sequence for IBRDC1 (NM_152553.2,597-615).
caattcgtctggtgtttta

SEQ ID NO: 418052 - DNA, 19 bp, Homo sapiens
  siRNA target sequence for IBRDC1 (NM_152553.2,628-646).
cttggcatgaaggtgttaa

SEQ ID NO: 418053 - DNA, 19 bp, Homo sapiens
  siRNA target sequence for IBRDC1 (NM_152553.2,782-800).
ctgctcacaatgtaacact

SEQ ID NO: 418054 - DNA, 19 bp, Homo sapiens
  siRNA target sequence for IBRDC1 (NM_152553.2,784-802).
gctcacaatgtaacactaa

SEQ ID NO: 418055 - DNA, 19 bp, Homo sapiens
  siRNA target sequence for IBRDC1 (NM_152553.2,785-803).
ctcacaatgtaacactaat

SEQ ID NO: 418056 - DNA, 19 bp, Homo sapiens
  siRNA target sequence for IBRDC1 (NM_152553.2,787-805).
cacaatgtaacactaattt

SEQ ID NO: 418057 - DNA, 19 bp, Homo sapiens
  siRNA target sequence for IBRDC1 (NM_152553.2,830-848).
ccgccagctccgatttttt

SEQ ID NO: 418058 - DNA, 19 bp, Homo sapiens
  siRNA target sequence for IBRDC1 (NM_152553.2,833-851).
ccagctccgattttttgga

SEQ ID NO: 418059 - DNA, 19 bp, Homo sapiens
  siRNA target sequence for IBRDC1 (NM_152553.2,859-877).
catcaaacctcagtatatt

SEQ ID NO: 418060 - DNA, 19 bp, Homo sapiens
  siRNA target sequence for IBRDC1 (NM_152553.2,869-887).
cagtatatttggatgcaaa

SEQ ID NO: 418061 - DNA, 19 bp, Homo sapiens
  siRNA target sequence for IBRDC1 (NM_152553.2,871-889).
gtatatttggatgcaaata

SEQ ID NO: 418062 - DNA, 19 bp, Homo sapiens
  siRNA target sequence for IBRDC1 (NM_152553.2,899-917).
cccagagagacctcattta

SEQ ID NO: 418063 - DNA, 19 bp, Homo sapiens
  siRNA target sequence for IBRDC1 (NM_152553.2,910-928).
ctcatttaaggagattagt

SEQ ID NO: 418064 - DNA, 19 bp, Homo sapiens
  siRNA target sequence for IBRDC1 (NM_152553.2,996-1014).
ggggccatagcggttgtaa

SEQ ID NO: 418065 - DNA, 19 bp, Homo sapiens
  siRNA target sequence for IBRDC1 (NM_152553.2,997-1015).
gggccatagcggttgtaat

SEQ ID NO: 418066 - DNA, 19 bp, Homo sapiens
  siRNA target sequence for IBRDC1 (NM_152553.2,1000-1018).
ccatagcggttgtaatcgt

SEQ ID NO: 418067 - DNA, 19 bp, Homo sapiens
  siRNA target sequence for IBRDC1 (NM_152553.2,1001-1019).
catagcggttgtaatcgtt

SEQ ID NO: 418068 - DNA, 19 bp, Homo sapiens
  siRNA target sequence for IBRDC1 (NM_152553.2,1097-1115).
gttgttaagtgatatgcta

SEQ ID NO: 418069 - DNA, 19 bp, Homo sapiens
  siRNA target sequence for IBRDC1 (NM_152553.2,1121-1139).
cctgaaacaagtgtttatt

SEQ ID NO: 418070 - DNA, 19 bp, Homo sapiens
  siRNA target sequence for C6orf195 (NM_152554.1,666-684).
ctacagcatgcctcagatt

SEQ ID NO: 418071 - DNA, 19 bp, Homo sapiens
  siRNA target sequence for C6orf195 (NM_152554.1,876-894).
cgtcagagggagattagca

SEQ ID NO: 418072 - DNA, 19 bp, Homo sapiens
  siRNA target sequence for C6orf195 (NM_152554.1,881-899).
gagggagattagcaatgaa

SEQ ID NO: 418073 - DNA, 19 bp, Homo sapiens
  siRNA target sequence for FLJ31818 (NM_152556.1,290-308).
ggagattttgataagatct

SEQ ID NO: 418074 - DNA, 19 bp, Homo sapiens
  siRNA target sequence for FLJ31818 (NM_152556.1,342-360).
gtgaatatgccgttgcaat

SEQ ID NO: 418075 - DNA, 19 bp, Homo sapiens
  siRNA target sequence for FLJ31818 (NM_152556.1,400-418).
gggcgaaggtcgtattgaa

SEQ ID NO: 418076 - DNA, 19 bp, Homo sapiens
  siRNA target sequence for FLJ31818 (NM_152556.1,401-419).
ggcgaaggtcgtattgaat

SEQ ID NO: 418077 - DNA, 19 bp, Homo sapiens
  siRNA target sequence for FLJ31818 (NM_152556.1,494-512).
gctgtacttgccactaaga

SEQ ID NO: 418078 - DNA, 19 bp, Homo sapiens
  siRNA target sequence for FLJ31818 (NM_152556.1,511-529).
gaccactccagccttaaat

SEQ ID NO: 418079 - DNA, 19 bp, Homo sapiens
  siRNA target sequence for FLJ31818 (NM_152556.1,516-534).
ctccagccttaaatatgca

SEQ ID NO: 418080 - DNA, 19 bp, Homo sapiens
  siRNA target sequence for FLJ31818 (NM_152556.1,532-550).
gcatgagtcttctcaactt

SEQ ID NO: 418081 - DNA, 19 bp, Homo sapiens
  siRNA target sequence for FLJ31818 (NM_152556.1,635-653).
gatgttggcagctgcttta

SEQ ID NO: 418082 - DNA, 19 bp, Homo sapiens
  siRNA target sequence for FLJ31818 (NM_152556.1,648-666).
gctttaacccatttctgaa

SEQ ID NO: 418083 - DNA, 19 bp, Homo sapiens
  siRNA target sequence for FLJ31818 (NM_152556.1,680-698).
ctaactgttggcatagata

SEQ ID NO: 418084 - DNA, 19 bp, Homo sapiens
  siRNA target sequence for FLJ31818 (NM_152556.1,684-702).
ctgttggcatagatattgt

SEQ ID NO: 418085 - DNA, 19 bp, Homo sapiens
  siRNA target sequence for FLJ31818 (NM_152556.1,707-725).
gctgtagagagtgtctata

SEQ ID NO: 418086 - DNA, 19 bp, Homo sapiens
  siRNA target sequence for FLJ31818 (NM_152556.1,710-728).
gtagagagtgtctataaat

SEQ ID NO: 418087 - DNA, 19 bp, Homo sapiens
  siRNA target sequence for FLJ31413 (NM_152557.2,457-475).
gcctccacggaagatgtaa

SEQ ID NO: 418088 - DNA, 19 bp, Homo sapiens
  siRNA target sequence for FLJ31413 (NM_152557.2,458-476).
cctccacggaagatgtaaa

SEQ ID NO: 418089 - DNA, 19 bp, Homo sapiens
  siRNA target sequence for FLJ31413 (NM_152557.2,459-477).
ctccacggaagatgtaaaa

SEQ ID NO: 418090 - DNA, 19 bp, Homo sapiens
  siRNA target sequence for FLJ31413 (NM_152557.2,760-778).
gtccggtggggctggaatt

SEQ ID NO: 418091 - DNA, 19 bp, Homo sapiens
  siRNA target sequence for FLJ31413 (NM_152557.2,771-789).
ctggaatttccggtgtaaa

SEQ ID NO: 418092 - DNA, 19 bp, Homo sapiens
  siRNA target sequence for KIAA1023 (NM_152558.1,75-93).
gacacgagtcaccttatct

SEQ ID NO: 418093 - DNA, 19 bp, Homo sapiens
  siRNA target sequence for KIAA1023 (NM_152558.1,324-342).
gatatgtatgacgagatta

SEQ ID NO: 418094 - DNA, 19 bp, Homo sapiens
  siRNA target sequence for KIAA1023 (NM_152558.1,333-351).
gacgagattattgagttaa

SEQ ID NO: 418095 - DNA, 19 bp, Homo sapiens
  siRNA target sequence for KIAA1023 (NM_152558.1,510-528).
gatgccagttgggtcatta

SEQ ID NO: 418096 - DNA, 19 bp, Homo sapiens
  siRNA target sequence for KIAA1023 (NM_152558.1,600-618).
cagaccgatatgaagacta

SEQ ID NO: 418097 - DNA, 19 bp, Homo sapiens
  siRNA target sequence for KIAA1023 (NM_152558.1,637-655).
ggatcgccatggagacata

SEQ ID NO: 418098 - DNA, 19 bp, Homo sapiens
  siRNA target sequence for KIAA1023 (NM_152558.1,684-702).
ctcttggcaagttctgaaa

SEQ ID NO: 418099 - DNA, 19 bp, Homo sapiens
  siRNA target sequence for KIAA1023 (NM_152558.1,945-963).
gtgatggagagctcaaaat

SEQ ID NO: 418100 - DNA, 19 bp, Homo sapiens
  siRNA target sequence for KIAA1023 (NM_152558.1,1223-1241).
gcgagaggaggttttgaga

SEQ ID NO: 418101 - DNA, 19 bp, Homo sapiens
  siRNA target sequence for KIAA1023 (NM_152558.1,1242-1260).
gaggagattcagacactta

SEQ ID NO: 418102 - DNA, 19 bp, Homo sapiens
  siRNA target sequence for KIAA1023 (NM_152558.1,1312-1330).
gcccggaagttcctcataa

SEQ ID NO: 418103 - DNA, 19 bp, Homo sapiens
  siRNA target sequence for KIAA1023 (NM_152558.1,1566-1584).
cggacaaagctcttagcaa

SEQ ID NO: 418104 - DNA, 19 bp, Homo sapiens
  siRNA target sequence for KIAA1023 (NM_152558.1,1752-1770).
cacagtgctaccggtaaaa

SEQ ID NO: 418105 - DNA, 19 bp, Homo sapiens
  siRNA target sequence for KIAA1023 (NM_152558.1,1754-1772).
cagtgctaccggtaaaaga

SEQ ID NO: 418106 - DNA, 19 bp, Homo sapiens
  siRNA target sequence for KIAA1023 (NM_152558.1,1908-1926).
gacgtcaactccgatgatt

SEQ ID NO: 418107 - DNA, 19 bp, Homo sapiens
  siRNA target sequence for KIAA1023 (NM_152558.1,1918-1936).
ccgatgattccgacgatat

SEQ ID NO: 418108 - DNA, 19 bp, Homo sapiens
  siRNA target sequence for KIAA1023 (NM_152558.1,1923-1941).
gattccgacgatattgtca

SEQ ID NO: 418109 - DNA, 19 bp, Homo sapiens
  siRNA target sequence for WBSCR27 (NM_152559.2,489-507).
cgatacctgagctacatgt

SEQ ID NO: 418110 - DNA, 19 bp, Homo sapiens
  siRNA target sequence for WBSCR27 (NM_152559.2,552-570).
cgtccaaccttcaatacaa

SEQ ID NO: 418111 - DNA, 19 bp, Homo sapiens
  siRNA target sequence for C9orf66 (NM_152569.1,704-722).
gcgtcttacctgttgatct

SEQ ID NO: 418112 - DNA, 19 bp, Homo sapiens
  siRNA target sequence for FLJ31810 (NM_152570.1,653-671).
gcttcacacggccatatca

SEQ ID NO: 418113 - DNA, 19 bp, Homo sapiens
  siRNA target sequence for FLJ31810 (NM_152570.1,654-672).
cttcacacggccatatcat

SEQ ID NO: 418114 - DNA, 19 bp, Homo sapiens
  siRNA target sequence for FLJ31810 (NM_152570.1,690-708).
ggtctggctgtggtgttaa

SEQ ID NO: 418115 - DNA, 19 bp, Homo sapiens
  siRNA target sequence for FLJ31810 (NM_152570.1,691-709).
gtctggctgtggtgttaat

SEQ ID NO: 418116 - DNA, 19 bp, Homo sapiens
  siRNA target sequence for FLJ31810 (NM_152570.1,756-774).
gcccagaacaaatctgtta

SEQ ID NO: 418117 - DNA, 19 bp, Homo sapiens
  siRNA target sequence for FLJ31810 (NM_152570.1,778-796).
gtcacagaaggcgattgat

SEQ ID NO: 418118 - DNA, 19 bp, Homo sapiens
  siRNA target sequence for FLJ31810 (NM_152570.1,816-834).
cccatcgaaaccaaaatct

SEQ ID NO: 418119 - DNA, 19 bp, Homo sapiens
  siRNA target sequence for FLJ31810 (NM_152570.1,817-835).
ccatcgaaaccaaaatctt

SEQ ID NO: 418120 - DNA, 19 bp, Homo sapiens
  siRNA target sequence for FLJ31810 (NM_152570.1,862-880).
gcgtcaaccctgaagaatt

SEQ ID NO: 418121 - DNA, 19 bp, Homo sapiens
  siRNA target sequence for FLJ31810 (NM_152570.1,864-882).
gtcaaccctgaagaattca

SEQ ID NO: 418122 - DNA, 19 bp, Homo sapiens
  siRNA target sequence for FLJ31810 (NM_152570.1,909-927).
gacttgagtgacaacatca

SEQ ID NO: 418123 - DNA, 19 bp, Homo sapiens
  siRNA target sequence for FLJ31810 (NM_152570.1,939-957).
gaaccaggagcattcaaca

SEQ ID NO: 418124 - DNA, 19 bp, Homo sapiens
  siRNA target sequence for FLJ31810 (NM_152570.1,943-961).
caggagcattcaacaatct

SEQ ID NO: 418125 - DNA, 19 bp, Homo sapiens
  siRNA target sequence for FLJ31810 (NM_152570.1,945-963).
ggagcattcaacaatctct

SEQ ID NO: 418126 - DNA, 19 bp, Homo sapiens
  siRNA target sequence for FLJ31810 (NM_152570.1,971-989).
gcgttccctccgcctaaaa

SEQ ID NO: 418127 - DNA, 19 bp, Homo sapiens
  siRNA target sequence for FLJ31810 (NM_152570.1,1008-1026).
gtccctttgggagtattca

SEQ ID NO: 418128 - DNA, 19 bp, Homo sapiens
  siRNA target sequence for FLJ31810 (NM_152570.1,1043-1061).
cactaagcttgacattagt

SEQ ID NO: 418129 - DNA, 19 bp, Homo sapiens
  siRNA target sequence for FLJ31810 (NM_152570.1,1091-1109).
catgttccaagatctacat

SEQ ID NO: 418130 - DNA, 19 bp, Homo sapiens
  siRNA target sequence for FLJ31810 (NM_152570.1,1125-1143).
gaagtgggggacaatgatt

SEQ ID NO: 418131 - DNA, 19 bp, Homo sapiens
  siRNA target sequence for FLJ31810 (NM_152570.1,1130-1148).
gggggacaatgatttggtt

SEQ ID NO: 418132 - DNA, 19 bp, Homo sapiens
  siRNA target sequence for FLJ31810 (NM_152570.1,1133-1151).
ggacaatgatttggtttat

SEQ ID NO: 418133 - DNA, 19 bp, Homo sapiens
  siRNA target sequence for FLJ31810 (NM_152570.1,1134-1152).
gacaatgatttggtttata

SEQ ID NO: 418134 - DNA, 19 bp, Homo sapiens
  siRNA target sequence for FLJ31810 (NM_152570.1,1298-1316).
gcctgtgtatgcctttaaa

SEQ ID NO: 418135 - DNA, 19 bp, Homo sapiens
  siRNA target sequence for FLJ31810 (NM_152570.1,1302-1320).
gtgtatgcctttaaaagat

SEQ ID NO: 418136 - DNA, 19 bp, Homo sapiens
  siRNA target sequence for FLJ31810 (NM_152570.1,1335-1353).
cacctagagattgactatt

SEQ ID NO: 418137 - DNA, 19 bp, Homo sapiens
  siRNA target sequence for FLJ31810 (NM_152570.1,1453-1471).
cctttaaacacctggtata

SEQ ID NO: 418138 - DNA, 19 bp, Homo sapiens
  siRNA target sequence for FLJ31810 (NM_152570.1,1689-1707).
ctggaggtcttgagcatta

SEQ ID NO: 418139 - DNA, 19 bp, Homo sapiens
  siRNA target sequence for FLJ31810 (NM_152570.1,1692-1710).
gaggtcttgagcattaaca

SEQ ID NO: 418140 - DNA, 19 bp, Homo sapiens
  siRNA target sequence for FLJ31810 (NM_152570.1,1695-1713).
gtcttgagcattaacaaca

SEQ ID NO: 418141 - DNA, 19 bp, Homo sapiens
  siRNA target sequence for FLJ31810 (NM_152570.1,1901-1919).
gcagcatctgctagtagat

SEQ ID NO: 418142 - DNA, 19 bp, Homo sapiens
  siRNA target sequence for FLJ31810 (NM_152570.1,1926-1944).
cagacagtccagctagaat

SEQ ID NO: 418143 - DNA, 19 bp, Homo sapiens
  siRNA target sequence for FLJ31810 (NM_152570.1,1959-1977).
gacccgcagcctgtgattt

SEQ ID NO: 418144 - DNA, 19 bp, Homo sapiens
  siRNA target sequence for FLJ31810 (NM_152570.1,1987-2005).
caccccgaaggcgtttcat

SEQ ID NO: 418145 - DNA, 19 bp, Homo sapiens
  siRNA target sequence for FLJ31810 (NM_152570.1,2079-2097).
gacagcgggatgtatgttt

SEQ ID NO: 418146 - DNA, 19 bp, Homo sapiens
  siRNA target sequence for FLJ31810 (NM_152570.1,2083-2101).
gcgggatgtatgtttgcat

SEQ ID NO: 418147 - DNA, 19 bp, Homo sapiens
  siRNA target sequence for FLJ31810 (NM_152570.1,2108-2126).
caatgctgctgggaatgat

SEQ ID NO: 418148 - DNA, 19 bp, Homo sapiens
  siRNA target sequence for FLJ31810 (NM_152570.1,2150-2168).
gaaaggattcgcttcagat

SEQ ID NO: 418149 - DNA, 19 bp, Homo sapiens
  siRNA target sequence for FLJ31810 (NM_152570.1,2155-2173).
gattcgcttcagatcgttt

SEQ ID NO: 418150 - DNA, 19 bp, Homo sapiens
  siRNA target sequence for FLJ31810 (NM_152570.1,2159-2177).
cgcttcagatcgttttctt

SEQ ID NO: 418151 - DNA, 19 bp, Homo sapiens
  siRNA target sequence for FLJ31810 (NM_152570.1,2161-2179).
cttcagatcgttttcttta

SEQ ID NO: 418152 - DNA, 19 bp, Homo sapiens
  siRNA target sequence for FLJ31810 (NM_152570.1,2182-2200).
cgaacaggacccctatgta

SEQ ID NO: 418153 - DNA, 19 bp, Homo sapiens
  siRNA target sequence for FLJ31810 (NM_152570.1,2208-2226).
gactccaatgacaccattt

SEQ ID NO: 418154 - DNA, 19 bp, Homo sapiens
  siRNA target sequence for FLJ31810 (NM_152570.1,2232-2250).
ggcaccaatgccaatactt

SEQ ID NO: 418155 - DNA, 19 bp, Homo sapiens
  siRNA target sequence for FLJ31810 (NM_152570.1,2233-2251).
gcaccaatgccaatacttt

SEQ ID NO: 418156 - DNA, 19 bp, Homo sapiens
  siRNA target sequence for FLJ31810 (NM_152570.1,2255-2273).
cctggaccttaaaacaata

SEQ ID NO: 418157 - DNA, 19 bp, Homo sapiens
  siRNA target sequence for FLJ31810 (NM_152570.1,2307-2325).
ctgggagtggttttatttt

SEQ ID NO: 418158 - DNA, 19 bp, Homo sapiens
  siRNA target sequence for FLJ31810 (NM_152570.1,2377-2395).
gcattgaccttgagtatgt

SEQ ID NO: 418159 - DNA, 19 bp, Homo sapiens
  siRNA target sequence for FLJ31810 (NM_152570.1,2440-2458).
gacccaggaggttcaacat

SEQ ID NO: 418160 - DNA, 19 bp, Homo sapiens
  siRNA target sequence for FLJ31810 (NM_152570.1,2446-2464).
ggaggttcaacatgaaaat

SEQ ID NO: 418161 - DNA, 19 bp, Homo sapiens
  siRNA target sequence for FLJ36779 (NM_152571.1,512-530).
caatctgctcagctaacat

SEQ ID NO: 418162 - DNA, 19 bp, Homo sapiens
  siRNA target sequence for FLJ36779 (NM_152571.1,533-551).
gcctttcaggagtcagatt

SEQ ID NO: 418163 - DNA, 19 bp, Homo sapiens
  siRNA target sequence for FLJ36779 (NM_152571.1,655-673).
cgcggaaggaggtgtcatt

SEQ ID NO: 418164 - DNA, 19 bp, Homo sapiens
  siRNA target sequence for FLJ36779 (NM_152571.1,742-760).
ccgctcgcgagttcaaaga

SEQ ID NO: 418165 - DNA, 19 bp, Homo sapiens
  siRNA target sequence for FLJ36779 (NM_152571.1,743-761).
cgctcgcgagttcaaagaa

SEQ ID NO: 418166 - DNA, 19 bp, Homo sapiens
  siRNA target sequence for MGC24103 (NM_152576.1,473-491).
gcaaactaagagttgatgt

SEQ ID NO: 418167 - DNA, 19 bp, Homo sapiens
  siRNA target sequence for MGC24103 (NM_152576.1,492-510).
gtttgatcaggttagtgaa

SEQ ID NO: 418168 - DNA, 19 bp, Homo sapiens
  siRNA target sequence for FLJ25735 (NM_152577.1,97-115).
gaagggaagtactactcta

SEQ ID NO: 418169 - DNA, 19 bp, Homo sapiens
  siRNA target sequence for FLJ25735 (NM_152577.1,160-178).
cgttggggggacattaaga

SEQ ID NO: 418170 - DNA, 19 bp, Homo sapiens
  siRNA target sequence for FLJ25735 (NM_152577.1,164-182).
ggggggacattaagataaa

SEQ ID NO: 418171 - DNA, 19 bp, Homo sapiens
  siRNA target sequence for FLJ25735 (NM_152577.1,193-211).
gaaaaggatgatttaccaa

SEQ ID NO: 418172 - DNA, 19 bp, Homo sapiens
  siRNA target sequence for FLJ25735 (NM_152577.1,293-311).
gtgctaatttatatgacaa

SEQ ID NO: 418173 - DNA, 19 bp, Homo sapiens
  siRNA target sequence for FLJ25735 (NM_152577.1,309-327).
caaagtcggatataaagta

SEQ ID NO: 418174 - DNA, 19 bp, Homo sapiens
  siRNA target sequence for FLJ25735 (NM_152577.1,341-359).
gttatcctgtgctgagaat

SEQ ID NO: 418175 - DNA, 19 bp, Homo sapiens
  siRNA target sequence for FLJ25735 (NM_152577.1,354-372).
gagaattgaggcgcataaa

SEQ ID NO: 418176 - DNA, 19 bp, Homo sapiens
  siRNA target sequence for FLJ25735 (NM_152577.1,423-441).
cttgtctcagaaaagctta

SEQ ID NO: 418177 - DNA, 19 bp, Homo sapiens
  siRNA target sequence for FLJ25735 (NM_152577.1,468-486).
gagagctcgaaaacaagtt

SEQ ID NO: 418178 - DNA, 19 bp, Homo sapiens
  siRNA target sequence for FLJ25735 (NM_152577.1,488-506).
ccagcgcttcgcttgaaaa

SEQ ID NO: 418179 - DNA, 19 bp, Homo sapiens
  siRNA target sequence for FLJ25735 (NM_152577.1,491-509).
gcgcttcgcttgaaaaagt

SEQ ID NO: 418180 - DNA, 19 bp, Homo sapiens
  siRNA target sequence for FLJ25735 (NM_152577.1,492-510).
cgcttcgcttgaaaaagtt

SEQ ID NO: 418181 - DNA, 19 bp, Homo sapiens
  siRNA target sequence for FLJ25735 (NM_152577.1,524-542).
ctccgccacaaactgaaat

SEQ ID NO: 418182 - DNA, 19 bp, Homo sapiens
  siRNA target sequence for FLJ25735 (NM_152577.1,526-544).
ccgccacaaactgaaatct

SEQ ID NO: 418183 - DNA, 19 bp, Homo sapiens
  siRNA target sequence for FLJ25735 (NM_152577.1,543-561).
ctctgacatccctaaaaga

SEQ ID NO: 418184 - DNA, 19 bp, Homo sapiens
  siRNA target sequence for FLJ25735 (NM_152577.1,545-563).
ctgacatccctaaaagact

SEQ ID NO: 418185 - DNA, 19 bp, Homo sapiens
  siRNA target sequence for FLJ25735 (NM_152577.1,565-583).
caagacagggaccatctaa

SEQ ID NO: 418186 - DNA, 19 bp, Homo sapiens
  siRNA target sequence for FLJ25735 (NM_152577.1,572-590).
gggaccatctaagctatat

SEQ ID NO: 418187 - DNA, 19 bp, Homo sapiens
  siRNA target sequence for FLJ25735 (NM_152577.1,573-591).
ggaccatctaagctatatt

SEQ ID NO: 418188 - DNA, 19 bp, Homo sapiens
  siRNA target sequence for FLJ25735 (NM_152577.1,623-641).
cgtctgtgcaacatatgct

SEQ ID NO: 418189 - DNA, 19 bp, Homo sapiens
  siRNA target sequence for FLJ25735 (NM_152577.1,624-642).
gtctgtgcaacatatgcta

SEQ ID NO: 418190 - DNA, 19 bp, Homo sapiens
  siRNA target sequence for FLJ25735 (NM_152577.1,639-657).
gctacaagagcaacataat

SEQ ID NO: 418191 - DNA, 19 bp, Homo sapiens
  siRNA target sequence for FLJ25735 (NM_152577.1,685-703).
cccccagaactatctctaa

SEQ ID NO: 418192 - DNA, 19 bp, Homo sapiens
  siRNA target sequence for FLJ25735 (NM_152577.1,687-705).
cccagaactatctctaagt

SEQ ID NO: 418193 - DNA, 19 bp, Homo sapiens
  siRNA target sequence for FLJ25735 (NM_152577.1,689-707).
cagaactatctctaagtct

SEQ ID NO: 418194 - DNA, 19 bp, Homo sapiens
  siRNA target sequence for FLJ25735 (NM_152577.1,721-739).
cagtgggaaaccgttagta

SEQ ID NO: 418195 - DNA, 19 bp, Homo sapiens
  siRNA target sequence for FLJ25735 (NM_152577.1,723-741).
gtgggaaaccgttagtatt

SEQ ID NO: 418196 - DNA, 19 bp, Homo sapiens
  siRNA target sequence for FLJ25735 (NM_152577.1,725-743).
gggaaaccgttagtatttt

SEQ ID NO: 418197 - DNA, 19 bp, Homo sapiens
  siRNA target sequence for FLJ25735 (NM_152577.1,726-744).
ggaaaccgttagtattttt

SEQ ID NO: 418198 - DNA, 19 bp, Homo sapiens
  siRNA target sequence for FLJ25735 (NM_152577.1,727-745).
gaaaccgttagtattttta

SEQ ID NO: 418199 - DNA, 19 bp, Homo sapiens
  siRNA target sequence for FLJ25735 (NM_152577.1,737-755).
gtatttttacgagaaaaca

SEQ ID NO: 418200 - DNA, 19 bp, Homo sapiens
  siRNA target sequence for FLJ25735 (NM_152577.1,746-764).
cgagaaaacatggcaattt

SEQ ID NO: 418201 - DNA, 19 bp, Homo sapiens
  siRNA target sequence for FLJ25735 (NM_152577.1,811-829).
ccaacacctcccgactatt

SEQ ID NO: 418202 - DNA, 19 bp, Homo sapiens
  siRNA target sequence for FLJ25735 (NM_152577.1,812-830).
caacacctcccgactatta

SEQ ID NO: 418203 - DNA, 19 bp, Homo sapiens
  siRNA target sequence for FLJ25735 (NM_152577.1,861-879).
gtcccctcatcatattata

SEQ ID NO: 418204 - DNA, 19 bp, Homo sapiens
  siRNA target sequence for FLJ25735 (NM_152577.1,1011-1029).
cgatccatcatctggatat

SEQ ID NO: 418205 - DNA, 19 bp, Homo sapiens
  siRNA target sequence for FLJ25735 (NM_152577.1,1012-1030).
gatccatcatctggatata

SEQ ID NO: 418206 - DNA, 19 bp, Homo sapiens
  siRNA target sequence for FLJ25735 (NM_152577.1,1042-1060).
gtgccacctgatatgaatt

SEQ ID NO: 418207 - DNA, 19 bp, Homo sapiens
  siRNA target sequence for FLJ25735 (NM_152577.1,1044-1062).
gccacctgatatgaattct

SEQ ID NO: 418208 - DNA, 19 bp, Homo sapiens
  siRNA target sequence for FLJ25735 (NM_152577.1,1072-1090).
cgtgctccccagtctcaaa

SEQ ID NO: 418209 - DNA, 19 bp, Homo sapiens
  siRNA target sequence for FLJ25735 (NM_152577.1,1073-1091).
gtgctccccagtctcaaaa

SEQ ID NO: 418210 - DNA, 19 bp, Homo sapiens
  siRNA target sequence for FLJ25735 (NM_152577.1,1078-1096).
ccccagtctcaaaatggta

SEQ ID NO: 418211 - DNA, 19 bp, Homo sapiens
  siRNA target sequence for FLJ25735 (NM_152577.1,1125-1143).
ccattataaccttaacatt

SEQ ID NO: 418212 - DNA, 19 bp, Homo sapiens
  siRNA target sequence for FLJ25735 (NM_152577.1,1148-1166).
ctcagttcaccgaaaatca

SEQ ID NO: 418213 - DNA, 19 bp, Homo sapiens
  siRNA target sequence for FLJ25735 (NM_152577.1,1278-1296).
cctacatggtcgatcacat

SEQ ID NO: 418214 - DNA, 19 bp, Homo sapiens
  siRNA target sequence for FLJ25735 (NM_152577.1,1286-1304).
gtcgatcacatcattcaca

SEQ ID NO: 418215 - DNA, 19 bp, Homo sapiens
  siRNA target sequence for FLJ25736 (NM_152578.1,128-146).
catgcgtgtggctcactta

SEQ ID NO: 418216 - DNA, 19 bp, Homo sapiens
  siRNA target sequence for FLJ25736 (NM_152578.1,143-161).
cttagagctggcaacttat

SEQ ID NO: 418217 - DNA, 19 bp, Homo sapiens
  siRNA target sequence for FLJ25736 (NM_152578.1,147-165).
gagctggcaacttatgagt

SEQ ID NO: 418218 - DNA, 19 bp, Homo sapiens
  siRNA target sequence for FLJ25736 (NM_152578.1,244-262).
ggcgggaatctctaaagat

SEQ ID NO: 418219 - DNA, 19 bp, Homo sapiens
  siRNA target sequence for FLJ25736 (NM_152578.1,346-364).
gctccgggtcctcatattt

SEQ ID NO: 418220 - DNA, 19 bp, Homo sapiens
  siRNA target sequence for FLJ25736 (NM_152578.1,386-404).
cctgcccaacagtgaaaat

SEQ ID NO: 418221 - DNA, 19 bp, Homo sapiens
  siRNA target sequence for FLJ25736 (NM_152578.1,508-526).
gtaatgagctgcaagatct

SEQ ID NO: 418222 - DNA, 19 bp, Homo sapiens
  siRNA target sequence for FLJ25736 (NM_152578.1,522-540).
gatcttagtgagagtgaat

SEQ ID NO: 418223 - DNA, 19 bp, Homo sapiens
  siRNA target sequence for FLJ25736 (NM_152578.1,572-590).
ggggaccacgagcttcaaa

SEQ ID NO: 418224 - DNA, 19 bp, Homo sapiens
  siRNA target sequence for FLJ25736 (NM_152578.1,573-591).
gggaccacgagcttcaaat

SEQ ID NO: 418225 - DNA, 19 bp, Homo sapiens
  siRNA target sequence for FLJ25736 (NM_152578.1,575-593).
gaccacgagcttcaaatgt

SEQ ID NO: 418226 - DNA, 19 bp, Homo sapiens
  siRNA target sequence for FLJ25736 (NM_152578.1,577-595).
ccacgagcttcaaatgttt

SEQ ID NO: 418227 - DNA, 19 bp, Homo sapiens
  siRNA target sequence for FLJ25736 (NM_152578.1,607-625).
gagatgtgcctaaacagat

SEQ ID NO: 418228 - DNA, 19 bp, Homo sapiens
  siRNA target sequence for FLJ25736 (NM_152578.1,615-633).
cctaaacagatgatgcaaa

SEQ ID NO: 418229 - DNA, 19 bp, Homo sapiens
  siRNA target sequence for FLJ25736 (NM_152578.1,646-664).
gtgcgatcagccttatcct

SEQ ID NO: 418230 - DNA, 19 bp, Homo sapiens
  siRNA target sequence for FLJ25736 (NM_152578.1,742-760).
gagttgtaacgggtttgaa

SEQ ID NO: 418231 - DNA, 19 bp, Homo sapiens
  siRNA target sequence for FLJ25736 (NM_152578.1,744-762).
gttgtaacgggtttgaaga

SEQ ID NO: 418232 - DNA, 19 bp, Homo sapiens
  siRNA target sequence for FLJ38564 (NM_152579.1,291-309).
catctggcctatattgtct

SEQ ID NO: 418233 - DNA, 19 bp, Homo sapiens
  siRNA target sequence for FLJ38564 (NM_152579.1,318-336).
gccatggctccaatgtaaa

SEQ ID NO: 418234 - DNA, 19 bp, Homo sapiens
  siRNA target sequence for FLJ38564 (NM_152579.1,323-341).
ggctccaatgtaaagtaca

SEQ ID NO: 418235 - DNA, 19 bp, Homo sapiens
  siRNA target sequence for FLJ38564 (NM_152579.1,324-342).
gctccaatgtaaagtacat

SEQ ID NO: 418236 - DNA, 19 bp, Homo sapiens
  siRNA target sequence for FLJ38564 (NM_152579.1,507-525).
ccagagtaatggaagaact

SEQ ID NO: 418237 - DNA, 19 bp, Homo sapiens
  siRNA target sequence for FLJ38564 (NM_152579.1,508-526).
cagagtaatggaagaactt

SEQ ID NO: 418238 - DNA, 19 bp, Homo sapiens
  siRNA target sequence for FLJ38564 (NM_152579.1,517-535).
ggaagaacttaacttacta

SEQ ID NO: 418239 - DNA, 19 bp, Homo sapiens
  siRNA target sequence for FLJ38564 (NM_152579.1,639-657).
ggacagtaggatcacatta

SEQ ID NO: 418240 - DNA, 19 bp, Homo sapiens
  siRNA target sequence for FLJ38564 (NM_152579.1,640-658).
gacagtaggatcacattat

SEQ ID NO: 418241 - DNA, 19 bp, Homo sapiens
  siRNA target sequence for FLJ38564 (NM_152579.1,669-687).
gtcatagggattcgatttt

SEQ ID NO: 418242 - DNA, 19 bp, Homo sapiens
  siRNA target sequence for FLJ38564 (NM_152579.1,675-693).
gggattcgatttttcttat

SEQ ID NO: 418243 - DNA, 19 bp, Homo sapiens
  siRNA target sequence for FLJ32742 (NM_152580.1,348-366).
cccaggtgctgtaatctct

SEQ ID NO: 418244 - DNA, 19 bp, Homo sapiens
  siRNA target sequence for FLJ32742 (NM_152580.1,349-367).
ccaggtgctgtaatctctt

SEQ ID NO: 418245 - DNA, 19 bp, Homo sapiens
  siRNA target sequence for FLJ32742 (NM_152580.1,369-387).
cttggtttcccaatctctt

SEQ ID NO: 418246 - DNA, 19 bp, Homo sapiens
  siRNA target sequence for FLJ32742 (NM_152580.1,372-390).
ggtttcccaatctcttgta

SEQ ID NO: 418247 - DNA, 19 bp, Homo sapiens
  siRNA target sequence for FLJ32742 (NM_152580.1,373-391).
gtttcccaatctcttgtaa

SEQ ID NO: 418248 - DNA, 19 bp, Homo sapiens
  siRNA target sequence for FLJ32742 (NM_152580.1,377-395).
cccaatctcttgtaaaggt

SEQ ID NO: 418249 - DNA, 19 bp, Homo sapiens
  siRNA target sequence for FLJ32742 (NM_152580.1,402-420).
gtgcatgaataattgttca

SEQ ID NO: 418250 - DNA, 19 bp, Homo sapiens
  siRNA target sequence for FLJ32742 (NM_152580.1,416-434).
gttcaaatggaagtttttt

SEQ ID NO: 418251 - DNA, 19 bp, Homo sapiens
  siRNA target sequence for FLJ32742 (NM_152580.1,486-504).
ccccagtatggtccattta

SEQ ID NO: 418252 - DNA, 19 bp, Homo sapiens
  siRNA target sequence for FLJ32742 (NM_152580.1,487-505).
cccagtatggtccatttaa

SEQ ID NO: 418253 - DNA, 19 bp, Homo sapiens
  siRNA target sequence for FLJ32742 (NM_152580.1,588-606).
gcaagaccctacatggttt

SEQ ID NO: 418254 - DNA, 19 bp, Homo sapiens
  siRNA target sequence for MGC40053 (NM_152583.1,223-241).
gctgcagggcttaagatca

SEQ ID NO: 418255 - DNA, 19 bp, Homo sapiens
  siRNA target sequence for MGC40053 (NM_152583.1,324-342).
ggaactgcctcggatcatt

SEQ ID NO: 418256 - DNA, 19 bp, Homo sapiens
  siRNA target sequence for MGC40053 (NM_152583.1,443-461).
ccgagtgcgctctaccata

SEQ ID NO: 418257 - DNA, 19 bp, Homo sapiens
  siRNA target sequence for MGC40053 (NM_152583.1,447-465).
gtgcgctctaccatacctt

SEQ ID NO: 418258 - DNA, 19 bp, Homo sapiens
  siRNA target sequence for MGC40053 (NM_152583.1,463-481).
cttgttcgtgcttttagca

SEQ ID NO: 418259 - DNA, 19 bp, Homo sapiens
  siRNA target sequence for MGC40053 (NM_152583.1,554-572).
gctactacatttacaaatt

SEQ ID NO: 418260 - DNA, 19 bp, Homo sapiens
  siRNA target sequence for MGC40053 (NM_152583.1,600-618).
gactcttgccagaaatgga

SEQ ID NO: 418261 - DNA, 19 bp, Homo sapiens
  siRNA target sequence for MGC40053 (NM_152583.1,705-723).
cgagattggagcagaaact

SEQ ID NO: 418262 - DNA, 19 bp, Homo sapiens
  siRNA target sequence for MGC40053 (NM_152583.1,817-835).
gcagagccagagactcaat

SEQ ID NO: 418263 - DNA, 19 bp, Homo sapiens
  siRNA target sequence for MGC40053 (NM_152583.1,950-968).
ctgaggctggcaaaatagt

SEQ ID NO: 418264 - DNA, 19 bp, Homo sapiens
  siRNA target sequence for MGC40053 (NM_152583.1,952-970).
gaggctggcaaaatagtta

SEQ ID NO: 418265 - DNA, 19 bp, Homo sapiens
  siRNA target sequence for MGC40053 (NM_152583.1,988-1006).
cagaccaaggctaaagctt

SEQ ID NO: 418266 - DNA, 19 bp, Homo sapiens
  siRNA target sequence for MGC40053 (NM_152583.1,1067-1085).
ctcatatattggctgaaaa

SEQ ID NO: 418267 - DNA, 19 bp, Homo sapiens
  siRNA target sequence for MGC40053 (NM_152583.1,1091-1109).
cagagattaacagagtaat

SEQ ID NO: 418268 - DNA, 19 bp, Homo sapiens
  siRNA target sequence for MGC40053 (NM_152583.1,1095-1113).
gattaacagagtaatggtt

SEQ ID NO: 418269 - DNA, 19 bp, Homo sapiens
  siRNA target sequence for MGC40053 (NM_152583.1,1164-1182).
cacgaacaagactggaatt

SEQ ID NO: 418270 - DNA, 19 bp, Homo sapiens
  siRNA target sequence for MGC40053 (NM_152583.1,1166-1184).
cgaacaagactggaattgt

SEQ ID NO: 418271 - DNA, 19 bp, Homo sapiens
  siRNA target sequence for MGC40053 (NM_152583.1,1178-1196).
gaattgtggatgaaaccaa

SEQ ID NO: 418272 - DNA, 19 bp, Homo sapiens
  siRNA target sequence for MGC40053 (NM_152583.1,1232-1250).
gagcattccctagtaaaaa

SEQ ID NO: 418273 - DNA, 19 bp, Homo sapiens
  siRNA target sequence for C10orf29 (NM_152586.2,2190-2208).
gagtcacactcatcactat

SEQ ID NO: 418274 - DNA, 19 bp, Homo sapiens
  siRNA target sequence for C10orf29 (NM_152586.2,2269-2287).
cttcggttgaagtagacaa

SEQ ID NO: 418275 - DNA, 19 bp, Homo sapiens
  siRNA target sequence for C10orf29 (NM_152586.2,2272-2290).
cggttgaagtagacaacat

SEQ ID NO: 418276 - DNA, 19 bp, Homo sapiens
  siRNA target sequence for C10orf29 (NM_152586.2,2302-2320).
cattccacaggcaaggttt

SEQ ID NO: 418277 - DNA, 19 bp, Homo sapiens
  siRNA target sequence for C10orf29 (NM_152586.2,2306-2324).
ccacaggcaaggtttacct

SEQ ID NO: 418278 - DNA, 19 bp, Homo sapiens
  siRNA target sequence for C10orf29 (NM_152586.2,2307-2325).
cacaggcaaggtttaccta

SEQ ID NO: 418279 - DNA, 19 bp, Homo sapiens
  siRNA target sequence for C10orf29 (NM_152586.2,2312-2330).
gcaaggtttacctaaagca

SEQ ID NO: 418280 - DNA, 19 bp, Homo sapiens
  siRNA target sequence for C10orf29 (NM_152586.2,2332-2350).
cagggtggactgagaagaa

SEQ ID NO: 418281 - DNA, 19 bp, Homo sapiens
  siRNA target sequence for C10orf29 (NM_152586.2,2336-2354).
gtggactgagaagaattct

SEQ ID NO: 418282 - DNA, 19 bp, Homo sapiens
  siRNA target sequence for C10orf29 (NM_152586.2,2531-2549).
ctctgagaggggtgatgaa

SEQ ID NO: 418283 - DNA, 19 bp, Homo sapiens
  siRNA target sequence for C10orf29 (NM_152586.2,2533-2551).
ctgagaggggtgatgaaca

SEQ ID NO: 418284 - DNA, 19 bp, Homo sapiens
  siRNA target sequence for C10orf29 (NM_152586.2,2561-2579).
ctgtagtccttcaaattca

SEQ ID NO: 418285 - DNA, 19 bp, Homo sapiens
  siRNA target sequence for C10orf29 (NM_152586.2,2589-2607).
cccagccttcccctgtata

SEQ ID NO: 418286 - DNA, 19 bp, Homo sapiens
  siRNA target sequence for C10orf29 (NM_152586.2,2667-2685).
gtgcagaaaactaaccaat

SEQ ID NO: 418287 - DNA, 19 bp, Homo sapiens
  siRNA target sequence for C10orf29 (NM_152586.2,2694-2712).
ggccaaagcctcaaaactt

SEQ ID NO: 418288 - DNA, 19 bp, Homo sapiens
  siRNA target sequence for C10orf29 (NM_152586.2,2696-2714).
ccaaagcctcaaaacttca

SEQ ID NO: 418289 - DNA, 19 bp, Homo sapiens
  siRNA target sequence for C10orf29 (NM_152586.2,2702-2720).
cctcaaaacttcattgact

SEQ ID NO: 418290 - DNA, 19 bp, Homo sapiens
  siRNA target sequence for C10orf29 (NM_152586.2,2703-2721).
ctcaaaacttcattgactt

SEQ ID NO: 418291 - DNA, 19 bp, Homo sapiens
  siRNA target sequence for C10orf29 (NM_152586.2,2823-2841).
gtctccatgagggatagta

SEQ ID NO: 418292 - DNA, 19 bp, Homo sapiens
  siRNA target sequence for C10orf29 (NM_152586.2,2825-2843).
ctccatgagggatagtaca

SEQ ID NO: 418293 - DNA, 19 bp, Homo sapiens
  siRNA target sequence for C10orf29 (NM_152586.2,2833-2851).
gggatagtacaggtttcaa

SEQ ID NO: 418294 - DNA, 19 bp, Homo sapiens
  siRNA target sequence for C10orf29 (NM_152586.2,2844-2862).
ggtttcaaggatagaagtt

SEQ ID NO: 418295 - DNA, 19 bp, Homo sapiens
  siRNA target sequence for C10orf29 (NM_152586.2,2868-2886).
ggtagtctaaggaagaact

SEQ ID NO: 418296 - DNA, 19 bp, Homo sapiens
  siRNA target sequence for C10orf29 (NM_152586.2,2943-2961).
ccatgggcaaagcaacaat

SEQ ID NO: 418297 - DNA, 19 bp, Homo sapiens
  siRNA target sequence for C10orf29 (NM_152586.2,3000-3018).
gagtccactgaacattctt

SEQ ID NO: 418298 - DNA, 19 bp, Homo sapiens
  siRNA target sequence for C10orf29 (NM_152586.2,3002-3020).
gtccactgaacattcttct

SEQ ID NO: 418299 - DNA, 19 bp, Homo sapiens
  siRNA target sequence for C10orf29 (NM_152586.2,3042-3060).
cctaatggtgaaacttcta

SEQ ID NO: 418300 - DNA, 19 bp, Homo sapiens
  siRNA target sequence for C10orf29 (NM_152586.2,3197-3215).
cacaaggttctgtgattct

SEQ ID NO: 418301 - DNA, 19 bp, Homo sapiens
  siRNA target sequence for C10orf29 (NM_152586.2,3234-3252).
cctaggccaggaatgaagt

SEQ ID NO: 418302 - DNA, 19 bp, Homo sapiens
  siRNA target sequence for C10orf29 (NM_152586.2,3248-3266).
gaagtcctcccctcatgat

SEQ ID NO: 418303 - DNA, 19 bp, Homo sapiens
  siRNA target sequence for C10orf29 (NM_152586.2,3268-3286).
cccatacgtgtgtaaccta

SEQ ID NO: 418304 - DNA, 19 bp, Homo sapiens
  siRNA target sequence for C10orf29 (NM_152586.2,3269-3287).
ccatacgtgtgtaacctat

SEQ ID NO: 418305 - DNA, 19 bp, Homo sapiens
  siRNA target sequence for C10orf29 (NM_152586.2,3492-3510).
gatcctggtctctcaaaga

SEQ ID NO: 418306 - DNA, 19 bp, Homo sapiens
  siRNA target sequence for C10orf29 (NM_152586.2,3605-3623).
cagtgcagagaatttacgt

SEQ ID NO: 418307 - DNA, 19 bp, Homo sapiens
  siRNA target sequence for C10orf29 (NM_152586.2,3666-3684).
gaggaagctccggtttctt

SEQ ID NO: 418308 - DNA, 19 bp, Homo sapiens
  siRNA target sequence for C10orf29 (NM_152586.2,4092-4110).
gccacactaccagaaagaa

SEQ ID NO: 418309 - DNA, 19 bp, Homo sapiens
  siRNA target sequence for C10orf29 (NM_152586.2,4168-4186).
cccaccctcccattgttca

SEQ ID NO: 418310 - DNA, 19 bp, Homo sapiens
  siRNA target sequence for C10orf29 (NM_152586.2,4169-4187).
ccaccctcccattgttcat

SEQ ID NO: 418311 - DNA, 19 bp, Homo sapiens
  siRNA target sequence for C10orf29 (NM_152586.2,4228-4246).
ggtcagcttggaattcaga

SEQ ID NO: 418312 - DNA, 19 bp, Homo sapiens
  siRNA target sequence for C10orf29 (NM_152586.2,4229-4247).
gtcagcttggaattcagat

SEQ ID NO: 418313 - DNA, 19 bp, Homo sapiens
  siRNA target sequence for C10orf29 (NM_152586.2,4268-4286).
ccctggtcctcgaagagta

SEQ ID NO: 418314 - DNA, 19 bp, Homo sapiens
  siRNA target sequence for C10orf29 (NM_152586.2,4272-4290).
ggtcctcgaagagtagata

SEQ ID NO: 418315 - DNA, 19 bp, Homo sapiens
  siRNA target sequence for C10orf29 (NM_152586.2,4273-4291).
gtcctcgaagagtagatat

SEQ ID NO: 418316 - DNA, 19 bp, Homo sapiens
  siRNA target sequence for C10orf29 (NM_152586.2,4361-4379).
ggggtttctgtttgttcta

SEQ ID NO: 418317 - DNA, 19 bp, Homo sapiens
  siRNA target sequence for C10orf29 (NM_152586.2,4362-4380).
gggtttctgtttgttctat

SEQ ID NO: 418318 - DNA, 19 bp, Homo sapiens
  siRNA target sequence for MGC33948 (NM_152587.2,267-285).
gagaaccacgtcagatagt

SEQ ID NO: 418319 - DNA, 19 bp, Homo sapiens
  siRNA target sequence for MGC33948 (NM_152587.2,272-290).
ccacgtcagatagtgaaat

SEQ ID NO: 418320 - DNA, 19 bp, Homo sapiens
  siRNA target sequence for MGC33948 (NM_152587.2,334-352).
cattcatgtgcgattcaga

SEQ ID NO: 418321 - DNA, 19 bp, Homo sapiens
  siRNA target sequence for MGC33948 (NM_152587.2,349-367).
cagattaggtggagttaaa

SEQ ID NO: 418322 - DNA, 19 bp, Homo sapiens
  siRNA target sequence for MGC33948 (NM_152587.2,351-369).
gattaggtggagttaaatt

SEQ ID NO: 418323 - DNA, 19 bp, Homo sapiens
  siRNA target sequence for MGC33948 (NM_152587.2,371-389).
ccacctgatatatactata

SEQ ID NO: 418324 - DNA, 19 bp, Homo sapiens
  siRNA target sequence for MGC33948 (NM_152587.2,372-390).
cacctgatatatactataa

SEQ ID NO: 418325 - DNA, 19 bp, Homo sapiens
  siRNA target sequence for MGC33948 (NM_152587.2,399-417).
ctcacagacctattgaaga

SEQ ID NO: 418326 - DNA, 19 bp, Homo sapiens
  siRNA target sequence for MGC33948 (NM_152587.2,423-441).
gtgctaacagccctagaaa

SEQ ID NO: 418327 - DNA, 19 bp, Homo sapiens
  siRNA target sequence for MGC33948 (NM_152587.2,425-443).
gctaacagccctagaaatt

SEQ ID NO: 418328 - DNA, 19 bp, Homo sapiens
  siRNA target sequence for MGC33948 (NM_152587.2,513-531).
gctggtatcatcgtataga

SEQ ID NO: 418329 - DNA, 19 bp, Homo sapiens
  siRNA target sequence for MGC33948 (NM_152587.2,514-532).
ctggtatcatcgtatagaa

SEQ ID NO: 418330 - DNA, 19 bp, Homo sapiens
  siRNA target sequence for MGC33948 (NM_152587.2,516-534).
ggtatcatcgtatagaaaa

SEQ ID NO: 418331 - DNA, 19 bp, Homo sapiens
  siRNA target sequence for MGC33948 (NM_152587.2,544-562).
gaggccagtttctgataca

SEQ ID NO: 418332 - DNA, 19 bp, Homo sapiens
  siRNA target sequence for MGC33948 (NM_152587.2,567-585).
ggctatctactgatggtat

SEQ ID NO: 418333 - DNA, 19 bp, Homo sapiens
  siRNA target sequence for MGC33948 (NM_152587.2,715-733).
ggctaagtcaacacatcat

SEQ ID NO: 418334 - DNA, 19 bp, Homo sapiens
  siRNA target sequence for MGC33948 (NM_152587.2,721-739).
gtcaacacatcatgaaact

SEQ ID NO: 418335 - DNA, 19 bp, Homo sapiens
  siRNA target sequence for MGC33948 (NM_152587.2,723-741).
caacacatcatgaaactct

SEQ ID NO: 418336 - DNA, 19 bp, Homo sapiens
  siRNA target sequence for MGC33948 (NM_152587.2,758-776).
gcaacaaaggggctgatta

SEQ ID NO: 418337 - DNA, 19 bp, Homo sapiens
  siRNA target sequence for MGC33948 (NM_152587.2,766-784).
ggggctgattagagctttt

SEQ ID NO: 418338 - DNA, 19 bp, Homo sapiens
  siRNA target sequence for MGC33948 (NM_152587.2,768-786).
ggctgattagagcttttga

SEQ ID NO: 418339 - DNA, 19 bp, Homo sapiens
  siRNA target sequence for MGC33948 (NM_152587.2,785-803).
gaagatggggggatagatt

SEQ ID NO: 418340 - DNA, 19 bp, Homo sapiens
  siRNA target sequence for MGC33948 (NM_152587.2,897-915).
gcaactcttcggctaactt

SEQ ID NO: 418341 - DNA, 19 bp, Homo sapiens
  siRNA target sequence for MGC33948 (NM_152587.2,901-919).
ctcttcggctaacttcaaa

SEQ ID NO: 418342 - DNA, 19 bp, Homo sapiens
  siRNA target sequence for MGC33948 (NM_152587.2,906-924).
cggctaacttcaaaggatt

SEQ ID NO: 418343 - DNA, 19 bp, Homo sapiens
  siRNA target sequence for MGC33948 (NM_152587.2,998-1016).
gatgatacttactatgaaa

SEQ ID NO: 418344 - DNA, 19 bp, Homo sapiens
  siRNA target sequence for MGC33948 (NM_152587.2,1028-1046).
gaaccaaatgtaactagat

SEQ ID NO: 418345 - DNA, 19 bp, Homo sapiens
  siRNA target sequence for DKFZp762A217 (NM_152588.1,463-481).
gggctcgccttgtatctca

SEQ ID NO: 418346 - DNA, 19 bp, Homo sapiens
  siRNA target sequence for DKFZp762A217 (NM_152588.1,515-533).
gccgtgctatcaagactaa

SEQ ID NO: 418347 - DNA, 19 bp, Homo sapiens
  siRNA target sequence for DKFZp762A217 (NM_152588.1,516-534).
ccgtgctatcaagactaat

SEQ ID NO: 418348 - DNA, 19 bp, Homo sapiens
  siRNA target sequence for DKFZp762A217 (NM_152588.1,518-536).
gtgctatcaagactaatca

SEQ ID NO: 418349 - DNA, 19 bp, Homo sapiens
  siRNA target sequence for DKFZp762A217 (NM_152588.1,556-574).
ccatggacgcacattttct

SEQ ID NO: 418350 - DNA, 19 bp, Homo sapiens
  siRNA target sequence for DKFZp762A217 (NM_152588.1,560-578).
ggacgcacattttctacaa

SEQ ID NO: 418351 - DNA, 19 bp, Homo sapiens
  siRNA target sequence for DKFZp762A217 (NM_152588.1,561-579).
gacgcacattttctacaat

SEQ ID NO: 418352 - DNA, 19 bp, Homo sapiens
  siRNA target sequence for DKFZp762A217 (NM_152588.1,628-646).
cggccactctgcactcttt

SEQ ID NO: 418353 - DNA, 19 bp, Homo sapiens
  siRNA target sequence for DKFZp762A217 (NM_152588.1,686-704).
ggagctaccatcttgtcaa

SEQ ID NO: 418354 - DNA, 19 bp, Homo sapiens
  siRNA target sequence for DKFZp762A217 (NM_152588.1,687-705).
gagctaccatcttgtcaat

SEQ ID NO: 418355 - DNA, 19 bp, Homo sapiens
  siRNA target sequence for DKFZp762A217 (NM_152588.1,689-707).
gctaccatcttgtcaatgt

SEQ ID NO: 418356 - DNA, 19 bp, Homo sapiens
  siRNA target sequence for DKFZp762A217 (NM_152588.1,766-784).
gatggatactggacattca

SEQ ID NO: 418357 - DNA, 19 bp, Homo sapiens
  siRNA target sequence for DKFZp762A217 (NM_152588.1,884-902).
ccttgctctgctacattaa

SEQ ID NO: 418358 - DNA, 19 bp, Homo sapiens
  siRNA target sequence for DKFZp762A217 (NM_152588.1,885-903).
cttgctctgctacattaaa

SEQ ID NO: 418359 - DNA, 19 bp, Homo sapiens
  siRNA target sequence for DKFZp762A217 (NM_152588.1,1002-1020).
gactgttctcgcagtttca

SEQ ID NO: 418360 - DNA, 19 bp, Homo sapiens
  siRNA target sequence for DKFZp762A217 (NM_152588.1,1011-1029).
cgcagtttcagcagtttat

SEQ ID NO: 418361 - DNA, 19 bp, Homo sapiens
  siRNA target sequence for DKFZp762A217 (NM_152588.1,1019-1037).
cagcagtttatgatgtctt

SEQ ID NO: 418362 - DNA, 19 bp, Homo sapiens
  siRNA target sequence for DKFZp762A217 (NM_152588.1,1024-1042).
gtttatgatgtctttgtct

SEQ ID NO: 418363 - DNA, 19 bp, Homo sapiens
  siRNA target sequence for DKFZp762A217 (NM_152588.1,1092-1110).
gaacttgtcgcttttccta

SEQ ID NO: 418364 - DNA, 19 bp, Homo sapiens
  siRNA target sequence for DKFZp762A217 (NM_152588.1,1098-1116).
gtcgcttttcctaagcatt

SEQ ID NO: 418365 - DNA, 19 bp, Homo sapiens
  siRNA target sequence for DKFZp762A217 (NM_152588.1,1101-1119).
gcttttcctaagcattagt

SEQ ID NO: 418366 - DNA, 19 bp, Homo sapiens
  siRNA target sequence for DKFZp762A217 (NM_152588.1,1102-1120).
cttttcctaagcattagtt

SEQ ID NO: 418367 - DNA, 19 bp, Homo sapiens
  siRNA target sequence for DKFZp762A217 (NM_152588.1,1289-1307).
gtccagataccctcagttt

SEQ ID NO: 418368 - DNA, 19 bp, Homo sapiens
  siRNA target sequence for DKFZp762A217 (NM_152588.1,1294-1312).
gataccctcagttttgatt

SEQ ID NO: 418369 - DNA, 19 bp, Homo sapiens
  siRNA target sequence for DKFZp762A217 (NM_152588.1,1329-1347).
gcctctgctcaaaacagtt

SEQ ID NO: 418370 - DNA, 19 bp, Homo sapiens
  siRNA target sequence for DKFZp762A217 (NM_152588.1,1368-1386).
cactgtggccttctatact

SEQ ID NO: 418371 - DNA, 19 bp, Homo sapiens
  siRNA target sequence for DKFZp762A217 (NM_152588.1,1396-1414).
ctccttgcctactatggtt

SEQ ID NO: 418372 - DNA, 19 bp, Homo sapiens
  siRNA target sequence for DKFZp762A217 (NM_152588.1,1423-1441).
ccgagcgtagacagagaat

SEQ ID NO: 418373 - DNA, 19 bp, Homo sapiens
  siRNA target sequence for DKFZp762A217 (NM_152588.1,1427-1445).
gcgtagacagagaatgcaa

SEQ ID NO: 418374 - DNA, 19 bp, Homo sapiens
  siRNA target sequence for DKFZp762A217 (NM_152588.1,1428-1446).
cgtagacagagaatgcaat

SEQ ID NO: 418375 - DNA, 19 bp, Homo sapiens
  siRNA target sequence for DKFZp762A217 (NM_152588.1,1558-1576).
ggcattaaaaacgatgtat

SEQ ID NO: 418376 - DNA, 19 bp, Homo sapiens
  siRNA target sequence for DKFZp762A217 (NM_152588.1,1595-1613).
cttctacggagaacattgt

SEQ ID NO: 418377 - DNA, 19 bp, Homo sapiens
  siRNA target sequence for DKFZp762A217 (NM_152588.1,1671-1689).
ctatgtcggctttgtaatt

SEQ ID NO: 418378 - DNA, 19 bp, Homo sapiens
  siRNA target sequence for DKFZp762A217 (NM_152588.1,1748-1766).
ctagagccctttatgtcaa

SEQ ID NO: 418379 - DNA, 19 bp, Homo sapiens
  siRNA target sequence for DKFZp762A217 (NM_152588.1,1779-1797).
gttcctcaagagcttgatt

SEQ ID NO: 418380 - DNA, 19 bp, Homo sapiens
  siRNA target sequence for DKFZp762A217 (NM_152588.1,1805-1823).
ctacagctacactaattgt

SEQ ID NO: 418381 - DNA, 19 bp, Homo sapiens
  siRNA target sequence for DKFZp762A217 (NM_152588.1,1808-1826).
cagctacactaattgtttt

SEQ ID NO: 418382 - DNA, 19 bp, Homo sapiens
  siRNA target sequence for DKFZp762A217 (NM_152588.1,1810-1828).
gctacactaattgtttttt

SEQ ID NO: 418383 - DNA, 19 bp, Homo sapiens
  siRNA target sequence for DKFZp762A217 (NM_152588.1,1900-1918).
gtaaacccagctaaagcat

SEQ ID NO: 418384 - DNA, 19 bp, Homo sapiens
  siRNA target sequence for DKFZp762A217 (NM_152588.1,1944-1962).
gagtcagagcaaaatttct

SEQ ID NO: 418385 - DNA, 19 bp, Homo sapiens
  siRNA target sequence for DKFZp762A217 (NM_152588.1,1966-1984).
gctgaaagcgcctatagaa

SEQ ID NO: 418386 - DNA, 19 bp, Homo sapiens
  siRNA target sequence for DKFZp762A217 (NM_152588.1,1967-1985).
ctgaaagcgcctatagaaa

SEQ ID NO: 418387 - DNA, 19 bp, Homo sapiens
  siRNA target sequence for DKFZp762A217 (NM_152588.1,1973-1991).
gcgcctatagaaatgcttt

SEQ ID NO: 418388 - DNA, 19 bp, Homo sapiens
  siRNA target sequence for DKFZp762A217 (NM_152588.1,2062-2080).
gcagaagcactacattatt

SEQ ID NO: 418389 - DNA, 19 bp, Homo sapiens
  siRNA target sequence for DKFZp762A217 (NM_152588.1,2132-2150).
ccggtattattctaatgaa

SEQ ID NO: 418390 - DNA, 19 bp, Homo sapiens
  siRNA target sequence for DKFZp762A217 (NM_152588.1,2167-2185).
gaagcccgacggacattct

SEQ ID NO: 418391 - DNA, 19 bp, Homo sapiens
  siRNA target sequence for DKFZp762A217 (NM_152588.1,2170-2188).
gcccgacggacattcttaa

SEQ ID NO: 418392 - DNA, 19 bp, Homo sapiens
  siRNA target sequence for DKFZp762A217 (NM_152588.1,2171-2189).
cccgacggacattcttaaa

SEQ ID NO: 418393 - DNA, 19 bp, Homo sapiens
  siRNA target sequence for DKFZp762A217 (NM_152588.1,2173-2191).
cgacggacattcttaaagt

SEQ ID NO: 418394 - DNA, 19 bp, Homo sapiens
  siRNA target sequence for DKFZp762A217 (NM_152588.1,2176-2194).
cggacattcttaaagtgtt

SEQ ID NO: 418395 - DNA, 19 bp, Homo sapiens
  siRNA target sequence for DKFZp762A217 (NM_152588.1,2195-2213).
cggagatcccagatgaaaa

SEQ ID NO: 418396 - DNA, 19 bp, Homo sapiens
  siRNA target sequence for DKFZp762A217 (NM_152588.1,2199-2217).
gatcccagatgaaaaccta

SEQ ID NO: 418397 - DNA, 19 bp, Homo sapiens
  siRNA target sequence for DKFZp762A217 (NM_152588.1,2230-2248).
gcacacaagagctctgtta

SEQ ID NO: 418398 - DNA, 19 bp, Homo sapiens
  siRNA target sequence for DKFZp762A217 (NM_152588.1,2373-2391).
catgatgggtgaagcatat

SEQ ID NO: 418399 - DNA, 19 bp, Homo sapiens
  siRNA target sequence for DKFZp762A217 (NM_152588.1,2386-2404).
gcatatatgcgtttaagca

SEQ ID NO: 418400 - DNA, 19 bp, Homo sapiens
  siRNA target sequence for DKFZp762A217 (NM_152588.1,2387-2405).
catatatgcgtttaagcaa

SEQ ID NO: 418401 - DNA, 19 bp, Homo sapiens
  siRNA target sequence for DKFZp762A217 (NM_152588.1,2411-2429).
ccgaagcagagcattggta

SEQ ID NO: 418402 - DNA, 19 bp, Homo sapiens
  siRNA target sequence for DKFZp762A217 (NM_152588.1,2412-2430).
cgaagcagagcattggtat

SEQ ID NO: 418403 - DNA, 19 bp, Homo sapiens
  siRNA target sequence for DKFZp762A217 (NM_152588.1,2413-2431).
gaagcagagcattggtata

SEQ ID NO: 418404 - DNA, 19 bp, Homo sapiens
  siRNA target sequence for DKFZp762A217 (NM_152588.1,2417-2435).
cagagcattggtatatgga

SEQ ID NO: 418405 - DNA, 19 bp, Homo sapiens
  siRNA target sequence for DKFZp762A217 (NM_152588.1,2518-2536).
gctgaaaagctcttcttga

SEQ ID NO: 418406 - DNA, 19 bp, Homo sapiens
  siRNA target sequence for DKFZp762A217 (NM_152588.1,2554-2572).
cccaccaaaggaaactgtt

SEQ ID NO: 418407 - DNA, 19 bp, Homo sapiens
  siRNA target sequence for DKFZp762A217 (NM_152588.1,2555-2573).
ccaccaaaggaaactgtta

SEQ ID NO: 418408 - DNA, 19 bp, Homo sapiens
  siRNA target sequence for DKFZp762A217 (NM_152588.1,2574-2592).
catgcattatggtcagttt

SEQ ID NO: 418409 - DNA, 19 bp, Homo sapiens
  siRNA target sequence for DKFZp762A217 (NM_152588.1,2598-2616).
ggaagaagctcgtctcata

SEQ ID NO: 418410 - DNA, 19 bp, Homo sapiens
  siRNA target sequence for DKFZp762A217 (NM_152588.1,2664-2682).
gtttgatgttgtcttcaat

SEQ ID NO: 418411 - DNA, 19 bp, Homo sapiens
  siRNA target sequence for DKFZp762A217 (NM_152588.1,2699-2717).
gacaggctagcctcaatga

SEQ ID NO: 418412 - DNA, 19 bp, Homo sapiens
  siRNA target sequence for DKFZp762A217 (NM_152588.1,2746-2764).
gccaggctgaggcctaatt

SEQ ID NO: 418413 - DNA, 19 bp, Homo sapiens
  siRNA target sequence for FLJ35821 (NM_152589.1,253-271).
cacagcaaacctcgaaata

SEQ ID NO: 418414 - DNA, 19 bp, Homo sapiens
  siRNA target sequence for FLJ35821 (NM_152589.1,257-275).
gcaaacctcgaaatatcaa

SEQ ID NO: 418415 - DNA, 19 bp, Homo sapiens
  siRNA target sequence for FLJ35821 (NM_152589.1,258-276).
caaacctcgaaatatcaat

SEQ ID NO: 418416 - DNA, 19 bp, Homo sapiens
  siRNA target sequence for FLJ35821 (NM_152589.1,262-280).
cctcgaaatatcaatggat

SEQ ID NO: 418417 - DNA, 19 bp, Homo sapiens
  siRNA target sequence for FLJ35821 (NM_152589.1,263-281).
ctcgaaatatcaatggatt

SEQ ID NO: 418418 - DNA, 19 bp, Homo sapiens
  siRNA target sequence for FLJ35821 (NM_152589.1,289-307).
ccaccaagtagcaatatca

SEQ ID NO: 418419 - DNA, 19 bp, Homo sapiens
  siRNA target sequence for FLJ35821 (NM_152589.1,351-369).
gagtcaagaacctctgaaa

SEQ ID NO: 418420 - DNA, 19 bp, Homo sapiens
  siRNA target sequence for FLJ35821 (NM_152589.1,392-410).
ccatccaccatcctttagt

SEQ ID NO: 418421 - DNA, 19 bp, Homo sapiens
  siRNA target sequence for FLJ35821 (NM_152589.1,393-411).
catccaccatcctttagtt

SEQ ID NO: 418422 - DNA, 19 bp, Homo sapiens
  siRNA target sequence for FLJ35821 (NM_152589.1,508-526).
gcaataaaggagatgtgtt

SEQ ID NO: 418423 - DNA, 19 bp, Homo sapiens
  siRNA target sequence for FLJ35821 (NM_152589.1,516-534).
ggagatgtgttataaatct

SEQ ID NO: 418424 - DNA, 19 bp, Homo sapiens
  siRNA target sequence for FLJ35821 (NM_152589.1,533-551).
ctggggaatactacagatt

SEQ ID NO: 418425 - DNA, 19 bp, Homo sapiens
  siRNA target sequence for FLJ35821 (NM_152589.1,536-554).
gggaatactacagatttca

SEQ ID NO: 418426 - DNA, 19 bp, Homo sapiens
  siRNA target sequence for FLJ35821 (NM_152589.1,537-555).
ggaatactacagatttcat

SEQ ID NO: 418427 - DNA, 19 bp, Homo sapiens
  siRNA target sequence for FLJ35821 (NM_152589.1,588-606).
gacacctacagcagaaaaa

SEQ ID NO: 418428 - DNA, 19 bp, Homo sapiens
  siRNA target sequence for FLJ35821 (NM_152589.1,642-660).
gcaagaaggagatagtctt

SEQ ID NO: 418429 - DNA, 19 bp, Homo sapiens
  siRNA target sequence for FLJ35821 (NM_152589.1,643-661).
caagaaggagatagtctta

SEQ ID NO: 418430 - DNA, 19 bp, Homo sapiens
  siRNA target sequence for FLJ35821 (NM_152589.1,671-689).
caaaacttagccaatatga

SEQ ID NO: 418431 - DNA, 19 bp, Homo sapiens
  siRNA target sequence for FLJ35821 (NM_152589.1,717-735).
gcatgggaaaccaaagact

SEQ ID NO: 418432 - DNA, 19 bp, Homo sapiens
  siRNA target sequence for FLJ35821 (NM_152589.1,732-750).
gactgacattgctgctttt

SEQ ID NO: 418433 - DNA, 19 bp, Homo sapiens
  siRNA target sequence for FLJ35821 (NM_152589.1,758-776).
gaggaggtgactgttatgt

SEQ ID NO: 418434 - DNA, 19 bp, Homo sapiens
  siRNA target sequence for FLJ35821 (NM_152589.1,804-822).
cgatgaaagtgaagcttta

SEQ ID NO: 418435 - DNA, 19 bp, Homo sapiens
  siRNA target sequence for FLJ35821 (NM_152589.1,840-858).
caccatatcaaaatgttca

SEQ ID NO: 418436 - DNA, 19 bp, Homo sapiens
  siRNA target sequence for FLJ35821 (NM_152589.1,842-860).
ccatatcaaaatgttcaaa

SEQ ID NO: 418437 - DNA, 19 bp, Homo sapiens
  siRNA target sequence for FLJ35821 (NM_152589.1,889-907).
ccaaagcattccctaacta

SEQ ID NO: 418438 - DNA, 19 bp, Homo sapiens
  siRNA target sequence for FLJ35821 (NM_152589.1,900-918).
cctaactacccgactagta

SEQ ID NO: 418439 - DNA, 19 bp, Homo sapiens
  siRNA target sequence for FLJ35821 (NM_152589.1,916-934).
gtacctacaacgcatgtat

SEQ ID NO: 418440 - DNA, 19 bp, Homo sapiens
  siRNA target sequence for FLJ35821 (NM_152589.1,919-937).
cctacaacgcatgtattaa

SEQ ID NO: 418441 - DNA, 19 bp, Homo sapiens
  siRNA target sequence for FLJ35821 (NM_152589.1,920-938).
ctacaacgcatgtattaaa

SEQ ID NO: 418442 - DNA, 19 bp, Homo sapiens
  siRNA target sequence for FLJ35821 (NM_152589.1,968-986).
gagaggacccctcttcaat

SEQ ID NO: 418443 - DNA, 19 bp, Homo sapiens
  siRNA target sequence for FLJ35821 (NM_152589.1,970-988).
gaggacccctcttcaatga

SEQ ID NO: 418444 - DNA, 19 bp, Homo sapiens
  siRNA target sequence for FLJ35821 (NM_152589.1,1054-1072).
gaaccacagaactttccta

SEQ ID NO: 418445 - DNA, 19 bp, Homo sapiens
  siRNA target sequence for FLJ35821 (NM_152589.1,1122-1140).
gagttatcaccgcaataat

SEQ ID NO: 418446 - DNA, 19 bp, Homo sapiens
  siRNA target sequence for FLJ35821 (NM_152589.1,1124-1142).
gttatcaccgcaataataa

SEQ ID NO: 418447 - DNA, 19 bp, Homo sapiens
  siRNA target sequence for FLJ35821 (NM_152589.1,1131-1149).
ccgcaataataaaaatcga

SEQ ID NO: 418448 - DNA, 19 bp, Homo sapiens
  siRNA target sequence for FLJ35821 (NM_152589.1,1132-1150).
cgcaataataaaaatcgaa

SEQ ID NO: 418449 - DNA, 19 bp, Homo sapiens
  siRNA target sequence for FLJ35821 (NM_152589.1,1147-1165).
cgaaatgcggagaatgcat

SEQ ID NO: 418450 - DNA, 19 bp, Homo sapiens
  siRNA target sequence for FLJ35821 (NM_152589.1,1153-1171).
gcggagaatgcatcctata

SEQ ID NO: 418451 - DNA, 19 bp, Homo sapiens
  siRNA target sequence for FLJ35821 (NM_152589.1,1154-1172).
cggagaatgcatcctatat

SEQ ID NO: 418452 - DNA, 19 bp, Homo sapiens
  siRNA target sequence for FLJ35821 (NM_152589.1,1167-1185).
ctatatccacgttcaaaga

SEQ ID NO: 418453 - DNA, 19 bp, Homo sapiens
  siRNA target sequence for FLJ35821 (NM_152589.1,1194-1212).
caggactgtcgcgttgaat

SEQ ID NO: 418454 - DNA, 19 bp, Homo sapiens
  siRNA target sequence for FLJ35821 (NM_152589.1,1294-1312).
gacaaatatacgtcaacat

SEQ ID NO: 418455 - DNA, 19 bp, Homo sapiens
  siRNA target sequence for FLJ35821 (NM_152589.1,1304-1322).
cgtcaacatcatataatga

SEQ ID NO: 418456 - DNA, 19 bp, Homo sapiens
  siRNA target sequence for FLJ35821 (NM_152589.1,1305-1323).
gtcaacatcatataatgat

SEQ ID NO: 418457 - DNA, 19 bp, Homo sapiens
  siRNA target sequence for FLJ35821 (NM_152589.1,1325-1343).
cagcctggcgaaaacgaat

SEQ ID NO: 418458 - DNA, 19 bp, Homo sapiens
  siRNA target sequence for FLJ35821 (NM_152589.1,1331-1349).
ggcgaaaacgaattccttt

SEQ ID NO: 418459 - DNA, 19 bp, Homo sapiens
  siRNA target sequence for FLJ35821 (NM_152589.1,1332-1350).
gcgaaaacgaattcctttt

SEQ ID NO: 418460 - DNA, 19 bp, Homo sapiens
  siRNA target sequence for FLJ35821 (NM_152589.1,1333-1351).
cgaaaacgaattccttttt

SEQ ID NO: 418461 - DNA, 19 bp, Homo sapiens
  siRNA target sequence for FLJ36004 (NM_152590.1,153-171).
gcttgaaggtagttggatt

SEQ ID NO: 418462 - DNA, 19 bp, Homo sapiens
  siRNA target sequence for FLJ36004 (NM_152590.1,154-172).
cttgaaggtagttggatta

SEQ ID NO: 418463 - DNA, 19 bp, Homo sapiens
  siRNA target sequence for FLJ36004 (NM_152590.1,157-175).
gaaggtagttggattaaca

SEQ ID NO: 418464 - DNA, 19 bp, Homo sapiens
  siRNA target sequence for FLJ36004 (NM_152590.1,160-178).
ggtagttggattaacagaa

SEQ ID NO: 418465 - DNA, 19 bp, Homo sapiens
  siRNA target sequence for FLJ36004 (NM_152590.1,184-202).
gacaaacttggagtatatt

SEQ ID NO: 418466 - DNA, 19 bp, Homo sapiens
  siRNA target sequence for FLJ36004 (NM_152590.1,278-296).
gaatgcctcttggttacta

SEQ ID NO: 418467 - DNA, 19 bp, Homo sapiens
  siRNA target sequence for FLJ36004 (NM_152590.1,307-325).
cctcagattagtagagtaa

SEQ ID NO: 418468 - DNA, 19 bp, Homo sapiens
  siRNA target sequence for FLJ36004 (NM_152590.1,310-328).
cagattagtagagtaacta

SEQ ID NO: 418469 - DNA, 19 bp, Homo sapiens
  siRNA target sequence for FLJ36004 (NM_152590.1,348-366).
gacttctaaagctactgta

SEQ ID NO: 418470 - DNA, 19 bp, Homo sapiens
  siRNA target sequence for FLJ36004 (NM_152590.1,429-447).
ggatgaatcacccatgatt

SEQ ID NO: 418471 - DNA, 19 bp, Homo sapiens
  siRNA target sequence for FLJ36004 (NM_152590.1,477-495).
gtttggtgattcaaagaaa

SEQ ID NO: 418472 - DNA, 19 bp, Homo sapiens
  siRNA target sequence for FLJ36004 (NM_152590.1,481-499).
ggtgattcaaagaaactta

SEQ ID NO: 418473 - DNA, 19 bp, Homo sapiens
  siRNA target sequence for FLJ36004 (NM_152590.1,578-596).
gttctcttggagatgttga

SEQ ID NO: 418474 - DNA, 19 bp, Homo sapiens
  siRNA target sequence for FLJ36004 (NM_152590.1,642-660).
ctcttcccttgacaaagaa

SEQ ID NO: 418475 - DNA, 19 bp, Homo sapiens
  siRNA target sequence for FLJ36004 (NM_152590.1,739-757).
gtaatgcaggcaaattcca

SEQ ID NO: 418476 - DNA, 19 bp, Homo sapiens
  siRNA target sequence for FLJ36004 (NM_152590.1,839-857).
gagcaagtcctgattgtat

SEQ ID NO: 418477 - DNA, 19 bp, Homo sapiens
  siRNA target sequence for FLJ36004 (NM_152590.1,918-936).
gcaagcgtgggaaaaatta

SEQ ID NO: 418478 - DNA, 19 bp, Homo sapiens
  siRNA target sequence for FLJ36004 (NM_152590.1,937-955).
gatgctgacgttgaattta

SEQ ID NO: 418479 - DNA, 19 bp, Homo sapiens
  siRNA target sequence for FLJ36004 (NM_152590.1,957-975).
cagatgttcagtagtatct

SEQ ID NO: 418480 - DNA, 19 bp, Homo sapiens
  siRNA target sequence for FLJ36004 (NM_152590.1,1016-1034).
cagctacaataactaaaga

SEQ ID NO: 418481 - DNA, 19 bp, Homo sapiens
  siRNA target sequence for FLJ36004 (NM_152590.1,1042-1060).
gatcaacctaagaaagata

SEQ ID NO: 418482 - DNA, 19 bp, Homo sapiens
  siRNA target sequence for FLJ36004 (NM_152590.1,1074-1092).
ggtggaacaagctcaagtt

SEQ ID NO: 418483 - DNA, 19 bp, Homo sapiens
  siRNA target sequence for FLJ36004 (NM_152590.1,1189-1207).
ctgattgaaccacacaata

SEQ ID NO: 418484 - DNA, 19 bp, Homo sapiens
  siRNA target sequence for FLJ36004 (NM_152590.1,1191-1209).
gattgaaccacacaataca

SEQ ID NO: 418485 - DNA, 19 bp, Homo sapiens
  siRNA target sequence for FLJ36004 (NM_152590.1,1215-1233).
cgctggaggcagattggat

SEQ ID NO: 418486 - DNA, 19 bp, Homo sapiens
  siRNA target sequence for FLJ36004 (NM_152590.1,1216-1234).
gctggaggcagattggata

SEQ ID NO: 418487 - DNA, 19 bp, Homo sapiens
  siRNA target sequence for FLJ36004 (NM_152590.1,1251-1269).
gtcaaccagacctaatcga

SEQ ID NO: 418488 - DNA, 19 bp, Homo sapiens
  siRNA target sequence for FLJ36004 (NM_152590.1,1267-1285).
cgagcctcagggtctaaga

SEQ ID NO: 418489 - DNA, 19 bp, Homo sapiens
  siRNA target sequence for FLJ36004 (NM_152590.1,1268-1286).
gagcctcagggtctaagaa

SEQ ID NO: 418490 - DNA, 19 bp, Homo sapiens
  siRNA target sequence for FLJ36004 (NM_152590.1,1270-1288).
gcctcagggtctaagaaaa

SEQ ID NO: 418491 - DNA, 19 bp, Homo sapiens
  siRNA target sequence for FLJ35843 (NM_152591.1,280-298).
gcagagctccggaagctaa

SEQ ID NO: 418492 - DNA, 19 bp, Homo sapiens
  siRNA target sequence for FLJ35843 (NM_152591.1,484-502).
cgactcctgctccaaacta

SEQ ID NO: 418493 - DNA, 19 bp, Homo sapiens
  siRNA target sequence for FLJ35843 (NM_152591.1,485-503).
gactcctgctccaaactaa

SEQ ID NO: 418494 - DNA, 19 bp, Homo sapiens
  siRNA target sequence for FLJ35843 (NM_152591.1,508-526).
gactatgaggcattgatta

SEQ ID NO: 418495 - DNA, 19 bp, Homo sapiens
  siRNA target sequence for FLJ35843 (NM_152591.1,588-606).
cgcaaaccaaaaacagatt

SEQ ID NO: 418496 - DNA, 19 bp, Homo sapiens
  siRNA target sequence for FLJ35843 (NM_152591.1,689-707).
ctgttcactttgacaagat

SEQ ID NO: 418497 - DNA, 19 bp, Homo sapiens
  siRNA target sequence for FLJ35843 (NM_152591.1,726-744).
gctccggaaggagattgaa

SEQ ID NO: 418498 - DNA, 19 bp, Homo sapiens
  siRNA target sequence for FLJ35843 (NM_152591.1,738-756).
gattgaagacctacgattt

SEQ ID NO: 418499 - DNA, 19 bp, Homo sapiens
  siRNA target sequence for FLJ35843 (NM_152591.1,742-760).
gaagacctacgatttgaga

SEQ ID NO: 418500 - DNA, 19 bp, Homo sapiens
  siRNA target sequence for FLJ35843 (NM_152591.1,757-775).
gagaaggctgcttatgaca

SEQ ID NO: 418501 - DNA, 19 bp, Homo sapiens
  siRNA target sequence for FLJ35843 (NM_152591.1,831-849).
ggccattgagcaatcttct

SEQ ID NO: 418502 - DNA, 19 bp, Homo sapiens
  siRNA target sequence for FLJ35843 (NM_152591.1,993-1011).
gctcgtcaagctgaatgat

SEQ ID NO: 418503 - DNA, 19 bp, Homo sapiens
  siRNA target sequence for FLJ35843 (NM_152591.1,1003-1021).
ctgaatgatcgcaatgaat

SEQ ID NO: 418504 - DNA, 19 bp, Homo sapiens
  siRNA target sequence for FLJ35843 (NM_152591.1,1135-1153).
gctgagagtgggaacctaa

SEQ ID NO: 418505 - DNA, 19 bp, Homo sapiens
  siRNA target sequence for FLJ35843 (NM_152591.1,1198-1216).
gctcggttcacgtatgtca

SEQ ID NO: 418506 - DNA, 19 bp, Homo sapiens
  siRNA target sequence for FLJ35843 (NM_152591.1,1262-1280).
gaatccaggacgagatcat

SEQ ID NO: 418507 - DNA, 19 bp, Homo sapiens
  siRNA target sequence for FLJ35843 (NM_152591.1,1518-1536).
caaccttccgcagtatttt

SEQ ID NO: 418508 - DNA, 19 bp, Homo sapiens
  siRNA target sequence for FLJ35843 (NM_152591.1,1676-1694).
cagaacccatcaaagtcat

SEQ ID NO: 418509 - DNA, 19 bp, Homo sapiens
  siRNA target sequence for FLJ35843 (NM_152591.1,1724-1742).
gcgacaggttggatgatgt

SEQ ID NO: 418510 - DNA, 19 bp, Homo sapiens
  siRNA target sequence for FLJ35843 (NM_152591.1,1803-1821).
ggagaatcggagtaaggaa

SEQ ID NO: 418511 - DNA, 19 bp, Homo sapiens
  siRNA target sequence for C14orf49 (NM_152592.2,301-319).
gagacagtcacctacatga

SEQ ID NO: 418512 - DNA, 19 bp, Homo sapiens
  siRNA target sequence for C14orf49 (NM_152592.2,858-876).
gcagtctgcgggtgtcatt

SEQ ID NO: 418513 - DNA, 19 bp, Homo sapiens
  siRNA target sequence for C14orf49 (NM_152592.2,1013-1031).
gggagcagcagattaagca

SEQ ID NO: 418514 - DNA, 19 bp, Homo sapiens
  siRNA target sequence for C14orf49 (NM_152592.2,1240-1258).
ctgaagccactctctgata

SEQ ID NO: 418515 - DNA, 19 bp, Homo sapiens
  siRNA target sequence for C14orf49 (NM_152592.2,1242-1260).
gaagccactctctgatagt

SEQ ID NO: 418516 - DNA, 19 bp, Homo sapiens
  siRNA target sequence for C14orf49 (NM_152592.2,1749-1767).
gcgggaccttcctggaaaa

SEQ ID NO: 418517 - DNA, 19 bp, Homo sapiens
  siRNA target sequence for C14orf49 (NM_152592.2,2355-2373).
caatcccatggatcctatt

SEQ ID NO: 418518 - DNA, 19 bp, Homo sapiens
  siRNA target sequence for C14orf49 (NM_152592.2,2384-2402).
gtcgacgcgcaaatcttct

SEQ ID NO: 418519 - DNA, 19 bp, Homo sapiens
  siRNA target sequence for C14orf49 (NM_152592.2,2387-2405).
gacgcgcaaatcttctaca

SEQ ID NO: 418520 - DNA, 19 bp, Homo sapiens
  siRNA target sequence for C14orf49 (NM_152592.2,2496-2514).
catcgcaatgagaacttct

SEQ ID NO: 418521 - DNA, 19 bp, Homo sapiens
  siRNA target sequence for C14orf49 (NM_152592.2,2578-2596).
ggtcagcatctctttgaga

SEQ ID NO: 418522 - DNA, 19 bp, Homo sapiens
  siRNA target sequence for C14orf49 (NM_152592.2,2721-2739).
ggagccgactggattccaa

SEQ ID NO: 418523 - DNA, 19 bp, Homo sapiens
  siRNA target sequence for C14orf49 (NM_152592.2,2722-2740).
gagccgactggattccaaa

SEQ ID NO: 418524 - DNA, 19 bp, Homo sapiens
  siRNA target sequence for C14orf49 (NM_152592.2,2725-2743).
ccgactggattccaaaaga

SEQ ID NO: 418525 - DNA, 19 bp, Homo sapiens
  siRNA target sequence for SPRED1 (NM_152594.1,121-139).
gcgacttctgacaacgata

SEQ ID NO: 418526 - DNA, 19 bp, Homo sapiens
  siRNA target sequence for SPRED1 (NM_152594.1,122-140).
cgacttctgacaacgataa

SEQ ID NO: 418527 - DNA, 19 bp, Homo sapiens
  siRNA target sequence for SPRED1 (NM_152594.1,123-141).
gacttctgacaacgataat

SEQ ID NO: 418528 - DNA, 19 bp, Homo sapiens
  siRNA target sequence for SPRED1 (NM_152594.1,128-146).
ctgacaacgataatagtta

SEQ ID NO: 418529 - DNA, 19 bp, Homo sapiens
  siRNA target sequence for SPRED1 (NM_152594.1,183-201).
ctcaagtggtggatggtta

SEQ ID NO: 418530 - DNA, 19 bp, Homo sapiens
  siRNA target sequence for SPRED1 (NM_152594.1,265-283).
ggctgtgctgactttttta

SEQ ID NO: 418531 - DNA, 19 bp, Homo sapiens
  siRNA target sequence for SPRED1 (NM_152594.1,399-417).
gtttggtcttacgtttcaa

SEQ ID NO: 418532 - DNA, 19 bp, Homo sapiens
  siRNA target sequence for SPRED1 (NM_152594.1,427-445).
gatgctagggcttttgata

SEQ ID NO: 418533 - DNA, 19 bp, Homo sapiens
  siRNA target sequence for SPRED1 (NM_152594.1,449-467).
gtatccgaagagctataga

SEQ ID NO: 418534 - DNA, 19 bp, Homo sapiens
  siRNA target sequence for SPRED1 (NM_152594.1,455-473).
gaagagctatagaggatat

SEQ ID NO: 418535 - DNA, 19 bp, Homo sapiens
  siRNA target sequence for SPRED1 (NM_152594.1,478-496).
caaggatgccccgaatcaa

SEQ ID NO: 418536 - DNA, 19 bp, Homo sapiens
  siRNA target sequence for SPRED1 (NM_152594.1,481-499).
ggatgccccgaatcaaaaa

SEQ ID NO: 418537 - DNA, 19 bp, Homo sapiens
  siRNA target sequence for SPRED1 (NM_152594.1,592-610).
gttaccagtgagccttata

SEQ ID NO: 418538 - DNA, 19 bp, Homo sapiens
  siRNA target sequence for SPRED1 (NM_152594.1,605-623).
cttatagaagctcaaatat

SEQ ID NO: 418539 - DNA, 19 bp, Homo sapiens
  siRNA target sequence for SPRED1 (NM_152594.1,675-693).
ccaagccaatcagataaca

SEQ ID NO: 418540 - DNA, 19 bp, Homo sapiens
  siRNA target sequence for SPRED1 (NM_152594.1,676-694).
caagccaatcagataacat

SEQ ID NO: 418541 - DNA, 19 bp, Homo sapiens
  siRNA target sequence for SPRED1 (NM_152594.1,681-699).
caatcagataacatttggt

SEQ ID NO: 418542 - DNA, 19 bp, Homo sapiens
  siRNA target sequence for SPRED1 (NM_152594.1,722-740).
gcagaagtatggaatacgt

SEQ ID NO: 418543 - DNA, 19 bp, Homo sapiens
  siRNA target sequence for SPRED1 (NM_152594.1,723-741).
cagaagtatggaatacgta

SEQ ID NO: 418544 - DNA, 19 bp, Homo sapiens
  siRNA target sequence for SPRED1 (NM_152594.1,739-757).
gtacagcggcaaatatcca

SEQ ID NO: 418545 - DNA, 19 bp, Homo sapiens
  siRNA target sequence for SPRED1 (NM_152594.1,745-763).
cggcaaatatccaaggaat

SEQ ID NO: 418546 - DNA, 19 bp, Homo sapiens
  siRNA target sequence for SPRED1 (NM_152594.1,760-778).
gaatgtggaagcctaaagt

SEQ ID NO: 418547 - DNA, 19 bp, Homo sapiens
  siRNA target sequence for SPRED1 (NM_152594.1,788-806).
gggtccctttgaaatcaat

SEQ ID NO: 418548 - DNA, 19 bp, Homo sapiens
  siRNA target sequence for SPRED1 (NM_152594.1,807-825).
cagacatgtcagctttcaa

SEQ ID NO: 418549 - DNA, 19 bp, Homo sapiens
  siRNA target sequence for SPRED1 (NM_152594.1,831-849).
ggatgagattgtcagaata

SEQ ID NO: 418550 - DNA, 19 bp, Homo sapiens
  siRNA target sequence for SPRED1 (NM_152594.1,832-850).
gatgagattgtcagaataa

SEQ ID NO: 418551 - DNA, 19 bp, Homo sapiens
  siRNA target sequence for SPRED1 (NM_152594.1,845-863).
gaataaaccctcgagatat

SEQ ID NO: 418552 - DNA, 19 bp, Homo sapiens
  siRNA target sequence for SPRED1 (NM_152594.1,996-1014).
ggatgagactaagttaagt

SEQ ID NO: 418553 - DNA, 19 bp, Homo sapiens
  siRNA target sequence for SPRED1 (NM_152594.1,1019-1037).
ccaaagactctgtggtatt

SEQ ID NO: 418554 - DNA, 19 bp, Homo sapiens
  siRNA target sequence for SPRED1 (NM_152594.1,1043-1061).
cgcagccttcctcattaaa

SEQ ID NO: 418555 - DNA, 19 bp, Homo sapiens
  siRNA target sequence for SPRED1 (NM_152594.1,1045-1063).
cagccttcctcattaaaaa

SEQ ID NO: 418556 - DNA, 19 bp, Homo sapiens
  siRNA target sequence for SPRED1 (NM_152594.1,1099-1117).
cgttctcgctgcgtatact

SEQ ID NO: 418557 - DNA, 19 bp, Homo sapiens
  siRNA target sequence for SPRED1 (NM_152594.1,1118-1136).
gccaggaaaggtttaatca

SEQ ID NO: 418558 - DNA, 19 bp, Homo sapiens
  siRNA target sequence for SPRED1 (NM_152594.1,1165-1183).
gatgctccagaccctatta

SEQ ID NO: 418559 - DNA, 19 bp, Homo sapiens
  siRNA target sequence for SPRED1 (NM_152594.1,1176-1194).
ccctattaaaagatgcata

SEQ ID NO: 418560 - DNA, 19 bp, Homo sapiens
  siRNA target sequence for SPRED1 (NM_152594.1,1217-1235).
gtgcagagagcatgttgta

SEQ ID NO: 418561 - DNA, 19 bp, Homo sapiens
  siRNA target sequence for SPRED1 (NM_152594.1,1224-1242).
gagcatgttgtatcattgt

SEQ ID NO: 418562 - DNA, 19 bp, Homo sapiens
  siRNA target sequence for SPRED1 (NM_152594.1,1302-1320).
gttctgcttgcgatggtta

SEQ ID NO: 418563 - DNA, 19 bp, Homo sapiens
  siRNA target sequence for SPRED1 (NM_152594.1,1316-1334).
ggttagccctggtagcttt

SEQ ID NO: 418564 - DNA, 19 bp, Homo sapiens
  siRNA target sequence for SPRED1 (NM_152594.1,1322-1340).
ccctggtagctttgtcttt

SEQ ID NO: 418565 - DNA, 19 bp, Homo sapiens
  siRNA target sequence for SPRED1 (NM_152594.1,1359-1377).
ctgctacgtccctttgaga

SEQ ID NO: 418566 - DNA, 19 bp, Homo sapiens
  siRNA target sequence for SPRED1 (NM_152594.1,1361-1379).
gctacgtccctttgagaat

SEQ ID NO: 418567 - DNA, 19 bp, Homo sapiens
  siRNA target sequence for PGBD4 (NM_152595.2,488-506).
cctatgcgtgatagtaata

SEQ ID NO: 418568 - DNA, 19 bp, Homo sapiens
  siRNA target sequence for PGBD4 (NM_152595.2,507-525).
ccggtctcgaacagttgtt

SEQ ID NO: 418569 - DNA, 19 bp, Homo sapiens
  siRNA target sequence for PGBD4 (NM_152595.2,530-548).
gaagattcatttgatgaat

SEQ ID NO: 418570 - DNA, 19 bp, Homo sapiens
  siRNA target sequence for PGBD4 (NM_152595.2,549-567).
ctgatttttcggaaataga

SEQ ID NO: 418571 - DNA, 19 bp, Homo sapiens
  siRNA target sequence for PGBD4 (NM_152595.2,594-612).
ctttagaagccgataagat

SEQ ID NO: 418572 - DNA, 19 bp, Homo sapiens
  siRNA target sequence for PGBD4 (NM_152595.2,613-631).
caggcctctgtcccattta

SEQ ID NO: 418573 - DNA, 19 bp, Homo sapiens
  siRNA target sequence for PGBD4 (NM_152595.2,616-634).
gcctctgtcccatttagaa

SEQ ID NO: 418574 - DNA, 19 bp, Homo sapiens
  siRNA target sequence for PGBD4 (NM_152595.2,622-640).
gtcccatttagaatctgat

SEQ ID NO: 418575 - DNA, 19 bp, Homo sapiens
  siRNA target sequence for PGBD4 (NM_152595.2,638-656).
gatggaaagagctctacat

SEQ ID NO: 418576 - DNA, 19 bp, Homo sapiens
  siRNA target sequence for PGBD4 (NM_152595.2,664-682).
ctcagggcgctccatgaaa

SEQ ID NO: 418577 - DNA, 19 bp, Homo sapiens
  siRNA target sequence for PGBD4 (NM_152595.2,668-686).
gggcgctccatgaaatggt

SEQ ID NO: 418578 - DNA, 19 bp, Homo sapiens
  siRNA target sequence for PGBD4 (NM_152595.2,685-703).
gtcagctcgtgctatgatt

SEQ ID NO: 418579 - DNA, 19 bp, Homo sapiens
  siRNA target sequence for PGBD4 (NM_152595.2,700-718).
gattccacgtcaaaggtat

SEQ ID NO: 418580 - DNA, 19 bp, Homo sapiens
  siRNA target sequence for PGBD4 (NM_152595.2,704-722).
ccacgtcaaaggtatgact

SEQ ID NO: 418581 - DNA, 19 bp, Homo sapiens
  siRNA target sequence for PGBD4 (NM_152595.2,748-766).
cgatgtcagtgatatcact

SEQ ID NO: 418582 - DNA, 19 bp, Homo sapiens
  siRNA target sequence for PGBD4 (NM_152595.2,864-882).
caccgggtccgaaaggatt

SEQ ID NO: 418583 - DNA, 19 bp, Homo sapiens
  siRNA target sequence for PGBD4 (NM_152595.2,866-884).
ccgggtccgaaaggatttt

SEQ ID NO: 418584 - DNA, 19 bp, Homo sapiens
  siRNA target sequence for PGBD4 (NM_152595.2,878-896).
ggattttcgcgaatggata

SEQ ID NO: 418585 - DNA, 19 bp, Homo sapiens
  siRNA target sequence for PGBD4 (NM_152595.2,879-897).
gattttcgcgaatggataa

SEQ ID NO: 418586 - DNA, 19 bp, Homo sapiens
  siRNA target sequence for PGBD4 (NM_152595.2,885-903).
cgcgaatggataaatggaa

SEQ ID NO: 418587 - DNA, 19 bp, Homo sapiens
  siRNA target sequence for PGBD4 (NM_152595.2,886-904).
gcgaatggataaatggaaa

SEQ ID NO: 418588 - DNA, 19 bp, Homo sapiens
  siRNA target sequence for PGBD4 (NM_152595.2,919-937).
cgagctcaaagtctttttt

SEQ ID NO: 418589 - DNA, 19 bp, Homo sapiens
  siRNA target sequence for PGBD4 (NM_152595.2,990-1008).
ggtcaacaaggcctctttt

SEQ ID NO: 418590 - DNA, 19 bp, Homo sapiens
  siRNA target sequence for PGBD4 (NM_152595.2,1017-1035).
cttatctcaggcaaattat

SEQ ID NO: 418591 - DNA, 19 bp, Homo sapiens
  siRNA target sequence for PGBD4 (NM_152595.2,1060-1078).
gtttcggtgcctgcatttt

SEQ ID NO: 418592 - DNA, 19 bp, Homo sapiens
  siRNA target sequence for PGBD4 (NM_152595.2,1064-1082).
cggtgcctgcattttgtca

SEQ ID NO: 418593 - DNA, 19 bp, Homo sapiens
  siRNA target sequence for PGBD4 (NM_152595.2,1065-1083).
ggtgcctgcattttgtcaa

SEQ ID NO: 418594 - DNA, 19 bp, Homo sapiens
  siRNA target sequence for PGBD4 (NM_152595.2,1068-1086).
gcctgcattttgtcaacaa

SEQ ID NO: 418595 - DNA, 19 bp, Homo sapiens
  siRNA target sequence for PGBD4 (NM_152595.2,1192-1210).
cagaaacattgcagttgat

SEQ ID NO: 418596 - DNA, 19 bp, Homo sapiens
  siRNA target sequence for PGBD4 (NM_152595.2,1225-1243).
gttcaaggggccattagct

SEQ ID NO: 418597 - DNA, 19 bp, Homo sapiens
  siRNA target sequence for PGBD4 (NM_152595.2,1249-1267).
gcagtacctcccgacaaaa

SEQ ID NO: 418598 - DNA, 19 bp, Homo sapiens
  siRNA target sequence for PGBD4 (NM_152595.2,1252-1270).
gtacctcccgacaaaacga

SEQ ID NO: 418599 - DNA, 19 bp, Homo sapiens
  siRNA target sequence for PGBD4 (NM_152595.2,1260-1278).
cgacaaaacgagtacgatt

SEQ ID NO: 418600 - DNA, 19 bp, Homo sapiens
  siRNA target sequence for PGBD4 (NM_152595.2,1261-1279).
gacaaaacgagtacgattt

SEQ ID NO: 418601 - DNA, 19 bp, Homo sapiens
  siRNA target sequence for PGBD4 (NM_152595.2,1281-1299).
gtctgaagctatatgtact

SEQ ID NO: 418602 - DNA, 19 bp, Homo sapiens
  siRNA target sequence for PGBD4 (NM_152595.2,1288-1306).
gctatatgtactttgtgaa

SEQ ID NO: 418603 - DNA, 19 bp, Homo sapiens
  siRNA target sequence for PGBD4 (NM_152595.2,1373-1391).
gcggatggcctgaaatcat

SEQ ID NO: 418604 - DNA, 19 bp, Homo sapiens
  siRNA target sequence for PGBD4 (NM_152595.2,1440-1458).
gtgtcttcctcgataactt

SEQ ID NO: 418605 - DNA, 19 bp, Homo sapiens
  siRNA target sequence for PGBD4 (NM_152595.2,1442-1460).
gtcttcctcgataacttta

SEQ ID NO: 418606 - DNA, 19 bp, Homo sapiens
  siRNA target sequence for PGBD4 (NM_152595.2,1514-1532).
gggacagctcgtttgaaca

SEQ ID NO: 418607 - DNA, 19 bp, Homo sapiens
  siRNA target sequence for PGBD4 (NM_152595.2,1518-1536).
cagctcgtttgaacagaaa

SEQ ID NO: 418608 - DNA, 19 bp, Homo sapiens
  siRNA target sequence for PGBD4 (NM_152595.2,1521-1539).
ctcgtttgaacagaaaaca

SEQ ID NO: 418609 - DNA, 19 bp, Homo sapiens
  siRNA target sequence for PGBD4 (NM_152595.2,1540-1558).
gattccaaatgatctgaaa

SEQ ID NO: 418610 - DNA, 19 bp, Homo sapiens
  siRNA target sequence for PGBD4 (NM_152595.2,1604-1622).
cttatggcactgaaatggt

SEQ ID NO: 418611 - DNA, 19 bp, Homo sapiens
  siRNA target sequence for PGBD4 (NM_152595.2,1648-1666).
gtcaacattccacaatgat

SEQ ID NO: 418612 - DNA, 19 bp, Homo sapiens
  siRNA target sequence for PGBD4 (NM_152595.2,1653-1671).
cattccacaatgatactgt

SEQ ID NO: 418613 - DNA, 19 bp, Homo sapiens
  siRNA target sequence for PGBD4 (NM_152595.2,1713-1731).
cacgtgtcattgtggatta

SEQ ID NO: 418614 - DNA, 19 bp, Homo sapiens
  siRNA target sequence for PGBD4 (NM_152595.2,1715-1733).
cgtgtcattgtggattata

SEQ ID NO: 418615 - DNA, 19 bp, Homo sapiens
  siRNA target sequence for PGBD4 (NM_152595.2,1724-1742).
gtggattataacgagaata

SEQ ID NO: 418616 - DNA, 19 bp, Homo sapiens
  siRNA target sequence for PGBD4 (NM_152595.2,1751-1769).
gtggactcggctgatcaaa

SEQ ID NO: 418617 - DNA, 19 bp, Homo sapiens
  siRNA target sequence for PGBD4 (NM_152595.2,1756-1774).
ctcggctgatcaaatgctt

SEQ ID NO: 418618 - DNA, 19 bp, Homo sapiens
  siRNA target sequence for PGBD4 (NM_152595.2,1760-1778).
gctgatcaaatgcttactt

SEQ ID NO: 418619 - DNA, 19 bp, Homo sapiens
  siRNA target sequence for PGBD4 (NM_152595.2,1785-1803).
catctgagcgcaaaagaca

SEQ ID NO: 418620 - DNA, 19 bp, Homo sapiens
  siRNA target sequence for PGBD4 (NM_152595.2,1793-1811).
cgcaaaagacacaaggttt

SEQ ID NO: 418621 - DNA, 19 bp, Homo sapiens
  siRNA target sequence for PGBD4 (NM_152595.2,1870-1888).
gttcaagaaggataatcct

SEQ ID NO: 418622 - DNA, 19 bp, Homo sapiens
  siRNA target sequence for PGBD4 (NM_152595.2,1891-1909).
gcacacgatgagccatata

SEQ ID NO: 418623 - DNA, 19 bp, Homo sapiens
  siRNA target sequence for PGBD4 (NM_152595.2,1892-1910).
cacacgatgagccatataa

SEQ ID NO: 418624 - DNA, 19 bp, Homo sapiens
  siRNA target sequence for PGBD4 (NM_152595.2,1912-1930).
cttcagactggcattgatt

SEQ ID NO: 418625 - DNA, 19 bp, Homo sapiens
  siRNA target sequence for PGBD4 (NM_152595.2,2013-2031).
gtctgtctggaagacattt

SEQ ID NO: 418626 - DNA, 19 bp, Homo sapiens
  siRNA target sequence for PGBD4 (NM_152595.2,2069-2087).
ccaactggtcgctgcaaaa

SEQ ID NO: 418627 - DNA, 19 bp, Homo sapiens
  siRNA target sequence for PGBD4 (NM_152595.2,2070-2088).
caactggtcgctgcaaaat

SEQ ID NO: 418628 - DNA, 19 bp, Homo sapiens
  siRNA target sequence for PGBD4 (NM_152595.2,2127-2145).
ggaaagaaacgcgctattt

SEQ ID NO: 418629 - DNA, 19 bp, Homo sapiens
  siRNA target sequence for PGBD4 (NM_152595.2,2128-2146).
gaaagaaacgcgctatttt

SEQ ID NO: 418630 - DNA, 19 bp, Homo sapiens
  siRNA target sequence for PGBD4 (NM_152595.2,2174-2192).
gttgttccgtgctttgaaa

SEQ ID NO: 418631 - DNA, 19 bp, Homo sapiens
  siRNA target sequence for PGBD4 (NM_152595.2,2177-2195).
gttccgtgctttgaaattt

SEQ ID NO: 418632 - DNA, 19 bp, Homo sapiens
  siRNA target sequence for PGBD4 (NM_152595.2,2189-2207).
gaaatttaccacacgaaaa

SEQ ID NO: 418633 - DNA, 19 bp, Homo sapiens
  siRNA target sequence for FLJ35989 (NM_152597.3,225-243).
gggaaacctagatggaatt

SEQ ID NO: 418634 - DNA, 19 bp, Homo sapiens
  siRNA target sequence for FLJ35989 (NM_152597.3,226-244).
ggaaacctagatggaattt

SEQ ID NO: 418635 - DNA, 19 bp, Homo sapiens
  siRNA target sequence for FLJ35989 (NM_152597.3,375-393).
ccactccgaaagcagtaat

SEQ ID NO: 418636 - DNA, 19 bp, Homo sapiens
  siRNA target sequence for FLJ35989 (NM_152597.3,376-394).
cactccgaaagcagtaata

SEQ ID NO: 418637 - DNA, 19 bp, Homo sapiens
  siRNA target sequence for FLJ35989 (NM_152597.3,407-425).
gaactagtaatgatgataa

SEQ ID NO: 418638 - DNA, 19 bp, Homo sapiens
  siRNA target sequence for FLJ35989 (NM_152597.3,603-621).
gaaacaacgcagagaaaaa

SEQ ID NO: 418639 - DNA, 19 bp, Homo sapiens
  siRNA target sequence for FLJ35989 (NM_152597.3,633-651).
gcaaggtctagaaatgaga

SEQ ID NO: 418640 - DNA, 19 bp, Homo sapiens
  siRNA target sequence for FLJ35989 (NM_152597.3,634-652).
caaggtctagaaatgagaa

SEQ ID NO: 418641 - DNA, 19 bp, Homo sapiens
  siRNA target sequence for FLJ35989 (NM_152597.3,637-655).
ggtctagaaatgagaataa

SEQ ID NO: 418642 - DNA, 19 bp, Homo sapiens
  siRNA target sequence for FLJ35989 (NM_152597.3,915-933).
gaaacctttctcgaataca

SEQ ID NO: 418643 - DNA, 19 bp, Homo sapiens
  siRNA target sequence for FLJ35989 (NM_152597.3,943-961).
gagctcaggggtaaacaca

SEQ ID NO: 418644 - DNA, 19 bp, Homo sapiens
  siRNA target sequence for FLJ35989 (NM_152597.3,1004-1022).
caagaaacccagtggttat

SEQ ID NO: 418645 - DNA, 19 bp, Homo sapiens
  siRNA target sequence for FLJ35989 (NM_152597.3,1043-1061).
ggctggttgagcttttgaa

SEQ ID NO: 418646 - DNA, 19 bp, Homo sapiens
  siRNA target sequence for FLJ35989 (NM_152597.3,1062-1080).
ggacttggatgagaaagat

SEQ ID NO: 418647 - DNA, 19 bp, Homo sapiens
  siRNA target sequence for FLJ35989 (NM_152597.3,1115-1133).
gctgggtggtcccagtaaa

SEQ ID NO: 418648 - DNA, 19 bp, Homo sapiens
  siRNA target sequence for FLJ35989 (NM_152597.3,1122-1140).
ggtcccagtaaaaggatat

SEQ ID NO: 418649 - DNA, 19 bp, Homo sapiens
  siRNA target sequence for FLJ35989 (NM_152597.3,1164-1182).
gcagcttgctgaaattgat

SEQ ID NO: 418650 - DNA, 19 bp, Homo sapiens
  siRNA target sequence for FLJ35989 (NM_152597.3,1243-1261).
gaaaatcggaataatcaga

SEQ ID NO: 418651 - DNA, 19 bp, Homo sapiens
  siRNA target sequence for FLJ35989 (NM_152597.3,1332-1350).
gcaacgcgatctgcataat

SEQ ID NO: 418652 - DNA, 19 bp, Homo sapiens
  siRNA target sequence for FLJ35989 (NM_152597.3,1444-1462).
ctggatgaatgcatactta

SEQ ID NO: 418653 - DNA, 19 bp, Homo sapiens
  siRNA target sequence for FLJ35989 (NM_152597.3,1473-1491).
catcattaaactttcttca

SEQ ID NO: 418654 - DNA, 19 bp, Homo sapiens
  siRNA target sequence for FLJ35989 (NM_152597.3,1544-1562).
ccaggtccatcatctctaa

SEQ ID NO: 418655 - DNA, 19 bp, Homo sapiens
  siRNA target sequence for FLJ35989 (NM_152597.3,1547-1565).
ggtccatcatctctaaatt

SEQ ID NO: 418656 - DNA, 19 bp, Homo sapiens
  siRNA target sequence for FLJ35989 (NM_152597.3,1643-1661).
cttctaaaggctactatct

SEQ ID NO: 418657 - DNA, 19 bp, Homo sapiens
  siRNA target sequence for FLJ35989 (NM_152597.3,1740-1758).
caaggacgttattattagt

SEQ ID NO: 418658 - DNA, 19 bp, Homo sapiens
  siRNA target sequence for FLJ35989 (NM_152597.3,1845-1863).
cagtgtgagcctttcatca

SEQ ID NO: 418659 - DNA, 19 bp, Homo sapiens
  siRNA target sequence for FLJ35989 (NM_152597.3,1867-1885).
gaccaacatctgaaactca

SEQ ID NO: 418660 - DNA, 19 bp, Homo sapiens
  siRNA target sequence for FLJ35757 (NM_152598.1,331-349).
gggacatgcagcataaggt

SEQ ID NO: 418661 - DNA, 19 bp, Homo sapiens
  siRNA target sequence for FLJ35757 (NM_152598.1,430-448).
ggcaagagacaagttttga

SEQ ID NO: 418662 - DNA, 19 bp, Homo sapiens
  siRNA target sequence for FLJ35757 (NM_152598.1,447-465).
gagagatcccggttttcta

SEQ ID NO: 418663 - DNA, 19 bp, Homo sapiens
  siRNA target sequence for FLJ35757 (NM_152598.1,513-531).
gaaccaaggtcatctatca

SEQ ID NO: 418664 - DNA, 19 bp, Homo sapiens
  siRNA target sequence for FLJ35757 (NM_152598.1,556-574).
ccaaacttccagcaattga

SEQ ID NO: 418665 - DNA, 19 bp, Homo sapiens
  siRNA target sequence for FLJ35757 (NM_152598.1,583-601).
cagtcaagcagaaacataa

SEQ ID NO: 418666 - DNA, 19 bp, Homo sapiens
  siRNA target sequence for FLJ35757 (NM_152598.1,604-622).
gtaccatgactgtaaggaa

SEQ ID NO: 418667 - DNA, 19 bp, Homo sapiens
  siRNA target sequence for FLJ35757 (NM_152598.1,666-684).
gcaccaatggttttattaa

SEQ ID NO: 418668 - DNA, 19 bp, Homo sapiens
  siRNA target sequence for FLJ35757 (NM_152598.1,1069-1087).
gaaaggcatcatttaggtt

SEQ ID NO: 418669 - DNA, 19 bp, Homo sapiens
  siRNA target sequence for FLJ35757 (NM_152598.1,1084-1102).
ggttccgagatgaagactt

SEQ ID NO: 418670 - DNA, 19 bp, Homo sapiens
  siRNA target sequence for FLJ35757 (NM_152598.1,1085-1103).
gttccgagatgaagacttt

SEQ ID NO: 418671 - DNA, 19 bp, Homo sapiens
  siRNA target sequence for FLJ35757 (NM_152598.1,1089-1107).
cgagatgaagacttttatt

SEQ ID NO: 418672 - DNA, 19 bp, Homo sapiens
  siRNA target sequence for FLJ35757 (NM_152598.1,1244-1262).
gacccctcaggccaaaaat

SEQ ID NO: 418673 - DNA, 19 bp, Homo sapiens
  siRNA target sequence for FLJ35757 (NM_152598.1,1476-1494).
ctttcgtgggacaccaaat

SEQ ID NO: 418674 - DNA, 19 bp, Homo sapiens
  siRNA target sequence for FLJ35757 (NM_152598.1,1573-1591).
cccatgattctgaaggata

SEQ ID NO: 418675 - DNA, 19 bp, Homo sapiens
  siRNA target sequence for FLJ35757 (NM_152598.1,1731-1749).
ccagtagacttgtcaatgt

SEQ ID NO: 418676 - DNA, 19 bp, Homo sapiens
  siRNA target sequence for FLJ35757 (NM_152598.1,1734-1752).
gtagacttgtcaatgtcat

SEQ ID NO: 418677 - DNA, 19 bp, Homo sapiens
  siRNA target sequence for FLJ35757 (NM_152598.1,1781-1799).
gggaaactcagggtttcat

SEQ ID NO: 418678 - DNA, 19 bp, Homo sapiens
  siRNA target sequence for FLJ35757 (NM_152598.1,1842-1860).
gccagtgccgaaaaccata

SEQ ID NO: 418679 - DNA, 19 bp, Homo sapiens
  siRNA target sequence for FLJ35757 (NM_152598.1,1843-1861).
ccagtgccgaaaaccataa

SEQ ID NO: 418680 - DNA, 19 bp, Homo sapiens
  siRNA target sequence for FLJ35757 (NM_152598.1,1846-1864).
gtgccgaaaaccataatta

SEQ ID NO: 418681 - DNA, 19 bp, Homo sapiens
  siRNA target sequence for FLJ35757 (NM_152598.1,1848-1866).
gccgaaaaccataattatt

SEQ ID NO: 418682 - DNA, 19 bp, Homo sapiens
  siRNA target sequence for FLJ35757 (NM_152598.1,1901-1919).
ggaagcagaagatactact

SEQ ID NO: 418683 - DNA, 19 bp, Homo sapiens
  siRNA target sequence for FLJ35757 (NM_152598.1,1908-1926).
gaagatactactttaacaa

SEQ ID NO: 418684 - DNA, 19 bp, Homo sapiens
  siRNA target sequence for FLJ35757 (NM_152598.1,1933-1951).
ctcagggggctccactata

SEQ ID NO: 418685 - DNA, 19 bp, Homo sapiens
  siRNA target sequence for FLJ35757 (NM_152598.1,1937-1955).
gggggctccactatataca

SEQ ID NO: 418686 - DNA, 19 bp, Homo sapiens
  siRNA target sequence for FLJ35757 (NM_152598.1,1939-1957).
gggctccactatatacaga

SEQ ID NO: 418687 - DNA, 19 bp, Homo sapiens
  siRNA target sequence for FLJ35757 (NM_152598.1,1940-1958).
ggctccactatatacagat

SEQ ID NO: 418688 - DNA, 19 bp, Homo sapiens
  siRNA target sequence for FLJ35757 (NM_152598.1,1945-1963).
cactatatacagatctctt

SEQ ID NO: 418689 - DNA, 19 bp, Homo sapiens
  siRNA target sequence for FLJ35757 (NM_152598.1,2027-2045).
ctcagaaggccatttgcat

SEQ ID NO: 418690 - DNA, 19 bp, Homo sapiens
  siRNA target sequence for FLJ35757 (NM_152598.1,2179-2197).
cagaccctgagaaactcaa

SEQ ID NO: 418691 - DNA, 19 bp, Homo sapiens
  siRNA target sequence for FLJ35757 (NM_152598.1,2249-2267).
gtgtcgcatctgtcagata

SEQ ID NO: 418692 - DNA, 19 bp, Homo sapiens
  siRNA target sequence for FLJ35757 (NM_152598.1,2315-2333).
gggaagcctgcagtttgtt

SEQ ID NO: 418693 - DNA, 19 bp, Homo sapiens
  siRNA target sequence for FLJ35757 (NM_152598.1,2320-2338).
gcctgcagtttgttcatca

SEQ ID NO: 418694 - DNA, 19 bp, Homo sapiens
  siRNA target sequence for FLJ35757 (NM_152598.1,2337-2355).
caagagtgcctgaaaaagt

SEQ ID NO: 418695 - DNA, 19 bp, Homo sapiens
  siRNA target sequence for FLJ35757 (NM_152598.1,2433-2451).
gttgacctgggtgacttta

SEQ ID NO: 418696 - DNA, 19 bp, Homo sapiens
  siRNA target sequence for FLJ35757 (NM_152598.1,2436-2454).
gacctgggtgactttaaca

SEQ ID NO: 418697 - DNA, 19 bp, Homo sapiens
  siRNA target sequence for FLJ35757 (NM_152598.1,2445-2463).
gactttaacatgattgagt

SEQ ID NO: 418698 - DNA, 19 bp, Homo sapiens
  siRNA target sequence for FLJ35757 (NM_152598.1,2491-2509).
cacaaaacgagctgatgaa

SEQ ID NO: 418699 - DNA, 19 bp, Homo sapiens
  siRNA target sequence for FLJ35757 (NM_152598.1,2493-2511).
caaaacgagctgatgaatt

SEQ ID NO: 418700 - DNA, 19 bp, Homo sapiens
  siRNA target sequence for FLJ35773 (NM_152599.1,381-399).
gccttcctggccaaaagct

SEQ ID NO: 418701 - DNA, 19 bp, Homo sapiens
  siRNA target sequence for FLJ35773 (NM_152599.1,382-400).
ccttcctggccaaaagcta

SEQ ID NO: 418702 - DNA, 19 bp, Homo sapiens
  siRNA target sequence for FLJ35773 (NM_152599.1,471-489).
gtcccaccggtagacaaaa

SEQ ID NO: 418703 - DNA, 19 bp, Homo sapiens
  siRNA target sequence for FLJ35773 (NM_152599.1,473-491).
cccaccggtagacaaaaat

SEQ ID NO: 418704 - DNA, 19 bp, Homo sapiens
  siRNA target sequence for FLJ35773 (NM_152599.1,493-511).
gggtgcacttcccttgtaa

SEQ ID NO: 418705 - DNA, 19 bp, Homo sapiens
  siRNA target sequence for FLJ35773 (NM_152599.1,494-512).
ggtgcacttcccttgtaat

SEQ ID NO: 418706 - DNA, 19 bp, Homo sapiens
  siRNA target sequence for FLJ35773 (NM_152599.1,754-772).
cttcggggctgaaagatca

SEQ ID NO: 418707 - DNA, 19 bp, Homo sapiens
  siRNA target sequence for FLJ35773 (NM_152599.1,768-786).
gatcatccctgggaagtta

SEQ ID NO: 418708 - DNA, 19 bp, Homo sapiens
  siRNA target sequence for FLJ35773 (NM_152599.1,771-789).
catccctgggaagttactt

SEQ ID NO: 418709 - DNA, 19 bp, Homo sapiens
  siRNA target sequence for FLJ35773 (NM_152599.1,775-793).
cctgggaagttacttttga

SEQ ID NO: 418710 - DNA, 19 bp, Homo sapiens
  siRNA target sequence for FLJ35773 (NM_152599.1,842-860).
gaatccagccaatttgtca

SEQ ID NO: 418711 - DNA, 19 bp, Homo sapiens
  siRNA target sequence for FLJ35773 (NM_152599.1,980-998).
ggcagatgacagcctttat

SEQ ID NO: 418712 - DNA, 19 bp, Homo sapiens
  siRNA target sequence for FLJ35773 (NM_152599.1,984-1002).
gatgacagcctttatgagt

SEQ ID NO: 418713 - DNA, 19 bp, Homo sapiens
  siRNA target sequence for FLJ35773 (NM_152599.1,1138-1156).
gaggtgtggtccacttcta

SEQ ID NO: 418714 - DNA, 19 bp, Homo sapiens
  siRNA target sequence for FLJ35773 (NM_152599.1,1226-1244).
gtgggagcccagctacaaa

SEQ ID NO: 418715 - DNA, 19 bp, Homo sapiens
  siRNA target sequence for FLJ35773 (NM_152599.1,1273-1291).
gtgacccccacctcattct

SEQ ID NO: 418716 - DNA, 19 bp, Homo sapiens
  siRNA target sequence for FLJ35773 (NM_152599.1,1293-1311).
ctcgcctccaccactgttt

SEQ ID NO: 418717 - DNA, 19 bp, Homo sapiens
  siRNA target sequence for FLJ35773 (NM_152599.1,1297-1315).
cctccaccactgttttggt

SEQ ID NO: 418718 - DNA, 19 bp, Homo sapiens
  siRNA target sequence for FLJ35773 (NM_152599.1,1298-1316).
ctccaccactgttttggta

SEQ ID NO: 418719 - DNA, 19 bp, Homo sapiens
  siRNA target sequence for FLJ35773 (NM_152599.1,1328-1346).
cagtactgtccagaacttt

SEQ ID NO: 418720 - DNA, 19 bp, Homo sapiens
  siRNA target sequence for FLJ35773 (NM_152599.1,1330-1348).
gtactgtccagaactttct

SEQ ID NO: 418721 - DNA, 19 bp, Homo sapiens
  siRNA target sequence for FLJ35773 (NM_152599.1,1409-1427).
cagcttgctgggggaaatt

SEQ ID NO: 418722 - DNA, 19 bp, Homo sapiens
  siRNA target sequence for FLJ35773 (NM_152599.1,1411-1429).
gcttgctgggggaaattct

SEQ ID NO: 418723 - DNA, 19 bp, Homo sapiens
  siRNA target sequence for FLJ35773 (NM_152599.1,1439-1457).
gttcaaagctacattgctt

SEQ ID NO: 418724 - DNA, 19 bp, Homo sapiens
  siRNA target sequence for FLJ35773 (NM_152599.1,1549-1567).
ccgtcctccccattcagat

SEQ ID NO: 418725 - DNA, 19 bp, Homo sapiens
  siRNA target sequence for FLJ35773 (NM_152599.1,1554-1572).
ctccccattcagatcttga

SEQ ID NO: 418726 - DNA, 19 bp, Homo sapiens
  siRNA target sequence for FLJ35773 (NM_152599.1,1818-1836).
ccccgagagcggaaaatca

SEQ ID NO: 418727 - DNA, 19 bp, Homo sapiens
  siRNA target sequence for FLJ35773 (NM_152599.1,1821-1839).
cgagagcggaaaatcaagt

SEQ ID NO: 418728 - DNA, 19 bp, Homo sapiens
  siRNA target sequence for FLJ35453 (NM_152600.1,1276-1294).
gctgccagcgggagttcaa

SEQ ID NO: 418729 - DNA, 19 bp, Homo sapiens
  siRNA target sequence for FLJ35453 (NM_152600.1,1531-1549).
cgctgcccctcgcaaacat

SEQ ID NO: 418730 - DNA, 19 bp, Homo sapiens
  siRNA target sequence for FLJ35453 (NM_152600.1,1532-1550).
gctgcccctcgcaaacatt

SEQ ID NO: 418731 - DNA, 19 bp, Homo sapiens
  siRNA target sequence for FLJ35453 (NM_152600.1,1533-1551).
ctgcccctcgcaaacatta

SEQ ID NO: 418732 - DNA, 19 bp, Homo sapiens
  siRNA target sequence for FLJ35453 (NM_152600.1,1537-1555).
ccctcgcaaacattaagga

SEQ ID NO: 418733 - DNA, 19 bp, Homo sapiens
  siRNA target sequence for FLJ38281 (NM_152601.1,469-487).
ggactatatgtgtcattca

SEQ ID NO: 418734 - DNA, 19 bp, Homo sapiens
  siRNA target sequence for FLJ38281 (NM_152601.1,470-488).
gactatatgtgtcattcat

SEQ ID NO: 418735 - DNA, 19 bp, Homo sapiens
  siRNA target sequence for FLJ38281 (NM_152601.1,512-530).
catactgaacatagatcat

SEQ ID NO: 418736 - DNA, 19 bp, Homo sapiens
  siRNA target sequence for FLJ38281 (NM_152601.1,518-536).
gaacatagatcatatgaat

SEQ ID NO: 418737 - DNA, 19 bp, Homo sapiens
  siRNA target sequence for FLJ38281 (NM_152601.1,525-543).
gatcatatgaatatcacaa

SEQ ID NO: 418738 - DNA, 19 bp, Homo sapiens
  siRNA target sequence for FLJ38281 (NM_152601.1,589-607).
cagctttcgaagttcattt

SEQ ID NO: 418739 - DNA, 19 bp, Homo sapiens
  siRNA target sequence for FLJ38281 (NM_152601.1,592-610).
ctttcgaagttcatttcga

SEQ ID NO: 418740 - DNA, 19 bp, Homo sapiens
  siRNA target sequence for FLJ38281 (NM_152601.1,1933-1951).
cagttgctcacgttccttt

SEQ ID NO: 418741 - DNA, 19 bp, Homo sapiens
  siRNA target sequence for FLJ37549 (NM_152605.1,1050-1068).
gagagcccatcttagtcaa

SEQ ID NO: 418742 - DNA, 19 bp, Homo sapiens
  siRNA target sequence for FLJ37549 (NM_152605.1,1130-1148).
cttgtttcctaccttaata

SEQ ID NO: 418743 - DNA, 19 bp, Homo sapiens
  siRNA target sequence for FLJ37549 (NM_152605.1,1207-1225).
ctttattgattgttcaact

SEQ ID NO: 418744 - DNA, 19 bp, Homo sapiens
  siRNA target sequence for FLJ37549 (NM_152605.1,1214-1232).
gattgttcaactcttaaca

SEQ ID NO: 418745 - DNA, 19 bp, Homo sapiens
  siRNA target sequence for FLJ37549 (NM_152605.1,1293-1311).
gcagagggcgcatcttact

SEQ ID NO: 418746 - DNA, 19 bp, Homo sapiens
  siRNA target sequence for FLJ40201 (NM_152607.1,217-235).
ccatactccacgcgttatt

SEQ ID NO: 418747 - DNA, 19 bp, Homo sapiens
  siRNA target sequence for FLJ40201 (NM_152607.1,601-619).
gcctggaaccggtctcatt

SEQ ID NO: 418748 - DNA, 19 bp, Homo sapiens
  siRNA target sequence for FLJ40201 (NM_152607.1,686-704).
gacccggcacctacttctt

SEQ ID NO: 418749 - DNA, 19 bp, Homo sapiens
  siRNA target sequence for FLJ40201 (NM_152607.1,865-883).
cttaactcacatcacaata

SEQ ID NO: 418750 - DNA, 19 bp, Homo sapiens
  siRNA target sequence for FLJ40201 (NM_152607.1,888-906).
gcatggggttttttctaaa

SEQ ID NO: 418751 - DNA, 19 bp, Homo sapiens
  siRNA target sequence for FLJ40201 (NM_152607.1,926-944).
cccctacagagaggattta

SEQ ID NO: 418752 - DNA, 19 bp, Homo sapiens
  siRNA target sequence for FLJ40201 (NM_152607.1,1158-1176).
caggcggcagcgatatcga

SEQ ID NO: 418753 - DNA, 19 bp, Homo sapiens
  siRNA target sequence for FLJ40201 (NM_152607.1,1225-1243).
gacatgctcatgcaaatca

SEQ ID NO: 418754 - DNA, 19 bp, Homo sapiens
  siRNA target sequence for FLJ40201 (NM_152607.1,1253-1271).
gttggaaaggcctagaagt

SEQ ID NO: 418755 - DNA, 19 bp, Homo sapiens
  siRNA target sequence for FLJ40201 (NM_152607.1,1256-1274).
ggaaaggcctagaagtcat

SEQ ID NO: 418756 - DNA, 19 bp, Homo sapiens
  siRNA target sequence for FLJ40201 (NM_152607.1,1261-1279).
ggcctagaagtcatcaatt

SEQ ID NO: 418757 - DNA, 19 bp, Homo sapiens
  siRNA target sequence for FLJ35382 (NM_152608.2,303-321).
ggagactacgcgatgtcaa

SEQ ID NO: 418758 - DNA, 19 bp, Homo sapiens
  siRNA target sequence for FLJ35382 (NM_152608.2,304-322).
gagactacgcgatgtcaat

SEQ ID NO: 418759 - DNA, 19 bp, Homo sapiens
  siRNA target sequence for FLJ35382 (NM_152608.2,306-324).
gactacgcgatgtcaatca

SEQ ID NO: 418760 - DNA, 19 bp, Homo sapiens
  siRNA target sequence for FLJ35382 (NM_152608.2,311-329).
cgcgatgtcaatcatgaaa

SEQ ID NO: 418761 - DNA, 19 bp, Homo sapiens
  siRNA target sequence for FLJ35382 (NM_152608.2,337-355).
ggctgaatgggtaaaacaa

SEQ ID NO: 418762 - DNA, 19 bp, Homo sapiens
  siRNA target sequence for FLJ35382 (NM_152608.2,360-378).
ccgagcgagaggctgaaaa

SEQ ID NO: 418763 - DNA, 19 bp, Homo sapiens
  siRNA target sequence for FLJ32001 (NM_152609.1,220-238).
cagcgatactcctacatat

SEQ ID NO: 418764 - DNA, 19 bp, Homo sapiens
  siRNA target sequence for FLJ32001 (NM_152609.1,222-240).
gcgatactcctacatatta

SEQ ID NO: 418765 - DNA, 19 bp, Homo sapiens
  siRNA target sequence for FLJ32001 (NM_152609.1,404-422).
gagcaggacagtctcaata

SEQ ID NO: 418766 - DNA, 19 bp, Homo sapiens
  siRNA target sequence for FLJ32001 (NM_152609.1,406-424).
gcaggacagtctcaataat

SEQ ID NO: 418767 - DNA, 19 bp, Homo sapiens
  siRNA target sequence for FLJ32001 (NM_152609.1,409-427).
ggacagtctcaataataat

SEQ ID NO: 418768 - DNA, 19 bp, Homo sapiens
  siRNA target sequence for FLJ32001 (NM_152609.1,602-620).
ggagatattgcacctttaa

SEQ ID NO: 418769 - DNA, 19 bp, Homo sapiens
  siRNA target sequence for FLJ32001 (NM_152609.1,603-621).
gagatattgcacctttaat

SEQ ID NO: 418770 - DNA, 19 bp, Homo sapiens
  siRNA target sequence for FLJ32001 (NM_152609.1,611-629).
gcacctttaatgcaagaaa

SEQ ID NO: 418771 - DNA, 19 bp, Homo sapiens
  siRNA target sequence for FLJ32001 (NM_152609.1,612-630).
cacctttaatgcaagaaaa

SEQ ID NO: 418772 - DNA, 19 bp, Homo sapiens
  siRNA target sequence for FLJ32001 (NM_152609.1,749-767).
gaagttgagcagttggatt

SEQ ID NO: 418773 - DNA, 19 bp, Homo sapiens
  siRNA target sequence for FLJ32001 (NM_152609.1,780-798).
ccctttgccttcatcagat

SEQ ID NO: 418774 - DNA, 19 bp, Homo sapiens
  siRNA target sequence for FLJ32001 (NM_152609.1,853-871).
gctagaacgattgtatcat

SEQ ID NO: 418775 - DNA, 19 bp, Homo sapiens
  siRNA target sequence for FLJ32001 (NM_152609.1,861-879).
gattgtatcatgagcaatt

SEQ ID NO: 418776 - DNA, 19 bp, Homo sapiens
  siRNA target sequence for FLJ32001 (NM_152609.1,874-892).
gcaattgctcgcaaatctt

SEQ ID NO: 418777 - DNA, 19 bp, Homo sapiens
  siRNA target sequence for FLJ32001 (NM_152609.1,875-893).
caattgctcgcaaatcttt

SEQ ID NO: 418778 - DNA, 19 bp, Homo sapiens
  siRNA target sequence for FLJ32001 (NM_152609.1,930-948).
ctgtgcaaccacatacagt

SEQ ID NO: 418779 - DNA, 19 bp, Homo sapiens
  siRNA target sequence for FLJ32001 (NM_152609.1,932-950).
gtgcaaccacatacagtta

SEQ ID NO: 418780 - DNA, 19 bp, Homo sapiens
  siRNA target sequence for FLJ32001 (NM_152609.1,947-965).
gttacggctctaaggaatt

SEQ ID NO: 418781 - DNA, 19 bp, Homo sapiens
  siRNA target sequence for FLJ32001 (NM_152609.1,951-969).
cggctctaaggaattcaga

SEQ ID NO: 418782 - DNA, 19 bp, Homo sapiens
  siRNA target sequence for FLJ32001 (NM_152609.1,974-992).
ggatttaatggtgaagatt

SEQ ID NO: 418783 - DNA, 19 bp, Homo sapiens
  siRNA target sequence for FLJ32001 (NM_152609.1,975-993).
gatttaatggtgaagattt

SEQ ID NO: 418784 - DNA, 19 bp, Homo sapiens
  siRNA target sequence for FLJ32001 (NM_152609.1,995-1013).
gaacggcttacgaaaattt

SEQ ID NO: 418785 - DNA, 19 bp, Homo sapiens
  siRNA target sequence for FLJ32001 (NM_152609.1,1006-1024).
gaaaatttgtgcaacacat

SEQ ID NO: 418786 - DNA, 19 bp, Homo sapiens
  siRNA target sequence for FLJ32001 (NM_152609.1,1086-1104).
gctccacgcagttactagt

SEQ ID NO: 418787 - DNA, 19 bp, Homo sapiens
  siRNA target sequence for FLJ32001 (NM_152609.1,1096-1114).
gttactagtgtctgaagat

SEQ ID NO: 418788 - DNA, 19 bp, Homo sapiens
  siRNA target sequence for FLJ32001 (NM_152609.1,1165-1183).
cggcacagagtcaagtaaa

SEQ ID NO: 418789 - DNA, 19 bp, Homo sapiens
  siRNA target sequence for FLJ32001 (NM_152609.1,1408-1426).
cttgcagctggctcaaaca

SEQ ID NO: 418790 - DNA, 19 bp, Homo sapiens
  siRNA target sequence for FLJ32001 (NM_152609.1,1501-1519).
gacagagccgttgatttca

SEQ ID NO: 418791 - DNA, 19 bp, Homo sapiens
  siRNA target sequence for FLJ32001 (NM_152609.1,1533-1551).
gtatacctcctgcattgat

SEQ ID NO: 418792 - DNA, 19 bp, Homo sapiens
  siRNA target sequence for FLJ32001 (NM_152609.1,1633-1651).
ccaacttgagaacaatgaa

SEQ ID NO: 418793 - DNA, 19 bp, Homo sapiens
  siRNA target sequence for FLJ32001 (NM_152609.1,1661-1679).
ctgcagcagcctgatctta

SEQ ID NO: 418794 - DNA, 19 bp, Homo sapiens
  siRNA target sequence for FLJ32001 (NM_152609.1,1717-1735).
ctcagacggttctgagaat

SEQ ID NO: 418795 - DNA, 19 bp, Homo sapiens
  siRNA target sequence for FLJ32001 (NM_152609.1,1822-1840).
cgaccaactcaacaaagaa

SEQ ID NO: 418796 - DNA, 19 bp, Homo sapiens
  siRNA target sequence for FLJ32001 (NM_152609.1,1927-1945).
ctccgatctccttcaagat

SEQ ID NO: 418797 - DNA, 19 bp, Homo sapiens
  siRNA target sequence for FLJ32001 (NM_152609.1,2172-2190).
gcttggatcaagatgaagt

SEQ ID NO: 418798 - DNA, 19 bp, Homo sapiens
  siRNA target sequence for FLJ32001 (NM_152609.1,2192-2210).
ggaggtggctcctgtattt

SEQ ID NO: 418799 - DNA, 19 bp, Homo sapiens
  siRNA target sequence for FLJ32001 (NM_152609.1,2216-2234).
gtcttgctgtgcatagcaa

SEQ ID NO: 418800 - DNA, 19 bp, Homo sapiens
  siRNA target sequence for FLJ32001 (NM_152609.1,2226-2244).
gcatagcaacggttttcct

SEQ ID NO: 418801 - DNA, 19 bp, Homo sapiens
  siRNA target sequence for FLJ32001 (NM_152609.1,2252-2270).
ggaggaactgcattatact

SEQ ID NO: 418802 - DNA, 19 bp, Homo sapiens
  siRNA target sequence for FLJ32001 (NM_152609.1,2287-2305).
ggagtcacctgtttgtact

SEQ ID NO: 418803 - DNA, 19 bp, Homo sapiens
  siRNA target sequence for FLJ32001 (NM_152609.1,2324-2342).
gacttctattacactaagt

SEQ ID NO: 418804 - DNA, 19 bp, Homo sapiens
  siRNA target sequence for FLJ32001 (NM_152609.1,2326-2344).
cttctattacactaagtta

SEQ ID NO: 418805 - DNA, 19 bp, Homo sapiens
  siRNA target sequence for FLJ35728 (NM_152610.1,516-534).
cccctgagtggcacattca

SEQ ID NO: 418806 - DNA, 19 bp, Homo sapiens
  siRNA target sequence for FLJ35728 (NM_152610.1,572-590).
gccactcggcagacatcta

SEQ ID NO: 418807 - DNA, 19 bp, Homo sapiens
  siRNA target sequence for FLJ35728 (NM_152610.1,631-649).
ctgtgccctcgcaaaagtt

SEQ ID NO: 418808 - DNA, 19 bp, Homo sapiens
  siRNA target sequence for FLJ35728 (NM_152610.1,633-651).
gtgccctcgcaaaagttca

SEQ ID NO: 418809 - DNA, 19 bp, Homo sapiens
  siRNA target sequence for FLJ35728 (NM_152610.1,694-712).
gcgaccaggttgagtcatt

SEQ ID NO: 418810 - DNA, 19 bp, Homo sapiens
  siRNA target sequence for FLJ35728 (NM_152610.1,695-713).
cgaccaggttgagtcatta

SEQ ID NO: 418811 - DNA, 19 bp, Homo sapiens
  siRNA target sequence for FLJ35728 (NM_152610.1,1320-1338).
ctgagctccctcatcaatt

SEQ ID NO: 418812 - DNA, 19 bp, Homo sapiens
  siRNA target sequence for FLJ35728 (NM_152610.1,1324-1342).
gctccctcatcaattacca

SEQ ID NO: 418813 - DNA, 19 bp, Homo sapiens
  siRNA target sequence for FLJ35728 (NM_152610.1,1395-1413).
cagctgtccctggaacaaa

SEQ ID NO: 418814 - DNA, 19 bp, Homo sapiens
  siRNA target sequence for FLJ35728 (NM_152610.1,1546-1564).
ggaagatgcgcaaaagaat

SEQ ID NO: 418815 - DNA, 19 bp, Homo sapiens
  siRNA target sequence for FLJ35728 (NM_152610.1,1677-1695).
caccacatcctgaaactga

SEQ ID NO: 418816 - DNA, 19 bp, Homo sapiens
  siRNA target sequence for FLJ36046 (NM_152612.2,305-323).
gccactttctggatttcct

SEQ ID NO: 418817 - DNA, 19 bp, Homo sapiens
  siRNA target sequence for FLJ36046 (NM_152612.2,524-542).
ctggacaccccaacaacta

SEQ ID NO: 418818 - DNA, 19 bp, Homo sapiens
  siRNA target sequence for FLJ36046 (NM_152612.2,875-893).
gagaacaggagccaatctt

SEQ ID NO: 418819 - DNA, 19 bp, Homo sapiens
  siRNA target sequence for FLJ36046 (NM_152612.2,894-912).
ccgcaagcgagagttcaat

SEQ ID NO: 418820 - DNA, 19 bp, Homo sapiens
  siRNA target sequence for FLJ36046 (NM_152612.2,895-913).
cgcaagcgagagttcaata

SEQ ID NO: 418821 - DNA, 19 bp, Homo sapiens
  siRNA target sequence for FLJ36046 (NM_152612.2,896-914).
gcaagcgagagttcaataa

SEQ ID NO: 418822 - DNA, 19 bp, Homo sapiens
  siRNA target sequence for FLJ36046 (NM_152612.2,1313-1331).
gcaggttcacgaagaagaa

SEQ ID NO: 418823 - DNA, 19 bp, Homo sapiens
  siRNA target sequence for FLJ36046 (NM_152612.2,1438-1456).
cgcaagtacgagttcgaaa

SEQ ID NO: 418824 - DNA, 19 bp, Homo sapiens
  siRNA target sequence for FLJ36046 (NM_152612.2,1439-1457).
gcaagtacgagttcgaaaa

SEQ ID NO: 418825 - DNA, 19 bp, Homo sapiens
  siRNA target sequence for FLJ36046 (NM_152612.2,1771-1789).
gagcccaagctctacatgt

SEQ ID NO: 418826 - DNA, 19 bp, Homo sapiens
  siRNA target sequence for FLJ36046 (NM_152612.2,1839-1857).
caatgagggccgtgataaa

SEQ ID NO: 418827 - DNA, 19 bp, Homo sapiens
  siRNA target sequence for FLJ36046 (NM_152612.2,1850-1868).
gtgataaagccgagattga

SEQ ID NO: 418828 - DNA, 19 bp, Homo sapiens
  siRNA target sequence for MGC26816 (NM_152613.1,127-145).
cttcccacagcgatcagaa

SEQ ID NO: 418829 - DNA, 19 bp, Homo sapiens
  siRNA target sequence for MGC26816 (NM_152613.1,136-154).
gcgatcagaaggctcaaat

SEQ ID NO: 418830 - DNA, 19 bp, Homo sapiens
  siRNA target sequence for MGC26816 (NM_152613.1,141-159).
cagaaggctcaaatgtctt

SEQ ID NO: 418831 - DNA, 19 bp, Homo sapiens
  siRNA target sequence for MGC26816 (NM_152613.1,199-217).
ccgggtgattttcataact

SEQ ID NO: 418832 - DNA, 19 bp, Homo sapiens
  siRNA target sequence for MGC26816 (NM_152613.1,200-218).
cgggtgattttcataactt

SEQ ID NO: 418833 - DNA, 19 bp, Homo sapiens
  siRNA target sequence for MGC26816 (NM_152613.1,231-249).
gtgatcccatgttgtcttt

SEQ ID NO: 418834 - DNA, 19 bp, Homo sapiens
  siRNA target sequence for MGC26816 (NM_152613.1,273-291).
cgaacctcactgttgaaca

SEQ ID NO: 418835 - DNA, 19 bp, Homo sapiens
  siRNA target sequence for MGC26816 (NM_152613.1,356-374).
ggacaagctacttttaaat

SEQ ID NO: 418836 - DNA, 19 bp, Homo sapiens
  siRNA target sequence for MGC26816 (NM_152613.1,362-380).
gctacttttaaattagtct

SEQ ID NO: 418837 - DNA, 19 bp, Homo sapiens
  siRNA target sequence for MGC26816 (NM_152613.1,442-460).
ccgaggatttccacttaga

SEQ ID NO: 418838 - DNA, 19 bp, Homo sapiens
  siRNA target sequence for MGC26816 (NM_152613.1,443-461).
cgaggatttccacttagaa

SEQ ID NO: 418839 - DNA, 19 bp, Homo sapiens
  siRNA target sequence for MGC26816 (NM_152613.1,453-471).
cacttagaaccttaaatga

SEQ ID NO: 418840 - DNA, 19 bp, Homo sapiens
  siRNA target sequence for MGC26816 (NM_152613.1,455-473).
cttagaaccttaaatgact

SEQ ID NO: 418841 - DNA, 19 bp, Homo sapiens
  siRNA target sequence for MGC26816 (NM_152613.1,478-496).
cagctctatgggaatttat

SEQ ID NO: 418842 - DNA, 19 bp, Homo sapiens
  siRNA target sequence for MGC26816 (NM_152613.1,483-501).
ctatgggaatttatgtaat

SEQ ID NO: 418843 - DNA, 19 bp, Homo sapiens
  siRNA target sequence for MGC26816 (NM_152613.1,624-642).
cccaacccgtaggaaatga

SEQ ID NO: 418844 - DNA, 19 bp, Homo sapiens
  siRNA target sequence for MGC26816 (NM_152613.1,900-918).
cccaggctcctgaaaacga

SEQ ID NO: 418845 - DNA, 19 bp, Homo sapiens
  siRNA target sequence for MGC35154 (NM_152614.1,179-197).
ccactgactggcaggatat

SEQ ID NO: 418846 - DNA, 19 bp, Homo sapiens
  siRNA target sequence for MGC35154 (NM_152614.1,182-200).
ctgactggcaggatataga

SEQ ID NO: 418847 - DNA, 19 bp, Homo sapiens
  siRNA target sequence for MGC35154 (NM_152614.1,199-217).
gatcaggcctccttcaaga

SEQ ID NO: 418848 - DNA, 19 bp, Homo sapiens
  siRNA target sequence for MGC35154 (NM_152614.1,225-243).
ccccagggccatatcaaca

SEQ ID NO: 418849 - DNA, 19 bp, Homo sapiens
  siRNA target sequence for MGC35154 (NM_152614.1,285-303).
ccagaagacacccagaaaa

SEQ ID NO: 418850 - DNA, 19 bp, Homo sapiens
  siRNA target sequence for MGC35154 (NM_152614.1,316-334).
cttcccagccaaaatccaa

SEQ ID NO: 418851 - DNA, 19 bp, Homo sapiens
  siRNA target sequence for MGC35154 (NM_152614.1,335-353).
gtcccctgcaagtgtctat

SEQ ID NO: 418852 - DNA, 19 bp, Homo sapiens
  siRNA target sequence for MGC35154 (NM_152614.1,428-446).
gtcacctcctgggtaaaga

SEQ ID NO: 418853 - DNA, 19 bp, Homo sapiens
  siRNA target sequence for MGC35154 (NM_152614.1,663-681).
ccctgaagctgaagcttta

SEQ ID NO: 418854 - DNA, 19 bp, Homo sapiens
  siRNA target sequence for MGC35154 (NM_152614.1,1215-1233).
ccaggctgaccccaactat

SEQ ID NO: 418855 - DNA, 19 bp, Homo sapiens
  siRNA target sequence for MGC35154 (NM_152614.1,1218-1236).
ggctgaccccaactatgat

SEQ ID NO: 418856 - DNA, 19 bp, Homo sapiens
  siRNA target sequence for FLJ40597 (NM_152615.1,38-56).
ccaaagaattggattaata

SEQ ID NO: 418857 - DNA, 19 bp, Homo sapiens
  siRNA target sequence for FLJ40597 (NM_152615.1,78-96).
gtcagtaactgtttctatt

SEQ ID NO: 418858 - DNA, 19 bp, Homo sapiens
  siRNA target sequence for FLJ40597 (NM_152615.1,227-245).
gaaaatcggtgcaattact

SEQ ID NO: 418859 - DNA, 19 bp, Homo sapiens
  siRNA target sequence for FLJ40597 (NM_152615.1,251-269).
ggttgctactggagatata

SEQ ID NO: 418860 - DNA, 19 bp, Homo sapiens
  siRNA target sequence for FLJ40597 (NM_152615.1,271-289).
ccactgaacaggtagatgt

SEQ ID NO: 418861 - DNA, 19 bp, Homo sapiens
  siRNA target sequence for FLJ40597 (NM_152615.1,272-290).
cactgaacaggtagatgtt

SEQ ID NO: 418862 - DNA, 19 bp, Homo sapiens
  siRNA target sequence for FLJ40597 (NM_152615.1,279-297).
caggtagatgttattgtaa

SEQ ID NO: 418863 - DNA, 19 bp, Homo sapiens
  siRNA target sequence for FLJ40597 (NM_152615.1,301-319).
caacagcaaggacatttaa

SEQ ID NO: 418864 - DNA, 19 bp, Homo sapiens
  siRNA target sequence for FLJ40597 (NM_152615.1,399-417).
cagcctcacagagatttta

SEQ ID NO: 418865 - DNA, 19 bp, Homo sapiens
  siRNA target sequence for FLJ40597 (NM_152615.1,401-419).
gcctcacagagattttata

SEQ ID NO: 418866 - DNA, 19 bp, Homo sapiens
  siRNA target sequence for FLJ40597 (NM_152615.1,424-442).
caccaggtggatgcttaaa

SEQ ID NO: 418867 - DNA, 19 bp, Homo sapiens
  siRNA target sequence for FLJ40597 (NM_152615.1,490-508).
cggtcaccagtgttctaga

SEQ ID NO: 418868 - DNA, 19 bp, Homo sapiens
  siRNA target sequence for FLJ40597 (NM_152615.1,491-509).
ggtcaccagtgttctagaa

SEQ ID NO: 418869 - DNA, 19 bp, Homo sapiens
  siRNA target sequence for FLJ40597 (NM_152615.1,569-587).
cggaaaaaaccctatcaca

SEQ ID NO: 418870 - DNA, 19 bp, Homo sapiens
  siRNA target sequence for FLJ40597 (NM_152615.1,640-658).
ccccatcattaaaaacagt

SEQ ID NO: 418871 - DNA, 19 bp, Homo sapiens
  siRNA target sequence for FLJ40597 (NM_152615.1,641-659).
cccatcattaaaaacagtt

SEQ ID NO: 418872 - DNA, 19 bp, Homo sapiens
  siRNA target sequence for FLJ40597 (NM_152615.1,675-693).
caacctgagctgctaaata

SEQ ID NO: 418873 - DNA, 19 bp, Homo sapiens
  siRNA target sequence for FLJ40597 (NM_152615.1,698-716).
ctacgacagcatgaaaaaa

SEQ ID NO: 418874 - DNA, 19 bp, Homo sapiens
  siRNA target sequence for FLJ40597 (NM_152615.1,787-805).
ggactgacatgaatcatca

SEQ ID NO: 418875 - DNA, 19 bp, Homo sapiens
  siRNA target sequence for FLJ40597 (NM_152615.1,824-842).
gctagagccaggacaatca

SEQ ID NO: 418876 - DNA, 19 bp, Homo sapiens
  siRNA target sequence for FLJ40597 (NM_152615.1,880-898).
gttcttcctacgcaataga

SEQ ID NO: 418877 - DNA, 19 bp, Homo sapiens
  siRNA target sequence for FLJ40597 (NM_152615.1,886-904).
cctacgcaatagagaagat

SEQ ID NO: 418878 - DNA, 19 bp, Homo sapiens
  siRNA target sequence for FLJ40597 (NM_152615.1,910-928).
ggatacagaatgcatttct

SEQ ID NO: 418879 - DNA, 19 bp, Homo sapiens
  siRNA target sequence for FLJ40597 (NM_152615.1,956-974).
gcaaatggatatcaagaat

SEQ ID NO: 418880 - DNA, 19 bp, Homo sapiens
  siRNA target sequence for FLJ40597 (NM_152615.1,968-986).
caagaatgaccataagaat

SEQ ID NO: 418881 - DNA, 19 bp, Homo sapiens
  siRNA target sequence for FLJ40597 (NM_152615.1,1020-1038).
gactcagtgccatatgtca

SEQ ID NO: 418882 - DNA, 19 bp, Homo sapiens
  siRNA target sequence for FLJ40597 (NM_152615.1,1037-1055).
caatcagcacggctttaat

SEQ ID NO: 418883 - DNA, 19 bp, Homo sapiens
  siRNA target sequence for FLJ40597 (NM_152615.1,1041-1059).
cagcacggctttaatagaa

SEQ ID NO: 418884 - DNA, 19 bp, Homo sapiens
  siRNA target sequence for FLJ40597 (NM_152615.1,1043-1061).
gcacggctttaatagaagt

SEQ ID NO: 418885 - DNA, 19 bp, Homo sapiens
  siRNA target sequence for FLJ40597 (NM_152615.1,1046-1064).
cggctttaatagaagttgt

SEQ ID NO: 418886 - DNA, 19 bp, Homo sapiens
  siRNA target sequence for FLJ40597 (NM_152615.1,1080-1098).
gtatcctatggaaaaggaa

SEQ ID NO: 418887 - DNA, 19 bp, Homo sapiens
  siRNA target sequence for FLJ40597 (NM_152615.1,1175-1193).
gtacgttgtgcgagtactt

SEQ ID NO: 418888 - DNA, 19 bp, Homo sapiens
  siRNA target sequence for FLJ40597 (NM_152615.1,1178-1196).
cgttgtgcgagtacttact

SEQ ID NO: 418889 - DNA, 19 bp, Homo sapiens
  siRNA target sequence for FLJ40597 (NM_152615.1,1212-1230).
ggacgtgcaggattagtca

SEQ ID NO: 418890 - DNA, 19 bp, Homo sapiens
  siRNA target sequence for FLJ40597 (NM_152615.1,1253-1271).
caatcccacagatctcttt

SEQ ID NO: 418891 - DNA, 19 bp, Homo sapiens
  siRNA target sequence for FLJ40597 (NM_152615.1,1272-1290).
gactcagtgacaaacaata

SEQ ID NO: 418892 - DNA, 19 bp, Homo sapiens
  siRNA target sequence for FLJ40597 (NM_152615.1,1337-1355).
cccagaatatctcataact

SEQ ID NO: 418893 - DNA, 19 bp, Homo sapiens
  siRNA target sequence for FLJ40597 (NM_152615.1,1338-1356).
ccagaatatctcataactt

SEQ ID NO: 418894 - DNA, 19 bp, Homo sapiens
  siRNA target sequence for FLJ40597 (NM_152615.1,1339-1357).
cagaatatctcataacttt

SEQ ID NO: 418895 - DNA, 19 bp, Homo sapiens
  siRNA target sequence for FLJ40597 (NM_152615.1,1341-1359).
gaatatctcataactttca

SEQ ID NO: 418896 - DNA, 19 bp, Homo sapiens
  siRNA target sequence for FLJ35794 (NM_152617.2,585-603).
gcgggatctgcatggaaat

SEQ ID NO: 418897 - DNA, 19 bp, Homo sapiens
  siRNA target sequence for FLJ35794 (NM_152617.2,588-606).
ggatctgcatggaaatcct

SEQ ID NO: 418898 - DNA, 19 bp, Homo sapiens
  siRNA target sequence for FLJ35794 (NM_152617.2,630-648).
gtaaccacacgctgtgtaa

SEQ ID NO: 418899 - DNA, 19 bp, Homo sapiens
  siRNA target sequence for FLJ35794 (NM_152617.2,667-685).
cgtcgaaaaggcgagttta

SEQ ID NO: 418900 - DNA, 19 bp, Homo sapiens
  siRNA target sequence for FLJ35794 (NM_152617.2,671-689).
gaaaaggcgagtttatgct

SEQ ID NO: 418901 - DNA, 19 bp, Homo sapiens
  siRNA target sequence for FLJ35794 (NM_152617.2,726-744).
ggtaccatacccgaagaaa

SEQ ID NO: 418902 - DNA, 19 bp, Homo sapiens
  siRNA target sequence for FLJ35794 (NM_152617.2,727-745).
gtaccatacccgaagaaat

SEQ ID NO: 418903 - DNA, 19 bp, Homo sapiens
  siRNA target sequence for FLJ35794 (NM_152617.2,758-776).
gtggaactgtggacgataa

SEQ ID NO: 418904 - DNA, 19 bp, Homo sapiens
  siRNA target sequence for FLJ35794 (NM_152617.2,760-778).
ggaactgtggacgataatt

SEQ ID NO: 418905 - DNA, 19 bp, Homo sapiens
  siRNA target sequence for FLJ35794 (NM_152617.2,768-786).
ggacgataattcaaaaaca

SEQ ID NO: 418906 - DNA, 19 bp, Homo sapiens
  siRNA target sequence for FLJ35794 (NM_152617.2,771-789).
cgataattcaaaaacacta

SEQ ID NO: 418907 - DNA, 19 bp, Homo sapiens
  siRNA target sequence for FLJ35794 (NM_152617.2,832-850).
ggaagtggctgatgactat

SEQ ID NO: 418908 - DNA, 19 bp, Homo sapiens
  siRNA target sequence for FLJ35794 (NM_152617.2,855-873).
cagttcgtctgctcagtaa

SEQ ID NO: 418909 - DNA, 19 bp, Homo sapiens
  siRNA target sequence for FLJ35794 (NM_152617.2,1067-1085).
gaactggcaagaaagctaa

SEQ ID NO: 418910 - DNA, 19 bp, Homo sapiens
  siRNA target sequence for FLJ35794 (NM_152617.2,1086-1104).
gcattgatattaacaattt

SEQ ID NO: 418911 - DNA, 19 bp, Homo sapiens
  siRNA target sequence for FLJ35794 (NM_152617.2,1120-1138).
ctcggcttctcccttgaat

SEQ ID NO: 418912 - DNA, 19 bp, Homo sapiens
  siRNA target sequence for FLJ35794 (NM_152617.2,1225-1243).
gacaccgaaatctcagttt

SEQ ID NO: 418913 - DNA, 19 bp, Homo sapiens
  siRNA target sequence for FLJ35794 (NM_152617.2,1281-1299).
ggaaagactccgtatctaa

SEQ ID NO: 418914 - DNA, 19 bp, Homo sapiens
  siRNA target sequence for FLJ35794 (NM_152617.2,1397-1415).
gaacaaggtgcagattctt

SEQ ID NO: 418915 - DNA, 19 bp, Homo sapiens
  siRNA target sequence for FLJ35794 (NM_152617.2,1426-1444).
ccctatgccatggttatgt

SEQ ID NO: 418916 - DNA, 19 bp, Homo sapiens
  siRNA target sequence for FLJ35794 (NM_152617.2,1446-1464).
cctgtggtgccgaatggta

SEQ ID NO: 418917 - DNA, 19 bp, Homo sapiens
  siRNA target sequence for FLJ35794 (NM_152617.2,1494-1512).
gcaatcatgggaaagagtt

SEQ ID NO: 418918 - DNA, 19 bp, Homo sapiens
  siRNA target sequence for FLJ35794 (NM_152617.2,1495-1513).
caatcatgggaaagagtta

SEQ ID NO: 418919 - DNA, 19 bp, Homo sapiens
  siRNA target sequence for FLJ35794 (NM_152617.2,1676-1694).
ctgatcagtaaggagattt

SEQ ID NO: 418920 - DNA, 19 bp, Homo sapiens
  siRNA target sequence for FLJ35794 (NM_152617.2,1681-1699).
cagtaaggagatttccaaa

SEQ ID NO: 418921 - DNA, 19 bp, Homo sapiens
  siRNA target sequence for FLJ35794 (NM_152617.2,1774-1792).
cgaatcttccccagatcaa

SEQ ID NO: 418922 - DNA, 19 bp, Homo sapiens
  siRNA target sequence for FLJ35794 (NM_152617.2,1815-1833).
cccaaaaactgatagattt

SEQ ID NO: 418923 - DNA, 19 bp, Homo sapiens
  siRNA target sequence for FLJ35794 (NM_152617.2,1835-1853).
gagcatctactgtttgaga

SEQ ID NO: 418924 - DNA, 19 bp, Homo sapiens
  siRNA target sequence for FLJ35794 (NM_152617.2,1841-1859).
ctactgtttgagagacata

SEQ ID NO: 418925 - DNA, 19 bp, Homo sapiens
  siRNA target sequence for FLJ35794 (NM_152617.2,1846-1864).
gtttgagagacataaacaa

SEQ ID NO: 418926 - DNA, 19 bp, Homo sapiens
  siRNA target sequence for FLJ35794 (NM_152617.2,1878-1896).
ggttattggcattacaact

SEQ ID NO: 418927 - DNA, 19 bp, Homo sapiens
  siRNA target sequence for FLJ35794 (NM_152617.2,1879-1897).
gttattggcattacaactt

SEQ ID NO: 418928 - DNA, 19 bp, Homo sapiens
  siRNA target sequence for FLJ35794 (NM_152617.2,1924-1942).
ggtgccaaaccggcaaaaa

SEQ ID NO: 418929 - DNA, 19 bp, Homo sapiens
  siRNA target sequence for FLJ35794 (NM_152617.2,1927-1945).
gccaaaccggcaaaaagga

SEQ ID NO: 418930 - DNA, 19 bp, Homo sapiens
  siRNA target sequence for FLJ35794 (NM_152617.2,1928-1946).
ccaaaccggcaaaaaggat

SEQ ID NO: 418931 - DNA, 19 bp, Homo sapiens
  siRNA target sequence for FLJ35794 (NM_152617.2,2165-2183).
cactgtaaggtatccaaaa

SEQ ID NO: 418932 - DNA, 19 bp, Homo sapiens
  siRNA target sequence for FLJ35794 (NM_152617.2,2194-2212).
cctacagcctagcatttca

SEQ ID NO: 418933 - DNA, 19 bp, Homo sapiens
  siRNA target sequence for FLJ35630 (NM_152618.2,204-222).
cttgcagagtcgtaaacaa

SEQ ID NO: 418934 - DNA, 19 bp, Homo sapiens
  siRNA target sequence for FLJ35630 (NM_152618.2,259-277).
cgcggaaacaggaagaact

SEQ ID NO: 418935 - DNA, 19 bp, Homo sapiens
  siRNA target sequence for FLJ35630 (NM_152618.2,260-278).
gcggaaacaggaagaactt

SEQ ID NO: 418936 - DNA, 19 bp, Homo sapiens
  siRNA target sequence for FLJ35630 (NM_152618.2,261-279).
cggaaacaggaagaacttt

SEQ ID NO: 418937 - DNA, 19 bp, Homo sapiens
  siRNA target sequence for FLJ35630 (NM_152618.2,276-294).
ctttcctaggcccactaaa

SEQ ID NO: 418938 - DNA, 19 bp, Homo sapiens
  siRNA target sequence for FLJ35630 (NM_152618.2,280-298).
cctaggcccactaaaatca

SEQ ID NO: 418939 - DNA, 19 bp, Homo sapiens
  siRNA target sequence for FLJ35630 (NM_152618.2,281-299).
ctaggcccactaaaatcat

SEQ ID NO: 418940 - DNA, 19 bp, Homo sapiens
  siRNA target sequence for FLJ35630 (NM_152618.2,286-304).
cccactaaaatcatccaaa

SEQ ID NO: 418941 - DNA, 19 bp, Homo sapiens
  siRNA target sequence for FLJ35630 (NM_152618.2,287-305).
ccactaaaatcatccaaat

SEQ ID NO: 418942 - DNA, 19 bp, Homo sapiens
  siRNA target sequence for FLJ35630 (NM_152618.2,326-344).
catgaaagtgtattaatca

SEQ ID NO: 418943 - DNA, 19 bp, Homo sapiens
  siRNA target sequence for FLJ35630 (NM_152618.2,329-347).
gaaagtgtattaatcagtt

SEQ ID NO: 418944 - DNA, 19 bp, Homo sapiens
  siRNA target sequence for FLJ35630 (NM_152618.2,348-366).
caacagtaaggcttcttga

SEQ ID NO: 418945 - DNA, 19 bp, Homo sapiens
  siRNA target sequence for FLJ35630 (NM_152618.2,410-428).
gcagttcaagcacaaaaca

SEQ ID NO: 418946 - DNA, 19 bp, Homo sapiens
  siRNA target sequence for FLJ35630 (NM_152618.2,517-535).
catttccataatagtatca

SEQ ID NO: 418947 - DNA, 19 bp, Homo sapiens
  siRNA target sequence for FLJ35630 (NM_152618.2,541-559).
gtcagaaggcttaaacttt

SEQ ID NO: 418948 - DNA, 19 bp, Homo sapiens
  siRNA target sequence for FLJ35630 (NM_152618.2,571-589).
ggtagtttctcttcatgta

SEQ ID NO: 418949 - DNA, 19 bp, Homo sapiens
  siRNA target sequence for FLJ35630 (NM_152618.2,584-602).
catgtacctgttcacaata

SEQ ID NO: 418950 - DNA, 19 bp, Homo sapiens
  siRNA target sequence for FLJ35630 (NM_152618.2,591-609).
ctgttcacaatatatttga

SEQ ID NO: 418951 - DNA, 19 bp, Homo sapiens
  siRNA target sequence for FLJ35630 (NM_152618.2,610-628).
ctgtatggacagcacaaaa

SEQ ID NO: 418952 - DNA, 19 bp, Homo sapiens
  siRNA target sequence for FLJ35630 (NM_152618.2,644-662).
gaaacatttagtgtaagtt

SEQ ID NO: 418953 - DNA, 19 bp, Homo sapiens
  siRNA target sequence for FLJ35630 (NM_152618.2,684-702).
cttcagatactgatttgat

SEQ ID NO: 418954 - DNA, 19 bp, Homo sapiens
  siRNA target sequence for FLJ35630 (NM_152618.2,706-724).
ggaattgcatggtctcaaa

SEQ ID NO: 418955 - DNA, 19 bp, Homo sapiens
  siRNA target sequence for FLJ35630 (NM_152618.2,766-784).
gagacctcttaaatcatat

SEQ ID NO: 418956 - DNA, 19 bp, Homo sapiens
  siRNA target sequence for FLJ35630 (NM_152618.2,826-844).
cacatcacgaactctgaaa

SEQ ID NO: 418957 - DNA, 19 bp, Homo sapiens
  siRNA target sequence for FLJ35630 (NM_152618.2,864-882).
cctgctgcagacagtcaat

SEQ ID NO: 418958 - DNA, 19 bp, Homo sapiens
  siRNA target sequence for FLJ35630 (NM_152618.2,944-962).
ggatttcaagaacatgtta

SEQ ID NO: 418959 - DNA, 19 bp, Homo sapiens
  siRNA target sequence for FLJ35630 (NM_152618.2,959-977).
gttacagctactcacaaaa

SEQ ID NO: 418960 - DNA, 19 bp, Homo sapiens
  siRNA target sequence for FLJ35630 (NM_152618.2,965-983).
gctactcacaaaacttaca

SEQ ID NO: 418961 - DNA, 19 bp, Homo sapiens
  siRNA target sequence for FLJ35630 (NM_152618.2,982-1000).
cagatgtaatgatttggta

SEQ ID NO: 418962 - DNA, 19 bp, Homo sapiens
  siRNA target sequence for FLJ35630 (NM_152618.2,1033-1051).
cagcagcatgaagttagta

SEQ ID NO: 418963 - DNA, 19 bp, Homo sapiens
  siRNA target sequence for FLJ35630 (NM_152618.2,1061-1079).
gtacagctgcaatatcaga

SEQ ID NO: 418964 - DNA, 19 bp, Homo sapiens
  siRNA target sequence for FLJ35630 (NM_152618.2,1088-1106).
gtgcaacaaggcaactgta

SEQ ID NO: 418965 - DNA, 19 bp, Homo sapiens
  siRNA target sequence for FLJ35630 (NM_152618.2,1097-1115).
ggcaactgtacaaaaccat

SEQ ID NO: 418966 - DNA, 19 bp, Homo sapiens
  siRNA target sequence for FLJ35630 (NM_152618.2,1098-1116).
gcaactgtacaaaaccatt

SEQ ID NO: 418967 - DNA, 19 bp, Homo sapiens
  siRNA target sequence for FLJ35630 (NM_152618.2,1198-1216).
cactgttgtgtcagtatct

SEQ ID NO: 418968 - DNA, 19 bp, Homo sapiens
  siRNA target sequence for FLJ35630 (NM_152618.2,1202-1220).
gttgtgtcagtatctaata

SEQ ID NO: 418969 - DNA, 19 bp, Homo sapiens
  siRNA target sequence for FLJ35630 (NM_152618.2,1251-1269).
ctgtgcgaatagttctcat

SEQ ID NO: 418970 - DNA, 19 bp, Homo sapiens
  siRNA target sequence for FLJ35630 (NM_152618.2,1295-1313).
cgccacctgggatttaata

SEQ ID NO: 418971 - DNA, 19 bp, Homo sapiens
  siRNA target sequence for FLJ35630 (NM_152618.2,1296-1314).
gccacctgggatttaataa

SEQ ID NO: 418972 - DNA, 19 bp, Homo sapiens
  siRNA target sequence for FLJ35630 (NM_152618.2,1380-1398).
gggcaaatcacgtgttaca

SEQ ID NO: 418973 - DNA, 19 bp, Homo sapiens
  siRNA target sequence for FLJ35630 (NM_152618.2,1388-1406).
cacgtgttacaggtgttaa

SEQ ID NO: 418974 - DNA, 19 bp, Homo sapiens
  siRNA target sequence for FLJ35630 (NM_152618.2,1447-1465).
gtccgaacgcttaattgaa

SEQ ID NO: 418975 - DNA, 19 bp, Homo sapiens
  siRNA target sequence for FLJ35630 (NM_152618.2,1449-1467).
ccgaacgcttaattgaaaa

SEQ ID NO: 418976 - DNA, 19 bp, Homo sapiens
  siRNA target sequence for FLJ35630 (NM_152618.2,1451-1469).
gaacgcttaattgaaaaat

SEQ ID NO: 418977 - DNA, 19 bp, Homo sapiens
  siRNA target sequence for FLJ35630 (NM_152618.2,1489-1507).
ggtaatcggctcagtgaat

SEQ ID NO: 418978 - DNA, 19 bp, Homo sapiens
  siRNA target sequence for FLJ35630 (NM_152618.2,1547-1565).
gtacaggtggcctacatta

SEQ ID NO: 418979 - DNA, 19 bp, Homo sapiens
  siRNA target sequence for FLJ35630 (NM_152618.2,1552-1570).
ggtggcctacattacacaa

SEQ ID NO: 418980 - DNA, 19 bp, Homo sapiens
  siRNA target sequence for FLJ35630 (NM_152618.2,1634-1652).
gttgtagataggaacaaca

SEQ ID NO: 418981 - DNA, 19 bp, Homo sapiens
  siRNA target sequence for FLJ35630 (NM_152618.2,1637-1655).
gtagataggaacaacagaa

SEQ ID NO: 418982 - DNA, 19 bp, Homo sapiens
  siRNA target sequence for FLJ35630 (NM_152618.2,1651-1669).
cagaatcgcaatcttatta

SEQ ID NO: 418983 - DNA, 19 bp, Homo sapiens
  siRNA target sequence for FLJ35630 (NM_152618.2,1702-1720).
gctcactaacccagttact

SEQ ID NO: 418984 - DNA, 19 bp, Homo sapiens
  siRNA target sequence for FLJ35630 (NM_152618.2,1752-1770).
ggacatgtgcctatcgttt

SEQ ID NO: 418985 - DNA, 19 bp, Homo sapiens
  siRNA target sequence for FLJ35630 (NM_152618.2,1755-1773).
catgtgcctatcgtttgta

SEQ ID NO: 418986 - DNA, 19 bp, Homo sapiens
  siRNA target sequence for FLJ35630 (NM_152618.2,1758-1776).
gtgcctatcgtttgtatta

SEQ ID NO: 418987 - DNA, 19 bp, Homo sapiens
  siRNA target sequence for FLJ35630 (NM_152618.2,1806-1824).
gaggtggtgcagttgaatt

SEQ ID NO: 418988 - DNA, 19 bp, Homo sapiens
  siRNA target sequence for FLJ35630 (NM_152618.2,1811-1829).
ggtgcagttgaatttttgt

SEQ ID NO: 418989 - DNA, 19 bp, Homo sapiens
  siRNA target sequence for FLJ35630 (NM_152618.2,1888-1906).
ctcagggtggctgcataat

SEQ ID NO: 418990 - DNA, 19 bp, Homo sapiens
  siRNA target sequence for FLJ35630 (NM_152618.2,1922-1940).
gcttcatctctggcaatat

SEQ ID NO: 418991 - DNA, 19 bp, Homo sapiens
  siRNA target sequence for FLJ35630 (NM_152618.2,1942-1960).
cagaccaactgtgcttaaa

SEQ ID NO: 418992 - DNA, 19 bp, Homo sapiens
  siRNA target sequence for FLJ35630 (NM_152618.2,1944-1962).
gaccaactgtgcttaaatt

SEQ ID NO: 418993 - DNA, 19 bp, Homo sapiens
  siRNA target sequence for FLJ35630 (NM_152618.2,1947-1965).
caactgtgcttaaattcct

SEQ ID NO: 418994 - DNA, 19 bp, Homo sapiens
  siRNA target sequence for FLJ35630 (NM_152618.2,2079-2097).
ctggctctccttcatctta

SEQ ID NO: 418995 - DNA, 19 bp, Homo sapiens
  siRNA target sequence for FLJ35630 (NM_152618.2,2087-2105).
ccttcatcttacatcttga

SEQ ID NO: 418996 - DNA, 19 bp, Homo sapiens
  siRNA target sequence for FLJ35630 (NM_152618.2,2091-2109).
catcttacatcttgaatga

SEQ ID NO: 418997 - DNA, 19 bp, Homo sapiens
  siRNA target sequence for FLJ35630 (NM_152618.2,2115-2133).
gtaaactaaatagtagaat

SEQ ID NO: 418998 - DNA, 19 bp, Homo sapiens
  siRNA target sequence for FLJ35630 (NM_152618.2,2162-2180).
gagcagattccgagagttt

SEQ ID NO: 418999 - DNA, 19 bp, Homo sapiens
  siRNA target sequence for FLJ35630 (NM_152618.2,2164-2182).
gcagattccgagagtttat

SEQ ID NO: 419000 - DNA, 19 bp, Homo sapiens
  siRNA target sequence for FLJ35630 (NM_152618.2,2185-2203).
cgttgttacaccaaagatt

SEQ ID NO: 419001 - DNA, 19 bp, Homo sapiens
  siRNA target sequence for FLJ35630 (NM_152618.2,2214-2232).
gccgagcattggatttagt

SEQ ID NO: 419002 - DNA, 19 bp, Homo sapiens
  siRNA target sequence for FLJ35630 (NM_152618.2,2215-2233).
ccgagcattggatttagta

SEQ ID NO: 419003 - DNA, 19 bp, Homo sapiens
  siRNA target sequence for FLJ35630 (NM_152618.2,2216-2234).
cgagcattggatttagtat

SEQ ID NO: 419004 - DNA, 19 bp, Homo sapiens
  siRNA target sequence for FLJ35630 (NM_152618.2,2299-2317).
ggaattaacgggctttcta

SEQ ID NO: 419005 - DNA, 19 bp, Homo sapiens
  siRNA target sequence for FLJ35630 (NM_152618.2,2300-2318).
gaattaacgggctttctat

SEQ ID NO: 419006 - DNA, 19 bp, Homo sapiens
  siRNA target sequence for MGC26963 (NM_152621.3,685-703).
gtgatcctacgaacactta

SEQ ID NO: 419007 - DNA, 19 bp, Homo sapiens
  siRNA target sequence for MGC26963 (NM_152621.3,712-730).
ccgctgaacctgttgaaga

SEQ ID NO: 419008 - DNA, 19 bp, Homo sapiens
  siRNA target sequence for MGC26963 (NM_152621.3,713-731).
cgctgaacctgttgaagaa

SEQ ID NO: 419009 - DNA, 19 bp, Homo sapiens
  siRNA target sequence for MGC26963 (NM_152621.3,800-818).
cccggactatatccaaatt

SEQ ID NO: 419010 - DNA, 19 bp, Homo sapiens
  siRNA target sequence for MGC26963 (NM_152621.3,803-821).
ggactatatccaaattgct

SEQ ID NO: 419011 - DNA, 19 bp, Homo sapiens
  siRNA target sequence for MGC26963 (NM_152621.3,849-867).
ccactagagtggtggaaaa

SEQ ID NO: 419012 - DNA, 19 bp, Homo sapiens
  siRNA target sequence for MGC26963 (NM_152621.3,914-932).
cgtcatgatcacagttgta

SEQ ID NO: 419013 - DNA, 19 bp, Homo sapiens
  siRNA target sequence for MGC26963 (NM_152621.3,977-995).
caagttttttgattacatt

SEQ ID NO: 419014 - DNA, 19 bp, Homo sapiens
  siRNA target sequence for MGC26963 (NM_152621.3,1009-1027).
gggcattttctgtatcaga

SEQ ID NO: 419015 - DNA, 19 bp, Homo sapiens
  siRNA target sequence for MGC26963 (NM_152621.3,1036-1054).
ggattatattagttggatt

SEQ ID NO: 419016 - DNA, 19 bp, Homo sapiens
  siRNA target sequence for MGC26963 (NM_152621.3,1037-1055).
gattatattagttggatta

SEQ ID NO: 419017 - DNA, 19 bp, Homo sapiens
  siRNA target sequence for MGC26963 (NM_152621.3,1095-1113).
gtgggacgcagattctgtt

SEQ ID NO: 419018 - DNA, 19 bp, Homo sapiens
  siRNA target sequence for MGC26963 (NM_152621.3,1101-1119).
cgcagattctgttttatta

SEQ ID NO: 419019 - DNA, 19 bp, Homo sapiens
  siRNA target sequence for MGC26963 (NM_152621.3,1102-1120).
gcagattctgttttattat

SEQ ID NO: 419020 - DNA, 19 bp, Homo sapiens
  siRNA target sequence for MGC26963 (NM_152621.3,1103-1121).
cagattctgttttattatt

SEQ ID NO: 419021 - DNA, 19 bp, Homo sapiens
  siRNA target sequence for MGC26963 (NM_152621.3,1142-1160).
ctgcattacaatgtatgtt

SEQ ID NO: 419022 - DNA, 19 bp, Homo sapiens
  siRNA target sequence for MGC26963 (NM_152621.3,1236-1254).
cggattctacgattgattt

SEQ ID NO: 419023 - DNA, 19 bp, Homo sapiens
  siRNA target sequence for MGC26963 (NM_152621.3,1268-1286).
gtccataactggatcacat

SEQ ID NO: 419024 - DNA, 19 bp, Homo sapiens
  siRNA target sequence for MGC26963 (NM_152621.3,1337-1355).
gacttatttgttcatcaaa

SEQ ID NO: 419025 - DNA, 19 bp, Homo sapiens
  siRNA target sequence for MGC26963 (NM_152621.3,1373-1391).
cttctggtggtatcattta

SEQ ID NO: 419026 - DNA, 19 bp, Homo sapiens
  siRNA target sequence for MGC26963 (NM_152621.3,1415-1433).
cgggatcatctgcattctt

SEQ ID NO: 419027 - DNA, 19 bp, Homo sapiens
  siRNA target sequence for MGC26963 (NM_152621.3,1437-1455).
gcacacgaacactacacta

SEQ ID NO: 419028 - DNA, 19 bp, Homo sapiens
  siRNA target sequence for MGC26963 (NM_152621.3,1438-1456).
cacacgaacactacactat

SEQ ID NO: 419029 - DNA, 19 bp, Homo sapiens
  siRNA target sequence for MGC26963 (NM_152621.3,1442-1460).
cgaacactacactatcgat

SEQ ID NO: 419030 - DNA, 19 bp, Homo sapiens
  siRNA target sequence for MGC26963 (NM_152621.3,1451-1469).
cactatcgatgtgatcatt

SEQ ID NO: 419031 - DNA, 19 bp, Homo sapiens
  siRNA target sequence for MGC26963 (NM_152621.3,1457-1475).
cgatgtgatcattgcttat

SEQ ID NO: 419032 - DNA, 19 bp, Homo sapiens
  siRNA target sequence for MGC26963 (NM_152621.3,1491-1509).
ctgttttggtggtaccatt

SEQ ID NO: 419033 - DNA, 19 bp, Homo sapiens
  siRNA target sequence for MGC26963 (NM_152621.3,1535-1553).
ggtctcttcacagactaat

SEQ ID NO: 419034 - DNA, 19 bp, Homo sapiens
  siRNA target sequence for MGC26963 (NM_152621.3,1540-1558).
cttcacagactaatttctt

SEQ ID NO: 419035 - DNA, 19 bp, Homo sapiens
  siRNA target sequence for MGC26963 (NM_152621.3,1570-1588).
ggtggttccccatctttta

SEQ ID NO: 419036 - DNA, 19 bp, Homo sapiens
  siRNA target sequence for MGC26963 (NM_152621.3,1573-1591).
ggttccccatcttttattt

SEQ ID NO: 419037 - DNA, 19 bp, Homo sapiens
  siRNA target sequence for FLJ35954 (NM_152622.2,112-130).
ggtccatgactatgatgat

SEQ ID NO: 419038 - DNA, 19 bp, Homo sapiens
  siRNA target sequence for FLJ35954 (NM_152622.2,164-182).
gagggtaaaaacttcagtt

SEQ ID NO: 419039 - DNA, 19 bp, Homo sapiens
  siRNA target sequence for FLJ35954 (NM_152622.2,210-228).
gaaccatgcctctagaaga

SEQ ID NO: 419040 - DNA, 19 bp, Homo sapiens
  siRNA target sequence for FLJ35954 (NM_152622.2,369-387).
gtgatgacgaggaaactca

SEQ ID NO: 419041 - DNA, 19 bp, Homo sapiens
  siRNA target sequence for FLJ35954 (NM_152622.2,416-434).
gtgacttcccatgaaactt

SEQ ID NO: 419042 - DNA, 19 bp, Homo sapiens
  siRNA target sequence for FLJ35954 (NM_152622.2,418-436).
gacttcccatgaaacttct

SEQ ID NO: 419043 - DNA, 19 bp, Homo sapiens
  siRNA target sequence for FLJ35954 (NM_152622.2,442-460).
cttccctaggcctttacga

SEQ ID NO: 419044 - DNA, 19 bp, Homo sapiens
  siRNA target sequence for FLJ35954 (NM_152622.2,447-465).
ctaggcctttacgatcaaa

SEQ ID NO: 419045 - DNA, 19 bp, Homo sapiens
  siRNA target sequence for FLJ35954 (NM_152622.2,601-619).
gtacgatggtaatgagaaa

SEQ ID NO: 419046 - DNA, 19 bp, Homo sapiens
  siRNA target sequence for FLJ35954 (NM_152622.2,692-710).
gttgagacttcattaagga

SEQ ID NO: 419047 - DNA, 19 bp, Homo sapiens
  siRNA target sequence for FLJ35954 (NM_152622.2,714-732).
gcagtgaaaaaataatgga

SEQ ID NO: 419048 - DNA, 19 bp, Homo sapiens
  siRNA target sequence for FLJ35954 (NM_152622.2,788-806).
ctcaagtgtaaccacaata

SEQ ID NO: 419049 - DNA, 19 bp, Homo sapiens
  siRNA target sequence for FLJ35954 (NM_152622.2,790-808).
caagtgtaaccacaatata

SEQ ID NO: 419050 - DNA, 19 bp, Homo sapiens
  siRNA target sequence for FLJ35954 (NM_152622.2,840-858).
gaaaggcctctcaaggaat

SEQ ID NO: 419051 - DNA, 19 bp, Homo sapiens
  siRNA target sequence for FLJ35954 (NM_152622.2,844-862).
ggcctctcaaggaatgact

SEQ ID NO: 419052 - DNA, 19 bp, Homo sapiens
  siRNA target sequence for FLJ35954 (NM_152622.2,899-917).
gcactcatgctttttggaa

SEQ ID NO: 419053 - DNA, 19 bp, Homo sapiens
  siRNA target sequence for FLJ35954 (NM_152622.2,926-944).
catcttatacagaagaata

SEQ ID NO: 419054 - DNA, 19 bp, Homo sapiens
  siRNA target sequence for FLJ35954 (NM_152622.2,1064-1082).
cctggagttacggactata

SEQ ID NO: 419055 - DNA, 19 bp, Homo sapiens
  siRNA target sequence for FLJ35954 (NM_152622.2,1065-1083).
ctggagttacggactatat

SEQ ID NO: 419056 - DNA, 19 bp, Homo sapiens
  siRNA target sequence for FLJ35954 (NM_152622.2,1068-1086).
gagttacggactatatgga

SEQ ID NO: 419057 - DNA, 19 bp, Homo sapiens
  siRNA target sequence for FLJ35954 (NM_152622.2,1074-1092).
cggactatatggatcgttt

SEQ ID NO: 419058 - DNA, 19 bp, Homo sapiens
  siRNA target sequence for FLJ35954 (NM_152622.2,1075-1093).
ggactatatggatcgttta

SEQ ID NO: 419059 - DNA, 19 bp, Homo sapiens
  siRNA target sequence for FLJ35954 (NM_152622.2,1078-1096).
ctatatggatcgtttagta

SEQ ID NO: 419060 - DNA, 19 bp, Homo sapiens
  siRNA target sequence for FLJ35954 (NM_152622.2,1084-1102).
ggatcgtttagtagatgaa

SEQ ID NO: 419061 - DNA, 19 bp, Homo sapiens
  siRNA target sequence for FLJ35954 (NM_152622.2,1114-1132).
gggtgggacggtaaatgct

SEQ ID NO: 419062 - DNA, 19 bp, Homo sapiens
  siRNA target sequence for FLJ35954 (NM_152622.2,1115-1133).
ggtgggacggtaaatgctt

SEQ ID NO: 419063 - DNA, 19 bp, Homo sapiens
  siRNA target sequence for FLJ35954 (NM_152622.2,1150-1168).
ccggcctgagcctattcct

SEQ ID NO: 419064 - DNA, 19 bp, Homo sapiens
  siRNA target sequence for FLJ35954 (NM_152622.2,1166-1184).
cctgatcaacagctaaaca

SEQ ID NO: 419065 - DNA, 19 bp, Homo sapiens
  siRNA target sequence for FLJ35954 (NM_152622.2,1172-1190).
caacagctaaacattctca

SEQ ID NO: 419066 - DNA, 19 bp, Homo sapiens
  siRNA target sequence for FLJ35954 (NM_152622.2,1245-1263).
gcgaccccacagatgtgaa

SEQ ID NO: 419067 - DNA, 19 bp, Homo sapiens
  siRNA target sequence for FLJ35954 (NM_152622.2,1299-1317).
caccccgtggacaagttaa

SEQ ID NO: 419068 - DNA, 19 bp, Homo sapiens
  siRNA target sequence for FLJ35954 (NM_152622.2,1302-1320).
cccgtggacaagttaatca

SEQ ID NO: 419069 - DNA, 19 bp, Homo sapiens
  siRNA target sequence for FLJ35954 (NM_152622.2,1303-1321).
ccgtggacaagttaatcat

SEQ ID NO: 419070 - DNA, 19 bp, Homo sapiens
  siRNA target sequence for FLJ35954 (NM_152622.2,1444-1462).
gtcagagagaccagcaaaa

SEQ ID NO: 419071 - DNA, 19 bp, Homo sapiens
  siRNA target sequence for FLJ35954 (NM_152622.2,1481-1499).
gccgtccctgaatccttta

SEQ ID NO: 419072 - DNA, 19 bp, Homo sapiens
  siRNA target sequence for FLJ35954 (NM_152622.2,1607-1625).
gccaacgagaccaatggtt

SEQ ID NO: 419073 - DNA, 19 bp, Homo sapiens
  siRNA target sequence for FLJ35954 (NM_152622.2,1608-1626).
ccaacgagaccaatggttt

SEQ ID NO: 419074 - DNA, 19 bp, Homo sapiens
  siRNA target sequence for FLJ37927 (NM_152623.1,252-270).
gtgtgctctccaaagactt

SEQ ID NO: 419075 - DNA, 19 bp, Homo sapiens
  siRNA target sequence for FLJ37927 (NM_152623.1,297-315).
ccaacgtactcgattcagt

SEQ ID NO: 419076 - DNA, 19 bp, Homo sapiens
  siRNA target sequence for FLJ37927 (NM_152623.1,298-316).
caacgtactcgattcagtt

SEQ ID NO: 419077 - DNA, 19 bp, Homo sapiens
  siRNA target sequence for FLJ37927 (NM_152623.1,301-319).
cgtactcgattcagttaat

SEQ ID NO: 419078 - DNA, 19 bp, Homo sapiens
  siRNA target sequence for FLJ37927 (NM_152623.1,321-339).
ctacgtattctgactttaa

SEQ ID NO: 419079 - DNA, 19 bp, Homo sapiens
  siRNA target sequence for FLJ37927 (NM_152623.1,380-398).
gcgagtagccccattacca

SEQ ID NO: 419080 - DNA, 19 bp, Homo sapiens
  siRNA target sequence for FLJ37927 (NM_152623.1,496-514).
gaagacaccgcctgagaaa

SEQ ID NO: 419081 - DNA, 19 bp, Homo sapiens
  siRNA target sequence for FLJ37927 (NM_152623.1,553-571).
gacccccagcaaaggaatt

SEQ ID NO: 419082 - DNA, 19 bp, Homo sapiens
  siRNA target sequence for FLJ37927 (NM_152623.1,603-621).
gcaaggcacctcatgcaat

SEQ ID NO: 419083 - DNA, 19 bp, Homo sapiens
  siRNA target sequence for FLJ37927 (NM_152623.1,622-640).
ggacagagactggaaagaa

SEQ ID NO: 419084 - DNA, 19 bp, Homo sapiens
  siRNA target sequence for FLJ37927 (NM_152623.1,647-665).
gcctcaaaagggcagaaat

SEQ ID NO: 419085 - DNA, 19 bp, Homo sapiens
  siRNA target sequence for FLJ37927 (NM_152623.1,697-715).
ggttcagcaggctaatgga

SEQ ID NO: 419086 - DNA, 19 bp, Homo sapiens
  siRNA target sequence for FLJ37927 (NM_152623.1,729-747).
gtgagcaatccgaatgtgt

SEQ ID NO: 419087 - DNA, 19 bp, Homo sapiens
  siRNA target sequence for FLJ37927 (NM_152623.1,798-816).
gttctggtgatataaacga

SEQ ID NO: 419088 - DNA, 19 bp, Homo sapiens
  siRNA target sequence for FLJ37927 (NM_152623.1,804-822).
gtgatataaacgattccat

SEQ ID NO: 419089 - DNA, 19 bp, Homo sapiens
  siRNA target sequence for FLJ37927 (NM_152623.1,852-870).
ctggtcttcgaaatgacta

SEQ ID NO: 419090 - DNA, 19 bp, Homo sapiens
  siRNA target sequence for FLJ37927 (NM_152623.1,1053-1071).
gcgagggagaagtgcaatt

SEQ ID NO: 419091 - DNA, 19 bp, Homo sapiens
  siRNA target sequence for FLJ37927 (NM_152623.1,1054-1072).
cgagggagaagtgcaatta

SEQ ID NO: 419092 - DNA, 19 bp, Homo sapiens
  siRNA target sequence for FLJ37927 (NM_152623.1,1140-1158).
gctggaatcactttatcct

SEQ ID NO: 419093 - DNA, 19 bp, Homo sapiens
  siRNA target sequence for FLJ37927 (NM_152623.1,1170-1188).
caagactggggcgtgttta

SEQ ID NO: 419094 - DNA, 19 bp, Homo sapiens
  siRNA target sequence for FLJ37927 (NM_152623.1,1204-1222).
ggtagcccagcatcatgtt

SEQ ID NO: 419095 - DNA, 19 bp, Homo sapiens
  siRNA target sequence for FLJ37927 (NM_152623.1,1299-1317).
gtgatggactgctgacaat

SEQ ID NO: 419096 - DNA, 19 bp, Homo sapiens
  siRNA target sequence for FLJ37927 (NM_152623.1,1301-1319).
gatggactgctgacaatat

SEQ ID NO: 419097 - DNA, 19 bp, Homo sapiens
  siRNA target sequence for FLJ37927 (NM_152623.1,1349-1367).
ggccaaccgctgaaagtca

SEQ ID NO: 419098 - DNA, 19 bp, Homo sapiens
  siRNA target sequence for FLJ37927 (NM_152623.1,1350-1368).
gccaaccgctgaaagtcat

SEQ ID NO: 419099 - DNA, 19 bp, Homo sapiens
  siRNA target sequence for FLJ37927 (NM_152623.1,1351-1369).
ccaaccgctgaaagtcata

SEQ ID NO: 419100 - DNA, 19 bp, Homo sapiens
  siRNA target sequence for FLJ37927 (NM_152623.1,1352-1370).
caaccgctgaaagtcataa

SEQ ID NO: 419101 - DNA, 19 bp, Homo sapiens
  siRNA target sequence for FLJ37927 (NM_152623.1,1454-1472).
cgcttacacatcttggata

SEQ ID NO: 419102 - DNA, 19 bp, Homo sapiens
  siRNA target sequence for FLJ37927 (NM_152623.1,1455-1473).
gcttacacatcttggatat

SEQ ID NO: 419103 - DNA, 19 bp, Homo sapiens
  siRNA target sequence for FLJ37927 (NM_152623.1,1514-1532).
cagatttgttccttaatct

SEQ ID NO: 419104 - DNA, 19 bp, Homo sapiens
  siRNA target sequence for FLJ37927 (NM_152623.1,1691-1709).
gatgggacggcctctgtat

SEQ ID NO: 419105 - DNA, 19 bp, Homo sapiens
  siRNA target sequence for FLJ37927 (NM_152623.1,1700-1718).
gcctctgtatggaattgct

SEQ ID NO: 419106 - DNA, 19 bp, Homo sapiens
  siRNA target sequence for DCP2 (NM_152624.3,273-291).
cagcgaggaaagagacaat

SEQ ID NO: 419107 - DNA, 19 bp, Homo sapiens
  siRNA target sequence for DCP2 (NM_152624.3,293-311).
caatccgagtgtgttttca

SEQ ID NO: 419108 - DNA, 19 bp, Homo sapiens
  siRNA target sequence for DCP2 (NM_152624.3,319-337).
cttgcccattggttttact

SEQ ID NO: 419109 - DNA, 19 bp, Homo sapiens
  siRNA target sequence for DCP2 (NM_152624.3,354-372).
gaacacaccaggattacct

SEQ ID NO: 419110 - DNA, 19 bp, Homo sapiens
  siRNA target sequence for DCP2 (NM_152624.3,375-393).
gtgtgggataagagacttt

SEQ ID NO: 419111 - DNA, 19 bp, Homo sapiens
  siRNA target sequence for DCP2 (NM_152624.3,410-428).
gtcattgtccgtttttgct

SEQ ID NO: 419112 - DNA, 19 bp, Homo sapiens
  siRNA target sequence for DCP2 (NM_152624.3,460-478).
gatgaatggaaggaatata

SEQ ID NO: 419113 - DNA, 19 bp, Homo sapiens
  siRNA target sequence for DCP2 (NM_152624.3,483-501).
gggagtaccaacatatggt

SEQ ID NO: 419114 - DNA, 19 bp, Homo sapiens
  siRNA target sequence for DCP2 (NM_152624.3,519-537).
gacacttgaaaatgtacta

SEQ ID NO: 419115 - DNA, 19 bp, Homo sapiens
  siRNA target sequence for DCP2 (NM_152624.3,546-564).
ggggtacctagcaaaatca

SEQ ID NO: 419116 - DNA, 19 bp, Homo sapiens
  siRNA target sequence for DCP2 (NM_152624.3,647-665).
gttttgatatcaaagacta

SEQ ID NO: 419117 - DNA, 19 bp, Homo sapiens
  siRNA target sequence for DCP2 (NM_152624.3,684-702).
cattgaacttcgaatcaat

SEQ ID NO: 419118 - DNA, 19 bp, Homo sapiens
  siRNA target sequence for DCP2 (NM_152624.3,709-727).
cttgctcgtttgtacatca

SEQ ID NO: 419119 - DNA, 19 bp, Homo sapiens
  siRNA target sequence for DCP2 (NM_152624.3,720-738).
gtacatcattccaggaatt

SEQ ID NO: 419120 - DNA, 19 bp, Homo sapiens
  siRNA target sequence for DCP2 (NM_152624.3,730-748).
ccaggaattccaaaagaca

SEQ ID NO: 419121 - DNA, 19 bp, Homo sapiens
  siRNA target sequence for DCP2 (NM_152624.3,790-808).
gagtggttctctattgaga

SEQ ID NO: 419122 - DNA, 19 bp, Homo sapiens
  siRNA target sequence for DCP2 (NM_152624.3,805-823).
gagaaattgccttgtcata

SEQ ID NO: 419123 - DNA, 19 bp, Homo sapiens
  siRNA target sequence for DCP2 (NM_152624.3,814-832).
ccttgtcatagaaatgata

SEQ ID NO: 419124 - DNA, 19 bp, Homo sapiens
  siRNA target sequence for DCP2 (NM_152624.3,853-871).
ggtttggcacctaacaaat

SEQ ID NO: 419125 - DNA, 19 bp, Homo sapiens
  siRNA target sequence for DCP2 (NM_152624.3,854-872).
gtttggcacctaacaaatt

SEQ ID NO: 419126 - DNA, 19 bp, Homo sapiens
  siRNA target sequence for DCP2 (NM_152624.3,879-897).
ggccattccctttatcaga

SEQ ID NO: 419127 - DNA, 19 bp, Homo sapiens
  siRNA target sequence for DCP2 (NM_152624.3,938-956).
cagacagtgacaatggatt

SEQ ID NO: 419128 - DNA, 19 bp, Homo sapiens
  siRNA target sequence for DCP2 (NM_152624.3,940-958).
gacagtgacaatggatttt

SEQ ID NO: 419129 - DNA, 19 bp, Homo sapiens
  siRNA target sequence for DCP2 (NM_152624.3,980-998).
ctaaacccactgtggaaaa

SEQ ID NO: 419130 - DNA, 19 bp, Homo sapiens
  siRNA target sequence for DCP2 (NM_152624.3,987-1005).
cactgtggaaaaattgagt

SEQ ID NO: 419131 - DNA, 19 bp, Homo sapiens
  siRNA target sequence for DCP2 (NM_152624.3,1018-1036).
cgccacagtcagcagttat

SEQ ID NO: 419132 - DNA, 19 bp, Homo sapiens
  siRNA target sequence for DCP2 (NM_152624.3,1055-1073).
gtgaccagtgggtaaagca

SEQ ID NO: 419133 - DNA, 19 bp, Homo sapiens
  siRNA target sequence for DCP2 (NM_152624.3,1087-1105).
cagcaaaagccatataata

SEQ ID NO: 419134 - DNA, 19 bp, Homo sapiens
  siRNA target sequence for DCP2 (NM_152624.3,1114-1132).
gaaatgtctgaccttttaa

SEQ ID NO: 419135 - DNA, 19 bp, Homo sapiens
  siRNA target sequence for DCP2 (NM_152624.3,1173-1191).
gtatcaagattcacctaat

SEQ ID NO: 419136 - DNA, 19 bp, Homo sapiens
  siRNA target sequence for DCP2 (NM_152624.3,1268-1286).
cacggaaacttcaggataa

SEQ ID NO: 419137 - DNA, 19 bp, Homo sapiens
  siRNA target sequence for DCP2 (NM_152624.3,1295-1313).
cagatgctgtatatgactt

SEQ ID NO: 419138 - DNA, 19 bp, Homo sapiens
  siRNA target sequence for DCP2 (NM_152624.3,1355-1373).
gacagcccgtggcatgtaa

SEQ ID NO: 419139 - DNA, 19 bp, Homo sapiens
  siRNA target sequence for DCP2 (NM_152624.3,1359-1377).
gcccgtggcatgtaatgga

SEQ ID NO: 419140 - DNA, 19 bp, Homo sapiens
  siRNA target sequence for DCP2 (NM_152624.3,1415-1433).
gtttcaagtttgaccataa

SEQ ID NO: 419141 - DNA, 19 bp, Homo sapiens
  siRNA target sequence for DCP2 (NM_152624.3,1419-1437).
caagtttgaccataatgct

SEQ ID NO: 419142 - DNA, 19 bp, Homo sapiens
  siRNA target sequence for DCP2 (NM_152624.3,1422-1440).
gtttgaccataatgctata

SEQ ID NO: 419143 - DNA, 19 bp, Homo sapiens
  siRNA target sequence for DCP2 (NM_152624.3,1428-1446).
ccataatgctataatgaaa

SEQ ID NO: 419144 - DNA, 19 bp, Homo sapiens
  siRNA target sequence for ZNF515 (NM_152629.2,204-222).
cagcgactgggactcattt

SEQ ID NO: 419145 - DNA, 19 bp, Homo sapiens
  siRNA target sequence for ZNF515 (NM_152629.2,206-224).
gcgactgggactcatttca

SEQ ID NO: 419146 - DNA, 19 bp, Homo sapiens
  siRNA target sequence for ZNF515 (NM_152629.2,257-275).
ccagatcagtcctagctta

SEQ ID NO: 419147 - DNA, 19 bp, Homo sapiens
  siRNA target sequence for ZNF515 (NM_152629.2,454-472).
ctcagaatggccttgatct

SEQ ID NO: 419148 - DNA, 19 bp, Homo sapiens
  siRNA target sequence for ZNF515 (NM_152629.2,511-529).
ccagcaatagtgtctctaa

SEQ ID NO: 419149 - DNA, 19 bp, Homo sapiens
  siRNA target sequence for ZNF515 (NM_152629.2,515-533).
caatagtgtctctaactca

SEQ ID NO: 419150 - DNA, 19 bp, Homo sapiens
  siRNA target sequence for ZNF515 (NM_152629.2,656-674).
cgatggcatcgggatagat

SEQ ID NO: 419151 - DNA, 19 bp, Homo sapiens
  siRNA target sequence for ZNF515 (NM_152629.2,657-675).
gatggcatcgggatagatt

SEQ ID NO: 419152 - DNA, 19 bp, Homo sapiens
  siRNA target sequence for ZNF515 (NM_152629.2,661-679).
gcatcgggatagatttcaa

SEQ ID NO: 419153 - DNA, 19 bp, Homo sapiens
  siRNA target sequence for ZNF515 (NM_152629.2,662-680).
catcgggatagatttcaat

SEQ ID NO: 419154 - DNA, 19 bp, Homo sapiens
  siRNA target sequence for ZNF515 (NM_152629.2,1345-1363).
ccggttgccctcgaagata

SEQ ID NO: 419155 - DNA, 19 bp, Homo sapiens
  siRNA target sequence for ZNF515 (NM_152629.2,1348-1366).
gttgccctcgaagatacaa

SEQ ID NO: 419156 - DNA, 19 bp, Homo sapiens
  siRNA target sequence for ZNF515 (NM_152629.2,1601-1619).
caaaccttatgcttgtcaa

SEQ ID NO: 419157 - DNA, 19 bp, Homo sapiens
  siRNA target sequence for ZNF515 (NM_152629.2,1667-1685).
gcatgtgaaggcacattct

SEQ ID NO: 419158 - DNA, 19 bp, Homo sapiens
  siRNA target sequence for ZNF515 (NM_152629.2,1673-1691).
gaaggcacattcttccaaa

SEQ ID NO: 419159 - DNA, 19 bp, Homo sapiens
  siRNA target sequence for ZNF515 (NM_152629.2,1781-1799).
ggccacttcccctagagat

SEQ ID NO: 419160 - DNA, 19 bp, Homo sapiens
  siRNA target sequence for ZNF515 (NM_152629.2,1939-1957).
cttctccaggacataatgt

SEQ ID NO: 419161 - DNA, 19 bp, Homo sapiens
  siRNA target sequence for ZNF515 (NM_152629.2,2188-2206).
gtatccatgtccatggatt

SEQ ID NO: 419162 - DNA, 19 bp, Homo sapiens
  siRNA target sequence for ZNF515 (NM_152629.2,2282-2300).
cagtgtggtgccttcgttt

SEQ ID NO: 419163 - DNA, 19 bp, Homo sapiens
  siRNA target sequence for ZNF515 (NM_152629.2,2329-2347).
gccaggccagttttgatgt

SEQ ID NO: 419164 - DNA, 19 bp, Homo sapiens
  siRNA target sequence for ZNF515 (NM_152629.2,2330-2348).
ccaggccagttttgatgtt

SEQ ID NO: 419165 - DNA, 19 bp, Homo sapiens
  siRNA target sequence for ZNF515 (NM_152629.2,2366-2384).
gactcactcgggcattaca

SEQ ID NO: 419166 - DNA, 19 bp, Homo sapiens
  siRNA target sequence for ZNF515 (NM_152629.2,2368-2386).
ctcactcgggcattacagt

SEQ ID NO: 419167 - DNA, 19 bp, Homo sapiens
  siRNA target sequence for ZNF515 (NM_152629.2,2372-2390).
ctcgggcattacagtgtat

SEQ ID NO: 419168 - DNA, 19 bp, Homo sapiens
  siRNA target sequence for ZNF515 (NM_152629.2,2377-2395).
gcattacagtgtatgattt

SEQ ID NO: 419169 - DNA, 19 bp, Homo sapiens
  siRNA target sequence for ZNF515 (NM_152629.2,2378-2396).
cattacagtgtatgattta

SEQ ID NO: 419170 - DNA, 19 bp, Homo sapiens
  siRNA target sequence for MGC26999 (NM_152630.2,271-289).
gggatcaagttataacact

SEQ ID NO: 419171 - DNA, 19 bp, Homo sapiens
  siRNA target sequence for MGC26999 (NM_152630.2,286-304).
cactggatcaagtgttaga

SEQ ID NO: 419172 - DNA, 19 bp, Homo sapiens
  siRNA target sequence for MGC26999 (NM_152630.2,290-308).
ggatcaagtgttagatgaa

SEQ ID NO: 419173 - DNA, 19 bp, Homo sapiens
  siRNA target sequence for MGC26999 (NM_152630.2,299-317).
gttagatgaagtaattcca

SEQ ID NO: 419174 - DNA, 19 bp, Homo sapiens
  siRNA target sequence for MGC26999 (NM_152630.2,338-356).
ccccacaatggaggtaaaa

SEQ ID NO: 419175 - DNA, 19 bp, Homo sapiens
  siRNA target sequence for MGC26999 (NM_152630.2,396-414).
gggcaaggaattattgtta

SEQ ID NO: 419176 - DNA, 19 bp, Homo sapiens
  siRNA target sequence for MGC26999 (NM_152630.2,417-435).
gatgccagattgaatggtt

SEQ ID NO: 419177 - DNA, 19 bp, Homo sapiens
  siRNA target sequence for MGC26999 (NM_152630.2,432-450).
ggttccgtagcaagttaca

SEQ ID NO: 419178 - DNA, 19 bp, Homo sapiens
  siRNA target sequence for MGC26999 (NM_152630.2,433-451).
gttccgtagcaagttacat

SEQ ID NO: 419179 - DNA, 19 bp, Homo sapiens
  siRNA target sequence for MGC26999 (NM_152630.2,436-454).
ccgtagcaagttacatact

SEQ ID NO: 419180 - DNA, 19 bp, Homo sapiens
  siRNA target sequence for MGC26999 (NM_152630.2,437-455).
cgtagcaagttacatactt

SEQ ID NO: 419181 - DNA, 19 bp, Homo sapiens
  siRNA target sequence for MGC26999 (NM_152630.2,510-528).
cttccaggtaacgaagaat

SEQ ID NO: 419182 - DNA, 19 bp, Homo sapiens
  siRNA target sequence for MGC26999 (NM_152630.2,555-573).
gactgtctacttgactttt

SEQ ID NO: 419183 - DNA, 19 bp, Homo sapiens
  siRNA target sequence for MGC26999 (NM_152630.2,614-632).
catgaaagacgcttacgta

SEQ ID NO: 419184 - DNA, 19 bp, Homo sapiens
  siRNA target sequence for MGC26999 (NM_152630.2,621-639).
gacgcttacgtacagaaat

SEQ ID NO: 419185 - DNA, 19 bp, Homo sapiens
  siRNA target sequence for MGC26999 (NM_152630.2,625-643).
cttacgtacagaaattggt

SEQ ID NO: 419186 - DNA, 19 bp, Homo sapiens
  siRNA target sequence for MGC26999 (NM_152630.2,660-678).
catgattgttggagtctta

SEQ ID NO: 419187 - DNA, 19 bp, Homo sapiens
  siRNA target sequence for MGC26999 (NM_152630.2,663-681).
gattgttggagtcttatct

SEQ ID NO: 419188 - DNA, 19 bp, Homo sapiens
  siRNA target sequence for MGC26999 (NM_152630.2,680-698).
ctccctttcaaataacact

SEQ ID NO: 419189 - DNA, 19 bp, Homo sapiens
  siRNA target sequence for MGC26999 (NM_152630.2,734-752).
cagacggcagtttgaattt

SEQ ID NO: 419190 - DNA, 19 bp, Homo sapiens
  siRNA target sequence for MGC26999 (NM_152630.2,873-891).
caggaagcaatgacacatt

SEQ ID NO: 419191 - DNA, 19 bp, Homo sapiens
  siRNA target sequence for MGC26999 (NM_152630.2,893-911).
gcaacacaagctcatatgt

SEQ ID NO: 419192 - DNA, 19 bp, Homo sapiens
  siRNA target sequence for MGC26999 (NM_152630.2,894-912).
caacacaagctcatatgta

SEQ ID NO: 419193 - DNA, 19 bp, Homo sapiens
  siRNA target sequence for MGC26999 (NM_152630.2,917-935).
gaaacctgaagagattaga

SEQ ID NO: 419194 - DNA, 19 bp, Homo sapiens
  siRNA target sequence for MGC26999 (NM_152630.2,1004-1022).
caaaaacctagaacgttat

SEQ ID NO: 419195 - DNA, 19 bp, Homo sapiens
  siRNA target sequence for MGC26999 (NM_152630.2,1025-1043).
gtgctctagattctttatt

SEQ ID NO: 419196 - DNA, 19 bp, Homo sapiens
  siRNA target sequence for MGC26999 (NM_152630.2,1027-1045).
gctctagattctttattga

SEQ ID NO: 419197 - DNA, 19 bp, Homo sapiens
  siRNA target sequence for MGC26999 (NM_152630.2,1028-1046).
ctctagattctttattgat

SEQ ID NO: 419198 - DNA, 19 bp, Homo sapiens
  siRNA target sequence for MGC26999 (NM_152630.2,1088-1106).
cctccacaaccatttcata

SEQ ID NO: 419199 - DNA, 19 bp, Homo sapiens
  siRNA target sequence for MGC26999 (NM_152630.2,1114-1132).
gaatgaccaagtatgacta

SEQ ID NO: 419200 - DNA, 19 bp, Homo sapiens
  siRNA target sequence for MGC26999 (NM_152630.2,1120-1138).
ccaagtatgactaccttat

SEQ ID NO: 419201 - DNA, 19 bp, Homo sapiens
  siRNA target sequence for MGC26999 (NM_152630.2,1141-1159).
ccttgcatggagttgtgaa

SEQ ID NO: 419202 - DNA, 19 bp, Homo sapiens
  siRNA target sequence for MGC26999 (NM_152630.2,1142-1160).
cttgcatggagttgtgaat

SEQ ID NO: 419203 - DNA, 19 bp, Homo sapiens
  siRNA target sequence for MGC26999 (NM_152630.2,1220-1238).
gatggctttgaaagtactt

SEQ ID NO: 419204 - DNA, 19 bp, Homo sapiens
  siRNA target sequence for MGC26999 (NM_152630.2,1311-1329).
gaggcaaggtaccctattt

SEQ ID NO: 419205 - DNA, 19 bp, Homo sapiens
  siRNA target sequence for MGC26999 (NM_152630.2,1313-1331).
ggcaaggtaccctatttat

SEQ ID NO: 419206 - DNA, 19 bp, Homo sapiens
  siRNA target sequence for MGC26999 (NM_152630.2,1315-1333).
caaggtaccctatttatgt

SEQ ID NO: 419207 - DNA, 19 bp, Homo sapiens
  siRNA target sequence for MGC26999 (NM_152630.2,1318-1336).
ggtaccctatttatgtaat

SEQ ID NO: 419208 - DNA, 19 bp, Homo sapiens
  siRNA target sequence for MGC26999 (NM_152630.2,1379-1397).
gcactttcgtggatcaaat

SEQ ID NO: 419209 - DNA, 19 bp, Homo sapiens
  siRNA target sequence for MGC26999 (NM_152630.2,1382-1400).
ctttcgtggatcaaatggt

SEQ ID NO: 419210 - DNA, 19 bp, Homo sapiens
  siRNA target sequence for FLJ35782 (NM_152631.1,211-229).
cctgaagatacgcttgttt

SEQ ID NO: 419211 - DNA, 19 bp, Homo sapiens
  siRNA target sequence for FLJ35782 (NM_152631.1,546-564).
caccgagtctggtaaatat

SEQ ID NO: 419212 - DNA, 19 bp, Homo sapiens
  siRNA target sequence for FLJ35782 (NM_152631.1,1138-1156).
ctcaccaagcctggtaaat

SEQ ID NO: 419213 - DNA, 19 bp, Homo sapiens
  siRNA target sequence for FLJ35782 (NM_152631.1,1307-1325).
ccggagcgtcccatctaaa

SEQ ID NO: 419214 - DNA, 19 bp, Homo sapiens
  siRNA target sequence for FLJ35782 (NM_152631.1,1308-1326).
cggagcgtcccatctaaaa

SEQ ID NO: 419215 - DNA, 19 bp, Homo sapiens
  siRNA target sequence for FLJ35782 (NM_152631.1,1310-1328).
gagcgtcccatctaaaaga

SEQ ID NO: 419216 - DNA, 19 bp, Homo sapiens
  siRNA target sequence for FLJ35782 (NM_152631.1,1313-1331).
cgtcccatctaaaagaact

SEQ ID NO: 419217 - DNA, 19 bp, Homo sapiens
  siRNA target sequence for FLJ35782 (NM_152631.1,1355-1373).
caatggagtgtgtttctga

SEQ ID NO: 419218 - DNA, 19 bp, Homo sapiens
  siRNA target sequence for FLJ35782 (NM_152631.1,1400-1418).
gaaaactccgtgacttcaa

SEQ ID NO: 419219 - DNA, 19 bp, Homo sapiens
  siRNA target sequence for FLJ35782 (NM_152631.1,1427-1445).
gagacctaggagttaatga

SEQ ID NO: 419220 - DNA, 19 bp, Homo sapiens
  siRNA target sequence for FLJ35782 (NM_152631.1,1432-1450).
ctaggagttaatgaagaat

SEQ ID NO: 419221 - DNA, 19 bp, Homo sapiens
  siRNA target sequence for FLJ35782 (NM_152631.1,1495-1513).
gatcaagaccaaaagatta

SEQ ID NO: 419222 - DNA, 19 bp, Homo sapiens
  siRNA target sequence for FLJ35782 (NM_152631.1,1569-1587).
ggatgaggtcgaattctta

SEQ ID NO: 419223 - DNA, 19 bp, Homo sapiens
  siRNA target sequence for FLJ35782 (NM_152631.1,1620-1638).
ggcaccgcattcttatagt

SEQ ID NO: 419224 - DNA, 19 bp, Homo sapiens
  siRNA target sequence for FLJ35782 (NM_152631.1,1639-1657).
gcacagcgtgggaggataa

SEQ ID NO: 419225 - DNA, 19 bp, Homo sapiens
  siRNA target sequence for FLJ35782 (NM_152631.1,1642-1660).
cagcgtgggaggataaggt

SEQ ID NO: 419226 - DNA, 19 bp, Homo sapiens
  siRNA target sequence for FLJ35782 (NM_152631.1,1644-1662).
gcgtgggaggataaggtat

SEQ ID NO: 419227 - DNA, 19 bp, Homo sapiens
  siRNA target sequence for FLJ35782 (NM_152631.1,1725-1743).
ccccaagcccgtacttgaa

SEQ ID NO: 419228 - DNA, 19 bp, Homo sapiens
  siRNA target sequence for FLJ35782 (NM_152631.1,1726-1744).
cccaagcccgtacttgaaa

SEQ ID NO: 419229 - DNA, 19 bp, Homo sapiens
  siRNA target sequence for FLJ35782 (NM_152631.1,1823-1841).
gaatgcctggcgtcattga

SEQ ID NO: 419230 - DNA, 19 bp, Homo sapiens
  siRNA target sequence for FLJ35782 (NM_152631.1,1829-1847).
ctggcgtcattgaaaagct

SEQ ID NO: 419231 - DNA, 19 bp, Homo sapiens
  siRNA target sequence for FLJ35782 (NM_152631.1,1897-1915).
cgtgcagtgcaagtttaca

SEQ ID NO: 419232 - DNA, 19 bp, Homo sapiens
  siRNA target sequence for FLJ35782 (NM_152631.1,1898-1916).
gtgcagtgcaagtttacaa

SEQ ID NO: 419233 - DNA, 19 bp, Homo sapiens
  siRNA target sequence for FLJ35782 (NM_152631.1,1900-1918).
gcagtgcaagtttacaagt

SEQ ID NO: 419234 - DNA, 19 bp, Homo sapiens
  siRNA target sequence for FLJ35782 (NM_152631.1,1905-1923).
gcaagtttacaagtacaaa

SEQ ID NO: 419235 - DNA, 19 bp, Homo sapiens
  siRNA target sequence for FLJ35782 (NM_152631.1,1929-1947).
cgtcacagatgcatcaaaa

SEQ ID NO: 419236 - DNA, 19 bp, Homo sapiens
  siRNA target sequence for MGC34831 (NM_152632.1,36-54).
gttccctcaccataaacgt

SEQ ID NO: 419237 - DNA, 19 bp, Homo sapiens
  siRNA target sequence for MGC34831 (NM_152632.1,68-86).
ctcgccatgagcatccaaa

SEQ ID NO: 419238 - DNA, 19 bp, Homo sapiens
  siRNA target sequence for MGC34831 (NM_152632.1,190-208).
gtaccgcctcccgattact

SEQ ID NO: 419239 - DNA, 19 bp, Homo sapiens
  siRNA target sequence for MGC34831 (NM_152632.1,199-217).
cccgattactgtgcataat

SEQ ID NO: 419240 - DNA, 19 bp, Homo sapiens
  siRNA target sequence for MGC34831 (NM_152632.1,200-218).
ccgattactgtgcataata

SEQ ID NO: 419241 - DNA, 19 bp, Homo sapiens
  siRNA target sequence for MGC34831 (NM_152632.1,201-219).
cgattactgtgcataatat

SEQ ID NO: 419242 - DNA, 19 bp, Homo sapiens
  siRNA target sequence for MGC34831 (NM_152632.1,255-273).
ccgtcaagccacagttcaa

SEQ ID NO: 419243 - DNA, 19 bp, Homo sapiens
  siRNA target sequence for MGC34831 (NM_152632.1,256-274).
cgtcaagccacagttcaaa

SEQ ID NO: 419244 - DNA, 19 bp, Homo sapiens
  siRNA target sequence for MGC34831 (NM_152632.1,280-298).
gttgaccagtctggataaa

SEQ ID NO: 419245 - DNA, 19 bp, Homo sapiens
  siRNA target sequence for MGC34831 (NM_152632.1,322-340).
gacagctatggtggaatat

SEQ ID NO: 419246 - DNA, 19 bp, Homo sapiens
  siRNA target sequence for MGC34831 (NM_152632.1,324-342).
cagctatggtggaatatca

SEQ ID NO: 419247 - DNA, 19 bp, Homo sapiens
  siRNA target sequence for MGC34831 (NM_152632.1,368-386).
gaccggctacttatttcaa

SEQ ID NO: 419248 - DNA, 19 bp, Homo sapiens
  siRNA target sequence for MGC34831 (NM_152632.1,370-388).
ccggctacttatttcaata

SEQ ID NO: 419249 - DNA, 19 bp, Homo sapiens
  siRNA target sequence for MGC34831 (NM_152632.1,373-391).
gctacttatttcaatagaa

SEQ ID NO: 419250 - DNA, 19 bp, Homo sapiens
  siRNA target sequence for MGC34831 (NM_152632.1,399-417).
caacagaaattcctctaat

SEQ ID NO: 419251 - DNA, 19 bp, Homo sapiens
  siRNA target sequence for MGC34831 (NM_152632.1,413-431).
ctaattgggttgattccat

SEQ ID NO: 419252 - DNA, 19 bp, Homo sapiens
  siRNA target sequence for MGC34831 (NM_152632.1,471-489).
cactggttgccaatagtaa

SEQ ID NO: 419253 - DNA, 19 bp, Homo sapiens
  siRNA target sequence for MGC34831 (NM_152632.1,475-493).
ggttgccaatagtaaagta

SEQ ID NO: 419254 - DNA, 19 bp, Homo sapiens
  siRNA target sequence for MGC34831 (NM_152632.1,476-494).
gttgccaatagtaaagtat

SEQ ID NO: 419255 - DNA, 19 bp, Homo sapiens
  siRNA target sequence for MGC34831 (NM_152632.1,505-523).
gattactatcactaaccat

SEQ ID NO: 419256 - DNA, 19 bp, Homo sapiens
  siRNA target sequence for MGC34831 (NM_152632.1,525-543).
gcaaagctccaggcatatt

SEQ ID NO: 419257 - DNA, 19 bp, Homo sapiens
  siRNA target sequence for MGC34831 (NM_152632.1,591-609).
gtggtatcgtggatgctaa

SEQ ID NO: 419258 - DNA, 19 bp, Homo sapiens
  siRNA target sequence for MGC34831 (NM_152632.1,606-624).
ctaagtcatcaatggttat

SEQ ID NO: 419259 - DNA, 19 bp, Homo sapiens
  siRNA target sequence for MGC34831 (NM_152632.1,639-657).
gtgcagaccagccaagaat

SEQ ID NO: 419260 - DNA, 19 bp, Homo sapiens
  siRNA target sequence for MGC34831 (NM_152632.1,651-669).
caagaattgtagatgaaga

SEQ ID NO: 419261 - DNA, 19 bp, Homo sapiens
  siRNA target sequence for MGC34831 (NM_152632.1,695-713).
cctgagatgctcttgagta

SEQ ID NO: 419262 - DNA, 19 bp, Homo sapiens
  siRNA target sequence for MGC34831 (NM_152632.1,698-716).
gagatgctcttgagtatca

SEQ ID NO: 419263 - DNA, 19 bp, Homo sapiens
  siRNA target sequence for MGC34831 (NM_152632.1,700-718).
gatgctcttgagtatcaaa

SEQ ID NO: 419264 - DNA, 19 bp, Homo sapiens
  siRNA target sequence for MGC34831 (NM_152632.1,728-746).
gttgagcagattattgaat

SEQ ID NO: 419265 - DNA, 19 bp, Homo sapiens
  siRNA target sequence for MGC34831 (NM_152632.1,731-749).
gagcagattattgaattat

SEQ ID NO: 419266 - DNA, 19 bp, Homo sapiens
  siRNA target sequence for MGC34831 (NM_152632.1,743-761).
gaattattaagcatgagta

SEQ ID NO: 419267 - DNA, 19 bp, Homo sapiens
  siRNA target sequence for MGC34831 (NM_152632.1,771-789).
ggctggaatgcatacactt

SEQ ID NO: 419268 - DNA, 19 bp, Homo sapiens
  siRNA target sequence for MGC34831 (NM_152632.1,772-790).
gctggaatgcatacacttt

SEQ ID NO: 419269 - DNA, 19 bp, Homo sapiens
  siRNA target sequence for MGC34831 (NM_152632.1,797-815).
gttttcttcggatcatcaa

SEQ ID NO: 419270 - DNA, 19 bp, Homo sapiens
  siRNA target sequence for MGC34831 (NM_152632.1,802-820).
cttcggatcatcaaaaatt

SEQ ID NO: 419271 - DNA, 19 bp, Homo sapiens
  siRNA target sequence for MGC34831 (NM_152632.1,805-823).
cggatcatcaaaaattaaa

SEQ ID NO: 419272 - DNA, 19 bp, Homo sapiens
  siRNA target sequence for MGC34831 (NM_152632.1,864-882).
gggtggccatcatacaaga

SEQ ID NO: 419273 - DNA, 19 bp, Homo sapiens
  siRNA target sequence for MGC34831 (NM_152632.1,865-883).
ggtggccatcatacaagat

SEQ ID NO: 419274 - DNA, 19 bp, Homo sapiens
  siRNA target sequence for MGC34831 (NM_152632.1,904-922).
gggtacagatattcaacaa

SEQ ID NO: 419275 - DNA, 19 bp, Homo sapiens
  siRNA target sequence for MGC34831 (NM_152632.1,905-923).
ggtacagatattcaacaaa

SEQ ID NO: 419276 - DNA, 19 bp, Homo sapiens
  siRNA target sequence for MGC34831 (NM_152632.1,973-991).
catagatactactatcatt

SEQ ID NO: 419277 - DNA, 19 bp, Homo sapiens
  siRNA target sequence for MGC34831 (NM_152632.1,977-995).
gatactactatcattatct

SEQ ID NO: 419278 - DNA, 19 bp, Homo sapiens
  siRNA target sequence for MGC34831 (NM_152632.1,1015-1033).
gactttacaaccttatcaa

SEQ ID NO: 419279 - DNA, 19 bp, Homo sapiens
  siRNA target sequence for MGC34831 (NM_152632.1,1066-1084).
gctaatggctgttggtaaa

SEQ ID NO: 419280 - DNA, 19 bp, Homo sapiens
  siRNA target sequence for MGC34831 (NM_152632.1,1067-1085).
ctaatggctgttggtaaaa

SEQ ID NO: 419281 - DNA, 19 bp, Homo sapiens
  siRNA target sequence for MGC34831 (NM_152632.1,1088-1106).
gatattggaccttcataca

SEQ ID NO: 419282 - DNA, 19 bp, Homo sapiens
  siRNA target sequence for MGC34831 (NM_152632.1,1109-1127).
caggactatgctctctttt

SEQ ID NO: 419283 - DNA, 19 bp, Homo sapiens
  siRNA target sequence for MGC34831 (NM_152632.1,1112-1130).
gactatgctctctttttga

SEQ ID NO: 419284 - DNA, 19 bp, Homo sapiens
  siRNA target sequence for MGC34831 (NM_152632.1,1114-1132).
ctatgctctctttttgaga

SEQ ID NO: 419285 - DNA, 19 bp, Homo sapiens
  siRNA target sequence for MGC34831 (NM_152632.1,1194-1212).
gtgaacgatttcagaaagt

SEQ ID NO: 419286 - DNA, 19 bp, Homo sapiens
  siRNA target sequence for MGC34831 (NM_152632.1,1236-1254).
gacttcctgttttactaca

SEQ ID NO: 419287 - DNA, 19 bp, Homo sapiens
  siRNA target sequence for MGC34831 (NM_152632.1,1259-1277).
gatccaggaccagttctta

SEQ ID NO: 419288 - DNA, 19 bp, Homo sapiens
  siRNA target sequence for MGC34831 (NM_152632.1,1294-1312).
catgggtgaacgttcagaa

SEQ ID NO: 419289 - DNA, 19 bp, Homo sapiens
  siRNA target sequence for MGC34831 (NM_152632.1,1297-1315).
gggtgaacgttcagaaatt

SEQ ID NO: 419290 - DNA, 19 bp, Homo sapiens
  siRNA target sequence for MGC34831 (NM_152632.1,1301-1319).
gaacgttcagaaattcagt

SEQ ID NO: 419291 - DNA, 19 bp, Homo sapiens
  siRNA target sequence for MGC34831 (NM_152632.1,1318-1336).
gtgcatcataaaaaatcaa

SEQ ID NO: 419292 - DNA, 19 bp, Homo sapiens
  siRNA target sequence for MGC34831 (NM_152632.1,1349-1367).
cctgtgacgtaccacttta

SEQ ID NO: 419293 - DNA, 19 bp, Homo sapiens
  siRNA target sequence for MGC34831 (NM_152632.1,1350-1368).
ctgtgacgtaccactttaa

SEQ ID NO: 419294 - DNA, 19 bp, Homo sapiens
  siRNA target sequence for MGC34831 (NM_152632.1,1352-1370).
gtgacgtaccactttaaaa

SEQ ID NO: 419295 - DNA, 19 bp, Homo sapiens
  siRNA target sequence for MGC34831 (NM_152632.1,1354-1372).
gacgtaccactttaaaaaa

SEQ ID NO: 419296 - DNA, 19 bp, Homo sapiens
  siRNA target sequence for MGC34831 (NM_152632.1,1429-1447).
ggatgtgatgtgttcattt

SEQ ID NO: 419297 - DNA, 19 bp, Homo sapiens
  siRNA target sequence for MGC34831 (NM_152632.1,1514-1532).
gaagatttgcaatctttgt

SEQ ID NO: 419298 - DNA, 19 bp, Homo sapiens
  siRNA target sequence for MGC34831 (NM_152632.1,1522-1540).
gcaatctttgtcggtaaaa

SEQ ID NO: 419299 - DNA, 19 bp, Homo sapiens
  siRNA target sequence for MGC34831 (NM_152632.1,1531-1549).
gtcggtaaaatctttccat

SEQ ID NO: 419300 - DNA, 19 bp, Homo sapiens
  siRNA target sequence for MGC34831 (NM_152632.1,1542-1560).
ctttccatcacgtatattt

SEQ ID NO: 419301 - DNA, 19 bp, Homo sapiens
  siRNA target sequence for MGC34831 (NM_152632.1,1546-1564).
ccatcacgtatatttagct

SEQ ID NO: 419302 - DNA, 19 bp, Homo sapiens
  siRNA target sequence for MGC34831 (NM_152632.1,1547-1565).
catcacgtatatttagctt

SEQ ID NO: 419303 - DNA, 19 bp, Homo sapiens
  siRNA target sequence for MGC34831 (NM_152632.1,1562-1580).
gctttcaacagcatctgta

SEQ ID NO: 419304 - DNA, 19 bp, Homo sapiens
  siRNA target sequence for MGC34831 (NM_152632.1,1563-1581).
ctttcaacagcatctgtaa

SEQ ID NO: 419305 - DNA, 19 bp, Homo sapiens
  siRNA target sequence for MGC34831 (NM_152632.1,1638-1656).
gtaatcccacgggaaagtt

SEQ ID NO: 419306 - DNA, 19 bp, Homo sapiens
  siRNA target sequence for MGC34831 (NM_152632.1,1672-1690).
ggcaaaacgcaagaattat

SEQ ID NO: 419307 - DNA, 19 bp, Homo sapiens
  siRNA target sequence for MGC34831 (NM_152632.1,1694-1712).
cctgtagcaatgcttcaat

SEQ ID NO: 419308 - DNA, 19 bp, Homo sapiens
  siRNA target sequence for MGC34831 (NM_152632.1,1753-1771).
gccagtgaaggatatgcta

SEQ ID NO: 419309 - DNA, 19 bp, Homo sapiens
  siRNA target sequence for MGC34831 (NM_152632.1,1787-1805).
gaccgagctgcaactatca

SEQ ID NO: 419310 - DNA, 19 bp, Homo sapiens
  siRNA target sequence for MGC34831 (NM_152632.1,1797-1815).
caactatcaggtctaaaga

SEQ ID NO: 419311 - DNA, 19 bp, Homo sapiens
  siRNA target sequence for MGC34831 (NM_152632.1,1833-1851).
ggccaattttcacaaaagt

SEQ ID NO: 419312 - DNA, 19 bp, Homo sapiens
  siRNA target sequence for MGC34831 (NM_152632.1,1857-1875).
gatttaactatgtgaatca

SEQ ID NO: 419313 - DNA, 19 bp, Homo sapiens
  siRNA target sequence for MGC34831 (NM_152632.1,1989-2007).
gggagcgcatgtattcata

SEQ ID NO: 419314 - DNA, 19 bp, Homo sapiens
  siRNA target sequence for MGC34831 (NM_152632.1,1993-2011).
gcgcatgtattcatatgat

SEQ ID NO: 419315 - DNA, 19 bp, Homo sapiens
  siRNA target sequence for MGC34831 (NM_152632.1,1999-2017).
gtattcatatgatgataca

SEQ ID NO: 419316 - DNA, 19 bp, Homo sapiens
  siRNA target sequence for MGC34831 (NM_152632.1,2033-2051).
ccaggatcaggtctaaagt

SEQ ID NO: 419317 - DNA, 19 bp, Homo sapiens
  siRNA target sequence for MGC34831 (NM_152632.1,2091-2109).
cttcagcagcaaattcaat

SEQ ID NO: 419318 - DNA, 19 bp, Homo sapiens
  siRNA target sequence for MGC34831 (NM_152632.1,2106-2124).
caattagagcgaatcgatt

SEQ ID NO: 419319 - DNA, 19 bp, Homo sapiens
  siRNA target sequence for MGC34831 (NM_152632.1,2114-2132).
gcgaatcgattgttaacca

SEQ ID NO: 419320 - DNA, 19 bp, Homo sapiens
  siRNA target sequence for MGC34831 (NM_152632.1,2161-2179).
gtctgtgagaagaaaggtt

SEQ ID NO: 419321 - DNA, 19 bp, Homo sapiens
  siRNA target sequence for MGC34831 (NM_152632.1,2201-2219).
ccatccactccacaagaaa

SEQ ID NO: 419322 - DNA, 19 bp, Homo sapiens
  siRNA target sequence for MGC34831 (NM_152632.1,2264-2282).
gtaattgttgttagatact

SEQ ID NO: 419323 - DNA, 19 bp, Homo sapiens
  siRNA target sequence for FLJ34064 (NM_152633.1,175-193).
gtcatctaacgaacaagaa

SEQ ID NO: 419324 - DNA, 19 bp, Homo sapiens
  siRNA target sequence for FLJ34064 (NM_152633.1,188-206).
caagaaaggctcttgtgtt

SEQ ID NO: 419325 - DNA, 19 bp, Homo sapiens
  siRNA target sequence for FLJ34064 (NM_152633.1,284-302).
catgtcagaagaatggtat

SEQ ID NO: 419326 - DNA, 19 bp, Homo sapiens
  siRNA target sequence for FLJ34064 (NM_152633.1,342-360).
gattttttaccataaagga

SEQ ID NO: 419327 - DNA, 19 bp, Homo sapiens
  siRNA target sequence for FLJ34064 (NM_152633.1,417-435).
gaattaacctcccttacat

SEQ ID NO: 419328 - DNA, 19 bp, Homo sapiens
  siRNA target sequence for FLJ34064 (NM_152633.1,424-442).
cctcccttacattgtgata

SEQ ID NO: 419329 - DNA, 19 bp, Homo sapiens
  siRNA target sequence for FLJ34064 (NM_152633.1,482-500).
ctaatccttcacagtacta

SEQ ID NO: 419330 - DNA, 19 bp, Homo sapiens
  siRNA target sequence for FLJ34064 (NM_152633.1,509-527).
gaaatgcgtttgagtttta

SEQ ID NO: 419331 - DNA, 19 bp, Homo sapiens
  siRNA target sequence for FLJ34064 (NM_152633.1,562-580).
ccttaatggccctttaatt

SEQ ID NO: 419332 - DNA, 19 bp, Homo sapiens
  siRNA target sequence for FLJ34064 (NM_152633.1,585-603).
ggaggcatgtcaaagcatt

SEQ ID NO: 419333 - DNA, 19 bp, Homo sapiens
  siRNA target sequence for FLJ34064 (NM_152633.1,593-611).
gtcaaagcattcttcttta

SEQ ID NO: 419334 - DNA, 19 bp, Homo sapiens
  siRNA target sequence for FLJ34064 (NM_152633.1,618-636).
ctcaaactggcaaagttgt

SEQ ID NO: 419335 - DNA, 19 bp, Homo sapiens
  siRNA target sequence for FLJ34064 (NM_152633.1,751-769).
gccttcaaaatcagattat

SEQ ID NO: 419336 - DNA, 19 bp, Homo sapiens
  siRNA target sequence for FLJ34064 (NM_152633.1,771-789).
caatttggaataccaaatt

SEQ ID NO: 419337 - DNA, 19 bp, Homo sapiens
  siRNA target sequence for FLJ34064 (NM_152633.1,778-796).
gaataccaaattttgtgta

SEQ ID NO: 419338 - DNA, 19 bp, Homo sapiens
  siRNA target sequence for FLJ34064 (NM_152633.1,810-828).
gtcaagaagtattaagtga

SEQ ID NO: 419339 - DNA, 19 bp, Homo sapiens
  siRNA target sequence for FLJ34064 (NM_152633.1,853-871).
cagcagtgtggtgacttat

SEQ ID NO: 419340 - DNA, 19 bp, Homo sapiens
  siRNA target sequence for FLJ34064 (NM_152633.1,855-873).
gcagtgtggtgacttatgt

SEQ ID NO: 419341 - DNA, 19 bp, Homo sapiens
  siRNA target sequence for FLJ34064 (NM_152633.1,858-876).
gtgtggtgacttatgtaca

SEQ ID NO: 419342 - DNA, 19 bp, Homo sapiens
  siRNA target sequence for FLJ34064 (NM_152633.1,895-913).
catcaaaaaccagttaaga

SEQ ID NO: 419343 - DNA, 19 bp, Homo sapiens
  siRNA target sequence for FLJ34064 (NM_152633.1,965-983).
ggaactcctaaaaatgtgt

SEQ ID NO: 419344 - DNA, 19 bp, Homo sapiens
  siRNA target sequence for FLJ34064 (NM_152633.1,1004-1022).
ccttgtgcagttcaactta

SEQ ID NO: 419345 - DNA, 19 bp, Homo sapiens
  siRNA target sequence for FLJ34064 (NM_152633.1,1005-1023).
cttgtgcagttcaacttat

SEQ ID NO: 419346 - DNA, 19 bp, Homo sapiens
  siRNA target sequence for FLJ34064 (NM_152633.1,1035-1053).
gaggaaacctctttttcgt

SEQ ID NO: 419347 - DNA, 19 bp, Homo sapiens
  siRNA target sequence for FLJ34064 (NM_152633.1,1045-1063).
ctttttcgttgtatccttt

SEQ ID NO: 419348 - DNA, 19 bp, Homo sapiens
  siRNA target sequence for FLJ34064 (NM_152633.1,1131-1149).
gcttagtactgatagatga

SEQ ID NO: 419349 - DNA, 19 bp, Homo sapiens
  siRNA target sequence for FLJ34064 (NM_152633.1,1141-1159).
gatagatgactttattgga

SEQ ID NO: 419350 - DNA, 19 bp, Homo sapiens
  siRNA target sequence for FLJ34064 (NM_152633.1,1169-1187).
gaacaagtactcctacttt

SEQ ID NO: 419351 - DNA, 19 bp, Homo sapiens
  siRNA target sequence for FLJ34064 (NM_152633.1,1233-1251).
cggatcttggaaaaataaa

SEQ ID NO: 419352 - DNA, 19 bp, Homo sapiens
  siRNA target sequence for FLJ34064 (NM_152633.1,1241-1259).
ggaaaaataaactattcga

SEQ ID NO: 419353 - DNA, 19 bp, Homo sapiens
  siRNA target sequence for FLJ34064 (NM_152633.1,1260-1278).
gtgaaccatcagattgcaa

SEQ ID NO: 419354 - DNA, 19 bp, Homo sapiens
  siRNA target sequence for FLJ34064 (NM_152633.1,1269-1287).
cagattgcaatgaagatga

SEQ ID NO: 419355 - DNA, 19 bp, Homo sapiens
  siRNA target sequence for FLJ34064 (NM_152633.1,1298-1316).
gacaaacaagagaatcgtt

SEQ ID NO: 419356 - DNA, 19 bp, Homo sapiens
  siRNA target sequence for FLJ34064 (NM_152633.1,1322-1340).
gtggttccacctctagaaa

SEQ ID NO: 419357 - DNA, 19 bp, Homo sapiens
  siRNA target sequence for FLJ34064 (NM_152633.1,1423-1441).
caaagctttaataaaccta

SEQ ID NO: 419358 - DNA, 19 bp, Homo sapiens
  siRNA target sequence for FLJ34064 (NM_152633.1,1428-1446).
ctttaataaacctagttca

SEQ ID NO: 419359 - DNA, 19 bp, Homo sapiens
  siRNA target sequence for FLJ34064 (NM_152633.1,1438-1456).
cctagttcaaggaaaagat

SEQ ID NO: 419360 - DNA, 19 bp, Homo sapiens
  siRNA target sequence for FLJ34064 (NM_152633.1,1514-1532).
gaaaattctgtccatatct

SEQ ID NO: 419361 - DNA, 19 bp, Homo sapiens
  siRNA target sequence for FLJ34064 (NM_152633.1,1523-1541).
gtccatatcttagatgaaa

SEQ ID NO: 419362 - DNA, 19 bp, Homo sapiens
  siRNA target sequence for FLJ34064 (NM_152633.1,1543-1561).
gttatcagacaattttcaa

SEQ ID NO: 419363 - DNA, 19 bp, Homo sapiens
  siRNA target sequence for FLJ34064 (NM_152633.1,1566-1584).
cagaacagctagtagagaa

SEQ ID NO: 419364 - DNA, 19 bp, Homo sapiens
  siRNA target sequence for FLJ34064 (NM_152633.1,1571-1589).
cagctagtagagaagatat

SEQ ID NO: 419365 - DNA, 19 bp, Homo sapiens
  siRNA target sequence for FLJ34064 (NM_152633.1,1585-1603).
gatatggtatcgtgtaata

SEQ ID NO: 419366 - DNA, 19 bp, Homo sapiens
  siRNA target sequence for FLJ34064 (NM_152633.1,1590-1608).
ggtatcgtgtaatagatga

SEQ ID NO: 419367 - DNA, 19 bp, Homo sapiens
  siRNA target sequence for FLJ34064 (NM_152633.1,1596-1614).
gtgtaatagatgatagctt

SEQ ID NO: 419368 - DNA, 19 bp, Homo sapiens
  siRNA target sequence for FLJ34064 (NM_152633.1,1615-1633).
ggttgttggagtgaaaact

SEQ ID NO: 419369 - DNA, 19 bp, Homo sapiens
  siRNA target sequence for FLJ34064 (NM_152633.1,1616-1634).
gttgttggagtgaaaacta

SEQ ID NO: 419370 - DNA, 19 bp, Homo sapiens
  siRNA target sequence for FLJ34064 (NM_152633.1,1645-1663).
gaagctgtccctgaatgat

SEQ ID NO: 419371 - DNA, 19 bp, Homo sapiens
  siRNA target sequence for FLJ34064 (NM_152633.1,1668-1686).
ctttatcattgttaatgga

SEQ ID NO: 419372 - DNA, 19 bp, Homo sapiens
  siRNA target sequence for FLJ34064 (NM_152633.1,1701-1719).
ccagatttcggcttctaaa

SEQ ID NO: 419373 - DNA, 19 bp, Homo sapiens
  siRNA target sequence for FLJ34064 (NM_152633.1,1709-1727).
cggcttctaaagtgtcaaa

SEQ ID NO: 419374 - DNA, 19 bp, Homo sapiens
  siRNA target sequence for FLJ34064 (NM_152633.1,1724-1742).
caaaatagggtgattaagt

SEQ ID NO: 419375 - DNA, 19 bp, Homo sapiens
  siRNA target sequence for FLJ34064 (NM_152633.1,1755-1773).
ctttcccagcaccatactt

SEQ ID NO: 419376 - DNA, 19 bp, Homo sapiens
  siRNA target sequence for FLJ34064 (NM_152633.1,1771-1789).
cttgatgccatgtgaaata

SEQ ID NO: 419377 - DNA, 19 bp, Homo sapiens
  siRNA target sequence for FLJ34064 (NM_152633.1,1774-1792).
gatgccatgtgaaatagga

SEQ ID NO: 419378 - DNA, 19 bp, Homo sapiens
  siRNA target sequence for FLJ34064 (NM_152633.1,1816-1834).
gacccctgatagcaagaaa

SEQ ID NO: 419379 - DNA, 19 bp, Homo sapiens
  siRNA target sequence for FLJ34064 (NM_152633.1,1818-1836).
cccctgatagcaagaaaga

SEQ ID NO: 419380 - DNA, 19 bp, Homo sapiens
  siRNA target sequence for FLJ34064 (NM_152633.1,1851-1869).
gtgaacacccatctaagaa

SEQ ID NO: 419381 - DNA, 19 bp, Homo sapiens
  siRNA target sequence for FLJ34064 (NM_152633.1,1856-1874).
cacccatctaagaaagagt

SEQ ID NO: 419382 - DNA, 19 bp, Homo sapiens
  siRNA target sequence for FLJ34064 (NM_152633.1,1882-1900).
gataattactgctgtaaca

SEQ ID NO: 419383 - DNA, 19 bp, Homo sapiens
  siRNA target sequence for FLJ34064 (NM_152633.1,1941-1959).
ctgtactgctacaaattat

SEQ ID NO: 419384 - DNA, 19 bp, Homo sapiens
  siRNA target sequence for FLJ34064 (NM_152633.1,1978-1996).
ctgtcctaaagatcgttat

SEQ ID NO: 419385 - DNA, 19 bp, Homo sapiens
  siRNA target sequence for FLJ34064 (NM_152633.1,1983-2001).
ctaaagatcgttatgttgt

SEQ ID NO: 419386 - DNA, 19 bp, Homo sapiens
  siRNA target sequence for FLJ34064 (NM_152633.1,2108-2126).
cttgcagcattccataaat

SEQ ID NO: 419387 - DNA, 19 bp, Homo sapiens
  siRNA target sequence for FLJ34064 (NM_152633.1,2149-2167).
cggctatgccctgaattca

SEQ ID NO: 419388 - DNA, 19 bp, Homo sapiens
  siRNA target sequence for FLJ34064 (NM_152633.1,2151-2169).
gctatgccctgaattcaat

SEQ ID NO: 419389 - DNA, 19 bp, Homo sapiens
  siRNA target sequence for FLJ34064 (NM_152633.1,2173-2191).
ggtgtggctcttagaacat

SEQ ID NO: 419390 - DNA, 19 bp, Homo sapiens
  siRNA target sequence for FLJ34064 (NM_152633.1,2174-2192).
gtgtggctcttagaacata

SEQ ID NO: 419391 - DNA, 19 bp, Homo sapiens
  siRNA target sequence for FLJ34064 (NM_152633.1,2179-2197).
gctcttagaacatatgaaa

SEQ ID NO: 419392 - DNA, 19 bp, Homo sapiens
  siRNA target sequence for FLJ34064 (NM_152633.1,2180-2198).
ctcttagaacatatgaaat

SEQ ID NO: 419393 - DNA, 19 bp, Homo sapiens
  siRNA target sequence for FLJ34064 (NM_152633.1,2182-2200).
cttagaacatatgaaatgt

SEQ ID NO: 419394 - DNA, 19 bp, Homo sapiens
  siRNA target sequence for FLJ34064 (NM_152633.1,2220-2238).
cagaagtgtacttttgtga

SEQ ID NO: 419395 - DNA, 19 bp, Homo sapiens
  siRNA target sequence for FLJ34064 (NM_152633.1,2235-2253).
gtgaaagaccgggaagttt

SEQ ID NO: 419396 - DNA, 19 bp, Homo sapiens
  siRNA target sequence for FLJ34064 (NM_152633.1,2286-2304).
caccattcgaagggatttt

SEQ ID NO: 419397 - DNA, 19 bp, Homo sapiens
  siRNA target sequence for FLJ34064 (NM_152633.1,2288-2306).
ccattcgaagggattttaa

SEQ ID NO: 419398 - DNA, 19 bp, Homo sapiens
  siRNA target sequence for FLJ34064 (NM_152633.1,2335-2353).
gttccagtgccttcataat

SEQ ID NO: 419399 - DNA, 19 bp, Homo sapiens
  siRNA target sequence for FLJ34064 (NM_152633.1,2406-2424).
gtgagaatttcctaattga

SEQ ID NO: 419400 - DNA, 19 bp, Homo sapiens
  siRNA target sequence for FLJ34064 (NM_152633.1,2410-2428).
gaatttcctaattgataat

SEQ ID NO: 419401 - DNA, 19 bp, Homo sapiens
  siRNA target sequence for FLJ34064 (NM_152633.1,2423-2441).
gataatatggcatttactt

SEQ ID NO: 419402 - DNA, 19 bp, Homo sapiens
  siRNA target sequence for FLJ34064 (NM_152633.1,2450-2468).
gaactagtcacccttagtt

SEQ ID NO: 419403 - DNA, 19 bp, Homo sapiens
  siRNA target sequence for FLJ34064 (NM_152633.1,2478-2496).
ctgccatagctaaacatga

SEQ ID NO: 419404 - DNA, 19 bp, Homo sapiens
  siRNA target sequence for FLJ34064 (NM_152633.1,2480-2498).
gccatagctaaacatgaaa

SEQ ID NO: 419405 - DNA, 19 bp, Homo sapiens
  siRNA target sequence for FLJ34064 (NM_152633.1,2543-2561).
gtcgtcgcggctgctttat

SEQ ID NO: 419406 - DNA, 19 bp, Homo sapiens
  siRNA target sequence for FLJ34064 (NM_152633.1,2545-2563).
cgtcgcggctgctttatca

SEQ ID NO: 419407 - DNA, 19 bp, Homo sapiens
  siRNA target sequence for FLJ34064 (NM_152633.1,2642-2660).
gtgagtggtgccctttaca

SEQ ID NO: 419408 - DNA, 19 bp, Homo sapiens
  siRNA target sequence for FLJ34064 (NM_152633.1,2681-2699).
gctgaggttcagttgaaat

SEQ ID NO: 419409 - DNA, 19 bp, Homo sapiens
  siRNA target sequence for FLJ34064 (NM_152633.1,2711-2729).
gcacagaaactgagtaatt

SEQ ID NO: 419410 - DNA, 19 bp, Homo sapiens
  siRNA target sequence for MGC26598 (NM_152638.2,563-581).
gggtgctccagcgtacaat

SEQ ID NO: 419411 - DNA, 19 bp, Homo sapiens
  siRNA target sequence for MGC26598 (NM_152638.2,564-582).
ggtgctccagcgtacaata

SEQ ID NO: 419412 - DNA, 19 bp, Homo sapiens
  siRNA target sequence for MGC26598 (NM_152638.2,669-687).
ccacccgtgtgctctaact

SEQ ID NO: 419413 - DNA, 19 bp, Homo sapiens
  siRNA target sequence for MGC26598 (NM_152638.2,743-761).
ctgcccggtgcaagtgttt

SEQ ID NO: 419414 - DNA, 19 bp, Homo sapiens
  siRNA target sequence for MGC26598 (NM_152638.2,948-966).
ccggtcaagctgtatgagt

SEQ ID NO: 419415 - DNA, 19 bp, Homo sapiens
  siRNA target sequence for MGC26598 (NM_152638.2,1165-1183).
ggggactgcaggaaactct

SEQ ID NO: 419416 - DNA, 19 bp, Homo sapiens
  siRNA target sequence for MGC26598 (NM_152638.2,1492-1510).
gaggggaagaatttcactt

SEQ ID NO: 419417 - DNA, 19 bp, Homo sapiens
  siRNA target sequence for MGC26598 (NM_152638.2,1515-1533).
ctggaaatgcctttatcaa

SEQ ID NO: 419418 - DNA, 19 bp, Homo sapiens
  siRNA target sequence for MGC26598 (NM_152638.2,1518-1536).
gaaatgcctttatcaatct

SEQ ID NO: 419419 - DNA, 19 bp, Homo sapiens
  siRNA target sequence for MGC26598 (NM_152638.2,1615-1633).
cacaggaatccctgttcat

SEQ ID NO: 419420 - DNA, 19 bp, Homo sapiens
  siRNA target sequence for DCP1B (NM_152640.3,148-166).
gccacgacccctatatcaa

SEQ ID NO: 419421 - DNA, 19 bp, Homo sapiens
  siRNA target sequence for DCP1B (NM_152640.3,246-264).
gaaggaaccttatttgttt

SEQ ID NO: 419422 - DNA, 19 bp, Homo sapiens
  siRNA target sequence for DCP1B (NM_152640.3,249-267).
ggaaccttatttgtttata

SEQ ID NO: 419423 - DNA, 19 bp, Homo sapiens
  siRNA target sequence for DCP1B (NM_152640.3,288-306).
catggattcaccattatga

SEQ ID NO: 419424 - DNA, 19 bp, Homo sapiens
  siRNA target sequence for DCP1B (NM_152640.3,291-309).
ggattcaccattatgaata

SEQ ID NO: 419425 - DNA, 19 bp, Homo sapiens
  siRNA target sequence for DCP1B (NM_152640.3,331-349).
cagaacctattactaaaga

SEQ ID NO: 419426 - DNA, 19 bp, Homo sapiens
  siRNA target sequence for DCP1B (NM_152640.3,333-351).
gaacctattactaaagact

SEQ ID NO: 419427 - DNA, 19 bp, Homo sapiens
  siRNA target sequence for DCP1B (NM_152640.3,397-415).
gattgtccatctatggaat

SEQ ID NO: 419428 - DNA, 19 bp, Homo sapiens
  siRNA target sequence for DCP1B (NM_152640.3,552-570).
gaagtagacattttacgaa

SEQ ID NO: 419429 - DNA, 19 bp, Homo sapiens
  siRNA target sequence for DCP1B (NM_152640.3,581-599).
ggccaaagacgaatacaca

SEQ ID NO: 419430 - DNA, 19 bp, Homo sapiens
  siRNA target sequence for DCP1B (NM_152640.3,582-600).
gccaaagacgaatacacaa

SEQ ID NO: 419431 - DNA, 19 bp, Homo sapiens
  siRNA target sequence for DCP1B (NM_152640.3,583-601).
ccaaagacgaatacacaaa

SEQ ID NO: 419432 - DNA, 19 bp, Homo sapiens
  siRNA target sequence for DCP1B (NM_152640.3,637-655).
gttcctctgccatctatga

SEQ ID NO: 419433 - DNA, 19 bp, Homo sapiens
  siRNA target sequence for DCP1B (NM_152640.3,647-665).
catctatgacaatccaaat

SEQ ID NO: 419434 - DNA, 19 bp, Homo sapiens
  siRNA target sequence for DCP1B (NM_152640.3,681-699).
ccagtgaaacccagtgaaa

SEQ ID NO: 419435 - DNA, 19 bp, Homo sapiens
  siRNA target sequence for DCP1B (NM_152640.3,701-719).
ccagcaacagcgtatacct

SEQ ID NO: 419436 - DNA, 19 bp, Homo sapiens
  siRNA target sequence for DCP1B (NM_152640.3,782-800).
gcaggacaaagctacatgt

SEQ ID NO: 419437 - DNA, 19 bp, Homo sapiens
  siRNA target sequence for DCP1B (NM_152640.3,924-942).
cactcaccccccattgaga

SEQ ID NO: 419438 - DNA, 19 bp, Homo sapiens
  siRNA target sequence for DCP1B (NM_152640.3,948-966).
ctctgtccagccattcaga

SEQ ID NO: 419439 - DNA, 19 bp, Homo sapiens
  siRNA target sequence for DCP1B (NM_152640.3,952-970).
gtccagccattcagaaact

SEQ ID NO: 419440 - DNA, 19 bp, Homo sapiens
  siRNA target sequence for DCP1B (NM_152640.3,1105-1123).
cttctcgtggtgtacaaaa

SEQ ID NO: 419441 - DNA, 19 bp, Homo sapiens
  siRNA target sequence for DCP1B (NM_152640.3,1139-1157).
gaacctgttcgagaaactt

SEQ ID NO: 419442 - DNA, 19 bp, Homo sapiens
  siRNA target sequence for DCP1B (NM_152640.3,1181-1199).
caagtgtgaccctagtaca

SEQ ID NO: 419443 - DNA, 19 bp, Homo sapiens
  siRNA target sequence for DCP1B (NM_152640.3,1287-1305).
ccaccacaggcctatttca

SEQ ID NO: 419444 - DNA, 19 bp, Homo sapiens
  siRNA target sequence for DCP1B (NM_152640.3,1363-1381).
cactcccaagacaaacact

SEQ ID NO: 419445 - DNA, 19 bp, Homo sapiens
  siRNA target sequence for DCP1B (NM_152640.3,1492-1510).
cagccttggccgctaagtt

SEQ ID NO: 419446 - DNA, 19 bp, Homo sapiens
  siRNA target sequence for DCP1B (NM_152640.3,1838-1856).
gctgtacctcattcagaat

SEQ ID NO: 419447 - DNA, 19 bp, Homo sapiens
  siRNA target sequence for DCP1B (NM_152640.3,1841-1859).
gtacctcattcagaatgat

SEQ ID NO: 419448 - DNA, 19 bp, Homo sapiens
  siRNA target sequence for DCP1B (NM_152640.3,1914-1932).
gccatgaaaaagactatgt

SEQ ID NO: 419449 - DNA, 19 bp, Homo sapiens
  siRNA target sequence for C10orf23 (NM_152643.3,108-126).
gttatgtgcagcaattcct

SEQ ID NO: 419450 - DNA, 19 bp, Homo sapiens
  siRNA target sequence for C10orf23 (NM_152643.3,225-243).
cgaccttcaccaagatcta

SEQ ID NO: 419451 - DNA, 19 bp, Homo sapiens
  siRNA target sequence for C10orf23 (NM_152643.3,730-748).
gctacagcaggagttgttt

SEQ ID NO: 419452 - DNA, 19 bp, Homo sapiens
  siRNA target sequence for C10orf23 (NM_152643.3,861-879).
gcttatttctgcccaatta

SEQ ID NO: 419453 - DNA, 19 bp, Homo sapiens
  siRNA target sequence for C10orf23 (NM_152643.3,980-998).
gtgaacttgctgtccaaat

SEQ ID NO: 419454 - DNA, 19 bp, Homo sapiens
  siRNA target sequence for C10orf23 (NM_152643.3,1006-1024).
gattgcaaaatcttgctat

SEQ ID NO: 419455 - DNA, 19 bp, Homo sapiens
  siRNA target sequence for C10orf23 (NM_152643.3,1090-1108).
gtcccctgcctggagaatt

SEQ ID NO: 419456 - DNA, 19 bp, Homo sapiens
  siRNA target sequence for C10orf23 (NM_152643.3,1104-1122).
gaattctgcctgcaaagat

SEQ ID NO: 419457 - DNA, 19 bp, Homo sapiens
  siRNA target sequence for C10orf23 (NM_152643.3,1489-1507).
gaagcactcacggaagatt

SEQ ID NO: 419458 - DNA, 19 bp, Homo sapiens
  siRNA target sequence for MGC45962 (NM_152644.1,287-305).
ccttgctcctgctgatagt

SEQ ID NO: 419459 - DNA, 19 bp, Homo sapiens
  siRNA target sequence for MGC45962 (NM_152644.1,288-306).
cttgctcctgctgatagtt

SEQ ID NO: 419460 - DNA, 19 bp, Homo sapiens
  siRNA target sequence for FLJ32800 (NM_152647.1,295-313).
ggcaggccaacgaacatgt

SEQ ID NO: 419461 - DNA, 19 bp, Homo sapiens
  siRNA target sequence for FLJ32800 (NM_152647.1,299-317).
ggccaacgaacatgtcaaa

SEQ ID NO: 419462 - DNA, 19 bp, Homo sapiens
  siRNA target sequence for FLJ32800 (NM_152647.1,360-378).
caaagagcattgaagaatt

SEQ ID NO: 419463 - DNA, 19 bp, Homo sapiens
  siRNA target sequence for FLJ32800 (NM_152647.1,407-425).
ccaagggaaatccatttta

SEQ ID NO: 419464 - DNA, 19 bp, Homo sapiens
  siRNA target sequence for FLJ32800 (NM_152647.1,467-485).
gaagatagttcatttgttt

SEQ ID NO: 419465 - DNA, 19 bp, Homo sapiens
  siRNA target sequence for FLJ32800 (NM_152647.1,505-523).
ggaaaatgttcctcgaata

SEQ ID NO: 419466 - DNA, 19 bp, Homo sapiens
  siRNA target sequence for FLJ32800 (NM_152647.1,506-524).
gaaaatgttcctcgaatat

SEQ ID NO: 419467 - DNA, 19 bp, Homo sapiens
  siRNA target sequence for FLJ32800 (NM_152647.1,533-551).
cttttgatcatggaatcaa

SEQ ID NO: 419468 - DNA, 19 bp, Homo sapiens
  siRNA target sequence for FLJ32800 (NM_152647.1,646-664).
ggaacgatatggggaattt

SEQ ID NO: 419469 - DNA, 19 bp, Homo sapiens
  siRNA target sequence for FLJ32800 (NM_152647.1,650-668).
cgatatggggaatttctaa

SEQ ID NO: 419470 - DNA, 19 bp, Homo sapiens
  siRNA target sequence for FLJ32800 (NM_152647.1,771-789).
ctcagctacccagacattt

SEQ ID NO: 419471 - DNA, 19 bp, Homo sapiens
  siRNA target sequence for FLJ32800 (NM_152647.1,775-793).
gctacccagacatttggat

SEQ ID NO: 419472 - DNA, 19 bp, Homo sapiens
  siRNA target sequence for FLJ32800 (NM_152647.1,893-911).
cttttgcatgactcctttt

SEQ ID NO: 419473 - DNA, 19 bp, Homo sapiens
  siRNA target sequence for FLJ32800 (NM_152647.1,952-970).
ccaagattgcttattcgat

SEQ ID NO: 419474 - DNA, 19 bp, Homo sapiens
  siRNA target sequence for FLJ32800 (NM_152647.1,953-971).
caagattgcttattcgata

SEQ ID NO: 419475 - DNA, 19 bp, Homo sapiens
  siRNA target sequence for FLJ32800 (NM_152647.1,956-974).
gattgcttattcgatagaa

SEQ ID NO: 419476 - DNA, 19 bp, Homo sapiens
  siRNA target sequence for FLJ32800 (NM_152647.1,961-979).
cttattcgatagaatttca

SEQ ID NO: 419477 - DNA, 19 bp, Homo sapiens
  siRNA target sequence for FLJ32800 (NM_152647.1,980-998).
gaaagttatgtgacacttt

SEQ ID NO: 419478 - DNA, 19 bp, Homo sapiens
  siRNA target sequence for FLJ32800 (NM_152647.1,984-1002).
gttatgtgacacttttcat

SEQ ID NO: 419479 - DNA, 19 bp, Homo sapiens
  siRNA target sequence for FLJ32800 (NM_152647.1,1000-1018).
catgagcatacctctaagt

SEQ ID NO: 419480 - DNA, 19 bp, Homo sapiens
  siRNA target sequence for FLJ32800 (NM_152647.1,1053-1071).
gtttggcacaagccatata

SEQ ID NO: 419481 - DNA, 19 bp, Homo sapiens
  siRNA target sequence for FLJ32800 (NM_152647.1,1074-1092).
caacgttccatgaagcatt

SEQ ID NO: 419482 - DNA, 19 bp, Homo sapiens
  siRNA target sequence for FLJ32800 (NM_152647.1,1097-1115).
gaatcgagttacctcttta

SEQ ID NO: 419483 - DNA, 19 bp, Homo sapiens
  siRNA target sequence for FLJ32800 (NM_152647.1,1133-1151).
gatctagggaataacattt

SEQ ID NO: 419484 - DNA, 19 bp, Homo sapiens
  siRNA target sequence for FLJ32800 (NM_152647.1,1192-1210).
gatccactggaaactgaaa

SEQ ID NO: 419485 - DNA, 19 bp, Homo sapiens
  siRNA target sequence for FLJ32800 (NM_152647.1,1227-1245).
ccattcatggtagcaaaaa

SEQ ID NO: 419486 - DNA, 19 bp, Homo sapiens
  siRNA target sequence for FLJ32800 (NM_152647.1,1228-1246).
cattcatggtagcaaaaaa

SEQ ID NO: 419487 - DNA, 19 bp, Homo sapiens
  siRNA target sequence for FLJ32800 (NM_152647.1,1277-1295).
gcagacagtcaagaacata

SEQ ID NO: 419488 - DNA, 19 bp, Homo sapiens
  siRNA target sequence for FLJ32800 (NM_152647.1,1278-1296).
cagacagtcaagaacatat

SEQ ID NO: 419489 - DNA, 19 bp, Homo sapiens
  siRNA target sequence for FLJ32800 (NM_152647.1,1299-1317).
caactagtatcgacttcaa

SEQ ID NO: 419490 - DNA, 19 bp, Homo sapiens
  siRNA target sequence for FLJ32800 (NM_152647.1,1302-1320).
ctagtatcgacttcaatat

SEQ ID NO: 419491 - DNA, 19 bp, Homo sapiens
  siRNA target sequence for FLJ32800 (NM_152647.1,1333-1351).
gaacaacccaagagcatat

SEQ ID NO: 419492 - DNA, 19 bp, Homo sapiens
  siRNA target sequence for FLJ32800 (NM_152647.1,1360-1378).
catatccaaggaagaatca

SEQ ID NO: 419493 - DNA, 19 bp, Homo sapiens
  siRNA target sequence for FLJ32800 (NM_152647.1,1394-1412).
gcaacaaagtcgcactata

SEQ ID NO: 419494 - DNA, 19 bp, Homo sapiens
  siRNA target sequence for FLJ32800 (NM_152647.1,1402-1420).
gtcgcactatagtagtact

SEQ ID NO: 419495 - DNA, 19 bp, Homo sapiens
  siRNA target sequence for FLJ32800 (NM_152647.1,1455-1473).
gaggtcagagtccattgat

SEQ ID NO: 419496 - DNA, 19 bp, Homo sapiens
  siRNA target sequence for FLJ32800 (NM_152647.1,1457-1475).
ggtcagagtccattgattt

SEQ ID NO: 419497 - DNA, 19 bp, Homo sapiens
  siRNA target sequence for FLJ32800 (NM_152647.1,1493-1511).
catgagctggctggtattt

SEQ ID NO: 419498 - DNA, 19 bp, Homo sapiens
  siRNA target sequence for FLJ32800 (NM_152647.1,1496-1514).
gagctggctggtatttcca

SEQ ID NO: 419499 - DNA, 19 bp, Homo sapiens
  siRNA target sequence for FLJ32800 (NM_152647.1,1534-1552).
gattaaactcactaagata

SEQ ID NO: 419500 - DNA, 19 bp, Homo sapiens
  siRNA target sequence for FLJ32800 (NM_152647.1,1617-1635).
caaggaaccaaaaggattt

SEQ ID NO: 419501 - DNA, 19 bp, Homo sapiens
  siRNA target sequence for FLJ32800 (NM_152647.1,1659-1677).
ccaagaaacctcatgaagt

SEQ ID NO: 419502 - DNA, 19 bp, Homo sapiens
  siRNA target sequence for FLJ32800 (NM_152647.1,1663-1681).
gaaacctcatgaagtgaaa

SEQ ID NO: 419503 - DNA, 19 bp, Homo sapiens
  siRNA target sequence for FLJ32800 (NM_152647.1,1711-1729).
gcgttccgaagctgaaatt

SEQ ID NO: 419504 - DNA, 19 bp, Homo sapiens
  siRNA target sequence for FLJ32800 (NM_152647.1,1713-1731).
gttccgaagctgaaattga

SEQ ID NO: 419505 - DNA, 19 bp, Homo sapiens
  siRNA target sequence for FLJ32800 (NM_152647.1,1736-1754).
gaatgtgtggcatcactat

SEQ ID NO: 419506 - DNA, 19 bp, Homo sapiens
  siRNA target sequence for FLJ32800 (NM_152647.1,1745-1763).
gcatcactatcgtcatcat

SEQ ID NO: 419507 - DNA, 19 bp, Homo sapiens
  siRNA target sequence for FLJ32800 (NM_152647.1,1776-1794).
catcatcaacagacaacta

SEQ ID NO: 419508 - DNA, 19 bp, Homo sapiens
  siRNA target sequence for FLJ31751 (NM_152652.1,144-162).
gggagtgagaacgtgattt

SEQ ID NO: 419509 - DNA, 19 bp, Homo sapiens
  siRNA target sequence for FLJ31751 (NM_152652.1,163-181).
ctcagccgaatgagtttga

SEQ ID NO: 419510 - DNA, 19 bp, Homo sapiens
  siRNA target sequence for FLJ31751 (NM_152652.1,168-186).
ccgaatgagtttgaacata

SEQ ID NO: 419511 - DNA, 19 bp, Homo sapiens
  siRNA target sequence for FLJ31751 (NM_152652.1,227-245).
ggctccagatcatgaagta

SEQ ID NO: 419512 - DNA, 19 bp, Homo sapiens
  siRNA target sequence for FLJ31751 (NM_152652.1,632-650).
cactatctgtggtgaatgt

SEQ ID NO: 419513 - DNA, 19 bp, Homo sapiens
  siRNA target sequence for FLJ31751 (NM_152652.1,867-885).
gcccaggacaagccatata

SEQ ID NO: 419514 - DNA, 19 bp, Homo sapiens
  siRNA target sequence for FLJ31751 (NM_152652.1,868-886).
cccaggacaagccatatat

SEQ ID NO: 419515 - DNA, 19 bp, Homo sapiens
  siRNA target sequence for FLJ38607 (NM_152654.1,329-347).
gtgatccaggggatgtgta

SEQ ID NO: 419516 - DNA, 19 bp, Homo sapiens
  siRNA target sequence for FLJ38607 (NM_152654.1,393-411).
ccatacgcctccgaaatca

SEQ ID NO: 419517 - DNA, 19 bp, Homo sapiens
  siRNA target sequence for FLJ38607 (NM_152654.1,394-412).
catacgcctccgaaatcat

SEQ ID NO: 419518 - DNA, 19 bp, Homo sapiens
  siRNA target sequence for FLJ38607 (NM_152654.1,549-567).
cccgtcgacgggtgaagat

SEQ ID NO: 419519 - DNA, 19 bp, Homo sapiens
  siRNA target sequence for FLJ38607 (NM_152654.1,550-568).
ccgtcgacgggtgaagata

SEQ ID NO: 419520 - DNA, 19 bp, Homo sapiens
  siRNA target sequence for FLJ38607 (NM_152654.1,551-569).
cgtcgacgggtgaagatat

SEQ ID NO: 419521 - DNA, 19 bp, Homo sapiens
  siRNA target sequence for FLJ38607 (NM_152654.1,554-572).
cgacgggtgaagatatcca

SEQ ID NO: 419522 - DNA, 19 bp, Homo sapiens
  siRNA target sequence for FLJ23765 (NM_152655.2,664-682).
ctcagttataaacaagtat

SEQ ID NO: 419523 - DNA, 19 bp, Homo sapiens
  siRNA target sequence for FLJ23765 (NM_152655.2,724-742).
gaatgcgccaaatttgaaa

SEQ ID NO: 419524 - DNA, 19 bp, Homo sapiens
  siRNA target sequence for FLJ23765 (NM_152655.2,1173-1191).
ccagaagacccatttgatt

SEQ ID NO: 419525 - DNA, 19 bp, Homo sapiens
  siRNA target sequence for FLJ23765 (NM_152655.2,2516-2534).
ctgacaggtccaatttgaa

SEQ ID NO: 419526 - DNA, 19 bp, Homo sapiens
  siRNA target sequence for GGN (NM_152657.3,721-739).
gcctcacccccgacagaaa

SEQ ID NO: 419527 - DNA, 19 bp, Homo sapiens
  siRNA target sequence for GGN (NM_152657.3,903-921).
ggcagcctcgagttcctta

SEQ ID NO: 419528 - DNA, 19 bp, Homo sapiens
  siRNA target sequence for GGN (NM_152657.3,1169-1187).
caggctcgaagcccaaatt

SEQ ID NO: 419529 - DNA, 19 bp, Homo sapiens
  siRNA target sequence for GGN (NM_152657.3,1172-1190).
gctcgaagcccaaattcga

SEQ ID NO: 419530 - DNA, 19 bp, Homo sapiens
  siRNA target sequence for GGN (NM_152657.3,1888-1906).
cccttccaggtgcttaact

SEQ ID NO: 419531 - DNA, 19 bp, Homo sapiens
  siRNA target sequence for FLJ23867 (NM_152662.1,171-189).
ccacagactgcccatagaa

SEQ ID NO: 419532 - DNA, 19 bp, Homo sapiens
  siRNA target sequence for FLJ23867 (NM_152662.1,325-343).
ctgcacctgcctaattcca

SEQ ID NO: 419533 - DNA, 19 bp, Homo sapiens
  siRNA target sequence for FLJ23867 (NM_152662.1,354-372).
gaagcaagggcttgtttgt

SEQ ID NO: 419534 - DNA, 19 bp, Homo sapiens
  siRNA target sequence for FLJ40873 (NM_152665.1,184-202).
gggagtatttcttctctaa

SEQ ID NO: 419535 - DNA, 19 bp, Homo sapiens
  siRNA target sequence for FLJ40873 (NM_152665.1,186-204).
gagtatttcttctctaagt

SEQ ID NO: 419536 - DNA, 19 bp, Homo sapiens
  siRNA target sequence for FLJ40873 (NM_152665.1,235-253).
gggcgcatcaaagattcta

SEQ ID NO: 419537 - DNA, 19 bp, Homo sapiens
  siRNA target sequence for FLJ40873 (NM_152665.1,236-254).
ggcgcatcaaagattctat

SEQ ID NO: 419538 - DNA, 19 bp, Homo sapiens
  siRNA target sequence for FLJ40873 (NM_152665.1,257-275).
gtactgtgtcttatatgga

SEQ ID NO: 419539 - DNA, 19 bp, Homo sapiens
  siRNA target sequence for FLJ40873 (NM_152665.1,336-354).
gttgggtcctcccaaacat

SEQ ID NO: 419540 - DNA, 19 bp, Homo sapiens
  siRNA target sequence for FLJ40873 (NM_152665.1,339-357).
gggtcctcccaaacatttt

SEQ ID NO: 419541 - DNA, 19 bp, Homo sapiens
  siRNA target sequence for FLJ40873 (NM_152665.1,361-379).
gtggtcaccgtcaatcata

SEQ ID NO: 419542 - DNA, 19 bp, Homo sapiens
  siRNA target sequence for FLJ40873 (NM_152665.1,363-381).
ggtcaccgtcaatcatatt

SEQ ID NO: 419543 - DNA, 19 bp, Homo sapiens
  siRNA target sequence for FLJ40873 (NM_152665.1,364-382).
gtcaccgtcaatcatattt

SEQ ID NO: 419544 - DNA, 19 bp, Homo sapiens
  siRNA target sequence for FLJ40873 (NM_152665.1,398-416).
ccagctatctacaagtaga

SEQ ID NO: 419545 - DNA, 19 bp, Homo sapiens
  siRNA target sequence for FLJ40873 (NM_152665.1,399-417).
cagctatctacaagtagaa

SEQ ID NO: 419546 - DNA, 19 bp, Homo sapiens
  siRNA target sequence for FLJ40873 (NM_152665.1,440-458).
gacagatgactaaaaccat

SEQ ID NO: 419547 - DNA, 19 bp, Homo sapiens
  siRNA target sequence for FLJ40873 (NM_152665.1,492-510).
gatgattccacggtataaa

SEQ ID NO: 419548 - DNA, 19 bp, Homo sapiens
  siRNA target sequence for FLJ40873 (NM_152665.1,502-520).
cggtataaactaattgtga

SEQ ID NO: 419549 - DNA, 19 bp, Homo sapiens
  siRNA target sequence for FLJ40873 (NM_152665.1,503-521).
ggtataaactaattgtgat

SEQ ID NO: 419550 - DNA, 19 bp, Homo sapiens
  siRNA target sequence for FLJ40873 (NM_152665.1,573-591).
cctctgggatcctaaaagt

SEQ ID NO: 419551 - DNA, 19 bp, Homo sapiens
  siRNA target sequence for FLJ40873 (NM_152665.1,626-644).
ctctcttcgctcttgcaaa

SEQ ID NO: 419552 - DNA, 19 bp, Homo sapiens
  siRNA target sequence for FLJ40873 (NM_152665.1,633-651).
cgctcttgcaaatgtctat

SEQ ID NO: 419553 - DNA, 19 bp, Homo sapiens
  siRNA target sequence for FLJ23865 (NM_152669.1,410-428).
cgctgcctgatgattgtga

SEQ ID NO: 419554 - DNA, 19 bp, Homo sapiens
  siRNA target sequence for FLJ23865 (NM_152669.1,416-434).
ctgatgattgtgagattct

SEQ ID NO: 419555 - DNA, 19 bp, Homo sapiens
  siRNA target sequence for OSTalpha (NM_152672.2,34-52).
caggacccagataaagctt

SEQ ID NO: 419556 - DNA, 19 bp, Homo sapiens
  siRNA target sequence for OSTalpha (NM_152672.2,58-76).
caggtacacagcagatctt

SEQ ID NO: 419557 - DNA, 19 bp, Homo sapiens
  siRNA target sequence for OSTalpha (NM_152672.2,373-391).
gaccatcacctcgttttat

SEQ ID NO: 419558 - DNA, 19 bp, Homo sapiens
  siRNA target sequence for OSTalpha (NM_152672.2,578-596).
caatacgccttcttgaaga

SEQ ID NO: 419559 - DNA, 19 bp, Homo sapiens
  siRNA target sequence for OSTalpha (NM_152672.2,625-643).
cgtccccgacggcatctat

SEQ ID NO: 419560 - DNA, 19 bp, Homo sapiens
  siRNA target sequence for OSTalpha (NM_152672.2,675-693).
ctctatggatcaacacttt

SEQ ID NO: 419561 - DNA, 19 bp, Homo sapiens
  siRNA target sequence for OSTalpha (NM_152672.2,951-969).
ctgtgctgacacgaatgta

SEQ ID NO: 419562 - DNA, 19 bp, Homo sapiens
  siRNA target sequence for OSTalpha (NM_152672.2,985-1003).
ccacaaggttgggtatgaa

SEQ ID NO: 419563 - DNA, 19 bp, Homo sapiens
  siRNA target sequence for MUC20 (NM_152673.1,124-142).
gcagacactgcgatgacaa

SEQ ID NO: 419564 - DNA, 19 bp, Homo sapiens
  siRNA target sequence for MUC20 (NM_152673.1,186-204).
cgccgctctggaaactcaa

SEQ ID NO: 419565 - DNA, 19 bp, Homo sapiens
  siRNA target sequence for MUC20 (NM_152673.1,187-205).
gccgctctggaaactcaaa

SEQ ID NO: 419566 - DNA, 19 bp, Homo sapiens
  siRNA target sequence for MUC20 (NM_152673.1,765-783).
cacaaacatcgaggttatt

SEQ ID NO: 419567 - DNA, 19 bp, Homo sapiens
  siRNA target sequence for MUC20 (NM_152673.1,767-785).
caaacatcgaggttattaa

SEQ ID NO: 419568 - DNA, 19 bp, Homo sapiens
  siRNA target sequence for MUC20 (NM_152673.1,985-1003).
ccaagttacgtcaaagtct

SEQ ID NO: 419569 - DNA, 19 bp, Homo sapiens
  siRNA target sequence for MUC20 (NM_152673.1,1326-1344).
gagtgcaggtgaaaatgga

SEQ ID NO: 419570 - DNA, 19 bp, Homo sapiens
  siRNA target sequence for FLJ23754 (NM_152675.1,296-314).
ccacacggtgacctgtaaa

SEQ ID NO: 419571 - DNA, 19 bp, Homo sapiens
  siRNA target sequence for FLJ23754 (NM_152675.1,297-315).
cacacggtgacctgtaaat

SEQ ID NO: 419572 - DNA, 19 bp, Homo sapiens
  siRNA target sequence for FLJ23754 (NM_152675.1,625-643).
gagcccttcacccaaacat

SEQ ID NO: 419573 - DNA, 19 bp, Homo sapiens
  siRNA target sequence for FLJ23754 (NM_152675.1,627-645).
gcccttcacccaaacatga

SEQ ID NO: 419574 - DNA, 19 bp, Homo sapiens
  siRNA target sequence for FLJ23754 (NM_152675.1,648-666).
caggaggcgagcttggtaa

SEQ ID NO: 419575 - DNA, 19 bp, Homo sapiens
  siRNA target sequence for FLJ23754 (NM_152675.1,685-703).
gaatgcgagggggaatgaa

SEQ ID NO: 419576 - DNA, 19 bp, Homo sapiens
  siRNA target sequence for FLJ23754 (NM_152675.1,712-730).
gctcctcagtgtgcaaaaa

SEQ ID NO: 419577 - DNA, 19 bp, Homo sapiens
  siRNA target sequence for FLJ23754 (NM_152675.1,715-733).
cctcagtgtgcaaaaacat

SEQ ID NO: 419578 - DNA, 19 bp, Homo sapiens
  siRNA target sequence for FLJ23754 (NM_152675.1,811-829).
ggaccctgctctcttgttt

SEQ ID NO: 419579 - DNA, 19 bp, Homo sapiens
  siRNA target sequence for FBXO15 (NM_152676.1,354-372).
gtgtgagcaggcgctttta

SEQ ID NO: 419580 - DNA, 19 bp, Homo sapiens
  siRNA target sequence for FBXO15 (NM_152676.1,358-376).
gagcaggcgcttttatcat

SEQ ID NO: 419581 - DNA, 19 bp, Homo sapiens
  siRNA target sequence for FBXO15 (NM_152676.1,361-379).
caggcgcttttatcatcta

SEQ ID NO: 419582 - DNA, 19 bp, Homo sapiens
  siRNA target sequence for FBXO15 (NM_152676.1,428-446).
cctgcaagatcaaattgga

SEQ ID NO: 419583 - DNA, 19 bp, Homo sapiens
  siRNA target sequence for FBXO15 (NM_152676.1,561-579).
ccgcactagctgacattct

SEQ ID NO: 419584 - DNA, 19 bp, Homo sapiens
  siRNA target sequence for FBXO15 (NM_152676.1,564-582).
cactagctgacattctcaa

SEQ ID NO: 419585 - DNA, 19 bp, Homo sapiens
  siRNA target sequence for FBXO15 (NM_152676.1,625-643).
ggccctcagaatatttggt

SEQ ID NO: 419586 - DNA, 19 bp, Homo sapiens
  siRNA target sequence for FBXO15 (NM_152676.1,631-649).
cagaatatttggtttaggt

SEQ ID NO: 419587 - DNA, 19 bp, Homo sapiens
  siRNA target sequence for FBXO15 (NM_152676.1,641-659).
ggtttaggttgggcaatta

SEQ ID NO: 419588 - DNA, 19 bp, Homo sapiens
  siRNA target sequence for FBXO15 (NM_152676.1,642-660).
gtttaggttgggcaattat

SEQ ID NO: 419589 - DNA, 19 bp, Homo sapiens
  siRNA target sequence for FBXO15 (NM_152676.1,651-669).
gggcaattatactgaaaga

SEQ ID NO: 419590 - DNA, 19 bp, Homo sapiens
  siRNA target sequence for FBXO15 (NM_152676.1,691-709).
catggagcatgttgatctt

SEQ ID NO: 419591 - DNA, 19 bp, Homo sapiens
  siRNA target sequence for FBXO15 (NM_152676.1,712-730).
cataaatgacacatcagtt

SEQ ID NO: 419592 - DNA, 19 bp, Homo sapiens
  siRNA target sequence for FBXO15 (NM_152676.1,719-737).
gacacatcagttactgtta

SEQ ID NO: 419593 - DNA, 19 bp, Homo sapiens
  siRNA target sequence for FBXO15 (NM_152676.1,721-739).
cacatcagttactgttata

SEQ ID NO: 419594 - DNA, 19 bp, Homo sapiens
  siRNA target sequence for FBXO15 (NM_152676.1,726-744).
cagttactgttatatggta

SEQ ID NO: 419595 - DNA, 19 bp, Homo sapiens
  siRNA target sequence for FBXO15 (NM_152676.1,758-776).
ccatgcctagcatcattgt

SEQ ID NO: 419596 - DNA, 19 bp, Homo sapiens
  siRNA target sequence for FBXO15 (NM_152676.1,771-789).
cattgtcaaccttagattt

SEQ ID NO: 419597 - DNA, 19 bp, Homo sapiens
  siRNA target sequence for FBXO15 (NM_152676.1,775-793).
gtcaaccttagatttatgt

SEQ ID NO: 419598 - DNA, 19 bp, Homo sapiens
  siRNA target sequence for FBXO15 (NM_152676.1,794-812).
ggcatgacaccagttttta

SEQ ID NO: 419599 - DNA, 19 bp, Homo sapiens
  siRNA target sequence for FBXO15 (NM_152676.1,806-824).
gtttttaccgactggtata

SEQ ID NO: 419600 - DNA, 19 bp, Homo sapiens
  siRNA target sequence for FBXO15 (NM_152676.1,828-846).
ctcccaccaaacatagact

SEQ ID NO: 419601 - DNA, 19 bp, Homo sapiens
  siRNA target sequence for FBXO15 (NM_152676.1,847-865).
ccgatggcattctttaatt

SEQ ID NO: 419602 - DNA, 19 bp, Homo sapiens
  siRNA target sequence for FBXO15 (NM_152676.1,889-907).
gaccatatctaccatgatt

SEQ ID NO: 419603 - DNA, 19 bp, Homo sapiens
  siRNA target sequence for FBXO15 (NM_152676.1,1035-1053).
cattaggctcggctactat

SEQ ID NO: 419604 - DNA, 19 bp, Homo sapiens
  siRNA target sequence for FBXO15 (NM_152676.1,1045-1063).
ggctactatcccctatgaa

SEQ ID NO: 419605 - DNA, 19 bp, Homo sapiens
  siRNA target sequence for FBXO15 (NM_152676.1,1071-1089).
cacatagcccctttttgga

SEQ ID NO: 419606 - DNA, 19 bp, Homo sapiens
  siRNA target sequence for FBXO15 (NM_152676.1,1116-1134).
gctaccaactccatgttga

SEQ ID NO: 419607 - DNA, 19 bp, Homo sapiens
  siRNA target sequence for FBXO15 (NM_152676.1,1117-1135).
ctaccaactccatgttgat

SEQ ID NO: 419608 - DNA, 19 bp, Homo sapiens
  siRNA target sequence for FBXO15 (NM_152676.1,1145-1163).
ggtggggttttctacctat

SEQ ID NO: 419609 - DNA, 19 bp, Homo sapiens
  siRNA target sequence for FBXO15 (NM_152676.1,1156-1174).
ctacctatgtggtacattt

SEQ ID NO: 419610 - DNA, 19 bp, Homo sapiens
  siRNA target sequence for FBXO15 (NM_152676.1,1166-1184).
ggtacatttcgcaatctct

SEQ ID NO: 419611 - DNA, 19 bp, Homo sapiens
  siRNA target sequence for FBXO15 (NM_152676.1,1167-1185).
gtacatttcgcaatctctt

SEQ ID NO: 419612 - DNA, 19 bp, Homo sapiens
  siRNA target sequence for FBXO15 (NM_152676.1,1212-1230).
gacatgtgaagctcattgt

SEQ ID NO: 419613 - DNA, 19 bp, Homo sapiens
  siRNA target sequence for FBXO15 (NM_152676.1,1251-1269).
gagaacacctacctcttat

SEQ ID NO: 419614 - DNA, 19 bp, Homo sapiens
  siRNA target sequence for FBXO15 (NM_152676.1,1258-1276).
cctacctcttattggaaaa

SEQ ID NO: 419615 - DNA, 19 bp, Homo sapiens
  siRNA target sequence for FBXO15 (NM_152676.1,1277-1295).
gttggcctctcgtggaaaa

SEQ ID NO: 419616 - DNA, 19 bp, Homo sapiens
  siRNA target sequence for FBXO15 (NM_152676.1,1281-1299).
gcctctcgtggaaaactga

SEQ ID NO: 419617 - DNA, 19 bp, Homo sapiens
  siRNA target sequence for FBXO15 (NM_152676.1,1283-1301).
ctctcgtggaaaactgata

SEQ ID NO: 419618 - DNA, 19 bp, Homo sapiens
  siRNA target sequence for FBXO15 (NM_152676.1,1307-1325).
gatggctgtataaagagtt

SEQ ID NO: 419619 - DNA, 19 bp, Homo sapiens
  siRNA target sequence for FBXO15 (NM_152676.1,1329-1347).
ccatgatggacgtaactct

SEQ ID NO: 419620 - DNA, 19 bp, Homo sapiens
  siRNA target sequence for FBXO15 (NM_152676.1,1330-1348).
catgatggacgtaactctt

SEQ ID NO: 419621 - DNA, 19 bp, Homo sapiens
  siRNA target sequence for FBXO15 (NM_152676.1,1336-1354).
ggacgtaactcttttggat

SEQ ID NO: 419622 - DNA, 19 bp, Homo sapiens
  siRNA target sequence for FBXO15 (NM_152676.1,1358-1376).
catgggaaacccttttggt

SEQ ID NO: 419623 - DNA, 19 bp, Homo sapiens
  siRNA target sequence for FBXO15 (NM_152676.1,1431-1449).
gcttcttgggacagacata

SEQ ID NO: 419624 - DNA, 19 bp, Homo sapiens
  siRNA target sequence for FBXO15 (NM_152676.1,1508-1526).
gagaccgaagaatacctta

SEQ ID NO: 419625 - DNA, 19 bp, Homo sapiens
  siRNA target sequence for FBXO15 (NM_152676.1,1535-1553).
ctggtcctttatcttagta

SEQ ID NO: 419626 - DNA, 19 bp, Homo sapiens
  siRNA target sequence for FBXO15 (NM_152676.1,1547-1565).
cttagtatcgcaaaaatca

SEQ ID NO: 419627 - DNA, 19 bp, Homo sapiens
  siRNA target sequence for FBXO15 (NM_152676.1,1557-1575).
caaaaatcaaccattggtt

SEQ ID NO: 419628 - DNA, 19 bp, Homo sapiens
  siRNA target sequence for FBXO15 (NM_152676.1,1568-1586).
cattggtttgggactgaat

SEQ ID NO: 419629 - DNA, 19 bp, Homo sapiens
  siRNA target sequence for FLJ34969 (NM_152678.1,284-302).
ccaggccgtggaggtaatt

SEQ ID NO: 419630 - DNA, 19 bp, Homo sapiens
  siRNA target sequence for FLJ34969 (NM_152678.1,285-303).
caggccgtggaggtaattt

SEQ ID NO: 419631 - DNA, 19 bp, Homo sapiens
  siRNA target sequence for FLJ34969 (NM_152678.1,287-305).
ggccgtggaggtaatttat

SEQ ID NO: 419632 - DNA, 19 bp, Homo sapiens
  siRNA target sequence for FLJ34969 (NM_152678.1,290-308).
cgtggaggtaatttatcct

SEQ ID NO: 419633 - DNA, 19 bp, Homo sapiens
  siRNA target sequence for FLJ34969 (NM_152678.1,306-324).
cctcagcattccaaactta

SEQ ID NO: 419634 - DNA, 19 bp, Homo sapiens
  siRNA target sequence for FLJ34969 (NM_152678.1,341-359).
caatatttgctatttgtct

SEQ ID NO: 419635 - DNA, 19 bp, Homo sapiens
  siRNA target sequence for FLJ34969 (NM_152678.1,356-374).
gtcttttccagattcaaat

SEQ ID NO: 419636 - DNA, 19 bp, Homo sapiens
  siRNA target sequence for FLJ34969 (NM_152678.1,433-451).
gggtgtcgctgcattgtct

SEQ ID NO: 419637 - DNA, 19 bp, Homo sapiens
  siRNA target sequence for FLJ34969 (NM_152678.1,448-466).
gtctcctggatcaatttga

SEQ ID NO: 419638 - DNA, 19 bp, Homo sapiens
  siRNA target sequence for FLJ34969 (NM_152678.1,499-517).
ctgcttatttttatggata

SEQ ID NO: 419639 - DNA, 19 bp, Homo sapiens
  siRNA target sequence for FLJ34969 (NM_152678.1,527-545).
ccgacaagttcgagataaa

SEQ ID NO: 419640 - DNA, 19 bp, Homo sapiens
  siRNA target sequence for FLJ34969 (NM_152678.1,578-596).
ggttttgatcagcaaacta

SEQ ID NO: 419641 - DNA, 19 bp, Homo sapiens
  siRNA target sequence for FLJ34969 (NM_152678.1,617-635).
cactgtgctcaaacagata

SEQ ID NO: 419642 - DNA, 19 bp, Homo sapiens
  siRNA target sequence for FLJ34969 (NM_152678.1,632-650).
gatagcaccagagtatttt

SEQ ID NO: 419643 - DNA, 19 bp, Homo sapiens
  siRNA target sequence for FLJ34969 (NM_152678.1,656-674).
gaatgaaccttatttggaa

SEQ ID NO: 419644 - DNA, 19 bp, Homo sapiens
  siRNA target sequence for FLJ34969 (NM_152678.1,676-694).
cagcttgtaatgatgttga

SEQ ID NO: 419645 - DNA, 19 bp, Homo sapiens
  siRNA target sequence for FLJ34969 (NM_152678.1,782-800).
caagcctgggacaactcaa

SEQ ID NO: 419646 - DNA, 19 bp, Homo sapiens
  siRNA target sequence for FLJ34969 (NM_152678.1,785-803).
gcctgggacaactcaaata

SEQ ID NO: 419647 - DNA, 19 bp, Homo sapiens
  siRNA target sequence for FLJ34969 (NM_152678.1,787-805).
ctgggacaactcaaatagt

SEQ ID NO: 419648 - DNA, 19 bp, Homo sapiens
  siRNA target sequence for FLJ34969 (NM_152678.1,819-837).
caggtggacacaaatatat

SEQ ID NO: 419649 - DNA, 19 bp, Homo sapiens
  siRNA target sequence for FLJ34969 (NM_152678.1,824-842).
ggacacaaatatatctgtt

SEQ ID NO: 419650 - DNA, 19 bp, Homo sapiens
  siRNA target sequence for FLJ34969 (NM_152678.1,887-905).
cccagttttccttcatagt

SEQ ID NO: 419651 - DNA, 19 bp, Homo sapiens
  siRNA target sequence for FLJ34969 (NM_152678.1,934-952).
gggagccccttgtggttat

SEQ ID NO: 419652 - DNA, 19 bp, Homo sapiens
  siRNA target sequence for FLJ34969 (NM_152678.1,980-998).
gactgtattggcacttgtt

SEQ ID NO: 419653 - DNA, 19 bp, Homo sapiens
  siRNA target sequence for FLJ34969 (NM_152678.1,982-1000).
ctgtattggcacttgttaa

SEQ ID NO: 419654 - DNA, 19 bp, Homo sapiens
  siRNA target sequence for FLJ34969 (NM_152678.1,984-1002).
gtattggcacttgttaact

SEQ ID NO: 419655 - DNA, 19 bp, Homo sapiens
  siRNA target sequence for FLJ34969 (NM_152678.1,989-1007).
ggcacttgttaactgtatt

SEQ ID NO: 419656 - DNA, 19 bp, Homo sapiens
  siRNA target sequence for FLJ34969 (NM_152678.1,1025-1043).
cagtgatttccgaccttat

SEQ ID NO: 419657 - DNA, 19 bp, Homo sapiens
  siRNA target sequence for FLJ34969 (NM_152678.1,1027-1045).
gtgatttccgaccttattt

SEQ ID NO: 419658 - DNA, 19 bp, Homo sapiens
  siRNA target sequence for FLJ34969 (NM_152678.1,1039-1057).
cttatttcactattcatga

SEQ ID NO: 419659 - DNA, 19 bp, Homo sapiens
  siRNA target sequence for FLJ34969 (NM_152678.1,1046-1064).
cactattcatgatagtgaa

SEQ ID NO: 419660 - DNA, 19 bp, Homo sapiens
  siRNA target sequence for FLJ34969 (NM_152678.1,1089-1107).
caagctccgccctcagtta

SEQ ID NO: 419661 - DNA, 19 bp, Homo sapiens
  siRNA target sequence for FLJ34969 (NM_152678.1,1092-1110).
gctccgccctcagttatat

SEQ ID NO: 419662 - DNA, 19 bp, Homo sapiens
  siRNA target sequence for FLJ34969 (NM_152678.1,1113-1131).
ggagtaaccaacccttttt

SEQ ID NO: 419663 - DNA, 19 bp, Homo sapiens
  siRNA target sequence for FLJ34969 (NM_152678.1,1120-1138).
ccaaccctttttttgctaa

SEQ ID NO: 419664 - DNA, 19 bp, Homo sapiens
  siRNA target sequence for FLJ34969 (NM_152678.1,1148-1166).
gcactggccacacattatt

SEQ ID NO: 419665 - DNA, 19 bp, Homo sapiens
  siRNA target sequence for FLJ34969 (NM_152678.1,1151-1169).
ctggccacacattattcga

SEQ ID NO: 419666 - DNA, 19 bp, Homo sapiens
  siRNA target sequence for FLJ34969 (NM_152678.1,1153-1171).
ggccacacattattcgaat

SEQ ID NO: 419667 - DNA, 19 bp, Homo sapiens
  siRNA target sequence for FLJ34969 (NM_152678.1,1154-1172).
gccacacattattcgaata

SEQ ID NO: 419668 - DNA, 19 bp, Homo sapiens
  siRNA target sequence for FLJ34969 (NM_152678.1,1185-1203).
cctacaggtgaaattccta

SEQ ID NO: 419669 - DNA, 19 bp, Homo sapiens
  siRNA target sequence for FLJ34969 (NM_152678.1,1186-1204).
ctacaggtgaaattcctaa

SEQ ID NO: 419670 - DNA, 19 bp, Homo sapiens
  siRNA target sequence for FLJ34969 (NM_152678.1,1296-1314).
gaagagatcataaaacaat

SEQ ID NO: 419671 - DNA, 19 bp, Homo sapiens
  siRNA target sequence for FLJ34969 (NM_152678.1,1383-1401).
gaactgacacaaagtttca

SEQ ID NO: 419672 - DNA, 19 bp, Homo sapiens
  siRNA target sequence for FLJ34969 (NM_152678.1,1386-1404).
ctgacacaaagtttcatca

SEQ ID NO: 419673 - DNA, 19 bp, Homo sapiens
  siRNA target sequence for FLJ34969 (NM_152678.1,1396-1414).
gtttcatcattccattaga

SEQ ID NO: 419674 - DNA, 19 bp, Homo sapiens
  siRNA target sequence for FLJ34969 (NM_152678.1,1466-1484).
gagtccacctcaattaaga

SEQ ID NO: 419675 - DNA, 19 bp, Homo sapiens
  siRNA target sequence for FLJ34969 (NM_152678.1,1546-1564).
gaataaaaggcgattggat

SEQ ID NO: 419676 - DNA, 19 bp, Homo sapiens
  siRNA target sequence for FLJ34969 (NM_152678.1,1569-1587).
ctttaccggcatttcctaa

SEQ ID NO: 419677 - DNA, 19 bp, Homo sapiens
  siRNA target sequence for FLJ34969 (NM_152678.1,1574-1592).
ccggcatttcctaaagtct

SEQ ID NO: 419678 - DNA, 19 bp, Homo sapiens
  siRNA target sequence for FLJ34969 (NM_152678.1,1583-1601).
cctaaagtctccaaatttt

SEQ ID NO: 419679 - DNA, 19 bp, Homo sapiens
  siRNA target sequence for FLJ34969 (NM_152678.1,1697-1715).
ccagaaacacacagaagta

SEQ ID NO: 419680 - DNA, 19 bp, Homo sapiens
  siRNA target sequence for FLJ34969 (NM_152678.1,1780-1798).
ctgtgaaacctgacactat

SEQ ID NO: 419681 - DNA, 19 bp, Homo sapiens
  siRNA target sequence for FLJ34969 (NM_152678.1,1784-1802).
gaaacctgacactatggaa

SEQ ID NO: 419682 - DNA, 19 bp, Homo sapiens
  siRNA target sequence for FLJ34969 (NM_152678.1,1789-1807).
ctgacactatggaaaagtt

SEQ ID NO: 419683 - DNA, 19 bp, Homo sapiens
  siRNA target sequence for FLJ34969 (NM_152678.1,1805-1823).
gttacggacacacatagat

SEQ ID NO: 419684 - DNA, 19 bp, Homo sapiens
  siRNA target sequence for FLJ34969 (NM_152678.1,1813-1831).
cacacatagatgccattat

SEQ ID NO: 419685 - DNA, 19 bp, Homo sapiens
  siRNA target sequence for FLJ34969 (NM_152678.1,1854-1872).
caaggcatactgctcaaaa

SEQ ID NO: 419686 - DNA, 19 bp, Homo sapiens
  siRNA target sequence for FLJ34969 (NM_152678.1,1866-1884).
ctcaaaacgggcatgacat

SEQ ID NO: 419687 - DNA, 19 bp, Homo sapiens
  siRNA target sequence for FLJ32028 (NM_152680.1,222-240).
gaccaaataaagtgactat

SEQ ID NO: 419688 - DNA, 19 bp, Homo sapiens
  siRNA target sequence for FLJ32028 (NM_152680.1,304-322).
ctttgctccggatgaaaat

SEQ ID NO: 419689 - DNA, 19 bp, Homo sapiens
  siRNA target sequence for FLJ32028 (NM_152680.1,344-362).
gtgttaatcccattgattt

SEQ ID NO: 419690 - DNA, 19 bp, Homo sapiens
  siRNA target sequence for FLJ32028 (NM_152680.1,389-407).
gtattccttgcaacatact

SEQ ID NO: 419691 - DNA, 19 bp, Homo sapiens
  siRNA target sequence for FLJ32028 (NM_152680.1,395-413).
cttgcaacatactataaaa

SEQ ID NO: 419692 - DNA, 19 bp, Homo sapiens
  siRNA target sequence for FLJ32028 (NM_152680.1,398-416).
gcaacatactataaaagaa

SEQ ID NO: 419693 - DNA, 19 bp, Homo sapiens
  siRNA target sequence for FLJ32028 (NM_152680.1,454-472).
gagtgctttacagacatat

SEQ ID NO: 419694 - DNA, 19 bp, Homo sapiens
  siRNA target sequence for FLJ32028 (NM_152680.1,480-498).
gaagtgaaaacgtgaaagt

SEQ ID NO: 419695 - DNA, 19 bp, Homo sapiens
  siRNA target sequence for FLJ32028 (NM_152680.1,522-540).
cctctgttatggaaattga

SEQ ID NO: 419696 - DNA, 19 bp, Homo sapiens
  siRNA target sequence for FLJ32028 (NM_152680.1,586-604).
cgactttgaatgtttacct

SEQ ID NO: 419697 - DNA, 19 bp, Homo sapiens
  siRNA target sequence for FLJ38482 (NM_152681.1,207-225).
ggatatcacccagagtatt

SEQ ID NO: 419698 - DNA, 19 bp, Homo sapiens
  siRNA target sequence for FLJ38482 (NM_152681.1,282-300).
ctttagaccccgattccat

SEQ ID NO: 419699 - DNA, 19 bp, Homo sapiens
  siRNA target sequence for FLJ38482 (NM_152681.1,307-325).
cctacagtcatcatagtga

SEQ ID NO: 419700 - DNA, 19 bp, Homo sapiens
  siRNA target sequence for FLJ38482 (NM_152681.1,308-326).
ctacagtcatcatagtgaa

SEQ ID NO: 419701 - DNA, 19 bp, Homo sapiens
  siRNA target sequence for FLJ38482 (NM_152681.1,311-329).
cagtcatcatagtgaatct

SEQ ID NO: 419702 - DNA, 19 bp, Homo sapiens
  siRNA target sequence for FLJ38482 (NM_152681.1,348-366).
cgtgtttgttgttttagca

SEQ ID NO: 419703 - DNA, 19 bp, Homo sapiens
  siRNA target sequence for FLJ38482 (NM_152681.1,389-407).
cttatcctaatccaaatga

SEQ ID NO: 419704 - DNA, 19 bp, Homo sapiens
  siRNA target sequence for FLJ38482 (NM_152681.1,409-427).
gacaagtgcccaggaaatt

SEQ ID NO: 419705 - DNA, 19 bp, Homo sapiens
  siRNA target sequence for FLJ38482 (NM_152681.1,414-432).
gtgcccaggaaattacaca

SEQ ID NO: 419706 - DNA, 19 bp, Homo sapiens
  siRNA target sequence for FLJ38482 (NM_152681.1,441-459).
gaaagttcagacggttata

SEQ ID NO: 419707 - DNA, 19 bp, Homo sapiens
  siRNA target sequence for FLJ38482 (NM_152681.1,487-505).
ctccatttactccttgaat

SEQ ID NO: 419708 - DNA, 19 bp, Homo sapiens
  siRNA target sequence for FLJ38482 (NM_152681.1,536-554).
gaaaccgaggctataactt

SEQ ID NO: 419709 - DNA, 19 bp, Homo sapiens
  siRNA target sequence for FLJ38482 (NM_152681.1,541-559).
cgaggctataacttgatct

SEQ ID NO: 419710 - DNA, 19 bp, Homo sapiens
  siRNA target sequence for FLJ38482 (NM_152681.1,542-560).
gaggctataacttgatcta

SEQ ID NO: 419711 - DNA, 19 bp, Homo sapiens
  siRNA target sequence for FLJ38482 (NM_152681.1,552-570).
cttgatctaccgatcaaca

SEQ ID NO: 419712 - DNA, 19 bp, Homo sapiens
  siRNA target sequence for FLJ38482 (NM_152681.1,582-600).
gagacttgcgttgatgata

SEQ ID NO: 419713 - DNA, 19 bp, Homo sapiens
  siRNA target sequence for FLJ38482 (NM_152681.1,584-602).
gacttgcgttgatgataca

SEQ ID NO: 419714 - DNA, 19 bp, Homo sapiens
  siRNA target sequence for FLJ38482 (NM_152681.1,586-604).
cttgcgttgatgatacagt

SEQ ID NO: 419715 - DNA, 19 bp, Homo sapiens
  siRNA target sequence for FLJ38482 (NM_152681.1,617-635).
cagtgcttctcctcatact

SEQ ID NO: 419716 - DNA, 19 bp, Homo sapiens
  siRNA target sequence for FLJ38482 (NM_152681.1,619-637).
gtgcttctcctcatactgt

SEQ ID NO: 419717 - DNA, 19 bp, Homo sapiens
  siRNA target sequence for FLJ38482 (NM_152681.1,660-678).
gcctggcagattgtatctt

SEQ ID NO: 419718 - DNA, 19 bp, Homo sapiens
  siRNA target sequence for FLJ38482 (NM_152681.1,700-718).
gcactggaactcatctgtt

SEQ ID NO: 419719 - DNA, 19 bp, Homo sapiens
  siRNA target sequence for FLJ38482 (NM_152681.1,745-763).
gtgaaaatccggagattta

SEQ ID NO: 419720 - DNA, 19 bp, Homo sapiens
  siRNA target sequence for FLJ38482 (NM_152681.1,747-765).
gaaaatccggagatttaat

SEQ ID NO: 419721 - DNA, 19 bp, Homo sapiens
  siRNA target sequence for FLJ38482 (NM_152681.1,754-772).
cggagatttaataaagcta

SEQ ID NO: 419722 - DNA, 19 bp, Homo sapiens
  siRNA target sequence for FLJ38482 (NM_152681.1,770-788).
ctaaaccagagcctgatat

SEQ ID NO: 419723 - DNA, 19 bp, Homo sapiens
  siRNA target sequence for FLJ38482 (NM_152681.1,776-794).
cagagcctgatatacttga

SEQ ID NO: 419724 - DNA, 19 bp, Homo sapiens
  siRNA target sequence for FLJ38482 (NM_152681.1,837-855).
gactggattcagaactatt

SEQ ID NO: 419725 - DNA, 19 bp, Homo sapiens
  siRNA target sequence for FLJ38482 (NM_152681.1,851-869).
ctatttcaagcctagaaga

SEQ ID NO: 419726 - DNA, 19 bp, Homo sapiens
  siRNA target sequence for FLJ38482 (NM_152681.1,857-875).
caagcctagaagaaattgt

SEQ ID NO: 419727 - DNA, 19 bp, Homo sapiens
  siRNA target sequence for FLJ38482 (NM_152681.1,887-905).
gagacaccattgaatacct

SEQ ID NO: 419728 - DNA, 19 bp, Homo sapiens
  siRNA target sequence for MGC10198 (NM_152682.1,226-244).
gatggaactagaagcatta

SEQ ID NO: 419729 - DNA, 19 bp, Homo sapiens
  siRNA target sequence for MGC10198 (NM_152682.1,240-258).
cattacgctctatttatga

SEQ ID NO: 419730 - DNA, 19 bp, Homo sapiens
  siRNA target sequence for MGC10198 (NM_152682.1,371-389).
caaacacctccaattctat

SEQ ID NO: 419731 - DNA, 19 bp, Homo sapiens
  siRNA target sequence for MGC10198 (NM_152682.1,377-395).
cctccaattctatctatga

SEQ ID NO: 419732 - DNA, 19 bp, Homo sapiens
  siRNA target sequence for MGC10198 (NM_152682.1,378-396).
ctccaattctatctatgaa

SEQ ID NO: 419733 - DNA, 19 bp, Homo sapiens
  siRNA target sequence for MGC10198 (NM_152682.1,386-404).
ctatctatgaacgcttttt

SEQ ID NO: 419734 - DNA, 19 bp, Homo sapiens
  siRNA target sequence for MGC10198 (NM_152682.1,390-408).
ctatgaacgctttttttaa

SEQ ID NO: 419735 - DNA, 19 bp, Homo sapiens
  siRNA target sequence for MGC10198 (NM_152682.1,423-441).
cagctgtaaagcagagtat

SEQ ID NO: 419736 - DNA, 19 bp, Homo sapiens
  siRNA target sequence for MGC10198 (NM_152682.1,479-497).
ggaaccgctatgacctata

SEQ ID NO: 419737 - DNA, 19 bp, Homo sapiens
  siRNA target sequence for MGC10198 (NM_152682.1,483-501).
ccgctatgacctatacatt

SEQ ID NO: 419738 - DNA, 19 bp, Homo sapiens
  siRNA target sequence for MGC10198 (NM_152682.1,485-503).
gctatgacctatacattgt

SEQ ID NO: 419739 - DNA, 19 bp, Homo sapiens
  siRNA target sequence for MGC10198 (NM_152682.1,486-504).
ctatgacctatacattgtt

SEQ ID NO: 419740 - DNA, 19 bp, Homo sapiens
  siRNA target sequence for MGC10198 (NM_152682.1,490-508).
gacctatacattgtttgaa

SEQ ID NO: 419741 - DNA, 19 bp, Homo sapiens
  siRNA target sequence for MGC10198 (NM_152682.1,541-559).
gaatcacaatcccatcaat

SEQ ID NO: 419742 - DNA, 19 bp, Homo sapiens
  siRNA target sequence for MGC10198 (NM_152682.1,586-604).
ctcaattgaaactcctaat

SEQ ID NO: 419743 - DNA, 19 bp, Homo sapiens
  siRNA target sequence for MGC10198 (NM_152682.1,661-679).
gcgtaagctggcagacaaa

SEQ ID NO: 419744 - DNA, 19 bp, Homo sapiens
  siRNA target sequence for MGC10198 (NM_152682.1,662-680).
cgtaagctggcagacaaaa

SEQ ID NO: 419745 - DNA, 19 bp, Homo sapiens
  siRNA target sequence for MGC10198 (NM_152682.1,708-726).
gctggaactgggttgatgt

SEQ ID NO: 419746 - DNA, 19 bp, Homo sapiens
  siRNA target sequence for MGC10198 (NM_152682.1,711-729).
ggaactgggttgatgttgt

SEQ ID NO: 419747 - DNA, 19 bp, Homo sapiens
  siRNA target sequence for MGC10198 (NM_152682.1,747-765).
ctggctctaaggatgatga

SEQ ID NO: 419748 - DNA, 19 bp, Homo sapiens
  siRNA target sequence for FLJ33167 (NM_152683.1,259-277).
cgagcatctcattatgaga

SEQ ID NO: 419749 - DNA, 19 bp, Homo sapiens
  siRNA target sequence for FLJ33167 (NM_152683.1,283-301).
ccgttgtcctcagtgtata

SEQ ID NO: 419750 - DNA, 19 bp, Homo sapiens
  siRNA target sequence for FLJ33167 (NM_152683.1,285-303).
gttgtcctcagtgtataga

SEQ ID NO: 419751 - DNA, 19 bp, Homo sapiens
  siRNA target sequence for FLJ33167 (NM_152683.1,293-311).
cagtgtatagaccaagatt

SEQ ID NO: 419752 - DNA, 19 bp, Homo sapiens
  siRNA target sequence for FLJ33167 (NM_152683.1,331-349).
ccctccatctggagactat

SEQ ID NO: 419753 - DNA, 19 bp, Homo sapiens
  siRNA target sequence for FLJ33167 (NM_152683.1,332-350).
cctccatctggagactatt

SEQ ID NO: 419754 - DNA, 19 bp, Homo sapiens
  siRNA target sequence for FLJ33167 (NM_152683.1,355-373).
cgacaagctcaagctttta

SEQ ID NO: 419755 - DNA, 19 bp, Homo sapiens
  siRNA target sequence for FLJ33167 (NM_152683.1,356-374).
gacaagctcaagcttttaa

SEQ ID NO: 419756 - DNA, 19 bp, Homo sapiens
  siRNA target sequence for FLJ33167 (NM_152683.1,389-407).
gtaaagaagacgttcatgt

SEQ ID NO: 419757 - DNA, 19 bp, Homo sapiens
  siRNA target sequence for FLJ33167 (NM_152683.1,397-415).
gacgttcatgtatttgctt

SEQ ID NO: 419758 - DNA, 19 bp, Homo sapiens
  siRNA target sequence for FLJ33167 (NM_152683.1,403-421).
catgtatttgctttggaat

SEQ ID NO: 419759 - DNA, 19 bp, Homo sapiens
  siRNA target sequence for FLJ33167 (NM_152683.1,431-449).
gagatggacaacgtattta

SEQ ID NO: 419760 - DNA, 19 bp, Homo sapiens
  siRNA target sequence for FLJ33167 (NM_152683.1,466-484).
gctgaattttggttttact

SEQ ID NO: 419761 - DNA, 19 bp, Homo sapiens
  siRNA target sequence for FLJ33167 (NM_152683.1,510-528).
ctgctatgaagttattcct

SEQ ID NO: 419762 - DNA, 19 bp, Homo sapiens
  siRNA target sequence for FLJ33167 (NM_152683.1,597-615).
gaaaaagatggttgcatta

SEQ ID NO: 419763 - DNA, 19 bp, Homo sapiens
  siRNA target sequence for FLJ33167 (NM_152683.1,611-629).
cattactcattgagtatgt

SEQ ID NO: 419764 - DNA, 19 bp, Homo sapiens
  siRNA target sequence for FLJ33167 (NM_152683.1,646-664).
gagttatacggtgttaatt

SEQ ID NO: 419765 - DNA, 19 bp, Homo sapiens
  siRNA target sequence for FLJ33167 (NM_152683.1,695-713).
ctagcactgatgaaaaatt

SEQ ID NO: 419766 - DNA, 19 bp, Homo sapiens
  siRNA target sequence for FLJ33167 (NM_152683.1,937-955).
gaaagctggacatcgaatt

SEQ ID NO: 419767 - DNA, 19 bp, Homo sapiens
  siRNA target sequence for FLJ33167 (NM_152683.1,941-959).
gctggacatcgaattcaaa

SEQ ID NO: 419768 - DNA, 19 bp, Homo sapiens
  siRNA target sequence for FLJ33167 (NM_152683.1,993-1011).
cagtcctgacctttcattt

SEQ ID NO: 419769 - DNA, 19 bp, Homo sapiens
  siRNA target sequence for FLJ33167 (NM_152683.1,998-1016).
ctgacctttcatttctagt

SEQ ID NO: 419770 - DNA, 19 bp, Homo sapiens
  siRNA target sequence for FLJ33167 (NM_152683.1,1007-1025).
catttctagttgtgaagaa

SEQ ID NO: 419771 - DNA, 19 bp, Homo sapiens
  siRNA target sequence for FLJ33167 (NM_152683.1,1051-1069).
gtagatctcggagtttata

SEQ ID NO: 419772 - DNA, 19 bp, Homo sapiens
  siRNA target sequence for FLJ33167 (NM_152683.1,1054-1072).
gatctcggagtttatacaa

SEQ ID NO: 419773 - DNA, 19 bp, Homo sapiens
  siRNA target sequence for FLJ33167 (NM_152683.1,1057-1075).
ctcggagtttatacaagaa

SEQ ID NO: 419774 - DNA, 19 bp, Homo sapiens
  siRNA target sequence for FLJ33167 (NM_152683.1,1059-1077).
cggagtttatacaagaaat

SEQ ID NO: 419775 - DNA, 19 bp, Homo sapiens
  siRNA target sequence for FLJ33167 (NM_152683.1,1079-1097).
gaaactttcggctatataa

SEQ ID NO: 419776 - DNA, 19 bp, Homo sapiens
  siRNA target sequence for FLJ33167 (NM_152683.1,1083-1101).
ctttcggctatataaatca

SEQ ID NO: 419777 - DNA, 19 bp, Homo sapiens
  siRNA target sequence for FLJ33167 (NM_152683.1,1087-1105).
cggctatataaatcatcaa

SEQ ID NO: 419778 - DNA, 19 bp, Homo sapiens
  siRNA target sequence for FLJ33167 (NM_152683.1,1088-1106).
ggctatataaatcatcaaa

SEQ ID NO: 419779 - DNA, 19 bp, Homo sapiens
  siRNA target sequence for FLJ33167 (NM_152683.1,1157-1175).
ctatacagtcaaaagatgt

SEQ ID NO: 419780 - DNA, 19 bp, Homo sapiens
  siRNA target sequence for FLJ33167 (NM_152683.1,1174-1192).
gtttctgacgaatatcaat

SEQ ID NO: 419781 - DNA, 19 bp, Homo sapiens
  siRNA target sequence for FLJ33167 (NM_152683.1,1221-1239).
caggttctcagatacttta

SEQ ID NO: 419782 - DNA, 19 bp, Homo sapiens
  siRNA target sequence for FLJ33167 (NM_152683.1,1227-1245).
ctcagatactttacgaatt

SEQ ID NO: 419783 - DNA, 19 bp, Homo sapiens
  siRNA target sequence for FLJ33167 (NM_152683.1,1344-1362).
ctatcctgaagttgatcat

SEQ ID NO: 419784 - DNA, 19 bp, Homo sapiens
  siRNA target sequence for FLJ33167 (NM_152683.1,1409-1427).
ggcgttggaactacttttt

SEQ ID NO: 419785 - DNA, 19 bp, Homo sapiens
  siRNA target sequence for FLJ33167 (NM_152683.1,1484-1502).
gaagagcccataagagtaa

SEQ ID NO: 419786 - DNA, 19 bp, Homo sapiens
  siRNA target sequence for FLJ33167 (NM_152683.1,1600-1618).
ccattacctgctgaagtat

SEQ ID NO: 419787 - DNA, 19 bp, Homo sapiens
  siRNA target sequence for FLJ33167 (NM_152683.1,1619-1637).
gtctcctgtttcttttcaa

SEQ ID NO: 419788 - DNA, 19 bp, Homo sapiens
  siRNA target sequence for FLJ33167 (NM_152683.1,1641-1659).
ggaagaagagtttacaaca

SEQ ID NO: 419789 - DNA, 19 bp, Homo sapiens
  siRNA target sequence for FLJ39653 (NM_152684.1,381-399).
ccctgcctgcccgctattt

SEQ ID NO: 419790 - DNA, 19 bp, Homo sapiens
  siRNA target sequence for FLJ39653 (NM_152684.1,382-400).
cctgcctgcccgctatttt

SEQ ID NO: 419791 - DNA, 19 bp, Homo sapiens
  siRNA target sequence for FLJ39653 (NM_152684.1,385-403).
gcctgcccgctattttggt

SEQ ID NO: 419792 - DNA, 19 bp, Homo sapiens
  siRNA target sequence for FLJ39653 (NM_152684.1,386-404).
cctgcccgctattttggtt

SEQ ID NO: 419793 - DNA, 19 bp, Homo sapiens
  siRNA target sequence for FLJ39653 (NM_152684.1,767-785).
gggaaggtggaaacctttt

SEQ ID NO: 419794 - DNA, 19 bp, Homo sapiens
  siRNA target sequence for FLJ39653 (NM_152684.1,788-806).
ccgctccccaagtgattgt

SEQ ID NO: 419795 - DNA, 19 bp, Homo sapiens
  siRNA target sequence for FLJ39653 (NM_152684.1,789-807).
cgctccccaagtgattgtt

SEQ ID NO: 419796 - DNA, 19 bp, Homo sapiens
  siRNA target sequence for FLJ39653 (NM_152684.1,825-843).
gacagtggtacctcgattt

SEQ ID NO: 419797 - DNA, 19 bp, Homo sapiens
  siRNA target sequence for FLJ33641 (NM_152687.1,399-417).
gtcgaaaagctgtggaaat

SEQ ID NO: 419798 - DNA, 19 bp, Homo sapiens
  siRNA target sequence for FLJ33641 (NM_152687.1,401-419).
cgaaaagctgtggaaataa

SEQ ID NO: 419799 - DNA, 19 bp, Homo sapiens
  siRNA target sequence for FLJ33641 (NM_152687.1,425-443).
cggccatttctgtaggaat

SEQ ID NO: 419800 - DNA, 19 bp, Homo sapiens
  siRNA target sequence for FLJ33641 (NM_152687.1,426-444).
ggccatttctgtaggaatt

SEQ ID NO: 419801 - DNA, 19 bp, Homo sapiens
  siRNA target sequence for FLJ33641 (NM_152687.1,436-454).
gtaggaatttcgcttcttt

SEQ ID NO: 419802 - DNA, 19 bp, Homo sapiens
  siRNA target sequence for FLJ33641 (NM_152687.1,446-464).
cgcttcttttactcttagt

SEQ ID NO: 419803 - DNA, 19 bp, Homo sapiens
  siRNA target sequence for FLJ33641 (NM_152687.1,501-519).
ccgtgttgccacacgattt

SEQ ID NO: 419804 - DNA, 19 bp, Homo sapiens
  siRNA target sequence for FLJ33641 (NM_152687.1,502-520).
cgtgttgccacacgattta

SEQ ID NO: 419805 - DNA, 19 bp, Homo sapiens
  siRNA target sequence for FLJ33641 (NM_152687.1,521-539).
ccttaccgaggtttttaca

SEQ ID NO: 419806 - DNA, 19 bp, Homo sapiens
  siRNA target sequence for FLJ33641 (NM_152687.1,555-573).
gagaaaagtctgtactaaa

SEQ ID NO: 419807 - DNA, 19 bp, Homo sapiens
  siRNA target sequence for FLJ33641 (NM_152687.1,600-618).
cttaaggcatgaaatctca

SEQ ID NO: 419808 - DNA, 19 bp, Homo sapiens
  siRNA target sequence for FLJ33641 (NM_152687.1,606-624).
gcatgaaatctcagttgaa

SEQ ID NO: 419809 - DNA, 19 bp, Homo sapiens
  siRNA target sequence for FLJ33641 (NM_152687.1,662-680).
cacacgacaactatgaaaa

SEQ ID NO: 419810 - DNA, 19 bp, Homo sapiens
  siRNA target sequence for FLJ33641 (NM_152687.1,716-734).
ccgataaggaactatatga

SEQ ID NO: 419811 - DNA, 19 bp, Homo sapiens
  siRNA target sequence for FLJ33641 (NM_152687.1,740-758).
cagggcagtctaatttcga

SEQ ID NO: 419812 - DNA, 19 bp, Homo sapiens
  siRNA target sequence for FLJ33641 (NM_152687.1,749-767).
ctaatttcgaggagcatat

SEQ ID NO: 419813 - DNA, 19 bp, Homo sapiens
  siRNA target sequence for FLJ33641 (NM_152687.1,778-796).
gagacatcttctgactatt

SEQ ID NO: 419814 - DNA, 19 bp, Homo sapiens
  siRNA target sequence for FLJ33641 (NM_152687.1,780-798).
gacatcttctgactattat

SEQ ID NO: 419815 - DNA, 19 bp, Homo sapiens
  siRNA target sequence for FLJ33641 (NM_152687.1,782-800).
catcttctgactattataa

SEQ ID NO: 419816 - DNA, 19 bp, Homo sapiens
  siRNA target sequence for FLJ33641 (NM_152687.1,807-825).
gaagcctcgtccttctgaa

SEQ ID NO: 419817 - DNA, 19 bp, Homo sapiens
  siRNA target sequence for FLJ33641 (NM_152687.1,830-848).
ctcaagatgaagatatata

SEQ ID NO: 419818 - DNA, 19 bp, Homo sapiens
  siRNA target sequence for MGC9712 (NM_152689.2,2039-2057).
ctgtgggaatcgctcttat

SEQ ID NO: 419819 - DNA, 19 bp, Homo sapiens
  siRNA target sequence for MGC9712 (NM_152689.2,2044-2062).
ggaatcgctcttatttata

SEQ ID NO: 419820 - DNA, 19 bp, Homo sapiens
  siRNA target sequence for MGC34032 (NM_152697.2,170-188).
gtgatccaaggacatatga

SEQ ID NO: 419821 - DNA, 19 bp, Homo sapiens
  siRNA target sequence for MGC34032 (NM_152697.2,249-267).
cttcctactgtgtattatt

SEQ ID NO: 419822 - DNA, 19 bp, Homo sapiens
  siRNA target sequence for MGC34032 (NM_152697.2,258-276).
gtgtattattggctacatt

SEQ ID NO: 419823 - DNA, 19 bp, Homo sapiens
  siRNA target sequence for MGC34032 (NM_152697.2,365-383).
gcactcccaatgagaacaa

SEQ ID NO: 419824 - DNA, 19 bp, Homo sapiens
  siRNA target sequence for MGC34032 (NM_152697.2,505-523).
gaaatgcaacttttgtaca

SEQ ID NO: 419825 - DNA, 19 bp, Homo sapiens
  siRNA target sequence for MGC34032 (NM_152697.2,590-608).
ctctcacacagcttttact

SEQ ID NO: 419826 - DNA, 19 bp, Homo sapiens
  siRNA target sequence for MGC34032 (NM_152697.2,681-699).
caaaaatggcactttaaca

SEQ ID NO: 419827 - DNA, 19 bp, Homo sapiens
  siRNA target sequence for MGC34032 (NM_152697.2,688-706).
ggcactttaacaataggaa

SEQ ID NO: 419828 - DNA, 19 bp, Homo sapiens
  siRNA target sequence for MGC34032 (NM_152697.2,759-777).
cgggattgctgcaaatggt

SEQ ID NO: 419829 - DNA, 19 bp, Homo sapiens
  siRNA target sequence for MGC34032 (NM_152697.2,817-835).
gtgtttgaagactatgcaa

SEQ ID NO: 419830 - DNA, 19 bp, Homo sapiens
  siRNA target sequence for MGC34032 (NM_152697.2,823-841).
gaagactatgcaagaactt

SEQ ID NO: 419831 - DNA, 19 bp, Homo sapiens
  siRNA target sequence for MGC34032 (NM_152697.2,828-846).
ctatgcaagaacttggtat

SEQ ID NO: 419832 - DNA, 19 bp, Homo sapiens
  siRNA target sequence for MGC34032 (NM_152697.2,873-891).
catggtccttagttggata

SEQ ID NO: 419833 - DNA, 19 bp, Homo sapiens
  siRNA target sequence for MGC34032 (NM_152697.2,876-894).
ggtccttagttggatattt

SEQ ID NO: 419834 - DNA, 19 bp, Homo sapiens
  siRNA target sequence for MGC34032 (NM_152697.2,877-895).
gtccttagttggatatttt

SEQ ID NO: 419835 - DNA, 19 bp, Homo sapiens
  siRNA target sequence for MGC34032 (NM_152697.2,880-898).
cttagttggatatttttga

SEQ ID NO: 419836 - DNA, 19 bp, Homo sapiens
  siRNA target sequence for MGC34032 (NM_152697.2,897-915).
gatacttctgaggttcata

SEQ ID NO: 419837 - DNA, 19 bp, Homo sapiens
  siRNA target sequence for MGC34032 (NM_152697.2,951-969).
gattggaattataggttat

SEQ ID NO: 419838 - DNA, 19 bp, Homo sapiens
  siRNA target sequence for MGC34032 (NM_152697.2,1008-1026).
ggaacgcccaagttctgta

SEQ ID NO: 419839 - DNA, 19 bp, Homo sapiens
  siRNA target sequence for MGC34032 (NM_152697.2,1012-1030).
cgcccaagttctgtattaa

SEQ ID NO: 419840 - DNA, 19 bp, Homo sapiens
  siRNA target sequence for MGC34032 (NM_152697.2,1019-1037).
gttctgtattaactatcta

SEQ ID NO: 419841 - DNA, 19 bp, Homo sapiens
  siRNA target sequence for MGC34032 (NM_152697.2,1024-1042).
gtattaactatctatgaca

SEQ ID NO: 419842 - DNA, 19 bp, Homo sapiens
  siRNA target sequence for MGC34032 (NM_152697.2,1104-1122).
gataatactctgcatcatt

SEQ ID NO: 419843 - DNA, 19 bp, Homo sapiens
  siRNA target sequence for MGC34032 (NM_152697.2,1163-1181).
gaatccgagtcgccattat

SEQ ID NO: 419844 - DNA, 19 bp, Homo sapiens
  siRNA target sequence for MGC34032 (NM_152697.2,1200-1218).
caaagccattggatatgtt

SEQ ID NO: 419845 - DNA, 19 bp, Homo sapiens
  siRNA target sequence for MGC34032 (NM_152697.2,1211-1229).
gatatgttcctagtacatt

SEQ ID NO: 419846 - DNA, 19 bp, Homo sapiens
  siRNA target sequence for MGC34032 (NM_152697.2,1237-1255).
ccagctttaactttcattt

SEQ ID NO: 419847 - DNA, 19 bp, Homo sapiens
  siRNA target sequence for MGC34032 (NM_152697.2,1280-1298).
gggtcgtgacagcagtttt

SEQ ID NO: 419848 - DNA, 19 bp, Homo sapiens
  siRNA target sequence for MGC34032 (NM_152697.2,1282-1300).
gtcgtgacagcagttttct

SEQ ID NO: 419849 - DNA, 19 bp, Homo sapiens
  siRNA target sequence for MGC34032 (NM_152697.2,1307-1325).
catcgggggtacctgtata

SEQ ID NO: 419850 - DNA, 19 bp, Homo sapiens
  siRNA target sequence for MGC34032 (NM_152697.2,1310-1328).
cgggggtacctgtatacaa

SEQ ID NO: 419851 - DNA, 19 bp, Homo sapiens
  siRNA target sequence for MGC34032 (NM_152697.2,1311-1329).
gggggtacctgtatacaaa

SEQ ID NO: 419852 - DNA, 19 bp, Homo sapiens
  siRNA target sequence for MGC34032 (NM_152697.2,1313-1331).
gggtacctgtatacaaagt

SEQ ID NO: 419853 - DNA, 19 bp, Homo sapiens
  siRNA target sequence for MGC34032 (NM_152697.2,1373-1391).
gtgacccagagatttttaa

SEQ ID NO: 419854 - DNA, 19 bp, Homo sapiens
  siRNA target sequence for MGC34032 (NM_152697.2,1375-1393).
gacccagagatttttaata

SEQ ID NO: 419855 - DNA, 19 bp, Homo sapiens
  siRNA target sequence for MGC34032 (NM_152697.2,1377-1395).
cccagagatttttaataca

SEQ ID NO: 419856 - DNA, 19 bp, Homo sapiens
  siRNA target sequence for MGC34032 (NM_152697.2,1418-1436).
ctggggctctgtgtaactt

SEQ ID NO: 419857 - DNA, 19 bp, Homo sapiens
  siRNA target sequence for MGC34032 (NM_152697.2,1485-1503).
ccatgtatacaacttattt

SEQ ID NO: 419858 - DNA, 19 bp, Homo sapiens
  siRNA target sequence for MGC34032 (NM_152697.2,1489-1507).
gtatacaacttatttgtct

SEQ ID NO: 419859 - DNA, 19 bp, Homo sapiens
  siRNA target sequence for MGC34032 (NM_152697.2,1556-1574).
ctggtgcattcgctactta

SEQ ID NO: 419860 - DNA, 19 bp, Homo sapiens
  siRNA target sequence for MGC34032 (NM_152697.2,1558-1576).
ggtgcattcgctacttatt

SEQ ID NO: 419861 - DNA, 19 bp, Homo sapiens
  siRNA target sequence for MGC34032 (NM_152697.2,1559-1577).
gtgcattcgctacttatta

SEQ ID NO: 419862 - DNA, 19 bp, Homo sapiens
  siRNA target sequence for MGC34032 (NM_152697.2,1561-1579).
gcattcgctacttattact

SEQ ID NO: 419863 - DNA, 19 bp, Homo sapiens
  siRNA target sequence for MGC34032 (NM_152697.2,1578-1596).
ctgggccatgaaaaaacct

SEQ ID NO: 419864 - DNA, 19 bp, Homo sapiens
  siRNA target sequence for MGC34032 (NM_152697.2,1605-1623).
cccacgatatccacttttt

SEQ ID NO: 419865 - DNA, 19 bp, Homo sapiens
  siRNA target sequence for MGC34032 (NM_152697.2,1634-1652).
gacgagccatacgatatca

SEQ ID NO: 419866 - DNA, 19 bp, Homo sapiens
  siRNA target sequence for MGC34032 (NM_152697.2,1636-1654).
cgagccatacgatatcaca

SEQ ID NO: 419867 - DNA, 19 bp, Homo sapiens
  siRNA target sequence for MGC34032 (NM_152697.2,1653-1671).
cacaggatccctagcattt

SEQ ID NO: 419868 - DNA, 19 bp, Homo sapiens
  siRNA target sequence for MGC34032 (NM_152697.2,1663-1681).
ctagcatttggatctttaa

SEQ ID NO: 419869 - DNA, 19 bp, Homo sapiens
  siRNA target sequence for MGC34032 (NM_152697.2,1722-1740).
cttggaccaccgtcttaaa

SEQ ID NO: 419870 - DNA, 19 bp, Homo sapiens
  siRNA target sequence for MGC34032 (NM_152697.2,1725-1743).
ggaccaccgtcttaaacgt

SEQ ID NO: 419871 - DNA, 19 bp, Homo sapiens
  siRNA target sequence for MGC34032 (NM_152697.2,1726-1744).
gaccaccgtcttaaacgta

SEQ ID NO: 419872 - DNA, 19 bp, Homo sapiens
  siRNA target sequence for MGC34032 (NM_152697.2,1741-1759).
cgtacccagaacacattgt

SEQ ID NO: 419873 - DNA, 19 bp, Homo sapiens
  siRNA target sequence for MGC34032 (NM_152697.2,1752-1770).
cacattgtctaaattccta

SEQ ID NO: 419874 - DNA, 19 bp, Homo sapiens
  siRNA target sequence for MGC34032 (NM_152697.2,1796-1814).
ggtgtttggaaaatgcaat

SEQ ID NO: 419875 - DNA, 19 bp, Homo sapiens
  siRNA target sequence for MGC34032 (NM_152697.2,1797-1815).
gtgtttggaaaatgcaata

SEQ ID NO: 419876 - DNA, 19 bp, Homo sapiens
  siRNA target sequence for MGC34032 (NM_152697.2,1829-1847).
gaaatgcctatattatgat

SEQ ID NO: 419877 - DNA, 19 bp, Homo sapiens
  siRNA target sequence for MGC34032 (NM_152697.2,1835-1853).
cctatattatgattgcaat

SEQ ID NO: 419878 - DNA, 19 bp, Homo sapiens
  siRNA target sequence for MGC34032 (NM_152697.2,1836-1854).
ctatattatgattgcaata

SEQ ID NO: 419879 - DNA, 19 bp, Homo sapiens
  siRNA target sequence for MGC34032 (NM_152697.2,1869-1887).
ctgcaggtcagcaaaagat

SEQ ID NO: 419880 - DNA, 19 bp, Homo sapiens
  siRNA target sequence for MGC34032 (NM_152697.2,1959-1977).
cctggggaaacttctagtt

SEQ ID NO: 419881 - DNA, 19 bp, Homo sapiens
  siRNA target sequence for MGC34032 (NM_152697.2,2071-2089).
cctttgctgacagtcattt

SEQ ID NO: 419882 - DNA, 19 bp, Homo sapiens
  siRNA target sequence for MGC34032 (NM_152697.2,2216-2234).
cccctaacctgcatggaat

SEQ ID NO: 419883 - DNA, 19 bp, Homo sapiens
  siRNA target sequence for MGC34032 (NM_152697.2,2217-2235).
ccctaacctgcatggaatt

SEQ ID NO: 419884 - DNA, 19 bp, Homo sapiens
  siRNA target sequence for FLJ38377 (NM_152698.1,630-648).
gctttcggaacctattcca

SEQ ID NO: 419885 - DNA, 19 bp, Homo sapiens
  siRNA target sequence for FLJ38377 (NM_152698.1,1078-1096).
gttctgggacagtgtgaat

SEQ ID NO: 419886 - DNA, 19 bp, Homo sapiens
  siRNA target sequence for FLJ38377 (NM_152698.1,1302-1320).
gtgacgagggctactatga

SEQ ID NO: 419887 - DNA, 19 bp, Homo sapiens
  siRNA target sequence for FLJ38377 (NM_152698.1,1304-1322).
gacgagggctactatgatt

SEQ ID NO: 419888 - DNA, 19 bp, Homo sapiens
  siRNA target sequence for FLJ38377 (NM_152698.1,1514-1532).
gggacgccactgtccatat

SEQ ID NO: 419889 - DNA, 19 bp, Homo sapiens
  siRNA target sequence for FLJ38377 (NM_152698.1,2012-2030).
gccacttcgacaacagata

SEQ ID NO: 419890 - DNA, 19 bp, Homo sapiens
  siRNA target sequence for FLJ35283 (NM_152702.1,163-181).
gtcacttggttcaggaata

SEQ ID NO: 419891 - DNA, 19 bp, Homo sapiens
  siRNA target sequence for FLJ35283 (NM_152702.1,170-188).
ggttcaggaataaaagcaa

SEQ ID NO: 419892 - DNA, 19 bp, Homo sapiens
  siRNA target sequence for FLJ35283 (NM_152702.1,218-236).
gctccttgctgctcacaaa

SEQ ID NO: 419893 - DNA, 19 bp, Homo sapiens
  siRNA target sequence for FLJ35283 (NM_152702.1,475-493).
ggtcaccctgtccctaata

SEQ ID NO: 419894 - DNA, 19 bp, Homo sapiens
  siRNA target sequence for FLJ35283 (NM_152702.1,476-494).
gtcaccctgtccctaatat

SEQ ID NO: 419895 - DNA, 19 bp, Homo sapiens
  siRNA target sequence for FLJ35283 (NM_152702.1,508-526).
ggtggtcagccaattgtca

SEQ ID NO: 419896 - DNA, 19 bp, Homo sapiens
  siRNA target sequence for FLJ35283 (NM_152702.1,533-551).
caggactgacgcatcacat

SEQ ID NO: 419897 - DNA, 19 bp, Homo sapiens
  siRNA target sequence for FLJ35283 (NM_152702.1,571-589).
cttcaagttgcaaacctta

SEQ ID NO: 419898 - DNA, 19 bp, Homo sapiens
  siRNA target sequence for FLJ35283 (NM_152702.1,595-613).
gggtctcaaggggaattca

SEQ ID NO: 419899 - DNA, 19 bp, Homo sapiens
  siRNA target sequence for FLJ25477 (NM_152704.2,275-293).
ccgtcggggaagattaata

SEQ ID NO: 419900 - DNA, 19 bp, Homo sapiens
  siRNA target sequence for FLJ25477 (NM_152704.2,276-294).
cgtcggggaagattaataa

SEQ ID NO: 419901 - DNA, 19 bp, Homo sapiens
  siRNA target sequence for FLJ25477 (NM_152704.2,280-298).
ggggaagattaataaagct

SEQ ID NO: 419902 - DNA, 19 bp, Homo sapiens
  siRNA target sequence for FLJ25477 (NM_152704.2,1312-1330).
caagccggctctgtctaaa

SEQ ID NO: 419903 - DNA, 19 bp, Homo sapiens
  siRNA target sequence for FLJ25477 (NM_152704.2,1316-1334).
ccggctctgtctaaaaaga

SEQ ID NO: 419904 - DNA, 19 bp, Homo sapiens
  siRNA target sequence for FLJ25477 (NM_152704.2,1390-1408).
ggtggacgacacctatcta

SEQ ID NO: 419905 - DNA, 19 bp, Homo sapiens
  siRNA target sequence for FLJ25477 (NM_152704.2,1590-1608).
ccatcgagccccatcctaa

SEQ ID NO: 419906 - DNA, 19 bp, Homo sapiens
  siRNA target sequence for FLJ25477 (NM_152704.2,1753-1771).
cggggacgcgctctatgat

SEQ ID NO: 419907 - DNA, 19 bp, Homo sapiens
  siRNA target sequence for FLJ25477 (NM_152704.2,1759-1777).
cgcgctctatgatctctat

SEQ ID NO: 419908 - DNA, 19 bp, Homo sapiens
  siRNA target sequence for FLJ25477 (NM_152704.2,1836-1854).
cctccctgtcccggttaaa

SEQ ID NO: 419909 - DNA, 19 bp, Homo sapiens
  siRNA target sequence for FLJ25477 (NM_152704.2,1913-1931).
gactctaagatccctatta

SEQ ID NO: 419910 - DNA, 19 bp, Homo sapiens
  siRNA target sequence for FLJ25477 (NM_152704.2,1917-1935).
ctaagatccctattagcat

SEQ ID NO: 419911 - DNA, 19 bp, Homo sapiens
  siRNA target sequence for FLJ25477 (NM_152704.2,2010-2028).
caaaaatcccggtttccaa

SEQ ID NO: 419912 - DNA, 19 bp, Homo sapiens
  siRNA target sequence for FLJ25477 (NM_152704.2,2091-2109).
gccacgacagtgccaaaaa

SEQ ID NO: 419913 - DNA, 19 bp, Homo sapiens
  siRNA target sequence for MGC9850 (NM_152705.1,136-154).
gctggagaggaaagcaata

SEQ ID NO: 419914 - DNA, 19 bp, Homo sapiens
  siRNA target sequence for MGC9850 (NM_152705.1,230-248).
cctcttgctagcaccaata

SEQ ID NO: 419915 - DNA, 19 bp, Homo sapiens
  siRNA target sequence for MGC9850 (NM_152705.1,231-249).
ctcttgctagcaccaataa

SEQ ID NO: 419916 - DNA, 19 bp, Homo sapiens
  siRNA target sequence for MGC9850 (NM_152705.1,233-251).
cttgctagcaccaataaaa

SEQ ID NO: 419917 - DNA, 19 bp, Homo sapiens
  siRNA target sequence for MGC9850 (NM_152705.1,237-255).
ctagcaccaataaaagatt

SEQ ID NO: 419918 - DNA, 19 bp, Homo sapiens
  siRNA target sequence for MGC9850 (NM_152705.1,257-275).
ctaattaacacaattaaaa

SEQ ID NO: 419919 - DNA, 19 bp, Homo sapiens
  siRNA target sequence for MGC9850 (NM_152705.1,410-428).
cgaggttccgccagttact

SEQ ID NO: 419920 - DNA, 19 bp, Homo sapiens
  siRNA target sequence for MGC9850 (NM_152705.1,444-462).
ggagcagccaggacaagta

SEQ ID NO: 419921 - DNA, 19 bp, Homo sapiens
  siRNA target sequence for MGC26647 (NM_152706.2,187-205).
ccttttcggtccataacca

SEQ ID NO: 419922 - DNA, 19 bp, Homo sapiens
  siRNA target sequence for MGC26647 (NM_152706.2,251-269).
ccaagtcccacgtagcaat

SEQ ID NO: 419923 - DNA, 19 bp, Homo sapiens
  siRNA target sequence for MGC26647 (NM_152706.2,252-270).
caagtcccacgtagcaatt

SEQ ID NO: 419924 - DNA, 19 bp, Homo sapiens
  siRNA target sequence for MGC26647 (NM_152706.2,294-312).
caacgactacacctaaaga

SEQ ID NO: 419925 - DNA, 19 bp, Homo sapiens
  siRNA target sequence for MGC26647 (NM_152706.2,332-350).
gtttctagtggccaagata

SEQ ID NO: 419926 - DNA, 19 bp, Homo sapiens
  siRNA target sequence for MGC26647 (NM_152706.2,378-396).
gctgactactatgaacaaa

SEQ ID NO: 419927 - DNA, 19 bp, Homo sapiens
  siRNA target sequence for MGC26647 (NM_152706.2,379-397).
ctgactactatgaacaaat

SEQ ID NO: 419928 - DNA, 19 bp, Homo sapiens
  siRNA target sequence for MGC26647 (NM_152706.2,439-457).
caggattgctgctcatcta

SEQ ID NO: 419929 - DNA, 19 bp, Homo sapiens
  siRNA target sequence for MGC26647 (NM_152706.2,460-478).
ccacttccattctgcatat

SEQ ID NO: 419930 - DNA, 19 bp, Homo sapiens
  siRNA target sequence for MGC26647 (NM_152706.2,490-508).
ccagcgacactctctacaa

SEQ ID NO: 419931 - DNA, 19 bp, Homo sapiens
  siRNA target sequence for MGC26647 (NM_152706.2,493-511).
gcgacactctctacaaagt

SEQ ID NO: 419932 - DNA, 19 bp, Homo sapiens
  siRNA target sequence for MGC26647 (NM_152706.2,494-512).
cgacactctctacaaagtt

SEQ ID NO: 419933 - DNA, 19 bp, Homo sapiens
  siRNA target sequence for MGC26647 (NM_152706.2,593-611).
cattccaatgaggcttttt

SEQ ID NO: 419934 - DNA, 19 bp, Homo sapiens
  siRNA target sequence for MGC26647 (NM_152706.2,598-616).
caatgaggctttttatgca

SEQ ID NO: 419935 - DNA, 19 bp, Homo sapiens
  siRNA target sequence for MGC26647 (NM_152706.2,766-784).
gaccaggcgataacttaca

SEQ ID NO: 419936 - DNA, 19 bp, Homo sapiens
  siRNA target sequence for MGC26647 (NM_152706.2,807-825).
ctcccagaacaaatcataa

SEQ ID NO: 419937 - DNA, 19 bp, Homo sapiens
  siRNA target sequence for MGC26647 (NM_152706.2,851-869).
catggacccggcaacattt

SEQ ID NO: 419938 - DNA, 19 bp, Homo sapiens
  siRNA target sequence for MGC26647 (NM_152706.2,854-872).
ggacccggcaacatttata

SEQ ID NO: 419939 - DNA, 19 bp, Homo sapiens
  siRNA target sequence for MGC26647 (NM_152706.2,855-873).
gacccggcaacatttataa

SEQ ID NO: 419940 - DNA, 19 bp, Homo sapiens
  siRNA target sequence for MGC26647 (NM_152706.2,858-876).
ccggcaacatttataaaca

SEQ ID NO: 419941 - DNA, 19 bp, Homo sapiens
  siRNA target sequence for C10orf24 (NM_152709.2,326-344).
ctgacaatcgggcataagt

SEQ ID NO: 419942 - DNA, 19 bp, Homo sapiens
  siRNA target sequence for C10orf24 (NM_152709.2,328-346).
gacaatcgggcataagtat

SEQ ID NO: 419943 - DNA, 19 bp, Homo sapiens
  siRNA target sequence for C10orf24 (NM_152709.2,351-369).
caaaagagggggttaagaa

SEQ ID NO: 419944 - DNA, 19 bp, Homo sapiens
  siRNA target sequence for C10orf24 (NM_152709.2,436-454).
gaatcagggaagtgagttt

SEQ ID NO: 419945 - DNA, 19 bp, Homo sapiens
  siRNA target sequence for C10orf24 (NM_152709.2,505-523).
gcccatccccagaattaaa

SEQ ID NO: 419946 - DNA, 19 bp, Homo sapiens
  siRNA target sequence for C10orf24 (NM_152709.2,572-590).
gtgctaggttcccatttga

SEQ ID NO: 419947 - DNA, 19 bp, Homo sapiens
  siRNA target sequence for C10orf24 (NM_152709.2,574-592).
gctaggttcccatttgatt

SEQ ID NO: 419948 - DNA, 19 bp, Homo sapiens
  siRNA target sequence for C10orf24 (NM_152709.2,575-593).
ctaggttcccatttgattt

SEQ ID NO: 419949 - DNA, 19 bp, Homo sapiens
  siRNA target sequence for C10orf24 (NM_152709.2,578-596).
ggttcccatttgatttaca

SEQ ID NO: 419950 - DNA, 19 bp, Homo sapiens
  siRNA target sequence for C10orf24 (NM_152709.2,579-597).
gttcccatttgatttacaa

SEQ ID NO: 419951 - DNA, 19 bp, Homo sapiens
  siRNA target sequence for C10orf24 (NM_152709.2,595-613).
caaaaagcgaatcagtaat

SEQ ID NO: 419952 - DNA, 19 bp, Homo sapiens
  siRNA target sequence for C10orf24 (NM_152709.2,635-653).
cgaggaagcacaatatcca

SEQ ID NO: 419953 - DNA, 19 bp, Homo sapiens
  siRNA target sequence for C10orf24 (NM_152709.2,651-669).
ccaaagggcacaaaattca

SEQ ID NO: 419954 - DNA, 19 bp, Homo sapiens
  siRNA target sequence for C10orf24 (NM_152709.2,670-688).
gaagacgagtgatctgaaa

SEQ ID NO: 419955 - DNA, 19 bp, Homo sapiens
  siRNA target sequence for C10orf24 (NM_152709.2,777-795).
catatgctgaacaacctaa

SEQ ID NO: 419956 - DNA, 19 bp, Homo sapiens
  siRNA target sequence for C10orf24 (NM_152709.2,782-800).
gctgaacaacctaatgata

SEQ ID NO: 419957 - DNA, 19 bp, Homo sapiens
  siRNA target sequence for C10orf24 (NM_152709.2,785-803).
gaacaacctaatgataaaa

SEQ ID NO: 419958 - DNA, 19 bp, Homo sapiens
  siRNA target sequence for C10orf24 (NM_152709.2,912-930).
gtaaatgctgtccctttat

SEQ ID NO: 419959 - DNA, 19 bp, Homo sapiens
  siRNA target sequence for C10orf24 (NM_152709.2,921-939).
gtccctttatggaaagcat

SEQ ID NO: 419960 - DNA, 19 bp, Homo sapiens
  siRNA target sequence for C10orf24 (NM_152709.2,999-1017).
gtcattcccactttgacaa

SEQ ID NO: 419961 - DNA, 19 bp, Homo sapiens
  siRNA target sequence for C10orf24 (NM_152709.2,1001-1019).
cattcccactttgacaaat

SEQ ID NO: 419962 - DNA, 19 bp, Homo sapiens
  siRNA target sequence for C10orf24 (NM_152709.2,1083-1101).
caccctctgcttgtagatt

SEQ ID NO: 419963 - DNA, 19 bp, Homo sapiens
  siRNA target sequence for C10orf24 (NM_152709.2,1086-1104).
cctctgcttgtagattagt

SEQ ID NO: 419964 - DNA, 19 bp, Homo sapiens
  siRNA target sequence for C10orf24 (NM_152709.2,1092-1110).
cttgtagattagtggataa

SEQ ID NO: 419965 - DNA, 19 bp, Homo sapiens
  siRNA target sequence for C10orf24 (NM_152709.2,1098-1116).
gattagtggataacacaat

SEQ ID NO: 419966 - DNA, 19 bp, Homo sapiens
  siRNA target sequence for C10orf24 (NM_152709.2,1113-1131).
caatacaccagtttcaaaa

SEQ ID NO: 419967 - DNA, 19 bp, Homo sapiens
  siRNA target sequence for C10orf24 (NM_152709.2,1154-1172).
gttggcgtgaaccctttaa

SEQ ID NO: 419968 - DNA, 19 bp, Homo sapiens
  siRNA target sequence for C10orf24 (NM_152709.2,1158-1176).
gcgtgaaccctttaagaca

SEQ ID NO: 419969 - DNA, 19 bp, Homo sapiens
  siRNA target sequence for C10orf24 (NM_152709.2,1159-1177).
cgtgaaccctttaagacaa

SEQ ID NO: 419970 - DNA, 19 bp, Homo sapiens
  siRNA target sequence for C10orf24 (NM_152709.2,1229-1247).
caggatgcagagactacaa

SEQ ID NO: 419971 - DNA, 19 bp, Homo sapiens
  siRNA target sequence for C10orf24 (NM_152709.2,1277-1295).
gaccaggccttgtatcaga

SEQ ID NO: 419972 - DNA, 19 bp, Homo sapiens
  siRNA target sequence for C10orf24 (NM_152709.2,1313-1331).
gatggtgcctgtagttcat

SEQ ID NO: 419973 - DNA, 19 bp, Homo sapiens
  siRNA target sequence for C10orf24 (NM_152709.2,1316-1334).
ggtgcctgtagttcattat

SEQ ID NO: 419974 - DNA, 19 bp, Homo sapiens
  siRNA target sequence for C10orf24 (NM_152709.2,1320-1338).
cctgtagttcattatatct

SEQ ID NO: 419975 - DNA, 19 bp, Homo sapiens
  siRNA target sequence for C10orf24 (NM_152709.2,1323-1341).
gtagttcattatatctaga

SEQ ID NO: 419976 - DNA, 19 bp, Homo sapiens
  siRNA target sequence for C10orf24 (NM_152709.2,1337-1355).
ctagaggaggatgacattt

SEQ ID NO: 419977 - DNA, 19 bp, Homo sapiens
  siRNA target sequence for C10orf24 (NM_152709.2,1389-1407).
gccacagtcagtattcctt

SEQ ID NO: 419978 - DNA, 19 bp, Homo sapiens
  siRNA target sequence for C10orf24 (NM_152709.2,1458-1476).
gatctctgaccgagtacaa

SEQ ID NO: 419979 - DNA, 19 bp, Homo sapiens
  siRNA target sequence for C10orf24 (NM_152709.2,1498-1516).
gtctcaggtgcttaaaaga

SEQ ID NO: 419980 - DNA, 19 bp, Homo sapiens
  siRNA target sequence for C10orf24 (NM_152709.2,1610-1628).
gcccagtttggttttaact

SEQ ID NO: 419981 - DNA, 19 bp, Homo sapiens
  siRNA target sequence for C10orf24 (NM_152709.2,1620-1638).
gttttaactacgaagaaga

SEQ ID NO: 419982 - DNA, 19 bp, Homo sapiens
  siRNA target sequence for C10orf24 (NM_152709.2,1670-1688).
gcacctgctgatgaaagaa

SEQ ID NO: 419983 - DNA, 19 bp, Homo sapiens
  siRNA target sequence for C10orf24 (NM_152709.2,1682-1700).
gaaagaatctttgattact

SEQ ID NO: 419984 - DNA, 19 bp, Homo sapiens
  siRNA target sequence for C10orf24 (NM_152709.2,1705-1723).
cgcaagaaaagccagtttt

SEQ ID NO: 419985 - DNA, 19 bp, Homo sapiens
  siRNA target sequence for C10orf24 (NM_152709.2,1735-1753).
catacaagacactattggt

SEQ ID NO: 419986 - DNA, 19 bp, Homo sapiens
  siRNA target sequence for C10orf24 (NM_152709.2,1823-1841).
caaaagttccaacttttca

SEQ ID NO: 419987 - DNA, 19 bp, Homo sapiens
  siRNA target sequence for C10orf24 (NM_152709.2,1864-1882).
ggctcaggatgtccaatat

SEQ ID NO: 419988 - DNA, 19 bp, Homo sapiens
  siRNA target sequence for C10orf24 (NM_152709.2,1915-1933).
cagcatggcaggagatagt

SEQ ID NO: 419989 - DNA, 19 bp, Homo sapiens
  siRNA target sequence for C10orf24 (NM_152709.2,1953-1971).
cacagagtctgggatctaa

SEQ ID NO: 419990 - DNA, 19 bp, Homo sapiens
  siRNA target sequence for C10orf24 (NM_152709.2,1981-1999).
cattttggatggactaaaa

SEQ ID NO: 419991 - DNA, 19 bp, Homo sapiens
  siRNA target sequence for C10orf24 (NM_152709.2,2043-2061).
gtcaaccactcacatctaa

SEQ ID NO: 419992 - DNA, 19 bp, Homo sapiens
  siRNA target sequence for C10orf24 (NM_152709.2,2048-2066).
ccactcacatctaattcct

SEQ ID NO: 419993 - DNA, 19 bp, Homo sapiens
  siRNA target sequence for C10orf24 (NM_152709.2,2049-2067).
cactcacatctaattcctt

SEQ ID NO: 419994 - DNA, 19 bp, Homo sapiens
  siRNA target sequence for C10orf24 (NM_152709.2,2053-2071).
cacatctaattccttacta

SEQ ID NO: 419995 - DNA, 19 bp, Homo sapiens
  siRNA target sequence for C10orf24 (NM_152709.2,2072-2090).
ccgctaactccagtcataa

SEQ ID NO: 419996 - DNA, 19 bp, Homo sapiens
  siRNA target sequence for C10orf27 (NM_152710.1,521-539).
cagggattgtggatttcga

SEQ ID NO: 419997 - DNA, 19 bp, Homo sapiens
  siRNA target sequence for C10orf27 (NM_152710.1,687-705).
ctgtgtcgtcagggatttt

SEQ ID NO: 419998 - DNA, 19 bp, Homo sapiens
  siRNA target sequence for C10orf27 (NM_152710.1,1294-1312).
gagccaccctgcagtcaat

SEQ ID NO: 419999 - DNA, 19 bp, Homo sapiens
  siRNA target sequence for C10orf27 (NM_152710.1,1305-1323).
cagtcaatccccgaagaaa

SEQ ID NO: 420000 - DNA, 19 bp, Homo sapiens
  siRNA target sequence for C10orf27 (NM_152710.1,1309-1327).
caatccccgaagaaaacga

SEQ ID NO: 420001 - DNA, 19 bp, Homo sapiens
  siRNA target sequence for C10orf27 (NM_152710.1,1314-1332).
cccgaagaaaacgaagata

SEQ ID NO: 420002 - DNA, 19 bp, Homo sapiens
  siRNA target sequence for C10orf27 (NM_152710.1,1315-1333).
ccgaagaaaacgaagatat

SEQ ID NO: 420003 - DNA, 19 bp, Homo sapiens
  siRNA target sequence for C10orf27 (NM_152710.1,1378-1396).
caagtcctccagatgcatt

SEQ ID NO: 420004 - DNA, 19 bp, Homo sapiens
  siRNA target sequence for MGC43033 (NM_152711.1,112-130).
cacccactccgggaaacaa

SEQ ID NO: 420005 - DNA, 19 bp, Homo sapiens
  siRNA target sequence for MGC43033 (NM_152711.1,165-183).
cacgtgttcaacggaaatt

SEQ ID NO: 420006 - DNA, 19 bp, Homo sapiens
  siRNA target sequence for MGC43033 (NM_152711.1,167-185).
cgtgttcaacggaaattca

SEQ ID NO: 420007 - DNA, 19 bp, Homo sapiens
  siRNA target sequence for MGC43033 (NM_152711.1,170-188).
gttcaacggaaattcacaa

SEQ ID NO: 420008 - DNA, 19 bp, Homo sapiens
  siRNA target sequence for MGC43033 (NM_152711.1,173-191).
caacggaaattcacaaatt

SEQ ID NO: 420009 - DNA, 19 bp, Homo sapiens
  siRNA target sequence for MGC43033 (NM_152711.1,344-362).
gagagaagggtagctaaaa

SEQ ID NO: 420010 - DNA, 19 bp, Homo sapiens
  siRNA target sequence for MGC43033 (NM_152711.1,421-439).
caggtgggaagtttatcct

SEQ ID NO: 420011 - DNA, 19 bp, Homo sapiens
  siRNA target sequence for MGC43033 (NM_152711.1,437-455).
cctgtcaactccaccttta

SEQ ID NO: 420012 - DNA, 19 bp, Homo sapiens
  siRNA target sequence for MGC43033 (NM_152711.1,561-579).
ccgagggacttgggtttta

SEQ ID NO: 420013 - DNA, 19 bp, Homo sapiens
  siRNA target sequence for MGC10233 (NM_152715.1,588-606).
gtgccttaatgactatgaa

SEQ ID NO: 420014 - DNA, 19 bp, Homo sapiens
  siRNA target sequence for MGC10233 (NM_152715.1,610-628).
gtgtcttgtccttctattt

SEQ ID NO: 420015 - DNA, 19 bp, Homo sapiens
  siRNA target sequence for MGC10233 (NM_152715.1,638-656).
ctcttaagctactacatat

SEQ ID NO: 420016 - DNA, 19 bp, Homo sapiens
  siRNA target sequence for MGC10233 (NM_152715.1,640-658).
cttaagctactacatataa

SEQ ID NO: 420017 - DNA, 19 bp, Homo sapiens
  siRNA target sequence for MGC10233 (NM_152715.1,672-690).
ccaagactggactgaaata

SEQ ID NO: 420018 - DNA, 19 bp, Homo sapiens
  siRNA target sequence for MGC10233 (NM_152715.1,680-698).
ggactgaaatacgaaagtt

SEQ ID NO: 420019 - DNA, 19 bp, Homo sapiens
  siRNA target sequence for MGC10233 (NM_152715.1,681-699).
gactgaaatacgaaagtta

SEQ ID NO: 420020 - DNA, 19 bp, Homo sapiens
  siRNA target sequence for MGC10233 (NM_152715.1,691-709).
cgaaagttaggagttatgt

SEQ ID NO: 420021 - DNA, 19 bp, Homo sapiens
  siRNA target sequence for MGC10233 (NM_152715.1,692-710).
gaaagttaggagttatgtt

SEQ ID NO: 420022 - DNA, 19 bp, Homo sapiens
  siRNA target sequence for MGC10233 (NM_152715.1,729-747).
cgtcctggccaacaatcat

SEQ ID NO: 420023 - DNA, 19 bp, Homo sapiens
  siRNA target sequence for MGC10233 (NM_152715.1,730-748).
gtcctggccaacaatcatt

SEQ ID NO: 420024 - DNA, 19 bp, Homo sapiens
  siRNA target sequence for MGC10233 (NM_152715.1,760-778).
gaggagcctgatgattcat

SEQ ID NO: 420025 - DNA, 19 bp, Homo sapiens
  siRNA target sequence for MGC10233 (NM_152715.1,782-800).
ccaggttgtttcctaatct

SEQ ID NO: 420026 - DNA, 19 bp, Homo sapiens
  siRNA target sequence for MGC10233 (NM_152715.1,783-801).
caggttgtttcctaatctt

SEQ ID NO: 420027 - DNA, 19 bp, Homo sapiens
  siRNA target sequence for MGC10233 (NM_152715.1,880-898).
gaagtgagattgttaggaa

SEQ ID NO: 420028 - DNA, 19 bp, Homo sapiens
  siRNA target sequence for MGC10233 (NM_152715.1,885-903).
gagattgttaggaattcct

SEQ ID NO: 420029 - DNA, 19 bp, Homo sapiens
  siRNA target sequence for MGC10233 (NM_152715.1,928-946).
gagcgaaggaaattggtaa

SEQ ID NO: 420030 - DNA, 19 bp, Homo sapiens
  siRNA target sequence for MGC10233 (NM_152715.1,930-948).
gcgaaggaaattggtaata

SEQ ID NO: 420031 - DNA, 19 bp, Homo sapiens
  siRNA target sequence for MGC10233 (NM_152715.1,957-975).
gccatcagtttccaaactt

SEQ ID NO: 420032 - DNA, 19 bp, Homo sapiens
  siRNA target sequence for MGC10233 (NM_152715.1,958-976).
ccatcagtttccaaactta

SEQ ID NO: 420033 - DNA, 19 bp, Homo sapiens
  siRNA target sequence for MGC10233 (NM_152715.1,959-977).
catcagtttccaaacttaa

SEQ ID NO: 420034 - DNA, 19 bp, Homo sapiens
  siRNA target sequence for MGC10233 (NM_152715.1,973-991).
cttaatggcagcgttgtta

SEQ ID NO: 420035 - DNA, 19 bp, Homo sapiens
  siRNA target sequence for MGC10233 (NM_152715.1,1019-1037).
gattttttattcgttacta

SEQ ID NO: 420036 - DNA, 19 bp, Homo sapiens
  siRNA target sequence for MGC10233 (NM_152715.1,1062-1080).
gccattcaggtatcatgaa

SEQ ID NO: 420037 - DNA, 19 bp, Homo sapiens
  siRNA target sequence for MGC10233 (NM_152715.1,1075-1093).
catgaactgatcactaaat

SEQ ID NO: 420038 - DNA, 19 bp, Homo sapiens
  siRNA target sequence for MGC10233 (NM_152715.1,1200-1218).
ccaaacagtggcagaacta

SEQ ID NO: 420039 - DNA, 19 bp, Homo sapiens
  siRNA target sequence for MGC10233 (NM_152715.1,1256-1274).
gcaacatgcttctctacta

SEQ ID NO: 420040 - DNA, 19 bp, Homo sapiens
  siRNA target sequence for MGC10233 (NM_152715.1,1298-1316).
gcccagaggaaatgaagta

SEQ ID NO: 420041 - DNA, 19 bp, Homo sapiens
  siRNA target sequence for MGC10233 (NM_152715.1,1317-1335).
cagctctcgggcattgcat

SEQ ID NO: 420042 - DNA, 19 bp, Homo sapiens
  siRNA target sequence for MGC10233 (NM_152715.1,1322-1340).
ctcgggcattgcattcctt

SEQ ID NO: 420043 - DNA, 19 bp, Homo sapiens
  siRNA target sequence for MGC10233 (NM_152715.1,1343-1361).
gcattagggatggagataa

SEQ ID NO: 420044 - DNA, 19 bp, Homo sapiens
  siRNA target sequence for FLJ36874 (NM_152716.1,86-104).
gcctacagtgtctgtatta

SEQ ID NO: 420045 - DNA, 19 bp, Homo sapiens
  siRNA target sequence for FLJ36874 (NM_152716.1,88-106).
ctacagtgtctgtattaga

SEQ ID NO: 420046 - DNA, 19 bp, Homo sapiens
  siRNA target sequence for FLJ36874 (NM_152716.1,231-249).
ggcaccccacctaaacaga

SEQ ID NO: 420047 - DNA, 19 bp, Homo sapiens
  siRNA target sequence for FLJ36874 (NM_152716.1,308-326).
cccaatgccacctcgttat

SEQ ID NO: 420048 - DNA, 19 bp, Homo sapiens
  siRNA target sequence for FLJ36874 (NM_152716.1,685-703).
gatctcaggccccaatgtt

SEQ ID NO: 420049 - DNA, 19 bp, Homo sapiens
  siRNA target sequence for FLJ36874 (NM_152716.1,791-809).
caatggtgcgggagataga

SEQ ID NO: 420050 - DNA, 19 bp, Homo sapiens
  siRNA target sequence for FLJ36874 (NM_152716.1,818-836).
ccggagcagtcatcaagat

SEQ ID NO: 420051 - DNA, 19 bp, Homo sapiens
  siRNA target sequence for FLJ36874 (NM_152716.1,820-838).
ggagcagtcatcaagatca

SEQ ID NO: 420052 - DNA, 19 bp, Homo sapiens
  siRNA target sequence for FLJ36874 (NM_152716.1,821-839).
gagcagtcatcaagatcat

SEQ ID NO: 420053 - DNA, 19 bp, Homo sapiens
  siRNA target sequence for FLJ36874 (NM_152716.1,823-841).
gcagtcatcaagatcatct

SEQ ID NO: 420054 - DNA, 19 bp, Homo sapiens
  siRNA target sequence for FLJ36874 (NM_152716.1,849-867).
gatccatatgccaatctca

SEQ ID NO: 420055 - DNA, 19 bp, Homo sapiens
  siRNA target sequence for FLJ36874 (NM_152716.1,927-945).
gatccctacctggatgatt

SEQ ID NO: 420056 - DNA, 19 bp, Homo sapiens
  siRNA target sequence for FLJ36874 (NM_152716.1,1092-1110).
ggctctttgggaaagctta

SEQ ID NO: 420057 - DNA, 19 bp, Homo sapiens
  siRNA target sequence for FLJ36874 (NM_152716.1,1101-1119).
ggaaagcttaccgtttcta

SEQ ID NO: 420058 - DNA, 19 bp, Homo sapiens
  siRNA target sequence for FLJ36874 (NM_152716.1,1122-1140).
gtgaataatccccgaaaaa

SEQ ID NO: 420059 - DNA, 19 bp, Homo sapiens
  siRNA target sequence for FLJ36874 (NM_152716.1,1265-1283).
ggactatgaaagacgttat

SEQ ID NO: 420060 - DNA, 19 bp, Homo sapiens
  siRNA target sequence for FLJ36874 (NM_152716.1,1276-1294).
gacgttatctcctaagtct

SEQ ID NO: 420061 - DNA, 19 bp, Homo sapiens
  siRNA target sequence for FLJ36874 (NM_152716.1,1312-1330).
ccctaatggatgacagaaa

SEQ ID NO: 420062 - DNA, 19 bp, Homo sapiens
  siRNA target sequence for FLJ36874 (NM_152716.1,1548-1566).
gtgctgccatgcttactga

SEQ ID NO: 420063 - DNA, 19 bp, Homo sapiens
  siRNA target sequence for FLJ36874 (NM_152716.1,1615-1633).
gccttttgcgacagctaat

SEQ ID NO: 420064 - DNA, 19 bp, Homo sapiens
  siRNA target sequence for FLJ36874 (NM_152716.1,1763-1781).
ccctgctacagaatcaaca

SEQ ID NO: 420065 - DNA, 19 bp, Homo sapiens
  siRNA target sequence for FLJ36874 (NM_152716.1,1795-1813).
ggacggaggtgatgttcat

SEQ ID NO: 420066 - DNA, 19 bp, Homo sapiens
  siRNA target sequence for FLJ36874 (NM_152716.1,1811-1829).
catggcaacacgagaactt

SEQ ID NO: 420067 - DNA, 19 bp, Homo sapiens
  siRNA target sequence for FLJ36874 (NM_152716.1,1861-1879).
caatctctatacctacaaa

SEQ ID NO: 420068 - DNA, 19 bp, Homo sapiens
  siRNA target sequence for FLJ36874 (NM_152716.1,1865-1883).
ctctatacctacaaaccta

SEQ ID NO: 420069 - DNA, 19 bp, Homo sapiens
  siRNA target sequence for FLJ36874 (NM_152716.1,1880-1898).
cctagtgtccctcttttct

SEQ ID NO: 420070 - DNA, 19 bp, Homo sapiens
  siRNA target sequence for MGC35295 (NM_152717.1,314-332).
ctggccgtgcttactatct

SEQ ID NO: 420071 - DNA, 19 bp, Homo sapiens
  siRNA target sequence for MGC35295 (NM_152717.1,317-335).
gccgtgcttactatcttca

SEQ ID NO: 420072 - DNA, 19 bp, Homo sapiens
  siRNA target sequence for NURIT (NM_152719.1,120-138).
cttctgcataggacctata

SEQ ID NO: 420073 - DNA, 19 bp, Homo sapiens
  siRNA target sequence for NURIT (NM_152719.1,123-141).
ctgcataggacctatacct

SEQ ID NO: 420074 - DNA, 19 bp, Homo sapiens
  siRNA target sequence for NURIT (NM_152719.1,155-173).
gcactcaaggccaaattat

SEQ ID NO: 420075 - DNA, 19 bp, Homo sapiens
  siRNA target sequence for NURIT (NM_152719.1,258-276).
ccgaggctccacaacttgt

SEQ ID NO: 420076 - DNA, 19 bp, Homo sapiens
  siRNA target sequence for NURIT (NM_152719.1,259-277).
cgaggctccacaacttgta

SEQ ID NO: 420077 - DNA, 19 bp, Homo sapiens
  siRNA target sequence for NURIT (NM_152719.1,907-925).
cccctgccgaggaaagcaa

SEQ ID NO: 420078 - DNA, 19 bp, Homo sapiens
  siRNA target sequence for FLJ25530 (NM_152722.3,86-104).
cctgcgccttgctcctttt

SEQ ID NO: 420079 - DNA, 19 bp, Homo sapiens
  siRNA target sequence for FLJ25530 (NM_152722.3,91-109).
gccttgctccttttgtcta

SEQ ID NO: 420080 - DNA, 19 bp, Homo sapiens
  siRNA target sequence for FLJ25530 (NM_152722.3,229-247).
gcgacaggcctgtagtgaa

SEQ ID NO: 420081 - DNA, 19 bp, Homo sapiens
  siRNA target sequence for FLJ25530 (NM_152722.3,335-353).
ccgtatccgactctttgaa

SEQ ID NO: 420082 - DNA, 19 bp, Homo sapiens
  siRNA target sequence for FLJ25530 (NM_152722.3,336-354).
cgtatccgactctttgaaa

SEQ ID NO: 420083 - DNA, 19 bp, Homo sapiens
  siRNA target sequence for FLJ25530 (NM_152722.3,337-355).
gtatccgactctttgaaaa

SEQ ID NO: 420084 - DNA, 19 bp, Homo sapiens
  siRNA target sequence for FLJ25530 (NM_152722.3,465-483).
gtagatgtgcccatttcga

SEQ ID NO: 420085 - DNA, 19 bp, Homo sapiens
  siRNA target sequence for FLJ25530 (NM_152722.3,542-560).
gaactgctcacatgagaat

SEQ ID NO: 420086 - DNA, 19 bp, Homo sapiens
  siRNA target sequence for FLJ25530 (NM_152722.3,724-742).
gcagcctgcctgtcaagat

SEQ ID NO: 420087 - DNA, 19 bp, Homo sapiens
  siRNA target sequence for FLJ25530 (NM_152722.3,754-772).
gaagaagctccctttacat

SEQ ID NO: 420088 - DNA, 19 bp, Homo sapiens
  siRNA target sequence for FLJ25530 (NM_152722.3,757-775).
gaagctccctttacatcat

SEQ ID NO: 420089 - DNA, 19 bp, Homo sapiens
  siRNA target sequence for FLJ25530 (NM_152722.3,765-783).
ctttacatcatcttgtcta

SEQ ID NO: 420090 - DNA, 19 bp, Homo sapiens
  siRNA target sequence for FLJ25530 (NM_152722.3,881-899).
ggaatacatggatcagaat

SEQ ID NO: 420091 - DNA, 19 bp, Homo sapiens
  siRNA target sequence for FLJ25530 (NM_152722.3,959-977).
gaaccccatggcactctat

SEQ ID NO: 420092 - DNA, 19 bp, Homo sapiens
  siRNA target sequence for FLJ38159 (NM_152723.1,155-173).
cgcctatgctccagaaaca

SEQ ID NO: 420093 - DNA, 19 bp, Homo sapiens
  siRNA target sequence for FLJ38159 (NM_152723.1,202-220).
cctgaagaacgcttagaga

SEQ ID NO: 420094 - DNA, 19 bp, Homo sapiens
  siRNA target sequence for FLJ38159 (NM_152723.1,327-345).
gagcgagaaggctatgctt

SEQ ID NO: 420095 - DNA, 19 bp, Homo sapiens
  siRNA target sequence for FLJ38159 (NM_152723.1,342-360).
gcttcgctcccgcattgaa

SEQ ID NO: 420096 - DNA, 19 bp, Homo sapiens
  siRNA target sequence for FLJ38159 (NM_152723.1,511-529).
ctagaggaacgctttatga

SEQ ID NO: 420097 - DNA, 19 bp, Homo sapiens
  siRNA target sequence for FLJ38159 (NM_152723.1,536-554).
cagccaaccacgagttgat

SEQ ID NO: 420098 - DNA, 19 bp, Homo sapiens
  siRNA target sequence for FLJ38159 (NM_152723.1,556-574).
ctccgcttcaaggatgaat

SEQ ID NO: 420099 - DNA, 19 bp, Homo sapiens
  siRNA target sequence for FLJ38159 (NM_152723.1,874-892).
gctgtggagcagatagcta

SEQ ID NO: 420100 - DNA, 19 bp, Homo sapiens
  siRNA target sequence for FLJ38159 (NM_152723.1,992-1010).
ggggcaaagtgcttcagaa

SEQ ID NO: 420101 - DNA, 19 bp, Homo sapiens
  siRNA target sequence for FLJ38159 (NM_152723.1,995-1013).
gcaaagtgcttcagaacaa

SEQ ID NO: 420102 - DNA, 19 bp, Homo sapiens
  siRNA target sequence for FLJ38159 (NM_152723.1,996-1014).
caaagtgcttcagaacaaa

SEQ ID NO: 420103 - DNA, 19 bp, Homo sapiens
  siRNA target sequence for FLJ38159 (NM_152723.1,1186-1204).
cagtctgaagccttcaaaa

SEQ ID NO: 420104 - DNA, 19 bp, Homo sapiens
  siRNA target sequence for FLJ38159 (NM_152723.1,1206-1224).
gcacagcttggatctttta

SEQ ID NO: 420105 - DNA, 19 bp, Homo sapiens
  siRNA target sequence for CPNE2 (NM_152727.4,407-425).
gagtacgacaggacagaaa

SEQ ID NO: 420106 - DNA, 19 bp, Homo sapiens
  siRNA target sequence for CPNE2 (NM_152727.4,420-438).
cagaaaccgcgatcaacaa

SEQ ID NO: 420107 - DNA, 19 bp, Homo sapiens
  siRNA target sequence for CPNE2 (NM_152727.4,540-558).
ggctggacgagcatgactt

SEQ ID NO: 420108 - DNA, 19 bp, Homo sapiens
  siRNA target sequence for CPNE2 (NM_152727.4,644-662).
gcggggaagggcttgatta

SEQ ID NO: 420109 - DNA, 19 bp, Homo sapiens
  siRNA target sequence for CPNE2 (NM_152727.4,647-665).
gggaagggcttgattacga

SEQ ID NO: 420110 - DNA, 19 bp, Homo sapiens
  siRNA target sequence for CPNE2 (NM_152727.4,648-666).
ggaagggcttgattacgat

SEQ ID NO: 420111 - DNA, 19 bp, Homo sapiens
  siRNA target sequence for CPNE2 (NM_152727.4,758-776).
ccctttctggagttttata

SEQ ID NO: 420112 - DNA, 19 bp, Homo sapiens
  siRNA target sequence for CPNE2 (NM_152727.4,918-936).
gctacgactatgacaatga

SEQ ID NO: 420113 - DNA, 19 bp, Homo sapiens
  siRNA target sequence for CPNE2 (NM_152727.4,1081-1099).
cctgcgatcctgcaagata

SEQ ID NO: 420114 - DNA, 19 bp, Homo sapiens
  siRNA target sequence for CPNE2 (NM_152727.4,1082-1100).
ctgcgatcctgcaagataa

SEQ ID NO: 420115 - DNA, 19 bp, Homo sapiens
  siRNA target sequence for CPNE2 (NM_152727.4,1147-1165).
catgttcaccgttggaata

SEQ ID NO: 420116 - DNA, 19 bp, Homo sapiens
  siRNA target sequence for CPNE2 (NM_152727.4,1153-1171).
caccgttggaatagacttt

SEQ ID NO: 420117 - DNA, 19 bp, Homo sapiens
  siRNA target sequence for CPNE2 (NM_152727.4,1199-1217).
ccttcctctttgcactata

SEQ ID NO: 420118 - DNA, 19 bp, Homo sapiens
  siRNA target sequence for CPNE2 (NM_152727.4,1203-1221).
cctctttgcactatatcaa

SEQ ID NO: 420119 - DNA, 19 bp, Homo sapiens
  siRNA target sequence for CPNE2 (NM_152727.4,1223-1241).
cctatgggcaccaacgaat

SEQ ID NO: 420120 - DNA, 19 bp, Homo sapiens
  siRNA target sequence for CPNE2 (NM_152727.4,1224-1242).
ctatgggcaccaacgaata

SEQ ID NO: 420121 - DNA, 19 bp, Homo sapiens
  siRNA target sequence for CPNE2 (NM_152727.4,1257-1275).
gggctgttgggcagatcat

SEQ ID NO: 420122 - DNA, 19 bp, Homo sapiens
  siRNA target sequence for CPNE2 (NM_152727.4,1258-1276).
ggctgttgggcagatcatt

SEQ ID NO: 420123 - DNA, 19 bp, Homo sapiens
  siRNA target sequence for CPNE2 (NM_152727.4,1260-1278).
ctgttgggcagatcattca

SEQ ID NO: 420124 - DNA, 19 bp, Homo sapiens
  siRNA target sequence for CPNE2 (NM_152727.4,1392-1410).
gctcaggtgtggatggtat

SEQ ID NO: 420125 - DNA, 19 bp, Homo sapiens
  siRNA target sequence for CPNE2 (NM_152727.4,1447-1465).
cttctacggtcctaccaat

SEQ ID NO: 420126 - DNA, 19 bp, Homo sapiens
  siRNA target sequence for CPNE2 (NM_152727.4,1759-1777).
gttccgcaacgcagcaaaa

SEQ ID NO: 420127 - DNA, 19 bp, Homo sapiens
  siRNA target sequence for CPNE2 (NM_152727.4,1763-1781).
cgcaacgcagcaaaagaga

SEQ ID NO: 420128 - DNA, 19 bp, Homo sapiens
  siRNA target sequence for CPNE2 (NM_152727.4,1803-1821).
cggagctgccccaacaagt

SEQ ID NO: 420129 - DNA, 19 bp, Homo sapiens
  siRNA target sequence for CPNE2 (NM_152727.4,1804-1822).
ggagctgccccaacaagtt

SEQ ID NO: 420130 - DNA, 19 bp, Homo sapiens
  siRNA target sequence for CPNE2 (NM_152727.4,1814-1832).
caacaagttgtgcagtatt

SEQ ID NO: 420131 - DNA, 19 bp, Homo sapiens
  siRNA target sequence for CPNE2 (NM_152727.4,1817-1835).
caagttgtgcagtatttca

SEQ ID NO: 420132 - DNA, 19 bp, Homo sapiens
  siRNA target sequence for CPNE2 (NM_152727.4,1823-1841).
gtgcagtatttcaagcata

SEQ ID NO: 420133 - DNA, 19 bp, Homo sapiens
  siRNA target sequence for MGC39571 (NM_152728.1,325-343).
ctctgcgacctgcaaagat

SEQ ID NO: 420134 - DNA, 19 bp, Homo sapiens
  siRNA target sequence for MGC39571 (NM_152728.1,386-404).
ggtttatcagccacactta

SEQ ID NO: 420135 - DNA, 19 bp, Homo sapiens
  siRNA target sequence for MGC39571 (NM_152728.1,440-458).
gttagagtgagattctaca

SEQ ID NO: 420136 - DNA, 19 bp, Homo sapiens
  siRNA target sequence for MGC39571 (NM_152728.1,450-468).
gattctacatgctctcaat

SEQ ID NO: 420137 - DNA, 19 bp, Homo sapiens
  siRNA target sequence for MGC39571 (NM_152728.1,479-497).
gcatgcaggaagaaccttt

SEQ ID NO: 420138 - DNA, 19 bp, Homo sapiens
  siRNA target sequence for NT5C2L1 (NM_152729.2,186-204).
ccgctcatttataatagct

SEQ ID NO: 420139 - DNA, 19 bp, Homo sapiens
  siRNA target sequence for NT5C2L1 (NM_152729.2,187-205).
cgctcatttataatagctt

SEQ ID NO: 420140 - DNA, 19 bp, Homo sapiens
  siRNA target sequence for NT5C2L1 (NM_152729.2,227-245).
gaaagggtacgataaggaa

SEQ ID NO: 420141 - DNA, 19 bp, Homo sapiens
  siRNA target sequence for NT5C2L1 (NM_152729.2,232-250).
ggtacgataaggaattgct

SEQ ID NO: 420142 - DNA, 19 bp, Homo sapiens
  siRNA target sequence for NT5C2L1 (NM_152729.2,264-282).
gaggattgggatttctgtt

SEQ ID NO: 420143 - DNA, 19 bp, Homo sapiens
  siRNA target sequence for NT5C2L1 (NM_152729.2,284-302).
caaaggtttggcattggat

SEQ ID NO: 420144 - DNA, 19 bp, Homo sapiens
  siRNA target sequence for NT5C2L1 (NM_152729.2,289-307).
gtttggcattggatctaga

SEQ ID NO: 420145 - DNA, 19 bp, Homo sapiens
  siRNA target sequence for NT5C2L1 (NM_152729.2,399-417).
gcatatggcaagaaagagt

SEQ ID NO: 420146 - DNA, 19 bp, Homo sapiens
  siRNA target sequence for NT5C2L1 (NM_152729.2,414-432).
gagtggaagcacttcttgt

SEQ ID NO: 420147 - DNA, 19 bp, Homo sapiens
  siRNA target sequence for NT5C2L1 (NM_152729.2,448-466).
cttgccgctcaggaaagta

SEQ ID NO: 420148 - DNA, 19 bp, Homo sapiens
  siRNA target sequence for NT5C2L1 (NM_152729.2,453-471).
cgctcaggaaagtattact

SEQ ID NO: 420149 - DNA, 19 bp, Homo sapiens
  siRNA target sequence for NT5C2L1 (NM_152729.2,454-472).
gctcaggaaagtattactt

SEQ ID NO: 420150 - DNA, 19 bp, Homo sapiens
  siRNA target sequence for NT5C2L1 (NM_152729.2,457-475).
caggaaagtattactttta

SEQ ID NO: 420151 - DNA, 19 bp, Homo sapiens
  siRNA target sequence for NT5C2L1 (NM_152729.2,513-531).
gccagggtggtggactatt

SEQ ID NO: 420152 - DNA, 19 bp, Homo sapiens
  siRNA target sequence for NT5C2L1 (NM_152729.2,542-560).
gaacaatggtcaaaaaaca

SEQ ID NO: 420153 - DNA, 19 bp, Homo sapiens
  siRNA target sequence for NT5C2L1 (NM_152729.2,589-607).
ctatacaacacaattataa

SEQ ID NO: 420154 - DNA, 19 bp, Homo sapiens
  siRNA target sequence for NT5C2L1 (NM_152729.2,706-724).
ggcttcgacagctaaagaa

SEQ ID NO: 420155 - DNA, 19 bp, Homo sapiens
  siRNA target sequence for NT5C2L1 (NM_152729.2,707-725).
gcttcgacagctaaagaat

SEQ ID NO: 420156 - DNA, 19 bp, Homo sapiens
  siRNA target sequence for NT5C2L1 (NM_152729.2,775-793).
gacttctctgcgaatatat

SEQ ID NO: 420157 - DNA, 19 bp, Homo sapiens
  siRNA target sequence for NT5C2L1 (NM_152729.2,887-905).
ccggacactcgagaatgat

SEQ ID NO: 420158 - DNA, 19 bp, Homo sapiens
  siRNA target sequence for NT5C2L1 (NM_152729.2,962-980).
cgctgtccacctctatgaa

SEQ ID NO: 420159 - DNA, 19 bp, Homo sapiens
  siRNA target sequence for NT5C2L1 (NM_152729.2,1008-1026).
gaacccaaggttgtttatt

SEQ ID NO: 420160 - DNA, 19 bp, Homo sapiens
  siRNA target sequence for NT5C2L1 (NM_152729.2,1055-1073).
cccagctcgtcactatagt

SEQ ID NO: 420161 - DNA, 19 bp, Homo sapiens
  siRNA target sequence for NT5C2L1 (NM_152729.2,1056-1074).
ccagctcgtcactatagta

SEQ ID NO: 420162 - DNA, 19 bp, Homo sapiens
  siRNA target sequence for NT5C2L1 (NM_152729.2,1057-1075).
cagctcgtcactatagtaa

SEQ ID NO: 420163 - DNA, 19 bp, Homo sapiens
  siRNA target sequence for NT5C2L1 (NM_152729.2,1059-1077).
gctcgtcactatagtaatt

SEQ ID NO: 420164 - DNA, 19 bp, Homo sapiens
  siRNA target sequence for NT5C2L1 (NM_152729.2,1179-1197).
ggaccaaaagcaaaacctt

SEQ ID NO: 420165 - DNA, 19 bp, Homo sapiens
  siRNA target sequence for NT5C2L1 (NM_152729.2,1261-1279).
cagaagactccttggttta

SEQ ID NO: 420166 - DNA, 19 bp, Homo sapiens
  siRNA target sequence for NT5C2L1 (NM_152729.2,1263-1281).
gaagactccttggtttata

SEQ ID NO: 420167 - DNA, 19 bp, Homo sapiens
  siRNA target sequence for NT5C2L1 (NM_152729.2,1266-1284).
gactccttggtttatacat

SEQ ID NO: 420168 - DNA, 19 bp, Homo sapiens
  siRNA target sequence for NT5C2L1 (NM_152729.2,1275-1293).
gtttatacatggtcttgta

SEQ ID NO: 420169 - DNA, 19 bp, Homo sapiens
  siRNA target sequence for NT5C2L1 (NM_152729.2,1282-1300).
catggtcttgtaagagaat

SEQ ID NO: 420170 - DNA, 19 bp, Homo sapiens
  siRNA target sequence for NT5C2L1 (NM_152729.2,1286-1304).
gtcttgtaagagaatcagt

SEQ ID NO: 420171 - DNA, 19 bp, Homo sapiens
  siRNA target sequence for NT5C2L1 (NM_152729.2,1291-1309).
gtaagagaatcagtactta

SEQ ID NO: 420172 - DNA, 19 bp, Homo sapiens
  siRNA target sequence for NT5C2L1 (NM_152729.2,1301-1319).
cagtacttacagcactatt

SEQ ID NO: 420173 - DNA, 19 bp, Homo sapiens
  siRNA target sequence for NT5C2L1 (NM_152729.2,1306-1324).
cttacagcactattgcaat

SEQ ID NO: 420174 - DNA, 19 bp, Homo sapiens
  siRNA target sequence for NT5C2L1 (NM_152729.2,1315-1333).
ctattgcaattccaagtat

SEQ ID NO: 420175 - DNA, 19 bp, Homo sapiens
  siRNA target sequence for NT5C2L1 (NM_152729.2,1359-1377).
gactacaaatttacaagat

SEQ ID NO: 420176 - DNA, 19 bp, Homo sapiens
  siRNA target sequence for NT5C2L1 (NM_152729.2,1399-1417).
cagctggctactatccaaa

SEQ ID NO: 420177 - DNA, 19 bp, Homo sapiens
  siRNA target sequence for NT5C2L1 (NM_152729.2,1419-1437).
cctccactggtcttatcaa

SEQ ID NO: 420178 - DNA, 19 bp, Homo sapiens
  siRNA target sequence for NT5C2L1 (NM_152729.2,1443-1461).
gagacactgatatccaaat

SEQ ID NO: 420179 - DNA, 19 bp, Homo sapiens
  siRNA target sequence for C6orf170 (NM_152730.2,264-282).
gtatggtgactgaagttct

SEQ ID NO: 420180 - DNA, 19 bp, Homo sapiens
  siRNA target sequence for C6orf170 (NM_152730.2,283-301).
gtggatactcagtgatcaa

SEQ ID NO: 420181 - DNA, 19 bp, Homo sapiens
  siRNA target sequence for C6orf170 (NM_152730.2,285-303).
ggatactcagtgatcaaaa

SEQ ID NO: 420182 - DNA, 19 bp, Homo sapiens
  siRNA target sequence for C6orf170 (NM_152730.2,321-339).
gcttatataacaacattgt

SEQ ID NO: 420183 - DNA, 19 bp, Homo sapiens
  siRNA target sequence for C6orf170 (NM_152730.2,322-340).
cttatataacaacattgta

SEQ ID NO: 420184 - DNA, 19 bp, Homo sapiens
  siRNA target sequence for C6orf170 (NM_152730.2,356-374).
cagcctattcacaatttaa

SEQ ID NO: 420185 - DNA, 19 bp, Homo sapiens
  siRNA target sequence for C6orf170 (NM_152730.2,386-404).
gaggcatctccaaattgct

SEQ ID NO: 420186 - DNA, 19 bp, Homo sapiens
  siRNA target sequence for C6orf170 (NM_152730.2,405-423).
ctgagacagctttaattca

SEQ ID NO: 420187 - DNA, 19 bp, Homo sapiens
  siRNA target sequence for C6orf170 (NM_152730.2,455-473).
gtagaagaagggcttattt

SEQ ID NO: 420188 - DNA, 19 bp, Homo sapiens
  siRNA target sequence for C6orf170 (NM_152730.2,485-503).
ggagcaaatatgaactctt

SEQ ID NO: 420189 - DNA, 19 bp, Homo sapiens
  siRNA target sequence for C6orf170 (NM_152730.2,513-531).
gtcctacaggtgctcatat

SEQ ID NO: 420190 - DNA, 19 bp, Homo sapiens
  siRNA target sequence for C6orf170 (NM_152730.2,515-533).
cctacaggtgctcatataa

SEQ ID NO: 420191 - DNA, 19 bp, Homo sapiens
  siRNA target sequence for C6orf170 (NM_152730.2,624-642).
ctgtgtgtcgtcacatata

SEQ ID NO: 420192 - DNA, 19 bp, Homo sapiens
  siRNA target sequence for C6orf170 (NM_152730.2,626-644).
gtgtgtcgtcacatatata

SEQ ID NO: 420193 - DNA, 19 bp, Homo sapiens
  siRNA target sequence for C6orf170 (NM_152730.2,628-646).
gtgtcgtcacatatatagt

SEQ ID NO: 420194 - DNA, 19 bp, Homo sapiens
  siRNA target sequence for C6orf170 (NM_152730.2,632-650).
cgtcacatatatagtacat

SEQ ID NO: 420195 - DNA, 19 bp, Homo sapiens
  siRNA target sequence for C6orf170 (NM_152730.2,653-671).
gaaggtttgcaggtgttaa

SEQ ID NO: 420196 - DNA, 19 bp, Homo sapiens
  siRNA target sequence for C6orf170 (NM_152730.2,725-743).
ctatcagaaagaattccta

SEQ ID NO: 420197 - DNA, 19 bp, Homo sapiens
  siRNA target sequence for C6orf170 (NM_152730.2,746-764).
ccagtagagggttctgatt

SEQ ID NO: 420198 - DNA, 19 bp, Homo sapiens
  siRNA target sequence for C6orf170 (NM_152730.2,803-821).
gcttgggaagataatttgt

SEQ ID NO: 420199 - DNA, 19 bp, Homo sapiens
  siRNA target sequence for C6orf170 (NM_152730.2,807-825).
gggaagataatttgttaga

SEQ ID NO: 420200 - DNA, 19 bp, Homo sapiens
  siRNA target sequence for C6orf170 (NM_152730.2,850-868).
ccccaaaggattactactt

SEQ ID NO: 420201 - DNA, 19 bp, Homo sapiens
  siRNA target sequence for C6orf170 (NM_152730.2,959-977).
ggctatggagttttggtta

SEQ ID NO: 420202 - DNA, 19 bp, Homo sapiens
  siRNA target sequence for C6orf170 (NM_152730.2,1001-1019).
ggtggcattgcactaaaaa

SEQ ID NO: 420203 - DNA, 19 bp, Homo sapiens
  siRNA target sequence for C6orf170 (NM_152730.2,1004-1022).
ggcattgcactaaaaaagt

SEQ ID NO: 420204 - DNA, 19 bp, Homo sapiens
  siRNA target sequence for C6orf170 (NM_152730.2,1021-1039).
gtcagggtttattaatgaa

SEQ ID NO: 420205 - DNA, 19 bp, Homo sapiens
  siRNA target sequence for C6orf170 (NM_152730.2,1040-1058).
cttataactgaattatggt

SEQ ID NO: 420206 - DNA, 19 bp, Homo sapiens
  siRNA target sequence for C6orf170 (NM_152730.2,1091-1109).
gtaacccatcccagaacta

SEQ ID NO: 420207 - DNA, 19 bp, Homo sapiens
  siRNA target sequence for C6orf170 (NM_152730.2,1107-1125).
ctactccagtggatcctat

SEQ ID NO: 420208 - DNA, 19 bp, Homo sapiens
  siRNA target sequence for C6orf170 (NM_152730.2,1110-1128).
ctccagtggatcctattga

SEQ ID NO: 420209 - DNA, 19 bp, Homo sapiens
  siRNA target sequence for C6orf170 (NM_152730.2,1131-1149).
gaagctgtcaaaagtcttt

SEQ ID NO: 420210 - DNA, 19 bp, Homo sapiens
  siRNA target sequence for C6orf170 (NM_152730.2,1154-1172).
gcactggtgaacttgttat

SEQ ID NO: 420211 - DNA, 19 bp, Homo sapiens
  siRNA target sequence for C6orf170 (NM_152730.2,1157-1175).
ctggtgaacttgttatcct

SEQ ID NO: 420212 - DNA, 19 bp, Homo sapiens
  siRNA target sequence for C6orf170 (NM_152730.2,1159-1177).
ggtgaacttgttatcctat

SEQ ID NO: 420213 - DNA, 19 bp, Homo sapiens
  siRNA target sequence for C6orf170 (NM_152730.2,1173-1191).
cctatcctgctatttatga

SEQ ID NO: 420214 - DNA, 19 bp, Homo sapiens
  siRNA target sequence for C6orf170 (NM_152730.2,1262-1280).
gatattattgatagactta

SEQ ID NO: 420215 - DNA, 19 bp, Homo sapiens
  siRNA target sequence for C6orf170 (NM_152730.2,1311-1329).
ctttattcaactatgaaca

SEQ ID NO: 420216 - DNA, 19 bp, Homo sapiens
  siRNA target sequence for C6orf170 (NM_152730.2,1318-1336).
caactatgaacaatcacat

SEQ ID NO: 420217 - DNA, 19 bp, Homo sapiens
  siRNA target sequence for C6orf170 (NM_152730.2,1542-1560).
ggccattggaacggatttt

SEQ ID NO: 420218 - DNA, 19 bp, Homo sapiens
  siRNA target sequence for C6orf170 (NM_152730.2,1565-1583).
ccgaggttactcgaaaaga

SEQ ID NO: 420219 - DNA, 19 bp, Homo sapiens
  siRNA target sequence for C6orf170 (NM_152730.2,1567-1585).
gaggttactcgaaaagagt

SEQ ID NO: 420220 - DNA, 19 bp, Homo sapiens
  siRNA target sequence for C6orf170 (NM_152730.2,1582-1600).
gagtgataatccatatcct

SEQ ID NO: 420221 - DNA, 19 bp, Homo sapiens
  siRNA target sequence for C6orf170 (NM_152730.2,1682-1700).
gatcttgacaagcttttat

SEQ ID NO: 420222 - DNA, 19 bp, Homo sapiens
  siRNA target sequence for C6orf170 (NM_152730.2,1704-1722).
gcctcaaaatatctgataa

SEQ ID NO: 420223 - DNA, 19 bp, Homo sapiens
  siRNA target sequence for C6orf170 (NM_152730.2,1771-1789).
gaaagccaaacctgatata

SEQ ID NO: 420224 - DNA, 19 bp, Homo sapiens
  siRNA target sequence for C6orf170 (NM_152730.2,1777-1795).
caaacctgatataatcagt

SEQ ID NO: 420225 - DNA, 19 bp, Homo sapiens
  siRNA target sequence for C6orf170 (NM_152730.2,1794-1812).
gtggagaggccttaataga

SEQ ID NO: 420226 - DNA, 19 bp, Homo sapiens
  siRNA target sequence for C6orf170 (NM_152730.2,1796-1814).
ggagaggccttaatagaat

SEQ ID NO: 420227 - DNA, 19 bp, Homo sapiens
  siRNA target sequence for C6orf170 (NM_152730.2,1867-1885).
cccttcagtggagtataca

SEQ ID NO: 420228 - DNA, 19 bp, Homo sapiens
  siRNA target sequence for C6orf170 (NM_152730.2,1906-1924).
gaatgaaagtctttcatct

SEQ ID NO: 420229 - DNA, 19 bp, Homo sapiens
  siRNA target sequence for C6orf170 (NM_152730.2,1950-1968).
ctgtcaggtatggcaaatt

SEQ ID NO: 420230 - DNA, 19 bp, Homo sapiens
  siRNA target sequence for C6orf170 (NM_152730.2,2047-2065).
gcaaacttccataaaatct

SEQ ID NO: 420231 - DNA, 19 bp, Homo sapiens
  siRNA target sequence for C6orf170 (NM_152730.2,2077-2095).
cctgcaagggaattatgct

SEQ ID NO: 420232 - DNA, 19 bp, Homo sapiens
  siRNA target sequence for C6orf65 (NM_152731.1,365-383).
gcaaatagtgacatggata

SEQ ID NO: 420233 - DNA, 19 bp, Homo sapiens
  siRNA target sequence for C6orf65 (NM_152731.1,366-384).
caaatagtgacatggataa

SEQ ID NO: 420234 - DNA, 19 bp, Homo sapiens
  siRNA target sequence for C6orf65 (NM_152731.1,476-494).
gaattgtgcgccaaaataa

SEQ ID NO: 420235 - DNA, 19 bp, Homo sapiens
  siRNA target sequence for C6orf65 (NM_152731.1,537-555).
gccgacttcgacagtcttt

SEQ ID NO: 420236 - DNA, 19 bp, Homo sapiens
  siRNA target sequence for C6orf65 (NM_152731.1,552-570).
ctttggtcatgcttcaagt

SEQ ID NO: 420237 - DNA, 19 bp, Homo sapiens
  siRNA target sequence for C6orf65 (NM_152731.1,635-653).
gggggaaccatgtctacat

SEQ ID NO: 420238 - DNA, 19 bp, Homo sapiens
  siRNA target sequence for C6orf65 (NM_152731.1,685-703).
ctcctcgccagattcattt

SEQ ID NO: 420239 - DNA, 19 bp, Homo sapiens
  siRNA target sequence for C6orf65 (NM_152731.1,704-722).
gcctcaacatgcagtaatt

SEQ ID NO: 420240 - DNA, 19 bp, Homo sapiens
  siRNA target sequence for C6orf65 (NM_152731.1,706-724).
ctcaacatgcagtaattct

SEQ ID NO: 420241 - DNA, 19 bp, Homo sapiens
  siRNA target sequence for C6orf65 (NM_152731.1,769-787).
gcatcagactgatgagaaa

SEQ ID NO: 420242 - DNA, 19 bp, Homo sapiens
  siRNA target sequence for C6orf65 (NM_152731.1,807-825).
ggcaaaatcctctacttca

SEQ ID NO: 420243 - DNA, 19 bp, Homo sapiens
  siRNA target sequence for C6orf206 (NM_152732.2,106-124).
cgctgctcacgtctcttat

SEQ ID NO: 420244 - DNA, 19 bp, Homo sapiens
  siRNA target sequence for C6orf206 (NM_152732.2,115-133).
cgtctcttatgctggttaa

SEQ ID NO: 420245 - DNA, 19 bp, Homo sapiens
  siRNA target sequence for C6orf206 (NM_152732.2,134-152).
gcgcgactaccgctatgat

SEQ ID NO: 420246 - DNA, 19 bp, Homo sapiens
  siRNA target sequence for C6orf206 (NM_152732.2,145-163).
gctatgatcgggttctctt

SEQ ID NO: 420247 - DNA, 19 bp, Homo sapiens
  siRNA target sequence for C6orf206 (NM_152732.2,180-198).
ggcctcgtcgccgattact

SEQ ID NO: 420248 - DNA, 19 bp, Homo sapiens
  siRNA target sequence for C6orf206 (NM_152732.2,181-199).
gcctcgtcgccgattacta

SEQ ID NO: 420249 - DNA, 19 bp, Homo sapiens
  siRNA target sequence for C6orf206 (NM_152732.2,183-201).
ctcgtcgccgattactaca

SEQ ID NO: 420250 - DNA, 19 bp, Homo sapiens
  siRNA target sequence for C6orf206 (NM_152732.2,234-252).
ccgcgcaagacgctctata

SEQ ID NO: 420251 - DNA, 19 bp, Homo sapiens
  siRNA target sequence for C6orf206 (NM_152732.2,339-357).
ggggacccatcatacgaat

SEQ ID NO: 420252 - DNA, 19 bp, Homo sapiens
  siRNA target sequence for C6orf206 (NM_152732.2,340-358).
gggacccatcatacgaata

SEQ ID NO: 420253 - DNA, 19 bp, Homo sapiens
  siRNA target sequence for C6orf206 (NM_152732.2,341-359).
ggacccatcatacgaatat

SEQ ID NO: 420254 - DNA, 19 bp, Homo sapiens
  siRNA target sequence for C6orf206 (NM_152732.2,344-362).
cccatcatacgaatatgaa

SEQ ID NO: 420255 - DNA, 19 bp, Homo sapiens
  siRNA target sequence for C6orf206 (NM_152732.2,346-364).
catcatacgaatatgaaca

SEQ ID NO: 420256 - DNA, 19 bp, Homo sapiens
  siRNA target sequence for C6orf206 (NM_152732.2,602-620).
gcctgttgagctaaagaat

SEQ ID NO: 420257 - DNA, 19 bp, Homo sapiens
  siRNA target sequence for C6orf206 (NM_152732.2,671-689).
ctccttggagcatgacatt

SEQ ID NO: 420258 - DNA, 19 bp, Homo sapiens
  siRNA target sequence for C6orf206 (NM_152732.2,780-798).
gctccccgcaccaagaact

SEQ ID NO: 420259 - DNA, 19 bp, Homo sapiens
  siRNA target sequence for C6orf206 (NM_152732.2,781-799).
ctccccgcaccaagaacta

SEQ ID NO: 420260 - DNA, 19 bp, Homo sapiens
  siRNA target sequence for C6orf206 (NM_152732.2,817-835).
gcactggcgagaagaacat

SEQ ID NO: 420261 - DNA, 19 bp, Homo sapiens
  siRNA target sequence for C6orf89 (NM_152734.1,740-758).
gaccctttccagactttga

SEQ ID NO: 420262 - DNA, 19 bp, Homo sapiens
  siRNA target sequence for C6orf89 (NM_152734.1,775-793).
gactgtgagcagaatgagt

SEQ ID NO: 420263 - DNA, 19 bp, Homo sapiens
  siRNA target sequence for C6orf89 (NM_152734.1,886-904).
catccactggtgatcaaga

SEQ ID NO: 420264 - DNA, 19 bp, Homo sapiens
  siRNA target sequence for C6orf89 (NM_152734.1,1017-1035).
gcggtggttcccatttcct

SEQ ID NO: 420265 - DNA, 19 bp, Homo sapiens
  siRNA target sequence for C6orf89 (NM_152734.1,1018-1036).
cggtggttcccatttcctt

SEQ ID NO: 420266 - DNA, 19 bp, Homo sapiens
  siRNA target sequence for C6orf89 (NM_152734.1,1056-1074).
gaacagatcacaaatgtta

SEQ ID NO: 420267 - DNA, 19 bp, Homo sapiens
  siRNA target sequence for C6orf89 (NM_152734.1,1071-1089).
gttacgtgagctttttcct

SEQ ID NO: 420268 - DNA, 19 bp, Homo sapiens
  siRNA target sequence for C6orf89 (NM_152734.1,1157-1175).
ctgttgtggggagtaagat

SEQ ID NO: 420269 - DNA, 19 bp, Homo sapiens
  siRNA target sequence for C6orf89 (NM_152734.1,1166-1184).
ggagtaagatgcataagat

SEQ ID NO: 420270 - DNA, 19 bp, Homo sapiens
  siRNA target sequence for C6orf89 (NM_152734.1,1239-1257).
cttccagtgccgaagacat

SEQ ID NO: 420271 - DNA, 19 bp, Homo sapiens
  siRNA target sequence for C6orf89 (NM_152734.1,1242-1260).
ccagtgccgaagacattgt

SEQ ID NO: 420272 - DNA, 19 bp, Homo sapiens
  siRNA target sequence for C6orf89 (NM_152734.1,1315-1333).
cactggaaggtctacgtta

SEQ ID NO: 420273 - DNA, 19 bp, Homo sapiens
  siRNA target sequence for C6orf89 (NM_152734.1,1317-1335).
ctggaaggtctacgttata

SEQ ID NO: 420274 - DNA, 19 bp, Homo sapiens
  siRNA target sequence for C6orf89 (NM_152734.1,1365-1383).
cgatggaaccgctttctca

SEQ ID NO: 420275 - DNA, 19 bp, Homo sapiens
  siRNA target sequence for MGC33993 (NM_152737.1,469-487).
gatgagctggagtgcaaaa

SEQ ID NO: 420276 - DNA, 19 bp, Homo sapiens
  siRNA target sequence for MGC33993 (NM_152737.1,474-492).
gctggagtgcaaaatctgt

SEQ ID NO: 420277 - DNA, 19 bp, Homo sapiens
  siRNA target sequence for MGC33993 (NM_152737.1,478-496).
gagtgcaaaatctgttaca

SEQ ID NO: 420278 - DNA, 19 bp, Homo sapiens
  siRNA target sequence for MGC33993 (NM_152737.1,489-507).
ctgttacaatcgatacaat

SEQ ID NO: 420279 - DNA, 19 bp, Homo sapiens
  siRNA target sequence for MGC33993 (NM_152737.1,491-509).
gttacaatcgatacaatct

SEQ ID NO: 420280 - DNA, 19 bp, Homo sapiens
  siRNA target sequence for MGC33993 (NM_152737.1,563-581).
gcctctacaagatcataga

SEQ ID NO: 420281 - DNA, 19 bp, Homo sapiens
  siRNA target sequence for MGC33993 (NM_152737.1,567-585).
ctacaagatcatagacttt

SEQ ID NO: 420282 - DNA, 19 bp, Homo sapiens
  siRNA target sequence for MGC33993 (NM_152737.1,633-651).
gacgtgcctgccagatgat

SEQ ID NO: 420283 - DNA, 19 bp, Homo sapiens
  siRNA target sequence for MGC33993 (NM_152737.1,635-653).
cgtgcctgccagatgatga

SEQ ID NO: 420284 - DNA, 19 bp, Homo sapiens
  siRNA target sequence for MGC33993 (NM_152737.1,659-677).
gtagcctgcccgatgacaa

SEQ ID NO: 420285 - DNA, 19 bp, Homo sapiens
  siRNA target sequence for MGC33993 (NM_152737.1,662-680).
gcctgcccgatgacaacaa

SEQ ID NO: 420286 - DNA, 19 bp, Homo sapiens
  siRNA target sequence for MGC33993 (NM_152737.1,673-691).
gacaacaacatccttgtaa

SEQ ID NO: 420287 - DNA, 19 bp, Homo sapiens
  siRNA target sequence for MGC33993 (NM_152737.1,941-959).
gcacgtccctgctgtttca

SEQ ID NO: 420288 - DNA, 19 bp, Homo sapiens
  siRNA target sequence for MGC33993 (NM_152737.1,962-980).
catccatccgggtgttagt

SEQ ID NO: 420289 - DNA, 19 bp, Homo sapiens
  siRNA target sequence for MGC33993 (NM_152737.1,988-1006).
ctaggtttgctctacttca

SEQ ID NO: 420290 - DNA, 19 bp, Homo sapiens
  siRNA target sequence for MGC33993 (NM_152737.1,1007-1025).
gctccttacccttaggaat

SEQ ID NO: 420291 - DNA, 19 bp, Homo sapiens
  siRNA target sequence for MGC33993 (NM_152737.1,1016-1034).
ccttaggaatctacttact

SEQ ID NO: 420292 - DNA, 19 bp, Homo sapiens
  siRNA target sequence for MGC33993 (NM_152737.1,1052-1070).
cccttggggtcgtctttgt

SEQ ID NO: 420293 - DNA, 19 bp, Homo sapiens
  siRNA target sequence for MGC33993 (NM_152737.1,1080-1098).
cccttcgagcctcgttatt

SEQ ID NO: 420294 - DNA, 19 bp, Homo sapiens
  siRNA target sequence for MGC33993 (NM_152737.1,1082-1100).
cttcgagcctcgttattct

SEQ ID NO: 420295 - DNA, 19 bp, Homo sapiens
  siRNA target sequence for MGC33993 (NM_152737.1,1085-1103).
cgagcctcgttattcttat

SEQ ID NO: 420296 - DNA, 19 bp, Homo sapiens
  siRNA target sequence for MGC33993 (NM_152737.1,1088-1106).
gcctcgttattcttatggt

SEQ ID NO: 420297 - DNA, 19 bp, Homo sapiens
  siRNA target sequence for MGC40222 (NM_152738.1,281-299).
ggattcgagtgatgaaaca

SEQ ID NO: 420298 - DNA, 19 bp, Homo sapiens
  siRNA target sequence for MGC40222 (NM_152738.1,322-340).
ggccacacctccaaagtga

SEQ ID NO: 420299 - DNA, 19 bp, Homo sapiens
  siRNA target sequence for MGC40222 (NM_152738.1,372-390).
ccctacttctcttttatca

SEQ ID NO: 420300 - DNA, 19 bp, Homo sapiens
  siRNA target sequence for MGC40222 (NM_152738.1,426-444).
ggaaccttagtgaaaatct

SEQ ID NO: 420301 - DNA, 19 bp, Homo sapiens
  siRNA target sequence for MGC40222 (NM_152738.1,465-483).
cagcctgccacccatttca

SEQ ID NO: 420302 - DNA, 19 bp, Homo sapiens
  siRNA target sequence for MGC40222 (NM_152738.1,468-486).
cctgccacccatttcaagt

SEQ ID NO: 420303 - DNA, 19 bp, Homo sapiens
  siRNA target sequence for MGC40222 (NM_152738.1,469-487).
ctgccacccatttcaagtt

SEQ ID NO: 420304 - DNA, 19 bp, Homo sapiens
  siRNA target sequence for MGC40222 (NM_152738.1,500-518).
gacacatggaccttatgta

SEQ ID NO: 420305 - DNA, 19 bp, Homo sapiens
  siRNA target sequence for MGC40222 (NM_152738.1,539-557).
gagtctgtggcaaaagtca

SEQ ID NO: 420306 - DNA, 19 bp, Homo sapiens
  siRNA target sequence for MGC40222 (NM_152738.1,603-621).
ccaacactgggctgtttct

SEQ ID NO: 420307 - DNA, 19 bp, Homo sapiens
  siRNA target sequence for C7orf27 (NM_152743.1,144-162).
gctcctggactggtttaaa

SEQ ID NO: 420308 - DNA, 19 bp, Homo sapiens
  siRNA target sequence for C7orf27 (NM_152743.1,145-163).
ctcctggactggtttaaaa

SEQ ID NO: 420309 - DNA, 19 bp, Homo sapiens
  siRNA target sequence for C7orf27 (NM_152743.1,484-502).
gcggtcgacaccatcttct

SEQ ID NO: 420310 - DNA, 19 bp, Homo sapiens
  siRNA target sequence for C7orf27 (NM_152743.1,628-646).
gcgtgtgcccagaagatca

SEQ ID NO: 420311 - DNA, 19 bp, Homo sapiens
  siRNA target sequence for C7orf27 (NM_152743.1,629-647).
cgtgtgcccagaagatcat

SEQ ID NO: 420312 - DNA, 19 bp, Homo sapiens
  siRNA target sequence for C7orf27 (NM_152743.1,853-871).
cgttctcccgtgttcagtt

SEQ ID NO: 420313 - DNA, 19 bp, Homo sapiens
  siRNA target sequence for C7orf27 (NM_152743.1,1436-1454).
ccagccccacggttctgaa

SEQ ID NO: 420314 - DNA, 19 bp, Homo sapiens
  siRNA target sequence for C7orf27 (NM_152743.1,1439-1457).
gccccacggttctgaagaa

SEQ ID NO: 420315 - DNA, 19 bp, Homo sapiens
  siRNA target sequence for C7orf27 (NM_152743.1,2140-2158).
cacgtggggctctttgact

SEQ ID NO: 420316 - DNA, 19 bp, Homo sapiens
  siRNA target sequence for C7orf27 (NM_152743.1,2223-2241).
cttcctgagggacaagatt

SEQ ID NO: 420317 - DNA, 19 bp, Homo sapiens
  siRNA target sequence for C7orf27 (NM_152743.1,2423-2441).
gcagcgaccacgtggaaaa

SEQ ID NO: 420318 - DNA, 19 bp, Homo sapiens
  siRNA target sequence for SDK1 (NM_152744.2,426-444).
cgctggcgcaagatgatgt

SEQ ID NO: 420319 - DNA, 19 bp, Homo sapiens
  siRNA target sequence for SDK1 (NM_152744.2,427-445).
gctggcgcaagatgatgtt

SEQ ID NO: 420320 - DNA, 19 bp, Homo sapiens
  siRNA target sequence for SDK1 (NM_152744.2,577-595).
cacctacagcagcgaatat

SEQ ID NO: 420321 - DNA, 19 bp, Homo sapiens
  siRNA target sequence for SDK1 (NM_152744.2,579-597).
cctacagcagcgaatataa

SEQ ID NO: 420322 - DNA, 19 bp, Homo sapiens
  siRNA target sequence for SDK1 (NM_152744.2,586-604).
cagcgaatataagtacatt

SEQ ID NO: 420323 - DNA, 19 bp, Homo sapiens
  siRNA target sequence for SDK1 (NM_152744.2,588-606).
gcgaatataagtacattat

SEQ ID NO: 420324 - DNA, 19 bp, Homo sapiens
  siRNA target sequence for SDK1 (NM_152744.2,643-661).
ctgcgtggtgcgaaacaga

SEQ ID NO: 420325 - DNA, 19 bp, Homo sapiens
  siRNA target sequence for SDK1 (NM_152744.2,645-663).
gcgtggtgcgaaacagaat

SEQ ID NO: 420326 - DNA, 19 bp, Homo sapiens
  siRNA target sequence for SDK1 (NM_152744.2,726-744).
cggaccagaggaaaacagt

SEQ ID NO: 420327 - DNA, 19 bp, Homo sapiens
  siRNA target sequence for SDK1 (NM_152744.2,752-770).
ggacgtgcagcgattctaa

SEQ ID NO: 420328 - DNA, 19 bp, Homo sapiens
  siRNA target sequence for SDK1 (NM_152744.2,753-771).
gacgtgcagcgattctaaa

SEQ ID NO: 420329 - DNA, 19 bp, Homo sapiens
  siRNA target sequence for SDK1 (NM_152744.2,756-774).
gtgcagcgattctaaacct

SEQ ID NO: 420330 - DNA, 19 bp, Homo sapiens
  siRNA target sequence for SDK1 (NM_152744.2,800-818).
cctcaagtgacttggttta

SEQ ID NO: 420331 - DNA, 19 bp, Homo sapiens
  siRNA target sequence for SDK1 (NM_152744.2,824-842).
gggcacaagattattccaa

SEQ ID NO: 420332 - DNA, 19 bp, Homo sapiens
  siRNA target sequence for SDK1 (NM_152744.2,923-941).
caggccgtgaatgagaaaa

SEQ ID NO: 420333 - DNA, 19 bp, Homo sapiens
  siRNA target sequence for SDK1 (NM_152744.2,952-970).
caagacaagcccattcatt

SEQ ID NO: 420334 - DNA, 19 bp, Homo sapiens
  siRNA target sequence for SDK1 (NM_152744.2,976-994).
gagcatagcaagagatgtt

SEQ ID NO: 420335 - DNA, 19 bp, Homo sapiens
  siRNA target sequence for SDK1 (NM_152744.2,1265-1283).
gcgacggcctttcttttca

SEQ ID NO: 420336 - DNA, 19 bp, Homo sapiens
  siRNA target sequence for SDK1 (NM_152744.2,1266-1284).
cgacggcctttcttttcat

SEQ ID NO: 420337 - DNA, 19 bp, Homo sapiens
  siRNA target sequence for SDK1 (NM_152744.2,1282-1300).
catcatagagccaccatat

SEQ ID NO: 420338 - DNA, 19 bp, Homo sapiens
  siRNA target sequence for SDK1 (NM_152744.2,1285-1303).
catagagccaccatatttt

SEQ ID NO: 420339 - DNA, 19 bp, Homo sapiens
  siRNA target sequence for SDK1 (NM_152744.2,1312-1330).
gcccgagagtcggatttca

SEQ ID NO: 420340 - DNA, 19 bp, Homo sapiens
  siRNA target sequence for SDK1 (NM_152744.2,1429-1447).
ccagaatcctcgatacaaa

SEQ ID NO: 420341 - DNA, 19 bp, Homo sapiens
  siRNA target sequence for SDK1 (NM_152744.2,1488-1506).
cagaggactccggaatctt

SEQ ID NO: 420342 - DNA, 19 bp, Homo sapiens
  siRNA target sequence for SDK1 (NM_152744.2,1551-1569).
cctacctggatgtaaccaa

SEQ ID NO: 420343 - DNA, 19 bp, Homo sapiens
  siRNA target sequence for SDK1 (NM_152744.2,1595-1613).
ccagtggacaccacagtta

SEQ ID NO: 420344 - DNA, 19 bp, Homo sapiens
  siRNA target sequence for SDK1 (NM_152744.2,1618-1636).
cgggatgacagccattcta

SEQ ID NO: 420345 - DNA, 19 bp, Homo sapiens
  siRNA target sequence for SDK1 (NM_152744.2,1619-1637).
gggatgacagccattctaa

SEQ ID NO: 420346 - DNA, 19 bp, Homo sapiens
  siRNA target sequence for SDK1 (NM_152744.2,1706-1724).
ggctctgtccggattccta

SEQ ID NO: 420347 - DNA, 19 bp, Homo sapiens
  siRNA target sequence for SDK1 (NM_152744.2,1722-1740).
ctaggttcatgcttcttga

SEQ ID NO: 420348 - DNA, 19 bp, Homo sapiens
  siRNA target sequence for SDK1 (NM_152744.2,1814-1832).
gagggctccctgaatgcat

SEQ ID NO: 420349 - DNA, 19 bp, Homo sapiens
  siRNA target sequence for SDK1 (NM_152744.2,1946-1964).
gtttcactccgctacgttt

SEQ ID NO: 420350 - DNA, 19 bp, Homo sapiens
  siRNA target sequence for SDK1 (NM_152744.2,1950-1968).
cactccgctacgtttggaa

SEQ ID NO: 420351 - DNA, 19 bp, Homo sapiens
  siRNA target sequence for SDK1 (NM_152744.2,2071-2089).
ctacagctgcgagattgtt

SEQ ID NO: 420352 - DNA, 19 bp, Homo sapiens
  siRNA target sequence for SDK1 (NM_152744.2,2074-2092).
cagctgcgagattgtttct

SEQ ID NO: 420353 - DNA, 19 bp, Homo sapiens
  siRNA target sequence for SDK1 (NM_152744.2,2076-2094).
gctgcgagattgtttctga

SEQ ID NO: 420354 - DNA, 19 bp, Homo sapiens
  siRNA target sequence for SDK1 (NM_152744.2,2077-2095).
ctgcgagattgtttctgaa

SEQ ID NO: 420355 - DNA, 19 bp, Homo sapiens
  siRNA target sequence for SDK1 (NM_152744.2,2131-2149).
gattgaactgcctcattca

SEQ ID NO: 420356 - DNA, 19 bp, Homo sapiens
  siRNA target sequence for SDK1 (NM_152744.2,2226-2244).
gaaacagtcctattcttta

SEQ ID NO: 420357 - DNA, 19 bp, Homo sapiens
  siRNA target sequence for SDK1 (NM_152744.2,2338-2356).
gactccggctcgtacctat

SEQ ID NO: 420358 - DNA, 19 bp, Homo sapiens
  siRNA target sequence for SDK1 (NM_152744.2,2342-2360).
ccggctcgtacctatcaat

SEQ ID NO: 420359 - DNA, 19 bp, Homo sapiens
  siRNA target sequence for SDK1 (NM_152744.2,2343-2361).
cggctcgtacctatcaatt

SEQ ID NO: 420360 - DNA, 19 bp, Homo sapiens
  siRNA target sequence for SDK1 (NM_152744.2,2445-2463).
gtgctcccccgaaaaatat

SEQ ID NO: 420361 - DNA, 19 bp, Homo sapiens
  siRNA target sequence for SDK1 (NM_152744.2,2467-2485).
ggccagtgggcggactaat

SEQ ID NO: 420362 - DNA, 19 bp, Homo sapiens
  siRNA target sequence for SDK1 (NM_152744.2,2469-2487).
ccagtgggcggactaatca

SEQ ID NO: 420363 - DNA, 19 bp, Homo sapiens
  siRNA target sequence for SDK1 (NM_152744.2,2477-2495).
cggactaatcagtccatta

SEQ ID NO: 420364 - DNA, 19 bp, Homo sapiens
  siRNA target sequence for SDK1 (NM_152744.2,2481-2499).
ctaatcagtccattatggt

SEQ ID NO: 420365 - DNA, 19 bp, Homo sapiens
  siRNA target sequence for SDK1 (NM_152744.2,2535-2553).
gggtgttgcgtggatacat

SEQ ID NO: 420366 - DNA, 19 bp, Homo sapiens
  siRNA target sequence for SDK1 (NM_152744.2,2607-2625).
ccagcccggaggtgaacta

SEQ ID NO: 420367 - DNA, 19 bp, Homo sapiens
  siRNA target sequence for SDK1 (NM_152744.2,2633-2651).
gtgacagacctgatcatct

SEQ ID NO: 420368 - DNA, 19 bp, Homo sapiens
  siRNA target sequence for SDK1 (NM_152744.2,2650-2668).
ctggacacagtatgagata

SEQ ID NO: 420369 - DNA, 19 bp, Homo sapiens
  siRNA target sequence for SDK1 (NM_152744.2,2652-2670).
ggacacagtatgagataca

SEQ ID NO: 420370 - DNA, 19 bp, Homo sapiens
  siRNA target sequence for SDK1 (NM_152744.2,2813-2831).
cctccgcctcagcagttta

SEQ ID NO: 420371 - DNA, 19 bp, Homo sapiens
  siRNA target sequence for SDK1 (NM_152744.2,2814-2832).
ctccgcctcagcagtttat

SEQ ID NO: 420372 - DNA, 19 bp, Homo sapiens
  siRNA target sequence for SDK1 (NM_152744.2,2816-2834).
ccgcctcagcagtttatca

SEQ ID NO: 420373 - DNA, 19 bp, Homo sapiens
  siRNA target sequence for SDK1 (NM_152744.2,2889-2907).
ctgtcactgtggtcactat

SEQ ID NO: 420374 - DNA, 19 bp, Homo sapiens
  siRNA target sequence for SDK1 (NM_152744.2,2904-2922).
ctattgccccagatttcca

SEQ ID NO: 420375 - DNA, 19 bp, Homo sapiens
  siRNA target sequence for SDK1 (NM_152744.2,2927-2945).
gtccaccatggacacataa

SEQ ID NO: 420376 - DNA, 19 bp, Homo sapiens
  siRNA target sequence for SDK1 (NM_152744.2,2930-2948).
caccatggacacataacga

SEQ ID NO: 420377 - DNA, 19 bp, Homo sapiens
  siRNA target sequence for SDK1 (NM_152744.2,3213-3231).
gcacgacgcacgagtacaa

SEQ ID NO: 420378 - DNA, 19 bp, Homo sapiens
  siRNA target sequence for SDK1 (NM_152744.2,3216-3234).
cgacgcacgagtacaagat

SEQ ID NO: 420379 - DNA, 19 bp, Homo sapiens
  siRNA target sequence for SDK1 (NM_152744.2,3416-3434).
ggctatgacgggaaaacgt

SEQ ID NO: 420380 - DNA, 19 bp, Homo sapiens
  siRNA target sequence for SDK1 (NM_152744.2,3436-3454).
catctccaggtggattgtt

SEQ ID NO: 420381 - DNA, 19 bp, Homo sapiens
  siRNA target sequence for SDK1 (NM_152744.2,3490-3508).
gtgggtcaccctctatgaa

SEQ ID NO: 420382 - DNA, 19 bp, Homo sapiens
  siRNA target sequence for SDK1 (NM_152744.2,3583-3601).
gaagcaagtgaacattgtt

SEQ ID NO: 420383 - DNA, 19 bp, Homo sapiens
  siRNA target sequence for SDK1 (NM_152744.2,3762-3780).
ccgtgggctacaggattaa

SEQ ID NO: 420384 - DNA, 19 bp, Homo sapiens
  siRNA target sequence for SDK1 (NM_152744.2,3764-3782).
gtgggctacaggattaagt

SEQ ID NO: 420385 - DNA, 19 bp, Homo sapiens
  siRNA target sequence for SDK1 (NM_152744.2,3833-3851).
cggctggagagagaattca

SEQ ID NO: 420386 - DNA, 19 bp, Homo sapiens
  siRNA target sequence for SDK1 (NM_152744.2,4001-4019).
gtcagctcgacccagattt

SEQ ID NO: 420387 - DNA, 19 bp, Homo sapiens
  siRNA target sequence for SDK1 (NM_152744.2,4005-4023).
gctcgacccagattttact

SEQ ID NO: 420388 - DNA, 19 bp, Homo sapiens
  siRNA target sequence for SDK1 (NM_152744.2,4061-4079).
ctcatactgggctacaaga

SEQ ID NO: 420389 - DNA, 19 bp, Homo sapiens
  siRNA target sequence for SDK1 (NM_152744.2,4469-4487).
ccggagtccgcatacatct

SEQ ID NO: 420390 - DNA, 19 bp, Homo sapiens
  siRNA target sequence for SDK1 (NM_152744.2,4470-4488).
cggagtccgcatacatctt

SEQ ID NO: 420391 - DNA, 19 bp, Homo sapiens
  siRNA target sequence for SDK1 (NM_152744.2,4472-4490).
gagtccgcatacatcttca

SEQ ID NO: 420392 - DNA, 19 bp, Homo sapiens
  siRNA target sequence for SDK1 (NM_152744.2,4976-4994).
ggatacaggatctactaca

SEQ ID NO: 420393 - DNA, 19 bp, Homo sapiens
  siRNA target sequence for SDK1 (NM_152744.2,5038-5056).
gctcaaaaaccctatagct

SEQ ID NO: 420394 - DNA, 19 bp, Homo sapiens
  siRNA target sequence for SDK1 (NM_152744.2,5039-5057).
ctcaaaaaccctatagctt

SEQ ID NO: 420395 - DNA, 19 bp, Homo sapiens
  siRNA target sequence for SDK1 (NM_152744.2,5116-5134).
gacgatgtgtgaactaaca

SEQ ID NO: 420396 - DNA, 19 bp, Homo sapiens
  siRNA target sequence for SDK1 (NM_152744.2,5118-5136).
cgatgtgtgaactaacaca

SEQ ID NO: 420397 - DNA, 19 bp, Homo sapiens
  siRNA target sequence for SDK1 (NM_152744.2,5119-5137).
gatgtgtgaactaacacat

SEQ ID NO: 420398 - DNA, 19 bp, Homo sapiens
  siRNA target sequence for SDK1 (NM_152744.2,5122-5140).
gtgtgaactaacacattta

SEQ ID NO: 420399 - DNA, 19 bp, Homo sapiens
  siRNA target sequence for SDK1 (NM_152744.2,5124-5142).
gtgaactaacacatttaaa

SEQ ID NO: 420400 - DNA, 19 bp, Homo sapiens
  siRNA target sequence for SDK1 (NM_152744.2,5342-5360).
caaggctacaagatttact

SEQ ID NO: 420401 - DNA, 19 bp, Homo sapiens
  siRNA target sequence for SDK1 (NM_152744.2,5491-5509).
cggagatggacctaagagt

SEQ ID NO: 420402 - DNA, 19 bp, Homo sapiens
  siRNA target sequence for SDK1 (NM_152744.2,5564-5582).
gcgttctcagaaataacct

SEQ ID NO: 420403 - DNA, 19 bp, Homo sapiens
  siRNA target sequence for SDK1 (NM_152744.2,5748-5766).
ccaagggagtgacctattt

SEQ ID NO: 420404 - DNA, 19 bp, Homo sapiens
  siRNA target sequence for SDK1 (NM_152744.2,5931-5949).
ctaccacgggctatgtgat

SEQ ID NO: 420405 - DNA, 19 bp, Homo sapiens
  siRNA target sequence for SDK1 (NM_152744.2,6227-6245).
gtcctgcacgggcagaata

SEQ ID NO: 420406 - DNA, 19 bp, Homo sapiens
  siRNA target sequence for SDK1 (NM_152744.2,6230-6248).
ctgcacgggcagaataaga

SEQ ID NO: 420407 - DNA, 19 bp, Homo sapiens
  siRNA target sequence for SDK1 (NM_152744.2,6233-6251).
cacgggcagaataagaagt

SEQ ID NO: 420408 - DNA, 19 bp, Homo sapiens
  siRNA target sequence for SDK1 (NM_152744.2,6235-6253).
cgggcagaataagaagtat

SEQ ID NO: 420409 - DNA, 19 bp, Homo sapiens
  siRNA target sequence for SDK1 (NM_152744.2,6236-6254).
gggcagaataagaagtata

SEQ ID NO: 420410 - DNA, 19 bp, Homo sapiens
  siRNA target sequence for SDK1 (NM_152744.2,6237-6255).
ggcagaataagaagtataa

SEQ ID NO: 420411 - DNA, 19 bp, Homo sapiens
  siRNA target sequence for SDK1 (NM_152744.2,6307-6325).
ggacaacggaggatttgct

SEQ ID NO: 420412 - DNA, 19 bp, Homo sapiens
  siRNA target sequence for SDK1 (NM_152744.2,6342-6360).
gccgccacctcaatgtcaa

SEQ ID NO: 420413 - DNA, 19 bp, Homo sapiens
  siRNA target sequence for SDK1 (NM_152744.2,6501-6519).
cagatgcatcagaatctga

SEQ ID NO: 420414 - DNA, 19 bp, Homo sapiens
  siRNA target sequence for NXPH1 (NM_152745.1,922-940).
cgtgctggtacgtgctttt

SEQ ID NO: 420415 - DNA, 19 bp, Homo sapiens
  siRNA target sequence for NXPH1 (NM_152745.1,925-943).
gctggtacgtgcttttcct

SEQ ID NO: 420416 - DNA, 19 bp, Homo sapiens
  siRNA target sequence for NXPH1 (NM_152745.1,989-1007).
cggtggaaagtcagaactt

SEQ ID NO: 420417 - DNA, 19 bp, Homo sapiens
  siRNA target sequence for NXPH1 (NM_152745.1,1024-1042).
gcaaatccacactaaagca

SEQ ID NO: 420418 - DNA, 19 bp, Homo sapiens
  siRNA target sequence for NXPH1 (NM_152745.1,1081-1099).
gactcctgtcacagacttt

SEQ ID NO: 420419 - DNA, 19 bp, Homo sapiens
  siRNA target sequence for NXPH1 (NM_152745.1,1085-1103).
cctgtcacagacttttcgt

SEQ ID NO: 420420 - DNA, 19 bp, Homo sapiens
  siRNA target sequence for NXPH1 (NM_152745.1,1101-1119).
cgtggcaaagagaatgata

SEQ ID NO: 420421 - DNA, 19 bp, Homo sapiens
  siRNA target sequence for NXPH1 (NM_152745.1,1120-1138).
cagatttggacctgagata

SEQ ID NO: 420422 - DNA, 19 bp, Homo sapiens
  siRNA target sequence for NXPH1 (NM_152745.1,1140-1158).
gacaccccagaaccttatt

SEQ ID NO: 420423 - DNA, 19 bp, Homo sapiens
  siRNA target sequence for NXPH1 (NM_152745.1,1239-1257).
gttaaaacgggcaagttta

SEQ ID NO: 420424 - DNA, 19 bp, Homo sapiens
  siRNA target sequence for NXPH1 (NM_152745.1,1246-1264).
cgggcaagtttaagaaaat

SEQ ID NO: 420425 - DNA, 19 bp, Homo sapiens
  siRNA target sequence for NXPH1 (NM_152745.1,1307-1325).
gctgaacctgttgataact

SEQ ID NO: 420426 - DNA, 19 bp, Homo sapiens
  siRNA target sequence for NXPH1 (NM_152745.1,1316-1334).
gttgataactgggaaaatt

SEQ ID NO: 420427 - DNA, 19 bp, Homo sapiens
  siRNA target sequence for NXPH1 (NM_152745.1,1345-1363).
gcaatgggacatttagtgt

SEQ ID NO: 420428 - DNA, 19 bp, Homo sapiens
  siRNA target sequence for NXPH1 (NM_152745.1,1346-1364).
caatgggacatttagtgtt

SEQ ID NO: 420429 - DNA, 19 bp, Homo sapiens
  siRNA target sequence for NXPH1 (NM_152745.1,1408-1426).
gcttggtaccccctacaaa

SEQ ID NO: 420430 - DNA, 19 bp, Homo sapiens
  siRNA target sequence for NXPH1 (NM_152745.1,1409-1427).
cttggtaccccctacaaaa

SEQ ID NO: 420431 - DNA, 19 bp, Homo sapiens
  siRNA target sequence for NXPH1 (NM_152745.1,1420-1438).
ctacaaaaatcgtggaatt

SEQ ID NO: 420432 - DNA, 19 bp, Homo sapiens
  siRNA target sequence for NXPH1 (NM_152745.1,1423-1441).
caaaaatcgtggaatttga

SEQ ID NO: 420433 - DNA, 19 bp, Homo sapiens
  siRNA target sequence for NXPH1 (NM_152745.1,1447-1465).
cacaacaaaccgtgattga

SEQ ID NO: 420434 - DNA, 19 bp, Homo sapiens
  siRNA target sequence for NXPH1 (NM_152745.1,1467-1485).
gccaaagattccaagtctt

SEQ ID NO: 420435 - DNA, 19 bp, Homo sapiens
  siRNA target sequence for NXPH1 (NM_152745.1,1473-1491).
gattccaagtcttttaatt

SEQ ID NO: 420436 - DNA, 19 bp, Homo sapiens
  siRNA target sequence for NXPH1 (NM_152745.1,1495-1513).
gcattgaatatgaaaaggt

SEQ ID NO: 420437 - DNA, 19 bp, Homo sapiens
  siRNA target sequence for NXPH1 (NM_152745.1,1529-1547).
gaacacactctgcaactat

SEQ ID NO: 420438 - DNA, 19 bp, Homo sapiens
  siRNA target sequence for NXPH1 (NM_152745.1,1540-1558).
gcaactatgacccttcaaa

SEQ ID NO: 420439 - DNA, 19 bp, Homo sapiens
  siRNA target sequence for NXPH1 (NM_152745.1,1541-1559).
caactatgacccttcaaaa

SEQ ID NO: 420440 - DNA, 19 bp, Homo sapiens
  siRNA target sequence for NXPH1 (NM_152745.1,1639-1657).
ccttttatagtacagatta

SEQ ID NO: 420441 - DNA, 19 bp, Homo sapiens
  siRNA target sequence for NXPH1 (NM_152745.1,1640-1658).
cttttatagtacagattat

SEQ ID NO: 420442 - DNA, 19 bp, Homo sapiens
  siRNA target sequence for DKFZp586I1420 (NM_152747.1,1807-1825).
ggacaagtttgtcatagat

SEQ ID NO: 420443 - DNA, 19 bp, Homo sapiens
  siRNA target sequence for DKFZp586I1420 (NM_152747.1,1867-1885).
cttggtggttctaagaaat

SEQ ID NO: 420444 - DNA, 19 bp, Homo sapiens
  siRNA target sequence for DKFZp586I1420 (NM_152747.1,1989-2007).
gactggataggcagatcaa

SEQ ID NO: 420445 - DNA, 19 bp, Homo sapiens
  siRNA target sequence for DKFZp586I1420 (NM_152747.1,1991-2009).
ctggataggcagatcaaga

SEQ ID NO: 420446 - DNA, 19 bp, Homo sapiens
  siRNA target sequence for DKFZp586I1420 (NM_152747.1,2132-2150).
gggactgtgtacctttatt

SEQ ID NO: 420447 - DNA, 19 bp, Homo sapiens
  siRNA target sequence for DKFZp586I1420 (NM_152747.1,2134-2152).
gactgtgtacctttattca

SEQ ID NO: 420448 - DNA, 19 bp, Homo sapiens
  siRNA target sequence for FLJ31340 (NM_152748.2,379-397).
ccaggtaatgctgaaatca

SEQ ID NO: 420449 - DNA, 19 bp, Homo sapiens
  siRNA target sequence for FLJ31340 (NM_152748.2,461-479).
gtgctggtaaaaaatatca

SEQ ID NO: 420450 - DNA, 19 bp, Homo sapiens
  siRNA target sequence for FLJ31340 (NM_152748.2,485-503).
gaaggggtggcgtacacat

SEQ ID NO: 420451 - DNA, 19 bp, Homo sapiens
  siRNA target sequence for FLJ31340 (NM_152748.2,493-511).
ggcgtacacatcagaatgt

SEQ ID NO: 420452 - DNA, 19 bp, Homo sapiens
  siRNA target sequence for FLJ31340 (NM_152748.2,494-512).
gcgtacacatcagaatgtt

SEQ ID NO: 420453 - DNA, 19 bp, Homo sapiens
  siRNA target sequence for FLJ31340 (NM_152748.2,618-636).
gtaaagacgactctcaatt

SEQ ID NO: 420454 - DNA, 19 bp, Homo sapiens
  siRNA target sequence for FLJ31340 (NM_152748.2,670-688).
ccctccctgtaccacaaaa

SEQ ID NO: 420455 - DNA, 19 bp, Homo sapiens
  siRNA target sequence for FLJ31340 (NM_152748.2,676-694).
ctgtaccacaaaagactat

SEQ ID NO: 420456 - DNA, 19 bp, Homo sapiens
  siRNA target sequence for FLJ31340 (NM_152748.2,703-721).
ccatactccatgtgatgaa

SEQ ID NO: 420457 - DNA, 19 bp, Homo sapiens
  siRNA target sequence for FLJ31340 (NM_152748.2,829-847).
gccttgcaaccctggattt

SEQ ID NO: 420458 - DNA, 19 bp, Homo sapiens
  siRNA target sequence for FLJ31340 (NM_152748.2,838-856).
ccctggattttataacaat

SEQ ID NO: 420459 - DNA, 19 bp, Homo sapiens
  siRNA target sequence for FLJ31340 (NM_152748.2,941-959).
cctgcacttggctttgaat

SEQ ID NO: 420460 - DNA, 19 bp, Homo sapiens
  siRNA target sequence for FLJ31340 (NM_152748.2,942-960).
ctgcacttggctttgaata

SEQ ID NO: 420461 - DNA, 19 bp, Homo sapiens
  siRNA target sequence for FLJ31340 (NM_152748.2,944-962).
gcacttggctttgaatata

SEQ ID NO: 420462 - DNA, 19 bp, Homo sapiens
  siRNA target sequence for FLJ31340 (NM_152748.2,945-963).
cacttggctttgaatataa

SEQ ID NO: 420463 - DNA, 19 bp, Homo sapiens
  siRNA target sequence for FLJ31340 (NM_152748.2,947-965).
cttggctttgaatataaat

SEQ ID NO: 420464 - DNA, 19 bp, Homo sapiens
  siRNA target sequence for FLJ31340 (NM_152748.2,1083-1101).
gttctgacaatgattacct

SEQ ID NO: 420465 - DNA, 19 bp, Homo sapiens
  siRNA target sequence for FLJ31340 (NM_152748.2,1111-1129).
cttgcatatcccaggattt

SEQ ID NO: 420466 - DNA, 19 bp, Homo sapiens
  siRNA target sequence for FLJ31340 (NM_152748.2,1114-1132).
gcatatcccaggatttaaa

SEQ ID NO: 420467 - DNA, 19 bp, Homo sapiens
  siRNA target sequence for FLJ31340 (NM_152748.2,1295-1313).
gcttacacccatatcatct

SEQ ID NO: 420468 - DNA, 19 bp, Homo sapiens
  siRNA target sequence for FLJ31340 (NM_152748.2,1302-1320).
cccatatcatcttcaagaa

SEQ ID NO: 420469 - DNA, 19 bp, Homo sapiens
  siRNA target sequence for FLJ31340 (NM_152748.2,1303-1321).
ccatatcatcttcaagaat

SEQ ID NO: 420470 - DNA, 19 bp, Homo sapiens
  siRNA target sequence for FLJ31340 (NM_152748.2,1312-1330).
cttcaagaatgcaactttt

SEQ ID NO: 420471 - DNA, 19 bp, Homo sapiens
  siRNA target sequence for FLJ31340 (NM_152748.2,1342-1360).
ggcattccagagaactaat

SEQ ID NO: 420472 - DNA, 19 bp, Homo sapiens
  siRNA target sequence for FLJ31340 (NM_152748.2,1356-1374).
ctaatcagggtcaagataa

SEQ ID NO: 420473 - DNA, 19 bp, Homo sapiens
  siRNA target sequence for FLJ31340 (NM_152748.2,1370-1388).
gataatagacggttcatca

SEQ ID NO: 420474 - DNA, 19 bp, Homo sapiens
  siRNA target sequence for FLJ31340 (NM_152748.2,1377-1395).
gacggttcatcaatgacat

SEQ ID NO: 420475 - DNA, 19 bp, Homo sapiens
  siRNA target sequence for FLJ31340 (NM_152748.2,1399-1417).
gaagatttattctatcaca

SEQ ID NO: 420476 - DNA, 19 bp, Homo sapiens
  siRNA target sequence for FLJ31340 (NM_152748.2,1563-1581).
cctacctgtccatacatca

SEQ ID NO: 420477 - DNA, 19 bp, Homo sapiens
  siRNA target sequence for FLJ31340 (NM_152748.2,1591-1609).
caaagaggcttgtattcca

SEQ ID NO: 420478 - DNA, 19 bp, Homo sapiens
  siRNA target sequence for FLJ31340 (NM_152748.2,1636-1654).
ggaccattcggtttgctat

SEQ ID NO: 420479 - DNA, 19 bp, Homo sapiens
  siRNA target sequence for FLJ31340 (NM_152748.2,1637-1655).
gaccattcggtttgctata

SEQ ID NO: 420480 - DNA, 19 bp, Homo sapiens
  siRNA target sequence for FLJ31340 (NM_152748.2,1639-1657).
ccattcggtttgctatagt

SEQ ID NO: 420481 - DNA, 19 bp, Homo sapiens
  siRNA target sequence for FLJ31340 (NM_152748.2,1662-1680).
gctttttctaccatgaaaa

SEQ ID NO: 420482 - DNA, 19 bp, Homo sapiens
  siRNA target sequence for FLJ31340 (NM_152748.2,1719-1737).
gcagtgtgggctcattaat

SEQ ID NO: 420483 - DNA, 19 bp, Homo sapiens
  siRNA target sequence for FLJ31340 (NM_152748.2,1722-1740).
gtgtgggctcattaatgaa

SEQ ID NO: 420484 - DNA, 19 bp, Homo sapiens
  siRNA target sequence for FLJ31340 (NM_152748.2,1822-1840).
ggctctctgtaccaacaat

SEQ ID NO: 420485 - DNA, 19 bp, Homo sapiens
  siRNA target sequence for FLJ31340 (NM_152748.2,1824-1842).
ctctctgtaccaacaatat

SEQ ID NO: 420486 - DNA, 19 bp, Homo sapiens
  siRNA target sequence for FLJ31340 (NM_152748.2,1834-1852).
caacaatataacagacttt

SEQ ID NO: 420487 - DNA, 19 bp, Homo sapiens
  siRNA target sequence for FLJ31340 (NM_152748.2,1845-1863).
cagactttacagtaaaaga

SEQ ID NO: 420488 - DNA, 19 bp, Homo sapiens
  siRNA target sequence for FLJ31340 (NM_152748.2,1871-1889).
gcagggtcagatgattaca

SEQ ID NO: 420489 - DNA, 19 bp, Homo sapiens
  siRNA target sequence for FLJ31340 (NM_152748.2,1874-1892).
gggtcagatgattacacaa

SEQ ID NO: 420490 - DNA, 19 bp, Homo sapiens
  siRNA target sequence for FLJ31340 (NM_152748.2,1876-1894).
gtcagatgattacacaaat

SEQ ID NO: 420491 - DNA, 19 bp, Homo sapiens
  siRNA target sequence for FLJ31340 (NM_152748.2,1915-1933).
ccagtcaacaattattcct

SEQ ID NO: 420492 - DNA, 19 bp, Homo sapiens
  siRNA target sequence for FLJ31340 (NM_152748.2,1916-1934).
cagtcaacaattattcctt

SEQ ID NO: 420493 - DNA, 19 bp, Homo sapiens
  siRNA target sequence for FLJ31340 (NM_152748.2,1951-1969).
ccgagcagccttatcatca

SEQ ID NO: 420494 - DNA, 19 bp, Homo sapiens
  siRNA target sequence for FLJ31340 (NM_152748.2,1955-1973).
gcagccttatcatcacaat

SEQ ID NO: 420495 - DNA, 19 bp, Homo sapiens
  siRNA target sequence for FLJ31340 (NM_152748.2,1959-1977).
ccttatcatcacaatccat

SEQ ID NO: 420496 - DNA, 19 bp, Homo sapiens
  siRNA target sequence for FLJ31340 (NM_152748.2,1975-1993).
catcattctggcagataca

SEQ ID NO: 420497 - DNA, 19 bp, Homo sapiens
  siRNA target sequence for FLJ31340 (NM_152748.2,2132-2150).
cgatcaactgctgtgaaaa

SEQ ID NO: 420498 - DNA, 19 bp, Homo sapiens
  siRNA target sequence for FLJ31340 (NM_152748.2,2152-2170).
gaggtgtaatcctactaaa

SEQ ID NO: 420499 - DNA, 19 bp, Homo sapiens
  siRNA target sequence for FLJ31340 (NM_152748.2,2222-2240).
gatgggtgtacgttctatt

SEQ ID NO: 420500 - DNA, 19 bp, Homo sapiens
  siRNA target sequence for FLJ31340 (NM_152748.2,2226-2244).
ggtgtacgttctatttcct

SEQ ID NO: 420501 - DNA, 19 bp, Homo sapiens
  siRNA target sequence for FLJ31340 (NM_152748.2,2307-2325).
cctgcaagagaggatttca

SEQ ID NO: 420502 - DNA, 19 bp, Homo sapiens
  siRNA target sequence for FLJ31340 (NM_152748.2,2324-2342).
caggaaaccttgtatgtgt

SEQ ID NO: 420503 - DNA, 19 bp, Homo sapiens
  siRNA target sequence for FLJ31340 (NM_152748.2,2332-2350).
cttgtatgtgtggaatgaa

SEQ ID NO: 420504 - DNA, 19 bp, Homo sapiens
  siRNA target sequence for FLJ31340 (NM_152748.2,2339-2357).
gtgtggaatgaacctaaat

SEQ ID NO: 420505 - DNA, 19 bp, Homo sapiens
  siRNA target sequence for FLJ31340 (NM_152748.2,2348-2366).
gaacctaaatggtgcatta

SEQ ID NO: 420506 - DNA, 19 bp, Homo sapiens
  siRNA target sequence for FLJ31340 (NM_152748.2,2400-2418).
cctgtgaaacggttgactt

SEQ ID NO: 420507 - DNA, 19 bp, Homo sapiens
  siRNA target sequence for FLJ31340 (NM_152748.2,2437-2455).
cggtgtgggagcttttact

SEQ ID NO: 420508 - DNA, 19 bp, Homo sapiens
  siRNA target sequence for FLJ31340 (NM_152748.2,2471-2489).
gctctgacctgctacttct

SEQ ID NO: 420509 - DNA, 19 bp, Homo sapiens
  siRNA target sequence for FLJ31340 (NM_152748.2,2531-2549).
gtaatgacgactaactcaa

SEQ ID NO: 420510 - DNA, 19 bp, Homo sapiens
  siRNA target sequence for FLJ31340 (NM_152748.2,2571-2589).
cagacagttgtgctatcat

SEQ ID NO: 420511 - DNA, 19 bp, Homo sapiens
  siRNA target sequence for FLJ31340 (NM_152748.2,2618-2636).
gtatattccaataaacagt

SEQ ID NO: 420512 - DNA, 19 bp, Homo sapiens
  siRNA target sequence for FLJ31340 (NM_152748.2,2637-2655).
cactactaggaaaactcaa

SEQ ID NO: 420513 - DNA, 19 bp, Homo sapiens
  siRNA target sequence for FLJ31340 (NM_152748.2,2639-2657).
ctactaggaaaactcaaat

SEQ ID NO: 420514 - DNA, 19 bp, Homo sapiens
  siRNA target sequence for FLJ31340 (NM_152748.2,2710-2728).
ctcaagatccccaaatata

SEQ ID NO: 420515 - DNA, 19 bp, Homo sapiens
  siRNA target sequence for MGC33190 (NM_152749.2,195-213).
ctgctccgacaatgtagat

SEQ ID NO: 420516 - DNA, 19 bp, Homo sapiens
  siRNA target sequence for MGC33190 (NM_152749.2,197-215).
gctccgacaatgtagattt

SEQ ID NO: 420517 - DNA, 19 bp, Homo sapiens
  siRNA target sequence for MGC33190 (NM_152749.2,198-216).
ctccgacaatgtagattta

SEQ ID NO: 420518 - DNA, 19 bp, Homo sapiens
  siRNA target sequence for MGC33190 (NM_152749.2,200-218).
ccgacaatgtagatttaga

SEQ ID NO: 420519 - DNA, 19 bp, Homo sapiens
  siRNA target sequence for MGC33190 (NM_152749.2,201-219).
cgacaatgtagatttagaa

SEQ ID NO: 420520 - DNA, 19 bp, Homo sapiens
  siRNA target sequence for MGC33190 (NM_152749.2,249-267).
ggaggttatgaggcttaat

SEQ ID NO: 420521 - DNA, 19 bp, Homo sapiens
  siRNA target sequence for MGC33190 (NM_152749.2,302-320).
cacatgacgacttctatct

SEQ ID NO: 420522 - DNA, 19 bp, Homo sapiens
  siRNA target sequence for MGC33190 (NM_152749.2,377-395).
gcgggagaaagcaagacaa

SEQ ID NO: 420523 - DNA, 19 bp, Homo sapiens
  siRNA target sequence for FLJ23834 (NM_152750.2,129-147).
gagaagcactacacctaat

SEQ ID NO: 420524 - DNA, 19 bp, Homo sapiens
  siRNA target sequence for FLJ23834 (NM_152750.2,193-211).
gacttcagtgcacaagttt

SEQ ID NO: 420525 - DNA, 19 bp, Homo sapiens
  siRNA target sequence for FLJ23834 (NM_152750.2,249-267).
caggatttccccagatagt

SEQ ID NO: 420526 - DNA, 19 bp, Homo sapiens
  siRNA target sequence for FLJ23834 (NM_152750.2,251-269).
ggatttccccagatagtca

SEQ ID NO: 420527 - DNA, 19 bp, Homo sapiens
  siRNA target sequence for FLJ23834 (NM_152750.2,252-270).
gatttccccagatagtcaa

SEQ ID NO: 420528 - DNA, 19 bp, Homo sapiens
  siRNA target sequence for FLJ23834 (NM_152750.2,287-305).
gaagcttttagggtgaatt

SEQ ID NO: 420529 - DNA, 19 bp, Homo sapiens
  siRNA target sequence for FLJ23834 (NM_152750.2,307-325).
gctgtcaggcacctacttt

SEQ ID NO: 420530 - DNA, 19 bp, Homo sapiens
  siRNA target sequence for FLJ23834 (NM_152750.2,341-359).
gggatggaacaactagatt

SEQ ID NO: 420531 - DNA, 19 bp, Homo sapiens
  siRNA target sequence for FLJ23834 (NM_152750.2,346-364).
ggaacaactagattttgaa

SEQ ID NO: 420532 - DNA, 19 bp, Homo sapiens
  siRNA target sequence for FLJ23834 (NM_152750.2,366-384).
caggaccaaacatatttga

SEQ ID NO: 420533 - DNA, 19 bp, Homo sapiens
  siRNA target sequence for FLJ23834 (NM_152750.2,383-401).
gatttgcagatttatgtga

SEQ ID NO: 420534 - DNA, 19 bp, Homo sapiens
  siRNA target sequence for FLJ23834 (NM_152750.2,436-454).
gactgtccaggtaacagat

SEQ ID NO: 420535 - DNA, 19 bp, Homo sapiens
  siRNA target sequence for FLJ23834 (NM_152750.2,955-973).
ccaagtggcccaaaggata

SEQ ID NO: 420536 - DNA, 19 bp, Homo sapiens
  siRNA target sequence for FLJ23834 (NM_152750.2,1014-1032).
ccctggaagttctagtgaa

SEQ ID NO: 420537 - DNA, 19 bp, Homo sapiens
  siRNA target sequence for FLJ23834 (NM_152750.2,1106-1124).
gccacatgccaaaagttca

SEQ ID NO: 420538 - DNA, 19 bp, Homo sapiens
  siRNA target sequence for FLJ23834 (NM_152750.2,1172-1190).
cttgacctaaacaagttct

SEQ ID NO: 420539 - DNA, 19 bp, Homo sapiens
  siRNA target sequence for FLJ23834 (NM_152750.2,1214-1232).
ccaaacaacagattcaact

SEQ ID NO: 420540 - DNA, 19 bp, Homo sapiens
  siRNA target sequence for FLJ23834 (NM_152750.2,1253-1271).
gggagcggcagcagatttt

SEQ ID NO: 420541 - DNA, 19 bp, Homo sapiens
  siRNA target sequence for FLJ23834 (NM_152750.2,1255-1273).
gagcggcagcagattttta

SEQ ID NO: 420542 - DNA, 19 bp, Homo sapiens
  siRNA target sequence for FLJ23834 (NM_152750.2,1310-1328).
ggtgatctagactacgaaa

SEQ ID NO: 420543 - DNA, 19 bp, Homo sapiens
  siRNA target sequence for FLJ23834 (NM_152750.2,1311-1329).
gtgatctagactacgaaaa

SEQ ID NO: 420544 - DNA, 19 bp, Homo sapiens
  siRNA target sequence for FLJ23834 (NM_152750.2,1316-1334).
ctagactacgaaaatccaa

SEQ ID NO: 420545 - DNA, 19 bp, Homo sapiens
  siRNA target sequence for FLJ23834 (NM_152750.2,1324-1342).
cgaaaatccaagtaaccta

SEQ ID NO: 420546 - DNA, 19 bp, Homo sapiens
  siRNA target sequence for FLJ23834 (NM_152750.2,1339-1357).
cctagcagccggcaataaa

SEQ ID NO: 420547 - DNA, 19 bp, Homo sapiens
  siRNA target sequence for FLJ23834 (NM_152750.2,1340-1358).
ctagcagccggcaataaat

SEQ ID NO: 420548 - DNA, 19 bp, Homo sapiens
  siRNA target sequence for FLJ23834 (NM_152750.2,1343-1361).
gcagccggcaataaatata

SEQ ID NO: 420549 - DNA, 19 bp, Homo sapiens
  siRNA target sequence for FLJ23834 (NM_152750.2,1395-1413).
cttactataaaaataacgt

SEQ ID NO: 420550 - DNA, 19 bp, Homo sapiens
  siRNA target sequence for FLJ23834 (NM_152750.2,1411-1429).
cgtctacgtttatatccta

SEQ ID NO: 420551 - DNA, 19 bp, Homo sapiens
  siRNA target sequence for FLJ23834 (NM_152750.2,1412-1430).
gtctacgtttatatcctaa

SEQ ID NO: 420552 - DNA, 19 bp, Homo sapiens
  siRNA target sequence for FLJ23834 (NM_152750.2,1463-1481).
gataggccatcctatgtat

SEQ ID NO: 420553 - DNA, 19 bp, Homo sapiens
  siRNA target sequence for FLJ23834 (NM_152750.2,1523-1541).
caggtgcgagccactgata

SEQ ID NO: 420554 - DNA, 19 bp, Homo sapiens
  siRNA target sequence for FLJ23834 (NM_152750.2,1525-1543).
ggtgcgagccactgataaa

SEQ ID NO: 420555 - DNA, 19 bp, Homo sapiens
  siRNA target sequence for FLJ23834 (NM_152750.2,1865-1883).
gattccagccccagatctt

SEQ ID NO: 420556 - DNA, 19 bp, Homo sapiens
  siRNA target sequence for FLJ23834 (NM_152750.2,1878-1896).
gatctttccgttattccat

SEQ ID NO: 420557 - DNA, 19 bp, Homo sapiens
  siRNA target sequence for FLJ23834 (NM_152750.2,1899-1917).
gcccaggtaacgtcaacaa

SEQ ID NO: 420558 - DNA, 19 bp, Homo sapiens
  siRNA target sequence for FLJ23834 (NM_152750.2,1900-1918).
cccaggtaacgtcaacaat

SEQ ID NO: 420559 - DNA, 19 bp, Homo sapiens
  siRNA target sequence for FLJ23834 (NM_152750.2,1904-1922).
ggtaacgtcaacaatcatt

SEQ ID NO: 420560 - DNA, 19 bp, Homo sapiens
  siRNA target sequence for FLJ23834 (NM_152750.2,1905-1923).
gtaacgtcaacaatcattt

SEQ ID NO: 420561 - DNA, 19 bp, Homo sapiens
  siRNA target sequence for FLJ23834 (NM_152750.2,1989-2007).
ctggtgggtttgataagat

SEQ ID NO: 420562 - DNA, 19 bp, Homo sapiens
  siRNA target sequence for FLJ23834 (NM_152750.2,1991-2009).
ggtgggtttgataagatct

SEQ ID NO: 420563 - DNA, 19 bp, Homo sapiens
  siRNA target sequence for FLJ23834 (NM_152750.2,2010-2028).
gggactacaagctacttgt

SEQ ID NO: 420564 - DNA, 19 bp, Homo sapiens
  siRNA target sequence for FLJ23834 (NM_152750.2,2100-2118).
cactgagtattaaagtcat

SEQ ID NO: 420565 - DNA, 19 bp, Homo sapiens
  siRNA target sequence for FLJ23834 (NM_152750.2,2121-2139).
cccacccaaccactatcat

SEQ ID NO: 420566 - DNA, 19 bp, Homo sapiens
  siRNA target sequence for FLJ23834 (NM_152750.2,2123-2141).
cacccaaccactatcatca

SEQ ID NO: 420567 - DNA, 19 bp, Homo sapiens
  siRNA target sequence for FLJ23834 (NM_152750.2,2173-2191).
ggtcctgaggaaaaacgtt

SEQ ID NO: 420568 - DNA, 19 bp, Homo sapiens
  siRNA target sequence for FLJ23834 (NM_152750.2,2174-2192).
gtcctgaggaaaaacgttt

SEQ ID NO: 420569 - DNA, 19 bp, Homo sapiens
  siRNA target sequence for FLJ23834 (NM_152750.2,2208-2226).
ggtacgtgccgtttgtcat

SEQ ID NO: 420570 - DNA, 19 bp, Homo sapiens
  siRNA target sequence for FLJ23834 (NM_152750.2,2213-2231).
gtgccgtttgtcatcactt

SEQ ID NO: 420571 - DNA, 19 bp, Homo sapiens
  siRNA target sequence for FLJ23834 (NM_152750.2,2372-2390).
gacgtcgtggtggaaacta

SEQ ID NO: 420572 - DNA, 19 bp, Homo sapiens
  siRNA target sequence for FLJ23834 (NM_152750.2,2388-2406).
ctatccagatgaacactat

SEQ ID NO: 420573 - DNA, 19 bp, Homo sapiens
  siRNA target sequence for FLJ23834 (NM_152750.2,2434-2452).
gaccggggaaacatatgaa

SEQ ID NO: 420574 - DNA, 19 bp, Homo sapiens
  siRNA target sequence for FLJ23834 (NM_152750.2,2436-2454).
ccggggaaacatatgaatt

SEQ ID NO: 420575 - DNA, 19 bp, Homo sapiens
  siRNA target sequence for FLJ23834 (NM_152750.2,2669-2687).
ggcaacccaaagaacagaa

SEQ ID NO: 420576 - DNA, 19 bp, Homo sapiens
  siRNA target sequence for C10orf30 (NM_152751.1,345-363).
cagcactgggcggatctat

SEQ ID NO: 420577 - DNA, 19 bp, Homo sapiens
  siRNA target sequence for C10orf30 (NM_152751.1,347-365).
gcactgggcggatctatca

SEQ ID NO: 420578 - DNA, 19 bp, Homo sapiens
  siRNA target sequence for C10orf30 (NM_152751.1,531-549).
gtatggcacccgttctaga

SEQ ID NO: 420579 - DNA, 19 bp, Homo sapiens
  siRNA target sequence for C10orf30 (NM_152751.1,579-597).
gagctccaatggagaactt

SEQ ID NO: 420580 - DNA, 19 bp, Homo sapiens
  siRNA target sequence for C10orf30 (NM_152751.1,653-671).
cgttgcaggccattctaca

SEQ ID NO: 420581 - DNA, 19 bp, Homo sapiens
  siRNA target sequence for C10orf30 (NM_152751.1,726-744).
cagacaacaacctccaatt

SEQ ID NO: 420582 - DNA, 19 bp, Homo sapiens
  siRNA target sequence for C10orf30 (NM_152751.1,824-842).
ctcttactgtgaaacagaa

SEQ ID NO: 420583 - DNA, 19 bp, Homo sapiens
  siRNA target sequence for C10orf30 (NM_152751.1,997-1015).
gaaggctttgacgtgttta

SEQ ID NO: 420584 - DNA, 19 bp, Homo sapiens
  siRNA target sequence for C10orf30 (NM_152751.1,1008-1026).
cgtgtttatgcctaaatct

SEQ ID NO: 420585 - DNA, 19 bp, Homo sapiens
  siRNA target sequence for C10orf30 (NM_152751.1,1027-1045).
cagctggactctatattgt

SEQ ID NO: 420586 - DNA, 19 bp, Homo sapiens
  siRNA target sequence for C10orf30 (NM_152751.1,1033-1051).
gactctatattgtcaaact

SEQ ID NO: 420587 - DNA, 19 bp, Homo sapiens
  siRNA target sequence for C10orf30 (NM_152751.1,1142-1160).
ggaaaagaggactcaatga

SEQ ID NO: 420588 - DNA, 19 bp, Homo sapiens
  siRNA target sequence for C10orf30 (NM_152751.1,1218-1236).
gtactgtacagctaaccat

SEQ ID NO: 420589 - DNA, 19 bp, Homo sapiens
  siRNA target sequence for C10orf30 (NM_152751.1,1226-1244).
cagctaaccatgtggataa

SEQ ID NO: 420590 - DNA, 19 bp, Homo sapiens
  siRNA target sequence for C10orf30 (NM_152751.1,1272-1290).
gattctacaggatcaaatt

SEQ ID NO: 420591 - DNA, 19 bp, Homo sapiens
  siRNA target sequence for C10orf30 (NM_152751.1,1329-1347).
gatcgcggacagtgatgaa

SEQ ID NO: 420592 - DNA, 19 bp, Homo sapiens
  siRNA target sequence for C10orf30 (NM_152751.1,1332-1350).
cgcggacagtgatgaaaga

SEQ ID NO: 420593 - DNA, 19 bp, Homo sapiens
  siRNA target sequence for C10orf30 (NM_152751.1,1334-1352).
cggacagtgatgaaagact

SEQ ID NO: 420594 - DNA, 19 bp, Homo sapiens
  siRNA target sequence for C10orf30 (NM_152751.1,1421-1439).
cagcggtgaccctagtctt

SEQ ID NO: 420595 - DNA, 19 bp, Homo sapiens
  siRNA target sequence for C10orf30 (NM_152751.1,1510-1528).
gtgctcctgaacaacctta

SEQ ID NO: 420596 - DNA, 19 bp, Homo sapiens
  siRNA target sequence for C10orf30 (NM_152751.1,1559-1577).
cccaaaccagccaagactt

SEQ ID NO: 420597 - DNA, 19 bp, Homo sapiens
  siRNA target sequence for C10orf30 (NM_152751.1,1573-1591).
gacttcaagcaccattcat

SEQ ID NO: 420598 - DNA, 19 bp, Homo sapiens
  siRNA target sequence for C10orf30 (NM_152751.1,1582-1600).
caccattcattcctcataa

SEQ ID NO: 420599 - DNA, 19 bp, Homo sapiens
  siRNA target sequence for C10orf30 (NM_152751.1,1584-1602).
ccattcattcctcataact

SEQ ID NO: 420600 - DNA, 19 bp, Homo sapiens
  siRNA target sequence for C10orf30 (NM_152751.1,1605-1623).
ggtctcagctacacttcat

SEQ ID NO: 420601 - DNA, 19 bp, Homo sapiens
  siRNA target sequence for C10orf30 (NM_152751.1,1629-1647).
gagagggattcgcaacttt

SEQ ID NO: 420602 - DNA, 19 bp, Homo sapiens
  siRNA target sequence for SEMA3D (NM_152754.1,281-299).
gtatgatgggagaattcct

SEQ ID NO: 420603 - DNA, 19 bp, Homo sapiens
  siRNA target sequence for SEMA3D (NM_152754.1,316-334).
catgtccaagcaaaaccta

SEQ ID NO: 420604 - DNA, 19 bp, Homo sapiens
  siRNA target sequence for SEMA3D (NM_152754.1,331-349).
cctatgacccactgattaa

SEQ ID NO: 420605 - DNA, 19 bp, Homo sapiens
  siRNA target sequence for SEMA3D (NM_152754.1,350-368).
gtccacccgagattttcca

SEQ ID NO: 420606 - DNA, 19 bp, Homo sapiens
  siRNA target sequence for SEMA3D (NM_152754.1,356-374).
ccgagattttccagatgat

SEQ ID NO: 420607 - DNA, 19 bp, Homo sapiens
  siRNA target sequence for SEMA3D (NM_152754.1,393-411).
cggcactctgtgatgtata

SEQ ID NO: 420608 - DNA, 19 bp, Homo sapiens
  siRNA target sequence for SEMA3D (NM_152754.1,396-414).
cactctgtgatgtataagt

SEQ ID NO: 420609 - DNA, 19 bp, Homo sapiens
  siRNA target sequence for SEMA3D (NM_152754.1,432-450).
ggaggaccaacgttcaaga

SEQ ID NO: 420610 - DNA, 19 bp, Homo sapiens
  siRNA target sequence for SEMA3D (NM_152754.1,438-456).
ccaacgttcaagagaatca

SEQ ID NO: 420611 - DNA, 19 bp, Homo sapiens
  siRNA target sequence for SEMA3D (NM_152754.1,439-457).
caacgttcaagagaatcaa

SEQ ID NO: 420612 - DNA, 19 bp, Homo sapiens
  siRNA target sequence for SEMA3D (NM_152754.1,507-525).
gatggccagtacgatgtaa

SEQ ID NO: 420613 - DNA, 19 bp, Homo sapiens
  siRNA target sequence for SEMA3D (NM_152754.1,510-528).
ggccagtacgatgtaatgt

SEQ ID NO: 420614 - DNA, 19 bp, Homo sapiens
  siRNA target sequence for SEMA3D (NM_152754.1,511-529).
gccagtacgatgtaatgtt

SEQ ID NO: 420615 - DNA, 19 bp, Homo sapiens
  siRNA target sequence for SEMA3D (NM_152754.1,512-530).
ccagtacgatgtaatgttt

SEQ ID NO: 420616 - DNA, 19 bp, Homo sapiens
  siRNA target sequence for SEMA3D (NM_152754.1,557-575).
caaagttgtcagcatttca

SEQ ID NO: 420617 - DNA, 19 bp, Homo sapiens
  siRNA target sequence for SEMA3D (NM_152754.1,672-690).
caacaattgtacattggtt

SEQ ID NO: 420618 - DNA, 19 bp, Homo sapiens
  siRNA target sequence for SEMA3D (NM_152754.1,719-737).
gcacagatgcgacacttat

SEQ ID NO: 420619 - DNA, 19 bp, Homo sapiens
  siRNA target sequence for SEMA3D (NM_152754.1,783-801).
gcctgggatggaaatgcat

SEQ ID NO: 420620 - DNA, 19 bp, Homo sapiens
  siRNA target sequence for SEMA3D (NM_152754.1,807-825).
cgatatgctcctacttcta

SEQ ID NO: 420621 - DNA, 19 bp, Homo sapiens
  siRNA target sequence for SEMA3D (NM_152754.1,832-850).
gagctagacgccaagatgt

SEQ ID NO: 420622 - DNA, 19 bp, Homo sapiens
  siRNA target sequence for SEMA3D (NM_152754.1,834-852).
gctagacgccaagatgtaa

SEQ ID NO: 420623 - DNA, 19 bp, Homo sapiens
  siRNA target sequence for SEMA3D (NM_152754.1,838-856).
gacgccaagatgtaaaata

SEQ ID NO: 420624 - DNA, 19 bp, Homo sapiens
  siRNA target sequence for SEMA3D (NM_152754.1,882-900).
gacatcgaagacagcatta

SEQ ID NO: 420625 - DNA, 19 bp, Homo sapiens
  siRNA target sequence for SEMA3D (NM_152754.1,884-902).
catcgaagacagcattagt

SEQ ID NO: 420626 - DNA, 19 bp, Homo sapiens
  siRNA target sequence for SEMA3D (NM_152754.1,887-905).
cgaagacagcattagtcat

SEQ ID NO: 420627 - DNA, 19 bp, Homo sapiens
  siRNA target sequence for SEMA3D (NM_152754.1,933-951).
ggcattgaatttaactcaa

SEQ ID NO: 420628 - DNA, 19 bp, Homo sapiens
  siRNA target sequence for SEMA3D (NM_152754.1,949-967).
caacctttctggaatgtat

SEQ ID NO: 420629 - DNA, 19 bp, Homo sapiens
  siRNA target sequence for SEMA3D (NM_152754.1,953-971).
ctttctggaatgtatacct

SEQ ID NO: 420630 - DNA, 19 bp, Homo sapiens
  siRNA target sequence for SEMA3D (NM_152754.1,957-975).
ctggaatgtatacctaaat

SEQ ID NO: 420631 - DNA, 19 bp, Homo sapiens
  siRNA target sequence for SEMA3D (NM_152754.1,976-994).
cccaacaagcaactattaa

SEQ ID NO: 420632 - DNA, 19 bp, Homo sapiens
  siRNA target sequence for SEMA3D (NM_152754.1,981-999).
caagcaactattaaatggt

SEQ ID NO: 420633 - DNA, 19 bp, Homo sapiens
  siRNA target sequence for SEMA3D (NM_152754.1,984-1002).
gcaactattaaatggtata

SEQ ID NO: 420634 - DNA, 19 bp, Homo sapiens
  siRNA target sequence for SEMA3D (NM_152754.1,988-1006).
ctattaaatggtatatcca

SEQ ID NO: 420635 - DNA, 19 bp, Homo sapiens
  siRNA target sequence for SEMA3D (NM_152754.1,1032-1050).
gagttgaagcccgatgaaa

SEQ ID NO: 420636 - DNA, 19 bp, Homo sapiens
  siRNA target sequence for SEMA3D (NM_152754.1,1034-1052).
gttgaagcccgatgaaaga

SEQ ID NO: 420637 - DNA, 19 bp, Homo sapiens
  siRNA target sequence for SEMA3D (NM_152754.1,1043-1061).
cgatgaaagaatcatcaaa

SEQ ID NO: 420638 - DNA, 19 bp, Homo sapiens
  siRNA target sequence for SEMA3D (NM_152754.1,1063-1081).
cggaatatgggctactgat

SEQ ID NO: 420639 - DNA, 19 bp, Homo sapiens
  siRNA target sequence for SEMA3D (NM_152754.1,1064-1082).
ggaatatgggctactgatt

SEQ ID NO: 420640 - DNA, 19 bp, Homo sapiens
  siRNA target sequence for SEMA3D (NM_152754.1,1072-1090).
ggctactgattcgaagttt

SEQ ID NO: 420641 - DNA, 19 bp, Homo sapiens
  siRNA target sequence for SEMA3D (NM_152754.1,1224-1242).
gggaaggtcaaggatctat

SEQ ID NO: 420642 - DNA, 19 bp, Homo sapiens
  siRNA target sequence for SEMA3D (NM_152754.1,1225-1243).
ggaaggtcaaggatctatt

SEQ ID NO: 420643 - DNA, 19 bp, Homo sapiens
  siRNA target sequence for SEMA3D (NM_152754.1,1250-1268).
gtcacggttgagatacaaa

SEQ ID NO: 420644 - DNA, 19 bp, Homo sapiens
  siRNA target sequence for SEMA3D (NM_152754.1,1252-1270).
cacggttgagatacaaaga

SEQ ID NO: 420645 - DNA, 19 bp, Homo sapiens
  siRNA target sequence for SEMA3D (NM_152754.1,1254-1272).
cggttgagatacaaagact

SEQ ID NO: 420646 - DNA, 19 bp, Homo sapiens
  siRNA target sequence for SEMA3D (NM_152754.1,1269-1287).
gactacatccaaatcctta

SEQ ID NO: 420647 - DNA, 19 bp, Homo sapiens
  siRNA target sequence for SEMA3D (NM_152754.1,1394-1412).
gaagaagaaacgaaatcga

SEQ ID NO: 420648 - DNA, 19 bp, Homo sapiens
  siRNA target sequence for MGC40499 (NM_152755.1,110-128).
cctgtgcggttgggaatat

SEQ ID NO: 420649 - DNA, 19 bp, Homo sapiens
  siRNA target sequence for MGC40499 (NM_152755.1,115-133).
gcggttgggaatattgctt

SEQ ID NO: 420650 - DNA, 19 bp, Homo sapiens
  siRNA target sequence for MGC40499 (NM_152755.1,197-215).
gaacgcttgcccagcaaat

SEQ ID NO: 420651 - DNA, 19 bp, Homo sapiens
  siRNA target sequence for MGC40499 (NM_152755.1,365-383).
gaggccttagagaatttat

SEQ ID NO: 420652 - DNA, 19 bp, Homo sapiens
  siRNA target sequence for MGC40499 (NM_152755.1,369-387).
ccttagagaatttatgtga

SEQ ID NO: 420653 - DNA, 19 bp, Homo sapiens
  siRNA target sequence for MGC40499 (NM_152755.1,388-406).
gcggatcctggactatagt

SEQ ID NO: 420654 - DNA, 19 bp, Homo sapiens
  siRNA target sequence for MGC40499 (NM_152755.1,537-555).
ccagcgtggaggtcacata

SEQ ID NO: 420655 - DNA, 19 bp, Homo sapiens
  siRNA target sequence for MGC40499 (NM_152755.1,629-647).
gagcagcccctacaaaatt

SEQ ID NO: 420656 - DNA, 19 bp, Homo sapiens
  siRNA target sequence for MGC40499 (NM_152755.1,631-649).
gcagcccctacaaaatttt

SEQ ID NO: 420657 - DNA, 19 bp, Homo sapiens
  siRNA target sequence for MGC40499 (NM_152755.1,816-834).
gaagccaccccaaacttga

SEQ ID NO: 420658 - DNA, 19 bp, Homo sapiens
  siRNA target sequence for MGC40499 (NM_152755.1,826-844).
caaacttgaccgagaagat

SEQ ID NO: 420659 - DNA, 19 bp, Homo sapiens
  siRNA target sequence for MGC39830 (NM_152756.1,65-83).
gtacgagggcggaatgaca

SEQ ID NO: 420660 - DNA, 19 bp, Homo sapiens
  siRNA target sequence for MGC39830 (NM_152756.1,112-130).
gacccgagaaccttctgat

SEQ ID NO: 420661 - DNA, 19 bp, Homo sapiens
  siRNA target sequence for MGC39830 (NM_152756.1,114-132).
cccgagaaccttctgataa

SEQ ID NO: 420662 - DNA, 19 bp, Homo sapiens
  siRNA target sequence for MGC39830 (NM_152756.1,162-180).
gattgcagggagtatcaaa

SEQ ID NO: 420663 - DNA, 19 bp, Homo sapiens
  siRNA target sequence for MGC39830 (NM_152756.1,169-187).
gggagtatcaaatatgaga

SEQ ID NO: 420664 - DNA, 19 bp, Homo sapiens
  siRNA target sequence for MGC39830 (NM_152756.1,186-204).
gaaagctaggccatctgaa

SEQ ID NO: 420665 - DNA, 19 bp, Homo sapiens
  siRNA target sequence for MGC39830 (NM_152756.1,194-212).
ggccatctgaataacttta

SEQ ID NO: 420666 - DNA, 19 bp, Homo sapiens
  siRNA target sequence for MGC39830 (NM_152756.1,196-214).
ccatctgaataactttact

SEQ ID NO: 420667 - DNA, 19 bp, Homo sapiens
  siRNA target sequence for MGC39830 (NM_152756.1,197-215).
catctgaataactttacta

SEQ ID NO: 420668 - DNA, 19 bp, Homo sapiens
  siRNA target sequence for MGC39830 (NM_152756.1,262-280).
ctatgaggatatcataatt

SEQ ID NO: 420669 - DNA, 19 bp, Homo sapiens
  siRNA target sequence for MGC39830 (NM_152756.1,282-300).
gtttgcggttagctttatt

SEQ ID NO: 420670 - DNA, 19 bp, Homo sapiens
  siRNA target sequence for MGC39830 (NM_152756.1,286-304).
gcggttagctttattaaat

SEQ ID NO: 420671 - DNA, 19 bp, Homo sapiens
  siRNA target sequence for MGC39830 (NM_152756.1,331-349).
gctacgagcgcttcgatat

SEQ ID NO: 420672 - DNA, 19 bp, Homo sapiens
  siRNA target sequence for MGC39830 (NM_152756.1,335-353).
cgagcgcttcgatatctca

SEQ ID NO: 420673 - DNA, 19 bp, Homo sapiens
  siRNA target sequence for MGC39830 (NM_152756.1,336-354).
gagcgcttcgatatctcat

SEQ ID NO: 420674 - DNA, 19 bp, Homo sapiens
  siRNA target sequence for MGC39830 (NM_152756.1,352-370).
catccaagactccagtatt

SEQ ID NO: 420675 - DNA, 19 bp, Homo sapiens
  siRNA target sequence for MGC39830 (NM_152756.1,411-429).
ctaggtgcattgacataca

SEQ ID NO: 420676 - DNA, 19 bp, Homo sapiens
  siRNA target sequence for MGC39830 (NM_152756.1,414-432).
ggtgcattgacatacaaca

SEQ ID NO: 420677 - DNA, 19 bp, Homo sapiens
  siRNA target sequence for MGC39830 (NM_152756.1,450-468).
ggacacaagcacttcgatt

SEQ ID NO: 420678 - DNA, 19 bp, Homo sapiens
  siRNA target sequence for MGC39830 (NM_152756.1,451-469).
gacacaagcacttcgatta

SEQ ID NO: 420679 - DNA, 19 bp, Homo sapiens
  siRNA target sequence for MGC39830 (NM_152756.1,453-471).
cacaagcacttcgattagt

SEQ ID NO: 420680 - DNA, 19 bp, Homo sapiens
  siRNA target sequence for MGC39830 (NM_152756.1,455-473).
caagcacttcgattagtca

SEQ ID NO: 420681 - DNA, 19 bp, Homo sapiens
  siRNA target sequence for MGC39830 (NM_152756.1,459-477).
cacttcgattagtcagaaa

SEQ ID NO: 420682 - DNA, 19 bp, Homo sapiens
  siRNA target sequence for MGC39830 (NM_152756.1,461-479).
cttcgattagtcagaaaga

SEQ ID NO: 420683 - DNA, 19 bp, Homo sapiens
  siRNA target sequence for MGC39830 (NM_152756.1,464-482).
cgattagtcagaaagatga

SEQ ID NO: 420684 - DNA, 19 bp, Homo sapiens
  siRNA target sequence for MGC39830 (NM_152756.1,510-528).
gttctgtgaccaactcatt

SEQ ID NO: 420685 - DNA, 19 bp, Homo sapiens
  siRNA target sequence for MGC39830 (NM_152756.1,513-531).
ctgtgaccaactcattaat

SEQ ID NO: 420686 - DNA, 19 bp, Homo sapiens
  siRNA target sequence for MGC39830 (NM_152756.1,630-648).
cccttcgaggtggactaaa

SEQ ID NO: 420687 - DNA, 19 bp, Homo sapiens
  siRNA target sequence for MGC39830 (NM_152756.1,641-659).
ggactaaacaccatcttga

SEQ ID NO: 420688 - DNA, 19 bp, Homo sapiens
  siRNA target sequence for MGC39830 (NM_152756.1,665-683).
gtgatcgattgccaattaa

SEQ ID NO: 420689 - DNA, 19 bp, Homo sapiens
  siRNA target sequence for MGC39830 (NM_152756.1,667-685).
gatcgattgccaattaagt

SEQ ID NO: 420690 - DNA, 19 bp, Homo sapiens
  siRNA target sequence for MGC39830 (NM_152756.1,675-693).
gccaattaagtcgaataaa

SEQ ID NO: 420691 - DNA, 19 bp, Homo sapiens
  siRNA target sequence for MGC39830 (NM_152756.1,697-715).
ggccctaattactacaatt

SEQ ID NO: 420692 - DNA, 19 bp, Homo sapiens
  siRNA target sequence for MGC39830 (NM_152756.1,698-716).
gccctaattactacaattt

SEQ ID NO: 420693 - DNA, 19 bp, Homo sapiens
  siRNA target sequence for MGC39830 (NM_152756.1,711-729).
caattttgcaccttcttaa

SEQ ID NO: 420694 - DNA, 19 bp, Homo sapiens
  siRNA target sequence for MGC39830 (NM_152756.1,735-753).
caaagactcgacagtatgt

SEQ ID NO: 420695 - DNA, 19 bp, Homo sapiens
  siRNA target sequence for MGC39830 (NM_152756.1,748-766).
gtatgtgcgagctgatgta

SEQ ID NO: 420696 - DNA, 19 bp, Homo sapiens
  siRNA target sequence for MGC39830 (NM_152756.1,754-772).
gcgagctgatgtagaatta

SEQ ID NO: 420697 - DNA, 19 bp, Homo sapiens
  siRNA target sequence for FLJ30313 (NM_152757.1,669-687).
cgggaaggaccatctgatt

SEQ ID NO: 420698 - DNA, 19 bp, Homo sapiens
  siRNA target sequence for FLJ31657 (NM_152758.2,337-355).
cggttcgattcatcaaaaa

SEQ ID NO: 420699 - DNA, 19 bp, Homo sapiens
  siRNA target sequence for FLJ31657 (NM_152758.2,339-357).
gttcgattcatcaaaaaga

SEQ ID NO: 420700 - DNA, 19 bp, Homo sapiens
  siRNA target sequence for FLJ31657 (NM_152758.2,374-392).
gattttgagccatacttaa

SEQ ID NO: 420701 - DNA, 19 bp, Homo sapiens
  siRNA target sequence for FLJ31657 (NM_152758.2,388-406).
cttaagtagccagacaaat

SEQ ID NO: 420702 - DNA, 19 bp, Homo sapiens
  siRNA target sequence for FLJ31657 (NM_152758.2,437-455).
ccatacatgcctagttact

SEQ ID NO: 420703 - DNA, 19 bp, Homo sapiens
  siRNA target sequence for FLJ31657 (NM_152758.2,438-456).
catacatgcctagttacta

SEQ ID NO: 420704 - DNA, 19 bp, Homo sapiens
  siRNA target sequence for FLJ31657 (NM_152758.2,526-544).
gccatatctgacaacctat

SEQ ID NO: 420705 - DNA, 19 bp, Homo sapiens
  siRNA target sequence for FLJ31657 (NM_152758.2,555-573).
gtaatggagaacatcacta

SEQ ID NO: 420706 - DNA, 19 bp, Homo sapiens
  siRNA target sequence for FLJ31657 (NM_152758.2,579-597).
cagatggtgtatttagtca

SEQ ID NO: 420707 - DNA, 19 bp, Homo sapiens
  siRNA target sequence for FLJ31657 (NM_152758.2,599-617).
cctggggcattaggaaata

SEQ ID NO: 420708 - DNA, 19 bp, Homo sapiens
  siRNA target sequence for FLJ31657 (NM_152758.2,656-674).
cctggtaatgctgatttct

SEQ ID NO: 420709 - DNA, 19 bp, Homo sapiens
  siRNA target sequence for FLJ31657 (NM_152758.2,659-677).
ggtaatgctgatttctcta

SEQ ID NO: 420710 - DNA, 19 bp, Homo sapiens
  siRNA target sequence for FLJ31657 (NM_152758.2,713-731).
caaagttctgcttatagta

SEQ ID NO: 420711 - DNA, 19 bp, Homo sapiens
  siRNA target sequence for FLJ31657 (NM_152758.2,817-835).
gcctggcattagcagtatt

SEQ ID NO: 420712 - DNA, 19 bp, Homo sapiens
  siRNA target sequence for FLJ31657 (NM_152758.2,847-865).
gactggactgaaaattggt

SEQ ID NO: 420713 - DNA, 19 bp, Homo sapiens
  siRNA target sequence for FLJ31657 (NM_152758.2,910-928).
gagcagcagtggtatgact

SEQ ID NO: 420714 - DNA, 19 bp, Homo sapiens
  siRNA target sequence for FLJ31657 (NM_152758.2,916-934).
cagtggtatgactagcatt

SEQ ID NO: 420715 - DNA, 19 bp, Homo sapiens
  siRNA target sequence for FLJ31657 (NM_152758.2,920-938).
ggtatgactagcattgcaa

SEQ ID NO: 420716 - DNA, 19 bp, Homo sapiens
  siRNA target sequence for FLJ31657 (NM_152758.2,961-979).
cagtgcagcacctaaacca

SEQ ID NO: 420717 - DNA, 19 bp, Homo sapiens
  siRNA target sequence for FLJ31657 (NM_152758.2,1012-1030).
caaacctcaaccgaaactt

SEQ ID NO: 420718 - DNA, 19 bp, Homo sapiens
  siRNA target sequence for FLJ31657 (NM_152758.2,1073-1091).
ccacctcctataaaacaca

SEQ ID NO: 420719 - DNA, 19 bp, Homo sapiens
  siRNA target sequence for FLJ31657 (NM_152758.2,1180-1198).
gcagcctcagccattaatt

SEQ ID NO: 420720 - DNA, 19 bp, Homo sapiens
  siRNA target sequence for FLJ31657 (NM_152758.2,1420-1438).
cagtgcttcaccttctagt

SEQ ID NO: 420721 - DNA, 19 bp, Homo sapiens
  siRNA target sequence for FLJ31657 (NM_152758.2,1451-1469).
cccgtgctggaaaagctaa

SEQ ID NO: 420722 - DNA, 19 bp, Homo sapiens
  siRNA target sequence for FLJ31657 (NM_152758.2,1466-1484).
ctaaaggccataaacaact

SEQ ID NO: 420723 - DNA, 19 bp, Homo sapiens
  siRNA target sequence for FLJ31657 (NM_152758.2,1471-1489).
ggccataaacaactataat

SEQ ID NO: 420724 - DNA, 19 bp, Homo sapiens
  siRNA target sequence for FLJ31657 (NM_152758.2,1520-1538).
ggacgtgtgtttataatta

SEQ ID NO: 420725 - DNA, 19 bp, Homo sapiens
  siRNA target sequence for FLJ31657 (NM_152758.2,1521-1539).
gacgtgtgtttataattaa

SEQ ID NO: 420726 - DNA, 19 bp, Homo sapiens
  siRNA target sequence for FLJ31657 (NM_152758.2,1556-1574).
gacatacatcgttccatta

SEQ ID NO: 420727 - DNA, 19 bp, Homo sapiens
  siRNA target sequence for FLJ31657 (NM_152758.2,1558-1576).
catacatcgttccattaaa

SEQ ID NO: 420728 - DNA, 19 bp, Homo sapiens
  siRNA target sequence for FLJ31657 (NM_152758.2,1562-1580).
catcgttccattaaatact

SEQ ID NO: 420729 - DNA, 19 bp, Homo sapiens
  siRNA target sequence for FLJ31657 (NM_152758.2,1590-1608).
gtagtactgagcatggtaa

SEQ ID NO: 420730 - DNA, 19 bp, Homo sapiens
  siRNA target sequence for FLJ31657 (NM_152758.2,1643-1661).
gggaaaggcccactctatt

SEQ ID NO: 420731 - DNA, 19 bp, Homo sapiens
  siRNA target sequence for FLJ31657 (NM_152758.2,1645-1663).
gaaaggcccactctattta

SEQ ID NO: 420732 - DNA, 19 bp, Homo sapiens
  siRNA target sequence for FLJ31657 (NM_152758.2,1675-1693).
gaatggcagtggacatttt

SEQ ID NO: 420733 - DNA, 19 bp, Homo sapiens
  siRNA target sequence for FLJ31657 (NM_152758.2,1714-1732).
gtctgttgtggactataat

SEQ ID NO: 420734 - DNA, 19 bp, Homo sapiens
  siRNA target sequence for FLJ31657 (NM_152758.2,1781-1799).
gttaaatggatctttgtca

SEQ ID NO: 420735 - DNA, 19 bp, Homo sapiens
  siRNA target sequence for FLJ31657 (NM_152758.2,1788-1806).
ggatctttgtcaaagatgt

SEQ ID NO: 420736 - DNA, 19 bp, Homo sapiens
  siRNA target sequence for FLJ31657 (NM_152758.2,1823-1841).
cggcatattcgcttagaaa

SEQ ID NO: 420737 - DNA, 19 bp, Homo sapiens
  siRNA target sequence for FLJ31657 (NM_152758.2,1824-1842).
ggcatattcgcttagaaaa

SEQ ID NO: 420738 - DNA, 19 bp, Homo sapiens
  siRNA target sequence for FLJ31657 (NM_152758.2,1825-1843).
gcatattcgcttagaaaat

SEQ ID NO: 420739 - DNA, 19 bp, Homo sapiens
  siRNA target sequence for FLJ31657 (NM_152758.2,1826-1844).
catattcgcttagaaaata

SEQ ID NO: 420740 - DNA, 19 bp, Homo sapiens
  siRNA target sequence for FLJ31657 (NM_152758.2,1849-1867).
caacaaaccggttaccaat

SEQ ID NO: 420741 - DNA, 19 bp, Homo sapiens
  siRNA target sequence for FLJ31657 (NM_152758.2,1880-1898).
caagaggtacccctagaaa

SEQ ID NO: 420742 - DNA, 19 bp, Homo sapiens
  siRNA target sequence for FLJ31657 (NM_152758.2,1885-1903).
ggtacccctagaaaaagct

SEQ ID NO: 420743 - DNA, 19 bp, Homo sapiens
  siRNA target sequence for FLJ31657 (NM_152758.2,1886-1904).
gtacccctagaaaaagcta

SEQ ID NO: 420744 - DNA, 19 bp, Homo sapiens
  siRNA target sequence for FLJ31657 (NM_152758.2,1999-2017).
catgcgtagggagagaaat

SEQ ID NO: 420745 - DNA, 19 bp, Homo sapiens
  siRNA target sequence for FLJ31657 (NM_152758.2,2002-2020).
gcgtagggagagaaataga

SEQ ID NO: 420746 - DNA, 19 bp, Homo sapiens
  siRNA target sequence for FLJ31657 (NM_152758.2,2003-2021).
cgtagggagagaaatagaa

SEQ ID NO: 420747 - DNA, 19 bp, Homo sapiens
  siRNA target sequence for MGC35140 (NM_152759.3,726-744).
ggggttaggccacaacaaa

SEQ ID NO: 420748 - DNA, 19 bp, Homo sapiens
  siRNA target sequence for MGC35140 (NM_152759.3,1145-1163).
ccgtgtctcccaatgagaa

SEQ ID NO: 420749 - DNA, 19 bp, Homo sapiens
  siRNA target sequence for MGC35140 (NM_152759.3,1251-1269).
cctggacacctctgtctta

SEQ ID NO: 420750 - DNA, 19 bp, Homo sapiens
  siRNA target sequence for MGC35140 (NM_152759.3,1283-1301).
ggcccgaaggccctttcat

SEQ ID NO: 420751 - DNA, 19 bp, Homo sapiens
  siRNA target sequence for MGC35140 (NM_152759.3,1285-1303).
cccgaaggccctttcatca

SEQ ID NO: 420752 - DNA, 19 bp, Homo sapiens
  siRNA target sequence for MGC35140 (NM_152759.3,1294-1312).
cctttcatcacttacaact

SEQ ID NO: 420753 - DNA, 19 bp, Homo sapiens
  siRNA target sequence for MGC35140 (NM_152759.3,1295-1313).
ctttcatcacttacaacta

SEQ ID NO: 420754 - DNA, 19 bp, Homo sapiens
  siRNA target sequence for MGC35140 (NM_152759.3,1345-1363).
gaaggcgaaatgaatgagt

SEQ ID NO: 420755 - DNA, 19 bp, Homo sapiens
  siRNA target sequence for MGC35140 (NM_152759.3,1400-1418).
ccagcttagaattattagt

SEQ ID NO: 420756 - DNA, 19 bp, Homo sapiens
  siRNA target sequence for MGC35140 (NM_152759.3,1401-1419).
cagcttagaattattagtt

SEQ ID NO: 420757 - DNA, 19 bp, Homo sapiens
  siRNA target sequence for MGC35140 (NM_152759.3,1403-1421).
gcttagaattattagttga

SEQ ID NO: 420758 - DNA, 19 bp, Homo sapiens
  siRNA target sequence for MGC35140 (NM_152759.3,1449-1467).
cgtcatcgaagacattgtt

SEQ ID NO: 420759 - DNA, 19 bp, Homo sapiens
  siRNA target sequence for MGC35140 (NM_152759.3,1602-1620).
gttgaggctgcgtatagat

SEQ ID NO: 420760 - DNA, 19 bp, Homo sapiens
  siRNA target sequence for MGC35140 (NM_152759.3,2059-2077).
ggcgtggtccgcacattga

SEQ ID NO: 420761 - DNA, 19 bp, Homo sapiens
  siRNA target sequence for MGC35140 (NM_152759.3,2061-2079).
cgtggtccgcacattgaca

SEQ ID NO: 420762 - DNA, 19 bp, Homo sapiens
  siRNA target sequence for MGC35140 (NM_152759.3,2062-2080).
gtggtccgcacattgacat

SEQ ID NO: 420763 - DNA, 19 bp, Homo sapiens
  siRNA target sequence for FLJ25444 (NM_152761.1,356-374).
ctcaaatgtaccacgtaaa

SEQ ID NO: 420764 - DNA, 19 bp, Homo sapiens
  siRNA target sequence for FLJ25444 (NM_152761.1,366-384).
ccacgtaaaggtattctga

SEQ ID NO: 420765 - DNA, 19 bp, Homo sapiens
  siRNA target sequence for FLJ25444 (NM_152761.1,367-385).
cacgtaaaggtattctgaa

SEQ ID NO: 420766 - DNA, 19 bp, Homo sapiens
  siRNA target sequence for FLJ25444 (NM_152761.1,369-387).
cgtaaaggtattctgaaat

SEQ ID NO: 420767 - DNA, 19 bp, Homo sapiens
  siRNA target sequence for FLJ25444 (NM_152761.1,381-399).
ctgaaatcaggtacaagat

SEQ ID NO: 420768 - DNA, 19 bp, Homo sapiens
  siRNA target sequence for FLJ25444 (NM_152761.1,394-412).
caagatccttacaaaaagt

SEQ ID NO: 420769 - DNA, 19 bp, Homo sapiens
  siRNA target sequence for FLJ25444 (NM_152761.1,428-446).
cgcaaatgcacgaaatgca

SEQ ID NO: 420770 - DNA, 19 bp, Homo sapiens
  siRNA target sequence for FLJ25444 (NM_152761.1,444-462).
gcaagatcattactatcaa

SEQ ID NO: 420771 - DNA, 19 bp, Homo sapiens
  siRNA target sequence for FLJ25444 (NM_152761.1,445-463).
caagatcattactatcaat

SEQ ID NO: 420772 - DNA, 19 bp, Homo sapiens
  siRNA target sequence for FLJ25444 (NM_152761.1,451-469).
cattactatcaatgcttaa

SEQ ID NO: 420773 - DNA, 19 bp, Homo sapiens
  siRNA target sequence for FLJ25444 (NM_152761.1,456-474).
ctatcaatgcttaaagaca

SEQ ID NO: 420774 - DNA, 19 bp, Homo sapiens
  siRNA target sequence for FLJ25444 (NM_152761.1,494-512).
gagggcttggttatctcat

SEQ ID NO: 420775 - DNA, 19 bp, Homo sapiens
  siRNA target sequence for FLJ25444 (NM_152761.1,498-516).
gcttggttatctcatacaa

SEQ ID NO: 420776 - DNA, 19 bp, Homo sapiens
  siRNA target sequence for FLJ25444 (NM_152761.1,499-517).
cttggttatctcatacaaa

SEQ ID NO: 420777 - DNA, 19 bp, Homo sapiens
  siRNA target sequence for FLJ25444 (NM_152761.1,502-520).
ggttatctcatacaaacaa

SEQ ID NO: 420778 - DNA, 19 bp, Homo sapiens
  siRNA target sequence for FLJ25444 (NM_152761.1,503-521).
gttatctcatacaaacaaa

SEQ ID NO: 420779 - DNA, 19 bp, Homo sapiens
  siRNA target sequence for FLJ25444 (NM_152761.1,553-571).
gtgcagcggaattctatgt

SEQ ID NO: 420780 - DNA, 19 bp, Homo sapiens
  siRNA target sequence for FLJ25444 (NM_152761.1,555-573).
gcagcggaattctatgtaa

SEQ ID NO: 420781 - DNA, 19 bp, Homo sapiens
  siRNA target sequence for FLJ25444 (NM_152761.1,559-577).
cggaattctatgtaacaca

SEQ ID NO: 420782 - DNA, 19 bp, Homo sapiens
  siRNA target sequence for FLJ25444 (NM_152761.1,599-617).
ccccttagaggctaagctt

SEQ ID NO: 420783 - DNA, 19 bp, Homo sapiens
  siRNA target sequence for FLJ25444 (NM_152761.1,655-673).
gatttagaggtgaaacgtt

SEQ ID NO: 420784 - DNA, 19 bp, Homo sapiens
  siRNA target sequence for FLJ25444 (NM_152761.1,675-693).
ccacctttcatcgtgttta

SEQ ID NO: 420785 - DNA, 19 bp, Homo sapiens
  siRNA target sequence for FLJ25444 (NM_152761.1,711-729).
gatggccatggttacaagt

SEQ ID NO: 420786 - DNA, 19 bp, Homo sapiens
  siRNA target sequence for FLJ25444 (NM_152761.1,714-732).
ggccatggttacaagtatt

SEQ ID NO: 420787 - DNA, 19 bp, Homo sapiens
  siRNA target sequence for FLJ25444 (NM_152761.1,747-765).
gtattaatgccgtcaagta

SEQ ID NO: 420788 - DNA, 19 bp, Homo sapiens
  siRNA target sequence for FLJ25444 (NM_152761.1,802-820).
ggaaatttcaccgtataat

SEQ ID NO: 420789 - DNA, 19 bp, Homo sapiens
  siRNA target sequence for FLJ25444 (NM_152761.1,842-860).
cccgaagtccaaagtaact

SEQ ID NO: 420790 - DNA, 19 bp, Homo sapiens
  siRNA target sequence for FLJ25444 (NM_152761.1,845-863).
gaagtccaaagtaactgat

SEQ ID NO: 420791 - DNA, 19 bp, Homo sapiens
  siRNA target sequence for FLJ25444 (NM_152761.1,859-877).
ctgatataatggatgttgt

SEQ ID NO: 420792 - DNA, 19 bp, Homo sapiens
  siRNA target sequence for FLJ25444 (NM_152761.1,878-896).
caccatgcaagattatgta

SEQ ID NO: 420793 - DNA, 19 bp, Homo sapiens
  siRNA target sequence for FLJ25444 (NM_152761.1,880-898).
ccatgcaagattatgtaca

SEQ ID NO: 420794 - DNA, 19 bp, Homo sapiens
  siRNA target sequence for FLJ25444 (NM_152761.1,894-912).
gtacaatatcgcagttttt

SEQ ID NO: 420795 - DNA, 19 bp, Homo sapiens
  siRNA target sequence for FLJ25444 (NM_152761.1,914-932).
cgatgaggcccctgcattt

SEQ ID NO: 420796 - DNA, 19 bp, Homo sapiens
  siRNA target sequence for FLJ25444 (NM_152761.1,952-970).
gctggcgcaaattaaatct

SEQ ID NO: 420797 - DNA, 19 bp, Homo sapiens
  siRNA target sequence for FLJ25444 (NM_152761.1,955-973).
ggcgcaaattaaatcttga

SEQ ID NO: 420798 - DNA, 19 bp, Homo sapiens
  siRNA target sequence for FLJ25444 (NM_152761.1,956-974).
gcgcaaattaaatcttgaa

SEQ ID NO: 420799 - DNA, 19 bp, Homo sapiens
  siRNA target sequence for FLJ25444 (NM_152761.1,983-1001).
caggacaatgctaatgtat

SEQ ID NO: 420800 - DNA, 19 bp, Homo sapiens
  siRNA target sequence for FLJ25444 (NM_152761.1,1034-1052).
ctcaaaccgtctacgaaat

SEQ ID NO: 420801 - DNA, 19 bp, Homo sapiens
  siRNA target sequence for FLJ25444 (NM_152761.1,1036-1054).
caaaccgtctacgaaatga

SEQ ID NO: 420802 - DNA, 19 bp, Homo sapiens
  siRNA target sequence for FLJ25444 (NM_152761.1,1041-1059).
cgtctacgaaatgaaatga

SEQ ID NO: 420803 - DNA, 19 bp, Homo sapiens
  siRNA target sequence for FLJ25444 (NM_152761.1,1044-1062).
ctacgaaatgaaatgaagt

SEQ ID NO: 420804 - DNA, 19 bp, Homo sapiens
  siRNA target sequence for FLJ25444 (NM_152761.1,1080-1098).
gtaacgcaagagatccata

SEQ ID NO: 420805 - DNA, 19 bp, Homo sapiens
  siRNA target sequence for FLJ25444 (NM_152761.1,1100-1118).
gcaccagctacggattgtt

SEQ ID NO: 420806 - DNA, 19 bp, Homo sapiens
  siRNA target sequence for FLJ25444 (NM_152761.1,1110-1128).
cggattgtttctgaaatta

SEQ ID NO: 420807 - DNA, 19 bp, Homo sapiens
  siRNA target sequence for FLJ25444 (NM_152761.1,1129-1147).
ggggtccatacttaactgt

SEQ ID NO: 420808 - DNA, 19 bp, Homo sapiens
  siRNA target sequence for FLJ25444 (NM_152761.1,1165-1183).
cctacaaacagcaaaatca

SEQ ID NO: 420809 - DNA, 19 bp, Homo sapiens
  siRNA target sequence for FLJ25444 (NM_152761.1,1204-1222).
gatccaagcaagctcaaat

SEQ ID NO: 420810 - DNA, 19 bp, Homo sapiens
  siRNA target sequence for FLJ25444 (NM_152761.1,1273-1291).
ctgaggtgactgaaccaaa

SEQ ID NO: 420811 - DNA, 19 bp, Homo sapiens
  siRNA target sequence for FLJ25444 (NM_152761.1,1303-1321).
caggtacaaaggataacta

SEQ ID NO: 420812 - DNA, 19 bp, Homo sapiens
  siRNA target sequence for FLJ25444 (NM_152761.1,1306-1324).
gtacaaaggataactatca

SEQ ID NO: 420813 - DNA, 19 bp, Homo sapiens
  siRNA target sequence for FLJ32880 (NM_152762.1,37-55).
ggcaggacaccgatatgct

SEQ ID NO: 420814 - DNA, 19 bp, Homo sapiens
  siRNA target sequence for FLJ32880 (NM_152762.1,38-56).
gcaggacaccgatatgcta

SEQ ID NO: 420815 - DNA, 19 bp, Homo sapiens
  siRNA target sequence for FLJ32880 (NM_152762.1,39-57).
caggacaccgatatgctaa

SEQ ID NO: 420816 - DNA, 19 bp, Homo sapiens
  siRNA target sequence for FLJ32880 (NM_152762.1,41-59).
ggacaccgatatgctaaat

SEQ ID NO: 420817 - DNA, 19 bp, Homo sapiens
  siRNA target sequence for FLJ32880 (NM_152762.1,42-60).
gacaccgatatgctaaata

SEQ ID NO: 420818 - DNA, 19 bp, Homo sapiens
  siRNA target sequence for FLJ32880 (NM_152762.1,46-64).
ccgatatgctaaataccta

SEQ ID NO: 420819 - DNA, 19 bp, Homo sapiens
  siRNA target sequence for FLJ32880 (NM_152762.1,196-214).
gtgatggtgtgccaaatca

SEQ ID NO: 420820 - DNA, 19 bp, Homo sapiens
  siRNA target sequence for FLJ32880 (NM_152762.1,1080-1098).
gcctccaagcggaatggaa

SEQ ID NO: 420821 - DNA, 19 bp, Homo sapiens
  siRNA target sequence for FLJ32880 (NM_152762.1,1103-1121).
ctatgcctcgggatacgat

SEQ ID NO: 420822 - DNA, 19 bp, Homo sapiens
  siRNA target sequence for FLJ32880 (NM_152762.1,1107-1125).
gcctcgggatacgatgaaa

SEQ ID NO: 420823 - DNA, 19 bp, Homo sapiens
  siRNA target sequence for FLJ32880 (NM_152762.1,1588-1606).
ggtcaatgggggtgagaat

SEQ ID NO: 420824 - DNA, 19 bp, Homo sapiens
  siRNA target sequence for MGC26989 (NM_152763.2,279-297).
cagaacacacgacttataa

SEQ ID NO: 420825 - DNA, 19 bp, Homo sapiens
  siRNA target sequence for MGC26989 (NM_152763.2,291-309).
cttataagcaggaggattt

SEQ ID NO: 420826 - DNA, 19 bp, Homo sapiens
  siRNA target sequence for MGC26989 (NM_152763.2,301-319).
ggaggatttgccttatgat

SEQ ID NO: 420827 - DNA, 19 bp, Homo sapiens
  siRNA target sequence for MGC26989 (NM_152763.2,321-339).
gggacctctctcagattaa

SEQ ID NO: 420828 - DNA, 19 bp, Homo sapiens
  siRNA target sequence for MGC26989 (NM_152763.2,323-341).
gacctctctcagattaaga

SEQ ID NO: 420829 - DNA, 19 bp, Homo sapiens
  siRNA target sequence for MGC26989 (NM_152763.2,325-343).
cctctctcagattaagata

SEQ ID NO: 420830 - DNA, 19 bp, Homo sapiens
  siRNA target sequence for MGC26989 (NM_152763.2,340-358).
gataggcaatgattacagt

SEQ ID NO: 420831 - DNA, 19 bp, Homo sapiens
  siRNA target sequence for MGC26989 (NM_152763.2,344-362).
ggcaatgattacagtttta

SEQ ID NO: 420832 - DNA, 19 bp, Homo sapiens
  siRNA target sequence for MGC26989 (NM_152763.2,379-397).
ccttgaagtcttaaatcaa

SEQ ID NO: 420833 - DNA, 19 bp, Homo sapiens
  siRNA target sequence for MGC26989 (NM_152763.2,560-578).
gaaggagacgcttctaagt

SEQ ID NO: 420834 - DNA, 19 bp, Homo sapiens
  siRNA target sequence for MGC26989 (NM_152763.2,568-586).
cgcttctaagtcaagcatt

SEQ ID NO: 420835 - DNA, 19 bp, Homo sapiens
  siRNA target sequence for MGC26989 (NM_152763.2,588-606).
ctgatattttacttcatca

SEQ ID NO: 420836 - DNA, 19 bp, Homo sapiens
  siRNA target sequence for MGC26989 (NM_152763.2,780-798).
cgaaaagggatggtgaaaa

SEQ ID NO: 420837 - DNA, 19 bp, Homo sapiens
  siRNA target sequence for MGC26989 (NM_152763.2,788-806).
gatggtgaaaacagcaata

SEQ ID NO: 420838 - DNA, 19 bp, Homo sapiens
  siRNA target sequence for MGC26989 (NM_152763.2,819-837).
ccaccacgacagaggaaaa

SEQ ID NO: 420839 - DNA, 19 bp, Homo sapiens
  siRNA target sequence for MGC26989 (NM_152763.2,820-838).
caccacgacagaggaaaat

SEQ ID NO: 420840 - DNA, 19 bp, Homo sapiens
  siRNA target sequence for MGC26989 (NM_152763.2,923-941).
ggtgataaacaaaaaagtt

SEQ ID NO: 420841 - DNA, 19 bp, Homo sapiens
  siRNA target sequence for MGC26989 (NM_152763.2,987-1005).
caggcaacacgttcaaata

SEQ ID NO: 420842 - DNA, 19 bp, Homo sapiens
  siRNA target sequence for MGC26989 (NM_152763.2,1095-1113).
cacttgcaatagctaaaca

SEQ ID NO: 420843 - DNA, 19 bp, Homo sapiens
  siRNA target sequence for MGC26989 (NM_152763.2,1125-1143).
cttccaagtcgagagataa

SEQ ID NO: 420844 - DNA, 19 bp, Homo sapiens
  siRNA target sequence for MGC26989 (NM_152763.2,1147-1165).
cactcttgtgcaagatagt

SEQ ID NO: 420845 - DNA, 19 bp, Homo sapiens
  siRNA target sequence for MGC26989 (NM_152763.2,1149-1167).
ctcttgtgcaagatagtct

SEQ ID NO: 420846 - DNA, 19 bp, Homo sapiens
  siRNA target sequence for MGC26989 (NM_152763.2,1174-1192).
cacgcctgagtcaaactgt

SEQ ID NO: 420847 - DNA, 19 bp, Homo sapiens
  siRNA target sequence for MGC26989 (NM_152763.2,1249-1267).
ccagatggagcccatagta

SEQ ID NO: 420848 - DNA, 19 bp, Homo sapiens
  siRNA target sequence for MGC26989 (NM_152763.2,1252-1270).
gatggagcccatagtacat

SEQ ID NO: 420849 - DNA, 19 bp, Homo sapiens
  siRNA target sequence for MGC26989 (NM_152763.2,1302-1320).
ctgaggcaagtctctctaa

SEQ ID NO: 420850 - DNA, 19 bp, Homo sapiens
  siRNA target sequence for MGC26989 (NM_152763.2,1307-1325).
gcaagtctctctaagttgt

SEQ ID NO: 420851 - DNA, 19 bp, Homo sapiens
  siRNA target sequence for MGC26989 (NM_152763.2,1422-1440).
ctgatcaactgaagactaa

SEQ ID NO: 420852 - DNA, 19 bp, Homo sapiens
  siRNA target sequence for MGC26989 (NM_152763.2,1435-1453).
gactaaagtacaagaattt

SEQ ID NO: 420853 - DNA, 19 bp, Homo sapiens
  siRNA target sequence for MGC26989 (NM_152763.2,1469-1487).
caggactctccttaccatt

SEQ ID NO: 420854 - DNA, 19 bp, Homo sapiens
  siRNA target sequence for MGC26989 (NM_152763.2,1474-1492).
ctctccttaccatttgcaa

SEQ ID NO: 420855 - DNA, 19 bp, Homo sapiens
  siRNA target sequence for MGC35212 (NM_152764.1,463-481).
ctgtaatctcaaaaaccat

SEQ ID NO: 420856 - DNA, 19 bp, Homo sapiens
  siRNA target sequence for MGC35212 (NM_152764.1,465-483).
gtaatctcaaaaaccatta

SEQ ID NO: 420857 - DNA, 19 bp, Homo sapiens
  siRNA target sequence for MGC35212 (NM_152764.1,577-595).
gttatttcaaagaatccat

SEQ ID NO: 420858 - DNA, 19 bp, Homo sapiens
  siRNA target sequence for MGC35212 (NM_152764.1,593-611).
cataaatttaagtacaata

SEQ ID NO: 420859 - DNA, 19 bp, Homo sapiens
  siRNA target sequence for MGC35212 (NM_152764.1,604-622).
gtacaatagttgatgtcta

SEQ ID NO: 420860 - DNA, 19 bp, Homo sapiens
  siRNA target sequence for MGC35212 (NM_152764.1,618-636).
gtctacacagttgaacaat

SEQ ID NO: 420861 - DNA, 19 bp, Homo sapiens
  siRNA target sequence for MGC35212 (NM_152764.1,620-638).
ctacacagttgaacaatta

SEQ ID NO: 420862 - DNA, 19 bp, Homo sapiens
  siRNA target sequence for MGC35212 (NM_152764.1,676-694).
cttcctatggcatccttta

SEQ ID NO: 420863 - DNA, 19 bp, Homo sapiens
  siRNA target sequence for MGC35212 (NM_152764.1,686-704).
catcctttatgcctacatt

SEQ ID NO: 420864 - DNA, 19 bp, Homo sapiens
  siRNA target sequence for MGC35212 (NM_152764.1,706-724).
ccacactcaacattgatga

SEQ ID NO: 420865 - DNA, 19 bp, Homo sapiens
  siRNA target sequence for MGC35212 (NM_152764.1,707-725).
cacactcaacattgatgat

SEQ ID NO: 420866 - DNA, 19 bp, Homo sapiens
  siRNA target sequence for MGC35212 (NM_152764.1,738-756).
gtagttcgaaatagatgtt

SEQ ID NO: 420867 - DNA, 19 bp, Homo sapiens
  siRNA target sequence for MGC35212 (NM_152764.1,754-772).
gttccagctgtggttatat

SEQ ID NO: 420868 - DNA, 19 bp, Homo sapiens
  siRNA target sequence for MGC35212 (NM_152764.1,757-775).
ccagctgtggttatattgt

SEQ ID NO: 420869 - DNA, 19 bp, Homo sapiens
  siRNA target sequence for MGC35212 (NM_152764.1,758-776).
cagctgtggttatattgta

SEQ ID NO: 420870 - DNA, 19 bp, Homo sapiens
  siRNA target sequence for MGC35212 (NM_152764.1,815-833).
ctccttggactttaaatct

SEQ ID NO: 420871 - DNA, 19 bp, Homo sapiens
  siRNA target sequence for MGC35212 (NM_152764.1,930-948).
ggctgcacgttcgttctat

SEQ ID NO: 420872 - DNA, 19 bp, Homo sapiens
  siRNA target sequence for MGC35212 (NM_152764.1,934-952).
gcacgttcgttctatcaca

SEQ ID NO: 420873 - DNA, 19 bp, Homo sapiens
  siRNA target sequence for MGC35212 (NM_152764.1,1028-1046).
gtctggacaaaaacatgtt

SEQ ID NO: 420874 - DNA, 19 bp, Homo sapiens
  siRNA target sequence for MGC33510 (NM_152765.2,137-155).
gctgcagtgacgagaacat

SEQ ID NO: 420875 - DNA, 19 bp, Homo sapiens
  siRNA target sequence for MGC33510 (NM_152765.2,138-156).
ctgcagtgacgagaacata

SEQ ID NO: 420876 - DNA, 19 bp, Homo sapiens
  siRNA target sequence for MGC33510 (NM_152765.2,140-158).
gcagtgacgagaacataga

SEQ ID NO: 420877 - DNA, 19 bp, Homo sapiens
  siRNA target sequence for MGC33510 (NM_152765.2,141-159).
cagtgacgagaacatagaa

SEQ ID NO: 420878 - DNA, 19 bp, Homo sapiens
  siRNA target sequence for MGC33510 (NM_152765.2,143-161).
gtgacgagaacatagaagt

SEQ ID NO: 420879 - DNA, 19 bp, Homo sapiens
  siRNA target sequence for MGC33510 (NM_152765.2,145-163).
gacgagaacatagaagttt

SEQ ID NO: 420880 - DNA, 19 bp, Homo sapiens
  siRNA target sequence for MGC33510 (NM_152765.2,390-408).
cagacccgtggggatttct

SEQ ID NO: 420881 - DNA, 19 bp, Homo sapiens
  siRNA target sequence for MGC33510 (NM_152765.2,392-410).
gacccgtggggatttctga

SEQ ID NO: 420882 - DNA, 19 bp, Homo sapiens
  siRNA target sequence for MGC33510 (NM_152765.2,429-447).
gtgtgggaatcgagcatat

SEQ ID NO: 420883 - DNA, 19 bp, Homo sapiens
  siRNA target sequence for MGC33510 (NM_152765.2,433-451).
gggaatcgagcatatggaa

SEQ ID NO: 420884 - DNA, 19 bp, Homo sapiens
  siRNA target sequence for MGC33510 (NM_152765.2,434-452).
ggaatcgagcatatggaaa

SEQ ID NO: 420885 - DNA, 19 bp, Homo sapiens
  siRNA target sequence for MGC40107 (NM_152766.2,124-142).
gggaaggagctgtttgaca

SEQ ID NO: 420886 - DNA, 19 bp, Homo sapiens
  siRNA target sequence for MGC40107 (NM_152766.2,206-224).
cactctgggctgggttatt

SEQ ID NO: 420887 - DNA, 19 bp, Homo sapiens
  siRNA target sequence for MGC40107 (NM_152766.2,229-247).
gcttccggaacgaccttat

SEQ ID NO: 420888 - DNA, 19 bp, Homo sapiens
  siRNA target sequence for MGC40107 (NM_152766.2,230-248).
cttccggaacgaccttatt

SEQ ID NO: 420889 - DNA, 19 bp, Homo sapiens
  siRNA target sequence for MGC40107 (NM_152766.2,314-332).
gagggaccctgctactctt

SEQ ID NO: 420890 - DNA, 19 bp, Homo sapiens
  siRNA target sequence for FLJ25378 (NM_152768.1,259-277).
caagaggtgatgttccaaa

SEQ ID NO: 420891 - DNA, 19 bp, Homo sapiens
  siRNA target sequence for FLJ25378 (NM_152768.1,279-297).
cagaggaaggctaagttta

SEQ ID NO: 420892 - DNA, 19 bp, Homo sapiens
  siRNA target sequence for FLJ25378 (NM_152768.1,462-480).
gctgcccggaagacatcta

SEQ ID NO: 420893 - DNA, 19 bp, Homo sapiens
  siRNA target sequence for MGC40084 (NM_152769.1,1257-1275).
cggcaggtatttttcagta

SEQ ID NO: 420894 - DNA, 19 bp, Homo sapiens
  siRNA target sequence for MGC35043 (NM_152770.1,119-137).
ctggactcgcagatcacta

SEQ ID NO: 420895 - DNA, 19 bp, Homo sapiens
  siRNA target sequence for MGC35043 (NM_152770.1,135-153).
ctactgtggacttgtacta

SEQ ID NO: 420896 - DNA, 19 bp, Homo sapiens
  siRNA target sequence for MGC35043 (NM_152770.1,243-261).
ggaaagcggctatagagat

SEQ ID NO: 420897 - DNA, 19 bp, Homo sapiens
  siRNA target sequence for MGC35043 (NM_152770.1,244-262).
gaaagcggctatagagatt

SEQ ID NO: 420898 - DNA, 19 bp, Homo sapiens
  siRNA target sequence for MGC35043 (NM_152770.1,248-266).
gcggctatagagattgcaa

SEQ ID NO: 420899 - DNA, 19 bp, Homo sapiens
  siRNA target sequence for MGC35043 (NM_152770.1,286-304).
gcaaaagacgctaacaagt

SEQ ID NO: 420900 - DNA, 19 bp, Homo sapiens
  siRNA target sequence for MGC35043 (NM_152770.1,317-335).
ctacaagataattttctga

SEQ ID NO: 420901 - DNA, 19 bp, Homo sapiens
  siRNA target sequence for MGC35043 (NM_152770.1,379-397).
gagttccgtgatctttatt

SEQ ID NO: 420902 - DNA, 19 bp, Homo sapiens
  siRNA target sequence for MGC35043 (NM_152770.1,453-471).
ggctaaagacggaagattt

SEQ ID NO: 420903 - DNA, 19 bp, Homo sapiens
  siRNA target sequence for MGC35043 (NM_152770.1,454-472).
gctaaagacggaagatttt

SEQ ID NO: 420904 - DNA, 19 bp, Homo sapiens
  siRNA target sequence for MGC35043 (NM_152770.1,476-494).
gtctactttactggaaaaa

SEQ ID NO: 420905 - DNA, 19 bp, Homo sapiens
  siRNA target sequence for MGC35043 (NM_152770.1,511-529).
gcctacagatataagcttt

SEQ ID NO: 420906 - DNA, 19 bp, Homo sapiens
  siRNA target sequence for MGC35043 (NM_152770.1,518-536).
gatataagcttttacaact

SEQ ID NO: 420907 - DNA, 19 bp, Homo sapiens
  siRNA target sequence for MGC35043 (NM_152770.1,535-553).
ctgggacgctgatattgct

SEQ ID NO: 420908 - DNA, 19 bp, Homo sapiens
  siRNA target sequence for MGC35043 (NM_152770.1,596-614).
ccagaaggcttacttttca

SEQ ID NO: 420909 - DNA, 19 bp, Homo sapiens
  siRNA target sequence for MGC35043 (NM_152770.1,599-617).
gaaggcttacttttcagat

SEQ ID NO: 420910 - DNA, 19 bp, Homo sapiens
  siRNA target sequence for MGC35043 (NM_152770.1,602-620).
ggcttacttttcagataca

SEQ ID NO: 420911 - DNA, 19 bp, Homo sapiens
  siRNA target sequence for MGC35043 (NM_152770.1,662-680).
ccaggtgacaactctacta

SEQ ID NO: 420912 - DNA, 19 bp, Homo sapiens
  siRNA target sequence for MGC35043 (NM_152770.1,665-683).
ggtgacaactctactagaa

SEQ ID NO: 420913 - DNA, 19 bp, Homo sapiens
  siRNA target sequence for MGC35043 (NM_152770.1,666-684).
gtgacaactctactagaat

SEQ ID NO: 420914 - DNA, 19 bp, Homo sapiens
  siRNA target sequence for MGC35043 (NM_152770.1,687-705).
ctatcctgacagaactcta

SEQ ID NO: 420915 - DNA, 19 bp, Homo sapiens
  siRNA target sequence for MGC39696 (NM_152771.1,719-737).
ggacacatctgcatcaaat

SEQ ID NO: 420916 - DNA, 19 bp, Homo sapiens
  siRNA target sequence for MGC40368 (NM_152772.1,213-231).
ccagccaagcgattctgat

SEQ ID NO: 420917 - DNA, 19 bp, Homo sapiens
  siRNA target sequence for MGC40368 (NM_152772.1,236-254).
cccggttttccgaaagcat

SEQ ID NO: 420918 - DNA, 19 bp, Homo sapiens
  siRNA target sequence for MGC40368 (NM_152772.1,255-273).
ggcttcgctcagtgactat

SEQ ID NO: 420919 - DNA, 19 bp, Homo sapiens
  siRNA target sequence for MGC40368 (NM_152772.1,257-275).
cttcgctcagtgactatga

SEQ ID NO: 420920 - DNA, 19 bp, Homo sapiens
  siRNA target sequence for MGC40368 (NM_152772.1,339-357).
ccctccaagggttgtaaca

SEQ ID NO: 420921 - DNA, 19 bp, Homo sapiens
  siRNA target sequence for MGC40368 (NM_152772.1,340-358).
cctccaagggttgtaacat

SEQ ID NO: 420922 - DNA, 19 bp, Homo sapiens
  siRNA target sequence for MGC40368 (NM_152772.1,344-362).
caagggttgtaacatttga

SEQ ID NO: 420923 - DNA, 19 bp, Homo sapiens
  siRNA target sequence for MGC40368 (NM_152772.1,347-365).
gggttgtaacatttgatga

SEQ ID NO: 420924 - DNA, 19 bp, Homo sapiens
  siRNA target sequence for MGC40368 (NM_152772.1,348-366).
ggttgtaacatttgatgaa

SEQ ID NO: 420925 - DNA, 19 bp, Homo sapiens
  siRNA target sequence for MGC40368 (NM_152772.1,377-395).
cagcaaggaacttatcaaa

SEQ ID NO: 420926 - DNA, 19 bp, Homo sapiens
  siRNA target sequence for MGC40368 (NM_152772.1,399-417).
gactcttgctcatgagatt

SEQ ID NO: 420927 - DNA, 19 bp, Homo sapiens
  siRNA target sequence for MGC40368 (NM_152772.1,421-439).
gtaaatgagaactttcaat

SEQ ID NO: 420928 - DNA, 19 bp, Homo sapiens
  siRNA target sequence for MGC40368 (NM_152772.1,476-494).
gtcgagtgaagcacattgt

SEQ ID NO: 420929 - DNA, 19 bp, Homo sapiens
  siRNA target sequence for MGC40368 (NM_152772.1,513-531).
cgtcttggattcagaacta

SEQ ID NO: 420930 - DNA, 19 bp, Homo sapiens
  siRNA target sequence for MGC40368 (NM_152772.1,514-532).
gtcttggattcagaactaa

SEQ ID NO: 420931 - DNA, 19 bp, Homo sapiens
  siRNA target sequence for MGC40368 (NM_152772.1,622-640).
cggcttcgcaaccaaatct

SEQ ID NO: 420932 - DNA, 19 bp, Homo sapiens
  siRNA target sequence for MGC40368 (NM_152772.1,699-717).
ccaaggcctggccaactat

SEQ ID NO: 420933 - DNA, 19 bp, Homo sapiens
  siRNA target sequence for MGC40368 (NM_152772.1,703-721).
ggcctggccaactatgtca

SEQ ID NO: 420934 - DNA, 19 bp, Homo sapiens
  siRNA target sequence for MGC40368 (NM_152772.1,709-727).
gccaactatgtcatcagta

SEQ ID NO: 420935 - DNA, 19 bp, Homo sapiens
  siRNA target sequence for MGC40368 (NM_152772.1,743-761).
gtgctcccgtgcgagataa

SEQ ID NO: 420936 - DNA, 19 bp, Homo sapiens
  siRNA target sequence for MGC40368 (NM_152772.1,746-764).
ctcccgtgcgagataatga

SEQ ID NO: 420937 - DNA, 19 bp, Homo sapiens
  siRNA target sequence for MGC40368 (NM_152772.1,748-766).
cccgtgcgagataatgata

SEQ ID NO: 420938 - DNA, 19 bp, Homo sapiens
  siRNA target sequence for MGC40368 (NM_152772.1,749-767).
ccgtgcgagataatgatat

SEQ ID NO: 420939 - DNA, 19 bp, Homo sapiens
  siRNA target sequence for MGC40368 (NM_152772.1,751-769).
gtgcgagataatgatatca

SEQ ID NO: 420940 - DNA, 19 bp, Homo sapiens
  siRNA target sequence for MGC40368 (NM_152772.1,753-771).
gcgagataatgatatcaga

SEQ ID NO: 420941 - DNA, 19 bp, Homo sapiens
  siRNA target sequence for MGC40368 (NM_152772.1,804-822).
gctgagacaaatattccat

SEQ ID NO: 420942 - DNA, 19 bp, Homo sapiens
  siRNA target sequence for MGC40368 (NM_152772.1,846-864).
catggccaattttacaatt

SEQ ID NO: 420943 - DNA, 19 bp, Homo sapiens
  siRNA target sequence for MGC40368 (NM_152772.1,890-908).
gccagttggtggaatatga

SEQ ID NO: 420944 - DNA, 19 bp, Homo sapiens
  siRNA target sequence for MGC40368 (NM_152772.1,892-910).
cagttggtggaatatgaga

SEQ ID NO: 420945 - DNA, 19 bp, Homo sapiens
  siRNA target sequence for MGC40368 (NM_152772.1,941-959).
ctccaagtgctcttgatca

SEQ ID NO: 420946 - DNA, 19 bp, Homo sapiens
  siRNA target sequence for MGC40368 (NM_152772.1,952-970).
cttgatcagactacagaat

SEQ ID NO: 420947 - DNA, 19 bp, Homo sapiens
  siRNA target sequence for MGC40368 (NM_152772.1,1062-1080).
ccctactttggtgctaaat

SEQ ID NO: 420948 - DNA, 19 bp, Homo sapiens
  siRNA target sequence for MGC40368 (NM_152772.1,1063-1081).
cctactttggtgctaaata

SEQ ID NO: 420949 - DNA, 19 bp, Homo sapiens
  siRNA target sequence for MGC40368 (NM_152772.1,1064-1082).
ctactttggtgctaaataa

SEQ ID NO: 420950 - DNA, 19 bp, Homo sapiens
  siRNA target sequence for MGC40368 (NM_152772.1,1085-1103).
gttacttgaaactgttaca

SEQ ID NO: 420951 - DNA, 19 bp, Homo sapiens
  siRNA target sequence for MGC40368 (NM_152772.1,1179-1197).
gctgaatcaattgaaaatt

SEQ ID NO: 420952 - DNA, 19 bp, Homo sapiens
  siRNA target sequence for MGC40368 (NM_152772.1,1211-1229).
ccctaattaccaacaacat

SEQ ID NO: 420953 - DNA, 19 bp, Homo sapiens
  siRNA target sequence for MGC40368 (NM_152772.1,1224-1242).
caacatggtgggtgctatt

SEQ ID NO: 420954 - DNA, 19 bp, Homo sapiens
  siRNA target sequence for MGC40368 (NM_152772.1,1227-1245).
catggtgggtgctattaca

SEQ ID NO: 420955 - DNA, 19 bp, Homo sapiens
  siRNA target sequence for MGC40368 (NM_152772.1,1260-1278).
gcttgcaagcaggttaaca

SEQ ID NO: 420956 - DNA, 19 bp, Homo sapiens
  siRNA target sequence for MGC40368 (NM_152772.1,1269-1287).
caggttaacaaggatttca

SEQ ID NO: 420957 - DNA, 19 bp, Homo sapiens
  siRNA target sequence for MGC40368 (NM_152772.1,1294-1312).
ctacttgaaggcatgaaca

SEQ ID NO: 420958 - DNA, 19 bp, Homo sapiens
  siRNA target sequence for MGC40368 (NM_152772.1,1336-1354).
gtcctgaattctattggta

SEQ ID NO: 420959 - DNA, 19 bp, Homo sapiens
  siRNA target sequence for MGC40368 (NM_152772.1,1394-1412).
gaggtttacccactttaaa

SEQ ID NO: 420960 - DNA, 19 bp, Homo sapiens
  siRNA target sequence for MGC40368 (NM_152772.1,1404-1422).
cactttaaatgctgagatt

SEQ ID NO: 420961 - DNA, 19 bp, Homo sapiens
  siRNA target sequence for MGC40368 (NM_152772.1,1417-1435).
gagattcaagctaatctta

SEQ ID NO: 420962 - DNA, 19 bp, Homo sapiens
  siRNA target sequence for MGC40368 (NM_152772.1,1427-1445).
ctaatcttataggtcaatt

SEQ ID NO: 420963 - DNA, 19 bp, Homo sapiens
  siRNA target sequence for MGC40368 (NM_152772.1,1476-1494).
ctggtccttgattgataaa

SEQ ID NO: 420964 - DNA, 19 bp, Homo sapiens
  siRNA target sequence for MGC40368 (NM_152772.1,1479-1497).
gtccttgattgataaacga

SEQ ID NO: 420965 - DNA, 19 bp, Homo sapiens
  siRNA target sequence for MGC40368 (NM_152772.1,1482-1500).
cttgattgataaacgaatt

SEQ ID NO: 420966 - DNA, 19 bp, Homo sapiens
  siRNA target sequence for MGC40368 (NM_152772.1,1489-1507).
gataaacgaattaagcttt

SEQ ID NO: 420967 - DNA, 19 bp, Homo sapiens
  siRNA target sequence for MGC40368 (NM_152772.1,1495-1513).
cgaattaagctttacatga

SEQ ID NO: 420968 - DNA, 19 bp, Homo sapiens
  siRNA target sequence for MGC40368 (NM_152772.1,1565-1583).
gaggcctagctgtcattca

SEQ ID NO: 420969 - DNA, 19 bp, Homo sapiens
  siRNA target sequence for MGC40368 (NM_152772.1,1594-1612).
gaagccctaggctctcaat

SEQ ID NO: 420970 - DNA, 19 bp, Homo sapiens
  siRNA target sequence for MGC40368 (NM_152772.1,1599-1617).
cctaggctctcaatatgca

SEQ ID NO: 420971 - DNA, 19 bp, Homo sapiens
  siRNA target sequence for MGC40368 (NM_152772.1,1600-1618).
ctaggctctcaatatgcaa

SEQ ID NO: 420972 - DNA, 19 bp, Homo sapiens
  siRNA target sequence for MGC40368 (NM_152772.1,1604-1622).
gctctcaatatgcaaacat

SEQ ID NO: 420973 - DNA, 19 bp, Homo sapiens
  siRNA target sequence for MGC40368 (NM_152772.1,1607-1625).
ctcaatatgcaaacattgt

SEQ ID NO: 420974 - DNA, 19 bp, Homo sapiens
  siRNA target sequence for MGC40368 (NM_152772.1,1639-1657).
caagtgtatggaccatttt

SEQ ID NO: 420975 - DNA, 19 bp, Homo sapiens
  siRNA target sequence for MGC40368 (NM_152772.1,1673-1691).
gaaagctgctcttcaatga

SEQ ID NO: 420976 - DNA, 19 bp, Homo sapiens
  siRNA target sequence for MGC33212 (NM_152773.2,192-210).
gagcccgagaacacctata

SEQ ID NO: 420977 - DNA, 19 bp, Homo sapiens
  siRNA target sequence for MGC33212 (NM_152773.2,194-212).
gcccgagaacacctatatt

SEQ ID NO: 420978 - DNA, 19 bp, Homo sapiens
  siRNA target sequence for MGC33212 (NM_152773.2,196-214).
ccgagaacacctatattct

SEQ ID NO: 420979 - DNA, 19 bp, Homo sapiens
  siRNA target sequence for MGC33212 (NM_152773.2,243-261).
ccctctgtggttaaagact

SEQ ID NO: 420980 - DNA, 19 bp, Homo sapiens
  siRNA target sequence for MGC33212 (NM_152773.2,290-308).
ggcaaatgctgaatattct

SEQ ID NO: 420981 - DNA, 19 bp, Homo sapiens
  siRNA target sequence for MGC33212 (NM_152773.2,315-333).
gaaatgcctcagcttacaa

SEQ ID NO: 420982 - DNA, 19 bp, Homo sapiens
  siRNA target sequence for MGC33212 (NM_152773.2,320-338).
gcctcagcttacaaaacat

SEQ ID NO: 420983 - DNA, 19 bp, Homo sapiens
  siRNA target sequence for MGC33212 (NM_152773.2,324-342).
cagcttacaaaacatttat

SEQ ID NO: 420984 - DNA, 19 bp, Homo sapiens
  siRNA target sequence for MGC33212 (NM_152773.2,376-394).
gatttgaccgatacaaaat

SEQ ID NO: 420985 - DNA, 19 bp, Homo sapiens
  siRNA target sequence for MGC33212 (NM_152773.2,395-413).
ggtggtgcaagtagtgatt

SEQ ID NO: 420986 - DNA, 19 bp, Homo sapiens
  siRNA target sequence for MGC33212 (NM_152773.2,405-423).
gtagtgattggagaacaaa

SEQ ID NO: 420987 - DNA, 19 bp, Homo sapiens
  siRNA target sequence for MGC33212 (NM_152773.2,476-494).
caactatactcatgatgtt

SEQ ID NO: 420988 - DNA, 19 bp, Homo sapiens
  siRNA target sequence for MGC33212 (NM_152773.2,515-533).
ctgcgttgtagcagcattt

SEQ ID NO: 420989 - DNA, 19 bp, Homo sapiens
  siRNA target sequence for MGC33212 (NM_152773.2,529-547).
catttggctgtttctacta

SEQ ID NO: 420990 - DNA, 19 bp, Homo sapiens
  siRNA target sequence for MGC42090 (NM_152774.1,110-128).
ctgtatctgtggacttatt

SEQ ID NO: 420991 - DNA, 19 bp, Homo sapiens
  siRNA target sequence for MGC42090 (NM_152774.1,153-171).
ctccgggcagtcacaaaga

SEQ ID NO: 420992 - DNA, 19 bp, Homo sapiens
  siRNA target sequence for MGC42090 (NM_152774.1,155-173).
ccgggcagtcacaaagaaa

SEQ ID NO: 420993 - DNA, 19 bp, Homo sapiens
  siRNA target sequence for MGC42090 (NM_152774.1,262-280).
gtcgactagccagttatga

SEQ ID NO: 420994 - DNA, 19 bp, Homo sapiens
  siRNA target sequence for MGC42090 (NM_152774.1,265-283).
gactagccagttatgaaca

SEQ ID NO: 420995 - DNA, 19 bp, Homo sapiens
  siRNA target sequence for MGC42090 (NM_152774.1,314-332).
cctgcatcactctcatgaa

SEQ ID NO: 420996 - DNA, 19 bp, Homo sapiens
  siRNA target sequence for MGC42090 (NM_152774.1,315-333).
ctgcatcactctcatgaaa

SEQ ID NO: 420997 - DNA, 19 bp, Homo sapiens
  siRNA target sequence for MGC33607 (NM_152775.1,97-115).
cagcgtccaagatcctaaa

SEQ ID NO: 420998 - DNA, 19 bp, Homo sapiens
  siRNA target sequence for MGC33607 (NM_152775.1,99-117).
gcgtccaagatcctaaatt

SEQ ID NO: 420999 - DNA, 19 bp, Homo sapiens
  siRNA target sequence for MGC33607 (NM_152775.1,143-161).
ctgcagtgacacagaatat

SEQ ID NO: 421000 - DNA, 19 bp, Homo sapiens
  siRNA target sequence for MGC33607 (NM_152775.1,163-181).
gctgcatagcagaatcaga

SEQ ID NO: 421001 - DNA, 19 bp, Homo sapiens
  siRNA target sequence for MGC33607 (NM_152775.1,164-182).
ctgcatagcagaatcagaa

SEQ ID NO: 421002 - DNA, 19 bp, Homo sapiens
  siRNA target sequence for MGC33607 (NM_152775.1,166-184).
gcatagcagaatcagaaaa

SEQ ID NO: 421003 - DNA, 19 bp, Homo sapiens
  siRNA target sequence for MGC33607 (NM_152775.1,196-214).
cacaatcagcattgaaagt

SEQ ID NO: 421004 - DNA, 19 bp, Homo sapiens
  siRNA target sequence for MGC33607 (NM_152775.1,284-302).
gtcggaaatcagtgaaata

SEQ ID NO: 421005 - DNA, 19 bp, Homo sapiens
  siRNA target sequence for MGC33607 (NM_152775.1,286-304).
cggaaatcagtgaaatatt

SEQ ID NO: 421006 - DNA, 19 bp, Homo sapiens
  siRNA target sequence for MGC33607 (NM_152775.1,324-342).
gtagaaaacccacaattta

SEQ ID NO: 421007 - DNA, 19 bp, Homo sapiens
  siRNA target sequence for MGC33607 (NM_152775.1,327-345).
gaaaacccacaatttagct

SEQ ID NO: 421008 - DNA, 19 bp, Homo sapiens
  siRNA target sequence for MGC33607 (NM_152775.1,334-352).
cacaatttagctcagaaaa

SEQ ID NO: 421009 - DNA, 19 bp, Homo sapiens
  siRNA target sequence for MGC33607 (NM_152775.1,362-380).
gtttggcacgcgcattgaa

SEQ ID NO: 421010 - DNA, 19 bp, Homo sapiens
  siRNA target sequence for MGC33607 (NM_152775.1,368-386).
cacgcgcattgaaaaggat

SEQ ID NO: 421011 - DNA, 19 bp, Homo sapiens
  siRNA target sequence for MGC33607 (NM_152775.1,370-388).
cgcgcattgaaaaggattt

SEQ ID NO: 421012 - DNA, 19 bp, Homo sapiens
  siRNA target sequence for MGC33607 (NM_152775.1,443-461).
ggattccaagacacttcat

SEQ ID NO: 421013 - DNA, 19 bp, Homo sapiens
  siRNA target sequence for MGC33607 (NM_152775.1,494-512).
gaacagtctccctcaaagt

SEQ ID NO: 421014 - DNA, 19 bp, Homo sapiens
  siRNA target sequence for MGC33607 (NM_152775.1,497-515).
cagtctccctcaaagtgta

SEQ ID NO: 421015 - DNA, 19 bp, Homo sapiens
  siRNA target sequence for MGC33607 (NM_152775.1,519-537).
gttccatcccagatacatt

SEQ ID NO: 421016 - DNA, 19 bp, Homo sapiens
  siRNA target sequence for MGC33607 (NM_152775.1,534-552).
cattccgaggacacattaa

SEQ ID NO: 421017 - DNA, 19 bp, Homo sapiens
  siRNA target sequence for MGC33607 (NM_152775.1,538-556).
ccgaggacacattaactct

SEQ ID NO: 421018 - DNA, 19 bp, Homo sapiens
  siRNA target sequence for MGC33607 (NM_152775.1,559-577).
gaacttcaacagacaattt

SEQ ID NO: 421019 - DNA, 19 bp, Homo sapiens
  siRNA target sequence for MGC33607 (NM_152775.1,655-673).
ctactgcacctccaaatgt

SEQ ID NO: 421020 - DNA, 19 bp, Homo sapiens
  siRNA target sequence for MGC33607 (NM_152775.1,674-692).
gatgtctcaagctgataca

SEQ ID NO: 421021 - DNA, 19 bp, Homo sapiens
  siRNA target sequence for MGC33607 (NM_152775.1,677-695).
gtctcaagctgatacagta

SEQ ID NO: 421022 - DNA, 19 bp, Homo sapiens
  siRNA target sequence for MGC33607 (NM_152775.1,724-742).
cttttctcaagcatggatt

SEQ ID NO: 421023 - DNA, 19 bp, Homo sapiens
  siRNA target sequence for MGC33607 (NM_152775.1,861-879).
gatgttcacaggaatggta

SEQ ID NO: 421024 - DNA, 19 bp, Homo sapiens
  siRNA target sequence for MGC33607 (NM_152775.1,892-910).
cccctattcaccaggataa

SEQ ID NO: 421025 - DNA, 19 bp, Homo sapiens
  siRNA target sequence for MGC33607 (NM_152775.1,935-953).
cttggacggtaacttaaat

SEQ ID NO: 421026 - DNA, 19 bp, Homo sapiens
  siRNA target sequence for MGC33607 (NM_152775.1,941-959).
cggtaacttaaatgaagat

SEQ ID NO: 421027 - DNA, 19 bp, Homo sapiens
  siRNA target sequence for MGC33607 (NM_152775.1,991-1009).
cattagtgaagaaattact

SEQ ID NO: 421028 - DNA, 19 bp, Homo sapiens
  siRNA target sequence for MGC33607 (NM_152775.1,1196-1214).
cgaccaaacaaaacatgaa

SEQ ID NO: 421029 - DNA, 19 bp, Homo sapiens
  siRNA target sequence for MGC33607 (NM_152775.1,1231-1249).
gacaaccatttctagtaaa

SEQ ID NO: 421030 - DNA, 19 bp, Homo sapiens
  siRNA target sequence for MGC33607 (NM_152775.1,1307-1325).
gcagtgtgttgcaaaaatt

SEQ ID NO: 421031 - DNA, 19 bp, Homo sapiens
  siRNA target sequence for MGC33607 (NM_152775.1,1318-1336).
caaaaattcagtacttaca

SEQ ID NO: 421032 - DNA, 19 bp, Homo sapiens
  siRNA target sequence for MGC33607 (NM_152775.1,1337-1355).
gaattacctaaaagaatct

SEQ ID NO: 421033 - DNA, 19 bp, Homo sapiens
  siRNA target sequence for MGC33607 (NM_152775.1,1358-1376).
gcagatacagaaaaaagta

SEQ ID NO: 421034 - DNA, 19 bp, Homo sapiens
  siRNA target sequence for MGC33607 (NM_152775.1,1392-1410).
gaaaatctaaaccttaagt

SEQ ID NO: 421035 - DNA, 19 bp, Homo sapiens
  siRNA target sequence for MGC33607 (NM_152775.1,1411-1429).
ccaaaatgaaacctcttat

SEQ ID NO: 421036 - DNA, 19 bp, Homo sapiens
  siRNA target sequence for MGC33607 (NM_152775.1,1425-1443).
cttatctttaccacacaat

SEQ ID NO: 421037 - DNA, 19 bp, Homo sapiens
  siRNA target sequence for MGC33607 (NM_152775.1,1435-1453).
ccacacaatctctcataca

SEQ ID NO: 421038 - DNA, 19 bp, Homo sapiens
  siRNA target sequence for MGC33607 (NM_152775.1,1444-1462).
ctctcatacagaaagttga

SEQ ID NO: 421039 - DNA, 19 bp, Homo sapiens
  siRNA target sequence for MGC33607 (NM_152775.1,1504-1522).
gtactattcagtctaagtt

SEQ ID NO: 421040 - DNA, 19 bp, Homo sapiens
  siRNA target sequence for MGC33607 (NM_152775.1,1543-1561).
gcaaagagtgtcttaaaga

SEQ ID NO: 421041 - DNA, 19 bp, Homo sapiens
  siRNA target sequence for MGC33607 (NM_152775.1,1590-1608).
gttctgcaaggccaaaata

SEQ ID NO: 421042 - DNA, 19 bp, Homo sapiens
  siRNA target sequence for MGC33607 (NM_152775.1,1684-1702).
gtaaggaacacaaaactca

SEQ ID NO: 421043 - DNA, 19 bp, Homo sapiens
  siRNA target sequence for MGC33607 (NM_152775.1,1688-1706).
ggaacacaaaactcaaagt

SEQ ID NO: 421044 - DNA, 19 bp, Homo sapiens
  siRNA target sequence for MGC33607 (NM_152775.1,1867-1885).
gccagctagagataatcca

SEQ ID NO: 421045 - DNA, 19 bp, Homo sapiens
  siRNA target sequence for MGC33607 (NM_152775.1,1965-1983).
ctcaaccttgaaacaacat

SEQ ID NO: 421046 - DNA, 19 bp, Homo sapiens
  siRNA target sequence for MGC33607 (NM_152775.1,2001-2019).
gccagacaaattatggaaa

SEQ ID NO: 421047 - DNA, 19 bp, Homo sapiens
  siRNA target sequence for MGC33607 (NM_152775.1,2134-2152).
gcaaggaatgtgaaatgtt

SEQ ID NO: 421048 - DNA, 19 bp, Homo sapiens
  siRNA target sequence for MGC33607 (NM_152775.1,2135-2153).
caaggaatgtgaaatgtta

SEQ ID NO: 421049 - DNA, 19 bp, Homo sapiens
  siRNA target sequence for MGC33607 (NM_152775.1,2168-2186).
ggaaaccaaaacagataat

SEQ ID NO: 421050 - DNA, 19 bp, Homo sapiens
  siRNA target sequence for MGC33607 (NM_152775.1,2243-2261).
cagcatcagtagacttact

SEQ ID NO: 421051 - DNA, 19 bp, Homo sapiens
  siRNA target sequence for MGC33607 (NM_152775.1,2274-2292).
cttttagaaaattacgtaa

SEQ ID NO: 421052 - DNA, 19 bp, Homo sapiens
  siRNA target sequence for MGC33607 (NM_152775.1,2311-2329).
gggataccttggaatttga

SEQ ID NO: 421053 - DNA, 19 bp, Homo sapiens
  siRNA target sequence for MGC33607 (NM_152775.1,2335-2353).
ggcatcttcaacgagaata

SEQ ID NO: 421054 - DNA, 19 bp, Homo sapiens
  siRNA target sequence for MGC33607 (NM_152775.1,2336-2354).
gcatcttcaacgagaatat

SEQ ID NO: 421055 - DNA, 19 bp, Homo sapiens
  siRNA target sequence for MGC33607 (NM_152775.1,2337-2355).
catcttcaacgagaatatt

SEQ ID NO: 421056 - DNA, 19 bp, Homo sapiens
  siRNA target sequence for MGC33607 (NM_152775.1,2346-2364).
cgagaatatttaagtttaa

SEQ ID NO: 421057 - DNA, 19 bp, Homo sapiens
  siRNA target sequence for MGC33607 (NM_152775.1,2384-2402).
gcataatgacccttcaaaa

SEQ ID NO: 421058 - DNA, 19 bp, Homo sapiens
  siRNA target sequence for MGC33607 (NM_152775.1,2391-2409).
gacccttcaaaaacaactt

SEQ ID NO: 421059 - DNA, 19 bp, Homo sapiens
  siRNA target sequence for MGC33607 (NM_152775.1,2424-2442).
gagaaattccattttgaca

SEQ ID NO: 421060 - DNA, 19 bp, Homo sapiens
  siRNA target sequence for MGC33607 (NM_152775.1,2444-2462).
ctatactcacgaagatact

SEQ ID NO: 421061 - DNA, 19 bp, Homo sapiens
  siRNA target sequence for MGC33607 (NM_152775.1,2481-2499).
cctttggcttcggatttga

SEQ ID NO: 421062 - DNA, 19 bp, Homo sapiens
  siRNA target sequence for MGC33607 (NM_152775.1,2488-2506).
cttcggatttgaaaggtta

SEQ ID NO: 421063 - DNA, 19 bp, Homo sapiens
  siRNA target sequence for C14orf48 (NM_152777.2,432-450).
gagagctgacccaagcaat

SEQ ID NO: 421064 - DNA, 19 bp, Homo sapiens
  siRNA target sequence for C14orf48 (NM_152777.2,479-497).
ggctgtggcaggaactcta

SEQ ID NO: 421065 - DNA, 19 bp, Homo sapiens
  siRNA target sequence for C14orf48 (NM_152777.2,535-553).
gtcgagaagcacaagcttt

SEQ ID NO: 421066 - DNA, 19 bp, Homo sapiens
  siRNA target sequence for C14orf48 (NM_152777.2,540-558).
gaagcacaagctttttgaa

SEQ ID NO: 421067 - DNA, 19 bp, Homo sapiens
  siRNA target sequence for C14orf48 (NM_152777.2,550-568).
ctttttgaagactatctga

SEQ ID NO: 421068 - DNA, 19 bp, Homo sapiens
  siRNA target sequence for C14orf48 (NM_152777.2,753-771).
ggaccacagggctctcata

SEQ ID NO: 421069 - DNA, 19 bp, Homo sapiens
  siRNA target sequence for C14orf48 (NM_152777.2,763-781).
gctctcatagcctcaagat

SEQ ID NO: 421070 - DNA, 19 bp, Homo sapiens
  siRNA target sequence for FLJ14503 (NM_152780.2,171-189).
cagatgagaggcagagatt

SEQ ID NO: 421071 - DNA, 19 bp, Homo sapiens
  siRNA target sequence for FLJ14503 (NM_152780.2,511-529).
caaactttcaacatcaact

SEQ ID NO: 421072 - DNA, 19 bp, Homo sapiens
  siRNA target sequence for FLJ14503 (NM_152780.2,515-533).
ctttcaacatcaactatga

SEQ ID NO: 421073 - DNA, 19 bp, Homo sapiens
  siRNA target sequence for FLJ14503 (NM_152780.2,549-567).
cggagcctcccatgaataa

SEQ ID NO: 421074 - DNA, 19 bp, Homo sapiens
  siRNA target sequence for FLJ14503 (NM_152780.2,583-601).
caccgtggcaatatcctat

SEQ ID NO: 421075 - DNA, 19 bp, Homo sapiens
  siRNA target sequence for FLJ14503 (NM_152780.2,604-622).
cccagaccgagtattccat

SEQ ID NO: 421076 - DNA, 19 bp, Homo sapiens
  siRNA target sequence for FLJ14503 (NM_152780.2,619-637).
ccatgtctgtcctcgttta

SEQ ID NO: 421077 - DNA, 19 bp, Homo sapiens
  siRNA target sequence for FLJ14503 (NM_152780.2,648-666).
gccctcttaacccttctta

SEQ ID NO: 421078 - DNA, 19 bp, Homo sapiens
  siRNA target sequence for FLJ14503 (NM_152780.2,650-668).
cctcttaacccttcttaca

SEQ ID NO: 421079 - DNA, 19 bp, Homo sapiens
  siRNA target sequence for FLJ14503 (NM_152780.2,651-669).
ctcttaacccttcttacaa

SEQ ID NO: 421080 - DNA, 19 bp, Homo sapiens
  siRNA target sequence for FLJ14503 (NM_152780.2,653-671).
cttaacccttcttacaagt

SEQ ID NO: 421081 - DNA, 19 bp, Homo sapiens
  siRNA target sequence for FLJ14503 (NM_152780.2,675-693).
cacccactcgaaacattga

SEQ ID NO: 421082 - DNA, 19 bp, Homo sapiens
  siRNA target sequence for FLJ14503 (NM_152780.2,681-699).
ctcgaaacattgagaagaa

SEQ ID NO: 421083 - DNA, 19 bp, Homo sapiens
  siRNA target sequence for FLJ14503 (NM_152780.2,704-722).
gctacatctacgtctacat

SEQ ID NO: 421084 - DNA, 19 bp, Homo sapiens
  siRNA target sequence for FLJ14503 (NM_152780.2,796-814).
gcaacgaacagcaacttct

SEQ ID NO: 421085 - DNA, 19 bp, Homo sapiens
  siRNA target sequence for FLJ14503 (NM_152780.2,901-919).
caagacagctactaaagct

SEQ ID NO: 421086 - DNA, 19 bp, Homo sapiens
  siRNA target sequence for FLJ14503 (NM_152780.2,904-922).
gacagctactaaagcttat

SEQ ID NO: 421087 - DNA, 19 bp, Homo sapiens
  siRNA target sequence for FLJ14503 (NM_152780.2,928-946).
gtctccaaagacaacgaaa

SEQ ID NO: 421088 - DNA, 19 bp, Homo sapiens
  siRNA target sequence for FLJ14503 (NM_152780.2,1095-1113).
ccctagagaagcatgtagt

SEQ ID NO: 421089 - DNA, 19 bp, Homo sapiens
  siRNA target sequence for FLJ14503 (NM_152780.2,1212-1230).
gagaggctgcgaagatctt

SEQ ID NO: 421090 - DNA, 19 bp, Homo sapiens
  siRNA target sequence for FLJ14503 (NM_152780.2,1587-1605).
gtctcgagagagaacagat

SEQ ID NO: 421091 - DNA, 19 bp, Homo sapiens
  siRNA target sequence for FLJ14503 (NM_152780.2,1589-1607).
ctcgagagagaacagatta

SEQ ID NO: 421092 - DNA, 19 bp, Homo sapiens
  siRNA target sequence for FLJ14503 (NM_152780.2,1760-1778).
ctggttgtccccaacaaaa

SEQ ID NO: 421093 - DNA, 19 bp, Homo sapiens
  siRNA target sequence for FLJ14503 (NM_152780.2,1766-1784).
gtccccaacaaaatggaaa

SEQ ID NO: 421094 - DNA, 19 bp, Homo sapiens
  siRNA target sequence for FLJ14503 (NM_152780.2,1842-1860).
cttatccccaagacatttt

SEQ ID NO: 421095 - DNA, 19 bp, Homo sapiens
  siRNA target sequence for FLJ14503 (NM_152780.2,1993-2011).
ctctatcccggaattttca

SEQ ID NO: 421096 - DNA, 19 bp, Homo sapiens
  siRNA target sequence for FLJ14503 (NM_152780.2,2038-2056).
gtctctggaccaaaatgga

SEQ ID NO: 421097 - DNA, 19 bp, Homo sapiens
  siRNA target sequence for FLJ14503 (NM_152780.2,2139-2157).
gcctggacgactgtaacaa

SEQ ID NO: 421098 - DNA, 19 bp, Homo sapiens
  siRNA target sequence for FLJ14503 (NM_152780.2,2140-2158).
cctggacgactgtaacaaa

SEQ ID NO: 421099 - DNA, 19 bp, Homo sapiens
  siRNA target sequence for FLJ14503 (NM_152780.2,2141-2159).
ctggacgactgtaacaaaa

SEQ ID NO: 421100 - DNA, 19 bp, Homo sapiens
  siRNA target sequence for FLJ14503 (NM_152780.2,2162-2180).
cttatcgaaggatttaaca

SEQ ID NO: 421101 - DNA, 19 bp, Homo sapiens
  siRNA target sequence for FLJ32830 (NM_152781.1,203-221).
gtacccatggctggaatat

SEQ ID NO: 421102 - DNA, 19 bp, Homo sapiens
  siRNA target sequence for FLJ32830 (NM_152781.1,250-268).
ccatggctcctgttcatct

SEQ ID NO: 421103 - DNA, 19 bp, Homo sapiens
  siRNA target sequence for FLJ32830 (NM_152781.1,354-372).
gtcccgtactgctacttca

SEQ ID NO: 421104 - DNA, 19 bp, Homo sapiens
  siRNA target sequence for FLJ32830 (NM_152781.1,357-375).
ccgtactgctacttcaaga

SEQ ID NO: 421105 - DNA, 19 bp, Homo sapiens
  siRNA target sequence for FLJ32830 (NM_152781.1,358-376).
cgtactgctacttcaagaa

SEQ ID NO: 421106 - DNA, 19 bp, Homo sapiens
  siRNA target sequence for FLJ32830 (NM_152781.1,486-504).
catcaaacccacatcaaaa

SEQ ID NO: 421107 - DNA, 19 bp, Homo sapiens
  siRNA target sequence for FLJ32830 (NM_152781.1,489-507).
caaacccacatcaaaatgt

SEQ ID NO: 421108 - DNA, 19 bp, Homo sapiens
  siRNA target sequence for FLJ32830 (NM_152781.1,517-535).
caatgagcaagctgactat

SEQ ID NO: 421109 - DNA, 19 bp, Homo sapiens
  siRNA target sequence for FLJ32830 (NM_152781.1,676-694).
gcatcagtgacaagtttgt

SEQ ID NO: 421110 - DNA, 19 bp, Homo sapiens
  siRNA target sequence for FLJ32830 (NM_152781.1,773-791).
gggttgcctgaataagcat

SEQ ID NO: 421111 - DNA, 19 bp, Homo sapiens
  siRNA target sequence for FLJ32830 (NM_152781.1,794-812).
gatccgggctctcatcaaa

SEQ ID NO: 421112 - DNA, 19 bp, Homo sapiens
  siRNA target sequence for FLJ32830 (NM_152781.1,1024-1042).
gcaacatggtccaagagtt

SEQ ID NO: 421113 - DNA, 19 bp, Homo sapiens
  siRNA target sequence for FLJ32830 (NM_152781.1,1175-1193).
ccttgaggaccgctttgaa

SEQ ID NO: 421114 - DNA, 19 bp, Homo sapiens
  siRNA target sequence for FLJ32830 (NM_152781.1,1213-1231).
ccattgggctggaacagat

SEQ ID NO: 421115 - DNA, 19 bp, Homo sapiens
  siRNA target sequence for FLJ32830 (NM_152781.1,1243-1261).
ggctagaggaactcacatt

SEQ ID NO: 421116 - DNA, 19 bp, Homo sapiens
  siRNA target sequence for FLJ32830 (NM_152781.1,1271-1289).
caggaggaagacgcataat

SEQ ID NO: 421117 - DNA, 19 bp, Homo sapiens
  siRNA target sequence for FLJ32830 (NM_152781.1,1466-1484).
gctcctggacttactagat

SEQ ID NO: 421118 - DNA, 19 bp, Homo sapiens
  siRNA target sequence for FLJ32830 (NM_152781.1,1511-1529).
gagtctacaagaaacatta

SEQ ID NO: 421119 - DNA, 19 bp, Homo sapiens
  siRNA target sequence for FLJ32830 (NM_152781.1,1657-1675).
cagaagagttaactattca

SEQ ID NO: 421120 - DNA, 19 bp, Homo sapiens
  siRNA target sequence for FLJ32830 (NM_152781.1,1664-1682).
gttaactattcaagacttt

SEQ ID NO: 421121 - DNA, 19 bp, Homo sapiens
  siRNA target sequence for FLJ32830 (NM_152781.1,1694-1712).
gctgaaccccttgtttatt

SEQ ID NO: 421122 - DNA, 19 bp, Homo sapiens
  siRNA target sequence for FLJ32830 (NM_152781.1,1766-1784).
ctgctcgaaaccacgaaaa

SEQ ID NO: 421123 - DNA, 19 bp, Homo sapiens
  siRNA target sequence for FLJ32830 (NM_152781.1,1768-1786).
gctcgaaaccacgaaaaca

SEQ ID NO: 421124 - DNA, 19 bp, Homo sapiens
  siRNA target sequence for FLJ32830 (NM_152781.1,1769-1787).
ctcgaaaccacgaaaacat

SEQ ID NO: 421125 - DNA, 19 bp, Homo sapiens
  siRNA target sequence for FLJ32830 (NM_152781.1,1835-1853).
ccgggtccttgctgaaatt

SEQ ID NO: 421126 - DNA, 19 bp, Homo sapiens
  siRNA target sequence for MGC33329 (NM_152782.2,308-326).
cctcagaaatccagacaat

SEQ ID NO: 421127 - DNA, 19 bp, Homo sapiens
  siRNA target sequence for MGC33329 (NM_152782.2,350-368).
ggttcaaggctttataaat

SEQ ID NO: 421128 - DNA, 19 bp, Homo sapiens
  siRNA target sequence for MGC33329 (NM_152782.2,378-396).
gacttcgtatgcctaaaga

SEQ ID NO: 421129 - DNA, 19 bp, Homo sapiens
  siRNA target sequence for MGC33329 (NM_152782.2,439-457).
caattttcgtcaaattcta

SEQ ID NO: 421130 - DNA, 19 bp, Homo sapiens
  siRNA target sequence for MGC33329 (NM_152782.2,479-497).
gtcctgaaggcattgctaa

SEQ ID NO: 421131 - DNA, 19 bp, Homo sapiens
  siRNA target sequence for MGC33329 (NM_152782.2,488-506).
gcattgctaagagatatga

SEQ ID NO: 421132 - DNA, 19 bp, Homo sapiens
  siRNA target sequence for MGC33329 (NM_152782.2,581-599).
gtgtcaaacttggtcaatt

SEQ ID NO: 421133 - DNA, 19 bp, Homo sapiens
  siRNA target sequence for MGC33329 (NM_152782.2,583-601).
gtcaaacttggtcaattat

SEQ ID NO: 421134 - DNA, 19 bp, Homo sapiens
  siRNA target sequence for MGC33329 (NM_152782.2,683-701).
gggacctcagaaagttata

SEQ ID NO: 421135 - DNA, 19 bp, Homo sapiens
  siRNA target sequence for MGC33329 (NM_152782.2,685-703).
gacctcagaaagttataaa

SEQ ID NO: 421136 - DNA, 19 bp, Homo sapiens
  siRNA target sequence for MGC33329 (NM_152782.2,732-750).
ggataggtttcctaaatca

SEQ ID NO: 421137 - DNA, 19 bp, Homo sapiens
  siRNA target sequence for MGC33329 (NM_152782.2,757-775).
gcctccagatattattctt

SEQ ID NO: 421138 - DNA, 19 bp, Homo sapiens
  siRNA target sequence for MGC33329 (NM_152782.2,821-839).
cagggtcataccctaatca

SEQ ID NO: 421139 - DNA, 19 bp, Homo sapiens
  siRNA target sequence for MGC33329 (NM_152782.2,939-957).
ctgtctatggcatcacaaa

SEQ ID NO: 421140 - DNA, 19 bp, Homo sapiens
  siRNA target sequence for MGC33329 (NM_152782.2,941-959).
gtctatggcatcacaaaaa

SEQ ID NO: 421141 - DNA, 19 bp, Homo sapiens
  siRNA target sequence for MGC33329 (NM_152782.2,982-1000).
cctaggtcagtttatatat

SEQ ID NO: 421142 - DNA, 19 bp, Homo sapiens
  siRNA target sequence for MGC33329 (NM_152782.2,986-1004).
ggtcagtttatatataaca

SEQ ID NO: 421143 - DNA, 19 bp, Homo sapiens
  siRNA target sequence for MGC33329 (NM_152782.2,987-1005).
gtcagtttatatataacaa

SEQ ID NO: 421144 - DNA, 19 bp, Homo sapiens
  siRNA target sequence for MGC33329 (NM_152782.2,1010-1028).
ggaaccaccgttcaaacat

SEQ ID NO: 421145 - DNA, 19 bp, Homo sapiens
  siRNA target sequence for MGC33329 (NM_152782.2,1014-1032).
ccaccgttcaaacatttga

SEQ ID NO: 421146 - DNA, 19 bp, Homo sapiens
  siRNA target sequence for MGC33329 (NM_152782.2,1015-1033).
caccgttcaaacatttgaa

SEQ ID NO: 421147 - DNA, 19 bp, Homo sapiens
  siRNA target sequence for MGC33329 (NM_152782.2,1039-1057).
gcatgcagtttctgaatat

SEQ ID NO: 421148 - DNA, 19 bp, Homo sapiens
  siRNA target sequence for MGC33329 (NM_152782.2,1065-1083).
gtgtgaaacttaatatctt

SEQ ID NO: 421149 - DNA, 19 bp, Homo sapiens
  siRNA target sequence for MGC33329 (NM_152782.2,1093-1111).
gggacacccgaagtatact

SEQ ID NO: 421150 - DNA, 19 bp, Homo sapiens
  siRNA target sequence for MGC33329 (NM_152782.2,1094-1112).
ggacacccgaagtatactt

SEQ ID NO: 421151 - DNA, 19 bp, Homo sapiens
  siRNA target sequence for MGC33329 (NM_152782.2,1097-1115).
cacccgaagtatacttgtt

SEQ ID NO: 421152 - DNA, 19 bp, Homo sapiens
  siRNA target sequence for MGC33329 (NM_152782.2,1100-1118).
ccgaagtatacttgtttat

SEQ ID NO: 421153 - DNA, 19 bp, Homo sapiens
  siRNA target sequence for MGC33329 (NM_152782.2,1101-1119).
cgaagtatacttgtttata

SEQ ID NO: 421154 - DNA, 19 bp, Homo sapiens
  siRNA target sequence for MGC39581 (NM_152784.2,284-302).
gactagtctccttccattt

SEQ ID NO: 421155 - DNA, 19 bp, Homo sapiens
  siRNA target sequence for MGC39581 (NM_152784.2,341-359).
gacatcagcacattttgct

SEQ ID NO: 421156 - DNA, 19 bp, Homo sapiens
  siRNA target sequence for MGC39581 (NM_152784.2,361-379).
gttcgttattgctgttagt

SEQ ID NO: 421157 - DNA, 19 bp, Homo sapiens
  siRNA target sequence for MGC39581 (NM_152784.2,378-396).
gtagtggatcaaaaagtct

SEQ ID NO: 421158 - DNA, 19 bp, Homo sapiens
  siRNA target sequence for MGC39581 (NM_152784.2,424-442).
ggagcatgtctttaggtat

SEQ ID NO: 421159 - DNA, 19 bp, Homo sapiens
  siRNA target sequence for MGC39581 (NM_152784.2,425-443).
gagcatgtctttaggtata

SEQ ID NO: 421160 - DNA, 19 bp, Homo sapiens
  siRNA target sequence for MGC39581 (NM_152784.2,459-477).
catgtctctggtgataatt

SEQ ID NO: 421161 - DNA, 19 bp, Homo sapiens
  siRNA target sequence for MGC39581 (NM_152784.2,468-486).
ggtgataattgttgttata

SEQ ID NO: 421162 - DNA, 19 bp, Homo sapiens
  siRNA target sequence for MGC39581 (NM_152784.2,478-496).
gttgttatactggaagttt

SEQ ID NO: 421163 - DNA, 19 bp, Homo sapiens
  siRNA target sequence for MGC39581 (NM_152784.2,481-499).
gttatactggaagtttgtt

SEQ ID NO: 421164 - DNA, 19 bp, Homo sapiens
  siRNA target sequence for MGC39581 (NM_152784.2,502-520).
gtgtgcatgtcagtaattt

SEQ ID NO: 421165 - DNA, 19 bp, Homo sapiens
  siRNA target sequence for MGC39581 (NM_152784.2,506-524).
gcatgtcagtaatttggtt

SEQ ID NO: 421166 - DNA, 19 bp, Homo sapiens
  siRNA target sequence for MGC39581 (NM_152784.2,507-525).
catgtcagtaatttggttt

SEQ ID NO: 421167 - DNA, 19 bp, Homo sapiens
  siRNA target sequence for MGC39581 (NM_152784.2,546-564).
cagatatcccagacttata

SEQ ID NO: 421168 - DNA, 19 bp, Homo sapiens
  siRNA target sequence for MGC39581 (NM_152784.2,557-575).
gacttatatatattattca

SEQ ID NO: 421169 - DNA, 19 bp, Homo sapiens
  siRNA target sequence for MGC39581 (NM_152784.2,582-600).
gggggattcagtttttgga

SEQ ID NO: 421170 - DNA, 19 bp, Homo sapiens
  siRNA target sequence for MGC39581 (NM_152784.2,592-610).
gtttttggaagtatcacta

SEQ ID NO: 421171 - DNA, 19 bp, Homo sapiens
  siRNA target sequence for MGC39581 (NM_152784.2,644-662).
cggaatcttccactttttt

SEQ ID NO: 421172 - DNA, 19 bp, Homo sapiens
  siRNA target sequence for MGC39581 (NM_152784.2,679-697).
cgatgcttgtagtgaatca

SEQ ID NO: 421173 - DNA, 19 bp, Homo sapiens
  siRNA target sequence for MGC39581 (NM_152784.2,680-698).
gatgcttgtagtgaatcaa

SEQ ID NO: 421174 - DNA, 19 bp, Homo sapiens
  siRNA target sequence for MGC39581 (NM_152784.2,696-714).
caagggaagggcatgttca

SEQ ID NO: 421175 - DNA, 19 bp, Homo sapiens
  siRNA target sequence for MGC39581 (NM_152784.2,740-758).
gagtttcgggctgtctttt

SEQ ID NO: 421176 - DNA, 19 bp, Homo sapiens
  siRNA target sequence for MGC39581 (NM_152784.2,742-760).
gtttcgggctgtcttttga

SEQ ID NO: 421177 - DNA, 19 bp, Homo sapiens
  siRNA target sequence for MGC39581 (NM_152784.2,746-764).
cgggctgtcttttgactat

SEQ ID NO: 421178 - DNA, 19 bp, Homo sapiens
  siRNA target sequence for MGC39581 (NM_152784.2,747-765).
gggctgtcttttgactata

SEQ ID NO: 421179 - DNA, 19 bp, Homo sapiens
  siRNA target sequence for MGC39581 (NM_152784.2,833-851).
cctgttgttttcccataat

SEQ ID NO: 421180 - DNA, 19 bp, Homo sapiens
  siRNA target sequence for MGC39581 (NM_152784.2,867-885).
gacaccgtccgggtgaaaa

SEQ ID NO: 421181 - DNA, 19 bp, Homo sapiens
  siRNA target sequence for MGC39581 (NM_152784.2,869-887).
caccgtccgggtgaaaaaa

SEQ ID NO: 421182 - DNA, 19 bp, Homo sapiens
  siRNA target sequence for MGC39581 (NM_152784.2,872-890).
cgtccgggtgaaaaaagga

SEQ ID NO: 421183 - DNA, 19 bp, Homo sapiens
  siRNA target sequence for MGC39581 (NM_152784.2,896-914).
gaccttgttttcttccatt

SEQ ID NO: 421184 - DNA, 19 bp, Homo sapiens
  siRNA target sequence for MGC39581 (NM_152784.2,941-959).
cattgctgtcactgaaaat

SEQ ID NO: 421185 - DNA, 19 bp, Homo sapiens
  siRNA target sequence for MGC39581 (NM_152784.2,1010-1028).
catcgtgccaagttccata

SEQ ID NO: 421186 - DNA, 19 bp, Homo sapiens
  siRNA target sequence for MGC39581 (NM_152784.2,1014-1032).
gtgccaagttccataatca

SEQ ID NO: 421187 - DNA, 19 bp, Homo sapiens
  siRNA target sequence for MGC39581 (NM_152784.2,1089-1107).
gggactctggaaatactga

SEQ ID NO: 421188 - DNA, 19 bp, Homo sapiens
  siRNA target sequence for MGC39581 (NM_152784.2,1186-1204).
ctgaactccacgttggaaa

SEQ ID NO: 421189 - DNA, 19 bp, Homo sapiens
  siRNA target sequence for MGC39581 (NM_152784.2,1217-1235).
gtttctgacaggagaattt

SEQ ID NO: 421190 - DNA, 19 bp, Homo sapiens
  siRNA target sequence for MGC39581 (NM_152784.2,1243-1261).
ggatgtataccattgacat

SEQ ID NO: 421191 - DNA, 19 bp, Homo sapiens
  siRNA target sequence for MGC39581 (NM_152784.2,1370-1388).
ctacgagaacggttacaca

SEQ ID NO: 421192 - DNA, 19 bp, Homo sapiens
  siRNA target sequence for MGC39581 (NM_152784.2,1376-1394).
gaacggttacacatcagat

SEQ ID NO: 421193 - DNA, 19 bp, Homo sapiens
  siRNA target sequence for MGC39581 (NM_152784.2,1572-1590).
ggctgcgacctggataaaa

SEQ ID NO: 421194 - DNA, 19 bp, Homo sapiens
  siRNA target sequence for MGC39581 (NM_152784.2,1595-1613).
cgtcatccagaacaaagtt

SEQ ID NO: 421195 - DNA, 19 bp, Homo sapiens
  siRNA target sequence for MGC39581 (NM_152784.2,1642-1660).
ccttgaccctgcaagacaa

SEQ ID NO: 421196 - DNA, 19 bp, Homo sapiens
  siRNA target sequence for MGC39581 (NM_152784.2,1643-1661).
cttgaccctgcaagacaat

SEQ ID NO: 421197 - DNA, 19 bp, Homo sapiens
  siRNA target sequence for MGC39581 (NM_152784.2,1725-1743).
gacctgcacgtgttttact

SEQ ID NO: 421198 - DNA, 19 bp, Homo sapiens
  siRNA target sequence for MGC39581 (NM_152784.2,1762-1780).
gtcctctcctcgtctacta

SEQ ID NO: 421199 - DNA, 19 bp, Homo sapiens
  siRNA target sequence for MGC39581 (NM_152784.2,1765-1783).
ctctcctcgtctactatga

SEQ ID NO: 421200 - DNA, 19 bp, Homo sapiens
  siRNA target sequence for MGC39581 (NM_152784.2,1767-1785).
ctcctcgtctactatgaca

SEQ ID NO: 421201 - DNA, 19 bp, Homo sapiens
  siRNA target sequence for MGC39581 (NM_152784.2,1806-1824).
gagctgtggcgaaaagaca

SEQ ID NO: 421202 - DNA, 19 bp, Homo sapiens
  siRNA target sequence for MGC39581 (NM_152784.2,1841-1859).
cgacgccgagtatgtgtta

SEQ ID NO: 421203 - DNA, 19 bp, Homo sapiens
  siRNA target sequence for MGC39581 (NM_152784.2,1866-1884).
gtgaacgggcagttctcat

SEQ ID NO: 421204 - DNA, 19 bp, Homo sapiens
  siRNA target sequence for MGC39581 (NM_152784.2,1902-1920).
gcccagtcggccatgtgta

SEQ ID NO: 421205 - DNA, 19 bp, Homo sapiens
  siRNA target sequence for MGC39581 (NM_152784.2,1934-1952).
gaactggaccaccatgata

SEQ ID NO: 421206 - DNA, 19 bp, Homo sapiens
  siRNA target sequence for MGC39581 (NM_152784.2,2037-2055).
ccagacgtccagtatcaga

SEQ ID NO: 421207 - DNA, 19 bp, Homo sapiens
  siRNA target sequence for MGC39581 (NM_152784.2,2038-2056).
cagacgtccagtatcagat

SEQ ID NO: 421208 - DNA, 19 bp, Homo sapiens
  siRNA target sequence for MGC39581 (NM_152784.2,2068-2086).
ggacagcaaaccagatcat

SEQ ID NO: 421209 - DNA, 19 bp, Homo sapiens
  siRNA target sequence for MGC39581 (NM_152784.2,2069-2087).
gacagcaaaccagatcatt

SEQ ID NO: 421210 - DNA, 19 bp, Homo sapiens
  siRNA target sequence for MGC39581 (NM_152784.2,2094-2112).
cacaatggcttttatgtct

SEQ ID NO: 421211 - DNA, 19 bp, Homo sapiens
  siRNA target sequence for MGC39581 (NM_152784.2,2215-2233).
gagtcgtcatcctactgat

SEQ ID NO: 421212 - DNA, 19 bp, Homo sapiens
  siRNA target sequence for MGC39581 (NM_152784.2,2256-2274).
gtttggctggcctacaaga

SEQ ID NO: 421213 - DNA, 19 bp, Homo sapiens
  siRNA target sequence for GCET2 (NM_152785.2,204-222).
gatgctgggatcaccatat

SEQ ID NO: 421214 - DNA, 19 bp, Homo sapiens
  siRNA target sequence for GCET2 (NM_152785.2,245-263).
ccatggaaaaaaatactca

SEQ ID NO: 421215 - DNA, 19 bp, Homo sapiens
  siRNA target sequence for GCET2 (NM_152785.2,377-395).
catcgggttctctgtacaa

SEQ ID NO: 421216 - DNA, 19 bp, Homo sapiens
  siRNA target sequence for GCET2 (NM_152785.2,483-501).
ctgagtattcacttctaca

SEQ ID NO: 421217 - DNA, 19 bp, Homo sapiens
  siRNA target sequence for GCET2 (NM_152785.2,530-548).
cgatccccagaagatgaat

SEQ ID NO: 421218 - DNA, 19 bp, Homo sapiens
  siRNA target sequence for TAB3 (NM_152787.2,597-615).
gacaacgtttccctgaaat

SEQ ID NO: 421219 - DNA, 19 bp, Homo sapiens
  siRNA target sequence for TAB3 (NM_152787.2,628-646).
ggtgtctcagtgcatgtta

SEQ ID NO: 421220 - DNA, 19 bp, Homo sapiens
  siRNA target sequence for TAB3 (NM_152787.2,643-661).
gttacagaataacaacaat

SEQ ID NO: 421221 - DNA, 19 bp, Homo sapiens
  siRNA target sequence for TAB3 (NM_152787.2,689-707).
caggagagtagcaaatact

SEQ ID NO: 421222 - DNA, 19 bp, Homo sapiens
  siRNA target sequence for TAB3 (NM_152787.2,706-724).
cttatatatggaataccat

SEQ ID NO: 421223 - DNA, 19 bp, Homo sapiens
  siRNA target sequence for TAB3 (NM_152787.2,721-739).
ccatagtccagatgacaat

SEQ ID NO: 421224 - DNA, 19 bp, Homo sapiens
  siRNA target sequence for TAB3 (NM_152787.2,750-768).
gaaatcgccttttacatat

SEQ ID NO: 421225 - DNA, 19 bp, Homo sapiens
  siRNA target sequence for TAB3 (NM_152787.2,781-799).
ccattctcctagtagctat

SEQ ID NO: 421226 - DNA, 19 bp, Homo sapiens
  siRNA target sequence for TAB3 (NM_152787.2,830-848).
ggtcgaacactggtacata

SEQ ID NO: 421227 - DNA, 19 bp, Homo sapiens
  siRNA target sequence for TAB3 (NM_152787.2,841-859).
ggtacatagctcaagtgat

SEQ ID NO: 421228 - DNA, 19 bp, Homo sapiens
  siRNA target sequence for TAB3 (NM_152787.2,852-870).
caagtgatggacatattga

SEQ ID NO: 421229 - DNA, 19 bp, Homo sapiens
  siRNA target sequence for TAB3 (NM_152787.2,884-902).
gcaggtaaacagctgatat

SEQ ID NO: 421230 - DNA, 19 bp, Homo sapiens
  siRNA target sequence for TAB3 (NM_152787.2,941-959).
gctgctactcccaactaca

SEQ ID NO: 421231 - DNA, 19 bp, Homo sapiens
  siRNA target sequence for TAB3 (NM_152787.2,942-960).
ctgctactcccaactacaa

SEQ ID NO: 421232 - DNA, 19 bp, Homo sapiens
  siRNA target sequence for TAB3 (NM_152787.2,948-966).
ctcccaactacaatccatt

SEQ ID NO: 421233 - DNA, 19 bp, Homo sapiens
  siRNA target sequence for TAB3 (NM_152787.2,951-969).
ccaactacaatccattttt

SEQ ID NO: 421234 - DNA, 19 bp, Homo sapiens
  siRNA target sequence for TAB3 (NM_152787.2,1048-1066).
gaatccgtctgctatgcaa

SEQ ID NO: 421235 - DNA, 19 bp, Homo sapiens
  siRNA target sequence for TAB3 (NM_152787.2,1080-1098).
caccgccacctccttcata

SEQ ID NO: 421236 - DNA, 19 bp, Homo sapiens
  siRNA target sequence for TAB3 (NM_152787.2,1082-1100).
ccgccacctccttcataca

SEQ ID NO: 421237 - DNA, 19 bp, Homo sapiens
  siRNA target sequence for TAB3 (NM_152787.2,1083-1101).
cgccacctccttcatacat

SEQ ID NO: 421238 - DNA, 19 bp, Homo sapiens
  siRNA target sequence for TAB3 (NM_152787.2,1102-1120).
gcacatacctcggtatagt

SEQ ID NO: 421239 - DNA, 19 bp, Homo sapiens
  siRNA target sequence for TAB3 (NM_152787.2,1103-1121).
cacatacctcggtatagta

SEQ ID NO: 421240 - DNA, 19 bp, Homo sapiens
  siRNA target sequence for TAB3 (NM_152787.2,1105-1123).
catacctcggtatagtaca

SEQ ID NO: 421241 - DNA, 19 bp, Homo sapiens
  siRNA target sequence for TAB3 (NM_152787.2,1112-1130).
cggtatagtacaaatccaa

SEQ ID NO: 421242 - DNA, 19 bp, Homo sapiens
  siRNA target sequence for TAB3 (NM_152787.2,1113-1131).
ggtatagtacaaatccaat

SEQ ID NO: 421243 - DNA, 19 bp, Homo sapiens
  siRNA target sequence for TAB3 (NM_152787.2,1119-1137).
gtacaaatccaattactgt

SEQ ID NO: 421244 - DNA, 19 bp, Homo sapiens
  siRNA target sequence for TAB3 (NM_152787.2,1127-1145).
ccaattactgttacagtat

SEQ ID NO: 421245 - DNA, 19 bp, Homo sapiens
  siRNA target sequence for TAB3 (NM_152787.2,1199-1217).
caaattccaagcaatctct

SEQ ID NO: 421246 - DNA, 19 bp, Homo sapiens
  siRNA target sequence for TAB3 (NM_152787.2,1313-1331).
ggcccagtgcctcactata

SEQ ID NO: 421247 - DNA, 19 bp, Homo sapiens
  siRNA target sequence for TAB3 (NM_152787.2,1327-1345).
ctatagccagcgtccttta

SEQ ID NO: 421248 - DNA, 19 bp, Homo sapiens
  siRNA target sequence for TAB3 (NM_152787.2,1336-1354).
gcgtcctttacctgtttat

SEQ ID NO: 421249 - DNA, 19 bp, Homo sapiens
  siRNA target sequence for TAB3 (NM_152787.2,1409-1427).
cctcagtctgcttaccatt

SEQ ID NO: 421250 - DNA, 19 bp, Homo sapiens
  siRNA target sequence for TAB3 (NM_152787.2,1488-1506).
cccagttgggccacatctt

SEQ ID NO: 421251 - DNA, 19 bp, Homo sapiens
  siRNA target sequence for TAB3 (NM_152787.2,1490-1508).
cagttgggccacatcttta

SEQ ID NO: 421252 - DNA, 19 bp, Homo sapiens
  siRNA target sequence for TAB3 (NM_152787.2,1511-1529).
ccacctagtccttcaacta

SEQ ID NO: 421253 - DNA, 19 bp, Homo sapiens
  siRNA target sequence for TAB3 (NM_152787.2,1533-1551).
caccccatccatatcaaca

SEQ ID NO: 421254 - DNA, 19 bp, Homo sapiens
  siRNA target sequence for TAB3 (NM_152787.2,1553-1571).
ggacctcctagctatcaga

SEQ ID NO: 421255 - DNA, 19 bp, Homo sapiens
  siRNA target sequence for TAB3 (NM_152787.2,1554-1572).
gacctcctagctatcagaa

SEQ ID NO: 421256 - DNA, 19 bp, Homo sapiens
  siRNA target sequence for TAB3 (NM_152787.2,1582-1600).
ccattcagtagcctatctt

SEQ ID NO: 421257 - DNA, 19 bp, Homo sapiens
  siRNA target sequence for TAB3 (NM_152787.2,1601-1619).
ccatacacagcatctagtt

SEQ ID NO: 421258 - DNA, 19 bp, Homo sapiens
  siRNA target sequence for TAB3 (NM_152787.2,1602-1620).
catacacagcatctagttt

SEQ ID NO: 421259 - DNA, 19 bp, Homo sapiens
  siRNA target sequence for TAB3 (NM_152787.2,1671-1689).
gacctgggacagcaattaa

SEQ ID NO: 421260 - DNA, 19 bp, Homo sapiens
  siRNA target sequence for TAB3 (NM_152787.2,1796-1814).
caaccaaaacctccattta

SEQ ID NO: 421261 - DNA, 19 bp, Homo sapiens
  siRNA target sequence for TAB3 (NM_152787.2,1800-1818).
caaaacctccatttagtgt

SEQ ID NO: 421262 - DNA, 19 bp, Homo sapiens
  siRNA target sequence for TAB3 (NM_152787.2,1817-1835).
gttaatcctgtgtatatta

SEQ ID NO: 421263 - DNA, 19 bp, Homo sapiens
  siRNA target sequence for TAB3 (NM_152787.2,1846-1864).
gccaactggaccttcttgt

SEQ ID NO: 421264 - DNA, 19 bp, Homo sapiens
  siRNA target sequence for TAB3 (NM_152787.2,1888-1906).
gataccaaacccaactaca

SEQ ID NO: 421265 - DNA, 19 bp, Homo sapiens
  siRNA target sequence for TAB3 (NM_152787.2,1925-1943).
ggccgagcaacgactgaaa

SEQ ID NO: 421266 - DNA, 19 bp, Homo sapiens
  siRNA target sequence for TAB3 (NM_152787.2,1931-1949).
gcaacgactgaaaatcttt

SEQ ID NO: 421267 - DNA, 19 bp, Homo sapiens
  siRNA target sequence for TAB3 (NM_152787.2,1992-2010).
ctattcagcccatttcagt

SEQ ID NO: 421268 - DNA, 19 bp, Homo sapiens
  siRNA target sequence for TAB3 (NM_152787.2,2091-2109).
cacaagccttgctgttaca

SEQ ID NO: 421269 - DNA, 19 bp, Homo sapiens
  siRNA target sequence for TAB3 (NM_152787.2,2170-2188).
gcggttgaagtctgaagtt

SEQ ID NO: 421270 - DNA, 19 bp, Homo sapiens
  siRNA target sequence for TAB3 (NM_152787.2,2171-2189).
cggttgaagtctgaagtta

SEQ ID NO: 421271 - DNA, 19 bp, Homo sapiens
  siRNA target sequence for TAB3 (NM_152787.2,2172-2190).
ggttgaagtctgaagttaa

SEQ ID NO: 421272 - DNA, 19 bp, Homo sapiens
  siRNA target sequence for TAB3 (NM_152787.2,2176-2194).
gaagtctgaagttaatggt

SEQ ID NO: 421273 - DNA, 19 bp, Homo sapiens
  siRNA target sequence for TAB3 (NM_152787.2,2252-2270).
cctacgcctgaggaaatga

SEQ ID NO: 421274 - DNA, 19 bp, Homo sapiens
  siRNA target sequence for TAB3 (NM_152787.2,2327-2345).
gaagttgacctccttcaat

SEQ ID NO: 421275 - DNA, 19 bp, Homo sapiens
  siRNA target sequence for TAB3 (NM_152787.2,2330-2348).
gttgacctccttcaatcta

SEQ ID NO: 421276 - DNA, 19 bp, Homo sapiens
  siRNA target sequence for TAB3 (NM_152787.2,2414-2432).
ccacccaagccatctaaaa

SEQ ID NO: 421277 - DNA, 19 bp, Homo sapiens
  siRNA target sequence for TAB3 (NM_152787.2,2442-2460).
cagacccctgcacaattga

SEQ ID NO: 421278 - DNA, 19 bp, Homo sapiens
  siRNA target sequence for TAB3 (NM_152787.2,2481-2499).
gcgtgacctccaaagtaca

SEQ ID NO: 421279 - DNA, 19 bp, Homo sapiens
  siRNA target sequence for TAB3 (NM_152787.2,2543-2561).
cgaactggctccacacaaa

SEQ ID NO: 421280 - DNA, 19 bp, Homo sapiens
  siRNA target sequence for TAB3 (NM_152787.2,2569-2587).
gacacaacctcgagatgaa

SEQ ID NO: 421281 - DNA, 19 bp, Homo sapiens
  siRNA target sequence for TAB3 (NM_152787.2,2571-2589).
cacaacctcgagatgaaga

SEQ ID NO: 421282 - DNA, 19 bp, Homo sapiens
  siRNA target sequence for TAB3 (NM_152787.2,2593-2611).
cgaaggggctccatggaat

SEQ ID NO: 421283 - DNA, 19 bp, Homo sapiens
  siRNA target sequence for TAB3 (NM_152787.2,2594-2612).
gaaggggctccatggaatt

SEQ ID NO: 421284 - DNA, 19 bp, Homo sapiens
  siRNA target sequence for TAB3 (NM_152787.2,2599-2617).
ggctccatggaattgtgat

SEQ ID NO: 421285 - DNA, 19 bp, Homo sapiens
  siRNA target sequence for TAB3 (NM_152787.2,2600-2618).
gctccatggaattgtgata

SEQ ID NO: 421286 - DNA, 19 bp, Homo sapiens
  siRNA target sequence for EB-1 (NM_152788.2,140-158).
ggcgaggccccaatgtgaa

SEQ ID NO: 421287 - DNA, 19 bp, Homo sapiens
  siRNA target sequence for EB-1 (NM_152788.2,173-191).
cgggttacactgctttaca

SEQ ID NO: 421288 - DNA, 19 bp, Homo sapiens
  siRNA target sequence for EB-1 (NM_152788.2,192-210).
ccacgcagccttaaatgga

SEQ ID NO: 421289 - DNA, 19 bp, Homo sapiens
  siRNA target sequence for EB-1 (NM_152788.2,209-227).
gacataaggacatagttct

SEQ ID NO: 421290 - DNA, 19 bp, Homo sapiens
  siRNA target sequence for EB-1 (NM_152788.2,216-234).
ggacatagttctcaaacta

SEQ ID NO: 421291 - DNA, 19 bp, Homo sapiens
  siRNA target sequence for EB-1 (NM_152788.2,240-258).
gtatgaggcatcaacaaat

SEQ ID NO: 421292 - DNA, 19 bp, Homo sapiens
  siRNA target sequence for EB-1 (NM_152788.2,254-272).
caaatgtagcagacaacaa

SEQ ID NO: 421293 - DNA, 19 bp, Homo sapiens
  siRNA target sequence for EB-1 (NM_152788.2,267-285).
caacaaagggtattttcct

SEQ ID NO: 421294 - DNA, 19 bp, Homo sapiens
  siRNA target sequence for EB-1 (NM_152788.2,324-342).
gaagattcttattcatcat

SEQ ID NO: 421295 - DNA, 19 bp, Homo sapiens
  siRNA target sequence for EB-1 (NM_152788.2,337-355).
catcatggaccatcacatt

SEQ ID NO: 421296 - DNA, 19 bp, Homo sapiens
  siRNA target sequence for EB-1 (NM_152788.2,350-368).
cacattccagggtcaatga

SEQ ID NO: 421297 - DNA, 19 bp, Homo sapiens
  siRNA target sequence for EB-1 (NM_152788.2,450-468).
gctcactgacccgacaatt

SEQ ID NO: 421298 - DNA, 19 bp, Homo sapiens
  siRNA target sequence for EB-1 (NM_152788.2,453-471).
cactgacccgacaattaga

SEQ ID NO: 421299 - DNA, 19 bp, Homo sapiens
  siRNA target sequence for EB-1 (NM_152788.2,460-478).
ccgacaattagaaatagca

SEQ ID NO: 421300 - DNA, 19 bp, Homo sapiens
  siRNA target sequence for EB-1 (NM_152788.2,461-479).
cgacaattagaaatagcaa

SEQ ID NO: 421301 - DNA, 19 bp, Homo sapiens
  siRNA target sequence for EB-1 (NM_152788.2,515-533).
gacggcttagagtggtaaa

SEQ ID NO: 421302 - DNA, 19 bp, Homo sapiens
  siRNA target sequence for EB-1 (NM_152788.2,547-565).
gcacatcctaacttaatga

SEQ ID NO: 421303 - DNA, 19 bp, Homo sapiens
  siRNA target sequence for EB-1 (NM_152788.2,654-672).
ggatgtgagctgtcaaaca

SEQ ID NO: 421304 - DNA, 19 bp, Homo sapiens
  siRNA target sequence for EB-1 (NM_152788.2,658-676).
gtgagctgtcaaacagaaa

SEQ ID NO: 421305 - DNA, 19 bp, Homo sapiens
  siRNA target sequence for EB-1 (NM_152788.2,678-696).
ggggagtgcacttcatgaa

SEQ ID NO: 421306 - DNA, 19 bp, Homo sapiens
  siRNA target sequence for EB-1 (NM_152788.2,724-742).
gtacgagttctgttagaaa

SEQ ID NO: 421307 - DNA, 19 bp, Homo sapiens
  siRNA target sequence for EB-1 (NM_152788.2,735-753).
gttagaaacaggaattgat

SEQ ID NO: 421308 - DNA, 19 bp, Homo sapiens
  siRNA target sequence for EB-1 (NM_152788.2,745-763).
ggaattgatgccaacataa

SEQ ID NO: 421309 - DNA, 19 bp, Homo sapiens
  siRNA target sequence for EB-1 (NM_152788.2,751-769).
gatgccaacataaaggata

SEQ ID NO: 421310 - DNA, 19 bp, Homo sapiens
  siRNA target sequence for EB-1 (NM_152788.2,782-800).
ctgtcttggacattctgaa

SEQ ID NO: 421311 - DNA, 19 bp, Homo sapiens
  siRNA target sequence for EB-1 (NM_152788.2,825-843).
ccagattgcaacactctta

SEQ ID NO: 421312 - DNA, 19 bp, Homo sapiens
  siRNA target sequence for EB-1 (NM_152788.2,840-858).
cttacaagagtatttagaa

SEQ ID NO: 421313 - DNA, 19 bp, Homo sapiens
  siRNA target sequence for EB-1 (NM_152788.2,972-990).
cgtcactggagaattatca

SEQ ID NO: 421314 - DNA, 19 bp, Homo sapiens
  siRNA target sequence for EB-1 (NM_152788.2,1018-1036).
caagaaaaggattattcgt

SEQ ID NO: 421315 - DNA, 19 bp, Homo sapiens
  siRNA target sequence for EB-1 (NM_152788.2,1042-1060).
gacttgtgccacacaatat

SEQ ID NO: 421316 - DNA, 19 bp, Homo sapiens
  siRNA target sequence for EB-1 (NM_152788.2,1055-1073).
caatatcagaccactactt

SEQ ID NO: 421317 - DNA, 19 bp, Homo sapiens
  siRNA target sequence for EB-1 (NM_152788.2,1061-1079).
cagaccactacttagataa

SEQ ID NO: 421318 - DNA, 19 bp, Homo sapiens
  siRNA target sequence for EB-1 (NM_152788.2,1117-1135).
ggaagccagagtgtaagaa

SEQ ID NO: 421319 - DNA, 19 bp, Homo sapiens
  siRNA target sequence for EB-1 (NM_152788.2,1133-1151).
gaacctcatctacaatcaa

SEQ ID NO: 421320 - DNA, 19 bp, Homo sapiens
  siRNA target sequence for EB-1 (NM_152788.2,1136-1154).
cctcatctacaatcaattt

SEQ ID NO: 421321 - DNA, 19 bp, Homo sapiens
  siRNA target sequence for EB-1 (NM_152788.2,1271-1289).
cccaggagtcctatccaaa

SEQ ID NO: 421322 - DNA, 19 bp, Homo sapiens
  siRNA target sequence for EB-1 (NM_152788.2,1276-1294).
gagtcctatccaaagaaga

SEQ ID NO: 421323 - DNA, 19 bp, Homo sapiens
  siRNA target sequence for EB-1 (NM_152788.2,1295-1313).
gaaattacactatggaaat

SEQ ID NO: 421324 - DNA, 19 bp, Homo sapiens
  siRNA target sequence for EB-1 (NM_152788.2,1322-1340).
ctgcttctctggatacatt

SEQ ID NO: 421325 - DNA, 19 bp, Homo sapiens
  siRNA target sequence for EB-1 (NM_152788.2,1380-1398).
cacagctgttacaaagaaa

SEQ ID NO: 421326 - DNA, 19 bp, Homo sapiens
  siRNA target sequence for EB-1 (NM_152788.2,1384-1402).
gctgttacaaagaaacctt

SEQ ID NO: 421327 - DNA, 19 bp, Homo sapiens
  siRNA target sequence for EB-1 (NM_152788.2,1466-1484).
ctactccaggaactagtaa

SEQ ID NO: 421328 - DNA, 19 bp, Homo sapiens
  siRNA target sequence for EB-1 (NM_152788.2,1474-1492).
ggaactagtaaccatagaa

SEQ ID NO: 421329 - DNA, 19 bp, Homo sapiens
  siRNA target sequence for EB-1 (NM_152788.2,1475-1493).
gaactagtaaccatagaaa

SEQ ID NO: 421330 - DNA, 19 bp, Homo sapiens
  siRNA target sequence for EB-1 (NM_152788.2,1504-1522).
ggcccaacacctgattgtt

SEQ ID NO: 421331 - DNA, 19 bp, Homo sapiens
  siRNA target sequence for EB-1 (NM_152788.2,1585-1603).
cagcgaacatccattgtgt

SEQ ID NO: 421332 - DNA, 19 bp, Homo sapiens
  siRNA target sequence for EB-1 (NM_152788.2,1737-1755).
gaatgagggaactaaccat

SEQ ID NO: 421333 - DNA, 19 bp, Homo sapiens
  siRNA target sequence for EB-1 (NM_152788.2,1743-1761).
gggaactaaccatacagat

SEQ ID NO: 421334 - DNA, 19 bp, Homo sapiens
  siRNA target sequence for EB-1 (NM_152788.2,1767-1785).
ctcccgacaggatgacaat

SEQ ID NO: 421335 - DNA, 19 bp, Homo sapiens
  siRNA target sequence for EB-1 (NM_152788.2,1769-1787).
cccgacaggatgacaatga

SEQ ID NO: 421336 - DNA, 19 bp, Homo sapiens
  siRNA target sequence for EB-1 (NM_152788.2,1770-1788).
ccgacaggatgacaatgat

SEQ ID NO: 421337 - DNA, 19 bp, Homo sapiens
  siRNA target sequence for EB-1 (NM_152788.2,1999-2017).
cccaaagtggtcagtagaa

SEQ ID NO: 421338 - DNA, 19 bp, Homo sapiens
  siRNA target sequence for EB-1 (NM_152788.2,2001-2019).
caaagtggtcagtagaaca

SEQ ID NO: 421339 - DNA, 19 bp, Homo sapiens
  siRNA target sequence for EB-1 (NM_152788.2,2005-2023).
gtggtcagtagaacaattt

SEQ ID NO: 421340 - DNA, 19 bp, Homo sapiens
  siRNA target sequence for EB-1 (NM_152788.2,2007-2025).
ggtcagtagaacaattttt

SEQ ID NO: 421341 - DNA, 19 bp, Homo sapiens
  siRNA target sequence for EB-1 (NM_152788.2,2176-2194).
gccttgatcgacatgcatt

SEQ ID NO: 421342 - DNA, 19 bp, Homo sapiens
  siRNA target sequence for EB-1 (NM_152788.2,2181-2199).
gatcgacatgcatttgtca

SEQ ID NO: 421343 - DNA, 19 bp, Homo sapiens
  siRNA target sequence for EB-1 (NM_152788.2,2229-2247).
cattgcctatccttccaat

SEQ ID NO: 421344 - DNA, 19 bp, Homo sapiens
  siRNA target sequence for EB-1 (NM_152788.2,2233-2251).
gcctatccttccaatgaga

SEQ ID NO: 421345 - DNA, 19 bp, Homo sapiens
  siRNA target sequence for EB-1 (NM_152788.2,2234-2252).
cctatccttccaatgagaa

SEQ ID NO: 421346 - DNA, 19 bp, Homo sapiens
  siRNA target sequence for EB-1 (NM_152788.2,2235-2253).
ctatccttccaatgagaaa

SEQ ID NO: 421347 - DNA, 19 bp, Homo sapiens
  siRNA target sequence for EB-1 (NM_152788.2,2263-2281).
gttaactggagtgaatctt

SEQ ID NO: 421348 - DNA, 19 bp, Homo sapiens
  siRNA target sequence for EB-1 (NM_152788.2,2297-2315).
gttctaaagggaattctga

SEQ ID NO: 421349 - DNA, 19 bp, Homo sapiens
  siRNA target sequence for EB-1 (NM_152788.2,2333-2351).
catcggaatgggaagaaat

SEQ ID NO: 421350 - DNA, 19 bp, Homo sapiens
  siRNA target sequence for EB-1 (NM_152788.2,2336-2354).
cggaatgggaagaaattga

SEQ ID NO: 421351 - DNA, 19 bp, Homo sapiens
  siRNA target sequence for EB-1 (NM_152788.2,2380-2398).
ggaatcaacaacgaactta

SEQ ID NO: 421352 - DNA, 19 bp, Homo sapiens
  siRNA target sequence for EB-1 (NM_152788.2,2391-2409).
cgaacttaaagagatgaat

SEQ ID NO: 421353 - DNA, 19 bp, Homo sapiens
  siRNA target sequence for EB-1 (NM_152788.2,2964-2982).
cctagacgttcctcacatt

SEQ ID NO: 421354 - DNA, 19 bp, Homo sapiens
  siRNA target sequence for EB-1 (NM_152788.2,2965-2983).
ctagacgttcctcacatta

SEQ ID NO: 421355 - DNA, 19 bp, Homo sapiens
  siRNA target sequence for EB-1 (NM_152788.2,2968-2986).
gacgttcctcacattatca

SEQ ID NO: 421356 - DNA, 19 bp, Homo sapiens
  siRNA target sequence for MGC26707 (NM_152791.3,332-350).
ctctgttttaggaaaaatt

SEQ ID NO: 421357 - DNA, 19 bp, Homo sapiens
  siRNA target sequence for MGC26707 (NM_152791.3,358-376).
gtcttagcatcgaagatca

SEQ ID NO: 421358 - DNA, 19 bp, Homo sapiens
  siRNA target sequence for MGC26707 (NM_152791.3,360-378).
cttagcatcgaagatcaaa

SEQ ID NO: 421359 - DNA, 19 bp, Homo sapiens
  siRNA target sequence for MGC26707 (NM_152791.3,637-655).
gtcgttcacacctaagaat

SEQ ID NO: 421360 - DNA, 19 bp, Homo sapiens
  siRNA target sequence for MGC26707 (NM_152791.3,684-702).
ccctatgtgtgtaaattat

SEQ ID NO: 421361 - DNA, 19 bp, Homo sapiens
  siRNA target sequence for MGC26707 (NM_152791.3,734-752).
caatcggcatgtaaggatt

SEQ ID NO: 421362 - DNA, 19 bp, Homo sapiens
  siRNA target sequence for MGC26707 (NM_152791.3,806-824).
cttctcaagtcttactagt

SEQ ID NO: 421363 - DNA, 19 bp, Homo sapiens
  siRNA target sequence for MGC26707 (NM_152791.3,899-917).
gtttcgaagacacacaata

SEQ ID NO: 421364 - DNA, 19 bp, Homo sapiens
  siRNA target sequence for MGC26707 (NM_152791.3,1556-1574).
ctattgccacatatcctta

SEQ ID NO: 421365 - DNA, 19 bp, Homo sapiens
  siRNA target sequence for MGC26707 (NM_152791.3,1561-1579).
gccacatatccttacaaaa

SEQ ID NO: 421366 - DNA, 19 bp, Homo sapiens
  siRNA target sequence for MGC26707 (NM_152791.3,1730-1748).
gccatcatctttaccaata

SEQ ID NO: 421367 - DNA, 19 bp, Homo sapiens
  siRNA target sequence for MGC26707 (NM_152791.3,1732-1750).
catcatctttaccaataca

SEQ ID NO: 421368 - DNA, 19 bp, Homo sapiens
  siRNA target sequence for MGC26707 (NM_152791.3,1828-1846).
ggcgacatgtgagaataca

SEQ ID NO: 421369 - DNA, 19 bp, Homo sapiens
  siRNA target sequence for MGC26707 (NM_152791.3,1847-1865).
cactacagaaaaacagtat

SEQ ID NO: 421370 - DNA, 19 bp, Homo sapiens
  siRNA target sequence for Ells1 (NM_152793.1,122-140).
gtgtaggagcagatctgat

SEQ ID NO: 421371 - DNA, 19 bp, Homo sapiens
  siRNA target sequence for Ells1 (NM_152793.1,130-148).
gcagatctgatgatgaaca

SEQ ID NO: 421372 - DNA, 19 bp, Homo sapiens
  siRNA target sequence for Ells1 (NM_152793.1,202-220).
ctagcacaggattacatct

SEQ ID NO: 421373 - DNA, 19 bp, Homo sapiens
  siRNA target sequence for Ells1 (NM_152793.1,267-285).
caagtctttcagaccttta

SEQ ID NO: 421374 - DNA, 19 bp, Homo sapiens
  siRNA target sequence for DKFZp434C1714 (NM_152834.2,234-252).
gaagctacagactacagat

SEQ ID NO: 421375 - DNA, 19 bp, Homo sapiens
  siRNA target sequence for DKFZp434C1714 (NM_152834.2,248-266).
cagatcgggcactttctgt

SEQ ID NO: 421376 - DNA, 19 bp, Homo sapiens
  siRNA target sequence for DKFZp434C1714 (NM_152834.2,281-299).
gtctactgtgctgaataca

SEQ ID NO: 421377 - DNA, 19 bp, Homo sapiens
  siRNA target sequence for DKFZp434C1714 (NM_152834.2,305-323).
gaggcggctgcgatgaact

SEQ ID NO: 421378 - DNA, 19 bp, Homo sapiens
  siRNA target sequence for DKFZp434C1714 (NM_152834.2,315-333).
cgatgaactggagattatt

SEQ ID NO: 421379 - DNA, 19 bp, Homo sapiens
  siRNA target sequence for DKFZp434C1714 (NM_152834.2,324-342).
ggagattattttcgaaata

SEQ ID NO: 421380 - DNA, 19 bp, Homo sapiens
  siRNA target sequence for DKFZp434C1714 (NM_152834.2,336-354).
cgaaataccagtatttcga

SEQ ID NO: 421381 - DNA, 19 bp, Homo sapiens
  siRNA target sequence for DKFZp434C1714 (NM_152834.2,353-371).
gactccagggggatgttca

SEQ ID NO: 421382 - DNA, 19 bp, Homo sapiens
  siRNA target sequence for DKFZp434C1714 (NM_152834.2,355-373).
ctccagggggatgttcatt

SEQ ID NO: 421383 - DNA, 19 bp, Homo sapiens
  siRNA target sequence for DKFZp434C1714 (NM_152834.2,360-378).
gggggatgttcatttctat

SEQ ID NO: 421384 - DNA, 19 bp, Homo sapiens
  siRNA target sequence for DKFZp434C1714 (NM_152834.2,363-381).
ggatgttcatttctatagt

SEQ ID NO: 421385 - DNA, 19 bp, Homo sapiens
  siRNA target sequence for DKFZp434C1714 (NM_152834.2,364-382).
gatgttcatttctatagta

SEQ ID NO: 421386 - DNA, 19 bp, Homo sapiens
  siRNA target sequence for C20orf58 (NM_152864.1,493-511).
caggtggtcagcgtgttta

SEQ ID NO: 421387 - DNA, 19 bp, Homo sapiens
  siRNA target sequence for C20orf58 (NM_152864.1,560-578).
ctctctaccatgtcaatga

SEQ ID NO: 421388 - DNA, 19 bp, Homo sapiens
  siRNA target sequence for COL22A1 (NM_152888.1,529-547).
cagcgggcaggttgcaaaa

SEQ ID NO: 421389 - DNA, 19 bp, Homo sapiens
  siRNA target sequence for COL22A1 (NM_152888.1,714-732).
cttcgagttgggactcttt

SEQ ID NO: 421390 - DNA, 19 bp, Homo sapiens
  siRNA target sequence for COL22A1 (NM_152888.1,802-820).
gacgcgctccgctacatca

SEQ ID NO: 421391 - DNA, 19 bp, Homo sapiens
  siRNA target sequence for COL22A1 (NM_152888.1,948-966).
cgctggcatccgcatcttt

SEQ ID NO: 421392 - DNA, 19 bp, Homo sapiens
  siRNA target sequence for COL22A1 (NM_152888.1,1041-1059).
ccacgtgtccgacttcaat

SEQ ID NO: 421393 - DNA, 19 bp, Homo sapiens
  siRNA target sequence for COL22A1 (NM_152888.1,1186-1204).
gacctgatggatttgttca

SEQ ID NO: 421394 - DNA, 19 bp, Homo sapiens
  siRNA target sequence for COL22A1 (NM_152888.1,1272-1290).
ccctgtggtgcaaagtact

SEQ ID NO: 421395 - DNA, 19 bp, Homo sapiens
  siRNA target sequence for COL22A1 (NM_152888.1,1426-1444).
cggctggatggtgaaaaca

SEQ ID NO: 421396 - DNA, 19 bp, Homo sapiens
  siRNA target sequence for COL22A1 (NM_152888.1,1427-1445).
ggctggatggtgaaaacaa

SEQ ID NO: 421397 - DNA, 19 bp, Homo sapiens
  siRNA target sequence for COL22A1 (NM_152888.1,1502-1520).
gaggttctcgggtcaatga

SEQ ID NO: 421398 - DNA, 19 bp, Homo sapiens
  siRNA target sequence for COL22A1 (NM_152888.1,1573-1591).
gtctccctgcacattgact

SEQ ID NO: 421399 - DNA, 19 bp, Homo sapiens
  siRNA target sequence for COL22A1 (NM_152888.1,1617-1635).
cgaggaacgggagaacatt

SEQ ID NO: 421400 - DNA, 19 bp, Homo sapiens
  siRNA target sequence for COL22A1 (NM_152888.1,1696-1714).
gacctacagcggattgtga

SEQ ID NO: 421401 - DNA, 19 bp, Homo sapiens
  siRNA target sequence for COL22A1 (NM_152888.1,1702-1720).
cagcggattgtgatctatt

SEQ ID NO: 421402 - DNA, 19 bp, Homo sapiens
  siRNA target sequence for COL22A1 (NM_152888.1,1704-1722).
gcggattgtgatctattgt

SEQ ID NO: 421403 - DNA, 19 bp, Homo sapiens
  siRNA target sequence for COL22A1 (NM_152888.1,1706-1724).
ggattgtgatctattgtga

SEQ ID NO: 421404 - DNA, 19 bp, Homo sapiens
  siRNA target sequence for COL22A1 (NM_152888.1,1727-1745).
cgagacacgcagaattgga

SEQ ID NO: 421405 - DNA, 19 bp, Homo sapiens
  siRNA target sequence for COL22A1 (NM_152888.1,1832-1850).
ccccaggcagtgaacagat

SEQ ID NO: 421406 - DNA, 19 bp, Homo sapiens
  siRNA target sequence for COL22A1 (NM_152888.1,2928-2946).
gggacttccaggactgaaa

SEQ ID NO: 421407 - DNA, 19 bp, Homo sapiens
  siRNA target sequence for COL22A1 (NM_152888.1,2991-3009).
cgggttacctggaactaca

SEQ ID NO: 421408 - DNA, 19 bp, Homo sapiens
  siRNA target sequence for COL22A1 (NM_152888.1,2992-3010).
gggttacctggaactacat

SEQ ID NO: 421409 - DNA, 19 bp, Homo sapiens
  siRNA target sequence for COL22A1 (NM_152888.1,3460-3478).
gctgcttgcggaaaagtca

SEQ ID NO: 421410 - DNA, 19 bp, Homo sapiens
  siRNA target sequence for COL22A1 (NM_152888.1,3499-3517).
ctgggagggcaatgtgtta

SEQ ID NO: 421411 - DNA, 19 bp, Homo sapiens
  siRNA target sequence for COL22A1 (NM_152888.1,3606-3624).
cggaccaccaggagacaaa

SEQ ID NO: 421412 - DNA, 19 bp, Homo sapiens
  siRNA target sequence for COL22A1 (NM_152888.1,3752-3770).
ctccaggggacataaatct

SEQ ID NO: 421413 - DNA, 19 bp, Homo sapiens
  siRNA target sequence for COL22A1 (NM_152888.1,3754-3772).
ccaggggacataaatctct

SEQ ID NO: 421414 - DNA, 19 bp, Homo sapiens
  siRNA target sequence for COL22A1 (NM_152888.1,3755-3773).
caggggacataaatctctt

SEQ ID NO: 421415 - DNA, 19 bp, Homo sapiens
  siRNA target sequence for COL22A1 (NM_152888.1,3821-3839).
ctggtctaccaggttttaa

SEQ ID NO: 421416 - DNA, 19 bp, Homo sapiens
  siRNA target sequence for COL22A1 (NM_152888.1,4134-4152).
ccaaggcccatctggatta

SEQ ID NO: 421417 - DNA, 19 bp, Homo sapiens
  siRNA target sequence for COL22A1 (NM_152888.1,4420-4438).
ccaccgggcaagaatggat

SEQ ID NO: 421418 - DNA, 19 bp, Homo sapiens
  siRNA target sequence for COL22A1 (NM_152888.1,4835-4853).
ccctgcgtcggcttattca

SEQ ID NO: 421419 - DNA, 19 bp, Homo sapiens
  siRNA target sequence for COL22A1 (NM_152888.1,4841-4859).
gtcggcttattcaagaaga

SEQ ID NO: 421420 - DNA, 19 bp, Homo sapiens
  siRNA target sequence for COL24A1 (NM_152890.4,69-87).
gtctcccccacggcaaaaa

SEQ ID NO: 421421 - DNA, 19 bp, Homo sapiens
  siRNA target sequence for COL24A1 (NM_152890.4,75-93).
cccacggcaaaaacgaaat

SEQ ID NO: 421422 - DNA, 19 bp, Homo sapiens
  siRNA target sequence for COL24A1 (NM_152890.4,77-95).
cacggcaaaaacgaaatca

SEQ ID NO: 421423 - DNA, 19 bp, Homo sapiens
  siRNA target sequence for COL24A1 (NM_152890.4,79-97).
cggcaaaaacgaaatcact

SEQ ID NO: 421424 - DNA, 19 bp, Homo sapiens
  siRNA target sequence for COL24A1 (NM_152890.4,88-106).
cgaaatcacttcttcattt

SEQ ID NO: 421425 - DNA, 19 bp, Homo sapiens
  siRNA target sequence for COL24A1 (NM_152890.4,144-162).
caagaacaaggcatagata

SEQ ID NO: 421426 - DNA, 19 bp, Homo sapiens
  siRNA target sequence for COL24A1 (NM_152890.4,246-264).
cctcagggggtccatttaa

SEQ ID NO: 421427 - DNA, 19 bp, Homo sapiens
  siRNA target sequence for COL24A1 (NM_152890.4,252-270).
ggggtccatttaacagaat

SEQ ID NO: 421428 - DNA, 19 bp, Homo sapiens
  siRNA target sequence for COL24A1 (NM_152890.4,254-272).
ggtccatttaacagaatca

SEQ ID NO: 421429 - DNA, 19 bp, Homo sapiens
  siRNA target sequence for COL24A1 (NM_152890.4,305-323).
gacacctttcgtgaaaatt

SEQ ID NO: 421430 - DNA, 19 bp, Homo sapiens
  siRNA target sequence for COL24A1 (NM_152890.4,335-353).
cttggggcagccgtttaca

SEQ ID NO: 421431 - DNA, 19 bp, Homo sapiens
  siRNA target sequence for COL24A1 (NM_152890.4,338-356).
ggggcagccgtttacaata

SEQ ID NO: 421432 - DNA, 19 bp, Homo sapiens
  siRNA target sequence for COL24A1 (NM_152890.4,339-357).
gggcagccgtttacaatat

SEQ ID NO: 421433 - DNA, 19 bp, Homo sapiens
  siRNA target sequence for COL24A1 (NM_152890.4,340-358).
ggcagccgtttacaatatt

SEQ ID NO: 421434 - DNA, 19 bp, Homo sapiens
  siRNA target sequence for COL24A1 (NM_152890.4,341-359).
gcagccgtttacaatatta

SEQ ID NO: 421435 - DNA, 19 bp, Homo sapiens
  siRNA target sequence for COL24A1 (NM_152890.4,344-362).
gccgtttacaatattaact

SEQ ID NO: 421436 - DNA, 19 bp, Homo sapiens
  siRNA target sequence for COL24A1 (NM_152890.4,371-389).
gtcacatcgggtgaacaat

SEQ ID NO: 421437 - DNA, 19 bp, Homo sapiens
  siRNA target sequence for COL24A1 (NM_152890.4,375-393).
catcgggtgaacaatgcat

SEQ ID NO: 421438 - DNA, 19 bp, Homo sapiens
  siRNA target sequence for COL24A1 (NM_152890.4,379-397).
gggtgaacaatgcatttct

SEQ ID NO: 421439 - DNA, 19 bp, Homo sapiens
  siRNA target sequence for COL24A1 (NM_152890.4,423-441).
ctgcaattaggagtacaat

SEQ ID NO: 421440 - DNA, 19 bp, Homo sapiens
  siRNA target sequence for COL24A1 (NM_152890.4,425-443).
gcaattaggagtacaatta

SEQ ID NO: 421441 - DNA, 19 bp, Homo sapiens
  siRNA target sequence for COL24A1 (NM_152890.4,433-451).
gagtacaattactacctaa

SEQ ID NO: 421442 - DNA, 19 bp, Homo sapiens
  siRNA target sequence for COL24A1 (NM_152890.4,435-453).
gtacaattactacctaaaa

SEQ ID NO: 421443 - DNA, 19 bp, Homo sapiens
  siRNA target sequence for COL24A1 (NM_152890.4,448-466).
ctaaaaaattagtagtaca

SEQ ID NO: 421444 - DNA, 19 bp, Homo sapiens
  siRNA target sequence for COL24A1 (NM_152890.4,521-539).
gcactcatttgccattact

SEQ ID NO: 421445 - DNA, 19 bp, Homo sapiens
  siRNA target sequence for COL24A1 (NM_152890.4,522-540).
cactcatttgccattacta

SEQ ID NO: 421446 - DNA, 19 bp, Homo sapiens
  siRNA target sequence for COL24A1 (NM_152890.4,553-571).
gtgtctcaatgtttgttga

SEQ ID NO: 421447 - DNA, 19 bp, Homo sapiens
  siRNA target sequence for COL24A1 (NM_152890.4,757-775).
gtcgccaagcagacaaata

SEQ ID NO: 421448 - DNA, 19 bp, Homo sapiens
  siRNA target sequence for COL24A1 (NM_152890.4,776-794).
ccaacctgaaacaagcatt

SEQ ID NO: 421449 - DNA, 19 bp, Homo sapiens
  siRNA target sequence for COL24A1 (NM_152890.4,780-798).
cctgaaacaagcattcctt

SEQ ID NO: 421450 - DNA, 19 bp, Homo sapiens
  siRNA target sequence for COL24A1 (NM_152890.4,802-820).
caactctcataccaacaaa

SEQ ID NO: 421451 - DNA, 19 bp, Homo sapiens
  siRNA target sequence for COL24A1 (NM_152890.4,1052-1070).
ggaagatactcagacaaat

SEQ ID NO: 421452 - DNA, 19 bp, Homo sapiens
  siRNA target sequence for COL24A1 (NM_152890.4,1056-1074).
gatactcagacaaatttca

SEQ ID NO: 421453 - DNA, 19 bp, Homo sapiens
  siRNA target sequence for COL24A1 (NM_152890.4,1095-1113).
cgcatcagtgaggcaaaaa

SEQ ID NO: 421454 - DNA, 19 bp, Homo sapiens
  siRNA target sequence for COL24A1 (NM_152890.4,1143-1161).
ctaaacatgtctgacaata

SEQ ID NO: 421455 - DNA, 19 bp, Homo sapiens
  siRNA target sequence for COL24A1 (NM_152890.4,1157-1175).
caatatcacacaacatgat

SEQ ID NO: 421456 - DNA, 19 bp, Homo sapiens
  siRNA target sequence for COL24A1 (NM_152890.4,1188-1206).
ggtctgtcactgtttaaga

SEQ ID NO: 421457 - DNA, 19 bp, Homo sapiens
  siRNA target sequence for COL24A1 (NM_152890.4,1189-1207).
gtctgtcactgtttaagaa

SEQ ID NO: 421458 - DNA, 19 bp, Homo sapiens
  siRNA target sequence for COL24A1 (NM_152890.4,1216-1234).
ctattcttccacaaattaa

SEQ ID NO: 421459 - DNA, 19 bp, Homo sapiens
  siRNA target sequence for COL24A1 (NM_152890.4,1259-1277).
gaaggctatcacagcaaat

SEQ ID NO: 421460 - DNA, 19 bp, Homo sapiens
  siRNA target sequence for COL24A1 (NM_152890.4,1262-1280).
ggctatcacagcaaatcta

SEQ ID NO: 421461 - DNA, 19 bp, Homo sapiens
  siRNA target sequence for COL24A1 (NM_152890.4,1264-1282).
ctatcacagcaaatctaca

SEQ ID NO: 421462 - DNA, 19 bp, Homo sapiens
  siRNA target sequence for COL24A1 (NM_152890.4,1285-1303).
ctaacgaactcatggaaat

SEQ ID NO: 421463 - DNA, 19 bp, Homo sapiens
  siRNA target sequence for COL24A1 (NM_152890.4,1295-1313).
catggaaatgcaaccaatt

SEQ ID NO: 421464 - DNA, 19 bp, Homo sapiens
  siRNA target sequence for COL24A1 (NM_152890.4,1324-1342).
gcttgcatagagtgacaaa

SEQ ID NO: 421465 - DNA, 19 bp, Homo sapiens
  siRNA target sequence for COL24A1 (NM_152890.4,1355-1373).
ggataatcaccttgatcta

SEQ ID NO: 421466 - DNA, 19 bp, Homo sapiens
  siRNA target sequence for COL24A1 (NM_152890.4,1356-1374).
gataatcaccttgatctaa

SEQ ID NO: 421467 - DNA, 19 bp, Homo sapiens
  siRNA target sequence for COL24A1 (NM_152890.4,1401-1419).
gctacttatcccatcgaaa

SEQ ID NO: 421468 - DNA, 19 bp, Homo sapiens
  siRNA target sequence for COL24A1 (NM_152890.4,1402-1420).
ctacttatcccatcgaaaa

SEQ ID NO: 421469 - DNA, 19 bp, Homo sapiens
  siRNA target sequence for COL24A1 (NM_152890.4,1415-1433).
cgaaaatagctatgaaact

SEQ ID NO: 421470 - DNA, 19 bp, Homo sapiens
  siRNA target sequence for COL24A1 (NM_152890.4,1720-1738).
ctggtatgcaaggtgataa

SEQ ID NO: 421471 - DNA, 19 bp, Homo sapiens
  siRNA target sequence for COL24A1 (NM_152890.4,2135-2153).
gggcctttcagggaataaa

SEQ ID NO: 421472 - DNA, 19 bp, Homo sapiens
  siRNA target sequence for COL24A1 (NM_152890.4,2231-2249).
caagggtgctgttggttta

SEQ ID NO: 421473 - DNA, 19 bp, Homo sapiens
  siRNA target sequence for COL24A1 (NM_152890.4,2234-2252).
gggtgctgttggtttacca

SEQ ID NO: 421474 - DNA, 19 bp, Homo sapiens
  siRNA target sequence for COL24A1 (NM_152890.4,2342-2360).
gggttttccaggagatatt

SEQ ID NO: 421475 - DNA, 19 bp, Homo sapiens
  siRNA target sequence for COL24A1 (NM_152890.4,2396-2414).
gggactccttggaaataga

SEQ ID NO: 421476 - DNA, 19 bp, Homo sapiens
  siRNA target sequence for COL24A1 (NM_152890.4,2530-2548).
caggaccagaaggcttaaa

SEQ ID NO: 421477 - DNA, 19 bp, Homo sapiens
  siRNA target sequence for COL24A1 (NM_152890.4,2556-2574).
gtaggagatcaaggaaata

SEQ ID NO: 421478 - DNA, 19 bp, Homo sapiens
  siRNA target sequence for COL24A1 (NM_152890.4,2963-2981).
gggattgcctggaagtaca

SEQ ID NO: 421479 - DNA, 19 bp, Homo sapiens
  siRNA target sequence for COL24A1 (NM_152890.4,3367-3385).
gaggtcgtccaggaaaaaa

SEQ ID NO: 421480 - DNA, 19 bp, Homo sapiens
  siRNA target sequence for COL24A1 (NM_152890.4,3722-3740).
gggtgtaccaggactaaga

SEQ ID NO: 421481 - DNA, 19 bp, Homo sapiens
  siRNA target sequence for COL24A1 (NM_152890.4,4283-4301).
gatatcaggtcctaaaggt

SEQ ID NO: 421482 - DNA, 19 bp, Homo sapiens
  siRNA target sequence for COL24A1 (NM_152890.4,4330-4348).
cccttggcagagaaggtat

SEQ ID NO: 421483 - DNA, 19 bp, Homo sapiens
  siRNA target sequence for COL24A1 (NM_152890.4,4332-4350).
cttggcagagaaggtataa

SEQ ID NO: 421484 - DNA, 19 bp, Homo sapiens
  siRNA target sequence for COL24A1 (NM_152890.4,4388-4406).
gggctttagaggtgaaact

SEQ ID NO: 421485 - DNA, 19 bp, Homo sapiens
  siRNA target sequence for COL24A1 (NM_152890.4,4500-4518).
gccttgattgaatcaaata

SEQ ID NO: 421486 - DNA, 19 bp, Homo sapiens
  siRNA target sequence for COL24A1 (NM_152890.4,4535-4553).
gagctaccagaatactgaa

SEQ ID NO: 421487 - DNA, 19 bp, Homo sapiens
  siRNA target sequence for COL24A1 (NM_152890.4,4566-4584).
gaccacagtgaagagatat

SEQ ID NO: 421488 - DNA, 19 bp, Homo sapiens
  siRNA target sequence for COL24A1 (NM_152890.4,4591-4609).
ccctgaactaccttagcaa

SEQ ID NO: 421489 - DNA, 19 bp, Homo sapiens
  siRNA target sequence for COL24A1 (NM_152890.4,4592-4610).
cctgaactaccttagcaat

SEQ ID NO: 421490 - DNA, 19 bp, Homo sapiens
  siRNA target sequence for COL24A1 (NM_152890.4,4593-4611).
ctgaactaccttagcaatt

SEQ ID NO: 421491 - DNA, 19 bp, Homo sapiens
  siRNA target sequence for COL24A1 (NM_152890.4,4656-4674).
gcacgaatctgcaaagatt

SEQ ID NO: 421492 - DNA, 19 bp, Homo sapiens
  siRNA target sequence for COL24A1 (NM_152890.4,4657-4675).
cacgaatctgcaaagattt

SEQ ID NO: 421493 - DNA, 19 bp, Homo sapiens
  siRNA target sequence for COL24A1 (NM_152890.4,4743-4761).
gatgccattgaggttttct

SEQ ID NO: 421494 - DNA, 19 bp, Homo sapiens
  siRNA target sequence for COL24A1 (NM_152890.4,4867-4885).
cggaagccacccatatcat

SEQ ID NO: 421495 - DNA, 19 bp, Homo sapiens
  siRNA target sequence for COL24A1 (NM_152890.4,4942-4960).
gattgcctattggtttcaa

SEQ ID NO: 421496 - DNA, 19 bp, Homo sapiens
  siRNA target sequence for COL24A1 (NM_152890.4,4962-4980).
ggatggaatggccagattt

SEQ ID NO: 421497 - DNA, 19 bp, Homo sapiens
  siRNA target sequence for COL24A1 (NM_152890.4,4991-5009).
cactctacttgaacctaaa

SEQ ID NO: 421498 - DNA, 19 bp, Homo sapiens
  siRNA target sequence for COL24A1 (NM_152890.4,4993-5011).
ctctacttgaacctaaagt

SEQ ID NO: 421499 - DNA, 19 bp, Homo sapiens
  siRNA target sequence for COL24A1 (NM_152890.4,5136-5154).
cgaaagtattacattgaca

SEQ ID NO: 421500 - DNA, 19 bp, Homo sapiens
  siRNA target sequence for COL24A1 (NM_152890.4,5147-5165).
cattgacagcagttctgta

SEQ ID NO: 421501 - DNA, 19 bp, Homo sapiens
  siRNA target sequence for DKFZp434K1815 (NM_152892.1,514-532).
gatgcgtcctcaacttact

SEQ ID NO: 421502 - DNA, 19 bp, Homo sapiens
  siRNA target sequence for DKFZp434K1815 (NM_152892.1,575-593).
cagctcactgggagaagtt

SEQ ID NO: 421503 - DNA, 19 bp, Homo sapiens
  siRNA target sequence for DKFZp434K1815 (NM_152892.1,577-595).
gctcactgggagaagttca

SEQ ID NO: 421504 - DNA, 19 bp, Homo sapiens
  siRNA target sequence for DKFZp434K1815 (NM_152892.1,578-596).
ctcactgggagaagttcat

SEQ ID NO: 421505 - DNA, 19 bp, Homo sapiens
  siRNA target sequence for DKFZp434K1815 (NM_152892.1,631-649).
gcccaggcggactttgtga

SEQ ID NO: 421506 - DNA, 19 bp, Homo sapiens
  siRNA target sequence for DKFZp434K1815 (NM_152892.1,746-764).
gtaggacccaggtgcaaaa

SEQ ID NO: 421507 - DNA, 19 bp, Homo sapiens
  siRNA target sequence for DKFZp434K1815 (NM_152892.1,1096-1114).
gctgtgtgcgtaattgatt

SEQ ID NO: 421508 - DNA, 19 bp, Homo sapiens
  siRNA target sequence for DKFZp434K1815 (NM_152892.1,1124-1142).
gcatcgtgctccacaagta

SEQ ID NO: 421509 - DNA, 19 bp, Homo sapiens
  siRNA target sequence for DKFZp434K1815 (NM_152892.1,1154-1172).
gcgaggagttcttttctgt

SEQ ID NO: 421510 - DNA, 19 bp, Homo sapiens
  siRNA target sequence for DKFZp434K1815 (NM_152892.1,1411-1429).
cccaaccaggactacgaat

SEQ ID NO: 421511 - DNA, 19 bp, Homo sapiens
  siRNA target sequence for DKFZp434K1815 (NM_152892.1,1412-1430).
ccaaccaggactacgaatt

SEQ ID NO: 421512 - DNA, 19 bp, Homo sapiens
  siRNA target sequence for DKFZp434K1815 (NM_152892.1,1639-1657).
gatgggctggcatttgtga

SEQ ID NO: 421513 - DNA, 19 bp, Homo sapiens
  siRNA target sequence for FERD3L (NM_152898.2,376-394).
ccaacatccgcgaaaggaa

SEQ ID NO: 421514 - DNA, 19 bp, Homo sapiens
  siRNA target sequence for FERD3L (NM_152898.2,387-405).
gaaaggaagcggatgttca

SEQ ID NO: 421515 - DNA, 19 bp, Homo sapiens
  siRNA target sequence for FERD3L (NM_152898.2,501-519).
gtctatatctccttcatga

SEQ ID NO: 421516 - DNA, 19 bp, Homo sapiens
  siRNA target sequence for IL4I1 (NM_152899.1,169-187).
gaccccttcgagaaatgca

SEQ ID NO: 421517 - DNA, 19 bp, Homo sapiens
  siRNA target sequence for IL4I1 (NM_152899.1,186-204).
catgcaggatcctgactat

SEQ ID NO: 421518 - DNA, 19 bp, Homo sapiens
  siRNA target sequence for IL4I1 (NM_152899.1,518-536).
cggaggtgcacgaagtgaa

SEQ ID NO: 421519 - DNA, 19 bp, Homo sapiens
  siRNA target sequence for IL4I1 (NM_152899.1,681-699).
ggcgatgaagaagtttgaa

SEQ ID NO: 421520 - DNA, 19 bp, Homo sapiens
  siRNA target sequence for IL4I1 (NM_152899.1,701-719).
ggcacacgctcttggaata

SEQ ID NO: 421521 - DNA, 19 bp, Homo sapiens
  siRNA target sequence for IL4I1 (NM_152899.1,702-720).
gcacacgctcttggaatat

SEQ ID NO: 421522 - DNA, 19 bp, Homo sapiens
  siRNA target sequence for IL4I1 (NM_152899.1,911-929).
ccgggcttgtgctgttgaa

SEQ ID NO: 421523 - DNA, 19 bp, Homo sapiens
  siRNA target sequence for IL4I1 (NM_152899.1,1132-1150).
gccaccaaggtgttcctaa

SEQ ID NO: 421524 - DNA, 19 bp, Homo sapiens
  siRNA target sequence for IL4I1 (NM_152899.1,1170-1188).
gcgcgaggagcacattgaa

SEQ ID NO: 421525 - DNA, 19 bp, Homo sapiens
  siRNA target sequence for IL4I1 (NM_152899.1,1210-1228).
cgcccgtcgcgcatgattt

SEQ ID NO: 421526 - DNA, 19 bp, Homo sapiens
  siRNA target sequence for IL4I1 (NM_152899.1,1211-1229).
gcccgtcgcgcatgatttt

SEQ ID NO: 421527 - DNA, 19 bp, Homo sapiens
  siRNA target sequence for IL4I1 (NM_152899.1,1213-1231).
ccgtcgcgcatgattttct

SEQ ID NO: 421528 - DNA, 19 bp, Homo sapiens
  siRNA target sequence for IL4I1 (NM_152899.1,1214-1232).
cgtcgcgcatgattttcta

SEQ ID NO: 421529 - DNA, 19 bp, Homo sapiens
  siRNA target sequence for IL4I1 (NM_152899.1,1492-1510).
ccttatggccgcatctact

SEQ ID NO: 421530 - DNA, 19 bp, Homo sapiens
  siRNA target sequence for IL4I1 (NM_152899.1,1493-1511).
cttatggccgcatctactt

SEQ ID NO: 421531 - DNA, 19 bp, Homo sapiens
  siRNA target sequence for IL4I1 (NM_152899.1,1692-1710).
gcatgacctggcaaaggaa

SEQ ID NO: 421532 - DNA, 19 bp, Homo sapiens
  siRNA target sequence for PYC1 (NM_152901.1,181-199).
gcgctcgggcagctagata

SEQ ID NO: 421533 - DNA, 19 bp, Homo sapiens
  siRNA target sequence for PYC1 (NM_152901.1,182-200).
cgctcgggcagctagatat

SEQ ID NO: 421534 - DNA, 19 bp, Homo sapiens
  siRNA target sequence for MGC3794 (NM_152902.2,181-199).
cgtccaagacccacatcat

SEQ ID NO: 421535 - DNA, 19 bp, Homo sapiens
  siRNA target sequence for MGC3794 (NM_152902.2,216-234).
gagaaattagccgatgaat

SEQ ID NO: 421536 - DNA, 19 bp, Homo sapiens
  siRNA target sequence for MGC3794 (NM_152902.2,218-236).
gaaattagccgatgaatta

SEQ ID NO: 421537 - DNA, 19 bp, Homo sapiens
  siRNA target sequence for MGC3794 (NM_152902.2,267-285).
ggagacaacgttttaagaa

SEQ ID NO: 421538 - DNA, 19 bp, Homo sapiens
  siRNA target sequence for MGC3794 (NM_152902.2,298-316).
ctggctttggaattgagtt

SEQ ID NO: 421539 - DNA, 19 bp, Homo sapiens
  siRNA target sequence for MGC3794 (NM_152902.2,327-345).
gatgcgttaagatgtgtaa

SEQ ID NO: 421540 - DNA, 19 bp, Homo sapiens
  siRNA target sequence for MGC3794 (NM_152902.2,330-348).
gcgttaagatgtgtaaaca

SEQ ID NO: 421541 - DNA, 19 bp, Homo sapiens
  siRNA target sequence for MGC3794 (NM_152902.2,331-349).
cgttaagatgtgtaaacaa

SEQ ID NO: 421542 - DNA, 19 bp, Homo sapiens
  siRNA target sequence for MGC3794 (NM_152902.2,347-365).
caactaccaaggaatgctt

SEQ ID NO: 421543 - DNA, 19 bp, Homo sapiens
  siRNA target sequence for MGC3794 (NM_152902.2,425-443).
ggttattaaaccatatgat

SEQ ID NO: 421544 - DNA, 19 bp, Homo sapiens
  siRNA target sequence for MGC3794 (NM_152902.2,435-453).
ccatatgattggacctata

SEQ ID NO: 421545 - DNA, 19 bp, Homo sapiens
  siRNA target sequence for MGC3794 (NM_152902.2,446-464).
gacctatacaacagattat

SEQ ID NO: 421546 - DNA, 19 bp, Homo sapiens
  siRNA target sequence for MGC3794 (NM_152902.2,500-518).
ggttgtacctacaacagat

SEQ ID NO: 421547 - DNA, 19 bp, Homo sapiens
  siRNA target sequence for MGC3794 (NM_152902.2,508-526).
ctacaacagatcatataga

SEQ ID NO: 421548 - DNA, 19 bp, Homo sapiens
  siRNA target sequence for MGC3794 (NM_152902.2,597-615).
catgatcatggagtttcaa

SEQ ID NO: 421549 - DNA, 19 bp, Homo sapiens
  siRNA target sequence for MGC3794 (NM_152902.2,613-631).
caagcctgagtgtgaagat

SEQ ID NO: 421550 - DNA, 19 bp, Homo sapiens
  siRNA target sequence for MGC3794 (NM_152902.2,622-640).
gtgtgaagattagagtaat

SEQ ID NO: 421551 - DNA, 19 bp, Homo sapiens
  siRNA target sequence for MGC3794 (NM_152902.2,636-654).
gtaatgccttctagctttt

SEQ ID NO: 421552 - DNA, 19 bp, Homo sapiens
  siRNA target sequence for MGC3794 (NM_152902.2,679-697).
gaattgatggggtgcttat

SEQ ID NO: 421553 - DNA, 19 bp, Homo sapiens
  siRNA target sequence for MGC3794 (NM_152902.2,687-705).
ggggtgcttatcagaatga

SEQ ID NO: 421554 - DNA, 19 bp, Homo sapiens
  siRNA target sequence for MGC3794 (NM_152902.2,688-706).
gggtgcttatcagaatgaa

SEQ ID NO: 421555 - DNA, 19 bp, Homo sapiens
  siRNA target sequence for MGC3794 (NM_152902.2,739-757).
cctacatgttacgagaata

SEQ ID NO: 421556 - DNA, 19 bp, Homo sapiens
  siRNA target sequence for MGC3794 (NM_152902.2,740-758).
ctacatgttacgagaatat

SEQ ID NO: 421557 - DNA, 19 bp, Homo sapiens
  siRNA target sequence for MGC3794 (NM_152902.2,760-778).
cgtcacgagaaagcaaaat

SEQ ID NO: 421558 - DNA, 19 bp, Homo sapiens
  siRNA target sequence for MGC3794 (NM_152902.2,805-823).
ccctcttcacggaacctaa

SEQ ID NO: 421559 - DNA, 19 bp, Homo sapiens
  siRNA target sequence for MGC3794 (NM_152902.2,806-824).
cctcttcacggaacctaat

SEQ ID NO: 421560 - DNA, 19 bp, Homo sapiens
  siRNA target sequence for MGC3794 (NM_152902.2,812-830).
cacggaacctaatgaaata

SEQ ID NO: 421561 - DNA, 19 bp, Homo sapiens
  siRNA target sequence for HCMOGT-1 (NM_152904.1,150-168).
gagttctaagtcttcaact

SEQ ID NO: 421562 - DNA, 19 bp, Homo sapiens
  siRNA target sequence for HCMOGT-1 (NM_152904.1,257-275).
gggtggttcgcctgaagaa

SEQ ID NO: 421563 - DNA, 19 bp, Homo sapiens
  siRNA target sequence for HCMOGT-1 (NM_152904.1,327-345).
cggcacaggggcctttaca

SEQ ID NO: 421564 - DNA, 19 bp, Homo sapiens
  siRNA target sequence for HCMOGT-1 (NM_152904.1,328-346).
ggcacaggggcctttacaa

SEQ ID NO: 421565 - DNA, 19 bp, Homo sapiens
  siRNA target sequence for HCMOGT-1 (NM_152904.1,330-348).
cacaggggcctttacaaca

SEQ ID NO: 421566 - DNA, 19 bp, Homo sapiens
  siRNA target sequence for HCMOGT-1 (NM_152904.1,334-352).
ggggcctttacaacaacta

SEQ ID NO: 421567 - DNA, 19 bp, Homo sapiens
  siRNA target sequence for HCMOGT-1 (NM_152904.1,335-353).
gggcctttacaacaactaa

SEQ ID NO: 421568 - DNA, 19 bp, Homo sapiens
  siRNA target sequence for HCMOGT-1 (NM_152904.1,336-354).
ggcctttacaacaactaaa

SEQ ID NO: 421569 - DNA, 19 bp, Homo sapiens
  siRNA target sequence for HCMOGT-1 (NM_152904.1,367-385).
ccagccccacgggaatttt

SEQ ID NO: 421570 - DNA, 19 bp, Homo sapiens
  siRNA target sequence for HCMOGT-1 (NM_152904.1,377-395).
gggaattttcagtaactgt

SEQ ID NO: 421571 - DNA, 19 bp, Homo sapiens
  siRNA target sequence for HCMOGT-1 (NM_152904.1,606-624).
caggcttcgaagtgaacta

SEQ ID NO: 421572 - DNA, 19 bp, Homo sapiens
  siRNA target sequence for HCMOGT-1 (NM_152904.1,608-626).
ggcttcgaagtgaactaaa

SEQ ID NO: 421573 - DNA, 19 bp, Homo sapiens
  siRNA target sequence for HCMOGT-1 (NM_152904.1,613-631).
cgaagtgaactaaagaaat

SEQ ID NO: 421574 - DNA, 19 bp, Homo sapiens
  siRNA target sequence for HCMOGT-1 (NM_152904.1,712-730).
gacacggaacctatgataa

SEQ ID NO: 421575 - DNA, 19 bp, Homo sapiens
  siRNA target sequence for HCMOGT-1 (NM_152904.1,714-732).
cacggaacctatgataaga

SEQ ID NO: 421576 - DNA, 19 bp, Homo sapiens
  siRNA target sequence for HCMOGT-1 (NM_152904.1,825-843).
gcactccccaaattcagaa

SEQ ID NO: 421577 - DNA, 19 bp, Homo sapiens
  siRNA target sequence for HCMOGT-1 (NM_152904.1,875-893).
gcccaacatccataactca

SEQ ID NO: 421578 - DNA, 19 bp, Homo sapiens
  siRNA target sequence for HCMOGT-1 (NM_152904.1,876-894).
cccaacatccataactcaa

SEQ ID NO: 421579 - DNA, 19 bp, Homo sapiens
  siRNA target sequence for HCMOGT-1 (NM_152904.1,932-950).
ccagtgacattgatgagta

SEQ ID NO: 421580 - DNA, 19 bp, Homo sapiens
  siRNA target sequence for HCMOGT-1 (NM_152904.1,935-953).
gtgacattgatgagtataa

SEQ ID NO: 421581 - DNA, 19 bp, Homo sapiens
  siRNA target sequence for HCMOGT-1 (NM_152904.1,995-1013).
caagtagcgatgttaccaa

SEQ ID NO: 421582 - DNA, 19 bp, Homo sapiens
  siRNA target sequence for HCMOGT-1 (NM_152904.1,1006-1024).
gttaccaaagcttctttgt

SEQ ID NO: 421583 - DNA, 19 bp, Homo sapiens
  siRNA target sequence for HCMOGT-1 (NM_152904.1,1028-1046).
cagatgcttccgactttga

SEQ ID NO: 421584 - DNA, 19 bp, Homo sapiens
  siRNA target sequence for HCMOGT-1 (NM_152904.1,1038-1056).
cgactttgagcacattaca

SEQ ID NO: 421585 - DNA, 19 bp, Homo sapiens
  siRNA target sequence for HCMOGT-1 (NM_152904.1,1085-1103).
ccaccagtaacccctttaa

SEQ ID NO: 421586 - DNA, 19 bp, Homo sapiens
  siRNA target sequence for HCMOGT-1 (NM_152904.1,1133-1151).
ccccaaacagcgtaagtga

SEQ ID NO: 421587 - DNA, 19 bp, Homo sapiens
  siRNA target sequence for HCMOGT-1 (NM_152904.1,1134-1152).
cccaaacagcgtaagtgaa

SEQ ID NO: 421588 - DNA, 19 bp, Homo sapiens
  siRNA target sequence for HCMOGT-1 (NM_152904.1,1135-1153).
ccaaacagcgtaagtgaat

SEQ ID NO: 421589 - DNA, 19 bp, Homo sapiens
  siRNA target sequence for HCMOGT-1 (NM_152904.1,1136-1154).
caaacagcgtaagtgaatt

SEQ ID NO: 421590 - DNA, 19 bp, Homo sapiens
  siRNA target sequence for HCMOGT-1 (NM_152904.1,1225-1243).
caggctactctacaagaat

SEQ ID NO: 421591 - DNA, 19 bp, Homo sapiens
  siRNA target sequence for HCMOGT-1 (NM_152904.1,1228-1246).
gctactctacaagaattat

SEQ ID NO: 421592 - DNA, 19 bp, Homo sapiens
  siRNA target sequence for HCMOGT-1 (NM_152904.1,1346-1364).
gggcagagcagctaagtca

SEQ ID NO: 421593 - DNA, 19 bp, Homo sapiens
  siRNA target sequence for HCMOGT-1 (NM_152904.1,1347-1365).
ggcagagcagctaagtcaa

SEQ ID NO: 421594 - DNA, 19 bp, Homo sapiens
  siRNA target sequence for HCMOGT-1 (NM_152904.1,1353-1371).
gcagctaagtcaagaaaat

SEQ ID NO: 421595 - DNA, 19 bp, Homo sapiens
  siRNA target sequence for HCMOGT-1 (NM_152904.1,1624-1642).
ctggaacggcataataata

SEQ ID NO: 421596 - DNA, 19 bp, Homo sapiens
  siRNA target sequence for HCMOGT-1 (NM_152904.1,1627-1645).
gaacggcataataataaca

SEQ ID NO: 421597 - DNA, 19 bp, Homo sapiens
  siRNA target sequence for HCMOGT-1 (NM_152904.1,1706-1724).
gatctttgaagtctcattt

SEQ ID NO: 421598 - DNA, 19 bp, Homo sapiens
  siRNA target sequence for HCMOGT-1 (NM_152904.1,1781-1799).
gctgcgaagttcaagaaat

SEQ ID NO: 421599 - DNA, 19 bp, Homo sapiens
  siRNA target sequence for HCMOGT-1 (NM_152904.1,1811-1829).
cccgagcagagaaagatct

SEQ ID NO: 421600 - DNA, 19 bp, Homo sapiens
  siRNA target sequence for HCMOGT-1 (NM_152904.1,1814-1832).
gagcagagaaagatctact

SEQ ID NO: 421601 - DNA, 19 bp, Homo sapiens
  siRNA target sequence for HCMOGT-1 (NM_152904.1,1851-1869).
gctcagacaagaattacta

SEQ ID NO: 421602 - DNA, 19 bp, Homo sapiens
  siRNA target sequence for HCMOGT-1 (NM_152904.1,1852-1870).
ctcagacaagaattactaa

SEQ ID NO: 421603 - DNA, 19 bp, Homo sapiens
  siRNA target sequence for HCMOGT-1 (NM_152904.1,1872-1890).
ggcaaacggtgaaattaaa

SEQ ID NO: 421604 - DNA, 19 bp, Homo sapiens
  siRNA target sequence for HCMOGT-1 (NM_152904.1,1973-1991).
gcagaaccagcctaaagct

SEQ ID NO: 421605 - DNA, 19 bp, Homo sapiens
  siRNA target sequence for HCMOGT-1 (NM_152904.1,2073-2091).
gcaccgggctgtcaagtta

SEQ ID NO: 421606 - DNA, 19 bp, Homo sapiens
  siRNA target sequence for HCMOGT-1 (NM_152904.1,2077-2095).
cgggctgtcaagttacaca

SEQ ID NO: 421607 - DNA, 19 bp, Homo sapiens
  siRNA target sequence for HCMOGT-1 (NM_152904.1,2078-2096).
gggctgtcaagttacacaa

SEQ ID NO: 421608 - DNA, 19 bp, Homo sapiens
  siRNA target sequence for HCMOGT-1 (NM_152904.1,2079-2097).
ggctgtcaagttacacaat

SEQ ID NO: 421609 - DNA, 19 bp, Homo sapiens
  siRNA target sequence for HCMOGT-1 (NM_152904.1,2080-2098).
gctgtcaagttacacaata

SEQ ID NO: 421610 - DNA, 19 bp, Homo sapiens
  siRNA target sequence for HCMOGT-1 (NM_152904.1,2081-2099).
ctgtcaagttacacaataa

SEQ ID NO: 421611 - DNA, 19 bp, Homo sapiens
  siRNA target sequence for HCMOGT-1 (NM_152904.1,2104-2122).
ctcatcagtgagctagaaa

SEQ ID NO: 421612 - DNA, 19 bp, Homo sapiens
  siRNA target sequence for NEDD1 (NM_152905.2,219-237).
gatgcttcatctatgacat

SEQ ID NO: 421613 - DNA, 19 bp, Homo sapiens
  siRNA target sequence for NEDD1 (NM_152905.2,325-343).
cttccagtggcgacaaaat

SEQ ID NO: 421614 - DNA, 19 bp, Homo sapiens
  siRNA target sequence for NEDD1 (NM_152905.2,348-366).
gtctcaagttgcaaatgta

SEQ ID NO: 421615 - DNA, 19 bp, Homo sapiens
  siRNA target sequence for NEDD1 (NM_152905.2,427-445).
ctacatctatgtatttggt

SEQ ID NO: 421616 - DNA, 19 bp, Homo sapiens
  siRNA target sequence for NEDD1 (NM_152905.2,443-461).
ggtaagcggaggcctaaat

SEQ ID NO: 421617 - DNA, 19 bp, Homo sapiens
  siRNA target sequence for NEDD1 (NM_152905.2,444-462).
gtaagcggaggcctaaata

SEQ ID NO: 421618 - DNA, 19 bp, Homo sapiens
  siRNA target sequence for NEDD1 (NM_152905.2,449-467).
cggaggcctaaataacact

SEQ ID NO: 421619 - DNA, 19 bp, Homo sapiens
  siRNA target sequence for NEDD1 (NM_152905.2,453-471).
ggcctaaataacactgtta

SEQ ID NO: 421620 - DNA, 19 bp, Homo sapiens
  siRNA target sequence for NEDD1 (NM_152905.2,455-473).
cctaaataacactgttaat

SEQ ID NO: 421621 - DNA, 19 bp, Homo sapiens
  siRNA target sequence for NEDD1 (NM_152905.2,496-514).
gagttcatcgatctcttaa

SEQ ID NO: 421622 - DNA, 19 bp, Homo sapiens
  siRNA target sequence for NEDD1 (NM_152905.2,504-522).
cgatctcttaaggatcata

SEQ ID NO: 421623 - DNA, 19 bp, Homo sapiens
  siRNA target sequence for NEDD1 (NM_152905.2,505-523).
gatctcttaaggatcataa

SEQ ID NO: 421624 - DNA, 19 bp, Homo sapiens
  siRNA target sequence for NEDD1 (NM_152905.2,516-534).
gatcataaagatcaagtaa

SEQ ID NO: 421625 - DNA, 19 bp, Homo sapiens
  siRNA target sequence for NEDD1 (NM_152905.2,582-600).
cttagtggtgaaattattt

SEQ ID NO: 421626 - DNA, 19 bp, Homo sapiens
  siRNA target sequence for NEDD1 (NM_152905.2,609-627).
gtaaccactaatttatcta

SEQ ID NO: 421627 - DNA, 19 bp, Homo sapiens
  siRNA target sequence for NEDD1 (NM_152905.2,634-652).
cttttggccatggtagtaa

SEQ ID NO: 421628 - DNA, 19 bp, Homo sapiens
  siRNA target sequence for NEDD1 (NM_152905.2,658-676).
ctgttcggcacttgaagta

SEQ ID NO: 421629 - DNA, 19 bp, Homo sapiens
  siRNA target sequence for NEDD1 (NM_152905.2,660-678).
gttcggcacttgaagtact

SEQ ID NO: 421630 - DNA, 19 bp, Homo sapiens
  siRNA target sequence for NEDD1 (NM_152905.2,668-686).
cttgaagtactccttgttt

SEQ ID NO: 421631 - DNA, 19 bp, Homo sapiens
  siRNA target sequence for NEDD1 (NM_152905.2,679-697).
ccttgtttaagaaatcact

SEQ ID NO: 421632 - DNA, 19 bp, Homo sapiens
  siRNA target sequence for NEDD1 (NM_152905.2,713-731).
ggataatggaatagtaact

SEQ ID NO: 421633 - DNA, 19 bp, Homo sapiens
  siRNA target sequence for NEDD1 (NM_152905.2,726-744).
gtaactctctgggatgtaa

SEQ ID NO: 421634 - DNA, 19 bp, Homo sapiens
  siRNA target sequence for NEDD1 (NM_152905.2,750-768).
cagagtccataccataact

SEQ ID NO: 421635 - DNA, 19 bp, Homo sapiens
  siRNA target sequence for NEDD1 (NM_152905.2,752-770).
gagtccataccataacttt

SEQ ID NO: 421636 - DNA, 19 bp, Homo sapiens
  siRNA target sequence for NEDD1 (NM_152905.2,754-772).
gtccataccataactttga

SEQ ID NO: 421637 - DNA, 19 bp, Homo sapiens
  siRNA target sequence for NEDD1 (NM_152905.2,790-808).
cagcgtcaggcatctgttt

SEQ ID NO: 421638 - DNA, 19 bp, Homo sapiens
  siRNA target sequence for NEDD1 (NM_152905.2,792-810).
gcgtcaggcatctgttttt

SEQ ID NO: 421639 - DNA, 19 bp, Homo sapiens
  siRNA target sequence for NEDD1 (NM_152905.2,811-829).
ctcctgtcaatgaattgct

SEQ ID NO: 421640 - DNA, 19 bp, Homo sapiens
  siRNA target sequence for NEDD1 (NM_152905.2,818-836).
caatgaattgctctttgta

SEQ ID NO: 421641 - DNA, 19 bp, Homo sapiens
  siRNA target sequence for NEDD1 (NM_152905.2,834-852).
gtaaccataggcttggata

SEQ ID NO: 421642 - DNA, 19 bp, Homo sapiens
  siRNA target sequence for NEDD1 (NM_152905.2,843-861).
ggcttggataaaagaatca

SEQ ID NO: 421643 - DNA, 19 bp, Homo sapiens
  siRNA target sequence for NEDD1 (NM_152905.2,844-862).
gcttggataaaagaatcat

SEQ ID NO: 421644 - DNA, 19 bp, Homo sapiens
  siRNA target sequence for NEDD1 (NM_152905.2,863-881).
cctctatgacacttcaagt

SEQ ID NO: 421645 - DNA, 19 bp, Homo sapiens
  siRNA target sequence for NEDD1 (NM_152905.2,905-923).
ggctgacactcctctaact

SEQ ID NO: 421646 - DNA, 19 bp, Homo sapiens
  siRNA target sequence for NEDD1 (NM_152905.2,918-936).
ctaactgcggtagatttca

SEQ ID NO: 421647 - DNA, 19 bp, Homo sapiens
  siRNA target sequence for NEDD1 (NM_152905.2,1040-1058).
gacatctgtgcagtgtata

SEQ ID NO: 421648 - DNA, 19 bp, Homo sapiens
  siRNA target sequence for NEDD1 (NM_152905.2,1065-1083).
cagtactccactgttctta

SEQ ID NO: 421649 - DNA, 19 bp, Homo sapiens
  siRNA target sequence for NEDD1 (NM_152905.2,1073-1091).
cactgttcttactaagtca

SEQ ID NO: 421650 - DNA, 19 bp, Homo sapiens
  siRNA target sequence for NEDD1 (NM_152905.2,1128-1146).
gtgaacaaacgaagtgtta

SEQ ID NO: 421651 - DNA, 19 bp, Homo sapiens
  siRNA target sequence for NEDD1 (NM_152905.2,1130-1148).
gaacaaacgaagtgttaat

SEQ ID NO: 421652 - DNA, 19 bp, Homo sapiens
  siRNA target sequence for NEDD1 (NM_152905.2,1173-1191).
cagaattccggaattgtca

SEQ ID NO: 421653 - DNA, 19 bp, Homo sapiens
  siRNA target sequence for NEDD1 (NM_152905.2,1208-1226).
gtccattgccacagttcta

SEQ ID NO: 421654 - DNA, 19 bp, Homo sapiens
  siRNA target sequence for NEDD1 (NM_152905.2,1224-1242).
ctaccacaacctatgacat

SEQ ID NO: 421655 - DNA, 19 bp, Homo sapiens
  siRNA target sequence for NEDD1 (NM_152905.2,1284-1302).
ggtttgcctcgaagcataa

SEQ ID NO: 421656 - DNA, 19 bp, Homo sapiens
  siRNA target sequence for NEDD1 (NM_152905.2,1285-1303).
gtttgcctcgaagcataaa

SEQ ID NO: 421657 - DNA, 19 bp, Homo sapiens
  siRNA target sequence for NEDD1 (NM_152905.2,1289-1307).
gcctcgaagcataaacaca

SEQ ID NO: 421658 - DNA, 19 bp, Homo sapiens
  siRNA target sequence for NEDD1 (NM_152905.2,1397-1415).
ctcacctatcagagatgat

SEQ ID NO: 421659 - DNA, 19 bp, Homo sapiens
  siRNA target sequence for NEDD1 (NM_152905.2,1408-1426).
gagatgatgctgtagttaa

SEQ ID NO: 421660 - DNA, 19 bp, Homo sapiens
  siRNA target sequence for NEDD1 (NM_152905.2,1602-1620).
ctaacagctgagtctaaga

SEQ ID NO: 421661 - DNA, 19 bp, Homo sapiens
  siRNA target sequence for NEDD1 (NM_152905.2,1654-1672).
ccttcaaacagttagcaaa

SEQ ID NO: 421662 - DNA, 19 bp, Homo sapiens
  siRNA target sequence for NEDD1 (NM_152905.2,1712-1730).
ctctccatcatctaaccaa

SEQ ID NO: 421663 - DNA, 19 bp, Homo sapiens
  siRNA target sequence for NEDD1 (NM_152905.2,1818-1836).
ccaaatccaaagatagcat

SEQ ID NO: 421664 - DNA, 19 bp, Homo sapiens
  siRNA target sequence for NEDD1 (NM_152905.2,1919-1937).
gacttccattcaaattcgt

SEQ ID NO: 421665 - DNA, 19 bp, Homo sapiens
  siRNA target sequence for NEDD1 (NM_152905.2,1924-1942).
ccattcaaattcgttttat

SEQ ID NO: 421666 - DNA, 19 bp, Homo sapiens
  siRNA target sequence for NEDD1 (NM_152905.2,1929-1947).
caaattcgttttattcaga

SEQ ID NO: 421667 - DNA, 19 bp, Homo sapiens
  siRNA target sequence for NEDD1 (NM_152905.2,1935-1953).
cgttttattcagaacatga

SEQ ID NO: 421668 - DNA, 19 bp, Homo sapiens
  siRNA target sequence for NEDD1 (NM_152905.2,1936-1954).
gttttattcagaacatgat

SEQ ID NO: 421669 - DNA, 19 bp, Homo sapiens
  siRNA target sequence for NEDD1 (NM_152905.2,1984-2002).
catgccatagggacattgt

SEQ ID NO: 421670 - DNA, 19 bp, Homo sapiens
  siRNA target sequence for NEDD1 (NM_152905.2,2018-2036).
gatgattaaacagtttcat

SEQ ID NO: 421671 - DNA, 19 bp, Homo sapiens
  siRNA target sequence for NEDD1 (NM_152905.2,2075-2093).
ctcagtgaatgaaggttta

SEQ ID NO: 421672 - DNA, 19 bp, Homo sapiens
  siRNA target sequence for NEDD1 (NM_152905.2,2096-2114).
ggctgaaattgaaagacta

SEQ ID NO: 421673 - DNA, 19 bp, Homo sapiens
  siRNA target sequence for DKFZp761P1121 (NM_152906.2,208-226).
cctcgccctgtttccaaaa

SEQ ID NO: 421674 - DNA, 19 bp, Homo sapiens
  siRNA target sequence for DKFZp761P1121 (NM_152906.2,270-288).
cagccgaccctccaagtta

SEQ ID NO: 421675 - DNA, 19 bp, Homo sapiens
  siRNA target sequence for DKFZp761P1121 (NM_152906.2,435-453).
ccgagggcgaggtgaactt

SEQ ID NO: 421676 - DNA, 19 bp, Homo sapiens
  siRNA target sequence for DKFZp761P1121 (NM_152906.2,437-455).
gagggcgaggtgaacttgt

SEQ ID NO: 421677 - DNA, 19 bp, Homo sapiens
  siRNA target sequence for DKFZp761P1121 (NM_152906.2,599-617).
gaggggagcctgatcctat

SEQ ID NO: 421678 - DNA, 19 bp, Homo sapiens
  siRNA target sequence for DKFZp761P1121 (NM_152906.2,604-622).
gagcctgatcctatcgttt

SEQ ID NO: 421679 - DNA, 19 bp, Homo sapiens
  siRNA target sequence for DKFZp761P1121 (NM_152906.2,972-990).
ctgggagaccagaacctat

SEQ ID NO: 421680 - DNA, 19 bp, Homo sapiens
  siRNA target sequence for DKFZp761L1417 (NM_152913.1,236-254).
ggccgcaggcctgtatgaa

SEQ ID NO: 421681 - DNA, 19 bp, Homo sapiens
  siRNA target sequence for DKFZp761L1417 (NM_152913.1,616-634).
ctaagaccgtcctgaaagt

SEQ ID NO: 421682 - DNA, 19 bp, Homo sapiens
  siRNA target sequence for DKFZp761L1417 (NM_152913.1,665-683).
cctcaagaccgccttgttt

SEQ ID NO: 421683 - DNA, 19 bp, Homo sapiens
  siRNA target sequence for DKFZp761L1417 (NM_152913.1,726-744).
gaagactccgtggtctatt

SEQ ID NO: 421684 - DNA, 19 bp, Homo sapiens
  siRNA target sequence for DKFZp761L1417 (NM_152913.1,729-747).
gactccgtggtctattata

SEQ ID NO: 421685 - DNA, 19 bp, Homo sapiens
  siRNA target sequence for DKFZp761L1417 (NM_152913.1,1191-1209).
ccatgtgctacacttatca

SEQ ID NO: 421686 - DNA, 19 bp, Homo sapiens
  siRNA target sequence for DKFZp761L1417 (NM_152913.1,1212-1230).
gtgatgttggccttcatca

SEQ ID NO: 421687 - DNA, 19 bp, Homo sapiens
  siRNA target sequence for MGC33894 (NM_152914.1,242-260).
ccggctcaacggatgtcat

SEQ ID NO: 421688 - DNA, 19 bp, Homo sapiens
  siRNA target sequence for MGC33894 (NM_152914.1,267-285).
gccgtcctgctctatgagt

SEQ ID NO: 421689 - DNA, 19 bp, Homo sapiens
  siRNA target sequence for MGC33894 (NM_152914.1,268-286).
ccgtcctgctctatgagta

SEQ ID NO: 421690 - DNA, 19 bp, Homo sapiens
  siRNA target sequence for MGC33894 (NM_152914.1,421-439).
gctggtacatccagaagta

SEQ ID NO: 421691 - DNA, 19 bp, Homo sapiens
  siRNA target sequence for STEPP (NM_152990.2,72-90).
ggttcgagaggatcttcaa

SEQ ID NO: 421692 - DNA, 19 bp, Homo sapiens
  siRNA target sequence for STEPP (NM_152990.2,98-116).
gcagagatgcactagatca

SEQ ID NO: 421693 - DNA, 19 bp, Homo sapiens
  siRNA target sequence for STEPP (NM_152990.2,99-117).
cagagatgcactagatcat

SEQ ID NO: 421694 - DNA, 19 bp, Homo sapiens
  siRNA target sequence for LOC129285 (NM_152994.2,326-344).
gaaggatcagtcattgaga

SEQ ID NO: 421695 - DNA, 19 bp, Homo sapiens
  siRNA target sequence for LOC129285 (NM_152994.2,329-347).
ggatcagtcattgagaaaa

SEQ ID NO: 421696 - DNA, 19 bp, Homo sapiens
  siRNA target sequence for LOC129285 (NM_152994.2,367-385).
gtttgacatttcgaaatct

SEQ ID NO: 421697 - DNA, 19 bp, Homo sapiens
  siRNA target sequence for LOC129285 (NM_152994.2,394-412).
ccaagagggtagaactact

SEQ ID NO: 421698 - DNA, 19 bp, Homo sapiens
  siRNA target sequence for LOC129285 (NM_152994.2,398-416).
gagggtagaactacttcaa

SEQ ID NO: 421699 - DNA, 19 bp, Homo sapiens
  siRNA target sequence for LOC129285 (NM_152994.2,500-518).
gagtgtctttgatgaagat

SEQ ID NO: 421700 - DNA, 19 bp, Homo sapiens
  siRNA target sequence for LOC129285 (NM_152994.2,539-557).
gaatgaacggttgcatata

SEQ ID NO: 421701 - DNA, 19 bp, Homo sapiens
  siRNA target sequence for LOC129285 (NM_152994.2,543-561).
gaacggttgcatatacaat

SEQ ID NO: 421702 - DNA, 19 bp, Homo sapiens
  siRNA target sequence for LOC129285 (NM_152994.2,546-564).
cggttgcatatacaatttt

SEQ ID NO: 421703 - DNA, 19 bp, Homo sapiens
  siRNA target sequence for LOC129285 (NM_152994.2,548-566).
gttgcatatacaatttttt

SEQ ID NO: 421704 - DNA, 19 bp, Homo sapiens
  siRNA target sequence for LOC129285 (NM_152994.2,704-722).
gaacgacaaggctaaacta

SEQ ID NO: 421705 - DNA, 19 bp, Homo sapiens
  siRNA target sequence for LOC129285 (NM_152994.2,707-725).
cgacaaggctaaactagaa

SEQ ID NO: 421706 - DNA, 19 bp, Homo sapiens
  siRNA target sequence for LOC129285 (NM_152994.2,765-783).
cgacttcgaacggaagaat

SEQ ID NO: 421707 - DNA, 19 bp, Homo sapiens
  siRNA target sequence for LOC129285 (NM_152994.2,771-789).
cgaacggaagaatgtcaat

SEQ ID NO: 421708 - DNA, 19 bp, Homo sapiens
  siRNA target sequence for LOC129285 (NM_152994.2,772-790).
gaacggaagaatgtcaatt

SEQ ID NO: 421709 - DNA, 19 bp, Homo sapiens
  siRNA target sequence for LOC129285 (NM_152994.2,823-841).
gtagattagaggaatcctt

SEQ ID NO: 421710 - DNA, 19 bp, Homo sapiens
  siRNA target sequence for LOC129285 (NM_152994.2,831-849).
gaggaatccttatcaatca

SEQ ID NO: 421711 - DNA, 19 bp, Homo sapiens
  siRNA target sequence for LOC129285 (NM_152994.2,906-924).
gttccactccacaatagga

SEQ ID NO: 421712 - DNA, 19 bp, Homo sapiens
  siRNA target sequence for LOC129285 (NM_152994.2,932-950).
gctgaagatgcgagatatt

SEQ ID NO: 421713 - DNA, 19 bp, Homo sapiens
  siRNA target sequence for LOC129285 (NM_152994.2,935-953).
gaagatgcgagatattgct

SEQ ID NO: 421714 - DNA, 19 bp, Homo sapiens
  siRNA target sequence for LOC129285 (NM_152994.2,984-1002).
gtgacggctcttctaaact

SEQ ID NO: 421715 - DNA, 19 bp, Homo sapiens
  siRNA target sequence for LOC129285 (NM_152994.2,986-1004).
gacggctcttctaaacttt

SEQ ID NO: 421716 - DNA, 19 bp, Homo sapiens
  siRNA target sequence for LOC129285 (NM_152994.2,988-1006).
cggctcttctaaactttca

SEQ ID NO: 421717 - DNA, 19 bp, Homo sapiens
  siRNA target sequence for LOC129285 (NM_152994.2,1079-1097).
gaagttctcacaatacctt

SEQ ID NO: 421718 - DNA, 19 bp, Homo sapiens
  siRNA target sequence for LOC129285 (NM_152994.2,1218-1236).
cacttaacctcctacatat

SEQ ID NO: 421719 - DNA, 19 bp, Homo sapiens
  siRNA target sequence for LOC129285 (NM_152994.2,1220-1238).
cttaacctcctacatatgt

SEQ ID NO: 421720 - DNA, 19 bp, Homo sapiens
  siRNA target sequence for LOC129285 (NM_152994.2,1225-1243).
cctcctacatatgttttct

SEQ ID NO: 421721 - DNA, 19 bp, Homo sapiens
  siRNA target sequence for LOC129285 (NM_152994.2,1254-1272).
cttccctatcagttaaaaa

SEQ ID NO: 421722 - DNA, 19 bp, Homo sapiens
  siRNA target sequence for LOC129285 (NM_152994.2,1257-1275).
ccctatcagttaaaaagtt

SEQ ID NO: 421723 - DNA, 19 bp, Homo sapiens
  siRNA target sequence for LOC129285 (NM_152994.2,1313-1331).
gttaagagccaggaatcta

SEQ ID NO: 421724 - DNA, 19 bp, Homo sapiens
  siRNA target sequence for LOC129285 (NM_152994.2,1373-1391).
gaagctgcagacttacata

SEQ ID NO: 421725 - DNA, 19 bp, Homo sapiens
  siRNA target sequence for LOC129285 (NM_152994.2,1425-1443).
ggactccttcggacaaact

SEQ ID NO: 421726 - DNA, 19 bp, Homo sapiens
  siRNA target sequence for LOC129285 (NM_152994.2,1426-1444).
gactccttcggacaaacta

SEQ ID NO: 421727 - DNA, 19 bp, Homo sapiens
  siRNA target sequence for LOC129285 (NM_152994.2,1428-1446).
ctccttcggacaaactaca

SEQ ID NO: 421728 - DNA, 19 bp, Homo sapiens
  siRNA target sequence for LOC129285 (NM_152994.2,1431-1449).
cttcggacaaactacagtt

SEQ ID NO: 421729 - DNA, 19 bp, Homo sapiens
  siRNA target sequence for LOC129285 (NM_152994.2,1442-1460).
ctacagttctgtgttaaca

SEQ ID NO: 421730 - DNA, 19 bp, Homo sapiens
  siRNA target sequence for LOC129285 (NM_152994.2,1445-1463).
cagttctgtgttaacaaat

SEQ ID NO: 421731 - DNA, 19 bp, Homo sapiens
  siRNA target sequence for LOC129285 (NM_152994.2,1482-1500).
ggatttcatgacgttatga

SEQ ID NO: 421732 - DNA, 19 bp, Homo sapiens
  siRNA target sequence for LOC129285 (NM_152994.2,1483-1501).
gatttcatgacgttatgaa

SEQ ID NO: 421733 - DNA, 19 bp, Homo sapiens
  siRNA target sequence for LOC129285 (NM_152994.2,1488-1506).
catgacgttatgaaagata

SEQ ID NO: 421734 - DNA, 19 bp, Homo sapiens
  siRNA target sequence for LOC129285 (NM_152994.2,1491-1509).
gacgttatgaaagatattt

SEQ ID NO: 421735 - DNA, 19 bp, Homo sapiens
  siRNA target sequence for LOC129285 (NM_152994.2,1531-1549).
ctgcaatagagcatgaact

SEQ ID NO: 421736 - DNA, 19 bp, Homo sapiens
  siRNA target sequence for LOC129285 (NM_152994.2,1565-1583).
gaagctgataacaactaat

SEQ ID NO: 421737 - DNA, 19 bp, Homo sapiens
  siRNA target sequence for LOC129285 (NM_152994.2,1569-1587).
ctgataacaactaatgact

SEQ ID NO: 421738 - DNA, 19 bp, Homo sapiens
  siRNA target sequence for LOC129285 (NM_152994.2,1694-1712).
ggcagcgagtggattcatt

SEQ ID NO: 421739 - DNA, 19 bp, Homo sapiens
  siRNA target sequence for LOC129285 (NM_152994.2,1695-1713).
gcagcgagtggattcatta

SEQ ID NO: 421740 - DNA, 19 bp, Homo sapiens
  siRNA target sequence for LOC129285 (NM_152994.2,1726-1744).
ctgaatgcatgctacagta

SEQ ID NO: 421741 - DNA, 19 bp, Homo sapiens
  siRNA target sequence for LOC129285 (NM_152994.2,1732-1750).
gcatgctacagtataagaa

SEQ ID NO: 421742 - DNA, 19 bp, Homo sapiens
  siRNA target sequence for LOC129285 (NM_152994.2,1931-1949).
gatgttggaagcacaatta

SEQ ID NO: 421743 - DNA, 19 bp, Homo sapiens
  siRNA target sequence for LOC129285 (NM_152994.2,1941-1959).
gcacaattagccaaaatca

SEQ ID NO: 421744 - DNA, 19 bp, Homo sapiens
  siRNA target sequence for LOC129285 (NM_152994.2,2132-2150).
ggaatctcgtgaagactta

SEQ ID NO: 421745 - DNA, 19 bp, Homo sapiens
  siRNA target sequence for LOC129285 (NM_152994.2,2133-2151).
gaatctcgtgaagacttaa

SEQ ID NO: 421746 - DNA, 19 bp, Homo sapiens
  siRNA target sequence for LOC129285 (NM_152994.2,2137-2155).
ctcgtgaagacttaattaa

SEQ ID NO: 421747 - DNA, 19 bp, Homo sapiens
  siRNA target sequence for LOC129285 (NM_152994.2,2169-2187).
gcaaggatagtggaactta

SEQ ID NO: 421748 - DNA, 19 bp, Homo sapiens
  siRNA target sequence for LOC129285 (NM_152994.2,2201-2219).
gctggctgacagtaagtca

SEQ ID NO: 421749 - DNA, 19 bp, Homo sapiens
  siRNA target sequence for LOC129285 (NM_152994.2,2242-2260).
gagcactgtctaaaagact

SEQ ID NO: 421750 - DNA, 19 bp, Homo sapiens
  siRNA target sequence for LOC129285 (NM_152994.2,2263-2281).
ccttggctgaaaagtctaa

SEQ ID NO: 421751 - DNA, 19 bp, Homo sapiens
  siRNA target sequence for LOC129285 (NM_152994.2,2334-2352).
caggatgagctgacaacta

SEQ ID NO: 421752 - DNA, 19 bp, Homo sapiens
  siRNA target sequence for LOC129285 (NM_152994.2,2360-2378).
gagttacgaggatcagtta

SEQ ID NO: 421753 - DNA, 19 bp, Homo sapiens
  siRNA target sequence for LOC129285 (NM_152994.2,2401-2419).
gcagcatgaatgagacatt

SEQ ID NO: 421754 - DNA, 19 bp, Homo sapiens
  siRNA target sequence for LOC129285 (NM_152994.2,2405-2423).
catgaatgagacattatct

SEQ ID NO: 421755 - DNA, 19 bp, Homo sapiens
  siRNA target sequence for LOC129285 (NM_152994.2,2412-2430).
gagacattatctaaacaga

SEQ ID NO: 421756 - DNA, 19 bp, Homo sapiens
  siRNA target sequence for LOC129285 (NM_152994.2,2456-2474).
gtccagtaaggggaattct

SEQ ID NO: 421757 - DNA, 19 bp, Homo sapiens
  siRNA target sequence for LOC129285 (NM_152994.2,2459-2477).
cagtaaggggaattctaaa

SEQ ID NO: 421758 - DNA, 19 bp, Homo sapiens
  siRNA target sequence for LOC129285 (NM_152994.2,2461-2479).
gtaaggggaattctaaaaa

SEQ ID NO: 421759 - DNA, 19 bp, Homo sapiens
  siRNA target sequence for C4orf7 (NM_152997.1,141-159).
cagtgacagcgatgaatta

SEQ ID NO: 421760 - DNA, 19 bp, Homo sapiens
  siRNA target sequence for C4orf7 (NM_152997.1,145-163).
gacagcgatgaattagctt

SEQ ID NO: 421761 - DNA, 19 bp, Homo sapiens
  siRNA target sequence for C4orf7 (NM_152997.1,203-221).
cacttccaccaattccatt

SEQ ID NO: 421762 - DNA, 19 bp, Homo sapiens
  siRNA target sequence for C4orf7 (NM_152997.1,223-241).
ccaagatttccatggttta

SEQ ID NO: 421763 - DNA, 19 bp, Homo sapiens
  siRNA target sequence for C4orf7 (NM_152997.1,232-250).
ccatggtttagacgtaatt

SEQ ID NO: 421764 - DNA, 19 bp, Homo sapiens
  siRNA target sequence for C4orf7 (NM_152997.1,233-251).
catggtttagacgtaattt

SEQ ID NO: 421765 - DNA, 19 bp, Homo sapiens
  siRNA target sequence for C4orf7 (NM_152997.1,244-262).
cgtaattttcctattccaa

SEQ ID NO: 421766 - DNA, 19 bp, Homo sapiens
  siRNA target sequence for C4orf7 (NM_152997.1,286-304).
ccccttcctagcgaaaagt

SEQ ID NO: 421767 - DNA, 19 bp, Homo sapiens
  siRNA target sequence for APCDD1 (NM_153000.3,456-474).
catcctaggtccttagaga

SEQ ID NO: 421768 - DNA, 19 bp, Homo sapiens
  siRNA target sequence for APCDD1 (NM_153000.3,587-605).
ctccacaggctgtgaagta

SEQ ID NO: 421769 - DNA, 19 bp, Homo sapiens
  siRNA target sequence for APCDD1 (NM_153000.3,612-630).
ggcccagagttcatcacaa

SEQ ID NO: 421770 - DNA, 19 bp, Homo sapiens
  siRNA target sequence for APCDD1 (NM_153000.3,628-646).
caaggtcctacagattcta

SEQ ID NO: 421771 - DNA, 19 bp, Homo sapiens
  siRNA target sequence for APCDD1 (NM_153000.3,659-677).
cttcaaggcctaccaattt

SEQ ID NO: 421772 - DNA, 19 bp, Homo sapiens
  siRNA target sequence for APCDD1 (NM_153000.3,665-683).
ggcctaccaattttattat

SEQ ID NO: 421773 - DNA, 19 bp, Homo sapiens
  siRNA target sequence for APCDD1 (NM_153000.3,695-713).
gtgcacaaatcccacttat

SEQ ID NO: 421774 - DNA, 19 bp, Homo sapiens
  siRNA target sequence for APCDD1 (NM_153000.3,698-716).
cacaaatcccacttatact

SEQ ID NO: 421775 - DNA, 19 bp, Homo sapiens
  siRNA target sequence for APCDD1 (NM_153000.3,700-718).
caaatcccacttatactct

SEQ ID NO: 421776 - DNA, 19 bp, Homo sapiens
  siRNA target sequence for APCDD1 (NM_153000.3,1315-1333).
cctgggagggccactacta

SEQ ID NO: 421777 - DNA, 19 bp, Homo sapiens
  siRNA target sequence for APCDD1 (NM_153000.3,1436-1454).
gttcgtgttcaaagtgaat

SEQ ID NO: 421778 - DNA, 19 bp, Homo sapiens
  siRNA target sequence for APCDD1 (NM_153000.3,1440-1458).
gtgttcaaagtgaatcaca

SEQ ID NO: 421779 - DNA, 19 bp, Homo sapiens
  siRNA target sequence for APCDD1 (NM_153000.3,1612-1630).
cggagtacgagatcttcaa

SEQ ID NO: 421780 - DNA, 19 bp, Homo sapiens
  siRNA target sequence for APCDD1 (NM_153000.3,1613-1631).
ggagtacgagatcttcaaa

SEQ ID NO: 421781 - DNA, 19 bp, Homo sapiens
  siRNA target sequence for APCDD1 (NM_153000.3,1614-1632).
gagtacgagatcttcaaaa

SEQ ID NO: 421782 - DNA, 19 bp, Homo sapiens
  siRNA target sequence for OFCC1 (NM_153003.1,154-172).
ctgaatttctgatggttaa

SEQ ID NO: 421783 - DNA, 19 bp, Homo sapiens
  siRNA target sequence for OFCC1 (NM_153003.1,162-180).
ctgatggttaaagaagata

SEQ ID NO: 421784 - DNA, 19 bp, Homo sapiens
  siRNA target sequence for OFCC1 (NM_153003.1,164-182).
gatggttaaagaagataga

SEQ ID NO: 421785 - DNA, 19 bp, Homo sapiens
  siRNA target sequence for OFCC1 (NM_153003.1,201-219).
ggaaatccagcttttaaca

SEQ ID NO: 421786 - DNA, 19 bp, Homo sapiens
  siRNA target sequence for OFCC1 (NM_153003.1,300-318).
gctcaccaacaaaaattca

SEQ ID NO: 421787 - DNA, 19 bp, Homo sapiens
  siRNA target sequence for OFCC1 (NM_153003.1,435-453).
gacgatagaattttctata

SEQ ID NO: 421788 - DNA, 19 bp, Homo sapiens
  siRNA target sequence for OFCC1 (NM_153003.1,437-455).
cgatagaattttctataat

SEQ ID NO: 421789 - DNA, 19 bp, Homo sapiens
  siRNA target sequence for OFCC1 (NM_153003.1,442-460).
gaattttctataatcgatt

SEQ ID NO: 421790 - DNA, 19 bp, Homo sapiens
  siRNA target sequence for OFCC1 (NM_153003.1,513-531).
cgggaggagactctgaatt

SEQ ID NO: 421791 - DNA, 19 bp, Homo sapiens
  siRNA target sequence for OFCC1 (NM_153003.1,550-568).
ccaataagagtcacgaaat

SEQ ID NO: 421792 - DNA, 19 bp, Homo sapiens
  siRNA target sequence for OFCC1 (NM_153003.1,559-577).
gtcacgaaatccacaaaga

SEQ ID NO: 421793 - DNA, 19 bp, Homo sapiens
  siRNA target sequence for OFCC1 (NM_153003.1,641-659).
gcttggaagttctccatta

SEQ ID NO: 421794 - DNA, 19 bp, Homo sapiens
  siRNA target sequence for OFCC1 (NM_153003.1,709-727).
gtcatccatggatactctt

SEQ ID NO: 421795 - DNA, 19 bp, Homo sapiens
  siRNA target sequence for OFCC1 (NM_153003.1,718-736).
ggatactcttgctcaaagt

SEQ ID NO: 421796 - DNA, 19 bp, Homo sapiens
  siRNA target sequence for OFCC1 (NM_153003.1,719-737).
gatactcttgctcaaagta

SEQ ID NO: 421797 - DNA, 19 bp, Homo sapiens
  siRNA target sequence for ODF4 (NM_153007.3,192-210).
gagtactctgggaatgagt

SEQ ID NO: 421798 - DNA, 19 bp, Homo sapiens
  siRNA target sequence for ODF4 (NM_153007.3,328-346).
ccctctccctcagtagtaa

SEQ ID NO: 421799 - DNA, 19 bp, Homo sapiens
  siRNA target sequence for ODF4 (NM_153007.3,381-399).
ccctttcaatggagaatca

SEQ ID NO: 421800 - DNA, 19 bp, Homo sapiens
  siRNA target sequence for ODF4 (NM_153007.3,446-464).
cctggttgcctttatccta

SEQ ID NO: 421801 - DNA, 19 bp, Homo sapiens
  siRNA target sequence for ODF4 (NM_153007.3,454-472).
cctttatcctactattggt

SEQ ID NO: 421802 - DNA, 19 bp, Homo sapiens
  siRNA target sequence for ODF4 (NM_153007.3,534-552).
gtggatgtcagcaacagaa

SEQ ID NO: 421803 - DNA, 19 bp, Homo sapiens
  siRNA target sequence for ODF4 (NM_153007.3,714-732).
cccataggctggagctatt

SEQ ID NO: 421804 - DNA, 19 bp, Homo sapiens
  siRNA target sequence for ODF4 (NM_153007.3,739-757).
gttggctggtgcttatcct

SEQ ID NO: 421805 - DNA, 19 bp, Homo sapiens
  siRNA target sequence for ODF4 (NM_153007.3,744-762).
ctggtgcttatcctatact

SEQ ID NO: 421806 - DNA, 19 bp, Homo sapiens
  siRNA target sequence for ODF4 (NM_153007.3,766-784).
cctgcgcgatcctttgcta

SEQ ID NO: 421807 - DNA, 19 bp, Homo sapiens
  siRNA target sequence for ODF4 (NM_153007.3,772-790).
cgatcctttgctacttcaa

SEQ ID NO: 421808 - DNA, 19 bp, Homo sapiens
  siRNA target sequence for ODF4 (NM_153007.3,777-795).
ctttgctacttcaaccata

SEQ ID NO: 421809 - DNA, 19 bp, Homo sapiens
  siRNA target sequence for ODF4 (NM_153007.3,782-800).
ctacttcaaccataaaagt

SEQ ID NO: 421810 - DNA, 19 bp, Homo sapiens
  siRNA target sequence for ODF4 (NM_153007.3,851-869).
cagtttcggctcagtagaa

SEQ ID NO: 421811 - DNA, 19 bp, Homo sapiens
  siRNA target sequence for ODF4 (NM_153007.3,853-871).
gtttcggctcagtagaaga

SEQ ID NO: 421812 - DNA, 19 bp, Homo sapiens
  siRNA target sequence for FLJ30277 (NM_153008.3,966-984).
cctgttgcataggcattta

SEQ ID NO: 421813 - DNA, 19 bp, Homo sapiens
  siRNA target sequence for FLJ30277 (NM_153008.3,967-985).
ctgttgcataggcatttat

SEQ ID NO: 421814 - DNA, 19 bp, Homo sapiens
  siRNA target sequence for FLJ30277 (NM_153008.3,969-987).
gttgcataggcatttattt

SEQ ID NO: 421815 - DNA, 19 bp, Homo sapiens
  siRNA target sequence for FLJ30430 (NM_153009.1,185-203).
ccctttgggctcaagagtt

SEQ ID NO: 421816 - DNA, 19 bp, Homo sapiens
  siRNA target sequence for FLJ30430 (NM_153009.1,374-392).
caacccaagcacctatctt

SEQ ID NO: 421817 - DNA, 19 bp, Homo sapiens
  siRNA target sequence for FLJ30430 (NM_153009.1,409-427).
cttctcgtctcctctagtt

SEQ ID NO: 421818 - DNA, 19 bp, Homo sapiens
  siRNA target sequence for FLJ30430 (NM_153009.1,443-461).
ggctgtcacggccgtttat

SEQ ID NO: 421819 - DNA, 19 bp, Homo sapiens
  siRNA target sequence for FLJ30430 (NM_153009.1,445-463).
ctgtcacggccgtttatca

SEQ ID NO: 421820 - DNA, 19 bp, Homo sapiens
  siRNA target sequence for FLJ30430 (NM_153009.1,534-552).
cccagactccatgaacttt

SEQ ID NO: 421821 - DNA, 19 bp, Homo sapiens
  siRNA target sequence for FLJ30507 (NM_153010.3,477-495).
gcgtcttcttcaaggtatt

SEQ ID NO: 421822 - DNA, 19 bp, Homo sapiens
  siRNA target sequence for FLJ30507 (NM_153010.3,478-496).
cgtcttcttcaaggtattt

SEQ ID NO: 421823 - DNA, 19 bp, Homo sapiens
  siRNA target sequence for FLJ30507 (NM_153010.3,551-569).
cacgtgcatagaccaattt

SEQ ID NO: 421824 - DNA, 19 bp, Homo sapiens
  siRNA target sequence for FLJ30507 (NM_153010.3,579-597).
cctgtgagccaacattatt

SEQ ID NO: 421825 - DNA, 19 bp, Homo sapiens
  siRNA target sequence for FLJ30507 (NM_153010.3,627-645).
cgttcacccaagaagtatt

SEQ ID NO: 421826 - DNA, 19 bp, Homo sapiens
  siRNA target sequence for TNFSF12 (NM_153012.1,469-487).
gatggaggttacacaactt

SEQ ID NO: 421827 - DNA, 19 bp, Homo sapiens
  siRNA target sequence for FLJ30596 (NM_153013.2,239-257).
gctgctggcagcgagtaaa

SEQ ID NO: 421828 - DNA, 19 bp, Homo sapiens
  siRNA target sequence for FLJ30596 (NM_153013.2,276-294).
ccagttataggggtaaaca

SEQ ID NO: 421829 - DNA, 19 bp, Homo sapiens
  siRNA target sequence for FLJ30596 (NM_153013.2,306-324).
cggtctgagggtcatttat

SEQ ID NO: 421830 - DNA, 19 bp, Homo sapiens
  siRNA target sequence for FLJ30596 (NM_153013.2,326-344).
cctgcccgttcgatataca

SEQ ID NO: 421831 - DNA, 19 bp, Homo sapiens
  siRNA target sequence for FLJ30596 (NM_153013.2,329-347).
gcccgttcgatatacacat

SEQ ID NO: 421832 - DNA, 19 bp, Homo sapiens
  siRNA target sequence for FLJ30596 (NM_153013.2,330-348).
cccgttcgatatacacatt

SEQ ID NO: 421833 - DNA, 19 bp, Homo sapiens
  siRNA target sequence for FLJ30596 (NM_153013.2,357-375).
gaagccttacagaagttct

SEQ ID NO: 421834 - DNA, 19 bp, Homo sapiens
  siRNA target sequence for FLJ30596 (NM_153013.2,479-497).
cttgaatcagcacaataga

SEQ ID NO: 421835 - DNA, 19 bp, Homo sapiens
  siRNA target sequence for FLJ30596 (NM_153013.2,489-507).
cacaatagagcccttaaca

SEQ ID NO: 421836 - DNA, 19 bp, Homo sapiens
  siRNA target sequence for FLJ30596 (NM_153013.2,557-575).
gccagtgagagcactaaat

SEQ ID NO: 421837 - DNA, 19 bp, Homo sapiens
  siRNA target sequence for FLJ30596 (NM_153013.2,565-583).
gagcactaaatgaagtctt

SEQ ID NO: 421838 - DNA, 19 bp, Homo sapiens
  siRNA target sequence for FLJ30596 (NM_153013.2,604-622).
ccagggcttcctactatga

SEQ ID NO: 421839 - DNA, 19 bp, Homo sapiens
  siRNA target sequence for FLJ30596 (NM_153013.2,608-626).
ggcttcctactatgagatt

SEQ ID NO: 421840 - DNA, 19 bp, Homo sapiens
  siRNA target sequence for FLJ30596 (NM_153013.2,609-627).
gcttcctactatgagattt

SEQ ID NO: 421841 - DNA, 19 bp, Homo sapiens
  siRNA target sequence for FLJ30596 (NM_153013.2,613-631).
cctactatgagatttcagt

SEQ ID NO: 421842 - DNA, 19 bp, Homo sapiens
  siRNA target sequence for FLJ30596 (NM_153013.2,614-632).
ctactatgagatttcagtt

SEQ ID NO: 421843 - DNA, 19 bp, Homo sapiens
  siRNA target sequence for FLJ30596 (NM_153013.2,679-697).
gtactggaacaggatcaaa

SEQ ID NO: 421844 - DNA, 19 bp, Homo sapiens
  siRNA target sequence for FLJ30596 (NM_153013.2,694-712).
caaaggcctggtcattcaa

SEQ ID NO: 421845 - DNA, 19 bp, Homo sapiens
  siRNA target sequence for FLJ30596 (NM_153013.2,760-778).
caaaacgacaaggaaattt

SEQ ID NO: 421846 - DNA, 19 bp, Homo sapiens
  siRNA target sequence for FLJ30596 (NM_153013.2,787-805).
cattgaacagagaattggt

SEQ ID NO: 421847 - DNA, 19 bp, Homo sapiens
  siRNA target sequence for FLJ30596 (NM_153013.2,885-903).
ccaatagcaaatagagttt

SEQ ID NO: 421848 - DNA, 19 bp, Homo sapiens
  siRNA target sequence for FLJ30596 (NM_153013.2,886-904).
caatagcaaatagagtttt

SEQ ID NO: 421849 - DNA, 19 bp, Homo sapiens
  siRNA target sequence for FLJ30596 (NM_153013.2,910-928).
gcagtcgtcagcgttgttt

SEQ ID NO: 421850 - DNA, 19 bp, Homo sapiens
  siRNA target sequence for FLJ30596 (NM_153013.2,980-998).
ggatggaggaacttctttt

SEQ ID NO: 421851 - DNA, 19 bp, Homo sapiens
  siRNA target sequence for FLJ30596 (NM_153013.2,1015-1033).
caattgcttcgatgatgat

SEQ ID NO: 421852 - DNA, 19 bp, Homo sapiens
  siRNA target sequence for FLJ30596 (NM_153013.2,1020-1038).
gcttcgatgatgatcaata

SEQ ID NO: 421853 - DNA, 19 bp, Homo sapiens
  siRNA target sequence for FLJ30596 (NM_153013.2,1054-1072).
gaactgtgcttcttgaaca

SEQ ID NO: 421854 - DNA, 19 bp, Homo sapiens
  siRNA target sequence for FLJ30634 (NM_153014.1,759-777).
cttctccctgttatccaat

SEQ ID NO: 421855 - DNA, 19 bp, Homo sapiens
  siRNA target sequence for FLJ30634 (NM_153014.1,797-815).
gggtaaggatgaagtgtta

SEQ ID NO: 421856 - DNA, 19 bp, Homo sapiens
  siRNA target sequence for FLJ30634 (NM_153014.1,798-816).
ggtaaggatgaagtgttaa

SEQ ID NO: 421857 - DNA, 19 bp, Homo sapiens
  siRNA target sequence for FLJ30668 (NM_153015.1,115-133).
cactaccttgctaagaaga

SEQ ID NO: 421858 - DNA, 19 bp, Homo sapiens
  siRNA target sequence for FLJ30668 (NM_153015.1,264-282).
cgagatggaagggtctaaa

SEQ ID NO: 421859 - DNA, 19 bp, Homo sapiens
  siRNA target sequence for FLJ30668 (NM_153015.1,267-285).
gatggaagggtctaaactt

SEQ ID NO: 421860 - DNA, 19 bp, Homo sapiens
  siRNA target sequence for FLJ30668 (NM_153015.1,270-288).
ggaagggtctaaacttagt

SEQ ID NO: 421861 - DNA, 19 bp, Homo sapiens
  siRNA target sequence for FLJ30668 (NM_153015.1,271-289).
gaagggtctaaacttagtt

SEQ ID NO: 421862 - DNA, 19 bp, Homo sapiens
  siRNA target sequence for FLJ30668 (NM_153015.1,274-292).
gggtctaaacttagttctt

SEQ ID NO: 421863 - DNA, 19 bp, Homo sapiens
  siRNA target sequence for FLJ30668 (NM_153015.1,276-294).
gtctaaacttagttcttct

SEQ ID NO: 421864 - DNA, 19 bp, Homo sapiens
  siRNA target sequence for FLJ30668 (NM_153015.1,389-407).
cggaacggaaagtctgtaa

SEQ ID NO: 421865 - DNA, 19 bp, Homo sapiens
  siRNA target sequence for FLJ30668 (NM_153015.1,414-432).
cagccaggaattagaaact

SEQ ID NO: 421866 - DNA, 19 bp, Homo sapiens
  siRNA target sequence for FLJ30668 (NM_153015.1,417-435).
ccaggaattagaaacttct

SEQ ID NO: 421867 - DNA, 19 bp, Homo sapiens
  siRNA target sequence for FLJ30668 (NM_153015.1,418-436).
caggaattagaaacttctt

SEQ ID NO: 421868 - DNA, 19 bp, Homo sapiens
  siRNA target sequence for FLJ30668 (NM_153015.1,440-458).
cctatgtggacaaaaacat

SEQ ID NO: 421869 - DNA, 19 bp, Homo sapiens
  siRNA target sequence for FLJ30668 (NM_153015.1,445-463).
gtggacaaaaacatcaact

SEQ ID NO: 421870 - DNA, 19 bp, Homo sapiens
  siRNA target sequence for FLJ30668 (NM_153015.1,516-534).
ggagcttggctgggaaaat

SEQ ID NO: 421871 - DNA, 19 bp, Homo sapiens
  siRNA target sequence for FLJ30668 (NM_153015.1,519-537).
gcttggctgggaaaatcca

SEQ ID NO: 421872 - DNA, 19 bp, Homo sapiens
  siRNA target sequence for FLJ30668 (NM_153015.1,580-598).
gaggaggatgatacaagtt

SEQ ID NO: 421873 - DNA, 19 bp, Homo sapiens
  siRNA target sequence for FLJ30668 (NM_153015.1,609-627).
gtcttcagggaagtctata

SEQ ID NO: 421874 - DNA, 19 bp, Homo sapiens
  siRNA target sequence for FLJ30668 (NM_153015.1,614-632).
cagggaagtctatagacta

SEQ ID NO: 421875 - DNA, 19 bp, Homo sapiens
  siRNA target sequence for FLJ30668 (NM_153015.1,623-641).
ctatagactatggtttcat

SEQ ID NO: 421876 - DNA, 19 bp, Homo sapiens
  siRNA target sequence for FLJ30668 (NM_153015.1,676-694).
ctcgtgatcatctcttaca

SEQ ID NO: 421877 - DNA, 19 bp, Homo sapiens
  siRNA target sequence for FLJ30668 (NM_153015.1,786-804).
cctggaccgctgtgtgatt

SEQ ID NO: 421878 - DNA, 19 bp, Homo sapiens
  siRNA target sequence for FLJ30668 (NM_153015.1,879-897).
gctctatcgtcgaaacaga

SEQ ID NO: 421879 - DNA, 19 bp, Homo sapiens
  siRNA target sequence for FLJ30668 (NM_153015.1,880-898).
ctctatcgtcgaaacagat

SEQ ID NO: 421880 - DNA, 19 bp, Homo sapiens
  siRNA target sequence for FLJ30668 (NM_153015.1,882-900).
ctatcgtcgaaacagattt

SEQ ID NO: 421881 - DNA, 19 bp, Homo sapiens
  siRNA target sequence for FLJ30668 (NM_153015.1,957-975).
cagcacgaatgaaaacact

SEQ ID NO: 421882 - DNA, 19 bp, Homo sapiens
  siRNA target sequence for FLJ30672 (NM_153016.2,368-386).
ctttgcagccttgaaacat

SEQ ID NO: 421883 - DNA, 19 bp, Homo sapiens
  siRNA target sequence for FLJ30672 (NM_153016.2,481-499).
gctttggcagcttacacat

SEQ ID NO: 421884 - DNA, 19 bp, Homo sapiens
  siRNA target sequence for FLJ31166 (NM_153022.1,705-723).
gtctgagccgccagcaaaa

SEQ ID NO: 421885 - DNA, 19 bp, Homo sapiens
  siRNA target sequence for FLJ31166 (NM_153022.1,752-770).
gaagtgaccgtcattgctt

SEQ ID NO: 421886 - DNA, 19 bp, Homo sapiens
  siRNA target sequence for FLJ31166 (NM_153022.1,757-775).
gaccgtcattgctttcgat

SEQ ID NO: 421887 - DNA, 19 bp, Homo sapiens
  siRNA target sequence for FLJ31166 (NM_153022.1,1015-1033).
gaaggagtcgactcgaata

SEQ ID NO: 421888 - DNA, 19 bp, Homo sapiens
  siRNA target sequence for FLJ31606 (NM_153025.1,16-34).
gctggcgcgaggacctttt

SEQ ID NO: 421889 - DNA, 19 bp, Homo sapiens
  siRNA target sequence for FLJ31606 (NM_153025.1,20-38).
gcgcgaggaccttttgtga

SEQ ID NO: 421890 - DNA, 19 bp, Homo sapiens
  siRNA target sequence for FLJ31606 (NM_153025.1,48-66).
gaagggatccacctattca

SEQ ID NO: 421891 - DNA, 19 bp, Homo sapiens
  siRNA target sequence for FLJ31606 (NM_153025.1,51-69).
gggatccacctattcagtt

SEQ ID NO: 421892 - DNA, 19 bp, Homo sapiens
  siRNA target sequence for FLJ31606 (NM_153025.1,57-75).
cacctattcagttccaaaa

SEQ ID NO: 421893 - DNA, 19 bp, Homo sapiens
  siRNA target sequence for FLJ31606 (NM_153025.1,250-268).
gtcgttccacagatcatca

SEQ ID NO: 421894 - DNA, 19 bp, Homo sapiens
  siRNA target sequence for FLJ31606 (NM_153025.1,383-401).
gtacagcagacgcctataa

SEQ ID NO: 421895 - DNA, 19 bp, Homo sapiens
  siRNA target sequence for PRICKLE1 (NM_153026.1,389-407).
gcagatccagctctatttt

SEQ ID NO: 421896 - DNA, 19 bp, Homo sapiens
  siRNA target sequence for PRICKLE1 (NM_153026.1,392-410).
gatccagctctattttgct

SEQ ID NO: 421897 - DNA, 19 bp, Homo sapiens
  siRNA target sequence for PRICKLE1 (NM_153026.1,398-416).
gctctattttgcttgctta

SEQ ID NO: 421898 - DNA, 19 bp, Homo sapiens
  siRNA target sequence for PRICKLE1 (NM_153026.1,409-427).
cttgcttaccagaggaaaa

SEQ ID NO: 421899 - DNA, 19 bp, Homo sapiens
  siRNA target sequence for PRICKLE1 (NM_153026.1,412-430).
gcttaccagaggaaaaagt

SEQ ID NO: 421900 - DNA, 19 bp, Homo sapiens
  siRNA target sequence for PRICKLE1 (NM_153026.1,422-440).
ggaaaaagttccttacgtt

SEQ ID NO: 421901 - DNA, 19 bp, Homo sapiens
  siRNA target sequence for PRICKLE1 (NM_153026.1,423-441).
gaaaaagttccttacgtta

SEQ ID NO: 421902 - DNA, 19 bp, Homo sapiens
  siRNA target sequence for PRICKLE1 (NM_153026.1,463-481).
ggattaaacagcttttgta

SEQ ID NO: 421903 - DNA, 19 bp, Homo sapiens
  siRNA target sequence for PRICKLE1 (NM_153026.1,510-528).
cggtattgccagtctttga

SEQ ID NO: 421904 - DNA, 19 bp, Homo sapiens
  siRNA target sequence for PRICKLE1 (NM_153026.1,512-530).
gtattgccagtctttgagt

SEQ ID NO: 421905 - DNA, 19 bp, Homo sapiens
  siRNA target sequence for PRICKLE1 (NM_153026.1,710-728).
ctggcacccatcctgtttt

SEQ ID NO: 421906 - DNA, 19 bp, Homo sapiens
  siRNA target sequence for PRICKLE1 (NM_153026.1,755-773).
ggtcgacctcatctatttt

SEQ ID NO: 421907 - DNA, 19 bp, Homo sapiens
  siRNA target sequence for PRICKLE1 (NM_153026.1,756-774).
gtcgacctcatctattttt

SEQ ID NO: 421908 - DNA, 19 bp, Homo sapiens
  siRNA target sequence for PRICKLE1 (NM_153026.1,758-776).
cgacctcatctatttttat

SEQ ID NO: 421909 - DNA, 19 bp, Homo sapiens
  siRNA target sequence for PRICKLE1 (NM_153026.1,835-853).
cagcatgtgacgagataat

SEQ ID NO: 421910 - DNA, 19 bp, Homo sapiens
  siRNA target sequence for PRICKLE1 (NM_153026.1,837-855).
gcatgtgacgagataattt

SEQ ID NO: 421911 - DNA, 19 bp, Homo sapiens
  siRNA target sequence for PRICKLE1 (NM_153026.1,838-856).
catgtgacgagataatttt

SEQ ID NO: 421912 - DNA, 19 bp, Homo sapiens
  siRNA target sequence for PRICKLE1 (NM_153026.1,883-901).
gtcgccattggcacatgaa

SEQ ID NO: 421913 - DNA, 19 bp, Homo sapiens
  siRNA target sequence for PRICKLE1 (NM_153026.1,936-954).
ggaggacagaggtatatca

SEQ ID NO: 421914 - DNA, 19 bp, Homo sapiens
  siRNA target sequence for PRICKLE1 (NM_153026.1,937-955).
gaggacagaggtatatcat

SEQ ID NO: 421915 - DNA, 19 bp, Homo sapiens
  siRNA target sequence for PRICKLE1 (NM_153026.1,939-957).
ggacagaggtatatcatga

SEQ ID NO: 421916 - DNA, 19 bp, Homo sapiens
  siRNA target sequence for PRICKLE1 (NM_153026.1,940-958).
gacagaggtatatcatgaa

SEQ ID NO: 421917 - DNA, 19 bp, Homo sapiens
  siRNA target sequence for PRICKLE1 (NM_153026.1,1014-1032).
gaaacctgtggggaacata

SEQ ID NO: 421918 - DNA, 19 bp, Homo sapiens
  siRNA target sequence for PRICKLE1 (NM_153026.1,1191-1209).
gacgtccatgcctctgatt

SEQ ID NO: 421919 - DNA, 19 bp, Homo sapiens
  siRNA target sequence for PRICKLE1 (NM_153026.1,1193-1211).
cgtccatgcctctgattct

SEQ ID NO: 421920 - DNA, 19 bp, Homo sapiens
  siRNA target sequence for PRICKLE1 (NM_153026.1,1318-1336).
cgcctgctctgaactacaa

SEQ ID NO: 421921 - DNA, 19 bp, Homo sapiens
  siRNA target sequence for PRICKLE1 (NM_153026.1,1369-1387).
ccctttctcgaaaattgga

SEQ ID NO: 421922 - DNA, 19 bp, Homo sapiens
  siRNA target sequence for PRICKLE1 (NM_153026.1,1375-1393).
ctcgaaaattggatgatct

SEQ ID NO: 421923 - DNA, 19 bp, Homo sapiens
  siRNA target sequence for PRICKLE1 (NM_153026.1,1483-1501).
gggctgatcatgaagatta

SEQ ID NO: 421924 - DNA, 19 bp, Homo sapiens
  siRNA target sequence for PRICKLE1 (NM_153026.1,1484-1502).
ggctgatcatgaagattat

SEQ ID NO: 421925 - DNA, 19 bp, Homo sapiens
  siRNA target sequence for PRICKLE1 (NM_153026.1,1507-1525).
cgcagctcctcctcaagtt

SEQ ID NO: 421926 - DNA, 19 bp, Homo sapiens
  siRNA target sequence for PRICKLE1 (NM_153026.1,1551-1569).
cagcccaatgagatggata

SEQ ID NO: 421927 - DNA, 19 bp, Homo sapiens
  siRNA target sequence for PRICKLE1 (NM_153026.1,1556-1574).
caatgagatggatattcga

SEQ ID NO: 421928 - DNA, 19 bp, Homo sapiens
  siRNA target sequence for PRICKLE1 (NM_153026.1,1575-1593).
gccagtgagcactggatat

SEQ ID NO: 421929 - DNA, 19 bp, Homo sapiens
  siRNA target sequence for PRICKLE1 (NM_153026.1,1577-1595).
cagtgagcactggatatct

SEQ ID NO: 421930 - DNA, 19 bp, Homo sapiens
  siRNA target sequence for PRICKLE1 (NM_153026.1,1579-1597).
gtgagcactggatatctga

SEQ ID NO: 421931 - DNA, 19 bp, Homo sapiens
  siRNA target sequence for PRICKLE1 (NM_153026.1,1581-1599).
gagcactggatatctgata

SEQ ID NO: 421932 - DNA, 19 bp, Homo sapiens
  siRNA target sequence for PRICKLE1 (NM_153026.1,1596-1614).
gataacatggttaaaagta

SEQ ID NO: 421933 - DNA, 19 bp, Homo sapiens
  siRNA target sequence for PRICKLE1 (NM_153026.1,1616-1634).
gaccgagttaaagcaaaat

SEQ ID NO: 421934 - DNA, 19 bp, Homo sapiens
  siRNA target sequence for PRICKLE1 (NM_153026.1,1618-1636).
ccgagttaaagcaaaataa

SEQ ID NO: 421935 - DNA, 19 bp, Homo sapiens
  siRNA target sequence for PRICKLE1 (NM_153026.1,1640-1658).
gagccttgcaagtaaaaaa

SEQ ID NO: 421936 - DNA, 19 bp, Homo sapiens
  siRNA target sequence for PRICKLE1 (NM_153026.1,1676-1694).
ctgggcacagtcacaagat

SEQ ID NO: 421937 - DNA, 19 bp, Homo sapiens
  siRNA target sequence for PRICKLE1 (NM_153026.1,1741-1759).
gtagaaggcttcaggaatt

SEQ ID NO: 421938 - DNA, 19 bp, Homo sapiens
  siRNA target sequence for PRICKLE1 (NM_153026.1,1780-1798).
cagggtataatcatgatga

SEQ ID NO: 421939 - DNA, 19 bp, Homo sapiens
  siRNA target sequence for PRICKLE1 (NM_153026.1,1782-1800).
gggtataatcatgatgaaa

SEQ ID NO: 421940 - DNA, 19 bp, Homo sapiens
  siRNA target sequence for PRICKLE1 (NM_153026.1,1784-1802).
gtataatcatgatgaaaca

SEQ ID NO: 421941 - DNA, 19 bp, Homo sapiens
  siRNA target sequence for PRICKLE1 (NM_153026.1,1857-1875).
gttcgggattcgatggatt

SEQ ID NO: 421942 - DNA, 19 bp, Homo sapiens
  siRNA target sequence for PRICKLE1 (NM_153026.1,1876-1894).
ctttggcattgtccaatat

SEQ ID NO: 421943 - DNA, 19 bp, Homo sapiens
  siRNA target sequence for PRICKLE1 (NM_153026.1,1880-1898).
ggcattgtccaatatcaca

SEQ ID NO: 421944 - DNA, 19 bp, Homo sapiens
  siRNA target sequence for PRICKLE1 (NM_153026.1,1903-1921).
cttcggtggatggagaaaa

SEQ ID NO: 421945 - DNA, 19 bp, Homo sapiens
  siRNA target sequence for PRICKLE1 (NM_153026.1,1926-1944).
ccaaggccatcattgtatt

SEQ ID NO: 421946 - DNA, 19 bp, Homo sapiens
  siRNA target sequence for PRICKLE1 (NM_153026.1,1930-1948).
ggccatcattgtattctct

SEQ ID NO: 421947 - DNA, 19 bp, Homo sapiens
  siRNA target sequence for PRICKLE1 (NM_153026.1,2039-2057).
gtccttaaagagtctaagt

SEQ ID NO: 421948 - DNA, 19 bp, Homo sapiens
  siRNA target sequence for PRICKLE1 (NM_153026.1,2042-2060).
cttaaagagtctaagttca

SEQ ID NO: 421949 - DNA, 19 bp, Homo sapiens
  siRNA target sequence for PRICKLE1 (NM_153026.1,2061-2079).
gagttgtgtccagagaaaa

SEQ ID NO: 421950 - DNA, 19 bp, Homo sapiens
  siRNA target sequence for PRICKLE1 (NM_153026.1,2140-2158).
gaccccagcaggtcaagtt

SEQ ID NO: 421951 - DNA, 19 bp, Homo sapiens
  siRNA target sequence for PRICKLE1 (NM_153026.1,2171-2189).
cattgacaatgggaactat

SEQ ID NO: 421952 - DNA, 19 bp, Homo sapiens
  siRNA target sequence for PRICKLE1 (NM_153026.1,2177-2195).
caatgggaactatgacatt

SEQ ID NO: 421953 - DNA, 19 bp, Homo sapiens
  siRNA target sequence for PRICKLE1 (NM_153026.1,2181-2199).
gggaactatgacattgaaa

SEQ ID NO: 421954 - DNA, 19 bp, Homo sapiens
  siRNA target sequence for PRICKLE1 (NM_153026.1,2182-2200).
ggaactatgacattgaaat

SEQ ID NO: 421955 - DNA, 19 bp, Homo sapiens
  siRNA target sequence for PRICKLE1 (NM_153026.1,2227-2245).
ctcggagacgcgtctacaa

SEQ ID NO: 421956 - DNA, 19 bp, Homo sapiens
  siRNA target sequence for PRICKLE1 (NM_153026.1,2229-2247).
cggagacgcgtctacaatt

SEQ ID NO: 421957 - DNA, 19 bp, Homo sapiens
  siRNA target sequence for PRICKLE1 (NM_153026.1,2230-2248).
ggagacgcgtctacaattt

SEQ ID NO: 421958 - DNA, 19 bp, Homo sapiens
  siRNA target sequence for PRICKLE1 (NM_153026.1,2231-2249).
gagacgcgtctacaatttt

SEQ ID NO: 421959 - DNA, 19 bp, Homo sapiens
  siRNA target sequence for PRICKLE1 (NM_153026.1,2233-2251).
gacgcgtctacaattttga

SEQ ID NO: 421960 - DNA, 19 bp, Homo sapiens
  siRNA target sequence for PRICKLE1 (NM_153026.1,2236-2254).
gcgtctacaattttgaaga

SEQ ID NO: 421961 - DNA, 19 bp, Homo sapiens
  siRNA target sequence for PRICKLE1 (NM_153026.1,2308-2326).
ccgacaatgccctgaatct

SEQ ID NO: 421962 - DNA, 19 bp, Homo sapiens
  siRNA target sequence for PRICKLE1 (NM_153026.1,2367-2385).
ctgtacacccccgataact

SEQ ID NO: 421963 - DNA, 19 bp, Homo sapiens
  siRNA target sequence for PRICKLE1 (NM_153026.1,2369-2387).
gtacacccccgataactat

SEQ ID NO: 421964 - DNA, 19 bp, Homo sapiens
  siRNA target sequence for PRICKLE1 (NM_153026.1,2374-2392).
cccccgataactatgagaa

SEQ ID NO: 421965 - DNA, 19 bp, Homo sapiens
  siRNA target sequence for PRICKLE1 (NM_153026.1,2375-2393).
ccccgataactatgagaaa

SEQ ID NO: 421966 - DNA, 19 bp, Homo sapiens
  siRNA target sequence for PRICKLE1 (NM_153026.1,2376-2394).
cccgataactatgagaaat

SEQ ID NO: 421967 - DNA, 19 bp, Homo sapiens
  siRNA target sequence for PRICKLE1 (NM_153026.1,2627-2645).
gagatttgcctactataca

SEQ ID NO: 421968 - DNA, 19 bp, Homo sapiens
  siRNA target sequence for PRICKLE1 (NM_153026.1,2691-2709).
ggtcagaggacaacaaaat

SEQ ID NO: 421969 - DNA, 19 bp, Homo sapiens
  siRNA target sequence for PRICKLE1 (NM_153026.1,2729-2747).
caagggcaaaaattgtatt

SEQ ID NO: 421970 - DNA, 19 bp, Homo sapiens
  siRNA target sequence for FLJ31659 (NM_153027.1,306-324).
ctgggagaagcgaatcgtt

SEQ ID NO: 421971 - DNA, 19 bp, Homo sapiens
  siRNA target sequence for FLJ31659 (NM_153027.1,389-407).
ctgtcacgccaccgaaatt

SEQ ID NO: 421972 - DNA, 19 bp, Homo sapiens
  siRNA target sequence for FLJ31821 (NM_153029.2,2941-2959).
gatccacggaccacatgtt

SEQ ID NO: 421973 - DNA, 19 bp, Homo sapiens
  siRNA target sequence for FLJ31821 (NM_153029.2,2947-2965).
cggaccacatgttgagaaa

SEQ ID NO: 421974 - DNA, 19 bp, Homo sapiens
  siRNA target sequence for FLJ31821 (NM_153029.2,3288-3306).
cttccagtaacatacttct

SEQ ID NO: 421975 - DNA, 19 bp, Homo sapiens
  siRNA target sequence for FLJ32063 (NM_153031.1,705-723).
ctatacaccaacagcttat

SEQ ID NO: 421976 - DNA, 19 bp, Homo sapiens
  siRNA target sequence for FLJ32063 (NM_153031.1,744-762).
ggaggattgggttaagctt

SEQ ID NO: 421977 - DNA, 19 bp, Homo sapiens
  siRNA target sequence for FLJ32063 (NM_153031.1,778-796).
ccaggtaatgcgcttcatt

SEQ ID NO: 421978 - DNA, 19 bp, Homo sapiens
  siRNA target sequence for FLJ32063 (NM_153031.1,779-797).
caggtaatgcgcttcatta

SEQ ID NO: 421979 - DNA, 19 bp, Homo sapiens
  siRNA target sequence for FLJ32063 (NM_153031.1,781-799).
ggtaatgcgcttcattatt

SEQ ID NO: 421980 - DNA, 19 bp, Homo sapiens
  siRNA target sequence for FLJ32063 (NM_153031.1,966-984).
cccgctcacgtgtaagcaa

SEQ ID NO: 421981 - DNA, 19 bp, Homo sapiens
  siRNA target sequence for FLJ32063 (NM_153031.1,981-999).
gcaacctcccactttgaaa

SEQ ID NO: 421982 - DNA, 19 bp, Homo sapiens
  siRNA target sequence for FLJ32063 (NM_153031.1,986-1004).
ctcccactttgaaactaat

SEQ ID NO: 421983 - DNA, 19 bp, Homo sapiens
  siRNA target sequence for FLJ32063 (NM_153031.1,1114-1132).
ctcaccttagtccttgatt

SEQ ID NO: 421984 - DNA, 19 bp, Homo sapiens
  siRNA target sequence for FLJ32063 (NM_153031.1,1119-1137).
cttagtccttgatttcgaa

SEQ ID NO: 421985 - DNA, 19 bp, Homo sapiens
  siRNA target sequence for FLJ32065 (NM_153032.1,350-368).
ccggttggcccgagatgtt

SEQ ID NO: 421986 - DNA, 19 bp, Homo sapiens
  siRNA target sequence for FLJ32065 (NM_153032.1,445-463).
cccgcagcttccctagatt

SEQ ID NO: 421987 - DNA, 19 bp, Homo sapiens
  siRNA target sequence for ZNF488 (NM_153034.2,243-261).
cccatcggctgaaaacaga

SEQ ID NO: 421988 - DNA, 19 bp, Homo sapiens
  siRNA target sequence for ZNF488 (NM_153034.2,244-262).
ccatcggctgaaaacagat

SEQ ID NO: 421989 - DNA, 19 bp, Homo sapiens
  siRNA target sequence for ZNF488 (NM_153034.2,557-575).
cacagctgacccagaacat

SEQ ID NO: 421990 - DNA, 19 bp, Homo sapiens
  siRNA target sequence for ZNF488 (NM_153034.2,637-655).
caaagaagcgcctttagca

SEQ ID NO: 421991 - DNA, 19 bp, Homo sapiens
  siRNA target sequence for ZNF488 (NM_153034.2,1022-1040).
cgtccgacctggtctttca

SEQ ID NO: 421992 - DNA, 19 bp, Homo sapiens
  siRNA target sequence for ZNF488 (NM_153034.2,1025-1043).
ccgacctggtctttcacat

SEQ ID NO: 421993 - DNA, 19 bp, Homo sapiens
  siRNA target sequence for FLJ32112 (NM_153035.1,275-293).
caagcaggccacgattgaa

SEQ ID NO: 421994 - DNA, 19 bp, Homo sapiens
  siRNA target sequence for FLJ32112 (NM_153035.1,278-296).
gcaggccacgattgaatct

SEQ ID NO: 421995 - DNA, 19 bp, Homo sapiens
  siRNA target sequence for FLJ32112 (NM_153035.1,304-322).
gagttgtggttgtagaaga

SEQ ID NO: 421996 - DNA, 19 bp, Homo sapiens
  siRNA target sequence for FLJ32112 (NM_153035.1,309-327).
gtggttgtagaagacataa

SEQ ID NO: 421997 - DNA, 19 bp, Homo sapiens
  siRNA target sequence for FLJ32112 (NM_153035.1,311-329).
ggttgtagaagacataaaa

SEQ ID NO: 421998 - DNA, 19 bp, Homo sapiens
  siRNA target sequence for FLJ32112 (NM_153035.1,378-396).
gttgaagccttacaagaat

SEQ ID NO: 421999 - DNA, 19 bp, Homo sapiens
  siRNA target sequence for FLJ32112 (NM_153035.1,412-430).
cctccagggaagtgttaaa

SEQ ID NO: 422000 - DNA, 19 bp, Homo sapiens
  siRNA target sequence for FLJ32112 (NM_153035.1,419-437).
ggaagtgttaaaatcaaca

SEQ ID NO: 422001 - DNA, 19 bp, Homo sapiens
  siRNA target sequence for FLJ32112 (NM_153035.1,444-462).
ggtcacactgtgaacaaga

SEQ ID NO: 422002 - DNA, 19 bp, Homo sapiens
  siRNA target sequence for FLJ32112 (NM_153035.1,445-463).
gtcacactgtgaacaagat

SEQ ID NO: 422003 - DNA, 19 bp, Homo sapiens
  siRNA target sequence for FLJ32112 (NM_153035.1,464-482).
gcgtaaacactcagattca

SEQ ID NO: 422004 - DNA, 19 bp, Homo sapiens
  siRNA target sequence for FLJ32112 (NM_153035.1,493-511).
ctcttgccagagaagttta

SEQ ID NO: 422005 - DNA, 19 bp, Homo sapiens
  siRNA target sequence for FLJ32112 (NM_153035.1,552-570).
ccttctattgaagttagaa

SEQ ID NO: 422006 - DNA, 19 bp, Homo sapiens
  siRNA target sequence for FLJ32112 (NM_153035.1,583-601).
ccgagtcgttgaggaaaaa

SEQ ID NO: 422007 - DNA, 19 bp, Homo sapiens
  siRNA target sequence for FLJ32112 (NM_153035.1,584-602).
cgagtcgttgaggaaaaat

SEQ ID NO: 422008 - DNA, 19 bp, Homo sapiens
  siRNA target sequence for FLJ32112 (NM_153035.1,587-605).
gtcgttgaggaaaaatgct

SEQ ID NO: 422009 - DNA, 19 bp, Homo sapiens
  siRNA target sequence for FLJ32112 (NM_153035.1,645-663).
cacctactggttgaaaata

SEQ ID NO: 422010 - DNA, 19 bp, Homo sapiens
  siRNA target sequence for FLJ32112 (NM_153035.1,729-747).
gccctggtcttcacattaa

SEQ ID NO: 422011 - DNA, 19 bp, Homo sapiens
  siRNA target sequence for FLJ32112 (NM_153035.1,791-809).
gccagtcggcacgtttgta

SEQ ID NO: 422012 - DNA, 19 bp, Homo sapiens
  siRNA target sequence for C6orf78 (NM_153036.1,237-255).
gatcaccttggcaaccatt

SEQ ID NO: 422013 - DNA, 19 bp, Homo sapiens
  siRNA target sequence for C6orf78 (NM_153036.1,298-316).
ctcacctctctgcaacatt

SEQ ID NO: 422014 - DNA, 19 bp, Homo sapiens
  siRNA target sequence for C6orf78 (NM_153036.1,302-320).
cctctctgcaacattgcta

SEQ ID NO: 422015 - DNA, 19 bp, Homo sapiens
  siRNA target sequence for C6orf78 (NM_153036.1,397-415).
catcgcataaagaagctat

SEQ ID NO: 422016 - DNA, 19 bp, Homo sapiens
  siRNA target sequence for C6orf78 (NM_153036.1,431-449).
ggagtgaagacgtcaaaca

SEQ ID NO: 422017 - DNA, 19 bp, Homo sapiens
  siRNA target sequence for C6orf78 (NM_153036.1,450-468).
catccgcattccttcttgt

SEQ ID NO: 422018 - DNA, 19 bp, Homo sapiens
  siRNA target sequence for C6orf78 (NM_153036.1,471-489).
ggactggaaagatatttca

SEQ ID NO: 422019 - DNA, 19 bp, Homo sapiens
  siRNA target sequence for C6orf78 (NM_153036.1,517-535).
gacttgcaaggtcactata

SEQ ID NO: 422020 - DNA, 19 bp, Homo sapiens
  siRNA target sequence for FLJ32447 (NM_153038.1,463-481).
caagaggctgcgaatgagt

SEQ ID NO: 422021 - DNA, 19 bp, Homo sapiens
  siRNA target sequence for FLJ32447 (NM_153038.1,488-506).
cccgcgttcctcgagtttt

SEQ ID NO: 422022 - DNA, 19 bp, Homo sapiens
  siRNA target sequence for FLJ32447 (NM_153038.1,489-507).
ccgcgttcctcgagtttta

SEQ ID NO: 422023 - DNA, 19 bp, Homo sapiens
  siRNA target sequence for FLJ32447 (NM_153038.1,490-508).
cgcgttcctcgagttttaa

SEQ ID NO: 422024 - DNA, 19 bp, Homo sapiens
  siRNA target sequence for FLJ32447 (NM_153038.1,491-509).
gcgttcctcgagttttaaa

SEQ ID NO: 422025 - DNA, 19 bp, Homo sapiens
  siRNA target sequence for FLJ32447 (NM_153038.1,492-510).
cgttcctcgagttttaaaa

SEQ ID NO: 422026 - DNA, 19 bp, Homo sapiens
  siRNA target sequence for FLJ32447 (NM_153038.1,528-546).
gactgcacagccaactaaa

SEQ ID NO: 422027 - DNA, 19 bp, Homo sapiens
  siRNA target sequence for FLJ32447 (NM_153038.1,537-555).
gccaactaaacggagtaaa

SEQ ID NO: 422028 - DNA, 19 bp, Homo sapiens
  siRNA target sequence for FLJ32447 (NM_153038.1,599-617).
cgcgatctggccagttctt

SEQ ID NO: 422029 - DNA, 19 bp, Homo sapiens
  siRNA target sequence for FLJ32447 (NM_153038.1,637-655).
ctgcagagaggcgttttga

SEQ ID NO: 422030 - DNA, 19 bp, Homo sapiens
  siRNA target sequence for FLJ32447 (NM_153038.1,770-788).
cgacccctcactctttcaa

SEQ ID NO: 422031 - DNA, 19 bp, Homo sapiens
  siRNA target sequence for FLJ32447 (NM_153038.1,771-789).
gacccctcactctttcaaa

SEQ ID NO: 422032 - DNA, 19 bp, Homo sapiens
  siRNA target sequence for FLJ32831 (NM_153040.1,539-557).
ggaaggggtcccacctaat

SEQ ID NO: 422033 - DNA, 19 bp, Homo sapiens
  siRNA target sequence for FLJ32831 (NM_153040.1,540-558).
gaaggggtcccacctaata

SEQ ID NO: 422034 - DNA, 19 bp, Homo sapiens
  siRNA target sequence for FLJ32831 (NM_153040.1,543-561).
ggggtcccacctaatagga

SEQ ID NO: 422035 - DNA, 19 bp, Homo sapiens
  siRNA target sequence for FLJ32831 (NM_153040.1,544-562).
gggtcccacctaataggaa

SEQ ID NO: 422036 - DNA, 19 bp, Homo sapiens
  siRNA target sequence for FLJ32831 (NM_153040.1,549-567).
ccacctaataggaagaaca

SEQ ID NO: 422037 - DNA, 19 bp, Homo sapiens
  siRNA target sequence for FLJ32831 (NM_153040.1,666-684).
ggggtgttgcacccatttt

SEQ ID NO: 422038 - DNA, 19 bp, Homo sapiens
  siRNA target sequence for FLJ32831 (NM_153040.1,739-757).
gctcacgagtggatggttt

SEQ ID NO: 422039 - DNA, 19 bp, Homo sapiens
  siRNA target sequence for FLJ32831 (NM_153040.1,742-760).
cacgagtggatggtttgat

SEQ ID NO: 422040 - DNA, 19 bp, Homo sapiens
  siRNA target sequence for FLJ32831 (NM_153040.1,826-844).
ccttcaaccatcttgtcat

SEQ ID NO: 422041 - DNA, 19 bp, Homo sapiens
  siRNA target sequence for FLJ32831 (NM_153040.1,830-848).
caaccatcttgtcataaga

SEQ ID NO: 422042 - DNA, 19 bp, Homo sapiens
  siRNA target sequence for FLJ32831 (NM_153040.1,962-980).
ggactgggaacatttaata

SEQ ID NO: 422043 - DNA, 19 bp, Homo sapiens
  siRNA target sequence for FLJ32955 (NM_153041.1,177-195).
gaatctcttgctgattcat

SEQ ID NO: 422044 - DNA, 19 bp, Homo sapiens
  siRNA target sequence for FLJ32955 (NM_153041.1,213-231).
ctcagtcagatgtttagct

SEQ ID NO: 422045 - DNA, 19 bp, Homo sapiens
  siRNA target sequence for FLJ32955 (NM_153041.1,239-257).
gtcctcttatccaagcttt

SEQ ID NO: 422046 - DNA, 19 bp, Homo sapiens
  siRNA target sequence for FLJ32955 (NM_153041.1,244-262).
cttatccaagcttttccaa

SEQ ID NO: 422047 - DNA, 19 bp, Homo sapiens
  siRNA target sequence for FLJ32955 (NM_153041.1,320-338).
gtctcctgacttcttttta

SEQ ID NO: 422048 - DNA, 19 bp, Homo sapiens
  siRNA target sequence for FLJ32955 (NM_153041.1,342-360).
gttgcatactatatataca

SEQ ID NO: 422049 - DNA, 19 bp, Homo sapiens
  siRNA target sequence for FLJ32955 (NM_153041.1,392-410).
ccctagtggacacagaata

SEQ ID NO: 422050 - DNA, 19 bp, Homo sapiens
  siRNA target sequence for FLJ32955 (NM_153041.1,418-436).
gcttcttagcatgttactt

SEQ ID NO: 422051 - DNA, 19 bp, Homo sapiens
  siRNA target sequence for FLJ32955 (NM_153041.1,486-504).
gctcccagttttcaatatt

SEQ ID NO: 422052 - DNA, 19 bp, Homo sapiens
  siRNA target sequence for FLJ32955 (NM_153041.1,498-516).
caatattctcctaaatgct

SEQ ID NO: 422053 - DNA, 19 bp, Homo sapiens
  siRNA target sequence for FLJ32955 (NM_153041.1,515-533).
ctgtggaacctctgtctat

SEQ ID NO: 422054 - DNA, 19 bp, Homo sapiens
  siRNA target sequence for FLJ35801 (NM_153044.1,777-795).
ggcctctcctagagatgta

SEQ ID NO: 422055 - DNA, 19 bp, Homo sapiens
  siRNA target sequence for FLJ35801 (NM_153044.1,779-797).
cctctcctagagatgtagt

SEQ ID NO: 422056 - DNA, 19 bp, Homo sapiens
  siRNA target sequence for FLJ35801 (NM_153044.1,973-991).
cacaggttagtggtacaaa

SEQ ID NO: 422057 - DNA, 19 bp, Homo sapiens
  siRNA target sequence for FLJ35801 (NM_153044.1,977-995).
ggttagtggtacaaagtca

SEQ ID NO: 422058 - DNA, 19 bp, Homo sapiens
  siRNA target sequence for FLJ35801 (NM_153044.1,1101-1119).
gcaacgcttgcctttgtct

SEQ ID NO: 422059 - DNA, 19 bp, Homo sapiens
  siRNA target sequence for LOC253559 (NM_153184.1,686-704).
gaatgtaaccgttgttgaa

SEQ ID NO: 422060 - DNA, 19 bp, Homo sapiens
  siRNA target sequence for LOC253559 (NM_153184.1,722-740).
gacctgcagggttgatcaa

SEQ ID NO: 422061 - DNA, 19 bp, Homo sapiens
  siRNA target sequence for LOC253559 (NM_153184.1,725-743).
ctgcagggttgatcaaaat

SEQ ID NO: 422062 - DNA, 19 bp, Homo sapiens
  siRNA target sequence for LOC253559 (NM_153184.1,727-745).
gcagggttgatcaaaatga

SEQ ID NO: 422063 - DNA, 19 bp, Homo sapiens
  siRNA target sequence for LOC253559 (NM_153184.1,728-746).
cagggttgatcaaaatgat

SEQ ID NO: 422064 - DNA, 19 bp, Homo sapiens
  siRNA target sequence for LOC253559 (NM_153184.1,730-748).
gggttgatcaaaatgataa

SEQ ID NO: 422065 - DNA, 19 bp, Homo sapiens
  siRNA target sequence for LOC253559 (NM_153184.1,837-855).
cgcgcttcctggcatgaat

SEQ ID NO: 422066 - DNA, 19 bp, Homo sapiens
  siRNA target sequence for LOC253559 (NM_153184.1,838-856).
gcgcttcctggcatgaatt

SEQ ID NO: 422067 - DNA, 19 bp, Homo sapiens
  siRNA target sequence for LOC253559 (NM_153184.1,840-858).
gcttcctggcatgaattga

SEQ ID NO: 422068 - DNA, 19 bp, Homo sapiens
  siRNA target sequence for LOC253559 (NM_153184.1,844-862).
cctggcatgaattgagtat

SEQ ID NO: 422069 - DNA, 19 bp, Homo sapiens
  siRNA target sequence for LOC253559 (NM_153184.1,848-866).
gcatgaattgagtattagt

SEQ ID NO: 422070 - DNA, 19 bp, Homo sapiens
  siRNA target sequence for LOC253559 (NM_153184.1,894-912).
ggacagtacacctgttctt

SEQ ID NO: 422071 - DNA, 19 bp, Homo sapiens
  siRNA target sequence for LOC253559 (NM_153184.1,897-915).
cagtacacctgttctttat

SEQ ID NO: 422072 - DNA, 19 bp, Homo sapiens
  siRNA target sequence for LOC253559 (NM_153184.1,978-996).
cagattagtggattctcat

SEQ ID NO: 422073 - DNA, 19 bp, Homo sapiens
  siRNA target sequence for LOC253559 (NM_153184.1,988-1006).
gattctcatcaccagttat

SEQ ID NO: 422074 - DNA, 19 bp, Homo sapiens
  siRNA target sequence for LOC253559 (NM_153184.1,1019-1037).
gatgcagctgacttgcaaa

SEQ ID NO: 422075 - DNA, 19 bp, Homo sapiens
  siRNA target sequence for LOC253559 (NM_153184.1,1025-1043).
gctgacttgcaaaacatct

SEQ ID NO: 422076 - DNA, 19 bp, Homo sapiens
  siRNA target sequence for LOC253559 (NM_153184.1,1048-1066).
gtaaacctgcagctgatat

SEQ ID NO: 422077 - DNA, 19 bp, Homo sapiens
  siRNA target sequence for LOC253559 (NM_153184.1,1122-1140).
gatgcaaatcgcaagacat

SEQ ID NO: 422078 - DNA, 19 bp, Homo sapiens
  siRNA target sequence for LOC253559 (NM_153184.1,1125-1143).
gcaaatcgcaagacattca

SEQ ID NO: 422079 - DNA, 19 bp, Homo sapiens
  siRNA target sequence for LOC253559 (NM_153184.1,1381-1399).
caaaggatggcggagaatt

SEQ ID NO: 422080 - DNA, 19 bp, Homo sapiens
  siRNA target sequence for LOC253559 (NM_153184.1,1426-1444).
gtggtagggagctaaacat

SEQ ID NO: 422081 - DNA, 19 bp, Homo sapiens
  siRNA target sequence for LOC253559 (NM_153184.1,1429-1447).
gtagggagctaaacattct

SEQ ID NO: 422082 - DNA, 19 bp, Homo sapiens
  siRNA target sequence for LOC253559 (NM_153184.1,1463-1481).
ggataatggtacatatcga

SEQ ID NO: 422083 - DNA, 19 bp, Homo sapiens
  siRNA target sequence for LOC253559 (NM_153184.1,1505-1523).
ccaaagcagtgcggaatat

SEQ ID NO: 422084 - DNA, 19 bp, Homo sapiens
  siRNA target sequence for LOC253559 (NM_153184.1,1513-1531).
gtgcggaatatgttctcat

SEQ ID NO: 422085 - DNA, 19 bp, Homo sapiens
  siRNA target sequence for LOC253559 (NM_153184.1,1516-1534).
cggaatatgttctcattgt

SEQ ID NO: 422086 - DNA, 19 bp, Homo sapiens
  siRNA target sequence for LOC253559 (NM_153184.1,1649-1667).
cagcatcagagatcctaat

SEQ ID NO: 422087 - DNA, 19 bp, Homo sapiens
  siRNA target sequence for LOC253559 (NM_153184.1,1652-1670).
catcagagatcctaatgct

SEQ ID NO: 422088 - DNA, 19 bp, Homo sapiens
  siRNA target sequence for LOC253559 (NM_153184.1,1699-1717).
ctctcataggaggaatagt

SEQ ID NO: 422089 - DNA, 19 bp, Homo sapiens
  siRNA target sequence for LOC253559 (NM_153184.1,1738-1756).
cgctgtgttctatctttct

SEQ ID NO: 422090 - DNA, 19 bp, Homo sapiens
  siRNA target sequence for LOC253559 (NM_153184.1,1751-1769).
ctttctgcttggtcgatat

SEQ ID NO: 422091 - DNA, 19 bp, Homo sapiens
  siRNA target sequence for LOC253559 (NM_153184.1,1778-1796).
gcataaaggaacgtattta

SEQ ID NO: 422092 - DNA, 19 bp, Homo sapiens
  siRNA target sequence for LOC253559 (NM_153184.1,1779-1797).
cataaaggaacgtatttaa

SEQ ID NO: 422093 - DNA, 19 bp, Homo sapiens
  siRNA target sequence for C21orf74 (NM_153203.1,227-245).
cctgaagcttgttttagtt

SEQ ID NO: 422094 - DNA, 19 bp, Homo sapiens
  siRNA target sequence for C21orf90 (NM_153204.1,602-620).
ggctcctgtgtgctttgaa

SEQ ID NO: 422095 - DNA, 19 bp, Homo sapiens
  siRNA target sequence for C21orf90 (NM_153204.1,609-627).
gtgtgctttgaagttttca

SEQ ID NO: 422096 - DNA, 19 bp, Homo sapiens
  siRNA target sequence for C21orf90 (NM_153204.1,743-761).
ccccaccagctcattcgtt

SEQ ID NO: 422097 - DNA, 19 bp, Homo sapiens
  siRNA target sequence for C21orf90 (NM_153204.1,749-767).
cagctcattcgttagatga

SEQ ID NO: 422098 - DNA, 19 bp, Homo sapiens
  siRNA target sequence for C21orf90 (NM_153204.1,751-769).
gctcattcgttagatgatt

SEQ ID NO: 422099 - DNA, 19 bp, Homo sapiens
  siRNA target sequence for AMICA (NM_153206.1,466-484).
gggcctgaatgacttgaat

SEQ ID NO: 422100 - DNA, 19 bp, Homo sapiens
  siRNA target sequence for AMICA (NM_153206.1,469-487).
cctgaatgacttgaatgtt

SEQ ID NO: 422101 - DNA, 19 bp, Homo sapiens
  siRNA target sequence for AMICA (NM_153206.1,554-572).
gaagacaaatgtatattca

SEQ ID NO: 422102 - DNA, 19 bp, Homo sapiens
  siRNA target sequence for AMICA (NM_153206.1,557-575).
gacaaatgtatattcaaga

SEQ ID NO: 422103 - DNA, 19 bp, Homo sapiens
  siRNA target sequence for AMICA (NM_153206.1,601-619).
gcacgccaaggacgaatat

SEQ ID NO: 422104 - DNA, 19 bp, Homo sapiens
  siRNA target sequence for AMICA (NM_153206.1,611-629).
gacgaatatgtgctatact

SEQ ID NO: 422105 - DNA, 19 bp, Homo sapiens
  siRNA target sequence for AMICA (NM_153206.1,736-754).
ggctgaccagggaacctat

SEQ ID NO: 422106 - DNA, 19 bp, Homo sapiens
  siRNA target sequence for AMICA (NM_153206.1,737-755).
gctgaccagggaacctata

SEQ ID NO: 422107 - DNA, 19 bp, Homo sapiens
  siRNA target sequence for AMICA (NM_153206.1,738-756).
ctgaccagggaacctatat

SEQ ID NO: 422108 - DNA, 19 bp, Homo sapiens
  siRNA target sequence for AMICA (NM_153206.1,902-920).
cacgtgaccaaggtagaat

SEQ ID NO: 422109 - DNA, 19 bp, Homo sapiens
  siRNA target sequence for AMICA (NM_153206.1,913-931).
ggtagaatggatattttca

SEQ ID NO: 422110 - DNA, 19 bp, Homo sapiens
  siRNA target sequence for AMICA (NM_153206.1,940-958).
cgcaaaggaggagattgta

SEQ ID NO: 422111 - DNA, 19 bp, Homo sapiens
  siRNA target sequence for AMICA (NM_153206.1,946-964).
ggaggagattgtatttcgt

SEQ ID NO: 422112 - DNA, 19 bp, Homo sapiens
  siRNA target sequence for AMICA (NM_153206.1,962-980).
cgttactaccacaaactca

SEQ ID NO: 422113 - DNA, 19 bp, Homo sapiens
  siRNA target sequence for AMICA (NM_153206.1,1217-1235).
gtcttgggtggtaatcagt

SEQ ID NO: 422114 - DNA, 19 bp, Homo sapiens
  siRNA target sequence for AMICA (NM_153206.1,1227-1245).
gtaatcagttggtgatcat

SEQ ID NO: 422115 - DNA, 19 bp, Homo sapiens
  siRNA target sequence for AMICA (NM_153206.1,1273-1291).
gctgctccctgttctgata

SEQ ID NO: 422116 - DNA, 19 bp, Homo sapiens
  siRNA target sequence for AMICA (NM_153206.1,1351-1369).
gaacacgaagaagactaat

SEQ ID NO: 422117 - DNA, 19 bp, Homo sapiens
  siRNA target sequence for AMICA (NM_153206.1,1354-1372).
cacgaagaagactaatcca

SEQ ID NO: 422118 - DNA, 19 bp, Homo sapiens
  siRNA target sequence for AMICA (NM_153206.1,1535-1553).
cggaacaactcacttgaaa

SEQ ID NO: 422119 - DNA, 19 bp, Homo sapiens
  siRNA target sequence for AMICA (NM_153206.1,1536-1554).
ggaacaactcacttgaaaa

SEQ ID NO: 422120 - DNA, 19 bp, Homo sapiens
  siRNA target sequence for AMICA (NM_153206.1,1562-1580).
ggtgggggaatgccaaaaa

SEQ ID NO: 422121 - DNA, 19 bp, Homo sapiens
  siRNA target sequence for AEBP2 (NM_153207.2,180-198).
gacagcataagcagtacta

SEQ ID NO: 422122 - DNA, 19 bp, Homo sapiens
  siRNA target sequence for AEBP2 (NM_153207.2,193-211).
gtactataatggatgtaga

SEQ ID NO: 422123 - DNA, 19 bp, Homo sapiens
  siRNA target sequence for AEBP2 (NM_153207.2,207-225).
gtagacagcacaatttcca

SEQ ID NO: 422124 - DNA, 19 bp, Homo sapiens
  siRNA target sequence for AEBP2 (NM_153207.2,235-253).
caactccagcaatgatgaa

SEQ ID NO: 422125 - DNA, 19 bp, Homo sapiens
  siRNA target sequence for AEBP2 (NM_153207.2,280-298).
gcaaaaatattgcctataa

SEQ ID NO: 422126 - DNA, 19 bp, Homo sapiens
  siRNA target sequence for AEBP2 (NM_153207.2,356-374).
catccgttccatacatgta

SEQ ID NO: 422127 - DNA, 19 bp, Homo sapiens
  siRNA target sequence for AEBP2 (NM_153207.2,359-377).
ccgttccatacatgtagat

SEQ ID NO: 422128 - DNA, 19 bp, Homo sapiens
  siRNA target sequence for AEBP2 (NM_153207.2,383-401).
gcgaggaggggtatttgtt

SEQ ID NO: 422129 - DNA, 19 bp, Homo sapiens
  siRNA target sequence for AEBP2 (NM_153207.2,384-402).
cgaggaggggtatttgttt

SEQ ID NO: 422130 - DNA, 19 bp, Homo sapiens
  siRNA target sequence for AEBP2 (NM_153207.2,414-432).
ggttgtaaagtatataaca

SEQ ID NO: 422131 - DNA, 19 bp, Homo sapiens
  siRNA target sequence for AEBP2 (NM_153207.2,668-686).
caaaagacgacgctcatta

SEQ ID NO: 422132 - DNA, 19 bp, Homo sapiens
  siRNA target sequence for AEBP2 (NM_153207.2,687-705).
ccacggccacatgatttct

SEQ ID NO: 422133 - DNA, 19 bp, Homo sapiens
  siRNA target sequence for AEBP2 (NM_153207.2,688-706).
cacggccacatgatttctt

SEQ ID NO: 422134 - DNA, 19 bp, Homo sapiens
  siRNA target sequence for AEBP2 (NM_153207.2,733-751).
gacatcgagccatatgctt

SEQ ID NO: 422135 - DNA, 19 bp, Homo sapiens
  siRNA target sequence for AEBP2 (NM_153207.2,735-753).
catcgagccatatgcttta

SEQ ID NO: 422136 - DNA, 19 bp, Homo sapiens
  siRNA target sequence for AEBP2 (NM_153207.2,739-757).
gagccatatgctttaacct

SEQ ID NO: 422137 - DNA, 19 bp, Homo sapiens
  siRNA target sequence for AEBP2 (NM_153207.2,756-774).
ctctcagctcatatagaaa

SEQ ID NO: 422138 - DNA, 19 bp, Homo sapiens
  siRNA target sequence for AEBP2 (NM_153207.2,798-816).
gtttttcatagtactgtaa

SEQ ID NO: 422139 - DNA, 19 bp, Homo sapiens
  siRNA target sequence for AEBP2 (NM_153207.2,907-925).
gtgaacgacatcagttaaa

SEQ ID NO: 422140 - DNA, 19 bp, Homo sapiens
  siRNA target sequence for AEBP2 (NM_153207.2,920-938).
gttaaaaactaaagtagtt

SEQ ID NO: 422141 - DNA, 19 bp, Homo sapiens
  siRNA target sequence for MGC35048 (NM_153208.1,840-858).
cgagccgtcaagcaagaat

SEQ ID NO: 422142 - DNA, 19 bp, Homo sapiens
  siRNA target sequence for MGC35048 (NM_153208.1,844-862).
ccgtcaagcaagaatctgt

SEQ ID NO: 422143 - DNA, 19 bp, Homo sapiens
  siRNA target sequence for MGC35048 (NM_153208.1,924-942).
caaacaggagcctgtgatt

SEQ ID NO: 422144 - DNA, 19 bp, Homo sapiens
  siRNA target sequence for MGC35048 (NM_153208.1,950-968).
cgccagtagaggaaatgct

SEQ ID NO: 422145 - DNA, 19 bp, Homo sapiens
  siRNA target sequence for MGC35048 (NM_153208.1,1031-1049).
caccctgtcctcaagataa

SEQ ID NO: 422146 - DNA, 19 bp, Homo sapiens
  siRNA target sequence for MGC35048 (NM_153208.1,1045-1063).
gataaatcggaaacaatca

SEQ ID NO: 422147 - DNA, 19 bp, Homo sapiens
  siRNA target sequence for MGC35048 (NM_153208.1,1207-1225).
ctgactgagtggttataca

SEQ ID NO: 422148 - DNA, 19 bp, Homo sapiens
  siRNA target sequence for MGC35048 (NM_153208.1,1215-1233).
gtggttatacaaccaaaat

SEQ ID NO: 422149 - DNA, 19 bp, Homo sapiens
  siRNA target sequence for MGC35048 (NM_153208.1,1355-1373).
ccctctacattcaatcctt

SEQ ID NO: 422150 - DNA, 19 bp, Homo sapiens
  siRNA target sequence for MGC35048 (NM_153208.1,1419-1437).
gcgtcagtggcagaagaaa

SEQ ID NO: 422151 - DNA, 19 bp, Homo sapiens
  siRNA target sequence for FLJ33761 (NM_153211.1,315-333).
gaatgccatgatgacattt

SEQ ID NO: 422152 - DNA, 19 bp, Homo sapiens
  siRNA target sequence for FLJ33761 (NM_153211.1,404-422).
ctggagtaattgaaacaat

SEQ ID NO: 422153 - DNA, 19 bp, Homo sapiens
  siRNA target sequence for FLJ33761 (NM_153211.1,406-424).
ggagtaattgaaacaatca

SEQ ID NO: 422154 - DNA, 19 bp, Homo sapiens
  siRNA target sequence for FLJ33761 (NM_153211.1,407-425).
gagtaattgaaacaatcaa

SEQ ID NO: 422155 - DNA, 19 bp, Homo sapiens
  siRNA target sequence for FLJ33761 (NM_153211.1,550-568).
gaattgtcagcttatatca

SEQ ID NO: 422156 - DNA, 19 bp, Homo sapiens
  siRNA target sequence for FLJ33761 (NM_153211.1,572-590).
gtgggtggatccttaggaa

SEQ ID NO: 422157 - DNA, 19 bp, Homo sapiens
  siRNA target sequence for FLJ33761 (NM_153211.1,643-661).
ctgtatcagaagaagctaa

SEQ ID NO: 422158 - DNA, 19 bp, Homo sapiens
  siRNA target sequence for FLJ33761 (NM_153211.1,749-767).
gtgctgttagctttggata

SEQ ID NO: 422159 - DNA, 19 bp, Homo sapiens
  siRNA target sequence for FLJ33761 (NM_153211.1,802-820).
ccaaacctgctcaaaatca

SEQ ID NO: 422160 - DNA, 19 bp, Homo sapiens
  siRNA target sequence for FLJ33761 (NM_153211.1,847-865).
cgcctacaggggctttctt

SEQ ID NO: 422161 - DNA, 19 bp, Homo sapiens
  siRNA target sequence for FLJ33761 (NM_153211.1,900-918).
ggcccctttagctacatta

SEQ ID NO: 422162 - DNA, 19 bp, Homo sapiens
  siRNA target sequence for FLJ33761 (NM_153211.1,903-921).
ccctttagctacattagct

SEQ ID NO: 422163 - DNA, 19 bp, Homo sapiens
  siRNA target sequence for FLJ33761 (NM_153211.1,924-942).
gctctggtatcatactgta

SEQ ID NO: 422164 - DNA, 19 bp, Homo sapiens
  siRNA target sequence for FLJ33761 (NM_153211.1,998-1016).
ctaaggaaattctccttaa

SEQ ID NO: 422165 - DNA, 19 bp, Homo sapiens
  siRNA target sequence for FLJ33761 (NM_153211.1,1072-1090).
caacgactagagtgtcaaa

SEQ ID NO: 422166 - DNA, 19 bp, Homo sapiens
  siRNA target sequence for FLJ33761 (NM_153211.1,1075-1093).
cgactagagtgtcaaatca

SEQ ID NO: 422167 - DNA, 19 bp, Homo sapiens
  siRNA target sequence for FLJ33761 (NM_153211.1,1076-1094).
gactagagtgtcaaatcaa

SEQ ID NO: 422168 - DNA, 19 bp, Homo sapiens
  siRNA target sequence for FLJ33761 (NM_153211.1,1133-1151).
cagtagaccagagagaaat

SEQ ID NO: 422169 - DNA, 19 bp, Homo sapiens
  siRNA target sequence for FLJ33761 (NM_153211.1,1178-1196).
gttggtgcagcatgataga

SEQ ID NO: 422170 - DNA, 19 bp, Homo sapiens
  siRNA target sequence for FLJ33761 (NM_153211.1,1187-1205).
gcatgatagagctcaattt

SEQ ID NO: 422171 - DNA, 19 bp, Homo sapiens
  siRNA target sequence for FLJ33761 (NM_153211.1,1200-1218).
caatttcaaggatgcattt

SEQ ID NO: 422172 - DNA, 19 bp, Homo sapiens
  siRNA target sequence for FLJ33761 (NM_153211.1,1250-1268).
ggtggtcccagtgctatta

SEQ ID NO: 422173 - DNA, 19 bp, Homo sapiens
  siRNA target sequence for FLJ33761 (NM_153211.1,1251-1269).
gtggtcccagtgctattat

SEQ ID NO: 422174 - DNA, 19 bp, Homo sapiens
  siRNA target sequence for FLJ33761 (NM_153211.1,1316-1334).
gggcacagattgtctttaa

SEQ ID NO: 422175 - DNA, 19 bp, Homo sapiens
  siRNA target sequence for FLJ33761 (NM_153211.1,1323-1341).
gattgtctttaaagaagtt

SEQ ID NO: 422176 - DNA, 19 bp, Homo sapiens
  siRNA target sequence for FLJ33761 (NM_153211.1,1434-1452).
ctgtgtgttggcgtctatt

SEQ ID NO: 422177 - DNA, 19 bp, Homo sapiens
  siRNA target sequence for FLJ33761 (NM_153211.1,1436-1454).
gtgtgttggcgtctattga

SEQ ID NO: 422178 - DNA, 19 bp, Homo sapiens
  siRNA target sequence for FLJ33761 (NM_153211.1,1448-1466).
ctattgaagtgttgtactt

SEQ ID NO: 422179 - DNA, 19 bp, Homo sapiens
  siRNA target sequence for FLJ33761 (NM_153211.1,1470-1488).
gaaagctcttccaaactgt

SEQ ID NO: 422180 - DNA, 19 bp, Homo sapiens
  siRNA target sequence for FLJ33761 (NM_153211.1,1533-1551).
ggatgactcatctgttgtt

SEQ ID NO: 422181 - DNA, 19 bp, Homo sapiens
  siRNA target sequence for FLJ33761 (NM_153211.1,1539-1557).
ctcatctgttgttggatta

SEQ ID NO: 422182 - DNA, 19 bp, Homo sapiens
  siRNA target sequence for FLJ33761 (NM_153211.1,1541-1559).
catctgttgttggattaaa

SEQ ID NO: 422183 - DNA, 19 bp, Homo sapiens
  siRNA target sequence for FLJ33761 (NM_153211.1,1567-1585).
cttcttggtgccatacaca

SEQ ID NO: 422184 - DNA, 19 bp, Homo sapiens
  siRNA target sequence for FLJ33761 (NM_153211.1,1574-1592).
gtgccatacacaaatgtct

SEQ ID NO: 422185 - DNA, 19 bp, Homo sapiens
  siRNA target sequence for FLJ33761 (NM_153211.1,1584-1602).
caaatgtctaggaaactca

SEQ ID NO: 422186 - DNA, 19 bp, Homo sapiens
  siRNA target sequence for FLJ33761 (NM_153211.1,1620-1638).
cttccagcgagctgttaaa

SEQ ID NO: 422187 - DNA, 19 bp, Homo sapiens
  siRNA target sequence for FLJ33761 (NM_153211.1,1623-1641).
ccagcgagctgttaaagat

SEQ ID NO: 422188 - DNA, 19 bp, Homo sapiens
  siRNA target sequence for FLJ33761 (NM_153211.1,1626-1644).
gcgagctgttaaagatgaa

SEQ ID NO: 422189 - DNA, 19 bp, Homo sapiens
  siRNA target sequence for FLJ33761 (NM_153211.1,1627-1645).
cgagctgttaaagatgaat

SEQ ID NO: 422190 - DNA, 19 bp, Homo sapiens
  siRNA target sequence for FLJ33761 (NM_153211.1,1642-1660).
gaattgtgtcgtcagaata

SEQ ID NO: 422191 - DNA, 19 bp, Homo sapiens
  siRNA target sequence for FLJ33761 (NM_153211.1,1674-1692).
gccgtatgcctgttatgaa

SEQ ID NO: 422192 - DNA, 19 bp, Homo sapiens
  siRNA target sequence for FLJ33761 (NM_153211.1,1676-1694).
cgtatgcctgttatgaact

SEQ ID NO: 422193 - DNA, 19 bp, Homo sapiens
  siRNA target sequence for FLJ33761 (NM_153211.1,1696-1714).
ggctgtcttctattagaca

SEQ ID NO: 422194 - DNA, 19 bp, Homo sapiens
  siRNA target sequence for FLJ33761 (NM_153211.1,1698-1716).
ctgtcttctattagacaaa

SEQ ID NO: 422195 - DNA, 19 bp, Homo sapiens
  siRNA target sequence for FLJ33761 (NM_153211.1,1772-1790).
ctggctacgactttgaaaa

SEQ ID NO: 422196 - DNA, 19 bp, Homo sapiens
  siRNA target sequence for FLJ33761 (NM_153211.1,1823-1841).
cctctctgagggaattggt

SEQ ID NO: 422197 - DNA, 19 bp, Homo sapiens
  siRNA target sequence for FLJ33962 (NM_153213.2,523-541).
gccacggctcggagaagaa

SEQ ID NO: 422198 - DNA, 19 bp, Homo sapiens
  siRNA target sequence for FLJ33962 (NM_153213.2,525-543).
cacggctcggagaagaagt

SEQ ID NO: 422199 - DNA, 19 bp, Homo sapiens
  siRNA target sequence for FLJ33962 (NM_153213.2,1012-1030).
ccgtcctctatcaggaata

SEQ ID NO: 422200 - DNA, 19 bp, Homo sapiens
  siRNA target sequence for FLJ33962 (NM_153213.2,1328-1346).
ggctgtgggccacttctta

SEQ ID NO: 422201 - DNA, 19 bp, Homo sapiens
  siRNA target sequence for FLJ33962 (NM_153213.2,1657-1675).
cccttacctccttccttat

SEQ ID NO: 422202 - DNA, 19 bp, Homo sapiens
  siRNA target sequence for FLJ33962 (NM_153213.2,1744-1762).
gctctgaagacgaagacat

SEQ ID NO: 422203 - DNA, 19 bp, Homo sapiens
  siRNA target sequence for FLJ33962 (NM_153213.2,1802-1820).
ggagtgcaatgctagtgta

SEQ ID NO: 422204 - DNA, 19 bp, Homo sapiens
  siRNA target sequence for FLJ33962 (NM_153213.2,2289-2307).
ccccaggttcagtgtgtta

SEQ ID NO: 422205 - DNA, 19 bp, Homo sapiens
  siRNA target sequence for FLJ38608 (NM_153215.1,177-195).
catcagcgacctacatagt

SEQ ID NO: 422206 - DNA, 19 bp, Homo sapiens
  siRNA target sequence for MGC13034 (NM_153217.1,199-217).
ggactggtggggatcacat

SEQ ID NO: 422207 - DNA, 19 bp, Homo sapiens
  siRNA target sequence for MGC13034 (NM_153217.1,200-218).
gactggtggggatcacatt

SEQ ID NO: 422208 - DNA, 19 bp, Homo sapiens
  siRNA target sequence for MGC13034 (NM_153217.1,223-241).
gtcatgggctggatcaaat

SEQ ID NO: 422209 - DNA, 19 bp, Homo sapiens
  siRNA target sequence for MGC13034 (NM_153217.1,228-246).
gggctggatcaaataccaa

SEQ ID NO: 422210 - DNA, 19 bp, Homo sapiens
  siRNA target sequence for MGC13034 (NM_153217.1,296-314).
cagttggggtgacattcat

SEQ ID NO: 422211 - DNA, 19 bp, Homo sapiens
  siRNA target sequence for MGC13034 (NM_153217.1,322-340).
gctgtgtgcaagttcaaaa

SEQ ID NO: 422212 - DNA, 19 bp, Homo sapiens
  siRNA target sequence for MGC13034 (NM_153217.1,348-366).
ctgccagttgtgcaaagaa

SEQ ID NO: 422213 - DNA, 19 bp, Homo sapiens
  siRNA target sequence for MGC13034 (NM_153217.1,401-419).
caggaggaccatcatttgt

SEQ ID NO: 422214 - DNA, 19 bp, Homo sapiens
  siRNA target sequence for MGC13034 (NM_153217.1,403-421).
ggaggaccatcatttgttt

SEQ ID NO: 422215 - DNA, 19 bp, Homo sapiens
  siRNA target sequence for MGC13034 (NM_153217.1,474-492).
catccctcctccttatggt

SEQ ID NO: 422216 - DNA, 19 bp, Homo sapiens
  siRNA target sequence for MGC13034 (NM_153217.1,499-517).
gagcctatggggataaata

SEQ ID NO: 422217 - DNA, 19 bp, Homo sapiens
  siRNA target sequence for MGC13034 (NM_153217.1,502-520).
cctatggggataaatacca

SEQ ID NO: 422218 - DNA, 19 bp, Homo sapiens
  siRNA target sequence for MGC13034 (NM_153217.1,544-562).
ccctgcggcctcataacct

SEQ ID NO: 422219 - DNA, 19 bp, Homo sapiens
  siRNA target sequence for MGC13034 (NM_153217.1,608-626).
ccatctaccctcaagataa

SEQ ID NO: 422220 - DNA, 19 bp, Homo sapiens
  siRNA target sequence for MGC13034 (NM_153217.1,646-664).
gagggctgcctttctttca

SEQ ID NO: 422221 - DNA, 19 bp, Homo sapiens
  siRNA target sequence for MGC13034 (NM_153217.1,681-699).
caggcccaatcctgatgtt

SEQ ID NO: 422222 - DNA, 19 bp, Homo sapiens
  siRNA target sequence for MGC13034 (NM_153217.1,683-701).
ggcccaatcctgatgttga

SEQ ID NO: 422223 - DNA, 19 bp, Homo sapiens
  siRNA target sequence for MGC13034 (NM_153217.1,751-769).
cctcccccttatgaagaaa

SEQ ID NO: 422224 - DNA, 19 bp, Homo sapiens
  siRNA target sequence for MGC13034 (NM_153217.1,752-770).
ctcccccttatgaagaaat

SEQ ID NO: 422225 - DNA, 19 bp, Homo sapiens
  siRNA target sequence for MGC13034 (NM_153217.1,755-773).
ccccttatgaagaaatata

SEQ ID NO: 422226 - DNA, 19 bp, Homo sapiens
  siRNA target sequence for FLJ38725 (NM_153218.1,343-361).
gatctttttggtttgaaat

SEQ ID NO: 422227 - DNA, 19 bp, Homo sapiens
  siRNA target sequence for FLJ38725 (NM_153218.1,380-398).
gccatcagacattactgaa

SEQ ID NO: 422228 - DNA, 19 bp, Homo sapiens
  siRNA target sequence for FLJ38725 (NM_153218.1,430-448).
gccaaggccaagtttctct

SEQ ID NO: 422229 - DNA, 19 bp, Homo sapiens
  siRNA target sequence for FLJ38725 (NM_153218.1,435-453).
ggccaagtttctctgtata

SEQ ID NO: 422230 - DNA, 19 bp, Homo sapiens
  siRNA target sequence for FLJ38725 (NM_153218.1,436-454).
gccaagtttctctgtataa

SEQ ID NO: 422231 - DNA, 19 bp, Homo sapiens
  siRNA target sequence for FLJ38725 (NM_153218.1,462-480).
cagtaacatcagctatgaa

SEQ ID NO: 422232 - DNA, 19 bp, Homo sapiens
  siRNA target sequence for FLJ38725 (NM_153218.1,577-595).
gccactttgtataccatta

SEQ ID NO: 422233 - DNA, 19 bp, Homo sapiens
  siRNA target sequence for FLJ38725 (NM_153218.1,578-596).
ccactttgtataccattaa

SEQ ID NO: 422234 - DNA, 19 bp, Homo sapiens
  siRNA target sequence for FLJ38725 (NM_153218.1,623-641).
gcagcattaaggtaattgt

SEQ ID NO: 422235 - DNA, 19 bp, Homo sapiens
  siRNA target sequence for FLJ38725 (NM_153218.1,624-642).
cagcattaaggtaattgta

SEQ ID NO: 422236 - DNA, 19 bp, Homo sapiens
  siRNA target sequence for FLJ38725 (NM_153218.1,739-757).
ggagggctttttaaacagt

SEQ ID NO: 422237 - DNA, 19 bp, Homo sapiens
  siRNA target sequence for FLJ38725 (NM_153218.1,841-859).
ctgagaggaaaattaacta

SEQ ID NO: 422238 - DNA, 19 bp, Homo sapiens
  siRNA target sequence for FLJ38725 (NM_153218.1,872-890).
ctttgatcccagatatttt

SEQ ID NO: 422239 - DNA, 19 bp, Homo sapiens
  siRNA target sequence for FLJ38725 (NM_153218.1,876-894).
gatcccagatattttcata

SEQ ID NO: 422240 - DNA, 19 bp, Homo sapiens
  siRNA target sequence for FLJ38725 (NM_153218.1,911-929).
gaacaggtgggatatctta

SEQ ID NO: 422241 - DNA, 19 bp, Homo sapiens
  siRNA target sequence for FLJ38725 (NM_153218.1,919-937).
gggatatcttatataccaa

SEQ ID NO: 422242 - DNA, 19 bp, Homo sapiens
  siRNA target sequence for FLJ38725 (NM_153218.1,938-956).
ctcttagctcattcaatct

SEQ ID NO: 422243 - DNA, 19 bp, Homo sapiens
  siRNA target sequence for FLJ38725 (NM_153218.1,983-1001).
ccaaggtagtggttcaaga

SEQ ID NO: 422244 - DNA, 19 bp, Homo sapiens
  siRNA target sequence for FLJ38725 (NM_153218.1,1106-1124).
ctgactcttatgatggaat

SEQ ID NO: 422245 - DNA, 19 bp, Homo sapiens
  siRNA target sequence for FLJ38725 (NM_153218.1,1168-1186).
gactgtataccgatagttt

SEQ ID NO: 422246 - DNA, 19 bp, Homo sapiens
  siRNA target sequence for FLJ38725 (NM_153218.1,1222-1240).
cacgctggttggaaaggta

SEQ ID NO: 422247 - DNA, 19 bp, Homo sapiens
  siRNA target sequence for FLJ38725 (NM_153218.1,1241-1259).
ctttgttgggtgttgctat

SEQ ID NO: 422248 - DNA, 19 bp, Homo sapiens
  siRNA target sequence for FLJ38725 (NM_153218.1,1302-1320).
ggaagacattgttgttgta

SEQ ID NO: 422249 - DNA, 19 bp, Homo sapiens
  siRNA target sequence for FLJ38725 (NM_153218.1,1337-1355).
gaccttgctgttttactct

SEQ ID NO: 422250 - DNA, 19 bp, Homo sapiens
  siRNA target sequence for FLJ38725 (NM_153218.1,1393-1411).
cctgcatgtgtacaactat

SEQ ID NO: 422251 - DNA, 19 bp, Homo sapiens
  siRNA target sequence for FLJ38725 (NM_153218.1,1394-1412).
ctgcatgtgtacaactatt

SEQ ID NO: 422252 - DNA, 19 bp, Homo sapiens
  siRNA target sequence for FLJ38725 (NM_153218.1,1440-1458).
ccgtaaagccacaaggatt

SEQ ID NO: 422253 - DNA, 19 bp, Homo sapiens
  siRNA target sequence for FLJ38725 (NM_153218.1,1448-1466).
ccacaaggattcttctaga

SEQ ID NO: 422254 - DNA, 19 bp, Homo sapiens
  siRNA target sequence for FLJ38725 (NM_153218.1,1510-1528).
gatctcaacctctgtacat

SEQ ID NO: 422255 - DNA, 19 bp, Homo sapiens
  siRNA target sequence for FLJ38725 (NM_153218.1,1529-1547).
cttgccatcctgacaagtt

SEQ ID NO: 422256 - DNA, 19 bp, Homo sapiens
  siRNA target sequence for FLJ38725 (NM_153218.1,1532-1550).
gccatcctgacaagttttt

SEQ ID NO: 422257 - DNA, 19 bp, Homo sapiens
  siRNA target sequence for FLJ38725 (NM_153218.1,1558-1576).
gtccgagatggccttaatt

SEQ ID NO: 422258 - DNA, 19 bp, Homo sapiens
  siRNA target sequence for FLJ38725 (NM_153218.1,1564-1582).
gatggccttaattttggta

SEQ ID NO: 422259 - DNA, 19 bp, Homo sapiens
  siRNA target sequence for CLIP-2 (NM_153221.1,382-400).
gcgagcgcgtgcacttgaa

SEQ ID NO: 422260 - DNA, 19 bp, Homo sapiens
  siRNA target sequence for CLIP-2 (NM_153221.1,1219-1237).
cccgagagtacctgatcaa

SEQ ID NO: 422261 - DNA, 19 bp, Homo sapiens
  siRNA target sequence for CLIP-2 (NM_153221.1,1563-1581).
gcctaccagggcgacttta

SEQ ID NO: 422262 - DNA, 19 bp, Homo sapiens
  siRNA target sequence for CLIP-2 (NM_153221.1,1568-1586).
ccagggcgactttaccatt

SEQ ID NO: 422263 - DNA, 19 bp, Homo sapiens
  siRNA target sequence for CLIP-2 (NM_153221.1,1607-1625).
gcggctggtggtgactttt

SEQ ID NO: 422264 - DNA, 19 bp, Homo sapiens
  siRNA target sequence for CLIP-2 (NM_153221.1,1658-1676).
ccgggtcttgccttttgat

SEQ ID NO: 422265 - DNA, 19 bp, Homo sapiens
  siRNA target sequence for CLIP-2 (NM_153221.1,1965-1983).
cgcacctacggcatgttct

SEQ ID NO: 422266 - DNA, 19 bp, Homo sapiens
  siRNA target sequence for CLIP-2 (NM_153221.1,2281-2299).
cctacgccaacgacaagtt

SEQ ID NO: 422267 - DNA, 19 bp, Homo sapiens
  siRNA target sequence for CLIP-2 (NM_153221.1,2764-2782).
cggacaagtacgagtacaa

SEQ ID NO: 422268 - DNA, 19 bp, Homo sapiens
  siRNA target sequence for CLIP-2 (NM_153221.1,2893-2911).
gtccccaggagtatatggt

SEQ ID NO: 422269 - DNA, 19 bp, Homo sapiens
  siRNA target sequence for CLIP-2 (NM_153221.1,3281-3299).
cattggccgctgctttgat

SEQ ID NO: 422270 - DNA, 19 bp, Homo sapiens
  siRNA target sequence for FLJ36090 (NM_153223.1,272-290).
gactaatcctcctgtagaa

SEQ ID NO: 422271 - DNA, 19 bp, Homo sapiens
  siRNA target sequence for FLJ36090 (NM_153223.1,285-303).
gtagaagttcggaaaaaca

SEQ ID NO: 422272 - DNA, 19 bp, Homo sapiens
  siRNA target sequence for FLJ36090 (NM_153223.1,362-380).
gctgcaagacaccttctta

SEQ ID NO: 422273 - DNA, 19 bp, Homo sapiens
  siRNA target sequence for FLJ36090 (NM_153223.1,374-392).
cttcttaaggattccatta

SEQ ID NO: 422274 - DNA, 19 bp, Homo sapiens
  siRNA target sequence for FLJ36090 (NM_153223.1,387-405).
ccattactggttgaactat

SEQ ID NO: 422275 - DNA, 19 bp, Homo sapiens
  siRNA target sequence for FLJ36090 (NM_153223.1,399-417).
gaactatggcacaaggata

SEQ ID NO: 422276 - DNA, 19 bp, Homo sapiens
  siRNA target sequence for FLJ36090 (NM_153223.1,447-465).
gcgagaatccagctttcta

SEQ ID NO: 422277 - DNA, 19 bp, Homo sapiens
  siRNA target sequence for FLJ36090 (NM_153223.1,448-466).
cgagaatccagctttctaa

SEQ ID NO: 422278 - DNA, 19 bp, Homo sapiens
  siRNA target sequence for FLJ36090 (NM_153223.1,456-474).
cagctttctaacatcttgt

SEQ ID NO: 422279 - DNA, 19 bp, Homo sapiens
  siRNA target sequence for FLJ36090 (NM_153223.1,487-505).
ctcgttttttaggttctaa

SEQ ID NO: 422280 - DNA, 19 bp, Homo sapiens
  siRNA target sequence for FLJ36090 (NM_153223.1,513-531).
cagtgttggcgtcaaactt

SEQ ID NO: 422281 - DNA, 19 bp, Homo sapiens
  siRNA target sequence for FLJ36090 (NM_153223.1,535-553).
gtgaaagtgtgcctgttat

SEQ ID NO: 422282 - DNA, 19 bp, Homo sapiens
  siRNA target sequence for FLJ36090 (NM_153223.1,602-620).
gactctagaagattatgga

SEQ ID NO: 422283 - DNA, 19 bp, Homo sapiens
  siRNA target sequence for FLJ36090 (NM_153223.1,624-642).
gtaaaaatgcgtgagattt

SEQ ID NO: 422284 - DNA, 19 bp, Homo sapiens
  siRNA target sequence for FLJ36090 (NM_153223.1,680-698).
gcaaaagccgtcttctctt

SEQ ID NO: 422285 - DNA, 19 bp, Homo sapiens
  siRNA target sequence for FLJ36090 (NM_153223.1,730-748).
cagagcctcgtgaaacgtt

SEQ ID NO: 422286 - DNA, 19 bp, Homo sapiens
  siRNA target sequence for FLJ36090 (NM_153223.1,734-752).
gcctcgtgaaacgttagaa

SEQ ID NO: 422287 - DNA, 19 bp, Homo sapiens
  siRNA target sequence for FLJ36090 (NM_153223.1,735-753).
cctcgtgaaacgttagaat

SEQ ID NO: 422288 - DNA, 19 bp, Homo sapiens
  siRNA target sequence for FLJ36090 (NM_153223.1,736-754).
ctcgtgaaacgttagaata

SEQ ID NO: 422289 - DNA, 19 bp, Homo sapiens
  siRNA target sequence for FLJ36090 (NM_153223.1,738-756).
cgtgaaacgttagaataca

SEQ ID NO: 422290 - DNA, 19 bp, Homo sapiens
  siRNA target sequence for FLJ36090 (NM_153223.1,759-777).
gcagcacttgagctagaaa

SEQ ID NO: 422291 - DNA, 19 bp, Homo sapiens
  siRNA target sequence for FLJ36090 (NM_153223.1,760-778).
cagcacttgagctagaaat

SEQ ID NO: 422292 - DNA, 19 bp, Homo sapiens
  siRNA target sequence for FLJ36090 (NM_153223.1,875-893).
ccgagaaagagaatcacta

SEQ ID NO: 422293 - DNA, 19 bp, Homo sapiens
  siRNA target sequence for FLJ36090 (NM_153223.1,905-923).
ggtggctgaatatactatt

SEQ ID NO: 422294 - DNA, 19 bp, Homo sapiens
  siRNA target sequence for FLJ36090 (NM_153223.1,910-928).
ctgaatatactattctaga

SEQ ID NO: 422295 - DNA, 19 bp, Homo sapiens
  siRNA target sequence for FLJ36090 (NM_153223.1,1170-1188).
gctgaaaataagtataaga

SEQ ID NO: 422296 - DNA, 19 bp, Homo sapiens
  siRNA target sequence for FLJ36090 (NM_153223.1,1244-1262).
ccgtctacagtctgaaata

SEQ ID NO: 422297 - DNA, 19 bp, Homo sapiens
  siRNA target sequence for FLJ36090 (NM_153223.1,1246-1264).
gtctacagtctgaaataaa

SEQ ID NO: 422298 - DNA, 19 bp, Homo sapiens
  siRNA target sequence for FLJ36090 (NM_153223.1,1304-1322).
ggaatctgcaactaagtct

SEQ ID NO: 422299 - DNA, 19 bp, Homo sapiens
  siRNA target sequence for FLJ36090 (NM_153223.1,1305-1323).
gaatctgcaactaagtcta

SEQ ID NO: 422300 - DNA, 19 bp, Homo sapiens
  siRNA target sequence for FLJ36090 (NM_153223.1,1396-1414).
gtcaaatggctcgtcttaa

SEQ ID NO: 422301 - DNA, 19 bp, Homo sapiens
  siRNA target sequence for FLJ36090 (NM_153223.1,1439-1457).
gatgagactacgttacctt

SEQ ID NO: 422302 - DNA, 19 bp, Homo sapiens
  siRNA target sequence for FLJ36090 (NM_153223.1,1458-1476).
gccgctgaggaaaaagata

SEQ ID NO: 422303 - DNA, 19 bp, Homo sapiens
  siRNA target sequence for FLJ36090 (NM_153223.1,1486-1504).
ccgagcgacaagaattgtt

SEQ ID NO: 422304 - DNA, 19 bp, Homo sapiens
  siRNA target sequence for FLJ36090 (NM_153223.1,1502-1520).
gttggatataagaaatgaa

SEQ ID NO: 422305 - DNA, 19 bp, Homo sapiens
  siRNA target sequence for FLJ36090 (NM_153223.1,1556-1574).
ccaggattccacagagatt

SEQ ID NO: 422306 - DNA, 19 bp, Homo sapiens
  siRNA target sequence for FLJ36090 (NM_153223.1,1637-1655).
gactcgcctgatagaagaa

SEQ ID NO: 422307 - DNA, 19 bp, Homo sapiens
  siRNA target sequence for FLJ36090 (NM_153223.1,1667-1685).
gatgagaacgggtgtgtat

SEQ ID NO: 422308 - DNA, 19 bp, Homo sapiens
  siRNA target sequence for FLJ36090 (NM_153223.1,1670-1688).
gagaacgggtgtgtataat

SEQ ID NO: 422309 - DNA, 19 bp, Homo sapiens
  siRNA target sequence for FLJ36090 (NM_153223.1,1689-1707).
cacgaggatcgaataataa

SEQ ID NO: 422310 - DNA, 19 bp, Homo sapiens
  siRNA target sequence for FLJ36090 (NM_153223.1,1691-1709).
cgaggatcgaataataagt

SEQ ID NO: 422311 - DNA, 19 bp, Homo sapiens
  siRNA target sequence for FLJ36090 (NM_153223.1,1694-1712).
ggatcgaataataagtgaa

SEQ ID NO: 422312 - DNA, 19 bp, Homo sapiens
  siRNA target sequence for FLJ36090 (NM_153223.1,1731-1749).
gagattttggcaaaaagca

SEQ ID NO: 422313 - DNA, 19 bp, Homo sapiens
  siRNA target sequence for MGC34034 (NM_153224.2,341-359).
ccaattctagtgctagtaa

SEQ ID NO: 422314 - DNA, 19 bp, Homo sapiens
  siRNA target sequence for MGC34034 (NM_153224.2,352-370).
gctagtaactccttcatct

SEQ ID NO: 422315 - DNA, 19 bp, Homo sapiens
  siRNA target sequence for MGC34034 (NM_153224.2,397-415).
ccagacatcacgtgtacat

SEQ ID NO: 422316 - DNA, 19 bp, Homo sapiens
  siRNA target sequence for MGC34034 (NM_153224.2,452-470).
gggcatgcacgctcacttt

SEQ ID NO: 422317 - DNA, 19 bp, Homo sapiens
  siRNA target sequence for MGC34034 (NM_153224.2,523-541).
ctcacttggctgctttcaa

SEQ ID NO: 422318 - DNA, 19 bp, Homo sapiens
  siRNA target sequence for MGC34034 (NM_153224.2,591-609).
gattgatcatgcctacaat

SEQ ID NO: 422319 - DNA, 19 bp, Homo sapiens
  siRNA target sequence for MGC34034 (NM_153224.2,595-613).
gatcatgcctacaatgaca

SEQ ID NO: 422320 - DNA, 19 bp, Homo sapiens
  siRNA target sequence for MGC34034 (NM_153224.2,644-662).
caagcactcacgcaatctt

SEQ ID NO: 422321 - DNA, 19 bp, Homo sapiens
  siRNA target sequence for MGC34034 (NM_153224.2,647-665).
gcactcacgcaatctttgt

SEQ ID NO: 422322 - DNA, 19 bp, Homo sapiens
  siRNA target sequence for MGC34034 (NM_153224.2,664-682).
gtcctcccagttgacttaa

SEQ ID NO: 422323 - DNA, 19 bp, Homo sapiens
  siRNA target sequence for MGC34034 (NM_153224.2,666-684).
cctcccagttgacttaaga

SEQ ID NO: 422324 - DNA, 19 bp, Homo sapiens
  siRNA target sequence for MGC34034 (NM_153224.2,667-685).
ctcccagttgacttaagaa

SEQ ID NO: 422325 - DNA, 19 bp, Homo sapiens
  siRNA target sequence for MGC34034 (NM_153224.2,669-687).
cccagttgacttaagaaca

SEQ ID NO: 422326 - DNA, 19 bp, Homo sapiens
  siRNA target sequence for RPESP (NM_153225.1,761-779).
ctgcgggcacacctatgtt

SEQ ID NO: 422327 - DNA, 19 bp, Homo sapiens
  siRNA target sequence for FLJ38335 (NM_153228.1,52-70).
ccaggaggctactctttaa

SEQ ID NO: 422328 - DNA, 19 bp, Homo sapiens
  siRNA target sequence for FLJ38335 (NM_153228.1,211-229).
ctgcctcgaacagcataaa

SEQ ID NO: 422329 - DNA, 19 bp, Homo sapiens
  siRNA target sequence for FLJ38335 (NM_153228.1,213-231).
gcctcgaacagcataaact

SEQ ID NO: 422330 - DNA, 19 bp, Homo sapiens
  siRNA target sequence for FLJ38335 (NM_153228.1,230-248).
ctggaattgtcgtgtgaaa

SEQ ID NO: 422331 - DNA, 19 bp, Homo sapiens
  siRNA target sequence for FLJ38335 (NM_153228.1,243-261).
gtgaaaatgacgcaacaaa

SEQ ID NO: 422332 - DNA, 19 bp, Homo sapiens
  siRNA target sequence for FLJ38335 (NM_153228.1,373-391).
ccttcgatgaggcctattt

SEQ ID NO: 422333 - DNA, 19 bp, Homo sapiens
  siRNA target sequence for FLJ38335 (NM_153228.1,421-439).
ggaagacctcggtgaattt

SEQ ID NO: 422334 - DNA, 19 bp, Homo sapiens
  siRNA target sequence for FLJ38335 (NM_153228.1,512-530).
gtacacaccagaagaactt

SEQ ID NO: 422335 - DNA, 19 bp, Homo sapiens
  siRNA target sequence for FLJ38335 (NM_153228.1,557-575).
cttgacacccctggatatt

SEQ ID NO: 422336 - DNA, 19 bp, Homo sapiens
  siRNA target sequence for FLJ38335 (NM_153228.1,803-821).
gctctacagacgcatgaaa

SEQ ID NO: 422337 - DNA, 19 bp, Homo sapiens
  siRNA target sequence for FLJ38335 (NM_153228.1,804-822).
ctctacagacgcatgaaaa

SEQ ID NO: 422338 - DNA, 19 bp, Homo sapiens
  siRNA target sequence for FLJ38335 (NM_153228.1,923-941).
cgtcaatgcagctgtagta

SEQ ID NO: 422339 - DNA, 19 bp, Homo sapiens
  siRNA target sequence for FLJ38335 (NM_153228.1,924-942).
gtcaatgcagctgtagtaa

SEQ ID NO: 422340 - DNA, 19 bp, Homo sapiens
  siRNA target sequence for FLJ38335 (NM_153228.1,961-979).
ggagtatgtccgaagactt

SEQ ID NO: 422341 - DNA, 19 bp, Homo sapiens
  siRNA target sequence for FLJ38335 (NM_153228.1,1071-1089).
caagtctcggcttacaata

SEQ ID NO: 422342 - DNA, 19 bp, Homo sapiens
  siRNA target sequence for FLJ38335 (NM_153228.1,1074-1092).
gtctcggcttacaatatga

SEQ ID NO: 422343 - DNA, 19 bp, Homo sapiens
  siRNA target sequence for FLJ38335 (NM_153228.1,1076-1094).
ctcggcttacaatatgaaa

SEQ ID NO: 422344 - DNA, 19 bp, Homo sapiens
  siRNA target sequence for FLJ38335 (NM_153228.1,1222-1240).
gagcccttcatcagcatta

SEQ ID NO: 422345 - DNA, 19 bp, Homo sapiens
  siRNA target sequence for FLJ38335 (NM_153228.1,1227-1245).
cttcatcagcattacagtt

SEQ ID NO: 422346 - DNA, 19 bp, Homo sapiens
  siRNA target sequence for FLJ38335 (NM_153228.1,1321-1339).
cctcgaacaagtttgtgaa

SEQ ID NO: 422347 - DNA, 19 bp, Homo sapiens
  siRNA target sequence for FLJ38335 (NM_153228.1,1445-1463).
caccagttctattacacaa

SEQ ID NO: 422348 - DNA, 19 bp, Homo sapiens
  siRNA target sequence for FLJ38335 (NM_153228.1,1450-1468).
gttctattacacaagattt

SEQ ID NO: 422349 - DNA, 19 bp, Homo sapiens
  siRNA target sequence for FLJ38335 (NM_153228.1,1515-1533).
ctgaggcaaagcataccaa

SEQ ID NO: 422350 - DNA, 19 bp, Homo sapiens
  siRNA target sequence for FLJ38335 (NM_153228.1,1517-1535).
gaggcaaagcataccaata

SEQ ID NO: 422351 - DNA, 19 bp, Homo sapiens
  siRNA target sequence for FLJ38335 (NM_153228.1,1637-1655).
ctatgagcccattaaagat

SEQ ID NO: 422352 - DNA, 19 bp, Homo sapiens
  siRNA target sequence for FLJ38335 (NM_153228.1,1657-1675).
gacatggaaacatactcat

SEQ ID NO: 422353 - DNA, 19 bp, Homo sapiens
  siRNA target sequence for FLJ38335 (NM_153228.1,1662-1680).
ggaaacatactcatagtca

SEQ ID NO: 422354 - DNA, 19 bp, Homo sapiens
  siRNA target sequence for FLJ38335 (NM_153228.1,1694-1712).
ggagatgctttattcattt

SEQ ID NO: 422355 - DNA, 19 bp, Homo sapiens
  siRNA target sequence for FLJ38335 (NM_153228.1,1779-1797).
gagccaacagctttagaca

SEQ ID NO: 422356 - DNA, 19 bp, Homo sapiens
  siRNA target sequence for FLJ38335 (NM_153228.1,1786-1804).
cagctttagacattctact

SEQ ID NO: 422357 - DNA, 19 bp, Homo sapiens
  siRNA target sequence for FLJ38335 (NM_153228.1,1789-1807).
ctttagacattctactgat

SEQ ID NO: 422358 - DNA, 19 bp, Homo sapiens
  siRNA target sequence for FLJ38335 (NM_153228.1,1794-1812).
gacattctactgataacca

SEQ ID NO: 422359 - DNA, 19 bp, Homo sapiens
  siRNA target sequence for FLJ38335 (NM_153228.1,1805-1823).
gataaccatccaggatatt

SEQ ID NO: 422360 - DNA, 19 bp, Homo sapiens
  siRNA target sequence for FLJ38335 (NM_153228.1,1814-1832).
ccaggatattctatcctat

SEQ ID NO: 422361 - DNA, 19 bp, Homo sapiens
  siRNA target sequence for FLJ38335 (NM_153228.1,1818-1836).
gatattctatcctatcaca

SEQ ID NO: 422362 - DNA, 19 bp, Homo sapiens
  siRNA target sequence for FLJ38335 (NM_153228.1,1841-1859).
gagtcatcagcgtctcttt

SEQ ID NO: 422363 - DNA, 19 bp, Homo sapiens
  siRNA target sequence for FLJ38335 (NM_153228.1,1850-1868).
gcgtctctttcctggatta

SEQ ID NO: 422364 - DNA, 19 bp, Homo sapiens
  siRNA target sequence for FLJ38335 (NM_153228.1,1891-1909).
gtagctctgtggatcaaat

SEQ ID NO: 422365 - DNA, 19 bp, Homo sapiens
  siRNA target sequence for FLJ38335 (NM_153228.1,1895-1913).
ctctgtggatcaaatcaaa

SEQ ID NO: 422366 - DNA, 19 bp, Homo sapiens
  siRNA target sequence for FLJ38335 (NM_153228.1,1901-1919).
ggatcaaatcaaagttctt

SEQ ID NO: 422367 - DNA, 19 bp, Homo sapiens
  siRNA target sequence for FLJ38335 (NM_153228.1,1914-1932).
gttcttgttacccaaaagt

SEQ ID NO: 422368 - DNA, 19 bp, Homo sapiens
  siRNA target sequence for FLJ38335 (NM_153228.1,1955-1973).
gaagatccgtgaaaacaat

SEQ ID NO: 422369 - DNA, 19 bp, Homo sapiens
  siRNA target sequence for FLJ38335 (NM_153228.1,1961-1979).
ccgtgaaaacaataatatt

SEQ ID NO: 422370 - DNA, 19 bp, Homo sapiens
  siRNA target sequence for FLJ38335 (NM_153228.1,1989-2007).
gaatgggaatggatccaaa

SEQ ID NO: 422371 - DNA, 19 bp, Homo sapiens
  siRNA target sequence for FLJ38335 (NM_153228.1,1994-2012).
ggaatggatccaaaagctt

SEQ ID NO: 422372 - DNA, 19 bp, Homo sapiens
  siRNA target sequence for FLJ38335 (NM_153228.1,2020-2038).
ctgaatctatggaaagtgt

SEQ ID NO: 422373 - DNA, 19 bp, Homo sapiens
  siRNA target sequence for FLJ38335 (NM_153228.1,2031-2049).
gaaagtgtggatcatactt

SEQ ID NO: 422374 - DNA, 19 bp, Homo sapiens
  siRNA target sequence for FLJ38335 (NM_153228.1,2056-2074).
gccccatgcaattgttctt

SEQ ID NO: 422375 - DNA, 19 bp, Homo sapiens
  siRNA target sequence for FLJ38335 (NM_153228.1,2058-2076).
cccatgcaattgttcttct

SEQ ID NO: 422376 - DNA, 19 bp, Homo sapiens
  siRNA target sequence for FLJ38335 (NM_153228.1,2059-2077).
ccatgcaattgttcttcta

SEQ ID NO: 422377 - DNA, 19 bp, Homo sapiens
  siRNA target sequence for FLJ38335 (NM_153228.1,2081-2099).
gctccagatggcagtgaaa

SEQ ID NO: 422378 - DNA, 19 bp, Homo sapiens
  siRNA target sequence for FLJ38335 (NM_153228.1,2158-2176).
cacaggaggtgttggaaat

SEQ ID NO: 422379 - DNA, 19 bp, Homo sapiens
  siRNA target sequence for FLJ38335 (NM_153228.1,2172-2190).
gaaatgggtcacaatgtgt

SEQ ID NO: 422380 - DNA, 19 bp, Homo sapiens
  siRNA target sequence for FLJ38335 (NM_153228.1,2230-2248).
cagccccaggacagaataa

SEQ ID NO: 422381 - DNA, 19 bp, Homo sapiens
  siRNA target sequence for FLJ38335 (NM_153228.1,2259-2277).
ccacactcagggtttctta

SEQ ID NO: 422382 - DNA, 19 bp, Homo sapiens
  siRNA target sequence for FLJ38335 (NM_153228.1,2260-2278).
cacactcagggtttcttaa

SEQ ID NO: 422383 - DNA, 19 bp, Homo sapiens
  siRNA target sequence for FLJ38335 (NM_153228.1,2294-2312).
gtttgaacttggtatagta

SEQ ID NO: 422384 - DNA, 19 bp, Homo sapiens
  siRNA target sequence for FLJ38335 (NM_153228.1,2304-2322).
ggtatagtagcttgtttca

SEQ ID NO: 422385 - DNA, 19 bp, Homo sapiens
  siRNA target sequence for FLJ33318 (NM_153229.1,128-146).
cctgccccaaaggattcaa

SEQ ID NO: 422386 - DNA, 19 bp, Homo sapiens
  siRNA target sequence for FLJ33318 (NM_153229.1,386-404).
cctacagtgaggtgattct

SEQ ID NO: 422387 - DNA, 19 bp, Homo sapiens
  siRNA target sequence for MGC35179 (NM_153230.1,149-167).
gcctttctgcccgatttgt

SEQ ID NO: 422388 - DNA, 19 bp, Homo sapiens
  siRNA target sequence for MGC35179 (NM_153230.1,151-169).
ctttctgcccgatttgtgt

SEQ ID NO: 422389 - DNA, 19 bp, Homo sapiens
  siRNA target sequence for MGC35179 (NM_153230.1,218-236).
gctcttgtctgcagaaagt

SEQ ID NO: 422390 - DNA, 19 bp, Homo sapiens
  siRNA target sequence for MGC35179 (NM_153230.1,238-256).
gaaccagatgatgtattct

SEQ ID NO: 422391 - DNA, 19 bp, Homo sapiens
  siRNA target sequence for MGC35179 (NM_153230.1,304-322).
cagggtacatgcatctgaa

SEQ ID NO: 422392 - DNA, 19 bp, Homo sapiens
  siRNA target sequence for MGC35179 (NM_153230.1,307-325).
ggtacatgcatctgaagtt

SEQ ID NO: 422393 - DNA, 19 bp, Homo sapiens
  siRNA target sequence for MGC35179 (NM_153230.1,328-346).
gtcagctgtttggtatgtt

SEQ ID NO: 422394 - DNA, 19 bp, Homo sapiens
  siRNA target sequence for MGC35179 (NM_153230.1,330-348).
cagctgtttggtatgttaa

SEQ ID NO: 422395 - DNA, 19 bp, Homo sapiens
  siRNA target sequence for MGC35179 (NM_153230.1,332-350).
gctgtttggtatgttaaga

SEQ ID NO: 422396 - DNA, 19 bp, Homo sapiens
  siRNA target sequence for MGC35179 (NM_153230.1,333-351).
ctgtttggtatgttaagaa

SEQ ID NO: 422397 - DNA, 19 bp, Homo sapiens
  siRNA target sequence for MGC35179 (NM_153230.1,335-353).
gtttggtatgttaagaagt

SEQ ID NO: 422398 - DNA, 19 bp, Homo sapiens
  siRNA target sequence for MGC35179 (NM_153230.1,404-422).
gctgtcttgaccaagaagt

SEQ ID NO: 422399 - DNA, 19 bp, Homo sapiens
  siRNA target sequence for MGC35179 (NM_153230.1,466-484).
caacaaccgtctgaaatct

SEQ ID NO: 422400 - DNA, 19 bp, Homo sapiens
  siRNA target sequence for MGC35179 (NM_153230.1,531-549).
gcatcaggagctcattcat

SEQ ID NO: 422401 - DNA, 19 bp, Homo sapiens
  siRNA target sequence for MGC35179 (NM_153230.1,590-608).
ctggattatctcaacctaa

SEQ ID NO: 422402 - DNA, 19 bp, Homo sapiens
  siRNA target sequence for MGC35179 (NM_153230.1,692-710).
ctcaacatcgaggactatt

SEQ ID NO: 422403 - DNA, 19 bp, Homo sapiens
  siRNA target sequence for MGC35179 (NM_153230.1,785-803).
ctgaacctcaactacaact

SEQ ID NO: 422404 - DNA, 19 bp, Homo sapiens
  siRNA target sequence for MGC35179 (NM_153230.1,810-828).
ccgacgagctgcttgagaa

SEQ ID NO: 422405 - DNA, 19 bp, Homo sapiens
  siRNA target sequence for MGC35179 (NM_153230.1,851-869).
ctccggaccatcaacatca

SEQ ID NO: 422406 - DNA, 19 bp, Homo sapiens
  siRNA target sequence for MGC35179 (NM_153230.1,853-871).
ccggaccatcaacatcaaa

SEQ ID NO: 422407 - DNA, 19 bp, Homo sapiens
  siRNA target sequence for MGC35179 (NM_153230.1,854-872).
cggaccatcaacatcaaat

SEQ ID NO: 422408 - DNA, 19 bp, Homo sapiens
  siRNA target sequence for MGC35179 (NM_153230.1,1075-1093).
gagacccactctgatagat

SEQ ID NO: 422409 - DNA, 19 bp, Homo sapiens
  siRNA target sequence for MGC35179 (NM_153230.1,1077-1095).
gacccactctgatagatct

SEQ ID NO: 422410 - DNA, 19 bp, Homo sapiens
  siRNA target sequence for MGC35179 (NM_153230.1,1191-1209).
cctgcaggaagttgtttta

SEQ ID NO: 422411 - DNA, 19 bp, Homo sapiens
  siRNA target sequence for MGC35179 (NM_153230.1,1281-1299).
gtgccctgcgtgtattcaa

SEQ ID NO: 422412 - DNA, 19 bp, Homo sapiens
  siRNA target sequence for MGC35179 (NM_153230.1,1292-1310).
gtattcaaggcgagaattt

SEQ ID NO: 422413 - DNA, 19 bp, Homo sapiens
  siRNA target sequence for MGC35179 (NM_153230.1,1297-1315).
caaggcgagaatttataca

SEQ ID NO: 422414 - DNA, 19 bp, Homo sapiens
  siRNA target sequence for MGC35179 (NM_153230.1,1318-1336).
cagatatgagacgaatgaa

SEQ ID NO: 422415 - DNA, 19 bp, Homo sapiens
  siRNA target sequence for MGC35179 (NM_153230.1,1355-1373).
gaaatttacaggaagtaca

SEQ ID NO: 422416 - DNA, 19 bp, Homo sapiens
  siRNA target sequence for MGC35179 (NM_153230.1,1374-1392).
gaaagctgatcgaatcaga

SEQ ID NO: 422417 - DNA, 19 bp, Homo sapiens
  siRNA target sequence for MGC35179 (NM_153230.1,1384-1402).
cgaatcagagcttagctat

SEQ ID NO: 422418 - DNA, 19 bp, Homo sapiens
  siRNA target sequence for MGC35179 (NM_153230.1,1385-1403).
gaatcagagcttagctatt

SEQ ID NO: 422419 - DNA, 19 bp, Homo sapiens
  siRNA target sequence for MGC35179 (NM_153230.1,1391-1409).
gagcttagctattttgtca

SEQ ID NO: 422420 - DNA, 19 bp, Homo sapiens
  siRNA target sequence for MGC35179 (NM_153230.1,1398-1416).
gctattttgtcatcgttta

SEQ ID NO: 422421 - DNA, 19 bp, Homo sapiens
  siRNA target sequence for FLJ36445 (NM_153233.1,101-119).
gcctctgggccctagactt

SEQ ID NO: 422422 - DNA, 19 bp, Homo sapiens
  siRNA target sequence for FLJ36445 (NM_153233.1,342-360).
ccagctgggggcaaacact

SEQ ID NO: 422423 - DNA, 19 bp, Homo sapiens
  siRNA target sequence for FLJ36445 (NM_153233.1,1141-1159).
gccccatctcaaattcact

SEQ ID NO: 422424 - DNA, 19 bp, Homo sapiens
  siRNA target sequence for FLJ25534 (NM_153234.3,215-233).
gagatccggctctagtctt

SEQ ID NO: 422425 - DNA, 19 bp, Homo sapiens
  siRNA target sequence for FLJ25534 (NM_153234.3,313-331).
ggtgtggtggtctatgagt

SEQ ID NO: 422426 - DNA, 19 bp, Homo sapiens
  siRNA target sequence for FLJ25534 (NM_153234.3,429-447).
caggcgggatgcagctaaa

SEQ ID NO: 422427 - DNA, 19 bp, Homo sapiens
  siRNA target sequence for FLJ25534 (NM_153234.3,443-461).
ctaaagtggccctgatcaa

SEQ ID NO: 422428 - DNA, 19 bp, Homo sapiens
  siRNA target sequence for FLJ25534 (NM_153234.3,488-506).
gcaggatcaccaaggaatt

SEQ ID NO: 422429 - DNA, 19 bp, Homo sapiens
  siRNA target sequence for FLJ25534 (NM_153234.3,540-558).
caccagcggcaccttagat

SEQ ID NO: 422430 - DNA, 19 bp, Homo sapiens
  siRNA target sequence for FLJ25534 (NM_153234.3,543-561).
cagcggcaccttagatgat

SEQ ID NO: 422431 - DNA, 19 bp, Homo sapiens
  siRNA target sequence for FLJ25534 (NM_153234.3,581-599).
gtgttggggcctatcacta

SEQ ID NO: 422432 - DNA, 19 bp, Homo sapiens
  siRNA target sequence for FLJ25534 (NM_153234.3,691-709).
gcccttcgtgaaacaaagt

SEQ ID NO: 422433 - DNA, 19 bp, Homo sapiens
  siRNA target sequence for FLJ25534 (NM_153234.3,693-711).
ccttcgtgaaacaaagtgt

SEQ ID NO: 422434 - DNA, 19 bp, Homo sapiens
  siRNA target sequence for FLJ25534 (NM_153234.3,694-712).
cttcgtgaaacaaagtgtt

SEQ ID NO: 422435 - DNA, 19 bp, Homo sapiens
  siRNA target sequence for FLJ25534 (NM_153234.3,729-747).
ctcctactattctcagtat

SEQ ID NO: 422436 - DNA, 19 bp, Homo sapiens
  siRNA target sequence for FLJ25534 (NM_153234.3,740-758).
ctcagtattctctagatga

SEQ ID NO: 422437 - DNA, 19 bp, Homo sapiens
  siRNA target sequence for FLJ25534 (NM_153234.3,801-819).
gcgggactcaccaggaatt

SEQ ID NO: 422438 - DNA, 19 bp, Homo sapiens
  siRNA target sequence for FLJ25534 (NM_153234.3,803-821).
gggactcaccaggaattgt

SEQ ID NO: 422439 - DNA, 19 bp, Homo sapiens
  siRNA target sequence for FLJ25534 (NM_153234.3,867-885).
gaaagcaggacaagaacta

SEQ ID NO: 422440 - DNA, 19 bp, Homo sapiens
  siRNA target sequence for FLJ25534 (NM_153234.3,875-893).
gacaagaactacggtttta

SEQ ID NO: 422441 - DNA, 19 bp, Homo sapiens
  siRNA target sequence for FLJ25534 (NM_153234.3,877-895).
caagaactacggttttaca

SEQ ID NO: 422442 - DNA, 19 bp, Homo sapiens
  siRNA target sequence for FLJ25534 (NM_153234.3,956-974).
cctcacccagtgatgatca

SEQ ID NO: 422443 - DNA, 19 bp, Homo sapiens
  siRNA target sequence for FLJ25534 (NM_153234.3,988-1006).
gccctgtgtggctatcact

SEQ ID NO: 422444 - DNA, 19 bp, Homo sapiens
  siRNA target sequence for hIAN7 (NM_153236.2,145-163).
cgttctggtagggaaaact

SEQ ID NO: 422445 - DNA, 19 bp, Homo sapiens
  siRNA target sequence for hIAN7 (NM_153236.2,205-223).
ggaaatctttgattctaga

SEQ ID NO: 422446 - DNA, 19 bp, Homo sapiens
  siRNA target sequence for hIAN7 (NM_153236.2,279-297).
ggagagaccttcttgttgt

SEQ ID NO: 422447 - DNA, 19 bp, Homo sapiens
  siRNA target sequence for hIAN7 (NM_153236.2,280-298).
gagagaccttcttgttgta

SEQ ID NO: 422448 - DNA, 19 bp, Homo sapiens
  siRNA target sequence for hIAN7 (NM_153236.2,488-506).
cacatggtcatcttgttca

SEQ ID NO: 422449 - DNA, 19 bp, Homo sapiens
  siRNA target sequence for hIAN7 (NM_153236.2,499-517).
cttgttcactcgcaaagaa

SEQ ID NO: 422450 - DNA, 19 bp, Homo sapiens
  siRNA target sequence for hIAN7 (NM_153236.2,557-575).
gcggatgtgggcctaaaaa

SEQ ID NO: 422451 - DNA, 19 bp, Homo sapiens
  siRNA target sequence for hIAN7 (NM_153236.2,696-714).
gcaacgaaggggcttactt

SEQ ID NO: 422452 - DNA, 19 bp, Homo sapiens
  siRNA target sequence for hIAN7 (NM_153236.2,697-715).
caacgaaggggcttacttt

SEQ ID NO: 422453 - DNA, 19 bp, Homo sapiens
  siRNA target sequence for hIAN7 (NM_153236.2,700-718).
cgaaggggcttacttttct

SEQ ID NO: 422454 - DNA, 19 bp, Homo sapiens
  siRNA target sequence for hIAN7 (NM_153236.2,708-726).
cttacttttctgatgacat

SEQ ID NO: 422455 - DNA, 19 bp, Homo sapiens
  siRNA target sequence for hIAN7 (NM_153236.2,755-773).
caacgggaagaggttttga

SEQ ID NO: 422456 - DNA, 19 bp, Homo sapiens
  siRNA target sequence for hIAN7 (NM_153236.2,815-833).
gtagaagaggataagcata

SEQ ID NO: 422457 - DNA, 19 bp, Homo sapiens
  siRNA target sequence for hIAN7 (NM_153236.2,981-999).
ggtttttgtcgaaatgtaa

SEQ ID NO: 422458 - DNA, 19 bp, Homo sapiens
  siRNA target sequence for C9orf71 (NM_153237.1,139-157).
cctggggctccatattcga

SEQ ID NO: 422459 - DNA, 19 bp, Homo sapiens
  siRNA target sequence for C9orf71 (NM_153237.1,169-187).
gcctgattgcggcctattt

SEQ ID NO: 422460 - DNA, 19 bp, Homo sapiens
  siRNA target sequence for C9orf71 (NM_153237.1,324-342).
gtagacaggccagactttt

SEQ ID NO: 422461 - DNA, 19 bp, Homo sapiens
  siRNA target sequence for C9orf71 (NM_153237.1,338-356).
cttttaccctccagcttat

SEQ ID NO: 422462 - DNA, 19 bp, Homo sapiens
  siRNA target sequence for C9orf71 (NM_153237.1,479-497).
ggccccaccatcttataga

SEQ ID NO: 422463 - DNA, 19 bp, Homo sapiens
  siRNA target sequence for C9orf71 (NM_153237.1,481-499).
ccccaccatcttatagaga

SEQ ID NO: 422464 - DNA, 19 bp, Homo sapiens
  siRNA target sequence for MGC22001 (NM_153238.1,305-323).
ctcgctgcgtcctaaccaa

SEQ ID NO: 422465 - DNA, 19 bp, Homo sapiens
  siRNA target sequence for MGC22001 (NM_153238.1,307-325).
cgctgcgtcctaaccaaat

SEQ ID NO: 422466 - DNA, 19 bp, Homo sapiens
  siRNA target sequence for KIAA1924 (NM_153239.2,587-605).
gtctctgccgccaactaca

SEQ ID NO: 422467 - DNA, 19 bp, Homo sapiens
  siRNA target sequence for KIAA1924 (NM_153239.2,645-663).
cgggacgatacctgtatgt

SEQ ID NO: 422468 - DNA, 19 bp, Homo sapiens
  siRNA target sequence for KIAA1924 (NM_153239.2,731-749).
gtcatccgtgtgtctttct

SEQ ID NO: 422469 - DNA, 19 bp, Homo sapiens
  siRNA target sequence for KIAA1924 (NM_153239.2,915-933).
ggtgctacggccatctcaa

SEQ ID NO: 422470 - DNA, 19 bp, Homo sapiens
  siRNA target sequence for KIAA1924 (NM_153239.2,1116-1134).
caagtgagagcttgaaagt

SEQ ID NO: 422471 - DNA, 19 bp, Homo sapiens
  siRNA target sequence for KIAA1924 (NM_153239.2,1136-1154).
ccttccaagccgattgaga

SEQ ID NO: 422472 - DNA, 19 bp, Homo sapiens
  siRNA target sequence for NPHP3 (NM_153240.3,461-479).
cgaactgcaggcacttcaa

SEQ ID NO: 422473 - DNA, 19 bp, Homo sapiens
  siRNA target sequence for NPHP3 (NM_153240.3,468-486).
caggcacttcaaaaaacgt

SEQ ID NO: 422474 - DNA, 19 bp, Homo sapiens
  siRNA target sequence for NPHP3 (NM_153240.3,514-532).
gtgctttagaagcgaaata

SEQ ID NO: 422475 - DNA, 19 bp, Homo sapiens
  siRNA target sequence for NPHP3 (NM_153240.3,517-535).
ctttagaagcgaaatacca

SEQ ID NO: 422476 - DNA, 19 bp, Homo sapiens
  siRNA target sequence for NPHP3 (NM_153240.3,681-699).
gctcagggtatccaagtat

SEQ ID NO: 422477 - DNA, 19 bp, Homo sapiens
  siRNA target sequence for NPHP3 (NM_153240.3,682-700).
ctcagggtatccaagtatt

SEQ ID NO: 422478 - DNA, 19 bp, Homo sapiens
  siRNA target sequence for NPHP3 (NM_153240.3,753-771).
ggaacccaatgtgaatatt

SEQ ID NO: 422479 - DNA, 19 bp, Homo sapiens
  siRNA target sequence for NPHP3 (NM_153240.3,853-871).
cccatagttctatagatgt

SEQ ID NO: 422480 - DNA, 19 bp, Homo sapiens
  siRNA target sequence for NPHP3 (NM_153240.3,876-894).
ggaccctttgcaaatgtta

SEQ ID NO: 422481 - DNA, 19 bp, Homo sapiens
  siRNA target sequence for NPHP3 (NM_153240.3,1012-1030).
ctgagatggatcttttcct

SEQ ID NO: 422482 - DNA, 19 bp, Homo sapiens
  siRNA target sequence for NPHP3 (NM_153240.3,1035-1053).
gactattcacctaaactta

SEQ ID NO: 422483 - DNA, 19 bp, Homo sapiens
  siRNA target sequence for NPHP3 (NM_153240.3,1090-1108).
ctgtttattttccaataga

SEQ ID NO: 422484 - DNA, 19 bp, Homo sapiens
  siRNA target sequence for NPHP3 (NM_153240.3,1149-1167).
gagaaaagttctttagtta

SEQ ID NO: 422485 - DNA, 19 bp, Homo sapiens
  siRNA target sequence for NPHP3 (NM_153240.3,1242-1260).
ggaaaacctcgattaatct

SEQ ID NO: 422486 - DNA, 19 bp, Homo sapiens
  siRNA target sequence for NPHP3 (NM_153240.3,1293-1311).
gactctgtccagcaattga

SEQ ID NO: 422487 - DNA, 19 bp, Homo sapiens
  siRNA target sequence for NPHP3 (NM_153240.3,1295-1313).
ctctgtccagcaattgatt

SEQ ID NO: 422488 - DNA, 19 bp, Homo sapiens
  siRNA target sequence for NPHP3 (NM_153240.3,1301-1319).
ccagcaattgattgatcaa

SEQ ID NO: 422489 - DNA, 19 bp, Homo sapiens
  siRNA target sequence for NPHP3 (NM_153240.3,1304-1322).
gcaattgattgatcaagtt

SEQ ID NO: 422490 - DNA, 19 bp, Homo sapiens
  siRNA target sequence for NPHP3 (NM_153240.3,1305-1323).
caattgattgatcaagttt

SEQ ID NO: 422491 - DNA, 19 bp, Homo sapiens
  siRNA target sequence for NPHP3 (NM_153240.3,1452-1470).
gacttggagactaaggatt

SEQ ID NO: 422492 - DNA, 19 bp, Homo sapiens
  siRNA target sequence for NPHP3 (NM_153240.3,1472-1490).
gggcagtgaggattccatt

SEQ ID NO: 422493 - DNA, 19 bp, Homo sapiens
  siRNA target sequence for NPHP3 (NM_153240.3,1570-1588).
ctaattcagcccatgagtt

SEQ ID NO: 422494 - DNA, 19 bp, Homo sapiens
  siRNA target sequence for NPHP3 (NM_153240.3,1579-1597).
cccatgagttgggatttga

SEQ ID NO: 422495 - DNA, 19 bp, Homo sapiens
  siRNA target sequence for NPHP3 (NM_153240.3,1607-1625).
ccaacgccttaatgatcta

SEQ ID NO: 422496 - DNA, 19 bp, Homo sapiens
  siRNA target sequence for NPHP3 (NM_153240.3,1682-1700).
gaagtctcttcttttatca

SEQ ID NO: 422497 - DNA, 19 bp, Homo sapiens
  siRNA target sequence for NPHP3 (NM_153240.3,1705-1723).
ggattcaattacaacagaa

SEQ ID NO: 422498 - DNA, 19 bp, Homo sapiens
  siRNA target sequence for NPHP3 (NM_153240.3,1730-1748).
ccccaacacactgattctt

SEQ ID NO: 422499 - DNA, 19 bp, Homo sapiens
  siRNA target sequence for NPHP3 (NM_153240.3,1731-1749).
cccaacacactgattcttt

SEQ ID NO: 422500 - DNA, 19 bp, Homo sapiens
  siRNA target sequence for NPHP3 (NM_153240.3,1785-1803).
gagtcctccttgattatta

SEQ ID NO: 422501 - DNA, 19 bp, Homo sapiens
  siRNA target sequence for NPHP3 (NM_153240.3,1796-1814).
gattattaaacgactaact

SEQ ID NO: 422502 - DNA, 19 bp, Homo sapiens
  siRNA target sequence for NPHP3 (NM_153240.3,1806-1824).
cgactaactctaaagttga

SEQ ID NO: 422503 - DNA, 19 bp, Homo sapiens
  siRNA target sequence for NPHP3 (NM_153240.3,1888-1906).
cacgttggctggaaaaact

SEQ ID NO: 422504 - DNA, 19 bp, Homo sapiens
  siRNA target sequence for NPHP3 (NM_153240.3,1890-1908).
cgttggctggaaaaactct

SEQ ID NO: 422505 - DNA, 19 bp, Homo sapiens
  siRNA target sequence for NPHP3 (NM_153240.3,1934-1952).
catcgttattgattctata

SEQ ID NO: 422506 - DNA, 19 bp, Homo sapiens
  siRNA target sequence for NPHP3 (NM_153240.3,1937-1955).
cgttattgattctatagat

SEQ ID NO: 422507 - DNA, 19 bp, Homo sapiens
  siRNA target sequence for NPHP3 (NM_153240.3,1998-2016).
ccactgccagtgaatgtaa

SEQ ID NO: 422508 - DNA, 19 bp, Homo sapiens
  siRNA target sequence for NPHP3 (NM_153240.3,2003-2021).
gccagtgaatgtaagagta

SEQ ID NO: 422509 - DNA, 19 bp, Homo sapiens
  siRNA target sequence for NPHP3 (NM_153240.3,2004-2022).
ccagtgaatgtaagagtaa

SEQ ID NO: 422510 - DNA, 19 bp, Homo sapiens
  siRNA target sequence for NPHP3 (NM_153240.3,2131-2149).
gccactctgtagacattaa

SEQ ID NO: 422511 - DNA, 19 bp, Homo sapiens
  siRNA target sequence for NPHP3 (NM_153240.3,2254-2272).
ggagagcaggcaatttaga

SEQ ID NO: 422512 - DNA, 19 bp, Homo sapiens
  siRNA target sequence for NPHP3 (NM_153240.3,2257-2275).
gagcaggcaatttagataa

SEQ ID NO: 422513 - DNA, 19 bp, Homo sapiens
  siRNA target sequence for NPHP3 (NM_153240.3,2294-2312).
ccagtgtcaagatactctt

SEQ ID NO: 422514 - DNA, 19 bp, Homo sapiens
  siRNA target sequence for NPHP3 (NM_153240.3,2295-2313).
cagtgtcaagatactcttt

SEQ ID NO: 422515 - DNA, 19 bp, Homo sapiens
  siRNA target sequence for NPHP3 (NM_153240.3,2299-2317).
gtcaagatactctttcatt

SEQ ID NO: 422516 - DNA, 19 bp, Homo sapiens
  siRNA target sequence for NPHP3 (NM_153240.3,2391-2409).
ctctgccttgtcaatgtta

SEQ ID NO: 422517 - DNA, 19 bp, Homo sapiens
  siRNA target sequence for NPHP3 (NM_153240.3,2393-2411).
ctgccttgtcaatgttagt

SEQ ID NO: 422518 - DNA, 19 bp, Homo sapiens
  siRNA target sequence for NPHP3 (NM_153240.3,2414-2432).
caatggtgtgagtgaatca

SEQ ID NO: 422519 - DNA, 19 bp, Homo sapiens
  siRNA target sequence for NPHP3 (NM_153240.3,2431-2449).
cagaactgatggaactcta

SEQ ID NO: 422520 - DNA, 19 bp, Homo sapiens
  siRNA target sequence for NPHP3 (NM_153240.3,2504-2522).
gtgtttgttgacttatgga

SEQ ID NO: 422521 - DNA, 19 bp, Homo sapiens
  siRNA target sequence for NPHP3 (NM_153240.3,2521-2539).
gatgtggcttgcttaggtt

SEQ ID NO: 422522 - DNA, 19 bp, Homo sapiens
  siRNA target sequence for NPHP3 (NM_153240.3,2528-2546).
cttgcttaggtttcaacat

SEQ ID NO: 422523 - DNA, 19 bp, Homo sapiens
  siRNA target sequence for NPHP3 (NM_153240.3,2580-2598).
ctggaaggccccactgtta

SEQ ID NO: 422524 - DNA, 19 bp, Homo sapiens
  siRNA target sequence for NPHP3 (NM_153240.3,2582-2600).
ggaaggccccactgttact

SEQ ID NO: 422525 - DNA, 19 bp, Homo sapiens
  siRNA target sequence for NPHP3 (NM_153240.3,2583-2601).
gaaggccccactgttactt

SEQ ID NO: 422526 - DNA, 19 bp, Homo sapiens
  siRNA target sequence for NPHP3 (NM_153240.3,2589-2607).
cccactgttacttcttcat

SEQ ID NO: 422527 - DNA, 19 bp, Homo sapiens
  siRNA target sequence for NPHP3 (NM_153240.3,2590-2608).
ccactgttacttcttcata

SEQ ID NO: 422528 - DNA, 19 bp, Homo sapiens
  siRNA target sequence for NPHP3 (NM_153240.3,2727-2745).
gattgccttcttaatctct

SEQ ID NO: 422529 - DNA, 19 bp, Homo sapiens
  siRNA target sequence for NPHP3 (NM_153240.3,2750-2768).
gtctcaaaacctttataaa

SEQ ID NO: 422530 - DNA, 19 bp, Homo sapiens
  siRNA target sequence for NPHP3 (NM_153240.3,2836-2854).
cagaatacttcgattcatt

SEQ ID NO: 422531 - DNA, 19 bp, Homo sapiens
  siRNA target sequence for NPHP3 (NM_153240.3,2838-2856).
gaatacttcgattcattga

SEQ ID NO: 422532 - DNA, 19 bp, Homo sapiens
  siRNA target sequence for NPHP3 (NM_153240.3,2851-2869).
cattgaagcagtatgagaa

SEQ ID NO: 422533 - DNA, 19 bp, Homo sapiens
  siRNA target sequence for NPHP3 (NM_153240.3,2875-2893).
gcgaaggcgaggacaacat

SEQ ID NO: 422534 - DNA, 19 bp, Homo sapiens
  siRNA target sequence for NPHP3 (NM_153240.3,2880-2898).
ggcgaggacaacatgagtt

SEQ ID NO: 422535 - DNA, 19 bp, Homo sapiens
  siRNA target sequence for NPHP3 (NM_153240.3,2885-2903).
ggacaacatgagttgctta

SEQ ID NO: 422536 - DNA, 19 bp, Homo sapiens
  siRNA target sequence for NPHP3 (NM_153240.3,2894-2912).
gagttgcttagctgatctt

SEQ ID NO: 422537 - DNA, 19 bp, Homo sapiens
  siRNA target sequence for NPHP3 (NM_153240.3,2899-2917).
gcttagctgatctttatga

SEQ ID NO: 422538 - DNA, 19 bp, Homo sapiens
  siRNA target sequence for NPHP3 (NM_153240.3,2920-2938).
ccttggggcgatttctcaa

SEQ ID NO: 422539 - DNA, 19 bp, Homo sapiens
  siRNA target sequence for NPHP3 (NM_153240.3,2956-2974).
gtcaggccatagtaccttt

SEQ ID NO: 422540 - DNA, 19 bp, Homo sapiens
  siRNA target sequence for NPHP3 (NM_153240.3,2975-2993).
gcagaggtctttagagatt

SEQ ID NO: 422541 - DNA, 19 bp, Homo sapiens
  siRNA target sequence for NPHP3 (NM_153240.3,2990-3008).
gattcgagaaacagcttta

SEQ ID NO: 422542 - DNA, 19 bp, Homo sapiens
  siRNA target sequence for NPHP3 (NM_153240.3,3041-3059).
ccaccaactagcaagtgta

SEQ ID NO: 422543 - DNA, 19 bp, Homo sapiens
  siRNA target sequence for NPHP3 (NM_153240.3,3042-3060).
caccaactagcaagtgtat

SEQ ID NO: 422544 - DNA, 19 bp, Homo sapiens
  siRNA target sequence for NPHP3 (NM_153240.3,3062-3080).
cgtgcagtggaagaagttt

SEQ ID NO: 422545 - DNA, 19 bp, Homo sapiens
  siRNA target sequence for NPHP3 (NM_153240.3,3082-3100).
gcaatgcagaacaactgta

SEQ ID NO: 422546 - DNA, 19 bp, Homo sapiens
  siRNA target sequence for NPHP3 (NM_153240.3,3083-3101).
caatgcagaacaactgtat

SEQ ID NO: 422547 - DNA, 19 bp, Homo sapiens
  siRNA target sequence for NPHP3 (NM_153240.3,3135-3153).
ggtgcggaccatccatata

SEQ ID NO: 422548 - DNA, 19 bp, Homo sapiens
  siRNA target sequence for NPHP3 (NM_153240.3,3168-3186).
gaagcacttgcaactttgt

SEQ ID NO: 422549 - DNA, 19 bp, Homo sapiens
  siRNA target sequence for NPHP3 (NM_153240.3,3178-3196).
caactttgtaccagaaaca

SEQ ID NO: 422550 - DNA, 19 bp, Homo sapiens
  siRNA target sequence for NPHP3 (NM_153240.3,3281-3299).
cggatttgcccttttacgt

SEQ ID NO: 422551 - DNA, 19 bp, Homo sapiens
  siRNA target sequence for NPHP3 (NM_153240.3,3282-3300).
ggatttgcccttttacgta

SEQ ID NO: 422552 - DNA, 19 bp, Homo sapiens
  siRNA target sequence for NPHP3 (NM_153240.3,3304-3322).
gggctttacagttagaaga

SEQ ID NO: 422553 - DNA, 19 bp, Homo sapiens
  siRNA target sequence for NPHP3 (NM_153240.3,3312-3330).
cagttagaagagcttacat

SEQ ID NO: 422554 - DNA, 19 bp, Homo sapiens
  siRNA target sequence for NPHP3 (NM_153240.3,3314-3332).
gttagaagagcttacatta

SEQ ID NO: 422555 - DNA, 19 bp, Homo sapiens
  siRNA target sequence for NPHP3 (NM_153240.3,3355-3373).
ctcggaccctcaatgaact

SEQ ID NO: 422556 - DNA, 19 bp, Homo sapiens
  siRNA target sequence for NPHP3 (NM_153240.3,3376-3394).
gtgttctctactatcttca

SEQ ID NO: 422557 - DNA, 19 bp, Homo sapiens
  siRNA target sequence for NPHP3 (NM_153240.3,3419-3437).
gtttctgaagcgttcctta

SEQ ID NO: 422558 - DNA, 19 bp, Homo sapiens
  siRNA target sequence for NPHP3 (NM_153240.3,3423-3441).
ctgaagcgttccttagaaa

SEQ ID NO: 422559 - DNA, 19 bp, Homo sapiens
  siRNA target sequence for NPHP3 (NM_153240.3,3481-3499).
ctcagtctttgaataatct

SEQ ID NO: 422560 - DNA, 19 bp, Homo sapiens
  siRNA target sequence for NPHP3 (NM_153240.3,3621-3639).
catcttgccatcttgtata

SEQ ID NO: 422561 - DNA, 19 bp, Homo sapiens
  siRNA target sequence for NPHP3 (NM_153240.3,3659-3677).
caaagctgtacctttgtat

SEQ ID NO: 422562 - DNA, 19 bp, Homo sapiens
  siRNA target sequence for NPHP3 (NM_153240.3,3713-3731).
cccaaagcaccctagtgta

SEQ ID NO: 422563 - DNA, 19 bp, Homo sapiens
  siRNA target sequence for NPHP3 (NM_153240.3,3743-3761).
ggtgaacttagctgttctt

SEQ ID NO: 422564 - DNA, 19 bp, Homo sapiens
  siRNA target sequence for NPHP3 (NM_153240.3,3981-3999).
gctccttcacgccattcat

SEQ ID NO: 422565 - DNA, 19 bp, Homo sapiens
  siRNA target sequence for NPHP3 (NM_153240.3,4003-4021).
gtggagacacgtttagctt

SEQ ID NO: 422566 - DNA, 19 bp, Homo sapiens
  siRNA target sequence for NPHP3 (NM_153240.3,4005-4023).
ggagacacgtttagcttaa

SEQ ID NO: 422567 - DNA, 19 bp, Homo sapiens
  siRNA target sequence for NPHP3 (NM_153240.3,4010-4028).
cacgtttagcttaaaaaca

SEQ ID NO: 422568 - DNA, 19 bp, Homo sapiens
  siRNA target sequence for MGC42157 (NM_153241.1,89-107).
ggcccctcaagggtaaagt

SEQ ID NO: 422569 - DNA, 19 bp, Homo sapiens
  siRNA target sequence for MGC42157 (NM_153241.1,332-350).
catgttgtacagaactact

SEQ ID NO: 422570 - DNA, 19 bp, Homo sapiens
  siRNA target sequence for MGC42157 (NM_153241.1,335-353).
gttgtacagaactacttct

SEQ ID NO: 422571 - DNA, 19 bp, Homo sapiens
  siRNA target sequence for MGC42157 (NM_153241.1,346-364).
ctacttctcaaatcactat

SEQ ID NO: 422572 - DNA, 19 bp, Homo sapiens
  siRNA target sequence for MGC42157 (NM_153241.1,352-370).
ctcaaatcactattcacat

SEQ ID NO: 422573 - DNA, 19 bp, Homo sapiens
  siRNA target sequence for MGC35468 (NM_153244.1,299-317).
caccgcgaaaatcaagata

SEQ ID NO: 422574 - DNA, 19 bp, Homo sapiens
  siRNA target sequence for MGC35468 (NM_153244.1,301-319).
ccgcgaaaatcaagataaa

SEQ ID NO: 422575 - DNA, 19 bp, Homo sapiens
  siRNA target sequence for MGC35468 (NM_153244.1,349-367).
gcctatgggcaataatgca

SEQ ID NO: 422576 - DNA, 19 bp, Homo sapiens
  siRNA target sequence for MGC35468 (NM_153244.1,358-376).
caataatgcagggaatctt

SEQ ID NO: 422577 - DNA, 19 bp, Homo sapiens
  siRNA target sequence for MGC35468 (NM_153244.1,374-392).
cttgagcccgaaaagagaa

SEQ ID NO: 422578 - DNA, 19 bp, Homo sapiens
  siRNA target sequence for MGC35468 (NM_153244.1,398-416).
gtaagagttgccttgagtt

SEQ ID NO: 422579 - DNA, 19 bp, Homo sapiens
  siRNA target sequence for MGC35468 (NM_153244.1,420-438).
caacagctgcacagaatat

SEQ ID NO: 422580 - DNA, 19 bp, Homo sapiens
  siRNA target sequence for MGC35468 (NM_153244.1,507-525).
gtcggggacaagtgatgaa

SEQ ID NO: 422581 - DNA, 19 bp, Homo sapiens
  siRNA target sequence for MGC35468 (NM_153244.1,552-570).
ggaatctggatctgttgat

SEQ ID NO: 422582 - DNA, 19 bp, Homo sapiens
  siRNA target sequence for MGC35468 (NM_153244.1,575-593).
ccttggccagaacttagaa

SEQ ID NO: 422583 - DNA, 19 bp, Homo sapiens
  siRNA target sequence for MGC35468 (NM_153244.1,602-620).
gttgcttctgacctaatga

SEQ ID NO: 422584 - DNA, 19 bp, Homo sapiens
  siRNA target sequence for MGC35468 (NM_153244.1,681-699).
cgtatctgcctccttttct

SEQ ID NO: 422585 - DNA, 19 bp, Homo sapiens
  siRNA target sequence for MGC35468 (NM_153244.1,706-724).
cctcactgttggttttgta

SEQ ID NO: 422586 - DNA, 19 bp, Homo sapiens
  siRNA target sequence for MGC35468 (NM_153244.1,707-725).
ctcactgttggttttgtat

SEQ ID NO: 422587 - DNA, 19 bp, Homo sapiens
  siRNA target sequence for MGC35468 (NM_153244.1,711-729).
ctgttggttttgtatccta

SEQ ID NO: 422588 - DNA, 19 bp, Homo sapiens
  siRNA target sequence for MGC45491 (NM_153246.1,948-966).
ccccgagcgcgagaagaaa

SEQ ID NO: 422589 - DNA, 19 bp, Homo sapiens
  siRNA target sequence for MGC45491 (NM_153246.1,949-967).
cccgagcgcgagaagaaat

SEQ ID NO: 422590 - DNA, 19 bp, Homo sapiens
  siRNA target sequence for MGC45491 (NM_153246.1,950-968).
ccgagcgcgagaagaaatt

SEQ ID NO: 422591 - DNA, 19 bp, Homo sapiens
  siRNA target sequence for MGC45491 (NM_153246.1,951-969).
cgagcgcgagaagaaatta

SEQ ID NO: 422592 - DNA, 19 bp, Homo sapiens
  siRNA target sequence for MGC45491 (NM_153246.1,986-1004).
cggctaatgcgctctaatt

SEQ ID NO: 422593 - DNA, 19 bp, Homo sapiens
  siRNA target sequence for MGC45491 (NM_153246.1,987-1005).
ggctaatgcgctctaatta

SEQ ID NO: 422594 - DNA, 19 bp, Homo sapiens
  siRNA target sequence for MGC14276 (NM_153248.2,320-338).
ctctggttgatgagttctt

SEQ ID NO: 422595 - DNA, 19 bp, Homo sapiens
  siRNA target sequence for FLJ25952 (NM_153251.1,24-42).
gcctaattttgcaaaatca

SEQ ID NO: 422596 - DNA, 19 bp, Homo sapiens
  siRNA target sequence for FLJ38568 (NM_153252.1,224-242).
caggcttcgaagacatagt

SEQ ID NO: 422597 - DNA, 19 bp, Homo sapiens
  siRNA target sequence for FLJ38568 (NM_153252.1,227-245).
gcttcgaagacatagtagt

SEQ ID NO: 422598 - DNA, 19 bp, Homo sapiens
  siRNA target sequence for FLJ38568 (NM_153252.1,231-249).
cgaagacatagtagtcaaa

SEQ ID NO: 422599 - DNA, 19 bp, Homo sapiens
  siRNA target sequence for FLJ38568 (NM_153252.1,235-253).
gacatagtagtcaaattga

SEQ ID NO: 422600 - DNA, 19 bp, Homo sapiens
  siRNA target sequence for FLJ38568 (NM_153252.1,293-311).
gatggccactgaaagagat

SEQ ID NO: 422601 - DNA, 19 bp, Homo sapiens
  siRNA target sequence for FLJ38568 (NM_153252.1,333-351).
gtggtggtcaatgaactaa

SEQ ID NO: 422602 - DNA, 19 bp, Homo sapiens
  siRNA target sequence for FLJ38568 (NM_153252.1,336-354).
gtggtcaatgaactaaata

SEQ ID NO: 422603 - DNA, 19 bp, Homo sapiens
  siRNA target sequence for FLJ38568 (NM_153252.1,348-366).
ctaaataatggggttagta

SEQ ID NO: 422604 - DNA, 19 bp, Homo sapiens
  siRNA target sequence for FLJ38568 (NM_153252.1,390-408).
gcaaaaggtgacatagaaa

SEQ ID NO: 422605 - DNA, 19 bp, Homo sapiens
  siRNA target sequence for FLJ38568 (NM_153252.1,440-458).
gccatcttacactactcaa

SEQ ID NO: 422606 - DNA, 19 bp, Homo sapiens
  siRNA target sequence for FLJ38568 (NM_153252.1,441-459).
ccatcttacactactcaaa

SEQ ID NO: 422607 - DNA, 19 bp, Homo sapiens
  siRNA target sequence for FLJ38568 (NM_153252.1,445-463).
cttacactactcaaaggaa

SEQ ID NO: 422608 - DNA, 19 bp, Homo sapiens
  siRNA target sequence for FLJ38568 (NM_153252.1,451-469).
ctactcaaaggaatgatta

SEQ ID NO: 422609 - DNA, 19 bp, Homo sapiens
  siRNA target sequence for FLJ38568 (NM_153252.1,507-525).
cgcaaacgtcagcatactt

SEQ ID NO: 422610 - DNA, 19 bp, Homo sapiens
  siRNA target sequence for FLJ38568 (NM_153252.1,508-526).
gcaaacgtcagcatactta

SEQ ID NO: 422611 - DNA, 19 bp, Homo sapiens
  siRNA target sequence for FLJ38568 (NM_153252.1,527-545).
ccaaacacggtccaacata

SEQ ID NO: 422612 - DNA, 19 bp, Homo sapiens
  siRNA target sequence for FLJ38568 (NM_153252.1,535-553).
ggtccaacatagagcataa

SEQ ID NO: 422613 - DNA, 19 bp, Homo sapiens
  siRNA target sequence for FLJ38568 (NM_153252.1,536-554).
gtccaacatagagcataat

SEQ ID NO: 422614 - DNA, 19 bp, Homo sapiens
  siRNA target sequence for FLJ38568 (NM_153252.1,539-557).
caacatagagcataattca

SEQ ID NO: 422615 - DNA, 19 bp, Homo sapiens
  siRNA target sequence for FLJ38568 (NM_153252.1,556-574).
cacaggcatcatgtcaaaa

SEQ ID NO: 422616 - DNA, 19 bp, Homo sapiens
  siRNA target sequence for FLJ38568 (NM_153252.1,558-576).
caggcatcatgtcaaaatt

SEQ ID NO: 422617 - DNA, 19 bp, Homo sapiens
  siRNA target sequence for FLJ38568 (NM_153252.1,588-606).
gaagactcagacagttctt

SEQ ID NO: 422618 - DNA, 19 bp, Homo sapiens
  siRNA target sequence for FLJ38568 (NM_153252.1,648-666).
gaggatcctgttgttgaat

SEQ ID NO: 422619 - DNA, 19 bp, Homo sapiens
  siRNA target sequence for FLJ38568 (NM_153252.1,688-706).
gtgactcatcaagtgaata

SEQ ID NO: 422620 - DNA, 19 bp, Homo sapiens
  siRNA target sequence for FLJ38568 (NM_153252.1,763-781).
gacagacaacacgtaaaat

SEQ ID NO: 422621 - DNA, 19 bp, Homo sapiens
  siRNA target sequence for FLJ38568 (NM_153252.1,765-783).
cagacaacacgtaaaatat

SEQ ID NO: 422622 - DNA, 19 bp, Homo sapiens
  siRNA target sequence for FLJ38568 (NM_153252.1,887-905).
gcctaatgaagaatggttt

SEQ ID NO: 422623 - DNA, 19 bp, Homo sapiens
  siRNA target sequence for FLJ38568 (NM_153252.1,909-927).
cctcagtggatcttggata

SEQ ID NO: 422624 - DNA, 19 bp, Homo sapiens
  siRNA target sequence for FLJ38568 (NM_153252.1,912-930).
cagtggatcttggatacta

SEQ ID NO: 422625 - DNA, 19 bp, Homo sapiens
  siRNA target sequence for FLJ38568 (NM_153252.1,914-932).
gtggatcttggatactata

SEQ ID NO: 422626 - DNA, 19 bp, Homo sapiens
  siRNA target sequence for FLJ38568 (NM_153252.1,934-952).
cccgacgttccccatttgt

SEQ ID NO: 422627 - DNA, 19 bp, Homo sapiens
  siRNA target sequence for FLJ38568 (NM_153252.1,943-961).
ccccatttgtcccacaaat

SEQ ID NO: 422628 - DNA, 19 bp, Homo sapiens
  siRNA target sequence for FLJ38568 (NM_153252.1,963-981).
ggagatgagcttatctatt

SEQ ID NO: 422629 - DNA, 19 bp, Homo sapiens
  siRNA target sequence for FLJ38568 (NM_153252.1,1005-1023).
gttcgggctgtaaggaaat

SEQ ID NO: 422630 - DNA, 19 bp, Homo sapiens
  siRNA target sequence for FLJ38568 (NM_153252.1,1008-1026).
cgggctgtaaggaaatcga

SEQ ID NO: 422631 - DNA, 19 bp, Homo sapiens
  siRNA target sequence for FLJ38568 (NM_153252.1,1009-1027).
gggctgtaaggaaatcgaa

SEQ ID NO: 422632 - DNA, 19 bp, Homo sapiens
  siRNA target sequence for FLJ38568 (NM_153252.1,1010-1028).
ggctgtaaggaaatcgaaa

SEQ ID NO: 422633 - DNA, 19 bp, Homo sapiens
  siRNA target sequence for FLJ38568 (NM_153252.1,1024-1042).
cgaaaatatacagtgttaa

SEQ ID NO: 422634 - DNA, 19 bp, Homo sapiens
  siRNA target sequence for FLJ38568 (NM_153252.1,1186-1204).
gagaatctttttccattaa

SEQ ID NO: 422635 - DNA, 19 bp, Homo sapiens
  siRNA target sequence for FLJ38568 (NM_153252.1,1198-1216).
ccattaagtatcatgacat

SEQ ID NO: 422636 - DNA, 19 bp, Homo sapiens
  siRNA target sequence for FLJ38568 (NM_153252.1,1235-1253).
ccttgtgctacatcagttt

SEQ ID NO: 422637 - DNA, 19 bp, Homo sapiens
  siRNA target sequence for FLJ38568 (NM_153252.1,1239-1257).
gtgctacatcagttttata

SEQ ID NO: 422638 - DNA, 19 bp, Homo sapiens
  siRNA target sequence for FLJ38568 (NM_153252.1,1279-1297).
ggcagattggtgatagatt

SEQ ID NO: 422639 - DNA, 19 bp, Homo sapiens
  siRNA target sequence for FLJ38568 (NM_153252.1,1290-1308).
gatagattccgcagtataa

SEQ ID NO: 422640 - DNA, 19 bp, Homo sapiens
  siRNA target sequence for FLJ38568 (NM_153252.1,1294-1312).
gattccgcagtataataga

SEQ ID NO: 422641 - DNA, 19 bp, Homo sapiens
  siRNA target sequence for FLJ38568 (NM_153252.1,1349-1367).
gccttttcaaccagagtat

SEQ ID NO: 422642 - DNA, 19 bp, Homo sapiens
  siRNA target sequence for FLJ38568 (NM_153252.1,1362-1380).
gagtatcctgatagttctt

SEQ ID NO: 422643 - DNA, 19 bp, Homo sapiens
  siRNA target sequence for FLJ38568 (NM_153252.1,1398-1416).
cactgggacaataatgaga

SEQ ID NO: 422644 - DNA, 19 bp, Homo sapiens
  siRNA target sequence for FLJ38568 (NM_153252.1,1497-1515).
gtctcccaggaagaattga

SEQ ID NO: 422645 - DNA, 19 bp, Homo sapiens
  siRNA target sequence for FLJ38568 (NM_153252.1,1514-1532).
gactgctttgctatacaaa

SEQ ID NO: 422646 - DNA, 19 bp, Homo sapiens
  siRNA target sequence for FLJ38568 (NM_153252.1,1652-1670).
cagtgcctaccccttgtat

SEQ ID NO: 422647 - DNA, 19 bp, Homo sapiens
  siRNA target sequence for FLJ38568 (NM_153252.1,1656-1674).
gcctaccccttgtattgta

SEQ ID NO: 422648 - DNA, 19 bp, Homo sapiens
  siRNA target sequence for FLJ38568 (NM_153252.1,1658-1676).
ctaccccttgtattgtact

SEQ ID NO: 422649 - DNA, 19 bp, Homo sapiens
  siRNA target sequence for FLJ38568 (NM_153252.1,1661-1679).
ccccttgtattgtactgta

SEQ ID NO: 422650 - DNA, 19 bp, Homo sapiens
  siRNA target sequence for FLJ38568 (NM_153252.1,1664-1682).
cttgtattgtactgtagtt

SEQ ID NO: 422651 - DNA, 19 bp, Homo sapiens
  siRNA target sequence for FLJ38568 (NM_153252.1,1689-1707).
ccaactgacctcaatacca

SEQ ID NO: 422652 - DNA, 19 bp, Homo sapiens
  siRNA target sequence for FLJ38568 (NM_153252.1,1690-1708).
caactgacctcaataccat

SEQ ID NO: 422653 - DNA, 19 bp, Homo sapiens
  siRNA target sequence for FLJ38568 (NM_153252.1,1706-1724).
catcaggcggagacttgaa

SEQ ID NO: 422654 - DNA, 19 bp, Homo sapiens
  siRNA target sequence for FLJ38568 (NM_153252.1,1717-1735).
gacttgaaaatcgctttta

SEQ ID NO: 422655 - DNA, 19 bp, Homo sapiens
  siRNA target sequence for FLJ38568 (NM_153252.1,1757-1775).
gtgggaggtacgctatatt

SEQ ID NO: 422656 - DNA, 19 bp, Homo sapiens
  siRNA target sequence for FLJ38568 (NM_153252.1,1759-1777).
gggaggtacgctatattga

SEQ ID NO: 422657 - DNA, 19 bp, Homo sapiens
  siRNA target sequence for FLJ38568 (NM_153252.1,1760-1778).
ggaggtacgctatattgaa

SEQ ID NO: 422658 - DNA, 19 bp, Homo sapiens
  siRNA target sequence for FLJ38568 (NM_153252.1,1763-1781).
ggtacgctatattgaacat

SEQ ID NO: 422659 - DNA, 19 bp, Homo sapiens
  siRNA target sequence for FLJ38568 (NM_153252.1,1764-1782).
gtacgctatattgaacata

SEQ ID NO: 422660 - DNA, 19 bp, Homo sapiens
  siRNA target sequence for FLJ38568 (NM_153252.1,1802-1820).
gccagacagtcctatagtt

SEQ ID NO: 422661 - DNA, 19 bp, Homo sapiens
  siRNA target sequence for FLJ38568 (NM_153252.1,1804-1822).
cagacagtcctatagttaa

SEQ ID NO: 422662 - DNA, 19 bp, Homo sapiens
  siRNA target sequence for FLJ38568 (NM_153252.1,1808-1826).
cagtcctatagttaaagca

SEQ ID NO: 422663 - DNA, 19 bp, Homo sapiens
  siRNA target sequence for FLJ38568 (NM_153252.1,1842-1860).
gatgtcttacttcgattta

SEQ ID NO: 422664 - DNA, 19 bp, Homo sapiens
  siRNA target sequence for FLJ38568 (NM_153252.1,1865-1883).
ggatcagagctgtactgat

SEQ ID NO: 422665 - DNA, 19 bp, Homo sapiens
  siRNA target sequence for FLJ38568 (NM_153252.1,1866-1884).
gatcagagctgtactgata

SEQ ID NO: 422666 - DNA, 19 bp, Homo sapiens
  siRNA target sequence for FLJ38568 (NM_153252.1,1881-1899).
gatatactggatacttata

SEQ ID NO: 422667 - DNA, 19 bp, Homo sapiens
  siRNA target sequence for FLJ38568 (NM_153252.1,1943-1961).
ggatacagaaattgttgat

SEQ ID NO: 422668 - DNA, 19 bp, Homo sapiens
  siRNA target sequence for FLJ38568 (NM_153252.1,1971-1989).
gacggtcctggtacttcat

SEQ ID NO: 422669 - DNA, 19 bp, Homo sapiens
  siRNA target sequence for FLJ38568 (NM_153252.1,2013-2031).
ggcagaagacagtctttaa

SEQ ID NO: 422670 - DNA, 19 bp, Homo sapiens
  siRNA target sequence for FLJ38568 (NM_153252.1,2058-2076).
caatgcaaggaactattga

SEQ ID NO: 422671 - DNA, 19 bp, Homo sapiens
  siRNA target sequence for FLJ38568 (NM_153252.1,2193-2211).
caacaagattcatctcttt

SEQ ID NO: 422672 - DNA, 19 bp, Homo sapiens
  siRNA target sequence for FLJ38568 (NM_153252.1,2269-2287).
ctttggaagcaggaaacta

SEQ ID NO: 422673 - DNA, 19 bp, Homo sapiens
  siRNA target sequence for C10orf47 (NM_153256.2,272-290).
cgctccagaagcttcactt

SEQ ID NO: 422674 - DNA, 19 bp, Homo sapiens
  siRNA target sequence for C10orf47 (NM_153256.2,739-757).
cgttatggcgcagaagatt

SEQ ID NO: 422675 - DNA, 19 bp, Homo sapiens
  siRNA target sequence for FLJ36812 (NM_153260.1,396-414).
gtggaaacggcgcagaaaa

SEQ ID NO: 422676 - DNA, 19 bp, Homo sapiens
  siRNA target sequence for FLJ36812 (NM_153260.1,398-416).
ggaaacggcgcagaaaact

SEQ ID NO: 422677 - DNA, 19 bp, Homo sapiens
  siRNA target sequence for FLJ36812 (NM_153260.1,565-583).
gcctctccctgaacaacaa

SEQ ID NO: 422678 - DNA, 19 bp, Homo sapiens
  siRNA target sequence for FLJ36812 (NM_153260.1,603-621).
gatgagatatgcaatctga

SEQ ID NO: 422679 - DNA, 19 bp, Homo sapiens
  siRNA target sequence for FLJ36812 (NM_153260.1,613-631).
gcaatctgaaaaaactaga

SEQ ID NO: 422680 - DNA, 19 bp, Homo sapiens
  siRNA target sequence for FLJ36812 (NM_153260.1,630-648).
gagacgctaagcctaaaca

SEQ ID NO: 422681 - DNA, 19 bp, Homo sapiens
  siRNA target sequence for FLJ36812 (NM_153260.1,635-653).
gctaagcctaaacaacaat

SEQ ID NO: 422682 - DNA, 19 bp, Homo sapiens
  siRNA target sequence for FLJ36812 (NM_153260.1,732-750).
gcattacctccccaacttt

SEQ ID NO: 422683 - DNA, 19 bp, Homo sapiens
  siRNA target sequence for FLJ36812 (NM_153260.1,771-789).
gtgatggatctctctaaga

SEQ ID NO: 422684 - DNA, 19 bp, Homo sapiens
  siRNA target sequence for FLJ36812 (NM_153260.1,788-806).
gaaccagattcgaagtata

SEQ ID NO: 422685 - DNA, 19 bp, Homo sapiens
  siRNA target sequence for FLJ36812 (NM_153260.1,791-809).
ccagattcgaagtatacct

SEQ ID NO: 422686 - DNA, 19 bp, Homo sapiens
  siRNA target sequence for FLJ36812 (NM_153260.1,889-907).
gctgtccacgccttaaaat

SEQ ID NO: 422687 - DNA, 19 bp, Homo sapiens
  siRNA target sequence for FLJ36812 (NM_153260.1,890-908).
ctgtccacgccttaaaatt

SEQ ID NO: 422688 - DNA, 19 bp, Homo sapiens
  siRNA target sequence for FLJ36812 (NM_153260.1,892-910).
gtccacgccttaaaattct

SEQ ID NO: 422689 - DNA, 19 bp, Homo sapiens
  siRNA target sequence for FLJ36812 (NM_153260.1,913-931).
gcctggaagagaattgtct

SEQ ID NO: 422690 - DNA, 19 bp, Homo sapiens
  siRNA target sequence for FLJ38101 (NM_153261.3,132-150).
gaggagacttactgaatat

SEQ ID NO: 422691 - DNA, 19 bp, Homo sapiens
  siRNA target sequence for FLJ38101 (NM_153261.3,137-155).
gacttactgaatatattca

SEQ ID NO: 422692 - DNA, 19 bp, Homo sapiens
  siRNA target sequence for FLJ38101 (NM_153261.3,182-200).
ggagaatgcttcttatagt

SEQ ID NO: 422693 - DNA, 19 bp, Homo sapiens
  siRNA target sequence for FLJ38101 (NM_153261.3,223-241).
ggtgcctggaactggttaa

SEQ ID NO: 422694 - DNA, 19 bp, Homo sapiens
  siRNA target sequence for FLJ38101 (NM_153261.3,224-242).
gtgcctggaactggttaat

SEQ ID NO: 422695 - DNA, 19 bp, Homo sapiens
  siRNA target sequence for FLJ38101 (NM_153261.3,256-274).
caaaaggtgtccttcttca

SEQ ID NO: 422696 - DNA, 19 bp, Homo sapiens
  siRNA target sequence for FLJ38101 (NM_153261.3,270-288).
cttcacatcattatggaat

SEQ ID NO: 422697 - DNA, 19 bp, Homo sapiens
  siRNA target sequence for FLJ38101 (NM_153261.3,289-307).
cacccatttttcaccatta

SEQ ID NO: 422698 - DNA, 19 bp, Homo sapiens
  siRNA target sequence for FLJ38101 (NM_153261.3,300-318).
caccattagctgtatcact

SEQ ID NO: 422699 - DNA, 19 bp, Homo sapiens
  siRNA target sequence for FLJ38101 (NM_153261.3,317-335).
ctctaataggcttgttctt

SEQ ID NO: 422700 - DNA, 19 bp, Homo sapiens
  siRNA target sequence for FLJ38101 (NM_153261.3,392-410).
cggtattagcagaatacaa

SEQ ID NO: 422701 - DNA, 19 bp, Homo sapiens
  siRNA target sequence for FLJ38101 (NM_153261.3,393-411).
ggtattagcagaatacaat

SEQ ID NO: 422702 - DNA, 19 bp, Homo sapiens
  siRNA target sequence for FLJ38101 (NM_153261.3,400-418).
gcagaatacaatatgtctt

SEQ ID NO: 422703 - DNA, 19 bp, Homo sapiens
  siRNA target sequence for FLJ38101 (NM_153261.3,419-437).
gtgatgatacaggaaaact

SEQ ID NO: 422704 - DNA, 19 bp, Homo sapiens
  siRNA target sequence for FLJ38101 (NM_153261.3,448-466).
cctaggcctcatgttcaat

SEQ ID NO: 422705 - DNA, 19 bp, Homo sapiens
  siRNA target sequence for FLJ35880 (NM_153264.2,367-385).
gaaagatgggtacagtaaa

SEQ ID NO: 422706 - DNA, 19 bp, Homo sapiens
  siRNA target sequence for FLJ35880 (NM_153264.2,416-434).
ccaactcctaatgaagaat

SEQ ID NO: 422707 - DNA, 19 bp, Homo sapiens
  siRNA target sequence for FLJ35880 (NM_153264.2,489-507).
ctactgtggaccactgaaa

SEQ ID NO: 422708 - DNA, 19 bp, Homo sapiens
  siRNA target sequence for FLJ35880 (NM_153264.2,494-512).
gtggaccactgaaaatctt

SEQ ID NO: 422709 - DNA, 19 bp, Homo sapiens
  siRNA target sequence for FLJ35880 (NM_153264.2,496-514).
ggaccactgaaaatctttt

SEQ ID NO: 422710 - DNA, 19 bp, Homo sapiens
  siRNA target sequence for FLJ35880 (NM_153264.2,516-534).
ccagaaacaccctatctaa

SEQ ID NO: 422711 - DNA, 19 bp, Homo sapiens
  siRNA target sequence for FLJ35880 (NM_153264.2,627-645).
ggctacgtcatatttgtga

SEQ ID NO: 422712 - DNA, 19 bp, Homo sapiens
  siRNA target sequence for FLJ35880 (NM_153264.2,628-646).
gctacgtcatatttgtgat

SEQ ID NO: 422713 - DNA, 19 bp, Homo sapiens
  siRNA target sequence for FLJ35880 (NM_153264.2,629-647).
ctacgtcatatttgtgatt

SEQ ID NO: 422714 - DNA, 19 bp, Homo sapiens
  siRNA target sequence for FLJ35880 (NM_153264.2,653-671).
gggctctacacgtaaggat

SEQ ID NO: 422715 - DNA, 19 bp, Homo sapiens
  siRNA target sequence for FLJ35880 (NM_153264.2,658-676).
ctacacgtaaggatgacat

SEQ ID NO: 422716 - DNA, 19 bp, Homo sapiens
  siRNA target sequence for FLJ35880 (NM_153264.2,689-707).
cagctacccacttgatcaa

SEQ ID NO: 422717 - DNA, 19 bp, Homo sapiens
  siRNA target sequence for FLJ35880 (NM_153264.2,691-709).
gctacccacttgatcaaca

SEQ ID NO: 422718 - DNA, 19 bp, Homo sapiens
  siRNA target sequence for FLJ35880 (NM_153264.2,713-731).
gatacagcttgggagaata

SEQ ID NO: 422719 - DNA, 19 bp, Homo sapiens
  siRNA target sequence for FLJ35880 (NM_153264.2,719-737).
gcttgggagaatacataaa

SEQ ID NO: 422720 - DNA, 19 bp, Homo sapiens
  siRNA target sequence for FLJ35880 (NM_153264.2,761-779).
gttcttaaagccattttta

SEQ ID NO: 422721 - DNA, 19 bp, Homo sapiens
  siRNA target sequence for FLJ35880 (NM_153264.2,892-910).
ctgagctacaagaggattt

SEQ ID NO: 422722 - DNA, 19 bp, Homo sapiens
  siRNA target sequence for FLJ35880 (NM_153264.2,987-1005).
ggaagtgactatttggttt

SEQ ID NO: 422723 - DNA, 19 bp, Homo sapiens
  siRNA target sequence for FLJ35880 (NM_153264.2,1152-1170).
gtctctcttcaagaatatt

SEQ ID NO: 422724 - DNA, 19 bp, Homo sapiens
  siRNA target sequence for FLJ35880 (NM_153264.2,1207-1225).
gagtaggaagtgatgagtt

SEQ ID NO: 422725 - DNA, 19 bp, Homo sapiens
  siRNA target sequence for FLJ35880 (NM_153264.2,1229-1247).
ggaagtaaaagcttttata

SEQ ID NO: 422726 - DNA, 19 bp, Homo sapiens
  siRNA target sequence for FLJ35880 (NM_153264.2,1250-1268).
ctcagtgcttgattacttt

SEQ ID NO: 422727 - DNA, 19 bp, Homo sapiens
  siRNA target sequence for FLJ35880 (NM_153264.2,1254-1272).
gtgcttgattactttcaca

SEQ ID NO: 422728 - DNA, 19 bp, Homo sapiens
  siRNA target sequence for FLJ35880 (NM_153264.2,1442-1460).
gctcaatggagatgttttt

SEQ ID NO: 422729 - DNA, 19 bp, Homo sapiens
  siRNA target sequence for FLJ35880 (NM_153264.2,1500-1518).
gtaggaacccccaatctga

SEQ ID NO: 422730 - DNA, 19 bp, Homo sapiens
  siRNA target sequence for FLJ35880 (NM_153264.2,1569-1587).
gacaaagacgtcttaagga

SEQ ID NO: 422731 - DNA, 19 bp, Homo sapiens
  siRNA target sequence for FLJ35880 (NM_153264.2,1729-1747).
cagattggaactatatcat

SEQ ID NO: 422732 - DNA, 19 bp, Homo sapiens
  siRNA target sequence for FLJ35880 (NM_153264.2,1818-1836).
gccacatgtgttaacatga

SEQ ID NO: 422733 - DNA, 19 bp, Homo sapiens
  siRNA target sequence for FLJ35880 (NM_153264.2,1860-1878).
ggcacagaaaacactgtat

SEQ ID NO: 422734 - DNA, 19 bp, Homo sapiens
  siRNA target sequence for FLJ35827 (NM_153265.1,330-348).
ctagcgggacccaatctga

SEQ ID NO: 422735 - DNA, 19 bp, Homo sapiens
  siRNA target sequence for FLJ35827 (NM_153265.1,510-528).
cctccgccaacctgttagt

SEQ ID NO: 422736 - DNA, 19 bp, Homo sapiens
  siRNA target sequence for FLJ35827 (NM_153265.1,590-608).
ggatctcggaggagcaatt

SEQ ID NO: 422737 - DNA, 19 bp, Homo sapiens
  siRNA target sequence for FLJ35827 (NM_153265.1,591-609).
gatctcggaggagcaatta

SEQ ID NO: 422738 - DNA, 19 bp, Homo sapiens
  siRNA target sequence for FLJ35827 (NM_153265.1,596-614).
cggaggagcaattacaatt

SEQ ID NO: 422739 - DNA, 19 bp, Homo sapiens
  siRNA target sequence for FLJ35827 (NM_153265.1,601-619).
gagcaattacaatttggaa

SEQ ID NO: 422740 - DNA, 19 bp, Homo sapiens
  siRNA target sequence for FLJ35827 (NM_153265.1,727-745).
cagccttgactgggtttat

SEQ ID NO: 422741 - DNA, 19 bp, Homo sapiens
  siRNA target sequence for FLJ35827 (NM_153265.1,759-777).
gtgactcccgctctaatct

SEQ ID NO: 422742 - DNA, 19 bp, Homo sapiens
  siRNA target sequence for FLJ35827 (NM_153265.1,761-779).
gactcccgctctaatctgt

SEQ ID NO: 422743 - DNA, 19 bp, Homo sapiens
  siRNA target sequence for FLJ35827 (NM_153265.1,765-783).
cccgctctaatctgtttgt

SEQ ID NO: 422744 - DNA, 19 bp, Homo sapiens
  siRNA target sequence for FLJ35827 (NM_153265.1,1094-1112).
gatcagggtgcctttcttt

SEQ ID NO: 422745 - DNA, 19 bp, Homo sapiens
  siRNA target sequence for FLJ35827 (NM_153265.1,1265-1283).
cacgtccacttctggaatt

SEQ ID NO: 422746 - DNA, 19 bp, Homo sapiens
  siRNA target sequence for FLJ35827 (NM_153265.1,1324-1342).
ccggaaacagggtgtcttt

SEQ ID NO: 422747 - DNA, 19 bp, Homo sapiens
  siRNA target sequence for FLJ35827 (NM_153265.1,1334-1352).
ggtgtctttgggaaataca

SEQ ID NO: 422748 - DNA, 19 bp, Homo sapiens
  siRNA target sequence for FLJ35827 (NM_153265.1,1517-1535).
gctcatgaaggttctatct

SEQ ID NO: 422749 - DNA, 19 bp, Homo sapiens
  siRNA target sequence for FLJ35827 (NM_153265.1,1518-1536).
ctcatgaaggttctatctt

SEQ ID NO: 422750 - DNA, 19 bp, Homo sapiens
  siRNA target sequence for FLJ35827 (NM_153265.1,1703-1721).
ggaaccacgaagaatgcat

SEQ ID NO: 422751 - DNA, 19 bp, Homo sapiens
  siRNA target sequence for FLJ35827 (NM_153265.1,1999-2017).
cgtgtctgatgtcattgat

SEQ ID NO: 422752 - DNA, 19 bp, Homo sapiens
  siRNA target sequence for FLJ35827 (NM_153265.1,2079-2097).
cccatgacaacgtgatcta

SEQ ID NO: 422753 - DNA, 19 bp, Homo sapiens
  siRNA target sequence for FLJ35827 (NM_153265.1,2081-2099).
catgacaacgtgatctaca

SEQ ID NO: 422754 - DNA, 19 bp, Homo sapiens
  siRNA target sequence for FLJ35827 (NM_153265.1,2084-2102).
gacaacgtgatctacatct

SEQ ID NO: 422755 - DNA, 19 bp, Homo sapiens
  siRNA target sequence for FLJ35827 (NM_153265.1,2086-2104).
caacgtgatctacatctat

SEQ ID NO: 422756 - DNA, 19 bp, Homo sapiens
  siRNA target sequence for FLJ35827 (NM_153265.1,2089-2107).
cgtgatctacatctatagt

SEQ ID NO: 422757 - DNA, 19 bp, Homo sapiens
  siRNA target sequence for FLJ35827 (NM_153265.1,2663-2681).
ggactgacttcgagacatt

SEQ ID NO: 422758 - DNA, 19 bp, Homo sapiens
  siRNA target sequence for FLJ35827 (NM_153265.1,2682-2700).
cccgatcgcgcattttcct

SEQ ID NO: 422759 - DNA, 19 bp, Homo sapiens
  siRNA target sequence for FLJ34960 (NM_153270.1,1131-1149).
ctgggcctggcgttagctt

SEQ ID NO: 422760 - DNA, 19 bp, Homo sapiens
  siRNA target sequence for FLJ34960 (NM_153270.1,1375-1393).
cccagacccgcatcttgtt

SEQ ID NO: 422761 - DNA, 19 bp, Homo sapiens
  siRNA target sequence for FLJ34960 (NM_153270.1,1553-1571).
ggccttcgatgtgtacaat

SEQ ID NO: 422762 - DNA, 19 bp, Homo sapiens
  siRNA target sequence for FLJ34960 (NM_153270.1,1954-1972).
gggaccgcggtgttgtgta

SEQ ID NO: 422763 - DNA, 19 bp, Homo sapiens
  siRNA target sequence for FLJ34960 (NM_153270.1,1959-1977).
cgcggtgttgtgtacatct

SEQ ID NO: 422764 - DNA, 19 bp, Homo sapiens
  siRNA target sequence for FLJ34960 (NM_153270.1,2017-2035).
gcctccgggacttatacgt

SEQ ID NO: 422765 - DNA, 19 bp, Homo sapiens
  siRNA target sequence for FLJ34960 (NM_153270.1,2449-2467).
gagaggcgctagatttggt

SEQ ID NO: 422766 - DNA, 19 bp, Homo sapiens
  siRNA target sequence for MGC45400 (NM_153333.1,247-265).
gcaaaagtcttgtgaagaa

SEQ ID NO: 422767 - DNA, 19 bp, Homo sapiens
  siRNA target sequence for MGC45400 (NM_153333.1,410-428).
cagcctggccagggattta

SEQ ID NO: 422768 - DNA, 19 bp, Homo sapiens
  siRNA target sequence for MGC45400 (NM_153333.1,438-456).
cacccgttaggcatttgga

SEQ ID NO: 422769 - DNA, 19 bp, Homo sapiens
  siRNA target sequence for MGC35392 (NM_153336.1,590-608).
cggtgttgtcgcgtatgat

SEQ ID NO: 422770 - DNA, 19 bp, Homo sapiens
  siRNA target sequence for MGC35392 (NM_153336.1,592-610).
gtgttgtcgcgtatgatga

SEQ ID NO: 422771 - DNA, 19 bp, Homo sapiens
  siRNA target sequence for MGC35392 (NM_153336.1,655-673).
cgccatcccaatggaaatt

SEQ ID NO: 422772 - DNA, 19 bp, Homo sapiens
  siRNA target sequence for MGC35392 (NM_153336.1,679-697).
gacaggaactgttgaagta

SEQ ID NO: 422773 - DNA, 19 bp, Homo sapiens
  siRNA target sequence for MGC35392 (NM_153336.1,707-725).
cttcttgatggctgtcatt

SEQ ID NO: 422774 - DNA, 19 bp, Homo sapiens
  siRNA target sequence for MGC35392 (NM_153336.1,765-783).
gccatgtgggaagatttta

SEQ ID NO: 422775 - DNA, 19 bp, Homo sapiens
  siRNA target sequence for MGC35392 (NM_153336.1,787-805).
cctgcttaaaggatcaaga

SEQ ID NO: 422776 - DNA, 19 bp, Homo sapiens
  siRNA target sequence for MGC35392 (NM_153336.1,798-816).
gatcaagatctgatatttt

SEQ ID NO: 422777 - DNA, 19 bp, Homo sapiens
  siRNA target sequence for MGC35392 (NM_153336.1,836-854).
gtcttgctacctcttaaca

SEQ ID NO: 422778 - DNA, 19 bp, Homo sapiens
  siRNA target sequence for MGC35392 (NM_153336.1,868-886).
ctagacctttgtttttggt

SEQ ID NO: 422779 - DNA, 19 bp, Homo sapiens
  siRNA target sequence for MGC35392 (NM_153336.1,913-931).
gtatgagatatgaagtcta

SEQ ID NO: 422780 - DNA, 19 bp, Homo sapiens
  siRNA target sequence for MGC35392 (NM_153336.1,933-951).
cagctggctcggaaatatt

SEQ ID NO: 422781 - DNA, 19 bp, Homo sapiens
  siRNA target sequence for MGC35392 (NM_153336.1,1148-1166).
cctggaagtgactgattta

SEQ ID NO: 422782 - DNA, 19 bp, Homo sapiens
  siRNA target sequence for MGC35392 (NM_153336.1,1274-1292).
gacactccgaaggattgta

SEQ ID NO: 422783 - DNA, 19 bp, Homo sapiens
  siRNA target sequence for MGC35392 (NM_153336.1,1381-1399).
ctatctggaggatcattct

SEQ ID NO: 422784 - DNA, 19 bp, Homo sapiens
  siRNA target sequence for SLIC1 (NM_153337.1,235-253).
gacctgacgggcacttaga

SEQ ID NO: 422785 - DNA, 19 bp, Homo sapiens
  siRNA target sequence for SLIC1 (NM_153337.1,331-349).
gctggaagcacgtcaaact

SEQ ID NO: 422786 - DNA, 19 bp, Homo sapiens
  siRNA target sequence for SLIC1 (NM_153337.1,370-388).
ctcgcatcgaggagagaaa

SEQ ID NO: 422787 - DNA, 19 bp, Homo sapiens
  siRNA target sequence for SLIC1 (NM_153337.1,381-399).
gagagaaaagtctctaagt

SEQ ID NO: 422788 - DNA, 19 bp, Homo sapiens
  siRNA target sequence for SLIC1 (NM_153337.1,383-401).
gagaaaagtctctaagttt

SEQ ID NO: 422789 - DNA, 19 bp, Homo sapiens
  siRNA target sequence for SLIC1 (NM_153337.1,385-403).
gaaaagtctctaagtttgt

SEQ ID NO: 422790 - DNA, 19 bp, Homo sapiens
  siRNA target sequence for SLIC1 (NM_153337.1,482-500).
gagatgtccacgtcaaagt

SEQ ID NO: 422791 - DNA, 19 bp, Homo sapiens
  siRNA target sequence for FLJ90811 (NM_153339.1,140-158).
ccgtcggggtccagaacta

SEQ ID NO: 422792 - DNA, 19 bp, Homo sapiens
  siRNA target sequence for FLJ90811 (NM_153339.1,466-484).
gtgtttgaacgcaacctat

SEQ ID NO: 422793 - DNA, 19 bp, Homo sapiens
  siRNA target sequence for FLJ90811 (NM_153339.1,497-515).
cggcagactgcctggatat

SEQ ID NO: 422794 - DNA, 19 bp, Homo sapiens
  siRNA target sequence for FLJ90811 (NM_153339.1,708-726).
ccagtctttcctgtataga

SEQ ID NO: 422795 - DNA, 19 bp, Homo sapiens
  siRNA target sequence for FLJ90811 (NM_153339.1,845-863).
ccccagcccacggcttatt

SEQ ID NO: 422796 - DNA, 19 bp, Homo sapiens
  siRNA target sequence for FLJ90811 (NM_153339.1,848-866).
cagcccacggcttattcct

SEQ ID NO: 422797 - DNA, 19 bp, Homo sapiens
  siRNA target sequence for MGC46534 (NM_153340.2,164-182).
gcaaaaacacgaagaagtt

SEQ ID NO: 422798 - DNA, 19 bp, Homo sapiens
  siRNA target sequence for MGC46534 (NM_153340.2,567-585).
catggctcccccttctaaa

SEQ ID NO: 422799 - DNA, 19 bp, Homo sapiens
  siRNA target sequence for MGC46534 (NM_153340.2,570-588).
ggctcccccttctaaagaa

SEQ ID NO: 422800 - DNA, 19 bp, Homo sapiens
  siRNA target sequence for MGC46534 (NM_153340.2,738-756).
gcagtgtggggtaataaat

SEQ ID NO: 422801 - DNA, 19 bp, Homo sapiens
  siRNA target sequence for MGC46534 (NM_153340.2,741-759).
gtgtggggtaataaatcca

SEQ ID NO: 422802 - DNA, 19 bp, Homo sapiens
  siRNA target sequence for MGC46534 (NM_153340.2,1064-1082).
cctccgagagtgaattgga

SEQ ID NO: 422803 - DNA, 19 bp, Homo sapiens
  siRNA target sequence for MGC46534 (NM_153340.2,1065-1083).
ctccgagagtgaattggat

SEQ ID NO: 422804 - DNA, 19 bp, Homo sapiens
  siRNA target sequence for MGC46534 (NM_153340.2,1275-1293).
ggtgagcccaggatgctat

SEQ ID NO: 422805 - DNA, 19 bp, Homo sapiens
  siRNA target sequence for MGC46534 (NM_153340.2,1282-1300).
ccaggatgctatgtgttta

SEQ ID NO: 422806 - DNA, 19 bp, Homo sapiens
  siRNA target sequence for FLJ90005 (NM_153341.1,58-76).
ctgcggttatgctgttatt

SEQ ID NO: 422807 - DNA, 19 bp, Homo sapiens
  siRNA target sequence for FLJ90005 (NM_153341.1,89-107).
gccagctgcccgaagctaa

SEQ ID NO: 422808 - DNA, 19 bp, Homo sapiens
  siRNA target sequence for FLJ90005 (NM_153341.1,215-233).
cgagttcggaccaaacaca

SEQ ID NO: 422809 - DNA, 19 bp, Homo sapiens
  siRNA target sequence for FLJ90005 (NM_153341.1,232-250).
cacttcaggtctcagttat

SEQ ID NO: 422810 - DNA, 19 bp, Homo sapiens
  siRNA target sequence for FLJ90005 (NM_153341.1,242-260).
ctcagttatgggcaagaat

SEQ ID NO: 422811 - DNA, 19 bp, Homo sapiens
  siRNA target sequence for FLJ90005 (NM_153341.1,244-262).
cagttatgggcaagaatct

SEQ ID NO: 422812 - DNA, 19 bp, Homo sapiens
  siRNA target sequence for FLJ90005 (NM_153341.1,293-311).
cgatgcagtgcatacatta

SEQ ID NO: 422813 - DNA, 19 bp, Homo sapiens
  siRNA target sequence for FLJ90005 (NM_153341.1,294-312).
gatgcagtgcatacattat

SEQ ID NO: 422814 - DNA, 19 bp, Homo sapiens
  siRNA target sequence for FLJ90005 (NM_153341.1,297-315).
gcagtgcatacattatcaa

SEQ ID NO: 422815 - DNA, 19 bp, Homo sapiens
  siRNA target sequence for FLJ90005 (NM_153341.1,300-318).
gtgcatacattatcaagat

SEQ ID NO: 422816 - DNA, 19 bp, Homo sapiens
  siRNA target sequence for FLJ90005 (NM_153341.1,365-383).
gaattctgttggctttgta

SEQ ID NO: 422817 - DNA, 19 bp, Homo sapiens
  siRNA target sequence for FLJ90005 (NM_153341.1,375-393).
ggctttgtatgaaagagat

SEQ ID NO: 422818 - DNA, 19 bp, Homo sapiens
  siRNA target sequence for FLJ90005 (NM_153341.1,453-471).
gccgtaagaagaaaattct

SEQ ID NO: 422819 - DNA, 19 bp, Homo sapiens
  siRNA target sequence for FLJ90005 (NM_153341.1,475-493).
gcagctgggcacgttgatt

SEQ ID NO: 422820 - DNA, 19 bp, Homo sapiens
  siRNA target sequence for FLJ90005 (NM_153341.1,658-676).
cattgcatccccagttatt

SEQ ID NO: 422821 - DNA, 19 bp, Homo sapiens
  siRNA target sequence for FLJ90005 (NM_153341.1,693-711).
gtattggtgtccccattat

SEQ ID NO: 422822 - DNA, 19 bp, Homo sapiens
  siRNA target sequence for FLJ90005 (NM_153341.1,705-723).
ccattatgctggcatatgt

SEQ ID NO: 422823 - DNA, 19 bp, Homo sapiens
  siRNA target sequence for FLJ90005 (NM_153341.1,781-799).
caacggaaaaggagtgaaa

SEQ ID NO: 422824 - DNA, 19 bp, Homo sapiens
  siRNA target sequence for FLJ90005 (NM_153341.1,786-804).
gaaaaggagtgaaaattga

SEQ ID NO: 422825 - DNA, 19 bp, Homo sapiens
  siRNA target sequence for FLJ90005 (NM_153341.1,844-862).
ctggagagccctcaagaat

SEQ ID NO: 422826 - DNA, 19 bp, Homo sapiens
  siRNA target sequence for FLJ90005 (NM_153341.1,887-905).
gaaggcctgactagtgtat

SEQ ID NO: 422827 - DNA, 19 bp, Homo sapiens
  siRNA target sequence for FLJ90005 (NM_153341.1,890-908).
ggcctgactagtgtattga

SEQ ID NO: 422828 - DNA, 19 bp, Homo sapiens
  siRNA target sequence for FLJ90005 (NM_153341.1,1022-1040).
ggcaagggaaaatatagca

SEQ ID NO: 422829 - DNA, 19 bp, Homo sapiens
  siRNA target sequence for FLJ90005 (NM_153341.1,1093-1111).
cagtcttggtgcaattagt

SEQ ID NO: 422830 - DNA, 19 bp, Homo sapiens
  siRNA target sequence for FLJ90005 (NM_153341.1,1095-1113).
gtcttggtgcaattagtga

SEQ ID NO: 422831 - DNA, 19 bp, Homo sapiens
  siRNA target sequence for FLJ90005 (NM_153341.1,1130-1148).
gctatggccggttccataa

SEQ ID NO: 422832 - DNA, 19 bp, Homo sapiens
  siRNA target sequence for FLJ90005 (NM_153341.1,1135-1153).
ggccggttccataatcagt

SEQ ID NO: 422833 - DNA, 19 bp, Homo sapiens
  siRNA target sequence for FLJ90005 (NM_153341.1,1168-1186).
ggacagagaatgcaacaat

SEQ ID NO: 422834 - DNA, 19 bp, Homo sapiens
  siRNA target sequence for FLJ90005 (NM_153341.1,1179-1197).
gcaacaatatggaaatcca

SEQ ID NO: 422835 - DNA, 19 bp, Homo sapiens
  siRNA target sequence for FLJ90005 (NM_153341.1,1545-1563).
gcccaagtgcccatatgaa

SEQ ID NO: 422836 - DNA, 19 bp, Homo sapiens
  siRNA target sequence for FLJ90005 (NM_153341.1,1573-1591).
cctagccgagggacaaact

SEQ ID NO: 422837 - DNA, 19 bp, Homo sapiens
  siRNA target sequence for FLJ90005 (NM_153341.1,1607-1625).
ggtggagaagccagagtat

SEQ ID NO: 422838 - DNA, 19 bp, Homo sapiens
  siRNA target sequence for FLJ90024 (NM_153342.1,458-476).
cggcactcttgggttaaca

SEQ ID NO: 422839 - DNA, 19 bp, Homo sapiens
  siRNA target sequence for FLJ90024 (NM_153342.1,686-704).
gctgtcatcgcctttatca

SEQ ID NO: 422840 - DNA, 19 bp, Homo sapiens
  siRNA target sequence for C6orf141 (NM_153344.1,502-520).
caactacccttctgtcttt

SEQ ID NO: 422841 - DNA, 19 bp, Homo sapiens
  siRNA target sequence for C6orf141 (NM_153344.1,573-591).
cagacccacccaaatacgt

SEQ ID NO: 422842 - DNA, 19 bp, Homo sapiens
  siRNA target sequence for C6orf141 (NM_153344.1,685-703).
cgtgaccgcgctcactttt

SEQ ID NO: 422843 - DNA, 19 bp, Homo sapiens
  siRNA target sequence for C6orf141 (NM_153344.1,825-843).
ggacttggctcgaggaaat

SEQ ID NO: 422844 - DNA, 19 bp, Homo sapiens
  siRNA target sequence for C6orf141 (NM_153344.1,826-844).
gacttggctcgaggaaatt

SEQ ID NO: 422845 - DNA, 19 bp, Homo sapiens
  siRNA target sequence for FLJ90586 (NM_153345.1,572-590).
gctttgctgggcataaaga

SEQ ID NO: 422846 - DNA, 19 bp, Homo sapiens
  siRNA target sequence for FLJ90586 (NM_153345.1,595-613).
catcacccccgttgcttat

SEQ ID NO: 422847 - DNA, 19 bp, Homo sapiens
  siRNA target sequence for FLJ90586 (NM_153345.1,600-618).
cccccgttgcttatttctt

SEQ ID NO: 422848 - DNA, 19 bp, Homo sapiens
  siRNA target sequence for FLJ90586 (NM_153345.1,683-701).
cggtcccagctccaatcaa

SEQ ID NO: 422849 - DNA, 19 bp, Homo sapiens
  siRNA target sequence for FLJ90586 (NM_153345.1,684-702).
ggtcccagctccaatcaat

SEQ ID NO: 422850 - DNA, 19 bp, Homo sapiens
  siRNA target sequence for FLJ90586 (NM_153345.1,729-747).
gcaatgcacgggacaatga

SEQ ID NO: 422851 - DNA, 19 bp, Homo sapiens
  siRNA target sequence for FLJ90586 (NM_153345.1,730-748).
caatgcacgggacaatgaa

SEQ ID NO: 422852 - DNA, 19 bp, Homo sapiens
  siRNA target sequence for FLJ90586 (NM_153345.1,751-769).
ctttgaagtgccagtctat

SEQ ID NO: 422853 - DNA, 19 bp, Homo sapiens
  siRNA target sequence for FLJ90586 (NM_153345.1,775-793).
ggccgtggtgggactagaa

SEQ ID NO: 422854 - DNA, 19 bp, Homo sapiens
  siRNA target sequence for FLJ90586 (NM_153345.1,832-850).
ctacagcactgttgtgata

SEQ ID NO: 422855 - DNA, 19 bp, Homo sapiens
  siRNA target sequence for FLJ90586 (NM_153345.1,960-978).
ctggaagagctccaatcaa

SEQ ID NO: 422856 - DNA, 19 bp, Homo sapiens
  siRNA target sequence for FLJ90586 (NM_153345.1,1033-1051).
ggcggcagtccccacatta

SEQ ID NO: 422857 - DNA, 19 bp, Homo sapiens
  siRNA target sequence for FLJ90586 (NM_153345.1,1035-1053).
cggcagtccccacattaga

SEQ ID NO: 422858 - DNA, 19 bp, Homo sapiens
  siRNA target sequence for FLJ90586 (NM_153345.1,1087-1105).
ctttggtcaccctgatgat

SEQ ID NO: 422859 - DNA, 19 bp, Homo sapiens
  siRNA target sequence for FLJ90586 (NM_153345.1,1091-1109).
ggtcaccctgatgatgata

SEQ ID NO: 422860 - DNA, 19 bp, Homo sapiens
  siRNA target sequence for MGC33653 (NM_153346.2,177-195).
gtcgacgacagtgatgata

SEQ ID NO: 422861 - DNA, 19 bp, Homo sapiens
  siRNA target sequence for MGC33653 (NM_153346.2,348-366).
caccgtccactccaaatgt

SEQ ID NO: 422862 - DNA, 19 bp, Homo sapiens
  siRNA target sequence for MGC33653 (NM_153346.2,350-368).
ccgtccactccaaatgtca

SEQ ID NO: 422863 - DNA, 19 bp, Homo sapiens
  siRNA target sequence for MGC33653 (NM_153346.2,515-533).
ccatggtgaccaaatagtt

SEQ ID NO: 422864 - DNA, 19 bp, Homo sapiens
  siRNA target sequence for MGC33653 (NM_153346.2,524-542).
ccaaatagtttcacagata

SEQ ID NO: 422865 - DNA, 19 bp, Homo sapiens
  siRNA target sequence for MGC33653 (NM_153346.2,539-557).
gataaaccacccagtacat

SEQ ID NO: 422866 - DNA, 19 bp, Homo sapiens
  siRNA target sequence for MGC33653 (NM_153346.2,624-642).
gaggtacagtctagcatat

SEQ ID NO: 422867 - DNA, 19 bp, Homo sapiens
  siRNA target sequence for MGC33653 (NM_153346.2,626-644).
ggtacagtctagcatatca

SEQ ID NO: 422868 - DNA, 19 bp, Homo sapiens
  siRNA target sequence for MGC33653 (NM_153346.2,733-751).
cagacctcagtgagagttt

SEQ ID NO: 422869 - DNA, 19 bp, Homo sapiens
  siRNA target sequence for MGC33653 (NM_153346.2,740-758).
cagtgagagtttatcatat

SEQ ID NO: 422870 - DNA, 19 bp, Homo sapiens
  siRNA target sequence for MGC33653 (NM_153346.2,824-842).
cggtatgccatggaacttt

SEQ ID NO: 422871 - DNA, 19 bp, Homo sapiens
  siRNA target sequence for MGC33653 (NM_153346.2,825-843).
ggtatgccatggaacttta

SEQ ID NO: 422872 - DNA, 19 bp, Homo sapiens
  siRNA target sequence for MGC33653 (NM_153346.2,826-844).
gtatgccatggaactttat

SEQ ID NO: 422873 - DNA, 19 bp, Homo sapiens
  siRNA target sequence for MGC33653 (NM_153346.2,830-848).
gccatggaactttatcagt

SEQ ID NO: 422874 - DNA, 19 bp, Homo sapiens
  siRNA target sequence for MGC33653 (NM_153346.2,915-933).
gttctgtcacgaagagaat

SEQ ID NO: 422875 - DNA, 19 bp, Homo sapiens
  siRNA target sequence for MGC33653 (NM_153346.2,951-969).
cctggtgtggtgaattact

SEQ ID NO: 422876 - DNA, 19 bp, Homo sapiens
  siRNA target sequence for MGC33653 (NM_153346.2,968-986).
ctctgctctaccagaaaat

SEQ ID NO: 422877 - DNA, 19 bp, Homo sapiens
  siRNA target sequence for MGC33653 (NM_153346.2,1003-1021).
gtagagccttgtcatcttt

SEQ ID NO: 422878 - DNA, 19 bp, Homo sapiens
  siRNA target sequence for MGC33653 (NM_153346.2,1078-1096).
gcactgagacagcgaatta

SEQ ID NO: 422879 - DNA, 19 bp, Homo sapiens
  siRNA target sequence for MGC33653 (NM_153346.2,1087-1105).
cagcgaattatccaacttt

SEQ ID NO: 422880 - DNA, 19 bp, Homo sapiens
  siRNA target sequence for MGC33653 (NM_153346.2,1089-1107).
gcgaattatccaactttaa

SEQ ID NO: 422881 - DNA, 19 bp, Homo sapiens
  siRNA target sequence for MGC33653 (NM_153346.2,1090-1108).
cgaattatccaactttaat

SEQ ID NO: 422882 - DNA, 19 bp, Homo sapiens
  siRNA target sequence for MGC33653 (NM_153346.2,1124-1142).
ccaaaatactgcctcttta

SEQ ID NO: 422883 - DNA, 19 bp, Homo sapiens
  siRNA target sequence for MGC33653 (NM_153346.2,1151-1169).
catccctccctattttgct

SEQ ID NO: 422884 - DNA, 19 bp, Homo sapiens
  siRNA target sequence for MGC33653 (NM_153346.2,1204-1222).
cagaaaccaacgtggaaaa

SEQ ID NO: 422885 - DNA, 19 bp, Homo sapiens
  siRNA target sequence for MGC33653 (NM_153346.2,1248-1266).
gctttatcgggaaatacga

SEQ ID NO: 422886 - DNA, 19 bp, Homo sapiens
  siRNA target sequence for MGC33653 (NM_153346.2,1318-1336).
ctggcccacaaatgagtta

SEQ ID NO: 422887 - DNA, 19 bp, Homo sapiens
  siRNA target sequence for MGC33653 (NM_153346.2,1333-1351).
gttatgggacaatgagtta

SEQ ID NO: 422888 - DNA, 19 bp, Homo sapiens
  siRNA target sequence for MGC33653 (NM_153346.2,1406-1424).
cctcactcccgattttgca

SEQ ID NO: 422889 - DNA, 19 bp, Homo sapiens
  siRNA target sequence for MGC33653 (NM_153346.2,1455-1473).
gacaccaacacggaaaaca

SEQ ID NO: 422890 - DNA, 19 bp, Homo sapiens
  siRNA target sequence for MGC33653 (NM_153346.2,1467-1485).
gaaaacagcgtcaacacaa

SEQ ID NO: 422891 - DNA, 19 bp, Homo sapiens
  siRNA target sequence for MGC33653 (NM_153346.2,1472-1490).
cagcgtcaacacaatgaat

SEQ ID NO: 422892 - DNA, 19 bp, Homo sapiens
  siRNA target sequence for MGC33653 (NM_153346.2,1512-1530).
gacagtggccaggattctt

SEQ ID NO: 422893 - DNA, 19 bp, Homo sapiens
  siRNA target sequence for MGC33653 (NM_153346.2,1565-1583).
ctatcttggtgatccaaaa

SEQ ID NO: 422894 - DNA, 19 bp, Homo sapiens
  siRNA target sequence for MGC33653 (NM_153346.2,1585-1603).
gaaatgtcagagtacttaa

SEQ ID NO: 422895 - DNA, 19 bp, Homo sapiens
  siRNA target sequence for MGC33653 (NM_153346.2,1623-1641).
caaaatatggccaaaccta

SEQ ID NO: 422896 - DNA, 19 bp, Homo sapiens
  siRNA target sequence for MGC33653 (NM_153346.2,1651-1669).
cctgctacttggttcgtat

SEQ ID NO: 422897 - DNA, 19 bp, Homo sapiens
  siRNA target sequence for MGC33653 (NM_153346.2,1652-1670).
ctgctacttggttcgtatt

SEQ ID NO: 422898 - DNA, 19 bp, Homo sapiens
  siRNA target sequence for MGC33653 (NM_153346.2,1654-1672).
gctacttggttcgtatttt

SEQ ID NO: 422899 - DNA, 19 bp, Homo sapiens
  siRNA target sequence for MGC33653 (NM_153346.2,1696-1714).
gcagctcagtggatatcca

SEQ ID NO: 422900 - DNA, 19 bp, Homo sapiens
  siRNA target sequence for MGC33653 (NM_153346.2,1764-1782).
gaatatctggcaacaactt

SEQ ID NO: 422901 - DNA, 19 bp, Homo sapiens
  siRNA target sequence for MGC33653 (NM_153346.2,1789-1807).
cctgtgatttgcatgaaca

SEQ ID NO: 422902 - DNA, 19 bp, Homo sapiens
  siRNA target sequence for MGC33653 (NM_153346.2,1790-1808).
ctgtgatttgcatgaacat

SEQ ID NO: 422903 - DNA, 19 bp, Homo sapiens
  siRNA target sequence for MGC33653 (NM_153346.2,1815-1833).
gactggcaggactgtattt

SEQ ID NO: 422904 - DNA, 19 bp, Homo sapiens
  siRNA target sequence for MGC33653 (NM_153346.2,1834-1852).
ctggtatcaattctatgat

SEQ ID NO: 422905 - DNA, 19 bp, Homo sapiens
  siRNA target sequence for MGC33653 (NM_153346.2,1877-1895).
gagtactccaaaaactgtt

SEQ ID NO: 422906 - DNA, 19 bp, Homo sapiens
  siRNA target sequence for MGC33653 (NM_153346.2,1896-1914).
cgcaaaaataaaaaacgta

SEQ ID NO: 422907 - DNA, 19 bp, Homo sapiens
  siRNA target sequence for MGC33653 (NM_153346.2,1930-1948).
cggcatctgcagatagaaa

SEQ ID NO: 422908 - DNA, 19 bp, Homo sapiens
  siRNA target sequence for MGC33653 (NM_153346.2,1968-1986).
ggtggtgaaggctgttctt

SEQ ID NO: 422909 - DNA, 19 bp, Homo sapiens
  siRNA target sequence for MGC33653 (NM_153346.2,1998-2016).
ccaatgaataactccaaaa

SEQ ID NO: 422910 - DNA, 19 bp, Homo sapiens
  siRNA target sequence for MGC33653 (NM_153346.2,2033-2051).
cttgcagccaaacagtaat

SEQ ID NO: 422911 - DNA, 19 bp, Homo sapiens
  siRNA target sequence for MGC33653 (NM_153346.2,2036-2054).
gcagccaaacagtaatgct

SEQ ID NO: 422912 - DNA, 19 bp, Homo sapiens
  siRNA target sequence for MGC33653 (NM_153346.2,2103-2121).
ggtgaagcatggagctatt

SEQ ID NO: 422913 - DNA, 19 bp, Homo sapiens
  siRNA target sequence for MGC33653 (NM_153346.2,2191-2209).
caagcctgtcggctagata

SEQ ID NO: 422914 - DNA, 19 bp, Homo sapiens
  siRNA target sequence for MGC33653 (NM_153346.2,2195-2213).
cctgtcggctagatacctt

SEQ ID NO: 422915 - DNA, 19 bp, Homo sapiens
  siRNA target sequence for MGC33653 (NM_153346.2,2196-2214).
ctgtcggctagatacctta

SEQ ID NO: 422916 - DNA, 19 bp, Homo sapiens
  siRNA target sequence for MGC33653 (NM_153346.2,2198-2216).
gtcggctagataccttatt

SEQ ID NO: 422917 - DNA, 19 bp, Homo sapiens
  siRNA target sequence for MGC33653 (NM_153346.2,2200-2218).
cggctagataccttattca

SEQ ID NO: 422918 - DNA, 19 bp, Homo sapiens
  siRNA target sequence for MGC33653 (NM_153346.2,2202-2220).
gctagataccttattcaga

SEQ ID NO: 422919 - DNA, 19 bp, Homo sapiens
  siRNA target sequence for MGC33653 (NM_153346.2,2235-2253).
gatgtcctggtccaaagta

SEQ ID NO: 422920 - DNA, 19 bp, Homo sapiens
  siRNA target sequence for MGC33653 (NM_153346.2,2284-2302).
gtgcccttgaccccaataa

SEQ ID NO: 422921 - DNA, 19 bp, Homo sapiens
  siRNA target sequence for MGC33653 (NM_153346.2,2316-2334).
cgagagttcctccaagaaa

SEQ ID NO: 422922 - DNA, 19 bp, Homo sapiens
  siRNA target sequence for MGC33653 (NM_153346.2,2317-2335).
gagagttcctccaagaaaa

SEQ ID NO: 422923 - DNA, 19 bp, Homo sapiens
  siRNA target sequence for MGC33653 (NM_153346.2,2404-2422).
gtatccgtagccttagaca

SEQ ID NO: 422924 - DNA, 19 bp, Homo sapiens
  siRNA target sequence for FLJ90119 (NM_153347.1,281-299).
cagcgccacccgcatcttt

SEQ ID NO: 422925 - DNA, 19 bp, Homo sapiens
  siRNA target sequence for FLJ90119 (NM_153347.1,365-383).
gcatggtctgctgatgttt

SEQ ID NO: 422926 - DNA, 19 bp, Homo sapiens
  siRNA target sequence for FLJ90119 (NM_153347.1,623-641).
cagtggtgcactcttcttt

SEQ ID NO: 422927 - DNA, 19 bp, Homo sapiens
  siRNA target sequence for FLJ90119 (NM_153347.1,625-643).
gtggtgcactcttctttat

SEQ ID NO: 422928 - DNA, 19 bp, Homo sapiens
  siRNA target sequence for FLJ90119 (NM_153347.1,627-645).
ggtgcactcttctttatca

SEQ ID NO: 422929 - DNA, 19 bp, Homo sapiens
  siRNA target sequence for FLJ90119 (NM_153347.1,630-648).
gcactcttctttatcatct

SEQ ID NO: 422930 - DNA, 19 bp, Homo sapiens
  siRNA target sequence for FLJ90119 (NM_153347.1,656-674).
gaccatcgccctcaacaaa

SEQ ID NO: 422931 - DNA, 19 bp, Homo sapiens
  siRNA target sequence for FLJ90119 (NM_153347.1,662-680).
cgccctcaacaaattctgt

SEQ ID NO: 422932 - DNA, 19 bp, Homo sapiens
  siRNA target sequence for FLJ90119 (NM_153347.1,766-784).
gggagcctgtggaacacta

SEQ ID NO: 422933 - DNA, 19 bp, Homo sapiens
  siRNA target sequence for FBXW8 (NM_153348.2,388-406).
catccgcgacctgaatgaa

SEQ ID NO: 422934 - DNA, 19 bp, Homo sapiens
  siRNA target sequence for FBXW8 (NM_153348.2,392-410).
cgcgacctgaatgaaatga

SEQ ID NO: 422935 - DNA, 19 bp, Homo sapiens
  siRNA target sequence for MGC27085 (NM_153353.2,112-130).
gcgcgaatctccagaatct

SEQ ID NO: 422936 - DNA, 19 bp, Homo sapiens
  siRNA target sequence for MGC27085 (NM_153353.2,150-168).
ctaatctgtgtatggaaaa

SEQ ID NO: 422937 - DNA, 19 bp, Homo sapiens
  siRNA target sequence for MGC27085 (NM_153353.2,236-254).
ctagcagcaggaatcacat

SEQ ID NO: 422938 - DNA, 19 bp, Homo sapiens
  siRNA target sequence for MGC27085 (NM_153353.2,242-260).
gcaggaatcacattaaaca

SEQ ID NO: 422939 - DNA, 19 bp, Homo sapiens
  siRNA target sequence for MGC27085 (NM_153353.2,243-261).
caggaatcacattaaacat

SEQ ID NO: 422940 - DNA, 19 bp, Homo sapiens
  siRNA target sequence for MGC27085 (NM_153353.2,277-295).
cttagtgccagtagaaaga

SEQ ID NO: 422941 - DNA, 19 bp, Homo sapiens
  siRNA target sequence for MGC27085 (NM_153353.2,281-299).
gtgccagtagaaagagtta

SEQ ID NO: 422942 - DNA, 19 bp, Homo sapiens
  siRNA target sequence for MGC27085 (NM_153353.2,342-360).
gtctgtatattaatggttt

SEQ ID NO: 422943 - DNA, 19 bp, Homo sapiens
  siRNA target sequence for MGC27085 (NM_153353.2,346-364).
gtatattaatggtttggat

SEQ ID NO: 422944 - DNA, 19 bp, Homo sapiens
  siRNA target sequence for MGC27085 (NM_153353.2,361-379).
ggatgttggatataacctt

SEQ ID NO: 422945 - DNA, 19 bp, Homo sapiens
  siRNA target sequence for MGC27085 (NM_153353.2,369-387).
gatataaccttctatgtga

SEQ ID NO: 422946 - DNA, 19 bp, Homo sapiens
  siRNA target sequence for MGC27085 (NM_153353.2,384-402).
gtgatgttggtgcatacta

SEQ ID NO: 422947 - DNA, 19 bp, Homo sapiens
  siRNA target sequence for MGC27085 (NM_153353.2,442-460).
cttaaacctcatgtttaat

SEQ ID NO: 422948 - DNA, 19 bp, Homo sapiens
  siRNA target sequence for MGC27085 (NM_153353.2,471-489).
ccgaaggtggagaattgat

SEQ ID NO: 422949 - DNA, 19 bp, Homo sapiens
  siRNA target sequence for MGC27085 (NM_153353.2,472-490).
cgaaggtggagaattgatt

SEQ ID NO: 422950 - DNA, 19 bp, Homo sapiens
  siRNA target sequence for MGC27085 (NM_153353.2,575-593).
gctgcaatgctgcaaatta

SEQ ID NO: 422951 - DNA, 19 bp, Homo sapiens
  siRNA target sequence for MGC27085 (NM_153353.2,576-594).
ctgcaatgctgcaaattaa

SEQ ID NO: 422952 - DNA, 19 bp, Homo sapiens
  siRNA target sequence for MGC27085 (NM_153353.2,586-604).
gcaaattaattcatcatta

SEQ ID NO: 422953 - DNA, 19 bp, Homo sapiens
  siRNA target sequence for MGC27085 (NM_153353.2,650-668).
catgtaggccgcatgttga

SEQ ID NO: 422954 - DNA, 19 bp, Homo sapiens
  siRNA target sequence for MGC27085 (NM_153353.2,656-674).
ggccgcatgttgaaagaaa

SEQ ID NO: 422955 - DNA, 19 bp, Homo sapiens
  siRNA target sequence for MGC27085 (NM_153353.2,681-699).
gtcttgttgcactacacat

SEQ ID NO: 422956 - DNA, 19 bp, Homo sapiens
  siRNA target sequence for MGC27085 (NM_153353.2,700-718).
gtgtaagcatgatataaaa

SEQ ID NO: 422957 - DNA, 19 bp, Homo sapiens
  siRNA target sequence for MGC27085 (NM_153353.2,706-724).
gcatgatataaaaaacagt

SEQ ID NO: 422958 - DNA, 19 bp, Homo sapiens
  siRNA target sequence for MGC27085 (NM_153353.2,736-754).
gttatgtgatgcactgtat

SEQ ID NO: 422959 - DNA, 19 bp, Homo sapiens
  siRNA target sequence for MGC27085 (NM_153353.2,746-764).
gcactgtatctgaacagta

SEQ ID NO: 422960 - DNA, 19 bp, Homo sapiens
  siRNA target sequence for MGC27085 (NM_153353.2,782-800).
gtcagctgcaacaaaataa

SEQ ID NO: 422961 - DNA, 19 bp, Homo sapiens
  siRNA target sequence for MGC27085 (NM_153353.2,786-804).
gctgcaacaaaataactca

SEQ ID NO: 422962 - DNA, 19 bp, Homo sapiens
  siRNA target sequence for MGC27085 (NM_153353.2,787-805).
ctgcaacaaaataactcat

SEQ ID NO: 422963 - DNA, 19 bp, Homo sapiens
  siRNA target sequence for MGC27085 (NM_153353.2,803-821).
catgatggaatggtgtatt

SEQ ID NO: 422964 - DNA, 19 bp, Homo sapiens
  siRNA target sequence for MGC27085 (NM_153353.2,824-842).
gctgatgtactgaaaagca

SEQ ID NO: 422965 - DNA, 19 bp, Homo sapiens
  siRNA target sequence for MGC27085 (NM_153353.2,825-843).
ctgatgtactgaaaagcaa

SEQ ID NO: 422966 - DNA, 19 bp, Homo sapiens
  siRNA target sequence for MGC27085 (NM_153353.2,844-862).
cactaccctggaagtaata

SEQ ID NO: 422967 - DNA, 19 bp, Homo sapiens
  siRNA target sequence for MGC27085 (NM_153353.2,890-908).
gcaggcgcaaactatctca

SEQ ID NO: 422968 - DNA, 19 bp, Homo sapiens
  siRNA target sequence for MGC27085 (NM_153353.2,924-942).
cacacaacaggagtcttaa

SEQ ID NO: 422969 - DNA, 19 bp, Homo sapiens
  siRNA target sequence for MGC27085 (NM_153353.2,986-1004).
gttgcactttcacaatcaa

SEQ ID NO: 422970 - DNA, 19 bp, Homo sapiens
  siRNA target sequence for MGC27085 (NM_153353.2,1138-1156).
ggtagatggacgtgtatat

SEQ ID NO: 422971 - DNA, 19 bp, Homo sapiens
  siRNA target sequence for MGC27085 (NM_153353.2,1218-1236).
cttatgaccactcatctaa

SEQ ID NO: 422972 - DNA, 19 bp, Homo sapiens
  siRNA target sequence for MGC27085 (NM_153353.2,1228-1246).
ctcatctaatgcaggtttt

SEQ ID NO: 422973 - DNA, 19 bp, Homo sapiens
  siRNA target sequence for MGC33214 (NM_153354.2,138-156).
ggtatacagctggttgtta

SEQ ID NO: 422974 - DNA, 19 bp, Homo sapiens
  siRNA target sequence for MGC33214 (NM_153354.2,169-187).
ccagtgtcatgcagaagat

SEQ ID NO: 422975 - DNA, 19 bp, Homo sapiens
  siRNA target sequence for MGC33214 (NM_153354.2,172-190).
gtgtcatgcagaagattat

SEQ ID NO: 422976 - DNA, 19 bp, Homo sapiens
  siRNA target sequence for MGC33214 (NM_153354.2,242-260).
gtatcaacatcctacagaa

SEQ ID NO: 422977 - DNA, 19 bp, Homo sapiens
  siRNA target sequence for MGC33214 (NM_153354.2,336-354).
gaaagtaagccattaacca

SEQ ID NO: 422978 - DNA, 19 bp, Homo sapiens
  siRNA target sequence for MGC33214 (NM_153354.2,362-380).
ggatattgaccttcatcta

SEQ ID NO: 422979 - DNA, 19 bp, Homo sapiens
  siRNA target sequence for MGC33214 (NM_153354.2,399-417).
gaagtggatactttagcat

SEQ ID NO: 422980 - DNA, 19 bp, Homo sapiens
  siRNA target sequence for MGC33214 (NM_153354.2,455-473).
cacagtggctgctacagtt

SEQ ID NO: 422981 - DNA, 19 bp, Homo sapiens
  siRNA target sequence for MGC33214 (NM_153354.2,463-481).
ctgctacagttgtgtatct

SEQ ID NO: 422982 - DNA, 19 bp, Homo sapiens
  siRNA target sequence for MGC33214 (NM_153354.2,466-484).
ctacagttgtgtatctagt

SEQ ID NO: 422983 - DNA, 19 bp, Homo sapiens
  siRNA target sequence for MGC33214 (NM_153354.2,483-501).
gtaactgaagtctactaca

SEQ ID NO: 422984 - DNA, 19 bp, Homo sapiens
  siRNA target sequence for MGC33214 (NM_153354.2,492-510).
gtctactacaattttatga

SEQ ID NO: 422985 - DNA, 19 bp, Homo sapiens
  siRNA target sequence for MGC33214 (NM_153354.2,540-558).
gtctggtgcctacttgttt

SEQ ID NO: 422986 - DNA, 19 bp, Homo sapiens
  siRNA target sequence for MGC33214 (NM_153354.2,586-604).
cattaactacacactattt

SEQ ID NO: 422987 - DNA, 19 bp, Homo sapiens
  siRNA target sequence for MGC33214 (NM_153354.2,592-610).
ctacacactattttaaagt

SEQ ID NO: 422988 - DNA, 19 bp, Homo sapiens
  siRNA target sequence for MGC33214 (NM_153354.2,618-636).
ggtggtgaaagatctgttt

SEQ ID NO: 422989 - DNA, 19 bp, Homo sapiens
  siRNA target sequence for MGC33214 (NM_153354.2,622-640).
gtgaaagatctgtttgtgt

SEQ ID NO: 422990 - DNA, 19 bp, Homo sapiens
  siRNA target sequence for MGC33214 (NM_153354.2,637-655).
gtgtcacctttggattttt

SEQ ID NO: 422991 - DNA, 19 bp, Homo sapiens
  siRNA target sequence for MGC33214 (NM_153354.2,714-732).
cttgaaacagggtttacaa

SEQ ID NO: 422992 - DNA, 19 bp, Homo sapiens
  siRNA target sequence for MGC33214 (NM_153354.2,743-761).
cagtgcgatgcagtttctt

SEQ ID NO: 422993 - DNA, 19 bp, Homo sapiens
  siRNA target sequence for MGC33214 (NM_153354.2,745-763).
gtgcgatgcagtttcttga

SEQ ID NO: 422994 - DNA, 19 bp, Homo sapiens
  siRNA target sequence for MGC33214 (NM_153354.2,748-766).
cgatgcagtttcttgaaaa

SEQ ID NO: 422995 - DNA, 19 bp, Homo sapiens
  siRNA target sequence for MGC33214 (NM_153354.2,781-799).
ctcagagtcctgtttcaaa

SEQ ID NO: 422996 - DNA, 19 bp, Homo sapiens
  siRNA target sequence for MGC33214 (NM_153354.2,785-803).
gagtcctgtttcaaaactt

SEQ ID NO: 422997 - DNA, 19 bp, Homo sapiens
  siRNA target sequence for MGC33214 (NM_153354.2,839-857).
cattggggcttttttgaca

SEQ ID NO: 422998 - DNA, 19 bp, Homo sapiens
  siRNA target sequence for MGC33214 (NM_153354.2,854-872).
gacatttcctggattacga

SEQ ID NO: 422999 - DNA, 19 bp, Homo sapiens
  siRNA target sequence for MGC33214 (NM_153354.2,865-883).
gattacgactggctcaaat

SEQ ID NO: 423000 - DNA, 19 bp, Homo sapiens
  siRNA target sequence for MGC33214 (NM_153354.2,928-946).
ctttacttcatatcaactt

SEQ ID NO: 423001 - DNA, 19 bp, Homo sapiens
  siRNA target sequence for MGC33214 (NM_153354.2,1026-1044).
gaaagtatccctttaatga

SEQ ID NO: 423002 - DNA, 19 bp, Homo sapiens
  siRNA target sequence for MGC33214 (NM_153354.2,1043-1061).
gacagaagccacattcgat

SEQ ID NO: 423003 - DNA, 19 bp, Homo sapiens
  siRNA target sequence for MGC33214 (NM_153354.2,1063-1081).
ctctgcgactctggttaat

SEQ ID NO: 423004 - DNA, 19 bp, Homo sapiens
  siRNA target sequence for MGC33214 (NM_153354.2,1065-1083).
ctgcgactctggttaataa

SEQ ID NO: 423005 - DNA, 19 bp, Homo sapiens
  siRNA target sequence for MGC33214 (NM_153354.2,1069-1087).
gactctggttaataatcct

SEQ ID NO: 423006 - DNA, 19 bp, Homo sapiens
  siRNA target sequence for MGC33214 (NM_153354.2,1117-1135).
gtagtcacctgcaagctta

SEQ ID NO: 423007 - DNA, 19 bp, Homo sapiens
  siRNA target sequence for MGC33214 (NM_153354.2,1120-1138).
gtcacctgcaagcttattt

SEQ ID NO: 423008 - DNA, 19 bp, Homo sapiens
  siRNA target sequence for MGC33214 (NM_153354.2,1122-1140).
cacctgcaagcttatttaa

SEQ ID NO: 423009 - DNA, 19 bp, Homo sapiens
  siRNA target sequence for MGC33214 (NM_153354.2,1192-1210).
gcacggttgagctacagaa

SEQ ID NO: 423010 - DNA, 19 bp, Homo sapiens
  siRNA target sequence for MGC33214 (NM_153354.2,1193-1211).
cacggttgagctacagaaa

SEQ ID NO: 423011 - DNA, 19 bp, Homo sapiens
  siRNA target sequence for MGC33214 (NM_153354.2,1195-1213).
cggttgagctacagaaaat

SEQ ID NO: 423012 - DNA, 19 bp, Homo sapiens
  siRNA target sequence for MGC33214 (NM_153354.2,1214-1232).
ggtggctcgagtcttttat

SEQ ID NO: 423013 - DNA, 19 bp, Homo sapiens
  siRNA target sequence for MGC33214 (NM_153354.2,1215-1233).
gtggctcgagtcttttatt

SEQ ID NO: 423014 - DNA, 19 bp, Homo sapiens
  siRNA target sequence for MGC33214 (NM_153354.2,1217-1235).
ggctcgagtcttttattat

SEQ ID NO: 423015 - DNA, 19 bp, Homo sapiens
  siRNA target sequence for MGC33214 (NM_153354.2,1219-1237).
ctcgagtcttttattatct

SEQ ID NO: 423016 - DNA, 19 bp, Homo sapiens
  siRNA target sequence for MGC33214 (NM_153354.2,1325-1343).
gggtatttatccagaatct

SEQ ID NO: 423017 - DNA, 19 bp, Homo sapiens
  siRNA target sequence for MGC33214 (NM_153354.2,1369-1387).
gtctactgtccaattctgt

SEQ ID NO: 423018 - DNA, 19 bp, Homo sapiens
  siRNA target sequence for MGC33214 (NM_153354.2,1421-1439).
gaaggtaactgttacacaa

SEQ ID NO: 423019 - DNA, 19 bp, Homo sapiens
  siRNA target sequence for MGC33214 (NM_153354.2,1425-1443).
gtaactgttacacaaataa

SEQ ID NO: 423020 - DNA, 19 bp, Homo sapiens
  siRNA target sequence for MGC33214 (NM_153354.2,1492-1510).
gaggacttctgtcttttct

SEQ ID NO: 423021 - DNA, 19 bp, Homo sapiens
  siRNA target sequence for MGC33214 (NM_153354.2,1527-1545).
gcttgcctcttttctacaa

SEQ ID NO: 423022 - DNA, 19 bp, Homo sapiens
  siRNA target sequence for TCBA1 (NM_153355.2,128-146).
gggatcattaggtttctct

SEQ ID NO: 423023 - DNA, 19 bp, Homo sapiens
  siRNA target sequence for TCBA1 (NM_153355.2,130-148).
gatcattaggtttctctta

SEQ ID NO: 423024 - DNA, 19 bp, Homo sapiens
  siRNA target sequence for TCBA1 (NM_153355.2,259-277).
cgtcattcttggtttgttt

SEQ ID NO: 423025 - DNA, 19 bp, Homo sapiens
  siRNA target sequence for TCBA1 (NM_153355.2,337-355).
ggttacgtggaatgtgttt

SEQ ID NO: 423026 - DNA, 19 bp, Homo sapiens
  siRNA target sequence for TCBA1 (NM_153355.2,380-398).
ggggacctctcaaaggaaa

SEQ ID NO: 423027 - DNA, 19 bp, Homo sapiens
  siRNA target sequence for TCBA1 (NM_153355.2,506-524).
gaagaccatcgctacatca

SEQ ID NO: 423028 - DNA, 19 bp, Homo sapiens
  siRNA target sequence for TCBA1 (NM_153355.2,541-559).
gctggagtaccagtacata

SEQ ID NO: 423029 - DNA, 19 bp, Homo sapiens
  siRNA target sequence for TCBA1 (NM_153355.2,556-574).
catagaagtggctcatagt

SEQ ID NO: 423030 - DNA, 19 bp, Homo sapiens
  siRNA target sequence for TCBA1 (NM_153355.2,607-625).
catctacgcctgttatgtt

SEQ ID NO: 423031 - DNA, 19 bp, Homo sapiens
  siRNA target sequence for TCBA1 (NM_153355.2,719-737).
caactacagcctatgtaca

SEQ ID NO: 423032 - DNA, 19 bp, Homo sapiens
  siRNA target sequence for TCBA1 (NM_153355.2,725-743).
cagcctatgtacatgtcaa

SEQ ID NO: 423033 - DNA, 19 bp, Homo sapiens
  siRNA target sequence for MGC34741 (NM_153356.1,211-229).
ccaaatcacgggacttcat

SEQ ID NO: 423034 - DNA, 19 bp, Homo sapiens
  siRNA target sequence for MGC34741 (NM_153356.1,212-230).
caaatcacgggacttcatt

SEQ ID NO: 423035 - DNA, 19 bp, Homo sapiens
  siRNA target sequence for MGC34741 (NM_153356.1,217-235).
cacgggacttcatttgtgt

SEQ ID NO: 423036 - DNA, 19 bp, Homo sapiens
  siRNA target sequence for MGC34741 (NM_153356.1,368-386).
ggccttatgccaaatgtat

SEQ ID NO: 423037 - DNA, 19 bp, Homo sapiens
  siRNA target sequence for MGC34741 (NM_153356.1,370-388).
ccttatgccaaatgtatga

SEQ ID NO: 423038 - DNA, 19 bp, Homo sapiens
  siRNA target sequence for MGC34741 (NM_153356.1,451-469).
cacgtgacattcagaaaat

SEQ ID NO: 423039 - DNA, 19 bp, Homo sapiens
  siRNA target sequence for MGC34741 (NM_153356.1,574-592).
gcttccatgagatgatgat

SEQ ID NO: 423040 - DNA, 19 bp, Homo sapiens
  siRNA target sequence for MGC34741 (NM_153356.1,1025-1043).
cgcctgcgtggtttatgct

SEQ ID NO: 423041 - DNA, 19 bp, Homo sapiens
  siRNA target sequence for SLC16A11 (NM_153357.1,466-484).
ccgcagccttcgcgataaa

SEQ ID NO: 423042 - DNA, 19 bp, Homo sapiens
  siRNA target sequence for SLC16A11 (NM_153357.1,715-733).
gcgatctgctgcatctcta

SEQ ID NO: 423043 - DNA, 19 bp, Homo sapiens
  siRNA target sequence for SLC16A11 (NM_153357.1,793-811).
gcaccctctcgcgttactt

SEQ ID NO: 423044 - DNA, 19 bp, Homo sapiens
  siRNA target sequence for SLC16A11 (NM_153357.1,891-909).
cagcttcttctcgatactt

SEQ ID NO: 423045 - DNA, 19 bp, Homo sapiens
  siRNA target sequence for SLC16A11 (NM_153357.1,1592-1610).
cggcagcttcatctacata

SEQ ID NO: 423046 - DNA, 19 bp, Homo sapiens
  siRNA target sequence for MGC24975 (NM_153359.1,621-639).
ggccagtcagccctgtata

SEQ ID NO: 423047 - DNA, 19 bp, Homo sapiens
  siRNA target sequence for MGC24975 (NM_153359.1,622-640).
gccagtcagccctgtataa

SEQ ID NO: 423048 - DNA, 19 bp, Homo sapiens
  siRNA target sequence for MGC24975 (NM_153359.1,1312-1330).
ggaactcagccgatgacat

SEQ ID NO: 423049 - DNA, 19 bp, Homo sapiens
  siRNA target sequence for MGC24975 (NM_153359.1,1396-1414).
ccgtgtccaacgttgacta

SEQ ID NO: 423050 - DNA, 19 bp, Homo sapiens
  siRNA target sequence for FLJ90166 (NM_153360.1,336-354).
cctgcctccacgccttaat

SEQ ID NO: 423051 - DNA, 19 bp, Homo sapiens
  siRNA target sequence for FLJ90166 (NM_153360.1,339-357).
gcctccacgccttaatgga

SEQ ID NO: 423052 - DNA, 19 bp, Homo sapiens
  siRNA target sequence for FLJ90166 (NM_153360.1,1112-1130).
gctcctgggaagggtatta

SEQ ID NO: 423053 - DNA, 19 bp, Homo sapiens
  siRNA target sequence for FLJ90166 (NM_153360.1,1411-1429).
gtggagtacgagcttttca

SEQ ID NO: 423054 - DNA, 19 bp, Homo sapiens
  siRNA target sequence for FLJ90166 (NM_153360.1,1414-1432).
gagtacgagcttttcaaga

SEQ ID NO: 423055 - DNA, 19 bp, Homo sapiens
  siRNA target sequence for FLJ90166 (NM_153360.1,1617-1635).
cacagggggtcttcacata

SEQ ID NO: 423056 - DNA, 19 bp, Homo sapiens
  siRNA target sequence for MGC39520 (NM_153364.1,425-443).
ggaggactgctgtatgcta

SEQ ID NO: 423057 - DNA, 19 bp, Homo sapiens
  siRNA target sequence for MGC39520 (NM_153364.1,433-451).
gctgtatgctaccgtatta

SEQ ID NO: 423058 - DNA, 19 bp, Homo sapiens
  siRNA target sequence for MGC39520 (NM_153364.1,521-539).
caaaggcgagtatactata

SEQ ID NO: 423059 - DNA, 19 bp, Homo sapiens
  siRNA target sequence for MGC39520 (NM_153364.1,525-543).
ggcgagtatactatattca

SEQ ID NO: 423060 - DNA, 19 bp, Homo sapiens
  siRNA target sequence for MGC39520 (NM_153364.1,615-633).
cgtgcccgaatggtaacaa

SEQ ID NO: 423061 - DNA, 19 bp, Homo sapiens
  siRNA target sequence for MGC39520 (NM_153364.1,616-634).
gtgcccgaatggtaacaat

SEQ ID NO: 423062 - DNA, 19 bp, Homo sapiens
  siRNA target sequence for MGC39520 (NM_153364.1,748-766).
gtccgcctgcagagatctt

SEQ ID NO: 423063 - DNA, 19 bp, Homo sapiens
  siRNA target sequence for MGC39520 (NM_153364.1,754-772).
ctgcagagatcttagaact

SEQ ID NO: 423064 - DNA, 19 bp, Homo sapiens
  siRNA target sequence for MGC39520 (NM_153364.1,778-796).
ggctgcttcccttgatgtt

SEQ ID NO: 423065 - DNA, 19 bp, Homo sapiens
  siRNA target sequence for MGC39520 (NM_153364.1,898-916).
gtgaagacctttttgttca

SEQ ID NO: 423066 - DNA, 19 bp, Homo sapiens
  siRNA target sequence for MGC39520 (NM_153364.1,1068-1086).
gagcaattcagaatcagta

SEQ ID NO: 423067 - DNA, 19 bp, Homo sapiens
  siRNA target sequence for MGC39520 (NM_153364.1,1078-1096).
gaatcagtagacttcacat

SEQ ID NO: 423068 - DNA, 19 bp, Homo sapiens
  siRNA target sequence for MGC39520 (NM_153364.1,1082-1100).
cagtagacttcacatgaat

SEQ ID NO: 423069 - DNA, 19 bp, Homo sapiens
  siRNA target sequence for MGC39520 (NM_153364.1,1109-1127).
gtttgggtccacctattgt

SEQ ID NO: 423070 - DNA, 19 bp, Homo sapiens
  siRNA target sequence for MGC39520 (NM_153364.1,1113-1131).
gggtccacctattgtgatt

SEQ ID NO: 423071 - DNA, 19 bp, Homo sapiens
  siRNA target sequence for MGC39520 (NM_153364.1,1115-1133).
gtccacctattgtgattat

SEQ ID NO: 423072 - DNA, 19 bp, Homo sapiens
  siRNA target sequence for FLJ90013 (NM_153365.1,207-225).
cgcacagagctttcattgt

SEQ ID NO: 423073 - DNA, 19 bp, Homo sapiens
  siRNA target sequence for FLJ90013 (NM_153365.1,234-252).
ctcagtgctgaactaacaa

SEQ ID NO: 423074 - DNA, 19 bp, Homo sapiens
  siRNA target sequence for FLJ90013 (NM_153365.1,236-254).
cagtgctgaactaacaaga

SEQ ID NO: 423075 - DNA, 19 bp, Homo sapiens
  siRNA target sequence for FLJ90013 (NM_153365.1,253-271).
gagggtacttccttgaaca

SEQ ID NO: 423076 - DNA, 19 bp, Homo sapiens
  siRNA target sequence for FLJ90013 (NM_153365.1,255-273).
gggtacttccttgaacata

SEQ ID NO: 423077 - DNA, 19 bp, Homo sapiens
  siRNA target sequence for FLJ90013 (NM_153365.1,276-294).
gaggccaagtatacagaaa

SEQ ID NO: 423078 - DNA, 19 bp, Homo sapiens
  siRNA target sequence for FLJ90013 (NM_153365.1,278-296).
ggccaagtatacagaaaga

SEQ ID NO: 423079 - DNA, 19 bp, Homo sapiens
  siRNA target sequence for FLJ90013 (NM_153365.1,371-389).
cctggatgcgtttttgtat

SEQ ID NO: 423080 - DNA, 19 bp, Homo sapiens
  siRNA target sequence for FLJ90013 (NM_153365.1,375-393).
gatgcgtttttgtatgtgt

SEQ ID NO: 423081 - DNA, 19 bp, Homo sapiens
  siRNA target sequence for FLJ90013 (NM_153365.1,437-455).
cctcactttgccttgctat

SEQ ID NO: 423082 - DNA, 19 bp, Homo sapiens
  siRNA target sequence for FLJ90013 (NM_153365.1,510-528).
ggtgtcattttggtaatct

SEQ ID NO: 423083 - DNA, 19 bp, Homo sapiens
  siRNA target sequence for FLJ90013 (NM_153365.1,549-567).
gttgactactccatgatgt

SEQ ID NO: 423084 - DNA, 19 bp, Homo sapiens
  siRNA target sequence for FLJ90013 (NM_153365.1,580-598).
gggggcagtccgtcatcaa

SEQ ID NO: 423085 - DNA, 19 bp, Homo sapiens
  siRNA target sequence for FLJ90013 (NM_153365.1,589-607).
ccgtcatcaagctctacat

SEQ ID NO: 423086 - DNA, 19 bp, Homo sapiens
  siRNA target sequence for FLJ90013 (NM_153365.1,626-644).
ggtagctgatcgtctgttt

SEQ ID NO: 423087 - DNA, 19 bp, Homo sapiens
  siRNA target sequence for FLJ90013 (NM_153365.1,662-680).
catattagatgctctctat

SEQ ID NO: 423088 - DNA, 19 bp, Homo sapiens
  siRNA target sequence for FLJ90013 (NM_153365.1,803-821).
caatgtagcttttaactca

SEQ ID NO: 423089 - DNA, 19 bp, Homo sapiens
  siRNA target sequence for FLJ90013 (NM_153365.1,841-859).
ctatcatgatgtctaataa

SEQ ID NO: 423090 - DNA, 19 bp, Homo sapiens
  siRNA target sequence for FLJ90013 (NM_153365.1,938-956).
ggaacgattcacaaattat

SEQ ID NO: 423091 - DNA, 19 bp, Homo sapiens
  siRNA target sequence for FLJ90013 (NM_153365.1,1038-1056).
gtctgtatggtaattgcat

SEQ ID NO: 423092 - DNA, 19 bp, Homo sapiens
  siRNA target sequence for FLJ90013 (NM_153365.1,1046-1064).
ggtaattgcatcagaaatt

SEQ ID NO: 423093 - DNA, 19 bp, Homo sapiens
  siRNA target sequence for FLJ90013 (NM_153365.1,1066-1084).
ccgtggatattgtaaaaca

SEQ ID NO: 423094 - DNA, 19 bp, Homo sapiens
  siRNA target sequence for FLJ90013 (NM_153365.1,1067-1085).
cgtggatattgtaaaacat

SEQ ID NO: 423095 - DNA, 19 bp, Homo sapiens
  siRNA target sequence for FLJ90013 (NM_153365.1,1210-1228).
cacggaggatgggctttat

SEQ ID NO: 423096 - DNA, 19 bp, Homo sapiens
  siRNA target sequence for FLJ90013 (NM_153365.1,1260-1278).
gttgtaacaagctcaatta

SEQ ID NO: 423097 - DNA, 19 bp, Homo sapiens
  siRNA target sequence for FLJ90013 (NM_153365.1,1295-1313).
gtcttatgcctgtgtcata

SEQ ID NO: 423098 - DNA, 19 bp, Homo sapiens
  siRNA target sequence for FLJ90013 (NM_153365.1,1297-1315).
cttatgcctgtgtcatact

SEQ ID NO: 423099 - DNA, 19 bp, Homo sapiens
  siRNA target sequence for FLJ90013 (NM_153365.1,1303-1321).
cctgtgtcatactcttcta

SEQ ID NO: 423100 - DNA, 19 bp, Homo sapiens
  siRNA target sequence for FLJ90013 (NM_153365.1,1304-1322).
ctgtgtcatactcttctat

SEQ ID NO: 423101 - DNA, 19 bp, Homo sapiens
  siRNA target sequence for FLJ90013 (NM_153365.1,1331-1349).
gatatccctgaaagtactt

SEQ ID NO: 423102 - DNA, 19 bp, Homo sapiens
  siRNA target sequence for FLJ90013 (NM_153365.1,1359-1377).
gtgctgttggggaaatcgt

SEQ ID NO: 423103 - DNA, 19 bp, Homo sapiens
  siRNA target sequence for FLJ90013 (NM_153365.1,1443-1461).
ggcaagccgtccagtaaat

SEQ ID NO: 423104 - DNA, 19 bp, Homo sapiens
  siRNA target sequence for FLJ90013 (NM_153365.1,1520-1538).
catcaccaaacaacctatt

SEQ ID NO: 423105 - DNA, 19 bp, Homo sapiens
  siRNA target sequence for FLJ90013 (NM_153365.1,1523-1541).
caccaaacaacctattcat

SEQ ID NO: 423106 - DNA, 19 bp, Homo sapiens
  siRNA target sequence for FLJ90013 (NM_153365.1,1573-1591).
caagcaattctgatcagtt

SEQ ID NO: 423107 - DNA, 19 bp, Homo sapiens
  siRNA target sequence for FLJ90013 (NM_153365.1,1608-1626).
ggtgacgagaaggacataa

SEQ ID NO: 423108 - DNA, 19 bp, Homo sapiens
  siRNA target sequence for FLJ90013 (NM_153365.1,1620-1638).
gacataacgcaggacaatt

SEQ ID NO: 423109 - DNA, 19 bp, Homo sapiens
  siRNA target sequence for FLJ90013 (NM_153365.1,1682-1700).
gtctgggcttccagaatgt

SEQ ID NO: 423110 - DNA, 19 bp, Homo sapiens
  siRNA target sequence for KIAA1919 (NM_153369.1,379-397).
gggacccacgtttcaagat

SEQ ID NO: 423111 - DNA, 19 bp, Homo sapiens
  siRNA target sequence for KIAA1919 (NM_153369.1,380-398).
ggacccacgtttcaagatt

SEQ ID NO: 423112 - DNA, 19 bp, Homo sapiens
  siRNA target sequence for KIAA1919 (NM_153369.1,381-399).
gacccacgtttcaagattt

SEQ ID NO: 423113 - DNA, 19 bp, Homo sapiens
  siRNA target sequence for KIAA1919 (NM_153369.1,405-423).
caaacgtgaaccgaaatat

SEQ ID NO: 423114 - DNA, 19 bp, Homo sapiens
  siRNA target sequence for KIAA1919 (NM_153369.1,409-427).
cgtgaaccgaaatatcagt

SEQ ID NO: 423115 - DNA, 19 bp, Homo sapiens
  siRNA target sequence for KIAA1919 (NM_153369.1,449-467).
ggtcgtgccttgggatatt

SEQ ID NO: 423116 - DNA, 19 bp, Homo sapiens
  siRNA target sequence for KIAA1919 (NM_153369.1,450-468).
gtcgtgccttgggatattt

SEQ ID NO: 423117 - DNA, 19 bp, Homo sapiens
  siRNA target sequence for KIAA1919 (NM_153369.1,452-470).
cgtgccttgggatatttga

SEQ ID NO: 423118 - DNA, 19 bp, Homo sapiens
  siRNA target sequence for KIAA1919 (NM_153369.1,489-507).
gatttcttgtcgatgtcat

SEQ ID NO: 423119 - DNA, 19 bp, Homo sapiens
  siRNA target sequence for KIAA1919 (NM_153369.1,543-561).
ctaccaccgttggtcttta

SEQ ID NO: 423120 - DNA, 19 bp, Homo sapiens
  siRNA target sequence for KIAA1919 (NM_153369.1,546-564).
ccaccgttggtctttatct

SEQ ID NO: 423121 - DNA, 19 bp, Homo sapiens
  siRNA target sequence for KIAA1919 (NM_153369.1,549-567).
ccgttggtctttatcttgt

SEQ ID NO: 423122 - DNA, 19 bp, Homo sapiens
  siRNA target sequence for KIAA1919 (NM_153369.1,550-568).
cgttggtctttatcttgtt

SEQ ID NO: 423123 - DNA, 19 bp, Homo sapiens
  siRNA target sequence for KIAA1919 (NM_153369.1,576-594).
gcaagacagcaatattact

SEQ ID NO: 423124 - DNA, 19 bp, Homo sapiens
  siRNA target sequence for KIAA1919 (NM_153369.1,609-627).
ctatcttcggtgtttcaat

SEQ ID NO: 423125 - DNA, 19 bp, Homo sapiens
  siRNA target sequence for KIAA1919 (NM_153369.1,642-660).
caggtggtaacgtccttat

SEQ ID NO: 423126 - DNA, 19 bp, Homo sapiens
  siRNA target sequence for KIAA1919 (NM_153369.1,644-662).
ggtggtaacgtccttatct

SEQ ID NO: 423127 - DNA, 19 bp, Homo sapiens
  siRNA target sequence for KIAA1919 (NM_153369.1,645-663).
gtggtaacgtccttatctt

SEQ ID NO: 423128 - DNA, 19 bp, Homo sapiens
  siRNA target sequence for KIAA1919 (NM_153369.1,736-754).
ggctccactgctagctaaa

SEQ ID NO: 423129 - DNA, 19 bp, Homo sapiens
  siRNA target sequence for KIAA1919 (NM_153369.1,738-756).
ctccactgctagctaaact

SEQ ID NO: 423130 - DNA, 19 bp, Homo sapiens
  siRNA target sequence for KIAA1919 (NM_153369.1,768-786).
cgacagcgtctgctgaaaa

SEQ ID NO: 423131 - DNA, 19 bp, Homo sapiens
  siRNA target sequence for KIAA1919 (NM_153369.1,846-864).
ctctgtttggagtacctaa

SEQ ID NO: 423132 - DNA, 19 bp, Homo sapiens
  siRNA target sequence for KIAA1919 (NM_153369.1,850-868).
gtttggagtacctaatgat

SEQ ID NO: 423133 - DNA, 19 bp, Homo sapiens
  siRNA target sequence for KIAA1919 (NM_153369.1,854-872).
ggagtacctaatgataaga

SEQ ID NO: 423134 - DNA, 19 bp, Homo sapiens
  siRNA target sequence for KIAA1919 (NM_153369.1,855-873).
gagtacctaatgataagaa

SEQ ID NO: 423135 - DNA, 19 bp, Homo sapiens
  siRNA target sequence for KIAA1919 (NM_153369.1,890-908).
gctgttatcggtacttaca

SEQ ID NO: 423136 - DNA, 19 bp, Homo sapiens
  siRNA target sequence for KIAA1919 (NM_153369.1,891-909).
ctgttatcggtacttacat

SEQ ID NO: 423137 - DNA, 19 bp, Homo sapiens
  siRNA target sequence for KIAA1919 (NM_153369.1,893-911).
gttatcggtacttacatgt

SEQ ID NO: 423138 - DNA, 19 bp, Homo sapiens
  siRNA target sequence for KIAA1919 (NM_153369.1,898-916).
cggtacttacatgttctta

SEQ ID NO: 423139 - DNA, 19 bp, Homo sapiens
  siRNA target sequence for KIAA1919 (NM_153369.1,1077-1095).
gctcttatgttttctcatt

SEQ ID NO: 423140 - DNA, 19 bp, Homo sapiens
  siRNA target sequence for KIAA1919 (NM_153369.1,1102-1120).
cacccatgctggcatgaaa

SEQ ID NO: 423141 - DNA, 19 bp, Homo sapiens
  siRNA target sequence for KIAA1919 (NM_153369.1,1105-1123).
ccatgctggcatgaaagaa

SEQ ID NO: 423142 - DNA, 19 bp, Homo sapiens
  siRNA target sequence for KIAA1919 (NM_153369.1,1189-1207).
cttttttgctacctgttta

SEQ ID NO: 423143 - DNA, 19 bp, Homo sapiens
  siRNA target sequence for KIAA1919 (NM_153369.1,1222-1240).
gattgtgttgagcaacatt

SEQ ID NO: 423144 - DNA, 19 bp, Homo sapiens
  siRNA target sequence for KIAA1919 (NM_153369.1,1243-1261).
cagcctgacttcatcttta

SEQ ID NO: 423145 - DNA, 19 bp, Homo sapiens
  siRNA target sequence for KIAA1919 (NM_153369.1,1300-1318).
gatagcaacttcagtgtat

SEQ ID NO: 423146 - DNA, 19 bp, Homo sapiens
  siRNA target sequence for KIAA1919 (NM_153369.1,1375-1393).
gaccatccatgggaaatct

SEQ ID NO: 423147 - DNA, 19 bp, Homo sapiens
  siRNA target sequence for KIAA1919 (NM_153369.1,1443-1461).
cagtcattggaattcttca

SEQ ID NO: 423148 - DNA, 19 bp, Homo sapiens
  siRNA target sequence for KIAA1919 (NM_153369.1,1618-1636).
ctctagctccgggctaaat

SEQ ID NO: 423149 - DNA, 19 bp, Homo sapiens
  siRNA target sequence for KIAA1919 (NM_153369.1,1620-1638).
ctagctccgggctaaatga

SEQ ID NO: 423150 - DNA, 19 bp, Homo sapiens
  siRNA target sequence for KIAA1919 (NM_153369.1,1623-1641).
gctccgggctaaatgaata

SEQ ID NO: 423151 - DNA, 19 bp, Homo sapiens
  siRNA target sequence for KIAA1919 (NM_153369.1,1624-1642).
ctccgggctaaatgaatat

SEQ ID NO: 423152 - DNA, 19 bp, Homo sapiens
  siRNA target sequence for KIAA1919 (NM_153369.1,1626-1644).
ccgggctaaatgaatatga

SEQ ID NO: 423153 - DNA, 19 bp, Homo sapiens
  siRNA target sequence for KIAA1919 (NM_153369.1,1712-1730).
gatacaatgaggcattcta

SEQ ID NO: 423154 - DNA, 19 bp, Homo sapiens
  siRNA target sequence for KIAA1919 (NM_153369.1,1763-1781).
cccacagctgaagtctata

SEQ ID NO: 423155 - DNA, 19 bp, Homo sapiens
  siRNA target sequence for KIAA1919 (NM_153369.1,1765-1783).
cacagctgaagtctataat

SEQ ID NO: 423156 - DNA, 19 bp, Homo sapiens
  siRNA target sequence for KIAA1919 (NM_153369.1,1769-1787).
gctgaagtctataatcaat

SEQ ID NO: 423157 - DNA, 19 bp, Homo sapiens
  siRNA target sequence for KIAA1919 (NM_153369.1,1794-1812).
caaatgcactggtgtttga

SEQ ID NO: 423158 - DNA, 19 bp, Homo sapiens
  siRNA target sequence for KIAA1919 (NM_153369.1,1807-1825).
gtttgagtcttctcctttt

SEQ ID NO: 423159 - DNA, 19 bp, Homo sapiens
  siRNA target sequence for FLJ90575 (NM_153376.1,726-744).
cccagcgctacaacctata

SEQ ID NO: 423160 - DNA, 19 bp, Homo sapiens
  siRNA target sequence for FLJ90575 (NM_153376.1,1089-1107).
cgttggaggataaaaagga

SEQ ID NO: 423161 - DNA, 19 bp, Homo sapiens
  siRNA target sequence for FLJ90575 (NM_153376.1,1123-1141).
cgtgcggctggagaacatt

SEQ ID NO: 423162 - DNA, 19 bp, Homo sapiens
  siRNA target sequence for FLJ90575 (NM_153376.1,1246-1264).
ccaaaccttcaatgagaaa

SEQ ID NO: 423163 - DNA, 19 bp, Homo sapiens
  siRNA target sequence for FLJ90575 (NM_153376.1,1271-1289).
gaacgaaatgaggaacttt

SEQ ID NO: 423164 - DNA, 19 bp, Homo sapiens
  siRNA target sequence for FLJ90575 (NM_153376.1,1312-1330).
caacagtgtgcaagtaata

SEQ ID NO: 423165 - DNA, 19 bp, Homo sapiens
  siRNA target sequence for FLJ90575 (NM_153376.1,1369-1387).
gaacgcgtgcaaaaagaca

SEQ ID NO: 423166 - DNA, 19 bp, Homo sapiens
  siRNA target sequence for FLJ90575 (NM_153376.1,1461-1479).
ggctgcggacggacaacat

SEQ ID NO: 423167 - DNA, 19 bp, Homo sapiens
  siRNA target sequence for FLJ90575 (NM_153376.1,1595-1613).
cacgctagcctcactttgt

SEQ ID NO: 423168 - DNA, 19 bp, Homo sapiens
  siRNA target sequence for FLJ90440 (NM_153377.3,472-490).
gtcgctcggctggacttaa

SEQ ID NO: 423169 - DNA, 19 bp, Homo sapiens
  siRNA target sequence for FLJ90440 (NM_153377.3,474-492).
cgctcggctggacttaagt

SEQ ID NO: 423170 - DNA, 19 bp, Homo sapiens
  siRNA target sequence for FLJ90440 (NM_153377.3,476-494).
ctcggctggacttaagtca

SEQ ID NO: 423171 - DNA, 19 bp, Homo sapiens
  siRNA target sequence for FLJ90440 (NM_153377.3,491-509).
gtcacaacagattatcttt

SEQ ID NO: 423172 - DNA, 19 bp, Homo sapiens
  siRNA target sequence for FLJ90440 (NM_153377.3,542-560).
gccttcgagaagtgaaact

SEQ ID NO: 423173 - DNA, 19 bp, Homo sapiens
  siRNA target sequence for FLJ90440 (NM_153377.3,544-562).
cttcgagaagtgaaactga

SEQ ID NO: 423174 - DNA, 19 bp, Homo sapiens
  siRNA target sequence for FLJ90440 (NM_153377.3,635-653).
gaaacaggattgttgaaat

SEQ ID NO: 423175 - DNA, 19 bp, Homo sapiens
  siRNA target sequence for FLJ90440 (NM_153377.3,696-714).
ggaccttagcagcaacaat

SEQ ID NO: 423176 - DNA, 19 bp, Homo sapiens
  siRNA target sequence for FLJ90440 (NM_153377.3,697-715).
gaccttagcagcaacaata

SEQ ID NO: 423177 - DNA, 19 bp, Homo sapiens
  siRNA target sequence for FLJ90440 (NM_153377.3,699-717).
ccttagcagcaacaatatt

SEQ ID NO: 423178 - DNA, 19 bp, Homo sapiens
  siRNA target sequence for FLJ90440 (NM_153377.3,704-722).
gcagcaacaatatttcaga

SEQ ID NO: 423179 - DNA, 19 bp, Homo sapiens
  siRNA target sequence for FLJ90440 (NM_153377.3,740-758).
cagccctacagctcaaata

SEQ ID NO: 423180 - DNA, 19 bp, Homo sapiens
  siRNA target sequence for FLJ90440 (NM_153377.3,773-791).
gcaaccgagtcacatcaat

SEQ ID NO: 423181 - DNA, 19 bp, Homo sapiens
  siRNA target sequence for FLJ90440 (NM_153377.3,777-795).
ccgagtcacatcaatggaa

SEQ ID NO: 423182 - DNA, 19 bp, Homo sapiens
  siRNA target sequence for FLJ90440 (NM_153377.3,788-806).
caatggaacctgggtattt

SEQ ID NO: 423183 - DNA, 19 bp, Homo sapiens
  siRNA target sequence for FLJ90440 (NM_153377.3,797-815).
ctgggtattttgacaattt

SEQ ID NO: 423184 - DNA, 19 bp, Homo sapiens
  siRNA target sequence for FLJ90440 (NM_153377.3,843-861).
gaacaggaaccgaatctca

SEQ ID NO: 423185 - DNA, 19 bp, Homo sapiens
  siRNA target sequence for FLJ90440 (NM_153377.3,867-885).
cccacccaagatgtttaaa

SEQ ID NO: 423186 - DNA, 19 bp, Homo sapiens
  siRNA target sequence for FLJ90440 (NM_153377.3,995-1013).
gagtaacgaaacttatgga

SEQ ID NO: 423187 - DNA, 19 bp, Homo sapiens
  siRNA target sequence for FLJ90440 (NM_153377.3,1068-1086).
cctaacagagattaccaaa

SEQ ID NO: 423188 - DNA, 19 bp, Homo sapiens
  siRNA target sequence for FLJ90440 (NM_153377.3,1187-1205).
gtgagctggacctaacttt

SEQ ID NO: 423189 - DNA, 19 bp, Homo sapiens
  siRNA target sequence for FLJ90440 (NM_153377.3,1197-1215).
cctaactttcaatcactta

SEQ ID NO: 423190 - DNA, 19 bp, Homo sapiens
  siRNA target sequence for FLJ90440 (NM_153377.3,1212-1230).
cttatcaaggttagatgat

SEQ ID NO: 423191 - DNA, 19 bp, Homo sapiens
  siRNA target sequence for FLJ90440 (NM_153377.3,1243-1261).
ggcctaagcttactaaata

SEQ ID NO: 423192 - DNA, 19 bp, Homo sapiens
  siRNA target sequence for FLJ90440 (NM_153377.3,1245-1263).
cctaagcttactaaataca

SEQ ID NO: 423193 - DNA, 19 bp, Homo sapiens
  siRNA target sequence for FLJ90440 (NM_153377.3,1317-1335).
gctttccagtttaaagact

SEQ ID NO: 423194 - DNA, 19 bp, Homo sapiens
  siRNA target sequence for FLJ90440 (NM_153377.3,1365-1383).
gactattgaagacatgaat

SEQ ID NO: 423195 - DNA, 19 bp, Homo sapiens
  siRNA target sequence for FLJ90440 (NM_153377.3,1404-1422).
caaactgaggcgactgata

SEQ ID NO: 423196 - DNA, 19 bp, Homo sapiens
  siRNA target sequence for FLJ90440 (NM_153377.3,1415-1433).
gactgatactccaaggaaa

SEQ ID NO: 423197 - DNA, 19 bp, Homo sapiens
  siRNA target sequence for FLJ90440 (NM_153377.3,1430-1448).
gaaatcggatccgttctat

SEQ ID NO: 423198 - DNA, 19 bp, Homo sapiens
  siRNA target sequence for FLJ90440 (NM_153377.3,1435-1453).
cggatccgttctattacta

SEQ ID NO: 423199 - DNA, 19 bp, Homo sapiens
  siRNA target sequence for FLJ90440 (NM_153377.3,1436-1454).
ggatccgttctattactaa

SEQ ID NO: 423200 - DNA, 19 bp, Homo sapiens
  siRNA target sequence for FLJ90440 (NM_153377.3,1437-1455).
gatccgttctattactaaa

SEQ ID NO: 423201 - DNA, 19 bp, Homo sapiens
  siRNA target sequence for FLJ90440 (NM_153377.3,1501-1519).
gacaacgcaatcatgtctt

SEQ ID NO: 423202 - DNA, 19 bp, Homo sapiens
  siRNA target sequence for FLJ90440 (NM_153377.3,1503-1521).
caacgcaatcatgtcttta

SEQ ID NO: 423203 - DNA, 19 bp, Homo sapiens
  siRNA target sequence for FLJ90440 (NM_153377.3,1587-1605).
gtgcgattgccagctaaaa

SEQ ID NO: 423204 - DNA, 19 bp, Homo sapiens
  siRNA target sequence for FLJ90440 (NM_153377.3,1619-1637).
gggtggcggaaaacaactt

SEQ ID NO: 423205 - DNA, 19 bp, Homo sapiens
  siRNA target sequence for FLJ90440 (NM_153377.3,1620-1638).
ggtggcggaaaacaacttt

SEQ ID NO: 423206 - DNA, 19 bp, Homo sapiens
  siRNA target sequence for FLJ90440 (NM_153377.3,1624-1642).
gcggaaaacaactttcaga

SEQ ID NO: 423207 - DNA, 19 bp, Homo sapiens
  siRNA target sequence for FLJ90440 (NM_153377.3,1749-1767).
cacggttcagccagaaaca

SEQ ID NO: 423208 - DNA, 19 bp, Homo sapiens
  siRNA target sequence for FLJ90440 (NM_153377.3,1773-1791).
ggcaataaaaggttccaat

SEQ ID NO: 423209 - DNA, 19 bp, Homo sapiens
  siRNA target sequence for FLJ90440 (NM_153377.3,1774-1792).
gcaataaaaggttccaatt

SEQ ID NO: 423210 - DNA, 19 bp, Homo sapiens
  siRNA target sequence for FLJ90440 (NM_153377.3,1915-1933).
ggcgaggtgatggagtata

SEQ ID NO: 423211 - DNA, 19 bp, Homo sapiens
  siRNA target sequence for FLJ90440 (NM_153377.3,1967-1985).
ccagtgaggggaaatatca

SEQ ID NO: 423212 - DNA, 19 bp, Homo sapiens
  siRNA target sequence for FLJ90440 (NM_153377.3,2251-2269).
gaggacattggggtataca

SEQ ID NO: 423213 - DNA, 19 bp, Homo sapiens
  siRNA target sequence for FLJ90440 (NM_153377.3,2353-2371).
ctgttggaccgaactgtaa

SEQ ID NO: 423214 - DNA, 19 bp, Homo sapiens
  siRNA target sequence for FLJ90440 (NM_153377.3,2461-2479).
gtaaccgagaggcactttt

SEQ ID NO: 423215 - DNA, 19 bp, Homo sapiens
  siRNA target sequence for FLJ90440 (NM_153377.3,2466-2484).
cgagaggcacttttttgca

SEQ ID NO: 423216 - DNA, 19 bp, Homo sapiens
  siRNA target sequence for FLJ90440 (NM_153377.3,2488-2506).
ggcaatcagcttctgatta

SEQ ID NO: 423217 - DNA, 19 bp, Homo sapiens
  siRNA target sequence for FLJ90440 (NM_153377.3,2666-2684).
ctgtgggtgtcgtgatcat

SEQ ID NO: 423218 - DNA, 19 bp, Homo sapiens
  siRNA target sequence for FLJ90440 (NM_153377.3,2718-2736).
cgtgtgggtggtcatcata

SEQ ID NO: 423219 - DNA, 19 bp, Homo sapiens
  siRNA target sequence for FLJ90440 (NM_153377.3,2790-2808).
caacttgccagcagatatt

SEQ ID NO: 423220 - DNA, 19 bp, Homo sapiens
  siRNA target sequence for FLJ90440 (NM_153377.3,2793-2811).
cttgccagcagatattcct

SEQ ID NO: 423221 - DNA, 19 bp, Homo sapiens
  siRNA target sequence for FLJ90440 (NM_153377.3,2803-2821).
gatattcctagttatttgt

SEQ ID NO: 423222 - DNA, 19 bp, Homo sapiens
  siRNA target sequence for FLJ90440 (NM_153377.3,2820-2838).
gtcatctcagggaacgtta

SEQ ID NO: 423223 - DNA, 19 bp, Homo sapiens
  siRNA target sequence for FLJ90440 (NM_153377.3,2856-2874).
gtacgtgtcttcagaaagt

SEQ ID NO: 423224 - DNA, 19 bp, Homo sapiens
  siRNA target sequence for FLJ90440 (NM_153377.3,2939-2957).
gtgggacctgccatattga

SEQ ID NO: 423225 - DNA, 19 bp, Homo sapiens
  siRNA target sequence for FLJ90440 (NM_153377.3,2941-2959).
gggacctgccatattgaca

SEQ ID NO: 423226 - DNA, 19 bp, Homo sapiens
  siRNA target sequence for FLJ90440 (NM_153377.3,2942-2960).
ggacctgccatattgacaa

SEQ ID NO: 423227 - DNA, 19 bp, Homo sapiens
  siRNA target sequence for FLJ90440 (NM_153377.3,2943-2961).
gacctgccatattgacaat

SEQ ID NO: 423228 - DNA, 19 bp, Homo sapiens
  siRNA target sequence for FLJ90440 (NM_153377.3,3017-3035).
gatccacaggccctatgta

SEQ ID NO: 423229 - DNA, 19 bp, Homo sapiens
  siRNA target sequence for FLJ90440 (NM_153377.3,3020-3038).
ccacaggccctatgtattt

SEQ ID NO: 423230 - DNA, 19 bp, Homo sapiens
  siRNA target sequence for FLJ90440 (NM_153377.3,3055-3073).
ggctcagatccttttgaaa

SEQ ID NO: 423231 - DNA, 19 bp, Homo sapiens
  siRNA target sequence for FLJ90440 (NM_153377.3,3121-3139).
cactatgagcccagttaca

SEQ ID NO: 423232 - DNA, 19 bp, Homo sapiens
  siRNA target sequence for FLJ90440 (NM_153377.3,3123-3141).
ctatgagcccagttacata

SEQ ID NO: 423233 - DNA, 19 bp, Homo sapiens
  siRNA target sequence for FLJ90440 (NM_153377.3,3150-3168).
ggagtgctacccatgttct

SEQ ID NO: 423234 - DNA, 19 bp, Homo sapiens
  siRNA target sequence for FLJ90440 (NM_153377.3,3153-3171).
gtgctacccatgttctcat

SEQ ID NO: 423235 - DNA, 19 bp, Homo sapiens
  siRNA target sequence for FLJ90440 (NM_153377.3,3188-3206).
gcgaacggagcttcagtaa

SEQ ID NO: 423236 - DNA, 19 bp, Homo sapiens
  siRNA target sequence for FLJ90440 (NM_153377.3,3189-3207).
cgaacggagcttcagtaat

SEQ ID NO: 423237 - DNA, 19 bp, Homo sapiens
  siRNA target sequence for FLJ90440 (NM_153377.3,3190-3208).
gaacggagcttcagtaata

SEQ ID NO: 423238 - DNA, 19 bp, Homo sapiens
  siRNA target sequence for FLJ90440 (NM_153377.3,3193-3211).
cggagcttcagtaatatat

SEQ ID NO: 423239 - DNA, 19 bp, Homo sapiens
  siRNA target sequence for FLJ90440 (NM_153377.3,3223-3241).
catgtgaggaagctactta

SEQ ID NO: 423240 - DNA, 19 bp, Homo sapiens
  siRNA target sequence for FLJ90440 (NM_153377.3,3226-3244).
gtgaggaagctacttaaca

SEQ ID NO: 423241 - DNA, 19 bp, Homo sapiens
  siRNA target sequence for FLJ90440 (NM_153377.3,3228-3246).
gaggaagctacttaacact

SEQ ID NO: 423242 - DNA, 19 bp, Homo sapiens
  siRNA target sequence for FLJ90440 (NM_153377.3,3235-3253).
ctacttaacactagttact

SEQ ID NO: 423243 - DNA, 19 bp, Homo sapiens
  siRNA target sequence for FLJ90440 (NM_153377.3,3333-3351).
gtcggttgcctcgagtaat

SEQ ID NO: 423244 - DNA, 19 bp, Homo sapiens
  siRNA target sequence for FLJ90440 (NM_153377.3,3336-3354).
ggttgcctcgagtaattct

SEQ ID NO: 423245 - DNA, 19 bp, Homo sapiens
  siRNA target sequence for FLJ90440 (NM_153377.3,3340-3358).
gcctcgagtaattctttca

SEQ ID NO: 423246 - DNA, 19 bp, Homo sapiens
  siRNA target sequence for FLJ90440 (NM_153377.3,3341-3359).
cctcgagtaattctttcat

SEQ ID NO: 423247 - DNA, 19 bp, Homo sapiens
  siRNA target sequence for FLJ90440 (NM_153377.3,3391-3409).
cacctagatgcctattcaa

SEQ ID NO: 423248 - DNA, 19 bp, Homo sapiens
  siRNA target sequence for FLJ90440 (NM_153377.3,3416-3434).
gacagccatcagattgtca

SEQ ID NO: 423249 - DNA, 19 bp, Homo sapiens
  siRNA target sequence for FLJ90440 (NM_153377.3,3542-3560).
cctttaaacagactttaga

SEQ ID NO: 423250 - DNA, 19 bp, Homo sapiens
  siRNA target sequence for FLJ90440 (NM_153377.3,3564-3582).
ctacaggactccaaatttt

SEQ ID NO: 423251 - DNA, 19 bp, Homo sapiens
  siRNA target sequence for KIR3DL7 (NM_153443.1,539-557).
cgggttcccaggtcaacta

SEQ ID NO: 423252 - DNA, 19 bp, Homo sapiens
  siRNA target sequence for KIR3DL7 (NM_153443.1,540-558).
gggttcccaggtcaactat

SEQ ID NO: 423253 - DNA, 19 bp, Homo sapiens
  siRNA target sequence for KIR3DL7 (NM_153443.1,541-559).
ggttcccaggtcaactatt

SEQ ID NO: 423254 - DNA, 19 bp, Homo sapiens
  siRNA target sequence for KIR3DL7 (NM_153443.1,617-635).
ctcacttaccctatgagtt

SEQ ID NO: 423255 - DNA, 19 bp, Homo sapiens
  siRNA target sequence for KIR3DL7 (NM_153443.1,750-768).
cagctcccggagcttgttt

SEQ ID NO: 423256 - DNA, 19 bp, Homo sapiens
  siRNA target sequence for KIR3DL7 (NM_153443.1,752-770).
gctcccggagcttgtttga

SEQ ID NO: 423257 - DNA, 19 bp, Homo sapiens
  siRNA target sequence for KIR3DL7 (NM_153443.1,755-773).
cccggagcttgtttgacat

SEQ ID NO: 423258 - DNA, 19 bp, Homo sapiens
  siRNA target sequence for KIR3DL7 (NM_153443.1,756-774).
ccggagcttgtttgacatt

SEQ ID NO: 423259 - DNA, 19 bp, Homo sapiens
  siRNA target sequence for KIR3DL7 (NM_153443.1,757-775).
cggagcttgtttgacattt

SEQ ID NO: 423260 - DNA, 19 bp, Homo sapiens
  siRNA target sequence for KIR3DL7 (NM_153443.1,792-810).
ggcagaggccggtgaactt

SEQ ID NO: 423261 - DNA, 19 bp, Homo sapiens
  siRNA target sequence for KIR3DL7 (NM_153443.1,793-811).
gcagaggccggtgaactta

SEQ ID NO: 423262 - DNA, 19 bp, Homo sapiens
  siRNA target sequence for ORAOV1 (NM_153451.1,116-134).
gcagtcaggacatattcga

SEQ ID NO: 423263 - DNA, 19 bp, Homo sapiens
  siRNA target sequence for ORAOV1 (NM_153451.1,174-192).
gtatcgggaaggctatgaa

SEQ ID NO: 423264 - DNA, 19 bp, Homo sapiens
  siRNA target sequence for ORAOV1 (NM_153451.1,276-294).
ccaaggttttgcttttgca

SEQ ID NO: 423265 - DNA, 19 bp, Homo sapiens
  siRNA target sequence for ORAOV1 (NM_153451.1,277-295).
caaggttttgcttttgcat

SEQ ID NO: 423266 - DNA, 19 bp, Homo sapiens
  siRNA target sequence for ORAOV1 (NM_153451.1,386-404).
cttatgatgaccctactta

SEQ ID NO: 423267 - DNA, 19 bp, Homo sapiens
  siRNA target sequence for ORAOV1 (NM_153451.1,451-469).
cagttttgttcgttactca

SEQ ID NO: 423268 - DNA, 19 bp, Homo sapiens
  siRNA target sequence for ORAOV1 (NM_153451.1,453-471).
gttttgttcgttactcaat

SEQ ID NO: 423269 - DNA, 19 bp, Homo sapiens
  siRNA target sequence for ORAOV1 (NM_153451.1,458-476).
gttcgttactcaatgttca

SEQ ID NO: 423270 - DNA, 19 bp, Homo sapiens
  siRNA target sequence for ORAOV1 (NM_153451.1,499-517).
gaaggttccggactttcat

SEQ ID NO: 423271 - DNA, 19 bp, Homo sapiens
  siRNA target sequence for ORAOV1 (NM_153451.1,502-520).
ggttccggactttcatttt

SEQ ID NO: 423272 - DNA, 19 bp, Homo sapiens
  siRNA target sequence for VGLL2 (NM_153453.1,211-229).
gctgtctggatgttatgta

SEQ ID NO: 423273 - DNA, 19 bp, Homo sapiens
  siRNA target sequence for VGLL2 (NM_153453.1,274-292).
ccccctaccaccagaaact

SEQ ID NO: 423274 - DNA, 19 bp, Homo sapiens
  siRNA target sequence for VGLL2 (NM_153453.1,284-302).
ccagaaactagcctattat

SEQ ID NO: 423275 - DNA, 19 bp, Homo sapiens
  siRNA target sequence for VGLL2 (NM_153453.1,285-303).
cagaaactagcctattatt

SEQ ID NO: 423276 - DNA, 19 bp, Homo sapiens
  siRNA target sequence for VGLL2 (NM_153453.1,357-375).
ggcagctcctcattttcca

SEQ ID NO: 423277 - DNA, 19 bp, Homo sapiens
  siRNA target sequence for VGLL2 (NM_153453.1,377-395).
ccaaaccccagccagtata

SEQ ID NO: 423278 - DNA, 19 bp, Homo sapiens
  siRNA target sequence for VGLL2 (NM_153453.1,378-396).
caaaccccagccagtataa

SEQ ID NO: 423279 - DNA, 19 bp, Homo sapiens
  siRNA target sequence for VGLL2 (NM_153453.1,433-451).
cagaggcagagtacatcaa

SEQ ID NO: 423280 - DNA, 19 bp, Homo sapiens
  siRNA target sequence for VGLL2 (NM_153453.1,435-453).
gaggcagagtacatcaact

SEQ ID NO: 423281 - DNA, 19 bp, Homo sapiens
  siRNA target sequence for VGLL2 (NM_153453.1,590-608).
ctggcgagctcgtcgttat

SEQ ID NO: 423282 - DNA, 19 bp, Homo sapiens
  siRNA target sequence for C21orf86 (NM_153454.1,685-703).
ccgcagagagcggatgttt

SEQ ID NO: 423283 - DNA, 19 bp, Homo sapiens
  siRNA target sequence for C21orf86 (NM_153454.1,687-705).
gcagagagcggatgtttgt

SEQ ID NO: 423284 - DNA, 19 bp, Homo sapiens
  siRNA target sequence for C21orf86 (NM_153454.1,690-708).
gagagcggatgtttgtgaa

SEQ ID NO: 423285 - DNA, 19 bp, Homo sapiens
  siRNA target sequence for C21orf86 (NM_153454.1,816-834).
ggctcagaacattctttaa

SEQ ID NO: 423286 - DNA, 19 bp, Homo sapiens
  siRNA target sequence for C21orf86 (NM_153454.1,817-835).
gctcagaacattctttaat

SEQ ID NO: 423287 - DNA, 19 bp, Homo sapiens
  siRNA target sequence for IL17RC (NM_153461.1,484-502).
gctgggtctgtctttctct

SEQ ID NO: 423288 - DNA, 19 bp, Homo sapiens
  siRNA target sequence for IL17RC (NM_153463.1,339-357).
ctctggggtgccaccaaat

SEQ ID NO: 423289 - DNA, 19 bp, Homo sapiens
  siRNA target sequence for IL17RE (NM_153480.1,1503-1521).
caccctactgggtgttgtt

SEQ ID NO: 423290 - DNA, 19 bp, Homo sapiens
  siRNA target sequence for IL17RE (NM_153480.1,1505-1523).
ccctactgggtgttgttct

SEQ ID NO: 423291 - DNA, 19 bp, Homo sapiens
  siRNA target sequence for FLJ32796 (NM_153606.1,505-523).
caagggggagtacgatata

SEQ ID NO: 423292 - DNA, 19 bp, Homo sapiens
  siRNA target sequence for FLJ32796 (NM_153606.1,510-528).
gggagtacgatatattcaa

SEQ ID NO: 423293 - DNA, 19 bp, Homo sapiens
  siRNA target sequence for FLJ32796 (NM_153606.1,512-530).
gagtacgatatattcaagt

SEQ ID NO: 423294 - DNA, 19 bp, Homo sapiens
  siRNA target sequence for FLJ32796 (NM_153606.1,514-532).
gtacgatatattcaagtat

SEQ ID NO: 423295 - DNA, 19 bp, Homo sapiens
  siRNA target sequence for FLJ32796 (NM_153606.1,681-699).
ccaccggctgcgaagagta

SEQ ID NO: 423296 - DNA, 19 bp, Homo sapiens
  siRNA target sequence for FLJ32796 (NM_153606.1,682-700).
caccggctgcgaagagtat

SEQ ID NO: 423297 - DNA, 19 bp, Homo sapiens
  siRNA target sequence for FLJ32796 (NM_153606.1,846-864).
gatcttgctatctgcaatt

SEQ ID NO: 423298 - DNA, 19 bp, Homo sapiens
  siRNA target sequence for FLJ32796 (NM_153606.1,899-917).
gcctattgggaaaaactaa

SEQ ID NO: 423299 - DNA, 19 bp, Homo sapiens
  siRNA target sequence for FLJ32796 (NM_153606.1,900-918).
cctattgggaaaaactaat

SEQ ID NO: 423300 - DNA, 19 bp, Homo sapiens
  siRNA target sequence for FLJ32796 (NM_153606.1,906-924).
gggaaaaactaatttacct

SEQ ID NO: 423301 - DNA, 19 bp, Homo sapiens
  siRNA target sequence for FLJ32796 (NM_153606.1,930-948).
ggccacccatggagagtaa

SEQ ID NO: 423302 - DNA, 19 bp, Homo sapiens
  siRNA target sequence for FLJ32796 (NM_153606.1,968-986).
ccagctgaagacatgatgt

SEQ ID NO: 423303 - DNA, 19 bp, Homo sapiens
  siRNA target sequence for FLJ32796 (NM_153606.1,1128-1146).
gggagggactccaaaatga

SEQ ID NO: 423304 - DNA, 19 bp, Homo sapiens
  siRNA target sequence for FLJ32796 (NM_153606.1,1134-1152).
gactccaaaatgactttaa

SEQ ID NO: 423305 - DNA, 19 bp, Homo sapiens
  siRNA target sequence for FLJ32796 (NM_153606.1,1147-1165).
ctttaacaaacccactaat

SEQ ID NO: 423306 - DNA, 19 bp, Homo sapiens
  siRNA target sequence for FLJ32796 (NM_153606.1,1175-1193).
gcatccatccccaaaacat

SEQ ID NO: 423307 - DNA, 19 bp, Homo sapiens
  siRNA target sequence for FLJ32796 (NM_153606.1,1183-1201).
ccccaaaacatctacagaa

SEQ ID NO: 423308 - DNA, 19 bp, Homo sapiens
  siRNA target sequence for FLJ32796 (NM_153606.1,1215-1233).
cagcaacaggggggattaa

SEQ ID NO: 423309 - DNA, 19 bp, Homo sapiens
  siRNA target sequence for FLJ32796 (NM_153606.1,1736-1754).
gaaagccgccacaaaacaa

SEQ ID NO: 423310 - DNA, 19 bp, Homo sapiens
  siRNA target sequence for FLJ32796 (NM_153606.1,1801-1819).
ccacagagccaatagagat

SEQ ID NO: 423311 - DNA, 19 bp, Homo sapiens
  siRNA target sequence for FLJ32796 (NM_153606.1,1861-1879).
gcacagggactcgcataaa

SEQ ID NO: 423312 - DNA, 19 bp, Homo sapiens
  siRNA target sequence for FLJ32796 (NM_153606.1,1864-1882).
cagggactcgcataaaggt

SEQ ID NO: 423313 - DNA, 19 bp, Homo sapiens
  siRNA target sequence for FLJ32796 (NM_153606.1,2003-2021).
gtcagagccaaccttacta

SEQ ID NO: 423314 - DNA, 19 bp, Homo sapiens
  siRNA target sequence for FLJ32796 (NM_153606.1,2005-2023).
cagagccaaccttactaca

SEQ ID NO: 423315 - DNA, 19 bp, Homo sapiens
  siRNA target sequence for FLJ32796 (NM_153606.1,2007-2025).
gagccaaccttactacaaa

SEQ ID NO: 423316 - DNA, 19 bp, Homo sapiens
  siRNA target sequence for FLJ32796 (NM_153606.1,2011-2029).
caaccttactacaaaagta

SEQ ID NO: 423317 - DNA, 19 bp, Homo sapiens
  siRNA target sequence for FLJ32796 (NM_153606.1,2145-2163).
ctatgacaccggacatcat

SEQ ID NO: 423318 - DNA, 19 bp, Homo sapiens
  siRNA target sequence for CMYA5 (NM_153610.2,443-461).
gcaaaaggtgaagacttta

SEQ ID NO: 423319 - DNA, 19 bp, Homo sapiens
  siRNA target sequence for CMYA5 (NM_153610.2,475-493).
gccagccggactttcagaa

SEQ ID NO: 423320 - DNA, 19 bp, Homo sapiens
  siRNA target sequence for CMYA5 (NM_153610.2,502-520).
gactgcctttagtatcatt

SEQ ID NO: 423321 - DNA, 19 bp, Homo sapiens
  siRNA target sequence for CMYA5 (NM_153610.2,524-542).
gaaggctgtgagatattga

SEQ ID NO: 423322 - DNA, 19 bp, Homo sapiens
  siRNA target sequence for CMYA5 (NM_153610.2,548-566).
catgctccggcctttattt

SEQ ID NO: 423323 - DNA, 19 bp, Homo sapiens
  siRNA target sequence for CMYA5 (NM_153610.2,554-572).
ccggcctttatttcttcaa

SEQ ID NO: 423324 - DNA, 19 bp, Homo sapiens
  siRNA target sequence for CMYA5 (NM_153610.2,555-573).
cggcctttatttcttcaat

SEQ ID NO: 423325 - DNA, 19 bp, Homo sapiens
  siRNA target sequence for CMYA5 (NM_153610.2,643-661).
cataccactccctgatgat

SEQ ID NO: 423326 - DNA, 19 bp, Homo sapiens
  siRNA target sequence for CMYA5 (NM_153610.2,654-672).
ctgatgatagtgaaacagt

SEQ ID NO: 423327 - DNA, 19 bp, Homo sapiens
  siRNA target sequence for CMYA5 (NM_153610.2,671-689).
gttgcttgtcataaaacat

SEQ ID NO: 423328 - DNA, 19 bp, Homo sapiens
  siRNA target sequence for CMYA5 (NM_153610.2,674-692).
gcttgtcataaaacattaa

SEQ ID NO: 423329 - DNA, 19 bp, Homo sapiens
  siRNA target sequence for CMYA5 (NM_153610.2,849-867).
ctttgattgattataacat

SEQ ID NO: 423330 - DNA, 19 bp, Homo sapiens
  siRNA target sequence for CMYA5 (NM_153610.2,1003-1021).
ggtgaaattagatgaaagt

SEQ ID NO: 423331 - DNA, 19 bp, Homo sapiens
  siRNA target sequence for CMYA5 (NM_153610.2,1041-1059).
gccacaacatattatctca

SEQ ID NO: 423332 - DNA, 19 bp, Homo sapiens
  siRNA target sequence for CMYA5 (NM_153610.2,1042-1060).
ccacaacatattatctcat

SEQ ID NO: 423333 - DNA, 19 bp, Homo sapiens
  siRNA target sequence for CMYA5 (NM_153610.2,1081-1099).
ctcagctgacaggaatgtt

SEQ ID NO: 423334 - DNA, 19 bp, Homo sapiens
  siRNA target sequence for CMYA5 (NM_153610.2,1134-1152).
caccggggatgcctttatt

SEQ ID NO: 423335 - DNA, 19 bp, Homo sapiens
  siRNA target sequence for CMYA5 (NM_153610.2,1137-1155).
cggggatgcctttatttga

SEQ ID NO: 423336 - DNA, 19 bp, Homo sapiens
  siRNA target sequence for CMYA5 (NM_153610.2,1172-1190).
ctatcacgaacccagatat

SEQ ID NO: 423337 - DNA, 19 bp, Homo sapiens
  siRNA target sequence for CMYA5 (NM_153610.2,1178-1196).
cgaacccagatatttccta

SEQ ID NO: 423338 - DNA, 19 bp, Homo sapiens
  siRNA target sequence for CMYA5 (NM_153610.2,1193-1211).
cctaccactattaaagtca

SEQ ID NO: 423339 - DNA, 19 bp, Homo sapiens
  siRNA target sequence for CMYA5 (NM_153610.2,1194-1212).
ctaccactattaaagtcat

SEQ ID NO: 423340 - DNA, 19 bp, Homo sapiens
  siRNA target sequence for CMYA5 (NM_153610.2,1423-1441).
ccatgacacatctctaact

SEQ ID NO: 423341 - DNA, 19 bp, Homo sapiens
  siRNA target sequence for CMYA5 (NM_153610.2,1431-1449).
catctctaactcaaaagga

SEQ ID NO: 423342 - DNA, 19 bp, Homo sapiens
  siRNA target sequence for CMYA5 (NM_153610.2,1475-1493).
cgagttggtaaggatgatt

SEQ ID NO: 423343 - DNA, 19 bp, Homo sapiens
  siRNA target sequence for CMYA5 (NM_153610.2,1612-1630).
ggagaccgttggtaacgta

SEQ ID NO: 423344 - DNA, 19 bp, Homo sapiens
  siRNA target sequence for CMYA5 (NM_153610.2,1627-1645).
cgtagcgatgcagaagaaa

SEQ ID NO: 423345 - DNA, 19 bp, Homo sapiens
  siRNA target sequence for CMYA5 (NM_153610.2,1673-1691).
gctacccagaaaataagtt

SEQ ID NO: 423346 - DNA, 19 bp, Homo sapiens
  siRNA target sequence for CMYA5 (NM_153610.2,1689-1707).
gttatgcggttccatttga

SEQ ID NO: 423347 - DNA, 19 bp, Homo sapiens
  siRNA target sequence for CMYA5 (NM_153610.2,1776-1794).
gtccagaggtcaatctgaa

SEQ ID NO: 423348 - DNA, 19 bp, Homo sapiens
  siRNA target sequence for CMYA5 (NM_153610.2,1860-1878).
catcactagaagaacctaa

SEQ ID NO: 423349 - DNA, 19 bp, Homo sapiens
  siRNA target sequence for CMYA5 (NM_153610.2,1904-1922).
gaagagaggctccgtaata

SEQ ID NO: 423350 - DNA, 19 bp, Homo sapiens
  siRNA target sequence for CMYA5 (NM_153610.2,1923-1941).
gccctgttcaggatgagta

SEQ ID NO: 423351 - DNA, 19 bp, Homo sapiens
  siRNA target sequence for CMYA5 (NM_153610.2,1924-1942).
ccctgttcaggatgagtat

SEQ ID NO: 423352 - DNA, 19 bp, Homo sapiens
  siRNA target sequence for CMYA5 (NM_153610.2,1928-1946).
gttcaggatgagtatgaat

SEQ ID NO: 423353 - DNA, 19 bp, Homo sapiens
  siRNA target sequence for CMYA5 (NM_153610.2,1970-1988).
gtggttcctcaagacatat

SEQ ID NO: 423354 - DNA, 19 bp, Homo sapiens
  siRNA target sequence for CMYA5 (NM_153610.2,1972-1990).
ggttcctcaagacatatta

SEQ ID NO: 423355 - DNA, 19 bp, Homo sapiens
  siRNA target sequence for CMYA5 (NM_153610.2,1977-1995).
ctcaagacatattatcaga

SEQ ID NO: 423356 - DNA, 19 bp, Homo sapiens
  siRNA target sequence for CMYA5 (NM_153610.2,2097-2115).
gtacacctgctgaacaaaa

SEQ ID NO: 423357 - DNA, 19 bp, Homo sapiens
  siRNA target sequence for CMYA5 (NM_153610.2,2133-2151).
ggaaagaagaagaccaatt

SEQ ID NO: 423358 - DNA, 19 bp, Homo sapiens
  siRNA target sequence for CMYA5 (NM_153610.2,2138-2156).
gaagaagaccaattatcat

SEQ ID NO: 423359 - DNA, 19 bp, Homo sapiens
  siRNA target sequence for CMYA5 (NM_153610.2,2154-2172).
catctgaggtagtaactga

SEQ ID NO: 423360 - DNA, 19 bp, Homo sapiens
  siRNA target sequence for CMYA5 (NM_153610.2,2157-2175).
ctgaggtagtaactgaaaa

SEQ ID NO: 423361 - DNA, 19 bp, Homo sapiens
  siRNA target sequence for CMYA5 (NM_153610.2,2290-2308).
gcttgacacagctataagt

SEQ ID NO: 423362 - DNA, 19 bp, Homo sapiens
  siRNA target sequence for CMYA5 (NM_153610.2,2298-2316).
cagctataagtgctgtaaa

SEQ ID NO: 423363 - DNA, 19 bp, Homo sapiens
  siRNA target sequence for CMYA5 (NM_153610.2,2301-2319).
ctataagtgctgtaaaggt

SEQ ID NO: 423364 - DNA, 19 bp, Homo sapiens
  siRNA target sequence for CMYA5 (NM_153610.2,2365-2383).
gattgaagcctttgttagt

SEQ ID NO: 423365 - DNA, 19 bp, Homo sapiens
  siRNA target sequence for CMYA5 (NM_153610.2,2373-2391).
cctttgttagtgagataga

SEQ ID NO: 423366 - DNA, 19 bp, Homo sapiens
  siRNA target sequence for CMYA5 (NM_153610.2,2374-2392).
ctttgttagtgagatagaa

SEQ ID NO: 423367 - DNA, 19 bp, Homo sapiens
  siRNA target sequence for CMYA5 (NM_153610.2,2384-2402).
gagatagaatcctttttta

SEQ ID NO: 423368 - DNA, 19 bp, Homo sapiens
  siRNA target sequence for CMYA5 (NM_153610.2,2635-2653).
cgtcttcctgacttcgttt

SEQ ID NO: 423369 - DNA, 19 bp, Homo sapiens
  siRNA target sequence for CMYA5 (NM_153610.2,2691-2709).
gcactgcttctttagagaa

SEQ ID NO: 423370 - DNA, 19 bp, Homo sapiens
  siRNA target sequence for CMYA5 (NM_153610.2,2727-2745).
cccttttcgaacattatga

SEQ ID NO: 423371 - DNA, 19 bp, Homo sapiens
  siRNA target sequence for CMYA5 (NM_153610.2,2763-2781).
gtgaccagatgttaaaaca

SEQ ID NO: 423372 - DNA, 19 bp, Homo sapiens
  siRNA target sequence for CMYA5 (NM_153610.2,2793-2811).
cacagcctcctagattaga

SEQ ID NO: 423373 - DNA, 19 bp, Homo sapiens
  siRNA target sequence for CMYA5 (NM_153610.2,2810-2828).
gaacctcaggaaccaaatt

SEQ ID NO: 423374 - DNA, 19 bp, Homo sapiens
  siRNA target sequence for CMYA5 (NM_153610.2,2833-2851).
caccagcacaacaattgca

SEQ ID NO: 423375 - DNA, 19 bp, Homo sapiens
  siRNA target sequence for CMYA5 (NM_153610.2,2838-2856).
gcacaacaattgcagttta

SEQ ID NO: 423376 - DNA, 19 bp, Homo sapiens
  siRNA target sequence for CMYA5 (NM_153610.2,2852-2870).
gtttactggagcatgaaca

SEQ ID NO: 423377 - DNA, 19 bp, Homo sapiens
  siRNA target sequence for CMYA5 (NM_153610.2,2911-2929).
ggagccacaagatgatcaa

SEQ ID NO: 423378 - DNA, 19 bp, Homo sapiens
  siRNA target sequence for CMYA5 (NM_153610.2,2939-2957).
gagttggtagaagaataca

SEQ ID NO: 423379 - DNA, 19 bp, Homo sapiens
  siRNA target sequence for CMYA5 (NM_153610.2,2976-2994).
gctactgcatttttgaaga

SEQ ID NO: 423380 - DNA, 19 bp, Homo sapiens
  siRNA target sequence for CMYA5 (NM_153610.2,2977-2995).
ctactgcatttttgaagat

SEQ ID NO: 423381 - DNA, 19 bp, Homo sapiens
  siRNA target sequence for CMYA5 (NM_153610.2,3024-3042).
gggtgatggctgtgaactt

SEQ ID NO: 423382 - DNA, 19 bp, Homo sapiens
  siRNA target sequence for CMYA5 (NM_153610.2,3061-3079).
cagtgaaagggccatcttt

SEQ ID NO: 423383 - DNA, 19 bp, Homo sapiens
  siRNA target sequence for CMYA5 (NM_153610.2,3254-3272).
ggactccagctgaaagtta

SEQ ID NO: 423384 - DNA, 19 bp, Homo sapiens
  siRNA target sequence for CMYA5 (NM_153610.2,3532-3550).
cacagactgcccagcatat

SEQ ID NO: 423385 - DNA, 19 bp, Homo sapiens
  siRNA target sequence for CMYA5 (NM_153610.2,3627-3645).
gctctgagccacagagata

SEQ ID NO: 423386 - DNA, 19 bp, Homo sapiens
  siRNA target sequence for CMYA5 (NM_153610.2,3759-3777).
gcgagcagttgctcttcat

SEQ ID NO: 423387 - DNA, 19 bp, Homo sapiens
  siRNA target sequence for CMYA5 (NM_153610.2,3778-3796).
catcaggcacaggtttaat

SEQ ID NO: 423388 - DNA, 19 bp, Homo sapiens
  siRNA target sequence for LOC254531 (NM_153613.1,249-267).
ccttcgtgcatgagttaca

SEQ ID NO: 423389 - DNA, 19 bp, Homo sapiens
  siRNA target sequence for LOC254531 (NM_153613.1,250-268).
cttcgtgcatgagttacat

SEQ ID NO: 423390 - DNA, 19 bp, Homo sapiens
  siRNA target sequence for LOC254531 (NM_153613.1,275-293).
cgcctccagagggttaagt

SEQ ID NO: 423391 - DNA, 19 bp, Homo sapiens
  siRNA target sequence for LOC254531 (NM_153613.1,276-294).
gcctccagagggttaagtt

SEQ ID NO: 423392 - DNA, 19 bp, Homo sapiens
  siRNA target sequence for LOC254531 (NM_153613.1,404-422).
cagcttcaggagccaatta

SEQ ID NO: 423393 - DNA, 19 bp, Homo sapiens
  siRNA target sequence for LOC254531 (NM_153613.1,464-482).
ctgagccgcctgctgtttt

SEQ ID NO: 423394 - DNA, 19 bp, Homo sapiens
  siRNA target sequence for LOC254531 (NM_153613.1,561-579).
cacactccactttctttga

SEQ ID NO: 423395 - DNA, 19 bp, Homo sapiens
  siRNA target sequence for LOC254531 (NM_153613.1,654-672).
gagcccttcttcgattcaa

SEQ ID NO: 423396 - DNA, 19 bp, Homo sapiens
  siRNA target sequence for LOC254531 (NM_153613.1,762-780).
ggccgcagtgctattcttt

SEQ ID NO: 423397 - DNA, 19 bp, Homo sapiens
  siRNA target sequence for LOC254531 (NM_153613.1,798-816).
caacaagaaggctttgctt

SEQ ID NO: 423398 - DNA, 19 bp, Homo sapiens
  siRNA target sequence for LOC254531 (NM_153613.1,1079-1097).
ccaccgaatgtgagtttgt

SEQ ID NO: 423399 - DNA, 19 bp, Homo sapiens
  siRNA target sequence for TSARG6 (NM_153614.2,754-772).
gggccaggattattactct

SEQ ID NO: 423400 - DNA, 19 bp, Homo sapiens
  siRNA target sequence for TSARG6 (NM_153614.2,778-796).
cgggatcactcgcaattca

SEQ ID NO: 423401 - DNA, 19 bp, Homo sapiens
  siRNA target sequence for TSARG6 (NM_153614.2,780-798).
ggatcactcgcaattcaga

SEQ ID NO: 423402 - DNA, 19 bp, Homo sapiens
  siRNA target sequence for TSARG6 (NM_153614.2,825-843).
gcagactcgcccttaagca

SEQ ID NO: 423403 - DNA, 19 bp, Homo sapiens
  siRNA target sequence for TSARG6 (NM_153614.2,842-860).
caccacccgttgaagtcaa

SEQ ID NO: 423404 - DNA, 19 bp, Homo sapiens
  siRNA target sequence for TSARG6 (NM_153614.2,933-951).
gaggcatctacgacaagtt

SEQ ID NO: 423405 - DNA, 19 bp, Homo sapiens
  siRNA target sequence for TSARG6 (NM_153614.2,1187-1205).
ctgtccctggaggacttat

SEQ ID NO: 423406 - DNA, 19 bp, Homo sapiens
  siRNA target sequence for TSARG6 (NM_153614.2,1215-1233).
gcaccaaaaaaattaagat

SEQ ID NO: 423407 - DNA, 19 bp, Homo sapiens
  siRNA target sequence for TSARG6 (NM_153614.2,1326-1344).
cacgcatcacctttgagaa

SEQ ID NO: 423408 - DNA, 19 bp, Homo sapiens
  siRNA target sequence for TSARG6 (NM_153614.2,1379-1397).
gacatcattttcatcgtaa

SEQ ID NO: 423409 - DNA, 19 bp, Homo sapiens
  siRNA target sequence for TSARG6 (NM_153614.2,1592-1610).
ccggaggaccccactaaga

SEQ ID NO: 423410 - DNA, 19 bp, Homo sapiens
  siRNA target sequence for TSARG6 (NM_153614.2,1593-1611).
cggaggaccccactaagaa

SEQ ID NO: 423411 - DNA, 19 bp, Homo sapiens
  siRNA target sequence for TSARG6 (NM_153614.2,1614-1632).
gggatctcttcatcttctt

SEQ ID NO: 423412 - DNA, 19 bp, Homo sapiens
  siRNA target sequence for CPNE8 (NM_153634.2,168-186).
gtccgtgtcctgcagaaat

SEQ ID NO: 423413 - DNA, 19 bp, Homo sapiens
  siRNA target sequence for CPNE8 (NM_153634.2,286-304).
gtaattgataatactttaa

SEQ ID NO: 423414 - DNA, 19 bp, Homo sapiens
  siRNA target sequence for CPNE8 (NM_153634.2,308-326).
ctgattttgtaagaaagtt

SEQ ID NO: 423415 - DNA, 19 bp, Homo sapiens
  siRNA target sequence for CPNE8 (NM_153634.2,353-371).
gagagaatcttcgttttga

SEQ ID NO: 423416 - DNA, 19 bp, Homo sapiens
  siRNA target sequence for CPNE8 (NM_153634.2,355-373).
gagaatcttcgttttgact

SEQ ID NO: 423417 - DNA, 19 bp, Homo sapiens
  siRNA target sequence for CPNE8 (NM_153634.2,370-388).
gacttgtatgatgttgatt

SEQ ID NO: 423418 - DNA, 19 bp, Homo sapiens
  siRNA target sequence for CPNE8 (NM_153634.2,470-488).
gtcgcctggaaaaaccaat

SEQ ID NO: 423419 - DNA, 19 bp, Homo sapiens
  siRNA target sequence for CPNE8 (NM_153634.2,556-574).
gatgccgttttgatgcaat

SEQ ID NO: 423420 - DNA, 19 bp, Homo sapiens
  siRNA target sequence for CPNE8 (NM_153634.2,559-577).
gccgttttgatgcaatttt

SEQ ID NO: 423421 - DNA, 19 bp, Homo sapiens
  siRNA target sequence for CPNE8 (NM_153634.2,570-588).
gcaattttgtgcgaacaaa

SEQ ID NO: 423422 - DNA, 19 bp, Homo sapiens
  siRNA target sequence for CPNE8 (NM_153634.2,571-589).
caattttgtgcgaacaaat

SEQ ID NO: 423423 - DNA, 19 bp, Homo sapiens
  siRNA target sequence for CPNE8 (NM_153634.2,617-635).
cagatcctttccttgtatt

SEQ ID NO: 423424 - DNA, 19 bp, Homo sapiens
  siRNA target sequence for CPNE8 (NM_153634.2,709-727).
gtatggcaagcattcaaga

SEQ ID NO: 423425 - DNA, 19 bp, Homo sapiens
  siRNA target sequence for CPNE8 (NM_153634.2,792-810).
ggaccgagatggaagtcat

SEQ ID NO: 423426 - DNA, 19 bp, Homo sapiens
  siRNA target sequence for CPNE8 (NM_153634.2,823-841).
gaatttacaacaagctata

SEQ ID NO: 423427 - DNA, 19 bp, Homo sapiens
  siRNA target sequence for CPNE8 (NM_153634.2,851-869).
ctagagggcagtcacaatt

SEQ ID NO: 423428 - DNA, 19 bp, Homo sapiens
  siRNA target sequence for CPNE8 (NM_153634.2,859-877).
cagtcacaattcaacgtat

SEQ ID NO: 423429 - DNA, 19 bp, Homo sapiens
  siRNA target sequence for CPNE8 (NM_153634.2,861-879).
gtcacaattcaacgtatat

SEQ ID NO: 423430 - DNA, 19 bp, Homo sapiens
  siRNA target sequence for CPNE8 (NM_153634.2,863-881).
cacaattcaacgtatatga

SEQ ID NO: 423431 - DNA, 19 bp, Homo sapiens
  siRNA target sequence for CPNE8 (NM_153634.2,912-930).
gaaaaaatatactaattct

SEQ ID NO: 423432 - DNA, 19 bp, Homo sapiens
  siRNA target sequence for CPNE8 (NM_153634.2,931-949).
ggaacagtaactttactct

SEQ ID NO: 423433 - DNA, 19 bp, Homo sapiens
  siRNA target sequence for CPNE8 (NM_153634.2,935-953).
cagtaactttactctcttt

SEQ ID NO: 423434 - DNA, 19 bp, Homo sapiens
  siRNA target sequence for CPNE8 (NM_153634.2,1014-1032).
cacagtggctattgatttt

SEQ ID NO: 423435 - DNA, 19 bp, Homo sapiens
  siRNA target sequence for CPNE8 (NM_153634.2,1064-1082).
cttccctccactacatgaa

SEQ ID NO: 423436 - DNA, 19 bp, Homo sapiens
  siRNA target sequence for CPNE8 (NM_153634.2,1080-1098).
gaatccttaccaactgaat

SEQ ID NO: 423437 - DNA, 19 bp, Homo sapiens
  siRNA target sequence for CPNE8 (NM_153634.2,1100-1118).
cctatggtatggcactaaa

SEQ ID NO: 423438 - DNA, 19 bp, Homo sapiens
  siRNA target sequence for CPNE8 (NM_153634.2,1101-1119).
ctatggtatggcactaaaa

SEQ ID NO: 423439 - DNA, 19 bp, Homo sapiens
  siRNA target sequence for CPNE8 (NM_153634.2,1202-1220).
gaaggatatctcacgaatt

SEQ ID NO: 423440 - DNA, 19 bp, Homo sapiens
  siRNA target sequence for CPNE8 (NM_153634.2,1206-1224).
gatatctcacgaatttgct

SEQ ID NO: 423441 - DNA, 19 bp, Homo sapiens
  siRNA target sequence for CPNE8 (NM_153634.2,1211-1229).
ctcacgaatttgctttgaa

SEQ ID NO: 423442 - DNA, 19 bp, Homo sapiens
  siRNA target sequence for CPNE8 (NM_153634.2,1290-1308).
gagtctgaaatctgtacaa

SEQ ID NO: 423443 - DNA, 19 bp, Homo sapiens
  siRNA target sequence for CPNE8 (NM_153634.2,1292-1310).
gtctgaaatctgtacaact

SEQ ID NO: 423444 - DNA, 19 bp, Homo sapiens
  siRNA target sequence for CPNE8 (NM_153634.2,1345-1363).
catgtagcaagatatgctt

SEQ ID NO: 423445 - DNA, 19 bp, Homo sapiens
  siRNA target sequence for CPNE8 (NM_153634.2,1374-1392).
ggatggctcccagtatttt

SEQ ID NO: 423446 - DNA, 19 bp, Homo sapiens
  siRNA target sequence for CPNE8 (NM_153634.2,1395-1413).
gcttctgattgttacagat

SEQ ID NO: 423447 - DNA, 19 bp, Homo sapiens
  siRNA target sequence for CPNE8 (NM_153634.2,1424-1442).
cagatatggcccagactaa

SEQ ID NO: 423448 - DNA, 19 bp, Homo sapiens
  siRNA target sequence for CPNE8 (NM_153634.2,1437-1455).
gactaaggagtccatagtt

SEQ ID NO: 423449 - DNA, 19 bp, Homo sapiens
  siRNA target sequence for CPNE8 (NM_153634.2,1439-1457).
ctaaggagtccatagttaa

SEQ ID NO: 423450 - DNA, 19 bp, Homo sapiens
  siRNA target sequence for CPNE8 (NM_153634.2,1530-1548).
ggatggagatgatgtaaga

SEQ ID NO: 423451 - DNA, 19 bp, Homo sapiens
  siRNA target sequence for CPNE8 (NM_153634.2,1562-1580).
gaaaatatgctgaaagaga

SEQ ID NO: 423452 - DNA, 19 bp, Homo sapiens
  siRNA target sequence for CPNE8 (NM_153634.2,1598-1616).
cattcagggattatattga

SEQ ID NO: 423453 - DNA, 19 bp, Homo sapiens
  siRNA target sequence for CPNE8 (NM_153634.2,1746-1764).
cccacctacacatgtgtta

SEQ ID NO: 423454 - DNA, 19 bp, Homo sapiens
  siRNA target sequence for CPNE8 (NM_153634.2,1748-1766).
cacctacacatgtgttaca

SEQ ID NO: 423455 - DNA, 19 bp, Homo sapiens
  siRNA target sequence for LOC151835 (NM_153635.1,332-350).
gacggaccgaggtgattga

SEQ ID NO: 423456 - DNA, 19 bp, Homo sapiens
  siRNA target sequence for LOC151835 (NM_153635.1,334-352).
cggaccgaggtgattgata

SEQ ID NO: 423457 - DNA, 19 bp, Homo sapiens
  siRNA target sequence for LOC151835 (NM_153635.1,384-402).
cgtcctcgactatttcttt

SEQ ID NO: 423458 - DNA, 19 bp, Homo sapiens
  siRNA target sequence for LOC151835 (NM_153635.1,586-604).
gcagaagagcttagcaatt

SEQ ID NO: 423459 - DNA, 19 bp, Homo sapiens
  siRNA target sequence for LOC151835 (NM_153635.1,671-689).
cagaccccttccttgtgtt

SEQ ID NO: 423460 - DNA, 19 bp, Homo sapiens
  siRNA target sequence for LOC151835 (NM_153635.1,818-836).
gaacggtgaagattgatgt

SEQ ID NO: 423461 - DNA, 19 bp, Homo sapiens
  siRNA target sequence for LOC151835 (NM_153635.1,821-839).
cggtgaagattgatgtgta

SEQ ID NO: 423462 - DNA, 19 bp, Homo sapiens
  siRNA target sequence for LOC151835 (NM_153635.1,851-869).
gggatggaagccacgattt

SEQ ID NO: 423463 - DNA, 19 bp, Homo sapiens
  siRNA target sequence for LOC151835 (NM_153635.1,915-933).
gaaccagttcacagtatat

SEQ ID NO: 423464 - DNA, 19 bp, Homo sapiens
  siRNA target sequence for LOC151835 (NM_153635.1,940-958).
cttaaccctcggaagaaat

SEQ ID NO: 423465 - DNA, 19 bp, Homo sapiens
  siRNA target sequence for LOC151835 (NM_153635.1,1012-1030).
gtggactctgaattcactt

SEQ ID NO: 423466 - DNA, 19 bp, Homo sapiens
  siRNA target sequence for LOC151835 (NM_153635.1,1021-1039).
gaattcacttttgttgatt

SEQ ID NO: 423467 - DNA, 19 bp, Homo sapiens
  siRNA target sequence for LOC151835 (NM_153635.1,1275-1293).
ccccctgaacaacaatgat

SEQ ID NO: 423468 - DNA, 19 bp, Homo sapiens
  siRNA target sequence for LOC151835 (NM_153635.1,1647-1665).
cgtcccattccgagactat

SEQ ID NO: 423469 - DNA, 19 bp, Homo sapiens
  siRNA target sequence for LOC151835 (NM_153635.1,1650-1668).
cccattccgagactatgtt

SEQ ID NO: 423470 - DNA, 19 bp, Homo sapiens
  siRNA target sequence for LOC151835 (NM_153635.1,1652-1670).
cattccgagactatgttga

SEQ ID NO: 423471 - DNA, 19 bp, Homo sapiens
  siRNA target sequence for DKFZp547D2210 (NM_153685.2,158-176).
cctgctcagggctcttcat

SEQ ID NO: 423472 - DNA, 19 bp, Homo sapiens
  siRNA target sequence for DKFZp547D2210 (NM_153685.2,441-459).
ctgccaatcccggatttct

SEQ ID NO: 423473 - DNA, 19 bp, Homo sapiens
  siRNA target sequence for DKFZp547D2210 (NM_153685.2,610-628).
ccagctctatgtcacaatt

SEQ ID NO: 423474 - DNA, 19 bp, Homo sapiens
  siRNA target sequence for DKFZp547D2210 (NM_153685.2,614-632).
ctctatgtcacaattacca

SEQ ID NO: 423475 - DNA, 19 bp, Homo sapiens
  siRNA target sequence for MLR1 (NM_153686.4,152-170).
cactgtgtaggttttgaga

SEQ ID NO: 423476 - DNA, 19 bp, Homo sapiens
  siRNA target sequence for MLR1 (NM_153686.4,156-174).
gtgtaggttttgagagtat

SEQ ID NO: 423477 - DNA, 19 bp, Homo sapiens
  siRNA target sequence for MLR1 (NM_153686.4,158-176).
gtaggttttgagagtattt

SEQ ID NO: 423478 - DNA, 19 bp, Homo sapiens
  siRNA target sequence for MLR1 (NM_153686.4,207-225).
gagacctcagtttatttga

SEQ ID NO: 423479 - DNA, 19 bp, Homo sapiens
  siRNA target sequence for MLR1 (NM_153686.4,296-314).
gaagcagtcagtgattgta

SEQ ID NO: 423480 - DNA, 19 bp, Homo sapiens
  siRNA target sequence for MLR1 (NM_153686.4,368-386).
ggccagtccaacactgata

SEQ ID NO: 423481 - DNA, 19 bp, Homo sapiens
  siRNA target sequence for MLR1 (NM_153686.4,371-389).
cagtccaacactgataaga

SEQ ID NO: 423482 - DNA, 19 bp, Homo sapiens
  siRNA target sequence for MLR1 (NM_153686.4,373-391).
gtccaacactgataagatt

SEQ ID NO: 423483 - DNA, 19 bp, Homo sapiens
  siRNA target sequence for MLR1 (NM_153686.4,375-393).
ccaacactgataagattga

SEQ ID NO: 423484 - DNA, 19 bp, Homo sapiens
  siRNA target sequence for MLR1 (NM_153686.4,376-394).
caacactgataagattgaa

SEQ ID NO: 423485 - DNA, 19 bp, Homo sapiens
  siRNA target sequence for MLR1 (NM_153686.4,424-442).
ctttcgaaagaaagatctt

SEQ ID NO: 423486 - DNA, 19 bp, Homo sapiens
  siRNA target sequence for MLR1 (NM_153686.4,448-466).
gaactgtgatcctaacatt

SEQ ID NO: 423487 - DNA, 19 bp, Homo sapiens
  siRNA target sequence for MLR1 (NM_153686.4,503-521).
cgtcaatttgcgattgagt

SEQ ID NO: 423488 - DNA, 19 bp, Homo sapiens
  siRNA target sequence for MLR1 (NM_153686.4,534-552).
gtggtaaaactcaagagaa

SEQ ID NO: 423489 - DNA, 19 bp, Homo sapiens
  siRNA target sequence for MLR1 (NM_153686.4,569-587).
ggaccaagtatagtatgta

SEQ ID NO: 423490 - DNA, 19 bp, Homo sapiens
  siRNA target sequence for MLR1 (NM_153686.4,570-588).
gaccaagtatagtatgtaa

SEQ ID NO: 423491 - DNA, 19 bp, Homo sapiens
  siRNA target sequence for MLR1 (NM_153686.4,647-665).
gacctcactgtgaatcgaa

SEQ ID NO: 423492 - DNA, 19 bp, Homo sapiens
  siRNA target sequence for MLR1 (NM_153686.4,652-670).
cactgtgaatcgaatgcaa

SEQ ID NO: 423493 - DNA, 19 bp, Homo sapiens
  siRNA target sequence for MLR1 (NM_153686.4,685-703).
gcaaggggatggagtgtta

SEQ ID NO: 423494 - DNA, 19 bp, Homo sapiens
  siRNA target sequence for MLR1 (NM_153686.4,690-708).
gggatggagtgttagatct

SEQ ID NO: 423495 - DNA, 19 bp, Homo sapiens
  siRNA target sequence for MLR1 (NM_153686.4,753-771).
gtgatccttcttctgaaaa

SEQ ID NO: 423496 - DNA, 19 bp, Homo sapiens
  siRNA target sequence for MLR1 (NM_153686.4,780-798).
ctggcatgctacaagtgaa

SEQ ID NO: 423497 - DNA, 19 bp, Homo sapiens
  siRNA target sequence for MLR1 (NM_153686.4,787-805).
gctacaagtgaaaactgat

SEQ ID NO: 423498 - DNA, 19 bp, Homo sapiens
  siRNA target sequence for MLR1 (NM_153686.4,814-832).
gaatgtgtctgatgagaat

SEQ ID NO: 423499 - DNA, 19 bp, Homo sapiens
  siRNA target sequence for MLR1 (NM_153686.4,868-886).
ccttaatcgtcccattgaa

SEQ ID NO: 423500 - DNA, 19 bp, Homo sapiens
  siRNA target sequence for MLR1 (NM_153686.4,869-887).
cttaatcgtcccattgaat

SEQ ID NO: 423501 - DNA, 19 bp, Homo sapiens
  siRNA target sequence for MLR1 (NM_153686.4,921-939).
gctgtacagttcataacca

SEQ ID NO: 423502 - DNA, 19 bp, Homo sapiens
  siRNA target sequence for MLR1 (NM_153686.4,924-942).
gtacagttcataaccaaaa

SEQ ID NO: 423503 - DNA, 19 bp, Homo sapiens
  siRNA target sequence for MLR1 (NM_153686.4,929-947).
gttcataaccaaaatctca

SEQ ID NO: 423504 - DNA, 19 bp, Homo sapiens
  siRNA target sequence for FLJ31051 (NM_153687.1,258-276).
cagtcagaaaaatttgcaa

SEQ ID NO: 423505 - DNA, 19 bp, Homo sapiens
  siRNA target sequence for FLJ31051 (NM_153687.1,274-292).
caaaggtggaaaaccaata

SEQ ID NO: 423506 - DNA, 19 bp, Homo sapiens
  siRNA target sequence for FLJ31051 (NM_153687.1,323-341).
ccaacaacttcaaagtaaa

SEQ ID NO: 423507 - DNA, 19 bp, Homo sapiens
  siRNA target sequence for FLJ31051 (NM_153687.1,324-342).
caacaacttcaaagtaaaa

SEQ ID NO: 423508 - DNA, 19 bp, Homo sapiens
  siRNA target sequence for FLJ31051 (NM_153687.1,612-630).
caagtaactgtccaaatta

SEQ ID NO: 423509 - DNA, 19 bp, Homo sapiens
  siRNA target sequence for FLJ31051 (NM_153687.1,632-650).
ctcagctgagcaggaaata

SEQ ID NO: 423510 - DNA, 19 bp, Homo sapiens
  siRNA target sequence for FLJ31051 (NM_153687.1,659-677).
cactgaacggctaaaagat

SEQ ID NO: 423511 - DNA, 19 bp, Homo sapiens
  siRNA target sequence for FLJ31051 (NM_153687.1,661-679).
ctgaacggctaaaagattt

SEQ ID NO: 423512 - DNA, 19 bp, Homo sapiens
  siRNA target sequence for FLJ31051 (NM_153687.1,680-698).
ggaagatagcacactaaga

SEQ ID NO: 423513 - DNA, 19 bp, Homo sapiens
  siRNA target sequence for FLJ31051 (NM_153687.1,681-699).
gaagatagcacactaagaa

SEQ ID NO: 423514 - DNA, 19 bp, Homo sapiens
  siRNA target sequence for FLJ31051 (NM_153687.1,684-702).
gatagcacactaagaaata

SEQ ID NO: 423515 - DNA, 19 bp, Homo sapiens
  siRNA target sequence for FLJ31051 (NM_153687.1,825-843).
gatctgactaataaacttt

SEQ ID NO: 423516 - DNA, 19 bp, Homo sapiens
  siRNA target sequence for FLJ31051 (NM_153687.1,845-863).
cgactacgaacccaaagtt

SEQ ID NO: 423517 - DNA, 19 bp, Homo sapiens
  siRNA target sequence for FLJ31051 (NM_153687.1,848-866).
ctacgaacccaaagttgaa

SEQ ID NO: 423518 - DNA, 19 bp, Homo sapiens
  siRNA target sequence for FLJ31051 (NM_153687.1,965-983).
gactatgcagatgtttaat

SEQ ID NO: 423519 - DNA, 19 bp, Homo sapiens
  siRNA target sequence for FLJ31051 (NM_153687.1,1050-1068).
cagtatgataatagcatat

SEQ ID NO: 423520 - DNA, 19 bp, Homo sapiens
  siRNA target sequence for FLJ31051 (NM_153687.1,1113-1131).
gattttatagcatactcaa

SEQ ID NO: 423521 - DNA, 19 bp, Homo sapiens
  siRNA target sequence for FLJ38973 (NM_153689.3,489-507).
gactcgtcatcctgagaat

SEQ ID NO: 423522 - DNA, 19 bp, Homo sapiens
  siRNA target sequence for FLJ38973 (NM_153689.3,496-514).
catcctgagaattatcaat

SEQ ID NO: 423523 - DNA, 19 bp, Homo sapiens
  siRNA target sequence for FLJ38973 (NM_153689.3,555-573).
ccaccggttccccaatagt

SEQ ID NO: 423524 - DNA, 19 bp, Homo sapiens
  siRNA target sequence for FLJ38973 (NM_153689.3,556-574).
caccggttccccaatagtt

SEQ ID NO: 423525 - DNA, 19 bp, Homo sapiens
  siRNA target sequence for FLJ38973 (NM_153689.3,558-576).
ccggttccccaatagttat

SEQ ID NO: 423526 - DNA, 19 bp, Homo sapiens
  siRNA target sequence for FLJ38973 (NM_153689.3,559-577).
cggttccccaatagttata

SEQ ID NO: 423527 - DNA, 19 bp, Homo sapiens
  siRNA target sequence for FLJ38973 (NM_153689.3,560-578).
ggttccccaatagttatat

SEQ ID NO: 423528 - DNA, 19 bp, Homo sapiens
  siRNA target sequence for FLJ38973 (NM_153689.3,561-579).
gttccccaatagttatatt

SEQ ID NO: 423529 - DNA, 19 bp, Homo sapiens
  siRNA target sequence for FLJ38973 (NM_153689.3,572-590).
gttatatttgggtgataaa

SEQ ID NO: 423530 - DNA, 19 bp, Homo sapiens
  siRNA target sequence for FLJ38973 (NM_153689.3,655-673).
ggtgccccagaacacaata

SEQ ID NO: 423531 - DNA, 19 bp, Homo sapiens
  siRNA target sequence for FLJ38973 (NM_153689.3,918-936).
gattggattcagtaaaggt

SEQ ID NO: 423532 - DNA, 19 bp, Homo sapiens
  siRNA target sequence for FLJ38973 (NM_153689.3,948-966).
gaatcagttgctttttgaa

SEQ ID NO: 423533 - DNA, 19 bp, Homo sapiens
  siRNA target sequence for FLJ38973 (NM_153689.3,1116-1134).
cgttcacactcatgtaaca

SEQ ID NO: 423534 - DNA, 19 bp, Homo sapiens
  siRNA target sequence for FLJ38973 (NM_153689.3,1218-1236).
gcaggtgactagccaaatt

SEQ ID NO: 423535 - DNA, 19 bp, Homo sapiens
  siRNA target sequence for FLJ38973 (NM_153689.3,1221-1239).
ggtgactagccaaattcat

SEQ ID NO: 423536 - DNA, 19 bp, Homo sapiens
  siRNA target sequence for FLJ38973 (NM_153689.3,1222-1240).
gtgactagccaaattcatt

SEQ ID NO: 423537 - DNA, 19 bp, Homo sapiens
  siRNA target sequence for FLJ38973 (NM_153689.3,1224-1242).
gactagccaaattcatttt

SEQ ID NO: 423538 - DNA, 19 bp, Homo sapiens
  siRNA target sequence for FLJ38973 (NM_153689.3,1253-1271).
ctccttccatagagaatca

SEQ ID NO: 423539 - DNA, 19 bp, Homo sapiens
  siRNA target sequence for FLJ90022 (NM_153690.3,151-169).
cgtggaagaagcacaagtt

SEQ ID NO: 423540 - DNA, 19 bp, Homo sapiens
  siRNA target sequence for FLJ90022 (NM_153690.3,334-352).
ctagcgaggacccaactta

SEQ ID NO: 423541 - DNA, 19 bp, Homo sapiens
  siRNA target sequence for FLJ90022 (NM_153690.3,453-471).
cgtcagggcaccaagatga

SEQ ID NO: 423542 - DNA, 19 bp, Homo sapiens
  siRNA target sequence for FLJ90022 (NM_153690.3,454-472).
gtcagggcaccaagatgaa

SEQ ID NO: 423543 - DNA, 19 bp, Homo sapiens
  siRNA target sequence for FLJ90022 (NM_153690.3,725-743).
cgcgctggcggaatttaaa

SEQ ID NO: 423544 - DNA, 19 bp, Homo sapiens
  siRNA target sequence for FLJ90022 (NM_153690.3,837-855).
cacggaccctgctgctata

SEQ ID NO: 423545 - DNA, 19 bp, Homo sapiens
  siRNA target sequence for FLJ90022 (NM_153690.3,1075-1093).
gggacttgttggatactct

SEQ ID NO: 423546 - DNA, 19 bp, Homo sapiens
  siRNA target sequence for FLJ90022 (NM_153690.3,1194-1212).
gctgagctgtcgcaactta

SEQ ID NO: 423547 - DNA, 19 bp, Homo sapiens
  siRNA target sequence for FLJ90022 (NM_153690.3,1195-1213).
ctgagctgtcgcaacttat

SEQ ID NO: 423548 - DNA, 19 bp, Homo sapiens
  siRNA target sequence for FLJ90022 (NM_153690.3,1197-1215).
gagctgtcgcaacttatta

SEQ ID NO: 423549 - DNA, 19 bp, Homo sapiens
  siRNA target sequence for SYCP3 (NM_153694.2,86-104).
gtcctccggaaaaaagtat

SEQ ID NO: 423550 - DNA, 19 bp, Homo sapiens
  siRNA target sequence for SYCP3 (NM_153694.2,124-142).
cgtctgtggaagatcagtt

SEQ ID NO: 423551 - DNA, 19 bp, Homo sapiens
  siRNA target sequence for SYCP3 (NM_153694.2,125-143).
gtctgtggaagatcagttt

SEQ ID NO: 423552 - DNA, 19 bp, Homo sapiens
  siRNA target sequence for SYCP3 (NM_153694.2,129-147).
gtggaagatcagtttacga

SEQ ID NO: 423553 - DNA, 19 bp, Homo sapiens
  siRNA target sequence for SYCP3 (NM_153694.2,145-163).
cgagagcctatgactttga

SEQ ID NO: 423554 - DNA, 19 bp, Homo sapiens
  siRNA target sequence for SYCP3 (NM_153694.2,214-232).
ggaagactgcagtcattga

SEQ ID NO: 423555 - DNA, 19 bp, Homo sapiens
  siRNA target sequence for SYCP3 (NM_153694.2,222-240).
gcagtcattgagaaacgta

SEQ ID NO: 423556 - DNA, 19 bp, Homo sapiens
  siRNA target sequence for SYCP3 (NM_153694.2,259-277).
caggagtagttgaagatat

SEQ ID NO: 423557 - DNA, 19 bp, Homo sapiens
  siRNA target sequence for SYCP3 (NM_153694.2,279-297).
gggggtgaagtgcagaata

SEQ ID NO: 423558 - DNA, 19 bp, Homo sapiens
  siRNA target sequence for SYCP3 (NM_153694.2,283-301).
gtgaagtgcagaatatgct

SEQ ID NO: 423559 - DNA, 19 bp, Homo sapiens
  siRNA target sequence for SYCP3 (NM_153694.2,306-324).
ggagttggagttgacatta

SEQ ID NO: 423560 - DNA, 19 bp, Homo sapiens
  siRNA target sequence for SYCP3 (NM_153694.2,307-325).
gagttggagttgacattaa

SEQ ID NO: 423561 - DNA, 19 bp, Homo sapiens
  siRNA target sequence for SYCP3 (NM_153694.2,352-370).
gactagaaatgtataccaa

SEQ ID NO: 423562 - DNA, 19 bp, Homo sapiens
  siRNA target sequence for SYCP3 (NM_153694.2,385-403).
ctagtaaccagaaaattga

SEQ ID NO: 423563 - DNA, 19 bp, Homo sapiens
  siRNA target sequence for SYCP3 (NM_153694.2,623-641).
gttcataaagagtatggaa

SEQ ID NO: 423564 - DNA, 19 bp, Homo sapiens
  siRNA target sequence for SYCP3 (NM_153694.2,650-668).
gaagaatcatgataatcta

SEQ ID NO: 423565 - DNA, 19 bp, Homo sapiens
  siRNA target sequence for SYCP3 (NM_153694.2,759-777).
gttcggaagtctcttcaat

SEQ ID NO: 423566 - DNA, 19 bp, Homo sapiens
  siRNA target sequence for SYCP3 (NM_153694.2,763-781).
ggaagtctcttcaatccat

SEQ ID NO: 423567 - DNA, 19 bp, Homo sapiens
  siRNA target sequence for SYCP3 (NM_153694.2,771-789).
cttcaatccatgttattct

SEQ ID NO: 423568 - DNA, 19 bp, Homo sapiens
  siRNA target sequence for ZNF367 (NM_153695.1,410-428).
gccacctcaaggatggaat

SEQ ID NO: 423569 - DNA, 19 bp, Homo sapiens
  siRNA target sequence for ZNF367 (NM_153695.1,451-469).
gatactgtccgcgatttaa

SEQ ID NO: 423570 - DNA, 19 bp, Homo sapiens
  siRNA target sequence for ZNF367 (NM_153695.1,455-473).
ctgtccgcgatttaataaa

SEQ ID NO: 423571 - DNA, 19 bp, Homo sapiens
  siRNA target sequence for ZNF367 (NM_153695.1,459-477).
ccgcgatttaataaatgaa

SEQ ID NO: 423572 - DNA, 19 bp, Homo sapiens
  siRNA target sequence for ZNF367 (NM_153695.1,491-509).
ccagcagaatccgttgtaa

SEQ ID NO: 423573 - DNA, 19 bp, Homo sapiens
  siRNA target sequence for ZNF367 (NM_153695.1,494-512).
gcagaatccgttgtaacat

SEQ ID NO: 423574 - DNA, 19 bp, Homo sapiens
  siRNA target sequence for ZNF367 (NM_153695.1,523-541).
gtgtttccacgggagaaat

SEQ ID NO: 423575 - DNA, 19 bp, Homo sapiens
  siRNA target sequence for ZNF367 (NM_153695.1,550-568).
gctcacaaaaggactcata

SEQ ID NO: 423576 - DNA, 19 bp, Homo sapiens
  siRNA target sequence for ZNF367 (NM_153695.1,579-597).
gccctatctgtgtgactat

SEQ ID NO: 423577 - DNA, 19 bp, Homo sapiens
  siRNA target sequence for ZNF367 (NM_153695.1,701-719).
gcagattcacccatgcaaa

SEQ ID NO: 423578 - DNA, 19 bp, Homo sapiens
  siRNA target sequence for ZNF367 (NM_153695.1,817-835).
gagtggctggcgaggtatt

SEQ ID NO: 423579 - DNA, 19 bp, Homo sapiens
  siRNA target sequence for ZNF367 (NM_153695.1,906-924).
ggaccctctggaatacctt

SEQ ID NO: 423580 - DNA, 19 bp, Homo sapiens
  siRNA target sequence for ZNF367 (NM_153695.1,998-1016).
gagccctcgcgctcataga

SEQ ID NO: 423581 - DNA, 19 bp, Homo sapiens
  siRNA target sequence for LOC91526 (NM_153697.1,122-140).
gaaacgaacccctcttcat

SEQ ID NO: 423582 - DNA, 19 bp, Homo sapiens
  siRNA target sequence for LOC91526 (NM_153697.1,188-206).
gtcaggagctcgtgtaaat

SEQ ID NO: 423583 - DNA, 19 bp, Homo sapiens
  siRNA target sequence for LOC91526 (NM_153697.1,264-282).
gaagcagtacaggttttga

SEQ ID NO: 423584 - DNA, 19 bp, Homo sapiens
  siRNA target sequence for LOC91526 (NM_153697.1,267-285).
gcagtacaggttttgatta

SEQ ID NO: 423585 - DNA, 19 bp, Homo sapiens
  siRNA target sequence for LOC91526 (NM_153697.1,287-305).
gcactcagctgatgtcaat

SEQ ID NO: 423586 - DNA, 19 bp, Homo sapiens
  siRNA target sequence for LOC91526 (NM_153697.1,456-474).
cacgtggagatggtcaatt

SEQ ID NO: 423587 - DNA, 19 bp, Homo sapiens
  siRNA target sequence for LOC91526 (NM_153697.1,493-511).
caaatatcaatgcatttga

SEQ ID NO: 423588 - DNA, 19 bp, Homo sapiens
  siRNA target sequence for LOC91526 (NM_153697.1,564-582).
gttgtagcattgctcatta

SEQ ID NO: 423589 - DNA, 19 bp, Homo sapiens
  siRNA target sequence for LOC91526 (NM_153697.1,597-615).
gtgacctgtaaggataaga

SEQ ID NO: 423590 - DNA, 19 bp, Homo sapiens
  siRNA target sequence for LOC91526 (NM_153697.1,642-660).
gcctccaatggacagatta

SEQ ID NO: 423591 - DNA, 19 bp, Homo sapiens
  siRNA target sequence for LOC91526 (NM_153697.1,643-661).
cctccaatggacagattaa

SEQ ID NO: 423592 - DNA, 19 bp, Homo sapiens
  siRNA target sequence for LOC91526 (NM_153697.1,644-662).
ctccaatggacagattaat

SEQ ID NO: 423593 - DNA, 19 bp, Homo sapiens
  siRNA target sequence for LOC91526 (NM_153697.1,646-664).
ccaatggacagattaatgt

SEQ ID NO: 423594 - DNA, 19 bp, Homo sapiens
  siRNA target sequence for LOC91526 (NM_153697.1,683-701).
cctgggggtggagattgat

SEQ ID NO: 423595 - DNA, 19 bp, Homo sapiens
  siRNA target sequence for LOC91526 (NM_153697.1,765-783).
gttaacgagttgattgact

SEQ ID NO: 423596 - DNA, 19 bp, Homo sapiens
  siRNA target sequence for LOC91526 (NM_153697.1,794-812).
cgtgaaccagccaaacaat

SEQ ID NO: 423597 - DNA, 19 bp, Homo sapiens
  siRNA target sequence for LOC91526 (NM_153697.1,817-835).
ggttcacccctttgcattt

SEQ ID NO: 423598 - DNA, 19 bp, Homo sapiens
  siRNA target sequence for LOC91526 (NM_153697.1,865-883).
gtcttgaattgttagtaaa

SEQ ID NO: 423599 - DNA, 19 bp, Homo sapiens
  siRNA target sequence for LOC91526 (NM_153697.1,887-905).
cggggcagatgttaacatt

SEQ ID NO: 423600 - DNA, 19 bp, Homo sapiens
  siRNA target sequence for LOC91526 (NM_153697.1,964-982).
ggtcacagaccctcattca

SEQ ID NO: 423601 - DNA, 19 bp, Homo sapiens
  siRNA target sequence for LOC91526 (NM_153697.1,967-985).
cacagaccctcattcagaa

SEQ ID NO: 423602 - DNA, 19 bp, Homo sapiens
  siRNA target sequence for LOC91526 (NM_153697.1,1045-1063).
gatacggtcatgagctttt

SEQ ID NO: 423603 - DNA, 19 bp, Homo sapiens
  siRNA target sequence for LOC91526 (NM_153697.1,1049-1067).
cggtcatgagcttttgatt

SEQ ID NO: 423604 - DNA, 19 bp, Homo sapiens
  siRNA target sequence for LOC91526 (NM_153697.1,1053-1071).
catgagcttttgattaaca

SEQ ID NO: 423605 - DNA, 19 bp, Homo sapiens
  siRNA target sequence for LOC91526 (NM_153697.1,1156-1174).
ctgactgctgcagaaagtt

SEQ ID NO: 423606 - DNA, 19 bp, Homo sapiens
  siRNA target sequence for LOC91526 (NM_153697.1,1158-1176).
gactgctgcagaaagttgt

SEQ ID NO: 423607 - DNA, 19 bp, Homo sapiens
  siRNA target sequence for LOC91526 (NM_153697.1,1175-1193).
gttatcatcgggctttgaa

SEQ ID NO: 423608 - DNA, 19 bp, Homo sapiens
  siRNA target sequence for LOC91526 (NM_153697.1,1180-1198).
catcgggctttgaaataga

SEQ ID NO: 423609 - DNA, 19 bp, Homo sapiens
  siRNA target sequence for LOC91526 (NM_153697.1,1237-1255).
ctgctgcaggaggtaatgt

SEQ ID NO: 423610 - DNA, 19 bp, Homo sapiens
  siRNA target sequence for LOC91526 (NM_153697.1,1245-1263).
ggaggtaatgtggaatgta

SEQ ID NO: 423611 - DNA, 19 bp, Homo sapiens
  siRNA target sequence for LOC91526 (NM_153697.1,1248-1266).
ggtaatgtggaatgtataa

SEQ ID NO: 423612 - DNA, 19 bp, Homo sapiens
  siRNA target sequence for LOC91526 (NM_153697.1,1249-1267).
gtaatgtggaatgtataaa

SEQ ID NO: 423613 - DNA, 19 bp, Homo sapiens
  siRNA target sequence for LOC91526 (NM_153697.1,1279-1297).
gcagcggagcagatttcca

SEQ ID NO: 423614 - DNA, 19 bp, Homo sapiens
  siRNA target sequence for LOC91526 (NM_153697.1,1280-1298).
cagcggagcagatttccat

SEQ ID NO: 423615 - DNA, 19 bp, Homo sapiens
  siRNA target sequence for LOC91526 (NM_153697.1,1282-1300).
gcggagcagatttccataa

SEQ ID NO: 423616 - DNA, 19 bp, Homo sapiens
  siRNA target sequence for LOC91526 (NM_153697.1,1283-1301).
cggagcagatttccataaa

SEQ ID NO: 423617 - DNA, 19 bp, Homo sapiens
  siRNA target sequence for LOC91526 (NM_153697.1,1284-1302).
ggagcagatttccataaaa

SEQ ID NO: 423618 - DNA, 19 bp, Homo sapiens
  siRNA target sequence for LOC91526 (NM_153697.1,1331-1349).
ctatgcagctgcgaattgt

SEQ ID NO: 423619 - DNA, 19 bp, Homo sapiens
  siRNA target sequence for LOC91526 (NM_153697.1,1348-1366).
gtcatttccactgtattga

SEQ ID NO: 423620 - DNA, 19 bp, Homo sapiens
  siRNA target sequence for LOC91526 (NM_153697.1,1355-1373).
ccactgtattgagacatta

SEQ ID NO: 423621 - DNA, 19 bp, Homo sapiens
  siRNA target sequence for LOC91526 (NM_153697.1,1378-1396).
ccacaggggccaacgttaa

SEQ ID NO: 423622 - DNA, 19 bp, Homo sapiens
  siRNA target sequence for LOC91526 (NM_153697.1,1383-1401).
ggggccaacgttaatgaaa

SEQ ID NO: 423623 - DNA, 19 bp, Homo sapiens
  siRNA target sequence for LOC91526 (NM_153697.1,1414-1432).
gacgcacagctttgcatta

SEQ ID NO: 423624 - DNA, 19 bp, Homo sapiens
  siRNA target sequence for LOC91526 (NM_153697.1,1437-1455).
gctgcatcagacatggata

SEQ ID NO: 423625 - DNA, 19 bp, Homo sapiens
  siRNA target sequence for LOC91526 (NM_153697.1,1440-1458).
gcatcagacatggatagaa

SEQ ID NO: 423626 - DNA, 19 bp, Homo sapiens
  siRNA target sequence for LOC91526 (NM_153697.1,1444-1462).
cagacatggatagaaataa

SEQ ID NO: 423627 - DNA, 19 bp, Homo sapiens
  siRNA target sequence for LOC91526 (NM_153697.1,1448-1466).
catggatagaaataagact

SEQ ID NO: 423628 - DNA, 19 bp, Homo sapiens
  siRNA target sequence for LOC91526 (NM_153697.1,1534-1552).
ccacactatgtctagagtt

SEQ ID NO: 423629 - DNA, 19 bp, Homo sapiens
  siRNA target sequence for LOC91526 (NM_153697.1,1535-1553).
cacactatgtctagagttt

SEQ ID NO: 423630 - DNA, 19 bp, Homo sapiens
  siRNA target sequence for LOC91526 (NM_153697.1,1537-1555).
cactatgtctagagtttct

SEQ ID NO: 423631 - DNA, 19 bp, Homo sapiens
  siRNA target sequence for LOC91526 (NM_153697.1,1585-1603).
gggacaaggaaggttacaa

SEQ ID NO: 423632 - DNA, 19 bp, Homo sapiens
  siRNA target sequence for LOC91526 (NM_153697.1,1587-1605).
gacaaggaaggttacaata

SEQ ID NO: 423633 - DNA, 19 bp, Homo sapiens
  siRNA target sequence for LOC91526 (NM_153697.1,1592-1610).
ggaaggttacaatagcata

SEQ ID NO: 423634 - DNA, 19 bp, Homo sapiens
  siRNA target sequence for LOC91526 (NM_153697.1,1689-1707).
gattctggtgctactaaga

SEQ ID NO: 423635 - DNA, 19 bp, Homo sapiens
  siRNA target sequence for LOC91526 (NM_153697.1,1814-1832).
ggatctggctgcctttaaa

SEQ ID NO: 423636 - DNA, 19 bp, Homo sapiens
  siRNA target sequence for LOC91526 (NM_153697.1,1870-1888).
gcgcatccatctttgtgaa

SEQ ID NO: 423637 - DNA, 19 bp, Homo sapiens
  siRNA target sequence for LOC91526 (NM_153697.1,1871-1889).
cgcatccatctttgtgaaa

SEQ ID NO: 423638 - DNA, 19 bp, Homo sapiens
  siRNA target sequence for LOC91526 (NM_153697.1,1911-1929).
ccacttcatgcctcagtaa

SEQ ID NO: 423639 - DNA, 19 bp, Homo sapiens
  siRNA target sequence for LOC91526 (NM_153697.1,1912-1930).
cacttcatgcctcagtaat

SEQ ID NO: 423640 - DNA, 19 bp, Homo sapiens
  siRNA target sequence for LOC91526 (NM_153697.1,1981-1999).
cggaggcggtcgatgtgaa

SEQ ID NO: 423641 - DNA, 19 bp, Homo sapiens
  siRNA target sequence for LOC91526 (NM_153697.1,2024-2042).
gatgcttgcagtagcatat

SEQ ID NO: 423642 - DNA, 19 bp, Homo sapiens
  siRNA target sequence for LOC91526 (NM_153697.1,2027-2045).
gcttgcagtagcatatgga

SEQ ID NO: 423643 - DNA, 19 bp, Homo sapiens
  siRNA target sequence for LOC91526 (NM_153697.1,2032-2050).
cagtagcatatggacatat

SEQ ID NO: 423644 - DNA, 19 bp, Homo sapiens
  siRNA target sequence for LOC91526 (NM_153697.1,2046-2064).
catattgacgctgtttcat

SEQ ID NO: 423645 - DNA, 19 bp, Homo sapiens
  siRNA target sequence for LOC91526 (NM_153697.1,2119-2137).
ctttacacagagggattat

SEQ ID NO: 423646 - DNA, 19 bp, Homo sapiens
  siRNA target sequence for LOC91526 (NM_153697.1,2183-2201).
gtcaattctctgtaaagat

SEQ ID NO: 423647 - DNA, 19 bp, Homo sapiens
  siRNA target sequence for LOC91526 (NM_153697.1,2338-2356).
cttgttacaatggtaatga

SEQ ID NO: 423648 - DNA, 19 bp, Homo sapiens
  siRNA target sequence for LOC91526 (NM_153697.1,2362-2380).
gtatagaggtacttttgga

SEQ ID NO: 423649 - DNA, 19 bp, Homo sapiens
  siRNA target sequence for LOC91526 (NM_153697.1,2469-2487).
ctgcttggggccatagatt

SEQ ID NO: 423650 - DNA, 19 bp, Homo sapiens
  siRNA target sequence for LOC91526 (NM_153697.1,2489-2507).
cagtatcgtcagttgtaga

SEQ ID NO: 423651 - DNA, 19 bp, Homo sapiens
  siRNA target sequence for LOC91526 (NM_153697.1,2539-2557).
cagcatttgctgatcatgt

SEQ ID NO: 423652 - DNA, 19 bp, Homo sapiens
  siRNA target sequence for LOC91526 (NM_153697.1,2592-2610).
ccagtgaacgcagtagata

SEQ ID NO: 423653 - DNA, 19 bp, Homo sapiens
  siRNA target sequence for LOC91526 (NM_153697.1,2593-2611).
cagtgaacgcagtagataa

SEQ ID NO: 423654 - DNA, 19 bp, Homo sapiens
  siRNA target sequence for LOC91526 (NM_153697.1,2595-2613).
gtgaacgcagtagataatt

SEQ ID NO: 423655 - DNA, 19 bp, Homo sapiens
  siRNA target sequence for LOC91526 (NM_153697.1,2655-2673).
gcaggcgctgtggatattt

SEQ ID NO: 423656 - DNA, 19 bp, Homo sapiens
  siRNA target sequence for LOC91526 (NM_153697.1,2656-2674).
caggcgctgtggatatttt

SEQ ID NO: 423657 - DNA, 19 bp, Homo sapiens
  siRNA target sequence for LOC91526 (NM_153697.1,2659-2677).
gcgctgtggatattttggt

SEQ ID NO: 423658 - DNA, 19 bp, Homo sapiens
  siRNA target sequence for LOC91526 (NM_153697.1,2708-2726).
ggataaggacttgaataca

SEQ ID NO: 423659 - DNA, 19 bp, Homo sapiens
  siRNA target sequence for LOC91526 (NM_153697.1,2729-2747).
cttacatttggcttgtagt

SEQ ID NO: 423660 - DNA, 19 bp, Homo sapiens
  siRNA target sequence for LOC91526 (NM_153697.1,2790-2808).
caagacgagagccttatta

SEQ ID NO: 423661 - DNA, 19 bp, Homo sapiens
  siRNA target sequence for LOC91526 (NM_153697.1,2798-2816).
gagccttattaatgaaaaa

SEQ ID NO: 423662 - DNA, 19 bp, Homo sapiens
  siRNA target sequence for STRC (NM_153700.2,243-261).
ccgctcacggttctttaca

SEQ ID NO: 423663 - DNA, 19 bp, Homo sapiens
  siRNA target sequence for STRC (NM_153700.2,244-262).
cgctcacggttctttacat

SEQ ID NO: 423664 - DNA, 19 bp, Homo sapiens
  siRNA target sequence for STRC (NM_153700.2,245-263).
gctcacggttctttacatt

SEQ ID NO: 423665 - DNA, 19 bp, Homo sapiens
  siRNA target sequence for STRC (NM_153700.2,2486-2504).
caccactcatccctttctt

SEQ ID NO: 423666 - DNA, 19 bp, Homo sapiens
  siRNA target sequence for STRC (NM_153700.2,2707-2725).
ctccctctggagaactttt

SEQ ID NO: 423667 - DNA, 19 bp, Homo sapiens
  siRNA target sequence for STRC (NM_153700.2,2990-3008).
gacgggtggcatatgaact

SEQ ID NO: 423668 - DNA, 19 bp, Homo sapiens
  siRNA target sequence for STRC (NM_153700.2,2993-3011).
gggtggcatatgaacttct

SEQ ID NO: 423669 - DNA, 19 bp, Homo sapiens
  siRNA target sequence for STRC (NM_153700.2,3147-3165).
cctgcagggaactagtgtt

SEQ ID NO: 423670 - DNA, 19 bp, Homo sapiens
  siRNA target sequence for STRC (NM_153700.2,3148-3166).
ctgcagggaactagtgtta

SEQ ID NO: 423671 - DNA, 19 bp, Homo sapiens
  siRNA target sequence for STRC (NM_153700.2,3150-3168).
gcagggaactagtgttaca

SEQ ID NO: 423672 - DNA, 19 bp, Homo sapiens
  siRNA target sequence for STRC (NM_153700.2,3202-3220).
cttcctaggcacgatctat

SEQ ID NO: 423673 - DNA, 19 bp, Homo sapiens
  siRNA target sequence for STRC (NM_153700.2,5361-5379).
ctggtccctggtattgact

SEQ ID NO: 423674 - DNA, 19 bp, Homo sapiens
  siRNA target sequence for STRC (NM_153700.2,5363-5381).
ggtccctggtattgactat

SEQ ID NO: 423675 - DNA, 19 bp, Homo sapiens
  siRNA target sequence for MGC10084 (NM_153702.1,103-121).
ctttgtgggagttcttcta

SEQ ID NO: 423676 - DNA, 19 bp, Homo sapiens
  siRNA target sequence for MGC10084 (NM_153702.1,116-134).
cttctatgggcactttttt

SEQ ID NO: 423677 - DNA, 19 bp, Homo sapiens
  siRNA target sequence for MGC10084 (NM_153702.1,119-137).
ctatgggcacttttttcga

SEQ ID NO: 423678 - DNA, 19 bp, Homo sapiens
  siRNA target sequence for MGC10084 (NM_153702.1,178-196).
gtgaattgcagcgaatatt

SEQ ID NO: 423679 - DNA, 19 bp, Homo sapiens
  siRNA target sequence for MGC10084 (NM_153702.1,188-206).
gcgaatatttgatacctat

SEQ ID NO: 423680 - DNA, 19 bp, Homo sapiens
  siRNA target sequence for MGC10084 (NM_153702.1,242-260).
cttgacatactccaagaat

SEQ ID NO: 423681 - DNA, 19 bp, Homo sapiens
  siRNA target sequence for MGC10084 (NM_153702.1,247-265).
catactccaagaataaggt

SEQ ID NO: 423682 - DNA, 19 bp, Homo sapiens
  siRNA target sequence for MGC10084 (NM_153702.1,251-269).
ctccaagaataaggtttta

SEQ ID NO: 423683 - DNA, 19 bp, Homo sapiens
  siRNA target sequence for MGC10084 (NM_153702.1,272-290).
gaaggcgacacatgttgtt

SEQ ID NO: 423684 - DNA, 19 bp, Homo sapiens
  siRNA target sequence for MGC10084 (NM_153702.1,353-371).
ggatgccagttttaaaata

SEQ ID NO: 423685 - DNA, 19 bp, Homo sapiens
  siRNA target sequence for MGC10084 (NM_153702.1,390-408).
ctgcagataactggttata

SEQ ID NO: 423686 - DNA, 19 bp, Homo sapiens
  siRNA target sequence for MGC10084 (NM_153702.1,448-466).
catatgattctgataacct

SEQ ID NO: 423687 - DNA, 19 bp, Homo sapiens
  siRNA target sequence for MGC10084 (NM_153702.1,485-503).
catgaagctttggaatctt

SEQ ID NO: 423688 - DNA, 19 bp, Homo sapiens
  siRNA target sequence for MGC10084 (NM_153702.1,504-522).
ctaatgcccacgaagaagt

SEQ ID NO: 423689 - DNA, 19 bp, Homo sapiens
  siRNA target sequence for MGC10084 (NM_153702.1,545-563).
gtgggctgaaattggtttt

SEQ ID NO: 423690 - DNA, 19 bp, Homo sapiens
  siRNA target sequence for MGC10084 (NM_153702.1,590-608).
cagaggcatgggcatactt

SEQ ID NO: 423691 - DNA, 19 bp, Homo sapiens
  siRNA target sequence for MGC10084 (NM_153702.1,600-618).
ggcatacttgggttaatca

SEQ ID NO: 423692 - DNA, 19 bp, Homo sapiens
  siRNA target sequence for MGC10084 (NM_153702.1,601-619).
gcatacttgggttaatcaa

SEQ ID NO: 423693 - DNA, 19 bp, Homo sapiens
  siRNA target sequence for MGC10084 (NM_153702.1,610-628).
ggttaatcaatcttgtgta

SEQ ID NO: 423694 - DNA, 19 bp, Homo sapiens
  siRNA target sequence for MGC10084 (NM_153702.1,646-664).
ctagtgaagctcatcagat

SEQ ID NO: 423695 - DNA, 19 bp, Homo sapiens
  siRNA target sequence for MGC10084 (NM_153702.1,649-667).
gtgaagctcatcagattct

SEQ ID NO: 423696 - DNA, 19 bp, Homo sapiens
  siRNA target sequence for MGC10084 (NM_153702.1,662-680).
gattctttcccgttcaaat

SEQ ID NO: 423697 - DNA, 19 bp, Homo sapiens
  siRNA target sequence for MGC10084 (NM_153702.1,672-690).
cgttcaaatcatccaaaat

SEQ ID NO: 423698 - DNA, 19 bp, Homo sapiens
  siRNA target sequence for MGC10084 (NM_153702.1,684-702).
ccaaaattagggtattctt

SEQ ID NO: 423699 - DNA, 19 bp, Homo sapiens
  siRNA target sequence for MGC10084 (NM_153702.1,685-703).
caaaattagggtattctta

SEQ ID NO: 423700 - DNA, 19 bp, Homo sapiens
  siRNA target sequence for MGC10084 (NM_153702.1,694-712).
ggtattcttatgcaatagt

SEQ ID NO: 423701 - DNA, 19 bp, Homo sapiens
  siRNA target sequence for MGC10084 (NM_153702.1,695-713).
gtattcttatgcaatagtt

SEQ ID NO: 423702 - DNA, 19 bp, Homo sapiens
  siRNA target sequence for MGC10084 (NM_153702.1,723-741).
cttacagagatggcttata

SEQ ID NO: 423703 - DNA, 19 bp, Homo sapiens
  siRNA target sequence for MGC10084 (NM_153702.1,727-745).
cagagatggcttatagctt

SEQ ID NO: 423704 - DNA, 19 bp, Homo sapiens
  siRNA target sequence for MGC10084 (NM_153702.1,783-801).
cttgttcctggtataccaa

SEQ ID NO: 423705 - DNA, 19 bp, Homo sapiens
  siRNA target sequence for MGC10084 (NM_153702.1,829-847).
gttatcttgtctatgaatt

SEQ ID NO: 423706 - DNA, 19 bp, Homo sapiens
  siRNA target sequence for MGC10084 (NM_153702.1,851-869).
caagttttggtttgaagaa

SEQ ID NO: 423707 - DNA, 19 bp, Homo sapiens
  siRNA target sequence for MGC10084 (NM_153702.1,873-891).
ccagaaagcattatgtatt

SEQ ID NO: 423708 - DNA, 19 bp, Homo sapiens
  siRNA target sequence for MGC10084 (NM_153702.1,899-917).
gtatagagagaagtttcat

SEQ ID NO: 423709 - DNA, 19 bp, Homo sapiens
  siRNA target sequence for PODN (NM_153703.2,920-938).
gcagcctgcgcgagctata

SEQ ID NO: 423710 - DNA, 19 bp, Homo sapiens
  siRNA target sequence for PODN (NM_153703.2,923-941).
gcctgcgcgagctatacct

SEQ ID NO: 423711 - DNA, 19 bp, Homo sapiens
  siRNA target sequence for PODN (NM_153703.2,1475-1493).
ctgggctgcctcgaaatgt

SEQ ID NO: 423712 - DNA, 19 bp, Homo sapiens
  siRNA target sequence for PODN (NM_153703.2,1722-1740).
gcagaacaacaagattagt

SEQ ID NO: 423713 - DNA, 19 bp, Homo sapiens
  siRNA target sequence for PODN (NM_153703.2,1783-1801).
gggatctttctcaggttta

SEQ ID NO: 423714 - DNA, 19 bp, Homo sapiens
  siRNA target sequence for PODN (NM_153703.2,1784-1802).
ggatctttctcaggtttaa

SEQ ID NO: 423715 - DNA, 19 bp, Homo sapiens
  siRNA target sequence for PODN (NM_153703.2,1866-1884).
ggacattgaaggcaactta

SEQ ID NO: 423716 - DNA, 19 bp, Homo sapiens
  siRNA target sequence for MGC33424 (NM_153705.2,158-176).
ctgccggtccgctatttct

SEQ ID NO: 423717 - DNA, 19 bp, Homo sapiens
  siRNA target sequence for MGC33424 (NM_153705.2,217-235).
ctctcccgcaggtgaaaca

SEQ ID NO: 423718 - DNA, 19 bp, Homo sapiens
  siRNA target sequence for MGC33424 (NM_153705.2,228-246).
gtgaaacaccattcaaagt

SEQ ID NO: 423719 - DNA, 19 bp, Homo sapiens
  siRNA target sequence for MGC33424 (NM_153705.2,237-255).
cattcaaagtcgtagtcaa

SEQ ID NO: 423720 - DNA, 19 bp, Homo sapiens
  siRNA target sequence for MGC33424 (NM_153705.2,245-263).
gtcgtagtcaaatctcttt

SEQ ID NO: 423721 - DNA, 19 bp, Homo sapiens
  siRNA target sequence for MGC33424 (NM_153705.2,283-301).
gatacatgtccctaaacct

SEQ ID NO: 423722 - DNA, 19 bp, Homo sapiens
  siRNA target sequence for MGC33424 (NM_153705.2,328-346).
gatgagatataggatgtat

SEQ ID NO: 423723 - DNA, 19 bp, Homo sapiens
  siRNA target sequence for MGC33424 (NM_153705.2,331-349).
gagatataggatgtatgaa

SEQ ID NO: 423724 - DNA, 19 bp, Homo sapiens
  siRNA target sequence for MGC33424 (NM_153705.2,370-388).
gatagaggtcctttatggt

SEQ ID NO: 423725 - DNA, 19 bp, Homo sapiens
  siRNA target sequence for MGC33424 (NM_153705.2,400-418).
ggctcagtctccctatatt

SEQ ID NO: 423726 - DNA, 19 bp, Homo sapiens
  siRNA target sequence for MGC33424 (NM_153705.2,540-558).
gcatcaatctccagcaaat

SEQ ID NO: 423727 - DNA, 19 bp, Homo sapiens
  siRNA target sequence for MGC33424 (NM_153705.2,592-610).
gagaggtgccattgttcat

SEQ ID NO: 423728 - DNA, 19 bp, Homo sapiens
  siRNA target sequence for MGC33424 (NM_153705.2,594-612).
gaggtgccattgttcatta

SEQ ID NO: 423729 - DNA, 19 bp, Homo sapiens
  siRNA target sequence for MGC33424 (NM_153705.2,605-623).
gttcattacacgattctca

SEQ ID NO: 423730 - DNA, 19 bp, Homo sapiens
  siRNA target sequence for MGC33424 (NM_153705.2,608-626).
cattacacgattctcaata

SEQ ID NO: 423731 - DNA, 19 bp, Homo sapiens
  siRNA target sequence for MGC33424 (NM_153705.2,613-631).
cacgattctcaataaccat

SEQ ID NO: 423732 - DNA, 19 bp, Homo sapiens
  siRNA target sequence for MGC33424 (NM_153705.2,676-694).
ctctgatgagattttgtta

SEQ ID NO: 423733 - DNA, 19 bp, Homo sapiens
  siRNA target sequence for MGC33424 (NM_153705.2,712-730).
ccttctcccagatttagaa

SEQ ID NO: 423734 - DNA, 19 bp, Homo sapiens
  siRNA target sequence for MGC33424 (NM_153705.2,713-731).
cttctcccagatttagaat

SEQ ID NO: 423735 - DNA, 19 bp, Homo sapiens
  siRNA target sequence for MGC33424 (NM_153705.2,753-771).
ggcccttggagcatcgaaa

SEQ ID NO: 423736 - DNA, 19 bp, Homo sapiens
  siRNA target sequence for MGC33424 (NM_153705.2,756-774).
ccttggagcatcgaaaagt

SEQ ID NO: 423737 - DNA, 19 bp, Homo sapiens
  siRNA target sequence for MGC33424 (NM_153705.2,760-778).
ggagcatcgaaaagtcaat

SEQ ID NO: 423738 - DNA, 19 bp, Homo sapiens
  siRNA target sequence for MGC33424 (NM_153705.2,783-801).
cccctagccccatacctat

SEQ ID NO: 423739 - DNA, 19 bp, Homo sapiens
  siRNA target sequence for MGC33424 (NM_153705.2,786-804).
ctagccccatacctatcat

SEQ ID NO: 423740 - DNA, 19 bp, Homo sapiens
  siRNA target sequence for MGC33424 (NM_153705.2,839-857).
gtccttccaacgtatgaca

SEQ ID NO: 423741 - DNA, 19 bp, Homo sapiens
  siRNA target sequence for MGC33424 (NM_153705.2,878-896).
gccatgcggggtgttacaa

SEQ ID NO: 423742 - DNA, 19 bp, Homo sapiens
  siRNA target sequence for MGC33424 (NM_153705.2,879-897).
ccatgcggggtgttacaaa

SEQ ID NO: 423743 - DNA, 19 bp, Homo sapiens
  siRNA target sequence for MGC33424 (NM_153705.2,880-898).
catgcggggtgttacaaat

SEQ ID NO: 423744 - DNA, 19 bp, Homo sapiens
  siRNA target sequence for MGC33424 (NM_153705.2,883-901).
gcggggtgttacaaatgat

SEQ ID NO: 423745 - DNA, 19 bp, Homo sapiens
  siRNA target sequence for MGC33424 (NM_153705.2,885-903).
ggggtgttacaaatgatct

SEQ ID NO: 423746 - DNA, 19 bp, Homo sapiens
  siRNA target sequence for MGC33424 (NM_153705.2,1092-1110).
ccaagttgatgggtttctt

SEQ ID NO: 423747 - DNA, 19 bp, Homo sapiens
  siRNA target sequence for MGC33424 (NM_153705.2,1117-1135).
ctttaagtacaagtatcaa

SEQ ID NO: 423748 - DNA, 19 bp, Homo sapiens
  siRNA target sequence for MGC33424 (NM_153705.2,1157-1175).
gctgcttacagatatccat

SEQ ID NO: 423749 - DNA, 19 bp, Homo sapiens
  siRNA target sequence for MGC33424 (NM_153705.2,1158-1176).
ctgcttacagatatccata

SEQ ID NO: 423750 - DNA, 19 bp, Homo sapiens
  siRNA target sequence for MGC33424 (NM_153705.2,1161-1179).
cttacagatatccatatct

SEQ ID NO: 423751 - DNA, 19 bp, Homo sapiens
  siRNA target sequence for MGC33424 (NM_153705.2,1186-1204).
gggcgacagtctggtttta

SEQ ID NO: 423752 - DNA, 19 bp, Homo sapiens
  siRNA target sequence for MGC33424 (NM_153705.2,1207-1225).
gcaggactcgccatattat

SEQ ID NO: 423753 - DNA, 19 bp, Homo sapiens
  siRNA target sequence for MGC33424 (NM_153705.2,1213-1231).
ctcgccatattatgaacat

SEQ ID NO: 423754 - DNA, 19 bp, Homo sapiens
  siRNA target sequence for MGC33424 (NM_153705.2,1244-1262).
ctagaaccttggaagcatt

SEQ ID NO: 423755 - DNA, 19 bp, Homo sapiens
  siRNA target sequence for MGC33424 (NM_153705.2,1254-1272).
ggaagcattatgttccaat

SEQ ID NO: 423756 - DNA, 19 bp, Homo sapiens
  siRNA target sequence for MGC33424 (NM_153705.2,1390-1408).
caggctttactgctactat

SEQ ID NO: 423757 - DNA, 19 bp, Homo sapiens
  siRNA target sequence for MGC33424 (NM_153705.2,1401-1419).
gctactattaccaagtact

SEQ ID NO: 423758 - DNA, 19 bp, Homo sapiens
  siRNA target sequence for MGC33424 (NM_153705.2,1452-1470).
ccgaagtacgtgatggaat

SEQ ID NO: 423759 - DNA, 19 bp, Homo sapiens
  siRNA target sequence for MGC33648 (NM_153706.2,637-655).
cctactggcagttgaacat

SEQ ID NO: 423760 - DNA, 19 bp, Homo sapiens
  siRNA target sequence for MGC33648 (NM_153706.2,749-767).
caagcaactagctcattga

SEQ ID NO: 423761 - DNA, 19 bp, Homo sapiens
  siRNA target sequence for MGC33648 (NM_153706.2,785-803).
gtcttcgttactaaaggat

SEQ ID NO: 423762 - DNA, 19 bp, Homo sapiens
  siRNA target sequence for MGC33648 (NM_153706.2,790-808).
cgttactaaaggattggta

SEQ ID NO: 423763 - DNA, 19 bp, Homo sapiens
  siRNA target sequence for MGC33648 (NM_153706.2,815-833).
ggcgcagtcgtatctatgt

SEQ ID NO: 423764 - DNA, 19 bp, Homo sapiens
  siRNA target sequence for MGC33648 (NM_153706.2,816-834).
gcgcagtcgtatctatgta

SEQ ID NO: 423765 - DNA, 19 bp, Homo sapiens
  siRNA target sequence for MGC33648 (NM_153706.2,817-835).
cgcagtcgtatctatgtat

SEQ ID NO: 423766 - DNA, 19 bp, Homo sapiens
  siRNA target sequence for MGC33648 (NM_153706.2,832-850).
gtatcctggtacagtatat

SEQ ID NO: 423767 - DNA, 19 bp, Homo sapiens
  siRNA target sequence for MGC33648 (NM_153706.2,836-854).
cctggtacagtatatcaga

SEQ ID NO: 423768 - DNA, 19 bp, Homo sapiens
  siRNA target sequence for MGC33648 (NM_153706.2,837-855).
ctggtacagtatatcagaa

SEQ ID NO: 423769 - DNA, 19 bp, Homo sapiens
  siRNA target sequence for MGC33648 (NM_153706.2,840-858).
gtacagtatatcagaagta

SEQ ID NO: 423770 - DNA, 19 bp, Homo sapiens
  siRNA target sequence for MGC33648 (NM_153706.2,879-897).
ccattggaaatccgtttat

SEQ ID NO: 423771 - DNA, 19 bp, Homo sapiens
  siRNA target sequence for MGC33648 (NM_153706.2,907-925).
cctggatggggtactcatt

SEQ ID NO: 423772 - DNA, 19 bp, Homo sapiens
  siRNA target sequence for MGC33648 (NM_153706.2,910-928).
ggatggggtactcattgat

SEQ ID NO: 423773 - DNA, 19 bp, Homo sapiens
  siRNA target sequence for MGC33648 (NM_153706.2,980-998).
gatcgactcggccctttaa

SEQ ID NO: 423774 - DNA, 19 bp, Homo sapiens
  siRNA target sequence for MGC33648 (NM_153706.2,984-1002).
gactcggccctttaaaaat

SEQ ID NO: 423775 - DNA, 19 bp, Homo sapiens
  siRNA target sequence for MGC33648 (NM_153706.2,988-1006).
cggccctttaaaaatgagt

SEQ ID NO: 423776 - DNA, 19 bp, Homo sapiens
  siRNA target sequence for MGC33648 (NM_153706.2,1014-1032).
catggctaacgtcagaaat

SEQ ID NO: 423777 - DNA, 19 bp, Homo sapiens
  siRNA target sequence for MGC33648 (NM_153706.2,1052-1070).
ggacagtatgtcaacaatt

SEQ ID NO: 423778 - DNA, 19 bp, Homo sapiens
  siRNA target sequence for MGC33648 (NM_153706.2,1079-1097).
gacagagcagctaatgtct

SEQ ID NO: 423779 - DNA, 19 bp, Homo sapiens
  siRNA target sequence for MGC33648 (NM_153706.2,1086-1104).
cagctaatgtctgttatca

SEQ ID NO: 423780 - DNA, 19 bp, Homo sapiens
  siRNA target sequence for MGC33648 (NM_153706.2,1098-1116).
gttatcaggaatttgatgt

SEQ ID NO: 423781 - DNA, 19 bp, Homo sapiens
  siRNA target sequence for MGC33648 (NM_153706.2,1122-1140).
cagttttccctatagaact

SEQ ID NO: 423782 - DNA, 19 bp, Homo sapiens
  siRNA target sequence for MGC33648 (NM_153706.2,1144-1162).
gcagtatcttccaaacatt

SEQ ID NO: 423783 - DNA, 19 bp, Homo sapiens
  siRNA target sequence for MGC33648 (NM_153706.2,1186-1204).
cccacttcgatgtgttgtt

SEQ ID NO: 423784 - DNA, 19 bp, Homo sapiens
  siRNA target sequence for MGC33648 (NM_153706.2,1188-1206).
cacttcgatgtgttgttct

SEQ ID NO: 423785 - DNA, 19 bp, Homo sapiens
  siRNA target sequence for MGC33648 (NM_153706.2,1210-1228).
cgcacttagggacatcaat

SEQ ID NO: 423786 - DNA, 19 bp, Homo sapiens
  siRNA target sequence for MGC33648 (NM_153706.2,1212-1230).
cacttagggacatcaatca

SEQ ID NO: 423787 - DNA, 19 bp, Homo sapiens
  siRNA target sequence for MGC35182 (NM_153707.1,382-400).
ccgaatataccgagaacta

SEQ ID NO: 423788 - DNA, 19 bp, Homo sapiens
  siRNA target sequence for MGC35182 (NM_153707.1,391-409).
ccgagaactaccctttcta

SEQ ID NO: 423789 - DNA, 19 bp, Homo sapiens
  siRNA target sequence for MGC35182 (NM_153707.1,392-410).
cgagaactaccctttctat

SEQ ID NO: 423790 - DNA, 19 bp, Homo sapiens
  siRNA target sequence for MGC35182 (NM_153707.1,476-494).
ggaaggcctgactacatca

SEQ ID NO: 423791 - DNA, 19 bp, Homo sapiens
  siRNA target sequence for MGC35182 (NM_153707.1,477-495).
gaaggcctgactacatcaa

SEQ ID NO: 423792 - DNA, 19 bp, Homo sapiens
  siRNA target sequence for MGC35182 (NM_153707.1,576-594).
gatttgctcacgacgtata

SEQ ID NO: 423793 - DNA, 19 bp, Homo sapiens
  siRNA target sequence for MGC35182 (NM_153707.1,581-599).
gctcacgacgtataagaaa

SEQ ID NO: 423794 - DNA, 19 bp, Homo sapiens
  siRNA target sequence for MGC35182 (NM_153707.1,584-602).
cacgacgtataagaaagat

SEQ ID NO: 423795 - DNA, 19 bp, Homo sapiens
  siRNA target sequence for MGC35182 (NM_153707.1,586-604).
cgacgtataagaaagatta

SEQ ID NO: 423796 - DNA, 19 bp, Homo sapiens
  siRNA target sequence for MGC35182 (NM_153707.1,645-663).
cgggacagtaaatatccat

SEQ ID NO: 423797 - DNA, 19 bp, Homo sapiens
  siRNA target sequence for MGC35182 (NM_153707.1,667-685).
gcgacaagatggagtgttt

SEQ ID NO: 423798 - DNA, 19 bp, Homo sapiens
  siRNA target sequence for MGC35182 (NM_153707.1,677-695).
ggagtgtttgcctacttat

SEQ ID NO: 423799 - DNA, 19 bp, Homo sapiens
  siRNA target sequence for MGC35182 (NM_153707.1,736-754).
cacttcgtctggaacacaa

SEQ ID NO: 423800 - DNA, 19 bp, Homo sapiens
  siRNA target sequence for MGC35182 (NM_153707.1,738-756).
cttcgtctggaacacaaat

SEQ ID NO: 423801 - DNA, 19 bp, Homo sapiens
  siRNA target sequence for MGC35182 (NM_153707.1,800-818).
ggacgattaccccataaaa

SEQ ID NO: 423802 - DNA, 19 bp, Homo sapiens
  siRNA target sequence for MGC35182 (NM_153707.1,811-829).
ccataaaaggccttgtgaa

SEQ ID NO: 423803 - DNA, 19 bp, Homo sapiens
  siRNA target sequence for MGC35182 (NM_153707.1,885-903).
gatgtgactaactacaaga

SEQ ID NO: 423804 - DNA, 19 bp, Homo sapiens
  siRNA target sequence for MGC35182 (NM_153707.1,888-906).
gtgactaactacaagatga

SEQ ID NO: 423805 - DNA, 19 bp, Homo sapiens
  siRNA target sequence for MGC35182 (NM_153707.1,1028-1046).
gcctgccaagagcttgaaa

SEQ ID NO: 423806 - DNA, 19 bp, Homo sapiens
  siRNA target sequence for MGC35182 (NM_153707.1,1068-1086).
ctagacatgcctttctgta

SEQ ID NO: 423807 - DNA, 19 bp, Homo sapiens
  siRNA target sequence for MGC35182 (NM_153707.1,1082-1100).
ctgtaacaccactgagttt

SEQ ID NO: 423808 - DNA, 19 bp, Homo sapiens
  siRNA target sequence for MGC35182 (NM_153707.1,1090-1108).
ccactgagtttcgagataa

SEQ ID NO: 423809 - DNA, 19 bp, Homo sapiens
  siRNA target sequence for MGC35182 (NM_153707.1,1197-1215).
gtgcaggcccattacacat

SEQ ID NO: 423810 - DNA, 19 bp, Homo sapiens
  siRNA target sequence for MGC35182 (NM_153707.1,1243-1261).
gccgacctgcacttcagat

SEQ ID NO: 423811 - DNA, 19 bp, Homo sapiens
  siRNA target sequence for MGC35182 (NM_153707.1,1244-1262).
ccgacctgcacttcagatt

SEQ ID NO: 423812 - DNA, 19 bp, Homo sapiens
  siRNA target sequence for MGC35182 (NM_153707.1,1245-1263).
cgacctgcacttcagatta

SEQ ID NO: 423813 - DNA, 19 bp, Homo sapiens
  siRNA target sequence for MGC35182 (NM_153707.1,1246-1264).
gacctgcacttcagattaa

SEQ ID NO: 423814 - DNA, 19 bp, Homo sapiens
  siRNA target sequence for MGC35182 (NM_153707.1,1248-1266).
cctgcacttcagattaaga

SEQ ID NO: 423815 - DNA, 19 bp, Homo sapiens
  siRNA target sequence for MGC35182 (NM_153707.1,1251-1269).
gcacttcagattaagaagt

SEQ ID NO: 423816 - DNA, 19 bp, Homo sapiens
  siRNA target sequence for MGC35182 (NM_153707.1,1415-1433).
gccccacctgcctatcaat

SEQ ID NO: 423817 - DNA, 19 bp, Homo sapiens
  siRNA target sequence for MGC35182 (NM_153707.1,1416-1434).
ccccacctgcctatcaata

SEQ ID NO: 423818 - DNA, 19 bp, Homo sapiens
  siRNA target sequence for MGC35182 (NM_153707.1,1421-1439).
cctgcctatcaataccaaa

SEQ ID NO: 423819 - DNA, 19 bp, Homo sapiens
  siRNA target sequence for MGC35182 (NM_153707.1,1592-1610).
gggtcacaggatatacaaa

SEQ ID NO: 423820 - DNA, 19 bp, Homo sapiens
  siRNA target sequence for MGC35182 (NM_153707.1,1644-1662).
catctttctgtagatgatt

SEQ ID NO: 423821 - DNA, 19 bp, Homo sapiens
  siRNA target sequence for MGC40168 (NM_153709.1,466-484).
ggaattgaaaagagattta

SEQ ID NO: 423822 - DNA, 19 bp, Homo sapiens
  siRNA target sequence for MGC40168 (NM_153709.1,731-749).
cttctgctctcctcaatgt

SEQ ID NO: 423823 - DNA, 19 bp, Homo sapiens
  siRNA target sequence for C6orf188 (NM_153711.1,82-100).
gcttttcagggcattttaa

SEQ ID NO: 423824 - DNA, 19 bp, Homo sapiens
  siRNA target sequence for C6orf188 (NM_153711.1,164-182).
gtgagcgtctcttttctgt

SEQ ID NO: 423825 - DNA, 19 bp, Homo sapiens
  siRNA target sequence for C6orf188 (NM_153711.1,200-218).
cctgcagcactgagaatat

SEQ ID NO: 423826 - DNA, 19 bp, Homo sapiens
  siRNA target sequence for C6orf188 (NM_153711.1,245-263).
ctcctgcctgggtgttact

SEQ ID NO: 423827 - DNA, 19 bp, Homo sapiens
  siRNA target sequence for C6orf188 (NM_153711.1,247-265).
cctgcctgggtgttactga

SEQ ID NO: 423828 - DNA, 19 bp, Homo sapiens
  siRNA target sequence for C6orf188 (NM_153711.1,248-266).
ctgcctgggtgttactgat

SEQ ID NO: 423829 - DNA, 19 bp, Homo sapiens
  siRNA target sequence for C6orf188 (NM_153711.1,481-499).
ggactcctggaactgattt

SEQ ID NO: 423830 - DNA, 19 bp, Homo sapiens
  siRNA target sequence for C6orf188 (NM_153711.1,541-559).
gtatcttgtggcaaaacta

SEQ ID NO: 423831 - DNA, 19 bp, Homo sapiens
  siRNA target sequence for C6orf188 (NM_153711.1,564-582).
gctacctaccgtcaatgaa

SEQ ID NO: 423832 - DNA, 19 bp, Homo sapiens
  siRNA target sequence for C6orf188 (NM_153711.1,569-587).
ctaccgtcaatgaagaact

SEQ ID NO: 423833 - DNA, 19 bp, Homo sapiens
  siRNA target sequence for C6orf188 (NM_153711.1,622-640).
ggatggtgcctgatttgtt

SEQ ID NO: 423834 - DNA, 19 bp, Homo sapiens
  siRNA target sequence for C6orf188 (NM_153711.1,660-678).
gctcaccacatgttatgct

SEQ ID NO: 423835 - DNA, 19 bp, Homo sapiens
  siRNA target sequence for C6orf188 (NM_153711.1,677-695).
ctcgctgccgatctaaagt

SEQ ID NO: 423836 - DNA, 19 bp, Homo sapiens
  siRNA target sequence for C6orf188 (NM_153711.1,679-697).
cgctgccgatctaaagtta

SEQ ID NO: 423837 - DNA, 19 bp, Homo sapiens
  siRNA target sequence for C6orf188 (NM_153711.1,683-701).
gccgatctaaagttagcta

SEQ ID NO: 423838 - DNA, 19 bp, Homo sapiens
  siRNA target sequence for C6orf188 (NM_153711.1,789-807).
cgagaggaacctgaaatgt

SEQ ID NO: 423839 - DNA, 19 bp, Homo sapiens
  siRNA target sequence for C6orf188 (NM_153711.1,792-810).
gaggaacctgaaatgtttt

SEQ ID NO: 423840 - DNA, 19 bp, Homo sapiens
  siRNA target sequence for C6orf188 (NM_153711.1,892-910).
caaagccagcaacactata

SEQ ID NO: 423841 - DNA, 19 bp, Homo sapiens
  siRNA target sequence for C6orf188 (NM_153711.1,982-1000).
gtgggtactgcccacaata

SEQ ID NO: 423842 - DNA, 19 bp, Homo sapiens
  siRNA target sequence for MGC46719 (NM_153713.1,353-371).
gggctatggccgagtgaat

SEQ ID NO: 423843 - DNA, 19 bp, Homo sapiens
  siRNA target sequence for MGC46719 (NM_153713.1,355-373).
gctatggccgagtgaatgt

SEQ ID NO: 423844 - DNA, 19 bp, Homo sapiens
  siRNA target sequence for MGC46719 (NM_153713.1,410-428).
gtcccgtggtgctgactta

SEQ ID NO: 423845 - DNA, 19 bp, Homo sapiens
  siRNA target sequence for MGC46719 (NM_153713.1,412-430).
cccgtggtgctgacttaaa

SEQ ID NO: 423846 - DNA, 19 bp, Homo sapiens
  siRNA target sequence for MGC46719 (NM_153713.1,436-454).
gggctctagtggtttatga

SEQ ID NO: 423847 - DNA, 19 bp, Homo sapiens
  siRNA target sequence for MGC46719 (NM_153713.1,438-456).
gctctagtggtttatgaga

SEQ ID NO: 423848 - DNA, 19 bp, Homo sapiens
  siRNA target sequence for MGC46719 (NM_153713.1,464-482).
ctccaacagccctccttat

SEQ ID NO: 423849 - DNA, 19 bp, Homo sapiens
  siRNA target sequence for MGC46719 (NM_153713.1,477-495).
ccttatgtctgctatgtca

SEQ ID NO: 423850 - DNA, 19 bp, Homo sapiens
  siRNA target sequence for MGC46719 (NM_153713.1,567-585).
gcaaagattgcgctaatga

SEQ ID NO: 423851 - DNA, 19 bp, Homo sapiens
  siRNA target sequence for MGC46719 (NM_153713.1,568-586).
caaagattgcgctaatgaa

SEQ ID NO: 423852 - DNA, 19 bp, Homo sapiens
  siRNA target sequence for MGC46719 (NM_153713.1,613-631).
gaagaatcactgatgagtt

SEQ ID NO: 423853 - DNA, 19 bp, Homo sapiens
  siRNA target sequence for MGC46719 (NM_153713.1,616-634).
gaatcactgatgagttcat

SEQ ID NO: 423854 - DNA, 19 bp, Homo sapiens
  siRNA target sequence for MGC46719 (NM_153713.1,653-671).
ggccctggcatcttttaat

SEQ ID NO: 423855 - DNA, 19 bp, Homo sapiens
  siRNA target sequence for MGC46719 (NM_153713.1,845-863).
ggaggtgttggctcattat

SEQ ID NO: 423856 - DNA, 19 bp, Homo sapiens
  siRNA target sequence for MGC46719 (NM_153713.1,1051-1069).
ctgggcagttgggcaatat

SEQ ID NO: 423857 - DNA, 19 bp, Homo sapiens
  siRNA target sequence for MGC46719 (NM_153713.1,1054-1072).
ggcagttgggcaatatgca

SEQ ID NO: 423858 - DNA, 19 bp, Homo sapiens
  siRNA target sequence for MGC46719 (NM_153713.1,1055-1073).
gcagttgggcaatatgcat

SEQ ID NO: 423859 - DNA, 19 bp, Homo sapiens
  siRNA target sequence for MGC46732 (NM_153714.1,83-101).
gggatcgcagggctcatta

SEQ ID NO: 423860 - DNA, 19 bp, Homo sapiens
  siRNA target sequence for MGC46732 (NM_153714.1,84-102).
ggatcgcagggctcattat

SEQ ID NO: 423861 - DNA, 19 bp, Homo sapiens
  siRNA target sequence for MGC46732 (NM_153714.1,88-106).
cgcagggctcattatgtca

SEQ ID NO: 423862 - DNA, 19 bp, Homo sapiens
  siRNA target sequence for MGC46732 (NM_153714.1,89-107).
gcagggctcattatgtcat

SEQ ID NO: 423863 - DNA, 19 bp, Homo sapiens
  siRNA target sequence for MGC46732 (NM_153714.1,103-121).
gtcatgagcatagttatta

SEQ ID NO: 423864 - DNA, 19 bp, Homo sapiens
  siRNA target sequence for MGC46732 (NM_153714.1,229-247).
cgagaagctcgggaattca

SEQ ID NO: 423865 - DNA, 19 bp, Homo sapiens
  siRNA target sequence for MGC46732 (NM_153714.1,265-283).
gggtccacgagacttaaca

SEQ ID NO: 423866 - DNA, 19 bp, Homo sapiens
  siRNA target sequence for MGC46732 (NM_153714.1,266-284).
ggtccacgagacttaacat

SEQ ID NO: 423867 - DNA, 19 bp, Homo sapiens
  siRNA target sequence for MGC46732 (NM_153714.1,267-285).
gtccacgagacttaacatt

SEQ ID NO: 423868 - DNA, 19 bp, Homo sapiens
  siRNA target sequence for MGC46732 (NM_153714.1,270-288).
cacgagacttaacatttca

SEQ ID NO: 423869 - DNA, 19 bp, Homo sapiens
  siRNA target sequence for MGC46732 (NM_153714.1,337-355).
gattccagtgaaatactgt

SEQ ID NO: 423870 - DNA, 19 bp, Homo sapiens
  siRNA target sequence for MGC46732 (NM_153714.1,344-362).
gtgaaatactgtcagtaaa

SEQ ID NO: 423871 - DNA, 19 bp, Homo sapiens
  siRNA target sequence for MGC46732 (NM_153714.1,352-370).
ctgtcagtaaaagaattga

SEQ ID NO: 423872 - DNA, 19 bp, Homo sapiens
  siRNA target sequence for MGC46732 (NM_153714.1,354-372).
gtcagtaaaagaattgagt

SEQ ID NO: 423873 - DNA, 19 bp, Homo sapiens
  siRNA target sequence for MGC46732 (NM_153714.1,371-389).
gttcatctacgcaaaagtt

SEQ ID NO: 423874 - DNA, 19 bp, Homo sapiens
  siRNA target sequence for MGC46732 (NM_153714.1,425-443).
ggttcctcaaacaattgct

SEQ ID NO: 423875 - DNA, 19 bp, Homo sapiens
  siRNA target sequence for MGC46732 (NM_153714.1,453-471).
gtttgaggaccgactgaaa

SEQ ID NO: 423876 - DNA, 19 bp, Homo sapiens
  siRNA target sequence for MGC46732 (NM_153714.1,547-565).
gataagatgagaaaatcct

SEQ ID NO: 423877 - DNA, 19 bp, Homo sapiens
  siRNA target sequence for FLJ25453 (NM_153716.1,1160-1178).
gatatcctctggtatcagt

SEQ ID NO: 423878 - DNA, 19 bp, Homo sapiens
  siRNA target sequence for C21orf82 (NM_153751.1,250-268).
cttgttgcaggctatgctt

SEQ ID NO: 423879 - DNA, 19 bp, Homo sapiens
  siRNA target sequence for C21orf82 (NM_153751.1,280-298).
cccaggccaagacactaaa

SEQ ID NO: 423880 - DNA, 19 bp, Homo sapiens
  siRNA target sequence for C21orf84 (NM_153752.1,97-115).
ctctgagcaagtcaaaaca

SEQ ID NO: 423881 - DNA, 19 bp, Homo sapiens
  siRNA target sequence for C21orf84 (NM_153752.1,272-290).
gcccgatgggaaagaatgt

SEQ ID NO: 423882 - DNA, 19 bp, Homo sapiens
  siRNA target sequence for C21orf85 (NM_153753.1,1565-1583).
ggtagttttatgttaggta

SEQ ID NO: 423883 - DNA, 19 bp, Homo sapiens
  siRNA target sequence for C21orf85 (NM_153753.1,1719-1737).
ctattatggcaacaaatta

SEQ ID NO: 423884 - DNA, 19 bp, Homo sapiens
  siRNA target sequence for C21orf85 (NM_153753.1,1727-1745).
gcaacaaattacattaata

SEQ ID NO: 423885 - DNA, 19 bp, Homo sapiens
  siRNA target sequence for C21orf88 (NM_153754.1,228-246).
ggggaggtcagaaatctca

SEQ ID NO: 423886 - DNA, 19 bp, Homo sapiens
  siRNA target sequence for C21orf88 (NM_153754.1,271-289).
cgtctctcaaggccaaaat

SEQ ID NO: 423887 - DNA, 19 bp, Homo sapiens
  siRNA target sequence for C21orf88 (NM_153754.1,367-385).
gtggggttgtaggaatgaa

SEQ ID NO: 423888 - DNA, 19 bp, Homo sapiens
  siRNA target sequence for C21orf88 (NM_153754.1,369-387).
ggggttgtaggaatgaagt

SEQ ID NO: 423889 - DNA, 19 bp, Homo sapiens
  siRNA target sequence for FRCP2 (NM_153756.1,288-306).
ggaggatacggagtacata

SEQ ID NO: 423890 - DNA, 19 bp, Homo sapiens
  siRNA target sequence for FRCP2 (NM_153756.1,374-392).
cgcgtgaggctgagaagat

SEQ ID NO: 423891 - DNA, 19 bp, Homo sapiens
  siRNA target sequence for FRCP2 (NM_153756.1,455-473).
caggcgaggtgctgatcat

SEQ ID NO: 423892 - DNA, 19 bp, Homo sapiens
  siRNA target sequence for FRCP2 (NM_153756.1,541-559).
gacaatgaacccaataaca

SEQ ID NO: 423893 - DNA, 19 bp, Homo sapiens
  siRNA target sequence for FRCP2 (NM_153756.1,618-636).
gcttctccgcagcaagata

SEQ ID NO: 423894 - DNA, 19 bp, Homo sapiens
  siRNA target sequence for FRCP2 (NM_153756.1,619-637).
cttctccgcagcaagatat

SEQ ID NO: 423895 - DNA, 19 bp, Homo sapiens
  siRNA target sequence for TAF1L (NM_153809.1,167-185).
cagcgaggaagattcatct

SEQ ID NO: 423896 - DNA, 19 bp, Homo sapiens
  siRNA target sequence for TAF1L (NM_153809.1,603-621).
gaccaagatgctattacct

SEQ ID NO: 423897 - DNA, 19 bp, Homo sapiens
  siRNA target sequence for TAF1L (NM_153809.1,869-887).
gttacgcttcctacatctt

SEQ ID NO: 423898 - DNA, 19 bp, Homo sapiens
  siRNA target sequence for TAF1L (NM_153809.1,1460-1478).
gcttccttctattaagact

SEQ ID NO: 423899 - DNA, 19 bp, Homo sapiens
  siRNA target sequence for TAF1L (NM_153809.1,4443-4461).
cgtgaaaatgtgcgtaaat

SEQ ID NO: 423900 - DNA, 19 bp, Homo sapiens
  siRNA target sequence for C10orf46 (NM_153810.2,735-753).
ctaatggggtgatcatgat

SEQ ID NO: 423901 - DNA, 19 bp, Homo sapiens
  siRNA target sequence for C10orf46 (NM_153810.2,847-865).
gttcttaatgaatgttata

SEQ ID NO: 423902 - DNA, 19 bp, Homo sapiens
  siRNA target sequence for C10orf46 (NM_153810.2,850-868).
cttaatgaatgttataact

SEQ ID NO: 423903 - DNA, 19 bp, Homo sapiens
  siRNA target sequence for C10orf46 (NM_153810.2,875-893).
gattataagagcacatact

SEQ ID NO: 423904 - DNA, 19 bp, Homo sapiens
  siRNA target sequence for C10orf46 (NM_153810.2,888-906).
catactggccaaaattgga

SEQ ID NO: 423905 - DNA, 19 bp, Homo sapiens
  siRNA target sequence for C10orf46 (NM_153810.2,904-922).
ggatggtgccatagatcaa

SEQ ID NO: 423906 - DNA, 19 bp, Homo sapiens
  siRNA target sequence for C10orf46 (NM_153810.2,913-931).
catagatcaacttttaact

SEQ ID NO: 423907 - DNA, 19 bp, Homo sapiens
  siRNA target sequence for C10orf46 (NM_153810.2,932-950).
cagagtcctggtgactata

SEQ ID NO: 423908 - DNA, 19 bp, Homo sapiens
  siRNA target sequence for C10orf46 (NM_153810.2,944-962).
gactatatccccatatcct

SEQ ID NO: 423909 - DNA, 19 bp, Homo sapiens
  siRNA target sequence for C10orf46 (NM_153810.2,946-964).
ctatatccccatatcctat

SEQ ID NO: 423910 - DNA, 19 bp, Homo sapiens
  siRNA target sequence for C10orf46 (NM_153810.2,954-972).
ccatatcctatgaacagat

SEQ ID NO: 423911 - DNA, 19 bp, Homo sapiens
  siRNA target sequence for C10orf46 (NM_153810.2,955-973).
catatcctatgaacagata

SEQ ID NO: 423912 - DNA, 19 bp, Homo sapiens
  siRNA target sequence for C10orf46 (NM_153810.2,1006-1024).
gcactcggaacagatgtat

SEQ ID NO: 423913 - DNA, 19 bp, Homo sapiens
  siRNA target sequence for C10orf46 (NM_153810.2,1007-1025).
cactcggaacagatgtata

SEQ ID NO: 423914 - DNA, 19 bp, Homo sapiens
  siRNA target sequence for C10orf46 (NM_153810.2,1009-1027).
ctcggaacagatgtatagt

SEQ ID NO: 423915 - DNA, 19 bp, Homo sapiens
  siRNA target sequence for C10orf46 (NM_153810.2,1011-1029).
cggaacagatgtatagtga

SEQ ID NO: 423916 - DNA, 19 bp, Homo sapiens
  siRNA target sequence for C10orf46 (NM_153810.2,1018-1036).
gatgtatagtgatctgatt

SEQ ID NO: 423917 - DNA, 19 bp, Homo sapiens
  siRNA target sequence for C10orf46 (NM_153810.2,1192-1210).
cgaaaccaagcttaacaga

SEQ ID NO: 423918 - DNA, 19 bp, Homo sapiens
  siRNA target sequence for C10orf46 (NM_153810.2,1223-1241).
gaccttataaagctgttta

SEQ ID NO: 423919 - DNA, 19 bp, Homo sapiens
  siRNA target sequence for C10orf46 (NM_153810.2,1270-1288).
cagcctaatgcctttactt

SEQ ID NO: 423920 - DNA, 19 bp, Homo sapiens
  siRNA target sequence for C10orf46 (NM_153810.2,1296-1314).
cccagtcaacaccatttca

SEQ ID NO: 423921 - DNA, 19 bp, Homo sapiens
  siRNA target sequence for ZFPM1 (NM_153813.1,455-473).
cctcccagcgcagatgtta

SEQ ID NO: 423922 - DNA, 19 bp, Homo sapiens
  siRNA target sequence for ZFPM1 (NM_153813.1,456-474).
ctcccagcgcagatgttaa

SEQ ID NO: 423923 - DNA, 19 bp, Homo sapiens
  siRNA target sequence for ZFPM1 (NM_153813.1,458-476).
cccagcgcagatgttaact

SEQ ID NO: 423924 - DNA, 19 bp, Homo sapiens
  siRNA target sequence for ZFPM1 (NM_153813.1,460-478).
cagcgcagatgttaactca

SEQ ID NO: 423925 - DNA, 19 bp, Homo sapiens
  siRNA target sequence for ZFPM1 (NM_153813.1,1020-1038).
ccgcagtgatcaacaaaga

SEQ ID NO: 423926 - DNA, 19 bp, Homo sapiens
  siRNA target sequence for ZFPM1 (NM_153813.1,1452-1470).
gctccaagggtgagatcta

SEQ ID NO: 423927 - DNA, 19 bp, Homo sapiens
  siRNA target sequence for ZFPM1 (NM_153813.1,2070-2088).
ccttcagcaacgtcaacaa

SEQ ID NO: 423928 - DNA, 19 bp, Homo sapiens
  siRNA target sequence for ZFPM1 (NM_153813.1,2099-2117).
cacaagcgcctctactgtt

SEQ ID NO: 423929 - DNA, 19 bp, Homo sapiens
  siRNA target sequence for ZFPM1 (NM_153813.1,2414-2432).
gtgcacaagcggtactact

SEQ ID NO: 423930 - DNA, 19 bp, Homo sapiens
  siRNA target sequence for ZFPM1 (NM_153813.1,2813-2831).
ctggcgcacaagaagtact

SEQ ID NO: 423931 - DNA, 19 bp, Homo sapiens
  siRNA target sequence for ZFPM1 (NM_153813.1,3243-3261).
gccgtctttgcaacatcaa

SEQ ID NO: 423932 - DNA, 19 bp, Homo sapiens
  siRNA target sequence for ZFPM1 (NM_153813.1,3246-3264).
gtctttgcaacatcaagtt

SEQ ID NO: 423933 - DNA, 19 bp, Homo sapiens
  siRNA target sequence for ZFPM1 (NM_153813.1,3248-3266).
ctttgcaacatcaagttca

SEQ ID NO: 423934 - DNA, 19 bp, Homo sapiens
  siRNA target sequence for ZFPM1 (NM_153813.1,3287-3305).
gcccacaagaagtattact

SEQ ID NO: 423935 - DNA, 19 bp, Homo sapiens
  siRNA target sequence for SNX14 (NM_153816.2,604-622).
ctcagaggttcttgaatta

SEQ ID NO: 423936 - DNA, 19 bp, Homo sapiens
  siRNA target sequence for SNX14 (NM_153816.2,606-624).
cagaggttcttgaattagt

SEQ ID NO: 423937 - DNA, 19 bp, Homo sapiens
  siRNA target sequence for SNX14 (NM_153816.2,689-707).
ctgagaataacattacgtt

SEQ ID NO: 423938 - DNA, 19 bp, Homo sapiens
  siRNA target sequence for SNX14 (NM_153816.2,691-709).
gagaataacattacgtttt

SEQ ID NO: 423939 - DNA, 19 bp, Homo sapiens
  siRNA target sequence for SNX14 (NM_153816.2,693-711).
gaataacattacgtttttt

SEQ ID NO: 423940 - DNA, 19 bp, Homo sapiens
  siRNA target sequence for SNX14 (NM_153816.2,737-755).
cacaaggtggatattccat

SEQ ID NO: 423941 - DNA, 19 bp, Homo sapiens
  siRNA target sequence for GSG1 (NM_153823.1,969-987).
gcggaacaagggatttcaa

SEQ ID NO: 423942 - DNA, 19 bp, Homo sapiens
  siRNA target sequence for CREG2 (NM_153836.1,341-359).
gcatctggcagcaaagctt

SEQ ID NO: 423943 - DNA, 19 bp, Homo sapiens
  siRNA target sequence for CREG2 (NM_153836.1,617-635).
gtgatggccccttcaacaa

SEQ ID NO: 423944 - DNA, 19 bp, Homo sapiens
  siRNA target sequence for CREG2 (NM_153836.1,619-637).
gatggccccttcaacaata

SEQ ID NO: 423945 - DNA, 19 bp, Homo sapiens
  siRNA target sequence for CREG2 (NM_153836.1,677-695).
ccgtggtggctgatctgat

SEQ ID NO: 423946 - DNA, 19 bp, Homo sapiens
  siRNA target sequence for CREG2 (NM_153836.1,775-793).
ccccgatgtgtccagttaa

SEQ ID NO: 423947 - DNA, 19 bp, Homo sapiens
  siRNA target sequence for CREG2 (NM_153836.1,794-812).
cgctcactggccagatgat

SEQ ID NO: 423948 - DNA, 19 bp, Homo sapiens
  siRNA target sequence for CREG2 (NM_153836.1,879-897).
gaagtggcctcgtcaatat

SEQ ID NO: 423949 - DNA, 19 bp, Homo sapiens
  siRNA target sequence for CREG2 (NM_153836.1,882-900).
gtggcctcgtcaatatgaa

SEQ ID NO: 423950 - DNA, 19 bp, Homo sapiens
  siRNA target sequence for CREG2 (NM_153836.1,887-905).
ctcgtcaatatgaatggtt

SEQ ID NO: 423951 - DNA, 19 bp, Homo sapiens
  siRNA target sequence for CREG2 (NM_153836.1,892-910).
caatatgaatggttcttta

SEQ ID NO: 423952 - DNA, 19 bp, Homo sapiens
  siRNA target sequence for CREG2 (NM_153836.1,928-946).
catatctggcttcagaaat

SEQ ID NO: 423953 - DNA, 19 bp, Homo sapiens
  siRNA target sequence for CREG2 (NM_153836.1,952-970).
ggaggcgcatccagtattt

SEQ ID NO: 423954 - DNA, 19 bp, Homo sapiens
  siRNA target sequence for CREG2 (NM_153836.1,955-973).
ggcgcatccagtatttcaa

SEQ ID NO: 423955 - DNA, 19 bp, Homo sapiens
  siRNA target sequence for AF15Q14 (NM_170589.1,1830-1848).
gcatgacagtaattatgct

SEQ ID NO: 423956 - DNA, 19 bp, Homo sapiens
  siRNA target sequence for AF15Q14 (NM_170589.1,1834-1852).
gacagtaattatgctaaaa

SEQ ID NO: 423957 - DNA, 19 bp, Homo sapiens
  siRNA target sequence for CSE-C (NM_170601.1,66-84).
cgacagaagtgcaggtatt

SEQ ID NO: 423958 - DNA, 19 bp, Homo sapiens
  siRNA target sequence for CSE-C (NM_170601.1,69-87).
cagaagtgcaggtattggt

SEQ ID NO: 423959 - DNA, 19 bp, Homo sapiens
  siRNA target sequence for CSE-C (NM_170601.1,71-89).
gaagtgcaggtattggttt

SEQ ID NO: 423960 - DNA, 19 bp, Homo sapiens
  siRNA target sequence for CSE-C (NM_170601.1,86-104).
gttttcgctttgcttcata

SEQ ID NO: 423961 - DNA, 19 bp, Homo sapiens
  siRNA target sequence for CSE-C (NM_170601.1,91-109).
cgctttgcttcatacatca

SEQ ID NO: 423962 - DNA, 19 bp, Homo sapiens
  siRNA target sequence for WDR17 (NM_170710.2,159-177).
ggcttggatgacttacatt

SEQ ID NO: 423963 - DNA, 19 bp, Homo sapiens
  siRNA target sequence for WDR17 (NM_170710.2,170-188).
cttacatttcaaattggtt

SEQ ID NO: 423964 - DNA, 19 bp, Homo sapiens
  siRNA target sequence for WDR17 (NM_170710.2,274-292).
ccatggaacaaggatgtat

SEQ ID NO: 423965 - DNA, 19 bp, Homo sapiens
  siRNA target sequence for WDR17 (NM_170710.2,323-341).
gtgcgaccctggctatcta

SEQ ID NO: 423966 - DNA, 19 bp, Homo sapiens
  siRNA target sequence for WDR17 (NM_170710.2,325-343).
gcgaccctggctatctata

SEQ ID NO: 423967 - DNA, 19 bp, Homo sapiens
  siRNA target sequence for WDR17 (NM_170710.2,334-352).
gctatctatatttatcagt

SEQ ID NO: 423968 - DNA, 19 bp, Homo sapiens
  siRNA target sequence for WDR17 (NM_170710.2,335-353).
ctatctatatttatcagtt

SEQ ID NO: 423969 - DNA, 19 bp, Homo sapiens
  siRNA target sequence for WDR17 (NM_170710.2,349-367).
cagttggatcaccgttata

SEQ ID NO: 423970 - DNA, 19 bp, Homo sapiens
  siRNA target sequence for WDR17 (NM_170710.2,351-369).
gttggatcaccgttataat

SEQ ID NO: 423971 - DNA, 19 bp, Homo sapiens
  siRNA target sequence for WDR17 (NM_170710.2,354-372).
ggatcaccgttataatgaa

SEQ ID NO: 423972 - DNA, 19 bp, Homo sapiens
  siRNA target sequence for WDR17 (NM_170710.2,362-380).
gttataatgaattcaaact

SEQ ID NO: 423973 - DNA, 19 bp, Homo sapiens
  siRNA target sequence for WDR17 (NM_170710.2,384-402).
cgcaattatgtctgaacat

SEQ ID NO: 423974 - DNA, 19 bp, Homo sapiens
  siRNA target sequence for WDR17 (NM_170710.2,454-472).
gcaagtggcagtactgata

SEQ ID NO: 423975 - DNA, 19 bp, Homo sapiens
  siRNA target sequence for WDR17 (NM_170710.2,455-473).
caagtggcagtactgataa

SEQ ID NO: 423976 - DNA, 19 bp, Homo sapiens
  siRNA target sequence for WDR17 (NM_170710.2,467-485).
ctgataatttagtgatcat

SEQ ID NO: 423977 - DNA, 19 bp, Homo sapiens
  siRNA target sequence for WDR17 (NM_170710.2,515-533).
ctaaactcgacagtacaaa

SEQ ID NO: 423978 - DNA, 19 bp, Homo sapiens
  siRNA target sequence for WDR17 (NM_170710.2,601-619).
ggcccactgttcatttgga

SEQ ID NO: 423979 - DNA, 19 bp, Homo sapiens
  siRNA target sequence for WDR17 (NM_170710.2,632-650).
cagatagtggagtgattgt

SEQ ID NO: 423980 - DNA, 19 bp, Homo sapiens
  siRNA target sequence for WDR17 (NM_170710.2,638-656).
gtggagtgattgtacacaa

SEQ ID NO: 423981 - DNA, 19 bp, Homo sapiens
  siRNA target sequence for WDR17 (NM_170710.2,679-697).
gatatctgtatgttcagat

SEQ ID NO: 423982 - DNA, 19 bp, Homo sapiens
  siRNA target sequence for WDR17 (NM_170710.2,739-757).
gatggaagtctatcaattt

SEQ ID NO: 423983 - DNA, 19 bp, Homo sapiens
  siRNA target sequence for WDR17 (NM_170710.2,844-862).
gaatgggacccactatcta

SEQ ID NO: 423984 - DNA, 19 bp, Homo sapiens
  siRNA target sequence for WDR17 (NM_170710.2,849-867).
ggacccactatctactgat

SEQ ID NO: 423985 - DNA, 19 bp, Homo sapiens
  siRNA target sequence for WDR17 (NM_170710.2,860-878).
ctactgattatcttctagt

SEQ ID NO: 423986 - DNA, 19 bp, Homo sapiens
  siRNA target sequence for WDR17 (NM_170710.2,874-892).
ctagtggttaatttgcatt

SEQ ID NO: 423987 - DNA, 19 bp, Homo sapiens
  siRNA target sequence for WDR17 (NM_170710.2,879-897).
ggttaatttgcattatgga

SEQ ID NO: 423988 - DNA, 19 bp, Homo sapiens
  siRNA target sequence for WDR17 (NM_170710.2,880-898).
gttaatttgcattatggaa

SEQ ID NO: 423989 - DNA, 19 bp, Homo sapiens
  siRNA target sequence for WDR17 (NM_170710.2,895-913).
ggaattcgcctggtagatt

SEQ ID NO: 423990 - DNA, 19 bp, Homo sapiens
  siRNA target sequence for WDR17 (NM_170710.2,1039-1057).
cgcatttggaatgtttcaa

SEQ ID NO: 423991 - DNA, 19 bp, Homo sapiens
  siRNA target sequence for WDR17 (NM_170710.2,1058-1076).
gaacaacacctattgataa

SEQ ID NO: 423992 - DNA, 19 bp, Homo sapiens
  siRNA target sequence for WDR17 (NM_170710.2,1061-1079).
caacacctattgataatct

SEQ ID NO: 423993 - DNA, 19 bp, Homo sapiens
  siRNA target sequence for WDR17 (NM_170710.2,1064-1082).
cacctattgataatcttaa

SEQ ID NO: 423994 - DNA, 19 bp, Homo sapiens
  siRNA target sequence for WDR17 (NM_170710.2,1102-1120).
cactgcttacatgtactta

SEQ ID NO: 423995 - DNA, 19 bp, Homo sapiens
  siRNA target sequence for WDR17 (NM_170710.2,1104-1122).
ctgcttacatgtacttaat

SEQ ID NO: 423996 - DNA, 19 bp, Homo sapiens
  siRNA target sequence for WDR17 (NM_170710.2,1168-1186).
cattatacatcctcaacaa

SEQ ID NO: 423997 - DNA, 19 bp, Homo sapiens
  siRNA target sequence for WDR17 (NM_170710.2,1203-1221).
cccaactttaacacagaat

SEQ ID NO: 423998 - DNA, 19 bp, Homo sapiens
  siRNA target sequence for WDR17 (NM_170710.2,1244-1262).
gtcatgcagtgtgttgttt

SEQ ID NO: 423999 - DNA, 19 bp, Homo sapiens
  siRNA target sequence for WDR17 (NM_170710.2,1288-1306).
gatatgggagctaagaagt

SEQ ID NO: 424000 - DNA, 19 bp, Homo sapiens
  siRNA target sequence for WDR17 (NM_170710.2,1302-1320).
gaagtgggattttcttaga

SEQ ID NO: 424001 - DNA, 19 bp, Homo sapiens
  siRNA target sequence for WDR17 (NM_170710.2,1340-1358).
ctatctttgactgcaaatt

SEQ ID NO: 424002 - DNA, 19 bp, Homo sapiens
  siRNA target sequence for WDR17 (NM_170710.2,1363-1381).
cctgacgatcctaatcttt

SEQ ID NO: 424003 - DNA, 19 bp, Homo sapiens
  siRNA target sequence for WDR17 (NM_170710.2,1368-1386).
cgatcctaatcttttagca

SEQ ID NO: 424004 - DNA, 19 bp, Homo sapiens
  siRNA target sequence for WDR17 (NM_170710.2,1369-1387).
gatcctaatcttttagcaa

SEQ ID NO: 424005 - DNA, 19 bp, Homo sapiens
  siRNA target sequence for WDR17 (NM_170710.2,1489-1507).
gctccaggtggtttaaatt

SEQ ID NO: 424006 - DNA, 19 bp, Homo sapiens
  siRNA target sequence for WDR17 (NM_170710.2,1493-1511).
caggtggtttaaattgtat

SEQ ID NO: 424007 - DNA, 19 bp, Homo sapiens
  siRNA target sequence for WDR17 (NM_170710.2,1526-1544).
cccgaaatggtgcttttat

SEQ ID NO: 424008 - DNA, 19 bp, Homo sapiens
  siRNA target sequence for WDR17 (NM_170710.2,1527-1545).
ccgaaatggtgcttttatt

SEQ ID NO: 424009 - DNA, 19 bp, Homo sapiens
  siRNA target sequence for WDR17 (NM_170710.2,1562-1580).
gcaaaattatacaacgatt

SEQ ID NO: 424010 - DNA, 19 bp, Homo sapiens
  siRNA target sequence for WDR17 (NM_170710.2,1563-1581).
caaaattatacaacgattt

SEQ ID NO: 424011 - DNA, 19 bp, Homo sapiens
  siRNA target sequence for WDR17 (NM_170710.2,1615-1633).
gcctggagtcataaagatt

SEQ ID NO: 424012 - DNA, 19 bp, Homo sapiens
  siRNA target sequence for WDR17 (NM_170710.2,1668-1686).
ctgtattattcgaacaatt

SEQ ID NO: 424013 - DNA, 19 bp, Homo sapiens
  siRNA target sequence for WDR17 (NM_170710.2,1670-1688).
gtattattcgaacaattga

SEQ ID NO: 424014 - DNA, 19 bp, Homo sapiens
  siRNA target sequence for WDR17 (NM_170710.2,1679-1697).
gaacaattgatggtaaagt

SEQ ID NO: 424015 - DNA, 19 bp, Homo sapiens
  siRNA target sequence for WDR17 (NM_170710.2,1723-1741).
gcagtgtttggttgtgatt

SEQ ID NO: 424016 - DNA, 19 bp, Homo sapiens
  siRNA target sequence for WDR17 (NM_170710.2,1745-1763).
gccaaaacaataaagacat

SEQ ID NO: 424017 - DNA, 19 bp, Homo sapiens
  siRNA target sequence for WDR17 (NM_170710.2,1785-1803).
cacaaatgttcgtgtttat

SEQ ID NO: 424018 - DNA, 19 bp, Homo sapiens
  siRNA target sequence for WDR17 (NM_170710.2,1787-1805).
caaatgttcgtgtttatta

SEQ ID NO: 424019 - DNA, 19 bp, Homo sapiens
  siRNA target sequence for WDR17 (NM_170710.2,1818-1836).
ctcagatcaaccattgaaa

SEQ ID NO: 424020 - DNA, 19 bp, Homo sapiens
  siRNA target sequence for WDR17 (NM_170710.2,1820-1838).
cagatcaaccattgaaagt

SEQ ID NO: 424021 - DNA, 19 bp, Homo sapiens
  siRNA target sequence for WDR17 (NM_170710.2,1846-1864).
gggcatacagcaaaagtgt

SEQ ID NO: 424022 - DNA, 19 bp, Homo sapiens
  siRNA target sequence for WDR17 (NM_170710.2,1848-1866).
gcatacagcaaaagtgttt

SEQ ID NO: 424023 - DNA, 19 bp, Homo sapiens
  siRNA target sequence for WDR17 (NM_170710.2,1861-1879).
gtgtttcatgttaaatggt

SEQ ID NO: 424024 - DNA, 19 bp, Homo sapiens
  siRNA target sequence for WDR17 (NM_170710.2,1926-1944).
cgttcgaatctgggattat

SEQ ID NO: 424025 - DNA, 19 bp, Homo sapiens
  siRNA target sequence for WDR17 (NM_170710.2,1927-1945).
gttcgaatctgggattata

SEQ ID NO: 424026 - DNA, 19 bp, Homo sapiens
  siRNA target sequence for WDR17 (NM_170710.2,1955-1973).
cttgcatcaatattcttaa

SEQ ID NO: 424027 - DNA, 19 bp, Homo sapiens
  siRNA target sequence for WDR17 (NM_170710.2,2039-2057).
gcagctgggactatactat

SEQ ID NO: 424028 - DNA, 19 bp, Homo sapiens
  siRNA target sequence for WDR17 (NM_170710.2,2040-2058).
cagctgggactatactata

SEQ ID NO: 424029 - DNA, 19 bp, Homo sapiens
  siRNA target sequence for WDR17 (NM_170710.2,2042-2060).
gctgggactatactataaa

SEQ ID NO: 424030 - DNA, 19 bp, Homo sapiens
  siRNA target sequence for WDR17 (NM_170710.2,2043-2061).
ctgggactatactataaaa

SEQ ID NO: 424031 - DNA, 19 bp, Homo sapiens
  siRNA target sequence for WDR17 (NM_170710.2,2045-2063).
gggactatactataaaagt

SEQ ID NO: 424032 - DNA, 19 bp, Homo sapiens
  siRNA target sequence for WDR17 (NM_170710.2,2046-2064).
ggactatactataaaagta

SEQ ID NO: 424033 - DNA, 19 bp, Homo sapiens
  siRNA target sequence for WDR17 (NM_170710.2,2047-2065).
gactatactataaaagtat

SEQ ID NO: 424034 - DNA, 19 bp, Homo sapiens
  siRNA target sequence for WDR17 (NM_170710.2,2081-2099).
gaacttgtgtggatactgt

SEQ ID NO: 424035 - DNA, 19 bp, Homo sapiens
  siRNA target sequence for WDR17 (NM_170710.2,2109-2127).
cggtgcagatgtatatggt

SEQ ID NO: 424036 - DNA, 19 bp, Homo sapiens
  siRNA target sequence for WDR17 (NM_170710.2,2140-2158).
cccagtcgccccttcacta

SEQ ID NO: 424037 - DNA, 19 bp, Homo sapiens
  siRNA target sequence for WDR17 (NM_170710.2,2141-2159).
ccagtcgccccttcactat

SEQ ID NO: 424038 - DNA, 19 bp, Homo sapiens
  siRNA target sequence for WDR17 (NM_170710.2,2185-2203).
gtgagactctggtcattaa

SEQ ID NO: 424039 - DNA, 19 bp, Homo sapiens
  siRNA target sequence for WDR17 (NM_170710.2,2208-2226).
cttagtcactcctgtacaa

SEQ ID NO: 424040 - DNA, 19 bp, Homo sapiens
  siRNA target sequence for WDR17 (NM_170710.2,2212-2230).
gtcactcctgtacaaataa

SEQ ID NO: 424041 - DNA, 19 bp, Homo sapiens
  siRNA target sequence for WDR17 (NM_170710.2,2214-2232).
cactcctgtacaaataaat

SEQ ID NO: 424042 - DNA, 19 bp, Homo sapiens
  siRNA target sequence for WDR17 (NM_170710.2,2267-2285).
ggaacactgattatgctat

SEQ ID NO: 424043 - DNA, 19 bp, Homo sapiens
  siRNA target sequence for WDR17 (NM_170710.2,2303-2321).
ctctactgtgtggtaaagt

SEQ ID NO: 424044 - DNA, 19 bp, Homo sapiens
  siRNA target sequence for WDR17 (NM_170710.2,2305-2323).
ctactgtgtggtaaagtgt

SEQ ID NO: 424045 - DNA, 19 bp, Homo sapiens
  siRNA target sequence for WDR17 (NM_170710.2,2314-2332).
ggtaaagtgtcaagagata

SEQ ID NO: 424046 - DNA, 19 bp, Homo sapiens
  siRNA target sequence for WDR17 (NM_170710.2,2347-2365).
gaaaaactaactgctaatt

SEQ ID NO: 424047 - DNA, 19 bp, Homo sapiens
  siRNA target sequence for WDR17 (NM_170710.2,2357-2375).
ctgctaattctcaagtgaa

SEQ ID NO: 424048 - DNA, 19 bp, Homo sapiens
  siRNA target sequence for WDR17 (NM_170710.2,2359-2377).
gctaattctcaagtgaaaa

SEQ ID NO: 424049 - DNA, 19 bp, Homo sapiens
  siRNA target sequence for WDR17 (NM_170710.2,2380-2398).
ctaagatggttctcagaat

SEQ ID NO: 424050 - DNA, 19 bp, Homo sapiens
  siRNA target sequence for WDR17 (NM_170710.2,2413-2431).
ggtggcagtgacaatttat

SEQ ID NO: 424051 - DNA, 19 bp, Homo sapiens
  siRNA target sequence for WDR17 (NM_170710.2,2416-2434).
ggcagtgacaatttatgga

SEQ ID NO: 424052 - DNA, 19 bp, Homo sapiens
  siRNA target sequence for WDR17 (NM_170710.2,2512-2530).
catctgattaaatttagaa

SEQ ID NO: 424053 - DNA, 19 bp, Homo sapiens
  siRNA target sequence for WDR17 (NM_170710.2,2552-2570).
caacagtcaagatgtctaa

SEQ ID NO: 424054 - DNA, 19 bp, Homo sapiens
  siRNA target sequence for WDR17 (NM_170710.2,2623-2641).
gctgaaatccacttgagat

SEQ ID NO: 424055 - DNA, 19 bp, Homo sapiens
  siRNA target sequence for WDR17 (NM_170710.2,2634-2652).
cttgagattaggacaaatt

SEQ ID NO: 424056 - DNA, 19 bp, Homo sapiens
  siRNA target sequence for WDR17 (NM_170710.2,2657-2675).
gatactgtgaacttatggt

SEQ ID NO: 424057 - DNA, 19 bp, Homo sapiens
  siRNA target sequence for WDR17 (NM_170710.2,2756-2774).
gagctgaccaattaatcca

SEQ ID NO: 424058 - DNA, 19 bp, Homo sapiens
  siRNA target sequence for WDR17 (NM_170710.2,2847-2865).
gtcaagaggtcagcttaaa

SEQ ID NO: 424059 - DNA, 19 bp, Homo sapiens
  siRNA target sequence for WDR17 (NM_170710.2,2886-2904).
ggctgcttgtgaaggaaat

SEQ ID NO: 424060 - DNA, 19 bp, Homo sapiens
  siRNA target sequence for WDR17 (NM_170710.2,2887-2905).
gctgcttgtgaaggaaata

SEQ ID NO: 424061 - DNA, 19 bp, Homo sapiens
  siRNA target sequence for WDR17 (NM_170710.2,2929-2947).
cctaaaggagcttcatatt

SEQ ID NO: 424062 - DNA, 19 bp, Homo sapiens
  siRNA target sequence for WDR17 (NM_170710.2,2939-2957).
cttcatattctgatgatat

SEQ ID NO: 424063 - DNA, 19 bp, Homo sapiens
  siRNA target sequence for WDR17 (NM_170710.2,3053-3071).
gccatcttgccatagataa

SEQ ID NO: 424064 - DNA, 19 bp, Homo sapiens
  siRNA target sequence for WDR17 (NM_170710.2,3054-3072).
ccatcttgccatagataat

SEQ ID NO: 424065 - DNA, 19 bp, Homo sapiens
  siRNA target sequence for WDR17 (NM_170710.2,3126-3144).
ctgtgtgggcacagtacta

SEQ ID NO: 424066 - DNA, 19 bp, Homo sapiens
  siRNA target sequence for WDR17 (NM_170710.2,3167-3185).
cccactatgccttagaatt

SEQ ID NO: 424067 - DNA, 19 bp, Homo sapiens
  siRNA target sequence for WDR17 (NM_170710.2,3168-3186).
ccactatgccttagaatta

SEQ ID NO: 424068 - DNA, 19 bp, Homo sapiens
  siRNA target sequence for WDR17 (NM_170710.2,3190-3208).
gcgagaaagtgcatgatga

SEQ ID NO: 424069 - DNA, 19 bp, Homo sapiens
  siRNA target sequence for WDR17 (NM_170710.2,3191-3209).
cgagaaagtgcatgatgat

SEQ ID NO: 424070 - DNA, 19 bp, Homo sapiens
  siRNA target sequence for WDR17 (NM_170710.2,3192-3210).
gagaaagtgcatgatgatt

SEQ ID NO: 424071 - DNA, 19 bp, Homo sapiens
  siRNA target sequence for WDR17 (NM_170710.2,3198-3216).
gtgcatgatgatttcagta

SEQ ID NO: 424072 - DNA, 19 bp, Homo sapiens
  siRNA target sequence for WDR17 (NM_170710.2,3204-3222).
gatgatttcagtatgcttt

SEQ ID NO: 424073 - DNA, 19 bp, Homo sapiens
  siRNA target sequence for WDR17 (NM_170710.2,3241-3259).
gtccccttttgttacgtta

SEQ ID NO: 424074 - DNA, 19 bp, Homo sapiens
  siRNA target sequence for WDR17 (NM_170710.2,3264-3282).
gaatttggcagctgatctt

SEQ ID NO: 424075 - DNA, 19 bp, Homo sapiens
  siRNA target sequence for WDR17 (NM_170710.2,3295-3313).
cctgataatgaactacatt

SEQ ID NO: 424076 - DNA, 19 bp, Homo sapiens
  siRNA target sequence for WDR17 (NM_170710.2,3296-3314).
ctgataatgaactacattt

SEQ ID NO: 424077 - DNA, 19 bp, Homo sapiens
  siRNA target sequence for WDR17 (NM_170710.2,3307-3325).
ctacatttaataaaactct

SEQ ID NO: 424078 - DNA, 19 bp, Homo sapiens
  siRNA target sequence for WDR17 (NM_170710.2,3333-3351).
ctacccaggatgtactgaa

SEQ ID NO: 424079 - DNA, 19 bp, Homo sapiens
  siRNA target sequence for WDR17 (NM_170710.2,3338-3356).
caggatgtactgaagagat

SEQ ID NO: 424080 - DNA, 19 bp, Homo sapiens
  siRNA target sequence for WDR17 (NM_170710.2,3341-3359).
gatgtactgaagagataaa

SEQ ID NO: 424081 - DNA, 19 bp, Homo sapiens
  siRNA target sequence for WDR17 (NM_170710.2,3421-3439).
gcccgtgcagatgacaata

SEQ ID NO: 424082 - DNA, 19 bp, Homo sapiens
  siRNA target sequence for WDR17 (NM_170710.2,3422-3440).
cccgtgcagatgacaatat

SEQ ID NO: 424083 - DNA, 19 bp, Homo sapiens
  siRNA target sequence for WDR17 (NM_170710.2,3490-3508).
cttcctattggtattagct

SEQ ID NO: 424084 - DNA, 19 bp, Homo sapiens
  siRNA target sequence for WDR17 (NM_170710.2,3506-3524).
gctttgttaaagaatacat

SEQ ID NO: 424085 - DNA, 19 bp, Homo sapiens
  siRNA target sequence for WDR17 (NM_170710.2,3531-3549).
ctcagactggactttggat

SEQ ID NO: 424086 - DNA, 19 bp, Homo sapiens
  siRNA target sequence for WDR17 (NM_170710.2,3565-3583).
cttgacctactgagctata

SEQ ID NO: 424087 - DNA, 19 bp, Homo sapiens
  siRNA target sequence for WDR17 (NM_170710.2,3571-3589).
ctactgagctatattcgta

SEQ ID NO: 424088 - DNA, 19 bp, Homo sapiens
  siRNA target sequence for WDR17 (NM_170710.2,3576-3594).
gagctatattcgtactgaa

SEQ ID NO: 424089 - DNA, 19 bp, Homo sapiens
  siRNA target sequence for WDR17 (NM_170710.2,3578-3596).
gctatattcgtactgaaaa

SEQ ID NO: 424090 - DNA, 19 bp, Homo sapiens
  siRNA target sequence for WDR17 (NM_170710.2,3586-3604).
cgtactgaaaaattactct

SEQ ID NO: 424091 - DNA, 19 bp, Homo sapiens
  siRNA target sequence for WDR17 (NM_170710.2,3612-3630).
gtgtactgaagctcgaaat

SEQ ID NO: 424092 - DNA, 19 bp, Homo sapiens
  siRNA target sequence for WDR17 (NM_170710.2,3614-3632).
gtactgaagctcgaaatga

SEQ ID NO: 424093 - DNA, 19 bp, Homo sapiens
  siRNA target sequence for WDR17 (NM_170710.2,3617-3635).
ctgaagctcgaaatgagtt

SEQ ID NO: 424094 - DNA, 19 bp, Homo sapiens
  siRNA target sequence for WDR17 (NM_170710.2,3625-3643).
cgaaatgagttgctgatat

SEQ ID NO: 424095 - DNA, 19 bp, Homo sapiens
  siRNA target sequence for WDR17 (NM_170710.2,3692-3710).
gcattgttccagcacttta

SEQ ID NO: 424096 - DNA, 19 bp, Homo sapiens
  siRNA target sequence for WDR17 (NM_170710.2,3693-3711).
cattgttccagcactttat

SEQ ID NO: 424097 - DNA, 19 bp, Homo sapiens
  siRNA target sequence for WDR17 (NM_170710.2,3741-3759).
ggaggtgtcagtaccttta

SEQ ID NO: 424098 - DNA, 19 bp, Homo sapiens
  siRNA target sequence for WDR17 (NM_170710.2,3744-3762).
ggtgtcagtacctttaaaa

SEQ ID NO: 424099 - DNA, 19 bp, Homo sapiens
  siRNA target sequence for WDR17 (NM_170710.2,3745-3763).
gtgtcagtacctttaaaaa

SEQ ID NO: 424100 - DNA, 19 bp, Homo sapiens
  siRNA target sequence for WDR17 (NM_170710.2,3810-3828).
gtccaccaacagatcatta

SEQ ID NO: 424101 - DNA, 19 bp, Homo sapiens
  siRNA target sequence for WDR17 (NM_170710.2,3812-3830).
ccaccaacagatcattaga

SEQ ID NO: 424102 - DNA, 19 bp, Homo sapiens
  siRNA target sequence for WDR17 (NM_170710.2,3815-3833).
ccaacagatcattagaaga

SEQ ID NO: 424103 - DNA, 19 bp, Homo sapiens
  siRNA target sequence for WDR17 (NM_170710.2,3840-3858).
gtatacacccccttctgat

SEQ ID NO: 424104 - DNA, 19 bp, Homo sapiens
  siRNA target sequence for WDR17 (NM_170710.2,3845-3863).
cacccccttctgattcaca

SEQ ID NO: 424105 - DNA, 19 bp, Homo sapiens
  siRNA target sequence for WDR17 (NM_170710.2,3904-3922).
gagtcactgaaaggaatta

SEQ ID NO: 424106 - DNA, 19 bp, Homo sapiens
  siRNA target sequence for WDR17 (NM_170710.2,3917-3935).
gaattattggaccagatta

SEQ ID NO: 424107 - DNA, 19 bp, Homo sapiens
  siRNA target sequence for WDR17 (NM_170710.2,3956-3974).
caagtcattctgatattca

SEQ ID NO: 424108 - DNA, 19 bp, Homo sapiens
  siRNA target sequence for WDR17 (NM_170710.2,3980-3998).
cttgtcttacgggattaaa

SEQ ID NO: 424109 - DNA, 19 bp, Homo sapiens
  siRNA target sequence for WDR17 (NM_170710.2,3983-4001).
gtcttacgggattaaaaat

SEQ ID NO: 424110 - DNA, 19 bp, Homo sapiens
  siRNA target sequence for WDR17 (NM_170710.2,4077-4095).
gaatccattctcaccttta

SEQ ID NO: 424111 - DNA, 19 bp, Homo sapiens
  siRNA target sequence for WDR17 (NM_170710.2,4098-4116).
gactggaatacgactcaat

SEQ ID NO: 424112 - DNA, 19 bp, Homo sapiens
  siRNA target sequence for WDR17 (NM_170710.2,4102-4120).
ggaatacgactcaatccat

SEQ ID NO: 424113 - DNA, 19 bp, Homo sapiens
  siRNA target sequence for NOD9 (NM_170722.1,2907-2925).
ccgaggatgccctcacatt

SEQ ID NO: 424114 - DNA, 19 bp, Homo sapiens
  siRNA target sequence for PGBD2 (NM_170725.1,178-196).
ggagaggtatccactcaaa

SEQ ID NO: 424115 - DNA, 19 bp, Homo sapiens
  siRNA target sequence for PGBD2 (NM_170725.1,397-415).
ctggcaccggggaggataa

SEQ ID NO: 424116 - DNA, 19 bp, Homo sapiens
  siRNA target sequence for PGBD2 (NM_170725.1,473-491).
gcgcatttggaccaaaaga

SEQ ID NO: 424117 - DNA, 19 bp, Homo sapiens
  siRNA target sequence for PGBD2 (NM_170725.1,476-494).
catttggaccaaaagagat

SEQ ID NO: 424118 - DNA, 19 bp, Homo sapiens
  siRNA target sequence for PGBD2 (NM_170725.1,482-500).
gaccaaaagagatattcgt

SEQ ID NO: 424119 - DNA, 19 bp, Homo sapiens
  siRNA target sequence for PGBD2 (NM_170725.1,512-530).
cagttggactgcatcagat

SEQ ID NO: 424120 - DNA, 19 bp, Homo sapiens
  siRNA target sequence for PGBD2 (NM_170725.1,520-538).
ctgcatcagatcctcatat

SEQ ID NO: 424121 - DNA, 19 bp, Homo sapiens
  siRNA target sequence for PGBD2 (NM_170725.1,523-541).
catcagatcctcatattga

SEQ ID NO: 424122 - DNA, 19 bp, Homo sapiens
  siRNA target sequence for PGBD2 (NM_170725.1,565-583).
gtcccgtgggcctttttga

SEQ ID NO: 424123 - DNA, 19 bp, Homo sapiens
  siRNA target sequence for PGBD2 (NM_170725.1,567-585).
cccgtgggcctttttgagt

SEQ ID NO: 424124 - DNA, 19 bp, Homo sapiens
  siRNA target sequence for PGBD2 (NM_170725.1,568-586).
ccgtgggcctttttgagtt

SEQ ID NO: 424125 - DNA, 19 bp, Homo sapiens
  siRNA target sequence for PGBD2 (NM_170725.1,664-682).
gtcttacggctcaggaatt

SEQ ID NO: 424126 - DNA, 19 bp, Homo sapiens
  siRNA target sequence for PGBD2 (NM_170725.1,666-684).
cttacggctcaggaattga

SEQ ID NO: 424127 - DNA, 19 bp, Homo sapiens
  siRNA target sequence for PGBD2 (NM_170725.1,714-732).
gggtacatctcttatccaa

SEQ ID NO: 424128 - DNA, 19 bp, Homo sapiens
  siRNA target sequence for PGBD2 (NM_170725.1,755-773).
ctctcccgattcacatcat

SEQ ID NO: 424129 - DNA, 19 bp, Homo sapiens
  siRNA target sequence for PGBD2 (NM_170725.1,757-775).
ctcccgattcacatcatca

SEQ ID NO: 424130 - DNA, 19 bp, Homo sapiens
  siRNA target sequence for PGBD2 (NM_170725.1,760-778).
ccgattcacatcatcatct

SEQ ID NO: 424131 - DNA, 19 bp, Homo sapiens
  siRNA target sequence for PGBD2 (NM_170725.1,761-779).
cgattcacatcatcatctt

SEQ ID NO: 424132 - DNA, 19 bp, Homo sapiens
  siRNA target sequence for PGBD2 (NM_170725.1,801-819).
gacagatttgaactaatct

SEQ ID NO: 424133 - DNA, 19 bp, Homo sapiens
  siRNA target sequence for PGBD2 (NM_170725.1,810-828).
gaactaatcttctcatact

SEQ ID NO: 424134 - DNA, 19 bp, Homo sapiens
  siRNA target sequence for PGBD2 (NM_170725.1,848-866).
cgaacttgatgcaagtgat

SEQ ID NO: 424135 - DNA, 19 bp, Homo sapiens
  siRNA target sequence for PGBD2 (NM_170725.1,849-867).
gaacttgatgcaagtgata

SEQ ID NO: 424136 - DNA, 19 bp, Homo sapiens
  siRNA target sequence for PGBD2 (NM_170725.1,888-906).
ctcatcatccggatgaact

SEQ ID NO: 424137 - DNA, 19 bp, Homo sapiens
  siRNA target sequence for PGBD2 (NM_170725.1,927-945).
cccttggaagagttctaca

SEQ ID NO: 424138 - DNA, 19 bp, Homo sapiens
  siRNA target sequence for PGBD2 (NM_170725.1,947-965).
ctttggcgagtctatgtgt

SEQ ID NO: 424139 - DNA, 19 bp, Homo sapiens
  siRNA target sequence for PGBD2 (NM_170725.1,956-974).
gtctatgtgtgagtacttt

SEQ ID NO: 424140 - DNA, 19 bp, Homo sapiens
  siRNA target sequence for PGBD2 (NM_170725.1,1016-1034).
gcgacttggctacaagatt

SEQ ID NO: 424141 - DNA, 19 bp, Homo sapiens
  siRNA target sequence for PGBD2 (NM_170725.1,1017-1035).
cgacttggctacaagattt

SEQ ID NO: 424142 - DNA, 19 bp, Homo sapiens
  siRNA target sequence for PGBD2 (NM_170725.1,1083-1101).
cagggcacactgtttacca

SEQ ID NO: 424143 - DNA, 19 bp, Homo sapiens
  siRNA target sequence for PGBD2 (NM_170725.1,1122-1140).
ctaggaggcagtatggtaa

SEQ ID NO: 424144 - DNA, 19 bp, Homo sapiens
  siRNA target sequence for PGBD2 (NM_170725.1,1157-1175).
gcttcaggagcgtggtttt

SEQ ID NO: 424145 - DNA, 19 bp, Homo sapiens
  siRNA target sequence for PGBD2 (NM_170725.1,1178-1196).
gccatatcacatatttttt

SEQ ID NO: 424146 - DNA, 19 bp, Homo sapiens
  siRNA target sequence for PGBD2 (NM_170725.1,1455-1473).
cactctggagcagctaaaa

SEQ ID NO: 424147 - DNA, 19 bp, Homo sapiens
  siRNA target sequence for PGBD2 (NM_170725.1,1536-1554).
ggtaggatggatcagaata

SEQ ID NO: 424148 - DNA, 19 bp, Homo sapiens
  siRNA target sequence for PGBD2 (NM_170725.1,1586-1604).
gaagtggtactcaagcttt

SEQ ID NO: 424149 - DNA, 19 bp, Homo sapiens
  siRNA target sequence for PGBD2 (NM_170725.1,1686-1704).
cttgccttccggagataca

SEQ ID NO: 424150 - DNA, 19 bp, Homo sapiens
  siRNA target sequence for PGBD2 (NM_170725.1,1727-1745).
caatgctgacacaacatct

SEQ ID NO: 424151 - DNA, 19 bp, Homo sapiens
  siRNA target sequence for PGBD2 (NM_170725.1,1774-1792).
ctgagagccgcttcgatat

SEQ ID NO: 424152 - DNA, 19 bp, Homo sapiens
  siRNA target sequence for PGBD2 (NM_170725.1,1776-1794).
gagagccgcttcgatatga

SEQ ID NO: 424153 - DNA, 19 bp, Homo sapiens
  siRNA target sequence for PGBD2 (NM_170725.1,1778-1796).
gagccgcttcgatatgatt

SEQ ID NO: 424154 - DNA, 19 bp, Homo sapiens
  siRNA target sequence for SELH (NM_170746.1,336-354).
gaggaggcgaccgttgtta

SEQ ID NO: 424155 - DNA, 19 bp, Homo sapiens
  siRNA target sequence for SELH (NM_170746.1,544-562).
ccccacgcaaactcaaatt

SEQ ID NO: 424156 - DNA, 19 bp, Homo sapiens
  siRNA target sequence for RNF39 (NM_170770.1,553-571).
gaattccccactcatttct

SEQ ID NO: 424157 - DNA, 19 bp, Homo sapiens
  siRNA target sequence for RNF39 (NM_170770.1,587-605).
cgcccattgcaggagtatt

SEQ ID NO: 424158 - DNA, 19 bp, Homo sapiens
  siRNA target sequence for RNF39 (NM_170770.1,589-607).
cccattgcaggagtattaa

SEQ ID NO: 424159 - DNA, 19 bp, Homo sapiens
  siRNA target sequence for RNF39 (NM_170770.1,591-609).
cattgcaggagtattaata

SEQ ID NO: 424160 - DNA, 19 bp, Homo sapiens
  siRNA target sequence for RNF39 (NM_170770.1,673-691).
gctcaaaaccaaatccatt

SEQ ID NO: 424161 - DNA, 19 bp, Homo sapiens
  siRNA target sequence for RNF39 (NM_170770.1,695-713).
gccttctggctctcagaat

SEQ ID NO: 424162 - DNA, 19 bp, Homo sapiens
  siRNA target sequence for RNF39 (NM_170770.1,745-763).
ctgacttctcccattcaaa

SEQ ID NO: 424163 - DNA, 19 bp, Homo sapiens
  siRNA target sequence for RNF39 (NM_170770.1,788-806).
caggccctccccatcagta

SEQ ID NO: 424164 - DNA, 19 bp, Homo sapiens
  siRNA target sequence for RNF39 (NM_170770.1,793-811).
cctccccatcagtattggt

SEQ ID NO: 424165 - DNA, 19 bp, Homo sapiens
  siRNA target sequence for RNF39 (NM_170770.1,794-812).
ctccccatcagtattggta

SEQ ID NO: 424166 - DNA, 19 bp, Homo sapiens
  siRNA target sequence for RNF39 (NM_170770.1,798-816).
ccatcagtattggtaaagt

SEQ ID NO: 424167 - DNA, 19 bp, Homo sapiens
  siRNA target sequence for HE9 (NM_172000.1,234-252).
gtgactggctccctcttaa

SEQ ID NO: 424168 - DNA, 19 bp, Homo sapiens
  siRNA target sequence for HE9 (NM_172000.1,236-254).
gactggctccctcttaaca

SEQ ID NO: 424169 - DNA, 19 bp, Homo sapiens
  siRNA target sequence for HE9 (NM_172000.1,375-393).
ggctgtgtggacttcatga

SEQ ID NO: 424170 - DNA, 19 bp, Homo sapiens
  siRNA target sequence for HE9 (NM_172000.1,470-488).
gctgatggtgtcacatgtt

SEQ ID NO: 424171 - DNA, 19 bp, Homo sapiens
  siRNA target sequence for HE9 (NM_172000.1,471-489).
ctgatggtgtcacatgtta

SEQ ID NO: 424172 - DNA, 19 bp, Homo sapiens
  siRNA target sequence for HE9 (NM_172000.1,476-494).
ggtgtcacatgttaaagat

SEQ ID NO: 424173 - DNA, 19 bp, Homo sapiens
  siRNA target sequence for HE9 (NM_172000.1,477-495).
gtgtcacatgttaaagatt

SEQ ID NO: 424174 - DNA, 19 bp, Homo sapiens
  siRNA target sequence for HE9 (NM_172000.1,503-521).
ggtggagctgcacgtttat

SEQ ID NO: 424175 - DNA, 19 bp, Homo sapiens
  siRNA target sequence for HE9 (NM_172000.1,504-522).
gtggagctgcacgtttatt

SEQ ID NO: 424176 - DNA, 19 bp, Homo sapiens
  siRNA target sequence for HE9 (NM_172000.1,603-621).
ctgatggagacctttctga

SEQ ID NO: 424177 - DNA, 19 bp, Homo sapiens
  siRNA target sequence for HE9 (NM_172000.1,644-662).
gatgcaggcaggctttatt

SEQ ID NO: 424178 - DNA, 19 bp, Homo sapiens
  siRNA target sequence for HE9 (NM_172000.1,704-722).
catcagtgacatcatgttt

SEQ ID NO: 424179 - DNA, 19 bp, Homo sapiens
  siRNA target sequence for HE9 (NM_172000.1,739-757).
gctggcatgtgatgatcaa

SEQ ID NO: 424180 - DNA, 19 bp, Homo sapiens
  siRNA target sequence for HE9 (NM_172000.1,763-781).
cattcctgttgggaatcta

SEQ ID NO: 424181 - DNA, 19 bp, Homo sapiens
  siRNA target sequence for HE9 (NM_172000.1,783-801).
ggcttctcttccttttggt

SEQ ID NO: 424182 - DNA, 19 bp, Homo sapiens
  siRNA target sequence for HE9 (NM_172000.1,784-802).
gcttctcttccttttggta

SEQ ID NO: 424183 - DNA, 19 bp, Homo sapiens
  siRNA target sequence for HE9 (NM_172000.1,793-811).
ccttttggtatcattgttt

SEQ ID NO: 424184 - DNA, 19 bp, Homo sapiens
  siRNA target sequence for HE9 (NM_172000.1,836-854).
gcccaaagaagctccatat

SEQ ID NO: 424185 - DNA, 19 bp, Homo sapiens
  siRNA target sequence for HE9 (NM_172000.1,838-856).
ccaaagaagctccatatta

SEQ ID NO: 424186 - DNA, 19 bp, Homo sapiens
  siRNA target sequence for HSC20 (NM_172002.2,107-125).
gtcgcaggcgggaagcaat

SEQ ID NO: 424187 - DNA, 19 bp, Homo sapiens
  siRNA target sequence for HSC20 (NM_172002.2,109-127).
cgcaggcgggaagcaatta

SEQ ID NO: 424188 - DNA, 19 bp, Homo sapiens
  siRNA target sequence for HSC20 (NM_172002.2,168-186).
cgggaggacaggttcttct

SEQ ID NO: 424189 - DNA, 19 bp, Homo sapiens
  siRNA target sequence for HSC20 (NM_172002.2,219-237).
cccactcgagactacttca

SEQ ID NO: 424190 - DNA, 19 bp, Homo sapiens
  siRNA target sequence for HSC20 (NM_172002.2,254-272).
ccgttccttcagagttgat

SEQ ID NO: 424191 - DNA, 19 bp, Homo sapiens
  siRNA target sequence for HSC20 (NM_172002.2,255-273).
cgttccttcagagttgata

SEQ ID NO: 424192 - DNA, 19 bp, Homo sapiens
  siRNA target sequence for HSC20 (NM_172002.2,310-328).
gtcttgtccacccagattt

SEQ ID NO: 424193 - DNA, 19 bp, Homo sapiens
  siRNA target sequence for HSC20 (NM_172002.2,340-358).
ggtctcagactgaaaagga

SEQ ID NO: 424194 - DNA, 19 bp, Homo sapiens
  siRNA target sequence for HSC20 (NM_172002.2,384-402).
gtgaatgatgcctataaga

SEQ ID NO: 424195 - DNA, 19 bp, Homo sapiens
  siRNA target sequence for HSC20 (NM_172002.2,443-461).
gctccatggaatagagatt

SEQ ID NO: 424196 - DNA, 19 bp, Homo sapiens
  siRNA target sequence for HSC20 (NM_172002.2,469-487).
ggacagattatgaaatgga

SEQ ID NO: 424197 - DNA, 19 bp, Homo sapiens
  siRNA target sequence for HSC20 (NM_172002.2,567-585).
gaatccattgtcaaagcta

SEQ ID NO: 424198 - DNA, 19 bp, Homo sapiens
  siRNA target sequence for HSC20 (NM_172002.2,613-631).
gcagtgcttttgaacaaga

SEQ ID NO: 424199 - DNA, 19 bp, Homo sapiens
  siRNA target sequence for HSC20 (NM_172002.2,614-632).
cagtgcttttgaacaagat

SEQ ID NO: 424200 - DNA, 19 bp, Homo sapiens
  siRNA target sequence for WFDC13 (NM_172005.1,179-197).
ccaagcagcgtgttctgaa

SEQ ID NO: 424201 - DNA, 19 bp, Homo sapiens
  siRNA target sequence for WFDC13 (NM_172005.1,183-201).
gcagcgtgttctgaagtat

SEQ ID NO: 424202 - DNA, 19 bp, Homo sapiens
  siRNA target sequence for WFDC13 (NM_172005.1,184-202).
cagcgtgttctgaagtata

SEQ ID NO: 424203 - DNA, 19 bp, Homo sapiens
  siRNA target sequence for WFDC13 (NM_172005.1,313-331).
gtctgttcatcagaaacat

SEQ ID NO: 424204 - DNA, 19 bp, Homo sapiens
  siRNA target sequence for WFDC13 (NM_172005.1,334-352).
caaaagcgcaacagaatca

SEQ ID NO: 424205 - DNA, 19 bp, Homo sapiens
  siRNA target sequence for WFDC10B (NM_172006.2,339-357).
gaagcgacccagcatagat

SEQ ID NO: 424206 - DNA, 19 bp, Homo sapiens
  siRNA target sequence for WFDC10B (NM_172006.2,342-360).
gcgacccagcatagatcta

SEQ ID NO: 424207 - DNA, 19 bp, Homo sapiens
  siRNA target sequence for WFDC10B (NM_172006.2,343-361).
cgacccagcatagatctat

SEQ ID NO: 424208 - DNA, 19 bp, Homo sapiens
  siRNA target sequence for WFDC10B (NM_172006.2,369-387).
ccactgttcatatttccaa

SEQ ID NO: 424209 - DNA, 19 bp, Homo sapiens
  siRNA target sequence for KIAA2024 (NM_172070.2,173-191).
gaacaaacgcatcattgaa

SEQ ID NO: 424210 - DNA, 19 bp, Homo sapiens
  siRNA target sequence for KIAA2024 (NM_172070.2,180-198).
cgcatcattgaagagatat

SEQ ID NO: 424211 - DNA, 19 bp, Homo sapiens
  siRNA target sequence for KIAA2024 (NM_172070.2,424-442).
cagtatatgactgtgttat

SEQ ID NO: 424212 - DNA, 19 bp, Homo sapiens
  siRNA target sequence for KIAA2024 (NM_172070.2,475-493).
gacctactggattagttgt

SEQ ID NO: 424213 - DNA, 19 bp, Homo sapiens
  siRNA target sequence for KIAA2024 (NM_172070.2,481-499).
ctggattagttgtactgtt

SEQ ID NO: 424214 - DNA, 19 bp, Homo sapiens
  siRNA target sequence for KIAA2024 (NM_172070.2,518-536).
ggggcagtgccgtgacaat

SEQ ID NO: 424215 - DNA, 19 bp, Homo sapiens
  siRNA target sequence for KIAA2024 (NM_172070.2,520-538).
ggcagtgccgtgacaatgt

SEQ ID NO: 424216 - DNA, 19 bp, Homo sapiens
  siRNA target sequence for KIAA2024 (NM_172070.2,531-549).
gacaatgttgagccaaaaa

SEQ ID NO: 424217 - DNA, 19 bp, Homo sapiens
  siRNA target sequence for KIAA2024 (NM_172070.2,593-611).
ctgtgcagccgttcatgat

SEQ ID NO: 424218 - DNA, 19 bp, Homo sapiens
  siRNA target sequence for KIAA2024 (NM_172070.2,595-613).
gtgcagccgttcatgatgt

SEQ ID NO: 424219 - DNA, 19 bp, Homo sapiens
  siRNA target sequence for KIAA2024 (NM_172070.2,655-673).
gtctcttggcagtatcaat

SEQ ID NO: 424220 - DNA, 19 bp, Homo sapiens
  siRNA target sequence for KIAA2024 (NM_172070.2,684-702).
ggaggtgtttatgtacaaa

SEQ ID NO: 424221 - DNA, 19 bp, Homo sapiens
  siRNA target sequence for KIAA2024 (NM_172070.2,715-733).
cattacatatagattgtca

SEQ ID NO: 424222 - DNA, 19 bp, Homo sapiens
  siRNA target sequence for KIAA2024 (NM_172070.2,813-831).
ctctgtaggcagtttgcta

SEQ ID NO: 424223 - DNA, 19 bp, Homo sapiens
  siRNA target sequence for KIAA2024 (NM_172070.2,882-900).
caacgtcctagcaacaaaa

SEQ ID NO: 424224 - DNA, 19 bp, Homo sapiens
  siRNA target sequence for KIAA2024 (NM_172070.2,885-903).
cgtcctagcaacaaaagca

SEQ ID NO: 424225 - DNA, 19 bp, Homo sapiens
  siRNA target sequence for KIAA2024 (NM_172070.2,952-970).
ctttcccatcagaaacaaa

SEQ ID NO: 424226 - DNA, 19 bp, Homo sapiens
  siRNA target sequence for KIAA2024 (NM_172070.2,1052-1070).
gggctcaccagacaatgat

SEQ ID NO: 424227 - DNA, 19 bp, Homo sapiens
  siRNA target sequence for KIAA2024 (NM_172070.2,1053-1071).
ggctcaccagacaatgatt

SEQ ID NO: 424228 - DNA, 19 bp, Homo sapiens
  siRNA target sequence for KIAA2024 (NM_172070.2,1093-1111).
ctagaaccaatttagaact

SEQ ID NO: 424229 - DNA, 19 bp, Homo sapiens
  siRNA target sequence for KIAA2024 (NM_172070.2,1096-1114).
gaaccaatttagaacttga

SEQ ID NO: 424230 - DNA, 19 bp, Homo sapiens
  siRNA target sequence for KIAA2024 (NM_172070.2,1164-1182).
ggcaaaaggtcttgtttaa

SEQ ID NO: 424231 - DNA, 19 bp, Homo sapiens
  siRNA target sequence for KIAA2024 (NM_172070.2,1177-1195).
gtttaaatcagctgtttca

SEQ ID NO: 424232 - DNA, 19 bp, Homo sapiens
  siRNA target sequence for KIAA2024 (NM_172070.2,1209-1227).
cacatgcggctttatagca

SEQ ID NO: 424233 - DNA, 19 bp, Homo sapiens
  siRNA target sequence for KIAA2024 (NM_172070.2,1211-1229).
catgcggctttatagcatt

SEQ ID NO: 424234 - DNA, 19 bp, Homo sapiens
  siRNA target sequence for KIAA2024 (NM_172070.2,1215-1233).
cggctttatagcattgact

SEQ ID NO: 424235 - DNA, 19 bp, Homo sapiens
  siRNA target sequence for KIAA2024 (NM_172070.2,1252-1270).
gaaagctcacccagttaga

SEQ ID NO: 424236 - DNA, 19 bp, Homo sapiens
  siRNA target sequence for KIAA2024 (NM_172070.2,1286-1304).
gctgggatatgaagaacaa

SEQ ID NO: 424237 - DNA, 19 bp, Homo sapiens
  siRNA target sequence for KIAA2024 (NM_172070.2,1402-1420).
gcattgtgaaggtactttt

SEQ ID NO: 424238 - DNA, 19 bp, Homo sapiens
  siRNA target sequence for KIAA2024 (NM_172070.2,1494-1512).
cacgcgggagctctcaaaa

SEQ ID NO: 424239 - DNA, 19 bp, Homo sapiens
  siRNA target sequence for KIAA2024 (NM_172070.2,1497-1515).
gcgggagctctcaaaaaga

SEQ ID NO: 424240 - DNA, 19 bp, Homo sapiens
  siRNA target sequence for KIAA2024 (NM_172070.2,1503-1521).
gctctcaaaaagagtacat

SEQ ID NO: 424241 - DNA, 19 bp, Homo sapiens
  siRNA target sequence for KIAA2024 (NM_172070.2,1560-1578).
gtgataagtgaactattta

SEQ ID NO: 424242 - DNA, 19 bp, Homo sapiens
  siRNA target sequence for KIAA2024 (NM_172070.2,1784-1802).
gggacttctgccaacgttt

SEQ ID NO: 424243 - DNA, 19 bp, Homo sapiens
  siRNA target sequence for KIAA2024 (NM_172070.2,1785-1803).
ggacttctgccaacgtttt

SEQ ID NO: 424244 - DNA, 19 bp, Homo sapiens
  siRNA target sequence for KIAA2024 (NM_172070.2,1786-1804).
gacttctgccaacgtttta

SEQ ID NO: 424245 - DNA, 19 bp, Homo sapiens
  siRNA target sequence for KIAA2024 (NM_172070.2,1795-1813).
caacgttttaccaaacaga

SEQ ID NO: 424246 - DNA, 19 bp, Homo sapiens
  siRNA target sequence for KIAA2024 (NM_172070.2,1848-1866).
ccagttccagcatttgata

SEQ ID NO: 424247 - DNA, 19 bp, Homo sapiens
  siRNA target sequence for KIAA2024 (NM_172070.2,1875-1893).
cagtggtgttttgagataa

SEQ ID NO: 424248 - DNA, 19 bp, Homo sapiens
  siRNA target sequence for KIAA2024 (NM_172070.2,1877-1895).
gtggtgttttgagataaaa

SEQ ID NO: 424249 - DNA, 19 bp, Homo sapiens
  siRNA target sequence for KIAA2024 (NM_172070.2,1941-1959).
caagagtcaaaatggaaat

SEQ ID NO: 424250 - DNA, 19 bp, Homo sapiens
  siRNA target sequence for KIAA2024 (NM_172070.2,2033-2051).
ctgcaccaaggttcctaaa

SEQ ID NO: 424251 - DNA, 19 bp, Homo sapiens
  siRNA target sequence for KIAA2024 (NM_172070.2,2104-2122).
gctgcaagcaacaaagtta

SEQ ID NO: 424252 - DNA, 19 bp, Homo sapiens
  siRNA target sequence for KIAA2024 (NM_172070.2,2108-2126).
caagcaacaaagttactgt

SEQ ID NO: 424253 - DNA, 19 bp, Homo sapiens
  siRNA target sequence for KIAA2024 (NM_172070.2,2180-2198).
gatcaatgcatcggtaatt

SEQ ID NO: 424254 - DNA, 19 bp, Homo sapiens
  siRNA target sequence for KIAA2024 (NM_172070.2,2187-2205).
gcatcggtaattatcatca

SEQ ID NO: 424255 - DNA, 19 bp, Homo sapiens
  siRNA target sequence for KIAA2024 (NM_172070.2,2188-2206).
catcggtaattatcatcat

SEQ ID NO: 424256 - DNA, 19 bp, Homo sapiens
  siRNA target sequence for KIAA2024 (NM_172070.2,2231-2249).
gggttccgtgtatttggat

SEQ ID NO: 424257 - DNA, 19 bp, Homo sapiens
  siRNA target sequence for KIAA2024 (NM_172070.2,2281-2299).
gaggcaaacctctctacat

SEQ ID NO: 424258 - DNA, 19 bp, Homo sapiens
  siRNA target sequence for KIAA2024 (NM_172070.2,2283-2301).
ggcaaacctctctacattt

SEQ ID NO: 424259 - DNA, 19 bp, Homo sapiens
  siRNA target sequence for KIAA2024 (NM_172070.2,2285-2303).
caaacctctctacatttgt

SEQ ID NO: 424260 - DNA, 19 bp, Homo sapiens
  siRNA target sequence for KIAA2024 (NM_172070.2,2327-2345).
gcaacagtggatttctcat

SEQ ID NO: 424261 - DNA, 19 bp, Homo sapiens
  siRNA target sequence for KIAA2024 (NM_172070.2,2328-2346).
caacagtggatttctcata

SEQ ID NO: 424262 - DNA, 19 bp, Homo sapiens
  siRNA target sequence for KIAA2024 (NM_172070.2,2336-2354).
gatttctcatacttttgat

SEQ ID NO: 424263 - DNA, 19 bp, Homo sapiens
  siRNA target sequence for KIAA2024 (NM_172070.2,2341-2359).
ctcatacttttgatcacat

SEQ ID NO: 424264 - DNA, 19 bp, Homo sapiens
  siRNA target sequence for WFDC10B (NM_172131.2,60-78).
gtgtaggacaaattttgct

SEQ ID NO: 424265 - DNA, 19 bp, Homo sapiens
  siRNA target sequence for WFDC10B (NM_172131.2,89-107).
ggttacacctgcagactat

SEQ ID NO: 424266 - DNA, 19 bp, Homo sapiens
  siRNA target sequence for WFDC10B (NM_172131.2,144-162).
gcaatcttcctgcattgta

SEQ ID NO: 424267 - DNA, 19 bp, Homo sapiens
  siRNA target sequence for WFDC10B (NM_172131.2,156-174).
cattgtacacaggaatcaa

SEQ ID NO: 424268 - DNA, 19 bp, Homo sapiens
  siRNA target sequence for FLJ30317 (NM_172136.1,184-202).
ggaacagggatttttgtct

SEQ ID NO: 424269 - DNA, 19 bp, Homo sapiens
  siRNA target sequence for IL29 (NM_172140.1,199-217).
ccacattggcaggttcaaa

SEQ ID NO: 424270 - DNA, 19 bp, Homo sapiens
  siRNA target sequence for IL29 (NM_172140.1,202-220).
cattggcaggttcaaatct

SEQ ID NO: 424271 - DNA, 19 bp, Homo sapiens
  siRNA target sequence for IL29 (NM_172140.1,628-646).
cacgcgagacctcaaatat

SEQ ID NO: 424272 - DNA, 19 bp, Homo sapiens
  siRNA target sequence for KLHDC1 (NM_172193.1,81-99).
ccgtggtggacggaaactt

SEQ ID NO: 424273 - DNA, 19 bp, Homo sapiens
  siRNA target sequence for KLHDC1 (NM_172193.1,115-133).
gggctacgtgtctattgaa

SEQ ID NO: 424274 - DNA, 19 bp, Homo sapiens
  siRNA target sequence for KLHDC1 (NM_172193.1,117-135).
gctacgtgtctattgaaga

SEQ ID NO: 424275 - DNA, 19 bp, Homo sapiens
  siRNA target sequence for KLHDC1 (NM_172193.1,121-139).
cgtgtctattgaagacaat

SEQ ID NO: 424276 - DNA, 19 bp, Homo sapiens
  siRNA target sequence for KLHDC1 (NM_172193.1,169-187).
gacctatgatattgatagt

SEQ ID NO: 424277 - DNA, 19 bp, Homo sapiens
  siRNA target sequence for KLHDC1 (NM_172193.1,243-261).
gctgtggtgcttgcattaa

SEQ ID NO: 424278 - DNA, 19 bp, Homo sapiens
  siRNA target sequence for KLHDC1 (NM_172193.1,248-266).
ggtgcttgcattaatggaa

SEQ ID NO: 424279 - DNA, 19 bp, Homo sapiens
  siRNA target sequence for KLHDC1 (NM_172193.1,249-267).
gtgcttgcattaatggaaa

SEQ ID NO: 424280 - DNA, 19 bp, Homo sapiens
  siRNA target sequence for KLHDC1 (NM_172193.1,304-322).
cagcaatcgactttatttt

SEQ ID NO: 424281 - DNA, 19 bp, Homo sapiens
  siRNA target sequence for KLHDC1 (NM_172193.1,387-405).
cacctacaccacgtgataa

SEQ ID NO: 424282 - DNA, 19 bp, Homo sapiens
  siRNA target sequence for KLHDC1 (NM_172193.1,419-437).
gtatataaagacagactaa

SEQ ID NO: 424283 - DNA, 19 bp, Homo sapiens
  siRNA target sequence for KLHDC1 (NM_172193.1,471-489).
gtgaactccaagactgttt

SEQ ID NO: 424284 - DNA, 19 bp, Homo sapiens
  siRNA target sequence for KLHDC1 (NM_172193.1,526-544).
ctggggatggcataatgat

SEQ ID NO: 424285 - DNA, 19 bp, Homo sapiens
  siRNA target sequence for KLHDC1 (NM_172193.1,528-546).
ggggatggcataatgatgt

SEQ ID NO: 424286 - DNA, 19 bp, Homo sapiens
  siRNA target sequence for KLHDC1 (NM_172193.1,536-554).
cataatgatgtccacatat

SEQ ID NO: 424287 - DNA, 19 bp, Homo sapiens
  siRNA target sequence for KLHDC1 (NM_172193.1,641-659).
cttggaaataagggttata

SEQ ID NO: 424288 - DNA, 19 bp, Homo sapiens
  siRNA target sequence for KLHDC1 (NM_172193.1,668-686).
ggacgtgttctgcaaacta

SEQ ID NO: 424289 - DNA, 19 bp, Homo sapiens
  siRNA target sequence for KLHDC1 (NM_172193.1,679-697).
gcaaactaggatgaatgat

SEQ ID NO: 424290 - DNA, 19 bp, Homo sapiens
  siRNA target sequence for KLHDC1 (NM_172193.1,691-709).
gaatgatttgcactatcta

SEQ ID NO: 424291 - DNA, 19 bp, Homo sapiens
  siRNA target sequence for KLHDC1 (NM_172193.1,724-742).
gacttggtctggaaggatt

SEQ ID NO: 424292 - DNA, 19 bp, Homo sapiens
  siRNA target sequence for KLHDC1 (NM_172193.1,729-747).
ggtctggaaggattactat

SEQ ID NO: 424293 - DNA, 19 bp, Homo sapiens
  siRNA target sequence for KLHDC1 (NM_172193.1,730-748).
gtctggaaggattactatt

SEQ ID NO: 424294 - DNA, 19 bp, Homo sapiens
  siRNA target sequence for KLHDC1 (NM_172193.1,767-785).
catcggtcatggcatactt

SEQ ID NO: 424295 - DNA, 19 bp, Homo sapiens
  siRNA target sequence for KLHDC1 (NM_172193.1,770-788).
cggtcatggcatactttaa

SEQ ID NO: 424296 - DNA, 19 bp, Homo sapiens
  siRNA target sequence for KLHDC1 (NM_172193.1,814-832).
cctatgtggtggactaagt

SEQ ID NO: 424297 - DNA, 19 bp, Homo sapiens
  siRNA target sequence for KLHDC1 (NM_172193.1,822-840).
gtggactaagtgcagataa

SEQ ID NO: 424298 - DNA, 19 bp, Homo sapiens
  siRNA target sequence for KLHDC1 (NM_172193.1,857-875).
ggttggattcataatgtca

SEQ ID NO: 424299 - DNA, 19 bp, Homo sapiens
  siRNA target sequence for KLHDC1 (NM_172193.1,866-884).
cataatgtcacaacaaatt

SEQ ID NO: 424300 - DNA, 19 bp, Homo sapiens
  siRNA target sequence for KLHDC1 (NM_172193.1,989-1007).
gacttacttgccttggata

SEQ ID NO: 424301 - DNA, 19 bp, Homo sapiens
  siRNA target sequence for KLHDC1 (NM_172193.1,1003-1021).
ggatacaggtcactgtaat

SEQ ID NO: 424302 - DNA, 19 bp, Homo sapiens
  siRNA target sequence for KLHDC1 (NM_172193.1,1070-1088).
cttgactgcattggtaaaa

SEQ ID NO: 424303 - DNA, 19 bp, Homo sapiens
  siRNA target sequence for KLHDC1 (NM_172193.1,1136-1154).
ctgcaacaagtactcaaaa

SEQ ID NO: 424304 - DNA, 19 bp, Homo sapiens
  siRNA target sequence for TUWD12 (NM_172240.1,127-145).
cccgttctggagcgttatt

SEQ ID NO: 424305 - DNA, 19 bp, Homo sapiens
  siRNA target sequence for TUWD12 (NM_172240.1,128-146).
ccgttctggagcgttattt

SEQ ID NO: 424306 - DNA, 19 bp, Homo sapiens
  siRNA target sequence for TUWD12 (NM_172240.1,130-148).
gttctggagcgttatttca

SEQ ID NO: 424307 - DNA, 19 bp, Homo sapiens
  siRNA target sequence for TUWD12 (NM_172240.1,224-242).
cctttctcatgctatggaa

SEQ ID NO: 424308 - DNA, 19 bp, Homo sapiens
  siRNA target sequence for TUWD12 (NM_172240.1,225-243).
ctttctcatgctatggaat

SEQ ID NO: 424309 - DNA, 19 bp, Homo sapiens
  siRNA target sequence for TUWD12 (NM_172240.1,253-271).
catgctagagcttacagat

SEQ ID NO: 424310 - DNA, 19 bp, Homo sapiens
  siRNA target sequence for TUWD12 (NM_172240.1,276-294).
gggtcacaaggatgttgta

SEQ ID NO: 424311 - DNA, 19 bp, Homo sapiens
  siRNA target sequence for TUWD12 (NM_172240.1,277-295).
ggtcacaaggatgttgtaa

SEQ ID NO: 424312 - DNA, 19 bp, Homo sapiens
  siRNA target sequence for TUWD12 (NM_172240.1,292-310).
gtaaccagcgtgcagtttt

SEQ ID NO: 424313 - DNA, 19 bp, Homo sapiens
  siRNA target sequence for TUWD12 (NM_172240.1,370-388).
cctgataagagaggaaaat

SEQ ID NO: 424314 - DNA, 19 bp, Homo sapiens
  siRNA target sequence for TUWD12 (NM_172240.1,416-434).
cagttcgaagtgtagactt

SEQ ID NO: 424315 - DNA, 19 bp, Homo sapiens
  siRNA target sequence for TUWD12 (NM_172240.1,418-436).
gttcgaagtgtagactttt

SEQ ID NO: 424316 - DNA, 19 bp, Homo sapiens
  siRNA target sequence for TUWD12 (NM_172240.1,437-455).
cagctgatggccagtttct

SEQ ID NO: 424317 - DNA, 19 bp, Homo sapiens
  siRNA target sequence for TUWD12 (NM_172240.1,467-485).
ctgaagacaaatccataaa

SEQ ID NO: 424318 - DNA, 19 bp, Homo sapiens
  siRNA target sequence for TUWD12 (NM_172240.1,521-539).
ccttgtatcgacatacaca

SEQ ID NO: 424319 - DNA, 19 bp, Homo sapiens
  siRNA target sequence for TUWD12 (NM_172240.1,543-561).
ggtacgctgtgccaaattt

SEQ ID NO: 424320 - DNA, 19 bp, Homo sapiens
  siRNA target sequence for TUWD12 (NM_172240.1,544-562).
gtacgctgtgccaaatttt

SEQ ID NO: 424321 - DNA, 19 bp, Homo sapiens
  siRNA target sequence for TUWD12 (NM_172240.1,563-581).
cacccgatggaagactaat

SEQ ID NO: 424322 - DNA, 19 bp, Homo sapiens
  siRNA target sequence for TUWD12 (NM_172240.1,566-584).
ccgatggaagactaattgt

SEQ ID NO: 424323 - DNA, 19 bp, Homo sapiens
  siRNA target sequence for TUWD12 (NM_172240.1,568-586).
gatggaagactaattgtgt

SEQ ID NO: 424324 - DNA, 19 bp, Homo sapiens
  siRNA target sequence for TUWD12 (NM_172240.1,590-608).
gtagtgaggataaaactat

SEQ ID NO: 424325 - DNA, 19 bp, Homo sapiens
  siRNA target sequence for TUWD12 (NM_172240.1,617-635).
gggataccacaaataagca

SEQ ID NO: 424326 - DNA, 19 bp, Homo sapiens
  siRNA target sequence for TUWD12 (NM_172240.1,619-637).
gataccacaaataagcaat

SEQ ID NO: 424327 - DNA, 19 bp, Homo sapiens
  siRNA target sequence for TUWD12 (NM_172240.1,623-641).
ccacaaataagcaatgtgt

SEQ ID NO: 424328 - DNA, 19 bp, Homo sapiens
  siRNA target sequence for TUWD12 (NM_172240.1,640-658).
gttaataacttctcagatt

SEQ ID NO: 424329 - DNA, 19 bp, Homo sapiens
  siRNA target sequence for TUWD12 (NM_172240.1,655-673).
gattccgttggatttgcaa

SEQ ID NO: 424330 - DNA, 19 bp, Homo sapiens
  siRNA target sequence for TUWD12 (NM_172240.1,659-677).
ccgttggatttgcaaattt

SEQ ID NO: 424331 - DNA, 19 bp, Homo sapiens
  siRNA target sequence for TUWD12 (NM_172240.1,733-751).
gtgaaagtctgggatgtaa

SEQ ID NO: 424332 - DNA, 19 bp, Homo sapiens
  siRNA target sequence for TUWD12 (NM_172240.1,735-753).
gaaagtctgggatgtaaga

SEQ ID NO: 424333 - DNA, 19 bp, Homo sapiens
  siRNA target sequence for TUWD12 (NM_172240.1,784-802).
cacagcggtggagttaatt

SEQ ID NO: 424334 - DNA, 19 bp, Homo sapiens
  siRNA target sequence for TUWD12 (NM_172240.1,788-806).
gcggtggagttaattgcat

SEQ ID NO: 424335 - DNA, 19 bp, Homo sapiens
  siRNA target sequence for TUWD12 (NM_172240.1,790-808).
ggtggagttaattgcatat

SEQ ID NO: 424336 - DNA, 19 bp, Homo sapiens
  siRNA target sequence for TUWD12 (NM_172240.1,793-811).
ggagttaattgcatatcat

SEQ ID NO: 424337 - DNA, 19 bp, Homo sapiens
  siRNA target sequence for TUWD12 (NM_172240.1,813-831).
ccatccttcgggtaactat

SEQ ID NO: 424338 - DNA, 19 bp, Homo sapiens
  siRNA target sequence for TUWD12 (NM_172240.1,817-835).
ccttcgggtaactatctca

SEQ ID NO: 424339 - DNA, 19 bp, Homo sapiens
  siRNA target sequence for TUWD12 (NM_172240.1,818-836).
cttcgggtaactatctcat

SEQ ID NO: 424340 - DNA, 19 bp, Homo sapiens
  siRNA target sequence for TUWD12 (NM_172240.1,848-866).
cagatggtacccttaagat

SEQ ID NO: 424341 - DNA, 19 bp, Homo sapiens
  siRNA target sequence for TUWD12 (NM_172240.1,884-902).
gaaggctcatctatacact

SEQ ID NO: 424342 - DNA, 19 bp, Homo sapiens
  siRNA target sequence for TUWD12 (NM_172240.1,914-932).
cgggacctgtctttactgt

SEQ ID NO: 424343 - DNA, 19 bp, Homo sapiens
  siRNA target sequence for TUWD12 (NM_172240.1,946-964).
ggtggagagctatttgcat

SEQ ID NO: 424344 - DNA, 19 bp, Homo sapiens
  siRNA target sequence for TUWD12 (NM_172240.1,976-994).
gacacacaggtcttattat

SEQ ID NO: 424345 - DNA, 19 bp, Homo sapiens
  siRNA target sequence for TUWD12 (NM_172240.1,995-1013).
ggaggactaactttgatga

SEQ ID NO: 424346 - DNA, 19 bp, Homo sapiens
  siRNA target sequence for TUWD12 (NM_172240.1,1067-1085).
caccaccacatcttcttga

SEQ ID NO: 424347 - DNA, 19 bp, Homo sapiens
  siRNA target sequence for TUWD12 (NM_172240.1,1070-1088).
caccacatcttcttgatat

SEQ ID NO: 424348 - DNA, 19 bp, Homo sapiens
  siRNA target sequence for TUWD12 (NM_172240.1,1072-1090).
ccacatcttcttgatatct

SEQ ID NO: 424349 - DNA, 19 bp, Homo sapiens
  siRNA target sequence for TUWD12 (NM_172240.1,1073-1091).
cacatcttcttgatatcta

SEQ ID NO: 424350 - DNA, 19 bp, Homo sapiens
  siRNA target sequence for TUWD12 (NM_172240.1,1128-1146).
gactgtagaaattaatcca

SEQ ID NO: 424351 - DNA, 19 bp, Homo sapiens
  siRNA target sequence for TUWD12 (NM_172240.1,1145-1163).
caaagcttgaggtaatcga

SEQ ID NO: 424352 - DNA, 19 bp, Homo sapiens
  siRNA target sequence for TUWD12 (NM_172240.1,1181-1199).
cccctgttatggatatcct

SEQ ID NO: 424353 - DNA, 19 bp, Homo sapiens
  siRNA target sequence for TUWD12 (NM_172240.1,1182-1200).
ccctgttatggatatcctt

SEQ ID NO: 424354 - DNA, 19 bp, Homo sapiens
  siRNA target sequence for TUWD12 (NM_172240.1,1183-1201).
cctgttatggatatccttt

SEQ ID NO: 424355 - DNA, 19 bp, Homo sapiens
  siRNA target sequence for TUWD12 (NM_172240.1,1186-1204).
gttatggatatcctttctt

SEQ ID NO: 424356 - DNA, 19 bp, Homo sapiens
  siRNA target sequence for TUWD12 (NM_172240.1,1261-1279).
gaggcctgtggatatttct

SEQ ID NO: 424357 - DNA, 19 bp, Homo sapiens
  siRNA target sequence for TUWD12 (NM_172240.1,1264-1282).
gcctgtggatatttcttga

SEQ ID NO: 424358 - DNA, 19 bp, Homo sapiens
  siRNA target sequence for TUWD12 (NM_172240.1,1281-1299).
gaacccttccttaatgtca

SEQ ID NO: 424359 - DNA, 19 bp, Homo sapiens
  siRNA target sequence for TUWD12 (NM_172240.1,1350-1368).
cctcccctgtgaaagtcaa

SEQ ID NO: 424360 - DNA, 19 bp, Homo sapiens
  siRNA target sequence for TUWD12 (NM_172240.1,1383-1401).
cgctgtgactgatgcttta

SEQ ID NO: 424361 - DNA, 19 bp, Homo sapiens
  siRNA target sequence for TUWD12 (NM_172240.1,1391-1409).
ctgatgctttagagcatat

SEQ ID NO: 424362 - DNA, 19 bp, Homo sapiens
  siRNA target sequence for TUWD12 (NM_172240.1,1393-1411).
gatgctttagagcatatta

SEQ ID NO: 424363 - DNA, 19 bp, Homo sapiens
  siRNA target sequence for TUWD12 (NM_172240.1,1426-1444).
gttttgacacagactgttt

SEQ ID NO: 424364 - DNA, 19 bp, Homo sapiens
  siRNA target sequence for TUWD12 (NM_172240.1,1455-1473).
gcagcgactgactttgaca

SEQ ID NO: 424365 - DNA, 19 bp, Homo sapiens
  siRNA target sequence for TUWD12 (NM_172240.1,1522-1540).
gctgtccaacagaaaagct

SEQ ID NO: 424366 - DNA, 19 bp, Homo sapiens
  siRNA target sequence for CTAGE-2 (NM_172241.1,117-135).
gacccgattctcatcctta

SEQ ID NO: 424367 - DNA, 19 bp, Homo sapiens
  siRNA target sequence for CTAGE-2 (NM_172241.1,121-139).
cgattctcatccttatggt

SEQ ID NO: 424368 - DNA, 19 bp, Homo sapiens
  siRNA target sequence for MMAA (NM_172250.1,87-105).
cctcaccagcatttcctaa

SEQ ID NO: 424369 - DNA, 19 bp, Homo sapiens
  siRNA target sequence for MMAA (NM_172250.1,88-106).
ctcaccagcatttcctaaa

SEQ ID NO: 424370 - DNA, 19 bp, Homo sapiens
  siRNA target sequence for MMAA (NM_172250.1,118-136).
gagcacctttccgatgtta

SEQ ID NO: 424371 - DNA, 19 bp, Homo sapiens
  siRNA target sequence for MMAA (NM_172250.1,133-151).
gttaccacttcatctttca

SEQ ID NO: 424372 - DNA, 19 bp, Homo sapiens
  siRNA target sequence for MMAA (NM_172250.1,143-161).
catctttcactcaagtact

SEQ ID NO: 424373 - DNA, 19 bp, Homo sapiens
  siRNA target sequence for MMAA (NM_172250.1,187-205).
ctcagccgtttaattctct

SEQ ID NO: 424374 - DNA, 19 bp, Homo sapiens
  siRNA target sequence for MMAA (NM_172250.1,207-225).
ggactccattgtacaaagt

SEQ ID NO: 424375 - DNA, 19 bp, Homo sapiens
  siRNA target sequence for MMAA (NM_172250.1,234-252).
ctgtcagatggcttaaaga

SEQ ID NO: 424376 - DNA, 19 bp, Homo sapiens
  siRNA target sequence for MMAA (NM_172250.1,377-395).
cataactcttgtagaatca

SEQ ID NO: 424377 - DNA, 19 bp, Homo sapiens
  siRNA target sequence for MMAA (NM_172250.1,422-440).
ccaggtgcttcttcagaaa

SEQ ID NO: 424378 - DNA, 19 bp, Homo sapiens
  siRNA target sequence for MMAA (NM_172250.1,597-615).
gctgtggacccttcttctt

SEQ ID NO: 424379 - DNA, 19 bp, Homo sapiens
  siRNA target sequence for MMAA (NM_172250.1,600-618).
gtggacccttcttcttgta

SEQ ID NO: 424380 - DNA, 19 bp, Homo sapiens
  siRNA target sequence for MMAA (NM_172250.1,650-668).
ccgaatgactgagttatca

SEQ ID NO: 424381 - DNA, 19 bp, Homo sapiens
  siRNA target sequence for MMAA (NM_172250.1,651-669).
cgaatgactgagttatcaa

SEQ ID NO: 424382 - DNA, 19 bp, Homo sapiens
  siRNA target sequence for MMAA (NM_172250.1,662-680).
gttatcaagagatatgaat

SEQ ID NO: 424383 - DNA, 19 bp, Homo sapiens
  siRNA target sequence for MMAA (NM_172250.1,689-707).
caggccatctcctactaga

SEQ ID NO: 424384 - DNA, 19 bp, Homo sapiens
  siRNA target sequence for MMAA (NM_172250.1,697-715).
ctcctactagaggaacttt

SEQ ID NO: 424385 - DNA, 19 bp, Homo sapiens
  siRNA target sequence for MMAA (NM_172250.1,722-740).
cgtgacaaggaccacaaat

SEQ ID NO: 424386 - DNA, 19 bp, Homo sapiens
  siRNA target sequence for MMAA (NM_172250.1,733-751).
ccacaaatgaagctattct

SEQ ID NO: 424387 - DNA, 19 bp, Homo sapiens
  siRNA target sequence for MMAA (NM_172250.1,759-777).
gaaggagcgggatatgaca

SEQ ID NO: 424388 - DNA, 19 bp, Homo sapiens
  siRNA target sequence for MMAA (NM_172250.1,762-780).
ggagcgggatatgacataa

SEQ ID NO: 424389 - DNA, 19 bp, Homo sapiens
  siRNA target sequence for MMAA (NM_172250.1,763-781).
gagcgggatatgacataat

SEQ ID NO: 424390 - DNA, 19 bp, Homo sapiens
  siRNA target sequence for MMAA (NM_172250.1,766-784).
cgggatatgacataattct

SEQ ID NO: 424391 - DNA, 19 bp, Homo sapiens
  siRNA target sequence for MMAA (NM_172250.1,774-792).
gacataattcttattgaaa

SEQ ID NO: 424392 - DNA, 19 bp, Homo sapiens
  siRNA target sequence for MMAA (NM_172250.1,920-938).
ggtagctgtaactaaatct

SEQ ID NO: 424393 - DNA, 19 bp, Homo sapiens
  siRNA target sequence for MMAA (NM_172250.1,956-974).
gccagctcgaaggatacaa

SEQ ID NO: 424394 - DNA, 19 bp, Homo sapiens
  siRNA target sequence for MMAA (NM_172250.1,1015-1033).
cacaagtctggaaaccaaa

SEQ ID NO: 424395 - DNA, 19 bp, Homo sapiens
  siRNA target sequence for MMAA (NM_172250.1,1022-1040).
ctggaaaccaaaggtaatt

SEQ ID NO: 424396 - DNA, 19 bp, Homo sapiens
  siRNA target sequence for MMAA (NM_172250.1,1025-1043).
gaaaccaaaggtaattcgt

SEQ ID NO: 424397 - DNA, 19 bp, Homo sapiens
  siRNA target sequence for MMAA (NM_172250.1,1213-1231).
ccacagtccgggaacagat

SEQ ID NO: 424398 - DNA, 19 bp, Homo sapiens
  siRNA target sequence for MMAA (NM_172250.1,1234-1252).
cacttctggaacaaaaggt

SEQ ID NO: 424399 - DNA, 19 bp, Homo sapiens
  siRNA target sequence for MMAA (NM_172250.1,1276-1294).
gactagcagcagacttctt

SEQ ID NO: 424400 - DNA, 19 bp, Homo sapiens
  siRNA target sequence for MMAA (NM_172250.1,1278-1296).
ctagcagcagacttcttgt

SEQ ID NO: 424401 - DNA, 19 bp, Homo sapiens
  siRNA target sequence for MMAA (NM_172250.1,1281-1299).
gcagcagacttcttgttaa

SEQ ID NO: 424402 - DNA, 19 bp, Homo sapiens
  siRNA target sequence for MMAA (NM_172250.1,1287-1305).
gacttcttgttaaaagctt

SEQ ID NO: 424403 - DNA, 19 bp, Homo sapiens
  siRNA target sequence for MRPL54 (NM_172251.1,241-259).
gccatgggcgtcaacatct

SEQ ID NO: 424404 - DNA, 19 bp, Homo sapiens
  siRNA target sequence for MRPL54 (NM_172251.1,242-260).
ccatgggcgtcaacatcta

SEQ ID NO: 424405 - DNA, 19 bp, Homo sapiens
  siRNA target sequence for PEN2 (NM_172341.1,224-242).
ccaatgaggagaaattgaa

SEQ ID NO: 424406 - DNA, 19 bp, Homo sapiens
  siRNA target sequence for C14orf50 (NM_172365.1,102-120).
ccgggtgcccgagttttat

SEQ ID NO: 424407 - DNA, 19 bp, Homo sapiens
  siRNA target sequence for C14orf50 (NM_172365.1,140-158).
gtgggcagaccccttactt

SEQ ID NO: 424408 - DNA, 19 bp, Homo sapiens
  siRNA target sequence for C14orf50 (NM_172365.1,142-160).
gggcagaccccttacttga

SEQ ID NO: 424409 - DNA, 19 bp, Homo sapiens
  siRNA target sequence for C14orf50 (NM_172365.1,143-161).
ggcagaccccttacttgat

SEQ ID NO: 424410 - DNA, 19 bp, Homo sapiens
  siRNA target sequence for C14orf50 (NM_172365.1,152-170).
cttacttgatggatcagtt

SEQ ID NO: 424411 - DNA, 19 bp, Homo sapiens
  siRNA target sequence for C14orf50 (NM_172365.1,162-180).
ggatcagttgggattacga

SEQ ID NO: 424412 - DNA, 19 bp, Homo sapiens
  siRNA target sequence for C14orf50 (NM_172365.1,163-181).
gatcagttgggattacgat

SEQ ID NO: 424413 - DNA, 19 bp, Homo sapiens
  siRNA target sequence for C14orf50 (NM_172365.1,231-249).
gtttgccgcagaagattct

SEQ ID NO: 424414 - DNA, 19 bp, Homo sapiens
  siRNA target sequence for C14orf50 (NM_172365.1,446-464).
cactggatgatgttaaatt

SEQ ID NO: 424415 - DNA, 19 bp, Homo sapiens
  siRNA target sequence for C14orf50 (NM_172365.1,493-511).
gagatgcagcggatctgtt

SEQ ID NO: 424416 - DNA, 19 bp, Homo sapiens
  siRNA target sequence for C14orf50 (NM_172365.1,498-516).
gcagcggatctgttctttt

SEQ ID NO: 424417 - DNA, 19 bp, Homo sapiens
  siRNA target sequence for C14orf50 (NM_172365.1,501-519).
gcggatctgttcttttaca

SEQ ID NO: 424418 - DNA, 19 bp, Homo sapiens
  siRNA target sequence for C14orf50 (NM_172365.1,504-522).
gatctgttcttttacaaca

SEQ ID NO: 424419 - DNA, 19 bp, Homo sapiens
  siRNA target sequence for C14orf50 (NM_172365.1,518-536).
caacatttatgaggaataa

SEQ ID NO: 424420 - DNA, 19 bp, Homo sapiens
  siRNA target sequence for C14orf50 (NM_172365.1,553-571).
ctcatggcattattgtact

SEQ ID NO: 424421 - DNA, 19 bp, Homo sapiens
  siRNA target sequence for C14orf50 (NM_172365.1,628-646).
gtaggccttgtagagaaaa

SEQ ID NO: 424422 - DNA, 19 bp, Homo sapiens
  siRNA target sequence for C14orf50 (NM_172365.1,689-707).
ggtacttggcgcagaagta

SEQ ID NO: 424423 - DNA, 19 bp, Homo sapiens
  siRNA target sequence for C14orf50 (NM_172365.1,699-717).
gcagaagtactgtatcctt

SEQ ID NO: 424424 - DNA, 19 bp, Homo sapiens
  siRNA target sequence for C14orf50 (NM_172365.1,729-747).
ggccgtgccggataagcat

SEQ ID NO: 424425 - DNA, 19 bp, Homo sapiens
  siRNA target sequence for C14orf50 (NM_172365.1,786-804).
gaaagactggaagttcttt

SEQ ID NO: 424426 - DNA, 19 bp, Homo sapiens
  siRNA target sequence for C14orf50 (NM_172365.1,883-901).
gtagggagactctttcgta

SEQ ID NO: 424427 - DNA, 19 bp, Homo sapiens
  siRNA target sequence for C14orf50 (NM_172365.1,888-906).
gagactctttcgtaccaat

SEQ ID NO: 424428 - DNA, 19 bp, Homo sapiens
  siRNA target sequence for C14orf50 (NM_172365.1,890-908).
gactctttcgtaccaatat

SEQ ID NO: 424429 - DNA, 19 bp, Homo sapiens
  siRNA target sequence for C14orf50 (NM_172365.1,892-910).
ctctttcgtaccaatatgt

SEQ ID NO: 424430 - DNA, 19 bp, Homo sapiens
  siRNA target sequence for C14orf50 (NM_172365.1,898-916).
cgtaccaatatgttcaaca

SEQ ID NO: 424431 - DNA, 19 bp, Homo sapiens
  siRNA target sequence for C14orf50 (NM_172365.1,899-917).
gtaccaatatgttcaacat

SEQ ID NO: 424432 - DNA, 19 bp, Homo sapiens
  siRNA target sequence for C14orf50 (NM_172365.1,923-941).
gcaggaggcgtgaagatga

SEQ ID NO: 424433 - DNA, 19 bp, Homo sapiens
  siRNA target sequence for C14orf50 (NM_172365.1,960-978).
gaaacgcatgacttttgtt

SEQ ID NO: 424434 - DNA, 19 bp, Homo sapiens
  siRNA target sequence for C14orf50 (NM_172365.1,965-983).
gcatgacttttgttcagtt

SEQ ID NO: 424435 - DNA, 19 bp, Homo sapiens
  siRNA target sequence for C14orf50 (NM_172365.1,996-1014).
ggcaaaacgcccagcaatt

SEQ ID NO: 424436 - DNA, 19 bp, Homo sapiens
  siRNA target sequence for C14orf50 (NM_172365.1,997-1015).
gcaaaacgcccagcaatta

SEQ ID NO: 424437 - DNA, 19 bp, Homo sapiens
  siRNA target sequence for C14orf50 (NM_172365.1,998-1016).
caaaacgcccagcaattaa

SEQ ID NO: 424438 - DNA, 19 bp, Homo sapiens
  siRNA target sequence for C14orf50 (NM_172365.1,1033-1051).
cgttctccagtcatgtcta

SEQ ID NO: 424439 - DNA, 19 bp, Homo sapiens
  siRNA target sequence for C14orf50 (NM_172365.1,1078-1096).
gctcaaaacgtctttgaga

SEQ ID NO: 424440 - DNA, 19 bp, Homo sapiens
  siRNA target sequence for C14orf50 (NM_172365.1,1079-1097).
ctcaaaacgtctttgagaa

SEQ ID NO: 424441 - DNA, 19 bp, Homo sapiens
  siRNA target sequence for C14orf50 (NM_172365.1,1191-1209).
gggggagcctcgatgtcta

SEQ ID NO: 424442 - DNA, 19 bp, Homo sapiens
  siRNA target sequence for C14orf50 (NM_172365.1,1192-1210).
ggggagcctcgatgtctat

SEQ ID NO: 424443 - DNA, 19 bp, Homo sapiens
  siRNA target sequence for C14orf50 (NM_172365.1,1193-1211).
gggagcctcgatgtctatt

SEQ ID NO: 424444 - DNA, 19 bp, Homo sapiens
  siRNA target sequence for C14orf50 (NM_172365.1,1195-1213).
gagcctcgatgtctattca

SEQ ID NO: 424445 - DNA, 19 bp, Homo sapiens
  siRNA target sequence for C14orf50 (NM_172365.1,1315-1333).
ctggacttggtcatgaaaa

SEQ ID NO: 424446 - DNA, 19 bp, Homo sapiens
  siRNA target sequence for FBXO16 (NM_172366.2,127-145).
cagatggtcccaaaatgca

SEQ ID NO: 424447 - DNA, 19 bp, Homo sapiens
  siRNA target sequence for FBXO16 (NM_172366.2,133-151).
gtcccaaaatgcagacaaa

SEQ ID NO: 424448 - DNA, 19 bp, Homo sapiens
  siRNA target sequence for FBXO16 (NM_172366.2,192-210).
gaccgggtatttgaagaaa

SEQ ID NO: 424449 - DNA, 19 bp, Homo sapiens
  siRNA target sequence for FBXO16 (NM_172366.2,194-212).
ccgggtatttgaagaaaga

SEQ ID NO: 424450 - DNA, 19 bp, Homo sapiens
  siRNA target sequence for FBXO16 (NM_172366.2,245-263).
gacagactctcaaagaaga

SEQ ID NO: 424451 - DNA, 19 bp, Homo sapiens
  siRNA target sequence for FBXO16 (NM_172366.2,292-310).
gctcgctgtcccagcaaaa

SEQ ID NO: 424452 - DNA, 19 bp, Homo sapiens
  siRNA target sequence for FBXO16 (NM_172366.2,311-329).
gttctgctgtcgaaagctt

SEQ ID NO: 424453 - DNA, 19 bp, Homo sapiens
  siRNA target sequence for FBXO16 (NM_172366.2,319-337).
gtcgaaagcttcaagagaa

SEQ ID NO: 424454 - DNA, 19 bp, Homo sapiens
  siRNA target sequence for FBXO16 (NM_172366.2,371-389).
gcttccaagggtgttatct

SEQ ID NO: 424455 - DNA, 19 bp, Homo sapiens
  siRNA target sequence for FBXO16 (NM_172366.2,376-394).
caagggtgttatctttata

SEQ ID NO: 424456 - DNA, 19 bp, Homo sapiens
  siRNA target sequence for FBXO16 (NM_172366.2,379-397).
gggtgttatctttatacat

SEQ ID NO: 424457 - DNA, 19 bp, Homo sapiens
  siRNA target sequence for FBXO16 (NM_172366.2,381-399).
gtgttatctttatacatct

SEQ ID NO: 424458 - DNA, 19 bp, Homo sapiens
  siRNA target sequence for FBXO16 (NM_172366.2,383-401).
gttatctttatacatcttt

SEQ ID NO: 424459 - DNA, 19 bp, Homo sapiens
  siRNA target sequence for FBXO16 (NM_172366.2,501-519).
cggtttaactggtacatca

SEQ ID NO: 424460 - DNA, 19 bp, Homo sapiens
  siRNA target sequence for FBXO16 (NM_172366.2,509-527).
ctggtacatcaatttctct

SEQ ID NO: 424461 - DNA, 19 bp, Homo sapiens
  siRNA target sequence for FBXO16 (NM_172366.2,575-593).
ggtgaaagaacttcatatt

SEQ ID NO: 424462 - DNA, 19 bp, Homo sapiens
  siRNA target sequence for FBXO16 (NM_172366.2,607-625).
cacccccaaaggatggatt

SEQ ID NO: 424463 - DNA, 19 bp, Homo sapiens
  siRNA target sequence for FBXO16 (NM_172366.2,632-650).
cgctgacgttcaactagtt

SEQ ID NO: 424464 - DNA, 19 bp, Homo sapiens
  siRNA target sequence for FBXO16 (NM_172366.2,633-651).
gctgacgttcaactagtta

SEQ ID NO: 424465 - DNA, 19 bp, Homo sapiens
  siRNA target sequence for FBXO16 (NM_172366.2,636-654).
gacgttcaactagttacaa

SEQ ID NO: 424466 - DNA, 19 bp, Homo sapiens
  siRNA target sequence for FBXO16 (NM_172366.2,642-660).
caactagttacaagcaatt

SEQ ID NO: 424467 - DNA, 19 bp, Homo sapiens
  siRNA target sequence for FBXO16 (NM_172366.2,696-714).
cggtcctcttcctctttaa

SEQ ID NO: 424468 - DNA, 19 bp, Homo sapiens
  siRNA target sequence for FBXO16 (NM_172366.2,750-768).
ccctggcgatcttctgata

SEQ ID NO: 424469 - DNA, 19 bp, Homo sapiens
  siRNA target sequence for FBXO16 (NM_172366.2,770-788).
gcacccaacagatatcatt

SEQ ID NO: 424470 - DNA, 19 bp, Homo sapiens
  siRNA target sequence for FBXO16 (NM_172366.2,778-796).
cagatatcattcgttttaa

SEQ ID NO: 424471 - DNA, 19 bp, Homo sapiens
  siRNA target sequence for FBXO16 (NM_172366.2,785-803).
cattcgttttaattaccta

SEQ ID NO: 424472 - DNA, 19 bp, Homo sapiens
  siRNA target sequence for FBXO16 (NM_172366.2,790-808).
gttttaattacctagacaa

SEQ ID NO: 424473 - DNA, 19 bp, Homo sapiens
  siRNA target sequence for FBXO16 (NM_172366.2,872-890).
cagccgacagtcacatgat

SEQ ID NO: 424474 - DNA, 19 bp, Homo sapiens
  siRNA target sequence for FBXO16 (NM_172366.2,874-892).
gccgacagtcacatgataa

SEQ ID NO: 424475 - DNA, 19 bp, Homo sapiens
  siRNA target sequence for FBXO16 (NM_172366.2,876-894).
cgacagtcacatgataaga

SEQ ID NO: 424476 - DNA, 19 bp, Homo sapiens
  siRNA target sequence for LOST1 (NM_172367.1,352-370).
gtgcagtccgagtttcctt

SEQ ID NO: 424477 - DNA, 19 bp, Homo sapiens
  siRNA target sequence for LOST1 (NM_172367.1,784-802).
gctcggctgctcagcatta

SEQ ID NO: 424478 - DNA, 19 bp, Homo sapiens
  siRNA target sequence for LOST1 (NM_172367.1,838-856).
gccgtgaccgtcaacttca

SEQ ID NO: 424479 - DNA, 19 bp, Homo sapiens
  siRNA target sequence for G30 (NM_172368.1,402-420).
gttggccaggtcttgtgaa

SEQ ID NO: 424480 - DNA, 19 bp, Homo sapiens
  siRNA target sequence for G30 (NM_172368.1,407-425).
ccaggtcttgtgaaaggta

SEQ ID NO: 424481 - DNA, 19 bp, Homo sapiens
  siRNA target sequence for G30 (NM_172368.1,494-512).
ccacattcaagggaacatt

SEQ ID NO: 424482 - DNA, 19 bp, Homo sapiens
  siRNA target sequence for IL4I1 (NM_172374.1,549-567).
gtcctgggctaaccataaa

SEQ ID NO: 424483 - DNA, 19 bp, Homo sapiens
  siRNA target sequence for APBB2 (NM_173075.1,1723-1741).
gtagtgttgcggtcaacaa

SEQ ID NO: 424484 - DNA, 19 bp, Homo sapiens
  siRNA target sequence for APBB2 (NM_173075.1,1976-1994).
gaaatgtcatgtatttcga

SEQ ID NO: 424485 - DNA, 19 bp, Homo sapiens
  siRNA target sequence for APBB2 (NM_173075.1,2117-2135).
cctcgatgtccctttgcaa

SEQ ID NO: 424486 - DNA, 19 bp, Homo sapiens
  siRNA target sequence for APBB2 (NM_173075.1,2194-2212).
gcatgttacctgtagacaa

SEQ ID NO: 424487 - DNA, 19 bp, Homo sapiens
  siRNA target sequence for APBB2 (NM_173075.1,2195-2213).
catgttacctgtagacaaa

SEQ ID NO: 424488 - DNA, 19 bp, Homo sapiens
  siRNA target sequence for APBB2 (NM_173075.1,2210-2228).
caaaccagtcggaatggat

SEQ ID NO: 424489 - DNA, 19 bp, Homo sapiens
  siRNA target sequence for APBB2 (NM_173075.1,2214-2232).
ccagtcggaatggatattt

SEQ ID NO: 424490 - DNA, 19 bp, Homo sapiens
  siRNA target sequence for APBB2 (NM_173075.1,2215-2233).
cagtcggaatggatatttt

SEQ ID NO: 424491 - DNA, 19 bp, Homo sapiens
  siRNA target sequence for APBB2 (NM_173075.1,2217-2235).
gtcggaatggatattttga

SEQ ID NO: 424492 - DNA, 19 bp, Homo sapiens
  siRNA target sequence for APBB2 (NM_173075.1,2220-2238).
ggaatggatattttgaaca

SEQ ID NO: 424493 - DNA, 19 bp, Homo sapiens
  siRNA target sequence for APBB2 (NM_173075.1,2237-2255).
cagtgccatagaaaatctt

SEQ ID NO: 424494 - DNA, 19 bp, Homo sapiens
  siRNA target sequence for APBB2 (NM_173075.1,2396-2414).
gaaggacgtccacacattt

SEQ ID NO: 424495 - DNA, 19 bp, Homo sapiens
  siRNA target sequence for APBB2 (NM_173075.1,2443-2461).
gctttgagtgccacgtttt

SEQ ID NO: 424496 - DNA, 19 bp, Homo sapiens
  siRNA target sequence for APBB2 (NM_173075.1,2507-2525).
cgcctgcatgttacgatat

SEQ ID NO: 424497 - DNA, 19 bp, Homo sapiens
  siRNA target sequence for APBB2 (NM_173075.1,2509-2527).
cctgcatgttacgatatca

SEQ ID NO: 424498 - DNA, 19 bp, Homo sapiens
  siRNA target sequence for APBB2 (NM_173075.1,2512-2530).
gcatgttacgatatcagaa

SEQ ID NO: 424499 - DNA, 19 bp, Homo sapiens
  siRNA target sequence for APBB2 (NM_173075.1,2577-2595).
ccgccagcagattcagtaa

SEQ ID NO: 424500 - DNA, 19 bp, Homo sapiens
  siRNA target sequence for APBB2 (NM_173075.1,2606-2624).
cacaaccaatgtaaaacga

SEQ ID NO: 424501 - DNA, 19 bp, Homo sapiens
  siRNA target sequence for APBB2 (NM_173075.1,2616-2634).
gtaaaacgaggggtcttat

SEQ ID NO: 424502 - DNA, 19 bp, Homo sapiens
  siRNA target sequence for APBB2 (NM_173075.1,2635-2653).
ccctcattgacactttgaa

SEQ ID NO: 424503 - DNA, 19 bp, Homo sapiens
  siRNA target sequence for SLITRK4 (NM_173078.2,437-455).
gacatatcggtggaaattt

SEQ ID NO: 424504 - DNA, 19 bp, Homo sapiens
  siRNA target sequence for SLITRK4 (NM_173078.2,468-486).
cctgcgtgtcagttgagaa

SEQ ID NO: 424505 - DNA, 19 bp, Homo sapiens
  siRNA target sequence for SLITRK4 (NM_173078.2,469-487).
ctgcgtgtcagttgagaat

SEQ ID NO: 424506 - DNA, 19 bp, Homo sapiens
  siRNA target sequence for SLITRK4 (NM_173078.2,471-489).
gcgtgtcagttgagaatgt

SEQ ID NO: 424507 - DNA, 19 bp, Homo sapiens
  siRNA target sequence for SLITRK4 (NM_173078.2,482-500).
gagaatgtgctctatgtca

SEQ ID NO: 424508 - DNA, 19 bp, Homo sapiens
  siRNA target sequence for SLITRK4 (NM_173078.2,497-515).
gtcaactgtgagaaggttt

SEQ ID NO: 424509 - DNA, 19 bp, Homo sapiens
  siRNA target sequence for SLITRK4 (NM_173078.2,538-556).
gaaaccaccttggtctaat

SEQ ID NO: 424510 - DNA, 19 bp, Homo sapiens
  siRNA target sequence for SLITRK4 (NM_173078.2,602-620).
ccaaatacattcttgaatt

SEQ ID NO: 424511 - DNA, 19 bp, Homo sapiens
  siRNA target sequence for SLITRK4 (NM_173078.2,686-704).
cttgggctcagtgcattaa

SEQ ID NO: 424512 - DNA, 19 bp, Homo sapiens
  siRNA target sequence for SLITRK4 (NM_173078.2,742-760).
ccgagctgacactttcctt

SEQ ID NO: 424513 - DNA, 19 bp, Homo sapiens
  siRNA target sequence for SLITRK4 (NM_173078.2,788-806).
gctgactacaatttaatca

SEQ ID NO: 424514 - DNA, 19 bp, Homo sapiens
  siRNA target sequence for SLITRK4 (NM_173078.2,789-807).
ctgactacaatttaatcaa

SEQ ID NO: 424515 - DNA, 19 bp, Homo sapiens
  siRNA target sequence for SLITRK4 (NM_173078.2,815-833).
gaacgaggagccttcaata

SEQ ID NO: 424516 - DNA, 19 bp, Homo sapiens
  siRNA target sequence for SLITRK4 (NM_173078.2,845-863).
ctgaaagttctcattctta

SEQ ID NO: 424517 - DNA, 19 bp, Homo sapiens
  siRNA target sequence for SLITRK4 (NM_173078.2,916-934).
gacccatctggatatacga

SEQ ID NO: 424518 - DNA, 19 bp, Homo sapiens
  siRNA target sequence for SLITRK4 (NM_173078.2,984-1002).
gccgtgtcgttgaattgca

SEQ ID NO: 424519 - DNA, 19 bp, Homo sapiens
  siRNA target sequence for SLITRK4 (NM_173078.2,985-1003).
ccgtgtcgttgaattgcaa

SEQ ID NO: 424520 - DNA, 19 bp, Homo sapiens
  siRNA target sequence for SLITRK4 (NM_173078.2,995-1013).
gaattgcaactggaagata

SEQ ID NO: 424521 - DNA, 19 bp, Homo sapiens
  siRNA target sequence for SLITRK4 (NM_173078.2,1061-1079).
gagaacatgccatataaca

SEQ ID NO: 424522 - DNA, 19 bp, Homo sapiens
  siRNA target sequence for SLITRK4 (NM_173078.2,1063-1081).
gaacatgccatataacatt

SEQ ID NO: 424523 - DNA, 19 bp, Homo sapiens
  siRNA target sequence for SLITRK4 (NM_173078.2,1170-1188).
gcaccggcagtgattttga

SEQ ID NO: 424524 - DNA, 19 bp, Homo sapiens
  siRNA target sequence for SLITRK4 (NM_173078.2,1248-1266).
ctacccaaacatctttaca

SEQ ID NO: 424525 - DNA, 19 bp, Homo sapiens
  siRNA target sequence for SLITRK4 (NM_173078.2,1337-1355).
ctctccaaccgcaatctca

SEQ ID NO: 424526 - DNA, 19 bp, Homo sapiens
  siRNA target sequence for SLITRK4 (NM_173078.2,1406-1424).
gcaccttgcttctgcaaaa

SEQ ID NO: 424527 - DNA, 19 bp, Homo sapiens
  siRNA target sequence for SLITRK4 (NM_173078.2,1420-1438).
caaaacacacccttcagat

SEQ ID NO: 424528 - DNA, 19 bp, Homo sapiens
  siRNA target sequence for SLITRK4 (NM_173078.2,1477-1495).
gtctatgtctgaactgata

SEQ ID NO: 424529 - DNA, 19 bp, Homo sapiens
  siRNA target sequence for SLITRK4 (NM_173078.2,1487-1505).
gaactgataccgaaacctt

SEQ ID NO: 424530 - DNA, 19 bp, Homo sapiens
  siRNA target sequence for SLITRK4 (NM_173078.2,1490-1508).
ctgataccgaaacctttaa

SEQ ID NO: 424531 - DNA, 19 bp, Homo sapiens
  siRNA target sequence for SLITRK4 (NM_173078.2,1492-1510).
gataccgaaacctttaaat

SEQ ID NO: 424532 - DNA, 19 bp, Homo sapiens
  siRNA target sequence for SLITRK4 (NM_173078.2,1580-1598).
ggactggatttgcttcatt

SEQ ID NO: 424533 - DNA, 19 bp, Homo sapiens
  siRNA target sequence for SLITRK4 (NM_173078.2,1606-1624).
caatcaaattacagtgatt

SEQ ID NO: 424534 - DNA, 19 bp, Homo sapiens
  siRNA target sequence for SLITRK4 (NM_173078.2,1621-1639).
gattaagggagacgtattt

SEQ ID NO: 424535 - DNA, 19 bp, Homo sapiens
  siRNA target sequence for SLITRK4 (NM_173078.2,1631-1649).
gacgtatttcacaatctca

SEQ ID NO: 424536 - DNA, 19 bp, Homo sapiens
  siRNA target sequence for SLITRK4 (NM_173078.2,1690-1708).
gagactctatcctgaaata

SEQ ID NO: 424537 - DNA, 19 bp, Homo sapiens
  siRNA target sequence for SLITRK4 (NM_173078.2,1836-1854).
gcctgcctgtttacatctt

SEQ ID NO: 424538 - DNA, 19 bp, Homo sapiens
  siRNA target sequence for SLITRK4 (NM_173078.2,1837-1855).
cctgcctgtttacatcttt

SEQ ID NO: 424539 - DNA, 19 bp, Homo sapiens
  siRNA target sequence for SLITRK4 (NM_173078.2,1922-1940).
gtccttgatcagttgcaat

SEQ ID NO: 424540 - DNA, 19 bp, Homo sapiens
  siRNA target sequence for SLITRK4 (NM_173078.2,1936-1954).
gcaatctcttacacagatt

SEQ ID NO: 424541 - DNA, 19 bp, Homo sapiens
  siRNA target sequence for SLITRK4 (NM_173078.2,1941-1959).
ctcttacacagattgactt

SEQ ID NO: 424542 - DNA, 19 bp, Homo sapiens
  siRNA target sequence for SLITRK4 (NM_173078.2,2020-2038).
gttgagcgacgggattgtt

SEQ ID NO: 424543 - DNA, 19 bp, Homo sapiens
  siRNA target sequence for SLITRK4 (NM_173078.2,2025-2043).
gcgacgggattgttgtgaa

SEQ ID NO: 424544 - DNA, 19 bp, Homo sapiens
  siRNA target sequence for SLITRK4 (NM_173078.2,2026-2044).
cgacgggattgttgtgaaa

SEQ ID NO: 424545 - DNA, 19 bp, Homo sapiens
  siRNA target sequence for SLITRK4 (NM_173078.2,2029-2047).
cgggattgttgtgaaagaa

SEQ ID NO: 424546 - DNA, 19 bp, Homo sapiens
  siRNA target sequence for SLITRK4 (NM_173078.2,2055-2073).
gtgagacgcctgttcagtt

SEQ ID NO: 424547 - DNA, 19 bp, Homo sapiens
  siRNA target sequence for SLITRK4 (NM_173078.2,2134-2152).
gccgtctgcaccattcaca

SEQ ID NO: 424548 - DNA, 19 bp, Homo sapiens
  siRNA target sequence for SLITRK4 (NM_173078.2,2156-2174).
cctgcacctgccattacat

SEQ ID NO: 424549 - DNA, 19 bp, Homo sapiens
  siRNA target sequence for SLITRK4 (NM_173078.2,2157-2175).
ctgcacctgccattacatt

SEQ ID NO: 424550 - DNA, 19 bp, Homo sapiens
  siRNA target sequence for SLITRK4 (NM_173078.2,2183-2201).
cctttgggtcccattcgaa

SEQ ID NO: 424551 - DNA, 19 bp, Homo sapiens
  siRNA target sequence for SLITRK4 (NM_173078.2,2214-2232).
ggccagtgcctctgtctat

SEQ ID NO: 424552 - DNA, 19 bp, Homo sapiens
  siRNA target sequence for SLITRK4 (NM_173078.2,2215-2233).
gccagtgcctctgtctatt

SEQ ID NO: 424553 - DNA, 19 bp, Homo sapiens
  siRNA target sequence for SLITRK4 (NM_173078.2,2260-2278).
cattttaacggtgtttgtt

SEQ ID NO: 424554 - DNA, 19 bp, Homo sapiens
  siRNA target sequence for SLITRK4 (NM_173078.2,2300-2318).
gtcctgcgacgcaacaaga

SEQ ID NO: 424555 - DNA, 19 bp, Homo sapiens
  siRNA target sequence for SLITRK4 (NM_173078.2,2467-2485).
ccacacttgtggcttgaaa

SEQ ID NO: 424556 - DNA, 19 bp, Homo sapiens
  siRNA target sequence for SLITRK4 (NM_173078.2,2490-2508).
cagaaactgggttcatgtt

SEQ ID NO: 424557 - DNA, 19 bp, Homo sapiens
  siRNA target sequence for SLITRK4 (NM_173078.2,2520-2538).
caggacagaaagttgttat

SEQ ID NO: 424558 - DNA, 19 bp, Homo sapiens
  siRNA target sequence for SLITRK4 (NM_173078.2,2548-2566).
ggccgacaaggagaaagat

SEQ ID NO: 424559 - DNA, 19 bp, Homo sapiens
  siRNA target sequence for SLITRK4 (NM_173078.2,2549-2567).
gccgacaaggagaaagatt

SEQ ID NO: 424560 - DNA, 19 bp, Homo sapiens
  siRNA target sequence for SLITRK4 (NM_173078.2,2590-2608).
gagactgagcacaattgat

SEQ ID NO: 424561 - DNA, 19 bp, Homo sapiens
  siRNA target sequence for SLITRK4 (NM_173078.2,2592-2610).
gactgagcacaattgatga

SEQ ID NO: 424562 - DNA, 19 bp, Homo sapiens
  siRNA target sequence for SLITRK4 (NM_173078.2,2632-2650).
cagggattccaatgtgttt

SEQ ID NO: 424563 - DNA, 19 bp, Homo sapiens
  siRNA target sequence for SLITRK4 (NM_173078.2,2635-2653).
ggattccaatgtgtttatt

SEQ ID NO: 424564 - DNA, 19 bp, Homo sapiens
  siRNA target sequence for SLITRK4 (NM_173078.2,2693-2711).
ggtgtcagtggctttgaga

SEQ ID NO: 424565 - DNA, 19 bp, Homo sapiens
  siRNA target sequence for SLITRK4 (NM_173078.2,2713-2731).
ccgctatccagaaaaacaa

SEQ ID NO: 424566 - DNA, 19 bp, Homo sapiens
  siRNA target sequence for SLITRK4 (NM_173078.2,2762-2780).
ggtggcaaccacagtaaaa

SEQ ID NO: 424567 - DNA, 19 bp, Homo sapiens
  siRNA target sequence for SLITRK4 (NM_173078.2,2763-2781).
gtggcaaccacagtaaaat

SEQ ID NO: 424568 - DNA, 19 bp, Homo sapiens
  siRNA target sequence for SLITRK4 (NM_173078.2,2767-2785).
caaccacagtaaaattgtt

SEQ ID NO: 424569 - DNA, 19 bp, Homo sapiens
  siRNA target sequence for DKFZp761H0421 (NM_173079.1,167-185).
gggcaaccgcgtttttaga

SEQ ID NO: 424570 - DNA, 19 bp, Homo sapiens
  siRNA target sequence for DKFZp761H0421 (NM_173079.1,168-186).
ggcaaccgcgtttttagaa

SEQ ID NO: 424571 - DNA, 19 bp, Homo sapiens
  siRNA target sequence for DKFZp761H0421 (NM_173079.1,170-188).
caaccgcgtttttagaaga

SEQ ID NO: 424572 - DNA, 19 bp, Homo sapiens
  siRNA target sequence for DKFZp761H0421 (NM_173079.1,413-431).
gccctcacgtcctaggtta

SEQ ID NO: 424573 - DNA, 19 bp, Homo sapiens
  siRNA target sequence for DKFZp761H0421 (NM_173079.1,600-618).
ggaaacgtttgcctatcaa

SEQ ID NO: 424574 - DNA, 19 bp, Homo sapiens
  siRNA target sequence for DKFZp761H0421 (NM_173079.1,612-630).
ctatcaagagggcagttat

SEQ ID NO: 424575 - DNA, 19 bp, Homo sapiens
  siRNA target sequence for DKFZp761H0421 (NM_173079.1,643-661).
cagtccgtggtgttggaaa

SEQ ID NO: 424576 - DNA, 19 bp, Homo sapiens
  siRNA target sequence for DKFZp761H0421 (NM_173079.1,662-680).
gacagcgggtgatcataga

SEQ ID NO: 424577 - DNA, 19 bp, Homo sapiens
  siRNA target sequence for DKFZp761H0421 (NM_173079.1,668-686).
gggtgatcatagatgagtt

SEQ ID NO: 424578 - DNA, 19 bp, Homo sapiens
  siRNA target sequence for DKFZp761H0421 (NM_173079.1,669-687).
ggtgatcatagatgagtta

SEQ ID NO: 424579 - DNA, 19 bp, Homo sapiens
  siRNA target sequence for DKFZp761H0421 (NM_173079.1,670-688).
gtgatcatagatgagttaa

SEQ ID NO: 424580 - DNA, 19 bp, Homo sapiens
  siRNA target sequence for DKFZp761H0421 (NM_173079.1,709-727).
ctgaatgaggacatcagtt

SEQ ID NO: 424581 - DNA, 19 bp, Homo sapiens
  siRNA target sequence for DKFZp761H0421 (NM_173079.1,744-762).
gcttcgtcagcgtgtagat

SEQ ID NO: 424582 - DNA, 19 bp, Homo sapiens
  siRNA target sequence for DKFZp761H0421 (NM_173079.1,783-801).
caacccagcccgagtcaaa

SEQ ID NO: 424583 - DNA, 19 bp, Homo sapiens
  siRNA target sequence for DKFZp761H0421 (NM_173079.1,786-804).
cccagcccgagtcaaagaa

SEQ ID NO: 424584 - DNA, 19 bp, Homo sapiens
  siRNA target sequence for DKFZp761H0421 (NM_173079.1,788-806).
cagcccgagtcaaagaaca

SEQ ID NO: 424585 - DNA, 19 bp, Homo sapiens
  siRNA target sequence for DKFZp761H0421 (NM_173079.1,807-825).
gttggttgagcaactgaaa

SEQ ID NO: 424586 - DNA, 19 bp, Homo sapiens
  siRNA target sequence for DKFZp761H0421 (NM_173079.1,834-852).
ccgagaccttgagatgttt

SEQ ID NO: 424587 - DNA, 19 bp, Homo sapiens
  siRNA target sequence for DKFZp761H0421 (NM_173079.1,835-853).
cgagaccttgagatgttta

SEQ ID NO: 424588 - DNA, 19 bp, Homo sapiens
  siRNA target sequence for DKFZp761H0421 (NM_173079.1,921-939).
cggtgggaagacaggaaat

SEQ ID NO: 424589 - DNA, 19 bp, Homo sapiens
  siRNA target sequence for DKFZp761H0421 (NM_173079.1,1050-1068).
ggccgtgctccagatcttt

SEQ ID NO: 424590 - DNA, 19 bp, Homo sapiens
  siRNA target sequence for DKFZp761H0421 (NM_173079.1,1366-1384).
gttatggctcctattgctt

SEQ ID NO: 424591 - DNA, 19 bp, Homo sapiens
  siRNA target sequence for DKFZp761H0421 (NM_173079.1,1425-1443).
cccgtgggagctctttgta

SEQ ID NO: 424592 - DNA, 19 bp, Homo sapiens
  siRNA target sequence for DKFZp761H0421 (NM_173079.1,1537-1555).
gttgtcacccccaaacaga

SEQ ID NO: 424593 - DNA, 19 bp, Homo sapiens
  siRNA target sequence for DKFZp761H0421 (NM_173079.1,1606-1624).
cgcagtgcagactcagaat

SEQ ID NO: 424594 - DNA, 19 bp, Homo sapiens
  siRNA target sequence for DKFZp761H0421 (NM_173079.1,1819-1837).
gtgcgccagctcaaaaaca

SEQ ID NO: 424595 - DNA, 19 bp, Homo sapiens
  siRNA target sequence for DKFZp761H0421 (NM_173079.1,1822-1840).
cgccagctcaaaaacatca

SEQ ID NO: 424596 - DNA, 19 bp, Homo sapiens
  siRNA target sequence for DKFZp761H0421 (NM_173079.1,1823-1841).
gccagctcaaaaacatcaa

SEQ ID NO: 424597 - DNA, 19 bp, Homo sapiens
  siRNA target sequence for DKFZp761H0421 (NM_173079.1,1827-1845).
gctcaaaaacatcaaagat

SEQ ID NO: 424598 - DNA, 19 bp, Homo sapiens
  siRNA target sequence for SPRR4 (NM_173080.1,145-163).
cagccaccccctgttaaat

SEQ ID NO: 424599 - DNA, 19 bp, Homo sapiens
  siRNA target sequence for SPRR4 (NM_173080.1,147-165).
gccaccccctgttaaatgt

SEQ ID NO: 424600 - DNA, 19 bp, Homo sapiens
  siRNA target sequence for SPRR4 (NM_173080.1,149-167).
caccccctgttaaatgtca

SEQ ID NO: 424601 - DNA, 19 bp, Homo sapiens
  siRNA target sequence for SPRR4 (NM_173080.1,173-191).
catgtgcacccaaaaccaa

SEQ ID NO: 424602 - DNA, 19 bp, Homo sapiens
  siRNA target sequence for FLJ32827 (NM_173081.1,120-138).
gatgtgtttgacccattaa

SEQ ID NO: 424603 - DNA, 19 bp, Homo sapiens
  siRNA target sequence for FLJ32827 (NM_173081.1,125-143).
gtttgacccattaatgatt

SEQ ID NO: 424604 - DNA, 19 bp, Homo sapiens
  siRNA target sequence for FLJ32827 (NM_173081.1,156-174).
gcagcaactgtggtgttaa

SEQ ID NO: 424605 - DNA, 19 bp, Homo sapiens
  siRNA target sequence for FLJ32827 (NM_173081.1,157-175).
cagcaactgtggtgttaat

SEQ ID NO: 424606 - DNA, 19 bp, Homo sapiens
  siRNA target sequence for FLJ32827 (NM_173081.1,160-178).
caactgtggtgttaatgct

SEQ ID NO: 424607 - DNA, 19 bp, Homo sapiens
  siRNA target sequence for FLJ32827 (NM_173081.1,167-185).
ggtgttaatgcttaattct

SEQ ID NO: 424608 - DNA, 19 bp, Homo sapiens
  siRNA target sequence for FLJ32827 (NM_173081.1,219-237).
gccatttataaatttgctt

SEQ ID NO: 424609 - DNA, 19 bp, Homo sapiens
  siRNA target sequence for FLJ32827 (NM_173081.1,276-294).
ggagctgtggaacctttaa

SEQ ID NO: 424610 - DNA, 19 bp, Homo sapiens
  siRNA target sequence for FLJ32827 (NM_173081.1,280-298).
ctgtggaacctttaactaa

SEQ ID NO: 424611 - DNA, 19 bp, Homo sapiens
  siRNA target sequence for FLJ32827 (NM_173081.1,284-302).
ggaacctttaactaagcta

SEQ ID NO: 424612 - DNA, 19 bp, Homo sapiens
  siRNA target sequence for FLJ32827 (NM_173081.1,307-325).
cccatgaagacaaaattgt

SEQ ID NO: 424613 - DNA, 19 bp, Homo sapiens
  siRNA target sequence for FLJ32827 (NM_173081.1,337-355).
ctactatgatatttggaat

SEQ ID NO: 424614 - DNA, 19 bp, Homo sapiens
  siRNA target sequence for FLJ32827 (NM_173081.1,351-369).
ggaatcctggcttctaata

SEQ ID NO: 424615 - DNA, 19 bp, Homo sapiens
  siRNA target sequence for FLJ32827 (NM_173081.1,356-374).
cctggcttctaataatgat

SEQ ID NO: 424616 - DNA, 19 bp, Homo sapiens
  siRNA target sequence for FLJ32827 (NM_173081.1,391-409).
gggagttagatgtcatgaa

SEQ ID NO: 424617 - DNA, 19 bp, Homo sapiens
  siRNA target sequence for FLJ32827 (NM_173081.1,425-443).
gctcgctccagaagaagaa

SEQ ID NO: 424618 - DNA, 19 bp, Homo sapiens
  siRNA target sequence for FLJ32827 (NM_173081.1,453-471).
catgagtttgctagtcttt

SEQ ID NO: 424619 - DNA, 19 bp, Homo sapiens
  siRNA target sequence for FLJ32827 (NM_173081.1,463-481).
ctagtctttgtctagcaaa

SEQ ID NO: 424620 - DNA, 19 bp, Homo sapiens
  siRNA target sequence for FLJ32827 (NM_173081.1,559-577).
gccctgacccggatgtaaa

SEQ ID NO: 424621 - DNA, 19 bp, Homo sapiens
  siRNA target sequence for FLJ32827 (NM_173081.1,561-579).
cctgacccggatgtaaaga

SEQ ID NO: 424622 - DNA, 19 bp, Homo sapiens
  siRNA target sequence for FLJ32827 (NM_173081.1,570-588).
gatgtaaagaagaactcta

SEQ ID NO: 424623 - DNA, 19 bp, Homo sapiens
  siRNA target sequence for FLJ32827 (NM_173081.1,623-641).
gtgtcgagctaaacttcaa

SEQ ID NO: 424624 - DNA, 19 bp, Homo sapiens
  siRNA target sequence for FLJ32827 (NM_173081.1,625-643).
gtcgagctaaacttcaaga

SEQ ID NO: 424625 - DNA, 19 bp, Homo sapiens
  siRNA target sequence for FLJ32827 (NM_173081.1,628-646).
gagctaaacttcaagaact

SEQ ID NO: 424626 - DNA, 19 bp, Homo sapiens
  siRNA target sequence for FLJ32827 (NM_173081.1,652-670).
caatacctcctatcttaga

SEQ ID NO: 424627 - DNA, 19 bp, Homo sapiens
  siRNA target sequence for FLJ32827 (NM_173081.1,680-698).
gtcagaatatccagtgatt

SEQ ID NO: 424628 - DNA, 19 bp, Homo sapiens
  siRNA target sequence for FLJ32827 (NM_173081.1,699-717).
cagttgttggctctcaaaa

SEQ ID NO: 424629 - DNA, 19 bp, Homo sapiens
  siRNA target sequence for FLJ32827 (NM_173081.1,718-736).
ccttaggtgttattgcaaa

SEQ ID NO: 424630 - DNA, 19 bp, Homo sapiens
  siRNA target sequence for FLJ32827 (NM_173081.1,723-741).
ggtgttattgcaaatgata

SEQ ID NO: 424631 - DNA, 19 bp, Homo sapiens
  siRNA target sequence for FLJ32827 (NM_173081.1,743-761).
ggagtctcgaacaatgcta

SEQ ID NO: 424632 - DNA, 19 bp, Homo sapiens
  siRNA target sequence for FLJ32827 (NM_173081.1,744-762).
gagtctcgaacaatgctaa

SEQ ID NO: 424633 - DNA, 19 bp, Homo sapiens
  siRNA target sequence for FLJ32827 (NM_173081.1,748-766).
ctcgaacaatgctaagaga

SEQ ID NO: 424634 - DNA, 19 bp, Homo sapiens
  siRNA target sequence for FLJ32827 (NM_173081.1,754-772).
caatgctaagagacaatca

SEQ ID NO: 424635 - DNA, 19 bp, Homo sapiens
  siRNA target sequence for FLJ32827 (NM_173081.1,774-792).
ggattggaccatcttatta

SEQ ID NO: 424636 - DNA, 19 bp, Homo sapiens
  siRNA target sequence for FLJ32827 (NM_173081.1,775-793).
gattggaccatcttattaa

SEQ ID NO: 424637 - DNA, 19 bp, Homo sapiens
  siRNA target sequence for FLJ32827 (NM_173081.1,794-812).
gatcctagaaactaaggaa

SEQ ID NO: 424638 - DNA, 19 bp, Homo sapiens
  siRNA target sequence for FLJ32827 (NM_173081.1,810-828).
gaattgaatgaccttcata

SEQ ID NO: 424639 - DNA, 19 bp, Homo sapiens
  siRNA target sequence for FLJ32827 (NM_173081.1,815-833).
gaatgaccttcatatagaa

SEQ ID NO: 424640 - DNA, 19 bp, Homo sapiens
  siRNA target sequence for FLJ32827 (NM_173081.1,850-868).
ccaattgccttgaagacat

SEQ ID NO: 424641 - DNA, 19 bp, Homo sapiens
  siRNA target sequence for FLJ32827 (NM_173081.1,1080-1098).
gctgcttcccaagctattt

SEQ ID NO: 424642 - DNA, 19 bp, Homo sapiens
  siRNA target sequence for FLJ32827 (NM_173081.1,1157-1175).
gttaattcagttgctaaaa

SEQ ID NO: 424643 - DNA, 19 bp, Homo sapiens
  siRNA target sequence for FLJ32827 (NM_173081.1,1166-1184).
gttgctaaaaagtgacaat

SEQ ID NO: 424644 - DNA, 19 bp, Homo sapiens
  siRNA target sequence for FLJ32827 (NM_173081.1,1209-1227).
ctagccctggcaaacctaa

SEQ ID NO: 424645 - DNA, 19 bp, Homo sapiens
  siRNA target sequence for FLJ32827 (NM_173081.1,1229-1247).
cacttgcaaccctgctaat

SEQ ID NO: 424646 - DNA, 19 bp, Homo sapiens
  siRNA target sequence for FLJ32827 (NM_173081.1,1267-1285).
ctgatggtattgatccatt

SEQ ID NO: 424647 - DNA, 19 bp, Homo sapiens
  siRNA target sequence for FLJ32827 (NM_173081.1,1269-1287).
gatggtattgatccattaa

SEQ ID NO: 424648 - DNA, 19 bp, Homo sapiens
  siRNA target sequence for FLJ32827 (NM_173081.1,1272-1290).
ggtattgatccattaataa

SEQ ID NO: 424649 - DNA, 19 bp, Homo sapiens
  siRNA target sequence for FLJ32827 (NM_173081.1,1292-1310).
cctcctgtctagtaaacga

SEQ ID NO: 424650 - DNA, 19 bp, Homo sapiens
  siRNA target sequence for FLJ32827 (NM_173081.1,1323-1341).
gccaacgctgctacagtat

SEQ ID NO: 424651 - DNA, 19 bp, Homo sapiens
  siRNA target sequence for FLJ32827 (NM_173081.1,1324-1342).
ccaacgctgctacagtatt

SEQ ID NO: 424652 - DNA, 19 bp, Homo sapiens
  siRNA target sequence for FLJ32827 (NM_173081.1,1325-1343).
caacgctgctacagtatta

SEQ ID NO: 424653 - DNA, 19 bp, Homo sapiens
  siRNA target sequence for FLJ32827 (NM_173081.1,1328-1346).
cgctgctacagtattaaca

SEQ ID NO: 424654 - DNA, 19 bp, Homo sapiens
  siRNA target sequence for FLJ32827 (NM_173081.1,1329-1347).
gctgctacagtattaacaa

SEQ ID NO: 424655 - DNA, 19 bp, Homo sapiens
  siRNA target sequence for FLJ32827 (NM_173081.1,1332-1350).
gctacagtattaacaaaca

SEQ ID NO: 424656 - DNA, 19 bp, Homo sapiens
  siRNA target sequence for FLJ32827 (NM_173081.1,1333-1351).
ctacagtattaacaaacat

SEQ ID NO: 424657 - DNA, 19 bp, Homo sapiens
  siRNA target sequence for FLJ32827 (NM_173081.1,1370-1388).
gcgcctgaacatacagaat

SEQ ID NO: 424658 - DNA, 19 bp, Homo sapiens
  siRNA target sequence for FLJ32827 (NM_173081.1,1372-1390).
gcctgaacatacagaatca

SEQ ID NO: 424659 - DNA, 19 bp, Homo sapiens
  siRNA target sequence for FLJ32827 (NM_173081.1,1491-1509).
gcccggactgagttaagaa

SEQ ID NO: 424660 - DNA, 19 bp, Homo sapiens
  siRNA target sequence for FLJ32827 (NM_173081.1,1492-1510).
cccggactgagttaagaaa

SEQ ID NO: 424661 - DNA, 19 bp, Homo sapiens
  siRNA target sequence for FLJ32827 (NM_173081.1,1493-1511).
ccggactgagttaagaaat

SEQ ID NO: 424662 - DNA, 19 bp, Homo sapiens
  siRNA target sequence for FLJ32827 (NM_173081.1,1494-1512).
cggactgagttaagaaatt

SEQ ID NO: 424663 - DNA, 19 bp, Homo sapiens
  siRNA target sequence for FLJ32827 (NM_173081.1,1541-1559).
gctacgctccaagaatgat

SEQ ID NO: 424664 - DNA, 19 bp, Homo sapiens
  siRNA target sequence for FLJ32827 (NM_173081.1,1608-1626).
gagctgacggccaatgaat

SEQ ID NO: 424665 - DNA, 19 bp, Homo sapiens
  siRNA target sequence for FLJ32827 (NM_173081.1,1610-1628).
gctgacggccaatgaatta

SEQ ID NO: 424666 - DNA, 19 bp, Homo sapiens
  siRNA target sequence for FLJ32827 (NM_173081.1,1611-1629).
ctgacggccaatgaattat

SEQ ID NO: 424667 - DNA, 19 bp, Homo sapiens
  siRNA target sequence for FLJ32827 (NM_173081.1,1637-1655).
cggggctttagatatcctt

SEQ ID NO: 424668 - DNA, 19 bp, Homo sapiens
  siRNA target sequence for FLJ32827 (NM_173081.1,1652-1670).
ccttgaagaagttaacgta

SEQ ID NO: 424669 - DNA, 19 bp, Homo sapiens
  siRNA target sequence for FLJ32827 (NM_173081.1,1653-1671).
cttgaagaagttaacgtat

SEQ ID NO: 424670 - DNA, 19 bp, Homo sapiens
  siRNA target sequence for FLJ32827 (NM_173081.1,1698-1716).
gaggcagcttataataagt

SEQ ID NO: 424671 - DNA, 19 bp, Homo sapiens
  siRNA target sequence for FLJ32827 (NM_173081.1,1715-1733).
gttgctcaataacaatctt

SEQ ID NO: 424672 - DNA, 19 bp, Homo sapiens
  siRNA target sequence for FLJ32827 (NM_173081.1,1755-1773).
ggctatttgtcatcaagta

SEQ ID NO: 424673 - DNA, 19 bp, Homo sapiens
  siRNA target sequence for FLJ32827 (NM_173081.1,1756-1774).
gctatttgtcatcaagtaa

SEQ ID NO: 424674 - DNA, 19 bp, Homo sapiens
  siRNA target sequence for FLJ32827 (NM_173081.1,1768-1786).
caagtaacataattaacga

SEQ ID NO: 424675 - DNA, 19 bp, Homo sapiens
  siRNA target sequence for FLJ32827 (NM_173081.1,1868-1886).
cctacgggctgtactctta

SEQ ID NO: 424676 - DNA, 19 bp, Homo sapiens
  siRNA target sequence for FLJ32827 (NM_173081.1,1869-1887).
ctacgggctgtactcttaa

SEQ ID NO: 424677 - DNA, 19 bp, Homo sapiens
  siRNA target sequence for FLJ32827 (NM_173081.1,1872-1890).
cgggctgtactcttaatca

SEQ ID NO: 424678 - DNA, 19 bp, Homo sapiens
  siRNA target sequence for FLJ32827 (NM_173081.1,1873-1891).
gggctgtactcttaatcaa

SEQ ID NO: 424679 - DNA, 19 bp, Homo sapiens
  siRNA target sequence for FLJ32827 (NM_173081.1,1889-1907).
caacagtaaatcttacgtt

SEQ ID NO: 424680 - DNA, 19 bp, Homo sapiens
  siRNA target sequence for FLJ32827 (NM_173081.1,1904-1922).
cgtttctccaccttcatct

SEQ ID NO: 424681 - DNA, 19 bp, Homo sapiens
  siRNA target sequence for FLJ32827 (NM_173081.1,1905-1923).
gtttctccaccttcatcta

SEQ ID NO: 424682 - DNA, 19 bp, Homo sapiens
  siRNA target sequence for FLJ32827 (NM_173081.1,1975-1993).
ccttaagaagatcaagtaa

SEQ ID NO: 424683 - DNA, 19 bp, Homo sapiens
  siRNA target sequence for FLJ32827 (NM_173081.1,2068-2086).
cttctggacgaaatactgt

SEQ ID NO: 424684 - DNA, 19 bp, Homo sapiens
  siRNA target sequence for FLJ32827 (NM_173081.1,2093-2111).
caaaagcgccaccaaagaa

SEQ ID NO: 424685 - DNA, 19 bp, Homo sapiens
  siRNA target sequence for FLJ32827 (NM_173081.1,2100-2118).
gccaccaaagaaaaaggat

SEQ ID NO: 424686 - DNA, 19 bp, Homo sapiens
  siRNA target sequence for FLJ32827 (NM_173081.1,2171-2189).
ggttatggtggtaccaaaa

SEQ ID NO: 424687 - DNA, 19 bp, Homo sapiens
  siRNA target sequence for FLJ32827 (NM_173081.1,2172-2190).
gttatggtggtaccaaaat

SEQ ID NO: 424688 - DNA, 19 bp, Homo sapiens
  siRNA target sequence for FLJ32827 (NM_173081.1,2227-2245).
ctccctctgaccctgattt

SEQ ID NO: 424689 - DNA, 19 bp, Homo sapiens
  siRNA target sequence for FLJ32827 (NM_173081.1,2237-2255).
ccctgatttctctatgtat

SEQ ID NO: 424690 - DNA, 19 bp, Homo sapiens
  siRNA target sequence for FLJ32827 (NM_173081.1,2256-2274).
gtgtatgaggtgaccaaat

SEQ ID NO: 424691 - DNA, 19 bp, Homo sapiens
  siRNA target sequence for FLJ32827 (NM_173081.1,2258-2276).
gtatgaggtgaccaaatca

SEQ ID NO: 424692 - DNA, 19 bp, Homo sapiens
  siRNA target sequence for FLJ32827 (NM_173081.1,2280-2298).
ctgccaataaccaatatta

SEQ ID NO: 424693 - DNA, 19 bp, Homo sapiens
  siRNA target sequence for FLJ32827 (NM_173081.1,2290-2308).
ccaatattaaggaacagat

SEQ ID NO: 424694 - DNA, 19 bp, Homo sapiens
  siRNA target sequence for FLJ32827 (NM_173081.1,2291-2309).
caatattaaggaacagatt

SEQ ID NO: 424695 - DNA, 19 bp, Homo sapiens
  siRNA target sequence for FLJ32827 (NM_173081.1,2312-2330).
ggatctggcaaagtatgta

SEQ ID NO: 424696 - DNA, 19 bp, Homo sapiens
  siRNA target sequence for FLJ32827 (NM_173081.1,2344-2362).
gtggtaagattccaaaaga

SEQ ID NO: 424697 - DNA, 19 bp, Homo sapiens
  siRNA target sequence for FLJ32827 (NM_173081.1,2391-2409).
cacataagtgaactgaaat

SEQ ID NO: 424698 - DNA, 19 bp, Homo sapiens
  siRNA target sequence for FLJ32827 (NM_173081.1,2434-2452).
cgattggacatgtcaaaaa

SEQ ID NO: 424699 - DNA, 19 bp, Homo sapiens
  siRNA target sequence for FLJ32827 (NM_173081.1,2496-2514).
gatagaattggcattggtt

SEQ ID NO: 424700 - DNA, 19 bp, Homo sapiens
  siRNA target sequence for FLJ32827 (NM_173081.1,2537-2555).
cggtagagcgtggaatgaa

SEQ ID NO: 424701 - DNA, 19 bp, Homo sapiens
  siRNA target sequence for FLJ32827 (NM_173081.1,2539-2557).
gtagagcgtggaatgaagt

SEQ ID NO: 424702 - DNA, 19 bp, Homo sapiens
  siRNA target sequence for FLJ32827 (NM_173081.1,2542-2560).
gagcgtggaatgaagtcat

SEQ ID NO: 424703 - DNA, 19 bp, Homo sapiens
  siRNA target sequence for FLJ32827 (NM_173081.1,2573-2591).
ctctcggaagggagtgatt

SEQ ID NO: 424704 - DNA, 19 bp, Homo sapiens
  siRNA target sequence for FLJ32827 (NM_173081.1,2641-2659).
caggtggactgatgaagtt

SEQ ID NO: 424705 - DNA, 19 bp, Homo sapiens
  siRNA target sequence for FLJ32827 (NM_173081.1,2646-2664).
ggactgatgaagttgagaa

SEQ ID NO: 424706 - DNA, 19 bp, Homo sapiens
  siRNA target sequence for FLJ32827 (NM_173081.1,2665-2683).
gtcgagaggctgatcttta

SEQ ID NO: 424707 - DNA, 19 bp, Homo sapiens
  siRNA target sequence for FLJ32827 (NM_173081.1,2667-2685).
cgagaggctgatctttaca

SEQ ID NO: 424708 - DNA, 19 bp, Homo sapiens
  siRNA target sequence for FLJ32827 (NM_173081.1,2673-2691).
gctgatctttacagattca

SEQ ID NO: 424709 - DNA, 19 bp, Homo sapiens
  siRNA target sequence for FLJ32827 (NM_173081.1,2674-2692).
ctgatctttacagattcat

SEQ ID NO: 424710 - DNA, 19 bp, Homo sapiens
  siRNA target sequence for FLJ32827 (NM_173081.1,2676-2694).
gatctttacagattcattt

SEQ ID NO: 424711 - DNA, 19 bp, Homo sapiens
  siRNA target sequence for TGS (NM_173083.2,385-403).
cgagagctcttcagcaaaa

SEQ ID NO: 424712 - DNA, 19 bp, Homo sapiens
  siRNA target sequence for TGS (NM_173083.2,422-440).
gaaggaagcttatctaaca

SEQ ID NO: 424713 - DNA, 19 bp, Homo sapiens
  siRNA target sequence for TGS (NM_173083.2,435-453).
ctaacacgtggaatgaaaa

SEQ ID NO: 424714 - DNA, 19 bp, Homo sapiens
  siRNA target sequence for TGS (NM_173083.2,531-549).
caaaacgaagtcgactttt

SEQ ID NO: 424715 - DNA, 19 bp, Homo sapiens
  siRNA target sequence for TGS (NM_173083.2,560-578).
gatgataggcaaataaata

SEQ ID NO: 424716 - DNA, 19 bp, Homo sapiens
  siRNA target sequence for TGS (NM_173083.2,598-616).
ccagagggttgcaatggtt

SEQ ID NO: 424717 - DNA, 19 bp, Homo sapiens
  siRNA target sequence for TGS (NM_173083.2,608-626).
gcaatggttccacagaaat

SEQ ID NO: 424718 - DNA, 19 bp, Homo sapiens
  siRNA target sequence for TGS (NM_173083.2,609-627).
caatggttccacagaaatt

SEQ ID NO: 424719 - DNA, 19 bp, Homo sapiens
  siRNA target sequence for TGS (NM_173083.2,659-677).
gcttcacagaagattggtt

SEQ ID NO: 424720 - DNA, 19 bp, Homo sapiens
  siRNA target sequence for TGS (NM_173083.2,665-683).
cagaagattggttttcgat

SEQ ID NO: 424721 - DNA, 19 bp, Homo sapiens
  siRNA target sequence for TGS (NM_173083.2,667-685).
gaagattggttttcgatta

SEQ ID NO: 424722 - DNA, 19 bp, Homo sapiens
  siRNA target sequence for TGS (NM_173083.2,670-688).
gattggttttcgattacgt

SEQ ID NO: 424723 - DNA, 19 bp, Homo sapiens
  siRNA target sequence for TGS (NM_173083.2,675-693).
gttttcgattacgtaatct

SEQ ID NO: 424724 - DNA, 19 bp, Homo sapiens
  siRNA target sequence for TGS (NM_173083.2,704-722).
cctaaagcacataaatggt

SEQ ID NO: 424725 - DNA, 19 bp, Homo sapiens
  siRNA target sequence for TGS (NM_173083.2,711-729).
cacataaatggtgtatata

SEQ ID NO: 424726 - DNA, 19 bp, Homo sapiens
  siRNA target sequence for TGS (NM_173083.2,730-748).
cgagtggttctattcaaat

SEQ ID NO: 424727 - DNA, 19 bp, Homo sapiens
  siRNA target sequence for TGS (NM_173083.2,731-749).
gagtggttctattcaaata

SEQ ID NO: 424728 - DNA, 19 bp, Homo sapiens
  siRNA target sequence for TGS (NM_173083.2,733-751).
gtggttctattcaaatata

SEQ ID NO: 424729 - DNA, 19 bp, Homo sapiens
  siRNA target sequence for TGS (NM_173083.2,735-753).
ggttctattcaaatataga

SEQ ID NO: 424730 - DNA, 19 bp, Homo sapiens
  siRNA target sequence for TGS (NM_173083.2,736-754).
gttctattcaaatatagat

SEQ ID NO: 424731 - DNA, 19 bp, Homo sapiens
  siRNA target sequence for TGS (NM_173083.2,779-797).
gacttctgtgtatgtctaa

SEQ ID NO: 424732 - DNA, 19 bp, Homo sapiens
  siRNA target sequence for TGS (NM_173083.2,905-923).
gaagagagatcagcattaa

SEQ ID NO: 424733 - DNA, 19 bp, Homo sapiens
  siRNA target sequence for TGS (NM_173083.2,965-983).
gttgcagatgtttcacaat

SEQ ID NO: 424734 - DNA, 19 bp, Homo sapiens
  siRNA target sequence for TGS (NM_173083.2,968-986).
gcagatgtttcacaattca

SEQ ID NO: 424735 - DNA, 19 bp, Homo sapiens
  siRNA target sequence for TGS (NM_173083.2,1018-1036).
ggttattggaacgaaagtt

SEQ ID NO: 424736 - DNA, 19 bp, Homo sapiens
  siRNA target sequence for TGS (NM_173083.2,1030-1048).
gaaagttacagcacgatta

SEQ ID NO: 424737 - DNA, 19 bp, Homo sapiens
  siRNA target sequence for TGS (NM_173083.2,1044-1062).
gattacgtggtgttcatga

SEQ ID NO: 424738 - DNA, 19 bp, Homo sapiens
  siRNA target sequence for TGS (NM_173083.2,1065-1083).
gtttgttcactggacaaat

SEQ ID NO: 424739 - DNA, 19 bp, Homo sapiens
  siRNA target sequence for TGS (NM_173083.2,1069-1087).
gttcactggacaaatagat

SEQ ID NO: 424740 - DNA, 19 bp, Homo sapiens
  siRNA target sequence for TGS (NM_173083.2,1106-1124).
gctacttatagagtaactt

SEQ ID NO: 424741 - DNA, 19 bp, Homo sapiens
  siRNA target sequence for TGS (NM_173083.2,1223-1241).
cagcggccttctcgatttt

SEQ ID NO: 424742 - DNA, 19 bp, Homo sapiens
  siRNA target sequence for TGS (NM_173083.2,1225-1243).
gcggccttctcgatttttt

SEQ ID NO: 424743 - DNA, 19 bp, Homo sapiens
  siRNA target sequence for TGS (NM_173083.2,1226-1244).
cggccttctcgatttttta

SEQ ID NO: 424744 - DNA, 19 bp, Homo sapiens
  siRNA target sequence for TGS (NM_173083.2,1229-1247).
ccttctcgattttttatga

SEQ ID NO: 424745 - DNA, 19 bp, Homo sapiens
  siRNA target sequence for TGS (NM_173083.2,1246-1264).
gaccccaccacggttacat

SEQ ID NO: 424746 - DNA, 19 bp, Homo sapiens
  siRNA target sequence for TGS (NM_173083.2,1248-1266).
ccccaccacggttacatta

SEQ ID NO: 424747 - DNA, 19 bp, Homo sapiens
  siRNA target sequence for TGS (NM_173083.2,1249-1267).
cccaccacggttacattat

SEQ ID NO: 424748 - DNA, 19 bp, Homo sapiens
  siRNA target sequence for TGS (NM_173083.2,1250-1268).
ccaccacggttacattata

SEQ ID NO: 424749 - DNA, 19 bp, Homo sapiens
  siRNA target sequence for TGS (NM_173083.2,1279-1297).
ccagtcaccaattatagat

SEQ ID NO: 424750 - DNA, 19 bp, Homo sapiens
  siRNA target sequence for TGS (NM_173083.2,1282-1300).
gtcaccaattatagataat

SEQ ID NO: 424751 - DNA, 19 bp, Homo sapiens
  siRNA target sequence for TGS (NM_173083.2,1284-1302).
caccaattatagataatga

SEQ ID NO: 424752 - DNA, 19 bp, Homo sapiens
  siRNA target sequence for TGS (NM_173083.2,1316-1334).
cagtcgccgtggagaagta

SEQ ID NO: 424753 - DNA, 19 bp, Homo sapiens
  siRNA target sequence for TGS (NM_173083.2,1318-1336).
gtcgccgtggagaagtaaa

SEQ ID NO: 424754 - DNA, 19 bp, Homo sapiens
  siRNA target sequence for TGS (NM_173083.2,1343-1361).
ggctctgacactgaaacat

SEQ ID NO: 424755 - DNA, 19 bp, Homo sapiens
  siRNA target sequence for TGS (NM_173083.2,1345-1363).
ctctgacactgaaacatta

SEQ ID NO: 424756 - DNA, 19 bp, Homo sapiens
  siRNA target sequence for TGS (NM_173083.2,1374-1392).
cagtagaatttcttatcca

SEQ ID NO: 424757 - DNA, 19 bp, Homo sapiens
  siRNA target sequence for TGS (NM_173083.2,1390-1408).
ccaagtgaccagattatca

SEQ ID NO: 424758 - DNA, 19 bp, Homo sapiens
  siRNA target sequence for TGS (NM_173083.2,1396-1414).
gaccagattatcaaaaatt

SEQ ID NO: 424759 - DNA, 19 bp, Homo sapiens
  siRNA target sequence for TGS (NM_173083.2,1398-1416).
ccagattatcaaaaattct

SEQ ID NO: 424760 - DNA, 19 bp, Homo sapiens
  siRNA target sequence for TGS (NM_173083.2,1492-1510).
gcccatcagcattgaattt

SEQ ID NO: 424761 - DNA, 19 bp, Homo sapiens
  siRNA target sequence for TGS (NM_173083.2,1561-1579).
cctaaacaaagttttgcat

SEQ ID NO: 424762 - DNA, 19 bp, Homo sapiens
  siRNA target sequence for TGS (NM_173083.2,1576-1594).
gcataaagttcaacagtat

SEQ ID NO: 424763 - DNA, 19 bp, Homo sapiens
  siRNA target sequence for TGS (NM_173083.2,1685-1703).
gttcggcatgcaaattcct

SEQ ID NO: 424764 - DNA, 19 bp, Homo sapiens
  siRNA target sequence for TGS (NM_173083.2,1710-1728).
gacagccctgcgttgaaaa

SEQ ID NO: 424765 - DNA, 19 bp, Homo sapiens
  siRNA target sequence for TGS (NM_173083.2,1730-1748).
gaaaatctgacagacttaa

SEQ ID NO: 424766 - DNA, 19 bp, Homo sapiens
  siRNA target sequence for TGS (NM_173083.2,1736-1754).
ctgacagacttaatttcca

SEQ ID NO: 424767 - DNA, 19 bp, Homo sapiens
  siRNA target sequence for TGS (NM_173083.2,1752-1770).
ccaggcttacagctatttt

SEQ ID NO: 424768 - DNA, 19 bp, Homo sapiens
  siRNA target sequence for TGS (NM_173083.2,1763-1781).
gctattttgttacaaatta

SEQ ID NO: 424769 - DNA, 19 bp, Homo sapiens
  siRNA target sequence for TGS (NM_173083.2,1764-1782).
ctattttgttacaaattaa

SEQ ID NO: 424770 - DNA, 19 bp, Homo sapiens
  siRNA target sequence for TGS (NM_173083.2,1860-1878).
caatagacgcttctaatat

SEQ ID NO: 424771 - DNA, 19 bp, Homo sapiens
  siRNA target sequence for TGS (NM_173083.2,1865-1883).
gacgcttctaatatcagtt

SEQ ID NO: 424772 - DNA, 19 bp, Homo sapiens
  siRNA target sequence for TGS (NM_173083.2,1891-1909).
gaataatgtagaaatccat

SEQ ID NO: 424773 - DNA, 19 bp, Homo sapiens
  siRNA target sequence for TGS (NM_173083.2,1952-1970).
catgcctttgcagcaaata

SEQ ID NO: 424774 - DNA, 19 bp, Homo sapiens
  siRNA target sequence for TGS (NM_173083.2,1955-1973).
gcctttgcagcaaataaca

SEQ ID NO: 424775 - DNA, 19 bp, Homo sapiens
  siRNA target sequence for FXYD4 (NM_173160.1,500-518).
gttctgagtggcaaatgca

SEQ ID NO: 424776 - DNA, 19 bp, Homo sapiens
  siRNA target sequence for CMYA4 (NM_173167.1,177-195).
cgtccaggcagcttcagat

SEQ ID NO: 424777 - DNA, 19 bp, Homo sapiens
  siRNA target sequence for CMYA4 (NM_173167.1,276-294).
gctggaccaggccttcaaa

SEQ ID NO: 424778 - DNA, 19 bp, Homo sapiens
  siRNA target sequence for CMYA4 (NM_173167.1,401-419).
cagactcgagggtacagaa

SEQ ID NO: 424779 - DNA, 19 bp, Homo sapiens
  siRNA target sequence for CMYA4 (NM_173167.1,465-483).
ggaaaaggctgccaacaat

SEQ ID NO: 424780 - DNA, 19 bp, Homo sapiens
  siRNA target sequence for CMYA4 (NM_173167.1,471-489).
ggctgccaacaatctcatt

SEQ ID NO: 424781 - DNA, 19 bp, Homo sapiens
  siRNA target sequence for CMYA4 (NM_173167.1,556-574).
cagcttctggacactaaga

SEQ ID NO: 424782 - DNA, 19 bp, Homo sapiens
  siRNA target sequence for CMYA4 (NM_173167.1,663-681).
gcggatagaccgaatctgt

SEQ ID NO: 424783 - DNA, 19 bp, Homo sapiens
  siRNA target sequence for CMYA4 (NM_173167.1,664-682).
cggatagaccgaatctgta

SEQ ID NO: 424784 - DNA, 19 bp, Homo sapiens
  siRNA target sequence for CMYA4 (NM_173167.1,729-747).
cctgctccaagccatcatt

SEQ ID NO: 424785 - DNA, 19 bp, Homo sapiens
  siRNA target sequence for CMYA4 (NM_173167.1,733-751).
ctccaagccatcattgact

SEQ ID NO: 424786 - DNA, 19 bp, Homo sapiens
  siRNA target sequence for CMYA4 (NM_173167.1,896-914).
cgctgaacctgctcaataa

SEQ ID NO: 424787 - DNA, 19 bp, Homo sapiens
  siRNA target sequence for CMYA4 (NM_173167.1,900-918).
gaacctgctcaataagaat

SEQ ID NO: 424788 - DNA, 19 bp, Homo sapiens
  siRNA target sequence for CMYA4 (NM_173167.1,948-966).
caactcacgtaccatctat

SEQ ID NO: 424789 - DNA, 19 bp, Homo sapiens
  siRNA target sequence for CMYA4 (NM_173167.1,1074-1092).
catcaacaagctctatgat

SEQ ID NO: 424790 - DNA, 19 bp, Homo sapiens
  siRNA target sequence for CMYA4 (NM_173167.1,1117-1135).
gatcacttccgcaagatct

SEQ ID NO: 424791 - DNA, 19 bp, Homo sapiens
  siRNA target sequence for CMYA4 (NM_173167.1,1391-1409).
cactgctcaaacagatcta

SEQ ID NO: 424792 - DNA, 19 bp, Homo sapiens
  siRNA target sequence for CMYA4 (NM_173167.1,1507-1525).
gcggaagggtcgacagaaa

SEQ ID NO: 424793 - DNA, 19 bp, Homo sapiens
  siRNA target sequence for CMYA4 (NM_173167.1,1508-1526).
cggaagggtcgacagaaaa

SEQ ID NO: 424794 - DNA, 19 bp, Homo sapiens
  siRNA target sequence for CMYA4 (NM_173167.1,1509-1527).
ggaagggtcgacagaaaaa

SEQ ID NO: 424795 - DNA, 19 bp, Homo sapiens
  siRNA target sequence for CMYA4 (NM_173167.1,1544-1562).
gcaagtggctgtgcaatat

SEQ ID NO: 424796 - DNA, 19 bp, Homo sapiens
  siRNA target sequence for CMYA4 (NM_173167.1,1836-1854).
ggacaagaaggactttata

SEQ ID NO: 424797 - DNA, 19 bp, Homo sapiens
  siRNA target sequence for CMYA4 (NM_173167.1,1908-1926).
catggtgaaagcagatagt

SEQ ID NO: 424798 - DNA, 19 bp, Homo sapiens
  siRNA target sequence for CMYA4 (NM_173167.1,2081-2099).
cagcccacgctctagcaaa

SEQ ID NO: 424799 - DNA, 19 bp, Homo sapiens
  siRNA target sequence for CMYA4 (NM_173167.1,2084-2102).
cccacgctctagcaaagat

SEQ ID NO: 424800 - DNA, 19 bp, Homo sapiens
  siRNA target sequence for CMYA4 (NM_173167.1,2114-2132).
ccaatccggacattgcttt

SEQ ID NO: 424801 - DNA, 19 bp, Homo sapiens
  siRNA target sequence for CMYA4 (NM_173167.1,2115-2133).
caatccggacattgctttt

SEQ ID NO: 424802 - DNA, 19 bp, Homo sapiens
  siRNA target sequence for CMYA4 (NM_173167.1,2135-2153).
ctggggagcgggtgtatga

SEQ ID NO: 424803 - DNA, 19 bp, Homo sapiens
  siRNA target sequence for CMYA4 (NM_173167.1,2240-2258).
ctgggcggagtgacaaact

SEQ ID NO: 424804 - DNA, 19 bp, Homo sapiens
  siRNA target sequence for CMYA4 (NM_173167.1,2290-2308).
ccagacatcgagaactaca

SEQ ID NO: 424805 - DNA, 19 bp, Homo sapiens
  siRNA target sequence for CMYA4 (NM_173167.1,2295-2313).
catcgagaactacatgttt

SEQ ID NO: 424806 - DNA, 19 bp, Homo sapiens
  siRNA target sequence for CMYA4 (NM_173167.1,2741-2759).
cccgagaatgtctcatcaa

SEQ ID NO: 424807 - DNA, 19 bp, Homo sapiens
  siRNA target sequence for CMYA4 (NM_173167.1,2752-2770).
ctcatcaagtgcatggatt

SEQ ID NO: 424808 - DNA, 19 bp, Homo sapiens
  siRNA target sequence for CMYA4 (NM_173167.1,2754-2772).
catcaagtgcatggattat

SEQ ID NO: 424809 - DNA, 19 bp, Homo sapiens
  siRNA target sequence for CMYA4 (NM_173167.1,2757-2775).
caagtgcatggattatggt

SEQ ID NO: 424810 - DNA, 19 bp, Homo sapiens
  siRNA target sequence for K5B (NM_173352.1,172-190).
cagcagcaggagccttaat

SEQ ID NO: 424811 - DNA, 19 bp, Homo sapiens
  siRNA target sequence for K5B (NM_173352.1,395-413).
gagacccaggagatcagaa

SEQ ID NO: 424812 - DNA, 19 bp, Homo sapiens
  siRNA target sequence for K5B (NM_173352.1,684-702).
ggcgtgccacacttgagaa

SEQ ID NO: 424813 - DNA, 19 bp, Homo sapiens
  siRNA target sequence for K5B (NM_173352.1,783-801).
gagagtacctctacttctt

SEQ ID NO: 424814 - DNA, 19 bp, Homo sapiens
  siRNA target sequence for K5B (NM_173352.1,785-803).
gagtacctctacttcttga

SEQ ID NO: 424815 - DNA, 19 bp, Homo sapiens
  siRNA target sequence for K5B (NM_173352.1,1259-1277).
ctgacgagcacgaagcttt

SEQ ID NO: 424816 - DNA, 19 bp, Homo sapiens
  siRNA target sequence for K5B (NM_173352.1,1347-1365).
gcaccagccaggtcactat

SEQ ID NO: 424817 - DNA, 19 bp, Homo sapiens
  siRNA target sequence for K5B (NM_173352.1,1485-1503).
gaggctccaacatcattct

SEQ ID NO: 424818 - DNA, 19 bp, Homo sapiens
  siRNA target sequence for K5B (NM_173352.1,1595-1613).
gagtcgagtctgaagacat

SEQ ID NO: 424819 - DNA, 19 bp, Homo sapiens
  siRNA target sequence for SSX6 (NM_173357.2,354-372).
gactctcagaggaatgatt

SEQ ID NO: 424820 - DNA, 19 bp, Homo sapiens
  siRNA target sequence for LOC317671 (NM_173362.2,1491-1509).
ctgttgtccatgatagaga

SEQ ID NO: 424821 - DNA, 19 bp, Homo sapiens
  siRNA target sequence for LOC317671 (NM_173362.2,1535-1553).
gaatatcatgctatggata

SEQ ID NO: 424822 - DNA, 19 bp, Homo sapiens
  siRNA target sequence for LOC317671 (NM_173362.2,1569-1587).
caggaggacctttacattt

SEQ ID NO: 424823 - DNA, 19 bp, Homo sapiens
  siRNA target sequence for LOC317671 (NM_173362.2,1610-1628).
ggacgaccgtgtatagttt

SEQ ID NO: 424824 - DNA, 19 bp, Homo sapiens
  siRNA target sequence for LOC317671 (NM_173362.2,1625-1643).
gtttgcccctggcataaat

SEQ ID NO: 424825 - DNA, 19 bp, Homo sapiens
  siRNA target sequence for LOC317671 (NM_173362.2,1629-1647).
gcccctggcataaatacaa

SEQ ID NO: 424826 - DNA, 19 bp, Homo sapiens
  siRNA target sequence for LOC317671 (NM_173362.2,1630-1648).
cccctggcataaatacaaa

SEQ ID NO: 424827 - DNA, 19 bp, Homo sapiens
  siRNA target sequence for LOC317671 (NM_173362.2,1681-1699).
gtctataaaccctaaagat

SEQ ID NO: 424828 - DNA, 19 bp, Homo sapiens
  siRNA target sequence for LOC317671 (NM_173362.2,1722-1740).
gctccaaaggaataaagca

SEQ ID NO: 424829 - DNA, 19 bp, Homo sapiens
  siRNA target sequence for LOC317671 (NM_173362.2,1785-1803).
ctctttctaatgaaccttt

SEQ ID NO: 424830 - DNA, 19 bp, Homo sapiens
  siRNA target sequence for LOC317671 (NM_173362.2,1830-1848).
ctggagacttcaaagtaat

SEQ ID NO: 424831 - DNA, 19 bp, Homo sapiens
  siRNA target sequence for LOC317671 (NM_173362.2,1832-1850).
ggagacttcaaagtaatta

SEQ ID NO: 424832 - DNA, 19 bp, Homo sapiens
  siRNA target sequence for DKFZp761B107 (NM_173463.2,337-355).
ggctaatcttgcacaacta

SEQ ID NO: 424833 - DNA, 19 bp, Homo sapiens
  siRNA target sequence for DKFZp761B107 (NM_173463.2,339-357).
ctaatcttgcacaactatt

SEQ ID NO: 424834 - DNA, 19 bp, Homo sapiens
  siRNA target sequence for DKFZp761B107 (NM_173463.2,474-492).
ggctcggagacgaagcaat

SEQ ID NO: 424835 - DNA, 19 bp, Homo sapiens
  siRNA target sequence for DKFZp761B107 (NM_173463.2,547-565).
gcgagctaaggaacagatt

SEQ ID NO: 424836 - DNA, 19 bp, Homo sapiens
  siRNA target sequence for DKFZp761B107 (NM_173463.2,549-567).
gagctaaggaacagattga

SEQ ID NO: 424837 - DNA, 19 bp, Homo sapiens
  siRNA target sequence for DKFZp761B107 (NM_173463.2,599-617).
gacgagcttcaggatgtta

SEQ ID NO: 424838 - DNA, 19 bp, Homo sapiens
  siRNA target sequence for DKFZp761B107 (NM_173463.2,688-706).
gcacgagaaccgcatcatt

SEQ ID NO: 424839 - DNA, 19 bp, Homo sapiens
  siRNA target sequence for DKFZp761B107 (NM_173463.2,772-790).
ggtcaacctcttgaaatca

SEQ ID NO: 424840 - DNA, 19 bp, Homo sapiens
  siRNA target sequence for DKFZp761B107 (NM_173463.2,793-811).
cattgccaaatacaagaat

SEQ ID NO: 424841 - DNA, 19 bp, Homo sapiens
  siRNA target sequence for DKFZp761B107 (NM_173463.2,986-1004).
gaaacaatccacgagaaaa

SEQ ID NO: 424842 - DNA, 19 bp, Homo sapiens
  siRNA target sequence for COL23A1 (NM_173465.2,853-871).
gggtgcaccaggagacttt

SEQ ID NO: 424843 - DNA, 19 bp, Homo sapiens
  siRNA target sequence for COL23A1 (NM_173465.2,1275-1293).
cagtggtgatcgactatga

SEQ ID NO: 424844 - DNA, 19 bp, Homo sapiens
  siRNA target sequence for COL23A1 (NM_173465.2,1368-1386).
ccaagggcgagcttggatt

SEQ ID NO: 424845 - DNA, 19 bp, Homo sapiens
  siRNA target sequence for COL23A1 (NM_173465.2,1566-1584).
gcctggctcagctcatagt

SEQ ID NO: 424846 - DNA, 19 bp, Homo sapiens
  siRNA target sequence for DKFZp434P055 (NM_173466.1,181-199).
gagaggactgcatcttcaa

SEQ ID NO: 424847 - DNA, 19 bp, Homo sapiens
  siRNA target sequence for DKFZp434P055 (NM_173466.1,218-236).
ggtcccatgtaaacagtat

SEQ ID NO: 424848 - DNA, 19 bp, Homo sapiens
  siRNA target sequence for DKFZp434P055 (NM_173466.1,226-244).
gtaaacagtataaaggaaa

SEQ ID NO: 424849 - DNA, 19 bp, Homo sapiens
  siRNA target sequence for DKFZp434P055 (NM_173466.1,305-323).
cacctaacctgccttctat

SEQ ID NO: 424850 - DNA, 19 bp, Homo sapiens
  siRNA target sequence for DKFZp434P055 (NM_173466.1,424-442).
ctagcctcaagacctttaa

SEQ ID NO: 424851 - DNA, 19 bp, Homo sapiens
  siRNA target sequence for DKFZp434P055 (NM_173466.1,474-492).
ggactcggtgaaatctatt

SEQ ID NO: 424852 - DNA, 19 bp, Homo sapiens
  siRNA target sequence for DKFZp434P055 (NM_173466.1,477-495).
ctcggtgaaatctattctt

SEQ ID NO: 424853 - DNA, 19 bp, Homo sapiens
  siRNA target sequence for DKFZp434P055 (NM_173466.1,479-497).
cggtgaaatctattcttga

SEQ ID NO: 424854 - DNA, 19 bp, Homo sapiens
  siRNA target sequence for DKFZp434P055 (NM_173466.1,665-683).
caatcatgttggagaatgt

SEQ ID NO: 424855 - DNA, 19 bp, Homo sapiens
  siRNA target sequence for DKFZp434P055 (NM_173466.1,710-728).
gtgctctggagaaagtaca

SEQ ID NO: 424856 - DNA, 19 bp, Homo sapiens
  siRNA target sequence for DKFZp434P055 (NM_173466.1,741-759).
gcggagggattcagagatt

SEQ ID NO: 424857 - DNA, 19 bp, Homo sapiens
  siRNA target sequence for DKFZp434P055 (NM_173466.1,771-789).
gaaagaaagggatctcaat

SEQ ID NO: 424858 - DNA, 19 bp, Homo sapiens
  siRNA target sequence for DKFZp434P055 (NM_173466.1,861-879).
gcacaacagtgagattgaa

SEQ ID NO: 424859 - DNA, 19 bp, Homo sapiens
  siRNA target sequence for DKFZp434P055 (NM_173466.1,862-880).
cacaacagtgagattgaat

SEQ ID NO: 424860 - DNA, 19 bp, Homo sapiens
  siRNA target sequence for DKFZp434P055 (NM_173466.1,918-936).
caggaaacttgctatgagt

SEQ ID NO: 424861 - DNA, 19 bp, Homo sapiens
  siRNA target sequence for DKFZp434P055 (NM_173466.1,974-992).
caaagctagatcacattca

SEQ ID NO: 424862 - DNA, 19 bp, Homo sapiens
  siRNA target sequence for DKFZp434P055 (NM_173466.1,1083-1101).
gcatgctgaacgcatagaa

SEQ ID NO: 424863 - DNA, 19 bp, Homo sapiens
  siRNA target sequence for DKFZp434P055 (NM_173466.1,1093-1111).
cgcatagaagctctaagaa

SEQ ID NO: 424864 - DNA, 19 bp, Homo sapiens
  siRNA target sequence for DKFZp434P055 (NM_173466.1,1124-1142).
ccgagagagaaactacaaa

SEQ ID NO: 424865 - DNA, 19 bp, Homo sapiens
  siRNA target sequence for DKFZp434P055 (NM_173466.1,1227-1245).
ccgagagctgcgacagaaa

SEQ ID NO: 424866 - DNA, 19 bp, Homo sapiens
  siRNA target sequence for DKFZp434P055 (NM_173466.1,1323-1341).
gtcagctaaggcgaataat

SEQ ID NO: 424867 - DNA, 19 bp, Homo sapiens
  siRNA target sequence for DKFZp434P055 (NM_173466.1,1332-1350).
ggcgaataatgctcagaat

SEQ ID NO: 424868 - DNA, 19 bp, Homo sapiens
  siRNA target sequence for DKFZp434P055 (NM_173466.1,1333-1351).
gcgaataatgctcagaata

SEQ ID NO: 424869 - DNA, 19 bp, Homo sapiens
  siRNA target sequence for DKFZp434P055 (NM_173466.1,1334-1352).
cgaataatgctcagaatat

SEQ ID NO: 424870 - DNA, 19 bp, Homo sapiens
  siRNA target sequence for DKFZp434P055 (NM_173466.1,1335-1353).
gaataatgctcagaatata

SEQ ID NO: 424871 - DNA, 19 bp, Homo sapiens
  siRNA target sequence for DKFZp434P055 (NM_173466.1,1354-1372).
gaaaggatgaaggttgtat

SEQ ID NO: 424872 - DNA, 19 bp, Homo sapiens
  siRNA target sequence for MOB4A (NM_173468.1,166-184).
ggtagtcgctcttctaaaa

SEQ ID NO: 424873 - DNA, 19 bp, Homo sapiens
  siRNA target sequence for MOB4A (NM_173468.1,360-378).
gctttatggaactatcaca

SEQ ID NO: 424874 - DNA, 19 bp, Homo sapiens
  siRNA target sequence for MOB4A (NM_173468.1,375-393).
cacagacttctgtacagaa

SEQ ID NO: 424875 - DNA, 19 bp, Homo sapiens
  siRNA target sequence for MOB4A (NM_173468.1,413-431).
cagctggcccaaaatatga

SEQ ID NO: 424876 - DNA, 19 bp, Homo sapiens
  siRNA target sequence for MOB4A (NM_173468.1,452-470).
cgaacataaagaaacctat

SEQ ID NO: 424877 - DNA, 19 bp, Homo sapiens
  siRNA target sequence for MOB4A (NM_173468.1,481-499).
gcaccaaagtatattgatt

SEQ ID NO: 424878 - DNA, 19 bp, Homo sapiens
  siRNA target sequence for MOB4A (NM_173468.1,528-546).
ggatgatgagacgttattt

SEQ ID NO: 424879 - DNA, 19 bp, Homo sapiens
  siRNA target sequence for MOB4A (NM_173468.1,532-550).
gatgagacgttatttccat

SEQ ID NO: 424880 - DNA, 19 bp, Homo sapiens
  siRNA target sequence for MOB4A (NM_173468.1,562-580).
gtcccgttcccaaagaatt

SEQ ID NO: 424881 - DNA, 19 bp, Homo sapiens
  siRNA target sequence for MOB4A (NM_173468.1,565-583).
ccgttcccaaagaatttca

SEQ ID NO: 424882 - DNA, 19 bp, Homo sapiens
  siRNA target sequence for MOB4A (NM_173468.1,612-630).
cctctttagggtttatgct

SEQ ID NO: 424883 - DNA, 19 bp, Homo sapiens
  siRNA target sequence for MOB4A (NM_173468.1,673-691).
gaggaagcacatctaaata

SEQ ID NO: 424884 - DNA, 19 bp, Homo sapiens
  siRNA target sequence for MOB4A (NM_173468.1,718-736).
gtccaggaattcaacctta

SEQ ID NO: 424885 - DNA, 19 bp, Homo sapiens
  siRNA target sequence for MOB4A (NM_173468.1,723-741).
ggaattcaaccttattgat

SEQ ID NO: 424886 - DNA, 19 bp, Homo sapiens
  siRNA target sequence for MOB4A (NM_173468.1,732-750).
ccttattgatagaagagaa

SEQ ID NO: 424887 - DNA, 19 bp, Homo sapiens
  siRNA target sequence for LOC93380 (NM_173470.1,371-389).
ctgcgcagcatcgttctta

SEQ ID NO: 424888 - DNA, 19 bp, Homo sapiens
  siRNA target sequence for LOC93380 (NM_173470.1,373-391).
gcgcagcatcgttcttata

SEQ ID NO: 424889 - DNA, 19 bp, Homo sapiens
  siRNA target sequence for LOC93380 (NM_173470.1,374-392).
cgcagcatcgttcttatat

SEQ ID NO: 424890 - DNA, 19 bp, Homo sapiens
  siRNA target sequence for LOC93380 (NM_173470.1,382-400).
cgttcttatatgcgattaa

SEQ ID NO: 424891 - DNA, 19 bp, Homo sapiens
  siRNA target sequence for LOC93380 (NM_173470.1,415-433).
gaatcactgccaatagata

SEQ ID NO: 424892 - DNA, 19 bp, Homo sapiens
  siRNA target sequence for LOC93380 (NM_173470.1,419-437).
cactgccaatagatatagt

SEQ ID NO: 424893 - DNA, 19 bp, Homo sapiens
  siRNA target sequence for LOC93380 (NM_173470.1,423-441).
gccaatagatatagttctt

SEQ ID NO: 424894 - DNA, 19 bp, Homo sapiens
  siRNA target sequence for LOC93380 (NM_173470.1,467-485).
cctgttacggtatagttca

SEQ ID NO: 424895 - DNA, 19 bp, Homo sapiens
  siRNA target sequence for LOC93380 (NM_173470.1,468-486).
ctgttacggtatagttcat

SEQ ID NO: 424896 - DNA, 19 bp, Homo sapiens
  siRNA target sequence for LOC93380 (NM_173470.1,470-488).
gttacggtatagttcatat

SEQ ID NO: 424897 - DNA, 19 bp, Homo sapiens
  siRNA target sequence for LOC93380 (NM_173470.1,474-492).
cggtatagttcatattgca

SEQ ID NO: 424898 - DNA, 19 bp, Homo sapiens
  siRNA target sequence for LOC93380 (NM_173470.1,484-502).
catattgcaggagagttta

SEQ ID NO: 424899 - DNA, 19 bp, Homo sapiens
  siRNA target sequence for LOC93380 (NM_173470.1,539-557).
catttgatacgttaaggaa

SEQ ID NO: 424900 - DNA, 19 bp, Homo sapiens
  siRNA target sequence for LOC93380 (NM_173470.1,606-624).
gccttcggatacagcaaat

SEQ ID NO: 424901 - DNA, 19 bp, Homo sapiens
  siRNA target sequence for LOC93380 (NM_173470.1,607-625).
ccttcggatacagcaaatt

SEQ ID NO: 424902 - DNA, 19 bp, Homo sapiens
  siRNA target sequence for LOC93380 (NM_173470.1,626-644).
cttcaaaccaagatgcatt

SEQ ID NO: 424903 - DNA, 19 bp, Homo sapiens
  siRNA target sequence for LOC93380 (NM_173470.1,640-658).
gcattgtcctctaacacat

SEQ ID NO: 424904 - DNA, 19 bp, Homo sapiens
  siRNA target sequence for LOC93380 (NM_173470.1,647-665).
cctctaacacatcattgaa

SEQ ID NO: 424905 - DNA, 19 bp, Homo sapiens
  siRNA target sequence for LOC93380 (NM_173470.1,650-668).
ctaacacatcattgaagtt

SEQ ID NO: 424906 - DNA, 19 bp, Homo sapiens
  siRNA target sequence for LOC93380 (NM_173470.1,656-674).
catcattgaagttacgaaa

SEQ ID NO: 424907 - DNA, 19 bp, Homo sapiens
  siRNA target sequence for MGC40179 (NM_173472.1,308-326).
cctccaagcacccattcaa

SEQ ID NO: 424908 - DNA, 19 bp, Homo sapiens
  siRNA target sequence for MGC40179 (NM_173472.1,350-368).
caccgtccgaccttgaagt

SEQ ID NO: 424909 - DNA, 19 bp, Homo sapiens
  siRNA target sequence for MGC40179 (NM_173472.1,457-475).
gagttgcgcacgatgaaca

SEQ ID NO: 424910 - DNA, 19 bp, Homo sapiens
  siRNA target sequence for MGC40179 (NM_173472.1,462-480).
gcgcacgatgaacaacaaa

SEQ ID NO: 424911 - DNA, 19 bp, Homo sapiens
  siRNA target sequence for MGC40179 (NM_173472.1,507-525).
ccgcctcagtggagtagat

SEQ ID NO: 424912 - DNA, 19 bp, Homo sapiens
  siRNA target sequence for MGC40179 (NM_173472.1,508-526).
cgcctcagtggagtagatt

SEQ ID NO: 424913 - DNA, 19 bp, Homo sapiens
  siRNA target sequence for MGC40179 (NM_173472.1,531-549).
ctttggcagggttatcaca

SEQ ID NO: 424914 - DNA, 19 bp, Homo sapiens
  siRNA target sequence for MGC40179 (NM_173472.1,564-582).
gtggaccgggactttcaga

SEQ ID NO: 424915 - DNA, 19 bp, Homo sapiens
  siRNA target sequence for MGC40179 (NM_173472.1,589-607).
gacaagtcagccttttgca

SEQ ID NO: 424916 - DNA, 19 bp, Homo sapiens
  siRNA target sequence for MGC40179 (NM_173472.1,596-614).
cagccttttgcaaaatcat

SEQ ID NO: 424917 - DNA, 19 bp, Homo sapiens
  siRNA target sequence for MGC40179 (NM_173472.1,661-679).
cagatgacagtcactatgt

SEQ ID NO: 424918 - DNA, 19 bp, Homo sapiens
  siRNA target sequence for LOC119504 (NM_173473.1,209-227).
ccacggaaagcccttttca

SEQ ID NO: 424919 - DNA, 19 bp, Homo sapiens
  siRNA target sequence for LOC119504 (NM_173473.1,273-291).
gattcctctgcgaatctgt

SEQ ID NO: 424920 - DNA, 19 bp, Homo sapiens
  siRNA target sequence for LOC119504 (NM_173473.1,282-300).
gcgaatctgtttttagcta

SEQ ID NO: 424921 - DNA, 19 bp, Homo sapiens
  siRNA target sequence for LOC119504 (NM_173473.1,315-333).
cgcttaaacaggtgaaaca

SEQ ID NO: 424922 - DNA, 19 bp, Homo sapiens
  siRNA target sequence for LOC119504 (NM_173473.1,316-334).
gcttaaacaggtgaaacat

SEQ ID NO: 424923 - DNA, 19 bp, Homo sapiens
  siRNA target sequence for NTAN1 (NM_173474.2,521-539).
ccactttccagtaatatat

SEQ ID NO: 424924 - DNA, 19 bp, Homo sapiens
  siRNA target sequence for MGC48972 (NM_173475.1,247-265).
cagtgtgtcaccaagtgta

SEQ ID NO: 424925 - DNA, 19 bp, Homo sapiens
  siRNA target sequence for MGC48972 (NM_173475.1,251-269).
gtgtcaccaagtgtaagaa

SEQ ID NO: 424926 - DNA, 19 bp, Homo sapiens
  siRNA target sequence for MGC48972 (NM_173475.1,278-296).
cgaccctgggcagcaaaaa

SEQ ID NO: 424927 - DNA, 19 bp, Homo sapiens
  siRNA target sequence for MGC48972 (NM_173475.1,304-322).
cgtgagcccagcaacaagt

SEQ ID NO: 424928 - DNA, 19 bp, Homo sapiens
  siRNA target sequence for MGC48972 (NM_173475.1,310-328).
cccagcaacaagtcacata

SEQ ID NO: 424929 - DNA, 19 bp, Homo sapiens
  siRNA target sequence for MGC48972 (NM_173475.1,685-703).
gatggctgcaaagcaataa

SEQ ID NO: 424930 - DNA, 19 bp, Homo sapiens
  siRNA target sequence for MGC48972 (NM_173475.1,711-729).
cagcattgacggaatctgt

SEQ ID NO: 424931 - DNA, 19 bp, Homo sapiens
  siRNA target sequence for MGC48972 (NM_173475.1,733-751).
cggttccctagcctcttaa

SEQ ID NO: 424932 - DNA, 19 bp, Homo sapiens
  siRNA target sequence for MGC48972 (NM_173475.1,735-753).
gttccctagcctcttaaca

SEQ ID NO: 424933 - DNA, 19 bp, Homo sapiens
  siRNA target sequence for MGC48972 (NM_173475.1,738-756).
ccctagcctcttaacagaa

SEQ ID NO: 424934 - DNA, 19 bp, Homo sapiens
  siRNA target sequence for MGC48972 (NM_173475.1,780-798).
ggatctctaccggtttaca

SEQ ID NO: 424935 - DNA, 19 bp, Homo sapiens
  siRNA target sequence for MGC48972 (NM_173475.1,781-799).
gatctctaccggtttacat

SEQ ID NO: 424936 - DNA, 19 bp, Homo sapiens
  siRNA target sequence for MGC48972 (NM_173475.1,834-852).
gtcactgcatcgggaaata

SEQ ID NO: 424937 - DNA, 19 bp, Homo sapiens
  siRNA target sequence for MGC48972 (NM_173475.1,911-929).
ggctaaacttcctaacaga

SEQ ID NO: 424938 - DNA, 19 bp, Homo sapiens
  siRNA target sequence for MGC48972 (NM_173475.1,958-976).
cgggacacttggaacatgt

SEQ ID NO: 424939 - DNA, 19 bp, Homo sapiens
  siRNA target sequence for MGC48972 (NM_173475.1,968-986).
ggaacatgttccttaactt

SEQ ID NO: 424940 - DNA, 19 bp, Homo sapiens
  siRNA target sequence for MGC48972 (NM_173475.1,1011-1029).
cagcaactacagtgaagat

SEQ ID NO: 424941 - DNA, 19 bp, Homo sapiens
  siRNA target sequence for FLJ34512 (NM_173476.2,235-253).
caccctgggcctaatttca

SEQ ID NO: 424942 - DNA, 19 bp, Homo sapiens
  siRNA target sequence for FLJ34512 (NM_173476.2,458-476).
ccagatctagcgctcaata

SEQ ID NO: 424943 - DNA, 19 bp, Homo sapiens
  siRNA target sequence for FLJ34512 (NM_173476.2,459-477).
cagatctagcgctcaataa

SEQ ID NO: 424944 - DNA, 19 bp, Homo sapiens
  siRNA target sequence for FLJ34512 (NM_173476.2,509-527).
gtcgacattcagatcacaa

SEQ ID NO: 424945 - DNA, 19 bp, Homo sapiens
  siRNA target sequence for USH1G (NM_173477.2,318-336).
cgagtcgctgcgtctcatt

SEQ ID NO: 424946 - DNA, 19 bp, Homo sapiens
  siRNA target sequence for USH1G (NM_173477.2,1087-1105).
ggccacgactccctgttta

SEQ ID NO: 424947 - DNA, 19 bp, Homo sapiens
  siRNA target sequence for USH1G (NM_173477.2,1125-1143).
catggtgttccgcagaaat

SEQ ID NO: 424948 - DNA, 19 bp, Homo sapiens
  siRNA target sequence for USH1G (NM_173477.2,1301-1319).
cctgggatgagctcgattt

SEQ ID NO: 424949 - DNA, 19 bp, Homo sapiens
  siRNA target sequence for USH1G (NM_173477.2,1302-1320).
ctgggatgagctcgattta

SEQ ID NO: 424950 - DNA, 19 bp, Homo sapiens
  siRNA target sequence for LOC126248 (NM_173479.1,307-325).
caggtgccggagaaattga

SEQ ID NO: 424951 - DNA, 19 bp, Homo sapiens
  siRNA target sequence for LOC126248 (NM_173479.1,346-364).
ctctccaagatcccattta

SEQ ID NO: 424952 - DNA, 19 bp, Homo sapiens
  siRNA target sequence for LOC126248 (NM_173479.1,430-448).
ctcagtggctcctatgact

SEQ ID NO: 424953 - DNA, 19 bp, Homo sapiens
  siRNA target sequence for LOC126248 (NM_173479.1,482-500).
ctgtggttcgcgattttga

SEQ ID NO: 424954 - DNA, 19 bp, Homo sapiens
  siRNA target sequence for LOC126248 (NM_173479.1,509-527).
ccaaagctcctgttgtaga

SEQ ID NO: 424955 - DNA, 19 bp, Homo sapiens
  siRNA target sequence for LOC126248 (NM_173479.1,558-576).
cattgccgcatcctatgat

SEQ ID NO: 424956 - DNA, 19 bp, Homo sapiens
  siRNA target sequence for LOC126248 (NM_173479.1,562-580).
gccgcatcctatgataaga

SEQ ID NO: 424957 - DNA, 19 bp, Homo sapiens
  siRNA target sequence for LOC126248 (NM_173479.1,645-663).
cgtctcctgtaagttttct

SEQ ID NO: 424958 - DNA, 19 bp, Homo sapiens
  siRNA target sequence for LOC126248 (NM_173479.1,700-718).
gatcatggaatctgcataa

SEQ ID NO: 424959 - DNA, 19 bp, Homo sapiens
  siRNA target sequence for LOC126248 (NM_173479.1,738-756).
caccgtttccgtcatcaaa

SEQ ID NO: 424960 - DNA, 19 bp, Homo sapiens
  siRNA target sequence for LOC126248 (NM_173479.1,740-758).
ccgtttccgtcatcaaaga

SEQ ID NO: 424961 - DNA, 19 bp, Homo sapiens
  siRNA target sequence for LOC126248 (NM_173479.1,741-759).
cgtttccgtcatcaaagat

SEQ ID NO: 424962 - DNA, 19 bp, Homo sapiens
  siRNA target sequence for LOC126248 (NM_173479.1,829-847).
gacaggtgcatcaagatct

SEQ ID NO: 424963 - DNA, 19 bp, Homo sapiens
  siRNA target sequence for LOC126248 (NM_173479.1,869-887).
cgctgctcaccatcactaa

SEQ ID NO: 424964 - DNA, 19 bp, Homo sapiens
  siRNA target sequence for LOC126248 (NM_173479.1,892-910).
cattccaatgcaatctcaa

SEQ ID NO: 424965 - DNA, 19 bp, Homo sapiens
  siRNA target sequence for LOC126248 (NM_173479.1,1102-1120).
gataggactgtggctattt

SEQ ID NO: 424966 - DNA, 19 bp, Homo sapiens
  siRNA target sequence for LOC126248 (NM_173479.1,1149-1167).
ctctttgaagggccataat

SEQ ID NO: 424967 - DNA, 19 bp, Homo sapiens
  siRNA target sequence for LOC126248 (NM_173479.1,1274-1292).
ctttggtaatcaagtacaa

SEQ ID NO: 424968 - DNA, 19 bp, Homo sapiens
  siRNA target sequence for LOC126353 (NM_173481.2,161-179).
caccagctacacataccat

SEQ ID NO: 424969 - DNA, 19 bp, Homo sapiens
  siRNA target sequence for LOC126353 (NM_173481.2,883-901).
gggccagtgtccaagttgt

SEQ ID NO: 424970 - DNA, 19 bp, Homo sapiens
  siRNA target sequence for LOC126353 (NM_173481.2,1133-1151).
cgtgcagcgggacatagta

SEQ ID NO: 424971 - DNA, 19 bp, Homo sapiens
  siRNA target sequence for LOC126353 (NM_173481.2,1378-1396).
ggaccccccagctagaatt

SEQ ID NO: 424972 - DNA, 19 bp, Homo sapiens
  siRNA target sequence for LOC126353 (NM_173481.2,1482-1500).
ccgaggcatctctcagaat

SEQ ID NO: 424973 - DNA, 19 bp, Homo sapiens
  siRNA target sequence for LOC126353 (NM_173481.2,1700-1718).
gaagtcccagtcatctgat

SEQ ID NO: 424974 - DNA, 19 bp, Homo sapiens
  siRNA target sequence for LOC126353 (NM_173481.2,2010-2028).
ccctcggacggtatcaact

SEQ ID NO: 424975 - DNA, 19 bp, Homo sapiens
  siRNA target sequence for LOC126353 (NM_173481.2,2050-2068).
gggtgacccgtcacaagaa

SEQ ID NO: 424976 - DNA, 19 bp, Homo sapiens
  siRNA target sequence for FLJ40365 (NM_173482.1,168-186).
cgaggaccgcgcacattct

SEQ ID NO: 424977 - DNA, 19 bp, Homo sapiens
  siRNA target sequence for FLJ40365 (NM_173482.1,586-604).
gcgcaagggtctgcttatt

SEQ ID NO: 424978 - DNA, 19 bp, Homo sapiens
  siRNA target sequence for FLJ40365 (NM_173482.1,587-605).
cgcaagggtctgcttatta

SEQ ID NO: 424979 - DNA, 19 bp, Homo sapiens
  siRNA target sequence for FLJ40365 (NM_173482.1,588-606).
gcaagggtctgcttattaa

SEQ ID NO: 424980 - DNA, 19 bp, Homo sapiens
  siRNA target sequence for FLJ40365 (NM_173482.1,665-683).
gctgacagtatgcttacat

SEQ ID NO: 424981 - DNA, 19 bp, Homo sapiens
  siRNA target sequence for FLJ40365 (NM_173482.1,771-789).
gccgagacactctgaactt

SEQ ID NO: 424982 - DNA, 19 bp, Homo sapiens
  siRNA target sequence for FLJ40365 (NM_173482.1,773-791).
cgagacactctgaacttct

SEQ ID NO: 424983 - DNA, 19 bp, Homo sapiens
  siRNA target sequence for FLJ40365 (NM_173482.1,902-920).
cgcacacagggtcagaaaa

SEQ ID NO: 424984 - DNA, 19 bp, Homo sapiens
  siRNA target sequence for FLJ40365 (NM_173482.1,960-978).
gcgccttggcgctaaacga

SEQ ID NO: 424985 - DNA, 19 bp, Homo sapiens
  siRNA target sequence for FLJ40365 (NM_173482.1,961-979).
cgccttggcgctaaacgaa

SEQ ID NO: 424986 - DNA, 19 bp, Homo sapiens
  siRNA target sequence for FLJ40365 (NM_173482.1,1146-1164).
gactgatgaggggaactat

SEQ ID NO: 424987 - DNA, 19 bp, Homo sapiens
  siRNA target sequence for FLJ40365 (NM_173482.1,1165-1183).
cctccggtgtacgaaatat

SEQ ID NO: 424988 - DNA, 19 bp, Homo sapiens
  siRNA target sequence for FLJ40365 (NM_173482.1,1166-1184).
ctccggtgtacgaaatata

SEQ ID NO: 424989 - DNA, 19 bp, Homo sapiens
  siRNA target sequence for FLJ40365 (NM_173482.1,1170-1188).
ggtgtacgaaatataacca

SEQ ID NO: 424990 - DNA, 19 bp, Homo sapiens
  siRNA target sequence for FLJ40365 (NM_173482.1,1171-1189).
gtgtacgaaatataaccaa

SEQ ID NO: 424991 - DNA, 19 bp, Homo sapiens
  siRNA target sequence for FLJ40365 (NM_173482.1,1200-1218).
ccacccacggtctcatcaa

SEQ ID NO: 424992 - DNA, 19 bp, Homo sapiens
  siRNA target sequence for FLJ40365 (NM_173482.1,1219-1237).
gggtcctctgtcgaaagtt

SEQ ID NO: 424993 - DNA, 19 bp, Homo sapiens
  siRNA target sequence for FLJ40365 (NM_173482.1,1512-1530).
cgcagcgcctggttaagga

SEQ ID NO: 424994 - DNA, 19 bp, Homo sapiens
  siRNA target sequence for FLJ40160 (NM_173484.2,459-477).
ccgtaggagagcccaatat

SEQ ID NO: 424995 - DNA, 19 bp, Homo sapiens
  siRNA target sequence for FLJ40160 (NM_173484.2,460-478).
cgtaggagagcccaatatt

SEQ ID NO: 424996 - DNA, 19 bp, Homo sapiens
  siRNA target sequence for FLJ40160 (NM_173484.2,464-482).
ggagagcccaatattccaa

SEQ ID NO: 424997 - DNA, 19 bp, Homo sapiens
  siRNA target sequence for FLJ40160 (NM_173484.2,493-511).
gcccttcggtgggaatcta

SEQ ID NO: 424998 - DNA, 19 bp, Homo sapiens
  siRNA target sequence for FLJ40160 (NM_173484.2,494-512).
cccttcggtgggaatctaa

SEQ ID NO: 424999 - DNA, 19 bp, Homo sapiens
  siRNA target sequence for FLJ40160 (NM_173484.2,983-1001).
ggtgagaggccatattctt

SEQ ID NO: 425000 - DNA, 19 bp, Homo sapiens
  siRNA target sequence for LOC132321 (NM_173487.1,316-334).
cacttgggatggttttcca

SEQ ID NO: 425001 - DNA, 19 bp, Homo sapiens
  siRNA target sequence for LOC132321 (NM_173487.1,337-355).
gaagcatgagcccgtattt

SEQ ID NO: 425002 - DNA, 19 bp, Homo sapiens
  siRNA target sequence for LOC132321 (NM_173487.1,341-359).
catgagcccgtatttatca

SEQ ID NO: 425003 - DNA, 19 bp, Homo sapiens
  siRNA target sequence for LOC132321 (NM_173487.1,380-398).
ggagtgatgatggacatta

SEQ ID NO: 425004 - DNA, 19 bp, Homo sapiens
  siRNA target sequence for LOC132321 (NM_173487.1,454-472).
caatgaactgtgggattat

SEQ ID NO: 425005 - DNA, 19 bp, Homo sapiens
  siRNA target sequence for LOC132321 (NM_173487.1,537-555).
cccacggacagcatttagt

SEQ ID NO: 425006 - DNA, 19 bp, Homo sapiens
  siRNA target sequence for LOC132321 (NM_173487.1,710-728).
ggatcaaaagataaacgaa

SEQ ID NO: 425007 - DNA, 19 bp, Homo sapiens
  siRNA target sequence for LOC132321 (NM_173487.1,791-809).
cattgcctagaatacttca

SEQ ID NO: 425008 - DNA, 19 bp, Homo sapiens
  siRNA target sequence for LOC132321 (NM_173487.1,846-864).
ggaaacaaccggaatcaga

SEQ ID NO: 425009 - DNA, 19 bp, Homo sapiens
  siRNA target sequence for LOC132321 (NM_173487.1,861-879).
cagacctgtggctaataga

SEQ ID NO: 425010 - DNA, 19 bp, Homo sapiens
  siRNA target sequence for LOC132321 (NM_173487.1,865-883).
cctgtggctaatagagaaa

SEQ ID NO: 425011 - DNA, 19 bp, Homo sapiens
  siRNA target sequence for FLJ40243 (NM_173489.2,533-551).
gttaacaaggaagacattt

SEQ ID NO: 425012 - DNA, 19 bp, Homo sapiens
  siRNA target sequence for FLJ40243 (NM_173489.2,600-618).
caattgtccaacgattgat

SEQ ID NO: 425013 - DNA, 19 bp, Homo sapiens
  siRNA target sequence for FLJ40243 (NM_173489.2,605-623).
gtccaacgattgatttatt

SEQ ID NO: 425014 - DNA, 19 bp, Homo sapiens
  siRNA target sequence for FLJ40243 (NM_173489.2,694-712).
gtctcttgctgcacatgat

SEQ ID NO: 425015 - DNA, 19 bp, Homo sapiens
  siRNA target sequence for FLJ40243 (NM_173489.2,701-719).
gctgcacatgatttcaact

SEQ ID NO: 425016 - DNA, 19 bp, Homo sapiens
  siRNA target sequence for FLJ40243 (NM_173489.2,731-749).
gaagtacaaagtaacttca

SEQ ID NO: 425017 - DNA, 19 bp, Homo sapiens
  siRNA target sequence for FLJ40243 (NM_173489.2,760-778).
gctaccagatgaattcgtt

SEQ ID NO: 425018 - DNA, 19 bp, Homo sapiens
  siRNA target sequence for FLJ40243 (NM_173489.2,807-825).
gctatgtgtcccagagtat

SEQ ID NO: 425019 - DNA, 19 bp, Homo sapiens
  siRNA target sequence for FLJ40243 (NM_173489.2,812-830).
gtgtcccagagtattcctt

SEQ ID NO: 425020 - DNA, 19 bp, Homo sapiens
  siRNA target sequence for FLJ40243 (NM_173489.2,892-910).
gaaggggactttctgtatt

SEQ ID NO: 425021 - DNA, 19 bp, Homo sapiens
  siRNA target sequence for FLJ40243 (NM_173489.2,906-924).
gtattgcccttgagaaatt

SEQ ID NO: 425022 - DNA, 19 bp, Homo sapiens
  siRNA target sequence for FLJ40243 (NM_173489.2,947-965).
gtcaaccactggagagatt

SEQ ID NO: 425023 - DNA, 19 bp, Homo sapiens
  siRNA target sequence for FLJ40243 (NM_173489.2,992-1010).
cgactgtctgacaagatct

SEQ ID NO: 425024 - DNA, 19 bp, Homo sapiens
  siRNA target sequence for FLJ40243 (NM_173489.2,993-1011).
gactgtctgacaagatctt

SEQ ID NO: 425025 - DNA, 19 bp, Homo sapiens
  siRNA target sequence for FLJ40243 (NM_173489.2,1159-1177).
gctcctgaaccagtataaa

SEQ ID NO: 425026 - DNA, 19 bp, Homo sapiens
  siRNA target sequence for FLJ40243 (NM_173489.2,1163-1181).
ctgaaccagtataaagaca

SEQ ID NO: 425027 - DNA, 19 bp, Homo sapiens
  siRNA target sequence for FLJ40243 (NM_173489.2,1165-1183).
gaaccagtataaagacaaa

SEQ ID NO: 425028 - DNA, 19 bp, Homo sapiens
  siRNA target sequence for FLJ40243 (NM_173489.2,1342-1360).
gaaagcttcaagctgtttt

SEQ ID NO: 425029 - DNA, 19 bp, Homo sapiens
  siRNA target sequence for FLJ40243 (NM_173489.2,1363-1381).
cattctagcccattccaat

SEQ ID NO: 425030 - DNA, 19 bp, Homo sapiens
  siRNA target sequence for FLJ40243 (NM_173489.2,1406-1424).
gatgaacaagtaagaagta

SEQ ID NO: 425031 - DNA, 19 bp, Homo sapiens
  siRNA target sequence for FLJ40243 (NM_173489.2,1434-1452).
ccattcgagtgggaatctt

SEQ ID NO: 425032 - DNA, 19 bp, Homo sapiens
  siRNA target sequence for FLJ40243 (NM_173489.2,1439-1457).
cgagtgggaatcttgactt

SEQ ID NO: 425033 - DNA, 19 bp, Homo sapiens
  siRNA target sequence for FLJ40243 (NM_173489.2,1440-1458).
gagtgggaatcttgacttt

SEQ ID NO: 425034 - DNA, 19 bp, Homo sapiens
  siRNA target sequence for FLJ40243 (NM_173489.2,1444-1462).
gggaatcttgactttgtta

SEQ ID NO: 425035 - DNA, 19 bp, Homo sapiens
  siRNA target sequence for FLJ40243 (NM_173489.2,1488-1506).
ccaggttgagggatcacat

SEQ ID NO: 425036 - DNA, 19 bp, Homo sapiens
  siRNA target sequence for FLJ40243 (NM_173489.2,1492-1510).
gttgagggatcacatcatt

SEQ ID NO: 425037 - DNA, 19 bp, Homo sapiens
  siRNA target sequence for FLJ40243 (NM_173489.2,1540-1558).
gggtgatctcagtacaaaa

SEQ ID NO: 425038 - DNA, 19 bp, Homo sapiens
  siRNA target sequence for FLJ40243 (NM_173489.2,1544-1562).
gatctcagtacaaaagtaa

SEQ ID NO: 425039 - DNA, 19 bp, Homo sapiens
  siRNA target sequence for FLJ40243 (NM_173489.2,1547-1565).
ctcagtacaaaagtaagaa

SEQ ID NO: 425040 - DNA, 19 bp, Homo sapiens
  siRNA target sequence for FLJ40243 (NM_173489.2,1596-1614).
gtgaaaagtcctatattga

SEQ ID NO: 425041 - DNA, 19 bp, Homo sapiens
  siRNA target sequence for FLJ40243 (NM_173489.2,1625-1643).
ggatggccattgattgatt

SEQ ID NO: 425042 - DNA, 19 bp, Homo sapiens
  siRNA target sequence for FLJ40243 (NM_173489.2,1626-1644).
gatggccattgattgatta

SEQ ID NO: 425043 - DNA, 19 bp, Homo sapiens
  siRNA target sequence for FLJ40243 (NM_173489.2,1629-1647).
ggccattgattgattatgt

SEQ ID NO: 425044 - DNA, 19 bp, Homo sapiens
  siRNA target sequence for FLJ40243 (NM_173489.2,1631-1649).
ccattgattgattatgtct

SEQ ID NO: 425045 - DNA, 19 bp, Homo sapiens
  siRNA target sequence for FLJ40243 (NM_173489.2,1632-1650).
cattgattgattatgtctt

SEQ ID NO: 425046 - DNA, 19 bp, Homo sapiens
  siRNA target sequence for FLJ40243 (NM_173489.2,1698-1716).
ctaactttcatgagaatga

SEQ ID NO: 425047 - DNA, 19 bp, Homo sapiens
  siRNA target sequence for FLJ40243 (NM_173489.2,1850-1868).
ctggagcccctgtttagta

SEQ ID NO: 425048 - DNA, 19 bp, Homo sapiens
  siRNA target sequence for FLJ40243 (NM_173489.2,1853-1871).
gagcccctgtttagtatca

SEQ ID NO: 425049 - DNA, 19 bp, Homo sapiens
  siRNA target sequence for FLJ40243 (NM_173489.2,1861-1879).
gtttagtatcatcagaatt

SEQ ID NO: 425050 - DNA, 19 bp, Homo sapiens
  siRNA target sequence for FLJ40243 (NM_173489.2,1981-1999).
ggccagacttctggtaata

SEQ ID NO: 425051 - DNA, 19 bp, Homo sapiens
  siRNA target sequence for FLJ40243 (NM_173489.2,1982-2000).
gccagacttctggtaatat

SEQ ID NO: 425052 - DNA, 19 bp, Homo sapiens
  siRNA target sequence for FLJ40243 (NM_173489.2,2036-2054).
ggtgcaatagggcttttga

SEQ ID NO: 425053 - DNA, 19 bp, Homo sapiens
  siRNA target sequence for FLJ40243 (NM_173489.2,2053-2071).
gaagatactgcctgagata

SEQ ID NO: 425054 - DNA, 19 bp, Homo sapiens
  siRNA target sequence for FLJ40243 (NM_173489.2,2086-2104).
ggtagacctatggaaaaca

SEQ ID NO: 425055 - DNA, 19 bp, Homo sapiens
  siRNA target sequence for FLJ40243 (NM_173489.2,2173-2191).
gcttcagttgctcaaagaa

SEQ ID NO: 425056 - DNA, 19 bp, Homo sapiens
  siRNA target sequence for FLJ40243 (NM_173489.2,2183-2201).
ctcaaagaatccttatgga

SEQ ID NO: 425057 - DNA, 19 bp, Homo sapiens
  siRNA target sequence for FLJ40243 (NM_173489.2,2396-2414).
caaagacagggaataacat

SEQ ID NO: 425058 - DNA, 19 bp, Homo sapiens
  siRNA target sequence for FLJ40243 (NM_173489.2,2400-2418).
gacagggaataacatctat

SEQ ID NO: 425059 - DNA, 19 bp, Homo sapiens
  siRNA target sequence for FLJ40243 (NM_173489.2,2402-2420).
cagggaataacatctattt

SEQ ID NO: 425060 - DNA, 19 bp, Homo sapiens
  siRNA target sequence for FLJ40243 (NM_173489.2,2432-2450).
gccgagaaccatttggata

SEQ ID NO: 425061 - DNA, 19 bp, Homo sapiens
  siRNA target sequence for FLJ40243 (NM_173489.2,2433-2451).
ccgagaaccatttggatat

SEQ ID NO: 425062 - DNA, 19 bp, Homo sapiens
  siRNA target sequence for FLJ40243 (NM_173489.2,2434-2452).
cgagaaccatttggatatt

SEQ ID NO: 425063 - DNA, 19 bp, Homo sapiens
  siRNA target sequence for FLJ40243 (NM_173489.2,2437-2455).
gaaccatttggatattgtt

SEQ ID NO: 425064 - DNA, 19 bp, Homo sapiens
  siRNA target sequence for FLJ40243 (NM_173489.2,2597-2615).
caacttctctccagactta

SEQ ID NO: 425065 - DNA, 19 bp, Homo sapiens
  siRNA target sequence for FLJ40243 (NM_173489.2,2605-2623).
ctccagacttaatcaagat

SEQ ID NO: 425066 - DNA, 19 bp, Homo sapiens
  siRNA target sequence for FLJ40243 (NM_173489.2,2607-2625).
ccagacttaatcaagatat

SEQ ID NO: 425067 - DNA, 19 bp, Homo sapiens
  siRNA target sequence for FLJ40243 (NM_173489.2,2612-2630).
cttaatcaagatatcatat

SEQ ID NO: 425068 - DNA, 19 bp, Homo sapiens
  siRNA target sequence for FLJ40243 (NM_173489.2,2695-2713).
catggatctgcaaatgagt

SEQ ID NO: 425069 - DNA, 19 bp, Homo sapiens
  siRNA target sequence for FLJ40243 (NM_173489.2,2705-2723).
caaatgagtttcacaagaa

SEQ ID NO: 425070 - DNA, 19 bp, Homo sapiens
  siRNA target sequence for FLJ40243 (NM_173489.2,2762-2780).
gatcaggggttccagtttt

SEQ ID NO: 425071 - DNA, 19 bp, Homo sapiens
  siRNA target sequence for FLJ40243 (NM_173489.2,2802-2820).
gttacatgctggacttcat

SEQ ID NO: 425072 - DNA, 19 bp, Homo sapiens
  siRNA target sequence for FLJ40243 (NM_173489.2,2827-2845).
cgagcccctggattcctta

SEQ ID NO: 425073 - DNA, 19 bp, Homo sapiens
  siRNA target sequence for FLJ40243 (NM_173489.2,2867-2885).
gccttaatcgccattaggt

SEQ ID NO: 425074 - DNA, 19 bp, Homo sapiens
  siRNA target sequence for FLJ40243 (NM_173489.2,2868-2886).
ccttaatcgccattaggta

SEQ ID NO: 425075 - DNA, 19 bp, Homo sapiens
  siRNA target sequence for FLJ40243 (NM_173489.2,2869-2887).
cttaatcgccattaggtat

SEQ ID NO: 425076 - DNA, 19 bp, Homo sapiens
  siRNA target sequence for FLJ40243 (NM_173489.2,2877-2895).
ccattaggtatctcagtaa

SEQ ID NO: 425077 - DNA, 19 bp, Homo sapiens
  siRNA target sequence for FLJ40243 (NM_173489.2,2969-2987).
ccacctctggaaaatctga

SEQ ID NO: 425078 - DNA, 19 bp, Homo sapiens
  siRNA target sequence for FLJ40243 (NM_173489.2,3011-3029).
gacaaggagcacattcaat

SEQ ID NO: 425079 - DNA, 19 bp, Homo sapiens
  siRNA target sequence for FLJ40243 (NM_173489.2,3013-3031).
caaggagcacattcaattt

SEQ ID NO: 425080 - DNA, 19 bp, Homo sapiens
  siRNA target sequence for FLJ40243 (NM_173489.2,3017-3035).
gagcacattcaatttctct

SEQ ID NO: 425081 - DNA, 19 bp, Homo sapiens
  siRNA target sequence for FLJ40243 (NM_173489.2,3045-3063).
ccatggacgccctaggaaa

SEQ ID NO: 425082 - DNA, 19 bp, Homo sapiens
  siRNA target sequence for FLJ40243 (NM_173489.2,3046-3064).
catggacgccctaggaaaa

SEQ ID NO: 425083 - DNA, 19 bp, Homo sapiens
  siRNA target sequence for FLJ40243 (NM_173489.2,3049-3067).
ggacgccctaggaaaactt

SEQ ID NO: 425084 - DNA, 19 bp, Homo sapiens
  siRNA target sequence for FLJ40243 (NM_173489.2,3075-3093).
ccatgatgtgggataatgt

SEQ ID NO: 425085 - DNA, 19 bp, Homo sapiens
  siRNA target sequence for FLJ40243 (NM_173489.2,3104-3122).
gactgtcaagaaatgttta

SEQ ID NO: 425086 - DNA, 19 bp, Homo sapiens
  siRNA target sequence for FLJ40243 (NM_173489.2,3136-3154).
gtggcttgtttcacaaaaa

SEQ ID NO: 425087 - DNA, 19 bp, Homo sapiens
  siRNA target sequence for FLJ40243 (NM_173489.2,3189-3207).
cgaaagtgctgacaaatga

SEQ ID NO: 425088 - DNA, 19 bp, Homo sapiens
  siRNA target sequence for FLJ40243 (NM_173489.2,3190-3208).
gaaagtgctgacaaatgat

SEQ ID NO: 425089 - DNA, 19 bp, Homo sapiens
  siRNA target sequence for FLJ40243 (NM_173489.2,3212-3230).
gaggcaccagagaacttta

SEQ ID NO: 425090 - DNA, 19 bp, Homo sapiens
  siRNA target sequence for FLJ40243 (NM_173489.2,3257-3275).
gctcctcactcctgtgata

SEQ ID NO: 425091 - DNA, 19 bp, Homo sapiens
  siRNA target sequence for FLJ40243 (NM_173489.2,3296-3314).
gcggctgctagctcaacta

SEQ ID NO: 425092 - DNA, 19 bp, Homo sapiens
  siRNA target sequence for FLJ40243 (NM_173489.2,3297-3315).
cggctgctagctcaactat

SEQ ID NO: 425093 - DNA, 19 bp, Homo sapiens
  siRNA target sequence for FLJ40243 (NM_173489.2,3298-3316).
ggctgctagctcaactatt

SEQ ID NO: 425094 - DNA, 19 bp, Homo sapiens
  siRNA target sequence for FLJ40243 (NM_173489.2,3309-3327).
caactattggtctgttcta

SEQ ID NO: 425095 - DNA, 19 bp, Homo sapiens
  siRNA target sequence for FLJ40243 (NM_173489.2,3406-3424).
gatcaagatttcttctaaa

SEQ ID NO: 425096 - DNA, 19 bp, Homo sapiens
  siRNA target sequence for FLJ40243 (NM_173489.2,3428-3446).
gctaagattgtcagtaagt

SEQ ID NO: 425097 - DNA, 19 bp, Homo sapiens
  siRNA target sequence for FLJ40243 (NM_173489.2,3505-3523).
cctcaaccccacttgtaca

SEQ ID NO: 425098 - DNA, 19 bp, Homo sapiens
  siRNA target sequence for FLJ40243 (NM_173489.2,3603-3621).
gcacaatctaccatcacat

SEQ ID NO: 425099 - DNA, 19 bp, Homo sapiens
  siRNA target sequence for FLJ40243 (NM_173489.2,3624-3642).
cagtcctcagacaaaaaga

SEQ ID NO: 425100 - DNA, 19 bp, Homo sapiens
  siRNA target sequence for FLJ40243 (NM_173489.2,3683-3701).
gccagctttcacatggata

SEQ ID NO: 425101 - DNA, 19 bp, Homo sapiens
  siRNA target sequence for FLJ40243 (NM_173489.2,3805-3823).
gcaagccttaatagacaaa

SEQ ID NO: 425102 - DNA, 19 bp, Homo sapiens
  siRNA target sequence for FLJ40243 (NM_173489.2,3851-3869).
gccagggttgaggcaattt

SEQ ID NO: 425103 - DNA, 19 bp, Homo sapiens
  siRNA target sequence for FLJ40243 (NM_173489.2,3853-3871).
cagggttgaggcaatttca

SEQ ID NO: 425104 - DNA, 19 bp, Homo sapiens
  siRNA target sequence for FLJ40243 (NM_173489.2,3910-3928).
ctctgtcaccggcttgtat

SEQ ID NO: 425105 - DNA, 19 bp, Homo sapiens
  siRNA target sequence for FLJ40243 (NM_173489.2,4059-4077).
ggctttcaactgctacttt

SEQ ID NO: 425106 - DNA, 19 bp, Homo sapiens
  siRNA target sequence for FLJ40243 (NM_173489.2,4060-4078).
gctttcaactgctacttta

SEQ ID NO: 425107 - DNA, 19 bp, Homo sapiens
  siRNA target sequence for FLJ40243 (NM_173489.2,4127-4145).
gatgagggggacaacttat

SEQ ID NO: 425108 - DNA, 19 bp, Homo sapiens
  siRNA target sequence for FLJ40243 (NM_173489.2,4130-4148).
gagggggacaacttatgga

SEQ ID NO: 425109 - DNA, 19 bp, Homo sapiens
  siRNA target sequence for FLJ40243 (NM_173489.2,4172-4190).
caccacataggcgtatgtt

SEQ ID NO: 425110 - DNA, 19 bp, Homo sapiens
  siRNA target sequence for FLJ40243 (NM_173489.2,4215-4233).
ggcaacacggagtcatact

SEQ ID NO: 425111 - DNA, 19 bp, Homo sapiens
  siRNA target sequence for FLJ40243 (NM_173489.2,4364-4382).
ctgatcttgatggatcaaa

SEQ ID NO: 425112 - DNA, 19 bp, Homo sapiens
  siRNA target sequence for FLJ40243 (NM_173489.2,4366-4384).
gatcttgatggatcaaagt

SEQ ID NO: 425113 - DNA, 19 bp, Homo sapiens
  siRNA target sequence for FLJ40243 (NM_173489.2,4455-4473).
ctcacaaggtgaagaaaca

SEQ ID NO: 425114 - DNA, 19 bp, Homo sapiens
  siRNA target sequence for FLJ40243 (NM_173489.2,4478-4496).
cagttaatgctagaatcta

SEQ ID NO: 425115 - DNA, 19 bp, Homo sapiens
  siRNA target sequence for FLJ40243 (NM_173489.2,4586-4604).
cgagacgtgagcttctact

SEQ ID NO: 425116 - DNA, 19 bp, Homo sapiens
  siRNA target sequence for FLJ40243 (NM_173489.2,4587-4605).
gagacgtgagcttctactt

SEQ ID NO: 425117 - DNA, 19 bp, Homo sapiens
  siRNA target sequence for FLJ40243 (NM_173489.2,4777-4795).
ggatcccaaccccaagatt

SEQ ID NO: 425118 - DNA, 19 bp, Homo sapiens
  siRNA target sequence for FLJ40243 (NM_173489.2,4803-4821).
cttgccgtgatgtcttgat

SEQ ID NO: 425119 - DNA, 19 bp, Homo sapiens
  siRNA target sequence for FLJ40243 (NM_173489.2,4892-4910).
ccaagggccagggatttct

SEQ ID NO: 425120 - DNA, 19 bp, Homo sapiens
  siRNA target sequence for FLJ40243 (NM_173489.2,4893-4911).
caagggccagggatttcta

SEQ ID NO: 425121 - DNA, 19 bp, Homo sapiens
  siRNA target sequence for FLJ40243 (NM_173489.2,4914-4932).
ggcaattctgtgtgaaact

SEQ ID NO: 425122 - DNA, 19 bp, Homo sapiens
  siRNA target sequence for FLJ40243 (NM_173489.2,5062-5080).
ccaatatgtggagttacta

SEQ ID NO: 425123 - DNA, 19 bp, Homo sapiens
  siRNA target sequence for FLJ40243 (NM_173489.2,5170-5188).
cctcctgagaaggtgtaaa

SEQ ID NO: 425124 - DNA, 19 bp, Homo sapiens
  siRNA target sequence for FLJ40243 (NM_173489.2,5182-5200).
gtgtaaagagacaagcatt

SEQ ID NO: 425125 - DNA, 19 bp, Homo sapiens
  siRNA target sequence for LOC134285 (NM_173490.3,174-192).
gttccaggcatgccaatat

SEQ ID NO: 425126 - DNA, 19 bp, Homo sapiens
  siRNA target sequence for LOC134285 (NM_173490.3,334-352).
cccgaccgagccttcatct

SEQ ID NO: 425127 - DNA, 19 bp, Homo sapiens
  siRNA target sequence for LOC134285 (NM_173490.3,467-485).
cgcaggaaccgctaaacga

SEQ ID NO: 425128 - DNA, 19 bp, Homo sapiens
  siRNA target sequence for LOC134285 (NM_173490.3,556-574).
gtgcttgtgggattgtgtt

SEQ ID NO: 425129 - DNA, 19 bp, Homo sapiens
  siRNA target sequence for LOC134285 (NM_173490.3,580-598).
gtggttgcccatgttaaga

SEQ ID NO: 425130 - DNA, 19 bp, Homo sapiens
  siRNA target sequence for LOC134285 (NM_173490.3,643-661).
gagggacagatccagatta

SEQ ID NO: 425131 - DNA, 19 bp, Homo sapiens
  siRNA target sequence for LOC134285 (NM_173490.3,682-700).
gtaggtgactcggtaataa

SEQ ID NO: 425132 - DNA, 19 bp, Homo sapiens
  siRNA target sequence for LOC134285 (NM_173490.3,685-703).
ggtgactcggtaataatat

SEQ ID NO: 425133 - DNA, 19 bp, Homo sapiens
  siRNA target sequence for LOC134285 (NM_173490.3,686-704).
gtgactcggtaataatatt

SEQ ID NO: 425134 - DNA, 19 bp, Homo sapiens
  siRNA target sequence for LOC134285 (NM_173490.3,757-775).
gagagtcctggaactaaca

SEQ ID NO: 425135 - DNA, 19 bp, Homo sapiens
  siRNA target sequence for LOC134285 (NM_173490.3,790-808).
gaaaaccccccttcatatt

SEQ ID NO: 425136 - DNA, 19 bp, Homo sapiens
  siRNA target sequence for LOC134285 (NM_173490.3,866-884).
gtgaatctatatataccat

SEQ ID NO: 425137 - DNA, 19 bp, Homo sapiens
  siRNA target sequence for LOC134285 (NM_173490.3,943-961).
cctcctagatatgaagaaa

SEQ ID NO: 425138 - DNA, 19 bp, Homo sapiens
  siRNA target sequence for MGC35261 (NM_173494.1,126-144).
gactttgagagtgtttctt

SEQ ID NO: 425139 - DNA, 19 bp, Homo sapiens
  siRNA target sequence for MGC35261 (NM_173494.1,162-180).
gccctctctaagctactta

SEQ ID NO: 425140 - DNA, 19 bp, Homo sapiens
  siRNA target sequence for MGC35261 (NM_173494.1,163-181).
ccctctctaagctacttaa

SEQ ID NO: 425141 - DNA, 19 bp, Homo sapiens
  siRNA target sequence for MGC35261 (NM_173494.1,164-182).
cctctctaagctacttaat

SEQ ID NO: 425142 - DNA, 19 bp, Homo sapiens
  siRNA target sequence for MGC35261 (NM_173494.1,215-233).
gacaaatggtttatctact

SEQ ID NO: 425143 - DNA, 19 bp, Homo sapiens
  siRNA target sequence for MGC35261 (NM_173494.1,245-263).
gggtcctgggaatattgga

SEQ ID NO: 425144 - DNA, 19 bp, Homo sapiens
  siRNA target sequence for MGC35261 (NM_173494.1,382-400).
gagaaatcccagagtatga

SEQ ID NO: 425145 - DNA, 19 bp, Homo sapiens
  siRNA target sequence for MGC35261 (NM_173494.1,416-434).
gcaggtgggaactgaagat

SEQ ID NO: 425146 - DNA, 19 bp, Homo sapiens
  siRNA target sequence for MGC35261 (NM_173494.1,417-435).
caggtgggaactgaagata

SEQ ID NO: 425147 - DNA, 19 bp, Homo sapiens
  siRNA target sequence for MGC35261 (NM_173494.1,419-437).
ggtgggaactgaagatata

SEQ ID NO: 425148 - DNA, 19 bp, Homo sapiens
  siRNA target sequence for MGC35261 (NM_173494.1,472-490).
gttgttgcagtgaactagt

SEQ ID NO: 425149 - DNA, 19 bp, Homo sapiens
  siRNA target sequence for MGC35261 (NM_173494.1,481-499).
gtgaactagtggctaaaat

SEQ ID NO: 425150 - DNA, 19 bp, Homo sapiens
  siRNA target sequence for MGC35261 (NM_173494.1,578-596).
gaagctgttgataactctt

SEQ ID NO: 425151 - DNA, 19 bp, Homo sapiens
  siRNA target sequence for MGC35261 (NM_173494.1,597-615).
cctgagctggtggaatgta

SEQ ID NO: 425152 - DNA, 19 bp, Homo sapiens
  siRNA target sequence for MGC35261 (NM_173494.1,613-631).
gtaccagtgccaaagcatt

SEQ ID NO: 425153 - DNA, 19 bp, Homo sapiens
  siRNA target sequence for MGC35261 (NM_173494.1,654-672).
cttgaaatcactatgacta

SEQ ID NO: 425154 - DNA, 19 bp, Homo sapiens
  siRNA target sequence for FLJ37306 (NM_173497.1,289-307).
ctgttagcccgaagaaaga

SEQ ID NO: 425155 - DNA, 19 bp, Homo sapiens
  siRNA target sequence for FLJ37306 (NM_173497.1,376-394).
caccaatttgccttgatgt

SEQ ID NO: 425156 - DNA, 19 bp, Homo sapiens
  siRNA target sequence for FLJ37306 (NM_173497.1,378-396).
ccaatttgccttgatgtta

SEQ ID NO: 425157 - DNA, 19 bp, Homo sapiens
  siRNA target sequence for FLJ37306 (NM_173497.1,385-403).
gccttgatgttagacaaaa

SEQ ID NO: 425158 - DNA, 19 bp, Homo sapiens
  siRNA target sequence for FLJ37306 (NM_173497.1,399-417).
caaaaacagcgtacatcta

SEQ ID NO: 425159 - DNA, 19 bp, Homo sapiens
  siRNA target sequence for FLJ37306 (NM_173497.1,472-490).
ctatccagcccaaaactgt

SEQ ID NO: 425160 - DNA, 19 bp, Homo sapiens
  siRNA target sequence for FLJ37306 (NM_173497.1,524-542).
gtcatcaggagattggaaa

SEQ ID NO: 425161 - DNA, 19 bp, Homo sapiens
  siRNA target sequence for FLJ37306 (NM_173497.1,620-638).
ctcatttaacaccattgaa

SEQ ID NO: 425162 - DNA, 19 bp, Homo sapiens
  siRNA target sequence for FLJ37306 (NM_173497.1,641-659).
ctctgggattaatgctaaa

SEQ ID NO: 425163 - DNA, 19 bp, Homo sapiens
  siRNA target sequence for FLJ37306 (NM_173497.1,643-661).
ctgggattaatgctaaatt

SEQ ID NO: 425164 - DNA, 19 bp, Homo sapiens
  siRNA target sequence for FLJ37306 (NM_173497.1,672-690).
gtgtatgataccttactta

SEQ ID NO: 425165 - DNA, 19 bp, Homo sapiens
  siRNA target sequence for FLJ37306 (NM_173497.1,683-701).
cttacttaatactgtaagt

SEQ ID NO: 425166 - DNA, 19 bp, Homo sapiens
  siRNA target sequence for MGC44294 (NM_173499.1,280-298).
gaacctcgtcgcgacattt

SEQ ID NO: 425167 - DNA, 19 bp, Homo sapiens
  siRNA target sequence for MGC44294 (NM_173499.1,284-302).
ctcgtcgcgacatttctca

SEQ ID NO: 425168 - DNA, 19 bp, Homo sapiens
  siRNA target sequence for MGC44294 (NM_173499.1,322-340).
gcggctggaggcctttcaa

SEQ ID NO: 425169 - DNA, 19 bp, Homo sapiens
  siRNA target sequence for LOC146174 (NM_173501.1,270-288).
ggttacttctgccagatta

SEQ ID NO: 425170 - DNA, 19 bp, Homo sapiens
  siRNA target sequence for LOC146174 (NM_173501.1,271-289).
gttacttctgccagattaa

SEQ ID NO: 425171 - DNA, 19 bp, Homo sapiens
  siRNA target sequence for LOC146174 (NM_173501.1,321-339).
ctcgtgcgacagtgtcaaa

SEQ ID NO: 425172 - DNA, 19 bp, Homo sapiens
  siRNA target sequence for LOC146174 (NM_173501.1,323-341).
cgtgcgacagtgtcaaaca

SEQ ID NO: 425173 - DNA, 19 bp, Homo sapiens
  siRNA target sequence for LOC146174 (NM_173501.1,324-342).
gtgcgacagtgtcaaacaa

SEQ ID NO: 425174 - DNA, 19 bp, Homo sapiens
  siRNA target sequence for LOC146174 (NM_173501.1,392-410).
ggtcaccacactgtttttt

SEQ ID NO: 425175 - DNA, 19 bp, Homo sapiens
  siRNA target sequence for LOC146174 (NM_173501.1,393-411).
gtcaccacactgtttttta

SEQ ID NO: 425176 - DNA, 19 bp, Homo sapiens
  siRNA target sequence for LOC146174 (NM_173501.1,413-431).
catcatgggaatcatttca

SEQ ID NO: 425177 - DNA, 19 bp, Homo sapiens
  siRNA target sequence for LOC146174 (NM_173501.1,469-487).
ggcgaagagaagctacaaa

SEQ ID NO: 425178 - DNA, 19 bp, Homo sapiens
  siRNA target sequence for LOC146174 (NM_173501.1,470-488).
gcgaagagaagctacaaaa

SEQ ID NO: 425179 - DNA, 19 bp, Homo sapiens
  siRNA target sequence for LOC146174 (NM_173501.1,471-489).
cgaagagaagctacaaaat

SEQ ID NO: 425180 - DNA, 19 bp, Homo sapiens
  siRNA target sequence for MGC42718 (NM_173506.3,988-1006).
gggaccccagcatttgaga

SEQ ID NO: 425181 - DNA, 19 bp, Homo sapiens
  siRNA target sequence for MGC42718 (NM_173506.3,1052-1070).
cgggctggagctcttttgt

SEQ ID NO: 425182 - DNA, 19 bp, Homo sapiens
  siRNA target sequence for MGC42718 (NM_173506.3,1079-1097).
gcaacagcctcaagattca

SEQ ID NO: 425183 - DNA, 19 bp, Homo sapiens
  siRNA target sequence for MGC42718 (NM_173506.3,1092-1110).
gattcagagctgttgcttt

SEQ ID NO: 425184 - DNA, 19 bp, Homo sapiens
  siRNA target sequence for MGC42718 (NM_173506.3,1100-1118).
gctgttgctttccataact

SEQ ID NO: 425185 - DNA, 19 bp, Homo sapiens
  siRNA target sequence for MGC42718 (NM_173506.3,1167-1185).
gcgaggagacgctagtgtt

SEQ ID NO: 425186 - DNA, 19 bp, Homo sapiens
  siRNA target sequence for MGC42718 (NM_173506.3,1207-1225).
gggagttgtgggctttaaa

SEQ ID NO: 425187 - DNA, 19 bp, Homo sapiens
  siRNA target sequence for MGC42718 (NM_173506.3,1308-1326).
gcgtctgccggtcttatct

SEQ ID NO: 425188 - DNA, 19 bp, Homo sapiens
  siRNA target sequence for MGC42718 (NM_173506.3,1310-1328).
gtctgccggtcttatctct

SEQ ID NO: 425189 - DNA, 19 bp, Homo sapiens
  siRNA target sequence for MGC42718 (NM_173506.3,1498-1516).
cagttccaccttaaaattt

SEQ ID NO: 425190 - DNA, 19 bp, Homo sapiens
  siRNA target sequence for MGC42718 (NM_173506.3,1552-1570).
ggggtgtgctcgtgaacat

SEQ ID NO: 425191 - DNA, 19 bp, Homo sapiens
  siRNA target sequence for MGC42718 (NM_173506.3,1553-1571).
gggtgtgctcgtgaacata

SEQ ID NO: 425192 - DNA, 19 bp, Homo sapiens
  siRNA target sequence for MGC42718 (NM_173506.3,1554-1572).
ggtgtgctcgtgaacataa

SEQ ID NO: 425193 - DNA, 19 bp, Homo sapiens
  siRNA target sequence for MGC42718 (NM_173506.3,1573-1591).
ccagcttttagcagatttt

SEQ ID NO: 425194 - DNA, 19 bp, Homo sapiens
  siRNA target sequence for MGC42718 (NM_173506.3,1622-1640).
gtcctcaacatcttagaga

SEQ ID NO: 425195 - DNA, 19 bp, Homo sapiens
  siRNA target sequence for FLJ37118 (NM_173507.1,169-187).
gcctgatgggactgtatgt

SEQ ID NO: 425196 - DNA, 19 bp, Homo sapiens
  siRNA target sequence for FLJ37118 (NM_173507.1,178-196).
gactgtatgtggacatgaa

SEQ ID NO: 425197 - DNA, 19 bp, Homo sapiens
  siRNA target sequence for FLJ37118 (NM_173507.1,271-289).
ctctgccaggagtgtcatt

SEQ ID NO: 425198 - DNA, 19 bp, Homo sapiens
  siRNA target sequence for FLJ37118 (NM_173507.1,295-313).
cagagtcggaggtcttagt

SEQ ID NO: 425199 - DNA, 19 bp, Homo sapiens
  siRNA target sequence for FLJ37118 (NM_173507.1,301-319).
cggaggtcttagttcacat

SEQ ID NO: 425200 - DNA, 19 bp, Homo sapiens
  siRNA target sequence for FLJ37118 (NM_173507.1,506-524).
gggaacacaagctttctat

SEQ ID NO: 425201 - DNA, 19 bp, Homo sapiens
  siRNA target sequence for FLJ37118 (NM_173507.1,778-796).
ccgacgcactggccaaaaa

SEQ ID NO: 425202 - DNA, 19 bp, Homo sapiens
  siRNA target sequence for FLJ37118 (NM_173507.1,1078-1096).
ctgaacgacctgaatcact

SEQ ID NO: 425203 - DNA, 19 bp, Homo sapiens
  siRNA target sequence for FLJ37118 (NM_173507.1,1188-1206).
ctgctgagaggcttgtcaa

SEQ ID NO: 425204 - DNA, 19 bp, Homo sapiens
  siRNA target sequence for FLJ37118 (NM_173507.1,1488-1506).
gcgagggatgccacattct

SEQ ID NO: 425205 - DNA, 19 bp, Homo sapiens
  siRNA target sequence for FLJ37118 (NM_173507.1,1822-1840).
gcctggtggagcttgaata

SEQ ID NO: 425206 - DNA, 19 bp, Homo sapiens
  siRNA target sequence for SLC35F3 (NM_173508.1,293-311).
cgattaaggaggatctgaa

SEQ ID NO: 425207 - DNA, 19 bp, Homo sapiens
  siRNA target sequence for SLC35F3 (NM_173508.1,535-553).
gcgcaactcaagaagatct

SEQ ID NO: 425208 - DNA, 19 bp, Homo sapiens
  siRNA target sequence for SLC35F3 (NM_173508.1,536-554).
cgcaactcaagaagatctt

SEQ ID NO: 425209 - DNA, 19 bp, Homo sapiens
  siRNA target sequence for SLC35F3 (NM_173508.1,665-683).
ccaccaactggaacttttt

SEQ ID NO: 425210 - DNA, 19 bp, Homo sapiens
  siRNA target sequence for SLC35F3 (NM_173508.1,668-686).
ccaactggaactttttatt

SEQ ID NO: 425211 - DNA, 19 bp, Homo sapiens
  siRNA target sequence for SLC35F3 (NM_173508.1,887-905).
cggatgtctccgtgttgtt

SEQ ID NO: 425212 - DNA, 19 bp, Homo sapiens
  siRNA target sequence for SLC35F3 (NM_173508.1,889-907).
gatgtctccgtgttgttct

SEQ ID NO: 425213 - DNA, 19 bp, Homo sapiens
  siRNA target sequence for SLC35F3 (NM_173508.1,908-926).
gctgcaacaaagcttttgt

SEQ ID NO: 425214 - DNA, 19 bp, Homo sapiens
  siRNA target sequence for SLC35F3 (NM_173508.1,1090-1108).
gccctctacaaggttttgt

SEQ ID NO: 425215 - DNA, 19 bp, Homo sapiens
  siRNA target sequence for SLC35F3 (NM_173508.1,1091-1109).
ccctctacaaggttttgtt

SEQ ID NO: 425216 - DNA, 19 bp, Homo sapiens
  siRNA target sequence for SLC35F3 (NM_173508.1,1138-1156).
ggagaagccgccttatttt

SEQ ID NO: 425217 - DNA, 19 bp, Homo sapiens
  siRNA target sequence for SLC35F3 (NM_173508.1,1139-1157).
gagaagccgccttattttt

SEQ ID NO: 425218 - DNA, 19 bp, Homo sapiens
  siRNA target sequence for SLC35F3 (NM_173508.1,1193-1211).
cctgcattcctattatcct

SEQ ID NO: 425219 - DNA, 19 bp, Homo sapiens
  siRNA target sequence for SLC35F3 (NM_173508.1,1235-1253).
ggagctcttttgatgacat

SEQ ID NO: 425220 - DNA, 19 bp, Homo sapiens
  siRNA target sequence for SLC35F3 (NM_173508.1,1400-1418).
ccagtcagatcgtcttcaa

SEQ ID NO: 425221 - DNA, 19 bp, Homo sapiens
  siRNA target sequence for SLC35F3 (NM_173508.1,1401-1419).
cagtcagatcgtcttcaat

SEQ ID NO: 425222 - DNA, 19 bp, Homo sapiens
  siRNA target sequence for SLC35F3 (NM_173508.1,1426-1444).
cgggtcatcgccatcatca

SEQ ID NO: 425223 - DNA, 19 bp, Homo sapiens
  siRNA target sequence for SLC35F3 (NM_173508.1,1487-1505).
gggatgtctggttgatcaa

SEQ ID NO: 425224 - DNA, 19 bp, Homo sapiens
  siRNA target sequence for SLC35F3 (NM_173508.1,1506-1524).
gctgctcacccgactcaaa

SEQ ID NO: 425225 - DNA, 19 bp, Homo sapiens
  siRNA target sequence for SLC35F3 (NM_173508.1,1510-1528).
ctcacccgactcaaagtga

SEQ ID NO: 425226 - DNA, 19 bp, Homo sapiens
  siRNA target sequence for MGC16664 (NM_173509.2,401-419).
cagcgggaacggttgtgat

SEQ ID NO: 425227 - DNA, 19 bp, Homo sapiens
  siRNA target sequence for MGC16664 (NM_173509.2,417-435).
gatcactggcggaatccta

SEQ ID NO: 425228 - DNA, 19 bp, Homo sapiens
  siRNA target sequence for MGC16664 (NM_173509.2,699-717).
cagctcccccttttacata

SEQ ID NO: 425229 - DNA, 19 bp, Homo sapiens
  siRNA target sequence for MGC16664 (NM_173509.2,859-877).
gaggccttcaccaatccaa

SEQ ID NO: 425230 - DNA, 19 bp, Homo sapiens
  siRNA target sequence for MGC16664 (NM_173509.2,870-888).
caatccaagggctattagt

SEQ ID NO: 425231 - DNA, 19 bp, Homo sapiens
  siRNA target sequence for FLJ33814 (NM_173510.1,369-387).
gattgtccagtaagaaaga

SEQ ID NO: 425232 - DNA, 19 bp, Homo sapiens
  siRNA target sequence for FLJ33814 (NM_173510.1,439-457).
gtgcacatcaggatgtaga

SEQ ID NO: 425233 - DNA, 19 bp, Homo sapiens
  siRNA target sequence for FLJ33814 (NM_173510.1,493-511).
ccatacctgggatattaga

SEQ ID NO: 425234 - DNA, 19 bp, Homo sapiens
  siRNA target sequence for FLJ33814 (NM_173510.1,494-512).
catacctgggatattagat

SEQ ID NO: 425235 - DNA, 19 bp, Homo sapiens
  siRNA target sequence for FLJ33814 (NM_173510.1,498-516).
cctgggatattagatgtta

SEQ ID NO: 425236 - DNA, 19 bp, Homo sapiens
  siRNA target sequence for FLJ33814 (NM_173510.1,499-517).
ctgggatattagatgttat

SEQ ID NO: 425237 - DNA, 19 bp, Homo sapiens
  siRNA target sequence for FLJ33814 (NM_173510.1,582-600).
gagattgaggacaggataa

SEQ ID NO: 425238 - DNA, 19 bp, Homo sapiens
  siRNA target sequence for FLJ33814 (NM_173510.1,584-602).
gattgaggacaggataatt

SEQ ID NO: 425239 - DNA, 19 bp, Homo sapiens
  siRNA target sequence for FLJ33814 (NM_173510.1,794-812).
gccaaagccatcctctaat

SEQ ID NO: 425240 - DNA, 19 bp, Homo sapiens
  siRNA target sequence for FLJ33814 (NM_173510.1,795-813).
ccaaagccatcctctaata

SEQ ID NO: 425241 - DNA, 19 bp, Homo sapiens
  siRNA target sequence for FLJ33814 (NM_173510.1,802-820).
catcctctaatactaagaa

SEQ ID NO: 425242 - DNA, 19 bp, Homo sapiens
  siRNA target sequence for FLJ33814 (NM_173510.1,866-884).
cttccctcagagaactgaa

SEQ ID NO: 425243 - DNA, 19 bp, Homo sapiens
  siRNA target sequence for FLJ33814 (NM_173510.1,907-925).
cagggatgtctctttataa

SEQ ID NO: 425244 - DNA, 19 bp, Homo sapiens
  siRNA target sequence for FLJ38771 (NM_173511.1,357-375).
gcatgggctgaagaatact

SEQ ID NO: 425245 - DNA, 19 bp, Homo sapiens
  siRNA target sequence for FLJ38771 (NM_173511.1,416-434).
gggcagtacagatcaactt

SEQ ID NO: 425246 - DNA, 19 bp, Homo sapiens
  siRNA target sequence for FLJ38771 (NM_173511.1,417-435).
ggcagtacagatcaactta

SEQ ID NO: 425247 - DNA, 19 bp, Homo sapiens
  siRNA target sequence for FLJ38771 (NM_173511.1,418-436).
gcagtacagatcaacttaa

SEQ ID NO: 425248 - DNA, 19 bp, Homo sapiens
  siRNA target sequence for FLJ38771 (NM_173511.1,456-474).
cagcagttgcagagaagta

SEQ ID NO: 425249 - DNA, 19 bp, Homo sapiens
  siRNA target sequence for FLJ38771 (NM_173511.1,484-502).
gtcggcatcatcgagataa

SEQ ID NO: 425250 - DNA, 19 bp, Homo sapiens
  siRNA target sequence for FLJ38771 (NM_173511.1,488-506).
gcatcatcgagataaagaa

SEQ ID NO: 425251 - DNA, 19 bp, Homo sapiens
  siRNA target sequence for FLJ38771 (NM_173511.1,525-543).
ggcaaccatgcagctatta

SEQ ID NO: 425252 - DNA, 19 bp, Homo sapiens
  siRNA target sequence for FLJ38771 (NM_173511.1,526-544).
gcaaccatgcagctattaa

SEQ ID NO: 425253 - DNA, 19 bp, Homo sapiens
  siRNA target sequence for FLJ38771 (NM_173511.1,622-640).
ggaatagcgtggaaggatt

SEQ ID NO: 425254 - DNA, 19 bp, Homo sapiens
  siRNA target sequence for FLJ38771 (NM_173511.1,628-646).
gcgtggaaggattgaatca

SEQ ID NO: 425255 - DNA, 19 bp, Homo sapiens
  siRNA target sequence for FLJ38771 (NM_173511.1,690-708).
caacttataccgcaagata

SEQ ID NO: 425256 - DNA, 19 bp, Homo sapiens
  siRNA target sequence for FLJ38771 (NM_173511.1,795-813).
gacaggggaagcaacaaca

SEQ ID NO: 425257 - DNA, 19 bp, Homo sapiens
  siRNA target sequence for FLJ38771 (NM_173511.1,892-910).
cggatgacctgcttgttga

SEQ ID NO: 425258 - DNA, 19 bp, Homo sapiens
  siRNA target sequence for FLJ38771 (NM_173511.1,966-984).
ccaaaacctaacaacagtt

SEQ ID NO: 425259 - DNA, 19 bp, Homo sapiens
  siRNA target sequence for FLJ38771 (NM_173511.1,967-985).
caaaacctaacaacagtta

SEQ ID NO: 425260 - DNA, 19 bp, Homo sapiens
  siRNA target sequence for FLJ38771 (NM_173511.1,1045-1063).
cgccaaaacagcttcatga

SEQ ID NO: 425261 - DNA, 19 bp, Homo sapiens
  siRNA target sequence for FLJ38771 (NM_173511.1,1097-1115).
ggtgaatttcattcctaaa

SEQ ID NO: 425262 - DNA, 19 bp, Homo sapiens
  siRNA target sequence for FLJ38771 (NM_173511.1,1158-1176).
cttcctaccccggatctta

SEQ ID NO: 425263 - DNA, 19 bp, Homo sapiens
  siRNA target sequence for FLJ38771 (NM_173511.1,1162-1180).
ctaccccggatcttacact

SEQ ID NO: 425264 - DNA, 19 bp, Homo sapiens
  siRNA target sequence for FLJ38771 (NM_173511.1,1284-1302).
gtctctcgaggaacaagta

SEQ ID NO: 425265 - DNA, 19 bp, Homo sapiens
  siRNA target sequence for FLJ38771 (NM_173511.1,1286-1304).
ctctcgaggaacaagtaca

SEQ ID NO: 425266 - DNA, 19 bp, Homo sapiens
  siRNA target sequence for MGC43122 (NM_173513.2,343-361).
ggacaatggcagtagagat

SEQ ID NO: 425267 - DNA, 19 bp, Homo sapiens
  siRNA target sequence for MGC43122 (NM_173513.2,400-418).
cactgtcccgggaaagaaa

SEQ ID NO: 425268 - DNA, 19 bp, Homo sapiens
  siRNA target sequence for MGC43122 (NM_173513.2,554-572).
gataaagaatccttctgta

SEQ ID NO: 425269 - DNA, 19 bp, Homo sapiens
  siRNA target sequence for MGC43122 (NM_173513.2,613-631).
ctgtgtgtgccattctaca

SEQ ID NO: 425270 - DNA, 19 bp, Homo sapiens
  siRNA target sequence for PNLDC1 (NM_173516.1,179-197).
gcacccgaggactgctatt

SEQ ID NO: 425271 - DNA, 19 bp, Homo sapiens
  siRNA target sequence for PNLDC1 (NM_173516.1,180-198).
cacccgaggactgctattt

SEQ ID NO: 425272 - DNA, 19 bp, Homo sapiens
  siRNA target sequence for PNLDC1 (NM_173516.1,211-229).
gcaggtctggacatagagt

SEQ ID NO: 425273 - DNA, 19 bp, Homo sapiens
  siRNA target sequence for PNLDC1 (NM_173516.1,264-282).
gcagatcagtctttttgat

SEQ ID NO: 425274 - DNA, 19 bp, Homo sapiens
  siRNA target sequence for PNLDC1 (NM_173516.1,285-303).
gccatcggagtggtatcta

SEQ ID NO: 425275 - DNA, 19 bp, Homo sapiens
  siRNA target sequence for PNLDC1 (NM_173516.1,286-304).
ccatcggagtggtatctaa

SEQ ID NO: 425276 - DNA, 19 bp, Homo sapiens
  siRNA target sequence for PNLDC1 (NM_173516.1,287-305).
catcggagtggtatctaaa

SEQ ID NO: 425277 - DNA, 19 bp, Homo sapiens
  siRNA target sequence for PNLDC1 (NM_173516.1,353-371).
ctgtgttttccgctattga

SEQ ID NO: 425278 - DNA, 19 bp, Homo sapiens
  siRNA target sequence for PNLDC1 (NM_173516.1,387-405).
gtatatagcccattcttgt

SEQ ID NO: 425279 - DNA, 19 bp, Homo sapiens
  siRNA target sequence for PNLDC1 (NM_173516.1,395-413).
cccattcttgtaacttcta

SEQ ID NO: 425280 - DNA, 19 bp, Homo sapiens
  siRNA target sequence for PNLDC1 (NM_173516.1,425-443).
caacgtttgggattttgga

SEQ ID NO: 425281 - DNA, 19 bp, Homo sapiens
  siRNA target sequence for PNLDC1 (NM_173516.1,462-480).
ggcttccagtgttcagttt

SEQ ID NO: 425282 - DNA, 19 bp, Homo sapiens
  siRNA target sequence for PNLDC1 (NM_173516.1,487-505).
cagtatggcttcaactata

SEQ ID NO: 425283 - DNA, 19 bp, Homo sapiens
  siRNA target sequence for PNLDC1 (NM_173516.1,494-512).
gcttcaactataacaagtt

SEQ ID NO: 425284 - DNA, 19 bp, Homo sapiens
  siRNA target sequence for PNLDC1 (NM_173516.1,522-540).
cggaatcccatatatgaat

SEQ ID NO: 425285 - DNA, 19 bp, Homo sapiens
  siRNA target sequence for PNLDC1 (NM_173516.1,596-614).
gcagctctccggataaaga

SEQ ID NO: 425286 - DNA, 19 bp, Homo sapiens
  siRNA target sequence for PNLDC1 (NM_173516.1,604-622).
ccggataaagaccaaatca

SEQ ID NO: 425287 - DNA, 19 bp, Homo sapiens
  siRNA target sequence for PNLDC1 (NM_173516.1,605-623).
cggataaagaccaaatcaa

SEQ ID NO: 425288 - DNA, 19 bp, Homo sapiens
  siRNA target sequence for PNLDC1 (NM_173516.1,753-771).
ctggacggtgctgaaagat

SEQ ID NO: 425289 - DNA, 19 bp, Homo sapiens
  siRNA target sequence for PNLDC1 (NM_173516.1,755-773).
ggacggtgctgaaagatga

SEQ ID NO: 425290 - DNA, 19 bp, Homo sapiens
  siRNA target sequence for PNLDC1 (NM_173516.1,870-888).
ctcagcaaggggtttttct

SEQ ID NO: 425291 - DNA, 19 bp, Homo sapiens
  siRNA target sequence for PNLDC1 (NM_173516.1,872-890).
cagcaaggggtttttctgt

SEQ ID NO: 425292 - DNA, 19 bp, Homo sapiens
  siRNA target sequence for PNLDC1 (NM_173516.1,958-976).
cacctccatgagaagttct

SEQ ID NO: 425293 - DNA, 19 bp, Homo sapiens
  siRNA target sequence for PNLDC1 (NM_173516.1,980-998).
gacccctcccagaaagcta

SEQ ID NO: 425294 - DNA, 19 bp, Homo sapiens
  siRNA target sequence for PNLDC1 (NM_173516.1,988-1006).
ccagaaagctacgatcaat

SEQ ID NO: 425295 - DNA, 19 bp, Homo sapiens
  siRNA target sequence for PNLDC1 (NM_173516.1,989-1007).
cagaaagctacgatcaatt

SEQ ID NO: 425296 - DNA, 19 bp, Homo sapiens
  siRNA target sequence for PNLDC1 (NM_173516.1,991-1009).
gaaagctacgatcaattta

SEQ ID NO: 425297 - DNA, 19 bp, Homo sapiens
  siRNA target sequence for PNLDC1 (NM_173516.1,1014-1032).
gaatatccacagcctattt

SEQ ID NO: 425298 - DNA, 19 bp, Homo sapiens
  siRNA target sequence for PNLDC1 (NM_173516.1,1045-1063).
gataccaagagtgtaacaa

SEQ ID NO: 425299 - DNA, 19 bp, Homo sapiens
  siRNA target sequence for PNLDC1 (NM_173516.1,1050-1068).
caagagtgtaacaaaggat

SEQ ID NO: 425300 - DNA, 19 bp, Homo sapiens
  siRNA target sequence for PNLDC1 (NM_173516.1,1089-1107).
cccgagggtgtcgaatctt

SEQ ID NO: 425301 - DNA, 19 bp, Homo sapiens
  siRNA target sequence for PNLDC1 (NM_173516.1,1100-1118).
cgaatctttcggaagtcta

SEQ ID NO: 425302 - DNA, 19 bp, Homo sapiens
  siRNA target sequence for PNLDC1 (NM_173516.1,1101-1119).
gaatctttcggaagtctat

SEQ ID NO: 425303 - DNA, 19 bp, Homo sapiens
  siRNA target sequence for PNLDC1 (NM_173516.1,1176-1194).
cgcgagcaggtgtgagaaa

SEQ ID NO: 425304 - DNA, 19 bp, Homo sapiens
  siRNA target sequence for PNLDC1 (NM_173516.1,1177-1195).
gcgagcaggtgtgagaaat

SEQ ID NO: 425305 - DNA, 19 bp, Homo sapiens
  siRNA target sequence for PNLDC1 (NM_173516.1,1178-1196).
cgagcaggtgtgagaaata

SEQ ID NO: 425306 - DNA, 19 bp, Homo sapiens
  siRNA target sequence for PNLDC1 (NM_173516.1,1181-1199).
gcaggtgtgagaaatatgt

SEQ ID NO: 425307 - DNA, 19 bp, Homo sapiens
  siRNA target sequence for PNLDC1 (NM_173516.1,1182-1200).
caggtgtgagaaatatgtt

SEQ ID NO: 425308 - DNA, 19 bp, Homo sapiens
  siRNA target sequence for PNLDC1 (NM_173516.1,1184-1202).
ggtgtgagaaatatgttga

SEQ ID NO: 425309 - DNA, 19 bp, Homo sapiens
  siRNA target sequence for PNLDC1 (NM_173516.1,1215-1233).
ccacgaagccgcgtatgat

SEQ ID NO: 425310 - DNA, 19 bp, Homo sapiens
  siRNA target sequence for PNLDC1 (NM_173516.1,1239-1257).
cctctgtgggtcagttctt

SEQ ID NO: 425311 - DNA, 19 bp, Homo sapiens
  siRNA target sequence for PNLDC1 (NM_173516.1,1244-1262).
gtgggtcagttcttttgaa

SEQ ID NO: 425312 - DNA, 19 bp, Homo sapiens
  siRNA target sequence for PNLDC1 (NM_173516.1,1247-1265).
ggtcagttcttttgaaagt

SEQ ID NO: 425313 - DNA, 19 bp, Homo sapiens
  siRNA target sequence for PNLDC1 (NM_173516.1,1438-1456).
ctcatcctcagcgtcaaaa

SEQ ID NO: 425314 - DNA, 19 bp, Homo sapiens
  siRNA target sequence for PNLDC1 (NM_173516.1,1500-1518).
gaatctctgcaagtttgat

SEQ ID NO: 425315 - DNA, 19 bp, Homo sapiens
  siRNA target sequence for PNLDC1 (NM_173516.1,1519-1537).
gtcaggcgactcacaagaa

SEQ ID NO: 425316 - DNA, 19 bp, Homo sapiens
  siRNA target sequence for PNLDC1 (NM_173516.1,1532-1550).
caagaagccagttcttact

SEQ ID NO: 425317 - DNA, 19 bp, Homo sapiens
  siRNA target sequence for PNLDC1 (NM_173516.1,1549-1567).
ctcctgaccaataagttta

SEQ ID NO: 425318 - DNA, 19 bp, Homo sapiens
  siRNA target sequence for LOC154807 (NM_173517.1,419-437).
gcgctgtggcggctttgat

SEQ ID NO: 425319 - DNA, 19 bp, Homo sapiens
  siRNA target sequence for LOC154807 (NM_173517.1,483-501).
ggcctacattctgtacttt

SEQ ID NO: 425320 - DNA, 19 bp, Homo sapiens
  siRNA target sequence for LOC154807 (NM_173517.1,485-503).
cctacattctgtactttgt

SEQ ID NO: 425321 - DNA, 19 bp, Homo sapiens
  siRNA target sequence for LOC154807 (NM_173517.1,567-585).
caactacaaacgactagtt

SEQ ID NO: 425322 - DNA, 19 bp, Homo sapiens
  siRNA target sequence for FLJ25692 (NM_173518.2,130-148).
caagtactacaatgattca

SEQ ID NO: 425323 - DNA, 19 bp, Homo sapiens
  siRNA target sequence for FLJ25692 (NM_173518.2,156-174).
gctatgctgtctatcgatt

SEQ ID NO: 425324 - DNA, 19 bp, Homo sapiens
  siRNA target sequence for FLJ25692 (NM_173518.2,161-179).
gctgtctatcgattcaaaa

SEQ ID NO: 425325 - DNA, 19 bp, Homo sapiens
  siRNA target sequence for FLJ25692 (NM_173518.2,162-180).
ctgtctatcgattcaaaat

SEQ ID NO: 425326 - DNA, 19 bp, Homo sapiens
  siRNA target sequence for FLJ25692 (NM_173518.2,164-182).
gtctatcgattcaaaattt

SEQ ID NO: 425327 - DNA, 19 bp, Homo sapiens
  siRNA target sequence for FLJ25692 (NM_173518.2,170-188).
cgattcaaaattttaataa

SEQ ID NO: 425328 - DNA, 19 bp, Homo sapiens
  siRNA target sequence for FLJ25692 (NM_173518.2,195-213).
ctgatgttgttgaattaga

SEQ ID NO: 425329 - DNA, 19 bp, Homo sapiens
  siRNA target sequence for FLJ25692 (NM_173518.2,258-276).
ctgaagtctttcaatcagt

SEQ ID NO: 425330 - DNA, 19 bp, Homo sapiens
  siRNA target sequence for FLJ25692 (NM_173518.2,288-306).
ctgttaagactctctcatt

SEQ ID NO: 425331 - DNA, 19 bp, Homo sapiens
  siRNA target sequence for FLJ25692 (NM_173518.2,290-308).
gttaagactctctcattaa

SEQ ID NO: 425332 - DNA, 19 bp, Homo sapiens
  siRNA target sequence for FLJ25692 (NM_173518.2,295-313).
gactctctcattaattgga

SEQ ID NO: 425333 - DNA, 19 bp, Homo sapiens
  siRNA target sequence for FLJ25692 (NM_173518.2,303-321).
cattaattggacaattgca

SEQ ID NO: 425334 - DNA, 19 bp, Homo sapiens
  siRNA target sequence for FLJ25692 (NM_173518.2,373-391).
gccaagttatggtcttgat

SEQ ID NO: 425335 - DNA, 19 bp, Homo sapiens
  siRNA target sequence for FLJ25692 (NM_173518.2,375-393).
caagttatggtcttgatct

SEQ ID NO: 425336 - DNA, 19 bp, Homo sapiens
  siRNA target sequence for FLJ25692 (NM_173518.2,480-498).
cacaaggggcaagatttct

SEQ ID NO: 425337 - DNA, 19 bp, Homo sapiens
  siRNA target sequence for FLJ25692 (NM_173518.2,482-500).
caaggggcaagatttcttt

SEQ ID NO: 425338 - DNA, 19 bp, Homo sapiens
  siRNA target sequence for FLJ25692 (NM_173518.2,509-527).
gaagcatgccctctttcaa

SEQ ID NO: 425339 - DNA, 19 bp, Homo sapiens
  siRNA target sequence for FLJ25692 (NM_173518.2,516-534).
gccctctttcaaaaggatt

SEQ ID NO: 425340 - DNA, 19 bp, Homo sapiens
  siRNA target sequence for FLJ25692 (NM_173518.2,531-549).
gatttcagtatataagagt

SEQ ID NO: 425341 - DNA, 19 bp, Homo sapiens
  siRNA target sequence for FLJ25692 (NM_173518.2,579-597).
cgataagaaatgacttttt

SEQ ID NO: 425342 - DNA, 19 bp, Homo sapiens
  siRNA target sequence for FLJ25692 (NM_173518.2,590-608).
gactttttgtgtaatctat

SEQ ID NO: 425343 - DNA, 19 bp, Homo sapiens
  siRNA target sequence for FLJ25692 (NM_173518.2,592-610).
ctttttgtgtaatctatgt

SEQ ID NO: 425344 - DNA, 19 bp, Homo sapiens
  siRNA target sequence for FLJ25692 (NM_173518.2,609-627).
gtgcatcttcacttcaaga

SEQ ID NO: 425345 - DNA, 19 bp, Homo sapiens
  siRNA target sequence for FLJ25692 (NM_173518.2,642-660).
gagtacttggtgataaaca

SEQ ID NO: 425346 - DNA, 19 bp, Homo sapiens
  siRNA target sequence for FLJ25692 (NM_173518.2,685-703).
ggcacttcgtgcttttcaa

SEQ ID NO: 425347 - DNA, 19 bp, Homo sapiens
  siRNA target sequence for FLJ25692 (NM_173518.2,692-710).
cgtgcttttcaaggatatt

SEQ ID NO: 425348 - DNA, 19 bp, Homo sapiens
  siRNA target sequence for FLJ25692 (NM_173518.2,721-739).
gccatttaggtttcaatca

SEQ ID NO: 425349 - DNA, 19 bp, Homo sapiens
  siRNA target sequence for FLJ25692 (NM_173518.2,831-849).
cacaaactgctgtctgtat

SEQ ID NO: 425350 - DNA, 19 bp, Homo sapiens
  siRNA target sequence for FLJ25692 (NM_173518.2,846-864).
gtatagaagcaaatagcat

SEQ ID NO: 425351 - DNA, 19 bp, Homo sapiens
  siRNA target sequence for FLJ25692 (NM_173518.2,854-872).
gcaaatagcataacttttt

SEQ ID NO: 425352 - DNA, 19 bp, Homo sapiens
  siRNA target sequence for FLJ25692 (NM_173518.2,893-911).
ggaattagtgacaacttca

SEQ ID NO: 425353 - DNA, 19 bp, Homo sapiens
  siRNA target sequence for FLJ25692 (NM_173518.2,913-931).
gtgtctcctctccttaact

SEQ ID NO: 425354 - DNA, 19 bp, Homo sapiens
  siRNA target sequence for FLJ25692 (NM_173518.2,937-955).
ctcatgctggaagtttaca

SEQ ID NO: 425355 - DNA, 19 bp, Homo sapiens
  siRNA target sequence for FLJ25692 (NM_173518.2,956-974).
gcaatacttgccaatatct

SEQ ID NO: 425356 - DNA, 19 bp, Homo sapiens
  siRNA target sequence for FLJ25692 (NM_173518.2,1098-1116).
caagtgatactctactcat

SEQ ID NO: 425357 - DNA, 19 bp, Homo sapiens
  siRNA target sequence for FLJ25692 (NM_173518.2,1101-1119).
gtgatactctactcataga

SEQ ID NO: 425358 - DNA, 19 bp, Homo sapiens
  siRNA target sequence for FLJ25692 (NM_173518.2,1103-1121).
gatactctactcatagaca

SEQ ID NO: 425359 - DNA, 19 bp, Homo sapiens
  siRNA target sequence for FLJ25692 (NM_173518.2,1122-1140).
ggcttctgaattttagcat

SEQ ID NO: 425360 - DNA, 19 bp, Homo sapiens
  siRNA target sequence for FLJ25692 (NM_173518.2,1129-1147).
gaattttagcataaacctt

SEQ ID NO: 425361 - DNA, 19 bp, Homo sapiens
  siRNA target sequence for FLJ25692 (NM_173518.2,1144-1162).
ccttgtcccccgtggtata

SEQ ID NO: 425362 - DNA, 19 bp, Homo sapiens
  siRNA target sequence for FLJ25692 (NM_173518.2,1153-1171).
ccgtggtatacgtcatcta

SEQ ID NO: 425363 - DNA, 19 bp, Homo sapiens
  siRNA target sequence for FLJ25692 (NM_173518.2,1155-1173).
gtggtatacgtcatctagt

SEQ ID NO: 425364 - DNA, 19 bp, Homo sapiens
  siRNA target sequence for FLJ25692 (NM_173518.2,1191-1209).
ccactctatccaggaataa

SEQ ID NO: 425365 - DNA, 19 bp, Homo sapiens
  siRNA target sequence for FLJ25692 (NM_173518.2,1194-1212).
ctctatccaggaataagta

SEQ ID NO: 425366 - DNA, 19 bp, Homo sapiens
  siRNA target sequence for FLJ25692 (NM_173518.2,1215-1233).
gaactggagcagttagcat

SEQ ID NO: 425367 - DNA, 19 bp, Homo sapiens
  siRNA target sequence for FLJ25692 (NM_173518.2,1237-1255).
ggctggcagtgctttgcta

SEQ ID NO: 425368 - DNA, 19 bp, Homo sapiens
  siRNA target sequence for FLJ25692 (NM_173518.2,1242-1260).
gcagtgctttgctagctaa

SEQ ID NO: 425369 - DNA, 19 bp, Homo sapiens
  siRNA target sequence for FLJ25692 (NM_173518.2,1243-1261).
cagtgctttgctagctaaa

SEQ ID NO: 425370 - DNA, 19 bp, Homo sapiens
  siRNA target sequence for FLJ25692 (NM_173518.2,1341-1359).
gaagcatcacagtgtacat

SEQ ID NO: 425371 - DNA, 19 bp, Homo sapiens
  siRNA target sequence for FLJ25692 (NM_173518.2,1409-1427).
gttcagtgcagtttttggt

SEQ ID NO: 425372 - DNA, 19 bp, Homo sapiens
  siRNA target sequence for FLJ25692 (NM_173518.2,1433-1451).
gttgatgtggattcatctt

SEQ ID NO: 425373 - DNA, 19 bp, Homo sapiens
  siRNA target sequence for FLJ25692 (NM_173518.2,1468-1486).
gaaaatcaacactctaatt

SEQ ID NO: 425374 - DNA, 19 bp, Homo sapiens
  siRNA target sequence for FLJ25692 (NM_173518.2,1584-1602).
ctactgtgcaacacacttt

SEQ ID NO: 425375 - DNA, 19 bp, Homo sapiens
  siRNA target sequence for FLJ25692 (NM_173518.2,1603-1621).
gaacaaagccattaatcct

SEQ ID NO: 425376 - DNA, 19 bp, Homo sapiens
  siRNA target sequence for FLJ25692 (NM_173518.2,1630-1648).
gttttatgcggcttctaga

SEQ ID NO: 425377 - DNA, 19 bp, Homo sapiens
  siRNA target sequence for FLJ25692 (NM_173518.2,1640-1658).
gcttctagacagttcacaa

SEQ ID NO: 425378 - DNA, 19 bp, Homo sapiens
  siRNA target sequence for FLJ25692 (NM_173518.2,1713-1731).
gcttggaagcagaaagaat

SEQ ID NO: 425379 - DNA, 19 bp, Homo sapiens
  siRNA target sequence for FLJ25692 (NM_173518.2,1728-1746).
gaatgacccatggctatta

SEQ ID NO: 425380 - DNA, 19 bp, Homo sapiens
  siRNA target sequence for C9orf62 (NM_173520.1,454-472).
ggcataagaacctcaagaa

SEQ ID NO: 425381 - DNA, 19 bp, Homo sapiens
  siRNA target sequence for C9orf62 (NM_173520.1,525-543).
catggcagtcgctgaaagt

SEQ ID NO: 425382 - DNA, 19 bp, Homo sapiens
  siRNA target sequence for C9orf62 (NM_173520.1,528-546).
ggcagtcgctgaaagttta

SEQ ID NO: 425383 - DNA, 19 bp, Homo sapiens
  siRNA target sequence for C9orf62 (NM_173520.1,529-547).
gcagtcgctgaaagtttaa

SEQ ID NO: 425384 - DNA, 19 bp, Homo sapiens
  siRNA target sequence for C9orf62 (NM_173520.1,565-583).
caatggggttggtttcttt

SEQ ID NO: 425385 - DNA, 19 bp, Homo sapiens
  siRNA target sequence for FLJ32779 (NM_173521.1,91-109).
cattgaaatatcatgcaat

SEQ ID NO: 425386 - DNA, 19 bp, Homo sapiens
  siRNA target sequence for FLJ32779 (NM_173521.1,149-167).
cagagatgctttattgctt

SEQ ID NO: 425387 - DNA, 19 bp, Homo sapiens
  siRNA target sequence for FLJ32779 (NM_173521.1,164-182).
gcttcgaatcccttcatgt

SEQ ID NO: 425388 - DNA, 19 bp, Homo sapiens
  siRNA target sequence for FLJ32779 (NM_173521.1,165-183).
cttcgaatcccttcatgtt

SEQ ID NO: 425389 - DNA, 19 bp, Homo sapiens
  siRNA target sequence for FLJ32779 (NM_173521.1,169-187).
gaatcccttcatgtttata

SEQ ID NO: 425390 - DNA, 19 bp, Homo sapiens
  siRNA target sequence for FLJ32779 (NM_173521.1,173-191).
cccttcatgtttatatcaa

SEQ ID NO: 425391 - DNA, 19 bp, Homo sapiens
  siRNA target sequence for FLJ32779 (NM_173521.1,245-263).
gagagtctcagctgtttca

SEQ ID NO: 425392 - DNA, 19 bp, Homo sapiens
  siRNA target sequence for FLJ32779 (NM_173521.1,264-282).
gttccgggaatgacagata

SEQ ID NO: 425393 - DNA, 19 bp, Homo sapiens
  siRNA target sequence for FLJ32779 (NM_173521.1,314-332).
ctttgtggaggatttcctt

SEQ ID NO: 425394 - DNA, 19 bp, Homo sapiens
  siRNA target sequence for FLJ32779 (NM_173521.1,356-374).
ggtgacccagattaattgt

SEQ ID NO: 425395 - DNA, 19 bp, Homo sapiens
  siRNA target sequence for FLJ32779 (NM_173521.1,359-377).
gacccagattaattgtgaa

SEQ ID NO: 425396 - DNA, 19 bp, Homo sapiens
  siRNA target sequence for FLJ32779 (NM_173521.1,383-401).
ggaagttgttccaagttca

SEQ ID NO: 425397 - DNA, 19 bp, Homo sapiens
  siRNA target sequence for FLJ32779 (NM_173521.1,384-402).
gaagttgttccaagttcaa

SEQ ID NO: 425398 - DNA, 19 bp, Homo sapiens
  siRNA target sequence for FLJ32779 (NM_173521.1,423-441).
gtagaggaggtcagtttat

SEQ ID NO: 425399 - DNA, 19 bp, Homo sapiens
  siRNA target sequence for FLJ32779 (NM_173521.1,445-463).
cccacatggactacaatga

SEQ ID NO: 425400 - DNA, 19 bp, Homo sapiens
  siRNA target sequence for FLJ32779 (NM_173521.1,589-607).
ctctcttgagtagactaaa

SEQ ID NO: 425401 - DNA, 19 bp, Homo sapiens
  siRNA target sequence for FLJ32779 (NM_173521.1,720-738).
gaagatttttgtatggata

SEQ ID NO: 425402 - DNA, 19 bp, Homo sapiens
  siRNA target sequence for FLJ32779 (NM_173521.1,734-752).
ggataaagtgaacttttgt

SEQ ID NO: 425403 - DNA, 19 bp, Homo sapiens
  siRNA target sequence for FLJ32779 (NM_173521.1,746-764).
cttttgtcaagagaaacta

SEQ ID NO: 425404 - DNA, 19 bp, Homo sapiens
  siRNA target sequence for FLJ32779 (NM_173521.1,762-780).
ctagaagatacaatatgtt

SEQ ID NO: 425405 - DNA, 19 bp, Homo sapiens
  siRNA target sequence for FLJ32779 (NM_173521.1,786-804).
gagccgtcaagttttctta

SEQ ID NO: 425406 - DNA, 19 bp, Homo sapiens
  siRNA target sequence for FLJ32779 (NM_173521.1,790-808).
cgtcaagttttcttattga

SEQ ID NO: 425407 - DNA, 19 bp, Homo sapiens
  siRNA target sequence for FLJ32779 (NM_173521.1,809-827).
gtatgaattcttaatacct

SEQ ID NO: 425408 - DNA, 19 bp, Homo sapiens
  siRNA target sequence for FLJ32779 (NM_173521.1,833-851).
cctcaaaccagaaattgat

SEQ ID NO: 425409 - DNA, 19 bp, Homo sapiens
  siRNA target sequence for FLJ32779 (NM_173521.1,936-954).
gaaagagatcttactaaca

SEQ ID NO: 425410 - DNA, 19 bp, Homo sapiens
  siRNA target sequence for FLJ32779 (NM_173521.1,949-967).
ctaacaagcatggaattga

SEQ ID NO: 425411 - DNA, 19 bp, Homo sapiens
  siRNA target sequence for FLJ32779 (NM_173521.1,966-984).
gaggatatcggggatataa

SEQ ID NO: 425412 - DNA, 19 bp, Homo sapiens
  siRNA target sequence for FLJ32779 (NM_173521.1,1042-1060).
gtaaaccaggagagttaga

SEQ ID NO: 425413 - DNA, 19 bp, Homo sapiens
  siRNA target sequence for FLJ32779 (NM_173521.1,1068-1086).
ctaactcctctattcctaa

SEQ ID NO: 425414 - DNA, 19 bp, Homo sapiens
  siRNA target sequence for FLJ32779 (NM_173521.1,1091-1109).
ccaacattcttcagtgaat

SEQ ID NO: 425415 - DNA, 19 bp, Homo sapiens
  siRNA target sequence for FLJ32779 (NM_173521.1,1095-1113).
cattcttcagtgaattcat

SEQ ID NO: 425416 - DNA, 19 bp, Homo sapiens
  siRNA target sequence for FLJ32779 (NM_173521.1,1106-1124).
gaattcattacgtacagaa

SEQ ID NO: 425417 - DNA, 19 bp, Homo sapiens
  siRNA target sequence for FLJ32779 (NM_173521.1,1138-1156).
cattatctccggtttgtaa

SEQ ID NO: 425418 - DNA, 19 bp, Homo sapiens
  siRNA target sequence for FLJ32779 (NM_173521.1,1146-1164).
ccggtttgtaaaattaatt

SEQ ID NO: 425419 - DNA, 19 bp, Homo sapiens
  siRNA target sequence for FLJ32779 (NM_173521.1,1183-1201).
cagctaatgaatactacat

SEQ ID NO: 425420 - DNA, 19 bp, Homo sapiens
  siRNA target sequence for FLJ32779 (NM_173521.1,1185-1203).
gctaatgaatactacatga

SEQ ID NO: 425421 - DNA, 19 bp, Homo sapiens
  siRNA target sequence for FLJ32779 (NM_173521.1,1186-1204).
ctaatgaatactacatgat

SEQ ID NO: 425422 - DNA, 19 bp, Homo sapiens
  siRNA target sequence for FLJ32779 (NM_173521.1,1269-1287).
gagccccacagccaatatt

SEQ ID NO: 425423 - DNA, 19 bp, Homo sapiens
  siRNA target sequence for FLJ32779 (NM_173521.1,1274-1292).
ccacagccaatattcagtt

SEQ ID NO: 425424 - DNA, 19 bp, Homo sapiens
  siRNA target sequence for FLJ32779 (NM_173521.1,1275-1293).
cacagccaatattcagtta

SEQ ID NO: 425425 - DNA, 19 bp, Homo sapiens
  siRNA target sequence for FLJ32779 (NM_173521.1,1277-1295).
cagccaatattcagttaca

SEQ ID NO: 425426 - DNA, 19 bp, Homo sapiens
  siRNA target sequence for FLJ32779 (NM_173521.1,1368-1386).
caagcaggactaaatctga

SEQ ID NO: 425427 - DNA, 19 bp, Homo sapiens
  siRNA target sequence for FLJ32779 (NM_173521.1,1473-1491).
cctacgaaagtgcttcaat

SEQ ID NO: 425428 - DNA, 19 bp, Homo sapiens
  siRNA target sequence for FLJ32779 (NM_173521.1,1474-1492).
ctacgaaagtgcttcaatt

SEQ ID NO: 425429 - DNA, 19 bp, Homo sapiens
  siRNA target sequence for FLJ32779 (NM_173521.1,1488-1506).
caattagaatgtaagtaca

SEQ ID NO: 425430 - DNA, 19 bp, Homo sapiens
  siRNA target sequence for FLJ36576 (NM_173522.1,337-355).
gttgtggtcgcattctcaa

SEQ ID NO: 425431 - DNA, 19 bp, Homo sapiens
  siRNA target sequence for FLJ36576 (NM_173522.1,368-386).
gcgccgtggaccatcactt

SEQ ID NO: 425432 - DNA, 19 bp, Homo sapiens
  siRNA target sequence for FLJ36576 (NM_173522.1,369-387).
cgccgtggaccatcacttt

SEQ ID NO: 425433 - DNA, 19 bp, Homo sapiens
  siRNA target sequence for FLJ36576 (NM_173522.1,407-425).
gcctattgcggcaactact

SEQ ID NO: 425434 - DNA, 19 bp, Homo sapiens
  siRNA target sequence for FLJ36576 (NM_173522.1,464-482).
ggcagagaaaaatagtagt

SEQ ID NO: 425435 - DNA, 19 bp, Homo sapiens
  siRNA target sequence for MAGEB6 (NM_173523.2,367-385).
ctgatgcagttgtttcata

SEQ ID NO: 425436 - DNA, 19 bp, Homo sapiens
  siRNA target sequence for MAGEB6 (NM_173523.2,369-387).
gatgcagttgtttcatatt

SEQ ID NO: 425437 - DNA, 19 bp, Homo sapiens
  siRNA target sequence for MAGEB6 (NM_173523.2,372-390).
gcagttgtttcatattcaa

SEQ ID NO: 425438 - DNA, 19 bp, Homo sapiens
  siRNA target sequence for MAGEB6 (NM_173523.2,748-766).
gcacgttggcgcaattcct

SEQ ID NO: 425439 - DNA, 19 bp, Homo sapiens
  siRNA target sequence for MAGEB6 (NM_173523.2,865-883).
gaacctcccaacatttggt

SEQ ID NO: 425440 - DNA, 19 bp, Homo sapiens
  siRNA target sequence for MAGEB6 (NM_173523.2,955-973).
gcctccccagtgaaggaat

SEQ ID NO: 425441 - DNA, 19 bp, Homo sapiens
  siRNA target sequence for MAGEB6 (NM_173523.2,960-978).
cccagtgaaggaattctga

SEQ ID NO: 425442 - DNA, 19 bp, Homo sapiens
  siRNA target sequence for LOC159491 (NM_173524.2,298-316).
gtcttctccccctattcct

SEQ ID NO: 425443 - DNA, 19 bp, Homo sapiens
  siRNA target sequence for LOC159491 (NM_173524.2,300-318).
cttctccccctattcctaa

SEQ ID NO: 425444 - DNA, 19 bp, Homo sapiens
  siRNA target sequence for LOC159491 (NM_173524.2,330-348).
cactccgtggggatcatct

SEQ ID NO: 425445 - DNA, 19 bp, Homo sapiens
  siRNA target sequence for LOC159491 (NM_173524.2,674-692).
gcagatgttgctcaatatt

SEQ ID NO: 425446 - DNA, 19 bp, Homo sapiens
  siRNA target sequence for LOC159491 (NM_173524.2,997-1015).
ctctgttcctggagtttga

SEQ ID NO: 425447 - DNA, 19 bp, Homo sapiens
  siRNA target sequence for LOC159491 (NM_173524.2,1144-1162).
cagagctgaaggtgtttga

SEQ ID NO: 425448 - DNA, 19 bp, Homo sapiens
  siRNA target sequence for LOC159491 (NM_173524.2,1179-1197).
cagcttgaaggcttcaagt

SEQ ID NO: 425449 - DNA, 19 bp, Homo sapiens
  siRNA target sequence for LOC159491 (NM_173524.2,1189-1207).
gcttcaagttccatcatga

SEQ ID NO: 425450 - DNA, 19 bp, Homo sapiens
  siRNA target sequence for LOC159491 (NM_173524.2,1209-1227).
gcatctggggtgactgtta

SEQ ID NO: 425451 - DNA, 19 bp, Homo sapiens
  siRNA target sequence for LOC159491 (NM_173524.2,1210-1228).
catctggggtgactgttaa

SEQ ID NO: 425452 - DNA, 19 bp, Homo sapiens
  siRNA target sequence for LOC159491 (NM_173524.2,1213-1231).
ctggggtgactgttaagaa

SEQ ID NO: 425453 - DNA, 19 bp, Homo sapiens
  siRNA target sequence for LOC159491 (NM_173524.2,1370-1388).
gcccatctcgcagtttgta

SEQ ID NO: 425454 - DNA, 19 bp, Homo sapiens
  siRNA target sequence for LOC159491 (NM_173524.2,1372-1390).
ccatctcgcagtttgtaga

SEQ ID NO: 425455 - DNA, 19 bp, Homo sapiens
  siRNA target sequence for LOC159491 (NM_173524.2,1378-1396).
cgcagtttgtagagatcat

SEQ ID NO: 425456 - DNA, 19 bp, Homo sapiens
  siRNA target sequence for LOC159491 (NM_173524.2,2162-2180).
gcactgggaccctgtcaat

SEQ ID NO: 425457 - DNA, 19 bp, Homo sapiens
  siRNA target sequence for LOC159491 (NM_173524.2,2173-2191).
ctgtcaatggctacttctt

SEQ ID NO: 425458 - DNA, 19 bp, Homo sapiens
  siRNA target sequence for LOC159491 (NM_173524.2,2467-2485).
cggttgtggatgttcagaa

SEQ ID NO: 425459 - DNA, 19 bp, Homo sapiens
  siRNA target sequence for LOC159491 (NM_173524.2,2611-2629).
ctcggttgtaccatgaaga

SEQ ID NO: 425460 - DNA, 19 bp, Homo sapiens
  siRNA target sequence for LOC159491 (NM_173524.2,2614-2632).
ggttgtaccatgaagatca

SEQ ID NO: 425461 - DNA, 19 bp, Homo sapiens
  siRNA target sequence for LOC159491 (NM_173524.2,2659-2677).
gctccctggccagtcatat

SEQ ID NO: 425462 - DNA, 19 bp, Homo sapiens
  siRNA target sequence for LOC159491 (NM_173524.2,2799-2817).
ctcatcaggatctttgaga

SEQ ID NO: 425463 - DNA, 19 bp, Homo sapiens
  siRNA target sequence for LOC159491 (NM_173524.2,2843-2861).
ggatgtgctaagacagttt

SEQ ID NO: 425464 - DNA, 19 bp, Homo sapiens
  siRNA target sequence for LOC159491 (NM_173524.2,2884-2902).
ctctgtcggccacaacaaa

SEQ ID NO: 425465 - DNA, 19 bp, Homo sapiens
  siRNA target sequence for LOC159491 (NM_173524.2,2890-2908).
cggccacaacaaaaatcct

SEQ ID NO: 425466 - DNA, 19 bp, Homo sapiens
  siRNA target sequence for LOC159491 (NM_173524.2,2891-2909).
ggccacaacaaaaatcctt

SEQ ID NO: 425467 - DNA, 19 bp, Homo sapiens
  siRNA target sequence for LOC159491 (NM_173524.2,3171-3189).
gctgctcagtgtaatatct

SEQ ID NO: 425468 - DNA, 19 bp, Homo sapiens
  siRNA target sequence for LOC159491 (NM_173524.2,3172-3190).
ctgctcagtgtaatatctt

SEQ ID NO: 425469 - DNA, 19 bp, Homo sapiens
  siRNA target sequence for MGC34805 (NM_173525.1,331-349).
cactgcactcgggaatact

SEQ ID NO: 425470 - DNA, 19 bp, Homo sapiens
  siRNA target sequence for MGC34805 (NM_173525.1,333-351).
ctgcactcgggaatactca

SEQ ID NO: 425471 - DNA, 19 bp, Homo sapiens
  siRNA target sequence for MGC34805 (NM_173525.1,410-428).
gcaagatccgcctacatat

SEQ ID NO: 425472 - DNA, 19 bp, Homo sapiens
  siRNA target sequence for MGC34805 (NM_173525.1,512-530).
gcacccacagcatctatgt

SEQ ID NO: 425473 - DNA, 19 bp, Homo sapiens
  siRNA target sequence for MGC34805 (NM_173525.1,603-621).
ccggctacttcggtcatta

SEQ ID NO: 425474 - DNA, 19 bp, Homo sapiens
  siRNA target sequence for MGC34805 (NM_173525.1,606-624).
gctacttcggtcattacct

SEQ ID NO: 425475 - DNA, 19 bp, Homo sapiens
  siRNA target sequence for C14orf54 (NM_173526.1,327-345).
gatccgagagatcttcaaa

SEQ ID NO: 425476 - DNA, 19 bp, Homo sapiens
  siRNA target sequence for C14orf54 (NM_173526.1,387-405).
cccatgttagagagcaatt

SEQ ID NO: 425477 - DNA, 19 bp, Homo sapiens
  siRNA target sequence for C14orf54 (NM_173526.1,421-439).
gaagaggtgaatccattta

SEQ ID NO: 425478 - DNA, 19 bp, Homo sapiens
  siRNA target sequence for C14orf54 (NM_173526.1,462-480).
gtgaccgtaggcatctgtt

SEQ ID NO: 425479 - DNA, 19 bp, Homo sapiens
  siRNA target sequence for C14orf54 (NM_173526.1,464-482).
gaccgtaggcatctgtttt

SEQ ID NO: 425480 - DNA, 19 bp, Homo sapiens
  siRNA target sequence for C14orf54 (NM_173526.1,530-548).
gacacctggtgcccaaaaa

SEQ ID NO: 425481 - DNA, 19 bp, Homo sapiens
  siRNA target sequence for C14orf54 (NM_173526.1,532-550).
cacctggtgcccaaaaaga

SEQ ID NO: 425482 - DNA, 19 bp, Homo sapiens
  siRNA target sequence for C14orf54 (NM_173526.1,549-567).
gatacagaaaccctgttta

SEQ ID NO: 425483 - DNA, 19 bp, Homo sapiens
  siRNA target sequence for C14orf54 (NM_173526.1,648-666).
catgatgcggagaacatga

SEQ ID NO: 425484 - DNA, 19 bp, Homo sapiens
  siRNA target sequence for C14orf54 (NM_173526.1,659-677).
gaacatgagcctgaaagta

SEQ ID NO: 425485 - DNA, 19 bp, Homo sapiens
  siRNA target sequence for C14orf54 (NM_173526.1,688-706).
gtggtcgagcctactactt

SEQ ID NO: 425486 - DNA, 19 bp, Homo sapiens
  siRNA target sequence for C14orf54 (NM_173526.1,713-731).
ctgcacctctgcatataaa

SEQ ID NO: 425487 - DNA, 19 bp, Homo sapiens
  siRNA target sequence for C14orf54 (NM_173526.1,734-752).
ggacaccttgttttctcaa

SEQ ID NO: 425488 - DNA, 19 bp, Homo sapiens
  siRNA target sequence for C14orf54 (NM_173526.1,735-753).
gacaccttgttttctcaat

SEQ ID NO: 425489 - DNA, 19 bp, Homo sapiens
  siRNA target sequence for C14orf54 (NM_173526.1,822-840).
ctctcaggaattacgaata

SEQ ID NO: 425490 - DNA, 19 bp, Homo sapiens
  siRNA target sequence for C14orf54 (NM_173526.1,896-914).
cctgaccccgtacatgtat

SEQ ID NO: 425491 - DNA, 19 bp, Homo sapiens
  siRNA target sequence for C14orf54 (NM_173526.1,936-954).
gtcagggacagcatagatt

SEQ ID NO: 425492 - DNA, 19 bp, Homo sapiens
  siRNA target sequence for C14orf54 (NM_173526.1,946-964).
gcatagatttcccagaatt

SEQ ID NO: 425493 - DNA, 19 bp, Homo sapiens
  siRNA target sequence for C14orf54 (NM_173526.1,983-1001).
cacagatgtcacagatctt

SEQ ID NO: 425494 - DNA, 19 bp, Homo sapiens
  siRNA target sequence for C14orf54 (NM_173526.1,1026-1044).
ccggatgtaagaattgtca

SEQ ID NO: 425495 - DNA, 19 bp, Homo sapiens
  siRNA target sequence for C14orf54 (NM_173526.1,1036-1054).
gaattgtcacagaagtcat

SEQ ID NO: 425496 - DNA, 19 bp, Homo sapiens
  siRNA target sequence for C14orf54 (NM_173526.1,1079-1097).
cacagacagctctgatatt

SEQ ID NO: 425497 - DNA, 19 bp, Homo sapiens
  siRNA target sequence for C14orf54 (NM_173526.1,1083-1101).
gacagctctgatattacaa

SEQ ID NO: 425498 - DNA, 19 bp, Homo sapiens
  siRNA target sequence for C14orf54 (NM_173526.1,1187-1205).
gaagcctgggtgtttacaa

SEQ ID NO: 425499 - DNA, 19 bp, Homo sapiens
  siRNA target sequence for C14orf54 (NM_173526.1,1252-1270).
ccatctcaaacataacact

SEQ ID NO: 425500 - DNA, 19 bp, Homo sapiens
  siRNA target sequence for C14orf54 (NM_173526.1,1262-1280).
cataacactgacttttgaa

SEQ ID NO: 425501 - DNA, 19 bp, Homo sapiens
  siRNA target sequence for C14orf54 (NM_173526.1,1421-1439).
gagaactgaatcaaacact

SEQ ID NO: 425502 - DNA, 19 bp, Homo sapiens
  siRNA target sequence for C14orf54 (NM_173526.1,1468-1486).
cttctaatttcctcaaact

SEQ ID NO: 425503 - DNA, 19 bp, Homo sapiens
  siRNA target sequence for FLJ38615 (NM_173528.1,305-323).
gaagtagaagactaaaaca

SEQ ID NO: 425504 - DNA, 19 bp, Homo sapiens
  siRNA target sequence for FLJ38615 (NM_173528.1,342-360).
gcaactttccgtaactgaa

SEQ ID NO: 425505 - DNA, 19 bp, Homo sapiens
  siRNA target sequence for FLJ38615 (NM_173528.1,373-391).
cattacggtgacaaagtga

SEQ ID NO: 425506 - DNA, 19 bp, Homo sapiens
  siRNA target sequence for FLJ38615 (NM_173528.1,393-411).
gcttgtgaatcctgatgat

SEQ ID NO: 425507 - DNA, 19 bp, Homo sapiens
  siRNA target sequence for FLJ38615 (NM_173528.1,445-463).
gacctgagcctgtgtatga

SEQ ID NO: 425508 - DNA, 19 bp, Homo sapiens
  siRNA target sequence for FLJ38615 (NM_173528.1,483-501).
ccatctgaaagacgaatta

SEQ ID NO: 425509 - DNA, 19 bp, Homo sapiens
  siRNA target sequence for FLJ38615 (NM_173528.1,590-608).
ctggtcaagtccttagata

SEQ ID NO: 425510 - DNA, 19 bp, Homo sapiens
  siRNA target sequence for FLJ38615 (NM_173528.1,635-653).
caggaggatttgacaacaa

SEQ ID NO: 425511 - DNA, 19 bp, Homo sapiens
  siRNA target sequence for FLJ38615 (NM_173528.1,676-694).
cacaggaccctcctgaaat

SEQ ID NO: 425512 - DNA, 19 bp, Homo sapiens
  siRNA target sequence for FLJ38615 (NM_173528.1,717-735).
ggaagtgtacctaacagat

SEQ ID NO: 425513 - DNA, 19 bp, Homo sapiens
  siRNA target sequence for FLJ38615 (NM_173528.1,773-791).
ccccgtcccggcaaatgct

SEQ ID NO: 425514 - DNA, 19 bp, Homo sapiens
  siRNA target sequence for FLJ38615 (NM_173528.1,774-792).
cccgtcccggcaaatgcta

SEQ ID NO: 425515 - DNA, 19 bp, Homo sapiens
  siRNA target sequence for FLJ38615 (NM_173528.1,775-793).
ccgtcccggcaaatgctaa

SEQ ID NO: 425516 - DNA, 19 bp, Homo sapiens
  siRNA target sequence for FLJ38615 (NM_173528.1,776-794).
cgtcccggcaaatgctaaa

SEQ ID NO: 425517 - DNA, 19 bp, Homo sapiens
  siRNA target sequence for FLJ38615 (NM_173528.1,777-795).
gtcccggcaaatgctaaaa

SEQ ID NO: 425518 - DNA, 19 bp, Homo sapiens
  siRNA target sequence for FLJ38615 (NM_173528.1,779-797).
cccggcaaatgctaaaatt

SEQ ID NO: 425519 - DNA, 19 bp, Homo sapiens
  siRNA target sequence for FLJ38615 (NM_173528.1,781-799).
cggcaaatgctaaaattct

SEQ ID NO: 425520 - DNA, 19 bp, Homo sapiens
  siRNA target sequence for MGC33382 (NM_173529.3,119-137).
ggcgaaatcaaagacaaaa

SEQ ID NO: 425521 - DNA, 19 bp, Homo sapiens
  siRNA target sequence for MGC33382 (NM_173529.3,187-205).
gcaccctgagtggtagtaa

SEQ ID NO: 425522 - DNA, 19 bp, Homo sapiens
  siRNA target sequence for MGC33382 (NM_173529.3,188-206).
caccctgagtggtagtaat

SEQ ID NO: 425523 - DNA, 19 bp, Homo sapiens
  siRNA target sequence for MGC33382 (NM_173529.3,192-210).
ctgagtggtagtaattcct

SEQ ID NO: 425524 - DNA, 19 bp, Homo sapiens
  siRNA target sequence for MGC33382 (NM_173529.3,217-235).
ctgatggctcgtttcacta

SEQ ID NO: 425525 - DNA, 19 bp, Homo sapiens
  siRNA target sequence for MGC33382 (NM_173529.3,223-241).
gctcgtttcactataaaga

SEQ ID NO: 425526 - DNA, 19 bp, Homo sapiens
  siRNA target sequence for MGC33382 (NM_173529.3,224-242).
ctcgtttcactataaagat

SEQ ID NO: 425527 - DNA, 19 bp, Homo sapiens
  siRNA target sequence for MGC33382 (NM_173529.3,264-282).
caagctctacaggcttata

SEQ ID NO: 425528 - DNA, 19 bp, Homo sapiens
  siRNA target sequence for MGC33382 (NM_173529.3,268-286).
ctctacaggcttatattga

SEQ ID NO: 425529 - DNA, 19 bp, Homo sapiens
  siRNA target sequence for MGC33382 (NM_173529.3,273-291).
caggcttatattgatgatt

SEQ ID NO: 425530 - DNA, 19 bp, Homo sapiens
  siRNA target sequence for MGC33382 (NM_173529.3,434-452).
cttcatatcctgtagaaga

SEQ ID NO: 425531 - DNA, 19 bp, Homo sapiens
  siRNA target sequence for MGC33382 (NM_173529.3,479-497).
gagcctaacaactgatgat

SEQ ID NO: 425532 - DNA, 19 bp, Homo sapiens
  siRNA target sequence for MGC33382 (NM_173529.3,481-499).
gcctaacaactgatgatct

SEQ ID NO: 425533 - DNA, 19 bp, Homo sapiens
  siRNA target sequence for MGC33382 (NM_173529.3,482-500).
cctaacaactgatgatcta

SEQ ID NO: 425534 - DNA, 19 bp, Homo sapiens
  siRNA target sequence for MGC33382 (NM_173529.3,483-501).
ctaacaactgatgatctat

SEQ ID NO: 425535 - DNA, 19 bp, Homo sapiens
  siRNA target sequence for MGC33382 (NM_173529.3,490-508).
ctgatgatctattaagact

SEQ ID NO: 425536 - DNA, 19 bp, Homo sapiens
  siRNA target sequence for MGC33382 (NM_173529.3,555-573).
cgaacgagcaagaaaaaca

SEQ ID NO: 425537 - DNA, 19 bp, Homo sapiens
  siRNA target sequence for MGC33382 (NM_173529.3,640-658).
cttccatgggcaaggataa

SEQ ID NO: 425538 - DNA, 19 bp, Homo sapiens
  siRNA target sequence for MGC33382 (NM_173529.3,643-661).
ccatgggcaaggataactt

SEQ ID NO: 425539 - DNA, 19 bp, Homo sapiens
  siRNA target sequence for MGC33382 (NM_173529.3,647-665).
gggcaaggataactttgtt

SEQ ID NO: 425540 - DNA, 19 bp, Homo sapiens
  siRNA target sequence for MGC33382 (NM_173529.3,648-666).
ggcaaggataactttgtta

SEQ ID NO: 425541 - DNA, 19 bp, Homo sapiens
  siRNA target sequence for MGC33382 (NM_173529.3,669-687).
cctgttatacgctcaaata

SEQ ID NO: 425542 - DNA, 19 bp, Homo sapiens
  siRNA target sequence for MGC33382 (NM_173529.3,670-688).
ctgttatacgctcaaatat

SEQ ID NO: 425543 - DNA, 19 bp, Homo sapiens
  siRNA target sequence for MGC33382 (NM_173529.3,672-690).
gttatacgctcaaatataa

SEQ ID NO: 425544 - DNA, 19 bp, Homo sapiens
  siRNA target sequence for MGC33382 (NM_173529.3,752-770).
gcagtgtactgaagaatta

SEQ ID NO: 425545 - DNA, 19 bp, Homo sapiens
  siRNA target sequence for MGC33382 (NM_173529.3,755-773).
gtgtactgaagaattacca

SEQ ID NO: 425546 - DNA, 19 bp, Homo sapiens
  siRNA target sequence for MGC33382 (NM_173529.3,794-812).
cagtccttgctcattagat

SEQ ID NO: 425547 - DNA, 19 bp, Homo sapiens
  siRNA target sequence for MGC33382 (NM_173529.3,799-817).
cttgctcattagataaact

SEQ ID NO: 425548 - DNA, 19 bp, Homo sapiens
  siRNA target sequence for MGC33382 (NM_173529.3,802-820).
gctcattagataaacttga

SEQ ID NO: 425549 - DNA, 19 bp, Homo sapiens
  siRNA target sequence for MGC33382 (NM_173529.3,803-821).
ctcattagataaacttgaa

SEQ ID NO: 425550 - DNA, 19 bp, Homo sapiens
  siRNA target sequence for MGC33382 (NM_173529.3,816-834).
cttgaagcagacagatcat

SEQ ID NO: 425551 - DNA, 19 bp, Homo sapiens
  siRNA target sequence for MGC33382 (NM_173529.3,870-888).
cccgttaactctgatgata

SEQ ID NO: 425552 - DNA, 19 bp, Homo sapiens
  siRNA target sequence for MGC33382 (NM_173529.3,1002-1020).
gccctgaaacaaatgttat

SEQ ID NO: 425553 - DNA, 19 bp, Homo sapiens
  siRNA target sequence for MGC33382 (NM_173529.3,1032-1050).
gcagtacaagaacgtttta

SEQ ID NO: 425554 - DNA, 19 bp, Homo sapiens
  siRNA target sequence for MGC33382 (NM_173529.3,1033-1051).
cagtacaagaacgttttaa

SEQ ID NO: 425555 - DNA, 19 bp, Homo sapiens
  siRNA target sequence for MGC33382 (NM_173529.3,1061-1079).
gaccacagatccaaaagaa

SEQ ID NO: 425556 - DNA, 19 bp, Homo sapiens
  siRNA target sequence for MGC33382 (NM_173529.3,1096-1114).
cagaagatgatttctctaa

SEQ ID NO: 425557 - DNA, 19 bp, Homo sapiens
  siRNA target sequence for MGC33382 (NM_173529.3,1098-1116).
gaagatgatttctctaaat

SEQ ID NO: 425558 - DNA, 19 bp, Homo sapiens
  siRNA target sequence for MGC33382 (NM_173529.3,1127-1145).
ggaaagtatgattcctatt

SEQ ID NO: 425559 - DNA, 19 bp, Homo sapiens
  siRNA target sequence for MGC33382 (NM_173529.3,1160-1178).
gaaggctttgcaccattta

SEQ ID NO: 425560 - DNA, 19 bp, Homo sapiens
  siRNA target sequence for MGC33382 (NM_173529.3,1193-1211).
cctggttgatgatacgaat

SEQ ID NO: 425561 - DNA, 19 bp, Homo sapiens
  siRNA target sequence for MGC33382 (NM_173529.3,1213-1231).
gagaacggtcaccgaaaat

SEQ ID NO: 425562 - DNA, 19 bp, Homo sapiens
  siRNA target sequence for MGC33382 (NM_173529.3,1215-1233).
gaacggtcaccgaaaatgt

SEQ ID NO: 425563 - DNA, 19 bp, Homo sapiens
  siRNA target sequence for FLJ35838 (NM_173532.1,120-138).
cagttttagcaagtaatga

SEQ ID NO: 425564 - DNA, 19 bp, Homo sapiens
  siRNA target sequence for FLJ35838 (NM_173532.1,140-158).
gctggatctagcaaatcat

SEQ ID NO: 425565 - DNA, 19 bp, Homo sapiens
  siRNA target sequence for FLJ35838 (NM_173532.1,143-161).
ggatctagcaaatcatctt

SEQ ID NO: 425566 - DNA, 19 bp, Homo sapiens
  siRNA target sequence for FLJ35838 (NM_173532.1,201-219).
gagtgacgatccaagaaga

SEQ ID NO: 425567 - DNA, 19 bp, Homo sapiens
  siRNA target sequence for FLJ35838 (NM_173532.1,305-323).
gaagtacactgcaacacat

SEQ ID NO: 425568 - DNA, 19 bp, Homo sapiens
  siRNA target sequence for FLJ35838 (NM_173532.1,405-423).
gtcctttgggtgacatatt

SEQ ID NO: 425569 - DNA, 19 bp, Homo sapiens
  siRNA target sequence for FLJ35838 (NM_173532.1,407-425).
cctttgggtgacatattca

SEQ ID NO: 425570 - DNA, 19 bp, Homo sapiens
  siRNA target sequence for FLJ35838 (NM_173532.1,412-430).
gggtgacatattcaattat

SEQ ID NO: 425571 - DNA, 19 bp, Homo sapiens
  siRNA target sequence for FLJ35838 (NM_173532.1,442-460).
ctgttgtcctagtgacatt

SEQ ID NO: 425572 - DNA, 19 bp, Homo sapiens
  siRNA target sequence for FLJ35838 (NM_173532.1,477-495).
ccagtgacagagttgagat

SEQ ID NO: 425573 - DNA, 19 bp, Homo sapiens
  siRNA target sequence for FLJ35838 (NM_173532.1,511-529).
ccgtggtgccgaactgtat

SEQ ID NO: 425574 - DNA, 19 bp, Homo sapiens
  siRNA target sequence for FLJ35838 (NM_173532.1,513-531).
gtggtgccgaactgtatga

SEQ ID NO: 425575 - DNA, 19 bp, Homo sapiens
  siRNA target sequence for FLJ35838 (NM_173532.1,515-533).
ggtgccgaactgtatgaaa

SEQ ID NO: 425576 - DNA, 19 bp, Homo sapiens
  siRNA target sequence for FLJ35838 (NM_173532.1,622-640).
caacatcacagtgtattca

SEQ ID NO: 425577 - DNA, 19 bp, Homo sapiens
  siRNA target sequence for FLJ35838 (NM_173532.1,630-648).
cagtgtattcattcaatga

SEQ ID NO: 425578 - DNA, 19 bp, Homo sapiens
  siRNA target sequence for FLJ35838 (NM_173532.1,730-748).
ggatgcattctccatgatt

SEQ ID NO: 425579 - DNA, 19 bp, Homo sapiens
  siRNA target sequence for FLJ35838 (NM_173532.1,731-749).
gatgcattctccatgatta

SEQ ID NO: 425580 - DNA, 19 bp, Homo sapiens
  siRNA target sequence for FLJ35838 (NM_173532.1,754-772).
gcactggcgatccactaat

SEQ ID NO: 425581 - DNA, 19 bp, Homo sapiens
  siRNA target sequence for FLJ35838 (NM_173532.1,757-775).
ctggcgatccactaatgat

SEQ ID NO: 425582 - DNA, 19 bp, Homo sapiens
  siRNA target sequence for FLJ35838 (NM_173532.1,759-777).
ggcgatccactaatgatga

SEQ ID NO: 425583 - DNA, 19 bp, Homo sapiens
  siRNA target sequence for FLJ35838 (NM_173532.1,760-778).
gcgatccactaatgatgat

SEQ ID NO: 425584 - DNA, 19 bp, Homo sapiens
  siRNA target sequence for FLJ35838 (NM_173532.1,768-786).
ctaatgatgatgctactta

SEQ ID NO: 425585 - DNA, 19 bp, Homo sapiens
  siRNA target sequence for FLJ35838 (NM_173532.1,888-906).
ctgctgtggccgaaacaca

SEQ ID NO: 425586 - DNA, 19 bp, Homo sapiens
  siRNA target sequence for FLJ35838 (NM_173532.1,933-951).
gtgtgcccctggaaacagt

SEQ ID NO: 425587 - DNA, 19 bp, Homo sapiens
  siRNA target sequence for FLJ35838 (NM_173532.1,962-980).
ccaaccggtctgacagtaa

SEQ ID NO: 425588 - DNA, 19 bp, Homo sapiens
  siRNA target sequence for FLJ35838 (NM_173532.1,966-984).
ccggtctgacagtaactca

SEQ ID NO: 425589 - DNA, 19 bp, Homo sapiens
  siRNA target sequence for FLJ35838 (NM_173532.1,967-985).
cggtctgacagtaactcaa

SEQ ID NO: 425590 - DNA, 19 bp, Homo sapiens
  siRNA target sequence for FLJ35838 (NM_173532.1,971-989).
ctgacagtaactcaaatca

SEQ ID NO: 425591 - DNA, 19 bp, Homo sapiens
  siRNA target sequence for FLJ35838 (NM_173532.1,1003-1021).
caacgtgagctggactatt

SEQ ID NO: 425592 - DNA, 19 bp, Homo sapiens
  siRNA target sequence for FLJ35838 (NM_173532.1,1061-1079).
cacactggacagtctaagt

SEQ ID NO: 425593 - DNA, 19 bp, Homo sapiens
  siRNA target sequence for FLJ35838 (NM_173532.1,1080-1098).
gtcacactcatcaaaacca

SEQ ID NO: 425594 - DNA, 19 bp, Homo sapiens
  siRNA target sequence for FLJ35838 (NM_173532.1,1129-1147).
caattacacagtgacatta

SEQ ID NO: 425595 - DNA, 19 bp, Homo sapiens
  siRNA target sequence for FLJ35838 (NM_173532.1,1182-1200).
gctcctaccaaagttattt

SEQ ID NO: 425596 - DNA, 19 bp, Homo sapiens
  siRNA target sequence for FLJ35838 (NM_173532.1,1278-1296).
ccaggggctctgccaatta

SEQ ID NO: 425597 - DNA, 19 bp, Homo sapiens
  siRNA target sequence for FLJ35838 (NM_173532.1,1427-1445).
ggattgaagcttactttct

SEQ ID NO: 425598 - DNA, 19 bp, Homo sapiens
  siRNA target sequence for FLJ35838 (NM_173532.1,1487-1505).
cttggaatggtgatttata

SEQ ID NO: 425599 - DNA, 19 bp, Homo sapiens
  siRNA target sequence for TDRD5 (NM_173533.2,255-273).
ctgaacaagagcgtataca

SEQ ID NO: 425600 - DNA, 19 bp, Homo sapiens
  siRNA target sequence for TDRD5 (NM_173533.2,281-299).
ctgcggaaggaaataaggt

SEQ ID NO: 425601 - DNA, 19 bp, Homo sapiens
  siRNA target sequence for TDRD5 (NM_173533.2,454-472).
cggtgcaggtggtactgta

SEQ ID NO: 425602 - DNA, 19 bp, Homo sapiens
  siRNA target sequence for TDRD5 (NM_173533.2,459-477).
caggtggtactgtaatact

SEQ ID NO: 425603 - DNA, 19 bp, Homo sapiens
  siRNA target sequence for TDRD5 (NM_173533.2,461-479).
ggtggtactgtaatactga

SEQ ID NO: 425604 - DNA, 19 bp, Homo sapiens
  siRNA target sequence for TDRD5 (NM_173533.2,462-480).
gtggtactgtaatactgaa

SEQ ID NO: 425605 - DNA, 19 bp, Homo sapiens
  siRNA target sequence for TDRD5 (NM_173533.2,513-531).
caagcttagttgcaaaaca

SEQ ID NO: 425606 - DNA, 19 bp, Homo sapiens
  siRNA target sequence for TDRD5 (NM_173533.2,537-555).
gcagccataagcttcgaaa

SEQ ID NO: 425607 - DNA, 19 bp, Homo sapiens
  siRNA target sequence for TDRD5 (NM_173533.2,548-566).
cttcgaaactcaatgcata

SEQ ID NO: 425608 - DNA, 19 bp, Homo sapiens
  siRNA target sequence for TDRD5 (NM_173533.2,670-688).
ggacctgttggcgttatct

SEQ ID NO: 425609 - DNA, 19 bp, Homo sapiens
  siRNA target sequence for TDRD5 (NM_173533.2,734-752).
ggacgatcattccaataca

SEQ ID NO: 425610 - DNA, 19 bp, Homo sapiens
  siRNA target sequence for TDRD5 (NM_173533.2,735-753).
gacgatcattccaatacat

SEQ ID NO: 425611 - DNA, 19 bp, Homo sapiens
  siRNA target sequence for TDRD5 (NM_173533.2,745-763).
ccaatacatgcaatatgga

SEQ ID NO: 425612 - DNA, 19 bp, Homo sapiens
  siRNA target sequence for TDRD5 (NM_173533.2,784-802).
gcttaatgcggcttcagat

SEQ ID NO: 425613 - DNA, 19 bp, Homo sapiens
  siRNA target sequence for TDRD5 (NM_173533.2,822-840).
ccagagcaggttctttgtt

SEQ ID NO: 425614 - DNA, 19 bp, Homo sapiens
  siRNA target sequence for TDRD5 (NM_173533.2,834-852).
ctttgttgatgctaaagaa

SEQ ID NO: 425615 - DNA, 19 bp, Homo sapiens
  siRNA target sequence for TDRD5 (NM_173533.2,844-862).
gctaaagaagagtgtaaca

SEQ ID NO: 425616 - DNA, 19 bp, Homo sapiens
  siRNA target sequence for TDRD5 (NM_173533.2,904-922).
ccagccatttagaatgaaa

SEQ ID NO: 425617 - DNA, 19 bp, Homo sapiens
  siRNA target sequence for TDRD5 (NM_173533.2,939-957).
caggctttccggtagcaaa

SEQ ID NO: 425618 - DNA, 19 bp, Homo sapiens
  siRNA target sequence for TDRD5 (NM_173533.2,949-967).
ggtagcaaagccatgcttt

SEQ ID NO: 425619 - DNA, 19 bp, Homo sapiens
  siRNA target sequence for TDRD5 (NM_173533.2,988-1006).
ggaaccaccgaagcaaata

SEQ ID NO: 425620 - DNA, 19 bp, Homo sapiens
  siRNA target sequence for TDRD5 (NM_173533.2,1021-1039).
gacttccaagttaaatgta

SEQ ID NO: 425621 - DNA, 19 bp, Homo sapiens
  siRNA target sequence for TDRD5 (NM_173533.2,1042-1060).
ggagacttcaagactgaat

SEQ ID NO: 425622 - DNA, 19 bp, Homo sapiens
  siRNA target sequence for TDRD5 (NM_173533.2,1053-1071).
gactgaatcacactgaaaa

SEQ ID NO: 425623 - DNA, 19 bp, Homo sapiens
  siRNA target sequence for TDRD5 (NM_173533.2,1118-1136).
ggacctggaggaactatca

SEQ ID NO: 425624 - DNA, 19 bp, Homo sapiens
  siRNA target sequence for TDRD5 (NM_173533.2,1131-1149).
ctatcagttcagaactaaa

SEQ ID NO: 425625 - DNA, 19 bp, Homo sapiens
  siRNA target sequence for TDRD5 (NM_173533.2,1211-1229).
ggagagtatgaggtaattt

SEQ ID NO: 425626 - DNA, 19 bp, Homo sapiens
  siRNA target sequence for TDRD5 (NM_173533.2,1264-1282).
cttaaatgtgacagaactt

SEQ ID NO: 425627 - DNA, 19 bp, Homo sapiens
  siRNA target sequence for TDRD5 (NM_173533.2,1296-1314).
gtgacattctccatgttga

SEQ ID NO: 425628 - DNA, 19 bp, Homo sapiens
  siRNA target sequence for TDRD5 (NM_173533.2,1326-1344).
gacaccaagacttactagt

SEQ ID NO: 425629 - DNA, 19 bp, Homo sapiens
  siRNA target sequence for TDRD5 (NM_173533.2,1370-1388).
ccacctgttcagtcagata

SEQ ID NO: 425630 - DNA, 19 bp, Homo sapiens
  siRNA target sequence for TDRD5 (NM_173533.2,1371-1389).
cacctgttcagtcagataa

SEQ ID NO: 425631 - DNA, 19 bp, Homo sapiens
  siRNA target sequence for TDRD5 (NM_173533.2,1373-1391).
cctgttcagtcagataaga

SEQ ID NO: 425632 - DNA, 19 bp, Homo sapiens
  siRNA target sequence for TDRD5 (NM_173533.2,1419-1437).
gtccacctagaaattcatt

SEQ ID NO: 425633 - DNA, 19 bp, Homo sapiens
  siRNA target sequence for TDRD5 (NM_173533.2,1421-1439).
ccacctagaaattcattgt

SEQ ID NO: 425634 - DNA, 19 bp, Homo sapiens
  siRNA target sequence for TDRD5 (NM_173533.2,1424-1442).
cctagaaattcattgtcta

SEQ ID NO: 425635 - DNA, 19 bp, Homo sapiens
  siRNA target sequence for TDRD5 (NM_173533.2,1438-1456).
gtctactgctgctgtcaaa

SEQ ID NO: 425636 - DNA, 19 bp, Homo sapiens
  siRNA target sequence for TDRD5 (NM_173533.2,1493-1511).
gagccacaacagaagattt

SEQ ID NO: 425637 - DNA, 19 bp, Homo sapiens
  siRNA target sequence for TDRD5 (NM_173533.2,1496-1514).
ccacaacagaagatttgca

SEQ ID NO: 425638 - DNA, 19 bp, Homo sapiens
  siRNA target sequence for TDRD5 (NM_173533.2,1497-1515).
cacaacagaagatttgcaa

SEQ ID NO: 425639 - DNA, 19 bp, Homo sapiens
  siRNA target sequence for TDRD5 (NM_173533.2,1547-1565).
ctgcaagtagaaacaaaca

SEQ ID NO: 425640 - DNA, 19 bp, Homo sapiens
  siRNA target sequence for TDRD5 (NM_173533.2,1613-1631).
gctgtgccgaacaagaaat

SEQ ID NO: 425641 - DNA, 19 bp, Homo sapiens
  siRNA target sequence for TDRD5 (NM_173533.2,1614-1632).
ctgtgccgaacaagaaatt

SEQ ID NO: 425642 - DNA, 19 bp, Homo sapiens
  siRNA target sequence for TDRD5 (NM_173533.2,1616-1634).
gtgccgaacaagaaattat

SEQ ID NO: 425643 - DNA, 19 bp, Homo sapiens
  siRNA target sequence for TDRD5 (NM_173533.2,1619-1637).
ccgaacaagaaattatgca

SEQ ID NO: 425644 - DNA, 19 bp, Homo sapiens
  siRNA target sequence for TDRD5 (NM_173533.2,1662-1680).
ccctcataggggtctttgt

SEQ ID NO: 425645 - DNA, 19 bp, Homo sapiens
  siRNA target sequence for TDRD5 (NM_173533.2,1673-1691).
gtctttgtggagtatatca

SEQ ID NO: 425646 - DNA, 19 bp, Homo sapiens
  siRNA target sequence for TDRD5 (NM_173533.2,1726-1744).
cagggattcgtcagagtta

SEQ ID NO: 425647 - DNA, 19 bp, Homo sapiens
  siRNA target sequence for TDRD5 (NM_173533.2,1728-1746).
gggattcgtcagagttact

SEQ ID NO: 425648 - DNA, 19 bp, Homo sapiens
  siRNA target sequence for TDRD5 (NM_173533.2,1737-1755).
cagagttactcgaagacat

SEQ ID NO: 425649 - DNA, 19 bp, Homo sapiens
  siRNA target sequence for TDRD5 (NM_173533.2,1789-1807).
gctggtttctgatcgatat

SEQ ID NO: 425650 - DNA, 19 bp, Homo sapiens
  siRNA target sequence for TDRD5 (NM_173533.2,1793-1811).
gtttctgatcgatatgtca

SEQ ID NO: 425651 - DNA, 19 bp, Homo sapiens
  siRNA target sequence for TDRD5 (NM_173533.2,1835-1853).
ggacatctctgttgtgtaa

SEQ ID NO: 425652 - DNA, 19 bp, Homo sapiens
  siRNA target sequence for TDRD5 (NM_173533.2,1841-1859).
ctctgttgtgtaaggattt

SEQ ID NO: 425653 - DNA, 19 bp, Homo sapiens
  siRNA target sequence for TDRD5 (NM_173533.2,1872-1890).
ggtggtatcgggtcattat

SEQ ID NO: 425654 - DNA, 19 bp, Homo sapiens
  siRNA target sequence for TDRD5 (NM_173533.2,1875-1893).
ggtatcgggtcattatcca

SEQ ID NO: 425655 - DNA, 19 bp, Homo sapiens
  siRNA target sequence for TDRD5 (NM_173533.2,1876-1894).
gtatcgggtcattatccat

SEQ ID NO: 425656 - DNA, 19 bp, Homo sapiens
  siRNA target sequence for TDRD5 (NM_173533.2,1979-1997).
ctcaagtgctgctacacaa

SEQ ID NO: 425657 - DNA, 19 bp, Homo sapiens
  siRNA target sequence for TDRD5 (NM_173533.2,1984-2002).
gtgctgctacacaaagctt

SEQ ID NO: 425658 - DNA, 19 bp, Homo sapiens
  siRNA target sequence for TDRD5 (NM_173533.2,2050-2068).
ggaacactggacatcgaaa

SEQ ID NO: 425659 - DNA, 19 bp, Homo sapiens
  siRNA target sequence for TDRD5 (NM_173533.2,2054-2072).
cactggacatcgaaagcta

SEQ ID NO: 425660 - DNA, 19 bp, Homo sapiens
  siRNA target sequence for TDRD5 (NM_173533.2,2056-2074).
ctggacatcgaaagctatt

SEQ ID NO: 425661 - DNA, 19 bp, Homo sapiens
  siRNA target sequence for TDRD5 (NM_173533.2,2094-2112).
gcggtttgaagccattagt

SEQ ID NO: 425662 - DNA, 19 bp, Homo sapiens
  siRNA target sequence for TDRD5 (NM_173533.2,2115-2133).
gggtagtggatgaatatgt

SEQ ID NO: 425663 - DNA, 19 bp, Homo sapiens
  siRNA target sequence for TDRD5 (NM_173533.2,2116-2134).
ggtagtggatgaatatgta

SEQ ID NO: 425664 - DNA, 19 bp, Homo sapiens
  siRNA target sequence for TDRD5 (NM_173533.2,2132-2150).
gtagatggaatccttaaca

SEQ ID NO: 425665 - DNA, 19 bp, Homo sapiens
  siRNA target sequence for TDRD5 (NM_173533.2,2166-2184).
catcctcaaacgaagatgt

SEQ ID NO: 425666 - DNA, 19 bp, Homo sapiens
  siRNA target sequence for TDRD5 (NM_173533.2,2170-2188).
ctcaaacgaagatgtctat

SEQ ID NO: 425667 - DNA, 19 bp, Homo sapiens
  siRNA target sequence for TDRD5 (NM_173533.2,2205-2223).
gaacagagggccatgctat

SEQ ID NO: 425668 - DNA, 19 bp, Homo sapiens
  siRNA target sequence for TDRD5 (NM_173533.2,2210-2228).
gagggccatgctattgtat

SEQ ID NO: 425669 - DNA, 19 bp, Homo sapiens
  siRNA target sequence for TDRD5 (NM_173533.2,2220-2238).
ctattgtatgccgagaaaa

SEQ ID NO: 425670 - DNA, 19 bp, Homo sapiens
  siRNA target sequence for TDRD5 (NM_173533.2,2242-2260).
ctcttctaagggtttcagt

SEQ ID NO: 425671 - DNA, 19 bp, Homo sapiens
  siRNA target sequence for TDRD5 (NM_173533.2,2264-2282).
ctcaaccctttagctttat

SEQ ID NO: 425672 - DNA, 19 bp, Homo sapiens
  siRNA target sequence for TDRD5 (NM_173533.2,2320-2338).
gacagaactgggttatcct

SEQ ID NO: 425673 - DNA, 19 bp, Homo sapiens
  siRNA target sequence for TDRD5 (NM_173533.2,2336-2354).
ccttcccagcagcactatt

SEQ ID NO: 425674 - DNA, 19 bp, Homo sapiens
  siRNA target sequence for TDRD5 (NM_173533.2,2341-2359).
ccagcagcactattttaat

SEQ ID NO: 425675 - DNA, 19 bp, Homo sapiens
  siRNA target sequence for TDRD5 (NM_173533.2,2383-2401).
gtcaaaagagagtgagtta

SEQ ID NO: 425676 - DNA, 19 bp, Homo sapiens
  siRNA target sequence for TDRD5 (NM_173533.2,2447-2465).
gtgaccataggtgatgata

SEQ ID NO: 425677 - DNA, 19 bp, Homo sapiens
  siRNA target sequence for TDRD5 (NM_173533.2,2449-2467).
gaccataggtgatgatatt

SEQ ID NO: 425678 - DNA, 19 bp, Homo sapiens
  siRNA target sequence for TDRD5 (NM_173533.2,2519-2537).
gctgcctcccatctattta

SEQ ID NO: 425679 - DNA, 19 bp, Homo sapiens
  siRNA target sequence for TDRD5 (NM_173533.2,2546-2564).
cttggtggaaagaatcagt

SEQ ID NO: 425680 - DNA, 19 bp, Homo sapiens
  siRNA target sequence for TDRD5 (NM_173533.2,2552-2570).
ggaaagaatcagtattcat

SEQ ID NO: 425681 - DNA, 19 bp, Homo sapiens
  siRNA target sequence for TDRD5 (NM_173533.2,2563-2581).
gtattcatcatgtaaagaa

SEQ ID NO: 425682 - DNA, 19 bp, Homo sapiens
  siRNA target sequence for TDRD5 (NM_173533.2,2590-2608).
gaaggactggtgtttttct

SEQ ID NO: 425683 - DNA, 19 bp, Homo sapiens
  siRNA target sequence for TDRD5 (NM_173533.2,2641-2659).
gccttcaggccttgtaaat

SEQ ID NO: 425684 - DNA, 19 bp, Homo sapiens
  siRNA target sequence for TDRD5 (NM_173533.2,2650-2668).
ccttgtaaatggaacgaaa

SEQ ID NO: 425685 - DNA, 19 bp, Homo sapiens
  siRNA target sequence for TDRD5 (NM_173533.2,2717-2735).
ggcacaaacaggactcaaa

SEQ ID NO: 425686 - DNA, 19 bp, Homo sapiens
  siRNA target sequence for TDRD5 (NM_173533.2,2718-2736).
gcacaaacaggactcaaaa

SEQ ID NO: 425687 - DNA, 19 bp, Homo sapiens
  siRNA target sequence for TDRD5 (NM_173533.2,2746-2764).
cataaatggttcttcagat

SEQ ID NO: 425688 - DNA, 19 bp, Homo sapiens
  siRNA target sequence for TDRD5 (NM_173533.2,2769-2787).
ccacactgcccaaattgga

SEQ ID NO: 425689 - DNA, 19 bp, Homo sapiens
  siRNA target sequence for TDRD5 (NM_173533.2,2770-2788).
cacactgcccaaattggaa

SEQ ID NO: 425690 - DNA, 19 bp, Homo sapiens
  siRNA target sequence for TDRD5 (NM_173533.2,2955-2973).
gctcaccagagatcctaaa

SEQ ID NO: 425691 - DNA, 19 bp, Homo sapiens
  siRNA target sequence for TDRD5 (NM_173533.2,2991-3009).
gcagccgtgctattacatt

SEQ ID NO: 425692 - DNA, 19 bp, Homo sapiens
  siRNA target sequence for TDRD5 (NM_173533.2,2994-3012).
gccgtgctattacattgta

SEQ ID NO: 425693 - DNA, 19 bp, Homo sapiens
  siRNA target sequence for TDRD5 (NM_173533.2,2996-3014).
cgtgctattacattgtaca

SEQ ID NO: 425694 - DNA, 19 bp, Homo sapiens
  siRNA target sequence for TDRD5 (NM_173533.2,2997-3015).
gtgctattacattgtacaa

SEQ ID NO: 425695 - DNA, 19 bp, Homo sapiens
  siRNA target sequence for TDRD5 (NM_173533.2,3019-3037).
caagcgtcaagaatctgta

SEQ ID NO: 425696 - DNA, 19 bp, Homo sapiens
  siRNA target sequence for TDRD5 (NM_173533.2,3041-3059).
cagctgtctttgattttgt

SEQ ID NO: 425697 - DNA, 19 bp, Homo sapiens
  siRNA target sequence for TDRD5 (NM_173533.2,3125-3143).
gctgccgcacggttagcta

SEQ ID NO: 425698 - DNA, 19 bp, Homo sapiens
  siRNA target sequence for GTF2IRD2 (NM_173537.1,1351-1369).
gaggcagctgagtttatca

SEQ ID NO: 425699 - DNA, 19 bp, Homo sapiens
  siRNA target sequence for FLJ35802 (NM_173538.1,88-106).
cacatgacagctattaaca

SEQ ID NO: 425700 - DNA, 19 bp, Homo sapiens
  siRNA target sequence for FLJ35802 (NM_173538.1,116-134).
ctcctccacttcacagtat

SEQ ID NO: 425701 - DNA, 19 bp, Homo sapiens
  siRNA target sequence for FLJ35802 (NM_173538.1,121-139).
ccacttcacagtataccaa

SEQ ID NO: 425702 - DNA, 19 bp, Homo sapiens
  siRNA target sequence for FLJ35802 (NM_173538.1,127-145).
cacagtataccaaacttga

SEQ ID NO: 425703 - DNA, 19 bp, Homo sapiens
  siRNA target sequence for FLJ35802 (NM_173538.1,129-147).
cagtataccaaacttgaaa

SEQ ID NO: 425704 - DNA, 19 bp, Homo sapiens
  siRNA target sequence for FLJ35802 (NM_173538.1,202-220).
caacacagccggagtatga

SEQ ID NO: 425705 - DNA, 19 bp, Homo sapiens
  siRNA target sequence for FLJ35802 (NM_173538.1,209-227).
gccggagtatgagcaatat

SEQ ID NO: 425706 - DNA, 19 bp, Homo sapiens
  siRNA target sequence for FLJ35802 (NM_173538.1,211-229).
cggagtatgagcaatatct

SEQ ID NO: 425707 - DNA, 19 bp, Homo sapiens
  siRNA target sequence for FLJ35802 (NM_173538.1,233-251).
cagctcacgatacatttat

SEQ ID NO: 425708 - DNA, 19 bp, Homo sapiens
  siRNA target sequence for FLJ35802 (NM_173538.1,358-376).
caacaacctgatgattcta

SEQ ID NO: 425709 - DNA, 19 bp, Homo sapiens
  siRNA target sequence for FLJ35802 (NM_173538.1,364-382).
cctgatgattctaacaata

SEQ ID NO: 425710 - DNA, 19 bp, Homo sapiens
  siRNA target sequence for FLJ35802 (NM_173538.1,463-481).
ctagctatcttaaagaaat

SEQ ID NO: 425711 - DNA, 19 bp, Homo sapiens
  siRNA target sequence for FLJ35802 (NM_173538.1,494-512).
ggacgccatatgaacacaa

SEQ ID NO: 425712 - DNA, 19 bp, Homo sapiens
  siRNA target sequence for FLJ35802 (NM_173538.1,574-592).
ctgaaaacacttagtaaga

SEQ ID NO: 425713 - DNA, 19 bp, Homo sapiens
  siRNA target sequence for FLJ35802 (NM_173538.1,583-601).
cttagtaagactgtctttt

SEQ ID NO: 425714 - DNA, 19 bp, Homo sapiens
  siRNA target sequence for FLJ35802 (NM_173538.1,666-684).
cctagctcgacctcaaaca

SEQ ID NO: 425715 - DNA, 19 bp, Homo sapiens
  siRNA target sequence for FLJ35802 (NM_173538.1,676-694).
cctcaaacaaacgtgtata

SEQ ID NO: 425716 - DNA, 19 bp, Homo sapiens
  siRNA target sequence for FLJ35802 (NM_173538.1,677-695).
ctcaaacaaacgtgtataa

SEQ ID NO: 425717 - DNA, 19 bp, Homo sapiens
  siRNA target sequence for FLJ35802 (NM_173538.1,679-697).
caaacaaacgtgtataaaa

SEQ ID NO: 425718 - DNA, 19 bp, Homo sapiens
  siRNA target sequence for FLJ35802 (NM_173538.1,687-705).
cgtgtataaaaatctgatt

SEQ ID NO: 425719 - DNA, 19 bp, Homo sapiens
  siRNA target sequence for FLJ35802 (NM_173538.1,722-740).
cagactcgttcatatctca

SEQ ID NO: 425720 - DNA, 19 bp, Homo sapiens
  siRNA target sequence for FLJ35802 (NM_173538.1,728-746).
cgttcatatctcagagttt

SEQ ID NO: 425721 - DNA, 19 bp, Homo sapiens
  siRNA target sequence for FLJ35802 (NM_173538.1,782-800).
ctacacttgctgagatgta

SEQ ID NO: 425722 - DNA, 19 bp, Homo sapiens
  siRNA target sequence for FLJ35802 (NM_173538.1,795-813).
gatgtacctaccttcatat

SEQ ID NO: 425723 - DNA, 19 bp, Homo sapiens
  siRNA target sequence for FLJ35802 (NM_173538.1,814-832).
gactcaatgcttagcaaat

SEQ ID NO: 425724 - DNA, 19 bp, Homo sapiens
  siRNA target sequence for FLJ35802 (NM_173538.1,852-870).
ggaagttatgcctcagaat

SEQ ID NO: 425725 - DNA, 19 bp, Homo sapiens
  siRNA target sequence for FLJ35802 (NM_173538.1,907-925).
gacgattgtgaaattctta

SEQ ID NO: 425726 - DNA, 19 bp, Homo sapiens
  siRNA target sequence for FLJ35802 (NM_173538.1,930-948).
cccagcaaagggatatgca

SEQ ID NO: 425727 - DNA, 19 bp, Homo sapiens
  siRNA target sequence for FLJ35802 (NM_173538.1,993-1011).
gaaattaatccgtatgtgt

SEQ ID NO: 425728 - DNA, 19 bp, Homo sapiens
  siRNA target sequence for FLJ35802 (NM_173538.1,1002-1020).
ccgtatgtgtccttattat

SEQ ID NO: 425729 - DNA, 19 bp, Homo sapiens
  siRNA target sequence for FLJ35802 (NM_173538.1,1024-1042).
gaatggcctactttatcca

SEQ ID NO: 425730 - DNA, 19 bp, Homo sapiens
  siRNA target sequence for FLJ35802 (NM_173538.1,1028-1046).
ggcctactttatccatata

SEQ ID NO: 425731 - DNA, 19 bp, Homo sapiens
  siRNA target sequence for FLJ35802 (NM_173538.1,1029-1047).
gcctactttatccatatat

SEQ ID NO: 425732 - DNA, 19 bp, Homo sapiens
  siRNA target sequence for FLJ35802 (NM_173538.1,1031-1049).
ctactttatccatatatga

SEQ ID NO: 425733 - DNA, 19 bp, Homo sapiens
  siRNA target sequence for FLJ35802 (NM_173538.1,1051-1069).
ctaattgcactccttaaat

SEQ ID NO: 425734 - DNA, 19 bp, Homo sapiens
  siRNA target sequence for FLJ35802 (NM_173538.1,1058-1076).
cactccttaaatggaaaaa

SEQ ID NO: 425735 - DNA, 19 bp, Homo sapiens
  siRNA target sequence for FLJ35802 (NM_173538.1,1189-1207).
cgatcaaataaagtgaaaa

SEQ ID NO: 425736 - DNA, 19 bp, Homo sapiens
  siRNA target sequence for FLJ35802 (NM_173538.1,1222-1240).
gtttatatggggaaactta

SEQ ID NO: 425737 - DNA, 19 bp, Homo sapiens
  siRNA target sequence for FLJ35802 (NM_173538.1,1249-1267).
gagtcctttggtgagatta

SEQ ID NO: 425738 - DNA, 19 bp, Homo sapiens
  siRNA target sequence for FLJ35802 (NM_173538.1,1263-1281).
gattagcgtccttcttcaa

SEQ ID NO: 425739 - DNA, 19 bp, Homo sapiens
  siRNA target sequence for FLJ35802 (NM_173538.1,1285-1303).
cctttcacgtgcacaatca

SEQ ID NO: 425740 - DNA, 19 bp, Homo sapiens
  siRNA target sequence for FLJ35802 (NM_173538.1,1286-1304).
ctttcacgtgcacaatcat

SEQ ID NO: 425741 - DNA, 19 bp, Homo sapiens
  siRNA target sequence for FLJ35802 (NM_173538.1,1292-1310).
cgtgcacaatcattaccaa

SEQ ID NO: 425742 - DNA, 19 bp, Homo sapiens
  siRNA target sequence for LOC170393 (NM_173541.1,249-267).
gcacgtcgcccatttctca

SEQ ID NO: 425743 - DNA, 19 bp, Homo sapiens
  siRNA target sequence for LOC170393 (NM_173541.1,250-268).
cacgtcgcccatttctcat

SEQ ID NO: 425744 - DNA, 19 bp, Homo sapiens
  siRNA target sequence for LOC170393 (NM_173541.1,253-271).
gtcgcccatttctcatcaa

SEQ ID NO: 425745 - DNA, 19 bp, Homo sapiens
  siRNA target sequence for LOC170393 (NM_173541.1,285-303).
ccacgagagcgctttctct

SEQ ID NO: 425746 - DNA, 19 bp, Homo sapiens
  siRNA target sequence for LOC196463 (NM_173542.2,842-860).
cgtgtcatcaagaagtact

SEQ ID NO: 425747 - DNA, 19 bp, Homo sapiens
  siRNA target sequence for LOC196463 (NM_173542.2,1161-1179).
ggatgatcgtggactacaa

SEQ ID NO: 425748 - DNA, 19 bp, Homo sapiens
  siRNA target sequence for LOC196463 (NM_173542.2,1294-1312).
ctgggccagctacaacata

SEQ ID NO: 425749 - DNA, 19 bp, Homo sapiens
  siRNA target sequence for LOC196463 (NM_173542.2,1366-1384).
gtatggggactggttttct

SEQ ID NO: 425750 - DNA, 19 bp, Homo sapiens
  siRNA target sequence for LOC196463 (NM_173542.2,1456-1474).
caggctgatgaggtacaat

SEQ ID NO: 425751 - DNA, 19 bp, Homo sapiens
  siRNA target sequence for LOC196463 (NM_173542.2,1523-1541).
cccaatggggagaatgcta

SEQ ID NO: 425752 - DNA, 19 bp, Homo sapiens
  siRNA target sequence for LOC196463 (NM_173542.2,1606-1624).
ctcccatgggggtatcgat

SEQ ID NO: 425753 - DNA, 19 bp, Homo sapiens
  siRNA target sequence for FLJ32844 (NM_173543.1,422-440).
cgttccccaccttcaagtt

SEQ ID NO: 425754 - DNA, 19 bp, Homo sapiens
  siRNA target sequence for FLJ32844 (NM_173543.1,997-1015).
ctacgggccaagctaaagt

SEQ ID NO: 425755 - DNA, 19 bp, Homo sapiens
  siRNA target sequence for FLJ32844 (NM_173543.1,1209-1227).
caagcagaactctacacta

SEQ ID NO: 425756 - DNA, 19 bp, Homo sapiens
  siRNA target sequence for FLJ32844 (NM_173543.1,1212-1230).
gcagaactctacactagaa

SEQ ID NO: 425757 - DNA, 19 bp, Homo sapiens
  siRNA target sequence for FLJ32844 (NM_173543.1,1530-1548).
ggaacaagctaggatcatt

SEQ ID NO: 425758 - DNA, 19 bp, Homo sapiens
  siRNA target sequence for FLJ32844 (NM_173543.1,1860-1878).
ccggaagttttctgaattt

SEQ ID NO: 425759 - DNA, 19 bp, Homo sapiens
  siRNA target sequence for FLJ32844 (NM_173543.1,1965-1983).
cgggcagccttcagtcaaa

SEQ ID NO: 425760 - DNA, 19 bp, Homo sapiens
  siRNA target sequence for FLJ32844 (NM_173543.1,2374-2392).
gtgcagtcgatggtcaaaa

SEQ ID NO: 425761 - DNA, 19 bp, Homo sapiens
  siRNA target sequence for FLJ32844 (NM_173543.1,2434-2452).
ggaggggtcagtctgtttt

SEQ ID NO: 425762 - DNA, 19 bp, Homo sapiens
  siRNA target sequence for FLJ32844 (NM_173543.1,2435-2453).
gaggggtcagtctgttttt

SEQ ID NO: 425763 - DNA, 19 bp, Homo sapiens
  siRNA target sequence for FLJ32844 (NM_173543.1,2437-2455).
ggggtcagtctgtttttta

SEQ ID NO: 425764 - DNA, 19 bp, Homo sapiens
  siRNA target sequence for FLJ32844 (NM_173543.1,2438-2456).
gggtcagtctgttttttat

SEQ ID NO: 425765 - DNA, 19 bp, Homo sapiens
  siRNA target sequence for BCNP1 (NM_173544.2,400-418).
cagttgctacgcagcaaaa

SEQ ID NO: 425766 - DNA, 19 bp, Homo sapiens
  siRNA target sequence for BCNP1 (NM_173544.2,603-621).
gacttcccagcgagaatat

SEQ ID NO: 425767 - DNA, 19 bp, Homo sapiens
  siRNA target sequence for BCNP1 (NM_173544.2,605-623).
cttcccagcgagaatatct

SEQ ID NO: 425768 - DNA, 19 bp, Homo sapiens
  siRNA target sequence for BCNP1 (NM_173544.2,653-671).
ccttgggagaccatactca

SEQ ID NO: 425769 - DNA, 19 bp, Homo sapiens
  siRNA target sequence for BCNP1 (NM_173544.2,1037-1055).
cctggaccgagcttctaga

SEQ ID NO: 425770 - DNA, 19 bp, Homo sapiens
  siRNA target sequence for BCNP1 (NM_173544.2,1103-1121).
ccttccagcccgaaaagga

SEQ ID NO: 425771 - DNA, 19 bp, Homo sapiens
  siRNA target sequence for BCNP1 (NM_173544.2,1201-1219).
cggctgaggacggatatca

SEQ ID NO: 425772 - DNA, 19 bp, Homo sapiens
  siRNA target sequence for BCNP1 (NM_173544.2,1388-1406).
ggctgcgcagggaggttta

SEQ ID NO: 425773 - DNA, 19 bp, Homo sapiens
  siRNA target sequence for BCNP1 (NM_173544.2,1392-1410).
gcgcagggaggtttactca

SEQ ID NO: 425774 - DNA, 19 bp, Homo sapiens
  siRNA target sequence for BCNP1 (NM_173544.2,1912-1930).
cttggtgccaatgatgtat

SEQ ID NO: 425775 - DNA, 19 bp, Homo sapiens
  siRNA target sequence for BCNP1 (NM_173544.2,1975-1993).
ggagcagctccaaatctta

SEQ ID NO: 425776 - DNA, 19 bp, Homo sapiens
  siRNA target sequence for BCNP1 (NM_173544.2,1990-2008).
cttaacttggtgtcaagtt

SEQ ID NO: 425777 - DNA, 19 bp, Homo sapiens
  siRNA target sequence for BCNP1 (NM_173544.2,2013-2031).
ggctgggagacaagctttt

SEQ ID NO: 425778 - DNA, 19 bp, Homo sapiens
  siRNA target sequence for BCNP1 (NM_173544.2,2151-2169).
gcttgcagagggactttca

SEQ ID NO: 425779 - DNA, 19 bp, Homo sapiens
  siRNA target sequence for BCNP1 (NM_173544.2,2212-2230).
cggcctaccccaagacaat

SEQ ID NO: 425780 - DNA, 19 bp, Homo sapiens
  siRNA target sequence for MGC47799 (NM_173545.1,241-259).
gaagacatgccattcttga

SEQ ID NO: 425781 - DNA, 19 bp, Homo sapiens
  siRNA target sequence for MGC47799 (NM_173545.1,268-286).
gtggtcagctgcgaatcaa

SEQ ID NO: 425782 - DNA, 19 bp, Homo sapiens
  siRNA target sequence for MGC47799 (NM_173545.1,284-302).
caaaccgatacacacaaat

SEQ ID NO: 425783 - DNA, 19 bp, Homo sapiens
  siRNA target sequence for MGC47799 (NM_173545.1,288-306).
ccgatacacacaaatccat

SEQ ID NO: 425784 - DNA, 19 bp, Homo sapiens
  siRNA target sequence for MGC47799 (NM_173545.1,351-369).
ccaaatctatggtgctatt

SEQ ID NO: 425785 - DNA, 19 bp, Homo sapiens
  siRNA target sequence for MGC47799 (NM_173545.1,385-403).
gcttttctttgttagttga

SEQ ID NO: 425786 - DNA, 19 bp, Homo sapiens
  siRNA target sequence for MGC47799 (NM_173545.1,391-409).
ctttgttagttgacaaata

SEQ ID NO: 425787 - DNA, 19 bp, Homo sapiens
  siRNA target sequence for MGC47799 (NM_173545.1,443-461).
ggaaatgcaatgtacctta

SEQ ID NO: 425788 - DNA, 19 bp, Homo sapiens
  siRNA target sequence for MGC47799 (NM_173545.1,471-489).
caagtgcttgatgaagata

SEQ ID NO: 425789 - DNA, 19 bp, Homo sapiens
  siRNA target sequence for MGC47799 (NM_173545.1,474-492).
gtgcttgatgaagataata

SEQ ID NO: 425790 - DNA, 19 bp, Homo sapiens
  siRNA target sequence for MGC47799 (NM_173545.1,476-494).
gcttgatgaagataatata

SEQ ID NO: 425791 - DNA, 19 bp, Homo sapiens
  siRNA target sequence for MGC47799 (NM_173545.1,587-605).
ccagatgactcccacaaat

SEQ ID NO: 425792 - DNA, 19 bp, Homo sapiens
  siRNA target sequence for MGC47799 (NM_173545.1,588-606).
cagatgactcccacaaata

SEQ ID NO: 425793 - DNA, 19 bp, Homo sapiens
  siRNA target sequence for MGC47799 (NM_173545.1,662-680).
cgagaggaaaagaatcctt

SEQ ID NO: 425794 - DNA, 19 bp, Homo sapiens
  siRNA target sequence for MGC47799 (NM_173545.1,699-717).
gaacatttaagtgatcaaa

SEQ ID NO: 425795 - DNA, 19 bp, Homo sapiens
  siRNA target sequence for MGC47799 (NM_173545.1,709-727).
gtgatcaaaacctttcagt

SEQ ID NO: 425796 - DNA, 19 bp, Homo sapiens
  siRNA target sequence for MGC47799 (NM_173545.1,733-751).
caatcagtggaggtaatgt

SEQ ID NO: 425797 - DNA, 19 bp, Homo sapiens
  siRNA target sequence for MGC47799 (NM_173545.1,739-757).
gtggaggtaatgtaatcca

SEQ ID NO: 425798 - DNA, 19 bp, Homo sapiens
  siRNA target sequence for MGC47799 (NM_173545.1,946-964).
ctgcaatcacattaagtaa

SEQ ID NO: 425799 - DNA, 19 bp, Homo sapiens
  siRNA target sequence for MGC47799 (NM_173545.1,948-966).
gcaatcacattaagtaaca

SEQ ID NO: 425800 - DNA, 19 bp, Homo sapiens
  siRNA target sequence for MGC47799 (NM_173545.1,1012-1030).
caatagaggaacttggtaa

SEQ ID NO: 425801 - DNA, 19 bp, Homo sapiens
  siRNA target sequence for MGC47799 (NM_173545.1,1026-1044).
ggtaaagtttctaaacata

SEQ ID NO: 425802 - DNA, 19 bp, Homo sapiens
  siRNA target sequence for MGC47799 (NM_173545.1,1027-1045).
gtaaagtttctaaacataa

SEQ ID NO: 425803 - DNA, 19 bp, Homo sapiens
  siRNA target sequence for MGC47799 (NM_173545.1,1054-1072).
ctaaaagaacaccacataa

SEQ ID NO: 425804 - DNA, 19 bp, Homo sapiens
  siRNA target sequence for MGC47799 (NM_173545.1,1084-1102).
caatgagctgttctgaaaa

SEQ ID NO: 425805 - DNA, 19 bp, Homo sapiens
  siRNA target sequence for MGC47799 (NM_173545.1,1137-1155).
gagtctcaagggtctcatt

SEQ ID NO: 425806 - DNA, 19 bp, Homo sapiens
  siRNA target sequence for MGC47799 (NM_173545.1,1173-1191).
ccctccaatcctgaaactt

SEQ ID NO: 425807 - DNA, 19 bp, Homo sapiens
  siRNA target sequence for MGC47799 (NM_173545.1,1194-1212).
catgcaaaggcaactgatt

SEQ ID NO: 425808 - DNA, 19 bp, Homo sapiens
  siRNA target sequence for MGC47799 (NM_173545.1,1198-1216).
caaaggcaactgattcagt

SEQ ID NO: 425809 - DNA, 19 bp, Homo sapiens
  siRNA target sequence for MGC47799 (NM_173545.1,1247-1265).
gaggacatcctgcatgtat

SEQ ID NO: 425810 - DNA, 19 bp, Homo sapiens
  siRNA target sequence for MGC47799 (NM_173545.1,1266-1284).
ggggcaaactgctatagga

SEQ ID NO: 425811 - DNA, 19 bp, Homo sapiens
  siRNA target sequence for MGC47799 (NM_173545.1,1267-1285).
gggcaaactgctataggaa

SEQ ID NO: 425812 - DNA, 19 bp, Homo sapiens
  siRNA target sequence for MGC47799 (NM_173545.1,1313-1331).
ccatcctggtgatagtgat

SEQ ID NO: 425813 - DNA, 19 bp, Homo sapiens
  siRNA target sequence for MGC47799 (NM_173545.1,1388-1406).
ctatggaccatcctgttat

SEQ ID NO: 425814 - DNA, 19 bp, Homo sapiens
  siRNA target sequence for MGC47799 (NM_173545.1,1392-1410).
ggaccatcctgttatagga

SEQ ID NO: 425815 - DNA, 19 bp, Homo sapiens
  siRNA target sequence for MGC47799 (NM_173545.1,1393-1411).
gaccatcctgttataggaa

SEQ ID NO: 425816 - DNA, 19 bp, Homo sapiens
  siRNA target sequence for MGC47799 (NM_173545.1,1412-1430).
gaatccccagcacaagata

SEQ ID NO: 425817 - DNA, 19 bp, Homo sapiens
  siRNA target sequence for MGC47799 (NM_173545.1,1417-1435).
cccagcacaagatagaata

SEQ ID NO: 425818 - DNA, 19 bp, Homo sapiens
  siRNA target sequence for MGC47799 (NM_173545.1,1418-1436).
ccagcacaagatagaatat

SEQ ID NO: 425819 - DNA, 19 bp, Homo sapiens
  siRNA target sequence for MGC47799 (NM_173545.1,1419-1437).
cagcacaagatagaatata

SEQ ID NO: 425820 - DNA, 19 bp, Homo sapiens
  siRNA target sequence for MGC47799 (NM_173545.1,1421-1439).
gcacaagatagaatataga

SEQ ID NO: 425821 - DNA, 19 bp, Homo sapiens
  siRNA target sequence for MGC47799 (NM_173545.1,1427-1445).
gatagaatatagacataat

SEQ ID NO: 425822 - DNA, 19 bp, Homo sapiens
  siRNA target sequence for MGC47799 (NM_173545.1,1447-1465).
cgcttccagtgagaaatgt

SEQ ID NO: 425823 - DNA, 19 bp, Homo sapiens
  siRNA target sequence for MGC47799 (NM_173545.1,1448-1466).
gcttccagtgagaaatgtt

SEQ ID NO: 425824 - DNA, 19 bp, Homo sapiens
  siRNA target sequence for MGC35097 (NM_173546.1,701-719).
gcacgggaacaagatctat

SEQ ID NO: 425825 - DNA, 19 bp, Homo sapiens
  siRNA target sequence for MGC35097 (NM_173546.1,843-861).
gctgaaggcagcgtcttta

SEQ ID NO: 425826 - DNA, 19 bp, Homo sapiens
  siRNA target sequence for MGC35097 (NM_173546.1,899-917).
ctactctcgcccacacttt

SEQ ID NO: 425827 - DNA, 19 bp, Homo sapiens
  siRNA target sequence for MGC35097 (NM_173546.1,904-922).
ctcgcccacactttgtcaa

SEQ ID NO: 425828 - DNA, 19 bp, Homo sapiens
  siRNA target sequence for MGC35097 (NM_173546.1,948-966).
catgggtcctggaccaaat

SEQ ID NO: 425829 - DNA, 19 bp, Homo sapiens
  siRNA target sequence for MGC35097 (NM_173546.1,978-996).
ctgcgcatgagggataaga

SEQ ID NO: 425830 - DNA, 19 bp, Homo sapiens
  siRNA target sequence for LOC201292 (NM_173547.2,500-518).
ccgaaggccagctactaga

SEQ ID NO: 425831 - DNA, 19 bp, Homo sapiens
  siRNA target sequence for LOC201292 (NM_173547.2,514-532).
ctagagctgcgcaagcaaa

SEQ ID NO: 425832 - DNA, 19 bp, Homo sapiens
  siRNA target sequence for LOC201292 (NM_173547.2,597-615).
gctacaggccctggaaata

SEQ ID NO: 425833 - DNA, 19 bp, Homo sapiens
  siRNA target sequence for LOC201292 (NM_173547.2,976-994).
ccggtcccaagcacagttt

SEQ ID NO: 425834 - DNA, 19 bp, Homo sapiens
  siRNA target sequence for LOC201292 (NM_173547.2,1007-1025).
ggaaactctggcagaatta

SEQ ID NO: 425835 - DNA, 19 bp, Homo sapiens
  siRNA target sequence for LOC201292 (NM_173547.2,1018-1036).
cagaattatcgcaatctga

SEQ ID NO: 425836 - DNA, 19 bp, Homo sapiens
  siRNA target sequence for LOC201292 (NM_173547.2,1052-1070).
gcgccaaccgtcacttcta

SEQ ID NO: 425837 - DNA, 19 bp, Homo sapiens
  siRNA target sequence for LOC201292 (NM_173547.2,1053-1071).
cgccaaccgtcacttctat

SEQ ID NO: 425838 - DNA, 19 bp, Homo sapiens
  siRNA target sequence for LOC201292 (NM_173547.2,1055-1073).
ccaaccgtcacttctatct

SEQ ID NO: 425839 - DNA, 19 bp, Homo sapiens
  siRNA target sequence for FLJ39553 (NM_173549.1,196-214).
gttccccagcgtaacttca

SEQ ID NO: 425840 - DNA, 19 bp, Homo sapiens
  siRNA target sequence for FLJ39553 (NM_173549.1,201-219).
ccagcgtaacttcaaatga

SEQ ID NO: 425841 - DNA, 19 bp, Homo sapiens
  siRNA target sequence for FLJ39553 (NM_173549.1,280-298).
gggaagagaatctactgtt

SEQ ID NO: 425842 - DNA, 19 bp, Homo sapiens
  siRNA target sequence for FLJ39553 (NM_173549.1,321-339).
gccgtcctcccttacaaaa

SEQ ID NO: 425843 - DNA, 19 bp, Homo sapiens
  siRNA target sequence for FLJ39553 (NM_173549.1,324-342).
gtcctcccttacaaaagct

SEQ ID NO: 425844 - DNA, 19 bp, Homo sapiens
  siRNA target sequence for FLJ39553 (NM_173549.1,437-455).
caatcagggtccacagaaa

SEQ ID NO: 425845 - DNA, 19 bp, Homo sapiens
  siRNA target sequence for FLJ39553 (NM_173549.1,561-579).
cagaggccgagtctctaaa

SEQ ID NO: 425846 - DNA, 19 bp, Homo sapiens
  siRNA target sequence for FLJ39553 (NM_173549.1,565-583).
ggccgagtctctaaaagga

SEQ ID NO: 425847 - DNA, 19 bp, Homo sapiens
  siRNA target sequence for FLJ39553 (NM_173549.1,673-691).
cactgagaatccacaaact

SEQ ID NO: 425848 - DNA, 19 bp, Homo sapiens
  siRNA target sequence for FLJ39553 (NM_173549.1,703-721).
gaagcctctaggaacaact

SEQ ID NO: 425849 - DNA, 19 bp, Homo sapiens
  siRNA target sequence for FLJ39553 (NM_173549.1,927-945).
gaattcccaaagagaatgt

SEQ ID NO: 425850 - DNA, 19 bp, Homo sapiens
  siRNA target sequence for FLJ39553 (NM_173549.1,940-958).
gaatgtaacaccagaagta

SEQ ID NO: 425851 - DNA, 19 bp, Homo sapiens
  siRNA target sequence for FLJ39553 (NM_173549.1,1072-1090).
ggagcatccagcacgaaat

SEQ ID NO: 425852 - DNA, 19 bp, Homo sapiens
  siRNA target sequence for FLJ39553 (NM_173549.1,1075-1093).
gcatccagcacgaaatgta

SEQ ID NO: 425853 - DNA, 19 bp, Homo sapiens
  siRNA target sequence for FLJ39553 (NM_173549.1,1161-1179).
gtgagacaggggaaaaggt

SEQ ID NO: 425854 - DNA, 19 bp, Homo sapiens
  siRNA target sequence for FLJ39267 (NM_173550.2,341-359).
ctggtgatacccaaaggtt

SEQ ID NO: 425855 - DNA, 19 bp, Homo sapiens
  siRNA target sequence for FLJ39267 (NM_173550.2,346-364).
gatacccaaaggttgaaga

SEQ ID NO: 425856 - DNA, 19 bp, Homo sapiens
  siRNA target sequence for FLJ39267 (NM_173550.2,360-378).
gaagattgcctcattggat

SEQ ID NO: 425857 - DNA, 19 bp, Homo sapiens
  siRNA target sequence for FLJ39267 (NM_173550.2,369-387).
ctcattggatgtaaaacaa

SEQ ID NO: 425858 - DNA, 19 bp, Homo sapiens
  siRNA target sequence for FLJ39267 (NM_173550.2,412-430).
gatattactgataatctca

SEQ ID NO: 425859 - DNA, 19 bp, Homo sapiens
  siRNA target sequence for FLJ39267 (NM_173550.2,523-541).
ctacggtccgaggttgaaa

SEQ ID NO: 425860 - DNA, 19 bp, Homo sapiens
  siRNA target sequence for FLJ39267 (NM_173550.2,614-632).
gggctgctgaagaaagatt

SEQ ID NO: 425861 - DNA, 19 bp, Homo sapiens
  siRNA target sequence for FLJ39267 (NM_173550.2,781-799).
gacaatatgatccaaaatt

SEQ ID NO: 425862 - DNA, 19 bp, Homo sapiens
  siRNA target sequence for FLJ39267 (NM_173550.2,801-819).
caatcgagaatatgattta

SEQ ID NO: 425863 - DNA, 19 bp, Homo sapiens
  siRNA target sequence for FLJ39267 (NM_173550.2,805-823).
cgagaatatgatttactta

SEQ ID NO: 425864 - DNA, 19 bp, Homo sapiens
  siRNA target sequence for FLJ39267 (NM_173550.2,806-824).
gagaatatgatttacttat

SEQ ID NO: 425865 - DNA, 19 bp, Homo sapiens
  siRNA target sequence for FLJ39267 (NM_173550.2,836-854).
gcagactagagaaaactct

SEQ ID NO: 425866 - DNA, 19 bp, Homo sapiens
  siRNA target sequence for FLJ39267 (NM_173550.2,858-876).
ggaagcgttggaaaaacat

SEQ ID NO: 425867 - DNA, 19 bp, Homo sapiens
  siRNA target sequence for FLJ39267 (NM_173550.2,968-986).
gagaattacaatttatagt

SEQ ID NO: 425868 - DNA, 19 bp, Homo sapiens
  siRNA target sequence for FLJ39267 (NM_173550.2,997-1015).
gatactgctgtgcaaaata

SEQ ID NO: 425869 - DNA, 19 bp, Homo sapiens
  siRNA target sequence for FLJ39267 (NM_173550.2,1006-1024).
gtgcaaaatatgcataaga

SEQ ID NO: 425870 - DNA, 19 bp, Homo sapiens
  siRNA target sequence for FLJ39267 (NM_173550.2,1065-1083).
ccttttacggcgacaaaca

SEQ ID NO: 425871 - DNA, 19 bp, Homo sapiens
  siRNA target sequence for FLJ39267 (NM_173550.2,1066-1084).
cttttacggcgacaaacaa

SEQ ID NO: 425872 - DNA, 19 bp, Homo sapiens
  siRNA target sequence for FLJ39267 (NM_173550.2,1074-1092).
gcgacaaacaagtgaactt

SEQ ID NO: 425873 - DNA, 19 bp, Homo sapiens
  siRNA target sequence for FLJ39267 (NM_173550.2,1078-1096).
caaacaagtgaacttgaat

SEQ ID NO: 425874 - DNA, 19 bp, Homo sapiens
  siRNA target sequence for FLJ39267 (NM_173550.2,1108-1126).
cgagaggaacgccttagaa

SEQ ID NO: 425875 - DNA, 19 bp, Homo sapiens
  siRNA target sequence for FLJ39267 (NM_173550.2,1109-1127).
gagaggaacgccttagaaa

SEQ ID NO: 425876 - DNA, 19 bp, Homo sapiens
  siRNA target sequence for FLJ39267 (NM_173550.2,1253-1271).
gagctttgcaagtagagaa

SEQ ID NO: 425877 - DNA, 19 bp, Homo sapiens
  siRNA target sequence for FLJ39267 (NM_173550.2,1340-1358).
catatgagcgagaaaagca

SEQ ID NO: 425878 - DNA, 19 bp, Homo sapiens
  siRNA target sequence for FLJ39267 (NM_173550.2,1347-1365).
gcgagaaaagcataatgca

SEQ ID NO: 425879 - DNA, 19 bp, Homo sapiens
  siRNA target sequence for FLJ39267 (NM_173550.2,1363-1381).
gcacaagagagctttgcaa

SEQ ID NO: 425880 - DNA, 19 bp, Homo sapiens
  siRNA target sequence for FLJ39267 (NM_173550.2,1371-1389).
gagctttgcaaaactaaat

SEQ ID NO: 425881 - DNA, 19 bp, Homo sapiens
  siRNA target sequence for FLJ39267 (NM_173550.2,1482-1500).
ccagtataatgaaaaaagt

SEQ ID NO: 425882 - DNA, 19 bp, Homo sapiens
  siRNA target sequence for FLJ39267 (NM_173550.2,1552-1570).
ctagtagagacatgtgaaa

SEQ ID NO: 425883 - DNA, 19 bp, Homo sapiens
  siRNA target sequence for FLJ39267 (NM_173550.2,1670-1688).
ctgttgtccttgagagatt

SEQ ID NO: 425884 - DNA, 19 bp, Homo sapiens
  siRNA target sequence for FLJ39267 (NM_173550.2,1672-1690).
gttgtccttgagagattga

SEQ ID NO: 425885 - DNA, 19 bp, Homo sapiens
  siRNA target sequence for FLJ39267 (NM_173550.2,1691-1709).
ggcgtaccttgacagatta

SEQ ID NO: 425886 - DNA, 19 bp, Homo sapiens
  siRNA target sequence for FLJ39267 (NM_173550.2,1694-1712).
gtaccttgacagattacca

SEQ ID NO: 425887 - DNA, 19 bp, Homo sapiens
  siRNA target sequence for FLJ39267 (NM_173550.2,1719-1737).
gctggaagatgcatctaat

SEQ ID NO: 425888 - DNA, 19 bp, Homo sapiens
  siRNA target sequence for FLJ39267 (NM_173550.2,1746-1764).
ggcatgtaatgaacttgat

SEQ ID NO: 425889 - DNA, 19 bp, Homo sapiens
  siRNA target sequence for FLJ39267 (NM_173550.2,1747-1765).
gcatgtaatgaacttgatt

SEQ ID NO: 425890 - DNA, 19 bp, Homo sapiens
  siRNA target sequence for FLJ39267 (NM_173550.2,1759-1777).
cttgattctacgaaacaga

SEQ ID NO: 425891 - DNA, 19 bp, Homo sapiens
  siRNA target sequence for FLJ39267 (NM_173550.2,1766-1784).
ctacgaaacagaagataga

SEQ ID NO: 425892 - DNA, 19 bp, Homo sapiens
  siRNA target sequence for FLJ39267 (NM_173550.2,1816-1834).
gataaactggctgatgtta

SEQ ID NO: 425893 - DNA, 19 bp, Homo sapiens
  siRNA target sequence for FLJ39267 (NM_173550.2,1825-1843).
gctgatgttaataaagagt

SEQ ID NO: 425894 - DNA, 19 bp, Homo sapiens
  siRNA target sequence for FLJ39267 (NM_173550.2,1868-1886).
cagaccgagaggctttaat

SEQ ID NO: 425895 - DNA, 19 bp, Homo sapiens
  siRNA target sequence for FLJ39267 (NM_173550.2,1870-1888).
gaccgagaggctttaataa

SEQ ID NO: 425896 - DNA, 19 bp, Homo sapiens
  siRNA target sequence for FLJ39267 (NM_173550.2,1873-1891).
cgagaggctttaataagca

SEQ ID NO: 425897 - DNA, 19 bp, Homo sapiens
  siRNA target sequence for FLJ39267 (NM_173550.2,1945-1963).
caggcagcccagtctgaaa

SEQ ID NO: 425898 - DNA, 19 bp, Homo sapiens
  siRNA target sequence for FLJ39267 (NM_173550.2,1947-1965).
ggcagcccagtctgaaagt

SEQ ID NO: 425899 - DNA, 19 bp, Homo sapiens
  siRNA target sequence for FLJ39267 (NM_173550.2,1978-1996).
ctttcccaggctttccata

SEQ ID NO: 425900 - DNA, 19 bp, Homo sapiens
  siRNA target sequence for FLJ39267 (NM_173550.2,2051-2069).
caggctgtgtgctcataaa

SEQ ID NO: 425901 - DNA, 19 bp, Homo sapiens
  siRNA target sequence for FLJ39267 (NM_173550.2,2075-2093).
cagaaggcatgctggataa

SEQ ID NO: 425902 - DNA, 19 bp, Homo sapiens
  siRNA target sequence for FLJ39267 (NM_173550.2,2077-2095).
gaaggcatgctggataaat

SEQ ID NO: 425903 - DNA, 19 bp, Homo sapiens
  siRNA target sequence for FLJ39267 (NM_173550.2,2155-2173).
ctcaacagggctaatgaga

SEQ ID NO: 425904 - DNA, 19 bp, Homo sapiens
  siRNA target sequence for FLJ39267 (NM_173550.2,2311-2329).
gaactagagctgcagtatt

SEQ ID NO: 425905 - DNA, 19 bp, Homo sapiens
  siRNA target sequence for FLJ39267 (NM_173550.2,2447-2465).
cgcacttcaaaaaactgtt

SEQ ID NO: 425906 - DNA, 19 bp, Homo sapiens
  siRNA target sequence for FLJ39267 (NM_173550.2,2497-2515).
ctggcagcctgtgcattaa

SEQ ID NO: 425907 - DNA, 19 bp, Homo sapiens
  siRNA target sequence for FLJ39267 (NM_173550.2,2597-2615).
cctttgagttgttcaaact

SEQ ID NO: 425908 - DNA, 19 bp, Homo sapiens
  siRNA target sequence for FLJ39267 (NM_173550.2,2747-2765).
caaacagactcaagatttt

SEQ ID NO: 425909 - DNA, 19 bp, Homo sapiens
  siRNA target sequence for FLJ39267 (NM_173550.2,2792-2810).
cctggatggagagtttcaa

SEQ ID NO: 425910 - DNA, 19 bp, Homo sapiens
  siRNA target sequence for FLJ39267 (NM_173550.2,2844-2862).
gccccaagacaagcataaa

SEQ ID NO: 425911 - DNA, 19 bp, Homo sapiens
  siRNA target sequence for FLJ39267 (NM_173550.2,2846-2864).
cccaagacaagcataaatt

SEQ ID NO: 425912 - DNA, 19 bp, Homo sapiens
  siRNA target sequence for FLJ39267 (NM_173550.2,2883-2901).
gcagttgcgttgtttacaa

SEQ ID NO: 425913 - DNA, 19 bp, Homo sapiens
  siRNA target sequence for FLJ39267 (NM_173550.2,2935-2953).
gctgcaataatcagttcta

SEQ ID NO: 425914 - DNA, 19 bp, Homo sapiens
  siRNA target sequence for FLJ39267 (NM_173550.2,2977-2995).
ggtaaagcagatccaaatt

SEQ ID NO: 425915 - DNA, 19 bp, Homo sapiens
  siRNA target sequence for FLJ39267 (NM_173550.2,3018-3036).
cataggtgcagccaagaat

SEQ ID NO: 425916 - DNA, 19 bp, Homo sapiens
  siRNA target sequence for FLJ39267 (NM_173550.2,3069-3087).
ggtaatggaatgtatacct

SEQ ID NO: 425917 - DNA, 19 bp, Homo sapiens
  siRNA target sequence for FLJ39267 (NM_173550.2,3091-3109).
cacagtagcaggagtatta

SEQ ID NO: 425918 - DNA, 19 bp, Homo sapiens
  siRNA target sequence for FLJ39267 (NM_173550.2,3144-3162).
ggcccatggacttcataaa

SEQ ID NO: 425919 - DNA, 19 bp, Homo sapiens
  siRNA target sequence for FLJ39267 (NM_173550.2,3146-3164).
cccatggacttcataaagt

SEQ ID NO: 425920 - DNA, 19 bp, Homo sapiens
  siRNA target sequence for FLJ39267 (NM_173550.2,3172-3190).
ctggccctgaaatatggtt

SEQ ID NO: 425921 - DNA, 19 bp, Homo sapiens
  siRNA target sequence for FLJ39267 (NM_173550.2,3196-3214).
ggccatgtgcccattacga

SEQ ID NO: 425922 - DNA, 19 bp, Homo sapiens
  siRNA target sequence for FLJ39267 (NM_173550.2,3197-3215).
gccatgtgcccattacgaa

SEQ ID NO: 425923 - DNA, 19 bp, Homo sapiens
  siRNA target sequence for FLJ39267 (NM_173550.2,3198-3216).
ccatgtgcccattacgaaa

SEQ ID NO: 425924 - DNA, 19 bp, Homo sapiens
  siRNA target sequence for FLJ39267 (NM_173550.2,3199-3217).
catgtgcccattacgaaaa

SEQ ID NO: 425925 - DNA, 19 bp, Homo sapiens
  siRNA target sequence for FLJ39267 (NM_173550.2,3202-3220).
gtgcccattacgaaaagca

SEQ ID NO: 425926 - DNA, 19 bp, Homo sapiens
  siRNA target sequence for FLJ39267 (NM_173550.2,3295-3313).
cgcttagaggtcacagaat

SEQ ID NO: 425927 - DNA, 19 bp, Homo sapiens
  siRNA target sequence for FLJ39267 (NM_173550.2,3296-3314).
gcttagaggtcacagaatt

SEQ ID NO: 425928 - DNA, 19 bp, Homo sapiens
  siRNA target sequence for FLJ39267 (NM_173550.2,3315-3333).
caaacgaagtgtgaatgaa

SEQ ID NO: 425929 - DNA, 19 bp, Homo sapiens
  siRNA target sequence for FLJ39267 (NM_173550.2,3361-3379).
ggtctgcaaatgcaattaa

SEQ ID NO: 425930 - DNA, 19 bp, Homo sapiens
  siRNA target sequence for FLJ39267 (NM_173550.2,3402-3420).
gatcacccatgagaagttt

SEQ ID NO: 425931 - DNA, 19 bp, Homo sapiens
  siRNA target sequence for FLJ39267 (NM_173550.2,3463-3481).
gagcaggcacaaatgctat

SEQ ID NO: 425932 - DNA, 19 bp, Homo sapiens
  siRNA target sequence for FLJ39267 (NM_173550.2,3466-3484).
caggcacaaatgctattga

SEQ ID NO: 425933 - DNA, 19 bp, Homo sapiens
  siRNA target sequence for FLJ39267 (NM_173550.2,3468-3486).
ggcacaaatgctattgaat

SEQ ID NO: 425934 - DNA, 19 bp, Homo sapiens
  siRNA target sequence for FLJ39267 (NM_173550.2,3499-3517).
caactacaggaattgaatt

SEQ ID NO: 425935 - DNA, 19 bp, Homo sapiens
  siRNA target sequence for FLJ39267 (NM_173550.2,3507-3525).
ggaattgaattataaactt

SEQ ID NO: 425936 - DNA, 19 bp, Homo sapiens
  siRNA target sequence for FLJ39267 (NM_173550.2,3584-3602).
gtctctccgaggcaaagat

SEQ ID NO: 425937 - DNA, 19 bp, Homo sapiens
  siRNA target sequence for FLJ39267 (NM_173550.2,3630-3648).
gcgtcagctcaatagacat

SEQ ID NO: 425938 - DNA, 19 bp, Homo sapiens
  siRNA target sequence for FLJ39267 (NM_173550.2,3634-3652).
cagctcaatagacatctta

SEQ ID NO: 425939 - DNA, 19 bp, Homo sapiens
  siRNA target sequence for FLJ39267 (NM_173550.2,3736-3754).
gaatgtgttgctaatcaca

SEQ ID NO: 425940 - DNA, 19 bp, Homo sapiens
  siRNA target sequence for FLJ39267 (NM_173550.2,3753-3771).
catgagagcagtagaaaat

SEQ ID NO: 425941 - DNA, 19 bp, Homo sapiens
  siRNA target sequence for FLJ39267 (NM_173550.2,3814-3832).
gcggcaagtaggaatgact

SEQ ID NO: 425942 - DNA, 19 bp, Homo sapiens
  siRNA target sequence for FLJ39267 (NM_173550.2,3815-3833).
cggcaagtaggaatgactt

SEQ ID NO: 425943 - DNA, 19 bp, Homo sapiens
  siRNA target sequence for FLJ39267 (NM_173550.2,3907-3925).
gcatgccaggctatgatta

SEQ ID NO: 425944 - DNA, 19 bp, Homo sapiens
  siRNA target sequence for FLJ39267 (NM_173550.2,3912-3930).
ccaggctatgattaaaagt

SEQ ID NO: 425945 - DNA, 19 bp, Homo sapiens
  siRNA target sequence for FLJ39267 (NM_173550.2,3916-3934).
gctatgattaaaagtttca

SEQ ID NO: 425946 - DNA, 19 bp, Homo sapiens
  siRNA target sequence for FLJ39267 (NM_173550.2,3956-3974).
gcactagaatcatgacatt

SEQ ID NO: 425947 - DNA, 19 bp, Homo sapiens
  siRNA target sequence for FLJ39267 (NM_173550.2,3957-3975).
cactagaatcatgacatta

SEQ ID NO: 425948 - DNA, 19 bp, Homo sapiens
  siRNA target sequence for FLJ39267 (NM_173550.2,3959-3977).
ctagaatcatgacattaga

SEQ ID NO: 425949 - DNA, 19 bp, Homo sapiens
  siRNA target sequence for FLJ39267 (NM_173550.2,4072-4090).
ggatcacgagaccattcaa

SEQ ID NO: 425950 - DNA, 19 bp, Homo sapiens
  siRNA target sequence for FLJ39267 (NM_173550.2,4076-4094).
cacgagaccattcaaatct

SEQ ID NO: 425951 - DNA, 19 bp, Homo sapiens
  siRNA target sequence for FLJ39267 (NM_173550.2,4078-4096).
cgagaccattcaaatctct

SEQ ID NO: 425952 - DNA, 19 bp, Homo sapiens
  siRNA target sequence for FLJ39267 (NM_173550.2,4165-4183).
gaacttgatactacttaca

SEQ ID NO: 425953 - DNA, 19 bp, Homo sapiens
  siRNA target sequence for FLJ39267 (NM_173550.2,4171-4189).
gatactacttacactttct

SEQ ID NO: 425954 - DNA, 19 bp, Homo sapiens
  siRNA target sequence for FLJ39267 (NM_173550.2,4276-4294).
ccaactcagattggattat

SEQ ID NO: 425955 - DNA, 19 bp, Homo sapiens
  siRNA target sequence for SAMD6 (NM_173551.1,298-316).
caaccactcgcctcattca

SEQ ID NO: 425956 - DNA, 19 bp, Homo sapiens
  siRNA target sequence for SAMD6 (NM_173551.1,378-396).
gtggcagcatagacaatgt

SEQ ID NO: 425957 - DNA, 19 bp, Homo sapiens
  siRNA target sequence for SAMD6 (NM_173551.1,380-398).
ggcagcatagacaatgtct

SEQ ID NO: 425958 - DNA, 19 bp, Homo sapiens
  siRNA target sequence for SAMD6 (NM_173551.1,381-399).
gcagcatagacaatgtctt

SEQ ID NO: 425959 - DNA, 19 bp, Homo sapiens
  siRNA target sequence for SAMD6 (NM_173551.1,536-554).
cctgttggcaagcagaaat

SEQ ID NO: 425960 - DNA, 19 bp, Homo sapiens
  siRNA target sequence for SAMD6 (NM_173551.1,737-755).
gaactgactggaatcctta

SEQ ID NO: 425961 - DNA, 19 bp, Homo sapiens
  siRNA target sequence for SAMD6 (NM_173551.1,740-758).
ctgactggaatccttaaga

SEQ ID NO: 425962 - DNA, 19 bp, Homo sapiens
  siRNA target sequence for SAMD6 (NM_173551.1,847-865).
ggagctgggaattaagaca

SEQ ID NO: 425963 - DNA, 19 bp, Homo sapiens
  siRNA target sequence for SAMD6 (NM_173551.1,870-888).
ggtccaggcagcagattct

SEQ ID NO: 425964 - DNA, 19 bp, Homo sapiens
  siRNA target sequence for SAMD6 (NM_173551.1,891-909).
cagcgatttctgaactgaa

SEQ ID NO: 425965 - DNA, 19 bp, Homo sapiens
  siRNA target sequence for SAMD6 (NM_173551.1,919-937).
gggacgcgagagacaaatt

SEQ ID NO: 425966 - DNA, 19 bp, Homo sapiens
  siRNA target sequence for MGC33365 (NM_173552.2,919-937).
gagttttccgtctgatgaa

SEQ ID NO: 425967 - DNA, 19 bp, Homo sapiens
  siRNA target sequence for MGC33365 (NM_173552.2,939-957).
gttggccatttgcaaagta

SEQ ID NO: 425968 - DNA, 19 bp, Homo sapiens
  siRNA target sequence for MGC33365 (NM_173552.2,942-960).
ggccatttgcaaagtatct

SEQ ID NO: 425969 - DNA, 19 bp, Homo sapiens
  siRNA target sequence for MGC33365 (NM_173552.2,979-997).
ggtggctgtaaattatgtt

SEQ ID NO: 425970 - DNA, 19 bp, Homo sapiens
  siRNA target sequence for MGC33365 (NM_173552.2,1004-1022).
gaactgtggagttacttta

SEQ ID NO: 425971 - DNA, 19 bp, Homo sapiens
  siRNA target sequence for MGC33365 (NM_173552.2,1046-1064).
gacctcgcttggcaattaa

SEQ ID NO: 425972 - DNA, 19 bp, Homo sapiens
  siRNA target sequence for MGC33365 (NM_173552.2,1052-1070).
gcttggcaattaatggaaa

SEQ ID NO: 425973 - DNA, 19 bp, Homo sapiens
  siRNA target sequence for MGC33365 (NM_173552.2,1074-1092).
cagaacagcttacaaacaa

SEQ ID NO: 425974 - DNA, 19 bp, Homo sapiens
  siRNA target sequence for MGC33365 (NM_173552.2,1120-1138).
ggacgtcagctttgacaat

SEQ ID NO: 425975 - DNA, 19 bp, Homo sapiens
  siRNA target sequence for MGC33365 (NM_173552.2,1123-1141).
cgtcagctttgacaatttt

SEQ ID NO: 425976 - DNA, 19 bp, Homo sapiens
  siRNA target sequence for MGC33365 (NM_173552.2,1151-1169).
cctagagatgggaaggtaa

SEQ ID NO: 425977 - DNA, 19 bp, Homo sapiens
  siRNA target sequence for MGC33365 (NM_173552.2,1152-1170).
ctagagatgggaaggtaat

SEQ ID NO: 425978 - DNA, 19 bp, Homo sapiens
  siRNA target sequence for MGC33365 (NM_173552.2,1190-1208).
gttttggttgctgacaaaa

SEQ ID NO: 425979 - DNA, 19 bp, Homo sapiens
  siRNA target sequence for MGC33365 (NM_173552.2,1195-1213).
ggttgctgacaaaagatta

SEQ ID NO: 425980 - DNA, 19 bp, Homo sapiens
  siRNA target sequence for MGC33365 (NM_173552.2,1274-1292).
gataaggaggcttgcttat

SEQ ID NO: 425981 - DNA, 19 bp, Homo sapiens
  siRNA target sequence for MGC33365 (NM_173552.2,1279-1297).
ggaggcttgcttatcattt

SEQ ID NO: 425982 - DNA, 19 bp, Homo sapiens
  siRNA target sequence for MGC33365 (NM_173552.2,1322-1340).
gccactgtggaccacaatt

SEQ ID NO: 425983 - DNA, 19 bp, Homo sapiens
  siRNA target sequence for MGC33365 (NM_173552.2,1336-1354).
caattactatgctgtttgt

SEQ ID NO: 425984 - DNA, 19 bp, Homo sapiens
  siRNA target sequence for MGC33365 (NM_173552.2,1349-1367).
gtttgtcagaacctcttat

SEQ ID NO: 425985 - DNA, 19 bp, Homo sapiens
  siRNA target sequence for MGC33365 (NM_173552.2,1518-1536).
gtgaatacctagcacaatt

SEQ ID NO: 425986 - DNA, 19 bp, Homo sapiens
  siRNA target sequence for MGC33365 (NM_173552.2,1526-1544).
ctagcacaattaagtaaca

SEQ ID NO: 425987 - DNA, 19 bp, Homo sapiens
  siRNA target sequence for FLJ25801 (NM_173553.1,85-103).
caggaaatattgaacacat

SEQ ID NO: 425988 - DNA, 19 bp, Homo sapiens
  siRNA target sequence for FLJ25801 (NM_173553.1,99-117).
cacatcgagggagaaactt

SEQ ID NO: 425989 - DNA, 19 bp, Homo sapiens
  siRNA target sequence for FLJ25801 (NM_173553.1,195-213).
gatgattgagtctgagtat

SEQ ID NO: 425990 - DNA, 19 bp, Homo sapiens
  siRNA target sequence for FLJ25801 (NM_173553.1,219-237).
gagactccggttgttgaat

SEQ ID NO: 425991 - DNA, 19 bp, Homo sapiens
  siRNA target sequence for FLJ25801 (NM_173553.1,221-239).
gactccggttgttgaatga

SEQ ID NO: 425992 - DNA, 19 bp, Homo sapiens
  siRNA target sequence for FLJ25801 (NM_173553.1,296-314).
gagaaacccttctgaatca

SEQ ID NO: 425993 - DNA, 19 bp, Homo sapiens
  siRNA target sequence for FLJ25801 (NM_173553.1,332-350).
ccgagctagaggagatgtt

SEQ ID NO: 425994 - DNA, 19 bp, Homo sapiens
  siRNA target sequence for FLJ25801 (NM_173553.1,502-520).
ctcaagaatgcaaaatact

SEQ ID NO: 425995 - DNA, 19 bp, Homo sapiens
  siRNA target sequence for FLJ25801 (NM_173553.1,680-698).
ctgaggacctgagaactat

SEQ ID NO: 425996 - DNA, 19 bp, Homo sapiens
  siRNA target sequence for FLJ25801 (NM_173553.1,682-700).
gaggacctgagaactatga

SEQ ID NO: 425997 - DNA, 19 bp, Homo sapiens
  siRNA target sequence for FLJ25801 (NM_173553.1,684-702).
ggacctgagaactatgaga

SEQ ID NO: 425998 - DNA, 19 bp, Homo sapiens
  siRNA target sequence for FLJ25801 (NM_173553.1,685-703).
gacctgagaactatgagat

SEQ ID NO: 425999 - DNA, 19 bp, Homo sapiens
  siRNA target sequence for FLJ25801 (NM_173553.1,732-750).
caacccagaaagattggat

SEQ ID NO: 426000 - DNA, 19 bp, Homo sapiens
  siRNA target sequence for FLJ25801 (NM_173553.1,830-848).
ggtggcaagtgggcatata

SEQ ID NO: 426001 - DNA, 19 bp, Homo sapiens
  siRNA target sequence for FLJ25801 (NM_173553.1,886-904).
gcttccggagagaaagtct

SEQ ID NO: 426002 - DNA, 19 bp, Homo sapiens
  siRNA target sequence for FLJ25801 (NM_173553.1,887-905).
cttccggagagaaagtctt

SEQ ID NO: 426003 - DNA, 19 bp, Homo sapiens
  siRNA target sequence for FLJ25801 (NM_173553.1,1015-1033).
gaacacgggcagatatcat

SEQ ID NO: 426004 - DNA, 19 bp, Homo sapiens
  siRNA target sequence for FLJ25801 (NM_173553.1,1018-1036).
cacgggcagatatcattct

SEQ ID NO: 426005 - DNA, 19 bp, Homo sapiens
  siRNA target sequence for FLJ25801 (NM_173553.1,1023-1041).
gcagatatcattctacaat

SEQ ID NO: 426006 - DNA, 19 bp, Homo sapiens
  siRNA target sequence for FLJ25801 (NM_173553.1,1046-1064).
ccgagatgtccctcattta

SEQ ID NO: 426007 - DNA, 19 bp, Homo sapiens
  siRNA target sequence for FLJ25801 (NM_173553.1,1048-1066).
gagatgtccctcatttaca

SEQ ID NO: 426008 - DNA, 19 bp, Homo sapiens
  siRNA target sequence for FLJ25801 (NM_173553.1,1050-1068).
gatgtccctcatttacaat

SEQ ID NO: 426009 - DNA, 19 bp, Homo sapiens
  siRNA target sequence for FLJ25801 (NM_173553.1,1093-1111).
gctctcaggcctgtgtttt

SEQ ID NO: 426010 - DNA, 19 bp, Homo sapiens
  siRNA target sequence for FLJ25801 (NM_173553.1,1113-1131).
cctctgtatcccaaatgga

SEQ ID NO: 426011 - DNA, 19 bp, Homo sapiens
  siRNA target sequence for FLJ25801 (NM_173553.1,1149-1167).
cctcaccatcttacaacat

SEQ ID NO: 426012 - DNA, 19 bp, Homo sapiens
  siRNA target sequence for MGC44593 (NM_173554.1,346-364).
caaaatttatgactttact

SEQ ID NO: 426013 - DNA, 19 bp, Homo sapiens
  siRNA target sequence for MGC44593 (NM_173554.1,363-381).
ctagctatgtcacttcaaa

SEQ ID NO: 426014 - DNA, 19 bp, Homo sapiens
  siRNA target sequence for MGC44593 (NM_173554.1,444-462).
gaaataggaccaacacatt

SEQ ID NO: 426015 - DNA, 19 bp, Homo sapiens
  siRNA target sequence for MGC44593 (NM_173554.1,453-471).
ccaacacattcgcaaaaga

SEQ ID NO: 426016 - DNA, 19 bp, Homo sapiens
  siRNA target sequence for MGC44593 (NM_173554.1,505-523).
ccaatgctatcattgatta

SEQ ID NO: 426017 - DNA, 19 bp, Homo sapiens
  siRNA target sequence for MGC44593 (NM_173554.1,510-528).
gctatcattgattacttaa

SEQ ID NO: 426018 - DNA, 19 bp, Homo sapiens
  siRNA target sequence for MGC44593 (NM_173554.1,812-830).
cattgaagatgtaaaatca

SEQ ID NO: 426019 - DNA, 19 bp, Homo sapiens
  siRNA target sequence for MGC44593 (NM_173554.1,864-882).
ggcattcagaccgagataa

SEQ ID NO: 426020 - DNA, 19 bp, Homo sapiens
  siRNA target sequence for MGC44593 (NM_173554.1,872-890).
gaccgagataaacgaaaaa

SEQ ID NO: 426021 - DNA, 19 bp, Homo sapiens
  siRNA target sequence for MGC44593 (NM_173554.1,874-892).
ccgagataaacgaaaaact

SEQ ID NO: 426022 - DNA, 19 bp, Homo sapiens
  siRNA target sequence for MGC44593 (NM_173554.1,902-920).
ggaagaggcctttaatgca

SEQ ID NO: 426023 - DNA, 19 bp, Homo sapiens
  siRNA target sequence for MGC44593 (NM_173554.1,908-926).
ggcctttaatgcacgaata

SEQ ID NO: 426024 - DNA, 19 bp, Homo sapiens
  siRNA target sequence for MGC44593 (NM_173554.1,910-928).
cctttaatgcacgaataga

SEQ ID NO: 426025 - DNA, 19 bp, Homo sapiens
  siRNA target sequence for MGC44593 (NM_173554.1,911-929).
ctttaatgcacgaatagaa

SEQ ID NO: 426026 - DNA, 19 bp, Homo sapiens
  siRNA target sequence for MGC44593 (NM_173554.1,918-936).
gcacgaatagaaaaattga

SEQ ID NO: 426027 - DNA, 19 bp, Homo sapiens
  siRNA target sequence for MGC44593 (NM_173554.1,919-937).
cacgaatagaaaaattgaa

SEQ ID NO: 426028 - DNA, 19 bp, Homo sapiens
  siRNA target sequence for MGC34732 (NM_173556.2,584-602).
ccagtgaagcacttctaga

SEQ ID NO: 426029 - DNA, 19 bp, Homo sapiens
  siRNA target sequence for MGC34732 (NM_173556.2,587-605).
gtgaagcacttctagacta

SEQ ID NO: 426030 - DNA, 19 bp, Homo sapiens
  siRNA target sequence for MGC34732 (NM_173556.2,592-610).
gcacttctagactatcaat

SEQ ID NO: 426031 - DNA, 19 bp, Homo sapiens
  siRNA target sequence for MGC34732 (NM_173556.2,598-616).
ctagactatcaatgtcaaa

SEQ ID NO: 426032 - DNA, 19 bp, Homo sapiens
  siRNA target sequence for MGC34732 (NM_173556.2,625-643).
gatgccgtggagcaattca

SEQ ID NO: 426033 - DNA, 19 bp, Homo sapiens
  siRNA target sequence for MGC34732 (NM_173556.2,628-646).
gccgtggagcaattcatgt

SEQ ID NO: 426034 - DNA, 19 bp, Homo sapiens
  siRNA target sequence for MGC34732 (NM_173556.2,722-740).
ggcacatacggcatctact

SEQ ID NO: 426035 - DNA, 19 bp, Homo sapiens
  siRNA target sequence for MGC34732 (NM_173556.2,723-741).
gcacatacggcatctacta

SEQ ID NO: 426036 - DNA, 19 bp, Homo sapiens
  siRNA target sequence for MGC34732 (NM_173556.2,854-872).
gagatatgcgcatgcaaat

SEQ ID NO: 426037 - DNA, 19 bp, Homo sapiens
  siRNA target sequence for MGC34732 (NM_173556.2,856-874).
gatatgcgcatgcaaataa

SEQ ID NO: 426038 - DNA, 19 bp, Homo sapiens
  siRNA target sequence for MGC34732 (NM_173556.2,861-879).
gcgcatgcaaataagtaat

SEQ ID NO: 426039 - DNA, 19 bp, Homo sapiens
  siRNA target sequence for MGC34732 (NM_173556.2,895-913).
cttgagaaactcagtgaaa

SEQ ID NO: 426040 - DNA, 19 bp, Homo sapiens
  siRNA target sequence for MGC34732 (NM_173556.2,944-962).
ggagtgaacgacatgctaa

SEQ ID NO: 426041 - DNA, 19 bp, Homo sapiens
  siRNA target sequence for MGC34732 (NM_173556.2,952-970).
cgacatgctaaactcatta

SEQ ID NO: 426042 - DNA, 19 bp, Homo sapiens
  siRNA target sequence for MGC34732 (NM_173556.2,964-982).
ctcattacctccttacaaa

SEQ ID NO: 426043 - DNA, 19 bp, Homo sapiens
  siRNA target sequence for MGC34732 (NM_173556.2,966-984).
cattacctccttacaaaat

SEQ ID NO: 426044 - DNA, 19 bp, Homo sapiens
  siRNA target sequence for MGC34732 (NM_173556.2,1014-1032).
gaaaatgtcagaacactat

SEQ ID NO: 426045 - DNA, 19 bp, Homo sapiens
  siRNA target sequence for MGC34732 (NM_173556.2,1038-1056).
cactctggaagatactaga

SEQ ID NO: 426046 - DNA, 19 bp, Homo sapiens
  siRNA target sequence for MGC34732 (NM_173556.2,1101-1119).
ggaatgggccacacagaat

SEQ ID NO: 426047 - DNA, 19 bp, Homo sapiens
  siRNA target sequence for MGC34732 (NM_173556.2,1109-1127).
ccacacagaatgctgtaaa

SEQ ID NO: 426048 - DNA, 19 bp, Homo sapiens
  siRNA target sequence for MGC34732 (NM_173556.2,1255-1273).
gtgcttattgatcaactat

SEQ ID NO: 426049 - DNA, 19 bp, Homo sapiens
  siRNA target sequence for MGC34732 (NM_173556.2,1280-1298).
gtagacttgtggatctcaa

SEQ ID NO: 426050 - DNA, 19 bp, Homo sapiens
  siRNA target sequence for MGC34732 (NM_173556.2,1283-1301).
gacttgtggatctcaagat

SEQ ID NO: 426051 - DNA, 19 bp, Homo sapiens
  siRNA target sequence for MGC34732 (NM_173556.2,1364-1382).
ctttggaatcatgtctaat

SEQ ID NO: 426052 - DNA, 19 bp, Homo sapiens
  siRNA target sequence for MGC34732 (NM_173556.2,1391-1409).
ggcgttgctggcgactata

SEQ ID NO: 426053 - DNA, 19 bp, Homo sapiens
  siRNA target sequence for MGC34732 (NM_173556.2,1392-1410).
gcgttgctggcgactatat

SEQ ID NO: 426054 - DNA, 19 bp, Homo sapiens
  siRNA target sequence for MGC34732 (NM_173556.2,1394-1412).
gttgctggcgactatatct

SEQ ID NO: 426055 - DNA, 19 bp, Homo sapiens
  siRNA target sequence for MGC34732 (NM_173556.2,1545-1563).
gagcactatcttacatctt

SEQ ID NO: 426056 - DNA, 19 bp, Homo sapiens
  siRNA target sequence for MGC34732 (NM_173556.2,1548-1566).
cactatcttacatcttagt

SEQ ID NO: 426057 - DNA, 19 bp, Homo sapiens
  siRNA target sequence for MGC34732 (NM_173556.2,1590-1608).
ccagtatgtgaagatagat

SEQ ID NO: 426058 - DNA, 19 bp, Homo sapiens
  siRNA target sequence for MGC34732 (NM_173556.2,1591-1609).
cagtatgtgaagatagata

SEQ ID NO: 426059 - DNA, 19 bp, Homo sapiens
  siRNA target sequence for MGC34732 (NM_173556.2,1643-1661).
ctgatatgaagtacttact

SEQ ID NO: 426060 - DNA, 19 bp, Homo sapiens
  siRNA target sequence for MGC34732 (NM_173556.2,1645-1663).
gatatgaagtacttactat

SEQ ID NO: 426061 - DNA, 19 bp, Homo sapiens
  siRNA target sequence for MGC34732 (NM_173556.2,1804-1822).
ccagaaagccacatcacat

SEQ ID NO: 426062 - DNA, 19 bp, Homo sapiens
  siRNA target sequence for MGC34732 (NM_173556.2,1805-1823).
cagaaagccacatcacata

SEQ ID NO: 426063 - DNA, 19 bp, Homo sapiens
  siRNA target sequence for MGC34732 (NM_173556.2,1811-1829).
gccacatcacatataagat

SEQ ID NO: 426064 - DNA, 19 bp, Homo sapiens
  siRNA target sequence for MGC34732 (NM_173556.2,1813-1831).
cacatcacatataagatga

SEQ ID NO: 426065 - DNA, 19 bp, Homo sapiens
  siRNA target sequence for RNF152 (NM_173557.1,963-981).
gcatcgtgcttcacaacat

SEQ ID NO: 426066 - DNA, 19 bp, Homo sapiens
  siRNA target sequence for RNF152 (NM_173557.1,976-994).
caacatgtcttgcatttct

SEQ ID NO: 426067 - DNA, 19 bp, Homo sapiens
  siRNA target sequence for RNF152 (NM_173557.1,998-1016).
cgcttcactgtgatatcct

SEQ ID NO: 426068 - DNA, 19 bp, Homo sapiens
  siRNA target sequence for FLJ25791 (NM_173559.1,137-155).
cagacatacctggaaagaa

SEQ ID NO: 426069 - DNA, 19 bp, Homo sapiens
  siRNA target sequence for FLJ25791 (NM_173559.1,173-191).
gcctgcattgacaagttat

SEQ ID NO: 426070 - DNA, 19 bp, Homo sapiens
  siRNA target sequence for FLJ25791 (NM_173559.1,287-305).
gcaactgactccttggaat

SEQ ID NO: 426071 - DNA, 19 bp, Homo sapiens
  siRNA target sequence for FLJ25791 (NM_173559.1,288-306).
caactgactccttggaatt

SEQ ID NO: 426072 - DNA, 19 bp, Homo sapiens
  siRNA target sequence for FLJ25791 (NM_173559.1,321-339).
gggggcactactataaaat

SEQ ID NO: 426073 - DNA, 19 bp, Homo sapiens
  siRNA target sequence for FLJ25791 (NM_173559.1,463-481).
gagtcgattccctaagtgt

SEQ ID NO: 426074 - DNA, 19 bp, Homo sapiens
  siRNA target sequence for FLJ25791 (NM_173559.1,501-519).
gtccagtgacctataagga

SEQ ID NO: 426075 - DNA, 19 bp, Homo sapiens
  siRNA target sequence for FLJ25791 (NM_173559.1,551-569).
ggtagcattaactatgctt

SEQ ID NO: 426076 - DNA, 19 bp, Homo sapiens
  siRNA target sequence for FLJ25791 (NM_173559.1,552-570).
gtagcattaactatgcttt

SEQ ID NO: 426077 - DNA, 19 bp, Homo sapiens
  siRNA target sequence for FLJ25791 (NM_173559.1,665-683).
cacaagcttcccccattaa

SEQ ID NO: 426078 - DNA, 19 bp, Homo sapiens
  siRNA target sequence for FLJ25791 (NM_173559.1,685-703).
ggaaccgatacttcttact

SEQ ID NO: 426079 - DNA, 19 bp, Homo sapiens
  siRNA target sequence for FLJ25791 (NM_173559.1,686-704).
gaaccgatacttcttacta

SEQ ID NO: 426080 - DNA, 19 bp, Homo sapiens
  siRNA target sequence for FLJ25791 (NM_173559.1,691-709).
gatacttcttactagtctt

SEQ ID NO: 426081 - DNA, 19 bp, Homo sapiens
  siRNA target sequence for FLJ25791 (NM_173559.1,733-751).
gggtattgcaacttctcta

SEQ ID NO: 426082 - DNA, 19 bp, Homo sapiens
  siRNA target sequence for FLJ25791 (NM_173559.1,734-752).
ggtattgcaacttctctaa

SEQ ID NO: 426083 - DNA, 19 bp, Homo sapiens
  siRNA target sequence for FLJ25791 (NM_173559.1,735-753).
gtattgcaacttctctaat

SEQ ID NO: 426084 - DNA, 19 bp, Homo sapiens
  siRNA target sequence for FLJ25791 (NM_173559.1,763-781).
gaatgcagcgggatgctta

SEQ ID NO: 426085 - DNA, 19 bp, Homo sapiens
  siRNA target sequence for FLJ25791 (NM_173559.1,810-828).
ggagatctgcactgctata

SEQ ID NO: 426086 - DNA, 19 bp, Homo sapiens
  siRNA target sequence for FLJ25791 (NM_173559.1,813-831).
gatctgcactgctatatat

SEQ ID NO: 426087 - DNA, 19 bp, Homo sapiens
  siRNA target sequence for FLJ25791 (NM_173559.1,859-877).
caaaggttccgaatacaca

SEQ ID NO: 426088 - DNA, 19 bp, Homo sapiens
  siRNA target sequence for FLJ25791 (NM_173559.1,863-881).
ggttccgaatacacaagaa

SEQ ID NO: 426089 - DNA, 19 bp, Homo sapiens
  siRNA target sequence for FLJ25791 (NM_173559.1,864-882).
gttccgaatacacaagaaa

SEQ ID NO: 426090 - DNA, 19 bp, Homo sapiens
  siRNA target sequence for FLJ25791 (NM_173559.1,916-934).
gagttgtgaactcataaca

SEQ ID NO: 426091 - DNA, 19 bp, Homo sapiens
  siRNA target sequence for FLJ25791 (NM_173559.1,918-936).
gttgtgaactcataacata

SEQ ID NO: 426092 - DNA, 19 bp, Homo sapiens
  siRNA target sequence for FLJ25791 (NM_173559.1,921-939).
gtgaactcataacatactt

SEQ ID NO: 426093 - DNA, 19 bp, Homo sapiens
  siRNA target sequence for FLJ25791 (NM_173559.1,1026-1044).
gaaatatagacccaattaa

SEQ ID NO: 426094 - DNA, 19 bp, Homo sapiens
  siRNA target sequence for C6orf69 (NM_173562.3,411-429).
gtgacagtgacaggttatt

SEQ ID NO: 426095 - DNA, 19 bp, Homo sapiens
  siRNA target sequence for C6orf69 (NM_173562.3,445-463).
ctgcttagtggatgatact

SEQ ID NO: 426096 - DNA, 19 bp, Homo sapiens
  siRNA target sequence for C6orf69 (NM_173562.3,447-465).
gcttagtggatgatacttt

SEQ ID NO: 426097 - DNA, 19 bp, Homo sapiens
  siRNA target sequence for C6orf69 (NM_173562.3,448-466).
cttagtggatgatacttta

SEQ ID NO: 426098 - DNA, 19 bp, Homo sapiens
  siRNA target sequence for C6orf69 (NM_173562.3,509-527).
ggtcctcataatcttactt

SEQ ID NO: 426099 - DNA, 19 bp, Homo sapiens
  siRNA target sequence for C6orf69 (NM_173562.3,573-591).
ctcagccagcaaatcttca

SEQ ID NO: 426100 - DNA, 19 bp, Homo sapiens
  siRNA target sequence for C6orf69 (NM_173562.3,656-674).
cggaaccatgaacctttta

SEQ ID NO: 426101 - DNA, 19 bp, Homo sapiens
  siRNA target sequence for C6orf69 (NM_173562.3,704-722).
gtgggctttggcagtaatt

SEQ ID NO: 426102 - DNA, 19 bp, Homo sapiens
  siRNA target sequence for C6orf69 (NM_173562.3,731-749).
caagcaccagagaaagtga

SEQ ID NO: 426103 - DNA, 19 bp, Homo sapiens
  siRNA target sequence for C6orf69 (NM_173562.3,742-760).
gaaagtgacgcttcttgta

SEQ ID NO: 426104 - DNA, 19 bp, Homo sapiens
  siRNA target sequence for C6orf69 (NM_173562.3,776-794).
gttgtgaatccacagattt

SEQ ID NO: 426105 - DNA, 19 bp, Homo sapiens
  siRNA target sequence for C6orf69 (NM_173562.3,798-816).
ctgctcatccggataccat

SEQ ID NO: 426106 - DNA, 19 bp, Homo sapiens
  siRNA target sequence for C6orf69 (NM_173562.3,836-854).
ccaggaagagagtacaact

SEQ ID NO: 426107 - DNA, 19 bp, Homo sapiens
  siRNA target sequence for C6orf69 (NM_173562.3,896-914).
ggcatcagtgcaactgtat

SEQ ID NO: 426108 - DNA, 19 bp, Homo sapiens
  siRNA target sequence for C6orf69 (NM_173562.3,921-939).
cagtgctggattattacaa

SEQ ID NO: 426109 - DNA, 19 bp, Homo sapiens
  siRNA target sequence for C6orf69 (NM_173562.3,937-955).
caaaaccggtatcatcaat

SEQ ID NO: 426110 - DNA, 19 bp, Homo sapiens
  siRNA target sequence for C6orf69 (NM_173562.3,972-990).
ctatcccagatcttagaga

SEQ ID NO: 426111 - DNA, 19 bp, Homo sapiens
  siRNA target sequence for C6orf69 (NM_173562.3,1024-1042).
caacactatccgatgtcaa

SEQ ID NO: 426112 - DNA, 19 bp, Homo sapiens
  siRNA target sequence for C6orf69 (NM_173562.3,1027-1045).
cactatccgatgtcaagat

SEQ ID NO: 426113 - DNA, 19 bp, Homo sapiens
  siRNA target sequence for C6orf69 (NM_173562.3,1029-1047).
ctatccgatgtcaagatct

SEQ ID NO: 426114 - DNA, 19 bp, Homo sapiens
  siRNA target sequence for C6orf69 (NM_173562.3,1071-1089).
ctaatgacggtgctcataa

SEQ ID NO: 426115 - DNA, 19 bp, Homo sapiens
  siRNA target sequence for C6orf69 (NM_173562.3,1080-1098).
gtgctcataagcagtttga

SEQ ID NO: 426116 - DNA, 19 bp, Homo sapiens
  siRNA target sequence for C6orf69 (NM_173562.3,1158-1176).
gagagtgccacattgttgt

SEQ ID NO: 426117 - DNA, 19 bp, Homo sapiens
  siRNA target sequence for C6orf69 (NM_173562.3,1221-1239).
caccaatgggggaggaata

SEQ ID NO: 426118 - DNA, 19 bp, Homo sapiens
  siRNA target sequence for C6orf69 (NM_173562.3,1223-1241).
ccaatgggggaggaatatt

SEQ ID NO: 426119 - DNA, 19 bp, Homo sapiens
  siRNA target sequence for C6orf69 (NM_173562.3,1257-1275).
gctccaagctctacagatt

SEQ ID NO: 426120 - DNA, 19 bp, Homo sapiens
  siRNA target sequence for C6orf69 (NM_173562.3,1296-1314).
gggatgttgcaaaaacagt

SEQ ID NO: 426121 - DNA, 19 bp, Homo sapiens
  siRNA target sequence for C6orf69 (NM_173562.3,1301-1319).
gttgcaaaaacagtgttaa

SEQ ID NO: 426122 - DNA, 19 bp, Homo sapiens
  siRNA target sequence for C6orf69 (NM_173562.3,1339-1357).
cattcgcattggaattgaa

SEQ ID NO: 426123 - DNA, 19 bp, Homo sapiens
  siRNA target sequence for C6orf69 (NM_173562.3,1344-1362).
gcattggaattgaaggtta

SEQ ID NO: 426124 - DNA, 19 bp, Homo sapiens
  siRNA target sequence for C6orf69 (NM_173562.3,1402-1420).
ccggtctgaagtcatctat

SEQ ID NO: 426125 - DNA, 19 bp, Homo sapiens
  siRNA target sequence for C6orf69 (NM_173562.3,1403-1421).
cggtctgaagtcatctata

SEQ ID NO: 426126 - DNA, 19 bp, Homo sapiens
  siRNA target sequence for C6orf69 (NM_173562.3,1404-1422).
ggtctgaagtcatctataa

SEQ ID NO: 426127 - DNA, 19 bp, Homo sapiens
  siRNA target sequence for C6orf69 (NM_173562.3,1414-1432).
catctataattatgtacaa

SEQ ID NO: 426128 - DNA, 19 bp, Homo sapiens
  siRNA target sequence for C6orf69 (NM_173562.3,1493-1511).
cagtgtgttcgaagcaaat

SEQ ID NO: 426129 - DNA, 19 bp, Homo sapiens
  siRNA target sequence for C6orf69 (NM_173562.3,1603-1621).
gctaaatgccccactttct

SEQ ID NO: 426130 - DNA, 19 bp, Homo sapiens
  siRNA target sequence for C6orf146 (NM_173563.1,374-392).
ctacgtgtgtcaaacatct

SEQ ID NO: 426131 - DNA, 19 bp, Homo sapiens
  siRNA target sequence for C6orf146 (NM_173563.1,480-498).
caggtggcaaaattaacaa

SEQ ID NO: 426132 - DNA, 19 bp, Homo sapiens
  siRNA target sequence for C6orf146 (NM_173563.1,550-568).
ggtgcatagtcaaaaaagt

SEQ ID NO: 426133 - DNA, 19 bp, Homo sapiens
  siRNA target sequence for C6orf146 (NM_173563.1,567-585).
gtacacagaatagtaaaca

SEQ ID NO: 426134 - DNA, 19 bp, Homo sapiens
  siRNA target sequence for C6orf146 (NM_173563.1,579-597).
gtaaacaagggatctttca

SEQ ID NO: 426135 - DNA, 19 bp, Homo sapiens
  siRNA target sequence for C6orf146 (NM_173563.1,584-602).
caagggatctttcaattat

SEQ ID NO: 426136 - DNA, 19 bp, Homo sapiens
  siRNA target sequence for C6orf146 (NM_173563.1,587-605).
gggatctttcaattatgga

SEQ ID NO: 426137 - DNA, 19 bp, Homo sapiens
  siRNA target sequence for C6orf146 (NM_173563.1,603-621).
ggaattgtcctcttaatga

SEQ ID NO: 426138 - DNA, 19 bp, Homo sapiens
  siRNA target sequence for C6orf146 (NM_173563.1,604-622).
gaattgtcctcttaatgaa

SEQ ID NO: 426139 - DNA, 19 bp, Homo sapiens
  siRNA target sequence for C6orf146 (NM_173563.1,680-698).
gtaatcaatcatcctataa

SEQ ID NO: 426140 - DNA, 19 bp, Homo sapiens
  siRNA target sequence for C6orf146 (NM_173563.1,801-819).
ctgatggagacttttttaa

SEQ ID NO: 426141 - DNA, 19 bp, Homo sapiens
  siRNA target sequence for C6orf146 (NM_173563.1,820-838).
gaacagaaatgagattcat

SEQ ID NO: 426142 - DNA, 19 bp, Homo sapiens
  siRNA target sequence for C6orf146 (NM_173563.1,839-857).
gttagttcatgttcaacta

SEQ ID NO: 426143 - DNA, 19 bp, Homo sapiens
  siRNA target sequence for C6orf146 (NM_173563.1,843-861).
gttcatgttcaactataga

SEQ ID NO: 426144 - DNA, 19 bp, Homo sapiens
  siRNA target sequence for C6orf146 (NM_173563.1,852-870).
caactatagaaaacaatga

SEQ ID NO: 426145 - DNA, 19 bp, Homo sapiens
  siRNA target sequence for C6orf146 (NM_173563.1,884-902).
cctgctccaaattggaatt

SEQ ID NO: 426146 - DNA, 19 bp, Homo sapiens
  siRNA target sequence for C6orf146 (NM_173563.1,885-903).
ctgctccaaattggaattt

SEQ ID NO: 426147 - DNA, 19 bp, Homo sapiens
  siRNA target sequence for C6orf146 (NM_173563.1,887-905).
gctccaaattggaatttga

SEQ ID NO: 426148 - DNA, 19 bp, Homo sapiens
  siRNA target sequence for C6orf146 (NM_173563.1,1054-1072).
caccgaggagccaaatgaa

SEQ ID NO: 426149 - DNA, 19 bp, Homo sapiens
  siRNA target sequence for C6orf146 (NM_173563.1,1056-1074).
ccgaggagccaaatgaagt

SEQ ID NO: 426150 - DNA, 19 bp, Homo sapiens
  siRNA target sequence for C6orf146 (NM_173563.1,1057-1075).
cgaggagccaaatgaagta

SEQ ID NO: 426151 - DNA, 19 bp, Homo sapiens
  siRNA target sequence for C6orf146 (NM_173563.1,1058-1076).
gaggagccaaatgaagtat

SEQ ID NO: 426152 - DNA, 19 bp, Homo sapiens
  siRNA target sequence for C6orf146 (NM_173563.1,1104-1122).
ctttcagtgctctagactt

SEQ ID NO: 426153 - DNA, 19 bp, Homo sapiens
  siRNA target sequence for C6orf146 (NM_173563.1,1112-1130).
gctctagacttgcacaatt

SEQ ID NO: 426154 - DNA, 19 bp, Homo sapiens
  siRNA target sequence for C6orf146 (NM_173563.1,1113-1131).
ctctagacttgcacaattt

SEQ ID NO: 426155 - DNA, 19 bp, Homo sapiens
  siRNA target sequence for C6orf146 (NM_173563.1,1176-1194).
cagaaacctctgttgaaca

SEQ ID NO: 426156 - DNA, 19 bp, Homo sapiens
  siRNA target sequence for C6orf146 (NM_173563.1,1182-1200).
cctctgttgaacacttgat

SEQ ID NO: 426157 - DNA, 19 bp, Homo sapiens
  siRNA target sequence for C6orf146 (NM_173563.1,1203-1221).
ctcgtttactggaactaga

SEQ ID NO: 426158 - DNA, 19 bp, Homo sapiens
  siRNA target sequence for C6orf146 (NM_173563.1,1220-1238).
gaacgattacaacatatga

SEQ ID NO: 426159 - DNA, 19 bp, Homo sapiens
  siRNA target sequence for C6orf146 (NM_173563.1,1223-1241).
cgattacaacatatgacta

SEQ ID NO: 426160 - DNA, 19 bp, Homo sapiens
  siRNA target sequence for C6orf146 (NM_173563.1,1224-1242).
gattacaacatatgactat

SEQ ID NO: 426161 - DNA, 19 bp, Homo sapiens
  siRNA target sequence for C6orf146 (NM_173563.1,1309-1327).
ctccaaagctacaccaaaa

SEQ ID NO: 426162 - DNA, 19 bp, Homo sapiens
  siRNA target sequence for C6orf146 (NM_173563.1,1311-1329).
ccaaagctacaccaaaagt

SEQ ID NO: 426163 - DNA, 19 bp, Homo sapiens
  siRNA target sequence for C6orf146 (NM_173563.1,1328-1346).
gtgagacagccaaaacttt

SEQ ID NO: 426164 - DNA, 19 bp, Homo sapiens
  siRNA target sequence for C6orf146 (NM_173563.1,1338-1356).
caaaactttgcgactcttt

SEQ ID NO: 426165 - DNA, 19 bp, Homo sapiens
  siRNA target sequence for C6orf146 (NM_173563.1,1371-1389).
cttgtgtagataaaagtca

SEQ ID NO: 426166 - DNA, 19 bp, Homo sapiens
  siRNA target sequence for C6orf146 (NM_173563.1,1423-1441).
gcttgaacaaaatgcttta

SEQ ID NO: 426167 - DNA, 19 bp, Homo sapiens
  siRNA target sequence for C6orf146 (NM_173563.1,1452-1470).
ggagcaatgctggcaaata

SEQ ID NO: 426168 - DNA, 19 bp, Homo sapiens
  siRNA target sequence for C6orf146 (NM_173563.1,1487-1505).
ccactgtctctaaaaagtt

SEQ ID NO: 426169 - DNA, 19 bp, Homo sapiens
  siRNA target sequence for C6orf146 (NM_173563.1,1573-1591).
ccaagaactctcattcaaa

SEQ ID NO: 426170 - DNA, 19 bp, Homo sapiens
  siRNA target sequence for C6orf146 (NM_173563.1,1577-1595).
gaactctcattcaaaccta

SEQ ID NO: 426171 - DNA, 19 bp, Homo sapiens
  siRNA target sequence for C6orf146 (NM_173563.1,1592-1610).
cctactattggccatacaa

SEQ ID NO: 426172 - DNA, 19 bp, Homo sapiens
  siRNA target sequence for C6orf146 (NM_173563.1,1593-1611).
ctactattggccatacaaa

SEQ ID NO: 426173 - DNA, 19 bp, Homo sapiens
  siRNA target sequence for C6orf146 (NM_173563.1,1596-1614).
ctattggccatacaaatca

SEQ ID NO: 426174 - DNA, 19 bp, Homo sapiens
  siRNA target sequence for C6orf146 (NM_173563.1,1601-1619).
ggccatacaaatcaatcaa

SEQ ID NO: 426175 - DNA, 19 bp, Homo sapiens
  siRNA target sequence for C6orf146 (NM_173563.1,1602-1620).
gccatacaaatcaatcaat

SEQ ID NO: 426176 - DNA, 19 bp, Homo sapiens
  siRNA target sequence for C6orf146 (NM_173563.1,1608-1626).
caaatcaatcaatggttaa

SEQ ID NO: 426177 - DNA, 19 bp, Homo sapiens
  siRNA target sequence for C6orf146 (NM_173563.1,1674-1692).
cacctatacctctgacttt

SEQ ID NO: 426178 - DNA, 19 bp, Homo sapiens
  siRNA target sequence for C6orf146 (NM_173563.1,1689-1707).
cttttcccgaaaatcagaa

SEQ ID NO: 426179 - DNA, 19 bp, Homo sapiens
  siRNA target sequence for C6orf146 (NM_173563.1,1774-1792).
gttgaatagaccattctct

SEQ ID NO: 426180 - DNA, 19 bp, Homo sapiens
  siRNA target sequence for C6orf146 (NM_173563.1,1813-1831).
gtcgccttcccttattgct

SEQ ID NO: 426181 - DNA, 19 bp, Homo sapiens
  siRNA target sequence for C6orf146 (NM_173563.1,1815-1833).
cgccttcccttattgctaa

SEQ ID NO: 426182 - DNA, 19 bp, Homo sapiens
  siRNA target sequence for C6orf146 (NM_173563.1,1840-1858).
gtgctgctcacccattgaa

SEQ ID NO: 426183 - DNA, 19 bp, Homo sapiens
  siRNA target sequence for C6orf146 (NM_173563.1,1845-1863).
gctcacccattgaacaaaa

SEQ ID NO: 426184 - DNA, 19 bp, Homo sapiens
  siRNA target sequence for FLJ37538 (NM_173564.2,1107-1125).
caagaccactccttgtgaa

SEQ ID NO: 426185 - DNA, 19 bp, Homo sapiens
  siRNA target sequence for FLJ37538 (NM_173564.2,1522-1540).
gacaaggccgtgtcttaca

SEQ ID NO: 426186 - DNA, 19 bp, Homo sapiens
  siRNA target sequence for FLJ37538 (NM_173564.2,1941-1959).
gaccgatgggggtgctttt

SEQ ID NO: 426187 - DNA, 19 bp, Homo sapiens
  siRNA target sequence for LOC222967 (NM_173565.1,433-451).
cgaagtgaaacccaaaaaa

SEQ ID NO: 426188 - DNA, 19 bp, Homo sapiens
  siRNA target sequence for LOC222967 (NM_173565.1,517-535).
catagtggaaagctatgaa

SEQ ID NO: 426189 - DNA, 19 bp, Homo sapiens
  siRNA target sequence for LOC222967 (NM_173565.1,594-612).
gtacctatcgtggtatgtt

SEQ ID NO: 426190 - DNA, 19 bp, Homo sapiens
  siRNA target sequence for LOC222967 (NM_173565.1,598-616).
ctatcgtggtatgttttca

SEQ ID NO: 426191 - DNA, 19 bp, Homo sapiens
  siRNA target sequence for LOC222967 (NM_173565.1,628-646).
gcatggacaggggacttat

SEQ ID NO: 426192 - DNA, 19 bp, Homo sapiens
  siRNA target sequence for LOC222967 (NM_173565.1,651-669).
gggccgatggattaaaata

SEQ ID NO: 426193 - DNA, 19 bp, Homo sapiens
  siRNA target sequence for LOC222967 (NM_173565.1,654-672).
ccgatggattaaaatatga

SEQ ID NO: 426194 - DNA, 19 bp, Homo sapiens
  siRNA target sequence for LOC222967 (NM_173565.1,721-739).
gccggacggcagcatgtat

SEQ ID NO: 426195 - DNA, 19 bp, Homo sapiens
  siRNA target sequence for LOC222967 (NM_173565.1,723-741).
cggacggcagcatgtatga

SEQ ID NO: 426196 - DNA, 19 bp, Homo sapiens
  siRNA target sequence for LOC222967 (NM_173565.1,724-742).
ggacggcagcatgtatgaa

SEQ ID NO: 426197 - DNA, 19 bp, Homo sapiens
  siRNA target sequence for LOC222967 (NM_173565.1,770-788).
ggattcgggatgttcaagt

SEQ ID NO: 426198 - DNA, 19 bp, Homo sapiens
  siRNA target sequence for LOC222967 (NM_173565.1,839-857).
cacgggaagggctccattt

SEQ ID NO: 426199 - DNA, 19 bp, Homo sapiens
  siRNA target sequence for LOC222967 (NM_173565.1,841-859).
cgggaagggctccatttat

SEQ ID NO: 426200 - DNA, 19 bp, Homo sapiens
  siRNA target sequence for LOC222967 (NM_173565.1,842-860).
gggaagggctccatttatt

SEQ ID NO: 426201 - DNA, 19 bp, Homo sapiens
  siRNA target sequence for LOC222967 (NM_173565.1,1849-1867).
cgagaacattcgtccaaat

SEQ ID NO: 426202 - DNA, 19 bp, Homo sapiens
  siRNA target sequence for LOC222967 (NM_173565.1,2018-2036).
ctctggatgctgaaagact

SEQ ID NO: 426203 - DNA, 19 bp, Homo sapiens
  siRNA target sequence for LOC222967 (NM_173565.1,2022-2040).
ggatgctgaaagactttaa

SEQ ID NO: 426204 - DNA, 19 bp, Homo sapiens
  siRNA target sequence for MGC50372 (NM_173566.1,460-478).
cttcatgacccagtttaca

SEQ ID NO: 426205 - DNA, 19 bp, Homo sapiens
  siRNA target sequence for MGC50372 (NM_173566.1,551-569).
ggcagagtcctatccattt

SEQ ID NO: 426206 - DNA, 19 bp, Homo sapiens
  siRNA target sequence for MGC50372 (NM_173566.1,663-681).
gccacaccatgttaccata

SEQ ID NO: 426207 - DNA, 19 bp, Homo sapiens
  siRNA target sequence for MGC50372 (NM_173566.1,695-713).
ggcatggaagctacatata

SEQ ID NO: 426208 - DNA, 19 bp, Homo sapiens
  siRNA target sequence for MGC50372 (NM_173566.1,696-714).
gcatggaagctacatataa

SEQ ID NO: 426209 - DNA, 19 bp, Homo sapiens
  siRNA target sequence for MGC50372 (NM_173566.1,998-1016).
cttcctcgacccaaaaggt

SEQ ID NO: 426210 - DNA, 19 bp, Homo sapiens
  siRNA target sequence for MGC50372 (NM_173566.1,1001-1019).
cctcgacccaaaaggttaa

SEQ ID NO: 426211 - DNA, 19 bp, Homo sapiens
  siRNA target sequence for MGC50372 (NM_173566.1,1024-1042).
gaaggagtttagtttagaa

SEQ ID NO: 426212 - DNA, 19 bp, Homo sapiens
  siRNA target sequence for MGC50372 (NM_173566.1,1183-1201).
ggcctcacgccgtctgatt

SEQ ID NO: 426213 - DNA, 19 bp, Homo sapiens
  siRNA target sequence for MGC50372 (NM_173566.1,1229-1247).
catccgagaagctatccat

SEQ ID NO: 426214 - DNA, 19 bp, Homo sapiens
  siRNA target sequence for MGC50372 (NM_173566.1,1232-1250).
ccgagaagctatccatatt

SEQ ID NO: 426215 - DNA, 19 bp, Homo sapiens
  siRNA target sequence for MGC50372 (NM_173566.1,1298-1316).
gggagggtcacgtggttaa

SEQ ID NO: 426216 - DNA, 19 bp, Homo sapiens
  siRNA target sequence for MGC50372 (NM_173566.1,1300-1318).
gagggtcacgtggttaaga

SEQ ID NO: 426217 - DNA, 19 bp, Homo sapiens
  siRNA target sequence for MGC50372 (NM_173566.1,1302-1320).
gggtcacgtggttaagact

SEQ ID NO: 426218 - DNA, 19 bp, Homo sapiens
  siRNA target sequence for FLJ36335 (NM_173568.1,525-543).
ctggagtggggggtttaca

SEQ ID NO: 426219 - DNA, 19 bp, Homo sapiens
  siRNA target sequence for FLJ36335 (NM_173568.1,560-578).
ccacggcgctgggaatttt

SEQ ID NO: 426220 - DNA, 19 bp, Homo sapiens
  siRNA target sequence for FLJ36335 (NM_173568.1,563-581).
cggcgctgggaattttgtt

SEQ ID NO: 426221 - DNA, 19 bp, Homo sapiens
  siRNA target sequence for FLJ36335 (NM_173568.1,583-601).
ccgaaatgcagttgtttat

SEQ ID NO: 426222 - DNA, 19 bp, Homo sapiens
  siRNA target sequence for FLJ36335 (NM_173568.1,608-626).
ctctcccatacctcagaat

SEQ ID NO: 426223 - DNA, 19 bp, Homo sapiens
  siRNA target sequence for FLJ36335 (NM_173568.1,610-628).
ctcccatacctcagaatta

SEQ ID NO: 426224 - DNA, 19 bp, Homo sapiens
  siRNA target sequence for FLJ36335 (NM_173568.1,790-808).
catacaccaacgtgattga

SEQ ID NO: 426225 - DNA, 19 bp, Homo sapiens
  siRNA target sequence for FLJ36335 (NM_173568.1,833-851).
gttcaagctgaggatcttt

SEQ ID NO: 426226 - DNA, 19 bp, Homo sapiens
  siRNA target sequence for FLJ36335 (NM_173568.1,913-931).
ccggagccacgtgcaaaat

SEQ ID NO: 426227 - DNA, 19 bp, Homo sapiens
  siRNA target sequence for FLJ36335 (NM_173568.1,916-934).
gagccacgtgcaaaatcaa

SEQ ID NO: 426228 - DNA, 19 bp, Homo sapiens
  siRNA target sequence for FLJ36335 (NM_173568.1,918-936).
gccacgtgcaaaatcaatt

SEQ ID NO: 426229 - DNA, 19 bp, Homo sapiens
  siRNA target sequence for FLJ36335 (NM_173568.1,922-940).
cgtgcaaaatcaattgcaa

SEQ ID NO: 426230 - DNA, 19 bp, Homo sapiens
  siRNA target sequence for FLJ36335 (NM_173568.1,923-941).
gtgcaaaatcaattgcaat

SEQ ID NO: 426231 - DNA, 19 bp, Homo sapiens
  siRNA target sequence for FLJ36335 (NM_173568.1,1051-1069).
ccggttatgtggtccttat

SEQ ID NO: 426232 - DNA, 19 bp, Homo sapiens
  siRNA target sequence for FLJ36335 (NM_173568.1,1052-1070).
cggttatgtggtccttatt

SEQ ID NO: 426233 - DNA, 19 bp, Homo sapiens
  siRNA target sequence for FLJ36335 (NM_173568.1,1054-1072).
gttatgtggtccttattgt

SEQ ID NO: 426234 - DNA, 19 bp, Homo sapiens
  siRNA target sequence for FLJ36335 (NM_173568.1,1099-1117).
gaacagccacccttctgat

SEQ ID NO: 426235 - DNA, 19 bp, Homo sapiens
  siRNA target sequence for FLJ36335 (NM_173568.1,1121-1139).
gcgctaccagagaatgaat

SEQ ID NO: 426236 - DNA, 19 bp, Homo sapiens
  siRNA target sequence for FLJ36335 (NM_173568.1,1144-1162).
gatacaactttaaaatcca

SEQ ID NO: 426237 - DNA, 19 bp, Homo sapiens
  siRNA target sequence for MGC42530 (NM_173570.1,343-361).
ccgaagaacctgaattgga

SEQ ID NO: 426238 - DNA, 19 bp, Homo sapiens
  siRNA target sequence for MGC42530 (NM_173570.1,368-386).
gtgctgctgcgagtacata

SEQ ID NO: 426239 - DNA, 19 bp, Homo sapiens
  siRNA target sequence for MGC42530 (NM_173570.1,370-388).
gctgctgcgagtacataga

SEQ ID NO: 426240 - DNA, 19 bp, Homo sapiens
  siRNA target sequence for MGC42530 (NM_173570.1,371-389).
ctgctgcgagtacatagat

SEQ ID NO: 426241 - DNA, 19 bp, Homo sapiens
  siRNA target sequence for MGC42530 (NM_173570.1,450-468).
gggtgtgatcgatggatta

SEQ ID NO: 426242 - DNA, 19 bp, Homo sapiens
  siRNA target sequence for MGC42530 (NM_173570.1,452-470).
gtgtgatcgatggattaca

SEQ ID NO: 426243 - DNA, 19 bp, Homo sapiens
  siRNA target sequence for MGC42530 (NM_173570.1,456-474).
gatcgatggattacatgta

SEQ ID NO: 426244 - DNA, 19 bp, Homo sapiens
  siRNA target sequence for MGC42530 (NM_173570.1,459-477).
cgatggattacatgtaaat

SEQ ID NO: 426245 - DNA, 19 bp, Homo sapiens
  siRNA target sequence for MGC42530 (NM_173570.1,522-540).
gatcgcctccgaattcctt

SEQ ID NO: 426246 - DNA, 19 bp, Homo sapiens
  siRNA target sequence for MGC42530 (NM_173570.1,541-559).
ggcttaggggagccaaaaa

SEQ ID NO: 426247 - DNA, 19 bp, Homo sapiens
  siRNA target sequence for MGC42530 (NM_173570.1,823-841).
cctgcgggttatttctgat

SEQ ID NO: 426248 - DNA, 19 bp, Homo sapiens
  siRNA target sequence for MGC42530 (NM_173570.1,824-842).
ctgcgggttatttctgata

SEQ ID NO: 426249 - DNA, 19 bp, Homo sapiens
  siRNA target sequence for MGC42530 (NM_173570.1,826-844).
gcgggttatttctgatact

SEQ ID NO: 426250 - DNA, 19 bp, Homo sapiens
  siRNA target sequence for MGC42530 (NM_173570.1,828-846).
gggttatttctgatactct

SEQ ID NO: 426251 - DNA, 19 bp, Homo sapiens
  siRNA target sequence for MGC42530 (NM_173570.1,986-1004).
gtcgggcagtctcaacaat

SEQ ID NO: 426252 - DNA, 19 bp, Homo sapiens
  siRNA target sequence for MGC42530 (NM_173570.1,1001-1019).
caatcgcacaacaaaggat

SEQ ID NO: 426253 - DNA, 19 bp, Homo sapiens
  siRNA target sequence for MGC42530 (NM_173570.1,1150-1168).
gaatggatcatcattgtgt

SEQ ID NO: 426254 - DNA, 19 bp, Homo sapiens
  siRNA target sequence for MGC42530 (NM_173570.1,1158-1176).
catcattgtgtctggataa

SEQ ID NO: 426255 - DNA, 19 bp, Homo sapiens
  siRNA target sequence for MGC42530 (NM_173570.1,1262-1280).
gaccttggacaccatttgt

SEQ ID NO: 426256 - DNA, 19 bp, Homo sapiens
  siRNA target sequence for MGC42530 (NM_173570.1,1265-1283).
cttggacaccatttgtaga

SEQ ID NO: 426257 - DNA, 19 bp, Homo sapiens
  siRNA target sequence for MGC42530 (NM_173570.1,1293-1311).
gtcttcacagctcttttct

SEQ ID NO: 426258 - DNA, 19 bp, Homo sapiens
  siRNA target sequence for MGC42530 (NM_173570.1,1295-1313).
cttcacagctcttttctat

SEQ ID NO: 426259 - DNA, 19 bp, Homo sapiens
  siRNA target sequence for MGC42530 (NM_173570.1,1320-1338).
ggagtttatgcaaattaca

SEQ ID NO: 426260 - DNA, 19 bp, Homo sapiens
  siRNA target sequence for LOC255313 (NM_173571.1,501-519).
ccgaggaggactcagatat

SEQ ID NO: 426261 - DNA, 19 bp, Homo sapiens
  siRNA target sequence for FLJ25954 (NM_173572.1,270-288).
gcgaggactgcatccaaat

SEQ ID NO: 426262 - DNA, 19 bp, Homo sapiens
  siRNA target sequence for FLJ25954 (NM_173572.1,272-290).
gaggactgcatccaaatgt

SEQ ID NO: 426263 - DNA, 19 bp, Homo sapiens
  siRNA target sequence for FLJ25954 (NM_173572.1,360-378).
ccccgaagtcggcagaaaa

SEQ ID NO: 426264 - DNA, 19 bp, Homo sapiens
  siRNA target sequence for FLJ25954 (NM_173572.1,363-381).
cgaagtcggcagaaaacct

SEQ ID NO: 426265 - DNA, 19 bp, Homo sapiens
  siRNA target sequence for FLJ25954 (NM_173572.1,438-456).
gagaaccgaggtactactt

SEQ ID NO: 426266 - DNA, 19 bp, Homo sapiens
  siRNA target sequence for FLJ25954 (NM_173572.1,440-458).
gaaccgaggtactactttt

SEQ ID NO: 426267 - DNA, 19 bp, Homo sapiens
  siRNA target sequence for FLJ25954 (NM_173572.1,502-520).
gttcctcaagcctggatat

SEQ ID NO: 426268 - DNA, 19 bp, Homo sapiens
  siRNA target sequence for FLJ25954 (NM_173572.1,505-523).
cctcaagcctggatatcgt

SEQ ID NO: 426269 - DNA, 19 bp, Homo sapiens
  siRNA target sequence for FLJ25954 (NM_173572.1,536-554).
cccagcctttcccaaatca

SEQ ID NO: 426270 - DNA, 19 bp, Homo sapiens
  siRNA target sequence for FLJ25954 (NM_173572.1,540-558).
gcctttcccaaatcataaa

SEQ ID NO: 426271 - DNA, 19 bp, Homo sapiens
  siRNA target sequence for FLJ25954 (NM_173572.1,673-691).
cacggcagctccgttcatt

SEQ ID NO: 426272 - DNA, 19 bp, Homo sapiens
  siRNA target sequence for FLJ25954 (NM_173572.1,675-693).
cggcagctccgttcattaa

SEQ ID NO: 426273 - DNA, 19 bp, Homo sapiens
  siRNA target sequence for FLJ25954 (NM_173572.1,677-695).
gcagctccgttcattaagt

SEQ ID NO: 426274 - DNA, 19 bp, Homo sapiens
  siRNA target sequence for FLJ25954 (NM_173572.1,707-725).
cagaaataccggcagatat

SEQ ID NO: 426275 - DNA, 19 bp, Homo sapiens
  siRNA target sequence for FLJ25954 (NM_173572.1,731-749).
gttatggttcgtcatgaat

SEQ ID NO: 426276 - DNA, 19 bp, Homo sapiens
  siRNA target sequence for FLJ25954 (NM_173572.1,801-819).
cagtcactttctatattaa

SEQ ID NO: 426277 - DNA, 19 bp, Homo sapiens
  siRNA target sequence for FLJ25954 (NM_173572.1,803-821).
gtcactttctatattaata

SEQ ID NO: 426278 - DNA, 19 bp, Homo sapiens
  siRNA target sequence for FLJ25954 (NM_173572.1,829-847).
ggcaaaagcggagcaaaat

SEQ ID NO: 426279 - DNA, 19 bp, Homo sapiens
  siRNA target sequence for FLJ25954 (NM_173572.1,831-849).
caaaagcggagcaaaatga

SEQ ID NO: 426280 - DNA, 19 bp, Homo sapiens
  siRNA target sequence for FLJ25954 (NM_173572.1,891-909).
gacacttaggtcattacaa

SEQ ID NO: 426281 - DNA, 19 bp, Homo sapiens
  siRNA target sequence for FLJ25954 (NM_173572.1,914-932).
cagcgctttccctctatca

SEQ ID NO: 426282 - DNA, 19 bp, Homo sapiens
  siRNA target sequence for FLJ25954 (NM_173572.1,959-977).
gaattggcgcgtttttcct

SEQ ID NO: 426283 - DNA, 19 bp, Homo sapiens
  siRNA target sequence for FLJ25954 (NM_173572.1,1168-1186).
cacattgccgtctttccta

SEQ ID NO: 426284 - DNA, 19 bp, Homo sapiens
  siRNA target sequence for FLJ25954 (NM_173572.1,1231-1249).
cacctgcccgtttctcttt

SEQ ID NO: 426285 - DNA, 19 bp, Homo sapiens
  siRNA target sequence for FLJ25954 (NM_173572.1,1236-1254).
gcccgtttctctttacctt

SEQ ID NO: 426286 - DNA, 19 bp, Homo sapiens
  siRNA target sequence for FLJ25954 (NM_173572.1,1272-1290).
cacagcaccacagttgttt

SEQ ID NO: 426287 - DNA, 19 bp, Homo sapiens
  siRNA target sequence for MGC35138 (NM_173573.1,500-518).
cccgcacgctccaagagat

SEQ ID NO: 426288 - DNA, 19 bp, Homo sapiens
  siRNA target sequence for MGC35138 (NM_173573.1,650-668).
gcgacctctctgaaaacat

SEQ ID NO: 426289 - DNA, 19 bp, Homo sapiens
  siRNA target sequence for MGC35138 (NM_173573.1,757-775).
gagcccagctcaaagcaaa

SEQ ID NO: 426290 - DNA, 19 bp, Homo sapiens
  siRNA target sequence for MGC35138 (NM_173573.1,817-835).
gagtcctctggaaagcatt

SEQ ID NO: 426291 - DNA, 19 bp, Homo sapiens
  siRNA target sequence for MGC35138 (NM_173573.1,1136-1154).
gcccgacaggcctgaagat

SEQ ID NO: 426292 - DNA, 19 bp, Homo sapiens
  siRNA target sequence for MGC35138 (NM_173573.1,1808-1826).
gtcggctccagaaagaaca

SEQ ID NO: 426293 - DNA, 19 bp, Homo sapiens
  siRNA target sequence for FLJ90834 (NM_173578.1,430-448).
cctgtgtcactctgtatat

SEQ ID NO: 426294 - DNA, 19 bp, Homo sapiens
  siRNA target sequence for FLJ90834 (NM_173578.1,960-978).
cctacaaccgtccctataa

SEQ ID NO: 426295 - DNA, 19 bp, Homo sapiens
  siRNA target sequence for FLJ90834 (NM_173578.1,964-982).
caaccgtccctataaactt

SEQ ID NO: 426296 - DNA, 19 bp, Homo sapiens
  siRNA target sequence for FLJ40224 (NM_173579.1,839-857).
gtccggaggccgaatccat

SEQ ID NO: 426297 - DNA, 19 bp, Homo sapiens
  siRNA target sequence for FLJ39058 (NM_173580.1,202-220).
ggagtctggcttatttcca

SEQ ID NO: 426298 - DNA, 19 bp, Homo sapiens
  siRNA target sequence for FLJ33790 (NM_173583.1,466-484).
ggctacactcgctcagaat

SEQ ID NO: 426299 - DNA, 19 bp, Homo sapiens
  siRNA target sequence for FLJ33790 (NM_173583.1,467-485).
gctacactcgctcagaatt

SEQ ID NO: 426300 - DNA, 19 bp, Homo sapiens
  siRNA target sequence for FLJ37794 (NM_173588.1,324-342).
cgagcatagtggagttctt

SEQ ID NO: 426301 - DNA, 19 bp, Homo sapiens
  siRNA target sequence for FLJ37794 (NM_173588.1,350-368).
gtgacccggagctcaaaca

SEQ ID NO: 426302 - DNA, 19 bp, Homo sapiens
  siRNA target sequence for FLJ37794 (NM_173588.1,514-532).
caaggagtccgccaagata

SEQ ID NO: 426303 - DNA, 19 bp, Homo sapiens
  siRNA target sequence for FLJ37794 (NM_173588.1,518-536).
gagtccgccaagatattct

SEQ ID NO: 426304 - DNA, 19 bp, Homo sapiens
  siRNA target sequence for FLJ37794 (NM_173588.1,590-608).
gactctgacaactataagt

SEQ ID NO: 426305 - DNA, 19 bp, Homo sapiens
  siRNA target sequence for FLJ37794 (NM_173588.1,785-803).
cccaagaaagactttgaga

SEQ ID NO: 426306 - DNA, 19 bp, Homo sapiens
  siRNA target sequence for FLJ37794 (NM_173588.1,884-902).
gaggccatccggattctga

SEQ ID NO: 426307 - DNA, 19 bp, Homo sapiens
  siRNA target sequence for FLJ37794 (NM_173588.1,952-970).
ctgcataatggaactgaaa

SEQ ID NO: 426308 - DNA, 19 bp, Homo sapiens
  siRNA target sequence for FLJ37794 (NM_173588.1,965-983).
ctgaaagaccccaatgtca

SEQ ID NO: 426309 - DNA, 19 bp, Homo sapiens
  siRNA target sequence for FLJ37794 (NM_173588.1,974-992).
cccaatgtcaagatgatat

SEQ ID NO: 426310 - DNA, 19 bp, Homo sapiens
  siRNA target sequence for FLJ37794 (NM_173588.1,1063-1081).
caagtacatgctggttatt

SEQ ID NO: 426311 - DNA, 19 bp, Homo sapiens
  siRNA target sequence for FLJ37794 (NM_173588.1,1213-1231).
gcgccagacagctgtgttt

SEQ ID NO: 426312 - DNA, 19 bp, Homo sapiens
  siRNA target sequence for FLJ37794 (NM_173588.1,1261-1279).
ctttgtgtggaagttcaat

SEQ ID NO: 426313 - DNA, 19 bp, Homo sapiens
  siRNA target sequence for FLJ37794 (NM_173588.1,1296-1314).
gggatgacaagtatgaaat

SEQ ID NO: 426314 - DNA, 19 bp, Homo sapiens
  siRNA target sequence for FLJ37794 (NM_173588.1,1334-1352).
ctgacgcacacgcttaaga

SEQ ID NO: 426315 - DNA, 19 bp, Homo sapiens
  siRNA target sequence for FLJ37794 (NM_173588.1,1336-1354).
gacgcacacgcttaagatt

SEQ ID NO: 426316 - DNA, 19 bp, Homo sapiens
  siRNA target sequence for FLJ37794 (NM_173588.1,1338-1356).
cgcacacgcttaagattaa

SEQ ID NO: 426317 - DNA, 19 bp, Homo sapiens
  siRNA target sequence for FLJ37794 (NM_173588.1,1342-1360).
cacgcttaagattaaggat

SEQ ID NO: 426318 - DNA, 19 bp, Homo sapiens
  siRNA target sequence for FLJ37794 (NM_173588.1,1433-1451).
gaccgcatccccatcaagt

SEQ ID NO: 426319 - DNA, 19 bp, Homo sapiens
  siRNA target sequence for FLJ37794 (NM_173588.1,1435-1453).
ccgcatccccatcaagttt

SEQ ID NO: 426320 - DNA, 19 bp, Homo sapiens
  siRNA target sequence for FLJ37794 (NM_173588.1,1437-1455).
gcatccccatcaagtttgt

SEQ ID NO: 426321 - DNA, 19 bp, Homo sapiens
  siRNA target sequence for FLJ37794 (NM_173588.1,1562-1580).
ctgatgcatggcactaagt

SEQ ID NO: 426322 - DNA, 19 bp, Homo sapiens
  siRNA target sequence for FLJ37794 (NM_173588.1,1676-1694).
ggagaccctactgaatact

SEQ ID NO: 426323 - DNA, 19 bp, Homo sapiens
  siRNA target sequence for FLJ37794 (NM_173588.1,1887-1905).
cagtgcacaagctcatctt

SEQ ID NO: 426324 - DNA, 19 bp, Homo sapiens
  siRNA target sequence for FLJ37794 (NM_173588.1,1925-1943).
cacgagggcaagtacacat

SEQ ID NO: 426325 - DNA, 19 bp, Homo sapiens
  siRNA target sequence for FLJ37794 (NM_173588.1,1961-1979).
gaaagtgaagcctctgtat

SEQ ID NO: 426326 - DNA, 19 bp, Homo sapiens
  siRNA target sequence for FLJ37794 (NM_173588.1,2055-2073).
gccacacggcccacatcaa

SEQ ID NO: 426327 - DNA, 19 bp, Homo sapiens
  siRNA target sequence for FLJ37794 (NM_173588.1,2077-2095).
ccccttccggggaaaacca

SEQ ID NO: 426328 - DNA, 19 bp, Homo sapiens
  siRNA target sequence for FLJ37794 (NM_173588.1,2262-2280).
ccactctgcaccttagtgt

SEQ ID NO: 426329 - DNA, 19 bp, Homo sapiens
  siRNA target sequence for FLJ37794 (NM_173588.1,2685-2703).
ctggctacatccttgagat

SEQ ID NO: 426330 - DNA, 19 bp, Homo sapiens
  siRNA target sequence for FLJ35709 (NM_173589.1,709-727).
cccgagcactacatcttct

SEQ ID NO: 426331 - DNA, 19 bp, Homo sapiens
  siRNA target sequence for FLJ35709 (NM_173589.1,850-868).
ctcttacgcaagtccttta

SEQ ID NO: 426332 - DNA, 19 bp, Homo sapiens
  siRNA target sequence for FLJ35709 (NM_173589.1,959-977).
gagctgggctactccatat

SEQ ID NO: 426333 - DNA, 19 bp, Homo sapiens
  siRNA target sequence for FLJ35709 (NM_173589.1,961-979).
gctgggctactccatatta

SEQ ID NO: 426334 - DNA, 19 bp, Homo sapiens
  siRNA target sequence for FLJ35709 (NM_173589.1,964-982).
gggctactccatattagca

SEQ ID NO: 426335 - DNA, 19 bp, Homo sapiens
  siRNA target sequence for FLJ35709 (NM_173589.1,1066-1084).
ctagccgaggagaagcata

SEQ ID NO: 426336 - DNA, 19 bp, Homo sapiens
  siRNA target sequence for FLJ35709 (NM_173589.1,1173-1191).
cctacaggagcgagtacaa

SEQ ID NO: 426337 - DNA, 19 bp, Homo sapiens
  siRNA target sequence for FLJ35709 (NM_173589.1,1174-1192).
ctacaggagcgagtacaaa

SEQ ID NO: 426338 - DNA, 19 bp, Homo sapiens
  siRNA target sequence for FLJ35709 (NM_173589.1,1177-1195).
caggagcgagtacaaaact

SEQ ID NO: 426339 - DNA, 19 bp, Homo sapiens
  siRNA target sequence for FLJ35709 (NM_173589.1,1179-1197).
ggagcgagtacaaaactgt

SEQ ID NO: 426340 - DNA, 19 bp, Homo sapiens
  siRNA target sequence for FLJ35709 (NM_173589.1,1214-1232).
gccaaggctccatatacct

SEQ ID NO: 426341 - DNA, 19 bp, Homo sapiens
  siRNA target sequence for FLJ35709 (NM_173589.1,1215-1233).
ccaaggctccatatacctt

SEQ ID NO: 426342 - DNA, 19 bp, Homo sapiens
  siRNA target sequence for FLJ35709 (NM_173589.1,1312-1330).
cgcctggttgactacatga

SEQ ID NO: 426343 - DNA, 19 bp, Homo sapiens
  siRNA target sequence for FLJ35709 (NM_173589.1,1313-1331).
gcctggttgactacatgat

SEQ ID NO: 426344 - DNA, 19 bp, Homo sapiens
  siRNA target sequence for FLJ35709 (NM_173589.1,1317-1335).
ggttgactacatgatttgt

SEQ ID NO: 426345 - DNA, 19 bp, Homo sapiens
  siRNA target sequence for FLJ35709 (NM_173589.1,1334-1352).
gtcagagcctcatttctgt

SEQ ID NO: 426346 - DNA, 19 bp, Homo sapiens
  siRNA target sequence for FLJ35709 (NM_173589.1,1351-1369).
gtcttggaagagcagataa

SEQ ID NO: 426347 - DNA, 19 bp, Homo sapiens
  siRNA target sequence for FLJ35709 (NM_173589.1,1428-1446).
gctggtctttgatgatcat

SEQ ID NO: 426348 - DNA, 19 bp, Homo sapiens
  siRNA target sequence for FLJ35709 (NM_173589.1,1459-1477).
catgtgccctgtgttgaaa

SEQ ID NO: 426349 - DNA, 19 bp, Homo sapiens
  siRNA target sequence for FLJ36102 (NM_173590.1,645-663).
ccgtccaggcctgtttcaa

SEQ ID NO: 426350 - DNA, 19 bp, Homo sapiens
  siRNA target sequence for FLJ36102 (NM_173590.1,705-723).
gaaacttggagcatctcta

SEQ ID NO: 426351 - DNA, 19 bp, Homo sapiens
  siRNA target sequence for FLJ36102 (NM_173590.1,713-731).
gagcatctctattaactta

SEQ ID NO: 426352 - DNA, 19 bp, Homo sapiens
  siRNA target sequence for FLJ36102 (NM_173590.1,861-879).
gcgcaaggtgaagagtttt

SEQ ID NO: 426353 - DNA, 19 bp, Homo sapiens
  siRNA target sequence for FLJ90579 (NM_173591.1,320-338).
ggaatttctcacagtagat

SEQ ID NO: 426354 - DNA, 19 bp, Homo sapiens
  siRNA target sequence for FLJ90579 (NM_173591.1,327-345).
ctcacagtagatcttaata

SEQ ID NO: 426355 - DNA, 19 bp, Homo sapiens
  siRNA target sequence for FLJ90579 (NM_173591.1,378-396).
gtatgtgaaccaaaccttt

SEQ ID NO: 426356 - DNA, 19 bp, Homo sapiens
  siRNA target sequence for FLJ90579 (NM_173591.1,397-415).
gtcctatgccattactcaa

SEQ ID NO: 426357 - DNA, 19 bp, Homo sapiens
  siRNA target sequence for FLJ90579 (NM_173591.1,421-439).
cagaagatatgaatcttgt

SEQ ID NO: 426358 - DNA, 19 bp, Homo sapiens
  siRNA target sequence for FLJ90579 (NM_173591.1,468-486).
ccaacatggcactgtgaat

SEQ ID NO: 426359 - DNA, 19 bp, Homo sapiens
  siRNA target sequence for FLJ90579 (NM_173591.1,524-542).
gggagaatttactgcaata

SEQ ID NO: 426360 - DNA, 19 bp, Homo sapiens
  siRNA target sequence for FLJ90579 (NM_173591.1,535-553).
ctgcaatagaccataactt

SEQ ID NO: 426361 - DNA, 19 bp, Homo sapiens
  siRNA target sequence for FLJ90579 (NM_173591.1,546-564).
cataacttccagagtgatt

SEQ ID NO: 426362 - DNA, 19 bp, Homo sapiens
  siRNA target sequence for FLJ90579 (NM_173591.1,561-579).
gattgtggatgcatacagt

SEQ ID NO: 426363 - DNA, 19 bp, Homo sapiens
  siRNA target sequence for FLJ90579 (NM_173591.1,612-630).
caagaagtatcagtattga

SEQ ID NO: 426364 - DNA, 19 bp, Homo sapiens
  siRNA target sequence for FLJ90579 (NM_173591.1,634-652).
ctggacaatccatgataaa

SEQ ID NO: 426365 - DNA, 19 bp, Homo sapiens
  siRNA target sequence for FLJ90579 (NM_173591.1,736-754).
cactggtgaattgttcaaa

SEQ ID NO: 426366 - DNA, 19 bp, Homo sapiens
  siRNA target sequence for FLJ90579 (NM_173591.1,760-778).
gtgatgttcaccaggtata

SEQ ID NO: 426367 - DNA, 19 bp, Homo sapiens
  siRNA target sequence for FLJ90579 (NM_173591.1,762-780).
gatgttcaccaggtatata

SEQ ID NO: 426368 - DNA, 19 bp, Homo sapiens
  siRNA target sequence for FLJ90579 (NM_173591.1,893-911).
caattgcaccacatatgaa

SEQ ID NO: 426369 - DNA, 19 bp, Homo sapiens
  siRNA target sequence for FLJ90579 (NM_173591.1,901-919).
ccacatatgaatgtgttaa

SEQ ID NO: 426370 - DNA, 19 bp, Homo sapiens
  siRNA target sequence for FLJ90579 (NM_173591.1,931-949).
gagcaataattctgaacta

SEQ ID NO: 426371 - DNA, 19 bp, Homo sapiens
  siRNA target sequence for FLJ90579 (NM_173591.1,956-974).
ggtctgtcccccttttaat

SEQ ID NO: 426372 - DNA, 19 bp, Homo sapiens
  siRNA target sequence for FLJ90579 (NM_173591.1,999-1017).
gggattgtgaagctttata

SEQ ID NO: 426373 - DNA, 19 bp, Homo sapiens
  siRNA target sequence for FLJ90579 (NM_173591.1,1000-1018).
ggattgtgaagctttataa

SEQ ID NO: 426374 - DNA, 19 bp, Homo sapiens
  siRNA target sequence for FLJ90579 (NM_173591.1,1020-1038).
gaaggctgttgcaagatct

SEQ ID NO: 426375 - DNA, 19 bp, Homo sapiens
  siRNA target sequence for FLJ90579 (NM_173591.1,1106-1124).
gagccaaagccctataaat

SEQ ID NO: 426376 - DNA, 19 bp, Homo sapiens
  siRNA target sequence for FLJ90579 (NM_173591.1,1109-1127).
ccaaagccctataaatgtt

SEQ ID NO: 426377 - DNA, 19 bp, Homo sapiens
  siRNA target sequence for FLJ90579 (NM_173591.1,1147-1165).
gcccatcagctaccatata

SEQ ID NO: 426378 - DNA, 19 bp, Homo sapiens
  siRNA target sequence for FLJ90579 (NM_173591.1,1149-1167).
ccatcagctaccatatata

SEQ ID NO: 426379 - DNA, 19 bp, Homo sapiens
  siRNA target sequence for FLJ90579 (NM_173591.1,1150-1168).
catcagctaccatatataa

SEQ ID NO: 426380 - DNA, 19 bp, Homo sapiens
  siRNA target sequence for FLJ90579 (NM_173591.1,1155-1173).
gctaccatatataacatca

SEQ ID NO: 426381 - DNA, 19 bp, Homo sapiens
  siRNA target sequence for FLJ90579 (NM_173591.1,1188-1206).
ctaagattctgcaagtgtt

SEQ ID NO: 426382 - DNA, 19 bp, Homo sapiens
  siRNA target sequence for FLJ90579 (NM_173591.1,1198-1216).
gcaagtgttgtcgtgaaaa

SEQ ID NO: 426383 - DNA, 19 bp, Homo sapiens
  siRNA target sequence for FLJ90579 (NM_173591.1,1199-1217).
caagtgttgtcgtgaaaat

SEQ ID NO: 426384 - DNA, 19 bp, Homo sapiens
  siRNA target sequence for FLJ90579 (NM_173591.1,1202-1220).
gtgttgtcgtgaaaatgga

SEQ ID NO: 426385 - DNA, 19 bp, Homo sapiens
  siRNA target sequence for FLJ90579 (NM_173591.1,1260-1278).
ggcactgaaattatgtaca

SEQ ID NO: 426386 - DNA, 19 bp, Homo sapiens
  siRNA target sequence for B4GalNac-T3 (NM_173593.2,102-120).
ggggctctggactctgtat

SEQ ID NO: 426387 - DNA, 19 bp, Homo sapiens
  siRNA target sequence for B4GalNac-T3 (NM_173593.2,104-122).
ggctctggactctgtatct

SEQ ID NO: 426388 - DNA, 19 bp, Homo sapiens
  siRNA target sequence for B4GalNac-T3 (NM_173593.2,480-498).
ccccaaatggaccaactat

SEQ ID NO: 426389 - DNA, 19 bp, Homo sapiens
  siRNA target sequence for B4GalNac-T3 (NM_173593.2,495-513).
ctatggcctccgcatcttt

SEQ ID NO: 426390 - DNA, 19 bp, Homo sapiens
  siRNA target sequence for B4GalNac-T3 (NM_173593.2,675-693).
gaaatttcggagccaaatt

SEQ ID NO: 426391 - DNA, 19 bp, Homo sapiens
  siRNA target sequence for B4GalNac-T3 (NM_173593.2,1095-1113).
gggactccggtttgttcat

SEQ ID NO: 426392 - DNA, 19 bp, Homo sapiens
  siRNA target sequence for B4GalNac-T3 (NM_173593.2,1097-1115).
gactccggtttgttcatct

SEQ ID NO: 426393 - DNA, 19 bp, Homo sapiens
  siRNA target sequence for B4GalNac-T3 (NM_173593.2,1123-1141).
gtttaccccaatgactata

SEQ ID NO: 426394 - DNA, 19 bp, Homo sapiens
  siRNA target sequence for B4GalNac-T3 (NM_173593.2,1163-1181).
cccacaataaatgtttcta

SEQ ID NO: 426395 - DNA, 19 bp, Homo sapiens
  siRNA target sequence for B4GalNac-T3 (NM_173593.2,1866-1884).
cgagtacgtacctgtgttt

SEQ ID NO: 426396 - DNA, 19 bp, Homo sapiens
  siRNA target sequence for B4GalNac-T3 (NM_173593.2,1879-1897).
gtgtttgacccggtagtaa

SEQ ID NO: 426397 - DNA, 19 bp, Homo sapiens
  siRNA target sequence for B4GalNac-T3 (NM_173593.2,1959-1977).
cgatctgagctgtaacaca

SEQ ID NO: 426398 - DNA, 19 bp, Homo sapiens
  siRNA target sequence for B4GalNac-T3 (NM_173593.2,1960-1978).
gatctgagctgtaacacat

SEQ ID NO: 426399 - DNA, 19 bp, Homo sapiens
  siRNA target sequence for B4GalNac-T3 (NM_173593.2,2017-2035).
gtcacgcgagtcttcttga

SEQ ID NO: 426400 - DNA, 19 bp, Homo sapiens
  siRNA target sequence for B4GalNac-T3 (NM_173593.2,2068-2086).
cagctacagcgcattgtga

SEQ ID NO: 426401 - DNA, 19 bp, Homo sapiens
  siRNA target sequence for B4GalNac-T3 (NM_173593.2,2170-2188).
cggctctcggagtatgtgt

SEQ ID NO: 426402 - DNA, 19 bp, Homo sapiens
  siRNA target sequence for B4GalNac-T3 (NM_173593.2,2393-2411).
cacgctgggtacagcaatt

SEQ ID NO: 426403 - DNA, 19 bp, Homo sapiens
  siRNA target sequence for B4GalNac-T3 (NM_173593.2,2399-2417).
gggtacagcaattcatcaa

SEQ ID NO: 426404 - DNA, 19 bp, Homo sapiens
  siRNA target sequence for B4GalNac-T3 (NM_173593.2,2444-2462).
ccggtgacccacacttcaa

SEQ ID NO: 426405 - DNA, 19 bp, Homo sapiens
  siRNA target sequence for B4GalNac-T3 (NM_173593.2,2447-2465).
gtgacccacacttcaacat

SEQ ID NO: 426406 - DNA, 19 bp, Homo sapiens
  siRNA target sequence for B4GalNac-T3 (NM_173593.2,2463-2481).
catcgtcatcactgactat

SEQ ID NO: 426407 - DNA, 19 bp, Homo sapiens
  siRNA target sequence for B4GalNac-T3 (NM_173593.2,2467-2485).
gtcatcactgactatagca

SEQ ID NO: 426408 - DNA, 19 bp, Homo sapiens
  siRNA target sequence for B4GalNac-T3 (NM_173593.2,2550-2568).
gctaagtggaaactttgaa

SEQ ID NO: 426409 - DNA, 19 bp, Homo sapiens
  siRNA target sequence for B4GalNac-T3 (NM_173593.2,2608-2626).
gacccgcacagcatcatct

SEQ ID NO: 426410 - DNA, 19 bp, Homo sapiens
  siRNA target sequence for FLJ37587 (NM_173597.1,242-260).
cagctgagcggaaagcaat

SEQ ID NO: 426411 - DNA, 19 bp, Homo sapiens
  siRNA target sequence for FLJ37587 (NM_173597.1,245-263).
ctgagcggaaagcaatgat

SEQ ID NO: 426412 - DNA, 19 bp, Homo sapiens
  siRNA target sequence for FLJ37587 (NM_173597.1,264-282).
gcagcaaaaggtagttaca

SEQ ID NO: 426413 - DNA, 19 bp, Homo sapiens
  siRNA target sequence for FLJ37587 (NM_173597.1,267-285).
gcaaaaggtagttacaagt

SEQ ID NO: 426414 - DNA, 19 bp, Homo sapiens
  siRNA target sequence for FLJ37587 (NM_173597.1,274-292).
gtagttacaagtgaaatct

SEQ ID NO: 426415 - DNA, 19 bp, Homo sapiens
  siRNA target sequence for FLJ37587 (NM_173597.1,311-329).
gctacacagaaagtttaaa

SEQ ID NO: 426416 - DNA, 19 bp, Homo sapiens
  siRNA target sequence for FLJ37587 (NM_173597.1,342-360).
caacagtcggatagatgaa

SEQ ID NO: 426417 - DNA, 19 bp, Homo sapiens
  siRNA target sequence for FLJ37587 (NM_173597.1,374-392).
cgaaagtgcttcagctaat

SEQ ID NO: 426418 - DNA, 19 bp, Homo sapiens
  siRNA target sequence for FLJ37587 (NM_173597.1,375-393).
gaaagtgcttcagctaatt

SEQ ID NO: 426419 - DNA, 19 bp, Homo sapiens
  siRNA target sequence for FLJ37587 (NM_173597.1,415-433).
ggtgtcccggtcattaaat

SEQ ID NO: 426420 - DNA, 19 bp, Homo sapiens
  siRNA target sequence for FLJ37587 (NM_173597.1,416-434).
gtgtcccggtcattaaata

SEQ ID NO: 426421 - DNA, 19 bp, Homo sapiens
  siRNA target sequence for FLJ37587 (NM_173597.1,421-439).
ccggtcattaaatatgaca

SEQ ID NO: 426422 - DNA, 19 bp, Homo sapiens
  siRNA target sequence for FLJ37587 (NM_173597.1,455-473).
cacggcagcggcaactcat

SEQ ID NO: 426423 - DNA, 19 bp, Homo sapiens
  siRNA target sequence for FLJ37587 (NM_173597.1,458-476).
ggcagcggcaactcattct

SEQ ID NO: 426424 - DNA, 19 bp, Homo sapiens
  siRNA target sequence for FLJ37587 (NM_173597.1,460-478).
cagcggcaactcattctta

SEQ ID NO: 426425 - DNA, 19 bp, Homo sapiens
  siRNA target sequence for FLJ37587 (NM_173597.1,462-480).
gcggcaactcattcttact

SEQ ID NO: 426426 - DNA, 19 bp, Homo sapiens
  siRNA target sequence for FLJ37587 (NM_173597.1,548-566).
gtaagaagtgggcaatctt

SEQ ID NO: 426427 - DNA, 19 bp, Homo sapiens
  siRNA target sequence for FLJ37587 (NM_173597.1,555-573).
gtgggcaatctttaaaaca

SEQ ID NO: 426428 - DNA, 19 bp, Homo sapiens
  siRNA target sequence for FLJ37587 (NM_173597.1,557-575).
gggcaatctttaaaacaat

SEQ ID NO: 426429 - DNA, 19 bp, Homo sapiens
  siRNA target sequence for FLJ40126 (NM_173599.1,232-250).
gcccctaagaaagcataat

SEQ ID NO: 426430 - DNA, 19 bp, Homo sapiens
  siRNA target sequence for FLJ40126 (NM_173599.1,270-288).
ctcactgtgtaccttctaa

SEQ ID NO: 426431 - DNA, 19 bp, Homo sapiens
  siRNA target sequence for FLJ40126 (NM_173599.1,366-384).
cacaaggcatggactcata

SEQ ID NO: 426432 - DNA, 19 bp, Homo sapiens
  siRNA target sequence for FLJ40126 (NM_173599.1,368-386).
caaggcatggactcatata

SEQ ID NO: 426433 - DNA, 19 bp, Homo sapiens
  siRNA target sequence for FLJ40126 (NM_173599.1,395-413).
caccctcagttcagcaaaa

SEQ ID NO: 426434 - DNA, 19 bp, Homo sapiens
  siRNA target sequence for FLJ40126 (NM_173599.1,397-415).
ccctcagttcagcaaaata

SEQ ID NO: 426435 - DNA, 19 bp, Homo sapiens
  siRNA target sequence for FLJ40126 (NM_173599.1,424-442).
cagtttcactccatcatct

SEQ ID NO: 426436 - DNA, 19 bp, Homo sapiens
  siRNA target sequence for FLJ40126 (NM_173599.1,426-444).
gtttcactccatcatcttt

SEQ ID NO: 426437 - DNA, 19 bp, Homo sapiens
  siRNA target sequence for FLJ40126 (NM_173599.1,447-465).
cagtggagttaccttctaa

SEQ ID NO: 426438 - DNA, 19 bp, Homo sapiens
  siRNA target sequence for FLJ40126 (NM_173599.1,513-531).
ctcagaaacttgcatatga

SEQ ID NO: 426439 - DNA, 19 bp, Homo sapiens
  siRNA target sequence for FLJ40126 (NM_173599.1,690-708).
ctaaaagccctgctgtaat

SEQ ID NO: 426440 - DNA, 19 bp, Homo sapiens
  siRNA target sequence for FLJ40126 (NM_173599.1,835-853).
ccagtctactcctaacctt

SEQ ID NO: 426441 - DNA, 19 bp, Homo sapiens
  siRNA target sequence for FLJ40126 (NM_173599.1,850-868).
ccttctatcagagaattgt

SEQ ID NO: 426442 - DNA, 19 bp, Homo sapiens
  siRNA target sequence for FLJ40126 (NM_173599.1,907-925).
catagatgagcaaaggata

SEQ ID NO: 426443 - DNA, 19 bp, Homo sapiens
  siRNA target sequence for FLJ40126 (NM_173599.1,933-951).
catttaacaagtgtgatta

SEQ ID NO: 426444 - DNA, 19 bp, Homo sapiens
  siRNA target sequence for FLJ40126 (NM_173599.1,974-992).
gtagtcactagttctgata

SEQ ID NO: 426445 - DNA, 19 bp, Homo sapiens
  siRNA target sequence for FLJ40126 (NM_173599.1,1037-1055).
ccagagttgacttttagta

SEQ ID NO: 426446 - DNA, 19 bp, Homo sapiens
  siRNA target sequence for FLJ40126 (NM_173599.1,1053-1071).
gtaattcgactttgaataa

SEQ ID NO: 426447 - DNA, 19 bp, Homo sapiens
  siRNA target sequence for FLJ40126 (NM_173599.1,1066-1084).
gaataaaacaagttatcca

SEQ ID NO: 426448 - DNA, 19 bp, Homo sapiens
  siRNA target sequence for FLJ40126 (NM_173599.1,1152-1170).
catcttttgagaacgatta

SEQ ID NO: 426449 - DNA, 19 bp, Homo sapiens
  siRNA target sequence for FLJ40126 (NM_173599.1,1155-1173).
cttttgagaacgattacta

SEQ ID NO: 426450 - DNA, 19 bp, Homo sapiens
  siRNA target sequence for FLJ40126 (NM_173599.1,1267-1285).
ctggtgtacaaaatgttct

SEQ ID NO: 426451 - DNA, 19 bp, Homo sapiens
  siRNA target sequence for FLJ40126 (NM_173599.1,1312-1330).
ccattatgtgttgatgtta

SEQ ID NO: 426452 - DNA, 19 bp, Homo sapiens
  siRNA target sequence for FLJ40126 (NM_173599.1,1313-1331).
cattatgtgttgatgttaa

SEQ ID NO: 426453 - DNA, 19 bp, Homo sapiens
  siRNA target sequence for FLJ40126 (NM_173599.1,1319-1337).
gtgttgatgttaaatttat

SEQ ID NO: 426454 - DNA, 19 bp, Homo sapiens
  siRNA target sequence for FLJ34278 (NM_173602.1,315-333).
cccgcagacacaagaaact

SEQ ID NO: 426455 - DNA, 19 bp, Homo sapiens
  siRNA target sequence for FLJ34278 (NM_173602.1,317-335).
cgcagacacaagaaactga

SEQ ID NO: 426456 - DNA, 19 bp, Homo sapiens
  siRNA target sequence for FLJ34278 (NM_173602.1,376-394).
ccatctgcagctcaaactt

SEQ ID NO: 426457 - DNA, 19 bp, Homo sapiens
  siRNA target sequence for FLJ34278 (NM_173602.1,431-449).
gagccagggatgaacgata

SEQ ID NO: 426458 - DNA, 19 bp, Homo sapiens
  siRNA target sequence for FLJ34278 (NM_173602.1,435-453).
cagggatgaacgatatcga

SEQ ID NO: 426459 - DNA, 19 bp, Homo sapiens
  siRNA target sequence for FLJ34278 (NM_173602.1,442-460).
gaacgatatcgatcagata

SEQ ID NO: 426460 - DNA, 19 bp, Homo sapiens
  siRNA target sequence for FLJ34278 (NM_173602.1,446-464).
gatatcgatcagatatcca

SEQ ID NO: 426461 - DNA, 19 bp, Homo sapiens
  siRNA target sequence for FLJ34278 (NM_173602.1,485-503).
cactggcaaagcataaaga

SEQ ID NO: 426462 - DNA, 19 bp, Homo sapiens
  siRNA target sequence for FLJ34278 (NM_173602.1,531-549).
caaaaggcgatccacattt

SEQ ID NO: 426463 - DNA, 19 bp, Homo sapiens
  siRNA target sequence for FLJ34278 (NM_173602.1,674-692).
cctggatcaaccgttcaat

SEQ ID NO: 426464 - DNA, 19 bp, Homo sapiens
  siRNA target sequence for FLJ34278 (NM_173602.1,675-693).
ctggatcaaccgttcaatt

SEQ ID NO: 426465 - DNA, 19 bp, Homo sapiens
  siRNA target sequence for FLJ34278 (NM_173602.1,677-695).
ggatcaaccgttcaattca

SEQ ID NO: 426466 - DNA, 19 bp, Homo sapiens
  siRNA target sequence for FLJ34278 (NM_173602.1,694-712).
cagggatcgtccacttctt

SEQ ID NO: 426467 - DNA, 19 bp, Homo sapiens
  siRNA target sequence for FLJ34278 (NM_173602.1,760-778).
gggtctctagctgatgtat

SEQ ID NO: 426468 - DNA, 19 bp, Homo sapiens
  siRNA target sequence for FLJ34278 (NM_173602.1,761-779).
ggtctctagctgatgtatt

SEQ ID NO: 426469 - DNA, 19 bp, Homo sapiens
  siRNA target sequence for FLJ34278 (NM_173602.1,811-829).
cctcctgatgtcactacaa

SEQ ID NO: 426470 - DNA, 19 bp, Homo sapiens
  siRNA target sequence for FLJ34278 (NM_173602.1,814-832).
cctgatgtcactacaacta

SEQ ID NO: 426471 - DNA, 19 bp, Homo sapiens
  siRNA target sequence for FLJ34278 (NM_173602.1,958-976).
cctgtcagtagcagagtat

SEQ ID NO: 426472 - DNA, 19 bp, Homo sapiens
  siRNA target sequence for FLJ34278 (NM_173602.1,961-979).
gtcagtagcagagtatcta

SEQ ID NO: 426473 - DNA, 19 bp, Homo sapiens
  siRNA target sequence for FLJ34278 (NM_173602.1,968-986).
gcagagtatctacaaaaat

SEQ ID NO: 426474 - DNA, 19 bp, Homo sapiens
  siRNA target sequence for FLJ34278 (NM_173602.1,1022-1040).
ggcctcccttaaaggaatt

SEQ ID NO: 426475 - DNA, 19 bp, Homo sapiens
  siRNA target sequence for FLJ34278 (NM_173602.1,1138-1156).
cctttaggagtcatctgta

SEQ ID NO: 426476 - DNA, 19 bp, Homo sapiens
  siRNA target sequence for FLJ34278 (NM_173602.1,1193-1211).
ggggtaccactcaagcaaa

SEQ ID NO: 426477 - DNA, 19 bp, Homo sapiens
  siRNA target sequence for FLJ34278 (NM_173602.1,1194-1212).
gggtaccactcaagcaaaa

SEQ ID NO: 426478 - DNA, 19 bp, Homo sapiens
  siRNA target sequence for FLJ25694 (NM_173604.1,821-839).
cggaccccgtccgatagta

SEQ ID NO: 426479 - DNA, 19 bp, Homo sapiens
  siRNA target sequence for FLJ25694 (NM_173604.1,822-840).
ggaccccgtccgatagtaa

SEQ ID NO: 426480 - DNA, 19 bp, Homo sapiens
  siRNA target sequence for FLJ25694 (NM_173604.1,823-841).
gaccccgtccgatagtaaa

SEQ ID NO: 426481 - DNA, 19 bp, Homo sapiens
  siRNA target sequence for FLJ25694 (NM_173604.1,908-926).
ctccagtcaatcccaatta

SEQ ID NO: 426482 - DNA, 19 bp, Homo sapiens
  siRNA target sequence for C14orf24 (NM_173607.2,234-252).
ggagagtcatccactttgt

SEQ ID NO: 426483 - DNA, 19 bp, Homo sapiens
  siRNA target sequence for C14orf24 (NM_173607.2,332-350).
gttgatccgacaaaactta

SEQ ID NO: 426484 - DNA, 19 bp, Homo sapiens
  siRNA target sequence for C14orf24 (NM_173607.2,354-372).
ggggtccctacttatggtt

SEQ ID NO: 426485 - DNA, 19 bp, Homo sapiens
  siRNA target sequence for C14orf24 (NM_173607.2,359-377).
ccctacttatggttttaca

SEQ ID NO: 426486 - DNA, 19 bp, Homo sapiens
  siRNA target sequence for C14orf24 (NM_173607.2,360-378).
cctacttatggttttacat

SEQ ID NO: 426487 - DNA, 19 bp, Homo sapiens
  siRNA target sequence for C14orf24 (NM_173607.2,447-465).
gtatcagcaccccaaagta

SEQ ID NO: 426488 - DNA, 19 bp, Homo sapiens
  siRNA target sequence for C14orf24 (NM_173607.2,463-481).
gtaccaatatgccattgat

SEQ ID NO: 426489 - DNA, 19 bp, Homo sapiens
  siRNA target sequence for C14orf24 (NM_173607.2,574-592).
gcagactgattccattgtt

SEQ ID NO: 426490 - DNA, 19 bp, Homo sapiens
  siRNA target sequence for FLJ39426 (NM_173609.1,695-713).
gtgttagttgcaaagatat

SEQ ID NO: 426491 - DNA, 19 bp, Homo sapiens
  siRNA target sequence for FLJ39426 (NM_173609.1,726-744).
ctggctacaaaaaagaata

SEQ ID NO: 426492 - DNA, 19 bp, Homo sapiens
  siRNA target sequence for FLJ39426 (NM_173609.1,891-909).
gataaaaccaaggttaagt

SEQ ID NO: 426493 - DNA, 19 bp, Homo sapiens
  siRNA target sequence for FLJ33768 (NM_173610.1,219-237).
ggcaactcttccgtctatt

SEQ ID NO: 426494 - DNA, 19 bp, Homo sapiens
  siRNA target sequence for FLJ33768 (NM_173610.1,220-238).
gcaactcttccgtctattt

SEQ ID NO: 426495 - DNA, 19 bp, Homo sapiens
  siRNA target sequence for FLJ33768 (NM_173610.1,221-239).
caactcttccgtctatttt

SEQ ID NO: 426496 - DNA, 19 bp, Homo sapiens
  siRNA target sequence for FLJ33768 (NM_173610.1,248-266).
ggtgtctcctacttttact

SEQ ID NO: 426497 - DNA, 19 bp, Homo sapiens
  siRNA target sequence for FLJ33768 (NM_173610.1,249-267).
gtgtctcctacttttacta

SEQ ID NO: 426498 - DNA, 19 bp, Homo sapiens
  siRNA target sequence for FLJ33768 (NM_173610.1,290-308).
cgctcaagtcctttttgct

SEQ ID NO: 426499 - DNA, 19 bp, Homo sapiens
  siRNA target sequence for FLJ33768 (NM_173610.1,330-348).
gaagggagggttactaact

SEQ ID NO: 426500 - DNA, 19 bp, Homo sapiens
  siRNA target sequence for FLJ33768 (NM_173610.1,334-352).
ggagggttactaactttat

SEQ ID NO: 426501 - DNA, 19 bp, Homo sapiens
  siRNA target sequence for FLJ38426 (NM_173611.1,81-99).
gtataaaggaccattgtta

SEQ ID NO: 426502 - DNA, 19 bp, Homo sapiens
  siRNA target sequence for FLJ38426 (NM_173611.1,124-142).
gcagagggtggattatctt

SEQ ID NO: 426503 - DNA, 19 bp, Homo sapiens
  siRNA target sequence for FLJ38426 (NM_173611.1,176-194).
gctctcaaataaaatcatt

SEQ ID NO: 426504 - DNA, 19 bp, Homo sapiens
  siRNA target sequence for FLJ38426 (NM_173611.1,197-215).
gcaacttggaagaaagtat

SEQ ID NO: 426505 - DNA, 19 bp, Homo sapiens
  siRNA target sequence for FLJ38426 (NM_173611.1,216-234).
cacgtctgctggaagagat

SEQ ID NO: 426506 - DNA, 19 bp, Homo sapiens
  siRNA target sequence for FLJ38426 (NM_173611.1,246-264).
cttccagcttgagataagt

SEQ ID NO: 426507 - DNA, 19 bp, Homo sapiens
  siRNA target sequence for FLJ38426 (NM_173611.1,303-321).
catatcaggagatattaaa

SEQ ID NO: 426508 - DNA, 19 bp, Homo sapiens
  siRNA target sequence for FLJ38426 (NM_173611.1,481-499).
ggtatacccaagtcaacaa

SEQ ID NO: 426509 - DNA, 19 bp, Homo sapiens
  siRNA target sequence for FLJ38426 (NM_173611.1,492-510).
gtcaacaacttctgacatt

SEQ ID NO: 426510 - DNA, 19 bp, Homo sapiens
  siRNA target sequence for FLJ38426 (NM_173611.1,503-521).
ctgacattccgcatatgct

SEQ ID NO: 426511 - DNA, 19 bp, Homo sapiens
  siRNA target sequence for FLJ38426 (NM_173611.1,505-523).
gacattccgcatatgctaa

SEQ ID NO: 426512 - DNA, 19 bp, Homo sapiens
  siRNA target sequence for FLJ38426 (NM_173611.1,586-604).
ccactgctgaaaatggatt

SEQ ID NO: 426513 - DNA, 19 bp, Homo sapiens
  siRNA target sequence for FLJ38426 (NM_173611.1,587-605).
cactgctgaaaatggattt

SEQ ID NO: 426514 - DNA, 19 bp, Homo sapiens
  siRNA target sequence for FLJ38426 (NM_173611.1,620-638).
cggaacaactggaaagaat

SEQ ID NO: 426515 - DNA, 19 bp, Homo sapiens
  siRNA target sequence for FLJ38426 (NM_173611.1,671-689).
gccgacgaatgttaatgaa

SEQ ID NO: 426516 - DNA, 19 bp, Homo sapiens
  siRNA target sequence for FLJ38426 (NM_173611.1,672-690).
ccgacgaatgttaatgaaa

SEQ ID NO: 426517 - DNA, 19 bp, Homo sapiens
  siRNA target sequence for FLJ38426 (NM_173611.1,676-694).
cgaatgttaatgaaacgat

SEQ ID NO: 426518 - DNA, 19 bp, Homo sapiens
  siRNA target sequence for FLJ38426 (NM_173611.1,748-766).
gatgatatagcaagaattt

SEQ ID NO: 426519 - DNA, 19 bp, Homo sapiens
  siRNA target sequence for FLJ38426 (NM_173611.1,789-807).
gtcacccaagacaacgatt

SEQ ID NO: 426520 - DNA, 19 bp, Homo sapiens
  siRNA target sequence for FLJ38426 (NM_173611.1,804-822).
gattacaatggcacatcta

SEQ ID NO: 426521 - DNA, 19 bp, Homo sapiens
  siRNA target sequence for FLJ38426 (NM_173611.1,830-848).
ctcgtgaagatctatccaa

SEQ ID NO: 426522 - DNA, 19 bp, Homo sapiens
  siRNA target sequence for FLJ38426 (NM_173611.1,849-867).
gatcattaggacaagtagt

SEQ ID NO: 426523 - DNA, 19 bp, Homo sapiens
  siRNA target sequence for FLJ38426 (NM_173611.1,885-903).
gaccgcatgtgccattaat

SEQ ID NO: 426524 - DNA, 19 bp, Homo sapiens
  siRNA target sequence for FLJ38426 (NM_173611.1,887-905).
ccgcatgtgccattaataa

SEQ ID NO: 426525 - DNA, 19 bp, Homo sapiens
  siRNA target sequence for FLJ38426 (NM_173611.1,937-955).
gaattgatgatatcttact

SEQ ID NO: 426526 - DNA, 19 bp, Homo sapiens
  siRNA target sequence for FLJ35894 (NM_173616.1,303-321).
gactgacctgaacttatta

SEQ ID NO: 426527 - DNA, 19 bp, Homo sapiens
  siRNA target sequence for FLJ35894 (NM_173616.1,329-347).
gtctaaagtatcaaatgga

SEQ ID NO: 426528 - DNA, 19 bp, Homo sapiens
  siRNA target sequence for FLJ35894 (NM_173616.1,345-363).
ggacaatgctttttcacaa

SEQ ID NO: 426529 - DNA, 19 bp, Homo sapiens
  siRNA target sequence for FLJ35894 (NM_173616.1,370-388).
gctttggtcactattcatt

SEQ ID NO: 426530 - DNA, 19 bp, Homo sapiens
  siRNA target sequence for FLJ35894 (NM_173616.1,405-423).
cagtaatgcaagtgtttat

SEQ ID NO: 426531 - DNA, 19 bp, Homo sapiens
  siRNA target sequence for FLJ35894 (NM_173616.1,428-446).
gggaaattggtggtttgat

SEQ ID NO: 426532 - DNA, 19 bp, Homo sapiens
  siRNA target sequence for FLJ35894 (NM_173616.1,430-448).
gaaattggtggtttgatgt

SEQ ID NO: 426533 - DNA, 19 bp, Homo sapiens
  siRNA target sequence for FLJ35894 (NM_173616.1,473-491).
gtgaacatagcatggtaaa

SEQ ID NO: 426534 - DNA, 19 bp, Homo sapiens
  siRNA target sequence for FLJ35894 (NM_173616.1,515-533).
gagctattgcagagaaaaa

SEQ ID NO: 426535 - DNA, 19 bp, Homo sapiens
  siRNA target sequence for FLJ35894 (NM_173616.1,544-562).
cagcagactttgtgtactt

SEQ ID NO: 426536 - DNA, 19 bp, Homo sapiens
  siRNA target sequence for FLJ35894 (NM_173616.1,546-564).
gcagactttgtgtacttca

SEQ ID NO: 426537 - DNA, 19 bp, Homo sapiens
  siRNA target sequence for FLJ35894 (NM_173616.1,555-573).
gtgtacttcagagttgttt

SEQ ID NO: 426538 - DNA, 19 bp, Homo sapiens
  siRNA target sequence for FLJ35894 (NM_173616.1,577-595).
gacttaacttggttcttat

SEQ ID NO: 426539 - DNA, 19 bp, Homo sapiens
  siRNA target sequence for FLJ35894 (NM_173616.1,579-597).
cttaacttggttcttatct

SEQ ID NO: 426540 - DNA, 19 bp, Homo sapiens
  siRNA target sequence for FLJ35894 (NM_173616.1,588-606).
gttcttatctaatgattca

SEQ ID NO: 426541 - DNA, 19 bp, Homo sapiens
  siRNA target sequence for FLJ35894 (NM_173616.1,601-619).
gattcaaacataaatttga

SEQ ID NO: 426542 - DNA, 19 bp, Homo sapiens
  siRNA target sequence for FLJ35894 (NM_173616.1,706-724).
gttctgtcacggttattca

SEQ ID NO: 426543 - DNA, 19 bp, Homo sapiens
  siRNA target sequence for FLJ35894 (NM_173616.1,715-733).
cggttattcaggacagtta

SEQ ID NO: 426544 - DNA, 19 bp, Homo sapiens
  siRNA target sequence for FLJ35894 (NM_173616.1,716-734).
ggttattcaggacagttat

SEQ ID NO: 426545 - DNA, 19 bp, Homo sapiens
  siRNA target sequence for FLJ35894 (NM_173616.1,745-763).
gagttggatttgtcagata

SEQ ID NO: 426546 - DNA, 19 bp, Homo sapiens
  siRNA target sequence for FLJ35894 (NM_173616.1,821-839).
gtgtcaacaatcctcaaaa

SEQ ID NO: 426547 - DNA, 19 bp, Homo sapiens
  siRNA target sequence for FLJ35894 (NM_173616.1,913-931).
gagataattcgccctattt

SEQ ID NO: 426548 - DNA, 19 bp, Homo sapiens
  siRNA target sequence for FLJ35894 (NM_173616.1,946-964).
ctcactcttgcaaataaca

SEQ ID NO: 426549 - DNA, 19 bp, Homo sapiens
  siRNA target sequence for FLJ35894 (NM_173616.1,970-988).
gttcagaaatacttcgtat

SEQ ID NO: 426550 - DNA, 19 bp, Homo sapiens
  siRNA target sequence for FLJ35894 (NM_173616.1,991-1009).
gtgggcggactggatgtat

SEQ ID NO: 426551 - DNA, 19 bp, Homo sapiens
  siRNA target sequence for FLJ35894 (NM_173616.1,994-1012).
ggcggactggatgtattgt

SEQ ID NO: 426552 - DNA, 19 bp, Homo sapiens
  siRNA target sequence for FLJ35894 (NM_173616.1,996-1014).
cggactggatgtattgtct

SEQ ID NO: 426553 - DNA, 19 bp, Homo sapiens
  siRNA target sequence for FLJ35894 (NM_173616.1,1089-1107).
gactgtggatgcatgcatt

SEQ ID NO: 426554 - DNA, 19 bp, Homo sapiens
  siRNA target sequence for FLJ35894 (NM_173616.1,1118-1136).
ctacttttgggatagtact

SEQ ID NO: 426555 - DNA, 19 bp, Homo sapiens
  siRNA target sequence for FLJ35894 (NM_173616.1,1167-1185).
ggcattactgcttcatgaa

SEQ ID NO: 426556 - DNA, 19 bp, Homo sapiens
  siRNA target sequence for FLJ35894 (NM_173616.1,1168-1186).
gcattactgcttcatgaaa

SEQ ID NO: 426557 - DNA, 19 bp, Homo sapiens
  siRNA target sequence for FLJ35894 (NM_173616.1,1242-1260).
ggattgtgctgagaaatta

SEQ ID NO: 426558 - DNA, 19 bp, Homo sapiens
  siRNA target sequence for FLJ35894 (NM_173616.1,1249-1267).
gctgagaaattatctctaa

SEQ ID NO: 426559 - DNA, 19 bp, Homo sapiens
  siRNA target sequence for FLJ35894 (NM_173616.1,1262-1280).
ctctaagtctaggagaata

SEQ ID NO: 426560 - DNA, 19 bp, Homo sapiens
  siRNA target sequence for FLJ35894 (NM_173616.1,1268-1286).
gtctaggagaatatccttt

SEQ ID NO: 426561 - DNA, 19 bp, Homo sapiens
  siRNA target sequence for FLJ35894 (NM_173616.1,1274-1292).
gagaatatccttttgatga

SEQ ID NO: 426562 - DNA, 19 bp, Homo sapiens
  siRNA target sequence for FLJ35894 (NM_173616.1,1303-1321).
cagcaattaaaggacataa

SEQ ID NO: 426563 - DNA, 19 bp, Homo sapiens
  siRNA target sequence for FLJ35894 (NM_173616.1,1305-1323).
gcaattaaaggacataagt

SEQ ID NO: 426564 - DNA, 19 bp, Homo sapiens
  siRNA target sequence for FLJ35894 (NM_173616.1,1448-1466).
catctatgaacataagtat

SEQ ID NO: 426565 - DNA, 19 bp, Homo sapiens
  siRNA target sequence for FLJ35894 (NM_173616.1,1455-1473).
gaacataagtattcagaat

SEQ ID NO: 426566 - DNA, 19 bp, Homo sapiens
  siRNA target sequence for FLJ35894 (NM_173616.1,1458-1476).
cataagtattcagaataca

SEQ ID NO: 426567 - DNA, 19 bp, Homo sapiens
  siRNA target sequence for FLJ35894 (NM_173616.1,1500-1518).
gattggtcgaggtagcaaa

SEQ ID NO: 426568 - DNA, 19 bp, Homo sapiens
  siRNA target sequence for FLJ35894 (NM_173616.1,1544-1562).
ctagacagttacagagtta

SEQ ID NO: 426569 - DNA, 19 bp, Homo sapiens
  siRNA target sequence for FLJ35894 (NM_173616.1,1568-1586).
cccatggagtcatgtctaa

SEQ ID NO: 426570 - DNA, 19 bp, Homo sapiens
  siRNA target sequence for FLJ35894 (NM_173616.1,1569-1587).
ccatggagtcatgtctaaa

SEQ ID NO: 426571 - DNA, 19 bp, Homo sapiens
  siRNA target sequence for FLJ35894 (NM_173616.1,1578-1596).
catgtctaaagcatgtaca

SEQ ID NO: 426572 - DNA, 19 bp, Homo sapiens
  siRNA target sequence for FLJ35894 (NM_173616.1,1636-1654).
ccagtccatgcttgttaca

SEQ ID NO: 426573 - DNA, 19 bp, Homo sapiens
  siRNA target sequence for FLJ35894 (NM_173616.1,1694-1712).
caagctgcaatcaaaactt

SEQ ID NO: 426574 - DNA, 19 bp, Homo sapiens
  siRNA target sequence for FLJ35894 (NM_173616.1,1697-1715).
gctgcaatcaaaacttaca

SEQ ID NO: 426575 - DNA, 19 bp, Homo sapiens
  siRNA target sequence for FLJ35894 (NM_173616.1,1748-1766).
ctcaatcaagatccattta

SEQ ID NO: 426576 - DNA, 19 bp, Homo sapiens
  siRNA target sequence for FLJ35894 (NM_173616.1,1750-1768).
caatcaagatccatttaca

SEQ ID NO: 426577 - DNA, 19 bp, Homo sapiens
  siRNA target sequence for FLJ90652 (NM_173618.1,119-137).
cggcgaagtggactacaaa

SEQ ID NO: 426578 - DNA, 19 bp, Homo sapiens
  siRNA target sequence for FLJ90652 (NM_173618.1,120-138).
ggcgaagtggactacaaaa

SEQ ID NO: 426579 - DNA, 19 bp, Homo sapiens
  siRNA target sequence for FLJ90652 (NM_173618.1,211-229).
ggaaagcgcaaaggaaatt

SEQ ID NO: 426580 - DNA, 19 bp, Homo sapiens
  siRNA target sequence for FLJ90652 (NM_173618.1,237-255).
gtgtcccgggacaagagtt

SEQ ID NO: 426581 - DNA, 19 bp, Homo sapiens
  siRNA target sequence for FLJ90652 (NM_173618.1,315-333).
gccactgcatcatcagata

SEQ ID NO: 426582 - DNA, 19 bp, Homo sapiens
  siRNA target sequence for FLJ90652 (NM_173618.1,316-334).
ccactgcatcatcagataa

SEQ ID NO: 426583 - DNA, 19 bp, Homo sapiens
  siRNA target sequence for FLJ90652 (NM_173618.1,345-363).
gaggggacacccaagttgt

SEQ ID NO: 426584 - DNA, 19 bp, Homo sapiens
  siRNA target sequence for FLJ90652 (NM_173618.1,748-766).
cggtccctcggcagatgtt

SEQ ID NO: 426585 - DNA, 19 bp, Homo sapiens
  siRNA target sequence for FLJ90652 (NM_173618.1,750-768).
gtccctcggcagatgttca

SEQ ID NO: 426586 - DNA, 19 bp, Homo sapiens
  siRNA target sequence for FLJ23825 (NM_173620.1,533-551).
gggtgtgatgaggtctatt

SEQ ID NO: 426587 - DNA, 19 bp, Homo sapiens
  siRNA target sequence for FLJ23825 (NM_173620.1,534-552).
ggtgtgatgaggtctatta

SEQ ID NO: 426588 - DNA, 19 bp, Homo sapiens
  siRNA target sequence for FLJ23825 (NM_173620.1,537-555).
gtgatgaggtctattacct

SEQ ID NO: 426589 - DNA, 19 bp, Homo sapiens
  siRNA target sequence for FLJ23825 (NM_173620.1,1069-1087).
gcttctacgcggaggattt

SEQ ID NO: 426590 - DNA, 19 bp, Homo sapiens
  siRNA target sequence for FLJ23825 (NM_173620.1,1077-1095).
gcggaggatttgatgaaga

SEQ ID NO: 426591 - DNA, 19 bp, Homo sapiens
  siRNA target sequence for FLJ23825 (NM_173620.1,1078-1096).
cggaggatttgatgaagat

SEQ ID NO: 426592 - DNA, 19 bp, Homo sapiens
  siRNA target sequence for FLJ34790 (NM_173621.1,642-660).
gagaggtcccgggttcaaa

SEQ ID NO: 426593 - DNA, 19 bp, Homo sapiens
  siRNA target sequence for FLJ34790 (NM_173621.1,668-686).
cgagccctcctttaccttt

SEQ ID NO: 426594 - DNA, 19 bp, Homo sapiens
  siRNA target sequence for FLJ34790 (NM_173621.1,669-687).
gagccctcctttacctttt

SEQ ID NO: 426595 - DNA, 19 bp, Homo sapiens
  siRNA target sequence for FLJ34790 (NM_173621.1,734-752).
gcaggaggcttgactgtaa

SEQ ID NO: 426596 - DNA, 19 bp, Homo sapiens
  siRNA target sequence for FLJ34790 (NM_173621.1,738-756).
gaggcttgactgtaagtca

SEQ ID NO: 426597 - DNA, 19 bp, Homo sapiens
  siRNA target sequence for FLJ34790 (NM_173621.1,745-763).
gactgtaagtcatcaatgt

SEQ ID NO: 426598 - DNA, 19 bp, Homo sapiens
  siRNA target sequence for FLJ34790 (NM_173621.1,762-780).
gtacagtaagctcttttgt

SEQ ID NO: 426599 - DNA, 19 bp, Homo sapiens
  siRNA target sequence for FLJ34790 (NM_173621.1,785-803).
ccgcggtagcagaaagcat

SEQ ID NO: 426600 - DNA, 19 bp, Homo sapiens
  siRNA target sequence for FLJ34790 (NM_173621.1,790-808).
gtagcagaaagcatctcaa

SEQ ID NO: 426601 - DNA, 19 bp, Homo sapiens
  siRNA target sequence for FLJ34790 (NM_173621.1,923-941).
ctggtttcgctttgattga

SEQ ID NO: 426602 - DNA, 19 bp, Homo sapiens
  siRNA target sequence for FLJ34790 (NM_173621.1,936-954).
gattgacacgcgtcaatct

SEQ ID NO: 426603 - DNA, 19 bp, Homo sapiens
  siRNA target sequence for FLJ34790 (NM_173621.1,942-960).
cacgcgtcaatctatagtt

SEQ ID NO: 426604 - DNA, 19 bp, Homo sapiens
  siRNA target sequence for FLJ34790 (NM_173621.1,944-962).
cgcgtcaatctatagttgt

SEQ ID NO: 426605 - DNA, 19 bp, Homo sapiens
  siRNA target sequence for FLJ34790 (NM_173621.1,981-999).
gagcccaggaactgtcaaa

SEQ ID NO: 426606 - DNA, 19 bp, Homo sapiens
  siRNA target sequence for FLJ34790 (NM_173621.1,984-1002).
cccaggaactgtcaaaact

SEQ ID NO: 426607 - DNA, 19 bp, Homo sapiens
  siRNA target sequence for FLJ36674 (NM_173622.1,81-99).
cccggaagctacttgaaaa

SEQ ID NO: 426608 - DNA, 19 bp, Homo sapiens
  siRNA target sequence for FLJ36674 (NM_173622.1,82-100).
ccggaagctacttgaaaaa

SEQ ID NO: 426609 - DNA, 19 bp, Homo sapiens
  siRNA target sequence for FLJ36674 (NM_173622.1,141-159).
cagtgaaaagactcattga

SEQ ID NO: 426610 - DNA, 19 bp, Homo sapiens
  siRNA target sequence for FLJ36674 (NM_173622.1,214-232).
ggcatcaaggcagaataaa

SEQ ID NO: 426611 - DNA, 19 bp, Homo sapiens
  siRNA target sequence for FLJ36674 (NM_173622.1,305-323).
ctgtcagaatccacgttat

SEQ ID NO: 426612 - DNA, 19 bp, Homo sapiens
  siRNA target sequence for FLJ36674 (NM_173622.1,307-325).
gtcagaatccacgttatca

SEQ ID NO: 426613 - DNA, 19 bp, Homo sapiens
  siRNA target sequence for FLJ36674 (NM_173622.1,309-327).
cagaatccacgttatcaat

SEQ ID NO: 426614 - DNA, 19 bp, Homo sapiens
  siRNA target sequence for FLJ36674 (NM_173622.1,311-329).
gaatccacgttatcaatgt

SEQ ID NO: 426615 - DNA, 19 bp, Homo sapiens
  siRNA target sequence for FLJ36674 (NM_173622.1,406-424).
ctgtccaactgaaaactat

SEQ ID NO: 426616 - DNA, 19 bp, Homo sapiens
  siRNA target sequence for FLJ36674 (NM_173622.1,408-426).
gtccaactgaaaactataa

SEQ ID NO: 426617 - DNA, 19 bp, Homo sapiens
  siRNA target sequence for FLJ36674 (NM_173622.1,440-458).
gcccgcaagcctatgatga

SEQ ID NO: 426618 - DNA, 19 bp, Homo sapiens
  siRNA target sequence for FLJ40504 (NM_173624.1,508-526).
cgggtcttagccagttaga

SEQ ID NO: 426619 - DNA, 19 bp, Homo sapiens
  siRNA target sequence for FLJ40504 (NM_173624.1,510-528).
ggtcttagccagttagatt

SEQ ID NO: 426620 - DNA, 19 bp, Homo sapiens
  siRNA target sequence for FLJ40504 (NM_173624.1,511-529).
gtcttagccagttagattt

SEQ ID NO: 426621 - DNA, 19 bp, Homo sapiens
  siRNA target sequence for FLJ39647 (NM_173625.2,65-83).
ggtcttcagcctaatcatt

SEQ ID NO: 426622 - DNA, 19 bp, Homo sapiens
  siRNA target sequence for FLJ39647 (NM_173625.2,74-92).
cctaatcattgcatcctat

SEQ ID NO: 426623 - DNA, 19 bp, Homo sapiens
  siRNA target sequence for FLJ39647 (NM_173625.2,231-249).
caaaaccggactatagcta

SEQ ID NO: 426624 - DNA, 19 bp, Homo sapiens
  siRNA target sequence for FLJ39647 (NM_173625.2,311-329).
gccaaaggtcaagcatatt

SEQ ID NO: 426625 - DNA, 19 bp, Homo sapiens
  siRNA target sequence for FLJ39647 (NM_173625.2,312-330).
ccaaaggtcaagcatattt

SEQ ID NO: 426626 - DNA, 19 bp, Homo sapiens
  siRNA target sequence for FLJ39647 (NM_173625.2,332-350).
gaagaacctgagaatcatt

SEQ ID NO: 426627 - DNA, 19 bp, Homo sapiens
  siRNA target sequence for FLJ39647 (NM_173625.2,351-369).
gctgctccccgcagaaaca

SEQ ID NO: 426628 - DNA, 19 bp, Homo sapiens
  siRNA target sequence for FLJ39647 (NM_173625.2,451-469).
cagggatctcacaatgtaa

SEQ ID NO: 426629 - DNA, 19 bp, Homo sapiens
  siRNA target sequence for FLJ39647 (NM_173625.2,514-532).
ctataactcctgggaataa

SEQ ID NO: 426630 - DNA, 19 bp, Homo sapiens
  siRNA target sequence for FLJ39647 (NM_173625.2,583-601).
gacagaaatggagtattgt

SEQ ID NO: 426631 - DNA, 19 bp, Homo sapiens
  siRNA target sequence for FLJ39647 (NM_173625.2,592-610).
ggagtattgtggtcaaaat

SEQ ID NO: 426632 - DNA, 19 bp, Homo sapiens
  siRNA target sequence for FLJ39647 (NM_173625.2,635-653).
cagtggagttgccattata

SEQ ID NO: 426633 - DNA, 19 bp, Homo sapiens
  siRNA target sequence for FLJ39647 (NM_173625.2,645-663).
gccattatagtatttgtaa

SEQ ID NO: 426634 - DNA, 19 bp, Homo sapiens
  siRNA target sequence for FLJ39647 (NM_173625.2,672-690).
gtcccatgtccttatcaat

SEQ ID NO: 426635 - DNA, 19 bp, Homo sapiens
  siRNA target sequence for FLJ39647 (NM_173625.2,810-828).
gatgctgccaattcatcaa

SEQ ID NO: 426636 - DNA, 19 bp, Homo sapiens
  siRNA target sequence for FLJ39647 (NM_173625.2,853-871).
ctgttatccaccagacata

SEQ ID NO: 426637 - DNA, 19 bp, Homo sapiens
  siRNA target sequence for FLJ39647 (NM_173625.2,855-873).
gttatccaccagacatact

SEQ ID NO: 426638 - DNA, 19 bp, Homo sapiens
  siRNA target sequence for FLJ35220 (NM_173627.2,636-654).
gcaccaggcccctctacat

SEQ ID NO: 426639 - DNA, 19 bp, Homo sapiens
  siRNA target sequence for FLJ35220 (NM_173627.2,857-875).
gagtcctcagcactttgtt

SEQ ID NO: 426640 - DNA, 19 bp, Homo sapiens
  siRNA target sequence for FLJ40457 (NM_173628.1,178-196).
ggccacctctgagtactat

SEQ ID NO: 426641 - DNA, 19 bp, Homo sapiens
  siRNA target sequence for FLJ40457 (NM_173628.1,179-197).
gccacctctgagtactata

SEQ ID NO: 426642 - DNA, 19 bp, Homo sapiens
  siRNA target sequence for FLJ40457 (NM_173628.1,230-248).
gagttctgcaaccaaatca

SEQ ID NO: 426643 - DNA, 19 bp, Homo sapiens
  siRNA target sequence for FLJ40457 (NM_173628.1,294-312).
gcctgcaaggtgaaatcga

SEQ ID NO: 426644 - DNA, 19 bp, Homo sapiens
  siRNA target sequence for FLJ40457 (NM_173628.1,327-345).
gcatctccctggctgtaaa

SEQ ID NO: 426645 - DNA, 19 bp, Homo sapiens
  siRNA target sequence for FLJ40457 (NM_173628.1,328-346).
catctccctggctgtaaat

SEQ ID NO: 426646 - DNA, 19 bp, Homo sapiens
  siRNA target sequence for FLJ40457 (NM_173628.1,386-404).
gtgaacatgaagcttttct

SEQ ID NO: 426647 - DNA, 19 bp, Homo sapiens
  siRNA target sequence for FLJ40457 (NM_173628.1,576-594).
gcctggtgacccgtatcta

SEQ ID NO: 426648 - DNA, 19 bp, Homo sapiens
  siRNA target sequence for FLJ40457 (NM_173628.1,577-595).
cctggtgacccgtatctat

SEQ ID NO: 426649 - DNA, 19 bp, Homo sapiens
  siRNA target sequence for FLJ40457 (NM_173628.1,580-598).
ggtgacccgtatctatgat

SEQ ID NO: 426650 - DNA, 19 bp, Homo sapiens
  siRNA target sequence for FLJ40457 (NM_173628.1,663-681).
cgaattttgaccgtgatta

SEQ ID NO: 426651 - DNA, 19 bp, Homo sapiens
  siRNA target sequence for FLJ40457 (NM_173628.1,664-682).
gaattttgaccgtgattat

SEQ ID NO: 426652 - DNA, 19 bp, Homo sapiens
  siRNA target sequence for FLJ40457 (NM_173628.1,683-701).
gctgattttgagatcaaaa

SEQ ID NO: 426653 - DNA, 19 bp, Homo sapiens
  siRNA target sequence for FLJ40457 (NM_173628.1,684-702).
ctgattttgagatcaaaat

SEQ ID NO: 426654 - DNA, 19 bp, Homo sapiens
  siRNA target sequence for FLJ40457 (NM_173628.1,729-747).
cgatcttttgccaaggatt

SEQ ID NO: 426655 - DNA, 19 bp, Homo sapiens
  siRNA target sequence for FLJ40457 (NM_173628.1,730-748).
gatcttttgccaaggattt

SEQ ID NO: 426656 - DNA, 19 bp, Homo sapiens
  siRNA target sequence for FLJ40457 (NM_173628.1,872-890).
gctgagctagacaatgcta

SEQ ID NO: 426657 - DNA, 19 bp, Homo sapiens
  siRNA target sequence for FLJ40457 (NM_173628.1,878-896).
ctagacaatgctaagatct

SEQ ID NO: 426658 - DNA, 19 bp, Homo sapiens
  siRNA target sequence for FLJ40457 (NM_173628.1,881-899).
gacaatgctaagatcttgt

SEQ ID NO: 426659 - DNA, 19 bp, Homo sapiens
  siRNA target sequence for FLJ40457 (NM_173628.1,939-957).
ccctgatccacaaaaacat

SEQ ID NO: 426660 - DNA, 19 bp, Homo sapiens
  siRNA target sequence for FLJ40457 (NM_173628.1,1068-1086).
ccaagctgacctatcagaa

SEQ ID NO: 426661 - DNA, 19 bp, Homo sapiens
  siRNA target sequence for FLJ40457 (NM_173628.1,1116-1134).
gccaccgcgagaagatcta

SEQ ID NO: 426662 - DNA, 19 bp, Homo sapiens
  siRNA target sequence for FLJ40457 (NM_173628.1,1157-1175).
gaccaggactgccacttta

SEQ ID NO: 426663 - DNA, 19 bp, Homo sapiens
  siRNA target sequence for FLJ40457 (NM_173628.1,1217-1235).
ctcatccacgtcaacttca

SEQ ID NO: 426664 - DNA, 19 bp, Homo sapiens
  siRNA target sequence for FLJ40457 (NM_173628.1,1333-1351).
cgaaactttccggaagttt

SEQ ID NO: 426665 - DNA, 19 bp, Homo sapiens
  siRNA target sequence for FLJ40457 (NM_173628.1,1367-1385).
ctcatcgttggctggtata

SEQ ID NO: 426666 - DNA, 19 bp, Homo sapiens
  siRNA target sequence for FLJ40457 (NM_173628.1,1369-1387).
catcgttggctggtataat

SEQ ID NO: 426667 - DNA, 19 bp, Homo sapiens
  siRNA target sequence for FLJ40457 (NM_173628.1,1373-1391).
gttggctggtataatgaga

SEQ ID NO: 426668 - DNA, 19 bp, Homo sapiens
  siRNA target sequence for FLJ40457 (NM_173628.1,1376-1394).
ggctggtataatgagataa

SEQ ID NO: 426669 - DNA, 19 bp, Homo sapiens
  siRNA target sequence for FLJ40457 (NM_173628.1,1467-1485).
gcgctgaaacgacattatt

SEQ ID NO: 426670 - DNA, 19 bp, Homo sapiens
  siRNA target sequence for FLJ40457 (NM_173628.1,1494-1512).
gcgaaggtgtgtttcagta

SEQ ID NO: 426671 - DNA, 19 bp, Homo sapiens
  siRNA target sequence for FLJ40457 (NM_173628.1,1500-1518).
gtgtgtttcagtacattca

SEQ ID NO: 426672 - DNA, 19 bp, Homo sapiens
  siRNA target sequence for FLJ40457 (NM_173628.1,1612-1630).
ggccaacccgctgtttgaa

SEQ ID NO: 426673 - DNA, 19 bp, Homo sapiens
  siRNA target sequence for FLJ40457 (NM_173628.1,1613-1631).
gccaacccgctgtttgaaa

SEQ ID NO: 426674 - DNA, 19 bp, Homo sapiens
  siRNA target sequence for FLJ40457 (NM_173628.1,1615-1633).
caacccgctgtttgaaaga

SEQ ID NO: 426675 - DNA, 19 bp, Homo sapiens
  siRNA target sequence for FLJ40457 (NM_173628.1,1734-1752).
ccatggttgcagtaaggaa

SEQ ID NO: 426676 - DNA, 19 bp, Homo sapiens
  siRNA target sequence for FLJ39106 (NM_173629.1,180-198).
cgccaatcacacatccaaa

SEQ ID NO: 426677 - DNA, 19 bp, Homo sapiens
  siRNA target sequence for FLJ39106 (NM_173629.1,181-199).
gccaatcacacatccaaat

SEQ ID NO: 426678 - DNA, 19 bp, Homo sapiens
  siRNA target sequence for FLJ39106 (NM_173629.1,206-224).
gaggctcacagttccatat

SEQ ID NO: 426679 - DNA, 19 bp, Homo sapiens
  siRNA target sequence for FLJ39106 (NM_173629.1,226-244).
ctggtgtctaccttcaaat

SEQ ID NO: 426680 - DNA, 19 bp, Homo sapiens
  siRNA target sequence for FLJ39106 (NM_173629.1,257-275).
gatgtctctcccaacttaa

SEQ ID NO: 426681 - DNA, 19 bp, Homo sapiens
  siRNA target sequence for FLJ39106 (NM_173629.1,323-341).
cagtcagaatcctgtaaca

SEQ ID NO: 426682 - DNA, 19 bp, Homo sapiens
  siRNA target sequence for FLJ39106 (NM_173629.1,325-343).
gtcagaatcctgtaacaca

SEQ ID NO: 426683 - DNA, 19 bp, Homo sapiens
  siRNA target sequence for FLJ39106 (NM_173629.1,353-371).
gaatattgccgcaatgact

SEQ ID NO: 426684 - DNA, 19 bp, Homo sapiens
  siRNA target sequence for FLJ39106 (NM_173629.1,362-380).
cgcaatgactggtctatgt

SEQ ID NO: 426685 - DNA, 19 bp, Homo sapiens
  siRNA target sequence for FLJ39106 (NM_173629.1,372-390).
ggtctatgtggaaagtctt

SEQ ID NO: 426686 - DNA, 19 bp, Homo sapiens
  siRNA target sequence for FLJ39106 (NM_173629.1,421-439).
gacagcaattggagtactt

SEQ ID NO: 426687 - DNA, 19 bp, Homo sapiens
  siRNA target sequence for FLJ39106 (NM_173629.1,423-441).
cagcaattggagtacttat

SEQ ID NO: 426688 - DNA, 19 bp, Homo sapiens
  siRNA target sequence for FLJ39106 (NM_173629.1,431-449).
ggagtacttataatatgct

SEQ ID NO: 426689 - DNA, 19 bp, Homo sapiens
  siRNA target sequence for FLJ39106 (NM_173629.1,469-487).
ggccaattcctccattgtt

SEQ ID NO: 426690 - DNA, 19 bp, Homo sapiens
  siRNA target sequence for FLJ39106 (NM_173629.1,470-488).
gccaattcctccattgtta

SEQ ID NO: 426691 - DNA, 19 bp, Homo sapiens
  siRNA target sequence for FLJ39106 (NM_173629.1,548-566).
gcttgtccacctacaatga

SEQ ID NO: 426692 - DNA, 19 bp, Homo sapiens
  siRNA target sequence for FLJ39106 (NM_173629.1,596-614).
gccactgaatctacaactt

SEQ ID NO: 426693 - DNA, 19 bp, Homo sapiens
  siRNA target sequence for FLJ39106 (NM_173629.1,656-674).
gttgcacctaccgatcatt

SEQ ID NO: 426694 - DNA, 19 bp, Homo sapiens
  siRNA target sequence for RTTN (NM_173630.2,125-143).
gagcgcgctctcaagagta

SEQ ID NO: 426695 - DNA, 19 bp, Homo sapiens
  siRNA target sequence for RTTN (NM_173630.2,127-145).
gcgcgctctcaagagtatt

SEQ ID NO: 426696 - DNA, 19 bp, Homo sapiens
  siRNA target sequence for RTTN (NM_173630.2,141-159).
gtattctctgcaagattga

SEQ ID NO: 426697 - DNA, 19 bp, Homo sapiens
  siRNA target sequence for RTTN (NM_173630.2,150-168).
gcaagattgagcacaactt

SEQ ID NO: 426698 - DNA, 19 bp, Homo sapiens
  siRNA target sequence for RTTN (NM_173630.2,151-169).
caagattgagcacaactta

SEQ ID NO: 426699 - DNA, 19 bp, Homo sapiens
  siRNA target sequence for RTTN (NM_173630.2,172-190).
ctgctacgctgatctcatt

SEQ ID NO: 426700 - DNA, 19 bp, Homo sapiens
  siRNA target sequence for RTTN (NM_173630.2,174-192).
gctacgctgatctcattca

SEQ ID NO: 426701 - DNA, 19 bp, Homo sapiens
  siRNA target sequence for RTTN (NM_173630.2,193-211).
ggagaggcaactttttctt

SEQ ID NO: 426702 - DNA, 19 bp, Homo sapiens
  siRNA target sequence for RTTN (NM_173630.2,257-275).
gaggttctgaacctgttaa

SEQ ID NO: 426703 - DNA, 19 bp, Homo sapiens
  siRNA target sequence for RTTN (NM_173630.2,294-312).
ccccagcagtccaacattt

SEQ ID NO: 426704 - DNA, 19 bp, Homo sapiens
  siRNA target sequence for RTTN (NM_173630.2,326-344).
gcagtagagttcttatcta

SEQ ID NO: 426705 - DNA, 19 bp, Homo sapiens
  siRNA target sequence for RTTN (NM_173630.2,354-372).
ctaatgtggagccaaatct

SEQ ID NO: 426706 - DNA, 19 bp, Homo sapiens
  siRNA target sequence for RTTN (NM_173630.2,366-384).
caaatctgcaggctgaaat

SEQ ID NO: 426707 - DNA, 19 bp, Homo sapiens
  siRNA target sequence for RTTN (NM_173630.2,485-503).
gaaatcttaacaggatatt

SEQ ID NO: 426708 - DNA, 19 bp, Homo sapiens
  siRNA target sequence for RTTN (NM_173630.2,544-562).
gccacgaccagtggtaaat

SEQ ID NO: 426709 - DNA, 19 bp, Homo sapiens
  siRNA target sequence for RTTN (NM_173630.2,546-564).
cacgaccagtggtaaatca

SEQ ID NO: 426710 - DNA, 19 bp, Homo sapiens
  siRNA target sequence for RTTN (NM_173630.2,576-594).
gcttgaagttttctacatt

SEQ ID NO: 426711 - DNA, 19 bp, Homo sapiens
  siRNA target sequence for RTTN (NM_173630.2,657-675).
gaagtagtaaccacacttt

SEQ ID NO: 426712 - DNA, 19 bp, Homo sapiens
  siRNA target sequence for RTTN (NM_173630.2,660-678).
gtagtaaccacactttaat

SEQ ID NO: 426713 - DNA, 19 bp, Homo sapiens
  siRNA target sequence for RTTN (NM_173630.2,679-697).
ctggaacacctgtgaacta

SEQ ID NO: 426714 - DNA, 19 bp, Homo sapiens
  siRNA target sequence for RTTN (NM_173630.2,681-699).
ggaacacctgtgaactatt

SEQ ID NO: 426715 - DNA, 19 bp, Homo sapiens
  siRNA target sequence for RTTN (NM_173630.2,695-713).
ctattgaaggatgttatca

SEQ ID NO: 426716 - DNA, 19 bp, Homo sapiens
  siRNA target sequence for RTTN (NM_173630.2,806-824).
catcgcctggcattacagt

SEQ ID NO: 426717 - DNA, 19 bp, Homo sapiens
  siRNA target sequence for RTTN (NM_173630.2,844-862).
gctgtgcatgtatttaaga

SEQ ID NO: 426718 - DNA, 19 bp, Homo sapiens
  siRNA target sequence for RTTN (NM_173630.2,881-899).
cgagatccaggttttttct

SEQ ID NO: 426719 - DNA, 19 bp, Homo sapiens
  siRNA target sequence for RTTN (NM_173630.2,887-905).
ccaggttttttctccaata

SEQ ID NO: 426720 - DNA, 19 bp, Homo sapiens
  siRNA target sequence for RTTN (NM_173630.2,911-929).
gacacagtttcccaaaatt

SEQ ID NO: 426721 - DNA, 19 bp, Homo sapiens
  siRNA target sequence for RTTN (NM_173630.2,913-931).
cacagtttcccaaaattct

SEQ ID NO: 426722 - DNA, 19 bp, Homo sapiens
  siRNA target sequence for RTTN (NM_173630.2,965-983).
catcattcccagaatcctt

SEQ ID NO: 426723 - DNA, 19 bp, Homo sapiens
  siRNA target sequence for RTTN (NM_173630.2,1097-1115).
catgtaaactccaggatat

SEQ ID NO: 426724 - DNA, 19 bp, Homo sapiens
  siRNA target sequence for RTTN (NM_173630.2,1108-1126).
caggatatccgttcattca

SEQ ID NO: 426725 - DNA, 19 bp, Homo sapiens
  siRNA target sequence for RTTN (NM_173630.2,1117-1135).
cgttcattcacctttggat

SEQ ID NO: 426726 - DNA, 19 bp, Homo sapiens
  siRNA target sequence for RTTN (NM_173630.2,1118-1136).
gttcattcacctttggata

SEQ ID NO: 426727 - DNA, 19 bp, Homo sapiens
  siRNA target sequence for RTTN (NM_173630.2,1132-1150).
ggatatgggacacatagat

SEQ ID NO: 426728 - DNA, 19 bp, Homo sapiens
  siRNA target sequence for RTTN (NM_173630.2,1203-1221).
gtcttccccagttttgtgt

SEQ ID NO: 426729 - DNA, 19 bp, Homo sapiens
  siRNA target sequence for RTTN (NM_173630.2,1257-1275).
caggtagcagacaagtgat

SEQ ID NO: 426730 - DNA, 19 bp, Homo sapiens
  siRNA target sequence for RTTN (NM_173630.2,1259-1277).
ggtagcagacaagtgataa

SEQ ID NO: 426731 - DNA, 19 bp, Homo sapiens
  siRNA target sequence for RTTN (NM_173630.2,1260-1278).
gtagcagacaagtgataat

SEQ ID NO: 426732 - DNA, 19 bp, Homo sapiens
  siRNA target sequence for RTTN (NM_173630.2,1311-1329).
cacttattggtgaagcaat

SEQ ID NO: 426733 - DNA, 19 bp, Homo sapiens
  siRNA target sequence for RTTN (NM_173630.2,1353-1371).
gcagcctttttggtataga

SEQ ID NO: 426734 - DNA, 19 bp, Homo sapiens
  siRNA target sequence for RTTN (NM_173630.2,1354-1372).
cagcctttttggtatagat

SEQ ID NO: 426735 - DNA, 19 bp, Homo sapiens
  siRNA target sequence for RTTN (NM_173630.2,1356-1374).
gcctttttggtatagatat

SEQ ID NO: 426736 - DNA, 19 bp, Homo sapiens
  siRNA target sequence for RTTN (NM_173630.2,1401-1419).
gagcccttggagaaaccat

SEQ ID NO: 426737 - DNA, 19 bp, Homo sapiens
  siRNA target sequence for RTTN (NM_173630.2,1412-1430).
gaaaccatgtgctaccata

SEQ ID NO: 426738 - DNA, 19 bp, Homo sapiens
  siRNA target sequence for RTTN (NM_173630.2,1417-1435).
catgtgctaccataaaagt

SEQ ID NO: 426739 - DNA, 19 bp, Homo sapiens
  siRNA target sequence for RTTN (NM_173630.2,1420-1438).
gtgctaccataaaagtagt

SEQ ID NO: 426740 - DNA, 19 bp, Homo sapiens
  siRNA target sequence for RTTN (NM_173630.2,1508-1526).
gcagttcgactgctacaaa

SEQ ID NO: 426741 - DNA, 19 bp, Homo sapiens
  siRNA target sequence for RTTN (NM_173630.2,1527-1545).
cgcttctccctgttgaaaa

SEQ ID NO: 426742 - DNA, 19 bp, Homo sapiens
  siRNA target sequence for RTTN (NM_173630.2,1546-1564).
ggcaagcgagtttttatca

SEQ ID NO: 426743 - DNA, 19 bp, Homo sapiens
  siRNA target sequence for RTTN (NM_173630.2,1548-1566).
caagcgagtttttatcaga

SEQ ID NO: 426744 - DNA, 19 bp, Homo sapiens
  siRNA target sequence for RTTN (NM_173630.2,1701-1719).
cagaggccgtttattcaat

SEQ ID NO: 426745 - DNA, 19 bp, Homo sapiens
  siRNA target sequence for RTTN (NM_173630.2,1705-1723).
ggccgtttattcaattgaa

SEQ ID NO: 426746 - DNA, 19 bp, Homo sapiens
  siRNA target sequence for RTTN (NM_173630.2,1706-1724).
gccgtttattcaattgaat

SEQ ID NO: 426747 - DNA, 19 bp, Homo sapiens
  siRNA target sequence for RTTN (NM_173630.2,1799-1817).
caagccttgcgtagctttt

SEQ ID NO: 426748 - DNA, 19 bp, Homo sapiens
  siRNA target sequence for RTTN (NM_173630.2,1802-1820).
gccttgcgtagcttttcct

SEQ ID NO: 426749 - DNA, 19 bp, Homo sapiens
  siRNA target sequence for RTTN (NM_173630.2,1804-1822).
cttgcgtagcttttcctat

SEQ ID NO: 426750 - DNA, 19 bp, Homo sapiens
  siRNA target sequence for RTTN (NM_173630.2,1807-1825).
gcgtagcttttcctatcat

SEQ ID NO: 426751 - DNA, 19 bp, Homo sapiens
  siRNA target sequence for RTTN (NM_173630.2,1835-1853).
ccgctaataaaggaaatca

SEQ ID NO: 426752 - DNA, 19 bp, Homo sapiens
  siRNA target sequence for RTTN (NM_173630.2,1836-1854).
cgctaataaaggaaatcat

SEQ ID NO: 426753 - DNA, 19 bp, Homo sapiens
  siRNA target sequence for RTTN (NM_173630.2,1993-2011).
cacgaaggaatgtttaggt

SEQ ID NO: 426754 - DNA, 19 bp, Homo sapiens
  siRNA target sequence for RTTN (NM_173630.2,2004-2022).
gtttaggtgtccataatgt

SEQ ID NO: 426755 - DNA, 19 bp, Homo sapiens
  siRNA target sequence for RTTN (NM_173630.2,2010-2028).
gtgtccataatgtcactaa

SEQ ID NO: 426756 - DNA, 19 bp, Homo sapiens
  siRNA target sequence for RTTN (NM_173630.2,2031-2049).
ccgtgtcttcactttgcaa

SEQ ID NO: 426757 - DNA, 19 bp, Homo sapiens
  siRNA target sequence for RTTN (NM_173630.2,2032-2050).
cgtgtcttcactttgcaat

SEQ ID NO: 426758 - DNA, 19 bp, Homo sapiens
  siRNA target sequence for RTTN (NM_173630.2,2165-2183).
cagggacgattgatgatga

SEQ ID NO: 426759 - DNA, 19 bp, Homo sapiens
  siRNA target sequence for RTTN (NM_173630.2,2278-2296).
cattctccttctaagcaaa

SEQ ID NO: 426760 - DNA, 19 bp, Homo sapiens
  siRNA target sequence for RTTN (NM_173630.2,2324-2342).
ccgtgtactacccgattaa

SEQ ID NO: 426761 - DNA, 19 bp, Homo sapiens
  siRNA target sequence for RTTN (NM_173630.2,2325-2343).
cgtgtactacccgattaaa

SEQ ID NO: 426762 - DNA, 19 bp, Homo sapiens
  siRNA target sequence for RTTN (NM_173630.2,2347-2365).
catgctgcgacttttgcta

SEQ ID NO: 426763 - DNA, 19 bp, Homo sapiens
  siRNA target sequence for RTTN (NM_173630.2,2353-2371).
gcgacttttgctagtgaaa

SEQ ID NO: 426764 - DNA, 19 bp, Homo sapiens
  siRNA target sequence for RTTN (NM_173630.2,2379-2397).
cggtccgttcgctagcatt

SEQ ID NO: 426765 - DNA, 19 bp, Homo sapiens
  siRNA target sequence for RTTN (NM_173630.2,2380-2398).
ggtccgttcgctagcatta

SEQ ID NO: 426766 - DNA, 19 bp, Homo sapiens
  siRNA target sequence for RTTN (NM_173630.2,2381-2399).
gtccgttcgctagcattaa

SEQ ID NO: 426767 - DNA, 19 bp, Homo sapiens
  siRNA target sequence for RTTN (NM_173630.2,2385-2403).
gttcgctagcattaaagct

SEQ ID NO: 426768 - DNA, 19 bp, Homo sapiens
  siRNA target sequence for RTTN (NM_173630.2,2442-2460).
caaagcgtcctctaataga

SEQ ID NO: 426769 - DNA, 19 bp, Homo sapiens
  siRNA target sequence for RTTN (NM_173630.2,2499-2517).
ggaagaaacctattgaact

SEQ ID NO: 426770 - DNA, 19 bp, Homo sapiens
  siRNA target sequence for RTTN (NM_173630.2,2554-2572).
ggagactgttgaaaaggta

SEQ ID NO: 426771 - DNA, 19 bp, Homo sapiens
  siRNA target sequence for RTTN (NM_173630.2,2557-2575).
gactgttgaaaaggtatat

SEQ ID NO: 426772 - DNA, 19 bp, Homo sapiens
  siRNA target sequence for RTTN (NM_173630.2,2559-2577).
ctgttgaaaaggtatatga

SEQ ID NO: 426773 - DNA, 19 bp, Homo sapiens
  siRNA target sequence for RTTN (NM_173630.2,2594-2612).
gatgttgatctcgttttga

SEQ ID NO: 426774 - DNA, 19 bp, Homo sapiens
  siRNA target sequence for RTTN (NM_173630.2,2597-2615).
gttgatctcgttttgagaa

SEQ ID NO: 426775 - DNA, 19 bp, Homo sapiens
  siRNA target sequence for RTTN (NM_173630.2,2637-2655).
ctgtgattatgcaagatat

SEQ ID NO: 426776 - DNA, 19 bp, Homo sapiens
  siRNA target sequence for RTTN (NM_173630.2,2666-2684).
gctgtggtgaaaaagttat

SEQ ID NO: 426777 - DNA, 19 bp, Homo sapiens
  siRNA target sequence for RTTN (NM_173630.2,2772-2790).
cactcttgaggaaggtttt

SEQ ID NO: 426778 - DNA, 19 bp, Homo sapiens
  siRNA target sequence for RTTN (NM_173630.2,2776-2794).
cttgaggaaggttttatgt

SEQ ID NO: 426779 - DNA, 19 bp, Homo sapiens
  siRNA target sequence for RTTN (NM_173630.2,2823-2841).
cgcaacagtcttctctttt

SEQ ID NO: 426780 - DNA, 19 bp, Homo sapiens
  siRNA target sequence for RTTN (NM_173630.2,2835-2853).
ctcttttgaccgtgttatt

SEQ ID NO: 426781 - DNA, 19 bp, Homo sapiens
  siRNA target sequence for RTTN (NM_173630.2,2837-2855).
cttttgaccgtgttattca

SEQ ID NO: 426782 - DNA, 19 bp, Homo sapiens
  siRNA target sequence for RTTN (NM_173630.2,2856-2874).
gagtttccttaatatttca

SEQ ID NO: 426783 - DNA, 19 bp, Homo sapiens
  siRNA target sequence for RTTN (NM_173630.2,2933-2951).
gaagtatcgagaatggata

SEQ ID NO: 426784 - DNA, 19 bp, Homo sapiens
  siRNA target sequence for RTTN (NM_173630.2,2936-2954).
gtatcgagaatggatatgt

SEQ ID NO: 426785 - DNA, 19 bp, Homo sapiens
  siRNA target sequence for RTTN (NM_173630.2,2947-2965).
ggatatgtggtctgttaat

SEQ ID NO: 426786 - DNA, 19 bp, Homo sapiens
  siRNA target sequence for RTTN (NM_173630.2,3004-3022).
gcctgtttccgtttttaga

SEQ ID NO: 426787 - DNA, 19 bp, Homo sapiens
  siRNA target sequence for RTTN (NM_173630.2,3005-3023).
cctgtttccgtttttagaa

SEQ ID NO: 426788 - DNA, 19 bp, Homo sapiens
  siRNA target sequence for RTTN (NM_173630.2,3125-3143).
gatatgctgagaatagctt

SEQ ID NO: 426789 - DNA, 19 bp, Homo sapiens
  siRNA target sequence for RTTN (NM_173630.2,3156-3174).
ggtatcatgggagtgataa

SEQ ID NO: 426790 - DNA, 19 bp, Homo sapiens
  siRNA target sequence for RTTN (NM_173630.2,3157-3175).
gtatcatgggagtgataat

SEQ ID NO: 426791 - DNA, 19 bp, Homo sapiens
  siRNA target sequence for RTTN (NM_173630.2,3184-3202).
gcaaatgaactctgaaact

SEQ ID NO: 426792 - DNA, 19 bp, Homo sapiens
  siRNA target sequence for RTTN (NM_173630.2,3201-3219).
ctaaaacgcaagaaatttt

SEQ ID NO: 426793 - DNA, 19 bp, Homo sapiens
  siRNA target sequence for RTTN (NM_173630.2,3247-3265).
catcctcactctgaagata

SEQ ID NO: 426794 - DNA, 19 bp, Homo sapiens
  siRNA target sequence for RTTN (NM_173630.2,3289-3307).
ggactgcctccattccatt

SEQ ID NO: 426795 - DNA, 19 bp, Homo sapiens
  siRNA target sequence for RTTN (NM_173630.2,3294-3312).
gcctccattccattgttca

SEQ ID NO: 426796 - DNA, 19 bp, Homo sapiens
  siRNA target sequence for RTTN (NM_173630.2,3317-3335).
gcaacccacagggaagtta

SEQ ID NO: 426797 - DNA, 19 bp, Homo sapiens
  siRNA target sequence for RTTN (NM_173630.2,3342-3360).
ctgtcaccaggatgagttt

SEQ ID NO: 426798 - DNA, 19 bp, Homo sapiens
  siRNA target sequence for RTTN (NM_173630.2,3346-3364).
caccaggatgagtttttat

SEQ ID NO: 426799 - DNA, 19 bp, Homo sapiens
  siRNA target sequence for RTTN (NM_173630.2,3348-3366).
ccaggatgagtttttatct

SEQ ID NO: 426800 - DNA, 19 bp, Homo sapiens
  siRNA target sequence for RTTN (NM_173630.2,3355-3373).
gagtttttatcttctgaat

SEQ ID NO: 426801 - DNA, 19 bp, Homo sapiens
  siRNA target sequence for RTTN (NM_173630.2,3402-3420).
gtccatgtggggttacctt

SEQ ID NO: 426802 - DNA, 19 bp, Homo sapiens
  siRNA target sequence for RTTN (NM_173630.2,3432-3450).
cttggcacaccgcactaaa

SEQ ID NO: 426803 - DNA, 19 bp, Homo sapiens
  siRNA target sequence for RTTN (NM_173630.2,3441-3459).
ccgcactaaacaggttttt

SEQ ID NO: 426804 - DNA, 19 bp, Homo sapiens
  siRNA target sequence for RTTN (NM_173630.2,3442-3460).
cgcactaaacaggttttta

SEQ ID NO: 426805 - DNA, 19 bp, Homo sapiens
  siRNA target sequence for RTTN (NM_173630.2,3571-3589).
ctggattctcgaattactt

SEQ ID NO: 426806 - DNA, 19 bp, Homo sapiens
  siRNA target sequence for RTTN (NM_173630.2,3573-3591).
ggattctcgaattacttct

SEQ ID NO: 426807 - DNA, 19 bp, Homo sapiens
  siRNA target sequence for RTTN (NM_173630.2,3574-3592).
gattctcgaattacttctt

SEQ ID NO: 426808 - DNA, 19 bp, Homo sapiens
  siRNA target sequence for RTTN (NM_173630.2,3600-3618).
gtgcaaacccactgttaga

SEQ ID NO: 426809 - DNA, 19 bp, Homo sapiens
  siRNA target sequence for RTTN (NM_173630.2,3637-3655).
gtcacaggcacgagaagaa

SEQ ID NO: 426810 - DNA, 19 bp, Homo sapiens
  siRNA target sequence for RTTN (NM_173630.2,3716-3734).
gataccttgctgctcaatt

SEQ ID NO: 426811 - DNA, 19 bp, Homo sapiens
  siRNA target sequence for RTTN (NM_173630.2,3743-3761).
gttactgacaggaaatgct

SEQ ID NO: 426812 - DNA, 19 bp, Homo sapiens
  siRNA target sequence for RTTN (NM_173630.2,3753-3771).
ggaaatgctcggaacttct

SEQ ID NO: 426813 - DNA, 19 bp, Homo sapiens
  siRNA target sequence for RTTN (NM_173630.2,3759-3777).
gctcggaacttctttacgt

SEQ ID NO: 426814 - DNA, 19 bp, Homo sapiens
  siRNA target sequence for RTTN (NM_173630.2,3760-3778).
ctcggaacttctttacgtt

SEQ ID NO: 426815 - DNA, 19 bp, Homo sapiens
  siRNA target sequence for RTTN (NM_173630.2,3762-3780).
cggaacttctttacgtttt

SEQ ID NO: 426816 - DNA, 19 bp, Homo sapiens
  siRNA target sequence for RTTN (NM_173630.2,3763-3781).
ggaacttctttacgttttt

SEQ ID NO: 426817 - DNA, 19 bp, Homo sapiens
  siRNA target sequence for RTTN (NM_173630.2,3767-3785).
cttctttacgtttttcaaa

SEQ ID NO: 426818 - DNA, 19 bp, Homo sapiens
  siRNA target sequence for RTTN (NM_173630.2,3825-3843).
cggatgcgcctcatttcta

SEQ ID NO: 426819 - DNA, 19 bp, Homo sapiens
  siRNA target sequence for RTTN (NM_173630.2,3912-3930).
cacactctcctctcacaaa

SEQ ID NO: 426820 - DNA, 19 bp, Homo sapiens
  siRNA target sequence for RTTN (NM_173630.2,3938-3956).
gatatctgtgtgaagtact

SEQ ID NO: 426821 - DNA, 19 bp, Homo sapiens
  siRNA target sequence for RTTN (NM_173630.2,3962-3980).
ggtctccttgaggtcatta

SEQ ID NO: 426822 - DNA, 19 bp, Homo sapiens
  siRNA target sequence for RTTN (NM_173630.2,4015-4033).
gtccttcatgggaaaaggt

SEQ ID NO: 426823 - DNA, 19 bp, Homo sapiens
  siRNA target sequence for RTTN (NM_173630.2,4123-4141).
cttgcctttgggtagtcat

SEQ ID NO: 426824 - DNA, 19 bp, Homo sapiens
  siRNA target sequence for RTTN (NM_173630.2,4175-4193).
gcttggttgattccattat

SEQ ID NO: 426825 - DNA, 19 bp, Homo sapiens
  siRNA target sequence for RTTN (NM_173630.2,4208-4226).
ccagaggtgagattcactt

SEQ ID NO: 426826 - DNA, 19 bp, Homo sapiens
  siRNA target sequence for RTTN (NM_173630.2,4265-4283).
ggctgtgtggccttagcaa

SEQ ID NO: 426827 - DNA, 19 bp, Homo sapiens
  siRNA target sequence for RTTN (NM_173630.2,4337-4355).
ctggaccagtcagaatgta

SEQ ID NO: 426828 - DNA, 19 bp, Homo sapiens
  siRNA target sequence for RTTN (NM_173630.2,4339-4357).
ggaccagtcagaatgtagt

SEQ ID NO: 426829 - DNA, 19 bp, Homo sapiens
  siRNA target sequence for RTTN (NM_173630.2,4368-4386).
gggaggcggcatttattct

SEQ ID NO: 426830 - DNA, 19 bp, Homo sapiens
  siRNA target sequence for RTTN (NM_173630.2,4369-4387).
ggaggcggcatttattctt

SEQ ID NO: 426831 - DNA, 19 bp, Homo sapiens
  siRNA target sequence for RTTN (NM_173630.2,4390-4408).
gaatctccttgtaattcca

SEQ ID NO: 426832 - DNA, 19 bp, Homo sapiens
  siRNA target sequence for RTTN (NM_173630.2,4406-4424).
ccaatgcctacagaaatta

SEQ ID NO: 426833 - DNA, 19 bp, Homo sapiens
  siRNA target sequence for RTTN (NM_173630.2,4441-4459).
gcagggtccctgtgttcat

SEQ ID NO: 426834 - DNA, 19 bp, Homo sapiens
  siRNA target sequence for RTTN (NM_173630.2,4444-4462).
gggtccctgtgttcatgat

SEQ ID NO: 426835 - DNA, 19 bp, Homo sapiens
  siRNA target sequence for RTTN (NM_173630.2,4472-4490).
ggcctatcgctcattggaa

SEQ ID NO: 426836 - DNA, 19 bp, Homo sapiens
  siRNA target sequence for RTTN (NM_173630.2,4473-4491).
gcctatcgctcattggaaa

SEQ ID NO: 426837 - DNA, 19 bp, Homo sapiens
  siRNA target sequence for RTTN (NM_173630.2,4474-4492).
cctatcgctcattggaaaa

SEQ ID NO: 426838 - DNA, 19 bp, Homo sapiens
  siRNA target sequence for RTTN (NM_173630.2,4498-4516).
ccttcaggctcttttatat

SEQ ID NO: 426839 - DNA, 19 bp, Homo sapiens
  siRNA target sequence for RTTN (NM_173630.2,4564-4582).
cctaggacggtgtatgttt

SEQ ID NO: 426840 - DNA, 19 bp, Homo sapiens
  siRNA target sequence for RTTN (NM_173630.2,4569-4587).
gacggtgtatgtttgattt

SEQ ID NO: 426841 - DNA, 19 bp, Homo sapiens
  siRNA target sequence for RTTN (NM_173630.2,4572-4590).
ggtgtatgtttgatttgaa

SEQ ID NO: 426842 - DNA, 19 bp, Homo sapiens
  siRNA target sequence for RTTN (NM_173630.2,4634-4652).
ggtttagatgactcattca

SEQ ID NO: 426843 - DNA, 19 bp, Homo sapiens
  siRNA target sequence for RTTN (NM_173630.2,4643-4661).
gactcattcaagttttgga

SEQ ID NO: 426844 - DNA, 19 bp, Homo sapiens
  siRNA target sequence for RTTN (NM_173630.2,4684-4702).
ggatcgagatccaagttct

SEQ ID NO: 426845 - DNA, 19 bp, Homo sapiens
  siRNA target sequence for RTTN (NM_173630.2,4734-4752).
cattggggagtactgaatt

SEQ ID NO: 426846 - DNA, 19 bp, Homo sapiens
  siRNA target sequence for RTTN (NM_173630.2,4765-4783).
gcagtcaacaacacttcta

SEQ ID NO: 426847 - DNA, 19 bp, Homo sapiens
  siRNA target sequence for RTTN (NM_173630.2,4791-4809).
cctcccatgaccagtttgt

SEQ ID NO: 426848 - DNA, 19 bp, Homo sapiens
  siRNA target sequence for RTTN (NM_173630.2,4838-4856).
ccacggccacctcatgatt

SEQ ID NO: 426849 - DNA, 19 bp, Homo sapiens
  siRNA target sequence for RTTN (NM_173630.2,4980-4998).
gacaagctcatctcataga

SEQ ID NO: 426850 - DNA, 19 bp, Homo sapiens
  siRNA target sequence for RTTN (NM_173630.2,5016-5034).
cagatgctaccctcataca

SEQ ID NO: 426851 - DNA, 19 bp, Homo sapiens
  siRNA target sequence for RTTN (NM_173630.2,5018-5036).
gatgctaccctcatacaga

SEQ ID NO: 426852 - DNA, 19 bp, Homo sapiens
  siRNA target sequence for RTTN (NM_173630.2,5117-5135).
gaatacctatcctctttgt

SEQ ID NO: 426853 - DNA, 19 bp, Homo sapiens
  siRNA target sequence for RTTN (NM_173630.2,5140-5158).
gcttctgcagtcatgttta

SEQ ID NO: 426854 - DNA, 19 bp, Homo sapiens
  siRNA target sequence for RTTN (NM_173630.2,5192-5210).
cttgtgaaacctcttatca

SEQ ID NO: 426855 - DNA, 19 bp, Homo sapiens
  siRNA target sequence for RTTN (NM_173630.2,5201-5219).
cctcttatcaccaatatca

SEQ ID NO: 426856 - DNA, 19 bp, Homo sapiens
  siRNA target sequence for RTTN (NM_173630.2,5338-5356).
catcacactcccgtttgtt

SEQ ID NO: 426857 - DNA, 19 bp, Homo sapiens
  siRNA target sequence for RTTN (NM_173630.2,5377-5395).
ctggacagcggcgattgat

SEQ ID NO: 426858 - DNA, 19 bp, Homo sapiens
  siRNA target sequence for RTTN (NM_173630.2,5379-5397).
ggacagcggcgattgatat

SEQ ID NO: 426859 - DNA, 19 bp, Homo sapiens
  siRNA target sequence for RTTN (NM_173630.2,5382-5400).
cagcggcgattgatatgtt

SEQ ID NO: 426860 - DNA, 19 bp, Homo sapiens
  siRNA target sequence for RTTN (NM_173630.2,5384-5402).
gcggcgattgatatgttct

SEQ ID NO: 426861 - DNA, 19 bp, Homo sapiens
  siRNA target sequence for RTTN (NM_173630.2,5473-5491).
cttgaccgaagaagcaaaa

SEQ ID NO: 426862 - DNA, 19 bp, Homo sapiens
  siRNA target sequence for RTTN (NM_173630.2,5503-5521).
ggctaagagcaaaacacat

SEQ ID NO: 426863 - DNA, 19 bp, Homo sapiens
  siRNA target sequence for RTTN (NM_173630.2,5580-5598).
ctctagaacaacttagtga

SEQ ID NO: 426864 - DNA, 19 bp, Homo sapiens
  siRNA target sequence for RTTN (NM_173630.2,5644-5662).
gaaaagagtagctgcaaat

SEQ ID NO: 426865 - DNA, 19 bp, Homo sapiens
  siRNA target sequence for RTTN (NM_173630.2,5649-5667).
gagtagctgcaaatgcatt

SEQ ID NO: 426866 - DNA, 19 bp, Homo sapiens
  siRNA target sequence for RTTN (NM_173630.2,5708-5726).
gctttgaaagccaatctta

SEQ ID NO: 426867 - DNA, 19 bp, Homo sapiens
  siRNA target sequence for RTTN (NM_173630.2,5709-5727).
ctttgaaagccaatcttat

SEQ ID NO: 426868 - DNA, 19 bp, Homo sapiens
  siRNA target sequence for RTTN (NM_173630.2,5762-5780).
gcacaactgaacctagatt

SEQ ID NO: 426869 - DNA, 19 bp, Homo sapiens
  siRNA target sequence for RTTN (NM_173630.2,5846-5864).
gccatgcagctcctaagaa

SEQ ID NO: 426870 - DNA, 19 bp, Homo sapiens
  siRNA target sequence for RTTN (NM_173630.2,5847-5865).
ccatgcagctcctaagaaa

SEQ ID NO: 426871 - DNA, 19 bp, Homo sapiens
  siRNA target sequence for RTTN (NM_173630.2,5983-6001).
gcagctcctttgtgtctat

SEQ ID NO: 426872 - DNA, 19 bp, Homo sapiens
  siRNA target sequence for RTTN (NM_173630.2,6020-6038).
ggttgcagttctctttgtt

SEQ ID NO: 426873 - DNA, 19 bp, Homo sapiens
  siRNA target sequence for RTTN (NM_173630.2,6058-6076).
ccctgttcaagctacacat

SEQ ID NO: 426874 - DNA, 19 bp, Homo sapiens
  siRNA target sequence for RTTN (NM_173630.2,6150-6168).
cggttcagcagatggtttt

SEQ ID NO: 426875 - DNA, 19 bp, Homo sapiens
  siRNA target sequence for RTTN (NM_173630.2,6189-6207).
ccttgtcgcatgactgtaa

SEQ ID NO: 426876 - DNA, 19 bp, Homo sapiens
  siRNA target sequence for RTTN (NM_173630.2,6190-6208).
cttgtcgcatgactgtaaa

SEQ ID NO: 426877 - DNA, 19 bp, Homo sapiens
  siRNA target sequence for RTTN (NM_173630.2,6193-6211).
gtcgcatgactgtaaagga

SEQ ID NO: 426878 - DNA, 19 bp, Homo sapiens
  siRNA target sequence for RTTN (NM_173630.2,6209-6227).
ggagtaattcagaagagta

SEQ ID NO: 426879 - DNA, 19 bp, Homo sapiens
  siRNA target sequence for RTTN (NM_173630.2,6212-6230).
gtaattcagaagagtaact

SEQ ID NO: 426880 - DNA, 19 bp, Homo sapiens
  siRNA target sequence for RTTN (NM_173630.2,6307-6325).
gaagttactcctgaatata

SEQ ID NO: 426881 - DNA, 19 bp, Homo sapiens
  siRNA target sequence for RTTN (NM_173630.2,6310-6328).
gttactcctgaatatatca

SEQ ID NO: 426882 - DNA, 19 bp, Homo sapiens
  siRNA target sequence for RTTN (NM_173630.2,6341-6359).
gggcaacaaatgattctga

SEQ ID NO: 426883 - DNA, 19 bp, Homo sapiens
  siRNA target sequence for RTTN (NM_173630.2,6368-6386).
ggctgtctagacttactaa

SEQ ID NO: 426884 - DNA, 19 bp, Homo sapiens
  siRNA target sequence for RTTN (NM_173630.2,6370-6388).
ctgtctagacttactaaca

SEQ ID NO: 426885 - DNA, 19 bp, Homo sapiens
  siRNA target sequence for RTTN (NM_173630.2,6372-6390).
gtctagacttactaacaga

SEQ ID NO: 426886 - DNA, 19 bp, Homo sapiens
  siRNA target sequence for RTTN (NM_173630.2,6474-6492).
ccaagatcctggctaatga

SEQ ID NO: 426887 - DNA, 19 bp, Homo sapiens
  siRNA target sequence for RTTN (NM_173630.2,6570-6588).
gggctctgatttacaatta

SEQ ID NO: 426888 - DNA, 19 bp, Homo sapiens
  siRNA target sequence for RTTN (NM_173630.2,6571-6589).
ggctctgatttacaattat

SEQ ID NO: 426889 - DNA, 19 bp, Homo sapiens
  siRNA target sequence for RTTN (NM_173630.2,6575-6593).
ctgatttacaattatcaga

SEQ ID NO: 426890 - DNA, 19 bp, Homo sapiens
  siRNA target sequence for RTTN (NM_173630.2,6724-6742).
cctcgtgcagctccttaat

SEQ ID NO: 426891 - DNA, 19 bp, Homo sapiens
  siRNA target sequence for RTTN (NM_173630.2,6728-6746).
gtgcagctccttaattctt

SEQ ID NO: 426892 - DNA, 19 bp, Homo sapiens
  siRNA target sequence for FLJ38288 (NM_173632.2,47-65).
cctgacacttatatcttct

SEQ ID NO: 426893 - DNA, 19 bp, Homo sapiens
  siRNA target sequence for FLJ38288 (NM_173632.2,50-68).
gacacttatatcttctcta

SEQ ID NO: 426894 - DNA, 19 bp, Homo sapiens
  siRNA target sequence for FLJ38288 (NM_173632.2,196-214).
gccctctcctgggagatat

SEQ ID NO: 426895 - DNA, 19 bp, Homo sapiens
  siRNA target sequence for FLJ38288 (NM_173632.2,221-239).
ccagggaacacaacacaat

SEQ ID NO: 426896 - DNA, 19 bp, Homo sapiens
  siRNA target sequence for FLJ38288 (NM_173632.2,252-270).
gggtttggggcatatgaaa

SEQ ID NO: 426897 - DNA, 19 bp, Homo sapiens
  siRNA target sequence for FLJ38288 (NM_173632.2,253-271).
ggtttggggcatatgaaaa

SEQ ID NO: 426898 - DNA, 19 bp, Homo sapiens
  siRNA target sequence for FLJ38288 (NM_173632.2,326-344).
gaaatcgtacagaagcaat

SEQ ID NO: 426899 - DNA, 19 bp, Homo sapiens
  siRNA target sequence for FLJ38288 (NM_173632.2,341-359).
caatgccaagggaacatct

SEQ ID NO: 426900 - DNA, 19 bp, Homo sapiens
  siRNA target sequence for FLJ38288 (NM_173632.2,408-426).
catgaggttgggaaagact

SEQ ID NO: 426901 - DNA, 19 bp, Homo sapiens
  siRNA target sequence for FLJ38288 (NM_173632.2,547-565).
ccacaataccgtttagcaa

SEQ ID NO: 426902 - DNA, 19 bp, Homo sapiens
  siRNA target sequence for FLJ38288 (NM_173632.2,555-573).
ccgtttagcaacaaacact

SEQ ID NO: 426903 - DNA, 19 bp, Homo sapiens
  siRNA target sequence for FLJ38288 (NM_173632.2,674-692).
gggagttcgcactggaaaa

SEQ ID NO: 426904 - DNA, 19 bp, Homo sapiens
  siRNA target sequence for FLJ38288 (NM_173632.2,708-726).
ggacaatgtgatgaatcat

SEQ ID NO: 426905 - DNA, 19 bp, Homo sapiens
  siRNA target sequence for FLJ38288 (NM_173632.2,709-727).
gacaatgtgatgaatcatt

SEQ ID NO: 426906 - DNA, 19 bp, Homo sapiens
  siRNA target sequence for FLJ38288 (NM_173632.2,1045-1063).
cggcatgtgggaagttatt

SEQ ID NO: 426907 - DNA, 19 bp, Homo sapiens
  siRNA target sequence for FLJ38288 (NM_173632.2,1066-1084).
ggagcaactcccacctaaa

SEQ ID NO: 426908 - DNA, 19 bp, Homo sapiens
  siRNA target sequence for FLJ90805 (NM_173633.1,604-622).
cttgttactttggatattt

SEQ ID NO: 426909 - DNA, 19 bp, Homo sapiens
  siRNA target sequence for FLJ90805 (NM_173633.1,641-659).
gctccacacaacttataaa

SEQ ID NO: 426910 - DNA, 19 bp, Homo sapiens
  siRNA target sequence for FLJ90805 (NM_173633.1,687-705).
gtcctgagcctcctatttt

SEQ ID NO: 426911 - DNA, 19 bp, Homo sapiens
  siRNA target sequence for FLJ90805 (NM_173633.1,710-728).
catctactggggtcaatat

SEQ ID NO: 426912 - DNA, 19 bp, Homo sapiens
  siRNA target sequence for FLJ90805 (NM_173633.1,745-763).
gcaacgagagtgtgaagat

SEQ ID NO: 426913 - DNA, 19 bp, Homo sapiens
  siRNA target sequence for FLJ90805 (NM_173633.1,960-978).
gtactgtacacgtatgagt

SEQ ID NO: 426914 - DNA, 19 bp, Homo sapiens
  siRNA target sequence for FLJ90805 (NM_173633.1,1224-1242).
ggcgtgtttctgatcatga

SEQ ID NO: 426915 - DNA, 19 bp, Homo sapiens
  siRNA target sequence for FLJ90805 (NM_173633.1,1368-1386).
gggaacgtgacgtttatca

SEQ ID NO: 426916 - DNA, 19 bp, Homo sapiens
  siRNA target sequence for FLJ40235 (NM_173635.1,585-603).
caccatcagcctaactgaa

SEQ ID NO: 426917 - DNA, 19 bp, Homo sapiens
  siRNA target sequence for FLJ40235 (NM_173635.1,726-744).
gatccagggtgctatctat

SEQ ID NO: 426918 - DNA, 19 bp, Homo sapiens
  siRNA target sequence for FLJ40235 (NM_173635.1,737-755).
ctatctatgcgggaattgt

SEQ ID NO: 426919 - DNA, 19 bp, Homo sapiens
  siRNA target sequence for FLJ40235 (NM_173635.1,741-759).
ctatgcgggaattgtaatt

SEQ ID NO: 426920 - DNA, 19 bp, Homo sapiens
  siRNA target sequence for FLJ40235 (NM_173635.1,783-801).
ccctctcatagtgaaacat

SEQ ID NO: 426921 - DNA, 19 bp, Homo sapiens
  siRNA target sequence for FLJ40235 (NM_173635.1,784-802).
cctctcatagtgaaacata

SEQ ID NO: 426922 - DNA, 19 bp, Homo sapiens
  siRNA target sequence for FLJ40235 (NM_173635.1,789-807).
catagtgaaacatatcaga

SEQ ID NO: 426923 - DNA, 19 bp, Homo sapiens
  siRNA target sequence for FLJ40235 (NM_173635.1,829-847).
gcagcgatcagagcaaaaa

SEQ ID NO: 426924 - DNA, 19 bp, Homo sapiens
  siRNA target sequence for FLJ40235 (NM_173635.1,861-879).
cagagcaagccaagaactt

SEQ ID NO: 426925 - DNA, 19 bp, Homo sapiens
  siRNA target sequence for FLJ40235 (NM_173635.1,913-931).
cccgtagtcgccacatttt

SEQ ID NO: 426926 - DNA, 19 bp, Homo sapiens
  siRNA target sequence for FLJ40235 (NM_173635.1,915-933).
cgtagtcgccacattttct

SEQ ID NO: 426927 - DNA, 19 bp, Homo sapiens
  siRNA target sequence for FLJ40235 (NM_173635.1,938-956).
gccggatattggaaaagca

SEQ ID NO: 426928 - DNA, 19 bp, Homo sapiens
  siRNA target sequence for FLJ33298 (NM_173636.1,1250-1268).
gatgtcaaggacatcaata

SEQ ID NO: 426929 - DNA, 19 bp, Homo sapiens
  siRNA target sequence for FLJ35976 (NM_173639.1,332-350).
gcagccgtcagcttgtcaa

SEQ ID NO: 426930 - DNA, 19 bp, Homo sapiens
  siRNA target sequence for FLJ40906 (NM_173640.1,301-319).
gctcacccaagctgttcat

SEQ ID NO: 426931 - DNA, 19 bp, Homo sapiens
  siRNA target sequence for FLJ40906 (NM_173640.1,444-462).
gcctgcttcagccataact

SEQ ID NO: 426932 - DNA, 19 bp, Homo sapiens
  siRNA target sequence for FLJ40906 (NM_173640.1,445-463).
cctgcttcagccataactt

SEQ ID NO: 426933 - DNA, 19 bp, Homo sapiens
  siRNA target sequence for FLJ40906 (NM_173640.1,562-580).
gtagtcctgcgcaatgtga

SEQ ID NO: 426934 - DNA, 19 bp, Homo sapiens
  siRNA target sequence for DKFZp547G0215 (NM_173643.1,913-931).
ccttgaagaagttatacca

SEQ ID NO: 426935 - DNA, 19 bp, Homo sapiens
  siRNA target sequence for DKFZp547G0215 (NM_173643.1,923-941).
gttataccatactcaaaat

SEQ ID NO: 426936 - DNA, 19 bp, Homo sapiens
  siRNA target sequence for DKFZp547G0215 (NM_173643.1,1050-1068).
cccagcaagtgtaatgata

SEQ ID NO: 426937 - DNA, 19 bp, Homo sapiens
  siRNA target sequence for DKFZp547G0215 (NM_173643.1,1054-1072).
gcaagtgtaatgatagtga

SEQ ID NO: 426938 - DNA, 19 bp, Homo sapiens
  siRNA target sequence for DKFZp547G0215 (NM_173643.1,1060-1078).
gtaatgatagtgaaagagt

SEQ ID NO: 426939 - DNA, 19 bp, Homo sapiens
  siRNA target sequence for DKFZp547G0215 (NM_173643.1,1101-1119).
cccaatcagagaattaaaa

SEQ ID NO: 426940 - DNA, 19 bp, Homo sapiens
  siRNA target sequence for FLJ33860 (NM_173644.1,375-393).
gtgtcaacacttcaaacaa

SEQ ID NO: 426941 - DNA, 19 bp, Homo sapiens
  siRNA target sequence for FLJ33860 (NM_173644.1,377-395).
gtcaacacttcaaacaaca

SEQ ID NO: 426942 - DNA, 19 bp, Homo sapiens
  siRNA target sequence for FLJ33860 (NM_173644.1,603-621).
gcaaagttctgcaccaaat

SEQ ID NO: 426943 - DNA, 19 bp, Homo sapiens
  siRNA target sequence for FLJ33860 (NM_173644.1,604-622).
caaagttctgcaccaaata

SEQ ID NO: 426944 - DNA, 19 bp, Homo sapiens
  siRNA target sequence for FLJ33860 (NM_173644.1,648-666).
gccatgtttccaaaaccta

SEQ ID NO: 426945 - DNA, 19 bp, Homo sapiens
  siRNA target sequence for FLJ37357 (NM_173645.1,655-673).
gaggctgacgtgctttatt

SEQ ID NO: 426946 - DNA, 19 bp, Homo sapiens
  siRNA target sequence for FLJ37357 (NM_173645.1,658-676).
gctgacgtgctttattcgt

SEQ ID NO: 426947 - DNA, 19 bp, Homo sapiens
  siRNA target sequence for FLJ37357 (NM_173645.1,666-684).
gctttattcgtctaaacga

SEQ ID NO: 426948 - DNA, 19 bp, Homo sapiens
  siRNA target sequence for FLJ37357 (NM_173645.1,674-692).
cgtctaaacgactatctaa

SEQ ID NO: 426949 - DNA, 19 bp, Homo sapiens
  siRNA target sequence for FLJ37357 (NM_173645.1,706-724).
gcacatcttaacggtaaat

SEQ ID NO: 426950 - DNA, 19 bp, Homo sapiens
  siRNA target sequence for FLJ37357 (NM_173645.1,709-727).
catcttaacggtaaatgct

SEQ ID NO: 426951 - DNA, 19 bp, Homo sapiens
  siRNA target sequence for FLJ37357 (NM_173645.1,814-832).
gcctgaagtccctgataaa

SEQ ID NO: 426952 - DNA, 19 bp, Homo sapiens
  siRNA target sequence for FLJ37357 (NM_173645.1,883-901).
catgtttctcacagaacta

SEQ ID NO: 426953 - DNA, 19 bp, Homo sapiens
  siRNA target sequence for FLJ37357 (NM_173645.1,890-908).
ctcacagaactaatgttga

SEQ ID NO: 426954 - DNA, 19 bp, Homo sapiens
  siRNA target sequence for FLJ37357 (NM_173645.1,957-975).
gtattttgggtgcagttaa

SEQ ID NO: 426955 - DNA, 19 bp, Homo sapiens
  siRNA target sequence for FLJ37357 (NM_173645.1,971-989).
gttaatcactgtcaaaaca

SEQ ID NO: 426956 - DNA, 19 bp, Homo sapiens
  siRNA target sequence for FLJ37357 (NM_173645.1,1010-1028).
ctcgtgcctgattcgtatt

SEQ ID NO: 426957 - DNA, 19 bp, Homo sapiens
  siRNA target sequence for FLJ37357 (NM_173645.1,1012-1030).
cgtgcctgattcgtatttt

SEQ ID NO: 426958 - DNA, 19 bp, Homo sapiens
  siRNA target sequence for FLJ37357 (NM_173645.1,1044-1062).
gcccttatattaacaacaa

SEQ ID NO: 426959 - DNA, 19 bp, Homo sapiens
  siRNA target sequence for FLJ37357 (NM_173645.1,1080-1098).
gtggaactgggccaagttt

SEQ ID NO: 426960 - DNA, 19 bp, Homo sapiens
  siRNA target sequence for FLJ37357 (NM_173645.1,1115-1133).
gatgataagaattttcaca

SEQ ID NO: 426961 - DNA, 19 bp, Homo sapiens
  siRNA target sequence for FLJ37357 (NM_173645.1,1186-1204).
catctatgcagctaccttt

SEQ ID NO: 426962 - DNA, 19 bp, Homo sapiens
  siRNA target sequence for FLJ37357 (NM_173645.1,1189-1207).
ctatgcagctacctttgaa

SEQ ID NO: 426963 - DNA, 19 bp, Homo sapiens
  siRNA target sequence for FLJ37357 (NM_173645.1,1193-1211).
gcagctacctttgaaaagt

SEQ ID NO: 426964 - DNA, 19 bp, Homo sapiens
  siRNA target sequence for FLJ37357 (NM_173645.1,1194-1212).
cagctacctttgaaaagtt

SEQ ID NO: 426965 - DNA, 19 bp, Homo sapiens
  siRNA target sequence for FLJ37357 (NM_173645.1,1344-1362).
ccaccagaaatgtaggatt

SEQ ID NO: 426966 - DNA, 19 bp, Homo sapiens
  siRNA target sequence for FLJ37357 (NM_173645.1,1416-1434).
gatgcttagaggtgctaaa

SEQ ID NO: 426967 - DNA, 19 bp, Homo sapiens
  siRNA target sequence for FLJ37357 (NM_173645.1,1486-1504).
ggcacaagatgcagagtat

SEQ ID NO: 426968 - DNA, 19 bp, Homo sapiens
  siRNA target sequence for FLJ37357 (NM_173645.1,1487-1505).
gcacaagatgcagagtata

SEQ ID NO: 426969 - DNA, 19 bp, Homo sapiens
  siRNA target sequence for FLJ37357 (NM_173645.1,1511-1529).
gagtttgttccaactacta

SEQ ID NO: 426970 - DNA, 19 bp, Homo sapiens
  siRNA target sequence for FLJ37357 (NM_173645.1,1520-1538).
ccaactactaccacagaat

SEQ ID NO: 426971 - DNA, 19 bp, Homo sapiens
  siRNA target sequence for FLJ37357 (NM_173645.1,1535-1553).
gaatatgttcatagcttat

SEQ ID NO: 426972 - DNA, 19 bp, Homo sapiens
  siRNA target sequence for FLJ37357 (NM_173645.1,1595-1613).
gatgaggggaatatagtga

SEQ ID NO: 426973 - DNA, 19 bp, Homo sapiens
  siRNA target sequence for FLJ37357 (NM_173645.1,1601-1619).
gggaatatagtgactcaaa

SEQ ID NO: 426974 - DNA, 19 bp, Homo sapiens
  siRNA target sequence for FLJ37357 (NM_173645.1,1651-1669).
cacacctcctgaagacttt

SEQ ID NO: 426975 - DNA, 19 bp, Homo sapiens
  siRNA target sequence for FLJ37357 (NM_173645.1,1706-1724).
gttcggaatgccattgata

SEQ ID NO: 426976 - DNA, 19 bp, Homo sapiens
  siRNA target sequence for FLJ37357 (NM_173645.1,1730-1748).
gtgggtgatagagaatcaa

SEQ ID NO: 426977 - DNA, 19 bp, Homo sapiens
  siRNA target sequence for FLJ37357 (NM_173645.1,1798-1816).
caacgaagtgaatgaagta

SEQ ID NO: 426978 - DNA, 19 bp, Homo sapiens
  siRNA target sequence for FLJ39660 (NM_173646.1,147-165).
ggtacatatggaaactaca

SEQ ID NO: 426979 - DNA, 19 bp, Homo sapiens
  siRNA target sequence for FLJ39660 (NM_173646.1,234-252).
gcaaaggatgagaatagtt

SEQ ID NO: 426980 - DNA, 19 bp, Homo sapiens
  siRNA target sequence for FLJ39660 (NM_173646.1,269-287).
cactgagggatgacctaat

SEQ ID NO: 426981 - DNA, 19 bp, Homo sapiens
  siRNA target sequence for FLJ39660 (NM_173646.1,271-289).
ctgagggatgacctaataa

SEQ ID NO: 426982 - DNA, 19 bp, Homo sapiens
  siRNA target sequence for FLJ39660 (NM_173646.1,351-369).
cagccagaaagtcattagt

SEQ ID NO: 426983 - DNA, 19 bp, Homo sapiens
  siRNA target sequence for FLJ39660 (NM_173646.1,427-445).
gagtttctggtaaatcgaa

SEQ ID NO: 426984 - DNA, 19 bp, Homo sapiens
  siRNA target sequence for FLJ39660 (NM_173646.1,442-460).
cgaatgtgccgtcttgaaa

SEQ ID NO: 426985 - DNA, 19 bp, Homo sapiens
  siRNA target sequence for FLJ39660 (NM_173646.1,463-481).
ctcatgcagtccttgaaga

SEQ ID NO: 426986 - DNA, 19 bp, Homo sapiens
  siRNA target sequence for FLJ39660 (NM_173646.1,489-507).
ctttcggctgcaaactgaa

SEQ ID NO: 426987 - DNA, 19 bp, Homo sapiens
  siRNA target sequence for FLJ39660 (NM_173646.1,589-607).
ctgttgcatctcgaagtta

SEQ ID NO: 426988 - DNA, 19 bp, Homo sapiens
  siRNA target sequence for FLJ39660 (NM_173646.1,594-612).
gcatctcgaagttatgaat

SEQ ID NO: 426989 - DNA, 19 bp, Homo sapiens
  siRNA target sequence for FLJ39660 (NM_173646.1,595-613).
catctcgaagttatgaatt

SEQ ID NO: 426990 - DNA, 19 bp, Homo sapiens
  siRNA target sequence for FLJ39660 (NM_173646.1,621-639).
gcaactgagagctgtaaaa

SEQ ID NO: 426991 - DNA, 19 bp, Homo sapiens
  siRNA target sequence for FLJ39660 (NM_173646.1,741-759).
gaagaccacaaaacgtaaa

SEQ ID NO: 426992 - DNA, 19 bp, Homo sapiens
  siRNA target sequence for FLJ39660 (NM_173646.1,811-829).
cttagggaatctttagaga

SEQ ID NO: 426993 - DNA, 19 bp, Homo sapiens
  siRNA target sequence for FLJ39660 (NM_173646.1,842-860).
ccatgctcctcaaaataca

SEQ ID NO: 426994 - DNA, 19 bp, Homo sapiens
  siRNA target sequence for FLJ39660 (NM_173646.1,843-861).
catgctcctcaaaatacaa

SEQ ID NO: 426995 - DNA, 19 bp, Homo sapiens
  siRNA target sequence for FLJ39660 (NM_173646.1,875-893).
cagtggaggtagaacgaaa

SEQ ID NO: 426996 - DNA, 19 bp, Homo sapiens
  siRNA target sequence for FLJ39660 (NM_173646.1,889-907).
cgaaaacaggtgcacattt

SEQ ID NO: 426997 - DNA, 19 bp, Homo sapiens
  siRNA target sequence for FLJ39660 (NM_173646.1,926-944).
ctctacgtgattctataca

SEQ ID NO: 426998 - DNA, 19 bp, Homo sapiens
  siRNA target sequence for FLJ39502 (NM_173648.2,202-220).
gggcttgagttccttaatt

SEQ ID NO: 426999 - DNA, 19 bp, Homo sapiens
  siRNA target sequence for FLJ39502 (NM_173648.2,204-222).
gcttgagttccttaattta

SEQ ID NO: 427000 - DNA, 19 bp, Homo sapiens
  siRNA target sequence for FLJ39502 (NM_173648.2,233-251).
caaaagagaacgagatatt

SEQ ID NO: 427001 - DNA, 19 bp, Homo sapiens
  siRNA target sequence for FLJ39502 (NM_173648.2,243-261).
cgagatattagatgtgaaa

SEQ ID NO: 427002 - DNA, 19 bp, Homo sapiens
  siRNA target sequence for FLJ39502 (NM_173648.2,265-283).
gaagtgtacctcatgaaga

SEQ ID NO: 427003 - DNA, 19 bp, Homo sapiens
  siRNA target sequence for FLJ39502 (NM_173648.2,389-407).
cattcaaagagcaacttaa

SEQ ID NO: 427004 - DNA, 19 bp, Homo sapiens
  siRNA target sequence for FLJ39502 (NM_173648.2,473-491).
gagggagcctccagttcat

SEQ ID NO: 427005 - DNA, 19 bp, Homo sapiens
  siRNA target sequence for FLJ39502 (NM_173648.2,496-514).
gatctacgacaaaaatgga

SEQ ID NO: 427006 - DNA, 19 bp, Homo sapiens
  siRNA target sequence for FLJ39502 (NM_173648.2,556-574).
cagtacattatgaaagaat

SEQ ID NO: 427007 - DNA, 19 bp, Homo sapiens
  siRNA target sequence for FLJ39502 (NM_173648.2,590-608).
gcagaggagcccctgtaaa

SEQ ID NO: 427008 - DNA, 19 bp, Homo sapiens
  siRNA target sequence for FLJ39502 (NM_173648.2,591-609).
cagaggagcccctgtaaaa

SEQ ID NO: 427009 - DNA, 19 bp, Homo sapiens
  siRNA target sequence for FLJ39502 (NM_173648.2,729-747).
gggacgtctcatcaaatca

SEQ ID NO: 427010 - DNA, 19 bp, Homo sapiens
  siRNA target sequence for FLJ39502 (NM_173648.2,730-748).
ggacgtctcatcaaatcaa

SEQ ID NO: 427011 - DNA, 19 bp, Homo sapiens
  siRNA target sequence for FLJ39502 (NM_173648.2,791-809).
cccatgatgtgcagattca

SEQ ID NO: 427012 - DNA, 19 bp, Homo sapiens
  siRNA target sequence for FLJ39502 (NM_173648.2,869-887).
ccttaggagtcgacatcat

SEQ ID NO: 427013 - DNA, 19 bp, Homo sapiens
  siRNA target sequence for FLJ39502 (NM_173648.2,874-892).
ggagtcgacatcatctcat

SEQ ID NO: 427014 - DNA, 19 bp, Homo sapiens
  siRNA target sequence for FLJ39502 (NM_173648.2,900-918).
gcggcctcactgctctaat

SEQ ID NO: 427015 - DNA, 19 bp, Homo sapiens
  siRNA target sequence for FLJ39502 (NM_173648.2,903-921).
gcctcactgctctaatgtt

SEQ ID NO: 427016 - DNA, 19 bp, Homo sapiens
  siRNA target sequence for FLJ39502 (NM_173648.2,904-922).
cctcactgctctaatgttt

SEQ ID NO: 427017 - DNA, 19 bp, Homo sapiens
  siRNA target sequence for FLJ39502 (NM_173648.2,1033-1051).
gccatgagagacgagataa

SEQ ID NO: 427018 - DNA, 19 bp, Homo sapiens
  siRNA target sequence for FLJ39502 (NM_173648.2,1054-1072).
gagctcaaagactcattca

SEQ ID NO: 427019 - DNA, 19 bp, Homo sapiens
  siRNA target sequence for FLJ39502 (NM_173648.2,1143-1161).
gaaggcgcttaaatatcaa

SEQ ID NO: 427020 - DNA, 19 bp, Homo sapiens
  siRNA target sequence for FLJ39502 (NM_173648.2,1146-1164).
ggcgcttaaatatcaaatt

SEQ ID NO: 427021 - DNA, 19 bp, Homo sapiens
  siRNA target sequence for FLJ39502 (NM_173648.2,1148-1166).
cgcttaaatatcaaattca

SEQ ID NO: 427022 - DNA, 19 bp, Homo sapiens
  siRNA target sequence for FLJ39502 (NM_173648.2,1215-1233).
ggaaaaagttagtaataaa

SEQ ID NO: 427023 - DNA, 19 bp, Homo sapiens
  siRNA target sequence for FLJ39502 (NM_173648.2,1330-1348).
gttgtgacagattacaaga

SEQ ID NO: 427024 - DNA, 19 bp, Homo sapiens
  siRNA target sequence for FLJ39502 (NM_173648.2,1383-1401).
gatagaagagtgtcatttt

SEQ ID NO: 427025 - DNA, 19 bp, Homo sapiens
  siRNA target sequence for FLJ39502 (NM_173648.2,1448-1466).
ccacagagtgcaagacaaa

SEQ ID NO: 427026 - DNA, 19 bp, Homo sapiens
  siRNA target sequence for FLJ39502 (NM_173648.2,1555-1573).
gaccttgctcagcacttat

SEQ ID NO: 427027 - DNA, 19 bp, Homo sapiens
  siRNA target sequence for FLJ39502 (NM_173648.2,1557-1575).
ccttgctcagcacttatat

SEQ ID NO: 427028 - DNA, 19 bp, Homo sapiens
  siRNA target sequence for FLJ39502 (NM_173648.2,1561-1579).
gctcagcacttatatggtt

SEQ ID NO: 427029 - DNA, 19 bp, Homo sapiens
  siRNA target sequence for FLJ39502 (NM_173648.2,1732-1750).
cattatgattacattgact

SEQ ID NO: 427030 - DNA, 19 bp, Homo sapiens
  siRNA target sequence for FLJ39502 (NM_173648.2,1738-1756).
gattacattgacttgctaa

SEQ ID NO: 427031 - DNA, 19 bp, Homo sapiens
  siRNA target sequence for FLJ39502 (NM_173648.2,1955-1973).
gtgtctcacctgatgacat

SEQ ID NO: 427032 - DNA, 19 bp, Homo sapiens
  siRNA target sequence for FLJ39502 (NM_173648.2,2056-2074).
ctcagccttcacataagca

SEQ ID NO: 427033 - DNA, 19 bp, Homo sapiens
  siRNA target sequence for FLJ39502 (NM_173648.2,2145-2163).
ctttgcggatgcatgcaat

SEQ ID NO: 427034 - DNA, 19 bp, Homo sapiens
  siRNA target sequence for FLJ39502 (NM_173648.2,2149-2167).
gcggatgcatgcaatgata

SEQ ID NO: 427035 - DNA, 19 bp, Homo sapiens
  siRNA target sequence for FLJ39502 (NM_173648.2,2198-2216).
ggccttacctccagttcaa

SEQ ID NO: 427036 - DNA, 19 bp, Homo sapiens
  siRNA target sequence for FLJ39502 (NM_173648.2,2199-2217).
gccttacctccagttcaaa

SEQ ID NO: 427037 - DNA, 19 bp, Homo sapiens
  siRNA target sequence for FLJ39502 (NM_173648.2,2237-2255).
ccagaggattcgtggaaaa

SEQ ID NO: 427038 - DNA, 19 bp, Homo sapiens
  siRNA target sequence for FLJ39502 (NM_173648.2,2258-2276).
gtactgccttacacagaat

SEQ ID NO: 427039 - DNA, 19 bp, Homo sapiens
  siRNA target sequence for FLJ39502 (NM_173648.2,2271-2289).
cagaatcagtgctgaacat

SEQ ID NO: 427040 - DNA, 19 bp, Homo sapiens
  siRNA target sequence for FLJ39502 (NM_173648.2,2343-2361).
ggctcagggtggtttgcta

SEQ ID NO: 427041 - DNA, 19 bp, Homo sapiens
  siRNA target sequence for FLJ39502 (NM_173648.2,2359-2377).
ctagaaacacgggagaaaa

SEQ ID NO: 427042 - DNA, 19 bp, Homo sapiens
  siRNA target sequence for FLJ39502 (NM_173648.2,2439-2457).
ctcgggcctcaggtttcaa

SEQ ID NO: 427043 - DNA, 19 bp, Homo sapiens
  siRNA target sequence for FLJ39502 (NM_173648.2,2475-2493).
ctatcagaggcaaatggtt

SEQ ID NO: 427044 - DNA, 19 bp, Homo sapiens
  siRNA target sequence for FLJ39502 (NM_173648.2,2548-2566).
gaccaggcacctaatttct

SEQ ID NO: 427045 - DNA, 19 bp, Homo sapiens
  siRNA target sequence for FLJ39502 (NM_173648.2,2571-2589).
gctcctgtctaatgtaact

SEQ ID NO: 427046 - DNA, 19 bp, Homo sapiens
  siRNA target sequence for FLJ39502 (NM_173648.2,2654-2672).
catggtgggtagcctataa

SEQ ID NO: 427047 - DNA, 19 bp, Homo sapiens
  siRNA target sequence for FLJ39502 (NM_173648.2,2657-2675).
ggtgggtagcctataatga

SEQ ID NO: 427048 - DNA, 19 bp, Homo sapiens
  siRNA target sequence for FLJ39502 (NM_173648.2,2660-2678).
gggtagcctataatgacaa

SEQ ID NO: 427049 - DNA, 19 bp, Homo sapiens
  siRNA target sequence for FLJ40172 (NM_173649.1,57-75).
caccgcttccacctcaata

SEQ ID NO: 427050 - DNA, 19 bp, Homo sapiens
  siRNA target sequence for FLJ40172 (NM_173649.1,84-102).
cctggtgggtggagaatca

SEQ ID NO: 427051 - DNA, 19 bp, Homo sapiens
  siRNA target sequence for FLJ40172 (NM_173649.1,85-103).
ctggtgggtggagaatcat

SEQ ID NO: 427052 - DNA, 19 bp, Homo sapiens
  siRNA target sequence for FLJ40172 (NM_173649.1,88-106).
gtgggtggagaatcattca

SEQ ID NO: 427053 - DNA, 19 bp, Homo sapiens
  siRNA target sequence for FLJ40172 (NM_173649.1,91-109).
ggtggagaatcattcatca

SEQ ID NO: 427054 - DNA, 19 bp, Homo sapiens
  siRNA target sequence for FLJ40172 (NM_173649.1,155-173).
gatggtggagaatagcatt

SEQ ID NO: 427055 - DNA, 19 bp, Homo sapiens
  siRNA target sequence for FLJ40172 (NM_173649.1,161-179).
ggagaatagcattaacaga

SEQ ID NO: 427056 - DNA, 19 bp, Homo sapiens
  siRNA target sequence for FLJ40172 (NM_173649.1,191-209).
ctggcacttaccacttgaa

SEQ ID NO: 427057 - DNA, 19 bp, Homo sapiens
  siRNA target sequence for FLJ40172 (NM_173649.1,228-246).
cctattaaatccagtgata

SEQ ID NO: 427058 - DNA, 19 bp, Homo sapiens
  siRNA target sequence for FLJ40172 (NM_173649.1,241-259).
gtgatagcaacctacaatt

SEQ ID NO: 427059 - DNA, 19 bp, Homo sapiens
  siRNA target sequence for FLJ40172 (NM_173649.1,283-301).
ccacctcttgtgcaaagaa

SEQ ID NO: 427060 - DNA, 19 bp, Homo sapiens
  siRNA target sequence for FLJ40172 (NM_173649.1,299-317).
gaaacaatccagtcctaaa

SEQ ID NO: 427061 - DNA, 19 bp, Homo sapiens
  siRNA target sequence for FLJ40172 (NM_173649.1,374-392).
ctacttactcattcaaaga

SEQ ID NO: 427062 - DNA, 19 bp, Homo sapiens
  siRNA target sequence for FLJ40172 (NM_173649.1,413-431).
gcacactagttgacaaaga

SEQ ID NO: 427063 - DNA, 19 bp, Homo sapiens
  siRNA target sequence for FLJ40172 (NM_173649.1,416-434).
cactagttgacaaagatca

SEQ ID NO: 427064 - DNA, 19 bp, Homo sapiens
  siRNA target sequence for FLJ40172 (NM_173649.1,473-491).
ctgcaccagttcccaaata

SEQ ID NO: 427065 - DNA, 19 bp, Homo sapiens
  siRNA target sequence for FLJ34780 (NM_173651.1,82-100).
gaacaacgcctattcctaa

SEQ ID NO: 427066 - DNA, 19 bp, Homo sapiens
  siRNA target sequence for FLJ34780 (NM_173651.1,88-106).
cgcctattcctaatggata

SEQ ID NO: 427067 - DNA, 19 bp, Homo sapiens
  siRNA target sequence for FLJ34780 (NM_173651.1,300-318).
gaaaaaaatggcttatcat

SEQ ID NO: 427068 - DNA, 19 bp, Homo sapiens
  siRNA target sequence for FLJ34780 (NM_173651.1,340-358).
ggctttaacggagaagata

SEQ ID NO: 427069 - DNA, 19 bp, Homo sapiens
  siRNA target sequence for FLJ34780 (NM_173651.1,342-360).
ctttaacggagaagatata

SEQ ID NO: 427070 - DNA, 19 bp, Homo sapiens
  siRNA target sequence for MGC34824 (NM_173652.1,467-485).
ctgagcttgaggcttcaaa

SEQ ID NO: 427071 - DNA, 19 bp, Homo sapiens
  siRNA target sequence for MGC34824 (NM_173652.1,544-562).
cccaggcccatgttcagta

SEQ ID NO: 427072 - DNA, 19 bp, Homo sapiens
  siRNA target sequence for MGC34824 (NM_173652.1,549-567).
gcccatgttcagtagtgaa

SEQ ID NO: 427073 - DNA, 19 bp, Homo sapiens
  siRNA target sequence for MGC34824 (NM_173652.1,574-592).
gctagcagcagaagcaata

SEQ ID NO: 427074 - DNA, 19 bp, Homo sapiens
  siRNA target sequence for MGC34824 (NM_173652.1,615-633).
ctgtggatgaatctcatta

SEQ ID NO: 427075 - DNA, 19 bp, Homo sapiens
  siRNA target sequence for MGC34824 (NM_173652.1,619-637).
ggatgaatctcattatctt

SEQ ID NO: 427076 - DNA, 19 bp, Homo sapiens
  siRNA target sequence for MGC34824 (NM_173652.1,751-769).
gaagttcaagcgactaact

SEQ ID NO: 427077 - DNA, 19 bp, Homo sapiens
  siRNA target sequence for MGC34824 (NM_173652.1,757-775).
caagcgactaactaggaaa

SEQ ID NO: 427078 - DNA, 19 bp, Homo sapiens
  siRNA target sequence for MGC34824 (NM_173652.1,768-786).
ctaggaaacaggttagtat

SEQ ID NO: 427079 - DNA, 19 bp, Homo sapiens
  siRNA target sequence for MGC34824 (NM_173652.1,800-818).
ctgtgcaacagattacata

SEQ ID NO: 427080 - DNA, 19 bp, Homo sapiens
  siRNA target sequence for MGC34824 (NM_173652.1,804-822).
gcaacagattacataccat

SEQ ID NO: 427081 - DNA, 19 bp, Homo sapiens
  siRNA target sequence for MGC34824 (NM_173652.1,815-833).
cataccatttgctctattt

SEQ ID NO: 427082 - DNA, 19 bp, Homo sapiens
  siRNA target sequence for MGC34824 (NM_173652.1,839-857).
cctttccttaggctagatt

SEQ ID NO: 427083 - DNA, 19 bp, Homo sapiens
  siRNA target sequence for MGC34132 (NM_173654.1,428-446).
gagtcttacttcatgaagt

SEQ ID NO: 427084 - DNA, 19 bp, Homo sapiens
  siRNA target sequence for MGC34132 (NM_173654.1,449-467).
cactgagtggtcagaatga

SEQ ID NO: 427085 - DNA, 19 bp, Homo sapiens
  siRNA target sequence for MGC34132 (NM_173654.1,462-480).
gaatgaagctcctcctaat

SEQ ID NO: 427086 - DNA, 19 bp, Homo sapiens
  siRNA target sequence for MGC34132 (NM_173654.1,493-511).
ccaggcgaacctctgtata

SEQ ID NO: 427087 - DNA, 19 bp, Homo sapiens
  siRNA target sequence for MGC34132 (NM_173654.1,494-512).
caggcgaacctctgtataa

SEQ ID NO: 427088 - DNA, 19 bp, Homo sapiens
  siRNA target sequence for MGC34132 (NM_173654.1,497-515).
gcgaacctctgtataacta

SEQ ID NO: 427089 - DNA, 19 bp, Homo sapiens
  siRNA target sequence for MGC34132 (NM_173654.1,498-516).
cgaacctctgtataactat

SEQ ID NO: 427090 - DNA, 19 bp, Homo sapiens
  siRNA target sequence for MGC34132 (NM_173654.1,595-613).
gactctctttgtccatata

SEQ ID NO: 427091 - DNA, 19 bp, Homo sapiens
  siRNA target sequence for MGC34132 (NM_173654.1,639-657).
ctgctggggttatgagaaa

SEQ ID NO: 427092 - DNA, 19 bp, Homo sapiens
  siRNA target sequence for MGC34132 (NM_173654.1,737-755).
ctgaggacatattttggaa

SEQ ID NO: 427093 - DNA, 19 bp, Homo sapiens
  siRNA target sequence for MGC34132 (NM_173654.1,840-858).
ggtgtgttcccgttatctt

SEQ ID NO: 427094 - DNA, 19 bp, Homo sapiens
  siRNA target sequence for MGC34132 (NM_173654.1,845-863).
gttcccgttatcttcagta

SEQ ID NO: 427095 - DNA, 19 bp, Homo sapiens
  siRNA target sequence for MGC34132 (NM_173654.1,872-890).
caaccaatctctatcttga

SEQ ID NO: 427096 - DNA, 19 bp, Homo sapiens
  siRNA target sequence for MGC34132 (NM_173654.1,959-977).
ggcactgtaaacttgacat

SEQ ID NO: 427097 - DNA, 19 bp, Homo sapiens
  siRNA target sequence for MGC34132 (NM_173654.1,970-988).
cttgacatccgtacattga

SEQ ID NO: 427098 - DNA, 19 bp, Homo sapiens
  siRNA target sequence for MGC34132 (NM_173654.1,1030-1048).
gctgagctacaaagctata

SEQ ID NO: 427099 - DNA, 19 bp, Homo sapiens
  siRNA target sequence for MGC34132 (NM_173654.1,1053-1071).
gctcaacttcagacctata

SEQ ID NO: 427100 - DNA, 19 bp, Homo sapiens
  siRNA target sequence for MGC34132 (NM_173654.1,1059-1077).
cttcagacctatagaagat

SEQ ID NO: 427101 - DNA, 19 bp, Homo sapiens
  siRNA target sequence for MGC34132 (NM_173654.1,1126-1144).
gatgcaggtgttaacatgt

SEQ ID NO: 427102 - DNA, 19 bp, Homo sapiens
  siRNA target sequence for MGC34132 (NM_173654.1,1147-1165).
caccacttctgtgatttca

SEQ ID NO: 427103 - DNA, 19 bp, Homo sapiens
  siRNA target sequence for MGC34132 (NM_173654.1,1159-1177).
gatttcatcaatctttata

SEQ ID NO: 427104 - DNA, 19 bp, Homo sapiens
  siRNA target sequence for MGC34132 (NM_173654.1,1183-1201).
cagcacgttaataactcat

SEQ ID NO: 427105 - DNA, 19 bp, Homo sapiens
  siRNA target sequence for MGC34132 (NM_173654.1,1186-1204).
cacgttaataactcattca

SEQ ID NO: 427106 - DNA, 19 bp, Homo sapiens
  siRNA target sequence for MGC34132 (NM_173654.1,1188-1206).
cgttaataactcattcagt

SEQ ID NO: 427107 - DNA, 19 bp, Homo sapiens
  siRNA target sequence for MGC34132 (NM_173654.1,1189-1207).
gttaataactcattcagta

SEQ ID NO: 427108 - DNA, 19 bp, Homo sapiens
  siRNA target sequence for MGC34132 (NM_173654.1,1227-1245).
gtgggacaccgatggaaaa

SEQ ID NO: 427109 - DNA, 19 bp, Homo sapiens
  siRNA target sequence for MGC34132 (NM_173654.1,1233-1251).
caccgatggaaaaattcga

SEQ ID NO: 427110 - DNA, 19 bp, Homo sapiens
  siRNA target sequence for MGC34132 (NM_173654.1,1261-1279).
cttgcacggagcacagaat

SEQ ID NO: 427111 - DNA, 19 bp, Homo sapiens
  siRNA target sequence for MGC34132 (NM_173654.1,1274-1292).
cagaataccggaaaatcct

SEQ ID NO: 427112 - DNA, 19 bp, Homo sapiens
  siRNA target sequence for MGC34132 (NM_173654.1,1281-1299).
ccggaaaatccttaaccaa

SEQ ID NO: 427113 - DNA, 19 bp, Homo sapiens
  siRNA target sequence for MGC34132 (NM_173654.1,1282-1300).
cggaaaatccttaaccaaa

SEQ ID NO: 427114 - DNA, 19 bp, Homo sapiens
  siRNA target sequence for MGC34132 (NM_173654.1,1283-1301).
ggaaaatccttaaccaaaa

SEQ ID NO: 427115 - DNA, 19 bp, Homo sapiens
  siRNA target sequence for MGC34132 (NM_173654.1,1315-1333).
gcactgaaaacagtatcta

SEQ ID NO: 427116 - DNA, 19 bp, Homo sapiens
  siRNA target sequence for MGC34132 (NM_173654.1,1339-1357).
gaagtccagattgttgatt

SEQ ID NO: 427117 - DNA, 19 bp, Homo sapiens
  siRNA target sequence for MGC34132 (NM_173654.1,1342-1360).
gtccagattgttgattaca

SEQ ID NO: 427118 - DNA, 19 bp, Homo sapiens
  siRNA target sequence for MGC34132 (NM_173654.1,1345-1363).
cagattgttgattacaagt

SEQ ID NO: 427119 - DNA, 19 bp, Homo sapiens
  siRNA target sequence for MGC34132 (NM_173654.1,1347-1365).
gattgttgattacaagtat

SEQ ID NO: 427120 - DNA, 19 bp, Homo sapiens
  siRNA target sequence for MGC34132 (NM_173654.1,1375-1393).
gggtttttagatcaactaa

SEQ ID NO: 427121 - DNA, 19 bp, Homo sapiens
  siRNA target sequence for MGC34132 (NM_173654.1,1402-1420).
cacaacacggacatattta

SEQ ID NO: 427122 - DNA, 19 bp, Homo sapiens
  siRNA target sequence for MGC34132 (NM_173654.1,1407-1425).
cacggacatatttattgga

SEQ ID NO: 427123 - DNA, 19 bp, Homo sapiens
  siRNA target sequence for MGC34132 (NM_173654.1,1409-1427).
cggacatatttattggaat

SEQ ID NO: 427124 - DNA, 19 bp, Homo sapiens
  siRNA target sequence for MGC34132 (NM_173654.1,1436-1454).
ctggtctgacccatttact

SEQ ID NO: 427125 - DNA, 19 bp, Homo sapiens
  siRNA target sequence for MGC34132 (NM_173654.1,1438-1456).
ggtctgacccatttacttt

SEQ ID NO: 427126 - DNA, 19 bp, Homo sapiens
  siRNA target sequence for MGC34132 (NM_173654.1,1469-1487).
gggctgctgtatttgaact

SEQ ID NO: 427127 - DNA, 19 bp, Homo sapiens
  siRNA target sequence for MGC34132 (NM_173654.1,1504-1522).
gaacgctgttacttagact

SEQ ID NO: 427128 - DNA, 19 bp, Homo sapiens
  siRNA target sequence for MGC34132 (NM_173654.1,1529-1547).
ggctgagaggcgttcacta

SEQ ID NO: 427129 - DNA, 19 bp, Homo sapiens
  siRNA target sequence for MGC34132 (NM_173654.1,1537-1555).
ggcgttcactacatcactt

SEQ ID NO: 427130 - DNA, 19 bp, Homo sapiens
  siRNA target sequence for MGC34132 (NM_173654.1,1618-1636).
ccgaagttcaccaactact

SEQ ID NO: 427131 - DNA, 19 bp, Homo sapiens
  siRNA target sequence for MGC34132 (NM_173654.1,1626-1644).
caccaactactctttcgat

SEQ ID NO: 427132 - DNA, 19 bp, Homo sapiens
  siRNA target sequence for MGC34132 (NM_173654.1,1635-1653).
ctctttcgatgtagaagaa

SEQ ID NO: 427133 - DNA, 19 bp, Homo sapiens
  siRNA target sequence for MGC29784 (NM_173659.1,253-271).
ctctagtgacgttgaacaa

SEQ ID NO: 427134 - DNA, 19 bp, Homo sapiens
  siRNA target sequence for MGC29784 (NM_173659.1,303-321).
ggagagctgacgttgttct

SEQ ID NO: 427135 - DNA, 19 bp, Homo sapiens
  siRNA target sequence for MGC29784 (NM_173659.1,439-457).
ctagtcgcctccagaagta

SEQ ID NO: 427136 - DNA, 19 bp, Homo sapiens
  siRNA target sequence for MGC29784 (NM_173659.1,553-571).
ccctgaaactggaacacat

SEQ ID NO: 427137 - DNA, 19 bp, Homo sapiens
  siRNA target sequence for MGC29784 (NM_173659.1,762-780).
cttggggaccacatgtact

SEQ ID NO: 427138 - DNA, 19 bp, Homo sapiens
  siRNA target sequence for MGC29784 (NM_173659.1,987-1005).
ccactgcccccttatttct

SEQ ID NO: 427139 - DNA, 19 bp, Homo sapiens
  siRNA target sequence for MGC29784 (NM_173659.1,1023-1041).
ctggggctccgcttacaat

SEQ ID NO: 427140 - DNA, 19 bp, Homo sapiens
  siRNA target sequence for FLJ33718 (NM_173660.2,1081-1099).
ggcagccactcctcttact

SEQ ID NO: 427141 - DNA, 19 bp, Homo sapiens
  siRNA target sequence for FLJ35424 (NM_173661.1,417-435).
cacctgcacttctagttat

SEQ ID NO: 427142 - DNA, 19 bp, Homo sapiens
  siRNA target sequence for FLJ35424 (NM_173661.1,419-437).
cctgcacttctagttattt

SEQ ID NO: 427143 - DNA, 19 bp, Homo sapiens
  siRNA target sequence for FLJ35424 (NM_173661.1,420-438).
ctgcacttctagttatttt

SEQ ID NO: 427144 - DNA, 19 bp, Homo sapiens
  siRNA target sequence for FLJ35424 (NM_173661.1,442-460).
gaaaacgttccctgaacat

SEQ ID NO: 427145 - DNA, 19 bp, Homo sapiens
  siRNA target sequence for FLJ35424 (NM_173661.1,506-524).
gctccaggtaactgcattt

SEQ ID NO: 427146 - DNA, 19 bp, Homo sapiens
  siRNA target sequence for FLJ35424 (NM_173661.1,530-548).
gccaatgttggctttttaa

SEQ ID NO: 427147 - DNA, 19 bp, Homo sapiens
  siRNA target sequence for FLJ35424 (NM_173661.1,662-680).
cgacataggctcacaagta

SEQ ID NO: 427148 - DNA, 19 bp, Homo sapiens
  siRNA target sequence for FLJ35424 (NM_173661.1,684-702).
ctcttcgtctgtttatact

SEQ ID NO: 427149 - DNA, 19 bp, Homo sapiens
  siRNA target sequence for FLJ35424 (NM_173661.1,686-704).
cttcgtctgtttatactta

SEQ ID NO: 427150 - DNA, 19 bp, Homo sapiens
  siRNA target sequence for FLJ35424 (NM_173661.1,707-725).
gcaattactgatacatcta

SEQ ID NO: 427151 - DNA, 19 bp, Homo sapiens
  siRNA target sequence for FLJ35424 (NM_173661.1,708-726).
caattactgatacatctaa

SEQ ID NO: 427152 - DNA, 19 bp, Homo sapiens
  siRNA target sequence for LOC285533 (NM_173662.1,434-452).
ggagcagctctctcataca

SEQ ID NO: 427153 - DNA, 19 bp, Homo sapiens
  siRNA target sequence for LOC285533 (NM_173662.1,435-453).
gagcagctctctcatacaa

SEQ ID NO: 427154 - DNA, 19 bp, Homo sapiens
  siRNA target sequence for LOC285533 (NM_173662.1,641-659).
gtgggttgtccccttatat

SEQ ID NO: 427155 - DNA, 19 bp, Homo sapiens
  siRNA target sequence for LOC285533 (NM_173662.1,643-661).
gggttgtccccttatattt

SEQ ID NO: 427156 - DNA, 19 bp, Homo sapiens
  siRNA target sequence for LOC285533 (NM_173662.1,645-663).
gttgtccccttatatttca

SEQ ID NO: 427157 - DNA, 19 bp, Homo sapiens
  siRNA target sequence for LOC285533 (NM_173662.1,651-669).
cccttatatttcacgataa

SEQ ID NO: 427158 - DNA, 19 bp, Homo sapiens
  siRNA target sequence for LOC285533 (NM_173662.1,679-697).
ggtggcggtttctgtctat

SEQ ID NO: 427159 - DNA, 19 bp, Homo sapiens
  siRNA target sequence for LOC285533 (NM_173662.1,701-719).
ggggatgttctccgttatt

SEQ ID NO: 427160 - DNA, 19 bp, Homo sapiens
  siRNA target sequence for LOC285533 (NM_173662.1,702-720).
gggatgttctccgttatta

SEQ ID NO: 427161 - DNA, 19 bp, Homo sapiens
  siRNA target sequence for LOC285533 (NM_173662.1,769-787).
caccacgattggtctacaa

SEQ ID NO: 427162 - DNA, 19 bp, Homo sapiens
  siRNA target sequence for LOC285533 (NM_173662.1,771-789).
ccacgattggtctacaaat

SEQ ID NO: 427163 - DNA, 19 bp, Homo sapiens
  siRNA target sequence for LOC285533 (NM_173662.1,774-792).
cgattggtctacaaatggt

SEQ ID NO: 427164 - DNA, 19 bp, Homo sapiens
  siRNA target sequence for LOC285533 (NM_173662.1,779-797).
ggtctacaaatggtttctt

SEQ ID NO: 427165 - DNA, 19 bp, Homo sapiens
  siRNA target sequence for LOC285533 (NM_173662.1,834-852).
ggttacttggcgatcatgt

SEQ ID NO: 427166 - DNA, 19 bp, Homo sapiens
  siRNA target sequence for LOC285533 (NM_173662.1,835-853).
gttacttggcgatcatgtt

SEQ ID NO: 427167 - DNA, 19 bp, Homo sapiens
  siRNA target sequence for LOC285533 (NM_173662.1,843-861).
gcgatcatgtttacaatgt

SEQ ID NO: 427168 - DNA, 19 bp, Homo sapiens
  siRNA target sequence for LOC285533 (NM_173662.1,860-878).
gtgtggattcaatctgttt

SEQ ID NO: 427169 - DNA, 19 bp, Homo sapiens
  siRNA target sequence for LOC285533 (NM_173662.1,1033-1051).
ggagcttatcggacaatat

SEQ ID NO: 427170 - DNA, 19 bp, Homo sapiens
  siRNA target sequence for LOC285533 (NM_173662.1,1061-1079).
ctgtgggcagaagatcatt

SEQ ID NO: 427171 - DNA, 19 bp, Homo sapiens
  siRNA target sequence for LOC285533 (NM_173662.1,1129-1147).
gtaatcatgtctttcatga

SEQ ID NO: 427172 - DNA, 19 bp, Homo sapiens
  siRNA target sequence for LOC285533 (NM_173662.1,1157-1175).
ccgaggttggtgtatcgtt

SEQ ID NO: 427173 - DNA, 19 bp, Homo sapiens
  siRNA target sequence for LOC285533 (NM_173662.1,1165-1183).
ggtgtatcgttgggaaaaa

SEQ ID NO: 427174 - DNA, 19 bp, Homo sapiens
  siRNA target sequence for LOC285533 (NM_173662.1,1243-1261).
gggagcgcacacattttct

SEQ ID NO: 427175 - DNA, 19 bp, Homo sapiens
  siRNA target sequence for LOC285533 (NM_173662.1,1245-1263).
gagcgcacacattttctgt

SEQ ID NO: 427176 - DNA, 19 bp, Homo sapiens
  siRNA target sequence for LOC285533 (NM_173662.1,1247-1265).
gcgcacacattttctgtat

SEQ ID NO: 427177 - DNA, 19 bp, Homo sapiens
  siRNA target sequence for LOC285533 (NM_173662.1,1274-1292).
cctggattggcttcgttat

SEQ ID NO: 427178 - DNA, 19 bp, Homo sapiens
  siRNA target sequence for LOC285533 (NM_173662.1,1275-1293).
ctggattggcttcgttatt

SEQ ID NO: 427179 - DNA, 19 bp, Homo sapiens
  siRNA target sequence for LOC285533 (NM_173662.1,1305-1323).
caacctgtggtgataggaa

SEQ ID NO: 427180 - DNA, 19 bp, Homo sapiens
  siRNA target sequence for MGC34713 (NM_173665.1,271-289).
ctacattgtttgttaaact

SEQ ID NO: 427181 - DNA, 19 bp, Homo sapiens
  siRNA target sequence for MGC34713 (NM_173665.1,274-292).
cattgtttgttaaactcat

SEQ ID NO: 427182 - DNA, 19 bp, Homo sapiens
  siRNA target sequence for MGC34713 (NM_173665.1,355-373).
gctgcaagcataaaacatt

SEQ ID NO: 427183 - DNA, 19 bp, Homo sapiens
  siRNA target sequence for MGC34713 (NM_173665.1,362-380).
gcataaaacattgcattaa

SEQ ID NO: 427184 - DNA, 19 bp, Homo sapiens
  siRNA target sequence for MGC34713 (NM_173665.1,390-408).
gtccgaaattaacaaacaa

SEQ ID NO: 427185 - DNA, 19 bp, Homo sapiens
  siRNA target sequence for MGC34713 (NM_173665.1,393-411).
cgaaattaacaaacaatgt

SEQ ID NO: 427186 - DNA, 19 bp, Homo sapiens
  siRNA target sequence for MGC34713 (NM_173665.1,443-461).
gctttgaatggctaactaa

SEQ ID NO: 427187 - DNA, 19 bp, Homo sapiens
  siRNA target sequence for MGC34713 (NM_173665.1,448-466).
gaatggctaactaactata

SEQ ID NO: 427188 - DNA, 19 bp, Homo sapiens
  siRNA target sequence for MGC34713 (NM_173665.1,452-470).
ggctaactaactataatta

SEQ ID NO: 427189 - DNA, 19 bp, Homo sapiens
  siRNA target sequence for MGC34713 (NM_173665.1,454-472).
ctaactaactataattaca

SEQ ID NO: 427190 - DNA, 19 bp, Homo sapiens
  siRNA target sequence for MGC34713 (NM_173665.1,497-515).
ctcatggagacttgataaa

SEQ ID NO: 427191 - DNA, 19 bp, Homo sapiens
  siRNA target sequence for MGC34713 (NM_173665.1,527-545).
cactgcaagatttgttgaa

SEQ ID NO: 427192 - DNA, 19 bp, Homo sapiens
  siRNA target sequence for MGC34713 (NM_173665.1,654-672).
ctctaggacgtctcttcat

SEQ ID NO: 427193 - DNA, 19 bp, Homo sapiens
  siRNA target sequence for MGC34713 (NM_173665.1,659-677).
ggacgtctcttcattctgt

SEQ ID NO: 427194 - DNA, 19 bp, Homo sapiens
  siRNA target sequence for MGC34713 (NM_173665.1,692-710).
ctatggatgtcaagtctat

SEQ ID NO: 427195 - DNA, 19 bp, Homo sapiens
  siRNA target sequence for MGC34713 (NM_173665.1,705-723).
gtctatgtgggatgatata

SEQ ID NO: 427196 - DNA, 19 bp, Homo sapiens
  siRNA target sequence for MGC34713 (NM_173665.1,729-747).
gcatcttcgacgcttctta

SEQ ID NO: 427197 - DNA, 19 bp, Homo sapiens
  siRNA target sequence for MGC34713 (NM_173665.1,733-751).
cttcgacgcttcttagtga

SEQ ID NO: 427198 - DNA, 19 bp, Homo sapiens
  siRNA target sequence for MGC34713 (NM_173665.1,740-758).
gcttcttagtgagcaaatt

SEQ ID NO: 427199 - DNA, 19 bp, Homo sapiens
  siRNA target sequence for MGC34713 (NM_173665.1,744-762).
cttagtgagcaaattacaa

SEQ ID NO: 427200 - DNA, 19 bp, Homo sapiens
  siRNA target sequence for MGC34713 (NM_173665.1,804-822).
gaaaaagcagtgcttacaa

SEQ ID NO: 427201 - DNA, 19 bp, Homo sapiens
  siRNA target sequence for MGC34713 (NM_173665.1,816-834).
cttacaacaactcttgttt

SEQ ID NO: 427202 - DNA, 19 bp, Homo sapiens
  siRNA target sequence for MGC34713 (NM_173665.1,968-986).
gtacaatgcttaagttata

SEQ ID NO: 427203 - DNA, 19 bp, Homo sapiens
  siRNA target sequence for MGC34713 (NM_173665.1,976-994).
cttaagttatactcagtaa

SEQ ID NO: 427204 - DNA, 19 bp, Homo sapiens
  siRNA target sequence for MGC34713 (NM_173665.1,989-1007).
cagtaataaaagaggattt

SEQ ID NO: 427205 - DNA, 19 bp, Homo sapiens
  siRNA target sequence for MGC34713 (NM_173665.1,1000-1018).
gaggattttaacacactat

SEQ ID NO: 427206 - DNA, 19 bp, Homo sapiens
  siRNA target sequence for MGC34713 (NM_173665.1,1002-1020).
ggattttaacacactatgt

SEQ ID NO: 427207 - DNA, 19 bp, Homo sapiens
  siRNA target sequence for MGC34713 (NM_173665.1,1034-1052).
catcttcaatggtgaaatt

SEQ ID NO: 427208 - DNA, 19 bp, Homo sapiens
  siRNA target sequence for MGC34713 (NM_173665.1,1040-1058).
caatggtgaaattcattaa

SEQ ID NO: 427209 - DNA, 19 bp, Homo sapiens
  siRNA target sequence for MGC34713 (NM_173665.1,1141-1159).
gttcgtgtggttaaaacaa

SEQ ID NO: 427210 - DNA, 19 bp, Homo sapiens
  siRNA target sequence for FLJ33977 (NM_173666.1,288-306).
cagcgcaccctctgcatat

SEQ ID NO: 427211 - DNA, 19 bp, Homo sapiens
  siRNA target sequence for FLJ33977 (NM_173666.1,292-310).
gcaccctctgcatatctct

SEQ ID NO: 427212 - DNA, 19 bp, Homo sapiens
  siRNA target sequence for FLJ33977 (NM_173666.1,293-311).
caccctctgcatatctcta

SEQ ID NO: 427213 - DNA, 19 bp, Homo sapiens
  siRNA target sequence for FLJ33977 (NM_173666.1,307-325).
ctctacccacttgtacata

SEQ ID NO: 427214 - DNA, 19 bp, Homo sapiens
  siRNA target sequence for FLJ33977 (NM_173666.1,349-367).
caaagtgttgcgtacagtt

SEQ ID NO: 427215 - DNA, 19 bp, Homo sapiens
  siRNA target sequence for FLJ33977 (NM_173666.1,358-376).
gcgtacagttcctctacta

SEQ ID NO: 427216 - DNA, 19 bp, Homo sapiens
  siRNA target sequence for FLJ33977 (NM_173666.1,386-404).
ctcccccaggacaagtgta

SEQ ID NO: 427217 - DNA, 19 bp, Homo sapiens
  siRNA target sequence for FLJ33977 (NM_173666.1,390-408).
cccaggacaagtgtaaagt

SEQ ID NO: 427218 - DNA, 19 bp, Homo sapiens
  siRNA target sequence for FLJ33977 (NM_173666.1,443-461).
cctgaactttcaactgttt

SEQ ID NO: 427219 - DNA, 19 bp, Homo sapiens
  siRNA target sequence for FLJ33977 (NM_173666.1,462-480).
gccggaagtctggtacatt

SEQ ID NO: 427220 - DNA, 19 bp, Homo sapiens
  siRNA target sequence for FLJ33977 (NM_173666.1,463-481).
ccggaagtctggtacatta

SEQ ID NO: 427221 - DNA, 19 bp, Homo sapiens
  siRNA target sequence for FLJ33977 (NM_173666.1,464-482).
cggaagtctggtacattaa

SEQ ID NO: 427222 - DNA, 19 bp, Homo sapiens
  siRNA target sequence for FLJ33977 (NM_173666.1,465-483).
ggaagtctggtacattaat

SEQ ID NO: 427223 - DNA, 19 bp, Homo sapiens
  siRNA target sequence for FLJ33977 (NM_173666.1,466-484).
gaagtctggtacattaata

SEQ ID NO: 427224 - DNA, 19 bp, Homo sapiens
  siRNA target sequence for FLJ33977 (NM_173666.1,469-487).
gtctggtacattaatatta

SEQ ID NO: 427225 - DNA, 19 bp, Homo sapiens
  siRNA target sequence for FLJ33977 (NM_173666.1,471-489).
ctggtacattaatattata

SEQ ID NO: 427226 - DNA, 19 bp, Homo sapiens
  siRNA target sequence for FLJ33977 (NM_173666.1,494-512).
ggggctgaagctgctaatt

SEQ ID NO: 427227 - DNA, 19 bp, Homo sapiens
  siRNA target sequence for FLJ33977 (NM_173666.1,495-513).
gggctgaagctgctaattt

SEQ ID NO: 427228 - DNA, 19 bp, Homo sapiens
  siRNA target sequence for FLJ33977 (NM_173666.1,504-522).
ctgctaatttggaagaatt

SEQ ID NO: 427229 - DNA, 19 bp, Homo sapiens
  siRNA target sequence for FLJ33977 (NM_173666.1,579-597).
gccaggctaaggacatttt

SEQ ID NO: 427230 - DNA, 19 bp, Homo sapiens
  siRNA target sequence for FLJ33977 (NM_173666.1,581-599).
caggctaaggacattttct

SEQ ID NO: 427231 - DNA, 19 bp, Homo sapiens
  siRNA target sequence for FLJ33977 (NM_173666.1,623-641).
cccaaacaggtgcaattaa

SEQ ID NO: 427232 - DNA, 19 bp, Homo sapiens
  siRNA target sequence for FLJ33977 (NM_173666.1,648-666).
gcatttctagtcagtatgt

SEQ ID NO: 427233 - DNA, 19 bp, Homo sapiens
  siRNA target sequence for FLJ33977 (NM_173666.1,671-689).
cggatgcagccgactaata

SEQ ID NO: 427234 - DNA, 19 bp, Homo sapiens
  siRNA target sequence for FLJ33977 (NM_173666.1,673-691).
gatgcagccgactaataga

SEQ ID NO: 427235 - DNA, 19 bp, Homo sapiens
  siRNA target sequence for FLJ33977 (NM_173666.1,770-788).
cgccctcttcaagctttat

SEQ ID NO: 427236 - DNA, 19 bp, Homo sapiens
  siRNA target sequence for FLJ33977 (NM_173666.1,851-869).
ggattatatcctaaaccaa

SEQ ID NO: 427237 - DNA, 19 bp, Homo sapiens
  siRNA target sequence for FLJ33977 (NM_173666.1,852-870).
gattatatcctaaaccaat

SEQ ID NO: 427238 - DNA, 19 bp, Homo sapiens
  siRNA target sequence for FLJ37543 (NM_173667.1,78-96).
gctggcaccactcttctta

SEQ ID NO: 427239 - DNA, 19 bp, Homo sapiens
  siRNA target sequence for FLJ37543 (NM_173667.1,79-97).
ctggcaccactcttcttat

SEQ ID NO: 427240 - DNA, 19 bp, Homo sapiens
  siRNA target sequence for FLJ37543 (NM_173667.1,82-100).
gcaccactcttcttatgct

SEQ ID NO: 427241 - DNA, 19 bp, Homo sapiens
  siRNA target sequence for FLJ37543 (NM_173667.1,98-116).
gctgtctgcgtaacttgtt

SEQ ID NO: 427242 - DNA, 19 bp, Homo sapiens
  siRNA target sequence for FLJ37543 (NM_173667.1,103-121).
ctgcgtaacttgttcagaa

SEQ ID NO: 427243 - DNA, 19 bp, Homo sapiens
  siRNA target sequence for FLJ37543 (NM_173667.1,105-123).
gcgtaacttgttcagaaaa

SEQ ID NO: 427244 - DNA, 19 bp, Homo sapiens
  siRNA target sequence for FLJ37543 (NM_173667.1,107-125).
gtaacttgttcagaaaact

SEQ ID NO: 427245 - DNA, 19 bp, Homo sapiens
  siRNA target sequence for FLJ37543 (NM_173667.1,152-170).
gcagaacaaacatgcatta

SEQ ID NO: 427246 - DNA, 19 bp, Homo sapiens
  siRNA target sequence for FLJ37543 (NM_173667.1,235-253).
gatctgaccgctgaagttt

SEQ ID NO: 427247 - DNA, 19 bp, Homo sapiens
  siRNA target sequence for FLJ37543 (NM_173667.1,289-307).
gcagttttctataatcagt

SEQ ID NO: 427248 - DNA, 19 bp, Homo sapiens
  siRNA target sequence for FLJ37543 (NM_173667.1,290-308).
cagttttctataatcagta

SEQ ID NO: 427249 - DNA, 19 bp, Homo sapiens
  siRNA target sequence for FLJ37543 (NM_173667.1,392-410).
caaccatgatgttctcaat

SEQ ID NO: 427250 - DNA, 19 bp, Homo sapiens
  siRNA target sequence for FLJ37543 (NM_173667.1,411-429).
gttagctgactgtgttcta

SEQ ID NO: 427251 - DNA, 19 bp, Homo sapiens
  siRNA target sequence for FLJ37543 (NM_173667.1,415-433).
gctgactgtgttctaaaat

SEQ ID NO: 427252 - DNA, 19 bp, Homo sapiens
  siRNA target sequence for FLJ34836 (NM_173668.1,462-480).
gtccgtaggcacttgcttt

SEQ ID NO: 427253 - DNA, 19 bp, Homo sapiens
  siRNA target sequence for FLJ34836 (NM_173668.1,464-482).
ccgtaggcacttgctttaa

SEQ ID NO: 427254 - DNA, 19 bp, Homo sapiens
  siRNA target sequence for FLJ34836 (NM_173668.1,476-494).
gctttaaccgtgaagaatt

SEQ ID NO: 427255 - DNA, 19 bp, Homo sapiens
  siRNA target sequence for FLJ34836 (NM_173668.1,477-495).
ctttaaccgtgaagaatta

SEQ ID NO: 427256 - DNA, 19 bp, Homo sapiens
  siRNA target sequence for FLJ34836 (NM_173668.1,512-530).
ggcctcagggtgaggaatt

SEQ ID NO: 427257 - DNA, 19 bp, Homo sapiens
  siRNA target sequence for FLJ34836 (NM_173668.1,536-554).
ccaccagtgtgacaaataa

SEQ ID NO: 427258 - DNA, 19 bp, Homo sapiens
  siRNA target sequence for FLJ34836 (NM_173668.1,646-664).
gaccaagccctcagtcaaa

SEQ ID NO: 427259 - DNA, 19 bp, Homo sapiens
  siRNA target sequence for FLJ34836 (NM_173668.1,648-666).
ccaagccctcagtcaaata

SEQ ID NO: 427260 - DNA, 19 bp, Homo sapiens
  siRNA target sequence for FLJ34836 (NM_173668.1,652-670).
gccctcagtcaaatactat

SEQ ID NO: 427261 - DNA, 19 bp, Homo sapiens
  siRNA target sequence for FLJ34836 (NM_173668.1,682-700).
ggaagaatcaaggttatgt

SEQ ID NO: 427262 - DNA, 19 bp, Homo sapiens
  siRNA target sequence for FLJ34047 (NM_173669.1,125-143).
cccgacgtcgactacgatt

SEQ ID NO: 427263 - DNA, 19 bp, Homo sapiens
  siRNA target sequence for FLJ34047 (NM_173669.1,545-563).
gcggacacttggtttagca

SEQ ID NO: 427264 - DNA, 19 bp, Homo sapiens
  siRNA target sequence for FLJ90406 (NM_173670.1,997-1015).
cggctttgactctgagttt

SEQ ID NO: 427265 - DNA, 19 bp, Homo sapiens
  siRNA target sequence for FLJ90406 (NM_173670.1,998-1016).
ggctttgactctgagtttt

SEQ ID NO: 427266 - DNA, 19 bp, Homo sapiens
  siRNA target sequence for FLJ90406 (NM_173670.1,1073-1091).
ggcaacctggtataccatt

SEQ ID NO: 427267 - DNA, 19 bp, Homo sapiens
  siRNA target sequence for FLJ90406 (NM_173670.1,1117-1135).
catgagccagaggaattgt

SEQ ID NO: 427268 - DNA, 19 bp, Homo sapiens
  siRNA target sequence for FLJ90406 (NM_173670.1,1328-1346).
gcctggccactcatagata

SEQ ID NO: 427269 - DNA, 19 bp, Homo sapiens
  siRNA target sequence for FLJ90406 (NM_173670.1,1329-1347).
cctggccactcatagataa

SEQ ID NO: 427270 - DNA, 19 bp, Homo sapiens
  siRNA target sequence for FLJ90406 (NM_173670.1,1330-1348).
ctggccactcatagataat

SEQ ID NO: 427271 - DNA, 19 bp, Homo sapiens
  siRNA target sequence for FLJ90406 (NM_173670.1,1333-1351).
gccactcatagataataat

SEQ ID NO: 427272 - DNA, 19 bp, Homo sapiens
  siRNA target sequence for FLJ90406 (NM_173670.1,1334-1352).
ccactcatagataataatt

SEQ ID NO: 427273 - DNA, 19 bp, Homo sapiens
  siRNA target sequence for FLJ90406 (NM_173670.1,1339-1357).
catagataataattatctt

SEQ ID NO: 427274 - DNA, 19 bp, Homo sapiens
  siRNA target sequence for FLJ90406 (NM_173670.1,1418-1436).
gcaagtataccttcttttt

SEQ ID NO: 427275 - DNA, 19 bp, Homo sapiens
  siRNA target sequence for FLJ37396 (NM_173671.1,84-102).
gtgcgacagccttctgtat

SEQ ID NO: 427276 - DNA, 19 bp, Homo sapiens
  siRNA target sequence for FLJ37396 (NM_173671.1,168-186).
gtccacagcgtccaattca

SEQ ID NO: 427277 - DNA, 19 bp, Homo sapiens
  siRNA target sequence for FLJ37396 (NM_173671.1,295-313).
gtgatctcaaggaactaga

SEQ ID NO: 427278 - DNA, 19 bp, Homo sapiens
  siRNA target sequence for FLJ37396 (NM_173671.1,333-351).
gctagccattacattgaga

SEQ ID NO: 427279 - DNA, 19 bp, Homo sapiens
  siRNA target sequence for FLJ37396 (NM_173671.1,334-352).
ctagccattacattgagaa

SEQ ID NO: 427280 - DNA, 19 bp, Homo sapiens
  siRNA target sequence for FLJ37396 (NM_173671.1,484-502).
gccagcttcttgacagtta

SEQ ID NO: 427281 - DNA, 19 bp, Homo sapiens
  siRNA target sequence for FLJ37396 (NM_173671.1,578-596).
ccgacgcccgaggtttgat

SEQ ID NO: 427282 - DNA, 19 bp, Homo sapiens
  siRNA target sequence for FLJ37396 (NM_173671.1,580-598).
gacgcccgaggtttgatct

SEQ ID NO: 427283 - DNA, 19 bp, Homo sapiens
  siRNA target sequence for FLJ37396 (NM_173671.1,599-617).
cagccacccctatttcatt

SEQ ID NO: 427284 - DNA, 19 bp, Homo sapiens
  siRNA target sequence for FLJ37396 (NM_173671.1,601-619).
gccacccctatttcattaa

SEQ ID NO: 427285 - DNA, 19 bp, Homo sapiens
  siRNA target sequence for FLJ37396 (NM_173671.1,743-761).
caatagcaatacatttgga

SEQ ID NO: 427286 - DNA, 19 bp, Homo sapiens
  siRNA target sequence for FLJ37396 (NM_173671.1,760-778).
gacttccccttaatatagt

SEQ ID NO: 427287 - DNA, 19 bp, Homo sapiens
  siRNA target sequence for FLJ37396 (NM_173671.1,766-784).
cccttaatatagtttgcaa

SEQ ID NO: 427288 - DNA, 19 bp, Homo sapiens
  siRNA target sequence for FLJ37396 (NM_173671.1,808-826).
gctgcccagcttcaaaaaa

SEQ ID NO: 427289 - DNA, 19 bp, Homo sapiens
  siRNA target sequence for FLJ37396 (NM_173671.1,1196-1214).
ccgccaccggctgatagaa

SEQ ID NO: 427290 - DNA, 19 bp, Homo sapiens
  siRNA target sequence for FLJ37396 (NM_173671.1,1197-1215).
cgccaccggctgatagaaa

SEQ ID NO: 427291 - DNA, 19 bp, Homo sapiens
  siRNA target sequence for FLJ37396 (NM_173671.1,1198-1216).
gccaccggctgatagaaat

SEQ ID NO: 427292 - DNA, 19 bp, Homo sapiens
  siRNA target sequence for FLJ37396 (NM_173671.1,1235-1253).
cttagctcggctctataaa

SEQ ID NO: 427293 - DNA, 19 bp, Homo sapiens
  siRNA target sequence for FLJ37396 (NM_173671.1,1239-1257).
gctcggctctataaagaat

SEQ ID NO: 427294 - DNA, 19 bp, Homo sapiens
  siRNA target sequence for FLJ37396 (NM_173671.1,1240-1258).
ctcggctctataaagaatt

SEQ ID NO: 427295 - DNA, 19 bp, Homo sapiens
  siRNA target sequence for FLJ37396 (NM_173671.1,1300-1318).
ggcctgttcactttgaatt

SEQ ID NO: 427296 - DNA, 19 bp, Homo sapiens
  siRNA target sequence for FLJ37396 (NM_173671.1,1346-1364).
gccacctcctgtgtttata

SEQ ID NO: 427297 - DNA, 19 bp, Homo sapiens
  siRNA target sequence for FLJ37396 (NM_173671.1,1384-1402).
gtggtcgggtagacagata

SEQ ID NO: 427298 - DNA, 19 bp, Homo sapiens
  siRNA target sequence for FLJ37396 (NM_173671.1,1386-1404).
ggtcgggtagacagatatt

SEQ ID NO: 427299 - DNA, 19 bp, Homo sapiens
  siRNA target sequence for FLJ37396 (NM_173671.1,1405-1423).
ctcctactgctcttgtctt

SEQ ID NO: 427300 - DNA, 19 bp, Homo sapiens
  siRNA target sequence for FLJ37396 (NM_173671.1,1478-1496).
ggaagccattcttaagctt

SEQ ID NO: 427301 - DNA, 19 bp, Homo sapiens
  siRNA target sequence for FLJ37396 (NM_173671.1,1479-1497).
gaagccattcttaagcttt

SEQ ID NO: 427302 - DNA, 19 bp, Homo sapiens
  siRNA target sequence for FLJ37396 (NM_173671.1,1573-1591).
ctgtccagcaggtgtactt

SEQ ID NO: 427303 - DNA, 19 bp, Homo sapiens
  siRNA target sequence for FLJ37396 (NM_173671.1,1578-1596).
cagcaggtgtacttctatt

SEQ ID NO: 427304 - DNA, 19 bp, Homo sapiens
  siRNA target sequence for FLJ34503 (NM_173673.1,305-323).
gctctcaagccttgtttca

SEQ ID NO: 427305 - DNA, 19 bp, Homo sapiens
  siRNA target sequence for FLJ34503 (NM_173673.1,416-434).
ccagacctctcctctgatt

SEQ ID NO: 427306 - DNA, 19 bp, Homo sapiens
  siRNA target sequence for FLJ34503 (NM_173673.1,483-501).
cccactgtgaagtctgaaa

SEQ ID NO: 427307 - DNA, 19 bp, Homo sapiens
  siRNA target sequence for FLJ34503 (NM_173673.1,578-596).
ggacgttgttacagatttt

SEQ ID NO: 427308 - DNA, 19 bp, Homo sapiens
  siRNA target sequence for FLJ34503 (NM_173673.1,581-599).
cgttgttacagattttctt

SEQ ID NO: 427309 - DNA, 19 bp, Homo sapiens
  siRNA target sequence for FLJ34503 (NM_173673.1,694-712).
caccctcactagcacttaa

SEQ ID NO: 427310 - DNA, 19 bp, Homo sapiens
  siRNA target sequence for FLJ34503 (NM_173673.1,696-714).
ccctcactagcacttaata

SEQ ID NO: 427311 - DNA, 19 bp, Homo sapiens
  siRNA target sequence for FLJ34503 (NM_173673.1,697-715).
cctcactagcacttaatat

SEQ ID NO: 427312 - DNA, 19 bp, Homo sapiens
  siRNA target sequence for FLJ34503 (NM_173673.1,744-762).
gacaaattacaatgcattt

SEQ ID NO: 427313 - DNA, 19 bp, Homo sapiens
  siRNA target sequence for FLJ33708 (NM_173675.1,302-320).
ggtgatgtgtccttgttct

SEQ ID NO: 427314 - DNA, 19 bp, Homo sapiens
  siRNA target sequence for FLJ33708 (NM_173675.1,340-358).
ctcttgcaagtgacttgaa

SEQ ID NO: 427315 - DNA, 19 bp, Homo sapiens
  siRNA target sequence for FLJ40852 (NM_173677.1,233-251).
gcagtcccccactacaaca

SEQ ID NO: 427316 - DNA, 19 bp, Homo sapiens
  siRNA target sequence for FLJ40852 (NM_173677.1,236-254).
gtcccccactacaacaaat

SEQ ID NO: 427317 - DNA, 19 bp, Homo sapiens
  siRNA target sequence for FLJ40852 (NM_173677.1,239-257).
ccccactacaacaaattat

SEQ ID NO: 427318 - DNA, 19 bp, Homo sapiens
  siRNA target sequence for FLJ40852 (NM_173677.1,272-290).
cacatttgggaatatcaca

SEQ ID NO: 427319 - DNA, 19 bp, Homo sapiens
  siRNA target sequence for FLJ40852 (NM_173677.1,301-319).
catccggagtgcaatcgat

SEQ ID NO: 427320 - DNA, 19 bp, Homo sapiens
  siRNA target sequence for FLJ40852 (NM_173677.1,373-391).
ggaaggccggagaactgta

SEQ ID NO: 427321 - DNA, 19 bp, Homo sapiens
  siRNA target sequence for FLJ40852 (NM_173677.1,374-392).
gaaggccggagaactgtat

SEQ ID NO: 427322 - DNA, 19 bp, Homo sapiens
  siRNA target sequence for FLJ40852 (NM_173677.1,378-396).
gccggagaactgtatttct

SEQ ID NO: 427323 - DNA, 19 bp, Homo sapiens
  siRNA target sequence for FLJ40852 (NM_173677.1,428-446).
gcatcaggttggatcatgt

SEQ ID NO: 427324 - DNA, 19 bp, Homo sapiens
  siRNA target sequence for FLJ40852 (NM_173677.1,429-447).
catcaggttggatcatgtt

SEQ ID NO: 427325 - DNA, 19 bp, Homo sapiens
  siRNA target sequence for FLJ40852 (NM_173677.1,434-452).
ggttggatcatgttctgat

SEQ ID NO: 427326 - DNA, 19 bp, Homo sapiens
  siRNA target sequence for FLJ40852 (NM_173677.1,439-457).
gatcatgttctgatgatat

SEQ ID NO: 427327 - DNA, 19 bp, Homo sapiens
  siRNA target sequence for FLJ40852 (NM_173677.1,482-500).
gcttcactattgggaaaaa

SEQ ID NO: 427328 - DNA, 19 bp, Homo sapiens
  siRNA target sequence for FLJ40852 (NM_173677.1,536-554).
ctggtggattttagagaaa

SEQ ID NO: 427329 - DNA, 19 bp, Homo sapiens
  siRNA target sequence for FLJ40852 (NM_173677.1,595-613).
gattcactttgcatcttgt

SEQ ID NO: 427330 - DNA, 19 bp, Homo sapiens
  siRNA target sequence for FLJ40852 (NM_173677.1,612-630).
gtgacaaatgaatatatta

SEQ ID NO: 427331 - DNA, 19 bp, Homo sapiens
  siRNA target sequence for MGC33584 (NM_173680.2,387-405).
cggcgagggtcactttgta

SEQ ID NO: 427332 - DNA, 19 bp, Homo sapiens
  siRNA target sequence for MGC33584 (NM_173680.2,388-406).
ggcgagggtcactttgtat

SEQ ID NO: 427333 - DNA, 19 bp, Homo sapiens
  siRNA target sequence for MGC33584 (NM_173680.2,749-767).
gcctgcacgagctgattca

SEQ ID NO: 427334 - DNA, 19 bp, Homo sapiens
  siRNA target sequence for FLJ39415 (NM_173681.1,376-394).
ggctcaacctgcaatgaca

SEQ ID NO: 427335 - DNA, 19 bp, Homo sapiens
  siRNA target sequence for FLJ39415 (NM_173681.1,657-675).
gtttcttcaccaagatcta

SEQ ID NO: 427336 - DNA, 19 bp, Homo sapiens
  siRNA target sequence for FLJ39415 (NM_173681.1,773-791).
cttcgatgcgtggattaca

SEQ ID NO: 427337 - DNA, 19 bp, Homo sapiens
  siRNA target sequence for FLJ39415 (NM_173681.1,777-795).
gatgcgtggattacaatgt

SEQ ID NO: 427338 - DNA, 19 bp, Homo sapiens
  siRNA target sequence for FLJ39415 (NM_173681.1,836-854).
ccgttccacagcaaagtga

SEQ ID NO: 427339 - DNA, 19 bp, Homo sapiens
  siRNA target sequence for FLJ39415 (NM_173681.1,996-1014).
gggacatccaggtgtttta

SEQ ID NO: 427340 - DNA, 19 bp, Homo sapiens
  siRNA target sequence for FLJ39415 (NM_173681.1,998-1016).
gacatccaggtgttttaca

SEQ ID NO: 427341 - DNA, 19 bp, Homo sapiens
  siRNA target sequence for FLJ40288 (NM_173682.1,657-675).
cccatggtttgtatattgt

SEQ ID NO: 427342 - DNA, 19 bp, Homo sapiens
  siRNA target sequence for FLJ40288 (NM_173682.1,658-676).
ccatggtttgtatattgtt

SEQ ID NO: 427343 - DNA, 19 bp, Homo sapiens
  siRNA target sequence for FLJ40288 (NM_173682.1,681-699).
gagaccaatttcaagagaa

SEQ ID NO: 427344 - DNA, 19 bp, Homo sapiens
  siRNA target sequence for FLJ40288 (NM_173682.1,703-721).
gggcctgttgtccatcaaa

SEQ ID NO: 427345 - DNA, 19 bp, Homo sapiens
  siRNA target sequence for FLJ40288 (NM_173682.1,722-740).
gccccacggtgctttatct

SEQ ID NO: 427346 - DNA, 19 bp, Homo sapiens
  siRNA target sequence for FLJ40288 (NM_173682.1,723-741).
ccccacggtgctttatctt

SEQ ID NO: 427347 - DNA, 19 bp, Homo sapiens
  siRNA target sequence for FLJ40288 (NM_173682.1,725-743).
ccacggtgctttatcttca

SEQ ID NO: 427348 - DNA, 19 bp, Homo sapiens
  siRNA target sequence for FLJ40288 (NM_173682.1,726-744).
cacggtgctttatcttcat

SEQ ID NO: 427349 - DNA, 19 bp, Homo sapiens
  siRNA target sequence for FLJ40288 (NM_173682.1,801-819).
cgaggacctccgtctatca

SEQ ID NO: 427350 - DNA, 19 bp, Homo sapiens
  siRNA target sequence for FLJ40288 (NM_173682.1,835-853).
gctgccttgggattgttca

SEQ ID NO: 427351 - DNA, 19 bp, Homo sapiens
  siRNA target sequence for FLJ40288 (NM_173682.1,839-857).
ccttgggattgttcaaact

SEQ ID NO: 427352 - DNA, 19 bp, Homo sapiens
  siRNA target sequence for FLJ40288 (NM_173682.1,912-930).
gagctcttctggttggaat

SEQ ID NO: 427353 - DNA, 19 bp, Homo sapiens
  siRNA target sequence for FLJ40288 (NM_173682.1,943-961).
gggattctcaacatttcca

SEQ ID NO: 427354 - DNA, 19 bp, Homo sapiens
  siRNA target sequence for FLJ40288 (NM_173682.1,969-987).
ggaggctataggaatactt

SEQ ID NO: 427355 - DNA, 19 bp, Homo sapiens
  siRNA target sequence for FLJ40288 (NM_173682.1,970-988).
gaggctataggaatactta

SEQ ID NO: 427356 - DNA, 19 bp, Homo sapiens
  siRNA target sequence for FLJ40288 (NM_173682.1,972-990).
ggctataggaatacttaca

SEQ ID NO: 427357 - DNA, 19 bp, Homo sapiens
  siRNA target sequence for FLJ40288 (NM_173682.1,973-991).
gctataggaatacttacaa

SEQ ID NO: 427358 - DNA, 19 bp, Homo sapiens
  siRNA target sequence for FLJ40288 (NM_173682.1,979-997).
ggaatacttacaaccattt

SEQ ID NO: 427359 - DNA, 19 bp, Homo sapiens
  siRNA target sequence for FLJ40288 (NM_173682.1,1015-1033).
gagtcaagtgccgtaaaat

SEQ ID NO: 427360 - DNA, 19 bp, Homo sapiens
  siRNA target sequence for LOC286046 (NM_173683.2,240-258).
gtgctacagctctacatca

SEQ ID NO: 427361 - DNA, 19 bp, Homo sapiens
  siRNA target sequence for LOC286046 (NM_173683.2,330-348).
gtgctagcctcctatcaca

SEQ ID NO: 427362 - DNA, 19 bp, Homo sapiens
  siRNA target sequence for LOC286046 (NM_173683.2,593-611).
ggtagggatcgtgtacatt

SEQ ID NO: 427363 - DNA, 19 bp, Homo sapiens
  siRNA target sequence for LOC286046 (NM_173683.2,597-615).
gggatcgtgtacattttct

SEQ ID NO: 427364 - DNA, 19 bp, Homo sapiens
  siRNA target sequence for LOC286046 (NM_173683.2,632-650).
ggaagggcggactcgatat

SEQ ID NO: 427365 - DNA, 19 bp, Homo sapiens
  siRNA target sequence for LOC286046 (NM_173683.2,636-654).
gggcggactcgatatcgaa

SEQ ID NO: 427366 - DNA, 19 bp, Homo sapiens
  siRNA target sequence for LOC286046 (NM_173683.2,637-655).
ggcggactcgatatcgaat

SEQ ID NO: 427367 - DNA, 19 bp, Homo sapiens
  siRNA target sequence for LOC286046 (NM_173683.2,640-658).
ggactcgatatcgaatgtt

SEQ ID NO: 427368 - DNA, 19 bp, Homo sapiens
  siRNA target sequence for LOC286046 (NM_173683.2,641-659).
gactcgatatcgaatgttt

SEQ ID NO: 427369 - DNA, 19 bp, Homo sapiens
  siRNA target sequence for LOC286046 (NM_173683.2,645-663).
cgatatcgaatgtttgcat

SEQ ID NO: 427370 - DNA, 19 bp, Homo sapiens
  siRNA target sequence for LOC286046 (NM_173683.2,646-664).
gatatcgaatgtttgcata

SEQ ID NO: 427371 - DNA, 19 bp, Homo sapiens
  siRNA target sequence for LOC286046 (NM_173683.2,660-678).
gcatattatacgatagtct

SEQ ID NO: 427372 - DNA, 19 bp, Homo sapiens
  siRNA target sequence for LOC286046 (NM_173683.2,661-679).
catattatacgatagtctt

SEQ ID NO: 427373 - DNA, 19 bp, Homo sapiens
  siRNA target sequence for LOC286046 (NM_173683.2,694-712).
ccttgacgttcctttggta

SEQ ID NO: 427374 - DNA, 19 bp, Homo sapiens
  siRNA target sequence for LOC286046 (NM_173683.2,695-713).
cttgacgttcctttggtat

SEQ ID NO: 427375 - DNA, 19 bp, Homo sapiens
  siRNA target sequence for LOC286046 (NM_173683.2,698-716).
gacgttcctttggtatttt

SEQ ID NO: 427376 - DNA, 19 bp, Homo sapiens
  siRNA target sequence for LOC286046 (NM_173683.2,704-722).
cctttggtatttttacaga

SEQ ID NO: 427377 - DNA, 19 bp, Homo sapiens
  siRNA target sequence for LOC286046 (NM_173683.2,795-813).
gcaatgatgctcttatact

SEQ ID NO: 427378 - DNA, 19 bp, Homo sapiens
  siRNA target sequence for LOC286046 (NM_173683.2,796-814).
caatgatgctcttatacta

SEQ ID NO: 427379 - DNA, 19 bp, Homo sapiens
  siRNA target sequence for LOC286046 (NM_173683.2,832-850).
caggaccacgagctaagat

SEQ ID NO: 427380 - DNA, 19 bp, Homo sapiens
  siRNA target sequence for LOC286046 (NM_173683.2,964-982).
gagccgtaacggaacaaca

SEQ ID NO: 427381 - DNA, 19 bp, Homo sapiens
  siRNA target sequence for LOC286046 (NM_173683.2,1077-1095).
cccctcattaagattgaca

SEQ ID NO: 427382 - DNA, 19 bp, Homo sapiens
  siRNA target sequence for LOC286046 (NM_173683.2,1078-1096).
ccctcattaagattgacat

SEQ ID NO: 427383 - DNA, 19 bp, Homo sapiens
  siRNA target sequence for LOC286046 (NM_173683.2,1144-1162).
ggctgagaaggactattaa

SEQ ID NO: 427384 - DNA, 19 bp, Homo sapiens
  siRNA target sequence for LOC286046 (NM_173683.2,1150-1168).
gaaggactattaacattct

SEQ ID NO: 427385 - DNA, 19 bp, Homo sapiens
  siRNA target sequence for LOC286046 (NM_173683.2,1186-1204).
ccgcagtaggcattcgata

SEQ ID NO: 427386 - DNA, 19 bp, Homo sapiens
  siRNA target sequence for LOC286046 (NM_173683.2,1187-1205).
cgcagtaggcattcgatat

SEQ ID NO: 427387 - DNA, 19 bp, Homo sapiens
  siRNA target sequence for LOC286046 (NM_173683.2,1213-1231).
gaccactcctctatgagtt

SEQ ID NO: 427388 - DNA, 19 bp, Homo sapiens
  siRNA target sequence for LOC286046 (NM_173683.2,1227-1245).
gagttgctacagtatgagt

SEQ ID NO: 427389 - DNA, 19 bp, Homo sapiens
  siRNA target sequence for FLJ35721 (NM_173684.1,180-198).
ggacatcctcccttacctt

SEQ ID NO: 427390 - DNA, 19 bp, Homo sapiens
  siRNA target sequence for FLJ35721 (NM_173684.1,452-470).
ggggactttgtataaaaaa

SEQ ID NO: 427391 - DNA, 19 bp, Homo sapiens
  siRNA target sequence for FLJ35721 (NM_173684.1,453-471).
gggactttgtataaaaaat

SEQ ID NO: 427392 - DNA, 19 bp, Homo sapiens
  siRNA target sequence for FLJ35721 (NM_173684.1,548-566).
cacgagtgaaattactgaa

SEQ ID NO: 427393 - DNA, 19 bp, Homo sapiens
  siRNA target sequence for FLJ32440 (NM_173685.1,231-249).
ccaggacgttccagttcaa

SEQ ID NO: 427394 - DNA, 19 bp, Homo sapiens
  siRNA target sequence for FLJ32440 (NM_173685.1,232-250).
caggacgttccagttcaaa

SEQ ID NO: 427395 - DNA, 19 bp, Homo sapiens
  siRNA target sequence for FLJ32440 (NM_173685.1,253-271).
caggttcaactggtttcat

SEQ ID NO: 427396 - DNA, 19 bp, Homo sapiens
  siRNA target sequence for FLJ32440 (NM_173685.1,390-408).
gtgagtagtgaatatagta

SEQ ID NO: 427397 - DNA, 19 bp, Homo sapiens
  siRNA target sequence for FLJ32440 (NM_173685.1,411-429).
gacaaggcaatggttgaat

SEQ ID NO: 427398 - DNA, 19 bp, Homo sapiens
  siRNA target sequence for FLJ32440 (NM_173685.1,413-431).
caaggcaatggttgaattt

SEQ ID NO: 427399 - DNA, 19 bp, Homo sapiens
  siRNA target sequence for FLJ32440 (NM_173685.1,416-434).
ggcaatggttgaatttgct

SEQ ID NO: 427400 - DNA, 19 bp, Homo sapiens
  siRNA target sequence for FLJ32440 (NM_173685.1,417-435).
gcaatggttgaatttgcta

SEQ ID NO: 427401 - DNA, 19 bp, Homo sapiens
  siRNA target sequence for FLJ32440 (NM_173685.1,436-454).
cattggatcggcaactaaa

SEQ ID NO: 427402 - DNA, 19 bp, Homo sapiens
  siRNA target sequence for FLJ32440 (NM_173685.1,440-458).
ggatcggcaactaaaccat

SEQ ID NO: 427403 - DNA, 19 bp, Homo sapiens
  siRNA target sequence for FLJ32440 (NM_173685.1,441-459).
gatcggcaactaaaccatt

SEQ ID NO: 427404 - DNA, 19 bp, Homo sapiens
  siRNA target sequence for FLJ32440 (NM_173685.1,445-463).
ggcaactaaaccattatgt

SEQ ID NO: 427405 - DNA, 19 bp, Homo sapiens
  siRNA target sequence for FLJ32440 (NM_173685.1,462-480).
gtaaaggctgttcaatcta

SEQ ID NO: 427406 - DNA, 19 bp, Homo sapiens
  siRNA target sequence for FLJ32440 (NM_173685.1,468-486).
gctgttcaatctacaataa

SEQ ID NO: 427407 - DNA, 19 bp, Homo sapiens
  siRNA target sequence for FLJ32440 (NM_173685.1,469-487).
ctgttcaatctacaataaa

SEQ ID NO: 427408 - DNA, 19 bp, Homo sapiens
  siRNA target sequence for FLJ32440 (NM_173685.1,554-572).
ggctttacagagcaagaat

SEQ ID NO: 427409 - DNA, 19 bp, Homo sapiens
  siRNA target sequence for FLJ32440 (NM_173685.1,555-573).
gctttacagagcaagaatt

SEQ ID NO: 427410 - DNA, 19 bp, Homo sapiens
  siRNA target sequence for FLJ32440 (NM_173685.1,684-702).
ggagtggatgaagatataa

SEQ ID NO: 427411 - DNA, 19 bp, Homo sapiens
  siRNA target sequence for FLJ32440 (NM_173685.1,781-799).
gtggccacacctatgaaga

SEQ ID NO: 427412 - DNA, 19 bp, Homo sapiens
  siRNA target sequence for FLJ32440 (NM_173685.1,803-821).
cgccattgttcgcatgatt

SEQ ID NO: 427413 - DNA, 19 bp, Homo sapiens
  siRNA target sequence for FLJ32440 (NM_173685.1,805-823).
ccattgttcgcatgattga

SEQ ID NO: 427414 - DNA, 19 bp, Homo sapiens
  siRNA target sequence for FLJ32440 (NM_173685.1,869-887).
ctgtagccacacggatata

SEQ ID NO: 427415 - DNA, 19 bp, Homo sapiens
  siRNA target sequence for FLJ32440 (NM_173685.1,874-892).
gccacacggatataagaaa

SEQ ID NO: 427416 - DNA, 19 bp, Homo sapiens
  siRNA target sequence for FLJ32440 (NM_173685.1,889-907).
gaaagtcagatcttatcca

SEQ ID NO: 427417 - DNA, 19 bp, Homo sapiens
  siRNA target sequence for FLJ32440 (NM_173685.1,905-923).
ccaggatgaagcacttaga

SEQ ID NO: 427418 - DNA, 19 bp, Homo sapiens
  siRNA target sequence for FLJ32440 (NM_173685.1,916-934).
cacttagaagggcaattga

SEQ ID NO: 427419 - DNA, 19 bp, Homo sapiens
  siRNA target sequence for FLJ32440 (NM_173685.1,918-936).
cttagaagggcaattgaga

SEQ ID NO: 427420 - DNA, 19 bp, Homo sapiens
  siRNA target sequence for FLJ32440 (NM_173685.1,925-943).
gggcaattgagaaccataa

SEQ ID NO: 427421 - DNA, 19 bp, Homo sapiens
  siRNA target sequence for FLJ32440 (NM_173685.1,927-945).
gcaattgagaaccataaca

SEQ ID NO: 427422 - DNA, 19 bp, Homo sapiens
  siRNA target sequence for FLJ37131 (NM_173687.1,526-544).
ccacaacggcacttaacct

SEQ ID NO: 427423 - DNA, 19 bp, Homo sapiens
  siRNA target sequence for FLJ37131 (NM_173687.1,577-595).
ccaaagacgctcactttct

SEQ ID NO: 427424 - DNA, 19 bp, Homo sapiens
  siRNA target sequence for FLJ39630 (NM_173688.1,194-212).
cattagagaggcagatctt

SEQ ID NO: 427425 - DNA, 19 bp, Homo sapiens
  siRNA target sequence for FLJ39630 (NM_173688.1,236-254).
cgcctattcttggaaattt

SEQ ID NO: 427426 - DNA, 19 bp, Homo sapiens
  siRNA target sequence for FLJ39630 (NM_173688.1,300-318).
gtacagacctcgatacata

SEQ ID NO: 427427 - DNA, 19 bp, Homo sapiens
  siRNA target sequence for FLJ39630 (NM_173688.1,305-323).
gacctcgatacataatggt

SEQ ID NO: 427428 - DNA, 19 bp, Homo sapiens
  siRNA target sequence for FLJ39630 (NM_173688.1,310-328).
cgatacataatggtgtata

SEQ ID NO: 427429 - DNA, 19 bp, Homo sapiens
  siRNA target sequence for FLJ39630 (NM_173688.1,405-423).
ggacaccgatctaatgaca

SEQ ID NO: 427430 - DNA, 19 bp, Homo sapiens
  siRNA target sequence for FLJ39630 (NM_173688.1,406-424).
gacaccgatctaatgacat

SEQ ID NO: 427431 - DNA, 19 bp, Homo sapiens
  siRNA target sequence for FLJ39630 (NM_173688.1,410-428).
ccgatctaatgacattcaa

SEQ ID NO: 427432 - DNA, 19 bp, Homo sapiens
  siRNA target sequence for FLJ39630 (NM_173688.1,539-557).
caggctgcatcgttgactt

SEQ ID NO: 427433 - DNA, 19 bp, Homo sapiens
  siRNA target sequence for FLJ39630 (NM_173688.1,579-597).
cagtgctgtccaaatacta

SEQ ID NO: 427434 - DNA, 19 bp, Homo sapiens
  siRNA target sequence for FLJ39630 (NM_173688.1,581-599).
gtgctgtccaaatactact

SEQ ID NO: 427435 - DNA, 19 bp, Homo sapiens
  siRNA target sequence for FLJ39630 (NM_173688.1,622-640).
gcctgttatgtgatcagta

SEQ ID NO: 427436 - DNA, 19 bp, Homo sapiens
  siRNA target sequence for FLJ39630 (NM_173688.1,623-641).
cctgttatgtgatcagtat

SEQ ID NO: 427437 - DNA, 19 bp, Homo sapiens
  siRNA target sequence for FLJ39630 (NM_173688.1,638-656).
gtatttccatggaagaaga

SEQ ID NO: 427438 - DNA, 19 bp, Homo sapiens
  siRNA target sequence for FLJ38464 (NM_173689.1,616-634).
ctggaggtcctgaatggtt

SEQ ID NO: 427439 - DNA, 19 bp, Homo sapiens
  siRNA target sequence for FLJ36664 (NM_173690.1,128-146).
ggagaaaccgcctcgaaaa

SEQ ID NO: 427440 - DNA, 19 bp, Homo sapiens
  siRNA target sequence for FLJ36664 (NM_173690.1,172-190).
gtgatagcagtcattcaca

SEQ ID NO: 427441 - DNA, 19 bp, Homo sapiens
  siRNA target sequence for FLJ36664 (NM_173690.1,174-192).
gatagcagtcattcacaat

SEQ ID NO: 427442 - DNA, 19 bp, Homo sapiens
  siRNA target sequence for FLJ36664 (NM_173690.1,179-197).
cagtcattcacaatctcaa

SEQ ID NO: 427443 - DNA, 19 bp, Homo sapiens
  siRNA target sequence for FLJ36664 (NM_173690.1,198-216).
ggggaaagatatcaacatt

SEQ ID NO: 427444 - DNA, 19 bp, Homo sapiens
  siRNA target sequence for FLJ36664 (NM_173690.1,199-217).
gggaaagatatcaacattt

SEQ ID NO: 427445 - DNA, 19 bp, Homo sapiens
  siRNA target sequence for FLJ36664 (NM_173690.1,262-280).
gaggtgctgaagatgatat

SEQ ID NO: 427446 - DNA, 19 bp, Homo sapiens
  siRNA target sequence for FLJ36664 (NM_173690.1,383-401).
gcagtggcagtcctatttt

SEQ ID NO: 427447 - DNA, 19 bp, Homo sapiens
  siRNA target sequence for FLJ36664 (NM_173690.1,386-404).
gtggcagtcctattttgga

SEQ ID NO: 427448 - DNA, 19 bp, Homo sapiens
  siRNA target sequence for FLJ36664 (NM_173690.1,482-500).
gaagcgctggcaaatagga

SEQ ID NO: 427449 - DNA, 19 bp, Homo sapiens
  siRNA target sequence for FLJ36664 (NM_173690.1,491-509).
gcaaataggagaaattgct

SEQ ID NO: 427450 - DNA, 19 bp, Homo sapiens
  siRNA target sequence for FLJ36664 (NM_173690.1,515-533).
gattgggcagctatactat

SEQ ID NO: 427451 - DNA, 19 bp, Homo sapiens
  siRNA target sequence for FLJ36664 (NM_173690.1,519-537).
gggcagctatactatcatt

SEQ ID NO: 427452 - DNA, 19 bp, Homo sapiens
  siRNA target sequence for FLJ36664 (NM_173690.1,520-538).
ggcagctatactatcatta

SEQ ID NO: 427453 - DNA, 19 bp, Homo sapiens
  siRNA target sequence for FLJ36664 (NM_173690.1,521-539).
gcagctatactatcattat

SEQ ID NO: 427454 - DNA, 19 bp, Homo sapiens
  siRNA target sequence for FLJ36664 (NM_173690.1,584-602).
cttctattctgcaatcaga

SEQ ID NO: 427455 - DNA, 19 bp, Homo sapiens
  siRNA target sequence for FLJ36664 (NM_173690.1,605-623).
gagatcatattattctcaa

SEQ ID NO: 427456 - DNA, 19 bp, Homo sapiens
  siRNA target sequence for FLJ36664 (NM_173690.1,610-628).
catattattctcaagtcaa

SEQ ID NO: 427457 - DNA, 19 bp, Homo sapiens
  siRNA target sequence for FLJ36664 (NM_173690.1,635-653).
ggacagacctgaattggta

SEQ ID NO: 427458 - DNA, 19 bp, Homo sapiens
  siRNA target sequence for FLJ36664 (NM_173690.1,645-663).
gaattggtagttaagaagt

SEQ ID NO: 427459 - DNA, 19 bp, Homo sapiens
  siRNA target sequence for FLJ36664 (NM_173690.1,651-669).
gtagttaagaagttacgat

SEQ ID NO: 427460 - DNA, 19 bp, Homo sapiens
  siRNA target sequence for FLJ36664 (NM_173690.1,659-677).
gaagttacgatattatgca

SEQ ID NO: 427461 - DNA, 19 bp, Homo sapiens
  siRNA target sequence for FLJ36664 (NM_173690.1,679-697).
gatttatagtagtttgtct

SEQ ID NO: 427462 - DNA, 19 bp, Homo sapiens
  siRNA target sequence for FLJ36664 (NM_173690.1,759-777).
gattatactcaccgattta

SEQ ID NO: 427463 - DNA, 19 bp, Homo sapiens
  siRNA target sequence for FLJ36664 (NM_173690.1,766-784).
ctcaccgatttaatactga

SEQ ID NO: 427464 - DNA, 19 bp, Homo sapiens
  siRNA target sequence for FLJ36664 (NM_173690.1,770-788).
ccgatttaatactgaagat

SEQ ID NO: 427465 - DNA, 19 bp, Homo sapiens
  siRNA target sequence for FLJ36664 (NM_173690.1,803-821).
cttggtgcttcaagaagta

SEQ ID NO: 427466 - DNA, 19 bp, Homo sapiens
  siRNA target sequence for FLJ36664 (NM_173690.1,836-854).
ggcggatcctgtaatggta

SEQ ID NO: 427467 - DNA, 19 bp, Homo sapiens
  siRNA target sequence for FLJ36664 (NM_173690.1,837-855).
gcggatcctgtaatggtat

SEQ ID NO: 427468 - DNA, 19 bp, Homo sapiens
  siRNA target sequence for FLJ36664 (NM_173690.1,838-856).
cggatcctgtaatggtatt

SEQ ID NO: 427469 - DNA, 19 bp, Homo sapiens
  siRNA target sequence for FLJ36664 (NM_173690.1,839-857).
ggatcctgtaatggtatta

SEQ ID NO: 427470 - DNA, 19 bp, Homo sapiens
  siRNA target sequence for FLJ36664 (NM_173690.1,844-862).
ctgtaatggtattaaatga

SEQ ID NO: 427471 - DNA, 19 bp, Homo sapiens
  siRNA target sequence for FLJ36664 (NM_173690.1,872-890).
cattgttatcacatcgaat

SEQ ID NO: 427472 - DNA, 19 bp, Homo sapiens
  siRNA target sequence for FLJ36664 (NM_173690.1,887-905).
gaatcgccttgctgaaaca

SEQ ID NO: 427473 - DNA, 19 bp, Homo sapiens
  siRNA target sequence for FLJ36664 (NM_173690.1,917-935).
gctggaacagggcatgatt

SEQ ID NO: 427474 - DNA, 19 bp, Homo sapiens
  siRNA target sequence for FLJ36664 (NM_173690.1,953-971).
ggctgacgcactcattatt

SEQ ID NO: 427475 - DNA, 19 bp, Homo sapiens
  siRNA target sequence for FLJ36664 (NM_173690.1,957-975).
gacgcactcattattggta

SEQ ID NO: 427476 - DNA, 19 bp, Homo sapiens
  siRNA target sequence for FLJ36664 (NM_173690.1,959-977).
cgcactcattattggtaat

SEQ ID NO: 427477 - DNA, 19 bp, Homo sapiens
  siRNA target sequence for FLJ36664 (NM_173690.1,960-978).
gcactcattattggtaatt

SEQ ID NO: 427478 - DNA, 19 bp, Homo sapiens
  siRNA target sequence for FLJ36664 (NM_173690.1,979-997).
gtaataatcaggttaagtt

SEQ ID NO: 427479 - DNA, 19 bp, Homo sapiens
  siRNA target sequence for FLJ36664 (NM_173690.1,989-1007).
ggttaagttcagtgaacta

SEQ ID NO: 427480 - DNA, 19 bp, Homo sapiens
  siRNA target sequence for FLJ36664 (NM_173690.1,990-1008).
gttaagttcagtgaactaa

SEQ ID NO: 427481 - DNA, 19 bp, Homo sapiens
  siRNA target sequence for FLJ36664 (NM_173690.1,995-1013).
gttcagtgaactaactgtt

SEQ ID NO: 427482 - DNA, 19 bp, Homo sapiens
  siRNA target sequence for FLJ36664 (NM_173690.1,1000-1018).
gtgaactaactgttgacat

SEQ ID NO: 427483 - DNA, 19 bp, Homo sapiens
  siRNA target sequence for FLJ36664 (NM_173690.1,1016-1034).
catgttccggatgttacaa

SEQ ID NO: 427484 - DNA, 19 bp, Homo sapiens
  siRNA target sequence for FLJ36664 (NM_173690.1,1046-1064).
ggagccaatgaatttagct

SEQ ID NO: 427485 - DNA, 19 bp, Homo sapiens
  siRNA target sequence for FLJ36664 (NM_173690.1,1130-1148).
caagtatctgctctacaaa

SEQ ID NO: 427486 - DNA, 19 bp, Homo sapiens
  siRNA target sequence for FLJ36664 (NM_173690.1,1248-1266).
cccacaggtcgttctgata

SEQ ID NO: 427487 - DNA, 19 bp, Homo sapiens
  siRNA target sequence for FLJ36664 (NM_173690.1,1250-1268).
cacaggtcgttctgatagt

SEQ ID NO: 427488 - DNA, 19 bp, Homo sapiens
  siRNA target sequence for FLJ36664 (NM_173690.1,1281-1299).
gattttggaggtgtactta

SEQ ID NO: 427489 - DNA, 19 bp, Homo sapiens
  siRNA target sequence for FLJ36664 (NM_173690.1,1287-1305).
ggaggtgtacttactaata

SEQ ID NO: 427490 - DNA, 19 bp, Homo sapiens
  siRNA target sequence for FLJ36664 (NM_173690.1,1290-1308).
ggtgtacttactaatagta

SEQ ID NO: 427491 - DNA, 19 bp, Homo sapiens
  siRNA target sequence for FLJ36664 (NM_173690.1,1306-1324).
gtaaccgggatattattaa

SEQ ID NO: 427492 - DNA, 19 bp, Homo sapiens
  siRNA target sequence for FLJ36664 (NM_173690.1,1310-1328).
ccgggatattattaatgga

SEQ ID NO: 427493 - DNA, 19 bp, Homo sapiens
  siRNA target sequence for FLJ36664 (NM_173690.1,1329-1347).
gatgccatccacaaacgaa

SEQ ID NO: 427494 - DNA, 19 bp, Homo sapiens
  siRNA target sequence for FLJ36664 (NM_173690.1,1333-1351).
ccatccacaaacgaaatca

SEQ ID NO: 427495 - DNA, 19 bp, Homo sapiens
  siRNA target sequence for FLJ36664 (NM_173690.1,1435-1453).
ctaatagtgttgcgtataa

SEQ ID NO: 427496 - DNA, 19 bp, Homo sapiens
  siRNA target sequence for FLJ36664 (NM_173690.1,1498-1516).
ctcctacagcatatccaaa

SEQ ID NO: 427497 - DNA, 19 bp, Homo sapiens
  siRNA target sequence for FLJ36664 (NM_173690.1,1504-1522).
cagcatatccaaaagcttt

SEQ ID NO: 427498 - DNA, 19 bp, Homo sapiens
  siRNA target sequence for FLJ36664 (NM_173690.1,1572-1590).
cctctaatggccttcctat

SEQ ID NO: 427499 - DNA, 19 bp, Homo sapiens
  siRNA target sequence for FLJ36664 (NM_173690.1,1573-1591).
ctctaatggccttcctatt

SEQ ID NO: 427500 - DNA, 19 bp, Homo sapiens
  siRNA target sequence for FLJ36664 (NM_173690.1,1651-1669).
gaaaaatcaaccgtgatat

SEQ ID NO: 427501 - DNA, 19 bp, Homo sapiens
  siRNA target sequence for FLJ36664 (NM_173690.1,1671-1689).
gcccagctactgactcatt

SEQ ID NO: 427502 - DNA, 19 bp, Homo sapiens
  siRNA target sequence for FLJ36664 (NM_173690.1,1682-1700).
gactcattcacgttcaata

SEQ ID NO: 427503 - DNA, 19 bp, Homo sapiens
  siRNA target sequence for FLJ36664 (NM_173690.1,1684-1702).
ctcattcacgttcaataga

SEQ ID NO: 427504 - DNA, 19 bp, Homo sapiens
  siRNA target sequence for FLJ36664 (NM_173690.1,1704-1722).
caggcatttctccagtttt

SEQ ID NO: 427505 - DNA, 19 bp, Homo sapiens
  siRNA target sequence for FLJ36664 (NM_173690.1,1742-1760).
cttgctcctcacaagattt

SEQ ID NO: 427506 - DNA, 19 bp, Homo sapiens
  siRNA target sequence for FLJ36664 (NM_173690.1,1833-1851).
caactgccaagggatgaaa

SEQ ID NO: 427507 - DNA, 19 bp, Homo sapiens
  siRNA target sequence for FLJ36664 (NM_173690.1,1877-1895).
gcacattttggaattagca

SEQ ID NO: 427508 - DNA, 19 bp, Homo sapiens
  siRNA target sequence for FLJ36664 (NM_173690.1,1878-1896).
cacattttggaattagcat

SEQ ID NO: 427509 - DNA, 19 bp, Homo sapiens
  siRNA target sequence for FLJ36664 (NM_173690.1,1911-1929).
cgaaacgtgttctttgaga

SEQ ID NO: 427510 - DNA, 19 bp, Homo sapiens
  siRNA target sequence for C9orf75 (NM_173691.1,363-381).
ccgcgcaaactctcgaaat

SEQ ID NO: 427511 - DNA, 19 bp, Homo sapiens
  siRNA target sequence for C9orf75 (NM_173691.1,364-382).
cgcgcaaactctcgaaatt

SEQ ID NO: 427512 - DNA, 19 bp, Homo sapiens
  siRNA target sequence for C9orf75 (NM_173691.1,366-384).
cgcaaactctcgaaattct

SEQ ID NO: 427513 - DNA, 19 bp, Homo sapiens
  siRNA target sequence for C9orf75 (NM_173691.1,367-385).
gcaaactctcgaaattctt

SEQ ID NO: 427514 - DNA, 19 bp, Homo sapiens
  siRNA target sequence for C9orf75 (NM_173691.1,368-386).
caaactctcgaaattcttt

SEQ ID NO: 427515 - DNA, 19 bp, Homo sapiens
  siRNA target sequence for C9orf75 (NM_173691.1,610-628).
ctcgctgaccgggctatta

SEQ ID NO: 427516 - DNA, 19 bp, Homo sapiens
  siRNA target sequence for C9orf75 (NM_173691.1,613-631).
gctgaccgggctattaggt

SEQ ID NO: 427517 - DNA, 19 bp, Homo sapiens
  siRNA target sequence for C9orf75 (NM_173691.1,720-738).
caagaatagccgggaatat

SEQ ID NO: 427518 - DNA, 19 bp, Homo sapiens
  siRNA target sequence for C9orf75 (NM_173691.1,1147-1165).
ctgcagaccacatttgagt

SEQ ID NO: 427519 - DNA, 19 bp, Homo sapiens
  siRNA target sequence for ATP11C (NM_173694.2,163-181).
gcacacgcacagtgtttgt

SEQ ID NO: 427520 - DNA, 19 bp, Homo sapiens
  siRNA target sequence for ATP11C (NM_173694.2,241-259).
gaatagtctcatctaagta

SEQ ID NO: 427521 - DNA, 19 bp, Homo sapiens
  siRNA target sequence for ATP11C (NM_173694.2,248-266).
ctcatctaagtatacactt

SEQ ID NO: 427522 - DNA, 19 bp, Homo sapiens
  siRNA target sequence for ATP11C (NM_173694.2,253-271).
ctaagtatacactttggaa

SEQ ID NO: 427523 - DNA, 19 bp, Homo sapiens
  siRNA target sequence for ATP11C (NM_173694.2,257-275).
gtatacactttggaatttt

SEQ ID NO: 427524 - DNA, 19 bp, Homo sapiens
  siRNA target sequence for ATP11C (NM_173694.2,278-296).
cccaaagaatctgtttgaa

SEQ ID NO: 427525 - DNA, 19 bp, Homo sapiens
  siRNA target sequence for ATP11C (NM_173694.2,454-472).
gagctgacaatgaagtcaa

SEQ ID NO: 427526 - DNA, 19 bp, Homo sapiens
  siRNA target sequence for ATP11C (NM_173694.2,533-551).
caaggttggtgatgtagta

SEQ ID NO: 427527 - DNA, 19 bp, Homo sapiens
  siRNA target sequence for ATP11C (NM_173694.2,536-554).
ggttggtgatgtagtagaa

SEQ ID NO: 427528 - DNA, 19 bp, Homo sapiens
  siRNA target sequence for ATP11C (NM_173694.2,582-600).
gatcttattcttctatcat

SEQ ID NO: 427529 - DNA, 19 bp, Homo sapiens
  siRNA target sequence for ATP11C (NM_173694.2,608-626).
cactgatggaacctgttat

SEQ ID NO: 427530 - DNA, 19 bp, Homo sapiens
  siRNA target sequence for ATP11C (NM_173694.2,610-628).
ctgatggaacctgttatgt

SEQ ID NO: 427531 - DNA, 19 bp, Homo sapiens
  siRNA target sequence for ATP11C (NM_173694.2,612-630).
gatggaacctgttatgtca

SEQ ID NO: 427532 - DNA, 19 bp, Homo sapiens
  siRNA target sequence for ATP11C (NM_173694.2,655-673).
ccaattgcaagacacatta

SEQ ID NO: 427533 - DNA, 19 bp, Homo sapiens
  siRNA target sequence for ATP11C (NM_173694.2,656-674).
caattgcaagacacattat

SEQ ID NO: 427534 - DNA, 19 bp, Homo sapiens
  siRNA target sequence for ATP11C (NM_173694.2,721-739).
ccctccgagcagcaattga

SEQ ID NO: 427535 - DNA, 19 bp, Homo sapiens
  siRNA target sequence for ATP11C (NM_173694.2,722-740).
cctccgagcagcaattgaa

SEQ ID NO: 427536 - DNA, 19 bp, Homo sapiens
  siRNA target sequence for ATP11C (NM_173694.2,723-741).
ctccgagcagcaattgaat

SEQ ID NO: 427537 - DNA, 19 bp, Homo sapiens
  siRNA target sequence for ATP11C (NM_173694.2,751-769).
ctcaacctgacctctacaa

SEQ ID NO: 427538 - DNA, 19 bp, Homo sapiens
  siRNA target sequence for ATP11C (NM_173694.2,753-771).
caacctgacctctacaaat

SEQ ID NO: 427539 - DNA, 19 bp, Homo sapiens
  siRNA target sequence for ATP11C (NM_173694.2,757-775).
ctgacctctacaaatttgt

SEQ ID NO: 427540 - DNA, 19 bp, Homo sapiens
  siRNA target sequence for ATP11C (NM_173694.2,774-792).
gttgggcgaatcaatatct

SEQ ID NO: 427541 - DNA, 19 bp, Homo sapiens
  siRNA target sequence for ATP11C (NM_173694.2,777-795).
gggcgaatcaatatctaca

SEQ ID NO: 427542 - DNA, 19 bp, Homo sapiens
  siRNA target sequence for ATP11C (NM_173694.2,848-866).
gaaaggagctacgctaaaa

SEQ ID NO: 427543 - DNA, 19 bp, Homo sapiens
  siRNA target sequence for ATP11C (NM_173694.2,947-965).
gaaacgttctgctgttgaa

SEQ ID NO: 427544 - DNA, 19 bp, Homo sapiens
  siRNA target sequence for ATP11C (NM_173694.2,951-969).
cgttctgctgttgaaaaat

SEQ ID NO: 427545 - DNA, 19 bp, Homo sapiens
  siRNA target sequence for ATP11C (NM_173694.2,1020-1038).
gcagtatgcactactctaa

SEQ ID NO: 427546 - DNA, 19 bp, Homo sapiens
  siRNA target sequence for ATP11C (NM_173694.2,1023-1041).
gtatgcactactctaaagt

SEQ ID NO: 427547 - DNA, 19 bp, Homo sapiens
  siRNA target sequence for ATP11C (NM_173694.2,1027-1045).
gcactactctaaagtatgt

SEQ ID NO: 427548 - DNA, 19 bp, Homo sapiens
  siRNA target sequence for ATP11C (NM_173694.2,1048-1066).
ggcaaagtaccccatacaa

SEQ ID NO: 427549 - DNA, 19 bp, Homo sapiens
  siRNA target sequence for ATP11C (NM_173694.2,1049-1067).
gcaaagtaccccatacaat

SEQ ID NO: 427550 - DNA, 19 bp, Homo sapiens
  siRNA target sequence for ATP11C (NM_173694.2,1064-1082).
caatgatgaaccttggtat

SEQ ID NO: 427551 - DNA, 19 bp, Homo sapiens
  siRNA target sequence for ATP11C (NM_173694.2,1133-1151).
caccgacttcctatcattt

SEQ ID NO: 427552 - DNA, 19 bp, Homo sapiens
  siRNA target sequence for ATP11C (NM_173694.2,1135-1153).
ccgacttcctatcatttat

SEQ ID NO: 427553 - DNA, 19 bp, Homo sapiens
  siRNA target sequence for ATP11C (NM_173694.2,1143-1161).
ctatcatttatggttctat

SEQ ID NO: 427554 - DNA, 19 bp, Homo sapiens
  siRNA target sequence for ATP11C (NM_173694.2,1155-1173).
gttctattcaactttatca

SEQ ID NO: 427555 - DNA, 19 bp, Homo sapiens
  siRNA target sequence for ATP11C (NM_173694.2,1184-1202).
catgtacgtcacagtagaa

SEQ ID NO: 427556 - DNA, 19 bp, Homo sapiens
  siRNA target sequence for ATP11C (NM_173694.2,1234-1252).
catgggataaggactttta

SEQ ID NO: 427557 - DNA, 19 bp, Homo sapiens
  siRNA target sequence for ATP11C (NM_173694.2,1237-1255).
gggataaggacttttatga

SEQ ID NO: 427558 - DNA, 19 bp, Homo sapiens
  siRNA target sequence for ATP11C (NM_173694.2,1269-1287).
gaaggagccctggttaaca

SEQ ID NO: 427559 - DNA, 19 bp, Homo sapiens
  siRNA target sequence for ATP11C (NM_173694.2,1272-1290).
ggagccctggttaacacat

SEQ ID NO: 427560 - DNA, 19 bp, Homo sapiens
  siRNA target sequence for ATP11C (NM_173694.2,1311-1329).
ggtcaggtggattatgtat

SEQ ID NO: 427561 - DNA, 19 bp, Homo sapiens
  siRNA target sequence for ATP11C (NM_173694.2,1501-1519).
gtgccttgtgtttatgtca

SEQ ID NO: 427562 - DNA, 19 bp, Homo sapiens
  siRNA target sequence for ATP11C (NM_173694.2,1518-1536).
catactgtagaaatcaaaa

SEQ ID NO: 427563 - DNA, 19 bp, Homo sapiens
  siRNA target sequence for ATP11C (NM_173694.2,1548-1566).
gttgatggagctacagaat

SEQ ID NO: 427564 - DNA, 19 bp, Homo sapiens
  siRNA target sequence for ATP11C (NM_173694.2,1567-1585).
cagctgaattaacctatat

SEQ ID NO: 427565 - DNA, 19 bp, Homo sapiens
  siRNA target sequence for ATP11C (NM_173694.2,1569-1587).
gctgaattaacctatatct

SEQ ID NO: 427566 - DNA, 19 bp, Homo sapiens
  siRNA target sequence for ATP11C (NM_173694.2,1630-1648).
ggtacgggttcacattttt

SEQ ID NO: 427567 - DNA, 19 bp, Homo sapiens
  siRNA target sequence for ATP11C (NM_173694.2,1634-1652).
cgggttcacatttttagga

SEQ ID NO: 427568 - DNA, 19 bp, Homo sapiens
  siRNA target sequence for ATP11C (NM_173694.2,1640-1658).
cacatttttaggaaatcga

SEQ ID NO: 427569 - DNA, 19 bp, Homo sapiens
  siRNA target sequence for ATP11C (NM_173694.2,1642-1660).
catttttaggaaatcgaaa

SEQ ID NO: 427570 - DNA, 19 bp, Homo sapiens
  siRNA target sequence for ATP11C (NM_173694.2,1650-1668).
ggaaatcgaaatggatata

SEQ ID NO: 427571 - DNA, 19 bp, Homo sapiens
  siRNA target sequence for ATP11C (NM_173694.2,1707-1725).
gaacttcttcacaccttaa

SEQ ID NO: 427572 - DNA, 19 bp, Homo sapiens
  siRNA target sequence for ATP11C (NM_173694.2,1740-1758).
cggcgacgtatgagtgtaa

SEQ ID NO: 427573 - DNA, 19 bp, Homo sapiens
  siRNA target sequence for ATP11C (NM_173694.2,1741-1759).
ggcgacgtatgagtgtaat

SEQ ID NO: 427574 - DNA, 19 bp, Homo sapiens
  siRNA target sequence for ATP11C (NM_173694.2,1742-1760).
gcgacgtatgagtgtaatt

SEQ ID NO: 427575 - DNA, 19 bp, Homo sapiens
  siRNA target sequence for ATP11C (NM_173694.2,1744-1762).
gacgtatgagtgtaattgt

SEQ ID NO: 427576 - DNA, 19 bp, Homo sapiens
  siRNA target sequence for ATP11C (NM_173694.2,1766-1784).
gactcaagaaggagacata

SEQ ID NO: 427577 - DNA, 19 bp, Homo sapiens
  siRNA target sequence for ATP11C (NM_173694.2,1768-1786).
ctcaagaaggagacatact

SEQ ID NO: 427578 - DNA, 19 bp, Homo sapiens
  siRNA target sequence for ATP11C (NM_173694.2,1776-1794).
ggagacatacttctctttt

SEQ ID NO: 427579 - DNA, 19 bp, Homo sapiens
  siRNA target sequence for ATP11C (NM_173694.2,1801-1819).
gagcagactcggcagtttt

SEQ ID NO: 427580 - DNA, 19 bp, Homo sapiens
  siRNA target sequence for ATP11C (NM_173694.2,1836-1854).
catgaaattgagttaacta

SEQ ID NO: 427581 - DNA, 19 bp, Homo sapiens
  siRNA target sequence for ATP11C (NM_173694.2,1859-1877).
ccatgtggaacgtaatgca

SEQ ID NO: 427582 - DNA, 19 bp, Homo sapiens
  siRNA target sequence for ATP11C (NM_173694.2,1865-1883).
ggaacgtaatgcaatggat

SEQ ID NO: 427583 - DNA, 19 bp, Homo sapiens
  siRNA target sequence for ATP11C (NM_173694.2,1900-1918).
gtgtagccttcaaagaaat

SEQ ID NO: 427584 - DNA, 19 bp, Homo sapiens
  siRNA target sequence for ATP11C (NM_173694.2,2004-2022).
gttttcgatgatattgaga

SEQ ID NO: 427585 - DNA, 19 bp, Homo sapiens
  siRNA target sequence for ATP11C (NM_173694.2,2103-2121).
gcagcaggcctgaaagtct

SEQ ID NO: 427586 - DNA, 19 bp, Homo sapiens
  siRNA target sequence for ATP11C (NM_173694.2,2192-2210).
cactgagctcttagaacta

SEQ ID NO: 427587 - DNA, 19 bp, Homo sapiens
  siRNA target sequence for ATP11C (NM_173694.2,2239-2257).
ggaaagaagatcgattaca

SEQ ID NO: 427588 - DNA, 19 bp, Homo sapiens
  siRNA target sequence for ATP11C (NM_173694.2,2244-2262).
gaagatcgattacatgaat

SEQ ID NO: 427589 - DNA, 19 bp, Homo sapiens
  siRNA target sequence for ATP11C (NM_173694.2,2247-2265).
gatcgattacatgaattat

SEQ ID NO: 427590 - DNA, 19 bp, Homo sapiens
  siRNA target sequence for ATP11C (NM_173694.2,2250-2268).
cgattacatgaattattga

SEQ ID NO: 427591 - DNA, 19 bp, Homo sapiens
  siRNA target sequence for ATP11C (NM_173694.2,2267-2285).
gatagaatatcgcaagaaa

SEQ ID NO: 427592 - DNA, 19 bp, Homo sapiens
  siRNA target sequence for ATP11C (NM_173694.2,2288-2306).
gctgcatgagtttcctaaa

SEQ ID NO: 427593 - DNA, 19 bp, Homo sapiens
  siRNA target sequence for ATP11C (NM_173694.2,2289-2307).
ctgcatgagtttcctaaaa

SEQ ID NO: 427594 - DNA, 19 bp, Homo sapiens
  siRNA target sequence for ATP11C (NM_173694.2,2297-2315).
gtttcctaaaagtactaga

SEQ ID NO: 427595 - DNA, 19 bp, Homo sapiens
  siRNA target sequence for ATP11C (NM_173694.2,2332-2350).
ggacagaacatcaggaata

SEQ ID NO: 427596 - DNA, 19 bp, Homo sapiens
  siRNA target sequence for ATP11C (NM_173694.2,2369-2387).
ctccacattgtcactcata

SEQ ID NO: 427597 - DNA, 19 bp, Homo sapiens
  siRNA target sequence for ATP11C (NM_173694.2,2371-2389).
ccacattgtcactcatact

SEQ ID NO: 427598 - DNA, 19 bp, Homo sapiens
  siRNA target sequence for ATP11C (NM_173694.2,2374-2392).
cattgtcactcatactaaa

SEQ ID NO: 427599 - DNA, 19 bp, Homo sapiens
  siRNA target sequence for ATP11C (NM_173694.2,2403-2421).
gactctagttcaaacaatt

SEQ ID NO: 427600 - DNA, 19 bp, Homo sapiens
  siRNA target sequence for ATP11C (NM_173694.2,2407-2425).
ctagttcaaacaattacaa

SEQ ID NO: 427601 - DNA, 19 bp, Homo sapiens
  siRNA target sequence for ATP11C (NM_173694.2,2473-2491).
gtcggatggcaccattaca

SEQ ID NO: 427602 - DNA, 19 bp, Homo sapiens
  siRNA target sequence for ATP11C (NM_173694.2,2475-2493).
cggatggcaccattacaga

SEQ ID NO: 427603 - DNA, 19 bp, Homo sapiens
  siRNA target sequence for ATP11C (NM_173694.2,2571-2589).
gttagtatgatcttggaat

SEQ ID NO: 427604 - DNA, 19 bp, Homo sapiens
  siRNA target sequence for ATP11C (NM_173694.2,2591-2609).
ccatgtgggaataggtatt

SEQ ID NO: 427605 - DNA, 19 bp, Homo sapiens
  siRNA target sequence for ATP11C (NM_173694.2,2592-2610).
catgtgggaataggtatta

SEQ ID NO: 427606 - DNA, 19 bp, Homo sapiens
  siRNA target sequence for ATP11C (NM_173694.2,2625-2643).
cgccaagcagctaggaata

SEQ ID NO: 427607 - DNA, 19 bp, Homo sapiens
  siRNA target sequence for ATP11C (NM_173694.2,2638-2656).
ggaatagcgattattctgt

SEQ ID NO: 427608 - DNA, 19 bp, Homo sapiens
  siRNA target sequence for ATP11C (NM_173694.2,2639-2657).
gaatagcgattattctgtt

SEQ ID NO: 427609 - DNA, 19 bp, Homo sapiens
  siRNA target sequence for ATP11C (NM_173694.2,2644-2662).
gcgattattctgttccaaa

SEQ ID NO: 427610 - DNA, 19 bp, Homo sapiens
  siRNA target sequence for ATP11C (NM_173694.2,2658-2676).
ccaaagtttaaacacttaa

SEQ ID NO: 427611 - DNA, 19 bp, Homo sapiens
  siRNA target sequence for ATP11C (NM_173694.2,2687-2705).
gttggctcatggacatcta

SEQ ID NO: 427612 - DNA, 19 bp, Homo sapiens
  siRNA target sequence for ATP11C (NM_173694.2,2697-2715).
ggacatctatattatgtga

SEQ ID NO: 427613 - DNA, 19 bp, Homo sapiens
  siRNA target sequence for ATP11C (NM_173694.2,2716-2734).
gaatagcacaccttgtaca

SEQ ID NO: 427614 - DNA, 19 bp, Homo sapiens
  siRNA target sequence for ATP11C (NM_173694.2,2820-2838).
gatgctgcttaccttacaa

SEQ ID NO: 427615 - DNA, 19 bp, Homo sapiens
  siRNA target sequence for ATP11C (NM_173694.2,2826-2844).
gcttaccttacaatgtaca

SEQ ID NO: 427616 - DNA, 19 bp, Homo sapiens
  siRNA target sequence for ATP11C (NM_173694.2,2827-2845).
cttaccttacaatgtacaa

SEQ ID NO: 427617 - DNA, 19 bp, Homo sapiens
  siRNA target sequence for ATP11C (NM_173694.2,2832-2850).
cttacaatgtacaatatct

SEQ ID NO: 427618 - DNA, 19 bp, Homo sapiens
  siRNA target sequence for ATP11C (NM_173694.2,2864-2882).
gcccatcctggcctatagt

SEQ ID NO: 427619 - DNA, 19 bp, Homo sapiens
  siRNA target sequence for ATP11C (NM_173694.2,2866-2884).
ccatcctggcctatagtct

SEQ ID NO: 427620 - DNA, 19 bp, Homo sapiens
  siRNA target sequence for ATP11C (NM_173694.2,2867-2885).
catcctggcctatagtcta

SEQ ID NO: 427621 - DNA, 19 bp, Homo sapiens
  siRNA target sequence for ATP11C (NM_173694.2,2920-2938).
cagatccccgattgtatat

SEQ ID NO: 427622 - DNA, 19 bp, Homo sapiens
  siRNA target sequence for ATP11C (NM_173694.2,2922-2940).
gatccccgattgtatatga

SEQ ID NO: 427623 - DNA, 19 bp, Homo sapiens
  siRNA target sequence for ATP11C (NM_173694.2,2927-2945).
ccgattgtatatgaaaatt

SEQ ID NO: 427624 - DNA, 19 bp, Homo sapiens
  siRNA target sequence for ATP11C (NM_173694.2,3086-3104).
ctggacttttggaaccatt

SEQ ID NO: 427625 - DNA, 19 bp, Homo sapiens
  siRNA target sequence for ATP11C (NM_173694.2,3105-3123).
gtttttacagtcttagtat

SEQ ID NO: 427626 - DNA, 19 bp, Homo sapiens
  siRNA target sequence for ATP11C (NM_173694.2,3164-3182).
gacgtggataaatcacttt

SEQ ID NO: 427627 - DNA, 19 bp, Homo sapiens
  siRNA target sequence for ATP11C (NM_173694.2,3191-3209).
gggttctttagccttctat

SEQ ID NO: 427628 - DNA, 19 bp, Homo sapiens
  siRNA target sequence for ATP11C (NM_173694.2,3193-3211).
gttctttagccttctatgt

SEQ ID NO: 427629 - DNA, 19 bp, Homo sapiens
  siRNA target sequence for ATP11C (NM_173694.2,3196-3214).
ctttagccttctatgtatt

SEQ ID NO: 427630 - DNA, 19 bp, Homo sapiens
  siRNA target sequence for ATP11C (NM_173694.2,3224-3242).
cttctggggaggaattatt

SEQ ID NO: 427631 - DNA, 19 bp, Homo sapiens
  siRNA target sequence for ATP11C (NM_173694.2,3252-3270).
ctcaagcaacagagaatgt

SEQ ID NO: 427632 - DNA, 19 bp, Homo sapiens
  siRNA target sequence for ATP11C (NM_173694.2,3310-3328).
ggttggctataattcttct

SEQ ID NO: 427633 - DNA, 19 bp, Homo sapiens
  siRNA target sequence for ATP11C (NM_173694.2,3315-3333).
gctataattcttctaatat

SEQ ID NO: 427634 - DNA, 19 bp, Homo sapiens
  siRNA target sequence for ATP11C (NM_173694.2,3347-3365).
ccctgagattcttctgata

SEQ ID NO: 427635 - DNA, 19 bp, Homo sapiens
  siRNA target sequence for ATP11C (NM_173694.2,3353-3371).
gattcttctgatagtatta

SEQ ID NO: 427636 - DNA, 19 bp, Homo sapiens
  siRNA target sequence for ATP11C (NM_173694.2,3388-3406).
gaagtgccaggagaaatct

SEQ ID NO: 427637 - DNA, 19 bp, Homo sapiens
  siRNA target sequence for ATP11C (NM_173694.2,3448-3466).
cagtcagacctcttctttt

SEQ ID NO: 427638 - DNA, 19 bp, Homo sapiens
  siRNA target sequence for ATP11C (NM_173694.2,3452-3470).
cagacctcttcttttacga

SEQ ID NO: 427639 - DNA, 19 bp, Homo sapiens
  siRNA target sequence for ATP11C (NM_173694.2,3472-3490).
cattctcagacgaatctaa

SEQ ID NO: 427640 - DNA, 19 bp, Homo sapiens
  siRNA target sequence for ATP11C (NM_173694.2,3476-3494).
ctcagacgaatctaatgta

SEQ ID NO: 427641 - DNA, 19 bp, Homo sapiens
  siRNA target sequence for ATP11C (NM_173694.2,3480-3498).
gacgaatctaatgtattgt

SEQ ID NO: 427642 - DNA, 19 bp, Homo sapiens
  siRNA target sequence for FLJ36601 (NM_173695.1,276-294).
ctaccaggatgctaaacca

SEQ ID NO: 427643 - DNA, 19 bp, Homo sapiens
  siRNA target sequence for FLJ36601 (NM_173695.1,318-336).
gacatacaccactagcaaa

SEQ ID NO: 427644 - DNA, 19 bp, Homo sapiens
  siRNA target sequence for FLJ36601 (NM_173695.1,324-342).
caccactagcaaattcaat

SEQ ID NO: 427645 - DNA, 19 bp, Homo sapiens
  siRNA target sequence for FLJ36601 (NM_173695.1,326-344).
ccactagcaaattcaatga

SEQ ID NO: 427646 - DNA, 19 bp, Homo sapiens
  siRNA target sequence for FLJ36601 (NM_173695.1,327-345).
cactagcaaattcaatgat

SEQ ID NO: 427647 - DNA, 19 bp, Homo sapiens
  siRNA target sequence for FLJ36601 (NM_173695.1,491-509).
caaaggcacactacttttt

SEQ ID NO: 427648 - DNA, 19 bp, Homo sapiens
  siRNA target sequence for FLJ36601 (NM_173695.1,593-611).
ctataagaagggatgtata

SEQ ID NO: 427649 - DNA, 19 bp, Homo sapiens
  siRNA target sequence for FLJ36601 (NM_173695.1,602-620).
gggatgtatataaaatgca

SEQ ID NO: 427650 - DNA, 19 bp, Homo sapiens
  siRNA target sequence for FLJ36601 (NM_173695.1,635-653).
cctcgccaccccaaaagtt

SEQ ID NO: 427651 - DNA, 19 bp, Homo sapiens
  siRNA target sequence for FLJ36601 (NM_173695.1,640-658).
ccaccccaaaagttttcca

SEQ ID NO: 427652 - DNA, 19 bp, Homo sapiens
  siRNA target sequence for FLJ36601 (NM_173695.1,697-715).
gatgtgctgctccatttga

SEQ ID NO: 427653 - DNA, 19 bp, Homo sapiens
  siRNA target sequence for FLJ36601 (NM_173695.1,726-744).
gccacctggaattaattca

SEQ ID NO: 427654 - DNA, 19 bp, Homo sapiens
  siRNA target sequence for FLJ36601 (NM_173695.1,727-745).
ccacctggaattaattcaa

SEQ ID NO: 427655 - DNA, 19 bp, Homo sapiens
  siRNA target sequence for FLJ36601 (NM_173695.1,757-775).
cctgtagataaccatgaaa

SEQ ID NO: 427656 - DNA, 19 bp, Homo sapiens
  siRNA target sequence for FLJ36601 (NM_173695.1,758-776).
ctgtagataaccatgaaaa

SEQ ID NO: 427657 - DNA, 19 bp, Homo sapiens
  siRNA target sequence for FLJ36601 (NM_173695.1,768-786).
ccatgaaaaaagggtaatt

SEQ ID NO: 427658 - DNA, 19 bp, Homo sapiens
  siRNA target sequence for FLJ36601 (NM_173695.1,779-797).
gggtaattcaactccattt

SEQ ID NO: 427659 - DNA, 19 bp, Homo sapiens
  siRNA target sequence for FLJ36601 (NM_173695.1,850-868).
catgtcctgccagaatttt

SEQ ID NO: 427660 - DNA, 19 bp, Homo sapiens
  siRNA target sequence for FLJ36601 (NM_173695.1,935-953).
gttcctgtacacctaagaa

SEQ ID NO: 427661 - DNA, 19 bp, Homo sapiens
  siRNA target sequence for FLJ36601 (NM_173695.1,946-964).
cctaagaaaaaatgttcta

SEQ ID NO: 427662 - DNA, 19 bp, Homo sapiens
  siRNA target sequence for FLJ36601 (NM_173695.1,1003-1021).
cgggcatggacagatgtat

SEQ ID NO: 427663 - DNA, 19 bp, Homo sapiens
  siRNA target sequence for FLJ36601 (NM_173695.1,1004-1022).
gggcatggacagatgtatt

SEQ ID NO: 427664 - DNA, 19 bp, Homo sapiens
  siRNA target sequence for FLJ36601 (NM_173695.1,1007-1025).
catggacagatgtatttct

SEQ ID NO: 427665 - DNA, 19 bp, Homo sapiens
  siRNA target sequence for FLJ36601 (NM_173695.1,1029-1047).
gatatacaaggttttggtt

SEQ ID NO: 427666 - DNA, 19 bp, Homo sapiens
  siRNA target sequence for FLJ36601 (NM_173695.1,1060-1078).
gtgccatactgcagcaata

SEQ ID NO: 427667 - DNA, 19 bp, Homo sapiens
  siRNA target sequence for FLJ36601 (NM_173695.1,1062-1080).
gccatactgcagcaataat

SEQ ID NO: 427668 - DNA, 19 bp, Homo sapiens
  siRNA target sequence for FLJ36601 (NM_173695.1,1129-1147).
gcatccagcaacatatatt

SEQ ID NO: 427669 - DNA, 19 bp, Homo sapiens
  siRNA target sequence for FLJ36601 (NM_173695.1,1133-1151).
ccagcaacatatattctga

SEQ ID NO: 427670 - DNA, 19 bp, Homo sapiens
  siRNA target sequence for FLJ36601 (NM_173695.1,1134-1152).
cagcaacatatattctgat

SEQ ID NO: 427671 - DNA, 19 bp, Homo sapiens
  siRNA target sequence for FLJ36601 (NM_173695.1,1137-1155).
caacatatattctgattct

SEQ ID NO: 427672 - DNA, 19 bp, Homo sapiens
  siRNA target sequence for FLJ36601 (NM_173695.1,1167-1185).
gcttagttggatgaacata

SEQ ID NO: 427673 - DNA, 19 bp, Homo sapiens
  siRNA target sequence for FLJ36601 (NM_173695.1,1172-1190).
gttggatgaacataaatta

SEQ ID NO: 427674 - DNA, 19 bp, Homo sapiens
  siRNA target sequence for FLJ36601 (NM_173695.1,1194-1212).
gaatactcgacatgtgata

SEQ ID NO: 427675 - DNA, 19 bp, Homo sapiens
  siRNA target sequence for FLJ36601 (NM_173695.1,1199-1217).
ctcgacatgtgatatggaa

SEQ ID NO: 427676 - DNA, 19 bp, Homo sapiens
  siRNA target sequence for FLJ36601 (NM_173695.1,1239-1257).
cccttctgagagatggata

SEQ ID NO: 427677 - DNA, 19 bp, Homo sapiens
  siRNA target sequence for FLJ36601 (NM_173695.1,1246-1264).
gagagatggatagtaaatt

SEQ ID NO: 427678 - DNA, 19 bp, Homo sapiens
  siRNA target sequence for FLJ36601 (NM_173695.1,1250-1268).
gatggatagtaaattttga

SEQ ID NO: 427679 - DNA, 19 bp, Homo sapiens
  siRNA target sequence for FLJ36601 (NM_173695.1,1353-1371).
gtacacacgaccaaaaagt

SEQ ID NO: 427680 - DNA, 19 bp, Homo sapiens
  siRNA target sequence for FLJ36601 (NM_173695.1,1384-1402).
ctgcacaattgcctgatta

SEQ ID NO: 427681 - DNA, 19 bp, Homo sapiens
  siRNA target sequence for FLJ36601 (NM_173695.1,1492-1510).
ggcctgagaaaggaagata

SEQ ID NO: 427682 - DNA, 19 bp, Homo sapiens
  siRNA target sequence for FLJ40182 (NM_173696.1,206-224).
gcttccttagtgtgtcttt

SEQ ID NO: 427683 - DNA, 19 bp, Homo sapiens
  siRNA target sequence for FLJ40182 (NM_173696.1,305-323).
cccagttggaggctcaatt

SEQ ID NO: 427684 - DNA, 19 bp, Homo sapiens
  siRNA target sequence for FLJ40182 (NM_173696.1,505-523).
gttggtgcaaataatttca

SEQ ID NO: 427685 - DNA, 19 bp, Homo sapiens
  siRNA target sequence for FLJ40182 (NM_173696.1,512-530).
caaataatttcaaaaacta

SEQ ID NO: 427686 - DNA, 19 bp, Homo sapiens
  siRNA target sequence for FLJ40182 (NM_173696.1,545-563).
gcgtctctagtgaacaaca

SEQ ID NO: 427687 - DNA, 19 bp, Homo sapiens
  siRNA target sequence for FLJ40182 (NM_173696.1,546-564).
cgtctctagtgaacaacat

SEQ ID NO: 427688 - DNA, 19 bp, Homo sapiens
  siRNA target sequence for FLJ40182 (NM_173696.1,547-565).
gtctctagtgaacaacata

SEQ ID NO: 427689 - DNA, 19 bp, Homo sapiens
  siRNA target sequence for FLJ40182 (NM_173696.1,554-572).
gtgaacaacatattttact

SEQ ID NO: 427690 - DNA, 19 bp, Homo sapiens
  siRNA target sequence for FLJ40182 (NM_173696.1,610-628).
cattctctgaagttgctaa

SEQ ID NO: 427691 - DNA, 19 bp, Homo sapiens
  siRNA target sequence for FLJ40182 (NM_173696.1,726-744).
gaagtggcaacaatataga

SEQ ID NO: 427692 - DNA, 19 bp, Homo sapiens
  siRNA target sequence for FLJ40182 (NM_173696.1,733-751).
caacaatatagaagtgtta

SEQ ID NO: 427693 - DNA, 19 bp, Homo sapiens
  siRNA target sequence for FLJ40182 (NM_173696.1,780-798).
gctacgtgaccaattcgta

SEQ ID NO: 427694 - DNA, 19 bp, Homo sapiens
  siRNA target sequence for FLJ40182 (NM_173696.1,781-799).
ctacgtgaccaattcgtaa

SEQ ID NO: 427695 - DNA, 19 bp, Homo sapiens
  siRNA target sequence for FLJ40182 (NM_173696.1,801-819).
ggctcttgaggactttgaa

SEQ ID NO: 427696 - DNA, 19 bp, Homo sapiens
  siRNA target sequence for FLJ40182 (NM_173696.1,843-861).
cgatgaagacagtgaactt

SEQ ID NO: 427697 - DNA, 19 bp, Homo sapiens
  siRNA target sequence for FLJ33610 (NM_173697.1,289-307).
cctaagagcctggagattt

SEQ ID NO: 427698 - DNA, 19 bp, Homo sapiens
  siRNA target sequence for FLJ33610 (NM_173697.1,290-308).
ctaagagcctggagattta

SEQ ID NO: 427699 - DNA, 19 bp, Homo sapiens
  siRNA target sequence for FLJ37659 (NM_173698.1,335-353).
gtagcctatatgaatccta

SEQ ID NO: 427700 - DNA, 19 bp, Homo sapiens
  siRNA target sequence for FLJ37659 (NM_173698.1,370-388).
gagaggcccaactcaatct

SEQ ID NO: 427701 - DNA, 19 bp, Homo sapiens
  siRNA target sequence for FLJ37659 (NM_173698.1,372-390).
gaggcccaactcaatctgt

SEQ ID NO: 427702 - DNA, 19 bp, Homo sapiens
  siRNA target sequence for FLJ37659 (NM_173698.1,393-411).
gcccaacaatccaagatta

SEQ ID NO: 427703 - DNA, 19 bp, Homo sapiens
  siRNA target sequence for FLJ37659 (NM_173698.1,399-417).
caatccaagattatctaaa

SEQ ID NO: 427704 - DNA, 19 bp, Homo sapiens
  siRNA target sequence for FLJ37659 (NM_173698.1,403-421).
ccaagattatctaaatcga

SEQ ID NO: 427705 - DNA, 19 bp, Homo sapiens
  siRNA target sequence for FLJ37659 (NM_173698.1,718-736).
gaaccgttcatacaaatca

SEQ ID NO: 427706 - DNA, 19 bp, Homo sapiens
  siRNA target sequence for FLJ37659 (NM_173698.1,740-758).
caaagctctacgcatgaat

SEQ ID NO: 427707 - DNA, 19 bp, Homo sapiens
  siRNA target sequence for FLJ37659 (NM_173698.1,744-762).
gctctacgcatgaatcaga

SEQ ID NO: 427708 - DNA, 19 bp, Homo sapiens
  siRNA target sequence for FLJ37659 (NM_173698.1,745-763).
ctctacgcatgaatcagaa

SEQ ID NO: 427709 - DNA, 19 bp, Homo sapiens
  siRNA target sequence for FLJ37659 (NM_173698.1,750-768).
cgcatgaatcagaatcaga

SEQ ID NO: 427710 - DNA, 19 bp, Homo sapiens
  siRNA target sequence for FLJ37659 (NM_173698.1,771-789).
gcaaggagtctgtaaaaaa

SEQ ID NO: 427711 - DNA, 19 bp, Homo sapiens
  siRNA target sequence for FLJ37659 (NM_173698.1,830-848).
gtaagaagcctcagcaaaa

SEQ ID NO: 427712 - DNA, 19 bp, Homo sapiens
  siRNA target sequence for FLJ37659 (NM_173698.1,856-874).
gaaaagttaccctgatgat

SEQ ID NO: 427713 - DNA, 19 bp, Homo sapiens
  siRNA target sequence for FLJ37659 (NM_173698.1,955-973).
gcgagaacaagcaaaggaa

SEQ ID NO: 427714 - DNA, 19 bp, Homo sapiens
  siRNA target sequence for FLJ37659 (NM_173698.1,998-1016).
cagcacaagaaacatagta

SEQ ID NO: 427715 - DNA, 19 bp, Homo sapiens
  siRNA target sequence for FLJ37659 (NM_173698.1,1037-1055).
ggatcaagtcacaagtcaa

SEQ ID NO: 427716 - DNA, 19 bp, Homo sapiens
  siRNA target sequence for MGC33889 (NM_173699.1,323-341).
ggtgacagaccccagaatt

SEQ ID NO: 427717 - DNA, 19 bp, Homo sapiens
  siRNA target sequence for MGC33889 (NM_173699.1,521-539).
gtgtcgctggtgcatttct

SEQ ID NO: 427718 - DNA, 19 bp, Homo sapiens
  siRNA target sequence for MGC33889 (NM_173699.1,577-595).
gggagatatgataaagttt

SEQ ID NO: 427719 - DNA, 19 bp, Homo sapiens
  siRNA target sequence for MGC33889 (NM_173699.1,579-597).
gagatatgataaagtttgt

SEQ ID NO: 427720 - DNA, 19 bp, Homo sapiens
  siRNA target sequence for MGC33889 (NM_173699.1,581-599).
gatatgataaagtttgtta

SEQ ID NO: 427721 - DNA, 19 bp, Homo sapiens
  siRNA target sequence for MGC33889 (NM_173699.1,596-614).
gttatcaggaaggataagt

SEQ ID NO: 427722 - DNA, 19 bp, Homo sapiens
  siRNA target sequence for MGC33889 (NM_173699.1,607-625).
ggataagtgtcacttcaat

SEQ ID NO: 427723 - DNA, 19 bp, Homo sapiens
  siRNA target sequence for MGC33889 (NM_173699.1,662-680).
gcacttggtgttgatttga

SEQ ID NO: 427724 - DNA, 19 bp, Homo sapiens
  siRNA target sequence for MGC33889 (NM_173699.1,663-681).
cacttggtgttgatttgaa

SEQ ID NO: 427725 - DNA, 19 bp, Homo sapiens
  siRNA target sequence for MGC33889 (NM_173699.1,699-717).
ggcactactatgccttttt

SEQ ID NO: 427726 - DNA, 19 bp, Homo sapiens
  siRNA target sequence for MGC33889 (NM_173699.1,730-748).
cctcacctatgatgaaaca

SEQ ID NO: 427727 - DNA, 19 bp, Homo sapiens
  siRNA target sequence for MGC33889 (NM_173699.1,731-749).
ctcacctatgatgaaacaa

SEQ ID NO: 427728 - DNA, 19 bp, Homo sapiens
  siRNA target sequence for MGC33889 (NM_173699.1,836-854).
gaggcagtctgggaaatta

SEQ ID NO: 427729 - DNA, 19 bp, Homo sapiens
  siRNA target sequence for MGC33889 (NM_173699.1,856-874).
gaatatgatgggtgtatat

SEQ ID NO: 427730 - DNA, 19 bp, Homo sapiens
  siRNA target sequence for MGC33889 (NM_173699.1,1045-1063).
gtttgtagccaagatacat

SEQ ID NO: 427731 - DNA, 19 bp, Homo sapiens
  siRNA target sequence for MGC33889 (NM_173699.1,1049-1067).
gtagccaagatacatgata

SEQ ID NO: 427732 - DNA, 19 bp, Homo sapiens
  siRNA target sequence for FLJ39821 (NM_173700.1,753-771).
gccctccaccgaagaataa

SEQ ID NO: 427733 - DNA, 19 bp, Homo sapiens
  siRNA target sequence for FLJ39821 (NM_173700.1,758-776).
ccaccgaagaataaggttt

SEQ ID NO: 427734 - DNA, 19 bp, Homo sapiens
  siRNA target sequence for FLJ39821 (NM_173700.1,761-779).
ccgaagaataaggttttat

SEQ ID NO: 427735 - DNA, 19 bp, Homo sapiens
  siRNA target sequence for FLJ39821 (NM_173700.1,809-827).
cactcaagctgcataccat

SEQ ID NO: 427736 - DNA, 19 bp, Homo sapiens
  siRNA target sequence for MTATP6 (NM_173702.1,189-207).
cattgcccccacaatccta

SEQ ID NO: 427737 - DNA, 19 bp, Homo sapiens
  siRNA target sequence for MTATP6 (NM_173702.1,218-236).
ccgcagtactgatcattct

SEQ ID NO: 427738 - DNA, 19 bp, Homo sapiens
  siRNA target sequence for MTATP6 (NM_173702.1,219-237).
cgcagtactgatcattcta

SEQ ID NO: 427739 - DNA, 19 bp, Homo sapiens
  siRNA target sequence for MTATP6 (NM_173702.1,220-238).
gcagtactgatcattctat

SEQ ID NO: 427740 - DNA, 19 bp, Homo sapiens
  siRNA target sequence for MTATP6 (NM_173702.1,235-253).
ctatttccccctctattga

SEQ ID NO: 427741 - DNA, 19 bp, Homo sapiens
  siRNA target sequence for MTATP6 (NM_173702.1,256-274).
cccacctccaaatatctca

SEQ ID NO: 427742 - DNA, 19 bp, Homo sapiens
  siRNA target sequence for MTATP6 (NM_173702.1,263-281).
ccaaatatctcatcaacaa

SEQ ID NO: 427743 - DNA, 19 bp, Homo sapiens
  siRNA target sequence for MTATP6 (NM_173702.1,286-304).
ctaatcaccacccaacaat

SEQ ID NO: 427744 - DNA, 19 bp, Homo sapiens
  siRNA target sequence for MTATP6 (NM_173702.1,293-311).
ccacccaacaatgactaat

SEQ ID NO: 427745 - DNA, 19 bp, Homo sapiens
  siRNA target sequence for MTATP6 (NM_173702.1,296-314).
cccaacaatgactaatcaa

SEQ ID NO: 427746 - DNA, 19 bp, Homo sapiens
  siRNA target sequence for MTATP6 (NM_173702.1,355-373).
ggacgaacctgatctctta

SEQ ID NO: 427747 - DNA, 19 bp, Homo sapiens
  siRNA target sequence for MTATP6 (NM_173702.1,356-374).
gacgaacctgatctcttat

SEQ ID NO: 427748 - DNA, 19 bp, Homo sapiens
  siRNA target sequence for MTATP6 (NM_173702.1,363-381).
ctgatctcttatactagta

SEQ ID NO: 427749 - DNA, 19 bp, Homo sapiens
  siRNA target sequence for MTATP6 (NM_173702.1,368-386).
ctcttatactagtatcctt

SEQ ID NO: 427750 - DNA, 19 bp, Homo sapiens
  siRNA target sequence for MTATP6 (NM_173702.1,370-388).
cttatactagtatccttaa

SEQ ID NO: 427751 - DNA, 19 bp, Homo sapiens
  siRNA target sequence for MTATP6 (NM_173702.1,376-394).
ctagtatccttaatcattt

SEQ ID NO: 427752 - DNA, 19 bp, Homo sapiens
  siRNA target sequence for MTATP6 (NM_173702.1,471-489).
catggccatccccttatga

SEQ ID NO: 427753 - DNA, 19 bp, Homo sapiens
  siRNA target sequence for MTATP6 (NM_173702.1,570-588).
ccttatccccatactagtt

SEQ ID NO: 427754 - DNA, 19 bp, Homo sapiens
  siRNA target sequence for MTATP6 (NM_173702.1,571-589).
cttatccccatactagtta

SEQ ID NO: 427755 - DNA, 19 bp, Homo sapiens
  siRNA target sequence for MTATP8 (NM_173703.1,21-39).
ccgtatggcccaccataat

SEQ ID NO: 427756 - DNA, 19 bp, Homo sapiens
  siRNA target sequence for MTATP8 (NM_173703.1,22-40).
cgtatggcccaccataatt

SEQ ID NO: 427757 - DNA, 19 bp, Homo sapiens
  siRNA target sequence for MTATP8 (NM_173703.1,23-41).
gtatggcccaccataatta

SEQ ID NO: 427758 - DNA, 19 bp, Homo sapiens
  siRNA target sequence for MTATP8 (NM_173703.1,42-60).
cccccatactccttacact

SEQ ID NO: 427759 - DNA, 19 bp, Homo sapiens
  siRNA target sequence for MTATP8 (NM_173703.1,43-61).
ccccatactccttacacta

SEQ ID NO: 427760 - DNA, 19 bp, Homo sapiens
  siRNA target sequence for MTATP8 (NM_173703.1,44-62).
cccatactccttacactat

SEQ ID NO: 427761 - DNA, 19 bp, Homo sapiens
  siRNA target sequence for MTATP8 (NM_173703.1,45-63).
ccatactccttacactatt

SEQ ID NO: 427762 - DNA, 19 bp, Homo sapiens
  siRNA target sequence for MTCO1 (NM_173704.1,6-24).
gttcgccgaccgttgacta

SEQ ID NO: 427763 - DNA, 19 bp, Homo sapiens
  siRNA target sequence for MTCO1 (NM_173704.1,10-28).
gccgaccgttgactattct

SEQ ID NO: 427764 - DNA, 19 bp, Homo sapiens
  siRNA target sequence for MTCO1 (NM_173704.1,12-30).
cgaccgttgactattctct

SEQ ID NO: 427765 - DNA, 19 bp, Homo sapiens
  siRNA target sequence for MTCO1 (NM_173704.1,13-31).
gaccgttgactattctcta

SEQ ID NO: 427766 - DNA, 19 bp, Homo sapiens
  siRNA target sequence for MTCO1 (NM_173704.1,95-113).
cagctctaagcctccttat

SEQ ID NO: 427767 - DNA, 19 bp, Homo sapiens
  siRNA target sequence for MTCO1 (NM_173704.1,134-152).
caggcaaccttctaggtaa

SEQ ID NO: 427768 - DNA, 19 bp, Homo sapiens
  siRNA target sequence for MTCO1 (NM_173704.1,174-192).
cgtcacagcccatgcattt

SEQ ID NO: 427769 - DNA, 19 bp, Homo sapiens
  siRNA target sequence for MTCO1 (NM_173704.1,234-252).
ctttggcaactgactagtt

SEQ ID NO: 427770 - DNA, 19 bp, Homo sapiens
  siRNA target sequence for MTCO1 (NM_173704.1,394-412).
cccttagcagggaactact

SEQ ID NO: 427771 - DNA, 19 bp, Homo sapiens
  siRNA target sequence for MTCO1 (NM_173704.1,425-443).
cctccgtagacctaaccat

SEQ ID NO: 427772 - DNA, 19 bp, Homo sapiens
  siRNA target sequence for MTCO1 (NM_173704.1,489-507).
caatttcatcacaacaatt

SEQ ID NO: 427773 - DNA, 19 bp, Homo sapiens
  siRNA target sequence for MTCO1 (NM_173704.1,802-820).
ccatttggatacataggta

SEQ ID NO: 427774 - DNA, 19 bp, Homo sapiens
  siRNA target sequence for MTCO1 (NM_173704.1,920-938).
cctccgctaccataatcat

SEQ ID NO: 427775 - DNA, 19 bp, Homo sapiens
  siRNA target sequence for MTCO1 (NM_173704.1,1522-1540).
gaacccgtatacataaaat

SEQ ID NO: 427776 - DNA, 19 bp, Homo sapiens
  siRNA target sequence for MTCO1 (NM_173704.1,1525-1543).
cccgtatacataaaatcta

SEQ ID NO: 427777 - DNA, 19 bp, Homo sapiens
  siRNA target sequence for MTCO2 (NM_173705.1,14-32).
cgcaagtaggtctacaaga

SEQ ID NO: 427778 - DNA, 19 bp, Homo sapiens
  siRNA target sequence for MTCO2 (NM_173705.1,33-51).
cgctacttcccctatcata

SEQ ID NO: 427779 - DNA, 19 bp, Homo sapiens
  siRNA target sequence for MTCO2 (NM_173705.1,44-62).
ctatcatagaagagcttat

SEQ ID NO: 427780 - DNA, 19 bp, Homo sapiens
  siRNA target sequence for MTCO2 (NM_173705.1,57-75).
gcttatcacctttcatgat

SEQ ID NO: 427781 - DNA, 19 bp, Homo sapiens
  siRNA target sequence for MTCO2 (NM_173705.1,70-88).
catgatcacgccctcataa

SEQ ID NO: 427782 - DNA, 19 bp, Homo sapiens
  siRNA target sequence for MTCO2 (NM_173705.1,73-91).
gatcacgccctcataatca

SEQ ID NO: 427783 - DNA, 19 bp, Homo sapiens
  siRNA target sequence for MTCO2 (NM_173705.1,76-94).
cacgccctcataatcattt

SEQ ID NO: 427784 - DNA, 19 bp, Homo sapiens
  siRNA target sequence for MTCO2 (NM_173705.1,129-147).
cctaacactcacaacaaaa

SEQ ID NO: 427785 - DNA, 19 bp, Homo sapiens
  siRNA target sequence for MTCO2 (NM_173705.1,148-166).
ctaactaatactaacatct

SEQ ID NO: 427786 - DNA, 19 bp, Homo sapiens
  siRNA target sequence for MTCO2 (NM_173705.1,167-185).
cagacgctcaggaaataga

SEQ ID NO: 427787 - DNA, 19 bp, Homo sapiens
  siRNA target sequence for MTCO2 (NM_173705.1,235-253).
ccatccctacgcatccttt

SEQ ID NO: 427788 - DNA, 19 bp, Homo sapiens
  siRNA target sequence for MTCO2 (NM_173705.1,236-254).
catccctacgcatccttta

SEQ ID NO: 427789 - DNA, 19 bp, Homo sapiens
  siRNA target sequence for MTCO2 (NM_173705.1,239-257).
ccctacgcatcctttacat

SEQ ID NO: 427790 - DNA, 19 bp, Homo sapiens
  siRNA target sequence for MTCO2 (NM_173705.1,240-258).
cctacgcatcctttacata

SEQ ID NO: 427791 - DNA, 19 bp, Homo sapiens
  siRNA target sequence for MTCO2 (NM_173705.1,241-259).
ctacgcatcctttacataa

SEQ ID NO: 427792 - DNA, 19 bp, Homo sapiens
  siRNA target sequence for MTCO2 (NM_173705.1,245-263).
gcatcctttacataacaga

SEQ ID NO: 427793 - DNA, 19 bp, Homo sapiens
  siRNA target sequence for MTND1 (NM_173708.1,26-44).
cctcattgtacccattcta

SEQ ID NO: 427794 - DNA, 19 bp, Homo sapiens
  siRNA target sequence for MTND1 (NM_173708.1,27-45).
ctcattgtacccattctaa

SEQ ID NO: 427795 - DNA, 19 bp, Homo sapiens
  siRNA target sequence for MTND1 (NM_173708.1,65-83).
gcttaccgaacgaaaaatt

SEQ ID NO: 427796 - DNA, 19 bp, Homo sapiens
  siRNA target sequence for MTND1 (NM_173708.1,199-217).
ctaccatcaccctctacat

SEQ ID NO: 427797 - DNA, 19 bp, Homo sapiens
  siRNA target sequence for MTND1 (NM_173708.1,239-257).
caccatcgctcttctacta

SEQ ID NO: 427798 - DNA, 19 bp, Homo sapiens
  siRNA target sequence for MTND1 (NM_173708.1,296-314).
caacctaggcctcctattt

SEQ ID NO: 427799 - DNA, 19 bp, Homo sapiens
  siRNA target sequence for MTND1 (NM_173708.1,299-317).
cctaggcctcctatttatt

SEQ ID NO: 427800 - DNA, 19 bp, Homo sapiens
  siRNA target sequence for MTND1 (NM_173708.1,331-349).
gcctagccgtttactcaat

SEQ ID NO: 427801 - DNA, 19 bp, Homo sapiens
  siRNA target sequence for MTND1 (NM_173708.1,355-373).
gatcagggtgagcatcaaa

SEQ ID NO: 427802 - DNA, 19 bp, Homo sapiens
  siRNA target sequence for MTND1 (NM_173708.1,364-382).
gagcatcaaactcaaacta

SEQ ID NO: 427803 - DNA, 19 bp, Homo sapiens
  siRNA target sequence for MTND1 (NM_173708.1,402-420).
cgagcagtagcccaaacaa

SEQ ID NO: 427804 - DNA, 19 bp, Homo sapiens
  siRNA target sequence for MTND1 (NM_173708.1,403-421).
gagcagtagcccaaacaat

SEQ ID NO: 427805 - DNA, 19 bp, Homo sapiens
  siRNA target sequence for MTND1 (NM_173708.1,408-426).
gtagcccaaacaatctcat

SEQ ID NO: 427806 - DNA, 19 bp, Homo sapiens
  siRNA target sequence for MTND1 (NM_173708.1,465-483).
ctaataagtggctccttta

SEQ ID NO: 427807 - DNA, 19 bp, Homo sapiens
  siRNA target sequence for MTND1 (NM_173708.1,628-646).
caggcttcaacatcgaata

SEQ ID NO: 427808 - DNA, 19 bp, Homo sapiens
  siRNA target sequence for MTND1 (NM_173708.1,857-875).
catacacctcctatgaaaa

SEQ ID NO: 427809 - DNA, 19 bp, Homo sapiens
  siRNA target sequence for MTND1 (NM_173708.1,886-904).
cactcaccctagcattact

SEQ ID NO: 427810 - DNA, 19 bp, Homo sapiens
  siRNA target sequence for MTND1 (NM_173708.1,888-906).
ctcaccctagcattactta

SEQ ID NO: 427811 - DNA, 19 bp, Homo sapiens
  siRNA target sequence for MTND1 (NM_173708.1,890-908).
caccctagcattacttata

SEQ ID NO: 427812 - DNA, 19 bp, Homo sapiens
  siRNA target sequence for MTND1 (NM_173708.1,893-911).
cctagcattacttatatga

SEQ ID NO: 427813 - DNA, 19 bp, Homo sapiens
  siRNA target sequence for MTND1 (NM_173708.1,894-912).
ctagcattacttatatgat

SEQ ID NO: 427814 - DNA, 19 bp, Homo sapiens
  siRNA target sequence for MTND2 (NM_173709.1,62-80).
cgctaagctcgcactgatt

SEQ ID NO: 427815 - DNA, 19 bp, Homo sapiens
  siRNA target sequence for MTND2 (NM_173709.1,86-104).
cctgagtaggcctagaaat

SEQ ID NO: 427816 - DNA, 19 bp, Homo sapiens
  siRNA target sequence for MTND2 (NM_173709.1,87-105).
ctgagtaggcctagaaata

SEQ ID NO: 427817 - DNA, 19 bp, Homo sapiens
  siRNA target sequence for MTND2 (NM_173709.1,91-109).
gtaggcctagaaataaaca

SEQ ID NO: 427818 - DNA, 19 bp, Homo sapiens
  siRNA target sequence for MTND2 (NM_173709.1,108-126).
catgctagcttttattcca

SEQ ID NO: 427819 - DNA, 19 bp, Homo sapiens
  siRNA target sequence for MTND2 (NM_173709.1,125-143).
cagttctaaccaaaaaaat

SEQ ID NO: 427820 - DNA, 19 bp, Homo sapiens
  siRNA target sequence for MTND2 (NM_173709.1,186-204).
gcaagcaaccgcatccata

SEQ ID NO: 427821 - DNA, 19 bp, Homo sapiens
  siRNA target sequence for MTND2 (NM_173709.1,187-205).
caagcaaccgcatccataa

SEQ ID NO: 427822 - DNA, 19 bp, Homo sapiens
  siRNA target sequence for MTND2 (NM_173709.1,191-209).
caaccgcatccataatcct

SEQ ID NO: 427823 - DNA, 19 bp, Homo sapiens
  siRNA target sequence for MTND2 (NM_173709.1,196-214).
gcatccataatccttctaa

SEQ ID NO: 427824 - DNA, 19 bp, Homo sapiens
  siRNA target sequence for MTND2 (NM_173709.1,197-215).
catccataatccttctaat

SEQ ID NO: 427825 - DNA, 19 bp, Homo sapiens
  siRNA target sequence for MTND2 (NM_173709.1,201-219).
cataatccttctaatagct

SEQ ID NO: 427826 - DNA, 19 bp, Homo sapiens
  siRNA target sequence for MTND2 (NM_173709.1,223-241).
ctcttcaacaatatactct

SEQ ID NO: 427827 - DNA, 19 bp, Homo sapiens
  siRNA target sequence for MTND2 (NM_173709.1,493-511).
ggcagttgaggtggattaa

SEQ ID NO: 427828 - DNA, 19 bp, Homo sapiens
  siRNA target sequence for MTND2 (NM_173709.1,518-536).
cccagctacgcaaaatctt

SEQ ID NO: 427829 - DNA, 19 bp, Homo sapiens
  siRNA target sequence for MTND2 (NM_173709.1,523-541).
ctacgcaaaatcttagcat

SEQ ID NO: 427830 - DNA, 19 bp, Homo sapiens
  siRNA target sequence for MTND2 (NM_173709.1,583-601).
ccgtacaaccctaacataa

SEQ ID NO: 427831 - DNA, 19 bp, Homo sapiens
  siRNA target sequence for MTND2 (NM_173709.1,588-606).
caaccctaacataaccatt

SEQ ID NO: 427832 - DNA, 19 bp, Homo sapiens
  siRNA target sequence for MTND2 (NM_173709.1,597-615).
cataaccattcttaattta

SEQ ID NO: 427833 - DNA, 19 bp, Homo sapiens
  siRNA target sequence for MTND2 (NM_173709.1,671-689).
gcaccacgaccctactact

SEQ ID NO: 427834 - DNA, 19 bp, Homo sapiens
  siRNA target sequence for MTND2 (NM_173709.1,675-693).
cacgaccctactactatct

SEQ ID NO: 427835 - DNA, 19 bp, Homo sapiens
  siRNA target sequence for MTND2 (NM_173709.1,688-706).
ctatctcgcacctgaaaca

SEQ ID NO: 427836 - DNA, 19 bp, Homo sapiens
  siRNA target sequence for MTND2 (NM_173709.1,694-712).
cgcacctgaaacaagctaa

SEQ ID NO: 427837 - DNA, 19 bp, Homo sapiens
  siRNA target sequence for MTND2 (NM_173709.1,705-723).
caagctaacatgactaaca

SEQ ID NO: 427838 - DNA, 19 bp, Homo sapiens
  siRNA target sequence for MTND2 (NM_173709.1,785-803).
ccaaatgggccattatcga

SEQ ID NO: 427839 - DNA, 19 bp, Homo sapiens
  siRNA target sequence for MTND2 (NM_173709.1,786-804).
caaatgggccattatcgaa

SEQ ID NO: 427840 - DNA, 19 bp, Homo sapiens
  siRNA target sequence for MTND2 (NM_173709.1,851-869).
ccatcaccctccttaacct

SEQ ID NO: 427841 - DNA, 19 bp, Homo sapiens
  siRNA target sequence for MTND2 (NM_173709.1,859-877).
ctccttaacctctacttct

SEQ ID NO: 427842 - DNA, 19 bp, Homo sapiens
  siRNA target sequence for MTND2 (NM_173709.1,910-928).
ctactccccatatctaaca

SEQ ID NO: 427843 - DNA, 19 bp, Homo sapiens
  siRNA target sequence for MTND2 (NM_173709.1,916-934).
cccatatctaacaacgtaa

SEQ ID NO: 427844 - DNA, 19 bp, Homo sapiens
  siRNA target sequence for MTND2 (NM_173709.1,917-935).
ccatatctaacaacgtaaa

SEQ ID NO: 427845 - DNA, 19 bp, Homo sapiens
  siRNA target sequence for MTND3 (NM_173710.1,36-54).
cctagccttactactaata

SEQ ID NO: 427846 - DNA, 19 bp, Homo sapiens
  siRNA target sequence for MTND3 (NM_173710.1,37-55).
ctagccttactactaataa

SEQ ID NO: 427847 - DNA, 19 bp, Homo sapiens
  siRNA target sequence for MTND3 (NM_173710.1,40-58).
gccttactactaataatta

SEQ ID NO: 427848 - DNA, 19 bp, Homo sapiens
  siRNA target sequence for MTND3 (NM_173710.1,42-60).
cttactactaataattatt

SEQ ID NO: 427849 - DNA, 19 bp, Homo sapiens
  siRNA target sequence for MTND3 (NM_173710.1,81-99).
caacggctacatagaaaaa

SEQ ID NO: 427850 - DNA, 19 bp, Homo sapiens
  siRNA target sequence for MTND3 (NM_173710.1,142-160).
cgcgtccctttctccataa

SEQ ID NO: 427851 - DNA, 19 bp, Homo sapiens
  siRNA target sequence for MTND3 (NM_173710.1,155-173).
ccataaaattcttcttagt

SEQ ID NO: 427852 - DNA, 19 bp, Homo sapiens
  siRNA target sequence for MTND3 (NM_173710.1,156-174).
cataaaattcttcttagta

SEQ ID NO: 427853 - DNA, 19 bp, Homo sapiens
  siRNA target sequence for MTND3 (NM_173710.1,172-190).
gtagctattaccttcttat

SEQ ID NO: 427854 - DNA, 19 bp, Homo sapiens
  siRNA target sequence for MTND3 (NM_173710.1,182-200).
ccttcttattatttgatct

SEQ ID NO: 427855 - DNA, 19 bp, Homo sapiens
  siRNA target sequence for MTND3 (NM_173710.1,183-201).
cttcttattatttgatcta

SEQ ID NO: 427856 - DNA, 19 bp, Homo sapiens
  siRNA target sequence for MTND3 (NM_173710.1,223-241).
ctaccatgagccctacaaa

SEQ ID NO: 427857 - DNA, 19 bp, Homo sapiens
  siRNA target sequence for MTND3 (NM_173710.1,226-244).
ccatgagccctacaaacaa

SEQ ID NO: 427858 - DNA, 19 bp, Homo sapiens
  siRNA target sequence for MTND3 (NM_173710.1,242-260).
caactaacctgccactaat

SEQ ID NO: 427859 - DNA, 19 bp, Homo sapiens
  siRNA target sequence for MTND3 (NM_173710.1,252-270).
gccactaatagttatgtca

SEQ ID NO: 427860 - DNA, 19 bp, Homo sapiens
  siRNA target sequence for MTND3 (NM_173710.1,253-271).
ccactaatagttatgtcat

SEQ ID NO: 427861 - DNA, 19 bp, Homo sapiens
  siRNA target sequence for MTND3 (NM_173710.1,262-280).
gttatgtcatccctcttat

SEQ ID NO: 427862 - DNA, 19 bp, Homo sapiens
  siRNA target sequence for MTND4 (NM_173711.1,300-318).
ctaatcgtcccaacaatta

SEQ ID NO: 427863 - DNA, 19 bp, Homo sapiens
  siRNA target sequence for MTND4 (NM_173711.1,305-323).
cgtcccaacaattatatta

SEQ ID NO: 427864 - DNA, 19 bp, Homo sapiens
  siRNA target sequence for MTND4 (NM_173711.1,308-326).
cccaacaattatattacta

SEQ ID NO: 427865 - DNA, 19 bp, Homo sapiens
  siRNA target sequence for MTND4 (NM_173711.1,328-346).
cactgacatgactttccaa

SEQ ID NO: 427866 - DNA, 19 bp, Homo sapiens
  siRNA target sequence for MTND4 (NM_173711.1,405-423).
ctactattttttaaccaaa

SEQ ID NO: 427867 - DNA, 19 bp, Homo sapiens
  siRNA target sequence for MTND4 (NM_173711.1,420-438).
caaatcaacaacaacctat

SEQ ID NO: 427868 - DNA, 19 bp, Homo sapiens
  siRNA target sequence for MTND4 (NM_173711.1,1300-1318).
ctcacagtcgcatcataat

SEQ ID NO: 427869 - DNA, 19 bp, Homo sapiens
  siRNA target sequence for MTND4 (NM_173711.1,1391-1409).
cgccttaccccccactatt

SEQ ID NO: 427870 - DNA, 19 bp, Homo sapiens
  siRNA target sequence for MTND4 (NM_173711.1,1392-1410).
gccttaccccccactatta

SEQ ID NO: 427871 - DNA, 19 bp, Homo sapiens
  siRNA target sequence for MTND4 (NM_173711.1,1393-1411).
ccttaccccccactattaa

SEQ ID NO: 427872 - DNA, 19 bp, Homo sapiens
  siRNA target sequence for MTND4 (NM_173711.1,1441-1459).
ccacgttctcctgatcaaa

SEQ ID NO: 427873 - DNA, 19 bp, Homo sapiens
  siRNA target sequence for MTND4 (NM_173711.1,1444-1462).
cgttctcctgatcaaatat

SEQ ID NO: 427874 - DNA, 19 bp, Homo sapiens
  siRNA target sequence for MTND4 (NM_173711.1,1477-1495).
caggactcaacatactagt

SEQ ID NO: 427875 - DNA, 19 bp, Homo sapiens
  siRNA target sequence for MTND4 (NM_173711.1,1491-1509).
ctagtcacagccctatact

SEQ ID NO: 427876 - DNA, 19 bp, Homo sapiens
  siRNA target sequence for MTND4 (NM_173711.1,1501-1519).
ccctatactccctctacat

SEQ ID NO: 427877 - DNA, 19 bp, Homo sapiens
  siRNA target sequence for MTND4 (NM_173711.1,1502-1520).
cctatactccctctacata

SEQ ID NO: 427878 - DNA, 19 bp, Homo sapiens
  siRNA target sequence for MTND4 (NM_173711.1,1503-1521).
ctatactccctctacatat

SEQ ID NO: 427879 - DNA, 19 bp, Homo sapiens
  siRNA target sequence for MTND4 (NM_173711.1,1543-1561).
cactcacccaccacattaa

SEQ ID NO: 427880 - DNA, 19 bp, Homo sapiens
  siRNA target sequence for MTND4 (NM_173711.1,1545-1563).
ctcacccaccacattaaca

SEQ ID NO: 427881 - DNA, 19 bp, Homo sapiens
  siRNA target sequence for MTND4 (NM_173711.1,1549-1567).
cccaccacattaacaacat

SEQ ID NO: 427882 - DNA, 19 bp, Homo sapiens
  siRNA target sequence for MTND4 (NM_173711.1,1587-1605).
gaaaacaccctcatgttca

SEQ ID NO: 427883 - DNA, 19 bp, Homo sapiens
  siRNA target sequence for MTND4 (NM_173711.1,1635-1653).
ctcaaccccgacatcatta

SEQ ID NO: 427884 - DNA, 19 bp, Homo sapiens
  siRNA target sequence for MTND4L (NM_173712.1,42-60).
ctcacttctaggaatacta

SEQ ID NO: 427885 - DNA, 19 bp, Homo sapiens
  siRNA target sequence for MTND4L (NM_173712.1,44-62).
cacttctaggaatactagt

SEQ ID NO: 427886 - DNA, 19 bp, Homo sapiens
  siRNA target sequence for MTND4L (NM_173712.1,46-64).
cttctaggaatactagtat

SEQ ID NO: 427887 - DNA, 19 bp, Homo sapiens
  siRNA target sequence for MTND4L (NM_173712.1,67-85).
cgctcacacctcatatcct

SEQ ID NO: 427888 - DNA, 19 bp, Homo sapiens
  siRNA target sequence for MTND4L (NM_173712.1,76-94).
ctcatatcctccctactat

SEQ ID NO: 427889 - DNA, 19 bp, Homo sapiens
  siRNA target sequence for MTND4L (NM_173712.1,123-141).
cattatagctactctcata

SEQ ID NO: 427890 - DNA, 19 bp, Homo sapiens
  siRNA target sequence for MTND4L (NM_173712.1,158-176).
ccctcttagccaatattgt

SEQ ID NO: 427891 - DNA, 19 bp, Homo sapiens
  siRNA target sequence for MTND4L (NM_173712.1,179-197).
ctattgccatactagtctt

SEQ ID NO: 427892 - DNA, 19 bp, Homo sapiens
  siRNA target sequence for MTND4L (NM_173712.1,226-244).
gccctactagtctcaatct

SEQ ID NO: 427893 - DNA, 19 bp, Homo sapiens
  siRNA target sequence for MTND4L (NM_173712.1,235-253).
gtctcaatctccaacacat

SEQ ID NO: 427894 - DNA, 19 bp, Homo sapiens
  siRNA target sequence for MTND4L (NM_173712.1,256-274).
ggcctagactacgtacata

SEQ ID NO: 427895 - DNA, 19 bp, Homo sapiens
  siRNA target sequence for MTND4L (NM_173712.1,257-275).
gcctagactacgtacataa

SEQ ID NO: 427896 - DNA, 19 bp, Homo sapiens
  siRNA target sequence for MTND4L (NM_173712.1,267-285).
cgtacataacctaaaccta

SEQ ID NO: 427897 - DNA, 19 bp, Homo sapiens
  siRNA target sequence for MTND5 (NM_173713.1,429-447).
ctgagagggcgtaggaatt

SEQ ID NO: 427898 - DNA, 19 bp, Homo sapiens
  siRNA target sequence for MTND5 (NM_173713.1,549-567).
cctcgccttagcatgattt

SEQ ID NO: 427899 - DNA, 19 bp, Homo sapiens
  siRNA target sequence for MTND5 (NM_173713.1,550-568).
ctcgccttagcatgattta

SEQ ID NO: 427900 - DNA, 19 bp, Homo sapiens
  siRNA target sequence for MTND5 (NM_173713.1,554-572).
ccttagcatgatttatcct

SEQ ID NO: 427901 - DNA, 19 bp, Homo sapiens
  siRNA target sequence for MTND5 (NM_173713.1,582-600).
ctcatgagacccacaacaa

SEQ ID NO: 427902 - DNA, 19 bp, Homo sapiens
  siRNA target sequence for MTND5 (NM_173713.1,595-613).
caacaaatagcccttctaa

SEQ ID NO: 427903 - DNA, 19 bp, Homo sapiens
  siRNA target sequence for MTND5 (NM_173713.1,606-624).
ccttctaaacgctaatcca

SEQ ID NO: 427904 - DNA, 19 bp, Homo sapiens
  siRNA target sequence for MTND5 (NM_173713.1,607-625).
cttctaaacgctaatccaa

SEQ ID NO: 427905 - DNA, 19 bp, Homo sapiens
  siRNA target sequence for MTND5 (NM_173713.1,809-827).
gcccactaatccaaactct

SEQ ID NO: 427906 - DNA, 19 bp, Homo sapiens
  siRNA target sequence for MTND5 (NM_173713.1,811-829).
ccactaatccaaactctaa

SEQ ID NO: 427907 - DNA, 19 bp, Homo sapiens
  siRNA target sequence for MTND5 (NM_173713.1,1216-1234).
gcctgagccctatctatta

SEQ ID NO: 427908 - DNA, 19 bp, Homo sapiens
  siRNA target sequence for MTND5 (NM_173713.1,1218-1236).
ctgagccctatctattact

SEQ ID NO: 427909 - DNA, 19 bp, Homo sapiens
  siRNA target sequence for MTND5 (NM_173713.1,1220-1238).
gagccctatctattactct

SEQ ID NO: 427910 - DNA, 19 bp, Homo sapiens
  siRNA target sequence for MTND5 (NM_173713.1,1252-1270).
ctgacaagcgcctatagca

SEQ ID NO: 427911 - DNA, 19 bp, Homo sapiens
  siRNA target sequence for MTND5 (NM_173713.1,1260-1278).
cgcctatagcactcgaata

SEQ ID NO: 427912 - DNA, 19 bp, Homo sapiens
  siRNA target sequence for MTND5 (NM_173713.1,1261-1279).
gcctatagcactcgaataa

SEQ ID NO: 427913 - DNA, 19 bp, Homo sapiens
  siRNA target sequence for MTND5 (NM_173713.1,1262-1280).
cctatagcactcgaataat

SEQ ID NO: 427914 - DNA, 19 bp, Homo sapiens
  siRNA target sequence for MTND5 (NM_173713.1,1263-1281).
ctatagcactcgaataatt

SEQ ID NO: 427915 - DNA, 19 bp, Homo sapiens
  siRNA target sequence for MTND5 (NM_173713.1,1268-1286).
gcactcgaataattcttct

SEQ ID NO: 427916 - DNA, 19 bp, Homo sapiens
  siRNA target sequence for MTND5 (NM_173713.1,1306-1324).
cgcttccccacccttacta

SEQ ID NO: 427917 - DNA, 19 bp, Homo sapiens
  siRNA target sequence for MTND5 (NM_173713.1,1311-1329).
ccccacccttactaacatt

SEQ ID NO: 427918 - DNA, 19 bp, Homo sapiens
  siRNA target sequence for MTND5 (NM_173713.1,1312-1330).
cccacccttactaacatta

SEQ ID NO: 427919 - DNA, 19 bp, Homo sapiens
  siRNA target sequence for MTND5 (NM_173713.1,1313-1331).
ccacccttactaacattaa

SEQ ID NO: 427920 - DNA, 19 bp, Homo sapiens
  siRNA target sequence for MTND5 (NM_173713.1,1316-1334).
cccttactaacattaacga

SEQ ID NO: 427921 - DNA, 19 bp, Homo sapiens
  siRNA target sequence for MTND5 (NM_173713.1,1346-1364).
ccctactaaaccccattaa

SEQ ID NO: 427922 - DNA, 19 bp, Homo sapiens
  siRNA target sequence for MTND5 (NM_173713.1,1382-1400).
gcctattcgcaggatttct

SEQ ID NO: 427923 - DNA, 19 bp, Homo sapiens
  siRNA target sequence for MTND5 (NM_173713.1,1394-1412).
gatttctcattactaacaa

SEQ ID NO: 427924 - DNA, 19 bp, Homo sapiens
  siRNA target sequence for MTND5 (NM_173713.1,1423-1441).
gcatcccccttccaaacaa

SEQ ID NO: 427925 - DNA, 19 bp, Homo sapiens
  siRNA target sequence for MTND5 (NM_173713.1,1442-1460).
caatccccctctacctaaa

SEQ ID NO: 427926 - DNA, 19 bp, Homo sapiens
  siRNA target sequence for MTND5 (NM_173713.1,1466-1484).
cagccctcgctgtcacttt

SEQ ID NO: 427927 - DNA, 19 bp, Homo sapiens
  siRNA target sequence for MTND5 (NM_173713.1,1470-1488).
cctcgctgtcactttccta

SEQ ID NO: 427928 - DNA, 19 bp, Homo sapiens
  siRNA target sequence for MTND5 (NM_173713.1,1504-1522).
ctagacctcaactacctaa

SEQ ID NO: 427929 - DNA, 19 bp, Homo sapiens
  siRNA target sequence for MTND5 (NM_173713.1,1512-1530).
caactacctaaccaacaaa

SEQ ID NO: 427930 - DNA, 19 bp, Homo sapiens
  siRNA target sequence for MTND5 (NM_173713.1,1515-1533).
ctacctaaccaacaaactt

SEQ ID NO: 427931 - DNA, 19 bp, Homo sapiens
  siRNA target sequence for MTND5 (NM_173713.1,1602-1620).
ccgcacaatcccctatcta

SEQ ID NO: 427932 - DNA, 19 bp, Homo sapiens
  siRNA target sequence for MTND5 (NM_173713.1,1660-1678).
gacctaacctgactagaaa

SEQ ID NO: 427933 - DNA, 19 bp, Homo sapiens
  siRNA target sequence for MTND5 (NM_173713.1,1667-1685).
cctgactagaaaagctatt

SEQ ID NO: 427934 - DNA, 19 bp, Homo sapiens
  siRNA target sequence for MTND5 (NM_173713.1,1680-1698).
gctattacctaaaacaatt

SEQ ID NO: 427935 - DNA, 19 bp, Homo sapiens
  siRNA target sequence for MTND5 (NM_173713.1,1789-1807).
ctaaccctactcctaatca

SEQ ID NO: 427936 - DNA, 19 bp, Homo sapiens
  siRNA target sequence for MTND6 (NM_173714.1,62-80).
ctaagccttctcctattta

SEQ ID NO: 427937 - DNA, 19 bp, Homo sapiens
  siRNA target sequence for MTND6 (NM_173714.1,74-92).
ctatttatgggggtttagt

SEQ ID NO: 427938 - DNA, 19 bp, Homo sapiens
  siRNA target sequence for MTND6 (NM_173714.1,106-124).
ggtgtggtcgggtgtgtta

SEQ ID NO: 427939 - DNA, 19 bp, Homo sapiens
  siRNA target sequence for MTND6 (NM_173714.1,107-125).
gtgtggtcgggtgtgttat

SEQ ID NO: 427940 - DNA, 19 bp, Homo sapiens
  siRNA target sequence for MTND6 (NM_173714.1,109-127).
gtggtcgggtgtgttatta

SEQ ID NO: 427941 - DNA, 19 bp, Homo sapiens
  siRNA target sequence for MTND6 (NM_173714.1,111-129).
ggtcgggtgtgttattatt

SEQ ID NO: 427942 - DNA, 19 bp, Homo sapiens
  siRNA target sequence for MTND6 (NM_173714.1,132-150).
gaattttgggggaggttat

SEQ ID NO: 427943 - DNA, 19 bp, Homo sapiens
  siRNA target sequence for MTND6 (NM_173714.1,142-160).
ggaggttatatgggtttaa

SEQ ID NO: 427944 - DNA, 19 bp, Homo sapiens
  siRNA target sequence for MTND6 (NM_173714.1,143-161).
gaggttatatgggtttaat

SEQ ID NO: 427945 - DNA, 19 bp, Homo sapiens
  siRNA target sequence for MTND6 (NM_173714.1,182-200).
ggggaatgatggttgtctt

SEQ ID NO: 427946 - DNA, 19 bp, Homo sapiens
  siRNA target sequence for MTND6 (NM_173714.1,183-201).
gggaatgatggttgtcttt

SEQ ID NO: 427947 - DNA, 19 bp, Homo sapiens
  siRNA target sequence for MTND6 (NM_173714.1,192-210).
ggttgtctttggatatact

SEQ ID NO: 427948 - DNA, 19 bp, Homo sapiens
  siRNA target sequence for MTND6 (NM_173714.1,193-211).
gttgtctttggatatacta

SEQ ID NO: 427949 - DNA, 19 bp, Homo sapiens
  siRNA target sequence for MTND6 (NM_173714.1,209-227).
ctacagcgatggctattga

SEQ ID NO: 427950 - DNA, 19 bp, Homo sapiens
  siRNA target sequence for MTND6 (NM_173714.1,259-277).
gaggtcttggtgagtgttt

SEQ ID NO: 427951 - DNA, 19 bp, Homo sapiens
  siRNA target sequence for MTND6 (NM_173714.1,336-354).
ggtggttgtggtaaacttt

SEQ ID NO: 427952 - DNA, 19 bp, Homo sapiens
  siRNA target sequence for MTND6 (NM_173714.1,345-363).
ggtaaactttaatagtgta

SEQ ID NO: 427953 - DNA, 19 bp, Homo sapiens
  siRNA target sequence for MTND6 (NM_173714.1,402-420).
gattcgggaggatcctatt

SEQ ID NO: 427954 - DNA, 19 bp, Homo sapiens
  siRNA target sequence for ARHGEF15 (NM_173728.2,1008-1026).
ccccacagccagatcttga

SEQ ID NO: 427955 - DNA, 19 bp, Homo sapiens
  siRNA target sequence for ARHGEF15 (NM_173728.2,1009-1027).
cccacagccagatcttgat

SEQ ID NO: 427956 - DNA, 19 bp, Homo sapiens
  siRNA target sequence for ARHGEF15 (NM_173728.2,1011-1029).
cacagccagatcttgatct

SEQ ID NO: 427957 - DNA, 19 bp, Homo sapiens
  siRNA target sequence for ARHGEF15 (NM_173728.2,1370-1388).
cgcatgcaggagagtcttt

SEQ ID NO: 427958 - DNA, 19 bp, Homo sapiens
  siRNA target sequence for ARHGEF15 (NM_173728.2,1633-1651).
ctcggtgtatgtggattat

SEQ ID NO: 427959 - DNA, 19 bp, Homo sapiens
  siRNA target sequence for ARHGEF15 (NM_173728.2,1635-1653).
cggtgtatgtggattatgt

SEQ ID NO: 427960 - DNA, 19 bp, Homo sapiens
  siRNA target sequence for ARHGEF15 (NM_173728.2,1811-1829).
cgcatgctgctgcagaata

SEQ ID NO: 427961 - DNA, 19 bp, Homo sapiens
  siRNA target sequence for ARHGEF15 (NM_173728.2,1886-1904).
ggtgctgtcagcaagatca

SEQ ID NO: 427962 - DNA, 19 bp, Homo sapiens
  siRNA target sequence for ARHGEF15 (NM_173728.2,1887-1905).
gtgctgtcagcaagatcat

SEQ ID NO: 427963 - DNA, 19 bp, Homo sapiens
  siRNA target sequence for ARHGEF15 (NM_173728.2,1973-1991).
ctgcgcttccacaaagtca

SEQ ID NO: 427964 - DNA, 19 bp, Homo sapiens
  siRNA target sequence for ARHGEF15 (NM_173728.2,2035-2053).
gggagagctgactgagtta

SEQ ID NO: 427965 - DNA, 19 bp, Homo sapiens
  siRNA target sequence for ARHGEF15 (NM_173728.2,2137-2155).
catcactcagcctaagagt

SEQ ID NO: 427966 - DNA, 19 bp, Homo sapiens
  siRNA target sequence for ARHGEF15 (NM_173728.2,2600-2618).
gaggctgttggatcttctt

SEQ ID NO: 427967 - DNA, 19 bp, Homo sapiens
  siRNA target sequence for MGC51029 (NM_173794.2,156-174).
ccctccccaagactatgaa

SEQ ID NO: 427968 - DNA, 19 bp, Homo sapiens
  siRNA target sequence for MGC51029 (NM_173794.2,157-175).
cctccccaagactatgaaa

SEQ ID NO: 427969 - DNA, 19 bp, Homo sapiens
  siRNA target sequence for MGC51029 (NM_173794.2,198-216).
gttggatttaactgagtat

SEQ ID NO: 427970 - DNA, 19 bp, Homo sapiens
  siRNA target sequence for MGC51029 (NM_173794.2,202-220).
gatttaactgagtatgcaa

SEQ ID NO: 427971 - DNA, 19 bp, Homo sapiens
  siRNA target sequence for MGC51029 (NM_173794.2,255-273).
cagttcgggacctatggta

SEQ ID NO: 427972 - DNA, 19 bp, Homo sapiens
  siRNA target sequence for MGC51029 (NM_173794.2,260-278).
cgggacctatggtagaaaa

SEQ ID NO: 427973 - DNA, 19 bp, Homo sapiens
  siRNA target sequence for MGC51029 (NM_173794.2,262-280).
ggacctatggtagaaaaat

SEQ ID NO: 427974 - DNA, 19 bp, Homo sapiens
  siRNA target sequence for MGC51029 (NM_173794.2,332-350).
gatttctgttccagaaagt

SEQ ID NO: 427975 - DNA, 19 bp, Homo sapiens
  siRNA target sequence for MGC51029 (NM_173794.2,342-360).
ccagaaagttggaaaactt

SEQ ID NO: 427976 - DNA, 19 bp, Homo sapiens
  siRNA target sequence for MGC51029 (NM_173794.2,394-412).
cttcagattgctagtcata

SEQ ID NO: 427977 - DNA, 19 bp, Homo sapiens
  siRNA target sequence for MGC51029 (NM_173794.2,496-514).
gcagcacctgaaatcaaca

SEQ ID NO: 427978 - DNA, 19 bp, Homo sapiens
  siRNA target sequence for MGC51029 (NM_173794.2,499-517).
gcacctgaaatcaacaatt

SEQ ID NO: 427979 - DNA, 19 bp, Homo sapiens
  siRNA target sequence for FLJ32096 (NM_173795.2,330-348).
ctgtgcagagccaatacga

SEQ ID NO: 427980 - DNA, 19 bp, Homo sapiens
  siRNA target sequence for FLJ32096 (NM_173795.2,529-547).
cctccccagtaggaaagat

SEQ ID NO: 427981 - DNA, 19 bp, Homo sapiens
  siRNA target sequence for FLJ32096 (NM_173795.2,550-568).
cggggtcacccgtccaaaa

SEQ ID NO: 427982 - DNA, 19 bp, Homo sapiens
  siRNA target sequence for FLJ39873 (NM_173799.2,103-121).
gacaggcacaatagaaaca

SEQ ID NO: 427983 - DNA, 19 bp, Homo sapiens
  siRNA target sequence for FLJ39873 (NM_173799.2,338-356).
gatacaggggagtacttct

SEQ ID NO: 427984 - DNA, 19 bp, Homo sapiens
  siRNA target sequence for FLJ39873 (NM_173799.2,346-364).
ggagtacttctgcatctat

SEQ ID NO: 427985 - DNA, 19 bp, Homo sapiens
  siRNA target sequence for FLJ39873 (NM_173799.2,384-402).
cgtacactgggagaatctt

SEQ ID NO: 427986 - DNA, 19 bp, Homo sapiens
  siRNA target sequence for FLJ39873 (NM_173799.2,509-527).
gtggtggtcgcgttgacta

SEQ ID NO: 427987 - DNA, 19 bp, Homo sapiens
  siRNA target sequence for FLJ39873 (NM_173799.2,512-530).
gtggtcgcgttgactagaa

SEQ ID NO: 427988 - DNA, 19 bp, Homo sapiens
  siRNA target sequence for FLJ39873 (NM_173799.2,690-708).
gtgccgagctgcatgacta

SEQ ID NO: 427989 - DNA, 19 bp, Homo sapiens
  siRNA target sequence for FLJ90650 (NM_173800.2,174-192).
gtgaaatacaggaactctt

SEQ ID NO: 427990 - DNA, 19 bp, Homo sapiens
  siRNA target sequence for FLJ90650 (NM_173800.2,185-203).
gaactctttgacatattta

SEQ ID NO: 427991 - DNA, 19 bp, Homo sapiens
  siRNA target sequence for FLJ90650 (NM_173800.2,266-284).
gtcagtgcactcaagtcat

SEQ ID NO: 427992 - DNA, 19 bp, Homo sapiens
  siRNA target sequence for FLJ90650 (NM_173800.2,272-290).
gcactcaagtcatatttga

SEQ ID NO: 427993 - DNA, 19 bp, Homo sapiens
  siRNA target sequence for FLJ90650 (NM_173800.2,306-324).
caaacgctgagcaagatga

SEQ ID NO: 427994 - DNA, 19 bp, Homo sapiens
  siRNA target sequence for FLJ90650 (NM_173800.2,356-374).
gaccagagtacagttattt

SEQ ID NO: 427995 - DNA, 19 bp, Homo sapiens
  siRNA target sequence for FLJ90650 (NM_173800.2,409-427).
gacacaccagagtggtttt

SEQ ID NO: 427996 - DNA, 19 bp, Homo sapiens
  siRNA target sequence for FLJ90650 (NM_173800.2,448-466).
gtctactggcgtcatgaaa

SEQ ID NO: 427997 - DNA, 19 bp, Homo sapiens
  siRNA target sequence for FLJ90650 (NM_173800.2,450-468).
ctactggcgtcatgaaaca

SEQ ID NO: 427998 - DNA, 19 bp, Homo sapiens
  siRNA target sequence for FLJ90650 (NM_173800.2,525-543).
catggattgtccctattct

SEQ ID NO: 427999 - DNA, 19 bp, Homo sapiens
  siRNA target sequence for FLJ90650 (NM_173800.2,558-576).
gaactacacaacctttagt

SEQ ID NO: 428000 - DNA, 19 bp, Homo sapiens
  siRNA target sequence for FLJ90650 (NM_173800.2,570-588).
ctttagtctggctagatca

SEQ ID NO: 428001 - DNA, 19 bp, Homo sapiens
  siRNA target sequence for FLJ90650 (NM_173800.2,661-679).
gactggatattatagagtt

SEQ ID NO: 428002 - DNA, 19 bp, Homo sapiens
  siRNA target sequence for FLJ90650 (NM_173800.2,663-681).
ctggatattatagagttaa

SEQ ID NO: 428003 - DNA, 19 bp, Homo sapiens
  siRNA target sequence for FLJ90650 (NM_173800.2,773-791).
gatgccttttccttgtcta

SEQ ID NO: 428004 - DNA, 19 bp, Homo sapiens
  siRNA target sequence for FLJ90650 (NM_173800.2,816-834).
cagcacttgagttaaccaa

SEQ ID NO: 428005 - DNA, 19 bp, Homo sapiens
  siRNA target sequence for FLJ90650 (NM_173800.2,889-907).
ggtaaccagggatcttgtt

SEQ ID NO: 428006 - DNA, 19 bp, Homo sapiens
  siRNA target sequence for FLJ90650 (NM_173800.2,890-908).
gtaaccagggatcttgttt

SEQ ID NO: 428007 - DNA, 19 bp, Homo sapiens
  siRNA target sequence for FLJ90650 (NM_173800.2,913-931).
ggtgaacatctatgatata

SEQ ID NO: 428008 - DNA, 19 bp, Homo sapiens
  siRNA target sequence for FLJ90650 (NM_173800.2,952-970).
cctattaaagagacttaat

SEQ ID NO: 428009 - DNA, 19 bp, Homo sapiens
  siRNA target sequence for FLJ90650 (NM_173800.2,1017-1035).
cattacaagatgactactt

SEQ ID NO: 428010 - DNA, 19 bp, Homo sapiens
  siRNA target sequence for FLJ90650 (NM_173800.2,1028-1046).
gactacttagctctaatat

SEQ ID NO: 428011 - DNA, 19 bp, Homo sapiens
  siRNA target sequence for FLJ90650 (NM_173800.2,1038-1056).
ctctaatatcactggaaaa

SEQ ID NO: 428012 - DNA, 19 bp, Homo sapiens
  siRNA target sequence for FLJ90650 (NM_173800.2,1129-1147).
ggtggatcatccagaaaat

SEQ ID NO: 428013 - DNA, 19 bp, Homo sapiens
  siRNA target sequence for FLJ90650 (NM_173800.2,1189-1207).
cattgccttgggaagtgat

SEQ ID NO: 428014 - DNA, 19 bp, Homo sapiens
  siRNA target sequence for FLJ90650 (NM_173800.2,1217-1235).
gacatcttgttaaatactt

SEQ ID NO: 428015 - DNA, 19 bp, Homo sapiens
  siRNA target sequence for FLJ90650 (NM_173800.2,1225-1243).
gttaaatacttacactaat

SEQ ID NO: 428016 - DNA, 19 bp, Homo sapiens
  siRNA target sequence for FLJ90650 (NM_173800.2,1264-1282).
gattcaacttgcttatgca

SEQ ID NO: 428017 - DNA, 19 bp, Homo sapiens
  siRNA target sequence for FLJ90650 (NM_173800.2,1298-1316).
gacccatggatacttaaca

SEQ ID NO: 428018 - DNA, 19 bp, Homo sapiens
  siRNA target sequence for FLJ90650 (NM_173800.2,1300-1318).
cccatggatacttaacaga

SEQ ID NO: 428019 - DNA, 19 bp, Homo sapiens
  siRNA target sequence for FLJ90650 (NM_173800.2,1301-1319).
ccatggatacttaacagat

SEQ ID NO: 428020 - DNA, 19 bp, Homo sapiens
  siRNA target sequence for FLJ90650 (NM_173800.2,1302-1320).
catggatacttaacagata

SEQ ID NO: 428021 - DNA, 19 bp, Homo sapiens
  siRNA target sequence for FLJ90650 (NM_173800.2,1344-1362).
ctccattcacttctaatga

SEQ ID NO: 428022 - DNA, 19 bp, Homo sapiens
  siRNA target sequence for FLJ90650 (NM_173800.2,1401-1419).
gccggtatgtcgcaaaaga

SEQ ID NO: 428023 - DNA, 19 bp, Homo sapiens
  siRNA target sequence for FLJ90650 (NM_173800.2,1404-1422).
ggtatgtcgcaaaagactt

SEQ ID NO: 428024 - DNA, 19 bp, Homo sapiens
  siRNA target sequence for FLJ90650 (NM_173800.2,1435-1453).
ctggcaagctgtgagtaaa

SEQ ID NO: 428025 - DNA, 19 bp, Homo sapiens
  siRNA target sequence for FLJ90650 (NM_173800.2,1445-1463).
gtgagtaaaaggtatggaa

SEQ ID NO: 428026 - DNA, 19 bp, Homo sapiens
  siRNA target sequence for FLJ90650 (NM_173800.2,1455-1473).
ggtatggaacacaatcatt

SEQ ID NO: 428027 - DNA, 19 bp, Homo sapiens
  siRNA target sequence for FLJ90650 (NM_173800.2,1461-1479).
gaacacaatcattgattaa

SEQ ID NO: 428028 - DNA, 19 bp, Homo sapiens
  siRNA target sequence for FLJ90650 (NM_173800.2,1474-1492).
gattaatctaatatataca

SEQ ID NO: 428029 - DNA, 19 bp, Homo sapiens
  siRNA target sequence for FLJ90650 (NM_173800.2,1498-1516).
gagaaccgtaactacagat

SEQ ID NO: 428030 - DNA, 19 bp, Homo sapiens
  siRNA target sequence for FLJ90650 (NM_173800.2,1503-1521).
ccgtaactacagatttaca

SEQ ID NO: 428031 - DNA, 19 bp, Homo sapiens
  siRNA target sequence for FLJ90650 (NM_173800.2,1576-1594).
cagagttcatgccaactta

SEQ ID NO: 428032 - DNA, 19 bp, Homo sapiens
  siRNA target sequence for FLJ90650 (NM_173800.2,1578-1596).
gagttcatgccaacttaca

SEQ ID NO: 428033 - DNA, 19 bp, Homo sapiens
  siRNA target sequence for FLJ90650 (NM_173800.2,1580-1598).
gttcatgccaacttacaga

SEQ ID NO: 428034 - DNA, 19 bp, Homo sapiens
  siRNA target sequence for FLJ90650 (NM_173800.2,1651-1669).
gtggctaaggagaaacaca

SEQ ID NO: 428035 - DNA, 19 bp, Homo sapiens
  siRNA target sequence for FLJ36198 (NM_173801.2,73-91).
ctcctcgctgtcttgattt

SEQ ID NO: 428036 - DNA, 19 bp, Homo sapiens
  siRNA target sequence for FLJ36198 (NM_173801.2,222-240).
ccctgcaaatcggatacat

SEQ ID NO: 428037 - DNA, 19 bp, Homo sapiens
  siRNA target sequence for FLJ36198 (NM_173801.2,223-241).
cctgcaaatcggatacata

SEQ ID NO: 428038 - DNA, 19 bp, Homo sapiens
  siRNA target sequence for FLJ36198 (NM_173801.2,226-244).
gcaaatcggatacatacat

SEQ ID NO: 428039 - DNA, 19 bp, Homo sapiens
  siRNA target sequence for FLJ36198 (NM_173801.2,227-245).
caaatcggatacatacata

SEQ ID NO: 428040 - DNA, 19 bp, Homo sapiens
  siRNA target sequence for FLJ36198 (NM_173801.2,322-340).
caaaccgagctgtacttta

SEQ ID NO: 428041 - DNA, 19 bp, Homo sapiens
  siRNA target sequence for FLJ36198 (NM_173801.2,333-351).
gtactttaccccaaggaat

SEQ ID NO: 428042 - DNA, 19 bp, Homo sapiens
  siRNA target sequence for FLJ36198 (NM_173801.2,336-354).
ctttaccccaaggaatata

SEQ ID NO: 428043 - DNA, 19 bp, Homo sapiens
  siRNA target sequence for FLJ36198 (NM_173801.2,344-362).
caaggaatatagatcatga

SEQ ID NO: 428044 - DNA, 19 bp, Homo sapiens
  siRNA target sequence for FLJ36198 (NM_173801.2,411-429).
gcttacaccagtttctact

SEQ ID NO: 428045 - DNA, 19 bp, Homo sapiens
  siRNA target sequence for FLJ36198 (NM_173801.2,484-502).
gcagaagagttaggattat

SEQ ID NO: 428046 - DNA, 19 bp, Homo sapiens
  siRNA target sequence for FLJ36198 (NM_173801.2,490-508).
gagttaggattattatctt

SEQ ID NO: 428047 - DNA, 19 bp, Homo sapiens
  siRNA target sequence for FLJ36198 (NM_173801.2,492-510).
gttaggattattatcttct

SEQ ID NO: 428048 - DNA, 19 bp, Homo sapiens
  siRNA target sequence for FLJ39599 (NM_173803.2,504-522).
cgctggagtctgtggtttt

SEQ ID NO: 428049 - DNA, 19 bp, Homo sapiens
  siRNA target sequence for FLJ39599 (NM_173803.2,528-546).
ggccaccttcatctgtttt

SEQ ID NO: 428050 - DNA, 19 bp, Homo sapiens
  siRNA target sequence for FLJ38723 (NM_173805.2,68-86).
ggcagagcagcttcaagtt

SEQ ID NO: 428051 - DNA, 19 bp, Homo sapiens
  siRNA target sequence for FLJ38723 (NM_173805.2,77-95).
gcttcaagttgtactgatt

SEQ ID NO: 428052 - DNA, 19 bp, Homo sapiens
  siRNA target sequence for FLJ38723 (NM_173805.2,81-99).
caagttgtactgattgaca

SEQ ID NO: 428053 - DNA, 19 bp, Homo sapiens
  siRNA target sequence for FLJ38723 (NM_173805.2,151-169).
ctgagctcacgcttcaaca

SEQ ID NO: 428054 - DNA, 19 bp, Homo sapiens
  siRNA target sequence for MGC50721 (NM_173806.2,339-357).
ggaggtgatgttctgatta

SEQ ID NO: 428055 - DNA, 19 bp, Homo sapiens
  siRNA target sequence for MGC50721 (NM_173806.2,360-378).
gttggccatgccaatgtgt

SEQ ID NO: 428056 - DNA, 19 bp, Homo sapiens
  siRNA target sequence for MGC50721 (NM_173806.2,382-400).
gatatactcttcgagaatt

SEQ ID NO: 428057 - DNA, 19 bp, Homo sapiens
  siRNA target sequence for MGC50721 (NM_173806.2,407-425).
gcttttgcaacatatcact

SEQ ID NO: 428058 - DNA, 19 bp, Homo sapiens
  siRNA target sequence for MGC50721 (NM_173806.2,413-431).
gcaacatatcactattgga

SEQ ID NO: 428059 - DNA, 19 bp, Homo sapiens
  siRNA target sequence for MGC50721 (NM_173806.2,414-432).
caacatatcactattggaa

SEQ ID NO: 428060 - DNA, 19 bp, Homo sapiens
  siRNA target sequence for MGC50721 (NM_173806.2,429-447).
ggaacagtgctacaaatca

SEQ ID NO: 428061 - DNA, 19 bp, Homo sapiens
  siRNA target sequence for MGC50721 (NM_173806.2,512-530).
ggccaaattcccagtaaca

SEQ ID NO: 428062 - DNA, 19 bp, Homo sapiens
  siRNA target sequence for MGC50721 (NM_173806.2,657-675).
gcaaggagaccaatatcca

SEQ ID NO: 428063 - DNA, 19 bp, Homo sapiens
  siRNA target sequence for MGC50721 (NM_173806.2,658-676).
caaggagaccaatatccat

SEQ ID NO: 428064 - DNA, 19 bp, Homo sapiens
  siRNA target sequence for MGC50721 (NM_173806.2,684-702).
gactggcatggatataaga

SEQ ID NO: 428065 - DNA, 19 bp, Homo sapiens
  siRNA target sequence for MGC50721 (NM_173806.2,786-804).
ccttctccatactggataa

SEQ ID NO: 428066 - DNA, 19 bp, Homo sapiens
  siRNA target sequence for MGC50721 (NM_173806.2,844-862).
cctctacctcagatgcatt

SEQ ID NO: 428067 - DNA, 19 bp, Homo sapiens
  siRNA target sequence for MGC50721 (NM_173806.2,845-863).
ctctacctcagatgcattt

SEQ ID NO: 428068 - DNA, 19 bp, Homo sapiens
  siRNA target sequence for MGC50721 (NM_173806.2,902-920).
ccaactggtatcaaaggtt

SEQ ID NO: 428069 - DNA, 19 bp, Homo sapiens
  siRNA target sequence for MGC33370 (NM_173807.2,115-133).
ccactaacagcccaaacta

SEQ ID NO: 428070 - DNA, 19 bp, Homo sapiens
  siRNA target sequence for MGC33370 (NM_173807.2,124-142).
gcccaaactatcgcatttt

SEQ ID NO: 428071 - DNA, 19 bp, Homo sapiens
  siRNA target sequence for MGC33370 (NM_173807.2,125-143).
cccaaactatcgcattttt

SEQ ID NO: 428072 - DNA, 19 bp, Homo sapiens
  siRNA target sequence for MGC33370 (NM_173807.2,126-144).
ccaaactatcgcattttta

SEQ ID NO: 428073 - DNA, 19 bp, Homo sapiens
  siRNA target sequence for MGC33370 (NM_173807.2,145-163).
gtaccagaagtactattaa

SEQ ID NO: 428074 - DNA, 19 bp, Homo sapiens
  siRNA target sequence for MGC33370 (NM_173807.2,149-167).
cagaagtactattaagtta

SEQ ID NO: 428075 - DNA, 19 bp, Homo sapiens
  siRNA target sequence for MGC33370 (NM_173807.2,151-169).
gaagtactattaagttaga

SEQ ID NO: 428076 - DNA, 19 bp, Homo sapiens
  siRNA target sequence for MGC33370 (NM_173807.2,157-175).
ctattaagttagagtatga

SEQ ID NO: 428077 - DNA, 19 bp, Homo sapiens
  siRNA target sequence for MGC33370 (NM_173807.2,194-212).
gtggagtgtgccagaaact

SEQ ID NO: 428078 - DNA, 19 bp, Homo sapiens
  siRNA target sequence for MGC33370 (NM_173807.2,197-215).
gagtgtgccagaaacttgt

SEQ ID NO: 428079 - DNA, 19 bp, Homo sapiens
  siRNA target sequence for MGC33370 (NM_173807.2,264-282).
cctggtgttcacgctataa

SEQ ID NO: 428080 - DNA, 19 bp, Homo sapiens
  siRNA target sequence for MGC33370 (NM_173807.2,265-283).
ctggtgttcacgctataaa

SEQ ID NO: 428081 - DNA, 19 bp, Homo sapiens
  siRNA target sequence for MGC33370 (NM_173807.2,275-293).
cgctataaaaccaattgtt

SEQ ID NO: 428082 - DNA, 19 bp, Homo sapiens
  siRNA target sequence for MGC33370 (NM_173807.2,276-294).
gctataaaaccaattgtta

SEQ ID NO: 428083 - DNA, 19 bp, Homo sapiens
  siRNA target sequence for MGC33370 (NM_173807.2,306-324).
gaagaagaacgctatttat

SEQ ID NO: 428084 - DNA, 19 bp, Homo sapiens
  siRNA target sequence for MGC33370 (NM_173807.2,327-345).
gtggaaagttctcatactt

SEQ ID NO: 428085 - DNA, 19 bp, Homo sapiens
  siRNA target sequence for MGC33370 (NM_173807.2,351-369).
ctgtggtactatagagtta

SEQ ID NO: 428086 - DNA, 19 bp, Homo sapiens
  siRNA target sequence for MGC33370 (NM_173807.2,353-371).
gtggtactatagagttaga

SEQ ID NO: 428087 - DNA, 19 bp, Homo sapiens
  siRNA target sequence for MGC33370 (NM_173807.2,355-373).
ggtactatagagttagaca

SEQ ID NO: 428088 - DNA, 19 bp, Homo sapiens
  siRNA target sequence for MGC33370 (NM_173807.2,356-374).
gtactatagagttagacat

SEQ ID NO: 428089 - DNA, 19 bp, Homo sapiens
  siRNA target sequence for MGC33370 (NM_173807.2,386-404).
ctttacccagcttatcact

SEQ ID NO: 428090 - DNA, 19 bp, Homo sapiens
  siRNA target sequence for MGC33370 (NM_173807.2,518-536).
gcctgtcatacatacagtt

SEQ ID NO: 428091 - DNA, 19 bp, Homo sapiens
  siRNA target sequence for MGC33370 (NM_173807.2,586-604).
ggcgtattgtagtaccaat

SEQ ID NO: 428092 - DNA, 19 bp, Homo sapiens
  siRNA target sequence for MGC33370 (NM_173807.2,637-655).
gaaaccaagttacttttca

SEQ ID NO: 428093 - DNA, 19 bp, Homo sapiens
  siRNA target sequence for MGC33370 (NM_173807.2,711-729).
cctgaaattcctggttatt

SEQ ID NO: 428094 - DNA, 19 bp, Homo sapiens
  siRNA target sequence for MGC33370 (NM_173807.2,744-762).
ccacgtggtagtcaattaa

SEQ ID NO: 428095 - DNA, 19 bp, Homo sapiens
  siRNA target sequence for MGC33370 (NM_173807.2,745-763).
cacgtggtagtcaattaat

SEQ ID NO: 428096 - DNA, 19 bp, Homo sapiens
  siRNA target sequence for MGC33370 (NM_173807.2,818-836).
gacctttcacacaactgat

SEQ ID NO: 428097 - DNA, 19 bp, Homo sapiens
  siRNA target sequence for MGC33370 (NM_173807.2,825-843).
cacacaactgattcattca

SEQ ID NO: 428098 - DNA, 19 bp, Homo sapiens
  siRNA target sequence for MGC33370 (NM_173807.2,901-919).
gtgtggctcatgtgatctt

SEQ ID NO: 428099 - DNA, 19 bp, Homo sapiens
  siRNA target sequence for MGC33370 (NM_173807.2,922-940).
cgcgggatggaatcgtttt

SEQ ID NO: 428100 - DNA, 19 bp, Homo sapiens
  siRNA target sequence for MGC33370 (NM_173807.2,925-943).
gggatggaatcgtttttct

SEQ ID NO: 428101 - DNA, 19 bp, Homo sapiens
  siRNA target sequence for MGC33370 (NM_173807.2,968-986).
gagttttcgtggatttata

SEQ ID NO: 428102 - DNA, 19 bp, Homo sapiens
  siRNA target sequence for MGC33370 (NM_173807.2,992-1010).
gggaggaattgtaaatctt

SEQ ID NO: 428103 - DNA, 19 bp, Homo sapiens
  siRNA target sequence for MGC33370 (NM_173807.2,1125-1143).
ctcggatccattcttctta

SEQ ID NO: 428104 - DNA, 19 bp, Homo sapiens
  siRNA target sequence for MGC33370 (NM_173807.2,1145-1163).
gtttgccagattagtaact

SEQ ID NO: 428105 - DNA, 19 bp, Homo sapiens
  siRNA target sequence for MGC33370 (NM_173807.2,1214-1232).
catagacagggttgagtat

SEQ ID NO: 428106 - DNA, 19 bp, Homo sapiens
  siRNA target sequence for MGC33370 (NM_173807.2,1278-1296).
gtatgtaacgtcaccaaaa

SEQ ID NO: 428107 - DNA, 19 bp, Homo sapiens
  siRNA target sequence for MGC33370 (NM_173807.2,1298-1316).
gattttcttagtgatatat

SEQ ID NO: 428108 - DNA, 19 bp, Homo sapiens
  siRNA target sequence for MGC33370 (NM_173807.2,1342-1360).
cccaagactttacattaga

SEQ ID NO: 428109 - DNA, 19 bp, Homo sapiens
  siRNA target sequence for MGC33370 (NM_173807.2,1343-1361).
ccaagactttacattagat

SEQ ID NO: 428110 - DNA, 19 bp, Homo sapiens
  siRNA target sequence for MGC33370 (NM_173807.2,1354-1372).
cattagatgcccctattga

SEQ ID NO: 428111 - DNA, 19 bp, Homo sapiens
  siRNA target sequence for MGC33370 (NM_173807.2,1362-1380).
gcccctattgacagtgtta

SEQ ID NO: 428112 - DNA, 19 bp, Homo sapiens
  siRNA target sequence for MGC33370 (NM_173807.2,1375-1393).
gtgttaccatgccacattt

SEQ ID NO: 428113 - DNA, 19 bp, Homo sapiens
  siRNA target sequence for MGC33370 (NM_173807.2,1377-1395).
gttaccatgccacatttta

SEQ ID NO: 428114 - DNA, 19 bp, Homo sapiens
  siRNA target sequence for MGC33370 (NM_173807.2,1381-1399).
ccatgccacattttacatt

SEQ ID NO: 428115 - DNA, 19 bp, Homo sapiens
  siRNA target sequence for MGC33370 (NM_173807.2,1411-1429).
caggattactgctatggaa

SEQ ID NO: 428116 - DNA, 19 bp, Homo sapiens
  siRNA target sequence for MGC33370 (NM_173807.2,1419-1437).
ctgctatggaacaagcata

SEQ ID NO: 428117 - DNA, 19 bp, Homo sapiens
  siRNA target sequence for MGC33370 (NM_173807.2,1422-1440).
ctatggaacaagcatagta

SEQ ID NO: 428118 - DNA, 19 bp, Homo sapiens
  siRNA target sequence for MGC33370 (NM_173807.2,1442-1460).
ctactattgttaccataat

SEQ ID NO: 428119 - DNA, 19 bp, Homo sapiens
  siRNA target sequence for MGC33370 (NM_173807.2,1463-1481).
cacctttactgggatttta

SEQ ID NO: 428120 - DNA, 19 bp, Homo sapiens
  siRNA target sequence for MGC33370 (NM_173807.2,1465-1483).
cctttactgggattttaca

SEQ ID NO: 428121 - DNA, 19 bp, Homo sapiens
  siRNA target sequence for MGC33370 (NM_173807.2,1494-1512).
ggacatggaaatctatcaa

SEQ ID NO: 428122 - DNA, 19 bp, Homo sapiens
  siRNA target sequence for MGC33370 (NM_173807.2,1500-1518).
ggaaatctatcaatgctat

SEQ ID NO: 428123 - DNA, 19 bp, Homo sapiens
  siRNA target sequence for MGC33370 (NM_173807.2,1515-1533).
ctatcaaatgacagcatta

SEQ ID NO: 428124 - DNA, 19 bp, Homo sapiens
  siRNA target sequence for MGC33370 (NM_173807.2,1526-1544).
cagcattattcatgaagtt

SEQ ID NO: 428125 - DNA, 19 bp, Homo sapiens
  siRNA target sequence for MGC33370 (NM_173807.2,1604-1622).
caagattaatactagagat

SEQ ID NO: 428126 - DNA, 19 bp, Homo sapiens
  siRNA target sequence for MGC33370 (NM_173807.2,1631-1649).
gctgcatttatggacaaat

SEQ ID NO: 428127 - DNA, 19 bp, Homo sapiens
  siRNA target sequence for MGC33370 (NM_173807.2,1635-1653).
catttatggacaaattaca

SEQ ID NO: 428128 - DNA, 19 bp, Homo sapiens
  siRNA target sequence for MGC33370 (NM_173807.2,1681-1699).
catctggtcaaacatattt

SEQ ID NO: 428129 - DNA, 19 bp, Homo sapiens
  siRNA target sequence for MGC33370 (NM_173807.2,1712-1730).
ggatgatggcacaatacaa

SEQ ID NO: 428130 - DNA, 19 bp, Homo sapiens
  siRNA target sequence for MGC33370 (NM_173807.2,1770-1788).
gctttcacaacaaaagaca

SEQ ID NO: 428131 - DNA, 19 bp, Homo sapiens
  siRNA target sequence for MGC33370 (NM_173807.2,1794-1812).
ccatacatggcatttcata

SEQ ID NO: 428132 - DNA, 19 bp, Homo sapiens
  siRNA target sequence for MGC33370 (NM_173807.2,1894-1912).
ctggtctgtatgttattgt

SEQ ID NO: 428133 - DNA, 19 bp, Homo sapiens
  siRNA target sequence for MGC33370 (NM_173807.2,1924-1942).
gcccaaaaatattacaaga

SEQ ID NO: 428134 - DNA, 19 bp, Homo sapiens
  siRNA target sequence for MGC33370 (NM_173807.2,1941-1959).
gagagtcatgagatttcct

SEQ ID NO: 428135 - DNA, 19 bp, Homo sapiens
  siRNA target sequence for MGC33370 (NM_173807.2,2025-2043).
gagagaatatctgattact

SEQ ID NO: 428136 - DNA, 19 bp, Homo sapiens
  siRNA target sequence for MGC33370 (NM_173807.2,2068-2086).
gtcttgtgctggttcagtt

SEQ ID NO: 428137 - DNA, 19 bp, Homo sapiens
  siRNA target sequence for MGC33370 (NM_173807.2,2082-2100).
cagtttcgacctagtgaat

SEQ ID NO: 428138 - DNA, 19 bp, Homo sapiens
  siRNA target sequence for MGC33370 (NM_173807.2,2084-2102).
gtttcgacctagtgaatat

SEQ ID NO: 428139 - DNA, 19 bp, Homo sapiens
  siRNA target sequence for MGC33370 (NM_173807.2,2088-2106).
cgacctagtgaatattcaa

SEQ ID NO: 428140 - DNA, 19 bp, Homo sapiens
  siRNA target sequence for MGC33370 (NM_173807.2,2089-2107).
gacctagtgaatattcaaa

SEQ ID NO: 428141 - DNA, 19 bp, Homo sapiens
  siRNA target sequence for MGC33370 (NM_173807.2,2113-2131).
gtccaatagcccaaaaggt

SEQ ID NO: 428142 - DNA, 19 bp, Homo sapiens
  siRNA target sequence for MGC33370 (NM_173807.2,2122-2140).
cccaaaaggtgttccaaat

SEQ ID NO: 428143 - DNA, 19 bp, Homo sapiens
  siRNA target sequence for MGC33370 (NM_173807.2,2142-2160).
gctgttggctgtgatgata

SEQ ID NO: 428144 - DNA, 19 bp, Homo sapiens
  siRNA target sequence for MGC33370 (NM_173807.2,2145-2163).
gttggctgtgatgataaaa

SEQ ID NO: 428145 - DNA, 19 bp, Homo sapiens
  siRNA target sequence for MGC33370 (NM_173807.2,2197-2215).
gatgtcatcaccatgattt

SEQ ID NO: 428146 - DNA, 19 bp, Homo sapiens
  siRNA target sequence for MGC33370 (NM_173807.2,2222-2240).
cgtgattgaaaagtcatat

SEQ ID NO: 428147 - DNA, 19 bp, Homo sapiens
  siRNA target sequence for MGC33370 (NM_173807.2,2243-2261).
gaggcatcagccatcgaaa

SEQ ID NO: 428148 - DNA, 19 bp, Homo sapiens
  siRNA target sequence for MGC33370 (NM_173807.2,2247-2265).
catcagccatcgaaaaact

SEQ ID NO: 428149 - DNA, 19 bp, Homo sapiens
  siRNA target sequence for MGC33370 (NM_173807.2,2250-2268).
cagccatcgaaaaacttga

SEQ ID NO: 428150 - DNA, 19 bp, Homo sapiens
  siRNA target sequence for MGC33370 (NM_173807.2,2264-2282).
cttgagagtaaggtatatt

SEQ ID NO: 428151 - DNA, 19 bp, Homo sapiens
  siRNA target sequence for MGC33370 (NM_173807.2,2331-2349).
caacctgtggttcaactat

SEQ ID NO: 428152 - DNA, 19 bp, Homo sapiens
  siRNA target sequence for MGC33370 (NM_173807.2,2335-2353).
ctgtggttcaactatttga

SEQ ID NO: 428153 - DNA, 19 bp, Homo sapiens
  siRNA target sequence for MGC33370 (NM_173807.2,2339-2357).
ggttcaactatttgatgat

SEQ ID NO: 428154 - DNA, 19 bp, Homo sapiens
  siRNA target sequence for MGC33370 (NM_173807.2,2340-2358).
gttcaactatttgatgata

SEQ ID NO: 428155 - DNA, 19 bp, Homo sapiens
  siRNA target sequence for MGC33370 (NM_173807.2,2352-2370).
gatgataatggctatgtta

SEQ ID NO: 428156 - DNA, 19 bp, Homo sapiens
  siRNA target sequence for MGC33370 (NM_173807.2,2411-2429).
cagggatgactatagcttt

SEQ ID NO: 428157 - DNA, 19 bp, Homo sapiens
  siRNA target sequence for MGC33370 (NM_173807.2,2414-2432).
ggatgactatagctttaat

SEQ ID NO: 428158 - DNA, 19 bp, Homo sapiens
  siRNA target sequence for MGC33370 (NM_173807.2,2441-2459).
ggcacagagtggttgttta

SEQ ID NO: 428159 - DNA, 19 bp, Homo sapiens
  siRNA target sequence for MGC33370 (NM_173807.2,2447-2465).
gagtggttgtttacatgaa

SEQ ID NO: 428160 - DNA, 19 bp, Homo sapiens
  siRNA target sequence for MGC33370 (NM_173807.2,2477-2495).
gaagtcaatgattgaactt

SEQ ID NO: 428161 - DNA, 19 bp, Homo sapiens
  siRNA target sequence for MGC33370 (NM_173807.2,2482-2500).
caatgattgaacttaacaa

SEQ ID NO: 428162 - DNA, 19 bp, Homo sapiens
  siRNA target sequence for NEGR1 (NM_173808.1,172-190).
ggcggtgcttaggtgttat

SEQ ID NO: 428163 - DNA, 19 bp, Homo sapiens
  siRNA target sequence for NEGR1 (NM_173808.1,173-191).
gcggtgcttaggtgttatt

SEQ ID NO: 428164 - DNA, 19 bp, Homo sapiens
  siRNA target sequence for NEGR1 (NM_173808.1,178-196).
gcttaggtgttatttggaa

SEQ ID NO: 428165 - DNA, 19 bp, Homo sapiens
  siRNA target sequence for NEGR1 (NM_173808.1,219-237).
ggctgaaccggtcaagtat

SEQ ID NO: 428166 - DNA, 19 bp, Homo sapiens
  siRNA target sequence for NEGR1 (NM_173808.1,220-238).
gctgaaccggtcaagtatt

SEQ ID NO: 428167 - DNA, 19 bp, Homo sapiens
  siRNA target sequence for NEGR1 (NM_173808.1,221-239).
ctgaaccggtcaagtatta

SEQ ID NO: 428168 - DNA, 19 bp, Homo sapiens
  siRNA target sequence for NEGR1 (NM_173808.1,223-241).
gaaccggtcaagtattatt

SEQ ID NO: 428169 - DNA, 19 bp, Homo sapiens
  siRNA target sequence for NEGR1 (NM_173808.1,266-284).
gtggatcctcgagtttcaa

SEQ ID NO: 428170 - DNA, 19 bp, Homo sapiens
  siRNA target sequence for NEGR1 (NM_173808.1,272-290).
cctcgagtttcaatttcaa

SEQ ID NO: 428171 - DNA, 19 bp, Homo sapiens
  siRNA target sequence for NEGR1 (NM_173808.1,275-293).
cgagtttcaatttcaacat

SEQ ID NO: 428172 - DNA, 19 bp, Homo sapiens
  siRNA target sequence for NEGR1 (NM_173808.1,278-296).
gtttcaatttcaacattga

SEQ ID NO: 428173 - DNA, 19 bp, Homo sapiens
  siRNA target sequence for NEGR1 (NM_173808.1,374-392).
caacatacacccagaacaa

SEQ ID NO: 428174 - DNA, 19 bp, Homo sapiens
  siRNA target sequence for NEGR1 (NM_173808.1,413-431).
caagttcctcctaagatat

SEQ ID NO: 428175 - DNA, 19 bp, Homo sapiens
  siRNA target sequence for NEGR1 (NM_173808.1,420-438).
ctcctaagatatatgacat

SEQ ID NO: 428176 - DNA, 19 bp, Homo sapiens
  siRNA target sequence for NEGR1 (NM_173808.1,434-452).
gacatctcaaatgatatga

SEQ ID NO: 428177 - DNA, 19 bp, Homo sapiens
  siRNA target sequence for NEGR1 (NM_173808.1,469-487).
caacgtcactcttacttgt

SEQ ID NO: 428178 - DNA, 19 bp, Homo sapiens
  siRNA target sequence for NEGR1 (NM_173808.1,532-550).
ctccccatcagcaaaacca

SEQ ID NO: 428179 - DNA, 19 bp, Homo sapiens
  siRNA target sequence for NEGR1 (NM_173808.1,534-552).
ccccatcagcaaaaccatt

SEQ ID NO: 428180 - DNA, 19 bp, Homo sapiens
  siRNA target sequence for NEGR1 (NM_173808.1,535-553).
cccatcagcaaaaccattt

SEQ ID NO: 428181 - DNA, 19 bp, Homo sapiens
  siRNA target sequence for NEGR1 (NM_173808.1,571-589).
ggacatttatggaattaca

SEQ ID NO: 428182 - DNA, 19 bp, Homo sapiens
  siRNA target sequence for NEGR1 (NM_173808.1,572-590).
gacatttatggaattacaa

SEQ ID NO: 428183 - DNA, 19 bp, Homo sapiens
  siRNA target sequence for NEGR1 (NM_173808.1,640-658).
cccagatgtgaggaaagta

SEQ ID NO: 428184 - DNA, 19 bp, Homo sapiens
  siRNA target sequence for NEGR1 (NM_173808.1,670-688).
caactttgctcctactatt

SEQ ID NO: 428185 - DNA, 19 bp, Homo sapiens
  siRNA target sequence for NEGR1 (NM_173808.1,719-737).
ggacgcagtggcctgataa

SEQ ID NO: 428186 - DNA, 19 bp, Homo sapiens
  siRNA target sequence for NEGR1 (NM_173808.1,874-892).
ggagcacttcggcaattat

SEQ ID NO: 428187 - DNA, 19 bp, Homo sapiens
  siRNA target sequence for NEGR1 (NM_173808.1,875-893).
gagcacttcggcaattata

SEQ ID NO: 428188 - DNA, 19 bp, Homo sapiens
  siRNA target sequence for NEGR1 (NM_173808.1,910-928).
caagctaggcacaaccaat

SEQ ID NO: 428189 - DNA, 19 bp, Homo sapiens
  siRNA target sequence for NEGR1 (NM_173808.1,975-993).
ccgggagcgctgatgttct

SEQ ID NO: 428190 - DNA, 19 bp, Homo sapiens
  siRNA target sequence for NEGR1 (NM_173808.1,976-994).
cgggagcgctgatgttctt

SEQ ID NO: 428191 - DNA, 19 bp, Homo sapiens
  siRNA target sequence for NEGR1 (NM_173808.1,977-995).
gggagcgctgatgttcttt

SEQ ID NO: 428192 - DNA, 19 bp, Homo sapiens
  siRNA target sequence for NEGR1 (NM_173808.1,978-996).
ggagcgctgatgttctttt

SEQ ID NO: 428193 - DNA, 19 bp, Homo sapiens
  siRNA target sequence for NEGR1 (NM_173808.1,1029-1047).
ctttcaccagcatattcta

SEQ ID NO: 428194 - DNA, 19 bp, Homo sapiens
  siRNA target sequence for MGC10120 (NM_173809.1,94-112).
cggccaccagtgaagacta

SEQ ID NO: 428195 - DNA, 19 bp, Homo sapiens
  siRNA target sequence for MGC10120 (NM_173809.1,95-113).
ggccaccagtgaagactat

SEQ ID NO: 428196 - DNA, 19 bp, Homo sapiens
  siRNA target sequence for MGC10120 (NM_173809.1,96-114).
gccaccagtgaagactata

SEQ ID NO: 428197 - DNA, 19 bp, Homo sapiens
  siRNA target sequence for MGC10120 (NM_173809.1,97-115).
ccaccagtgaagactataa

SEQ ID NO: 428198 - DNA, 19 bp, Homo sapiens
  siRNA target sequence for MGC10120 (NM_173809.1,100-118).
ccagtgaagactataagct

SEQ ID NO: 428199 - DNA, 19 bp, Homo sapiens
  siRNA target sequence for MGC10120 (NM_173809.1,159-177).
gaaatgaaagatattgcta

SEQ ID NO: 428200 - DNA, 19 bp, Homo sapiens
  siRNA target sequence for MGC10120 (NM_173809.1,168-186).
gatattgctataaacatta

SEQ ID NO: 428201 - DNA, 19 bp, Homo sapiens
  siRNA target sequence for MGC10120 (NM_173809.1,200-218).
ggacttaaaccagaaatat

SEQ ID NO: 428202 - DNA, 19 bp, Homo sapiens
  siRNA target sequence for MGC10120 (NM_173809.1,289-307).
cttacaagttggatgcata

SEQ ID NO: 428203 - DNA, 19 bp, Homo sapiens
  siRNA target sequence for MGC10120 (NM_173809.1,293-311).
caagttggatgcatattca

SEQ ID NO: 428204 - DNA, 19 bp, Homo sapiens
  siRNA target sequence for MGC29649 (NM_173810.3,502-520).
ctgccctctccgttaccta

SEQ ID NO: 428205 - DNA, 19 bp, Homo sapiens
  siRNA target sequence for MGC29649 (NM_173810.3,504-522).
gccctctccgttacctaat

SEQ ID NO: 428206 - DNA, 19 bp, Homo sapiens
  siRNA target sequence for MGC29649 (NM_173810.3,506-524).
cctctccgttacctaatct

SEQ ID NO: 428207 - DNA, 19 bp, Homo sapiens
  siRNA target sequence for MGC29649 (NM_173810.3,542-560).
ccctcacgcctgaacaaga

SEQ ID NO: 428208 - DNA, 19 bp, Homo sapiens
  siRNA target sequence for MGC29649 (NM_173810.3,543-561).
cctcacgcctgaacaagaa

SEQ ID NO: 428209 - DNA, 19 bp, Homo sapiens
  siRNA target sequence for MGC29649 (NM_173810.3,584-602).
cagactgctataacaatct

SEQ ID NO: 428210 - DNA, 19 bp, Homo sapiens
  siRNA target sequence for MGC29649 (NM_173810.3,639-657).
cgaacgagtgagagaatat

SEQ ID NO: 428211 - DNA, 19 bp, Homo sapiens
  siRNA target sequence for MGC29649 (NM_173810.3,640-658).
gaacgagtgagagaatata

SEQ ID NO: 428212 - DNA, 19 bp, Homo sapiens
  siRNA target sequence for MGC29649 (NM_173810.3,710-728).
ccggagtggcctttttcca

SEQ ID NO: 428213 - DNA, 19 bp, Homo sapiens
  siRNA target sequence for MGC29649 (NM_173810.3,711-729).
cggagtggcctttttccat

SEQ ID NO: 428214 - DNA, 19 bp, Homo sapiens
  siRNA target sequence for MGC29649 (NM_173810.3,760-778).
ctcctggctgccgtgaata

SEQ ID NO: 428215 - DNA, 19 bp, Homo sapiens
  siRNA target sequence for MGC29649 (NM_173810.3,774-792).
gaataggcagcctaaagat

SEQ ID NO: 428216 - DNA, 19 bp, Homo sapiens
  siRNA target sequence for FLJ32675 (NM_173811.2,273-291).
gactgtgacctcttgctat

SEQ ID NO: 428217 - DNA, 19 bp, Homo sapiens
  siRNA target sequence for FLJ32675 (NM_173811.2,306-324).
cggacattggaccgtttta

SEQ ID NO: 428218 - DNA, 19 bp, Homo sapiens
  siRNA target sequence for FLJ32675 (NM_173811.2,307-325).
ggacattggaccgttttaa

SEQ ID NO: 428219 - DNA, 19 bp, Homo sapiens
  siRNA target sequence for FLJ32675 (NM_173811.2,310-328).
cattggaccgttttaagct

SEQ ID NO: 428220 - DNA, 19 bp, Homo sapiens
  siRNA target sequence for FLJ32675 (NM_173811.2,336-354).
gtgactgatgaatacttga

SEQ ID NO: 428221 - DNA, 19 bp, Homo sapiens
  siRNA target sequence for FLJ32675 (NM_173811.2,367-385).
ggtttccacggcagttcat

SEQ ID NO: 428222 - DNA, 19 bp, Homo sapiens
  siRNA target sequence for FLJ32675 (NM_173811.2,373-391).
cacggcagttcatttatta

SEQ ID NO: 428223 - DNA, 19 bp, Homo sapiens
  siRNA target sequence for FLJ32675 (NM_173811.2,375-393).
cggcagttcatttattact

SEQ ID NO: 428224 - DNA, 19 bp, Homo sapiens
  siRNA target sequence for FLJ32675 (NM_173811.2,432-450).
cagcgatccagggctatta

SEQ ID NO: 428225 - DNA, 19 bp, Homo sapiens
  siRNA target sequence for FLJ32675 (NM_173811.2,468-486).
cttgcagcattgggttttt

SEQ ID NO: 428226 - DNA, 19 bp, Homo sapiens
  siRNA target sequence for FLJ32675 (NM_173811.2,474-492).
gcattgggtttttatacct

SEQ ID NO: 428227 - DNA, 19 bp, Homo sapiens
  siRNA target sequence for FLJ32675 (NM_173811.2,533-551).
cagtcaggcgtctatgagt

SEQ ID NO: 428228 - DNA, 19 bp, Homo sapiens
  siRNA target sequence for FLJ32675 (NM_173811.2,542-560).
gtctatgagtcgttgtgtt

SEQ ID NO: 428229 - DNA, 19 bp, Homo sapiens
  siRNA target sequence for FLJ32675 (NM_173811.2,552-570).
cgttgtgttgccaatgtca

SEQ ID NO: 428230 - DNA, 19 bp, Homo sapiens
  siRNA target sequence for FLJ32675 (NM_173811.2,686-704).
ggtggttgactgtatccat

SEQ ID NO: 428231 - DNA, 19 bp, Homo sapiens
  siRNA target sequence for FLJ32675 (NM_173811.2,729-747).
gaagacctctcctatgtga

SEQ ID NO: 428232 - DNA, 19 bp, Homo sapiens
  siRNA target sequence for FLJ32675 (NM_173811.2,789-807).
gacattagagggacactaa

SEQ ID NO: 428233 - DNA, 19 bp, Homo sapiens
  siRNA target sequence for FLJ32675 (NM_173811.2,950-968).
catgaccccacttcacatt

SEQ ID NO: 428234 - DNA, 19 bp, Homo sapiens
  siRNA target sequence for FLJ32675 (NM_173811.2,979-997).
cagcagaatatcgctataa

SEQ ID NO: 428235 - DNA, 19 bp, Homo sapiens
  siRNA target sequence for FLJ32675 (NM_173811.2,981-999).
gcagaatatcgctataaca

SEQ ID NO: 428236 - DNA, 19 bp, Homo sapiens
  siRNA target sequence for FLJ32675 (NM_173811.2,1012-1030).
caactcacagtgtgattga

SEQ ID NO: 428237 - DNA, 19 bp, Homo sapiens
  siRNA target sequence for FLJ32675 (NM_173811.2,1132-1150).
gttgtgtcctccacaacat

SEQ ID NO: 428238 - DNA, 19 bp, Homo sapiens
  siRNA target sequence for FLJ32675 (NM_173811.2,1261-1279).
gtattcgtcaggagctaat

SEQ ID NO: 428239 - DNA, 19 bp, Homo sapiens
  siRNA target sequence for FLJ32675 (NM_173811.2,1272-1290).
gagctaatgctcactcatt

SEQ ID NO: 428240 - DNA, 19 bp, Homo sapiens
  siRNA target sequence for FLJ32675 (NM_173811.2,1275-1293).
ctaatgctcactcatttta

SEQ ID NO: 428241 - DNA, 19 bp, Homo sapiens
  siRNA target sequence for FLJ32949 (NM_173812.3,275-293).
ggatccaaagtctgaaaga

SEQ ID NO: 428242 - DNA, 19 bp, Homo sapiens
  siRNA target sequence for FLJ32949 (NM_173812.3,566-584).
catacttcaagaccattat

SEQ ID NO: 428243 - DNA, 19 bp, Homo sapiens
  siRNA target sequence for FLJ32949 (NM_173812.3,570-588).
cttcaagaccattattgaa

SEQ ID NO: 428244 - DNA, 19 bp, Homo sapiens
  siRNA target sequence for FLJ32949 (NM_173812.3,679-697).
ctttatccagaggtaatca

SEQ ID NO: 428245 - DNA, 19 bp, Homo sapiens
  siRNA target sequence for FLJ32949 (NM_173812.3,1846-1864).
cgcagagttcgttttgaga

SEQ ID NO: 428246 - DNA, 19 bp, Homo sapiens
  siRNA target sequence for FLJ32949 (NM_173812.3,1852-1870).
gttcgttttgagaaggtta

SEQ ID NO: 428247 - DNA, 19 bp, Homo sapiens
  siRNA target sequence for FLJ34154 (NM_173813.2,158-176).
gtgcatacaccaactcaat

SEQ ID NO: 428248 - DNA, 19 bp, Homo sapiens
  siRNA target sequence for FLJ34154 (NM_173813.2,187-205).
ccaaccccaatcttccaat

SEQ ID NO: 428249 - DNA, 19 bp, Homo sapiens
  siRNA target sequence for FLJ34154 (NM_173813.2,218-236).
gggcaagcagcatccaatt

SEQ ID NO: 428250 - DNA, 19 bp, Homo sapiens
  siRNA target sequence for FLJ34154 (NM_173813.2,220-238).
gcaagcagcatccaattga

SEQ ID NO: 428251 - DNA, 19 bp, Homo sapiens
  siRNA target sequence for FLJ34154 (NM_173813.2,275-293).
gaaggccatggttaatgga

SEQ ID NO: 428252 - DNA, 19 bp, Homo sapiens
  siRNA target sequence for FLJ34154 (NM_173813.2,310-328).
gctgcattctcgttgtctt

SEQ ID NO: 428253 - DNA, 19 bp, Homo sapiens
  siRNA target sequence for FLJ34154 (NM_173813.2,311-329).
ctgcattctcgttgtcttt

SEQ ID NO: 428254 - DNA, 19 bp, Homo sapiens
  siRNA target sequence for FLJ34154 (NM_173813.2,313-331).
gcattctcgttgtctttca

SEQ ID NO: 428255 - DNA, 19 bp, Homo sapiens
  siRNA target sequence for FLJ34154 (NM_173813.2,350-368).
cttcagcccacaaactgaa

SEQ ID NO: 428256 - DNA, 19 bp, Homo sapiens
  siRNA target sequence for FLJ34154 (NM_173813.2,355-373).
gcccacaaactgaaaggaa

SEQ ID NO: 428257 - DNA, 19 bp, Homo sapiens
  siRNA target sequence for FLJ34154 (NM_173813.2,390-408).
cggtcgggattgcttcttt

SEQ ID NO: 428258 - DNA, 19 bp, Homo sapiens
  siRNA target sequence for FLJ34154 (NM_173813.2,413-431).
gttgttgatggctccaaaa

SEQ ID NO: 428259 - DNA, 19 bp, Homo sapiens
  siRNA target sequence for FLJ34154 (NM_173813.2,472-490).
ccatcagctctggtttaaa

SEQ ID NO: 428260 - DNA, 19 bp, Homo sapiens
  siRNA target sequence for FLJ34154 (NM_173813.2,473-491).
catcagctctggtttaaat

SEQ ID NO: 428261 - DNA, 19 bp, Homo sapiens
  siRNA target sequence for FLJ34154 (NM_173813.2,494-512).
cttgtacccaggtgaaact

SEQ ID NO: 428262 - DNA, 19 bp, Homo sapiens
  siRNA target sequence for FLJ34154 (NM_173813.2,497-515).
gtacccaggtgaaactgaa

SEQ ID NO: 428263 - DNA, 19 bp, Homo sapiens
  siRNA target sequence for FLJ34154 (NM_173813.2,511-529).
ctgaaatcaataacttact

SEQ ID NO: 428264 - DNA, 19 bp, Homo sapiens
  siRNA target sequence for FLJ34154 (NM_173813.2,576-594).
ctacgggatgtgatcctaa

SEQ ID NO: 428265 - DNA, 19 bp, Homo sapiens
  siRNA target sequence for FLJ34154 (NM_173813.2,642-660).
gatgatcattacagactaa

SEQ ID NO: 428266 - DNA, 19 bp, Homo sapiens
  siRNA target sequence for FLJ34154 (NM_173813.2,696-714).
gtacgagaatcctgtatct

SEQ ID NO: 428267 - DNA, 19 bp, Homo sapiens
  siRNA target sequence for FLJ34154 (NM_173813.2,787-805).
cctgcctgcgctatctgat

SEQ ID NO: 428268 - DNA, 19 bp, Homo sapiens
  siRNA target sequence for FLJ34154 (NM_173813.2,905-923).
ggagctaaaagtcagtatt

SEQ ID NO: 428269 - DNA, 19 bp, Homo sapiens
  siRNA target sequence for FLJ34154 (NM_173813.2,928-946).
ctcttgccacccaaatcct

SEQ ID NO: 428270 - DNA, 19 bp, Homo sapiens
  siRNA target sequence for FLJ34154 (NM_173813.2,955-973).
gtgatgaagtgttggaaat

SEQ ID NO: 428271 - DNA, 19 bp, Homo sapiens
  siRNA target sequence for FLJ34154 (NM_173813.2,986-1004).
cacaactgccctcataaat

SEQ ID NO: 428272 - DNA, 19 bp, Homo sapiens
  siRNA target sequence for FLJ34154 (NM_173813.2,991-1009).
ctgccctcataaatagtga

SEQ ID NO: 428273 - DNA, 19 bp, Homo sapiens
  siRNA target sequence for FLJ34154 (NM_173813.2,995-1013).
cctcataaatagtgacata

SEQ ID NO: 428274 - DNA, 19 bp, Homo sapiens
  siRNA target sequence for FLJ34154 (NM_173813.2,1019-1037).
ccgtgagcagaggttaaaa

SEQ ID NO: 428275 - DNA, 19 bp, Homo sapiens
  siRNA target sequence for FLJ34154 (NM_173813.2,1100-1118).
cttgatgcatccaaattta

SEQ ID NO: 428276 - DNA, 19 bp, Homo sapiens
  siRNA target sequence for FLJ34154 (NM_173813.2,1158-1176).
gtgcagctggtactctata

SEQ ID NO: 428277 - DNA, 19 bp, Homo sapiens
  siRNA target sequence for FLJ34154 (NM_173813.2,1161-1179).
cagctggtactctatacca

SEQ ID NO: 428278 - DNA, 19 bp, Homo sapiens
  siRNA target sequence for FLJ34154 (NM_173813.2,1184-1202).
gacggcgttgctgcttaaa

SEQ ID NO: 428279 - DNA, 19 bp, Homo sapiens
  siRNA target sequence for FLJ34154 (NM_173813.2,1205-1223).
ccagtgtccggtttttgct

SEQ ID NO: 428280 - DNA, 19 bp, Homo sapiens
  siRNA target sequence for FLJ34154 (NM_173813.2,1276-1294).
ctgatgagagaatgttaga

SEQ ID NO: 428281 - DNA, 19 bp, Homo sapiens
  siRNA target sequence for FLJ34154 (NM_173813.2,1376-1394).
ccccgtcagagacaactat

SEQ ID NO: 428282 - DNA, 19 bp, Homo sapiens
  siRNA target sequence for FLJ34154 (NM_173813.2,1377-1395).
cccgtcagagacaactata

SEQ ID NO: 428283 - DNA, 19 bp, Homo sapiens
  siRNA target sequence for FLJ34154 (NM_173813.2,1378-1396).
ccgtcagagacaactataa

SEQ ID NO: 428284 - DNA, 19 bp, Homo sapiens
  siRNA target sequence for FLJ34154 (NM_173813.2,1425-1443).
gctcgctgcctgtacctta

SEQ ID NO: 428285 - DNA, 19 bp, Homo sapiens
  siRNA target sequence for FLJ34154 (NM_173813.2,1428-1446).
cgctgcctgtaccttagat

SEQ ID NO: 428286 - DNA, 19 bp, Homo sapiens
  siRNA target sequence for FLJ34154 (NM_173813.2,1429-1447).
gctgcctgtaccttagatt

SEQ ID NO: 428287 - DNA, 19 bp, Homo sapiens
  siRNA target sequence for FLJ34154 (NM_173813.2,1430-1448).
ctgcctgtaccttagattt

SEQ ID NO: 428288 - DNA, 19 bp, Homo sapiens
  siRNA target sequence for FLJ34154 (NM_173813.2,1454-1472).
cagatgctcttcgcaatat

SEQ ID NO: 428289 - DNA, 19 bp, Homo sapiens
  siRNA target sequence for FLJ34154 (NM_173813.2,1456-1474).
gatgctcttcgcaatatga

SEQ ID NO: 428290 - DNA, 19 bp, Homo sapiens
  siRNA target sequence for FLJ34154 (NM_173813.2,1459-1477).
gctcttcgcaatatgacta

SEQ ID NO: 428291 - DNA, 19 bp, Homo sapiens
  siRNA target sequence for FLJ34154 (NM_173813.2,1460-1478).
ctcttcgcaatatgactat

SEQ ID NO: 428292 - DNA, 19 bp, Homo sapiens
  siRNA target sequence for FLJ34154 (NM_173813.2,1462-1480).
cttcgcaatatgactatga

SEQ ID NO: 428293 - DNA, 19 bp, Homo sapiens
  siRNA target sequence for FLJ34154 (NM_173813.2,1465-1483).
cgcaatatgactatgacaa

SEQ ID NO: 428294 - DNA, 19 bp, Homo sapiens
  siRNA target sequence for FLJ34154 (NM_173813.2,1579-1597).
ctggttggccgaaagactt

SEQ ID NO: 428295 - DNA, 19 bp, Homo sapiens
  siRNA target sequence for FLJ34154 (NM_173813.2,1748-1766).
ggtagacctggctttaggt

SEQ ID NO: 428296 - DNA, 19 bp, Homo sapiens
  siRNA target sequence for FLJ34154 (NM_173813.2,1775-1793).
gttagcttgttccatgtta

SEQ ID NO: 428297 - DNA, 19 bp, Homo sapiens
  siRNA target sequence for FLJ34154 (NM_173813.2,1847-1865).
gctattgcggtccaaactt

SEQ ID NO: 428298 - DNA, 19 bp, Homo sapiens
  siRNA target sequence for FLJ34154 (NM_173813.2,1848-1866).
ctattgcggtccaaacttt

SEQ ID NO: 428299 - DNA, 19 bp, Homo sapiens
  siRNA target sequence for FLJ34154 (NM_173813.2,1853-1871).
gcggtccaaacttttacaa

SEQ ID NO: 428300 - DNA, 19 bp, Homo sapiens
  siRNA target sequence for FLJ34154 (NM_173813.2,1854-1872).
cggtccaaacttttacaaa

SEQ ID NO: 428301 - DNA, 19 bp, Homo sapiens
  siRNA target sequence for FLJ34154 (NM_173813.2,1996-2014).
ctcctgttggaaactactt

SEQ ID NO: 428302 - DNA, 19 bp, Homo sapiens
  siRNA target sequence for FLJ34154 (NM_173813.2,1999-2017).
ctgttggaaactactttga

SEQ ID NO: 428303 - DNA, 19 bp, Homo sapiens
  siRNA target sequence for FLJ34154 (NM_173813.2,2074-2092).
ggcgtgctagacctcaatt

SEQ ID NO: 428304 - DNA, 19 bp, Homo sapiens
  siRNA target sequence for FLJ34154 (NM_173813.2,2075-2093).
gcgtgctagacctcaattt

SEQ ID NO: 428305 - DNA, 19 bp, Homo sapiens
  siRNA target sequence for FLJ34154 (NM_173813.2,2076-2094).
cgtgctagacctcaattta

SEQ ID NO: 428306 - DNA, 19 bp, Homo sapiens
  siRNA target sequence for FLJ37464 (NM_173815.3,1127-1145).
gcatctcaggactgatgat

SEQ ID NO: 428307 - DNA, 19 bp, Homo sapiens
  siRNA target sequence for FLJ37464 (NM_173815.3,1196-1214).
ccgcgttattcagactttt

SEQ ID NO: 428308 - DNA, 19 bp, Homo sapiens
  siRNA target sequence for FLJ37464 (NM_173815.3,1198-1216).
gcgttattcagacttttca

SEQ ID NO: 428309 - DNA, 19 bp, Homo sapiens
  siRNA target sequence for FLJ37464 (NM_173815.3,1199-1217).
cgttattcagacttttcat

SEQ ID NO: 428310 - DNA, 19 bp, Homo sapiens
  siRNA target sequence for FLJ37464 (NM_173815.3,1218-1236).
cactagtaacccactgaaa

SEQ ID NO: 428311 - DNA, 19 bp, Homo sapiens
  siRNA target sequence for FLJ37464 (NM_173815.3,1280-1298).
gcacacagatcctggtaaa

SEQ ID NO: 428312 - DNA, 19 bp, Homo sapiens
  siRNA target sequence for FLJ37464 (NM_173815.3,1333-1351).
cgtgtgtccaacaagatga

SEQ ID NO: 428313 - DNA, 19 bp, Homo sapiens
  siRNA target sequence for FLJ37464 (NM_173815.3,1336-1354).
gtgtccaacaagatgagat

SEQ ID NO: 428314 - DNA, 19 bp, Homo sapiens
  siRNA target sequence for FLJ37464 (NM_173815.3,1374-1392).
gagagacccggaagagatt

SEQ ID NO: 428315 - DNA, 19 bp, Homo sapiens
  siRNA target sequence for FLJ37464 (NM_173815.3,1376-1394).
gagacccggaagagattat

SEQ ID NO: 428316 - DNA, 19 bp, Homo sapiens
  siRNA target sequence for FLJ37464 (NM_173815.3,1378-1396).
gacccggaagagattatct

SEQ ID NO: 428317 - DNA, 19 bp, Homo sapiens
  siRNA target sequence for FLJ37464 (NM_173815.3,1453-1471).
ctgacccaggggaaggttt

SEQ ID NO: 428318 - DNA, 19 bp, Homo sapiens
  siRNA target sequence for FLJ37464 (NM_173815.3,1495-1513).
gtcaacaacctggaattca

SEQ ID NO: 428319 - DNA, 19 bp, Homo sapiens
  siRNA target sequence for FLJ37464 (NM_173815.3,1497-1515).
caacaacctggaattcaat

SEQ ID NO: 428320 - DNA, 19 bp, Homo sapiens
  siRNA target sequence for FLJ37464 (NM_173815.3,1517-1535).
ggctcttgccttataatat

SEQ ID NO: 428321 - DNA, 19 bp, Homo sapiens
  siRNA target sequence for FLJ37464 (NM_173815.3,1519-1537).
ctcttgccttataatatca

SEQ ID NO: 428322 - DNA, 19 bp, Homo sapiens
  siRNA target sequence for FLJ37464 (NM_173815.3,1616-1634).
gtatgatggacatagttca

SEQ ID NO: 428323 - DNA, 19 bp, Homo sapiens
  siRNA target sequence for FLJ37464 (NM_173815.3,1711-1729).
gctggccacgctacaacaa

SEQ ID NO: 428324 - DNA, 19 bp, Homo sapiens
  siRNA target sequence for FLJ37464 (NM_173815.3,1719-1737).
cgctacaacaaggatgaaa

SEQ ID NO: 428325 - DNA, 19 bp, Homo sapiens
  siRNA target sequence for FLJ35487 (NM_173820.1,170-188).
gccaggacccgaccattta

SEQ ID NO: 428326 - DNA, 19 bp, Homo sapiens
  siRNA target sequence for FLJ35487 (NM_173820.1,175-193).
gacccgaccatttagatca

SEQ ID NO: 428327 - DNA, 19 bp, Homo sapiens
  siRNA target sequence for FLJ35487 (NM_173820.1,206-224).
cacgcaacactgtcaacat

SEQ ID NO: 428328 - DNA, 19 bp, Homo sapiens
  siRNA target sequence for FLJ35487 (NM_173820.1,209-227).
gcaacactgtcaacatagt

SEQ ID NO: 428329 - DNA, 19 bp, Homo sapiens
  siRNA target sequence for FLJ35487 (NM_173820.1,365-383).
cctaggttgtttgcaaaat

SEQ ID NO: 428330 - DNA, 19 bp, Homo sapiens
  siRNA target sequence for FLJ35487 (NM_173820.1,407-425).
ggagggcttcagtttattt

SEQ ID NO: 428331 - DNA, 19 bp, Homo sapiens
  siRNA target sequence for FLJ35487 (NM_173820.1,469-487).
ctagaggtcacctgcaatt

SEQ ID NO: 428332 - DNA, 19 bp, Homo sapiens
  siRNA target sequence for FLJ33590 (NM_173821.1,514-532).
gagcgccaacgccacaaaa

SEQ ID NO: 428333 - DNA, 19 bp, Homo sapiens
  siRNA target sequence for FLJ33590 (NM_173821.1,1138-1156).
ccccttcatctttactgat

SEQ ID NO: 428334 - DNA, 19 bp, Homo sapiens
  siRNA target sequence for FLJ33590 (NM_173821.1,1320-1338).
gcaaagatgcctttactga

SEQ ID NO: 428335 - DNA, 19 bp, Homo sapiens
  siRNA target sequence for FLJ33590 (NM_173821.1,1456-1474).
cgcagtcttcgatgtcata

SEQ ID NO: 428336 - DNA, 19 bp, Homo sapiens
  siRNA target sequence for FLJ33590 (NM_173821.1,1524-1542).
gcttctcccaaggctatta

SEQ ID NO: 428337 - DNA, 19 bp, Homo sapiens
  siRNA target sequence for MGC39518 (NM_173822.1,194-212).
gggaactgaccgttgtgtt

SEQ ID NO: 428338 - DNA, 19 bp, Homo sapiens
  siRNA target sequence for MGC39518 (NM_173822.1,215-233).
ggaagaatggttatcagaa

SEQ ID NO: 428339 - DNA, 19 bp, Homo sapiens
  siRNA target sequence for MGC39518 (NM_173822.1,216-234).
gaagaatggttatcagaat

SEQ ID NO: 428340 - DNA, 19 bp, Homo sapiens
  siRNA target sequence for MGC39518 (NM_173822.1,219-237).
gaatggttatcagaattca

SEQ ID NO: 428341 - DNA, 19 bp, Homo sapiens
  siRNA target sequence for MGC39518 (NM_173822.1,265-283).
gttatgcagcaactttaca

SEQ ID NO: 428342 - DNA, 19 bp, Homo sapiens
  siRNA target sequence for MGC39518 (NM_173822.1,311-329).
ctataaagttattcaagat

SEQ ID NO: 428343 - DNA, 19 bp, Homo sapiens
  siRNA target sequence for MGC39518 (NM_173822.1,318-336).
gttattcaagattcaaata

SEQ ID NO: 428344 - DNA, 19 bp, Homo sapiens
  siRNA target sequence for MGC39518 (NM_173822.1,366-384).
ctgtttgagctctatcgta

SEQ ID NO: 428345 - DNA, 19 bp, Homo sapiens
  siRNA target sequence for MGC39518 (NM_173822.1,385-403).
gctcagaggttcgacttaa

SEQ ID NO: 428346 - DNA, 19 bp, Homo sapiens
  siRNA target sequence for MGC39518 (NM_173822.1,476-494).
gagtaatggttgcattgaa

SEQ ID NO: 428347 - DNA, 19 bp, Homo sapiens
  siRNA target sequence for MGC39518 (NM_173822.1,501-519).
ctgttaggaatttacaatt

SEQ ID NO: 428348 - DNA, 19 bp, Homo sapiens
  siRNA target sequence for MGC39518 (NM_173822.1,565-583).
ctatcccctccttatccaa

SEQ ID NO: 428349 - DNA, 19 bp, Homo sapiens
  siRNA target sequence for MGC39518 (NM_173822.1,574-592).
ccttatccaagccttcaat

SEQ ID NO: 428350 - DNA, 19 bp, Homo sapiens
  siRNA target sequence for MGC39518 (NM_173822.1,575-593).
cttatccaagccttcaata

SEQ ID NO: 428351 - DNA, 19 bp, Homo sapiens
  siRNA target sequence for MGC39518 (NM_173822.1,581-599).
caagccttcaatataccat

SEQ ID NO: 428352 - DNA, 19 bp, Homo sapiens
  siRNA target sequence for MGC39518 (NM_173822.1,659-677).
catcagagttgtttatagt

SEQ ID NO: 428353 - DNA, 19 bp, Homo sapiens
  siRNA target sequence for MGC39518 (NM_173822.1,718-736).
ggtttgaagtcctgagttt

SEQ ID NO: 428354 - DNA, 19 bp, Homo sapiens
  siRNA target sequence for MGC39518 (NM_173822.1,723-741).
gaagtcctgagttttctca

SEQ ID NO: 428355 - DNA, 19 bp, Homo sapiens
  siRNA target sequence for MGC39518 (NM_173822.1,740-758).
catgctgtgttataattct

SEQ ID NO: 428356 - DNA, 19 bp, Homo sapiens
  siRNA target sequence for MGC39518 (NM_173822.1,746-764).
gtgttataattctgctatt

SEQ ID NO: 428357 - DNA, 19 bp, Homo sapiens
  siRNA target sequence for MGC39518 (NM_173822.1,864-882).
ctctgtggtcgaatagtat

SEQ ID NO: 428358 - DNA, 19 bp, Homo sapiens
  siRNA target sequence for MGC39518 (NM_173822.1,868-886).
gtggtcgaatagtattgga

SEQ ID NO: 428359 - DNA, 19 bp, Homo sapiens
  siRNA target sequence for MGC39518 (NM_173822.1,879-897).
gtattggatcctgaattta

SEQ ID NO: 428360 - DNA, 19 bp, Homo sapiens
  siRNA target sequence for MGC39518 (NM_173822.1,906-924).
cttctcacaggggtttatt

SEQ ID NO: 428361 - DNA, 19 bp, Homo sapiens
  siRNA target sequence for MGC39518 (NM_173822.1,956-974).
ccaggaagttcttgatgat

SEQ ID NO: 428362 - DNA, 19 bp, Homo sapiens
  siRNA target sequence for MGC39518 (NM_173822.1,966-984).
cttgatgatatcatttata

SEQ ID NO: 428363 - DNA, 19 bp, Homo sapiens
  siRNA target sequence for MGC39518 (NM_173822.1,987-1005).
gcccagctagagctttttt

SEQ ID NO: 428364 - DNA, 19 bp, Homo sapiens
  siRNA target sequence for MGC39518 (NM_173822.1,1019-1037).
ggttgccaatgccatgaaa

SEQ ID NO: 428365 - DNA, 19 bp, Homo sapiens
  siRNA target sequence for MGC39518 (NM_173822.1,1020-1038).
gttgccaatgccatgaaaa

SEQ ID NO: 428366 - DNA, 19 bp, Homo sapiens
  siRNA target sequence for MGC39518 (NM_173822.1,1034-1052).
gaaaaactcattaccattt

SEQ ID NO: 428367 - DNA, 19 bp, Homo sapiens
  siRNA target sequence for MGC39518 (NM_173822.1,1121-1139).
gatttctcggactgcaatt

SEQ ID NO: 428368 - DNA, 19 bp, Homo sapiens
  siRNA target sequence for MGC39518 (NM_173822.1,1135-1153).
caattacaacagcttcaat

SEQ ID NO: 428369 - DNA, 19 bp, Homo sapiens
  siRNA target sequence for MGC39518 (NM_173822.1,1201-1219).
gagaggagtctgtaaacct

SEQ ID NO: 428370 - DNA, 19 bp, Homo sapiens
  siRNA target sequence for MGC39518 (NM_173822.1,1208-1226).
gtctgtaaacctgaatgat

SEQ ID NO: 428371 - DNA, 19 bp, Homo sapiens
  siRNA target sequence for MGC39518 (NM_173822.1,1269-1287).
ccaattgggaccaaaccat

SEQ ID NO: 428372 - DNA, 19 bp, Homo sapiens
  siRNA target sequence for MGC39518 (NM_173822.1,1301-1319).
gaggggaagcttaaggaaa

SEQ ID NO: 428373 - DNA, 19 bp, Homo sapiens
  siRNA target sequence for MGC39518 (NM_173822.1,1333-1351).
gttcagccaaggataaaga

SEQ ID NO: 428374 - DNA, 19 bp, Homo sapiens
  siRNA target sequence for MGC39518 (NM_173822.1,1379-1397).
gagccctcgagattcagta

SEQ ID NO: 428375 - DNA, 19 bp, Homo sapiens
  siRNA target sequence for MGC39518 (NM_173822.1,1416-1434).
cagcaaccaactgatctta

SEQ ID NO: 428376 - DNA, 19 bp, Homo sapiens
  siRNA target sequence for MGC39518 (NM_173822.1,1418-1436).
gcaaccaactgatcttagt

SEQ ID NO: 428377 - DNA, 19 bp, Homo sapiens
  siRNA target sequence for MGC39518 (NM_173822.1,1489-1507).
gccaggtggtgccaaaaat

SEQ ID NO: 428378 - DNA, 19 bp, Homo sapiens
  siRNA target sequence for MGC39518 (NM_173822.1,1497-1515).
gtgccaaaaatcaatagct

SEQ ID NO: 428379 - DNA, 19 bp, Homo sapiens
  siRNA target sequence for MGC39518 (NM_173822.1,1543-1561).
cctcaagtaaatcatttga

SEQ ID NO: 428380 - DNA, 19 bp, Homo sapiens
  siRNA target sequence for MGC39518 (NM_173822.1,1549-1567).
gtaaatcatttgactatgt

SEQ ID NO: 428381 - DNA, 19 bp, Homo sapiens
  siRNA target sequence for MGC39518 (NM_173822.1,1604-1622).
cactgagggaggtactaat

SEQ ID NO: 428382 - DNA, 19 bp, Homo sapiens
  siRNA target sequence for MGC39518 (NM_173822.1,1606-1624).
ctgagggaggtactaattt

SEQ ID NO: 428383 - DNA, 19 bp, Homo sapiens
  siRNA target sequence for MGC39518 (NM_173822.1,1610-1628).
gggaggtactaatttagca

SEQ ID NO: 428384 - DNA, 19 bp, Homo sapiens
  siRNA target sequence for MGC39518 (NM_173822.1,1629-1647).
gccaacaatgctaatcgat

SEQ ID NO: 428385 - DNA, 19 bp, Homo sapiens
  siRNA target sequence for MGC39518 (NM_173822.1,1630-1648).
ccaacaatgctaatcgata

SEQ ID NO: 428386 - DNA, 19 bp, Homo sapiens
  siRNA target sequence for MGC39518 (NM_173822.1,1634-1652).
caatgctaatcgatactca

SEQ ID NO: 428387 - DNA, 19 bp, Homo sapiens
  siRNA target sequence for MGC39518 (NM_173822.1,1681-1699).
gtcaagctggcgaaggtaa

SEQ ID NO: 428388 - DNA, 19 bp, Homo sapiens
  siRNA target sequence for MGC39518 (NM_173822.1,1738-1756).
ctcgatccccaagtttcaa

SEQ ID NO: 428389 - DNA, 19 bp, Homo sapiens
  siRNA target sequence for MGC39518 (NM_173822.1,1740-1758).
cgatccccaagtttcaata

SEQ ID NO: 428390 - DNA, 19 bp, Homo sapiens
  siRNA target sequence for MGC39518 (NM_173822.1,1744-1762).
ccccaagtttcaatatgca

SEQ ID NO: 428391 - DNA, 19 bp, Homo sapiens
  siRNA target sequence for DKFZp313N0621 (NM_173826.1,124-142).
ctatgaggaggttatgtct

SEQ ID NO: 428392 - DNA, 19 bp, Homo sapiens
  siRNA target sequence for DKFZp313N0621 (NM_173826.1,130-148).
ggaggttatgtctagagaa

SEQ ID NO: 428393 - DNA, 19 bp, Homo sapiens
  siRNA target sequence for DKFZp313N0621 (NM_173826.1,133-151).
ggttatgtctagagaagat

SEQ ID NO: 428394 - DNA, 19 bp, Homo sapiens
  siRNA target sequence for DKFZp313N0621 (NM_173826.1,249-267).
ggacagcaccccgtagaaa

SEQ ID NO: 428395 - DNA, 19 bp, Homo sapiens
  siRNA target sequence for DKFZp313N0621 (NM_173826.1,259-277).
ccgtagaaagggaaatcaa

SEQ ID NO: 428396 - DNA, 19 bp, Homo sapiens
  siRNA target sequence for DKFZp313N0621 (NM_173826.1,260-278).
cgtagaaagggaaatcaat

SEQ ID NO: 428397 - DNA, 19 bp, Homo sapiens
  siRNA target sequence for DKFZp313N0621 (NM_173826.1,279-297).
gaaaattctcttaaaaggt

SEQ ID NO: 428398 - DNA, 19 bp, Homo sapiens
  siRNA target sequence for DKFZp313N0621 (NM_173826.1,348-366).
ccaactcagcttacatttt

SEQ ID NO: 428399 - DNA, 19 bp, Homo sapiens
  siRNA target sequence for DKFZp313N0621 (NM_173826.1,394-412).
ccgatggccaggaaccttt

SEQ ID NO: 428400 - DNA, 19 bp, Homo sapiens
  siRNA target sequence for DKFZp313N0621 (NM_173826.1,395-413).
cgatggccaggaacctttt

SEQ ID NO: 428401 - DNA, 19 bp, Homo sapiens
  siRNA target sequence for DKFZp313N0621 (NM_173826.1,396-414).
gatggccaggaacctttta

SEQ ID NO: 428402 - DNA, 19 bp, Homo sapiens
  siRNA target sequence for DKFZp313N0621 (NM_173826.1,401-419).
ccaggaaccttttagtact

SEQ ID NO: 428403 - DNA, 19 bp, Homo sapiens
  siRNA target sequence for DKFZp313N0621 (NM_173826.1,402-420).
caggaaccttttagtactt

SEQ ID NO: 428404 - DNA, 19 bp, Homo sapiens
  siRNA target sequence for DKFZp313N0621 (NM_173826.1,422-440).
cggatttcgagcagtcaaa

SEQ ID NO: 428405 - DNA, 19 bp, Homo sapiens
  siRNA target sequence for DKFZp313N0621 (NM_173826.1,423-441).
ggatttcgagcagtcaaat

SEQ ID NO: 428406 - DNA, 19 bp, Homo sapiens
  siRNA target sequence for DKFZp313N0621 (NM_173826.1,424-442).
gatttcgagcagtcaaatt

SEQ ID NO: 428407 - DNA, 19 bp, Homo sapiens
  siRNA target sequence for DKFZp313N0621 (NM_173826.1,429-447).
cgagcagtcaaatttactt

SEQ ID NO: 428408 - DNA, 19 bp, Homo sapiens
  siRNA target sequence for DKFZp313N0621 (NM_173826.1,430-448).
gagcagtcaaatttacttt

SEQ ID NO: 428409 - DNA, 19 bp, Homo sapiens
  siRNA target sequence for DKFZp313N0621 (NM_173826.1,464-482).
gctaagcacagtgttatat

SEQ ID NO: 428410 - DNA, 19 bp, Homo sapiens
  siRNA target sequence for DKFZp313N0621 (NM_173826.1,465-483).
ctaagcacagtgttatata

SEQ ID NO: 428411 - DNA, 19 bp, Homo sapiens
  siRNA target sequence for DKFZp313N0621 (NM_173826.1,494-512).
ctgcagtttatctgttgaa

SEQ ID NO: 428412 - DNA, 19 bp, Homo sapiens
  siRNA target sequence for DKFZp313N0621 (NM_173826.1,518-536).
ccaaagcttgaatactaat

SEQ ID NO: 428413 - DNA, 19 bp, Homo sapiens
  siRNA target sequence for DKFZp313N0621 (NM_173826.1,523-541).
gcttgaatactaatatgca

SEQ ID NO: 428414 - DNA, 19 bp, Homo sapiens
  siRNA target sequence for DKFZp313N0621 (NM_173826.1,548-566).
gcctctcaaagaagctaaa

SEQ ID NO: 428415 - DNA, 19 bp, Homo sapiens
  siRNA target sequence for DKFZp313N0621 (NM_173826.1,572-590).
gcctgacaggcccatcaaa

SEQ ID NO: 428416 - DNA, 19 bp, Homo sapiens
  siRNA target sequence for DKFZp313N0621 (NM_173826.1,573-591).
cctgacaggcccatcaaat

SEQ ID NO: 428417 - DNA, 19 bp, Homo sapiens
  siRNA target sequence for DKFZp313N0621 (NM_173826.1,651-669).
gtctcgagagtggaaacaa

SEQ ID NO: 428418 - DNA, 19 bp, Homo sapiens
  siRNA target sequence for DKFZp313N0621 (NM_173826.1,722-740).
gaacagtttgccacttaga

SEQ ID NO: 428419 - DNA, 19 bp, Homo sapiens
  siRNA target sequence for DKFZp313N0621 (NM_173826.1,731-749).
gccacttagaaaagaacta

SEQ ID NO: 428420 - DNA, 19 bp, Homo sapiens
  siRNA target sequence for DKFZp313N0621 (NM_173826.1,739-757).
gaaaagaactagatcgttt

SEQ ID NO: 428421 - DNA, 19 bp, Homo sapiens
  siRNA target sequence for DKFZp313N0621 (NM_173826.1,891-909).
gcaaaagggtgtacaatca

SEQ ID NO: 428422 - DNA, 19 bp, Homo sapiens
  siRNA target sequence for DKFZp313N0621 (NM_173826.1,892-910).
caaaagggtgtacaatcat

SEQ ID NO: 428423 - DNA, 19 bp, Homo sapiens
  siRNA target sequence for DKFZp313N0621 (NM_173826.1,950-968).
gatgctaggaacaatggat

SEQ ID NO: 428424 - DNA, 19 bp, Homo sapiens
  siRNA target sequence for DKFZp313N0621 (NM_173826.1,977-995).
ccactggacaaaacttttt

SEQ ID NO: 428425 - DNA, 19 bp, Homo sapiens
  siRNA target sequence for DKFZp313N0621 (NM_173826.1,996-1014).
gaaagattgccaagttatt

SEQ ID NO: 428426 - DNA, 19 bp, Homo sapiens
  siRNA target sequence for DKFZp313N0621 (NM_173826.1,1049-1067).
ccaaataagctatctttta

SEQ ID NO: 428427 - DNA, 19 bp, Homo sapiens
  siRNA target sequence for DKFZp313N0621 (NM_173826.1,1095-1113).
gaattacagccagtattga

SEQ ID NO: 428428 - DNA, 19 bp, Homo sapiens
  siRNA target sequence for DKFZp313N0621 (NM_173826.1,1103-1121).
gccagtattgacacttgaa

SEQ ID NO: 428429 - DNA, 19 bp, Homo sapiens
  siRNA target sequence for DKFZp313N0621 (NM_173826.1,1134-1152).
cttcttgatgtgttttata

SEQ ID NO: 428430 - DNA, 19 bp, Homo sapiens
  siRNA target sequence for DKFZp313N0621 (NM_173826.1,1244-1262).
gcatgaactcgggcatttt

SEQ ID NO: 428431 - DNA, 19 bp, Homo sapiens
  siRNA target sequence for DKFZp313N0621 (NM_173826.1,1253-1271).
cgggcattttaatattcca

SEQ ID NO: 428432 - DNA, 19 bp, Homo sapiens
  siRNA target sequence for DKFZp313N0621 (NM_173826.1,1287-1305).
gcaaatctccagtggttta

SEQ ID NO: 428433 - DNA, 19 bp, Homo sapiens
  siRNA target sequence for DKFZp313N0621 (NM_173826.1,1383-1401).
caggcatcaacaaagaaat

SEQ ID NO: 428434 - DNA, 19 bp, Homo sapiens
  siRNA target sequence for DKFZp313N0621 (NM_173826.1,1425-1443).
gagcccagcatttctagta

SEQ ID NO: 428435 - DNA, 19 bp, Homo sapiens
  siRNA target sequence for DKFZp313N0621 (NM_173826.1,1427-1445).
gcccagcatttctagtata

SEQ ID NO: 428436 - DNA, 19 bp, Homo sapiens
  siRNA target sequence for DKFZp313N0621 (NM_173826.1,1430-1448).
cagcatttctagtatacaa

SEQ ID NO: 428437 - DNA, 19 bp, Homo sapiens
  siRNA target sequence for DKFZp313N0621 (NM_173826.1,1468-1486).
gacttctagaacaatcact

SEQ ID NO: 428438 - DNA, 19 bp, Homo sapiens
  siRNA target sequence for DKFZp313N0621 (NM_173826.1,1545-1563).
ggagacctttgtattcctt

SEQ ID NO: 428439 - DNA, 19 bp, Homo sapiens
  siRNA target sequence for FLJ90583 (NM_173828.3,1319-1337).
gccacgtgctcaagaagaa

SEQ ID NO: 428440 - DNA, 19 bp, Homo sapiens
  siRNA target sequence for FLJ90583 (NM_173828.3,1716-1734).
gttccgggtgacacacatt

SEQ ID NO: 428441 - DNA, 19 bp, Homo sapiens
  siRNA target sequence for FLJ90583 (NM_173828.3,2067-2085).
caaaccagacacttctgat

SEQ ID NO: 428442 - DNA, 19 bp, Homo sapiens
  siRNA target sequence for C6orf182 (NM_173830.3,1363-1381).
ctgcagcaaaaagttcaaa

SEQ ID NO: 428443 - DNA, 19 bp, Homo sapiens
  siRNA target sequence for C6orf182 (NM_173830.3,1394-1412).
gtgaagcttcaggtattca

SEQ ID NO: 428444 - DNA, 19 bp, Homo sapiens
  siRNA target sequence for C6orf182 (NM_173830.3,1420-1438).
gacagctaccctaaaggat

SEQ ID NO: 428445 - DNA, 19 bp, Homo sapiens
  siRNA target sequence for C6orf182 (NM_173830.3,1424-1442).
gctaccctaaaggatcaaa

SEQ ID NO: 428446 - DNA, 19 bp, Homo sapiens
  siRNA target sequence for C6orf182 (NM_173830.3,1514-1532).
caatacgagttcataatct

SEQ ID NO: 428447 - DNA, 19 bp, Homo sapiens
  siRNA target sequence for C6orf182 (NM_173830.3,1522-1540).
gttcataatcttcaaatga

SEQ ID NO: 428448 - DNA, 19 bp, Homo sapiens
  siRNA target sequence for MGC45780 (NM_173833.2,436-454).
ccatctgtgaggattcctt

SEQ ID NO: 428449 - DNA, 19 bp, Homo sapiens
  siRNA target sequence for MGC45780 (NM_173833.2,660-678).
gccctgactcgcaatgtga

SEQ ID NO: 428450 - DNA, 19 bp, Homo sapiens
  siRNA target sequence for MGC45780 (NM_173833.2,661-679).
ccctgactcgcaatgtgaa

SEQ ID NO: 428451 - DNA, 19 bp, Homo sapiens
  siRNA target sequence for MGC45780 (NM_173833.2,675-693).
gtgaaccggctgaatgaga

SEQ ID NO: 428452 - DNA, 19 bp, Homo sapiens
  siRNA target sequence for MGC45780 (NM_173833.2,1460-1478).
gggcatgcgtgggttcaaa

SEQ ID NO: 428453 - DNA, 19 bp, Homo sapiens
  siRNA target sequence for MGC21416 (NM_173834.2,80-98).
gtttgcaggcctttcagat

SEQ ID NO: 428454 - DNA, 19 bp, Homo sapiens
  siRNA target sequence for MGC21416 (NM_173834.2,87-105).
ggcctttcagatatatcca

SEQ ID NO: 428455 - DNA, 19 bp, Homo sapiens
  siRNA target sequence for MGC21416 (NM_173834.2,88-106).
gcctttcagatatatccat

SEQ ID NO: 428456 - DNA, 19 bp, Homo sapiens
  siRNA target sequence for MGC21416 (NM_173834.2,154-172).
ctcgcatccgggagtttga

SEQ ID NO: 428457 - DNA, 19 bp, Homo sapiens
  siRNA target sequence for MGC21416 (NM_173834.2,156-174).
cgcatccgggagtttgaca

SEQ ID NO: 428458 - DNA, 19 bp, Homo sapiens
  siRNA target sequence for MGC21416 (NM_173834.2,167-185).
gtttgacagctccacatta

SEQ ID NO: 428459 - DNA, 19 bp, Homo sapiens
  siRNA target sequence for MGC21416 (NM_173834.2,176-194).
ctccacattaaatgaatct

SEQ ID NO: 428460 - DNA, 19 bp, Homo sapiens
  siRNA target sequence for MGC21416 (NM_173834.2,189-207).
gaatctgttcgcaatacca

SEQ ID NO: 428461 - DNA, 19 bp, Homo sapiens
  siRNA target sequence for MGC21416 (NM_173834.2,262-280).
ggaaaagtaatactctttt

SEQ ID NO: 428462 - DNA, 19 bp, Homo sapiens
  siRNA target sequence for MGC21416 (NM_173834.2,316-334).
gtgtgacactcgcattaat

SEQ ID NO: 428463 - DNA, 19 bp, Homo sapiens
  siRNA target sequence for MGC21416 (NM_173834.2,444-462).
cttggagggaacatatctt

SEQ ID NO: 428464 - DNA, 19 bp, Homo sapiens
  siRNA target sequence for MGC21416 (NM_173834.2,478-496).
gtgtgctgggttactgtat

SEQ ID NO: 428465 - DNA, 19 bp, Homo sapiens
  siRNA target sequence for MGC21416 (NM_173834.2,482-500).
gctgggttactgtatactt

SEQ ID NO: 428466 - DNA, 19 bp, Homo sapiens
  siRNA target sequence for MGC21416 (NM_173834.2,549-567).
ccaggacctgtaaacttca

SEQ ID NO: 428467 - DNA, 19 bp, Homo sapiens
  siRNA target sequence for MGC21416 (NM_173834.2,563-581).
cttcatggttcggcttttt

SEQ ID NO: 428468 - DNA, 19 bp, Homo sapiens
  siRNA target sequence for MGC21416 (NM_173834.2,655-673).
gcagagccctagctgttta

SEQ ID NO: 428469 - DNA, 19 bp, Homo sapiens
  siRNA target sequence for MGC21416 (NM_173834.2,656-674).
cagagccctagctgtttat

SEQ ID NO: 428470 - DNA, 19 bp, Homo sapiens
  siRNA target sequence for C14orf8 (NM_173846.3,114-132).
gctgcgtttggagaatcat

SEQ ID NO: 428471 - DNA, 19 bp, Homo sapiens
  siRNA target sequence for C14orf8 (NM_173846.3,117-135).
gcgtttggagaatcatcaa

SEQ ID NO: 428472 - DNA, 19 bp, Homo sapiens
  siRNA target sequence for C14orf8 (NM_173846.3,263-281).
ccgaaccatcacgtttcaa

SEQ ID NO: 428473 - DNA, 19 bp, Homo sapiens
  siRNA target sequence for C14orf8 (NM_173846.3,265-283).
gaaccatcacgtttcaaca

SEQ ID NO: 428474 - DNA, 19 bp, Homo sapiens
  siRNA target sequence for C14orf8 (NM_173846.3,274-292).
cgtttcaacagttcaaaga

SEQ ID NO: 428475 - DNA, 19 bp, Homo sapiens
  siRNA target sequence for C14orf8 (NM_173846.3,388-406).
ccaccactggcgctactaa

SEQ ID NO: 428476 - DNA, 19 bp, Homo sapiens
  siRNA target sequence for C14orf8 (NM_173846.3,389-407).
caccactggcgctactaaa

SEQ ID NO: 428477 - DNA, 19 bp, Homo sapiens
  siRNA target sequence for C14orf8 (NM_173846.3,392-410).
cactggcgctactaaagca

SEQ ID NO: 428478 - DNA, 19 bp, Homo sapiens
  siRNA target sequence for C14orf8 (NM_173846.3,398-416).
cgctactaaagcaacaaca

SEQ ID NO: 428479 - DNA, 19 bp, Homo sapiens
  siRNA target sequence for C14orf8 (NM_173846.3,558-576).
ggttctggcacctacgata

SEQ ID NO: 428480 - DNA, 19 bp, Homo sapiens
  siRNA target sequence for C14orf8 (NM_173846.3,559-577).
gttctggcacctacgataa

SEQ ID NO: 428481 - DNA, 19 bp, Homo sapiens
  siRNA target sequence for LOC138046 (NM_173848.3,1164-1182).
gttttcatcggcaatctaa

SEQ ID NO: 428482 - DNA, 19 bp, Homo sapiens
  siRNA target sequence for LOC138046 (NM_173848.3,1179-1197).
ctaaatacggcaattgtca

SEQ ID NO: 428483 - DNA, 19 bp, Homo sapiens
  siRNA target sequence for LOC138046 (NM_173848.3,1186-1204).
cggcaattgtcaagaaagt

SEQ ID NO: 428484 - DNA, 19 bp, Homo sapiens
  siRNA target sequence for LOC138046 (NM_173848.3,1187-1205).
ggcaattgtcaagaaagtt

SEQ ID NO: 428485 - DNA, 19 bp, Homo sapiens
  siRNA target sequence for LOC138046 (NM_173848.3,1249-1267).
gttccgttcacaaaggtta

SEQ ID NO: 428486 - DNA, 19 bp, Homo sapiens
  siRNA target sequence for LOC138046 (NM_173848.3,1253-1271).
cgttcacaaaggttatgca

SEQ ID NO: 428487 - DNA, 19 bp, Homo sapiens
  siRNA target sequence for LOC138046 (NM_173848.3,1269-1287).
gcatttgtacagtacatga

SEQ ID NO: 428488 - DNA, 19 bp, Homo sapiens
  siRNA target sequence for LOC138046 (NM_173848.3,1344-1362).
caaccacttgatatcaaca

SEQ ID NO: 428489 - DNA, 19 bp, Homo sapiens
  siRNA target sequence for LOC138046 (NM_173848.3,1408-1426).
ggcccctttctgcacttta

SEQ ID NO: 428490 - DNA, 19 bp, Homo sapiens
  siRNA target sequence for LOC138046 (NM_173848.3,1410-1428).
cccctttctgcactttaca

SEQ ID NO: 428491 - DNA, 19 bp, Homo sapiens
  siRNA target sequence for LOC138046 (NM_173848.3,1461-1479).
ggcggttatgtctttgact

SEQ ID NO: 428492 - DNA, 19 bp, Homo sapiens
  siRNA target sequence for LOC138046 (NM_173848.3,1462-1480).
gcggttatgtctttgacta

SEQ ID NO: 428493 - DNA, 19 bp, Homo sapiens
  siRNA target sequence for LOC138046 (NM_173848.3,1463-1481).
cggttatgtctttgactat

SEQ ID NO: 428494 - DNA, 19 bp, Homo sapiens
  siRNA target sequence for LOC138046 (NM_173848.3,1482-1500).
gattactacagagatgatt

SEQ ID NO: 428495 - DNA, 19 bp, Homo sapiens
  siRNA target sequence for LOC138046 (NM_173848.3,1502-1520).
ctacaatcggttatttgat

SEQ ID NO: 428496 - DNA, 19 bp, Homo sapiens
  siRNA target sequence for LOC138046 (NM_173848.3,1650-1668).
gggtcaacaggttctaaat

SEQ ID NO: 428497 - DNA, 19 bp, Homo sapiens
  siRNA target sequence for LOC138046 (NM_173848.3,1686-1704).
cagaccatcaagaaagaat

SEQ ID NO: 428498 - DNA, 19 bp, Homo sapiens
  siRNA target sequence for LOC138046 (NM_173848.3,1829-1847).
ggaatgtgtgtcagagatt

SEQ ID NO: 428499 - DNA, 19 bp, Homo sapiens
  siRNA target sequence for KCP2 (NM_173852.2,36-54).
ggttcagctcgcctttctt

SEQ ID NO: 428500 - DNA, 19 bp, Homo sapiens
  siRNA target sequence for KCP2 (NM_173852.2,272-290).
cttgtctttggcaaaggat

SEQ ID NO: 428501 - DNA, 19 bp, Homo sapiens
  siRNA target sequence for KCP2 (NM_173852.2,398-416).
gttggtctgtactacatca

SEQ ID NO: 428502 - DNA, 19 bp, Homo sapiens
  siRNA target sequence for KCP2 (NM_173852.2,402-420).
gtctgtactacatcaacaa

SEQ ID NO: 428503 - DNA, 19 bp, Homo sapiens
  siRNA target sequence for KCP3 (NM_173853.2,482-500).
ccccacaagaatctatgat

SEQ ID NO: 428504 - DNA, 19 bp, Homo sapiens
  siRNA target sequence for KCP3 (NM_173853.2,483-501).
cccacaagaatctatgata

SEQ ID NO: 428505 - DNA, 19 bp, Homo sapiens
  siRNA target sequence for KCP3 (NM_173853.2,485-503).
cacaagaatctatgataca

SEQ ID NO: 428506 - DNA, 19 bp, Homo sapiens
  siRNA target sequence for KCP3 (NM_173853.2,654-672).
gaatctcctaaatgtaaaa

SEQ ID NO: 428507 - DNA, 19 bp, Homo sapiens
  siRNA target sequence for KCP3 (NM_173853.2,714-732).
cgggcatcacagagaagtt

SEQ ID NO: 428508 - DNA, 19 bp, Homo sapiens
  siRNA target sequence for LOC283385 (NM_173855.2,156-174).
gcctgcggagccaggtata

SEQ ID NO: 428509 - DNA, 19 bp, Homo sapiens
  siRNA target sequence for LOC283385 (NM_173855.2,166-184).
ccaggtatacgctgtgaat

SEQ ID NO: 428510 - DNA, 19 bp, Homo sapiens
  siRNA target sequence for LOC283385 (NM_173855.2,177-195).
ctgtgaatggcgactacta

SEQ ID NO: 428511 - DNA, 19 bp, Homo sapiens
  siRNA target sequence for LOC283385 (NM_173855.2,363-381).
ggtggaaaggtgataagaa

SEQ ID NO: 428512 - DNA, 19 bp, Homo sapiens
  siRNA target sequence for LOC283385 (NM_173855.2,406-424).
cggacccaaggagtattat

SEQ ID NO: 428513 - DNA, 19 bp, Homo sapiens
  siRNA target sequence for LOC283385 (NM_173855.2,408-426).
gacccaaggagtattatga

SEQ ID NO: 428514 - DNA, 19 bp, Homo sapiens
  siRNA target sequence for LOC283385 (NM_173855.2,535-553).
gctgcgcctgagtcaaaat

SEQ ID NO: 428515 - DNA, 19 bp, Homo sapiens
  siRNA target sequence for LOC283385 (NM_173855.2,538-556).
gcgcctgagtcaaaatcct

SEQ ID NO: 428516 - DNA, 19 bp, Homo sapiens
  siRNA target sequence for LOC283385 (NM_173855.2,539-557).
cgcctgagtcaaaatccta

SEQ ID NO: 428517 - DNA, 19 bp, Homo sapiens
  siRNA target sequence for BASE (NM_173859.1,208-226).
ctccagaaaccattgagta

SEQ ID NO: 428518 - DNA, 19 bp, Homo sapiens
  siRNA target sequence for BASE (NM_173859.1,339-357).
cgagagcacccctcaaaga

SEQ ID NO: 428519 - DNA, 19 bp, Homo sapiens
  siRNA target sequence for BASE (NM_173859.1,365-383).
ccactgtacaagtaccatt

SEQ ID NO: 428520 - DNA, 19 bp, Homo sapiens
  siRNA target sequence for BASE (NM_173859.1,380-398).
cattcacgtctgagttgat

SEQ ID NO: 428521 - DNA, 19 bp, Homo sapiens
  siRNA target sequence for BASE (NM_173859.1,417-435).
gaagcccttcacagctaat

SEQ ID NO: 428522 - DNA, 19 bp, Homo sapiens
  siRNA target sequence for BASE (NM_173859.1,556-574).
ctcgccccagcgcaaaatt

SEQ ID NO: 428523 - DNA, 19 bp, Homo sapiens
  siRNA target sequence for BASE (NM_173859.1,559-577).
gccccagcgcaaaatttgt

SEQ ID NO: 428524 - DNA, 19 bp, Homo sapiens
  siRNA target sequence for BASE (NM_173859.1,560-578).
ccccagcgcaaaatttgtt

SEQ ID NO: 428525 - DNA, 19 bp, Homo sapiens
  siRNA target sequence for BASE (NM_173859.1,562-580).
ccagcgcaaaatttgttgt

SEQ ID NO: 428526 - DNA, 19 bp, Homo sapiens
  siRNA target sequence for LOC90410 (NM_174887.2,276-294).
gaaaatagttggtggttta

SEQ ID NO: 428527 - DNA, 19 bp, Homo sapiens
  siRNA target sequence for MGC24133 (NM_174896.2,373-391).
gatcctccagccaagcttt

SEQ ID NO: 428528 - DNA, 19 bp, Homo sapiens
  siRNA target sequence for MGC24133 (NM_174896.2,401-419).
caggggaatcacttaccta

SEQ ID NO: 428529 - DNA, 19 bp, Homo sapiens
  siRNA target sequence for MGC24133 (NM_174896.2,486-504).
ctttgaccccattgtctat

SEQ ID NO: 428530 - DNA, 19 bp, Homo sapiens
  siRNA target sequence for MGC24133 (NM_174896.2,494-512).
ccattgtctatgctcaaat

SEQ ID NO: 428531 - DNA, 19 bp, Homo sapiens
  siRNA target sequence for MGC24133 (NM_174896.2,506-524).
ctcaaattaaagtaacaaa

SEQ ID NO: 428532 - DNA, 19 bp, Homo sapiens
  siRNA target sequence for LOC130888 (NM_174899.3,32-50).
ccggagactctctttgaaa

SEQ ID NO: 428533 - DNA, 19 bp, Homo sapiens
  siRNA target sequence for LOC130888 (NM_174899.3,69-87).
cgcctagcaaagactatta

SEQ ID NO: 428534 - DNA, 19 bp, Homo sapiens
  siRNA target sequence for LOC130888 (NM_174899.3,72-90).
ctagcaaagactattacca

SEQ ID NO: 428535 - DNA, 19 bp, Homo sapiens
  siRNA target sequence for LOC130888 (NM_174899.3,102-120).
cccggtctcaggtaatctt

SEQ ID NO: 428536 - DNA, 19 bp, Homo sapiens
  siRNA target sequence for LOC130888 (NM_174899.3,103-121).
ccggtctcaggtaatcttt

SEQ ID NO: 428537 - DNA, 19 bp, Homo sapiens
  siRNA target sequence for LOC130888 (NM_174899.3,104-122).
cggtctcaggtaatcttta

SEQ ID NO: 428538 - DNA, 19 bp, Homo sapiens
  siRNA target sequence for LOC130888 (NM_174899.3,106-124).
gtctcaggtaatctttaga

SEQ ID NO: 428539 - DNA, 19 bp, Homo sapiens
  siRNA target sequence for LOC130888 (NM_174899.3,140-158).
ctaaggagtgagtatcgat

SEQ ID NO: 428540 - DNA, 19 bp, Homo sapiens
  siRNA target sequence for LOC130888 (NM_174899.3,147-165).
gtgagtatcgatcaacaaa

SEQ ID NO: 428541 - DNA, 19 bp, Homo sapiens
  siRNA target sequence for LOC130888 (NM_174899.3,151-169).
gtatcgatcaacaaaacct

SEQ ID NO: 428542 - DNA, 19 bp, Homo sapiens
  siRNA target sequence for LOC130888 (NM_174899.3,196-214).
cttcctagagaattcacat

SEQ ID NO: 428543 - DNA, 19 bp, Homo sapiens
  siRNA target sequence for LOC130888 (NM_174899.3,221-239).
ggtcaaactgccttaatat

SEQ ID NO: 428544 - DNA, 19 bp, Homo sapiens
  siRNA target sequence for LOC130888 (NM_174899.3,222-240).
gtcaaactgccttaatatt

SEQ ID NO: 428545 - DNA, 19 bp, Homo sapiens
  siRNA target sequence for LOC130888 (NM_174899.3,242-260).
ggtgcaagaatattagact

SEQ ID NO: 428546 - DNA, 19 bp, Homo sapiens
  siRNA target sequence for LOC130888 (NM_174899.3,243-261).
gtgcaagaatattagacta

SEQ ID NO: 428547 - DNA, 19 bp, Homo sapiens
  siRNA target sequence for LOC130888 (NM_174899.3,246-264).
caagaatattagactatgt

SEQ ID NO: 428548 - DNA, 19 bp, Homo sapiens
  siRNA target sequence for LOC130888 (NM_174899.3,314-332).
gatttgctcctgactatca

SEQ ID NO: 428549 - DNA, 19 bp, Homo sapiens
  siRNA target sequence for LOC130888 (NM_174899.3,322-340).
cctgactatcatttcttat

SEQ ID NO: 428550 - DNA, 19 bp, Homo sapiens
  siRNA target sequence for LOC130888 (NM_174899.3,359-377).
gccaggctttgtcaaacat

SEQ ID NO: 428551 - DNA, 19 bp, Homo sapiens
  siRNA target sequence for LOC130888 (NM_174899.3,369-387).
gtcaaacatcacacagatt

SEQ ID NO: 428552 - DNA, 19 bp, Homo sapiens
  siRNA target sequence for LOC130888 (NM_174899.3,532-550).
gctccgcaagaggaaacaa

SEQ ID NO: 428553 - DNA, 19 bp, Homo sapiens
  siRNA target sequence for ZFP42 (NM_174900.1,257-275).
gaagaaacgggcaaagaca

SEQ ID NO: 428554 - DNA, 19 bp, Homo sapiens
  siRNA target sequence for ZFP42 (NM_174900.1,374-392).
cgcggtgtgggccttatgt

SEQ ID NO: 428555 - DNA, 19 bp, Homo sapiens
  siRNA target sequence for ZFP42 (NM_174900.1,376-394).
cggtgtgggccttatgtga

SEQ ID NO: 428556 - DNA, 19 bp, Homo sapiens
  siRNA target sequence for ZFP42 (NM_174900.1,377-395).
ggtgtgggccttatgtgat

SEQ ID NO: 428557 - DNA, 19 bp, Homo sapiens
  siRNA target sequence for ZFP42 (NM_174900.1,426-444).
gctctcggaggggatgatt

SEQ ID NO: 428558 - DNA, 19 bp, Homo sapiens
  siRNA target sequence for ZFP42 (NM_174900.1,446-464).
ctcagactgttacatagaa

SEQ ID NO: 428559 - DNA, 19 bp, Homo sapiens
  siRNA target sequence for ZFP42 (NM_174900.1,467-485).
cgtcataaggggtgagttt

SEQ ID NO: 428560 - DNA, 19 bp, Homo sapiens
  siRNA target sequence for ZFP42 (NM_174900.1,519-537).
gagtccttggaatacctaa

SEQ ID NO: 428561 - DNA, 19 bp, Homo sapiens
  siRNA target sequence for ZFP42 (NM_174900.1,547-565).
cagaacaacagctttctca

SEQ ID NO: 428562 - DNA, 19 bp, Homo sapiens
  siRNA target sequence for ZFP42 (NM_174900.1,579-597).
gcaagctcccttgaatgtt

SEQ ID NO: 428563 - DNA, 19 bp, Homo sapiens
  siRNA target sequence for ZFP42 (NM_174900.1,652-670).
gagagaattcgcttgagta

SEQ ID NO: 428564 - DNA, 19 bp, Homo sapiens
  siRNA target sequence for ZFP42 (NM_174900.1,666-684).
gagtattctgagtacatga

SEQ ID NO: 428565 - DNA, 19 bp, Homo sapiens
  siRNA target sequence for ZFP42 (NM_174900.1,736-754).
ctaaacagctcgcagaatt

SEQ ID NO: 428566 - DNA, 19 bp, Homo sapiens
  siRNA target sequence for ZFP42 (NM_174900.1,971-989).
gccgtttcggtgcactttt

SEQ ID NO: 428567 - DNA, 19 bp, Homo sapiens
  siRNA target sequence for ZFP42 (NM_174900.1,973-991).
cgtttcggtgcacttttga

SEQ ID NO: 428568 - DNA, 19 bp, Homo sapiens
  siRNA target sequence for ZFP42 (NM_174900.1,974-992).
gtttcggtgcacttttgaa

SEQ ID NO: 428569 - DNA, 19 bp, Homo sapiens
  siRNA target sequence for ZFP42 (NM_174900.1,1085-1103).
ctgcaacaggaggtttatt

SEQ ID NO: 428570 - DNA, 19 bp, Homo sapiens
  siRNA target sequence for ZFP42 (NM_174900.1,1093-1111).
ggaggtttattcagtcaaa

SEQ ID NO: 428571 - DNA, 19 bp, Homo sapiens
  siRNA target sequence for ZFP42 (NM_174900.1,1116-1134).
ctgaaagcccacatcctaa

SEQ ID NO: 428572 - DNA, 19 bp, Homo sapiens
  siRNA target sequence for ZFP42 (NM_174900.1,1127-1145).
catcctaacgcatgcaaat

SEQ ID NO: 428573 - DNA, 19 bp, Homo sapiens
  siRNA target sequence for ZFP42 (NM_174900.1,1131-1149).
ctaacgcatgcaaatacga

SEQ ID NO: 428574 - DNA, 19 bp, Homo sapiens
  siRNA target sequence for LOC147965 (NM_174905.2,855-873).
gccgacctgtcgtgcttat

SEQ ID NO: 428575 - DNA, 19 bp, Homo sapiens
  siRNA target sequence for LOC147965 (NM_174905.2,966-984).
gttggggtcgcaagaagaa

SEQ ID NO: 428576 - DNA, 19 bp, Homo sapiens
  siRNA target sequence for MGC39724 (NM_174906.1,388-406).
ggctgcctccaccatatta

SEQ ID NO: 428577 - DNA, 19 bp, Homo sapiens
  siRNA target sequence for MGC39724 (NM_174906.1,508-526).
cctggaacccccaactcat

SEQ ID NO: 428578 - DNA, 19 bp, Homo sapiens
  siRNA target sequence for PPP4R2 (NM_174907.1,135-153).
gtcctgtcctggatcagtt

SEQ ID NO: 428579 - DNA, 19 bp, Homo sapiens
  siRNA target sequence for PPP4R2 (NM_174907.1,276-294).
gtcctcccaaccctaatgt

SEQ ID NO: 428580 - DNA, 19 bp, Homo sapiens
  siRNA target sequence for PPP4R2 (NM_174907.1,282-300).
ccaaccctaatgtcgaata

SEQ ID NO: 428581 - DNA, 19 bp, Homo sapiens
  siRNA target sequence for PPP4R2 (NM_174907.1,286-304).
ccctaatgtcgaatatatt

SEQ ID NO: 428582 - DNA, 19 bp, Homo sapiens
  siRNA target sequence for PPP4R2 (NM_174907.1,334-352).
gaaaattgtcactggattt

SEQ ID NO: 428583 - DNA, 19 bp, Homo sapiens
  siRNA target sequence for PPP4R2 (NM_174907.1,341-359).
gtcactggatttaatggta

SEQ ID NO: 428584 - DNA, 19 bp, Homo sapiens
  siRNA target sequence for PPP4R2 (NM_174907.1,369-387).
ctattcagcgactatgtga

SEQ ID NO: 428585 - DNA, 19 bp, Homo sapiens
  siRNA target sequence for PPP4R2 (NM_174907.1,374-392).
cagcgactatgtgaattgt

SEQ ID NO: 428586 - DNA, 19 bp, Homo sapiens
  siRNA target sequence for PPP4R2 (NM_174907.1,376-394).
gcgactatgtgaattgtta

SEQ ID NO: 428587 - DNA, 19 bp, Homo sapiens
  siRNA target sequence for PPP4R2 (NM_174907.1,440-458).
ggagtagaaaagaatgtga

SEQ ID NO: 428588 - DNA, 19 bp, Homo sapiens
  siRNA target sequence for PPP4R2 (NM_174907.1,501-519).
ccaatagtttaaatcgaat

SEQ ID NO: 428589 - DNA, 19 bp, Homo sapiens
  siRNA target sequence for PPP4R2 (NM_174907.1,553-571).
ctatactgagaggtctaat

SEQ ID NO: 428590 - DNA, 19 bp, Homo sapiens
  siRNA target sequence for PPP4R2 (NM_174907.1,585-603).
ggacacccaggccacttaa

SEQ ID NO: 428591 - DNA, 19 bp, Homo sapiens
  siRNA target sequence for PPP4R2 (NM_174907.1,586-604).
gacacccaggccacttaat

SEQ ID NO: 428592 - DNA, 19 bp, Homo sapiens
  siRNA target sequence for PPP4R2 (NM_174907.1,599-617).
cttaatcgaccaaaggttt

SEQ ID NO: 428593 - DNA, 19 bp, Homo sapiens
  siRNA target sequence for PPP4R2 (NM_174907.1,605-623).
cgaccaaaggtttctttgt

SEQ ID NO: 428594 - DNA, 19 bp, Homo sapiens
  siRNA target sequence for PPP4R2 (NM_174907.1,710-728).
gactcttcgacctctgaat

SEQ ID NO: 428595 - DNA, 19 bp, Homo sapiens
  siRNA target sequence for PPP4R2 (NM_174907.1,712-730).
ctcttcgacctctgaatca

SEQ ID NO: 428596 - DNA, 19 bp, Homo sapiens
  siRNA target sequence for PPP4R2 (NM_174907.1,789-807).
ctgaggggcatgaggtaaa

SEQ ID NO: 428597 - DNA, 19 bp, Homo sapiens
  siRNA target sequence for PPP4R2 (NM_174907.1,810-828).
gactcaggtttgacaaaga

SEQ ID NO: 428598 - DNA, 19 bp, Homo sapiens
  siRNA target sequence for PPP4R2 (NM_174907.1,859-877).
gacttccagcgaaatttct

SEQ ID NO: 428599 - DNA, 19 bp, Homo sapiens
  siRNA target sequence for PPP4R2 (NM_174907.1,867-885).
gcgaaatttcttcagttat

SEQ ID NO: 428600 - DNA, 19 bp, Homo sapiens
  siRNA target sequence for C3orf6 (NM_174908.2,635-653).
ggaagtatgccgagatttt

SEQ ID NO: 428601 - DNA, 19 bp, Homo sapiens
  siRNA target sequence for C3orf6 (NM_174908.2,696-714).
caagagattgagcatcatt

SEQ ID NO: 428602 - DNA, 19 bp, Homo sapiens
  siRNA target sequence for C3orf6 (NM_174908.2,806-824).
gctccagaagcgctacaaa

SEQ ID NO: 428603 - DNA, 19 bp, Homo sapiens
  siRNA target sequence for C3orf6 (NM_174908.2,923-941).
catagctcgccttttgcaa

SEQ ID NO: 428604 - DNA, 19 bp, Homo sapiens
  siRNA target sequence for C3orf6 (NM_174908.2,992-1010).
ccctgcaacccgtgcttat

SEQ ID NO: 428605 - DNA, 19 bp, Homo sapiens
  siRNA target sequence for C3orf6 (NM_174908.2,1001-1019).
ccgtgcttatgcagatagt

SEQ ID NO: 428606 - DNA, 19 bp, Homo sapiens
  siRNA target sequence for C3orf6 (NM_174908.2,1002-1020).
cgtgcttatgcagatagtt

SEQ ID NO: 428607 - DNA, 19 bp, Homo sapiens
  siRNA target sequence for C3orf6 (NM_174908.2,1003-1021).
gtgcttatgcagatagtta

SEQ ID NO: 428608 - DNA, 19 bp, Homo sapiens
  siRNA target sequence for C3orf6 (NM_174908.2,1005-1023).
gcttatgcagatagttact

SEQ ID NO: 428609 - DNA, 19 bp, Homo sapiens
  siRNA target sequence for C3orf6 (NM_174908.2,1006-1024).
cttatgcagatagttacta

SEQ ID NO: 428610 - DNA, 19 bp, Homo sapiens
  siRNA target sequence for C3orf6 (NM_174908.2,1058-1076).
gaaagaagctgtatctact

SEQ ID NO: 428611 - DNA, 19 bp, Homo sapiens
  siRNA target sequence for C3orf6 (NM_174908.2,1097-1115).
ggatcaggaatggtatgat

SEQ ID NO: 428612 - DNA, 19 bp, Homo sapiens
  siRNA target sequence for C3orf6 (NM_174908.2,1169-1187).
catgagagccgctcaagta

SEQ ID NO: 428613 - DNA, 19 bp, Homo sapiens
  siRNA target sequence for C3orf6 (NM_174908.2,1178-1196).
cgctcaagtagctcaagat

SEQ ID NO: 428614 - DNA, 19 bp, Homo sapiens
  siRNA target sequence for C3orf6 (NM_174908.2,1200-1218).
gaaatcgctcgacttctaa

SEQ ID NO: 428615 - DNA, 19 bp, Homo sapiens
  siRNA target sequence for C3orf6 (NM_174908.2,1295-1313).
cgagtggaagccaaaaaca

SEQ ID NO: 428616 - DNA, 19 bp, Homo sapiens
  siRNA target sequence for C3orf6 (NM_174908.2,1304-1322).
gccaaaaacagctaaagca

SEQ ID NO: 428617 - DNA, 19 bp, Homo sapiens
  siRNA target sequence for C3orf6 (NM_174908.2,1347-1365).
gatgaacctcaccattcta

SEQ ID NO: 428618 - DNA, 19 bp, Homo sapiens
  siRNA target sequence for C3orf6 (NM_174908.2,1350-1368).
gaacctcaccattctaaga

SEQ ID NO: 428619 - DNA, 19 bp, Homo sapiens
  siRNA target sequence for C3orf6 (NM_174908.2,1356-1374).
caccattctaagaatgaaa

SEQ ID NO: 428620 - DNA, 19 bp, Homo sapiens
  siRNA target sequence for C3orf6 (NM_174908.2,1384-1402).
ggccaccaccacctatcat

SEQ ID NO: 428621 - DNA, 19 bp, Homo sapiens
  siRNA target sequence for C3orf6 (NM_174908.2,1410-1428).
ggtgaagatgcggattaca

SEQ ID NO: 428622 - DNA, 19 bp, Homo sapiens
  siRNA target sequence for C3orf6 (NM_174908.2,1419-1437).
gcggattacactcatttta

SEQ ID NO: 428623 - DNA, 19 bp, Homo sapiens
  siRNA target sequence for C3orf6 (NM_174908.2,1421-1439).
ggattacactcattttaca

SEQ ID NO: 428624 - DNA, 19 bp, Homo sapiens
  siRNA target sequence for C3orf6 (NM_174908.2,1476-1494).
gagtcctctcataaaggtt

SEQ ID NO: 428625 - DNA, 19 bp, Homo sapiens
  siRNA target sequence for TCTE3 (NM_174910.1,156-174).
ggtgacgcctaggaaagaa

SEQ ID NO: 428626 - DNA, 19 bp, Homo sapiens
  siRNA target sequence for TCTE3 (NM_174910.1,157-175).
gtgacgcctaggaaagaaa

SEQ ID NO: 428627 - DNA, 19 bp, Homo sapiens
  siRNA target sequence for TCTE3 (NM_174910.1,192-210).
cgagaaggaggcatataca

SEQ ID NO: 428628 - DNA, 19 bp, Homo sapiens
  siRNA target sequence for TCTE3 (NM_174910.1,198-216).
ggaggcatatacacagatt

SEQ ID NO: 428629 - DNA, 19 bp, Homo sapiens
  siRNA target sequence for TCTE3 (NM_174910.1,231-249).
gagagagtcaattcacaat

SEQ ID NO: 428630 - DNA, 19 bp, Homo sapiens
  siRNA target sequence for TCTE3 (NM_174910.1,233-251).
gagagtcaattcacaatgt

SEQ ID NO: 428631 - DNA, 19 bp, Homo sapiens
  siRNA target sequence for TCTE3 (NM_174910.1,255-273).
gtatgtggagcctcctttt

SEQ ID NO: 428632 - DNA, 19 bp, Homo sapiens
  siRNA target sequence for TCTE3 (NM_174910.1,281-299).
caattgctgatataggtaa

SEQ ID NO: 428633 - DNA, 19 bp, Homo sapiens
  siRNA target sequence for TCTE3 (NM_174910.1,286-304).
gctgatataggtaaagaat

SEQ ID NO: 428634 - DNA, 19 bp, Homo sapiens
  siRNA target sequence for TCTE3 (NM_174910.1,320-338).
caaaattaaagtttgctaa

SEQ ID NO: 428635 - DNA, 19 bp, Homo sapiens
  siRNA target sequence for TCTE3 (NM_174910.1,330-348).
gtttgctaattcatataga

SEQ ID NO: 428636 - DNA, 19 bp, Homo sapiens
  siRNA target sequence for TCTE3 (NM_174910.1,370-388).
caagctcattcagtagaaa

SEQ ID NO: 428637 - DNA, 19 bp, Homo sapiens
  siRNA target sequence for TCTE3 (NM_174910.1,399-417).
gcagatactaacagaaagt

SEQ ID NO: 428638 - DNA, 19 bp, Homo sapiens
  siRNA target sequence for TCTE3 (NM_174910.1,450-468).
ctctcacttgtcacttgaa

SEQ ID NO: 428639 - DNA, 19 bp, Homo sapiens
  siRNA target sequence for TCTE3 (NM_174910.1,486-504).
gttagcagtcaaagaattt

SEQ ID NO: 428640 - DNA, 19 bp, Homo sapiens
  siRNA target sequence for TCTE3 (NM_174910.1,505-523).
gggtaccaccgttataagt

SEQ ID NO: 428641 - DNA, 19 bp, Homo sapiens
  siRNA target sequence for TCTE3 (NM_174910.1,510-528).
ccaccgttataagttcatt

SEQ ID NO: 428642 - DNA, 19 bp, Homo sapiens
  siRNA target sequence for TCTE3 (NM_174910.1,511-529).
caccgttataagttcatta

SEQ ID NO: 428643 - DNA, 19 bp, Homo sapiens
  siRNA target sequence for TCTE3 (NM_174910.1,513-531).
ccgttataagttcattata

SEQ ID NO: 428644 - DNA, 19 bp, Homo sapiens
  siRNA target sequence for TCTE3 (NM_174910.1,514-532).
cgttataagttcattataa

SEQ ID NO: 428645 - DNA, 19 bp, Homo sapiens
  siRNA target sequence for TCTE3 (NM_174910.1,606-624).
cagctgggtcgcagctaaa

SEQ ID NO: 428646 - DNA, 19 bp, Homo sapiens
  siRNA target sequence for TCTE3 (NM_174910.1,608-626).
gctgggtcgcagctaaaca

SEQ ID NO: 428647 - DNA, 19 bp, Homo sapiens
  siRNA target sequence for NSE2 (NM_174911.3,377-395).
cattggggtctcctacatt

SEQ ID NO: 428648 - DNA, 19 bp, Homo sapiens
  siRNA target sequence for NSE2 (NM_174911.3,381-399).
ggggtctcctacattttct

SEQ ID NO: 428649 - DNA, 19 bp, Homo sapiens
  siRNA target sequence for NSE2 (NM_174911.3,674-692).
cccgcactgggccgtatat

SEQ ID NO: 428650 - DNA, 19 bp, Homo sapiens
  siRNA target sequence for NSE2 (NM_174911.3,676-694).
cgcactgggccgtatatgt

SEQ ID NO: 428651 - DNA, 19 bp, Homo sapiens
  siRNA target sequence for NSE2 (NM_174911.3,685-703).
ccgtatatgtgggtaactt

SEQ ID NO: 428652 - DNA, 19 bp, Homo sapiens
  siRNA target sequence for NSE2 (NM_174911.3,778-796).
gcgtggtcaacgatctgta

SEQ ID NO: 428653 - DNA, 19 bp, Homo sapiens
  siRNA target sequence for NSE2 (NM_174911.3,877-895).
ggcgcaactcggagagttt

SEQ ID NO: 428654 - DNA, 19 bp, Homo sapiens
  siRNA target sequence for NSE2 (NM_174911.3,1021-1039).
gtctagaggacctgatcat

SEQ ID NO: 428655 - DNA, 19 bp, Homo sapiens
  siRNA target sequence for LOC199675 (NM_174918.1,526-544).
gggggtctcagccaagaat

SEQ ID NO: 428656 - DNA, 19 bp, Homo sapiens
  siRNA target sequence for LOC199675 (NM_174918.1,557-575).
gacccagactatgagaata

SEQ ID NO: 428657 - DNA, 19 bp, Homo sapiens
  siRNA target sequence for LOC199675 (NM_174918.1,560-578).
ccagactatgagaatatca

SEQ ID NO: 428658 - DNA, 19 bp, Homo sapiens
  siRNA target sequence for LOC199675 (NM_174918.1,901-919).
ggtcaggagcaagattgat

SEQ ID NO: 428659 - DNA, 19 bp, Homo sapiens
  siRNA target sequence for LOC199675 (NM_174918.1,902-920).
gtcaggagcaagattgata

SEQ ID NO: 428660 - DNA, 19 bp, Homo sapiens
  siRNA target sequence for LOC199675 (NM_174918.1,904-922).
caggagcaagattgataga

SEQ ID NO: 428661 - DNA, 19 bp, Homo sapiens
  siRNA target sequence for LOC199675 (NM_174918.1,930-948).
cgacattagcaggcataaa

SEQ ID NO: 428662 - DNA, 19 bp, Homo sapiens
  siRNA target sequence for LOC199675 (NM_174918.1,931-949).
gacattagcaggcataaaa

SEQ ID NO: 428663 - DNA, 19 bp, Homo sapiens
  siRNA target sequence for LOC201191 (NM_174920.2,321-339).
gaacccgtggatgaagttt

SEQ ID NO: 428664 - DNA, 19 bp, Homo sapiens
  siRNA target sequence for LOC201191 (NM_174920.2,373-391).
gactggacagcagtttaca

SEQ ID NO: 428665 - DNA, 19 bp, Homo sapiens
  siRNA target sequence for LOC201191 (NM_174920.2,838-856).
ccaccatcggcctcgataa

SEQ ID NO: 428666 - DNA, 19 bp, Homo sapiens
  siRNA target sequence for LOC201191 (NM_174920.2,841-859).
ccatcggcctcgataagaa

SEQ ID NO: 428667 - DNA, 19 bp, Homo sapiens
  siRNA target sequence for LOC201191 (NM_174920.2,1393-1411).
gcctcaacctggaacagta

SEQ ID NO: 428668 - DNA, 19 bp, Homo sapiens
  siRNA target sequence for LOC201191 (NM_174920.2,1460-1478).
gctggacggaagcaaacta

SEQ ID NO: 428669 - DNA, 19 bp, Homo sapiens
  siRNA target sequence for LOC201191 (NM_174920.2,1461-1479).
ctggacggaagcaaactaa

SEQ ID NO: 428670 - DNA, 19 bp, Homo sapiens
  siRNA target sequence for LOC201191 (NM_174920.2,1515-1533).
ctggtgaagcgcaagttga

SEQ ID NO: 428671 - DNA, 19 bp, Homo sapiens
  siRNA target sequence for LOC201895 (NM_174921.1,211-229).
caatgagaagactgatcaa

SEQ ID NO: 428672 - DNA, 19 bp, Homo sapiens
  siRNA target sequence for LOC201895 (NM_174921.1,286-304).
cgggaccctctggtgataa

SEQ ID NO: 428673 - DNA, 19 bp, Homo sapiens
  siRNA target sequence for LOC201895 (NM_174921.1,306-324).
ggcatcagtgttacaatga

SEQ ID NO: 428674 - DNA, 19 bp, Homo sapiens
  siRNA target sequence for LOC201895 (NM_174921.1,329-347).
ggtagcctggatggttatt

SEQ ID NO: 428675 - DNA, 19 bp, Homo sapiens
  siRNA target sequence for LOC201895 (NM_174921.1,333-351).
gcctggatggttattgcat

SEQ ID NO: 428676 - DNA, 19 bp, Homo sapiens
  siRNA target sequence for LOC201895 (NM_174921.1,337-355).
ggatggttattgcattgat

SEQ ID NO: 428677 - DNA, 19 bp, Homo sapiens
  siRNA target sequence for LOC201895 (NM_174921.1,366-384).
ctgagacctcctaatctaa

SEQ ID NO: 428678 - DNA, 19 bp, Homo sapiens
  siRNA target sequence for LOC201895 (NM_174921.1,407-425).
gccaaccagtcctcataat

SEQ ID NO: 428679 - DNA, 19 bp, Homo sapiens
  siRNA target sequence for ADCK5 (NM_174922.2,54-72).
ccggtgcagctctgtcatt

SEQ ID NO: 428680 - DNA, 19 bp, Homo sapiens
  siRNA target sequence for ADCK5 (NM_174922.2,55-73).
cggtgcagctctgtcattt

SEQ ID NO: 428681 - DNA, 19 bp, Homo sapiens
  siRNA target sequence for ADCK5 (NM_174922.2,112-130).
cgtcccctgctgtgttctt

SEQ ID NO: 428682 - DNA, 19 bp, Homo sapiens
  siRNA target sequence for ADCK5 (NM_174922.2,228-246).
ctcggagcccgctatgtca

SEQ ID NO: 428683 - DNA, 19 bp, Homo sapiens
  siRNA target sequence for ADCK5 (NM_174922.2,349-367).
ggtggtgcaccaatgttgt

SEQ ID NO: 428684 - DNA, 19 bp, Homo sapiens
  siRNA target sequence for ADCK5 (NM_174922.2,743-761).
cctgcgggaccgctttgat

SEQ ID NO: 428685 - DNA, 19 bp, Homo sapiens
  siRNA target sequence for ADCK5 (NM_174922.2,1042-1060).
ggctggcagtgcatgacat

SEQ ID NO: 428686 - DNA, 19 bp, Homo sapiens
  siRNA target sequence for ADCK5 (NM_174922.2,1043-1061).
gctggcagtgcatgacata

SEQ ID NO: 428687 - DNA, 19 bp, Homo sapiens
  siRNA target sequence for ADCK5 (NM_174922.2,1080-1098).
gcctttgctgagcagatat

SEQ ID NO: 428688 - DNA, 19 bp, Homo sapiens
  siRNA target sequence for ADCK5 (NM_174922.2,1081-1099).
cctttgctgagcagatatt

SEQ ID NO: 428689 - DNA, 19 bp, Homo sapiens
  siRNA target sequence for ADCK5 (NM_174922.2,1086-1104).
gctgagcagatattttaca

SEQ ID NO: 428690 - DNA, 19 bp, Homo sapiens
  siRNA target sequence for ADCK5 (NM_174922.2,1297-1315).
cactgggggtgcaagacta

SEQ ID NO: 428691 - DNA, 19 bp, Homo sapiens
  siRNA target sequence for MGC31967 (NM_174923.1,296-314).
cggcttttgtgctgtacaa

SEQ ID NO: 428692 - DNA, 19 bp, Homo sapiens
  siRNA target sequence for MGC31967 (NM_174923.1,298-316).
gcttttgtgctgtacaagt

SEQ ID NO: 428693 - DNA, 19 bp, Homo sapiens
  siRNA target sequence for MGC31967 (NM_174923.1,508-526).
cttctgaacatgaagctat

SEQ ID NO: 428694 - DNA, 19 bp, Homo sapiens
  siRNA target sequence for MGC31967 (NM_174923.1,554-572).
gcaagccggacaaggatat

SEQ ID NO: 428695 - DNA, 19 bp, Homo sapiens
  siRNA target sequence for MGC31967 (NM_174923.1,884-902).
ctgaaggtcgactaaaaca

SEQ ID NO: 428696 - DNA, 19 bp, Homo sapiens
  siRNA target sequence for LOC205251 (NM_174925.1,1038-1056).
ccaaagcctgggaaagtct

SEQ ID NO: 428697 - DNA, 19 bp, Homo sapiens
  siRNA target sequence for LOC205251 (NM_174925.1,1068-1086).
cgagacagatgggactatt

SEQ ID NO: 428698 - DNA, 19 bp, Homo sapiens
  siRNA target sequence for LOC205251 (NM_174925.1,1069-1087).
gagacagatgggactatta

SEQ ID NO: 428699 - DNA, 19 bp, Homo sapiens
  siRNA target sequence for MGC17839 (NM_174926.1,425-443).
ggctggctctcgctctata

SEQ ID NO: 428700 - DNA, 19 bp, Homo sapiens
  siRNA target sequence for MGC17839 (NM_174926.1,426-444).
gctggctctcgctctatat

SEQ ID NO: 428701 - DNA, 19 bp, Homo sapiens
  siRNA target sequence for MGC17839 (NM_174926.1,430-448).
gctctcgctctatatttct

SEQ ID NO: 428702 - DNA, 19 bp, Homo sapiens
  siRNA target sequence for MGC17839 (NM_174926.1,460-478).
gaataagcaccgaagctat

SEQ ID NO: 428703 - DNA, 19 bp, Homo sapiens
  siRNA target sequence for MGC17839 (NM_174926.1,507-525).
cccatggagtcctctctat

SEQ ID NO: 428704 - DNA, 19 bp, Homo sapiens
  siRNA target sequence for MGC17839 (NM_174926.1,508-526).
ccatggagtcctctctata

SEQ ID NO: 428705 - DNA, 19 bp, Homo sapiens
  siRNA target sequence for MGC17839 (NM_174926.1,554-572).
gatggcccatggcctttta

SEQ ID NO: 428706 - DNA, 19 bp, Homo sapiens
  siRNA target sequence for MGC17839 (NM_174926.1,737-755).
cacaacggacatctcaaaa

SEQ ID NO: 428707 - DNA, 19 bp, Homo sapiens
  siRNA target sequence for MGC17839 (NM_174926.1,739-757).
caacggacatctcaaaata

SEQ ID NO: 428708 - DNA, 19 bp, Homo sapiens
  siRNA target sequence for MGC17839 (NM_174926.1,743-761).
ggacatctcaaaatacact

SEQ ID NO: 428709 - DNA, 19 bp, Homo sapiens
  siRNA target sequence for FLJ25851 (NM_174927.1,54-72).
gataattacgacatggatt

SEQ ID NO: 428710 - DNA, 19 bp, Homo sapiens
  siRNA target sequence for FLJ25851 (NM_174927.1,62-80).
cgacatggattgtgtatat

SEQ ID NO: 428711 - DNA, 19 bp, Homo sapiens
  siRNA target sequence for FLJ25851 (NM_174927.1,102-120).
gcttcccttcctaccaata

SEQ ID NO: 428712 - DNA, 19 bp, Homo sapiens
  siRNA target sequence for FLJ25851 (NM_174927.1,200-218).
cttctcggggcataaagga

SEQ ID NO: 428713 - DNA, 19 bp, Homo sapiens
  siRNA target sequence for FLJ25851 (NM_174927.1,203-221).
ctcggggcataaaggaaaa

SEQ ID NO: 428714 - DNA, 19 bp, Homo sapiens
  siRNA target sequence for FLJ25851 (NM_174927.1,247-265).
ggtgtaagggagaagatgt

SEQ ID NO: 428715 - DNA, 19 bp, Homo sapiens
  siRNA target sequence for FLJ25851 (NM_174927.1,383-401).
gaacacgaatccagttcat

SEQ ID NO: 428716 - DNA, 19 bp, Homo sapiens
  siRNA target sequence for FLJ25851 (NM_174927.1,388-406).
cgaatccagttcataagat

SEQ ID NO: 428717 - DNA, 19 bp, Homo sapiens
  siRNA target sequence for FLJ25851 (NM_174927.1,407-425).
ggagccacactcgtatctt

SEQ ID NO: 428718 - DNA, 19 bp, Homo sapiens
  siRNA target sequence for FLJ25851 (NM_174927.1,453-471).
catcatgcgagatcgaata

SEQ ID NO: 428719 - DNA, 19 bp, Homo sapiens
  siRNA target sequence for FLJ25851 (NM_174927.1,474-492).
gcaggtgagacgaagcata

SEQ ID NO: 428720 - DNA, 19 bp, Homo sapiens
  siRNA target sequence for FLJ25851 (NM_174927.1,475-493).
caggtgagacgaagcatat

SEQ ID NO: 428721 - DNA, 19 bp, Homo sapiens
  siRNA target sequence for FLJ25851 (NM_174927.1,488-506).
gcatatcccgtcttacaga

SEQ ID NO: 428722 - DNA, 19 bp, Homo sapiens
  siRNA target sequence for FLJ25851 (NM_174927.1,489-507).
catatcccgtcttacagat

SEQ ID NO: 428723 - DNA, 19 bp, Homo sapiens
  siRNA target sequence for SCN4B (NM_174934.1,260-278).
gaaaggccaccgacatcta

SEQ ID NO: 428724 - DNA, 19 bp, Homo sapiens
  siRNA target sequence for SCN4B (NM_174934.1,368-386).
gcagtgacgcattcaagat

SEQ ID NO: 428725 - DNA, 19 bp, Homo sapiens
  siRNA target sequence for SCN4B (NM_174934.1,371-389).
gtgacgcattcaagattct

SEQ ID NO: 428726 - DNA, 19 bp, Homo sapiens
  siRNA target sequence for SCN4B (NM_174934.1,373-391).
gacgcattcaagattctca

SEQ ID NO: 428727 - DNA, 19 bp, Homo sapiens
  siRNA target sequence for SCN4B (NM_174934.1,375-393).
cgcattcaagattctcata

SEQ ID NO: 428728 - DNA, 19 bp, Homo sapiens
  siRNA target sequence for SCN4B (NM_174934.1,377-395).
cattcaagattctcataga

SEQ ID NO: 428729 - DNA, 19 bp, Homo sapiens
  siRNA target sequence for SCN4B (NM_174934.1,458-476).
ctctggtaggctctactaa

SEQ ID NO: 428730 - DNA, 19 bp, Homo sapiens
  siRNA target sequence for SCN4B (NM_174934.1,555-573).
gaaccccaaggagaataat

SEQ ID NO: 428731 - DNA, 19 bp, Homo sapiens
  siRNA target sequence for SCN4B (NM_174934.1,597-615).
cctccaagtcgttgataga

SEQ ID NO: 428732 - DNA, 19 bp, Homo sapiens
  siRNA target sequence for SCN4B (NM_174934.1,764-782).
gctcctcggggaatgacaa

SEQ ID NO: 428733 - DNA, 19 bp, Homo sapiens
  siRNA target sequence for TCERG1L (NM_174937.1,549-567).
gttggatagacaaaaggat

SEQ ID NO: 428734 - DNA, 19 bp, Homo sapiens
  siRNA target sequence for TCERG1L (NM_174937.1,559-577).
caaaaggattcctaactgt

SEQ ID NO: 428735 - DNA, 19 bp, Homo sapiens
  siRNA target sequence for TCERG1L (NM_174937.1,607-625).
ggactcaacgtggatacat

SEQ ID NO: 428736 - DNA, 19 bp, Homo sapiens
  siRNA target sequence for TCERG1L (NM_174937.1,626-644).
cctgaggagtcaaggtttt

SEQ ID NO: 428737 - DNA, 19 bp, Homo sapiens
  siRNA target sequence for TCERG1L (NM_174937.1,627-645).
ctgaggagtcaaggttttt

SEQ ID NO: 428738 - DNA, 19 bp, Homo sapiens
  siRNA target sequence for TCERG1L (NM_174937.1,663-681).
ctcgtttgctggcaaatca

SEQ ID NO: 428739 - DNA, 19 bp, Homo sapiens
  siRNA target sequence for TCERG1L (NM_174937.1,768-786).
gccataacagccttaaggt

SEQ ID NO: 428740 - DNA, 19 bp, Homo sapiens
  siRNA target sequence for TCERG1L (NM_174937.1,901-919).
gaccttggcacccatcaaa

SEQ ID NO: 428741 - DNA, 19 bp, Homo sapiens
  siRNA target sequence for TCERG1L (NM_174937.1,934-952).
gtcccccgtctcagataca

SEQ ID NO: 428742 - DNA, 19 bp, Homo sapiens
  siRNA target sequence for TCERG1L (NM_174937.1,1011-1029).
gccgggatggagacaaaga

SEQ ID NO: 428743 - DNA, 19 bp, Homo sapiens
  siRNA target sequence for TCERG1L (NM_174937.1,1012-1030).
ccgggatggagacaaagaa

SEQ ID NO: 428744 - DNA, 19 bp, Homo sapiens
  siRNA target sequence for TCERG1L (NM_174937.1,1140-1158).
cgggcgatgaccgagtttt

SEQ ID NO: 428745 - DNA, 19 bp, Homo sapiens
  siRNA target sequence for TCERG1L (NM_174937.1,1142-1160).
ggcgatgaccgagttttct

SEQ ID NO: 428746 - DNA, 19 bp, Homo sapiens
  siRNA target sequence for TCERG1L (NM_174937.1,1143-1161).
gcgatgaccgagttttctt

SEQ ID NO: 428747 - DNA, 19 bp, Homo sapiens
  siRNA target sequence for TCERG1L (NM_174937.1,1148-1166).
gaccgagttttcttcttca

SEQ ID NO: 428748 - DNA, 19 bp, Homo sapiens
  siRNA target sequence for TCERG1L (NM_174937.1,1291-1309).
cgatgggtccagttctgaa

SEQ ID NO: 428749 - DNA, 19 bp, Homo sapiens
  siRNA target sequence for TCERG1L (NM_174937.1,1317-1335).
gggaagaccaagatgtgaa

SEQ ID NO: 428750 - DNA, 19 bp, Homo sapiens
  siRNA target sequence for TCERG1L (NM_174937.1,1480-1498).
gagaggggtatcagcattt

SEQ ID NO: 428751 - DNA, 19 bp, Homo sapiens
  siRNA target sequence for TCERG1L (NM_174937.1,1484-1502).
ggggtatcagcattttcta

SEQ ID NO: 428752 - DNA, 19 bp, Homo sapiens
  siRNA target sequence for TCERG1L (NM_174937.1,1562-1580).
gaggaacgaaagcagatat

SEQ ID NO: 428753 - DNA, 19 bp, Homo sapiens
  siRNA target sequence for TCERG1L (NM_174937.1,1564-1582).
ggaacgaaagcagatattt

SEQ ID NO: 428754 - DNA, 19 bp, Homo sapiens
  siRNA target sequence for TCERG1L (NM_174937.1,1738-1756).
gaggttccgacttgttcaa

SEQ ID NO: 428755 - DNA, 19 bp, Homo sapiens
  siRNA target sequence for TCERG1L (NM_174937.1,1740-1758).
ggttccgacttgttcaaaa

SEQ ID NO: 428756 - DNA, 19 bp, Homo sapiens
  siRNA target sequence for TCERG1L (NM_174937.1,1827-1845).
gactaaggctgcggaaaat

SEQ ID NO: 428757 - DNA, 19 bp, Homo sapiens
  siRNA target sequence for MGC39681 (NM_174939.2,138-156).
catctcacattgtgttgaa

SEQ ID NO: 428758 - DNA, 19 bp, Homo sapiens
  siRNA target sequence for MGC39681 (NM_174939.2,168-186).
gaatgttggggttgatgta

SEQ ID NO: 428759 - DNA, 19 bp, Homo sapiens
  siRNA target sequence for MGC39681 (NM_174939.2,184-202).
gtatgccatatggatgaat

SEQ ID NO: 428760 - DNA, 19 bp, Homo sapiens
  siRNA target sequence for MGC39681 (NM_174939.2,208-226).
cagtttcggccttgcaata

SEQ ID NO: 428761 - DNA, 19 bp, Homo sapiens
  siRNA target sequence for MGC39681 (NM_174939.2,214-232).
cggccttgcaataattggt

SEQ ID NO: 428762 - DNA, 19 bp, Homo sapiens
  siRNA target sequence for MGC39681 (NM_174939.2,230-248).
ggtatacttctaattgcat

SEQ ID NO: 428763 - DNA, 19 bp, Homo sapiens
  siRNA target sequence for MGC39681 (NM_174939.2,346-364).
gcagctgcttgttagatct

SEQ ID NO: 428764 - DNA, 19 bp, Homo sapiens
  siRNA target sequence for MGC39681 (NM_174939.2,347-365).
cagctgcttgttagatcta

SEQ ID NO: 428765 - DNA, 19 bp, Homo sapiens
  siRNA target sequence for MGC39681 (NM_174939.2,370-388).
gtggttccatagagaaact

SEQ ID NO: 428766 - DNA, 19 bp, Homo sapiens
  siRNA target sequence for LOC283232 (NM_174940.1,244-262).
cgtactacgccctgtattt

SEQ ID NO: 428767 - DNA, 19 bp, Homo sapiens
  siRNA target sequence for LOC283232 (NM_174940.1,275-293).
cctgatgatcacgtataaa

SEQ ID NO: 428768 - DNA, 19 bp, Homo sapiens
  siRNA target sequence for LOC283232 (NM_174940.1,276-294).
ctgatgatcacgtataaaa

SEQ ID NO: 428769 - DNA, 19 bp, Homo sapiens
  siRNA target sequence for LOC283232 (NM_174940.1,278-296).
gatgatcacgtataaaagt

SEQ ID NO: 428770 - DNA, 19 bp, Homo sapiens
  siRNA target sequence for FLJ25976 (NM_174943.2,664-682).
gagaacatgatcttaacca

SEQ ID NO: 428771 - DNA, 19 bp, Homo sapiens
  siRNA target sequence for FLJ25976 (NM_174943.2,666-684).
gaacatgatcttaaccata

SEQ ID NO: 428772 - DNA, 19 bp, Homo sapiens
  siRNA target sequence for PGSF1 (NM_174947.2,120-138).
ggttggcgcatggacattt

SEQ ID NO: 428773 - DNA, 19 bp, Homo sapiens
  siRNA target sequence for PGSF1 (NM_174947.2,202-220).
ctgcttgggagcaccaaat

SEQ ID NO: 428774 - DNA, 19 bp, Homo sapiens
  siRNA target sequence for PGSF1 (NM_174947.2,418-436).
caagggaaacgatccttat

SEQ ID NO: 428775 - DNA, 19 bp, Homo sapiens
  siRNA target sequence for PGSF1 (NM_174947.2,452-470).
cacgtgaagtctgtattga

SEQ ID NO: 428776 - DNA, 19 bp, Homo sapiens
  siRNA target sequence for PGSF1 (NM_174947.2,454-472).
cgtgaagtctgtattgaca

SEQ ID NO: 428777 - DNA, 19 bp, Homo sapiens
  siRNA target sequence for PGSF1 (NM_174947.2,455-473).
gtgaagtctgtattgacat

SEQ ID NO: 428778 - DNA, 19 bp, Homo sapiens
  siRNA target sequence for PGSF1 (NM_174947.2,460-478).
gtctgtattgacattctca

SEQ ID NO: 428779 - DNA, 19 bp, Homo sapiens
  siRNA target sequence for MGC46496 (NM_174952.1,189-207).
gcaggcgacaggtagtaat

SEQ ID NO: 428780 - DNA, 19 bp, Homo sapiens
  siRNA target sequence for MGC46496 (NM_174952.1,200-218).
gtagtaatgcaccatttct

SEQ ID NO: 428781 - DNA, 19 bp, Homo sapiens
  siRNA target sequence for MGC46496 (NM_174952.1,225-243).
gactgccagagaaagtact

SEQ ID NO: 428782 - DNA, 19 bp, Homo sapiens
  siRNA target sequence for MGC46496 (NM_174952.1,277-295).
ccaggtccaggacactata

SEQ ID NO: 428783 - DNA, 19 bp, Homo sapiens
  siRNA target sequence for MGC46496 (NM_174952.1,283-301).
ccaggacactataatgttt

SEQ ID NO: 428784 - DNA, 19 bp, Homo sapiens
  siRNA target sequence for MGC46496 (NM_174952.1,344-362).
gtgttgatgttccttcaat

SEQ ID NO: 428785 - DNA, 19 bp, Homo sapiens
  siRNA target sequence for MGC46496 (NM_174952.1,349-367).
gatgttccttcaattcctt

SEQ ID NO: 428786 - DNA, 19 bp, Homo sapiens
  siRNA target sequence for MGC46496 (NM_174952.1,371-389).
gtggaaagtcatatggtta

SEQ ID NO: 428787 - DNA, 19 bp, Homo sapiens
  siRNA target sequence for MGC46496 (NM_174952.1,374-392).
gaaagtcatatggttatca

SEQ ID NO: 428788 - DNA, 19 bp, Homo sapiens
  siRNA target sequence for MGC46496 (NM_174952.1,446-464).
cacttggtccagcatacta

SEQ ID NO: 428789 - DNA, 19 bp, Homo sapiens
  siRNA target sequence for MGC46496 (NM_174952.1,448-466).
cttggtccagcatactaca

SEQ ID NO: 428790 - DNA, 19 bp, Homo sapiens
  siRNA target sequence for MGC46496 (NM_174952.1,538-556).
caagagttacctaaaaagt

SEQ ID NO: 428791 - DNA, 19 bp, Homo sapiens
  siRNA target sequence for MGC46496 (NM_174952.1,588-606).
ccagaaaaagacatcatat

SEQ ID NO: 428792 - DNA, 19 bp, Homo sapiens
  siRNA target sequence for MGC46496 (NM_174952.1,629-647).
gagatcaacaacaaaatta

SEQ ID NO: 428793 - DNA, 19 bp, Homo sapiens
  siRNA target sequence for MGC46496 (NM_174952.1,653-671).
catttatcccacgactata

SEQ ID NO: 428794 - DNA, 19 bp, Homo sapiens
  siRNA target sequence for MGC46496 (NM_174952.1,660-678).
cccacgactatatgaaata

SEQ ID NO: 428795 - DNA, 19 bp, Homo sapiens
  siRNA target sequence for MGC46496 (NM_174952.1,661-679).
ccacgactatatgaaataa

SEQ ID NO: 428796 - DNA, 19 bp, Homo sapiens
  siRNA target sequence for MGC46496 (NM_174952.1,732-750).
ggctcctggcacatataat

SEQ ID NO: 428797 - DNA, 19 bp, Homo sapiens
  siRNA target sequence for MGC46496 (NM_174952.1,734-752).
ctcctggcacatataatga

SEQ ID NO: 428798 - DNA, 19 bp, Homo sapiens
  siRNA target sequence for MGC46496 (NM_174952.1,757-775).
cgaactgctctcaagtctt

SEQ ID NO: 428799 - DNA, 19 bp, Homo sapiens
  siRNA target sequence for MGC46496 (NM_174952.1,758-776).
gaactgctctcaagtcttt

SEQ ID NO: 428800 - DNA, 19 bp, Homo sapiens
  siRNA target sequence for MGC46496 (NM_174952.1,763-781).
gctctcaagtctttgaaga

SEQ ID NO: 428801 - DNA, 19 bp, Homo sapiens
  siRNA target sequence for MGC46496 (NM_174952.1,858-876).
gccaggtcctggattttat

SEQ ID NO: 428802 - DNA, 19 bp, Homo sapiens
  siRNA target sequence for MGC46496 (NM_174952.1,859-877).
ccaggtcctggattttata

SEQ ID NO: 428803 - DNA, 19 bp, Homo sapiens
  siRNA target sequence for MGC46496 (NM_174952.1,863-881).
gtcctggattttataatgt

SEQ ID NO: 428804 - DNA, 19 bp, Homo sapiens
  siRNA target sequence for MGC46496 (NM_174952.1,865-883).
cctggattttataatgtct

SEQ ID NO: 428805 - DNA, 19 bp, Homo sapiens
  siRNA target sequence for MGC46496 (NM_174952.1,880-898).
gtcttgaacaatactataa

SEQ ID NO: 428806 - DNA, 19 bp, Homo sapiens
  siRNA target sequence for MGC46496 (NM_174952.1,958-976).
gttcctcggactttcttct

SEQ ID NO: 428807 - DNA, 19 bp, Homo sapiens
  siRNA target sequence for MGC46496 (NM_174952.1,968-986).
ctttcttctcggttcagaa

SEQ ID NO: 428808 - DNA, 19 bp, Homo sapiens
  siRNA target sequence for MGC46496 (NM_174952.1,972-990).
cttctcggttcagaaagaa

SEQ ID NO: 428809 - DNA, 19 bp, Homo sapiens
  siRNA target sequence for MGC46496 (NM_174952.1,1002-1020).
ccctggacctgctgattat

SEQ ID NO: 428810 - DNA, 19 bp, Homo sapiens
  siRNA target sequence for MGC46496 (NM_174952.1,1010-1028).
ctgctgattatcaggaatt

SEQ ID NO: 428811 - DNA, 19 bp, Homo sapiens
  siRNA target sequence for MGC46496 (NM_174952.1,1055-1073).
ctgatgaattacctaactt

SEQ ID NO: 428812 - DNA, 19 bp, Homo sapiens
  siRNA target sequence for MGC46496 (NM_174952.1,1066-1084).
cctaacttgactaacaaat

SEQ ID NO: 428813 - DNA, 19 bp, Homo sapiens
  siRNA target sequence for MGC46496 (NM_174952.1,1095-1113).
cttgtcaagagccaaaaga

SEQ ID NO: 428814 - DNA, 19 bp, Homo sapiens
  siRNA target sequence for MGC46496 (NM_174952.1,1100-1118).
caagagccaaaagaactat

SEQ ID NO: 428815 - DNA, 19 bp, Homo sapiens
  siRNA target sequence for MGC46496 (NM_174952.1,1145-1163).
cgccaggcagctatgatgt

SEQ ID NO: 428816 - DNA, 19 bp, Homo sapiens
  siRNA target sequence for MGC46496 (NM_174952.1,1146-1164).
gccaggcagctatgatgtt

SEQ ID NO: 428817 - DNA, 19 bp, Homo sapiens
  siRNA target sequence for MGC46496 (NM_174952.1,1162-1180).
gttcacaaatcatatgaga

SEQ ID NO: 428818 - DNA, 19 bp, Homo sapiens
  siRNA target sequence for MGC46496 (NM_174952.1,1179-1197).
gatgtcccaagttaagcat

SEQ ID NO: 428819 - DNA, 19 bp, Homo sapiens
  siRNA target sequence for MGC46496 (NM_174952.1,1213-1231).
cgtagtttagtggctaaaa

SEQ ID NO: 428820 - DNA, 19 bp, Homo sapiens
  siRNA target sequence for MGC46496 (NM_174952.1,1262-1280).
ctcggtgcctagaaaaagt

SEQ ID NO: 428821 - DNA, 19 bp, Homo sapiens
  siRNA target sequence for MGC46496 (NM_174952.1,1264-1282).
cggtgcctagaaaaagtga

SEQ ID NO: 428822 - DNA, 19 bp, Homo sapiens
  siRNA target sequence for MGC46496 (NM_174952.1,1331-1349).
gccccatacccttatttgt

SEQ ID NO: 428823 - DNA, 19 bp, Homo sapiens
  siRNA target sequence for MGC46496 (NM_174952.1,1339-1357).
cccttatttgtgaaagcat

SEQ ID NO: 428824 - DNA, 19 bp, Homo sapiens
  siRNA target sequence for MGC46496 (NM_174952.1,1355-1373).
catcaaagcgctttgaaga

SEQ ID NO: 428825 - DNA, 19 bp, Homo sapiens
  siRNA target sequence for C14orf59 (NM_174976.1,391-409).
gcaattacgtccttgtcat

SEQ ID NO: 428826 - DNA, 19 bp, Homo sapiens
  siRNA target sequence for C14orf59 (NM_174976.1,522-540).
cacgaccatcactgtttct

SEQ ID NO: 428827 - DNA, 19 bp, Homo sapiens
  siRNA target sequence for C14orf39 (NM_174978.1,118-136).
gtttggacagacttttgct

SEQ ID NO: 428828 - DNA, 19 bp, Homo sapiens
  siRNA target sequence for C14orf39 (NM_174978.1,123-141).
gacagacttttgctagaat

SEQ ID NO: 428829 - DNA, 19 bp, Homo sapiens
  siRNA target sequence for C14orf39 (NM_174978.1,129-147).
cttttgctagaatttgtct

SEQ ID NO: 428830 - DNA, 19 bp, Homo sapiens
  siRNA target sequence for C14orf39 (NM_174978.1,149-167).
ccagtatgagcaagacata

SEQ ID NO: 428831 - DNA, 19 bp, Homo sapiens
  siRNA target sequence for C14orf39 (NM_174978.1,152-170).
gtatgagcaagacataagt

SEQ ID NO: 428832 - DNA, 19 bp, Homo sapiens
  siRNA target sequence for C14orf39 (NM_174978.1,244-262).
ggatacacgaaactataaa

SEQ ID NO: 428833 - DNA, 19 bp, Homo sapiens
  siRNA target sequence for C14orf39 (NM_174978.1,245-263).
gatacacgaaactataaat

SEQ ID NO: 428834 - DNA, 19 bp, Homo sapiens
  siRNA target sequence for C14orf39 (NM_174978.1,249-267).
cacgaaactataaatgcaa

SEQ ID NO: 428835 - DNA, 19 bp, Homo sapiens
  siRNA target sequence for C14orf39 (NM_174978.1,282-300).
gatcattactgtaaacata

SEQ ID NO: 428836 - DNA, 19 bp, Homo sapiens
  siRNA target sequence for C14orf39 (NM_174978.1,306-324).
gagattaaagacaactgta

SEQ ID NO: 428837 - DNA, 19 bp, Homo sapiens
  siRNA target sequence for C14orf39 (NM_174978.1,329-347).
ctggaagccaacatgtgat

SEQ ID NO: 428838 - DNA, 19 bp, Homo sapiens
  siRNA target sequence for C14orf39 (NM_174978.1,332-350).
gaagccaacatgtgatgtt

SEQ ID NO: 428839 - DNA, 19 bp, Homo sapiens
  siRNA target sequence for C14orf39 (NM_174978.1,335-353).
gccaacatgtgatgttttt

SEQ ID NO: 428840 - DNA, 19 bp, Homo sapiens
  siRNA target sequence for C14orf39 (NM_174978.1,340-358).
catgtgatgtttttcgtaa

SEQ ID NO: 428841 - DNA, 19 bp, Homo sapiens
  siRNA target sequence for C14orf39 (NM_174978.1,374-392).
gcaggaccaatttactgtt

SEQ ID NO: 428842 - DNA, 19 bp, Homo sapiens
  siRNA target sequence for C14orf39 (NM_174978.1,377-395).
ggaccaatttactgtttat

SEQ ID NO: 428843 - DNA, 19 bp, Homo sapiens
  siRNA target sequence for C14orf39 (NM_174978.1,425-443).
gtatcatgattatatatgt

SEQ ID NO: 428844 - DNA, 19 bp, Homo sapiens
  siRNA target sequence for C14orf39 (NM_174978.1,465-483).
cagtaccaactaaaatact

SEQ ID NO: 428845 - DNA, 19 bp, Homo sapiens
  siRNA target sequence for C14orf39 (NM_174978.1,490-508).
cacccttttcacgtgaata

SEQ ID NO: 428846 - DNA, 19 bp, Homo sapiens
  siRNA target sequence for C14orf39 (NM_174978.1,492-510).
cccttttcacgtgaatatt

SEQ ID NO: 428847 - DNA, 19 bp, Homo sapiens
  siRNA target sequence for C14orf39 (NM_174978.1,493-511).
ccttttcacgtgaatatta

SEQ ID NO: 428848 - DNA, 19 bp, Homo sapiens
  siRNA target sequence for C14orf39 (NM_174978.1,499-517).
cacgtgaatattatgagaa

SEQ ID NO: 428849 - DNA, 19 bp, Homo sapiens
  siRNA target sequence for C14orf39 (NM_174978.1,545-563).
cagagtgttggcatgtact

SEQ ID NO: 428850 - DNA, 19 bp, Homo sapiens
  siRNA target sequence for C14orf39 (NM_174978.1,551-569).
gttggcatgtactgaacaa

SEQ ID NO: 428851 - DNA, 19 bp, Homo sapiens
  siRNA target sequence for C14orf39 (NM_174978.1,555-573).
gcatgtactgaacaattaa

SEQ ID NO: 428852 - DNA, 19 bp, Homo sapiens
  siRNA target sequence for C14orf39 (NM_174978.1,615-633).
ccctttccatcacttacta

SEQ ID NO: 428853 - DNA, 19 bp, Homo sapiens
  siRNA target sequence for C14orf39 (NM_174978.1,616-634).
cctttccatcacttactaa

SEQ ID NO: 428854 - DNA, 19 bp, Homo sapiens
  siRNA target sequence for C14orf39 (NM_174978.1,637-655).
ggactttaaacattgttaa

SEQ ID NO: 428855 - DNA, 19 bp, Homo sapiens
  siRNA target sequence for C14orf39 (NM_174978.1,661-679).
gatgtgaaacacaagatat

SEQ ID NO: 428856 - DNA, 19 bp, Homo sapiens
  siRNA target sequence for C14orf39 (NM_174978.1,692-710).
cagcaatcttaccaaaagt

SEQ ID NO: 428857 - DNA, 19 bp, Homo sapiens
  siRNA target sequence for C14orf39 (NM_174978.1,695-713).
caatcttaccaaaagttca

SEQ ID NO: 428858 - DNA, 19 bp, Homo sapiens
  siRNA target sequence for C14orf39 (NM_174978.1,712-730).
catccgaattgaagaaaga

SEQ ID NO: 428859 - DNA, 19 bp, Homo sapiens
  siRNA target sequence for C14orf39 (NM_174978.1,715-733).
ccgaattgaagaaagaagt

SEQ ID NO: 428860 - DNA, 19 bp, Homo sapiens
  siRNA target sequence for C14orf39 (NM_174978.1,770-788).
gcagatatctaggcataat

SEQ ID NO: 428861 - DNA, 19 bp, Homo sapiens
  siRNA target sequence for C14orf39 (NM_174978.1,881-899).
gcatgtacttacattgaat

SEQ ID NO: 428862 - DNA, 19 bp, Homo sapiens
  siRNA target sequence for C14orf39 (NM_174978.1,882-900).
catgtacttacattgaata

SEQ ID NO: 428863 - DNA, 19 bp, Homo sapiens
  siRNA target sequence for C14orf39 (NM_174978.1,904-922).
ctcaaagcagtcaattatt

SEQ ID NO: 428864 - DNA, 19 bp, Homo sapiens
  siRNA target sequence for C14orf39 (NM_174978.1,1083-1101).
gctgtggataaccattcaa

SEQ ID NO: 428865 - DNA, 19 bp, Homo sapiens
  siRNA target sequence for C14orf39 (NM_174978.1,1118-1136).
gactatcacaagttcacaa

SEQ ID NO: 428866 - DNA, 19 bp, Homo sapiens
  siRNA target sequence for C14orf39 (NM_174978.1,1120-1138).
ctatcacaagttcacaaaa

SEQ ID NO: 428867 - DNA, 19 bp, Homo sapiens
  siRNA target sequence for C14orf39 (NM_174978.1,1173-1191).
caatcaaattccaatcagt

SEQ ID NO: 428868 - DNA, 19 bp, Homo sapiens
  siRNA target sequence for C14orf39 (NM_174978.1,1193-1211).
gtcggaaaaaggggataaa

SEQ ID NO: 428869 - DNA, 19 bp, Homo sapiens
  siRNA target sequence for C14orf39 (NM_174978.1,1224-1242).
ggagataaagggacagtaa

SEQ ID NO: 428870 - DNA, 19 bp, Homo sapiens
  siRNA target sequence for C14orf39 (NM_174978.1,1233-1251).
gggacagtaagacaagtaa

SEQ ID NO: 428871 - DNA, 19 bp, Homo sapiens
  siRNA target sequence for C14orf39 (NM_174978.1,1239-1257).
gtaagacaagtaagagaat

SEQ ID NO: 428872 - DNA, 19 bp, Homo sapiens
  siRNA target sequence for C14orf39 (NM_174978.1,1264-1282).
gtacttcacaagctatata

SEQ ID NO: 428873 - DNA, 19 bp, Homo sapiens
  siRNA target sequence for C14orf39 (NM_174978.1,1353-1371).
cgaacgtctgaaattccta

SEQ ID NO: 428874 - DNA, 19 bp, Homo sapiens
  siRNA target sequence for C14orf39 (NM_174978.1,1354-1372).
gaacgtctgaaattcctat

SEQ ID NO: 428875 - DNA, 19 bp, Homo sapiens
  siRNA target sequence for C14orf39 (NM_174978.1,1357-1375).
cgtctgaaattcctatatt

SEQ ID NO: 428876 - DNA, 19 bp, Homo sapiens
  siRNA target sequence for C14orf39 (NM_174978.1,1358-1376).
gtctgaaattcctatattt

SEQ ID NO: 428877 - DNA, 19 bp, Homo sapiens
  siRNA target sequence for C14orf39 (NM_174978.1,1405-1423).
ctgagtcattggagaaaat

SEQ ID NO: 428878 - DNA, 19 bp, Homo sapiens
  siRNA target sequence for C14orf39 (NM_174978.1,1443-1461).
ccgttcgaaattaacagaa

SEQ ID NO: 428879 - DNA, 19 bp, Homo sapiens
  siRNA target sequence for C14orf39 (NM_174978.1,1444-1462).
cgttcgaaattaacagaaa

SEQ ID NO: 428880 - DNA, 19 bp, Homo sapiens
  siRNA target sequence for C14orf39 (NM_174978.1,1518-1536).
cttatgagttatacttcta

SEQ ID NO: 428881 - DNA, 19 bp, Homo sapiens
  siRNA target sequence for C14orf39 (NM_174978.1,1523-1541).
gagttatacttctagatca

SEQ ID NO: 428882 - DNA, 19 bp, Homo sapiens
  siRNA target sequence for C14orf39 (NM_174978.1,1588-1606).
catcagatcagtttaatga

SEQ ID NO: 428883 - DNA, 19 bp, Homo sapiens
  siRNA target sequence for C14orf39 (NM_174978.1,1593-1611).
gatcagtttaatgaacatt

SEQ ID NO: 428884 - DNA, 19 bp, Homo sapiens
  siRNA target sequence for C14orf39 (NM_174978.1,1713-1731).
gacacttcaactcatacat

SEQ ID NO: 428885 - DNA, 19 bp, Homo sapiens
  siRNA target sequence for C14orf39 (NM_174978.1,1715-1733).
cacttcaactcatacattt

SEQ ID NO: 428886 - DNA, 19 bp, Homo sapiens
  siRNA target sequence for C14orf39 (NM_174978.1,1768-1786).
catttggacagggtcaaaa

SEQ ID NO: 428887 - DNA, 19 bp, Homo sapiens
  siRNA target sequence for C14orf65 (NM_174979.2,579-597).
gaggcacgtcccttttcgt

SEQ ID NO: 428888 - DNA, 19 bp, Homo sapiens
  siRNA target sequence for C14orf65 (NM_174979.2,585-603).
cgtcccttttcgtggttta

SEQ ID NO: 428889 - DNA, 19 bp, Homo sapiens
  siRNA target sequence for C14orf65 (NM_174979.2,588-606).
cccttttcgtggtttacat

SEQ ID NO: 428890 - DNA, 19 bp, Homo sapiens
  siRNA target sequence for MGC20700 (NM_174983.2,971-989).
gtgggcatactgtacatga

SEQ ID NO: 428891 - DNA, 19 bp, Homo sapiens
  siRNA target sequence for MGC20700 (NM_174983.2,1443-1461).
cctgcgtgagcttttacca

SEQ ID NO: 428892 - DNA, 19 bp, Homo sapiens
  siRNA target sequence for K6IRS4 (NM_175053.2,53-71).
gtcggcaactgaacatcaa

SEQ ID NO: 428893 - DNA, 19 bp, Homo sapiens
  siRNA target sequence for K6IRS4 (NM_175053.2,55-73).
cggcaactgaacatcaagt

SEQ ID NO: 428894 - DNA, 19 bp, Homo sapiens
  siRNA target sequence for K6IRS4 (NM_175053.2,208-226).
ggagggaatcggcgtattt

SEQ ID NO: 428895 - DNA, 19 bp, Homo sapiens
  siRNA target sequence for K6IRS4 (NM_175053.2,211-229).
gggaatcggcgtatttctt

SEQ ID NO: 428896 - DNA, 19 bp, Homo sapiens
  siRNA target sequence for K6IRS4 (NM_175053.2,212-230).
ggaatcggcgtatttcttt

SEQ ID NO: 428897 - DNA, 19 bp, Homo sapiens
  siRNA target sequence for K6IRS4 (NM_175053.2,218-236).
ggcgtatttctttcaatgt

SEQ ID NO: 428898 - DNA, 19 bp, Homo sapiens
  siRNA target sequence for K6IRS4 (NM_175053.2,345-363).
ggggcctgcatgtttgtct

SEQ ID NO: 428899 - DNA, 19 bp, Homo sapiens
  siRNA target sequence for K6IRS4 (NM_175053.2,982-1000).
gctgaggtccgcatgcatt

SEQ ID NO: 428900 - DNA, 19 bp, Homo sapiens
  siRNA target sequence for K6IRS4 (NM_175053.2,983-1001).
ctgaggtccgcatgcatta

SEQ ID NO: 428901 - DNA, 19 bp, Homo sapiens
  siRNA target sequence for HIST4H4 (NM_175054.2,214-232).
ggggagtcctcaaagtctt

SEQ ID NO: 428902 - DNA, 19 bp, Homo sapiens
  siRNA target sequence for LOC131368 (NM_175056.1,140-158).
ggttttgcaatggaacaaa

SEQ ID NO: 428903 - DNA, 19 bp, Homo sapiens
  siRNA target sequence for LOC131368 (NM_175056.1,147-165).
caatggaacaaatatggtt

SEQ ID NO: 428904 - DNA, 19 bp, Homo sapiens
  siRNA target sequence for LOC131368 (NM_175056.1,167-185).
ctgctgcttctaacaatta

SEQ ID NO: 428905 - DNA, 19 bp, Homo sapiens
  siRNA target sequence for LOC131368 (NM_175056.1,195-213).
cggggtctgctcagttcaa

SEQ ID NO: 428906 - DNA, 19 bp, Homo sapiens
  siRNA target sequence for LOC131368 (NM_175056.1,206-224).
cagttcaacggctacaact

SEQ ID NO: 428907 - DNA, 19 bp, Homo sapiens
  siRNA target sequence for LOC131368 (NM_175056.1,230-248).
gccaacctccacagtagat

SEQ ID NO: 428908 - DNA, 19 bp, Homo sapiens
  siRNA target sequence for LOC131368 (NM_175056.1,231-249).
ccaacctccacagtagatt

SEQ ID NO: 428909 - DNA, 19 bp, Homo sapiens
  siRNA target sequence for LOC131368 (NM_175056.1,232-250).
caacctccacagtagattt

SEQ ID NO: 428910 - DNA, 19 bp, Homo sapiens
  siRNA target sequence for LOC131368 (NM_175056.1,281-299).
ggagtgcaggctattacga

SEQ ID NO: 428911 - DNA, 19 bp, Homo sapiens
  siRNA target sequence for LOC131368 (NM_175056.1,282-300).
gagtgcaggctattacgat

SEQ ID NO: 428912 - DNA, 19 bp, Homo sapiens
  siRNA target sequence for LOC131368 (NM_175056.1,287-305).
caggctattacgatgaaga

SEQ ID NO: 428913 - DNA, 19 bp, Homo sapiens
  siRNA target sequence for LOC131368 (NM_175056.1,289-307).
ggctattacgatgaagatt

SEQ ID NO: 428914 - DNA, 19 bp, Homo sapiens
  siRNA target sequence for LOC131368 (NM_175056.1,290-308).
gctattacgatgaagatta

SEQ ID NO: 428915 - DNA, 19 bp, Homo sapiens
  siRNA target sequence for LOC131368 (NM_175056.1,291-309).
ctattacgatgaagattaa

SEQ ID NO: 428916 - DNA, 19 bp, Homo sapiens
  siRNA target sequence for LOC131368 (NM_175056.1,330-348).
cgggttattcggaaacaga

SEQ ID NO: 428917 - DNA, 19 bp, Homo sapiens
  siRNA target sequence for LOC131368 (NM_175056.1,347-365).
gatctggcactgaatggaa

SEQ ID NO: 428918 - DNA, 19 bp, Homo sapiens
  siRNA target sequence for LOC131368 (NM_175056.1,384-402).
gcagagggttcatcaataa

SEQ ID NO: 428919 - DNA, 19 bp, Homo sapiens
  siRNA target sequence for LOC131368 (NM_175056.1,389-407).
gggttcatcaataacaaca

SEQ ID NO: 428920 - DNA, 19 bp, Homo sapiens
  siRNA target sequence for LOC131368 (NM_175056.1,472-490).
ggtggtatccacaattcct

SEQ ID NO: 428921 - DNA, 19 bp, Homo sapiens
  siRNA target sequence for LOC131368 (NM_175056.1,491-509).
ggagtcagtgcttatggaa

SEQ ID NO: 428922 - DNA, 19 bp, Homo sapiens
  siRNA target sequence for LOC131368 (NM_175056.1,492-510).
gagtcagtgcttatggaaa

SEQ ID NO: 428923 - DNA, 19 bp, Homo sapiens
  siRNA target sequence for LOC131368 (NM_175056.1,558-576).
cagacccaccaacaatcat

SEQ ID NO: 428924 - DNA, 19 bp, Homo sapiens
  siRNA target sequence for LOC131368 (NM_175056.1,560-578).
gacccaccaacaatcatca

SEQ ID NO: 428925 - DNA, 19 bp, Homo sapiens
  siRNA target sequence for LOC131368 (NM_175056.1,587-605).
cctgggcttctttacaaat

SEQ ID NO: 428926 - DNA, 19 bp, Homo sapiens
  siRNA target sequence for LOC131368 (NM_175056.1,592-610).
gcttctttacaaatttagt

SEQ ID NO: 428927 - DNA, 19 bp, Homo sapiens
  siRNA target sequence for LOC131368 (NM_175056.1,612-630).
gtagttatccattggaata

SEQ ID NO: 428928 - DNA, 19 bp, Homo sapiens
  siRNA target sequence for LOC131368 (NM_175056.1,621-639).
cattggaatacctggttaa

SEQ ID NO: 428929 - DNA, 19 bp, Homo sapiens
  siRNA target sequence for LOC131368 (NM_175056.1,626-644).
gaatacctggttaataata

SEQ ID NO: 428930 - DNA, 19 bp, Homo sapiens
  siRNA target sequence for LOC131368 (NM_175056.1,658-676).
gtcctcagcggctatttct

SEQ ID NO: 428931 - DNA, 19 bp, Homo sapiens
  siRNA target sequence for LOC131368 (NM_175056.1,660-678).
cctcagcggctatttctgt

SEQ ID NO: 428932 - DNA, 19 bp, Homo sapiens
  siRNA target sequence for LOC131368 (NM_175056.1,715-733).
cctgctcctttataacgat

SEQ ID NO: 428933 - DNA, 19 bp, Homo sapiens
  siRNA target sequence for LOC131368 (NM_175056.1,716-734).
ctgctcctttataacgatt

SEQ ID NO: 428934 - DNA, 19 bp, Homo sapiens
  siRNA target sequence for LOC131368 (NM_175056.1,719-737).
ctcctttataacgattcaa

SEQ ID NO: 428935 - DNA, 19 bp, Homo sapiens
  siRNA target sequence for LOC131368 (NM_175056.1,751-769).
gttaattatccccagtata

SEQ ID NO: 428936 - DNA, 19 bp, Homo sapiens
  siRNA target sequence for LOC131368 (NM_175056.1,760-778).
ccccagtataggattacct

SEQ ID NO: 428937 - DNA, 19 bp, Homo sapiens
  siRNA target sequence for LOC131368 (NM_175056.1,761-779).
cccagtataggattacctt

SEQ ID NO: 428938 - DNA, 19 bp, Homo sapiens
  siRNA target sequence for LOC131368 (NM_175056.1,762-780).
ccagtataggattaccttt

SEQ ID NO: 428939 - DNA, 19 bp, Homo sapiens
  siRNA target sequence for LOC131368 (NM_175056.1,770-788).
ggattacctttgaaaacca

SEQ ID NO: 428940 - DNA, 19 bp, Homo sapiens
  siRNA target sequence for LOC131368 (NM_175056.1,800-818).
gctgtccaagccactaatt

SEQ ID NO: 428941 - DNA, 19 bp, Homo sapiens
  siRNA target sequence for LOC131368 (NM_175056.1,805-823).
ccaagccactaatttggat

SEQ ID NO: 428942 - DNA, 19 bp, Homo sapiens
  siRNA target sequence for LOC131368 (NM_175056.1,875-893).
ccaaatgatgacattcgat

SEQ ID NO: 428943 - DNA, 19 bp, Homo sapiens
  siRNA target sequence for LOC131368 (NM_175056.1,876-894).
caaatgatgacattcgata

SEQ ID NO: 428944 - DNA, 19 bp, Homo sapiens
  siRNA target sequence for LOC131368 (NM_175056.1,884-902).
gacattcgatatgatcttt

SEQ ID NO: 428945 - DNA, 19 bp, Homo sapiens
  siRNA target sequence for LOC131368 (NM_175056.1,890-908).
cgatatgatcttttcctta

SEQ ID NO: 428946 - DNA, 19 bp, Homo sapiens
  siRNA target sequence for LOC131368 (NM_175056.1,924-942).
ctcagaccaccgtcattga

SEQ ID NO: 428947 - DNA, 19 bp, Homo sapiens
  siRNA target sequence for LOC131368 (NM_175056.1,926-944).
cagaccaccgtcattgaga

SEQ ID NO: 428948 - DNA, 19 bp, Homo sapiens
  siRNA target sequence for LOC131368 (NM_175056.1,928-946).
gaccaccgtcattgagaat

SEQ ID NO: 428949 - DNA, 19 bp, Homo sapiens
  siRNA target sequence for LOC131368 (NM_175056.1,1255-1273).
catcaccagcgcactgata

SEQ ID NO: 428950 - DNA, 19 bp, Homo sapiens
  siRNA target sequence for LOC131368 (NM_175056.1,1258-1276).
caccagcgcactgatatca

SEQ ID NO: 428951 - DNA, 19 bp, Homo sapiens
  siRNA target sequence for LOC131368 (NM_175056.1,1289-1307).
ctgggagttacgagctttt

SEQ ID NO: 428952 - DNA, 19 bp, Homo sapiens
  siRNA target sequence for LOC131368 (NM_175056.1,1291-1309).
gggagttacgagcttttct

SEQ ID NO: 428953 - DNA, 19 bp, Homo sapiens
  siRNA target sequence for LOC131368 (NM_175056.1,1293-1311).
gagttacgagcttttctct

SEQ ID NO: 428954 - DNA, 19 bp, Homo sapiens
  siRNA target sequence for LOC131368 (NM_175056.1,1346-1364).
ggacccacaagtttagtgt

SEQ ID NO: 428955 - DNA, 19 bp, Homo sapiens
  siRNA target sequence for LOC131368 (NM_175056.1,1347-1365).
gacccacaagtttagtgtt

SEQ ID NO: 428956 - DNA, 19 bp, Homo sapiens
  siRNA target sequence for LOC131368 (NM_175056.1,1351-1369).
cacaagtttagtgttgaat

SEQ ID NO: 428957 - DNA, 19 bp, Homo sapiens
  siRNA target sequence for LOC144100 (NM_175058.2,60-78).
cgggcagagaagaatggaa

SEQ ID NO: 428958 - DNA, 19 bp, Homo sapiens
  siRNA target sequence for LOC144100 (NM_175058.2,363-381).
ctgccaagtgactacaagt

SEQ ID NO: 428959 - DNA, 19 bp, Homo sapiens
  siRNA target sequence for LOC144100 (NM_175058.2,365-383).
gccaagtgactacaagtat

SEQ ID NO: 428960 - DNA, 19 bp, Homo sapiens
  siRNA target sequence for LOC144100 (NM_175058.2,789-807).
ccctccatgggttacatga

SEQ ID NO: 428961 - DNA, 19 bp, Homo sapiens
  siRNA target sequence for LOC144100 (NM_175058.2,815-833).
cgtcagcgctcccagttta

SEQ ID NO: 428962 - DNA, 19 bp, Homo sapiens
  siRNA target sequence for LOC144100 (NM_175058.2,825-843).
cccagtttacatggaaaat

SEQ ID NO: 428963 - DNA, 19 bp, Homo sapiens
  siRNA target sequence for LOC144100 (NM_175058.2,958-976).
gcgacactgacgtcaaact

SEQ ID NO: 428964 - DNA, 19 bp, Homo sapiens
  siRNA target sequence for LOC144100 (NM_175058.2,1193-1211).
gtccactgagatggaaaat
